United States Patent Application Publication US 2008/0113351 A1 - sequence listing, part 25

SEQ ID NO: 607751 - DNA, 19 bp, Mus musculus
  siRNA target sequence for Impdh2 (NM_011830.2,1144-1162).
ggtcatattgccaaagctt

SEQ ID NO: 607752 - DNA, 19 bp, Mus musculus
  siRNA target sequence for Gba2 (NM_172692.1,342-360).
gaaccaagctactgcaatt

SEQ ID NO: 607753 - DNA, 19 bp, Mus musculus
  siRNA target sequence for Gba2 (NM_172692.1,346-364).
caagctactgcaattcaga

SEQ ID NO: 607754 - DNA, 19 bp, Mus musculus
  siRNA target sequence for Gba2 (NM_172692.1,464-482).
gaagaggagaccttttcaa

SEQ ID NO: 607755 - DNA, 19 bp, Mus musculus
  siRNA target sequence for Gba2 (NM_172692.1,474-492).
ccttttcaagctaacaaca

SEQ ID NO: 607756 - DNA, 19 bp, Mus musculus
  siRNA target sequence for Gba2 (NM_172692.1,475-493).
cttttcaagctaacaacat

SEQ ID NO: 607757 - DNA, 19 bp, Mus musculus
  siRNA target sequence for Gba2 (NM_172692.1,488-506).
caacatctctctcagtaat

SEQ ID NO: 607758 - DNA, 19 bp, Mus musculus
  siRNA target sequence for Gba2 (NM_172692.1,494-512).
ctctctcagtaatttggta

SEQ ID NO: 607759 - DNA, 19 bp, Mus musculus
  siRNA target sequence for Gba2 (NM_172692.1,528-546).
ggcttgaggtacttgaagt

SEQ ID NO: 607760 - DNA, 19 bp, Mus musculus
  siRNA target sequence for Gba2 (NM_172692.1,590-608).
cgacatgctcaattctcta

SEQ ID NO: 607761 - DNA, 19 bp, Mus musculus
  siRNA target sequence for Gba2 (NM_172692.1,612-630).
ctgagacagatctatggtt

SEQ ID NO: 607762 - DNA, 19 bp, Mus musculus
  siRNA target sequence for Gba2 (NM_172692.1,716-734).
ccagcaccagacagtcatt

SEQ ID NO: 607763 - DNA, 19 bp, Mus musculus
  siRNA target sequence for Gba2 (NM_172692.1,729-747).
gtcattgcagaccaattta

SEQ ID NO: 607764 - DNA, 19 bp, Mus musculus
  siRNA target sequence for Gba2 (NM_172692.1,735-753).
gcagaccaatttatagtat

SEQ ID NO: 607765 - DNA, 19 bp, Mus musculus
  siRNA target sequence for Gba2 (NM_172692.1,794-812).
gtccttggagcttccaaat

SEQ ID NO: 607766 - DNA, 19 bp, Mus musculus
  siRNA target sequence for Gba2 (NM_172692.1,833-851).
gggcctgtgtggttacttt

SEQ ID NO: 607767 - DNA, 19 bp, Mus musculus
  siRNA target sequence for Gba2 (NM_172692.1,877-895).
gagcctggacggtctatca

SEQ ID NO: 607768 - DNA, 19 bp, Mus musculus
  siRNA target sequence for Gba2 (NM_172692.1,928-946).
gccaggtcacacctatctt

SEQ ID NO: 607769 - DNA, 19 bp, Mus musculus
  siRNA target sequence for Gba2 (NM_172692.1,940-958).
ctatcttgcctcatgacta

SEQ ID NO: 607770 - DNA, 19 bp, Mus musculus
  siRNA target sequence for Gba2 (NM_172692.1,975-993).
cctgtaggagtctttgtgt

SEQ ID NO: 607771 - DNA, 19 bp, Mus musculus
  siRNA target sequence for Gba2 (NM_172692.1,1408-1426).
cttgggatatgcctaagat

SEQ ID NO: 607772 - DNA, 19 bp, Mus musculus
  siRNA target sequence for Gba2 (NM_172692.1,1411-1429).
gggatatgcctaagatcat

SEQ ID NO: 607773 - DNA, 19 bp, Mus musculus
  siRNA target sequence for Gba2 (NM_172692.1,1413-1431).
gatatgcctaagatcatgt

SEQ ID NO: 607774 - DNA, 19 bp, Mus musculus
  siRNA target sequence for Gba2 (NM_172692.1,1424-1442).
gatcatgtttggagctaaa

SEQ ID NO: 607775 - DNA, 19 bp, Mus musculus
  siRNA target sequence for Gba2 (NM_172692.1,1451-1469).
ccactacaggcggtataca

SEQ ID NO: 607776 - DNA, 19 bp, Mus musculus
  siRNA target sequence for Gba2 (NM_172692.1,1460-1478).
gcggtatacacggttcttt

SEQ ID NO: 607777 - DNA, 19 bp, Mus musculus
  siRNA target sequence for Gba2 (NM_172692.1,1536-1554).
gactgggaggacagaatct

SEQ ID NO: 607778 - DNA, 19 bp, Mus musculus
  siRNA target sequence for Gba2 (NM_172692.1,1592-1610).
gcctgcctggtacaaatct

SEQ ID NO: 607779 - DNA, 19 bp, Mus musculus
  siRNA target sequence for Gba2 (NM_172692.1,1604-1622).
caaatctgcactgttcaat

SEQ ID NO: 607780 - DNA, 19 bp, Mus musculus
  siRNA target sequence for Gba2 (NM_172692.1,1738-1756).
ggcgatttggctatcttga

SEQ ID NO: 607781 - DNA, 19 bp, Mus musculus
  siRNA target sequence for Gba2 (NM_172692.1,1739-1757).
gcgatttggctatcttgaa

SEQ ID NO: 607782 - DNA, 19 bp, Mus musculus
  siRNA target sequence for Gba2 (NM_172692.1,1772-1790).
catgtacaacacatacgat

SEQ ID NO: 607783 - DNA, 19 bp, Mus musculus
  siRNA target sequence for Gba2 (NM_172692.1,1783-1801).
catacgatgtccactttta

SEQ ID NO: 607784 - DNA, 19 bp, Mus musculus
  siRNA target sequence for Gba2 (NM_172692.1,1986-2004).
ctccgggtcaacgcatatt

SEQ ID NO: 607785 - DNA, 19 bp, Mus musculus
  siRNA target sequence for Gba2 (NM_172692.1,1989-2007).
cgggtcaacgcatatttga

SEQ ID NO: 607786 - DNA, 19 bp, Mus musculus
  siRNA target sequence for Gba2 (NM_172692.1,1990-2008).
gggtcaacgcatatttgat

SEQ ID NO: 607787 - DNA, 19 bp, Mus musculus
  siRNA target sequence for Gba2 (NM_172692.1,1991-2009).
ggtcaacgcatatttgatt

SEQ ID NO: 607788 - DNA, 19 bp, Mus musculus
  siRNA target sequence for Gba2 (NM_172692.1,1997-2015).
cgcatatttgattcatgat

SEQ ID NO: 607789 - DNA, 19 bp, Mus musculus
  siRNA target sequence for Gba2 (NM_172692.1,2033-2051).
cctgaacctgaagtttgta

SEQ ID NO: 607790 - DNA, 19 bp, Mus musculus
  siRNA target sequence for Gba2 (NM_172692.1,2039-2057).
cctgaagtttgtattgcaa

SEQ ID NO: 607791 - DNA, 19 bp, Mus musculus
  siRNA target sequence for Gba2 (NM_172692.1,2055-2073).
caaatttatcgggactatt

SEQ ID NO: 607792 - DNA, 19 bp, Mus musculus
  siRNA target sequence for Gba2 (NM_172692.1,2127-2145).
gtgatggagtccgaaatga

SEQ ID NO: 607793 - DNA, 19 bp, Mus musculus
  siRNA target sequence for Gba2 (NM_172692.1,2132-2150).
ggagtccgaaatgaagttt

SEQ ID NO: 607794 - DNA, 19 bp, Mus musculus
  siRNA target sequence for Gba2 (NM_172692.1,2160-2178).
caagatggactcattgaga

SEQ ID NO: 607795 - DNA, 19 bp, Mus musculus
  siRNA target sequence for Gba2 (NM_172692.1,2189-2207).
cgcagaccagacctatgat

SEQ ID NO: 607796 - DNA, 19 bp, Mus musculus
  siRNA target sequence for Gba2 (NM_172692.1,2335-2353).
gccgaggccgagaagctta

SEQ ID NO: 607797 - DNA, 19 bp, Mus musculus
  siRNA target sequence for Gba2 (NM_172692.1,2336-2354).
ccgaggccgagaagcttat

SEQ ID NO: 607798 - DNA, 19 bp, Mus musculus
  siRNA target sequence for Gba2 (NM_172692.1,2338-2356).
gaggccgagaagcttatga

SEQ ID NO: 607799 - DNA, 19 bp, Mus musculus
  siRNA target sequence for Gba2 (NM_172692.1,2409-2427).
cagtctcggagcatcatgt

SEQ ID NO: 607800 - DNA, 19 bp, Mus musculus
  siRNA target sequence for Gba2 (NM_172692.1,2715-2733).
ggctgttaccgcactgtat

SEQ ID NO: 607801 - DNA, 19 bp, Mus musculus
  siRNA target sequence for 2210409H23Rik (NM_175380.3,268-286).
gacagacataatcaacaat

SEQ ID NO: 607802 - DNA, 19 bp, Mus musculus
  siRNA target sequence for 2210409H23Rik (NM_175380.3,287-305).
gaccacgaaaacgtgaaat

SEQ ID NO: 607803 - DNA, 19 bp, Mus musculus
  siRNA target sequence for 2210409H23Rik (NM_175380.3,289-307).
ccacgaaaacgtgaaatat

SEQ ID NO: 607804 - DNA, 19 bp, Mus musculus
  siRNA target sequence for Gpd1 (NM_010271.2,163-181).
ctaactgagatcatcaaca

SEQ ID NO: 607805 - DNA, 19 bp, Mus musculus
  siRNA target sequence for Gpd1 (NM_010271.2,182-200).
ctcagcacgagaatgttaa

SEQ ID NO: 607806 - DNA, 19 bp, Mus musculus
  siRNA target sequence for Gpd1 (NM_010271.2,184-202).
cagcacgagaatgttaaat

SEQ ID NO: 607807 - DNA, 19 bp, Mus musculus
  siRNA target sequence for Gpd1 (NM_010271.2,269-287).
gcgctgacatcctggtttt

SEQ ID NO: 607808 - DNA, 19 bp, Mus musculus
  siRNA target sequence for Gpd1 (NM_010271.2,291-309).
ggtaccccatcagttcatt

SEQ ID NO: 607809 - DNA, 19 bp, Mus musculus
  siRNA target sequence for Gpd1 (NM_010271.2,336-354).
ccacttgaaggccaatact

SEQ ID NO: 607810 - DNA, 19 bp, Mus musculus
  siRNA target sequence for Gpd1 (NM_010271.2,337-355).
cacttgaaggccaatacta

SEQ ID NO: 607811 - DNA, 19 bp, Mus musculus
  siRNA target sequence for Gpd1 (NM_010271.2,396-414).
cgggctgaagctcatttct

SEQ ID NO: 607812 - DNA, 19 bp, Mus musculus
  siRNA target sequence for Gpd1 (NM_010271.2,398-416).
ggctgaagctcatttctga

SEQ ID NO: 607813 - DNA, 19 bp, Mus musculus
  siRNA target sequence for Gpd1 (NM_010271.2,614-632).
gtggggccttgaagaatat

SEQ ID NO: 607814 - DNA, 19 bp, Mus musculus
  siRNA target sequence for Gpd1 (NM_010271.2,617-635).
gggccttgaagaatatagt

SEQ ID NO: 607815 - DNA, 19 bp, Mus musculus
  siRNA target sequence for Gpd1 (NM_010271.2,1012-1030).
cagccagtgggcgaattca

SEQ ID NO: 607816 - DNA, 19 bp, Mus musculus
  siRNA target sequence for Cbr1 (NM_007620.1,155-173).
ggtgaccggtgctaacaaa

SEQ ID NO: 607817 - DNA, 19 bp, Mus musculus
  siRNA target sequence for Cbr1 (NM_007620.1,160-178).
ccggtgctaacaaaggaat

SEQ ID NO: 607818 - DNA, 19 bp, Mus musculus
  siRNA target sequence for Spr (NM_011467.1,208-226).
cgatgctgcggcaactgaa

SEQ ID NO: 607819 - DNA, 19 bp, Mus musculus
  siRNA target sequence for Spr (NM_011467.1,710-728).
ctccaaggacccagagtta

SEQ ID NO: 607820 - DNA, 19 bp, Mus musculus
  siRNA target sequence for Spr (NM_011467.1,835-853).
cccatgtggacttctatga

SEQ ID NO: 607821 - DNA, 19 bp, Mus musculus
  siRNA target sequence for Ugdh (NM_009466.2,230-248).
gttgagattaagaagatct

SEQ ID NO: 607822 - DNA, 19 bp, Mus musculus
  siRNA target sequence for Ugdh (NM_009466.2,337-355).
caacgaggcaaggatcaat

SEQ ID NO: 607823 - DNA, 19 bp, Mus musculus
  siRNA target sequence for Ugdh (NM_009466.2,388-406).
gcctggattaaaagaagta

SEQ ID NO: 607824 - DNA, 19 bp, Mus musculus
  siRNA target sequence for Ugdh (NM_009466.2,409-427).
cgaatcctgtcgaggaaaa

SEQ ID NO: 607825 - DNA, 19 bp, Mus musculus
  siRNA target sequence for Ugdh (NM_009466.2,410-428).
gaatcctgtcgaggaaaaa

SEQ ID NO: 607826 - DNA, 19 bp, Mus musculus
  siRNA target sequence for Ugdh (NM_009466.2,415-433).
ctgtcgaggaaaaaaccta

SEQ ID NO: 607827 - DNA, 19 bp, Mus musculus
  siRNA target sequence for Ugdh (NM_009466.2,417-435).
gtcgaggaaaaaacctatt

SEQ ID NO: 607828 - DNA, 19 bp, Mus musculus
  siRNA target sequence for Ugdh (NM_009466.2,465-483).
gagaagccgatctagtatt

SEQ ID NO: 607829 - DNA, 19 bp, Mus musculus
  siRNA target sequence for Ugdh (NM_009466.2,467-485).
gaagccgatctagtattta

SEQ ID NO: 607830 - DNA, 19 bp, Mus musculus
  siRNA target sequence for Ugdh (NM_009466.2,470-488).
gccgatctagtatttattt

SEQ ID NO: 607831 - DNA, 19 bp, Mus musculus
  siRNA target sequence for Ugdh (NM_009466.2,472-490).
cgatctagtatttatttct

SEQ ID NO: 607832 - DNA, 19 bp, Mus musculus
  siRNA target sequence for Ugdh (NM_009466.2,533-551).
gcagcagacctgaagtata

SEQ ID NO: 607833 - DNA, 19 bp, Mus musculus
  siRNA target sequence for Ugdh (NM_009466.2,537-555).
cagacctgaagtatatcga

SEQ ID NO: 607834 - DNA, 19 bp, Mus musculus
  siRNA target sequence for Ugdh (NM_009466.2,569-587).
cgcattgtgcagaactcaa

SEQ ID NO: 607835 - DNA, 19 bp, Mus musculus
  siRNA target sequence for Ugdh (NM_009466.2,580-598).
gaactcaaatgggtacaaa

SEQ ID NO: 607836 - DNA, 19 bp, Mus musculus
  siRNA target sequence for Ugdh (NM_009466.2,583-601).
ctcaaatgggtacaaaatt

SEQ ID NO: 607837 - DNA, 19 bp, Mus musculus
  siRNA target sequence for Ugdh (NM_009466.2,585-603).
caaatgggtacaaaattgt

SEQ ID NO: 607838 - DNA, 19 bp, Mus musculus
  siRNA target sequence for Ugdh (NM_009466.2,761-779).
ctgattggaggggatgaaa

SEQ ID NO: 607839 - DNA, 19 bp, Mus musculus
  siRNA target sequence for Ugdh (NM_009466.2,763-781).
gattggaggggatgaaact

SEQ ID NO: 607840 - DNA, 19 bp, Mus musculus
  siRNA target sequence for Ugdh (NM_009466.2,867-885).
ggtcctcggagctttccaa

SEQ ID NO: 607841 - DNA, 19 bp, Mus musculus
  siRNA target sequence for Ugdh (NM_009466.2,886-904).
gctggcagccaatgcattt

SEQ ID NO: 607842 - DNA, 19 bp, Mus musculus
  siRNA target sequence for Ugdh (NM_009466.2,991-1009).
cgggatggaccaaagaatt

SEQ ID NO: 607843 - DNA, 19 bp, Mus musculus
  siRNA target sequence for Ugdh (NM_009466.2,1005-1023).
gaattgggaataagtttct

SEQ ID NO: 607844 - DNA, 19 bp, Mus musculus
  siRNA target sequence for Ugdh (NM_009466.2,1070-1088).
ctgaatttggtttatctct

SEQ ID NO: 607845 - DNA, 19 bp, Mus musculus
  siRNA target sequence for Ugdh (NM_009466.2,1129-1147).
gcaggtcatagacatgaat

SEQ ID NO: 607846 - DNA, 19 bp, Mus musculus
  siRNA target sequence for Ugdh (NM_009466.2,1165-1183).
gtttgcatcacggatcata

SEQ ID NO: 607847 - DNA, 19 bp, Mus musculus
  siRNA target sequence for Ugdh (NM_009466.2,1169-1187).
gcatcacggatcatagata

SEQ ID NO: 607848 - DNA, 19 bp, Mus musculus
  siRNA target sequence for Ugdh (NM_009466.2,1180-1198).
catagatagcctgtttaat

SEQ ID NO: 607849 - DNA, 19 bp, Mus musculus
  siRNA target sequence for Ugdh (NM_009466.2,1200-1218).
cagtgaccgataagaagat

SEQ ID NO: 607850 - DNA, 19 bp, Mus musculus
  siRNA target sequence for Ugdh (NM_009466.2,1206-1224).
ccgataagaagatagctat

SEQ ID NO: 607851 - DNA, 19 bp, Mus musculus
  siRNA target sequence for Ugdh (NM_009466.2,1220-1238).
gctatcttggggtttgcat

SEQ ID NO: 607852 - DNA, 19 bp, Mus musculus
  siRNA target sequence for Ugdh (NM_009466.2,1221-1239).
ctatcttggggtttgcatt

SEQ ID NO: 607853 - DNA, 19 bp, Mus musculus
  siRNA target sequence for Ugdh (NM_009466.2,1230-1248).
ggtttgcattcaaaaagga

SEQ ID NO: 607854 - DNA, 19 bp, Mus musculus
  siRNA target sequence for Ugdh (NM_009466.2,1231-1249).
gtttgcattcaaaaaggat

SEQ ID NO: 607855 - DNA, 19 bp, Mus musculus
  siRNA target sequence for Ugdh (NM_009466.2,1263-1281).
gagaatcctccagtatcta

SEQ ID NO: 607856 - DNA, 19 bp, Mus musculus
  siRNA target sequence for Ugdh (NM_009466.2,1265-1283).
gaatcctccagtatctaca

SEQ ID NO: 607857 - DNA, 19 bp, Mus musculus
  siRNA target sequence for Ugdh (NM_009466.2,1272-1290).
ccagtatctacattagcaa

SEQ ID NO: 607858 - DNA, 19 bp, Mus musculus
  siRNA target sequence for Ugdh (NM_009466.2,1307-1325).
ggtgcacacctccacatat

SEQ ID NO: 607859 - DNA, 19 bp, Mus musculus
  siRNA target sequence for Ugdh (NM_009466.2,1404-1422).
gactggtgaccatttccaa

SEQ ID NO: 607860 - DNA, 19 bp, Mus musculus
  siRNA target sequence for Ugdh (NM_009466.2,1448-1466).
gcccatgccctcgttatct

SEQ ID NO: 607861 - DNA, 19 bp, Mus musculus
  siRNA target sequence for Ugdh (NM_009466.2,1470-1488).
ctgagtgggacatgtttaa

SEQ ID NO: 607862 - DNA, 19 bp, Mus musculus
  siRNA target sequence for Ugdh (NM_009466.2,1495-1513).
ggattacgaacggattcat

SEQ ID NO: 607863 - DNA, 19 bp, Mus musculus
  siRNA target sequence for Ugdh (NM_009466.2,1496-1514).
gattacgaacggattcata

SEQ ID NO: 607864 - DNA, 19 bp, Mus musculus
  siRNA target sequence for Ugdh (NM_009466.2,1501-1519).
cgaacggattcataaaaaa

SEQ ID NO: 607865 - DNA, 19 bp, Mus musculus
  siRNA target sequence for Ugdh (NM_009466.2,1587-1605).
ccattggcttccagattga

SEQ ID NO: 607866 - DNA, 19 bp, Mus musculus
  siRNA target sequence for Ugdh (NM_009466.2,1592-1610).
ggcttccagattgaaacaa

SEQ ID NO: 607867 - DNA, 19 bp, Mus musculus
  siRNA target sequence for Ugdh (NM_009466.2,1621-1639).
ggtgtcttccaagagaatt

SEQ ID NO: 607868 - DNA, 19 bp, Mus musculus
  siRNA target sequence for Ugdh (NM_009466.2,1642-1660).
gtacactcctggtgagatt

SEQ ID NO: 607869 - DNA, 19 bp, Mus musculus
  siRNA target sequence for Ugdh (NM_009466.2,1676-1694).
caggacccacctaacaaga

SEQ ID NO: 607870 - DNA, 19 bp, Mus musculus
  siRNA target sequence for Ugdh (NM_009466.2,1678-1696).
ggacccacctaacaagaaa

SEQ ID NO: 607871 - DNA, 19 bp, Mus musculus
  siRNA target sequence for Mod1 (NM_008615.1,121-139).
cgcgggacccgcatctcaa

SEQ ID NO: 607872 - DNA, 19 bp, Mus musculus
  siRNA target sequence for Mod1 (NM_008615.1,329-347).
cgtgctcatgtctgatgtt

SEQ ID NO: 607873 - DNA, 19 bp, Mus musculus
  siRNA target sequence for Mod1 (NM_008615.1,391-409).
catgccagcagtacagttt

SEQ ID NO: 607874 - DNA, 19 bp, Mus musculus
  siRNA target sequence for Mod1 (NM_008615.1,657-675).
gaaaatgaggagttactta

SEQ ID NO: 607875 - DNA, 19 bp, Mus musculus
  siRNA target sequence for Akr1c18 (NM_134066.1,91-109).
ggctttggcacctatgcaa

SEQ ID NO: 607876 - DNA, 19 bp, Mus musculus
  siRNA target sequence for Akr1c18 (NM_134066.1,117-135).
gcatctcaagaaaaagtct

SEQ ID NO: 607877 - DNA, 19 bp, Mus musculus
  siRNA target sequence for Akr1c18 (NM_134066.1,118-136).
catctcaagaaaaagtcta

SEQ ID NO: 607878 - DNA, 19 bp, Mus musculus
  siRNA target sequence for Akr1c18 (NM_134066.1,134-152).
ctatggagtccaccaaaat

SEQ ID NO: 607879 - DNA, 19 bp, Mus musculus
  siRNA target sequence for Akr1c18 (NM_134066.1,338-356).
ccctgaggaaacttaattt

SEQ ID NO: 607880 - DNA, 19 bp, Mus musculus
  siRNA target sequence for Akr1c18 (NM_134066.1,542-560).
gtagacaactggagatgat

SEQ ID NO: 607881 - DNA, 19 bp, Mus musculus
  siRNA target sequence for Akr1c18 (NM_134066.1,642-660).
ggcctactgcaagatgaat

SEQ ID NO: 607882 - DNA, 19 bp, Mus musculus
  siRNA target sequence for Akr1c18 (NM_134066.1,697-715).
caaagatacaaatactgta

SEQ ID NO: 607883 - DNA, 19 bp, Mus musculus
  siRNA target sequence for Akr1c18 (NM_134066.1,933-951).
cagaaatcttcggtacttt

SEQ ID NO: 607884 - DNA, 19 bp, Mus musculus
  siRNA target sequence for Akr1c18 (NM_134066.1,971-989).
ctcaccctaactttccatt

SEQ ID NO: 607885 - DNA, 19 bp, Mus musculus
  siRNA target sequence for 2410018D16Rik (NM_134017.1,254-272).
cgaagagcaagaccaaaat

SEQ ID NO: 607886 - DNA, 19 bp, Mus musculus
  siRNA target sequence for 2410018D16Rik (NM_134017.1,258-276).
gagcaagaccaaaattcga

SEQ ID NO: 607887 - DNA, 19 bp, Mus musculus
  siRNA target sequence for 2410018D16Rik (NM_134017.1,264-282).
gaccaaaattcgaacaagt

SEQ ID NO: 607888 - DNA, 19 bp, Mus musculus
  siRNA target sequence for 2410018D16Rik (NM_134017.1,278-296).
caagtgaacctgttggatt

SEQ ID NO: 607889 - DNA, 19 bp, Mus musculus
  siRNA target sequence for 2410018D16Rik (NM_134017.1,447-465).
ctgcgattggagcatttct

SEQ ID NO: 607890 - DNA, 19 bp, Mus musculus
  siRNA target sequence for 2410018D16Rik (NM_134017.1,449-467).
gcgattggagcatttctca

SEQ ID NO: 607891 - DNA, 19 bp, Mus musculus
  siRNA target sequence for 2410018D16Rik (NM_134017.1,450-468).
cgattggagcatttctcat

SEQ ID NO: 607892 - DNA, 19 bp, Mus musculus
  siRNA target sequence for 2410018D16Rik (NM_134017.1,458-476).
gcatttctcatctacatta

SEQ ID NO: 607893 - DNA, 19 bp, Mus musculus
  siRNA target sequence for 2410018D16Rik (NM_134017.1,477-495).
gctcagattatgtgtttga

SEQ ID NO: 607894 - DNA, 19 bp, Mus musculus
  siRNA target sequence for 2410018D16Rik (NM_134017.1,514-532).
cacagaagaagatatacca

SEQ ID NO: 607895 - DNA, 19 bp, Mus musculus
  siRNA target sequence for 2410018D16Rik (NM_134017.1,530-548).
ccaagtcccctgaatctat

SEQ ID NO: 607896 - DNA, 19 bp, Mus musculus
  siRNA target sequence for 2410018D16Rik (NM_134017.1,538-556).
cctgaatctatatggaaaa

SEQ ID NO: 607897 - DNA, 19 bp, Mus musculus
  siRNA target sequence for 2410018D16Rik (NM_134017.1,578-596).
gcagtcctggagaataatt

SEQ ID NO: 607898 - DNA, 19 bp, Mus musculus
  siRNA target sequence for 2410018D16Rik (NM_134017.1,895-913).
ccacttaagacctattact

SEQ ID NO: 607899 - DNA, 19 bp, Mus musculus
  siRNA target sequence for 2410018D16Rik (NM_134017.1,953-971).
cagctcgattgctccaaat

SEQ ID NO: 607900 - DNA, 19 bp, Mus musculus
  siRNA target sequence for 2410018D16Rik (NM_134017.1,991-1009).
ccagaggacaccatttcga

SEQ ID NO: 607901 - DNA, 19 bp, Mus musculus
  siRNA target sequence for 2410018D16Rik (NM_134017.1,992-1010).
cagaggacaccatttcgaa

SEQ ID NO: 607902 - DNA, 19 bp, Mus musculus
  siRNA target sequence for 2410018D16Rik (NM_134017.1,1002-1020).
catttcgaactggaatcaa

SEQ ID NO: 607903 - DNA, 19 bp, Mus musculus
  siRNA target sequence for Tdh (NM_021480.4,487-505).
cttgtcttgcccttgaagt

SEQ ID NO: 607904 - DNA, 19 bp, Mus musculus
  siRNA target sequence for Tdh (NM_021480.4,492-510).
cttgcccttgaagtttcta

SEQ ID NO: 607905 - DNA, 19 bp, Mus musculus
  siRNA target sequence for Tdh (NM_021480.4,1264-1282).
gagcgcctgtccatgagaa

SEQ ID NO: 607906 - DNA, 19 bp, Mus musculus
  siRNA target sequence for Tdh (NM_021480.4,1404-1422).
ctggcccatgattctagat

SEQ ID NO: 607907 - DNA, 19 bp, Mus musculus
  siRNA target sequence for Tdh (NM_021480.4,1514-1532).
ccagagttgcccaagtgaa

SEQ ID NO: 607908 - DNA, 19 bp, Mus musculus
  siRNA target sequence for Grhpr (NM_080289.1,129-147).
gaggtggaacagtggaatt

SEQ ID NO: 607909 - DNA, 19 bp, Mus musculus
  siRNA target sequence for Grhpr (NM_080289.1,460-478).
cctggagcccattatggat

SEQ ID NO: 607910 - DNA, 19 bp, Mus musculus
  siRNA target sequence for Grhpr (NM_080289.1,542-560).
catcgctcgacgactgaaa

SEQ ID NO: 607911 - DNA, 19 bp, Mus musculus
  siRNA target sequence for Grhpr (NM_080289.1,546-564).
gctcgacgactgaaaccat

SEQ ID NO: 607912 - DNA, 19 bp, Mus musculus
  siRNA target sequence for Grhpr (NM_080289.1,547-565).
ctcgacgactgaaaccatt

SEQ ID NO: 607913 - DNA, 19 bp, Mus musculus
  siRNA target sequence for Grhpr (NM_080289.1,562-580).
cattcggtgtccagagatt

SEQ ID NO: 607914 - DNA, 19 bp, Mus musculus
  siRNA target sequence for Grhpr (NM_080289.1,566-584).
cggtgtccagagatttctt

SEQ ID NO: 607915 - DNA, 19 bp, Mus musculus
  siRNA target sequence for Grhpr (NM_080289.1,620-638).
cgagtttcaggcagagttt

SEQ ID NO: 607916 - DNA, 19 bp, Mus musculus
  siRNA target sequence for Grhpr (NM_080289.1,659-677).
cgcagagtcagacttcatt

SEQ ID NO: 607917 - DNA, 19 bp, Mus musculus
  siRNA target sequence for Grhpr (NM_080289.1,678-696).
gtcgtgtcctgctccttaa

SEQ ID NO: 607918 - DNA, 19 bp, Mus musculus
  siRNA target sequence for Grhpr (NM_080289.1,691-709).
ccttaacacccgataccat

SEQ ID NO: 607919 - DNA, 19 bp, Mus musculus
  siRNA target sequence for Grhpr (NM_080289.1,714-732).
ctctgcagcaaggatttct

SEQ ID NO: 607920 - DNA, 19 bp, Mus musculus
  siRNA target sequence for Grhpr (NM_080289.1,958-976).
ccttgctggcggctaacaa

SEQ ID NO: 607921 - DNA, 19 bp, Mus musculus
  siRNA target sequence for Akr1a4 (NM_021473.2,555-573).
ccaagctgtggaatactaa

SEQ ID NO: 607922 - DNA, 19 bp, Mus musculus
  siRNA target sequence for Akr1a4 (NM_021473.2,670-688).
ctttgagcggggagacaat

SEQ ID NO: 607923 - DNA, 19 bp, Mus musculus
  siRNA target sequence for Akr1a4 (NM_021473.2,705-723).
ccgatggaactgtcagata

SEQ ID NO: 607924 - DNA, 19 bp, Mus musculus
  siRNA target sequence for Akr1a4 (NM_021473.2,816-834).
gtcggcagattgatgatgt

SEQ ID NO: 607925 - DNA, 19 bp, Mus musculus
  siRNA target sequence for Akr1a4 (NM_021473.2,885-903).
catacctggctcagaatga

SEQ ID NO: 607926 - DNA, 19 bp, Mus musculus
  siRNA target sequence for Akr1a4 (NM_021473.2,1021-1039).
cttggcactagctgaaaaa

SEQ ID NO: 607927 - DNA, 19 bp, Mus musculus
  siRNA target sequence for Akr1a4 (NM_021473.2,1055-1073).
gctcagatcttgcttagat

SEQ ID NO: 607928 - DNA, 19 bp, Mus musculus
  siRNA target sequence for Akr1a4 (NM_021473.2,1119-1137).
cttcccgcatccttcagaa

SEQ ID NO: 607929 - DNA, 19 bp, Mus musculus
  siRNA target sequence for Akr1a4 (NM_021473.2,1122-1140).
cccgcatccttcagaacat

SEQ ID NO: 607930 - DNA, 19 bp, Mus musculus
  siRNA target sequence for Akr1a4 (NM_021473.2,1198-1216).
caaaaattggcggtatatt

SEQ ID NO: 607931 - DNA, 19 bp, Mus musculus
  siRNA target sequence for Akr1a4 (NM_021473.2,1269-1287).
ctctgtatccctttaatga

SEQ ID NO: 607932 - DNA, 19 bp, Mus musculus
  siRNA target sequence for Ctbp1 (NM_013502.1,194-212).
gtccgacctcccatcatga

SEQ ID NO: 607933 - DNA, 19 bp, Mus musculus
  siRNA target sequence for Ctbp1 (NM_013502.1,446-464).
ggcagcgggtttgacaata

SEQ ID NO: 607934 - DNA, 19 bp, Mus musculus
  siRNA target sequence for Ctbp1 (NM_013502.1,447-465).
gcagcgggtttgacaatat

SEQ ID NO: 607935 - DNA, 19 bp, Mus musculus
  siRNA target sequence for Ctbp1 (NM_013502.1,450-468).
gcgggtttgacaatatcga

SEQ ID NO: 607936 - DNA, 19 bp, Mus musculus
  siRNA target sequence for Ctbp1 (NM_013502.1,458-476).
gacaatatcgacatcaagt

SEQ ID NO: 607937 - DNA, 19 bp, Mus musculus
  siRNA target sequence for Ctbp1 (NM_013502.1,742-760).
cttcaacgtcctcttctat

SEQ ID NO: 607938 - DNA, 19 bp, Mus musculus
  siRNA target sequence for Ctbp1 (NM_013502.1,754-772).
cttctatgatccataccta

SEQ ID NO: 607939 - DNA, 19 bp, Mus musculus
  siRNA target sequence for Ctbp1 (NM_013502.1,765-783).
catacctatctgatggaat

SEQ ID NO: 607940 - DNA, 19 bp, Mus musculus
  siRNA target sequence for Ctbp1 (NM_013502.1,1177-1195).
gatcccagatagcttgaaa

SEQ ID NO: 607941 - DNA, 19 bp, Mus musculus
  siRNA target sequence for Ube1dc1 (NM_025692.1,304-322).
cgaggtgttggattccaat

SEQ ID NO: 607942 - DNA, 19 bp, Mus musculus
  siRNA target sequence for Ube1dc1 (NM_025692.1,355-373).
gggaattgtcagtgactat

SEQ ID NO: 607943 - DNA, 19 bp, Mus musculus
  siRNA target sequence for Ube1dc1 (NM_025692.1,384-402).
gtacctacgctgtagcaat

SEQ ID NO: 607944 - DNA, 19 bp, Mus musculus
  siRNA target sequence for Ube1dc1 (NM_025692.1,387-405).
cctacgctgtagcaatagt

SEQ ID NO: 607945 - DNA, 19 bp, Mus musculus
  siRNA target sequence for Ube1dc1 (NM_025692.1,388-406).
ctacgctgtagcaatagta

SEQ ID NO: 607946 - DNA, 19 bp, Mus musculus
  siRNA target sequence for Ube1dc1 (NM_025692.1,423-441).
gtagtgtgactgctgaaat

SEQ ID NO: 607947 - DNA, 19 bp, Mus musculus
  siRNA target sequence for Ube1dc1 (NM_025692.1,426-444).
gtgtgactgctgaaatgct

SEQ ID NO: 607948 - DNA, 19 bp, Mus musculus
  siRNA target sequence for Ube1dc1 (NM_025692.1,577-595).
gaacattaaccctgatgtt

SEQ ID NO: 607949 - DNA, 19 bp, Mus musculus
  siRNA target sequence for Ube1dc1 (NM_025692.1,605-623).
gtccacaactacaatatca

SEQ ID NO: 607950 - DNA, 19 bp, Mus musculus
  siRNA target sequence for Ube1dc1 (NM_025692.1,855-873).
gtgcgccaccacttgtagt

SEQ ID NO: 607951 - DNA, 19 bp, Mus musculus
  siRNA target sequence for Ube1dc1 (NM_025692.1,864-882).
cacttgtagttgcttcaaa

SEQ ID NO: 607952 - DNA, 19 bp, Mus musculus
  siRNA target sequence for Ube1dc1 (NM_025692.1,875-893).
gcttcaaatattgatgaaa

SEQ ID NO: 607953 - DNA, 19 bp, Mus musculus
  siRNA target sequence for Ube1dc1 (NM_025692.1,955-973).
cgggatcttggtacaaaat

SEQ ID NO: 607954 - DNA, 19 bp, Mus musculus
  siRNA target sequence for Ube1dc1 (NM_025692.1,961-979).
cttggtacaaaatgtacta

SEQ ID NO: 607955 - DNA, 19 bp, Mus musculus
  siRNA target sequence for Ube1dc1 (NM_025692.1,977-995).
ctaaagtttctgttaaaat

SEQ ID NO: 607956 - DNA, 19 bp, Mus musculus
  siRNA target sequence for Ube1dc1 (NM_025692.1,999-1017).
gcactgtcagtttttacct

SEQ ID NO: 607957 - DNA, 19 bp, Mus musculus
  siRNA target sequence for Ube1dc1 (NM_025692.1,1070-1088).
cctcagtgtgatgacaaaa

SEQ ID NO: 607958 - DNA, 19 bp, Mus musculus
  siRNA target sequence for Ube1dc1 (NM_025692.1,1071-1089).
ctcagtgtgatgacaaaaa

SEQ ID NO: 607959 - DNA, 19 bp, Mus musculus
  siRNA target sequence for Ube1dc1 (NM_025692.1,1226-1244).
gaggaactgaagaactctt

SEQ ID NO: 607960 - DNA, 19 bp, Mus musculus
  siRNA target sequence for Ube1dc1 (NM_025692.1,1261-1279).
cttacctgaaggcattaca

SEQ ID NO: 607961 - DNA, 19 bp, Mus musculus
  siRNA target sequence for Ube1dc1 (NM_025692.1,1306-1324).
ggaggattcggcttctgaa

SEQ ID NO: 607962 - DNA, 19 bp, Mus musculus
  siRNA target sequence for Ube1dc1 (NM_025692.1,1309-1327).
ggattcggcttctgaagta

SEQ ID NO: 607963 - DNA, 19 bp, Mus musculus
  siRNA target sequence for Ube1dc1 (NM_025692.1,1344-1362).
gcgaaagcttggaagatct

SEQ ID NO: 607964 - DNA, 19 bp, Mus musculus
  siRNA target sequence for B230207H15Rik (NM_181407.2,599-617).
gcaacaatgctgaactctt

SEQ ID NO: 607965 - DNA, 19 bp, Mus musculus
  siRNA target sequence for B230207H15Rik (NM_181407.2,793-811).
caatgaggagcttcttaga

SEQ ID NO: 607966 - DNA, 19 bp, Mus musculus
  siRNA target sequence for B230207H15Rik (NM_181407.2,847-865).
ccgtggggaggagtatgat

SEQ ID NO: 607967 - DNA, 19 bp, Mus musculus
  siRNA target sequence for B230207H15Rik (NM_181407.2,887-905).
caggcggtgacagataagt

SEQ ID NO: 607968 - DNA, 19 bp, Mus musculus
  siRNA target sequence for B230207H15Rik (NM_181407.2,899-917).
gataagttcggaataaatt

SEQ ID NO: 607969 - DNA, 19 bp, Mus musculus
  siRNA target sequence for B230207H15Rik (NM_181407.2,977-995).
cgcaacaagtactgtatgt

SEQ ID NO: 607970 - DNA, 19 bp, Mus musculus
  siRNA target sequence for B230207H15Rik (NM_181407.2,985-1003).
gtactgtatgttcaatgat

SEQ ID NO: 607971 - DNA, 19 bp, Mus musculus
  siRNA target sequence for B230207H15Rik (NM_181407.2,1071-1089).
gactgtccaatcatgtgtt

SEQ ID NO: 607972 - DNA, 19 bp, Mus musculus
  siRNA target sequence for B230207H15Rik (NM_181407.2,1075-1093).
gtccaatcatgtgtttgtt

SEQ ID NO: 607973 - DNA, 19 bp, Mus musculus
  siRNA target sequence for B230207H15Rik (NM_181407.2,1312-1330).
gaagcccacagcaattata

SEQ ID NO: 607974 - DNA, 19 bp, Mus musculus
  siRNA target sequence for B230207H15Rik (NM_181407.2,1315-1333).
gcccacagcaattataggt

SEQ ID NO: 607975 - DNA, 19 bp, Mus musculus
  siRNA target sequence for B230207H15Rik (NM_181407.2,1471-1489).
cgagggccgaggaatcttt

SEQ ID NO: 607976 - DNA, 19 bp, Mus musculus
  siRNA target sequence for B230207H15Rik (NM_181407.2,1491-1509).
ccagtggaagtccttttaa

SEQ ID NO: 607977 - DNA, 19 bp, Mus musculus
  siRNA target sequence for B230207H15Rik (NM_181407.2,1553-1571).
ggaaacaatgcctatgtgt

SEQ ID NO: 607978 - DNA, 19 bp, Mus musculus
  siRNA target sequence for B230207H15Rik (NM_181407.2,1554-1572).
gaaacaatgcctatgtgtt

SEQ ID NO: 607979 - DNA, 19 bp, Mus musculus
  siRNA target sequence for B230207H15Rik (NM_181407.2,1613-1631).
cacatcccagatgaaatct

SEQ ID NO: 607980 - DNA, 19 bp, Mus musculus
  siRNA target sequence for B230207H15Rik (NM_181407.2,1719-1737).
gagatgtgtctctgagaat

SEQ ID NO: 607981 - DNA, 19 bp, Mus musculus
  siRNA target sequence for B230207H15Rik (NM_181407.2,1771-1789).
caacttggcctcctactat

SEQ ID NO: 607982 - DNA, 19 bp, Mus musculus
  siRNA target sequence for B230207H15Rik (NM_181407.2,1828-1846).
gatctacactccagactat

SEQ ID NO: 607983 - DNA, 19 bp, Mus musculus
  siRNA target sequence for B230207H15Rik (NM_181407.2,1867-1885).
ctacagctggcctaaggaa

SEQ ID NO: 607984 - DNA, 19 bp, Mus musculus
  siRNA target sequence for B230207H15Rik (NM_181407.2,1872-1890).
gctggcctaaggaagctat

SEQ ID NO: 607985 - DNA, 19 bp, Mus musculus
  siRNA target sequence for Me2 (NM_145494.1,149-167).
gccgagtgcacctgaaaga

SEQ ID NO: 607986 - DNA, 19 bp, Mus musculus
  siRNA target sequence for Me2 (NM_145494.1,174-192).
caagccactcatgttgaat

SEQ ID NO: 607987 - DNA, 19 bp, Mus musculus
  siRNA target sequence for Me2 (NM_145494.1,207-225).
gggaatggcgtttacgtta

SEQ ID NO: 607988 - DNA, 19 bp, Mus musculus
  siRNA target sequence for Me2 (NM_145494.1,253-271).
ggacttttacctcctaaaa

SEQ ID NO: 607989 - DNA, 19 bp, Mus musculus
  siRNA target sequence for Me2 (NM_145494.1,283-301).
gatattcaagccttacgat

SEQ ID NO: 607990 - DNA, 19 bp, Mus musculus
  siRNA target sequence for Me2 (NM_145494.1,289-307).
caagccttacgattccata

SEQ ID NO: 607991 - DNA, 19 bp, Mus musculus
  siRNA target sequence for Me2 (NM_145494.1,292-310).
gccttacgattccatagaa

SEQ ID NO: 607992 - DNA, 19 bp, Mus musculus
  siRNA target sequence for Me2 (NM_145494.1,293-311).
ccttacgattccatagaaa

SEQ ID NO: 607993 - DNA, 19 bp, Mus musculus
  siRNA target sequence for Me2 (NM_145494.1,298-316).
cgattccatagaaacttga

SEQ ID NO: 607994 - DNA, 19 bp, Mus musculus
  siRNA target sequence for Me2 (NM_145494.1,330-348).
ccctttggaaaaatacatt

SEQ ID NO: 607995 - DNA, 19 bp, Mus musculus
  siRNA target sequence for Me2 (NM_145494.1,416-434).
gtctgatgccgattgtgta

SEQ ID NO: 607996 - DNA, 19 bp, Mus musculus
  siRNA target sequence for Me2 (NM_145494.1,448-466).
ggtcttgcctgctgtcaat

SEQ ID NO: 607997 - DNA, 19 bp, Mus musculus
  siRNA target sequence for Me2 (NM_145494.1,449-467).
gtcttgcctgctgtcaata

SEQ ID NO: 607998 - DNA, 19 bp, Mus musculus
  siRNA target sequence for Me2 (NM_145494.1,482-500).
ggagacctaagggattgtt

SEQ ID NO: 607999 - DNA, 19 bp, Mus musculus
  siRNA target sequence for Me2 (NM_145494.1,483-501).
gagacctaagggattgttt

SEQ ID NO: 608000 - DNA, 19 bp, Mus musculus
  siRNA target sequence for Me2 (NM_145494.1,485-503).
gacctaagggattgtttat

SEQ ID NO: 608001 - DNA, 19 bp, Mus musculus
  siRNA target sequence for Me2 (NM_145494.1,516-534).
cagaggtcatgttagatca

SEQ ID NO: 608002 - DNA, 19 bp, Mus musculus
  siRNA target sequence for Me2 (NM_145494.1,518-536).
gaggtcatgttagatcaat

SEQ ID NO: 608003 - DNA, 19 bp, Mus musculus
  siRNA target sequence for Me2 (NM_145494.1,521-539).
gtcatgttagatcaattgt

SEQ ID NO: 608004 - DNA, 19 bp, Mus musculus
  siRNA target sequence for Me2 (NM_145494.1,548-566).
ggccagaaaatcatgttaa

SEQ ID NO: 608005 - DNA, 19 bp, Mus musculus
  siRNA target sequence for Me2 (NM_145494.1,709-727).
gacgtgggcactgataaca

SEQ ID NO: 608006 - DNA, 19 bp, Mus musculus
  siRNA target sequence for Me2 (NM_145494.1,747-765).
gttttatatgggcttgtat

SEQ ID NO: 608007 - DNA, 19 bp, Mus musculus
  siRNA target sequence for Me2 (NM_145494.1,799-817).
ctgatggacgagtttatga

SEQ ID NO: 608008 - DNA, 19 bp, Mus musculus
  siRNA target sequence for Me2 (NM_145494.1,841-859).
cggaacacactcattcagt

SEQ ID NO: 608009 - DNA, 19 bp, Mus musculus
  siRNA target sequence for Me2 (NM_145494.1,1007-1025).
cagaacacaaaatcttatt

SEQ ID NO: 608010 - DNA, 19 bp, Mus musculus
  siRNA target sequence for Me2 (NM_145494.1,1052-1070).
gaattgccaatctcatagt

SEQ ID NO: 608011 - DNA, 19 bp, Mus musculus
  siRNA target sequence for Me2 (NM_145494.1,1057-1075).
gccaatctcatagttctat

SEQ ID NO: 608012 - DNA, 19 bp, Mus musculus
  siRNA target sequence for Me2 (NM_145494.1,1059-1077).
caatctcatagttctatca

SEQ ID NO: 608013 - DNA, 19 bp, Mus musculus
  siRNA target sequence for Me2 (NM_145494.1,1158-1176).
gcggactgctagcatagat

SEQ ID NO: 608014 - DNA, 19 bp, Mus musculus
  siRNA target sequence for Me2 (NM_145494.1,1159-1177).
cggactgctagcatagata

SEQ ID NO: 608015 - DNA, 19 bp, Mus musculus
  siRNA target sequence for Me2 (NM_145494.1,1163-1181).
ctgctagcatagatagcaa

SEQ ID NO: 608016 - DNA, 19 bp, Mus musculus
  siRNA target sequence for Me2 (NM_145494.1,1212-1230).
gagcatacctgcgactttt

SEQ ID NO: 608017 - DNA, 19 bp, Mus musculus
  siRNA target sequence for Me2 (NM_145494.1,1214-1232).
gcatacctgcgacttttga

SEQ ID NO: 608018 - DNA, 19 bp, Mus musculus
  siRNA target sequence for Me2 (NM_145494.1,1215-1233).
catacctgcgacttttgaa

SEQ ID NO: 608019 - DNA, 19 bp, Mus musculus
  siRNA target sequence for Me2 (NM_145494.1,1329-1347).
caacgagagacctataata

SEQ ID NO: 608020 - DNA, 19 bp, Mus musculus
  siRNA target sequence for Me2 (NM_145494.1,1332-1350).
cgagagacctataatattt

SEQ ID NO: 608021 - DNA, 19 bp, Mus musculus
  siRNA target sequence for Me2 (NM_145494.1,1335-1353).
gagacctataatatttgct

SEQ ID NO: 608022 - DNA, 19 bp, Mus musculus
  siRNA target sequence for Me2 (NM_145494.1,1430-1448).
ccagtggcagcccatttga

SEQ ID NO: 608023 - DNA, 19 bp, Mus musculus
  siRNA target sequence for Me2 (NM_145494.1,1442-1460).
catttgagccagtgaaact

SEQ ID NO: 608024 - DNA, 19 bp, Mus musculus
  siRNA target sequence for Me2 (NM_145494.1,1557-1575).
cagtgacaccgttttctta

SEQ ID NO: 608025 - DNA, 19 bp, Mus musculus
  siRNA target sequence for Me2 (NM_145494.1,1638-1656).
cccgtcgctggctaatatt

SEQ ID NO: 608026 - DNA, 19 bp, Mus musculus
  siRNA target sequence for Me2 (NM_145494.1,1640-1658).
cgtcgctggctaatattca

SEQ ID NO: 608027 - DNA, 19 bp, Mus musculus
  siRNA target sequence for Me2 (NM_145494.1,1659-1677).
ggaagtttctgctaacata

SEQ ID NO: 608028 - DNA, 19 bp, Mus musculus
  siRNA target sequence for Me2 (NM_145494.1,1663-1681).
gtttctgctaacatagcta

SEQ ID NO: 608029 - DNA, 19 bp, Mus musculus
  siRNA target sequence for Me2 (NM_145494.1,1670-1688).
ctaacatagctattaaact

SEQ ID NO: 608030 - DNA, 19 bp, Mus musculus
  siRNA target sequence for Me2 (NM_145494.1,1693-1711).
gagtacctgtacgctaata

SEQ ID NO: 608031 - DNA, 19 bp, Mus musculus
  siRNA target sequence for Me2 (NM_145494.1,1695-1713).
gtacctgtacgctaataaa

SEQ ID NO: 608032 - DNA, 19 bp, Mus musculus
  siRNA target sequence for Me2 (NM_145494.1,1751-1769).
gatacgtgagagagagaat

SEQ ID NO: 608033 - DNA, 19 bp, Mus musculus
  siRNA target sequence for Me2 (NM_145494.1,1795-1813).
ctgccggacgtgtatgact

SEQ ID NO: 608034 - DNA, 19 bp, Mus musculus
  siRNA target sequence for Hao1 (NM_010403.1,38-56).
ctgcatcagtgattatgaa

SEQ ID NO: 608035 - DNA, 19 bp, Mus musculus
  siRNA target sequence for Hao1 (NM_010403.1,74-92).
gcttcagaagtcagtgtat

SEQ ID NO: 608036 - DNA, 19 bp, Mus musculus
  siRNA target sequence for Hao1 (NM_010403.1,80-98).
gaagtcagtgtatgactat

SEQ ID NO: 608037 - DNA, 19 bp, Mus musculus
  siRNA target sequence for Hao1 (NM_010403.1,103-121).
ggtctggggcaaatgatca

SEQ ID NO: 608038 - DNA, 19 bp, Mus musculus
  siRNA target sequence for Hao1 (NM_010403.1,184-202).
gcaacgttgctgatatcga

SEQ ID NO: 608039 - DNA, 19 bp, Mus musculus
  siRNA target sequence for Hao1 (NM_010403.1,185-203).
caacgttgctgatatcgat

SEQ ID NO: 608040 - DNA, 19 bp, Mus musculus
  siRNA target sequence for Hao1 (NM_010403.1,195-213).
gatatcgatctgtcaactt

SEQ ID NO: 608041 - DNA, 19 bp, Mus musculus
  siRNA target sequence for Hao1 (NM_010403.1,233-251).
cagcatgccaatatgtgtt

SEQ ID NO: 608042 - DNA, 19 bp, Mus musculus
  siRNA target sequence for Hao1 (NM_010403.1,349-367).
gggctacctcctcaataga

SEQ ID NO: 608043 - DNA, 19 bp, Mus musculus
  siRNA target sequence for Hao1 (NM_010403.1,350-368).
ggctacctcctcaatagaa

SEQ ID NO: 608044 - DNA, 19 bp, Mus musculus
  siRNA target sequence for Hao1 (NM_010403.1,355-373).
cctcctcaatagaagaagt

SEQ ID NO: 608045 - DNA, 19 bp, Mus musculus
  siRNA target sequence for Hao1 (NM_010403.1,403-421).
ggatgcaactgtacatcta

SEQ ID NO: 608046 - DNA, 19 bp, Mus musculus
  siRNA target sequence for Hao1 (NM_010403.1,407-425).
gcaactgtacatctacaaa

SEQ ID NO: 608047 - DNA, 19 bp, Mus musculus
  siRNA target sequence for Hao1 (NM_010403.1,509-527).
cctgggcaaccgcattgat

SEQ ID NO: 608048 - DNA, 19 bp, Mus musculus
  siRNA target sequence for Hao1 (NM_010403.1,584-602).
caatgatttggcattttct

SEQ ID NO: 608049 - DNA, 19 bp, Mus musculus
  siRNA target sequence for Hao1 (NM_010403.1,709-727).
cactgcctattgttgtaaa

SEQ ID NO: 608050 - DNA, 19 bp, Mus musculus
  siRNA target sequence for Hao1 (NM_010403.1,751-769).
ccaaggaagctgttaaaca

SEQ ID NO: 608051 - DNA, 19 bp, Mus musculus
  siRNA target sequence for Hao1 (NM_010403.1,782-800).
gatcttggtgtcgaatcat

SEQ ID NO: 608052 - DNA, 19 bp, Mus musculus
  siRNA target sequence for Hao1 (NM_010403.1,940-958).
gagccaaggccgtttttgt

SEQ ID NO: 608053 - DNA, 19 bp, Mus musculus
  siRNA target sequence for Hao3 (NM_019545.2,232-250).
ctgtgtttggcagacttta

SEQ ID NO: 608054 - DNA, 19 bp, Mus musculus
  siRNA target sequence for Hao3 (NM_019545.2,279-297).
gacctcctgggattttatt

SEQ ID NO: 608055 - DNA, 19 bp, Mus musculus
  siRNA target sequence for Hao3 (NM_019545.2,316-334).
ggcataacctacaatgaca

SEQ ID NO: 608056 - DNA, 19 bp, Mus musculus
  siRNA target sequence for Hao3 (NM_019545.2,317-335).
gcataacctacaatgacaa

SEQ ID NO: 608057 - DNA, 19 bp, Mus musculus
  siRNA target sequence for Hao3 (NM_019545.2,452-470).
ccacagcctttcattcaat

SEQ ID NO: 608058 - DNA, 19 bp, Mus musculus
  siRNA target sequence for Hao3 (NM_019545.2,540-558).
cagttatgccagctatact

SEQ ID NO: 608059 - DNA, 19 bp, Mus musculus
  siRNA target sequence for Hao3 (NM_019545.2,542-560).
gttatgccagctatactgt

SEQ ID NO: 608060 - DNA, 19 bp, Mus musculus
  siRNA target sequence for Hao3 (NM_019545.2,584-602).
ctggaggcctccattggtt

SEQ ID NO: 608061 - DNA, 19 bp, Mus musculus
  siRNA target sequence for Hao3 (NM_019545.2,594-612).
ccattggttccaactttat

SEQ ID NO: 608062 - DNA, 19 bp, Mus musculus
  siRNA target sequence for Hao3 (NM_019545.2,619-637).
ccagactgggacatcaaca

SEQ ID NO: 608063 - DNA, 19 bp, Mus musculus
  siRNA target sequence for Hao3 (NM_019545.2,741-759).
ggatttggaggcaaacata

SEQ ID NO: 608064 - DNA, 19 bp, Mus musculus
  siRNA target sequence for Hao3 (NM_019545.2,853-871).
cccttgcttcagagtatga

SEQ ID NO: 608065 - DNA, 19 bp, Mus musculus
  siRNA target sequence for Hao3 (NM_019545.2,855-873).
cttgcttcagagtatgact

SEQ ID NO: 608066 - DNA, 19 bp, Mus musculus
  siRNA target sequence for Hao3 (NM_019545.2,936-954).
caacatccgaggcatcatt

SEQ ID NO: 608067 - DNA, 19 bp, Mus musculus
  siRNA target sequence for Hao3 (NM_019545.2,939-957).
catccgaggcatcattgtt

SEQ ID NO: 608068 - DNA, 19 bp, Mus musculus
  siRNA target sequence for Hao3 (NM_019545.2,968-986).
gcgggaggcagcttgatga

SEQ ID NO: 608069 - DNA, 19 bp, Mus musculus
  siRNA target sequence for Hao3 (NM_019545.2,1065-1083).
ggttcgaaccggcaatgat

SEQ ID NO: 608070 - DNA, 19 bp, Mus musculus
  siRNA target sequence for Hao3 (NM_019545.2,1070-1088).
gaaccggcaatgatgtgtt

SEQ ID NO: 608071 - DNA, 19 bp, Mus musculus
  siRNA target sequence for Hao3 (NM_019545.2,1073-1091).
ccggcaatgatgtgttgaa

SEQ ID NO: 608072 - DNA, 19 bp, Mus musculus
  siRNA target sequence for Hao3 (NM_019545.2,1123-1141).
cttgggagaccaatcattt

SEQ ID NO: 608073 - DNA, 19 bp, Mus musculus
  siRNA target sequence for Hao3 (NM_019545.2,1171-1189).
gttaaggaagttttagata

SEQ ID NO: 608074 - DNA, 19 bp, Mus musculus
  siRNA target sequence for Hao3 (NM_019545.2,1198-1216).
gaagaactccacacttgta

SEQ ID NO: 608075 - DNA, 19 bp, Mus musculus
  siRNA target sequence for Cyp17a1 (NM_007809.1,58-76).
ctcatcctggcctatttct

SEQ ID NO: 608076 - DNA, 19 bp, Mus musculus
  siRNA target sequence for Cyp17a1 (NM_007809.1,84-102).
caagtcaaagacacctaat

SEQ ID NO: 608077 - DNA, 19 bp, Mus musculus
  siRNA target sequence for Cyp17a1 (NM_007809.1,132-150).
gcccctggtgggtagtcta

SEQ ID NO: 608078 - DNA, 19 bp, Mus musculus
  siRNA target sequence for Cyp17a1 (NM_007809.1,342-360).
cttgtcggaccaaggaaaa

SEQ ID NO: 608079 - DNA, 19 bp, Mus musculus
  siRNA target sequence for Cyp17a1 (NM_007809.1,364-382).
gtcgcctttgcggatagta

SEQ ID NO: 608080 - DNA, 19 bp, Mus musculus
  siRNA target sequence for Cyp17a1 (NM_007809.1,366-384).
cgcctttgcggatagtagt

SEQ ID NO: 608081 - DNA, 19 bp, Mus musculus
  siRNA target sequence for Cyp17a1 (NM_007809.1,367-385).
gcctttgcggatagtagta

SEQ ID NO: 608082 - DNA, 19 bp, Mus musculus
  siRNA target sequence for Cyp17a1 (NM_007809.1,540-558).
cttcaagtcagtaatcaat

SEQ ID NO: 608083 - DNA, 19 bp, Mus musculus
  siRNA target sequence for Cyp17a1 (NM_007809.1,566-584).
gtaccatctgcttcaacat

SEQ ID NO: 608084 - DNA, 19 bp, Mus musculus
  siRNA target sequence for Cyp17a1 (NM_007809.1,626-644).
cctttacagagggtattgt

SEQ ID NO: 608085 - DNA, 19 bp, Mus musculus
  siRNA target sequence for Cyp17a1 (NM_007809.1,662-680).
gcgatctggtggacatatt

SEQ ID NO: 608086 - DNA, 19 bp, Mus musculus
  siRNA target sequence for Cyp17a1 (NM_007809.1,681-699).
cccgtggttgaagattttt

SEQ ID NO: 608087 - DNA, 19 bp, Mus musculus
  siRNA target sequence for Cyp17a1 (NM_007809.1,701-719).
ccaataaaaacttggaaat

SEQ ID NO: 608088 - DNA, 19 bp, Mus musculus
  siRNA target sequence for Cyp17a1 (NM_007809.1,720-738).
gataaaggaacacactaaa

SEQ ID NO: 608089 - DNA, 19 bp, Mus musculus
  siRNA target sequence for Cyp17a1 (NM_007809.1,726-744).
ggaacacactaaaattcga

SEQ ID NO: 608090 - DNA, 19 bp, Mus musculus
  siRNA target sequence for Cyp17a1 (NM_007809.1,745-763).
gaaaaaacactggttgaaa

SEQ ID NO: 608091 - DNA, 19 bp, Mus musculus
  siRNA target sequence for Cyp17a1 (NM_007809.1,752-770).
cactggttgaaatgtttga

SEQ ID NO: 608092 - DNA, 19 bp, Mus musculus
  siRNA target sequence for Cyp17a1 (NM_007809.1,777-795).
caaggagaaattcaatagt

SEQ ID NO: 608093 - DNA, 19 bp, Mus musculus
  siRNA target sequence for Cyp17a1 (NM_007809.1,809-827).
gcctgacagacattctgat

SEQ ID NO: 608094 - DNA, 19 bp, Mus musculus
  siRNA target sequence for Cyp17a1 (NM_007809.1,810-828).
cctgacagacattctgata

SEQ ID NO: 608095 - DNA, 19 bp, Mus musculus
  siRNA target sequence for Cyp17a1 (NM_007809.1,877-895).
ccaagtgtgttctcagata

SEQ ID NO: 608096 - DNA, 19 bp, Mus musculus
  siRNA target sequence for Cyp17a1 (NM_007809.1,878-896).
caagtgtgttctcagataa

SEQ ID NO: 608097 - DNA, 19 bp, Mus musculus
  siRNA target sequence for Cyp17a1 (NM_007809.1,881-899).
gtgtgttctcagataagca

SEQ ID NO: 608098 - DNA, 19 bp, Mus musculus
  siRNA target sequence for Cyp17a1 (NM_007809.1,1043-1061).
gtcgaacaccgtctttcaa

SEQ ID NO: 608099 - DNA, 19 bp, Mus musculus
  siRNA target sequence for Cyp17a1 (NM_007809.1,1046-1064).
gaacaccgtctttcaatga

SEQ ID NO: 608100 - DNA, 19 bp, Mus musculus
  siRNA target sequence for Cyp17a1 (NM_007809.1,1187-1205).
cgaaggacacacatgtgat

SEQ ID NO: 608101 - DNA, 19 bp, Mus musculus
  siRNA target sequence for Cyp17a1 (NM_007809.1,1192-1210).
gacacacatgtgatcatca

SEQ ID NO: 608102 - DNA, 19 bp, Mus musculus
  siRNA target sequence for Cyp17a1 (NM_007809.1,1194-1212).
cacacatgtgatcatcaat

SEQ ID NO: 608103 - DNA, 19 bp, Mus musculus
  siRNA target sequence for Cyp17a1 (NM_007809.1,1196-1214).
cacatgtgatcatcaatct

SEQ ID NO: 608104 - DNA, 19 bp, Mus musculus
  siRNA target sequence for Cyp17a1 (NM_007809.1,1198-1216).
catgtgatcatcaatctct

SEQ ID NO: 608105 - DNA, 19 bp, Mus musculus
  siRNA target sequence for Cyp17a1 (NM_007809.1,1218-1236).
ggcactgcatcacgataaa

SEQ ID NO: 608106 - DNA, 19 bp, Mus musculus
  siRNA target sequence for Cyp17a1 (NM_007809.1,1219-1237).
gcactgcatcacgataaaa

SEQ ID NO: 608107 - DNA, 19 bp, Mus musculus
  siRNA target sequence for Cyp17a1 (NM_007809.1,1220-1238).
cactgcatcacgataaaaa

SEQ ID NO: 608108 - DNA, 19 bp, Mus musculus
  siRNA target sequence for Cyp17a1 (NM_007809.1,1224-1242).
gcatcacgataaaaatgaa

SEQ ID NO: 608109 - DNA, 19 bp, Mus musculus
  siRNA target sequence for Cyp17a1 (NM_007809.1,1266-1284).
gcctgagcgcttcttagat

SEQ ID NO: 608110 - DNA, 19 bp, Mus musculus
  siRNA target sequence for Cyp17a1 (NM_007809.1,1466-1484).
ccaaggtggtctttctgat

SEQ ID NO: 608111 - DNA, 19 bp, Mus musculus
  siRNA target sequence for Cyp17a1 (NM_007809.1,1485-1503).
cgaccctttcaaagtgaaa

SEQ ID NO: 608112 - DNA, 19 bp, Mus musculus
  siRNA target sequence for Cyp39a1 (NM_018887.2,189-207).
ggcattatggagttattct

SEQ ID NO: 608113 - DNA, 19 bp, Mus musculus
  siRNA target sequence for Cyp39a1 (NM_018887.2,191-209).
cattatggagttattctca

SEQ ID NO: 608114 - DNA, 19 bp, Mus musculus
  siRNA target sequence for Cyp39a1 (NM_018887.2,197-215).
ggagttattctcaccaata

SEQ ID NO: 608115 - DNA, 19 bp, Mus musculus
  siRNA target sequence for Cyp39a1 (NM_018887.2,200-218).
gttattctcaccaatagca

SEQ ID NO: 608116 - DNA, 19 bp, Mus musculus
  siRNA target sequence for Cyp39a1 (NM_018887.2,256-274).
ctcggttgaagaatttgct

SEQ ID NO: 608117 - DNA, 19 bp, Mus musculus
  siRNA target sequence for Cyp39a1 (NM_018887.2,330-348).
gggaaagcccctcttgaat

SEQ ID NO: 608118 - DNA, 19 bp, Mus musculus
  siRNA target sequence for Cyp39a1 (NM_018887.2,331-349).
ggaaagcccctcttgaatt

SEQ ID NO: 608119 - DNA, 19 bp, Mus musculus
  siRNA target sequence for Cyp39a1 (NM_018887.2,337-355).
cccctcttgaatttataga

SEQ ID NO: 608120 - DNA, 19 bp, Mus musculus
  siRNA target sequence for Cyp39a1 (NM_018887.2,345-363).
gaatttatagaaaaagcaa

SEQ ID NO: 608121 - DNA, 19 bp, Mus musculus
  siRNA target sequence for Cyp39a1 (NM_018887.2,368-386).
caagtatggaccggtattt

SEQ ID NO: 608122 - DNA, 19 bp, Mus musculus
  siRNA target sequence for Cyp39a1 (NM_018887.2,407-425).
ccgaatgacctttgttagt

SEQ ID NO: 608123 - DNA, 19 bp, Mus musculus
  siRNA target sequence for Cyp39a1 (NM_018887.2,486-504).
caaagtcctgtctatcaca

SEQ ID NO: 608124 - DNA, 19 bp, Mus musculus
  siRNA target sequence for Cyp39a1 (NM_018887.2,511-529).
ggattccaaagaatgtctt

SEQ ID NO: 608125 - DNA, 19 bp, Mus musculus
  siRNA target sequence for Cyp39a1 (NM_018887.2,546-564).
cgactgtatgccttgatga

SEQ ID NO: 608126 - DNA, 19 bp, Mus musculus
  siRNA target sequence for Cyp39a1 (NM_018887.2,567-585).
gggaagatgggaactttca

SEQ ID NO: 608127 - DNA, 19 bp, Mus musculus
  siRNA target sequence for Cyp39a1 (NM_018887.2,568-586).
ggaagatgggaactttcaa

SEQ ID NO: 608128 - DNA, 19 bp, Mus musculus
  siRNA target sequence for Cyp39a1 (NM_018887.2,607-625).
cgctaactgaagaacttca

SEQ ID NO: 608129 - DNA, 19 bp, Mus musculus
  siRNA target sequence for Cyp39a1 (NM_018887.2,668-686).
gaatgactttgtaaggtat

SEQ ID NO: 608130 - DNA, 19 bp, Mus musculus
  siRNA target sequence for Cyp39a1 (NM_018887.2,739-757).
cagacaagaggacaatcaa

SEQ ID NO: 608131 - DNA, 19 bp, Mus musculus
  siRNA target sequence for Cyp39a1 (NM_018887.2,748-766).
ggacaatcaaggaattcta

SEQ ID NO: 608132 - DNA, 19 bp, Mus musculus
  siRNA target sequence for Cyp39a1 (NM_018887.2,858-876).
ctcctggcgctgtttgaga

SEQ ID NO: 608133 - DNA, 19 bp, Mus musculus
  siRNA target sequence for Cyp39a1 (NM_018887.2,861-879).
ctggcgctgtttgagaaaa

SEQ ID NO: 608134 - DNA, 19 bp, Mus musculus
  siRNA target sequence for Cyp39a1 (NM_018887.2,865-883).
cgctgtttgagaaaaatat

SEQ ID NO: 608135 - DNA, 19 bp, Mus musculus
  siRNA target sequence for Cyp39a1 (NM_018887.2,902-920).
cggatctgcaggtcattct

SEQ ID NO: 608136 - DNA, 19 bp, Mus musculus
  siRNA target sequence for Cyp39a1 (NM_018887.2,966-984).
cgtcaatacagtccaaatt

SEQ ID NO: 608137 - DNA, 19 bp, Mus musculus
  siRNA target sequence for Cyp39a1 (NM_018887.2,967-985).
gtcaatacagtccaaatta

SEQ ID NO: 608138 - DNA, 19 bp, Mus musculus
  siRNA target sequence for Cyp39a1 (NM_018887.2,1016-1034).
caatgctcctcctattgca

SEQ ID NO: 608139 - DNA, 19 bp, Mus musculus
  siRNA target sequence for Cyp39a1 (NM_018887.2,1039-1057).
ggacacttggatatatcct

SEQ ID NO: 608140 - DNA, 19 bp, Mus musculus
  siRNA target sequence for Cyp39a1 (NM_018887.2,1177-1195).
ggtgcattctggaatctgt

SEQ ID NO: 608141 - DNA, 19 bp, Mus musculus
  siRNA target sequence for Cyp39a1 (NM_018887.2,1202-1220).
gagagcccctggtgtcatt

SEQ ID NO: 608142 - DNA, 19 bp, Mus musculus
  siRNA target sequence for Cyp39a1 (NM_018887.2,1206-1224).
gcccctggtgtcattacta

SEQ ID NO: 608143 - DNA, 19 bp, Mus musculus
  siRNA target sequence for Cyp39a1 (NM_018887.2,1208-1226).
ccctggtgtcattactaga

SEQ ID NO: 608144 - DNA, 19 bp, Mus musculus
  siRNA target sequence for Cyp39a1 (NM_018887.2,1209-1227).
cctggtgtcattactagaa

SEQ ID NO: 608145 - DNA, 19 bp, Mus musculus
  siRNA target sequence for Cyp39a1 (NM_018887.2,1229-1247).
ggtagtgaagccagttaaa

SEQ ID NO: 608146 - DNA, 19 bp, Mus musculus
  siRNA target sequence for Cyp39a1 (NM_018887.2,1230-1248).
gtagtgaagccagttaaaa

SEQ ID NO: 608147 - DNA, 19 bp, Mus musculus
  siRNA target sequence for Cyp39a1 (NM_018887.2,1242-1260).
gttaaaattctgaatcaca

SEQ ID NO: 608148 - DNA, 19 bp, Mus musculus
  siRNA target sequence for Cyp39a1 (NM_018887.2,1326-1344).
cctgaacctgagtcattca

SEQ ID NO: 608149 - DNA, 19 bp, Mus musculus
  siRNA target sequence for Cyp39a1 (NM_018887.2,1327-1345).
ctgaacctgagtcattcaa

SEQ ID NO: 608150 - DNA, 19 bp, Mus musculus
  siRNA target sequence for Cyp39a1 (NM_018887.2,1353-1371).
cgctggaaagaggcaaatt

SEQ ID NO: 608151 - DNA, 19 bp, Mus musculus
  siRNA target sequence for Cyp39a1 (NM_018887.2,1358-1376).
gaaagaggcaaatttagat

SEQ ID NO: 608152 - DNA, 19 bp, Mus musculus
  siRNA target sequence for Cyp39a1 (NM_018887.2,1362-1380).
gaggcaaatttagataagt

SEQ ID NO: 608153 - DNA, 19 bp, Mus musculus
  siRNA target sequence for Cyp39a1 (NM_018887.2,1365-1383).
gcaaatttagataagtaca

SEQ ID NO: 608154 - DNA, 19 bp, Mus musculus
  siRNA target sequence for Cyp39a1 (NM_018887.2,1442-1460).
gtttgctctcttagagatt

SEQ ID NO: 608155 - DNA, 19 bp, Mus musculus
  siRNA target sequence for Cyp39a1 (NM_018887.2,1479-1497).
gtgctgtataagtacgaat

SEQ ID NO: 608156 - DNA, 19 bp, Mus musculus
  siRNA target sequence for Cyp39a1 (NM_018887.2,1503-1521).
cttctggacccattaccaa

SEQ ID NO: 608157 - DNA, 19 bp, Mus musculus
  siRNA target sequence for Cyp39a1 (NM_018887.2,1564-1582).
ggaaatgccggattgaata

SEQ ID NO: 608158 - DNA, 19 bp, Mus musculus
  siRNA target sequence for Cyp39a1 (NM_018887.2,1565-1583).
gaaatgccggattgaatat

SEQ ID NO: 608159 - DNA, 19 bp, Mus musculus
  siRNA target sequence for Cyp39a1 (NM_018887.2,1570-1588).
gccggattgaatataaaca

SEQ ID NO: 608160 - DNA, 19 bp, Mus musculus
  siRNA target sequence for Cyp39a1 (NM_018887.2,1574-1592).
gattgaatataaacaaaga

SEQ ID NO: 608161 - DNA, 19 bp, Mus musculus
  siRNA target sequence for Cyp11a1 (NM_019779.1,142-160).
cagtcctaggtccttcaat

SEQ ID NO: 608162 - DNA, 19 bp, Mus musculus
  siRNA target sequence for Cyp11a1 (NM_019779.1,146-164).
cctaggtccttcaatgaga

SEQ ID NO: 608163 - DNA, 19 bp, Mus musculus
  siRNA target sequence for Cyp11a1 (NM_019779.1,147-165).
ctaggtccttcaatgagat

SEQ ID NO: 608164 - DNA, 19 bp, Mus musculus
  siRNA target sequence for Cyp11a1 (NM_019779.1,219-237).
gtggcacacagaaaatcca

SEQ ID NO: 608165 - DNA, 19 bp, Mus musculus
  siRNA target sequence for Cyp11a1 (NM_019779.1,293-311).
ggcactttggagtcagttt

SEQ ID NO: 608166 - DNA, 19 bp, Mus musculus
  siRNA target sequence for Cyp11a1 (NM_019779.1,332-350).
gcgtcgatactcttctcat

SEQ ID NO: 608167 - DNA, 19 bp, Mus musculus
  siRNA target sequence for Cyp11a1 (NM_019779.1,392-410).
gtggcctatcaccagtatt

SEQ ID NO: 608168 - DNA, 19 bp, Mus musculus
  siRNA target sequence for Cyp11a1 (NM_019779.1,425-443).
ggggtcctgtttaagagtt

SEQ ID NO: 608169 - DNA, 19 bp, Mus musculus
  siRNA target sequence for Cyp11a1 (NM_019779.1,463-481).
ccgaatcgtcctaaaccaa

SEQ ID NO: 608170 - DNA, 19 bp, Mus musculus
  siRNA target sequence for Cyp11a1 (NM_019779.1,491-509).
gcgcctggagccatcaaga

SEQ ID NO: 608171 - DNA, 19 bp, Mus musculus
  siRNA target sequence for Cyp11a1 (NM_019779.1,531-549).
gtgtagctcaggacttcat

SEQ ID NO: 608172 - DNA, 19 bp, Mus musculus
  siRNA target sequence for Cyp11a1 (NM_019779.1,533-551).
gtagctcaggacttcatca

SEQ ID NO: 608173 - DNA, 19 bp, Mus musculus
  siRNA target sequence for Cyp11a1 (NM_019779.1,541-559).
ggacttcatcaaagtctta

SEQ ID NO: 608174 - DNA, 19 bp, Mus musculus
  siRNA target sequence for Cyp11a1 (NM_019779.1,564-582).
gacgcatcaagcagcaaaa

SEQ ID NO: 608175 - DNA, 19 bp, Mus musculus
  siRNA target sequence for Cyp11a1 (NM_019779.1,614-632).
gacctattccgcttttcct

SEQ ID NO: 608176 - DNA, 19 bp, Mus musculus
  siRNA target sequence for Cyp11a1 (NM_019779.1,635-653).
gagtccatcagcagtgtta

SEQ ID NO: 608177 - DNA, 19 bp, Mus musculus
  siRNA target sequence for Cyp11a1 (NM_019779.1,640-658).
catcagcagtgttatattt

SEQ ID NO: 608178 - DNA, 19 bp, Mus musculus
  siRNA target sequence for Cyp11a1 (NM_019779.1,700-718).
ggcccagcggttcatcaat

SEQ ID NO: 608179 - DNA, 19 bp, Mus musculus
  siRNA target sequence for Cyp11a1 (NM_019779.1,779-797).
cgactcctcagaactaaga

SEQ ID NO: 608180 - DNA, 19 bp, Mus musculus
  siRNA target sequence for Cyp11a1 (NM_019779.1,818-836).
gcctgggatgtgattttca

SEQ ID NO: 608181 - DNA, 19 bp, Mus musculus
  siRNA target sequence for Cyp11a1 (NM_019779.1,820-838).
ctgggatgtgattttcaat

SEQ ID NO: 608182 - DNA, 19 bp, Mus musculus
  siRNA target sequence for Cyp11a1 (NM_019779.1,1012-1030).
cctgcagtggaacctttat

SEQ ID NO: 608183 - DNA, 19 bp, Mus musculus
  siRNA target sequence for Cyp11a1 (NM_019779.1,1016-1034).
cagtggaacctttatgaga

SEQ ID NO: 608184 - DNA, 19 bp, Mus musculus
  siRNA target sequence for Cyp11a1 (NM_019779.1,1031-1049).
gagatggcacacaacttga

SEQ ID NO: 608185 - DNA, 19 bp, Mus musculus
  siRNA target sequence for Cyp11a1 (NM_019779.1,1192-1210).
gcagaggtacactgtgaat

SEQ ID NO: 608186 - DNA, 19 bp, Mus musculus
  siRNA target sequence for Cyp11a1 (NM_019779.1,1211-1229).
gacctggtgcttcgtaatt

SEQ ID NO: 608187 - DNA, 19 bp, Mus musculus
  siRNA target sequence for Cyp11a1 (NM_019779.1,1214-1232).
ctggtgcttcgtaattaca

SEQ ID NO: 608188 - DNA, 19 bp, Mus musculus
  siRNA target sequence for Cyp11a1 (NM_019779.1,1217-1235).
gtgcttcgtaattacaaga

SEQ ID NO: 608189 - DNA, 19 bp, Mus musculus
  siRNA target sequence for Cyp11a1 (NM_019779.1,1219-1237).
gcttcgtaattacaagatt

SEQ ID NO: 608190 - DNA, 19 bp, Mus musculus
  siRNA target sequence for Cyp11a1 (NM_019779.1,1289-1307).
ggcttctttcccaatccaa

SEQ ID NO: 608191 - DNA, 19 bp, Mus musculus
  siRNA target sequence for Cyp11a1 (NM_019779.1,1290-1308).
gcttctttcccaatccaaa

SEQ ID NO: 608192 - DNA, 19 bp, Mus musculus
  siRNA target sequence for Cyp11a1 (NM_019779.1,1320-1338).
caactcgttggctggaaaa

SEQ ID NO: 608193 - DNA, 19 bp, Mus musculus
  siRNA target sequence for Cyp11a1 (NM_019779.1,1453-1471).
gaacttcagaattgaagtt

SEQ ID NO: 608194 - DNA, 19 bp, Mus musculus
  siRNA target sequence for Cyp11a1 (NM_019779.1,1456-1474).
cttcagaattgaagttcaa

SEQ ID NO: 608195 - DNA, 19 bp, Mus musculus
  siRNA target sequence for Cyp11a1 (NM_019779.1,1571-1589).
gccgtgaccagaaaagaca

SEQ ID NO: 608196 - DNA, 19 bp, Mus musculus
  siRNA target sequence for Ch25h (NM_009890.1,511-529).
gcgctggcgacccaataca

SEQ ID NO: 608197 - DNA, 19 bp, Mus musculus
  siRNA target sequence for Ch25h (NM_009890.1,512-530).
cgctggcgacccaatacat

SEQ ID NO: 608198 - DNA, 19 bp, Mus musculus
  siRNA target sequence for Ch25h (NM_009890.1,514-532).
ctggcgacccaatacatga

SEQ ID NO: 608199 - DNA, 19 bp, Mus musculus
  siRNA target sequence for Ch25h (NM_009890.1,599-617).
cactcaccatctttacctt

SEQ ID NO: 608200 - DNA, 19 bp, Mus musculus
  siRNA target sequence for Ch25h (NM_009890.1,649-667).
gaccactcgggctatgact

SEQ ID NO: 608201 - DNA, 19 bp, Mus musculus
  siRNA target sequence for Ch25h (NM_009890.1,752-770).
gcaattttgctccttactt

SEQ ID NO: 608202 - DNA, 19 bp, Mus musculus
  siRNA target sequence for Sdfr2 (NM_009146.1,199-217).
ccaatggcaaagtaccaat

SEQ ID NO: 608203 - DNA, 19 bp, Mus musculus
  siRNA target sequence for Sdfr2 (NM_009146.1,228-246).
gggatgatcccccaacata

SEQ ID NO: 608204 - DNA, 19 bp, Mus musculus
  siRNA target sequence for Sdfr2 (NM_009146.1,229-247).
ggatgatcccccaacataa

SEQ ID NO: 608205 - DNA, 19 bp, Mus musculus
  siRNA target sequence for Sdfr2 (NM_009146.1,264-282).
gagcctattcaccaaatca

SEQ ID NO: 608206 - DNA, 19 bp, Mus musculus
  siRNA target sequence for Sdfr2 (NM_009146.1,266-284).
gcctattcaccaaatcaca

SEQ ID NO: 608207 - DNA, 19 bp, Mus musculus
  siRNA target sequence for Sdfr2 (NM_009146.1,287-305).
gagtcagacgacgttcaaa

SEQ ID NO: 608208 - DNA, 19 bp, Mus musculus
  siRNA target sequence for Sdfr2 (NM_009146.1,312-330).
gaccagatcgaagttactt

SEQ ID NO: 608209 - DNA, 19 bp, Mus musculus
  siRNA target sequence for Sdfr2 (NM_009146.1,314-332).
ccagatcgaagttacttta

SEQ ID NO: 608210 - DNA, 19 bp, Mus musculus
  siRNA target sequence for Sdfr2 (NM_009146.1,342-360).
ccatttagaggctttcttt

SEQ ID NO: 608211 - DNA, 19 bp, Mus musculus
  siRNA target sequence for Sdfr2 (NM_009146.1,452-470).
cgatgtacagggattagct

SEQ ID NO: 608212 - DNA, 19 bp, Mus musculus
  siRNA target sequence for Sdfr2 (NM_009146.1,534-552).
gccccagatcacatacgat

SEQ ID NO: 608213 - DNA, 19 bp, Mus musculus
  siRNA target sequence for Sdfr2 (NM_009146.1,596-614).
gattccgagtcccgtaatt

SEQ ID NO: 608214 - DNA, 19 bp, Mus musculus
  siRNA target sequence for Sdfr2 (NM_009146.1,607-625).
ccgtaatttcccaaccaaa

SEQ ID NO: 608215 - DNA, 19 bp, Mus musculus
  siRNA target sequence for Sdfr2 (NM_009146.1,635-653).
ctttacgacacctaaagct

SEQ ID NO: 608216 - DNA, 19 bp, Mus musculus
  siRNA target sequence for Sdfr2 (NM_009146.1,682-700).
ctgtctcacacttaaccaa

SEQ ID NO: 608217 - DNA, 19 bp, Mus musculus
  siRNA target sequence for Sdfr2 (NM_009146.1,692-710).
cttaaccaaaccattcagt

SEQ ID NO: 608218 - DNA, 19 bp, Mus musculus
  siRNA target sequence for Sdfr2 (NM_009146.1,739-757).
gtgtcaggagtcctttgaa

SEQ ID NO: 608219 - DNA, 19 bp, Mus musculus
  siRNA target sequence for Sdfr2 (NM_009146.1,840-858).
cccagtgacggctatgtgt

SEQ ID NO: 608220 - DNA, 19 bp, Mus musculus
  siRNA target sequence for Sdfr2 (NM_009146.1,849-867).
ggctatgtgtcgtttgcat

SEQ ID NO: 608221 - DNA, 19 bp, Mus musculus
  siRNA target sequence for Sdfr2 (NM_009146.1,850-868).
gctatgtgtcgtttgcatt

SEQ ID NO: 608222 - DNA, 19 bp, Mus musculus
  siRNA target sequence for Sdfr2 (NM_009146.1,851-869).
ctatgtgtcgtttgcattt

SEQ ID NO: 608223 - DNA, 19 bp, Mus musculus
  siRNA target sequence for Sdfr2 (NM_009146.1,918-936).
gaggaccagacagtagata

SEQ ID NO: 608224 - DNA, 19 bp, Mus musculus
  siRNA target sequence for Sdfr2 (NM_009146.1,953-971).
gacagggagaagttatcct

SEQ ID NO: 608225 - DNA, 19 bp, Mus musculus
  siRNA target sequence for Sdfr2 (NM_009146.1,1017-1035).
gcggacggcgtcatacagt

SEQ ID NO: 608226 - DNA, 19 bp, Mus musculus
  siRNA target sequence for Sdfr2 (NM_009146.1,1023-1041).
ggcgtcatacagtgttcat

SEQ ID NO: 608227 - DNA, 19 bp, Mus musculus
  siRNA target sequence for Sdfr2 (NM_009146.1,1024-1042).
gcgtcatacagtgttcatt

SEQ ID NO: 608228 - DNA, 19 bp, Mus musculus
  siRNA target sequence for Sdfr2 (NM_009146.1,1026-1044).
gtcatacagtgttcattca

SEQ ID NO: 608229 - DNA, 19 bp, Mus musculus
  siRNA target sequence for Sdfr2 (NM_009146.1,1088-1106).
gaatgagagctactacata

SEQ ID NO: 608230 - DNA, 19 bp, Mus musculus
  siRNA target sequence for Sdfr2 (NM_009146.1,1092-1110).
gagagctactacatattct

SEQ ID NO: 608231 - DNA, 19 bp, Mus musculus
  siRNA target sequence for Sdfr2 (NM_009146.1,1126-1144).
ctcacgacggccgaatatt

SEQ ID NO: 608232 - DNA, 19 bp, Mus musculus
  siRNA target sequence for Sdfr2 (NM_009146.1,1128-1146).
cacgacggccgaatattta

SEQ ID NO: 608233 - DNA, 19 bp, Mus musculus
  siRNA target sequence for Sdfr2 (NM_009146.1,1151-1169).
ctctcagcaacctttgata

SEQ ID NO: 608234 - DNA, 19 bp, Mus musculus
  siRNA target sequence for Sdfr2 (NM_009146.1,1161-1179).
cctttgataacatatgaaa

SEQ ID NO: 608235 - DNA, 19 bp, Mus musculus
  siRNA target sequence for Sdfr2 (NM_009146.1,1243-1261).
ctcatggtgccttaatgtt

SEQ ID NO: 608236 - DNA, 19 bp, Mus musculus
  siRNA target sequence for Sdfr2 (NM_009146.1,1299-1317).
gttgcccggttcttcagat

SEQ ID NO: 608237 - DNA, 19 bp, Mus musculus
  siRNA target sequence for Sdfr2 (NM_009146.1,1304-1322).
ccggttcttcagatctgtt

SEQ ID NO: 608238 - DNA, 19 bp, Mus musculus
  siRNA target sequence for Sdfr2 (NM_009146.1,1318-1336).
ctgtttggtcgaaagcttt

SEQ ID NO: 608239 - DNA, 19 bp, Mus musculus
  siRNA target sequence for Sdfr2 (NM_009146.1,1367-1385).
gcatcggatgctcatgata

SEQ ID NO: 608240 - DNA, 19 bp, Mus musculus
  siRNA target sequence for Sdfr2 (NM_009146.1,1466-1484).
cccgtacctcggttgtaca

SEQ ID NO: 608241 - DNA, 19 bp, Mus musculus
  siRNA target sequence for Sdfr2 (NM_009146.1,1522-1540).
ccttcagaccacctttaca

SEQ ID NO: 608242 - DNA, 19 bp, Mus musculus
  siRNA target sequence for Sdfr2 (NM_009146.1,1545-1563).
ccaaggaggcaagtgttta

SEQ ID NO: 608243 - DNA, 19 bp, Mus musculus
  siRNA target sequence for Sdfr2 (NM_009146.1,1583-1601).
ggggacagccgctagaata

SEQ ID NO: 608244 - DNA, 19 bp, Mus musculus
  siRNA target sequence for Sdfr2 (NM_009146.1,1612-1630).
cagcaatgttcctaggaat

SEQ ID NO: 608245 - DNA, 19 bp, Mus musculus
  siRNA target sequence for Sdfr2 (NM_009146.1,1732-1750).
cttaccggctctctagaaa

SEQ ID NO: 608246 - DNA, 19 bp, Mus musculus
  siRNA target sequence for Sdfr2 (NM_009146.1,1736-1754).
ccggctctctagaaaagtt

SEQ ID NO: 608247 - DNA, 19 bp, Mus musculus
  siRNA target sequence for Sdfr2 (NM_009146.1,1738-1756).
ggctctctagaaaagttga

SEQ ID NO: 608248 - DNA, 19 bp, Mus musculus
  siRNA target sequence for Sdfr2 (NM_009146.1,1742-1760).
ctctagaaaagttgaaata

SEQ ID NO: 608249 - DNA, 19 bp, Mus musculus
  siRNA target sequence for Sdfr2 (NM_009146.1,1744-1762).
ctagaaaagttgaaatact

SEQ ID NO: 608250 - DNA, 19 bp, Mus musculus
  siRNA target sequence for Sdfr2 (NM_009146.1,1769-1787).
cgataggattcaaatcctt

SEQ ID NO: 608251 - DNA, 19 bp, Mus musculus
  siRNA target sequence for Sdfr2 (NM_009146.1,1809-1827).
gcagagggtcatgttttta

SEQ ID NO: 608252 - DNA, 19 bp, Mus musculus
  siRNA target sequence for Sdfr2 (NM_009146.1,1835-1853).
ggtgttggccgtttacata

SEQ ID NO: 608253 - DNA, 19 bp, Mus musculus
  siRNA target sequence for Fmo1 (NM_010231.2,438-456).
ggagattcacggaacatgt

SEQ ID NO: 608254 - DNA, 19 bp, Mus musculus
  siRNA target sequence for Fmo1 (NM_010231.2,439-457).
gagattcacggaacatgtt

SEQ ID NO: 608255 - DNA, 19 bp, Mus musculus
  siRNA target sequence for Fmo1 (NM_010231.2,617-635).
cagagatgcatttatttca

SEQ ID NO: 608256 - DNA, 19 bp, Mus musculus
  siRNA target sequence for Fmo1 (NM_010231.2,619-637).
gagatgcatttatttcaat

SEQ ID NO: 608257 - DNA, 19 bp, Mus musculus
  siRNA target sequence for Fmo1 (NM_010231.2,624-642).
gcatttatttcaataccaa

SEQ ID NO: 608258 - DNA, 19 bp, Mus musculus
  siRNA target sequence for Fmo1 (NM_010231.2,640-658).
caaagtgtgcagtataaca

SEQ ID NO: 608259 - DNA, 19 bp, Mus musculus
  siRNA target sequence for Fmo1 (NM_010231.2,704-722).
gtcacaaacgggaagcaaa

SEQ ID NO: 608260 - DNA, 19 bp, Mus musculus
  siRNA target sequence for Fmo1 (NM_010231.2,873-891).
gagtccttgtagttggaat

SEQ ID NO: 608261 - DNA, 19 bp, Mus musculus
  siRNA target sequence for Fmo1 (NM_010231.2,893-911).
gggaattctggcacagata

SEQ ID NO: 608262 - DNA, 19 bp, Mus musculus
  siRNA target sequence for Fmo1 (NM_010231.2,894-912).
ggaattctggcacagatat

SEQ ID NO: 608263 - DNA, 19 bp, Mus musculus
  siRNA target sequence for Fmo1 (NM_010231.2,927-945).
gccacttagcaaaaaaggt

SEQ ID NO: 608264 - DNA, 19 bp, Mus musculus
  siRNA target sequence for Fmo1 (NM_010231.2,973-991).
ggtgatcagccgagtcttt

SEQ ID NO: 608265 - DNA, 19 bp, Mus musculus
  siRNA target sequence for Fmo1 (NM_010231.2,976-994).
gatcagccgagtctttgat

SEQ ID NO: 608266 - DNA, 19 bp, Mus musculus
  siRNA target sequence for Fmo1 (NM_010231.2,1005-1023).
catgggacatgatattcat

SEQ ID NO: 608267 - DNA, 19 bp, Mus musculus
  siRNA target sequence for Fmo1 (NM_010231.2,1153-1171).
gagagagcctgtgctaaat

SEQ ID NO: 608268 - DNA, 19 bp, Mus musculus
  siRNA target sequence for Fmo1 (NM_010231.2,1291-1309).
cgtctttgcgactggatat

SEQ ID NO: 608269 - DNA, 19 bp, Mus musculus
  siRNA target sequence for Fmo1 (NM_010231.2,1292-1310).
gtctttgcgactggatata

SEQ ID NO: 608270 - DNA, 19 bp, Mus musculus
  siRNA target sequence for Fmo1 (NM_010231.2,1294-1312).
ctttgcgactggatatact

SEQ ID NO: 608271 - DNA, 19 bp, Mus musculus
  siRNA target sequence for Fmo1 (NM_010231.2,1330-1348).
cgatgaatccgtagtgaaa

SEQ ID NO: 608272 - DNA, 19 bp, Mus musculus
  siRNA target sequence for Fmo1 (NM_010231.2,1368-1386).
cactgtacaagtacatctt

SEQ ID NO: 608273 - DNA, 19 bp, Mus musculus
  siRNA target sequence for Fmo1 (NM_010231.2,1391-1409).
gcgcatctgccaaaaccaa

SEQ ID NO: 608274 - DNA, 19 bp, Mus musculus
  siRNA target sequence for Fmo1 (NM_010231.2,1479-1497).
gggttgttcaggtcctaaa

SEQ ID NO: 608275 - DNA, 19 bp, Mus musculus
  siRNA target sequence for Fmo1 (NM_010231.2,1515-1533).
caccgccaagtgtcatgat

SEQ ID NO: 608276 - DNA, 19 bp, Mus musculus
  siRNA target sequence for Fmo1 (NM_010231.2,1526-1544).
gtcatgatggaggaagtta

SEQ ID NO: 608277 - DNA, 19 bp, Mus musculus
  siRNA target sequence for Fmo1 (NM_010231.2,1528-1546).
catgatggaggaagttaat

SEQ ID NO: 608278 - DNA, 19 bp, Mus musculus
  siRNA target sequence for Fmo1 (NM_010231.2,1585-1603).
ctactgcaaggctttgcaa

SEQ ID NO: 608279 - DNA, 19 bp, Mus musculus
  siRNA target sequence for Fmo1 (NM_010231.2,1739-1757).
ctgactggtccaggaaaat

SEQ ID NO: 608280 - DNA, 19 bp, Mus musculus
  siRNA target sequence for Fmo1 (NM_010231.2,1793-1811).
gaccgaacagtgaaagtca

SEQ ID NO: 608281 - DNA, 19 bp, Mus musculus
  siRNA target sequence for Fmo1 (NM_010231.2,1810-1828).
caccaaaactcgaaccata

SEQ ID NO: 608282 - DNA, 19 bp, Mus musculus
  siRNA target sequence for Fmo1 (NM_010231.2,1813-1831).
caaaactcgaaccatacaa

SEQ ID NO: 608283 - DNA, 19 bp, Mus musculus
  siRNA target sequence for Fmo1 (NM_010231.2,1886-1904).
ctcatagctgtcttcttga

SEQ ID NO: 608284 - DNA, 19 bp, Mus musculus
  siRNA target sequence for Fmo1 (NM_010231.2,1888-1906).
catagctgtcttcttgatt

SEQ ID NO: 608285 - DNA, 19 bp, Mus musculus
  siRNA target sequence for Fmo3 (NM_008030.1,299-317).
caagaatacatcacttcat

SEQ ID NO: 608286 - DNA, 19 bp, Mus musculus
  siRNA target sequence for Fmo3 (NM_008030.1,331-349).
gaacctcctgaaatacata

SEQ ID NO: 608287 - DNA, 19 bp, Mus musculus
  siRNA target sequence for Fmo3 (NM_008030.1,360-378).
cacctgtaaccagtataaa

SEQ ID NO: 608288 - DNA, 19 bp, Mus musculus
  siRNA target sequence for Fmo3 (NM_008030.1,362-380).
cctgtaaccagtataaata

SEQ ID NO: 608289 - DNA, 19 bp, Mus musculus
  siRNA target sequence for Fmo3 (NM_008030.1,363-381).
ctgtaaccagtataaataa

SEQ ID NO: 608290 - DNA, 19 bp, Mus musculus
  siRNA target sequence for Fmo3 (NM_008030.1,430-448).
gcacggtaaaaaagaaaca

SEQ ID NO: 608291 - DNA, 19 bp, Mus musculus
  siRNA target sequence for Fmo3 (NM_008030.1,452-470).
gtctttgatgctacaatga

SEQ ID NO: 608292 - DNA, 19 bp, Mus musculus
  siRNA target sequence for Fmo3 (NM_008030.1,562-580).
ctataaggaaccaggaata

SEQ ID NO: 608293 - DNA, 19 bp, Mus musculus
  siRNA target sequence for Fmo3 (NM_008030.1,825-843).
gattcaagcacgaaaacta

SEQ ID NO: 608294 - DNA, 19 bp, Mus musculus
  siRNA target sequence for Fmo3 (NM_008030.1,845-863).
ggtttggtgcctttaaaca

SEQ ID NO: 608295 - DNA, 19 bp, Mus musculus
  siRNA target sequence for Fmo3 (NM_008030.1,1196-1214).
cgctgggcagcacaagtaa

SEQ ID NO: 608296 - DNA, 19 bp, Mus musculus
  siRNA target sequence for Fmo3 (NM_008030.1,1227-1245).
gcactttgccttctgtaaa

SEQ ID NO: 608297 - DNA, 19 bp, Mus musculus
  siRNA target sequence for Fmo3 (NM_008030.1,1236-1254).
cttctgtaaacgacatgat

SEQ ID NO: 608298 - DNA, 19 bp, Mus musculus
  siRNA target sequence for Fmo3 (NM_008030.1,1277-1295).
ggggaaaagttcaaatggt

SEQ ID NO: 608299 - DNA, 19 bp, Mus musculus
  siRNA target sequence for Fmo3 (NM_008030.1,1278-1296).
gggaaaagttcaaatggta

SEQ ID NO: 608300 - DNA, 19 bp, Mus musculus
  siRNA target sequence for Fmo3 (NM_008030.1,1401-1419).
ccaggttggctgtagaagt

SEQ ID NO: 608301 - DNA, 19 bp, Mus musculus
  siRNA target sequence for Fmo3 (NM_008030.1,1408-1426).
ggctgtagaagtgttcttt

SEQ ID NO: 608302 - DNA, 19 bp, Mus musculus
  siRNA target sequence for Fmo3 (NM_008030.1,1512-1530).
gatcactgaagcctatgaa

SEQ ID NO: 608303 - DNA, 19 bp, Mus musculus
  siRNA target sequence for Fmo3 (NM_008030.1,1531-1549).
gacgcgtgtcgtcagtaaa

SEQ ID NO: 608304 - DNA, 19 bp, Mus musculus
  siRNA target sequence for Fmo3 (NM_008030.1,1533-1551).
cgcgtgtcgtcagtaaagt

SEQ ID NO: 608305 - DNA, 19 bp, Mus musculus
  siRNA target sequence for Fmo3 (NM_008030.1,1534-1552).
gcgtgtcgtcagtaaagtt

SEQ ID NO: 608306 - DNA, 19 bp, Mus musculus
  siRNA target sequence for Fmo3 (NM_008030.1,1536-1554).
gtgtcgtcagtaaagttca

SEQ ID NO: 608307 - DNA, 19 bp, Mus musculus
  siRNA target sequence for Fmo3 (NM_008030.1,1558-1576).
gtcttgctctcacttctat

SEQ ID NO: 608308 - DNA, 19 bp, Mus musculus
  siRNA target sequence for Fmo5 (NM_010232.1,1067-1085).
ctcccaagtcctagagtat

SEQ ID NO: 608309 - DNA, 19 bp, Mus musculus
  siRNA target sequence for Fmo5 (NM_010232.1,1069-1087).
cccaagtcctagagtattt

SEQ ID NO: 608310 - DNA, 19 bp, Mus musculus
  siRNA target sequence for Fmo5 (NM_010232.1,1088-1106).
caggatgtatgccaaagaa

SEQ ID NO: 608311 - DNA, 19 bp, Mus musculus
  siRNA target sequence for Fmo5 (NM_010232.1,1112-1130).
ccttctcaaatatatccaa

SEQ ID NO: 608312 - DNA, 19 bp, Mus musculus
  siRNA target sequence for Fmo5 (NM_010232.1,1277-1295).
cctgcccctggaaagcttt

SEQ ID NO: 608313 - DNA, 19 bp, Mus musculus
  siRNA target sequence for Fmo5 (NM_010232.1,1325-1343).
ctttcacagccgagactat

SEQ ID NO: 608314 - DNA, 19 bp, Mus musculus
  siRNA target sequence for Fmo5 (NM_010232.1,1364-1382).
cgggaagagggtcattgta

SEQ ID NO: 608315 - DNA, 19 bp, Mus musculus
  siRNA target sequence for Fmo5 (NM_010232.1,1366-1384).
ggaagagggtcattgtaat

SEQ ID NO: 608316 - DNA, 19 bp, Mus musculus
  siRNA target sequence for Fmo5 (NM_010232.1,1405-1423).
gggatctggctgtagagat

SEQ ID NO: 608317 - DNA, 19 bp, Mus musculus
  siRNA target sequence for Fmo5 (NM_010232.1,1406-1424).
ggatctggctgtagagatt

SEQ ID NO: 608318 - DNA, 19 bp, Mus musculus
  siRNA target sequence for Fmo5 (NM_010232.1,1407-1425).
gatctggctgtagagatta

SEQ ID NO: 608319 - DNA, 19 bp, Mus musculus
  siRNA target sequence for Fmo5 (NM_010232.1,1488-1506).
ggcaagcatggatatccta

SEQ ID NO: 608320 - DNA, 19 bp, Mus musculus
  siRNA target sequence for Fmo5 (NM_010232.1,1518-1536).
ctctcttctcggattatgt

SEQ ID NO: 608321 - DNA, 19 bp, Mus musculus
  siRNA target sequence for Fmo5 (NM_010232.1,1522-1540).
cttctcggattatgtacta

SEQ ID NO: 608322 - DNA, 19 bp, Mus musculus
  siRNA target sequence for Fmo5 (NM_010232.1,1525-1543).
ctcggattatgtactactt

SEQ ID NO: 608323 - DNA, 19 bp, Mus musculus
  siRNA target sequence for Fmo5 (NM_010232.1,1527-1545).
cggattatgtactacttgt

SEQ ID NO: 608324 - DNA, 19 bp, Mus musculus
  siRNA target sequence for Fmo5 (NM_010232.1,1538-1556).
ctacttgtcacgtatctgt

SEQ ID NO: 608325 - DNA, 19 bp, Mus musculus
  siRNA target sequence for Fmo5 (NM_010232.1,1557-1575).
ggtccatcactaaaaaaca

SEQ ID NO: 608326 - DNA, 19 bp, Mus musculus
  siRNA target sequence for Fmo5 (NM_010232.1,1560-1578).
ccatcactaaaaaacaact

SEQ ID NO: 608327 - DNA, 19 bp, Mus musculus
  siRNA target sequence for Fmo5 (NM_010232.1,1598-1616).
ccaaaggtttgatcatgaa

SEQ ID NO: 608328 - DNA, 19 bp, Mus musculus
  siRNA target sequence for Fmo5 (NM_010232.1,1619-1637).
gtttggcctgaaacctaaa

SEQ ID NO: 608329 - DNA, 19 bp, Mus musculus
  siRNA target sequence for Fmo5 (NM_010232.1,1768-1786).
gggaggatggcattgatgt

SEQ ID NO: 608330 - DNA, 19 bp, Mus musculus
  siRNA target sequence for Fmo5 (NM_010232.1,1835-1853).
ctctgtcaaagtagtcaaa

SEQ ID NO: 608331 - DNA, 19 bp, Mus musculus
  siRNA target sequence for Fmo5 (NM_010232.1,1856-1874).
caaggtgtccttgtacaaa

SEQ ID NO: 608332 - DNA, 19 bp, Mus musculus
  siRNA target sequence for Fmo5 (NM_010232.1,1887-1905).
cctaacctggaaaaaccaa

SEQ ID NO: 608333 - DNA, 19 bp, Mus musculus
  siRNA target sequence for Fmo5 (NM_010232.1,1912-1930).
caatcatcggcttaattca

SEQ ID NO: 608334 - DNA, 19 bp, Mus musculus
  siRNA target sequence for Fmo5 (NM_010232.1,1975-1993).
gggccactcaagtgttcaa

SEQ ID NO: 608335 - DNA, 19 bp, Mus musculus
  siRNA target sequence for Fmo5 (NM_010232.1,1976-1994).
ggccactcaagtgttcaaa

SEQ ID NO: 608336 - DNA, 19 bp, Mus musculus
  siRNA target sequence for Fmo5 (NM_010232.1,2003-2021).
gaaattgccctcacaaagt

SEQ ID NO: 608337 - DNA, 19 bp, Mus musculus
  siRNA target sequence for Fmo5 (NM_010232.1,2092-2110).
ccatccagggagactatat

SEQ ID NO: 608338 - DNA, 19 bp, Mus musculus
  siRNA target sequence for Fmo5 (NM_010232.1,2143-2161).
gtgtcaggcccaatatcca

SEQ ID NO: 608339 - DNA, 19 bp, Mus musculus
  siRNA target sequence for Fmo5 (NM_010232.1,2257-2275).
ctggagcccggaaaactat

SEQ ID NO: 608340 - DNA, 19 bp, Mus musculus
  siRNA target sequence for Fmo5 (NM_010232.1,2260-2278).
gagcccggaaaactattct

SEQ ID NO: 608341 - DNA, 19 bp, Mus musculus
  siRNA target sequence for Fmo5 (NM_010232.1,2262-2280).
gcccggaaaactattctca

SEQ ID NO: 608342 - DNA, 19 bp, Mus musculus
  siRNA target sequence for Fmo5 (NM_010232.1,2298-2316).
cggaagcctctgatgacaa

SEQ ID NO: 608343 - DNA, 19 bp, Mus musculus
  siRNA target sequence for Sqle (NM_009270.1,641-659).
gctaccttcacctattttt

SEQ ID NO: 608344 - DNA, 19 bp, Mus musculus
  siRNA target sequence for Sqle (NM_009270.1,805-823).
cgctgccttctcggatatt

SEQ ID NO: 608345 - DNA, 19 bp, Mus musculus
  siRNA target sequence for Sqle (NM_009270.1,807-825).
ctgccttctcggatattct

SEQ ID NO: 608346 - DNA, 19 bp, Mus musculus
  siRNA target sequence for Sqle (NM_009270.1,809-827).
gccttctcggatattctct

SEQ ID NO: 608347 - DNA, 19 bp, Mus musculus
  siRNA target sequence for Sqle (NM_009270.1,856-874).
ggccaagtcacctgaatca

SEQ ID NO: 608348 - DNA, 19 bp, Mus musculus
  siRNA target sequence for Sqle (NM_009270.1,914-932).
gaaatcggtctttcagaaa

SEQ ID NO: 608349 - DNA, 19 bp, Mus musculus
  siRNA target sequence for Sqle (NM_009270.1,978-996).
cggacccggaagtgatcat

SEQ ID NO: 608350 - DNA, 19 bp, Mus musculus
  siRNA target sequence for Sqle (NM_009270.1,1062-1080).
cggtcatcgagagagattt

SEQ ID NO: 608351 - DNA, 19 bp, Mus musculus
  siRNA target sequence for Sqle (NM_009270.1,1063-1081).
ggtcatcgagagagattta

SEQ ID NO: 608352 - DNA, 19 bp, Mus musculus
  siRNA target sequence for Sqle (NM_009270.1,1064-1082).
gtcatcgagagagatttaa

SEQ ID NO: 608353 - DNA, 19 bp, Mus musculus
  siRNA target sequence for Sqle (NM_009270.1,1150-1168).
ccttggagatacagtagaa

SEQ ID NO: 608354 - DNA, 19 bp, Mus musculus
  siRNA target sequence for Sqle (NM_009270.1,1169-1187).
ggtctcaatgcccatcata

SEQ ID NO: 608355 - DNA, 19 bp, Mus musculus
  siRNA target sequence for Sqle (NM_009270.1,1170-1188).
gtctcaatgcccatcatat

SEQ ID NO: 608356 - DNA, 19 bp, Mus musculus
  siRNA target sequence for Sqle (NM_009270.1,1174-1192).
caatgcccatcatatacat

SEQ ID NO: 608357 - DNA, 19 bp, Mus musculus
  siRNA target sequence for Sqle (NM_009270.1,1194-1212).
gctacatagttcatgacta

SEQ ID NO: 608358 - DNA, 19 bp, Mus musculus
  siRNA target sequence for Sqle (NM_009270.1,1195-1213).
ctacatagttcatgactat

SEQ ID NO: 608359 - DNA, 19 bp, Mus musculus
  siRNA target sequence for Sqle (NM_009270.1,1267-1285).
gcagagtggaattgctttt

SEQ ID NO: 608360 - DNA, 19 bp, Mus musculus
  siRNA target sequence for Sqle (NM_009270.1,1289-1307).
catggccgattcatcatga

SEQ ID NO: 608361 - DNA, 19 bp, Mus musculus
  siRNA target sequence for Sqle (NM_009270.1,1328-1346).
gcagagcccaatgtaaagt

SEQ ID NO: 608362 - DNA, 19 bp, Mus musculus
  siRNA target sequence for Sqle (NM_009270.1,1329-1347).
cagagcccaatgtaaagtt

SEQ ID NO: 608363 - DNA, 19 bp, Mus musculus
  siRNA target sequence for Sqle (NM_009270.1,1331-1349).
gagcccaatgtaaagttta

SEQ ID NO: 608364 - DNA, 19 bp, Mus musculus
  siRNA target sequence for Sqle (NM_009270.1,1333-1351).
gcccaatgtaaagtttata

SEQ ID NO: 608365 - DNA, 19 bp, Mus musculus
  siRNA target sequence for Sqle (NM_009270.1,1389-1407).
ctgtaatcggcgtgcaata

SEQ ID NO: 608366 - DNA, 19 bp, Mus musculus
  siRNA target sequence for Sqle (NM_009270.1,1391-1409).
gtaatcggcgtgcaataca

SEQ ID NO: 608367 - DNA, 19 bp, Mus musculus
  siRNA target sequence for Sqle (NM_009270.1,1526-1544).
cacttcgttggcttcctta

SEQ ID NO: 608368 - DNA, 19 bp, Mus musculus
  siRNA target sequence for Sqle (NM_009270.1,1599-1617).
ccagtccagttctcatcta

SEQ ID NO: 608369 - DNA, 19 bp, Mus musculus
  siRNA target sequence for Sqle (NM_009270.1,1632-1650).
gtgaaactagggtacttgt

SEQ ID NO: 608370 - DNA, 19 bp, Mus musculus
  siRNA target sequence for Sqle (NM_009270.1,1638-1656).
ctagggtacttgttgatat

SEQ ID NO: 608371 - DNA, 19 bp, Mus musculus
  siRNA target sequence for Sqle (NM_009270.1,1659-1677).
ggggagaattgccaagaaa

SEQ ID NO: 608372 - DNA, 19 bp, Mus musculus
  siRNA target sequence for Sqle (NM_009270.1,1670-1688).
ccaagaaacctaagagaat

SEQ ID NO: 608373 - DNA, 19 bp, Mus musculus
  siRNA target sequence for Sqle (NM_009270.1,1671-1689).
caagaaacctaagagaata

SEQ ID NO: 608374 - DNA, 19 bp, Mus musculus
  siRNA target sequence for Sqle (NM_009270.1,1723-1741).
gcacctgaaggagtcattt

SEQ ID NO: 608375 - DNA, 19 bp, Mus musculus
  siRNA target sequence for Sqle (NM_009270.1,1810-1828).
caaacgaggcgtccttatt

SEQ ID NO: 608376 - DNA, 19 bp, Mus musculus
  siRNA target sequence for Sqle (NM_009270.1,1846-1864).
cctgaggcaccctcttact

SEQ ID NO: 608377 - DNA, 19 bp, Mus musculus
  siRNA target sequence for Sqle (NM_009270.1,1880-1898).
gttgctttaaaagatataa

SEQ ID NO: 608378 - DNA, 19 bp, Mus musculus
  siRNA target sequence for Sqle (NM_009270.1,1924-1942).
cattcctgacctttatgat

SEQ ID NO: 608379 - DNA, 19 bp, Mus musculus
  siRNA target sequence for Sqle (NM_009270.1,1950-1968).
ctattttccaggccaaaaa

SEQ ID NO: 608380 - DNA, 19 bp, Mus musculus
  siRNA target sequence for Sqle (NM_009270.1,1958-1976).
caggccaaaaaatcattct

SEQ ID NO: 608381 - DNA, 19 bp, Mus musculus
  siRNA target sequence for Sqle (NM_009270.1,1992-2010).
ggacccattcctttgttgt

SEQ ID NO: 608382 - DNA, 19 bp, Mus musculus
  siRNA target sequence for Sqle (NM_009270.1,2027-2045).
gccttgtatgaattatttt

SEQ ID NO: 608383 - DNA, 19 bp, Mus musculus
  siRNA target sequence for Sqle (NM_009270.1,2154-2172).
ctcaccctctggtgttgat

SEQ ID NO: 608384 - DNA, 19 bp, Mus musculus
  siRNA target sequence for Sqle (NM_009270.1,2167-2185).
gttgattcgacacttcttt

SEQ ID NO: 608385 - DNA, 19 bp, Mus musculus
  siRNA target sequence for Sqle (NM_009270.1,2192-2210).
gcaatctacgccacgtatt

SEQ ID NO: 608386 - DNA, 19 bp, Mus musculus
  siRNA target sequence for Sqle (NM_009270.1,2193-2211).
caatctacgccacgtattt

SEQ ID NO: 608387 - DNA, 19 bp, Mus musculus
  siRNA target sequence for Sqle (NM_009270.1,2203-2221).
cacgtatttctgcttcaaa

SEQ ID NO: 608388 - DNA, 19 bp, Mus musculus
  siRNA target sequence for Sqle (NM_009270.1,2223-2241).
cagagccgtgggctacaaa

SEQ ID NO: 608389 - DNA, 19 bp, Mus musculus
  siRNA target sequence for Sqle (NM_009270.1,2227-2245).
gccgtgggctacaaaacca

SEQ ID NO: 608390 - DNA, 19 bp, Mus musculus
  siRNA target sequence for Sqle (NM_009270.1,2259-2277).
gtagcggtgctgtactgta

SEQ ID NO: 608391 - DNA, 19 bp, Mus musculus
  siRNA target sequence for Sqle (NM_009270.1,2262-2280).
gcggtgctgtactgtacaa

SEQ ID NO: 608392 - DNA, 19 bp, Mus musculus
  siRNA target sequence for Sqle (NM_009270.1,2284-2302).
gtgttctatcctatttcca

SEQ ID NO: 608393 - DNA, 19 bp, Mus musculus
  siRNA target sequence for Sqle (NM_009270.1,2293-2311).
cctatttccactcatctat

SEQ ID NO: 608394 - DNA, 19 bp, Mus musculus
  siRNA target sequence for Sqle (NM_009270.1,2301-2319).
cactcatctattcagaaat

SEQ ID NO: 608395 - DNA, 19 bp, Mus musculus
  siRNA target sequence for Sqle (NM_009270.1,2303-2321).
ctcatctattcagaaatga

SEQ ID NO: 608396 - DNA, 19 bp, Mus musculus
  siRNA target sequence for Tyr (NM_011661.1,545-563).
gggtcaacacccatgttta

SEQ ID NO: 608397 - DNA, 19 bp, Mus musculus
  siRNA target sequence for Tyr (NM_011661.1,626-644).
cttgggggctctgaaatat

SEQ ID NO: 608398 - DNA, 19 bp, Mus musculus
  siRNA target sequence for Tyr (NM_011661.1,629-647).
gggggctctgaaatatgga

SEQ ID NO: 608399 - DNA, 19 bp, Mus musculus
  siRNA target sequence for Tyr (NM_011661.1,706-724).
gttattgtgggaacaagaa

SEQ ID NO: 608400 - DNA, 19 bp, Mus musculus
  siRNA target sequence for Tyr (NM_011661.1,712-730).
gtgggaacaagaaattcga

SEQ ID NO: 608401 - DNA, 19 bp, Mus musculus
  siRNA target sequence for Tyr (NM_011661.1,829-847).
ccctgaaaatcctaactta

SEQ ID NO: 608402 - DNA, 19 bp, Mus musculus
  siRNA target sequence for Tyr (NM_011661.1,833-851).
gaaaatcctaacttactca

SEQ ID NO: 608403 - DNA, 19 bp, Mus musculus
  siRNA target sequence for Tyr (NM_011661.1,888-906).
gtagcagatcagaagagta

SEQ ID NO: 608404 - DNA, 19 bp, Mus musculus
  siRNA target sequence for Tyr (NM_011661.1,891-909).
gcagatcagaagagtataa

SEQ ID NO: 608405 - DNA, 19 bp, Mus musculus
  siRNA target sequence for Tyr (NM_011661.1,941-959).
gagggaccactattacgta

SEQ ID NO: 608406 - DNA, 19 bp, Mus musculus
  siRNA target sequence for Tyr (NM_011661.1,943-961).
gggaccactattacgtaat

SEQ ID NO: 608407 - DNA, 19 bp, Mus musculus
  siRNA target sequence for Tyr (NM_011661.1,1002-1020).
cttcagcagatgtggaatt

SEQ ID NO: 608408 - DNA, 19 bp, Mus musculus
  siRNA target sequence for Tyr (NM_011661.1,1027-1045).
gagtttgacccagtatgaa

SEQ ID NO: 608409 - DNA, 19 bp, Mus musculus
  siRNA target sequence for Tyr (NM_011661.1,1043-1061).
gaatctggatcaatggata

SEQ ID NO: 608410 - DNA, 19 bp, Mus musculus
  siRNA target sequence for Tyr (NM_011661.1,1058-1076).
gatagaactgccaatttca

SEQ ID NO: 608411 - DNA, 19 bp, Mus musculus
  siRNA target sequence for Tyr (NM_011661.1,1083-1101).
gaaacacactggaaggatt

SEQ ID NO: 608412 - DNA, 19 bp, Mus musculus
  siRNA target sequence for Tyr (NM_011661.1,1120-1138).
gatagcagatccttctcaa

SEQ ID NO: 608413 - DNA, 19 bp, Mus musculus
  siRNA target sequence for Tyr (NM_011661.1,1124-1142).
gcagatccttctcaaagta

SEQ ID NO: 608414 - DNA, 19 bp, Mus musculus
  siRNA target sequence for Tyr (NM_011661.1,1148-1166).
cacaatgccttacatatct

SEQ ID NO: 608415 - DNA, 19 bp, Mus musculus
  siRNA target sequence for Tyr (NM_011661.1,1150-1168).
caatgccttacatatcttt

SEQ ID NO: 608416 - DNA, 19 bp, Mus musculus
  siRNA target sequence for Tyr (NM_011661.1,1200-1218).
cggccaacgatcccatttt

SEQ ID NO: 608417 - DNA, 19 bp, Mus musculus
  siRNA target sequence for Tyr (NM_011661.1,1204-1222).
caacgatcccatttttctt

SEQ ID NO: 608418 - DNA, 19 bp, Mus musculus
  siRNA target sequence for Tyr (NM_011661.1,1266-1284).
gaaggcaccgccctctttt

SEQ ID NO: 608419 - DNA, 19 bp, Mus musculus
  siRNA target sequence for Tyr (NM_011661.1,1343-1361).
cctttcataccgctctata

SEQ ID NO: 608420 - DNA, 19 bp, Mus musculus
  siRNA target sequence for Tyr (NM_011661.1,1348-1366).
cataccgctctatagaaat

SEQ ID NO: 608421 - DNA, 19 bp, Mus musculus
  siRNA target sequence for Tyr (NM_011661.1,1386-1404).
ccaaggatctgggatatga

SEQ ID NO: 608422 - DNA, 19 bp, Mus musculus
  siRNA target sequence for Tyr (NM_011661.1,1433-1451).
ggcttttacagaaattata

SEQ ID NO: 608423 - DNA, 19 bp, Mus musculus
  siRNA target sequence for Tyr (NM_011661.1,1554-1572).
ggctatgccttcagaagaa

SEQ ID NO: 608424 - DNA, 19 bp, Mus musculus
  siRNA target sequence for Cmah (NM_007717.1,174-192).
ggatcaatttttttcgaaa

SEQ ID NO: 608425 - DNA, 19 bp, Mus musculus
  siRNA target sequence for Cmah (NM_007717.1,198-216).
ctactgggaaagagtacat

SEQ ID NO: 608426 - DNA, 19 bp, Mus musculus
  siRNA target sequence for Cmah (NM_007717.1,271-289).
gggaggcctgttcatgaaa

SEQ ID NO: 608427 - DNA, 19 bp, Mus musculus
  siRNA target sequence for Cmah (NM_007717.1,275-293).
ggcctgttcatgaaagaca

SEQ ID NO: 608428 - DNA, 19 bp, Mus musculus
  siRNA target sequence for Cmah (NM_007717.1,286-304).
gaaagacatcgaggattta

SEQ ID NO: 608429 - DNA, 19 bp, Mus musculus
  siRNA target sequence for Cmah (NM_007717.1,305-323).
gatggaaggtccgttaaat

SEQ ID NO: 608430 - DNA, 19 bp, Mus musculus
  siRNA target sequence for Cmah (NM_007717.1,308-326).
ggaaggtccgttaaatgca

SEQ ID NO: 608431 - DNA, 19 bp, Mus musculus
  siRNA target sequence for Cmah (NM_007717.1,347-365).
gacgtgagcaccatgaaat

SEQ ID NO: 608432 - DNA, 19 bp, Mus musculus
  siRNA target sequence for Cmah (NM_007717.1,349-367).
cgtgagcaccatgaaatat

SEQ ID NO: 608433 - DNA, 19 bp, Mus musculus
  siRNA target sequence for Cmah (NM_007717.1,354-372).
gcaccatgaaatatatcaa

SEQ ID NO: 608434 - DNA, 19 bp, Mus musculus
  siRNA target sequence for Cmah (NM_007717.1,390-408).
gtcaagacgagctcgttat

SEQ ID NO: 608435 - DNA, 19 bp, Mus musculus
  siRNA target sequence for Cmah (NM_007717.1,395-413).
gacgagctcgttattgaaa

SEQ ID NO: 608436 - DNA, 19 bp, Mus musculus
  siRNA target sequence for Cmah (NM_007717.1,478-496).
caggtctcctgaagaatta

SEQ ID NO: 608437 - DNA, 19 bp, Mus musculus
  siRNA target sequence for Cmah (NM_007717.1,503-521).
ggggaagtacagataacat

SEQ ID NO: 608438 - DNA, 19 bp, Mus musculus
  siRNA target sequence for Cmah (NM_007717.1,505-523).
ggaagtacagataacatat

SEQ ID NO: 608439 - DNA, 19 bp, Mus musculus
  siRNA target sequence for Cmah (NM_007717.1,509-527).
gtacagataacatatctca

SEQ ID NO: 608440 - DNA, 19 bp, Mus musculus
  siRNA target sequence for Cmah (NM_007717.1,534-552).
cctgcatggacctcaagtt

SEQ ID NO: 608441 - DNA, 19 bp, Mus musculus
  siRNA target sequence for Cmah (NM_007717.1,553-571).
gggagacaagcgaatggta

SEQ ID NO: 608442 - DNA, 19 bp, Mus musculus
  siRNA target sequence for Cmah (NM_007717.1,554-572).
ggagacaagcgaatggtat

SEQ ID NO: 608443 - DNA, 19 bp, Mus musculus
  siRNA target sequence for Cmah (NM_007717.1,555-573).
gagacaagcgaatggtatt

SEQ ID NO: 608444 - DNA, 19 bp, Mus musculus
  siRNA target sequence for Cmah (NM_007717.1,583-601).
gttaattggccctgctttt

SEQ ID NO: 608445 - DNA, 19 bp, Mus musculus
  siRNA target sequence for Cmah (NM_007717.1,609-627).
gatggtggttgctacatga

SEQ ID NO: 608446 - DNA, 19 bp, Mus musculus
  siRNA target sequence for Cmah (NM_007717.1,662-680).
gcagacctcatttatatca

SEQ ID NO: 608447 - DNA, 19 bp, Mus musculus
  siRNA target sequence for Cmah (NM_007717.1,730-748).
ccagagacgaccagacatt

SEQ ID NO: 608448 - DNA, 19 bp, Mus musculus
  siRNA target sequence for Cmah (NM_007717.1,741-759).
cagacattcccatttatgt

SEQ ID NO: 608449 - DNA, 19 bp, Mus musculus
  siRNA target sequence for Cmah (NM_007717.1,799-817).
gagtggcgtcgggttaact

SEQ ID NO: 608450 - DNA, 19 bp, Mus musculus
  siRNA target sequence for Cmah (NM_007717.1,801-819).
gtggcgtcgggttaactaa

SEQ ID NO: 608451 - DNA, 19 bp, Mus musculus
  siRNA target sequence for Cmah (NM_007717.1,803-821).
ggcgtcgggttaactaaca

SEQ ID NO: 608452 - DNA, 19 bp, Mus musculus
  siRNA target sequence for Cmah (NM_007717.1,820-838).
catcaacgtggttccattt

SEQ ID NO: 608453 - DNA, 19 bp, Mus musculus
  siRNA target sequence for Cmah (NM_007717.1,823-841).
caacgtggttccatttgga

SEQ ID NO: 608454 - DNA, 19 bp, Mus musculus
  siRNA target sequence for Cmah (NM_007717.1,847-865).
gcaacaggtagacaaaagt

SEQ ID NO: 608455 - DNA, 19 bp, Mus musculus
  siRNA target sequence for Cmah (NM_007717.1,864-882).
gtctgcggttcatgatctt

SEQ ID NO: 608456 - DNA, 19 bp, Mus musculus
  siRNA target sequence for Cmah (NM_007717.1,866-884).
ctgcggttcatgatcttga

SEQ ID NO: 608457 - DNA, 19 bp, Mus musculus
  siRNA target sequence for Cmah (NM_007717.1,990-1008).
ctgagaaagttgctctaat

SEQ ID NO: 608458 - DNA, 19 bp, Mus musculus
  siRNA target sequence for Cmah (NM_007717.1,992-1010).
gagaaagttgctctaatga

SEQ ID NO: 608459 - DNA, 19 bp, Mus musculus
  siRNA target sequence for Cmah (NM_007717.1,1001-1019).
gctctaatgatgagtgatt

SEQ ID NO: 608460 - DNA, 19 bp, Mus musculus
  siRNA target sequence for Cmah (NM_007717.1,1002-1020).
ctctaatgatgagtgattt

SEQ ID NO: 608461 - DNA, 19 bp, Mus musculus
  siRNA target sequence for Cmah (NM_007717.1,1028-1046).
ggtgcatcaggctttccaa

SEQ ID NO: 608462 - DNA, 19 bp, Mus musculus
  siRNA target sequence for Cmah (NM_007717.1,1029-1047).
gtgcatcaggctttccaat

SEQ ID NO: 608463 - DNA, 19 bp, Mus musculus
  siRNA target sequence for Cmah (NM_007717.1,1035-1053).
caggctttccaatgacttt

SEQ ID NO: 608464 - DNA, 19 bp, Mus musculus
  siRNA target sequence for Cmah (NM_007717.1,1056-1074).
gtggtggaaaatttactga

SEQ ID NO: 608465 - DNA, 19 bp, Mus musculus
  siRNA target sequence for Cmah (NM_007717.1,1080-1098).
ggaaagcccagttcattaa

SEQ ID NO: 608466 - DNA, 19 bp, Mus musculus
  siRNA target sequence for Cmah (NM_007717.1,1093-1111).
cattaaggctgaaagaaga

SEQ ID NO: 608467 - DNA, 19 bp, Mus musculus
  siRNA target sequence for Cmah (NM_007717.1,1110-1128).
gaaagcttctgaattacaa

SEQ ID NO: 608468 - DNA, 19 bp, Mus musculus
  siRNA target sequence for Cmah (NM_007717.1,1205-1223).
gacaagtacattaaggaaa

SEQ ID NO: 608469 - DNA, 19 bp, Mus musculus
  siRNA target sequence for Cmah (NM_007717.1,1242-1260).
caaatcagctcaacaatct

SEQ ID NO: 608470 - DNA, 19 bp, Mus musculus
  siRNA target sequence for Cmah (NM_007717.1,1368-1386).
ctccagaggggacaaagat

SEQ ID NO: 608471 - DNA, 19 bp, Mus musculus
  siRNA target sequence for Cmah (NM_007717.1,1370-1388).
ccagaggggacaaagattt

SEQ ID NO: 608472 - DNA, 19 bp, Mus musculus
  siRNA target sequence for Cmah (NM_007717.1,1410-1428).
gcccgtacctggagatctt

SEQ ID NO: 608473 - DNA, 19 bp, Mus musculus
  siRNA target sequence for Cmah (NM_007717.1,1445-1463).
gatgaaatcttctgtcatt

SEQ ID NO: 608474 - DNA, 19 bp, Mus musculus
  siRNA target sequence for Cmah (NM_007717.1,1458-1476).
gtcattcatcctggattaa

SEQ ID NO: 608475 - DNA, 19 bp, Mus musculus
  siRNA target sequence for Cmah (NM_007717.1,1488-1506).
cgtgggctggatttaagaa

SEQ ID NO: 608476 - DNA, 19 bp, Mus musculus
  siRNA target sequence for Cmah (NM_007717.1,1489-1507).
gtgggctggatttaagaat

SEQ ID NO: 608477 - DNA, 19 bp, Mus musculus
  siRNA target sequence for Cmah (NM_007717.1,1494-1512).
ctggatttaagaattacaa

SEQ ID NO: 608478 - DNA, 19 bp, Mus musculus
  siRNA target sequence for Cmah (NM_007717.1,1519-1537).
ggtcaggatgattgaaaca

SEQ ID NO: 608479 - DNA, 19 bp, Mus musculus
  siRNA target sequence for Cmah (NM_007717.1,1583-1601).
gactttctagatttatcct

SEQ ID NO: 608480 - DNA, 19 bp, Mus musculus
  siRNA target sequence for Cmah (NM_007717.1,1617-1635).
ccagccgggagcatcctta

SEQ ID NO: 608481 - DNA, 19 bp, Mus musculus
  siRNA target sequence for Cmah (NM_007717.1,1618-1636).
cagccgggagcatccttat

SEQ ID NO: 608482 - DNA, 19 bp, Mus musculus
  siRNA target sequence for Cmah (NM_007717.1,1620-1638).
gccgggagcatccttatga

SEQ ID NO: 608483 - DNA, 19 bp, Mus musculus
  siRNA target sequence for Cmah (NM_007717.1,1621-1639).
ccgggagcatccttatgaa

SEQ ID NO: 608484 - DNA, 19 bp, Mus musculus
  siRNA target sequence for Cmah (NM_007717.1,1631-1649).
ccttatgaagaaatccata

SEQ ID NO: 608485 - DNA, 19 bp, Mus musculus
  siRNA target sequence for Cmah (NM_007717.1,1693-1711).
gtgggatgatctgtatatt

SEQ ID NO: 608486 - DNA, 19 bp, Mus musculus
  siRNA target sequence for Cmah (NM_007717.1,1729-1747).
gctgcgggaccctgatata

SEQ ID NO: 608487 - DNA, 19 bp, Mus musculus
  siRNA target sequence for Cmah (NM_007717.1,1730-1748).
ctgcgggaccctgatatat

SEQ ID NO: 608488 - DNA, 19 bp, Mus musculus
  siRNA target sequence for Cmah (NM_007717.1,1735-1753).
ggaccctgatatataccat

SEQ ID NO: 608489 - DNA, 19 bp, Mus musculus
  siRNA target sequence for Cmah (NM_007717.1,1777-1795).
gataaaactccctctaaca

SEQ ID NO: 608490 - DNA, 19 bp, Mus musculus
  siRNA target sequence for Cmah (NM_007717.1,1806-1824).
ggaagtcgttcctaatgca

SEQ ID NO: 608491 - DNA, 19 bp, Mus musculus
  siRNA target sequence for 4831428F09 (NM_172844.1,256-274).
ggcctaggagccatcaagt

SEQ ID NO: 608492 - DNA, 19 bp, Mus musculus
  siRNA target sequence for 4831428F09 (NM_172844.1,331-349).
ggcctgtggaaatttcaaa

SEQ ID NO: 608493 - DNA, 19 bp, Mus musculus
  siRNA target sequence for 4831428F09 (NM_172844.1,506-524).
gcttcagtcttctggatta

SEQ ID NO: 608494 - DNA, 19 bp, Mus musculus
  siRNA target sequence for 4831428F09 (NM_172844.1,517-535).
ctggattacatccgattta

SEQ ID NO: 608495 - DNA, 19 bp, Mus musculus
  siRNA target sequence for 4831428F09 (NM_172844.1,520-538).
gattacatccgatttaaga

SEQ ID NO: 608496 - DNA, 19 bp, Mus musculus
  siRNA target sequence for 4831428F09 (NM_172844.1,729-747).
ccacagccgagaatacaaa

SEQ ID NO: 608497 - DNA, 19 bp, Mus musculus
  siRNA target sequence for 4831428F09 (NM_172844.1,730-748).
cacagccgagaatacaaaa

SEQ ID NO: 608498 - DNA, 19 bp, Mus musculus
  siRNA target sequence for 4831428F09 (NM_172844.1,732-750).
cagccgagaatacaaaagt

SEQ ID NO: 608499 - DNA, 19 bp, Mus musculus
  siRNA target sequence for 4831428F09 (NM_172844.1,744-762).
caaaagtcctgaggattat

SEQ ID NO: 608500 - DNA, 19 bp, Mus musculus
  siRNA target sequence for 4831428F09 (NM_172844.1,822-840).
gcttggtcgtgtagcaaaa

SEQ ID NO: 608501 - DNA, 19 bp, Mus musculus
  siRNA target sequence for 4831428F09 (NM_172844.1,860-878).
gacgaggatcgtggatttt

SEQ ID NO: 608502 - DNA, 19 bp, Mus musculus
  siRNA target sequence for 4831428F09 (NM_172844.1,898-916).
ggctatcccatggatagtt

SEQ ID NO: 608503 - DNA, 19 bp, Mus musculus
  siRNA target sequence for 4831428F09 (NM_172844.1,900-918).
ctatcccatggatagttca

SEQ ID NO: 608504 - DNA, 19 bp, Mus musculus
  siRNA target sequence for 4831428F09 (NM_172844.1,904-922).
cccatggatagttcatttt

SEQ ID NO: 608505 - DNA, 19 bp, Mus musculus
  siRNA target sequence for 4831428F09 (NM_172844.1,992-1010).
ctctgaactcaagattcaa

SEQ ID NO: 608506 - DNA, 19 bp, Mus musculus
  siRNA target sequence for 4831428F09 (NM_172844.1,1004-1022).
gattcaaccatgcacatta

SEQ ID NO: 608507 - DNA, 19 bp, Mus musculus
  siRNA target sequence for 4831428F09 (NM_172844.1,1139-1157).
gaacggatgttcattttga

SEQ ID NO: 608508 - DNA, 19 bp, Mus musculus
  siRNA target sequence for 4831428F09 (NM_172844.1,1233-1251).
ggatctgattgcagttact

SEQ ID NO: 608509 - DNA, 19 bp, Mus musculus
  siRNA target sequence for 4831428F09 (NM_172844.1,1239-1257).
gattgcagttactgacaat

SEQ ID NO: 608510 - DNA, 19 bp, Mus musculus
  siRNA target sequence for 4831428F09 (NM_172844.1,1244-1262).
cagttactgacaatgaagt

SEQ ID NO: 608511 - DNA, 19 bp, Mus musculus
  siRNA target sequence for 4831428F09 (NM_172844.1,1338-1356).
gggcatcatcctacctatt

SEQ ID NO: 608512 - DNA, 19 bp, Mus musculus
  siRNA target sequence for 4831428F09 (NM_172844.1,1341-1359).
catcatcctacctattgca

SEQ ID NO: 608513 - DNA, 19 bp, Mus musculus
  siRNA target sequence for 4831428F09 (NM_172844.1,1376-1394).
gggctgtgcgggtgttcaa

SEQ ID NO: 608514 - DNA, 19 bp, Mus musculus
  siRNA target sequence for 4831428F09 (NM_172844.1,1462-1480).
gagaaacggtatgtaaaga

SEQ ID NO: 608515 - DNA, 19 bp, Mus musculus
  siRNA target sequence for 4831428F09 (NM_172844.1,1464-1482).
gaaacggtatgtaaagaca

SEQ ID NO: 608516 - DNA, 19 bp, Mus musculus
  siRNA target sequence for 4831428F09 (NM_172844.1,1498-1516).
caagtggaccatattgagt

SEQ ID NO: 608517 - DNA, 19 bp, Mus musculus
  siRNA target sequence for 4831428F09 (NM_172844.1,1705-1723).
cccttgaagacccgaatta

SEQ ID NO: 608518 - DNA, 19 bp, Mus musculus
  siRNA target sequence for 4831428F09 (NM_172844.1,1750-1768).
ggtctcttttggataaaga

SEQ ID NO: 608519 - DNA, 19 bp, Mus musculus
  siRNA target sequence for 4831428F09 (NM_172844.1,1787-1805).
catttctggttccaagttt

SEQ ID NO: 608520 - DNA, 19 bp, Mus musculus
  siRNA target sequence for 4831428F09 (NM_172844.1,1792-1810).
ctggttccaagtttaacat

SEQ ID NO: 608521 - DNA, 19 bp, Mus musculus
  siRNA target sequence for 4831428F09 (NM_172844.1,1795-1813).
gttccaagtttaacatact

SEQ ID NO: 608522 - DNA, 19 bp, Mus musculus
  siRNA target sequence for 4831428F09 (NM_172844.1,1798-1816).
ccaagtttaacatacttta

SEQ ID NO: 608523 - DNA, 19 bp, Mus musculus
  siRNA target sequence for 5330438E18Rik (NM_177282.2,355-373).
ccaggtcttcgagaacttt

SEQ ID NO: 608524 - DNA, 19 bp, Mus musculus
  siRNA target sequence for 5330438E18Rik (NM_177282.2,376-394).
gcaagctaccacatgcaaa

SEQ ID NO: 608525 - DNA, 19 bp, Mus musculus
  siRNA target sequence for 5330438E18Rik (NM_177282.2,449-467).
gaccataggaacttctact

SEQ ID NO: 608526 - DNA, 19 bp, Mus musculus
  siRNA target sequence for 5330438E18Rik (NM_177282.2,544-562).
ggagtacaagcgaggaaaa

SEQ ID NO: 608527 - DNA, 19 bp, Mus musculus
  siRNA target sequence for 5330438E18Rik (NM_177282.2,563-581).
gcctgctcgaacactaagt

SEQ ID NO: 608528 - DNA, 19 bp, Mus musculus
  siRNA target sequence for 5330438E18Rik (NM_177282.2,565-583).
ctgctcgaacactaagtgt

SEQ ID NO: 608529 - DNA, 19 bp, Mus musculus
  siRNA target sequence for 5330438E18Rik (NM_177282.2,610-628).
cttgcgcactgccattgaa

SEQ ID NO: 608530 - DNA, 19 bp, Mus musculus
  siRNA target sequence for 5330438E18Rik (NM_177282.2,613-631).
gcgcactgccattgaactt

SEQ ID NO: 608531 - DNA, 19 bp, Mus musculus
  siRNA target sequence for 5330438E18Rik (NM_177282.2,673-691).
caccttctcccggaacaat

SEQ ID NO: 608532 - DNA, 19 bp, Mus musculus
  siRNA target sequence for 5330438E18Rik (NM_177282.2,940-958).
ccacgccctgtctgacttt

SEQ ID NO: 608533 - DNA, 19 bp, Mus musculus
  siRNA target sequence for 5330438E18Rik (NM_177282.2,1048-1066).
catcaccgccaacttcata

SEQ ID NO: 608534 - DNA, 19 bp, Mus musculus
  siRNA target sequence for 5330438E18Rik (NM_177282.2,1107-1125).
gtggtgttgccttcatctt

SEQ ID NO: 608535 - DNA, 19 bp, Mus musculus
  siRNA target sequence for 5330438E18Rik (NM_177282.2,1174-1192).
cgagaacattgtttactat

SEQ ID NO: 608536 - DNA, 19 bp, Mus musculus
  siRNA target sequence for 5330438E18Rik (NM_177282.2,1251-1269).
gcgtcatccttaatgacta

SEQ ID NO: 608537 - DNA, 19 bp, Mus musculus
  siRNA target sequence for 5330438E18Rik (NM_177282.2,1366-1384).
gctgccatccttagacttt

SEQ ID NO: 608538 - DNA, 19 bp, Mus musculus
  siRNA target sequence for 5330438E18Rik (NM_177282.2,1375-1393).
cttagactttgccatcaat

SEQ ID NO: 608539 - DNA, 19 bp, Mus musculus
  siRNA target sequence for 5330438E18Rik (NM_177282.2,1668-1686).
caaccccagagaacatcaa

SEQ ID NO: 608540 - DNA, 19 bp, Mus musculus
  siRNA target sequence for 5330438E18Rik (NM_177282.2,1757-1775).
cctcaccaggtgaagcatt

SEQ ID NO: 608541 - DNA, 19 bp, Mus musculus
  siRNA target sequence for 5330438E18Rik (NM_177282.2,1860-1878).
cagacatccggcctaacaa

SEQ ID NO: 608542 - DNA, 19 bp, Mus musculus
  siRNA target sequence for 5330438E18Rik (NM_177282.2,1867-1885).
ccggcctaacaagctttta

SEQ ID NO: 608543 - DNA, 19 bp, Mus musculus
  siRNA target sequence for 5330438E18Rik (NM_177282.2,1868-1886).
cggcctaacaagcttttaa

SEQ ID NO: 608544 - DNA, 19 bp, Mus musculus
  siRNA target sequence for 5330438E18Rik (NM_177282.2,1871-1889).
cctaacaagcttttaacct

SEQ ID NO: 608545 - DNA, 19 bp, Mus musculus
  siRNA target sequence for 5330438E18Rik (NM_177282.2,1991-2009).
cggccagagctgatcaact

SEQ ID NO: 608546 - DNA, 19 bp, Mus musculus
  siRNA target sequence for 5330438E18Rik (NM_177282.2,1992-2010).
ggccagagctgatcaactt

SEQ ID NO: 608547 - DNA, 19 bp, Mus musculus
  siRNA target sequence for 5330438E18Rik (NM_177282.2,1993-2011).
gccagagctgatcaacttt

SEQ ID NO: 608548 - DNA, 19 bp, Mus musculus
  siRNA target sequence for 5330438E18Rik (NM_177282.2,2152-2170).
gtacctctccaagttctat

SEQ ID NO: 608549 - DNA, 19 bp, Mus musculus
  siRNA target sequence for 5330438E18Rik (NM_177282.2,2204-2222).
gattcctggcgtaaaaact

SEQ ID NO: 608550 - DNA, 19 bp, Mus musculus
  siRNA target sequence for 5330438E18Rik (NM_177282.2,2239-2257).
ctttggcttgggcaaaaca

SEQ ID NO: 608551 - DNA, 19 bp, Mus musculus
  siRNA target sequence for 5330438E18Rik (NM_177282.2,2256-2274).
cattcattcagaataacta

SEQ ID NO: 608552 - DNA, 19 bp, Mus musculus
  siRNA target sequence for 5330438E18Rik (NM_177282.2,2407-2425).
gggctccagtcaagagtat

SEQ ID NO: 608553 - DNA, 19 bp, Mus musculus
  siRNA target sequence for 5330438E18Rik (NM_177282.2,2412-2430).
ccagtcaagagtatgctaa

SEQ ID NO: 608554 - DNA, 19 bp, Mus musculus
  siRNA target sequence for 5330438E18Rik (NM_177282.2,2417-2435).
caagagtatgctaaagaaa

SEQ ID NO: 608555 - DNA, 19 bp, Mus musculus
  siRNA target sequence for 5330438E18Rik (NM_177282.2,2567-2585).
gacacctgctacttttgta

SEQ ID NO: 608556 - DNA, 19 bp, Mus musculus
  siRNA target sequence for 5330438E18Rik (NM_177282.2,2583-2601).
gtaagaagcgtgtatacat

SEQ ID NO: 608557 - DNA, 19 bp, Mus musculus
  siRNA target sequence for 5330438E18Rik (NM_177282.2,2701-2719).
ctgcgatgaaggcaaattt

SEQ ID NO: 608558 - DNA, 19 bp, Mus musculus
  siRNA target sequence for 5330438E18Rik (NM_177282.2,2724-2742).
gcaagccccattttgttca

SEQ ID NO: 608559 - DNA, 19 bp, Mus musculus
  siRNA target sequence for 5330438E18Rik (NM_177282.2,3033-3051).
gggacaatgctcacaacta

SEQ ID NO: 608560 - DNA, 19 bp, Mus musculus
  siRNA target sequence for 5330438E18Rik (NM_177282.2,3035-3053).
gacaatgctcacaactact

SEQ ID NO: 608561 - DNA, 19 bp, Mus musculus
  siRNA target sequence for Coq6 (NM_172582.1,186-204).
gtgccttaggacatgatat

SEQ ID NO: 608562 - DNA, 19 bp, Mus musculus
  siRNA target sequence for Coq6 (NM_172582.1,195-213).
gacatgatattcactttca

SEQ ID NO: 608563 - DNA, 19 bp, Mus musculus
  siRNA target sequence for Coq6 (NM_172582.1,400-418).
ctgctcagaggccttgata

SEQ ID NO: 608564 - DNA, 19 bp, Mus musculus
  siRNA target sequence for Coq6 (NM_172582.1,450-468).
gctatatagtggaaaatga

SEQ ID NO: 608565 - DNA, 19 bp, Mus musculus
  siRNA target sequence for Coq6 (NM_172582.1,516-534).
gagtgaaggttctctatga

SEQ ID NO: 608566 - DNA, 19 bp, Mus musculus
  siRNA target sequence for Coq6 (NM_172582.1,558-576).
ggcctggtgcattttccat

SEQ ID NO: 608567 - DNA, 19 bp, Mus musculus
  siRNA target sequence for Coq6 (NM_172582.1,585-603).
ccagcccttgggtccatat

SEQ ID NO: 608568 - DNA, 19 bp, Mus musculus
  siRNA target sequence for Coq6 (NM_172582.1,628-646).
ccagaccaaactgttgatt

SEQ ID NO: 608569 - DNA, 19 bp, Mus musculus
  siRNA target sequence for Coq6 (NM_172582.1,1037-1055).
gccaaggtggatgctaaaa

SEQ ID NO: 608570 - DNA, 19 bp, Mus musculus
  siRNA target sequence for Coq6 (NM_172582.1,1155-1173).
cgggacaaggtgtcaacat

SEQ ID NO: 608571 - DNA, 19 bp, Mus musculus
  siRNA target sequence for Coq6 (NM_172582.1,1171-1189).
catgggcttcggggatatt

SEQ ID NO: 608572 - DNA, 19 bp, Mus musculus
  siRNA target sequence for Coq6 (NM_172582.1,1191-1209).
ccagcttggttcatcatct

SEQ ID NO: 608573 - DNA, 19 bp, Mus musculus
  siRNA target sequence for Coq6 (NM_172582.1,1210-1228).
cagtacagcagccttcaat

SEQ ID NO: 608574 - DNA, 19 bp, Mus musculus
  siRNA target sequence for Coq6 (NM_172582.1,1272-1290).
cagacagacagcgtcataa

SEQ ID NO: 608575 - DNA, 19 bp, Mus musculus
  siRNA target sequence for Coq6 (NM_172582.1,1276-1294).
cagacagcgtcataacact

SEQ ID NO: 608576 - DNA, 19 bp, Mus musculus
  siRNA target sequence for Coq6 (NM_172582.1,1398-1416).
ctcctctcaaagaacagat

SEQ ID NO: 608577 - DNA, 19 bp, Mus musculus
  siRNA target sequence for Cyp19a1 (NM_007810.1,62-80).
ctgaaccccatgcagtata

SEQ ID NO: 608578 - DNA, 19 bp, Mus musculus
  siRNA target sequence for Cyp19a1 (NM_007810.1,68-86).
cccatgcagtataatgtca

SEQ ID NO: 608579 - DNA, 19 bp, Mus musculus
  siRNA target sequence for Cyp19a1 (NM_007810.1,148-166).
ccttctcctgatttggaat

SEQ ID NO: 608580 - DNA, 19 bp, Mus musculus
  siRNA target sequence for Cyp19a1 (NM_007810.1,168-186).
gtgagagctcgtcttcaat

SEQ ID NO: 608581 - DNA, 19 bp, Mus musculus
  siRNA target sequence for Cyp19a1 (NM_007810.1,258-276).
gaagtgcctgcaactacta

SEQ ID NO: 608582 - DNA, 19 bp, Mus musculus
  siRNA target sequence for Cyp19a1 (NM_007810.1,263-281).
gcctgcaactactacaata

SEQ ID NO: 608583 - DNA, 19 bp, Mus musculus
  siRNA target sequence for Cyp19a1 (NM_007810.1,264-282).
cctgcaactactacaataa

SEQ ID NO: 608584 - DNA, 19 bp, Mus musculus
  siRNA target sequence for Cyp19a1 (NM_007810.1,271-289).
ctactacaataagatgtat

SEQ ID NO: 608585 - DNA, 19 bp, Mus musculus
  siRNA target sequence for Cyp19a1 (NM_007810.1,317-335).
ggagaggagacactcatta

SEQ ID NO: 608586 - DNA, 19 bp, Mus musculus
  siRNA target sequence for Cyp19a1 (NM_007810.1,318-336).
gagaggagacactcattat

SEQ ID NO: 608587 - DNA, 19 bp, Mus musculus
  siRNA target sequence for Cyp19a1 (NM_007810.1,348-366).
caagcatgttccatgtcat

SEQ ID NO: 608588 - DNA, 19 bp, Mus musculus
  siRNA target sequence for Cyp19a1 (NM_007810.1,427-445).
gcatgagaacggcatcata

SEQ ID NO: 608589 - DNA, 19 bp, Mus musculus
  siRNA target sequence for Cyp19a1 (NM_007810.1,431-449).
gagaacggcatcatattta

SEQ ID NO: 608590 - DNA, 19 bp, Mus musculus
  siRNA target sequence for Cyp19a1 (NM_007810.1,471-489).
gaacaattcgccctttctt

SEQ ID NO: 608591 - DNA, 19 bp, Mus musculus
  siRNA target sequence for Cyp19a1 (NM_007810.1,474-492).
caattcgccctttctttat

SEQ ID NO: 608592 - DNA, 19 bp, Mus musculus
  siRNA target sequence for Cyp19a1 (NM_007810.1,507-525).
gccctggtcttgttcgaat

SEQ ID NO: 608593 - DNA, 19 bp, Mus musculus
  siRNA target sequence for Cyp19a1 (NM_007810.1,518-536).
gttcgaatggtggaagttt

SEQ ID NO: 608594 - DNA, 19 bp, Mus musculus
  siRNA target sequence for Cyp19a1 (NM_007810.1,522-540).
gaatggtggaagtttgtgt

SEQ ID NO: 608595 - DNA, 19 bp, Mus musculus
  siRNA target sequence for Cyp19a1 (NM_007810.1,612-630).
ccctcatgagacacatcat

SEQ ID NO: 608596 - DNA, 19 bp, Mus musculus
  siRNA target sequence for Cyp19a1 (NM_007810.1,718-736).
gcaagctctcctcatcaaa

SEQ ID NO: 608597 - DNA, 19 bp, Mus musculus
  siRNA target sequence for Cyp19a1 (NM_007810.1,783-801).
gatccgtcaaggacttgaa

SEQ ID NO: 608598 - DNA, 19 bp, Mus musculus
  siRNA target sequence for Cyp19a1 (NM_007810.1,860-878).
ctggaagactgtatggatt

SEQ ID NO: 608599 - DNA, 19 bp, Mus musculus
  siRNA target sequence for Cyp19a1 (NM_007810.1,862-880).
ggaagactgtatggatttt

SEQ ID NO: 608600 - DNA, 19 bp, Mus musculus
  siRNA target sequence for Cyp19a1 (NM_007810.1,912-930).
gagacctgacgaaagagaa

SEQ ID NO: 608601 - DNA, 19 bp, Mus musculus
  siRNA target sequence for Cyp19a1 (NM_007810.1,921-939).
cgaaagagaacgtgaatca

SEQ ID NO: 608602 - DNA, 19 bp, Mus musculus
  siRNA target sequence for Cyp19a1 (NM_007810.1,985-1003).
cactctgtacttcatgtta

SEQ ID NO: 608603 - DNA, 19 bp, Mus musculus
  siRNA target sequence for Cyp19a1 (NM_007810.1,1218-1236).
gaactaacatcattctgaa

SEQ ID NO: 608604 - DNA, 19 bp, Mus musculus
  siRNA target sequence for Cyp19a1 (NM_007810.1,1221-1239).
ctaacatcattctgaacat

SEQ ID NO: 608605 - DNA, 19 bp, Mus musculus
  siRNA target sequence for Cyp19a1 (NM_007810.1,1267-1285).
ccctaagcccaatgaattt

SEQ ID NO: 608606 - DNA, 19 bp, Mus musculus
  siRNA target sequence for Cyp19a1 (NM_007810.1,1268-1286).
cctaagcccaatgaattta

SEQ ID NO: 608607 - DNA, 19 bp, Mus musculus
  siRNA target sequence for Cyp19a1 (NM_007810.1,1280-1298).
gaatttacccttgaaaact

SEQ ID NO: 608608 - DNA, 19 bp, Mus musculus
  siRNA target sequence for Cyp19a1 (NM_007810.1,1435-1453).
gcaaaaaaggtgtattgaa

SEQ ID NO: 608609 - DNA, 19 bp, Mus musculus
  siRNA target sequence for Cyp19a1 (NM_007810.1,1500-1518).
ggcaccttgtggaaataat

SEQ ID NO: 608610 - DNA, 19 bp, Mus musculus
  siRNA target sequence for Cyp19a1 (NM_007810.1,1501-1519).
gcaccttgtggaaataatt

SEQ ID NO: 608611 - DNA, 19 bp, Mus musculus
  siRNA target sequence for Cyp19a1 (NM_007810.1,1527-1545).
caaggaattcagacaagta

SEQ ID NO: 608612 - DNA, 19 bp, Mus musculus
  siRNA target sequence for Cyp1a1 (NM_009992.2,233-251).
ctggctgtcaccgtattct

SEQ ID NO: 608613 - DNA, 19 bp, Mus musculus
  siRNA target sequence for Cyp1a1 (NM_009992.2,266-284).
gtggtcagagccacaagaa

SEQ ID NO: 608614 - DNA, 19 bp, Mus musculus
  siRNA target sequence for Cyp1a1 (NM_009992.2,742-760).
ctttgacccttacaagtat

SEQ ID NO: 608615 - DNA, 19 bp, Mus musculus
  siRNA target sequence for Cyp1a1 (NM_009992.2,782-800).
gtcatctgtgccatatgct

SEQ ID NO: 608616 - DNA, 19 bp, Mus musculus
  siRNA target sequence for Cyp1a1 (NM_009992.2,798-816).
gctttggccaacgttatga

SEQ ID NO: 608617 - DNA, 19 bp, Mus musculus
  siRNA target sequence for Cyp1a1 (NM_009992.2,832-850).
gctgctcagcatagtcaat

SEQ ID NO: 608618 - DNA, 19 bp, Mus musculus
  siRNA target sequence for Cyp1a1 (NM_009992.2,836-854).
ctcagcatagtcaatctga

SEQ ID NO: 608619 - DNA, 19 bp, Mus musculus
  siRNA target sequence for Cyp1a1 (NM_009992.2,913-931).
ccgttacctgcctaactct

SEQ ID NO: 608620 - DNA, 19 bp, Mus musculus
  siRNA target sequence for Cyp1a1 (NM_009992.2,950-968).
gacttgaatgataagttct

SEQ ID NO: 608621 - DNA, 19 bp, Mus musculus
  siRNA target sequence for Cyp1a1 (NM_009992.2,1044-1062).
gcctcattgagcattgtca

SEQ ID NO: 608622 - DNA, 19 bp, Mus musculus
  siRNA target sequence for Cyp1a1 (NM_009992.2,1203-1221).
ctagggtacagagaaagat

SEQ ID NO: 608623 - DNA, 19 bp, Mus musculus
  siRNA target sequence for Cyp1a1 (NM_009992.2,1313-1331).
gagaccttccggcattcat

SEQ ID NO: 608624 - DNA, 19 bp, Mus musculus
  siRNA target sequence for Cyp1a1 (NM_009992.2,1354-1372).
ccacagcaccacaagagat

SEQ ID NO: 608625 - DNA, 19 bp, Mus musculus
  siRNA target sequence for Cyp1a1 (NM_009992.2,1355-1373).
cacagcaccacaagagata

SEQ ID NO: 608626 - DNA, 19 bp, Mus musculus
  siRNA target sequence for Cyp1a1 (NM_009992.2,1377-1395).
gtctgaatggcttctatat

SEQ ID NO: 608627 - DNA, 19 bp, Mus musculus
  siRNA target sequence for Cyp1a1 (NM_009992.2,1404-1422).
ggtgctgtgtctttgtgaa

SEQ ID NO: 608628 - DNA, 19 bp, Mus musculus
  siRNA target sequence for Cyp1a1 (NM_009992.2,1581-1599).
gccgatcggaggtctttct

SEQ ID NO: 608629 - DNA, 19 bp, Mus musculus
  siRNA target sequence for Cyp1a1 (NM_009992.2,1583-1601).
cgatcggaggtctttctct

SEQ ID NO: 608630 - DNA, 19 bp, Mus musculus
  siRNA target sequence for Cyp1a1 (NM_009992.2,1616-1634).
ctgcagcaaatagaattta

SEQ ID NO: 608631 - DNA, 19 bp, Mus musculus
  siRNA target sequence for Cyp1a2 (NM_009993.2,108-126).
cactgccatcttctgttta

SEQ ID NO: 608632 - DNA, 19 bp, Mus musculus
  siRNA target sequence for Cyp1a2 (NM_009993.2,706-724).
ctgaacatcgtgaataaca

SEQ ID NO: 608633 - DNA, 19 bp, Mus musculus
  siRNA target sequence for Cyp1a2 (NM_009993.2,755-773).
ggaatgcagtggacttctt

SEQ ID NO: 608634 - DNA, 19 bp, Mus musculus
  siRNA target sequence for Cyp1a2 (NM_009993.2,813-831).
gtttaagaccttcaatgat

SEQ ID NO: 608635 - DNA, 19 bp, Mus musculus
  siRNA target sequence for Cyp1a2 (NM_009993.2,868-886).
cactaccaagacttcaaca

SEQ ID NO: 608636 - DNA, 19 bp, Mus musculus
  siRNA target sequence for Cyp1a2 (NM_009993.2,1142-1160).
cccagctgccatatctaga

SEQ ID NO: 608637 - DNA, 19 bp, Mus musculus
  siRNA target sequence for Cyp1a2 (NM_009993.2,1173-1191).
ggagatctaccgatacaca

SEQ ID NO: 608638 - DNA, 19 bp, Mus musculus
  siRNA target sequence for Cyp1a2 (NM_009993.2,1174-1192).
gagatctaccgatacacat

SEQ ID NO: 608639 - DNA, 19 bp, Mus musculus
  siRNA target sequence for Cyp1a2 (NM_009993.2,1179-1197).
ctaccgatacacatccttt

SEQ ID NO: 608640 - DNA, 19 bp, Mus musculus
  siRNA target sequence for Cyp1a2 (NM_009993.2,1258-1276).
cccaaggagcgctgtatct

SEQ ID NO: 608641 - DNA, 19 bp, Mus musculus
  siRNA target sequence for Cyp1a2 (NM_009993.2,1289-1307).
ggcaggtcaaccatgatga

SEQ ID NO: 608642 - DNA, 19 bp, Mus musculus
  siRNA target sequence for Cyp1a2 (NM_009993.2,1340-1358).
cagagcggtttcttaccaa

SEQ ID NO: 608643 - DNA, 19 bp, Mus musculus
  siRNA target sequence for Cyp1a2 (NM_009993.2,1342-1360).
gagcggtttcttaccaata

SEQ ID NO: 608644 - DNA, 19 bp, Mus musculus
  siRNA target sequence for Cyp1a2 (NM_009993.2,1345-1363).
cggtttcttaccaataaca

SEQ ID NO: 608645 - DNA, 19 bp, Mus musculus
  siRNA target sequence for Cyp1a2 (NM_009993.2,1452-1470).
ggaagtcttcctcttctta

SEQ ID NO: 608646 - DNA, 19 bp, Mus musculus
  siRNA target sequence for Cyp1a2 (NM_009993.2,1482-1500).
gcagcatctggagtttagt

SEQ ID NO: 608647 - DNA, 19 bp, Mus musculus
  siRNA target sequence for Cyp1a2 (NM_009993.2,1521-1539).
ggacctgacacccaactat

SEQ ID NO: 608648 - DNA, 19 bp, Mus musculus
  siRNA target sequence for Cyp1a2 (NM_009993.2,1579-1597).
gcatggccacgcttttcca

SEQ ID NO: 608649 - DNA, 19 bp, Mus musculus
  siRNA target sequence for Cyp1a2 (NM_009993.2,1580-1598).
catggccacgcttttccaa

SEQ ID NO: 608650 - DNA, 19 bp, Mus musculus
  siRNA target sequence for Cyp1b1 (NM_009994.1,556-574).
gccaggcgtcgcacttgta

SEQ ID NO: 608651 - DNA, 19 bp, Mus musculus
  siRNA target sequence for Cyp1b1 (NM_009994.1,558-576).
caggcgtcgcacttgtact

SEQ ID NO: 608652 - DNA, 19 bp, Mus musculus
  siRNA target sequence for Cyp1b1 (NM_009994.1,592-610).
ggcgctatggcgacgtttt

SEQ ID NO: 608653 - DNA, 19 bp, Mus musculus
  siRNA target sequence for Cyp1b1 (NM_009994.1,595-613).
gctatggcgacgttttcca

SEQ ID NO: 608654 - DNA, 19 bp, Mus musculus
  siRNA target sequence for Cyp1b1 (NM_009994.1,789-807).
cgacgctcggcctatagca

SEQ ID NO: 608655 - DNA, 19 bp, Mus musculus
  siRNA target sequence for Cyp1b1 (NM_009994.1,871-889).
cagaggctcgagaattggt

SEQ ID NO: 608656 - DNA, 19 bp, Mus musculus
  siRNA target sequence for Cyp1b1 (NM_009994.1,934-952).
caacgcagccggtcattgt

SEQ ID NO: 608657 - DNA, 19 bp, Mus musculus
  siRNA target sequence for Cyp1b1 (NM_009994.1,1396-1414).
ccagatacccggatgttca

SEQ ID NO: 608658 - DNA, 19 bp, Mus musculus
  siRNA target sequence for Cyp1b1 (NM_009994.1,1482-1500).
cccaacctgccatatgtca

SEQ ID NO: 608659 - DNA, 19 bp, Mus musculus
  siRNA target sequence for Cyp1b1 (NM_009994.1,1483-1501).
ccaacctgccatatgtcat

SEQ ID NO: 608660 - DNA, 19 bp, Mus musculus
  siRNA target sequence for Cyp1b1 (NM_009994.1,1565-1583).
caccgccaacacctttgtt

SEQ ID NO: 608661 - DNA, 19 bp, Mus musculus
  siRNA target sequence for Cyp1b1 (NM_009994.1,1567-1585).
ccgccaacacctttgtttt

SEQ ID NO: 608662 - DNA, 19 bp, Mus musculus
  siRNA target sequence for Cyp1b1 (NM_009994.1,1571-1589).
caacacctttgttttaggt

SEQ ID NO: 608663 - DNA, 19 bp, Mus musculus
  siRNA target sequence for Cyp1b1 (NM_009994.1,1604-1622).
gaatacggtcgtttttgtt

SEQ ID NO: 608664 - DNA, 19 bp, Mus musculus
  siRNA target sequence for Cyp1b1 (NM_009994.1,1609-1627).
cggtcgtttttgttaacca

SEQ ID NO: 608665 - DNA, 19 bp, Mus musculus
  siRNA target sequence for Cyp1b1 (NM_009994.1,1625-1643).
ccagtggtctgtgaatcat

SEQ ID NO: 608666 - DNA, 19 bp, Mus musculus
  siRNA target sequence for Cyp1b1 (NM_009994.1,1695-1713).
gacaaggacggcttcatta

SEQ ID NO: 608667 - DNA, 19 bp, Mus musculus
  siRNA target sequence for Cyp1b1 (NM_009994.1,1726-1744).
ccagcagtgtgatgatatt

SEQ ID NO: 608668 - DNA, 19 bp, Mus musculus
  siRNA target sequence for Cyp1b1 (NM_009994.1,1770-1788).
ggtgaggaactgtctaaga

SEQ ID NO: 608669 - DNA, 19 bp, Mus musculus
  siRNA target sequence for Cyp1b1 (NM_009994.1,1815-1833).
ctcgctcatcagtgcaatt

SEQ ID NO: 608670 - DNA, 19 bp, Mus musculus
  siRNA target sequence for Cyp1b1 (NM_009994.1,1829-1847).
caatttcaaggctaaccaa

SEQ ID NO: 608671 - DNA, 19 bp, Mus musculus
  siRNA target sequence for Cyp1b1 (NM_009994.1,1845-1863).
caaaatgagtcctcaaaca

SEQ ID NO: 608672 - DNA, 19 bp, Mus musculus
  siRNA target sequence for Cyp1b1 (NM_009994.1,1851-1869).
gagtcctcaaacatgagtt

SEQ ID NO: 608673 - DNA, 19 bp, Mus musculus
  siRNA target sequence for Cyp1b1 (NM_009994.1,1873-1891).
gttatggcctgaccattaa

SEQ ID NO: 608674 - DNA, 19 bp, Mus musculus
  siRNA target sequence for Cyp1b1 (NM_009994.1,1895-1913).
caagtcgtttagaatccat

SEQ ID NO: 608675 - DNA, 19 bp, Mus musculus
  siRNA target sequence for Cyp1b1 (NM_009994.1,1930-1948).
cgatggaactcctggataa

SEQ ID NO: 608676 - DNA, 19 bp, Mus musculus
  siRNA target sequence for Cyp1b1 (NM_009994.1,1931-1949).
gatggaactcctggataat

SEQ ID NO: 608677 - DNA, 19 bp, Mus musculus
  siRNA target sequence for Cyp24a1 (NM_009996.2,367-385).
gagctgccccattgacaaa

SEQ ID NO: 608678 - DNA, 19 bp, Mus musculus
  siRNA target sequence for Cyp24a1 (NM_009996.2,566-584).
ggcagcctactggagattt

SEQ ID NO: 608679 - DNA, 19 bp, Mus musculus
  siRNA target sequence for Cyp24a1 (NM_009996.2,567-585).
gcagcctactggagatttt

SEQ ID NO: 608680 - DNA, 19 bp, Mus musculus
  siRNA target sequence for Cyp24a1 (NM_009996.2,568-586).
cagcctactggagattttt

SEQ ID NO: 608681 - DNA, 19 bp, Mus musculus
  siRNA target sequence for Cyp24a1 (NM_009996.2,839-857).
cgcagcgccttccaaaaga

SEQ ID NO: 608682 - DNA, 19 bp, Mus musculus
  siRNA target sequence for Cyp24a1 (NM_009996.2,840-858).
gcagcgccttccaaaagaa

SEQ ID NO: 608683 - DNA, 19 bp, Mus musculus
  siRNA target sequence for Cyp24a1 (NM_009996.2,841-859).
cagcgccttccaaaagaaa

SEQ ID NO: 608684 - DNA, 19 bp, Mus musculus
  siRNA target sequence for Cyp24a1 (NM_009996.2,954-972).
gaggccgcatccaagactt

SEQ ID NO: 608685 - DNA, 19 bp, Mus musculus
  siRNA target sequence for Cyp24a1 (NM_009996.2,957-975).
gccgcatccaagacttgta

SEQ ID NO: 608686 - DNA, 19 bp, Mus musculus
  siRNA target sequence for Cyp24a1 (NM_009996.2,959-977).
cgcatccaagacttgtaca

SEQ ID NO: 608687 - DNA, 19 bp, Mus musculus
  siRNA target sequence for Cyp24a1 (NM_009996.2,985-1003).
gaacaaatggtcctttgaa

SEQ ID NO: 608688 - DNA, 19 bp, Mus musculus
  siRNA target sequence for Cyp24a1 (NM_009996.2,1005-1023).
gcatctgccttgtgttata

SEQ ID NO: 608689 - DNA, 19 bp, Mus musculus
  siRNA target sequence for Cyp24a1 (NM_009996.2,1011-1029).
gccttgtgttatatgagaa

SEQ ID NO: 608690 - DNA, 19 bp, Mus musculus
  siRNA target sequence for Cyp24a1 (NM_009996.2,1075-1093).
cttcattgcggccatcaaa

SEQ ID NO: 608691 - DNA, 19 bp, Mus musculus
  siRNA target sequence for Cyp24a1 (NM_009996.2,1083-1101).
cggccatcaaaacaatgat

SEQ ID NO: 608692 - DNA, 19 bp, Mus musculus
  siRNA target sequence for Cyp24a1 (NM_009996.2,1184-1202).
gcctgggacaccattttca

SEQ ID NO: 608693 - DNA, 19 bp, Mus musculus
  siRNA target sequence for Cyp24a1 (NM_009996.2,1225-1243).
ccaccgcctagagagatat

SEQ ID NO: 608694 - DNA, 19 bp, Mus musculus
  siRNA target sequence for Cyp24a1 (NM_009996.2,1226-1244).
caccgcctagagagatatt

SEQ ID NO: 608695 - DNA, 19 bp, Mus musculus
  siRNA target sequence for Cyp24a1 (NM_009996.2,1252-1270).
gcctggtgcggatttcctt

SEQ ID NO: 608696 - DNA, 19 bp, Mus musculus
  siRNA target sequence for Cyp24a1 (NM_009996.2,1253-1271).
cctggtgcggatttccttt

SEQ ID NO: 608697 - DNA, 19 bp, Mus musculus
  siRNA target sequence for Cyp24a1 (NM_009996.2,1257-1275).
gtgcggatttcctttgtga

SEQ ID NO: 608698 - DNA, 19 bp, Mus musculus
  siRNA target sequence for Cyp24a1 (NM_009996.2,1259-1277).
gcggatttcctttgtgata

SEQ ID NO: 608699 - DNA, 19 bp, Mus musculus
  siRNA target sequence for Cyp24a1 (NM_009996.2,1365-1383).
gcttgatgtggattctcta

SEQ ID NO: 608700 - DNA, 19 bp, Mus musculus
  siRNA target sequence for Cyp24a1 (NM_009996.2,1369-1387).
gatgtggattctctacaat

SEQ ID NO: 608701 - DNA, 19 bp, Mus musculus
  siRNA target sequence for Cyp24a1 (NM_009996.2,1372-1390).
gtggattctctacaatcta

SEQ ID NO: 608702 - DNA, 19 bp, Mus musculus
  siRNA target sequence for Cyp24a1 (NM_009996.2,1466-1484).
gcggaagatgtgaggaata

SEQ ID NO: 608703 - DNA, 19 bp, Mus musculus
  siRNA target sequence for Cyp24a1 (NM_009996.2,1477-1495).
gaggaatatgccctattta

SEQ ID NO: 608704 - DNA, 19 bp, Mus musculus
  siRNA target sequence for Cyp24a1 (NM_009996.2,1566-1584).
caaccgttctgggtgaata

SEQ ID NO: 608705 - DNA, 19 bp, Mus musculus
  siRNA target sequence for Cyp24a1 (NM_009996.2,1594-1612).
caaaggaacagtcttaaca

SEQ ID NO: 608706 - DNA, 19 bp, Mus musculus
  siRNA target sequence for Cyp24a1 (NM_009996.2,1598-1616).
ggaacagtcttaacactaa

SEQ ID NO: 608707 - DNA, 19 bp, Mus musculus
  siRNA target sequence for Cyp24a1 (NM_009996.2,1632-1650).
gctctagcgaagacaattt

SEQ ID NO: 608708 - DNA, 19 bp, Mus musculus
  siRNA target sequence for Cyp24a1 (NM_009996.2,1633-1651).
ctctagcgaagacaatttt

SEQ ID NO: 608709 - DNA, 19 bp, Mus musculus
  siRNA target sequence for Cyp24a1 (NM_009996.2,1635-1653).
ctagcgaagacaattttga

SEQ ID NO: 608710 - DNA, 19 bp, Mus musculus
  siRNA target sequence for Cyp24a1 (NM_009996.2,1674-1692).
ccgaacgctggcttgaaaa

SEQ ID NO: 608711 - DNA, 19 bp, Mus musculus
  siRNA target sequence for Cyp24a1 (NM_009996.2,1797-1815).
ggataatccaaaaatataa

SEQ ID NO: 608712 - DNA, 19 bp, Mus musculus
  siRNA target sequence for Cyp26a1 (NM_007811.1,290-308).
ctacaagacgcatctgttt

SEQ ID NO: 608713 - DNA, 19 bp, Mus musculus
  siRNA target sequence for Cyp26a1 (NM_007811.1,451-469).
cgcacaagcagcgaaagaa

SEQ ID NO: 608714 - DNA, 19 bp, Mus musculus
  siRNA target sequence for Cyp26a1 (NM_007811.1,463-481).
gaaagaaggtgattatgca

SEQ ID NO: 608715 - DNA, 19 bp, Mus musculus
  siRNA target sequence for Cyp26a1 (NM_007811.1,702-720).
gagatgacccgcaatctct

SEQ ID NO: 608716 - DNA, 19 bp, Mus musculus
  siRNA target sequence for Cyp26a1 (NM_007811.1,865-883).
cgctgcagctcctgattga

SEQ ID NO: 608717 - DNA, 19 bp, Mus musculus
  siRNA target sequence for Cyp26a1 (NM_007811.1,911-929).
ggatatgcaggcactaaaa

SEQ ID NO: 608718 - DNA, 19 bp, Mus musculus
  siRNA target sequence for Cyp26a1 (NM_007811.1,950-968).
ctttggtggtcatgaaact

SEQ ID NO: 608719 - DNA, 19 bp, Mus musculus
  siRNA target sequence for Cyp26a1 (NM_007811.1,1032-1050).
gttcgagaagagataaaga

SEQ ID NO: 608720 - DNA, 19 bp, Mus musculus
  siRNA target sequence for Cyp26a1 (NM_007811.1,1051-1069).
gcaagggcttactttgcaa

SEQ ID NO: 608721 - DNA, 19 bp, Mus musculus
  siRNA target sequence for Cyp26a1 (NM_007811.1,1072-1090).
gcaatcaagacaacaagtt

SEQ ID NO: 608722 - DNA, 19 bp, Mus musculus
  siRNA target sequence for Cyp26a1 (NM_007811.1,1077-1095).
caagacaacaagttagaca

SEQ ID NO: 608723 - DNA, 19 bp, Mus musculus
  siRNA target sequence for Cyp26a1 (NM_007811.1,1102-1120).
ctttggaacagcttaaata

SEQ ID NO: 608724 - DNA, 19 bp, Mus musculus
  siRNA target sequence for Cyp26a1 (NM_007811.1,1179-1197).
cgggttgctctgaagactt

SEQ ID NO: 608725 - DNA, 19 bp, Mus musculus
  siRNA target sequence for Cyp26a1 (NM_007811.1,1180-1198).
gggttgctctgaagacttt

SEQ ID NO: 608726 - DNA, 19 bp, Mus musculus
  siRNA target sequence for Cyp26a1 (NM_007811.1,1181-1199).
ggttgctctgaagactttt

SEQ ID NO: 608727 - DNA, 19 bp, Mus musculus
  siRNA target sequence for Cyp26a1 (NM_007811.1,1258-1276).
cccacgatgtggcagatat

SEQ ID NO: 608728 - DNA, 19 bp, Mus musculus
  siRNA target sequence for Cyp26a1 (NM_007811.1,1260-1278).
cacgatgtggcagatatct

SEQ ID NO: 608729 - DNA, 19 bp, Mus musculus
  siRNA target sequence for Cyp26a1 (NM_007811.1,1270-1288).
cagatatcttcactaacaa

SEQ ID NO: 608730 - DNA, 19 bp, Mus musculus
  siRNA target sequence for Cyp26a1 (NM_007811.1,1341-1359).
cggttcagcttcattccat

SEQ ID NO: 608731 - DNA, 19 bp, Mus musculus
  siRNA target sequence for Cyp26a1 (NM_007811.1,1378-1396).
gctgtgtaggcaaagagtt

SEQ ID NO: 608732 - DNA, 19 bp, Mus musculus
  siRNA target sequence for Cyp26a1 (NM_007811.1,1399-1417).
caaaaattcttcttaagat

SEQ ID NO: 608733 - DNA, 19 bp, Mus musculus
  siRNA target sequence for Cyp26a1 (NM_007811.1,1464-1482).
ggacctcctacaatgaaga

SEQ ID NO: 608734 - DNA, 19 bp, Mus musculus
  siRNA target sequence for Cyp27a1 (NM_024264.3,248-266).
gggaccggaacgctacaat

SEQ ID NO: 608735 - DNA, 19 bp, Mus musculus
  siRNA target sequence for Cyp27a1 (NM_024264.3,249-267).
ggaccggaacgctacaatt

SEQ ID NO: 608736 - DNA, 19 bp, Mus musculus
  siRNA target sequence for Cyp27a1 (NM_024264.3,250-268).
gaccggaacgctacaattt

SEQ ID NO: 608737 - DNA, 19 bp, Mus musculus
  siRNA target sequence for Cyp27a1 (NM_024264.3,253-271).
cggaacgctacaattttta

SEQ ID NO: 608738 - DNA, 19 bp, Mus musculus
  siRNA target sequence for Cyp27a1 (NM_024264.3,255-273).
gaacgctacaatttttatt

SEQ ID NO: 608739 - DNA, 19 bp, Mus musculus
  siRNA target sequence for Cyp27a1 (NM_024264.3,322-340).
gctgaacaagaccaagtat

SEQ ID NO: 608740 - DNA, 19 bp, Mus musculus
  siRNA target sequence for Cyp27a1 (NM_024264.3,427-445).
gggcaagtacccaataaga

SEQ ID NO: 608741 - DNA, 19 bp, Mus musculus
  siRNA target sequence for Cyp27a1 (NM_024264.3,429-447).
gcaagtacccaataagaga

SEQ ID NO: 608742 - DNA, 19 bp, Mus musculus
  siRNA target sequence for Cyp27a1 (NM_024264.3,536-554).
cgtcaggctttgaaacaga

SEQ ID NO: 608743 - DNA, 19 bp, Mus musculus
  siRNA target sequence for Cyp27a1 (NM_024264.3,601-619).
cgaggttatcagtgacttt

SEQ ID NO: 608744 - DNA, 19 bp, Mus musculus
  siRNA target sequence for Cyp27a1 (NM_024264.3,605-623).
gttatcagtgactttatca

SEQ ID NO: 608745 - DNA, 19 bp, Mus musculus
  siRNA target sequence for Cyp27a1 (NM_024264.3,640-658).
gcgggcagagagtgaatca

SEQ ID NO: 608746 - DNA, 19 bp, Mus musculus
  siRNA target sequence for Cyp27a1 (NM_024264.3,717-735).
cctatatcctgtttgagaa

SEQ ID NO: 608747 - DNA, 19 bp, Mus musculus
  siRNA target sequence for Cyp27a1 (NM_024264.3,789-807).
gatctgttgcaatcatgtt

SEQ ID NO: 608748 - DNA, 19 bp, Mus musculus
  siRNA target sequence for Cyp27a1 (NM_024264.3,880-898).
gaatggctgggataacatt

SEQ ID NO: 608749 - DNA, 19 bp, Mus musculus
  siRNA target sequence for Cyp27a1 (NM_024264.3,1103-1121).
gccctgtaccacctttcaa

SEQ ID NO: 608750 - DNA, 19 bp, Mus musculus
  siRNA target sequence for Cyp27a1 (NM_024264.3,1104-1122).
ccctgtaccacctttcaaa

SEQ ID NO: 608751 - DNA, 19 bp, Mus musculus
  siRNA target sequence for Cyp27a1 (NM_024264.3,1106-1124).
ctgtaccacctttcaaaga

SEQ ID NO: 608752 - DNA, 19 bp, Mus musculus
  siRNA target sequence for Cyp27a1 (NM_024264.3,1207-1225).
ccacatgcctctgctaaaa

SEQ ID NO: 608753 - DNA, 19 bp, Mus musculus
  siRNA target sequence for Cyp27a1 (NM_024264.3,1210-1228).
catgcctctgctaaaagct

SEQ ID NO: 608754 - DNA, 19 bp, Mus musculus
  siRNA target sequence for Cyp27a1 (NM_024264.3,1321-1339).
ccccaagaatacacagttt

SEQ ID NO: 608755 - DNA, 19 bp, Mus musculus
  siRNA target sequence for Cyp27a1 (NM_024264.3,1539-1557).
caaggctggtacagaagta

SEQ ID NO: 608756 - DNA, 19 bp, Mus musculus
  siRNA target sequence for Cyp27a1 (NM_024264.3,1544-1562).
ctggtacagaagtatgaga

SEQ ID NO: 608757 - DNA, 19 bp, Mus musculus
  siRNA target sequence for Cyp27a1 (NM_024264.3,1574-1592).
cccgggatgggagaagtaa

SEQ ID NO: 608758 - DNA, 19 bp, Mus musculus
  siRNA target sequence for Cyp27a1 (NM_024264.3,1579-1597).
gatgggagaagtaaagact

SEQ ID NO: 608759 - DNA, 19 bp, Mus musculus
  siRNA target sequence for Cyp2b19 (NM_007814.1,516-534).
ccagtgcatcgtagcaaat

SEQ ID NO: 608760 - DNA, 19 bp, Mus musculus
  siRNA target sequence for Cyp2b19 (NM_007814.1,1012-1030).
ctaccgactcttgatgata

SEQ ID NO: 608761 - DNA, 19 bp, Mus musculus
  siRNA target sequence for Cyp2b19 (NM_007814.1,1015-1033).
ccgactcttgatgatagaa

SEQ ID NO: 608762 - DNA, 19 bp, Mus musculus
  siRNA target sequence for Cyp2b19 (NM_007814.1,1445-1463).
ccccacagtaccagattca

SEQ ID NO: 608763 - DNA, 19 bp, Mus musculus
  siRNA target sequence for Cyp2b9 (NM_010000.1,1467-1485).
ctccagcacaccagatcta

SEQ ID NO: 608764 - DNA, 19 bp, Mus musculus
  siRNA target sequence for Cyp2b9 (NM_010000.1,1469-1487).
ccagcacaccagatctact

SEQ ID NO: 608765 - DNA, 19 bp, Mus musculus
  siRNA target sequence for Cyp2b9 (NM_010000.1,1470-1488).
cagcacaccagatctactt

SEQ ID NO: 608766 - DNA, 19 bp, Mus musculus
  siRNA target sequence for Cyp2c29 (NM_007815.2,239-257).
cactctatcctgtcttatt

SEQ ID NO: 608767 - DNA, 19 bp, Mus musculus
  siRNA target sequence for Cyp2c29 (NM_007815.2,374-392).
caccaacttctcaaaagct

SEQ ID NO: 608768 - DNA, 19 bp, Mus musculus
  siRNA target sequence for Cyp2c29 (NM_007815.2,424-442).
caaagcctactgtcatatt

SEQ ID NO: 608769 - DNA, 19 bp, Mus musculus
  siRNA target sequence for Cyp2c37 (NM_010001.1,119-137).
gaaacatccttcagataga

SEQ ID NO: 608770 - DNA, 19 bp, Mus musculus
  siRNA target sequence for Cyp2c37 (NM_010001.1,178-196).
gtttatggccctgtgtata

SEQ ID NO: 608771 - DNA, 19 bp, Mus musculus
  siRNA target sequence for Cyp2c38 (NM_010002.1,679-697).
ccccttgctcattgactat

SEQ ID NO: 608772 - DNA, 19 bp, Mus musculus
  siRNA target sequence for Cyp2c38 (NM_010002.1,680-698).
cccttgctcattgactatt

SEQ ID NO: 608773 - DNA, 19 bp, Mus musculus
  siRNA target sequence for Cyp2c38 (NM_010002.1,682-700).
cttgctcattgactattgt

SEQ ID NO: 608774 - DNA, 19 bp, Mus musculus
  siRNA target sequence for Cyp2c39 (NM_010003.1,210-228).
ctcacggcccactgttgta

SEQ ID NO: 608775 - DNA, 19 bp, Mus musculus
  siRNA target sequence for Cyp2c39 (NM_010003.1,212-230).
cacggcccactgttgtatt

SEQ ID NO: 608776 - DNA, 19 bp, Mus musculus
  siRNA target sequence for Cyp2c39 (NM_010003.1,831-849).
ccaacaagcagaattttca

SEQ ID NO: 608777 - DNA, 19 bp, Mus musculus
  siRNA target sequence for Cyp2c39 (NM_010003.1,863-881).
cctgcactatcaataacct

SEQ ID NO: 608778 - DNA, 19 bp, Mus musculus
  siRNA target sequence for Cyp2c39 (NM_010003.1,1080-1098).
ccttgtccctaacaacata

SEQ ID NO: 608779 - DNA, 19 bp, Mus musculus
  siRNA target sequence for Cyp2c40 (NM_010004.1,838-856).
gagcacatggactatacca

SEQ ID NO: 608780 - DNA, 19 bp, Mus musculus
  siRNA target sequence for Cyp2c40 (NM_010004.1,840-858).
gcacatggactataccatt

SEQ ID NO: 608781 - DNA, 19 bp, Mus musculus
  siRNA target sequence for Cyp2c40 (NM_010004.1,843-861).
catggactataccattgaa

SEQ ID NO: 608782 - DNA, 19 bp, Mus musculus
  siRNA target sequence for Cyp2c50 (NM_134144.1,123-141).
gaaatatccttcagatcaa

SEQ ID NO: 608783 - DNA, 19 bp, Mus musculus
  siRNA target sequence for Cyp2c50 (NM_134144.1,578-596).
cgggattttcttaatttga

SEQ ID NO: 608784 - DNA, 19 bp, Mus musculus
  siRNA target sequence for Cyp2c55 (NM_028089.1,81-99).
cctctggagacaaaactct

SEQ ID NO: 608785 - DNA, 19 bp, Mus musculus
  siRNA target sequence for Cyp2c55 (NM_028089.1,179-197).
gcaaatccttcaactattt

SEQ ID NO: 608786 - DNA, 19 bp, Mus musculus
  siRNA target sequence for Cyp2c55 (NM_028089.1,314-332).
ggaggggtagttttcaaat

SEQ ID NO: 608787 - DNA, 19 bp, Mus musculus
  siRNA target sequence for Cyp2c55 (NM_028089.1,391-409).
gagcttcggcgcttctcaa

SEQ ID NO: 608788 - DNA, 19 bp, Mus musculus
  siRNA target sequence for Cyp2c55 (NM_028089.1,394-412).
cttcggcgcttctcaatca

SEQ ID NO: 608789 - DNA, 19 bp, Mus musculus
  siRNA target sequence for Cyp2c55 (NM_028089.1,397-415).
cggcgcttctcaatcatga

SEQ ID NO: 608790 - DNA, 19 bp, Mus musculus
  siRNA target sequence for Cyp2c55 (NM_028089.1,411-429).
catgaccttgaggagtttt

SEQ ID NO: 608791 - DNA, 19 bp, Mus musculus
  siRNA target sequence for Cyp2c55 (NM_028089.1,547-565).
ccctccaatgtgatctgtt

SEQ ID NO: 608792 - DNA, 19 bp, Mus musculus
  siRNA target sequence for Cyp2c55 (NM_028089.1,552-570).
caatgtgatctgttcagtt

SEQ ID NO: 608793 - DNA, 19 bp, Mus musculus
  siRNA target sequence for Cyp2c55 (NM_028089.1,556-574).
gtgatctgttcagttattt

SEQ ID NO: 608794 - DNA, 19 bp, Mus musculus
  siRNA target sequence for Cyp2c55 (NM_028089.1,598-616).
gatgagaagtttcttaact

SEQ ID NO: 608795 - DNA, 19 bp, Mus musculus
  siRNA target sequence for Cyp2c55 (NM_028089.1,618-636).
gatggagagactcaatgaa

SEQ ID NO: 608796 - DNA, 19 bp, Mus musculus
  siRNA target sequence for Cyp2c55 (NM_028089.1,682-700).
ctgcctaccctcatcaatt

SEQ ID NO: 608797 - DNA, 19 bp, Mus musculus
  siRNA target sequence for Cyp2c55 (NM_028089.1,684-702).
gcctaccctcatcaattat

SEQ ID NO: 608798 - DNA, 19 bp, Mus musculus
  siRNA target sequence for Cyp2c55 (NM_028089.1,686-704).
ctaccctcatcaattatct

SEQ ID NO: 608799 - DNA, 19 bp, Mus musculus
  siRNA target sequence for Cyp2c55 (NM_028089.1,703-721).
ctcccagggagtcataaca

SEQ ID NO: 608800 - DNA, 19 bp, Mus musculus
  siRNA target sequence for Cyp2c55 (NM_028089.1,709-727).
gggagtcataacaaagtaa

SEQ ID NO: 608801 - DNA, 19 bp, Mus musculus
  siRNA target sequence for Cyp2c55 (NM_028089.1,859-877).
ccccattcggagtttacta

SEQ ID NO: 608802 - DNA, 19 bp, Mus musculus
  siRNA target sequence for Cyp2c55 (NM_028089.1,860-878).
cccattcggagtttactat

SEQ ID NO: 608803 - DNA, 19 bp, Mus musculus
  siRNA target sequence for Cyp2c55 (NM_028089.1,861-879).
ccattcggagtttactatt

SEQ ID NO: 608804 - DNA, 19 bp, Mus musculus
  siRNA target sequence for Cyp2c55 (NM_028089.1,892-910).
gccactgtaaccgacatat

SEQ ID NO: 608805 - DNA, 19 bp, Mus musculus
  siRNA target sequence for Cyp2c55 (NM_028089.1,893-911).
ccactgtaaccgacatatt

SEQ ID NO: 608806 - DNA, 19 bp, Mus musculus
  siRNA target sequence for Cyp2c55 (NM_028089.1,896-914).
ctgtaaccgacatatttgt

SEQ ID NO: 608807 - DNA, 19 bp, Mus musculus
  siRNA target sequence for Cyp2c55 (NM_028089.1,930-948).
cacaaacattactctaaga

SEQ ID NO: 608808 - DNA, 19 bp, Mus musculus
  siRNA target sequence for Cyp2c55 (NM_028089.1,936-954).
cattactctaagatatgga

SEQ ID NO: 608809 - DNA, 19 bp, Mus musculus
  siRNA target sequence for Cyp2c55 (NM_028089.1,1128-1146).
ccatgcagctacctgtaat

SEQ ID NO: 608810 - DNA, 19 bp, Mus musculus
  siRNA target sequence for Cyp2c55 (NM_028089.1,1132-1150).
gcagctacctgtaatgtta

SEQ ID NO: 608811 - DNA, 19 bp, Mus musculus
  siRNA target sequence for Cyp2c55 (NM_028089.1,1173-1191).
caagggcacagagttagta

SEQ ID NO: 608812 - DNA, 19 bp, Mus musculus
  siRNA target sequence for Cyp2c55 (NM_028089.1,1176-1194).
gggcacagagttagtaaca

SEQ ID NO: 608813 - DNA, 19 bp, Mus musculus
  siRNA target sequence for Cyp2c55 (NM_028089.1,1177-1195).
ggcacagagttagtaacat

SEQ ID NO: 608814 - DNA, 19 bp, Mus musculus
  siRNA target sequence for Cyp2c55 (NM_028089.1,1179-1197).
cacagagttagtaacatca

SEQ ID NO: 608815 - DNA, 19 bp, Mus musculus
  siRNA target sequence for Cyp2c55 (NM_028089.1,1348-1366).
gctcgcacggagctgtttt

SEQ ID NO: 608816 - DNA, 19 bp, Mus musculus
  siRNA target sequence for Cyp2c55 (NM_028089.1,1349-1367).
ctcgcacggagctgttttt

SEQ ID NO: 608817 - DNA, 19 bp, Mus musculus
  siRNA target sequence for Cyp2c55 (NM_028089.1,1351-1369).
cgcacggagctgtttttga

SEQ ID NO: 608818 - DNA, 19 bp, Mus musculus
  siRNA target sequence for Cyp2c55 (NM_028089.1,1352-1370).
gcacggagctgtttttgat

SEQ ID NO: 608819 - DNA, 19 bp, Mus musculus
  siRNA target sequence for Cyp2c55 (NM_028089.1,1368-1386).
gattctgaccaccatttta

SEQ ID NO: 608820 - DNA, 19 bp, Mus musculus
  siRNA target sequence for Cyp2c55 (NM_028089.1,1399-1417).
ctgaaatctttggttgata

SEQ ID NO: 608821 - DNA, 19 bp, Mus musculus
  siRNA target sequence for Cyp2c55 (NM_028089.1,1436-1454).
ctccagtggccaatacttt

SEQ ID NO: 608822 - DNA, 19 bp, Mus musculus
  siRNA target sequence for Cyp2c55 (NM_028089.1,1457-1475).
gccgtgtaccaccttcata

SEQ ID NO: 608823 - DNA, 19 bp, Mus musculus
  siRNA target sequence for Cyp2c55 (NM_028089.1,1469-1487).
cttcataccagctgtactt

SEQ ID NO: 608824 - DNA, 19 bp, Mus musculus
  siRNA target sequence for Cyp2c55 (NM_028089.1,1472-1490).
cataccagctgtacttcat

SEQ ID NO: 608825 - DNA, 19 bp, Mus musculus
  siRNA target sequence for Cyp2d10 (NM_010005.2,740-758).
cctgaggttcttaatatgt

SEQ ID NO: 608826 - DNA, 19 bp, Mus musculus
  siRNA target sequence for Cyp2d10 (NM_010005.2,741-759).
ctgaggttcttaatatgtt

SEQ ID NO: 608827 - DNA, 19 bp, Mus musculus
  siRNA target sequence for Cyp2d10 (NM_010005.2,1495-1513).
gcccaggcctagaaacctt

SEQ ID NO: 608828 - DNA, 19 bp, Mus musculus
  siRNA target sequence for Cyp2d22 (NM_019823.2,386-404).
gagtcagtggttgtactaa

SEQ ID NO: 608829 - DNA, 19 bp, Mus musculus
  siRNA target sequence for Cyp2d22 (NM_019823.2,462-480).
ggccaccgctgcatttcaa

SEQ ID NO: 608830 - DNA, 19 bp, Mus musculus
  siRNA target sequence for Cyp2d22 (NM_019823.2,463-481).
gccaccgctgcatttcaat

SEQ ID NO: 608831 - DNA, 19 bp, Mus musculus
  siRNA target sequence for Cyp2d22 (NM_019823.2,501-519).
cacgctctcaaggtatagt

SEQ ID NO: 608832 - DNA, 19 bp, Mus musculus
  siRNA target sequence for Cyp2d22 (NM_019823.2,752-770).
gatgacccacgcttcatca

SEQ ID NO: 608833 - DNA, 19 bp, Mus musculus
  siRNA target sequence for Cyp2d22 (NM_019823.2,780-798).
gcttgttgaaggaaactct

SEQ ID NO: 608834 - DNA, 19 bp, Mus musculus
  siRNA target sequence for Cyp2d22 (NM_019823.2,781-799).
cttgttgaaggaaactctt

SEQ ID NO: 608835 - DNA, 19 bp, Mus musculus
  siRNA target sequence for Cyp2d22 (NM_019823.2,887-905).
gggaaaagggcctttgtta

SEQ ID NO: 608836 - DNA, 19 bp, Mus musculus
  siRNA target sequence for Cyp2d22 (NM_019823.2,1277-1295).
ggtgtacctcacaagactt

SEQ ID NO: 608837 - DNA, 19 bp, Mus musculus
  siRNA target sequence for Cyp2d22 (NM_019823.2,1296-1314).
ctcgtgacattgaactaca

SEQ ID NO: 608838 - DNA, 19 bp, Mus musculus
  siRNA target sequence for Cyp2d26 (NM_029562.1,82-100).
gctggttggagatgactta

SEQ ID NO: 608839 - DNA, 19 bp, Mus musculus
  siRNA target sequence for Cyp2d26 (NM_029562.1,583-601).
ggccgaacatcccttcaat

SEQ ID NO: 608840 - DNA, 19 bp, Mus musculus
  siRNA target sequence for Cyp2d26 (NM_029562.1,603-621).
ccagccccctcctaagtaa

SEQ ID NO: 608841 - DNA, 19 bp, Mus musculus
  siRNA target sequence for Cyp2d26 (NM_029562.1,604-622).
cagccccctcctaagtaaa

SEQ ID NO: 608842 - DNA, 19 bp, Mus musculus
  siRNA target sequence for Cyp2d26 (NM_029562.1,607-625).
ccccctcctaagtaaagct

SEQ ID NO: 608843 - DNA, 19 bp, Mus musculus
  siRNA target sequence for Cyp2d26 (NM_029562.1,637-655).
gatcgcctccctcatttat

SEQ ID NO: 608844 - DNA, 19 bp, Mus musculus
  siRNA target sequence for Cyp2d26 (NM_029562.1,657-675).
ctcgtcgatttgagtatga

SEQ ID NO: 608845 - DNA, 19 bp, Mus musculus
  siRNA target sequence for Cyp2d26 (NM_029562.1,693-711).
ggatgctcaaaacattgaa

SEQ ID NO: 608846 - DNA, 19 bp, Mus musculus
  siRNA target sequence for Cyp2d26 (NM_029562.1,781-799).
ccctggtttgcctgataaa

SEQ ID NO: 608847 - DNA, 19 bp, Mus musculus
  siRNA target sequence for Cyp2d26 (NM_029562.1,819-837).
cattcatagccttagtgaa

SEQ ID NO: 608848 - DNA, 19 bp, Mus musculus
  siRNA target sequence for Cyp2d26 (NM_029562.1,1147-1165).
cacaaacgcggtcattcat

SEQ ID NO: 608849 - DNA, 19 bp, Mus musculus
  siRNA target sequence for Cyp2d26 (NM_029562.1,1149-1167).
caaacgcggtcattcatga

SEQ ID NO: 608850 - DNA, 19 bp, Mus musculus
  siRNA target sequence for Cyp2d26 (NM_029562.1,1182-1200).
cagacatcgtcccaacaaa

SEQ ID NO: 608851 - DNA, 19 bp, Mus musculus
  siRNA target sequence for Cyp2d26 (NM_029562.1,1213-1231).
gacatcccgagacattaaa

SEQ ID NO: 608852 - DNA, 19 bp, Mus musculus
  siRNA target sequence for Cyp2d26 (NM_029562.1,1215-1233).
catcccgagacattaaatt

SEQ ID NO: 608853 - DNA, 19 bp, Mus musculus
  siRNA target sequence for Cyp2d26 (NM_029562.1,1218-1236).
cccgagacattaaattcca

SEQ ID NO: 608854 - DNA, 19 bp, Mus musculus
  siRNA target sequence for Cyp2d26 (NM_029562.1,1219-1237).
ccgagacattaaattccaa

SEQ ID NO: 608855 - DNA, 19 bp, Mus musculus
  siRNA target sequence for Cyp2e1 (NM_021282.1,159-177).
ccctcctcctcgtatccat

SEQ ID NO: 608856 - DNA, 19 bp, Mus musculus
  siRNA target sequence for Cyp2e1 (NM_021282.1,215-233).
ggacctttcccaattcctt

SEQ ID NO: 608857 - DNA, 19 bp, Mus musculus
  siRNA target sequence for Cyp2e1 (NM_021282.1,488-506).
cggaggttttccctaagta

SEQ ID NO: 608858 - DNA, 19 bp, Mus musculus
  siRNA target sequence for Cyp2e1 (NM_021282.1,489-507).
ggaggttttccctaagtat

SEQ ID NO: 608859 - DNA, 19 bp, Mus musculus
  siRNA target sequence for Cyp2e1 (NM_021282.1,643-661).
caatgtcattgcggatatt

SEQ ID NO: 608860 - DNA, 19 bp, Mus musculus
  siRNA target sequence for Cyp2e1 (NM_021282.1,647-665).
gtcattgcggatattctct

SEQ ID NO: 608861 - DNA, 19 bp, Mus musculus
  siRNA target sequence for Cyp2e1 (NM_021282.1,654-672).
cggatattctcttcaacaa

SEQ ID NO: 608862 - DNA, 19 bp, Mus musculus
  siRNA target sequence for Cyp2e1 (NM_021282.1,655-673).
ggatattctcttcaacaaa

SEQ ID NO: 608863 - DNA, 19 bp, Mus musculus
  siRNA target sequence for Cyp2e1 (NM_021282.1,670-688).
caaacgcttcgattacgat

SEQ ID NO: 608864 - DNA, 19 bp, Mus musculus
  siRNA target sequence for Cyp2e1 (NM_021282.1,706-724).
gctcatgagtttgttcaat

SEQ ID NO: 608865 - DNA, 19 bp, Mus musculus
  siRNA target sequence for Cyp2e1 (NM_021282.1,753-771).
ggatccaggcttacaatta

SEQ ID NO: 608866 - DNA, 19 bp, Mus musculus
  siRNA target sequence for Cyp2e1 (NM_021282.1,772-790).
cttttcggattatctacaa

SEQ ID NO: 608867 - DNA, 19 bp, Mus musculus
  siRNA target sequence for Cyp2e1 (NM_021282.1,777-795).
cggattatctacaatatct

SEQ ID NO: 608868 - DNA, 19 bp, Mus musculus
  siRNA target sequence for Cyp2e1 (NM_021282.1,778-796).
ggattatctacaatatcta

SEQ ID NO: 608869 - DNA, 19 bp, Mus musculus
  siRNA target sequence for Cyp2e1 (NM_021282.1,840-858).
gacagtacacacttggaaa

SEQ ID NO: 608870 - DNA, 19 bp, Mus musculus
  siRNA target sequence for Cyp2e1 (NM_021282.1,862-880).
caaggaacaccttaagtca

SEQ ID NO: 608871 - DNA, 19 bp, Mus musculus
  siRNA target sequence for Cyp2e1 (NM_021282.1,911-929).
gactgtctcctcatagaga

SEQ ID NO: 608872 - DNA, 19 bp, Mus musculus
  siRNA target sequence for Cyp2e1 (NM_021282.1,961-979).
gtacacaatggaaaatatt

SEQ ID NO: 608873 - DNA, 19 bp, Mus musculus
  siRNA target sequence for Cyp2e1 (NM_021282.1,987-1005).
ctttggccgacctgttctt

SEQ ID NO: 608874 - DNA, 19 bp, Mus musculus
  siRNA target sequence for Cyp2e1 (NM_021282.1,1038-1056).
gatatgggctcctgattct

SEQ ID NO: 608875 - DNA, 19 bp, Mus musculus
  siRNA target sequence for Cyp2e1 (NM_021282.1,1133-1151).
gtccgagacaggatgaata

SEQ ID NO: 608876 - DNA, 19 bp, Mus musculus
  siRNA target sequence for Cyp2e1 (NM_021282.1,1165-1183).
cgctgtagtgcatgagatt

SEQ ID NO: 608877 - DNA, 19 bp, Mus musculus
  siRNA target sequence for Cyp2e1 (NM_021282.1,1239-1257).
ccgtgttccgaggatatgt

SEQ ID NO: 608878 - DNA, 19 bp, Mus musculus
  siRNA target sequence for Cyp2e1 (NM_021282.1,1241-1259).
gtgttccgaggatatgtca

SEQ ID NO: 608879 - DNA, 19 bp, Mus musculus
  siRNA target sequence for Cyp2e1 (NM_021282.1,1261-1279).
ccccaagggtacagttgta

SEQ ID NO: 608880 - DNA, 19 bp, Mus musculus
  siRNA target sequence for Cyp2e1 (NM_021282.1,1264-1282).
caagggtacagttgtaatt

SEQ ID NO: 608881 - DNA, 19 bp, Mus musculus
  siRNA target sequence for Cyp2e1 (NM_021282.1,1296-1314).
cccttttatttgacaacta

SEQ ID NO: 608882 - DNA, 19 bp, Mus musculus
  siRNA target sequence for Cyp2e1 (NM_021282.1,1372-1390).
gttcaagtacagtgactat

SEQ ID NO: 608883 - DNA, 19 bp, Mus musculus
  siRNA target sequence for Cyp2e1 (NM_021282.1,1387-1405).
ctatttcaaggcgttttct

SEQ ID NO: 608884 - DNA, 19 bp, Mus musculus
  siRNA target sequence for Cyp2e1 (NM_021282.1,1519-1537).
cgacctcagccctgttaca

SEQ ID NO: 608885 - DNA, 19 bp, Mus musculus
  siRNA target sequence for Cyp2e1 (NM_021282.1,1549-1567).
cagtatcccacgcgaattt

SEQ ID NO: 608886 - DNA, 19 bp, Mus musculus
  siRNA target sequence for Cyp2e1 (NM_021282.1,1551-1569).
gtatcccacgcgaatttaa

SEQ ID NO: 608887 - DNA, 19 bp, Mus musculus
  siRNA target sequence for Cyp2e1 (NM_021282.1,1556-1574).
ccacgcgaatttaaactct

SEQ ID NO: 608888 - DNA, 19 bp, Mus musculus
  siRNA target sequence for Cyp2f2 (NM_007817.1,448-466).
ccaaatcctgcggaacttt

SEQ ID NO: 608889 - DNA, 19 bp, Mus musculus
  siRNA target sequence for Cyp2f2 (NM_007817.1,578-596).
cgctctgtgtccaacatta

SEQ ID NO: 608890 - DNA, 19 bp, Mus musculus
  siRNA target sequence for Cyp2f2 (NM_007817.1,579-597).
gctctgtgtccaacattat

SEQ ID NO: 608891 - DNA, 19 bp, Mus musculus
  siRNA target sequence for Cyp2f2 (NM_007817.1,615-633).
gaagtcgcttcgactatga

SEQ ID NO: 608892 - DNA, 19 bp, Mus musculus
  siRNA target sequence for Cyp2f2 (NM_007817.1,671-689).
gacaacttcaagattatga

SEQ ID NO: 608893 - DNA, 19 bp, Mus musculus
  siRNA target sequence for Cyp2f2 (NM_007817.1,699-717).
ggggcgagatgtacaacat

SEQ ID NO: 608894 - DNA, 19 bp, Mus musculus
  siRNA target sequence for Cyp2f2 (NM_007817.1,702-720).
gcgagatgtacaacatctt

SEQ ID NO: 608895 - DNA, 19 bp, Mus musculus
  siRNA target sequence for Cyp2f2 (NM_007817.1,723-741).
caagtgtccttgattggat

SEQ ID NO: 608896 - DNA, 19 bp, Mus musculus
  siRNA target sequence for Cyp2f2 (NM_007817.1,1506-1524).
ggcctttccagctgtgtat

SEQ ID NO: 608897 - DNA, 19 bp, Mus musculus
  siRNA target sequence for Cyp2g1 (NM_013809.1,110-128).
ccacaccaataccgttttt

SEQ ID NO: 608898 - DNA, 19 bp, Mus musculus
  siRNA target sequence for Cyp2g1 (NM_013809.1,314-332).
ctacactagagaagaactt

SEQ ID NO: 608899 - DNA, 19 bp, Mus musculus
  siRNA target sequence for Cyp2g1 (NM_013809.1,327-345).
gaacttccaaggttatggt

SEQ ID NO: 608900 - DNA, 19 bp, Mus musculus
  siRNA target sequence for Cyp2g1 (NM_013809.1,330-348).
cttccaaggttatggttta

SEQ ID NO: 608901 - DNA, 19 bp, Mus musculus
  siRNA target sequence for Cyp2g1 (NM_013809.1,362-380).
gagaacgatggaagattct

SEQ ID NO: 608902 - DNA, 19 bp, Mus musculus
  siRNA target sequence for Cyp2g1 (NM_013809.1,392-410).
ccctgaccgtccttcgaaa

SEQ ID NO: 608903 - DNA, 19 bp, Mus musculus
  siRNA target sequence for Cyp2g1 (NM_013809.1,396-414).
gaccgtccttcgaaacttt

SEQ ID NO: 608904 - DNA, 19 bp, Mus musculus
  siRNA target sequence for Cyp2g1 (NM_013809.1,489-507).
caagggagctcccatagat

SEQ ID NO: 608905 - DNA, 19 bp, Mus musculus
  siRNA target sequence for Cyp2g1 (NM_013809.1,499-517).
cccatagatcccaccttat

SEQ ID NO: 608906 - DNA, 19 bp, Mus musculus
  siRNA target sequence for Cyp2g1 (NM_013809.1,500-518).
ccatagatcccaccttata

SEQ ID NO: 608907 - DNA, 19 bp, Mus musculus
  siRNA target sequence for Cyp2g1 (NM_013809.1,532-550).
gtgtccaacgtcatctgtt

SEQ ID NO: 608908 - DNA, 19 bp, Mus musculus
  siRNA target sequence for Cyp2g1 (NM_013809.1,644-662).
cctgggcacagttatatga

SEQ ID NO: 608909 - DNA, 19 bp, Mus musculus
  siRNA target sequence for Cyp2g1 (NM_013809.1,645-663).
ctgggcacagttatatgat

SEQ ID NO: 608910 - DNA, 19 bp, Mus musculus
  siRNA target sequence for Cyp2g1 (NM_013809.1,661-679).
gatatgtactggaaagtca

SEQ ID NO: 608911 - DNA, 19 bp, Mus musculus
  siRNA target sequence for Cyp2g1 (NM_013809.1,698-716).
gacacaactacctctacaa

SEQ ID NO: 608912 - DNA, 19 bp, Mus musculus
  siRNA target sequence for Cyp2g1 (NM_013809.1,705-723).
ctacctctacaacttgata

SEQ ID NO: 608913 - DNA, 19 bp, Mus musculus
  siRNA target sequence for Cyp2g1 (NM_013809.1,805-823).
gattgctttctcatcaaga

SEQ ID NO: 608914 - DNA, 19 bp, Mus musculus
  siRNA target sequence for Cyp2g1 (NM_013809.1,822-840).
gatgcaccaggataaaagt

SEQ ID NO: 608915 - DNA, 19 bp, Mus musculus
  siRNA target sequence for Cyp2g1 (NM_013809.1,923-941).
ccacgttacggtatggatt

SEQ ID NO: 608916 - DNA, 19 bp, Mus musculus
  siRNA target sequence for Cyp2g1 (NM_013809.1,926-944).
cgttacggtatggattctt

SEQ ID NO: 608917 - DNA, 19 bp, Mus musculus
  siRNA target sequence for Cyp2j13 (NM_145548.1,303-321).
cttgatttcggaatcaagt

SEQ ID NO: 608918 - DNA, 19 bp, Mus musculus
  siRNA target sequence for Cyp2j13 (NM_145548.1,337-355).
gcagcctgcctttaatcaa

SEQ ID NO: 608919 - DNA, 19 bp, Mus musculus
  siRNA target sequence for Cyp2j13 (NM_145548.1,338-356).
cagcctgcctttaatcaaa

SEQ ID NO: 608920 - DNA, 19 bp, Mus musculus
  siRNA target sequence for Cyp2j13 (NM_145548.1,395-413).
ccgtatatttcctctacaa

SEQ ID NO: 608921 - DNA, 19 bp, Mus musculus
  siRNA target sequence for Cyp2j13 (NM_145548.1,396-414).
cgtatatttcctctacaaa

SEQ ID NO: 608922 - DNA, 19 bp, Mus musculus
  siRNA target sequence for Cyp2j13 (NM_145548.1,521-539).
gagcttagagcatcgaatt

SEQ ID NO: 608923 - DNA, 19 bp, Mus musculus
  siRNA target sequence for Cyp2j13 (NM_145548.1,523-541).
gcttagagcatcgaattca

SEQ ID NO: 608924 - DNA, 19 bp, Mus musculus
  siRNA target sequence for Cyp2j13 (NM_145548.1,733-751).
cctccctaatggtccatta

SEQ ID NO: 608925 - DNA, 19 bp, Mus musculus
  siRNA target sequence for Cyp2j13 (NM_145548.1,981-999).
gttgtccatgaaattctga

SEQ ID NO: 608926 - DNA, 19 bp, Mus musculus
  siRNA target sequence for Cyp2j13 (NM_145548.1,1007-1025).
caatagtgtccctctgaat

SEQ ID NO: 608927 - DNA, 19 bp, Mus musculus
  siRNA target sequence for Cyp2j5 (NM_010007.2,186-204).
gccgtcaccccaaaaacta

SEQ ID NO: 608928 - DNA, 19 bp, Mus musculus
  siRNA target sequence for Cyp2j5 (NM_010007.2,233-251).
gtgggcaacttctttcaaa

SEQ ID NO: 608929 - DNA, 19 bp, Mus musculus
  siRNA target sequence for Cyp2j5 (NM_010007.2,417-435).
caccggttagagaacgaat

SEQ ID NO: 608930 - DNA, 19 bp, Mus musculus
  siRNA target sequence for Cyp2j5 (NM_010007.2,421-439).
ggttagagaacgaatcaca

SEQ ID NO: 608931 - DNA, 19 bp, Mus musculus
  siRNA target sequence for Cyp2j5 (NM_010007.2,428-446).
gaacgaatcacaggtaaaa

SEQ ID NO: 608932 - DNA, 19 bp, Mus musculus
  siRNA target sequence for Cyp2j5 (NM_010007.2,593-611).
gagggaggtcaacctttta

SEQ ID NO: 608933 - DNA, 19 bp, Mus musculus
  siRNA target sequence for Cyp2j5 (NM_010007.2,595-613).
gggaggtcaaccttttaat

SEQ ID NO: 608934 - DNA, 19 bp, Mus musculus
  siRNA target sequence for Cyp2j5 (NM_010007.2,605-623).
ccttttaatcctcatttga

SEQ ID NO: 608935 - DNA, 19 bp, Mus musculus
  siRNA target sequence for Cyp2j5 (NM_010007.2,606-624).
cttttaatcctcatttgaa

SEQ ID NO: 608936 - DNA, 19 bp, Mus musculus
  siRNA target sequence for Cyp2j5 (NM_010007.2,615-633).
ctcatttgaagctcatcaa

SEQ ID NO: 608937 - DNA, 19 bp, Mus musculus
  siRNA target sequence for Cyp2j5 (NM_010007.2,733-751).
gcatttgatgggttcatca

SEQ ID NO: 608938 - DNA, 19 bp, Mus musculus
  siRNA target sequence for Cyp2j5 (NM_010007.2,766-784).
caatggcttcccatgtata

SEQ ID NO: 608939 - DNA, 19 bp, Mus musculus
  siRNA target sequence for Cyp2j5 (NM_010007.2,770-788).
ggcttcccatgtataatga

SEQ ID NO: 608940 - DNA, 19 bp, Mus musculus
  siRNA target sequence for Cyp2j5 (NM_010007.2,771-789).
gcttcccatgtataatgaa

SEQ ID NO: 608941 - DNA, 19 bp, Mus musculus
  siRNA target sequence for Cyp2j5 (NM_010007.2,772-790).
cttcccatgtataatgaaa

SEQ ID NO: 608942 - DNA, 19 bp, Mus musculus
  siRNA target sequence for Cyp2j5 (NM_010007.2,803-821).
ccacatcagaaaatattca

SEQ ID NO: 608943 - DNA, 19 bp, Mus musculus
  siRNA target sequence for Cyp2j5 (NM_010007.2,937-955).
ggaccctgatagaactaca

SEQ ID NO: 608944 - DNA, 19 bp, Mus musculus
  siRNA target sequence for Cyp2j5 (NM_010007.2,938-956).
gaccctgatagaactacaa

SEQ ID NO: 608945 - DNA, 19 bp, Mus musculus
  siRNA target sequence for Cyp2j5 (NM_010007.2,940-958).
ccctgatagaactacaagt

SEQ ID NO: 608946 - DNA, 19 bp, Mus musculus
  siRNA target sequence for Cyp2j5 (NM_010007.2,942-960).
ctgatagaactacaagttt

SEQ ID NO: 608947 - DNA, 19 bp, Mus musculus
  siRNA target sequence for Cyp2j5 (NM_010007.2,944-962).
gatagaactacaagtttca

SEQ ID NO: 608948 - DNA, 19 bp, Mus musculus
  siRNA target sequence for Cyp2j5 (NM_010007.2,1045-1063).
gctctacatgagtagctat

SEQ ID NO: 608949 - DNA, 19 bp, Mus musculus
  siRNA target sequence for Cyp2j5 (NM_010007.2,1056-1074).
gtagctatccagaaatcca

SEQ ID NO: 608950 - DNA, 19 bp, Mus musculus
  siRNA target sequence for Cyp2j5 (NM_010007.2,1195-1213).
catcgtccctttgaattct

SEQ ID NO: 608951 - DNA, 19 bp, Mus musculus
  siRNA target sequence for Cyp2j5 (NM_010007.2,1232-1250).
gacaccaagtttaatggat

SEQ ID NO: 608952 - DNA, 19 bp, Mus musculus
  siRNA target sequence for Cyp2j5 (NM_010007.2,1421-1439).
ggagaacagttggctaaat

SEQ ID NO: 608953 - DNA, 19 bp, Mus musculus
  siRNA target sequence for Cyp2j5 (NM_010007.2,1544-1562).
ccagccagctaccgaattt

SEQ ID NO: 608954 - DNA, 19 bp, Mus musculus
  siRNA target sequence for Cyp2j6 (NM_010008.2,443-461).
cctgaatcttggtgacata

SEQ ID NO: 608955 - DNA, 19 bp, Mus musculus
  siRNA target sequence for Cyp2j6 (NM_010008.2,444-462).
ctgaatcttggtgacataa

SEQ ID NO: 608956 - DNA, 19 bp, Mus musculus
  siRNA target sequence for Cyp2j6 (NM_010008.2,446-464).
gaatcttggtgacataact

SEQ ID NO: 608957 - DNA, 19 bp, Mus musculus
  siRNA target sequence for Cyp2j6 (NM_010008.2,494-512).
caaagaagcacttactcaa

SEQ ID NO: 608958 - DNA, 19 bp, Mus musculus
  siRNA target sequence for Cyp2j6 (NM_010008.2,508-526).
ctcaaatggaacaaaacat

SEQ ID NO: 608959 - DNA, 19 bp, Mus musculus
  siRNA target sequence for Cyp2j6 (NM_010008.2,530-548).
gaatcgtcctctaagtgtt

SEQ ID NO: 608960 - DNA, 19 bp, Mus musculus
  siRNA target sequence for Cyp2j6 (NM_010008.2,535-553).
gtcctctaagtgttatgca

SEQ ID NO: 608961 - DNA, 19 bp, Mus musculus
  siRNA target sequence for Cyp2j6 (NM_010008.2,544-562).
gtgttatgcaagaacgtat

SEQ ID NO: 608962 - DNA, 19 bp, Mus musculus
  siRNA target sequence for Cyp2j6 (NM_010008.2,546-564).
gttatgcaagaacgtatat

SEQ ID NO: 608963 - DNA, 19 bp, Mus musculus
  siRNA target sequence for Cyp2j6 (NM_010008.2,551-569).
gcaagaacgtatatctaat

SEQ ID NO: 608964 - DNA, 19 bp, Mus musculus
  siRNA target sequence for Cyp2j6 (NM_010008.2,841-859).
ggttactggacgaggttat

SEQ ID NO: 608965 - DNA, 19 bp, Mus musculus
  siRNA target sequence for Cyp2j6 (NM_010008.2,846-864).
ctggacgaggttatgtatt

SEQ ID NO: 608966 - DNA, 19 bp, Mus musculus
  siRNA target sequence for Cyp2j6 (NM_010008.2,866-884).
ggagacaacaatgattagt

SEQ ID NO: 608967 - DNA, 19 bp, Mus musculus
  siRNA target sequence for Cyp2j6 (NM_010008.2,878-896).
gattagtcagctgtataat

SEQ ID NO: 608968 - DNA, 19 bp, Mus musculus
  siRNA target sequence for Cyp2j6 (NM_010008.2,883-901).
gtcagctgtataatatttt

SEQ ID NO: 608969 - DNA, 19 bp, Mus musculus
  siRNA target sequence for Cyp2j6 (NM_010008.2,977-995).
ctcttgtatgattgatgat

SEQ ID NO: 608970 - DNA, 19 bp, Mus musculus
  siRNA target sequence for Cyp2j6 (NM_010008.2,1252-1270).
caagacttgctgatagaga

SEQ ID NO: 608971 - DNA, 19 bp, Mus musculus
  siRNA target sequence for Cyp2j6 (NM_010008.2,1350-1368).
gtagcaatggataccaatt

SEQ ID NO: 608972 - DNA, 19 bp, Mus musculus
  siRNA target sequence for Cyp2j6 (NM_010008.2,1353-1371).
gcaatggataccaatttga

SEQ ID NO: 608973 - DNA, 19 bp, Mus musculus
  siRNA target sequence for Cyp2j6 (NM_010008.2,1354-1372).
caatggataccaatttgaa

SEQ ID NO: 608974 - DNA, 19 bp, Mus musculus
  siRNA target sequence for Cyp2j6 (NM_010008.2,1359-1377).
gataccaatttgaatggat

SEQ ID NO: 608975 - DNA, 19 bp, Mus musculus
  siRNA target sequence for Cyp2j6 (NM_010008.2,1364-1382).
caatttgaatggatttcat

SEQ ID NO: 608976 - DNA, 19 bp, Mus musculus
  siRNA target sequence for Cyp2j6 (NM_010008.2,1391-1409).
gggtacaatggttctaaca

SEQ ID NO: 608977 - DNA, 19 bp, Mus musculus
  siRNA target sequence for Cyp2j6 (NM_010008.2,1392-1410).
ggtacaatggttctaacaa

SEQ ID NO: 608978 - DNA, 19 bp, Mus musculus
  siRNA target sequence for Cyp2j9 (NM_028979.1,184-202).
cgctccatctccggatttt

SEQ ID NO: 608979 - DNA, 19 bp, Mus musculus
  siRNA target sequence for Cyp2j9 (NM_028979.1,297-315).
gtgggttgcttgttccatt

SEQ ID NO: 608980 - DNA, 19 bp, Mus musculus
  siRNA target sequence for Cyp2j9 (NM_028979.1,301-319).
gttgcttgttccatttgga

SEQ ID NO: 608981 - DNA, 19 bp, Mus musculus
  siRNA target sequence for Cyp2j9 (NM_028979.1,359-377).
gaaatacgggaatgttcta

SEQ ID NO: 608982 - DNA, 19 bp, Mus musculus
  siRNA target sequence for Cyp2j9 (NM_028979.1,375-393).
ctaagcctggattttgcta

SEQ ID NO: 608983 - DNA, 19 bp, Mus musculus
  siRNA target sequence for Cyp2j9 (NM_028979.1,481-499).
ctcttctccgaaaacatct

SEQ ID NO: 608984 - DNA, 19 bp, Mus musculus
  siRNA target sequence for Cyp2j9 (NM_028979.1,598-616).
ggagcttagaggaacgaat

SEQ ID NO: 608985 - DNA, 19 bp, Mus musculus
  siRNA target sequence for Cyp2j9 (NM_028979.1,599-617).
gagcttagaggaacgaata

SEQ ID NO: 608986 - DNA, 19 bp, Mus musculus
  siRNA target sequence for Cyp2j9 (NM_028979.1,707-725).
caacataatttgctctatt

SEQ ID NO: 608987 - DNA, 19 bp, Mus musculus
  siRNA target sequence for Cyp2j9 (NM_028979.1,841-859).
caaggatacttcagtatct

SEQ ID NO: 608988 - DNA, 19 bp, Mus musculus
  siRNA target sequence for Cyp2j9 (NM_028979.1,912-930).
gtttccgatattgttaaca

SEQ ID NO: 608989 - DNA, 19 bp, Mus musculus
  siRNA target sequence for Cyp2j9 (NM_028979.1,1301-1319).
cacccagttggctggattt

SEQ ID NO: 608990 - DNA, 19 bp, Mus musculus
  siRNA target sequence for Cyp2j9 (NM_028979.1,1333-1351).
gtattatggttctttccaa

SEQ ID NO: 608991 - DNA, 19 bp, Mus musculus
  siRNA target sequence for Cyp2j9 (NM_028979.1,1384-1402).
ggaccaccccagatacatt

SEQ ID NO: 608992 - DNA, 19 bp, Mus musculus
  siRNA target sequence for Cyp2j9 (NM_028979.1,1517-1535).
catttttatcactactctt

SEQ ID NO: 608993 - DNA, 19 bp, Mus musculus
  siRNA target sequence for Cyp2j9 (NM_028979.1,1622-1640).
ccgcctttgtgcaattcct

SEQ ID NO: 608994 - DNA, 19 bp, Mus musculus
  siRNA target sequence for Cyp2j9 (NM_028979.1,1623-1641).
cgcctttgtgcaattccta

SEQ ID NO: 608995 - DNA, 19 bp, Mus musculus
  siRNA target sequence for Cyp2s1 (NM_028775.2,197-215).
gggcttttgcggctaagta

SEQ ID NO: 608996 - DNA, 19 bp, Mus musculus
  siRNA target sequence for Cyp2s1 (NM_028775.2,198-216).
ggcttttgcggctaagtaa

SEQ ID NO: 608997 - DNA, 19 bp, Mus musculus
  siRNA target sequence for Cyp2s1 (NM_028775.2,205-223).
gcggctaagtaagaagtat

SEQ ID NO: 608998 - DNA, 19 bp, Mus musculus
  siRNA target sequence for Cyp2s1 (NM_028775.2,306-324).
gaggtcaggctgaggaatt

SEQ ID NO: 608999 - DNA, 19 bp, Mus musculus
  siRNA target sequence for Cyp2s1 (NM_028775.2,553-571).
ggcccaggccacctctaat

SEQ ID NO: 609000 - DNA, 19 bp, Mus musculus
  siRNA target sequence for Cyp2s1 (NM_028775.2,600-618).
gtttgccctatgacgataa

SEQ ID NO: 609001 - DNA, 19 bp, Mus musculus
  siRNA target sequence for Cyp2s1 (NM_028775.2,605-623).
ccctatgacgataaagagt

SEQ ID NO: 609002 - DNA, 19 bp, Mus musculus
  siRNA target sequence for Cyp2s1 (NM_028775.2,606-624).
cctatgacgataaagagtt

SEQ ID NO: 609003 - DNA, 19 bp, Mus musculus
  siRNA target sequence for Cyp2s1 (NM_028775.2,683-701).
caggcctacgagatgttct

SEQ ID NO: 609004 - DNA, 19 bp, Mus musculus
  siRNA target sequence for Cyp2s1 (NM_028775.2,875-893).
gacccaggtacagaattca

SEQ ID NO: 609005 - DNA, 19 bp, Mus musculus
  siRNA target sequence for Cyp2s1 (NM_028775.2,1322-1340).
ctgccctactccttaggta

SEQ ID NO: 609006 - DNA, 19 bp, Mus musculus
  siRNA target sequence for Cyp3a25 (NM_019792.1,209-227).
ccgttacttggcaccattt

SEQ ID NO: 609007 - DNA, 19 bp, Mus musculus
  siRNA target sequence for Cyp3a25 (NM_019792.1,210-228).
cgttacttggcaccatttt

SEQ ID NO: 609008 - DNA, 19 bp, Mus musculus
  siRNA target sequence for Cyp3a25 (NM_019792.1,215-233).
cttggcaccattttcaact

SEQ ID NO: 609009 - DNA, 19 bp, Mus musculus
  siRNA target sequence for Cyp3a25 (NM_019792.1,1429-1447).
catcaaacttgctgtcata

SEQ ID NO: 609010 - DNA, 19 bp, Mus musculus
  siRNA target sequence for Cyp46a1 (NM_010010.1,272-290).
gaagtatggtcctgttgta

SEQ ID NO: 609011 - DNA, 19 bp, Mus musculus
  siRNA target sequence for Cyp46a1 (NM_010010.1,275-293).
gtatggtcctgttgtaaga

SEQ ID NO: 609012 - DNA, 19 bp, Mus musculus
  siRNA target sequence for Cyp46a1 (NM_010010.1,283-301).
ctgttgtaagagtcaatgt

SEQ ID NO: 609013 - DNA, 19 bp, Mus musculus
  siRNA target sequence for Cyp46a1 (NM_010010.1,285-303).
gttgtaagagtcaatgtct

SEQ ID NO: 609014 - DNA, 19 bp, Mus musculus
  siRNA target sequence for Cyp46a1 (NM_010010.1,331-349).
gtccggagtcagtcaagaa

SEQ ID NO: 609015 - DNA, 19 bp, Mus musculus
  siRNA target sequence for Cyp46a1 (NM_010010.1,333-351).
ccggagtcagtcaagaagt

SEQ ID NO: 609016 - DNA, 19 bp, Mus musculus
  siRNA target sequence for Cyp46a1 (NM_010010.1,334-352).
cggagtcagtcaagaagtt

SEQ ID NO: 609017 - DNA, 19 bp, Mus musculus
  siRNA target sequence for Cyp46a1 (NM_010010.1,432-450).
cagggcttggtgtctgaat

SEQ ID NO: 609018 - DNA, 19 bp, Mus musculus
  siRNA target sequence for Cyp46a1 (NM_010010.1,440-458).
ggtgtctgaatgtgactat

SEQ ID NO: 609019 - DNA, 19 bp, Mus musculus
  siRNA target sequence for Cyp46a1 (NM_010010.1,547-565).
cggagcagctggtggaaat

SEQ ID NO: 609020 - DNA, 19 bp, Mus musculus
  siRNA target sequence for Cyp46a1 (NM_010010.1,659-677).
gatggagaccagtatgtta

SEQ ID NO: 609021 - DNA, 19 bp, Mus musculus
  siRNA target sequence for Cyp46a1 (NM_010010.1,742-760).
gtaacaccctggcaaagtt

SEQ ID NO: 609022 - DNA, 19 bp, Mus musculus
  siRNA target sequence for Cyp46a1 (NM_010010.1,816-834).
cgccaggtggggaaggatt

SEQ ID NO: 609023 - DNA, 19 bp, Mus musculus
  siRNA target sequence for Cyp46a1 (NM_010010.1,989-1007).
caaccatctggcattcaca

SEQ ID NO: 609024 - DNA, 19 bp, Mus musculus
  siRNA target sequence for Cyp46a1 (NM_010010.1,1281-1299).
gaagacccattgactttca

SEQ ID NO: 609025 - DNA, 19 bp, Mus musculus
  siRNA target sequence for Cyp46a1 (NM_010010.1,1326-1344).
cccaagccacggttcactt

SEQ ID NO: 609026 - DNA, 19 bp, Mus musculus
  siRNA target sequence for Cyp46a1 (NM_010010.1,1327-1345).
ccaagccacggttcactta

SEQ ID NO: 609027 - DNA, 19 bp, Mus musculus
  siRNA target sequence for Cyp46a1 (NM_010010.1,1331-1349).
gccacggttcacttacttt

SEQ ID NO: 609028 - DNA, 19 bp, Mus musculus
  siRNA target sequence for Cyp4a14 (NM_007822.1,52-70).
caaggtacttggatggtat

SEQ ID NO: 609029 - DNA, 19 bp, Mus musculus
  siRNA target sequence for Cyp4a14 (NM_007822.1,129-147).
gtccaattctacttacgaa

SEQ ID NO: 609030 - DNA, 19 bp, Mus musculus
  siRNA target sequence for Cyp4a14 (NM_007822.1,228-246).
gagctccagcagattctta

SEQ ID NO: 609031 - DNA, 19 bp, Mus musculus
  siRNA target sequence for Cyp4a14 (NM_007822.1,231-249).
ctccagcagattcttatat

SEQ ID NO: 609032 - DNA, 19 bp, Mus musculus
  siRNA target sequence for Cyp4a14 (NM_007822.1,243-261).
cttatatgggtagagaaat

SEQ ID NO: 609033 - DNA, 19 bp, Mus musculus
  siRNA target sequence for Cyp4a14 (NM_007822.1,264-282).
ccaagtgcctgcttacagt

SEQ ID NO: 609034 - DNA, 19 bp, Mus musculus
  siRNA target sequence for Cyp4a14 (NM_007822.1,283-301).
gtctctcggggagcaatat

SEQ ID NO: 609035 - DNA, 19 bp, Mus musculus
  siRNA target sequence for Cyp4a14 (NM_007822.1,287-305).
ctcggggagcaatatacga

SEQ ID NO: 609036 - DNA, 19 bp, Mus musculus
  siRNA target sequence for Cyp4a14 (NM_007822.1,362-380).
ggcttctggaatttatcaa

SEQ ID NO: 609037 - DNA, 19 bp, Mus musculus
  siRNA target sequence for Cyp4a14 (NM_007822.1,500-518).
catggcggactctgtcaat

SEQ ID NO: 609038 - DNA, 19 bp, Mus musculus
  siRNA target sequence for Cyp4a14 (NM_007822.1,503-521).
ggcggactctgtcaatata

SEQ ID NO: 609039 - DNA, 19 bp, Mus musculus
  siRNA target sequence for Cyp4a14 (NM_007822.1,504-522).
gcggactctgtcaatataa

SEQ ID NO: 609040 - DNA, 19 bp, Mus musculus
  siRNA target sequence for Cyp4a14 (NM_007822.1,505-523).
cggactctgtcaatataat

SEQ ID NO: 609041 - DNA, 19 bp, Mus musculus
  siRNA target sequence for Cyp4a14 (NM_007822.1,509-527).
ctctgtcaatataatgcta

SEQ ID NO: 609042 - DNA, 19 bp, Mus musculus
  siRNA target sequence for Cyp4a14 (NM_007822.1,513-531).
gtcaatataatgctagata

SEQ ID NO: 609043 - DNA, 19 bp, Mus musculus
  siRNA target sequence for Cyp4a14 (NM_007822.1,569-587).
gatcttccactgtgtttca

SEQ ID NO: 609044 - DNA, 19 bp, Mus musculus
  siRNA target sequence for Cyp4a14 (NM_007822.1,576-594).
cactgtgtttcattgatga

SEQ ID NO: 609045 - DNA, 19 bp, Mus musculus
  siRNA target sequence for Cyp4a14 (NM_007822.1,675-693).
gctgtcgaggatctaaaca

SEQ ID NO: 609046 - DNA, 19 bp, Mus musculus
  siRNA target sequence for Cyp4a14 (NM_007822.1,676-694).
ctgtcgaggatctaaacaa

SEQ ID NO: 609047 - DNA, 19 bp, Mus musculus
  siRNA target sequence for Cyp4a14 (NM_007822.1,710-728).
cctgcggaatgccttttat

SEQ ID NO: 609048 - DNA, 19 bp, Mus musculus
  siRNA target sequence for Cyp4a14 (NM_007822.1,711-729).
ctgcggaatgccttttata

SEQ ID NO: 609049 - DNA, 19 bp, Mus musculus
  siRNA target sequence for Cyp4a14 (NM_007822.1,720-738).
gccttttataagtacaaca

SEQ ID NO: 609050 - DNA, 19 bp, Mus musculus
  siRNA target sequence for Cyp4a14 (NM_007822.1,721-739).
ccttttataagtacaacat

SEQ ID NO: 609051 - DNA, 19 bp, Mus musculus
  siRNA target sequence for Cyp4a14 (NM_007822.1,1159-1177).
ggctctatccaccagtaat

SEQ ID NO: 609052 - DNA, 19 bp, Mus musculus
  siRNA target sequence for Cyp4a14 (NM_007822.1,1160-1178).
gctctatccaccagtaata

SEQ ID NO: 609053 - DNA, 19 bp, Mus musculus
  siRNA target sequence for Cyp4a14 (NM_007822.1,1161-1179).
ctctatccaccagtaatat

SEQ ID NO: 609054 - DNA, 19 bp, Mus musculus
  siRNA target sequence for Cyp4a14 (NM_007822.1,1163-1181).
ctatccaccagtaatatct

SEQ ID NO: 609055 - DNA, 19 bp, Mus musculus
  siRNA target sequence for Cyp4a14 (NM_007822.1,1244-1262).
cacagccacaatttccatt

SEQ ID NO: 609056 - DNA, 19 bp, Mus musculus
  siRNA target sequence for Cyp4a14 (NM_007822.1,1246-1264).
cagccacaatttccattta

SEQ ID NO: 609057 - DNA, 19 bp, Mus musculus
  siRNA target sequence for Cyp4a14 (NM_007822.1,1305-1323).
gtgtttgacccctctagat

SEQ ID NO: 609058 - DNA, 19 bp, Mus musculus
  siRNA target sequence for Cyp4a14 (NM_007822.1,1307-1325).
gtttgacccctctagattt

SEQ ID NO: 609059 - DNA, 19 bp, Mus musculus
  siRNA target sequence for Cyp4a14 (NM_007822.1,1486-1504).
ccattgcaagacttgtgtt

SEQ ID NO: 609060 - DNA, 19 bp, Mus musculus
  siRNA target sequence for Cyp4b1 (NM_007823.1,217-235).
ctggacaaggtggtaactt

SEQ ID NO: 609061 - DNA, 19 bp, Mus musculus
  siRNA target sequence for Cyp4b1 (NM_007823.1,985-1003).
ggtatctcttggtttctct

SEQ ID NO: 609062 - DNA, 19 bp, Mus musculus
  siRNA target sequence for Cyp4b1 (NM_007823.1,1002-1020).
ctactgcatggccctttat

SEQ ID NO: 609063 - DNA, 19 bp, Mus musculus
  siRNA target sequence for Cyp4b1 (NM_007823.1,1079-1097).
ccttccagtgggatgatct

SEQ ID NO: 609064 - DNA, 19 bp, Mus musculus
  siRNA target sequence for Cyp4b1 (NM_007823.1,1179-1197).
cagcaagccagtaaccttt

SEQ ID NO: 609065 - DNA, 19 bp, Mus musculus
  siRNA target sequence for Cyp4b1 (NM_007823.1,1448-1466).
ctccagatccctcaaagat

SEQ ID NO: 609066 - DNA, 19 bp, Mus musculus
  siRNA target sequence for Cyp4f13 (NM_130882.1,136-154).
ggattctagcccgaattct

SEQ ID NO: 609067 - DNA, 19 bp, Mus musculus
  siRNA target sequence for Cyp4f13 (NM_130882.1,292-310).
gccatgacttccatgatgt

SEQ ID NO: 609068 - DNA, 19 bp, Mus musculus
  siRNA target sequence for Cyp4f13 (NM_130882.1,353-371).
cgtccacccgaacttcatt

SEQ ID NO: 609069 - DNA, 19 bp, Mus musculus
  siRNA target sequence for Cyp4f13 (NM_130882.1,396-414).
gctgttgcacccaaggaaa

SEQ ID NO: 609070 - DNA, 19 bp, Mus musculus
  siRNA target sequence for Cyp4f13 (NM_130882.1,397-415).
ctgttgcacccaaggaaat

SEQ ID NO: 609071 - DNA, 19 bp, Mus musculus
  siRNA target sequence for Cyp4f13 (NM_130882.1,399-417).
gttgcacccaaggaaatga

SEQ ID NO: 609072 - DNA, 19 bp, Mus musculus
  siRNA target sequence for Cyp4f13 (NM_130882.1,884-902).
caatacgcagggtgttgaa

SEQ ID NO: 609073 - DNA, 19 bp, Mus musculus
  siRNA target sequence for Cyp4f13 (NM_130882.1,919-937).
ctaagaccaaaactttaga

SEQ ID NO: 609074 - DNA, 19 bp, Mus musculus
  siRNA target sequence for Cyp4f13 (NM_130882.1,956-974).
gatggctgaggatgaacat

SEQ ID NO: 609075 - DNA, 19 bp, Mus musculus
  siRNA target sequence for Cyp4f13 (NM_130882.1,1143-1161).
gactccgaggagattgaat

SEQ ID NO: 609076 - DNA, 19 bp, Mus musculus
  siRNA target sequence for Cyp4f13 (NM_130882.1,1220-1238).
gcatcccccagtcttatta

SEQ ID NO: 609077 - DNA, 19 bp, Mus musculus
  siRNA target sequence for Cyp4f13 (NM_130882.1,1221-1239).
catcccccagtcttattaa

SEQ ID NO: 609078 - DNA, 19 bp, Mus musculus
  siRNA target sequence for Cyp4f13 (NM_130882.1,1361-1379).
ggtctacaacccctttaga

SEQ ID NO: 609079 - DNA, 19 bp, Mus musculus
  siRNA target sequence for Cyp4f13 (NM_130882.1,1362-1380).
gtctacaacccctttagat

SEQ ID NO: 609080 - DNA, 19 bp, Mus musculus
  siRNA target sequence for Cyp4f13 (NM_130882.1,1364-1382).
ctacaacccctttagattt

SEQ ID NO: 609081 - DNA, 19 bp, Mus musculus
  siRNA target sequence for Cyp4f14 (NM_022434.1,545-563).
gcactcaaggatgtgatat

SEQ ID NO: 609082 - DNA, 19 bp, Mus musculus
  siRNA target sequence for Cyp4f14 (NM_022434.1,721-739).
caagtggcaacggttgatt

SEQ ID NO: 609083 - DNA, 19 bp, Mus musculus
  siRNA target sequence for Cyp4f14 (NM_022434.1,724-742).
gtggcaacggttgatttca

SEQ ID NO: 609084 - DNA, 19 bp, Mus musculus
  siRNA target sequence for Cyp4f14 (NM_022434.1,726-744).
ggcaacggttgatttcaga

SEQ ID NO: 609085 - DNA, 19 bp, Mus musculus
  siRNA target sequence for Cyp4f14 (NM_022434.1,727-745).
gcaacggttgatttcagat

SEQ ID NO: 609086 - DNA, 19 bp, Mus musculus
  siRNA target sequence for Cyp4f14 (NM_022434.1,838-856).
ggagaagtccagtgaatat

SEQ ID NO: 609087 - DNA, 19 bp, Mus musculus
  siRNA target sequence for Cyp4f14 (NM_022434.1,1042-1060).
ggatgacttccttaagtct

SEQ ID NO: 609088 - DNA, 19 bp, Mus musculus
  siRNA target sequence for Cyp4f14 (NM_022434.1,1427-1445).
cggaccattcccaaaggta

SEQ ID NO: 609089 - DNA, 19 bp, Mus musculus
  siRNA target sequence for Cyp4f14 (NM_022434.1,1428-1446).
ggaccattcccaaaggtat

SEQ ID NO: 609090 - DNA, 19 bp, Mus musculus
  siRNA target sequence for Cyp4f14 (NM_022434.1,1662-1680).
gactcctaccggatgacaa

SEQ ID NO: 609091 - DNA, 19 bp, Mus musculus
  siRNA target sequence for Cyp4f15 (NM_134127.1,201-219).
cctcaccatggctgctttt

SEQ ID NO: 609092 - DNA, 19 bp, Mus musculus
  siRNA target sequence for Cyp4f15 (NM_134127.1,257-275).
ctgactcagacctatatct

SEQ ID NO: 609093 - DNA, 19 bp, Mus musculus
  siRNA target sequence for Cyp4f15 (NM_134127.1,261-279).
ctcagacctatatcttcta

SEQ ID NO: 609094 - DNA, 19 bp, Mus musculus
  siRNA target sequence for Cyp4f15 (NM_134127.1,263-281).
cagacctatatcttctaca

SEQ ID NO: 609095 - DNA, 19 bp, Mus musculus
  siRNA target sequence for Cyp4f15 (NM_134127.1,274-292).
cttctacagaacatatcat

SEQ ID NO: 609096 - DNA, 19 bp, Mus musculus
  siRNA target sequence for Cyp4f15 (NM_134127.1,338-356).
ggtcacctaggcatgatca

SEQ ID NO: 609097 - DNA, 19 bp, Mus musculus
  siRNA target sequence for Cyp4f15 (NM_134127.1,428-446).
ctgggtcctatcattccta

SEQ ID NO: 609098 - DNA, 19 bp, Mus musculus
  siRNA target sequence for Cyp4f15 (NM_134127.1,432-450).
gtcctatcattcctatcat

SEQ ID NO: 609099 - DNA, 19 bp, Mus musculus
  siRNA target sequence for Cyp4f15 (NM_134127.1,498-516).
cttcggtagccctaaagga

SEQ ID NO: 609100 - DNA, 19 bp, Mus musculus
  siRNA target sequence for Cyp4f15 (NM_134127.1,507-525).
ccctaaaggaagtagtctt

SEQ ID NO: 609101 - DNA, 19 bp, Mus musculus
  siRNA target sequence for Cyp4f15 (NM_134127.1,515-533).
gaagtagtcttctacagtt

SEQ ID NO: 609102 - DNA, 19 bp, Mus musculus
  siRNA target sequence for Cyp4f15 (NM_134127.1,1248-1266).
gagagtctacagaaattga

SEQ ID NO: 609103 - DNA, 19 bp, Mus musculus
  siRNA target sequence for Cyp4f15 (NM_134127.1,1250-1268).
gagtctacagaaattgagt

SEQ ID NO: 609104 - DNA, 19 bp, Mus musculus
  siRNA target sequence for Cyp4f15 (NM_134127.1,1584-1602).
gacagacgtttgctatgaa

SEQ ID NO: 609105 - DNA, 19 bp, Mus musculus
  siRNA target sequence for Cyp4f16 (NM_024442.1,382-400).
cccaaaggacatgacattt

SEQ ID NO: 609106 - DNA, 19 bp, Mus musculus
  siRNA target sequence for Cyp4f16 (NM_024442.1,383-401).
ccaaaggacatgacatttt

SEQ ID NO: 609107 - DNA, 19 bp, Mus musculus
  siRNA target sequence for Cyp4f16 (NM_024442.1,1198-1216).
gctacattccccagtcata

SEQ ID NO: 609108 - DNA, 19 bp, Mus musculus
  siRNA target sequence for Cyp4v3 (NM_133969.1,244-262).
gtgggcagaaactattgct

SEQ ID NO: 609109 - DNA, 19 bp, Mus musculus
  siRNA target sequence for Cyp4v3 (NM_133969.1,395-413).
ggtgggacacgcgctttat

SEQ ID NO: 609110 - DNA, 19 bp, Mus musculus
  siRNA target sequence for Cyp4v3 (NM_133969.1,396-414).
gtgggacacgcgctttata

SEQ ID NO: 609111 - DNA, 19 bp, Mus musculus
  siRNA target sequence for Cyp4v3 (NM_133969.1,399-417).
ggacacgcgctttatatga

SEQ ID NO: 609112 - DNA, 19 bp, Mus musculus
  siRNA target sequence for Cyp4v3 (NM_133969.1,400-418).
gacacgcgctttatatgaa

SEQ ID NO: 609113 - DNA, 19 bp, Mus musculus
  siRNA target sequence for Cyp4v3 (NM_133969.1,443-461).
gcagctaatttattacaca

SEQ ID NO: 609114 - DNA, 19 bp, Mus musculus
  siRNA target sequence for Cyp4v3 (NM_133969.1,471-489).
cgacacctgccgatcatta

SEQ ID NO: 609115 - DNA, 19 bp, Mus musculus
  siRNA target sequence for Cyp4v3 (NM_133969.1,472-490).
gacacctgccgatcattaa

SEQ ID NO: 609116 - DNA, 19 bp, Mus musculus
  siRNA target sequence for Cyp4v3 (NM_133969.1,476-494).
cctgccgatcattaaactt

SEQ ID NO: 609117 - DNA, 19 bp, Mus musculus
  siRNA target sequence for Cyp4v3 (NM_133969.1,477-495).
ctgccgatcattaaacttt

SEQ ID NO: 609118 - DNA, 19 bp, Mus musculus
  siRNA target sequence for Cyp4v3 (NM_133969.1,554-572).
gaccagttctaagcaaatt

SEQ ID NO: 609119 - DNA, 19 bp, Mus musculus
  siRNA target sequence for Cyp4v3 (NM_133969.1,556-574).
ccagttctaagcaaattga

SEQ ID NO: 609120 - DNA, 19 bp, Mus musculus
  siRNA target sequence for Cyp4v3 (NM_133969.1,557-575).
cagttctaagcaaattgat

SEQ ID NO: 609121 - DNA, 19 bp, Mus musculus
  siRNA target sequence for Cyp4v3 (NM_133969.1,559-577).
gttctaagcaaattgataa

SEQ ID NO: 609122 - DNA, 19 bp, Mus musculus
  siRNA target sequence for Cyp4v3 (NM_133969.1,566-584).
gcaaattgataaatcgttt

SEQ ID NO: 609123 - DNA, 19 bp, Mus musculus
  siRNA target sequence for Cyp4v3 (NM_133969.1,567-585).
caaattgataaatcgtttt

SEQ ID NO: 609124 - DNA, 19 bp, Mus musculus
  siRNA target sequence for Cyp4v3 (NM_133969.1,608-626).
gctgggactaggacttctt

SEQ ID NO: 609125 - DNA, 19 bp, Mus musculus
  siRNA target sequence for Cyp4v3 (NM_133969.1,611-629).
gggactaggacttcttaca

SEQ ID NO: 609126 - DNA, 19 bp, Mus musculus
  siRNA target sequence for Cyp4v3 (NM_133969.1,615-633).
ctaggacttcttacaagta

SEQ ID NO: 609127 - DNA, 19 bp, Mus musculus
  siRNA target sequence for Cyp4v3 (NM_133969.1,666-684).
ctaacgcccactttccatt

SEQ ID NO: 609128 - DNA, 19 bp, Mus musculus
  siRNA target sequence for Cyp4v3 (NM_133969.1,673-691).
ccactttccattttaccat

SEQ ID NO: 609129 - DNA, 19 bp, Mus musculus
  siRNA target sequence for Cyp4v3 (NM_133969.1,722-740).
gcaagcaaatatattggtt

SEQ ID NO: 609130 - DNA, 19 bp, Mus musculus
  siRNA target sequence for Cyp4v3 (NM_133969.1,723-741).
caagcaaatatattggtta

SEQ ID NO: 609131 - DNA, 19 bp, Mus musculus
  siRNA target sequence for Cyp4v3 (NM_133969.1,761-779).
caaccaagaagcctttaat

SEQ ID NO: 609132 - DNA, 19 bp, Mus musculus
  siRNA target sequence for Cyp4v3 (NM_133969.1,842-860).
catcggagctcaaagcaat

SEQ ID NO: 609133 - DNA, 19 bp, Mus musculus
  siRNA target sequence for Cyp4v3 (NM_133969.1,845-863).
cggagctcaaagcaataat

SEQ ID NO: 609134 - DNA, 19 bp, Mus musculus
  siRNA target sequence for Cyp4v3 (NM_133969.1,847-865).
gagctcaaagcaataatga

SEQ ID NO: 609135 - DNA, 19 bp, Mus musculus
  siRNA target sequence for Cyp4v3 (NM_133969.1,849-867).
gctcaaagcaataatgatt

SEQ ID NO: 609136 - DNA, 19 bp, Mus musculus
  siRNA target sequence for Cyp4v3 (NM_133969.1,872-890).
gtatgtccgtacagtgtat

SEQ ID NO: 609137 - DNA, 19 bp, Mus musculus
  siRNA target sequence for Cyp4v3 (NM_133969.1,876-894).
gtccgtacagtgtatagga

SEQ ID NO: 609138 - DNA, 19 bp, Mus musculus
  siRNA target sequence for Cyp4v3 (NM_133969.1,885-903).
gtgtataggatgagtgata

SEQ ID NO: 609139 - DNA, 19 bp, Mus musculus
  siRNA target sequence for Cyp4v3 (NM_133969.1,892-910).
ggatgagtgatatgatata

SEQ ID NO: 609140 - DNA, 19 bp, Mus musculus
  siRNA target sequence for Cyp4v3 (NM_133969.1,896-914).
gagtgatatgatatataga

SEQ ID NO: 609141 - DNA, 19 bp, Mus musculus
  siRNA target sequence for Cyp4v3 (NM_133969.1,949-967).
ggtaccttgtgtttaaaga

SEQ ID NO: 609142 - DNA, 19 bp, Mus musculus
  siRNA target sequence for Cyp4v3 (NM_133969.1,950-968).
gtaccttgtgtttaaagaa

SEQ ID NO: 609143 - DNA, 19 bp, Mus musculus
  siRNA target sequence for Cyp4v3 (NM_133969.1,966-984).
gaaggacgggaccacaaaa

SEQ ID NO: 609144 - DNA, 19 bp, Mus musculus
  siRNA target sequence for Cyp4v3 (NM_133969.1,977-995).
ccacaaaaggggactcaaa

SEQ ID NO: 609145 - DNA, 19 bp, Mus musculus
  siRNA target sequence for Cyp4v3 (NM_133969.1,1022-1040).
cattgctgaacgagtcaaa

SEQ ID NO: 609146 - DNA, 19 bp, Mus musculus
  siRNA target sequence for Cyp4v3 (NM_133969.1,1080-1098).
ggtcctatcccctccaaaa

SEQ ID NO: 609147 - DNA, 19 bp, Mus musculus
  siRNA target sequence for Cyp4v3 (NM_133969.1,1081-1099).
gtcctatcccctccaaaaa

SEQ ID NO: 609148 - DNA, 19 bp, Mus musculus
  siRNA target sequence for Cyp4v3 (NM_133969.1,1216-1234).
caactgctgctgcaatcaa

SEQ ID NO: 609149 - DNA, 19 bp, Mus musculus
  siRNA target sequence for Cyp4v3 (NM_133969.1,1227-1245).
gcaatcaactggtccttat

SEQ ID NO: 609150 - DNA, 19 bp, Mus musculus
  siRNA target sequence for Cyp4v3 (NM_133969.1,1232-1250).
caactggtccttataccta

SEQ ID NO: 609151 - DNA, 19 bp, Mus musculus
  siRNA target sequence for Cyp4v3 (NM_133969.1,1335-1353).
gaagacctgaagaaactta

SEQ ID NO: 609152 - DNA, 19 bp, Mus musculus
  siRNA target sequence for Cyp4v3 (NM_133969.1,1338-1356).
gacctgaagaaacttaaat

SEQ ID NO: 609153 - DNA, 19 bp, Mus musculus
  siRNA target sequence for Cyp4v3 (NM_133969.1,1435-1453).
gtgaagtgggcggttacaa

SEQ ID NO: 609154 - DNA, 19 bp, Mus musculus
  siRNA target sequence for Cyp4v3 (NM_133969.1,1440-1458).
gtgggcggttacaaagtca

SEQ ID NO: 609155 - DNA, 19 bp, Mus musculus
  siRNA target sequence for Cyp4v3 (NM_133969.1,1445-1463).
cggttacaaagtcacaaaa

SEQ ID NO: 609156 - DNA, 19 bp, Mus musculus
  siRNA target sequence for Cyp4v3 (NM_133969.1,1459-1477).
caaaaggaacggaagcaat

SEQ ID NO: 609157 - DNA, 19 bp, Mus musculus
  siRNA target sequence for Cyp4v3 (NM_133969.1,1465-1483).
gaacggaagcaatcatcat

SEQ ID NO: 609158 - DNA, 19 bp, Mus musculus
  siRNA target sequence for Cyp4v3 (NM_133969.1,1535-1553).
ccgaccagagcggttcttt

SEQ ID NO: 609159 - DNA, 19 bp, Mus musculus
  siRNA target sequence for Cyp4v3 (NM_133969.1,1544-1562).
gcggttctttcctgaaaat

SEQ ID NO: 609160 - DNA, 19 bp, Mus musculus
  siRNA target sequence for Cyp4v3 (NM_133969.1,1602-1620).
gctggacctcgaaactgta

SEQ ID NO: 609161 - DNA, 19 bp, Mus musculus
  siRNA target sequence for Cyp4v3 (NM_133969.1,1603-1621).
ctggacctcgaaactgtat

SEQ ID NO: 609162 - DNA, 19 bp, Mus musculus
  siRNA target sequence for Cyp4v3 (NM_133969.1,1616-1634).
ctgtattggtcaaaagttt

SEQ ID NO: 609163 - DNA, 19 bp, Mus musculus
  siRNA target sequence for Cyp7b1 (NM_007825.1,205-223).
gtgaaccacccttgataaa

SEQ ID NO: 609164 - DNA, 19 bp, Mus musculus
  siRNA target sequence for Cyp7b1 (NM_007825.1,260-278).
ctttaaggatccgttaact

SEQ ID NO: 609165 - DNA, 19 bp, Mus musculus
  siRNA target sequence for Cyp7b1 (NM_007825.1,267-285).
gatccgttaactttcttga

SEQ ID NO: 609166 - DNA, 19 bp, Mus musculus
  siRNA target sequence for Cyp7b1 (NM_007825.1,270-288).
ccgttaactttcttgaaaa

SEQ ID NO: 609167 - DNA, 19 bp, Mus musculus
  siRNA target sequence for Cyp7b1 (NM_007825.1,300-318).
caacatggtgacactttca

SEQ ID NO: 609168 - DNA, 19 bp, Mus musculus
  siRNA target sequence for Cyp7b1 (NM_007825.1,326-344).
ccttgtggggaagtatata

SEQ ID NO: 609169 - DNA, 19 bp, Mus musculus
  siRNA target sequence for Cyp7b1 (NM_007825.1,332-350).
ggggaagtatataacattt

SEQ ID NO: 609170 - DNA, 19 bp, Mus musculus
  siRNA target sequence for Cyp7b1 (NM_007825.1,334-352).
ggaagtatataacatttgt

SEQ ID NO: 609171 - DNA, 19 bp, Mus musculus
  siRNA target sequence for Cyp7b1 (NM_007825.1,361-379).
ctttccagtaccagtatgt

SEQ ID NO: 609172 - DNA, 19 bp, Mus musculus
  siRNA target sequence for Cyp7b1 (NM_007825.1,413-431).
gttcagcagccgattatca

SEQ ID NO: 609173 - DNA, 19 bp, Mus musculus
  siRNA target sequence for Cyp7b1 (NM_007825.1,432-450).
gcgaaagccttctctgtaa

SEQ ID NO: 609174 - DNA, 19 bp, Mus musculus
  siRNA target sequence for Cyp7b1 (NM_007825.1,463-481).
ctgatgacgaccttaatga

SEQ ID NO: 609175 - DNA, 19 bp, Mus musculus
  siRNA target sequence for Cyp7b1 (NM_007825.1,485-503).
cgttcacagagcctatcta

SEQ ID NO: 609176 - DNA, 19 bp, Mus musculus
  siRNA target sequence for Cyp7b1 (NM_007825.1,628-646).
gctcactggtatttgagat

SEQ ID NO: 609177 - DNA, 19 bp, Mus musculus
  siRNA target sequence for Cyp7b1 (NM_007825.1,647-665).
cacatttgcgactctatat

SEQ ID NO: 609178 - DNA, 19 bp, Mus musculus
  siRNA target sequence for Cyp7b1 (NM_007825.1,655-673).
cgactctatatggaaaaat

SEQ ID NO: 609179 - DNA, 19 bp, Mus musculus
  siRNA target sequence for Cyp7b1 (NM_007825.1,703-721).
gtgagctaagggatgattt

SEQ ID NO: 609180 - DNA, 19 bp, Mus musculus
  siRNA target sequence for Cyp7b1 (NM_007825.1,705-723).
gagctaagggatgattttt

SEQ ID NO: 609181 - DNA, 19 bp, Mus musculus
  siRNA target sequence for Cyp7b1 (NM_007825.1,737-755).
catgttcccatacttagta

SEQ ID NO: 609182 - DNA, 19 bp, Mus musculus
  siRNA target sequence for Cyp7b1 (NM_007825.1,845-863).
gcaaggacagtcaaaaatt

SEQ ID NO: 609183 - DNA, 19 bp, Mus musculus
  siRNA target sequence for Cyp7b1 (NM_007825.1,879-897).
gatctgctgaaaagatact

SEQ ID NO: 609184 - DNA, 19 bp, Mus musculus
  siRNA target sequence for Cyp7b1 (NM_007825.1,882-900).
ctgctgaaaagatactata

SEQ ID NO: 609185 - DNA, 19 bp, Mus musculus
  siRNA target sequence for Cyp7b1 (NM_007825.1,977-995).
gttctgggcaatgtattat

SEQ ID NO: 609186 - DNA, 19 bp, Mus musculus
  siRNA target sequence for Cyp7b1 (NM_007825.1,983-1001).
ggcaatgtattatattctt

SEQ ID NO: 609187 - DNA, 19 bp, Mus musculus
  siRNA target sequence for Cyp7b1 (NM_007825.1,1024-1042).
ccctgcgtgacgaaattga

SEQ ID NO: 609188 - DNA, 19 bp, Mus musculus
  siRNA target sequence for Cyp7b1 (NM_007825.1,1026-1044).
ctgcgtgacgaaattgaca

SEQ ID NO: 609189 - DNA, 19 bp, Mus musculus
  siRNA target sequence for Cyp7b1 (NM_007825.1,1030-1048).
gtgacgaaattgacagttt

SEQ ID NO: 609190 - DNA, 19 bp, Mus musculus
  siRNA target sequence for Cyp7b1 (NM_007825.1,1191-1209).
caggaggatatgaatctca

SEQ ID NO: 609191 - DNA, 19 bp, Mus musculus
  siRNA target sequence for Cyp7b1 (NM_007825.1,1295-1313).
cgatgctccaaaggaattt

SEQ ID NO: 609192 - DNA, 19 bp, Mus musculus
  siRNA target sequence for Cyp7b1 (NM_007825.1,1299-1317).
gctccaaaggaatttaggt

SEQ ID NO: 609193 - DNA, 19 bp, Mus musculus
  siRNA target sequence for Cyp7b1 (NM_007825.1,1401-1419).
ggactcggaacaagcaaat

SEQ ID NO: 609194 - DNA, 19 bp, Mus musculus
  siRNA target sequence for Cyp7b1 (NM_007825.1,1415-1433).
caaatgtccagggagatat

SEQ ID NO: 609195 - DNA, 19 bp, Mus musculus
  siRNA target sequence for Cyp7b1 (NM_007825.1,1505-1523).
gaagcctatagggctaaat

SEQ ID NO: 609196 - DNA, 19 bp, Mus musculus
  siRNA target sequence for Cyp7b1 (NM_007825.1,1509-1527).
cctatagggctaaatcaca

SEQ ID NO: 609197 - DNA, 19 bp, Mus musculus
  siRNA target sequence for Cyp7b1 (NM_007825.1,1526-1544).
cagtcggatgtttttaggt

SEQ ID NO: 609198 - DNA, 19 bp, Mus musculus
  siRNA target sequence for Cyp7b1 (NM_007825.1,1528-1546).
gtcggatgtttttaggtat

SEQ ID NO: 609199 - DNA, 19 bp, Mus musculus
  siRNA target sequence for Cyp7b1 (NM_007825.1,1557-1575).
gattctgccgtctccttta

SEQ ID NO: 609200 - DNA, 19 bp, Mus musculus
  siRNA target sequence for Cyp7b1 (NM_007825.1,1561-1579).
ctgccgtctcctttaggta

SEQ ID NO: 609201 - DNA, 19 bp, Mus musculus
  siRNA target sequence for Cyp8b1 (NM_010012.2,190-208).
gctttccggaagaatatgt

SEQ ID NO: 609202 - DNA, 19 bp, Mus musculus
  siRNA target sequence for Cyp8b1 (NM_010012.2,271-289).
cagtacttcacctttgtca

SEQ ID NO: 609203 - DNA, 19 bp, Mus musculus
  siRNA target sequence for Cyp8b1 (NM_010012.2,340-358).
gacttccagtcctatgcaa

SEQ ID NO: 609204 - DNA, 19 bp, Mus musculus
  siRNA target sequence for Cyp8b1 (NM_010012.2,342-360).
cttccagtcctatgcaaaa

SEQ ID NO: 609205 - DNA, 19 bp, Mus musculus
  siRNA target sequence for Cyp8b1 (NM_010012.2,345-363).
ccagtcctatgcaaaagaa

SEQ ID NO: 609206 - DNA, 19 bp, Mus musculus
  siRNA target sequence for Cyp8b1 (NM_010012.2,663-681).
gttccgtcgatttgacttt

SEQ ID NO: 609207 - DNA, 19 bp, Mus musculus
  siRNA target sequence for Cyp8b1 (NM_010012.2,667-685).
cgtcgatttgactttctct

SEQ ID NO: 609208 - DNA, 19 bp, Mus musculus
  siRNA target sequence for Cyp8b1 (NM_010012.2,668-686).
gtcgatttgactttctctt

SEQ ID NO: 609209 - DNA, 19 bp, Mus musculus
  siRNA target sequence for Cyp8b1 (NM_010012.2,795-813).
cggcataagctgttggtta

SEQ ID NO: 609210 - DNA, 19 bp, Mus musculus
  siRNA target sequence for Cyp8b1 (NM_010012.2,865-883).
gacaaatttaactttatga

SEQ ID NO: 609211 - DNA, 19 bp, Mus musculus
  siRNA target sequence for Cyp8b1 (NM_010012.2,1015-1033).
gccaagaagtcgttcactt

SEQ ID NO: 609212 - DNA, 19 bp, Mus musculus
  siRNA target sequence for Cyp8b1 (NM_010012.2,1020-1038).
gaagtcgttcactttcact

SEQ ID NO: 609213 - DNA, 19 bp, Mus musculus
  siRNA target sequence for Cyp8b1 (NM_010012.2,1205-1223).
cctatctctcagtacacat

SEQ ID NO: 609214 - DNA, 19 bp, Mus musculus
  siRNA target sequence for Cyp8b1 (NM_010012.2,1248-1266).
cacagccttcaagtatgat

SEQ ID NO: 609215 - DNA, 19 bp, Mus musculus
  siRNA target sequence for Cyp8b1 (NM_010012.2,1289-1307).
cccggaaagtggacttcta

SEQ ID NO: 609216 - DNA, 19 bp, Mus musculus
  siRNA target sequence for Cyp8b1 (NM_010012.2,1384-1402).
gccctcagcgagatgaaga

SEQ ID NO: 609217 - DNA, 19 bp, Mus musculus
  siRNA target sequence for Cyp8b1 (NM_010012.2,1408-1426).
gtccttcttatgattatgt

SEQ ID NO: 609218 - DNA, 19 bp, Mus musculus
  siRNA target sequence for Fmo2 (NM_018881.2,78-96).
ggggtcagtggcctaatct

SEQ ID NO: 609219 - DNA, 19 bp, Mus musculus
  siRNA target sequence for Fmo2 (NM_018881.2,80-98).
ggtcagtggcctaatctct

SEQ ID NO: 609220 - DNA, 19 bp, Mus musculus
  siRNA target sequence for Fmo2 (NM_018881.2,169-187).
ggagattcaaagaaaacgt

SEQ ID NO: 609221 - DNA, 19 bp, Mus musculus
  siRNA target sequence for Fmo2 (NM_018881.2,206-224).
catctaccgctctgtcatt

SEQ ID NO: 609222 - DNA, 19 bp, Mus musculus
  siRNA target sequence for Fmo2 (NM_018881.2,226-244).
ccaacactagcaaagaaat

SEQ ID NO: 609223 - DNA, 19 bp, Mus musculus
  siRNA target sequence for Fmo2 (NM_018881.2,299-317).
ctctaaactcctggaatat

SEQ ID NO: 609224 - DNA, 19 bp, Mus musculus
  siRNA target sequence for Fmo2 (NM_018881.2,347-365).
cctaaaatatattcagttt

SEQ ID NO: 609225 - DNA, 19 bp, Mus musculus
  siRNA target sequence for Fmo2 (NM_018881.2,541-559).
ggttccgaggccagtattt

SEQ ID NO: 609226 - DNA, 19 bp, Mus musculus
  siRNA target sequence for Fmo2 (NM_018881.2,546-564).
cgaggccagtatttccata

SEQ ID NO: 609227 - DNA, 19 bp, Mus musculus
  siRNA target sequence for Fmo2 (NM_018881.2,704-722).
ggtcatgagtcgaatctct

SEQ ID NO: 609228 - DNA, 19 bp, Mus musculus
  siRNA target sequence for Fmo2 (NM_018881.2,746-764).
ggtgttccacactagattt

SEQ ID NO: 609229 - DNA, 19 bp, Mus musculus
  siRNA target sequence for Fmo2 (NM_018881.2,831-849).
cgatggttcaaccatgaaa

SEQ ID NO: 609230 - DNA, 19 bp, Mus musculus
  siRNA target sequence for Fmo2 (NM_018881.2,867-885).
cagaacaaataccttatga

SEQ ID NO: 609231 - DNA, 19 bp, Mus musculus
  siRNA target sequence for Fmo2 (NM_018881.2,1033-1051).
cggggtatacgttctcttt

SEQ ID NO: 609232 - DNA, 19 bp, Mus musculus
  siRNA target sequence for Fmo2 (NM_018881.2,1034-1052).
ggggtatacgttctctttt

SEQ ID NO: 609233 - DNA, 19 bp, Mus musculus
  siRNA target sequence for Fmo2 (NM_018881.2,1035-1053).
gggtatacgttctcttttt

SEQ ID NO: 609234 - DNA, 19 bp, Mus musculus
  siRNA target sequence for Fmo2 (NM_018881.2,1074-1092).
gttaaagtggaggataata

SEQ ID NO: 609235 - DNA, 19 bp, Mus musculus
  siRNA target sequence for Fmo2 (NM_018881.2,1245-1263).
ccttcggagacgactatga

SEQ ID NO: 609236 - DNA, 19 bp, Mus musculus
  siRNA target sequence for Fmo2 (NM_018881.2,1246-1264).
cttcggagacgactatgat

SEQ ID NO: 609237 - DNA, 19 bp, Mus musculus
  siRNA target sequence for Fmo2 (NM_018881.2,1256-1274).
gactatgatggcagacatt

SEQ ID NO: 609238 - DNA, 19 bp, Mus musculus
  siRNA target sequence for Fmo2 (NM_018881.2,1265-1283).
ggcagacattgttgaaaga

SEQ ID NO: 609239 - DNA, 19 bp, Mus musculus
  siRNA target sequence for Fmo2 (NM_018881.2,1378-1396).
gtgcaaagccagatttcgt

SEQ ID NO: 609240 - DNA, 19 bp, Mus musculus
  siRNA target sequence for Fmo2 (NM_018881.2,1436-1454).
ctacttcggaccctgtaat

SEQ ID NO: 609241 - DNA, 19 bp, Mus musculus
  siRNA target sequence for Fmo2 (NM_018881.2,1617-1635).
gttgttctggccttctttt

SEQ ID NO: 609242 - DNA, 19 bp, Mus musculus
  siRNA target sequence for Fmo2 (NM_018881.2,1627-1645).
ccttctttttccaacttca

SEQ ID NO: 609243 - DNA, 19 bp, Mus musculus
  siRNA target sequence for Fmo4 (NM_144878.1,177-195).
gggatgaccagggtttaca

SEQ ID NO: 609244 - DNA, 19 bp, Mus musculus
  siRNA target sequence for Fmo4 (NM_144878.1,194-212).
caggtcactagtgacaaat

SEQ ID NO: 609245 - DNA, 19 bp, Mus musculus
  siRNA target sequence for Fmo4 (NM_144878.1,196-214).
ggtcactagtgacaaatgt

SEQ ID NO: 609246 - DNA, 19 bp, Mus musculus
  siRNA target sequence for Fmo4 (NM_144878.1,213-231).
gtctgcaaagaaatgtcat

SEQ ID NO: 609247 - DNA, 19 bp, Mus musculus
  siRNA target sequence for Fmo4 (NM_144878.1,269-287).
cttcatgagccatgagaaa

SEQ ID NO: 609248 - DNA, 19 bp, Mus musculus
  siRNA target sequence for Fmo4 (NM_144878.1,503-521).
gtcctttcctggaatccat

SEQ ID NO: 609249 - DNA, 19 bp, Mus musculus
  siRNA target sequence for Fmo4 (NM_144878.1,510-528).
cctggaatccataagttta

SEQ ID NO: 609250 - DNA, 19 bp, Mus musculus
  siRNA target sequence for Fmo4 (NM_144878.1,511-529).
ctggaatccataagtttaa

SEQ ID NO: 609251 - DNA, 19 bp, Mus musculus
  siRNA target sequence for Fmo4 (NM_144878.1,648-666).
gcagctcaggtgtttctca

SEQ ID NO: 609252 - DNA, 19 bp, Mus musculus
  siRNA target sequence for Fmo4 (NM_144878.1,659-677).
gtttctcagcactagaact

SEQ ID NO: 609253 - DNA, 19 bp, Mus musculus
  siRNA target sequence for Fmo4 (NM_144878.1,708-726).
ggtggctaccctttcaata

SEQ ID NO: 609254 - DNA, 19 bp, Mus musculus
  siRNA target sequence for Fmo4 (NM_144878.1,709-727).
gtggctaccctttcaatat

SEQ ID NO: 609255 - DNA, 19 bp, Mus musculus
  siRNA target sequence for Fmo4 (NM_144878.1,711-729).
ggctaccctttcaatatga

SEQ ID NO: 609256 - DNA, 19 bp, Mus musculus
  siRNA target sequence for Fmo4 (NM_144878.1,712-730).
gctaccctttcaatatgat

SEQ ID NO: 609257 - DNA, 19 bp, Mus musculus
  siRNA target sequence for Fmo4 (NM_144878.1,713-731).
ctaccctttcaatatgata

SEQ ID NO: 609258 - DNA, 19 bp, Mus musculus
  siRNA target sequence for Fmo4 (NM_144878.1,768-786).
ccttcacgttttataaact

SEQ ID NO: 609259 - DNA, 19 bp, Mus musculus
  siRNA target sequence for Fmo4 (NM_144878.1,792-810).
cacgagaggaaaatgaata

SEQ ID NO: 609260 - DNA, 19 bp, Mus musculus
  siRNA target sequence for Fmo4 (NM_144878.1,821-839).
ccatgagaattatggatta

SEQ ID NO: 609261 - DNA, 19 bp, Mus musculus
  siRNA target sequence for Fmo4 (NM_144878.1,827-845).
gaattatggattaagcatt

SEQ ID NO: 609262 - DNA, 19 bp, Mus musculus
  siRNA target sequence for Fmo4 (NM_144878.1,885-903).
ctaccaacctgtatacttt

SEQ ID NO: 609263 - DNA, 19 bp, Mus musculus
  siRNA target sequence for Fmo4 (NM_144878.1,926-944).
cagcgtgaaggattttaca

SEQ ID NO: 609264 - DNA, 19 bp, Mus musculus
  siRNA target sequence for Fmo4 (NM_144878.1,928-946).
gcgtgaaggattttacaga

SEQ ID NO: 609265 - DNA, 19 bp, Mus musculus
  siRNA target sequence for Fmo4 (NM_144878.1,990-1008).
gatgtagtgatcttcacta

SEQ ID NO: 609266 - DNA, 19 bp, Mus musculus
  siRNA target sequence for Fmo4 (NM_144878.1,998-1016).
gatcttcactacaggatat

SEQ ID NO: 609267 - DNA, 19 bp, Mus musculus
  siRNA target sequence for Fmo4 (NM_144878.1,1047-1065).
ctcaaaagcctttgtacaa

SEQ ID NO: 609268 - DNA, 19 bp, Mus musculus
  siRNA target sequence for Fmo4 (NM_144878.1,1063-1081).
caaagaagatcatcctata

SEQ ID NO: 609269 - DNA, 19 bp, Mus musculus
  siRNA target sequence for Fmo4 (NM_144878.1,1076-1094).
cctatacaagcgagtcttt

SEQ ID NO: 609270 - DNA, 19 bp, Mus musculus
  siRNA target sequence for Fmo4 (NM_144878.1,1111-1129).
gagcaacattagccattat

SEQ ID NO: 609271 - DNA, 19 bp, Mus musculus
  siRNA target sequence for Fmo4 (NM_144878.1,1142-1160).
ccttaatgggtcgatctta

SEQ ID NO: 609272 - DNA, 19 bp, Mus musculus
  siRNA target sequence for Fmo4 (NM_144878.1,1238-1256).
gatggccgaagccactaaa

SEQ ID NO: 609273 - DNA, 19 bp, Mus musculus
  siRNA target sequence for Fmo4 (NM_144878.1,1548-1566).
cctacctccctctcacatt

SEQ ID NO: 609274 - DNA, 19 bp, Mus musculus
  siRNA target sequence for Fmo4 (NM_144878.1,1555-1573).
ccctctcacattacttaat

SEQ ID NO: 609275 - DNA, 19 bp, Mus musculus
  siRNA target sequence for Fmo4 (NM_144878.1,1559-1577).
ctcacattacttaatagct

SEQ ID NO: 609276 - DNA, 19 bp, Mus musculus
  siRNA target sequence for Fmo4 (NM_144878.1,1603-1621).
ctcttttacttatctacaa

SEQ ID NO: 609277 - DNA, 19 bp, Mus musculus
  siRNA target sequence for Fmo4 (NM_144878.1,1627-1645).
cacattttcttgaattggt

SEQ ID NO: 609278 - DNA, 19 bp, Mus musculus
  siRNA target sequence for Fmo4 (NM_144878.1,1650-1668).
ggtaagctaccgagaagat

SEQ ID NO: 609279 - DNA, 19 bp, Mus musculus
  siRNA target sequence for Fmo4 (NM_144878.1,1651-1669).
gtaagctaccgagaagatt

SEQ ID NO: 609280 - DNA, 19 bp, Mus musculus
  siRNA target sequence for Fmo4 (NM_144878.1,1671-1689).
cccccttaccgattactgt

SEQ ID NO: 609281 - DNA, 19 bp, Mus musculus
  siRNA target sequence for Kmo (NM_133809.1,151-169).
gatattcgcgtggctaaat

SEQ ID NO: 609282 - DNA, 19 bp, Mus musculus
  siRNA target sequence for Kmo (NM_133809.1,172-190).
gcacgtggaaggagcatta

SEQ ID NO: 609283 - DNA, 19 bp, Mus musculus
  siRNA target sequence for Kmo (NM_133809.1,173-191).
cacgtggaaggagcattaa

SEQ ID NO: 609284 - DNA, 19 bp, Mus musculus
  siRNA target sequence for Kmo (NM_133809.1,175-193).
cgtggaaggagcattaact

SEQ ID NO: 609285 - DNA, 19 bp, Mus musculus
  siRNA target sequence for Kmo (NM_133809.1,176-194).
gtggaaggagcattaactt

SEQ ID NO: 609286 - DNA, 19 bp, Mus musculus
  siRNA target sequence for Kmo (NM_133809.1,238-256).
ctggaagatcagatcgttt

SEQ ID NO: 609287 - DNA, 19 bp, Mus musculus
  siRNA target sequence for Kmo (NM_133809.1,326-344).
ggaacaagtcacagtatat

SEQ ID NO: 609288 - DNA, 19 bp, Mus musculus
  siRNA target sequence for Kmo (NM_133809.1,424-442).
ggccacaagctgtcgaaat

SEQ ID NO: 609289 - DNA, 19 bp, Mus musculus
  siRNA target sequence for Kmo (NM_133809.1,548-566).
gagcccacctcatgaagaa

SEQ ID NO: 609290 - DNA, 19 bp, Mus musculus
  siRNA target sequence for Kmo (NM_133809.1,605-623).
gatacatggagttgacaat

SEQ ID NO: 609291 - DNA, 19 bp, Mus musculus
  siRNA target sequence for Kmo (NM_133809.1,645-663).
cgccatggaacctaactgt

SEQ ID NO: 609292 - DNA, 19 bp, Mus musculus
  siRNA target sequence for Kmo (NM_133809.1,677-695).
ctagaaatgcctatatgat

SEQ ID NO: 609293 - DNA, 19 bp, Mus musculus
  siRNA target sequence for Kmo (NM_133809.1,706-724).
ccaaacatggacaaatctt

SEQ ID NO: 609294 - DNA, 19 bp, Mus musculus
  siRNA target sequence for Kmo (NM_133809.1,841-859).
gccctcatgagagatttct

SEQ ID NO: 609295 - DNA, 19 bp, Mus musculus
  siRNA target sequence for Kmo (NM_133809.1,867-885).
gcctgcccagcccatgata

SEQ ID NO: 609296 - DNA, 19 bp, Mus musculus
  siRNA target sequence for Kmo (NM_133809.1,946-964).
catgccattgtcccatttt

SEQ ID NO: 609297 - DNA, 19 bp, Mus musculus
  siRNA target sequence for Kmo (NM_133809.1,1017-1035).
gatggacaaattcaataat

SEQ ID NO: 609298 - DNA, 19 bp, Mus musculus
  siRNA target sequence for Kmo (NM_133809.1,1097-1115).
cagacctatctatgtacaa

SEQ ID NO: 609299 - DNA, 19 bp, Mus musculus
  siRNA target sequence for Kmo (NM_133809.1,1099-1117).
gacctatctatgtacaatt

SEQ ID NO: 609300 - DNA, 19 bp, Mus musculus
  siRNA target sequence for Kmo (NM_133809.1,1102-1120).
ctatctatgtacaattaca

SEQ ID NO: 609301 - DNA, 19 bp, Mus musculus
  siRNA target sequence for Kmo (NM_133809.1,1129-1147).
cgagcgcatgtcaactcta

SEQ ID NO: 609302 - DNA, 19 bp, Mus musculus
  siRNA target sequence for Kmo (NM_133809.1,1191-1209).
gatcatgccctctaccttt

SEQ ID NO: 609303 - DNA, 19 bp, Mus musculus
  siRNA target sequence for Kmo (NM_133809.1,1227-1245).
ggtcgccttcaccagaata

SEQ ID NO: 609304 - DNA, 19 bp, Mus musculus
  siRNA target sequence for Kmo (NM_133809.1,1228-1246).
gtcgccttcaccagaataa

SEQ ID NO: 609305 - DNA, 19 bp, Mus musculus
  siRNA target sequence for Kmo (NM_133809.1,1230-1248).
cgccttcaccagaataaga

SEQ ID NO: 609306 - DNA, 19 bp, Mus musculus
  siRNA target sequence for Kmo (NM_133809.1,1232-1250).
ccttcaccagaataagata

SEQ ID NO: 609307 - DNA, 19 bp, Mus musculus
  siRNA target sequence for Kmo (NM_133809.1,1277-1295).
ggcaaaaaaaggtgataaa

SEQ ID NO: 609308 - DNA, 19 bp, Mus musculus
  siRNA target sequence for Kmo (NM_133809.1,1334-1352).
gaggcacctacctacttgt

SEQ ID NO: 609309 - DNA, 19 bp, Mus musculus
  siRNA target sequence for Kmo (NM_133809.1,1422-1440).
gactaggagtacagacatt

SEQ ID NO: 609310 - DNA, 19 bp, Mus musculus
  siRNA target sequence for Kmo (NM_133809.1,1447-1465).
caagttccatggagttact

SEQ ID NO: 609311 - DNA, 19 bp, Mus musculus
  siRNA target sequence for Lao1 (NM_133892.3,442-460).
caagaagagtggaatcctt

SEQ ID NO: 609312 - DNA, 19 bp, Mus musculus
  siRNA target sequence for Lao1 (NM_133892.3,657-675).
ctggtcacgaggtaaccat

SEQ ID NO: 609313 - DNA, 19 bp, Mus musculus
  siRNA target sequence for Lao1 (NM_133892.3,705-723).
gggtggtcacactcagaaa

SEQ ID NO: 609314 - DNA, 19 bp, Mus musculus
  siRNA target sequence for Lao1 (NM_133892.3,727-745).
ggaagaaggctggtactta

SEQ ID NO: 609315 - DNA, 19 bp, Mus musculus
  siRNA target sequence for Lao1 (NM_133892.3,948-966).
ctgtcacagacctgttcta

SEQ ID NO: 609316 - DNA, 19 bp, Mus musculus
  siRNA target sequence for Lao1 (NM_133892.3,968-986).
caagccatcactaagatca

SEQ ID NO: 609317 - DNA, 19 bp, Mus musculus
  siRNA target sequence for Lao1 (NM_133892.3,1015-1033).
ccagctgctctccctttat

SEQ ID NO: 609318 - DNA, 19 bp, Mus musculus
  siRNA target sequence for Lao1 (NM_133892.3,1093-1111).
cgagatgatcggggatata

SEQ ID NO: 609319 - DNA, 19 bp, Mus musculus
  siRNA target sequence for Lao1 (NM_133892.3,1099-1117).
gatcggggatataatgaat

SEQ ID NO: 609320 - DNA, 19 bp, Mus musculus
  siRNA target sequence for Lao1 (NM_133892.3,1261-1279).
ccgtctggggtccaaagta

SEQ ID NO: 609321 - DNA, 19 bp, Mus musculus
  siRNA target sequence for Lao1 (NM_133892.3,1263-1281).
gtctggggtccaaagtaga

SEQ ID NO: 609322 - DNA, 19 bp, Mus musculus
  siRNA target sequence for Lao1 (NM_133892.3,1265-1283).
ctggggtccaaagtagaaa

SEQ ID NO: 609323 - DNA, 19 bp, Mus musculus
  siRNA target sequence for Lao1 (NM_133892.3,1267-1285).
ggggtccaaagtagaaaga

SEQ ID NO: 609324 - DNA, 19 bp, Mus musculus
  siRNA target sequence for Lao1 (NM_133892.3,1269-1287).
ggtccaaagtagaaagagt

SEQ ID NO: 609325 - DNA, 19 bp, Mus musculus
  siRNA target sequence for Lao1 (NM_133892.3,1361-1379).
gcggattacgccatcatca

SEQ ID NO: 609326 - DNA, 19 bp, Mus musculus
  siRNA target sequence for Lao1 (NM_133892.3,1445-1463).
gccctgcgctccgttcatt

SEQ ID NO: 609327 - DNA, 19 bp, Mus musculus
  siRNA target sequence for Lao1 (NM_133892.3,1446-1464).
ccctgcgctccgttcatta

SEQ ID NO: 609328 - DNA, 19 bp, Mus musculus
  siRNA target sequence for Lao1 (NM_133892.3,1549-1567).
ccgaccctcccgcttcatt

SEQ ID NO: 609329 - DNA, 19 bp, Mus musculus
  siRNA target sequence for Lao1 (NM_133892.3,1550-1568).
cgaccctcccgcttcattt

SEQ ID NO: 609330 - DNA, 19 bp, Mus musculus
  siRNA target sequence for Lao1 (NM_133892.3,1551-1569).
gaccctcccgcttcattta

SEQ ID NO: 609331 - DNA, 19 bp, Mus musculus
  siRNA target sequence for Lao1 (NM_133892.3,1553-1571).
ccctcccgcttcatttact

SEQ ID NO: 609332 - DNA, 19 bp, Mus musculus
  siRNA target sequence for Lao1 (NM_133892.3,1554-1572).
cctcccgcttcatttacta

SEQ ID NO: 609333 - DNA, 19 bp, Mus musculus
  siRNA target sequence for Lao1 (NM_133892.3,1732-1750).
gcgcatgtgcccaaagtca

SEQ ID NO: 609334 - DNA, 19 bp, Mus musculus
  siRNA target sequence for Lao1 (NM_133892.3,1780-1798).
caccattggcgcctttaca

SEQ ID NO: 609335 - DNA, 19 bp, Mus musculus
  siRNA target sequence for Lao1 (NM_133892.3,1782-1800).
ccattggcgcctttacaga

SEQ ID NO: 609336 - DNA, 19 bp, Mus musculus
  siRNA target sequence for Lao1 (NM_133892.3,1799-1817).
gagttcacaccctaccaat

SEQ ID NO: 609337 - DNA, 19 bp, Mus musculus
  siRNA target sequence for Lao1 (NM_133892.3,1804-1822).
cacaccctaccaatttgta

SEQ ID NO: 609338 - DNA, 19 bp, Mus musculus
  siRNA target sequence for Lao1 (NM_133892.3,1806-1824).
caccctaccaatttgtaga

SEQ ID NO: 609339 - DNA, 19 bp, Mus musculus
  siRNA target sequence for Lao1 (NM_133892.3,1809-1827).
cctaccaatttgtagacta

SEQ ID NO: 609340 - DNA, 19 bp, Mus musculus
  siRNA target sequence for Lao1 (NM_133892.3,1814-1832).
caatttgtagactattcga

SEQ ID NO: 609341 - DNA, 19 bp, Mus musculus
  siRNA target sequence for LOC223706 (NM_145474.1,381-399).
gagtacctaggttttaaga

SEQ ID NO: 609342 - DNA, 19 bp, Mus musculus
  siRNA target sequence for LOC223706 (NM_145474.1,683-701).
gcgggaagaaagtttgaaa

SEQ ID NO: 609343 - DNA, 19 bp, Mus musculus
  siRNA target sequence for MGC25972 (NM_177406.2,692-710).
ctgaacgatctcgtttttt

SEQ ID NO: 609344 - DNA, 19 bp, Mus musculus
  siRNA target sequence for Nical (NM_138315.1,548-566).
gagtggtacttgtggaaaa

SEQ ID NO: 609345 - DNA, 19 bp, Mus musculus
  siRNA target sequence for Nical (NM_138315.1,668-686).
ctggcaccctggaccatat

SEQ ID NO: 609346 - DNA, 19 bp, Mus musculus
  siRNA target sequence for Nical (NM_138315.1,670-688).
ggcaccctggaccatatca

SEQ ID NO: 609347 - DNA, 19 bp, Mus musculus
  siRNA target sequence for Nical (NM_138315.1,748-766).
cactggggcgtcaaattca

SEQ ID NO: 609348 - DNA, 19 bp, Mus musculus
  siRNA target sequence for Nical (NM_138315.1,835-853).
caactggccagctatgagt

SEQ ID NO: 609349 - DNA, 19 bp, Mus musculus
  siRNA target sequence for Nical (NM_138315.1,889-907).
gtccctgaaggcttcacta

SEQ ID NO: 609350 - DNA, 19 bp, Mus musculus
  siRNA target sequence for Nical (NM_138315.1,891-909).
ccctgaaggcttcactata

SEQ ID NO: 609351 - DNA, 19 bp, Mus musculus
  siRNA target sequence for Nical (NM_138315.1,998-1016).
gtggtgtagctcgaatcta

SEQ ID NO: 609352 - DNA, 19 bp, Mus musculus
  siRNA target sequence for Nical (NM_138315.1,1001-1019).
gtgtagctcgaatctacaa

SEQ ID NO: 609353 - DNA, 19 bp, Mus musculus
  siRNA target sequence for Nical (NM_138315.1,1006-1024).
gctcgaatctacaaccaaa

SEQ ID NO: 609354 - DNA, 19 bp, Mus musculus
  siRNA target sequence for Nical (NM_138315.1,1009-1027).
cgaatctacaaccaaaaat

SEQ ID NO: 609355 - DNA, 19 bp, Mus musculus
  siRNA target sequence for Nical (NM_138315.1,1176-1194).
gctgctgggcaaagctaat

SEQ ID NO: 609356 - DNA, 19 bp, Mus musculus
  siRNA target sequence for Nical (NM_138315.1,1346-1364).
ccgctcgtgtccaagaaaa

SEQ ID NO: 609357 - DNA, 19 bp, Mus musculus
  siRNA target sequence for Nical (NM_138315.1,1542-1560).
ccagcttctgtcacaaaca

SEQ ID NO: 609358 - DNA, 19 bp, Mus musculus
  siRNA target sequence for Nical (NM_138315.1,1555-1573).
caaacatcccccgagaata

SEQ ID NO: 609359 - DNA, 19 bp, Mus musculus
  siRNA target sequence for Nical (NM_138315.1,1559-1577).
catcccccgagaatatgca

SEQ ID NO: 609360 - DNA, 19 bp, Mus musculus
  siRNA target sequence for Nical (NM_138315.1,1565-1583).
ccgagaatatgcatcgaaa

SEQ ID NO: 609361 - DNA, 19 bp, Mus musculus
  siRNA target sequence for Nical (NM_138315.1,1566-1584).
cgagaatatgcatcgaaat

SEQ ID NO: 609362 - DNA, 19 bp, Mus musculus
  siRNA target sequence for Nical (NM_138315.1,1656-1674).
ggtacaggacctctatgat

SEQ ID NO: 609363 - DNA, 19 bp, Mus musculus
  siRNA target sequence for Nical (NM_138315.1,1657-1675).
gtacaggacctctatgata

SEQ ID NO: 609364 - DNA, 19 bp, Mus musculus
  siRNA target sequence for Nical (NM_138315.1,2096-2114).
gaacccccagtgctatact

SEQ ID NO: 609365 - DNA, 19 bp, Mus musculus
  siRNA target sequence for Nical (NM_138315.1,2099-2117).
cccccagtgctatactttt

SEQ ID NO: 609366 - DNA, 19 bp, Mus musculus
  siRNA target sequence for Nical (NM_138315.1,2102-2120).
ccagtgctatacttttcct

SEQ ID NO: 609367 - DNA, 19 bp, Mus musculus
  siRNA target sequence for Nical (NM_138315.1,2103-2121).
cagtgctatacttttcctt

SEQ ID NO: 609368 - DNA, 19 bp, Mus musculus
  siRNA target sequence for Nical (NM_138315.1,2199-2217).
ctccgagcccagtatgtct

SEQ ID NO: 609369 - DNA, 19 bp, Mus musculus
  siRNA target sequence for Nical (NM_138315.1,2589-2607).
gatccggctctccagttta

SEQ ID NO: 609370 - DNA, 19 bp, Mus musculus
  siRNA target sequence for Nical (NM_138315.1,2592-2610).
ccggctctccagtttagaa

SEQ ID NO: 609371 - DNA, 19 bp, Mus musculus
  siRNA target sequence for Nical (NM_138315.1,2881-2899).
ccaggtgccatgactaagt

SEQ ID NO: 609372 - DNA, 19 bp, Mus musculus
  siRNA target sequence for Nical (NM_138315.1,2882-2900).
caggtgccatgactaagta

SEQ ID NO: 609373 - DNA, 19 bp, Mus musculus
  siRNA target sequence for Nical (NM_138315.1,2944-2962).
gagatgaagaggttttgca

SEQ ID NO: 609374 - DNA, 19 bp, Mus musculus
  siRNA target sequence for Nical (NM_138315.1,3225-3243).
catgaatcgggaagaaact

SEQ ID NO: 609375 - DNA, 19 bp, Mus musculus
  siRNA target sequence for Nical (NM_138315.1,3314-3332).
gggatgctctgatccaatt

SEQ ID NO: 609376 - DNA, 19 bp, Mus musculus
  siRNA target sequence for Tbxas1 (NM_011539.2,320-338).
ccttttgttggaaacttga

SEQ ID NO: 609377 - DNA, 19 bp, Mus musculus
  siRNA target sequence for Tbxas1 (NM_011539.2,420-438).
gtcggatgcacgttgtcat

SEQ ID NO: 609378 - DNA, 19 bp, Mus musculus
  siRNA target sequence for Tbxas1 (NM_011539.2,422-440).
cggatgcacgttgtcattt

SEQ ID NO: 609379 - DNA, 19 bp, Mus musculus
  siRNA target sequence for Tbxas1 (NM_011539.2,424-442).
gatgcacgttgtcatttca

SEQ ID NO: 609380 - DNA, 19 bp, Mus musculus
  siRNA target sequence for Tbxas1 (NM_011539.2,470-488).
gttgagaacttcagtaact

SEQ ID NO: 609381 - DNA, 19 bp, Mus musculus
  siRNA target sequence for Tbxas1 (NM_011539.2,483-501).
gtaacttttccaacagaat

SEQ ID NO: 609382 - DNA, 19 bp, Mus musculus
  siRNA target sequence for Tbxas1 (NM_011539.2,578-596).
ggtgccctgatgtcttcat

SEQ ID NO: 609383 - DNA, 19 bp, Mus musculus
  siRNA target sequence for Tbxas1 (NM_011539.2,594-612).
cattcagtcctgaaaagtt

SEQ ID NO: 609384 - DNA, 19 bp, Mus musculus
  siRNA target sequence for Tbxas1 (NM_011539.2,681-699).
catccagggacgcattcaa

SEQ ID NO: 609385 - DNA, 19 bp, Mus musculus
  siRNA target sequence for Tbxas1 (NM_011539.2,684-702).
ccagggacgcattcaacat

SEQ ID NO: 609386 - DNA, 19 bp, Mus musculus
  siRNA target sequence for Tbxas1 (NM_011539.2,717-735).
gctgttacaccatagatgt

SEQ ID NO: 609387 - DNA, 19 bp, Mus musculus
  siRNA target sequence for Tbxas1 (NM_011539.2,812-830).
cgtgcttccaccttctgta

SEQ ID NO: 609388 - DNA, 19 bp, Mus musculus
  siRNA target sequence for Tbxas1 (NM_011539.2,837-855).
ggcctctcctggtattaat

SEQ ID NO: 609389 - DNA, 19 bp, Mus musculus
  siRNA target sequence for Tbxas1 (NM_011539.2,840-858).
ctctcctggtattaatctt

SEQ ID NO: 609390 - DNA, 19 bp, Mus musculus
  siRNA target sequence for Tbxas1 (NM_011539.2,842-860).
ctcctggtattaatcttat

SEQ ID NO: 609391 - DNA, 19 bp, Mus musculus
  siRNA target sequence for Tbxas1 (NM_011539.2,844-862).
cctggtattaatcttatca

SEQ ID NO: 609392 - DNA, 19 bp, Mus musculus
  siRNA target sequence for Tbxas1 (NM_011539.2,847-865).
ggtattaatcttatcattt

SEQ ID NO: 609393 - DNA, 19 bp, Mus musculus
  siRNA target sequence for Tbxas1 (NM_011539.2,856-874).
cttatcatttccatccata

SEQ ID NO: 609394 - DNA, 19 bp, Mus musculus
  siRNA target sequence for Tbxas1 (NM_011539.2,861-879).
catttccatccataatggt

SEQ ID NO: 609395 - DNA, 19 bp, Mus musculus
  siRNA target sequence for Tbxas1 (NM_011539.2,890-908).
cggattctgcccaataaga

SEQ ID NO: 609396 - DNA, 19 bp, Mus musculus
  siRNA target sequence for Tbxas1 (NM_011539.2,1022-1040).
gcccagcactccatgaact

SEQ ID NO: 609397 - DNA, 19 bp, Mus musculus
  siRNA target sequence for Tbxas1 (NM_011539.2,1046-1064).
ggcgtggaaggctttgaca

SEQ ID NO: 609398 - DNA, 19 bp, Mus musculus
  siRNA target sequence for Tbxas1 (NM_011539.2,1121-1139).
catcctacctccacatcta

SEQ ID NO: 609399 - DNA, 19 bp, Mus musculus
  siRNA target sequence for Tbxas1 (NM_011539.2,1194-1212).
gccatgaggtcatcacaaa

SEQ ID NO: 609400 - DNA, 19 bp, Mus musculus
  siRNA target sequence for Tbxas1 (NM_011539.2,1697-1715).
gttccacttcagctagaat

SEQ ID NO: 609401 - DNA, 19 bp, Mus musculus
  siRNA target sequence for Tbxas1 (NM_011539.2,1701-1719).
cacttcagctagaatccaa

SEQ ID NO: 609402 - DNA, 19 bp, Mus musculus
  siRNA target sequence for Tbxas1 (NM_011539.2,1743-1761).
gagtctacatcaagattgt

SEQ ID NO: 609403 - DNA, 19 bp, Mus musculus
  siRNA target sequence for Tbxas1 (NM_011539.2,1745-1763).
gtctacatcaagattgtgt

SEQ ID NO: 609404 - DNA, 19 bp, Mus musculus
  siRNA target sequence for Tyrp1 (NM_031202.1,254-272).
cacgagagtgtgccaatat

SEQ ID NO: 609405 - DNA, 19 bp, Mus musculus
  siRNA target sequence for Tyrp1 (NM_031202.1,413-431).
cccacgatggtaaagatga

SEQ ID NO: 609406 - DNA, 19 bp, Mus musculus
  siRNA target sequence for Tyrp1 (NM_031202.1,443-461).
ggcctctgaggttctttaa

SEQ ID NO: 609407 - DNA, 19 bp, Mus musculus
  siRNA target sequence for Tyrp1 (NM_031202.1,444-462).
gcctctgaggttctttaat

SEQ ID NO: 609408 - DNA, 19 bp, Mus musculus
  siRNA target sequence for Tyrp1 (NM_031202.1,450-468).
gaggttctttaatagaaca

SEQ ID NO: 609409 - DNA, 19 bp, Mus musculus
  siRNA target sequence for Tyrp1 (NM_031202.1,467-485).
catgtcagtgcaatgataa

SEQ ID NO: 609410 - DNA, 19 bp, Mus musculus
  siRNA target sequence for Tyrp1 (NM_031202.1,470-488).
gtcagtgcaatgataattt

SEQ ID NO: 609411 - DNA, 19 bp, Mus musculus
  siRNA target sequence for Tyrp1 (NM_031202.1,532-550).
gctgcatgcaaccagaaaa

SEQ ID NO: 609412 - DNA, 19 bp, Mus musculus
  siRNA target sequence for Tyrp1 (NM_031202.1,555-573).
cacagtcaggagaaatctt

SEQ ID NO: 609413 - DNA, 19 bp, Mus musculus
  siRNA target sequence for Tyrp1 (NM_031202.1,564-582).
gagaaatcttctagactta

SEQ ID NO: 609414 - DNA, 19 bp, Mus musculus
  siRNA target sequence for Tyrp1 (NM_031202.1,635-653).
caactcaccctcaatttgt

SEQ ID NO: 609415 - DNA, 19 bp, Mus musculus
  siRNA target sequence for Tyrp1 (NM_031202.1,638-656).
ctcaccctcaatttgtcat

SEQ ID NO: 609416 - DNA, 19 bp, Mus musculus
  siRNA target sequence for Tyrp1 (NM_031202.1,695-713).
gcaacacaccacaatttga

SEQ ID NO: 609417 - DNA, 19 bp, Mus musculus
  siRNA target sequence for Tyrp1 (NM_031202.1,722-740).
ccgtttataactactttgt

SEQ ID NO: 609418 - DNA, 19 bp, Mus musculus
  siRNA target sequence for Tyrp1 (NM_031202.1,723-741).
cgtttataactactttgtt

SEQ ID NO: 609419 - DNA, 19 bp, Mus musculus
  siRNA target sequence for Tyrp1 (NM_031202.1,743-761).
ggacacactattattcagt

SEQ ID NO: 609420 - DNA, 19 bp, Mus musculus
  siRNA target sequence for Tyrp1 (NM_031202.1,748-766).
cactattattcagtcaaaa

SEQ ID NO: 609421 - DNA, 19 bp, Mus musculus
  siRNA target sequence for Tyrp1 (NM_031202.1,820-838).
gaaggacccgcttttctca

SEQ ID NO: 609422 - DNA, 19 bp, Mus musculus
  siRNA target sequence for Tyrp1 (NM_031202.1,889-907).
ctgcaggagccttctttct

SEQ ID NO: 609423 - DNA, 19 bp, Mus musculus
  siRNA target sequence for Tyrp1 (NM_031202.1,984-1002).
caacttcgattctactctt

SEQ ID NO: 609424 - DNA, 19 bp, Mus musculus
  siRNA target sequence for Tyrp1 (NM_031202.1,1034-1052).
gagtggtctgtgaatcctt

SEQ ID NO: 609425 - DNA, 19 bp, Mus musculus
  siRNA target sequence for Tyrp1 (NM_031202.1,1062-1080).
cgataccctgggaacactt

SEQ ID NO: 609426 - DNA, 19 bp, Mus musculus
  siRNA target sequence for Tyrp1 (NM_031202.1,1063-1081).
gataccctgggaacacttt

SEQ ID NO: 609427 - DNA, 19 bp, Mus musculus
  siRNA target sequence for Tyrp1 (NM_031202.1,1069-1087).
ctgggaacactttgtaaca

SEQ ID NO: 609428 - DNA, 19 bp, Mus musculus
  siRNA target sequence for Tyrp1 (NM_031202.1,1112-1130).
gaaacccagctggaaatgt

SEQ ID NO: 609429 - DNA, 19 bp, Mus musculus
  siRNA target sequence for Tyrp1 (NM_031202.1,1181-1199).
gcttggaggtccgtgtatt

SEQ ID NO: 609430 - DNA, 19 bp, Mus musculus
  siRNA target sequence for Tyrp1 (NM_031202.1,1226-1244).
ctacagacagttttcgaaa

SEQ ID NO: 609431 - DNA, 19 bp, Mus musculus
  siRNA target sequence for Tyrp1 (NM_031202.1,1262-1280).
gtgctcccacgggaaaata

SEQ ID NO: 609432 - DNA, 19 bp, Mus musculus
  siRNA target sequence for Tyrp1 (NM_031202.1,1265-1283).
ctcccacgggaaaatatga

SEQ ID NO: 609433 - DNA, 19 bp, Mus musculus
  siRNA target sequence for Tyrp1 (NM_031202.1,1289-1307).
ctgttcgaagccttcacaa

SEQ ID NO: 609434 - DNA, 19 bp, Mus musculus
  siRNA target sequence for Tyrp1 (NM_031202.1,1353-1371).
gtctcccaatgatcctatt

SEQ ID NO: 609435 - DNA, 19 bp, Mus musculus
  siRNA target sequence for Tyrp1 (NM_031202.1,1411-1429).
gaatggctaaggaggtata

SEQ ID NO: 609436 - DNA, 19 bp, Mus musculus
  siRNA target sequence for Tyrp1 (NM_031202.1,1422-1440).
gaggtataacgccgatatt

SEQ ID NO: 609437 - DNA, 19 bp, Mus musculus
  siRNA target sequence for Tyrp1 (NM_031202.1,1425-1443).
gtataacgccgatatttct

SEQ ID NO: 609438 - DNA, 19 bp, Mus musculus
  siRNA target sequence for Tyrp1 (NM_031202.1,1442-1460).
ctaccttcccgttggaaaa

SEQ ID NO: 609439 - DNA, 19 bp, Mus musculus
  siRNA target sequence for Tyrp1 (NM_031202.1,1452-1470).
gttggaaaacgcacctatt

SEQ ID NO: 609440 - DNA, 19 bp, Mus musculus
  siRNA target sequence for Tyrp1 (NM_031202.1,1513-1531).
gttaccaacacagaaatgt

SEQ ID NO: 609441 - DNA, 19 bp, Mus musculus
  siRNA target sequence for Tyrp1 (NM_031202.1,1518-1536).
caacacagaaatgtttgtt

SEQ ID NO: 609442 - DNA, 19 bp, Mus musculus
  siRNA target sequence for Tyrp1 (NM_031202.1,1546-1564).
gacaatctgggatatgctt

SEQ ID NO: 609443 - DNA, 19 bp, Mus musculus
  siRNA target sequence for Tyrp1 (NM_031202.1,1626-1644).
ggctgcgttgttacttgta

SEQ ID NO: 609444 - DNA, 19 bp, Mus musculus
  siRNA target sequence for Tyrp1 (NM_031202.1,1716-1734).
cctcactgatcactatcaa

SEQ ID NO: 609445 - DNA, 19 bp, Mus musculus
  siRNA target sequence for Tyrp1 (NM_031202.1,1753-1771).
gaggagctcccgaatccta

SEQ ID NO: 609446 - DNA, 19 bp, Mus musculus
  siRNA target sequence for 5730405M13Rik (NM_025671.1,328-346).
ggctgcagctgaatatagt

SEQ ID NO: 609447 - DNA, 19 bp, Mus musculus
  siRNA target sequence for 5730405M13Rik (NM_025671.1,351-369).
ccccaggcgcagatcttga

SEQ ID NO: 609448 - DNA, 19 bp, Mus musculus
  siRNA target sequence for 5730405M13Rik (NM_025671.1,504-522).
ggcccaacaccatgaacaa

SEQ ID NO: 609449 - DNA, 19 bp, Mus musculus
  siRNA target sequence for 5730405M13Rik (NM_025671.1,529-547).
ggtactgatgtatgaacta

SEQ ID NO: 609450 - DNA, 19 bp, Mus musculus
  siRNA target sequence for 5730405M13Rik (NM_025671.1,597-615).
cactgatggccttgttgta

SEQ ID NO: 609451 - DNA, 19 bp, Mus musculus
  siRNA target sequence for 5730405M13Rik (NM_025671.1,651-669).
gtgcctttgtggtcaagta

SEQ ID NO: 609452 - DNA, 19 bp, Mus musculus
  siRNA target sequence for 5730405M13Rik (NM_025671.1,692-710).
ctgggctgtcactacgata

SEQ ID NO: 609453 - DNA, 19 bp, Mus musculus
  siRNA target sequence for 5730405M13Rik (NM_025671.1,694-712).
gggctgtcactacgataat

SEQ ID NO: 609454 - DNA, 19 bp, Mus musculus
  siRNA target sequence for 5730405M13Rik (NM_025671.1,714-732).
ctgagcttaccctcaatgt

SEQ ID NO: 609455 - DNA, 19 bp, Mus musculus
  siRNA target sequence for 5730405M13Rik (NM_025671.1,921-939).
gggcatctgctgttcgaaa

SEQ ID NO: 609456 - DNA, 19 bp, Mus musculus
  siRNA target sequence for 5730405M13Rik (NM_025671.1,922-940).
ggcatctgctgttcgaaat

SEQ ID NO: 609457 - DNA, 19 bp, Mus musculus
  siRNA target sequence for Plod1 (NM_011122.1,304-322).
gaagacctggttattctct

SEQ ID NO: 609458 - DNA, 19 bp, Mus musculus
  siRNA target sequence for Plod1 (NM_011122.1,361-379).
cgggaactcttaaagaagt

SEQ ID NO: 609459 - DNA, 19 bp, Mus musculus
  siRNA target sequence for Plod1 (NM_011122.1,438-456).
gaggctggaggccaagtat

SEQ ID NO: 609460 - DNA, 19 bp, Mus musculus
  siRNA target sequence for Plod1 (NM_011122.1,559-577).
gacagcgaccagctctttt

SEQ ID NO: 609461 - DNA, 19 bp, Mus musculus
  siRNA target sequence for Plod1 (NM_011122.1,561-579).
cagcgaccagctcttttat

SEQ ID NO: 609462 - DNA, 19 bp, Mus musculus
  siRNA target sequence for Plod1 (NM_011122.1,565-583).
gaccagctcttttatacca

SEQ ID NO: 609463 - DNA, 19 bp, Mus musculus
  siRNA target sequence for Plod1 (NM_011122.1,603-621).
gaagagggagcaaatcaat

SEQ ID NO: 609464 - DNA, 19 bp, Mus musculus
  siRNA target sequence for Plod1 (NM_011122.1,679-697).
gttgtgctcaagtttgaaa

SEQ ID NO: 609465 - DNA, 19 bp, Mus musculus
  siRNA target sequence for Plod1 (NM_011122.1,702-720).
ccacgtgagagcacgaaat

SEQ ID NO: 609466 - DNA, 19 bp, Mus musculus
  siRNA target sequence for Plod1 (NM_011122.1,715-733).
cgaaatctggcctatgaca

SEQ ID NO: 609467 - DNA, 19 bp, Mus musculus
  siRNA target sequence for Plod1 (NM_011122.1,894-912).
cctggtcggtgtgttcatt

SEQ ID NO: 609468 - DNA, 19 bp, Mus musculus
  siRNA target sequence for Plod1 (NM_011122.1,950-968).
ggctgctgcgcctacgata

SEQ ID NO: 609469 - DNA, 19 bp, Mus musculus
  siRNA target sequence for Plod1 (NM_011122.1,960-978).
cctacgataccctcagaaa

SEQ ID NO: 609470 - DNA, 19 bp, Mus musculus
  siRNA target sequence for Plod1 (NM_011122.1,964-982).
cgataccctcagaaacaga

SEQ ID NO: 609471 - DNA, 19 bp, Mus musculus
  siRNA target sequence for Plod1 (NM_011122.1,1005-1023).
ggaacggcaccacaaactt

SEQ ID NO: 609472 - DNA, 19 bp, Mus musculus
  siRNA target sequence for Plod1 (NM_011122.1,1147-1165).
caaacttgcacctactact

SEQ ID NO: 609473 - DNA, 19 bp, Mus musculus
  siRNA target sequence for Plod1 (NM_011122.1,1206-1224).
cctaaggctcctgattgaa

SEQ ID NO: 609474 - DNA, 19 bp, Mus musculus
  siRNA target sequence for Plod1 (NM_011122.1,1385-1403).
caaacatctacctgatcaa

SEQ ID NO: 609475 - DNA, 19 bp, Mus musculus
  siRNA target sequence for Plod1 (NM_011122.1,1564-1582).
cagaccacccacctacata

SEQ ID NO: 609476 - DNA, 19 bp, Mus musculus
  siRNA target sequence for Plod1 (NM_011122.1,1569-1587).
cacccacctacataatgat

SEQ ID NO: 609477 - DNA, 19 bp, Mus musculus
  siRNA target sequence for Plod1 (NM_011122.1,1679-1697).
cgccttgtccggatgtcta

SEQ ID NO: 609478 - DNA, 19 bp, Mus musculus
  siRNA target sequence for Plod1 (NM_011122.1,1766-1784).
ggtctctgggtgataataa

SEQ ID NO: 609479 - DNA, 19 bp, Mus musculus
  siRNA target sequence for Plod1 (NM_011122.1,1819-1837).
cccactatcgacatccata

SEQ ID NO: 609480 - DNA, 19 bp, Mus musculus
  siRNA target sequence for Plod1 (NM_011122.1,1823-1841).
ctatcgacatccatatgaa

SEQ ID NO: 609481 - DNA, 19 bp, Mus musculus
  siRNA target sequence for Plod1 (NM_011122.1,1926-1944).
cactagggcccagtttgat

SEQ ID NO: 609482 - DNA, 19 bp, Mus musculus
  siRNA target sequence for Plod1 (NM_011122.1,2037-2055).
cagggttggggaagattat

SEQ ID NO: 609483 - DNA, 19 bp, Mus musculus
  siRNA target sequence for Plod1 (NM_011122.1,2060-2078).
gcggaggttgccgatttct

SEQ ID NO: 609484 - DNA, 19 bp, Mus musculus
  siRNA target sequence for Plod1 (NM_011122.1,2071-2089).
cgatttctgcgctacaact

SEQ ID NO: 609485 - DNA, 19 bp, Mus musculus
  siRNA target sequence for Plod1 (NM_011122.1,2172-2190).
caagggcacgcgctacatt

SEQ ID NO: 609486 - DNA, 19 bp, Mus musculus
  siRNA target sequence for Plod1 (NM_011122.1,2183-2201).
gctacattgctgtgtcttt

SEQ ID NO: 609487 - DNA, 19 bp, Mus musculus
  siRNA target sequence for Plod2 (NM_011961.1,104-122).
gcgcatccctgcagataaa

SEQ ID NO: 609488 - DNA, 19 bp, Mus musculus
  siRNA target sequence for Plod2 (NM_011961.1,110-128).
ccctgcagataaattatta

SEQ ID NO: 609489 - DNA, 19 bp, Mus musculus
  siRNA target sequence for Plod2 (NM_011961.1,112-130).
ctgcagataaattattagt

SEQ ID NO: 609490 - DNA, 19 bp, Mus musculus
  siRNA target sequence for Plod2 (NM_011961.1,131-149).
cataactgtcgcaacaaaa

SEQ ID NO: 609491 - DNA, 19 bp, Mus musculus
  siRNA target sequence for Plod2 (NM_011961.1,159-177).
ggattccacagatttatga

SEQ ID NO: 609492 - DNA, 19 bp, Mus musculus
  siRNA target sequence for Plod2 (NM_011961.1,160-178).
gattccacagatttatgaa

SEQ ID NO: 609493 - DNA, 19 bp, Mus musculus
  siRNA target sequence for Plod2 (NM_011961.1,181-199).
cagccaagtatttcaatta

SEQ ID NO: 609494 - DNA, 19 bp, Mus musculus
  siRNA target sequence for Plod2 (NM_011961.1,237-255).
ggcggtgatggaatgaaca

SEQ ID NO: 609495 - DNA, 19 bp, Mus musculus
  siRNA target sequence for Plod2 (NM_011961.1,240-258).
ggtgatggaatgaacagta

SEQ ID NO: 609496 - DNA, 19 bp, Mus musculus
  siRNA target sequence for Plod2 (NM_011961.1,268-286).
gccagaaggtgagattact

SEQ ID NO: 609497 - DNA, 19 bp, Mus musculus
  siRNA target sequence for Plod2 (NM_011961.1,270-288).
cagaaggtgagattactga

SEQ ID NO: 609498 - DNA, 19 bp, Mus musculus
  siRNA target sequence for Plod2 (NM_011961.1,332-350).
cttgtttaccgagtgtttt

SEQ ID NO: 609499 - DNA, 19 bp, Mus musculus
  siRNA target sequence for Plod2 (NM_011961.1,370-388).
ggcctgaagaagttcttaa

SEQ ID NO: 609500 - DNA, 19 bp, Mus musculus
  siRNA target sequence for Plod2 (NM_011961.1,371-389).
gcctgaagaagttcttaaa

SEQ ID NO: 609501 - DNA, 19 bp, Mus musculus
  siRNA target sequence for Plod2 (NM_011961.1,392-410).
gttccaaaagacaaatcat

SEQ ID NO: 609502 - DNA, 19 bp, Mus musculus
  siRNA target sequence for Plod2 (NM_011961.1,486-504).
gggaaacgctacctgaatt

SEQ ID NO: 609503 - DNA, 19 bp, Mus musculus
  siRNA target sequence for Plod2 (NM_011961.1,500-518).
gaattctggaggctttatt

SEQ ID NO: 609504 - DNA, 19 bp, Mus musculus
  siRNA target sequence for Plod2 (NM_011961.1,519-537).
ggctatgccccgtacatca

SEQ ID NO: 609505 - DNA, 19 bp, Mus musculus
  siRNA target sequence for Plod2 (NM_011961.1,556-574).
ggaatctgcaggataatga

SEQ ID NO: 609506 - DNA, 19 bp, Mus musculus
  siRNA target sequence for Plod2 (NM_011961.1,573-591).
gatgatgatcagctctttt

SEQ ID NO: 609507 - DNA, 19 bp, Mus musculus
  siRNA target sequence for Plod2 (NM_011961.1,584-602).
gctcttttacacgaaagtt

SEQ ID NO: 609508 - DNA, 19 bp, Mus musculus
  siRNA target sequence for Plod2 (NM_011961.1,585-603).
ctcttttacacgaaagttt

SEQ ID NO: 609509 - DNA, 19 bp, Mus musculus
  siRNA target sequence for Plod2 (NM_011961.1,640-658).
cactggatcacaaatgcaa

SEQ ID NO: 609510 - DNA, 19 bp, Mus musculus
  siRNA target sequence for Plod2 (NM_011961.1,671-689).
cttgaatggagctacagat

SEQ ID NO: 609511 - DNA, 19 bp, Mus musculus
  siRNA target sequence for Plod2 (NM_011961.1,748-766).
cactgccagtggcaattaa

SEQ ID NO: 609512 - DNA, 19 bp, Mus musculus
  siRNA target sequence for Plod2 (NM_011961.1,752-770).
gccagtggcaattaatgga

SEQ ID NO: 609513 - DNA, 19 bp, Mus musculus
  siRNA target sequence for Plod2 (NM_011961.1,753-771).
ccagtggcaattaatggaa

SEQ ID NO: 609514 - DNA, 19 bp, Mus musculus
  siRNA target sequence for Plod2 (NM_011961.1,781-799).
ccaagattctcctgaatta

SEQ ID NO: 609515 - DNA, 19 bp, Mus musculus
  siRNA target sequence for Plod2 (NM_011961.1,861-879).
gacacaattgacttgtcta

SEQ ID NO: 609516 - DNA, 19 bp, Mus musculus
  siRNA target sequence for Plod2 (NM_011961.1,885-903).
gatgtccctcccaaggtta

SEQ ID NO: 609517 - DNA, 19 bp, Mus musculus
  siRNA target sequence for Plod2 (NM_011961.1,899-917).
ggttacactgggtgttttt

SEQ ID NO: 609518 - DNA, 19 bp, Mus musculus
  siRNA target sequence for Plod2 (NM_011961.1,943-961).
ctcgattcctgaacttact

SEQ ID NO: 609519 - DNA, 19 bp, Mus musculus
  siRNA target sequence for Plod2 (NM_011961.1,984-1002).
gaagcccttcaactcttta

SEQ ID NO: 609520 - DNA, 19 bp, Mus musculus
  siRNA target sequence for Plod2 (NM_011961.1,1061-1079).
gcatgacatcagctctata

SEQ ID NO: 609521 - DNA, 19 bp, Mus musculus
  siRNA target sequence for Plod2 (NM_011961.1,1062-1080).
catgacatcagctctataa

SEQ ID NO: 609522 - DNA, 19 bp, Mus musculus
  siRNA target sequence for Plod2 (NM_011961.1,1065-1083).
gacatcagctctataaaaa

SEQ ID NO: 609523 - DNA, 19 bp, Mus musculus
  siRNA target sequence for Plod2 (NM_011961.1,1067-1085).
catcagctctataaaaata

SEQ ID NO: 609524 - DNA, 19 bp, Mus musculus
  siRNA target sequence for Plod2 (NM_011961.1,1089-1107).
ggaccagaggagaacctaa

SEQ ID NO: 609525 - DNA, 19 bp, Mus musculus
  siRNA target sequence for Plod2 (NM_011961.1,1123-1141).
ggaacatgggcatggattt

SEQ ID NO: 609526 - DNA, 19 bp, Mus musculus
  siRNA target sequence for Plod2 (NM_011961.1,1149-1167).
caggatgaaaagtgtgatt

SEQ ID NO: 609527 - DNA, 19 bp, Mus musculus
  siRNA target sequence for Plod2 (NM_011961.1,1160-1178).
gtgtgattactactttagt

SEQ ID NO: 609528 - DNA, 19 bp, Mus musculus
  siRNA target sequence for Plod2 (NM_011961.1,1162-1180).
gtgattactactttagtgt

SEQ ID NO: 609529 - DNA, 19 bp, Mus musculus
  siRNA target sequence for Plod2 (NM_011961.1,1319-1337).
ctatgctcgctctgaagat

SEQ ID NO: 609530 - DNA, 19 bp, Mus musculus
  siRNA target sequence for Plod2 (NM_011961.1,1324-1342).
ctcgctctgaagattacgt

SEQ ID NO: 609531 - DNA, 19 bp, Mus musculus
  siRNA target sequence for Plod2 (NM_011961.1,1330-1348).
ctgaagattacgtggatat

SEQ ID NO: 609532 - DNA, 19 bp, Mus musculus
  siRNA target sequence for Plod2 (NM_011961.1,1383-1401).
ccatatatggctaatgtgt

SEQ ID NO: 609533 - DNA, 19 bp, Mus musculus
  siRNA target sequence for Plod2 (NM_011961.1,1384-1402).
catatatggctaatgtgta

SEQ ID NO: 609534 - DNA, 19 bp, Mus musculus
  siRNA target sequence for Plod2 (NM_011961.1,1420-1438).
cactccgatctgagatgaa

SEQ ID NO: 609535 - DNA, 19 bp, Mus musculus
  siRNA target sequence for Plod2 (NM_011961.1,1433-1451).
gatgaatgaaaggaactat

SEQ ID NO: 609536 - DNA, 19 bp, Mus musculus
  siRNA target sequence for Plod2 (NM_011961.1,1482-1500).
gctctttgccgcaatgcta

SEQ ID NO: 609537 - DNA, 19 bp, Mus musculus
  siRNA target sequence for Plod2 (NM_011961.1,1489-1507).
gccgcaatgctagagatat

SEQ ID NO: 609538 - DNA, 19 bp, Mus musculus
  siRNA target sequence for Plod2 (NM_011961.1,1539-1557).
gaatttggacggctgatat

SEQ ID NO: 609539 - DNA, 19 bp, Mus musculus
  siRNA target sequence for Plod2 (NM_011961.1,1550-1568).
gctgatatcaactgctaat

SEQ ID NO: 609540 - DNA, 19 bp, Mus musculus
  siRNA target sequence for Plod2 (NM_011961.1,1647-1665).
cgtgattattcaaagattt

SEQ ID NO: 609541 - DNA, 19 bp, Mus musculus
  siRNA target sequence for Plod2 (NM_011961.1,1650-1668).
gattattcaaagattttca

SEQ ID NO: 609542 - DNA, 19 bp, Mus musculus
  siRNA target sequence for Plod2 (NM_011961.1,1799-1817).
ccgcatatcgggtggttat

SEQ ID NO: 609543 - DNA, 19 bp, Mus musculus
  siRNA target sequence for Plod2 (NM_011961.1,1802-1820).
catatcgggtggttatgaa

SEQ ID NO: 609544 - DNA, 19 bp, Mus musculus
  siRNA target sequence for Plod2 (NM_011961.1,1826-1844).
cccgactgacgatattcat

SEQ ID NO: 609545 - DNA, 19 bp, Mus musculus
  siRNA target sequence for Plod2 (NM_011961.1,1827-1845).
ccgactgacgatattcata

SEQ ID NO: 609546 - DNA, 19 bp, Mus musculus
  siRNA target sequence for Plod2 (NM_011961.1,1828-1846).
cgactgacgatattcatat

SEQ ID NO: 609547 - DNA, 19 bp, Mus musculus
  siRNA target sequence for Plod2 (NM_011961.1,1831-1849).
ctgacgatattcatatgaa

SEQ ID NO: 609548 - DNA, 19 bp, Mus musculus
  siRNA target sequence for Plod2 (NM_011961.1,1853-1871).
gatcgggctggagaatgtt

SEQ ID NO: 609549 - DNA, 19 bp, Mus musculus
  siRNA target sequence for Plod2 (NM_011961.1,1916-1934).
ggtcttcgcaggctattat

SEQ ID NO: 609550 - DNA, 19 bp, Mus musculus
  siRNA target sequence for Plod2 (NM_011961.1,1917-1935).
gtcttcgcaggctattata

SEQ ID NO: 609551 - DNA, 19 bp, Mus musculus
  siRNA target sequence for Plod2 (NM_011961.1,1919-1937).
cttcgcaggctattataca

SEQ ID NO: 609552 - DNA, 19 bp, Mus musculus
  siRNA target sequence for Plod2 (NM_011961.1,1941-1959).
ggatttgcactgctgaatt

SEQ ID NO: 609553 - DNA, 19 bp, Mus musculus
  siRNA target sequence for Plod2 (NM_011961.1,1942-1960).
gatttgcactgctgaattt

SEQ ID NO: 609554 - DNA, 19 bp, Mus musculus
  siRNA target sequence for Plod2 (NM_011961.1,2006-2024).
ccacgatgcctcaaccttt

SEQ ID NO: 609555 - DNA, 19 bp, Mus musculus
  siRNA target sequence for Plod2 (NM_011961.1,2007-2025).
cacgatgcctcaaccttta

SEQ ID NO: 609556 - DNA, 19 bp, Mus musculus
  siRNA target sequence for Plod2 (NM_011961.1,2010-2028).
gatgcctcaacctttacca

SEQ ID NO: 609557 - DNA, 19 bp, Mus musculus
  siRNA target sequence for Plod2 (NM_011961.1,2027-2045).
catcaacattgctctgaat

SEQ ID NO: 609558 - DNA, 19 bp, Mus musculus
  siRNA target sequence for Plod2 (NM_011961.1,2070-2088).
ggtggatgcaaatttctga

SEQ ID NO: 609559 - DNA, 19 bp, Mus musculus
  siRNA target sequence for Plod2 (NM_011961.1,2102-2120).
cattgagtccccacgaaaa

SEQ ID NO: 609560 - DNA, 19 bp, Mus musculus
  siRNA target sequence for Plod2 (NM_011961.1,2140-2158).
ctgggaggctcacacattt

SEQ ID NO: 609561 - DNA, 19 bp, Mus musculus
  siRNA target sequence for Plod2 (NM_011961.1,2143-2161).
ggaggctcacacatttgca

SEQ ID NO: 609562 - DNA, 19 bp, Mus musculus
  siRNA target sequence for Plod2 (NM_011961.1,2162-2180).
cgaaggacttcctgttaaa

SEQ ID NO: 609563 - DNA, 19 bp, Mus musculus
  siRNA target sequence for Plod2 (NM_011961.1,2163-2181).
gaaggacttcctgttaaaa

SEQ ID NO: 609564 - DNA, 19 bp, Mus musculus
  siRNA target sequence for Plod3 (NM_011962.2,1213-1231).
gtccgccagtggaactaca

SEQ ID NO: 609565 - DNA, 19 bp, Mus musculus
  siRNA target sequence for Plod3 (NM_011962.2,1215-1233).
ccgccagtggaactacaaa

SEQ ID NO: 609566 - DNA, 19 bp, Mus musculus
  siRNA target sequence for Plod3 (NM_011962.2,1237-1255).
gacgatgatgatcaattgt

SEQ ID NO: 609567 - DNA, 19 bp, Mus musculus
  siRNA target sequence for Plod3 (NM_011962.2,1240-1258).
gatgatgatcaattgttct

SEQ ID NO: 609568 - DNA, 19 bp, Mus musculus
  siRNA target sequence for Plod3 (NM_011962.2,1243-1261).
gatgatcaattgttctaca

SEQ ID NO: 609569 - DNA, 19 bp, Mus musculus
  siRNA target sequence for Plod3 (NM_011962.2,1288-1306).
cgggagaaactcaaactga

SEQ ID NO: 609570 - DNA, 19 bp, Mus musculus
  siRNA target sequence for Plod3 (NM_011962.2,1314-1332).
ccataaatcccggatcttt

SEQ ID NO: 609571 - DNA, 19 bp, Mus musculus
  siRNA target sequence for Plod3 (NM_011962.2,1346-1364).
gagccttagatgaagtgat

SEQ ID NO: 609572 - DNA, 19 bp, Mus musculus
  siRNA target sequence for Plod3 (NM_011962.2,1448-1466).
ctaagctccagctcaacta

SEQ ID NO: 609573 - DNA, 19 bp, Mus musculus
  siRNA target sequence for Plod3 (NM_011962.2,1686-1704).
gtaccacgagcctcatatt

SEQ ID NO: 609574 - DNA, 19 bp, Mus musculus
  siRNA target sequence for Plod3 (NM_011962.2,1689-1707).
ccacgagcctcatattgca

SEQ ID NO: 609575 - DNA, 19 bp, Mus musculus
  siRNA target sequence for Plod3 (NM_011962.2,1722-1740).
gctccaggaccatttttca

SEQ ID NO: 609576 - DNA, 19 bp, Mus musculus
  siRNA target sequence for Plod3 (NM_011962.2,1822-1840).
cctgagtgtgagttctact

SEQ ID NO: 609577 - DNA, 19 bp, Mus musculus
  siRNA target sequence for Plod3 (NM_011962.2,1880-1898).
ccttgcgtgtcttgattga

SEQ ID NO: 609578 - DNA, 19 bp, Mus musculus
  siRNA target sequence for Plod3 (NM_011962.2,1881-1899).
cttgcgtgtcttgattgaa

SEQ ID NO: 609579 - DNA, 19 bp, Mus musculus
  siRNA target sequence for Plod3 (NM_011962.2,1884-1902).
gcgtgtcttgattgaacaa

SEQ ID NO: 609580 - DNA, 19 bp, Mus musculus
  siRNA target sequence for Plod3 (NM_011962.2,1885-1903).
cgtgtcttgattgaacaaa

SEQ ID NO: 609581 - DNA, 19 bp, Mus musculus
  siRNA target sequence for Plod3 (NM_011962.2,1912-1930).
gtaatagctcccatgcttt

SEQ ID NO: 609582 - DNA, 19 bp, Mus musculus
  siRNA target sequence for Plod3 (NM_011962.2,1966-1984).
gccctgagccccaatgagt

SEQ ID NO: 609583 - DNA, 19 bp, Mus musculus
  siRNA target sequence for Plod3 (NM_011962.2,1967-1985).
ccctgagccccaatgagta

SEQ ID NO: 609584 - DNA, 19 bp, Mus musculus
  siRNA target sequence for Plod3 (NM_011962.2,2040-2058).
gtggaatgtaccctacata

SEQ ID NO: 609585 - DNA, 19 bp, Mus musculus
  siRNA target sequence for Plod3 (NM_011962.2,2501-2519).
ccgttgatatccacatgaa

SEQ ID NO: 609586 - DNA, 19 bp, Mus musculus
  siRNA target sequence for Plod3 (NM_011962.2,2502-2520).
cgttgatatccacatgaaa

SEQ ID NO: 609587 - DNA, 19 bp, Mus musculus
  siRNA target sequence for Plod3 (NM_011962.2,2685-2703).
gtccaccttcactctcaat

SEQ ID NO: 609588 - DNA, 19 bp, Mus musculus
  siRNA target sequence for Plod3 (NM_011962.2,2687-2705).
ccaccttcactctcaatgt

SEQ ID NO: 609589 - DNA, 19 bp, Mus musculus
  siRNA target sequence for Plod3 (NM_011962.2,2715-2733).
ccacaagggtgtagattat

SEQ ID NO: 609590 - DNA, 19 bp, Mus musculus
  siRNA target sequence for Plod3 (NM_011962.2,2758-2776).
cgttacgactgcagaatct

SEQ ID NO: 609591 - DNA, 19 bp, Mus musculus
  siRNA target sequence for Plod3 (NM_011962.2,2852-2870).
ggggtactcgatacatcat

SEQ ID NO: 609592 - DNA, 19 bp, Mus musculus
  siRNA target sequence for P4ha1 (NM_011030.1,180-198).
gcccatccagggtttttta

SEQ ID NO: 609593 - DNA, 19 bp, Mus musculus
  siRNA target sequence for P4ha1 (NM_011030.1,183-201).
catccagggttttttacgt

SEQ ID NO: 609594 - DNA, 19 bp, Mus musculus
  siRNA target sequence for P4ha1 (NM_011030.1,208-226).
gtcagatgactgacttgat

SEQ ID NO: 609595 - DNA, 19 bp, Mus musculus
  siRNA target sequence for P4ha1 (NM_011030.1,217-235).
ctgacttgatccataatga

SEQ ID NO: 609596 - DNA, 19 bp, Mus musculus
  siRNA target sequence for P4ha1 (NM_011030.1,242-260).
cctggtgacatcactaaaa

SEQ ID NO: 609597 - DNA, 19 bp, Mus musculus
  siRNA target sequence for P4ha1 (NM_011030.1,245-263).
ggtgacatcactaaaagat

SEQ ID NO: 609598 - DNA, 19 bp, Mus musculus
  siRNA target sequence for P4ha1 (NM_011030.1,250-268).
catcactaaaagattatat

SEQ ID NO: 609599 - DNA, 19 bp, Mus musculus
  siRNA target sequence for P4ha1 (NM_011030.1,331-349).
cgagtacagcaacaaaaga

SEQ ID NO: 609600 - DNA, 19 bp, Mus musculus
  siRNA target sequence for P4ha1 (NM_011030.1,373-391).
ctgtaaacgcattcaagtt

SEQ ID NO: 609601 - DNA, 19 bp, Mus musculus
  siRNA target sequence for P4ha1 (NM_011030.1,375-393).
gtaaacgcattcaagttaa

SEQ ID NO: 609602 - DNA, 19 bp, Mus musculus
  siRNA target sequence for P4ha1 (NM_011030.1,380-398).
cgcattcaagttaatgaaa

SEQ ID NO: 609603 - DNA, 19 bp, Mus musculus
  siRNA target sequence for P4ha1 (NM_011030.1,456-474).
ggcttcatctctaacctaa

SEQ ID NO: 609604 - DNA, 19 bp, Mus musculus
  siRNA target sequence for P4ha1 (NM_011030.1,484-502).
ggcagtacttccctaatga

SEQ ID NO: 609605 - DNA, 19 bp, Mus musculus
  siRNA target sequence for P4ha1 (NM_011030.1,485-503).
gcagtacttccctaatgat

SEQ ID NO: 609606 - DNA, 19 bp, Mus musculus
  siRNA target sequence for P4ha1 (NM_011030.1,488-506).
gtacttccctaatgatgaa

SEQ ID NO: 609607 - DNA, 19 bp, Mus musculus
  siRNA target sequence for P4ha1 (NM_011030.1,539-557).
gctgcaagacacctacaat

SEQ ID NO: 609608 - DNA, 19 bp, Mus musculus
  siRNA target sequence for P4ha1 (NM_011030.1,550-568).
cctacaatctggacacaaa

SEQ ID NO: 609609 - DNA, 19 bp, Mus musculus
  siRNA target sequence for P4ha1 (NM_011030.1,561-579).
gacacaaataccatctcaa

SEQ ID NO: 609610 - DNA, 19 bp, Mus musculus
  siRNA target sequence for P4ha1 (NM_011030.1,572-590).
catctcaaaggggaatctt

SEQ ID NO: 609611 - DNA, 19 bp, Mus musculus
  siRNA target sequence for P4ha1 (NM_011030.1,588-606).
cttccaggagtgcaacata

SEQ ID NO: 609612 - DNA, 19 bp, Mus musculus
  siRNA target sequence for P4ha1 (NM_011030.1,591-609).
ccaggagtgcaacataagt

SEQ ID NO: 609613 - DNA, 19 bp, Mus musculus
  siRNA target sequence for P4ha1 (NM_011030.1,594-612).
ggagtgcaacataagtctt

SEQ ID NO: 609614 - DNA, 19 bp, Mus musculus
  siRNA target sequence for P4ha1 (NM_011030.1,595-613).
gagtgcaacataagtcttt

SEQ ID NO: 609615 - DNA, 19 bp, Mus musculus
  siRNA target sequence for P4ha1 (NM_011030.1,643-661).
gcaaagtggcctatacaga

SEQ ID NO: 609616 - DNA, 19 bp, Mus musculus
  siRNA target sequence for P4ha1 (NM_011030.1,653-671).
ctatacagaggcagattat

SEQ ID NO: 609617 - DNA, 19 bp, Mus musculus
  siRNA target sequence for P4ha1 (NM_011030.1,723-741).
gagctgtctactgtagata

SEQ ID NO: 609618 - DNA, 19 bp, Mus musculus
  siRNA target sequence for P4ha1 (NM_011030.1,848-866).
gagagctaatggtaactta

SEQ ID NO: 609619 - DNA, 19 bp, Mus musculus
  siRNA target sequence for P4ha1 (NM_011030.1,850-868).
gagctaatggtaacttagt

SEQ ID NO: 609620 - DNA, 19 bp, Mus musculus
  siRNA target sequence for P4ha1 (NM_011030.1,852-870).
gctaatggtaacttagtat

SEQ ID NO: 609621 - DNA, 19 bp, Mus musculus
  siRNA target sequence for P4ha1 (NM_011030.1,916-934).
cgtcgggcgaccaatctga

SEQ ID NO: 609622 - DNA, 19 bp, Mus musculus
  siRNA target sequence for P4ha1 (NM_011030.1,917-935).
gtcgggcgaccaatctgat

SEQ ID NO: 609623 - DNA, 19 bp, Mus musculus
  siRNA target sequence for P4ha1 (NM_011030.1,922-940).
gcgaccaatctgatcagaa

SEQ ID NO: 609624 - DNA, 19 bp, Mus musculus
  siRNA target sequence for P4ha1 (NM_011030.1,923-941).
cgaccaatctgatcagaaa

SEQ ID NO: 609625 - DNA, 19 bp, Mus musculus
  siRNA target sequence for P4ha1 (NM_011030.1,961-979).
ggatagctgtggattacct

SEQ ID NO: 609626 - DNA, 19 bp, Mus musculus
  siRNA target sequence for P4ha1 (NM_011030.1,988-1006).
gacagaagtacgaaatgct

SEQ ID NO: 609627 - DNA, 19 bp, Mus musculus
  siRNA target sequence for P4ha1 (NM_011030.1,1009-1027).
gccgtggggagggtatcaa

SEQ ID NO: 609628 - DNA, 19 bp, Mus musculus
  siRNA target sequence for P4ha1 (NM_011030.1,1010-1028).
ccgtggggagggtatcaaa

SEQ ID NO: 609629 - DNA, 19 bp, Mus musculus
  siRNA target sequence for P4ha1 (NM_011030.1,1011-1029).
cgtggggagggtatcaaaa

SEQ ID NO: 609630 - DNA, 19 bp, Mus musculus
  siRNA target sequence for P4ha1 (NM_011030.1,1016-1034).
ggagggtatcaaaatgact

SEQ ID NO: 609631 - DNA, 19 bp, Mus musculus
  siRNA target sequence for P4ha1 (NM_011030.1,1071-1089).
gatgggaaccggaatccta

SEQ ID NO: 609632 - DNA, 19 bp, Mus musculus
  siRNA target sequence for P4ha1 (NM_011030.1,1136-1154).
ccggattatccgtttccat

SEQ ID NO: 609633 - DNA, 19 bp, Mus musculus
  siRNA target sequence for P4ha1 (NM_011030.1,1146-1164).
cgtttccatgacatcatct

SEQ ID NO: 609634 - DNA, 19 bp, Mus musculus
  siRNA target sequence for P4ha1 (NM_011030.1,1165-1183).
ctgacgcggagattgagat

SEQ ID NO: 609635 - DNA, 19 bp, Mus musculus
  siRNA target sequence for P4ha1 (NM_011030.1,1246-1264).
ccttggagacggtacatta

SEQ ID NO: 609636 - DNA, 19 bp, Mus musculus
  siRNA target sequence for P4ha1 (NM_011030.1,1250-1268).
ggagacggtacattacaga

SEQ ID NO: 609637 - DNA, 19 bp, Mus musculus
  siRNA target sequence for P4ha1 (NM_011030.1,1253-1271).
gacggtacattacagaatt

SEQ ID NO: 609638 - DNA, 19 bp, Mus musculus
  siRNA target sequence for P4ha1 (NM_011030.1,1305-1323).
cctgtggtatcccgaatta

SEQ ID NO: 609639 - DNA, 19 bp, Mus musculus
  siRNA target sequence for P4ha1 (NM_011030.1,1306-1324).
ctgtggtatcccgaattaa

SEQ ID NO: 609640 - DNA, 19 bp, Mus musculus
  siRNA target sequence for P4ha1 (NM_011030.1,1308-1326).
gtggtatcccgaattaata

SEQ ID NO: 609641 - DNA, 19 bp, Mus musculus
  siRNA target sequence for P4ha1 (NM_011030.1,1311-1329).
gtatcccgaattaatatga

SEQ ID NO: 609642 - DNA, 19 bp, Mus musculus
  siRNA target sequence for P4ha1 (NM_011030.1,1315-1333).
cccgaattaatatgagaat

SEQ ID NO: 609643 - DNA, 19 bp, Mus musculus
  siRNA target sequence for P4ha1 (NM_011030.1,1370-1388).
ggagttacaggtagcaaat

SEQ ID NO: 609644 - DNA, 19 bp, Mus musculus
  siRNA target sequence for P4ha1 (NM_011030.1,1371-1389).
gagttacaggtagcaaatt

SEQ ID NO: 609645 - DNA, 19 bp, Mus musculus
  siRNA target sequence for P4ha1 (NM_011030.1,1516-1534).
ctggaggagctactgtttt

SEQ ID NO: 609646 - DNA, 19 bp, Mus musculus
  siRNA target sequence for P4ha1 (NM_011030.1,1576-1594).
ctgtcttctggtataatct

SEQ ID NO: 609647 - DNA, 19 bp, Mus musculus
  siRNA target sequence for P4ha1 (NM_011030.1,1578-1596).
gtcttctggtataatctgt

SEQ ID NO: 609648 - DNA, 19 bp, Mus musculus
  siRNA target sequence for P4ha1 (NM_011030.1,1605-1623).
ggggaaggagattacagta

SEQ ID NO: 609649 - DNA, 19 bp, Mus musculus
  siRNA target sequence for P4ha1 (NM_011030.1,1639-1657).
gtcccgtgctagttggaaa

SEQ ID NO: 609650 - DNA, 19 bp, Mus musculus
  siRNA target sequence for P4ha1 (NM_011030.1,1683-1701).
catgaacgtggacaagaat

SEQ ID NO: 609651 - DNA, 19 bp, Mus musculus
  siRNA target sequence for P4ha1 (NM_011030.1,1689-1707).
cgtggacaagaatttcgaa

SEQ ID NO: 609652 - DNA, 19 bp, Mus musculus
  siRNA target sequence for A830014H24Rik (NM_176958.2,164-182).
gcggaagagctcatcgaaa

SEQ ID NO: 609653 - DNA, 19 bp, Mus musculus
  siRNA target sequence for A830014H24Rik (NM_176958.2,166-184).
ggaagagctcatcgaaaat

SEQ ID NO: 609654 - DNA, 19 bp, Mus musculus
  siRNA target sequence for A830014H24Rik (NM_176958.2,199-217).
gctgaccgacacaaacctt

SEQ ID NO: 609655 - DNA, 19 bp, Mus musculus
  siRNA target sequence for A830014H24Rik (NM_176958.2,204-222).
ccgacacaaaccttgtgta

SEQ ID NO: 609656 - DNA, 19 bp, Mus musculus
  siRNA target sequence for A830014H24Rik (NM_176958.2,205-223).
cgacacaaaccttgtgtat

SEQ ID NO: 609657 - DNA, 19 bp, Mus musculus
  siRNA target sequence for A830014H24Rik (NM_176958.2,244-262).
cgaatacctgcaagagaat

SEQ ID NO: 609658 - DNA, 19 bp, Mus musculus
  siRNA target sequence for A830014H24Rik (NM_176958.2,369-387).
gggaggaaattaaatttca

SEQ ID NO: 609659 - DNA, 19 bp, Mus musculus
  siRNA target sequence for A830014H24Rik (NM_176958.2,491-509).
gacttcttgggttttaact

SEQ ID NO: 609660 - DNA, 19 bp, Mus musculus
  siRNA target sequence for A830014H24Rik (NM_176958.2,510-528).
ggaactggatcaataaaca

SEQ ID NO: 609661 - DNA, 19 bp, Mus musculus
  siRNA target sequence for A830014H24Rik (NM_176958.2,646-664).
ccataagagatgcatctta

SEQ ID NO: 609662 - DNA, 19 bp, Mus musculus
  siRNA target sequence for A830014H24Rik (NM_176958.2,647-665).
cataagagatgcatcttat

SEQ ID NO: 609663 - DNA, 19 bp, Mus musculus
  siRNA target sequence for A830014H24Rik (NM_176958.2,652-670).
gagatgcatcttatttcct

SEQ ID NO: 609664 - DNA, 19 bp, Mus musculus
  siRNA target sequence for Bbox1 (NM_130452.1,124-142).
gtggatggggctcatttga

SEQ ID NO: 609665 - DNA, 19 bp, Mus musculus
  siRNA target sequence for Bbox1 (NM_130452.1,134-152).
ctcatttgatgcagatctt

SEQ ID NO: 609666 - DNA, 19 bp, Mus musculus
  siRNA target sequence for Bbox1 (NM_130452.1,225-243).
cctacattctgcaaaagct

SEQ ID NO: 609667 - DNA, 19 bp, Mus musculus
  siRNA target sequence for Bbox1 (NM_130452.1,265-283).
cttgatgtaaacattagaa

SEQ ID NO: 609668 - DNA, 19 bp, Mus musculus
  siRNA target sequence for Bbox1 (NM_130452.1,327-345).
gcccaatgaccattacagt

SEQ ID NO: 609669 - DNA, 19 bp, Mus musculus
  siRNA target sequence for Bbox1 (NM_130452.1,336-354).
ccattacagtgaattcgaa

SEQ ID NO: 609670 - DNA, 19 bp, Mus musculus
  siRNA target sequence for Bbox1 (NM_130452.1,398-416).
caaggctccaaggagaatt

SEQ ID NO: 609671 - DNA, 19 bp, Mus musculus
  siRNA target sequence for Bbox1 (NM_130452.1,456-474).
gctgccaactctgaatttt

SEQ ID NO: 609672 - DNA, 19 bp, Mus musculus
  siRNA target sequence for Bbox1 (NM_130452.1,549-567).
caccggagcagctgacaaa

SEQ ID NO: 609673 - DNA, 19 bp, Mus musculus
  siRNA target sequence for Bbox1 (NM_130452.1,564-582).
caaacgtggtgagatcata

SEQ ID NO: 609674 - DNA, 19 bp, Mus musculus
  siRNA target sequence for Bbox1 (NM_130452.1,609-627).
gtacctcacattttatgga

SEQ ID NO: 609675 - DNA, 19 bp, Mus musculus
  siRNA target sequence for Bbox1 (NM_130452.1,636-654).
gcaagtgcaggacaagatt

SEQ ID NO: 609676 - DNA, 19 bp, Mus musculus
  siRNA target sequence for Bbox1 (NM_130452.1,658-676).
gccaacaatgtggcttata

SEQ ID NO: 609677 - DNA, 19 bp, Mus musculus
  siRNA target sequence for Bbox1 (NM_130452.1,663-681).
caatgtggcttatacaact

SEQ ID NO: 609678 - DNA, 19 bp, Mus musculus
  siRNA target sequence for Bbox1 (NM_130452.1,733-751).
gttcagcttctgcattgta

SEQ ID NO: 609679 - DNA, 19 bp, Mus musculus
  siRNA target sequence for Bbox1 (NM_130452.1,830-848).
ctcaggctttccatattct

SEQ ID NO: 609680 - DNA, 19 bp, Mus musculus
  siRNA target sequence for Bbox1 (NM_130452.1,832-850).
caggctttccatattctct

SEQ ID NO: 609681 - DNA, 19 bp, Mus musculus
  siRNA target sequence for Bbox1 (NM_130452.1,880-898).
ggagtggattactgtgatt

SEQ ID NO: 609682 - DNA, 19 bp, Mus musculus
  siRNA target sequence for Bbox1 (NM_130452.1,881-899).
gagtggattactgtgattt

SEQ ID NO: 609683 - DNA, 19 bp, Mus musculus
  siRNA target sequence for Bbox1 (NM_130452.1,885-903).
ggattactgtgatttctct

SEQ ID NO: 609684 - DNA, 19 bp, Mus musculus
  siRNA target sequence for Bbox1 (NM_130452.1,906-924).
gcaatctaaacacaagatt

SEQ ID NO: 609685 - DNA, 19 bp, Mus musculus
  siRNA target sequence for Bbox1 (NM_130452.1,969-987).
caatgcaaccagagataca

SEQ ID NO: 609686 - DNA, 19 bp, Mus musculus
  siRNA target sequence for Bbox1 (NM_130452.1,1031-1049).
ctctgaaagagtttgttga

SEQ ID NO: 609687 - DNA, 19 bp, Mus musculus
  siRNA target sequence for Bbox1 (NM_130452.1,1089-1107).
gaatccaggtgatgtgatt

SEQ ID NO: 609688 - DNA, 19 bp, Mus musculus
  siRNA target sequence for Bbox1 (NM_130452.1,1150-1168).
gaggcgggaactgagatat

SEQ ID NO: 609689 - DNA, 19 bp, Mus musculus
  siRNA target sequence for Bbox1 (NM_130452.1,1209-1227).
gatgtcaaggcttcgtatt

SEQ ID NO: 609690 - DNA, 19 bp, Mus musculus
  siRNA target sequence for 1110031I02Rik (NM_025402.1,263-281).
gtgtggggatcgatgatga

SEQ ID NO: 609691 - DNA, 19 bp, Mus musculus
  siRNA target sequence for 1110031I02Rik (NM_025402.1,267-285).
ggggatcgatgatgatgtt

SEQ ID NO: 609692 - DNA, 19 bp, Mus musculus
  siRNA target sequence for 1110031I02Rik (NM_025402.1,315-333).
cctagaaggcaggttcatt

SEQ ID NO: 609693 - DNA, 19 bp, Mus musculus
  siRNA target sequence for 1110031I02Rik (NM_025402.1,357-375).
cgatggtcaccgaaggttt

SEQ ID NO: 609694 - DNA, 19 bp, Mus musculus
  siRNA target sequence for 1110031I02Rik (NM_025402.1,444-462).
gcagattcgcagaatagca

SEQ ID NO: 609695 - DNA, 19 bp, Mus musculus
  siRNA target sequence for 1110031I02Rik (NM_025402.1,488-506).
cggatggaggggcatctat

SEQ ID NO: 609696 - DNA, 19 bp, Mus musculus
  siRNA target sequence for 1110031I02Rik (NM_025402.1,546-564).
ctttgtgaacctgtataga

SEQ ID NO: 609697 - DNA, 19 bp, Mus musculus
  siRNA target sequence for 1110031I02Rik (NM_025402.1,601-619).
gaggactttcagttatata

SEQ ID NO: 609698 - DNA, 19 bp, Mus musculus
  siRNA target sequence for 1110031I02Rik (NM_025402.1,701-719).
catttttctcgcgaataaa

SEQ ID NO: 609699 - DNA, 19 bp, Mus musculus
  siRNA target sequence for 1110031I02Rik (NM_025402.1,731-749).
cccggacagctcatgatga

SEQ ID NO: 609700 - DNA, 19 bp, Mus musculus
  siRNA target sequence for 1110031I02Rik (NM_025402.1,779-797).
cctacggctcttttgacta

SEQ ID NO: 609701 - DNA, 19 bp, Mus musculus
  siRNA target sequence for 1110031I02Rik (NM_025402.1,798-816).
cacttcgctgctttaccta

SEQ ID NO: 609702 - DNA, 19 bp, Mus musculus
  siRNA target sequence for 1110031I02Rik (NM_025402.1,808-826).
ctttacctatcggattact

SEQ ID NO: 609703 - DNA, 19 bp, Mus musculus
  siRNA target sequence for 1110031I02Rik (NM_025402.1,838-856).
ggtggagggcgctttgtgt

SEQ ID NO: 609704 - DNA, 19 bp, Mus musculus
  siRNA target sequence for 1110031I02Rik (NM_025402.1,839-857).
gtggagggcgctttgtgtt

SEQ ID NO: 609705 - DNA, 19 bp, Mus musculus
  siRNA target sequence for 1110031I02Rik (NM_025402.1,842-860).
gagggcgctttgtgttcat

SEQ ID NO: 609706 - DNA, 19 bp, Mus musculus
  siRNA target sequence for 1110031I02Rik (NM_025402.1,893-911).
gagctggtcgagtctcatt

SEQ ID NO: 609707 - DNA, 19 bp, Mus musculus
  siRNA target sequence for 1110031I02Rik (NM_025402.1,896-914).
ctggtcgagtctcattctt

SEQ ID NO: 609708 - DNA, 19 bp, Mus musculus
  siRNA target sequence for 1110031I02Rik (NM_025402.1,898-916).
ggtcgagtctcattcttta

SEQ ID NO: 609709 - DNA, 19 bp, Mus musculus
  siRNA target sequence for 4930415J21Rik (NM_177767.3,58-76).
gcaggtatcggcagagttt

SEQ ID NO: 609710 - DNA, 19 bp, Mus musculus
  siRNA target sequence for 4930415J21Rik (NM_177767.3,59-77).
caggtatcggcagagtttt

SEQ ID NO: 609711 - DNA, 19 bp, Mus musculus
  siRNA target sequence for 4930415J21Rik (NM_177767.3,138-156).
caccgttcagccatgctat

SEQ ID NO: 609712 - DNA, 19 bp, Mus musculus
  siRNA target sequence for 4930415J21Rik (NM_177767.3,186-204).
gtgtgatcccaaacttcat

SEQ ID NO: 609713 - DNA, 19 bp, Mus musculus
  siRNA target sequence for 4930415J21Rik (NM_177767.3,220-238).
cttggaaggacttcacaaa

SEQ ID NO: 609714 - DNA, 19 bp, Mus musculus
  siRNA target sequence for 4930415J21Rik (NM_177767.3,228-246).
gacttcacaaagagctttt

SEQ ID NO: 609715 - DNA, 19 bp, Mus musculus
  siRNA target sequence for 4930415J21Rik (NM_177767.3,259-277).
ccatgaaaagtacaatgat

SEQ ID NO: 609716 - DNA, 19 bp, Mus musculus
  siRNA target sequence for 4930415J21Rik (NM_177767.3,260-278).
catgaaaagtacaatgatt

SEQ ID NO: 609717 - DNA, 19 bp, Mus musculus
  siRNA target sequence for 4930415J21Rik (NM_177767.3,314-332).
cgaaaagagccccatatct

SEQ ID NO: 609718 - DNA, 19 bp, Mus musculus
  siRNA target sequence for 4930415J21Rik (NM_177767.3,343-361).
gaaacttatgtttgaagat

SEQ ID NO: 609719 - DNA, 19 bp, Mus musculus
  siRNA target sequence for 4930415J21Rik (NM_177767.3,482-500).
cggatcgctttcattctgt

SEQ ID NO: 609720 - DNA, 19 bp, Mus musculus
  siRNA target sequence for 4930415J21Rik (NM_177767.3,483-501).
ggatcgctttcattctgta

SEQ ID NO: 609721 - DNA, 19 bp, Mus musculus
  siRNA target sequence for 4930415J21Rik (NM_177767.3,532-550).
gggcaccctggacctttat

SEQ ID NO: 609722 - DNA, 19 bp, Mus musculus
  siRNA target sequence for 4930415J21Rik (NM_177767.3,603-621).
cctggaacaaactggtttt

SEQ ID NO: 609723 - DNA, 19 bp, Mus musculus
  siRNA target sequence for 4930415J21Rik (NM_177767.3,664-682).
cctgtctgaagaaacatca

SEQ ID NO: 609724 - DNA, 19 bp, Mus musculus
  siRNA target sequence for 4930415J21Rik (NM_177767.3,674-692).
gaaacatcacgtttgtcta

SEQ ID NO: 609725 - DNA, 19 bp, Mus musculus
  siRNA target sequence for 4930415J21Rik (NM_177767.3,690-708).
ctataagtggctggtttta

SEQ ID NO: 609726 - DNA, 19 bp, Mus musculus
  siRNA target sequence for 4930415J21Rik (NM_177767.3,702-720).
ggttttatggtccttcatt

SEQ ID NO: 609727 - DNA, 19 bp, Mus musculus
  siRNA target sequence for 4930415J21Rik (NM_177767.3,703-721).
gttttatggtccttcatta

SEQ ID NO: 609728 - DNA, 19 bp, Mus musculus
  siRNA target sequence for 4930415J21Rik (NM_177767.3,726-744).
ggcctcctacctactttga

SEQ ID NO: 609729 - DNA, 19 bp, Mus musculus
  siRNA target sequence for 4930415J21Rik (NM_177767.3,773-791).
ccacaagatcatgaaattt

SEQ ID NO: 609730 - DNA, 19 bp, Mus musculus
  siRNA target sequence for 4930415J21Rik (NM_177767.3,1007-1025).
cctgacgtgctgaaggaat

SEQ ID NO: 609731 - DNA, 19 bp, Mus musculus
  siRNA target sequence for 4930415J21Rik (NM_177767.3,1080-1098).
gcctgaagcttcacttctt

SEQ ID NO: 609732 - DNA, 19 bp, Mus musculus
  siRNA target sequence for 4930415J21Rik (NM_177767.3,1335-1353).
ctggccattacacattagt

SEQ ID NO: 609733 - DNA, 19 bp, Mus musculus
  siRNA target sequence for 4930415J21Rik (NM_177767.3,1379-1397).
gccctggacctgtttctgt

SEQ ID NO: 609734 - DNA, 19 bp, Mus musculus
  siRNA target sequence for 4930415J21Rik (NM_177767.3,1432-1450).
cggctttacctcctacatt

SEQ ID NO: 609735 - DNA, 19 bp, Mus musculus
  siRNA target sequence for 4930415J21Rik (NM_177767.3,1447-1465).
cattgctaaaggtgaagat

SEQ ID NO: 609736 - DNA, 19 bp, Mus musculus
  siRNA target sequence for 4930415J21Rik (NM_177767.3,1526-1544).
gaaacgctgaggtttgtga

SEQ ID NO: 609737 - DNA, 19 bp, Mus musculus
  siRNA target sequence for 4930415J21Rik (NM_177767.3,1530-1548).
cgctgaggtttgtgaaaca

SEQ ID NO: 609738 - DNA, 19 bp, Mus musculus
  siRNA target sequence for 4930415J21Rik (NM_177767.3,1605-1623).
gggacttcgcattcatcta

SEQ ID NO: 609739 - DNA, 19 bp, Mus musculus
  siRNA target sequence for 4930415J21Rik (NM_177767.3,1607-1625).
gacttcgcattcatctact

SEQ ID NO: 609740 - DNA, 19 bp, Mus musculus
  siRNA target sequence for 4930415J21Rik (NM_177767.3,1609-1627).
cttcgcattcatctactat

SEQ ID NO: 609741 - DNA, 19 bp, Mus musculus
  siRNA target sequence for AW553532 (NM_173379.1,247-265).
ggcgtggctgcctactaca

SEQ ID NO: 609742 - DNA, 19 bp, Mus musculus
  siRNA target sequence for AW553532 (NM_173379.1,529-547).
cgcagagttccctacaact

SEQ ID NO: 609743 - DNA, 19 bp, Mus musculus
  siRNA target sequence for AW553532 (NM_173379.1,530-548).
gcagagttccctacaacta

SEQ ID NO: 609744 - DNA, 19 bp, Mus musculus
  siRNA target sequence for AW553532 (NM_173379.1,599-617).
cagctcacacgttcttcat

SEQ ID NO: 609745 - DNA, 19 bp, Mus musculus
  siRNA target sequence for AW553532 (NM_173379.1,626-644).
ccgagcacatggaaatgca

SEQ ID NO: 609746 - DNA, 19 bp, Mus musculus
  siRNA target sequence for AW553532 (NM_173379.1,646-664).
caggacctagaggactata

SEQ ID NO: 609747 - DNA, 19 bp, Mus musculus
  siRNA target sequence for AW553532 (NM_173379.1,648-666).
ggacctagaggactataaa

SEQ ID NO: 609748 - DNA, 19 bp, Mus musculus
  siRNA target sequence for AW553532 (NM_173379.1,712-730).
ccacacctggaaagctata

SEQ ID NO: 609749 - DNA, 19 bp, Mus musculus
  siRNA target sequence for AW553532 (NM_173379.1,717-735).
cctggaaagctataatgct

SEQ ID NO: 609750 - DNA, 19 bp, Mus musculus
  siRNA target sequence for AW553532 (NM_173379.1,766-784).
gaatccgcaatcaagtact

SEQ ID NO: 609751 - DNA, 19 bp, Mus musculus
  siRNA target sequence for AW553532 (NM_173379.1,770-788).
ccgcaatcaagtactttga

SEQ ID NO: 609752 - DNA, 19 bp, Mus musculus
  siRNA target sequence for AW553532 (NM_173379.1,790-808).
caagctttaagagagtatt

SEQ ID NO: 609753 - DNA, 19 bp, Mus musculus
  siRNA target sequence for AW553532 (NM_173379.1,878-896).
ggtataaaggtggtcttta

SEQ ID NO: 609754 - DNA, 19 bp, Mus musculus
  siRNA target sequence for AW553532 (NM_173379.1,900-918).
ggcaatcgcagatcactat

SEQ ID NO: 609755 - DNA, 19 bp, Mus musculus
  siRNA target sequence for AW553532 (NM_173379.1,901-919).
gcaatcgcagatcactata

SEQ ID NO: 609756 - DNA, 19 bp, Mus musculus
  siRNA target sequence for AW553532 (NM_173379.1,902-920).
caatcgcagatcactatat

SEQ ID NO: 609757 - DNA, 19 bp, Mus musculus
  siRNA target sequence for AW553532 (NM_173379.1,981-999).
ctcaccaatcgagaacttt

SEQ ID NO: 609758 - DNA, 19 bp, Mus musculus
  siRNA target sequence for AW553532 (NM_173379.1,1086-1104).
gatgttccatccagacaat

SEQ ID NO: 609759 - DNA, 19 bp, Mus musculus
  siRNA target sequence for AW553532 (NM_173379.1,1155-1173).
cactgatccagcatccatt

SEQ ID NO: 609760 - DNA, 19 bp, Mus musculus
  siRNA target sequence for AW553532 (NM_173379.1,1182-1200).
ggaggatttaacagcattt

SEQ ID NO: 609761 - DNA, 19 bp, Mus musculus
  siRNA target sequence for AW553532 (NM_173379.1,1196-1214).
catttgtcaaacgtcataa

SEQ ID NO: 609762 - DNA, 19 bp, Mus musculus
  siRNA target sequence for AW553532 (NM_173379.1,1219-1237).
gaagctgaactgatcaagt

SEQ ID NO: 609763 - DNA, 19 bp, Mus musculus
  siRNA target sequence for AW553532 (NM_173379.1,1251-1269).
cctgggattttcatatgct

SEQ ID NO: 609764 - DNA, 19 bp, Mus musculus
  siRNA target sequence for AW553532 (NM_173379.1,1262-1280).
catatgctgaaccgaatta

SEQ ID NO: 609765 - DNA, 19 bp, Mus musculus
  siRNA target sequence for AW553532 (NM_173379.1,1374-1392).
gaagtcaccgcccaagata

SEQ ID NO: 609766 - DNA, 19 bp, Mus musculus
  siRNA target sequence for AW553532 (NM_173379.1,1418-1436).
ctctgctctacgagaacat

SEQ ID NO: 609767 - DNA, 19 bp, Mus musculus
  siRNA target sequence for AW553532 (NM_173379.1,1478-1496).
gggttcttctcgataatgt

SEQ ID NO: 609768 - DNA, 19 bp, Mus musculus
  siRNA target sequence for AW553532 (NM_173379.1,1525-1543).
cacagtgtggccaatggaa

SEQ ID NO: 609769 - DNA, 19 bp, Mus musculus
  siRNA target sequence for AW553532 (NM_173379.1,1561-1579).
ggataccgagggaaaacgt

SEQ ID NO: 609770 - DNA, 19 bp, Mus musculus
  siRNA target sequence for AW553532 (NM_173379.1,1602-1620).
gtttgaaggagcaactgtt

SEQ ID NO: 609771 - DNA, 19 bp, Mus musculus
  siRNA target sequence for AW553532 (NM_173379.1,1736-1754).
caaccctgtatttttccta

SEQ ID NO: 609772 - DNA, 19 bp, Mus musculus
  siRNA target sequence for AW553532 (NM_173379.1,1787-1805).
ggcagcaggatcgaagaaa

SEQ ID NO: 609773 - DNA, 19 bp, Mus musculus
  siRNA target sequence for AW553532 (NM_173379.1,1788-1806).
gcagcaggatcgaagaaat

SEQ ID NO: 609774 - DNA, 19 bp, Mus musculus
  siRNA target sequence for AW553532 (NM_173379.1,1907-1925).
ctctcctgtatatgaatga

SEQ ID NO: 609775 - DNA, 19 bp, Mus musculus
  siRNA target sequence for AW553532 (NM_173379.1,1933-1951).
gacggaggggaattcatct

SEQ ID NO: 609776 - DNA, 19 bp, Mus musculus
  siRNA target sequence for AW553532 (NM_173379.1,1977-1995).
gactgcctctataaaacca

SEQ ID NO: 609777 - DNA, 19 bp, Mus musculus
  siRNA target sequence for AW553532 (NM_173379.1,1994-2012).
caaagtgtggccgaatgat

SEQ ID NO: 609778 - DNA, 19 bp, Mus musculus
  siRNA target sequence for AW553532 (NM_173379.1,2077-2095).
gctgtggcactatggttta

SEQ ID NO: 609779 - DNA, 19 bp, Mus musculus
  siRNA target sequence for AW553532 (NM_173379.1,2124-2142).
gcggatacaggcagatgaa

SEQ ID NO: 609780 - DNA, 19 bp, Mus musculus
  siRNA target sequence for D930031A02Rik (NM_177161.3,194-212).
cgcgacttgaccagattct

SEQ ID NO: 609781 - DNA, 19 bp, Mus musculus
  siRNA target sequence for D930031A02Rik (NM_177161.3,195-213).
gcgacttgaccagattcta

SEQ ID NO: 609782 - DNA, 19 bp, Mus musculus
  siRNA target sequence for D930031A02Rik (NM_177161.3,211-229).
ctatgacaaggtactttct

SEQ ID NO: 609783 - DNA, 19 bp, Mus musculus
  siRNA target sequence for D930031A02Rik (NM_177161.3,228-246).
ctttgcacgaggacttgaa

SEQ ID NO: 609784 - DNA, 19 bp, Mus musculus
  siRNA target sequence for D930031A02Rik (NM_177161.3,307-325).
gaggaatgtggtacatagt

SEQ ID NO: 609785 - DNA, 19 bp, Mus musculus
  siRNA target sequence for D930031A02Rik (NM_177161.3,309-327).
ggaatgtggtacatagtct

SEQ ID NO: 609786 - DNA, 19 bp, Mus musculus
  siRNA target sequence for D930031A02Rik (NM_177161.3,686-704).
gaagacgccctggattact

SEQ ID NO: 609787 - DNA, 19 bp, Mus musculus
  siRNA target sequence for D930031A02Rik (NM_177161.3,792-810).
ggatggccaggaatgtgtt

SEQ ID NO: 609788 - DNA, 19 bp, Mus musculus
  siRNA target sequence for D930031A02Rik (NM_177161.3,796-814).
ggccaggaatgtgttgaaa

SEQ ID NO: 609789 - DNA, 19 bp, Mus musculus
  siRNA target sequence for D930031A02Rik (NM_177161.3,797-815).
gccaggaatgtgttgaaat

SEQ ID NO: 609790 - DNA, 19 bp, Mus musculus
  siRNA target sequence for D930031A02Rik (NM_177161.3,801-819).
ggaatgtgttgaaatatga

SEQ ID NO: 609791 - DNA, 19 bp, Mus musculus
  siRNA target sequence for D930031A02Rik (NM_177161.3,850-868).
ggcggctgagactgcaatt

SEQ ID NO: 609792 - DNA, 19 bp, Mus musculus
  siRNA target sequence for D930031A02Rik (NM_177161.3,852-870).
cggctgagactgcaattca

SEQ ID NO: 609793 - DNA, 19 bp, Mus musculus
  siRNA target sequence for D930031A02Rik (NM_177161.3,854-872).
gctgagactgcaattcaga

SEQ ID NO: 609794 - DNA, 19 bp, Mus musculus
  siRNA target sequence for D930031A02Rik (NM_177161.3,938-956).
cagccaacacactaccaaa

SEQ ID NO: 609795 - DNA, 19 bp, Mus musculus
  siRNA target sequence for D930031A02Rik (NM_177161.3,1163-1181).
gagtaccgcatcagcaaaa

SEQ ID NO: 609796 - DNA, 19 bp, Mus musculus
  siRNA target sequence for D930031A02Rik (NM_177161.3,1165-1183).
gtaccgcatcagcaaaagt

SEQ ID NO: 609797 - DNA, 19 bp, Mus musculus
  siRNA target sequence for D930031A02Rik (NM_177161.3,1286-1304).
caggtggtgaactatggaa

SEQ ID NO: 609798 - DNA, 19 bp, Mus musculus
  siRNA target sequence for D930031A02Rik (NM_177161.3,1302-1320).
gaatcggagggcactatga

SEQ ID NO: 609799 - DNA, 19 bp, Mus musculus
  siRNA target sequence for D930031A02Rik (NM_177161.3,1312-1330).
gcactatgagcctcacttt

SEQ ID NO: 609800 - DNA, 19 bp, Mus musculus
  siRNA target sequence for D930031A02Rik (NM_177161.3,1382-1400).
cgagtggcaacgtttatga

SEQ ID NO: 609801 - DNA, 19 bp, Mus musculus
  siRNA target sequence for D930031A02Rik (NM_177161.3,1383-1401).
gagtggcaacgtttatgat

SEQ ID NO: 609802 - DNA, 19 bp, Mus musculus
  siRNA target sequence for D930031A02Rik (NM_177161.3,1387-1405).
ggcaacgtttatgatctat

SEQ ID NO: 609803 - DNA, 19 bp, Mus musculus
  siRNA target sequence for D930031A02Rik (NM_177161.3,1389-1407).
caacgtttatgatctatct

SEQ ID NO: 609804 - DNA, 19 bp, Mus musculus
  siRNA target sequence for D930031A02Rik (NM_177161.3,1424-1442).
ggaggagccacggctttta

SEQ ID NO: 609805 - DNA, 19 bp, Mus musculus
  siRNA target sequence for D930031A02Rik (NM_177161.3,1425-1443).
gaggagccacggcttttat

SEQ ID NO: 609806 - DNA, 19 bp, Mus musculus
  siRNA target sequence for D930031A02Rik (NM_177161.3,1428-1446).
gagccacggcttttatcta

SEQ ID NO: 609807 - DNA, 19 bp, Mus musculus
  siRNA target sequence for D930031A02Rik (NM_177161.3,1519-1537).
ggatggtgacacacttcat

SEQ ID NO: 609808 - DNA, 19 bp, Mus musculus
  siRNA target sequence for Grcb (NM_013534.1,624-642).
ctggtgacgcccctatact

SEQ ID NO: 609809 - DNA, 19 bp, Mus musculus
  siRNA target sequence for Grcb (NM_013534.1,635-653).
cctatactgggcagcttat

SEQ ID NO: 609810 - DNA, 19 bp, Mus musculus
  siRNA target sequence for Grcb (NM_013534.1,983-1001).
gtctcaggccatggaaaat

SEQ ID NO: 609811 - DNA, 19 bp, Mus musculus
  siRNA target sequence for Grcb (NM_013534.1,1315-1333).
ggaaggatgcccttctgat

SEQ ID NO: 609812 - DNA, 19 bp, Mus musculus
  siRNA target sequence for Grcb (NM_013534.1,1376-1394).
gtcggagcgagctgtctta

SEQ ID NO: 609813 - DNA, 19 bp, Mus musculus
  siRNA target sequence for Grcb (NM_013534.1,1378-1396).
cggagcgagctgtcttaga

SEQ ID NO: 609814 - DNA, 19 bp, Mus musculus
  siRNA target sequence for Grcb (NM_013534.1,1379-1397).
ggagcgagctgtcttagat

SEQ ID NO: 609815 - DNA, 19 bp, Mus musculus
  siRNA target sequence for Grcb (NM_013534.1,1605-1623).
gagcgagtgcggactttga

SEQ ID NO: 609816 - DNA, 19 bp, Mus musculus
  siRNA target sequence for Grcb (NM_013534.1,1644-1662).
gaacggccactgcatcttt

SEQ ID NO: 609817 - DNA, 19 bp, Mus musculus
  siRNA target sequence for Grcb (NM_013534.1,1679-1697).
gtgccgaagtgccatagaa

SEQ ID NO: 609818 - DNA, 19 bp, Mus musculus
  siRNA target sequence for Grcb (NM_013534.1,1799-1817).
cacctatcgagactatagt

SEQ ID NO: 609819 - DNA, 19 bp, Mus musculus
  siRNA target sequence for Grcb (NM_013534.1,1819-1837).
gactcctctacctcaatga

SEQ ID NO: 609820 - DNA, 19 bp, Mus musculus
  siRNA target sequence for Lepre1 (NM_019782.1,467-485).
ggtcgcctatttcaagata

SEQ ID NO: 609821 - DNA, 19 bp, Mus musculus
  siRNA target sequence for Lepre1 (NM_019782.1,468-486).
gtcgcctatttcaagataa

SEQ ID NO: 609822 - DNA, 19 bp, Mus musculus
  siRNA target sequence for Lepre1 (NM_019782.1,555-573).
cggcagaacctcgactatt

SEQ ID NO: 609823 - DNA, 19 bp, Mus musculus
  siRNA target sequence for Lepre1 (NM_019782.1,556-574).
ggcagaacctcgactatta

SEQ ID NO: 609824 - DNA, 19 bp, Mus musculus
  siRNA target sequence for Lepre1 (NM_019782.1,560-578).
gaacctcgactattaccaa

SEQ ID NO: 609825 - DNA, 19 bp, Mus musculus
  siRNA target sequence for Lepre1 (NM_019782.1,620-638).
ggccaagccccatatgcat

SEQ ID NO: 609826 - DNA, 19 bp, Mus musculus
  siRNA target sequence for Lepre1 (NM_019782.1,754-772).
gcgaagggccctatgacta

SEQ ID NO: 609827 - DNA, 19 bp, Mus musculus
  siRNA target sequence for Lepre1 (NM_019782.1,768-786).
gactacgacggctacaact

SEQ ID NO: 609828 - DNA, 19 bp, Mus musculus
  siRNA target sequence for Lepre1 (NM_019782.1,778-796).
gctacaactacctagacta

SEQ ID NO: 609829 - DNA, 19 bp, Mus musculus
  siRNA target sequence for Lepre1 (NM_019782.1,817-835).
ccatcacagatcattacgt

SEQ ID NO: 609830 - DNA, 19 bp, Mus musculus
  siRNA target sequence for Lepre1 (NM_019782.1,892-910).
gggaaaagccctttgaaga

SEQ ID NO: 609831 - DNA, 19 bp, Mus musculus
  siRNA target sequence for Lepre1 (NM_019782.1,911-929).
cttcctcccttcacactat

SEQ ID NO: 609832 - DNA, 19 bp, Mus musculus
  siRNA target sequence for Lepre1 (NM_019782.1,914-932).
cctcccttcacactataat

SEQ ID NO: 609833 - DNA, 19 bp, Mus musculus
  siRNA target sequence for Lepre1 (NM_019782.1,915-933).
ctcccttcacactataatt

SEQ ID NO: 609834 - DNA, 19 bp, Mus musculus
  siRNA target sequence for Lepre1 (NM_019782.1,956-974).
cattgggaactatacacaa

SEQ ID NO: 609835 - DNA, 19 bp, Mus musculus
  siRNA target sequence for Lepre1 (NM_019782.1,961-979).
ggaactatacacaagctat

SEQ ID NO: 609836 - DNA, 19 bp, Mus musculus
  siRNA target sequence for Lepre1 (NM_019782.1,962-980).
gaactatacacaagctatt

SEQ ID NO: 609837 - DNA, 19 bp, Mus musculus
  siRNA target sequence for Lepre1 (NM_019782.1,1151-1169).
cgcttatgacatttttgga

SEQ ID NO: 609838 - DNA, 19 bp, Mus musculus
  siRNA target sequence for Lepre1 (NM_019782.1,1536-1554).
cacaccccaaatgaaaagt

SEQ ID NO: 609839 - DNA, 19 bp, Mus musculus
  siRNA target sequence for Lepre1 (NM_019782.1,1614-1632).
cagagtgcccgcatgtact

SEQ ID NO: 609840 - DNA, 19 bp, Mus musculus
  siRNA target sequence for Lepre1 (NM_019782.1,1618-1636).
gtgcccgcatgtactacaa

SEQ ID NO: 609841 - DNA, 19 bp, Mus musculus
  siRNA target sequence for Lepre1 (NM_019782.1,1680-1698).
ctggacacgcccctctatt

SEQ ID NO: 609842 - DNA, 19 bp, Mus musculus
  siRNA target sequence for Lepre1 (NM_019782.1,1683-1701).
gacacgcccctctatttct

SEQ ID NO: 609843 - DNA, 19 bp, Mus musculus
  siRNA target sequence for Lepre1 (NM_019782.1,1687-1705).
cgcccctctatttctctta

SEQ ID NO: 609844 - DNA, 19 bp, Mus musculus
  siRNA target sequence for Lepre1 (NM_019782.1,1715-1733).
cgtgtgccgcactgcaata

SEQ ID NO: 609845 - DNA, 19 bp, Mus musculus
  siRNA target sequence for Lepre1 (NM_019782.1,1718-1736).
gtgccgcactgcaatagaa

SEQ ID NO: 609846 - DNA, 19 bp, Mus musculus
  siRNA target sequence for Lepre1 (NM_019782.1,1770-1788).
cccgtccacgtggataact

SEQ ID NO: 609847 - DNA, 19 bp, Mus musculus
  siRNA target sequence for Lepre1 (NM_019782.1,1880-1898).
cttcgatggaggaaacttt

SEQ ID NO: 609848 - DNA, 19 bp, Mus musculus
  siRNA target sequence for Lepre1 (NM_019782.1,1895-1913).
cttttacttcacagaacta

SEQ ID NO: 609849 - DNA, 19 bp, Mus musculus
  siRNA target sequence for Lepre1 (NM_019782.1,2192-2210).
gcatggtgctactgttctt

SEQ ID NO: 609850 - DNA, 19 bp, Mus musculus
  siRNA target sequence for Fads2 (NM_019699.1,138-156).
cgttgggaggagattcaga

SEQ ID NO: 609851 - DNA, 19 bp, Mus musculus
  siRNA target sequence for Fads2 (NM_019699.1,139-157).
gttgggaggagattcagaa

SEQ ID NO: 609852 - DNA, 19 bp, Mus musculus
  siRNA target sequence for Fads2 (NM_019699.1,195-213).
cgcaaggtctacaacgtta

SEQ ID NO: 609853 - DNA, 19 bp, Mus musculus
  siRNA target sequence for Fads2 (NM_019699.1,200-218).
ggtctacaacgttaccaaa

SEQ ID NO: 609854 - DNA, 19 bp, Mus musculus
  siRNA target sequence for Fads2 (NM_019699.1,201-219).
gtctacaacgttaccaaat

SEQ ID NO: 609855 - DNA, 19 bp, Mus musculus
  siRNA target sequence for Fads2 (NM_019699.1,246-264).
cgtgtcatcggacactatt

SEQ ID NO: 609856 - DNA, 19 bp, Mus musculus
  siRNA target sequence for Fads2 (NM_019699.1,375-393).
ctggaccgtggcaaaagct

SEQ ID NO: 609857 - DNA, 19 bp, Mus musculus
  siRNA target sequence for Fads2 (NM_019699.1,437-455).
ggacatgaacctcttcaaa

SEQ ID NO: 609858 - DNA, 19 bp, Mus musculus
  siRNA target sequence for Fads2 (NM_019699.1,438-456).
gacatgaacctcttcaaaa

SEQ ID NO: 609859 - DNA, 19 bp, Mus musculus
  siRNA target sequence for Fads2 (NM_019699.1,601-619).
gatggctgcaacatgacta

SEQ ID NO: 609860 - DNA, 19 bp, Mus musculus
  siRNA target sequence for Fads2 (NM_019699.1,621-639).
ggccacctttctgtctata

SEQ ID NO: 609861 - DNA, 19 bp, Mus musculus
  siRNA target sequence for Fads2 (NM_019699.1,622-640).
gccacctttctgtctataa

SEQ ID NO: 609862 - DNA, 19 bp, Mus musculus
  siRNA target sequence for Fads2 (NM_019699.1,631-649).
ctgtctataagaaatccat

SEQ ID NO: 609863 - DNA, 19 bp, Mus musculus
  siRNA target sequence for Fads2 (NM_019699.1,709-727).
ggtggaaccaccgacattt

SEQ ID NO: 609864 - DNA, 19 bp, Mus musculus
  siRNA target sequence for Fads2 (NM_019699.1,756-774).
cacaaggacccggacataa

SEQ ID NO: 609865 - DNA, 19 bp, Mus musculus
  siRNA target sequence for Fads2 (NM_019699.1,803-821).
gtggcagccccttgagtat

SEQ ID NO: 609866 - DNA, 19 bp, Mus musculus
  siRNA target sequence for Fads2 (NM_019699.1,889-907).
cgctgctcatccctatgta

SEQ ID NO: 609867 - DNA, 19 bp, Mus musculus
  siRNA target sequence for Fads2 (NM_019699.1,967-985).
gggccatcagctactatat

SEQ ID NO: 609868 - DNA, 19 bp, Mus musculus
  siRNA target sequence for Fads2 (NM_019699.1,976-994).
gctactatatgcgtttctt

SEQ ID NO: 609869 - DNA, 19 bp, Mus musculus
  siRNA target sequence for Fads2 (NM_019699.1,1170-1188).
gtggagcagtccttcttca

SEQ ID NO: 609870 - DNA, 19 bp, Mus musculus
  siRNA target sequence for Fads2 (NM_019699.1,1172-1190).
ggagcagtccttcttcaat

SEQ ID NO: 609871 - DNA, 19 bp, Mus musculus
  siRNA target sequence for Fads2 (NM_019699.1,1336-1354).
gggccctgatcgacattgt

SEQ ID NO: 609872 - DNA, 19 bp, Mus musculus
  siRNA target sequence for Fads2 (NM_019699.1,1338-1356).
gccctgatcgacattgtga

SEQ ID NO: 609873 - DNA, 19 bp, Mus musculus
  siRNA target sequence for Cer1 (NM_009887.1,346-364).
gaaacctgagaccgaattt

SEQ ID NO: 609874 - DNA, 19 bp, Mus musculus
  siRNA target sequence for Cer1 (NM_009887.1,620-638).
gttgtccagaacaaccttt

SEQ ID NO: 609875 - DNA, 19 bp, Mus musculus
  siRNA target sequence for Cer1 (NM_009887.1,704-722).
cactgctcgcccaccaaat

SEQ ID NO: 609876 - DNA, 19 bp, Mus musculus
  siRNA target sequence for Hmox1 (NM_010442.1,152-170).
catgccccaggatttgtct

SEQ ID NO: 609877 - DNA, 19 bp, Mus musculus
  siRNA target sequence for Hmox1 (NM_010442.1,187-205).
ccaccaaggaggtacacat

SEQ ID NO: 609878 - DNA, 19 bp, Mus musculus
  siRNA target sequence for Hmox1 (NM_010442.1,211-229).
ccgagaatgctgagttcat

SEQ ID NO: 609879 - DNA, 19 bp, Mus musculus
  siRNA target sequence for Hmox1 (NM_010442.1,332-350).
caagcagaacccagtctat

SEQ ID NO: 609880 - DNA, 19 bp, Mus musculus
  siRNA target sequence for Hmox1 (NM_010442.1,970-988).
cagtggcagtgggaattta

SEQ ID NO: 609881 - DNA, 19 bp, Mus musculus
  siRNA target sequence for Hmox2 (NM_010443.1,184-202).
cctcggagggggtagatga

SEQ ID NO: 609882 - DNA, 19 bp, Mus musculus
  siRNA target sequence for Hmox2 (NM_010443.1,201-219).
gagtcagagaagaactcta

SEQ ID NO: 609883 - DNA, 19 bp, Mus musculus
  siRNA target sequence for Hmox2 (NM_010443.1,292-310).
cacatgaccgagcagaaaa

SEQ ID NO: 609884 - DNA, 19 bp, Mus musculus
  siRNA target sequence for Hmox2 (NM_010443.1,294-312).
catgaccgagcagaaaata

SEQ ID NO: 609885 - DNA, 19 bp, Mus musculus
  siRNA target sequence for Hmox2 (NM_010443.1,376-394).
ctgcactttacttcacata

SEQ ID NO: 609886 - DNA, 19 bp, Mus musculus
  siRNA target sequence for Hmox2 (NM_010443.1,378-396).
gcactttacttcacatact

SEQ ID NO: 609887 - DNA, 19 bp, Mus musculus
  siRNA target sequence for Hmox2 (NM_010443.1,475-493).
ggaaggcagcactgatcaa

SEQ ID NO: 609888 - DNA, 19 bp, Mus musculus
  siRNA target sequence for Hmox2 (NM_010443.1,484-502).
cactgatcaaggacatgaa

SEQ ID NO: 609889 - DNA, 19 bp, Mus musculus
  siRNA target sequence for Hmox2 (NM_010443.1,566-584).
ggatcggattcactatgta

SEQ ID NO: 609890 - DNA, 19 bp, Mus musculus
  siRNA target sequence for Hmox2 (NM_010443.1,703-721).
gggaagggacccaattcta

SEQ ID NO: 609891 - DNA, 19 bp, Mus musculus
  siRNA target sequence for Hmox2 (NM_010443.1,764-782).
ctaccgcgctagaatgaat

SEQ ID NO: 609892 - DNA, 19 bp, Mus musculus
  siRNA target sequence for Hmox2 (NM_010443.1,783-801).
gccttggacctgaatttga

SEQ ID NO: 609893 - DNA, 19 bp, Mus musculus
  siRNA target sequence for Hmox2 (NM_010443.1,933-951).
gggaagggagatatacgta

SEQ ID NO: 609894 - DNA, 19 bp, Mus musculus
  siRNA target sequence for Hmox2 (NM_010443.1,934-952).
ggaagggagatatacgtaa

SEQ ID NO: 609895 - DNA, 19 bp, Mus musculus
  siRNA target sequence for Ptgs1 (NM_008969.1,137-155).
cagtcaatccctgttgtta

SEQ ID NO: 609896 - DNA, 19 bp, Mus musculus
  siRNA target sequence for Ptgs1 (NM_008969.1,269-287).
cctggcttcggaattctct

SEQ ID NO: 609897 - DNA, 19 bp, Mus musculus
  siRNA target sequence for Ptgs1 (NM_008969.1,299-317).
cctcgttcacccatttcct

SEQ ID NO: 609898 - DNA, 19 bp, Mus musculus
  siRNA target sequence for Ptgs1 (NM_008969.1,359-377).
ccttcatccgagaagtact

SEQ ID NO: 609899 - DNA, 19 bp, Mus musculus
  siRNA target sequence for Ptgs1 (NM_008969.1,395-413).
cagtgcggtccaaccttat

SEQ ID NO: 609900 - DNA, 19 bp, Mus musculus
  siRNA target sequence for Ptgs1 (NM_008969.1,468-486).
ctccaatgtgagctactat

SEQ ID NO: 609901 - DNA, 19 bp, Mus musculus
  siRNA target sequence for Ptgs1 (NM_008969.1,471-489).
caatgtgagctactatact

SEQ ID NO: 609902 - DNA, 19 bp, Mus musculus
  siRNA target sequence for Ptgs1 (NM_008969.1,546-564).
gaaacagttaccagatgtt

SEQ ID NO: 609903 - DNA, 19 bp, Mus musculus
  siRNA target sequence for Ptgs1 (NM_008969.1,734-752).
gccacatttatggagataa

SEQ ID NO: 609904 - DNA, 19 bp, Mus musculus
  siRNA target sequence for Ptgs1 (NM_008969.1,735-753).
ccacatttatggagataat

SEQ ID NO: 609905 - DNA, 19 bp, Mus musculus
  siRNA target sequence for Ptgs1 (NM_008969.1,951-969).
gatctggcttcgtgaacat

SEQ ID NO: 609906 - DNA, 19 bp, Mus musculus
  siRNA target sequence for Ptgs1 (NM_008969.1,1034-1052).
ccactcgcctcatccttat

SEQ ID NO: 609907 - DNA, 19 bp, Mus musculus
  siRNA target sequence for Ptgs1 (NM_008969.1,1057-1075).
gaaaccatcaaaattgtca

SEQ ID NO: 609908 - DNA, 19 bp, Mus musculus
  siRNA target sequence for Ptgs1 (NM_008969.1,1167-1185).
ccgcatcgccatggaattt

SEQ ID NO: 609909 - DNA, 19 bp, Mus musculus
  siRNA target sequence for Ptgs1 (NM_008969.1,1168-1186).
cgcatcgccatggaattta

SEQ ID NO: 609910 - DNA, 19 bp, Mus musculus
  siRNA target sequence for Ptgs1 (NM_008969.1,1173-1191).
cgccatggaatttaaccat

SEQ ID NO: 609911 - DNA, 19 bp, Mus musculus
  siRNA target sequence for Ptgs1 (NM_008969.1,1248-1266).
cagctacgagcagttttta

SEQ ID NO: 609912 - DNA, 19 bp, Mus musculus
  siRNA target sequence for Ptgs1 (NM_008969.1,1251-1269).
ctacgagcagtttttattt

SEQ ID NO: 609913 - DNA, 19 bp, Mus musculus
  siRNA target sequence for Ptgs1 (NM_008969.1,1346-1364).
gtggaggtaggaactttga

SEQ ID NO: 609914 - DNA, 19 bp, Mus musculus
  siRNA target sequence for Ptgs1 (NM_008969.1,1348-1366).
ggaggtaggaactttgact

SEQ ID NO: 609915 - DNA, 19 bp, Mus musculus
  siRNA target sequence for Ptgs1 (NM_008969.1,1349-1367).
gaggtaggaactttgacta

SEQ ID NO: 609916 - DNA, 19 bp, Mus musculus
  siRNA target sequence for Ptgs1 (NM_008969.1,1416-1434).
gcgcctacagcccttcaat

SEQ ID NO: 609917 - DNA, 19 bp, Mus musculus
  siRNA target sequence for Ptgs1 (NM_008969.1,1527-1545).
cggtgacatcgatgcttta

SEQ ID NO: 609918 - DNA, 19 bp, Mus musculus
  siRNA target sequence for Ptgs1 (NM_008969.1,1531-1549).
gacatcgatgctttagagt

SEQ ID NO: 609919 - DNA, 19 bp, Mus musculus
  siRNA target sequence for Ptgs1 (NM_008969.1,1722-1740).
cacagcctcactgaagaaa

SEQ ID NO: 609920 - DNA, 19 bp, Mus musculus
  siRNA target sequence for Ptgs1 (NM_008969.1,1724-1742).
cagcctcactgaagaaact

SEQ ID NO: 609921 - DNA, 19 bp, Mus musculus
  siRNA target sequence for Ptgs1 (NM_008969.1,1758-1776).
caagacctgcccctatgtt

SEQ ID NO: 609922 - DNA, 19 bp, Mus musculus
  siRNA target sequence for Ptgs1 (NM_008969.1,1807-1825).
gacgggtctgtcttagtga

SEQ ID NO: 609923 - DNA, 19 bp, Mus musculus
  siRNA target sequence for Ptgs2 (NM_011198.2,158-176).
ccttgctgttccaatccat

SEQ ID NO: 609924 - DNA, 19 bp, Mus musculus
  siRNA target sequence for Ptgs2 (NM_011198.2,179-197).
caaaaccgtggggaatgta

SEQ ID NO: 609925 - DNA, 19 bp, Mus musculus
  siRNA target sequence for Ptgs2 (NM_011198.2,204-222).
caggatttgaccagtataa

SEQ ID NO: 609926 - DNA, 19 bp, Mus musculus
  siRNA target sequence for Ptgs2 (NM_011198.2,259-277).
ctgtactacacctgaattt

SEQ ID NO: 609927 - DNA, 19 bp, Mus musculus
  siRNA target sequence for Ptgs2 (NM_011198.2,373-391).
ccccttcctgcgaagttta

SEQ ID NO: 609928 - DNA, 19 bp, Mus musculus
  siRNA target sequence for Ptgs2 (NM_011198.2,383-401).
cgaagtttaatcatgaaat

SEQ ID NO: 609929 - DNA, 19 bp, Mus musculus
  siRNA target sequence for Ptgs2 (NM_011198.2,411-429).
catccagatcatatttgat

SEQ ID NO: 609930 - DNA, 19 bp, Mus musculus
  siRNA target sequence for Ptgs2 (NM_011198.2,414-432).
ccagatcatatttgattga

SEQ ID NO: 609931 - DNA, 19 bp, Mus musculus
  siRNA target sequence for Ptgs2 (NM_011198.2,452-470).
gtgcactatggttacaaaa

SEQ ID NO: 609932 - DNA, 19 bp, Mus musculus
  siRNA target sequence for Ptgs2 (NM_011198.2,455-473).
cactatggttacaaaagct

SEQ ID NO: 609933 - DNA, 19 bp, Mus musculus
  siRNA target sequence for Ptgs2 (NM_011198.2,549-567).
gtgtgaagggaaataagga

SEQ ID NO: 609934 - DNA, 19 bp, Mus musculus
  siRNA target sequence for Ptgs2 (NM_011198.2,737-755).
ggagtggacttaaatcaca

SEQ ID NO: 609935 - DNA, 19 bp, Mus musculus
  siRNA target sequence for Ptgs2 (NM_011198.2,742-760).
ggacttaaatcacatttat

SEQ ID NO: 609936 - DNA, 19 bp, Mus musculus
  siRNA target sequence for Ptgs2 (NM_011198.2,782-800).
cataaactgcgccttttca

SEQ ID NO: 609937 - DNA, 19 bp, Mus musculus
  siRNA target sequence for Ptgs2 (NM_011198.2,802-820).
ggatggaaaattgaaatat

SEQ ID NO: 609938 - DNA, 19 bp, Mus musculus
  siRNA target sequence for Ptgs2 (NM_011198.2,943-961).
gcctggtctgatgatgtat

SEQ ID NO: 609939 - DNA, 19 bp, Mus musculus
  siRNA target sequence for Ptgs2 (NM_011198.2,990-1008).
gagtgtgcgacatactcaa

SEQ ID NO: 609940 - DNA, 19 bp, Mus musculus
  siRNA target sequence for Ptgs2 (NM_011198.2,1050-1068).
ccagcagactcatactcat

SEQ ID NO: 609941 - DNA, 19 bp, Mus musculus
  siRNA target sequence for Ptgs2 (NM_011198.2,1064-1082).
ctcataggagagactatca

SEQ ID NO: 609942 - DNA, 19 bp, Mus musculus
  siRNA target sequence for Ptgs2 (NM_011198.2,1116-1134).
gcggttaccacttcaaact

SEQ ID NO: 609943 - DNA, 19 bp, Mus musculus
  siRNA target sequence for Ptgs2 (NM_011198.2,1231-1249).
gcccgacaccttcaacatt

SEQ ID NO: 609944 - DNA, 19 bp, Mus musculus
  siRNA target sequence for Ptgs2 (NM_011198.2,1234-1252).
cgacaccttcaacattgaa

SEQ ID NO: 609945 - DNA, 19 bp, Mus musculus
  siRNA target sequence for Ptgs2 (NM_011198.2,1330-1348).
gtcattcaccagacagatt

SEQ ID NO: 609946 - DNA, 19 bp, Mus musculus
  siRNA target sequence for Ptgs2 (NM_011198.2,1432-1450).
gaaataccagtctctcaat

SEQ ID NO: 609947 - DNA, 19 bp, Mus musculus
  siRNA target sequence for Ptgs2 (NM_011198.2,1472-1490).
ctgaagccgtacacatcat

SEQ ID NO: 609948 - DNA, 19 bp, Mus musculus
  siRNA target sequence for Ptgs2 (NM_011198.2,1474-1492).
gaagccgtacacatcattt

SEQ ID NO: 609949 - DNA, 19 bp, Mus musculus
  siRNA target sequence for Ptgs2 (NM_011198.2,1593-1611).
ctcgtccagatgctatctt

SEQ ID NO: 609950 - DNA, 19 bp, Mus musculus
  siRNA target sequence for Ptgs2 (NM_011198.2,1709-1727).
ggaggcgaagtgggtttta

SEQ ID NO: 609951 - DNA, 19 bp, Mus musculus
  siRNA target sequence for Ptgs2 (NM_011198.2,1710-1728).
gaggcgaagtgggttttaa

SEQ ID NO: 609952 - DNA, 19 bp, Mus musculus
  siRNA target sequence for Ptgs2 (NM_011198.2,1712-1730).
ggcgaagtgggttttaaga

SEQ ID NO: 609953 - DNA, 19 bp, Mus musculus
  siRNA target sequence for Ptgs2 (NM_011198.2,1713-1731).
gcgaagtgggttttaagat

SEQ ID NO: 609954 - DNA, 19 bp, Mus musculus
  siRNA target sequence for Ptgs2 (NM_011198.2,1720-1738).
gggttttaagatcatcaat

SEQ ID NO: 609955 - DNA, 19 bp, Mus musculus
  siRNA target sequence for Ptgs2 (NM_011198.2,1751-1769).
cagtctctcatctgcaata

SEQ ID NO: 609956 - DNA, 19 bp, Mus musculus
  siRNA target sequence for Ptgs2 (NM_011198.2,1778-1796).
gggtgtcccttcacttctt

SEQ ID NO: 609957 - DNA, 19 bp, Mus musculus
  siRNA target sequence for Ptgs2 (NM_011198.2,1855-1873).
ctccagactagatgacatt

SEQ ID NO: 609958 - DNA, 19 bp, Mus musculus
  siRNA target sequence for Ptgs2 (NM_011198.2,1857-1875).
ccagactagatgacattaa

SEQ ID NO: 609959 - DNA, 19 bp, Mus musculus
  siRNA target sequence for Ptgs2 (NM_011198.2,1870-1888).
cattaaccctacagtacta

SEQ ID NO: 609960 - DNA, 19 bp, Mus musculus
  siRNA target sequence for Ptgs2 (NM_011198.2,1876-1894).
ccctacagtactaatcaaa

SEQ ID NO: 609961 - DNA, 19 bp, Mus musculus
  siRNA target sequence for Ndufa1 (NM_019443.1,291-309).
cagtaccagtggtatctga

SEQ ID NO: 609962 - DNA, 19 bp, Mus musculus
  siRNA target sequence for Ndufa1 (NM_019443.1,334-352).
gagtcaatcgctactatgt

SEQ ID NO: 609963 - DNA, 19 bp, Mus musculus
  siRNA target sequence for Ndufa1 (NM_019443.1,336-354).
gtcaatcgctactatgtgt

SEQ ID NO: 609964 - DNA, 19 bp, Mus musculus
  siRNA target sequence for Ndufa2 (NM_010885.2,68-86).
gctggggttgcgtgagatt

SEQ ID NO: 609965 - DNA, 19 bp, Mus musculus
  siRNA target sequence for Ndufa2 (NM_010885.2,81-99).
gagattcgcgttcacttat

SEQ ID NO: 609966 - DNA, 19 bp, Mus musculus
  siRNA target sequence for Ndufa3 (NM_025348.1,100-118).
gtctggggcctcgctataa

SEQ ID NO: 609967 - DNA, 19 bp, Mus musculus
  siRNA target sequence for Ndufa3 (NM_025348.1,102-120).
ctggggcctcgctataatt

SEQ ID NO: 609968 - DNA, 19 bp, Mus musculus
  siRNA target sequence for Ndufa3 (NM_025348.1,104-122).
ggggcctcgctataattat

SEQ ID NO: 609969 - DNA, 19 bp, Mus musculus
  siRNA target sequence for Ndufa3 (NM_025348.1,136-154).
ccctacaccaagtatgcta

SEQ ID NO: 609970 - DNA, 19 bp, Mus musculus
  siRNA target sequence for Ndufa4 (NM_010886.1,127-145).
gattcctctcttcgtattt

SEQ ID NO: 609971 - DNA, 19 bp, Mus musculus
  siRNA target sequence for Ndufa4 (NM_010886.1,165-183).
gagcagcactgtatgtgat

SEQ ID NO: 609972 - DNA, 19 bp, Mus musculus
  siRNA target sequence for Ndufa4 (NM_010886.1,181-199).
gatgcgcttggcactgttt

SEQ ID NO: 609973 - DNA, 19 bp, Mus musculus
  siRNA target sequence for Ndufa4 (NM_010886.1,184-202).
gcgcttggcactgtttaat

SEQ ID NO: 609974 - DNA, 19 bp, Mus musculus
  siRNA target sequence for Ndufa4 (NM_010886.1,251-269).
ctgggtcccaatgaacaat

SEQ ID NO: 609975 - DNA, 19 bp, Mus musculus
  siRNA target sequence for Ndufa4 (NM_010886.1,253-271).
gggtcccaatgaacaatat

SEQ ID NO: 609976 - DNA, 19 bp, Mus musculus
  siRNA target sequence for Ndufa4 (NM_010886.1,254-272).
ggtcccaatgaacaatata

SEQ ID NO: 609977 - DNA, 19 bp, Mus musculus
  siRNA target sequence for Ndufa4 (NM_010886.1,255-273).
gtcccaatgaacaatataa

SEQ ID NO: 609978 - DNA, 19 bp, Mus musculus
  siRNA target sequence for Ndufa4 (NM_010886.1,257-275).
cccaatgaacaatataagt

SEQ ID NO: 609979 - DNA, 19 bp, Mus musculus
  siRNA target sequence for Ndufa4 (NM_010886.1,263-281).
gaacaatataagttctact

SEQ ID NO: 609980 - DNA, 19 bp, Mus musculus
  siRNA target sequence for Ndufa5 (NM_026614.1,148-166).
gggcttgctgaaaaagaca

SEQ ID NO: 609981 - DNA, 19 bp, Mus musculus
  siRNA target sequence for Ndufa5 (NM_026614.1,149-167).
ggcttgctgaaaaagacaa

SEQ ID NO: 609982 - DNA, 19 bp, Mus musculus
  siRNA target sequence for Ndufa5 (NM_026614.1,203-221).
cacgagaggctcacaatat

SEQ ID NO: 609983 - DNA, 19 bp, Mus musculus
  siRNA target sequence for Ndufa5 (NM_026614.1,206-224).
gagaggctcacaatattgt

SEQ ID NO: 609984 - DNA, 19 bp, Mus musculus
  siRNA target sequence for Ndufa5 (NM_026614.1,212-230).
ctcacaatattgtatacaa

SEQ ID NO: 609985 - DNA, 19 bp, Mus musculus
  siRNA target sequence for Ndufa5 (NM_026614.1,228-246).
caaagactcttgatattct

SEQ ID NO: 609986 - DNA, 19 bp, Mus musculus
  siRNA target sequence for Ndufa5 (NM_026614.1,263-281).
catgcagcctatagaaaat

SEQ ID NO: 609987 - DNA, 19 bp, Mus musculus
  siRNA target sequence for Ndufa5 (NM_026614.1,266-284).
gcagcctatagaaaataca

SEQ ID NO: 609988 - DNA, 19 bp, Mus musculus
  siRNA target sequence for Ndufa5 (NM_026614.1,276-294).
gaaaatacacagaacagat

SEQ ID NO: 609989 - DNA, 19 bp, Mus musculus
  siRNA target sequence for Ndufa5 (NM_026614.1,322-340).
ggcggagccagatgttaaa

SEQ ID NO: 609990 - DNA, 19 bp, Mus musculus
  siRNA target sequence for Ndufa5 (NM_026614.1,323-341).
gcggagccagatgttaaaa

SEQ ID NO: 609991 - DNA, 19 bp, Mus musculus
  siRNA target sequence for Ndufa5 (NM_026614.1,324-342).
cggagccagatgttaaaaa

SEQ ID NO: 609992 - DNA, 19 bp, Mus musculus
  siRNA target sequence for Ndufa5 (NM_026614.1,325-343).
ggagccagatgttaaaaaa

SEQ ID NO: 609993 - DNA, 19 bp, Mus musculus
  siRNA target sequence for Ndufa5 (NM_026614.1,326-344).
gagccagatgttaaaaaat

SEQ ID NO: 609994 - DNA, 19 bp, Mus musculus
  siRNA target sequence for Ndufa5 (NM_026614.1,328-346).
gccagatgttaaaaaatta

SEQ ID NO: 609995 - DNA, 19 bp, Mus musculus
  siRNA target sequence for Ndufa5 (NM_026614.1,408-426).
gtctggcaaggaaaatgtt

SEQ ID NO: 609996 - DNA, 19 bp, Mus musculus
  siRNA target sequence for Ndufa6 (NM_025987.1,65-83).
cctcggtgaagcccatttt

SEQ ID NO: 609997 - DNA, 19 bp, Mus musculus
  siRNA target sequence for Ndufa6 (NM_025987.1,151-169).
ccgaacaccgtgcacttaa

SEQ ID NO: 609998 - DNA, 19 bp, Mus musculus
  siRNA target sequence for Ndufa6 (NM_025987.1,152-170).
cgaacaccgtgcacttaat

SEQ ID NO: 609999 - DNA, 19 bp, Mus musculus
  siRNA target sequence for Ndufa6 (NM_025987.1,177-195).
ggatatcacggtgaaacaa

SEQ ID NO: 610000 - DNA, 19 bp, Mus musculus
  siRNA target sequence for Ndufa6 (NM_025987.1,189-207).
gaaacaaggacgggataaa

SEQ ID NO: 610001 - DNA, 19 bp, Mus musculus
  siRNA target sequence for Ndufa6 (NM_025987.1,200-218).
gggataaagtccgagaaat

SEQ ID NO: 610002 - DNA, 19 bp, Mus musculus
  siRNA target sequence for Ndufa6 (NM_025987.1,202-220).
gataaagtccgagaaatgt

SEQ ID NO: 610003 - DNA, 19 bp, Mus musculus
  siRNA target sequence for Ndufa6 (NM_025987.1,208-226).
gtccgagaaatgttcatga

SEQ ID NO: 610004 - DNA, 19 bp, Mus musculus
  siRNA target sequence for Ndufa6 (NM_025987.1,256-274).
gttgatctgctggtcatta

SEQ ID NO: 610005 - DNA, 19 bp, Mus musculus
  siRNA target sequence for Ndufa6 (NM_025987.1,323-341).
cacacgttatgcggttttt

SEQ ID NO: 610006 - DNA, 19 bp, Mus musculus
  siRNA target sequence for Ndufa6 (NM_025987.1,327-345).
cgttatgcggtttttccat

SEQ ID NO: 610007 - DNA, 19 bp, Mus musculus
  siRNA target sequence for Ndufa6 (NM_025987.1,333-351).
gcggtttttccatgaaaca

SEQ ID NO: 610008 - DNA, 19 bp, Mus musculus
  siRNA target sequence for Ndufa6 (NM_025987.1,364-382).
ccaaaggatttcttatcta

SEQ ID NO: 610009 - DNA, 19 bp, Mus musculus
  siRNA target sequence for Ndufa7 (NM_023202.2,24-42).
ccgctactcgcgttatcca

SEQ ID NO: 610010 - DNA, 19 bp, Mus musculus
  siRNA target sequence for Ndufa7 (NM_023202.2,25-43).
cgctactcgcgttatccaa

SEQ ID NO: 610011 - DNA, 19 bp, Mus musculus
  siRNA target sequence for Ndufa7 (NM_023202.2,26-44).
gctactcgcgttatccaaa

SEQ ID NO: 610012 - DNA, 19 bp, Mus musculus
  siRNA target sequence for Ndufa7 (NM_023202.2,27-45).
ctactcgcgttatccaaaa

SEQ ID NO: 610013 - DNA, 19 bp, Mus musculus
  siRNA target sequence for Ndufa7 (NM_023202.2,30-48).
ctcgcgttatccaaaagct

SEQ ID NO: 610014 - DNA, 19 bp, Mus musculus
  siRNA target sequence for Ndufa7 (NM_023202.2,203-221).
gttgtgcctccctcaatca

SEQ ID NO: 610015 - DNA, 19 bp, Mus musculus
  siRNA target sequence for Ndufa8 (NM_026703.1,147-165).
ggggctcagtgcgataaaa

SEQ ID NO: 610016 - DNA, 19 bp, Mus musculus
  siRNA target sequence for Ndufa8 (NM_026703.1,150-168).
gctcagtgcgataaaacca

SEQ ID NO: 610017 - DNA, 19 bp, Mus musculus
  siRNA target sequence for Ndufa8 (NM_026703.1,151-169).
ctcagtgcgataaaaccaa

SEQ ID NO: 610018 - DNA, 19 bp, Mus musculus
  siRNA target sequence for Ndufa8 (NM_026703.1,153-171).
cagtgcgataaaaccaata

SEQ ID NO: 610019 - DNA, 19 bp, Mus musculus
  siRNA target sequence for Ndufa8 (NM_026703.1,166-184).
ccaataaggagtttatgct

SEQ ID NO: 610020 - DNA, 19 bp, Mus musculus
  siRNA target sequence for Ndufa8 (NM_026703.1,243-261).
ggctgtgcgctgaacttct

SEQ ID NO: 610021 - DNA, 19 bp, Mus musculus
  siRNA target sequence for Ndufa8 (NM_026703.1,260-278).
cttcaggcagataaagagt

SEQ ID NO: 610022 - DNA, 19 bp, Mus musculus
  siRNA target sequence for Ndufa8 (NM_026703.1,411-429).
gacctggggcagttgtcta

SEQ ID NO: 610023 - DNA, 19 bp, Mus musculus
  siRNA target sequence for Ndufa8 (NM_026703.1,434-452).
caccaaagtgaaaacagat

SEQ ID NO: 610024 - DNA, 19 bp, Mus musculus
  siRNA target sequence for Ndufa8 (NM_026703.1,462-480).
ccagagaatccttatcact

SEQ ID NO: 610025 - DNA, 19 bp, Mus musculus
  siRNA target sequence for Ndufa8 (NM_026703.1,497-515).
gcccaaccctgtgattgaa

SEQ ID NO: 610026 - DNA, 19 bp, Mus musculus
  siRNA target sequence for Ndufa8 (NM_026703.1,536-554).
gcacggcacccgctttttt

SEQ ID NO: 610027 - DNA, 19 bp, Mus musculus
  siRNA target sequence for Ndufa8 (NM_026703.1,537-555).
cacggcacccgcttttttt

SEQ ID NO: 610028 - DNA, 19 bp, Mus musculus
  siRNA target sequence for Ndufa9 (NM_025358.1,27-45).
gtccgctttcgggttgtta

SEQ ID NO: 610029 - DNA, 19 bp, Mus musculus
  siRNA target sequence for Ndufa9 (NM_025358.1,29-47).
ccgctttcgggttgttaga

SEQ ID NO: 610030 - DNA, 19 bp, Mus musculus
  siRNA target sequence for Ndufa9 (NM_025358.1,59-77).
gtcacgtcctgccattact

SEQ ID NO: 610031 - DNA, 19 bp, Mus musculus
  siRNA target sequence for Ndufa9 (NM_025358.1,207-225).
ctgggtcgatacgttgtta

SEQ ID NO: 610032 - DNA, 19 bp, Mus musculus
  siRNA target sequence for Ndufa9 (NM_025358.1,211-229).
gtcgatacgttgttaacca

SEQ ID NO: 610033 - DNA, 19 bp, Mus musculus
  siRNA target sequence for Ndufa9 (NM_025358.1,238-256).
gaatggggtcacaagtgat

SEQ ID NO: 610034 - DNA, 19 bp, Mus musculus
  siRNA target sequence for Ndufa9 (NM_025358.1,242-260).
ggggtcacaagtgatcata

SEQ ID NO: 610035 - DNA, 19 bp, Mus musculus
  siRNA target sequence for Ndufa9 (NM_025358.1,247-265).
cacaagtgatcataccata

SEQ ID NO: 610036 - DNA, 19 bp, Mus musculus
  siRNA target sequence for Ndufa9 (NM_025358.1,267-285).
cggtgtgatgtatatgaca

SEQ ID NO: 610037 - DNA, 19 bp, Mus musculus
  siRNA target sequence for Ndufa9 (NM_025358.1,268-286).
ggtgtgatgtatatgacat

SEQ ID NO: 610038 - DNA, 19 bp, Mus musculus
  siRNA target sequence for Ndufa9 (NM_025358.1,339-357).
gatgcacgagacaaagatt

SEQ ID NO: 610039 - DNA, 19 bp, Mus musculus
  siRNA target sequence for Ndufa9 (NM_025358.1,343-361).
cacgagacaaagattctat

SEQ ID NO: 610040 - DNA, 19 bp, Mus musculus
  siRNA target sequence for Ndufa9 (NM_025358.1,345-363).
cgagacaaagattctatca

SEQ ID NO: 610041 - DNA, 19 bp, Mus musculus
  siRNA target sequence for Ndufa9 (NM_025358.1,614-632).
catacggccgtctgacatt

SEQ ID NO: 610042 - DNA, 19 bp, Mus musculus
  siRNA target sequence for Ndufa9 (NM_025358.1,647-665).
caggttccttaatcacttt

SEQ ID NO: 610043 - DNA, 19 bp, Mus musculus
  siRNA target sequence for Ndufa9 (NM_025358.1,654-672).
cttaatcactttgcaaatt

SEQ ID NO: 610044 - DNA, 19 bp, Mus musculus
  siRNA target sequence for Ndufa9 (NM_025358.1,660-678).
cactttgcaaattatcgtt

SEQ ID NO: 610045 - DNA, 19 bp, Mus musculus
  siRNA target sequence for Ndufa9 (NM_025358.1,731-749).
ggtgtatgttgcagatgtt

SEQ ID NO: 610046 - DNA, 19 bp, Mus musculus
  siRNA target sequence for Ndufa9 (NM_025358.1,732-750).
gtgtatgttgcagatgttt

SEQ ID NO: 610047 - DNA, 19 bp, Mus musculus
  siRNA target sequence for Ndufa9 (NM_025358.1,780-798).
ccagatgccgtaggaaaaa

SEQ ID NO: 610048 - DNA, 19 bp, Mus musculus
  siRNA target sequence for Ndufa9 (NM_025358.1,783-801).
gatgccgtaggaaaaacct

SEQ ID NO: 610049 - DNA, 19 bp, Mus musculus
  siRNA target sequence for Ndufa9 (NM_025358.1,888-906).
cctttgccactatttgtgt

SEQ ID NO: 610050 - DNA, 19 bp, Mus musculus
  siRNA target sequence for Ndufa9 (NM_025358.1,889-907).
ctttgccactatttgtgta

SEQ ID NO: 610051 - DNA, 19 bp, Mus musculus
  siRNA target sequence for Ndufa9 (NM_025358.1,894-912).
ccactatttgtgtatagct

SEQ ID NO: 610052 - DNA, 19 bp, Mus musculus
  siRNA target sequence for Ndufa9 (NM_025358.1,910-928).
gctggattggcaaactctt

SEQ ID NO: 610053 - DNA, 19 bp, Mus musculus
  siRNA target sequence for Ndufa9 (NM_025358.1,965-983).
caaggtggagcggatacat

SEQ ID NO: 610054 - DNA, 19 bp, Mus musculus
  siRNA target sequence for Ndufa9 (NM_025358.1,969-987).
gtggagcggatacatatct

SEQ ID NO: 610055 - DNA, 19 bp, Mus musculus
  siRNA target sequence for Ndufa9 (NM_025358.1,971-989).
ggagcggatacatatctca

SEQ ID NO: 610056 - DNA, 19 bp, Mus musculus
  siRNA target sequence for Ndufa9 (NM_025358.1,1105-1123).
ctgagatcgaggaaaccaa

SEQ ID NO: 610057 - DNA, 19 bp, Mus musculus
  siRNA target sequence for Nqo1 (NM_008706.1,416-434).
ccgagtcatctctagcata

SEQ ID NO: 610058 - DNA, 19 bp, Mus musculus
  siRNA target sequence for Nqo1 (NM_008706.1,417-435).
cgagtcatctctagcatat

SEQ ID NO: 610059 - DNA, 19 bp, Mus musculus
  siRNA target sequence for Nqo1 (NM_008706.1,858-876).
ggagaccccactctatttt

SEQ ID NO: 610060 - DNA, 19 bp, Mus musculus
  siRNA target sequence for Nqo1 (NM_008706.1,861-879).
gaccccactctattttgct

SEQ ID NO: 610061 - DNA, 19 bp, Mus musculus
  siRNA target sequence for Nqo2 (NM_020282.2,362-380).
gggccacaagaaatgatat

SEQ ID NO: 610062 - DNA, 19 bp, Mus musculus
  siRNA target sequence for Nqo2 (NM_020282.2,364-382).
gccacaagaaatgatatca

SEQ ID NO: 610063 - DNA, 19 bp, Mus musculus
  siRNA target sequence for Nqo2 (NM_020282.2,381-399).
cactggtgccccctctaat

SEQ ID NO: 610064 - DNA, 19 bp, Mus musculus
  siRNA target sequence for Nqo2 (NM_020282.2,451-469).
gctctgaccagtgatatat

SEQ ID NO: 610065 - DNA, 19 bp, Mus musculus
  siRNA target sequence for Nqo2 (NM_020282.2,452-470).
ctctgaccagtgatatatt

SEQ ID NO: 610066 - DNA, 19 bp, Mus musculus
  siRNA target sequence for Nqo2 (NM_020282.2,493-511).
gaagctgatcttgtgatat

SEQ ID NO: 610067 - DNA, 19 bp, Mus musculus
  siRNA target sequence for Nqo2 (NM_020282.2,534-552).
cagcgttccagcaatccta

SEQ ID NO: 610068 - DNA, 19 bp, Mus musculus
  siRNA target sequence for Nqo2 (NM_020282.2,541-559).
ccagcaatcctaaaaggtt

SEQ ID NO: 610069 - DNA, 19 bp, Mus musculus
  siRNA target sequence for Nqo2 (NM_020282.2,580-598).
cgagggtttgcctttgata

SEQ ID NO: 610070 - DNA, 19 bp, Mus musculus
  siRNA target sequence for Nqo2 (NM_020282.2,581-599).
gagggtttgcctttgatat

SEQ ID NO: 610071 - DNA, 19 bp, Mus musculus
  siRNA target sequence for Nqo2 (NM_020282.2,662-680).
gaggtacagcggagatgta

SEQ ID NO: 610072 - DNA, 19 bp, Mus musculus
  siRNA target sequence for Nqo2 (NM_020282.2,664-682).
ggtacagcggagatgtaca

SEQ ID NO: 610073 - DNA, 19 bp, Mus musculus
  siRNA target sequence for Ndufs1 (NM_145518.1,159-177).
gataggcctttctaattct

SEQ ID NO: 610074 - DNA, 19 bp, Mus musculus
  siRNA target sequence for Ndufs1 (NM_145518.1,289-307).
gagaaggtcggcatgcaaa

SEQ ID NO: 610075 - DNA, 19 bp, Mus musculus
  siRNA target sequence for Ndufs1 (NM_145518.1,303-321).
gcaaatccctcgattctgt

SEQ ID NO: 610076 - DNA, 19 bp, Mus musculus
  siRNA target sequence for Ndufs1 (NM_145518.1,304-322).
caaatccctcgattctgtt

SEQ ID NO: 610077 - DNA, 19 bp, Mus musculus
  siRNA target sequence for Ndufs1 (NM_145518.1,313-331).
cgattctgttaccatgaaa

SEQ ID NO: 610078 - DNA, 19 bp, Mus musculus
  siRNA target sequence for Ndufs1 (NM_145518.1,438-456).
gacaaactcggaaaaatct

SEQ ID NO: 610079 - DNA, 19 bp, Mus musculus
  siRNA target sequence for Ndufs1 (NM_145518.1,477-495).
gatggagttcttattagca

SEQ ID NO: 610080 - DNA, 19 bp, Mus musculus
  siRNA target sequence for Ndufs1 (NM_145518.1,493-511).
gcaaatcacccattggatt

SEQ ID NO: 610081 - DNA, 19 bp, Mus musculus
  siRNA target sequence for Ndufs1 (NM_145518.1,549-567).
ggaccagtccatgatgttt

SEQ ID NO: 610082 - DNA, 19 bp, Mus musculus
  siRNA target sequence for Ndufs1 (NM_145518.1,572-590).
gtgataggagccgatttct

SEQ ID NO: 610083 - DNA, 19 bp, Mus musculus
  siRNA target sequence for Ndufs1 (NM_145518.1,634-652).
gtaaagaccatcatgacta

SEQ ID NO: 610084 - DNA, 19 bp, Mus musculus
  siRNA target sequence for Ndufs1 (NM_145518.1,872-890).
cagagtccattgatgtaat

SEQ ID NO: 610085 - DNA, 19 bp, Mus musculus
  siRNA target sequence for Ndufs1 (NM_145518.1,876-894).
gtccattgatgtaatggat

SEQ ID NO: 610086 - DNA, 19 bp, Mus musculus
  siRNA target sequence for Ndufs1 (NM_145518.1,931-949).
ggagaggtaatgaggattt

SEQ ID NO: 610087 - DNA, 19 bp, Mus musculus
  siRNA target sequence for Ndufs1 (NM_145518.1,932-950).
gagaggtaatgaggatttt

SEQ ID NO: 610088 - DNA, 19 bp, Mus musculus
  siRNA target sequence for Ndufs1 (NM_145518.1,945-963).
gattttgccaagaatgcat

SEQ ID NO: 610089 - DNA, 19 bp, Mus musculus
  siRNA target sequence for Ndufs1 (NM_145518.1,976-994).
gaagaatggatctctgata

SEQ ID NO: 610090 - DNA, 19 bp, Mus musculus
  siRNA target sequence for Ndufs1 (NM_145518.1,1037-1055).
ctgaaccaatggtcagaaa

SEQ ID NO: 610091 - DNA, 19 bp, Mus musculus
  siRNA target sequence for Ndufs1 (NM_145518.1,1042-1060).
ccaatggtcagaaacgaaa

SEQ ID NO: 610092 - DNA, 19 bp, Mus musculus
  siRNA target sequence for Ndufs1 (NM_145518.1,1100-1118).
ctcgtgtagctggaatgtt

SEQ ID NO: 610093 - DNA, 19 bp, Mus musculus
  siRNA target sequence for Ndufs1 (NM_145518.1,1103-1121).
gtgtagctggaatgttaca

SEQ ID NO: 610094 - DNA, 19 bp, Mus musculus
  siRNA target sequence for Ndufs1 (NM_145518.1,1105-1123).
gtagctggaatgttacaga

SEQ ID NO: 610095 - DNA, 19 bp, Mus musculus
  siRNA target sequence for Ndufs1 (NM_145518.1,1108-1126).
gctggaatgttacagaatt

SEQ ID NO: 610096 - DNA, 19 bp, Mus musculus
  siRNA target sequence for Ndufs1 (NM_145518.1,1109-1127).
ctggaatgttacagaattt

SEQ ID NO: 610097 - DNA, 19 bp, Mus musculus
  siRNA target sequence for Ndufs1 (NM_145518.1,1186-1204).
gctctgaaagacttgctta

SEQ ID NO: 610098 - DNA, 19 bp, Mus musculus
  siRNA target sequence for Ndufs1 (NM_145518.1,1187-1205).
ctctgaaagacttgcttaa

SEQ ID NO: 610099 - DNA, 19 bp, Mus musculus
  siRNA target sequence for Ndufs1 (NM_145518.1,1189-1207).
ctgaaagacttgcttaata

SEQ ID NO: 610100 - DNA, 19 bp, Mus musculus
  siRNA target sequence for Ndufs1 (NM_145518.1,1213-1231).
gactctgacaacttatgca

SEQ ID NO: 610101 - DNA, 19 bp, Mus musculus
  siRNA target sequence for Ndufs1 (NM_145518.1,1265-1283).
cagacttacgttccaatta

SEQ ID NO: 610102 - DNA, 19 bp, Mus musculus
  siRNA target sequence for Ndufs1 (NM_145518.1,1274-1292).
gttccaattatcttctcaa

SEQ ID NO: 610103 - DNA, 19 bp, Mus musculus
  siRNA target sequence for Ndufs1 (NM_145518.1,1340-1358).
gtacaaatccacgttttga

SEQ ID NO: 610104 - DNA, 19 bp, Mus musculus
  siRNA target sequence for Ndufs1 (NM_145518.1,1359-1377).
ggcaccgctgtttaatgct

SEQ ID NO: 610105 - DNA, 19 bp, Mus musculus
  siRNA target sequence for Ndufs1 (NM_145518.1,1360-1378).
gcaccgctgtttaatgcta

SEQ ID NO: 610106 - DNA, 19 bp, Mus musculus
  siRNA target sequence for Ndufs1 (NM_145518.1,1364-1382).
cgctgtttaatgctagaat

SEQ ID NO: 610107 - DNA, 19 bp, Mus musculus
  siRNA target sequence for Ndufs1 (NM_145518.1,1368-1386).
gtttaatgctagaattaga

SEQ ID NO: 610108 - DNA, 19 bp, Mus musculus
  siRNA target sequence for Ndufs1 (NM_145518.1,1435-1453).
gtggacctcacttacagat

SEQ ID NO: 610109 - DNA, 19 bp, Mus musculus
  siRNA target sequence for Ndufs1 (NM_145518.1,1462-1480).
ctaggagactctcctaaaa

SEQ ID NO: 610110 - DNA, 19 bp, Mus musculus
  siRNA target sequence for Ndufs1 (NM_145518.1,1466-1484).
gagactctcctaaaattct

SEQ ID NO: 610111 - DNA, 19 bp, Mus musculus
  siRNA target sequence for Ndufs1 (NM_145518.1,1496-1514).
cttcagggaggcattcatt

SEQ ID NO: 610112 - DNA, 19 bp, Mus musculus
  siRNA target sequence for Ndufs1 (NM_145518.1,1511-1529).
cattctgcgaggtcttaaa

SEQ ID NO: 610113 - DNA, 19 bp, Mus musculus
  siRNA target sequence for Ndufs1 (NM_145518.1,1515-1533).
ctgcgaggtcttaaaggat

SEQ ID NO: 610114 - DNA, 19 bp, Mus musculus
  siRNA target sequence for Ndufs1 (NM_145518.1,1521-1539).
ggtcttaaaggatgctaaa

SEQ ID NO: 610115 - DNA, 19 bp, Mus musculus
  siRNA target sequence for Ndufs1 (NM_145518.1,1522-1540).
gtcttaaaggatgctaaaa

SEQ ID NO: 610116 - DNA, 19 bp, Mus musculus
  siRNA target sequence for Ndufs1 (NM_145518.1,1524-1542).
cttaaaggatgctaaaaaa

SEQ ID NO: 610117 - DNA, 19 bp, Mus musculus
  siRNA target sequence for Ndufs1 (NM_145518.1,1611-1629).
caacatggtacaaaagatt

SEQ ID NO: 610118 - DNA, 19 bp, Mus musculus
  siRNA target sequence for Ndufs1 (NM_145518.1,1648-1666).
gctgcagagtggaaagtta

SEQ ID NO: 610119 - DNA, 19 bp, Mus musculus
  siRNA target sequence for Ndufs1 (NM_145518.1,1654-1672).
gagtggaaagttatgaata

SEQ ID NO: 610120 - DNA, 19 bp, Mus musculus
  siRNA target sequence for Ndufs1 (NM_145518.1,1668-1686).
gaatattctgcataggatt

SEQ ID NO: 610121 - DNA, 19 bp, Mus musculus
  siRNA target sequence for Ndufs1 (NM_145518.1,1726-1744).
ggggtagaagcgattagga

SEQ ID NO: 610122 - DNA, 19 bp, Mus musculus
  siRNA target sequence for Ndufs1 (NM_145518.1,1727-1745).
gggtagaagcgattaggaa

SEQ ID NO: 610123 - DNA, 19 bp, Mus musculus
  siRNA target sequence for Ndufs1 (NM_145518.1,1777-1795).
gcagatggaggttgtatca

SEQ ID NO: 610124 - DNA, 19 bp, Mus musculus
  siRNA target sequence for Ndufs1 (NM_145518.1,1804-1822).
gacttgccaaaggattgtt

SEQ ID NO: 610125 - DNA, 19 bp, Mus musculus
  siRNA target sequence for Ndufs1 (NM_145518.1,1809-1827).
gccaaaggattgtttcatt

SEQ ID NO: 610126 - DNA, 19 bp, Mus musculus
  siRNA target sequence for Ndufs1 (NM_145518.1,1858-1876).
gctcccatggctgatgtta

SEQ ID NO: 610127 - DNA, 19 bp, Mus musculus
  siRNA target sequence for Ndufs1 (NM_145518.1,1862-1880).
ccatggctgatgttattct

SEQ ID NO: 610128 - DNA, 19 bp, Mus musculus
  siRNA target sequence for Ndufs1 (NM_145518.1,1885-1903).
ggggctgcttacacagaaa

SEQ ID NO: 610129 - DNA, 19 bp, Mus musculus
  siRNA target sequence for Ndufs1 (NM_145518.1,2078-2096).
ctcctaatctggttcgata

SEQ ID NO: 610130 - DNA, 19 bp, Mus musculus
  siRNA target sequence for Ndufs1 (NM_145518.1,2081-2099).
ctaatctggttcgatatga

SEQ ID NO: 610131 - DNA, 19 bp, Mus musculus
  siRNA target sequence for Ndufs1 (NM_145518.1,2086-2104).
ctggttcgatatgatgata

SEQ ID NO: 610132 - DNA, 19 bp, Mus musculus
  siRNA target sequence for Ndufs1 (NM_145518.1,2088-2106).
ggttcgatatgatgatatt

SEQ ID NO: 610133 - DNA, 19 bp, Mus musculus
  siRNA target sequence for Ndufs1 (NM_145518.1,2137-2155).
gagcttgccaagctagtaa

SEQ ID NO: 610134 - DNA, 19 bp, Mus musculus
  siRNA target sequence for Ndufs1 (NM_145518.1,2182-2200).
gttccacctcagctaacta

SEQ ID NO: 610135 - DNA, 19 bp, Mus musculus
  siRNA target sequence for Ndufs1 (NM_145518.1,2185-2203).
ccacctcagctaactataa

SEQ ID NO: 610136 - DNA, 19 bp, Mus musculus
  siRNA target sequence for Ndufs1 (NM_145518.1,2189-2207).
ctcagctaactataaaaga

SEQ ID NO: 610137 - DNA, 19 bp, Mus musculus
  siRNA target sequence for Ndufs1 (NM_145518.1,2191-2209).
cagctaactataaaagact

SEQ ID NO: 610138 - DNA, 19 bp, Mus musculus
  siRNA target sequence for Ndufs1 (NM_145518.1,2290-2308).
gtagaggagccgtccatat

SEQ ID NO: 610139 - DNA, 19 bp, Mus musculus
  siRNA target sequence for Ndufs4 (NM_010887.1,60-78).
cgtttccgtctgtagagtt

SEQ ID NO: 610140 - DNA, 19 bp, Mus musculus
  siRNA target sequence for Ndufs4 (NM_010887.1,229-247).
gttcctgctcgcaataaca

SEQ ID NO: 610141 - DNA, 19 bp, Mus musculus
  siRNA target sequence for Ndufs4 (NM_010887.1,246-264).
catgcagtctggagtaaat

SEQ ID NO: 610142 - DNA, 19 bp, Mus musculus
  siRNA target sequence for Ndufs4 (NM_010887.1,250-268).
cagtctggagtaaataaca

SEQ ID NO: 610143 - DNA, 19 bp, Mus musculus
  siRNA target sequence for Ndufs4 (NM_010887.1,305-323).
gatgggaaaatcctttgat

SEQ ID NO: 610144 - DNA, 19 bp, Mus musculus
  siRNA target sequence for Ndufs7 (NM_029272.1,428-446).
ggcacgcttaccaacaaga

SEQ ID NO: 610145 - DNA, 19 bp, Mus musculus
  siRNA target sequence for Ndufs7 (NM_029272.1,616-634).
ggccgaagcactcctttat

SEQ ID NO: 610146 - DNA, 19 bp, Mus musculus
  siRNA target sequence for Ndufv1 (NM_133666.1,106-124).
gctagcggcacggcatttt

SEQ ID NO: 610147 - DNA, 19 bp, Mus musculus
  siRNA target sequence for Ndufv1 (NM_133666.1,172-190).
cacgacagcacccaagaaa

SEQ ID NO: 610148 - DNA, 19 bp, Mus musculus
  siRNA target sequence for Ndufv1 (NM_133666.1,282-300).
gtgactggtacaagacaaa

SEQ ID NO: 610149 - DNA, 19 bp, Mus musculus
  siRNA target sequence for Ndufv1 (NM_133666.1,477-495).
gtaaggaccgagagatcat

SEQ ID NO: 610150 - DNA, 19 bp, Mus musculus
  siRNA target sequence for Ndufv1 (NM_133666.1,603-621).
ccaatttgcaggtagctat

SEQ ID NO: 610151 - DNA, 19 bp, Mus musculus
  siRNA target sequence for Ndufv1 (NM_133666.1,631-649).
ctatgaagcaggtctgatt

SEQ ID NO: 610152 - DNA, 19 bp, Mus musculus
  siRNA target sequence for Ndufv1 (NM_133666.1,660-678).
cttgtggctccgactatga

SEQ ID NO: 610153 - DNA, 19 bp, Mus musculus
  siRNA target sequence for Ndufv1 (NM_133666.1,663-681).
gtggctccgactatgattt

SEQ ID NO: 610154 - DNA, 19 bp, Mus musculus
  siRNA target sequence for Ndufv1 (NM_133666.1,667-685).
ctccgactatgattttgat

SEQ ID NO: 610155 - DNA, 19 bp, Mus musculus
  siRNA target sequence for Ndufv1 (NM_133666.1,673-691).
ctatgattttgatgtgttt

SEQ ID NO: 610156 - DNA, 19 bp, Mus musculus
  siRNA target sequence for Ndufv1 (NM_133666.1,701-719).
ggggctggggcctacatct

SEQ ID NO: 610157 - DNA, 19 bp, Mus musculus
  siRNA target sequence for Ndufv1 (NM_133666.1,723-741).
gagaagagacggcacttat

SEQ ID NO: 610158 - DNA, 19 bp, Mus musculus
  siRNA target sequence for Ndufv1 (NM_133666.1,728-746).
gagacggcacttattgaat

SEQ ID NO: 610159 - DNA, 19 bp, Mus musculus
  siRNA target sequence for Ndufv1 (NM_133666.1,732-750).
cggcacttattgaatccat

SEQ ID NO: 610160 - DNA, 19 bp, Mus musculus
  siRNA target sequence for Ndufv1 (NM_133666.1,908-926).
cgcaattcaggtaccaaat

SEQ ID NO: 610161 - DNA, 19 bp, Mus musculus
  siRNA target sequence for Ndufv1 (NM_133666.1,909-927).
gcaattcaggtaccaaatt

SEQ ID NO: 610162 - DNA, 19 bp, Mus musculus
  siRNA target sequence for Ndufv1 (NM_133666.1,918-936).
gtaccaaattgtttaacat

SEQ ID NO: 610163 - DNA, 19 bp, Mus musculus
  siRNA target sequence for Ndufv1 (NM_133666.1,1039-1057).
caacctccttgctgtgatt

SEQ ID NO: 610164 - DNA, 19 bp, Mus musculus
  siRNA target sequence for Ndufv1 (NM_133666.1,1066-1084).
ctcatctactccactgatt

SEQ ID NO: 610165 - DNA, 19 bp, Mus musculus
  siRNA target sequence for Ndufv1 (NM_133666.1,1098-1116).
gtgagaccgtgctaatgga

SEQ ID NO: 610166 - DNA, 19 bp, Mus musculus
  siRNA target sequence for Ndufv1 (NM_133666.1,1155-1173).
cggctgcagttattgttat

SEQ ID NO: 610167 - DNA, 19 bp, Mus musculus
  siRNA target sequence for Ndufv1 (NM_133666.1,1158-1176).
ctgcagttattgttatgga

SEQ ID NO: 610168 - DNA, 19 bp, Mus musculus
  siRNA target sequence for Ndufv1 (NM_133666.1,1174-1192).
ggatcgctcgacagacatt

SEQ ID NO: 610169 - DNA, 19 bp, Mus musculus
  siRNA target sequence for Ndufv1 (NM_133666.1,1178-1196).
cgctcgacagacattgtga

SEQ ID NO: 610170 - DNA, 19 bp, Mus musculus
  siRNA target sequence for Ndufv1 (NM_133666.1,1179-1197).
gctcgacagacattgtgaa

SEQ ID NO: 610171 - DNA, 19 bp, Mus musculus
  siRNA target sequence for Ndufv1 (NM_133666.1,1200-1218).
ccatcgctcgtctcattga

SEQ ID NO: 610172 - DNA, 19 bp, Mus musculus
  siRNA target sequence for Ndufv1 (NM_133666.1,1208-1226).
cgtctcattgagttctaca

SEQ ID NO: 610173 - DNA, 19 bp, Mus musculus
  siRNA target sequence for Ndufv1 (NM_133666.1,1266-1284).
gcgttgactggatgaacaa

SEQ ID NO: 610174 - DNA, 19 bp, Mus musculus
  siRNA target sequence for Ndufv1 (NM_133666.1,1286-1304).
gtgatggcccgatttgtga

SEQ ID NO: 610175 - DNA, 19 bp, Mus musculus
  siRNA target sequence for Ndufv1 (NM_133666.1,1412-1430).
ggtctgatccgacatttca

SEQ ID NO: 610176 - DNA, 19 bp, Mus musculus
  siRNA target sequence for Nxn (NM_008750.2,433-451).
caccggaagcttaaacttt

SEQ ID NO: 610177 - DNA, 19 bp, Mus musculus
  siRNA target sequence for Nxn (NM_008750.2,471-489).
caacattccatcgctaata

SEQ ID NO: 610178 - DNA, 19 bp, Mus musculus
  siRNA target sequence for Nxn (NM_008750.2,662-680).
ctcacgtgggagtctattt

SEQ ID NO: 610179 - DNA, 19 bp, Mus musculus
  siRNA target sequence for Nxn (NM_008750.2,664-682).
cacgtgggagtctatttct

SEQ ID NO: 610180 - DNA, 19 bp, Mus musculus
  siRNA target sequence for Nxn (NM_008750.2,882-900).
ccgactgtatggaatccaa

SEQ ID NO: 610181 - DNA, 19 bp, Mus musculus
  siRNA target sequence for Nxn (NM_008750.2,1217-1235).
ctgactccctgagagatta

SEQ ID NO: 610182 - DNA, 19 bp, Mus musculus
  siRNA target sequence for Nxn (NM_008750.2,1296-1314).
gtacgtgatggatgtagaa

SEQ ID NO: 610183 - DNA, 19 bp, Mus musculus
  siRNA target sequence for Ncf1 (NM_010876.2,74-92).
gccagcactatgtgtacat

SEQ ID NO: 610184 - DNA, 19 bp, Mus musculus
  siRNA target sequence for Ncf1 (NM_010876.2,505-523).
gctgactacgagaagagtt

SEQ ID NO: 610185 - DNA, 19 bp, Mus musculus
  siRNA target sequence for Ncf1 (NM_010876.2,690-708).
cgcaggtgaaccgtatgta

SEQ ID NO: 610186 - DNA, 19 bp, Mus musculus
  siRNA target sequence for Ncf1 (NM_010876.2,691-709).
gcaggtgaaccgtatgtaa

SEQ ID NO: 610187 - DNA, 19 bp, Mus musculus
  siRNA target sequence for Ncf1 (NM_010876.2,695-713).
gtgaaccgtatgtaaccat

SEQ ID NO: 610188 - DNA, 19 bp, Mus musculus
  siRNA target sequence for Nox1 (NM_172203.1,26-44).
ggctctcagttttgtttct

SEQ ID NO: 610189 - DNA, 19 bp, Mus musculus
  siRNA target sequence for Nox1 (NM_172203.1,53-71).
ggttggggctgaacatttt

SEQ ID NO: 610190 - DNA, 19 bp, Mus musculus
  siRNA target sequence for Nox1 (NM_172203.1,58-76).
gggctgaacatttttctgt

SEQ ID NO: 610191 - DNA, 19 bp, Mus musculus
  siRNA target sequence for Nox1 (NM_172203.1,85-103).
gccttcctgaattatgaga

SEQ ID NO: 610192 - DNA, 19 bp, Mus musculus
  siRNA target sequence for Nox1 (NM_172203.1,102-120).
gaagtctgacaagtactat

SEQ ID NO: 610193 - DNA, 19 bp, Mus musculus
  siRNA target sequence for Nox1 (NM_172203.1,172-190).
ctgtgcttgaattttaaca

SEQ ID NO: 610194 - DNA, 19 bp, Mus musculus
  siRNA target sequence for Nox1 (NM_172203.1,204-222).
gattcctgtgtgtcgaaat

SEQ ID NO: 610195 - DNA, 19 bp, Mus musculus
  siRNA target sequence for Nox1 (NM_172203.1,257-275).
gcaaccgtacactgagaaa

SEQ ID NO: 610196 - DNA, 19 bp, Mus musculus
  siRNA target sequence for Nox1 (NM_172203.1,307-325).
ctggtggcatatatgatct

SEQ ID NO: 610197 - DNA, 19 bp, Mus musculus
  siRNA target sequence for Nox1 (NM_172203.1,313-331).
gcatatatgatctgcatat

SEQ ID NO: 610198 - DNA, 19 bp, Mus musculus
  siRNA target sequence for Nox1 (NM_172203.1,314-332).
catatatgatctgcatatt

SEQ ID NO: 610199 - DNA, 19 bp, Mus musculus
  siRNA target sequence for Nox1 (NM_172203.1,324-342).
ctgcatattcacagttatt

SEQ ID NO: 610200 - DNA, 19 bp, Mus musculus
  siRNA target sequence for Nox1 (NM_172203.1,542-560).
ctgtagctttggttctcat

SEQ ID NO: 610201 - DNA, 19 bp, Mus musculus
  siRNA target sequence for Nox1 (NM_172203.1,566-584).
cgtcagctatggagtttat

SEQ ID NO: 610202 - DNA, 19 bp, Mus musculus
  siRNA target sequence for Nox1 (NM_172203.1,577-595).
gagtttatccgcaggaatt

SEQ ID NO: 610203 - DNA, 19 bp, Mus musculus
  siRNA target sequence for Nox1 (NM_172203.1,579-597).
gtttatccgcaggaattat

SEQ ID NO: 610204 - DNA, 19 bp, Mus musculus
  siRNA target sequence for Nox1 (NM_172203.1,611-629).
ggtatacacatcacctttt

SEQ ID NO: 610205 - DNA, 19 bp, Mus musculus
  siRNA target sequence for Nox1 (NM_172203.1,617-635).
cacatcacctttttatcgt

SEQ ID NO: 610206 - DNA, 19 bp, Mus musculus
  siRNA target sequence for Nox1 (NM_172203.1,622-640).
cacctttttatcgtctata

SEQ ID NO: 610207 - DNA, 19 bp, Mus musculus
  siRNA target sequence for Nox1 (NM_172203.1,625-643).
ctttttatcgtctatatca

SEQ ID NO: 610208 - DNA, 19 bp, Mus musculus
  siRNA target sequence for Nox1 (NM_172203.1,672-690).
gattgtccggggtcaaaca

SEQ ID NO: 610209 - DNA, 19 bp, Mus musculus
  siRNA target sequence for Nox1 (NM_172203.1,720-738).
caattgttcccattctttt

SEQ ID NO: 610210 - DNA, 19 bp, Mus musculus
  siRNA target sequence for Nox1 (NM_172203.1,764-782).
gttgcaggcatcctcattt

SEQ ID NO: 610211 - DNA, 19 bp, Mus musculus
  siRNA target sequence for Nox1 (NM_172203.1,816-834).
ccttgcaccgattgctttt

SEQ ID NO: 610212 - DNA, 19 bp, Mus musculus
  siRNA target sequence for Nox1 (NM_172203.1,817-835).
cttgcaccgattgcttttt

SEQ ID NO: 610213 - DNA, 19 bp, Mus musculus
  siRNA target sequence for Nox1 (NM_172203.1,820-838).
gcaccgattgctttttata

SEQ ID NO: 610214 - DNA, 19 bp, Mus musculus
  siRNA target sequence for Nox1 (NM_172203.1,821-839).
caccgattgctttttatat

SEQ ID NO: 610215 - DNA, 19 bp, Mus musculus
  siRNA target sequence for Nox1 (NM_172203.1,823-841).
ccgattgctttttatatat

SEQ ID NO: 610216 - DNA, 19 bp, Mus musculus
  siRNA target sequence for Nox1 (NM_172203.1,824-842).
cgattgctttttatatatt

SEQ ID NO: 610217 - DNA, 19 bp, Mus musculus
  siRNA target sequence for Nox1 (NM_172203.1,871-889).
cagcagaaggtcgtgatta

SEQ ID NO: 610218 - DNA, 19 bp, Mus musculus
  siRNA target sequence for Nox1 (NM_172203.1,874-892).
cagaaggtcgtgattacca

SEQ ID NO: 610219 - DNA, 19 bp, Mus musculus
  siRNA target sequence for Nox1 (NM_172203.1,900-918).
catgcacccatctaatgtt

SEQ ID NO: 610220 - DNA, 19 bp, Mus musculus
  siRNA target sequence for Nox1 (NM_172203.1,906-924).
cccatctaatgttttggaa

SEQ ID NO: 610221 - DNA, 19 bp, Mus musculus
  siRNA target sequence for Nox1 (NM_172203.1,935-953).
ggaagcgaggctttagcat

SEQ ID NO: 610222 - DNA, 19 bp, Mus musculus
  siRNA target sequence for Nox1 (NM_172203.1,954-972).
ggaagtaggacagtatata

SEQ ID NO: 610223 - DNA, 19 bp, Mus musculus
  siRNA target sequence for Nox1 (NM_172203.1,976-994).
gtaaattgcccctccattt

SEQ ID NO: 610224 - DNA, 19 bp, Mus musculus
  siRNA target sequence for Nox1 (NM_172203.1,1073-1091).
gggactggacacgaaatct

SEQ ID NO: 610225 - DNA, 19 bp, Mus musculus
  siRNA target sequence for Nox1 (NM_172203.1,1075-1093).
gactggacacgaaatctca

SEQ ID NO: 610226 - DNA, 19 bp, Mus musculus
  siRNA target sequence for Nox1 (NM_172203.1,1077-1095).
ctggacacgaaatctcata

SEQ ID NO: 610227 - DNA, 19 bp, Mus musculus
  siRNA target sequence for Nox1 (NM_172203.1,1228-1246).
gcttccatcttgaaatcta

SEQ ID NO: 610228 - DNA, 19 bp, Mus musculus
  siRNA target sequence for Nox1 (NM_172203.1,1244-1262).
ctatctggtacaaattcca

SEQ ID NO: 610229 - DNA, 19 bp, Mus musculus
  siRNA target sequence for Nox1 (NM_172203.1,1267-1285).
gccgacaacaagctcaaaa

SEQ ID NO: 610230 - DNA, 19 bp, Mus musculus
  siRNA target sequence for Nox1 (NM_172203.1,1269-1287).
cgacaacaagctcaaaaca

SEQ ID NO: 610231 - DNA, 19 bp, Mus musculus
  siRNA target sequence for Nox1 (NM_172203.1,1327-1345).
gcctttgcctggttcaaca

SEQ ID NO: 610232 - DNA, 19 bp, Mus musculus
  siRNA target sequence for Nox1 (NM_172203.1,1328-1346).
cctttgcctggttcaacaa

SEQ ID NO: 610233 - DNA, 19 bp, Mus musculus
  siRNA target sequence for Nox1 (NM_172203.1,1333-1351).
gcctggttcaacaacttat

SEQ ID NO: 610234 - DNA, 19 bp, Mus musculus
  siRNA target sequence for Nox1 (NM_172203.1,1334-1352).
cctggttcaacaacttatt

SEQ ID NO: 610235 - DNA, 19 bp, Mus musculus
  siRNA target sequence for Nox1 (NM_172203.1,1338-1356).
gttcaacaacttattgaat

SEQ ID NO: 610236 - DNA, 19 bp, Mus musculus
  siRNA target sequence for Nox1 (NM_172203.1,1441-1459).
gctggtcatgcagcattaa

SEQ ID NO: 610237 - DNA, 19 bp, Mus musculus
  siRNA target sequence for Nox1 (NM_172203.1,1445-1463).
gtcatgcagcattaaactt

SEQ ID NO: 610238 - DNA, 19 bp, Mus musculus
  siRNA target sequence for Nox1 (NM_172203.1,1489-1507).
ggtctgaagcagaaaactt

SEQ ID NO: 610239 - DNA, 19 bp, Mus musculus
  siRNA target sequence for Nox1 (NM_172203.1,1517-1535).
gaccaatgtgggacaatga

SEQ ID NO: 610240 - DNA, 19 bp, Mus musculus
  siRNA target sequence for Nox1 (NM_172203.1,1570-1588).
gcggtgggggttttcttat

SEQ ID NO: 610241 - DNA, 19 bp, Mus musculus
  siRNA target sequence for Nox1 (NM_172203.1,1652-1670).
ctaggaaggttcagttcta

SEQ ID NO: 610242 - DNA, 19 bp, Mus musculus
  siRNA target sequence for Nox4 (NM_015760.2,121-139).
gtccctaaacgttctactt

SEQ ID NO: 610243 - DNA, 19 bp, Mus musculus
  siRNA target sequence for Nox4 (NM_015760.2,123-141).
ccctaaacgttctactttt

SEQ ID NO: 610244 - DNA, 19 bp, Mus musculus
  siRNA target sequence for Nox4 (NM_015760.2,125-143).
ctaaacgttctacttttct

SEQ ID NO: 610245 - DNA, 19 bp, Mus musculus
  siRNA target sequence for Nox4 (NM_015760.2,134-152).
ctacttttctggaaaacct

SEQ ID NO: 610246 - DNA, 19 bp, Mus musculus
  siRNA target sequence for Nox4 (NM_015760.2,202-220).
gggcctaggattgtgttta

SEQ ID NO: 610247 - DNA, 19 bp, Mus musculus
  siRNA target sequence for Nox4 (NM_015760.2,206-224).
ctaggattgtgtttaagca

SEQ ID NO: 610248 - DNA, 19 bp, Mus musculus
  siRNA target sequence for Nox4 (NM_015760.2,282-300).
ggacagtcctggcttatct

SEQ ID NO: 610249 - DNA, 19 bp, Mus musculus
  siRNA target sequence for Nox4 (NM_015760.2,283-301).
gacagtcctggcttatctt

SEQ ID NO: 610250 - DNA, 19 bp, Mus musculus
  siRNA target sequence for Nox4 (NM_015760.2,367-385).
catcacatgtggtgtaact

SEQ ID NO: 610251 - DNA, 19 bp, Mus musculus
  siRNA target sequence for Nox4 (NM_015760.2,375-393).
gtggtgtaactatctgtat

SEQ ID NO: 610252 - DNA, 19 bp, Mus musculus
  siRNA target sequence for Nox4 (NM_015760.2,425-443).
gtgaatgccctcaactttt

SEQ ID NO: 610253 - DNA, 19 bp, Mus musculus
  siRNA target sequence for Nox4 (NM_015760.2,427-445).
gaatgccctcaacttttca

SEQ ID NO: 610254 - DNA, 19 bp, Mus musculus
  siRNA target sequence for Nox4 (NM_015760.2,560-578).
gtattgttcctcatggtta

SEQ ID NO: 610255 - DNA, 19 bp, Mus musculus
  siRNA target sequence for Nox4 (NM_015760.2,581-599).
gcttctacctacgcaataa

SEQ ID NO: 610256 - DNA, 19 bp, Mus musculus
  siRNA target sequence for Nox4 (NM_015760.2,592-610).
cgcaataagagtttctaat

SEQ ID NO: 610257 - DNA, 19 bp, Mus musculus
  siRNA target sequence for Nox4 (NM_015760.2,593-611).
gcaataagagtttctaatt

SEQ ID NO: 610258 - DNA, 19 bp, Mus musculus
  siRNA target sequence for Nox4 (NM_015760.2,1073-1091).
ctccattgccccagtgtat

SEQ ID NO: 610259 - DNA, 19 bp, Mus musculus
  siRNA target sequence for Nox4 (NM_015760.2,1075-1093).
ccattgccccagtgtatca

SEQ ID NO: 610260 - DNA, 19 bp, Mus musculus
  siRNA target sequence for Nox4 (NM_015760.2,1109-1127).
ccatttactctcacaatgt

SEQ ID NO: 610261 - DNA, 19 bp, Mus musculus
  siRNA target sequence for Nox4 (NM_015760.2,1120-1138).
cacaatgtgtcctactgaa

SEQ ID NO: 610262 - DNA, 19 bp, Mus musculus
  siRNA target sequence for Nox4 (NM_015760.2,1204-1222).
gctactgcctccatcaagt

SEQ ID NO: 610263 - DNA, 19 bp, Mus musculus
  siRNA target sequence for Nox4 (NM_015760.2,1254-1272).
ctagaaattaccctaagtt

SEQ ID NO: 610264 - DNA, 19 bp, Mus musculus
  siRNA target sequence for Nox4 (NM_015760.2,1257-1275).
gaaattaccctaagttata

SEQ ID NO: 610265 - DNA, 19 bp, Mus musculus
  siRNA target sequence for Nox4 (NM_015760.2,1287-1305).
catttggaagcccatttga

SEQ ID NO: 610266 - DNA, 19 bp, Mus musculus
  siRNA target sequence for Nox4 (NM_015760.2,1357-1375).
cactccatttgcatcgata

SEQ ID NO: 610267 - DNA, 19 bp, Mus musculus
  siRNA target sequence for Nox4 (NM_015760.2,1361-1379).
ccatttgcatcgatactaa

SEQ ID NO: 610268 - DNA, 19 bp, Mus musculus
  siRNA target sequence for Nox4 (NM_015760.2,1362-1380).
catttgcatcgatactaaa

SEQ ID NO: 610269 - DNA, 19 bp, Mus musculus
  siRNA target sequence for Nox4 (NM_015760.2,1399-1417).
gaaaccatacaagttaaga

SEQ ID NO: 610270 - DNA, 19 bp, Mus musculus
  siRNA target sequence for Nox4 (NM_015760.2,1440-1458).
gcagagacatccaatcatt

SEQ ID NO: 610271 - DNA, 19 bp, Mus musculus
  siRNA target sequence for Nox4 (NM_015760.2,1482-1500).
gtgtgttgcataacaagtt

SEQ ID NO: 610272 - DNA, 19 bp, Mus musculus
  siRNA target sequence for Nox4 (NM_015760.2,1484-1502).
gtgttgcataacaagtttt

SEQ ID NO: 610273 - DNA, 19 bp, Mus musculus
  siRNA target sequence for Nox4 (NM_015760.2,1537-1555).
gctgtacctcagtcaaaca

SEQ ID NO: 610274 - DNA, 19 bp, Mus musculus
  siRNA target sequence for Nox4 (NM_015760.2,1556-1574).
gatgggattcagaagataa

SEQ ID NO: 610275 - DNA, 19 bp, Mus musculus
  siRNA target sequence for Nox4 (NM_015760.2,1595-1613).
ctgaattcgagacttttca

SEQ ID NO: 610276 - DNA, 19 bp, Mus musculus
  siRNA target sequence for Nox4 (NM_015760.2,1618-1636).
gcgtcctcggtggaaactt

SEQ ID NO: 610277 - DNA, 19 bp, Mus musculus
  siRNA target sequence for Nox4 (NM_015760.2,1619-1637).
cgtcctcggtggaaacttt

SEQ ID NO: 610278 - DNA, 19 bp, Mus musculus
  siRNA target sequence for Nox4 (NM_015760.2,1620-1638).
gtcctcggtggaaactttt

SEQ ID NO: 610279 - DNA, 19 bp, Mus musculus
  siRNA target sequence for Nox4 (NM_015760.2,1689-1707).
gctgtggacccagttctat

SEQ ID NO: 610280 - DNA, 19 bp, Mus musculus
  siRNA target sequence for Nox4 (NM_015760.2,1716-1734).
ctcttcatagtttgagtaa

SEQ ID NO: 610281 - DNA, 19 bp, Mus musculus
  siRNA target sequence for Nox4 (NM_015760.2,1731-1749).
gtaaccggaacaactcata

SEQ ID NO: 610282 - DNA, 19 bp, Mus musculus
  siRNA target sequence for Nox4 (NM_015760.2,1741-1759).
caactcatatgggacaaaa

SEQ ID NO: 610283 - DNA, 19 bp, Mus musculus
  siRNA target sequence for Nox4 (NM_015760.2,1744-1762).
ctcatatgggacaaaattt

SEQ ID NO: 610284 - DNA, 19 bp, Mus musculus
  siRNA target sequence for Nox4 (NM_015760.2,1746-1764).
catatgggacaaaatttga

SEQ ID NO: 610285 - DNA, 19 bp, Mus musculus
  siRNA target sequence for Gmpr (NM_025508.1,197-215).
gcatagacgcggaccttaa

SEQ ID NO: 610286 - DNA, 19 bp, Mus musculus
  siRNA target sequence for Gmpr (NM_025508.1,269-287).
gatccgaggtggatcttga

SEQ ID NO: 610287 - DNA, 19 bp, Mus musculus
  siRNA target sequence for Gmpr (NM_025508.1,279-297).
ggatcttgagcgaactttt

SEQ ID NO: 610288 - DNA, 19 bp, Mus musculus
  siRNA target sequence for Gmpr (NM_025508.1,283-301).
cttgagcgaacttttacat

SEQ ID NO: 610289 - DNA, 19 bp, Mus musculus
  siRNA target sequence for Gmpr (NM_025508.1,288-306).
gcgaacttttacatttcga

SEQ ID NO: 610290 - DNA, 19 bp, Mus musculus
  siRNA target sequence for Gmpr (NM_025508.1,289-307).
cgaacttttacatttcgaa

SEQ ID NO: 610291 - DNA, 19 bp, Mus musculus
  siRNA target sequence for Gmpr (NM_025508.1,324-342).
ctcagggattcccatcatt

SEQ ID NO: 610292 - DNA, 19 bp, Mus musculus
  siRNA target sequence for Gmpr (NM_025508.1,354-372).
ggacactgtggggacattt

SEQ ID NO: 610293 - DNA, 19 bp, Mus musculus
  siRNA target sequence for Gmpr (NM_025508.1,503-521).
gcgggcagaatgatcttga

SEQ ID NO: 610294 - DNA, 19 bp, Mus musculus
  siRNA target sequence for Gmpr (NM_025508.1,587-605).
ggtattcagagcattttgt

SEQ ID NO: 610295 - DNA, 19 bp, Mus musculus
  siRNA target sequence for Gmpr (NM_025508.1,593-611).
cagagcattttgtggaatt

SEQ ID NO: 610296 - DNA, 19 bp, Mus musculus
  siRNA target sequence for Gmpr (NM_025508.1,615-633).
gaaactggtccgatccaaa

SEQ ID NO: 610297 - DNA, 19 bp, Mus musculus
  siRNA target sequence for Gmpr (NM_025508.1,784-802).
ctgagtgcggtgatagagt

SEQ ID NO: 610298 - DNA, 19 bp, Mus musculus
  siRNA target sequence for Gmpr (NM_025508.1,909-927).
gctgggaggcatgttttca

SEQ ID NO: 610299 - DNA, 19 bp, Mus musculus
  siRNA target sequence for Gmpr (NM_025508.1,972-990).
gaagctgaaactcttctat

SEQ ID NO: 610300 - DNA, 19 bp, Mus musculus
  siRNA target sequence for Gmpr (NM_025508.1,1064-1082).
ccgtggaagtgccttacaa

SEQ ID NO: 610301 - DNA, 19 bp, Mus musculus
  siRNA target sequence for Gmpr (NM_025508.1,1065-1083).
cgtggaagtgccttacaaa

SEQ ID NO: 610302 - DNA, 19 bp, Mus musculus
  siRNA target sequence for Gmpr2 (NM_134075.1,121-139).
gcctcatattgataatgat

SEQ ID NO: 610303 - DNA, 19 bp, Mus musculus
  siRNA target sequence for Gmpr2 (NM_134075.1,123-141).
ctcatattgataatgatgt

SEQ ID NO: 610304 - DNA, 19 bp, Mus musculus
  siRNA target sequence for Gmpr2 (NM_134075.1,173-191).
cccaaacgcagcactctta

SEQ ID NO: 610305 - DNA, 19 bp, Mus musculus
  siRNA target sequence for Gmpr2 (NM_134075.1,203-221).
gaggtagagctcacaagat

SEQ ID NO: 610306 - DNA, 19 bp, Mus musculus
  siRNA target sequence for Gmpr2 (NM_134075.1,205-223).
ggtagagctcacaagatca

SEQ ID NO: 610307 - DNA, 19 bp, Mus musculus
  siRNA target sequence for Gmpr2 (NM_134075.1,206-224).
gtagagctcacaagatcat

SEQ ID NO: 610308 - DNA, 19 bp, Mus musculus
  siRNA target sequence for Gmpr2 (NM_134075.1,268-286).
cattgctgccaatatggat

SEQ ID NO: 610309 - DNA, 19 bp, Mus musculus
  siRNA target sequence for Gmpr2 (NM_134075.1,283-301).
ggataccgtgggcactttt

SEQ ID NO: 610310 - DNA, 19 bp, Mus musculus
  siRNA target sequence for Gmpr2 (NM_134075.1,288-306).
ccgtgggcacttttgaaat

SEQ ID NO: 610311 - DNA, 19 bp, Mus musculus
  siRNA target sequence for Gmpr2 (NM_134075.1,308-326).
gctagggttctctgtaagt

SEQ ID NO: 610312 - DNA, 19 bp, Mus musculus
  siRNA target sequence for Gmpr2 (NM_134075.1,309-327).
ctagggttctctgtaagtt

SEQ ID NO: 610313 - DNA, 19 bp, Mus musculus
  siRNA target sequence for Gmpr2 (NM_134075.1,473-491).
gctattccccaagtcaaat

SEQ ID NO: 610314 - DNA, 19 bp, Mus musculus
  siRNA target sequence for Gmpr2 (NM_134075.1,474-492).
ctattccccaagtcaaata

SEQ ID NO: 610315 - DNA, 19 bp, Mus musculus
  siRNA target sequence for Gmpr2 (NM_134075.1,514-532).
cggctactctgaacatttt

SEQ ID NO: 610316 - DNA, 19 bp, Mus musculus
  siRNA target sequence for Gmpr2 (NM_134075.1,643-661).
catcaaagtgggaattggt

SEQ ID NO: 610317 - DNA, 19 bp, Mus musculus
  siRNA target sequence for Gmpr2 (NM_134075.1,673-691).
ctgtacaactcggaagaaa

SEQ ID NO: 610318 - DNA, 19 bp, Mus musculus
  siRNA target sequence for Gmpr2 (NM_134075.1,749-767).
ggcctcaaaggccatatca

SEQ ID NO: 610319 - DNA, 19 bp, Mus musculus
  siRNA target sequence for Gmpr2 (NM_134075.1,750-768).
gcctcaaaggccatatcat

SEQ ID NO: 610320 - DNA, 19 bp, Mus musculus
  siRNA target sequence for Gmpr2 (NM_134075.1,872-890).
ggtggcgaactcattgaga

SEQ ID NO: 610321 - DNA, 19 bp, Mus musculus
  siRNA target sequence for Gmpr2 (NM_134075.1,889-907).
gagagatggcaagaaatat

SEQ ID NO: 610322 - DNA, 19 bp, Mus musculus
  siRNA target sequence for Gmpr2 (NM_134075.1,910-928).
gctcttctacggaatgagt

SEQ ID NO: 610323 - DNA, 19 bp, Mus musculus
  siRNA target sequence for Gmpr2 (NM_134075.1,978-996).
cctcagagggaaagatagt

SEQ ID NO: 610324 - DNA, 19 bp, Mus musculus
  siRNA target sequence for Gmpr2 (NM_134075.1,979-997).
ctcagagggaaagatagta

SEQ ID NO: 610325 - DNA, 19 bp, Mus musculus
  siRNA target sequence for Gmpr2 (NM_134075.1,1014-1032).
gcgatgtggaacatactat

SEQ ID NO: 610326 - DNA, 19 bp, Mus musculus
  siRNA target sequence for Gmpr2 (NM_134075.1,1015-1033).
cgatgtggaacatactatt

SEQ ID NO: 610327 - DNA, 19 bp, Mus musculus
  siRNA target sequence for Gmpr2 (NM_134075.1,1046-1064).
ggaggcatccggtctacat

SEQ ID NO: 610328 - DNA, 19 bp, Mus musculus
  siRNA target sequence for Gmpr2 (NM_134075.1,1082-1100).
gctaaactgaaggaactaa

SEQ ID NO: 610329 - DNA, 19 bp, Mus musculus
  siRNA target sequence for Gmpr2 (NM_134075.1,1094-1112).
gaactaagccggagaacta

SEQ ID NO: 610330 - DNA, 19 bp, Mus musculus
  siRNA target sequence for Gmpr2 (NM_134075.1,1097-1115).
ctaagccggagaactactt

SEQ ID NO: 610331 - DNA, 19 bp, Mus musculus
  siRNA target sequence for Gmpr2 (NM_177992.1,653-671).
ggtagaagagttaatcctt

SEQ ID NO: 610332 - DNA, 19 bp, Mus musculus
  siRNA target sequence for Gmpr2 (NM_177992.1,654-672).
gtagaagagttaatccttt

SEQ ID NO: 610333 - DNA, 19 bp, Mus musculus
  siRNA target sequence for Por (NM_008898.1,121-139).
cagcacaacggacattgtt

SEQ ID NO: 610334 - DNA, 19 bp, Mus musculus
  siRNA target sequence for Por (NM_008898.1,123-141).
gcacaacggacattgttct

SEQ ID NO: 610335 - DNA, 19 bp, Mus musculus
  siRNA target sequence for Por (NM_008898.1,126-144).
caacggacattgttctgtt

SEQ ID NO: 610336 - DNA, 19 bp, Mus musculus
  siRNA target sequence for Por (NM_008898.1,168-186).
cctactggttcatctttaa

SEQ ID NO: 610337 - DNA, 19 bp, Mus musculus
  siRNA target sequence for Por (NM_008898.1,274-292).
gaaaacgggaaggaacatt

SEQ ID NO: 610338 - DNA, 19 bp, Mus musculus
  siRNA target sequence for Por (NM_008898.1,282-300).
gaaggaacattattgtatt

SEQ ID NO: 610339 - DNA, 19 bp, Mus musculus
  siRNA target sequence for Por (NM_008898.1,285-303).
ggaacattattgtattcta

SEQ ID NO: 610340 - DNA, 19 bp, Mus musculus
  siRNA target sequence for Por (NM_008898.1,286-304).
gaacattattgtattctat

SEQ ID NO: 610341 - DNA, 19 bp, Mus musculus
  siRNA target sequence for Por (NM_008898.1,496-514).
cgcgcaggacttctatgat

SEQ ID NO: 610342 - DNA, 19 bp, Mus musculus
  siRNA target sequence for Por (NM_008898.1,538-556).
cctcacgggtgtcaagttt

SEQ ID NO: 610343 - DNA, 19 bp, Mus musculus
  siRNA target sequence for Por (NM_008898.1,681-699).
ggaacttggaagaggattt

SEQ ID NO: 610344 - DNA, 19 bp, Mus musculus
  siRNA target sequence for Por (NM_008898.1,939-957).
ctgagaggcatctaatgca

SEQ ID NO: 610345 - DNA, 19 bp, Mus musculus
  siRNA target sequence for Por (NM_008898.1,1073-1091).
gacctggatgtcatcatgt

SEQ ID NO: 610346 - DNA, 19 bp, Mus musculus
  siRNA target sequence for Por (NM_008898.1,1103-1121).
ctcgatgaggagtcgaata

SEQ ID NO: 610347 - DNA, 19 bp, Mus musculus
  siRNA target sequence for Por (NM_008898.1,1106-1124).
gatgaggagtcgaataaga

SEQ ID NO: 610348 - DNA, 19 bp, Mus musculus
  siRNA target sequence for Por (NM_008898.1,1543-1561).
ggaaccagcaggagagaat

SEQ ID NO: 610349 - DNA, 19 bp, Mus musculus
  siRNA target sequence for Por (NM_008898.1,1755-1773).
gctcggatgaggactatct

SEQ ID NO: 610350 - DNA, 19 bp, Mus musculus
  siRNA target sequence for Por (NM_008898.1,1758-1776).
cggatgaggactatctgta

SEQ ID NO: 610351 - DNA, 19 bp, Mus musculus
  siRNA target sequence for Por (NM_008898.1,1849-1867).
ggcccacaaggtctatgtt

SEQ ID NO: 610352 - DNA, 19 bp, Mus musculus
  siRNA target sequence for Por (NM_008898.1,1851-1869).
cccacaaggtctatgttca

SEQ ID NO: 610353 - DNA, 19 bp, Mus musculus
  siRNA target sequence for Por (NM_008898.1,1939-1957).
ctgcggggatgctcgaaat

SEQ ID NO: 610354 - DNA, 19 bp, Mus musculus
  siRNA target sequence for Por (NM_008898.1,1941-1959).
gcggggatgctcgaaatat

SEQ ID NO: 610355 - DNA, 19 bp, Mus musculus
  siRNA target sequence for Por (NM_008898.1,1967-1985).
gatgtgcagaacacattct

SEQ ID NO: 610356 - DNA, 19 bp, Mus musculus
  siRNA target sequence for Por (NM_008898.1,2024-2042).
caggctgtggactatgtta

SEQ ID NO: 610357 - DNA, 19 bp, Mus musculus
  siRNA target sequence for Por (NM_008898.1,2063-2081).
cgctactcgctggatgtat

SEQ ID NO: 610358 - DNA, 19 bp, Mus musculus
  siRNA target sequence for Nnt (NM_008710.2,313-331).
caggaattccatataagca

SEQ ID NO: 610359 - DNA, 19 bp, Mus musculus
  siRNA target sequence for Nnt (NM_008710.2,582-600).
cacgaagctgactttttaa

SEQ ID NO: 610360 - DNA, 19 bp, Mus musculus
  siRNA target sequence for Nnt (NM_008710.2,607-625).
caggaactctaattagctt

SEQ ID NO: 610361 - DNA, 19 bp, Mus musculus
  siRNA target sequence for Nnt (NM_008710.2,646-664).
cagacttgctcaataaact

SEQ ID NO: 610362 - DNA, 19 bp, Mus musculus
  siRNA target sequence for Nnt (NM_008710.2,648-666).
gacttgctcaataaacttt

SEQ ID NO: 610363 - DNA, 19 bp, Mus musculus
  siRNA target sequence for Nnt (NM_008710.2,701-719).
ggttccaagagtgacaata

SEQ ID NO: 610364 - DNA, 19 bp, Mus musculus
  siRNA target sequence for Nnt (NM_008710.2,749-767).
ggccaacatctctggttat

SEQ ID NO: 610365 - DNA, 19 bp, Mus musculus
  siRNA target sequence for Nnt (NM_008710.2,750-768).
gccaacatctctggttata

SEQ ID NO: 610366 - DNA, 19 bp, Mus musculus
  siRNA target sequence for Nnt (NM_008710.2,751-769).
ccaacatctctggttataa

SEQ ID NO: 610367 - DNA, 19 bp, Mus musculus
  siRNA target sequence for Nnt (NM_008710.2,777-795).
gttttagcagcgaatcatt

SEQ ID NO: 610368 - DNA, 19 bp, Mus musculus
  siRNA target sequence for Nnt (NM_008710.2,792-810).
cattttgggaggtttttca

SEQ ID NO: 610369 - DNA, 19 bp, Mus musculus
  siRNA target sequence for Nnt (NM_008710.2,818-836).
gatcacagctgctggaaaa

SEQ ID NO: 610370 - DNA, 19 bp, Mus musculus
  siRNA target sequence for Nnt (NM_008710.2,914-932).
cgcagttgtccgaggattt

SEQ ID NO: 610371 - DNA, 19 bp, Mus musculus
  siRNA target sequence for Nnt (NM_008710.2,916-934).
cagttgtccgaggatttga

SEQ ID NO: 610372 - DNA, 19 bp, Mus musculus
  siRNA target sequence for Nnt (NM_008710.2,918-936).
gttgtccgaggatttgata

SEQ ID NO: 610373 - DNA, 19 bp, Mus musculus
  siRNA target sequence for Nnt (NM_008710.2,921-939).
gtccgaggatttgatacaa

SEQ ID NO: 610374 - DNA, 19 bp, Mus musculus
  siRNA target sequence for Nnt (NM_008710.2,943-961).
ctgccgctttggaacagtt

SEQ ID NO: 610375 - DNA, 19 bp, Mus musculus
  siRNA target sequence for Nnt (NM_008710.2,946-964).
ccgctttggaacagttcaa

SEQ ID NO: 610376 - DNA, 19 bp, Mus musculus
  siRNA target sequence for Nnt (NM_008710.2,948-966).
gctttggaacagttcaaat

SEQ ID NO: 610377 - DNA, 19 bp, Mus musculus
  siRNA target sequence for Nnt (NM_008710.2,1020-1038).
ggaggatacgcgaaagaga

SEQ ID NO: 610378 - DNA, 19 bp, Mus musculus
  siRNA target sequence for Nnt (NM_008710.2,1021-1039).
gaggatacgcgaaagagat

SEQ ID NO: 610379 - DNA, 19 bp, Mus musculus
  siRNA target sequence for Nnt (NM_008710.2,1037-1055).
gatgtccaaagagttcatt

SEQ ID NO: 610380 - DNA, 19 bp, Mus musculus
  siRNA target sequence for Nnt (NM_008710.2,1137-1155).
gctcctgttttatttagta

SEQ ID NO: 610381 - DNA, 19 bp, Mus musculus
  siRNA target sequence for Nnt (NM_008710.2,1183-1201).
ggtcagttgttgtggattt

SEQ ID NO: 610382 - DNA, 19 bp, Mus musculus
  siRNA target sequence for Nnt (NM_008710.2,1238-1256).
gccgggagaactttacgtt

SEQ ID NO: 610383 - DNA, 19 bp, Mus musculus
  siRNA target sequence for Nnt (NM_008710.2,1243-1261).
gagaactttacgttcataa

SEQ ID NO: 610384 - DNA, 19 bp, Mus musculus
  siRNA target sequence for Nnt (NM_008710.2,1253-1271).
cgttcataagggaatcact

SEQ ID NO: 610385 - DNA, 19 bp, Mus musculus
  siRNA target sequence for Nnt (NM_008710.2,1257-1275).
cataagggaatcactcata

SEQ ID NO: 610386 - DNA, 19 bp, Mus musculus
  siRNA target sequence for Nnt (NM_008710.2,1311-1329).
caggcgagcactctctatt

SEQ ID NO: 610387 - DNA, 19 bp, Mus musculus
  siRNA target sequence for Nnt (NM_008710.2,1314-1332).
gcgagcactctctattcca

SEQ ID NO: 610388 - DNA, 19 bp, Mus musculus
  siRNA target sequence for Nnt (NM_008710.2,1315-1333).
cgagcactctctattccaa

SEQ ID NO: 610389 - DNA, 19 bp, Mus musculus
  siRNA target sequence for Nnt (NM_008710.2,1363-1381).
gccctgacaaggacaattt

SEQ ID NO: 610390 - DNA, 19 bp, Mus musculus
  siRNA target sequence for Nnt (NM_008710.2,1366-1384).
ctgacaaggacaattttca

SEQ ID NO: 610391 - DNA, 19 bp, Mus musculus
  siRNA target sequence for Nnt (NM_008710.2,1476-1494).
gctcccacaccaaaaaata

SEQ ID NO: 610392 - DNA, 19 bp, Mus musculus
  siRNA target sequence for Nnt (NM_008710.2,1499-1517).
cgaagaagccccagtcaaa

SEQ ID NO: 610393 - DNA, 19 bp, Mus musculus
  siRNA target sequence for Nnt (NM_008710.2,1611-1629).
ctcactgggatgttaggtt

SEQ ID NO: 610394 - DNA, 19 bp, Mus musculus
  siRNA target sequence for Nnt (NM_008710.2,1645-1663).
ccaatgtagccttttctca

SEQ ID NO: 610395 - DNA, 19 bp, Mus musculus
  siRNA target sequence for Nnt (NM_008710.2,1796-1814).
gttgatgggagggcatttt

SEQ ID NO: 610396 - DNA, 19 bp, Mus musculus
  siRNA target sequence for Nnt (NM_008710.2,1928-1946).
cacggaccctccagagtat

SEQ ID NO: 610397 - DNA, 19 bp, Mus musculus
  siRNA target sequence for Nnt (NM_008710.2,1930-1948).
cggaccctccagagtataa

SEQ ID NO: 610398 - DNA, 19 bp, Mus musculus
  siRNA target sequence for Nnt (NM_008710.2,1931-1949).
ggaccctccagagtataat

SEQ ID NO: 610399 - DNA, 19 bp, Mus musculus
  siRNA target sequence for Nnt (NM_008710.2,1932-1950).
gaccctccagagtataatt

SEQ ID NO: 610400 - DNA, 19 bp, Mus musculus
  siRNA target sequence for Nnt (NM_008710.2,1934-1952).
ccctccagagtataattat

SEQ ID NO: 610401 - DNA, 19 bp, Mus musculus
  siRNA target sequence for Nnt (NM_008710.2,1936-1954).
ctccagagtataattatct

SEQ ID NO: 610402 - DNA, 19 bp, Mus musculus
  siRNA target sequence for Nnt (NM_008710.2,1938-1956).
ccagagtataattatctgt

SEQ ID NO: 610403 - DNA, 19 bp, Mus musculus
  siRNA target sequence for Nnt (NM_008710.2,1939-1957).
cagagtataattatctgta

SEQ ID NO: 610404 - DNA, 19 bp, Mus musculus
  siRNA target sequence for Nnt (NM_008710.2,1973-1991).
caccttcgtaggtggatat

SEQ ID NO: 610405 - DNA, 19 bp, Mus musculus
  siRNA target sequence for Nnt (NM_008710.2,1976-1994).
cttcgtaggtggatattta

SEQ ID NO: 610406 - DNA, 19 bp, Mus musculus
  siRNA target sequence for Nnt (NM_008710.2,1979-1997).
cgtaggtggatatttagct

SEQ ID NO: 610407 - DNA, 19 bp, Mus musculus
  siRNA target sequence for Nnt (NM_008710.2,1999-2017).
ctctctacggtggctataa

SEQ ID NO: 610408 - DNA, 19 bp, Mus musculus
  siRNA target sequence for Nnt (NM_008710.2,2001-2019).
ctctacggtggctataaca

SEQ ID NO: 610409 - DNA, 19 bp, Mus musculus
  siRNA target sequence for Nnt (NM_008710.2,2011-2029).
gctataacatcgaagaaat

SEQ ID NO: 610410 - DNA, 19 bp, Mus musculus
  siRNA target sequence for Nnt (NM_008710.2,2235-2253).
gcaaagcggatccagattt

SEQ ID NO: 610411 - DNA, 19 bp, Mus musculus
  siRNA target sequence for Nnt (NM_008710.2,2314-2332).
cctgcatggccgagtacat

SEQ ID NO: 610412 - DNA, 19 bp, Mus musculus
  siRNA target sequence for Nnt (NM_008710.2,2323-2341).
ccgagtacatcgtagagta

SEQ ID NO: 610413 - DNA, 19 bp, Mus musculus
  siRNA target sequence for Nnt (NM_008710.2,2324-2342).
cgagtacatcgtagagtat

SEQ ID NO: 610414 - DNA, 19 bp, Mus musculus
  siRNA target sequence for Nnt (NM_008710.2,2333-2351).
cgtagagtatccacatttt

SEQ ID NO: 610415 - DNA, 19 bp, Mus musculus
  siRNA target sequence for Nnt (NM_008710.2,2337-2355).
gagtatccacattttgcaa

SEQ ID NO: 610416 - DNA, 19 bp, Mus musculus
  siRNA target sequence for Nnt (NM_008710.2,2358-2376).
gatgccacgtcaaatttca

SEQ ID NO: 610417 - DNA, 19 bp, Mus musculus
  siRNA target sequence for Nnt (NM_008710.2,2366-2384).
gtcaaatttcaccaagatt

SEQ ID NO: 610418 - DNA, 19 bp, Mus musculus
  siRNA target sequence for Nnt (NM_008710.2,2368-2386).
caaatttcaccaagattgt

SEQ ID NO: 610419 - DNA, 19 bp, Mus musculus
  siRNA target sequence for Nnt (NM_008710.2,2388-2406).
gcttaccttggcacttaca

SEQ ID NO: 610420 - DNA, 19 bp, Mus musculus
  siRNA target sequence for Nnt (NM_008710.2,2389-2407).
cttaccttggcacttacat

SEQ ID NO: 610421 - DNA, 19 bp, Mus musculus
  siRNA target sequence for Nnt (NM_008710.2,2408-2426).
cggcggagtcacctttagt

SEQ ID NO: 610422 - DNA, 19 bp, Mus musculus
  siRNA target sequence for Nnt (NM_008710.2,2524-2542).
ctagcgtgggtgggataat

SEQ ID NO: 610423 - DNA, 19 bp, Mus musculus
  siRNA target sequence for Nnt (NM_008710.2,2611-2629).
ctctcatgggtgtgacttt

SEQ ID NO: 610424 - DNA, 19 bp, Mus musculus
  siRNA target sequence for Nnt (NM_008710.2,2624-2642).
gactttgacggctgctatt

SEQ ID NO: 610425 - DNA, 19 bp, Mus musculus
  siRNA target sequence for Nnt (NM_008710.2,2664-2682).
gtcatcaccgtgctaaaca

SEQ ID NO: 610426 - DNA, 19 bp, Mus musculus
  siRNA target sequence for Nnt (NM_008710.2,2772-2790).
gcaatcctgtcgtacatca

SEQ ID NO: 610427 - DNA, 19 bp, Mus musculus
  siRNA target sequence for Nnt (NM_008710.2,2808-2826).
cgctccctggctaatgtca

SEQ ID NO: 610428 - DNA, 19 bp, Mus musculus
  siRNA target sequence for Nnt (NM_008710.2,2859-2877).
ggtggaaaacccatggaaa

SEQ ID NO: 610429 - DNA, 19 bp, Mus musculus
  siRNA target sequence for Nnt (NM_008710.2,2860-2878).
gtggaaaacccatggaaat

SEQ ID NO: 610430 - DNA, 19 bp, Mus musculus
  siRNA target sequence for Nnt (NM_008710.2,2874-2892).
gaaatttctggcacacata

SEQ ID NO: 610431 - DNA, 19 bp, Mus musculus
  siRNA target sequence for Nnt (NM_008710.2,2934-2952).
gctaacagcattgttatta

SEQ ID NO: 610432 - DNA, 19 bp, Mus musculus
  siRNA target sequence for Nnt (NM_008710.2,3005-3023).
ggtgaagatgcttactgaa

SEQ ID NO: 610433 - DNA, 19 bp, Mus musculus
  siRNA target sequence for Nnt (NM_008710.2,3067-3085).
gaatgcctggtcagcttaa

SEQ ID NO: 610434 - DNA, 19 bp, Mus musculus
  siRNA target sequence for Nnt (NM_008710.2,3101-3119).
ggcgggagtgccctatgat

SEQ ID NO: 610435 - DNA, 19 bp, Mus musculus
  siRNA target sequence for Nnt (NM_008710.2,3102-3120).
gcgggagtgccctatgata

SEQ ID NO: 610436 - DNA, 19 bp, Mus musculus
  siRNA target sequence for Nnt (NM_008710.2,3103-3121).
cgggagtgccctatgatat

SEQ ID NO: 610437 - DNA, 19 bp, Mus musculus
  siRNA target sequence for Nnt (NM_008710.2,3104-3122).
gggagtgccctatgatatt

SEQ ID NO: 610438 - DNA, 19 bp, Mus musculus
  siRNA target sequence for Nnt (NM_008710.2,3106-3124).
gagtgccctatgatattgt

SEQ ID NO: 610439 - DNA, 19 bp, Mus musculus
  siRNA target sequence for Nnt (NM_008710.2,3110-3128).
gccctatgatattgtgtta

SEQ ID NO: 610440 - DNA, 19 bp, Mus musculus
  siRNA target sequence for Nnt (NM_008710.2,3140-3158).
gatcaacagtgattttcca

SEQ ID NO: 610441 - DNA, 19 bp, Mus musculus
  siRNA target sequence for Nnt (NM_008710.2,3164-3182).
cgacttggttcttgtcatt

SEQ ID NO: 610442 - DNA, 19 bp, Mus musculus
  siRNA target sequence for Nnt (NM_008710.2,3186-3204).
gcaaacgacactgtgaatt

SEQ ID NO: 610443 - DNA, 19 bp, Mus musculus
  siRNA target sequence for Nnt (NM_008710.2,3221-3239).
ccccaattctataattgca

SEQ ID NO: 610444 - DNA, 19 bp, Mus musculus
  siRNA target sequence for Nnt (NM_008710.2,3321-3339).
gacaatccgatcttctaca

SEQ ID NO: 610445 - DNA, 19 bp, Mus musculus
  siRNA target sequence for Nnt (NM_008710.2,3327-3345).
ccgatcttctacaaaccta

SEQ ID NO: 610446 - DNA, 19 bp, Mus musculus
  siRNA target sequence for Nnt (NM_008710.2,3328-3346).
cgatcttctacaaacctaa

SEQ ID NO: 610447 - DNA, 19 bp, Mus musculus
  siRNA target sequence for Nnt (NM_008710.2,3386-3404).
cgctctgcaggccaaagtt

SEQ ID NO: 610448 - DNA, 19 bp, Mus musculus
  siRNA target sequence for Nnt (NM_008710.2,3397-3415).
ccaaagttcgggaatccta

SEQ ID NO: 610449 - DNA, 19 bp, Mus musculus
  siRNA target sequence for Nnt (NM_008710.2,3398-3416).
caaagttcgggaatcctat

SEQ ID NO: 610450 - DNA, 19 bp, Mus musculus
  siRNA target sequence for Nnt (NM_008710.2,3402-3420).
gttcgggaatcctatcaga

SEQ ID NO: 610451 - DNA, 19 bp, Mus musculus
  siRNA target sequence for Aldrl6 (NM_019977.1,83-101).
ccagagatggccaaaagca

SEQ ID NO: 610452 - DNA, 19 bp, Mus musculus
  siRNA target sequence for Aldrl6 (NM_019977.1,84-102).
cagagatggccaaaagcaa

SEQ ID NO: 610453 - DNA, 19 bp, Mus musculus
  siRNA target sequence for Aldrl6 (NM_019977.1,104-122).
gacagcttccgaaactata

SEQ ID NO: 610454 - DNA, 19 bp, Mus musculus
  siRNA target sequence for Aldrl6 (NM_019977.1,106-124).
cagcttccgaaactatact

SEQ ID NO: 610455 - DNA, 19 bp, Mus musculus
  siRNA target sequence for Aldrl6 (NM_019977.1,109-127).
cttccgaaactatacttca

SEQ ID NO: 610456 - DNA, 19 bp, Mus musculus
  siRNA target sequence for Aldrl6 (NM_019977.1,222-240).
gcttctcttacaagaagat

SEQ ID NO: 610457 - DNA, 19 bp, Mus musculus
  siRNA target sequence for Aldrl6 (NM_019977.1,288-306).
ctgacccagacgtagattt

SEQ ID NO: 610458 - DNA, 19 bp, Mus musculus
  siRNA target sequence for Aldrl6 (NM_019977.1,491-509).
gtgttctgtgactctactt

SEQ ID NO: 610459 - DNA, 19 bp, Mus musculus
  siRNA target sequence for Aldrl6 (NM_019977.1,579-597).
gactagagaacgtccttat

SEQ ID NO: 610460 - DNA, 19 bp, Mus musculus
  siRNA target sequence for Aldrl6 (NM_019977.1,581-599).
ctagagaacgtccttatgt

SEQ ID NO: 610461 - DNA, 19 bp, Mus musculus
  siRNA target sequence for Aldrl6 (NM_019977.1,606-624).
gccatgatgagtacctata

SEQ ID NO: 610462 - DNA, 19 bp, Mus musculus
  siRNA target sequence for Aldrl6 (NM_019977.1,762-780).
gggtgcaagagttcaacaa

SEQ ID NO: 610463 - DNA, 19 bp, Mus musculus
  siRNA target sequence for Aldrl6 (NM_019977.1,764-782).
gtgcaagagttcaacaagt

SEQ ID NO: 610464 - DNA, 19 bp, Mus musculus
  siRNA target sequence for 4930563M21Rik (NM_183111.1,47-65).
gaaaagactgggttgtgaa

SEQ ID NO: 610465 - DNA, 19 bp, Mus musculus
  siRNA target sequence for 4930563M21Rik (NM_183111.1,56-74).
gggttgtgaagatatgcat

SEQ ID NO: 610466 - DNA, 19 bp, Mus musculus
  siRNA target sequence for 4930563M21Rik (NM_183111.1,181-199).
gcaaatcgtcactagttgt

SEQ ID NO: 610467 - DNA, 19 bp, Mus musculus
  siRNA target sequence for 4930563M21Rik (NM_183111.1,220-238).
ggatttttgctctcttgaa

SEQ ID NO: 610468 - DNA, 19 bp, Mus musculus
  siRNA target sequence for 4930563M21Rik (NM_183111.1,221-239).
gatttttgctctcttgaaa

SEQ ID NO: 610469 - DNA, 19 bp, Mus musculus
  siRNA target sequence for 4930563M21Rik (NM_183111.1,260-278).
ccaggatcatgaatacagt

SEQ ID NO: 610470 - DNA, 19 bp, Mus musculus
  siRNA target sequence for 4930563M21Rik (NM_183111.1,275-293).
cagtggcacacctcagaaa

SEQ ID NO: 610471 - DNA, 19 bp, Mus musculus
  siRNA target sequence for 4930563M21Rik (NM_183111.1,277-295).
gtggcacacctcagaaaaa

SEQ ID NO: 610472 - DNA, 19 bp, Mus musculus
  siRNA target sequence for 4930563M21Rik (NM_183111.1,338-356).
cattgatacgtttgaagaa

SEQ ID NO: 610473 - DNA, 19 bp, Mus musculus
  siRNA target sequence for 4930563M21Rik (NM_183111.1,472-490).
gcgtgcacacctttgaact

SEQ ID NO: 610474 - DNA, 19 bp, Mus musculus
  siRNA target sequence for 4930563M21Rik (NM_183111.1,476-494).
gcacacctttgaacttgat

SEQ ID NO: 610475 - DNA, 19 bp, Mus musculus
  siRNA target sequence for 4930563M21Rik (NM_183111.1,477-495).
cacacctttgaacttgata

SEQ ID NO: 610476 - DNA, 19 bp, Mus musculus
  siRNA target sequence for 4930563M21Rik (NM_183111.1,554-572).
ggagaagggaccattccta

SEQ ID NO: 610477 - DNA, 19 bp, Mus musculus
  siRNA target sequence for 4930563M21Rik (NM_183111.1,600-618).
ggccagggtcacaaaaata

SEQ ID NO: 610478 - DNA, 19 bp, Mus musculus
  siRNA target sequence for 4930563M21Rik (NM_183111.1,601-619).
gccagggtcacaaaaatat

SEQ ID NO: 610479 - DNA, 19 bp, Mus musculus
  siRNA target sequence for 4930563M21Rik (NM_183111.1,602-620).
ccagggtcacaaaaatatt

SEQ ID NO: 610480 - DNA, 19 bp, Mus musculus
  siRNA target sequence for 9930021D14Rik (NM_175682.2,399-417).
gtaccctggcccaaccaaa

SEQ ID NO: 610481 - DNA, 19 bp, Mus musculus
  siRNA target sequence for 9930021D14Rik (NM_175682.2,404-422).
ctggcccaaccaaactact

SEQ ID NO: 610482 - DNA, 19 bp, Mus musculus
  siRNA target sequence for 9930021D14Rik (NM_175682.2,507-525).
cagaacggctacatctgtt

SEQ ID NO: 610483 - DNA, 19 bp, Mus musculus
  siRNA target sequence for 9930021D14Rik (NM_175682.2,614-632).
ggcccaagagtcacatgta

SEQ ID NO: 610484 - DNA, 19 bp, Mus musculus
  siRNA target sequence for A930017N06Rik (NM_175522.2,373-391).
gtacagcgtgggtacttgt

SEQ ID NO: 610485 - DNA, 19 bp, Mus musculus
  siRNA target sequence for A930017N06Rik (NM_175522.2,820-838).
ccaacatcgtcaacataga

SEQ ID NO: 610486 - DNA, 19 bp, Mus musculus
  siRNA target sequence for A930017N06Rik (NM_175522.2,821-839).
caacatcgtcaacatagat

SEQ ID NO: 610487 - DNA, 19 bp, Mus musculus
  siRNA target sequence for A930017N06Rik (NM_175522.2,1068-1086).
caccaacgtagcatcctta

SEQ ID NO: 610488 - DNA, 19 bp, Mus musculus
  siRNA target sequence for A930017N06Rik (NM_175522.2,1448-1466).
gatccgcctcaccaatctt

SEQ ID NO: 610489 - DNA, 19 bp, Mus musculus
  siRNA target sequence for A930017N06Rik (NM_175522.2,1452-1470).
cgcctcaccaatctttaca

SEQ ID NO: 610490 - DNA, 19 bp, Mus musculus
  siRNA target sequence for A930017N06Rik (NM_175522.2,1625-1643).
ctgcctctttggtatggta

SEQ ID NO: 610491 - DNA, 19 bp, Mus musculus
  siRNA target sequence for A930017N06Rik (NM_175522.2,1647-1665).
gttctgggcgctgtctatt

SEQ ID NO: 610492 - DNA, 19 bp, Mus musculus
  siRNA target sequence for A930017N06Rik (NM_175522.2,1745-1763).
catcatcgagcttaagtat

SEQ ID NO: 610493 - DNA, 19 bp, Mus musculus
  siRNA target sequence for A930017N06Rik (NM_175522.2,1913-1931).
caccaaggggaactacatt

SEQ ID NO: 610494 - DNA, 19 bp, Mus musculus
  siRNA target sequence for A930017N06Rik (NM_175522.2,2179-2197).
gcttcctgtcccctgtata

SEQ ID NO: 610495 - DNA, 19 bp, Mus musculus
  siRNA target sequence for A930017N06Rik (NM_175522.2,2186-2204).
gtcccctgtatacaaagat

SEQ ID NO: 610496 - DNA, 19 bp, Mus musculus
  siRNA target sequence for A930017N06Rik (NM_175522.2,2458-2476).
gcgagcatcggcactcata

SEQ ID NO: 610497 - DNA, 19 bp, Mus musculus
  siRNA target sequence for Aass (NM_013930.2,266-284).
gggctacaaggtcttgata

SEQ ID NO: 610498 - DNA, 19 bp, Mus musculus
  siRNA target sequence for Aass (NM_013930.2,298-316).
gacgggccatccatgacaa

SEQ ID NO: 610499 - DNA, 19 bp, Mus musculus
  siRNA target sequence for Aass (NM_013930.2,326-344).
cagggctggtggcattctt

SEQ ID NO: 610500 - DNA, 19 bp, Mus musculus
  siRNA target sequence for Aass (NM_013930.2,367-385).
gtctgattttgggagtaaa

SEQ ID NO: 610501 - DNA, 19 bp, Mus musculus
  siRNA target sequence for Aass (NM_013930.2,388-406).
ggcctccagaggaaaaact

SEQ ID NO: 610502 - DNA, 19 bp, Mus musculus
  siRNA target sequence for Aass (NM_013930.2,494-512).
ggaaatccggctcattgat

SEQ ID NO: 610503 - DNA, 19 bp, Mus musculus
  siRNA target sequence for Aass (NM_013930.2,495-513).
gaaatccggctcattgatt

SEQ ID NO: 610504 - DNA, 19 bp, Mus musculus
  siRNA target sequence for Aass (NM_013930.2,501-519).
cggctcattgattatgaga

SEQ ID NO: 610505 - DNA, 19 bp, Mus musculus
  siRNA target sequence for Aass (NM_013930.2,502-520).
ggctcattgattatgagaa

SEQ ID NO: 610506 - DNA, 19 bp, Mus musculus
  siRNA target sequence for Aass (NM_013930.2,571-589).
gtgtggcaggaatgattaa

SEQ ID NO: 610507 - DNA, 19 bp, Mus musculus
  siRNA target sequence for Aass (NM_013930.2,575-593).
ggcaggaatgattaatatt

SEQ ID NO: 610508 - DNA, 19 bp, Mus musculus
  siRNA target sequence for Aass (NM_013930.2,576-594).
gcaggaatgattaatattt

SEQ ID NO: 610509 - DNA, 19 bp, Mus musculus
  siRNA target sequence for Aass (NM_013930.2,577-595).
caggaatgattaatatttt

SEQ ID NO: 610510 - DNA, 19 bp, Mus musculus
  siRNA target sequence for Aass (NM_013930.2,627-645).
ggacatcatacgcctttta

SEQ ID NO: 610511 - DNA, 19 bp, Mus musculus
  siRNA target sequence for Aass (NM_013930.2,628-646).
gacatcatacgccttttat

SEQ ID NO: 610512 - DNA, 19 bp, Mus musculus
  siRNA target sequence for Aass (NM_013930.2,654-672).
ggcatggctcacaactaca

SEQ ID NO: 610513 - DNA, 19 bp, Mus musculus
  siRNA target sequence for Aass (NM_013930.2,705-723).
gatgctggctatgaaatat

SEQ ID NO: 610514 - DNA, 19 bp, Mus musculus
  siRNA target sequence for Aass (NM_013930.2,717-735).
gaaatatctctgggtttaa

SEQ ID NO: 610515 - DNA, 19 bp, Mus musculus
  siRNA target sequence for Aass (NM_013930.2,728-746).
gggtttaatgccaaagtca

SEQ ID NO: 610516 - DNA, 19 bp, Mus musculus
  siRNA target sequence for Aass (NM_013930.2,745-763).
caataggacccttaacgtt

SEQ ID NO: 610517 - DNA, 19 bp, Mus musculus
  siRNA target sequence for Aass (NM_013930.2,775-793).
ggactggcaatgtatccaa

SEQ ID NO: 610518 - DNA, 19 bp, Mus musculus
  siRNA target sequence for Aass (NM_013930.2,834-852).
gtggagccccacgaattaa

SEQ ID NO: 610519 - DNA, 19 bp, Mus musculus
  siRNA target sequence for Aass (NM_013930.2,836-854).
ggagccccacgaattaaga

SEQ ID NO: 610520 - DNA, 19 bp, Mus musculus
  siRNA target sequence for Aass (NM_013930.2,842-860).
ccacgaattaagagaagtt

SEQ ID NO: 610521 - DNA, 19 bp, Mus musculus
  siRNA target sequence for Aass (NM_013930.2,843-861).
cacgaattaagagaagttt

SEQ ID NO: 610522 - DNA, 19 bp, Mus musculus
  siRNA target sequence for Aass (NM_013930.2,887-905).
gtatgggacggtgttaagt

SEQ ID NO: 610523 - DNA, 19 bp, Mus musculus
  siRNA target sequence for Aass (NM_013930.2,899-917).
gttaagtcgccatcatcat

SEQ ID NO: 610524 - DNA, 19 bp, Mus musculus
  siRNA target sequence for Aass (NM_013930.2,939-957).
gtgtacgatcccgtagaat

SEQ ID NO: 610525 - DNA, 19 bp, Mus musculus
  siRNA target sequence for Aass (NM_013930.2,948-966).
cccgtagaatacgagaaat

SEQ ID NO: 610526 - DNA, 19 bp, Mus musculus
  siRNA target sequence for Aass (NM_013930.2,950-968).
cgtagaatacgagaaatat

SEQ ID NO: 610527 - DNA, 19 bp, Mus musculus
  siRNA target sequence for Aass (NM_013930.2,974-992).
gcgctacacaagtcgtttt

SEQ ID NO: 610528 - DNA, 19 bp, Mus musculus
  siRNA target sequence for Aass (NM_013930.2,975-993).
cgctacacaagtcgtttta

SEQ ID NO: 610529 - DNA, 19 bp, Mus musculus
  siRNA target sequence for Aass (NM_013930.2,977-995).
ctacacaagtcgttttaat

SEQ ID NO: 610530 - DNA, 19 bp, Mus musculus
  siRNA target sequence for Aass (NM_013930.2,985-1003).
gtcgttttaatacagatat

SEQ ID NO: 610531 - DNA, 19 bp, Mus musculus
  siRNA target sequence for Aass (NM_013930.2,1005-1023).
gcgccctatacaacttgtt

SEQ ID NO: 610532 - DNA, 19 bp, Mus musculus
  siRNA target sequence for Aass (NM_013930.2,1006-1024).
cgccctatacaacttgttt

SEQ ID NO: 610533 - DNA, 19 bp, Mus musculus
  siRNA target sequence for Aass (NM_013930.2,1007-1025).
gccctatacaacttgttta

SEQ ID NO: 610534 - DNA, 19 bp, Mus musculus
  siRNA target sequence for Aass (NM_013930.2,1008-1026).
ccctatacaacttgtttaa

SEQ ID NO: 610535 - DNA, 19 bp, Mus musculus
  siRNA target sequence for Aass (NM_013930.2,1009-1027).
cctatacaacttgtttaat

SEQ ID NO: 610536 - DNA, 19 bp, Mus musculus
  siRNA target sequence for Aass (NM_013930.2,1033-1051).
gaatctactgggagcaaaa

SEQ ID NO: 610537 - DNA, 19 bp, Mus musculus
  siRNA target sequence for Aass (NM_013930.2,1109-1127).
ctcagttgttcctgttgaa

SEQ ID NO: 610538 - DNA, 19 bp, Mus musculus
  siRNA target sequence for Aass (NM_013930.2,1135-1153).
ctgaattaccacacaaact

SEQ ID NO: 610539 - DNA, 19 bp, Mus musculus
  siRNA target sequence for Aass (NM_013930.2,1157-1175).
ggcaatatgtgacatttca

SEQ ID NO: 610540 - DNA, 19 bp, Mus musculus
  siRNA target sequence for Aass (NM_013930.2,1181-1199).
cacgggagggtccatagat

SEQ ID NO: 610541 - DNA, 19 bp, Mus musculus
  siRNA target sequence for Aass (NM_013930.2,1183-1201).
cgggagggtccatagattt

SEQ ID NO: 610542 - DNA, 19 bp, Mus musculus
  siRNA target sequence for Aass (NM_013930.2,1186-1204).
gagggtccatagattttat

SEQ ID NO: 610543 - DNA, 19 bp, Mus musculus
  siRNA target sequence for Aass (NM_013930.2,1188-1206).
gggtccatagattttatga

SEQ ID NO: 610544 - DNA, 19 bp, Mus musculus
  siRNA target sequence for Aass (NM_013930.2,1190-1208).
gtccatagattttatgact

SEQ ID NO: 610545 - DNA, 19 bp, Mus musculus
  siRNA target sequence for Aass (NM_013930.2,1247-1265).
cgcagaccagcaaattatt

SEQ ID NO: 610546 - DNA, 19 bp, Mus musculus
  siRNA target sequence for Aass (NM_013930.2,1249-1267).
cagaccagcaaattattca

SEQ ID NO: 610547 - DNA, 19 bp, Mus musculus
  siRNA target sequence for Aass (NM_013930.2,1295-1313).
gatgtgttccattgacaat

SEQ ID NO: 610548 - DNA, 19 bp, Mus musculus
  siRNA target sequence for Aass (NM_013930.2,1334-1352).
cgaggctacggaatacttt

SEQ ID NO: 610549 - DNA, 19 bp, Mus musculus
  siRNA target sequence for Aass (NM_013930.2,1368-1386).
ccttatgttgaagaaatgt

SEQ ID NO: 610550 - DNA, 19 bp, Mus musculus
  siRNA target sequence for Aass (NM_013930.2,1374-1392).
gttgaagaaatgttgttat

SEQ ID NO: 610551 - DNA, 19 bp, Mus musculus
  siRNA target sequence for Aass (NM_013930.2,1388-1406).
gttatccgatgcatcacaa

SEQ ID NO: 610552 - DNA, 19 bp, Mus musculus
  siRNA target sequence for Aass (NM_013930.2,1436-1454).
ggtgcgagacgcagtgatt

SEQ ID NO: 610553 - DNA, 19 bp, Mus musculus
  siRNA target sequence for Aass (NM_013930.2,1437-1455).
gtgcgagacgcagtgatta

SEQ ID NO: 610554 - DNA, 19 bp, Mus musculus
  siRNA target sequence for Aass (NM_013930.2,1440-1458).
cgagacgcagtgattacgt

SEQ ID NO: 610555 - DNA, 19 bp, Mus musculus
  siRNA target sequence for Aass (NM_013930.2,1457-1475).
gtccaatggtctattgact

SEQ ID NO: 610556 - DNA, 19 bp, Mus musculus
  siRNA target sequence for Aass (NM_013930.2,1464-1482).
ggtctattgactgacaaat

SEQ ID NO: 610557 - DNA, 19 bp, Mus musculus
  siRNA target sequence for Aass (NM_013930.2,1510-1528).
gcagagaacgcattcaatt

SEQ ID NO: 610558 - DNA, 19 bp, Mus musculus
  siRNA target sequence for Aass (NM_013930.2,1518-1536).
cgcattcaattcctttcaa

SEQ ID NO: 610559 - DNA, 19 bp, Mus musculus
  siRNA target sequence for Aass (NM_013930.2,1519-1537).
gcattcaattcctttcaat

SEQ ID NO: 610560 - DNA, 19 bp, Mus musculus
  siRNA target sequence for Aass (NM_013930.2,1524-1542).
caattcctttcaatgagta

SEQ ID NO: 610561 - DNA, 19 bp, Mus musculus
  siRNA target sequence for Aass (NM_013930.2,1540-1558).
gtaccaagaagaaggtttt

SEQ ID NO: 610562 - DNA, 19 bp, Mus musculus
  siRNA target sequence for Aass (NM_013930.2,1562-1580).
ccttgggtctggctatgta

SEQ ID NO: 610563 - DNA, 19 bp, Mus musculus
  siRNA target sequence for Aass (NM_013930.2,1563-1581).
cttgggtctggctatgtat

SEQ ID NO: 610564 - DNA, 19 bp, Mus musculus
  siRNA target sequence for Aass (NM_013930.2,1585-1603).
ggcctgttttggaatatct

SEQ ID NO: 610565 - DNA, 19 bp, Mus musculus
  siRNA target sequence for Aass (NM_013930.2,1602-1620).
ctgtcaagagacaacaata

SEQ ID NO: 610566 - DNA, 19 bp, Mus musculus
  siRNA target sequence for Aass (NM_013930.2,1604-1622).
gtcaagagacaacaatata

SEQ ID NO: 610567 - DNA, 19 bp, Mus musculus
  siRNA target sequence for Aass (NM_013930.2,1606-1624).
caagagacaacaatataga

SEQ ID NO: 610568 - DNA, 19 bp, Mus musculus
  siRNA target sequence for Aass (NM_013930.2,1639-1657).
ctgacatgaccaaccaaat

SEQ ID NO: 610569 - DNA, 19 bp, Mus musculus
  siRNA target sequence for Aass (NM_013930.2,1805-1823).
catcgaaagcagggttaat

SEQ ID NO: 610570 - DNA, 19 bp, Mus musculus
  siRNA target sequence for Aass (NM_013930.2,1846-1864).
caccagccatgaaagaact

SEQ ID NO: 610571 - DNA, 19 bp, Mus musculus
  siRNA target sequence for Aass (NM_013930.2,1978-1996).
ccacggttgagtcttatgt

SEQ ID NO: 610572 - DNA, 19 bp, Mus musculus
  siRNA target sequence for Aass (NM_013930.2,1979-1997).
cacggttgagtcttatgtt

SEQ ID NO: 610573 - DNA, 19 bp, Mus musculus
  siRNA target sequence for Aass (NM_013930.2,2040-2058).
cccttgcgatacaaattca

SEQ ID NO: 610574 - DNA, 19 bp, Mus musculus
  siRNA target sequence for Aass (NM_013930.2,2065-2083).
gtccagtgggagtcttgat

SEQ ID NO: 610575 - DNA, 19 bp, Mus musculus
  siRNA target sequence for Aass (NM_013930.2,2073-2091).
ggagtcttgatgaacataa

SEQ ID NO: 610576 - DNA, 19 bp, Mus musculus
  siRNA target sequence for Aass (NM_013930.2,2074-2092).
gagtcttgatgaacataat

SEQ ID NO: 610577 - DNA, 19 bp, Mus musculus
  siRNA target sequence for Aass (NM_013930.2,2135-2153).
gacagggggagtctctttt

SEQ ID NO: 610578 - DNA, 19 bp, Mus musculus
  siRNA target sequence for Aass (NM_013930.2,2163-2181).
gtcacacccatggattact

SEQ ID NO: 610579 - DNA, 19 bp, Mus musculus
  siRNA target sequence for Aass (NM_013930.2,2208-2226).
cctaacagagatagcataa

SEQ ID NO: 610580 - DNA, 19 bp, Mus musculus
  siRNA target sequence for Aass (NM_013930.2,2251-2269).
catctgcccatacattatt

SEQ ID NO: 610581 - DNA, 19 bp, Mus musculus
  siRNA target sequence for Aass (NM_013930.2,2280-2298).
ctgagatataagggatatt

SEQ ID NO: 610582 - DNA, 19 bp, Mus musculus
  siRNA target sequence for Aass (NM_013930.2,2284-2302).
gatataagggatattccaa

SEQ ID NO: 610583 - DNA, 19 bp, Mus musculus
  siRNA target sequence for Aass (NM_013930.2,2428-2446).
ccccatgcgagaagcttaa

SEQ ID NO: 610584 - DNA, 19 bp, Mus musculus
  siRNA target sequence for Aass (NM_013930.2,2431-2449).
catgcgagaagcttaagga

SEQ ID NO: 610585 - DNA, 19 bp, Mus musculus
  siRNA target sequence for Aass (NM_013930.2,2564-2582).
caagcacttggtctcaaaa

SEQ ID NO: 610586 - DNA, 19 bp, Mus musculus
  siRNA target sequence for Aass (NM_013930.2,2652-2670).
ggacatttagaaaataaga

SEQ ID NO: 610587 - DNA, 19 bp, Mus musculus
  siRNA target sequence for Aass (NM_013930.2,2672-2690).
cattgatctcgtggtttat

SEQ ID NO: 610588 - DNA, 19 bp, Mus musculus
  siRNA target sequence for Aass (NM_013930.2,2824-2842).
caatattggagcggattaa

SEQ ID NO: 610589 - DNA, 19 bp, Mus musculus
  siRNA target sequence for Aass (NM_013930.2,2868-2886).
cagagtacaatcaagctat

SEQ ID NO: 610590 - DNA, 19 bp, Mus musculus
  siRNA target sequence for Cat (NM_009804.1,183-201).
gaacccaataggagataaa

SEQ ID NO: 610591 - DNA, 19 bp, Mus musculus
  siRNA target sequence for Cat (NM_009804.1,186-204).
cccaataggagataaactt

SEQ ID NO: 610592 - DNA, 19 bp, Mus musculus
  siRNA target sequence for Cat (NM_009804.1,187-205).
ccaataggagataaactta

SEQ ID NO: 610593 - DNA, 19 bp, Mus musculus
  siRNA target sequence for Cat (NM_009804.1,343-361).
gaggtcacccacgatatca

SEQ ID NO: 610594 - DNA, 19 bp, Mus musculus
  siRNA target sequence for Cat (NM_009804.1,381-399).
ggtgtttgagcatattgga

SEQ ID NO: 610595 - DNA, 19 bp, Mus musculus
  siRNA target sequence for Cat (NM_009804.1,556-574).
gatgccatattgtttccat

SEQ ID NO: 610596 - DNA, 19 bp, Mus musculus
  siRNA target sequence for Cat (NM_009804.1,567-585).
gtttccatcctttatccat

SEQ ID NO: 610597 - DNA, 19 bp, Mus musculus
  siRNA target sequence for Cat (NM_009804.1,744-762).
cttcaagttggttaatgca

SEQ ID NO: 610598 - DNA, 19 bp, Mus musculus
  siRNA target sequence for Cat (NM_009804.1,763-781).
gatggagaggcagtctatt

SEQ ID NO: 610599 - DNA, 19 bp, Mus musculus
  siRNA target sequence for Cat (NM_009804.1,798-816).
gaccgaccagggcatcaaa

SEQ ID NO: 610600 - DNA, 19 bp, Mus musculus
  siRNA target sequence for Cat (NM_009804.1,800-818).
ccgaccagggcatcaaaaa

SEQ ID NO: 610601 - DNA, 19 bp, Mus musculus
  siRNA target sequence for Cat (NM_009804.1,802-820).
gaccagggcatcaaaaact

SEQ ID NO: 610602 - DNA, 19 bp, Mus musculus
  siRNA target sequence for Cat (NM_009804.1,868-886).
ggcctccgagatcttttca

SEQ ID NO: 610603 - DNA, 19 bp, Mus musculus
  siRNA target sequence for Cat (NM_009804.1,869-887).
gcctccgagatcttttcaa

SEQ ID NO: 610604 - DNA, 19 bp, Mus musculus
  siRNA target sequence for Cat (NM_009804.1,890-908).
ccatcgccaatggcaatta

SEQ ID NO: 610605 - DNA, 19 bp, Mus musculus
  siRNA target sequence for Cat (NM_009804.1,910-928).
ccgtcctggacgttttaca

SEQ ID NO: 610606 - DNA, 19 bp, Mus musculus
  siRNA target sequence for Cat (NM_009804.1,911-929).
cgtcctggacgttttacat

SEQ ID NO: 610607 - DNA, 19 bp, Mus musculus
  siRNA target sequence for Cat (NM_009804.1,1005-1023).
ggactaccctcttatacca

SEQ ID NO: 610608 - DNA, 19 bp, Mus musculus
  siRNA target sequence for Cat (NM_009804.1,1084-1102).
gcttttgacccaagcaata

SEQ ID NO: 610609 - DNA, 19 bp, Mus musculus
  siRNA target sequence for Cat (NM_009804.1,1181-1199).
gcctgggacccaactatct

SEQ ID NO: 610610 - DNA, 19 bp, Mus musculus
  siRNA target sequence for Cat (NM_009804.1,1353-1371).
cgtccagtgcgctgtagat

SEQ ID NO: 610611 - DNA, 19 bp, Mus musculus
  siRNA target sequence for Cat (NM_009804.1,1359-1377).
gtgcgctgtagatgtgaaa

SEQ ID NO: 610612 - DNA, 19 bp, Mus musculus
  siRNA target sequence for Cat (NM_009804.1,1369-1387).
gatgtgaaacgcttcaaca

SEQ ID NO: 610613 - DNA, 19 bp, Mus musculus
  siRNA target sequence for Cat (NM_009804.1,1409-1427).
ctcaggtgcggacattcta

SEQ ID NO: 610614 - DNA, 19 bp, Mus musculus
  siRNA target sequence for Cat (NM_009804.1,1414-1432).
gtgcggacattctacacaa

SEQ ID NO: 610615 - DNA, 19 bp, Mus musculus
  siRNA target sequence for Cat (NM_009804.1,1491-1509).
ggacgctcagcttttcatt

SEQ ID NO: 610616 - DNA, 19 bp, Mus musculus
  siRNA target sequence for Cat (NM_009804.1,1600-1618).
cctaagaacgcaattcaca

SEQ ID NO: 610617 - DNA, 19 bp, Mus musculus
  siRNA target sequence for Cat (NM_009804.1,1645-1663).
gctgcgaagggaaaagcta

SEQ ID NO: 610618 - DNA, 19 bp, Mus musculus
  siRNA target sequence for Cygb (NM_030206.1,556-574).
cttcggccaagcagtactt

SEQ ID NO: 610619 - DNA, 19 bp, Mus musculus
  siRNA target sequence for Cygb (NM_030206.1,569-587).
gtacttcagccagtttaga

SEQ ID NO: 610620 - DNA, 19 bp, Mus musculus
  siRNA target sequence for Cygb (NM_030206.1,749-767).
ggtggaacctatgtacttt

SEQ ID NO: 610621 - DNA, 19 bp, Mus musculus
  siRNA target sequence for Cygb (NM_030206.1,750-768).
gtggaacctatgtacttta

SEQ ID NO: 610622 - DNA, 19 bp, Mus musculus
  siRNA target sequence for Cygb (NM_030206.1,753-771).
gaacctatgtactttaaga

SEQ ID NO: 610623 - DNA, 19 bp, Mus musculus
  siRNA target sequence for Cygb (NM_030206.1,794-812).
ggtgatcgccgaggaattt

SEQ ID NO: 610624 - DNA, 19 bp, Mus musculus
  siRNA target sequence for Cygb (NM_030206.1,855-873).
ctgcggggtctcatctaca

SEQ ID NO: 610625 - DNA, 19 bp, Mus musculus
  siRNA target sequence for Epx (NM_007946.1,389-407).
ggttcaggccgctgattat

SEQ ID NO: 610626 - DNA, 19 bp, Mus musculus
  siRNA target sequence for Epx (NM_007946.1,390-408).
gttcaggccgctgattata

SEQ ID NO: 610627 - DNA, 19 bp, Mus musculus
  siRNA target sequence for Epx (NM_007946.1,443-461).
gcagccacggggatctaga

SEQ ID NO: 610628 - DNA, 19 bp, Mus musculus
  siRNA target sequence for Epx (NM_007946.1,546-564).
gagaggtgcagcaacaagt

SEQ ID NO: 610629 - DNA, 19 bp, Mus musculus
  siRNA target sequence for Epx (NM_007946.1,557-575).
caacaagtaccgaaccata

SEQ ID NO: 610630 - DNA, 19 bp, Mus musculus
  siRNA target sequence for Epx (NM_007946.1,560-578).
caagtaccgaaccataaca

SEQ ID NO: 610631 - DNA, 19 bp, Mus musculus
  siRNA target sequence for Epx (NM_007946.1,729-747).
cgggatgtctccaatcaga

SEQ ID NO: 610632 - DNA, 19 bp, Mus musculus
  siRNA target sequence for Epx (NM_007946.1,752-770).
gcgcttccccagcaagaaa

SEQ ID NO: 610633 - DNA, 19 bp, Mus musculus
  siRNA target sequence for Epx (NM_007946.1,1095-1113).
gccctgcggctccgtaata

SEQ ID NO: 610634 - DNA, 19 bp, Mus musculus
  siRNA target sequence for Epx (NM_007946.1,1098-1116).
ctgcggctccgtaatagga

SEQ ID NO: 610635 - DNA, 19 bp, Mus musculus
  siRNA target sequence for Epx (NM_007946.1,1254-1272).
gacactcggtcaagtgaaa

SEQ ID NO: 610636 - DNA, 19 bp, Mus musculus
  siRNA target sequence for Epx (NM_007946.1,1288-1306).
ccttgcacacgctgtttgt

SEQ ID NO: 610637 - DNA, 19 bp, Mus musculus
  siRNA target sequence for Epx (NM_007946.1,1479-1497).
ccctacagagggtattgct

SEQ ID NO: 610638 - DNA, 19 bp, Mus musculus
  siRNA target sequence for Epx (NM_007946.1,1510-1528).
cccgtgtagccaatgtttt

SEQ ID NO: 610639 - DNA, 19 bp, Mus musculus
  siRNA target sequence for Epx (NM_007946.1,1512-1530).
cgtgtagccaatgttttca

SEQ ID NO: 610640 - DNA, 19 bp, Mus musculus
  siRNA target sequence for Epx (NM_007946.1,1624-1642).
cgcttagctctgtattctt

SEQ ID NO: 610641 - DNA, 19 bp, Mus musculus
  siRNA target sequence for Epx (NM_007946.1,1645-1663).
ccagctggcgaatcataca

SEQ ID NO: 610642 - DNA, 19 bp, Mus musculus
  siRNA target sequence for Epx (NM_007946.1,1646-1664).
cagctggcgaatcatacat

SEQ ID NO: 610643 - DNA, 19 bp, Mus musculus
  siRNA target sequence for Epx (NM_007946.1,1648-1666).
gctggcgaatcatacatga

SEQ ID NO: 610644 - DNA, 19 bp, Mus musculus
  siRNA target sequence for Epx (NM_007946.1,1649-1667).
ctggcgaatcatacatgaa

SEQ ID NO: 610645 - DNA, 19 bp, Mus musculus
  siRNA target sequence for Epx (NM_007946.1,1895-1913).
gcttagtcgggtgctaaaa

SEQ ID NO: 610646 - DNA, 19 bp, Mus musculus
  siRNA target sequence for Epx (NM_007946.1,1896-1914).
cttagtcgggtgctaaaaa

SEQ ID NO: 610647 - DNA, 19 bp, Mus musculus
  siRNA target sequence for Epx (NM_007946.1,1900-1918).
gtcgggtgctaaaaaatca

SEQ ID NO: 610648 - DNA, 19 bp, Mus musculus
  siRNA target sequence for Epx (NM_007946.1,1919-1937).
ggatttggcaaggaagttt

SEQ ID NO: 610649 - DNA, 19 bp, Mus musculus
  siRNA target sequence for Epx (NM_007946.1,1949-1967).
caagacgcccgacaacatt

SEQ ID NO: 610650 - DNA, 19 bp, Mus musculus
  siRNA target sequence for Epx (NM_007946.1,2086-2104).
ggcagaaatggggagtttt

SEQ ID NO: 610651 - DNA, 19 bp, Mus musculus
  siRNA target sequence for Epx (NM_007946.1,2124-2142).
gccctgaggcgaatctctt

SEQ ID NO: 610652 - DNA, 19 bp, Mus musculus
  siRNA target sequence for Epx (NM_007946.1,2138-2156).
ctctttatctcggattgta

SEQ ID NO: 610653 - DNA, 19 bp, Mus musculus
  siRNA target sequence for Epx (NM_007946.1,2148-2166).
cggattgtatgcgacaata

SEQ ID NO: 610654 - DNA, 19 bp, Mus musculus
  siRNA target sequence for Epx (NM_007946.1,2150-2168).
gattgtatgcgacaatact

SEQ ID NO: 610655 - DNA, 19 bp, Mus musculus
  siRNA target sequence for Epx (NM_007946.1,2236-2254).
gccgtattcccaagttgaa

SEQ ID NO: 610656 - DNA, 19 bp, Mus musculus
  siRNA target sequence for Faim (NM_011810.2,178-196).
ctgtttgggacgtagcatt

SEQ ID NO: 610657 - DNA, 19 bp, Mus musculus
  siRNA target sequence for Faim (NM_011810.2,180-198).
gtttgggacgtagcattaa

SEQ ID NO: 610658 - DNA, 19 bp, Mus musculus
  siRNA target sequence for Faim (NM_011810.2,184-202).
gggacgtagcattaagtga

SEQ ID NO: 610659 - DNA, 19 bp, Mus musculus
  siRNA target sequence for Faim (NM_011810.2,283-301).
gaagagagtggatgttcaa

SEQ ID NO: 610660 - DNA, 19 bp, Mus musculus
  siRNA target sequence for Faim (NM_011810.2,286-304).
gagagtggatgttcaagtt

SEQ ID NO: 610661 - DNA, 19 bp, Mus musculus
  siRNA target sequence for Faim (NM_011810.2,344-362).
caaagccaccatcaatata

SEQ ID NO: 610662 - DNA, 19 bp, Mus musculus
  siRNA target sequence for Faim (NM_011810.2,356-374).
caatatagatgccataagt

SEQ ID NO: 610663 - DNA, 19 bp, Mus musculus
  siRNA target sequence for Faim (NM_011810.2,386-404).
cgagtacacgctggaaatt

SEQ ID NO: 610664 - DNA, 19 bp, Mus musculus
  siRNA target sequence for Gpx1 (NM_008160.1,295-313).
gaatgaagagattctgaat

SEQ ID NO: 610665 - DNA, 19 bp, Mus musculus
  siRNA target sequence for Gpx1 (NM_008160.1,339-357).
gcgggttcgagcccaattt

SEQ ID NO: 610666 - DNA, 19 bp, Mus musculus
  siRNA target sequence for Gpx1 (NM_008160.1,340-358).
cgggttcgagcccaatttt

SEQ ID NO: 610667 - DNA, 19 bp, Mus musculus
  siRNA target sequence for Gpx1 (NM_008160.1,341-359).
gggttcgagcccaatttta

SEQ ID NO: 610668 - DNA, 19 bp, Mus musculus
  siRNA target sequence for Gpx1 (NM_008160.1,343-361).
gttcgagcccaattttaca

SEQ ID NO: 610669 - DNA, 19 bp, Mus musculus
  siRNA target sequence for Gpx1 (NM_008160.1,347-365).
gagcccaattttacattgt

SEQ ID NO: 610670 - DNA, 19 bp, Mus musculus
  siRNA target sequence for Gpx1 (NM_008160.1,349-367).
gcccaattttacattgttt

SEQ ID NO: 610671 - DNA, 19 bp, Mus musculus
  siRNA target sequence for Gpx1 (NM_008160.1,351-369).
ccaattttacattgtttga

SEQ ID NO: 610672 - DNA, 19 bp, Mus musculus
  siRNA target sequence for Gpx1 (NM_008160.1,395-413).
gctcacccgctctttacct

SEQ ID NO: 610673 - DNA, 19 bp, Mus musculus
  siRNA target sequence for Gpx1 (NM_008160.1,396-414).
ctcacccgctctttacctt

SEQ ID NO: 610674 - DNA, 19 bp, Mus musculus
  siRNA target sequence for Gpx1 (NM_008160.1,470-488).
cccaagtacatcatttggt

SEQ ID NO: 610675 - DNA, 19 bp, Mus musculus
  siRNA target sequence for Gpx1 (NM_008160.1,589-607).
cgacatcgaacctgacata

SEQ ID NO: 610676 - DNA, 19 bp, Mus musculus
  siRNA target sequence for Gpx1 (NM_008160.1,592-610).
catcgaacctgacatagaa

SEQ ID NO: 610677 - DNA, 19 bp, Mus musculus
  siRNA target sequence for Gpx3 (NM_008161.1,109-127).
ctgccatggcggtatgagt

SEQ ID NO: 610678 - DNA, 19 bp, Mus musculus
  siRNA target sequence for Gpx3 (NM_008161.1,156-174).
ccatcgatggggaggaata

SEQ ID NO: 610679 - DNA, 19 bp, Mus musculus
  siRNA target sequence for Gpx3 (NM_008161.1,160-178).
cgatggggaggaatacatt

SEQ ID NO: 610680 - DNA, 19 bp, Mus musculus
  siRNA target sequence for Gpx3 (NM_008161.1,164-182).
ggggaggaatacattcctt

SEQ ID NO: 610681 - DNA, 19 bp, Mus musculus
  siRNA target sequence for Gpx3 (NM_008161.1,234-252).
gaggtctgacagaccaata

SEQ ID NO: 610682 - DNA, 19 bp, Mus musculus
  siRNA target sequence for Gpx3 (NM_008161.1,345-363).
gcgagaactcggagatact

SEQ ID NO: 610683 - DNA, 19 bp, Mus musculus
  siRNA target sequence for Gpx3 (NM_008161.1,364-382).
ccccagtctcaagtatgtt

SEQ ID NO: 610684 - DNA, 19 bp, Mus musculus
  siRNA target sequence for Gpx3 (NM_008161.1,392-410).
gggggctttgtgcctaatt

SEQ ID NO: 610685 - DNA, 19 bp, Mus musculus
  siRNA target sequence for Gpx3 (NM_008161.1,644-662).
gacatcctgtcttacatga

SEQ ID NO: 610686 - DNA, 19 bp, Mus musculus
  siRNA target sequence for Gpx5 (NM_010343.1,34-52).
cagagttaagagtcttcta

SEQ ID NO: 610687 - DNA, 19 bp, Mus musculus
  siRNA target sequence for Gpx5 (NM_010343.1,97-115).
ggccggaaaagatgaagat

SEQ ID NO: 610688 - DNA, 19 bp, Mus musculus
  siRNA target sequence for Gpx5 (NM_010343.1,225-243).
gtcaatgtggctacctatt

SEQ ID NO: 610689 - DNA, 19 bp, Mus musculus
  siRNA target sequence for Gpx5 (NM_010343.1,238-256).
cctattgcggtctgacaat

SEQ ID NO: 610690 - DNA, 19 bp, Mus musculus
  siRNA target sequence for Gpx5 (NM_010343.1,345-363).
caagaaccaggagacaatt

SEQ ID NO: 610691 - DNA, 19 bp, Mus musculus
  siRNA target sequence for Gpx5 (NM_010343.1,386-404).
gtatgttcgtccaggaaaa

SEQ ID NO: 610692 - DNA, 19 bp, Mus musculus
  siRNA target sequence for Gpx5 (NM_010343.1,399-417).
ggaaaagggtttttaccta

SEQ ID NO: 610693 - DNA, 19 bp, Mus musculus
  siRNA target sequence for Gpx5 (NM_010343.1,439-457).
gggatgtaaatggtgaaaa

SEQ ID NO: 610694 - DNA, 19 bp, Mus musculus
  siRNA target sequence for Gpx5 (NM_010343.1,451-469).
gtgaaaacgagcagaaaat

SEQ ID NO: 610695 - DNA, 19 bp, Mus musculus
  siRNA target sequence for Gpx5 (NM_010343.1,544-562).
caataaaagtccatgacat

SEQ ID NO: 610696 - DNA, 19 bp, Mus musculus
  siRNA target sequence for Gpx5 (NM_010343.1,663-681).
gcgtacctgagccatttca

SEQ ID NO: 610697 - DNA, 19 bp, Mus musculus
  siRNA target sequence for Gpx5 (NM_010343.1,665-683).
gtacctgagccatttcaaa

SEQ ID NO: 610698 - DNA, 19 bp, Mus musculus
  siRNA target sequence for Gpx5 (NM_010343.1,671-689).
gagccatttcaaaaccata

SEQ ID NO: 610699 - DNA, 19 bp, Mus musculus
  siRNA target sequence for Gpx6 (NM_145451.1,56-74).
ctgtcttttctcattgttt

SEQ ID NO: 610700 - DNA, 19 bp, Mus musculus
  siRNA target sequence for Gpx6 (NM_145451.1,99-117).
ctgaatcctcaaaaatcga

SEQ ID NO: 610701 - DNA, 19 bp, Mus musculus
  siRNA target sequence for Gpx6 (NM_145451.1,142-160).
ctggcaccgtctatgagta

SEQ ID NO: 610702 - DNA, 19 bp, Mus musculus
  siRNA target sequence for Lpo (NM_080420.1,537-555).
cccgggacaggctgaagat

SEQ ID NO: 610703 - DNA, 19 bp, Mus musculus
  siRNA target sequence for Lpo (NM_080420.1,558-576).
ccatgacaaccaagataca

SEQ ID NO: 610704 - DNA, 19 bp, Mus musculus
  siRNA target sequence for Lpo (NM_080420.1,583-601).
ccgtcatctgtcagattat

SEQ ID NO: 610705 - DNA, 19 bp, Mus musculus
  siRNA target sequence for Lpo (NM_080420.1,585-603).
gtcatctgtcagattatct

SEQ ID NO: 610706 - DNA, 19 bp, Mus musculus
  siRNA target sequence for Lpo (NM_080420.1,680-698).
cagtttctcaccaatgtca

SEQ ID NO: 610707 - DNA, 19 bp, Mus musculus
  siRNA target sequence for Lpo (NM_080420.1,704-722).
caaggcctggacttgactt

SEQ ID NO: 610708 - DNA, 19 bp, Mus musculus
  siRNA target sequence for Lpo (NM_080420.1,752-770).
cctgctccaacaatgactt

SEQ ID NO: 610709 - DNA, 19 bp, Mus musculus
  siRNA target sequence for Lpo (NM_080420.1,970-988).
gattgcagcctatctgaat

SEQ ID NO: 610710 - DNA, 19 bp, Mus musculus
  siRNA target sequence for Lpo (NM_080420.1,1163-1181).
cctggtgaccctaaattaa

SEQ ID NO: 610711 - DNA, 19 bp, Mus musculus
  siRNA target sequence for Lpo (NM_080420.1,1164-1182).
ctggtgaccctaaattaaa

SEQ ID NO: 610712 - DNA, 19 bp, Mus musculus
  siRNA target sequence for Lpo (NM_080420.1,1166-1184).
ggtgaccctaaattaaaga

SEQ ID NO: 610713 - DNA, 19 bp, Mus musculus
  siRNA target sequence for Lpo (NM_080420.1,1321-1339).
cctggcaaatcgacttaga

SEQ ID NO: 610714 - DNA, 19 bp, Mus musculus
  siRNA target sequence for Lpo (NM_080420.1,1322-1340).
ctggcaaatcgacttagaa

SEQ ID NO: 610715 - DNA, 19 bp, Mus musculus
  siRNA target sequence for Lpo (NM_080420.1,1357-1375).
gggcctcatggctgtcaat

SEQ ID NO: 610716 - DNA, 19 bp, Mus musculus
  siRNA target sequence for Lpo (NM_080420.1,1406-1424).
ccgcctttcgtcaaaatga

SEQ ID NO: 610717 - DNA, 19 bp, Mus musculus
  siRNA target sequence for Lpo (NM_080420.1,1407-1425).
cgcctttcgtcaaaatgaa

SEQ ID NO: 610718 - DNA, 19 bp, Mus musculus
  siRNA target sequence for Lpo (NM_080420.1,1431-1449).
gcccctgcgaggtcatcaa

SEQ ID NO: 610719 - DNA, 19 bp, Mus musculus
  siRNA target sequence for Lpo (NM_080420.1,1549-1567).
ccggttggccacagaacta

SEQ ID NO: 610720 - DNA, 19 bp, Mus musculus
  siRNA target sequence for Lpo (NM_080420.1,1550-1568).
cggttggccacagaactaa

SEQ ID NO: 610721 - DNA, 19 bp, Mus musculus
  siRNA target sequence for Lpo (NM_080420.1,1627-1645).
gggagccttcatacagatt

SEQ ID NO: 610722 - DNA, 19 bp, Mus musculus
  siRNA target sequence for Lpo (NM_080420.1,1628-1646).
ggagccttcatacagatta

SEQ ID NO: 610723 - DNA, 19 bp, Mus musculus
  siRNA target sequence for Lpo (NM_080420.1,1631-1649).
gccttcatacagattacca

SEQ ID NO: 610724 - DNA, 19 bp, Mus musculus
  siRNA target sequence for Lpo (NM_080420.1,1696-1714).
gtggattcccccataccaa

SEQ ID NO: 610725 - DNA, 19 bp, Mus musculus
  siRNA target sequence for Lpo (NM_080420.1,1705-1723).
cccataccaaggctacaat

SEQ ID NO: 610726 - DNA, 19 bp, Mus musculus
  siRNA target sequence for Lpo (NM_080420.1,1730-1748).
gtagacccccgaatttcca

SEQ ID NO: 610727 - DNA, 19 bp, Mus musculus
  siRNA target sequence for Lpo (NM_080420.1,1737-1755).
cccgaatttccaatgtctt

SEQ ID NO: 610728 - DNA, 19 bp, Mus musculus
  siRNA target sequence for Lpo (NM_080420.1,1804-1822).
ccgcctagatgagaattat

SEQ ID NO: 610729 - DNA, 19 bp, Mus musculus
  siRNA target sequence for Lpo (NM_080420.1,1806-1824).
gcctagatgagaattatca

SEQ ID NO: 610730 - DNA, 19 bp, Mus musculus
  siRNA target sequence for Mms19l (NM_028152.2,76-94).
gtggcctcgtgcaagactt

SEQ ID NO: 610731 - DNA, 19 bp, Mus musculus
  siRNA target sequence for Mms19l (NM_028152.2,149-167).
cggtggctatacagtgtta

SEQ ID NO: 610732 - DNA, 19 bp, Mus musculus
  siRNA target sequence for Mms19l (NM_028152.2,151-169).
gtggctatacagtgttaca

SEQ ID NO: 610733 - DNA, 19 bp, Mus musculus
  siRNA target sequence for Mms19l (NM_028152.2,500-518).
catgcgatcacgagaagaa

SEQ ID NO: 610734 - DNA, 19 bp, Mus musculus
  siRNA target sequence for Mms19l (NM_028152.2,649-667).
gacctttcgtggaagagtt

SEQ ID NO: 610735 - DNA, 19 bp, Mus musculus
  siRNA target sequence for Mms19l (NM_028152.2,651-669).
cctttcgtggaagagttat

SEQ ID NO: 610736 - DNA, 19 bp, Mus musculus
  siRNA target sequence for Mms19l (NM_028152.2,652-670).
ctttcgtggaagagttatt

SEQ ID NO: 610737 - DNA, 19 bp, Mus musculus
  siRNA target sequence for Mms19l (NM_028152.2,656-674).
cgtggaagagttatttgaa

SEQ ID NO: 610738 - DNA, 19 bp, Mus musculus
  siRNA target sequence for Mms19l (NM_028152.2,685-703).
gttatttccctattgattt

SEQ ID NO: 610739 - DNA, 19 bp, Mus musculus
  siRNA target sequence for Mms19l (NM_028152.2,709-727).
ctccgcctaacgatcctta

SEQ ID NO: 610740 - DNA, 19 bp, Mus musculus
  siRNA target sequence for Mms19l (NM_028152.2,784-802).
cgcgctttgccgagttctt

SEQ ID NO: 610741 - DNA, 19 bp, Mus musculus
  siRNA target sequence for Mms19l (NM_028152.2,785-803).
gcgctttgccgagttctta

SEQ ID NO: 610742 - DNA, 19 bp, Mus musculus
  siRNA target sequence for Mms19l (NM_028152.2,787-805).
gctttgccgagttcttact

SEQ ID NO: 610743 - DNA, 19 bp, Mus musculus
  siRNA target sequence for Mms19l (NM_028152.2,800-818).
cttactgcctctgctaatt

SEQ ID NO: 610744 - DNA, 19 bp, Mus musculus
  siRNA target sequence for Mms19l (NM_028152.2,806-824).
gcctctgctaattgagaaa

SEQ ID NO: 610745 - DNA, 19 bp, Mus musculus
  siRNA target sequence for Mms19l (NM_028152.2,808-826).
ctctgctaattgagaaagt

SEQ ID NO: 610746 - DNA, 19 bp, Mus musculus
  siRNA target sequence for Mms19l (NM_028152.2,827-845).
ggattcggagattttaagt

SEQ ID NO: 610747 - DNA, 19 bp, Mus musculus
  siRNA target sequence for Mms19l (NM_028152.2,937-955).
ccatccgtagagaggtttt

SEQ ID NO: 610748 - DNA, 19 bp, Mus musculus
  siRNA target sequence for Mms19l (NM_028152.2,1108-1126).
gtgaaccagacatgaaact

SEQ ID NO: 610749 - DNA, 19 bp, Mus musculus
  siRNA target sequence for Mms19l (NM_028152.2,1250-1268).
ccagcgtcggacaatcctt

SEQ ID NO: 610750 - DNA, 19 bp, Mus musculus
  siRNA target sequence for Mms19l (NM_028152.2,1254-1272).
cgtcggacaatccttgaaa

SEQ ID NO: 610751 - DNA, 19 bp, Mus musculus
  siRNA target sequence for Mms19l (NM_028152.2,1255-1273).
gtcggacaatccttgaaat

SEQ ID NO: 610752 - DNA, 19 bp, Mus musculus
  siRNA target sequence for Mms19l (NM_028152.2,1257-1275).
cggacaatccttgaaatga

SEQ ID NO: 610753 - DNA, 19 bp, Mus musculus
  siRNA target sequence for Mms19l (NM_028152.2,1287-1305).
ctaaagctacagcagaaat

SEQ ID NO: 610754 - DNA, 19 bp, Mus musculus
  siRNA target sequence for Mms19l (NM_028152.2,1367-1385).
ggtgttcatggctctaaca

SEQ ID NO: 610755 - DNA, 19 bp, Mus musculus
  siRNA target sequence for Mms19l (NM_028152.2,1948-1966).
cctcagttctgagaaaagt

SEQ ID NO: 610756 - DNA, 19 bp, Mus musculus
  siRNA target sequence for Mms19l (NM_028152.2,2062-2080).
gcatcgtgcccctcttctt

SEQ ID NO: 610757 - DNA, 19 bp, Mus musculus
  siRNA target sequence for Mms19l (NM_028152.2,2163-2181).
cggctggttgcactactta

SEQ ID NO: 610758 - DNA, 19 bp, Mus musculus
  siRNA target sequence for Mms19l (NM_028152.2,2173-2191).
cactacttacggcttttgt

SEQ ID NO: 610759 - DNA, 19 bp, Mus musculus
  siRNA target sequence for Mms19l (NM_028152.2,2175-2193).
ctacttacggcttttgtct

SEQ ID NO: 610760 - DNA, 19 bp, Mus musculus
  siRNA target sequence for Mms19l (NM_028152.2,2233-2251).
gactcatgcgggagctttt

SEQ ID NO: 610761 - DNA, 19 bp, Mus musculus
  siRNA target sequence for Mms19l (NM_028152.2,2408-2426).
ccgtgatcaggctttcaca

SEQ ID NO: 610762 - DNA, 19 bp, Mus musculus
  siRNA target sequence for Mms19l (NM_028152.2,2598-2616).
gctgatgttcggatcatgt

SEQ ID NO: 610763 - DNA, 19 bp, Mus musculus
  siRNA target sequence for Mms19l (NM_028152.2,2599-2617).
ctgatgttcggatcatgtt

SEQ ID NO: 610764 - DNA, 19 bp, Mus musculus
  siRNA target sequence for Mms19l (NM_028152.2,2624-2642).
gcggttcttcacagacaat

SEQ ID NO: 610765 - DNA, 19 bp, Mus musculus
  siRNA target sequence for Mms19l (NM_028152.2,2626-2644).
ggttcttcacagacaatgt

SEQ ID NO: 610766 - DNA, 19 bp, Mus musculus
  siRNA target sequence for Mms19l (NM_028152.2,2647-2665).
ctgctttggtccaaggttt

SEQ ID NO: 610767 - DNA, 19 bp, Mus musculus
  siRNA target sequence for Mms19l (NM_028152.2,2671-2689).
ccgctccccaagatgtgaa

SEQ ID NO: 610768 - DNA, 19 bp, Mus musculus
  siRNA target sequence for Mms19l (NM_028152.2,2850-2868).
ctggaagcacctcaaatca

SEQ ID NO: 610769 - DNA, 19 bp, Mus musculus
  siRNA target sequence for Mms19l (NM_028152.2,2853-2871).
gaagcacctcaaatcatga

SEQ ID NO: 610770 - DNA, 19 bp, Mus musculus
  siRNA target sequence for Mms19l (NM_028152.2,2880-2898).
gttgacactctggttacaa

SEQ ID NO: 610771 - DNA, 19 bp, Mus musculus
  siRNA target sequence for Mms19l (NM_028152.2,2910-2928).
ctcagctccagttactcaa

SEQ ID NO: 610772 - DNA, 19 bp, Mus musculus
  siRNA target sequence for Mms19l (NM_028152.2,2990-3008).
gctactgccatacaaatct

SEQ ID NO: 610773 - DNA, 19 bp, Mus musculus
  siRNA target sequence for Mms19l (NM_028152.2,3050-3068).
gagacttgtgcgaaaggaa

SEQ ID NO: 610774 - DNA, 19 bp, Mus musculus
  siRNA target sequence for Prdx3 (NM_007452.1,90-108).
cgtcatgcaagtgctattt

SEQ ID NO: 610775 - DNA, 19 bp, Mus musculus
  siRNA target sequence for Prdx3 (NM_007452.1,160-178).
cctgtttgacagacatact

SEQ ID NO: 610776 - DNA, 19 bp, Mus musculus
  siRNA target sequence for Prdx3 (NM_007452.1,303-321).
ctgagtctcgacgacttta

SEQ ID NO: 610777 - DNA, 19 bp, Mus musculus
  siRNA target sequence for Prdx3 (NM_007452.1,312-330).
gacgactttaagggaaaat

SEQ ID NO: 610778 - DNA, 19 bp, Mus musculus
  siRNA target sequence for Prdx3 (NM_007452.1,411-429).
gaatttcatgatgtaaact

SEQ ID NO: 610779 - DNA, 19 bp, Mus musculus
  siRNA target sequence for Prdx3 (NM_007452.1,524-542).
cacactgttgtcggatata

SEQ ID NO: 610780 - DNA, 19 bp, Mus musculus
  siRNA target sequence for Prdx3 (NM_007452.1,528-546).
ctgttgtcggatataacta

SEQ ID NO: 610781 - DNA, 19 bp, Mus musculus
  siRNA target sequence for Prdx3 (NM_007452.1,611-629).
cattattgaccctaatggt

SEQ ID NO: 610782 - DNA, 19 bp, Mus musculus
  siRNA target sequence for Prdx3 (NM_007452.1,681-699).
gaaacactccgtttggtaa

SEQ ID NO: 610783 - DNA, 19 bp, Mus musculus
  siRNA target sequence for Prdx3 (NM_007452.1,781-799).
caacagcttccaaagagta

SEQ ID NO: 610784 - DNA, 19 bp, Mus musculus
  siRNA target sequence for Prdx4 (NM_016764.1,228-246).
gttccggacccgcgaaaat

SEQ ID NO: 610785 - DNA, 19 bp, Mus musculus
  siRNA target sequence for Prdx4 (NM_016764.1,232-250).
cggacccgcgaaaatgagt

SEQ ID NO: 610786 - DNA, 19 bp, Mus musculus
  siRNA target sequence for Prdx4 (NM_016764.1,310-328).
gatcactccctgcatctaa

SEQ ID NO: 610787 - DNA, 19 bp, Mus musculus
  siRNA target sequence for Prdx4 (NM_016764.1,315-333).
ctccctgcatctaagcaaa

SEQ ID NO: 610788 - DNA, 19 bp, Mus musculus
  siRNA target sequence for Prdx4 (NM_016764.1,376-394).
gtgattaacggagaattca

SEQ ID NO: 610789 - DNA, 19 bp, Mus musculus
  siRNA target sequence for Prdx4 (NM_016764.1,412-430).
gactatcgtgggaaatact

SEQ ID NO: 610790 - DNA, 19 bp, Mus musculus
  siRNA target sequence for Prdx4 (NM_016764.1,418-436).
cgtgggaaatacttggttt

SEQ ID NO: 610791 - DNA, 19 bp, Mus musculus
  siRNA target sequence for Prdx4 (NM_016764.1,466-484).
gtgtgtccaactgaaatca

SEQ ID NO: 610792 - DNA, 19 bp, Mus musculus
  siRNA target sequence for Prdx4 (NM_016764.1,486-504).
cgcttttggggatcgaatt

SEQ ID NO: 610793 - DNA, 19 bp, Mus musculus
  siRNA target sequence for Prdx4 (NM_016764.1,488-506).
cttttggggatcgaattga

SEQ ID NO: 610794 - DNA, 19 bp, Mus musculus
  siRNA target sequence for Prdx4 (NM_016764.1,493-511).
ggggatcgaattgaagaat

SEQ ID NO: 610795 - DNA, 19 bp, Mus musculus
  siRNA target sequence for Prdx4 (NM_016764.1,494-512).
gggatcgaattgaagaatt

SEQ ID NO: 610796 - DNA, 19 bp, Mus musculus
  siRNA target sequence for Prdx4 (NM_016764.1,499-517).
cgaattgaagaattcaaat

SEQ ID NO: 610797 - DNA, 19 bp, Mus musculus
  siRNA target sequence for Prdx4 (NM_016764.1,598-616).
ggaggactggggccaataa

SEQ ID NO: 610798 - DNA, 19 bp, Mus musculus
  siRNA target sequence for Prdx4 (NM_016764.1,601-619).
ggactggggccaataagga

SEQ ID NO: 610799 - DNA, 19 bp, Mus musculus
  siRNA target sequence for Prdx4 (NM_016764.1,637-655).
ctgaaccatcagatctcaa

SEQ ID NO: 610800 - DNA, 19 bp, Mus musculus
  siRNA target sequence for Prdx4 (NM_016764.1,681-699).
ctcaggacatactcttaga

SEQ ID NO: 610801 - DNA, 19 bp, Mus musculus
  siRNA target sequence for Prdx4 (NM_016764.1,692-710).
ctcttagaggcctctttat

SEQ ID NO: 610802 - DNA, 19 bp, Mus musculus
  siRNA target sequence for Prdx4 (NM_016764.1,698-716).
gaggcctctttattatcga

SEQ ID NO: 610803 - DNA, 19 bp, Mus musculus
  siRNA target sequence for Prdx4 (NM_016764.1,705-723).
ctttattatcgatgacaaa

SEQ ID NO: 610804 - DNA, 19 bp, Mus musculus
  siRNA target sequence for Prdx4 (NM_016764.1,734-752).
ggcagattactctgaatga

SEQ ID NO: 610805 - DNA, 19 bp, Mus musculus
  siRNA target sequence for Prdx4 (NM_016764.1,777-795).
cgagacactgcgtttggtt

SEQ ID NO: 610806 - DNA, 19 bp, Mus musculus
  siRNA target sequence for Prdx4 (NM_016764.1,846-864).
gaaacctggtagtgaaaca

SEQ ID NO: 610807 - DNA, 19 bp, Mus musculus
  siRNA target sequence for Prdx4 (NM_016764.1,850-868).
cctggtagtgaaacaataa

SEQ ID NO: 610808 - DNA, 19 bp, Mus musculus
  siRNA target sequence for Prdx4 (NM_016764.1,851-869).
ctggtagtgaaacaataat

SEQ ID NO: 610809 - DNA, 19 bp, Mus musculus
  siRNA target sequence for Prdx4 (NM_016764.1,884-902).
gaaaactgaagtatttcga

SEQ ID NO: 610810 - DNA, 19 bp, Mus musculus
  siRNA target sequence for 2310016C16Rik (NM_027127.1,26-44).
cgctgcctacccattaaaa

SEQ ID NO: 610811 - DNA, 19 bp, Mus musculus
  siRNA target sequence for 2310016C16Rik (NM_027127.1,149-167).
cagcttctactcctttgaa

SEQ ID NO: 610812 - DNA, 19 bp, Mus musculus
  siRNA target sequence for 2310016C16Rik (NM_027127.1,152-170).
cttctactcctttgaagta

SEQ ID NO: 610813 - DNA, 19 bp, Mus musculus
  siRNA target sequence for 2310016C16Rik (NM_027127.1,187-205).
ggaccgtgtctctggaaaa

SEQ ID NO: 610814 - DNA, 19 bp, Mus musculus
  siRNA target sequence for 2310016C16Rik (NM_027127.1,277-295).
ctctcagggagctacacaa

SEQ ID NO: 610815 - DNA, 19 bp, Mus musculus
  siRNA target sequence for 2310016C16Rik (NM_027127.1,418-436).
ccatcttccacaagattaa

SEQ ID NO: 610816 - DNA, 19 bp, Mus musculus
  siRNA target sequence for 2310016C16Rik (NM_027127.1,422-440).
cttccacaagattaagatt

SEQ ID NO: 610817 - DNA, 19 bp, Mus musculus
  siRNA target sequence for 2310016C16Rik (NM_027127.1,425-443).
ccacaagattaagatttta

SEQ ID NO: 610818 - DNA, 19 bp, Mus musculus
  siRNA target sequence for 2310016C16Rik (NM_027127.1,453-471).
gcagaacctgcgtttagat

SEQ ID NO: 610819 - DNA, 19 bp, Mus musculus
  siRNA target sequence for 2310016C16Rik (NM_027127.1,456-474).
gaacctgcgtttagattta

SEQ ID NO: 610820 - DNA, 19 bp, Mus musculus
  siRNA target sequence for 2310016C16Rik (NM_027127.1,460-478).
ctgcgtttagatttattgt

SEQ ID NO: 610821 - DNA, 19 bp, Mus musculus
  siRNA target sequence for 2310016C16Rik (NM_027127.1,494-512).
ggagccaaggtggaatttt

SEQ ID NO: 610822 - DNA, 19 bp, Mus musculus
  siRNA target sequence for 2310016C16Rik (NM_027127.1,498-516).
ccaaggtggaatttttgga

SEQ ID NO: 610823 - DNA, 19 bp, Mus musculus
  siRNA target sequence for 2310016C16Rik (NM_027127.1,499-517).
caaggtggaatttttggaa

SEQ ID NO: 610824 - DNA, 19 bp, Mus musculus
  siRNA target sequence for 2310016C16Rik (NM_027127.1,537-555).
ggacaagtcgtgaagttct

SEQ ID NO: 610825 - DNA, 19 bp, Mus musculus
  siRNA target sequence for 2310016C16Rik (NM_027127.1,579-597).
gccatcagacctcatgtat

SEQ ID NO: 610826 - DNA, 19 bp, Mus musculus
  siRNA target sequence for 2310016C16Rik (NM_027127.1,586-604).
gacctcatgtatcacaaat

SEQ ID NO: 610827 - DNA, 19 bp, Mus musculus
  siRNA target sequence for 2310016C16Rik (NM_027127.1,588-606).
cctcatgtatcacaaatga

SEQ ID NO: 610828 - DNA, 19 bp, Mus musculus
  siRNA target sequence for 2310016C16Rik (NM_027127.1,589-607).
ctcatgtatcacaaatgat

SEQ ID NO: 610829 - DNA, 19 bp, Mus musculus
  siRNA target sequence for Tdo2 (NM_019911.2,47-65).
cccgtttgcaggaaacagt

SEQ ID NO: 610830 - DNA, 19 bp, Mus musculus
  siRNA target sequence for Tdo2 (NM_019911.2,64-82).
gtgtaggatacactttgaa

SEQ ID NO: 610831 - DNA, 19 bp, Mus musculus
  siRNA target sequence for Tdo2 (NM_019911.2,66-84).
gtaggatacactttgaaaa

SEQ ID NO: 610832 - DNA, 19 bp, Mus musculus
  siRNA target sequence for Tdo2 (NM_019911.2,76-94).
ctttgaaaaacgtatctat

SEQ ID NO: 610833 - DNA, 19 bp, Mus musculus
  siRNA target sequence for Tdo2 (NM_019911.2,115-133).
gagctcaaactggtgtaaa

SEQ ID NO: 610834 - DNA, 19 bp, Mus musculus
  siRNA target sequence for Tdo2 (NM_019911.2,117-135).
gctcaaactggtgtaaaca

SEQ ID NO: 610835 - DNA, 19 bp, Mus musculus
  siRNA target sequence for Tdo2 (NM_019911.2,143-161).
caaaggaggacttatctat

SEQ ID NO: 610836 - DNA, 19 bp, Mus musculus
  siRNA target sequence for Tdo2 (NM_019911.2,151-169).
gacttatctatggcaatta

SEQ ID NO: 610837 - DNA, 19 bp, Mus musculus
  siRNA target sequence for Tdo2 (NM_019911.2,153-171).
cttatctatggcaattact

SEQ ID NO: 610838 - DNA, 19 bp, Mus musculus
  siRNA target sequence for Tdo2 (NM_019911.2,237-255).
gacgagcacctattcatca

SEQ ID NO: 610839 - DNA, 19 bp, Mus musculus
  siRNA target sequence for Tdo2 (NM_019911.2,239-257).
cgagcacctattcatcata

SEQ ID NO: 610840 - DNA, 19 bp, Mus musculus
  siRNA target sequence for Tdo2 (NM_019911.2,242-260).
gcacctattcatcataact

SEQ ID NO: 610841 - DNA, 19 bp, Mus musculus
  siRNA target sequence for Tdo2 (NM_019911.2,254-272).
cataactcatcaagcttat

SEQ ID NO: 610842 - DNA, 19 bp, Mus musculus
  siRNA target sequence for Tdo2 (NM_019911.2,259-277).
ctcatcaagcttatgaact

SEQ ID NO: 610843 - DNA, 19 bp, Mus musculus
  siRNA target sequence for Tdo2 (NM_019911.2,261-279).
catcaagcttatgaacttt

SEQ ID NO: 610844 - DNA, 19 bp, Mus musculus
  siRNA target sequence for Tdo2 (NM_019911.2,306-324).
gattctgttcgtgaaatct

SEQ ID NO: 610845 - DNA, 19 bp, Mus musculus
  siRNA target sequence for Tdo2 (NM_019911.2,312-330).
gttcgtgaaatcttccaaa

SEQ ID NO: 610846 - DNA, 19 bp, Mus musculus
  siRNA target sequence for Tdo2 (NM_019911.2,506-524).
gttccggctgctggaaaat

SEQ ID NO: 610847 - DNA, 19 bp, Mus musculus
  siRNA target sequence for Tdo2 (NM_019911.2,511-529).
ggctgctggaaaataagat

SEQ ID NO: 610848 - DNA, 19 bp, Mus musculus
  siRNA target sequence for Tdo2 (NM_019911.2,512-530).
gctgctggaaaataagatt

SEQ ID NO: 610849 - DNA, 19 bp, Mus musculus
  siRNA target sequence for Tdo2 (NM_019911.2,544-562).
gcttgagagtcccttacaa

SEQ ID NO: 610850 - DNA, 19 bp, Mus musculus
  siRNA target sequence for Tdo2 (NM_019911.2,556-574).
cttacaacaggaaacacta

SEQ ID NO: 610851 - DNA, 19 bp, Mus musculus
  siRNA target sequence for Tdo2 (NM_019911.2,565-583).
ggaaacactatcgtgataa

SEQ ID NO: 610852 - DNA, 19 bp, Mus musculus
  siRNA target sequence for Tdo2 (NM_019911.2,681-699).
gagccaaatggatttaatt

SEQ ID NO: 610853 - DNA, 19 bp, Mus musculus
  siRNA target sequence for Tdo2 (NM_019911.2,701-719).
ctggggaaagtttgaaaaa

SEQ ID NO: 610854 - DNA, 19 bp, Mus musculus
  siRNA target sequence for Tdo2 (NM_019911.2,733-751).
gcctggaagaagaatttct

SEQ ID NO: 610855 - DNA, 19 bp, Mus musculus
  siRNA target sequence for Tdo2 (NM_019911.2,750-768).
ctaaggattcaggctaaaa

SEQ ID NO: 610856 - DNA, 19 bp, Mus musculus
  siRNA target sequence for Tdo2 (NM_019911.2,874-892).
gtgaacgacgactgtcata

SEQ ID NO: 610857 - DNA, 19 bp, Mus musculus
  siRNA target sequence for Tdo2 (NM_019911.2,902-920).
ccagggagcactgatgata

SEQ ID NO: 610858 - DNA, 19 bp, Mus musculus
  siRNA target sequence for Tdo2 (NM_019911.2,905-923).
gggagcactgatgatatat

SEQ ID NO: 610859 - DNA, 19 bp, Mus musculus
  siRNA target sequence for Tdo2 (NM_019911.2,907-925).
gagcactgatgatatattt

SEQ ID NO: 610860 - DNA, 19 bp, Mus musculus
  siRNA target sequence for Tdo2 (NM_019911.2,987-1005).
gacacgctcatgaccaaat

SEQ ID NO: 610861 - DNA, 19 bp, Mus musculus
  siRNA target sequence for Tdo2 (NM_019911.2,995-1013).
catgaccaaatggagatat

SEQ ID NO: 610862 - DNA, 19 bp, Mus musculus
  siRNA target sequence for Tdo2 (NM_019911.2,998-1016).
gaccaaatggagatataat

SEQ ID NO: 610863 - DNA, 19 bp, Mus musculus
  siRNA target sequence for Tdo2 (NM_019911.2,1001-1019).
caaatggagatataatcat

SEQ ID NO: 610864 - DNA, 19 bp, Mus musculus
  siRNA target sequence for Tdo2 (NM_019911.2,1064-1082).
gggatcctcaggctatcat

SEQ ID NO: 610865 - DNA, 19 bp, Mus musculus
  siRNA target sequence for Tdo2 (NM_019911.2,1102-1120).
gcgacaggtacaaggtttt

SEQ ID NO: 610866 - DNA, 19 bp, Mus musculus
  siRNA target sequence for Tdo2 (NM_019911.2,1159-1177).
gacactgggtaccaaagat

SEQ ID NO: 610867 - DNA, 19 bp, Mus musculus
  siRNA target sequence for Tdo2 (NM_019911.2,1178-1196).
gaatccgatcattcacaaa

SEQ ID NO: 610868 - DNA, 19 bp, Mus musculus
  siRNA target sequence for Hpd (NM_008277.1,72-90).
gaggccggttcctccattt

SEQ ID NO: 610869 - DNA, 19 bp, Mus musculus
  siRNA target sequence for Hpd (NM_008277.1,217-235).
catcaagcaagggaaaatt

SEQ ID NO: 610870 - DNA, 19 bp, Mus musculus
  siRNA target sequence for Hpd (NM_008277.1,302-320).
ggcgacggggtgaaagaca

SEQ ID NO: 610871 - DNA, 19 bp, Mus musculus
  siRNA target sequence for Hpd (NM_008277.1,303-321).
gcgacggggtgaaagacat

SEQ ID NO: 610872 - DNA, 19 bp, Mus musculus
  siRNA target sequence for Hpd (NM_008277.1,396-414).
catgggtggagcaagacaa

SEQ ID NO: 610873 - DNA, 19 bp, Mus musculus
  siRNA target sequence for Hpd (NM_008277.1,487-505).
ctacactggccgtttctta

SEQ ID NO: 610874 - DNA, 19 bp, Mus musculus
  siRNA target sequence for Hpd (NM_008277.1,510-528).
gattcgaggccccaacata

SEQ ID NO: 610875 - DNA, 19 bp, Mus musculus
  siRNA target sequence for Hpd (NM_008277.1,518-536).
gccccaacatacaaggata

SEQ ID NO: 610876 - DNA, 19 bp, Mus musculus
  siRNA target sequence for Hpd (NM_008277.1,558-576).
gatgtaaccttgagatcat

SEQ ID NO: 610877 - DNA, 19 bp, Mus musculus
  siRNA target sequence for Hpd (NM_008277.1,781-799).
gtctcagatccaggaatat

SEQ ID NO: 610878 - DNA, 19 bp, Mus musculus
  siRNA target sequence for Hpd (NM_008277.1,791-809).
caggaatatgtggactata

SEQ ID NO: 610879 - DNA, 19 bp, Mus musculus
  siRNA target sequence for Hpd (NM_008277.1,837-855).
ctctcaagacggaagacat

SEQ ID NO: 610880 - DNA, 19 bp, Mus musculus
  siRNA target sequence for Indo (NM_008324.1,124-142).
ccaccacatagatgaagat

SEQ ID NO: 610881 - DNA, 19 bp, Mus musculus
  siRNA target sequence for Indo (NM_008324.1,244-262).
gcttcgagaagaagttgaa

SEQ ID NO: 610882 - DNA, 19 bp, Mus musculus
  siRNA target sequence for Indo (NM_008324.1,417-435).
gcgagctctcagagaagtt

SEQ ID NO: 610883 - DNA, 19 bp, Mus musculus
  siRNA target sequence for Indo (NM_008324.1,433-451).
gttgggcctgcctcctatt

SEQ ID NO: 610884 - DNA, 19 bp, Mus musculus
  siRNA target sequence for Indo (NM_008324.1,442-460).
gcctcctattctgtcttat

SEQ ID NO: 610885 - DNA, 19 bp, Mus musculus
  siRNA target sequence for Indo (NM_008324.1,497-515).
cccaatgggcccatgacat

SEQ ID NO: 610886 - DNA, 19 bp, Mus musculus
  siRNA target sequence for Indo (NM_008324.1,498-516).
ccaatgggcccatgacata

SEQ ID NO: 610887 - DNA, 19 bp, Mus musculus
  siRNA target sequence for Indo (NM_008324.1,606-624).
ctcctgcaatcaaagcaat

SEQ ID NO: 610888 - DNA, 19 bp, Mus musculus
  siRNA target sequence for Indo (NM_008324.1,650-668).
cgtcaagacctgaaagcat

SEQ ID NO: 610889 - DNA, 19 bp, Mus musculus
  siRNA target sequence for Indo (NM_008324.1,651-669).
gtcaagacctgaaagcatt

SEQ ID NO: 610890 - DNA, 19 bp, Mus musculus
  siRNA target sequence for Indo (NM_008324.1,656-674).
gacctgaaagcattggaaa

SEQ ID NO: 610891 - DNA, 19 bp, Mus musculus
  siRNA target sequence for Indo (NM_008324.1,677-695).
gcactgcacgacatagcta

SEQ ID NO: 610892 - DNA, 19 bp, Mus musculus
  siRNA target sequence for Indo (NM_008324.1,710-728).
gccaaggaaatttttaaga

SEQ ID NO: 610893 - DNA, 19 bp, Mus musculus
  siRNA target sequence for Indo (NM_008324.1,767-785).
gttctccgcatatatctgt

SEQ ID NO: 610894 - DNA, 19 bp, Mus musculus
  siRNA target sequence for Indo (NM_008324.1,841-859).
ggacaccccaaaaatgttt

SEQ ID NO: 610895 - DNA, 19 bp, Mus musculus
  siRNA target sequence for Indo (NM_008324.1,923-941).
cacgaggctggcaaagaat

SEQ ID NO: 610896 - DNA, 19 bp, Mus musculus
  siRNA target sequence for Indo (NM_008324.1,925-943).
cgaggctggcaaagaatct

SEQ ID NO: 610897 - DNA, 19 bp, Mus musculus
  siRNA target sequence for Indo (NM_008324.1,986-1004).
gcccaccggaacttccttt

SEQ ID NO: 610898 - DNA, 19 bp, Mus musculus
  siRNA target sequence for Indo (NM_008324.1,989-1007).
caccggaacttccttttct

SEQ ID NO: 610899 - DNA, 19 bp, Mus musculus
  siRNA target sequence for Indo (NM_008324.1,1025-1043).
ccagtccgtgagtttgtca

SEQ ID NO: 610900 - DNA, 19 bp, Mus musculus
  siRNA target sequence for Indo (NM_008324.1,1026-1044).
cagtccgtgagtttgtcat

SEQ ID NO: 610901 - DNA, 19 bp, Mus musculus
  siRNA target sequence for Indo (NM_008324.1,1028-1046).
gtccgtgagtttgtcattt

SEQ ID NO: 610902 - DNA, 19 bp, Mus musculus
  siRNA target sequence for Indo (NM_008324.1,1030-1048).
ccgtgagtttgtcatttca

SEQ ID NO: 610903 - DNA, 19 bp, Mus musculus
  siRNA target sequence for Indo (NM_008324.1,1031-1049).
cgtgagtttgtcatttcaa

SEQ ID NO: 610904 - DNA, 19 bp, Mus musculus
  siRNA target sequence for Indo (NM_008324.1,1047-1065).
caagacacaatgaagactt

SEQ ID NO: 610905 - DNA, 19 bp, Mus musculus
  siRNA target sequence for Indo (NM_008324.1,1114-1132).
gttccacctcgcaatagta

SEQ ID NO: 610906 - DNA, 19 bp, Mus musculus
  siRNA target sequence for Indo (NM_008324.1,1117-1135).
ccacctcgcaatagtagat

SEQ ID NO: 610907 - DNA, 19 bp, Mus musculus
  siRNA target sequence for Indo (NM_008324.1,1118-1136).
cacctcgcaatagtagata

SEQ ID NO: 610908 - DNA, 19 bp, Mus musculus
  siRNA target sequence for Indo (NM_008324.1,1120-1138).
cctcgcaatagtagatact

SEQ ID NO: 610909 - DNA, 19 bp, Mus musculus
  siRNA target sequence for Indo (NM_008324.1,1121-1139).
ctcgcaatagtagatactt

SEQ ID NO: 610910 - DNA, 19 bp, Mus musculus
  siRNA target sequence for Indo (NM_008324.1,1183-1201).
gtcggaagagccctcaaat

SEQ ID NO: 610911 - DNA, 19 bp, Mus musculus
  siRNA target sequence for Indo (NM_008324.1,1185-1203).
cggaagagccctcaaatgt

SEQ ID NO: 610912 - DNA, 19 bp, Mus musculus
  siRNA target sequence for Indo (NM_008324.1,1223-1241).
ggtacgaatcccatgactt

SEQ ID NO: 610913 - DNA, 19 bp, Mus musculus
  siRNA target sequence for Indo (NM_008324.1,1224-1242).
gtacgaatcccatgacttt

SEQ ID NO: 610914 - DNA, 19 bp, Mus musculus
  siRNA target sequence for Hgd (NM_013547.1,324-342).
gtccacggaacaccaataa

SEQ ID NO: 610915 - DNA, 19 bp, Mus musculus
  siRNA target sequence for Hgd (NM_013547.1,326-344).
ccacggaacaccaataaga

SEQ ID NO: 610916 - DNA, 19 bp, Mus musculus
  siRNA target sequence for Hgd (NM_013547.1,329-347).
cggaacaccaataagagaa

SEQ ID NO: 610917 - DNA, 19 bp, Mus musculus
  siRNA target sequence for Hgd (NM_013547.1,349-367).
ctggctgtataggattctt

SEQ ID NO: 610918 - DNA, 19 bp, Mus musculus
  siRNA target sequence for Hgd (NM_013547.1,417-435).
ctcacaactgggatgaagt

SEQ ID NO: 610919 - DNA, 19 bp, Mus musculus
  siRNA target sequence for Hgd (NM_013547.1,537-555).
caggagacatcaagtctaa

SEQ ID NO: 610920 - DNA, 19 bp, Mus musculus
  siRNA target sequence for Hgd (NM_013547.1,566-584).
gctgtgcacatttttctgt

SEQ ID NO: 610921 - DNA, 19 bp, Mus musculus
  siRNA target sequence for Hgd (NM_013547.1,704-722).
gaaatctgcgtcattcaga

SEQ ID NO: 610922 - DNA, 19 bp, Mus musculus
  siRNA target sequence for Hgd (NM_013547.1,732-750).
gattcagcgtcgatgtctt

SEQ ID NO: 610923 - DNA, 19 bp, Mus musculus
  siRNA target sequence for Hgd (NM_013547.1,811-829).
gggacccatcggagcaaat

SEQ ID NO: 610924 - DNA, 19 bp, Mus musculus
  siRNA target sequence for Hgd (NM_013547.1,836-854).
gccaatcctcgagatttct

SEQ ID NO: 610925 - DNA, 19 bp, Mus musculus
  siRNA target sequence for Hgd (NM_013547.1,861-879).
ccgttgcctggtatgaaga

SEQ ID NO: 610926 - DNA, 19 bp, Mus musculus
  siRNA target sequence for Hgd (NM_013547.1,862-880).
cgttgcctggtatgaagat

SEQ ID NO: 610927 - DNA, 19 bp, Mus musculus
  siRNA target sequence for Hgd (NM_013547.1,894-912).
gtggttacactgtgattaa

SEQ ID NO: 610928 - DNA, 19 bp, Mus musculus
  siRNA target sequence for Hgd (NM_013547.1,896-914).
ggttacactgtgattaata

SEQ ID NO: 610929 - DNA, 19 bp, Mus musculus
  siRNA target sequence for Hgd (NM_013547.1,903-921).
ctgtgattaataaattcca

SEQ ID NO: 610930 - DNA, 19 bp, Mus musculus
  siRNA target sequence for Hgd (NM_013547.1,946-964).
ggatgtctctccattcaat

SEQ ID NO: 610931 - DNA, 19 bp, Mus musculus
  siRNA target sequence for Hgd (NM_013547.1,1045-1063).
ccatgcggatccttccatt

SEQ ID NO: 610932 - DNA, 19 bp, Mus musculus
  siRNA target sequence for Hgd (NM_013547.1,1046-1064).
catgcggatccttccattt

SEQ ID NO: 610933 - DNA, 19 bp, Mus musculus
  siRNA target sequence for Hgd (NM_013547.1,1049-1067).
gcggatccttccattttca

SEQ ID NO: 610934 - DNA, 19 bp, Mus musculus
  siRNA target sequence for Hgd (NM_013547.1,1134-1152).
ggtggggagttgcagataa

SEQ ID NO: 610935 - DNA, 19 bp, Mus musculus
  siRNA target sequence for Hgd (NM_013547.1,1135-1153).
gtggggagttgcagataaa

SEQ ID NO: 610936 - DNA, 19 bp, Mus musculus
  siRNA target sequence for Hgd (NM_013547.1,1155-1173).
ccttcagacctccttatta

SEQ ID NO: 610937 - DNA, 19 bp, Mus musculus
  siRNA target sequence for Hgd (NM_013547.1,1356-1374).
ccatggcgtttatgtttga

SEQ ID NO: 610938 - DNA, 19 bp, Mus musculus
  siRNA target sequence for Hgd (NM_013547.1,1414-1432).
gacctgtagctgtttggat

SEQ ID NO: 610939 - DNA, 19 bp, Mus musculus
  siRNA target sequence for Bcdo2 (NM_133217.1,80-98).
ctcgggtccgaggacatat

SEQ ID NO: 610940 - DNA, 19 bp, Mus musculus
  siRNA target sequence for Bcdo2 (NM_133217.1,84-102).
ggtccgaggacatattcct

SEQ ID NO: 610941 - DNA, 19 bp, Mus musculus
  siRNA target sequence for Bcdo2 (NM_133217.1,107-125).
ggcttaatggttatctact

SEQ ID NO: 610942 - DNA, 19 bp, Mus musculus
  siRNA target sequence for Bcdo2 (NM_133217.1,108-126).
gcttaatggttatctactt

SEQ ID NO: 610943 - DNA, 19 bp, Mus musculus
  siRNA target sequence for Bcdo2 (NM_133217.1,156-174).
gaaggatagatacaatcat

SEQ ID NO: 610944 - DNA, 19 bp, Mus musculus
  siRNA target sequence for Bcdo2 (NM_133217.1,230-248).
catacaagagcaagtttct

SEQ ID NO: 610945 - DNA, 19 bp, Mus musculus
  siRNA target sequence for Bcdo2 (NM_133217.1,278-296).
ctggaggtagaattgtgat

SEQ ID NO: 610946 - DNA, 19 bp, Mus musculus
  siRNA target sequence for Bcdo2 (NM_133217.1,329-347).
catgcaagagcatctttga

SEQ ID NO: 610947 - DNA, 19 bp, Mus musculus
  siRNA target sequence for Bcdo2 (NM_133217.1,338-356).
gcatctttgaacgtttcat

SEQ ID NO: 610948 - DNA, 19 bp, Mus musculus
  siRNA target sequence for Bcdo2 (NM_133217.1,362-380).
ggtttgagccacctactat

SEQ ID NO: 610949 - DNA, 19 bp, Mus musculus
  siRNA target sequence for Bcdo2 (NM_133217.1,387-405).
caacaccaacgtcaacttt

SEQ ID NO: 610950 - DNA, 19 bp, Mus musculus
  siRNA target sequence for Bcdo2 (NM_133217.1,437-455).
cagagactaattttatgaa

SEQ ID NO: 610951 - DNA, 19 bp, Mus musculus
  siRNA target sequence for Bcdo2 (NM_133217.1,504-522).
caaattcattgctgtgaat

SEQ ID NO: 610952 - DNA, 19 bp, Mus musculus
  siRNA target sequence for Bcdo2 (NM_133217.1,527-545).
ccactgcacatcctcatta

SEQ ID NO: 610953 - DNA, 19 bp, Mus musculus
  siRNA target sequence for Bcdo2 (NM_133217.1,530-548).
ctgcacatcctcattacga

SEQ ID NO: 610954 - DNA, 19 bp, Mus musculus
  siRNA target sequence for Bcdo2 (NM_133217.1,589-607).
ccaagaggttcttgctata

SEQ ID NO: 610955 - DNA, 19 bp, Mus musculus
  siRNA target sequence for Bcdo2 (NM_133217.1,590-608).
caagaggttcttgctataa

SEQ ID NO: 610956 - DNA, 19 bp, Mus musculus
  siRNA target sequence for Bcdo2 (NM_133217.1,593-611).
gaggttcttgctataatat

SEQ ID NO: 610957 - DNA, 19 bp, Mus musculus
  siRNA target sequence for Bcdo2 (NM_133217.1,714-732).
ccatagctttggaatgaca

SEQ ID NO: 610958 - DNA, 19 bp, Mus musculus
  siRNA target sequence for Bcdo2 (NM_133217.1,715-733).
catagctttggaatgacaa

SEQ ID NO: 610959 - DNA, 19 bp, Mus musculus
  siRNA target sequence for Bcdo2 (NM_133217.1,724-742).
ggaatgacaaaaaactaca

SEQ ID NO: 610960 - DNA, 19 bp, Mus musculus
  siRNA target sequence for Bcdo2 (NM_133217.1,731-749).
caaaaaactacataatctt

SEQ ID NO: 610961 - DNA, 19 bp, Mus musculus
  siRNA target sequence for Bcdo2 (NM_133217.1,751-769).
gtcgaacagcctgtaaaga

SEQ ID NO: 610962 - DNA, 19 bp, Mus musculus
  siRNA target sequence for Bcdo2 (NM_133217.1,843-861).
gtataacacgcggtttcat

SEQ ID NO: 610963 - DNA, 19 bp, Mus musculus
  siRNA target sequence for Bcdo2 (NM_133217.1,919-937).
cttacctatcatcaaatca

SEQ ID NO: 610964 - DNA, 19 bp, Mus musculus
  siRNA target sequence for Bcdo2 (NM_133217.1,949-967).
gaccagggctgtattgtga

SEQ ID NO: 610965 - DNA, 19 bp, Mus musculus
  siRNA target sequence for Bcdo2 (NM_133217.1,951-969).
ccagggctgtattgtgatt

SEQ ID NO: 610966 - DNA, 19 bp, Mus musculus
  siRNA target sequence for Bcdo2 (NM_133217.1,1043-1061).
ggcttgatcaggtctatga

SEQ ID NO: 610967 - DNA, 19 bp, Mus musculus
  siRNA target sequence for Bcdo2 (NM_133217.1,1045-1063).
cttgatcaggtctatgagt

SEQ ID NO: 610968 - DNA, 19 bp, Mus musculus
  siRNA target sequence for Bcdo2 (NM_133217.1,1048-1066).
gatcaggtctatgagttaa

SEQ ID NO: 610969 - DNA, 19 bp, Mus musculus
  siRNA target sequence for Bcdo2 (NM_133217.1,1060-1078).
gagttaaaggcaaagtctt

SEQ ID NO: 610970 - DNA, 19 bp, Mus musculus
  siRNA target sequence for Bcdo2 (NM_133217.1,1076-1094).
ctttccctcgaagatttgt

SEQ ID NO: 610971 - DNA, 19 bp, Mus musculus
  siRNA target sequence for Bcdo2 (NM_133217.1,1093-1111).
gtcttgcccttagatgtta

SEQ ID NO: 610972 - DNA, 19 bp, Mus musculus
  siRNA target sequence for Bcdo2 (NM_133217.1,1095-1113).
cttgcccttagatgttagt

SEQ ID NO: 610973 - DNA, 19 bp, Mus musculus
  siRNA target sequence for Bcdo2 (NM_133217.1,1263-1281).
caactatggccgattcaat

SEQ ID NO: 610974 - DNA, 19 bp, Mus musculus
  siRNA target sequence for Bcdo2 (NM_133217.1,1271-1289).
gccgattcaatggcaaaaa

SEQ ID NO: 610975 - DNA, 19 bp, Mus musculus
  siRNA target sequence for Bcdo2 (NM_133217.1,1273-1291).
cgattcaatggcaaaaagt

SEQ ID NO: 610976 - DNA, 19 bp, Mus musculus
  siRNA target sequence for Bcdo2 (NM_133217.1,1302-1320).
ctatggctgcggttttcga

SEQ ID NO: 610977 - DNA, 19 bp, Mus musculus
  siRNA target sequence for Bcdo2 (NM_133217.1,1307-1325).
gctgcggttttcgacattt

SEQ ID NO: 610978 - DNA, 19 bp, Mus musculus
  siRNA target sequence for Bcdo2 (NM_133217.1,1310-1328).
gcggttttcgacatttggt

SEQ ID NO: 610979 - DNA, 19 bp, Mus musculus
  siRNA target sequence for Bcdo2 (NM_133217.1,1327-1345).
gtgggggattctctgatta

SEQ ID NO: 610980 - DNA, 19 bp, Mus musculus
  siRNA target sequence for Bcdo2 (NM_133217.1,1331-1349).
gggattctctgattaaggt

SEQ ID NO: 610981 - DNA, 19 bp, Mus musculus
  siRNA target sequence for Bcdo2 (NM_133217.1,1332-1350).
ggattctctgattaaggtt

SEQ ID NO: 610982 - DNA, 19 bp, Mus musculus
  siRNA target sequence for Bcdo2 (NM_133217.1,1348-1366).
gttgacgtgacgaacaaga

SEQ ID NO: 610983 - DNA, 19 bp, Mus musculus
  siRNA target sequence for Bcdo2 (NM_133217.1,1354-1372).
gtgacgaacaagacactaa

SEQ ID NO: 610984 - DNA, 19 bp, Mus musculus
  siRNA target sequence for Bcdo2 (NM_133217.1,1401-1419).
ctcggagcccgtttttgtt

SEQ ID NO: 610985 - DNA, 19 bp, Mus musculus
  siRNA target sequence for Tmlhe (NM_138758.1,156-174).
caaagcaggctccgtaatt

SEQ ID NO: 610986 - DNA, 19 bp, Mus musculus
  siRNA target sequence for Tmlhe (NM_138758.1,163-181).
ggctccgtaatttgatgaa

SEQ ID NO: 610987 - DNA, 19 bp, Mus musculus
  siRNA target sequence for Tmlhe (NM_138758.1,204-222).
cttcatctgtccaacttta

SEQ ID NO: 610988 - DNA, 19 bp, Mus musculus
  siRNA target sequence for Tmlhe (NM_138758.1,245-263).
ccattggtgccatacaact

SEQ ID NO: 610989 - DNA, 19 bp, Mus musculus
  siRNA target sequence for Tmlhe (NM_138758.1,246-264).
cattggtgccatacaactt

SEQ ID NO: 610990 - DNA, 19 bp, Mus musculus
  siRNA target sequence for Tmlhe (NM_138758.1,280-298).
gtacttggcaccaacatga

SEQ ID NO: 610991 - DNA, 19 bp, Mus musculus
  siRNA target sequence for Tmlhe (NM_138758.1,286-304).
ggcaccaacatgaagatca

SEQ ID NO: 610992 - DNA, 19 bp, Mus musculus
  siRNA target sequence for Tmlhe (NM_138758.1,287-305).
gcaccaacatgaagatcat

SEQ ID NO: 610993 - DNA, 19 bp, Mus musculus
  siRNA target sequence for Tmlhe (NM_138758.1,326-344).
cactgtgatgcgctttgat

SEQ ID NO: 610994 - DNA, 19 bp, Mus musculus
  siRNA target sequence for Tmlhe (NM_138758.1,368-386).
ccgctcagcatcatgctat

SEQ ID NO: 610995 - DNA, 19 bp, Mus musculus
  siRNA target sequence for Tmlhe (NM_138758.1,369-387).
cgctcagcatcatgctata

SEQ ID NO: 610996 - DNA, 19 bp, Mus musculus
  siRNA target sequence for Tmlhe (NM_138758.1,370-388).
gctcagcatcatgctataa

SEQ ID NO: 610997 - DNA, 19 bp, Mus musculus
  siRNA target sequence for Tmlhe (NM_138758.1,375-393).
gcatcatgctataattcta

SEQ ID NO: 610998 - DNA, 19 bp, Mus musculus
  siRNA target sequence for Tmlhe (NM_138758.1,376-394).
catcatgctataattctaa

SEQ ID NO: 610999 - DNA, 19 bp, Mus musculus
  siRNA target sequence for Tmlhe (NM_138758.1,416-434).
cactgccagtgtggattta

SEQ ID NO: 611000 - DNA, 19 bp, Mus musculus
  siRNA target sequence for Tmlhe (NM_138758.1,420-438).
gccagtgtggatttatgta

SEQ ID NO: 611001 - DNA, 19 bp, Mus musculus
  siRNA target sequence for Tmlhe (NM_138758.1,538-556).
gttatgaagggcagaaaca

SEQ ID NO: 611002 - DNA, 19 bp, Mus musculus
  siRNA target sequence for Tmlhe (NM_138758.1,561-579).
gttatccaacctagaatat

SEQ ID NO: 611003 - DNA, 19 bp, Mus musculus
  siRNA target sequence for Tmlhe (NM_138758.1,570-588).
cctagaatattatggaatt

SEQ ID NO: 611004 - DNA, 19 bp, Mus musculus
  siRNA target sequence for Tmlhe (NM_138758.1,621-639).
gttgatttccagtgctttt

SEQ ID NO: 611005 - DNA, 19 bp, Mus musculus
  siRNA target sequence for Tmlhe (NM_138758.1,841-859).
ctctagaccggcatactga

SEQ ID NO: 611006 - DNA, 19 bp, Mus musculus
  siRNA target sequence for Tmlhe (NM_138758.1,856-874).
ctgacactacctactttca

SEQ ID NO: 611007 - DNA, 19 bp, Mus musculus
  siRNA target sequence for Tmlhe (NM_138758.1,878-896).
gccctgtggcattcaagta

SEQ ID NO: 611008 - DNA, 19 bp, Mus musculus
  siRNA target sequence for Tmlhe (NM_138758.1,880-898).
cctgtggcattcaagtatt

SEQ ID NO: 611009 - DNA, 19 bp, Mus musculus
  siRNA target sequence for Tmlhe (NM_138758.1,891-909).
caagtatttcattgtctta

SEQ ID NO: 611010 - DNA, 19 bp, Mus musculus
  siRNA target sequence for Tmlhe (NM_138758.1,925-943).
gtggtagaacactgttagt

SEQ ID NO: 611011 - DNA, 19 bp, Mus musculus
  siRNA target sequence for Tmlhe (NM_138758.1,934-952).
cactgttagtggatggatt

SEQ ID NO: 611012 - DNA, 19 bp, Mus musculus
  siRNA target sequence for Tmlhe (NM_138758.1,953-971).
ctatgcagcacaacaagta

SEQ ID NO: 611013 - DNA, 19 bp, Mus musculus
  siRNA target sequence for Tmlhe (NM_138758.1,958-976).
cagcacaacaagtacttca

SEQ ID NO: 611014 - DNA, 19 bp, Mus musculus
  siRNA target sequence for Tmlhe (NM_138758.1,960-978).
gcacaacaagtacttcaaa

SEQ ID NO: 611015 - DNA, 19 bp, Mus musculus
  siRNA target sequence for Tmlhe (NM_138758.1,961-979).
cacaacaagtacttcaaaa

SEQ ID NO: 611016 - DNA, 19 bp, Mus musculus
  siRNA target sequence for Tmlhe (NM_138758.1,982-1000).
cacctgaggaatttgaact

SEQ ID NO: 611017 - DNA, 19 bp, Mus musculus
  siRNA target sequence for Tmlhe (NM_138758.1,1011-1029).
gtaccattgaagcatgaat

SEQ ID NO: 611018 - DNA, 19 bp, Mus musculus
  siRNA target sequence for Tmlhe (NM_138758.1,1014-1032).
ccattgaagcatgaatata

SEQ ID NO: 611019 - DNA, 19 bp, Mus musculus
  siRNA target sequence for Tmlhe (NM_138758.1,1044-1062).
ggacaatgtcacaatcaca

SEQ ID NO: 611020 - DNA, 19 bp, Mus musculus
  siRNA target sequence for Tmlhe (NM_138758.1,1068-1086).
ggggttgggcccatcttaa

SEQ ID NO: 611021 - DNA, 19 bp, Mus musculus
  siRNA target sequence for Tmlhe (NM_138758.1,1069-1087).
gggttgggcccatcttaaa

SEQ ID NO: 611022 - DNA, 19 bp, Mus musculus
  siRNA target sequence for Tmlhe (NM_138758.1,1070-1088).
ggttgggcccatcttaaat

SEQ ID NO: 611023 - DNA, 19 bp, Mus musculus
  siRNA target sequence for Tmlhe (NM_138758.1,1071-1089).
gttgggcccatcttaaata

SEQ ID NO: 611024 - DNA, 19 bp, Mus musculus
  siRNA target sequence for Tmlhe (NM_138758.1,1074-1092).
gggcccatcttaaatattt

SEQ ID NO: 611025 - DNA, 19 bp, Mus musculus
  siRNA target sequence for Tmlhe (NM_138758.1,1118-1136).
gatcaggtacaacaactat

SEQ ID NO: 611026 - DNA, 19 bp, Mus musculus
  siRNA target sequence for Tmlhe (NM_138758.1,1170-1188).
gttgtccatcgttggtata

SEQ ID NO: 611027 - DNA, 19 bp, Mus musculus
  siRNA target sequence for Tmlhe (NM_138758.1,1191-1209).
gcacaccgaaccctaacaa

SEQ ID NO: 611028 - DNA, 19 bp, Mus musculus
  siRNA target sequence for Tmlhe (NM_138758.1,1196-1214).
ccgaaccctaacaactgaa

SEQ ID NO: 611029 - DNA, 19 bp, Mus musculus
  siRNA target sequence for Tmlhe (NM_138758.1,1253-1271).
gcctggaaaggtactattt

SEQ ID NO: 611030 - DNA, 19 bp, Mus musculus
  siRNA target sequence for Tmlhe (NM_138758.1,1277-1295).
caactggcgagtacttcat

SEQ ID NO: 611031 - DNA, 19 bp, Mus musculus
  siRNA target sequence for Tmlhe (NM_138758.1,1293-1311).
catggcagggaatcattca

SEQ ID NO: 611032 - DNA, 19 bp, Mus musculus
  siRNA target sequence for Tmlhe (NM_138758.1,1326-1344).
ctctgtggctgctatttaa

SEQ ID NO: 611033 - DNA, 19 bp, Mus musculus
  siRNA target sequence for Tmlhe (NM_138758.1,1334-1352).
ctgctatttaactagagat

SEQ ID NO: 611034 - DNA, 19 bp, Mus musculus
  siRNA target sequence for Cai (NM_009787.1,194-212).
gctccagaatatgagaaaa

SEQ ID NO: 611035 - DNA, 19 bp, Mus musculus
  siRNA target sequence for Cai (NM_009787.1,195-213).
ctccagaatatgagaaaat

SEQ ID NO: 611036 - DNA, 19 bp, Mus musculus
  siRNA target sequence for Cai (NM_009787.1,279-297).
ccatgctagccagcaaatt

SEQ ID NO: 611037 - DNA, 19 bp, Mus musculus
  siRNA target sequence for Cai (NM_009787.1,280-298).
catgctagccagcaaattt

SEQ ID NO: 611038 - DNA, 19 bp, Mus musculus
  siRNA target sequence for Cai (NM_009787.1,337-355).
gggacaggccgttgactat

SEQ ID NO: 611039 - DNA, 19 bp, Mus musculus
  siRNA target sequence for Cai (NM_009787.1,366-384).
ggacccaggaagaaattgt

SEQ ID NO: 611040 - DNA, 19 bp, Mus musculus
  siRNA target sequence for Cai (NM_009787.1,436-454).
cactctttcattgactaaa

SEQ ID NO: 611041 - DNA, 19 bp, Mus musculus
  siRNA target sequence for Cai (NM_009787.1,438-456).
ctctttcattgactaaaga

SEQ ID NO: 611042 - DNA, 19 bp, Mus musculus
  siRNA target sequence for Cai (NM_009787.1,444-462).
cattgactaaagataactt

SEQ ID NO: 611043 - DNA, 19 bp, Mus musculus
  siRNA target sequence for Cai (NM_009787.1,651-669).
ctggctacccgactttgaa

SEQ ID NO: 611044 - DNA, 19 bp, Mus musculus
  siRNA target sequence for Cai (NM_009787.1,653-671).
ggctacccgactttgaaaa

SEQ ID NO: 611045 - DNA, 19 bp, Mus musculus
  siRNA target sequence for Cai (NM_009787.1,654-672).
gctacccgactttgaaaat

SEQ ID NO: 611046 - DNA, 19 bp, Mus musculus
  siRNA target sequence for Cai (NM_009787.1,655-673).
ctacccgactttgaaaatt

SEQ ID NO: 611047 - DNA, 19 bp, Mus musculus
  siRNA target sequence for Cai (NM_009787.1,684-702).
gaaggccttttgactacaa

SEQ ID NO: 611048 - DNA, 19 bp, Mus musculus
  siRNA target sequence for Cai (NM_009787.1,700-718).
caatggcccacgagagaaa

SEQ ID NO: 611049 - DNA, 19 bp, Mus musculus
  siRNA target sequence for Cai (NM_009787.1,722-740).
gggattgttgactacatga

SEQ ID NO: 611050 - DNA, 19 bp, Mus musculus
  siRNA target sequence for Cai (NM_009787.1,723-741).
ggattgttgactacatgat

SEQ ID NO: 611051 - DNA, 19 bp, Mus musculus
  siRNA target sequence for Cai (NM_009787.1,724-742).
gattgttgactacatgatt

SEQ ID NO: 611052 - DNA, 19 bp, Mus musculus
  siRNA target sequence for Cai (NM_009787.1,890-908).
ctgagagaagattacaagt

SEQ ID NO: 611053 - DNA, 19 bp, Mus musculus
  siRNA target sequence for Cai (NM_009787.1,985-1003).
gaagttccagtccaagtat

SEQ ID NO: 611054 - DNA, 19 bp, Mus musculus
  siRNA target sequence for Cai (NM_009787.1,1053-1071).
ccattaaggactatgtagt

SEQ ID NO: 611055 - DNA, 19 bp, Mus musculus
  siRNA target sequence for Cai (NM_009787.1,1090-1108).
ggtgggccatcgtaagact

SEQ ID NO: 611056 - DNA, 19 bp, Mus musculus
  siRNA target sequence for Cai (NM_009787.1,1091-1109).
gtgggccatcgtaagactt

SEQ ID NO: 611057 - DNA, 19 bp, Mus musculus
  siRNA target sequence for Cai (NM_009787.1,1094-1112).
ggccatcgtaagacttcta

SEQ ID NO: 611058 - DNA, 19 bp, Mus musculus
  siRNA target sequence for Cai (NM_009787.1,1095-1113).
gccatcgtaagacttctaa

SEQ ID NO: 611059 - DNA, 19 bp, Mus musculus
  siRNA target sequence for Cai (NM_009787.1,1096-1114).
ccatcgtaagacttctaat

SEQ ID NO: 611060 - DNA, 19 bp, Mus musculus
  siRNA target sequence for Cai (NM_009787.1,1139-1157).
cccctggtggttgtatact

SEQ ID NO: 611061 - DNA, 19 bp, Mus musculus
  siRNA target sequence for Cai (NM_009787.1,1140-1158).
ccctggtggttgtatacta

SEQ ID NO: 611062 - DNA, 19 bp, Mus musculus
  siRNA target sequence for Cai (NM_009787.1,1194-1212).
ctcagttttggcgtaacaa

SEQ ID NO: 611063 - DNA, 19 bp, Mus musculus
  siRNA target sequence for Cai (NM_009787.1,1367-1385).
gagccagaggagtttgatt

SEQ ID NO: 611064 - DNA, 19 bp, Mus musculus
  siRNA target sequence for Cai (NM_009787.1,1369-1387).
gccagaggagtttgattca

SEQ ID NO: 611065 - DNA, 19 bp, Mus musculus
  siRNA target sequence for Cai (NM_009787.1,1451-1469).
cagccagtacccaagaaca

SEQ ID NO: 611066 - DNA, 19 bp, Mus musculus
  siRNA target sequence for Cai (NM_009787.1,1571-1589).
gcagctagagcctatctat

SEQ ID NO: 611067 - DNA, 19 bp, Mus musculus
  siRNA target sequence for Cai (NM_009787.1,1572-1590).
cagctagagcctatctata

SEQ ID NO: 611068 - DNA, 19 bp, Mus musculus
  siRNA target sequence for Cai (NM_009787.1,1575-1593).
ctagagcctatctatacca

SEQ ID NO: 611069 - DNA, 19 bp, Mus musculus
  siRNA target sequence for Cai (NM_009787.1,1662-1680).
catcaccaacgaccaatat

SEQ ID NO: 611070 - DNA, 19 bp, Mus musculus
  siRNA target sequence for Cai (NM_009787.1,1667-1685).
ccaacgaccaatataaggt

SEQ ID NO: 611071 - DNA, 19 bp, Mus musculus
  siRNA target sequence for Cai (NM_009787.1,1690-1708).
ggcttccctaccatctatt

SEQ ID NO: 611072 - DNA, 19 bp, Mus musculus
  siRNA target sequence for Cai (NM_009787.1,1691-1709).
gcttccctaccatctattt

SEQ ID NO: 611073 - DNA, 19 bp, Mus musculus
  siRNA target sequence for Cai (NM_009787.1,1711-1729).
gctcccagtggggacaaaa

SEQ ID NO: 611074 - DNA, 19 bp, Mus musculus
  siRNA target sequence for Txndc2 (NM_153519.1,334-352).
gagttcccgcagcaagtta

SEQ ID NO: 611075 - DNA, 19 bp, Mus musculus
  siRNA target sequence for Txndc2 (NM_153519.1,356-374).
gcacccccatgttttcaga

SEQ ID NO: 611076 - DNA, 19 bp, Mus musculus
  siRNA target sequence for Txndc2 (NM_153519.1,496-514).
cccaagtccttggcaaaaa

SEQ ID NO: 611077 - DNA, 19 bp, Mus musculus
  siRNA target sequence for Txndc2 (NM_153519.1,1079-1097).
cccacaggcccttaaagga

SEQ ID NO: 611078 - DNA, 19 bp, Mus musculus
  siRNA target sequence for Txndc2 (NM_153519.1,1155-1173).
caaggaggataaaatccat

SEQ ID NO: 611079 - DNA, 19 bp, Mus musculus
  siRNA target sequence for Txndc2 (NM_153519.1,1196-1214).
catctaaggagggagatat

SEQ ID NO: 611080 - DNA, 19 bp, Mus musculus
  siRNA target sequence for Txndc2 (NM_153519.1,1286-1304).
cccaggaaggtaacactat

SEQ ID NO: 611081 - DNA, 19 bp, Mus musculus
  siRNA target sequence for Txndc2 (NM_153519.1,1291-1309).
gaaggtaacactatcaagt

SEQ ID NO: 611082 - DNA, 19 bp, Mus musculus
  siRNA target sequence for Txndc2 (NM_153519.1,1390-1408).
gtgagagtgatcaaagaca

SEQ ID NO: 611083 - DNA, 19 bp, Mus musculus
  siRNA target sequence for Txndc2 (NM_153519.1,1584-1602).
gcaagactgtgagatcttt

SEQ ID NO: 611084 - DNA, 19 bp, Mus musculus
  siRNA target sequence for Txndc2 (NM_153519.1,1636-1654).
gaaaaggtgggtgaatttt

SEQ ID NO: 611085 - DNA, 19 bp, Mus musculus
  siRNA target sequence for Txndc2 (NM_153519.1,1666-1684).
gtgggaaaactcgaaagaa

SEQ ID NO: 611086 - DNA, 19 bp, Mus musculus
  siRNA target sequence for 2810401C16Rik (NM_175178.2,418-436).
cagtggagctcaagattga

SEQ ID NO: 611087 - DNA, 19 bp, Mus musculus
  siRNA target sequence for 2810401C16Rik (NM_175178.2,696-714).
catgccctgggccataagt

SEQ ID NO: 611088 - DNA, 19 bp, Mus musculus
  siRNA target sequence for 2810401C16Rik (NM_175178.2,927-945).
gtgatggccaagtgtatct

SEQ ID NO: 611089 - DNA, 19 bp, Mus musculus
  siRNA target sequence for 2810401C16Rik (NM_175178.2,929-947).
gatggccaagtgtatctct

SEQ ID NO: 611090 - DNA, 19 bp, Mus musculus
  siRNA target sequence for 2810401C16Rik (NM_175178.2,970-988).
gcaccaacgtgctcatagt

SEQ ID NO: 611091 - DNA, 19 bp, Mus musculus
  siRNA target sequence for 2810401C16Rik (NM_175178.2,1515-1533).
gttggtcgtgcacttatga

SEQ ID NO: 611092 - DNA, 19 bp, Mus musculus
  siRNA target sequence for 2810401C16Rik (NM_175178.2,1519-1537).
gtcgtgcacttatgaagat

SEQ ID NO: 611093 - DNA, 19 bp, Mus musculus
  siRNA target sequence for 2810401C16Rik (NM_175178.2,1521-1539).
cgtgcacttatgaagatgt

SEQ ID NO: 611094 - DNA, 19 bp, Mus musculus
  siRNA target sequence for 2810401C16Rik (NM_175178.2,1547-1565).
caaccgggtgaagttctat

SEQ ID NO: 611095 - DNA, 19 bp, Mus musculus
  siRNA target sequence for 5430437E11Rik (NM_153779.1,281-299).
cgggttcgccaaaaagaca

SEQ ID NO: 611096 - DNA, 19 bp, Mus musculus
  siRNA target sequence for 5430437E11Rik (NM_153779.1,282-300).
gggttcgccaaaaagacat

SEQ ID NO: 611097 - DNA, 19 bp, Mus musculus
  siRNA target sequence for 5430437E11Rik (NM_153779.1,287-305).
cgccaaaaagacattcatt

SEQ ID NO: 611098 - DNA, 19 bp, Mus musculus
  siRNA target sequence for 5430437E11Rik (NM_153779.1,445-463).
ccttccctggcaagtttaa

SEQ ID NO: 611099 - DNA, 19 bp, Mus musculus
  siRNA target sequence for 5430437E11Rik (NM_153779.1,744-762).
gaactgcctcgcaatgagt

SEQ ID NO: 611100 - DNA, 19 bp, Mus musculus
  siRNA target sequence for 5430437E11Rik (NM_153779.1,759-777).
gagtatcgggagtacatca

SEQ ID NO: 611101 - DNA, 19 bp, Mus musculus
  siRNA target sequence for 5430437E11Rik (NM_153779.1,856-874).
cctaccgcagtgcatttga

SEQ ID NO: 611102 - DNA, 19 bp, Mus musculus
  siRNA target sequence for 5430437E11Rik (NM_153779.1,926-944).
ggaaggttacagcaatatt

SEQ ID NO: 611103 - DNA, 19 bp, Mus musculus
  siRNA target sequence for 5430437E11Rik (NM_153779.1,927-945).
gaaggttacagcaatattt

SEQ ID NO: 611104 - DNA, 19 bp, Mus musculus
  siRNA target sequence for 5430437E11Rik (NM_153779.1,1047-1065).
cagaggccactcaaagctt

SEQ ID NO: 611105 - DNA, 19 bp, Mus musculus
  siRNA target sequence for 5430437E11Rik (NM_153779.1,1051-1069).
ggccactcaaagcttacaa

SEQ ID NO: 611106 - DNA, 19 bp, Mus musculus
  siRNA target sequence for Aof1 (NM_172262.1,137-155).
ctcgagggaggtcaaagaa

SEQ ID NO: 611107 - DNA, 19 bp, Mus musculus
  siRNA target sequence for Aof1 (NM_172262.1,256-274).
ggttcgtcggagaagaagt

SEQ ID NO: 611108 - DNA, 19 bp, Mus musculus
  siRNA target sequence for Aof1 (NM_172262.1,257-275).
gttcgtcggagaagaagta

SEQ ID NO: 611109 - DNA, 19 bp, Mus musculus
  siRNA target sequence for Aof1 (NM_172262.1,270-288).
gaagtaccggaaatgtgaa

SEQ ID NO: 611110 - DNA, 19 bp, Mus musculus
  siRNA target sequence for Aof1 (NM_172262.1,341-359).
gatgtgccaaaaatggtta

SEQ ID NO: 611111 - DNA, 19 bp, Mus musculus
  siRNA target sequence for Aof1 (NM_172262.1,433-451).
cacaaagatgggtatgaca

SEQ ID NO: 611112 - DNA, 19 bp, Mus musculus
  siRNA target sequence for Aof1 (NM_172262.1,439-457).
gatgggtatgacaaataca

SEQ ID NO: 611113 - DNA, 19 bp, Mus musculus
  siRNA target sequence for Aof1 (NM_172262.1,450-468).
caaatacagtgcatggaaa

SEQ ID NO: 611114 - DNA, 19 bp, Mus musculus
  siRNA target sequence for Aof1 (NM_172262.1,635-653).
gcatgaagccaaatactat

SEQ ID NO: 611115 - DNA, 19 bp, Mus musculus
  siRNA target sequence for Aof1 (NM_172262.1,664-682).
gacacccccgatcattgtt

SEQ ID NO: 611116 - DNA, 19 bp, Mus musculus
  siRNA target sequence for Aof1 (NM_172262.1,666-684).
cacccccgatcattgttct

SEQ ID NO: 611117 - DNA, 19 bp, Mus musculus
  siRNA target sequence for Aof1 (NM_172262.1,668-686).
cccccgatcattgttcttt

SEQ ID NO: 611118 - DNA, 19 bp, Mus musculus
  siRNA target sequence for Aof1 (NM_172262.1,697-715).
ctgagagtgctggaagttt

SEQ ID NO: 611119 - DNA, 19 bp, Mus musculus
  siRNA target sequence for Aof1 (NM_172262.1,909-927).
ggcagccccctcttcactt

SEQ ID NO: 611120 - DNA, 19 bp, Mus musculus
  siRNA target sequence for Aof1 (NM_172262.1,1026-1044).
ctacgagttcccagagtat

SEQ ID NO: 611121 - DNA, 19 bp, Mus musculus
  siRNA target sequence for Aof1 (NM_172262.1,1087-1105).
ctcgcactgtggtacacaa

SEQ ID NO: 611122 - DNA, 19 bp, Mus musculus
  siRNA target sequence for Aof1 (NM_172262.1,1134-1152).
gtgcattccccacatcatt

SEQ ID NO: 611123 - DNA, 19 bp, Mus musculus
  siRNA target sequence for Aof1 (NM_172262.1,1136-1154).
gcattccccacatcattgt

SEQ ID NO: 611124 - DNA, 19 bp, Mus musculus
  siRNA target sequence for Aof1 (NM_172262.1,1159-1177).
ggccttgtccgcatcagat

SEQ ID NO: 611125 - DNA, 19 bp, Mus musculus
  siRNA target sequence for Aof1 (NM_172262.1,1189-1207).
gtggagaggattctttact

SEQ ID NO: 611126 - DNA, 19 bp, Mus musculus
  siRNA target sequence for Aof1 (NM_172262.1,1192-1210).
gagaggattctttacttca

SEQ ID NO: 611127 - DNA, 19 bp, Mus musculus
  siRNA target sequence for Aof1 (NM_172262.1,1214-1232).
cgaggaaaggcctcatcaa

SEQ ID NO: 611128 - DNA, 19 bp, Mus musculus
  siRNA target sequence for Aof1 (NM_172262.1,1273-1291).
cctaaacactaccacaata

SEQ ID NO: 611129 - DNA, 19 bp, Mus musculus
  siRNA target sequence for Aof1 (NM_172262.1,1334-1352).
ctgctaggcaactgcataa

SEQ ID NO: 611130 - DNA, 19 bp, Mus musculus
  siRNA target sequence for Aof1 (NM_172262.1,1336-1354).
gctaggcaactgcataact

SEQ ID NO: 611131 - DNA, 19 bp, Mus musculus
  siRNA target sequence for Aof1 (NM_172262.1,1337-1355).
ctaggcaactgcataactt

SEQ ID NO: 611132 - DNA, 19 bp, Mus musculus
  siRNA target sequence for Aof1 (NM_172262.1,1479-1497).
cccagtagcactaatgtgt

SEQ ID NO: 611133 - DNA, 19 bp, Mus musculus
  siRNA target sequence for Aof1 (NM_172262.1,1508-1526).
gcatcagcatgcgtaagtt

SEQ ID NO: 611134 - DNA, 19 bp, Mus musculus
  siRNA target sequence for Aof1 (NM_172262.1,1588-1606).
cgcatggactttcatttta

SEQ ID NO: 611135 - DNA, 19 bp, Mus musculus
  siRNA target sequence for Aof1 (NM_172262.1,1656-1674).
ccaagatgtccctttagga

SEQ ID NO: 611136 - DNA, 19 bp, Mus musculus
  siRNA target sequence for Aof1 (NM_172262.1,1686-1704).
ggagatctaccgagctttt

SEQ ID NO: 611137 - DNA, 19 bp, Mus musculus
  siRNA target sequence for Aof1 (NM_172262.1,1811-1829).
ctcgctcctgggatcacaa

SEQ ID NO: 611138 - DNA, 19 bp, Mus musculus
  siRNA target sequence for Aof1 (NM_172262.1,1912-1930).
ctagacattcgactcaaat

SEQ ID NO: 611139 - DNA, 19 bp, Mus musculus
  siRNA target sequence for Aof1 (NM_172262.1,1931-1949).
ctccagtgcaaagtataga

SEQ ID NO: 611140 - DNA, 19 bp, Mus musculus
  siRNA target sequence for Aof1 (NM_172262.1,1933-1951).
ccagtgcaaagtatagatt

SEQ ID NO: 611141 - DNA, 19 bp, Mus musculus
  siRNA target sequence for Aof1 (NM_172262.1,1936-1954).
gtgcaaagtatagattata

SEQ ID NO: 611142 - DNA, 19 bp, Mus musculus
  siRNA target sequence for Aof1 (NM_172262.1,1938-1956).
gcaaagtatagattatact

SEQ ID NO: 611143 - DNA, 19 bp, Mus musculus
  siRNA target sequence for Aof1 (NM_172262.1,1994-2012).
ggcattctgcacaaaaggt

SEQ ID NO: 611144 - DNA, 19 bp, Mus musculus
  siRNA target sequence for Aof1 (NM_172262.1,2000-2018).
ctgcacaaaaggtgttagt

SEQ ID NO: 611145 - DNA, 19 bp, Mus musculus
  siRNA target sequence for Aof1 (NM_172262.1,2002-2020).
gcacaaaaggtgttagtca

SEQ ID NO: 611146 - DNA, 19 bp, Mus musculus
  siRNA target sequence for Aof1 (NM_172262.1,2133-2151).
cttgcagtttccatataga

SEQ ID NO: 611147 - DNA, 19 bp, Mus musculus
  siRNA target sequence for Aof1 (NM_172262.1,2136-2154).
gcagtttccatatagattt

SEQ ID NO: 611148 - DNA, 19 bp, Mus musculus
  siRNA target sequence for Aof1 (NM_172262.1,2216-2234).
gaggcctcttcgctgtatt

SEQ ID NO: 611149 - DNA, 19 bp, Mus musculus
  siRNA target sequence for Aof1 (NM_172262.1,2219-2237).
gcctcttcgctgtattcta

SEQ ID NO: 611150 - DNA, 19 bp, Mus musculus
  siRNA target sequence for Aof1 (NM_172262.1,2220-2238).
cctcttcgctgtattctat

SEQ ID NO: 611151 - DNA, 19 bp, Mus musculus
  siRNA target sequence for Aof1 (NM_172262.1,2377-2395).
ccagaacccacaaagtatt

SEQ ID NO: 611152 - DNA, 19 bp, Mus musculus
  siRNA target sequence for Aof1 (NM_172262.1,2378-2396).
cagaacccacaaagtattt

SEQ ID NO: 611153 - DNA, 19 bp, Mus musculus
  siRNA target sequence for Aof1 (NM_172262.1,2383-2401).
cccacaaagtattttgtca

SEQ ID NO: 611154 - DNA, 19 bp, Mus musculus
  siRNA target sequence for Aof1 (NM_172262.1,2424-2442).
gatccagatggcatatagt

SEQ ID NO: 611155 - DNA, 19 bp, Mus musculus
  siRNA target sequence for Aof1 (NM_172262.1,2462-2480).
gtggcgaggcctatgatat

SEQ ID NO: 611156 - DNA, 19 bp, Mus musculus
  siRNA target sequence for Aof1 (NM_172262.1,2464-2482).
ggcgaggcctatgatatta

SEQ ID NO: 611157 - DNA, 19 bp, Mus musculus
  siRNA target sequence for Aof1 (NM_172262.1,2465-2483).
gcgaggcctatgatattat

SEQ ID NO: 611158 - DNA, 19 bp, Mus musculus
  siRNA target sequence for Aof1 (NM_172262.1,2469-2487).
ggcctatgatattattgct

SEQ ID NO: 611159 - DNA, 19 bp, Mus musculus
  siRNA target sequence for BC027061 (NM_183165.1,177-195).
cagcctctcctgttatcaa

SEQ ID NO: 611160 - DNA, 19 bp, Mus musculus
  siRNA target sequence for BC027061 (NM_183165.1,188-206).
gttatcaaagccgttacaa

SEQ ID NO: 611161 - DNA, 19 bp, Mus musculus
  siRNA target sequence for BC027061 (NM_183165.1,279-297).
gctttcccaacattaaggt

SEQ ID NO: 611162 - DNA, 19 bp, Mus musculus
  siRNA target sequence for BC027061 (NM_183165.1,395-413).
ggagctaagccaaagttaa

SEQ ID NO: 611163 - DNA, 19 bp, Mus musculus
  siRNA target sequence for BC027061 (NM_183165.1,399-417).
ctaagccaaagttaatcta

SEQ ID NO: 611164 - DNA, 19 bp, Mus musculus
  siRNA target sequence for BC027061 (NM_183165.1,485-503).
gcaaaagccaggaggataa

SEQ ID NO: 611165 - DNA, 19 bp, Mus musculus
  siRNA target sequence for BC027061 (NM_183165.1,486-504).
caaaagccaggaggataat

SEQ ID NO: 611166 - DNA, 19 bp, Mus musculus
  siRNA target sequence for BC027061 (NM_183165.1,532-550).
ggagctagcgtatgaaatt

SEQ ID NO: 611167 - DNA, 19 bp, Mus musculus
  siRNA target sequence for BC027061 (NM_183165.1,566-584).
gtttgggccataaaggata

SEQ ID NO: 611168 - DNA, 19 bp, Mus musculus
  siRNA target sequence for BC027061 (NM_183165.1,636-654).
ccaagctcatgtctgaaaa

SEQ ID NO: 611169 - DNA, 19 bp, Mus musculus
  siRNA target sequence for BC027061 (NM_183165.1,723-741).
ccaaatctaaagctgatta

SEQ ID NO: 611170 - DNA, 19 bp, Mus musculus
  siRNA target sequence for BC027061 (NM_183165.1,834-852).
gtgaagtaaagaaaatcta

SEQ ID NO: 611171 - DNA, 19 bp, Mus musculus
  siRNA target sequence for BC027061 (NM_183165.1,916-934).
gtcagttacagctgataaa

SEQ ID NO: 611172 - DNA, 19 bp, Mus musculus
  siRNA target sequence for BC027061 (NM_183165.1,1095-1113).
gcacgtcacttcctgatat

SEQ ID NO: 611173 - DNA, 19 bp, Mus musculus
  siRNA target sequence for BC027061 (NM_183165.1,1236-1254).
gcatgggacatcctattga

SEQ ID NO: 611174 - DNA, 19 bp, Mus musculus
  siRNA target sequence for BC027061 (NM_183165.1,1247-1265).
cctattgacatggatttca

SEQ ID NO: 611175 - DNA, 19 bp, Mus musculus
  siRNA target sequence for BC027061 (NM_183165.1,1281-1299).
ctcatgtcacaaagttttt

SEQ ID NO: 611176 - DNA, 19 bp, Mus musculus
  siRNA target sequence for BC027061 (NM_183165.1,1313-1331).
gtattgctgggaaaataca

SEQ ID NO: 611177 - DNA, 19 bp, Mus musculus
  siRNA target sequence for BC027061 (NM_183165.1,1374-1392).
gcaccagaggacaagagta

SEQ ID NO: 611178 - DNA, 19 bp, Mus musculus
  siRNA target sequence for BC027061 (NM_183165.1,1375-1393).
caccagaggacaagagtat

SEQ ID NO: 611179 - DNA, 19 bp, Mus musculus
  siRNA target sequence for BC027061 (NM_183165.1,1423-1441).
gatgggagccgtcttaatt

SEQ ID NO: 611180 - DNA, 19 bp, Mus musculus
  siRNA target sequence for BC027061 (NM_183165.1,1426-1444).
gggagccgtcttaattggt

SEQ ID NO: 611181 - DNA, 19 bp, Mus musculus
  siRNA target sequence for BC027061 (NM_183165.1,1449-1467).
cggacttagaggaaacatt

SEQ ID NO: 611182 - DNA, 19 bp, Mus musculus
  siRNA target sequence for BC027061 (NM_183165.1,1487-1505).
caaatggacctttcatcat

SEQ ID NO: 611183 - DNA, 19 bp, Mus musculus
  siRNA target sequence for BC027061 (NM_183165.1,1534-1552).
cgacatagaggattatttt

SEQ ID NO: 611184 - DNA, 19 bp, Mus musculus
  siRNA target sequence for Dpyd (NM_170778.1,189-207).
caccgcagccaagaaacta

SEQ ID NO: 611185 - DNA, 19 bp, Mus musculus
  siRNA target sequence for Dpyd (NM_170778.1,191-209).
ccgcagccaagaaactaga

SEQ ID NO: 611186 - DNA, 19 bp, Mus musculus
  siRNA target sequence for Dpyd (NM_170778.1,197-215).
ccaagaaactagacaagaa

SEQ ID NO: 611187 - DNA, 19 bp, Mus musculus
  siRNA target sequence for Dpyd (NM_170778.1,235-253).
gacaagaactgctttacct

SEQ ID NO: 611188 - DNA, 19 bp, Mus musculus
  siRNA target sequence for Dpyd (NM_170778.1,269-287).
gtaattttgatgacatcaa

SEQ ID NO: 611189 - DNA, 19 bp, Mus musculus
  siRNA target sequence for Dpyd (NM_170778.1,373-391).
cccacatctcttgacatta

SEQ ID NO: 611190 - DNA, 19 bp, Mus musculus
  siRNA target sequence for Dpyd (NM_170778.1,374-392).
ccacatctcttgacattaa

SEQ ID NO: 611191 - DNA, 19 bp, Mus musculus
  siRNA target sequence for Dpyd (NM_170778.1,382-400).
cttgacattaaatcattta

SEQ ID NO: 611192 - DNA, 19 bp, Mus musculus
  siRNA target sequence for Dpyd (NM_170778.1,407-425).
gtatcgccaacaagaacta

SEQ ID NO: 611193 - DNA, 19 bp, Mus musculus
  siRNA target sequence for Dpyd (NM_170778.1,411-429).
cgccaacaagaactactat

SEQ ID NO: 611194 - DNA, 19 bp, Mus musculus
  siRNA target sequence for Dpyd (NM_170778.1,430-448).
ggtgcagctaagctgattt

SEQ ID NO: 611195 - DNA, 19 bp, Mus musculus
  siRNA target sequence for Dpyd (NM_170778.1,431-449).
gtgcagctaagctgatttt

SEQ ID NO: 611196 - DNA, 19 bp, Mus musculus
  siRNA target sequence for Dpyd (NM_170778.1,433-451).
gcagctaagctgatttttt

SEQ ID NO: 611197 - DNA, 19 bp, Mus musculus
  siRNA target sequence for Dpyd (NM_170778.1,469-487).
cttacttgtggaatggttt

SEQ ID NO: 611198 - DNA, 19 bp, Mus musculus
  siRNA target sequence for Dpyd (NM_170778.1,540-558).
gggaccaattaatattggt

SEQ ID NO: 611199 - DNA, 19 bp, Mus musculus
  siRNA target sequence for Dpyd (NM_170778.1,578-596).
ctgaggtgttcaaagcaat

SEQ ID NO: 611200 - DNA, 19 bp, Mus musculus
  siRNA target sequence for Dpyd (NM_170778.1,654-672).
ctactcagcaaaaattgca

SEQ ID NO: 611201 - DNA, 19 bp, Mus musculus
  siRNA target sequence for Dpyd (NM_170778.1,659-677).
cagcaaaaattgcactttt

SEQ ID NO: 611202 - DNA, 19 bp, Mus musculus
  siRNA target sequence for Dpyd (NM_170778.1,682-700).
gcagggcctgcgagtataa

SEQ ID NO: 611203 - DNA, 19 bp, Mus musculus
  siRNA target sequence for Dpyd (NM_170778.1,685-703).
gggcctgcgagtataagct

SEQ ID NO: 611204 - DNA, 19 bp, Mus musculus
  siRNA target sequence for Dpyd (NM_170778.1,718-736).
gctcggttgggctattcca

SEQ ID NO: 611205 - DNA, 19 bp, Mus musculus
  siRNA target sequence for Dpyd (NM_170778.1,723-741).
gttgggctattccaacatt

SEQ ID NO: 611206 - DNA, 19 bp, Mus musculus
  siRNA target sequence for Dpyd (NM_170778.1,726-744).
gggctattccaacattact

SEQ ID NO: 611207 - DNA, 19 bp, Mus musculus
  siRNA target sequence for Dpyd (NM_170778.1,727-745).
ggctattccaacattacta

SEQ ID NO: 611208 - DNA, 19 bp, Mus musculus
  siRNA target sequence for Dpyd (NM_170778.1,728-746).
gctattccaacattactat

SEQ ID NO: 611209 - DNA, 19 bp, Mus musculus
  siRNA target sequence for Dpyd (NM_170778.1,729-747).
ctattccaacattactata

SEQ ID NO: 611210 - DNA, 19 bp, Mus musculus
  siRNA target sequence for Dpyd (NM_170778.1,738-756).
cattactatattcgaaaaa

SEQ ID NO: 611211 - DNA, 19 bp, Mus musculus
  siRNA target sequence for Dpyd (NM_170778.1,772-790).
ggtttaagcacttctgaaa

SEQ ID NO: 611212 - DNA, 19 bp, Mus musculus
  siRNA target sequence for Dpyd (NM_170778.1,816-834).
cgtcgtgaattttgagatt

SEQ ID NO: 611213 - DNA, 19 bp, Mus musculus
  siRNA target sequence for Dpyd (NM_170778.1,878-896).
gcctttccaccgatgaaat

SEQ ID NO: 611214 - DNA, 19 bp, Mus musculus
  siRNA target sequence for Dpyd (NM_170778.1,880-898).
ctttccaccgatgaaatga

SEQ ID NO: 611215 - DNA, 19 bp, Mus musculus
  siRNA target sequence for Dpyd (NM_170778.1,929-947).
gagctgcatttattggaat

SEQ ID NO: 611216 - DNA, 19 bp, Mus musculus
  siRNA target sequence for Dpyd (NM_170778.1,950-968).
gcttgccagaacccaaaaa

SEQ ID NO: 611217 - DNA, 19 bp, Mus musculus
  siRNA target sequence for Dpyd (NM_170778.1,997-1015).
gtccagggattttacacat

SEQ ID NO: 611218 - DNA, 19 bp, Mus musculus
  siRNA target sequence for Dpyd (NM_170778.1,1000-1018).
cagggattttacacatcta

SEQ ID NO: 611219 - DNA, 19 bp, Mus musculus
  siRNA target sequence for Dpyd (NM_170778.1,1004-1022).
gattttacacatctaaaga

SEQ ID NO: 611220 - DNA, 19 bp, Mus musculus
  siRNA target sequence for Dpyd (NM_170778.1,1038-1056).
cgccaaaagcagtaaaaca

SEQ ID NO: 611221 - DNA, 19 bp, Mus musculus
  siRNA target sequence for Dpyd (NM_170778.1,1094-1112).
ggggagccgtgattgtact

SEQ ID NO: 611222 - DNA, 19 bp, Mus musculus
  siRNA target sequence for Dpyd (NM_170778.1,1120-1138).
ggagatactgcgtttgact

SEQ ID NO: 611223 - DNA, 19 bp, Mus musculus
  siRNA target sequence for Dpyd (NM_170778.1,1163-1181).
gagcccttcgcgtgttcat

SEQ ID NO: 611224 - DNA, 19 bp, Mus musculus
  siRNA target sequence for Dpyd (NM_170778.1,1174-1192).
gtgttcatcgtcttcagaa

SEQ ID NO: 611225 - DNA, 19 bp, Mus musculus
  siRNA target sequence for Dpyd (NM_170778.1,1194-1212).
gggctttgttaatattcga

SEQ ID NO: 611226 - DNA, 19 bp, Mus musculus
  siRNA target sequence for Dpyd (NM_170778.1,1227-1245).
gatggagctcgctaaggaa

SEQ ID NO: 611227 - DNA, 19 bp, Mus musculus
  siRNA target sequence for Dpyd (NM_170778.1,1233-1251).
gctcgctaaggaagagaaa

SEQ ID NO: 611228 - DNA, 19 bp, Mus musculus
  siRNA target sequence for Dpyd (NM_170778.1,1270-1288).
ctctcgccacggaaggtta

SEQ ID NO: 611229 - DNA, 19 bp, Mus musculus
  siRNA target sequence for Dpyd (NM_170778.1,1272-1290).
ctcgccacggaaggttata

SEQ ID NO: 611230 - DNA, 19 bp, Mus musculus
  siRNA target sequence for Dpyd (NM_170778.1,1274-1292).
cgccacggaaggttatagt

SEQ ID NO: 611231 - DNA, 19 bp, Mus musculus
  siRNA target sequence for Dpyd (NM_170778.1,1276-1294).
ccacggaaggttatagtca

SEQ ID NO: 611232 - DNA, 19 bp, Mus musculus
  siRNA target sequence for Dpyd (NM_170778.1,1277-1295).
cacggaaggttatagtcaa

SEQ ID NO: 611233 - DNA, 19 bp, Mus musculus
  siRNA target sequence for Dpyd (NM_170778.1,1280-1298).
ggaaggttatagtcaaaga

SEQ ID NO: 611234 - DNA, 19 bp, Mus musculus
  siRNA target sequence for Dpyd (NM_170778.1,1281-1299).
gaaggttatagtcaaagat

SEQ ID NO: 611235 - DNA, 19 bp, Mus musculus
  siRNA target sequence for Dpyd (NM_170778.1,1349-1367).
gaaactgggtggaagatga

SEQ ID NO: 611236 - DNA, 19 bp, Mus musculus
  siRNA target sequence for Dpyd (NM_170778.1,1399-1417).
gttattagtgcctttggat

SEQ ID NO: 611237 - DNA, 19 bp, Mus musculus
  siRNA target sequence for Dpyd (NM_170778.1,1456-1474).
cccatcaagtttaacagat

SEQ ID NO: 611238 - DNA, 19 bp, Mus musculus
  siRNA target sequence for Dpyd (NM_170778.1,1475-1493).
ggggtctcccagaagtaaa

SEQ ID NO: 611239 - DNA, 19 bp, Mus musculus
  siRNA target sequence for Dpyd (NM_170778.1,1594-1612).
gcttcatggtacattcaca

SEQ ID NO: 611240 - DNA, 19 bp, Mus musculus
  siRNA target sequence for Dpyd (NM_170778.1,1595-1613).
cttcatggtacattcacaa

SEQ ID NO: 611241 - DNA, 19 bp, Mus musculus
  siRNA target sequence for Dpyd (NM_170778.1,1653-1671).
gcctacaatgcccctattt

SEQ ID NO: 611242 - DNA, 19 bp, Mus musculus
  siRNA target sequence for Dpyd (NM_170778.1,1655-1673).
ctacaatgcccctatttta

SEQ ID NO: 611243 - DNA, 19 bp, Mus musculus
  siRNA target sequence for Dpyd (NM_170778.1,1760-1778).
ccactagcacaccaatgat

SEQ ID NO: 611244 - DNA, 19 bp, Mus musculus
  siRNA target sequence for Dpyd (NM_170778.1,1810-1828).
gctctgaccaaaactttct

SEQ ID NO: 611245 - DNA, 19 bp, Mus musculus
  siRNA target sequence for Dpyd (NM_170778.1,1913-1931).
gctcctttcttaacattga

SEQ ID NO: 611246 - DNA, 19 bp, Mus musculus
  siRNA target sequence for Dpyd (NM_170778.1,1988-2006).
ctgacttcccggacaatat

SEQ ID NO: 611247 - DNA, 19 bp, Mus musculus
  siRNA target sequence for Dpyd (NM_170778.1,2008-2026).
ctgatcgccagcatcatgt

SEQ ID NO: 611248 - DNA, 19 bp, Mus musculus
  siRNA target sequence for Dpyd (NM_170778.1,2018-2036).
gcatcatgtgcagttacaa

SEQ ID NO: 611249 - DNA, 19 bp, Mus musculus
  siRNA target sequence for Dpyd (NM_170778.1,2092-2110).
ctggagttaaatttatcgt

SEQ ID NO: 611250 - DNA, 19 bp, Mus musculus
  siRNA target sequence for Dpyd (NM_170778.1,2200-2218).
gctgttcgggttccatttt

SEQ ID NO: 611251 - DNA, 19 bp, Mus musculus
  siRNA target sequence for Dpyd (NM_170778.1,2201-2219).
ctgttcgggttccattttt

SEQ ID NO: 611252 - DNA, 19 bp, Mus musculus
  siRNA target sequence for Dpyd (NM_170778.1,2212-2230).
ccattttttgccaagttga

SEQ ID NO: 611253 - DNA, 19 bp, Mus musculus
  siRNA target sequence for Dpyd (NM_170778.1,2231-2249).
ccccaaatgtcactgatat

SEQ ID NO: 611254 - DNA, 19 bp, Mus musculus
  siRNA target sequence for Dpyd (NM_170778.1,2234-2252).
caaatgtcactgatattgt

SEQ ID NO: 611255 - DNA, 19 bp, Mus musculus
  siRNA target sequence for Dpyd (NM_170778.1,2316-2334).
gggtctgatgggactgaaa

SEQ ID NO: 611256 - DNA, 19 bp, Mus musculus
  siRNA target sequence for Dpyd (NM_170778.1,2404-2422).
gctatcaggcccattgctt

SEQ ID NO: 611257 - DNA, 19 bp, Mus musculus
  siRNA target sequence for Dpyd (NM_170778.1,2495-2513).
ctgaaagtggacttcagtt

SEQ ID NO: 611258 - DNA, 19 bp, Mus musculus
  siRNA target sequence for Dpyd (NM_170778.1,2542-2560).
gtatgcagcgctattcaga

SEQ ID NO: 611259 - DNA, 19 bp, Mus musculus
  siRNA target sequence for Dpyd (NM_170778.1,2568-2586).
cttcactgtgattgaagat

SEQ ID NO: 611260 - DNA, 19 bp, Mus musculus
  siRNA target sequence for Dpyd (NM_170778.1,2597-2615).
gactcaaagccctgcttta

SEQ ID NO: 611261 - DNA, 19 bp, Mus musculus
  siRNA target sequence for Dpyd (NM_170778.1,2651-2669).
gtcagagtccacccattat

SEQ ID NO: 611262 - DNA, 19 bp, Mus musculus
  siRNA target sequence for Dpyd (NM_170778.1,2655-2673).
gagtccacccattataagt

SEQ ID NO: 611263 - DNA, 19 bp, Mus musculus
  siRNA target sequence for Dpyd (NM_170778.1,2657-2675).
gtccacccattataagtca

SEQ ID NO: 611264 - DNA, 19 bp, Mus musculus
  siRNA target sequence for Dpyd (NM_170778.1,2663-2681).
ccattataagtcatcagaa

SEQ ID NO: 611265 - DNA, 19 bp, Mus musculus
  siRNA target sequence for Dpyd (NM_170778.1,2730-2748).
cagctttggaccttacctt

SEQ ID NO: 611266 - DNA, 19 bp, Mus musculus
  siRNA target sequence for Dpyd (NM_170778.1,2745-2763).
ccttgaacagcgcaagaaa

SEQ ID NO: 611267 - DNA, 19 bp, Mus musculus
  siRNA target sequence for Dpyd (NM_170778.1,2810-2828).
gctcacctctccagagaaa

SEQ ID NO: 611268 - DNA, 19 bp, Mus musculus
  siRNA target sequence for Dpyd (NM_170778.1,2838-2856).
ctcgcaaaagcctattcct

SEQ ID NO: 611269 - DNA, 19 bp, Mus musculus
  siRNA target sequence for Dpyd (NM_170778.1,2854-2872).
cctgccatcaaggatgtaa

SEQ ID NO: 611270 - DNA, 19 bp, Mus musculus
  siRNA target sequence for Dpyd (NM_170778.1,2855-2873).
ctgccatcaaggatgtaat

SEQ ID NO: 611271 - DNA, 19 bp, Mus musculus
  siRNA target sequence for Dpyd (NM_170778.1,2862-2880).
caaggatgtaattggaaaa

SEQ ID NO: 611272 - DNA, 19 bp, Mus musculus
  siRNA target sequence for Dpyd (NM_170778.1,2865-2883).
ggatgtaattggaaaatca

SEQ ID NO: 611273 - DNA, 19 bp, Mus musculus
  siRNA target sequence for Dpyd (NM_170778.1,2915-2933).
gcatcatggaacaagttgt

SEQ ID NO: 611274 - DNA, 19 bp, Mus musculus
  siRNA target sequence for Dpyd (NM_170778.1,2936-2954).
ccctgatcgatgaggaaat

SEQ ID NO: 611275 - DNA, 19 bp, Mus musculus
  siRNA target sequence for Dpyd (NM_170778.1,2975-2993).
gttacatgacctgtaatga

SEQ ID NO: 611276 - DNA, 19 bp, Mus musculus
  siRNA target sequence for Dpyd (NM_170778.1,3012-3030).
ccagttcgatccagaaact

SEQ ID NO: 611277 - DNA, 19 bp, Mus musculus
  siRNA target sequence for Dpyd (NM_170778.1,3042-3060).
cgttagcgacacatgtaca

SEQ ID NO: 611278 - DNA, 19 bp, Mus musculus
  siRNA target sequence for Dpyd (NM_170778.1,3080-3098).
gcgtctgccctattatgga

SEQ ID NO: 611279 - DNA, 19 bp, Mus musculus
  siRNA target sequence for Dpyd (NM_170778.1,3117-3135).
cagggcaacaccttatcaa

SEQ ID NO: 611280 - DNA, 19 bp, Mus musculus
  siRNA target sequence for Mto1 (NM_026658.1,180-198).
cacttcgacgtggtagtta

SEQ ID NO: 611281 - DNA, 19 bp, Mus musculus
  siRNA target sequence for Mto1 (NM_026658.1,290-308).
cggtcagatgtcctgtaat

SEQ ID NO: 611282 - DNA, 19 bp, Mus musculus
  siRNA target sequence for Mto1 (NM_026658.1,394-412).
ctggtatacattacaaagt

SEQ ID NO: 611283 - DNA, 19 bp, Mus musculus
  siRNA target sequence for Mto1 (NM_026658.1,445-463).
gactgagagcacagattga

SEQ ID NO: 611284 - DNA, 19 bp, Mus musculus
  siRNA target sequence for Mto1 (NM_026658.1,456-474).
cagattgaccggaaacttt

SEQ ID NO: 611285 - DNA, 19 bp, Mus musculus
  siRNA target sequence for Mto1 (NM_026658.1,458-476).
gattgaccggaaactttat

SEQ ID NO: 611286 - DNA, 19 bp, Mus musculus
  siRNA target sequence for Mto1 (NM_026658.1,532-550).
gagctgtagaagatctagt

SEQ ID NO: 611287 - DNA, 19 bp, Mus musculus
  siRNA target sequence for Mto1 (NM_026658.1,535-553).
ctgtagaagatctagttct

SEQ ID NO: 611288 - DNA, 19 bp, Mus musculus
  siRNA target sequence for Mto1 (NM_026658.1,747-765).
ctggagaagttgggattta

SEQ ID NO: 611289 - DNA, 19 bp, Mus musculus
  siRNA target sequence for Mto1 (NM_026658.1,767-785).
ggtaggaagactaaagact

SEQ ID NO: 611290 - DNA, 19 bp, Mus musculus
  siRNA target sequence for Mto1 (NM_026658.1,836-854).
caagcacacaccagatgat

SEQ ID NO: 611291 - DNA, 19 bp, Mus musculus
  siRNA target sequence for Mto1 (NM_026658.1,909-927).
caactgccatgttacttga

SEQ ID NO: 611292 - DNA, 19 bp, Mus musculus
  siRNA target sequence for Mto1 (NM_026658.1,963-981).
gagaaccttcacctgaata

SEQ ID NO: 611293 - DNA, 19 bp, Mus musculus
  siRNA target sequence for Mto1 (NM_026658.1,983-1001).
ccacgttcaggaaactaca

SEQ ID NO: 611294 - DNA, 19 bp, Mus musculus
  siRNA target sequence for Mto1 (NM_026658.1,984-1002).
cacgttcaggaaactacaa

SEQ ID NO: 611295 - DNA, 19 bp, Mus musculus
  siRNA target sequence for Mto1 (NM_026658.1,1010-1028).
ccgatactgtccctctatt

SEQ ID NO: 611296 - DNA, 19 bp, Mus musculus
  siRNA target sequence for Mto1 (NM_026658.1,1012-1030).
gatactgtccctctattga

SEQ ID NO: 611297 - DNA, 19 bp, Mus musculus
  siRNA target sequence for Mto1 (NM_026658.1,1016-1034).
ctgtccctctattgaatca

SEQ ID NO: 611298 - DNA, 19 bp, Mus musculus
  siRNA target sequence for Mto1 (NM_026658.1,1106-1124).
ctacccgcaagggttatct

SEQ ID NO: 611299 - DNA, 19 bp, Mus musculus
  siRNA target sequence for Mto1 (NM_026658.1,1110-1128).
ccgcaagggttatctgtta

SEQ ID NO: 611300 - DNA, 19 bp, Mus musculus
  siRNA target sequence for Mto1 (NM_026658.1,1129-1147).
cactgccagctgagttaca

SEQ ID NO: 611301 - DNA, 19 bp, Mus musculus
  siRNA target sequence for Mto1 (NM_026658.1,1280-1298).
gttctttgctggacagata

SEQ ID NO: 611302 - DNA, 19 bp, Mus musculus
  siRNA target sequence for Mto1 (NM_026658.1,1283-1301).
ctttgctggacagataaat

SEQ ID NO: 611303 - DNA, 19 bp, Mus musculus
  siRNA target sequence for Mto1 (NM_026658.1,1408-1426).
gctacataggagtcttgat

SEQ ID NO: 611304 - DNA, 19 bp, Mus musculus
  siRNA target sequence for Mto1 (NM_026658.1,1412-1430).
cataggagtcttgattgat

SEQ ID NO: 611305 - DNA, 19 bp, Mus musculus
  siRNA target sequence for Mto1 (NM_026658.1,1453-1471).
gtgagccataccgaatgtt

SEQ ID NO: 611306 - DNA, 19 bp, Mus musculus
  siRNA target sequence for Mto1 (NM_026658.1,1455-1473).
gagccataccgaatgttca

SEQ ID NO: 611307 - DNA, 19 bp, Mus musculus
  siRNA target sequence for Mto1 (NM_026658.1,1458-1476).
ccataccgaatgttcacta

SEQ ID NO: 611308 - DNA, 19 bp, Mus musculus
  siRNA target sequence for Mto1 (NM_026658.1,1531-1549).
cgttccgagcccataagga

SEQ ID NO: 611309 - DNA, 19 bp, Mus musculus
  siRNA target sequence for Mto1 (NM_026658.1,1532-1550).
gttccgagcccataaggaa

SEQ ID NO: 611310 - DNA, 19 bp, Mus musculus
  siRNA target sequence for Mto1 (NM_026658.1,1562-1580).
gtcctcacagcgatttgaa

SEQ ID NO: 611311 - DNA, 19 bp, Mus musculus
  siRNA target sequence for Mto1 (NM_026658.1,1565-1583).
ctcacagcgatttgaaaga

SEQ ID NO: 611312 - DNA, 19 bp, Mus musculus
  siRNA target sequence for Mto1 (NM_026658.1,1591-1609).
ggatgaagtcatctttaga

SEQ ID NO: 611313 - DNA, 19 bp, Mus musculus
  siRNA target sequence for Mto1 (NM_026658.1,1592-1610).
gatgaagtcatctttagaa

SEQ ID NO: 611314 - DNA, 19 bp, Mus musculus
  siRNA target sequence for Mto1 (NM_026658.1,1600-1618).
catctttagaagaaggtat

SEQ ID NO: 611315 - DNA, 19 bp, Mus musculus
  siRNA target sequence for Mto1 (NM_026658.1,1649-1667).
ctccaaatggaaaaagtta

SEQ ID NO: 611316 - DNA, 19 bp, Mus musculus
  siRNA target sequence for Mto1 (NM_026658.1,1671-1689).
ccacaaattcctataagta

SEQ ID NO: 611317 - DNA, 19 bp, Mus musculus
  siRNA target sequence for Mto1 (NM_026658.1,1672-1690).
cacaaattcctataagtat

SEQ ID NO: 611318 - DNA, 19 bp, Mus musculus
  siRNA target sequence for Mto1 (NM_026658.1,1711-1729).
gtgctctggatgttcttaa

SEQ ID NO: 611319 - DNA, 19 bp, Mus musculus
  siRNA target sequence for Mto1 (NM_026658.1,1713-1731).
gctctggatgttcttaagt

SEQ ID NO: 611320 - DNA, 19 bp, Mus musculus
  siRNA target sequence for Mto1 (NM_026658.1,1714-1732).
ctctggatgttcttaagta

SEQ ID NO: 611321 - DNA, 19 bp, Mus musculus
  siRNA target sequence for Mto1 (NM_026658.1,1771-1789).
ccgagcccttggagaagta

SEQ ID NO: 611322 - DNA, 19 bp, Mus musculus
  siRNA target sequence for Mto1 (NM_026658.1,1772-1790).
cgagcccttggagaagtat

SEQ ID NO: 611323 - DNA, 19 bp, Mus musculus
  siRNA target sequence for Mto1 (NM_026658.1,1773-1791).
gagcccttggagaagtata

SEQ ID NO: 611324 - DNA, 19 bp, Mus musculus
  siRNA target sequence for Mto1 (NM_026658.1,1784-1802).
gaagtatactgcatgtaga

SEQ ID NO: 611325 - DNA, 19 bp, Mus musculus
  siRNA target sequence for Mto1 (NM_026658.1,1805-1823).
gctcgccagaagactgaaa

SEQ ID NO: 611326 - DNA, 19 bp, Mus musculus
  siRNA target sequence for Mto1 (NM_026658.1,1806-1824).
ctcgccagaagactgaaaa

SEQ ID NO: 611327 - DNA, 19 bp, Mus musculus
  siRNA target sequence for Mto1 (NM_026658.1,1820-1838).
gaaaatagaagccagttat

SEQ ID NO: 611328 - DNA, 19 bp, Mus musculus
  siRNA target sequence for Mto1 (NM_026658.1,1830-1848).
gccagttatgagtcagtat

SEQ ID NO: 611329 - DNA, 19 bp, Mus musculus
  siRNA target sequence for Mto1 (NM_026658.1,1908-1926).
cacgagctcgactacctaa

SEQ ID NO: 611330 - DNA, 19 bp, Mus musculus
  siRNA target sequence for Mto1 (NM_026658.1,1927-1945).
ccatcagggatgtgtcatt

SEQ ID NO: 611331 - DNA, 19 bp, Mus musculus
  siRNA target sequence for Mto1 (NM_026658.1,1997-2015).
ggctgctagtcgtattcct

SEQ ID NO: 611332 - DNA, 19 bp, Mus musculus
  siRNA target sequence for Pdcd8 (NM_012019.2,105-123).
gcctggcgggtgctttcaa

SEQ ID NO: 611333 - DNA, 19 bp, Mus musculus
  siRNA target sequence for Pdcd8 (NM_012019.2,158-176).
gtccagaggccgaaacaga

SEQ ID NO: 611334 - DNA, 19 bp, Mus musculus
  siRNA target sequence for Pdcd8 (NM_012019.2,183-201).
ggcttccaggcaacttgtt

SEQ ID NO: 611335 - DNA, 19 bp, Mus musculus
  siRNA target sequence for Pdcd8 (NM_012019.2,261-279).
catcagggggcaaaatgga

SEQ ID NO: 611336 - DNA, 19 bp, Mus musculus
  siRNA target sequence for Pdcd8 (NM_012019.2,266-284).
gggggcaaaatggataatt

SEQ ID NO: 611337 - DNA, 19 bp, Mus musculus
  siRNA target sequence for Pdcd8 (NM_012019.2,295-313).
ccttattgtgggcttatca

SEQ ID NO: 611338 - DNA, 19 bp, Mus musculus
  siRNA target sequence for Pdcd8 (NM_012019.2,296-314).
cttattgtgggcttatcaa

SEQ ID NO: 611339 - DNA, 19 bp, Mus musculus
  siRNA target sequence for Pdcd8 (NM_012019.2,304-322).
gggcttatcaacaatagga

SEQ ID NO: 611340 - DNA, 19 bp, Mus musculus
  siRNA target sequence for Pdcd8 (NM_012019.2,326-344).
ggtgcatatgcctacaaaa

SEQ ID NO: 611341 - DNA, 19 bp, Mus musculus
  siRNA target sequence for Pdcd8 (NM_012019.2,329-347).
gcatatgcctacaaaacta

SEQ ID NO: 611342 - DNA, 19 bp, Mus musculus
  siRNA target sequence for Pdcd8 (NM_012019.2,556-574).
cagggtcctgattgtatct

SEQ ID NO: 611343 - DNA, 19 bp, Mus musculus
  siRNA target sequence for Pdcd8 (NM_012019.2,558-576).
gggtcctgattgtatctga

SEQ ID NO: 611344 - DNA, 19 bp, Mus musculus
  siRNA target sequence for Pdcd8 (NM_012019.2,559-577).
ggtcctgattgtatctgaa

SEQ ID NO: 611345 - DNA, 19 bp, Mus musculus
  siRNA target sequence for Pdcd8 (NM_012019.2,598-616).
gcgacctcctctttcaaaa

SEQ ID NO: 611346 - DNA, 19 bp, Mus musculus
  siRNA target sequence for Pdcd8 (NM_012019.2,668-686).
cagtggaatggaaaagaga

SEQ ID NO: 611347 - DNA, 19 bp, Mus musculus
  siRNA target sequence for Pdcd8 (NM_012019.2,726-744).
ctcaggacctgcctaatat

SEQ ID NO: 611348 - DNA, 19 bp, Mus musculus
  siRNA target sequence for Pdcd8 (NM_012019.2,731-749).
gacctgcctaatattgaga

SEQ ID NO: 611349 - DNA, 19 bp, Mus musculus
  siRNA target sequence for Pdcd8 (NM_012019.2,771-789).
ctgggaaaaaggtagtaca

SEQ ID NO: 611350 - DNA, 19 bp, Mus musculus
  siRNA target sequence for Pdcd8 (NM_012019.2,774-792).
ggaaaaaggtagtacatct

SEQ ID NO: 611351 - DNA, 19 bp, Mus musculus
  siRNA target sequence for Pdcd8 (NM_012019.2,782-800).
gtagtacatctggatgtaa

SEQ ID NO: 611352 - DNA, 19 bp, Mus musculus
  siRNA target sequence for Pdcd8 (NM_012019.2,805-823).
caacatggtgaaacttaat

SEQ ID NO: 611353 - DNA, 19 bp, Mus musculus
  siRNA target sequence for Pdcd8 (NM_012019.2,824-842).
gatggctctcagattacct

SEQ ID NO: 611354 - DNA, 19 bp, Mus musculus
  siRNA target sequence for Pdcd8 (NM_012019.2,845-863).
gaaaagtgcttgattgcaa

SEQ ID NO: 611355 - DNA, 19 bp, Mus musculus
  siRNA target sequence for Pdcd8 (NM_012019.2,865-883).
gggaggcactccaagaagt

SEQ ID NO: 611356 - DNA, 19 bp, Mus musculus
  siRNA target sequence for Pdcd8 (NM_012019.2,905-923).
ggagcagaggtgaagagta

SEQ ID NO: 611357 - DNA, 19 bp, Mus musculus
  siRNA target sequence for Pdcd8 (NM_012019.2,908-926).
gcagaggtgaagagtagaa

SEQ ID NO: 611358 - DNA, 19 bp, Mus musculus
  siRNA target sequence for Pdcd8 (NM_012019.2,975-993).
ctcgggaggtcaagtcaat

SEQ ID NO: 611359 - DNA, 19 bp, Mus musculus
  siRNA target sequence for Pdcd8 (NM_012019.2,977-995).
cgggaggtcaagtcaatta

SEQ ID NO: 611360 - DNA, 19 bp, Mus musculus
  siRNA target sequence for Pdcd8 (NM_012019.2,982-1000).
ggtcaagtcaattacagtt

SEQ ID NO: 611361 - DNA, 19 bp, Mus musculus
  siRNA target sequence for Pdcd8 (NM_012019.2,983-1001).
gtcaagtcaattacagtta

SEQ ID NO: 611362 - DNA, 19 bp, Mus musculus
  siRNA target sequence for Pdcd8 (NM_012019.2,1107-1125).
ggaagatccttcctcaata

SEQ ID NO: 611363 - DNA, 19 bp, Mus musculus
  siRNA target sequence for Pdcd8 (NM_012019.2,1132-1150).
caactggaccatggaaaaa

SEQ ID NO: 611364 - DNA, 19 bp, Mus musculus
  siRNA target sequence for Pdcd8 (NM_012019.2,1174-1192).
gatgcccaatgcaattgta

SEQ ID NO: 611365 - DNA, 19 bp, Mus musculus
  siRNA target sequence for Pdcd8 (NM_012019.2,1177-1195).
gcccaatgcaattgtacaa

SEQ ID NO: 611366 - DNA, 19 bp, Mus musculus
  siRNA target sequence for Pdcd8 (NM_012019.2,1209-1227).
gcggtggcaggttactcat

SEQ ID NO: 611367 - DNA, 19 bp, Mus musculus
  siRNA target sequence for Pdcd8 (NM_012019.2,1210-1228).
cggtggcaggttactcatt

SEQ ID NO: 611368 - DNA, 19 bp, Mus musculus
  siRNA target sequence for Pdcd8 (NM_012019.2,1211-1229).
ggtggcaggttactcatta

SEQ ID NO: 611369 - DNA, 19 bp, Mus musculus
  siRNA target sequence for Pdcd8 (NM_012019.2,1212-1230).
gtggcaggttactcattaa

SEQ ID NO: 611370 - DNA, 19 bp, Mus musculus
  siRNA target sequence for Pdcd8 (NM_012019.2,1279-1297).
gggcctagagcccaatgtt

SEQ ID NO: 611371 - DNA, 19 bp, Mus musculus
  siRNA target sequence for Pdcd8 (NM_012019.2,1309-1327).
gactggcggactggaaata

SEQ ID NO: 611372 - DNA, 19 bp, Mus musculus
  siRNA target sequence for Pdcd8 (NM_012019.2,1311-1329).
ctggcggactggaaataga

SEQ ID NO: 611373 - DNA, 19 bp, Mus musculus
  siRNA target sequence for Pdcd8 (NM_012019.2,1313-1331).
ggcggactggaaatagatt

SEQ ID NO: 611374 - DNA, 19 bp, Mus musculus
  siRNA target sequence for Pdcd8 (NM_012019.2,1364-1382).
ctccaagcacgttctaaca

SEQ ID NO: 611375 - DNA, 19 bp, Mus musculus
  siRNA target sequence for Pdcd8 (NM_012019.2,1367-1385).
caagcacgttctaacatct

SEQ ID NO: 611376 - DNA, 19 bp, Mus musculus
  siRNA target sequence for Pdcd8 (NM_012019.2,1403-1421).
gcatgcttctatgatataa

SEQ ID NO: 611377 - DNA, 19 bp, Mus musculus
  siRNA target sequence for Pdcd8 (NM_012019.2,1434-1452).
ggcgagtagagcatcatga

SEQ ID NO: 611378 - DNA, 19 bp, Mus musculus
  siRNA target sequence for Pdcd8 (NM_012019.2,1435-1453).
gcgagtagagcatcatgat

SEQ ID NO: 611379 - DNA, 19 bp, Mus musculus
  siRNA target sequence for Pdcd8 (NM_012019.2,1509-1527).
catactggcatcagtcaat

SEQ ID NO: 611380 - DNA, 19 bp, Mus musculus
  siRNA target sequence for Pdcd8 (NM_012019.2,1555-1573).
cggctatgaagctattggt

SEQ ID NO: 611381 - DNA, 19 bp, Mus musculus
  siRNA target sequence for Pdcd8 (NM_012019.2,1571-1589).
ggtctggtggatagtagtt

SEQ ID NO: 611382 - DNA, 19 bp, Mus musculus
  siRNA target sequence for Pdcd8 (NM_012019.2,1572-1590).
gtctggtggatagtagttt

SEQ ID NO: 611383 - DNA, 19 bp, Mus musculus
  siRNA target sequence for Pdcd8 (NM_012019.2,1814-1832).
gtgctatggaacgtcttta

SEQ ID NO: 611384 - DNA, 19 bp, Mus musculus
  siRNA target sequence for Pdcd8 (NM_012019.2,1841-1859).
ccaattgcaaggaagatca

SEQ ID NO: 611385 - DNA, 19 bp, Mus musculus
  siRNA target sequence for Pdcd8 (NM_012019.2,1842-1860).
caattgcaaggaagatcat

SEQ ID NO: 611386 - DNA, 19 bp, Mus musculus
  siRNA target sequence for Pdcd8 (NM_012019.2,1864-1882).
ggacggtgagcaacatgaa

SEQ ID NO: 611387 - DNA, 19 bp, Mus musculus
  siRNA target sequence for Pdcd8 (NM_012019.2,1867-1885).
cggtgagcaacatgaagat

SEQ ID NO: 611388 - DNA, 19 bp, Mus musculus
  siRNA target sequence for Sqrdl (NM_021507.4,497-515).
ccggacccctccaattgca

SEQ ID NO: 611389 - DNA, 19 bp, Mus musculus
  siRNA target sequence for Sqrdl (NM_021507.4,498-516).
cggacccctccaattgcat

SEQ ID NO: 611390 - DNA, 19 bp, Mus musculus
  siRNA target sequence for Sqrdl (NM_021507.4,499-517).
ggacccctccaattgcata

SEQ ID NO: 611391 - DNA, 19 bp, Mus musculus
  siRNA target sequence for Sqrdl (NM_021507.4,896-914).
gctttgcttatcccaaaat

SEQ ID NO: 611392 - DNA, 19 bp, Mus musculus
  siRNA target sequence for Sqrdl (NM_021507.4,907-925).
cccaaaatagggtccaatt

SEQ ID NO: 611393 - DNA, 19 bp, Mus musculus
  siRNA target sequence for Sqrdl (NM_021507.4,908-926).
ccaaaatagggtccaatta

SEQ ID NO: 611394 - DNA, 19 bp, Mus musculus
  siRNA target sequence for Sqrdl (NM_021507.4,1101-1119).
cttcaacacagctttagga

SEQ ID NO: 611395 - DNA, 19 bp, Mus musculus
  siRNA target sequence for Sqrdl (NM_021507.4,1176-1194).
ggacgtctctgtcaactat

SEQ ID NO: 611396 - DNA, 19 bp, Mus musculus
  siRNA target sequence for Sqrdl (NM_021507.4,1177-1195).
gacgtctctgtcaactata

SEQ ID NO: 611397 - DNA, 19 bp, Mus musculus
  siRNA target sequence for Sqrdl (NM_021507.4,1264-1282).
gagacgcatgtgattcctt

SEQ ID NO: 611398 - DNA, 19 bp, Mus musculus
  siRNA target sequence for Sqrdl (NM_021507.4,1266-1284).
gacgcatgtgattccttat

SEQ ID NO: 611399 - DNA, 19 bp, Mus musculus
  siRNA target sequence for Sqrdl (NM_021507.4,1268-1286).
cgcatgtgattccttatga

SEQ ID NO: 611400 - DNA, 19 bp, Mus musculus
  siRNA target sequence for Sqrdl (NM_021507.4,1280-1298).
cttatgaaatgcttcatgt

SEQ ID NO: 611401 - DNA, 19 bp, Mus musculus
  siRNA target sequence for Sqrdl (NM_021507.4,1428-1446).
caccaatcttccaacttca

SEQ ID NO: 611402 - DNA, 19 bp, Mus musculus
  siRNA target sequence for Sqrdl (NM_021507.4,1482-1500).
ccttgatagaacaatgtgt

SEQ ID NO: 611403 - DNA, 19 bp, Mus musculus
  siRNA target sequence for Sqrdl (NM_021507.4,1520-1538).
gacccataaaaaagtatga

SEQ ID NO: 611404 - DNA, 19 bp, Mus musculus
  siRNA target sequence for Sqrdl (NM_021507.4,1568-1586).
gctacaaccgagtgattct

SEQ ID NO: 611405 - DNA, 19 bp, Mus musculus
  siRNA target sequence for Sqrdl (NM_021507.4,1626-1644).
cccttttgatcagagtaaa

SEQ ID NO: 611406 - DNA, 19 bp, Mus musculus
  siRNA target sequence for Sqrdl (NM_021507.4,1636-1654).
cagagtaaagagcgaatta

SEQ ID NO: 611407 - DNA, 19 bp, Mus musculus
  siRNA target sequence for Sqrdl (NM_021507.4,1638-1656).
gagtaaagagcgaattact

SEQ ID NO: 611408 - DNA, 19 bp, Mus musculus
  siRNA target sequence for Sqrdl (NM_021507.4,1640-1658).
gtaaagagcgaattactat

SEQ ID NO: 611409 - DNA, 19 bp, Mus musculus
  siRNA target sequence for Sqrdl (NM_021507.4,1737-1755).
cttgcgaaagctgtttcat

SEQ ID NO: 611410 - DNA, 19 bp, Mus musculus
  siRNA target sequence for Aldh1a1 (NM_013467.1,369-387).
ctcaatggtgggaaagtct

SEQ ID NO: 611411 - DNA, 19 bp, Mus musculus
  siRNA target sequence for Aldh1a1 (NM_013467.1,408-426).
gatttaggaggctgcataa

SEQ ID NO: 611412 - DNA, 19 bp, Mus musculus
  siRNA target sequence for Aldh1a1 (NM_013467.1,415-433).
gaggctgcataaaagcatt

SEQ ID NO: 611413 - DNA, 19 bp, Mus musculus
  siRNA target sequence for Aldh1a1 (NM_013467.1,417-435).
ggctgcataaaagcattaa

SEQ ID NO: 611414 - DNA, 19 bp, Mus musculus
  siRNA target sequence for Aldh1a1 (NM_013467.1,418-436).
gctgcataaaagcattaaa

SEQ ID NO: 611415 - DNA, 19 bp, Mus musculus
  siRNA target sequence for Aldh1a1 (NM_013467.1,558-576).
ccaatgctcatgttcattt

SEQ ID NO: 611416 - DNA, 19 bp, Mus musculus
  siRNA target sequence for Aldh1a1 (NM_013467.1,1402-1420).
gggttaactgctatatcat

SEQ ID NO: 611417 - DNA, 19 bp, Mus musculus
  siRNA target sequence for Aldh1a1 (NM_013467.1,1514-1532).
gacagtcgcaatgaagata

SEQ ID NO: 611418 - DNA, 19 bp, Mus musculus
  siRNA target sequence for Aldh1a2 (NM_009022.2,88-106).
cgcccaacctcgagatcaa

SEQ ID NO: 611419 - DNA, 19 bp, Mus musculus
  siRNA target sequence for Aldh1a2 (NM_009022.2,349-367).
gggcaactcttgcaactat

SEQ ID NO: 611420 - DNA, 19 bp, Mus musculus
  siRNA target sequence for Aldh1a2 (NM_009022.2,389-407).
gccattcctgcaagctttt

SEQ ID NO: 611421 - DNA, 19 bp, Mus musculus
  siRNA target sequence for Aldh1a2 (NM_009022.2,431-449).
caaaaccctgaggtattat

SEQ ID NO: 611422 - DNA, 19 bp, Mus musculus
  siRNA target sequence for Aldh1a2 (NM_009022.2,495-513).
ggagactattttactttca

SEQ ID NO: 611423 - DNA, 19 bp, Mus musculus
  siRNA target sequence for Aldh1a2 (NM_009022.2,572-590).
gatgttcacctggaaaatt

SEQ ID NO: 611424 - DNA, 19 bp, Mus musculus
  siRNA target sequence for Aldh1a2 (NM_009022.2,575-593).
gttcacctggaaaattgct

SEQ ID NO: 611425 - DNA, 19 bp, Mus musculus
  siRNA target sequence for Aldh1a2 (NM_009022.2,645-663).
ccgctcagtgcactgtata

SEQ ID NO: 611426 - DNA, 19 bp, Mus musculus
  siRNA target sequence for Aldh1a2 (NM_009022.2,646-664).
cgctcagtgcactgtatat

SEQ ID NO: 611427 - DNA, 19 bp, Mus musculus
  siRNA target sequence for Aldh1a2 (NM_009022.2,693-711).
ccacccggagtcgtcaata

SEQ ID NO: 611428 - DNA, 19 bp, Mus musculus
  siRNA target sequence for Aldh1a2 (NM_009022.2,694-712).
cacccggagtcgtcaatat

SEQ ID NO: 611429 - DNA, 19 bp, Mus musculus
  siRNA target sequence for Aldh1a2 (NM_009022.2,697-715).
ccggagtcgtcaatatcct

SEQ ID NO: 611430 - DNA, 19 bp, Mus musculus
  siRNA target sequence for Aldh1a2 (NM_009022.2,754-772).
ctcacatcggcatagacaa

SEQ ID NO: 611431 - DNA, 19 bp, Mus musculus
  siRNA target sequence for Aldh1a2 (NM_009022.2,762-780).
ggcatagacaagattgcat

SEQ ID NO: 611432 - DNA, 19 bp, Mus musculus
  siRNA target sequence for Aldh1a2 (NM_009022.2,763-781).
gcatagacaagattgcatt

SEQ ID NO: 611433 - DNA, 19 bp, Mus musculus
  siRNA target sequence for Aldh1a2 (NM_009022.2,793-811).
ctgaggttggaaagcttat

SEQ ID NO: 611434 - DNA, 19 bp, Mus musculus
  siRNA target sequence for Aldh1a2 (NM_009022.2,797-815).
ggttggaaagcttattcaa

SEQ ID NO: 611435 - DNA, 19 bp, Mus musculus
  siRNA target sequence for Aldh1a2 (NM_009022.2,862-880).
gagggaagagccctaatat

SEQ ID NO: 611436 - DNA, 19 bp, Mus musculus
  siRNA target sequence for Aldh1a2 (NM_009022.2,864-882).
gggaagagccctaatatta

SEQ ID NO: 611437 - DNA, 19 bp, Mus musculus
  siRNA target sequence for Aldh1a2 (NM_009022.2,866-884).
gaagagccctaatattatt

SEQ ID NO: 611438 - DNA, 19 bp, Mus musculus
  siRNA target sequence for Aldh1a2 (NM_009022.2,962-980).
cgcagggtctcgcatcttt

SEQ ID NO: 611439 - DNA, 19 bp, Mus musculus
  siRNA target sequence for Aldh1a2 (NM_009022.2,964-982).
cagggtctcgcatctttgt

SEQ ID NO: 611440 - DNA, 19 bp, Mus musculus
  siRNA target sequence for Aldh1a2 (NM_009022.2,1074-1092).
cagggtcctcagatcgata

SEQ ID NO: 611441 - DNA, 19 bp, Mus musculus
  siRNA target sequence for Aldh1a2 (NM_009022.2,1077-1095).
ggtcctcagatcgataaga

SEQ ID NO: 611442 - DNA, 19 bp, Mus musculus
  siRNA target sequence for Aldh1a2 (NM_009022.2,1078-1096).
gtcctcagatcgataagaa

SEQ ID NO: 611443 - DNA, 19 bp, Mus musculus
  siRNA target sequence for Aldh1a2 (NM_009022.2,1081-1099).
ctcagatcgataagaaaca

SEQ ID NO: 611444 - DNA, 19 bp, Mus musculus
  siRNA target sequence for Aldh1a2 (NM_009022.2,1266-1284).
caagaaattttgaggttta

SEQ ID NO: 611445 - DNA, 19 bp, Mus musculus
  siRNA target sequence for Aldh1a2 (NM_009022.2,1277-1295).
gaggtttaagactatggat

SEQ ID NO: 611446 - DNA, 19 bp, Mus musculus
  siRNA target sequence for Aldh1a2 (NM_009022.2,1376-1394).
ggtatcctccgcaatgcaa

SEQ ID NO: 611447 - DNA, 19 bp, Mus musculus
  siRNA target sequence for Aldh1a2 (NM_009022.2,1400-1418).
gacagtttggatcaattgt

SEQ ID NO: 611448 - DNA, 19 bp, Mus musculus
  siRNA target sequence for Aldh1a2 (NM_009022.2,1443-1461).
ccctttggggggttcaaga

SEQ ID NO: 611449 - DNA, 19 bp, Mus musculus
  siRNA target sequence for Aldh1a2 (NM_009022.2,1475-1493).
gagagaaatgggtgagttt

SEQ ID NO: 611450 - DNA, 19 bp, Mus musculus
  siRNA target sequence for Aldh1a2 (NM_009022.2,1496-1514).
cttacgggagtattcagaa

SEQ ID NO: 611451 - DNA, 19 bp, Mus musculus
  siRNA target sequence for Aldh1a2 (NM_009022.2,1503-1521).
gagtattcagaagtaaaga

SEQ ID NO: 611452 - DNA, 19 bp, Mus musculus
  siRNA target sequence for Aldh1a3 (NM_053080.2,415-433).
caccggcaagccattcctt

SEQ ID NO: 611453 - DNA, 19 bp, Mus musculus
  siRNA target sequence for Aldh1a3 (NM_053080.2,448-466).
cgacctggaaggctgtatt

SEQ ID NO: 611454 - DNA, 19 bp, Mus musculus
  siRNA target sequence for Aldh1a3 (NM_053080.2,485-503).
gccgggtgggcagacaaaa

SEQ ID NO: 611455 - DNA, 19 bp, Mus musculus
  siRNA target sequence for Aldh1a3 (NM_053080.2,486-504).
ccgggtgggcagacaaaat

SEQ ID NO: 611456 - DNA, 19 bp, Mus musculus
  siRNA target sequence for Aldh1a3 (NM_053080.2,733-751).
gggtgtggtgaacattgta

SEQ ID NO: 611457 - DNA, 19 bp, Mus musculus
  siRNA target sequence for Aldh1a3 (NM_053080.2,766-784).
cactgtgggagcagcaatt

SEQ ID NO: 611458 - DNA, 19 bp, Mus musculus
  siRNA target sequence for Aldh1a3 (NM_053080.2,786-804).
cctcccatccgcagatcaa

SEQ ID NO: 611459 - DNA, 19 bp, Mus musculus
  siRNA target sequence for Aldh1a3 (NM_053080.2,789-807).
cccatccgcagatcaacaa

SEQ ID NO: 611460 - DNA, 19 bp, Mus musculus
  siRNA target sequence for Aldh1a3 (NM_053080.2,1116-1134).
ctcagatcgaccaaaagca

SEQ ID NO: 611461 - DNA, 19 bp, Mus musculus
  siRNA target sequence for Aldh1a3 (NM_053080.2,1175-1193).
gaaggggccaagctagaat

SEQ ID NO: 611462 - DNA, 19 bp, Mus musculus
  siRNA target sequence for Aldh1a3 (NM_053080.2,1237-1255).
cacggtcttctcagatgtt

SEQ ID NO: 611463 - DNA, 19 bp, Mus musculus
  siRNA target sequence for Aldh1a3 (NM_053080.2,1248-1266).
cagatgttacggacaacat

SEQ ID NO: 611464 - DNA, 19 bp, Mus musculus
  siRNA target sequence for Aldh1a3 (NM_053080.2,1250-1268).
gatgttacggacaacatga

SEQ ID NO: 611465 - DNA, 19 bp, Mus musculus
  siRNA target sequence for Aldh1a3 (NM_053080.2,1305-1323).
cgatcctgaagttcaaaaa

SEQ ID NO: 611466 - DNA, 19 bp, Mus musculus
  siRNA target sequence for Aldh1a3 (NM_053080.2,1377-1395).
cagtgttcaccaaaaacct

SEQ ID NO: 611467 - DNA, 19 bp, Mus musculus
  siRNA target sequence for Aldh1a3 (NM_053080.2,1447-1465).
caactgctacaatgcattt

SEQ ID NO: 611468 - DNA, 19 bp, Mus musculus
  siRNA target sequence for Aldh1a3 (NM_053080.2,1453-1471).
ctacaatgcattttatgca

SEQ ID NO: 611469 - DNA, 19 bp, Mus musculus
  siRNA target sequence for Aldh1a3 (NM_053080.2,1510-1528).
cagagaactaggagaatat

SEQ ID NO: 611470 - DNA, 19 bp, Mus musculus
  siRNA target sequence for Aldh2 (NM_009656.1,250-268).
gacgccgtcagcaggaaaa

SEQ ID NO: 611471 - DNA, 19 bp, Mus musculus
  siRNA target sequence for Aldh2 (NM_009656.1,252-270).
cgccgtcagcaggaaaaca

SEQ ID NO: 611472 - DNA, 19 bp, Mus musculus
  siRNA target sequence for Aldh2 (NM_009656.1,429-447).
ccgattggcggatctcatt

SEQ ID NO: 611473 - DNA, 19 bp, Mus musculus
  siRNA target sequence for Aldh2 (NM_009656.1,431-449).
gattggcggatctcattga

SEQ ID NO: 611474 - DNA, 19 bp, Mus musculus
  siRNA target sequence for Aldh2 (NM_009656.1,576-594).
gtaccatgggaaaaccatt

SEQ ID NO: 611475 - DNA, 19 bp, Mus musculus
  siRNA target sequence for Aldh2 (NM_009656.1,766-784).
ctctacgtggccaacttga

SEQ ID NO: 611476 - DNA, 19 bp, Mus musculus
  siRNA target sequence for Aldh2 (NM_009656.1,802-820).
ccccctggcgtggtcaata

SEQ ID NO: 611477 - DNA, 19 bp, Mus musculus
  siRNA target sequence for Aldh2 (NM_009656.1,803-821).
cccctggcgtggtcaatat

SEQ ID NO: 611478 - DNA, 19 bp, Mus musculus
  siRNA target sequence for Aldh2 (NM_009656.1,902-920).
cggaggttggtcacctaat

SEQ ID NO: 611479 - DNA, 19 bp, Mus musculus
  siRNA target sequence for Aldh2 (NM_009656.1,1085-1103).
ccttcgtgcaggagaatgt

SEQ ID NO: 611480 - DNA, 19 bp, Mus musculus
  siRNA target sequence for Aldh2 (NM_009656.1,1089-1107).
cgtgcaggagaatgtgtat

SEQ ID NO: 611481 - DNA, 19 bp, Mus musculus
  siRNA target sequence for Aldh2 (NM_009656.1,1195-1213).
gtggatgaaactcagttta

SEQ ID NO: 611482 - DNA, 19 bp, Mus musculus
  siRNA target sequence for Aldh2 (NM_009656.1,1313-1331).
ccgtgttcggggacgtaaa

SEQ ID NO: 611483 - DNA, 19 bp, Mus musculus
  siRNA target sequence for Aldh2 (NM_009656.1,1314-1332).
cgtgttcggggacgtaaaa

SEQ ID NO: 611484 - DNA, 19 bp, Mus musculus
  siRNA target sequence for Aldh2 (NM_009656.1,1419-1437).
ggccaatgattctaagtat

SEQ ID NO: 611485 - DNA, 19 bp, Mus musculus
  siRNA target sequence for Aldh2 (NM_009656.1,1507-1525).
ggcactgtgtggatcaact

SEQ ID NO: 611486 - DNA, 19 bp, Mus musculus
  siRNA target sequence for Aldh2 (NM_009656.1,1521-1539).
caactgctacgatgtgttt

SEQ ID NO: 611487 - DNA, 19 bp, Mus musculus
  siRNA target sequence for Aldh2 (NM_009656.1,1550-1568).
ctccatttgggggctataa

SEQ ID NO: 611488 - DNA, 19 bp, Mus musculus
  siRNA target sequence for Aldh2 (NM_009656.1,1552-1570).
ccatttgggggctataaga

SEQ ID NO: 611489 - DNA, 19 bp, Mus musculus
  siRNA target sequence for Aldh2 (NM_009656.1,1553-1571).
catttgggggctataagat

SEQ ID NO: 611490 - DNA, 19 bp, Mus musculus
  siRNA target sequence for Aldh3a2 (NM_007437.1,221-239).
gcgcgagaaggaaatctta

SEQ ID NO: 611491 - DNA, 19 bp, Mus musculus
  siRNA target sequence for Aldh3a2 (NM_007437.1,249-267).
gcggcagacctgagcaaaa

SEQ ID NO: 611492 - DNA, 19 bp, Mus musculus
  siRNA target sequence for Aldh3a2 (NM_007437.1,253-271).
cagacctgagcaaaagtga

SEQ ID NO: 611493 - DNA, 19 bp, Mus musculus
  siRNA target sequence for Aldh3a2 (NM_007437.1,260-278).
gagcaaaagtgaactcaat

SEQ ID NO: 611494 - DNA, 19 bp, Mus musculus
  siRNA target sequence for Aldh3a2 (NM_007437.1,352-370).
ctgcgagaccggctaagaa

SEQ ID NO: 611495 - DNA, 19 bp, Mus musculus
  siRNA target sequence for Aldh3a2 (NM_007437.1,415-433).
ctctgggagtcgtactgat

SEQ ID NO: 611496 - DNA, 19 bp, Mus musculus
  siRNA target sequence for Aldh3a2 (NM_007437.1,417-435).
ctgggagtcgtactgatta

SEQ ID NO: 611497 - DNA, 19 bp, Mus musculus
  siRNA target sequence for Aldh3a2 (NM_007437.1,419-437).
gggagtcgtactgattatt

SEQ ID NO: 611498 - DNA, 19 bp, Mus musculus
  siRNA target sequence for Aldh3a2 (NM_007437.1,534-552).
gaaaacacggccaagatct

SEQ ID NO: 611499 - DNA, 19 bp, Mus musculus
  siRNA target sequence for Aldh3a2 (NM_007437.1,584-602).
ggacctgtatgcgattgtt

SEQ ID NO: 611500 - DNA, 19 bp, Mus musculus
  siRNA target sequence for Aldh3a2 (NM_007437.1,585-603).
gacctgtatgcgattgtta

SEQ ID NO: 611501 - DNA, 19 bp, Mus musculus
  siRNA target sequence for Aldh3a2 (NM_007437.1,587-605).
cctgtatgcgattgttaat

SEQ ID NO: 611502 - DNA, 19 bp, Mus musculus
  siRNA target sequence for Aldh3a2 (NM_007437.1,642-660).
cggtttgaccacattctct

SEQ ID NO: 611503 - DNA, 19 bp, Mus musculus
  siRNA target sequence for Aldh3a2 (NM_007437.1,675-693).
gcagttggaaaaattgtca

SEQ ID NO: 611504 - DNA, 19 bp, Mus musculus
  siRNA target sequence for Aldh3a2 (NM_007437.1,801-819).
gcctggggaaagtacatga

SEQ ID NO: 611505 - DNA, 19 bp, Mus musculus
  siRNA target sequence for Aldh3a2 (NM_007437.1,833-851).
ctgcattgctcctgactat

SEQ ID NO: 611506 - DNA, 19 bp, Mus musculus
  siRNA target sequence for Aldh3a2 (NM_007437.1,868-886).
ccctccagaatcaaatcgt

SEQ ID NO: 611507 - DNA, 19 bp, Mus musculus
  siRNA target sequence for Aldh3a2 (NM_007437.1,869-887).
cctccagaatcaaatcgta

SEQ ID NO: 611508 - DNA, 19 bp, Mus musculus
  siRNA target sequence for Aldh3a2 (NM_007437.1,940-958).
ctcctgactatgaaaggat

SEQ ID NO: 611509 - DNA, 19 bp, Mus musculus
  siRNA target sequence for Aldh3a2 (NM_007437.1,959-977).
catcaatcttcgtcacttt

SEQ ID NO: 611510 - DNA, 19 bp, Mus musculus
  siRNA target sequence for Aldh3a2 (NM_007437.1,972-990).
cactttaagaggttacaaa

SEQ ID NO: 611511 - DNA, 19 bp, Mus musculus
  siRNA target sequence for Aldh3a2 (NM_007437.1,982-1000).
ggttacaaagtctgcttaa

SEQ ID NO: 611512 - DNA, 19 bp, Mus musculus
  siRNA target sequence for Aldh3a2 (NM_007437.1,993-1011).
ctgcttaaaggccagaaaa

SEQ ID NO: 611513 - DNA, 19 bp, Mus musculus
  siRNA target sequence for Aldh3a2 (NM_007437.1,995-1013).
gcttaaaggccagaaaata

SEQ ID NO: 611514 - DNA, 19 bp, Mus musculus
  siRNA target sequence for Aldh3a2 (NM_007437.1,1054-1072).
ccccaaccatacttacaga

SEQ ID NO: 611515 - DNA, 19 bp, Mus musculus
  siRNA target sequence for Aldh3a2 (NM_007437.1,1055-1073).
cccaaccatacttacagat

SEQ ID NO: 611516 - DNA, 19 bp, Mus musculus
  siRNA target sequence for Aldh3a2 (NM_007437.1,1092-1110).
gtgatgcaagaagaaattt

SEQ ID NO: 611517 - DNA, 19 bp, Mus musculus
  siRNA target sequence for Aldh3a2 (NM_007437.1,1114-1132).
gaccaattcttccaatagt

SEQ ID NO: 611518 - DNA, 19 bp, Mus musculus
  siRNA target sequence for Aldh3a2 (NM_007437.1,1125-1143).
ccaatagtgtctgtgaaaa

SEQ ID NO: 611519 - DNA, 19 bp, Mus musculus
  siRNA target sequence for Aldh3a2 (NM_007437.1,1146-1164).
gtagacgaagccataaatt

SEQ ID NO: 611520 - DNA, 19 bp, Mus musculus
  siRNA target sequence for Aldh3a2 (NM_007437.1,1149-1167).
gacgaagccataaatttca

SEQ ID NO: 611521 - DNA, 19 bp, Mus musculus
  siRNA target sequence for Aldh3a2 (NM_007437.1,1188-1206).
ctggctctctacgtatttt

SEQ ID NO: 611522 - DNA, 19 bp, Mus musculus
  siRNA target sequence for Aldh3a2 (NM_007437.1,1199-1217).
cgtattttctcgtaacaat

SEQ ID NO: 611523 - DNA, 19 bp, Mus musculus
  siRNA target sequence for Aldh3a2 (NM_007437.1,1223-1241).
catcaaacgggtgatagat

SEQ ID NO: 611524 - DNA, 19 bp, Mus musculus
  siRNA target sequence for Aldh3a2 (NM_007437.1,1258-1276).
gagtcaccggcaatgatgt

SEQ ID NO: 611525 - DNA, 19 bp, Mus musculus
  siRNA target sequence for Aldh3a2 (NM_007437.1,1338-1356).
gcgtatcatggaaaataca

SEQ ID NO: 611526 - DNA, 19 bp, Mus musculus
  siRNA target sequence for Aldh7a1 (NM_138600.1,339-357).
ggctccgcgaggataacga

SEQ ID NO: 611527 - DNA, 19 bp, Mus musculus
  siRNA target sequence for Aldh7a1 (NM_138600.1,350-368).
gataacgagggcgtgtata

SEQ ID NO: 611528 - DNA, 19 bp, Mus musculus
  siRNA target sequence for Aldh7a1 (NM_138600.1,355-373).
cgagggcgtgtataatgga

SEQ ID NO: 611529 - DNA, 19 bp, Mus musculus
  siRNA target sequence for Aldh7a1 (NM_138600.1,392-410).
gaggtaattacgacctatt

SEQ ID NO: 611530 - DNA, 19 bp, Mus musculus
  siRNA target sequence for Aldh7a1 (NM_138600.1,394-412).
ggtaattacgacctattgt

SEQ ID NO: 611531 - DNA, 19 bp, Mus musculus
  siRNA target sequence for Aldh7a1 (NM_138600.1,522-540).
ccccaaaacgcggagaaat

SEQ ID NO: 611532 - DNA, 19 bp, Mus musculus
  siRNA target sequence for Aldh7a1 (NM_138600.1,525-543).
caaaacgcggagaaatagt

SEQ ID NO: 611533 - DNA, 19 bp, Mus musculus
  siRNA target sequence for Aldh7a1 (NM_138600.1,652-670).
cgtggacgtctgcgattat

SEQ ID NO: 611534 - DNA, 19 bp, Mus musculus
  siRNA target sequence for Aldh7a1 (NM_138600.1,655-673).
ggacgtctgcgattatgct

SEQ ID NO: 611535 - DNA, 19 bp, Mus musculus
  siRNA target sequence for Aldh7a1 (NM_138600.1,701-719).
cccaccttgccttctgaaa

SEQ ID NO: 611536 - DNA, 19 bp, Mus musculus
  siRNA target sequence for Aldh7a1 (NM_138600.1,725-743).
ggccatgctctcatcgaaa

SEQ ID NO: 611537 - DNA, 19 bp, Mus musculus
  siRNA target sequence for Aldh7a1 (NM_138600.1,728-746).
catgctctcatcgaaatgt

SEQ ID NO: 611538 - DNA, 19 bp, Mus musculus
  siRNA target sequence for Aldh7a1 (NM_138600.1,758-776).
ggcttggtgggaatcatca

SEQ ID NO: 611539 - DNA, 19 bp, Mus musculus
  siRNA target sequence for Aldh7a1 (NM_138600.1,827-845).
ctgatcacagggaatgtct

SEQ ID NO: 611540 - DNA, 19 bp, Mus musculus
  siRNA target sequence for Aldh7a1 (NM_138600.1,867-885).
ctacgtccctcgttagtgt

SEQ ID NO: 611541 - DNA, 19 bp, Mus musculus
  siRNA target sequence for Aldh7a1 (NM_138600.1,886-904).
ggctgtcacaaagatcata

SEQ ID NO: 611542 - DNA, 19 bp, Mus musculus
  siRNA target sequence for Aldh7a1 (NM_138600.1,1216-1234).
gcacgaaagcatccataat

SEQ ID NO: 611543 - DNA, 19 bp, Mus musculus
  siRNA target sequence for Aldh7a1 (NM_138600.1,1219-1237).
cgaaagcatccataatgaa

SEQ ID NO: 611544 - DNA, 19 bp, Mus musculus
  siRNA target sequence for Aldh7a1 (NM_138600.1,1224-1242).
gcatccataatgaagttgt

SEQ ID NO: 611545 - DNA, 19 bp, Mus musculus
  siRNA target sequence for Aldh7a1 (NM_138600.1,1490-1508).
gccccaatcctctatgtct

SEQ ID NO: 611546 - DNA, 19 bp, Mus musculus
  siRNA target sequence for Aldh7a1 (NM_138600.1,1494-1512).
caatcctctatgtcttcaa

SEQ ID NO: 611547 - DNA, 19 bp, Mus musculus
  siRNA target sequence for Aldh7a1 (NM_138600.1,1531-1549).
ggtctttgaatggaacaat

SEQ ID NO: 611548 - DNA, 19 bp, Mus musculus
  siRNA target sequence for Aldh7a1 (NM_138600.1,1562-1580).
ggactttcaagtagtatct

SEQ ID NO: 611549 - DNA, 19 bp, Mus musculus
  siRNA target sequence for Aldh7a1 (NM_138600.1,1563-1581).
gactttcaagtagtatctt

SEQ ID NO: 611550 - DNA, 19 bp, Mus musculus
  siRNA target sequence for Aldh7a1 (NM_138600.1,1569-1587).
caagtagtatctttaccaa

SEQ ID NO: 611551 - DNA, 19 bp, Mus musculus
  siRNA target sequence for Aldh7a1 (NM_138600.1,1606-1624).
ccgctggcttggacctaaa

SEQ ID NO: 611552 - DNA, 19 bp, Mus musculus
  siRNA target sequence for Aldh7a1 (NM_138600.1,1637-1655).
ggcatcgtgaacgtcaata

SEQ ID NO: 611553 - DNA, 19 bp, Mus musculus
  siRNA target sequence for Aldh7a1 (NM_138600.1,1639-1657).
catcgtgaacgtcaatatt

SEQ ID NO: 611554 - DNA, 19 bp, Mus musculus
  siRNA target sequence for Aldh7a1 (NM_138600.1,1642-1660).
cgtgaacgtcaatattcct

SEQ ID NO: 611555 - DNA, 19 bp, Mus musculus
  siRNA target sequence for Aldh7a1 (NM_138600.1,1643-1661).
gtgaacgtcaatattccta

SEQ ID NO: 611556 - DNA, 19 bp, Mus musculus
  siRNA target sequence for Aldh7a1 (NM_138600.1,1761-1779).
ccacatgtaccatcaacta

SEQ ID NO: 611557 - DNA, 19 bp, Mus musculus
  siRNA target sequence for Aldh3a1 (NM_007436.1,268-286).
gcgttgcagcgcatgatca

SEQ ID NO: 611558 - DNA, 19 bp, Mus musculus
  siRNA target sequence for Aldh3a1 (NM_007436.1,269-287).
cgttgcagcgcatgatcaa

SEQ ID NO: 611559 - DNA, 19 bp, Mus musculus
  siRNA target sequence for Aldh3a1 (NM_007436.1,278-296).
gcatgatcaacgagaactt

SEQ ID NO: 611560 - DNA, 19 bp, Mus musculus
  siRNA target sequence for Aldh3a1 (NM_007436.1,321-339).
ctctaacctgcgcaagaat

SEQ ID NO: 611561 - DNA, 19 bp, Mus musculus
  siRNA target sequence for Aldh3a1 (NM_007436.1,323-341).
ctaacctgcgcaagaatga

SEQ ID NO: 611562 - DNA, 19 bp, Mus musculus
  siRNA target sequence for Aldh3a1 (NM_007436.1,368-386).
ctcacgtgctggacgaaat

SEQ ID NO: 611563 - DNA, 19 bp, Mus musculus
  siRNA target sequence for Aldh3a1 (NM_007436.1,372-390).
cgtgctggacgaaatcgat

SEQ ID NO: 611564 - DNA, 19 bp, Mus musculus
  siRNA target sequence for Aldh3a1 (NM_007436.1,373-391).
gtgctggacgaaatcgatt

SEQ ID NO: 611565 - DNA, 19 bp, Mus musculus
  siRNA target sequence for Aldh3a1 (NM_007436.1,382-400).
gaaatcgatttcacgatta

SEQ ID NO: 611566 - DNA, 19 bp, Mus musculus
  siRNA target sequence for Aldh3a1 (NM_007436.1,512-530).
cttggaactacccattcaa

SEQ ID NO: 611567 - DNA, 19 bp, Mus musculus
  siRNA target sequence for Aldh3a1 (NM_007436.1,593-611).
cggaagtgagtgatcacat

SEQ ID NO: 611568 - DNA, 19 bp, Mus musculus
  siRNA target sequence for Aldh3a1 (NM_007436.1,629-647).
cacttatccctcagtatat

SEQ ID NO: 611569 - DNA, 19 bp, Mus musculus
  siRNA target sequence for Aldh3a1 (NM_007436.1,692-710).
ccacggagctgctcaaaga

SEQ ID NO: 611570 - DNA, 19 bp, Mus musculus
  siRNA target sequence for Aldh3a1 (NM_007436.1,737-755).
ggagcacggctgtaggaaa

SEQ ID NO: 611571 - DNA, 19 bp, Mus musculus
  siRNA target sequence for Aldh3a1 (NM_007436.1,872-890).
cttggggaaagtttatgaa

SEQ ID NO: 611572 - DNA, 19 bp, Mus musculus
  siRNA target sequence for Aldh3a1 (NM_007436.1,905-923).
gtgtggccccagactacat

SEQ ID NO: 611573 - DNA, 19 bp, Mus musculus
  siRNA target sequence for Aldh3a1 (NM_007436.1,1042-1060).
cacttccagcgggtcataa

SEQ ID NO: 611574 - DNA, 19 bp, Mus musculus
  siRNA target sequence for Aldh3a1 (NM_007436.1,1052-1070).
gggtcataaatctgattga

SEQ ID NO: 611575 - DNA, 19 bp, Mus musculus
  siRNA target sequence for Aldh3a1 (NM_007436.1,1219-1237).
gatgaggccattaaattta

SEQ ID NO: 611576 - DNA, 19 bp, Mus musculus
  siRNA target sequence for Aldh3a1 (NM_007436.1,1222-1240).
gaggccattaaatttatca

SEQ ID NO: 611577 - DNA, 19 bp, Mus musculus
  siRNA target sequence for Aldh3a1 (NM_007436.1,1251-1269).
gaagcccctggcactctat

SEQ ID NO: 611578 - DNA, 19 bp, Mus musculus
  siRNA target sequence for Aldh3a1 (NM_007436.1,1255-1273).
cccctggcactctatgtgt

SEQ ID NO: 611579 - DNA, 19 bp, Mus musculus
  siRNA target sequence for Aldh3a1 (NM_007436.1,1266-1284).
ctatgtgttctccaacaat

SEQ ID NO: 611580 - DNA, 19 bp, Mus musculus
  siRNA target sequence for Aldh3a1 (NM_007436.1,1270-1288).
gtgttctccaacaatgaca

SEQ ID NO: 611581 - DNA, 19 bp, Mus musculus
  siRNA target sequence for Aldh3a1 (NM_007436.1,1337-1355).
ccaatgacgtcattgttca

SEQ ID NO: 611582 - DNA, 19 bp, Mus musculus
  siRNA target sequence for Aldh3a1 (NM_007436.1,1408-1426).
gcctaccatggcaagaaaa

SEQ ID NO: 611583 - DNA, 19 bp, Mus musculus
  siRNA target sequence for Aldh3a1 (NM_007436.1,1464-1482).
gaggtctctgcggaatgaa

SEQ ID NO: 611584 - DNA, 19 bp, Mus musculus
  siRNA target sequence for Aldh3a1 (NM_007436.1,1475-1493).
ggaatgaagaagctaacaa

SEQ ID NO: 611585 - DNA, 19 bp, Mus musculus
  siRNA target sequence for 1110037D04Rik (NM_026825.1,368-386).
cgcctgtgttggacaactt

SEQ ID NO: 611586 - DNA, 19 bp, Mus musculus
  siRNA target sequence for 1110037D04Rik (NM_026825.1,369-387).
gcctgtgttggacaactta

SEQ ID NO: 611587 - DNA, 19 bp, Mus musculus
  siRNA target sequence for 1110037D04Rik (NM_026825.1,620-638).
cacaaggctttcaagacat

SEQ ID NO: 611588 - DNA, 19 bp, Mus musculus
  siRNA target sequence for 1110037D04Rik (NM_026825.1,646-664).
gctatggaaaagaactaca

SEQ ID NO: 611589 - DNA, 19 bp, Mus musculus
  siRNA target sequence for 1110037D04Rik (NM_026825.1,678-696).
gccaattccgatgtatgat

SEQ ID NO: 611590 - DNA, 19 bp, Mus musculus
  siRNA target sequence for 1110037D04Rik (NM_026825.1,697-715).
gccgctcaagctctcaaaa

SEQ ID NO: 611591 - DNA, 19 bp, Mus musculus
  siRNA target sequence for 1110037D04Rik (NM_026825.1,849-867).
gatgattgaccggatatgt

SEQ ID NO: 611592 - DNA, 19 bp, Mus musculus
  siRNA target sequence for 1110037D04Rik (NM_026825.1,902-920).
cctgtgggggtgatgctat

SEQ ID NO: 611593 - DNA, 19 bp, Mus musculus
  siRNA target sequence for 1110037D04Rik (NM_026825.1,903-921).
ctgtgggggtgatgctatt

SEQ ID NO: 611594 - DNA, 19 bp, Mus musculus
  siRNA target sequence for 1110037D04Rik (NM_026825.1,905-923).
gtgggggtgatgctattca

SEQ ID NO: 611595 - DNA, 19 bp, Mus musculus
  siRNA target sequence for 1110037D04Rik (NM_026825.1,916-934).
gctattcaggaggatttaa

SEQ ID NO: 611596 - DNA, 19 bp, Mus musculus
  siRNA target sequence for 1110037D04Rik (NM_026825.1,955-973).
cgagatgctaagaactcta

SEQ ID NO: 611597 - DNA, 19 bp, Mus musculus
  siRNA target sequence for 1110037D04Rik (NM_026825.1,956-974).
gagatgctaagaactctaa

SEQ ID NO: 611598 - DNA, 19 bp, Mus musculus
  siRNA target sequence for 1110037D04Rik (NM_026825.1,962-980).
ctaagaactctaaaacatt

SEQ ID NO: 611599 - DNA, 19 bp, Mus musculus
  siRNA target sequence for 1110037D04Rik (NM_026825.1,1151-1169).
gccccaacgtcatgagaaa

SEQ ID NO: 611600 - DNA, 19 bp, Mus musculus
  siRNA target sequence for 1110037D04Rik (NM_026825.1,1195-1213).
catgccagcaccgaaaaga

SEQ ID NO: 611601 - DNA, 19 bp, Mus musculus
  siRNA target sequence for 1110037D04Rik (NM_026825.1,1198-1216).
gccagcaccgaaaagattt

SEQ ID NO: 611602 - DNA, 19 bp, Mus musculus
  siRNA target sequence for 1110037D04Rik (NM_026825.1,1218-1236).
catcccacgtacctttgtt

SEQ ID NO: 611603 - DNA, 19 bp, Mus musculus
  siRNA target sequence for 1110037D04Rik (NM_026825.1,1221-1239).
cccacgtacctttgttaaa

SEQ ID NO: 611604 - DNA, 19 bp, Mus musculus
  siRNA target sequence for 1110037D04Rik (NM_026825.1,1222-1240).
ccacgtacctttgttaaaa

SEQ ID NO: 611605 - DNA, 19 bp, Mus musculus
  siRNA target sequence for 1110037D04Rik (NM_026825.1,1226-1244).
gtacctttgttaaaaatgt

SEQ ID NO: 611606 - DNA, 19 bp, Mus musculus
  siRNA target sequence for 1110037D04Rik (NM_026825.1,1252-1270).
gaacagtccgggattgaca

SEQ ID NO: 611607 - DNA, 19 bp, Mus musculus
  siRNA target sequence for 1110037D04Rik (NM_026825.1,1259-1277).
ccgggattgacattcttaa

SEQ ID NO: 611608 - DNA, 19 bp, Mus musculus
  siRNA target sequence for 1110037D04Rik (NM_026825.1,1261-1279).
gggattgacattcttaaca

SEQ ID NO: 611609 - DNA, 19 bp, Mus musculus
  siRNA target sequence for 1110037D04Rik (NM_026825.1,1262-1280).
ggattgacattcttaacaa

SEQ ID NO: 611610 - DNA, 19 bp, Mus musculus
  siRNA target sequence for 1110037D04Rik (NM_026825.1,1504-1522).
gaagacctagacacttgta

SEQ ID NO: 611611 - DNA, 19 bp, Mus musculus
  siRNA target sequence for 1110037D04Rik (NM_026825.1,1509-1527).
cctagacacttgtatgact

SEQ ID NO: 611612 - DNA, 19 bp, Mus musculus
  siRNA target sequence for 1110037D04Rik (NM_026825.1,1524-1542).
gactctctgctgtacaagt

SEQ ID NO: 611613 - DNA, 19 bp, Mus musculus
  siRNA target sequence for 1110037D04Rik (NM_026825.1,1528-1546).
ctctgctgtacaagtatga

SEQ ID NO: 611614 - DNA, 19 bp, Mus musculus
  siRNA target sequence for 1110037D04Rik (NM_026825.1,1530-1548).
ctgctgtacaagtatgact

SEQ ID NO: 611615 - DNA, 19 bp, Mus musculus
  siRNA target sequence for 1110037D04Rik (NM_026825.1,1598-1616).
ccagggccttcgaaatgga

SEQ ID NO: 611616 - DNA, 19 bp, Mus musculus
  siRNA target sequence for 1110037D04Rik (NM_026825.1,1605-1623).
cttcgaaatggagtttgat

SEQ ID NO: 611617 - DNA, 19 bp, Mus musculus
  siRNA target sequence for 1110037D04Rik (NM_026825.1,1608-1626).
cgaaatggagtttgatctt

SEQ ID NO: 611618 - DNA, 19 bp, Mus musculus
  siRNA target sequence for 1110037D04Rik (NM_026825.1,1639-1657).
gaagaggtgccgattcaca

SEQ ID NO: 611619 - DNA, 19 bp, Mus musculus
  siRNA target sequence for 1110037D04Rik (NM_026825.1,1676-1694).
catcagtccggcaagagaa

SEQ ID NO: 611620 - DNA, 19 bp, Mus musculus
  siRNA target sequence for 1110037D04Rik (NM_026825.1,1696-1714).
cgaagctcggggttaatct

SEQ ID NO: 611621 - DNA, 19 bp, Mus musculus
  siRNA target sequence for 1110037D04Rik (NM_026825.1,1736-1754).
gcaggagactggaacactt

SEQ ID NO: 611622 - DNA, 19 bp, Mus musculus
  siRNA target sequence for 1110037D04Rik (NM_026825.1,1747-1765).
gaacacttcaccaagttaa

SEQ ID NO: 611623 - DNA, 19 bp, Mus musculus
  siRNA target sequence for 1110037D04Rik (NM_026825.1,1766-1784).
ggcccaagcggaacaagaa

SEQ ID NO: 611624 - DNA, 19 bp, Mus musculus
  siRNA target sequence for 1110037D04Rik (NM_026825.1,1873-1891).
ggggtagatgagtttttca

SEQ ID NO: 611625 - DNA, 19 bp, Mus musculus
  siRNA target sequence for 1110037D04Rik (NM_026825.1,2005-2023).
ctcaacctgattaaatcca

SEQ ID NO: 611626 - DNA, 19 bp, Mus musculus
  siRNA target sequence for 1110037D04Rik (NM_026825.1,2158-2176).
cgcacagaagagattaaga

SEQ ID NO: 611627 - DNA, 19 bp, Mus musculus
  siRNA target sequence for 1110037D04Rik (NM_026825.1,2689-2707).
cttccacccatcctcaaaa

SEQ ID NO: 611628 - DNA, 19 bp, Mus musculus
  siRNA target sequence for 1110037D04Rik (NM_026825.1,2693-2711).
cacccatcctcaaaaaagt

SEQ ID NO: 611629 - DNA, 19 bp, Mus musculus
  siRNA target sequence for 1110037D04Rik (NM_026825.1,2775-2793).
ggaagcgtgcccaactaat

SEQ ID NO: 611630 - DNA, 19 bp, Mus musculus
  siRNA target sequence for 1110037D04Rik (NM_026825.1,2776-2794).
gaagcgtgcccaactaatt

SEQ ID NO: 611631 - DNA, 19 bp, Mus musculus
  siRNA target sequence for Gapds (NM_008085.1,11-29).
gtgacgtggtccttaccaa

SEQ ID NO: 611632 - DNA, 19 bp, Mus musculus
  siRNA target sequence for Gapds (NM_008085.1,15-33).
cgtggtccttaccaatgtt

SEQ ID NO: 611633 - DNA, 19 bp, Mus musculus
  siRNA target sequence for Gapds (NM_008085.1,18-36).
ggtccttaccaatgttact

SEQ ID NO: 611634 - DNA, 19 bp, Mus musculus
  siRNA target sequence for Gapds (NM_008085.1,21-39).
ccttaccaatgttactgtt

SEQ ID NO: 611635 - DNA, 19 bp, Mus musculus
  siRNA target sequence for Gapds (NM_008085.1,134-152).
cacccacggttgaagaaca

SEQ ID NO: 611636 - DNA, 19 bp, Mus musculus
  siRNA target sequence for Gapds (NM_008085.1,315-333).
gctgacagtgggtatcaat

SEQ ID NO: 611637 - DNA, 19 bp, Mus musculus
  siRNA target sequence for Gapds (NM_008085.1,324-342).
gggtatcaatggatttgga

SEQ ID NO: 611638 - DNA, 19 bp, Mus musculus
  siRNA target sequence for Gapds (NM_008085.1,398-416).
cagtgaatgacccattcat

SEQ ID NO: 611639 - DNA, 19 bp, Mus musculus
  siRNA target sequence for Gapds (NM_008085.1,460-478).
catggtagatacaaaggaa

SEQ ID NO: 611640 - DNA, 19 bp, Mus musculus
  siRNA target sequence for Gapds (NM_008085.1,475-493).
ggaaacgtggaacataaga

SEQ ID NO: 611641 - DNA, 19 bp, Mus musculus
  siRNA target sequence for Gapds (NM_008085.1,476-494).
gaaacgtggaacataagaa

SEQ ID NO: 611642 - DNA, 19 bp, Mus musculus
  siRNA target sequence for Gapds (NM_008085.1,621-639).
ggcagcttcggcacatatt

SEQ ID NO: 611643 - DNA, 19 bp, Mus musculus
  siRNA target sequence for Gapds (NM_008085.1,625-643).
gcttcggcacatatttcat

SEQ ID NO: 611644 - DNA, 19 bp, Mus musculus
  siRNA target sequence for Gapds (NM_008085.1,779-797).
ctcctctcgccaaggttat

SEQ ID NO: 611645 - DNA, 19 bp, Mus musculus
  siRNA target sequence for Gapds (NM_008085.1,782-800).
ctctcgccaaggttattca

SEQ ID NO: 611646 - DNA, 19 bp, Mus musculus
  siRNA target sequence for Gapds (NM_008085.1,786-804).
cgccaaggttattcatgaa

SEQ ID NO: 611647 - DNA, 19 bp, Mus musculus
  siRNA target sequence for Gapds (NM_008085.1,866-884).
cagtggatgggccatcaaa

SEQ ID NO: 611648 - DNA, 19 bp, Mus musculus
  siRNA target sequence for Gapds (NM_008085.1,1054-1072).
gccaagcctgcttcttact

SEQ ID NO: 611649 - DNA, 19 bp, Mus musculus
  siRNA target sequence for Gapds (NM_008085.1,1147-1165).
gtggtctccacggacttta

SEQ ID NO: 611650 - DNA, 19 bp, Mus musculus
  siRNA target sequence for Gapds (NM_008085.1,1240-1258).
gcctggtacgacaacgaat

SEQ ID NO: 611651 - DNA, 19 bp, Mus musculus
  siRNA target sequence for Gapds (NM_008085.1,1284-1302).
cctcctccgctacatgttt

SEQ ID NO: 611652 - DNA, 19 bp, Mus musculus
  siRNA target sequence for Solt (NM_021790.1,201-219).
gctaccgtgttctgtctat

SEQ ID NO: 611653 - DNA, 19 bp, Mus musculus
  siRNA target sequence for Solt (NM_021790.1,202-220).
ctaccgtgttctgtctatt

SEQ ID NO: 611654 - DNA, 19 bp, Mus musculus
  siRNA target sequence for Solt (NM_021790.1,248-266).
cttctccgttggtaattta

SEQ ID NO: 611655 - DNA, 19 bp, Mus musculus
  siRNA target sequence for Solt (NM_021790.1,272-290).
gttgcagtaaggtgaagaa

SEQ ID NO: 611656 - DNA, 19 bp, Mus musculus
  siRNA target sequence for Solt (NM_021790.1,300-318).
ggatatgtcagagaataaa

SEQ ID NO: 611657 - DNA, 19 bp, Mus musculus
  siRNA target sequence for Solt (NM_021790.1,322-340).
gaagtacatccagatacta

SEQ ID NO: 611658 - DNA, 19 bp, Mus musculus
  siRNA target sequence for Solt (NM_021790.1,351-369).
ggaagctgttatagataca

SEQ ID NO: 611659 - DNA, 19 bp, Mus musculus
  siRNA target sequence for Solt (NM_021790.1,368-386).
cagaggaagaacttattaa

SEQ ID NO: 611660 - DNA, 19 bp, Mus musculus
  siRNA target sequence for Solt (NM_021790.1,475-493).
cagctctcattacttatta

SEQ ID NO: 611661 - DNA, 19 bp, Mus musculus
  siRNA target sequence for Solt (NM_021790.1,520-538).
cttggtcaatggaagaaaa

SEQ ID NO: 611662 - DNA, 19 bp, Mus musculus
  siRNA target sequence for Solt (NM_021790.1,565-583).
gaagacgttttgttaacat

SEQ ID NO: 611663 - DNA, 19 bp, Mus musculus
  siRNA target sequence for Solt (NM_021790.1,570-588).
cgttttgttaacattagga

SEQ ID NO: 611664 - DNA, 19 bp, Mus musculus
  siRNA target sequence for Solt (NM_021790.1,595-613).
gagttccaaaaattgagat

SEQ ID NO: 611665 - DNA, 19 bp, Mus musculus
  siRNA target sequence for Solt (NM_021790.1,611-629).
gatgtgatcttgaaatggt

SEQ ID NO: 611666 - DNA, 19 bp, Mus musculus
  siRNA target sequence for Solt (NM_021790.1,628-646).
gtactatctaccattcaat

SEQ ID NO: 611667 - DNA, 19 bp, Mus musculus
  siRNA target sequence for Solt (NM_021790.1,635-653).
ctaccattcaatcaaagaa

SEQ ID NO: 611668 - DNA, 19 bp, Mus musculus
  siRNA target sequence for Solt (NM_021790.1,639-657).
cattcaatcaaagaatgaa

SEQ ID NO: 611669 - DNA, 19 bp, Mus musculus
  siRNA target sequence for Solt (NM_021790.1,709-727).
caaatactggacactctta

SEQ ID NO: 611670 - DNA, 19 bp, Mus musculus
  siRNA target sequence for Solt (NM_021790.1,715-733).
ctggacactcttaacgtat

SEQ ID NO: 611671 - DNA, 19 bp, Mus musculus
  siRNA target sequence for Solt (NM_021790.1,717-735).
ggacactcttaacgtatta

SEQ ID NO: 611672 - DNA, 19 bp, Mus musculus
  siRNA target sequence for Solt (NM_021790.1,718-736).
gacactcttaacgtattaa

SEQ ID NO: 611673 - DNA, 19 bp, Mus musculus
  siRNA target sequence for Solt (NM_021790.1,800-818).
ctaagatccgtgggataaa

SEQ ID NO: 611674 - DNA, 19 bp, Mus musculus
  siRNA target sequence for Solt (NM_021790.1,841-859).
cttaccttgggtgcttttt

SEQ ID NO: 611675 - DNA, 19 bp, Mus musculus
  siRNA target sequence for Solt (NM_021790.1,849-867).
gggtgcttttttagacaat

SEQ ID NO: 611676 - DNA, 19 bp, Mus musculus
  siRNA target sequence for Solt (NM_021790.1,933-951).
gctgataacactgaatgaa

SEQ ID NO: 611677 - DNA, 19 bp, Mus musculus
  siRNA target sequence for Solt (NM_021790.1,958-976).
gagatgcttataaatagaa

SEQ ID NO: 611678 - DNA, 19 bp, Mus musculus
  siRNA target sequence for Solt (NM_021790.1,978-996).
gtttgatgttccacatgat

SEQ ID NO: 611679 - DNA, 19 bp, Mus musculus
  siRNA target sequence for Solt (NM_021790.1,988-1006).
ccacatgatccatatgtta

SEQ ID NO: 611680 - DNA, 19 bp, Mus musculus
  siRNA target sequence for Solt (NM_021790.1,989-1007).
cacatgatccatatgttaa

SEQ ID NO: 611681 - DNA, 19 bp, Mus musculus
  siRNA target sequence for Solt (NM_021790.1,1019-1037).
ccttttggccaccatatat

SEQ ID NO: 611682 - DNA, 19 bp, Mus musculus
  siRNA target sequence for Solt (NM_021790.1,1020-1038).
cttttggccaccatatatt

SEQ ID NO: 611683 - DNA, 19 bp, Mus musculus
  siRNA target sequence for Solt (NM_021790.1,1048-1066).
ctgcgttacggaattgctt

SEQ ID NO: 611684 - DNA, 19 bp, Mus musculus
  siRNA target sequence for Solt (NM_021790.1,1078-1096).
gaagatccatcccaaataa

SEQ ID NO: 611685 - DNA, 19 bp, Mus musculus
  siRNA target sequence for Solt (NM_021790.1,1081-1099).
gatccatcccaaataaggt

SEQ ID NO: 611686 - DNA, 19 bp, Mus musculus
  siRNA target sequence for Aldh6a1 (NM_134042.1,60-78).
caggtttcttctaaggtaa

SEQ ID NO: 611687 - DNA, 19 bp, Mus musculus
  siRNA target sequence for Aldh6a1 (NM_134042.1,62-80).
ggtttcttctaaggtaaat

SEQ ID NO: 611688 - DNA, 19 bp, Mus musculus
  siRNA target sequence for Aldh6a1 (NM_134042.1,74-92).
ggtaaatgccacatggtat

SEQ ID NO: 611689 - DNA, 19 bp, Mus musculus
  siRNA target sequence for Aldh6a1 (NM_134042.1,159-177).
gaatcaaaaagtgataaat

SEQ ID NO: 611690 - DNA, 19 bp, Mus musculus
  siRNA target sequence for Aldh6a1 (NM_134042.1,169-187).
gtgataaatggattgacat

SEQ ID NO: 611691 - DNA, 19 bp, Mus musculus
  siRNA target sequence for Aldh6a1 (NM_134042.1,194-212).
cccagccaccaatgaagtt

SEQ ID NO: 611692 - DNA, 19 bp, Mus musculus
  siRNA target sequence for Aldh6a1 (NM_134042.1,285-303).
gcgtgggcagacacatcta

SEQ ID NO: 611693 - DNA, 19 bp, Mus musculus
  siRNA target sequence for Aldh6a1 (NM_134042.1,289-307).
gggcagacacatctatttt

SEQ ID NO: 611694 - DNA, 19 bp, Mus musculus
  siRNA target sequence for Aldh6a1 (NM_134042.1,317-335).
gcaggtcctgcttcgttat

SEQ ID NO: 611695 - DNA, 19 bp, Mus musculus
  siRNA target sequence for Aldh6a1 (NM_134042.1,330-348).
cgttatcagcagctcatta

SEQ ID NO: 611696 - DNA, 19 bp, Mus musculus
  siRNA target sequence for Aldh6a1 (NM_134042.1,363-381).
gaaattgccaggttaatca

SEQ ID NO: 611697 - DNA, 19 bp, Mus musculus
  siRNA target sequence for Aldh6a1 (NM_134042.1,550-568).
caggcattgcaccatttaa

SEQ ID NO: 611698 - DNA, 19 bp, Mus musculus
  siRNA target sequence for Aldh6a1 (NM_134042.1,552-570).
ggcattgcaccatttaatt

SEQ ID NO: 611699 - DNA, 19 bp, Mus musculus
  siRNA target sequence for Aldh6a1 (NM_134042.1,553-571).
gcattgcaccatttaattt

SEQ ID NO: 611700 - DNA, 19 bp, Mus musculus
  siRNA target sequence for Aldh6a1 (NM_134042.1,577-595).
ccatgatccccctttggat

SEQ ID NO: 611701 - DNA, 19 bp, Mus musculus
  siRNA target sequence for Aldh6a1 (NM_134042.1,616-634).
gtggaaatactttcctaat

SEQ ID NO: 611702 - DNA, 19 bp, Mus musculus
  siRNA target sequence for Aldh6a1 (NM_134042.1,661-679).
caactatgctccttgctaa

SEQ ID NO: 611703 - DNA, 19 bp, Mus musculus
  siRNA target sequence for Aldh6a1 (NM_134042.1,664-682).
ctatgctccttgctaagtt

SEQ ID NO: 611704 - DNA, 19 bp, Mus musculus
  siRNA target sequence for Aldh6a1 (NM_134042.1,705-723).
gacggaacactgaacatta

SEQ ID NO: 611705 - DNA, 19 bp, Mus musculus
  siRNA target sequence for Aldh6a1 (NM_134042.1,719-737).
cattatccatggacaacat

SEQ ID NO: 611706 - DNA, 19 bp, Mus musculus
  siRNA target sequence for Aldh6a1 (NM_134042.1,730-748).
gacaacatgatgctgtaaa

SEQ ID NO: 611707 - DNA, 19 bp, Mus musculus
  siRNA target sequence for Aldh6a1 (NM_134042.1,732-750).
caacatgatgctgtaaact

SEQ ID NO: 611708 - DNA, 19 bp, Mus musculus
  siRNA target sequence for Aldh6a1 (NM_134042.1,757-775).
gcgatcatccagacatcaa

SEQ ID NO: 611709 - DNA, 19 bp, Mus musculus
  siRNA target sequence for Aldh6a1 (NM_134042.1,890-908).
gccagacgccaataaggaa

SEQ ID NO: 611710 - DNA, 19 bp, Mus musculus
  siRNA target sequence for Aldh6a1 (NM_134042.1,891-909).
ccagacgccaataaggaaa

SEQ ID NO: 611711 - DNA, 19 bp, Mus musculus
  siRNA target sequence for Aldh6a1 (NM_134042.1,957-975).
cgctgcatggctctttcaa

SEQ ID NO: 611712 - DNA, 19 bp, Mus musculus
  siRNA target sequence for Aldh6a1 (NM_134042.1,1031-1049).
caaaaatctgcgagtcaat

SEQ ID NO: 611713 - DNA, 19 bp, Mus musculus
  siRNA target sequence for Aldh6a1 (NM_134042.1,1104-1122).
gagagagtctgcaatctga

SEQ ID NO: 611714 - DNA, 19 bp, Mus musculus
  siRNA target sequence for Aldh6a1 (NM_134042.1,1110-1128).
gtctgcaatctgatcgata

SEQ ID NO: 611715 - DNA, 19 bp, Mus musculus
  siRNA target sequence for Aldh6a1 (NM_134042.1,1121-1139).
gatcgatagcggaacaaaa

SEQ ID NO: 611716 - DNA, 19 bp, Mus musculus
  siRNA target sequence for Aldh6a1 (NM_134042.1,1164-1182).
gggcgaagaattaaagtca

SEQ ID NO: 611717 - DNA, 19 bp, Mus musculus
  siRNA target sequence for Aldh6a1 (NM_134042.1,1165-1183).
ggcgaagaattaaagtcaa

SEQ ID NO: 611718 - DNA, 19 bp, Mus musculus
  siRNA target sequence for Aldh6a1 (NM_134042.1,1181-1199).
caagggctatgaaaatggt

SEQ ID NO: 611719 - DNA, 19 bp, Mus musculus
  siRNA target sequence for Aldh6a1 (NM_134042.1,1210-1228).
gaccaaccatcatctcaaa

SEQ ID NO: 611720 - DNA, 19 bp, Mus musculus
  siRNA target sequence for Aldh6a1 (NM_134042.1,1225-1243).
caaatgttaagccaagtat

SEQ ID NO: 611721 - DNA, 19 bp, Mus musculus
  siRNA target sequence for Aldh6a1 (NM_134042.1,1230-1248).
gttaagccaagtatgactt

SEQ ID NO: 611722 - DNA, 19 bp, Mus musculus
  siRNA target sequence for Aldh6a1 (NM_134042.1,1236-1254).
ccaagtatgacttgttaca

SEQ ID NO: 611723 - DNA, 19 bp, Mus musculus
  siRNA target sequence for Aldh6a1 (NM_134042.1,1249-1267).
gttacaaagaggagatatt

SEQ ID NO: 611724 - DNA, 19 bp, Mus musculus
  siRNA target sequence for Aldh6a1 (NM_134042.1,1273-1291).
cagttcttgtggttttgga

SEQ ID NO: 611725 - DNA, 19 bp, Mus musculus
  siRNA target sequence for Aldh6a1 (NM_134042.1,1486-1504).
ggggagacaccaatttcta

SEQ ID NO: 611726 - DNA, 19 bp, Mus musculus
  siRNA target sequence for Aldh6a1 (NM_134042.1,1521-1539).
cagttttacacgcagttaa

SEQ ID NO: 611727 - DNA, 19 bp, Mus musculus
  siRNA target sequence for Aldh6a1 (NM_134042.1,1547-1565).
cacgtctcagtggaaagaa

SEQ ID NO: 611728 - DNA, 19 bp, Mus musculus
  siRNA target sequence for A230062G08Rik (NM_173765.1,344-362).
cggactgcctctgtctata

SEQ ID NO: 611729 - DNA, 19 bp, Mus musculus
  siRNA target sequence for A230062G08Rik (NM_173765.1,345-363).
ggactgcctctgtctatat

SEQ ID NO: 611730 - DNA, 19 bp, Mus musculus
  siRNA target sequence for A230062G08Rik (NM_173765.1,369-387).
gaacagctgtatgttttga

SEQ ID NO: 611731 - DNA, 19 bp, Mus musculus
  siRNA target sequence for A230062G08Rik (NM_173765.1,381-399).
gttttgacgaaggcaataa

SEQ ID NO: 611732 - DNA, 19 bp, Mus musculus
  siRNA target sequence for A230062G08Rik (NM_173765.1,401-419).
cagcctccagtgtgctatt

SEQ ID NO: 611733 - DNA, 19 bp, Mus musculus
  siRNA target sequence for A230062G08Rik (NM_173765.1,449-467).
gaattatcccattttctga

SEQ ID NO: 611734 - DNA, 19 bp, Mus musculus
  siRNA target sequence for A230062G08Rik (NM_173765.1,513-531).
gtcaacctgggataaactt

SEQ ID NO: 611735 - DNA, 19 bp, Mus musculus
  siRNA target sequence for A230062G08Rik (NM_173765.1,590-608).
gactccccaccgtccttat

SEQ ID NO: 611736 - DNA, 19 bp, Mus musculus
  siRNA target sequence for A230062G08Rik (NM_173765.1,595-613).
cccaccgtccttatcaact

SEQ ID NO: 611737 - DNA, 19 bp, Mus musculus
  siRNA target sequence for A230062G08Rik (NM_173765.1,596-614).
ccaccgtccttatcaactt

SEQ ID NO: 611738 - DNA, 19 bp, Mus musculus
  siRNA target sequence for A230062G08Rik (NM_173765.1,597-615).
caccgtccttatcaactta

SEQ ID NO: 611739 - DNA, 19 bp, Mus musculus
  siRNA target sequence for A230062G08Rik (NM_173765.1,599-617).
ccgtccttatcaacttact

SEQ ID NO: 611740 - DNA, 19 bp, Mus musculus
  siRNA target sequence for A230062G08Rik (NM_173765.1,600-618).
cgtccttatcaacttactt

SEQ ID NO: 611741 - DNA, 19 bp, Mus musculus
  siRNA target sequence for A230062G08Rik (NM_173765.1,601-619).
gtccttatcaacttacttt

SEQ ID NO: 611742 - DNA, 19 bp, Mus musculus
  siRNA target sequence for A230062G08Rik (NM_173765.1,640-658).
gtatgttctcgttgaaaaa

SEQ ID NO: 611743 - DNA, 19 bp, Mus musculus
  siRNA target sequence for A230062G08Rik (NM_173765.1,661-679).
gcagcttagtaaattcaaa

SEQ ID NO: 611744 - DNA, 19 bp, Mus musculus
  siRNA target sequence for A230062G08Rik (NM_173765.1,684-702).
cacatgagacagttctgaa

SEQ ID NO: 611745 - DNA, 19 bp, Mus musculus
  siRNA target sequence for A230062G08Rik (NM_173765.1,711-729).
cagtttccgtggaacacaa

SEQ ID NO: 611746 - DNA, 19 bp, Mus musculus
  siRNA target sequence for A230062G08Rik (NM_173765.1,805-823).
caaggtgacggatagagaa

SEQ ID NO: 611747 - DNA, 19 bp, Mus musculus
  siRNA target sequence for A230062G08Rik (NM_173765.1,919-937).
cacggggacaccgaagatt

SEQ ID NO: 611748 - DNA, 19 bp, Mus musculus
  siRNA target sequence for A230062G08Rik (NM_173765.1,923-941).
gggacaccgaagattgtca

SEQ ID NO: 611749 - DNA, 19 bp, Mus musculus
  siRNA target sequence for A230062G08Rik (NM_173765.1,953-971).
gcatgcatactgcctaata

SEQ ID NO: 611750 - DNA, 19 bp, Mus musculus
  siRNA target sequence for A230062G08Rik (NM_173765.1,954-972).
catgcatactgcctaatat

SEQ ID NO: 611751 - DNA, 19 bp, Mus musculus
  siRNA target sequence for A230062G08Rik (NM_173765.1,957-975).
gcatactgcctaatatcca

SEQ ID NO: 611752 - DNA, 19 bp, Mus musculus
  siRNA target sequence for A230062G08Rik (NM_173765.1,974-992).
cagcacttccggtcacttt

SEQ ID NO: 611753 - DNA, 19 bp, Mus musculus
  siRNA target sequence for A230062G08Rik (NM_173765.1,1093-1111).
gcttatcgtgccaacttct

SEQ ID NO: 611754 - DNA, 19 bp, Mus musculus
  siRNA target sequence for A230062G08Rik (NM_173765.1,1099-1117).
cgtgccaacttctgtcaaa

SEQ ID NO: 611755 - DNA, 19 bp, Mus musculus
  siRNA target sequence for A230062G08Rik (NM_173765.1,1289-1307).
ctgaccatcctcaaaagct

SEQ ID NO: 611756 - DNA, 19 bp, Mus musculus
  siRNA target sequence for A230062G08Rik (NM_173765.1,1391-1409).
ccagaggagattcttaatt

SEQ ID NO: 611757 - DNA, 19 bp, Mus musculus
  siRNA target sequence for A230062G08Rik (NM_173765.1,1438-1456).
gctggggtcgccactactt

SEQ ID NO: 611758 - DNA, 19 bp, Mus musculus
  siRNA target sequence for A230062G08Rik (NM_173765.1,1729-1747).
ctgcgcggtcacttggtat

SEQ ID NO: 611759 - DNA, 19 bp, Mus musculus
  siRNA target sequence for A230062G08Rik (NM_173765.1,1731-1749).
gcgcggtcacttggtataa

SEQ ID NO: 611760 - DNA, 19 bp, Mus musculus
  siRNA target sequence for A230062G08Rik (NM_173765.1,1732-1750).
cgcggtcacttggtataat

SEQ ID NO: 611761 - DNA, 19 bp, Mus musculus
  siRNA target sequence for A230062G08Rik (NM_173765.1,1768-1786).
cttcatcgtatccaaagtt

SEQ ID NO: 611762 - DNA, 19 bp, Mus musculus
  siRNA target sequence for A230062G08Rik (NM_173765.1,1774-1792).
cgtatccaaagttgactta

SEQ ID NO: 611763 - DNA, 19 bp, Mus musculus
  siRNA target sequence for A230062G08Rik (NM_173765.1,1793-1811).
gtaaaggactgcatcttta

SEQ ID NO: 611764 - DNA, 19 bp, Mus musculus
  siRNA target sequence for A230062G08Rik (NM_173765.1,1853-1871).
gacatggtgctgatcgata

SEQ ID NO: 611765 - DNA, 19 bp, Mus musculus
  siRNA target sequence for A230062G08Rik (NM_173765.1,1868-1886).
gataccctgccatttacat

SEQ ID NO: 611766 - DNA, 19 bp, Mus musculus
  siRNA target sequence for A230062G08Rik (NM_173765.1,1884-1902).
catgccatggcaaagttga

SEQ ID NO: 611767 - DNA, 19 bp, Mus musculus
  siRNA target sequence for A230062G08Rik (NM_173765.1,1908-1926).
ctgagttaaacaagatata

SEQ ID NO: 611768 - DNA, 19 bp, Mus musculus
  siRNA target sequence for A230062G08Rik (NM_173765.1,1921-1939).
gatatatttagactacata

SEQ ID NO: 611769 - DNA, 19 bp, Mus musculus
  siRNA target sequence for A230062G08Rik (NM_173765.1,1979-1997).
ctttggggaaaattacagt

SEQ ID NO: 611770 - DNA, 19 bp, Mus musculus
  siRNA target sequence for A230062G08Rik (NM_173765.1,1983-2001).
ggggaaaattacagtattt

SEQ ID NO: 611771 - DNA, 19 bp, Mus musculus
  siRNA target sequence for A230062G08Rik (NM_173765.1,1984-2002).
gggaaaattacagtattta

SEQ ID NO: 611772 - DNA, 19 bp, Mus musculus
  siRNA target sequence for A230062G08Rik (NM_173765.1,1994-2012).
cagtatttatggaagtcta

SEQ ID NO: 611773 - DNA, 19 bp, Mus musculus
  siRNA target sequence for A230062G08Rik (NM_173765.1,2054-2072).
cccgccaactccgtctttt

SEQ ID NO: 611774 - DNA, 19 bp, Mus musculus
  siRNA target sequence for A230062G08Rik (NM_173765.1,2056-2074).
cgccaactccgtcttttta

SEQ ID NO: 611775 - DNA, 19 bp, Mus musculus
  siRNA target sequence for A230062G08Rik (NM_173765.1,2058-2076).
ccaactccgtctttttaga

SEQ ID NO: 611776 - DNA, 19 bp, Mus musculus
  siRNA target sequence for A230062G08Rik (NM_173765.1,2059-2077).
caactccgtctttttagat

SEQ ID NO: 611777 - DNA, 19 bp, Mus musculus
  siRNA target sequence for A230062G08Rik (NM_173765.1,2062-2080).
ctccgtctttttagatagt

SEQ ID NO: 611778 - DNA, 19 bp, Mus musculus
  siRNA target sequence for A230062G08Rik (NM_173765.1,2104-2122).
gcggctcctcagtgagatt

SEQ ID NO: 611779 - DNA, 19 bp, Mus musculus
  siRNA target sequence for A230062G08Rik (NM_173765.1,2147-2165).
cctggccttctggaagtta

SEQ ID NO: 611780 - DNA, 19 bp, Mus musculus
  siRNA target sequence for A230062G08Rik (NM_173765.1,2148-2166).
ctggccttctggaagttat

SEQ ID NO: 611781 - DNA, 19 bp, Mus musculus
  siRNA target sequence for A230062G08Rik (NM_173765.1,2151-2169).
gccttctggaagttatcct

SEQ ID NO: 611782 - DNA, 19 bp, Mus musculus
  siRNA target sequence for A230062G08Rik (NM_173765.1,2175-2193).
gttccctcttagacgttta

SEQ ID NO: 611783 - DNA, 19 bp, Mus musculus
  siRNA target sequence for A230062G08Rik (NM_173765.1,2178-2196).
ccctcttagacgtttacaa

SEQ ID NO: 611784 - DNA, 19 bp, Mus musculus
  siRNA target sequence for A230062G08Rik (NM_173765.1,2398-2416).
cgctgggaggcttttaact

SEQ ID NO: 611785 - DNA, 19 bp, Mus musculus
  siRNA target sequence for A230062G08Rik (NM_173765.1,2404-2422).
gaggcttttaactcagtta

SEQ ID NO: 611786 - DNA, 19 bp, Mus musculus
  siRNA target sequence for A230062G08Rik (NM_173765.1,2466-2484).
ctaacactcagatattaaa

SEQ ID NO: 611787 - DNA, 19 bp, Mus musculus
  siRNA target sequence for A230062G08Rik (NM_173765.1,2637-2655).
gagcggctgtacaggataa

SEQ ID NO: 611788 - DNA, 19 bp, Mus musculus
  siRNA target sequence for A230062G08Rik (NM_173765.1,2657-2675).
ccctccacaaccgtgtata

SEQ ID NO: 611789 - DNA, 19 bp, Mus musculus
  siRNA target sequence for A230062G08Rik (NM_173765.1,2658-2676).
cctccacaaccgtgtatat

SEQ ID NO: 611790 - DNA, 19 bp, Mus musculus
  siRNA target sequence for A230062G08Rik (NM_173765.1,2764-2782).
ctcagcgtgtgtgtctaaa

SEQ ID NO: 611791 - DNA, 19 bp, Mus musculus
  siRNA target sequence for A230062G08Rik (NM_173765.1,2801-2819).
gtgggctgttataatggat

SEQ ID NO: 611792 - DNA, 19 bp, Mus musculus
  siRNA target sequence for A230062G08Rik (NM_173765.1,2803-2821).
gggctgttataatggatta

SEQ ID NO: 611793 - DNA, 19 bp, Mus musculus
  siRNA target sequence for A230062G08Rik (NM_173765.1,2805-2823).
gctgttataatggattagt

SEQ ID NO: 611794 - DNA, 19 bp, Mus musculus
  siRNA target sequence for A230062G08Rik (NM_173765.1,2808-2826).
gttataatggattagtcta

SEQ ID NO: 611795 - DNA, 19 bp, Mus musculus
  siRNA target sequence for A230062G08Rik (NM_173765.1,2817-2835).
gattagtctatgtcctaaa

SEQ ID NO: 611796 - DNA, 19 bp, Mus musculus
  siRNA target sequence for A230062G08Rik (NM_173765.1,2822-2840).
gtctatgtcctaaaaagta

SEQ ID NO: 611797 - DNA, 19 bp, Mus musculus
  siRNA target sequence for A230062G08Rik (NM_173765.1,2860-2878).
gacatttactactgaagat

SEQ ID NO: 611798 - DNA, 19 bp, Mus musculus
  siRNA target sequence for A230062G08Rik (NM_173765.1,2920-2938).
catttatgtcggatctcat

SEQ ID NO: 611799 - DNA, 19 bp, Mus musculus
  siRNA target sequence for A230062G08Rik (NM_173765.1,2945-2963).
cacgcatatgctttagaca

SEQ ID NO: 611800 - DNA, 19 bp, Mus musculus
  siRNA target sequence for A230062G08Rik (NM_173765.1,2947-2965).
cgcatatgctttagacatt

SEQ ID NO: 611801 - DNA, 19 bp, Mus musculus
  siRNA target sequence for A230062G08Rik (NM_173765.1,2999-3017).
gaaggcgctctcttttcct

SEQ ID NO: 611802 - DNA, 19 bp, Mus musculus
  siRNA target sequence for A230062G08Rik (NM_173765.1,3060-3078).
cgctagggggactcttact

SEQ ID NO: 611803 - DNA, 19 bp, Mus musculus
  siRNA target sequence for A230062G08Rik (NM_173765.1,3073-3091).
cttactggccctaaatcct

SEQ ID NO: 611804 - DNA, 19 bp, Mus musculus
  siRNA target sequence for A230062G08Rik (NM_173765.1,3239-3257).
gctggagggccaatcttct

SEQ ID NO: 611805 - DNA, 19 bp, Mus musculus
  siRNA target sequence for A230062G08Rik (NM_173765.1,3268-3286).
cgtctcggcagcagaacaa

SEQ ID NO: 611806 - DNA, 19 bp, Mus musculus
  siRNA target sequence for A230062G08Rik (NM_173765.1,3338-3356).
ggtcacctccggtggaaat

SEQ ID NO: 611807 - DNA, 19 bp, Mus musculus
  siRNA target sequence for A230062G08Rik (NM_173765.1,3339-3357).
gtcacctccggtggaaatt

SEQ ID NO: 611808 - DNA, 19 bp, Mus musculus
  siRNA target sequence for A230062G08Rik (NM_173765.1,3528-3546).
ctgtggtctgggaatcaat

SEQ ID NO: 611809 - DNA, 19 bp, Mus musculus
  siRNA target sequence for A230062G08Rik (NM_173765.1,3532-3550).
ggtctgggaatcaatgctt

SEQ ID NO: 611810 - DNA, 19 bp, Mus musculus
  siRNA target sequence for A230062G08Rik (NM_173765.1,3537-3555).
gggaatcaatgcttgttat

SEQ ID NO: 611811 - DNA, 19 bp, Mus musculus
  siRNA target sequence for Aldh9a1 (NM_019993.2,350-368).
ggagcggaaggatgaaatt

SEQ ID NO: 611812 - DNA, 19 bp, Mus musculus
  siRNA target sequence for Aldh9a1 (NM_019993.2,389-407).
caacgggaagtccatattt

SEQ ID NO: 611813 - DNA, 19 bp, Mus musculus
  siRNA target sequence for Aldh9a1 (NM_019993.2,433-451).
gctggcagtgcctggaata

SEQ ID NO: 611814 - DNA, 19 bp, Mus musculus
  siRNA target sequence for Aldh9a1 (NM_019993.2,436-454).
ggcagtgcctggaatacta

SEQ ID NO: 611815 - DNA, 19 bp, Mus musculus
  siRNA target sequence for Aldh9a1 (NM_019993.2,613-631).
gtggtaatgccatgatctt

SEQ ID NO: 611816 - DNA, 19 bp, Mus musculus
  siRNA target sequence for Aldh9a1 (NM_019993.2,615-633).
ggtaatgccatgatcttta

SEQ ID NO: 611817 - DNA, 19 bp, Mus musculus
  siRNA target sequence for Aldh9a1 (NM_019993.2,616-634).
gtaatgccatgatctttaa

SEQ ID NO: 611818 - DNA, 19 bp, Mus musculus
  siRNA target sequence for Aldh9a1 (NM_019993.2,666-684).
ctcctggctgagatctaca

SEQ ID NO: 611819 - DNA, 19 bp, Mus musculus
  siRNA target sequence for Aldh9a1 (NM_019993.2,762-780).
cgcgaggtggccaaaatct

SEQ ID NO: 611820 - DNA, 19 bp, Mus musculus
  siRNA target sequence for Aldh9a1 (NM_019993.2,799-817).
ccactggcgtgaagatcat

SEQ ID NO: 611821 - DNA, 19 bp, Mus musculus
  siRNA target sequence for Aldh9a1 (NM_019993.2,833-851).
gggagtcaagcccattact

SEQ ID NO: 611822 - DNA, 19 bp, Mus musculus
  siRNA target sequence for Aldh9a1 (NM_019993.2,854-872).
ggaacttgggggcaaatct

SEQ ID NO: 611823 - DNA, 19 bp, Mus musculus
  siRNA target sequence for Aldh9a1 (NM_019993.2,865-883).
gcaaatctcctctcatcat

SEQ ID NO: 611824 - DNA, 19 bp, Mus musculus
  siRNA target sequence for Aldh9a1 (NM_019993.2,970-988).
ctagagtctttgtgcaaaa

SEQ ID NO: 611825 - DNA, 19 bp, Mus musculus
  siRNA target sequence for Aldh9a1 (NM_019993.2,990-1008).
gaaattgctgataaattca

SEQ ID NO: 611826 - DNA, 19 bp, Mus musculus
  siRNA target sequence for Aldh9a1 (NM_019993.2,1072-1090).
ggatgggcccactcatcaa

SEQ ID NO: 611827 - DNA, 19 bp, Mus musculus
  siRNA target sequence for Aldh9a1 (NM_019993.2,1107-1125).
cgagtcctcgggtttgtca

SEQ ID NO: 611828 - DNA, 19 bp, Mus musculus
  siRNA target sequence for Aldh9a1 (NM_019993.2,1108-1126).
gagtcctcgggtttgtcaa

SEQ ID NO: 611829 - DNA, 19 bp, Mus musculus
  siRNA target sequence for Aldh9a1 (NM_019993.2,1180-1198).
cagaggaccccaaattaaa

SEQ ID NO: 611830 - DNA, 19 bp, Mus musculus
  siRNA target sequence for Aldh9a1 (NM_019993.2,1184-1202).
ggaccccaaattaaaacat

SEQ ID NO: 611831 - DNA, 19 bp, Mus musculus
  siRNA target sequence for Aldh9a1 (NM_019993.2,1216-1234).
caccttgcattttaactaa

SEQ ID NO: 611832 - DNA, 19 bp, Mus musculus
  siRNA target sequence for Aldh9a1 (NM_019993.2,1242-1260).
gacgacatgacttgtgtaa

SEQ ID NO: 611833 - DNA, 19 bp, Mus musculus
  siRNA target sequence for Aldh9a1 (NM_019993.2,1244-1262).
cgacatgacttgtgtaaaa

SEQ ID NO: 611834 - DNA, 19 bp, Mus musculus
  siRNA target sequence for Aldh9a1 (NM_019993.2,1247-1265).
catgacttgtgtaaaagaa

SEQ ID NO: 611835 - DNA, 19 bp, Mus musculus
  siRNA target sequence for Aldh9a1 (NM_019993.2,1278-1296).
ccagtcatgtccattttaa

SEQ ID NO: 611836 - DNA, 19 bp, Mus musculus
  siRNA target sequence for Aldh9a1 (NM_019993.2,1286-1304).
gtccattttaacatttgga

SEQ ID NO: 611837 - DNA, 19 bp, Mus musculus
  siRNA target sequence for Aldh9a1 (NM_019993.2,1472-1490).
ctacaagaagtcaggattt

SEQ ID NO: 611838 - DNA, 19 bp, Mus musculus
  siRNA target sequence for Aldh9a1 (NM_019993.2,1503-1521).
ggccgtgtgacgattgagt

SEQ ID NO: 611839 - DNA, 19 bp, Mus musculus
  siRNA target sequence for Aldh9a1 (NM_019993.2,1504-1522).
gccgtgtgacgattgagta

SEQ ID NO: 611840 - DNA, 19 bp, Mus musculus
  siRNA target sequence for Pdha1 (NM_008810.2,408-426).
cctgcctgtgcgagcaatt

SEQ ID NO: 611841 - DNA, 19 bp, Mus musculus
  siRNA target sequence for Pdha1 (NM_008810.2,473-491).
gcgggtcaatgcacatgta

SEQ ID NO: 611842 - DNA, 19 bp, Mus musculus
  siRNA target sequence for Pdha1 (NM_008810.2,633-651).
gatctttgaagcttacaat

SEQ ID NO: 611843 - DNA, 19 bp, Mus musculus
  siRNA target sequence for Pdha1 (NM_008810.2,734-752).
cagccagcacggactacta

SEQ ID NO: 611844 - DNA, 19 bp, Mus musculus
  siRNA target sequence for Pdha1 (NM_008810.2,738-756).
cagcacggactactacaaa

SEQ ID NO: 611845 - DNA, 19 bp, Mus musculus
  siRNA target sequence for Pdha1 (NM_008810.2,806-824).
gcgtccgagaggcaacaaa

SEQ ID NO: 611846 - DNA, 19 bp, Mus musculus
  siRNA target sequence for Pdha1 (NM_008810.2,808-826).
gtccgagaggcaacaaagt

SEQ ID NO: 611847 - DNA, 19 bp, Mus musculus
  siRNA target sequence for Pdha1 (NM_008810.2,908-926).
gtgaccctggagtaagcta

SEQ ID NO: 611848 - DNA, 19 bp, Mus musculus
  siRNA target sequence for Pdha2 (NM_008811.1,629-647).
gtgctgtctcacgtatttt

SEQ ID NO: 611849 - DNA, 19 bp, Mus musculus
  siRNA target sequence for Pdha2 (NM_008811.1,710-728).
gccacctgtgacattaaga

SEQ ID NO: 611850 - DNA, 19 bp, Mus musculus
  siRNA target sequence for Pdha2 (NM_008811.1,783-801).
gagccgaggccctcaagta

SEQ ID NO: 611851 - DNA, 19 bp, Mus musculus
  siRNA target sequence for Pdha2 (NM_008811.1,1215-1233).
ggcaggtattcgaagcata

SEQ ID NO: 611852 - DNA, 19 bp, Mus musculus
  siRNA target sequence for Pdha2 (NM_008811.1,1225-1243).
cgaagcatacaatatgtca

SEQ ID NO: 611853 - DNA, 19 bp, Mus musculus
  siRNA target sequence for Pdha2 (NM_008811.1,1320-1338).
cagccagtactgattacca

SEQ ID NO: 611854 - DNA, 19 bp, Mus musculus
  siRNA target sequence for Pdha2 (NM_008811.1,1369-1387).
ggtgaatgggatggatatt

SEQ ID NO: 611855 - DNA, 19 bp, Mus musculus
  siRNA target sequence for Pdha2 (NM_008811.1,1462-1480).
gcagacctaccgttatcat

SEQ ID NO: 611856 - DNA, 19 bp, Mus musculus
  siRNA target sequence for Pdha2 (NM_008811.1,1494-1512).
gcgacccagggatcagtta

SEQ ID NO: 611857 - DNA, 19 bp, Mus musculus
  siRNA target sequence for Pdha2 (NM_008811.1,1495-1513).
cgacccagggatcagttat

SEQ ID NO: 611858 - DNA, 19 bp, Mus musculus
  siRNA target sequence for Pdha2 (NM_008811.1,1498-1516).
cccagggatcagttatcgt

SEQ ID NO: 611859 - DNA, 19 bp, Mus musculus
  siRNA target sequence for Pdha2 (NM_008811.1,1515-1533).
gttcacgagaagaagttca

SEQ ID NO: 611860 - DNA, 19 bp, Mus musculus
  siRNA target sequence for Pdha2 (NM_008811.1,1529-1547).
gttcataacgtgagaagta

SEQ ID NO: 611861 - DNA, 19 bp, Mus musculus
  siRNA target sequence for Pdha2 (NM_008811.1,1564-1582).
gctgctccgagagagaatt

SEQ ID NO: 611862 - DNA, 19 bp, Mus musculus
  siRNA target sequence for Pdha2 (NM_008811.1,1565-1583).
ctgctccgagagagaatta

SEQ ID NO: 611863 - DNA, 19 bp, Mus musculus
  siRNA target sequence for Pdha2 (NM_008811.1,1568-1586).
ctccgagagagaattatca

SEQ ID NO: 611864 - DNA, 19 bp, Mus musculus
  siRNA target sequence for Pdha2 (NM_008811.1,1717-1735).
ccaccaagatccacctttt

SEQ ID NO: 611865 - DNA, 19 bp, Mus musculus
  siRNA target sequence for Pdha2 (NM_008811.1,1720-1738).
ccaagatccaccttttgaa

SEQ ID NO: 611866 - DNA, 19 bp, Mus musculus
  siRNA target sequence for Pdha2 (NM_008811.1,1739-1757).
gtccgtggtgcacataagt

SEQ ID NO: 611867 - DNA, 19 bp, Mus musculus
  siRNA target sequence for Pdha2 (NM_008811.1,1751-1769).
cataagtggctcaagtata

SEQ ID NO: 611868 - DNA, 19 bp, Mus musculus
  siRNA target sequence for Ogdh (NM_010956.1,151-169).
gacttgtgctgctaagtta

SEQ ID NO: 611869 - DNA, 19 bp, Mus musculus
  siRNA target sequence for Ogdh (NM_010956.1,190-208).
gactgttaagacattttca

SEQ ID NO: 611870 - DNA, 19 bp, Mus musculus
  siRNA target sequence for Ogdh (NM_010956.1,239-257).
caacagattcggtgctatt

SEQ ID NO: 611871 - DNA, 19 bp, Mus musculus
  siRNA target sequence for Ogdh (NM_010956.1,291-309).
ggactagttcgaactatgt

SEQ ID NO: 611872 - DNA, 19 bp, Mus musculus
  siRNA target sequence for Ogdh (NM_010956.1,300-318).
cgaactatgtggaggaaat

SEQ ID NO: 611873 - DNA, 19 bp, Mus musculus
  siRNA target sequence for Ogdh (NM_010956.1,334-352).
ggagaatcccaaaagtgta

SEQ ID NO: 611874 - DNA, 19 bp, Mus musculus
  siRNA target sequence for Ogdh (NM_010956.1,337-355).
gaatcccaaaagtgtacat

SEQ ID NO: 611875 - DNA, 19 bp, Mus musculus
  siRNA target sequence for Ogdh (NM_010956.1,531-549).
ctctcatcagggcatatca

SEQ ID NO: 611876 - DNA, 19 bp, Mus musculus
  siRNA target sequence for Ogdh (NM_010956.1,575-593).
cttgatcctctcggaatta

SEQ ID NO: 611877 - DNA, 19 bp, Mus musculus
  siRNA target sequence for Ogdh (NM_010956.1,578-596).
gatcctctcggaattagtt

SEQ ID NO: 611878 - DNA, 19 bp, Mus musculus
  siRNA target sequence for Ogdh (NM_010956.1,584-602).
ctcggaattagttgtgtaa

SEQ ID NO: 611879 - DNA, 19 bp, Mus musculus
  siRNA target sequence for Ogdh (NM_010956.1,611-629).
gatgctccggtaactgttt

SEQ ID NO: 611880 - DNA, 19 bp, Mus musculus
  siRNA target sequence for Ogdh (NM_010956.1,617-635).
ccggtaactgtttcttcaa

SEQ ID NO: 611881 - DNA, 19 bp, Mus musculus
  siRNA target sequence for Ogdh (NM_010956.1,779-797).
ggtgtggagttcatgttca

SEQ ID NO: 611882 - DNA, 19 bp, Mus musculus
  siRNA target sequence for Ogdh (NM_010956.1,943-961).
ctcggagaagcgttttggt

SEQ ID NO: 611883 - DNA, 19 bp, Mus musculus
  siRNA target sequence for Ogdh (NM_010956.1,992-1010).
ctcaagacaatcattgata

SEQ ID NO: 611884 - DNA, 19 bp, Mus musculus
  siRNA target sequence for Ogdh (NM_010956.1,1020-1038).
caaatggagtggactatgt

SEQ ID NO: 611885 - DNA, 19 bp, Mus musculus
  siRNA target sequence for Ogdh (NM_010956.1,1026-1044).
gagtggactatgtgatcat

SEQ ID NO: 611886 - DNA, 19 bp, Mus musculus
  siRNA target sequence for Ogdh (NM_010956.1,1065-1083).
ggctgaacgtgcttgcaaa

SEQ ID NO: 611887 - DNA, 19 bp, Mus musculus
  siRNA target sequence for Ogdh (NM_010956.1,1066-1084).
gctgaacgtgcttgcaaat

SEQ ID NO: 611888 - DNA, 19 bp, Mus musculus
  siRNA target sequence for Ogdh (NM_010956.1,1099-1117).
gctggagcaaatattctgt

SEQ ID NO: 611889 - DNA, 19 bp, Mus musculus
  siRNA target sequence for Ogdh (NM_010956.1,1152-1170).
gttctggggacatgaagta

SEQ ID NO: 611890 - DNA, 19 bp, Mus musculus
  siRNA target sequence for Ogdh (NM_010956.1,1168-1186).
gtaccacctgggcatgtat

SEQ ID NO: 611891 - DNA, 19 bp, Mus musculus
  siRNA target sequence for Ogdh (NM_010956.1,1202-1220).
cgtgtgaccgacagaaaca

SEQ ID NO: 611892 - DNA, 19 bp, Mus musculus
  siRNA target sequence for Ogdh (NM_010956.1,1322-1340).
gggaaaaaggtgatgtcta

SEQ ID NO: 611893 - DNA, 19 bp, Mus musculus
  siRNA target sequence for Ogdh (NM_010956.1,1373-1391).
cagggcatcgtatatgaga

SEQ ID NO: 611894 - DNA, 19 bp, Mus musculus
  siRNA target sequence for Ogdh (NM_010956.1,1434-1452).
ctgttcatgtggttgtcaa

SEQ ID NO: 611895 - DNA, 19 bp, Mus musculus
  siRNA target sequence for Ogdh (NM_010956.1,1533-1551).
cccccattttccatgtcaa

SEQ ID NO: 611896 - DNA, 19 bp, Mus musculus
  siRNA target sequence for Ogdh (NM_010956.1,1569-1587).
ctgtcatgtatgtatgcaa

SEQ ID NO: 611897 - DNA, 19 bp, Mus musculus
  siRNA target sequence for Ogdh (NM_010956.1,1612-1630).
cttccacaaggatgttgta

SEQ ID NO: 611898 - DNA, 19 bp, Mus musculus
  siRNA target sequence for Ogdh (NM_010956.1,1639-1657).
ggtgtgttatcgacgaaat

SEQ ID NO: 611899 - DNA, 19 bp, Mus musculus
  siRNA target sequence for Ogdh (NM_010956.1,1650-1668).
gacgaaatggccacaatga

SEQ ID NO: 611900 - DNA, 19 bp, Mus musculus
  siRNA target sequence for Ogdh (NM_010956.1,1669-1687).
gatggacgaacctatgttt

SEQ ID NO: 611901 - DNA, 19 bp, Mus musculus
  siRNA target sequence for Ogdh (NM_010956.1,1672-1690).
ggacgaacctatgtttaca

SEQ ID NO: 611902 - DNA, 19 bp, Mus musculus
  siRNA target sequence for Ogdh (NM_010956.1,1784-1802).
gagtacgaggaggaaatct

SEQ ID NO: 611903 - DNA, 19 bp, Mus musculus
  siRNA target sequence for Ogdh (NM_010956.1,1796-1814).
gaaatctccaagtatgata

SEQ ID NO: 611904 - DNA, 19 bp, Mus musculus
  siRNA target sequence for Ogdh (NM_010956.1,1816-1834).
gatctgtgaggaagcattt

SEQ ID NO: 611905 - DNA, 19 bp, Mus musculus
  siRNA target sequence for Ogdh (NM_010956.1,1992-2010).
ctgtacctgtggagaactt

SEQ ID NO: 611906 - DNA, 19 bp, Mus musculus
  siRNA target sequence for Ogdh (NM_010956.1,2025-2043).
ggctgagccggatcttgaa

SEQ ID NO: 611907 - DNA, 19 bp, Mus musculus
  siRNA target sequence for Ogdh (NM_010956.1,2191-2209).
gctccatgatcagaatgtt

SEQ ID NO: 611908 - DNA, 19 bp, Mus musculus
  siRNA target sequence for Ogdh (NM_010956.1,2358-2376).
cccagtttggtgacttcaa

SEQ ID NO: 611909 - DNA, 19 bp, Mus musculus
  siRNA target sequence for Ogdh (NM_010956.1,2380-2398).
catggcacagtgcatcatt

SEQ ID NO: 611910 - DNA, 19 bp, Mus musculus
  siRNA target sequence for Ogdh (NM_010956.1,2670-2688).
ccttccggaagccgttaat

SEQ ID NO: 611911 - DNA, 19 bp, Mus musculus
  siRNA target sequence for Ogdh (NM_010956.1,2717-2735).
caccctgaggcaagaacta

SEQ ID NO: 611912 - DNA, 19 bp, Mus musculus
  siRNA target sequence for Ogdh (NM_010956.1,2770-2788).
gcgtgtgatcccagaaaat

SEQ ID NO: 611913 - DNA, 19 bp, Mus musculus
  siRNA target sequence for Ogdh (NM_010956.1,3014-3032).
ggctactatgactatgtca

SEQ ID NO: 611914 - DNA, 19 bp, Mus musculus
  siRNA target sequence for Ogdh (NM_010956.1,3170-3188).
ctggacgcattcaagaaat

SEQ ID NO: 611915 - DNA, 19 bp, Mus musculus
  siRNA target sequence for Ogdh (NM_010956.1,3175-3193).
cgcattcaagaaattctct

SEQ ID NO: 611916 - DNA, 19 bp, Mus musculus
  siRNA target sequence for Bckdha (NM_007533.2,203-221).
gggcctctgcagagtttgt

SEQ ID NO: 611917 - DNA, 19 bp, Mus musculus
  siRNA target sequence for Bckdha (NM_007533.2,415-433).
cggatctccttctacatga

SEQ ID NO: 611918 - DNA, 19 bp, Mus musculus
  siRNA target sequence for Bckdha (NM_007533.2,423-441).
cttctacatgaccaactat

SEQ ID NO: 611919 - DNA, 19 bp, Mus musculus
  siRNA target sequence for Bckdha (NM_007533.2,544-562).
ccgctggagctgttcatgt

SEQ ID NO: 611920 - DNA, 19 bp, Mus musculus
  siRNA target sequence for Bckdha (NM_007533.2,565-583).
cagtgctacggcaatgtga

SEQ ID NO: 611921 - DNA, 19 bp, Mus musculus
  siRNA target sequence for Bckdha (NM_007533.2,567-585).
gtgctacggcaatgtgaat

SEQ ID NO: 611922 - DNA, 19 bp, Mus musculus
  siRNA target sequence for Bckdha (NM_007533.2,602-620).
gccagatgcctgttcacta

SEQ ID NO: 611923 - DNA, 19 bp, Mus musculus
  siRNA target sequence for Bckdha (NM_007533.2,634-652).
cgccacttcgtcaccattt

SEQ ID NO: 611924 - DNA, 19 bp, Mus musculus
  siRNA target sequence for Bckdha (NM_007533.2,637-655).
cacttcgtcaccatttcct

SEQ ID NO: 611925 - DNA, 19 bp, Mus musculus
  siRNA target sequence for Bckdha (NM_007533.2,724-742).
cggattgtgatctgttact

SEQ ID NO: 611926 - DNA, 19 bp, Mus musculus
  siRNA target sequence for Bckdha (NM_007533.2,772-790).
gcccacgccggtttcaatt

SEQ ID NO: 611927 - DNA, 19 bp, Mus musculus
  siRNA target sequence for Bckdha (NM_007533.2,773-791).
cccacgccggtttcaattt

SEQ ID NO: 611928 - DNA, 19 bp, Mus musculus
  siRNA target sequence for Bckdha (NM_007533.2,901-919).
cctgggtacggcatcatgt

SEQ ID NO: 611929 - DNA, 19 bp, Mus musculus
  siRNA target sequence for Bckdha (NM_007533.2,904-922).
gggtacggcatcatgtcaa

SEQ ID NO: 611930 - DNA, 19 bp, Mus musculus
  siRNA target sequence for Bckdha (NM_007533.2,905-923).
ggtacggcatcatgtcaat

SEQ ID NO: 611931 - DNA, 19 bp, Mus musculus
  siRNA target sequence for Bckdha (NM_007533.2,930-948).
ggacggcaacgatgtgttt

SEQ ID NO: 611932 - DNA, 19 bp, Mus musculus
  siRNA target sequence for Bckdha (NM_007533.2,1076-1094).
cggtggacgaggtcaatta

SEQ ID NO: 611933 - DNA, 19 bp, Mus musculus
  siRNA target sequence for Bckdha (NM_007533.2,1222-1240).
caggctgagcggaagctaa

SEQ ID NO: 611934 - DNA, 19 bp, Mus musculus
  siRNA target sequence for Acadl (NM_007381.2,161-179).
ggaatcaggagaatctttt

SEQ ID NO: 611935 - DNA, 19 bp, Mus musculus
  siRNA target sequence for Acadl (NM_007381.2,308-326).
ggcttgcttggcatcaaca

SEQ ID NO: 611936 - DNA, 19 bp, Mus musculus
  siRNA target sequence for Acadl (NM_007381.2,322-340).
caacatcgcagagaaacat

SEQ ID NO: 611937 - DNA, 19 bp, Mus musculus
  siRNA target sequence for Acadl (NM_007381.2,361-379).
gctctcaacagcagttact

SEQ ID NO: 611938 - DNA, 19 bp, Mus musculus
  siRNA target sequence for Acadl (NM_007381.2,362-380).
ctctcaacagcagttactt

SEQ ID NO: 611939 - DNA, 19 bp, Mus musculus
  siRNA target sequence for Acadl (NM_007381.2,389-407).
caagcgtactccaattgca

SEQ ID NO: 611940 - DNA, 19 bp, Mus musculus
  siRNA target sequence for Acadl (NM_007381.2,423-441).
gcctccactcagatattgt

SEQ ID NO: 611941 - DNA, 19 bp, Mus musculus
  siRNA target sequence for Acadl (NM_007381.2,456-474).
cgaattacggcacaaaaga

SEQ ID NO: 611942 - DNA, 19 bp, Mus musculus
  siRNA target sequence for Acadl (NM_007381.2,457-475).
gaattacggcacaaaagaa

SEQ ID NO: 611943 - DNA, 19 bp, Mus musculus
  siRNA target sequence for Acadl (NM_007381.2,547-565).
ggctggaagtgacttacaa

SEQ ID NO: 611944 - DNA, 19 bp, Mus musculus
  siRNA target sequence for Acadl (NM_007381.2,593-611).
gggagtgattggattctca

SEQ ID NO: 611945 - DNA, 19 bp, Mus musculus
  siRNA target sequence for Acadl (NM_007381.2,595-613).
gagtgattggattctcaat

SEQ ID NO: 611946 - DNA, 19 bp, Mus musculus
  siRNA target sequence for Acadl (NM_007381.2,619-637).
caaggtgttcatcactaat

SEQ ID NO: 611947 - DNA, 19 bp, Mus musculus
  siRNA target sequence for Acadl (NM_007381.2,631-649).
cactaatggctggttaagt

SEQ ID NO: 611948 - DNA, 19 bp, Mus musculus
  siRNA target sequence for Acadl (NM_007381.2,701-719).
catggcattagcctctttt

SEQ ID NO: 611949 - DNA, 19 bp, Mus musculus
  siRNA target sequence for Acadl (NM_007381.2,763-781).
gcataagatgggaatgaaa

SEQ ID NO: 611950 - DNA, 19 bp, Mus musculus
  siRNA target sequence for Acadl (NM_007381.2,788-806).
gacacagcagaactattct

SEQ ID NO: 611951 - DNA, 19 bp, Mus musculus
  siRNA target sequence for Acadl (NM_007381.2,790-808).
cacagcagaactattcttt

SEQ ID NO: 611952 - DNA, 19 bp, Mus musculus
  siRNA target sequence for Acadl (NM_007381.2,795-813).
cagaactattctttgaaga

SEQ ID NO: 611953 - DNA, 19 bp, Mus musculus
  siRNA target sequence for Acadl (NM_007381.2,955-973).
ctacgtgaagcaaagaaaa

SEQ ID NO: 611954 - DNA, 19 bp, Mus musculus
  siRNA target sequence for Acadl (NM_007381.2,1003-1021).
gacggtgcagcataaacta

SEQ ID NO: 611955 - DNA, 19 bp, Mus musculus
  siRNA target sequence for Acadl (NM_007381.2,1012-1030).
gcataaactagcagaatta

SEQ ID NO: 611956 - DNA, 19 bp, Mus musculus
  siRNA target sequence for Acadl (NM_007381.2,1110-1128).
ctgcttccatggcaaaata

SEQ ID NO: 611957 - DNA, 19 bp, Mus musculus
  siRNA target sequence for Acadl (NM_007381.2,1129-1147).
ctgggcatctgaattacaa

SEQ ID NO: 611958 - DNA, 19 bp, Mus musculus
  siRNA target sequence for Acadl (NM_007381.2,1133-1151).
gcatctgaattacaaaaca

SEQ ID NO: 611959 - DNA, 19 bp, Mus musculus
  siRNA target sequence for Acadl (NM_007381.2,1200-1218).
gggagtacccgattgcaaa

SEQ ID NO: 611960 - DNA, 19 bp, Mus musculus
  siRNA target sequence for Acadl (NM_007381.2,1201-1219).
ggagtacccgattgcaaaa

SEQ ID NO: 611961 - DNA, 19 bp, Mus musculus
  siRNA target sequence for Acadl (NM_007381.2,1204-1222).
gtacccgattgcaaaagct

SEQ ID NO: 611962 - DNA, 19 bp, Mus musculus
  siRNA target sequence for Acadl (NM_007381.2,1252-1270).
cggtggtaccaacgaaata

SEQ ID NO: 611963 - DNA, 19 bp, Mus musculus
  siRNA target sequence for Acadl (NM_007381.2,1253-1271).
ggtggtaccaacgaaataa

SEQ ID NO: 611964 - DNA, 19 bp, Mus musculus
  siRNA target sequence for Acadl (NM_007381.2,1254-1272).
gtggtaccaacgaaataat

SEQ ID NO: 611965 - DNA, 19 bp, Mus musculus
  siRNA target sequence for Acadl (NM_007381.2,1256-1274).
ggtaccaacgaaataatga

SEQ ID NO: 611966 - DNA, 19 bp, Mus musculus
  siRNA target sequence for Acadl (NM_007381.2,1257-1275).
gtaccaacgaaataatgaa

SEQ ID NO: 611967 - DNA, 19 bp, Mus musculus
  siRNA target sequence for Acads (NM_007383.2,110-128).
cgacggttacacactgttt

SEQ ID NO: 611968 - DNA, 19 bp, Mus musculus
  siRNA target sequence for Acads (NM_007383.2,242-260).
cccacagctcaggttaaga

SEQ ID NO: 611969 - DNA, 19 bp, Mus musculus
  siRNA target sequence for Acads (NM_007383.2,312-330).
gtgcaggcttggattacct

SEQ ID NO: 611970 - DNA, 19 bp, Mus musculus
  siRNA target sequence for Acads (NM_007383.2,369-387).
gcgcctccacgggagttat

SEQ ID NO: 611971 - DNA, 19 bp, Mus musculus
  siRNA target sequence for Acads (NM_007383.2,371-389).
gcctccacgggagttatca

SEQ ID NO: 611972 - DNA, 19 bp, Mus musculus
  siRNA target sequence for Acads (NM_007383.2,372-390).
cctccacgggagttatcat

SEQ ID NO: 611973 - DNA, 19 bp, Mus musculus
  siRNA target sequence for Acads (NM_007383.2,415-433).
gggacccattctgaagttt

SEQ ID NO: 611974 - DNA, 19 bp, Mus musculus
  siRNA target sequence for Acads (NM_007383.2,578-596).
ctcaacggcaccaaagctt

SEQ ID NO: 611975 - DNA, 19 bp, Mus musculus
  siRNA target sequence for Acads (NM_007383.2,618-636).
cttccgccacggtggtatt

SEQ ID NO: 611976 - DNA, 19 bp, Mus musculus
  siRNA target sequence for Acads (NM_007383.2,658-676).
gcagaacaagggtatcagt

SEQ ID NO: 611977 - DNA, 19 bp, Mus musculus
  siRNA target sequence for Acads (NM_007383.2,753-771).
ccacagctaacctcatctt

SEQ ID NO: 611978 - DNA, 19 bp, Mus musculus
  siRNA target sequence for Acads (NM_007383.2,754-772).
cacagctaacctcatcttt

SEQ ID NO: 611979 - DNA, 19 bp, Mus musculus
  siRNA target sequence for Acads (NM_007383.2,756-774).
cagctaacctcatctttga

SEQ ID NO: 611980 - DNA, 19 bp, Mus musculus
  siRNA target sequence for Acads (NM_007383.2,953-971).
ctcaccaagctccaaaata

SEQ ID NO: 611981 - DNA, 19 bp, Mus musculus
  siRNA target sequence for Acads (NM_007383.2,957-975).
ccaagctccaaaatatcca

SEQ ID NO: 611982 - DNA, 19 bp, Mus musculus
  siRNA target sequence for Acads (NM_007383.2,1029-1047).
ggcgtgctgccatgttgaa

SEQ ID NO: 611983 - DNA, 19 bp, Mus musculus
  siRNA target sequence for Acads (NM_007383.2,1030-1048).
gcgtgctgccatgttgaaa

SEQ ID NO: 611984 - DNA, 19 bp, Mus musculus
  siRNA target sequence for Acads (NM_007383.2,1197-1215).
cccgcatcactgagatcta

SEQ ID NO: 611985 - DNA, 19 bp, Mus musculus
  siRNA target sequence for 1200014P05Rik (NM_028765.1,222-240).
gtggactgtttatagaagt

SEQ ID NO: 611986 - DNA, 19 bp, Mus musculus
  siRNA target sequence for 1200014P05Rik (NM_028765.1,378-396).
gcttcatcagccaaatcct

SEQ ID NO: 611987 - DNA, 19 bp, Mus musculus
  siRNA target sequence for 1200014P05Rik (NM_028765.1,379-397).
cttcatcagccaaatcctt

SEQ ID NO: 611988 - DNA, 19 bp, Mus musculus
  siRNA target sequence for 1200014P05Rik (NM_028765.1,538-556).
gaagtatactgggatgttt

SEQ ID NO: 611989 - DNA, 19 bp, Mus musculus
  siRNA target sequence for 1200014P05Rik (NM_028765.1,654-672).
gtgagaacgcccacaagat

SEQ ID NO: 611990 - DNA, 19 bp, Mus musculus
  siRNA target sequence for 1200014P05Rik (NM_028765.1,708-726).
ctgtcttcgcccaactcat

SEQ ID NO: 611991 - DNA, 19 bp, Mus musculus
  siRNA target sequence for 1200014P05Rik (NM_028765.1,712-730).
cttcgcccaactcatcatt

SEQ ID NO: 611992 - DNA, 19 bp, Mus musculus
  siRNA target sequence for 1200014P05Rik (NM_028765.1,766-784).
ccctatcagggatgaaaat

SEQ ID NO: 611993 - DNA, 19 bp, Mus musculus
  siRNA target sequence for 1200014P05Rik (NM_028765.1,823-841).
gcacaaagagggtatgaat

SEQ ID NO: 611994 - DNA, 19 bp, Mus musculus
  siRNA target sequence for 1200014P05Rik (NM_028765.1,834-852).
gtatgaatggtgtggataa

SEQ ID NO: 611995 - DNA, 19 bp, Mus musculus
  siRNA target sequence for 1200014P05Rik (NM_028765.1,842-860).
ggtgtggataacggaattt

SEQ ID NO: 611996 - DNA, 19 bp, Mus musculus
  siRNA target sequence for 1200014P05Rik (NM_028765.1,843-861).
gtgtggataacggaatttt

SEQ ID NO: 611997 - DNA, 19 bp, Mus musculus
  siRNA target sequence for 1200014P05Rik (NM_028765.1,845-863).
gtggataacggaattttga

SEQ ID NO: 611998 - DNA, 19 bp, Mus musculus
  siRNA target sequence for 1200014P05Rik (NM_028765.1,847-865).
ggataacggaattttgata

SEQ ID NO: 611999 - DNA, 19 bp, Mus musculus
  siRNA target sequence for 1200014P05Rik (NM_028765.1,848-866).
gataacggaattttgatat

SEQ ID NO: 612000 - DNA, 19 bp, Mus musculus
  siRNA target sequence for 1200014P05Rik (NM_028765.1,890-908).
gagaacctgctggataagt

SEQ ID NO: 612001 - DNA, 19 bp, Mus musculus
  siRNA target sequence for 1200014P05Rik (NM_028765.1,923-941).
ccagatggacaataccatt

SEQ ID NO: 612002 - DNA, 19 bp, Mus musculus
  siRNA target sequence for 1200014P05Rik (NM_028765.1,954-972).
gcaagaacgcaagattcaa

SEQ ID NO: 612003 - DNA, 19 bp, Mus musculus
  siRNA target sequence for 1200014P05Rik (NM_028765.1,955-973).
caagaacgcaagattcaat

SEQ ID NO: 612004 - DNA, 19 bp, Mus musculus
  siRNA target sequence for 1200014P05Rik (NM_028765.1,1036-1054).
gaagcttggactgatgata

SEQ ID NO: 612005 - DNA, 19 bp, Mus musculus
  siRNA target sequence for 1200014P05Rik (NM_028765.1,1274-1292).
ggactgaaagcctacagta

SEQ ID NO: 612006 - DNA, 19 bp, Mus musculus
  siRNA target sequence for 1200014P05Rik (NM_028765.1,1335-1353).
ccggaggcatgggttacat

SEQ ID NO: 612007 - DNA, 19 bp, Mus musculus
  siRNA target sequence for 1200014P05Rik (NM_028765.1,1337-1355).
ggaggcatgggttacatga

SEQ ID NO: 612008 - DNA, 19 bp, Mus musculus
  siRNA target sequence for 1200014P05Rik (NM_028765.1,1338-1356).
gaggcatgggttacatgat

SEQ ID NO: 612009 - DNA, 19 bp, Mus musculus
  siRNA target sequence for 1200014P05Rik (NM_028765.1,1389-1407).
cagatgtgtttgtaacctt

SEQ ID NO: 612010 - DNA, 19 bp, Mus musculus
  siRNA target sequence for 1200014P05Rik (NM_028765.1,1632-1650).
gtttggtgtccagaattta

SEQ ID NO: 612011 - DNA, 19 bp, Mus musculus
  siRNA target sequence for 1200014P05Rik (NM_028765.1,1637-1655).
gtgtccagaatttactata

SEQ ID NO: 612012 - DNA, 19 bp, Mus musculus
  siRNA target sequence for 1200014P05Rik (NM_028765.1,1796-1814).
gaccaggctttgctaatga

SEQ ID NO: 612013 - DNA, 19 bp, Mus musculus
  siRNA target sequence for 1200014P05Rik (NM_028765.1,1852-1870).
ggagcgaggctggtactta

SEQ ID NO: 612014 - DNA, 19 bp, Mus musculus
  siRNA target sequence for 1200014P05Rik (NM_028765.1,1860-1878).
gctggtacttagaacataa

SEQ ID NO: 612015 - DNA, 19 bp, Mus musculus
  siRNA target sequence for 1200014P05Rik (NM_028765.1,1911-1929).
gggctcagttgctgaattt

SEQ ID NO: 612016 - DNA, 19 bp, Mus musculus
  siRNA target sequence for 1200014P05Rik (NM_028765.1,1913-1931).
gctcagttgctgaatttgt

SEQ ID NO: 612017 - DNA, 19 bp, Mus musculus
  siRNA target sequence for 1200014P05Rik (NM_028765.1,1990-2008).
caccatccgtgcaccaaaa

SEQ ID NO: 612018 - DNA, 19 bp, Mus musculus
  siRNA target sequence for 1700069O15Rik (NM_173441.1,264-282).
cggggaccagtcagatgat

SEQ ID NO: 612019 - DNA, 19 bp, Mus musculus
  siRNA target sequence for 1700069O15Rik (NM_173441.1,393-411).
gaatgaaactagtgataga

SEQ ID NO: 612020 - DNA, 19 bp, Mus musculus
  siRNA target sequence for 1700069O15Rik (NM_173441.1,418-436).
ggcttggccaagatacata

SEQ ID NO: 612021 - DNA, 19 bp, Mus musculus
  siRNA target sequence for 1700069O15Rik (NM_173441.1,424-442).
gccaagatacataatggaa

SEQ ID NO: 612022 - DNA, 19 bp, Mus musculus
  siRNA target sequence for 1700069O15Rik (NM_173441.1,1011-1029).
gaaaggacctgctagtgat

SEQ ID NO: 612023 - DNA, 19 bp, Mus musculus
  siRNA target sequence for 1700069O15Rik (NM_173441.1,1540-1558).
gaggaatttacgggtttta

SEQ ID NO: 612024 - DNA, 19 bp, Mus musculus
  siRNA target sequence for 1700069O15Rik (NM_173441.1,1550-1568).
cgggttttaaccaagaaga

SEQ ID NO: 612025 - DNA, 19 bp, Mus musculus
  siRNA target sequence for 1700069O15Rik (NM_173441.1,1618-1636).
gattctgatgataacataa

SEQ ID NO: 612026 - DNA, 19 bp, Mus musculus
  siRNA target sequence for 1700069O15Rik (NM_173441.1,1643-1661).
gcaagcatatggactttct

SEQ ID NO: 612027 - DNA, 19 bp, Mus musculus
  siRNA target sequence for 1700069O15Rik (NM_173441.1,1707-1725).
caaacgcagacgaaatcga

SEQ ID NO: 612028 - DNA, 19 bp, Mus musculus
  siRNA target sequence for 1700069O15Rik (NM_173441.1,1726-1744).
gatgggggcacttttatta

SEQ ID NO: 612029 - DNA, 19 bp, Mus musculus
  siRNA target sequence for 1700069O15Rik (NM_173441.1,1731-1749).
gggcacttttattagtgat

SEQ ID NO: 612030 - DNA, 19 bp, Mus musculus
  siRNA target sequence for 1700069O15Rik (NM_173441.1,1762-1780).
gtgagcgccatgattgtca

SEQ ID NO: 612031 - DNA, 19 bp, Mus musculus
  siRNA target sequence for 1700069O15Rik (NM_173441.1,1830-1848).
gccagctctgaaaaaatta

SEQ ID NO: 612032 - DNA, 19 bp, Mus musculus
  siRNA target sequence for 1700069O15Rik (NM_173441.1,1834-1852).
gctctgaaaaaattaacct

SEQ ID NO: 612033 - DNA, 19 bp, Mus musculus
  siRNA target sequence for 1700069O15Rik (NM_173441.1,1835-1853).
ctctgaaaaaattaacctt

SEQ ID NO: 612034 - DNA, 19 bp, Mus musculus
  siRNA target sequence for 1700069O15Rik (NM_173441.1,1862-1880).
ctgtggttatgcaccttaa

SEQ ID NO: 612035 - DNA, 19 bp, Mus musculus
  siRNA target sequence for 1700069O15Rik (NM_173441.1,1864-1882).
gtggttatgcaccttaaaa

SEQ ID NO: 612036 - DNA, 19 bp, Mus musculus
  siRNA target sequence for 1700069O15Rik (NM_173441.1,2029-2047).
caagagaccctgaagcata

SEQ ID NO: 612037 - DNA, 19 bp, Mus musculus
  siRNA target sequence for 1700069O15Rik (NM_173441.1,2059-2077).
cgagcagtgatgtatctgt

SEQ ID NO: 612038 - DNA, 19 bp, Mus musculus
  siRNA target sequence for 1700069O15Rik (NM_173441.1,2060-2078).
gagcagtgatgtatctgta

SEQ ID NO: 612039 - DNA, 19 bp, Mus musculus
  siRNA target sequence for 1700069O15Rik (NM_173441.1,2062-2080).
gcagtgatgtatctgtata

SEQ ID NO: 612040 - DNA, 19 bp, Mus musculus
  siRNA target sequence for 1700069O15Rik (NM_173441.1,2115-2133).
ggcagggaagctcatcaat

SEQ ID NO: 612041 - DNA, 19 bp, Mus musculus
  siRNA target sequence for 1700069O15Rik (NM_173441.1,2136-2154).
gtggtctcggcccatattt

SEQ ID NO: 612042 - DNA, 19 bp, Mus musculus
  siRNA target sequence for 1700069O15Rik (NM_173441.1,2139-2157).
gtctcggcccatatttggt

SEQ ID NO: 612043 - DNA, 19 bp, Mus musculus
  siRNA target sequence for 1700069O15Rik (NM_173441.1,2155-2173).
ggtcttacctcaaactata

SEQ ID NO: 612044 - DNA, 19 bp, Mus musculus
  siRNA target sequence for 1700069O15Rik (NM_173441.1,2221-2239).
ccacagcgacgaagattga

SEQ ID NO: 612045 - DNA, 19 bp, Mus musculus
  siRNA target sequence for 1700069O15Rik (NM_173441.1,2357-2375).
caaacaaggactatgttgt

SEQ ID NO: 612046 - DNA, 19 bp, Mus musculus
  siRNA target sequence for 1700069O15Rik (NM_173441.1,2378-2396).
ggcccaagtggaatgtaga

SEQ ID NO: 612047 - DNA, 19 bp, Mus musculus
  siRNA target sequence for 1700069O15Rik (NM_173441.1,2379-2397).
gcccaagtggaatgtagaa

SEQ ID NO: 612048 - DNA, 19 bp, Mus musculus
  siRNA target sequence for 1700069O15Rik (NM_173441.1,2441-2459).
gtcgactggataaacagat

SEQ ID NO: 612049 - DNA, 19 bp, Mus musculus
  siRNA target sequence for 1700069O15Rik (NM_173441.1,2514-2532).
cagcatcgagggcaataaa

SEQ ID NO: 612050 - DNA, 19 bp, Mus musculus
  siRNA target sequence for 1700069O15Rik (NM_173441.1,2516-2534).
gcatcgagggcaataaaat

SEQ ID NO: 612051 - DNA, 19 bp, Mus musculus
  siRNA target sequence for 2600017P15Rik (NM_172678.2,109-127).
cgggtgctgagggaattca

SEQ ID NO: 612052 - DNA, 19 bp, Mus musculus
  siRNA target sequence for 2600017P15Rik (NM_172678.2,227-245).
cagaggtcagtcaacatga

SEQ ID NO: 612053 - DNA, 19 bp, Mus musculus
  siRNA target sequence for 2600017P15Rik (NM_172678.2,234-252).
cagtcaacatgaacttagt

SEQ ID NO: 612054 - DNA, 19 bp, Mus musculus
  siRNA target sequence for 2600017P15Rik (NM_172678.2,247-265).
cttagtgaaatcaatcagt

SEQ ID NO: 612055 - DNA, 19 bp, Mus musculus
  siRNA target sequence for 2600017P15Rik (NM_172678.2,271-289).
ggaccgctggaaaaattct

SEQ ID NO: 612056 - DNA, 19 bp, Mus musculus
  siRNA target sequence for 2600017P15Rik (NM_172678.2,272-290).
gaccgctggaaaaattctt

SEQ ID NO: 612057 - DNA, 19 bp, Mus musculus
  siRNA target sequence for 2600017P15Rik (NM_172678.2,298-316).
gaagtggactctcgaaaaa

SEQ ID NO: 612058 - DNA, 19 bp, Mus musculus
  siRNA target sequence for 2600017P15Rik (NM_172678.2,337-355).
ccagttgacaccttagaga

SEQ ID NO: 612059 - DNA, 19 bp, Mus musculus
  siRNA target sequence for 2600017P15Rik (NM_172678.2,387-405).
ggtcccagaagaatatggt

SEQ ID NO: 612060 - DNA, 19 bp, Mus musculus
  siRNA target sequence for 2600017P15Rik (NM_172678.2,436-454).
cggctcggggagatcatca

SEQ ID NO: 612061 - DNA, 19 bp, Mus musculus
  siRNA target sequence for 2600017P15Rik (NM_172678.2,502-520).
ggcctcaaggggattatct

SEQ ID NO: 612062 - DNA, 19 bp, Mus musculus
  siRNA target sequence for 2600017P15Rik (NM_172678.2,503-521).
gcctcaaggggattatctt

SEQ ID NO: 612063 - DNA, 19 bp, Mus musculus
  siRNA target sequence for 2600017P15Rik (NM_172678.2,636-654).
gaccagagctacgttaagt

SEQ ID NO: 612064 - DNA, 19 bp, Mus musculus
  siRNA target sequence for 2600017P15Rik (NM_172678.2,638-656).
ccagagctacgttaagtga

SEQ ID NO: 612065 - DNA, 19 bp, Mus musculus
  siRNA target sequence for 2600017P15Rik (NM_172678.2,639-657).
cagagctacgttaagtgaa

SEQ ID NO: 612066 - DNA, 19 bp, Mus musculus
  siRNA target sequence for 2600017P15Rik (NM_172678.2,644-662).
ctacgttaagtgaagataa

SEQ ID NO: 612067 - DNA, 19 bp, Mus musculus
  siRNA target sequence for 2600017P15Rik (NM_172678.2,647-665).
cgttaagtgaagataagaa

SEQ ID NO: 612068 - DNA, 19 bp, Mus musculus
  siRNA target sequence for 2600017P15Rik (NM_172678.2,706-724).
ggaggactggccaatattt

SEQ ID NO: 612069 - DNA, 19 bp, Mus musculus
  siRNA target sequence for 2600017P15Rik (NM_172678.2,707-725).
gaggactggccaatatttt

SEQ ID NO: 612070 - DNA, 19 bp, Mus musculus
  siRNA target sequence for 2600017P15Rik (NM_172678.2,764-782).
gttcgaaaacagacaaaat

SEQ ID NO: 612071 - DNA, 19 bp, Mus musculus
  siRNA target sequence for 2600017P15Rik (NM_172678.2,777-795).
caaaatgaccgcattcata

SEQ ID NO: 612072 - DNA, 19 bp, Mus musculus
  siRNA target sequence for 2600017P15Rik (NM_172678.2,783-801).
gaccgcattcatagtagaa

SEQ ID NO: 612073 - DNA, 19 bp, Mus musculus
  siRNA target sequence for 2600017P15Rik (NM_172678.2,786-804).
cgcattcatagtagaaaga

SEQ ID NO: 612074 - DNA, 19 bp, Mus musculus
  siRNA target sequence for 2600017P15Rik (NM_172678.2,788-806).
cattcatagtagaaagaga

SEQ ID NO: 612075 - DNA, 19 bp, Mus musculus
  siRNA target sequence for 2600017P15Rik (NM_172678.2,805-823).
gacttcggcggaatcacta

SEQ ID NO: 612076 - DNA, 19 bp, Mus musculus
  siRNA target sequence for 2600017P15Rik (NM_172678.2,807-825).
cttcggcggaatcactaat

SEQ ID NO: 612077 - DNA, 19 bp, Mus musculus
  siRNA target sequence for 2600017P15Rik (NM_172678.2,866-884).
catgtgaggtccattttga

SEQ ID NO: 612078 - DNA, 19 bp, Mus musculus
  siRNA target sequence for 2600017P15Rik (NM_172678.2,874-892).
gtccattttgaaaatacca

SEQ ID NO: 612079 - DNA, 19 bp, Mus musculus
  siRNA target sequence for 2600017P15Rik (NM_172678.2,1014-1032).
cgaactgactgctgagtat

SEQ ID NO: 612080 - DNA, 19 bp, Mus musculus
  siRNA target sequence for 2600017P15Rik (NM_172678.2,1033-1051).
gcctgtacgaggaaacagt

SEQ ID NO: 612081 - DNA, 19 bp, Mus musculus
  siRNA target sequence for 2600017P15Rik (NM_172678.2,1034-1052).
cctgtacgaggaaacagtt

SEQ ID NO: 612082 - DNA, 19 bp, Mus musculus
  siRNA target sequence for 2600017P15Rik (NM_172678.2,1037-1055).
gtacgaggaaacagttcaa

SEQ ID NO: 612083 - DNA, 19 bp, Mus musculus
  siRNA target sequence for 2600017P15Rik (NM_172678.2,1075-1093).
gggttgattcaggaaaagt

SEQ ID NO: 612084 - DNA, 19 bp, Mus musculus
  siRNA target sequence for 2600017P15Rik (NM_172678.2,1104-1122).
ggctcagaaggcatacgta

SEQ ID NO: 612085 - DNA, 19 bp, Mus musculus
  siRNA target sequence for 2600017P15Rik (NM_172678.2,1106-1124).
ctcagaaggcatacgtaat

SEQ ID NO: 612086 - DNA, 19 bp, Mus musculus
  siRNA target sequence for 2600017P15Rik (NM_172678.2,1155-1173).
gctagaccaaccaggattt

SEQ ID NO: 612087 - DNA, 19 bp, Mus musculus
  siRNA target sequence for 2600017P15Rik (NM_172678.2,1195-1213).
gccatggtgaaggtgttta

SEQ ID NO: 612088 - DNA, 19 bp, Mus musculus
  siRNA target sequence for 2600017P15Rik (NM_172678.2,1262-1280).
ggggctcaggctacatgaa

SEQ ID NO: 612089 - DNA, 19 bp, Mus musculus
  siRNA target sequence for 2600017P15Rik (NM_172678.2,1312-1330).
gcccgcattctcctaatct

SEQ ID NO: 612090 - DNA, 19 bp, Mus musculus
  siRNA target sequence for 2600017P15Rik (NM_172678.2,1313-1331).
cccgcattctcctaatctt

SEQ ID NO: 612091 - DNA, 19 bp, Mus musculus
  siRNA target sequence for 2600017P15Rik (NM_172678.2,1314-1332).
ccgcattctcctaatcttt

SEQ ID NO: 612092 - DNA, 19 bp, Mus musculus
  siRNA target sequence for 2600017P15Rik (NM_172678.2,1335-1353).
gggaaccaatgagattctt

SEQ ID NO: 612093 - DNA, 19 bp, Mus musculus
  siRNA target sequence for 2600017P15Rik (NM_172678.2,1345-1363).
gagattcttcggttgttca

SEQ ID NO: 612094 - DNA, 19 bp, Mus musculus
  siRNA target sequence for 2600017P15Rik (NM_172678.2,1398-1416).
cctgacctcgaggatcaaa

SEQ ID NO: 612095 - DNA, 19 bp, Mus musculus
  siRNA target sequence for 2600017P15Rik (NM_172678.2,1406-1424).
cgaggatcaaagagcttaa

SEQ ID NO: 612096 - DNA, 19 bp, Mus musculus
  siRNA target sequence for 2600017P15Rik (NM_172678.2,1420-1438).
cttaaaagtggcaatgtga

SEQ ID NO: 612097 - DNA, 19 bp, Mus musculus
  siRNA target sequence for 2600017P15Rik (NM_172678.2,1452-1470).
gacgattggtcggaaactt

SEQ ID NO: 612098 - DNA, 19 bp, Mus musculus
  siRNA target sequence for 2600017P15Rik (NM_172678.2,1463-1481).
ggaaacttcgggattctct

SEQ ID NO: 612099 - DNA, 19 bp, Mus musculus
  siRNA target sequence for 2600017P15Rik (NM_172678.2,1589-1607).
ctgttgagaccctgttact

SEQ ID NO: 612100 - DNA, 19 bp, Mus musculus
  siRNA target sequence for 2600017P15Rik (NM_172678.2,1599-1617).
cctgttactccgttttgga

SEQ ID NO: 612101 - DNA, 19 bp, Mus musculus
  siRNA target sequence for 2600017P15Rik (NM_172678.2,1600-1618).
ctgttactccgttttggaa

SEQ ID NO: 612102 - DNA, 19 bp, Mus musculus
  siRNA target sequence for 2600017P15Rik (NM_172678.2,1606-1624).
ctccgttttggaaagaaca

SEQ ID NO: 612103 - DNA, 19 bp, Mus musculus
  siRNA target sequence for 2600017P15Rik (NM_172678.2,1705-1723).
gccagccgctccatcagaa

SEQ ID NO: 612104 - DNA, 19 bp, Mus musculus
  siRNA target sequence for 2600017P15Rik (NM_172678.2,1706-1724).
ccagccgctccatcagaat

SEQ ID NO: 612105 - DNA, 19 bp, Mus musculus
  siRNA target sequence for 2600017P15Rik (NM_172678.2,1707-1725).
cagccgctccatcagaatt

SEQ ID NO: 612106 - DNA, 19 bp, Mus musculus
  siRNA target sequence for 2600017P15Rik (NM_172678.2,1772-1790).
gtgtggaagcttatttcca

SEQ ID NO: 612107 - DNA, 19 bp, Mus musculus
  siRNA target sequence for 2600017P15Rik (NM_172678.2,1876-1894).
gagaagcgagcctatatct

SEQ ID NO: 612108 - DNA, 19 bp, Mus musculus
  siRNA target sequence for 9330129D05Rik (NM_178799.2,1016-1034).
gataactcctatgtcataa

SEQ ID NO: 612109 - DNA, 19 bp, Mus musculus
  siRNA target sequence for 9330129D05Rik (NM_178799.2,1316-1334).
gggcgtgcccggattcata

SEQ ID NO: 612110 - DNA, 19 bp, Mus musculus
  siRNA target sequence for 9330129D05Rik (NM_178799.2,1317-1335).
ggcgtgcccggattcataa

SEQ ID NO: 612111 - DNA, 19 bp, Mus musculus
  siRNA target sequence for 9330129D05Rik (NM_178799.2,1319-1337).
cgtgcccggattcataact

SEQ ID NO: 612112 - DNA, 19 bp, Mus musculus
  siRNA target sequence for 9330129D05Rik (NM_178799.2,1547-1565).
gagatggccatgattaaaa

SEQ ID NO: 612113 - DNA, 19 bp, Mus musculus
  siRNA target sequence for Acad8 (NM_025862.1,217-235).
gggaaatggctcccaatat

SEQ ID NO: 612114 - DNA, 19 bp, Mus musculus
  siRNA target sequence for Acad8 (NM_025862.1,308-326).
ggtctatgtgcgaacagat

SEQ ID NO: 612115 - DNA, 19 bp, Mus musculus
  siRNA target sequence for Acad8 (NM_025862.1,339-357).
ggactgtctcgccttgata

SEQ ID NO: 612116 - DNA, 19 bp, Mus musculus
  siRNA target sequence for Acad8 (NM_025862.1,344-362).
gtctcgccttgatacttct

SEQ ID NO: 612117 - DNA, 19 bp, Mus musculus
  siRNA target sequence for Acad8 (NM_025862.1,428-446).
gtgtgcctggatgattgat

SEQ ID NO: 612118 - DNA, 19 bp, Mus musculus
  siRNA target sequence for Acad8 (NM_025862.1,433-451).
cctggatgattgatagctt

SEQ ID NO: 612119 - DNA, 19 bp, Mus musculus
  siRNA target sequence for Acad8 (NM_025862.1,434-452).
ctggatgattgatagcttt

SEQ ID NO: 612120 - DNA, 19 bp, Mus musculus
  siRNA target sequence for Acad8 (NM_025862.1,459-477).
gaggaacagaggcacaaat

SEQ ID NO: 612121 - DNA, 19 bp, Mus musculus
  siRNA target sequence for Acad8 (NM_025862.1,628-646).
gaggtgagtcagacatcta

SEQ ID NO: 612122 - DNA, 19 bp, Mus musculus
  siRNA target sequence for Acad8 (NM_025862.1,669-687).
gagtctggcgccaaaggta

SEQ ID NO: 612123 - DNA, 19 bp, Mus musculus
  siRNA target sequence for Acad8 (NM_025862.1,685-703).
gtatctcctgcatagttgt

SEQ ID NO: 612124 - DNA, 19 bp, Mus musculus
  siRNA target sequence for Acad8 (NM_025862.1,692-710).
ctgcatagttgttgagaaa

SEQ ID NO: 612125 - DNA, 19 bp, Mus musculus
  siRNA target sequence for Acad8 (NM_025862.1,772-790).
cccgagcagtgatctttga

SEQ ID NO: 612126 - DNA, 19 bp, Mus musculus
  siRNA target sequence for Acad8 (NM_025862.1,773-791).
ccgagcagtgatctttgaa

SEQ ID NO: 612127 - DNA, 19 bp, Mus musculus
  siRNA target sequence for Acad8 (NM_025862.1,863-881).
gaatggtggaaggatcaat

SEQ ID NO: 612128 - DNA, 19 bp, Mus musculus
  siRNA target sequence for Acad8 (NM_025862.1,903-921).
gccgctcatgcttcagtta

SEQ ID NO: 612129 - DNA, 19 bp, Mus musculus
  siRNA target sequence for Acad8 (NM_025862.1,904-922).
ccgctcatgcttcagttat

SEQ ID NO: 612130 - DNA, 19 bp, Mus musculus
  siRNA target sequence for Acad8 (NM_025862.1,909-927).
catgcttcagttatcctaa

SEQ ID NO: 612131 - DNA, 19 bp, Mus musculus
  siRNA target sequence for Acad8 (NM_025862.1,976-994).
gaagccagtacctccaatt

SEQ ID NO: 612132 - DNA, 19 bp, Mus musculus
  siRNA target sequence for Acad8 (NM_025862.1,1187-1205).
ctatgctgttcaacagtat

SEQ ID NO: 612133 - DNA, 19 bp, Mus musculus
  siRNA target sequence for Acad8 (NM_025862.1,1229-1247).
gatcctagaaggtagcaat

SEQ ID NO: 612134 - DNA, 19 bp, Mus musculus
  siRNA target sequence for Acad8 (NM_025862.1,1325-1343).
gtgtgcagctggaatcagt

SEQ ID NO: 612135 - DNA, 19 bp, Mus musculus
  siRNA target sequence for Acad8 (NM_025862.1,1366-1384).
cagttcaagtgaatcatga

SEQ ID NO: 612136 - DNA, 19 bp, Mus musculus
  siRNA target sequence for Acadm (NM_007382.1,227-245).
ccgttccctctcatcaaaa

SEQ ID NO: 612137 - DNA, 19 bp, Mus musculus
  siRNA target sequence for Acadm (NM_007382.1,394-412).
gcaaatgcctgtgattctt

SEQ ID NO: 612138 - DNA, 19 bp, Mus musculus
  siRNA target sequence for Acadm (NM_007382.1,545-563).
ggtgacgagtatgttatca

SEQ ID NO: 612139 - DNA, 19 bp, Mus musculus
  siRNA target sequence for Acadm (NM_007382.1,546-564).
gtgacgagtatgttatcaa

SEQ ID NO: 612140 - DNA, 19 bp, Mus musculus
  siRNA target sequence for Acadm (NM_007382.1,593-611).
ggaaaggccaactggtatt

SEQ ID NO: 612141 - DNA, 19 bp, Mus musculus
  siRNA target sequence for Acadm (NM_007382.1,594-612).
gaaaggccaactggtattt

SEQ ID NO: 612142 - DNA, 19 bp, Mus musculus
  siRNA target sequence for Acadm (NM_007382.1,599-617).
gccaactggtatttcttgt

SEQ ID NO: 612143 - DNA, 19 bp, Mus musculus
  siRNA target sequence for Acadsb (NM_025826.1,321-339).
cggtgatccagggattgtt

SEQ ID NO: 612144 - DNA, 19 bp, Mus musculus
  siRNA target sequence for Acadsb (NM_025826.1,823-841).
cacctgtcagttaacattt

SEQ ID NO: 612145 - DNA, 19 bp, Mus musculus
  siRNA target sequence for Acadsb (NM_025826.1,828-846).
gtcagttaacatttgaaaa

SEQ ID NO: 612146 - DNA, 19 bp, Mus musculus
  siRNA target sequence for Acadsb (NM_025826.1,832-850).
gttaacatttgaaaatgtt

SEQ ID NO: 612147 - DNA, 19 bp, Mus musculus
  siRNA target sequence for Acadsb (NM_025826.1,853-871).
ggttccagagactaatatt

SEQ ID NO: 612148 - DNA, 19 bp, Mus musculus
  siRNA target sequence for Acadsb (NM_025826.1,959-977).
gcccaaggatgttttgact

SEQ ID NO: 612149 - DNA, 19 bp, Mus musculus
  siRNA target sequence for Acadsb (NM_025826.1,960-978).
cccaaggatgttttgacta

SEQ ID NO: 612150 - DNA, 19 bp, Mus musculus
  siRNA target sequence for Acadsb (NM_025826.1,979-997).
cactattccatacattaaa

SEQ ID NO: 612151 - DNA, 19 bp, Mus musculus
  siRNA target sequence for Acadsb (NM_025826.1,981-999).
ctattccatacattaaaga

SEQ ID NO: 612152 - DNA, 19 bp, Mus musculus
  siRNA target sequence for Acadsb (NM_025826.1,1076-1094).
gaagccacacggttgctaa

SEQ ID NO: 612153 - DNA, 19 bp, Mus musculus
  siRNA target sequence for Acadsb (NM_025826.1,1079-1097).
gccacacggttgctaacat

SEQ ID NO: 612154 - DNA, 19 bp, Mus musculus
  siRNA target sequence for Acadsb (NM_025826.1,1080-1098).
ccacacggttgctaacata

SEQ ID NO: 612155 - DNA, 19 bp, Mus musculus
  siRNA target sequence for Acadsb (NM_025826.1,1083-1101).
cacggttgctaacatacaa

SEQ ID NO: 612156 - DNA, 19 bp, Mus musculus
  siRNA target sequence for Acadsb (NM_025826.1,1118-1136).
gaagccggaaggccattta

SEQ ID NO: 612157 - DNA, 19 bp, Mus musculus
  siRNA target sequence for Acadsb (NM_025826.1,1121-1139).
gccggaaggccatttataa

SEQ ID NO: 612158 - DNA, 19 bp, Mus musculus
  siRNA target sequence for Acadsb (NM_025826.1,1122-1140).
ccggaaggccatttataaa

SEQ ID NO: 612159 - DNA, 19 bp, Mus musculus
  siRNA target sequence for Acadsb (NM_025826.1,1123-1141).
cggaaggccatttataaaa

SEQ ID NO: 612160 - DNA, 19 bp, Mus musculus
  siRNA target sequence for Acadsb (NM_025826.1,1174-1192).
ggtcgctgggctaacaaca

SEQ ID NO: 612161 - DNA, 19 bp, Mus musculus
  siRNA target sequence for Acadsb (NM_025826.1,1175-1193).
gtcgctgggctaacaacaa

SEQ ID NO: 612162 - DNA, 19 bp, Mus musculus
  siRNA target sequence for Acadsb (NM_025826.1,1219-1237).
ggtcggctacaccaaagat

SEQ ID NO: 612163 - DNA, 19 bp, Mus musculus
  siRNA target sequence for Acadsb (NM_025826.1,1220-1238).
gtcggctacaccaaagatt

SEQ ID NO: 612164 - DNA, 19 bp, Mus musculus
  siRNA target sequence for Acadsb (NM_025826.1,1235-1253).
gattaccctgtggagaaat

SEQ ID NO: 612165 - DNA, 19 bp, Mus musculus
  siRNA target sequence for Acadsb (NM_025826.1,1265-1283).
gccaagatcggtacaatat

SEQ ID NO: 612166 - DNA, 19 bp, Mus musculus
  siRNA target sequence for Acadsb (NM_025826.1,1266-1284).
ccaagatcggtacaatata

SEQ ID NO: 612167 - DNA, 19 bp, Mus musculus
  siRNA target sequence for Acadsb (NM_025826.1,1267-1285).
caagatcggtacaatatat

SEQ ID NO: 612168 - DNA, 19 bp, Mus musculus
  siRNA target sequence for Acadsb (NM_025826.1,1270-1288).
gatcggtacaatatatgaa

SEQ ID NO: 612169 - DNA, 19 bp, Mus musculus
  siRNA target sequence for Acadvl (NM_017366.1,140-158).
ccgaagctcgcgatctact

SEQ ID NO: 612170 - DNA, 19 bp, Mus musculus
  siRNA target sequence for Acadvl (NM_017366.1,141-159).
cgaagctcgcgatctacta

SEQ ID NO: 612171 - DNA, 19 bp, Mus musculus
  siRNA target sequence for Acadvl (NM_017366.1,824-842).
caagatctggatcagtaat

SEQ ID NO: 612172 - DNA, 19 bp, Mus musculus
  siRNA target sequence for Acadvl (NM_017366.1,874-892).
ccaagacgccaattaaaga

SEQ ID NO: 612173 - DNA, 19 bp, Mus musculus
  siRNA target sequence for Acadvl (NM_017366.1,875-893).
caagacgccaattaaagat

SEQ ID NO: 612174 - DNA, 19 bp, Mus musculus
  siRNA target sequence for Acadvl (NM_017366.1,963-981).
catgggctccctgaaaaga

SEQ ID NO: 612175 - DNA, 19 bp, Mus musculus
  siRNA target sequence for Acadvl (NM_017366.1,1031-1049).
gaaggtgccatcagagaat

SEQ ID NO: 612176 - DNA, 19 bp, Mus musculus
  siRNA target sequence for Acadvl (NM_017366.1,1084-1102).
ctgtcaacatcctcaacaa

SEQ ID NO: 612177 - DNA, 19 bp, Mus musculus
  siRNA target sequence for Acadvl (NM_017366.1,1127-1145).
cctcgcaggcaccatgaaa

SEQ ID NO: 612178 - DNA, 19 bp, Mus musculus
  siRNA target sequence for Acadvl (NM_017366.1,1162-1180).
cggttgatcatgctactaa

SEQ ID NO: 612179 - DNA, 19 bp, Mus musculus
  siRNA target sequence for Acadvl (NM_017366.1,1163-1181).
ggttgatcatgctactaat

SEQ ID NO: 612180 - DNA, 19 bp, Mus musculus
  siRNA target sequence for Acadvl (NM_017366.1,1167-1185).
gatcatgctactaatcgta

SEQ ID NO: 612181 - DNA, 19 bp, Mus musculus
  siRNA target sequence for Acadvl (NM_017366.1,1195-1213).
gggacaaaattcacaactt

SEQ ID NO: 612182 - DNA, 19 bp, Mus musculus
  siRNA target sequence for Acadvl (NM_017366.1,1196-1214).
ggacaaaattcacaacttt

SEQ ID NO: 612183 - DNA, 19 bp, Mus musculus
  siRNA target sequence for Acadvl (NM_017366.1,1245-1263).
gctattctgcagtatgtga

SEQ ID NO: 612184 - DNA, 19 bp, Mus musculus
  siRNA target sequence for Ivd (NM_019826.2,125-143).
ctgtggacgatgatatcaa

SEQ ID NO: 612185 - DNA, 19 bp, Mus musculus
  siRNA target sequence for Ivd (NM_019826.2,172-190).
cgtcatactatatctaagt

SEQ ID NO: 612186 - DNA, 19 bp, Mus musculus
  siRNA target sequence for Ivd (NM_019826.2,420-438).
ctgcgtcaaccagattgtt

SEQ ID NO: 612187 - DNA, 19 bp, Mus musculus
  siRNA target sequence for Ivd (NM_019826.2,570-588).
gaaaggagatcactatgtt

SEQ ID NO: 612188 - DNA, 19 bp, Mus musculus
  siRNA target sequence for Ivd (NM_019826.2,575-593).
gagatcactatgttctgaa

SEQ ID NO: 612189 - DNA, 19 bp, Mus musculus
  siRNA target sequence for Ivd (NM_019826.2,620-638).
gccctgatgctgatatcct

SEQ ID NO: 612190 - DNA, 19 bp, Mus musculus
  siRNA target sequence for Ivd (NM_019826.2,708-726).
gaagggtatgcctggtttt

SEQ ID NO: 612191 - DNA, 19 bp, Mus musculus
  siRNA target sequence for Ivd (NM_019826.2,712-730).
ggtatgcctggttttagta

SEQ ID NO: 612192 - DNA, 19 bp, Mus musculus
  siRNA target sequence for Ivd (NM_019826.2,838-856).
ggggtctacgtattgatga

SEQ ID NO: 612193 - DNA, 19 bp, Mus musculus
  siRNA target sequence for Ivd (NM_019826.2,995-1013).
gaaagatggccgacatgta

SEQ ID NO: 612194 - DNA, 19 bp, Mus musculus
  siRNA target sequence for Ivd (NM_019826.2,1031-1049).
gtcgacagtacgtctacaa

SEQ ID NO: 612195 - DNA, 19 bp, Mus musculus
  siRNA target sequence for Ivd (NM_019826.2,1034-1052).
gacagtacgtctacaatgt

SEQ ID NO: 612196 - DNA, 19 bp, Mus musculus
  siRNA target sequence for Ivd (NM_019826.2,1094-1112).
gtgccggtgtgattctgta

SEQ ID NO: 612197 - DNA, 19 bp, Mus musculus
  siRNA target sequence for Ivd (NM_019826.2,1166-1184).
gaaatggctacatcaatga

SEQ ID NO: 612198 - DNA, 19 bp, Mus musculus
  siRNA target sequence for Ivd (NM_019826.2,1263-1281).
cattggccgagctttcaat

SEQ ID NO: 612199 - DNA, 19 bp, Mus musculus
  siRNA target sequence for Dhodh (NM_020046.2,351-369).
ccacgggggacgaccattt

SEQ ID NO: 612200 - DNA, 19 bp, Mus musculus
  siRNA target sequence for Dhodh (NM_020046.2,354-372).
cgggggacgaccatttcta

SEQ ID NO: 612201 - DNA, 19 bp, Mus musculus
  siRNA target sequence for Dhodh (NM_020046.2,502-520).
gagagtcctgggccataaa

SEQ ID NO: 612202 - DNA, 19 bp, Mus musculus
  siRNA target sequence for Dhodh (NM_020046.2,514-532).
ccataaattccgaaatcca

SEQ ID NO: 612203 - DNA, 19 bp, Mus musculus
  siRNA target sequence for Dhodh (NM_020046.2,537-555).
ggattgctgcaggatttga

SEQ ID NO: 612204 - DNA, 19 bp, Mus musculus
  siRNA target sequence for Dhodh (NM_020046.2,569-587).
gctgtggacggactctata

SEQ ID NO: 612205 - DNA, 19 bp, Mus musculus
  siRNA target sequence for Dhodh (NM_020046.2,782-800).
gggctgcctctgggaataa

SEQ ID NO: 612206 - DNA, 19 bp, Mus musculus
  siRNA target sequence for Dhodh (NM_020046.2,876-894).
ccgactacctggtggttaa

SEQ ID NO: 612207 - DNA, 19 bp, Mus musculus
  siRNA target sequence for Dhodh (NM_020046.2,1008-1026).
cagcggtgctggtgaagat

SEQ ID NO: 612208 - DNA, 19 bp, Mus musculus
  siRNA target sequence for Dhodh (NM_020046.2,1086-1104).
gcatcgacggactgatcat

SEQ ID NO: 612209 - DNA, 19 bp, Mus musculus
  siRNA target sequence for Dhodh (NM_020046.2,1091-1109).
gacggactgatcatcacaa

SEQ ID NO: 612210 - DNA, 19 bp, Mus musculus
  siRNA target sequence for Dhodh (NM_020046.2,1378-1396).
gctggaggcccttctaaaa

SEQ ID NO: 612211 - DNA, 19 bp, Mus musculus
  siRNA target sequence for Dhodh (NM_020046.2,1391-1409).
ctaaaagaacggggtttta

SEQ ID NO: 612212 - DNA, 19 bp, Mus musculus
  siRNA target sequence for Srd5a2 (NM_053188.1,406-424).
ctttatcagcggtgatctt

SEQ ID NO: 612213 - DNA, 19 bp, Mus musculus
  siRNA target sequence for Srd5a2 (NM_053188.1,412-430).
cagcggtgatctttctgaa

SEQ ID NO: 612214 - DNA, 19 bp, Mus musculus
  siRNA target sequence for Srd5a2 (NM_053188.1,530-548).
cgtcggtgtcttcttcttt

SEQ ID NO: 612215 - DNA, 19 bp, Mus musculus
  siRNA target sequence for Srd5a2 (NM_053188.1,531-549).
gtcggtgtcttcttcttta

SEQ ID NO: 612216 - DNA, 19 bp, Mus musculus
  siRNA target sequence for Srd5a2 (NM_053188.1,533-551).
cggtgtcttcttctttatt

SEQ ID NO: 612217 - DNA, 19 bp, Mus musculus
  siRNA target sequence for Srd5a2 (NM_053188.1,606-624).
cccggagaggtcatctaca

SEQ ID NO: 612218 - DNA, 19 bp, Mus musculus
  siRNA target sequence for Srd5a2 (NM_053188.1,630-648).
ccacaaggtggcttgttta

SEQ ID NO: 612219 - DNA, 19 bp, Mus musculus
  siRNA target sequence for Srd5a2 (NM_053188.1,633-651).
caaggtggcttgtttacgt

SEQ ID NO: 612220 - DNA, 19 bp, Mus musculus
  siRNA target sequence for Srd5a2 (NM_053188.1,639-657).
ggcttgtttacgtatgtgt

SEQ ID NO: 612221 - DNA, 19 bp, Mus musculus
  siRNA target sequence for Srd5a2 (NM_053188.1,671-689).
cctgggcgagattattgaa

SEQ ID NO: 612222 - DNA, 19 bp, Mus musculus
  siRNA target sequence for Srd5a2 (NM_053188.1,676-694).
gcgagattattgaatggat

SEQ ID NO: 612223 - DNA, 19 bp, Mus musculus
  siRNA target sequence for Srd5a2 (NM_053188.1,763-781).
ggatgcaagctttttacca

SEQ ID NO: 612224 - DNA, 19 bp, Mus musculus
  siRNA target sequence for Srd5a2 (NM_053188.1,794-812).
cctcaagatgtttaaggat

SEQ ID NO: 612225 - DNA, 19 bp, Mus musculus
  siRNA target sequence for Acox1 (NM_015729.1,116-134).
caccttcaatccagagtta

SEQ ID NO: 612226 - DNA, 19 bp, Mus musculus
  siRNA target sequence for Acox1 (NM_015729.1,118-136).
ccttcaatccagagttaat

SEQ ID NO: 612227 - DNA, 19 bp, Mus musculus
  siRNA target sequence for Acox1 (NM_015729.1,178-196).
gtcgagaaatcgagaactt

SEQ ID NO: 612228 - DNA, 19 bp, Mus musculus
  siRNA target sequence for Acox1 (NM_015729.1,180-198).
cgagaaatcgagaacttga

SEQ ID NO: 612229 - DNA, 19 bp, Mus musculus
  siRNA target sequence for Acox1 (NM_015729.1,219-237).
caacatgaggactataact

SEQ ID NO: 612230 - DNA, 19 bp, Mus musculus
  siRNA target sequence for Acox1 (NM_015729.1,256-274).
gttacgaggtggctgttaa

SEQ ID NO: 612231 - DNA, 19 bp, Mus musculus
  siRNA target sequence for Acox1 (NM_015729.1,372-390).
gaacctgttggcctcaatt

SEQ ID NO: 612232 - DNA, 19 bp, Mus musculus
  siRNA target sequence for Acox1 (NM_015729.1,500-518).
gatgggccacggaactcat

SEQ ID NO: 612233 - DNA, 19 bp, Mus musculus
  siRNA target sequence for Acox1 (NM_015729.1,516-534).
catcttcgaggcttggaaa

SEQ ID NO: 612234 - DNA, 19 bp, Mus musculus
  siRNA target sequence for Acox1 (NM_015729.1,671-689).
ggagtgctacgggttacat

SEQ ID NO: 612235 - DNA, 19 bp, Mus musculus
  siRNA target sequence for Acox1 (NM_015729.1,761-779).
ccccaagtttggttatgaa

SEQ ID NO: 612236 - DNA, 19 bp, Mus musculus
  siRNA target sequence for Acox1 (NM_015729.1,860-878).
gcctgacggcacgtatgta

SEQ ID NO: 612237 - DNA, 19 bp, Mus musculus
  siRNA target sequence for Acox1 (NM_015729.1,970-988).
gcaccattgccattcgata

SEQ ID NO: 612238 - DNA, 19 bp, Mus musculus
  siRNA target sequence for Acox1 (NM_015729.1,996-1014).
gtgaggcgccagtctgaaa

SEQ ID NO: 612239 - DNA, 19 bp, Mus musculus
  siRNA target sequence for Acox1 (NM_015729.1,1002-1020).
cgccagtctgaaatcaaga

SEQ ID NO: 612240 - DNA, 19 bp, Mus musculus
  siRNA target sequence for Acox1 (NM_015729.1,1032-1050).
gagccccagattttggatt

SEQ ID NO: 612241 - DNA, 19 bp, Mus musculus
  siRNA target sequence for Acox1 (NM_015729.1,1106-1124).
ctttctcggaagatacata

SEQ ID NO: 612242 - DNA, 19 bp, Mus musculus
  siRNA target sequence for Acox1 (NM_015729.1,1130-1148).
gacctacatgcggattaat

SEQ ID NO: 612243 - DNA, 19 bp, Mus musculus
  siRNA target sequence for Acox1 (NM_015729.1,1132-1150).
cctacatgcggattaatga

SEQ ID NO: 612244 - DNA, 19 bp, Mus musculus
  siRNA target sequence for Acox1 (NM_015729.1,1203-1221).
gctgggctgaaggctttta

SEQ ID NO: 612245 - DNA, 19 bp, Mus musculus
  siRNA target sequence for Acox1 (NM_015729.1,1268-1286).
cggtgggcacggctattct

SEQ ID NO: 612246 - DNA, 19 bp, Mus musculus
  siRNA target sequence for Acox1 (NM_015729.1,1270-1288).
gtgggcacggctattctca

SEQ ID NO: 612247 - DNA, 19 bp, Mus musculus
  siRNA target sequence for Acox1 (NM_015729.1,1292-1310).
cagtgggattccaaatatt

SEQ ID NO: 612248 - DNA, 19 bp, Mus musculus
  siRNA target sequence for Acox1 (NM_015729.1,1294-1312).
gtgggattccaaatattta

SEQ ID NO: 612249 - DNA, 19 bp, Mus musculus
  siRNA target sequence for Acox1 (NM_015729.1,1345-1363).
gggagaacactgttatgat

SEQ ID NO: 612250 - DNA, 19 bp, Mus musculus
  siRNA target sequence for Acox1 (NM_015729.1,1368-1386).
cagacggccaggttcttga

SEQ ID NO: 612251 - DNA, 19 bp, Mus musculus
  siRNA target sequence for Acox1 (NM_015729.1,1428-1446).
ggtatggtgtcgtacttga

SEQ ID NO: 612252 - DNA, 19 bp, Mus musculus
  siRNA target sequence for Acox1 (NM_015729.1,1429-1447).
gtatggtgtcgtacttgaa

SEQ ID NO: 612253 - DNA, 19 bp, Mus musculus
  siRNA target sequence for Acox1 (NM_015729.1,1494-1512).
ccaactctggtggacatta

SEQ ID NO: 612254 - DNA, 19 bp, Mus musculus
  siRNA target sequence for Acox1 (NM_015729.1,1552-1570).
cagccagattggtagaaat

SEQ ID NO: 612255 - DNA, 19 bp, Mus musculus
  siRNA target sequence for Acox1 (NM_015729.1,1556-1574).
cagattggtagaaattgct

SEQ ID NO: 612256 - DNA, 19 bp, Mus musculus
  siRNA target sequence for Acox1 (NM_015729.1,1620-1638).
gtggcgtggaacttgactt

SEQ ID NO: 612257 - DNA, 19 bp, Mus musculus
  siRNA target sequence for Acox1 (NM_015729.1,1745-1763).
gaggaacctgtgtctctta

SEQ ID NO: 612258 - DNA, 19 bp, Mus musculus
  siRNA target sequence for Acox1 (NM_015729.1,1787-1805).
gaaaggaggggattttctt

SEQ ID NO: 612259 - DNA, 19 bp, Mus musculus
  siRNA target sequence for Acox1 (NM_015729.1,1947-1965).
cgctatgatggcaatgtgt

SEQ ID NO: 612260 - DNA, 19 bp, Mus musculus
  siRNA target sequence for Acox1 (NM_015729.1,1948-1966).
gctatgatggcaatgtgta

SEQ ID NO: 612261 - DNA, 19 bp, Mus musculus
  siRNA target sequence for Acox1 (NM_015729.1,2046-2064).
cccctgcagtcgaagcttt

SEQ ID NO: 612262 - DNA, 19 bp, Mus musculus
  siRNA target sequence for Acox2 (NM_053115.1,237-255).
ggaagtgcaccctgacata

SEQ ID NO: 612263 - DNA, 19 bp, Mus musculus
  siRNA target sequence for Acox2 (NM_053115.1,241-259).
gtgcaccctgacatagaca

SEQ ID NO: 612264 - DNA, 19 bp, Mus musculus
  siRNA target sequence for Acox2 (NM_053115.1,333-351).
gctgcggagaagagttgaa

SEQ ID NO: 612265 - DNA, 19 bp, Mus musculus
  siRNA target sequence for Acox2 (NM_053115.1,334-352).
ctgcggagaagagttgaaa

SEQ ID NO: 612266 - DNA, 19 bp, Mus musculus
  siRNA target sequence for Acox2 (NM_053115.1,360-378).
ccaacgtgacccagtgttt

SEQ ID NO: 612267 - DNA, 19 bp, Mus musculus
  siRNA target sequence for Acox2 (NM_053115.1,361-379).
caacgtgacccagtgttta

SEQ ID NO: 612268 - DNA, 19 bp, Mus musculus
  siRNA target sequence for Acox2 (NM_053115.1,364-382).
cgtgacccagtgtttaatt

SEQ ID NO: 612269 - DNA, 19 bp, Mus musculus
  siRNA target sequence for Acox2 (NM_053115.1,365-383).
gtgacccagtgtttaattt

SEQ ID NO: 612270 - DNA, 19 bp, Mus musculus
  siRNA target sequence for Acox2 (NM_053115.1,402-420).
gacccgagatgagctatat

SEQ ID NO: 612271 - DNA, 19 bp, Mus musculus
  siRNA target sequence for Acox2 (NM_053115.1,404-422).
cccgagatgagctatatga

SEQ ID NO: 612272 - DNA, 19 bp, Mus musculus
  siRNA target sequence for Acox2 (NM_053115.1,423-441).
ggatgcagttcaaaagaga

SEQ ID NO: 612273 - DNA, 19 bp, Mus musculus
  siRNA target sequence for Acox2 (NM_053115.1,486-504).
cggtcctgaacgcatttat

SEQ ID NO: 612274 - DNA, 19 bp, Mus musculus
  siRNA target sequence for Acox2 (NM_053115.1,510-528).
cagagtccttgctggatat

SEQ ID NO: 612275 - DNA, 19 bp, Mus musculus
  siRNA target sequence for Acox2 (NM_053115.1,514-532).
gtccttgctggatataaca

SEQ ID NO: 612276 - DNA, 19 bp, Mus musculus
  siRNA target sequence for Acox2 (NM_053115.1,524-542).
gatataacaacttaaactt

SEQ ID NO: 612277 - DNA, 19 bp, Mus musculus
  siRNA target sequence for Acox2 (NM_053115.1,547-565).
ggtattgccatgaatgcta

SEQ ID NO: 612278 - DNA, 19 bp, Mus musculus
  siRNA target sequence for Acox2 (NM_053115.1,553-571).
gccatgaatgctatcagaa

SEQ ID NO: 612279 - DNA, 19 bp, Mus musculus
  siRNA target sequence for Acox2 (NM_053115.1,602-620).
ggggccaactcggcaaaaa

SEQ ID NO: 612280 - DNA, 19 bp, Mus musculus
  siRNA target sequence for Acox2 (NM_053115.1,604-622).
ggccaactcggcaaaaact

SEQ ID NO: 612281 - DNA, 19 bp, Mus musculus
  siRNA target sequence for Acox2 (NM_053115.1,684-702).
ggagaccgaagcaacctat

SEQ ID NO: 612282 - DNA, 19 bp, Mus musculus
  siRNA target sequence for Acox2 (NM_053115.1,687-705).
gaccgaagcaacctatgat

SEQ ID NO: 612283 - DNA, 19 bp, Mus musculus
  siRNA target sequence for Acox2 (NM_053115.1,711-729).
cacccaggagtttgtgata

SEQ ID NO: 612284 - DNA, 19 bp, Mus musculus
  siRNA target sequence for Acox2 (NM_053115.1,796-814).
gtggtcctagcccatttga

SEQ ID NO: 612285 - DNA, 19 bp, Mus musculus
  siRNA target sequence for Acox2 (NM_053115.1,879-897).
caccccactgccaggaata

SEQ ID NO: 612286 - DNA, 19 bp, Mus musculus
  siRNA target sequence for Acox2 (NM_053115.1,882-900).
cccactgccaggaataaca

SEQ ID NO: 612287 - DNA, 19 bp, Mus musculus
  siRNA target sequence for Acox2 (NM_053115.1,925-943).
ggcttcgaaaacatagaca

SEQ ID NO: 612288 - DNA, 19 bp, Mus musculus
  siRNA target sequence for Acox2 (NM_053115.1,926-944).
gcttcgaaaacatagacaa

SEQ ID NO: 612289 - DNA, 19 bp, Mus musculus
  siRNA target sequence for Acox2 (NM_053115.1,927-945).
cttcgaaaacatagacaat

SEQ ID NO: 612290 - DNA, 19 bp, Mus musculus
  siRNA target sequence for Acox2 (NM_053115.1,1040-1058).
ggacaccacagagcaatta

SEQ ID NO: 612291 - DNA, 19 bp, Mus musculus
  siRNA target sequence for Acox2 (NM_053115.1,1041-1059).
gacaccacagagcaattat

SEQ ID NO: 612292 - DNA, 19 bp, Mus musculus
  siRNA target sequence for Acox2 (NM_053115.1,1043-1061).
caccacagagcaattatct

SEQ ID NO: 612293 - DNA, 19 bp, Mus musculus
  siRNA target sequence for Acox2 (NM_053115.1,1089-1107).
gctgtataaaggattccta

SEQ ID NO: 612294 - DNA, 19 bp, Mus musculus
  siRNA target sequence for Acox2 (NM_053115.1,1193-1211).
caaaaatcctggaatacca

SEQ ID NO: 612295 - DNA, 19 bp, Mus musculus
  siRNA target sequence for Acox2 (NM_053115.1,1246-1264).
gtgagctatgccttgcatt

SEQ ID NO: 612296 - DNA, 19 bp, Mus musculus
  siRNA target sequence for Acox2 (NM_053115.1,1274-1292).
ccagcctcttacaattctt

SEQ ID NO: 612297 - DNA, 19 bp, Mus musculus
  siRNA target sequence for Acox2 (NM_053115.1,1427-1445).
ggggtcatggctactcaaa

SEQ ID NO: 612298 - DNA, 19 bp, Mus musculus
  siRNA target sequence for Acox2 (NM_053115.1,1599-1617).
ccctcagtccgtcatgtat

SEQ ID NO: 612299 - DNA, 19 bp, Mus musculus
  siRNA target sequence for Acox2 (NM_053115.1,1668-1686).
ccgctgcccagaagtctat

SEQ ID NO: 612300 - DNA, 19 bp, Mus musculus
  siRNA target sequence for Acox2 (NM_053115.1,1705-1723).
gtgtctgccaggctcataa

SEQ ID NO: 612301 - DNA, 19 bp, Mus musculus
  siRNA target sequence for Acox2 (NM_053115.1,1785-1803).
gaaccagacttctgtcata

SEQ ID NO: 612302 - DNA, 19 bp, Mus musculus
  siRNA target sequence for Acox2 (NM_053115.1,1916-1934).
gtgacctctatgccttaaa

SEQ ID NO: 612303 - DNA, 19 bp, Mus musculus
  siRNA target sequence for Acox2 (NM_053115.1,1927-1945).
gccttaaacggtattctga

SEQ ID NO: 612304 - DNA, 19 bp, Mus musculus
  siRNA target sequence for Acox2 (NM_053115.1,2038-2056).
cggaaggacgccatcttgt

SEQ ID NO: 612305 - DNA, 19 bp, Mus musculus
  siRNA target sequence for Acox2 (NM_053115.1,2039-2057).
ggaaggacgccatcttgtt

SEQ ID NO: 612306 - DNA, 19 bp, Mus musculus
  siRNA target sequence for Acox2 (NM_053115.1,2046-2064).
cgccatcttgttaacagat

SEQ ID NO: 612307 - DNA, 19 bp, Mus musculus
  siRNA target sequence for Acox2 (NM_053115.1,2071-2089).
gacttctcggaccattgtt

SEQ ID NO: 612308 - DNA, 19 bp, Mus musculus
  siRNA target sequence for Acox2 (NM_053115.1,2073-2091).
cttctcggaccattgttta

SEQ ID NO: 612309 - DNA, 19 bp, Mus musculus
  siRNA target sequence for Acox2 (NM_053115.1,2178-2196).
ccctgcctataagaagtat

SEQ ID NO: 612310 - DNA, 19 bp, Mus musculus
  siRNA target sequence for Acox2 (NM_053115.1,2179-2197).
cctgcctataagaagtata

SEQ ID NO: 612311 - DNA, 19 bp, Mus musculus
  siRNA target sequence for Acox2 (NM_053115.1,2182-2200).
gcctataagaagtatatta

SEQ ID NO: 612312 - DNA, 19 bp, Mus musculus
  siRNA target sequence for Acox2 (NM_053115.1,2184-2202).
ctataagaagtatattaga

SEQ ID NO: 612313 - DNA, 19 bp, Mus musculus
  siRNA target sequence for Acox3 (NM_030721.2,191-209).
gatccctaccggaagaaaa

SEQ ID NO: 612314 - DNA, 19 bp, Mus musculus
  siRNA target sequence for Acox3 (NM_030721.2,194-212).
ccctaccggaagaaaaaga

SEQ ID NO: 612315 - DNA, 19 bp, Mus musculus
  siRNA target sequence for Acox3 (NM_030721.2,196-214).
ctaccggaagaaaaagaca

SEQ ID NO: 612316 - DNA, 19 bp, Mus musculus
  siRNA target sequence for Acox3 (NM_030721.2,302-320).
gggacggccaggatgtaat

SEQ ID NO: 612317 - DNA, 19 bp, Mus musculus
  siRNA target sequence for Acox3 (NM_030721.2,528-546).
ctggtccctggccaacaaa

SEQ ID NO: 612318 - DNA, 19 bp, Mus musculus
  siRNA target sequence for Acox3 (NM_030721.2,565-583).
gtttttggaaccacagttt

SEQ ID NO: 612319 - DNA, 19 bp, Mus musculus
  siRNA target sequence for Acox3 (NM_030721.2,592-610).
ggttctgagaagcatttca

SEQ ID NO: 612320 - DNA, 19 bp, Mus musculus
  siRNA target sequence for Acox3 (NM_030721.2,596-614).
ctgagaagcatttcaagta

SEQ ID NO: 612321 - DNA, 19 bp, Mus musculus
  siRNA target sequence for Acox3 (NM_030721.2,671-689).
gtcatgggagtaataccaa

SEQ ID NO: 612322 - DNA, 19 bp, Mus musculus
  siRNA target sequence for Acox3 (NM_030721.2,696-714).
gcgaacgacagctcactat

SEQ ID NO: 612323 - DNA, 19 bp, Mus musculus
  siRNA target sequence for Acox3 (NM_030721.2,727-745).
caggaattcatcttacatt

SEQ ID NO: 612324 - DNA, 19 bp, Mus musculus
  siRNA target sequence for Acox3 (NM_030721.2,786-804).
gggcaagacggcaactcat

SEQ ID NO: 612325 - DNA, 19 bp, Mus musculus
  siRNA target sequence for Acox3 (NM_030721.2,845-863).
gccacgggctgcattcctt

SEQ ID NO: 612326 - DNA, 19 bp, Mus musculus
  siRNA target sequence for Acox3 (NM_030721.2,942-960).
gcagaatggcctggataat

SEQ ID NO: 612327 - DNA, 19 bp, Mus musculus
  siRNA target sequence for Acox3 (NM_030721.2,961-979).
ggattcgccatgttcaaca

SEQ ID NO: 612328 - DNA, 19 bp, Mus musculus
  siRNA target sequence for Acox3 (NM_030721.2,962-980).
gattcgccatgttcaacaa

SEQ ID NO: 612329 - DNA, 19 bp, Mus musculus
  siRNA target sequence for Acox3 (NM_030721.2,966-984).
cgccatgttcaacaaagtt

SEQ ID NO: 612330 - DNA, 19 bp, Mus musculus
  siRNA target sequence for Acox3 (NM_030721.2,972-990).
gttcaacaaagttcgaatt

SEQ ID NO: 612331 - DNA, 19 bp, Mus musculus
  siRNA target sequence for Acox3 (NM_030721.2,1009-1027).
gacaggactgggaatatca

SEQ ID NO: 612332 - DNA, 19 bp, Mus musculus
  siRNA target sequence for Acox3 (NM_030721.2,1176-1194).
ggccacacggtgtcagttt

SEQ ID NO: 612333 - DNA, 19 bp, Mus musculus
  siRNA target sequence for Acox3 (NM_030721.2,1199-1217).
ccacggataaggaagagat

SEQ ID NO: 612334 - DNA, 19 bp, Mus musculus
  siRNA target sequence for Acox3 (NM_030721.2,1288-1306).
cacttctctaagacaatct

SEQ ID NO: 612335 - DNA, 19 bp, Mus musculus
  siRNA target sequence for Acox3 (NM_030721.2,1512-1530).
cgacaacgacccaaactgt

SEQ ID NO: 612336 - DNA, 19 bp, Mus musculus
  siRNA target sequence for Acox3 (NM_030721.2,1513-1531).
gacaacgacccaaactgta

SEQ ID NO: 612337 - DNA, 19 bp, Mus musculus
  siRNA target sequence for Acox3 (NM_030721.2,1518-1536).
cgacccaaactgtacctat

SEQ ID NO: 612338 - DNA, 19 bp, Mus musculus
  siRNA target sequence for Acox3 (NM_030721.2,1521-1539).
cccaaactgtacctatgaa

SEQ ID NO: 612339 - DNA, 19 bp, Mus musculus
  siRNA target sequence for Acox3 (NM_030721.2,1609-1627).
gacggagctcacttcacaa

SEQ ID NO: 612340 - DNA, 19 bp, Mus musculus
  siRNA target sequence for Acox3 (NM_030721.2,1735-1753).
gcctaccgctggcttgttt

SEQ ID NO: 612341 - DNA, 19 bp, Mus musculus
  siRNA target sequence for Acox3 (NM_030721.2,1891-1909).
cagcgattccacgaacata

SEQ ID NO: 612342 - DNA, 19 bp, Mus musculus
  siRNA target sequence for Acox3 (NM_030721.2,1893-1911).
gcgattccacgaacatata

SEQ ID NO: 612343 - DNA, 19 bp, Mus musculus
  siRNA target sequence for Acox3 (NM_030721.2,1895-1913).
gattccacgaacatataca

SEQ ID NO: 612344 - DNA, 19 bp, Mus musculus
  siRNA target sequence for Acox3 (NM_030721.2,2007-2025).
ctaccgaggtggctacatt

SEQ ID NO: 612345 - DNA, 19 bp, Mus musculus
  siRNA target sequence for Acox3 (NM_030721.2,2096-2114).
cggtggccttggtagatgt

SEQ ID NO: 612346 - DNA, 19 bp, Mus musculus
  siRNA target sequence for Acox3 (NM_030721.2,2159-2177).
ctgatggtgagctctataa

SEQ ID NO: 612347 - DNA, 19 bp, Mus musculus
  siRNA target sequence for Acox3 (NM_030721.2,2161-2179).
gatggtgagctctataaaa

SEQ ID NO: 612348 - DNA, 19 bp, Mus musculus
  siRNA target sequence for Acox3 (NM_030721.2,2165-2183).
gtgagctctataaaaacct

SEQ ID NO: 612349 - DNA, 19 bp, Mus musculus
  siRNA target sequence for Acox3 (NM_030721.2,2244-2262).
ctctgccaacaaatctgta

SEQ ID NO: 612350 - DNA, 19 bp, Mus musculus
  siRNA target sequence for Acox3 (NM_030721.2,2260-2278).
gtagccgacaggctaaagt

SEQ ID NO: 612351 - DNA, 19 bp, Mus musculus
  siRNA target sequence for Ppox (NM_008911.1,303-321).
ccggactgtgatagtactt

SEQ ID NO: 612352 - DNA, 19 bp, Mus musculus
  siRNA target sequence for Ppox (NM_008911.1,374-392).
gtcctcctaaggtgatctt

SEQ ID NO: 612353 - DNA, 19 bp, Mus musculus
  siRNA target sequence for Ppox (NM_008911.1,377-395).
ctcctaaggtgatcttagt

SEQ ID NO: 612354 - DNA, 19 bp, Mus musculus
  siRNA target sequence for Ppox (NM_008911.1,429-447).
ctcaatccgaggatcagat

SEQ ID NO: 612355 - DNA, 19 bp, Mus musculus
  siRNA target sequence for Ppox (NM_008911.1,443-461).
cagatggtgcgatctttga

SEQ ID NO: 612356 - DNA, 19 bp, Mus musculus
  siRNA target sequence for Ppox (NM_008911.1,871-889).
caaacccaccggtccatat

SEQ ID NO: 612357 - DNA, 19 bp, Mus musculus
  siRNA target sequence for Ppox (NM_008911.1,875-893).
cccaccggtccatattgct

SEQ ID NO: 612358 - DNA, 19 bp, Mus musculus
  siRNA target sequence for Ppox (NM_008911.1,925-943).
cagccggattcctcactaa

SEQ ID NO: 612359 - DNA, 19 bp, Mus musculus
  siRNA target sequence for Ppox (NM_008911.1,927-945).
gccggattcctcactaatt

SEQ ID NO: 612360 - DNA, 19 bp, Mus musculus
  siRNA target sequence for Ppox (NM_008911.1,930-948).
ggattcctcactaattcgt

SEQ ID NO: 612361 - DNA, 19 bp, Mus musculus
  siRNA target sequence for Ppox (NM_008911.1,1126-1144).
ctggaggctgaccacatta

SEQ ID NO: 612362 - DNA, 19 bp, Mus musculus
  siRNA target sequence for Ppox (NM_008911.1,1129-1147).
gaggctgaccacattataa

SEQ ID NO: 612363 - DNA, 19 bp, Mus musculus
  siRNA target sequence for Ppox (NM_008911.1,1131-1149).
ggctgaccacattataagt

SEQ ID NO: 612364 - DNA, 19 bp, Mus musculus
  siRNA target sequence for 4930503B16Rik (NM_030052.2,169-187).
gccagatatgcactaaact

SEQ ID NO: 612365 - DNA, 19 bp, Mus musculus
  siRNA target sequence for 4930503B16Rik (NM_030052.2,170-188).
ccagatatgcactaaacta

SEQ ID NO: 612366 - DNA, 19 bp, Mus musculus
  siRNA target sequence for 4930503B16Rik (NM_030052.2,171-189).
cagatatgcactaaactat

SEQ ID NO: 612367 - DNA, 19 bp, Mus musculus
  siRNA target sequence for 4930503B16Rik (NM_030052.2,262-280).
gacaaatacggcaatatga

SEQ ID NO: 612368 - DNA, 19 bp, Mus musculus
  siRNA target sequence for 4930503B16Rik (NM_030052.2,270-288).
cggcaatatgatgctaatt

SEQ ID NO: 612369 - DNA, 19 bp, Mus musculus
  siRNA target sequence for 4930503B16Rik (NM_030052.2,271-289).
ggcaatatgatgctaatta

SEQ ID NO: 612370 - DNA, 19 bp, Mus musculus
  siRNA target sequence for 4930503B16Rik (NM_030052.2,273-291).
caatatgatgctaattagt

SEQ ID NO: 612371 - DNA, 19 bp, Mus musculus
  siRNA target sequence for 4930503B16Rik (NM_030052.2,303-321).
ctgtttagctggatataca

SEQ ID NO: 612372 - DNA, 19 bp, Mus musculus
  siRNA target sequence for 4930503B16Rik (NM_030052.2,305-323).
gtttagctggatatacaat

SEQ ID NO: 612373 - DNA, 19 bp, Mus musculus
  siRNA target sequence for 4930503B16Rik (NM_030052.2,313-331).
ggatatacaatttatatga

SEQ ID NO: 612374 - DNA, 19 bp, Mus musculus
  siRNA target sequence for 4930503B16Rik (NM_030052.2,348-366).
gtggaacctgtctcctatt

SEQ ID NO: 612375 - DNA, 19 bp, Mus musculus
  siRNA target sequence for Cox4i1 (NM_009941.1,272-290).
gcctttccagggatgagaa

SEQ ID NO: 612376 - DNA, 19 bp, Mus musculus
  siRNA target sequence for Cox4i1 (NM_009941.1,273-291).
cctttccagggatgagaaa

SEQ ID NO: 612377 - DNA, 19 bp, Mus musculus
  siRNA target sequence for Cox4i1 (NM_009941.1,281-299).
gggatgagaaagttcagtt

SEQ ID NO: 612378 - DNA, 19 bp, Mus musculus
  siRNA target sequence for Cox4i1 (NM_009941.1,396-414).
cactgcgctcgttctgatt

SEQ ID NO: 612379 - DNA, 19 bp, Mus musculus
  siRNA target sequence for Cox4i1 (NM_009941.1,436-454).
ggccccatccctcatactt

SEQ ID NO: 612380 - DNA, 19 bp, Mus musculus
  siRNA target sequence for Cox4i1 (NM_009941.1,437-455).
gccccatccctcatacttt

SEQ ID NO: 612381 - DNA, 19 bp, Mus musculus
  siRNA target sequence for Cox4i1 (NM_009941.1,441-459).
catccctcatactttcgat

SEQ ID NO: 612382 - DNA, 19 bp, Mus musculus
  siRNA target sequence for Cox4i1 (NM_009941.1,527-545).
ccgccaagtgggactatga

SEQ ID NO: 612383 - DNA, 19 bp, Mus musculus
  siRNA target sequence for Cox4i1 (NM_009941.1,529-547).
gccaagtgggactatgaca

SEQ ID NO: 612384 - DNA, 19 bp, Mus musculus
  siRNA target sequence for Cox4i2 (NM_053091.1,68-86).
gcccggagtctggtaatga

SEQ ID NO: 612385 - DNA, 19 bp, Mus musculus
  siRNA target sequence for Cox4i2 (NM_053091.1,308-326).
cggctccagttccatgaaa

SEQ ID NO: 612386 - DNA, 19 bp, Mus musculus
  siRNA target sequence for Cox4i2 (NM_053091.1,417-435).
ggtggcagcgagtctatgt

SEQ ID NO: 612387 - DNA, 19 bp, Mus musculus
  siRNA target sequence for Cox4i2 (NM_053091.1,420-438).
ggcagcgagtctatgtgtt

SEQ ID NO: 612388 - DNA, 19 bp, Mus musculus
  siRNA target sequence for Cox6a1 (NM_007748.2,322-340).
cgaccggctatgaagatga

SEQ ID NO: 612389 - DNA, 19 bp, Mus musculus
  siRNA target sequence for Cox6a2 (NM_009943.1,323-341).
ctttgcccaccggttatga

SEQ ID NO: 612390 - DNA, 19 bp, Mus musculus
  siRNA target sequence for Cox6b (NM_025628.1,277-295).
ggtaccggcgtgtgtacaa

SEQ ID NO: 612391 - DNA, 19 bp, Mus musculus
  siRNA target sequence for Cox7a1 (NM_009944.2,48-66).
gctctggtccggtctttta

SEQ ID NO: 612392 - DNA, 19 bp, Mus musculus
  siRNA target sequence for Cox7a1 (NM_009944.2,51-69).
ctggtccggtcttttagct

SEQ ID NO: 612393 - DNA, 19 bp, Mus musculus
  siRNA target sequence for Cox7a1 (NM_009944.2,73-91).
ctaccagaagccacttaga

SEQ ID NO: 612394 - DNA, 19 bp, Mus musculus
  siRNA target sequence for Cox7a1 (NM_009944.2,76-94).
ccagaagccacttagaaaa

SEQ ID NO: 612395 - DNA, 19 bp, Mus musculus
  siRNA target sequence for Cox7a1 (NM_009944.2,137-155).
cctcccagtacacttgaaa

SEQ ID NO: 612396 - DNA, 19 bp, Mus musculus
  siRNA target sequence for Cox7a2 (NM_009945.2,88-106).
gctggcccttcgtcagatt

SEQ ID NO: 612397 - DNA, 19 bp, Mus musculus
  siRNA target sequence for Cox7a2 (NM_009945.2,278-296).
gccatctatctgttagcta

SEQ ID NO: 612398 - DNA, 19 bp, Mus musculus
  siRNA target sequence for Cox7a2 (NM_009945.2,289-307).
gttagctatggctgcattt

SEQ ID NO: 612399 - DNA, 19 bp, Mus musculus
  siRNA target sequence for Cox8b (NM_007751.1,88-106).
caagcgcctgcgaagttca

SEQ ID NO: 612400 - DNA, 19 bp, Mus musculus
  siRNA target sequence for Cox8b (NM_007751.1,229-247).
gcccacttggagagctata

SEQ ID NO: 612401 - DNA, 19 bp, Mus musculus
  siRNA target sequence for Cox8b (NM_007751.1,230-248).
cccacttggagagctataa

SEQ ID NO: 612402 - DNA, 19 bp, Mus musculus
  siRNA target sequence for Cox8b (NM_007751.1,231-249).
ccacttggagagctataaa

SEQ ID NO: 612403 - DNA, 19 bp, Mus musculus
  siRNA target sequence for Cox8b (NM_007751.1,232-250).
cacttggagagctataaaa

SEQ ID NO: 612404 - DNA, 19 bp, Mus musculus
  siRNA target sequence for Coxvib2 (NM_183405.1,314-332).
cacaaccctgcgagtacta

SEQ ID NO: 612405 - DNA, 19 bp, Mus musculus
  siRNA target sequence for Coxvib2 (NM_183405.1,316-334).
caaccctgcgagtactatt

SEQ ID NO: 612406 - DNA, 19 bp, Mus musculus
  siRNA target sequence for Coxvib2 (NM_183405.1,330-348).
ctatttccgtgtattccat

SEQ ID NO: 612407 - DNA, 19 bp, Mus musculus
  siRNA target sequence for Coxvib2 (NM_183405.1,377-395).
gctggaatgagcagatcaa

SEQ ID NO: 612408 - DNA, 19 bp, Mus musculus
  siRNA target sequence for Surf1 (NM_013677.1,145-163).
cgcaggtgttgcagttcta

SEQ ID NO: 612409 - DNA, 19 bp, Mus musculus
  siRNA target sequence for Surf1 (NM_013677.1,156-174).
cagttctactgctgaaaca

SEQ ID NO: 612410 - DNA, 19 bp, Mus musculus
  siRNA target sequence for Surf1 (NM_013677.1,403-421).
cactctaaagagttgtaca

SEQ ID NO: 612411 - DNA, 19 bp, Mus musculus
  siRNA target sequence for Surf1 (NM_013677.1,405-423).
ctctaaagagttgtacata

SEQ ID NO: 612412 - DNA, 19 bp, Mus musculus
  siRNA target sequence for Surf1 (NM_013677.1,535-553).
gtcaccatcctggttaata

SEQ ID NO: 612413 - DNA, 19 bp, Mus musculus
  siRNA target sequence for Surf1 (NM_013677.1,537-555).
caccatcctggttaataga

SEQ ID NO: 612414 - DNA, 19 bp, Mus musculus
  siRNA target sequence for Surf1 (NM_013677.1,622-640).
gacctagttggcatagtga

SEQ ID NO: 612415 - DNA, 19 bp, Mus musculus
  siRNA target sequence for Surf1 (NM_013677.1,685-703).
gaaaggaatcactggtatt

SEQ ID NO: 612416 - DNA, 19 bp, Mus musculus
  siRNA target sequence for Surf1 (NM_013677.1,715-733).
gaagctatggccaagataa

SEQ ID NO: 612417 - DNA, 19 bp, Mus musculus
  siRNA target sequence for Surf1 (NM_013677.1,736-754).
ggagcggaccccattttca

SEQ ID NO: 612418 - DNA, 19 bp, Mus musculus
  siRNA target sequence for Surf1 (NM_013677.1,737-755).
gagcggaccccattttcat

SEQ ID NO: 612419 - DNA, 19 bp, Mus musculus
  siRNA target sequence for Surf1 (NM_013677.1,741-759).
ggaccccattttcattgat

SEQ ID NO: 612420 - DNA, 19 bp, Mus musculus
  siRNA target sequence for Surf1 (NM_013677.1,864-882).
gtgtgcggccacatcatat

SEQ ID NO: 612421 - DNA, 19 bp, Mus musculus
  siRNA target sequence for Surf1 (NM_013677.1,866-884).
gtgcggccacatcatattt

SEQ ID NO: 612422 - DNA, 19 bp, Mus musculus
  siRNA target sequence for Surf1 (NM_013677.1,868-886).
gcggccacatcatatttgt

SEQ ID NO: 612423 - DNA, 19 bp, Mus musculus
  siRNA target sequence for Surf1 (NM_013677.1,904-922).
cgtcggacacccatcatgt

SEQ ID NO: 612424 - DNA, 19 bp, Mus musculus
  siRNA target sequence for Il4i1 (NM_010215.1,154-172).
gtatggaggaccacgatta

SEQ ID NO: 612425 - DNA, 19 bp, Mus musculus
  siRNA target sequence for Il4i1 (NM_010215.1,481-499).
cgtggacggaggtgcataa

SEQ ID NO: 612426 - DNA, 19 bp, Mus musculus
  siRNA target sequence for Il4i1 (NM_010215.1,482-500).
gtggacggaggtgcataat

SEQ ID NO: 612427 - DNA, 19 bp, Mus musculus
  siRNA target sequence for Il4i1 (NM_010215.1,484-502).
ggacggaggtgcataatgt

SEQ ID NO: 612428 - DNA, 19 bp, Mus musculus
  siRNA target sequence for Il4i1 (NM_010215.1,487-505).
cggaggtgcataatgtgaa

SEQ ID NO: 612429 - DNA, 19 bp, Mus musculus
  siRNA target sequence for Il4i1 (NM_010215.1,799-817).
cctgcctgagcgatagact

SEQ ID NO: 612430 - DNA, 19 bp, Mus musculus
  siRNA target sequence for Il4i1 (NM_010215.1,1017-1035).
gcgctgcagcgcattacct

SEQ ID NO: 612431 - DNA, 19 bp, Mus musculus
  siRNA target sequence for Il4i1 (NM_010215.1,1018-1036).
cgctgcagcgcattacctt

SEQ ID NO: 612432 - DNA, 19 bp, Mus musculus
  siRNA target sequence for Il4i1 (NM_010215.1,1173-1191).
cgcccatcgcgcctcatat

SEQ ID NO: 612433 - DNA, 19 bp, Mus musculus
  siRNA target sequence for Il4i1 (NM_010215.1,1174-1192).
gcccatcgcgcctcatatt

SEQ ID NO: 612434 - DNA, 19 bp, Mus musculus
  siRNA target sequence for Il4i1 (NM_010215.1,1176-1194).
ccatcgcgcctcatattct

SEQ ID NO: 612435 - DNA, 19 bp, Mus musculus
  siRNA target sequence for Il4i1 (NM_010215.1,1177-1195).
catcgcgcctcatattcta

SEQ ID NO: 612436 - DNA, 19 bp, Mus musculus
  siRNA target sequence for Il4i1 (NM_010215.1,1592-1610).
gatgatggagcatgcatat

SEQ ID NO: 612437 - DNA, 19 bp, Mus musculus
  siRNA target sequence for Il4i1 (NM_010215.1,1702-1720).
cctctcacaaacacttgtt

SEQ ID NO: 612438 - DNA, 19 bp, Mus musculus
  siRNA target sequence for Il4i1 (NM_010215.1,1818-1836).
gggcacgcccaccagaata

SEQ ID NO: 612439 - DNA, 19 bp, Mus musculus
  siRNA target sequence for Il4i1 (NM_010215.1,1819-1837).
ggcacgcccaccagaatat

SEQ ID NO: 612440 - DNA, 19 bp, Mus musculus
  siRNA target sequence for Il4i1 (NM_010215.1,1820-1838).
gcacgcccaccagaatata

SEQ ID NO: 612441 - DNA, 19 bp, Mus musculus
  siRNA target sequence for Il4i1 (NM_010215.1,1823-1841).
cgcccaccagaatatatat

SEQ ID NO: 612442 - DNA, 19 bp, Mus musculus
  siRNA target sequence for Il4i1 (NM_010215.1,1826-1844).
ccaccagaatatatatcct

SEQ ID NO: 612443 - DNA, 19 bp, Mus musculus
  siRNA target sequence for Il4i1 (NM_010215.1,1903-1921).
ctggcaccccgcaaatgca

SEQ ID NO: 612444 - DNA, 19 bp, Mus musculus
  siRNA target sequence for Maoa (NM_173740.1,92-110).
gctgctgccaaactattgt

SEQ ID NO: 612445 - DNA, 19 bp, Mus musculus
  siRNA target sequence for Maoa (NM_173740.1,98-116).
gccaaactattgtcagaat

SEQ ID NO: 612446 - DNA, 19 bp, Mus musculus
  siRNA target sequence for Maoa (NM_173740.1,99-117).
ccaaactattgtcagaata

SEQ ID NO: 612447 - DNA, 19 bp, Mus musculus
  siRNA target sequence for Maoa (NM_173740.1,263-281).
ctaggcatagagacctata

SEQ ID NO: 612448 - DNA, 19 bp, Mus musculus
  siRNA target sequence for Maoa (NM_173740.1,267-285).
gcatagagacctataaagt

SEQ ID NO: 612449 - DNA, 19 bp, Mus musculus
  siRNA target sequence for Maoa (NM_173740.1,276-294).
cctataaagtgaatgtcaa

SEQ ID NO: 612450 - DNA, 19 bp, Mus musculus
  siRNA target sequence for Maoa (NM_173740.1,277-295).
ctataaagtgaatgtcaat

SEQ ID NO: 612451 - DNA, 19 bp, Mus musculus
  siRNA target sequence for Maoa (NM_173740.1,292-310).
caatgagcgtctagttcaa

SEQ ID NO: 612452 - DNA, 19 bp, Mus musculus
  siRNA target sequence for Maoa (NM_173740.1,299-317).
cgtctagttcaatatgtca

SEQ ID NO: 612453 - DNA, 19 bp, Mus musculus
  siRNA target sequence for Maoa (NM_173740.1,300-318).
gtctagttcaatatgtcaa

SEQ ID NO: 612454 - DNA, 19 bp, Mus musculus
  siRNA target sequence for Maoa (NM_173740.1,331-349).
cccattccgtggtgcattt

SEQ ID NO: 612455 - DNA, 19 bp, Mus musculus
  siRNA target sequence for Maoa (NM_173740.1,366-384).
ccttggcatatttggatta

SEQ ID NO: 612456 - DNA, 19 bp, Mus musculus
  siRNA target sequence for Maoa (NM_173740.1,464-482).
gaatgggacaagataacca

SEQ ID NO: 612457 - DNA, 19 bp, Mus musculus
  siRNA target sequence for Maoa (NM_173740.1,484-502).
gaaagatctcattgataaa

SEQ ID NO: 612458 - DNA, 19 bp, Mus musculus
  siRNA target sequence for Maoa (NM_173740.1,488-506).
gatctcattgataaaatct

SEQ ID NO: 612459 - DNA, 19 bp, Mus musculus
  siRNA target sequence for Maoa (NM_173740.1,519-537).
ctgctcgagaatttgctta

SEQ ID NO: 612460 - DNA, 19 bp, Mus musculus
  siRNA target sequence for Maoa (NM_173740.1,618-636).
gaggtacctctcggatatt

SEQ ID NO: 612461 - DNA, 19 bp, Mus musculus
  siRNA target sequence for Maoa (NM_173740.1,655-673).
ccaggaacggaaatttgta

SEQ ID NO: 612462 - DNA, 19 bp, Mus musculus
  siRNA target sequence for Maoa (NM_173740.1,678-696).
gctctggccaaataagtga

SEQ ID NO: 612463 - DNA, 19 bp, Mus musculus
  siRNA target sequence for Maoa (NM_173740.1,685-703).
ccaaataagtgaacagata

SEQ ID NO: 612464 - DNA, 19 bp, Mus musculus
  siRNA target sequence for Maoa (NM_173740.1,706-724).
ggtcctccttggggataaa

SEQ ID NO: 612465 - DNA, 19 bp, Mus musculus
  siRNA target sequence for Maoa (NM_173740.1,730-748).
gctgagctctcctgttact

SEQ ID NO: 612466 - DNA, 19 bp, Mus musculus
  siRNA target sequence for Maoa (NM_173740.1,735-753).
gctctcctgttacttatat

SEQ ID NO: 612467 - DNA, 19 bp, Mus musculus
  siRNA target sequence for Maoa (NM_173740.1,738-756).
ctcctgttacttatattga

SEQ ID NO: 612468 - DNA, 19 bp, Mus musculus
  siRNA target sequence for Maoa (NM_173740.1,747-765).
cttatattgaccaaacaga

SEQ ID NO: 612469 - DNA, 19 bp, Mus musculus
  siRNA target sequence for Maoa (NM_173740.1,758-776).
caaacagatgacaacatca

SEQ ID NO: 612470 - DNA, 19 bp, Mus musculus
  siRNA target sequence for Maoa (NM_173740.1,797-815).
gagcactatgagtgcaaat

SEQ ID NO: 612471 - DNA, 19 bp, Mus musculus
  siRNA target sequence for Maoa (NM_173740.1,808-826).
gtgcaaatatgtaattagt

SEQ ID NO: 612472 - DNA, 19 bp, Mus musculus
  siRNA target sequence for Maoa (NM_173740.1,827-845).
gccatcccaccggttttga

SEQ ID NO: 612473 - DNA, 19 bp, Mus musculus
  siRNA target sequence for Maoa (NM_173740.1,829-847).
catcccaccggttttgact

SEQ ID NO: 612474 - DNA, 19 bp, Mus musculus
  siRNA target sequence for Maoa (NM_173740.1,846-864).
ctgccaagatccactttaa

SEQ ID NO: 612475 - DNA, 19 bp, Mus musculus
  siRNA target sequence for Maoa (NM_173740.1,850-868).
caagatccactttaaacca

SEQ ID NO: 612476 - DNA, 19 bp, Mus musculus
  siRNA target sequence for Maoa (NM_173740.1,875-893).
ccacctgagagaaaccaat

SEQ ID NO: 612477 - DNA, 19 bp, Mus musculus
  siRNA target sequence for Maoa (NM_173740.1,909-927).
caatgggggctgtcatcaa

SEQ ID NO: 612478 - DNA, 19 bp, Mus musculus
  siRNA target sequence for Maoa (NM_173740.1,958-976).
gaagaaaaaggactattgt

SEQ ID NO: 612479 - DNA, 19 bp, Mus musculus
  siRNA target sequence for Maoa (NM_173740.1,970-988).
ctattgtggctgcatgata

SEQ ID NO: 612480 - DNA, 19 bp, Mus musculus
  siRNA target sequence for Maoa (NM_173740.1,978-996).
gctgcatgataattgaaga

SEQ ID NO: 612481 - DNA, 19 bp, Mus musculus
  siRNA target sequence for Maoa (NM_173740.1,979-997).
ctgcatgataattgaagat

SEQ ID NO: 612482 - DNA, 19 bp, Mus musculus
  siRNA target sequence for Maoa (NM_173740.1,998-1016).
gaggaggctccaatttcaa

SEQ ID NO: 612483 - DNA, 19 bp, Mus musculus
  siRNA target sequence for Maoa (NM_173740.1,1001-1019).
gaggctccaatttcaatca

SEQ ID NO: 612484 - DNA, 19 bp, Mus musculus
  siRNA target sequence for Maoa (NM_173740.1,1003-1021).
ggctccaatttcaatcact

SEQ ID NO: 612485 - DNA, 19 bp, Mus musculus
  siRNA target sequence for Maoa (NM_173740.1,1086-1104).
ctgaacgacttgctaaact

SEQ ID NO: 612486 - DNA, 19 bp, Mus musculus
  siRNA target sequence for Maoa (NM_173740.1,1157-1175).
ggatctcaagaagctttat

SEQ ID NO: 612487 - DNA, 19 bp, Mus musculus
  siRNA target sequence for Maoa (NM_173740.1,1289-1307).
ccagtaggcaggatttact

SEQ ID NO: 612488 - DNA, 19 bp, Mus musculus
  siRNA target sequence for Maoa (NM_173740.1,1290-1308).
cagtaggcaggatttactt

SEQ ID NO: 612489 - DNA, 19 bp, Mus musculus
  siRNA target sequence for Maoa (NM_173740.1,1409-1427).
gttgccaagaaggatatat

SEQ ID NO: 612490 - DNA, 19 bp, Mus musculus
  siRNA target sequence for Maob (NM_172778.1,95-113).
gcaacaaaagcgatgtgat

SEQ ID NO: 612491 - DNA, 19 bp, Mus musculus
  siRNA target sequence for Maob (NM_172778.1,148-166).
gccaaacttctgcatgatt

SEQ ID NO: 612492 - DNA, 19 bp, Mus musculus
  siRNA target sequence for Maob (NM_172778.1,211-229).
ggcaggacttacacaatta

SEQ ID NO: 612493 - DNA, 19 bp, Mus musculus
  siRNA target sequence for Maob (NM_172778.1,215-233).
ggacttacacaattaggaa

SEQ ID NO: 612494 - DNA, 19 bp, Mus musculus
  siRNA target sequence for Maob (NM_172778.1,216-234).
gacttacacaattaggaat

SEQ ID NO: 612495 - DNA, 19 bp, Mus musculus
  siRNA target sequence for Maob (NM_172778.1,224-242).
caattaggaataaaaacgt

SEQ ID NO: 612496 - DNA, 19 bp, Mus musculus
  siRNA target sequence for Maob (NM_172778.1,274-292).
gggccaacccagaatcgta

SEQ ID NO: 612497 - DNA, 19 bp, Mus musculus
  siRNA target sequence for Maob (NM_172778.1,275-293).
ggccaacccagaatcgtat

SEQ ID NO: 612498 - DNA, 19 bp, Mus musculus
  siRNA target sequence for Maob (NM_172778.1,278-296).
caacccagaatcgtatctt

SEQ ID NO: 612499 - DNA, 19 bp, Mus musculus
  siRNA target sequence for Maob (NM_172778.1,283-301).
cagaatcgtatcttacgat

SEQ ID NO: 612500 - DNA, 19 bp, Mus musculus
  siRNA target sequence for Maob (NM_172778.1,313-331).
ctaggattggagacctata

SEQ ID NO: 612501 - DNA, 19 bp, Mus musculus
  siRNA target sequence for Maob (NM_172778.1,317-335).
gattggagacctataaagt

SEQ ID NO: 612502 - DNA, 19 bp, Mus musculus
  siRNA target sequence for Maob (NM_172778.1,326-344).
cctataaagttaatgaagt

SEQ ID NO: 612503 - DNA, 19 bp, Mus musculus
  siRNA target sequence for Maob (NM_172778.1,343-361).
gttgagcggctgatacact

SEQ ID NO: 612504 - DNA, 19 bp, Mus musculus
  siRNA target sequence for Maob (NM_172778.1,348-366).
gcggctgatacactttgta

SEQ ID NO: 612505 - DNA, 19 bp, Mus musculus
  siRNA target sequence for Maob (NM_172778.1,349-367).
cggctgatacactttgtaa

SEQ ID NO: 612506 - DNA, 19 bp, Mus musculus
  siRNA target sequence for Maob (NM_172778.1,401-419).
caccagtatggaatcctat

SEQ ID NO: 612507 - DNA, 19 bp, Mus musculus
  siRNA target sequence for Maob (NM_172778.1,415-433).
cctatcacctacctagata

SEQ ID NO: 612508 - DNA, 19 bp, Mus musculus
  siRNA target sequence for Maob (NM_172778.1,416-434).
ctatcacctacctagataa

SEQ ID NO: 612509 - DNA, 19 bp, Mus musculus
  siRNA target sequence for Maob (NM_172778.1,422-440).
cctacctagataataacaa

SEQ ID NO: 612510 - DNA, 19 bp, Mus musculus
  siRNA target sequence for Maob (NM_172778.1,509-527).
ctgaagagtgggactacat

SEQ ID NO: 612511 - DNA, 19 bp, Mus musculus
  siRNA target sequence for Maob (NM_172778.1,514-532).
gagtgggactacatgacaa

SEQ ID NO: 612512 - DNA, 19 bp, Mus musculus
  siRNA target sequence for Maob (NM_172778.1,538-556).
gaattgctagataagatct

SEQ ID NO: 612513 - DNA, 19 bp, Mus musculus
  siRNA target sequence for Maob (NM_172778.1,670-688).
ggtacaaccagaatcatct

SEQ ID NO: 612514 - DNA, 19 bp, Mus musculus
  siRNA target sequence for Maob (NM_172778.1,743-761).
gtgaacggataaaggatat

SEQ ID NO: 612515 - DNA, 19 bp, Mus musculus
  siRNA target sequence for Maob (NM_172778.1,808-826).
cagacaggggaaaatgtta

SEQ ID NO: 612516 - DNA, 19 bp, Mus musculus
  siRNA target sequence for Maob (NM_172778.1,836-854).
ccctaaaccatgaaatata

SEQ ID NO: 612517 - DNA, 19 bp, Mus musculus
  siRNA target sequence for Maob (NM_172778.1,837-855).
cctaaaccatgaaatatat

SEQ ID NO: 612518 - DNA, 19 bp, Mus musculus
  siRNA target sequence for Maob (NM_172778.1,858-876).
ggctaaatatgtgattagt

SEQ ID NO: 612519 - DNA, 19 bp, Mus musculus
  siRNA target sequence for Maob (NM_172778.1,894-912).
gggcatgaagattcactat

SEQ ID NO: 612520 - DNA, 19 bp, Mus musculus
  siRNA target sequence for Maob (NM_172778.1,895-913).
ggcatgaagattcactata

SEQ ID NO: 612521 - DNA, 19 bp, Mus musculus
  siRNA target sequence for Maob (NM_172778.1,1025-1043).
gtggaaccatggttatcga

SEQ ID NO: 612522 - DNA, 19 bp, Mus musculus
  siRNA target sequence for Maob (NM_172778.1,1054-1072).
gctccaattgcatacacat

SEQ ID NO: 612523 - DNA, 19 bp, Mus musculus
  siRNA target sequence for Maob (NM_172778.1,1055-1073).
ctccaattgcatacacatt

SEQ ID NO: 612524 - DNA, 19 bp, Mus musculus
  siRNA target sequence for Maob (NM_172778.1,1106-1124).
ctataatgggatttatcct

SEQ ID NO: 612525 - DNA, 19 bp, Mus musculus
  siRNA target sequence for Maob (NM_172778.1,1146-1164).
ggtacgtctcaccaaagaa

SEQ ID NO: 612526 - DNA, 19 bp, Mus musculus
  siRNA target sequence for Maob (NM_172778.1,1175-1193).
ggaaactttgtgagctata

SEQ ID NO: 612527 - DNA, 19 bp, Mus musculus
  siRNA target sequence for Maob (NM_172778.1,1176-1194).
gaaactttgtgagctatat

SEQ ID NO: 612528 - DNA, 19 bp, Mus musculus
  siRNA target sequence for Maob (NM_172778.1,1180-1198).
ctttgtgagctatatgcaa

SEQ ID NO: 612529 - DNA, 19 bp, Mus musculus
  siRNA target sequence for Maob (NM_172778.1,1220-1238).
ctctgcagcccgtccatta

SEQ ID NO: 612530 - DNA, 19 bp, Mus musculus
  siRNA target sequence for Maob (NM_172778.1,1254-1272).
gtgtgaggaacagtattct

SEQ ID NO: 612531 - DNA, 19 bp, Mus musculus
  siRNA target sequence for Maob (NM_172778.1,1553-1571).
ctgtaccaggcctgctaaa

SEQ ID NO: 612532 - DNA, 19 bp, Mus musculus
  siRNA target sequence for Maob (NM_172778.1,1579-1597).
ggattgaccaccatcttgt

SEQ ID NO: 612533 - DNA, 19 bp, Mus musculus
  siRNA target sequence for Maob (NM_172778.1,1626-1644).
caaaaggggcctgtttgta

SEQ ID NO: 612534 - DNA, 19 bp, Mus musculus
  siRNA target sequence for 5730402C02Rik (NM_027442.3,180-198).
ctgataccaccagtaatgt

SEQ ID NO: 612535 - DNA, 19 bp, Mus musculus
  siRNA target sequence for 5730402C02Rik (NM_027442.3,197-215).
gtagcggctgggatgctta

SEQ ID NO: 612536 - DNA, 19 bp, Mus musculus
  siRNA target sequence for 5730402C02Rik (NM_027442.3,247-265).
cacacagaagcgatggttt

SEQ ID NO: 612537 - DNA, 19 bp, Mus musculus
  siRNA target sequence for 5730402C02Rik (NM_027442.3,269-287).
gagaccttcgagcatcttt

SEQ ID NO: 612538 - DNA, 19 bp, Mus musculus
  siRNA target sequence for 5730402C02Rik (NM_027442.3,358-376).
cagcgtccccgctgaagaa

SEQ ID NO: 612539 - DNA, 19 bp, Mus musculus
  siRNA target sequence for 5730402C02Rik (NM_027442.3,433-451).
gaagcggttccctcagtat

SEQ ID NO: 612540 - DNA, 19 bp, Mus musculus
  siRNA target sequence for 5730402C02Rik (NM_027442.3,437-455).
cggttccctcagtatgtgt

SEQ ID NO: 612541 - DNA, 19 bp, Mus musculus
  siRNA target sequence for 5730402C02Rik (NM_027442.3,454-472).
gtttggccaggcttttaca

SEQ ID NO: 612542 - DNA, 19 bp, Mus musculus
  siRNA target sequence for 5730402C02Rik (NM_027442.3,590-608).
gatatcgtggtcaattgct

SEQ ID NO: 612543 - DNA, 19 bp, Mus musculus
  siRNA target sequence for 5730402C02Rik (NM_027442.3,632-650).
gtaggtgaccccatgattt

SEQ ID NO: 612544 - DNA, 19 bp, Mus musculus
  siRNA target sequence for 5730402C02Rik (NM_027442.3,686-704).
ccctgggtgaagcatttca

SEQ ID NO: 612545 - DNA, 19 bp, Mus musculus
  siRNA target sequence for 5730402C02Rik (NM_027442.3,687-705).
cctgggtgaagcatttcat

SEQ ID NO: 612546 - DNA, 19 bp, Mus musculus
  siRNA target sequence for 5730402C02Rik (NM_027442.3,857-875).
cacagagcctacgacataa

SEQ ID NO: 612547 - DNA, 19 bp, Mus musculus
  siRNA target sequence for 5730402C02Rik (NM_027442.3,859-877).
cagagcctacgacataaaa

SEQ ID NO: 612548 - DNA, 19 bp, Mus musculus
  siRNA target sequence for 5730402C02Rik (NM_027442.3,861-879).
gagcctacgacataaaaga

SEQ ID NO: 612549 - DNA, 19 bp, Mus musculus
  siRNA target sequence for 5730402C02Rik (NM_027442.3,863-881).
gcctacgacataaaagaga

SEQ ID NO: 612550 - DNA, 19 bp, Mus musculus
  siRNA target sequence for AI415282 (NM_134021.1,194-212).
gaccaatgcgcaagagtta

SEQ ID NO: 612551 - DNA, 19 bp, Mus musculus
  siRNA target sequence for AI415282 (NM_134021.1,262-280).
cccatgaagcagtttgctt

SEQ ID NO: 612552 - DNA, 19 bp, Mus musculus
  siRNA target sequence for AI415282 (NM_134021.1,403-421).
gacggcttccgcttcttca

SEQ ID NO: 612553 - DNA, 19 bp, Mus musculus
  siRNA target sequence for AI415282 (NM_134021.1,407-425).
gcttccgcttcttcactaa

SEQ ID NO: 612554 - DNA, 19 bp, Mus musculus
  siRNA target sequence for AI415282 (NM_134021.1,469-487).
gcctctcttgtcttctact

SEQ ID NO: 612555 - DNA, 19 bp, Mus musculus
  siRNA target sequence for AI415282 (NM_134021.1,550-568).
gccgagaactacttccatt

SEQ ID NO: 612556 - DNA, 19 bp, Mus musculus
  siRNA target sequence for AI415282 (NM_134021.1,764-782).
gcctccatgaccgtattgt

SEQ ID NO: 612557 - DNA, 19 bp, Mus musculus
  siRNA target sequence for AI415282 (NM_134021.1,766-784).
ctccatgaccgtattgtct

SEQ ID NO: 612558 - DNA, 19 bp, Mus musculus
  siRNA target sequence for Glud (NM_008133.2,610-628).
cgtgagtgtggatgaagta

SEQ ID NO: 612559 - DNA, 19 bp, Mus musculus
  siRNA target sequence for Glud (NM_008133.2,632-650).
gcactggcttccttaatga

SEQ ID NO: 612560 - DNA, 19 bp, Mus musculus
  siRNA target sequence for Glud (NM_008133.2,706-724).
gatcaaccccaagaactat

SEQ ID NO: 612561 - DNA, 19 bp, Mus musculus
  siRNA target sequence for Glud (NM_008133.2,709-727).
caaccccaagaactataca

SEQ ID NO: 612562 - DNA, 19 bp, Mus musculus
  siRNA target sequence for Glud (NM_008133.2,714-732).
ccaagaactatacagataa

SEQ ID NO: 612563 - DNA, 19 bp, Mus musculus
  siRNA target sequence for Glud (NM_008133.2,772-790).
ggccaagaagggttttatt

SEQ ID NO: 612564 - DNA, 19 bp, Mus musculus
  siRNA target sequence for Glud (NM_008133.2,871-889).
caccatagggcactatgat

SEQ ID NO: 612565 - DNA, 19 bp, Mus musculus
  siRNA target sequence for Glud (NM_008133.2,873-891).
ccatagggcactatgatat

SEQ ID NO: 612566 - DNA, 19 bp, Mus musculus
  siRNA target sequence for Glud (NM_008133.2,966-984).
ggggtgtcttccatggaat

SEQ ID NO: 612567 - DNA, 19 bp, Mus musculus
  siRNA target sequence for Glud (NM_008133.2,1004-1022).
gcttcttacatgagcattt

SEQ ID NO: 612568 - DNA, 19 bp, Mus musculus
  siRNA target sequence for Glud (NM_008133.2,1037-1055).
ggctttggcgataagacat

SEQ ID NO: 612569 - DNA, 19 bp, Mus musculus
  siRNA target sequence for Glud (NM_008133.2,1038-1056).
gctttggcgataagacatt

SEQ ID NO: 612570 - DNA, 19 bp, Mus musculus
  siRNA target sequence for Glud (NM_008133.2,1039-1057).
ctttggcgataagacattt

SEQ ID NO: 612571 - DNA, 19 bp, Mus musculus
  siRNA target sequence for Glud (NM_008133.2,1044-1062).
gcgataagacatttgttgt

SEQ ID NO: 612572 - DNA, 19 bp, Mus musculus
  siRNA target sequence for Glud (NM_008133.2,1058-1076).
gttgttcagggatttggta

SEQ ID NO: 612573 - DNA, 19 bp, Mus musculus
  siRNA target sequence for Glud (NM_008133.2,1079-1097).
gtgggcctgcactctatga

SEQ ID NO: 612574 - DNA, 19 bp, Mus musculus
  siRNA target sequence for Glud (NM_008133.2,1081-1099).
gggcctgcactctatgaga

SEQ ID NO: 612575 - DNA, 19 bp, Mus musculus
  siRNA target sequence for Glud (NM_008133.2,1082-1100).
ggcctgcactctatgagat

SEQ ID NO: 612576 - DNA, 19 bp, Mus musculus
  siRNA target sequence for Glud (NM_008133.2,1083-1101).
gcctgcactctatgagata

SEQ ID NO: 612577 - DNA, 19 bp, Mus musculus
  siRNA target sequence for Glud (NM_008133.2,1084-1102).
cctgcactctatgagatat

SEQ ID NO: 612578 - DNA, 19 bp, Mus musculus
  siRNA target sequence for Glud (NM_008133.2,1085-1103).
ctgcactctatgagatatt

SEQ ID NO: 612579 - DNA, 19 bp, Mus musculus
  siRNA target sequence for Glud (NM_008133.2,1087-1105).
gcactctatgagatattta

SEQ ID NO: 612580 - DNA, 19 bp, Mus musculus
  siRNA target sequence for Glud (NM_008133.2,1106-1124).
catcgttttggtgctaaat

SEQ ID NO: 612581 - DNA, 19 bp, Mus musculus
  siRNA target sequence for Glud (NM_008133.2,1711-1729).
gcgcacagccatgaagtat

SEQ ID NO: 612582 - DNA, 19 bp, Mus musculus
  siRNA target sequence for Glud (NM_008133.2,1712-1730).
cgcacagccatgaagtata

SEQ ID NO: 612583 - DNA, 19 bp, Mus musculus
  siRNA target sequence for 1110058B13Rik (NM_025412.1,187-205).
caggcaaagtagaagctaa

SEQ ID NO: 612584 - DNA, 19 bp, Mus musculus
  siRNA target sequence for 1110058B13Rik (NM_025412.1,220-238).
gtgcaccaacggacaacaa

SEQ ID NO: 612585 - DNA, 19 bp, Mus musculus
  siRNA target sequence for 1110058B13Rik (NM_025412.1,594-612).
cccgagtcctacgtagata

SEQ ID NO: 612586 - DNA, 19 bp, Mus musculus
  siRNA target sequence for 1110058B13Rik (NM_025412.1,595-613).
ccgagtcctacgtagatat

SEQ ID NO: 612587 - DNA, 19 bp, Mus musculus
  siRNA target sequence for P5cr2 (NM_133705.1,696-714).
ggcctgcctatgcattcat

SEQ ID NO: 612588 - DNA, 19 bp, Mus musculus
  siRNA target sequence for Pycr1 (NM_144795.1,216-234).
ctcggccctccggaagata

SEQ ID NO: 612589 - DNA, 19 bp, Mus musculus
  siRNA target sequence for Pycr1 (NM_144795.1,389-407).
ccatcaactccatcgaaaa

SEQ ID NO: 612590 - DNA, 19 bp, Mus musculus
  siRNA target sequence for Pycr1 (NM_144795.1,434-452).
ccaaagtcatccgatgtat

SEQ ID NO: 612591 - DNA, 19 bp, Mus musculus
  siRNA target sequence for Pycr1 (NM_144795.1,439-457).
gtcatccgatgtatgacta

SEQ ID NO: 612592 - DNA, 19 bp, Mus musculus
  siRNA target sequence for Pycr1 (NM_144795.1,654-672).
ggctgacggtggtgtgaaa

SEQ ID NO: 612593 - DNA, 19 bp, Mus musculus
  siRNA target sequence for Pycr1 (NM_144795.1,656-674).
ctgacggtggtgtgaaaat

SEQ ID NO: 612594 - DNA, 19 bp, Mus musculus
  siRNA target sequence for A930035F14Rik (NM_175438.3,342-360).
ggtgtggacctccgatata

SEQ ID NO: 612595 - DNA, 19 bp, Mus musculus
  siRNA target sequence for A930035F14Rik (NM_175438.3,347-365).
ggacctccgatatacagta

SEQ ID NO: 612596 - DNA, 19 bp, Mus musculus
  siRNA target sequence for A930035F14Rik (NM_175438.3,369-387).
gttgtcgccctttaaccat

SEQ ID NO: 612597 - DNA, 19 bp, Mus musculus
  siRNA target sequence for A930035F14Rik (NM_175438.3,893-911).
ccaacataatccagtttgt

SEQ ID NO: 612598 - DNA, 19 bp, Mus musculus
  siRNA target sequence for A930035F14Rik (NM_175438.3,957-975).
gcacctttgtggcatcaat

SEQ ID NO: 612599 - DNA, 19 bp, Mus musculus
  siRNA target sequence for A930035F14Rik (NM_175438.3,1072-1090).
ggcgggaagaatttccatt

SEQ ID NO: 612600 - DNA, 19 bp, Mus musculus
  siRNA target sequence for A930035F14Rik (NM_175438.3,1202-1220).
cgctgtggccgcagatcaa

SEQ ID NO: 612601 - DNA, 19 bp, Mus musculus
  siRNA target sequence for A930035F14Rik (NM_175438.3,1273-1291).
gactttgggaccttcttct

SEQ ID NO: 612602 - DNA, 19 bp, Mus musculus
  siRNA target sequence for A930035F14Rik (NM_175438.3,1284-1302).
cttcttctccgcagtgatt

SEQ ID NO: 612603 - DNA, 19 bp, Mus musculus
  siRNA target sequence for A930035F14Rik (NM_175438.3,1287-1305).
cttctccgcagtgattgat

SEQ ID NO: 612604 - DNA, 19 bp, Mus musculus
  siRNA target sequence for A930035F14Rik (NM_175438.3,1312-1330).
gcctttgctcgcattaaga

SEQ ID NO: 612605 - DNA, 19 bp, Mus musculus
  siRNA target sequence for A930035F14Rik (NM_175438.3,1568-1586).
cagtgttcgcccaggataa

SEQ ID NO: 612606 - DNA, 19 bp, Mus musculus
  siRNA target sequence for A930035F14Rik (NM_175438.3,1624-1642).
gctgctggcaacttctaca

SEQ ID NO: 612607 - DNA, 19 bp, Mus musculus
  siRNA target sequence for A930035F14Rik (NM_175438.3,1625-1643).
ctgctggcaacttctacat

SEQ ID NO: 612608 - DNA, 19 bp, Mus musculus
  siRNA target sequence for A930035F14Rik (NM_175438.3,1628-1646).
ctggcaacttctacatcaa

SEQ ID NO: 612609 - DNA, 19 bp, Mus musculus
  siRNA target sequence for A930035F14Rik (NM_175438.3,1751-1769).
catcaccccaggtcatcaa

SEQ ID NO: 612610 - DNA, 19 bp, Mus musculus
  siRNA target sequence for Mthfr (NM_010840.2,372-390).
cccctcttcgtagatgtta

SEQ ID NO: 612611 - DNA, 19 bp, Mus musculus
  siRNA target sequence for Mthfr (NM_010840.2,659-677).
gaccgagtttgctgactat

SEQ ID NO: 612612 - DNA, 19 bp, Mus musculus
  siRNA target sequence for Mthfr (NM_010840.2,661-679).
ccgagtttgctgactattt

SEQ ID NO: 612613 - DNA, 19 bp, Mus musculus
  siRNA target sequence for Mthfr (NM_010840.2,732-750).
gaggatgacctgaagcatt

SEQ ID NO: 612614 - DNA, 19 bp, Mus musculus
  siRNA target sequence for Mthfr (NM_010840.2,882-900).
cctattcagggctacactt

SEQ ID NO: 612615 - DNA, 19 bp, Mus musculus
  siRNA target sequence for Mthfr (NM_010840.2,902-920).
ccttcggcagcttgtaaaa

SEQ ID NO: 612616 - DNA, 19 bp, Mus musculus
  siRNA target sequence for Mthfr (NM_010840.2,933-951).
gaggtgccacagaagatca

SEQ ID NO: 612617 - DNA, 19 bp, Mus musculus
  siRNA target sequence for Mthfr (NM_010840.2,944-962).
gaagatcaaggatgtaatt

SEQ ID NO: 612618 - DNA, 19 bp, Mus musculus
  siRNA target sequence for Mthfr (NM_010840.2,1055-1073).
gccaggcctccacttctat

SEQ ID NO: 612619 - DNA, 19 bp, Mus musculus
  siRNA target sequence for Mthfr (NM_010840.2,1056-1074).
ccaggcctccacttctata

SEQ ID NO: 612620 - DNA, 19 bp, Mus musculus
  siRNA target sequence for Mthfr (NM_010840.2,1219-1237).
gaccaaagagctacatcta

SEQ ID NO: 612621 - DNA, 19 bp, Mus musculus
  siRNA target sequence for Mthfr (NM_010840.2,1248-1266).
gactgggatgagtttccta

SEQ ID NO: 612622 - DNA, 19 bp, Mus musculus
  siRNA target sequence for Mthfr (NM_010840.2,1390-1408).
gcgaagagagtgtctttga

SEQ ID NO: 612623 - DNA, 19 bp, Mus musculus
  siRNA target sequence for Mthfr (NM_010840.2,1568-1586).
caacatcaacgcaaaacca

SEQ ID NO: 612624 - DNA, 19 bp, Mus musculus
  siRNA target sequence for Mthfr (NM_010840.2,1641-1659).
gcctacctcgaattcttca

SEQ ID NO: 612625 - DNA, 19 bp, Mus musculus
  siRNA target sequence for Mthfr (NM_010840.2,1918-1936).
cgccatcccgcatgatcat

SEQ ID NO: 612626 - DNA, 19 bp, Mus musculus
  siRNA target sequence for Mthfr (NM_010840.2,1924-1942).
cccgcatgatcatccaata

SEQ ID NO: 612627 - DNA, 19 bp, Mus musculus
  siRNA target sequence for Mthfr (NM_010840.2,1927-1945).
gcatgatcatccaatacat

SEQ ID NO: 612628 - DNA, 19 bp, Mus musculus
  siRNA target sequence for Dhfr (NM_010049.2,134-152).
cgtcgccgtgtcccaaaat

SEQ ID NO: 612629 - DNA, 19 bp, Mus musculus
  siRNA target sequence for Dhfr (NM_010049.2,135-153).
gtcgccgtgtcccaaaata

SEQ ID NO: 612630 - DNA, 19 bp, Mus musculus
  siRNA target sequence for Dhfr (NM_010049.2,190-208).
cgctcaggaacgagttcaa

SEQ ID NO: 612631 - DNA, 19 bp, Mus musculus
  siRNA target sequence for Dhfr (NM_010049.2,192-210).
ctcaggaacgagttcaagt

SEQ ID NO: 612632 - DNA, 19 bp, Mus musculus
  siRNA target sequence for Dhfr (NM_010049.2,196-214).
ggaacgagttcaagtactt

SEQ ID NO: 612633 - DNA, 19 bp, Mus musculus
  siRNA target sequence for Dhfr (NM_010049.2,201-219).
gagttcaagtacttccaaa

SEQ ID NO: 612634 - DNA, 19 bp, Mus musculus
  siRNA target sequence for Dhfr (NM_010049.2,235-253).
cttcagtggaaggtaaaca

SEQ ID NO: 612635 - DNA, 19 bp, Mus musculus
  siRNA target sequence for Dhfr (NM_010049.2,261-279).
gtgattatgggtaggaaaa

SEQ ID NO: 612636 - DNA, 19 bp, Mus musculus
  siRNA target sequence for Dhfr (NM_010049.2,297-315).
gagaagaatcgacctttaa

SEQ ID NO: 612637 - DNA, 19 bp, Mus musculus
  siRNA target sequence for Dhfr (NM_010049.2,372-390).
cattttcttgccaaaagtt

SEQ ID NO: 612638 - DNA, 19 bp, Mus musculus
  siRNA target sequence for Dhfr (NM_010049.2,421-439).
cggaattggcaagtaaagt

SEQ ID NO: 612639 - DNA, 19 bp, Mus musculus
  siRNA target sequence for Dhfr (NM_010049.2,501-519).
cacctcagactctttgtga

SEQ ID NO: 612640 - DNA, 19 bp, Mus musculus
  siRNA target sequence for Dhfr (NM_010049.2,527-545).
catgcaggaatttgaaagt

SEQ ID NO: 612641 - DNA, 19 bp, Mus musculus
  siRNA target sequence for Dhfr (NM_010049.2,550-568).
cgtttttcccagaaattga

SEQ ID NO: 612642 - DNA, 19 bp, Mus musculus
  siRNA target sequence for Dhfr (NM_010049.2,624-642).
gaggaaaaaggcatcaagt

SEQ ID NO: 612643 - DNA, 19 bp, Mus musculus
  siRNA target sequence for Dhfr (NM_010049.2,654-672).
gtctacgagaagaaagact

SEQ ID NO: 612644 - DNA, 19 bp, Mus musculus
  siRNA target sequence for Paox (NM_153783.2,440-458).
cccgagaattcctgaatga

SEQ ID NO: 612645 - DNA, 19 bp, Mus musculus
  siRNA target sequence for Paox (NM_153783.2,441-459).
ccgagaattcctgaatgaa

SEQ ID NO: 612646 - DNA, 19 bp, Mus musculus
  siRNA target sequence for Paox (NM_153783.2,442-460).
cgagaattcctgaatgaat

SEQ ID NO: 612647 - DNA, 19 bp, Mus musculus
  siRNA target sequence for Paox (NM_153783.2,492-510).
cctgaagaaggagataagt

SEQ ID NO: 612648 - DNA, 19 bp, Mus musculus
  siRNA target sequence for Paox (NM_153783.2,561-579).
gctggctatcctgaatact

SEQ ID NO: 612649 - DNA, 19 bp, Mus musculus
  siRNA target sequence for Paox (NM_153783.2,562-580).
ctggctatcctgaatactt

SEQ ID NO: 612650 - DNA, 19 bp, Mus musculus
  siRNA target sequence for Paox (NM_153783.2,565-583).
gctatcctgaatactttct

SEQ ID NO: 612651 - DNA, 19 bp, Mus musculus
  siRNA target sequence for Paox (NM_153783.2,1104-1122).
caagaagctcattggattt

SEQ ID NO: 612652 - DNA, 19 bp, Mus musculus
  siRNA target sequence for Paox (NM_153783.2,1174-1192).
gggctggagtcggagttta

SEQ ID NO: 612653 - DNA, 19 bp, Mus musculus
  siRNA target sequence for Paox (NM_153783.2,1213-1231).
gaagtgcttctgtctctaa

SEQ ID NO: 612654 - DNA, 19 bp, Mus musculus
  siRNA target sequence for Paox (NM_153783.2,1355-1373).
ctggcgatgacctagatct

SEQ ID NO: 612655 - DNA, 19 bp, Mus musculus
  siRNA target sequence for Paox (NM_153783.2,1438-1456).
gccacacatcggacatttt

SEQ ID NO: 612656 - DNA, 19 bp, Mus musculus
  siRNA target sequence for Paox (NM_153783.2,1439-1457).
ccacacatcggacatttta

SEQ ID NO: 612657 - DNA, 19 bp, Mus musculus
  siRNA target sequence for Paox (NM_153783.2,1440-1458).
cacacatcggacattttat

SEQ ID NO: 612658 - DNA, 19 bp, Mus musculus
  siRNA target sequence for Smox (NM_145533.1,368-386).
gatcccacgggaatcctat

SEQ ID NO: 612659 - DNA, 19 bp, Mus musculus
  siRNA target sequence for Smox (NM_145533.1,371-389).
cccacgggaatcctatcta

SEQ ID NO: 612660 - DNA, 19 bp, Mus musculus
  siRNA target sequence for Smox (NM_145533.1,372-390).
ccacgggaatcctatctat

SEQ ID NO: 612661 - DNA, 19 bp, Mus musculus
  siRNA target sequence for Smox (NM_145533.1,375-393).
cgggaatcctatctatcaa

SEQ ID NO: 612662 - DNA, 19 bp, Mus musculus
  siRNA target sequence for Smox (NM_145533.1,377-395).
ggaatcctatctatcaact

SEQ ID NO: 612663 - DNA, 19 bp, Mus musculus
  siRNA target sequence for Smox (NM_145533.1,378-396).
gaatcctatctatcaacta

SEQ ID NO: 612664 - DNA, 19 bp, Mus musculus
  siRNA target sequence for Smox (NM_145533.1,475-493).
ggcgtggcctgctacctta

SEQ ID NO: 612665 - DNA, 19 bp, Mus musculus
  siRNA target sequence for Smox (NM_145533.1,529-547).
gaggaattcagcgatttat

SEQ ID NO: 612666 - DNA, 19 bp, Mus musculus
  siRNA target sequence for Smox (NM_145533.1,532-550).
gaattcagcgatttataca

SEQ ID NO: 612667 - DNA, 19 bp, Mus musculus
  siRNA target sequence for Smox (NM_145533.1,576-594).
gttcttccggcatggtaaa

SEQ ID NO: 612668 - DNA, 19 bp, Mus musculus
  siRNA target sequence for Smox (NM_145533.1,579-597).
cttccggcatggtaaacca

SEQ ID NO: 612669 - DNA, 19 bp, Mus musculus
  siRNA target sequence for Smox (NM_145533.1,585-603).
gcatggtaaaccagtcaat

SEQ ID NO: 612670 - DNA, 19 bp, Mus musculus
  siRNA target sequence for Smox (NM_145533.1,749-767).
gctcccacagcatagatga

SEQ ID NO: 612671 - DNA, 19 bp, Mus musculus
  siRNA target sequence for Smox (NM_145533.1,866-884).
gcattcctccacatgtcat

SEQ ID NO: 612672 - DNA, 19 bp, Mus musculus
  siRNA target sequence for Smox (NM_145533.1,965-983).
gtgagggtgatcacaatca

SEQ ID NO: 612673 - DNA, 19 bp, Mus musculus
  siRNA target sequence for Smox (NM_145533.1,1192-1210).
caccgcctgggcattggta

SEQ ID NO: 612674 - DNA, 19 bp, Mus musculus
  siRNA target sequence for Smox (NM_145533.1,1485-1503).
cacagggaaccccaatata

SEQ ID NO: 612675 - DNA, 19 bp, Mus musculus
  siRNA target sequence for Smox (NM_145533.1,1489-1507).
gggaaccccaatataccaa

SEQ ID NO: 612676 - DNA, 19 bp, Mus musculus
  siRNA target sequence for Smox (NM_145533.1,1490-1508).
ggaaccccaatataccaaa

SEQ ID NO: 612677 - DNA, 19 bp, Mus musculus
  siRNA target sequence for Smox (NM_145533.1,1491-1509).
gaaccccaatataccaaaa

SEQ ID NO: 612678 - DNA, 19 bp, Mus musculus
  siRNA target sequence for Smox (NM_145533.1,1494-1512).
ccccaatataccaaaacct

SEQ ID NO: 612679 - DNA, 19 bp, Mus musculus
  siRNA target sequence for Smox (NM_145533.1,1535-1553).
ggggcagcaacccatactt

SEQ ID NO: 612680 - DNA, 19 bp, Mus musculus
  siRNA target sequence for Smox (NM_145533.1,1679-1697).
ccacacaccgcaagtacta

SEQ ID NO: 612681 - DNA, 19 bp, Mus musculus
  siRNA target sequence for Pipox (NM_008952.1,25-43).
ctgggatgctattgtgatt

SEQ ID NO: 612682 - DNA, 19 bp, Mus musculus
  siRNA target sequence for Pipox (NM_008952.1,155-173).
cagagccgcataatcagaa

SEQ ID NO: 612683 - DNA, 19 bp, Mus musculus
  siRNA target sequence for Pipox (NM_008952.1,177-195).
cttatccagaggacttcta

SEQ ID NO: 612684 - DNA, 19 bp, Mus musculus
  siRNA target sequence for Pipox (NM_008952.1,188-206).
gacttctacacgatgatga

SEQ ID NO: 612685 - DNA, 19 bp, Mus musculus
  siRNA target sequence for Pipox (NM_008952.1,248-266).
gccggaacccagttacaca

SEQ ID NO: 612686 - DNA, 19 bp, Mus musculus
  siRNA target sequence for Pipox (NM_008952.1,345-363).
ggatcgaccatgagtatct

SEQ ID NO: 612687 - DNA, 19 bp, Mus musculus
  siRNA target sequence for Pipox (NM_008952.1,346-364).
gatcgaccatgagtatctt

SEQ ID NO: 612688 - DNA, 19 bp, Mus musculus
  siRNA target sequence for Pipox (NM_008952.1,362-380).
ctttcgtcagtggatttaa

SEQ ID NO: 612689 - DNA, 19 bp, Mus musculus
  siRNA target sequence for Pipox (NM_008952.1,366-384).
cgtcagtggatttaaagca

SEQ ID NO: 612690 - DNA, 19 bp, Mus musculus
  siRNA target sequence for Pipox (NM_008952.1,367-385).
gtcagtggatttaaagcaa

SEQ ID NO: 612691 - DNA, 19 bp, Mus musculus
  siRNA target sequence for Pipox (NM_008952.1,382-400).
gcaacgctttccaaacatt

SEQ ID NO: 612692 - DNA, 19 bp, Mus musculus
  siRNA target sequence for Pipox (NM_008952.1,521-539).
gagaaggtagtggagataa

SEQ ID NO: 612693 - DNA, 19 bp, Mus musculus
  siRNA target sequence for Pipox (NM_008952.1,548-566).
ctacccgtcacagtgaaaa

SEQ ID NO: 612694 - DNA, 19 bp, Mus musculus
  siRNA target sequence for Pipox (NM_008952.1,560-578).
gtgaaaaccaccttgaaga

SEQ ID NO: 612695 - DNA, 19 bp, Mus musculus
  siRNA target sequence for Pipox (NM_008952.1,635-653).
catcctctggggattgagt

SEQ ID NO: 612696 - DNA, 19 bp, Mus musculus
  siRNA target sequence for Pipox (NM_008952.1,875-893).
gacatccaagacgttcaaa

SEQ ID NO: 612697 - DNA, 19 bp, Mus musculus
  siRNA target sequence for Pipox (NM_008952.1,877-895).
catccaagacgttcaaatt

SEQ ID NO: 612698 - DNA, 19 bp, Mus musculus
  siRNA target sequence for Pipox (NM_008952.1,880-898).
ccaagacgttcaaattcta

SEQ ID NO: 612699 - DNA, 19 bp, Mus musculus
  siRNA target sequence for Pipox (NM_008952.1,881-899).
caagacgttcaaattctat

SEQ ID NO: 612700 - DNA, 19 bp, Mus musculus
  siRNA target sequence for Pipox (NM_008952.1,933-951).
gggctgagccagacatcat

SEQ ID NO: 612701 - DNA, 19 bp, Mus musculus
  siRNA target sequence for Pipox (NM_008952.1,956-974).
cgctgcatgtacacgaata

SEQ ID NO: 612702 - DNA, 19 bp, Mus musculus
  siRNA target sequence for Pipox (NM_008952.1,958-976).
ctgcatgtacacgaatact

SEQ ID NO: 612703 - DNA, 19 bp, Mus musculus
  siRNA target sequence for Pipox (NM_008952.1,975-993).
ctcctgatgagcactttat

SEQ ID NO: 612704 - DNA, 19 bp, Mus musculus
  siRNA target sequence for Pipox (NM_008952.1,1006-1024).
cccaaagtatgacaacatt

SEQ ID NO: 612705 - DNA, 19 bp, Mus musculus
  siRNA target sequence for Pipox (NM_008952.1,1027-1045).
catcggcgctggattctct

SEQ ID NO: 612706 - DNA, 19 bp, Mus musculus
  siRNA target sequence for Pipox (NM_008952.1,1087-1105).
ctatgagctaagcatgaaa

SEQ ID NO: 612707 - DNA, 19 bp, Mus musculus
  siRNA target sequence for Pipox (NM_008952.1,1121-1139).
gacttggctccgtttcgaa

SEQ ID NO: 612708 - DNA, 19 bp, Mus musculus
  siRNA target sequence for Pipox (NM_008952.1,1126-1144).
ggctccgtttcgaatgagt

SEQ ID NO: 612709 - DNA, 19 bp, Mus musculus
  siRNA target sequence for Pipox (NM_008952.1,1136-1154).
cgaatgagtcgcttctcta

SEQ ID NO: 612710 - DNA, 19 bp, Mus musculus
  siRNA target sequence for Prodh (NM_011172.1,370-388).
ctctgatccggcacaacaa

SEQ ID NO: 612711 - DNA, 19 bp, Mus musculus
  siRNA target sequence for Prodh (NM_011172.1,467-485).
ggagtcatgcacttctgaa

SEQ ID NO: 612712 - DNA, 19 bp, Mus musculus
  siRNA target sequence for Prodh (NM_011172.1,495-513).
gatggcagtggagcaaata

SEQ ID NO: 612713 - DNA, 19 bp, Mus musculus
  siRNA target sequence for Prodh (NM_011172.1,498-516).
ggcagtggagcaaataaga

SEQ ID NO: 612714 - DNA, 19 bp, Mus musculus
  siRNA target sequence for Prodh (NM_011172.1,751-769).
gacggttcttccatcaaat

SEQ ID NO: 612715 - DNA, 19 bp, Mus musculus
  siRNA target sequence for Prodh (NM_011172.1,860-878).
cgcatccagggctgagatt

SEQ ID NO: 612716 - DNA, 19 bp, Mus musculus
  siRNA target sequence for Prodh (NM_011172.1,1105-1123).
caggtgtgcgcctgatgat

SEQ ID NO: 612717 - DNA, 19 bp, Mus musculus
  siRNA target sequence for Prodh (NM_011172.1,1108-1126).
gtgtgcgcctgatgattga

SEQ ID NO: 612718 - DNA, 19 bp, Mus musculus
  siRNA target sequence for Prodh (NM_011172.1,1175-1193).
gatgcagcgcaggttcaat

SEQ ID NO: 612719 - DNA, 19 bp, Mus musculus
  siRNA target sequence for Prodh (NM_011172.1,1194-1212).
gtggataagccgttcatct

SEQ ID NO: 612720 - DNA, 19 bp, Mus musculus
  siRNA target sequence for Prodh (NM_011172.1,1239-1257).
gatgcctatgacaatgtga

SEQ ID NO: 612721 - DNA, 19 bp, Mus musculus
  siRNA target sequence for Prodh (NM_011172.1,1409-1427).
ccacaggtgccttaactat

SEQ ID NO: 612722 - DNA, 19 bp, Mus musculus
  siRNA target sequence for Prodh (NM_011172.1,1412-1430).
caggtgccttaactatgtt

SEQ ID NO: 612723 - DNA, 19 bp, Mus musculus
  siRNA target sequence for Prodh (NM_011172.1,1414-1432).
ggtgccttaactatgttct

SEQ ID NO: 612724 - DNA, 19 bp, Mus musculus
  siRNA target sequence for Prodh (NM_011172.1,1611-1629).
ggctttcctgtgtacaagt

SEQ ID NO: 612725 - DNA, 19 bp, Mus musculus
  siRNA target sequence for Prodh (NM_011172.1,1612-1630).
gctttcctgtgtacaagta

SEQ ID NO: 612726 - DNA, 19 bp, Mus musculus
  siRNA target sequence for Prodh2 (NM_019546.4,84-102).
gcagcccctgcgctttgat

SEQ ID NO: 612727 - DNA, 19 bp, Mus musculus
  siRNA target sequence for Prodh2 (NM_019546.4,237-255).
gctctcaggcgcacttctt

SEQ ID NO: 612728 - DNA, 19 bp, Mus musculus
  siRNA target sequence for Prodh2 (NM_019546.4,263-281).
ccatctacgggcagtttgt

SEQ ID NO: 612729 - DNA, 19 bp, Mus musculus
  siRNA target sequence for Prodh2 (NM_019546.4,520-538).
gccagcactcggctttgta

SEQ ID NO: 612730 - DNA, 19 bp, Mus musculus
  siRNA target sequence for Prodh2 (NM_019546.4,521-539).
ccagcactcggctttgtaa

SEQ ID NO: 612731 - DNA, 19 bp, Mus musculus
  siRNA target sequence for Prodh2 (NM_019546.4,522-540).
cagcactcggctttgtaaa

SEQ ID NO: 612732 - DNA, 19 bp, Mus musculus
  siRNA target sequence for Prodh2 (NM_019546.4,524-542).
gcactcggctttgtaaaga

SEQ ID NO: 612733 - DNA, 19 bp, Mus musculus
  siRNA target sequence for Prodh2 (NM_019546.4,544-562).
ctgtcggcttggatccaaa

SEQ ID NO: 612734 - DNA, 19 bp, Mus musculus
  siRNA target sequence for Prodh2 (NM_019546.4,733-751).
ctggtagatgctgaatata

SEQ ID NO: 612735 - DNA, 19 bp, Mus musculus
  siRNA target sequence for Prodh2 (NM_019546.4,826-844).
ccgtgggtgtggaacactt

SEQ ID NO: 612736 - DNA, 19 bp, Mus musculus
  siRNA target sequence for Prodh2 (NM_019546.4,827-845).
cgtgggtgtggaacactta

SEQ ID NO: 612737 - DNA, 19 bp, Mus musculus
  siRNA target sequence for Prodh2 (NM_019546.4,842-860).
cttaccaggcctatctaaa

SEQ ID NO: 612738 - DNA, 19 bp, Mus musculus
  siRNA target sequence for Prodh2 (NM_019546.4,993-1011).
ctgtacccagcctgactat

SEQ ID NO: 612739 - DNA, 19 bp, Mus musculus
  siRNA target sequence for Prodh2 (NM_019546.4,1015-1033).
gccactagtcggagttaca

SEQ ID NO: 612740 - DNA, 19 bp, Mus musculus
  siRNA target sequence for Prodh2 (NM_019546.4,1118-1136).
ccgttcgccaggcaactaa

SEQ ID NO: 612741 - DNA, 19 bp, Mus musculus
  siRNA target sequence for Prodh2 (NM_019546.4,1232-1250).
ctggatatatggtgtacaa

SEQ ID NO: 612742 - DNA, 19 bp, Mus musculus
  siRNA target sequence for Prodh2 (NM_019546.4,1234-1252).
ggatatatggtgtacaagt

SEQ ID NO: 612743 - DNA, 19 bp, Mus musculus
  siRNA target sequence for 1500040F11Rik (NM_025352.1,200-218).
gccttcccaagctatttca

SEQ ID NO: 612744 - DNA, 19 bp, Mus musculus
  siRNA target sequence for 1500040F11Rik (NM_025352.1,287-305).
gtggtctacctgatctaca

SEQ ID NO: 612745 - DNA, 19 bp, Mus musculus
  siRNA target sequence for 1500040F11Rik (NM_025352.1,309-327).
ggggcaaccaggagtttga

SEQ ID NO: 612746 - DNA, 19 bp, Mus musculus
  siRNA target sequence for 1500040F11Rik (NM_025352.1,320-338).
gagtttgagcagtcgaaaa

SEQ ID NO: 612747 - DNA, 19 bp, Mus musculus
  siRNA target sequence for 1810037C20Rik (NM_025473.1,480-498).
cgtggccctaatcatcatt

SEQ ID NO: 612748 - DNA, 19 bp, Mus musculus
  siRNA target sequence for 1810037C20Rik (NM_025473.1,481-499).
gtggccctaatcatcatta

SEQ ID NO: 612749 - DNA, 19 bp, Mus musculus
  siRNA target sequence for 1810037C20Rik (NM_025473.1,557-575).
ctcgaattcagcagttctt

SEQ ID NO: 612750 - DNA, 19 bp, Mus musculus
  siRNA target sequence for 1810037C20Rik (NM_025473.1,657-675).
gcacctgagctttcgaata

SEQ ID NO: 612751 - DNA, 19 bp, Mus musculus
  siRNA target sequence for 1810037C20Rik (NM_025473.1,735-753).
gagcagcgtcaaagacaat

SEQ ID NO: 612752 - DNA, 19 bp, Mus musculus
  siRNA target sequence for 1810037C20Rik (NM_025473.1,836-854).
gagatgtcaatgatctctt

SEQ ID NO: 612753 - DNA, 19 bp, Mus musculus
  siRNA target sequence for 1810037C20Rik (NM_025473.1,888-906).
ggtgtttgtggcttcctat

SEQ ID NO: 612754 - DNA, 19 bp, Mus musculus
  siRNA target sequence for 1810037C20Rik (NM_025473.1,891-909).
gtttgtggcttcctatgat

SEQ ID NO: 612755 - DNA, 19 bp, Mus musculus
  siRNA target sequence for 1810037C20Rik (NM_025473.1,1037-1055).
gcccctttgagcagcatat

SEQ ID NO: 612756 - DNA, 19 bp, Mus musculus
  siRNA target sequence for 1810037C20Rik (NM_025473.1,1039-1057).
ccctttgagcagcatatga

SEQ ID NO: 612757 - DNA, 19 bp, Mus musculus
  siRNA target sequence for 2210413P12Rik (NM_145977.1,538-556).
ggctgccggcattacctat

SEQ ID NO: 612758 - DNA, 19 bp, Mus musculus
  siRNA target sequence for 2210413P12Rik (NM_145977.1,731-749).
ctgctaagcctctttctca

SEQ ID NO: 612759 - DNA, 19 bp, Mus musculus
  siRNA target sequence for 2210413P12Rik (NM_145977.1,829-847).
ggggctgctggacttttgt

SEQ ID NO: 612760 - DNA, 19 bp, Mus musculus
  siRNA target sequence for 2210413P12Rik (NM_145977.1,929-947).
gtctacgccttcatgatca

SEQ ID NO: 612761 - DNA, 19 bp, Mus musculus
  siRNA target sequence for 2210413P12Rik (NM_145977.1,1043-1061).
ggcctcctcaccctcattt

SEQ ID NO: 612762 - DNA, 19 bp, Mus musculus
  siRNA target sequence for 2210413P12Rik (NM_145977.1,1249-1267).
caccctacgccgactcttt

SEQ ID NO: 612763 - DNA, 19 bp, Mus musculus
  siRNA target sequence for 2210413P12Rik (NM_145977.1,1251-1269).
ccctacgccgactctttgt

SEQ ID NO: 612764 - DNA, 19 bp, Mus musculus
  siRNA target sequence for 2210413P12Rik (NM_145977.1,1281-1299).
gcagctggatggcacttat

SEQ ID NO: 612765 - DNA, 19 bp, Mus musculus
  siRNA target sequence for 2210413P12Rik (NM_145977.1,1285-1303).
ctggatggcacttatgact

SEQ ID NO: 612766 - DNA, 19 bp, Mus musculus
  siRNA target sequence for 2210413P12Rik (NM_145977.1,1287-1305).
ggatggcacttatgacttt

SEQ ID NO: 612767 - DNA, 19 bp, Mus musculus
  siRNA target sequence for 2210413P12Rik (NM_145977.1,1381-1399).
ccggagacactatgatgaa

SEQ ID NO: 612768 - DNA, 19 bp, Mus musculus
  siRNA target sequence for 2210413P12Rik (NM_145977.1,1489-1507).
cggcacacggtcagtctat

SEQ ID NO: 612769 - DNA, 19 bp, Mus musculus
  siRNA target sequence for 2210413P12Rik (NM_145977.1,1491-1509).
gcacacggtcagtctatct

SEQ ID NO: 612770 - DNA, 19 bp, Mus musculus
  siRNA target sequence for 2210413P12Rik (NM_145977.1,1874-1892).
cctgaggccagggttgtta

SEQ ID NO: 612771 - DNA, 19 bp, Mus musculus
  siRNA target sequence for 2210413P12Rik (NM_145977.1,2034-2052).
gtctggtcgccatttactt

SEQ ID NO: 612772 - DNA, 19 bp, Mus musculus
  siRNA target sequence for 2210413P12Rik (NM_145977.1,2055-2073).
ctacacaggtagtgtttga

SEQ ID NO: 612773 - DNA, 19 bp, Mus musculus
  siRNA target sequence for 2210413P12Rik (NM_145977.1,2058-2076).
cacaggtagtgtttgacaa

SEQ ID NO: 612774 - DNA, 19 bp, Mus musculus
  siRNA target sequence for 2210413P12Rik (NM_145977.1,2080-2098).
cgacttggccaaatactca

SEQ ID NO: 612775 - DNA, 19 bp, Mus musculus
  siRNA target sequence for 2410080H04Rik (NM_172522.1,160-178).
cggtgggcctccttgtctt

SEQ ID NO: 612776 - DNA, 19 bp, Mus musculus
  siRNA target sequence for 2410080H04Rik (NM_172522.1,336-354).
cggcaccggatcagctata

SEQ ID NO: 612777 - DNA, 19 bp, Mus musculus
  siRNA target sequence for 2410080H04Rik (NM_172522.1,339-357).
caccggatcagctataaga

SEQ ID NO: 612778 - DNA, 19 bp, Mus musculus
  siRNA target sequence for 2410080H04Rik (NM_172522.1,677-695).
ctacacaggcgtttactgt

SEQ ID NO: 612779 - DNA, 19 bp, Mus musculus
  siRNA target sequence for 2410080H04Rik (NM_172522.1,957-975).
gaagaatgtccctttggaa

SEQ ID NO: 612780 - DNA, 19 bp, Mus musculus
  siRNA target sequence for 2410080H04Rik (NM_172522.1,1141-1159).
gtgacaccgagaacactat

SEQ ID NO: 612781 - DNA, 19 bp, Mus musculus
  siRNA target sequence for 2410080H04Rik (NM_172522.1,1143-1161).
gacaccgagaacactatca

SEQ ID NO: 612782 - DNA, 19 bp, Mus musculus
  siRNA target sequence for 2410080H04Rik (NM_172522.1,1285-1303).
gtgctgactgccacagtat

SEQ ID NO: 612783 - DNA, 19 bp, Mus musculus
  siRNA target sequence for 2410080H04Rik (NM_172522.1,1287-1305).
gctgactgccacagtatca

SEQ ID NO: 612784 - DNA, 19 bp, Mus musculus
  siRNA target sequence for 2410080H04Rik (NM_172522.1,1847-1865).
ctttcgaggacccttatgt

SEQ ID NO: 612785 - DNA, 19 bp, Mus musculus
  siRNA target sequence for 2410080H04Rik (NM_172522.1,1949-1967).
ccacatcagtggtatctgt

SEQ ID NO: 612786 - DNA, 19 bp, Mus musculus
  siRNA target sequence for 2410080H04Rik (NM_172522.1,2271-2289).
gcccctggaacctttggat

SEQ ID NO: 612787 - DNA, 19 bp, Mus musculus
  siRNA target sequence for 2410080H04Rik (NM_172522.1,2482-2500).
gcatcgttctcctgttgtt

SEQ ID NO: 612788 - DNA, 19 bp, Mus musculus
  siRNA target sequence for 2410080H04Rik (NM_172522.1,2625-2643).
ctctcagatttgtctcaaa

SEQ ID NO: 612789 - DNA, 19 bp, Mus musculus
  siRNA target sequence for 2410080H04Rik (NM_172522.1,2740-2758).
gccccaccaagctcagtaa

SEQ ID NO: 612790 - DNA, 19 bp, Mus musculus
  siRNA target sequence for 2410080H04Rik (NM_172522.1,2791-2809).
ccccctacagctatgtgaa

SEQ ID NO: 612791 - DNA, 19 bp, Mus musculus
  siRNA target sequence for 2410080H04Rik (NM_172522.1,2800-2818).
gctatgtgaacgtgttaga

SEQ ID NO: 612792 - DNA, 19 bp, Mus musculus
  siRNA target sequence for 2410080H04Rik (NM_172522.1,2934-2952).
gacagacgtcagaacacat

SEQ ID NO: 612793 - DNA, 19 bp, Mus musculus
  siRNA target sequence for 2410080H04Rik (NM_172522.1,2938-2956).
gacgtcagaacacatacat

SEQ ID NO: 612794 - DNA, 19 bp, Mus musculus
  siRNA target sequence for 2410080H04Rik (NM_172522.1,2940-2958).
cgtcagaacacatacatta

SEQ ID NO: 612795 - DNA, 19 bp, Mus musculus
  siRNA target sequence for 4430402G14Rik (NM_025710.1,300-318).
ccgtttttcccatacagat

SEQ ID NO: 612796 - DNA, 19 bp, Mus musculus
  siRNA target sequence for 4430402G14Rik (NM_025710.1,327-345).
gcccgacttctctgactat

SEQ ID NO: 612797 - DNA, 19 bp, Mus musculus
  siRNA target sequence for 4430402G14Rik (NM_025710.1,342-360).
ctatcgtcgtgctgaagtt

SEQ ID NO: 612798 - DNA, 19 bp, Mus musculus
  siRNA target sequence for 4430402G14Rik (NM_025710.1,349-367).
cgtgctgaagttcttgata

SEQ ID NO: 612799 - DNA, 19 bp, Mus musculus
  siRNA target sequence for 4430402G14Rik (NM_025710.1,358-376).
gttcttgatagcacaaaat

SEQ ID NO: 612800 - DNA, 19 bp, Mus musculus
  siRNA target sequence for 4430402G14Rik (NM_025710.1,361-379).
cttgatagcacaaaatctt

SEQ ID NO: 612801 - DNA, 19 bp, Mus musculus
  siRNA target sequence for 4430402G14Rik (NM_025710.1,418-436).
ctggtaactgcaactacta

SEQ ID NO: 612802 - DNA, 19 bp, Mus musculus
  siRNA target sequence for 4430402G14Rik (NM_025710.1,420-438).
ggtaactgcaactactact

SEQ ID NO: 612803 - DNA, 19 bp, Mus musculus
  siRNA target sequence for 4430402G14Rik (NM_025710.1,449-467).
cttatgcggccaaaaatgt

SEQ ID NO: 612804 - DNA, 19 bp, Mus musculus
  siRNA target sequence for 4430402G14Rik (NM_025710.1,521-539).
cgaagatcgagatcaagtt

SEQ ID NO: 612805 - DNA, 19 bp, Mus musculus
  siRNA target sequence for 4430402G14Rik (NM_025710.1,529-547).
gagatcaagttgtctgata

SEQ ID NO: 612806 - DNA, 19 bp, Mus musculus
  siRNA target sequence for 4430402G14Rik (NM_025710.1,592-610).
ctgtttgtgcgccatagaa

SEQ ID NO: 612807 - DNA, 19 bp, Mus musculus
  siRNA target sequence for 4430402G14Rik (NM_025710.1,640-658).
gtcgaagtgtcccagttaa

SEQ ID NO: 612808 - DNA, 19 bp, Mus musculus
  siRNA target sequence for 4430402G14Rik (NM_025710.1,673-691).
gatttagatcgagtaaaga

SEQ ID NO: 612809 - DNA, 19 bp, Mus musculus
  siRNA target sequence for 4430402G14Rik (NM_025710.1,733-751).
ggttgtgtacccattgcaa

SEQ ID NO: 612810 - DNA, 19 bp, Mus musculus
  siRNA target sequence for 4430402G14Rik (NM_025710.1,758-776).
gagattttggtggctatta

SEQ ID NO: 612811 - DNA, 19 bp, Mus musculus
  siRNA target sequence for 4430402G14Rik (NM_025710.1,785-803).
gccatgggtcacactatga

SEQ ID NO: 612812 - DNA, 19 bp, Mus musculus
  siRNA target sequence for 4430402G14Rik (NM_025710.1,861-879).
cgagttcaccagtgatgat

SEQ ID NO: 612813 - DNA, 19 bp, Mus musculus
  siRNA target sequence for 4430402G14Rik (NM_025710.1,867-885).
caccagtgatgatgtagtt

SEQ ID NO: 612814 - DNA, 19 bp, Mus musculus
  siRNA target sequence for Pcyox1 (NM_025823.3,137-155).
cgaacaggatcgcaatagt

SEQ ID NO: 612815 - DNA, 19 bp, Mus musculus
  siRNA target sequence for Pcyox1 (NM_025823.3,173-191).
gtacttcctccgcctatta

SEQ ID NO: 612816 - DNA, 19 bp, Mus musculus
  siRNA target sequence for Pcyox1 (NM_025823.3,182-200).
ccgcctattatctaaggaa

SEQ ID NO: 612817 - DNA, 19 bp, Mus musculus
  siRNA target sequence for Pcyox1 (NM_025823.3,307-325).
gtcattcaccccctaaatt

SEQ ID NO: 612818 - DNA, 19 bp, Mus musculus
  siRNA target sequence for Pcyox1 (NM_025823.3,328-346).
cacatgaagcgatttgtca

SEQ ID NO: 612819 - DNA, 19 bp, Mus musculus
  siRNA target sequence for Pcyox1 (NM_025823.3,393-411).
cgtgtacaatggaaagtct

SEQ ID NO: 612820 - DNA, 19 bp, Mus musculus
  siRNA target sequence for Pcyox1 (NM_025823.3,428-446).
gcagctggtttgtaatcaa

SEQ ID NO: 612821 - DNA, 19 bp, Mus musculus
  siRNA target sequence for Pcyox1 (NM_025823.3,508-526).
gacttgttggacaagttca

SEQ ID NO: 612822 - DNA, 19 bp, Mus musculus
  siRNA target sequence for Pcyox1 (NM_025823.3,539-557).
gttaccagtcccatgacta

SEQ ID NO: 612823 - DNA, 19 bp, Mus musculus
  siRNA target sequence for Pcyox1 (NM_025823.3,559-577).
gcctttagcagtgtagaaa

SEQ ID NO: 612824 - DNA, 19 bp, Mus musculus
  siRNA target sequence for Pcyox1 (NM_025823.3,560-578).
cctttagcagtgtagaaaa

SEQ ID NO: 612825 - DNA, 19 bp, Mus musculus
  siRNA target sequence for Pcyox1 (NM_025823.3,590-608).
ccatcggaggggatgacta

SEQ ID NO: 612826 - DNA, 19 bp, Mus musculus
  siRNA target sequence for Pcyox1 (NM_025823.3,609-627).
cgtcagactgcttaaccaa

SEQ ID NO: 612827 - DNA, 19 bp, Mus musculus
  siRNA target sequence for Pcyox1 (NM_025823.3,614-632).
gactgcttaaccaaactct

SEQ ID NO: 612828 - DNA, 19 bp, Mus musculus
  siRNA target sequence for Pcyox1 (NM_025823.3,668-686).
cgtttctcaacgagatgat

SEQ ID NO: 612829 - DNA, 19 bp, Mus musculus
  siRNA target sequence for Pcyox1 (NM_025823.3,669-687).
gtttctcaacgagatgatt

SEQ ID NO: 612830 - DNA, 19 bp, Mus musculus
  siRNA target sequence for Pcyox1 (NM_025823.3,781-799).
gcagtggaaggtggtaata

SEQ ID NO: 612831 - DNA, 19 bp, Mus musculus
  siRNA target sequence for Pcyox1 (NM_025823.3,782-800).
cagtggaaggtggtaataa

SEQ ID NO: 612832 - DNA, 19 bp, Mus musculus
  siRNA target sequence for Pcyox1 (NM_025823.3,790-808).
ggtggtaataaaattgttt

SEQ ID NO: 612833 - DNA, 19 bp, Mus musculus
  siRNA target sequence for Pcyox1 (NM_025823.3,826-844).
gcctctagcagcaatctta

SEQ ID NO: 612834 - DNA, 19 bp, Mus musculus
  siRNA target sequence for Pcyox1 (NM_025823.3,851-869).
gctccgtaatgtcaataga

SEQ ID NO: 612835 - DNA, 19 bp, Mus musculus
  siRNA target sequence for Pcyox1 (NM_025823.3,895-913).
ggaaaccccaccaagatgt

SEQ ID NO: 612836 - DNA, 19 bp, Mus musculus
  siRNA target sequence for Pcyox1 (NM_025823.3,896-914).
gaaaccccaccaagatgta

SEQ ID NO: 612837 - DNA, 19 bp, Mus musculus
  siRNA target sequence for Pcyox1 (NM_025823.3,909-927).
gatgtatgaagtggtatat

SEQ ID NO: 612838 - DNA, 19 bp, Mus musculus
  siRNA target sequence for Pcyox1 (NM_025823.3,912-930).
gtatgaagtggtatataaa

SEQ ID NO: 612839 - DNA, 19 bp, Mus musculus
  siRNA target sequence for Pcyox1 (NM_025823.3,942-960).
gacccattctgacttctat

SEQ ID NO: 612840 - DNA, 19 bp, Mus musculus
  siRNA target sequence for Pcyox1 (NM_025823.3,993-1011).
gaagatgtccaacataact

SEQ ID NO: 612841 - DNA, 19 bp, Mus musculus
  siRNA target sequence for Pcyox1 (NM_025823.3,1133-1151).
gcctctcggcaattcttgt

SEQ ID NO: 612842 - DNA, 19 bp, Mus musculus
  siRNA target sequence for Pcyox1 (NM_025823.3,1156-1174).
gatgactccgatatgttta

SEQ ID NO: 612843 - DNA, 19 bp, Mus musculus
  siRNA target sequence for Pcyox1 (NM_025823.3,1297-1315).
ctcttcctgtcctatgatt

SEQ ID NO: 612844 - DNA, 19 bp, Mus musculus
  siRNA target sequence for Pcyox1 (NM_025823.3,1299-1317).
cttcctgtcctatgattat

SEQ ID NO: 612845 - DNA, 19 bp, Mus musculus
  siRNA target sequence for Pcyox1 (NM_025823.3,1335-1353).
gctgtcctatcctcactat

SEQ ID NO: 612846 - DNA, 19 bp, Mus musculus
  siRNA target sequence for Pcyox1 (NM_025823.3,1424-1442).
cggccagctgcatggaaat

SEQ ID NO: 612847 - DNA, 19 bp, Mus musculus
  siRNA target sequence for Pcyox1 (NM_025823.3,1496-1514).
gcaatgaggacatgattga

SEQ ID NO: 612848 - DNA, 19 bp, Mus musculus
  siRNA target sequence for Pcyox1 (NM_025823.3,1497-1515).
caatgaggacatgattgat

SEQ ID NO: 612849 - DNA, 19 bp, Mus musculus
  siRNA target sequence for Pcyox1 (NM_025823.3,1516-1534).
caggacgacctgtatgaaa

SEQ ID NO: 612850 - DNA, 19 bp, Mus musculus
  siRNA target sequence for Msra (NM_026322.2,313-331).
cgagccgatccctgtaaca

SEQ ID NO: 612851 - DNA, 19 bp, Mus musculus
  siRNA target sequence for Msra (NM_026322.2,429-447).
gcaagttctgggtcttgaa

SEQ ID NO: 612852 - DNA, 19 bp, Mus musculus
  siRNA target sequence for Msra (NM_026322.2,511-529).
ggtctgctcagaaaaaact

SEQ ID NO: 612853 - DNA, 19 bp, Mus musculus
  siRNA target sequence for Msra (NM_026322.2,631-649).
gcgccaaggcaatgacttt

SEQ ID NO: 612854 - DNA, 19 bp, Mus musculus
  siRNA target sequence for Msra (NM_026322.2,658-676).
gtaccggtcagcagtctat

SEQ ID NO: 612855 - DNA, 19 bp, Mus musculus
  siRNA target sequence for Msra (NM_026322.2,711-729).
gatccaaggaagaatacca

SEQ ID NO: 612856 - DNA, 19 bp, Mus musculus
  siRNA target sequence for Msra (NM_026322.2,873-891).
cctgcccgatggccattaa

SEQ ID NO: 612857 - DNA, 19 bp, Mus musculus
  siRNA target sequence for Msra (NM_026322.2,874-892).
ctgcccgatggccattaaa

SEQ ID NO: 612858 - DNA, 19 bp, Mus musculus
  siRNA target sequence for Msra (NM_026322.2,876-894).
gcccgatggccattaaaaa

SEQ ID NO: 612859 - DNA, 19 bp, Mus musculus
  siRNA target sequence for Rrm1 (NM_009103.2,183-201).
cgccaagagcgagttatgt

SEQ ID NO: 612860 - DNA, 19 bp, Mus musculus
  siRNA target sequence for Rrm1 (NM_009103.2,184-202).
gccaagagcgagttatgtt

SEQ ID NO: 612861 - DNA, 19 bp, Mus musculus
  siRNA target sequence for Rrm1 (NM_009103.2,185-203).
ccaagagcgagttatgttt

SEQ ID NO: 612862 - DNA, 19 bp, Mus musculus
  siRNA target sequence for Rrm1 (NM_009103.2,189-207).
gagcgagttatgtttgaca

SEQ ID NO: 612863 - DNA, 19 bp, Mus musculus
  siRNA target sequence for Rrm1 (NM_009103.2,191-209).
gcgagttatgtttgacaaa

SEQ ID NO: 612864 - DNA, 19 bp, Mus musculus
  siRNA target sequence for Rrm1 (NM_009103.2,193-211).
gagttatgtttgacaaaat

SEQ ID NO: 612865 - DNA, 19 bp, Mus musculus
  siRNA target sequence for Rrm1 (NM_009103.2,200-218).
gtttgacaaaattacatca

SEQ ID NO: 612866 - DNA, 19 bp, Mus musculus
  siRNA target sequence for Rrm1 (NM_009103.2,214-232).
catcacgaatccagaaact

SEQ ID NO: 612867 - DNA, 19 bp, Mus musculus
  siRNA target sequence for Rrm1 (NM_009103.2,220-238).
gaatccagaaactctgtta

SEQ ID NO: 612868 - DNA, 19 bp, Mus musculus
  siRNA target sequence for Rrm1 (NM_009103.2,224-242).
ccagaaactctgttatgga

SEQ ID NO: 612869 - DNA, 19 bp, Mus musculus
  siRNA target sequence for Rrm1 (NM_009103.2,241-259).
gactcaacatggactttgt

SEQ ID NO: 612870 - DNA, 19 bp, Mus musculus
  siRNA target sequence for Rrm1 (NM_009103.2,285-303).
gtaatccaaggcctatata

SEQ ID NO: 612871 - DNA, 19 bp, Mus musculus
  siRNA target sequence for Rrm1 (NM_009103.2,362-380).
cacgaagcaccctgactat

SEQ ID NO: 612872 - DNA, 19 bp, Mus musculus
  siRNA target sequence for Rrm1 (NM_009103.2,383-401).
catcctggcagcaaggata

SEQ ID NO: 612873 - DNA, 19 bp, Mus musculus
  siRNA target sequence for Rrm1 (NM_009103.2,394-412).
caaggatagccgtctctaa

SEQ ID NO: 612874 - DNA, 19 bp, Mus musculus
  siRNA target sequence for Rrm1 (NM_009103.2,397-415).
ggatagccgtctctaactt

SEQ ID NO: 612875 - DNA, 19 bp, Mus musculus
  siRNA target sequence for Rrm1 (NM_009103.2,407-425).
ctctaacttgcacaaagaa

SEQ ID NO: 612876 - DNA, 19 bp, Mus musculus
  siRNA target sequence for Rrm1 (NM_009103.2,455-473).
ggatctctacaactacata

SEQ ID NO: 612877 - DNA, 19 bp, Mus musculus
  siRNA target sequence for Rrm1 (NM_009103.2,514-532).
caacactcgacattgttat

SEQ ID NO: 612878 - DNA, 19 bp, Mus musculus
  siRNA target sequence for Rrm1 (NM_009103.2,566-584).
ctatgaccgagatttctct

SEQ ID NO: 612879 - DNA, 19 bp, Mus musculus
  siRNA target sequence for Rrm1 (NM_009103.2,570-588).
gaccgagatttctcttata

SEQ ID NO: 612880 - DNA, 19 bp, Mus musculus
  siRNA target sequence for Rrm1 (NM_009103.2,573-591).
cgagatttctcttataact

SEQ ID NO: 612881 - DNA, 19 bp, Mus musculus
  siRNA target sequence for Rrm1 (NM_009103.2,605-623).
gacactggaacggtcatat

SEQ ID NO: 612882 - DNA, 19 bp, Mus musculus
  siRNA target sequence for Rrm1 (NM_009103.2,607-625).
cactggaacggtcatattt

SEQ ID NO: 612883 - DNA, 19 bp, Mus musculus
  siRNA target sequence for Rrm1 (NM_009103.2,612-630).
gaacggtcatatttgttga

SEQ ID NO: 612884 - DNA, 19 bp, Mus musculus
  siRNA target sequence for Rrm1 (NM_009103.2,619-637).
catatttgttgaagatcaa

SEQ ID NO: 612885 - DNA, 19 bp, Mus musculus
  siRNA target sequence for Rrm1 (NM_009103.2,686-704).
ggggattcacaaagaagat

SEQ ID NO: 612886 - DNA, 19 bp, Mus musculus
  siRNA target sequence for Rrm1 (NM_009103.2,724-742).
cctacaacctactttctga

SEQ ID NO: 612887 - DNA, 19 bp, Mus musculus
  siRNA target sequence for Rrm1 (NM_009103.2,815-833).
cctcttgagtatgaaagat

SEQ ID NO: 612888 - DNA, 19 bp, Mus musculus
  siRNA target sequence for Rrm1 (NM_009103.2,836-854).
cagcattgaaggaatttat

SEQ ID NO: 612889 - DNA, 19 bp, Mus musculus
  siRNA target sequence for Rrm1 (NM_009103.2,863-881).
gaagcagtgtgccttgatt

SEQ ID NO: 612890 - DNA, 19 bp, Mus musculus
  siRNA target sequence for Rrm1 (NM_009103.2,867-885).
cagtgtgccttgatttcta

SEQ ID NO: 612891 - DNA, 19 bp, Mus musculus
  siRNA target sequence for Rrm1 (NM_009103.2,887-905).
gtccgctgggggaattggt

SEQ ID NO: 612892 - DNA, 19 bp, Mus musculus
  siRNA target sequence for Rrm1 (NM_009103.2,948-966).
gggactaatggcaattcta

SEQ ID NO: 612893 - DNA, 19 bp, Mus musculus
  siRNA target sequence for Rrm1 (NM_009103.2,949-967).
ggactaatggcaattctaa

SEQ ID NO: 612894 - DNA, 19 bp, Mus musculus
  siRNA target sequence for Rrm1 (NM_009103.2,950-968).
gactaatggcaattctaat

SEQ ID NO: 612895 - DNA, 19 bp, Mus musculus
  siRNA target sequence for Rrm1 (NM_009103.2,1035-1053).
cgcccaggcgcgtttgcta

SEQ ID NO: 612896 - DNA, 19 bp, Mus musculus
  siRNA target sequence for Rrm1 (NM_009103.2,1036-1054).
gcccaggcgcgtttgctat

SEQ ID NO: 612897 - DNA, 19 bp, Mus musculus
  siRNA target sequence for Rrm1 (NM_009103.2,1037-1055).
cccaggcgcgtttgctatt

SEQ ID NO: 612898 - DNA, 19 bp, Mus musculus
  siRNA target sequence for Rrm1 (NM_009103.2,1038-1056).
ccaggcgcgtttgctattt

SEQ ID NO: 612899 - DNA, 19 bp, Mus musculus
  siRNA target sequence for Rrm1 (NM_009103.2,1039-1057).
caggcgcgtttgctattta

SEQ ID NO: 612900 - DNA, 19 bp, Mus musculus
  siRNA target sequence for Rrm1 (NM_009103.2,1042-1060).
gcgcgtttgctatttacct

SEQ ID NO: 612901 - DNA, 19 bp, Mus musculus
  siRNA target sequence for Rrm1 (NM_009103.2,1069-1087).
ggcacttagacatctttga

SEQ ID NO: 612902 - DNA, 19 bp, Mus musculus
  siRNA target sequence for Rrm1 (NM_009103.2,1129-1147).
gagcacgcgatctcttctt

SEQ ID NO: 612903 - DNA, 19 bp, Mus musculus
  siRNA target sequence for Rrm1 (NM_009103.2,1194-1212).
caggactggtcattgatgt

SEQ ID NO: 612904 - DNA, 19 bp, Mus musculus
  siRNA target sequence for Rrm1 (NM_009103.2,1289-1307).
gggtcgtgtccgaaaagtt

SEQ ID NO: 612905 - DNA, 19 bp, Mus musculus
  siRNA target sequence for Rrm1 (NM_009103.2,1291-1309).
gtcgtgtccgaaaagttgt

SEQ ID NO: 612906 - DNA, 19 bp, Mus musculus
  siRNA target sequence for Rrm1 (NM_009103.2,1293-1311).
cgtgtccgaaaagttgtaa

SEQ ID NO: 612907 - DNA, 19 bp, Mus musculus
  siRNA target sequence for Rrm1 (NM_009103.2,1294-1312).
gtgtccgaaaagttgtaaa

SEQ ID NO: 612908 - DNA, 19 bp, Mus musculus
  siRNA target sequence for Rrm1 (NM_009103.2,1363-1381).
ccccatacatgctctacaa

SEQ ID NO: 612909 - DNA, 19 bp, Mus musculus
  siRNA target sequence for Rrm1 (NM_009103.2,1364-1382).
cccatacatgctctacaaa

SEQ ID NO: 612910 - DNA, 19 bp, Mus musculus
  siRNA target sequence for Rrm1 (NM_009103.2,1366-1384).
catacatgctctacaaaga

SEQ ID NO: 612911 - DNA, 19 bp, Mus musculus
  siRNA target sequence for Rrm1 (NM_009103.2,1416-1434).
ctgggaaccatcaaatgca

SEQ ID NO: 612912 - DNA, 19 bp, Mus musculus
  siRNA target sequence for Rrm1 (NM_009103.2,1433-1451).
cagcaacctgtgtacagaa

SEQ ID NO: 612913 - DNA, 19 bp, Mus musculus
  siRNA target sequence for Rrm1 (NM_009103.2,1435-1453).
gcaacctgtgtacagaaat

SEQ ID NO: 612914 - DNA, 19 bp, Mus musculus
  siRNA target sequence for Rrm1 (NM_009103.2,1439-1457).
cctgtgtacagaaatagta

SEQ ID NO: 612915 - DNA, 19 bp, Mus musculus
  siRNA target sequence for Rrm1 (NM_009103.2,1444-1462).
gtacagaaatagtagagta

SEQ ID NO: 612916 - DNA, 19 bp, Mus musculus
  siRNA target sequence for Rrm1 (NM_009103.2,1506-1524).
gctctgaatatgtatgtca

SEQ ID NO: 612917 - DNA, 19 bp, Mus musculus
  siRNA target sequence for Rrm1 (NM_009103.2,1523-1541).
cacaccggaacatacgtat

SEQ ID NO: 612918 - DNA, 19 bp, Mus musculus
  siRNA target sequence for Rrm1 (NM_009103.2,1527-1545).
ccggaacatacgtatgact

SEQ ID NO: 612919 - DNA, 19 bp, Mus musculus
  siRNA target sequence for Rrm1 (NM_009103.2,1528-1546).
cggaacatacgtatgactt

SEQ ID NO: 612920 - DNA, 19 bp, Mus musculus
  siRNA target sequence for Rrm1 (NM_009103.2,1533-1551).
catacgtatgactttgaga

SEQ ID NO: 612921 - DNA, 19 bp, Mus musculus
  siRNA target sequence for Rrm1 (NM_009103.2,1557-1575).
gcagaagtcactaaagtca

SEQ ID NO: 612922 - DNA, 19 bp, Mus musculus
  siRNA target sequence for Rrm1 (NM_009103.2,1648-1666).
gccatcggcccattggaat

SEQ ID NO: 612923 - DNA, 19 bp, Mus musculus
  siRNA target sequence for Rrm1 (NM_009103.2,1649-1667).
ccatcggcccattggaatt

SEQ ID NO: 612924 - DNA, 19 bp, Mus musculus
  siRNA target sequence for Rrm1 (NM_009103.2,1690-1708).
ctttcatcctgatgagata

SEQ ID NO: 612925 - DNA, 19 bp, Mus musculus
  siRNA target sequence for Rrm1 (NM_009103.2,1720-1738).
gcccagaagcccagttatt

SEQ ID NO: 612926 - DNA, 19 bp, Mus musculus
  siRNA target sequence for Rrm1 (NM_009103.2,1721-1739).
cccagaagcccagttatta

SEQ ID NO: 612927 - DNA, 19 bp, Mus musculus
  siRNA target sequence for Rrm1 (NM_009103.2,1722-1740).
ccagaagcccagttattaa

SEQ ID NO: 612928 - DNA, 19 bp, Mus musculus
  siRNA target sequence for Rrm1 (NM_009103.2,1723-1741).
cagaagcccagttattaaa

SEQ ID NO: 612929 - DNA, 19 bp, Mus musculus
  siRNA target sequence for Rrm1 (NM_009103.2,1725-1743).
gaagcccagttattaaata

SEQ ID NO: 612930 - DNA, 19 bp, Mus musculus
  siRNA target sequence for Rrm1 (NM_009103.2,1729-1747).
cccagttattaaataagca

SEQ ID NO: 612931 - DNA, 19 bp, Mus musculus
  siRNA target sequence for Rrm1 (NM_009103.2,1803-1821).
gagtatggcccctatgaaa

SEQ ID NO: 612932 - DNA, 19 bp, Mus musculus
  siRNA target sequence for Rrm1 (NM_009103.2,1837-1855).
cagtcagcaagggtattct

SEQ ID NO: 612933 - DNA, 19 bp, Mus musculus
  siRNA target sequence for Rrm1 (NM_009103.2,1843-1861).
gcaagggtattcttcagta

SEQ ID NO: 612934 - DNA, 19 bp, Mus musculus
  siRNA target sequence for Rrm1 (NM_009103.2,1844-1862).
caagggtattcttcagtat

SEQ ID NO: 612935 - DNA, 19 bp, Mus musculus
  siRNA target sequence for Rrm1 (NM_009103.2,1848-1866).
ggtattcttcagtatgaca

SEQ ID NO: 612936 - DNA, 19 bp, Mus musculus
  siRNA target sequence for Rrm1 (NM_009103.2,1859-1877).
gtatgacatgtggaatgtt

SEQ ID NO: 612937 - DNA, 19 bp, Mus musculus
  siRNA target sequence for Rrm1 (NM_009103.2,1904-1922).
gcctctcaaggagaagatt

SEQ ID NO: 612938 - DNA, 19 bp, Mus musculus
  siRNA target sequence for Rrm1 (NM_009103.2,1919-1937).
gattgcaaagtatggtata

SEQ ID NO: 612939 - DNA, 19 bp, Mus musculus
  siRNA target sequence for Rrm1 (NM_009103.2,1923-1941).
gcaaagtatggtataagga

SEQ ID NO: 612940 - DNA, 19 bp, Mus musculus
  siRNA target sequence for Rrm1 (NM_009103.2,2001-2019).
gagtccattgagccttata

SEQ ID NO: 612941 - DNA, 19 bp, Mus musculus
  siRNA target sequence for Rrm1 (NM_009103.2,2010-2028).
gagccttataccagtaaca

SEQ ID NO: 612942 - DNA, 19 bp, Mus musculus
  siRNA target sequence for Rrm1 (NM_009103.2,2052-2070).
ggggaatttcagattgtga

SEQ ID NO: 612943 - DNA, 19 bp, Mus musculus
  siRNA target sequence for Rrm1 (NM_009103.2,2063-2081).
gattgtgaatcctcactta

SEQ ID NO: 612944 - DNA, 19 bp, Mus musculus
  siRNA target sequence for Rrm1 (NM_009103.2,2067-2085).
gtgaatcctcacttactga

SEQ ID NO: 612945 - DNA, 19 bp, Mus musculus
  siRNA target sequence for Rrm1 (NM_009103.2,2184-2202).
ctgaagcaactctataaga

SEQ ID NO: 612946 - DNA, 19 bp, Mus musculus
  siRNA target sequence for Rrm1 (NM_009103.2,2245-2263).
ccgagagaggtgctttcat

SEQ ID NO: 612947 - DNA, 19 bp, Mus musculus
  siRNA target sequence for Rrm1 (NM_009103.2,2338-2356).
gttggaagcagggtttaaa

SEQ ID NO: 612948 - DNA, 19 bp, Mus musculus
  siRNA target sequence for Rrm1 (NM_009103.2,2342-2360).
gaagcagggtttaaagact

SEQ ID NO: 612949 - DNA, 19 bp, Mus musculus
  siRNA target sequence for Rrm1 (NM_009103.2,2357-2375).
gactggaatgtattactta

SEQ ID NO: 612950 - DNA, 19 bp, Mus musculus
  siRNA target sequence for Rrm1 (NM_009103.2,2361-2379).
ggaatgtattacttaagga

SEQ ID NO: 612951 - DNA, 19 bp, Mus musculus
  siRNA target sequence for Rrm2 (NM_009104.1,269-287).
gaggatgagccgttactga

SEQ ID NO: 612952 - DNA, 19 bp, Mus musculus
  siRNA target sequence for Rrm2 (NM_009104.1,317-335).
cccatcgagtaccatgata

SEQ ID NO: 612953 - DNA, 19 bp, Mus musculus
  siRNA target sequence for Rrm2 (NM_009104.1,318-336).
ccatcgagtaccatgatat

SEQ ID NO: 612954 - DNA, 19 bp, Mus musculus
  siRNA target sequence for Rrm2 (NM_009104.1,332-350).
gatatctggcagatgtaca

SEQ ID NO: 612955 - DNA, 19 bp, Mus musculus
  siRNA target sequence for Rrm2 (NM_009104.1,428-446).
cccgatgagagacatttta

SEQ ID NO: 612956 - DNA, 19 bp, Mus musculus
  siRNA target sequence for Rrm2 (NM_009104.1,429-447).
ccgatgagagacattttat

SEQ ID NO: 612957 - DNA, 19 bp, Mus musculus
  siRNA target sequence for Rrm2 (NM_009104.1,430-448).
cgatgagagacattttata

SEQ ID NO: 612958 - DNA, 19 bp, Mus musculus
  siRNA target sequence for Rrm2 (NM_009104.1,450-468).
ctcacgttctggctttctt

SEQ ID NO: 612959 - DNA, 19 bp, Mus musculus
  siRNA target sequence for Rrm2 (NM_009104.1,473-491).
gcgagtgatggcatagtca

SEQ ID NO: 612960 - DNA, 19 bp, Mus musculus
  siRNA target sequence for Rrm2 (NM_009104.1,508-526).
gcgatttagccaagaagtt

SEQ ID NO: 612961 - DNA, 19 bp, Mus musculus
  siRNA target sequence for Rrm2 (NM_009104.1,566-584).
gccatggaaaacatacact

SEQ ID NO: 612962 - DNA, 19 bp, Mus musculus
  siRNA target sequence for Rrm2 (NM_009104.1,601-619).
ccttattgacacttacatt

SEQ ID NO: 612963 - DNA, 19 bp, Mus musculus
  siRNA target sequence for Rrm2 (NM_009104.1,602-620).
cttattgacacttacatta

SEQ ID NO: 612964 - DNA, 19 bp, Mus musculus
  siRNA target sequence for Rrm2 (NM_009104.1,1069-1087).
gctgggttttaacaagatt

SEQ ID NO: 612965 - DNA, 19 bp, Mus musculus
  siRNA target sequence for Rrm2 (NM_009104.1,1094-1112).
gtagaaaatccgtttgact

SEQ ID NO: 612966 - DNA, 19 bp, Mus musculus
  siRNA target sequence for Rrm2 (NM_009104.1,1104-1122).
cgtttgacttcatggaaaa

SEQ ID NO: 612967 - DNA, 19 bp, Mus musculus
  siRNA target sequence for Rrm2 (NM_009104.1,1105-1123).
gtttgacttcatggaaaat

SEQ ID NO: 612968 - DNA, 19 bp, Mus musculus
  siRNA target sequence for Rrm2 (NM_009104.1,1117-1135).
ggaaaatatctcactagaa

SEQ ID NO: 612969 - DNA, 19 bp, Mus musculus
  siRNA target sequence for Rrm2 (NM_009104.1,1160-1178).
cgagtaggcgagtatcaga

SEQ ID NO: 612970 - DNA, 19 bp, Mus musculus
  siRNA target sequence for Rrm2 (NM_009104.1,1184-1202).
ggagtcatgtcgaattcga

SEQ ID NO: 612971 - DNA, 19 bp, Mus musculus
  siRNA target sequence for Fdxr (NM_007997.1,246-264).
cagcccaacacttgttaaa

SEQ ID NO: 612972 - DNA, 19 bp, Mus musculus
  siRNA target sequence for Fdxr (NM_007997.1,249-267).
cccaacacttgttaaagca

SEQ ID NO: 612973 - DNA, 19 bp, Mus musculus
  siRNA target sequence for Fdxr (NM_007997.1,273-291).
cccatgcccacgtagacat

SEQ ID NO: 612974 - DNA, 19 bp, Mus musculus
  siRNA target sequence for Fdxr (NM_007997.1,788-806).
caagtagcgttcaccatta

SEQ ID NO: 612975 - DNA, 19 bp, Mus musculus
  siRNA target sequence for Fdxr (NM_007997.1,872-890).
ggcctccaggacagaatta

SEQ ID NO: 612976 - DNA, 19 bp, Mus musculus
  siRNA target sequence for Fdxr (NM_007997.1,873-891).
gcctccaggacagaattaa

SEQ ID NO: 612977 - DNA, 19 bp, Mus musculus
  siRNA target sequence for Fdxr (NM_007997.1,877-895).
ccaggacagaattaaggat

SEQ ID NO: 612978 - DNA, 19 bp, Mus musculus
  siRNA target sequence for Fdxr (NM_007997.1,1441-1459).
ccggccagtgtctttctca

SEQ ID NO: 612979 - DNA, 19 bp, Mus musculus
  siRNA target sequence for Uox (NM_009474.3,74-92).
caactacggaaagaatgat

SEQ ID NO: 612980 - DNA, 19 bp, Mus musculus
  siRNA target sequence for Uox (NM_009474.3,131-149).
ggtcaaagttctccatatt

SEQ ID NO: 612981 - DNA, 19 bp, Mus musculus
  siRNA target sequence for Uox (NM_009474.3,211-229).
ggtccaagaaggattacct

SEQ ID NO: 612982 - DNA, 19 bp, Mus musculus
  siRNA target sequence for Uox (NM_009474.3,212-230).
gtccaagaaggattaccta

SEQ ID NO: 612983 - DNA, 19 bp, Mus musculus
  siRNA target sequence for Uox (NM_009474.3,235-253).
gtgataattccgacatcat

SEQ ID NO: 612984 - DNA, 19 bp, Mus musculus
  siRNA target sequence for Uox (NM_009474.3,398-416).
ggtcccctggaaacgattt

SEQ ID NO: 612985 - DNA, 19 bp, Mus musculus
  siRNA target sequence for Uox (NM_009474.3,401-419).
cccctggaaacgatttgaa

SEQ ID NO: 612986 - DNA, 19 bp, Mus musculus
  siRNA target sequence for Uox (NM_009474.3,534-552).
ctcaaggtcttgaaaacaa

SEQ ID NO: 612987 - DNA, 19 bp, Mus musculus
  siRNA target sequence for Uox (NM_009474.3,576-594).
ctcaaggaccagttcacta

SEQ ID NO: 612988 - DNA, 19 bp, Mus musculus
  siRNA target sequence for Uox (NM_009474.3,688-706).
gcgctgtccgggacattgt

SEQ ID NO: 612989 - DNA, 19 bp, Mus musculus
  siRNA target sequence for Uox (NM_009474.3,766-784).
ccctctatgatatacaagt

SEQ ID NO: 612990 - DNA, 19 bp, Mus musculus
  siRNA target sequence for Uox (NM_009474.3,834-852).
ccgaacattcactacttta

SEQ ID NO: 612991 - DNA, 19 bp, Mus musculus
  siRNA target sequence for Uox (NM_009474.3,835-853).
cgaacattcactactttaa

SEQ ID NO: 612992 - DNA, 19 bp, Mus musculus
  siRNA target sequence for Uox (NM_009474.3,865-883).
ccaaaatgggactgatcaa

SEQ ID NO: 612993 - DNA, 19 bp, Mus musculus
  siRNA target sequence for 0610009A07Rik (NM_027391.1,63-81).
ggttgtatgggtctttaaa

SEQ ID NO: 612994 - DNA, 19 bp, Mus musculus
  siRNA target sequence for 0610009A07Rik (NM_027391.1,64-82).
gttgtatgggtctttaaaa

SEQ ID NO: 612995 - DNA, 19 bp, Mus musculus
  siRNA target sequence for 0610009A07Rik (NM_027391.1,86-104).
ccgacaggaacctagagaa

SEQ ID NO: 612996 - DNA, 19 bp, Mus musculus
  siRNA target sequence for 0610009A07Rik (NM_027391.1,158-176).
gcacagaagaccttcaagt

SEQ ID NO: 612997 - DNA, 19 bp, Mus musculus
  siRNA target sequence for 0610009A07Rik (NM_027391.1,270-288).
gaggtcccaggaattctat

SEQ ID NO: 612998 - DNA, 19 bp, Mus musculus
  siRNA target sequence for 0610009A07Rik (NM_027391.1,305-323).
gacgctccgtcaggtttat

SEQ ID NO: 612999 - DNA, 19 bp, Mus musculus
  siRNA target sequence for 0610009A07Rik (NM_027391.1,307-325).
cgctccgtcaggtttatca

SEQ ID NO: 613000 - DNA, 19 bp, Mus musculus
  siRNA target sequence for 0610009A07Rik (NM_027391.1,330-348).
cgagcacgtcccaatggaa

SEQ ID NO: 613001 - DNA, 19 bp, Mus musculus
  siRNA target sequence for 0610009A07Rik (NM_027391.1,336-354).
cgtcccaatggaagtcatt

SEQ ID NO: 613002 - DNA, 19 bp, Mus musculus
  siRNA target sequence for 0610009A07Rik (NM_027391.1,339-357).
cccaatggaagtcattgaa

SEQ ID NO: 613003 - DNA, 19 bp, Mus musculus
  siRNA target sequence for 0610009A07Rik (NM_027391.1,430-448).
gacccagacatgaagcata

SEQ ID NO: 613004 - DNA, 19 bp, Mus musculus
  siRNA target sequence for 0610009A07Rik (NM_027391.1,433-451).
ccagacatgaagcataaga

SEQ ID NO: 613005 - DNA, 19 bp, Mus musculus
  siRNA target sequence for 0610009A07Rik (NM_027391.1,444-462).
gcataagatcagagagatt

SEQ ID NO: 613006 - DNA, 19 bp, Mus musculus
  siRNA target sequence for 0610009A07Rik (NM_027391.1,512-530).
gggtcacagacctgaagaa

SEQ ID NO: 613007 - DNA, 19 bp, Mus musculus
  siRNA target sequence for 0610009A07Rik (NM_027391.1,532-550).
ctgagaaccaactggatta

SEQ ID NO: 613008 - DNA, 19 bp, Mus musculus
  siRNA target sequence for 0610009A07Rik (NM_027391.1,536-554).
gaaccaactggattaagga

SEQ ID NO: 613009 - DNA, 19 bp, Mus musculus
  siRNA target sequence for 0610009A07Rik (NM_027391.1,574-592).
gttctgatcctcattttca

SEQ ID NO: 613010 - DNA, 19 bp, Mus musculus
  siRNA target sequence for 0610009A07Rik (NM_027391.1,579-597).
gatcctcattttcaaacaa

SEQ ID NO: 613011 - DNA, 19 bp, Mus musculus
  siRNA target sequence for 0610009A07Rik (NM_027391.1,604-622).
ggttttgctgcgaatggaa

SEQ ID NO: 613012 - DNA, 19 bp, Mus musculus
  siRNA target sequence for 0610009A07Rik (NM_027391.1,605-623).
gttttgctgcgaatggaaa

SEQ ID NO: 613013 - DNA, 19 bp, Mus musculus
  siRNA target sequence for 0710001O03Rik (NM_146094.1,127-145).
ccgccaaacgcgctacttt

SEQ ID NO: 613014 - DNA, 19 bp, Mus musculus
  siRNA target sequence for 0710001O03Rik (NM_146094.1,128-146).
cgccaaacgcgctacttta

SEQ ID NO: 613015 - DNA, 19 bp, Mus musculus
  siRNA target sequence for 0710001O03Rik (NM_146094.1,130-148).
ccaaacgcgctactttact

SEQ ID NO: 613016 - DNA, 19 bp, Mus musculus
  siRNA target sequence for 0710001O03Rik (NM_146094.1,131-149).
caaacgcgctactttactt

SEQ ID NO: 613017 - DNA, 19 bp, Mus musculus
  siRNA target sequence for 0710001O03Rik (NM_146094.1,203-221).
gaccggaaggtgtacaaca

SEQ ID NO: 613018 - DNA, 19 bp, Mus musculus
  siRNA target sequence for 0710001O03Rik (NM_146094.1,283-301).
ggatgccacggatcctttt

SEQ ID NO: 613019 - DNA, 19 bp, Mus musculus
  siRNA target sequence for 0710001O03Rik (NM_146094.1,525-543).
cctggctcaccctttggat

SEQ ID NO: 613020 - DNA, 19 bp, Mus musculus
  siRNA target sequence for 0710001O03Rik (NM_146094.1,671-689).
ctgctacatcattttgtga

SEQ ID NO: 613021 - DNA, 19 bp, Mus musculus
  siRNA target sequence for 0710001O03Rik (NM_146094.1,767-785).
cgcaaggaccccgatatca

SEQ ID NO: 613022 - DNA, 19 bp, Mus musculus
  siRNA target sequence for 0710001O03Rik (NM_146094.1,906-924).
ccttgctgcctctatactt

SEQ ID NO: 613023 - DNA, 19 bp, Mus musculus
  siRNA target sequence for 0710001O03Rik (NM_146094.1,917-935).
ctatacttccagtggtata

SEQ ID NO: 613024 - DNA, 19 bp, Mus musculus
  siRNA target sequence for 0710001O03Rik (NM_146094.1,926-944).
cagtggtatattttctatt

SEQ ID NO: 613025 - DNA, 19 bp, Mus musculus
  siRNA target sequence for 0710001O03Rik (NM_146094.1,947-965).
gtggttcagcggaaaaaat

SEQ ID NO: 613026 - DNA, 19 bp, Mus musculus
  siRNA target sequence for 0710001O03Rik (NM_146094.1,979-997).
ctggatgctcagcttctat

SEQ ID NO: 613027 - DNA, 19 bp, Mus musculus
  siRNA target sequence for 0710001O03Rik (NM_146094.1,999-1017).
cccgcatcttcttcactta

SEQ ID NO: 613028 - DNA, 19 bp, Mus musculus
  siRNA target sequence for 0710001O03Rik (NM_146094.1,1209-1227).
ggttcagtggccacctaaa

SEQ ID NO: 613029 - DNA, 19 bp, Mus musculus
  siRNA target sequence for 0710001O03Rik (NM_146094.1,1210-1228).
gttcagtggccacctaaat

SEQ ID NO: 613030 - DNA, 19 bp, Mus musculus
  siRNA target sequence for 0710001O03Rik (NM_146094.1,1282-1300).
ggtggcacccctagtacaa

SEQ ID NO: 613031 - DNA, 19 bp, Mus musculus
  siRNA target sequence for 0710001O03Rik (NM_146094.1,1283-1301).
gtggcacccctagtacaat

SEQ ID NO: 613032 - DNA, 19 bp, Mus musculus
  siRNA target sequence for 0710001O03Rik (NM_146094.1,1310-1328).
gccaagtacggcatcaagt

SEQ ID NO: 613033 - DNA, 19 bp, Mus musculus
  siRNA target sequence for 0710001O03Rik (NM_146094.1,1312-1330).
caagtacggcatcaagtat

SEQ ID NO: 613034 - DNA, 19 bp, Mus musculus
  siRNA target sequence for 0710001O03Rik (NM_146094.1,1353-1371).
ccttcgcggacattgttta

SEQ ID NO: 613035 - DNA, 19 bp, Mus musculus
  siRNA target sequence for 0710001O03Rik (NM_146094.1,1396-1414).
ctggttggacgcttacctt

SEQ ID NO: 613036 - DNA, 19 bp, Mus musculus
  siRNA target sequence for 1110061L23Rik (NM_029406.1,325-343).
ctcatcggaaggaaaggtt

SEQ ID NO: 613037 - DNA, 19 bp, Mus musculus
  siRNA target sequence for 1110061L23Rik (NM_029406.1,330-348).
cggaaggaaaggttttcat

SEQ ID NO: 613038 - DNA, 19 bp, Mus musculus
  siRNA target sequence for 1110061L23Rik (NM_029406.1,505-523).
ctatgacgtcgctgtcaat

SEQ ID NO: 613039 - DNA, 19 bp, Mus musculus
  siRNA target sequence for 1110061L23Rik (NM_029406.1,509-527).
gacgtcgctgtcaatagca

SEQ ID NO: 613040 - DNA, 19 bp, Mus musculus
  siRNA target sequence for 1110061L23Rik (NM_029406.1,515-533).
gctgtcaatagcaacttct

SEQ ID NO: 613041 - DNA, 19 bp, Mus musculus
  siRNA target sequence for 1110061L23Rik (NM_029406.1,516-534).
ctgtcaatagcaacttcta

SEQ ID NO: 613042 - DNA, 19 bp, Mus musculus
  siRNA target sequence for 1110061L23Rik (NM_029406.1,627-645).
ctgaatggcgcatgttgaa

SEQ ID NO: 613043 - DNA, 19 bp, Mus musculus
  siRNA target sequence for 1110061L23Rik (NM_029406.1,629-647).
gaatggcgcatgttgaagt

SEQ ID NO: 613044 - DNA, 19 bp, Mus musculus
  siRNA target sequence for 1110061L23Rik (NM_029406.1,771-789).
ctcacctgaacctttggtt

SEQ ID NO: 613045 - DNA, 19 bp, Mus musculus
  siRNA target sequence for 1300018L09Rik (NM_027903.1,160-178).
cgaggagttcgcacagaaa

SEQ ID NO: 613046 - DNA, 19 bp, Mus musculus
  siRNA target sequence for 1300018L09Rik (NM_027903.1,334-352).
cgtgaatgcagcagaagtt

SEQ ID NO: 613047 - DNA, 19 bp, Mus musculus
  siRNA target sequence for 1300018L09Rik (NM_027903.1,378-396).
ctcaaggcgtcttccttat

SEQ ID NO: 613048 - DNA, 19 bp, Mus musculus
  siRNA target sequence for 1300018L09Rik (NM_027903.1,401-419).
gccatttggagccgatttt

SEQ ID NO: 613049 - DNA, 19 bp, Mus musculus
  siRNA target sequence for 1300018L09Rik (NM_027903.1,433-451).
ggctctgagggaagtttta

SEQ ID NO: 613050 - DNA, 19 bp, Mus musculus
  siRNA target sequence for 1300018L09Rik (NM_027903.1,487-505).
ggcagaattcggatttgat

SEQ ID NO: 613051 - DNA, 19 bp, Mus musculus
  siRNA target sequence for 1300018L09Rik (NM_027903.1,557-575).
ctggacctaggcatctact

SEQ ID NO: 613052 - DNA, 19 bp, Mus musculus
  siRNA target sequence for 1300018L09Rik (NM_027903.1,581-599).
cagttcttatccatgatct

SEQ ID NO: 613053 - DNA, 19 bp, Mus musculus
  siRNA target sequence for 1300018L09Rik (NM_027903.1,666-684).
ctgtcagcgtgctacttca

SEQ ID NO: 613054 - DNA, 19 bp, Mus musculus
  siRNA target sequence for 1300018L09Rik (NM_027903.1,670-688).
cagcgtgctacttcagtat

SEQ ID NO: 613055 - DNA, 19 bp, Mus musculus
  siRNA target sequence for 1300018L09Rik (NM_027903.1,767-785).
ggcatggcccagattcaaa

SEQ ID NO: 613056 - DNA, 19 bp, Mus musculus
  siRNA target sequence for 1300018L09Rik (NM_027903.1,847-865).
ccttgggaaggactacaat

SEQ ID NO: 613057 - DNA, 19 bp, Mus musculus
  siRNA target sequence for 1300018L09Rik (NM_027903.1,848-866).
cttgggaaggactacaatt

SEQ ID NO: 613058 - DNA, 19 bp, Mus musculus
  siRNA target sequence for 1300018L09Rik (NM_027903.1,852-870).
ggaaggactacaattttgt

SEQ ID NO: 613059 - DNA, 19 bp, Mus musculus
  siRNA target sequence for 1300018L09Rik (NM_027903.1,853-871).
gaaggactacaattttgta

SEQ ID NO: 613060 - DNA, 19 bp, Mus musculus
  siRNA target sequence for 1300018L09Rik (NM_027903.1,876-894).
ggtcatgcatgctctatga

SEQ ID NO: 613061 - DNA, 19 bp, Mus musculus
  siRNA target sequence for 1300018L09Rik (NM_027903.1,915-933).
gcctgcgtaaaggtcttaa

SEQ ID NO: 613062 - DNA, 19 bp, Mus musculus
  siRNA target sequence for 1500005G05Rik (NM_028057.1,302-320).
cctctctgcccgaattgat

SEQ ID NO: 613063 - DNA, 19 bp, Mus musculus
  siRNA target sequence for 1500005G05Rik (NM_028057.1,373-391).
gctatgtagatcttgtcat

SEQ ID NO: 613064 - DNA, 19 bp, Mus musculus
  siRNA target sequence for 1500005G05Rik (NM_028057.1,381-399).
gatcttgtcatcaaggttt

SEQ ID NO: 613065 - DNA, 19 bp, Mus musculus
  siRNA target sequence for 1500005G05Rik (NM_028057.1,387-405).
gtcatcaaggtttatctga

SEQ ID NO: 613066 - DNA, 19 bp, Mus musculus
  siRNA target sequence for 1500005G05Rik (NM_028057.1,496-514).
cgagcgggttgctcagtta

SEQ ID NO: 613067 - DNA, 19 bp, Mus musculus
  siRNA target sequence for 1500005G05Rik (NM_028057.1,497-515).
gagcgggttgctcagttat

SEQ ID NO: 613068 - DNA, 19 bp, Mus musculus
  siRNA target sequence for 1500005G05Rik (NM_028057.1,500-518).
cgggttgctcagttatgct

SEQ ID NO: 613069 - DNA, 19 bp, Mus musculus
  siRNA target sequence for 1500005G05Rik (NM_028057.1,516-534).
gctgggaaagggaatttta

SEQ ID NO: 613070 - DNA, 19 bp, Mus musculus
  siRNA target sequence for 1500005G05Rik (NM_028057.1,577-595).
cgaagaaattgggaatgat

SEQ ID NO: 613071 - DNA, 19 bp, Mus musculus
  siRNA target sequence for 1500005G05Rik (NM_028057.1,697-715).
ctgaaagggatataatcct

SEQ ID NO: 613072 - DNA, 19 bp, Mus musculus
  siRNA target sequence for 1500005G05Rik (NM_028057.1,735-753).
cttcaggcccagtatccta

SEQ ID NO: 613073 - DNA, 19 bp, Mus musculus
  siRNA target sequence for 1500005G05Rik (NM_028057.1,926-944).
ggataagctgggctattca

SEQ ID NO: 613074 - DNA, 19 bp, Mus musculus
  siRNA target sequence for 1700055N04Rik (NM_028545.1,111-129).
gcgctacattggtcatcaa

SEQ ID NO: 613075 - DNA, 19 bp, Mus musculus
  siRNA target sequence for 1700055N04Rik (NM_028545.1,112-130).
cgctacattggtcatcaaa

SEQ ID NO: 613076 - DNA, 19 bp, Mus musculus
  siRNA target sequence for 1700055N04Rik (NM_028545.1,114-132).
ctacattggtcatcaaaca

SEQ ID NO: 613077 - DNA, 19 bp, Mus musculus
  siRNA target sequence for 1810054F20Rik (NM_027301.3,118-136).
ccctcacagactttgcttt

SEQ ID NO: 613078 - DNA, 19 bp, Mus musculus
  siRNA target sequence for 1810054F20Rik (NM_027301.3,140-158).
gtaccgctggttcaaaaat

SEQ ID NO: 613079 - DNA, 19 bp, Mus musculus
  siRNA target sequence for 1810054F20Rik (NM_027301.3,450-468).
cccagtggtcccaacgaat

SEQ ID NO: 613080 - DNA, 19 bp, Mus musculus
  siRNA target sequence for 1810054F20Rik (NM_027301.3,469-487).
ggctgaccataaaagactt

SEQ ID NO: 613081 - DNA, 19 bp, Mus musculus
  siRNA target sequence for 1810054F20Rik (NM_027301.3,470-488).
gctgaccataaaagacttt

SEQ ID NO: 613082 - DNA, 19 bp, Mus musculus
  siRNA target sequence for 1810054F20Rik (NM_027301.3,475-493).
ccataaaagactttgtgaa

SEQ ID NO: 613083 - DNA, 19 bp, Mus musculus
  siRNA target sequence for 1810054F20Rik (NM_027301.3,489-507).
gtgaaagtgatcaacataa

SEQ ID NO: 613084 - DNA, 19 bp, Mus musculus
  siRNA target sequence for 1810054F20Rik (NM_027301.3,542-560).
gctgccgatgatcaagaaa

SEQ ID NO: 613085 - DNA, 19 bp, Mus musculus
  siRNA target sequence for 1810054F20Rik (NM_027301.3,567-585).
ggcagggtggtcaacatgt

SEQ ID NO: 613086 - DNA, 19 bp, Mus musculus
  siRNA target sequence for 1810054F20Rik (NM_027301.3,594-612).
ggtggccgtgtggctatat

SEQ ID NO: 613087 - DNA, 19 bp, Mus musculus
  siRNA target sequence for 1810054F20Rik (NM_027301.3,645-663).
gttgaagccttctctgata

SEQ ID NO: 613088 - DNA, 19 bp, Mus musculus
  siRNA target sequence for 1810054F20Rik (NM_027301.3,670-688).
ggcgcgagcttcatttctt

SEQ ID NO: 613089 - DNA, 19 bp, Mus musculus
  siRNA target sequence for 1810054F20Rik (NM_027301.3,808-826).
gctacggagaggagtattt

SEQ ID NO: 613090 - DNA, 19 bp, Mus musculus
  siRNA target sequence for 1810054F20Rik (NM_027301.3,812-830).
cggagaggagtatttccaa

SEQ ID NO: 613091 - DNA, 19 bp, Mus musculus
  siRNA target sequence for 1810054F20Rik (NM_027301.3,818-836).
ggagtatttccaaacctat

SEQ ID NO: 613092 - DNA, 19 bp, Mus musculus
  siRNA target sequence for 1810054F20Rik (NM_027301.3,819-837).
gagtatttccaaacctata

SEQ ID NO: 613093 - DNA, 19 bp, Mus musculus
  siRNA target sequence for 1810054F20Rik (NM_027301.3,821-839).
gtatttccaaacctatact

SEQ ID NO: 613094 - DNA, 19 bp, Mus musculus
  siRNA target sequence for 1810054F20Rik (NM_027301.3,949-967).
gcctggacgtcaagtttct

SEQ ID NO: 613095 - DNA, 19 bp, Mus musculus
  siRNA target sequence for 1810054F20Rik (NM_027301.3,953-971).
ggacgtcaagtttctctat

SEQ ID NO: 613096 - DNA, 19 bp, Mus musculus
  siRNA target sequence for 2210008A03Rik (NM_027299.2,167-185).
ccagaccctcacatcaagt

SEQ ID NO: 613097 - DNA, 19 bp, Mus musculus
  siRNA target sequence for 2210008A03Rik (NM_027299.2,217-235).
gctggcctgctggttagta

SEQ ID NO: 613098 - DNA, 19 bp, Mus musculus
  siRNA target sequence for 2210008A03Rik (NM_027299.2,317-335).
catgacatctcgcacaata

SEQ ID NO: 613099 - DNA, 19 bp, Mus musculus
  siRNA target sequence for 2210008A03Rik (NM_027299.2,372-390).
ggtttgccatctttgctaa

SEQ ID NO: 613100 - DNA, 19 bp, Mus musculus
  siRNA target sequence for 2210008A03Rik (NM_027299.2,373-391).
gtttgccatctttgctaat

SEQ ID NO: 613101 - DNA, 19 bp, Mus musculus
  siRNA target sequence for 2210008A03Rik (NM_027299.2,413-431).
gctacatccttcaaaaagt

SEQ ID NO: 613102 - DNA, 19 bp, Mus musculus
  siRNA target sequence for 2210008A03Rik (NM_027299.2,414-432).
ctacatccttcaaaaagta

SEQ ID NO: 613103 - DNA, 19 bp, Mus musculus
  siRNA target sequence for 2210008A03Rik (NM_027299.2,466-484).
cgggctggatgtggatatt

SEQ ID NO: 613104 - DNA, 19 bp, Mus musculus
  siRNA target sequence for 2210008A03Rik (NM_027299.2,470-488).
ctggatgtggatattccta

SEQ ID NO: 613105 - DNA, 19 bp, Mus musculus
  siRNA target sequence for 2210008A03Rik (NM_027299.2,550-568).
gcctttcttctattcacta

SEQ ID NO: 613106 - DNA, 19 bp, Mus musculus
  siRNA target sequence for 2210008A03Rik (NM_027299.2,551-569).
cctttcttctattcactaa

SEQ ID NO: 613107 - DNA, 19 bp, Mus musculus
  siRNA target sequence for 2210008A03Rik (NM_027299.2,621-639).
ccctggtgcagctagcatt

SEQ ID NO: 613108 - DNA, 19 bp, Mus musculus
  siRNA target sequence for 2210008A03Rik (NM_027299.2,622-640).
cctggtgcagctagcattt

SEQ ID NO: 613109 - DNA, 19 bp, Mus musculus
  siRNA target sequence for 2210008A03Rik (NM_027299.2,625-643).
ggtgcagctagcatttgat

SEQ ID NO: 613110 - DNA, 19 bp, Mus musculus
  siRNA target sequence for 2210008A03Rik (NM_027299.2,665-683).
gggatcaagcccatagtct

SEQ ID NO: 613111 - DNA, 19 bp, Mus musculus
  siRNA target sequence for 2210008A03Rik (NM_027299.2,666-684).
ggatcaagcccatagtcta

SEQ ID NO: 613112 - DNA, 19 bp, Mus musculus
  siRNA target sequence for 2210008A03Rik (NM_027299.2,721-739).
ccctatctctggtcacttt

SEQ ID NO: 613113 - DNA, 19 bp, Mus musculus
  siRNA target sequence for 2210008A03Rik (NM_027299.2,740-758).
gtggctgagcattatatgt

SEQ ID NO: 613114 - DNA, 19 bp, Mus musculus
  siRNA target sequence for 2210008A03Rik (NM_027299.2,772-790).
cgagacttactcctactat

SEQ ID NO: 613115 - DNA, 19 bp, Mus musculus
  siRNA target sequence for 2210008A03Rik (NM_027299.2,799-817).
caattggatcaccttcaat

SEQ ID NO: 613116 - DNA, 19 bp, Mus musculus
  siRNA target sequence for 2210008A03Rik (NM_027299.2,849-867).
ccagtatccccggttacta

SEQ ID NO: 613117 - DNA, 19 bp, Mus musculus
  siRNA target sequence for 2210008A03Rik (NM_027299.2,871-889).
gccactggtgcggaagatt

SEQ ID NO: 613118 - DNA, 19 bp, Mus musculus
  siRNA target sequence for 2210008A03Rik (NM_027299.2,883-901).
gaagattgcacctgaatat

SEQ ID NO: 613119 - DNA, 19 bp, Mus musculus
  siRNA target sequence for 2210008A03Rik (NM_027299.2,886-904).
gattgcacctgaatattat

SEQ ID NO: 613120 - DNA, 19 bp, Mus musculus
  siRNA target sequence for 2310003G12Rik (NM_023631.1,123-141).
gtctgacgagctgattttt

SEQ ID NO: 613121 - DNA, 19 bp, Mus musculus
  siRNA target sequence for 2310003G12Rik (NM_023631.1,176-194).
ctgaccctgaaaagaatct

SEQ ID NO: 613122 - DNA, 19 bp, Mus musculus
  siRNA target sequence for 2310003G12Rik (NM_023631.1,204-222).
caccaggaaagttctcaat

SEQ ID NO: 613123 - DNA, 19 bp, Mus musculus
  siRNA target sequence for 2310003G12Rik (NM_023631.1,206-224).
ccaggaaagttctcaatct

SEQ ID NO: 613124 - DNA, 19 bp, Mus musculus
  siRNA target sequence for 2310003G12Rik (NM_023631.1,274-292).
gtgatggtgtcgagatata

SEQ ID NO: 613125 - DNA, 19 bp, Mus musculus
  siRNA target sequence for 2310003G12Rik (NM_023631.1,276-294).
gatggtgtcgagatataat

SEQ ID NO: 613126 - DNA, 19 bp, Mus musculus
  siRNA target sequence for 2310003G12Rik (NM_023631.1,279-297).
ggtgtcgagatataatcca

SEQ ID NO: 613127 - DNA, 19 bp, Mus musculus
  siRNA target sequence for 2310003G12Rik (NM_023631.1,280-298).
gtgtcgagatataatccaa

SEQ ID NO: 613128 - DNA, 19 bp, Mus musculus
  siRNA target sequence for 2310003G12Rik (NM_023631.1,541-559).
gctcttggagggaatttgt

SEQ ID NO: 613129 - DNA, 19 bp, Mus musculus
  siRNA target sequence for 2310003G12Rik (NM_023631.1,586-604).
gtagaaagcgggaaaacat

SEQ ID NO: 613130 - DNA, 19 bp, Mus musculus
  siRNA target sequence for 2310003G12Rik (NM_023631.1,658-676).
gatccagatgagaagtgtt

SEQ ID NO: 613131 - DNA, 19 bp, Mus musculus
  siRNA target sequence for 2310003G12Rik (NM_023631.1,690-708).
gaaaaagatgtgtactaaa

SEQ ID NO: 613132 - DNA, 19 bp, Mus musculus
  siRNA target sequence for 2310003G12Rik (NM_023631.1,743-761).
catcccaggaacctatatt

SEQ ID NO: 613133 - DNA, 19 bp, Mus musculus
  siRNA target sequence for 2310003G12Rik (NM_023631.1,764-782).
ctcctgaactgattagaat

SEQ ID NO: 613134 - DNA, 19 bp, Mus musculus
  siRNA target sequence for 2310003G12Rik (NM_023631.1,774-792).
gattagaatggcagaagat

SEQ ID NO: 613135 - DNA, 19 bp, Mus musculus
  siRNA target sequence for 2310003G12Rik (NM_023631.1,921-939).
gggacccggtattaaattt

SEQ ID NO: 613136 - DNA, 19 bp, Mus musculus
  siRNA target sequence for 2310003G12Rik (NM_023631.1,922-940).
ggacccggtattaaattta

SEQ ID NO: 613137 - DNA, 19 bp, Mus musculus
  siRNA target sequence for 2310003G12Rik (NM_023631.1,923-941).
gacccggtattaaatttaa

SEQ ID NO: 613138 - DNA, 19 bp, Mus musculus
  siRNA target sequence for 2310003G12Rik (NM_023631.1,926-944).
ccggtattaaatttaatga

SEQ ID NO: 613139 - DNA, 19 bp, Mus musculus
  siRNA target sequence for 2310003G12Rik (NM_023631.1,927-945).
cggtattaaatttaatgat

SEQ ID NO: 613140 - DNA, 19 bp, Mus musculus
  siRNA target sequence for 2310003G12Rik (NM_023631.1,1038-1056).
cagcctggcacagcttaaa

SEQ ID NO: 613141 - DNA, 19 bp, Mus musculus
  siRNA target sequence for 2310003G12Rik (NM_023631.1,1040-1058).
gcctggcacagcttaaaga

SEQ ID NO: 613142 - DNA, 19 bp, Mus musculus
  siRNA target sequence for 2310003G12Rik (NM_023631.1,1042-1060).
ctggcacagcttaaagata

SEQ ID NO: 613143 - DNA, 19 bp, Mus musculus
  siRNA target sequence for 2310003G12Rik (NM_023631.1,1158-1176).
gaatatggctactttagga

SEQ ID NO: 613144 - DNA, 19 bp, Mus musculus
  siRNA target sequence for 2310003G12Rik (NM_023631.1,1182-1200).
cactgcaagccgtcctaat

SEQ ID NO: 613145 - DNA, 19 bp, Mus musculus
  siRNA target sequence for 2310003G12Rik (NM_023631.1,1184-1202).
ctgcaagccgtcctaattt

SEQ ID NO: 613146 - DNA, 19 bp, Mus musculus
  siRNA target sequence for 2310003G12Rik (NM_023631.1,1186-1204).
gcaagccgtcctaattttt

SEQ ID NO: 613147 - DNA, 19 bp, Mus musculus
  siRNA target sequence for 2310003G12Rik (NM_023631.1,1242-1260).
catcaacgtggtatctaga

SEQ ID NO: 613148 - DNA, 19 bp, Mus musculus
  siRNA target sequence for 2310003G12Rik (NM_023631.1,1270-1288).
gatcgtcagctccctttaa

SEQ ID NO: 613149 - DNA, 19 bp, Mus musculus
  siRNA target sequence for 2310003G12Rik (NM_023631.1,1311-1329).
gcctgaggctgacttgaaa

SEQ ID NO: 613150 - DNA, 19 bp, Mus musculus
  siRNA target sequence for 2310003G12Rik (NM_023631.1,1442-1460).
gtatgagcgtggagtttga

SEQ ID NO: 613151 - DNA, 19 bp, Mus musculus
  siRNA target sequence for 2310003G12Rik (NM_023631.1,1475-1493).
cgatcaaggatcttaagat

SEQ ID NO: 613152 - DNA, 19 bp, Mus musculus
  siRNA target sequence for 2310003G12Rik (NM_023631.1,1519-1537).
gtggtctctgcaagtcaaa

SEQ ID NO: 613153 - DNA, 19 bp, Mus musculus
  siRNA target sequence for 2310003G12Rik (NM_023631.1,1559-1577).
ggcaatgggacgaccaaat

SEQ ID NO: 613154 - DNA, 19 bp, Mus musculus
  siRNA target sequence for 2310003G12Rik (NM_023631.1,1654-1672).
cgacgcaccctcatcatca

SEQ ID NO: 613155 - DNA, 19 bp, Mus musculus
  siRNA target sequence for 2310003G12Rik (NM_023631.1,1702-1720).
cagcgatggctgaatgaaa

SEQ ID NO: 613156 - DNA, 19 bp, Mus musculus
  siRNA target sequence for 2310003G12Rik (NM_023631.1,1771-1789).
gatgacttccccatagaaa

SEQ ID NO: 613157 - DNA, 19 bp, Mus musculus
  siRNA target sequence for 2310003G12Rik (NM_023631.1,1793-1811).
cccaaggaatccagatgtt

SEQ ID NO: 613158 - DNA, 19 bp, Mus musculus
  siRNA target sequence for 2310003G12Rik (NM_023631.1,1847-1865).
cagttgggcacccaatcat

SEQ ID NO: 613159 - DNA, 19 bp, Mus musculus
  siRNA target sequence for 2310003G12Rik (NM_023631.1,1866-1884).
gcaccagtcgggtattaaa

SEQ ID NO: 613160 - DNA, 19 bp, Mus musculus
  siRNA target sequence for 2310003G12Rik (NM_023631.1,1869-1887).
ccagtcgggtattaaacat

SEQ ID NO: 613161 - DNA, 19 bp, Mus musculus
  siRNA target sequence for 2310003G12Rik (NM_023631.1,1985-2003).
catcacttgatgtatcaga

SEQ ID NO: 613162 - DNA, 19 bp, Mus musculus
  siRNA target sequence for 2310003G12Rik (NM_023631.1,2054-2072).
cgggagaaaatgatcacaa

SEQ ID NO: 613163 - DNA, 19 bp, Mus musculus
  siRNA target sequence for 2310003G12Rik (NM_023631.1,2129-2147).
ccgtggctgctgataccta

SEQ ID NO: 613164 - DNA, 19 bp, Mus musculus
  siRNA target sequence for 2310003G12Rik (NM_023631.1,2224-2242).
gaagccctagaacacaatt

SEQ ID NO: 613165 - DNA, 19 bp, Mus musculus
  siRNA target sequence for 2310003G12Rik (NM_023631.1,2228-2246).
ccctagaacacaattcttt

SEQ ID NO: 613166 - DNA, 19 bp, Mus musculus
  siRNA target sequence for 2310003G12Rik (NM_023631.1,2373-2391).
cctggctatcccacaaact

SEQ ID NO: 613167 - DNA, 19 bp, Mus musculus
  siRNA target sequence for 2310003G12Rik (NM_023631.1,2376-2394).
ggctatcccacaaactgaa

SEQ ID NO: 613168 - DNA, 19 bp, Mus musculus
  siRNA target sequence for 2310003G12Rik (NM_023631.1,2432-2450).
caacccacgtgcaggaatt

SEQ ID NO: 613169 - DNA, 19 bp, Mus musculus
  siRNA target sequence for 2310003G12Rik (NM_023631.1,2435-2453).
cccacgtgcaggaatttgt

SEQ ID NO: 613170 - DNA, 19 bp, Mus musculus
  siRNA target sequence for 2310003G12Rik (NM_023631.1,2437-2455).
cacgtgcaggaatttgtgt

SEQ ID NO: 613171 - DNA, 19 bp, Mus musculus
  siRNA target sequence for 2310003G12Rik (NM_023631.1,2483-2501).
ggatcgcctgccacatgaa

SEQ ID NO: 613172 - DNA, 19 bp, Mus musculus
  siRNA target sequence for 2310003G12Rik (NM_023631.1,2484-2502).
gatcgcctgccacatgaaa

SEQ ID NO: 613173 - DNA, 19 bp, Mus musculus
  siRNA target sequence for 2310003G12Rik (NM_023631.1,2515-2533).
gcatttgggggcaaagtga

SEQ ID NO: 613174 - DNA, 19 bp, Mus musculus
  siRNA target sequence for 2310003G12Rik (NM_023631.1,2601-2619).
catcctagaacgaagtgat

SEQ ID NO: 613175 - DNA, 19 bp, Mus musculus
  siRNA target sequence for 2310003G12Rik (NM_023631.1,2664-2682).
caaaattgggttcatgaat

SEQ ID NO: 613176 - DNA, 19 bp, Mus musculus
  siRNA target sequence for 2310003G12Rik (NM_023631.1,2701-2719).
gctgacgttgaatattaca

SEQ ID NO: 613177 - DNA, 19 bp, Mus musculus
  siRNA target sequence for 2310003G12Rik (NM_023631.1,2704-2722).
gacgttgaatattacacta

SEQ ID NO: 613178 - DNA, 19 bp, Mus musculus
  siRNA target sequence for 2310003G12Rik (NM_023631.1,2706-2724).
cgttgaatattacactaat

SEQ ID NO: 613179 - DNA, 19 bp, Mus musculus
  siRNA target sequence for 2310003G12Rik (NM_023631.1,2732-2750).
gcacccccgacgaatctga

SEQ ID NO: 613180 - DNA, 19 bp, Mus musculus
  siRNA target sequence for 2310003G12Rik (NM_023631.1,2761-2779).
gaatttgtcgtgctgaaat

SEQ ID NO: 613181 - DNA, 19 bp, Mus musculus
  siRNA target sequence for 2310003G12Rik (NM_023631.1,2789-2807).
catatcatattccgaattt

SEQ ID NO: 613182 - DNA, 19 bp, Mus musculus
  siRNA target sequence for 2310003G12Rik (NM_023631.1,2885-2903).
cggtggtcgtcgaagcata

SEQ ID NO: 613183 - DNA, 19 bp, Mus musculus
  siRNA target sequence for 2310003G12Rik (NM_023631.1,2907-2925).
cgctgcggtagcatctaaa

SEQ ID NO: 613184 - DNA, 19 bp, Mus musculus
  siRNA target sequence for 2310003G12Rik (NM_023631.1,2908-2926).
gctgcggtagcatctaaat

SEQ ID NO: 613185 - DNA, 19 bp, Mus musculus
  siRNA target sequence for 2310003G12Rik (NM_023631.1,2911-2929).
gcggtagcatctaaatgta

SEQ ID NO: 613186 - DNA, 19 bp, Mus musculus
  siRNA target sequence for 2310003G12Rik (NM_023631.1,2912-2930).
cggtagcatctaaatgtaa

SEQ ID NO: 613187 - DNA, 19 bp, Mus musculus
  siRNA target sequence for 2310003G12Rik (NM_023631.1,2914-2932).
gtagcatctaaatgtaact

SEQ ID NO: 613188 - DNA, 19 bp, Mus musculus
  siRNA target sequence for 2310003G12Rik (NM_023631.1,2987-3005).
cctataagcagacgtttaa

SEQ ID NO: 613189 - DNA, 19 bp, Mus musculus
  siRNA target sequence for 2310003G12Rik (NM_023631.1,3040-3058).
ctggagaagtcgtcattct

SEQ ID NO: 613190 - DNA, 19 bp, Mus musculus
  siRNA target sequence for 2310003G12Rik (NM_023631.1,3121-3139).
gctgtcgtccccatgaagt

SEQ ID NO: 613191 - DNA, 19 bp, Mus musculus
  siRNA target sequence for 2310003G12Rik (NM_023631.1,3122-3140).
ctgtcgtccccatgaagtt

SEQ ID NO: 613192 - DNA, 19 bp, Mus musculus
  siRNA target sequence for 2310003G12Rik (NM_023631.1,3151-3169).
gtccccatagccttctaca

SEQ ID NO: 613193 - DNA, 19 bp, Mus musculus
  siRNA target sequence for 2310003G12Rik (NM_023631.1,3242-3260).
gacaaggcctacacactaa

SEQ ID NO: 613194 - DNA, 19 bp, Mus musculus
  siRNA target sequence for 2310003G12Rik (NM_023631.1,3247-3265).
ggcctacacactaagatga

SEQ ID NO: 613195 - DNA, 19 bp, Mus musculus
  siRNA target sequence for 2310003G12Rik (NM_023631.1,3248-3266).
gcctacacactaagatgat

SEQ ID NO: 613196 - DNA, 19 bp, Mus musculus
  siRNA target sequence for 2310003G12Rik (NM_023631.1,3249-3267).
cctacacactaagatgatt

SEQ ID NO: 613197 - DNA, 19 bp, Mus musculus
  siRNA target sequence for 2310003G12Rik (NM_023631.1,3300-3318).
gtcgtacgtgcacttttct

SEQ ID NO: 613198 - DNA, 19 bp, Mus musculus
  siRNA target sequence for 2310003G12Rik (NM_023631.1,3302-3320).
cgtacgtgcacttttctga

SEQ ID NO: 613199 - DNA, 19 bp, Mus musculus
  siRNA target sequence for 2310003G12Rik (NM_023631.1,3303-3321).
gtacgtgcacttttctgaa

SEQ ID NO: 613200 - DNA, 19 bp, Mus musculus
  siRNA target sequence for 2310003G12Rik (NM_023631.1,3362-3380).
gttccatgggagcagatat

SEQ ID NO: 613201 - DNA, 19 bp, Mus musculus
  siRNA target sequence for 2310003G12Rik (NM_023631.1,3365-3383).
ccatgggagcagatatcaa

SEQ ID NO: 613202 - DNA, 19 bp, Mus musculus
  siRNA target sequence for 2310003G12Rik (NM_023631.1,3431-3449).
ggcccatcatcaggaaaaa

SEQ ID NO: 613203 - DNA, 19 bp, Mus musculus
  siRNA target sequence for 2310003G12Rik (NM_023631.1,3464-3482).
gggaggaatggattaaaat

SEQ ID NO: 613204 - DNA, 19 bp, Mus musculus
  siRNA target sequence for 2310003G12Rik (NM_023631.1,3759-3777).
gaaatactccccaaaaggt

SEQ ID NO: 613205 - DNA, 19 bp, Mus musculus
  siRNA target sequence for 2310003G12Rik (NM_023631.1,3813-3831).
ccccaccatcactgagata

SEQ ID NO: 613206 - DNA, 19 bp, Mus musculus
  siRNA target sequence for 2310003G12Rik (NM_023631.1,3871-3889).
cccatagccatctactcat

SEQ ID NO: 613207 - DNA, 19 bp, Mus musculus
  siRNA target sequence for 2310003G12Rik (NM_023631.1,3977-3995).
gagggctgagcgacatctt

SEQ ID NO: 613208 - DNA, 19 bp, Mus musculus
  siRNA target sequence for 2310003G12Rik (NM_023631.1,3988-4006).
gacatcttccccttgaata

SEQ ID NO: 613209 - DNA, 19 bp, Mus musculus
  siRNA target sequence for 2310003G12Rik (NM_023631.1,4035-4053).
ggcttgtacggatcagttt

SEQ ID NO: 613210 - DNA, 19 bp, Mus musculus
  siRNA target sequence for 2310003G12Rik (NM_023631.1,4036-4054).
gcttgtacggatcagttta

SEQ ID NO: 613211 - DNA, 19 bp, Mus musculus
  siRNA target sequence for 2310003G12Rik (NM_023631.1,4040-4058).
gtacggatcagtttactga

SEQ ID NO: 613212 - DNA, 19 bp, Mus musculus
  siRNA target sequence for 2310003G12Rik (NM_023631.1,4070-4088).
gagatgacccttcaacatt

SEQ ID NO: 613213 - DNA, 19 bp, Mus musculus
  siRNA target sequence for 2310003G12Rik (NM_023631.1,4072-4090).
gatgacccttcaacattca

SEQ ID NO: 613214 - DNA, 19 bp, Mus musculus
  siRNA target sequence for 2410004H02Rik (NM_145954.1,79-97).
cccagtacccgggagattt

SEQ ID NO: 613215 - DNA, 19 bp, Mus musculus
  siRNA target sequence for 2410004H02Rik (NM_145954.1,80-98).
ccagtacccgggagatttt

SEQ ID NO: 613216 - DNA, 19 bp, Mus musculus
  siRNA target sequence for 2410004H02Rik (NM_145954.1,311-329).
ctgcaaagatagcattcaa

SEQ ID NO: 613217 - DNA, 19 bp, Mus musculus
  siRNA target sequence for 2410004H02Rik (NM_145954.1,546-564).
gcagcccgtgggagtcatt

SEQ ID NO: 613218 - DNA, 19 bp, Mus musculus
  siRNA target sequence for 2410004H02Rik (NM_145954.1,574-592).
ctgccgactcctttctctt

SEQ ID NO: 613219 - DNA, 19 bp, Mus musculus
  siRNA target sequence for 2410004H02Rik (NM_145954.1,998-1016).
ctgtatgggatgaagctat

SEQ ID NO: 613220 - DNA, 19 bp, Mus musculus
  siRNA target sequence for 2410004H02Rik (NM_145954.1,1142-1160).
gccaagggggacaggtatt

SEQ ID NO: 613221 - DNA, 19 bp, Mus musculus
  siRNA target sequence for 2410004H02Rik (NM_145954.1,1489-1507).
ccagatggcctgtatgagt

SEQ ID NO: 613222 - DNA, 19 bp, Mus musculus
  siRNA target sequence for 2410004H02Rik (NM_145954.1,1490-1508).
cagatggcctgtatgagta

SEQ ID NO: 613223 - DNA, 19 bp, Mus musculus
  siRNA target sequence for 2410004H02Rik (NM_145954.1,1692-1710).
gcccatccaagattcttca

SEQ ID NO: 613224 - DNA, 19 bp, Mus musculus
  siRNA target sequence for 2410004H02Rik (NM_145954.1,1713-1731).
caaagtctccagctatgta

SEQ ID NO: 613225 - DNA, 19 bp, Mus musculus
  siRNA target sequence for 2410004H02Rik (NM_145954.1,1872-1890).
gctgacctcacaactagaa

SEQ ID NO: 613226 - DNA, 19 bp, Mus musculus
  siRNA target sequence for 2410004H02Rik (NM_145954.1,1896-1914).
cggagcagcgcctacagtt

SEQ ID NO: 613227 - DNA, 19 bp, Mus musculus
  siRNA target sequence for 2410004H02Rik (NM_145954.1,2120-2138).
gcaatgccgtggtcttagt

SEQ ID NO: 613228 - DNA, 19 bp, Mus musculus
  siRNA target sequence for 2410004H02Rik (NM_145954.1,2169-2187).
ggaggtctgccaggatata

SEQ ID NO: 613229 - DNA, 19 bp, Mus musculus
  siRNA target sequence for 2410004H02Rik (NM_145954.1,2172-2190).
ggtctgccaggatatagct

SEQ ID NO: 613230 - DNA, 19 bp, Mus musculus
  siRNA target sequence for 2410004H02Rik (NM_145954.1,2249-2267).
gctgtctggccttacatca

SEQ ID NO: 613231 - DNA, 19 bp, Mus musculus
  siRNA target sequence for 2610209N15Rik (NM_183286.1,75-93).
cctacgtgcttgtctacta

SEQ ID NO: 613232 - DNA, 19 bp, Mus musculus
  siRNA target sequence for 2610209N15Rik (NM_183286.1,420-438).
gccggactcgggaaacctt

SEQ ID NO: 613233 - DNA, 19 bp, Mus musculus
  siRNA target sequence for 2610209N15Rik (NM_183286.1,422-440).
cggactcgggaaaccttta

SEQ ID NO: 613234 - DNA, 19 bp, Mus musculus
  siRNA target sequence for 2610209N15Rik (NM_183286.1,423-441).
ggactcgggaaacctttaa

SEQ ID NO: 613235 - DNA, 19 bp, Mus musculus
  siRNA target sequence for 2610209N15Rik (NM_183286.1,426-444).
ctcgggaaacctttaacct

SEQ ID NO: 613236 - DNA, 19 bp, Mus musculus
  siRNA target sequence for 2610209N15Rik (NM_183286.1,516-534).
cccccagccgtgtggtaat

SEQ ID NO: 613237 - DNA, 19 bp, Mus musculus
  siRNA target sequence for 2610209N15Rik (NM_183286.1,517-535).
ccccagccgtgtggtaata

SEQ ID NO: 613238 - DNA, 19 bp, Mus musculus
  siRNA target sequence for 2610209N15Rik (NM_183286.1,519-537).
ccagccgtgtggtaatagt

SEQ ID NO: 613239 - DNA, 19 bp, Mus musculus
  siRNA target sequence for 2610209N15Rik (NM_183286.1,622-640).
gtacgctgacagcaaacta

SEQ ID NO: 613240 - DNA, 19 bp, Mus musculus
  siRNA target sequence for 2610209N15Rik (NM_183286.1,733-751).
gctcttcctgcgtcatctt

SEQ ID NO: 613241 - DNA, 19 bp, Mus musculus
  siRNA target sequence for 2610209N15Rik (NM_183286.1,755-773).
ggatggctgcgtcctattt

SEQ ID NO: 613242 - DNA, 19 bp, Mus musculus
  siRNA target sequence for 2610209N15Rik (NM_183286.1,756-774).
gatggctgcgtcctatttt

SEQ ID NO: 613243 - DNA, 19 bp, Mus musculus
  siRNA target sequence for 2810410C14Rik (NM_175471.2,458-476).
ctatcttgtccggtttaca

SEQ ID NO: 613244 - DNA, 19 bp, Mus musculus
  siRNA target sequence for 2810410C14Rik (NM_175471.2,521-539).
catcctacgaggtgtagta

SEQ ID NO: 613245 - DNA, 19 bp, Mus musculus
  siRNA target sequence for 2810410C14Rik (NM_175471.2,524-542).
cctacgaggtgtagtagat

SEQ ID NO: 613246 - DNA, 19 bp, Mus musculus
  siRNA target sequence for 2810410C14Rik (NM_175471.2,534-552).
gtagtagatggcttagaga

SEQ ID NO: 613247 - DNA, 19 bp, Mus musculus
  siRNA target sequence for 2810410C14Rik (NM_175471.2,584-602).
cactgcagaaggatacttt

SEQ ID NO: 613248 - DNA, 19 bp, Mus musculus
  siRNA target sequence for 2810410C14Rik (NM_175471.2,586-604).
ctgcagaaggatactttga

SEQ ID NO: 613249 - DNA, 19 bp, Mus musculus
  siRNA target sequence for 2810410C14Rik (NM_175471.2,595-613).
gatactttgacgttttaat

SEQ ID NO: 613250 - DNA, 19 bp, Mus musculus
  siRNA target sequence for 2810410C14Rik (NM_175471.2,689-707).
gcctttcggaagcttctta

SEQ ID NO: 613251 - DNA, 19 bp, Mus musculus
  siRNA target sequence for 2810410C14Rik (NM_175471.2,690-708).
cctttcggaagcttcttat

SEQ ID NO: 613252 - DNA, 19 bp, Mus musculus
  siRNA target sequence for 2810410C14Rik (NM_175471.2,695-713).
cggaagcttcttatatgaa

SEQ ID NO: 613253 - DNA, 19 bp, Mus musculus
  siRNA target sequence for 2810410C14Rik (NM_175471.2,804-822).
gatgatgagacctttgtca

SEQ ID NO: 613254 - DNA, 19 bp, Mus musculus
  siRNA target sequence for 2810410C14Rik (NM_175471.2,896-914).
gaacgtgcaaaccttcttt

SEQ ID NO: 613255 - DNA, 19 bp, Mus musculus
  siRNA target sequence for 2810410C14Rik (NM_175471.2,959-977).
ccgtgacaagacccatttt

SEQ ID NO: 613256 - DNA, 19 bp, Mus musculus
  siRNA target sequence for 2810410C14Rik (NM_175471.2,1023-1041).
cggagaaagccgtttacct

SEQ ID NO: 613257 - DNA, 19 bp, Mus musculus
  siRNA target sequence for 2810410C14Rik (NM_175471.2,1024-1042).
ggagaaagccgtttacctt

SEQ ID NO: 613258 - DNA, 19 bp, Mus musculus
  siRNA target sequence for 2810410C14Rik (NM_175471.2,1048-1066).
gtggctcacctgcatttaa

SEQ ID NO: 613259 - DNA, 19 bp, Mus musculus
  siRNA target sequence for 2810410C14Rik (NM_175471.2,1051-1069).
gctcacctgcatttaatga

SEQ ID NO: 613260 - DNA, 19 bp, Mus musculus
  siRNA target sequence for 3110030G19Rik (NM_023697.1,473-491).
ggctagacgtcctgatcaa

SEQ ID NO: 613261 - DNA, 19 bp, Mus musculus
  siRNA target sequence for 3110030G19Rik (NM_023697.1,475-493).
ctagacgtcctgatcaata

SEQ ID NO: 613262 - DNA, 19 bp, Mus musculus
  siRNA target sequence for 3110030G19Rik (NM_023697.1,592-610).
ctccttggactcctcaaaa

SEQ ID NO: 613263 - DNA, 19 bp, Mus musculus
  siRNA target sequence for 3110030G19Rik (NM_023697.1,594-612).
ccttggactcctcaaaagt

SEQ ID NO: 613264 - DNA, 19 bp, Mus musculus
  siRNA target sequence for 3110030G19Rik (NM_023697.1,595-613).
cttggactcctcaaaagtt

SEQ ID NO: 613265 - DNA, 19 bp, Mus musculus
  siRNA target sequence for 3110030G19Rik (NM_023697.1,634-652).
gtcgtttcttccaaacttt

SEQ ID NO: 613266 - DNA, 19 bp, Mus musculus
  siRNA target sequence for 3110030G19Rik (NM_023697.1,636-654).
cgtttcttccaaactttat

SEQ ID NO: 613267 - DNA, 19 bp, Mus musculus
  siRNA target sequence for 3110030G19Rik (NM_023697.1,684-702).
gaacagtgagcaaagctat

SEQ ID NO: 613268 - DNA, 19 bp, Mus musculus
  siRNA target sequence for 3110030G19Rik (NM_023697.1,689-707).
gtgagcaaagctataataa

SEQ ID NO: 613269 - DNA, 19 bp, Mus musculus
  siRNA target sequence for 3110030G19Rik (NM_023697.1,714-732).
ctgttatagtcgaagcaaa

SEQ ID NO: 613270 - DNA, 19 bp, Mus musculus
  siRNA target sequence for 3110030G19Rik (NM_023697.1,767-785).
gtcgcttagaaggaacaaa

SEQ ID NO: 613271 - DNA, 19 bp, Mus musculus
  siRNA target sequence for 3110030G19Rik (NM_023697.1,809-827).
ctggtattgtgcgaacaaa

SEQ ID NO: 613272 - DNA, 19 bp, Mus musculus
  siRNA target sequence for 3110030G19Rik (NM_023697.1,829-847).
ctagggaggcatattcaca

SEQ ID NO: 613273 - DNA, 19 bp, Mus musculus
  siRNA target sequence for 3110030G19Rik (NM_023697.1,858-876).
ggcaagaccacttttcaat

SEQ ID NO: 613274 - DNA, 19 bp, Mus musculus
  siRNA target sequence for 3110030G19Rik (NM_023697.1,863-881).
gaccacttttcaatttggt

SEQ ID NO: 613275 - DNA, 19 bp, Mus musculus
  siRNA target sequence for 3110030G19Rik (NM_023697.1,918-936).
ccagacttccatctattta

SEQ ID NO: 613276 - DNA, 19 bp, Mus musculus
  siRNA target sequence for 3110030G19Rik (NM_023697.1,997-1015).
gagctcttgcccaaagcta

SEQ ID NO: 613277 - DNA, 19 bp, Mus musculus
  siRNA target sequence for 3110030G19Rik (NM_023697.1,1057-1075).
gtgatggttggcattctaa

SEQ ID NO: 613278 - DNA, 19 bp, Mus musculus
  siRNA target sequence for 3110049J23Rik (NM_026085.1,289-307).
gaagctcccaatcttcata

SEQ ID NO: 613279 - DNA, 19 bp, Mus musculus
  siRNA target sequence for 3110049J23Rik (NM_026085.1,386-404).
gctcatcaggacattgcaa

SEQ ID NO: 613280 - DNA, 19 bp, Mus musculus
  siRNA target sequence for 3110049J23Rik (NM_026085.1,395-413).
gacattgcaagggaaatga

SEQ ID NO: 613281 - DNA, 19 bp, Mus musculus
  siRNA target sequence for 4930447P04Rik (NM_178239.2,213-231).
cagagaccttacatctact

SEQ ID NO: 613282 - DNA, 19 bp, Mus musculus
  siRNA target sequence for 4930447P04Rik (NM_178239.2,240-258).
gtcctcgaggcgaatctca

SEQ ID NO: 613283 - DNA, 19 bp, Mus musculus
  siRNA target sequence for 4930447P04Rik (NM_178239.2,242-260).
cctcgaggcgaatctcatt

SEQ ID NO: 613284 - DNA, 19 bp, Mus musculus
  siRNA target sequence for 4930447P04Rik (NM_178239.2,243-261).
ctcgaggcgaatctcatta

SEQ ID NO: 613285 - DNA, 19 bp, Mus musculus
  siRNA target sequence for 4930447P04Rik (NM_178239.2,267-285).
cccctggtgatatttgttt

SEQ ID NO: 613286 - DNA, 19 bp, Mus musculus
  siRNA target sequence for 4930447P04Rik (NM_178239.2,326-344).
gaacttctggaggttcata

SEQ ID NO: 613287 - DNA, 19 bp, Mus musculus
  siRNA target sequence for 4930447P04Rik (NM_178239.2,401-419).
cctcggggattcctcatat

SEQ ID NO: 613288 - DNA, 19 bp, Mus musculus
  siRNA target sequence for 4930447P04Rik (NM_178239.2,412-430).
cctcatatgccaagttcaa

SEQ ID NO: 613289 - DNA, 19 bp, Mus musculus
  siRNA target sequence for 4930447P04Rik (NM_178239.2,542-560).
cccctgggtaggagatctt

SEQ ID NO: 613290 - DNA, 19 bp, Mus musculus
  siRNA target sequence for 4930447P04Rik (NM_178239.2,562-580).
gggagaagataatggttat

SEQ ID NO: 613291 - DNA, 19 bp, Mus musculus
  siRNA target sequence for 4930447P04Rik (NM_178239.2,564-582).
gagaagataatggttatgt

SEQ ID NO: 613292 - DNA, 19 bp, Mus musculus
  siRNA target sequence for 4930447P04Rik (NM_178239.2,624-642).
cccttgccctccaagttca

SEQ ID NO: 613293 - DNA, 19 bp, Mus musculus
  siRNA target sequence for 4930447P04Rik (NM_178239.2,798-816).
cggctgattgaatttgaca

SEQ ID NO: 613294 - DNA, 19 bp, Mus musculus
  siRNA target sequence for 4930447P04Rik (NM_178239.2,813-831).
gacattacagactccaata

SEQ ID NO: 613295 - DNA, 19 bp, Mus musculus
  siRNA target sequence for 4930447P04Rik (NM_178239.2,844-862).
ctggtgatgttgtattcat

SEQ ID NO: 613296 - DNA, 19 bp, Mus musculus
  siRNA target sequence for 4930447P04Rik (NM_178239.2,847-865).
gtgatgttgtattcatttt

SEQ ID NO: 613297 - DNA, 19 bp, Mus musculus
  siRNA target sequence for 4930447P04Rik (NM_178239.2,915-933).
ctggaccccaatcagtttt

SEQ ID NO: 613298 - DNA, 19 bp, Mus musculus
  siRNA target sequence for 4930447P04Rik (NM_178239.2,918-936).
gaccccaatcagtttttca

SEQ ID NO: 613299 - DNA, 19 bp, Mus musculus
  siRNA target sequence for 4930447P04Rik (NM_178239.2,1257-1275).
cgggccttctccattgctt

SEQ ID NO: 613300 - DNA, 19 bp, Mus musculus
  siRNA target sequence for 4930447P04Rik (NM_178239.2,1459-1477).
caccagacacacccattat

SEQ ID NO: 613301 - DNA, 19 bp, Mus musculus
  siRNA target sequence for 4930447P04Rik (NM_178239.2,1462-1480).
cagacacacccattatcat

SEQ ID NO: 613302 - DNA, 19 bp, Mus musculus
  siRNA target sequence for 4930457P18Rik (NM_026648.1,213-231).
ggccagggatccgtaaaga

SEQ ID NO: 613303 - DNA, 19 bp, Mus musculus
  siRNA target sequence for 4930457P18Rik (NM_026648.1,260-278).
gcgggtccttgcacaacat

SEQ ID NO: 613304 - DNA, 19 bp, Mus musculus
  siRNA target sequence for 4930457P18Rik (NM_026648.1,365-383).
cccaggatgacgaaacagt

SEQ ID NO: 613305 - DNA, 19 bp, Mus musculus
  siRNA target sequence for 4930457P18Rik (NM_026648.1,375-393).
cgaaacagttccttcaaaa

SEQ ID NO: 613306 - DNA, 19 bp, Mus musculus
  siRNA target sequence for 4930457P18Rik (NM_026648.1,431-449).
ctgaacgacaccctgtatt

SEQ ID NO: 613307 - DNA, 19 bp, Mus musculus
  siRNA target sequence for 4930457P18Rik (NM_026648.1,920-938).
cgtctgaagcacttgactt

SEQ ID NO: 613308 - DNA, 19 bp, Mus musculus
  siRNA target sequence for 4930457P18Rik (NM_026648.1,921-939).
gtctgaagcacttgactta

SEQ ID NO: 613309 - DNA, 19 bp, Mus musculus
  siRNA target sequence for 4930457P18Rik (NM_026648.1,1108-1126).
gcggaagaaggcaagagat

SEQ ID NO: 613310 - DNA, 19 bp, Mus musculus
  siRNA target sequence for 4930457P18Rik (NM_026648.1,1381-1399).
cccggaagagtctacatct

SEQ ID NO: 613311 - DNA, 19 bp, Mus musculus
  siRNA target sequence for 4930457P18Rik (NM_026648.1,1705-1723).
ggtgcctttcacagacata

SEQ ID NO: 613312 - DNA, 19 bp, Mus musculus
  siRNA target sequence for 4930457P18Rik (NM_026648.1,1706-1724).
gtgcctttcacagacatat

SEQ ID NO: 613313 - DNA, 19 bp, Mus musculus
  siRNA target sequence for 4930457P18Rik (NM_026648.1,1708-1726).
gcctttcacagacatatgt

SEQ ID NO: 613314 - DNA, 19 bp, Mus musculus
  siRNA target sequence for 4930457P18Rik (NM_026648.1,1720-1738).
catatgtaagccaatagca

SEQ ID NO: 613315 - DNA, 19 bp, Mus musculus
  siRNA target sequence for 4930457P18Rik (NM_026648.1,1992-2010).
cccgggtaggcctagaaga

SEQ ID NO: 613316 - DNA, 19 bp, Mus musculus
  siRNA target sequence for 4930457P18Rik (NM_026648.1,1994-2012).
cgggtaggcctagaagata

SEQ ID NO: 613317 - DNA, 19 bp, Mus musculus
  siRNA target sequence for 4930457P18Rik (NM_026648.1,1996-2014).
ggtaggcctagaagatatt

SEQ ID NO: 613318 - DNA, 19 bp, Mus musculus
  siRNA target sequence for 4930457P18Rik (NM_026648.1,2000-2018).
ggcctagaagatattgaat

SEQ ID NO: 613319 - DNA, 19 bp, Mus musculus
  siRNA target sequence for 4930457P18Rik (NM_026648.1,2001-2019).
gcctagaagatattgaatt

SEQ ID NO: 613320 - DNA, 19 bp, Mus musculus
  siRNA target sequence for 5430405K24Rik (NM_027790.1,312-330).
caagacagcggatgagaat

SEQ ID NO: 613321 - DNA, 19 bp, Mus musculus
  siRNA target sequence for 5430405K24Rik (NM_027790.1,437-455).
gccggaagcaggagaatgt

SEQ ID NO: 613322 - DNA, 19 bp, Mus musculus
  siRNA target sequence for 5430405K24Rik (NM_027790.1,709-727).
ccctacatggagaacagaa

SEQ ID NO: 613323 - DNA, 19 bp, Mus musculus
  siRNA target sequence for 5430405K24Rik (NM_027790.1,728-746).
ggggaggcagcgttgttct

SEQ ID NO: 613324 - DNA, 19 bp, Mus musculus
  siRNA target sequence for 5430405K24Rik (NM_027790.1,752-770).
cctccggagtggcttatgt

SEQ ID NO: 613325 - DNA, 19 bp, Mus musculus
  siRNA target sequence for 5430405K24Rik (NM_027790.1,753-771).
ctccggagtggcttatgta

SEQ ID NO: 613326 - DNA, 19 bp, Mus musculus
  siRNA target sequence for 5430405K24Rik (NM_027790.1,764-782).
cttatgtaccagttccaaa

SEQ ID NO: 613327 - DNA, 19 bp, Mus musculus
  siRNA target sequence for 5430405K24Rik (NM_027790.1,779-797).
caaaactgggcgtctacaa

SEQ ID NO: 613328 - DNA, 19 bp, Mus musculus
  siRNA target sequence for 5430405K24Rik (NM_027790.1,873-891).
ctgcctagtgccaggaatt

SEQ ID NO: 613329 - DNA, 19 bp, Mus musculus
  siRNA target sequence for 5430405K24Rik (NM_027790.1,875-893).
gcctagtgccaggaattat

SEQ ID NO: 613330 - DNA, 19 bp, Mus musculus
  siRNA target sequence for 5430405K24Rik (NM_027790.1,877-895).
ctagtgccaggaattatca

SEQ ID NO: 613331 - DNA, 19 bp, Mus musculus
  siRNA target sequence for 5430405K24Rik (NM_027790.1,880-898).
gtgccaggaattatcaaga

SEQ ID NO: 613332 - DNA, 19 bp, Mus musculus
  siRNA target sequence for 5430405K24Rik (NM_027790.1,1063-1081).
ggcttctcctctaaactgt

SEQ ID NO: 613333 - DNA, 19 bp, Mus musculus
  siRNA target sequence for 5730466C23Rik (NM_027469.1,373-391).
gccgaggagatgaacatca

SEQ ID NO: 613334 - DNA, 19 bp, Mus musculus
  siRNA target sequence for 5730466C23Rik (NM_027469.1,466-484).
ccgctcacccggcagatat

SEQ ID NO: 613335 - DNA, 19 bp, Mus musculus
  siRNA target sequence for 5730466C23Rik (NM_027469.1,485-503).
ccgtgaaggctctaggaat

SEQ ID NO: 613336 - DNA, 19 bp, Mus musculus
  siRNA target sequence for 5730466C23Rik (NM_027469.1,765-783).
gcacaccatgggtacctat

SEQ ID NO: 613337 - DNA, 19 bp, Mus musculus
  siRNA target sequence for 5730466C23Rik (NM_027469.1,770-788).
ccatgggtacctatatcgt

SEQ ID NO: 613338 - DNA, 19 bp, Mus musculus
  siRNA target sequence for 5730466C23Rik (NM_027469.1,1039-1057).
ctctatgggcagaagaact

SEQ ID NO: 613339 - DNA, 19 bp, Mus musculus
  siRNA target sequence for 5730466C23Rik (NM_027469.1,1137-1155).
cccactgctttacttgaaa

SEQ ID NO: 613340 - DNA, 19 bp, Mus musculus
  siRNA target sequence for 5730466C23Rik (NM_027469.1,1141-1159).
ctgctttacttgaaaggta

SEQ ID NO: 613341 - DNA, 19 bp, Mus musculus
  siRNA target sequence for 5730466C23Rik (NM_027469.1,1275-1293).
gagcgtggtagatgctatt

SEQ ID NO: 613342 - DNA, 19 bp, Mus musculus
  siRNA target sequence for 5730466C23Rik (NM_027469.1,1277-1295).
gcgtggtagatgctattaa

SEQ ID NO: 613343 - DNA, 19 bp, Mus musculus
  siRNA target sequence for 5730466C23Rik (NM_027469.1,1278-1296).
cgtggtagatgctattaaa

SEQ ID NO: 613344 - DNA, 19 bp, Mus musculus
  siRNA target sequence for 5730466C23Rik (NM_027469.1,1282-1300).
gtagatgctattaaaaggt

SEQ ID NO: 613345 - DNA, 19 bp, Mus musculus
  siRNA target sequence for 5730466C23Rik (NM_027469.1,1355-1373).
ccaaccagaatctaagtga

SEQ ID NO: 613346 - DNA, 19 bp, Mus musculus
  siRNA target sequence for 5730466C23Rik (NM_027469.1,1356-1374).
caaccagaatctaagtgaa

SEQ ID NO: 613347 - DNA, 19 bp, Mus musculus
  siRNA target sequence for 5730466C23Rik (NM_027469.1,1359-1377).
ccagaatctaagtgaaaca

SEQ ID NO: 613348 - DNA, 19 bp, Mus musculus
  siRNA target sequence for AI256775 (NM_178916.2,929-947).
ggcagagaagaggacatta

SEQ ID NO: 613349 - DNA, 19 bp, Mus musculus
  siRNA target sequence for AI256775 (NM_178916.2,1000-1018).
ctaccacaaaggggaatat

SEQ ID NO: 613350 - DNA, 19 bp, Mus musculus
  siRNA target sequence for AI256775 (NM_178916.2,1003-1021).
ccacaaaggggaatatcat

SEQ ID NO: 613351 - DNA, 19 bp, Mus musculus
  siRNA target sequence for AI256775 (NM_178916.2,1027-1045).
ggacattcgctgttaccat

SEQ ID NO: 613352 - DNA, 19 bp, Mus musculus
  siRNA target sequence for AI256775 (NM_178916.2,1028-1046).
gacattcgctgttaccatt

SEQ ID NO: 613353 - DNA, 19 bp, Mus musculus
  siRNA target sequence for AI256775 (NM_178916.2,1047-1065).
ctggagggcccttacactt

SEQ ID NO: 613354 - DNA, 19 bp, Mus musculus
  siRNA target sequence for AI256775 (NM_178916.2,1084-1102).
caatggacaatcatgtata

SEQ ID NO: 613355 - DNA, 19 bp, Mus musculus
  siRNA target sequence for AI256775 (NM_178916.2,1103-1121).
gtttgcccctggcataaat

SEQ ID NO: 613356 - DNA, 19 bp, Mus musculus
  siRNA target sequence for AI256775 (NM_178916.2,1110-1128).
cctggcataaatataaaat

SEQ ID NO: 613357 - DNA, 19 bp, Mus musculus
  siRNA target sequence for AI256775 (NM_178916.2,1114-1132).
gcataaatataaaatcact

SEQ ID NO: 613358 - DNA, 19 bp, Mus musculus
  siRNA target sequence for AI256775 (NM_178916.2,1149-1167).
ggattataccagtctataa

SEQ ID NO: 613359 - DNA, 19 bp, Mus musculus
  siRNA target sequence for AI256775 (NM_178916.2,1150-1168).
gattataccagtctataaa

SEQ ID NO: 613360 - DNA, 19 bp, Mus musculus
  siRNA target sequence for Akr1c13 (NM_013778.1,523-541).
ctggagcgaatcctcaata

SEQ ID NO: 613361 - DNA, 19 bp, Mus musculus
  siRNA target sequence for Akr1c13 (NM_013778.1,753-771).
gcgaagtcctgccttgatt

SEQ ID NO: 613362 - DNA, 19 bp, Mus musculus
  siRNA target sequence for Akr1c6 (NM_030611.1,18-36).
gacagtgcgtctaagtgat

SEQ ID NO: 613363 - DNA, 19 bp, Mus musculus
  siRNA target sequence for Akr1c6 (NM_030611.1,657-675).
gggaagccatcgtgaaaaa

SEQ ID NO: 613364 - DNA, 19 bp, Mus musculus
  siRNA target sequence for Akr1c6 (NM_030611.1,659-677).
gaagccatcgtgaaaaaca

SEQ ID NO: 613365 - DNA, 19 bp, Mus musculus
  siRNA target sequence for Akr1c6 (NM_030611.1,888-906).
cgatgacctgaataaaaat

SEQ ID NO: 613366 - DNA, 19 bp, Mus musculus
  siRNA target sequence for Akr1c6 (NM_030611.1,920-938).
gtggttctagctttaagga

SEQ ID NO: 613367 - DNA, 19 bp, Mus musculus
  siRNA target sequence for Akr1c6 (NM_030611.1,937-955).
gaccatcctgattttccat

SEQ ID NO: 613368 - DNA, 19 bp, Mus musculus
  siRNA target sequence for Akr1e1 (NM_018859.1,92-110).
cagttaagttggctatcaa

SEQ ID NO: 613369 - DNA, 19 bp, Mus musculus
  siRNA target sequence for Akr1e1 (NM_018859.1,115-133).
ggctaccggcacttcgatt

SEQ ID NO: 613370 - DNA, 19 bp, Mus musculus
  siRNA target sequence for Akr1e1 (NM_018859.1,126-144).
cttcgattgtgcttactta

SEQ ID NO: 613371 - DNA, 19 bp, Mus musculus
  siRNA target sequence for Akr1e1 (NM_018859.1,137-155).
cttacttataccacaatga

SEQ ID NO: 613372 - DNA, 19 bp, Mus musculus
  siRNA target sequence for Akr1e1 (NM_018859.1,162-180).
ggtgggaatgggaatcagt

SEQ ID NO: 613373 - DNA, 19 bp, Mus musculus
  siRNA target sequence for Akr1e1 (NM_018859.1,499-517).
cttgagaggcttttggata

SEQ ID NO: 613374 - DNA, 19 bp, Mus musculus
  siRNA target sequence for Akr1e1 (NM_018859.1,528-546).
gagggtcaggccgataact

SEQ ID NO: 613375 - DNA, 19 bp, Mus musculus
  siRNA target sequence for Akr1e1 (NM_018859.1,530-548).
gggtcaggccgataactaa

SEQ ID NO: 613376 - DNA, 19 bp, Mus musculus
  siRNA target sequence for Akr1e1 (NM_018859.1,539-557).
cgataactaaccagattga

SEQ ID NO: 613377 - DNA, 19 bp, Mus musculus
  siRNA target sequence for Akr1e1 (NM_018859.1,540-558).
gataactaaccagattgaa

SEQ ID NO: 613378 - DNA, 19 bp, Mus musculus
  siRNA target sequence for Akr1e1 (NM_018859.1,545-563).
ctaaccagattgaatgtca

SEQ ID NO: 613379 - DNA, 19 bp, Mus musculus
  siRNA target sequence for Akr1e1 (NM_018859.1,556-574).
gaatgtcacccatatctta

SEQ ID NO: 613380 - DNA, 19 bp, Mus musculus
  siRNA target sequence for Akr1e1 (NM_018859.1,650-668).
gaggtgggtttcacttgat

SEQ ID NO: 613381 - DNA, 19 bp, Mus musculus
  siRNA target sequence for Akr1e1 (NM_018859.1,670-688).
gatgatactgtcattcgaa

SEQ ID NO: 613382 - DNA, 19 bp, Mus musculus
  siRNA target sequence for Akr1e1 (NM_018859.1,679-697).
gtcattcgaaagattgcaa

SEQ ID NO: 613383 - DNA, 19 bp, Mus musculus
  siRNA target sequence for Akr1e1 (NM_018859.1,713-731).
ctcctgctcagattttgat

SEQ ID NO: 613384 - DNA, 19 bp, Mus musculus
  siRNA target sequence for Akr1e1 (NM_018859.1,777-795).
caccccaagtcggattaga

SEQ ID NO: 613385 - DNA, 19 bp, Mus musculus
  siRNA target sequence for Akr1e1 (NM_018859.1,785-803).
gtcggattagagagaatat

SEQ ID NO: 613386 - DNA, 19 bp, Mus musculus
  siRNA target sequence for Aldh1a7 (NM_011921.1,397-415).
catacctgttggatgtaga

SEQ ID NO: 613387 - DNA, 19 bp, Mus musculus
  siRNA target sequence for Aldh1a7 (NM_011921.1,416-434).
gatcagcataaaagcatta

SEQ ID NO: 613388 - DNA, 19 bp, Mus musculus
  siRNA target sequence for Aldh1a7 (NM_011921.1,547-565).
cttggaatggtccattgat

SEQ ID NO: 613389 - DNA, 19 bp, Mus musculus
  siRNA target sequence for Aldh1a7 (NM_011921.1,551-569).
gaatggtccattgattata

SEQ ID NO: 613390 - DNA, 19 bp, Mus musculus
  siRNA target sequence for Aldh1a7 (NM_011921.1,932-950).
cttccaccagggtcagatt

SEQ ID NO: 613391 - DNA, 19 bp, Mus musculus
  siRNA target sequence for Aldh1a7 (NM_011921.1,958-976).
cagcgtccaggctttttgt

SEQ ID NO: 613392 - DNA, 19 bp, Mus musculus
  siRNA target sequence for Aldh1a7 (NM_011921.1,961-979).
cgtccaggctttttgttga

SEQ ID NO: 613393 - DNA, 19 bp, Mus musculus
  siRNA target sequence for Aldh1a7 (NM_011921.1,1017-1035).
gagcgggctaagaaataca

SEQ ID NO: 613394 - DNA, 19 bp, Mus musculus
  siRNA target sequence for Aldh1a7 (NM_011921.1,1019-1037).
gcgggctaagaaatacatt

SEQ ID NO: 613395 - DNA, 19 bp, Mus musculus
  siRNA target sequence for Aldh1a7 (NM_011921.1,1271-1289).
gaagtttaaatctatggat

SEQ ID NO: 613396 - DNA, 19 bp, Mus musculus
  siRNA target sequence for Aldh1b1 (NM_028270.2,177-195).
ggcaggactacctcttact

SEQ ID NO: 613397 - DNA, 19 bp, Mus musculus
  siRNA target sequence for Aldh1b1 (NM_028270.2,273-291).
catgatgcggtcagcaaaa

SEQ ID NO: 613398 - DNA, 19 bp, Mus musculus
  siRNA target sequence for Aldh1b1 (NM_028270.2,452-470).
gaaccgcctagctgatctt

SEQ ID NO: 613399 - DNA, 19 bp, Mus musculus
  siRNA target sequence for Aldh1b1 (NM_028270.2,510-528).
ctagataacgggaaacctt

SEQ ID NO: 613400 - DNA, 19 bp, Mus musculus
  siRNA target sequence for Aldh1b1 (NM_028270.2,595-613).
ctgacaagtggcatggtaa

SEQ ID NO: 613401 - DNA, 19 bp, Mus musculus
  siRNA target sequence for Aldh1b1 (NM_028270.2,831-849).
ccaggagtggtgaacatca

SEQ ID NO: 613402 - DNA, 19 bp, Mus musculus
  siRNA target sequence for Aldh1b1 (NM_028270.2,890-908).
gcacatggatgtggataaa

SEQ ID NO: 613403 - DNA, 19 bp, Mus musculus
  siRNA target sequence for Aldh1b1 (NM_028270.2,933-951).
gtaggccacctgattcaga

SEQ ID NO: 613404 - DNA, 19 bp, Mus musculus
  siRNA target sequence for Aldh1b1 (NM_028270.2,1124-1142).
gtccatctaccgtgagttt

SEQ ID NO: 613405 - DNA, 19 bp, Mus musculus
  siRNA target sequence for Aldh1b1 (NM_028270.2,1126-1144).
ccatctaccgtgagtttct

SEQ ID NO: 613406 - DNA, 19 bp, Mus musculus
  siRNA target sequence for Aldh1b1 (NM_028270.2,1179-1197).
gtggggaacccctttgagt

SEQ ID NO: 613407 - DNA, 19 bp, Mus musculus
  siRNA target sequence for Aldh1b1 (NM_028270.2,1539-1557).
gtgtgggtgaacacctata

SEQ ID NO: 613408 - DNA, 19 bp, Mus musculus
  siRNA target sequence for Aldh1b1 (NM_028270.2,1544-1562).
ggtgaacacctataacatt

SEQ ID NO: 613409 - DNA, 19 bp, Mus musculus
  siRNA target sequence for Aldh1b1 (NM_028270.2,1576-1594).
cgccattcggaggctttaa

SEQ ID NO: 613410 - DNA, 19 bp, Mus musculus
  siRNA target sequence for Aldh8a1 (NM_178713.3,77-95).
gttggagaactttataggt

SEQ ID NO: 613411 - DNA, 19 bp, Mus musculus
  siRNA target sequence for Aldh8a1 (NM_178713.3,101-119).
gtttttaccctgtaactca

SEQ ID NO: 613412 - DNA, 19 bp, Mus musculus
  siRNA target sequence for Aldh8a1 (NM_178713.3,269-287).
gaacaggctggctgatgta

SEQ ID NO: 613413 - DNA, 19 bp, Mus musculus
  siRNA target sequence for Aldh8a1 (NM_178713.3,476-494).
caccccggtgggaattgct

SEQ ID NO: 613414 - DNA, 19 bp, Mus musculus
  siRNA target sequence for Aldh8a1 (NM_178713.3,500-518).
gatcagcccttggaattta

SEQ ID NO: 613415 - DNA, 19 bp, Mus musculus
  siRNA target sequence for Aldh8a1 (NM_178713.3,527-545).
cctgctgacctggaagata

SEQ ID NO: 613416 - DNA, 19 bp, Mus musculus
  siRNA target sequence for Aldh8a1 (NM_178713.3,610-628).
cctggatgttttgtaaact

SEQ ID NO: 613417 - DNA, 19 bp, Mus musculus
  siRNA target sequence for Aldh8a1 (NM_178713.3,613-631).
ggatgttttgtaaactctt

SEQ ID NO: 613418 - DNA, 19 bp, Mus musculus
  siRNA target sequence for Aldh8a1 (NM_178713.3,649-667).
caccaggtgtgatcaacat

SEQ ID NO: 613419 - DNA, 19 bp, Mus musculus
  siRNA target sequence for Aldh8a1 (NM_178713.3,652-670).
caggtgtgatcaacattgt

SEQ ID NO: 613420 - DNA, 19 bp, Mus musculus
  siRNA target sequence for Aldh8a1 (NM_178713.3,821-839).
gaatcctgctatcatcttt

SEQ ID NO: 613421 - DNA, 19 bp, Mus musculus
  siRNA target sequence for Aldh8a1 (NM_178713.3,876-894).
gttaggtccagctttgcta

SEQ ID NO: 613422 - DNA, 19 bp, Mus musculus
  siRNA target sequence for Aldh8a1 (NM_178713.3,916-934).
gtaccagtagaatctttgt

SEQ ID NO: 613423 - DNA, 19 bp, Mus musculus
  siRNA target sequence for Aldh8a1 (NM_178713.3,940-958).
gaagcatctacagtgaatt

SEQ ID NO: 613424 - DNA, 19 bp, Mus musculus
  siRNA target sequence for Aldh8a1 (NM_178713.3,943-961).
gcatctacagtgaatttct

SEQ ID NO: 613425 - DNA, 19 bp, Mus musculus
  siRNA target sequence for Aldh8a1 (NM_178713.3,1055-1073).
ggagaaagtcagaagttat

SEQ ID NO: 613426 - DNA, 19 bp, Mus musculus
  siRNA target sequence for Aldh8a1 (NM_178713.3,1064-1082).
cagaagttatgtcttgaaa

SEQ ID NO: 613427 - DNA, 19 bp, Mus musculus
  siRNA target sequence for Aldh8a1 (NM_178713.3,1092-1110).
gagggtgcccggattctct

SEQ ID NO: 613428 - DNA, 19 bp, Mus musculus
  siRNA target sequence for Aldh8a1 (NM_178713.3,1169-1187).
gcttcccacggtgataaca

SEQ ID NO: 613429 - DNA, 19 bp, Mus musculus
  siRNA target sequence for Aldh8a1 (NM_178713.3,1177-1195).
cggtgataacagacattaa

SEQ ID NO: 613430 - DNA, 19 bp, Mus musculus
  siRNA target sequence for Aldh8a1 (NM_178713.3,1241-1259).
gtgtgttgttccgtttgat

SEQ ID NO: 613431 - DNA, 19 bp, Mus musculus
  siRNA target sequence for Aldh8a1 (NM_178713.3,1263-1281).
gaagaggaagtgattacga

SEQ ID NO: 613432 - DNA, 19 bp, Mus musculus
  siRNA target sequence for Aldh8a1 (NM_178713.3,1280-1298).
gagagctaacagtgttaga

SEQ ID NO: 613433 - DNA, 19 bp, Mus musculus
  siRNA target sequence for Aldh8a1 (NM_178713.3,1463-1481).
ggactcatatgacttcttt

SEQ ID NO: 613434 - DNA, 19 bp, Mus musculus
  siRNA target sequence for Aldh8a1 (NM_178713.3,1464-1482).
gactcatatgacttcttta

SEQ ID NO: 613435 - DNA, 19 bp, Mus musculus
  siRNA target sequence for Aldh8a1 (NM_178713.3,1468-1486).
catatgacttctttactga

SEQ ID NO: 613436 - DNA, 19 bp, Mus musculus
  siRNA target sequence for Aldh8a1 (NM_178713.3,1485-1503).
gaaataaaaaccattacca

SEQ ID NO: 613437 - DNA, 19 bp, Mus musculus
  siRNA target sequence for BC003479 (NM_145428.1,46-64).
ccgtcctttaggaaaggta

SEQ ID NO: 613438 - DNA, 19 bp, Mus musculus
  siRNA target sequence for BC003479 (NM_145428.1,47-65).
cgtcctttaggaaaggtat

SEQ ID NO: 613439 - DNA, 19 bp, Mus musculus
  siRNA target sequence for BC003479 (NM_145428.1,277-295).
ctctgtggacgaaatgtga

SEQ ID NO: 613440 - DNA, 19 bp, Mus musculus
  siRNA target sequence for BC003479 (NM_145428.1,378-396).
cgcggatcctggtactatt

SEQ ID NO: 613441 - DNA, 19 bp, Mus musculus
  siRNA target sequence for BC003479 (NM_145428.1,381-399).
ggatcctggtactattgct

SEQ ID NO: 613442 - DNA, 19 bp, Mus musculus
  siRNA target sequence for BC003479 (NM_145428.1,436-454).
gtggacgttctcatcaata

SEQ ID NO: 613443 - DNA, 19 bp, Mus musculus
  siRNA target sequence for BC003479 (NM_145428.1,438-456).
ggacgttctcatcaataat

SEQ ID NO: 613444 - DNA, 19 bp, Mus musculus
  siRNA target sequence for BC003479 (NM_145428.1,441-459).
cgttctcatcaataatgct

SEQ ID NO: 613445 - DNA, 19 bp, Mus musculus
  siRNA target sequence for BC003479 (NM_145428.1,468-486).
ctaccgtggtaccattagt

SEQ ID NO: 613446 - DNA, 19 bp, Mus musculus
  siRNA target sequence for BC003479 (NM_145428.1,471-489).
ccgtggtaccattagtgat

SEQ ID NO: 613447 - DNA, 19 bp, Mus musculus
  siRNA target sequence for BC003479 (NM_145428.1,472-490).
cgtggtaccattagtgata

SEQ ID NO: 613448 - DNA, 19 bp, Mus musculus
  siRNA target sequence for BC003479 (NM_145428.1,476-494).
gtaccattagtgataccat

SEQ ID NO: 613449 - DNA, 19 bp, Mus musculus
  siRNA target sequence for BC003479 (NM_145428.1,619-637).
ggcaagatcagcattcctt

SEQ ID NO: 613450 - DNA, 19 bp, Mus musculus
  siRNA target sequence for BC003479 (NM_145428.1,620-638).
gcaagatcagcattccttt

SEQ ID NO: 613451 - DNA, 19 bp, Mus musculus
  siRNA target sequence for BC003479 (NM_145428.1,634-652).
cctttccgatcggcatatt

SEQ ID NO: 613452 - DNA, 19 bp, Mus musculus
  siRNA target sequence for BC003479 (NM_145428.1,740-758).
ctggctacatccataccaa

SEQ ID NO: 613453 - DNA, 19 bp, Mus musculus
  siRNA target sequence for BC003479 (NM_145428.1,756-774).
caacctctctgtaaatgct

SEQ ID NO: 613454 - DNA, 19 bp, Mus musculus
  siRNA target sequence for BC003479 (NM_145428.1,980-998).
gaaaagagcggaaatccaa

SEQ ID NO: 613455 - DNA, 19 bp, Mus musculus
  siRNA target sequence for BC009118 (NM_145595.1,112-130).
gggcggtagcccagctaat

SEQ ID NO: 613456 - DNA, 19 bp, Mus musculus
  siRNA target sequence for BC009118 (NM_145595.1,218-236).
ggcatttaggtgtgatgtt

SEQ ID NO: 613457 - DNA, 19 bp, Mus musculus
  siRNA target sequence for BC009118 (NM_145595.1,272-290).
gatggagaaacatttaggt

SEQ ID NO: 613458 - DNA, 19 bp, Mus musculus
  siRNA target sequence for BC009118 (NM_145595.1,418-436).
ccatgaagacaatgattca

SEQ ID NO: 613459 - DNA, 19 bp, Mus musculus
  siRNA target sequence for BC009118 (NM_145595.1,437-455).
gcagggagggtctattgtt

SEQ ID NO: 613460 - DNA, 19 bp, Mus musculus
  siRNA target sequence for BC009118 (NM_145595.1,442-460).
gagggtctattgttaatgt

SEQ ID NO: 613461 - DNA, 19 bp, Mus musculus
  siRNA target sequence for BC009118 (NM_145595.1,453-471).
gttaatgtgggaagtatta

SEQ ID NO: 613462 - DNA, 19 bp, Mus musculus
  siRNA target sequence for BC009118 (NM_145595.1,459-477).
gtgggaagtattattggtt

SEQ ID NO: 613463 - DNA, 19 bp, Mus musculus
  siRNA target sequence for BC009118 (NM_145595.1,538-556).
cacgctcgcttgctaaaga

SEQ ID NO: 613464 - DNA, 19 bp, Mus musculus
  siRNA target sequence for BC009118 (NM_145595.1,558-576).
gttgcacggaagaaaatca

SEQ ID NO: 613465 - DNA, 19 bp, Mus musculus
  siRNA target sequence for BC009118 (NM_145595.1,585-603).
gtggtggcaccaggattta

SEQ ID NO: 613466 - DNA, 19 bp, Mus musculus
  siRNA target sequence for BC009118 (NM_145595.1,664-682).
ggaggtttggagaaactct

SEQ ID NO: 613467 - DNA, 19 bp, Mus musculus
  siRNA target sequence for BC009118 (NM_145595.1,665-683).
gaggtttggagaaactctt

SEQ ID NO: 613468 - DNA, 19 bp, Mus musculus
  siRNA target sequence for BC009118 (NM_145595.1,730-748).
caggccatgttcttatcgt

SEQ ID NO: 613469 - DNA, 19 bp, Mus musculus
  siRNA target sequence for BC016226 (NM_145443.1,1263-1281).
gaaatctggtagaggattt

SEQ ID NO: 613470 - DNA, 19 bp, Mus musculus
  siRNA target sequence for BC019806 (NM_145460.1,115-133).
ggcccacgttgccttgatt

SEQ ID NO: 613471 - DNA, 19 bp, Mus musculus
  siRNA target sequence for BC019806 (NM_145460.1,219-237).
ccctagccagcataattaa

SEQ ID NO: 613472 - DNA, 19 bp, Mus musculus
  siRNA target sequence for BC019806 (NM_145460.1,220-238).
cctagccagcataattaaa

SEQ ID NO: 613473 - DNA, 19 bp, Mus musculus
  siRNA target sequence for BC019806 (NM_145460.1,221-239).
ctagccagcataattaaat

SEQ ID NO: 613474 - DNA, 19 bp, Mus musculus
  siRNA target sequence for BC019806 (NM_145460.1,224-242).
gccagcataattaaatcca

SEQ ID NO: 613475 - DNA, 19 bp, Mus musculus
  siRNA target sequence for BC019806 (NM_145460.1,302-320).
gcagctaaggtgtgtgaaa

SEQ ID NO: 613476 - DNA, 19 bp, Mus musculus
  siRNA target sequence for BC019806 (NM_145460.1,303-321).
cagctaaggtgtgtgaaat

SEQ ID NO: 613477 - DNA, 19 bp, Mus musculus
  siRNA target sequence for BC019806 (NM_145460.1,343-361).
gaagagcctccgtttgctt

SEQ ID NO: 613478 - DNA, 19 bp, Mus musculus
  siRNA target sequence for BC019806 (NM_145460.1,430-448).
ggttggtgggttttcaatt

SEQ ID NO: 613479 - DNA, 19 bp, Mus musculus
  siRNA target sequence for BC019806 (NM_145460.1,434-452).
ggtgggttttcaatttgct

SEQ ID NO: 613480 - DNA, 19 bp, Mus musculus
  siRNA target sequence for BC019806 (NM_145460.1,465-483).
ggctagaacgagacagaat

SEQ ID NO: 613481 - DNA, 19 bp, Mus musculus
  siRNA target sequence for BC019806 (NM_145460.1,466-484).
gctagaacgagacagaata

SEQ ID NO: 613482 - DNA, 19 bp, Mus musculus
  siRNA target sequence for BC019806 (NM_145460.1,467-485).
ctagaacgagacagaataa

SEQ ID NO: 613483 - DNA, 19 bp, Mus musculus
  siRNA target sequence for BC019806 (NM_145460.1,519-537).
ctgctgtctgggttcacaa

SEQ ID NO: 613484 - DNA, 19 bp, Mus musculus
  siRNA target sequence for BC019806 (NM_145460.1,521-539).
gctgtctgggttcacaata

SEQ ID NO: 613485 - DNA, 19 bp, Mus musculus
  siRNA target sequence for BC019806 (NM_145460.1,522-540).
ctgtctgggttcacaataa

SEQ ID NO: 613486 - DNA, 19 bp, Mus musculus
  siRNA target sequence for BC019806 (NM_145460.1,524-542).
gtctgggttcacaataagt

SEQ ID NO: 613487 - DNA, 19 bp, Mus musculus
  siRNA target sequence for BC019806 (NM_145460.1,612-630).
cccctcgaaacctcatctt

SEQ ID NO: 613488 - DNA, 19 bp, Mus musculus
  siRNA target sequence for BC019806 (NM_145460.1,614-632).
cctcgaaacctcatcttga

SEQ ID NO: 613489 - DNA, 19 bp, Mus musculus
  siRNA target sequence for BC019806 (NM_145460.1,615-633).
ctcgaaacctcatcttgat

SEQ ID NO: 613490 - DNA, 19 bp, Mus musculus
  siRNA target sequence for BC019806 (NM_145460.1,694-712).
ccgggaccacgcagacaaa

SEQ ID NO: 613491 - DNA, 19 bp, Mus musculus
  siRNA target sequence for BC019806 (NM_145460.1,765-783).
ccagcgagctcctgtttaa

SEQ ID NO: 613492 - DNA, 19 bp, Mus musculus
  siRNA target sequence for BC019806 (NM_145460.1,768-786).
gcgagctcctgtttaagaa

SEQ ID NO: 613493 - DNA, 19 bp, Mus musculus
  siRNA target sequence for BC019806 (NM_145460.1,793-811).
cctcgacttagtacatgaa

SEQ ID NO: 613494 - DNA, 19 bp, Mus musculus
  siRNA target sequence for BC019806 (NM_145460.1,794-812).
ctcgacttagtacatgaat

SEQ ID NO: 613495 - DNA, 19 bp, Mus musculus
  siRNA target sequence for BC019806 (NM_145460.1,809-827).
gaattccctgagaagattt

SEQ ID NO: 613496 - DNA, 19 bp, Mus musculus
  siRNA target sequence for BC019806 (NM_145460.1,938-956).
gagactctgttctatgtct

SEQ ID NO: 613497 - DNA, 19 bp, Mus musculus
  siRNA target sequence for BC022224 (NM_177564.2,450-468).
gcactcgggaggcttatca

SEQ ID NO: 613498 - DNA, 19 bp, Mus musculus
  siRNA target sequence for BC022224 (NM_177564.2,472-490).
catgaaggagcggaacata

SEQ ID NO: 613499 - DNA, 19 bp, Mus musculus
  siRNA target sequence for BC022224 (NM_177564.2,491-509).
gacgacgggcacatcatta

SEQ ID NO: 613500 - DNA, 19 bp, Mus musculus
  siRNA target sequence for BC022224 (NM_177564.2,494-512).
gacgggcacatcattaaca

SEQ ID NO: 613501 - DNA, 19 bp, Mus musculus
  siRNA target sequence for BC022224 (NM_177564.2,542-560).
ccccagtctgtgatccatt

SEQ ID NO: 613502 - DNA, 19 bp, Mus musculus
  siRNA target sequence for BC022224 (NM_177564.2,547-565).
gtctgtgatccatttctat

SEQ ID NO: 613503 - DNA, 19 bp, Mus musculus
  siRNA target sequence for BC022224 (NM_177564.2,562-580).
ctatagtgcgactaagtat

SEQ ID NO: 613504 - DNA, 19 bp, Mus musculus
  siRNA target sequence for BC022224 (NM_177564.2,673-691).
gacacagttcgccttcaaa

SEQ ID NO: 613505 - DNA, 19 bp, Mus musculus
  siRNA target sequence for BC022224 (NM_177564.2,675-693).
cacagttcgccttcaaact

SEQ ID NO: 613506 - DNA, 19 bp, Mus musculus
  siRNA target sequence for BC022224 (NM_177564.2,684-702).
ccttcaaactccatgacaa

SEQ ID NO: 613507 - DNA, 19 bp, Mus musculus
  siRNA target sequence for BC022224 (NM_177564.2,770-788).
gctgtcatctacgttctta

SEQ ID NO: 613508 - DNA, 19 bp, Mus musculus
  siRNA target sequence for BC024806 (NM_172291.1,128-146).
gcaaaggtgtctgacttta

SEQ ID NO: 613509 - DNA, 19 bp, Mus musculus
  siRNA target sequence for BC024806 (NM_172291.1,223-241).
ggcggatgtggtcatcata

SEQ ID NO: 613510 - DNA, 19 bp, Mus musculus
  siRNA target sequence for BC024806 (NM_172291.1,238-256).
cataggaggtgggattctt

SEQ ID NO: 613511 - DNA, 19 bp, Mus musculus
  siRNA target sequence for BC024806 (NM_172291.1,326-344).
gagcaggaccacacgtatt

SEQ ID NO: 613512 - DNA, 19 bp, Mus musculus
  siRNA target sequence for BC024806 (NM_172291.1,391-409).
gttttccgtgcctgagaat

SEQ ID NO: 613513 - DNA, 19 bp, Mus musculus
  siRNA target sequence for BC024806 (NM_172291.1,410-428).
gtccagctctcactctttt

SEQ ID NO: 613514 - DNA, 19 bp, Mus musculus
  siRNA target sequence for BC024806 (NM_172291.1,416-434).
ctctcactcttttcaatca

SEQ ID NO: 613515 - DNA, 19 bp, Mus musculus
  siRNA target sequence for BC024806 (NM_172291.1,420-438).
cactcttttcaatcaactt

SEQ ID NO: 613516 - DNA, 19 bp, Mus musculus
  siRNA target sequence for BC024806 (NM_172291.1,440-458).
ctccggaacataaatgagt

SEQ ID NO: 613517 - DNA, 19 bp, Mus musculus
  siRNA target sequence for BC024806 (NM_172291.1,520-538).
gctagcttcagaaaaggat

SEQ ID NO: 613518 - DNA, 19 bp, Mus musculus
  siRNA target sequence for BC024806 (NM_172291.1,621-639).
ccaagtttccctggataaa

SEQ ID NO: 613519 - DNA, 19 bp, Mus musculus
  siRNA target sequence for BC024806 (NM_172291.1,625-643).
gtttccctggataaacgta

SEQ ID NO: 613520 - DNA, 19 bp, Mus musculus
  siRNA target sequence for BC024806 (NM_172291.1,720-738).
gtcgaaaggtccagtcaat

SEQ ID NO: 613521 - DNA, 19 bp, Mus musculus
  siRNA target sequence for BC024806 (NM_172291.1,759-777).
gagaggtgacacgtttcat

SEQ ID NO: 613522 - DNA, 19 bp, Mus musculus
  siRNA target sequence for BC024806 (NM_172291.1,761-779).
gaggtgacacgtttcatca

SEQ ID NO: 613523 - DNA, 19 bp, Mus musculus
  siRNA target sequence for BC024806 (NM_172291.1,764-782).
gtgacacgtttcatcactt

SEQ ID NO: 613524 - DNA, 19 bp, Mus musculus
  siRNA target sequence for BC024806 (NM_172291.1,770-788).
cgtttcatcacttcatcta

SEQ ID NO: 613525 - DNA, 19 bp, Mus musculus
  siRNA target sequence for BC024806 (NM_172291.1,812-830).
gaacatgtagtcttgagaa

SEQ ID NO: 613526 - DNA, 19 bp, Mus musculus
  siRNA target sequence for BC024806 (NM_172291.1,835-853).
caacaatgtccatgtgaaa

SEQ ID NO: 613527 - DNA, 19 bp, Mus musculus
  siRNA target sequence for BC024806 (NM_172291.1,859-877).
caagagcctggagtatcaa

SEQ ID NO: 613528 - DNA, 19 bp, Mus musculus
  siRNA target sequence for BC024806 (NM_172291.1,868-886).
ggagtatcaaccagtagaa

SEQ ID NO: 613529 - DNA, 19 bp, Mus musculus
  siRNA target sequence for BC024806 (NM_172291.1,912-930).
gagcctggtctgggaaaat

SEQ ID NO: 613530 - DNA, 19 bp, Mus musculus
  siRNA target sequence for BC024806 (NM_172291.1,1148-1166).
ccagacccaacaaatctga

SEQ ID NO: 613531 - DNA, 19 bp, Mus musculus
  siRNA target sequence for BC024806 (NM_172291.1,1219-1237).
ggtgccatcttttaagact

SEQ ID NO: 613532 - DNA, 19 bp, Mus musculus
  siRNA target sequence for BC024806 (NM_172291.1,1269-1287).
gtgcctgggctggttatta

SEQ ID NO: 613533 - DNA, 19 bp, Mus musculus
  siRNA target sequence for BC024806 (NM_172291.1,1278-1296).
ctggttattatgactacaa

SEQ ID NO: 613534 - DNA, 19 bp, Mus musculus
  siRNA target sequence for BC024806 (NM_172291.1,1326-1344).
cccacccactagttgtcaa

SEQ ID NO: 613535 - DNA, 19 bp, Mus musculus
  siRNA target sequence for BC024806 (NM_172291.1,1331-1349).
ccactagttgtcaacatgt

SEQ ID NO: 613536 - DNA, 19 bp, Mus musculus
  siRNA target sequence for BC024806 (NM_172291.1,1332-1350).
cactagttgtcaacatgta

SEQ ID NO: 613537 - DNA, 19 bp, Mus musculus
  siRNA target sequence for BC024806 (NM_172291.1,1334-1352).
ctagttgtcaacatgtact

SEQ ID NO: 613538 - DNA, 19 bp, Mus musculus
  siRNA target sequence for BC024806 (NM_172291.1,1401-1419).
gacgcgctgtggcagaaat

SEQ ID NO: 613539 - DNA, 19 bp, Mus musculus
  siRNA target sequence for BC024806 (NM_172291.1,1403-1421).
cgcgctgtggcagaaatca

SEQ ID NO: 613540 - DNA, 19 bp, Mus musculus
  siRNA target sequence for BC024806 (NM_172291.1,1424-1442).
ctagagggtcactttaaga

SEQ ID NO: 613541 - DNA, 19 bp, Mus musculus
  siRNA target sequence for BC024806 (NM_172291.1,1463-1481).
ctctttacccgcttttact

SEQ ID NO: 613542 - DNA, 19 bp, Mus musculus
  siRNA target sequence for BC024806 (NM_172291.1,1465-1483).
ctttacccgcttttactta

SEQ ID NO: 613543 - DNA, 19 bp, Mus musculus
  siRNA target sequence for BC051083 (NM_181409.2,223-241).
ctctctggaccgaagtcta

SEQ ID NO: 613544 - DNA, 19 bp, Mus musculus
  siRNA target sequence for BC051083 (NM_181409.2,471-489).
gatcaacattggtcgatta

SEQ ID NO: 613545 - DNA, 19 bp, Mus musculus
  siRNA target sequence for BC051083 (NM_181409.2,532-550).
gggtctcagcttaagttca

SEQ ID NO: 613546 - DNA, 19 bp, Mus musculus
  siRNA target sequence for BC051083 (NM_181409.2,533-551).
ggtctcagcttaagttcat

SEQ ID NO: 613547 - DNA, 19 bp, Mus musculus
  siRNA target sequence for BC051083 (NM_181409.2,534-552).
gtctcagcttaagttcatt

SEQ ID NO: 613548 - DNA, 19 bp, Mus musculus
  siRNA target sequence for BC051083 (NM_181409.2,587-605).
ggctgcttcgagttggttt

SEQ ID NO: 613549 - DNA, 19 bp, Mus musculus
  siRNA target sequence for BC051083 (NM_181409.2,588-606).
gctgcttcgagttggtttt

SEQ ID NO: 613550 - DNA, 19 bp, Mus musculus
  siRNA target sequence for BC051083 (NM_181409.2,685-703).
cagcagtatagaggaataa

SEQ ID NO: 613551 - DNA, 19 bp, Mus musculus
  siRNA target sequence for BC051083 (NM_181409.2,815-833).
gggttagcacggtcaatga

SEQ ID NO: 613552 - DNA, 19 bp, Mus musculus
  siRNA target sequence for BC051083 (NM_181409.2,817-835).
gttagcacggtcaatgaga

SEQ ID NO: 613553 - DNA, 19 bp, Mus musculus
  siRNA target sequence for BC051083 (NM_181409.2,841-859).
gatgtagctaccagtcttt

SEQ ID NO: 613554 - DNA, 19 bp, Mus musculus
  siRNA target sequence for BC051083 (NM_181409.2,867-885).
cttctgggtccctaatcga

SEQ ID NO: 613555 - DNA, 19 bp, Mus musculus
  siRNA target sequence for BC051083 (NM_181409.2,870-888).
ctgggtccctaatcgaatt

SEQ ID NO: 613556 - DNA, 19 bp, Mus musculus
  siRNA target sequence for BC051083 (NM_181409.2,872-890).
gggtccctaatcgaattct

SEQ ID NO: 613557 - DNA, 19 bp, Mus musculus
  siRNA target sequence for BC051083 (NM_181409.2,988-1006).
ggaggcttctatatagcaa

SEQ ID NO: 613558 - DNA, 19 bp, Mus musculus
  siRNA target sequence for BC051083 (NM_181409.2,1053-1071).
ggctgggcactctgatgtt

SEQ ID NO: 613559 - DNA, 19 bp, Mus musculus
  siRNA target sequence for BC051083 (NM_181409.2,1100-1118).
ctagtcttgccgatatcca

SEQ ID NO: 613560 - DNA, 19 bp, Mus musculus
  siRNA target sequence for BC051083 (NM_181409.2,1198-1216).
ggaacacggtggttagact

SEQ ID NO: 613561 - DNA, 19 bp, Mus musculus
  siRNA target sequence for BC051083 (NM_181409.2,1199-1217).
gaacacggtggttagacta

SEQ ID NO: 613562 - DNA, 19 bp, Mus musculus
  siRNA target sequence for BC051083 (NM_181409.2,1202-1220).
cacggtggttagactatgt

SEQ ID NO: 613563 - DNA, 19 bp, Mus musculus
  siRNA target sequence for BC051083 (NM_181409.2,1204-1222).
cggtggttagactatgtca

SEQ ID NO: 613564 - DNA, 19 bp, Mus musculus
  siRNA target sequence for BC051083 (NM_181409.2,1215-1233).
ctatgtcaggtcttgtctt

SEQ ID NO: 613565 - DNA, 19 bp, Mus musculus
  siRNA target sequence for BC051083 (NM_181409.2,1242-1260).
cagcgacatctcagtatta

SEQ ID NO: 613566 - DNA, 19 bp, Mus musculus
  siRNA target sequence for BC051083 (NM_181409.2,1244-1262).
gcgacatctcagtattagt

SEQ ID NO: 613567 - DNA, 19 bp, Mus musculus
  siRNA target sequence for BC051083 (NM_181409.2,1331-1349).
cactcgtccagctgctttt

SEQ ID NO: 613568 - DNA, 19 bp, Mus musculus
  siRNA target sequence for BC051083 (NM_181409.2,1354-1372).
ccggaagcccggacattgt

SEQ ID NO: 613569 - DNA, 19 bp, Mus musculus
  siRNA target sequence for BC051083 (NM_181409.2,1355-1373).
cggaagcccggacattgtt

SEQ ID NO: 613570 - DNA, 19 bp, Mus musculus
  siRNA target sequence for BC051083 (NM_181409.2,1360-1378).
gcccggacattgtttggtt

SEQ ID NO: 613571 - DNA, 19 bp, Mus musculus
  siRNA target sequence for BC051083 (NM_181409.2,1361-1379).
cccggacattgtttggttt

SEQ ID NO: 613572 - DNA, 19 bp, Mus musculus
  siRNA target sequence for BC051083 (NM_181409.2,1509-1527).
gcagtttccagcggaattt

SEQ ID NO: 613573 - DNA, 19 bp, Mus musculus
  siRNA target sequence for BC051083 (NM_181409.2,1549-1567).
cttgctcttcatgatagta

SEQ ID NO: 613574 - DNA, 19 bp, Mus musculus
  siRNA target sequence for BC051083 (NM_181409.2,1552-1570).
gctcttcatgatagtatca

SEQ ID NO: 613575 - DNA, 19 bp, Mus musculus
  siRNA target sequence for BC051083 (NM_181409.2,1579-1597).
gacaccctcacctttctga

SEQ ID NO: 613576 - DNA, 19 bp, Mus musculus
  siRNA target sequence for BC051083 (NM_181409.2,1834-1852).
cctggaccccctagttcta

SEQ ID NO: 613577 - DNA, 19 bp, Mus musculus
  siRNA target sequence for BC051083 (NM_181409.2,1872-1890).
gaccctgaccccactgaat

SEQ ID NO: 613578 - DNA, 19 bp, Mus musculus
  siRNA target sequence for BC051083 (NM_181409.2,2034-2052).
gctactgctgcctggatat

SEQ ID NO: 613579 - DNA, 19 bp, Mus musculus
  siRNA target sequence for BC051083 (NM_181409.2,2161-2179).
caccttcaggaactgttaa

SEQ ID NO: 613580 - DNA, 19 bp, Mus musculus
  siRNA target sequence for Bdh (NM_175177.3,349-367).
cacgctgttgttttatcca

SEQ ID NO: 613581 - DNA, 19 bp, Mus musculus
  siRNA target sequence for Bdh (NM_175177.3,416-434).
gcggctagtggcaaagcta

SEQ ID NO: 613582 - DNA, 19 bp, Mus musculus
  siRNA target sequence for Bdh (NM_175177.3,417-435).
cggctagtggcaaagctat

SEQ ID NO: 613583 - DNA, 19 bp, Mus musculus
  siRNA target sequence for Bdh (NM_175177.3,492-510).
caaaaggcttccttgtatt

SEQ ID NO: 613584 - DNA, 19 bp, Mus musculus
  siRNA target sequence for Bdh (NM_175177.3,643-661).
ccgctccggcctgaaagat

SEQ ID NO: 613585 - DNA, 19 bp, Mus musculus
  siRNA target sequence for Bdh (NM_175177.3,694-712).
cgcaggcatctcaacgttt

SEQ ID NO: 613586 - DNA, 19 bp, Mus musculus
  siRNA target sequence for Bdh (NM_175177.3,779-797).
gtgcgcaccacaaaatcct

SEQ ID NO: 613587 - DNA, 19 bp, Mus musculus
  siRNA target sequence for Bdh (NM_175177.3,819-837).
ccaaaggtcgcgtcgttaa

SEQ ID NO: 613588 - DNA, 19 bp, Mus musculus
  siRNA target sequence for Bdh (NM_175177.3,824-842).
ggtcgcgtcgttaacatca

SEQ ID NO: 613589 - DNA, 19 bp, Mus musculus
  siRNA target sequence for Bdh (NM_175177.3,920-938).
gactgcctgcgctatgaga

SEQ ID NO: 613590 - DNA, 19 bp, Mus musculus
  siRNA target sequence for Bdh (NM_175177.3,1129-1147).
cagcggttccacagatact

SEQ ID NO: 613591 - DNA, 19 bp, Mus musculus
  siRNA target sequence for Bdh (NM_175177.3,1208-1226).
catcccatggactactact

SEQ ID NO: 613592 - DNA, 19 bp, Mus musculus
  siRNA target sequence for Bdh (NM_175177.3,1230-1248).
ggcttcggatgcagatcat

SEQ ID NO: 613593 - DNA, 19 bp, Mus musculus
  siRNA target sequence for Bdh (NM_175177.3,1232-1250).
cttcggatgcagatcatga

SEQ ID NO: 613594 - DNA, 19 bp, Mus musculus
  siRNA target sequence for Bdh (NM_175177.3,1243-1261).
gatcatgacccattttcct

SEQ ID NO: 613595 - DNA, 19 bp, Mus musculus
  siRNA target sequence for Bdh (NM_175177.3,1263-1281).
gagccatctctgacaagat

SEQ ID NO: 613596 - DNA, 19 bp, Mus musculus
  siRNA target sequence for Bdh (NM_175177.3,1274-1292).
gacaagatctacatacact

SEQ ID NO: 613597 - DNA, 19 bp, Mus musculus
  siRNA target sequence for Blvra (NM_026678.3,193-211).
gccaaagaggaaatttggt

SEQ ID NO: 613598 - DNA, 19 bp, Mus musculus
  siRNA target sequence for Blvra (NM_026678.3,236-254).
gctggctctgtgaggataa

SEQ ID NO: 613599 - DNA, 19 bp, Mus musculus
  siRNA target sequence for Blvra (NM_026678.3,317-335).
gaacttgggagccttgata

SEQ ID NO: 613600 - DNA, 19 bp, Mus musculus
  siRNA target sequence for Blvra (NM_026678.3,332-350).
gataatgtacggcagattt

SEQ ID NO: 613601 - DNA, 19 bp, Mus musculus
  siRNA target sequence for Blvra (NM_026678.3,369-387).
gcagccaagaggttgatgt

SEQ ID NO: 613602 - DNA, 19 bp, Mus musculus
  siRNA target sequence for Blvra (NM_026678.3,379-397).
ggttgatgtcgcctatatt

SEQ ID NO: 613603 - DNA, 19 bp, Mus musculus
  siRNA target sequence for Blvra (NM_026678.3,380-398).
gttgatgtcgcctatattt

SEQ ID NO: 613604 - DNA, 19 bp, Mus musculus
  siRNA target sequence for Blvra (NM_026678.3,383-401).
gatgtcgcctatatttgca

SEQ ID NO: 613605 - DNA, 19 bp, Mus musculus
  siRNA target sequence for Blvra (NM_026678.3,408-426).
gttccagccacgaagacta

SEQ ID NO: 613606 - DNA, 19 bp, Mus musculus
  siRNA target sequence for Blvra (NM_026678.3,412-430).
cagccacgaagactatata

SEQ ID NO: 613607 - DNA, 19 bp, Mus musculus
  siRNA target sequence for Blvra (NM_026678.3,424-442).
ctatataaggcagtttctt

SEQ ID NO: 613608 - DNA, 19 bp, Mus musculus
  siRNA target sequence for Blvra (NM_026678.3,574-592).
gttcgaattcctgaaaaga

SEQ ID NO: 613609 - DNA, 19 bp, Mus musculus
  siRNA target sequence for Blvra (NM_026678.3,577-595).
cgaattcctgaaaagagaa

SEQ ID NO: 613610 - DNA, 19 bp, Mus musculus
  siRNA target sequence for Blvra (NM_026678.3,610-628).
gctgctaaaaggatctctt

SEQ ID NO: 613611 - DNA, 19 bp, Mus musculus
  siRNA target sequence for Blvra (NM_026678.3,715-733).
ctttggggagctttctctt

SEQ ID NO: 613612 - DNA, 19 bp, Mus musculus
  siRNA target sequence for Blvra (NM_026678.3,852-870).
ggaacagacatataagcat

SEQ ID NO: 613613 - DNA, 19 bp, Mus musculus
  siRNA target sequence for Blvra (NM_026678.3,908-926).
gtaggagtcaataagaaca

SEQ ID NO: 613614 - DNA, 19 bp, Mus musculus
  siRNA target sequence for Cbr3 (NM_173047.2,392-410).
catcgcctttagaatggat

SEQ ID NO: 613615 - DNA, 19 bp, Mus musculus
  siRNA target sequence for Cbr3 (NM_173047.2,415-433).
caacacccttcgacattca

SEQ ID NO: 613616 - DNA, 19 bp, Mus musculus
  siRNA target sequence for Cbr3 (NM_173047.2,532-550).
gcagtctgcaggggttaaa

SEQ ID NO: 613617 - DNA, 19 bp, Mus musculus
  siRNA target sequence for Cbr3 (NM_173047.2,617-635).
cctggtcgacctcatgaaa

SEQ ID NO: 613618 - DNA, 19 bp, Mus musculus
  siRNA target sequence for Cbr3 (NM_173047.2,621-639).
gtcgacctcatgaaaaagt

SEQ ID NO: 613619 - DNA, 19 bp, Mus musculus
  siRNA target sequence for Cbr3 (NM_173047.2,623-641).
cgacctcatgaaaaagttt

SEQ ID NO: 613620 - DNA, 19 bp, Mus musculus
  siRNA target sequence for Cbr3 (NM_173047.2,644-662).
ggaggatacaaaaaatgaa

SEQ ID NO: 613621 - DNA, 19 bp, Mus musculus
  siRNA target sequence for Cbr3 (NM_173047.2,858-876).
gccgaaacccccgtttact

SEQ ID NO: 613622 - DNA, 19 bp, Mus musculus
  siRNA target sequence for Cbr3 (NM_173047.2,859-877).
ccgaaacccccgtttactt

SEQ ID NO: 613623 - DNA, 19 bp, Mus musculus
  siRNA target sequence for Cbr3 (NM_173047.2,927-945).
gacaaagttgtgcaaactt

SEQ ID NO: 613624 - DNA, 19 bp, Mus musculus
  siRNA target sequence for Cd160 (NM_018767.2,249-267).
cgaagctgaggggctaata

SEQ ID NO: 613625 - DNA, 19 bp, Mus musculus
  siRNA target sequence for Cd160 (NM_018767.2,253-271).
gctgaggggctaatactct

SEQ ID NO: 613626 - DNA, 19 bp, Mus musculus
  siRNA target sequence for Cd160 (NM_018767.2,254-272).
ctgaggggctaatactctt

SEQ ID NO: 613627 - DNA, 19 bp, Mus musculus
  siRNA target sequence for Cd160 (NM_018767.2,270-288).
cttctggtgcaaagacaat

SEQ ID NO: 613628 - DNA, 19 bp, Mus musculus
  siRNA target sequence for Cd160 (NM_018767.2,319-337).
gaacagcttagggttaaaa

SEQ ID NO: 613629 - DNA, 19 bp, Mus musculus
  siRNA target sequence for Cd160 (NM_018767.2,378-396).
gttggtgttcaccatagaa

SEQ ID NO: 613630 - DNA, 19 bp, Mus musculus
  siRNA target sequence for Cd160 (NM_018767.2,381-399).
ggtgttcaccatagaacaa

SEQ ID NO: 613631 - DNA, 19 bp, Mus musculus
  siRNA target sequence for Cd160 (NM_018767.2,619-637).
gcccttcaagctctatata

SEQ ID NO: 613632 - DNA, 19 bp, Mus musculus
  siRNA target sequence for Cryl1 (NM_030004.2,121-139).
gcttcaaggtgaaactcta

SEQ ID NO: 613633 - DNA, 19 bp, Mus musculus
  siRNA target sequence for Cryl1 (NM_030004.2,122-140).
cttcaaggtgaaactctat

SEQ ID NO: 613634 - DNA, 19 bp, Mus musculus
  siRNA target sequence for Cryl1 (NM_030004.2,163-181).
cagacgccctggaaaatat

SEQ ID NO: 613635 - DNA, 19 bp, Mus musculus
  siRNA target sequence for Cryl1 (NM_030004.2,165-183).
gacgccctggaaaatatca

SEQ ID NO: 613636 - DNA, 19 bp, Mus musculus
  siRNA target sequence for Cryl1 (NM_030004.2,324-342).
gagaacctagaactgaaaa

SEQ ID NO: 613637 - DNA, 19 bp, Mus musculus
  siRNA target sequence for Cryl1 (NM_030004.2,374-392).
ggatgaccgggttatccta

SEQ ID NO: 613638 - DNA, 19 bp, Mus musculus
  siRNA target sequence for Cryl1 (NM_030004.2,375-393).
gatgaccgggttatcctaa

SEQ ID NO: 613639 - DNA, 19 bp, Mus musculus
  siRNA target sequence for Cryl1 (NM_030004.2,472-490).
ctgtcaatccaccatatta

SEQ ID NO: 613640 - DNA, 19 bp, Mus musculus
  siRNA target sequence for Cryl1 (NM_030004.2,589-607).
gagtcctgaaggagattga

SEQ ID NO: 613641 - DNA, 19 bp, Mus musculus
  siRNA target sequence for Cryl1 (NM_030004.2,764-782).
caatgctgaaggtgtgatt

SEQ ID NO: 613642 - DNA, 19 bp, Mus musculus
  siRNA target sequence for Cryl1 (NM_030004.2,785-803).
ctactgtgagagatacagt

SEQ ID NO: 613643 - DNA, 19 bp, Mus musculus
  siRNA target sequence for Cryl1 (NM_030004.2,862-880).
cggtggagagagttagtga

SEQ ID NO: 613644 - DNA, 19 bp, Mus musculus
  siRNA target sequence for Cyba (NM_007806.1,107-125).
gcgtctggcctgattctca

SEQ ID NO: 613645 - DNA, 19 bp, Mus musculus
  siRNA target sequence for Cyba (NM_007806.1,108-126).
cgtctggcctgattctcat

SEQ ID NO: 613646 - DNA, 19 bp, Mus musculus
  siRNA target sequence for Cyba (NM_007806.1,305-323).
cccctcaccaggaattact

SEQ ID NO: 613647 - DNA, 19 bp, Mus musculus
  siRNA target sequence for Cyba (NM_007806.1,306-324).
ccctcaccaggaattacta

SEQ ID NO: 613648 - DNA, 19 bp, Mus musculus
  siRNA target sequence for Cyba (NM_007806.1,405-423).
ccattgccagtgtgatcta

SEQ ID NO: 613649 - DNA, 19 bp, Mus musculus
  siRNA target sequence for Cyba (NM_007806.1,540-558).
ccgcagaggtccgaaagaa

SEQ ID NO: 613650 - DNA, 19 bp, Mus musculus
  siRNA target sequence for Cybb (NM_007807.2,118-136).
gatgatgggcctaagtata

SEQ ID NO: 613651 - DNA, 19 bp, Mus musculus
  siRNA target sequence for Cybb (NM_007807.2,121-139).
gatgggcctaagtataatt

SEQ ID NO: 613652 - DNA, 19 bp, Mus musculus
  siRNA target sequence for Cybb (NM_007807.2,124-142).
gggcctaagtataattata

SEQ ID NO: 613653 - DNA, 19 bp, Mus musculus
  siRNA target sequence for Cybb (NM_007807.2,222-240).
gctgccagtgtgtcgaaat

SEQ ID NO: 613654 - DNA, 19 bp, Mus musculus
  siRNA target sequence for Cybb (NM_007807.2,279-297).
gacaaggattcgaagacaa

SEQ ID NO: 613655 - DNA, 19 bp, Mus musculus
  siRNA target sequence for Cybb (NM_007807.2,351-369).
caccgccatccacacaatt

SEQ ID NO: 613656 - DNA, 19 bp, Mus musculus
  siRNA target sequence for Cybb (NM_007807.2,441-459).
ctctgacatcggtgacaat

SEQ ID NO: 613657 - DNA, 19 bp, Mus musculus
  siRNA target sequence for Cybb (NM_007807.2,445-463).
gacatcggtgacaatgaga

SEQ ID NO: 613658 - DNA, 19 bp, Mus musculus
  siRNA target sequence for Cybb (NM_007807.2,568-586).
ctgtgtctcatattgatta

SEQ ID NO: 613659 - DNA, 19 bp, Mus musculus
  siRNA target sequence for Cybb (NM_007807.2,574-592).
ctcatattgattatcacat

SEQ ID NO: 613660 - DNA, 19 bp, Mus musculus
  siRNA target sequence for Cybb (NM_007807.2,605-623).
ccattcggaggtcttattt

SEQ ID NO: 613661 - DNA, 19 bp, Mus musculus
  siRNA target sequence for Cybb (NM_007807.2,606-624).
cattcggaggtcttatttt

SEQ ID NO: 613662 - DNA, 19 bp, Mus musculus
  siRNA target sequence for Cybb (NM_007807.2,711-729).
gactgcggagagtttggaa

SEQ ID NO: 613663 - DNA, 19 bp, Mus musculus
  siRNA target sequence for Cybb (NM_007807.2,722-740).
gtttggaagagcataattt

SEQ ID NO: 613664 - DNA, 19 bp, Mus musculus
  siRNA target sequence for Cybb (NM_007807.2,813-831).
ccctcctatgacttggaaa

SEQ ID NO: 613665 - DNA, 19 bp, Mus musculus
  siRNA target sequence for Cybb (NM_007807.2,814-832).
cctcctatgacttggaaat

SEQ ID NO: 613666 - DNA, 19 bp, Mus musculus
  siRNA target sequence for Cybb (NM_007807.2,817-835).
cctatgacttggaaatgga

SEQ ID NO: 613667 - DNA, 19 bp, Mus musculus
  siRNA target sequence for Cybb (NM_007807.2,919-937).
gtcacccaccctttcaaaa

SEQ ID NO: 613668 - DNA, 19 bp, Mus musculus
  siRNA target sequence for Cybb (NM_007807.2,924-942).
ccaccctttcaaaaccatt

SEQ ID NO: 613669 - DNA, 19 bp, Mus musculus
  siRNA target sequence for Cybb (NM_007807.2,938-956).
ccattgagcttcagatgaa

SEQ ID NO: 613670 - DNA, 19 bp, Mus musculus
  siRNA target sequence for Cybb (NM_007807.2,978-996).
ggtgggacagtacattttt

SEQ ID NO: 613671 - DNA, 19 bp, Mus musculus
  siRNA target sequence for Cybb (NM_007807.2,997-1015).
gtcaagtgccccaaggtat

SEQ ID NO: 613672 - DNA, 19 bp, Mus musculus
  siRNA target sequence for Cybb (NM_007807.2,1007-1025).
ccaaggtatccaagttaga

SEQ ID NO: 613673 - DNA, 19 bp, Mus musculus
  siRNA target sequence for Cybb (NM_007807.2,1054-1072).
cctgaggaagactttttta

SEQ ID NO: 613674 - DNA, 19 bp, Mus musculus
  siRNA target sequence for Cybb (NM_007807.2,1057-1075).
gaggaagacttttttagca

SEQ ID NO: 613675 - DNA, 19 bp, Mus musculus
  siRNA target sequence for Cybb (NM_007807.2,1063-1081).
gacttttttagcatccata

SEQ ID NO: 613676 - DNA, 19 bp, Mus musculus
  siRNA target sequence for Cybb (NM_007807.2,1100-1118).
ggacggaggggctattcaa

SEQ ID NO: 613677 - DNA, 19 bp, Mus musculus
  siRNA target sequence for Cybb (NM_007807.2,1101-1119).
gacggaggggctattcaat

SEQ ID NO: 613678 - DNA, 19 bp, Mus musculus
  siRNA target sequence for Cybb (NM_007807.2,1105-1123).
gaggggctattcaatgctt

SEQ ID NO: 613679 - DNA, 19 bp, Mus musculus
  siRNA target sequence for Cybb (NM_007807.2,1217-1235).
gctatgaggtggtgatgtt

SEQ ID NO: 613680 - DNA, 19 bp, Mus musculus
  siRNA target sequence for Cybb (NM_007807.2,1218-1236).
ctatgaggtggtgatgtta

SEQ ID NO: 613681 - DNA, 19 bp, Mus musculus
  siRNA target sequence for Cybb (NM_007807.2,1278-1296).
caagtctgtctggtacaaa

SEQ ID NO: 613682 - DNA, 19 bp, Mus musculus
  siRNA target sequence for Cybb (NM_007807.2,1281-1299).
gtctgtctggtacaaatat

SEQ ID NO: 613683 - DNA, 19 bp, Mus musculus
  siRNA target sequence for Cybb (NM_007807.2,1287-1305).
ctggtacaaatattgtgat

SEQ ID NO: 613684 - DNA, 19 bp, Mus musculus
  siRNA target sequence for Cybb (NM_007807.2,1289-1307).
ggtacaaatattgtgataa

SEQ ID NO: 613685 - DNA, 19 bp, Mus musculus
  siRNA target sequence for Cybb (NM_007807.2,1471-1489).
gaatctcaggccaatcact

SEQ ID NO: 613686 - DNA, 19 bp, Mus musculus
  siRNA target sequence for Cybb (NM_007807.2,1556-1574).
ggcccaactgggataacga

SEQ ID NO: 613687 - DNA, 19 bp, Mus musculus
  siRNA target sequence for Cybb (NM_007807.2,1573-1591).
gagttcaagaccattgcaa

SEQ ID NO: 613688 - DNA, 19 bp, Mus musculus
  siRNA target sequence for Cybb (NM_007807.2,1607-1625).
ccacaataggcgttttcct

SEQ ID NO: 613689 - DNA, 19 bp, Mus musculus
  siRNA target sequence for Cybb (NM_007807.2,1648-1666).
gaaactctcagtaaacaga

SEQ ID NO: 613690 - DNA, 19 bp, Mus musculus
  siRNA target sequence for Cybb (NM_007807.2,1696-1714).
ggagtccacttcattttca

SEQ ID NO: 613691 - DNA, 19 bp, Mus musculus
  siRNA target sequence for D130067I03Rik (NM_172485.2,694-712).
gggactgcgtggtatctga

SEQ ID NO: 613692 - DNA, 19 bp, Mus musculus
  siRNA target sequence for D130067I03Rik (NM_172485.2,752-770).
gaaactgcagcatagaact

SEQ ID NO: 613693 - DNA, 19 bp, Mus musculus
  siRNA target sequence for D130067I03Rik (NM_172485.2,804-822).
ctgcagtgtccaaatctca

SEQ ID NO: 613694 - DNA, 19 bp, Mus musculus
  siRNA target sequence for D130067I03Rik (NM_172485.2,861-879).
cttgggaaagaagaatatt

SEQ ID NO: 613695 - DNA, 19 bp, Mus musculus
  siRNA target sequence for D130067I03Rik (NM_172485.2,894-912).
gtgggaccatggagcaaat

SEQ ID NO: 613696 - DNA, 19 bp, Mus musculus
  siRNA target sequence for D130067I03Rik (NM_172485.2,896-914).
gggaccatggagcaaatgt

SEQ ID NO: 613697 - DNA, 19 bp, Mus musculus
  siRNA target sequence for D130067I03Rik (NM_172485.2,897-915).
ggaccatggagcaaatgta

SEQ ID NO: 613698 - DNA, 19 bp, Mus musculus
  siRNA target sequence for D130067I03Rik (NM_172485.2,913-931).
gtagactccctcaccttaa

SEQ ID NO: 613699 - DNA, 19 bp, Mus musculus
  siRNA target sequence for D130067I03Rik (NM_172485.2,938-956).
cgacctcagcggaagaaat

SEQ ID NO: 613700 - DNA, 19 bp, Mus musculus
  siRNA target sequence for D130067I03Rik (NM_172485.2,939-957).
gacctcagcggaagaaata

SEQ ID NO: 613701 - DNA, 19 bp, Mus musculus
  siRNA target sequence for D130067I03Rik (NM_172485.2,963-981).
gattttagctctgattcaa

SEQ ID NO: 613702 - DNA, 19 bp, Mus musculus
  siRNA target sequence for D130067I03Rik (NM_172485.2,986-1004).
gcaagtcaccctaacacat

SEQ ID NO: 613703 - DNA, 19 bp, Mus musculus
  siRNA target sequence for D130067I03Rik (NM_172485.2,996-1014).
ctaacacatcagagttaca

SEQ ID NO: 613704 - DNA, 19 bp, Mus musculus
  siRNA target sequence for D130067I03Rik (NM_172485.2,1092-1110).
ggaagaaacgccctgttaa

SEQ ID NO: 613705 - DNA, 19 bp, Mus musculus
  siRNA target sequence for D130067I03Rik (NM_172485.2,1103-1121).
cctgttaagcctttgtgtt

SEQ ID NO: 613706 - DNA, 19 bp, Mus musculus
  siRNA target sequence for D130067I03Rik (NM_172485.2,1214-1232).
ctgccgttctgggacttta

SEQ ID NO: 613707 - DNA, 19 bp, Mus musculus
  siRNA target sequence for D130067I03Rik (NM_172485.2,1217-1235).
ccgttctgggactttatca

SEQ ID NO: 613708 - DNA, 19 bp, Mus musculus
  siRNA target sequence for D130067I03Rik (NM_172485.2,1255-1273).
gccggaacgtgaagcatat

SEQ ID NO: 613709 - DNA, 19 bp, Mus musculus
  siRNA target sequence for D130067I03Rik (NM_172485.2,1256-1274).
ccggaacgtgaagcatatt

SEQ ID NO: 613710 - DNA, 19 bp, Mus musculus
  siRNA target sequence for D130067I03Rik (NM_172485.2,1259-1277).
gaacgtgaagcatattgct

SEQ ID NO: 613711 - DNA, 19 bp, Mus musculus
  siRNA target sequence for D130067I03Rik (NM_172485.2,1262-1280).
cgtgaagcatattgctatt

SEQ ID NO: 613712 - DNA, 19 bp, Mus musculus
  siRNA target sequence for D130067I03Rik (NM_172485.2,1292-1310).
ggaatgcccagaacttctt

SEQ ID NO: 613713 - DNA, 19 bp, Mus musculus
  siRNA target sequence for D130067I03Rik (NM_172485.2,1350-1368).
ccatgtcccaggtattcct

SEQ ID NO: 613714 - DNA, 19 bp, Mus musculus
  siRNA target sequence for D130067I03Rik (NM_172485.2,1393-1411).
gccaagtctctcttcttct

SEQ ID NO: 613715 - DNA, 19 bp, Mus musculus
  siRNA target sequence for D130067I03Rik (NM_172485.2,1497-1515).
ctaccagcaaccattgcat

SEQ ID NO: 613716 - DNA, 19 bp, Mus musculus
  siRNA target sequence for D130067I03Rik (NM_172485.2,1604-1622).
ctcgatggactgcatagta

SEQ ID NO: 613717 - DNA, 19 bp, Mus musculus
  siRNA target sequence for D130067I03Rik (NM_172485.2,1699-1717).
gacagcgccatgtactcat

SEQ ID NO: 613718 - DNA, 19 bp, Mus musculus
  siRNA target sequence for D130067I03Rik (NM_172485.2,1800-1818).
gcctcggaagggatctgta

SEQ ID NO: 613719 - DNA, 19 bp, Mus musculus
  siRNA target sequence for D130067I03Rik (NM_172485.2,1805-1823).
ggaagggatctgtattgct

SEQ ID NO: 613720 - DNA, 19 bp, Mus musculus
  siRNA target sequence for D130067I03Rik (NM_172485.2,1811-1829).
gatctgtattgctgatcat

SEQ ID NO: 613721 - DNA, 19 bp, Mus musculus
  siRNA target sequence for D130067I03Rik (NM_172485.2,1874-1892).
gaatgagcgaggagaagaa

SEQ ID NO: 613722 - DNA, 19 bp, Mus musculus
  siRNA target sequence for D130067I03Rik (NM_172485.2,2098-2116).
gtcaggaactccaagagta

SEQ ID NO: 613723 - DNA, 19 bp, Mus musculus
  siRNA target sequence for D130067I03Rik (NM_172485.2,2114-2132).
gtaccgcctatgcaatgat

SEQ ID NO: 613724 - DNA, 19 bp, Mus musculus
  siRNA target sequence for D130067I03Rik (NM_172485.2,2225-2243).
gaatggagaagcaacatgt

SEQ ID NO: 613725 - DNA, 19 bp, Mus musculus
  siRNA target sequence for D130067I03Rik (NM_172485.2,2262-2280).
cgaaaggtcttctgtatca

SEQ ID NO: 613726 - DNA, 19 bp, Mus musculus
  siRNA target sequence for D130067I03Rik (NM_172485.2,2263-2281).
gaaaggtcttctgtatcaa

SEQ ID NO: 613727 - DNA, 19 bp, Mus musculus
  siRNA target sequence for D130067I03Rik (NM_172485.2,2282-2300).
gagtcatgtgggacaagta

SEQ ID NO: 613728 - DNA, 19 bp, Mus musculus
  siRNA target sequence for D130067I03Rik (NM_172485.2,2284-2302).
gtcatgtgggacaagtaat

SEQ ID NO: 613729 - DNA, 19 bp, Mus musculus
  siRNA target sequence for D130067I03Rik (NM_172485.2,2292-2310).
ggacaagtaatgaccaaaa

SEQ ID NO: 613730 - DNA, 19 bp, Mus musculus
  siRNA target sequence for D130067I03Rik (NM_172485.2,2323-2341).
ctacacggccagaaactgt

SEQ ID NO: 613731 - DNA, 19 bp, Mus musculus
  siRNA target sequence for D130067I03Rik (NM_172485.2,2355-2373).
ctcccatgcaagaaagact

SEQ ID NO: 613732 - DNA, 19 bp, Mus musculus
  siRNA target sequence for D130067I03Rik (NM_172485.2,2417-2435).
ctgccagccaggaaatact

SEQ ID NO: 613733 - DNA, 19 bp, Mus musculus
  siRNA target sequence for D130067I03Rik (NM_172485.2,2420-2438).
ccagccaggaaatactaca

SEQ ID NO: 613734 - DNA, 19 bp, Mus musculus
  siRNA target sequence for D130067I03Rik (NM_172485.2,2423-2441).
gccaggaaatactacaata

SEQ ID NO: 613735 - DNA, 19 bp, Mus musculus
  siRNA target sequence for D130067I03Rik (NM_172485.2,2445-2463).
caatctcgatacaggatta

SEQ ID NO: 613736 - DNA, 19 bp, Mus musculus
  siRNA target sequence for D130067I03Rik (NM_172485.2,2449-2467).
ctcgatacaggattatcat

SEQ ID NO: 613737 - DNA, 19 bp, Mus musculus
  siRNA target sequence for D130067I03Rik (NM_172485.2,2556-2574).
cggtggaagccgcagaaat

SEQ ID NO: 613738 - DNA, 19 bp, Mus musculus
  siRNA target sequence for D130067I03Rik (NM_172485.2,2568-2586).
cagaaatggagctcttgta

SEQ ID NO: 613739 - DNA, 19 bp, Mus musculus
  siRNA target sequence for D130067I03Rik (NM_172485.2,2687-2705).
ccagtctgcagaaatgaca

SEQ ID NO: 613740 - DNA, 19 bp, Mus musculus
  siRNA target sequence for D130067I03Rik (NM_172485.2,2708-2726).
gtgcctcaagcagatgaat

SEQ ID NO: 613741 - DNA, 19 bp, Mus musculus
  siRNA target sequence for D130067I03Rik (NM_172485.2,2920-2938).
catgtccctgtgatacgtt

SEQ ID NO: 613742 - DNA, 19 bp, Mus musculus
  siRNA target sequence for D130067I03Rik (NM_172485.2,2923-2941).
gtccctgtgatacgtttat

SEQ ID NO: 613743 - DNA, 19 bp, Mus musculus
  siRNA target sequence for D130067I03Rik (NM_172485.2,2925-2943).
ccctgtgatacgtttatgt

SEQ ID NO: 613744 - DNA, 19 bp, Mus musculus
  siRNA target sequence for D130067I03Rik (NM_172485.2,2927-2945).
ctgtgatacgtttatgtct

SEQ ID NO: 613745 - DNA, 19 bp, Mus musculus
  siRNA target sequence for D130067I03Rik (NM_172485.2,2935-2953).
cgtttatgtctcatcctta

SEQ ID NO: 613746 - DNA, 19 bp, Mus musculus
  siRNA target sequence for D130067I03Rik (NM_172485.2,2936-2954).
gtttatgtctcatccttat

SEQ ID NO: 613747 - DNA, 19 bp, Mus musculus
  siRNA target sequence for D130067I03Rik (NM_172485.2,3016-3034).
gggtgcaaggagatgacaa

SEQ ID NO: 613748 - DNA, 19 bp, Mus musculus
  siRNA target sequence for D130067I03Rik (NM_172485.2,3050-3068).
cgtgcgctttcgagcaata

SEQ ID NO: 613749 - DNA, 19 bp, Mus musculus
  siRNA target sequence for D130067I03Rik (NM_172485.2,3053-3071).
gcgctttcgagcaatagca

SEQ ID NO: 613750 - DNA, 19 bp, Mus musculus
  siRNA target sequence for D130067I03Rik (NM_172485.2,3063-3081).
gcaatagcatgctccaata

SEQ ID NO: 613751 - DNA, 19 bp, Mus musculus
  siRNA target sequence for D130067I03Rik (NM_172485.2,3093-3111).
ccggttgacccctcattct

SEQ ID NO: 613752 - DNA, 19 bp, Mus musculus
  siRNA target sequence for D130067I03Rik (NM_172485.2,3113-3131).
caacagctctggttacatt

SEQ ID NO: 613753 - DNA, 19 bp, Mus musculus
  siRNA target sequence for D130067I03Rik (NM_172485.2,3146-3164).
catcccctgtccgtttgat

SEQ ID NO: 613754 - DNA, 19 bp, Mus musculus
  siRNA target sequence for D130067I03Rik (NM_172485.2,3151-3169).
cctgtccgtttgattgcaa

SEQ ID NO: 613755 - DNA, 19 bp, Mus musculus
  siRNA target sequence for D130067I03Rik (NM_172485.2,3156-3174).
ccgtttgattgcaagctaa

SEQ ID NO: 613756 - DNA, 19 bp, Mus musculus
  siRNA target sequence for D130067I03Rik (NM_172485.2,3215-3233).
gattggagtgagaattcga

SEQ ID NO: 613757 - DNA, 19 bp, Mus musculus
  siRNA target sequence for D130067I03Rik (NM_172485.2,3220-3238).
gagtgagaattcgatcaaa

SEQ ID NO: 613758 - DNA, 19 bp, Mus musculus
  siRNA target sequence for D130067I03Rik (NM_172485.2,3222-3240).
gtgagaattcgatcaaaat

SEQ ID NO: 613759 - DNA, 19 bp, Mus musculus
  siRNA target sequence for D130067I03Rik (NM_172485.2,3232-3250).
gatcaaaatggctaaaaga

SEQ ID NO: 613760 - DNA, 19 bp, Mus musculus
  siRNA target sequence for D130067I03Rik (NM_172485.2,3280-3298).
ccaaactggatctcaagaa

SEQ ID NO: 613761 - DNA, 19 bp, Mus musculus
  siRNA target sequence for D130067I03Rik (NM_172485.2,3326-3344).
cagtgagtgtgatcaatat

SEQ ID NO: 613762 - DNA, 19 bp, Mus musculus
  siRNA target sequence for D130067I03Rik (NM_172485.2,3330-3348).
gagtgtgatcaatattcct

SEQ ID NO: 613763 - DNA, 19 bp, Mus musculus
  siRNA target sequence for D130067I03Rik (NM_172485.2,3364-3382).
ggtctccatgcaagatcaa

SEQ ID NO: 613764 - DNA, 19 bp, Mus musculus
  siRNA target sequence for D130067I03Rik (NM_172485.2,3365-3383).
gtctccatgcaagatcaat

SEQ ID NO: 613765 - DNA, 19 bp, Mus musculus
  siRNA target sequence for D130067I03Rik (NM_172485.2,3367-3385).
ctccatgcaagatcaataa

SEQ ID NO: 613766 - DNA, 19 bp, Mus musculus
  siRNA target sequence for D130067I03Rik (NM_172485.2,3636-3654).
ccctcactgaactcaagaa

SEQ ID NO: 613767 - DNA, 19 bp, Mus musculus
  siRNA target sequence for D130067I03Rik (NM_172485.2,3638-3656).
ctcactgaactcaagaact

SEQ ID NO: 613768 - DNA, 19 bp, Mus musculus
  siRNA target sequence for D130067I03Rik (NM_172485.2,3739-3757).
catgccagctgagtgaaaa

SEQ ID NO: 613769 - DNA, 19 bp, Mus musculus
  siRNA target sequence for D130067I03Rik (NM_172485.2,3880-3898).
cctgtctggtggaatgtgt

SEQ ID NO: 613770 - DNA, 19 bp, Mus musculus
  siRNA target sequence for D130067I03Rik (NM_172485.2,3968-3986).
catgagccggactcgattt

SEQ ID NO: 613771 - DNA, 19 bp, Mus musculus
  siRNA target sequence for D130067I03Rik (NM_172485.2,3973-3991).
gccggactcgatttatcat

SEQ ID NO: 613772 - DNA, 19 bp, Mus musculus
  siRNA target sequence for D130067I03Rik (NM_172485.2,3974-3992).
ccggactcgatttatcatt

SEQ ID NO: 613773 - DNA, 19 bp, Mus musculus
  siRNA target sequence for D130067I03Rik (NM_172485.2,3975-3993).
cggactcgatttatcatta

SEQ ID NO: 613774 - DNA, 19 bp, Mus musculus
  siRNA target sequence for D130067I03Rik (NM_172485.2,3976-3994).
ggactcgatttatcattat

SEQ ID NO: 613775 - DNA, 19 bp, Mus musculus
  siRNA target sequence for D130067I03Rik (NM_172485.2,4053-4071).
ccagtgacaccctgctata

SEQ ID NO: 613776 - DNA, 19 bp, Mus musculus
  siRNA target sequence for D130067I03Rik (NM_172485.2,4056-4074).
gtgacaccctgctatagtt

SEQ ID NO: 613777 - DNA, 19 bp, Mus musculus
  siRNA target sequence for D130067I03Rik (NM_172485.2,4084-4102).
gcaactggtctgcatgtaa

SEQ ID NO: 613778 - DNA, 19 bp, Mus musculus
  siRNA target sequence for D130067I03Rik (NM_172485.2,4412-4430).
ccaacaggttctagaaaca

SEQ ID NO: 613779 - DNA, 19 bp, Mus musculus
  siRNA target sequence for D130067I03Rik (NM_172485.2,4444-4462).
gtggcaaatgttatcacta

SEQ ID NO: 613780 - DNA, 19 bp, Mus musculus
  siRNA target sequence for D130067I03Rik (NM_172485.2,4463-4481).
catatggaaagcaagtctt

SEQ ID NO: 613781 - DNA, 19 bp, Mus musculus
  siRNA target sequence for D130067I03Rik (NM_172485.2,4477-4495).
gtctttggaacaataatga

SEQ ID NO: 613782 - DNA, 19 bp, Mus musculus
  siRNA target sequence for D130067I03Rik (NM_172485.2,4514-4532).
gcgctcagatggccttaat

SEQ ID NO: 613783 - DNA, 19 bp, Mus musculus
  siRNA target sequence for D130067I03Rik (NM_172485.2,4516-4534).
gctcagatggccttaatgt

SEQ ID NO: 613784 - DNA, 19 bp, Mus musculus
  siRNA target sequence for D130067I03Rik (NM_172485.2,4567-4585).
ctgctattcggcaatgcat

SEQ ID NO: 613785 - DNA, 19 bp, Mus musculus
  siRNA target sequence for D130067I03Rik (NM_172485.2,4582-4600).
gcattccagcatgcaaaaa

SEQ ID NO: 613786 - DNA, 19 bp, Mus musculus
  siRNA target sequence for D130067I03Rik (NM_172485.2,4706-4724).
ctcggaggataaaaaagct

SEQ ID NO: 613787 - DNA, 19 bp, Mus musculus
  siRNA target sequence for D130067I03Rik (NM_172485.2,4745-4763).
gaaaaatagacctgtgaat

SEQ ID NO: 613788 - DNA, 19 bp, Mus musculus
  siRNA target sequence for D130067I03Rik (NM_172485.2,4811-4829).
cccagatggccgagtaaaa

SEQ ID NO: 613789 - DNA, 19 bp, Mus musculus
  siRNA target sequence for D130067I03Rik (NM_172485.2,4812-4830).
ccagatggccgagtaaaaa

SEQ ID NO: 613790 - DNA, 19 bp, Mus musculus
  siRNA target sequence for D130067I03Rik (NM_172485.2,4813-4831).
cagatggccgagtaaaaat

SEQ ID NO: 613791 - DNA, 19 bp, Mus musculus
  siRNA target sequence for D130067I03Rik (NM_172485.2,4815-4833).
gatggccgagtaaaaatgt

SEQ ID NO: 613792 - DNA, 19 bp, Mus musculus
  siRNA target sequence for D130067I03Rik (NM_172485.2,4844-4862).
cgtttccggtggcagtttt

SEQ ID NO: 613793 - DNA, 19 bp, Mus musculus
  siRNA target sequence for D130067I03Rik (NM_172485.2,4877-4895).
cctagtatttacttcctat

SEQ ID NO: 613794 - DNA, 19 bp, Mus musculus
  siRNA target sequence for D630003K02Rik (NM_177216.2,145-163).
cgctgcccttgattgagaa

SEQ ID NO: 613795 - DNA, 19 bp, Mus musculus
  siRNA target sequence for D630003K02Rik (NM_177216.2,255-273).
ctcttggcacaaattaaca

SEQ ID NO: 613796 - DNA, 19 bp, Mus musculus
  siRNA target sequence for D630003K02Rik (NM_177216.2,261-279).
gcacaaattaacaatgaat

SEQ ID NO: 613797 - DNA, 19 bp, Mus musculus
  siRNA target sequence for D630003K02Rik (NM_177216.2,262-280).
cacaaattaacaatgaatt

SEQ ID NO: 613798 - DNA, 19 bp, Mus musculus
  siRNA target sequence for D630003K02Rik (NM_177216.2,281-299).
ggtgatcagggcttacaca

SEQ ID NO: 613799 - DNA, 19 bp, Mus musculus
  siRNA target sequence for D630003K02Rik (NM_177216.2,305-323).
ctccagtgacgatgatcaa

SEQ ID NO: 613800 - DNA, 19 bp, Mus musculus
  siRNA target sequence for D630003K02Rik (NM_177216.2,330-348).
gtggacttaattataaaga

SEQ ID NO: 613801 - DNA, 19 bp, Mus musculus
  siRNA target sequence for D630003K02Rik (NM_177216.2,333-351).
gacttaattataaagatct

SEQ ID NO: 613802 - DNA, 19 bp, Mus musculus
  siRNA target sequence for D630003K02Rik (NM_177216.2,471-489).
gagccaggaacccttttaa

SEQ ID NO: 613803 - DNA, 19 bp, Mus musculus
  siRNA target sequence for D630003K02Rik (NM_177216.2,474-492).
ccaggaacccttttaatca

SEQ ID NO: 613804 - DNA, 19 bp, Mus musculus
  siRNA target sequence for D630003K02Rik (NM_177216.2,689-707).
cgccacgactcatcacaaa

SEQ ID NO: 613805 - DNA, 19 bp, Mus musculus
  siRNA target sequence for D630003K02Rik (NM_177216.2,691-709).
ccacgactcatcacaaaca

SEQ ID NO: 613806 - DNA, 19 bp, Mus musculus
  siRNA target sequence for D630003K02Rik (NM_177216.2,694-712).
cgactcatcacaaacagtt

SEQ ID NO: 613807 - DNA, 19 bp, Mus musculus
  siRNA target sequence for D630003K02Rik (NM_177216.2,697-715).
ctcatcacaaacagttcaa

SEQ ID NO: 613808 - DNA, 19 bp, Mus musculus
  siRNA target sequence for D630003K02Rik (NM_177216.2,708-726).
cagttcaacctgtggtata

SEQ ID NO: 613809 - DNA, 19 bp, Mus musculus
  siRNA target sequence for D630003K02Rik (NM_177216.2,771-789).
gttagcgctgacatgatca

SEQ ID NO: 613810 - DNA, 19 bp, Mus musculus
  siRNA target sequence for D630003K02Rik (NM_177216.2,889-907).
gctataccaaggacatgat

SEQ ID NO: 613811 - DNA, 19 bp, Mus musculus
  siRNA target sequence for D630003K02Rik (NM_177216.2,890-908).
ctataccaaggacatgatt

SEQ ID NO: 613812 - DNA, 19 bp, Mus musculus
  siRNA target sequence for D630032B01Rik (NM_172532.1,431-449).
cgtaaatggtacgacttaa

SEQ ID NO: 613813 - DNA, 19 bp, Mus musculus
  siRNA target sequence for D630032B01Rik (NM_172532.1,432-450).
gtaaatggtacgacttaat

SEQ ID NO: 613814 - DNA, 19 bp, Mus musculus
  siRNA target sequence for D630032B01Rik (NM_172532.1,438-456).
ggtacgacttaatgataca

SEQ ID NO: 613815 - DNA, 19 bp, Mus musculus
  siRNA target sequence for D630032B01Rik (NM_172532.1,439-457).
gtacgacttaatgatacaa

SEQ ID NO: 613816 - DNA, 19 bp, Mus musculus
  siRNA target sequence for D630032B01Rik (NM_172532.1,466-484).
cgaccttgccaagatcata

SEQ ID NO: 613817 - DNA, 19 bp, Mus musculus
  siRNA target sequence for D630032B01Rik (NM_172532.1,469-487).
ccttgccaagatcataaca

SEQ ID NO: 613818 - DNA, 19 bp, Mus musculus
  siRNA target sequence for D630032B01Rik (NM_172532.1,520-538).
gggagaaattctgtattca

SEQ ID NO: 613819 - DNA, 19 bp, Mus musculus
  siRNA target sequence for D630032B01Rik (NM_172532.1,563-581).
gaggaagctcgccgtattt

SEQ ID NO: 613820 - DNA, 19 bp, Mus musculus
  siRNA target sequence for D630032B01Rik (NM_172532.1,565-583).
ggaagctcgccgtatttat

SEQ ID NO: 613821 - DNA, 19 bp, Mus musculus
  siRNA target sequence for D630032B01Rik (NM_172532.1,595-613).
ctatacctctgccaaagat

SEQ ID NO: 613822 - DNA, 19 bp, Mus musculus
  siRNA target sequence for D630032B01Rik (NM_172532.1,878-896).
gatccattggtgtccaaaa

SEQ ID NO: 613823 - DNA, 19 bp, Mus musculus
  siRNA target sequence for D630032B01Rik (NM_172532.1,887-905).
gtgtccaaaatttccttta

SEQ ID NO: 613824 - DNA, 19 bp, Mus musculus
  siRNA target sequence for D630032B01Rik (NM_172532.1,934-952).
gctacatcacgcagcaaat

SEQ ID NO: 613825 - DNA, 19 bp, Mus musculus
  siRNA target sequence for D630032B01Rik (NM_172532.1,935-953).
ctacatcacgcagcaaatt

SEQ ID NO: 613826 - DNA, 19 bp, Mus musculus
  siRNA target sequence for D630032B01Rik (NM_172532.1,981-999).
gtggcctcgccccattcat

SEQ ID NO: 613827 - DNA, 19 bp, Mus musculus
  siRNA target sequence for D630032B01Rik (NM_172532.1,984-1002).
gcctcgccccattcattgt

SEQ ID NO: 613828 - DNA, 19 bp, Mus musculus
  siRNA target sequence for D630032B01Rik (NM_172532.1,988-1006).
cgccccattcattgtcttt

SEQ ID NO: 613829 - DNA, 19 bp, Mus musculus
  siRNA target sequence for D630032B01Rik (NM_172532.1,1038-1056).
gggcaatggcgtctaaatt

SEQ ID NO: 613830 - DNA, 19 bp, Mus musculus
  siRNA target sequence for D630032B01Rik (NM_172532.1,1039-1057).
ggcaatggcgtctaaattt

SEQ ID NO: 613831 - DNA, 19 bp, Mus musculus
  siRNA target sequence for D630032B01Rik (NM_172532.1,1045-1063).
ggcgtctaaatttaggaat

SEQ ID NO: 613832 - DNA, 19 bp, Mus musculus
  siRNA target sequence for D630032B01Rik (NM_172532.1,1077-1095).
gcgtttgctcaaacagatt

SEQ ID NO: 613833 - DNA, 19 bp, Mus musculus
  siRNA target sequence for D630032B01Rik (NM_172532.1,1107-1125).
ggggtatccacgattcctt

SEQ ID NO: 613834 - DNA, 19 bp, Mus musculus
  siRNA target sequence for D630032B01Rik (NM_172532.1,1108-1126).
gggtatccacgattccttt

SEQ ID NO: 613835 - DNA, 19 bp, Mus musculus
  siRNA target sequence for D630032B01Rik (NM_172532.1,1117-1135).
cgattcctttgtaacgaaa

SEQ ID NO: 613836 - DNA, 19 bp, Mus musculus
  siRNA target sequence for D630032B01Rik (NM_172532.1,1118-1136).
gattcctttgtaacgaaat

SEQ ID NO: 613837 - DNA, 19 bp, Mus musculus
  siRNA target sequence for D630032B01Rik (NM_172532.1,1164-1182).
gtgtaggtaacggatttga

SEQ ID NO: 613838 - DNA, 19 bp, Mus musculus
  siRNA target sequence for D630032B01Rik (NM_172532.1,1191-1209).
cgactcaagggccgttaat

SEQ ID NO: 613839 - DNA, 19 bp, Mus musculus
  siRNA target sequence for D630032B01Rik (NM_172532.1,1192-1210).
gactcaagggccgttaatt

SEQ ID NO: 613840 - DNA, 19 bp, Mus musculus
  siRNA target sequence for D630032B01Rik (NM_172532.1,1194-1212).
ctcaagggccgttaattaa

SEQ ID NO: 613841 - DNA, 19 bp, Mus musculus
  siRNA target sequence for D630032B01Rik (NM_172532.1,1199-1217).
gggccgttaattaatgaga

SEQ ID NO: 613842 - DNA, 19 bp, Mus musculus
  siRNA target sequence for D630032B01Rik (NM_172532.1,1201-1219).
gccgttaattaatgagaaa

SEQ ID NO: 613843 - DNA, 19 bp, Mus musculus
  siRNA target sequence for D630032B01Rik (NM_172532.1,1385-1403).
ctggcaccagtcatcaagt

SEQ ID NO: 613844 - DNA, 19 bp, Mus musculus
  siRNA target sequence for D630032B01Rik (NM_172532.1,1387-1405).
ggcaccagtcatcaagttt

SEQ ID NO: 613845 - DNA, 19 bp, Mus musculus
  siRNA target sequence for D630032B01Rik (NM_172532.1,1519-1537).
cggcatggtcggtgtgaat

SEQ ID NO: 613846 - DNA, 19 bp, Mus musculus
  siRNA target sequence for D630032B01Rik (NM_172532.1,1521-1539).
gcatggtcggtgtgaatga

SEQ ID NO: 613847 - DNA, 19 bp, Mus musculus
  siRNA target sequence for D630032B01Rik (NM_172532.1,1522-1540).
catggtcggtgtgaatgaa

SEQ ID NO: 613848 - DNA, 19 bp, Mus musculus
  siRNA target sequence for D630032B01Rik (NM_172532.1,1566-1584).
cttttggtggggtgaaaca

SEQ ID NO: 613849 - DNA, 19 bp, Mus musculus
  siRNA target sequence for D630032B01Rik (NM_172532.1,1627-1645).
gtacctagaggtcaagtat

SEQ ID NO: 613850 - DNA, 19 bp, Mus musculus
  siRNA target sequence for Dct (NM_010024.1,540-558).
cccgaggcaaccaacatct

SEQ ID NO: 613851 - DNA, 19 bp, Mus musculus
  siRNA target sequence for Dct (NM_010024.1,612-630).
ccctggagtggcccttata

SEQ ID NO: 613852 - DNA, 19 bp, Mus musculus
  siRNA target sequence for Dct (NM_010024.1,617-635).
gagtggcccttatatcctt

SEQ ID NO: 613853 - DNA, 19 bp, Mus musculus
  siRNA target sequence for Dct (NM_010024.1,622-640).
gcccttatatccttcgaaa

SEQ ID NO: 613854 - DNA, 19 bp, Mus musculus
  siRNA target sequence for Dct (NM_010024.1,661-679).
ggccgagaaaattcttcaa

SEQ ID NO: 613855 - DNA, 19 bp, Mus musculus
  siRNA target sequence for Dct (NM_010024.1,674-692).
cttcaaccggacatgcaaa

SEQ ID NO: 613856 - DNA, 19 bp, Mus musculus
  siRNA target sequence for Dct (NM_010024.1,775-793).
ccatcctaagacggaatat

SEQ ID NO: 613857 - DNA, 19 bp, Mus musculus
  siRNA target sequence for Dct (NM_010024.1,779-797).
cctaagacggaatatccat

SEQ ID NO: 613858 - DNA, 19 bp, Mus musculus
  siRNA target sequence for Dct (NM_010024.1,780-798).
ctaagacggaatatccatt

SEQ ID NO: 613859 - DNA, 19 bp, Mus musculus
  siRNA target sequence for Dct (NM_010024.1,938-956).
ctgcagcgtgtatgacttt

SEQ ID NO: 613860 - DNA, 19 bp, Mus musculus
  siRNA target sequence for Dct (NM_010024.1,941-959).
cagcgtgtatgactttttt

SEQ ID NO: 613861 - DNA, 19 bp, Mus musculus
  siRNA target sequence for Dct (NM_010024.1,965-983).
gctccattattattctgtt

SEQ ID NO: 613862 - DNA, 19 bp, Mus musculus
  siRNA target sequence for Dct (NM_010024.1,979-997).
ctgttcgagacacattatt

SEQ ID NO: 613863 - DNA, 19 bp, Mus musculus
  siRNA target sequence for Dct (NM_010024.1,1000-1018).
gtccaggacgcccctataa

SEQ ID NO: 613864 - DNA, 19 bp, Mus musculus
  siRNA target sequence for Dct (NM_010024.1,1010-1028).
cccctataaggccattgat

SEQ ID NO: 613865 - DNA, 19 bp, Mus musculus
  siRNA target sequence for Dct (NM_010024.1,1206-1224).
gatgacccaacgctgatta

SEQ ID NO: 613866 - DNA, 19 bp, Mus musculus
  siRNA target sequence for Dct (NM_010024.1,1227-1245).
cggaactcgagattctcta

SEQ ID NO: 613867 - DNA, 19 bp, Mus musculus
  siRNA target sequence for Dct (NM_010024.1,1261-1279).
gcgacagcttggatgacta

SEQ ID NO: 613868 - DNA, 19 bp, Mus musculus
  siRNA target sequence for Dct (NM_010024.1,1298-1316).
gtgtaatggaacctatgaa

SEQ ID NO: 613869 - DNA, 19 bp, Mus musculus
  siRNA target sequence for Dct (NM_010024.1,1334-1352).
caaagtaggcagaaataat

SEQ ID NO: 613870 - DNA, 19 bp, Mus musculus
  siRNA target sequence for Dct (NM_010024.1,1338-1356).
gtaggcagaaataatgaga

SEQ ID NO: 613871 - DNA, 19 bp, Mus musculus
  siRNA target sequence for Dct (NM_010024.1,1497-1515).
gtcatgaaccttcataact

SEQ ID NO: 613872 - DNA, 19 bp, Mus musculus
  siRNA target sequence for Dct (NM_010024.1,1600-1618).
cagacgccatctttgatga

SEQ ID NO: 613873 - DNA, 19 bp, Mus musculus
  siRNA target sequence for Dct (NM_010024.1,1677-1695).
ggtcacaaccgaatgtata

SEQ ID NO: 613874 - DNA, 19 bp, Mus musculus
  siRNA target sequence for Dct (NM_010024.1,1678-1696).
gtcacaaccgaatgtataa

SEQ ID NO: 613875 - DNA, 19 bp, Mus musculus
  siRNA target sequence for Dct (NM_010024.1,1749-1767).
gagcaacttggctacaatt

SEQ ID NO: 613876 - DNA, 19 bp, Mus musculus
  siRNA target sequence for Dct (NM_010024.1,1866-1884).
ctggcttttcttcaataca

SEQ ID NO: 613877 - DNA, 19 bp, Mus musculus
  siRNA target sequence for Dct (NM_010024.1,1868-1886).
ggcttttcttcaatacaga

SEQ ID NO: 613878 - DNA, 19 bp, Mus musculus
  siRNA target sequence for Dct (NM_010024.1,1900-1918).
gctatgcgcccttaatgga

SEQ ID NO: 613879 - DNA, 19 bp, Mus musculus
  siRNA target sequence for Dct (NM_010024.1,1923-1941).
ggtctcagcagcaagagat

SEQ ID NO: 613880 - DNA, 19 bp, Mus musculus
  siRNA target sequence for Dct (NM_010024.1,1924-1942).
gtctcagcagcaagagata

SEQ ID NO: 613881 - DNA, 19 bp, Mus musculus
  siRNA target sequence for Decr1 (NM_026172.3,165-183).
gctgggccgtgcgttcttt

SEQ ID NO: 613882 - DNA, 19 bp, Mus musculus
  siRNA target sequence for Decr1 (NM_026172.3,211-229).
ccgggtcctcagaggtttt

SEQ ID NO: 613883 - DNA, 19 bp, Mus musculus
  siRNA target sequence for Decr1 (NM_026172.3,214-232).
ggtcctcagaggtttttca

SEQ ID NO: 613884 - DNA, 19 bp, Mus musculus
  siRNA target sequence for Decr1 (NM_026172.3,268-286).
gctccacagtctaaattct

SEQ ID NO: 613885 - DNA, 19 bp, Mus musculus
  siRNA target sequence for Decr1 (NM_026172.3,294-312).
cgttttaaagcctatgcta

SEQ ID NO: 613886 - DNA, 19 bp, Mus musculus
  siRNA target sequence for Decr1 (NM_026172.3,309-327).
gctaccacctgatgctttt

SEQ ID NO: 613887 - DNA, 19 bp, Mus musculus
  siRNA target sequence for Decr1 (NM_026172.3,366-384).
ccttggcaaggcaatgaca

SEQ ID NO: 613888 - DNA, 19 bp, Mus musculus
  siRNA target sequence for Decr1 (NM_026172.3,370-388).
ggcaaggcaatgacaactt

SEQ ID NO: 613889 - DNA, 19 bp, Mus musculus
  siRNA target sequence for Decr1 (NM_026172.3,376-394).
gcaatgacaactttcttgt

SEQ ID NO: 613890 - DNA, 19 bp, Mus musculus
  siRNA target sequence for Decr1 (NM_026172.3,423-441).
cagcagaaatattgatgtt

SEQ ID NO: 613891 - DNA, 19 bp, Mus musculus
  siRNA target sequence for Decr1 (NM_026172.3,448-466).
gcgactgcagaagagattt

SEQ ID NO: 613892 - DNA, 19 bp, Mus musculus
  siRNA target sequence for Decr1 (NM_026172.3,514-532).
gatcctgatatggtacata

SEQ ID NO: 613893 - DNA, 19 bp, Mus musculus
  siRNA target sequence for Decr1 (NM_026172.3,517-535).
cctgatatggtacataaca

SEQ ID NO: 613894 - DNA, 19 bp, Mus musculus
  siRNA target sequence for Decr1 (NM_026172.3,540-558).
gctggaactgatcaaagtt

SEQ ID NO: 613895 - DNA, 19 bp, Mus musculus
  siRNA target sequence for Decr1 (NM_026172.3,565-583).
catccggatgtggtgataa

SEQ ID NO: 613896 - DNA, 19 bp, Mus musculus
  siRNA target sequence for Decr1 (NM_026172.3,642-660).
gaccataactgacatagtt

SEQ ID NO: 613897 - DNA, 19 bp, Mus musculus
  siRNA target sequence for Decr1 (NM_026172.3,644-662).
ccataactgacatagttct

SEQ ID NO: 613898 - DNA, 19 bp, Mus musculus
  siRNA target sequence for Decr1 (NM_026172.3,674-692).
cctatgtgacactagaaat

SEQ ID NO: 613899 - DNA, 19 bp, Mus musculus
  siRNA target sequence for Decr1 (NM_026172.3,679-697).
gtgacactagaaattggaa

SEQ ID NO: 613900 - DNA, 19 bp, Mus musculus
  siRNA target sequence for Decr1 (NM_026172.3,727-745).
gcgtttcttgccatcacta

SEQ ID NO: 613901 - DNA, 19 bp, Mus musculus
  siRNA target sequence for Decr1 (NM_026172.3,761-779).
gtggatcaggctttgtaat

SEQ ID NO: 613902 - DNA, 19 bp, Mus musculus
  siRNA target sequence for Decr1 (NM_026172.3,771-789).
ctttgtaatgccaagttct

SEQ ID NO: 613903 - DNA, 19 bp, Mus musculus
  siRNA target sequence for Decr1 (NM_026172.3,802-820).
ggcgtggaagccatgaata

SEQ ID NO: 613904 - DNA, 19 bp, Mus musculus
  siRNA target sequence for Decr1 (NM_026172.3,803-821).
gcgtggaagccatgaataa

SEQ ID NO: 613905 - DNA, 19 bp, Mus musculus
  siRNA target sequence for Decr1 (NM_026172.3,850-868).
ggaatgcgtttcaacataa

SEQ ID NO: 613906 - DNA, 19 bp, Mus musculus
  siRNA target sequence for Decr1 (NM_026172.3,851-869).
gaatgcgtttcaacataat

SEQ ID NO: 613907 - DNA, 19 bp, Mus musculus
  siRNA target sequence for Decr1 (NM_026172.3,874-892).
ccaggacctatcaaaacca

SEQ ID NO: 613908 - DNA, 19 bp, Mus musculus
  siRNA target sequence for Decr1 (NM_026172.3,912-930).
ggacccgactggaagattt

SEQ ID NO: 613909 - DNA, 19 bp, Mus musculus
  siRNA target sequence for Decr1 (NM_026172.3,959-977).
gtggtcgtctgggaactat

SEQ ID NO: 613910 - DNA, 19 bp, Mus musculus
  siRNA target sequence for Decr1 (NM_026172.3,1001-1019).
ctttcctatgcagtgatta

SEQ ID NO: 613911 - DNA, 19 bp, Mus musculus
  siRNA target sequence for Decr1 (NM_026172.3,1015-1033).
gattatgcctcttggatta

SEQ ID NO: 613912 - DNA, 19 bp, Mus musculus
  siRNA target sequence for Decr1 (NM_026172.3,1054-1072).
gacggtggagaggaagtat

SEQ ID NO: 613913 - DNA, 19 bp, Mus musculus
  siRNA target sequence for Decr1 (NM_026172.3,1060-1078).
ggagaggaagtatttctgt

SEQ ID NO: 613914 - DNA, 19 bp, Mus musculus
  siRNA target sequence for Decr1 (NM_026172.3,1110-1128).
caaggaggagtgggatata

SEQ ID NO: 613915 - DNA, 19 bp, Mus musculus
  siRNA target sequence for Decr2 (NM_011933.1,244-262).
cttccggatcgcagagatt

SEQ ID NO: 613916 - DNA, 19 bp, Mus musculus
  siRNA target sequence for Decr2 (NM_011933.1,248-266).
cggatcgcagagattttca

SEQ ID NO: 613917 - DNA, 19 bp, Mus musculus
  siRNA target sequence for Decr2 (NM_011933.1,249-267).
ggatcgcagagattttcat

SEQ ID NO: 613918 - DNA, 19 bp, Mus musculus
  siRNA target sequence for Decr2 (NM_011933.1,461-479).
gcagctggaaacttcctat

SEQ ID NO: 613919 - DNA, 19 bp, Mus musculus
  siRNA target sequence for Decr2 (NM_011933.1,551-569).
gtgtctagtgtgctttaca

SEQ ID NO: 613920 - DNA, 19 bp, Mus musculus
  siRNA target sequence for Decr2 (NM_011933.1,555-573).
ctagtgtgctttacaagaa

SEQ ID NO: 613921 - DNA, 19 bp, Mus musculus
  siRNA target sequence for Decr2 (NM_011933.1,587-605).
catggaggagtgattgtga

SEQ ID NO: 613922 - DNA, 19 bp, Mus musculus
  siRNA target sequence for Decr2 (NM_011933.1,704-722).
gaatggggtccccagaata

SEQ ID NO: 613923 - DNA, 19 bp, Mus musculus
  siRNA target sequence for Decr2 (NM_011933.1,764-782).
gagggtttaaggcgattaa

SEQ ID NO: 613924 - DNA, 19 bp, Mus musculus
  siRNA target sequence for Decr2 (NM_011933.1,787-805).
ctccaatgccagttcgaaa

SEQ ID NO: 613925 - DNA, 19 bp, Mus musculus
  siRNA target sequence for Decr2 (NM_011933.1,789-807).
ccaatgccagttcgaaatt

SEQ ID NO: 613926 - DNA, 19 bp, Mus musculus
  siRNA target sequence for Decr2 (NM_011933.1,790-808).
caatgccagttcgaaatta

SEQ ID NO: 613927 - DNA, 19 bp, Mus musculus
  siRNA target sequence for Decr2 (NM_011933.1,795-813).
ccagttcgaaattaaagca

SEQ ID NO: 613928 - DNA, 19 bp, Mus musculus
  siRNA target sequence for Decr2 (NM_011933.1,796-814).
cagttcgaaattaaagcat

SEQ ID NO: 613929 - DNA, 19 bp, Mus musculus
  siRNA target sequence for Decr2 (NM_011933.1,798-816).
gttcgaaattaaagcattt

SEQ ID NO: 613930 - DNA, 19 bp, Mus musculus
  siRNA target sequence for Decr2 (NM_011933.1,880-898).
cagccctctggcttcctat

SEQ ID NO: 613931 - DNA, 19 bp, Mus musculus
  siRNA target sequence for Decr2 (NM_011933.1,962-980).
caactgctagagtttgaat

SEQ ID NO: 613932 - DNA, 19 bp, Mus musculus
  siRNA target sequence for Degs (NM_007853.2,223-241).
gcttcattttacttagtca

SEQ ID NO: 613933 - DNA, 19 bp, Mus musculus
  siRNA target sequence for Degs (NM_007853.2,306-324).
catgactctggctatccat

SEQ ID NO: 613934 - DNA, 19 bp, Mus musculus
  siRNA target sequence for Degs (NM_007853.2,311-329).
ctctggctatccatgagat

SEQ ID NO: 613935 - DNA, 19 bp, Mus musculus
  siRNA target sequence for Degs (NM_007853.2,406-424).
ggagtgccatactcgattt

SEQ ID NO: 613936 - DNA, 19 bp, Mus musculus
  siRNA target sequence for Degs (NM_007853.2,409-427).
gtgccatactcgatttcct

SEQ ID NO: 613937 - DNA, 19 bp, Mus musculus
  siRNA target sequence for Degs (NM_007853.2,459-477).
cctcggagcggataagatt

SEQ ID NO: 613938 - DNA, 19 bp, Mus musculus
  siRNA target sequence for Degs (NM_007853.2,462-480).
cggagcggataagattgat

SEQ ID NO: 613939 - DNA, 19 bp, Mus musculus
  siRNA target sequence for Degs (NM_007853.2,464-482).
gagcggataagattgatgt

SEQ ID NO: 613940 - DNA, 19 bp, Mus musculus
  siRNA target sequence for Degs (NM_007853.2,467-485).
cggataagattgatgtaga

SEQ ID NO: 613941 - DNA, 19 bp, Mus musculus
  siRNA target sequence for Degs (NM_007853.2,569-587).
cttttagacccctgttcat

SEQ ID NO: 613942 - DNA, 19 bp, Mus musculus
  siRNA target sequence for Degs (NM_007853.2,671-689).
gagtgaaatctttagtcta

SEQ ID NO: 613943 - DNA, 19 bp, Mus musculus
  siRNA target sequence for Degs (NM_007853.2,726-744).
cccaatttctgggcatttt

SEQ ID NO: 613944 - DNA, 19 bp, Mus musculus
  siRNA target sequence for Degs (NM_007853.2,727-745).
ccaatttctgggcatttta

SEQ ID NO: 613945 - DNA, 19 bp, Mus musculus
  siRNA target sequence for Degs (NM_007853.2,728-746).
caatttctgggcattttat

SEQ ID NO: 613946 - DNA, 19 bp, Mus musculus
  siRNA target sequence for Degs (NM_007853.2,739-757).
cattttatagccgaacatt

SEQ ID NO: 613947 - DNA, 19 bp, Mus musculus
  siRNA target sequence for Degs (NM_007853.2,748-766).
gccgaacattacatgttct

SEQ ID NO: 613948 - DNA, 19 bp, Mus musculus
  siRNA target sequence for Degs (NM_007853.2,775-793).
cacgaaacctactcctatt

SEQ ID NO: 613949 - DNA, 19 bp, Mus musculus
  siRNA target sequence for Degs (NM_007853.2,777-795).
cgaaacctactcctattat

SEQ ID NO: 613950 - DNA, 19 bp, Mus musculus
  siRNA target sequence for Degs (NM_007853.2,854-872).
ccaacgttcctgggaaaaa

SEQ ID NO: 613951 - DNA, 19 bp, Mus musculus
  siRNA target sequence for Degs (NM_007853.2,913-931).
gacctcccgcactacaact

SEQ ID NO: 613952 - DNA, 19 bp, Mus musculus
  siRNA target sequence for Degs (NM_007853.2,935-953).
ggatcaaggtgctctatga

SEQ ID NO: 613953 - DNA, 19 bp, Mus musculus
  siRNA target sequence for Degs (NM_007853.2,979-997).
ccctactcgcggatgaaga

SEQ ID NO: 613954 - DNA, 19 bp, Mus musculus
  siRNA target sequence for Dhcr7 (NM_007856.1,168-186).
gctcttcgctccattcatt

SEQ ID NO: 613955 - DNA, 19 bp, Mus musculus
  siRNA target sequence for Dhcr7 (NM_007856.1,178-196).
ccattcattgtgtactact

SEQ ID NO: 613956 - DNA, 19 bp, Mus musculus
  siRNA target sequence for Dhcr7 (NM_007856.1,265-283).
gctagtctggcagacattt

SEQ ID NO: 613957 - DNA, 19 bp, Mus musculus
  siRNA target sequence for Dhcr7 (NM_007856.1,308-326).
ctaaagctgcccaactgta

SEQ ID NO: 613958 - DNA, 19 bp, Mus musculus
  siRNA target sequence for Dhcr7 (NM_007856.1,386-404).
gatttctgccaggttatgt

SEQ ID NO: 613959 - DNA, 19 bp, Mus musculus
  siRNA target sequence for Dhcr7 (NM_007856.1,414-432).
ccaagaaggtgccattact

SEQ ID NO: 613960 - DNA, 19 bp, Mus musculus
  siRNA target sequence for Dhcr7 (NM_007856.1,433-451).
ccagcaggggttgtaaaca

SEQ ID NO: 613961 - DNA, 19 bp, Mus musculus
  siRNA target sequence for Dhcr7 (NM_007856.1,436-454).
gcaggggttgtaaacaagt

SEQ ID NO: 613962 - DNA, 19 bp, Mus musculus
  siRNA target sequence for Dhcr7 (NM_007856.1,437-455).
caggggttgtaaacaagta

SEQ ID NO: 613963 - DNA, 19 bp, Mus musculus
  siRNA target sequence for Dhcr7 (NM_007856.1,440-458).
gggttgtaaacaagtatga

SEQ ID NO: 613964 - DNA, 19 bp, Mus musculus
  siRNA target sequence for Dhcr7 (NM_007856.1,490-508).
cacatcctctggtttgtga

SEQ ID NO: 613965 - DNA, 19 bp, Mus musculus
  siRNA target sequence for Dhcr7 (NM_007856.1,505-523).
gtgaacgcttacctcttat

SEQ ID NO: 613966 - DNA, 19 bp, Mus musculus
  siRNA target sequence for Dhcr7 (NM_007856.1,533-551).
cccccaccatcatctttga

SEQ ID NO: 613967 - DNA, 19 bp, Mus musculus
  siRNA target sequence for Dhcr7 (NM_007856.1,602-620).
ccacgttcgcaatgatcaa

SEQ ID NO: 613968 - DNA, 19 bp, Mus musculus
  siRNA target sequence for Dhcr7 (NM_007856.1,641-659).
gtgccgaagactgcaaatt

SEQ ID NO: 613969 - DNA, 19 bp, Mus musculus
  siRNA target sequence for Dhcr7 (NM_007856.1,653-671).
gcaaattcacaggcaattt

SEQ ID NO: 613970 - DNA, 19 bp, Mus musculus
  siRNA target sequence for Dhcr7 (NM_007856.1,727-745).
gacttcaagctgttcttca

SEQ ID NO: 613971 - DNA, 19 bp, Mus musculus
  siRNA target sequence for Dhcr7 (NM_007856.1,763-781).
gtagcctggaccctcatta

SEQ ID NO: 613972 - DNA, 19 bp, Mus musculus
  siRNA target sequence for Dhcr7 (NM_007856.1,767-785).
cctggaccctcattaacct

SEQ ID NO: 613973 - DNA, 19 bp, Mus musculus
  siRNA target sequence for Dhcr7 (NM_007856.1,859-877).
gccatctacgtgttagact

SEQ ID NO: 613974 - DNA, 19 bp, Mus musculus
  siRNA target sequence for Dhcr7 (NM_007856.1,860-878).
ccatctacgtgttagactt

SEQ ID NO: 613975 - DNA, 19 bp, Mus musculus
  siRNA target sequence for Dhcr7 (NM_007856.1,1057-1075).
ggcctcgtgggttactata

SEQ ID NO: 613976 - DNA, 19 bp, Mus musculus
  siRNA target sequence for Dhcr7 (NM_007856.1,1058-1076).
gcctcgtgggttactatat

SEQ ID NO: 613977 - DNA, 19 bp, Mus musculus
  siRNA target sequence for Dhcr7 (NM_007856.1,1060-1078).
ctcgtgggttactatatct

SEQ ID NO: 613978 - DNA, 19 bp, Mus musculus
  siRNA target sequence for Dhcr7 (NM_007856.1,1306-1324).
ctcctcccctacttttaca

SEQ ID NO: 613979 - DNA, 19 bp, Mus musculus
  siRNA target sequence for Dhcr7 (NM_007856.1,1314-1332).
ctacttttacatcatctat

SEQ ID NO: 613980 - DNA, 19 bp, Mus musculus
  siRNA target sequence for Dhcr7 (NM_007856.1,1374-1392).
ccgctgtgccaacaagtat

SEQ ID NO: 613981 - DNA, 19 bp, Mus musculus
  siRNA target sequence for Dhcr7 (NM_007856.1,1433-1451).
gcctgctgcctggaatctt

SEQ ID NO: 613982 - DNA, 19 bp, Mus musculus
  siRNA target sequence for Dhrs1 (NM_026819.2,284-302).
gcaggtgccacagtttaca

SEQ ID NO: 613983 - DNA, 19 bp, Mus musculus
  siRNA target sequence for Dhrs1 (NM_026819.2,285-303).
caggtgccacagtttacat

SEQ ID NO: 613984 - DNA, 19 bp, Mus musculus
  siRNA target sequence for Dhrs1 (NM_026819.2,371-389).
gtacccgtggtgtgtgatt

SEQ ID NO: 613985 - DNA, 19 bp, Mus musculus
  siRNA target sequence for Dhrs1 (NM_026819.2,374-392).
cccgtggtgtgtgattcaa

SEQ ID NO: 613986 - DNA, 19 bp, Mus musculus
  siRNA target sequence for Dhrs1 (NM_026819.2,452-470).
ctagatgttctggtcaata

SEQ ID NO: 613987 - DNA, 19 bp, Mus musculus
  siRNA target sequence for Dhrs1 (NM_026819.2,537-555).
ccatttgggatgacataaa

SEQ ID NO: 613988 - DNA, 19 bp, Mus musculus
  siRNA target sequence for Dhrs1 (NM_026819.2,564-582).
gactcagaggccactactt

SEQ ID NO: 613989 - DNA, 19 bp, Mus musculus
  siRNA target sequence for Dhrs1 (NM_026819.2,657-675).
ggctgcagcatatgttcaa

SEQ ID NO: 613990 - DNA, 19 bp, Mus musculus
  siRNA target sequence for Dhrs1 (NM_026819.2,670-688).
gttcaatgtcccttatggt

SEQ ID NO: 613991 - DNA, 19 bp, Mus musculus
  siRNA target sequence for Dhrs1 (NM_026819.2,774-792).
cagggctggtgcaaacaga

SEQ ID NO: 613992 - DNA, 19 bp, Mus musculus
  siRNA target sequence for Dhrs1 (NM_026819.2,830-848).
gaggaccctctatttaaga

SEQ ID NO: 613993 - DNA, 19 bp, Mus musculus
  siRNA target sequence for Dhrs1 (NM_026819.2,874-892).
cgaaagtccagaaatgagt

SEQ ID NO: 613994 - DNA, 19 bp, Mus musculus
  siRNA target sequence for Dhrs1 (NM_026819.2,976-994).
gcgctatggccttaaggat

SEQ ID NO: 613995 - DNA, 19 bp, Mus musculus
  siRNA target sequence for Dhrs1 (NM_026819.2,977-995).
cgctatggccttaaggata

SEQ ID NO: 613996 - DNA, 19 bp, Mus musculus
  siRNA target sequence for Dhrs1 (NM_026819.2,1109-1127).
gtcgtcaccctctacaaca

SEQ ID NO: 613997 - DNA, 19 bp, Mus musculus
  siRNA target sequence for Dhrs1 (NM_026819.2,1116-1134).
ccctctacaacagcaaatt

SEQ ID NO: 613998 - DNA, 19 bp, Mus musculus
  siRNA target sequence for Dhrs10 (NM_025330.1,322-340).
cagggccaccattctagaa

SEQ ID NO: 613999 - DNA, 19 bp, Mus musculus
  siRNA target sequence for Dhrs10 (NM_025330.1,476-494).
ggacgcaaggctagtaaaa

SEQ ID NO: 614000 - DNA, 19 bp, Mus musculus
  siRNA target sequence for Dhrs10 (NM_025330.1,479-497).
cgcaaggctagtaaaagca

SEQ ID NO: 614001 - DNA, 19 bp, Mus musculus
  siRNA target sequence for Dhrs10 (NM_025330.1,513-531).
ccactctcccacctaatgt

SEQ ID NO: 614002 - DNA, 19 bp, Mus musculus
  siRNA target sequence for Dhrs10 (NM_025330.1,516-534).
ctctcccacctaatgtaca

SEQ ID NO: 614003 - DNA, 19 bp, Mus musculus
  siRNA target sequence for Dhrs3 (NM_011303.2,477-495).
ccctctgcaaatgatctat

SEQ ID NO: 614004 - DNA, 19 bp, Mus musculus
  siRNA target sequence for Dhrs3 (NM_011303.2,937-955).
cagaacggccatattgtgt

SEQ ID NO: 614005 - DNA, 19 bp, Mus musculus
  siRNA target sequence for Dhrs3 (NM_011303.2,1002-1020).
ctactgcacgtcaaaagca

SEQ ID NO: 614006 - DNA, 19 bp, Mus musculus
  siRNA target sequence for Dhrs3 (NM_011303.2,1192-1210).
gtagatgctgtgcaacaaa

SEQ ID NO: 614007 - DNA, 19 bp, Mus musculus
  siRNA target sequence for Dhrs3 (NM_011303.2,1227-1245).
gctcccgtggaccatgaat

SEQ ID NO: 614008 - DNA, 19 bp, Mus musculus
  siRNA target sequence for Dhrs3 (NM_011303.2,1282-1300).
gcactggaggagattcaca

SEQ ID NO: 614009 - DNA, 19 bp, Mus musculus
  siRNA target sequence for Dhrs3 (NM_011303.2,1319-1337).
cctgtatgaacacctttaa

SEQ ID NO: 614010 - DNA, 19 bp, Mus musculus
  siRNA target sequence for Dhrs4 (NM_030686.1,314-332).
gatcgagaaaagctgataa

SEQ ID NO: 614011 - DNA, 19 bp, Mus musculus
  siRNA target sequence for Dhrs4 (NM_030686.1,317-335).
cgagaaaagctgataacca

SEQ ID NO: 614012 - DNA, 19 bp, Mus musculus
  siRNA target sequence for Dhrs4 (NM_030686.1,461-479).
gctacagccatgatgatta

SEQ ID NO: 614013 - DNA, 19 bp, Mus musculus
  siRNA target sequence for Dhrs4 (NM_030686.1,462-480).
ctacagccatgatgattaa

SEQ ID NO: 614014 - DNA, 19 bp, Mus musculus
  siRNA target sequence for Dhrs4 (NM_030686.1,513-531).
gcggctcagtggtgattgt

SEQ ID NO: 614015 - DNA, 19 bp, Mus musculus
  siRNA target sequence for Dhrs4 (NM_030686.1,641-659).
caagtcctctcccacaaaa

SEQ ID NO: 614016 - DNA, 19 bp, Mus musculus
  siRNA target sequence for Dhrs6 (NM_027208.1,102-120).
ccgactggacggcaaagtt

SEQ ID NO: 614017 - DNA, 19 bp, Mus musculus
  siRNA target sequence for Dhrs6 (NM_027208.1,103-121).
cgactggacggcaaagtta

SEQ ID NO: 614018 - DNA, 19 bp, Mus musculus
  siRNA target sequence for Dhrs6 (NM_027208.1,104-122).
gactggacggcaaagttat

SEQ ID NO: 614019 - DNA, 19 bp, Mus musculus
  siRNA target sequence for Dhrs6 (NM_027208.1,154-172).
cgggcatccgcattagctt

SEQ ID NO: 614020 - DNA, 19 bp, Mus musculus
  siRNA target sequence for Dhrs6 (NM_027208.1,155-173).
gggcatccgcattagcttt

SEQ ID NO: 614021 - DNA, 19 bp, Mus musculus
  siRNA target sequence for Dhrs6 (NM_027208.1,156-174).
ggcatccgcattagctttt

SEQ ID NO: 614022 - DNA, 19 bp, Mus musculus
  siRNA target sequence for Dhrs6 (NM_027208.1,234-252).
ggaaagttaccgaggtatt

SEQ ID NO: 614023 - DNA, 19 bp, Mus musculus
  siRNA target sequence for Dhrs6 (NM_027208.1,282-300).
gagacagattgatcagttt

SEQ ID NO: 614024 - DNA, 19 bp, Mus musculus
  siRNA target sequence for Dhrs6 (NM_027208.1,302-320).
cctcagaaatcgagagaat

SEQ ID NO: 614025 - DNA, 19 bp, Mus musculus
  siRNA target sequence for Dhrs6 (NM_027208.1,366-384).
cctggattgcgaggaaaaa

SEQ ID NO: 614026 - DNA, 19 bp, Mus musculus
  siRNA target sequence for Dhrs6 (NM_027208.1,370-388).
gattgcgaggaaaaagact

SEQ ID NO: 614027 - DNA, 19 bp, Mus musculus
  siRNA target sequence for Dhrs6 (NM_027208.1,385-403).
gactgggacttctcaatga

SEQ ID NO: 614028 - DNA, 19 bp, Mus musculus
  siRNA target sequence for Dhrs6 (NM_027208.1,387-405).
ctgggacttctcaatgaat

SEQ ID NO: 614029 - DNA, 19 bp, Mus musculus
  siRNA target sequence for Dhrs6 (NM_027208.1,419-437).
gcatgttcctgatgatcaa

SEQ ID NO: 614030 - DNA, 19 bp, Mus musculus
  siRNA target sequence for Dhrs6 (NM_027208.1,470-488).
caggcaacattatcaacat

SEQ ID NO: 614031 - DNA, 19 bp, Mus musculus
  siRNA target sequence for Dhrs6 (NM_027208.1,575-593).
ccgtggctgcagacttcat

SEQ ID NO: 614032 - DNA, 19 bp, Mus musculus
  siRNA target sequence for Dhrs6 (NM_027208.1,774-792).
ggacgagtcagcctatgta

SEQ ID NO: 614033 - DNA, 19 bp, Mus musculus
  siRNA target sequence for Dhrs6 (NM_027208.1,775-793).
gacgagtcagcctatgtaa

SEQ ID NO: 614034 - DNA, 19 bp, Mus musculus
  siRNA target sequence for Dhrs6 (NM_027208.1,777-795).
cgagtcagcctatgtaact

SEQ ID NO: 614035 - DNA, 19 bp, Mus musculus
  siRNA target sequence for Dhrs6 (NM_027208.1,794-812).
ctggcaaccctgtcatcat

SEQ ID NO: 614036 - DNA, 19 bp, Mus musculus
  siRNA target sequence for Dhrs6 (NM_027208.1,798-816).
caaccctgtcatcattgat

SEQ ID NO: 614037 - DNA, 19 bp, Mus musculus
  siRNA target sequence for Dhrs7 (NM_025522.1,218-236).
ctagctttccagttatcta

SEQ ID NO: 614038 - DNA, 19 bp, Mus musculus
  siRNA target sequence for Dhrs7 (NM_025522.1,284-302).
gagcgggtgaagagaagat

SEQ ID NO: 614039 - DNA, 19 bp, Mus musculus
  siRNA target sequence for Dhrs7 (NM_025522.1,350-368).
cttgacttgaccgatacaa

SEQ ID NO: 614040 - DNA, 19 bp, Mus musculus
  siRNA target sequence for Dhrs7 (NM_025522.1,353-371).
gacttgaccgatacaagtt

SEQ ID NO: 614041 - DNA, 19 bp, Mus musculus
  siRNA target sequence for Dhrs7 (NM_025522.1,400-418).
gcaggagtttggtaaaatt

SEQ ID NO: 614042 - DNA, 19 bp, Mus musculus
  siRNA target sequence for Dhrs7 (NM_025522.1,451-469).
gcgttccttagttctagaa

SEQ ID NO: 614043 - DNA, 19 bp, Mus musculus
  siRNA target sequence for Dhrs7 (NM_025522.1,452-470).
cgttccttagttctagaaa

SEQ ID NO: 614044 - DNA, 19 bp, Mus musculus
  siRNA target sequence for Dhrs7 (NM_025522.1,484-502).
cttcaaggagctgataaat

SEQ ID NO: 614045 - DNA, 19 bp, Mus musculus
  siRNA target sequence for Dhrs7 (NM_025522.1,537-555).
gtgtcctgcctcacatgat

SEQ ID NO: 614046 - DNA, 19 bp, Mus musculus
  siRNA target sequence for Dhrs7 (NM_025522.1,647-665).
gctcttcggggttttttca

SEQ ID NO: 614047 - DNA, 19 bp, Mus musculus
  siRNA target sequence for Dhrs7 (NM_025522.1,688-706).
ccaatatccaggcataaca

SEQ ID NO: 614048 - DNA, 19 bp, Mus musculus
  siRNA target sequence for Dhrs7 (NM_025522.1,689-707).
caatatccaggcataacat

SEQ ID NO: 614049 - DNA, 19 bp, Mus musculus
  siRNA target sequence for Dhrs7 (NM_025522.1,696-714).
caggcataacattttgcaa

SEQ ID NO: 614050 - DNA, 19 bp, Mus musculus
  siRNA target sequence for Dhrs7 (NM_025522.1,731-749).
gtgcagtccgacattgtga

SEQ ID NO: 614051 - DNA, 19 bp, Mus musculus
  siRNA target sequence for Dhrs7 (NM_025522.1,736-754).
gtccgacattgtgaagaat

SEQ ID NO: 614052 - DNA, 19 bp, Mus musculus
  siRNA target sequence for Dhrs7 (NM_025522.1,763-781).
cgaggaagtaactaagtct

SEQ ID NO: 614053 - DNA, 19 bp, Mus musculus
  siRNA target sequence for Dhrs7 (NM_025522.1,764-782).
gaggaagtaactaagtcta

SEQ ID NO: 614054 - DNA, 19 bp, Mus musculus
  siRNA target sequence for Dhrs7 (NM_025522.1,767-785).
gaagtaactaagtctatga

SEQ ID NO: 614055 - DNA, 19 bp, Mus musculus
  siRNA target sequence for Dhrs7 (NM_025522.1,770-788).
gtaactaagtctatgagaa

SEQ ID NO: 614056 - DNA, 19 bp, Mus musculus
  siRNA target sequence for Dhrs7 (NM_025522.1,774-792).
ctaagtctatgagaaacaa

SEQ ID NO: 614057 - DNA, 19 bp, Mus musculus
  siRNA target sequence for Dhrs7 (NM_025522.1,778-796).
gtctatgagaaacaacata

SEQ ID NO: 614058 - DNA, 19 bp, Mus musculus
  siRNA target sequence for Dhrs7 (NM_025522.1,895-913).
gctgttgggggcatacata

SEQ ID NO: 614059 - DNA, 19 bp, Mus musculus
  siRNA target sequence for Dhrs7 (NM_025522.1,896-914).
ctgttgggggcatacatat

SEQ ID NO: 614060 - DNA, 19 bp, Mus musculus
  siRNA target sequence for Dhrs7 (NM_025522.1,973-991).
ccaaaactttaagaataat

SEQ ID NO: 614061 - DNA, 19 bp, Mus musculus
  siRNA target sequence for Dhrs7 (NM_025522.1,995-1013).
gatccagacttgccttata

SEQ ID NO: 614062 - DNA, 19 bp, Mus musculus
  siRNA target sequence for Dhrs8 (NM_053262.2,187-205).
gctggtcatgggattggaa

SEQ ID NO: 614063 - DNA, 19 bp, Mus musculus
  siRNA target sequence for Dhrs8 (NM_053262.2,206-224).
gactgactgcctacgaatt

SEQ ID NO: 614064 - DNA, 19 bp, Mus musculus
  siRNA target sequence for Dhrs8 (NM_053262.2,216-234).
ctacgaatttgccaaactt

SEQ ID NO: 614065 - DNA, 19 bp, Mus musculus
  siRNA target sequence for Dhrs8 (NM_053262.2,360-378).
cagcgctgcgaaaaaggta

SEQ ID NO: 614066 - DNA, 19 bp, Mus musculus
  siRNA target sequence for Dhrs8 (NM_053262.2,362-380).
gcgctgcgaaaaaggtaaa

SEQ ID NO: 614067 - DNA, 19 bp, Mus musculus
  siRNA target sequence for Dhrs8 (NM_053262.2,397-415).
gttagcattctggtaaata

SEQ ID NO: 614068 - DNA, 19 bp, Mus musculus
  siRNA target sequence for Dhrs8 (NM_053262.2,427-445).
gtctacactgcagacttat

SEQ ID NO: 614069 - DNA, 19 bp, Mus musculus
  siRNA target sequence for Dhrs8 (NM_053262.2,459-477).
ccctcagattgaaaagact

SEQ ID NO: 614070 - DNA, 19 bp, Mus musculus
  siRNA target sequence for Dhrs8 (NM_053262.2,460-478).
cctcagattgaaaagactt

SEQ ID NO: 614071 - DNA, 19 bp, Mus musculus
  siRNA target sequence for Dhrs8 (NM_053262.2,490-508).
gtgcttgcacacttttgga

SEQ ID NO: 614072 - DNA, 19 bp, Mus musculus
  siRNA target sequence for Dhrs8 (NM_053262.2,518-536).
catttctcccagtgatgat

SEQ ID NO: 614073 - DNA, 19 bp, Mus musculus
  siRNA target sequence for Dhrs8 (NM_053262.2,741-759).
cccaagcaccaatttagga

SEQ ID NO: 614074 - DNA, 19 bp, Mus musculus
  siRNA target sequence for Dhrs8 (NM_053262.2,848-866).
cacttctgacagtattgga

SEQ ID NO: 614075 - DNA, 19 bp, Mus musculus
  siRNA target sequence for Dhrs8 (NM_053262.2,918-936).
caagttcgatgcagttgtt

SEQ ID NO: 614076 - DNA, 19 bp, Mus musculus
  siRNA target sequence for Dhrs9 (NM_175512.2,342-360).
cacgggctttggaaactta

SEQ ID NO: 614077 - DNA, 19 bp, Mus musculus
  siRNA target sequence for Dhrs9 (NM_175512.2,361-379).
gcagccagaacttttgata

SEQ ID NO: 614078 - DNA, 19 bp, Mus musculus
  siRNA target sequence for Dhrs9 (NM_175512.2,546-564).
ctggggtctgatcaataat

SEQ ID NO: 614079 - DNA, 19 bp, Mus musculus
  siRNA target sequence for Dhrs9 (NM_175512.2,549-567).
gggtctgatcaataatgct

SEQ ID NO: 614080 - DNA, 19 bp, Mus musculus
  siRNA target sequence for Dhrs9 (NM_175512.2,651-669).
catcaacgtgacactgaat

SEQ ID NO: 614081 - DNA, 19 bp, Mus musculus
  siRNA target sequence for Dhrs9 (NM_175512.2,657-675).
cgtgacactgaatatgctt

SEQ ID NO: 614082 - DNA, 19 bp, Mus musculus
  siRNA target sequence for Dhrs9 (NM_175512.2,691-709).
gctcgagggcgtgttatca

SEQ ID NO: 614083 - DNA, 19 bp, Mus musculus
  siRNA target sequence for Dhrs9 (NM_175512.2,697-715).
gggcgtgttatcaatgtct

SEQ ID NO: 614084 - DNA, 19 bp, Mus musculus
  siRNA target sequence for Dhrs9 (NM_175512.2,750-768).
gggctatactccatccaaa

SEQ ID NO: 614085 - DNA, 19 bp, Mus musculus
  siRNA target sequence for Dhrs9 (NM_175512.2,751-769).
ggctatactccatccaaat

SEQ ID NO: 614086 - DNA, 19 bp, Mus musculus
  siRNA target sequence for Dhrs9 (NM_175512.2,752-770).
gctatactccatccaaata

SEQ ID NO: 614087 - DNA, 19 bp, Mus musculus
  siRNA target sequence for Dhrs9 (NM_175512.2,773-791).
cagtggagggtttcaatga

SEQ ID NO: 614088 - DNA, 19 bp, Mus musculus
  siRNA target sequence for Dhrs9 (NM_175512.2,794-812).
gcctaaggcgggatatgaa

SEQ ID NO: 614089 - DNA, 19 bp, Mus musculus
  siRNA target sequence for Dhrs9 (NM_175512.2,795-813).
cctaaggcgggatatgaaa

SEQ ID NO: 614090 - DNA, 19 bp, Mus musculus
  siRNA target sequence for Dhrs9 (NM_175512.2,825-843).
gcatgtctcatgcattgaa

SEQ ID NO: 614091 - DNA, 19 bp, Mus musculus
  siRNA target sequence for Dhrs9 (NM_175512.2,845-863).
cagggctgttcaaaacaga

SEQ ID NO: 614092 - DNA, 19 bp, Mus musculus
  siRNA target sequence for Dhrs9 (NM_175512.2,918-936).
gtctccagatatcaaacaa

SEQ ID NO: 614093 - DNA, 19 bp, Mus musculus
  siRNA target sequence for Dhrs9 (NM_175512.2,920-938).
ctccagatatcaaacaaca

SEQ ID NO: 614094 - DNA, 19 bp, Mus musculus
  siRNA target sequence for Dhrs9 (NM_175512.2,922-940).
ccagatatcaaacaacaat

SEQ ID NO: 614095 - DNA, 19 bp, Mus musculus
  siRNA target sequence for Dhrs9 (NM_175512.2,948-966).
gggctacattgaaaaaagt

SEQ ID NO: 614096 - DNA, 19 bp, Mus musculus
  siRNA target sequence for Dhrs9 (NM_175512.2,1029-1047).
catggaccacgctctaaca

SEQ ID NO: 614097 - DNA, 19 bp, Mus musculus
  siRNA target sequence for Dhrs9 (NM_175512.2,1032-1050).
ggaccacgctctaacaagt

SEQ ID NO: 614098 - DNA, 19 bp, Mus musculus
  siRNA target sequence for Dhrs9 (NM_175512.2,1056-1074).
ccccaagactcggtacatt

SEQ ID NO: 614099 - DNA, 19 bp, Mus musculus
  siRNA target sequence for Dhrs9 (NM_175512.2,1079-1097).
ggaaagatgccaagacatt

SEQ ID NO: 614100 - DNA, 19 bp, Mus musculus
  siRNA target sequence for Dia1 (NM_029787.2,119-137).
cccgtctggttcatctaca

SEQ ID NO: 614101 - DNA, 19 bp, Mus musculus
  siRNA target sequence for Dia1 (NM_029787.2,363-381).
ctgtgtcgagcgatgatga

SEQ ID NO: 614102 - DNA, 19 bp, Mus musculus
  siRNA target sequence for Dia1 (NM_029787.2,421-439).
ggacacccatcccaagttt

SEQ ID NO: 614103 - DNA, 19 bp, Mus musculus
  siRNA target sequence for Dia1 (NM_029787.2,549-567).
ccatccgtgcagacaagaa

SEQ ID NO: 614104 - DNA, 19 bp, Mus musculus
  siRNA target sequence for Dia1 (NM_029787.2,746-764).
gaactgaggaacgaacatt

SEQ ID NO: 614105 - DNA, 19 bp, Mus musculus
  siRNA target sequence for Etfdh (NM_025794.1,214-232).
gtttcatgccttaaaaatt

SEQ ID NO: 614106 - DNA, 19 bp, Mus musculus
  siRNA target sequence for Etfdh (NM_025794.1,278-296).
gctgtacctcagattacca

SEQ ID NO: 614107 - DNA, 19 bp, Mus musculus
  siRNA target sequence for Etfdh (NM_025794.1,295-313).
cactcactacactgttcat

SEQ ID NO: 614108 - DNA, 19 bp, Mus musculus
  siRNA target sequence for Etfdh (NM_025794.1,336-354).
gggaaggagtgaatatgga

SEQ ID NO: 614109 - DNA, 19 bp, Mus musculus
  siRNA target sequence for Etfdh (NM_025794.1,414-432).
cagctattcggctaaagca

SEQ ID NO: 614110 - DNA, 19 bp, Mus musculus
  siRNA target sequence for Etfdh (NM_025794.1,508-526).
ctcaggggcttgtcttgat

SEQ ID NO: 614111 - DNA, 19 bp, Mus musculus
  siRNA target sequence for Etfdh (NM_025794.1,565-583).
gaaaggggctccacttaat

SEQ ID NO: 614112 - DNA, 19 bp, Mus musculus
  siRNA target sequence for Etfdh (NM_025794.1,654-672).
gtcttccgatgaacaatca

SEQ ID NO: 614113 - DNA, 19 bp, Mus musculus
  siRNA target sequence for Etfdh (NM_025794.1,732-750).
ctcttggagtcgaagtgta

SEQ ID NO: 614114 - DNA, 19 bp, Mus musculus
  siRNA target sequence for Etfdh (NM_025794.1,788-806).
gatggtagtgtaaaaggaa

SEQ ID NO: 614115 - DNA, 19 bp, Mus musculus
  siRNA target sequence for Etfdh (NM_025794.1,804-822).
gaatcgccactaatgatgt

SEQ ID NO: 614116 - DNA, 19 bp, Mus musculus
  siRNA target sequence for Etfdh (NM_025794.1,835-853).
ggatggtgcaccaaagaca

SEQ ID NO: 614117 - DNA, 19 bp, Mus musculus
  siRNA target sequence for Etfdh (NM_025794.1,872-890).
gaactgcatgccaaagtca

SEQ ID NO: 614118 - DNA, 19 bp, Mus musculus
  siRNA target sequence for Etfdh (NM_025794.1,923-941).
gccaagcagctttataaga

SEQ ID NO: 614119 - DNA, 19 bp, Mus musculus
  siRNA target sequence for Etfdh (NM_025794.1,924-942).
ccaagcagctttataagaa

SEQ ID NO: 614120 - DNA, 19 bp, Mus musculus
  siRNA target sequence for Etfdh (NM_025794.1,925-943).
caagcagctttataagaaa

SEQ ID NO: 614121 - DNA, 19 bp, Mus musculus
  siRNA target sequence for Etfdh (NM_025794.1,928-946).
gcagctttataagaaattt

SEQ ID NO: 614122 - DNA, 19 bp, Mus musculus
  siRNA target sequence for Etfdh (NM_025794.1,971-989).
cagacttacggaattggtt

SEQ ID NO: 614123 - DNA, 19 bp, Mus musculus
  siRNA target sequence for Etfdh (NM_025794.1,991-1009).
gaaggagttatggattatt

SEQ ID NO: 614124 - DNA, 19 bp, Mus musculus
  siRNA target sequence for Etfdh (NM_025794.1,997-1015).
gttatggattattgatgaa

SEQ ID NO: 614125 - DNA, 19 bp, Mus musculus
  siRNA target sequence for Etfdh (NM_025794.1,1090-1108).
cctttaccacttaaatgaa

SEQ ID NO: 614126 - DNA, 19 bp, Mus musculus
  siRNA target sequence for Etfdh (NM_025794.1,1251-1269).
gagcccgagcgctcaatga

SEQ ID NO: 614127 - DNA, 19 bp, Mus musculus
  siRNA target sequence for Etfdh (NM_025794.1,1274-1292).
ggcttgcagtccataccaa

SEQ ID NO: 614128 - DNA, 19 bp, Mus musculus
  siRNA target sequence for Etfdh (NM_025794.1,1276-1294).
cttgcagtccataccaaaa

SEQ ID NO: 614129 - DNA, 19 bp, Mus musculus
  siRNA target sequence for Etfdh (NM_025794.1,1280-1298).
cagtccataccaaaactca

SEQ ID NO: 614130 - DNA, 19 bp, Mus musculus
  siRNA target sequence for Etfdh (NM_025794.1,1284-1302).
ccataccaaaactcacttt

SEQ ID NO: 614131 - DNA, 19 bp, Mus musculus
  siRNA target sequence for Etfdh (NM_025794.1,1307-1325).
ggtggcttactaattggtt

SEQ ID NO: 614132 - DNA, 19 bp, Mus musculus
  siRNA target sequence for Etfdh (NM_025794.1,1312-1330).
cttactaattggttgtagt

SEQ ID NO: 614133 - DNA, 19 bp, Mus musculus
  siRNA target sequence for Etfdh (NM_025794.1,1346-1364).
gtccccaagatcaaaggta

SEQ ID NO: 614134 - DNA, 19 bp, Mus musculus
  siRNA target sequence for Etfdh (NM_025794.1,1362-1380).
gtacccacacggcaatgaa

SEQ ID NO: 614135 - DNA, 19 bp, Mus musculus
  siRNA target sequence for Etfdh (NM_025794.1,1366-1384).
ccacacggcaatgaaaagt

SEQ ID NO: 614136 - DNA, 19 bp, Mus musculus
  siRNA target sequence for Etfdh (NM_025794.1,1374-1392).
caatgaaaagtggaagttt

SEQ ID NO: 614137 - DNA, 19 bp, Mus musculus
  siRNA target sequence for Etfdh (NM_025794.1,1394-1412).
gcagcagaatcaattttta

SEQ ID NO: 614138 - DNA, 19 bp, Mus musculus
  siRNA target sequence for Etfdh (NM_025794.1,1414-1432).
gcaactaactagtgaaaat

SEQ ID NO: 614139 - DNA, 19 bp, Mus musculus
  siRNA target sequence for Etfdh (NM_025794.1,1427-1445).
gaaaatctccagtcaaaga

SEQ ID NO: 614140 - DNA, 19 bp, Mus musculus
  siRNA target sequence for Etfdh (NM_025794.1,1451-1469).
ggactccatgtaactgaat

SEQ ID NO: 614141 - DNA, 19 bp, Mus musculus
  siRNA target sequence for Etfdh (NM_025794.1,1452-1470).
gactccatgtaactgaata

SEQ ID NO: 614142 - DNA, 19 bp, Mus musculus
  siRNA target sequence for Etfdh (NM_025794.1,1464-1482).
ctgaatatgaggacaattt

SEQ ID NO: 614143 - DNA, 19 bp, Mus musculus
  siRNA target sequence for Etfdh (NM_025794.1,1466-1484).
gaatatgaggacaatttga

SEQ ID NO: 614144 - DNA, 19 bp, Mus musculus
  siRNA target sequence for Etfdh (NM_025794.1,1486-1504).
gcaatcctgggtatggaaa

SEQ ID NO: 614145 - DNA, 19 bp, Mus musculus
  siRNA target sequence for Etfdh (NM_025794.1,1507-1525).
gctacacgctgttcgaaat

SEQ ID NO: 614146 - DNA, 19 bp, Mus musculus
  siRNA target sequence for Etfdh (NM_025794.1,1508-1526).
ctacacgctgttcgaaata

SEQ ID NO: 614147 - DNA, 19 bp, Mus musculus
  siRNA target sequence for Etfdh (NM_025794.1,1511-1529).
cacgctgttcgaaatataa

SEQ ID NO: 614148 - DNA, 19 bp, Mus musculus
  siRNA target sequence for Etfdh (NM_025794.1,1546-1564).
gatactgggagtatatgga

SEQ ID NO: 614149 - DNA, 19 bp, Mus musculus
  siRNA target sequence for Etfdh (NM_025794.1,1580-1598).
gggatattttactggatat

SEQ ID NO: 614150 - DNA, 19 bp, Mus musculus
  siRNA target sequence for Etfdh (NM_025794.1,1581-1599).
ggatattttactggatatt

SEQ ID NO: 614151 - DNA, 19 bp, Mus musculus
  siRNA target sequence for Etfdh (NM_025794.1,1612-1630).
gccatggactctaaaacat

SEQ ID NO: 614152 - DNA, 19 bp, Mus musculus
  siRNA target sequence for Etfdh (NM_025794.1,1667-1685).
gattgtacacccattgagt

SEQ ID NO: 614153 - DNA, 19 bp, Mus musculus
  siRNA target sequence for Etfdh (NM_025794.1,1694-1712).
cctgatggacagatcagtt

SEQ ID NO: 614154 - DNA, 19 bp, Mus musculus
  siRNA target sequence for Etfdh (NM_025794.1,1695-1713).
ctgatggacagatcagttt

SEQ ID NO: 614155 - DNA, 19 bp, Mus musculus
  siRNA target sequence for Etfdh (NM_025794.1,1738-1756).
gagtggtactaatcatgaa

SEQ ID NO: 614156 - DNA, 19 bp, Mus musculus
  siRNA target sequence for Etfdh (NM_025794.1,1740-1758).
gtggtactaatcatgaaca

SEQ ID NO: 614157 - DNA, 19 bp, Mus musculus
  siRNA target sequence for Etfdh (NM_025794.1,1743-1761).
gtactaatcatgaacatga

SEQ ID NO: 614158 - DNA, 19 bp, Mus musculus
  siRNA target sequence for Etfdh (NM_025794.1,1765-1783).
gccagcacatttaacctta

SEQ ID NO: 614159 - DNA, 19 bp, Mus musculus
  siRNA target sequence for Etfdh (NM_025794.1,1809-1827).
gaaacctgtcaatatacga

SEQ ID NO: 614160 - DNA, 19 bp, Mus musculus
  siRNA target sequence for Etfdh (NM_025794.1,1883-1901).
caaggtgatggatttcgat

SEQ ID NO: 614161 - DNA, 19 bp, Mus musculus
  siRNA target sequence for Etfdh (NM_025794.1,1887-1905).
gtgatggatttcgattaca

SEQ ID NO: 614162 - DNA, 19 bp, Mus musculus
  siRNA target sequence for Etfdh (NM_025794.1,1889-1907).
gatggatttcgattacaga

SEQ ID NO: 614163 - DNA, 19 bp, Mus musculus
  siRNA target sequence for Etfdh (NM_025794.1,1892-1910).
ggatttcgattacagataa

SEQ ID NO: 614164 - DNA, 19 bp, Mus musculus
  siRNA target sequence for Etfdh (NM_025794.1,1893-1911).
gatttcgattacagataaa

SEQ ID NO: 614165 - DNA, 19 bp, Mus musculus
  siRNA target sequence for Etfdh (NM_025794.1,1952-1970).
gacccaagtcaaaatatta

SEQ ID NO: 614166 - DNA, 19 bp, Mus musculus
  siRNA target sequence for Etfdh (NM_025794.1,1955-1973).
ccaagtcaaaatattaact

SEQ ID NO: 614167 - DNA, 19 bp, Mus musculus
  siRNA target sequence for Fads3 (NM_021890.2,316-334).
cctgaaacccctgttgatt

SEQ ID NO: 614168 - DNA, 19 bp, Mus musculus
  siRNA target sequence for Fads3 (NM_021890.2,588-606).
ggtgtctgcaacatgatct

SEQ ID NO: 614169 - DNA, 19 bp, Mus musculus
  siRNA target sequence for Fads3 (NM_021890.2,589-607).
gtgtctgcaacatgatcta

SEQ ID NO: 614170 - DNA, 19 bp, Mus musculus
  siRNA target sequence for Fads3 (NM_021890.2,661-679).
cgtgatggggcagttgaaa

SEQ ID NO: 614171 - DNA, 19 bp, Mus musculus
  siRNA target sequence for Fads3 (NM_021890.2,880-898).
caccttggtgaactttgaa

SEQ ID NO: 614172 - DNA, 19 bp, Mus musculus
  siRNA target sequence for Fads3 (NM_021890.2,882-900).
ccttggtgaactttgaagt

SEQ ID NO: 614173 - DNA, 19 bp, Mus musculus
  siRNA target sequence for Fads3 (NM_021890.2,1156-1174).
ggaaccttcgctcttcatt

SEQ ID NO: 614174 - DNA, 19 bp, Mus musculus
  siRNA target sequence for Fads3 (NM_021890.2,1160-1178).
ccttcgctcttcattgact

SEQ ID NO: 614175 - DNA, 19 bp, Mus musculus
  siRNA target sequence for Fads3 (NM_021890.2,1227-1245).
cgatgccaaggcacaacta

SEQ ID NO: 614176 - DNA, 19 bp, Mus musculus
  siRNA target sequence for Fads3 (NM_021890.2,1281-1299).
ccaagcacggcctacacta

SEQ ID NO: 614177 - DNA, 19 bp, Mus musculus
  siRNA target sequence for Gmds (NM_146041.1,201-219).
ggtacgaggtccatggaat

SEQ ID NO: 614178 - DNA, 19 bp, Mus musculus
  siRNA target sequence for Gmds (NM_146041.1,202-220).
gtacgaggtccatggaata

SEQ ID NO: 614179 - DNA, 19 bp, Mus musculus
  siRNA target sequence for Gmds (NM_146041.1,205-223).
cgaggtccatggaatagta

SEQ ID NO: 614180 - DNA, 19 bp, Mus musculus
  siRNA target sequence for Gmds (NM_146041.1,221-239).
gtacggcgatctagttcat

SEQ ID NO: 614181 - DNA, 19 bp, Mus musculus
  siRNA target sequence for Gmds (NM_146041.1,224-242).
cggcgatctagttcattta

SEQ ID NO: 614182 - DNA, 19 bp, Mus musculus
  siRNA target sequence for Gmds (NM_146041.1,225-243).
ggcgatctagttcatttaa

SEQ ID NO: 614183 - DNA, 19 bp, Mus musculus
  siRNA target sequence for Gmds (NM_146041.1,248-266).
ggtcgaattgaacatttat

SEQ ID NO: 614184 - DNA, 19 bp, Mus musculus
  siRNA target sequence for Gmds (NM_146041.1,252-270).
gaattgaacatttatataa

SEQ ID NO: 614185 - DNA, 19 bp, Mus musculus
  siRNA target sequence for Gmds (NM_146041.1,328-346).
cagcacctgcctagtgaaa

SEQ ID NO: 614186 - DNA, 19 bp, Mus musculus
  siRNA target sequence for Gmds (NM_146041.1,333-351).
cctgcctagtgaaaatcat

SEQ ID NO: 614187 - DNA, 19 bp, Mus musculus
  siRNA target sequence for Gmds (NM_146041.1,336-354).
gcctagtgaaaatcatcaa

SEQ ID NO: 614188 - DNA, 19 bp, Mus musculus
  siRNA target sequence for Gmds (NM_146041.1,337-355).
cctagtgaaaatcatcaat

SEQ ID NO: 614189 - DNA, 19 bp, Mus musculus
  siRNA target sequence for Gmds (NM_146041.1,387-405).
gagcccagagccatgtcaa

SEQ ID NO: 614190 - DNA, 19 bp, Mus musculus
  siRNA target sequence for Gmds (NM_146041.1,733-751).
ccggtcagtagctaagatt

SEQ ID NO: 614191 - DNA, 19 bp, Mus musculus
  siRNA target sequence for Gmds (NM_146041.1,734-752).
cggtcagtagctaagattt

SEQ ID NO: 614192 - DNA, 19 bp, Mus musculus
  siRNA target sequence for Gmds (NM_146041.1,735-753).
ggtcagtagctaagattta

SEQ ID NO: 614193 - DNA, 19 bp, Mus musculus
  siRNA target sequence for Gmds (NM_146041.1,810-828).
gccatgccaaggactatgt

SEQ ID NO: 614194 - DNA, 19 bp, Mus musculus
  siRNA target sequence for Gmds (NM_146041.1,898-916).
cagtgtccgtgaatttgtt

SEQ ID NO: 614195 - DNA, 19 bp, Mus musculus
  siRNA target sequence for Gmds (NM_146041.1,900-918).
gtgtccgtgaatttgttga

SEQ ID NO: 614196 - DNA, 19 bp, Mus musculus
  siRNA target sequence for Gmds (NM_146041.1,905-923).
cgtgaatttgttgaaaagt

SEQ ID NO: 614197 - DNA, 19 bp, Mus musculus
  siRNA target sequence for Gmds (NM_146041.1,931-949).
gcacatcggaaaaaccatt

SEQ ID NO: 614198 - DNA, 19 bp, Mus musculus
  siRNA target sequence for Gmds (NM_146041.1,977-995).
gtgggcagatgtaaagaga

SEQ ID NO: 614199 - DNA, 19 bp, Mus musculus
  siRNA target sequence for Gmds (NM_146041.1,1076-1094).
gctcagcagaagctaaact

SEQ ID NO: 614200 - DNA, 19 bp, Mus musculus
  siRNA target sequence for Grid1 (NM_008166.1,1153-1171).
ccatgctagacacgattaa

SEQ ID NO: 614201 - DNA, 19 bp, Mus musculus
  siRNA target sequence for Grid1 (NM_008166.1,1154-1172).
catgctagacacgattaaa

SEQ ID NO: 614202 - DNA, 19 bp, Mus musculus
  siRNA target sequence for Grid1 (NM_008166.1,1189-1207).
gcctcacaggggttatgga

SEQ ID NO: 614203 - DNA, 19 bp, Mus musculus
  siRNA target sequence for Grid1 (NM_008166.1,1214-1232).
ggaagatagctcaaatcct

SEQ ID NO: 614204 - DNA, 19 bp, Mus musculus
  siRNA target sequence for Grid1 (NM_008166.1,1230-1248).
ccttacgtccagtttgaaa

SEQ ID NO: 614205 - DNA, 19 bp, Mus musculus
  siRNA target sequence for Grid1 (NM_008166.1,1250-1268).
ccttggcacaacctatagt

SEQ ID NO: 614206 - DNA, 19 bp, Mus musculus
  siRNA target sequence for Grid1 (NM_008166.1,1258-1276).
caacctatagtgagacttt

SEQ ID NO: 614207 - DNA, 19 bp, Mus musculus
  siRNA target sequence for Grid1 (NM_008166.1,2181-2199).
gagctctggcggaccataa

SEQ ID NO: 614208 - DNA, 19 bp, Mus musculus
  siRNA target sequence for Grid1 (NM_008166.1,2184-2202).
ctctggcggaccataagca

SEQ ID NO: 614209 - DNA, 19 bp, Mus musculus
  siRNA target sequence for Grid1 (NM_008166.1,2189-2207).
gcggaccataagcaagaat

SEQ ID NO: 614210 - DNA, 19 bp, Mus musculus
  siRNA target sequence for Grid1 (NM_008166.1,2230-2248).
ccaatccttcagaaggtat

SEQ ID NO: 614211 - DNA, 19 bp, Mus musculus
  siRNA target sequence for Grid1 (NM_008166.1,2264-2282).
ggggaactacgcctttcta

SEQ ID NO: 614212 - DNA, 19 bp, Mus musculus
  siRNA target sequence for Grid1 (NM_008166.1,2265-2283).
gggaactacgcctttctat

SEQ ID NO: 614213 - DNA, 19 bp, Mus musculus
  siRNA target sequence for Grid1 (NM_008166.1,2395-2413).
gcccctacagggacctttt

SEQ ID NO: 614214 - DNA, 19 bp, Mus musculus
  siRNA target sequence for Grid1 (NM_008166.1,2397-2415).
ccctacagggaccttttct

SEQ ID NO: 614215 - DNA, 19 bp, Mus musculus
  siRNA target sequence for Grid1 (NM_008166.1,2603-2621).
cgtggctgctctagagtta

SEQ ID NO: 614216 - DNA, 19 bp, Mus musculus
  siRNA target sequence for Grid1 (NM_008166.1,2723-2741).
cattgctcacaagcaaatt

SEQ ID NO: 614217 - DNA, 19 bp, Mus musculus
  siRNA target sequence for Grid1 (NM_008166.1,2938-2956).
ccactatgccctcaattca

SEQ ID NO: 614218 - DNA, 19 bp, Mus musculus
  siRNA target sequence for Grid1 (NM_008166.1,2972-2990).
gcccaatgggggactgttt

SEQ ID NO: 614219 - DNA, 19 bp, Mus musculus
  siRNA target sequence for Hadha (NM_178878.1,139-157).
ctgaccagaacccatatta

SEQ ID NO: 614220 - DNA, 19 bp, Mus musculus
  siRNA target sequence for Hadha (NM_178878.1,141-159).
gaccagaacccatattaat

SEQ ID NO: 614221 - DNA, 19 bp, Mus musculus
  siRNA target sequence for Hadha (NM_178878.1,181-199).
gcagttattcggattaact

SEQ ID NO: 614222 - DNA, 19 bp, Mus musculus
  siRNA target sequence for Hadha (NM_178878.1,192-210).
gattaactcacccaattca

SEQ ID NO: 614223 - DNA, 19 bp, Mus musculus
  siRNA target sequence for Hadha (NM_178878.1,202-220).
cccaattcaaaggtaaata

SEQ ID NO: 614224 - DNA, 19 bp, Mus musculus
  siRNA target sequence for Hadha (NM_178878.1,242-260).
cagagttcatagaagtcat

SEQ ID NO: 614225 - DNA, 19 bp, Mus musculus
  siRNA target sequence for Hadha (NM_178878.1,253-271).
gaagtcatgaacgaaatct

SEQ ID NO: 614226 - DNA, 19 bp, Mus musculus
  siRNA target sequence for Hadha (NM_178878.1,332-350).
caggggctgacatcaacat

SEQ ID NO: 614227 - DNA, 19 bp, Mus musculus
  siRNA target sequence for Hadha (NM_178878.1,348-366).
catgctatcctcttgtaca

SEQ ID NO: 614228 - DNA, 19 bp, Mus musculus
  siRNA target sequence for Hadha (NM_178878.1,611-629).
gtgtgcctgctgcatttga

SEQ ID NO: 614229 - DNA, 19 bp, Mus musculus
  siRNA target sequence for Hadha (NM_178878.1,636-654).
gctgactggcaggaacatt

SEQ ID NO: 614230 - DNA, 19 bp, Mus musculus
  siRNA target sequence for Hadha (NM_178878.1,703-721).
ccgctgggaccaggaataa

SEQ ID NO: 614231 - DNA, 19 bp, Mus musculus
  siRNA target sequence for Hadha (NM_178878.1,704-722).
cgctgggaccaggaataaa

SEQ ID NO: 614232 - DNA, 19 bp, Mus musculus
  siRNA target sequence for Hadha (NM_178878.1,865-883).
gtcagacaacaggtttaca

SEQ ID NO: 614233 - DNA, 19 bp, Mus musculus
  siRNA target sequence for Hadha (NM_178878.1,1021-1039).
cttgcattgaccaaagaat

SEQ ID NO: 614234 - DNA, 19 bp, Mus musculus
  siRNA target sequence for Hadha (NM_178878.1,1025-1043).
cattgaccaaagaatcgaa

SEQ ID NO: 614235 - DNA, 19 bp, Mus musculus
  siRNA target sequence for Hadha (NM_178878.1,1045-1063).
gccctgatggggctttata

SEQ ID NO: 614236 - DNA, 19 bp, Mus musculus
  siRNA target sequence for Hadha (NM_178878.1,1046-1064).
ccctgatggggctttataa

SEQ ID NO: 614237 - DNA, 19 bp, Mus musculus
  siRNA target sequence for Hadha (NM_178878.1,1252-1270).
gggctgaacgacaaagtga

SEQ ID NO: 614238 - DNA, 19 bp, Mus musculus
  siRNA target sequence for Hadha (NM_178878.1,1253-1271).
ggctgaacgacaaagtgaa

SEQ ID NO: 614239 - DNA, 19 bp, Mus musculus
  siRNA target sequence for Hadha (NM_178878.1,1393-1411).
gtaaagcacaaagtgttaa

SEQ ID NO: 614240 - DNA, 19 bp, Mus musculus
  siRNA target sequence for Hadha (NM_178878.1,1463-1481).
ctgctctcccaatcaatca

SEQ ID NO: 614241 - DNA, 19 bp, Mus musculus
  siRNA target sequence for Hadha (NM_178878.1,1465-1483).
gctctcccaatcaatcaaa

SEQ ID NO: 614242 - DNA, 19 bp, Mus musculus
  siRNA target sequence for Hadha (NM_178878.1,1466-1484).
ctctcccaatcaatcaaat

SEQ ID NO: 614243 - DNA, 19 bp, Mus musculus
  siRNA target sequence for Hadha (NM_178878.1,1626-1644).
gcaagggaaggtcatcatt

SEQ ID NO: 614244 - DNA, 19 bp, Mus musculus
  siRNA target sequence for Hadha (NM_178878.1,1654-1672).
gacggacccggcttctaca

SEQ ID NO: 614245 - DNA, 19 bp, Mus musculus
  siRNA target sequence for Hadha (NM_178878.1,1824-1842).
gcacgtagcagaagatcta

SEQ ID NO: 614246 - DNA, 19 bp, Mus musculus
  siRNA target sequence for Hadha (NM_178878.1,1932-1950).
gaagggcttttacatctat

SEQ ID NO: 614247 - DNA, 19 bp, Mus musculus
  siRNA target sequence for Hadha (NM_178878.1,1951-1969).
caggagggctcaaagaata

SEQ ID NO: 614248 - DNA, 19 bp, Mus musculus
  siRNA target sequence for Hadha (NM_178878.1,1954-1972).
gagggctcaaagaataaga

SEQ ID NO: 614249 - DNA, 19 bp, Mus musculus
  siRNA target sequence for Hadha (NM_178878.1,1973-1991).
gtttgaattctgaaatgga

SEQ ID NO: 614250 - DNA, 19 bp, Mus musculus
  siRNA target sequence for Hadha (NM_178878.1,2039-2057).
ctgatgaagacgtccaata

SEQ ID NO: 614251 - DNA, 19 bp, Mus musculus
  siRNA target sequence for Hadha (NM_178878.1,2049-2067).
cgtccaataccgtgtgata

SEQ ID NO: 614252 - DNA, 19 bp, Mus musculus
  siRNA target sequence for Hadha (NM_178878.1,2050-2068).
gtccaataccgtgtgataa

SEQ ID NO: 614253 - DNA, 19 bp, Mus musculus
  siRNA target sequence for Hadha (NM_178878.1,2052-2070).
ccaataccgtgtgataaca

SEQ ID NO: 614254 - DNA, 19 bp, Mus musculus
  siRNA target sequence for Hadha (NM_178878.1,2053-2071).
caataccgtgtgataacaa

SEQ ID NO: 614255 - DNA, 19 bp, Mus musculus
  siRNA target sequence for Hadha (NM_178878.1,2248-2266).
gcctatggaacacagttta

SEQ ID NO: 614256 - DNA, 19 bp, Mus musculus
  siRNA target sequence for Hadha (NM_178878.1,2284-2302).
ctcgaccacgctaacaact

SEQ ID NO: 614257 - DNA, 19 bp, Mus musculus
  siRNA target sequence for Hadha (NM_178878.1,2287-2305).
gaccacgctaacaactcta

SEQ ID NO: 614258 - DNA, 19 bp, Mus musculus
  siRNA target sequence for Hpgd (NM_008278.1,142-160).
cttgaggcaggtgtaaaat

SEQ ID NO: 614259 - DNA, 19 bp, Mus musculus
  siRNA target sequence for Hpgd (NM_008278.1,268-286).
catttcggaagattggata

SEQ ID NO: 614260 - DNA, 19 bp, Mus musculus
  siRNA target sequence for Hpgd (NM_008278.1,297-315).
caatgcaggcgtgaacaat

SEQ ID NO: 614261 - DNA, 19 bp, Mus musculus
  siRNA target sequence for Hpgd (NM_008278.1,301-319).
gcaggcgtgaacaatgaga

SEQ ID NO: 614262 - DNA, 19 bp, Mus musculus
  siRNA target sequence for Hpgd (NM_008278.1,304-322).
ggcgtgaacaatgagaaaa

SEQ ID NO: 614263 - DNA, 19 bp, Mus musculus
  siRNA target sequence for Hpgd (NM_008278.1,369-387).
gacctatcttggtttggat

SEQ ID NO: 614264 - DNA, 19 bp, Mus musculus
  siRNA target sequence for Hpgd (NM_008278.1,379-397).
ggtttggattacatgagta

SEQ ID NO: 614265 - DNA, 19 bp, Mus musculus
  siRNA target sequence for Hpgd (NM_008278.1,380-398).
gtttggattacatgagtaa

SEQ ID NO: 614266 - DNA, 19 bp, Mus musculus
  siRNA target sequence for Hpgd (NM_008278.1,384-402).
ggattacatgagtaagcaa

SEQ ID NO: 614267 - DNA, 19 bp, Mus musculus
  siRNA target sequence for Hpgd (NM_008278.1,385-403).
gattacatgagtaagcaaa

SEQ ID NO: 614268 - DNA, 19 bp, Mus musculus
  siRNA target sequence for Hpgd (NM_008278.1,409-427).
ggtgaaggcggcatcatca

SEQ ID NO: 614269 - DNA, 19 bp, Mus musculus
  siRNA target sequence for Hpgd (NM_008278.1,410-428).
gtgaaggcggcatcatcat

SEQ ID NO: 614270 - DNA, 19 bp, Mus musculus
  siRNA target sequence for Hpgd (NM_008278.1,412-430).
gaaggcggcatcatcatca

SEQ ID NO: 614271 - DNA, 19 bp, Mus musculus
  siRNA target sequence for Hpgd (NM_008278.1,415-433).
ggcggcatcatcatcaata

SEQ ID NO: 614272 - DNA, 19 bp, Mus musculus
  siRNA target sequence for Hpgd (NM_008278.1,416-434).
gcggcatcatcatcaatat

SEQ ID NO: 614273 - DNA, 19 bp, Mus musculus
  siRNA target sequence for Hpgd (NM_008278.1,429-447).
caatatgtcttcattagca

SEQ ID NO: 614274 - DNA, 19 bp, Mus musculus
  siRNA target sequence for Hpgd (NM_008278.1,463-481).
gcgcagcaacctgtttatt

SEQ ID NO: 614275 - DNA, 19 bp, Mus musculus
  siRNA target sequence for Hpgd (NM_008278.1,528-546).
ggctgctaacctcatgaaa

SEQ ID NO: 614276 - DNA, 19 bp, Mus musculus
  siRNA target sequence for Hpgd (NM_008278.1,529-547).
gctgctaacctcatgaaaa

SEQ ID NO: 614277 - DNA, 19 bp, Mus musculus
  siRNA target sequence for Hpgd (NM_008278.1,540-558).
catgaaaagcggtgtaaga

SEQ ID NO: 614278 - DNA, 19 bp, Mus musculus
  siRNA target sequence for Hpgd (NM_008278.1,548-566).
gcggtgtaagactgaatgt

SEQ ID NO: 614279 - DNA, 19 bp, Mus musculus
  siRNA target sequence for Hpgd (NM_008278.1,550-568).
ggtgtaagactgaatgtca

SEQ ID NO: 614280 - DNA, 19 bp, Mus musculus
  siRNA target sequence for Hpgd (NM_008278.1,586-604).
gacacacccatccttgaat

SEQ ID NO: 614281 - DNA, 19 bp, Mus musculus
  siRNA target sequence for Hpgd (NM_008278.1,594-612).
catccttgaatccattgaa

SEQ ID NO: 614282 - DNA, 19 bp, Mus musculus
  siRNA target sequence for Hpgd (NM_008278.1,654-672).
gatcaaggctatgatgaaa

SEQ ID NO: 614283 - DNA, 19 bp, Mus musculus
  siRNA target sequence for Hpgd (NM_008278.1,660-678).
ggctatgatgaaattctat

SEQ ID NO: 614284 - DNA, 19 bp, Mus musculus
  siRNA target sequence for Hpgd (NM_008278.1,698-716).
ccattgccaatggattaat

SEQ ID NO: 614285 - DNA, 19 bp, Mus musculus
  siRNA target sequence for Hpgd (NM_008278.1,699-717).
cattgccaatggattaata

SEQ ID NO: 614286 - DNA, 19 bp, Mus musculus
  siRNA target sequence for Hpgd (NM_008278.1,801-819).
ctctccattactcgtaaaa

SEQ ID NO: 614287 - DNA, 19 bp, Mus musculus
  siRNA target sequence for Hsd17b12 (NM_019657.2,208-226).
caggtggcactgatggaat

SEQ ID NO: 614288 - DNA, 19 bp, Mus musculus
  siRNA target sequence for Hsd17b12 (NM_019657.2,213-231).
ggcactgatggaattggaa

SEQ ID NO: 614289 - DNA, 19 bp, Mus musculus
  siRNA target sequence for Hsd17b12 (NM_019657.2,215-233).
cactgatggaattggaaaa

SEQ ID NO: 614290 - DNA, 19 bp, Mus musculus
  siRNA target sequence for Hsd17b12 (NM_019657.2,252-270).
gcaaaacgtggaatgaaga

SEQ ID NO: 614291 - DNA, 19 bp, Mus musculus
  siRNA target sequence for Hsd17b12 (NM_019657.2,253-271).
caaaacgtggaatgaagat

SEQ ID NO: 614292 - DNA, 19 bp, Mus musculus
  siRNA target sequence for Hsd17b12 (NM_019657.2,417-435).
gagattggcgttttagtga

SEQ ID NO: 614293 - DNA, 19 bp, Mus musculus
  siRNA target sequence for Hsd17b12 (NM_019657.2,455-473).
cgagtatccggaatacttt

SEQ ID NO: 614294 - DNA, 19 bp, Mus musculus
  siRNA target sequence for Hsd17b12 (NM_019657.2,560-578).
gcctggcatggtagaaaga

SEQ ID NO: 614295 - DNA, 19 bp, Mus musculus
  siRNA target sequence for Hsd17b12 (NM_019657.2,561-579).
cctggcatggtagaaagat

SEQ ID NO: 614296 - DNA, 19 bp, Mus musculus
  siRNA target sequence for Hsd17b12 (NM_019657.2,577-595).
gatctaaaggggtgattct

SEQ ID NO: 614297 - DNA, 19 bp, Mus musculus
  siRNA target sequence for Hsd17b12 (NM_019657.2,625-643).
cagttccattgttgacaat

SEQ ID NO: 614298 - DNA, 19 bp, Mus musculus
  siRNA target sequence for Hsd17b12 (NM_019657.2,630-648).
ccattgttgacaatctact

SEQ ID NO: 614299 - DNA, 19 bp, Mus musculus
  siRNA target sequence for Hsd17b12 (NM_019657.2,685-703).
gcctccatgaggagtataa

SEQ ID NO: 614300 - DNA, 19 bp, Mus musculus
  siRNA target sequence for Hsd17b12 (NM_019657.2,788-806).
gccctctgcagagacattt

SEQ ID NO: 614301 - DNA, 19 bp, Mus musculus
  siRNA target sequence for Hsd17b12 (NM_019657.2,812-830).
gtctgcaattaaaacagta

SEQ ID NO: 614302 - DNA, 19 bp, Mus musculus
  siRNA target sequence for Hsd17b12 (NM_019657.2,817-835).
caattaaaacagtaggttt

SEQ ID NO: 614303 - DNA, 19 bp, Mus musculus
  siRNA target sequence for Hsd17b12 (NM_019657.2,839-857).
gacccgaaccactggatat

SEQ ID NO: 614304 - DNA, 19 bp, Mus musculus
  siRNA target sequence for Hsd17b12 (NM_019657.2,866-884).
ctctctcatgggctcaata

SEQ ID NO: 614305 - DNA, 19 bp, Mus musculus
  siRNA target sequence for Hsd17b12 (NM_019657.2,897-915).
cctcgttggatgtatttta

SEQ ID NO: 614306 - DNA, 19 bp, Mus musculus
  siRNA target sequence for Hsd17b12 (NM_019657.2,898-916).
ctcgttggatgtattttaa

SEQ ID NO: 614307 - DNA, 19 bp, Mus musculus
  siRNA target sequence for Hsd17b12 (NM_019657.2,947-965).
gaatcgctacctgaagaaa

SEQ ID NO: 614308 - DNA, 19 bp, Mus musculus
  siRNA target sequence for Hsd17b9 (NM_013786.2,199-217).
gttctacctggtaactctt

SEQ ID NO: 614309 - DNA, 19 bp, Mus musculus
  siRNA target sequence for Hsd17b9 (NM_013786.2,229-247).
ccaccttctgcgttggtat

SEQ ID NO: 614310 - DNA, 19 bp, Mus musculus
  siRNA target sequence for Hsd17b9 (NM_013786.2,511-529).
ctggggtttggttaataat

SEQ ID NO: 614311 - DNA, 19 bp, Mus musculus
  siRNA target sequence for Hsd17b9 (NM_013786.2,514-532).
gggtttggttaataatgca

SEQ ID NO: 614312 - DNA, 19 bp, Mus musculus
  siRNA target sequence for Hsd17b9 (NM_013786.2,618-636).
cccaggtgactataagcat

SEQ ID NO: 614313 - DNA, 19 bp, Mus musculus
  siRNA target sequence for Hsd17b9 (NM_013786.2,660-678).
ggggcaggatcgtcaatgt

SEQ ID NO: 614314 - DNA, 19 bp, Mus musculus
  siRNA target sequence for Hsd17b9 (NM_013786.2,765-783).
ggcatgaggttcaagattt

SEQ ID NO: 614315 - DNA, 19 bp, Mus musculus
  siRNA target sequence for Hsd17b9 (NM_013786.2,779-797).
gatttcggggtgaaagtca

SEQ ID NO: 614316 - DNA, 19 bp, Mus musculus
  siRNA target sequence for Hsd17b9 (NM_013786.2,839-857).
gcagagttaaccattgaga

SEQ ID NO: 614317 - DNA, 19 bp, Mus musculus
  siRNA target sequence for Hsd17b9 (NM_013786.2,903-921).
cctacggacagcagttttt

SEQ ID NO: 614318 - DNA, 19 bp, Mus musculus
  siRNA target sequence for Hsd17b9 (NM_013786.2,914-932).
cagttttttgacgactttt

SEQ ID NO: 614319 - DNA, 19 bp, Mus musculus
  siRNA target sequence for Hsd17b9 (NM_013786.2,939-957).
ccaccaaacgagagttgat

SEQ ID NO: 614320 - DNA, 19 bp, Mus musculus
  siRNA target sequence for Hsd17b9 (NM_013786.2,947-965).
cgagagttgatgaagtgta

SEQ ID NO: 614321 - DNA, 19 bp, Mus musculus
  siRNA target sequence for Hsd17b9 (NM_013786.2,1089-1107).
cgtcactggtagactactt

SEQ ID NO: 614322 - DNA, 19 bp, Mus musculus
  siRNA target sequence for Hsd17b9 (NM_013786.2,1090-1108).
gtcactggtagactactta

SEQ ID NO: 614323 - DNA, 19 bp, Mus musculus
  siRNA target sequence for Hsd17b9 (NM_013786.2,1092-1110).
cactggtagactacttatt

SEQ ID NO: 614324 - DNA, 19 bp, Mus musculus
  siRNA target sequence for Kremen2 (NM_028416.1,270-288).
caggcttgtccgaatgctt

SEQ ID NO: 614325 - DNA, 19 bp, Mus musculus
  siRNA target sequence for Kremen2 (NM_028416.1,344-362).
gctggacgcccttgtcttt

SEQ ID NO: 614326 - DNA, 19 bp, Mus musculus
  siRNA target sequence for Kremen2 (NM_028416.1,345-363).
ctggacgcccttgtctttt

SEQ ID NO: 614327 - DNA, 19 bp, Mus musculus
  siRNA target sequence for Kremen2 (NM_028416.1,422-440).
gggttgggtgcgcataact

SEQ ID NO: 614328 - DNA, 19 bp, Mus musculus
  siRNA target sequence for Kremen2 (NM_028416.1,423-441).
ggttgggtgcgcataactt

SEQ ID NO: 614329 - DNA, 19 bp, Mus musculus
  siRNA target sequence for Kremen2 (NM_028416.1,428-446).
ggtgcgcataacttctgta

SEQ ID NO: 614330 - DNA, 19 bp, Mus musculus
  siRNA target sequence for Kremen2 (NM_028416.1,798-816).
gacgactaggcatctatga

SEQ ID NO: 614331 - DNA, 19 bp, Mus musculus
  siRNA target sequence for Kremen2 (NM_028416.1,801-819).
gactaggcatctatgaagt

SEQ ID NO: 614332 - DNA, 19 bp, Mus musculus
  siRNA target sequence for Kremen2 (NM_028416.1,852-870).
ctcctcaaggagtcatcta

SEQ ID NO: 614333 - DNA, 19 bp, Mus musculus
  siRNA target sequence for Kremen2 (NM_028416.1,876-894).
cggattttccggatgagta

SEQ ID NO: 614334 - DNA, 19 bp, Mus musculus
  siRNA target sequence for Kremen2 (NM_028416.1,877-895).
ggattttccggatgagtat

SEQ ID NO: 614335 - DNA, 19 bp, Mus musculus
  siRNA target sequence for Kremen2 (NM_028416.1,964-982).
cttcgagttggctgattct

SEQ ID NO: 614336 - DNA, 19 bp, Mus musculus
  siRNA target sequence for Lisch7 (NM_017405.1,515-533).
gagacagtggagtgtatta

SEQ ID NO: 614337 - DNA, 19 bp, Mus musculus
  siRNA target sequence for Lisch7 (NM_017405.1,578-596).
cgtacgcagagctcattgt

SEQ ID NO: 614338 - DNA, 19 bp, Mus musculus
  siRNA target sequence for Lisch7 (NM_017405.1,849-867).
ctatgcccccagcatctat

SEQ ID NO: 614339 - DNA, 19 bp, Mus musculus
  siRNA target sequence for Lisch7 (NM_017405.1,1008-1026).
ggatgggagcgtatcttca

SEQ ID NO: 614340 - DNA, 19 bp, Mus musculus
  siRNA target sequence for Lisch7 (NM_017405.1,1014-1032).
gagcgtatcttcagaagta

SEQ ID NO: 614341 - DNA, 19 bp, Mus musculus
  siRNA target sequence for Lisch7 (NM_017405.1,1079-1097).
gggtcctatactatatgga

SEQ ID NO: 614342 - DNA, 19 bp, Mus musculus
  siRNA target sequence for Lisch7 (NM_017405.1,1156-1174).
cgggccatgagtgaagtaa

SEQ ID NO: 614343 - DNA, 19 bp, Mus musculus
  siRNA target sequence for Lisch7 (NM_017405.1,1349-1367).
ctgtggatgctctagatga

SEQ ID NO: 614344 - DNA, 19 bp, Mus musculus
  siRNA target sequence for Lisch7 (NM_017405.1,1401-1419).
gtcttctcccccaagtagt

SEQ ID NO: 614345 - DNA, 19 bp, Mus musculus
  siRNA target sequence for Lisch7 (NM_017405.1,1460-1478).
gccgggatgacctctatga

SEQ ID NO: 614346 - DNA, 19 bp, Mus musculus
  siRNA target sequence for Lisch7 (NM_017405.1,1511-1529).
gagatccccactattatga

SEQ ID NO: 614347 - DNA, 19 bp, Mus musculus
  siRNA target sequence for Lisch7 (NM_017405.1,1516-1534).
ccccactattatgatgatt

SEQ ID NO: 614348 - DNA, 19 bp, Mus musculus
  siRNA target sequence for Lisch7 (NM_017405.1,1517-1535).
cccactattatgatgattt

SEQ ID NO: 614349 - DNA, 19 bp, Mus musculus
  siRNA target sequence for Lisch7 (NM_017405.1,1610-1628).
cacgggaccctcagtatga

SEQ ID NO: 614350 - DNA, 19 bp, Mus musculus
  siRNA target sequence for Lisch7 (NM_017405.1,1623-1641).
gtatgatgggcgactctta

SEQ ID NO: 614351 - DNA, 19 bp, Mus musculus
  siRNA target sequence for Lisch7 (NM_017405.1,1636-1654).
ctcttagaagaggctttaa

SEQ ID NO: 614352 - DNA, 19 bp, Mus musculus
  siRNA target sequence for Lisch7 (NM_017405.1,1798-1816).
gccctgagtcgggaaagtt

SEQ ID NO: 614353 - DNA, 19 bp, Mus musculus
  siRNA target sequence for Lisch7 (NM_017405.1,1799-1817).
ccctgagtcgggaaagttt

SEQ ID NO: 614354 - DNA, 19 bp, Mus musculus
  siRNA target sequence for Lisch7 (NM_017405.1,1800-1818).
cctgagtcgggaaagttta

SEQ ID NO: 614355 - DNA, 19 bp, Mus musculus
  siRNA target sequence for LOC328035 (NM_178035.3,240-258).
gccacgggcatcacaatct

SEQ ID NO: 614356 - DNA, 19 bp, Mus musculus
  siRNA target sequence for LOC328035 (NM_178035.3,260-278).
gggtgtgtgccattataca

SEQ ID NO: 614357 - DNA, 19 bp, Mus musculus
  siRNA target sequence for LOC328035 (NM_178035.3,262-280).
gtgtgtgccattatacact

SEQ ID NO: 614358 - DNA, 19 bp, Mus musculus
  siRNA target sequence for LOC328035 (NM_178035.3,333-351).
cgctggagcaagatcttga

SEQ ID NO: 614359 - DNA, 19 bp, Mus musculus
  siRNA target sequence for LOC328035 (NM_178035.3,340-358).
gcaagatcttgatgatttt

SEQ ID NO: 614360 - DNA, 19 bp, Mus musculus
  siRNA target sequence for LOC328035 (NM_178035.3,441-459).
gtgggtctgggcgattcaa

SEQ ID NO: 614361 - DNA, 19 bp, Mus musculus
  siRNA target sequence for LOC328035 (NM_178035.3,477-495).
ctcctcaaccgctacgttt

SEQ ID NO: 614362 - DNA, 19 bp, Mus musculus
  siRNA target sequence for LOC328035 (NM_178035.3,480-498).
ctcaaccgctacgtttaca

SEQ ID NO: 614363 - DNA, 19 bp, Mus musculus
  siRNA target sequence for LOC328035 (NM_178035.3,512-530).
gcttttggtccccatcata

SEQ ID NO: 614364 - DNA, 19 bp, Mus musculus
  siRNA target sequence for LOC328035 (NM_178035.3,585-603).
cggactttgggcttcatct

SEQ ID NO: 614365 - DNA, 19 bp, Mus musculus
  siRNA target sequence for LOC328035 (NM_178035.3,619-637).
ctcagtactggctgttcat

SEQ ID NO: 614366 - DNA, 19 bp, Mus musculus
  siRNA target sequence for LOC328035 (NM_178035.3,711-729).
ccttatctccatgtcaata

SEQ ID NO: 614367 - DNA, 19 bp, Mus musculus
  siRNA target sequence for LOC328035 (NM_178035.3,961-979).
cttacaatgaagactcata

SEQ ID NO: 614368 - DNA, 19 bp, Mus musculus
  siRNA target sequence for Mtrr (NM_172480.1,181-199).
cgggttttccgcagatctt

SEQ ID NO: 614369 - DNA, 19 bp, Mus musculus
  siRNA target sequence for Mtrr (NM_172480.1,183-201).
ggttttccgcagatcttca

SEQ ID NO: 614370 - DNA, 19 bp, Mus musculus
  siRNA target sequence for Mtrr (NM_172480.1,189-207).
ccgcagatcttcactgtat

SEQ ID NO: 614371 - DNA, 19 bp, Mus musculus
  siRNA target sequence for Mtrr (NM_172480.1,191-209).
gcagatcttcactgtatca

SEQ ID NO: 614372 - DNA, 19 bp, Mus musculus
  siRNA target sequence for Mtrr (NM_172480.1,208-226).
cagtgagtcagaaaagtat

SEQ ID NO: 614373 - DNA, 19 bp, Mus musculus
  siRNA target sequence for Mtrr (NM_172480.1,210-228).
gtgagtcagaaaagtatga

SEQ ID NO: 614374 - DNA, 19 bp, Mus musculus
  siRNA target sequence for Mtrr (NM_172480.1,251-269).
ctggtgatggttgtatcta

SEQ ID NO: 614375 - DNA, 19 bp, Mus musculus
  siRNA target sequence for Mtrr (NM_172480.1,297-315).
cagcccggaagtttgttaa

SEQ ID NO: 614376 - DNA, 19 bp, Mus musculus
  siRNA target sequence for Mtrr (NM_172480.1,301-319).
ccggaagtttgttaaagaa

SEQ ID NO: 614377 - DNA, 19 bp, Mus musculus
  siRNA target sequence for Mtrr (NM_172480.1,333-351).
cactccccacggactattt

SEQ ID NO: 614378 - DNA, 19 bp, Mus musculus
  siRNA target sequence for Mtrr (NM_172480.1,353-371).
gctcacctgcaatatggat

SEQ ID NO: 614379 - DNA, 19 bp, Mus musculus
  siRNA target sequence for Mtrr (NM_172480.1,354-372).
ctcacctgcaatatggatt

SEQ ID NO: 614380 - DNA, 19 bp, Mus musculus
  siRNA target sequence for Mtrr (NM_172480.1,356-374).
cacctgcaatatggattat

SEQ ID NO: 614381 - DNA, 19 bp, Mus musculus
  siRNA target sequence for Mtrr (NM_172480.1,383-401).
ggtgactcagaatacacat

SEQ ID NO: 614382 - DNA, 19 bp, Mus musculus
  siRNA target sequence for Mtrr (NM_172480.1,413-431).
ggagggaaagtaattgata

SEQ ID NO: 614383 - DNA, 19 bp, Mus musculus
  siRNA target sequence for Mtrr (NM_172480.1,418-436).
gaaagtaattgataaacga

SEQ ID NO: 614384 - DNA, 19 bp, Mus musculus
  siRNA target sequence for Mtrr (NM_172480.1,508-526).
ggtagagccgtggattgat

SEQ ID NO: 614385 - DNA, 19 bp, Mus musculus
  siRNA target sequence for Mtrr (NM_172480.1,542-560).
ctcacaaagcactttaagt

SEQ ID NO: 614386 - DNA, 19 bp, Mus musculus
  siRNA target sequence for Mtrr (NM_172480.1,544-562).
cacaaagcactttaagtca

SEQ ID NO: 614387 - DNA, 19 bp, Mus musculus
  siRNA target sequence for Mtrr (NM_172480.1,646-664).
gcacatccagtcacaagtt

SEQ ID NO: 614388 - DNA, 19 bp, Mus musculus
  siRNA target sequence for Mtrr (NM_172480.1,707-725).
cttcgggaacaaaatgaga

SEQ ID NO: 614389 - DNA, 19 bp, Mus musculus
  siRNA target sequence for Mtrr (NM_172480.1,742-760).
gggtcggatcgaagacttt

SEQ ID NO: 614390 - DNA, 19 bp, Mus musculus
  siRNA target sequence for Mtrr (NM_172480.1,744-762).
gtcggatcgaagactttga

SEQ ID NO: 614391 - DNA, 19 bp, Mus musculus
  siRNA target sequence for Mtrr (NM_172480.1,746-764).
cggatcgaagactttgact

SEQ ID NO: 614392 - DNA, 19 bp, Mus musculus
  siRNA target sequence for Mtrr (NM_172480.1,819-837).
ctgtgcccccagagtattt

SEQ ID NO: 614393 - DNA, 19 bp, Mus musculus
  siRNA target sequence for Mtrr (NM_172480.1,894-912).
caggggatccaagttttca

SEQ ID NO: 614394 - DNA, 19 bp, Mus musculus
  siRNA target sequence for Mtrr (NM_172480.1,897-915).
gggatccaagttttcaagt

SEQ ID NO: 614395 - DNA, 19 bp, Mus musculus
  siRNA target sequence for Mtrr (NM_172480.1,898-916).
ggatccaagttttcaagtt

SEQ ID NO: 614396 - DNA, 19 bp, Mus musculus
  siRNA target sequence for Mtrr (NM_172480.1,903-921).
caagttttcaagttccaat

SEQ ID NO: 614397 - DNA, 19 bp, Mus musculus
  siRNA target sequence for Mtrr (NM_172480.1,930-948).
ccattcggctgactacaaa

SEQ ID NO: 614398 - DNA, 19 bp, Mus musculus
  siRNA target sequence for Mtrr (NM_172480.1,931-949).
cattcggctgactacaaat

SEQ ID NO: 614399 - DNA, 19 bp, Mus musculus
  siRNA target sequence for Mtrr (NM_172480.1,976-994).
ggaactggacatttcaaaa

SEQ ID NO: 614400 - DNA, 19 bp, Mus musculus
  siRNA target sequence for Mtrr (NM_172480.1,977-995).
gaactggacatttcaaaaa

SEQ ID NO: 614401 - DNA, 19 bp, Mus musculus
  siRNA target sequence for Mtrr (NM_172480.1,1047-1065).
gtgatcgtgaggtagaaga

SEQ ID NO: 614402 - DNA, 19 bp, Mus musculus
  siRNA target sequence for Mtrr (NM_172480.1,1081-1099).
gcagctggctgataaacga

SEQ ID NO: 614403 - DNA, 19 bp, Mus musculus
  siRNA target sequence for Mtrr (NM_172480.1,1103-1121).
caccgtgtcatcttgaaaa

SEQ ID NO: 614404 - DNA, 19 bp, Mus musculus
  siRNA target sequence for Mtrr (NM_172480.1,1106-1124).
cgtgtcatcttgaaaatta

SEQ ID NO: 614405 - DNA, 19 bp, Mus musculus
  siRNA target sequence for Mtrr (NM_172480.1,1176-1194).
ggcgttctctccagttcat

SEQ ID NO: 614406 - DNA, 19 bp, Mus musculus
  siRNA target sequence for Mtrr (NM_172480.1,1201-1219).
ctggtgtcttgaaatacga

SEQ ID NO: 614407 - DNA, 19 bp, Mus musculus
  siRNA target sequence for Mtrr (NM_172480.1,1310-1328).
caaggagccgctgattaca

SEQ ID NO: 614408 - DNA, 19 bp, Mus musculus
  siRNA target sequence for Mtrr (NM_172480.1,1433-1451).
cagcctcgaccgtactcat

SEQ ID NO: 614409 - DNA, 19 bp, Mus musculus
  siRNA target sequence for Mtrr (NM_172480.1,1484-1502).
cttcacttcgtgtttaaca

SEQ ID NO: 614410 - DNA, 19 bp, Mus musculus
  siRNA target sequence for Mtrr (NM_172480.1,1561-1579).
ctggctagccacattggtt

SEQ ID NO: 614411 - DNA, 19 bp, Mus musculus
  siRNA target sequence for Mtrr (NM_172480.1,1596-1614).
caaacacagacgtttcgaa

SEQ ID NO: 614412 - DNA, 19 bp, Mus musculus
  siRNA target sequence for Mtrr (NM_172480.1,1600-1618).
cacagacgtttcgaatgta

SEQ ID NO: 614413 - DNA, 19 bp, Mus musculus
  siRNA target sequence for Mtrr (NM_172480.1,1602-1620).
cagacgtttcgaatgtaga

SEQ ID NO: 614414 - DNA, 19 bp, Mus musculus
  siRNA target sequence for Mtrr (NM_172480.1,1630-1648).
cgctctggctcctgagata

SEQ ID NO: 614415 - DNA, 19 bp, Mus musculus
  siRNA target sequence for Mtrr (NM_172480.1,1634-1652).
ctggctcctgagatacgta

SEQ ID NO: 614416 - DNA, 19 bp, Mus musculus
  siRNA target sequence for Mtrr (NM_172480.1,2012-2030).
caggagaatggctacgttt

SEQ ID NO: 614417 - DNA, 19 bp, Mus musculus
  siRNA target sequence for Mtrr (NM_172480.1,2035-2053).
gtgtggagacgccaagaat

SEQ ID NO: 614418 - DNA, 19 bp, Mus musculus
  siRNA target sequence for Mtrr (NM_172480.1,2128-2146).
gaagacgctggcaacgtta

SEQ ID NO: 614419 - DNA, 19 bp, Mus musculus
  siRNA target sequence for Ncb5or (NM_024195.1,346-364).
cttcccaagagccaaatgt

SEQ ID NO: 614420 - DNA, 19 bp, Mus musculus
  siRNA target sequence for Otog (NM_013624.1,62-80).
gacgatgcttgcttcttct

SEQ ID NO: 614421 - DNA, 19 bp, Mus musculus
  siRNA target sequence for Otog (NM_013624.1,139-157).
gcactcacatggaaaatca

SEQ ID NO: 614422 - DNA, 19 bp, Mus musculus
  siRNA target sequence for Otog (NM_013624.1,225-243).
ggaggatgtcacaacagtt

SEQ ID NO: 614423 - DNA, 19 bp, Mus musculus
  siRNA target sequence for Otog (NM_013624.1,226-244).
gaggatgtcacaacagtta

SEQ ID NO: 614424 - DNA, 19 bp, Mus musculus
  siRNA target sequence for Otog (NM_013624.1,271-289).
gccgcatcggccatgtctt

SEQ ID NO: 614425 - DNA, 19 bp, Mus musculus
  siRNA target sequence for Otog (NM_013624.1,320-338).
gtgcaccgtcgtacttgtt

SEQ ID NO: 614426 - DNA, 19 bp, Mus musculus
  siRNA target sequence for Otog (NM_013624.1,322-340).
gcaccgtcgtacttgttct

SEQ ID NO: 614427 - DNA, 19 bp, Mus musculus
  siRNA target sequence for Otog (NM_013624.1,412-430).
cgttgccagttggtgtata

SEQ ID NO: 614428 - DNA, 19 bp, Mus musculus
  siRNA target sequence for Otog (NM_013624.1,413-431).
gttgccagttggtgtataa

SEQ ID NO: 614429 - DNA, 19 bp, Mus musculus
  siRNA target sequence for Otog (NM_013624.1,416-434).
gccagttggtgtataatgt

SEQ ID NO: 614430 - DNA, 19 bp, Mus musculus
  siRNA target sequence for Otog (NM_013624.1,417-435).
ccagttggtgtataatgta

SEQ ID NO: 614431 - DNA, 19 bp, Mus musculus
  siRNA target sequence for Otog (NM_013624.1,493-511).
gacggcctgtactactact

SEQ ID NO: 614432 - DNA, 19 bp, Mus musculus
  siRNA target sequence for Otog (NM_013624.1,495-513).
cggcctgtactactacttt

SEQ ID NO: 614433 - DNA, 19 bp, Mus musculus
  siRNA target sequence for Otog (NM_013624.1,553-571).
cccgagggtcagagttttt

SEQ ID NO: 614434 - DNA, 19 bp, Mus musculus
  siRNA target sequence for Otog (NM_013624.1,556-574).
gagggtcagagtttttcca

SEQ ID NO: 614435 - DNA, 19 bp, Mus musculus
  siRNA target sequence for Otog (NM_013624.1,803-821).
cagccatttacatcaagat

SEQ ID NO: 614436 - DNA, 19 bp, Mus musculus
  siRNA target sequence for Otog (NM_013624.1,906-924).
gaaggtgactgatgatgta

SEQ ID NO: 614437 - DNA, 19 bp, Mus musculus
  siRNA target sequence for Otog (NM_013624.1,1041-1059).
gtatgagcggtgtgaagta

SEQ ID NO: 614438 - DNA, 19 bp, Mus musculus
  siRNA target sequence for Otog (NM_013624.1,1169-1187).
gccgagcactgatggaata

SEQ ID NO: 614439 - DNA, 19 bp, Mus musculus
  siRNA target sequence for Otog (NM_013624.1,1373-1391).
gccccaatgggctgatctt

SEQ ID NO: 614440 - DNA, 19 bp, Mus musculus
  siRNA target sequence for Otog (NM_013624.1,1374-1392).
ccccaatgggctgatcttt

SEQ ID NO: 614441 - DNA, 19 bp, Mus musculus
  siRNA target sequence for Otog (NM_013624.1,1418-1436).
ctgagtgtccctgtgaatt

SEQ ID NO: 614442 - DNA, 19 bp, Mus musculus
  siRNA target sequence for Otog (NM_013624.1,1579-1597).
gatggacgccggtacacat

SEQ ID NO: 614443 - DNA, 19 bp, Mus musculus
  siRNA target sequence for Otog (NM_013624.1,1762-1780).
gcaggagatgtccttctat

SEQ ID NO: 614444 - DNA, 19 bp, Mus musculus
  siRNA target sequence for Otog (NM_013624.1,1766-1784).
gagatgtccttctatttga

SEQ ID NO: 614445 - DNA, 19 bp, Mus musculus
  siRNA target sequence for Otog (NM_013624.1,1805-1823).
cctactcagatgatgcttt

SEQ ID NO: 614446 - DNA, 19 bp, Mus musculus
  siRNA target sequence for Otog (NM_013624.1,1874-1892).
gcgtgcggatcctctatga

SEQ ID NO: 614447 - DNA, 19 bp, Mus musculus
  siRNA target sequence for Otog (NM_013624.1,2016-2034).
gagcacaccacagttgttt

SEQ ID NO: 614448 - DNA, 19 bp, Mus musculus
  siRNA target sequence for Otog (NM_013624.1,2026-2044).
cagttgtttggcaattcgt

SEQ ID NO: 614449 - DNA, 19 bp, Mus musculus
  siRNA target sequence for Otog (NM_013624.1,2170-2188).
ccctgctctgcgtatctga

SEQ ID NO: 614450 - DNA, 19 bp, Mus musculus
  siRNA target sequence for Otog (NM_013624.1,2342-2360).
gtgaggccactaaagagta

SEQ ID NO: 614451 - DNA, 19 bp, Mus musculus
  siRNA target sequence for Otog (NM_013624.1,2474-2492).
cctgcccaccggacacatt

SEQ ID NO: 614452 - DNA, 19 bp, Mus musculus
  siRNA target sequence for Otog (NM_013624.1,2995-3013).
gacgggcttccgtatgact

SEQ ID NO: 614453 - DNA, 19 bp, Mus musculus
  siRNA target sequence for Otog (NM_013624.1,2997-3015).
cgggcttccgtatgacttt

SEQ ID NO: 614454 - DNA, 19 bp, Mus musculus
  siRNA target sequence for Otog (NM_013624.1,2999-3017).
ggcttccgtatgactttgt

SEQ ID NO: 614455 - DNA, 19 bp, Mus musculus
  siRNA target sequence for Otog (NM_013624.1,3000-3018).
gcttccgtatgactttgta

SEQ ID NO: 614456 - DNA, 19 bp, Mus musculus
  siRNA target sequence for Otog (NM_013624.1,3225-3243).
gagagcaggctttttcaca

SEQ ID NO: 614457 - DNA, 19 bp, Mus musculus
  siRNA target sequence for Otog (NM_013624.1,3512-3530).
ggaaggagtgtggtattct

SEQ ID NO: 614458 - DNA, 19 bp, Mus musculus
  siRNA target sequence for Otog (NM_013624.1,3565-3583).
gttgatgtcacttggtttt

SEQ ID NO: 614459 - DNA, 19 bp, Mus musculus
  siRNA target sequence for Otog (NM_013624.1,3682-3700).
cacggggtggtcattgact

SEQ ID NO: 614460 - DNA, 19 bp, Mus musculus
  siRNA target sequence for Otog (NM_013624.1,3710-3728).
cccgcatctgcccatatga

SEQ ID NO: 614461 - DNA, 19 bp, Mus musculus
  siRNA target sequence for Otog (NM_013624.1,3712-3730).
cgcatctgcccatatgact

SEQ ID NO: 614462 - DNA, 19 bp, Mus musculus
  siRNA target sequence for Otog (NM_013624.1,3853-3871).
ctggcgccaggggacattt

SEQ ID NO: 614463 - DNA, 19 bp, Mus musculus
  siRNA target sequence for Otog (NM_013624.1,3855-3873).
ggcgccaggggacatttca

SEQ ID NO: 614464 - DNA, 19 bp, Mus musculus
  siRNA target sequence for Otog (NM_013624.1,3856-3874).
gcgccaggggacatttcaa

SEQ ID NO: 614465 - DNA, 19 bp, Mus musculus
  siRNA target sequence for Otog (NM_013624.1,3944-3962).
ctgacagacccaacttctt

SEQ ID NO: 614466 - DNA, 19 bp, Mus musculus
  siRNA target sequence for Otog (NM_013624.1,4134-4152).
ggcactgcgggcatacgaa

SEQ ID NO: 614467 - DNA, 19 bp, Mus musculus
  siRNA target sequence for Otog (NM_013624.1,4630-4648).
cccctgggccttacaacat

SEQ ID NO: 614468 - DNA, 19 bp, Mus musculus
  siRNA target sequence for Otog (NM_013624.1,4637-4655).
gccttacaacatctaactt

SEQ ID NO: 614469 - DNA, 19 bp, Mus musculus
  siRNA target sequence for Otog (NM_013624.1,4638-4656).
ccttacaacatctaacttt

SEQ ID NO: 614470 - DNA, 19 bp, Mus musculus
  siRNA target sequence for Otog (NM_013624.1,4693-4711).
ggggctgccagccttctaa

SEQ ID NO: 614471 - DNA, 19 bp, Mus musculus
  siRNA target sequence for Otog (NM_013624.1,4765-4783).
cccacatctggcattgtat

SEQ ID NO: 614472 - DNA, 19 bp, Mus musculus
  siRNA target sequence for Otog (NM_013624.1,4851-4869).
ccggtcaccccctatacct

SEQ ID NO: 614473 - DNA, 19 bp, Mus musculus
  siRNA target sequence for Otog (NM_013624.1,5029-5047).
ctgtcaactgcagtaacta

SEQ ID NO: 614474 - DNA, 19 bp, Mus musculus
  siRNA target sequence for Otog (NM_013624.1,5041-5059).
gtaactaaggtggcaaata

SEQ ID NO: 614475 - DNA, 19 bp, Mus musculus
  siRNA target sequence for Otog (NM_013624.1,5085-5103).
ggcccagagcacttcaagt

SEQ ID NO: 614476 - DNA, 19 bp, Mus musculus
  siRNA target sequence for Otog (NM_013624.1,5524-5542).
cagcaccaggctacaactt

SEQ ID NO: 614477 - DNA, 19 bp, Mus musculus
  siRNA target sequence for Otog (NM_013624.1,5558-5576).
ctgtgagcccacttactca

SEQ ID NO: 614478 - DNA, 19 bp, Mus musculus
  siRNA target sequence for Otog (NM_013624.1,5843-5861).
cagaactcacacctatagt

SEQ ID NO: 614479 - DNA, 19 bp, Mus musculus
  siRNA target sequence for Otog (NM_013624.1,5845-5863).
gaactcacacctatagtga

SEQ ID NO: 614480 - DNA, 19 bp, Mus musculus
  siRNA target sequence for Otog (NM_013624.1,6120-6138).
gatggaggccgaagtgaat

SEQ ID NO: 614481 - DNA, 19 bp, Mus musculus
  siRNA target sequence for Otog (NM_013624.1,6123-6141).
ggaggccgaagtgaatact

SEQ ID NO: 614482 - DNA, 19 bp, Mus musculus
  siRNA target sequence for Otog (NM_013624.1,6124-6142).
gaggccgaagtgaatactt

SEQ ID NO: 614483 - DNA, 19 bp, Mus musculus
  siRNA target sequence for Otog (NM_013624.1,6126-6144).
ggccgaagtgaatacttct

SEQ ID NO: 614484 - DNA, 19 bp, Mus musculus
  siRNA target sequence for Otog (NM_013624.1,6323-6341).
cctgccgatgctcaatctt

SEQ ID NO: 614485 - DNA, 19 bp, Mus musculus
  siRNA target sequence for Otog (NM_013624.1,6351-6369).
gagctttgtaactttcgat

SEQ ID NO: 614486 - DNA, 19 bp, Mus musculus
  siRNA target sequence for Otog (NM_013624.1,6374-6392).
gccatgcggctctgttcaa

SEQ ID NO: 614487 - DNA, 19 bp, Mus musculus
  siRNA target sequence for Otog (NM_013624.1,6387-6405).
gttcaaggaggccatctat

SEQ ID NO: 614488 - DNA, 19 bp, Mus musculus
  siRNA target sequence for Otog (NM_013624.1,6495-6513).
ctgtctggtgatactgaat

SEQ ID NO: 614489 - DNA, 19 bp, Mus musculus
  siRNA target sequence for Otog (NM_013624.1,6564-6582).
gactgtggactctcaagtt

SEQ ID NO: 614490 - DNA, 19 bp, Mus musculus
  siRNA target sequence for Otog (NM_013624.1,6566-6584).
ctgtggactctcaagttgt

SEQ ID NO: 614491 - DNA, 19 bp, Mus musculus
  siRNA target sequence for Otog (NM_013624.1,6602-6620).
gatatggcttccgaattga

SEQ ID NO: 614492 - DNA, 19 bp, Mus musculus
  siRNA target sequence for Otog (NM_013624.1,7048-7066).
gtggctatgtgtcacaaat

SEQ ID NO: 614493 - DNA, 19 bp, Mus musculus
  siRNA target sequence for Otog (NM_013624.1,7052-7070).
ctatgtgtcacaaattcca

SEQ ID NO: 614494 - DNA, 19 bp, Mus musculus
  siRNA target sequence for Otog (NM_013624.1,7140-7158).
ctgtgtggcagcttgtgaa

SEQ ID NO: 614495 - DNA, 19 bp, Mus musculus
  siRNA target sequence for Otog (NM_013624.1,7457-7475).
gtgaagtgatcctgttaca

SEQ ID NO: 614496 - DNA, 19 bp, Mus musculus
  siRNA target sequence for Otog (NM_013624.1,7903-7921).
cgatgctgcccctacaagt

SEQ ID NO: 614497 - DNA, 19 bp, Mus musculus
  siRNA target sequence for Otog (NM_013624.1,7929-7947).
gtgtgactgtgacactatt

SEQ ID NO: 614498 - DNA, 19 bp, Mus musculus
  siRNA target sequence for Otog (NM_013624.1,8412-8430).
cagctgccctccattcaat

SEQ ID NO: 614499 - DNA, 19 bp, Mus musculus
  siRNA target sequence for Otog (NM_013624.1,8414-8432).
gctgccctccattcaatga

SEQ ID NO: 614500 - DNA, 19 bp, Mus musculus
  siRNA target sequence for Otog (NM_013624.1,8415-8433).
ctgccctccattcaatgaa

SEQ ID NO: 614501 - DNA, 19 bp, Mus musculus
  siRNA target sequence for Otog (NM_013624.1,8480-8498).
gatgctgcagagcatgtaa

SEQ ID NO: 614502 - DNA, 19 bp, Mus musculus
  siRNA target sequence for Otog (NM_013624.1,8721-8739).
ctgggtgccctatacagta

SEQ ID NO: 614503 - DNA, 19 bp, Mus musculus
  siRNA target sequence for PAN1B-like (NM_198030.1,52-70).
gaacctcatcctggaattt

SEQ ID NO: 614504 - DNA, 19 bp, Mus musculus
  siRNA target sequence for PAN1B-like (NM_198030.1,104-122).
ctggagtcactggtaaagt

SEQ ID NO: 614505 - DNA, 19 bp, Mus musculus
  siRNA target sequence for PAN1B-like (NM_198030.1,107-125).
gagtcactggtaaagttct

SEQ ID NO: 614506 - DNA, 19 bp, Mus musculus
  siRNA target sequence for PAN1B-like (NM_198030.1,153-171).
ccgggcagaccgttctcat

SEQ ID NO: 614507 - DNA, 19 bp, Mus musculus
  siRNA target sequence for PAN1B-like (NM_198030.1,269-287).
gaggaaaccgcggacaaat

SEQ ID NO: 614508 - DNA, 19 bp, Mus musculus
  siRNA target sequence for PAN1B-like (NM_198030.1,272-290).
gaaaccgcggacaaatgca

SEQ ID NO: 614509 - DNA, 19 bp, Mus musculus
  siRNA target sequence for PAN1B-like (NM_198030.1,303-321).
ccgtcgtgcacgtgtttgt

SEQ ID NO: 614510 - DNA, 19 bp, Mus musculus
  siRNA target sequence for PAN1B-like (NM_198030.1,389-407).
gtcgagatcgtggtaaaca

SEQ ID NO: 614511 - DNA, 19 bp, Mus musculus
  siRNA target sequence for PAN1B-like (NM_198030.1,478-496).
caatatcctcggacatttt

SEQ ID NO: 614512 - DNA, 19 bp, Mus musculus
  siRNA target sequence for PAN1B-like (NM_198030.1,523-541).
gatgctgagaagaaactct

SEQ ID NO: 614513 - DNA, 19 bp, Mus musculus
  siRNA target sequence for PAN1B-like (NM_198030.1,578-596).
ggagtgattccttatctca

SEQ ID NO: 614514 - DNA, 19 bp, Mus musculus
  siRNA target sequence for PAN1B-like (NM_198030.1,700-718).
ccctgtgttcgtgaatact

SEQ ID NO: 614515 - DNA, 19 bp, Mus musculus
  siRNA target sequence for PAN1B-like (NM_198030.1,744-762).
ggttatggcctgtattaga

SEQ ID NO: 614516 - DNA, 19 bp, Mus musculus
  siRNA target sequence for PAN1B-like (NM_198030.1,780-798).
ggagtctgatcaatggaat

SEQ ID NO: 614517 - DNA, 19 bp, Mus musculus
  siRNA target sequence for PAN1B-like (NM_198030.1,783-801).
gtctgatcaatggaatact

SEQ ID NO: 614518 - DNA, 19 bp, Mus musculus
  siRNA target sequence for PAN1B-like (NM_198030.1,785-803).
ctgatcaatggaatactta

SEQ ID NO: 614519 - DNA, 19 bp, Mus musculus
  siRNA target sequence for PAN1B-like (NM_198030.1,823-841).
cgttccatcctatatcaat

SEQ ID NO: 614520 - DNA, 19 bp, Mus musculus
  siRNA target sequence for PAN1B-like (NM_198030.1,824-842).
gttccatcctatatcaata

SEQ ID NO: 614521 - DNA, 19 bp, Mus musculus
  siRNA target sequence for PAN1B-like (NM_198030.1,827-845).
ccatcctatatcaatattt

SEQ ID NO: 614522 - DNA, 19 bp, Mus musculus
  siRNA target sequence for Pecr (NM_023523.3,237-255).
cggaagctggacagactaa

SEQ ID NO: 614523 - DNA, 19 bp, Mus musculus
  siRNA target sequence for Pecr (NM_023523.3,306-324).
gaagtctccgccatacagt

SEQ ID NO: 614524 - DNA, 19 bp, Mus musculus
  siRNA target sequence for Pecr (NM_023523.3,325-343).
gcaacatcaggaaagaaga

SEQ ID NO: 614525 - DNA, 19 bp, Mus musculus
  siRNA target sequence for Pecr (NM_023523.3,360-378).
gtcaaatctaccttagcta

SEQ ID NO: 614526 - DNA, 19 bp, Mus musculus
  siRNA target sequence for Pecr (NM_023523.3,370-388).
ccttagctaagtatggtaa

SEQ ID NO: 614527 - DNA, 19 bp, Mus musculus
  siRNA target sequence for Pecr (NM_023523.3,375-393).
gctaagtatggtaagatca

SEQ ID NO: 614528 - DNA, 19 bp, Mus musculus
  siRNA target sequence for Pecr (NM_023523.3,376-394).
ctaagtatggtaagatcaa

SEQ ID NO: 614529 - DNA, 19 bp, Mus musculus
  siRNA target sequence for Pecr (NM_023523.3,392-410).
caacttcttggtcaacaat

SEQ ID NO: 614530 - DNA, 19 bp, Mus musculus
  siRNA target sequence for Pecr (NM_023523.3,457-475).
gatggcatgctgtgataga

SEQ ID NO: 614531 - DNA, 19 bp, Mus musculus
  siRNA target sequence for Pecr (NM_023523.3,497-515).
ctacatgtgcaaagaagtt

SEQ ID NO: 614532 - DNA, 19 bp, Mus musculus
  siRNA target sequence for Pecr (NM_023523.3,503-521).
gtgcaaagaagtttacaat

SEQ ID NO: 614533 - DNA, 19 bp, Mus musculus
  siRNA target sequence for Pecr (NM_023523.3,537-555).
cacggagggtcgattgtca

SEQ ID NO: 614534 - DNA, 19 bp, Mus musculus
  siRNA target sequence for Pecr (NM_023523.3,539-557).
cggagggtcgattgtcaat

SEQ ID NO: 614535 - DNA, 19 bp, Mus musculus
  siRNA target sequence for Pecr (NM_023523.3,540-558).
ggagggtcgattgtcaata

SEQ ID NO: 614536 - DNA, 19 bp, Mus musculus
  siRNA target sequence for Pecr (NM_023523.3,541-559).
gagggtcgattgtcaatat

SEQ ID NO: 614537 - DNA, 19 bp, Mus musculus
  siRNA target sequence for Pecr (NM_023523.3,545-563).
gtcgattgtcaatatcatt

SEQ ID NO: 614538 - DNA, 19 bp, Mus musculus
  siRNA target sequence for Pecr (NM_023523.3,547-565).
cgattgtcaatatcattgt

SEQ ID NO: 614539 - DNA, 19 bp, Mus musculus
  siRNA target sequence for Pecr (NM_023523.3,560-578).
cattgtccttcttaataat

SEQ ID NO: 614540 - DNA, 19 bp, Mus musculus
  siRNA target sequence for Pecr (NM_023523.3,599-617).
cactggagcggcaagagaa

SEQ ID NO: 614541 - DNA, 19 bp, Mus musculus
  siRNA target sequence for Pecr (NM_023523.3,607-625).
cggcaagagaaggtgttta

SEQ ID NO: 614542 - DNA, 19 bp, Mus musculus
  siRNA target sequence for Pecr (NM_023523.3,610-628).
caagagaaggtgtttacaa

SEQ ID NO: 614543 - DNA, 19 bp, Mus musculus
  siRNA target sequence for Pecr (NM_023523.3,684-702).
gtcgctcctgggaccattt

SEQ ID NO: 614544 - DNA, 19 bp, Mus musculus
  siRNA target sequence for Pecr (NM_023523.3,710-728).
gactgctgttgacaactat

SEQ ID NO: 614545 - DNA, 19 bp, Mus musculus
  siRNA target sequence for Pecr (NM_023523.3,730-748).
gcgaaatgggacaaacctt

SEQ ID NO: 614546 - DNA, 19 bp, Mus musculus
  siRNA target sequence for Pecr (NM_023523.3,731-749).
cgaaatgggacaaacctta

SEQ ID NO: 614547 - DNA, 19 bp, Mus musculus
  siRNA target sequence for Pecr (NM_023523.3,732-750).
gaaatgggacaaaccttat

SEQ ID NO: 614548 - DNA, 19 bp, Mus musculus
  siRNA target sequence for Pecr (NM_023523.3,830-848).
gtcccctgcggcttcctat

SEQ ID NO: 614549 - DNA, 19 bp, Mus musculus
  siRNA target sequence for Pecr (NM_023523.3,832-850).
cccctgcggcttcctatat

SEQ ID NO: 614550 - DNA, 19 bp, Mus musculus
  siRNA target sequence for Pecr (NM_023523.3,834-852).
cctgcggcttcctatatca

SEQ ID NO: 614551 - DNA, 19 bp, Mus musculus
  siRNA target sequence for Pecr (NM_023523.3,851-869).
cactggacagttgatcaat

SEQ ID NO: 614552 - DNA, 19 bp, Mus musculus
  siRNA target sequence for Pecr (NM_023523.3,853-871).
ctggacagttgatcaatgt

SEQ ID NO: 614553 - DNA, 19 bp, Mus musculus
  siRNA target sequence for Pecr (NM_023523.3,907-925).
gcataccggatcatgacaa

SEQ ID NO: 614554 - DNA, 19 bp, Mus musculus
  siRNA target sequence for Pecr (NM_023523.3,937-955).
gagctggggacctttctat

SEQ ID NO: 614555 - DNA, 19 bp, Mus musculus
  siRNA target sequence for Pecr (NM_023523.3,943-961).
gggacctttctattgtcaa

SEQ ID NO: 614556 - DNA, 19 bp, Mus musculus
  siRNA target sequence for Pecr (NM_023523.3,957-975).
gtcaagaggataaaggaat

SEQ ID NO: 614557 - DNA, 19 bp, Mus musculus
  siRNA target sequence for Phyh (NM_010726.1,152-170).
gtttccagcctgaacaatt

SEQ ID NO: 614558 - DNA, 19 bp, Mus musculus
  siRNA target sequence for Phyh (NM_010726.1,174-192).
gtatactctggataataat

SEQ ID NO: 614559 - DNA, 19 bp, Mus musculus
  siRNA target sequence for Phyh (NM_010726.1,232-250).
gggtttctcgtcattaaga

SEQ ID NO: 614560 - DNA, 19 bp, Mus musculus
  siRNA target sequence for Phyh (NM_010726.1,233-251).
ggtttctcgtcattaagaa

SEQ ID NO: 614561 - DNA, 19 bp, Mus musculus
  siRNA target sequence for Phyh (NM_010726.1,249-267).
gaatctggtatctgatgat

SEQ ID NO: 614562 - DNA, 19 bp, Mus musculus
  siRNA target sequence for Phyh (NM_010726.1,255-273).
ggtatctgatgatgacatt

SEQ ID NO: 614563 - DNA, 19 bp, Mus musculus
  siRNA target sequence for Phyh (NM_010726.1,278-296).
gttttcgagcagagtttga

SEQ ID NO: 614564 - DNA, 19 bp, Mus musculus
  siRNA target sequence for Phyh (NM_010726.1,322-340).
ccaccagggatcgttataa

SEQ ID NO: 614565 - DNA, 19 bp, Mus musculus
  siRNA target sequence for Phyh (NM_010726.1,323-341).
caccagggatcgttataat

SEQ ID NO: 614566 - DNA, 19 bp, Mus musculus
  siRNA target sequence for Phyh (NM_010726.1,325-343).
ccagggatcgttataatga

SEQ ID NO: 614567 - DNA, 19 bp, Mus musculus
  siRNA target sequence for Phyh (NM_010726.1,354-372).
ccttgcaaaacaggattat

SEQ ID NO: 614568 - DNA, 19 bp, Mus musculus
  siRNA target sequence for Phyh (NM_010726.1,355-373).
cttgcaaaacaggattata

SEQ ID NO: 614569 - DNA, 19 bp, Mus musculus
  siRNA target sequence for Phyh (NM_010726.1,366-384).
ggattatatgccaagtgat

SEQ ID NO: 614570 - DNA, 19 bp, Mus musculus
  siRNA target sequence for Phyh (NM_010726.1,367-385).
gattatatgccaagtgata

SEQ ID NO: 614571 - DNA, 19 bp, Mus musculus
  siRNA target sequence for Phyh (NM_010726.1,380-398).
gtgataggatggtttcaaa

SEQ ID NO: 614572 - DNA, 19 bp, Mus musculus
  siRNA target sequence for Phyh (NM_010726.1,382-400).
gataggatggtttcaaaga

SEQ ID NO: 614573 - DNA, 19 bp, Mus musculus
  siRNA target sequence for Phyh (NM_010726.1,421-439).
gaggagctcttcagatact

SEQ ID NO: 614574 - DNA, 19 bp, Mus musculus
  siRNA target sequence for Phyh (NM_010726.1,442-460).
cttctccccgagattctga

SEQ ID NO: 614575 - DNA, 19 bp, Mus musculus
  siRNA target sequence for Phyh (NM_010726.1,449-467).
ccgagattctgaagtatgt

SEQ ID NO: 614576 - DNA, 19 bp, Mus musculus
  siRNA target sequence for Phyh (NM_010726.1,473-491).
gtttcactggacccaatat

SEQ ID NO: 614577 - DNA, 19 bp, Mus musculus
  siRNA target sequence for Phyh (NM_010726.1,529-547).
gatgttggcaagaagacat

SEQ ID NO: 614578 - DNA, 19 bp, Mus musculus
  siRNA target sequence for Phyh (NM_010726.1,562-580).
catcaggatctgcactatt

SEQ ID NO: 614579 - DNA, 19 bp, Mus musculus
  siRNA target sequence for Phyh (NM_010726.1,588-606).
ccgacctagcaacctaatt

SEQ ID NO: 614580 - DNA, 19 bp, Mus musculus
  siRNA target sequence for Phyh (NM_010726.1,715-733).
gagggaggtgttaacaaaa

SEQ ID NO: 614581 - DNA, 19 bp, Mus musculus
  siRNA target sequence for Phyh (NM_010726.1,719-737).
gaggtgttaacaaaatgta

SEQ ID NO: 614582 - DNA, 19 bp, Mus musculus
  siRNA target sequence for Phyh (NM_010726.1,775-793).
gtccacctagtgatggaaa

SEQ ID NO: 614583 - DNA, 19 bp, Mus musculus
  siRNA target sequence for Phyh (NM_010726.1,789-807).
ggaaaagggcgatactgtt

SEQ ID NO: 614584 - DNA, 19 bp, Mus musculus
  siRNA target sequence for Phyh (NM_010726.1,790-808).
gaaaagggcgatactgttt

SEQ ID NO: 614585 - DNA, 19 bp, Mus musculus
  siRNA target sequence for Phyh (NM_010726.1,832-850).
ggatctggtcggaacaaaa

SEQ ID NO: 614586 - DNA, 19 bp, Mus musculus
  siRNA target sequence for Phyh (NM_010726.1,836-854).
ctggtcggaacaaaactca

SEQ ID NO: 614587 - DNA, 19 bp, Mus musculus
  siRNA target sequence for Phyh (NM_010726.1,915-933).
gagcggcaccagtcaagaa

SEQ ID NO: 614588 - DNA, 19 bp, Mus musculus
  siRNA target sequence for Phyh (NM_010726.1,917-935).
gcggcaccagtcaagaaaa

SEQ ID NO: 614589 - DNA, 19 bp, Mus musculus
  siRNA target sequence for Phyh (NM_010726.1,982-1000).
caaggagtcatggacttta

SEQ ID NO: 614590 - DNA, 19 bp, Mus musculus
  siRNA target sequence for Phyh (NM_010726.1,1002-1020).
ggacacttggatatttcga

SEQ ID NO: 614591 - DNA, 19 bp, Mus musculus
  siRNA target sequence for Qdpr (NM_024236.1,204-222).
gtgccagcgtggttgttaa

SEQ ID NO: 614592 - DNA, 19 bp, Mus musculus
  siRNA target sequence for Qdpr (NM_024236.1,215-233).
gttgttaagatgacagatt

SEQ ID NO: 614593 - DNA, 19 bp, Mus musculus
  siRNA target sequence for Qdpr (NM_024236.1,223-241).
gatgacagattcattcaca

SEQ ID NO: 614594 - DNA, 19 bp, Mus musculus
  siRNA target sequence for Qdpr (NM_024236.1,289-307).
ccagaaggtggatgcaatt

SEQ ID NO: 614595 - DNA, 19 bp, Mus musculus
  siRNA target sequence for Qdpr (NM_024236.1,343-361).
caaatccaagtcgcttttt

SEQ ID NO: 614596 - DNA, 19 bp, Mus musculus
  siRNA target sequence for Qdpr (NM_024236.1,619-637).
cccgatgaacaggaaatca

SEQ ID NO: 614597 - DNA, 19 bp, Mus musculus
  siRNA target sequence for Qdpr (NM_024236.1,660-678).
cctggacacccttagagtt

SEQ ID NO: 614598 - DNA, 19 bp, Mus musculus
  siRNA target sequence for Rdh10 (NM_133832.2,157-175).
cttcgtggtcactttcaaa

SEQ ID NO: 614599 - DNA, 19 bp, Mus musculus
  siRNA target sequence for Rdh10 (NM_133832.2,369-387).
gcatggttcgccacatcta

SEQ ID NO: 614600 - DNA, 19 bp, Mus musculus
  siRNA target sequence for Rdh10 (NM_133832.2,456-474).
cgtgtaacttacaggtttt

SEQ ID NO: 614601 - DNA, 19 bp, Mus musculus
  siRNA target sequence for Rdh10 (NM_133832.2,551-569).
gtctcggtcctggtcaata

SEQ ID NO: 614602 - DNA, 19 bp, Mus musculus
  siRNA target sequence for Rdh10 (NM_133832.2,611-629).
gatgagctcattgaaagaa

SEQ ID NO: 614603 - DNA, 19 bp, Mus musculus
  siRNA target sequence for Rdh10 (NM_133832.2,661-679).
gaccactaaggcctttctt

SEQ ID NO: 614604 - DNA, 19 bp, Mus musculus
  siRNA target sequence for Rdh10 (NM_133832.2,680-698).
ccaacgatgctagagatta

SEQ ID NO: 614605 - DNA, 19 bp, Mus musculus
  siRNA target sequence for Rdh10 (NM_133832.2,681-699).
caacgatgctagagattaa

SEQ ID NO: 614606 - DNA, 19 bp, Mus musculus
  siRNA target sequence for Rdh10 (NM_133832.2,684-702).
cgatgctagagattaatca

SEQ ID NO: 614607 - DNA, 19 bp, Mus musculus
  siRNA target sequence for Rdh10 (NM_133832.2,761-779).
gattactgtgccagtaaat

SEQ ID NO: 614608 - DNA, 19 bp, Mus musculus
  siRNA target sequence for Rdh10 (NM_133832.2,766-784).
ctgtgccagtaaatttgga

SEQ ID NO: 614609 - DNA, 19 bp, Mus musculus
  siRNA target sequence for Rdh10 (NM_133832.2,835-853).
ggatggaattaaaacaact

SEQ ID NO: 614610 - DNA, 19 bp, Mus musculus
  siRNA target sequence for Rdh10 (NM_133832.2,891-909).
gaggctgccgaatcagaaa

SEQ ID NO: 614611 - DNA, 19 bp, Mus musculus
  siRNA target sequence for Rdh10 (NM_133832.2,894-912).
gctgccgaatcagaaaaga

SEQ ID NO: 614612 - DNA, 19 bp, Mus musculus
  siRNA target sequence for Rdh10 (NM_133832.2,1058-1076).
gtcgtgtgcatgtatcgat

SEQ ID NO: 614613 - DNA, 19 bp, Mus musculus
  siRNA target sequence for Rdh10 (NM_133832.2,1060-1078).
cgtgtgcatgtatcgattt

SEQ ID NO: 614614 - DNA, 19 bp, Mus musculus
  siRNA target sequence for Rdh10 (NM_133832.2,1079-1097).
ctaggagcggacaagtgta

SEQ ID NO: 614615 - DNA, 19 bp, Mus musculus
  siRNA target sequence for Rdh10 (NM_133832.2,1082-1100).
ggagcggacaagtgtatgt

SEQ ID NO: 614616 - DNA, 19 bp, Mus musculus
  siRNA target sequence for Rdh10 (NM_133832.2,1083-1101).
gagcggacaagtgtatgta

SEQ ID NO: 614617 - DNA, 19 bp, Mus musculus
  siRNA target sequence for Rdh11 (NM_021557.2,586-604).
gggtgtgcacatctaatgt

SEQ ID NO: 614618 - DNA, 19 bp, Mus musculus
  siRNA target sequence for Rdh11 (NM_021557.2,615-633).
gggaaggtagccatagtca

SEQ ID NO: 614619 - DNA, 19 bp, Mus musculus
  siRNA target sequence for Rdh11 (NM_021557.2,690-708).
gcccgtgtgtatttagctt

SEQ ID NO: 614620 - DNA, 19 bp, Mus musculus
  siRNA target sequence for Rdh11 (NM_021557.2,795-813).
ctagctgataccaagtcta

SEQ ID NO: 614621 - DNA, 19 bp, Mus musculus
  siRNA target sequence for Rdh11 (NM_021557.2,907-925).
ctgcagacggctttgagat

SEQ ID NO: 614622 - DNA, 19 bp, Mus musculus
  siRNA target sequence for Rdh11 (NM_021557.2,964-982).
cccatttgctgctagaaaa

SEQ ID NO: 614623 - DNA, 19 bp, Mus musculus
  siRNA target sequence for Rdh11 (NM_021557.2,997-1015).
ccccatcaaggatagtcaa

SEQ ID NO: 614624 - DNA, 19 bp, Mus musculus
  siRNA target sequence for Rdh11 (NM_021557.2,1000-1018).
catcaaggatagtcaactt

SEQ ID NO: 614625 - DNA, 19 bp, Mus musculus
  siRNA target sequence for Rdh11 (NM_021557.2,1041-1059).
ggcaggatccacttccata

SEQ ID NO: 614626 - DNA, 19 bp, Mus musculus
  siRNA target sequence for Rdh11 (NM_021557.2,1042-1060).
gcaggatccacttccataa

SEQ ID NO: 614627 - DNA, 19 bp, Mus musculus
  siRNA target sequence for Rdh11 (NM_021557.2,1045-1063).
ggatccacttccataacct

SEQ ID NO: 614628 - DNA, 19 bp, Mus musculus
  siRNA target sequence for Rdh11 (NM_021557.2,1062-1080).
ctgcagggggagaagttct

SEQ ID NO: 614629 - DNA, 19 bp, Mus musculus
  siRNA target sequence for Rdh11 (NM_021557.2,1065-1083).
cagggggagaagttctaca

SEQ ID NO: 614630 - DNA, 19 bp, Mus musculus
  siRNA target sequence for Rdh11 (NM_021557.2,1097-1115).
gtactgccacagcaaacta

SEQ ID NO: 614631 - DNA, 19 bp, Mus musculus
  siRNA target sequence for Rdh11 (NM_021557.2,1143-1161).
gccaagaggctgaaaggtt

SEQ ID NO: 614632 - DNA, 19 bp, Mus musculus
  siRNA target sequence for Rdh11 (NM_021557.2,1191-1209).
ggcacagtccattctgaat

SEQ ID NO: 614633 - DNA, 19 bp, Mus musculus
  siRNA target sequence for Rdh11 (NM_021557.2,1192-1210).
gcacagtccattctgaatt

SEQ ID NO: 614634 - DNA, 19 bp, Mus musculus
  siRNA target sequence for Rdh11 (NM_021557.2,1211-1229).
gacgcggtactcctctatt

SEQ ID NO: 614635 - DNA, 19 bp, Mus musculus
  siRNA target sequence for Rdh11 (NM_021557.2,1213-1231).
cgcggtactcctctattat

SEQ ID NO: 614636 - DNA, 19 bp, Mus musculus
  siRNA target sequence for Rdh11 (NM_021557.2,1215-1233).
cggtactcctctattatga

SEQ ID NO: 614637 - DNA, 19 bp, Mus musculus
  siRNA target sequence for Rdh11 (NM_021557.2,1327-1345).
gcctaagtggcagtcattt

SEQ ID NO: 614638 - DNA, 19 bp, Mus musculus
  siRNA target sequence for Rdh11 (NM_021557.2,1329-1347).
ctaagtggcagtcatttca

SEQ ID NO: 614639 - DNA, 19 bp, Mus musculus
  siRNA target sequence for Rdh13 (NM_175372.2,249-267).
ctgggaagactgttatcgt

SEQ ID NO: 614640 - DNA, 19 bp, Mus musculus
  siRNA target sequence for Rdh13 (NM_175372.2,280-298).
cacaggcatcgggaaacaa

SEQ ID NO: 614641 - DNA, 19 bp, Mus musculus
  siRNA target sequence for Rdh13 (NM_175372.2,321-339).
gaggaggcaacgtcattct

SEQ ID NO: 614642 - DNA, 19 bp, Mus musculus
  siRNA target sequence for Rdh13 (NM_175372.2,414-432).
gtgctgaacgcctagactt

SEQ ID NO: 614643 - DNA, 19 bp, Mus musculus
  siRNA target sequence for Rdh13 (NM_175372.2,481-499).
ggaggagcgagtagacatt

SEQ ID NO: 614644 - DNA, 19 bp, Mus musculus
  siRNA target sequence for Rdh13 (NM_175372.2,577-595).
ctacttggggcattttcta

SEQ ID NO: 614645 - DNA, 19 bp, Mus musculus
  siRNA target sequence for Rdh13 (NM_175372.2,583-601).
ggggcattttctattgaca

SEQ ID NO: 614646 - DNA, 19 bp, Mus musculus
  siRNA target sequence for Rdh13 (NM_175372.2,633-651).
ccccatcacgcatcatcaa

SEQ ID NO: 614647 - DNA, 19 bp, Mus musculus
  siRNA target sequence for Rdh13 (NM_175372.2,634-652).
cccatcacgcatcatcaat

SEQ ID NO: 614648 - DNA, 19 bp, Mus musculus
  siRNA target sequence for Rdh13 (NM_175372.2,636-654).
catcacgcatcatcaatct

SEQ ID NO: 614649 - DNA, 19 bp, Mus musculus
  siRNA target sequence for Rdh13 (NM_175372.2,671-689).
gttgctgggcacatagact

SEQ ID NO: 614650 - DNA, 19 bp, Mus musculus
  siRNA target sequence for Rdh13 (NM_175372.2,705-723).
ggcagatgaaaaagtatga

SEQ ID NO: 614651 - DNA, 19 bp, Mus musculus
  siRNA target sequence for Rdh13 (NM_175372.2,942-960).
cccagcccagcacatatct

SEQ ID NO: 614652 - DNA, 19 bp, Mus musculus
  siRNA target sequence for Rdh13 (NM_175372.2,1049-1067).
gaagtagcccgcagacttt

SEQ ID NO: 614653 - DNA, 19 bp, Mus musculus
  siRNA target sequence for Rdh9 (NM_153133.1,573-591).
gtcttgggccgagtatctt

SEQ ID NO: 614654 - DNA, 19 bp, Mus musculus
  siRNA target sequence for Rdhs (NM_147222.1,587-605).
gggtcgagtgtcacttcat

SEQ ID NO: 614655 - DNA, 19 bp, Mus musculus
  siRNA target sequence for Rdhs (NM_147222.1,592-610).
gagtgtcacttcatggtaa

SEQ ID NO: 614656 - DNA, 19 bp, Mus musculus
  siRNA target sequence for Rdhs (NM_147222.1,596-614).
gtcacttcatggtaatggt

SEQ ID NO: 614657 - DNA, 19 bp, Mus musculus
  siRNA target sequence for Sc4mol (NM_025436.1,193-211).
gagccctttaagaatgctt

SEQ ID NO: 614658 - DNA, 19 bp, Mus musculus
  siRNA target sequence for Sc4mol (NM_025436.1,254-272).
cctggggctccctgatagt

SEQ ID NO: 614659 - DNA, 19 bp, Mus musculus
  siRNA target sequence for Sc4mol (NM_025436.1,255-273).
ctggggctccctgatagtt

SEQ ID NO: 614660 - DNA, 19 bp, Mus musculus
  siRNA target sequence for Sc4mol (NM_025436.1,271-289).
gttcacgaagccatctatt

SEQ ID NO: 614661 - DNA, 19 bp, Mus musculus
  siRNA target sequence for Sc4mol (NM_025436.1,277-295).
gaagccatctatttcttgt

SEQ ID NO: 614662 - DNA, 19 bp, Mus musculus
  siRNA target sequence for Sc4mol (NM_025436.1,297-315).
ctctttacctggattccta

SEQ ID NO: 614663 - DNA, 19 bp, Mus musculus
  siRNA target sequence for Sc4mol (NM_025436.1,308-326).
gattcctattccagtttat

SEQ ID NO: 614664 - DNA, 19 bp, Mus musculus
  siRNA target sequence for Sc4mol (NM_025436.1,312-330).
cctattccagtttatacct

SEQ ID NO: 614665 - DNA, 19 bp, Mus musculus
  siRNA target sequence for Sc4mol (NM_025436.1,313-331).
ctattccagtttatacctt

SEQ ID NO: 614666 - DNA, 19 bp, Mus musculus
  siRNA target sequence for Sc4mol (NM_025436.1,328-346).
ccttacatgagaaagtaca

SEQ ID NO: 614667 - DNA, 19 bp, Mus musculus
  siRNA target sequence for Sc4mol (NM_025436.1,426-444).
ccagttgcctctgatttgt

SEQ ID NO: 614668 - DNA, 19 bp, Mus musculus
  siRNA target sequence for Sc4mol (NM_025436.1,438-456).
gatttgtggaacatactat

SEQ ID NO: 614669 - DNA, 19 bp, Mus musculus
  siRNA target sequence for Sc4mol (NM_025436.1,479-497).
cttatgattgggaaagaat

SEQ ID NO: 614670 - DNA, 19 bp, Mus musculus
  siRNA target sequence for Sc4mol (NM_025436.1,498-516).
gccaagatggtacttaact

SEQ ID NO: 614671 - DNA, 19 bp, Mus musculus
  siRNA target sequence for Sc4mol (NM_025436.1,500-518).
caagatggtacttaacttt

SEQ ID NO: 614672 - DNA, 19 bp, Mus musculus
  siRNA target sequence for Sc4mol (NM_025436.1,547-565).
gaggacacctggcattatt

SEQ ID NO: 614673 - DNA, 19 bp, Mus musculus
  siRNA target sequence for Sc4mol (NM_025436.1,624-642).
cgagtttcaggctccattt

SEQ ID NO: 614674 - DNA, 19 bp, Mus musculus
  siRNA target sequence for Sc4mol (NM_025436.1,627-645).
gtttcaggctccatttgga

SEQ ID NO: 614675 - DNA, 19 bp, Mus musculus
  siRNA target sequence for Sc4mol (NM_025436.1,745-763).
gcatgggtgaccatacgtt

SEQ ID NO: 614676 - DNA, 19 bp, Mus musculus
  siRNA target sequence for Sc4mol (NM_025436.1,746-764).
catgggtgaccatacgttt

SEQ ID NO: 614677 - DNA, 19 bp, Mus musculus
  siRNA target sequence for Sc4mol (NM_025436.1,781-799).
gtgcacagcggttatgata

SEQ ID NO: 614678 - DNA, 19 bp, Mus musculus
  siRNA target sequence for Sc4mol (NM_025436.1,783-801).
gcacagcggttatgatatt

SEQ ID NO: 614679 - DNA, 19 bp, Mus musculus
  siRNA target sequence for Sc4mol (NM_025436.1,786-804).
cagcggttatgatattcct

SEQ ID NO: 614680 - DNA, 19 bp, Mus musculus
  siRNA target sequence for Sc4mol (NM_025436.1,812-830).
cgctgaacttggttccttt

SEQ ID NO: 614681 - DNA, 19 bp, Mus musculus
  siRNA target sequence for Sc4mol (NM_025436.1,839-857).
gcgctcggcaccatgattt

SEQ ID NO: 614682 - DNA, 19 bp, Mus musculus
  siRNA target sequence for Sc4mol (NM_025436.1,842-860).
ctcggcaccatgatttcca

SEQ ID NO: 614683 - DNA, 19 bp, Mus musculus
  siRNA target sequence for Sc4mol (NM_025436.1,920-938).
ggacagatgcccagtatca

SEQ ID NO: 614684 - DNA, 19 bp, Mus musculus
  siRNA target sequence for Sc4mol (NM_025436.1,921-939).
gacagatgcccagtatcat

SEQ ID NO: 614685 - DNA, 19 bp, Mus musculus
  siRNA target sequence for Sc4mol (NM_025436.1,930-948).
ccagtatcatgcctacatt

SEQ ID NO: 614686 - DNA, 19 bp, Mus musculus
  siRNA target sequence for Sc4mol (NM_025436.1,933-951).
gtatcatgcctacattgaa

SEQ ID NO: 614687 - DNA, 19 bp, Mus musculus
  siRNA target sequence for Sc4mol (NM_025436.1,940-958).
gcctacattgaaaaatcga

SEQ ID NO: 614688 - DNA, 19 bp, Mus musculus
  siRNA target sequence for Sc5d (NM_172769.1,150-168).
cttcttcactccgtatgta

SEQ ID NO: 614689 - DNA, 19 bp, Mus musculus
  siRNA target sequence for Sc5d (NM_172769.1,153-171).
cttcactccgtatgtatat

SEQ ID NO: 614690 - DNA, 19 bp, Mus musculus
  siRNA target sequence for Sc5d (NM_172769.1,286-304).
gtctatgatcattccttaa

SEQ ID NO: 614691 - DNA, 19 bp, Mus musculus
  siRNA target sequence for Sc5d (NM_172769.1,425-443).
gcaaactctacgatgacat

SEQ ID NO: 614692 - DNA, 19 bp, Mus musculus
  siRNA target sequence for Sc5d (NM_172769.1,435-453).
cgatgacatcggagacttt

SEQ ID NO: 614693 - DNA, 19 bp, Mus musculus
  siRNA target sequence for Sc5d (NM_172769.1,439-457).
gacatcggagactttccaa

SEQ ID NO: 614694 - DNA, 19 bp, Mus musculus
  siRNA target sequence for Sc5d (NM_172769.1,441-459).
catcggagactttccaaat

SEQ ID NO: 614695 - DNA, 19 bp, Mus musculus
  siRNA target sequence for Sc5d (NM_172769.1,968-986).
gctgtaaaggcaaaaaagt

SEQ ID NO: 614696 - DNA, 19 bp, Mus musculus
  siRNA target sequence for Sdhb (NM_023374.3,193-211).
gagtcggcctgcagtttca

SEQ ID NO: 614697 - DNA, 19 bp, Mus musculus
  siRNA target sequence for Sdhb (NM_023374.3,246-264).
gctcccagaatcaaaaaat

SEQ ID NO: 614698 - DNA, 19 bp, Mus musculus
  siRNA target sequence for Sdhb (NM_023374.3,319-337).
cgtacgaggtggatctgaa

SEQ ID NO: 614699 - DNA, 19 bp, Mus musculus
  siRNA target sequence for Sdhb (NM_023374.3,320-338).
gtacgaggtggatctgaat

SEQ ID NO: 614700 - DNA, 19 bp, Mus musculus
  siRNA target sequence for Sdhb (NM_023374.3,363-381).
gctttaatcaagatcaaga

SEQ ID NO: 614701 - DNA, 19 bp, Mus musculus
  siRNA target sequence for Sdhb (NM_023374.3,364-382).
ctttaatcaagatcaagaa

SEQ ID NO: 614702 - DNA, 19 bp, Mus musculus
  siRNA target sequence for Sdhb (NM_023374.3,380-398).
gaatgaagtggattctact

SEQ ID NO: 614703 - DNA, 19 bp, Mus musculus
  siRNA target sequence for Sdhb (NM_023374.3,404-422).
cttccgaagatcttgtaga

SEQ ID NO: 614704 - DNA, 19 bp, Mus musculus
  siRNA target sequence for Sdhb (NM_023374.3,436-454).
gctcttgcgccatgaacat

SEQ ID NO: 614705 - DNA, 19 bp, Mus musculus
  siRNA target sequence for Sdhb (NM_023374.3,439-457).
cttgcgccatgaacatcaa

SEQ ID NO: 614706 - DNA, 19 bp, Mus musculus
  siRNA target sequence for Sdhb (NM_023374.3,452-470).
catcaacggaggcaatact

SEQ ID NO: 614707 - DNA, 19 bp, Mus musculus
  siRNA target sequence for Sdhb (NM_023374.3,505-523).
gcaaagtctccaaaatcta

SEQ ID NO: 614708 - DNA, 19 bp, Mus musculus
  siRNA target sequence for Sdhb (NM_023374.3,552-570).
gatctagtccctgatttga

SEQ ID NO: 614709 - DNA, 19 bp, Mus musculus
  siRNA target sequence for Sdhb (NM_023374.3,558-576).
gtccctgatttgagtaact

SEQ ID NO: 614710 - DNA, 19 bp, Mus musculus
  siRNA target sequence for Sdhb (NM_023374.3,561-579).
cctgatttgagtaacttct

SEQ ID NO: 614711 - DNA, 19 bp, Mus musculus
  siRNA target sequence for Sdhb (NM_023374.3,571-589).
gtaacttctacgcacaata

SEQ ID NO: 614712 - DNA, 19 bp, Mus musculus
  siRNA target sequence for Sdhb (NM_023374.3,575-593).
cttctacgcacaatacaaa

SEQ ID NO: 614713 - DNA, 19 bp, Mus musculus
  siRNA target sequence for Sdhb (NM_023374.3,595-613).
ccattgagccttatctgaa

SEQ ID NO: 614714 - DNA, 19 bp, Mus musculus
  siRNA target sequence for Sdhb (NM_023374.3,739-757).
ggtggaacggagacaagta

SEQ ID NO: 614715 - DNA, 19 bp, Mus musculus
  siRNA target sequence for Sdhb (NM_023374.3,924-942).
gcgattgcggaaatcaaga

SEQ ID NO: 614716 - DNA, 19 bp, Mus musculus
  siRNA target sequence for Sdhb (NM_023374.3,925-943).
cgattgcggaaatcaagaa

SEQ ID NO: 614717 - DNA, 19 bp, Mus musculus
  siRNA target sequence for Sdhb (NM_023374.3,930-948).
gcggaaatcaagaagatga

SEQ ID NO: 614718 - DNA, 19 bp, Mus musculus
  siRNA target sequence for Slc35c2 (NM_144893.1,245-263).
gcatcacgttctacaacaa

SEQ ID NO: 614719 - DNA, 19 bp, Mus musculus
  siRNA target sequence for Slc35c2 (NM_144893.1,490-508).
ctgtacacgatgaccaaat

SEQ ID NO: 614720 - DNA, 19 bp, Mus musculus
  siRNA target sequence for Slc35c2 (NM_144893.1,690-708).
ccgctggacccttacacaa

SEQ ID NO: 614721 - DNA, 19 bp, Mus musculus
  siRNA target sequence for Slc35c2 (NM_144893.1,797-815).
ctctctttgccatattcga

SEQ ID NO: 614722 - DNA, 19 bp, Mus musculus
  siRNA target sequence for Slc35c2 (NM_144893.1,978-996).
cgctggcatctttaaggaa

SEQ ID NO: 614723 - DNA, 19 bp, Mus musculus
  siRNA target sequence for Slc35c2 (NM_144893.1,1098-1116).
ggccctcaaggctctacat

SEQ ID NO: 614724 - DNA, 19 bp, Mus musculus
  siRNA target sequence for Slc35c2 (NM_144893.1,1099-1117).
gccctcaaggctctacatt

SEQ ID NO: 614725 - DNA, 19 bp, Mus musculus
  siRNA target sequence for Tecta (NM_009347.1,290-308).
gaatttgggtctctttcat

SEQ ID NO: 614726 - DNA, 19 bp, Mus musculus
  siRNA target sequence for Tecta (NM_009347.1,343-361).
gagctcatgtatccatttt

SEQ ID NO: 614727 - DNA, 19 bp, Mus musculus
  siRNA target sequence for Tecta (NM_009347.1,372-390).
cacgagaacccctaaagta

SEQ ID NO: 614728 - DNA, 19 bp, Mus musculus
  siRNA target sequence for Tecta (NM_009347.1,374-392).
cgagaacccctaaagtaga

SEQ ID NO: 614729 - DNA, 19 bp, Mus musculus
  siRNA target sequence for Tecta (NM_009347.1,449-467).
cttaccgcaccgtctatgt

SEQ ID NO: 614730 - DNA, 19 bp, Mus musculus
  siRNA target sequence for Tecta (NM_009347.1,455-473).
gcaccgtctatgtcaataa

SEQ ID NO: 614731 - DNA, 19 bp, Mus musculus
  siRNA target sequence for Tecta (NM_009347.1,498-516).
gctagtgagccagtttaca

SEQ ID NO: 614732 - DNA, 19 bp, Mus musculus
  siRNA target sequence for Tecta (NM_009347.1,537-555).
ggacgggagggccttcatt

SEQ ID NO: 614733 - DNA, 19 bp, Mus musculus
  siRNA target sequence for Tecta (NM_009347.1,584-602).
gaattcggggtgagatcta

SEQ ID NO: 614734 - DNA, 19 bp, Mus musculus
  siRNA target sequence for Tecta (NM_009347.1,713-731).
gggaggaagtcacgtttta

SEQ ID NO: 614735 - DNA, 19 bp, Mus musculus
  siRNA target sequence for Tecta (NM_009347.1,782-800).
ccgacggctcctacacatt

SEQ ID NO: 614736 - DNA, 19 bp, Mus musculus
  siRNA target sequence for Tecta (NM_009347.1,784-802).
gacggctcctacacattca

SEQ ID NO: 614737 - DNA, 19 bp, Mus musculus
  siRNA target sequence for Tecta (NM_009347.1,795-813).
cacattcacgctctttaat

SEQ ID NO: 614738 - DNA, 19 bp, Mus musculus
  siRNA target sequence for Tecta (NM_009347.1,797-815).
cattcacgctctttaatta

SEQ ID NO: 614739 - DNA, 19 bp, Mus musculus
  siRNA target sequence for Tecta (NM_009347.1,801-819).
cacgctctttaattactat

SEQ ID NO: 614740 - DNA, 19 bp, Mus musculus
  siRNA target sequence for Tecta (NM_009347.1,803-821).
cgctctttaattactatga

SEQ ID NO: 614741 - DNA, 19 bp, Mus musculus
  siRNA target sequence for Tecta (NM_009347.1,849-867).
cggtggcgaccctctaaca

SEQ ID NO: 614742 - DNA, 19 bp, Mus musculus
  siRNA target sequence for Tecta (NM_009347.1,904-922).
ggtggaaacctcacgaatt

SEQ ID NO: 614743 - DNA, 19 bp, Mus musculus
  siRNA target sequence for Tecta (NM_009347.1,905-923).
gtggaaacctcacgaattt

SEQ ID NO: 614744 - DNA, 19 bp, Mus musculus
  siRNA target sequence for Tecta (NM_009347.1,907-925).
ggaaacctcacgaatttct

SEQ ID NO: 614745 - DNA, 19 bp, Mus musculus
  siRNA target sequence for Tecta (NM_009347.1,908-926).
gaaacctcacgaatttctt

SEQ ID NO: 614746 - DNA, 19 bp, Mus musculus
  siRNA target sequence for Tecta (NM_009347.1,945-963).
gacccctgagattgtaaat

SEQ ID NO: 614747 - DNA, 19 bp, Mus musculus
  siRNA target sequence for Tecta (NM_009347.1,950-968).
ctgagattgtaaatattca

SEQ ID NO: 614748 - DNA, 19 bp, Mus musculus
  siRNA target sequence for Tecta (NM_009347.1,972-990).
gaccacaaatgtcaatgtt

SEQ ID NO: 614749 - DNA, 19 bp, Mus musculus
  siRNA target sequence for Tecta (NM_009347.1,991-1009).
ccaggacgctgggcattta

SEQ ID NO: 614750 - DNA, 19 bp, Mus musculus
  siRNA target sequence for Tecta (NM_009347.1,995-1013).
gacgctgggcatttaaagt

SEQ ID NO: 614751 - DNA, 19 bp, Mus musculus
  siRNA target sequence for Tecta (NM_009347.1,1069-1087).
cgtcgaggggaggtgtttt

SEQ ID NO: 614752 - DNA, 19 bp, Mus musculus
  siRNA target sequence for Tecta (NM_009347.1,1121-1139).
gtctggatttcaacaatga

SEQ ID NO: 614753 - DNA, 19 bp, Mus musculus
  siRNA target sequence for Tecta (NM_009347.1,1187-1205).
ccaagggtcggttcttcta

SEQ ID NO: 614754 - DNA, 19 bp, Mus musculus
  siRNA target sequence for Tecta (NM_009347.1,1223-1241).
ccagtacctgtgtggtatt

SEQ ID NO: 614755 - DNA, 19 bp, Mus musculus
  siRNA target sequence for Tecta (NM_009347.1,1311-1329).
ggcccgacagtgtctacaa

SEQ ID NO: 614756 - DNA, 19 bp, Mus musculus
  siRNA target sequence for Tecta (NM_009347.1,1312-1330).
gcccgacagtgtctacaaa

SEQ ID NO: 614757 - DNA, 19 bp, Mus musculus
  siRNA target sequence for Tecta (NM_009347.1,1460-1478).
ggaaagtcaaggttaatga

SEQ ID NO: 614758 - DNA, 19 bp, Mus musculus
  siRNA target sequence for Tecta (NM_009347.1,1547-1565).
ctgccgtggaaacagattt

SEQ ID NO: 614759 - DNA, 19 bp, Mus musculus
  siRNA target sequence for Tecta (NM_009347.1,1561-1579).
gattttgggctcttagtga

SEQ ID NO: 614760 - DNA, 19 bp, Mus musculus
  siRNA target sequence for Tecta (NM_009347.1,1591-1609).
cagcactacgcctccattt

SEQ ID NO: 614761 - DNA, 19 bp, Mus musculus
  siRNA target sequence for Tecta (NM_009347.1,1615-1633).
ccaggctcttacataaact

SEQ ID NO: 614762 - DNA, 19 bp, Mus musculus
  siRNA target sequence for Tecta (NM_009347.1,1810-1828).
gaggccctctactttggtt

SEQ ID NO: 614763 - DNA, 19 bp, Mus musculus
  siRNA target sequence for Tecta (NM_009347.1,1890-1908).
ggatgccacggcttttgta

SEQ ID NO: 614764 - DNA, 19 bp, Mus musculus
  siRNA target sequence for Tecta (NM_009347.1,2265-2283).
ggccaccgccaattgtaca

SEQ ID NO: 614765 - DNA, 19 bp, Mus musculus
  siRNA target sequence for Tecta (NM_009347.1,2414-2432).
gccagaaccaggtactaca

SEQ ID NO: 614766 - DNA, 19 bp, Mus musculus
  siRNA target sequence for Tecta (NM_009347.1,2625-2643).
ggaagtcaagctaaatggt

SEQ ID NO: 614767 - DNA, 19 bp, Mus musculus
  siRNA target sequence for Tecta (NM_009347.1,2631-2649).
caagctaaatggtcaagat

SEQ ID NO: 614768 - DNA, 19 bp, Mus musculus
  siRNA target sequence for Tecta (NM_009347.1,2652-2670).
ggaattaccctttttccat

SEQ ID NO: 614769 - DNA, 19 bp, Mus musculus
  siRNA target sequence for Tecta (NM_009347.1,2750-2768).
ccgatgtgggactactgta

SEQ ID NO: 614770 - DNA, 19 bp, Mus musculus
  siRNA target sequence for Tecta (NM_009347.1,2773-2791).
cgactgtccaccatgtact

SEQ ID NO: 614771 - DNA, 19 bp, Mus musculus
  siRNA target sequence for Tecta (NM_009347.1,2966-2984).
ccgagctgctcaagttcta

SEQ ID NO: 614772 - DNA, 19 bp, Mus musculus
  siRNA target sequence for Tecta (NM_009347.1,2993-3011).
gctcccggtgtggtatcat

SEQ ID NO: 614773 - DNA, 19 bp, Mus musculus
  siRNA target sequence for Tecta (NM_009347.1,2996-3014).
cccggtgtggtatcatcaa

SEQ ID NO: 614774 - DNA, 19 bp, Mus musculus
  siRNA target sequence for Tecta (NM_009347.1,3221-3239).
cggagaacagccattttga

SEQ ID NO: 614775 - DNA, 19 bp, Mus musculus
  siRNA target sequence for Tecta (NM_009347.1,3238-3256).
gaggagtgtatgacatgta

SEQ ID NO: 614776 - DNA, 19 bp, Mus musculus
  siRNA target sequence for Tecta (NM_009347.1,3240-3258).
ggagtgtatgacatgtaca

SEQ ID NO: 614777 - DNA, 19 bp, Mus musculus
  siRNA target sequence for Tecta (NM_009347.1,3369-3387).
cgagtgcggctgcaacttt

SEQ ID NO: 614778 - DNA, 19 bp, Mus musculus
  siRNA target sequence for Tecta (NM_009347.1,3494-3512).
cctgcagggacgatgaata

SEQ ID NO: 614779 - DNA, 19 bp, Mus musculus
  siRNA target sequence for Tecta (NM_009347.1,3504-3522).
cgatgaatactgtatggaa

SEQ ID NO: 614780 - DNA, 19 bp, Mus musculus
  siRNA target sequence for Tecta (NM_009347.1,3523-3541).
gagagtggcttgtactact

SEQ ID NO: 614781 - DNA, 19 bp, Mus musculus
  siRNA target sequence for Tecta (NM_009347.1,3540-3558).
ctgccagccccgtactgat

SEQ ID NO: 614782 - DNA, 19 bp, Mus musculus
  siRNA target sequence for Tecta (NM_009347.1,3601-3619).
gatggctacccatttgact

SEQ ID NO: 614783 - DNA, 19 bp, Mus musculus
  siRNA target sequence for Tecta (NM_009347.1,3711-3729).
ggaccgggacccatctcta

SEQ ID NO: 614784 - DNA, 19 bp, Mus musculus
  siRNA target sequence for Tecta (NM_009347.1,3843-3861).
gttaggacaagggaagata

SEQ ID NO: 614785 - DNA, 19 bp, Mus musculus
  siRNA target sequence for Tecta (NM_009347.1,3848-3866).
gacaagggaagataaacat

SEQ ID NO: 614786 - DNA, 19 bp, Mus musculus
  siRNA target sequence for Tecta (NM_009347.1,4140-4158).
ggaaggtttctccaaagta

SEQ ID NO: 614787 - DNA, 19 bp, Mus musculus
  siRNA target sequence for Tecta (NM_009347.1,4251-4269).
gtttgactcctgtatcgat

SEQ ID NO: 614788 - DNA, 19 bp, Mus musculus
  siRNA target sequence for Tecta (NM_009347.1,4319-4337).
cttgccagactcaaggaat

SEQ ID NO: 614789 - DNA, 19 bp, Mus musculus
  siRNA target sequence for Tecta (NM_009347.1,4547-4565).
gctactcagatggcaaata

SEQ ID NO: 614790 - DNA, 19 bp, Mus musculus
  siRNA target sequence for Tecta (NM_009347.1,4570-4588).
gagcccaagcagctattct

SEQ ID NO: 614791 - DNA, 19 bp, Mus musculus
  siRNA target sequence for Tecta (NM_009347.1,4895-4913).
caccggtctatttctacat

SEQ ID NO: 614792 - DNA, 19 bp, Mus musculus
  siRNA target sequence for Tecta (NM_009347.1,4897-4915).
ccggtctatttctacatta

SEQ ID NO: 614793 - DNA, 19 bp, Mus musculus
  siRNA target sequence for Tecta (NM_009347.1,4902-4920).
ctatttctacattaacgaa

SEQ ID NO: 614794 - DNA, 19 bp, Mus musculus
  siRNA target sequence for Tecta (NM_009347.1,4956-4974).
ggtgaatggcacacaagta

SEQ ID NO: 614795 - DNA, 19 bp, Mus musculus
  siRNA target sequence for Tecta (NM_009347.1,4957-4975).
gtgaatggcacacaagtaa

SEQ ID NO: 614796 - DNA, 19 bp, Mus musculus
  siRNA target sequence for Tecta (NM_009347.1,4993-5011).
ggcttggcaaccaaaatct

SEQ ID NO: 614797 - DNA, 19 bp, Mus musculus
  siRNA target sequence for Tecta (NM_009347.1,5045-5063).
gtcccgacatccagatata

SEQ ID NO: 614798 - DNA, 19 bp, Mus musculus
  siRNA target sequence for Tecta (NM_009347.1,5047-5065).
cccgacatccagatatatt

SEQ ID NO: 614799 - DNA, 19 bp, Mus musculus
  siRNA target sequence for Tecta (NM_009347.1,5048-5066).
ccgacatccagatatatta

SEQ ID NO: 614800 - DNA, 19 bp, Mus musculus
  siRNA target sequence for Tecta (NM_009347.1,5258-5276).
gctgcaacgagctacagtt

SEQ ID NO: 614801 - DNA, 19 bp, Mus musculus
  siRNA target sequence for Tecta (NM_009347.1,5429-5447).
gctgctacaaccacaagaa

SEQ ID NO: 614802 - DNA, 19 bp, Mus musculus
  siRNA target sequence for Tecta (NM_009347.1,5432-5450).
gctacaaccacaagaagtt

SEQ ID NO: 614803 - DNA, 19 bp, Mus musculus
  siRNA target sequence for Tecta (NM_009347.1,5510-5528).
gcaccgagtggattgagaa

SEQ ID NO: 614804 - DNA, 19 bp, Mus musculus
  siRNA target sequence for Tecta (NM_009347.1,5511-5529).
caccgagtggattgagaaa

SEQ ID NO: 614805 - DNA, 19 bp, Mus musculus
  siRNA target sequence for Tecta (NM_009347.1,5601-5619).
caacggaggagaattatgt

SEQ ID NO: 614806 - DNA, 19 bp, Mus musculus
  siRNA target sequence for Tecta (NM_009347.1,5635-5653).
cccccctatggaaacaatt

SEQ ID NO: 614807 - DNA, 19 bp, Mus musculus
  siRNA target sequence for Tecta (NM_009347.1,5645-5663).
gaaacaattcccatgacat

SEQ ID NO: 614808 - DNA, 19 bp, Mus musculus
  siRNA target sequence for Tecta (NM_009347.1,5697-5715).
gatggaagtgtccatatct

SEQ ID NO: 614809 - DNA, 19 bp, Mus musculus
  siRNA target sequence for Tecta (NM_009347.1,5747-5765).
gagagggtgtgagaatcaa

SEQ ID NO: 614810 - DNA, 19 bp, Mus musculus
  siRNA target sequence for Tecta (NM_009347.1,5783-5801).
gcatcgagggcgaggattt

SEQ ID NO: 614811 - DNA, 19 bp, Mus musculus
  siRNA target sequence for Tecta (NM_009347.1,5796-5814).
ggattttatctcctttcaa

SEQ ID NO: 614812 - DNA, 19 bp, Mus musculus
  siRNA target sequence for Tecta (NM_009347.1,5851-5869).
cagtccaatggcactcata

SEQ ID NO: 614813 - DNA, 19 bp, Mus musculus
  siRNA target sequence for Tecta (NM_009347.1,5855-5873).
ccaatggcactcatatcat

SEQ ID NO: 614814 - DNA, 19 bp, Mus musculus
  siRNA target sequence for Tecta (NM_009347.1,5883-5901).
cacaatctggattgaaagt

SEQ ID NO: 614815 - DNA, 19 bp, Mus musculus
  siRNA target sequence for Tecta (NM_009347.1,5928-5946).
gagggaccgcacgatcaat

SEQ ID NO: 614816 - DNA, 19 bp, Mus musculus
  siRNA target sequence for Tecta (NM_009347.1,5930-5948).
gggaccgcacgatcaatgt

SEQ ID NO: 614817 - DNA, 19 bp, Mus musculus
  siRNA target sequence for Tecta (NM_009347.1,5960-5978).
gcgcttatgagctagatat

SEQ ID NO: 614818 - DNA, 19 bp, Mus musculus
  siRNA target sequence for Tecta (NM_009347.1,5962-5980).
gcttatgagctagatatca

SEQ ID NO: 614819 - DNA, 19 bp, Mus musculus
  siRNA target sequence for Tecta (NM_009347.1,5963-5981).
cttatgagctagatatcaa

SEQ ID NO: 614820 - DNA, 19 bp, Mus musculus
  siRNA target sequence for Tecta (NM_009347.1,5998-6016).
gtcgtgaagcctatgctaa

SEQ ID NO: 614821 - DNA, 19 bp, Mus musculus
  siRNA target sequence for Tecta (NM_009347.1,6008-6026).
ctatgctaagtgtcatcaa

SEQ ID NO: 614822 - DNA, 19 bp, Mus musculus
  siRNA target sequence for Tecta (NM_009347.1,6069-6087).
ggcactctataaaaatgct

SEQ ID NO: 614823 - DNA, 19 bp, Mus musculus
  siRNA target sequence for Tecta (NM_009347.1,6070-6088).
gcactctataaaaatgctt

SEQ ID NO: 614824 - DNA, 19 bp, Mus musculus
  siRNA target sequence for Tecta (NM_009347.1,6334-6352).
cacgtcaccgtcttcaagt

SEQ ID NO: 614825 - DNA, 19 bp, Mus musculus
  siRNA target sequence for Tecta (NM_009347.1,6357-6375).
cggagactacgatgaagtt

SEQ ID NO: 614826 - DNA, 19 bp, Mus musculus
  siRNA target sequence for Tecta (NM_009347.1,6397-6415).
ctctgtgactcagagaaat

SEQ ID NO: 614827 - DNA, 19 bp, Mus musculus
  siRNA target sequence for Tecta (NM_009347.1,6446-6464).
ccaggatcgccacagatta

SEQ ID NO: 614828 - DNA, 19 bp, Mus musculus
  siRNA target sequence for Tecta (NM_009347.1,6447-6465).
caggatcgccacagattat

SEQ ID NO: 614829 - DNA, 19 bp, Mus musculus
  siRNA target sequence for Tecta (NM_009347.1,6450-6468).
gatcgccacagattattca

SEQ ID NO: 614830 - DNA, 19 bp, Mus musculus
  siRNA target sequence for Tecta (NM_009347.1,6474-6492).
gcacaaagaacagatcatt

SEQ ID NO: 614831 - DNA, 19 bp, Mus musculus
  siRNA target sequence for Tecta (NM_009347.1,6498-6516).
gggacccattaggagaaaa

SEQ ID NO: 614832 - DNA, 19 bp, Mus musculus
  siRNA target sequence for Tsta3 (NM_031201.1,257-275).
cactcttccagaaagtaca

SEQ ID NO: 614833 - DNA, 19 bp, Mus musculus
  siRNA target sequence for Tsta3 (NM_031201.1,314-332).
gccttttccggaatatcaa

SEQ ID NO: 614834 - DNA, 19 bp, Mus musculus
  siRNA target sequence for Tsta3 (NM_031201.1,353-371).
ggaaaaacgtgcacatcaa

SEQ ID NO: 614835 - DNA, 19 bp, Mus musculus
  siRNA target sequence for Tsta3 (NM_031201.1,354-372).
gaaaaacgtgcacatcaat

SEQ ID NO: 614836 - DNA, 19 bp, Mus musculus
  siRNA target sequence for Tsta3 (NM_031201.1,464-482).
ctattgacgagacaatgat

SEQ ID NO: 614837 - DNA, 19 bp, Mus musculus
  siRNA target sequence for Tsta3 (NM_031201.1,494-512).
cgcctcacagcagcaattt

SEQ ID NO: 614838 - DNA, 19 bp, Mus musculus
  siRNA target sequence for Tsta3 (NM_031201.1,506-524).
gcaatttcgggtactcata

SEQ ID NO: 614839 - DNA, 19 bp, Mus musculus
  siRNA target sequence for Tsta3 (NM_031201.1,588-606).
cgccgtcatccctaccaat

SEQ ID NO: 614840 - DNA, 19 bp, Mus musculus
  siRNA target sequence for Tsta3 (NM_031201.1,592-610).
gtcatccctaccaatgtct

SEQ ID NO: 614841 - DNA, 19 bp, Mus musculus
  siRNA target sequence for Tsta3 (NM_031201.1,594-612).
catccctaccaatgtcttt

SEQ ID NO: 614842 - DNA, 19 bp, Mus musculus
  siRNA target sequence for Tsta3 (NM_031201.1,607-625).
gtctttgggccttatgaca

SEQ ID NO: 614843 - DNA, 19 bp, Mus musculus
  siRNA target sequence for Tsta3 (NM_031201.1,730-748).
cggaggcagttcatctact

SEQ ID NO: 614844 - DNA, 19 bp, Mus musculus
  siRNA target sequence for Tsta3 (NM_031201.1,885-903).
caatggggaagtcactttt

SEQ ID NO: 614845 - DNA, 19 bp, Mus musculus
  siRNA target sequence for Tsta3 (NM_031201.1,889-907).
ggggaagtcacttttgatt

SEQ ID NO: 614846 - DNA, 19 bp, Mus musculus
  siRNA target sequence for Tsta3 (NM_031201.1,891-909).
ggaagtcacttttgattca

SEQ ID NO: 614847 - DNA, 19 bp, Mus musculus
  siRNA target sequence for Tsta3 (NM_031201.1,917-935).
cagatgggcaatataagaa

SEQ ID NO: 614848 - DNA, 19 bp, Mus musculus
  siRNA target sequence for Tsta3 (NM_031201.1,919-937).
gatgggcaatataagaaga

SEQ ID NO: 614849 - DNA, 19 bp, Mus musculus
  siRNA target sequence for Tsta3 (NM_031201.1,969-987).
gcccgacttccgtttcaca

SEQ ID NO: 614850 - DNA, 19 bp, Mus musculus
  siRNA target sequence for Tsta3 (NM_031201.1,1019-1037).
cttggttcaccgacaacta

SEQ ID NO: 614851 - DNA, 19 bp, Mus musculus
  siRNA target sequence for Wwox (NM_019573.2,245-263).
ggagatttgccgtatggat

SEQ ID NO: 614852 - DNA, 19 bp, Mus musculus
  siRNA target sequence for Wwox (NM_019573.2,280-298).
cgagaacggacaagtgttt

SEQ ID NO: 614853 - DNA, 19 bp, Mus musculus
  siRNA target sequence for Wwox (NM_019573.2,281-299).
gagaacggacaagtgtttt

SEQ ID NO: 614854 - DNA, 19 bp, Mus musculus
  siRNA target sequence for Wwox (NM_019573.2,286-304).
cggacaagtgtttttcgtt

SEQ ID NO: 614855 - DNA, 19 bp, Mus musculus
  siRNA target sequence for Wwox (NM_019573.2,327-345).
cctacttggatccaagatt

SEQ ID NO: 614856 - DNA, 19 bp, Mus musculus
  siRNA target sequence for Wwox (NM_019573.2,335-353).
gatccaagattggcattta

SEQ ID NO: 614857 - DNA, 19 bp, Mus musculus
  siRNA target sequence for Wwox (NM_019573.2,348-366).
catttaccgtggacgataa

SEQ ID NO: 614858 - DNA, 19 bp, Mus musculus
  siRNA target sequence for Wwox (NM_019573.2,378-396).
cgaccaccagacagagata

SEQ ID NO: 614859 - DNA, 19 bp, Mus musculus
  siRNA target sequence for Wwox (NM_019573.2,637-655).
ccgtagcgtgcagcatttt

SEQ ID NO: 614860 - DNA, 19 bp, Mus musculus
  siRNA target sequence for Wwox (NM_019573.2,939-957).
gggccatgctggcttataa

SEQ ID NO: 614861 - DNA, 19 bp, Mus musculus
  siRNA target sequence for Wwox (NM_019573.2,949-967).
ggcttataacagatctaaa

SEQ ID NO: 614862 - DNA, 19 bp, Mus musculus
  siRNA target sequence for Wwox (NM_019573.2,951-969).
cttataacagatctaaact

SEQ ID NO: 614863 - DNA, 19 bp, Mus musculus
  siRNA target sequence for Wwox (NM_019573.2,963-981).
ctaaactctgcaatatcct

SEQ ID NO: 614864 - DNA, 19 bp, Mus musculus
  siRNA target sequence for Wwox (NM_019573.2,1183-1201).
gggcctcggagggatgtat

SEQ ID NO: 614865 - DNA, 19 bp, Mus musculus
  siRNA target sequence for Wwox (NM_019573.2,1184-1202).
ggcctcggagggatgtatt

SEQ ID NO: 614866 - DNA, 19 bp, Mus musculus
  siRNA target sequence for Wwox (NM_019573.2,1185-1203).
gcctcggagggatgtattt

SEQ ID NO: 614867 - DNA, 19 bp, Mus musculus
  siRNA target sequence for Wwox (NM_019573.2,1187-1205).
ctcggagggatgtatttca

SEQ ID NO: 614868 - DNA, 19 bp, Mus musculus
  siRNA target sequence for Wwox (NM_019573.2,1190-1208).
ggagggatgtatttcaaca

SEQ ID NO: 614869 - DNA, 19 bp, Mus musculus
  siRNA target sequence for Wwox (NM_019573.2,1191-1209).
gagggatgtatttcaacaa

SEQ ID NO: 614870 - DNA, 19 bp, Mus musculus
  siRNA target sequence for 1110018G07Rik (NM_178065.3,210-228).
cgttattggtggaatcata

SEQ ID NO: 614871 - DNA, 19 bp, Mus musculus
  siRNA target sequence for 1110018G07Rik (NM_178065.3,284-302).
gtgtagtcagctttcttca

SEQ ID NO: 614872 - DNA, 19 bp, Mus musculus
  siRNA target sequence for 1110018G07Rik (NM_178065.3,321-339).
ccgaggggaccggactatt

SEQ ID NO: 614873 - DNA, 19 bp, Mus musculus
  siRNA target sequence for 1110018G07Rik (NM_178065.3,322-340).
cgaggggaccggactattt

SEQ ID NO: 614874 - DNA, 19 bp, Mus musculus
  siRNA target sequence for 1110018G07Rik (NM_178065.3,323-341).
gaggggaccggactattta

SEQ ID NO: 614875 - DNA, 19 bp, Mus musculus
  siRNA target sequence for 1110018G07Rik (NM_178065.3,328-346).
gaccggactatttatgact

SEQ ID NO: 614876 - DNA, 19 bp, Mus musculus
  siRNA target sequence for 1110018G07Rik (NM_178065.3,343-361).
gactacgtgcggggaaatt

SEQ ID NO: 614877 - DNA, 19 bp, Mus musculus
  siRNA target sequence for 1110018G07Rik (NM_178065.3,370-388).
ccccggtcctgcaaagtgt

SEQ ID NO: 614878 - DNA, 19 bp, Mus musculus
  siRNA target sequence for 1110018G07Rik (NM_178065.3,435-453).
ccgagtgcatttgttctat

SEQ ID NO: 614879 - DNA, 19 bp, Mus musculus
  siRNA target sequence for 1110018G07Rik (NM_178065.3,436-454).
cgagtgcatttgttctata

SEQ ID NO: 614880 - DNA, 19 bp, Mus musculus
  siRNA target sequence for 1110018G07Rik (NM_178065.3,437-455).
gagtgcatttgttctataa

SEQ ID NO: 614881 - DNA, 19 bp, Mus musculus
  siRNA target sequence for 1110018G07Rik (NM_178065.3,439-457).
gtgcatttgttctataaga

SEQ ID NO: 614882 - DNA, 19 bp, Mus musculus
  siRNA target sequence for 1110018G07Rik (NM_178065.3,504-522).
catctctcacgttgaacta

SEQ ID NO: 614883 - DNA, 19 bp, Mus musculus
  siRNA target sequence for 1110018G07Rik (NM_178065.3,639-657).
cttaaatgtggcctatagt

SEQ ID NO: 614884 - DNA, 19 bp, Mus musculus
  siRNA target sequence for 1110018G07Rik (NM_178065.3,649-667).
gcctatagtccctactaca

SEQ ID NO: 614885 - DNA, 19 bp, Mus musculus
  siRNA target sequence for 1110018G07Rik (NM_178065.3,650-668).
cctatagtccctactacaa

SEQ ID NO: 614886 - DNA, 19 bp, Mus musculus
  siRNA target sequence for 1110018G07Rik (NM_178065.3,651-669).
ctatagtccctactacaaa

SEQ ID NO: 614887 - DNA, 19 bp, Mus musculus
  siRNA target sequence for 1110018G07Rik (NM_178065.3,656-674).
gtccctactacaaaatttt

SEQ ID NO: 614888 - DNA, 19 bp, Mus musculus
  siRNA target sequence for 1110018G07Rik (NM_178065.3,659-677).
cctactacaaaatttttca

SEQ ID NO: 614889 - DNA, 19 bp, Mus musculus
  siRNA target sequence for 1110018G07Rik (NM_178065.3,687-705).
ggtggttccttccaaaaca

SEQ ID NO: 614890 - DNA, 19 bp, Mus musculus
  siRNA target sequence for 1110018G07Rik (NM_178065.3,752-770).
cacacactctgcagatagt

SEQ ID NO: 614891 - DNA, 19 bp, Mus musculus
  siRNA target sequence for 1110018G07Rik (NM_178065.3,772-790).
ccccgagatgagtatgaca

SEQ ID NO: 614892 - DNA, 19 bp, Mus musculus
  siRNA target sequence for 1110018G07Rik (NM_178065.3,849-867).
cgagcttggtcctcaagaa

SEQ ID NO: 614893 - DNA, 19 bp, Mus musculus
  siRNA target sequence for 1110018G07Rik (NM_178065.3,963-981).
cttccatgcctgcatttca

SEQ ID NO: 614894 - DNA, 19 bp, Mus musculus
  siRNA target sequence for 1110018G07Rik (NM_178065.3,985-1003).
cagaaccaacccatcaata

SEQ ID NO: 614895 - DNA, 19 bp, Mus musculus
  siRNA target sequence for 1110018G07Rik (NM_178065.3,996-1014).
catcaataatggcgaattt

SEQ ID NO: 614896 - DNA, 19 bp, Mus musculus
  siRNA target sequence for 1110018G07Rik (NM_178065.3,1007-1025).
gcgaatttgacattattgt

SEQ ID NO: 614897 - DNA, 19 bp, Mus musculus
  siRNA target sequence for 1110018G07Rik (NM_178065.3,1070-1088).
cctcaggagtgagcattta

SEQ ID NO: 614898 - DNA, 19 bp, Mus musculus
  siRNA target sequence for 1110018G07Rik (NM_178065.3,1096-1114).
gcttacctttacaatgcta

SEQ ID NO: 614899 - DNA, 19 bp, Mus musculus
  siRNA target sequence for 1110018G07Rik (NM_178065.3,1097-1115).
cttacctttacaatgctaa

SEQ ID NO: 614900 - DNA, 19 bp, Mus musculus
  siRNA target sequence for 1110018G07Rik (NM_178065.3,1102-1120).
ctttacaatgctaacaact

SEQ ID NO: 614901 - DNA, 19 bp, Mus musculus
  siRNA target sequence for 1110018G07Rik (NM_178065.3,1152-1170).
gcacatgagctcttctcaa

SEQ ID NO: 614902 - DNA, 19 bp, Mus musculus
  siRNA target sequence for 1110018G07Rik (NM_178065.3,1272-1290).
gtcaccaaagcaattctct

SEQ ID NO: 614903 - DNA, 19 bp, Mus musculus
  siRNA target sequence for 1110018G07Rik (NM_178065.3,1297-1315).
gaattctacctgaaaatca

SEQ ID NO: 614904 - DNA, 19 bp, Mus musculus
  siRNA target sequence for 1110018G07Rik (NM_178065.3,1480-1498).
cgttccttgcacaagaaca

SEQ ID NO: 614905 - DNA, 19 bp, Mus musculus
  siRNA target sequence for 1110018G07Rik (NM_178065.3,1481-1499).
gttccttgcacaagaacat

SEQ ID NO: 614906 - DNA, 19 bp, Mus musculus
  siRNA target sequence for 1110018G07Rik (NM_178065.3,1549-1567).
cttcggcaggtacatatga

SEQ ID NO: 614907 - DNA, 19 bp, Mus musculus
  siRNA target sequence for 1110018G07Rik (NM_178065.3,1552-1570).
cggcaggtacatatgaaga

SEQ ID NO: 614908 - DNA, 19 bp, Mus musculus
  siRNA target sequence for 1110018G07Rik (NM_178065.3,1629-1647).
gaaggccactcggaacttt

SEQ ID NO: 614909 - DNA, 19 bp, Mus musculus
  siRNA target sequence for 1110018G07Rik (NM_178065.3,1633-1651).
gccactcggaacttttcca

SEQ ID NO: 614910 - DNA, 19 bp, Mus musculus
  siRNA target sequence for 1110018G07Rik (NM_178065.3,1634-1652).
ccactcggaacttttccat

SEQ ID NO: 614911 - DNA, 19 bp, Mus musculus
  siRNA target sequence for 1110018G07Rik (NM_178065.3,1665-1683).
caagaactttgaagtagtt

SEQ ID NO: 614912 - DNA, 19 bp, Mus musculus
  siRNA target sequence for 1110018G07Rik (NM_178065.3,1726-1744).
gaatggtttgagctaatct

SEQ ID NO: 614913 - DNA, 19 bp, Mus musculus
  siRNA target sequence for 1110018G07Rik (NM_178065.3,1835-1853).
ctcacctgcgcttgaagat

SEQ ID NO: 614914 - DNA, 19 bp, Mus musculus
  siRNA target sequence for 1110018G07Rik (NM_178065.3,1837-1855).
cacctgcgcttgaagatgt

SEQ ID NO: 614915 - DNA, 19 bp, Mus musculus
  siRNA target sequence for 1110018G07Rik (NM_178065.3,1839-1857).
cctgcgcttgaagatgtat

SEQ ID NO: 614916 - DNA, 19 bp, Mus musculus
  siRNA target sequence for 1110018G07Rik (NM_178065.3,1843-1861).
cgcttgaagatgtatgagt

SEQ ID NO: 614917 - DNA, 19 bp, Mus musculus
  siRNA target sequence for 1110018G07Rik (NM_178065.3,1844-1862).
gcttgaagatgtatgagtt

SEQ ID NO: 614918 - DNA, 19 bp, Mus musculus
  siRNA target sequence for 1110018G07Rik (NM_178065.3,1845-1863).
cttgaagatgtatgagttt

SEQ ID NO: 614919 - DNA, 19 bp, Mus musculus
  siRNA target sequence for 1110018G07Rik (NM_178065.3,1870-1888).
cggctggtgggcaagtgtt

SEQ ID NO: 614920 - DNA, 19 bp, Mus musculus
  siRNA target sequence for 1110018G07Rik (NM_178065.3,1871-1889).
ggctggtgggcaagtgttt

SEQ ID NO: 614921 - DNA, 19 bp, Mus musculus
  siRNA target sequence for 1110018G07Rik (NM_178065.3,1875-1893).
ggtgggcaagtgtttgtat

SEQ ID NO: 614922 - DNA, 19 bp, Mus musculus
  siRNA target sequence for 1110018G07Rik (NM_178065.3,1878-1896).
gggcaagtgtttgtatgaa

SEQ ID NO: 614923 - DNA, 19 bp, Mus musculus
  siRNA target sequence for 1110018G07Rik (NM_178065.3,1879-1897).
ggcaagtgtttgtatgaat

SEQ ID NO: 614924 - DNA, 19 bp, Mus musculus
  siRNA target sequence for 1110018G07Rik (NM_178065.3,1965-1983).
cataggactccgtatgcat

SEQ ID NO: 614925 - DNA, 19 bp, Mus musculus
  siRNA target sequence for 1110018G07Rik (NM_178065.3,1969-1987).
ggactccgtatgcattaca

SEQ ID NO: 614926 - DNA, 19 bp, Mus musculus
  siRNA target sequence for 1110018G07Rik (NM_178065.3,1970-1988).
gactccgtatgcattacaa

SEQ ID NO: 614927 - DNA, 19 bp, Mus musculus
  siRNA target sequence for 1110018G07Rik (NM_178065.3,1972-1990).
ctccgtatgcattacaagt

SEQ ID NO: 614928 - DNA, 19 bp, Mus musculus
  siRNA target sequence for 1110018G07Rik (NM_178065.3,1975-1993).
cgtatgcattacaagtact

SEQ ID NO: 614929 - DNA, 19 bp, Mus musculus
  siRNA target sequence for 1110018G07Rik (NM_178065.3,1976-1994).
gtatgcattacaagtactt

SEQ ID NO: 614930 - DNA, 19 bp, Mus musculus
  siRNA target sequence for 1110018G07Rik (NM_178065.3,2000-2018).
cggatgacccagaattcta

SEQ ID NO: 614931 - DNA, 19 bp, Mus musculus
  siRNA target sequence for 1110018G07Rik (NM_178065.3,2024-2042).
ccaaggtgtgctttatcct

SEQ ID NO: 614932 - DNA, 19 bp, Mus musculus
  siRNA target sequence for 1110018G07Rik (NM_178065.3,2147-2165).
ccccagtcaccaatgcaaa

SEQ ID NO: 614933 - DNA, 19 bp, Mus musculus
  siRNA target sequence for 1110018G07Rik (NM_178065.3,2149-2167).
ccagtcaccaatgcaaata

SEQ ID NO: 614934 - DNA, 19 bp, Mus musculus
  siRNA target sequence for 1110018G07Rik (NM_178065.3,2201-2219).
ggctggccagtcaagtgaa

SEQ ID NO: 614935 - DNA, 19 bp, Mus musculus
  siRNA target sequence for 1110018G07Rik (NM_178065.3,2268-2286).
gaacctcctggctattttt

SEQ ID NO: 614936 - DNA, 19 bp, Mus musculus
  siRNA target sequence for 1110018G07Rik (NM_178065.3,2324-2342).
gagacatcaatgtatctga

SEQ ID NO: 614937 - DNA, 19 bp, Mus musculus
  siRNA target sequence for 1110018G07Rik (NM_178065.3,2451-2469).
gctgcttcagtttacaaca

SEQ ID NO: 614938 - DNA, 19 bp, Mus musculus
  siRNA target sequence for 1300010O06Rik (NM_025830.3,159-177).
cgccagcccagaatcaact

SEQ ID NO: 614939 - DNA, 19 bp, Mus musculus
  siRNA target sequence for 1300010O06Rik (NM_025830.3,463-481).
gagagctgacaattttcct

SEQ ID NO: 614940 - DNA, 19 bp, Mus musculus
  siRNA target sequence for 1300010O06Rik (NM_025830.3,479-497).
cctggatgggccaactgtt

SEQ ID NO: 614941 - DNA, 19 bp, Mus musculus
  siRNA target sequence for 1300010O06Rik (NM_025830.3,482-500).
ggatgggccaactgttgat

SEQ ID NO: 614942 - DNA, 19 bp, Mus musculus
  siRNA target sequence for 1300010O06Rik (NM_025830.3,714-732).
cgccagcctgtgaagaact

SEQ ID NO: 614943 - DNA, 19 bp, Mus musculus
  siRNA target sequence for 1300010O06Rik (NM_025830.3,717-735).
cagcctgtgaagaactcta

SEQ ID NO: 614944 - DNA, 19 bp, Mus musculus
  siRNA target sequence for 1300010O06Rik (NM_025830.3,839-857).
cttgagtgtgtcctcaaat

SEQ ID NO: 614945 - DNA, 19 bp, Mus musculus
  siRNA target sequence for 1300010O06Rik (NM_025830.3,992-1010).
gcccaatgggcgtgtctat

SEQ ID NO: 614946 - DNA, 19 bp, Mus musculus
  siRNA target sequence for 1300010O06Rik (NM_025830.3,993-1011).
cccaatgggcgtgtctatt

SEQ ID NO: 614947 - DNA, 19 bp, Mus musculus
  siRNA target sequence for 1300010O06Rik (NM_025830.3,994-1012).
ccaatgggcgtgtctatta

SEQ ID NO: 614948 - DNA, 19 bp, Mus musculus
  siRNA target sequence for 1300010O06Rik (NM_025830.3,1000-1018).
ggcgtgtctattatgttga

SEQ ID NO: 614949 - DNA, 19 bp, Mus musculus
  siRNA target sequence for 1300010O06Rik (NM_025830.3,1080-1098).
gacccccgagggaggtttt

SEQ ID NO: 614950 - DNA, 19 bp, Mus musculus
  siRNA target sequence for 1300010O06Rik (NM_025830.3,1305-1323).
gacaatggacgggtgtatt

SEQ ID NO: 614951 - DNA, 19 bp, Mus musculus
  siRNA target sequence for 1300010O06Rik (NM_025830.3,1307-1325).
caatggacgggtgtattat

SEQ ID NO: 614952 - DNA, 19 bp, Mus musculus
  siRNA target sequence for 1300010O06Rik (NM_025830.3,1311-1329).
ggacgggtgtattatgtca

SEQ ID NO: 614953 - DNA, 19 bp, Mus musculus
  siRNA target sequence for 1300010O06Rik (NM_025830.3,1312-1330).
gacgggtgtattatgtcaa

SEQ ID NO: 614954 - DNA, 19 bp, Mus musculus
  siRNA target sequence for 1300010O06Rik (NM_025830.3,1400-1418).
cccagggtgggagatgaaa

SEQ ID NO: 614955 - DNA, 19 bp, Mus musculus
  siRNA target sequence for 1300010O06Rik (NM_025830.3,1404-1422).
gggtgggagatgaaataca

SEQ ID NO: 614956 - DNA, 19 bp, Mus musculus
  siRNA target sequence for 1300010O06Rik (NM_025830.3,1427-1445).
cgagggcgtgcggtacttt

SEQ ID NO: 614957 - DNA, 19 bp, Mus musculus
  siRNA target sequence for 1300010O06Rik (NM_025830.3,1459-1477).
cccgcaccactacctttaa

SEQ ID NO: 614958 - DNA, 19 bp, Mus musculus
  siRNA target sequence for 1300010O06Rik (NM_025830.3,1462-1480).
gcaccactacctttaagga

SEQ ID NO: 614959 - DNA, 19 bp, Mus musculus
  siRNA target sequence for 1300010O06Rik (NM_025830.3,1525-1543).
gtgcctatgaccgaagttt

SEQ ID NO: 614960 - DNA, 19 bp, Mus musculus
  siRNA target sequence for 1300010O06Rik (NM_025830.3,1588-1606).
ctctacccagccatgtgaa

SEQ ID NO: 614961 - DNA, 19 bp, Mus musculus
  siRNA target sequence for 1300010O06Rik (NM_025830.3,1642-1660).
ctttccaacagattatgaa

SEQ ID NO: 614962 - DNA, 19 bp, Mus musculus
  siRNA target sequence for 1300010O06Rik (NM_025830.3,1778-1796).
ccctatgtactgtttgttt

SEQ ID NO: 614963 - DNA, 19 bp, Mus musculus
  siRNA target sequence for 1300010O06Rik (NM_025830.3,1784-1802).
gtactgtttgtttgaatat

SEQ ID NO: 614964 - DNA, 19 bp, Mus musculus
  siRNA target sequence for 1300010O06Rik (NM_025830.3,1875-1893).
cgctttatcggcagattca

SEQ ID NO: 614965 - DNA, 19 bp, Mus musculus
  siRNA target sequence for 1300010O06Rik (NM_025830.3,1876-1894).
gctttatcggcagattcat

SEQ ID NO: 614966 - DNA, 19 bp, Mus musculus
  siRNA target sequence for 1300010O06Rik (NM_025830.3,2257-2275).
ctctggagtggttgagata

SEQ ID NO: 614967 - DNA, 19 bp, Mus musculus
  siRNA target sequence for 1300010O06Rik (NM_025830.3,2259-2277).
ctggagtggttgagatatt

SEQ ID NO: 614968 - DNA, 19 bp, Mus musculus
  siRNA target sequence for 1300010O06Rik (NM_025830.3,2339-2357).
gcagaagaacgccatctat

SEQ ID NO: 614969 - DNA, 19 bp, Mus musculus
  siRNA target sequence for 1300010O06Rik (NM_025830.3,2605-2623).
gctacgagcagctgaaaga

SEQ ID NO: 614970 - DNA, 19 bp, Mus musculus
  siRNA target sequence for 1700056O17Rik (NM_026101.2,297-315).
ctggggcaatgcatcctat

SEQ ID NO: 614971 - DNA, 19 bp, Mus musculus
  siRNA target sequence for 1700056O17Rik (NM_026101.2,311-329).
cctatggacaactaggttt

SEQ ID NO: 614972 - DNA, 19 bp, Mus musculus
  siRNA target sequence for 1700056O17Rik (NM_026101.2,371-389).
gtgactttttcgtgaacaa

SEQ ID NO: 614973 - DNA, 19 bp, Mus musculus
  siRNA target sequence for 1700056O17Rik (NM_026101.2,387-405).
caaaaaggtccgagatgta

SEQ ID NO: 614974 - DNA, 19 bp, Mus musculus
  siRNA target sequence for 1700056O17Rik (NM_026101.2,442-460).
gatgggactgtgtacacat

SEQ ID NO: 614975 - DNA, 19 bp, Mus musculus
  siRNA target sequence for 1700056O17Rik (NM_026101.2,456-474).
cacatgtggatgtaatgat

SEQ ID NO: 614976 - DNA, 19 bp, Mus musculus
  siRNA target sequence for 1700056O17Rik (NM_026101.2,481-499).
cagctaggtcatgaaaagt

SEQ ID NO: 614977 - DNA, 19 bp, Mus musculus
  siRNA target sequence for 1700056O17Rik (NM_026101.2,531-549).
ggatgcccagaatatcgta

SEQ ID NO: 614978 - DNA, 19 bp, Mus musculus
  siRNA target sequence for 1700056O17Rik (NM_026101.2,575-593).
cgttagcgctgaatgacaa

SEQ ID NO: 614979 - DNA, 19 bp, Mus musculus
  siRNA target sequence for 1700056O17Rik (NM_026101.2,646-664).
ggatcagaggaatgtatca

SEQ ID NO: 614980 - DNA, 19 bp, Mus musculus
  siRNA target sequence for 1700056O17Rik (NM_026101.2,665-683).
gagtacccagaaatattaa

SEQ ID NO: 614981 - DNA, 19 bp, Mus musculus
  siRNA target sequence for 1700056O17Rik (NM_026101.2,671-689).
ccagaaatattaaaagtct

SEQ ID NO: 614982 - DNA, 19 bp, Mus musculus
  siRNA target sequence for 1700056O17Rik (NM_026101.2,692-710).
cggatatccagatagtaca

SEQ ID NO: 614983 - DNA, 19 bp, Mus musculus
  siRNA target sequence for 1700056O17Rik (NM_026101.2,715-733).
gcgtgtggttactatcatt

SEQ ID NO: 614984 - DNA, 19 bp, Mus musculus
  siRNA target sequence for 1700056O17Rik (NM_026101.2,730-748).
cattcgcttgcactttcta

SEQ ID NO: 614985 - DNA, 19 bp, Mus musculus
  siRNA target sequence for 1700056O17Rik (NM_026101.2,735-753).
gcttgcactttctaaagca

SEQ ID NO: 614986 - DNA, 19 bp, Mus musculus
  siRNA target sequence for 1700056O17Rik (NM_026101.2,795-813).
gggtctaggcattgattgt

SEQ ID NO: 614987 - DNA, 19 bp, Mus musculus
  siRNA target sequence for 1700056O17Rik (NM_026101.2,797-815).
gtctaggcattgattgtca

SEQ ID NO: 614988 - DNA, 19 bp, Mus musculus
  siRNA target sequence for 1700056O17Rik (NM_026101.2,799-817).
ctaggcattgattgtcaaa

SEQ ID NO: 614989 - DNA, 19 bp, Mus musculus
  siRNA target sequence for 1700056O17Rik (NM_026101.2,803-821).
gcattgattgtcaaaagca

SEQ ID NO: 614990 - DNA, 19 bp, Mus musculus
  siRNA target sequence for 1700056O17Rik (NM_026101.2,881-899).
gaggagcccatagttttgt

SEQ ID NO: 614991 - DNA, 19 bp, Mus musculus
  siRNA target sequence for 1700056O17Rik (NM_026101.2,925-943).
ggatggggacgtaacaaat

SEQ ID NO: 614992 - DNA, 19 bp, Mus musculus
  siRNA target sequence for 1700056O17Rik (NM_026101.2,926-944).
gatggggacgtaacaaatt

SEQ ID NO: 614993 - DNA, 19 bp, Mus musculus
  siRNA target sequence for 1700056O17Rik (NM_026101.2,930-948).
gggacgtaacaaatttggt

SEQ ID NO: 614994 - DNA, 19 bp, Mus musculus
  siRNA target sequence for 1700056O17Rik (NM_026101.2,947-965).
gtcagctaggtcttaatga

SEQ ID NO: 614995 - DNA, 19 bp, Mus musculus
  siRNA target sequence for 1700056O17Rik (NM_026101.2,951-969).
gctaggtcttaatgatgaa

SEQ ID NO: 614996 - DNA, 19 bp, Mus musculus
  siRNA target sequence for 1700056O17Rik (NM_026101.2,973-991).
gataggtatgttcctaatt

SEQ ID NO: 614997 - DNA, 19 bp, Mus musculus
  siRNA target sequence for 1700056O17Rik (NM_026101.2,978-996).
gtatgttcctaatttacta

SEQ ID NO: 614998 - DNA, 19 bp, Mus musculus
  siRNA target sequence for 1700056O17Rik (NM_026101.2,982-1000).
gttcctaatttactaaagt

SEQ ID NO: 614999 - DNA, 19 bp, Mus musculus
  siRNA target sequence for 1700056O17Rik (NM_026101.2,1001-1019).
cactaagatctcagaaaat

SEQ ID NO: 615000 - DNA, 19 bp, Mus musculus
  siRNA target sequence for 1700056O17Rik (NM_026101.2,1042-1060).
gatcatactgctgcattaa

SEQ ID NO: 615001 - DNA, 19 bp, Mus musculus
  siRNA target sequence for 1700056O17Rik (NM_026101.2,1045-1063).
catactgctgcattaacca

SEQ ID NO: 615002 - DNA, 19 bp, Mus musculus
  siRNA target sequence for 1700056O17Rik (NM_026101.2,1121-1139).
ctaccagtcatgagataaa

SEQ ID NO: 615003 - DNA, 19 bp, Mus musculus
  siRNA target sequence for 1700056O17Rik (NM_026101.2,1159-1177).
ctcatgggaagcattgtta

SEQ ID NO: 615004 - DNA, 19 bp, Mus musculus
  siRNA target sequence for 1700056O17Rik (NM_026101.2,1161-1179).
catgggaagcattgttact

SEQ ID NO: 615005 - DNA, 19 bp, Mus musculus
  siRNA target sequence for 1700056O17Rik (NM_026101.2,1197-1215).
gcagcatacctctgcattt

SEQ ID NO: 615006 - DNA, 19 bp, Mus musculus
  siRNA target sequence for 1700056O17Rik (NM_026101.2,1200-1218).
gcatacctctgcatttgtt

SEQ ID NO: 615007 - DNA, 19 bp, Mus musculus
  siRNA target sequence for 1700056O17Rik (NM_026101.2,1220-1238).
cttcttcaggacgaattta

SEQ ID NO: 615008 - DNA, 19 bp, Mus musculus
  siRNA target sequence for 1700056O17Rik (NM_026101.2,1276-1294).
ggttcaaccagcaacagaa

SEQ ID NO: 615009 - DNA, 19 bp, Mus musculus
  siRNA target sequence for 1700056O17Rik (NM_026101.2,1309-1327).
gtaaaaggaaactggtttt

SEQ ID NO: 615010 - DNA, 19 bp, Mus musculus
  siRNA target sequence for 1700056O17Rik (NM_026101.2,1320-1338).
ctggttttcttataatgga

SEQ ID NO: 615011 - DNA, 19 bp, Mus musculus
  siRNA target sequence for 1700056O17Rik (NM_026101.2,1341-1359).
gtgtccacaagatattggt

SEQ ID NO: 615012 - DNA, 19 bp, Mus musculus
  siRNA target sequence for 1700056O17Rik (NM_026101.2,1366-1384).
gactatttctgtgtcaaaa

SEQ ID NO: 615013 - DNA, 19 bp, Mus musculus
  siRNA target sequence for 1700056O17Rik (NM_026101.2,1439-1457).
gtggacctccagatgactt

SEQ ID NO: 615014 - DNA, 19 bp, Mus musculus
  siRNA target sequence for 1700056O17Rik (NM_026101.2,1441-1459).
ggacctccagatgacttta

SEQ ID NO: 615015 - DNA, 19 bp, Mus musculus
  siRNA target sequence for 1700056O17Rik (NM_026101.2,1497-1515).
cgaagctctgattcagaaa

SEQ ID NO: 615016 - DNA, 19 bp, Mus musculus
  siRNA target sequence for 1700056O17Rik (NM_026101.2,1551-1569).
gatagccaatgagatagat

SEQ ID NO: 615017 - DNA, 19 bp, Mus musculus
  siRNA target sequence for 1700056O17Rik (NM_026101.2,1590-1608).
ctgcctaaatggaagtttt

SEQ ID NO: 615018 - DNA, 19 bp, Mus musculus
  siRNA target sequence for 1700056O17Rik (NM_026101.2,1592-1610).
gcctaaatggaagttttct

SEQ ID NO: 615019 - DNA, 19 bp, Mus musculus
  siRNA target sequence for 1700056O17Rik (NM_026101.2,1739-1757).
ctagtttggaaaagaatct

SEQ ID NO: 615020 - DNA, 19 bp, Mus musculus
  siRNA target sequence for 1700056O17Rik (NM_026101.2,1742-1760).
gtttggaaaagaatctaat

SEQ ID NO: 615021 - DNA, 19 bp, Mus musculus
  siRNA target sequence for 1700056O17Rik (NM_026101.2,1789-1807).
gttgaagctctgaggtttt

SEQ ID NO: 615022 - DNA, 19 bp, Mus musculus
  siRNA target sequence for 1700056O17Rik (NM_026101.2,1840-1858).
gactgcaacaatttcacaa

SEQ ID NO: 615023 - DNA, 19 bp, Mus musculus
  siRNA target sequence for 1700056O17Rik (NM_026101.2,1848-1866).
caatttcacaacaatagca

SEQ ID NO: 615024 - DNA, 19 bp, Mus musculus
  siRNA target sequence for 1700056O17Rik (NM_026101.2,1904-1922).
caccactgaaagtacttga

SEQ ID NO: 615025 - DNA, 19 bp, Mus musculus
  siRNA target sequence for 1700056O17Rik (NM_026101.2,1957-1975).
ctcaagatagtagaacttt

SEQ ID NO: 615026 - DNA, 19 bp, Mus musculus
  siRNA target sequence for 1700056O17Rik (NM_026101.2,2016-2034).
cggcattcccccttctgaa

SEQ ID NO: 615027 - DNA, 19 bp, Mus musculus
  siRNA target sequence for 1700056O17Rik (NM_026101.2,2017-2035).
ggcattcccccttctgaaa

SEQ ID NO: 615028 - DNA, 19 bp, Mus musculus
  siRNA target sequence for 1700056O17Rik (NM_026101.2,2024-2042).
ccccttctgaaagaagaat

SEQ ID NO: 615029 - DNA, 19 bp, Mus musculus
  siRNA target sequence for 1700056O17Rik (NM_026101.2,2025-2043).
cccttctgaaagaagaatt

SEQ ID NO: 615030 - DNA, 19 bp, Mus musculus
  siRNA target sequence for 1700056O17Rik (NM_026101.2,2059-2077).
cataccgcattaaaggttt

SEQ ID NO: 615031 - DNA, 19 bp, Mus musculus
  siRNA target sequence for 1700056O17Rik (NM_026101.2,2063-2081).
ccgcattaaaggttttaga

SEQ ID NO: 615032 - DNA, 19 bp, Mus musculus
  siRNA target sequence for 1700056O17Rik (NM_026101.2,2074-2092).
gttttagaaatattgcata

SEQ ID NO: 615033 - DNA, 19 bp, Mus musculus
  siRNA target sequence for 1700056O17Rik (NM_026101.2,2219-2237).
cagatatcccggtgacaat

SEQ ID NO: 615034 - DNA, 19 bp, Mus musculus
  siRNA target sequence for 1700056O17Rik (NM_026101.2,2221-2239).
gatatcccggtgacaattt

SEQ ID NO: 615035 - DNA, 19 bp, Mus musculus
  siRNA target sequence for 1700056O17Rik (NM_026101.2,2226-2244).
cccggtgacaatttgtaca

SEQ ID NO: 615036 - DNA, 19 bp, Mus musculus
  siRNA target sequence for 1700056O17Rik (NM_026101.2,2329-2347).
gcccacaggcagaatgtct

SEQ ID NO: 615037 - DNA, 19 bp, Mus musculus
  siRNA target sequence for 1700056O17Rik (NM_026101.2,2398-2416).
gttgttcgcagagagaata

SEQ ID NO: 615038 - DNA, 19 bp, Mus musculus
  siRNA target sequence for 1700056O17Rik (NM_026101.2,2450-2468).
ccaagaatatagattataa

SEQ ID NO: 615039 - DNA, 19 bp, Mus musculus
  siRNA target sequence for 1700056O17Rik (NM_026101.2,2472-2490).
gccactcaaggttatattt

SEQ ID NO: 615040 - DNA, 19 bp, Mus musculus
  siRNA target sequence for 1700056O17Rik (NM_026101.2,2474-2492).
cactcaaggttatatttgt

SEQ ID NO: 615041 - DNA, 19 bp, Mus musculus
  siRNA target sequence for 1700056O17Rik (NM_026101.2,2515-2533).
ggaggtgttcgcaaagaat

SEQ ID NO: 615042 - DNA, 19 bp, Mus musculus
  siRNA target sequence for 1700056O17Rik (NM_026101.2,2516-2534).
gaggtgttcgcaaagaatt

SEQ ID NO: 615043 - DNA, 19 bp, Mus musculus
  siRNA target sequence for 1700056O17Rik (NM_026101.2,2518-2536).
ggtgttcgcaaagaatttt

SEQ ID NO: 615044 - DNA, 19 bp, Mus musculus
  siRNA target sequence for 1700056O17Rik (NM_026101.2,2519-2537).
gtgttcgcaaagaattttt

SEQ ID NO: 615045 - DNA, 19 bp, Mus musculus
  siRNA target sequence for 1700056O17Rik (NM_026101.2,2521-2539).
gttcgcaaagaatttttct

SEQ ID NO: 615046 - DNA, 19 bp, Mus musculus
  siRNA target sequence for 1700056O17Rik (NM_026101.2,2552-2570).
gggaattgttggatcctaa

SEQ ID NO: 615047 - DNA, 19 bp, Mus musculus
  siRNA target sequence for 1700056O17Rik (NM_026101.2,2553-2571).
ggaattgttggatcctaaa

SEQ ID NO: 615048 - DNA, 19 bp, Mus musculus
  siRNA target sequence for 1700056O17Rik (NM_026101.2,2574-2592).
cggcatgtttcgatattat

SEQ ID NO: 615049 - DNA, 19 bp, Mus musculus
  siRNA target sequence for 1700056O17Rik (NM_026101.2,2650-2668).
cacttgatcggtgttatct

SEQ ID NO: 615050 - DNA, 19 bp, Mus musculus
  siRNA target sequence for 1700056O17Rik (NM_026101.2,2652-2670).
cttgatcggtgttatctgt

SEQ ID NO: 615051 - DNA, 19 bp, Mus musculus
  siRNA target sequence for 1700056O17Rik (NM_026101.2,2662-2680).
gttatctgtggattagcaa

SEQ ID NO: 615052 - DNA, 19 bp, Mus musculus
  siRNA target sequence for 1700056O17Rik (NM_026101.2,2671-2689).
ggattagcaatttataatt

SEQ ID NO: 615053 - DNA, 19 bp, Mus musculus
  siRNA target sequence for 1700056O17Rik (NM_026101.2,2713-2731).
cctttggctttatataaga

SEQ ID NO: 615054 - DNA, 19 bp, Mus musculus
  siRNA target sequence for 1700064K09Rik (NM_175244.2,519-537).
cgccttgtacctattgaca

SEQ ID NO: 615055 - DNA, 19 bp, Mus musculus
  siRNA target sequence for 1700064K09Rik (NM_175244.2,609-627).
gtagtggacctgacctatt

SEQ ID NO: 615056 - DNA, 19 bp, Mus musculus
  siRNA target sequence for 1700064K09Rik (NM_175244.2,614-632).
ggacctgacctattcacat

SEQ ID NO: 615057 - DNA, 19 bp, Mus musculus
  siRNA target sequence for 1700064K09Rik (NM_175244.2,664-682).
catatacagaagctataca

SEQ ID NO: 615058 - DNA, 19 bp, Mus musculus
  siRNA target sequence for 1700064K09Rik (NM_175244.2,676-694).
ctatacaaaggctactcta

SEQ ID NO: 615059 - DNA, 19 bp, Mus musculus
  siRNA target sequence for 1700064K09Rik (NM_175244.2,700-718).
ccccaacatggacatatga

SEQ ID NO: 615060 - DNA, 19 bp, Mus musculus
  siRNA target sequence for 1700064K09Rik (NM_175244.2,731-749).
cctgatccacttcttatat

SEQ ID NO: 615061 - DNA, 19 bp, Mus musculus
  siRNA target sequence for 1700064K09Rik (NM_175244.2,806-824).
catagatgtttcttcctat

SEQ ID NO: 615062 - DNA, 19 bp, Mus musculus
  siRNA target sequence for 1700064K09Rik (NM_175244.2,820-838).
cctatacggaggagttcaa

SEQ ID NO: 615063 - DNA, 19 bp, Mus musculus
  siRNA target sequence for 1700064K09Rik (NM_175244.2,821-839).
ctatacggaggagttcaat

SEQ ID NO: 615064 - DNA, 19 bp, Mus musculus
  siRNA target sequence for 1700064K09Rik (NM_175244.2,909-927).
gtacggcttaccatgaaga

SEQ ID NO: 615065 - DNA, 19 bp, Mus musculus
  siRNA target sequence for 1700064K09Rik (NM_175244.2,988-1006).
cgaaacgggtagtagtcta

SEQ ID NO: 615066 - DNA, 19 bp, Mus musculus
  siRNA target sequence for 1700064K09Rik (NM_175244.2,989-1007).
gaaacgggtagtagtctat

SEQ ID NO: 615067 - DNA, 19 bp, Mus musculus
  siRNA target sequence for 1700064K09Rik (NM_175244.2,1034-1052).
gctgagtgacgtgaacatt

SEQ ID NO: 615068 - DNA, 19 bp, Mus musculus
  siRNA target sequence for 1700064K09Rik (NM_175244.2,1067-1085).
cggggatgtctgtgtatta

SEQ ID NO: 615069 - DNA, 19 bp, Mus musculus
  siRNA target sequence for 1700064K09Rik (NM_175244.2,1096-1114).
ccgtccaccttccaatcat

SEQ ID NO: 615070 - DNA, 19 bp, Mus musculus
  siRNA target sequence for 1700064K09Rik (NM_175244.2,1097-1115).
cgtccaccttccaatcatt

SEQ ID NO: 615071 - DNA, 19 bp, Mus musculus
  siRNA target sequence for 1700064K09Rik (NM_175244.2,1101-1119).
caccttccaatcattgaga

SEQ ID NO: 615072 - DNA, 19 bp, Mus musculus
  siRNA target sequence for 1700064K09Rik (NM_175244.2,1127-1145).
cgttgagtgtcgagatgat

SEQ ID NO: 615073 - DNA, 19 bp, Mus musculus
  siRNA target sequence for 1700064K09Rik (NM_175244.2,1158-1176).
cgtcttcgaggggtaaaga

SEQ ID NO: 615074 - DNA, 19 bp, Mus musculus
  siRNA target sequence for 1700064K09Rik (NM_175244.2,1161-1179).
cttcgaggggtaaagatca

SEQ ID NO: 615075 - DNA, 19 bp, Mus musculus
  siRNA target sequence for 1700064K09Rik (NM_175244.2,1164-1182).
cgaggggtaaagatcaagt

SEQ ID NO: 615076 - DNA, 19 bp, Mus musculus
  siRNA target sequence for 1700064K09Rik (NM_175244.2,1264-1282).
ctgacccagaagtactata

SEQ ID NO: 615077 - DNA, 19 bp, Mus musculus
  siRNA target sequence for 1700064K09Rik (NM_175244.2,1363-1381).
ccctgggcacctttagtga

SEQ ID NO: 615078 - DNA, 19 bp, Mus musculus
  siRNA target sequence for 1700064K09Rik (NM_175244.2,1367-1385).
gggcacctttagtgagatt

SEQ ID NO: 615079 - DNA, 19 bp, Mus musculus
  siRNA target sequence for 1700064K09Rik (NM_175244.2,1369-1387).
gcacctttagtgagattaa

SEQ ID NO: 615080 - DNA, 19 bp, Mus musculus
  siRNA target sequence for 1700064K09Rik (NM_175244.2,1372-1390).
cctttagtgagattaagca

SEQ ID NO: 615081 - DNA, 19 bp, Mus musculus
  siRNA target sequence for 1700064K09Rik (NM_175244.2,1373-1391).
ctttagtgagattaagcaa

SEQ ID NO: 615082 - DNA, 19 bp, Mus musculus
  siRNA target sequence for 1700064K09Rik (NM_175244.2,1442-1460).
gtgcctgcgtgattcagaa

SEQ ID NO: 615083 - DNA, 19 bp, Mus musculus
  siRNA target sequence for 1700064K09Rik (NM_175244.2,1558-1576).
cagtcttcacccaggttta

SEQ ID NO: 615084 - DNA, 19 bp, Mus musculus
  siRNA target sequence for 1700064K09Rik (NM_175244.2,1562-1580).
cttcacccaggtttatgaa

SEQ ID NO: 615085 - DNA, 19 bp, Mus musculus
  siRNA target sequence for 1700064K09Rik (NM_175244.2,1590-1608).
ccttctgacaagtatgaga

SEQ ID NO: 615086 - DNA, 19 bp, Mus musculus
  siRNA target sequence for 1700064K09Rik (NM_175244.2,1648-1666).
ggtgggaatgtaaattcat

SEQ ID NO: 615087 - DNA, 19 bp, Mus musculus
  siRNA target sequence for 1700064K09Rik (NM_175244.2,1704-1722).
gacagcctggcagatatgt

SEQ ID NO: 615088 - DNA, 19 bp, Mus musculus
  siRNA target sequence for 1700064K09Rik (NM_175244.2,2034-2052).
gacaaggagacgtttgagt

SEQ ID NO: 615089 - DNA, 19 bp, Mus musculus
  siRNA target sequence for 1700064K09Rik (NM_175244.2,2042-2060).
gacgtttgagttcaagttt

SEQ ID NO: 615090 - DNA, 19 bp, Mus musculus
  siRNA target sequence for 1700064K09Rik (NM_175244.2,2128-2146).
cgggcatcgtggtggaata

SEQ ID NO: 615091 - DNA, 19 bp, Mus musculus
  siRNA target sequence for 1700064K09Rik (NM_175244.2,2129-2147).
gggcatcgtggtggaatat

SEQ ID NO: 615092 - DNA, 19 bp, Mus musculus
  siRNA target sequence for 1700064K09Rik (NM_175244.2,2369-2387).
cacacgcgtgcagtacttt

SEQ ID NO: 615093 - DNA, 19 bp, Mus musculus
  siRNA target sequence for 1700064K09Rik (NM_175244.2,2427-2445).
cgtttcctgcgctttgtca

SEQ ID NO: 615094 - DNA, 19 bp, Mus musculus
  siRNA target sequence for 1700064K09Rik (NM_175244.2,2462-2480).
ccctgctcggatctacatt

SEQ ID NO: 615095 - DNA, 19 bp, Mus musculus
  siRNA target sequence for 1700064K09Rik (NM_175244.2,2463-2481).
cctgctcggatctacattt

SEQ ID NO: 615096 - DNA, 19 bp, Mus musculus
  siRNA target sequence for 1700064K09Rik (NM_175244.2,2464-2482).
ctgctcggatctacattta

SEQ ID NO: 615097 - DNA, 19 bp, Mus musculus
  siRNA target sequence for 2510010F15Rik (NM_026454.2,444-462).
gcgggatgatggtctcaaa

SEQ ID NO: 615098 - DNA, 19 bp, Mus musculus
  siRNA target sequence for 2700084L22Rik (NM_026024.1,282-300).
gagcctcacgcctgaagaa

SEQ ID NO: 615099 - DNA, 19 bp, Mus musculus
  siRNA target sequence for 2700084L22Rik (NM_026024.1,369-387).
ctgatttgcgagctcaaat

SEQ ID NO: 615100 - DNA, 19 bp, Mus musculus
  siRNA target sequence for 2700084L22Rik (NM_026024.1,396-414).
gagctaatacaccttatga

SEQ ID NO: 615101 - DNA, 19 bp, Mus musculus
  siRNA target sequence for 2700084L22Rik (NM_026024.1,398-416).
gctaatacaccttatgaga

SEQ ID NO: 615102 - DNA, 19 bp, Mus musculus
  siRNA target sequence for 2700084L22Rik (NM_026024.1,399-417).
ctaatacaccttatgagaa

SEQ ID NO: 615103 - DNA, 19 bp, Mus musculus
  siRNA target sequence for 2700084L22Rik (NM_026024.1,447-465).
ctgagaggtacccatttga

SEQ ID NO: 615104 - DNA, 19 bp, Mus musculus
  siRNA target sequence for 2700084L22Rik (NM_026024.1,470-488).
ccacaggtccgatttctaa

SEQ ID NO: 615105 - DNA, 19 bp, Mus musculus
  siRNA target sequence for 2700084L22Rik (NM_026024.1,489-507).
ctccaatctatcatccaaa

SEQ ID NO: 615106 - DNA, 19 bp, Mus musculus
  siRNA target sequence for 2700084L22Rik (NM_026024.1,512-530).
gattctagtggaaggattt

SEQ ID NO: 615107 - DNA, 19 bp, Mus musculus
  siRNA target sequence for 2700084L22Rik (NM_026024.1,531-549).
gtctagatattctcaaatt

SEQ ID NO: 615108 - DNA, 19 bp, Mus musculus
  siRNA target sequence for 2700084L22Rik (NM_026024.1,567-585).
ggagaccatccctcaacat

SEQ ID NO: 615109 - DNA, 19 bp, Mus musculus
  siRNA target sequence for 2700084L22Rik (NM_026024.1,568-586).
gagaccatccctcaacatt

SEQ ID NO: 615110 - DNA, 19 bp, Mus musculus
  siRNA target sequence for 2700084L22Rik (NM_026024.1,578-596).
ctcaacattgccactgtat

SEQ ID NO: 615111 - DNA, 19 bp, Mus musculus
  siRNA target sequence for 2700084L22Rik (NM_026024.1,640-658).
cccactaatggctgacatt

SEQ ID NO: 615112 - DNA, 19 bp, Mus musculus
  siRNA target sequence for 2700084L22Rik (NM_026024.1,718-736).
ggctcatgcaagacagaaa

SEQ ID NO: 615113 - DNA, 19 bp, Mus musculus
  siRNA target sequence for 4930431E10Rik (NM_029438.2,348-366).
ccgtctgacagtattgtgt

SEQ ID NO: 615114 - DNA, 19 bp, Mus musculus
  siRNA target sequence for 4930431E10Rik (NM_029438.2,369-387).
caagaaccttgcaaagaaa

SEQ ID NO: 615115 - DNA, 19 bp, Mus musculus
  siRNA target sequence for 4930431E10Rik (NM_029438.2,495-513).
gcactatgacctgtatgtt

SEQ ID NO: 615116 - DNA, 19 bp, Mus musculus
  siRNA target sequence for 4930431E10Rik (NM_029438.2,514-532).
gggaaaacggactcgataa

SEQ ID NO: 615117 - DNA, 19 bp, Mus musculus
  siRNA target sequence for 4930431E10Rik (NM_029438.2,539-557).
gtgtgtggaaccacaagaa

SEQ ID NO: 615118 - DNA, 19 bp, Mus musculus
  siRNA target sequence for 4930431E10Rik (NM_029438.2,645-663).
gcgtttggatctatgcaaa

SEQ ID NO: 615119 - DNA, 19 bp, Mus musculus
  siRNA target sequence for 4930431E10Rik (NM_029438.2,686-704).
cagttcgtggccaaatagt

SEQ ID NO: 615120 - DNA, 19 bp, Mus musculus
  siRNA target sequence for 4930431E10Rik (NM_029438.2,695-713).
gccaaatagtggtcagttt

SEQ ID NO: 615121 - DNA, 19 bp, Mus musculus
  siRNA target sequence for 4930431E10Rik (NM_029438.2,696-714).
ccaaatagtggtcagttta

SEQ ID NO: 615122 - DNA, 19 bp, Mus musculus
  siRNA target sequence for 4930431E10Rik (NM_029438.2,774-792).
gaacgaaggaacagtgtat

SEQ ID NO: 615123 - DNA, 19 bp, Mus musculus
  siRNA target sequence for 4930431E10Rik (NM_029438.2,777-795).
cgaaggaacagtgtatgaa

SEQ ID NO: 615124 - DNA, 19 bp, Mus musculus
  siRNA target sequence for 4930431E10Rik (NM_029438.2,952-970).
gttcgagggcccttacaga

SEQ ID NO: 615125 - DNA, 19 bp, Mus musculus
  siRNA target sequence for 4930431E10Rik (NM_029438.2,1039-1057).
gtgcagggacaagtttact

SEQ ID NO: 615126 - DNA, 19 bp, Mus musculus
  siRNA target sequence for 4930431E10Rik (NM_029438.2,1042-1060).
cagggacaagtttactttt

SEQ ID NO: 615127 - DNA, 19 bp, Mus musculus
  siRNA target sequence for 4930431E10Rik (NM_029438.2,1100-1118).
ggatccccagagaccttaa

SEQ ID NO: 615128 - DNA, 19 bp, Mus musculus
  siRNA target sequence for 4930431E10Rik (NM_029438.2,1121-1139).
gtgtgaactgcgatgaact

SEQ ID NO: 615129 - DNA, 19 bp, Mus musculus
  siRNA target sequence for 4930431E10Rik (NM_029438.2,1177-1195).
gtgtcgggaagaatctatt

SEQ ID NO: 615130 - DNA, 19 bp, Mus musculus
  siRNA target sequence for 4930431E10Rik (NM_029438.2,1179-1197).
gtcgggaagaatctatttt

SEQ ID NO: 615131 - DNA, 19 bp, Mus musculus
  siRNA target sequence for 4930431E10Rik (NM_029438.2,1215-1233).
gacaacccagtttacagat

SEQ ID NO: 615132 - DNA, 19 bp, Mus musculus
  siRNA target sequence for 4930431E10Rik (NM_029438.2,1235-1253).
cacggcttcaccacatcat

SEQ ID NO: 615133 - DNA, 19 bp, Mus musculus
  siRNA target sequence for 4930431E10Rik (NM_029438.2,1237-1255).
cggcttcaccacatcatga

SEQ ID NO: 615134 - DNA, 19 bp, Mus musculus
  siRNA target sequence for 4930431E10Rik (NM_029438.2,1333-1351).
cctgcccagagatatgaga

SEQ ID NO: 615135 - DNA, 19 bp, Mus musculus
  siRNA target sequence for 4930431E10Rik (NM_029438.2,1343-1361).
gatatgagagggacttagt

SEQ ID NO: 615136 - DNA, 19 bp, Mus musculus
  siRNA target sequence for 4930431E10Rik (NM_029438.2,1412-1430).
ctggtcactgtcgaataga

SEQ ID NO: 615137 - DNA, 19 bp, Mus musculus
  siRNA target sequence for 4930431E10Rik (NM_029438.2,1558-1576).
cgggagtggctgtatttgt

SEQ ID NO: 615138 - DNA, 19 bp, Mus musculus
  siRNA target sequence for 4930431E10Rik (NM_029438.2,1561-1579).
gagtggctgtatttgttgt

SEQ ID NO: 615139 - DNA, 19 bp, Mus musculus
  siRNA target sequence for 4930431E10Rik (NM_029438.2,1615-1633).
cagtattccacggacaata

SEQ ID NO: 615140 - DNA, 19 bp, Mus musculus
  siRNA target sequence for 4930431E10Rik (NM_029438.2,1617-1635).
gtattccacggacaatatt

SEQ ID NO: 615141 - DNA, 19 bp, Mus musculus
  siRNA target sequence for 4930431E10Rik (NM_029438.2,1725-1743).
gttccacggacactacata

SEQ ID NO: 615142 - DNA, 19 bp, Mus musculus
  siRNA target sequence for 4930431E10Rik (NM_029438.2,1728-1746).
ccacggacactacataaat

SEQ ID NO: 615143 - DNA, 19 bp, Mus musculus
  siRNA target sequence for 4930431E10Rik (NM_029438.2,1842-1860).
ggtgtggattctagagaat

SEQ ID NO: 615144 - DNA, 19 bp, Mus musculus
  siRNA target sequence for 4930431E10Rik (NM_029438.2,1871-1889).
ctgtgttggatcatacctt

SEQ ID NO: 615145 - DNA, 19 bp, Mus musculus
  siRNA target sequence for 4930431E10Rik (NM_029438.2,1916-1934).
ggattctccagcatgaact

SEQ ID NO: 615146 - DNA, 19 bp, Mus musculus
  siRNA target sequence for 4930431E10Rik (NM_029438.2,2010-2028).
gtttatgagaggaatcgaa

SEQ ID NO: 615147 - DNA, 19 bp, Mus musculus
  siRNA target sequence for 4930431E10Rik (NM_029438.2,2052-2070).
ggggtttaacgaactcatt

SEQ ID NO: 615148 - DNA, 19 bp, Mus musculus
  siRNA target sequence for 4930431E10Rik (NM_029438.2,2268-2286).
gacaggatccacaagagtt

SEQ ID NO: 615149 - DNA, 19 bp, Mus musculus
  siRNA target sequence for 4930431E10Rik (NM_029438.2,2346-2364).
cctgatagacgccaataca

SEQ ID NO: 615150 - DNA, 19 bp, Mus musculus
  siRNA target sequence for 4930431E10Rik (NM_029438.2,2404-2422).
gacatcccaccctatgagt

SEQ ID NO: 615151 - DNA, 19 bp, Mus musculus
  siRNA target sequence for 5730410I19Rik (NM_025666.1,266-284).
gcccgcagggatttgtcta

SEQ ID NO: 615152 - DNA, 19 bp, Mus musculus
  siRNA target sequence for 5730410I19Rik (NM_025666.1,282-300).
ctagcttgcagttacgaat

SEQ ID NO: 615153 - DNA, 19 bp, Mus musculus
  siRNA target sequence for 5730410I19Rik (NM_025666.1,301-319).
gtcatggaagccataaact

SEQ ID NO: 615154 - DNA, 19 bp, Mus musculus
  siRNA target sequence for 5730410I19Rik (NM_025666.1,358-376).
gtggaaacagcaagtttaa

SEQ ID NO: 615155 - DNA, 19 bp, Mus musculus
  siRNA target sequence for 5730410I19Rik (NM_025666.1,360-378).
ggaaacagcaagtttaaaa

SEQ ID NO: 615156 - DNA, 19 bp, Mus musculus
  siRNA target sequence for 5730410I19Rik (NM_025666.1,389-407).
caaattatttcctgacaaa

SEQ ID NO: 615157 - DNA, 19 bp, Mus musculus
  siRNA target sequence for 5730410I19Rik (NM_025666.1,399-417).
cctgacaaatcaaaggtaa

SEQ ID NO: 615158 - DNA, 19 bp, Mus musculus
  siRNA target sequence for 5730410I19Rik (NM_025666.1,400-418).
ctgacaaatcaaaggtaaa

SEQ ID NO: 615159 - DNA, 19 bp, Mus musculus
  siRNA target sequence for 5730410I19Rik (NM_025666.1,414-432).
gtaaattcttgcaataagt

SEQ ID NO: 615160 - DNA, 19 bp, Mus musculus
  siRNA target sequence for 5730410I19Rik (NM_025666.1,434-452).
caatgacaacttttttgga

SEQ ID NO: 615161 - DNA, 19 bp, Mus musculus
  siRNA target sequence for 5730410I19Rik (NM_025666.1,450-468).
ggattatactgcgtttgta

SEQ ID NO: 615162 - DNA, 19 bp, Mus musculus
  siRNA target sequence for 5730410I19Rik (NM_025666.1,461-479).
cgtttgtaagagaccttat

SEQ ID NO: 615163 - DNA, 19 bp, Mus musculus
  siRNA target sequence for 5730410I19Rik (NM_025666.1,497-515).
ggttccagatgagatgata

SEQ ID NO: 615164 - DNA, 19 bp, Mus musculus
  siRNA target sequence for 5730410I19Rik (NM_025666.1,501-519).
ccagatgagatgatacagt

SEQ ID NO: 615165 - DNA, 19 bp, Mus musculus
  siRNA target sequence for 5730410I19Rik (NM_025666.1,610-628).
gtatgaggcgctgttcttt

SEQ ID NO: 615166 - DNA, 19 bp, Mus musculus
  siRNA target sequence for 5730410I19Rik (NM_025666.1,662-680).
caggatatctgctgaagat

SEQ ID NO: 615167 - DNA, 19 bp, Mus musculus
  siRNA target sequence for 5730410I19Rik (NM_025666.1,664-682).
ggatatctgctgaagatga

SEQ ID NO: 615168 - DNA, 19 bp, Mus musculus
  siRNA target sequence for 5730410I19Rik (NM_025666.1,665-683).
gatatctgctgaagatgat

SEQ ID NO: 615169 - DNA, 19 bp, Mus musculus
  siRNA target sequence for 5730410I19Rik (NM_025666.1,831-849).
ccctgcagcagctctagtt

SEQ ID NO: 615170 - DNA, 19 bp, Mus musculus
  siRNA target sequence for 5730410I19Rik (NM_025666.1,977-995).
gaactggcgcagcaaacta

SEQ ID NO: 615171 - DNA, 19 bp, Mus musculus
  siRNA target sequence for 5730410I19Rik (NM_025666.1,1000-1018).
cctgtcaagactgtatgaa

SEQ ID NO: 615172 - DNA, 19 bp, Mus musculus
  siRNA target sequence for 5730410I19Rik (NM_025666.1,1110-1128).
gatagaagggaccctttaa

SEQ ID NO: 615173 - DNA, 19 bp, Mus musculus
  siRNA target sequence for 5730410I19Rik (NM_025666.1,1114-1132).
gaagggaccctttaatgga

SEQ ID NO: 615174 - DNA, 19 bp, Mus musculus
  siRNA target sequence for 5730410I19Rik (NM_025666.1,1136-1154).
ccttagcagcatgaataga

SEQ ID NO: 615175 - DNA, 19 bp, Mus musculus
  siRNA target sequence for 5730410I19Rik (NM_025666.1,1280-1298).
gtttcaatcaaaaaagaga

SEQ ID NO: 615176 - DNA, 19 bp, Mus musculus
  siRNA target sequence for 5730410I19Rik (NM_025666.1,1302-1320).
cgagtggacgggttacagt

SEQ ID NO: 615177 - DNA, 19 bp, Mus musculus
  siRNA target sequence for 5730410I19Rik (NM_025666.1,1303-1321).
gagtggacgggttacagta

SEQ ID NO: 615178 - DNA, 19 bp, Mus musculus
  siRNA target sequence for 5730410I19Rik (NM_025666.1,1305-1323).
gtggacgggttacagtatt

SEQ ID NO: 615179 - DNA, 19 bp, Mus musculus
  siRNA target sequence for A130030D10 (NM_177783.2,457-475).
ctggacacgacttcaacat

SEQ ID NO: 615180 - DNA, 19 bp, Mus musculus
  siRNA target sequence for A130030D10 (NM_177783.2,459-477).
ggacacgacttcaacatgt

SEQ ID NO: 615181 - DNA, 19 bp, Mus musculus
  siRNA target sequence for A130030D10 (NM_177783.2,460-478).
gacacgacttcaacatgtt

SEQ ID NO: 615182 - DNA, 19 bp, Mus musculus
  siRNA target sequence for A130030D10 (NM_177783.2,508-526).
gcggggacagcaacgtaat

SEQ ID NO: 615183 - DNA, 19 bp, Mus musculus
  siRNA target sequence for A130030D10 (NM_177783.2,527-545).
gcgggagagcgggttttgt

SEQ ID NO: 615184 - DNA, 19 bp, Mus musculus
  siRNA target sequence for A130030D10 (NM_177783.2,528-546).
cgggagagcgggttttgta

SEQ ID NO: 615185 - DNA, 19 bp, Mus musculus
  siRNA target sequence for A130030D10 (NM_177783.2,530-548).
ggagagcgggttttgtaga

SEQ ID NO: 615186 - DNA, 19 bp, Mus musculus
  siRNA target sequence for A130030D10 (NM_177783.2,531-549).
gagagcgggttttgtagaa

SEQ ID NO: 615187 - DNA, 19 bp, Mus musculus
  siRNA target sequence for A130030D10 (NM_177783.2,536-554).
cgggttttgtagaagacat

SEQ ID NO: 615188 - DNA, 19 bp, Mus musculus
  siRNA target sequence for A130030D10 (NM_177783.2,618-636).
gttcttccaagattcattt

SEQ ID NO: 615189 - DNA, 19 bp, Mus musculus
  siRNA target sequence for A130030D10 (NM_177783.2,719-737).
gcttttggagcctcagatt

SEQ ID NO: 615190 - DNA, 19 bp, Mus musculus
  siRNA target sequence for A130030D10 (NM_177783.2,771-789).
gccatgaggtctgttctta

SEQ ID NO: 615191 - DNA, 19 bp, Mus musculus
  siRNA target sequence for A130030D10 (NM_177783.2,783-801).
gttcttactcaggtgttaa

SEQ ID NO: 615192 - DNA, 19 bp, Mus musculus
  siRNA target sequence for A130030D10 (NM_177783.2,786-804).
cttactcaggtgttaacca

SEQ ID NO: 615193 - DNA, 19 bp, Mus musculus
  siRNA target sequence for A130030D10 (NM_177783.2,869-887).
cgagaagtaccttatagct

SEQ ID NO: 615194 - DNA, 19 bp, Mus musculus
  siRNA target sequence for A130030D10 (NM_177783.2,870-888).
gagaagtaccttatagctt

SEQ ID NO: 615195 - DNA, 19 bp, Mus musculus
  siRNA target sequence for A130030D10 (NM_177783.2,907-925).
catatcccgaggataagct

SEQ ID NO: 615196 - DNA, 19 bp, Mus musculus
  siRNA target sequence for A130030D10 (NM_177783.2,1087-1105).
gcaccaaagatcaatccat

SEQ ID NO: 615197 - DNA, 19 bp, Mus musculus
  siRNA target sequence for A130030D10 (NM_177783.2,1090-1108).
ccaaagatcaatccataat

SEQ ID NO: 615198 - DNA, 19 bp, Mus musculus
  siRNA target sequence for A130030D10 (NM_177783.2,1098-1116).
caatccataatggatgttt

SEQ ID NO: 615199 - DNA, 19 bp, Mus musculus
  siRNA target sequence for A130030D10 (NM_177783.2,1137-1155).
gaagaactattattttgga

SEQ ID NO: 615200 - DNA, 19 bp, Mus musculus
  siRNA target sequence for A130030D10 (NM_177783.2,1143-1161).
ctattattttggacaataa

SEQ ID NO: 615201 - DNA, 19 bp, Mus musculus
  siRNA target sequence for A130030D10 (NM_177783.2,1173-1191).
ccacagaagatggtaactt

SEQ ID NO: 615202 - DNA, 19 bp, Mus musculus
  siRNA target sequence for A130030D10 (NM_177783.2,1185-1203).
gtaactttcttgctcaata

SEQ ID NO: 615203 - DNA, 19 bp, Mus musculus
  siRNA target sequence for A130030D10 (NM_177783.2,1210-1228).
cagatcaagagtataaggt

SEQ ID NO: 615204 - DNA, 19 bp, Mus musculus
  siRNA target sequence for A130030D10 (NM_177783.2,1288-1306).
gtcacgaatcagatacaat

SEQ ID NO: 615205 - DNA, 19 bp, Mus musculus
  siRNA target sequence for A130030D10 (NM_177783.2,1290-1308).
cacgaatcagatacaatgt

SEQ ID NO: 615206 - DNA, 19 bp, Mus musculus
  siRNA target sequence for A130030D10 (NM_177783.2,1299-1317).
gatacaatgtccaacagaa

SEQ ID NO: 615207 - DNA, 19 bp, Mus musculus
  siRNA target sequence for A130030D10 (NM_177783.2,1303-1321).
caatgtccaacagaattgt

SEQ ID NO: 615208 - DNA, 19 bp, Mus musculus
  siRNA target sequence for A130030D10 (NM_177783.2,1310-1328).
caacagaattgtgcatatt

SEQ ID NO: 615209 - DNA, 19 bp, Mus musculus
  siRNA target sequence for A130030D10 (NM_177783.2,1313-1331).
cagaattgtgcatattagt

SEQ ID NO: 615210 - DNA, 19 bp, Mus musculus
  siRNA target sequence for A130030D10 (NM_177783.2,1381-1399).
gtcagctcctggacatcat

SEQ ID NO: 615211 - DNA, 19 bp, Mus musculus
  siRNA target sequence for A130030D10 (NM_177783.2,1452-1470).
caaggtaagctccaattat

SEQ ID NO: 615212 - DNA, 19 bp, Mus musculus
  siRNA target sequence for A130030D10 (NM_177783.2,1464-1482).
caattatgccacttgctta

SEQ ID NO: 615213 - DNA, 19 bp, Mus musculus
  siRNA target sequence for A130030D10 (NM_177783.2,1497-1515).
gtgcaacaagttttaaaca

SEQ ID NO: 615214 - DNA, 19 bp, Mus musculus
  siRNA target sequence for A130030D10 (NM_177783.2,1506-1524).
gttttaaacacacttgtat

SEQ ID NO: 615215 - DNA, 19 bp, Mus musculus
  siRNA target sequence for A130030D10 (NM_177783.2,1521-1539).
gtatccttacaaataactt

SEQ ID NO: 615216 - DNA, 19 bp, Mus musculus
  siRNA target sequence for A630025O09Rik (NM_172637.1,150-168).
ggatccaagggccagattt

SEQ ID NO: 615217 - DNA, 19 bp, Mus musculus
  siRNA target sequence for A630025O09Rik (NM_172637.1,252-270).
cctaacatcaggaatgtga

SEQ ID NO: 615218 - DNA, 19 bp, Mus musculus
  siRNA target sequence for A630025O09Rik (NM_172637.1,269-287).
gagagacctaccaccaatt

SEQ ID NO: 615219 - DNA, 19 bp, Mus musculus
  siRNA target sequence for A630025O09Rik (NM_172637.1,280-298).
caccaatttgtcttgatgt

SEQ ID NO: 615220 - DNA, 19 bp, Mus musculus
  siRNA target sequence for A630025O09Rik (NM_172637.1,282-300).
ccaatttgtcttgatgtta

SEQ ID NO: 615221 - DNA, 19 bp, Mus musculus
  siRNA target sequence for A630025O09Rik (NM_172637.1,289-307).
gtcttgatgttagacaaaa

SEQ ID NO: 615222 - DNA, 19 bp, Mus musculus
  siRNA target sequence for A630025O09Rik (NM_172637.1,323-341).
ggaagcgttaccatctgaa

SEQ ID NO: 615223 - DNA, 19 bp, Mus musculus
  siRNA target sequence for A630025O09Rik (NM_172637.1,328-346).
cgttaccatctgaagtgaa

SEQ ID NO: 615224 - DNA, 19 bp, Mus musculus
  siRNA target sequence for A630025O09Rik (NM_172637.1,376-394).
ctagccagcccaaaactgt

SEQ ID NO: 615225 - DNA, 19 bp, Mus musculus
  siRNA target sequence for A630025O09Rik (NM_172637.1,379-397).
gccagcccaaaactgtaaa

SEQ ID NO: 615226 - DNA, 19 bp, Mus musculus
  siRNA target sequence for A630025O09Rik (NM_172637.1,380-398).
ccagcccaaaactgtaaaa

SEQ ID NO: 615227 - DNA, 19 bp, Mus musculus
  siRNA target sequence for A630025O09Rik (NM_172637.1,437-455).
gaattggaagacagtacat

SEQ ID NO: 615228 - DNA, 19 bp, Mus musculus
  siRNA target sequence for A630025O09Rik (NM_172637.1,442-460).
ggaagacagtacatgcttt

SEQ ID NO: 615229 - DNA, 19 bp, Mus musculus
  siRNA target sequence for A630025O09Rik (NM_172637.1,443-461).
gaagacagtacatgctttt

SEQ ID NO: 615230 - DNA, 19 bp, Mus musculus
  siRNA target sequence for A630025O09Rik (NM_172637.1,450-468).
gtacatgctttttatataa

SEQ ID NO: 615231 - DNA, 19 bp, Mus musculus
  siRNA target sequence for A630025O09Rik (NM_172637.1,513-531).
gatgccacggcctcattta

SEQ ID NO: 615232 - DNA, 19 bp, Mus musculus
  siRNA target sequence for A630025O09Rik (NM_172637.1,518-536).
cacggcctcatttaatact

SEQ ID NO: 615233 - DNA, 19 bp, Mus musculus
  siRNA target sequence for A630025O09Rik (NM_172637.1,520-538).
cggcctcatttaatactat

SEQ ID NO: 615234 - DNA, 19 bp, Mus musculus
  siRNA target sequence for A630025O09Rik (NM_172637.1,547-565).
ctgggcttaatgccaattt

SEQ ID NO: 615235 - DNA, 19 bp, Mus musculus
  siRNA target sequence for A630025O09Rik (NM_172637.1,550-568).
ggcttaatgccaatttggt

SEQ ID NO: 615236 - DNA, 19 bp, Mus musculus
  siRNA target sequence for A630025O09Rik (NM_172637.1,578-596).
gtttgatgccttacttaat

SEQ ID NO: 615237 - DNA, 19 bp, Mus musculus
  siRNA target sequence for A630025O09Rik (NM_172637.1,619-637).
cagtattgaagggaatcat

SEQ ID NO: 615238 - DNA, 19 bp, Mus musculus
  siRNA target sequence for A630025O09Rik (NM_172637.1,643-661).
gcttgttacaagaatggaa

SEQ ID NO: 615239 - DNA, 19 bp, Mus musculus
  siRNA target sequence for A630025O09Rik (NM_172637.1,644-662).
cttgttacaagaatggaaa

SEQ ID NO: 615240 - DNA, 19 bp, Mus musculus
  siRNA target sequence for A630025O09Rik (NM_172637.1,658-676).
ggaaaggtccacgaacaaa

SEQ ID NO: 615241 - DNA, 19 bp, Mus musculus
  siRNA target sequence for A630025O09Rik (NM_172637.1,659-677).
gaaaggtccacgaacaaaa

SEQ ID NO: 615242 - DNA, 19 bp, Mus musculus
  siRNA target sequence for A630025O09Rik (NM_172637.1,664-682).
gtccacgaacaaaagatga

SEQ ID NO: 615243 - DNA, 19 bp, Mus musculus
  siRNA target sequence for A630025O09Rik (NM_172637.1,678-696).
gatgatcttagagcatatt

SEQ ID NO: 615244 - DNA, 19 bp, Mus musculus
  siRNA target sequence for A630025O09Rik (NM_172637.1,704-722).
gttacagaatcctcaattt

SEQ ID NO: 615245 - DNA, 19 bp, Mus musculus
  siRNA target sequence for A630025O09Rik (NM_172637.1,714-732).
cctcaatttaatatcacat

SEQ ID NO: 615246 - DNA, 19 bp, Mus musculus
  siRNA target sequence for A630025O09Rik (NM_172637.1,730-748).
catctacatatgtcatcta

SEQ ID NO: 615247 - DNA, 19 bp, Mus musculus
  siRNA target sequence for A630025O09Rik (NM_172637.1,801-819).
ctagttcactggcttaaaa

SEQ ID NO: 615248 - DNA, 19 bp, Mus musculus
  siRNA target sequence for A630025O09Rik (NM_172637.1,807-825).
cactggcttaaaaaattat

SEQ ID NO: 615249 - DNA, 19 bp, Mus musculus
  siRNA target sequence for A630025O09Rik (NM_172637.1,909-927).
ccgcctctaacgaagtgta

SEQ ID NO: 615250 - DNA, 19 bp, Mus musculus
  siRNA target sequence for A630025O09Rik (NM_172637.1,999-1017).
ctcgttccttacactgatt

SEQ ID NO: 615251 - DNA, 19 bp, Mus musculus
  siRNA target sequence for A630025O09Rik (NM_172637.1,1005-1023).
ccttacactgatttctata

SEQ ID NO: 615252 - DNA, 19 bp, Mus musculus
  siRNA target sequence for A630025O09Rik (NM_172637.1,1027-1045).
ctaccctggatcacattga

SEQ ID NO: 615253 - DNA, 19 bp, Mus musculus
  siRNA target sequence for A630025O09Rik (NM_172637.1,1080-1098).
gggaactctcacaggtttt

SEQ ID NO: 615254 - DNA, 19 bp, Mus musculus
  siRNA target sequence for A630025O09Rik (NM_172637.1,1105-1123).
gtcagtacccattcgttat

SEQ ID NO: 615255 - DNA, 19 bp, Mus musculus
  siRNA target sequence for A630025O09Rik (NM_172637.1,1107-1125).
cagtacccattcgttattt

SEQ ID NO: 615256 - DNA, 19 bp, Mus musculus
  siRNA target sequence for A630025O09Rik (NM_172637.1,1109-1127).
gtacccattcgttatttct

SEQ ID NO: 615257 - DNA, 19 bp, Mus musculus
  siRNA target sequence for A630025O09Rik (NM_172637.1,1112-1130).
cccattcgttatttctata

SEQ ID NO: 615258 - DNA, 19 bp, Mus musculus
  siRNA target sequence for A630025O09Rik (NM_172637.1,1180-1198).
gcatcgcaaggcaaagtct

SEQ ID NO: 615259 - DNA, 19 bp, Mus musculus
  siRNA target sequence for A630025O09Rik (NM_172637.1,1190-1208).
gcaaagtctggtggataaa

SEQ ID NO: 615260 - DNA, 19 bp, Mus musculus
  siRNA target sequence for A630025O09Rik (NM_172637.1,1219-1237).
gacaaagacctgatatgaa

SEQ ID NO: 615261 - DNA, 19 bp, Mus musculus
  siRNA target sequence for A630025O09Rik (NM_172637.1,1277-1295).
ggttagcgactcacttgat

SEQ ID NO: 615262 - DNA, 19 bp, Mus musculus
  siRNA target sequence for A630025O09Rik (NM_172637.1,1282-1300).
gcgactcacttgatgagtt

SEQ ID NO: 615263 - DNA, 19 bp, Mus musculus
  siRNA target sequence for A630025O09Rik (NM_172637.1,1284-1302).
gactcacttgatgagttaa

SEQ ID NO: 615264 - DNA, 19 bp, Mus musculus
  siRNA target sequence for A630025O09Rik (NM_172637.1,1350-1368).
ggtgaagctggtttggata

SEQ ID NO: 615265 - DNA, 19 bp, Mus musculus
  siRNA target sequence for A630025O09Rik (NM_172637.1,1375-1393).
gcttgactaaagaatggtt

SEQ ID NO: 615266 - DNA, 19 bp, Mus musculus
  siRNA target sequence for A630025O09Rik (NM_172637.1,1386-1404).
gaatggttccttcttctaa

SEQ ID NO: 615267 - DNA, 19 bp, Mus musculus
  siRNA target sequence for A630025O09Rik (NM_172637.1,1412-1430).
gattttccatccagattat

SEQ ID NO: 615268 - DNA, 19 bp, Mus musculus
  siRNA target sequence for A630025O09Rik (NM_172637.1,1422-1440).
ccagattatggcatgttta

SEQ ID NO: 615269 - DNA, 19 bp, Mus musculus
  siRNA target sequence for A630025O09Rik (NM_172637.1,1441-1459).
cataccacaaggattcaca

SEQ ID NO: 615270 - DNA, 19 bp, Mus musculus
  siRNA target sequence for A630025O09Rik (NM_172637.1,1469-1487).
gtttagcagctttaaatgt

SEQ ID NO: 615271 - DNA, 19 bp, Mus musculus
  siRNA target sequence for A630025O09Rik (NM_172637.1,1527-1545).
ggactagctgtttataaca

SEQ ID NO: 615272 - DNA, 19 bp, Mus musculus
  siRNA target sequence for A630025O09Rik (NM_172637.1,1547-1565).
catcaccttggatattcgt

SEQ ID NO: 615273 - DNA, 19 bp, Mus musculus
  siRNA target sequence for A630025O09Rik (NM_172637.1,1570-1588).
ctccctgctgttacaaaaa

SEQ ID NO: 615274 - DNA, 19 bp, Mus musculus
  siRNA target sequence for A630025O09Rik (NM_172637.1,1632-1650).
gtaggcatctgcagtgtta

SEQ ID NO: 615275 - DNA, 19 bp, Mus musculus
  siRNA target sequence for A630025O09Rik (NM_172637.1,1637-1655).
catctgcagtgttaccatt

SEQ ID NO: 615276 - DNA, 19 bp, Mus musculus
  siRNA target sequence for A630025O09Rik (NM_172637.1,1666-1684).
gccaggttatgcctgaatt

SEQ ID NO: 615277 - DNA, 19 bp, Mus musculus
  siRNA target sequence for A630025O09Rik (NM_172637.1,1685-1703).
ggcccatggactaaaggaa

SEQ ID NO: 615278 - DNA, 19 bp, Mus musculus
  siRNA target sequence for A630025O09Rik (NM_172637.1,1773-1791).
ggagtaattaaatcctata

SEQ ID NO: 615279 - DNA, 19 bp, Mus musculus
  siRNA target sequence for A630025O09Rik (NM_172637.1,1774-1792).
gagtaattaaatcctataa

SEQ ID NO: 615280 - DNA, 19 bp, Mus musculus
  siRNA target sequence for A630025O09Rik (NM_172637.1,1776-1794).
gtaattaaatcctataact

SEQ ID NO: 615281 - DNA, 19 bp, Mus musculus
  siRNA target sequence for A630025O09Rik (NM_172637.1,1818-1836).
ccagttaccaatcagaata

SEQ ID NO: 615282 - DNA, 19 bp, Mus musculus
  siRNA target sequence for A630025O09Rik (NM_172637.1,1840-1858).
gagagtatgtacagcttta

SEQ ID NO: 615283 - DNA, 19 bp, Mus musculus
  siRNA target sequence for A630025O09Rik (NM_172637.1,1842-1860).
gagtatgtacagctttata

SEQ ID NO: 615284 - DNA, 19 bp, Mus musculus
  siRNA target sequence for A630025O09Rik (NM_172637.1,1865-1883).
cttcctgttgaacaaatct

SEQ ID NO: 615285 - DNA, 19 bp, Mus musculus
  siRNA target sequence for A630025O09Rik (NM_172637.1,1933-1951).
cttcaaatgccctaatgct

SEQ ID NO: 615286 - DNA, 19 bp, Mus musculus
  siRNA target sequence for A630025O09Rik (NM_172637.1,1990-2008).
gtcctgaactggatatgca

SEQ ID NO: 615287 - DNA, 19 bp, Mus musculus
  siRNA target sequence for A630025O09Rik (NM_172637.1,2050-2068).
cagacctgaccatacgata

SEQ ID NO: 615288 - DNA, 19 bp, Mus musculus
  siRNA target sequence for A630025O09Rik (NM_172637.1,2054-2072).
cctgaccatacgatacttt

SEQ ID NO: 615289 - DNA, 19 bp, Mus musculus
  siRNA target sequence for A630025O09Rik (NM_172637.1,2055-2073).
ctgaccatacgatactttt

SEQ ID NO: 615290 - DNA, 19 bp, Mus musculus
  siRNA target sequence for A630025O09Rik (NM_172637.1,2065-2083).
gatacttttgggatgttgt

SEQ ID NO: 615291 - DNA, 19 bp, Mus musculus
  siRNA target sequence for A630025O09Rik (NM_172637.1,2084-2102).
gcttggatttccacttgaa

SEQ ID NO: 615292 - DNA, 19 bp, Mus musculus
  siRNA target sequence for A630025O09Rik (NM_172637.1,2089-2107).
gatttccacttgaacttca

SEQ ID NO: 615293 - DNA, 19 bp, Mus musculus
  siRNA target sequence for A630025O09Rik (NM_172637.1,2114-2132).
gctgttacactttactaca

SEQ ID NO: 615294 - DNA, 19 bp, Mus musculus
  siRNA target sequence for A630025O09Rik (NM_172637.1,2158-2176).
ggatggctgatttgaattt

SEQ ID NO: 615295 - DNA, 19 bp, Mus musculus
  siRNA target sequence for A630025O09Rik (NM_172637.1,2215-2233).
ctgtggcacacacttgttt

SEQ ID NO: 615296 - DNA, 19 bp, Mus musculus
  siRNA target sequence for A630025O09Rik (NM_172637.1,2217-2235).
gtggcacacacttgtttca

SEQ ID NO: 615297 - DNA, 19 bp, Mus musculus
  siRNA target sequence for A630025O09Rik (NM_172637.1,2219-2237).
ggcacacacttgtttcaat

SEQ ID NO: 615298 - DNA, 19 bp, Mus musculus
  siRNA target sequence for AI853514 (NM_133907.1,362-380).
catcgcactcaggaagaaa

SEQ ID NO: 615299 - DNA, 19 bp, Mus musculus
  siRNA target sequence for AI853514 (NM_133907.1,419-437).
gcagtaataatccaatctt

SEQ ID NO: 615300 - DNA, 19 bp, Mus musculus
  siRNA target sequence for AI853514 (NM_133907.1,420-438).
cagtaataatccaatcttt

SEQ ID NO: 615301 - DNA, 19 bp, Mus musculus
  siRNA target sequence for AI853514 (NM_133907.1,422-440).
gtaataatccaatctttta

SEQ ID NO: 615302 - DNA, 19 bp, Mus musculus
  siRNA target sequence for AI853514 (NM_133907.1,455-473).
gacagaaaacaacaatact

SEQ ID NO: 615303 - DNA, 19 bp, Mus musculus
  siRNA target sequence for AI853514 (NM_133907.1,655-673).
gtttgtcaagcaattggat

SEQ ID NO: 615304 - DNA, 19 bp, Mus musculus
  siRNA target sequence for AI853514 (NM_133907.1,682-700).
gagactgacatgcttattt

SEQ ID NO: 615305 - DNA, 19 bp, Mus musculus
  siRNA target sequence for AI853514 (NM_133907.1,684-702).
gactgacatgcttatttca

SEQ ID NO: 615306 - DNA, 19 bp, Mus musculus
  siRNA target sequence for AI853514 (NM_133907.1,686-704).
ctgacatgcttatttcaaa

SEQ ID NO: 615307 - DNA, 19 bp, Mus musculus
  siRNA target sequence for AI853514 (NM_133907.1,726-744).
gttgcaggttgctgcaaaa

SEQ ID NO: 615308 - DNA, 19 bp, Mus musculus
  siRNA target sequence for AI853514 (NM_133907.1,736-754).
gctgcaaaactgtagtgat

SEQ ID NO: 615309 - DNA, 19 bp, Mus musculus
  siRNA target sequence for AI853514 (NM_133907.1,750-768).
gtgatgacagtctgaatgt

SEQ ID NO: 615310 - DNA, 19 bp, Mus musculus
  siRNA target sequence for AI853514 (NM_133907.1,782-800).
cgaatgcttgaggtgttta

SEQ ID NO: 615311 - DNA, 19 bp, Mus musculus
  siRNA target sequence for AI853514 (NM_133907.1,821-839).
cctgttttacaagattcta

SEQ ID NO: 615312 - DNA, 19 bp, Mus musculus
  siRNA target sequence for AI853514 (NM_133907.1,847-865).
ggtgtcagtgattgaacaa

SEQ ID NO: 615313 - DNA, 19 bp, Mus musculus
  siRNA target sequence for AI853514 (NM_133907.1,852-870).
cagtgattgaacaaatttt

SEQ ID NO: 615314 - DNA, 19 bp, Mus musculus
  siRNA target sequence for AI853514 (NM_133907.1,881-899).
gttcacagtggatattata

SEQ ID NO: 615315 - DNA, 19 bp, Mus musculus
  siRNA target sequence for AI853514 (NM_133907.1,886-904).
cagtggatattatagatct

SEQ ID NO: 615316 - DNA, 19 bp, Mus musculus
  siRNA target sequence for AI853514 (NM_133907.1,900-918).
gatctctctacttgttgat

SEQ ID NO: 615317 - DNA, 19 bp, Mus musculus
  siRNA target sequence for AI853514 (NM_133907.1,924-942).
gcaagcttccatcaagtat

SEQ ID NO: 615318 - DNA, 19 bp, Mus musculus
  siRNA target sequence for AI853514 (NM_133907.1,925-943).
caagcttccatcaagtatt

SEQ ID NO: 615319 - DNA, 19 bp, Mus musculus
  siRNA target sequence for AI853514 (NM_133907.1,932-950).
ccatcaagtattgaatatt

SEQ ID NO: 615320 - DNA, 19 bp, Mus musculus
  siRNA target sequence for AI853514 (NM_133907.1,936-954).
caagtattgaatattctga

SEQ ID NO: 615321 - DNA, 19 bp, Mus musculus
  siRNA target sequence for AI853514 (NM_133907.1,962-980).
cgagttcctatagcaaaaa

SEQ ID NO: 615322 - DNA, 19 bp, Mus musculus
  siRNA target sequence for AI853514 (NM_133907.1,985-1003).
gctggagaatgtcctaaaa

SEQ ID NO: 615323 - DNA, 19 bp, Mus musculus
  siRNA target sequence for AI853514 (NM_133907.1,1004-1022).
ccattgcactttacgtata

SEQ ID NO: 615324 - DNA, 19 bp, Mus musculus
  siRNA target sequence for AI853514 (NM_133907.1,1085-1103).
gcaccttttaccgatcaaa

SEQ ID NO: 615325 - DNA, 19 bp, Mus musculus
  siRNA target sequence for AI853514 (NM_133907.1,1086-1104).
caccttttaccgatcaaat

SEQ ID NO: 615326 - DNA, 19 bp, Mus musculus
  siRNA target sequence for AI853514 (NM_133907.1,1088-1106).
ccttttaccgatcaaattt

SEQ ID NO: 615327 - DNA, 19 bp, Mus musculus
  siRNA target sequence for AI853514 (NM_133907.1,1089-1107).
cttttaccgatcaaatttt

SEQ ID NO: 615328 - DNA, 19 bp, Mus musculus
  siRNA target sequence for AI853514 (NM_133907.1,1151-1169).
ccttatgagccctttctca

SEQ ID NO: 615329 - DNA, 19 bp, Mus musculus
  siRNA target sequence for AI853514 (NM_133907.1,1184-1202).
cttgagagtcaaagttcaa

SEQ ID NO: 615330 - DNA, 19 bp, Mus musculus
  siRNA target sequence for AI853514 (NM_133907.1,1245-1263).
ctgttggcgagaattattt

SEQ ID NO: 615331 - DNA, 19 bp, Mus musculus
  siRNA target sequence for AI853514 (NM_133907.1,1371-1389).
gtgactctgaggacgataa

SEQ ID NO: 615332 - DNA, 19 bp, Mus musculus
  siRNA target sequence for AI853514 (NM_133907.1,1428-1446).
gggtgtcagccccatatat

SEQ ID NO: 615333 - DNA, 19 bp, Mus musculus
  siRNA target sequence for AI853514 (NM_133907.1,1429-1447).
ggtgtcagccccatatatt

SEQ ID NO: 615334 - DNA, 19 bp, Mus musculus
  siRNA target sequence for AI853514 (NM_133907.1,1430-1448).
gtgtcagccccatatatta

SEQ ID NO: 615335 - DNA, 19 bp, Mus musculus
  siRNA target sequence for AI853514 (NM_133907.1,1434-1452).
cagccccatatattactga

SEQ ID NO: 615336 - DNA, 19 bp, Mus musculus
  siRNA target sequence for AI853514 (NM_133907.1,1551-1569).
cttctatctgccacacatt

SEQ ID NO: 615337 - DNA, 19 bp, Mus musculus
  siRNA target sequence for AI853514 (NM_133907.1,1554-1572).
ctatctgccacacattgat

SEQ ID NO: 615338 - DNA, 19 bp, Mus musculus
  siRNA target sequence for AI853514 (NM_133907.1,1612-1630).
ctacagtttagccttcaat

SEQ ID NO: 615339 - DNA, 19 bp, Mus musculus
  siRNA target sequence for AI853514 (NM_133907.1,1622-1640).
gccttcaatgccaggtttt

SEQ ID NO: 615340 - DNA, 19 bp, Mus musculus
  siRNA target sequence for AI853514 (NM_133907.1,1703-1721).
ccattgcttcagttgatat

SEQ ID NO: 615341 - DNA, 19 bp, Mus musculus
  siRNA target sequence for AI853514 (NM_133907.1,1725-1743).
ggggttcgcccatgtcttt

SEQ ID NO: 615342 - DNA, 19 bp, Mus musculus
  siRNA target sequence for AI853514 (NM_133907.1,1726-1744).
gggttcgcccatgtctttt

SEQ ID NO: 615343 - DNA, 19 bp, Mus musculus
  siRNA target sequence for AI853514 (NM_133907.1,1728-1746).
gttcgcccatgtcttttga

SEQ ID NO: 615344 - DNA, 19 bp, Mus musculus
  siRNA target sequence for AI853514 (NM_133907.1,1757-1775).
cgaatcatcccactctttt

SEQ ID NO: 615345 - DNA, 19 bp, Mus musculus
  siRNA target sequence for AI853514 (NM_133907.1,1758-1776).
gaatcatcccactctttta

SEQ ID NO: 615346 - DNA, 19 bp, Mus musculus
  siRNA target sequence for AI853514 (NM_133907.1,1807-1825).
gatctccatacatgacaat

SEQ ID NO: 615347 - DNA, 19 bp, Mus musculus
  siRNA target sequence for AI853514 (NM_133907.1,1810-1828).
ctccatacatgacaatgaa

SEQ ID NO: 615348 - DNA, 19 bp, Mus musculus
  siRNA target sequence for AI853514 (NM_133907.1,1853-1871).
gtaggtcagagacaatcat

SEQ ID NO: 615349 - DNA, 19 bp, Mus musculus
  siRNA target sequence for AI853514 (NM_133907.1,1938-1956).
ggatcatcaagctagcata

SEQ ID NO: 615350 - DNA, 19 bp, Mus musculus
  siRNA target sequence for AI853514 (NM_133907.1,1949-1967).
ctagcatacccggaaacaa

SEQ ID NO: 615351 - DNA, 19 bp, Mus musculus
  siRNA target sequence for AI853514 (NM_133907.1,1971-1989).
cagaagttcgggaagaata

SEQ ID NO: 615352 - DNA, 19 bp, Mus musculus
  siRNA target sequence for AI853514 (NM_133907.1,1976-1994).
gttcgggaagaatatgtca

SEQ ID NO: 615353 - DNA, 19 bp, Mus musculus
  siRNA target sequence for AI853514 (NM_133907.1,2072-2090).
cagctgttcaaggttatca

SEQ ID NO: 615354 - DNA, 19 bp, Mus musculus
  siRNA target sequence for AI853514 (NM_133907.1,2149-2167).
ccactggctgtcagaacaa

SEQ ID NO: 615355 - DNA, 19 bp, Mus musculus
  siRNA target sequence for AI853514 (NM_133907.1,2365-2383).
gcgagtgaagatctttcaa

SEQ ID NO: 615356 - DNA, 19 bp, Mus musculus
  siRNA target sequence for AI853514 (NM_133907.1,2366-2384).
cgagtgaagatctttcaaa

SEQ ID NO: 615357 - DNA, 19 bp, Mus musculus
  siRNA target sequence for AI853514 (NM_133907.1,2385-2403).
ggttgatttatgctgataa

SEQ ID NO: 615358 - DNA, 19 bp, Mus musculus
  siRNA target sequence for AI853514 (NM_133907.1,2424-2442).
gtccatttctggatggaat

SEQ ID NO: 615359 - DNA, 19 bp, Mus musculus
  siRNA target sequence for AI853514 (NM_133907.1,2434-2452).
ggatggaatcaatgttact

SEQ ID NO: 615360 - DNA, 19 bp, Mus musculus
  siRNA target sequence for AI853514 (NM_133907.1,2435-2453).
gatggaatcaatgttacta

SEQ ID NO: 615361 - DNA, 19 bp, Mus musculus
  siRNA target sequence for AI853514 (NM_133907.1,2451-2469).
ctataaggagaaattatat

SEQ ID NO: 615362 - DNA, 19 bp, Mus musculus
  siRNA target sequence for AI853514 (NM_133907.1,2488-2506).
caaactttctccagaaaat

SEQ ID NO: 615363 - DNA, 19 bp, Mus musculus
  siRNA target sequence for AI853514 (NM_133907.1,2639-2657).
cagggcttctttaagacta

SEQ ID NO: 615364 - DNA, 19 bp, Mus musculus
  siRNA target sequence for AI853514 (NM_133907.1,2695-2713).
gatgcttgtgggagattct

SEQ ID NO: 615365 - DNA, 19 bp, Mus musculus
  siRNA target sequence for AI853514 (NM_133907.1,2712-2730).
ctttcgcaaggcattacta

SEQ ID NO: 615366 - DNA, 19 bp, Mus musculus
  siRNA target sequence for AI853514 (NM_133907.1,2746-2764).
gcttggaaaggctctgtat

SEQ ID NO: 615367 - DNA, 19 bp, Mus musculus
  siRNA target sequence for AI853514 (NM_133907.1,2964-2982).
cccaggtggttgaactaaa

SEQ ID NO: 615368 - DNA, 19 bp, Mus musculus
  siRNA target sequence for AI853514 (NM_133907.1,2965-2983).
ccaggtggttgaactaaaa

SEQ ID NO: 615369 - DNA, 19 bp, Mus musculus
  siRNA target sequence for AI853514 (NM_133907.1,3072-3090).
gaccgcattgcctagcttt

SEQ ID NO: 615370 - DNA, 19 bp, Mus musculus
  siRNA target sequence for AI853514 (NM_133907.1,3148-3166).
ggaaattcaggtattaatt

SEQ ID NO: 615371 - DNA, 19 bp, Mus musculus
  siRNA target sequence for AI853514 (NM_133907.1,3191-3209).
ctggaggacctaaaatcct

SEQ ID NO: 615372 - DNA, 19 bp, Mus musculus
  siRNA target sequence for AI853514 (NM_133907.1,3194-3212).
gaggacctaaaatccttta

SEQ ID NO: 615373 - DNA, 19 bp, Mus musculus
  siRNA target sequence for AI853514 (NM_133907.1,3217-3235).
ctattcagggggctattct

SEQ ID NO: 615374 - DNA, 19 bp, Mus musculus
  siRNA target sequence for AI853514 (NM_133907.1,3236-3254).
gccgatcatcctgtcatta

SEQ ID NO: 615375 - DNA, 19 bp, Mus musculus
  siRNA target sequence for AI853514 (NM_133907.1,3237-3255).
ccgatcatcctgtcattaa

SEQ ID NO: 615376 - DNA, 19 bp, Mus musculus
  siRNA target sequence for AI853514 (NM_133907.1,3238-3256).
cgatcatcctgtcattaaa

SEQ ID NO: 615377 - DNA, 19 bp, Mus musculus
  siRNA target sequence for AI853514 (NM_133907.1,3259-3277).
cttttggagagttgtagaa

SEQ ID NO: 615378 - DNA, 19 bp, Mus musculus
  siRNA target sequence for AI853514 (NM_133907.1,3307-3325).
gctcaagtttgtaacaagt

SEQ ID NO: 615379 - DNA, 19 bp, Mus musculus
  siRNA target sequence for AI853514 (NM_133907.1,3336-3354).
cccctctcctgggtttcaa

SEQ ID NO: 615380 - DNA, 19 bp, Mus musculus
  siRNA target sequence for AI853514 (NM_133907.1,3359-3377).
ctataccctgcgttttgca

SEQ ID NO: 615381 - DNA, 19 bp, Mus musculus
  siRNA target sequence for AI853514 (NM_133907.1,3365-3383).
cctgcgttttgcattcaca

SEQ ID NO: 615382 - DNA, 19 bp, Mus musculus
  siRNA target sequence for AI853514 (NM_133907.1,3366-3384).
ctgcgttttgcattcacaa

SEQ ID NO: 615383 - DNA, 19 bp, Mus musculus
  siRNA target sequence for AI853514 (NM_133907.1,3482-3500).
ctgctgtatgccattgagt

SEQ ID NO: 615384 - DNA, 19 bp, Mus musculus
  siRNA target sequence for AV273951 (NM_153130.1,30-48).
ccgacgccggtgcaaagaa

SEQ ID NO: 615385 - DNA, 19 bp, Mus musculus
  siRNA target sequence for AV273951 (NM_153130.1,49-67).
cccctccggtacagctata

SEQ ID NO: 615386 - DNA, 19 bp, Mus musculus
  siRNA target sequence for AV273951 (NM_153130.1,50-68).
ccctccggtacagctataa

SEQ ID NO: 615387 - DNA, 19 bp, Mus musculus
  siRNA target sequence for AV273951 (NM_153130.1,62-80).
gctataacccagaccaatt

SEQ ID NO: 615388 - DNA, 19 bp, Mus musculus
  siRNA target sequence for AV273951 (NM_153130.1,76-94).
caattccacaacatagaca

SEQ ID NO: 615389 - DNA, 19 bp, Mus musculus
  siRNA target sequence for AV273951 (NM_153130.1,183-201).
ggtcagcagttcctactat

SEQ ID NO: 615390 - DNA, 19 bp, Mus musculus
  siRNA target sequence for AV273951 (NM_153130.1,184-202).
gtcagcagttcctactatt

SEQ ID NO: 615391 - DNA, 19 bp, Mus musculus
  siRNA target sequence for AV273951 (NM_153130.1,188-206).
gcagttcctactattcgat

SEQ ID NO: 615392 - DNA, 19 bp, Mus musculus
  siRNA target sequence for AV273951 (NM_153130.1,189-207).
cagttcctactattcgata

SEQ ID NO: 615393 - DNA, 19 bp, Mus musculus
  siRNA target sequence for AV273951 (NM_153130.1,209-227).
ggcactcccaggatttggt

SEQ ID NO: 615394 - DNA, 19 bp, Mus musculus
  siRNA target sequence for AV273951 (NM_153130.1,269-287).
ggattggcatgtaccttat

SEQ ID NO: 615395 - DNA, 19 bp, Mus musculus
  siRNA target sequence for AV273951 (NM_153130.1,270-288).
gattggcatgtaccttatt

SEQ ID NO: 615396 - DNA, 19 bp, Mus musculus
  siRNA target sequence for AV273951 (NM_153130.1,289-307).
ggtgaagtctcatctgaaa

SEQ ID NO: 615397 - DNA, 19 bp, Mus musculus
  siRNA target sequence for AV273951 (NM_153130.1,292-310).
gaagtctcatctgaaaact

SEQ ID NO: 615398 - DNA, 19 bp, Mus musculus
  siRNA target sequence for AV273951 (NM_153130.1,394-412).
gaatctgaaactaagatct

SEQ ID NO: 615399 - DNA, 19 bp, Mus musculus
  siRNA target sequence for AV273951 (NM_153130.1,404-422).
ctaagatctgcttcaaata

SEQ ID NO: 615400 - DNA, 19 bp, Mus musculus
  siRNA target sequence for AV273951 (NM_153130.1,487-505).
gcccctatttttaaaggta

SEQ ID NO: 615401 - DNA, 19 bp, Mus musculus
  siRNA target sequence for AV273951 (NM_153130.1,612-630).
cgacccttatctgaagatt

SEQ ID NO: 615402 - DNA, 19 bp, Mus musculus
  siRNA target sequence for AV273951 (NM_153130.1,730-748).
caggcagagcatttcagtt

SEQ ID NO: 615403 - DNA, 19 bp, Mus musculus
  siRNA target sequence for AV273951 (NM_153130.1,761-779).
caaccgatgtgctggaaat

SEQ ID NO: 615404 - DNA, 19 bp, Mus musculus
  siRNA target sequence for AV273951 (NM_153130.1,764-782).
ccgatgtgctggaaattga

SEQ ID NO: 615405 - DNA, 19 bp, Mus musculus
  siRNA target sequence for AV273951 (NM_153130.1,943-961).
ctgcaattccgatttgaga

SEQ ID NO: 615406 - DNA, 19 bp, Mus musculus
  siRNA target sequence for AV273951 (NM_153130.1,1035-1053).
ggacagcatcatgaatagt

SEQ ID NO: 615407 - DNA, 19 bp, Mus musculus
  siRNA target sequence for AV273951 (NM_153130.1,1084-1102).
ggtgatgctacagaattct

SEQ ID NO: 615408 - DNA, 19 bp, Mus musculus
  siRNA target sequence for AV273951 (NM_153130.1,1602-1620).
gaccccgagaacccattat

SEQ ID NO: 615409 - DNA, 19 bp, Mus musculus
  siRNA target sequence for AV273951 (NM_153130.1,1604-1622).
ccccgagaacccattatat

SEQ ID NO: 615410 - DNA, 19 bp, Mus musculus
  siRNA target sequence for AV273951 (NM_153130.1,1740-1758).
cagcgaggtggacacaata

SEQ ID NO: 615411 - DNA, 19 bp, Mus musculus
  siRNA target sequence for AV273951 (NM_153130.1,1743-1761).
cgaggtggacacaatagct

SEQ ID NO: 615412 - DNA, 19 bp, Mus musculus
  siRNA target sequence for AV273951 (NM_153130.1,1837-1855).
ggacatttctccagtttat

SEQ ID NO: 615413 - DNA, 19 bp, Mus musculus
  siRNA target sequence for AV273951 (NM_153130.1,1971-1989).
ctgcagcccgtcttgctat

SEQ ID NO: 615414 - DNA, 19 bp, Mus musculus
  siRNA target sequence for AV273951 (NM_153130.1,2039-2057).
gctcctgctacaatggtaa

SEQ ID NO: 615415 - DNA, 19 bp, Mus musculus
  siRNA target sequence for AV273951 (NM_153130.1,2200-2218).
ctagatcccgagtctacaa

SEQ ID NO: 615416 - DNA, 19 bp, Mus musculus
  siRNA target sequence for AV273951 (NM_153130.1,2298-2316).
catggcaggtcctagcaat

SEQ ID NO: 615417 - DNA, 19 bp, Mus musculus
  siRNA target sequence for AV273951 (NM_153130.1,2302-2320).
gcaggtcctagcaatagga

SEQ ID NO: 615418 - DNA, 19 bp, Mus musculus
  siRNA target sequence for AV273951 (NM_153130.1,2376-2394).
cttgaggcctgaacatcat

SEQ ID NO: 615419 - DNA, 19 bp, Mus musculus
  siRNA target sequence for AV273951 (NM_153130.1,2450-2468).
gccatggacgggtctttta

SEQ ID NO: 615420 - DNA, 19 bp, Mus musculus
  siRNA target sequence for AV273951 (NM_153130.1,2451-2469).
ccatggacgggtcttttat

SEQ ID NO: 615421 - DNA, 19 bp, Mus musculus
  siRNA target sequence for AV273951 (NM_153130.1,2516-2534).
cccctacccccgatggaat

SEQ ID NO: 615422 - DNA, 19 bp, Mus musculus
  siRNA target sequence for AV273951 (NM_153130.1,2519-2537).
ctacccccgatggaatgat

SEQ ID NO: 615423 - DNA, 19 bp, Mus musculus
  siRNA target sequence for AV273951 (NM_153130.1,2524-2542).
cccgatggaatgatcagat

SEQ ID NO: 615424 - DNA, 19 bp, Mus musculus
  siRNA target sequence for AV273951 (NM_153130.1,2569-2587).
cttaacagaaggtatcaaa

SEQ ID NO: 615425 - DNA, 19 bp, Mus musculus
  siRNA target sequence for AV273951 (NM_153130.1,2689-2707).
gactcggaagcagaatcat

SEQ ID NO: 615426 - DNA, 19 bp, Mus musculus
  siRNA target sequence for AV273951 (NM_153130.1,2708-2726).
cccaatcaagcttagatct

SEQ ID NO: 615427 - DNA, 19 bp, Mus musculus
  siRNA target sequence for AV273951 (NM_153130.1,2730-2748).
gagagaagggtcactttct

SEQ ID NO: 615428 - DNA, 19 bp, Mus musculus
  siRNA target sequence for AV273951 (NM_153130.1,2786-2804).
ctccagcggtcaagttcat

SEQ ID NO: 615429 - DNA, 19 bp, Mus musculus
  siRNA target sequence for AV273951 (NM_153130.1,2788-2806).
ccagcggtcaagttcatca

SEQ ID NO: 615430 - DNA, 19 bp, Mus musculus
  siRNA target sequence for AV273951 (NM_153130.1,2827-2845).
gtgttgcatgccaattata

SEQ ID NO: 615431 - DNA, 19 bp, Mus musculus
  siRNA target sequence for AV273951 (NM_153130.1,2829-2847).
gttgcatgccaattatagt

SEQ ID NO: 615432 - DNA, 19 bp, Mus musculus
  siRNA target sequence for AV273951 (NM_153130.1,2848-2866).
gcctacagggttttcacaa

SEQ ID NO: 615433 - DNA, 19 bp, Mus musculus
  siRNA target sequence for AV273951 (NM_153130.1,2941-2959).
cgggacctggtgaatttca

SEQ ID NO: 615434 - DNA, 19 bp, Mus musculus
  siRNA target sequence for AV273951 (NM_153130.1,2942-2960).
gggacctggtgaatttcat

SEQ ID NO: 615435 - DNA, 19 bp, Mus musculus
  siRNA target sequence for AV273951 (NM_153130.1,2999-3017).
gttgggagatcaaaactga

SEQ ID NO: 615436 - DNA, 19 bp, Mus musculus
  siRNA target sequence for AV273951 (NM_153130.1,3078-3096).
ccgaatccctcttcagaat

SEQ ID NO: 615437 - DNA, 19 bp, Mus musculus
  siRNA target sequence for AV273951 (NM_153130.1,3098-3116).
gccgtcttcccaatcatct

SEQ ID NO: 615438 - DNA, 19 bp, Mus musculus
  siRNA target sequence for AV273951 (NM_153130.1,3100-3118).
cgtcttcccaatcatctaa

SEQ ID NO: 615439 - DNA, 19 bp, Mus musculus
  siRNA target sequence for AV273951 (NM_153130.1,3136-3154).
cagaggctccggagttaca

SEQ ID NO: 615440 - DNA, 19 bp, Mus musculus
  siRNA target sequence for AV273951 (NM_153130.1,3219-3237).
cagcctaatagctgctatt

SEQ ID NO: 615441 - DNA, 19 bp, Mus musculus
  siRNA target sequence for AV273951 (NM_153130.1,3222-3240).
cctaatagctgctattcga

SEQ ID NO: 615442 - DNA, 19 bp, Mus musculus
  siRNA target sequence for AV273951 (NM_153130.1,3223-3241).
ctaatagctgctattcgaa

SEQ ID NO: 615443 - DNA, 19 bp, Mus musculus
  siRNA target sequence for AV273951 (NM_153130.1,3261-3279).
cttgccactggcatacaat

SEQ ID NO: 615444 - DNA, 19 bp, Mus musculus
  siRNA target sequence for AV273951 (NM_153130.1,3282-3300).
caagattgtggcatttctt

SEQ ID NO: 615445 - DNA, 19 bp, Mus musculus
  siRNA target sequence for AV273951 (NM_153130.1,3298-3316).
cttcgccagccaaacattt

SEQ ID NO: 615446 - DNA, 19 bp, Mus musculus
  siRNA target sequence for AV273951 (NM_153130.1,3303-3321).
ccagccaaacatttttgaa

SEQ ID NO: 615447 - DNA, 19 bp, Mus musculus
  siRNA target sequence for AV273951 (NM_153130.1,3304-3322).
cagccaaacatttttgaaa

SEQ ID NO: 615448 - DNA, 19 bp, Mus musculus
  siRNA target sequence for AV273951 (NM_153130.1,3362-3380).
cactcagggagaaaatcca

SEQ ID NO: 615449 - DNA, 19 bp, Mus musculus
  siRNA target sequence for AV273951 (NM_153130.1,3364-3382).
ctcagggagaaaatccatt

SEQ ID NO: 615450 - DNA, 19 bp, Mus musculus
  siRNA target sequence for AV273951 (NM_153130.1,3368-3386).
gggagaaaatccattatat

SEQ ID NO: 615451 - DNA, 19 bp, Mus musculus
  siRNA target sequence for AV273951 (NM_153130.1,3397-3415).
ggcaatcatgggcttgata

SEQ ID NO: 615452 - DNA, 19 bp, Mus musculus
  siRNA target sequence for AV273951 (NM_153130.1,3398-3416).
gcaatcatgggcttgataa

SEQ ID NO: 615453 - DNA, 19 bp, Mus musculus
  siRNA target sequence for AV273951 (NM_153130.1,3403-3421).
catgggcttgataaattgt

SEQ ID NO: 615454 - DNA, 19 bp, Mus musculus
  siRNA target sequence for AV273951 (NM_153130.1,3420-3438).
gtcctgtgatgcagatcta

SEQ ID NO: 615455 - DNA, 19 bp, Mus musculus
  siRNA target sequence for AV273951 (NM_153130.1,3431-3449).
cagatctagtcattttgct

SEQ ID NO: 615456 - DNA, 19 bp, Mus musculus
  siRNA target sequence for AV273951 (NM_153130.1,3596-3614).
cataccgaagggattttga

SEQ ID NO: 615457 - DNA, 19 bp, Mus musculus
  siRNA target sequence for AV273951 (NM_153130.1,3616-3634).
gctaagctccgcaatttct

SEQ ID NO: 615458 - DNA, 19 bp, Mus musculus
  siRNA target sequence for AV273951 (NM_153130.1,3617-3635).
ctaagctccgcaatttcta

SEQ ID NO: 615459 - DNA, 19 bp, Mus musculus
  siRNA target sequence for AV273951 (NM_153130.1,3711-3729).
ggaggggaccttcaatcaa

SEQ ID NO: 615460 - DNA, 19 bp, Mus musculus
  siRNA target sequence for AV273951 (NM_153130.1,3716-3734).
ggaccttcaatcaagtgat

SEQ ID NO: 615461 - DNA, 19 bp, Mus musculus
  siRNA target sequence for AV273951 (NM_153130.1,3812-3830).
gcccttctcgagagttctt

SEQ ID NO: 615462 - DNA, 19 bp, Mus musculus
  siRNA target sequence for AV273951 (NM_153130.1,3849-3867).
gctcttcaacccttactat

SEQ ID NO: 615463 - DNA, 19 bp, Mus musculus
  siRNA target sequence for AV273951 (NM_153130.1,3877-3895).
gagtattctgcaaatgaca

SEQ ID NO: 615464 - DNA, 19 bp, Mus musculus
  siRNA target sequence for AV273951 (NM_153130.1,3915-3933).
ccccatgtcagcatttgta

SEQ ID NO: 615465 - DNA, 19 bp, Mus musculus
  siRNA target sequence for AV273951 (NM_153130.1,3918-3936).
catgtcagcatttgtagaa

SEQ ID NO: 615466 - DNA, 19 bp, Mus musculus
  siRNA target sequence for AV273951 (NM_153130.1,3923-3941).
cagcatttgtagaaaacta

SEQ ID NO: 615467 - DNA, 19 bp, Mus musculus
  siRNA target sequence for AV273951 (NM_153130.1,3931-3949).
gtagaaaactatcttgaat

SEQ ID NO: 615468 - DNA, 19 bp, Mus musculus
  siRNA target sequence for AV273951 (NM_153130.1,3943-3961).
cttgaatggtttagattca

SEQ ID NO: 615469 - DNA, 19 bp, Mus musculus
  siRNA target sequence for AV273951 (NM_153130.1,4057-4075).
gatctgagtgacctagaat

SEQ ID NO: 615470 - DNA, 19 bp, Mus musculus
  siRNA target sequence for AV273951 (NM_153130.1,4060-4078).
ctgagtgacctagaatatt

SEQ ID NO: 615471 - DNA, 19 bp, Mus musculus
  siRNA target sequence for AV273951 (NM_153130.1,4141-4159).
gatctcaccttcactgtta

SEQ ID NO: 615472 - DNA, 19 bp, Mus musculus
  siRNA target sequence for AV273951 (NM_153130.1,4304-4322).
cattgctcaggggtttcta

SEQ ID NO: 615473 - DNA, 19 bp, Mus musculus
  siRNA target sequence for AV273951 (NM_153130.1,4340-4358).
ggctcgtctcagtgtttga

SEQ ID NO: 615474 - DNA, 19 bp, Mus musculus
  siRNA target sequence for AV273951 (NM_153130.1,4341-4359).
gctcgtctcagtgtttgat

SEQ ID NO: 615475 - DNA, 19 bp, Mus musculus
  siRNA target sequence for AV273951 (NM_153130.1,4385-4403).
ctggaactgctgaaatcga

SEQ ID NO: 615476 - DNA, 19 bp, Mus musculus
  siRNA target sequence for AV273951 (NM_153130.1,4396-4414).
gaaatcgacctgaatgact

SEQ ID NO: 615477 - DNA, 19 bp, Mus musculus
  siRNA target sequence for AV273951 (NM_153130.1,4483-4501).
gcagtggaacgcttcaata

SEQ ID NO: 615478 - DNA, 19 bp, Mus musculus
  siRNA target sequence for AV273951 (NM_153130.1,4484-4502).
cagtggaacgcttcaataa

SEQ ID NO: 615479 - DNA, 19 bp, Mus musculus
  siRNA target sequence for AV273951 (NM_153130.1,4506-4524).
gcagagattgcgattactt

SEQ ID NO: 615480 - DNA, 19 bp, Mus musculus
  siRNA target sequence for AV273951 (NM_153130.1,4511-4529).
gattgcgattacttcagtt

SEQ ID NO: 615481 - DNA, 19 bp, Mus musculus
  siRNA target sequence for AV273951 (NM_153130.1,4594-4612).
cgacgtttctgcatagaaa

SEQ ID NO: 615482 - DNA, 19 bp, Mus musculus
  siRNA target sequence for AV273951 (NM_153130.1,4614-4632).
gtgggggaagattacatct

SEQ ID NO: 615483 - DNA, 19 bp, Mus musculus
  siRNA target sequence for AV273951 (NM_153130.1,4650-4668).
gtgcttcaaccgattggat

SEQ ID NO: 615484 - DNA, 19 bp, Mus musculus
  siRNA target sequence for AV273951 (NM_153130.1,4671-4689).
cccaccatacccttcatat

SEQ ID NO: 615485 - DNA, 19 bp, Mus musculus
  siRNA target sequence for AV273951 (NM_153130.1,4681-4699).
ccttcatattccatgttgt

SEQ ID NO: 615486 - DNA, 19 bp, Mus musculus
  siRNA target sequence for AV273951 (NM_153130.1,4682-4700).
cttcatattccatgttgta

SEQ ID NO: 615487 - DNA, 19 bp, Mus musculus
  siRNA target sequence for BC016265 (NM_144839.1,143-161).
ctgatcgagaacaagttca

SEQ ID NO: 615488 - DNA, 19 bp, Mus musculus
  siRNA target sequence for BC016265 (NM_144839.1,259-277).
gatccccctcccaactgta

SEQ ID NO: 615489 - DNA, 19 bp, Mus musculus
  siRNA target sequence for BC016265 (NM_144839.1,358-376).
gtattctttcttgacatta

SEQ ID NO: 615490 - DNA, 19 bp, Mus musculus
  siRNA target sequence for BC016265 (NM_144839.1,383-401).
caccagattatccgtttaa

SEQ ID NO: 615491 - DNA, 19 bp, Mus musculus
  siRNA target sequence for BC016265 (NM_144839.1,416-434).
ccttccgaacgagaatcta

SEQ ID NO: 615492 - DNA, 19 bp, Mus musculus
  siRNA target sequence for BC016265 (NM_144839.1,417-435).
cttccgaacgagaatctat

SEQ ID NO: 615493 - DNA, 19 bp, Mus musculus
  siRNA target sequence for BC016265 (NM_144839.1,450-468).
cagccagggtgtaatctgt

SEQ ID NO: 615494 - DNA, 19 bp, Mus musculus
  siRNA target sequence for BC016265 (NM_144839.1,500-518).
ccctgaccatctctaaagt

SEQ ID NO: 615495 - DNA, 19 bp, Mus musculus
  siRNA target sequence for BC016265 (NM_144839.1,528-546).
catctgctcactacttaca

SEQ ID NO: 615496 - DNA, 19 bp, Mus musculus
  siRNA target sequence for BC025474 (NM_172473.1,254-272).
ctgcccgaggataatgaga

SEQ ID NO: 615497 - DNA, 19 bp, Mus musculus
  siRNA target sequence for BC025474 (NM_172473.1,308-326).
gaccagcacaggtctgttt

SEQ ID NO: 615498 - DNA, 19 bp, Mus musculus
  siRNA target sequence for BC025474 (NM_172473.1,323-341).
gtttctgaactcctatcaa

SEQ ID NO: 615499 - DNA, 19 bp, Mus musculus
  siRNA target sequence for BC025474 (NM_172473.1,515-533).
cagaagaaatgcatgagta

SEQ ID NO: 615500 - DNA, 19 bp, Mus musculus
  siRNA target sequence for BC025474 (NM_172473.1,551-569).
gcggatgtcaacatttgta

SEQ ID NO: 615501 - DNA, 19 bp, Mus musculus
  siRNA target sequence for BC025474 (NM_172473.1,553-571).
ggatgtcaacatttgtaat

SEQ ID NO: 615502 - DNA, 19 bp, Mus musculus
  siRNA target sequence for BC025474 (NM_172473.1,554-572).
gatgtcaacatttgtaata

SEQ ID NO: 615503 - DNA, 19 bp, Mus musculus
  siRNA target sequence for BC025474 (NM_172473.1,740-758).
gacagcggtgctgatatta

SEQ ID NO: 615504 - DNA, 19 bp, Mus musculus
  siRNA target sequence for BC025474 (NM_172473.1,777-795).
gagccacgccactgtactt

SEQ ID NO: 615505 - DNA, 19 bp, Mus musculus
  siRNA target sequence for BC025474 (NM_172473.1,822-840).
ctgcacagattcttctatt

SEQ ID NO: 615506 - DNA, 19 bp, Mus musculus
  siRNA target sequence for BC025474 (NM_172473.1,873-891).
gagtaacccctctagatct

SEQ ID NO: 615507 - DNA, 19 bp, Mus musculus
  siRNA target sequence for BC025474 (NM_172473.1,875-893).
gtaacccctctagatctat

SEQ ID NO: 615508 - DNA, 19 bp, Mus musculus
  siRNA target sequence for BC025474 (NM_172473.1,914-932).
cagacttgtgaagtgttaa

SEQ ID NO: 615509 - DNA, 19 bp, Mus musculus
  siRNA target sequence for BC025474 (NM_172473.1,945-963).
cgaggcttttccagactat

SEQ ID NO: 615510 - DNA, 19 bp, Mus musculus
  siRNA target sequence for BC025474 (NM_172473.1,946-964).
gaggcttttccagactatt

SEQ ID NO: 615511 - DNA, 19 bp, Mus musculus
  siRNA target sequence for BC025474 (NM_172473.1,949-967).
gcttttccagactattgtt

SEQ ID NO: 615512 - DNA, 19 bp, Mus musculus
  siRNA target sequence for BC025474 (NM_172473.1,958-976).
gactattgttcaaatgaca

SEQ ID NO: 615513 - DNA, 19 bp, Mus musculus
  siRNA target sequence for BC025474 (NM_172473.1,986-1004).
gaccttcgggaaaacatgt

SEQ ID NO: 615514 - DNA, 19 bp, Mus musculus
  siRNA target sequence for BC025474 (NM_172473.1,988-1006).
ccttcgggaaaacatgtta

SEQ ID NO: 615515 - DNA, 19 bp, Mus musculus
  siRNA target sequence for BC025474 (NM_172473.1,1038-1056).
gtgaaagccagtacctaaa

SEQ ID NO: 615516 - DNA, 19 bp, Mus musculus
  siRNA target sequence for BC025474 (NM_172473.1,1086-1104).
cgacaaatggccataagct

SEQ ID NO: 615517 - DNA, 19 bp, Mus musculus
  siRNA target sequence for BC025474 (NM_172473.1,1192-1210).
ctcatctcccagtaatgga

SEQ ID NO: 615518 - DNA, 19 bp, Mus musculus
  siRNA target sequence for BC025474 (NM_172473.1,1199-1217).
cccagtaatggaatcgata

SEQ ID NO: 615519 - DNA, 19 bp, Mus musculus
  siRNA target sequence for BC025474 (NM_172473.1,1214-1232).
gatatgggctacaatggaa

SEQ ID NO: 615520 - DNA, 19 bp, Mus musculus
  siRNA target sequence for BC025474 (NM_172473.1,1282-1300).
ctcattggatgaatggtta

SEQ ID NO: 615521 - DNA, 19 bp, Mus musculus
  siRNA target sequence for BC025474 (NM_172473.1,1288-1306).
ggatgaatggttagtttta

SEQ ID NO: 615522 - DNA, 19 bp, Mus musculus
  siRNA target sequence for BC025474 (NM_172473.1,1334-1352).
gaggattcaacagatatta

SEQ ID NO: 615523 - DNA, 19 bp, Mus musculus
  siRNA target sequence for BC025474 (NM_172473.1,1336-1354).
ggattcaacagatattact

SEQ ID NO: 615524 - DNA, 19 bp, Mus musculus
  siRNA target sequence for BC025474 (NM_172473.1,1341-1359).
caacagatattacttctat

SEQ ID NO: 615525 - DNA, 19 bp, Mus musculus
  siRNA target sequence for BC025474 (NM_172473.1,1537-1555).
ccggctgagtgctgtcatt

SEQ ID NO: 615526 - DNA, 19 bp, Mus musculus
  siRNA target sequence for BC025474 (NM_172473.1,1550-1568).
gtcattcaagccttctaca

SEQ ID NO: 615527 - DNA, 19 bp, Mus musculus
  siRNA target sequence for BC025474 (NM_172473.1,1600-1618).
gacttcacctcgtttcatt

SEQ ID NO: 615528 - DNA, 19 bp, Mus musculus
  siRNA target sequence for BC025474 (NM_172473.1,1605-1623).
cacctcgtttcattgagtt

SEQ ID NO: 615529 - DNA, 19 bp, Mus musculus
  siRNA target sequence for BC025474 (NM_172473.1,1610-1628).
cgtttcattgagtttgtct

SEQ ID NO: 615530 - DNA, 19 bp, Mus musculus
  siRNA target sequence for BC025474 (NM_172473.1,1660-1678).
gaatagaaaccccaaaatt

SEQ ID NO: 615531 - DNA, 19 bp, Mus musculus
  siRNA target sequence for BC025474 (NM_172473.1,1665-1683).
gaaaccccaaaattatatt

SEQ ID NO: 615532 - DNA, 19 bp, Mus musculus
  siRNA target sequence for BC025474 (NM_172473.1,1725-1743).
caagattcatgcatatcat

SEQ ID NO: 615533 - DNA, 19 bp, Mus musculus
  siRNA target sequence for BC025474 (NM_172473.1,1728-1746).
gattcatgcatatcataaa

SEQ ID NO: 615534 - DNA, 19 bp, Mus musculus
  siRNA target sequence for BC025474 (NM_172473.1,1770-1788).
gtgagtggttctatgaaca

SEQ ID NO: 615535 - DNA, 19 bp, Mus musculus
  siRNA target sequence for BC025474 (NM_172473.1,1830-1848).
cagtgagtgagaacgatat

SEQ ID NO: 615536 - DNA, 19 bp, Mus musculus
  siRNA target sequence for BC025474 (NM_172473.1,1853-1871).
ctggttcacagagattcta

SEQ ID NO: 615537 - DNA, 19 bp, Mus musculus
  siRNA target sequence for BC025474 (NM_172473.1,1927-1945).
ggggattgctgtacgattt

SEQ ID NO: 615538 - DNA, 19 bp, Mus musculus
  siRNA target sequence for BC025474 (NM_172473.1,1929-1947).
ggattgctgtacgatttca

SEQ ID NO: 615539 - DNA, 19 bp, Mus musculus
  siRNA target sequence for BC025474 (NM_172473.1,1971-1989).
gcgttgtgcgtgaatggtt

SEQ ID NO: 615540 - DNA, 19 bp, Mus musculus
  siRNA target sequence for BC025474 (NM_172473.1,1972-1990).
cgttgtgcgtgaatggttt

SEQ ID NO: 615541 - DNA, 19 bp, Mus musculus
  siRNA target sequence for BC025474 (NM_172473.1,1976-1994).
gtgcgtgaatggtttgata

SEQ ID NO: 615542 - DNA, 19 bp, Mus musculus
  siRNA target sequence for BC025474 (NM_172473.1,1982-2000).
gaatggtttgatattctgt

SEQ ID NO: 615543 - DNA, 19 bp, Mus musculus
  siRNA target sequence for BC025474 (NM_172473.1,2008-2026).
gatcgtcaaccctgactat

SEQ ID NO: 615544 - DNA, 19 bp, Mus musculus
  siRNA target sequence for BC025474 (NM_172473.1,2123-2141).
cagatcttggggttagctt

SEQ ID NO: 615545 - DNA, 19 bp, Mus musculus
  siRNA target sequence for BC025474 (NM_172473.1,2191-2209).
gcacattctcggtattcct

SEQ ID NO: 615546 - DNA, 19 bp, Mus musculus
  siRNA target sequence for BC025474 (NM_172473.1,2198-2216).
ctcggtattcctgtaaatt

SEQ ID NO: 615547 - DNA, 19 bp, Mus musculus
  siRNA target sequence for BC025474 (NM_172473.1,2218-2236).
ccaagatgtagcatctatt

SEQ ID NO: 615548 - DNA, 19 bp, Mus musculus
  siRNA target sequence for BC025474 (NM_172473.1,2229-2247).
catctattgatcctgaata

SEQ ID NO: 615549 - DNA, 19 bp, Mus musculus
  siRNA target sequence for BC025474 (NM_172473.1,2240-2258).
cctgaatatgccaaaaatt

SEQ ID NO: 615550 - DNA, 19 bp, Mus musculus
  siRNA target sequence for BC025474 (NM_172473.1,2250-2268).
ccaaaaatttgcaatggat

SEQ ID NO: 615551 - DNA, 19 bp, Mus musculus
  siRNA target sequence for BC025474 (NM_172473.1,2251-2269).
caaaaatttgcaatggatt

SEQ ID NO: 615552 - DNA, 19 bp, Mus musculus
  siRNA target sequence for BC025474 (NM_172473.1,2265-2283).
ggattttagataatgatat

SEQ ID NO: 615553 - DNA, 19 bp, Mus musculus
  siRNA target sequence for BC025474 (NM_172473.1,2266-2284).
gattttagataatgatatt

SEQ ID NO: 615554 - DNA, 19 bp, Mus musculus
  siRNA target sequence for BC025474 (NM_172473.1,2286-2304).
gtgacttgggtctagaatt

SEQ ID NO: 615555 - DNA, 19 bp, Mus musculus
  siRNA target sequence for BC025474 (NM_172473.1,2290-2308).
cttgggtctagaattgact

SEQ ID NO: 615556 - DNA, 19 bp, Mus musculus
  siRNA target sequence for BC025474 (NM_172473.1,2293-2311).
gggtctagaattgactttt

SEQ ID NO: 615557 - DNA, 19 bp, Mus musculus
  siRNA target sequence for BC025474 (NM_172473.1,2294-2312).
ggtctagaattgacttttt

SEQ ID NO: 615558 - DNA, 19 bp, Mus musculus
  siRNA target sequence for BC025474 (NM_172473.1,2364-2382).
ggggtggaagtattcttgt

SEQ ID NO: 615559 - DNA, 19 bp, Mus musculus
  siRNA target sequence for BC025474 (NM_172473.1,2373-2391).
gtattcttgtgacacaaaa

SEQ ID NO: 615560 - DNA, 19 bp, Mus musculus
  siRNA target sequence for BC025474 (NM_172473.1,2442-2460).
ccattcagccgcagatcaa

SEQ ID NO: 615561 - DNA, 19 bp, Mus musculus
  siRNA target sequence for BC025474 (NM_172473.1,2443-2461).
cattcagccgcagatcaat

SEQ ID NO: 615562 - DNA, 19 bp, Mus musculus
  siRNA target sequence for BC025474 (NM_172473.1,2452-2470).
gcagatcaatgcgttttta

SEQ ID NO: 615563 - DNA, 19 bp, Mus musculus
  siRNA target sequence for BC025474 (NM_172473.1,2493-2511).
cgccttccctcatacaact

SEQ ID NO: 615564 - DNA, 19 bp, Mus musculus
  siRNA target sequence for BC025474 (NM_172473.1,2496-2514).
cttccctcatacaactgtt

SEQ ID NO: 615565 - DNA, 19 bp, Mus musculus
  siRNA target sequence for BC025474 (NM_172473.1,2510-2528).
ctgtttgacgagtatgaat

SEQ ID NO: 615566 - DNA, 19 bp, Mus musculus
  siRNA target sequence for BC025474 (NM_172473.1,2551-2569).
gccggaaattgatgtaaat

SEQ ID NO: 615567 - DNA, 19 bp, Mus musculus
  siRNA target sequence for BC025474 (NM_172473.1,2561-2579).
gatgtaaatgattggataa

SEQ ID NO: 615568 - DNA, 19 bp, Mus musculus
  siRNA target sequence for BC025474 (NM_172473.1,2610-2628).
gagaagatccagttattca

SEQ ID NO: 615569 - DNA, 19 bp, Mus musculus
  siRNA target sequence for BC025474 (NM_172473.1,2612-2630).
gaagatccagttattcagt

SEQ ID NO: 615570 - DNA, 19 bp, Mus musculus
  siRNA target sequence for BC025474 (NM_172473.1,2747-2765).
ggtttgcaaaactttacaa

SEQ ID NO: 615571 - DNA, 19 bp, Mus musculus
  siRNA target sequence for BC025474 (NM_172473.1,2752-2770).
gcaaaactttacaattgct

SEQ ID NO: 615572 - DNA, 19 bp, Mus musculus
  siRNA target sequence for BC025474 (NM_172473.1,2776-2794).
gccatatactccaaatctt

SEQ ID NO: 615573 - DNA, 19 bp, Mus musculus
  siRNA target sequence for BC025474 (NM_172473.1,2778-2796).
catatactccaaatctttt

SEQ ID NO: 615574 - DNA, 19 bp, Mus musculus
  siRNA target sequence for BC025474 (NM_172473.1,2892-2910).
gcagctatggttatacaat

SEQ ID NO: 615575 - DNA, 19 bp, Mus musculus
  siRNA target sequence for Birc6 (NM_007566.1,498-516).
ggcgctcagcgctaaacca

SEQ ID NO: 615576 - DNA, 19 bp, Mus musculus
  siRNA target sequence for Birc6 (NM_007566.1,545-563).
ctgctgtggataaagtgat

SEQ ID NO: 615577 - DNA, 19 bp, Mus musculus
  siRNA target sequence for Birc6 (NM_007566.1,699-717).
gctcttatcagcatgtata

SEQ ID NO: 615578 - DNA, 19 bp, Mus musculus
  siRNA target sequence for Birc6 (NM_007566.1,723-741).
gatagatgtttctagtaca

SEQ ID NO: 615579 - DNA, 19 bp, Mus musculus
  siRNA target sequence for Birc6 (NM_007566.1,737-755).
gtacagagggttatgattt

SEQ ID NO: 615580 - DNA, 19 bp, Mus musculus
  siRNA target sequence for Birc6 (NM_007566.1,766-784).
cagctcaaagatggtttaa

SEQ ID NO: 615581 - DNA, 19 bp, Mus musculus
  siRNA target sequence for Birc6 (NM_007566.1,823-841).
gctaagtgggccacagtta

SEQ ID NO: 615582 - DNA, 19 bp, Mus musculus
  siRNA target sequence for Birc6 (NM_007566.1,850-868).
cttcctcatcacgtattga

SEQ ID NO: 615583 - DNA, 19 bp, Mus musculus
  siRNA target sequence for Birc6 (NM_007566.1,853-871).
cctcatcacgtattgaagt

SEQ ID NO: 615584 - DNA, 19 bp, Mus musculus
  siRNA target sequence for Birc6 (NM_007566.1,856-874).
catcacgtattgaagtcta

SEQ ID NO: 615585 - DNA, 19 bp, Mus musculus
  siRNA target sequence for Birc6 (NM_007566.1,879-897).
cagtgccattgtaaatgaa

SEQ ID NO: 615586 - DNA, 19 bp, Mus musculus
  siRNA target sequence for Birc6 (NM_007566.1,883-901).
gccattgtaaatgaactta

SEQ ID NO: 615587 - DNA, 19 bp, Mus musculus
  siRNA target sequence for Birc6 (NM_007566.1,975-993).
cagtgcacgtccagaactt

SEQ ID NO: 615588 - DNA, 19 bp, Mus musculus
  siRNA target sequence for Birc6 (NM_007566.1,1015-1033).
gtagacagggcattgatgt

SEQ ID NO: 615589 - DNA, 19 bp, Mus musculus
  siRNA target sequence for Birc6 (NM_007566.1,1018-1036).
gacagggcattgatgtata

SEQ ID NO: 615590 - DNA, 19 bp, Mus musculus
  siRNA target sequence for Birc6 (NM_007566.1,1020-1038).
cagggcattgatgtatagt

SEQ ID NO: 615591 - DNA, 19 bp, Mus musculus
  siRNA target sequence for Birc6 (NM_007566.1,1022-1040).
gggcattgatgtatagtga

SEQ ID NO: 615592 - DNA, 19 bp, Mus musculus
  siRNA target sequence for Birc6 (NM_007566.1,1023-1041).
ggcattgatgtatagtgaa

SEQ ID NO: 615593 - DNA, 19 bp, Mus musculus
  siRNA target sequence for Birc6 (NM_007566.1,1062-1080).
cacttcgtggcctcatgtt

SEQ ID NO: 615594 - DNA, 19 bp, Mus musculus
  siRNA target sequence for Birc6 (NM_007566.1,1138-1156).
gcttcatctggagatgata

SEQ ID NO: 615595 - DNA, 19 bp, Mus musculus
  siRNA target sequence for Birc6 (NM_007566.1,1262-1280).
gtgagcacacccagaatgt

SEQ ID NO: 615596 - DNA, 19 bp, Mus musculus
  siRNA target sequence for Birc6 (NM_007566.1,1333-1351).
ggagctgacagaatagctt

SEQ ID NO: 615597 - DNA, 19 bp, Mus musculus
  siRNA target sequence for Birc6 (NM_007566.1,1364-1382).
ggagctgtcctcagtttct

SEQ ID NO: 615598 - DNA, 19 bp, Mus musculus
  siRNA target sequence for Birc6 (NM_007566.1,1399-1417).
cgtgggaagatctgcatat

SEQ ID NO: 615599 - DNA, 19 bp, Mus musculus
  siRNA target sequence for Birc6 (NM_007566.1,1437-1455).
gaaggtgcacttgaagttt

SEQ ID NO: 615600 - DNA, 19 bp, Mus musculus
  siRNA target sequence for Birc6 (NM_007566.1,1440-1458).
ggtgcacttgaagtttgaa

SEQ ID NO: 615601 - DNA, 19 bp, Mus musculus
  siRNA target sequence for Birc6 (NM_007566.1,1483-1501).
gtgcaacagctgatcctat

SEQ ID NO: 615602 - DNA, 19 bp, Mus musculus
  siRNA target sequence for Birc6 (NM_007566.1,1551-1569).
gctggaagactcttctagt

SEQ ID NO: 615603 - DNA, 19 bp, Mus musculus
  siRNA target sequence for Birc6 (NM_007566.1,1552-1570).
ctggaagactcttctagtt

SEQ ID NO: 615604 - DNA, 19 bp, Mus musculus
  siRNA target sequence for Birc6 (NM_007566.1,1595-1613).
gagacagtgatgatttgct

SEQ ID NO: 615605 - DNA, 19 bp, Mus musculus
  siRNA target sequence for Birc6 (NM_007566.1,1686-1704).
ggaagtaagccttgatata

SEQ ID NO: 615606 - DNA, 19 bp, Mus musculus
  siRNA target sequence for Birc6 (NM_007566.1,1687-1705).
gaagtaagccttgatataa

SEQ ID NO: 615607 - DNA, 19 bp, Mus musculus
  siRNA target sequence for Birc6 (NM_007566.1,1756-1774).
gctaatgtgcttgaagata

SEQ ID NO: 615608 - DNA, 19 bp, Mus musculus
  siRNA target sequence for Birc6 (NM_007566.1,1802-1820).
caaacccctccctaacgaa

SEQ ID NO: 615609 - DNA, 19 bp, Mus musculus
  siRNA target sequence for Birc6 (NM_007566.1,1807-1825).
ccctccctaacgaactcta

SEQ ID NO: 615610 - DNA, 19 bp, Mus musculus
  siRNA target sequence for Birc6 (NM_007566.1,1808-1826).
cctccctaacgaactctaa

SEQ ID NO: 615611 - DNA, 19 bp, Mus musculus
  siRNA target sequence for Birc6 (NM_007566.1,1817-1835).
cgaactctaagagtgaaaa

SEQ ID NO: 615612 - DNA, 19 bp, Mus musculus
  siRNA target sequence for Birc6 (NM_007566.1,1821-1839).
ctctaagagtgaaaagaca

SEQ ID NO: 615613 - DNA, 19 bp, Mus musculus
  siRNA target sequence for Birc6 (NM_007566.1,1851-1869).
ccaggaacaacacaacatt

SEQ ID NO: 615614 - DNA, 19 bp, Mus musculus
  siRNA target sequence for Birc6 (NM_007566.1,1887-1905).
ggctggaggtttattaaca

SEQ ID NO: 615615 - DNA, 19 bp, Mus musculus
  siRNA target sequence for Birc6 (NM_007566.1,1888-1906).
gctggaggtttattaacat

SEQ ID NO: 615616 - DNA, 19 bp, Mus musculus
  siRNA target sequence for Birc6 (NM_007566.1,1891-1909).
ggaggtttattaacatata

SEQ ID NO: 615617 - DNA, 19 bp, Mus musculus
  siRNA target sequence for Birc6 (NM_007566.1,1892-1910).
gaggtttattaacatataa

SEQ ID NO: 615618 - DNA, 19 bp, Mus musculus
  siRNA target sequence for Birc6 (NM_007566.1,1894-1912).
ggtttattaacatataagt

SEQ ID NO: 615619 - DNA, 19 bp, Mus musculus
  siRNA target sequence for Birc6 (NM_007566.1,1918-1936).
gctacctcacccattagta

SEQ ID NO: 615620 - DNA, 19 bp, Mus musculus
  siRNA target sequence for Birc6 (NM_007566.1,1923-1941).
ctcacccattagtagtaat

SEQ ID NO: 615621 - DNA, 19 bp, Mus musculus
  siRNA target sequence for Birc6 (NM_007566.1,1947-1965).
caggtcactggatggttta

SEQ ID NO: 615622 - DNA, 19 bp, Mus musculus
  siRNA target sequence for Birc6 (NM_007566.1,1970-1988).
gaactcagggcgaaagtat

SEQ ID NO: 615623 - DNA, 19 bp, Mus musculus
  siRNA target sequence for Birc6 (NM_007566.1,1999-2017).
gggtcaactgacaatgaat

SEQ ID NO: 615624 - DNA, 19 bp, Mus musculus
  siRNA target sequence for Birc6 (NM_007566.1,2154-2172).
gcacgatgacggttttaca

SEQ ID NO: 615625 - DNA, 19 bp, Mus musculus
  siRNA target sequence for Birc6 (NM_007566.1,2157-2175).
cgatgacggttttacagtt

SEQ ID NO: 615626 - DNA, 19 bp, Mus musculus
  siRNA target sequence for Birc6 (NM_007566.1,2171-2189).
cagttcctcagattattga

SEQ ID NO: 615627 - DNA, 19 bp, Mus musculus
  siRNA target sequence for Birc6 (NM_007566.1,2173-2191).
gttcctcagattattgaaa

SEQ ID NO: 615628 - DNA, 19 bp, Mus musculus
  siRNA target sequence for Birc6 (NM_007566.1,2339-2357).
gcttgaggctaccaaagtt

SEQ ID NO: 615629 - DNA, 19 bp, Mus musculus
  siRNA target sequence for Birc6 (NM_007566.1,2340-2358).
cttgaggctaccaaagttt

SEQ ID NO: 615630 - DNA, 19 bp, Mus musculus
  siRNA target sequence for Birc6 (NM_007566.1,2374-2392).
ctttgtatagactctataa

SEQ ID NO: 615631 - DNA, 19 bp, Mus musculus
  siRNA target sequence for Birc6 (NM_007566.1,2450-2468).
cattgagtgcaataaatca

SEQ ID NO: 615632 - DNA, 19 bp, Mus musculus
  siRNA target sequence for Birc6 (NM_007566.1,2470-2488).
gtcgaggccttgaataatt

SEQ ID NO: 615633 - DNA, 19 bp, Mus musculus
  siRNA target sequence for Birc6 (NM_007566.1,2472-2490).
cgaggccttgaataattta

SEQ ID NO: 615634 - DNA, 19 bp, Mus musculus
  siRNA target sequence for Birc6 (NM_007566.1,2502-2520).
ctctgcactatgtaataga

SEQ ID NO: 615635 - DNA, 19 bp, Mus musculus
  siRNA target sequence for Birc6 (NM_007566.1,2540-2558).
ccaatcttgctgtagtgaa

SEQ ID NO: 615636 - DNA, 19 bp, Mus musculus
  siRNA target sequence for Birc6 (NM_007566.1,2541-2559).
caatcttgctgtagtgaat

SEQ ID NO: 615637 - DNA, 19 bp, Mus musculus
  siRNA target sequence for Birc6 (NM_007566.1,2551-2569).
gtagtgaatggtgcaaata

SEQ ID NO: 615638 - DNA, 19 bp, Mus musculus
  siRNA target sequence for Birc6 (NM_007566.1,2641-2659).
gtcgtcagtggtggatatt

SEQ ID NO: 615639 - DNA, 19 bp, Mus musculus
  siRNA target sequence for Birc6 (NM_007566.1,2643-2661).
cgtcagtggtggatattta

SEQ ID NO: 615640 - DNA, 19 bp, Mus musculus
  siRNA target sequence for Birc6 (NM_007566.1,2651-2669).
gtggatatttagttcttta

SEQ ID NO: 615641 - DNA, 19 bp, Mus musculus
  siRNA target sequence for Birc6 (NM_007566.1,2654-2672).
gatatttagttctttacaa

SEQ ID NO: 615642 - DNA, 19 bp, Mus musculus
  siRNA target sequence for Birc6 (NM_007566.1,2676-2694).
gaactataccactcgaata

SEQ ID NO: 615643 - DNA, 19 bp, Mus musculus
  siRNA target sequence for Birc6 (NM_007566.1,2684-2702).
ccactcgaatagtgacttt

SEQ ID NO: 615644 - DNA, 19 bp, Mus musculus
  siRNA target sequence for Birc6 (NM_007566.1,2685-2703).
cactcgaatagtgacttta

SEQ ID NO: 615645 - DNA, 19 bp, Mus musculus
  siRNA target sequence for Birc6 (NM_007566.1,2687-2705).
ctcgaatagtgactttaga

SEQ ID NO: 615646 - DNA, 19 bp, Mus musculus
  siRNA target sequence for Birc6 (NM_007566.1,2690-2708).
gaatagtgactttagaaga

SEQ ID NO: 615647 - DNA, 19 bp, Mus musculus
  siRNA target sequence for Birc6 (NM_007566.1,2709-2727).
ggagcccgtgaaaatccaa

SEQ ID NO: 615648 - DNA, 19 bp, Mus musculus
  siRNA target sequence for Birc6 (NM_007566.1,2718-2736).
gaaaatccaacatatcaaa

SEQ ID NO: 615649 - DNA, 19 bp, Mus musculus
  siRNA target sequence for Birc6 (NM_007566.1,2750-2768).
caattacctcgctcatttt

SEQ ID NO: 615650 - DNA, 19 bp, Mus musculus
  siRNA target sequence for Birc6 (NM_007566.1,2774-2792).
caccagatatactggataa

SEQ ID NO: 615651 - DNA, 19 bp, Mus musculus
  siRNA target sequence for Birc6 (NM_007566.1,2829-2847).
gcagttagcctcaaagaat

SEQ ID NO: 615652 - DNA, 19 bp, Mus musculus
  siRNA target sequence for Birc6 (NM_007566.1,2844-2862).
gaatgggattgaaagagaa

SEQ ID NO: 615653 - DNA, 19 bp, Mus musculus
  siRNA target sequence for Birc6 (NM_007566.1,2884-2902).
cttggacacctggtagtaa

SEQ ID NO: 615654 - DNA, 19 bp, Mus musculus
  siRNA target sequence for Birc6 (NM_007566.1,2910-2928).
gggaggatacgtgaaagta

SEQ ID NO: 615655 - DNA, 19 bp, Mus musculus
  siRNA target sequence for Birc6 (NM_007566.1,2911-2929).
ggaggatacgtgaaagtat

SEQ ID NO: 615656 - DNA, 19 bp, Mus musculus
  siRNA target sequence for Birc6 (NM_007566.1,2912-2930).
gaggatacgtgaaagtatt

SEQ ID NO: 615657 - DNA, 19 bp, Mus musculus
  siRNA target sequence for Birc6 (NM_007566.1,2915-2933).
gatacgtgaaagtattaga

SEQ ID NO: 615658 - DNA, 19 bp, Mus musculus
  siRNA target sequence for Birc6 (NM_007566.1,3163-3181).
gaaggttccagacctttat

SEQ ID NO: 615659 - DNA, 19 bp, Mus musculus
  siRNA target sequence for Birc6 (NM_007566.1,3167-3185).
gttccagacctttatcaaa

SEQ ID NO: 615660 - DNA, 19 bp, Mus musculus
  siRNA target sequence for Birc6 (NM_007566.1,3200-3218).
gtatttcaggagttgagtt

SEQ ID NO: 615661 - DNA, 19 bp, Mus musculus
  siRNA target sequence for Birc6 (NM_007566.1,3206-3224).
caggagttgagttattggt

SEQ ID NO: 615662 - DNA, 19 bp, Mus musculus
  siRNA target sequence for Birc6 (NM_007566.1,3222-3240).
ggtggaccagcctttcaca

SEQ ID NO: 615663 - DNA, 19 bp, Mus musculus
  siRNA target sequence for Birc6 (NM_007566.1,3232-3250).
cctttcacacttgaaatct

SEQ ID NO: 615664 - DNA, 19 bp, Mus musculus
  siRNA target sequence for Birc6 (NM_007566.1,3255-3273).
gtctttagtagaactaact

SEQ ID NO: 615665 - DNA, 19 bp, Mus musculus
  siRNA target sequence for Birc6 (NM_007566.1,3265-3283).
gaactaactcgatttgaaa

SEQ ID NO: 615666 - DNA, 19 bp, Mus musculus
  siRNA target sequence for Birc6 (NM_007566.1,3317-3335).
catgttgggtagaagttca

SEQ ID NO: 615667 - DNA, 19 bp, Mus musculus
  siRNA target sequence for Birc6 (NM_007566.1,3490-3508).
ggacatgtggacttcaaat

SEQ ID NO: 615668 - DNA, 19 bp, Mus musculus
  siRNA target sequence for Birc6 (NM_007566.1,3491-3509).
gacatgtggacttcaaatt

SEQ ID NO: 615669 - DNA, 19 bp, Mus musculus
  siRNA target sequence for Birc6 (NM_007566.1,3692-3710).
ggttatgtccattcttaga

SEQ ID NO: 615670 - DNA, 19 bp, Mus musculus
  siRNA target sequence for Birc6 (NM_007566.1,3700-3718).
ccattcttagaggatcata

SEQ ID NO: 615671 - DNA, 19 bp, Mus musculus
  siRNA target sequence for Birc6 (NM_007566.1,3701-3719).
cattcttagaggatcataa

SEQ ID NO: 615672 - DNA, 19 bp, Mus musculus
  siRNA target sequence for Birc6 (NM_007566.1,3711-3729).
ggatcataaagaagacatt

SEQ ID NO: 615673 - DNA, 19 bp, Mus musculus
  siRNA target sequence for Birc6 (NM_007566.1,3772-3790).
ggtcatgctgggatgttga

SEQ ID NO: 615674 - DNA, 19 bp, Mus musculus
  siRNA target sequence for Birc6 (NM_007566.1,3781-3799).
gggatgttgacgttgacaa

SEQ ID NO: 615675 - DNA, 19 bp, Mus musculus
  siRNA target sequence for Birc6 (NM_007566.1,3792-3810).
gttgacaagccccaaactt

SEQ ID NO: 615676 - DNA, 19 bp, Mus musculus
  siRNA target sequence for Birc6 (NM_007566.1,3802-3820).
cccaaacttgttaaaggta

SEQ ID NO: 615677 - DNA, 19 bp, Mus musculus
  siRNA target sequence for Birc6 (NM_007566.1,3803-3821).
ccaaacttgttaaaggtat

SEQ ID NO: 615678 - DNA, 19 bp, Mus musculus
  siRNA target sequence for Birc6 (NM_007566.1,3827-3845).
gagggaagtaccgttcatt

SEQ ID NO: 615679 - DNA, 19 bp, Mus musculus
  siRNA target sequence for Birc6 (NM_007566.1,3829-3847).
gggaagtaccgttcatttt

SEQ ID NO: 615680 - DNA, 19 bp, Mus musculus
  siRNA target sequence for Birc6 (NM_007566.1,3830-3848).
ggaagtaccgttcattttt

SEQ ID NO: 615681 - DNA, 19 bp, Mus musculus
  siRNA target sequence for Birc6 (NM_007566.1,3831-3849).
gaagtaccgttcattttta

SEQ ID NO: 615682 - DNA, 19 bp, Mus musculus
  siRNA target sequence for Birc6 (NM_007566.1,3834-3852).
gtaccgttcatttttaatt

SEQ ID NO: 615683 - DNA, 19 bp, Mus musculus
  siRNA target sequence for Birc6 (NM_007566.1,3837-3855).
ccgttcatttttaattcat

SEQ ID NO: 615684 - DNA, 19 bp, Mus musculus
  siRNA target sequence for Birc6 (NM_007566.1,3919-3937).
gtgaggcttccatctctta

SEQ ID NO: 615685 - DNA, 19 bp, Mus musculus
  siRNA target sequence for Birc6 (NM_007566.1,3945-3963).
gggtcacaagggatactca

SEQ ID NO: 615686 - DNA, 19 bp, Mus musculus
  siRNA target sequence for Birc6 (NM_007566.1,4036-4054).
ggcacccgaaagtctgaaa

SEQ ID NO: 615687 - DNA, 19 bp, Mus musculus
  siRNA target sequence for Birc6 (NM_007566.1,4056-4074).
cctgcggggttgtgattta

SEQ ID NO: 615688 - DNA, 19 bp, Mus musculus
  siRNA target sequence for Birc6 (NM_007566.1,4059-4077).
gcggggttgtgatttactt

SEQ ID NO: 615689 - DNA, 19 bp, Mus musculus
  siRNA target sequence for Birc6 (NM_007566.1,4090-4108).
gtcaccattcggaggttta

SEQ ID NO: 615690 - DNA, 19 bp, Mus musculus
  siRNA target sequence for Birc6 (NM_007566.1,4094-4112).
ccattcggaggtttaagaa

SEQ ID NO: 615691 - DNA, 19 bp, Mus musculus
  siRNA target sequence for Birc6 (NM_007566.1,4095-4113).
cattcggaggtttaagaaa

SEQ ID NO: 615692 - DNA, 19 bp, Mus musculus
  siRNA target sequence for Birc6 (NM_007566.1,4142-4160).
gttgcgccatgttacagtt

SEQ ID NO: 615693 - DNA, 19 bp, Mus musculus
  siRNA target sequence for Birc6 (NM_007566.1,4146-4164).
cgccatgttacagttttca

SEQ ID NO: 615694 - DNA, 19 bp, Mus musculus
  siRNA target sequence for Birc6 (NM_007566.1,4171-4189).
catgagaagcttcttaaca

SEQ ID NO: 615695 - DNA, 19 bp, Mus musculus
  siRNA target sequence for Birc6 (NM_007566.1,4180-4198).
cttcttaacacgctttgta

SEQ ID NO: 615696 - DNA, 19 bp, Mus musculus
  siRNA target sequence for Birc6 (NM_007566.1,4270-4288).
ggagtccattcaaatggat

SEQ ID NO: 615697 - DNA, 19 bp, Mus musculus
  siRNA target sequence for Birc6 (NM_007566.1,4381-4399).
cgaagtatagcccataaat

SEQ ID NO: 615698 - DNA, 19 bp, Mus musculus
  siRNA target sequence for Birc6 (NM_007566.1,4411-4429).
ctagccttgtgcattagta

SEQ ID NO: 615699 - DNA, 19 bp, Mus musculus
  siRNA target sequence for Birc6 (NM_007566.1,4456-4474).
ggatttggatcggttctat

SEQ ID NO: 615700 - DNA, 19 bp, Mus musculus
  siRNA target sequence for Birc6 (NM_007566.1,4457-4475).
gatttggatcggttctatt

SEQ ID NO: 615701 - DNA, 19 bp, Mus musculus
  siRNA target sequence for Birc6 (NM_007566.1,4525-4543).
ggttctgtctactggtatt

SEQ ID NO: 615702 - DNA, 19 bp, Mus musculus
  siRNA target sequence for Birc6 (NM_007566.1,4526-4544).
gttctgtctactggtattt

SEQ ID NO: 615703 - DNA, 19 bp, Mus musculus
  siRNA target sequence for Birc6 (NM_007566.1,4529-4547).
ctgtctactggtattttgt

SEQ ID NO: 615704 - DNA, 19 bp, Mus musculus
  siRNA target sequence for Birc6 (NM_007566.1,4546-4564).
gtactgctgaattatgtta

SEQ ID NO: 615705 - DNA, 19 bp, Mus musculus
  siRNA target sequence for Birc6 (NM_007566.1,4594-4612).
gcgtgtgcagccctactta

SEQ ID NO: 615706 - DNA, 19 bp, Mus musculus
  siRNA target sequence for Birc6 (NM_007566.1,4683-4701).
gtacagctccccgtttgat

SEQ ID NO: 615707 - DNA, 19 bp, Mus musculus
  siRNA target sequence for Birc6 (NM_007566.1,4694-4712).
cgtttgatccagttctctt

SEQ ID NO: 615708 - DNA, 19 bp, Mus musculus
  siRNA target sequence for Birc6 (NM_007566.1,4695-4713).
gtttgatccagttctcttt

SEQ ID NO: 615709 - DNA, 19 bp, Mus musculus
  siRNA target sequence for Birc6 (NM_007566.1,4699-4717).
gatccagttctctttgact

SEQ ID NO: 615710 - DNA, 19 bp, Mus musculus
  siRNA target sequence for Birc6 (NM_007566.1,4720-4738).
gagatgagcggctcttctt

SEQ ID NO: 615711 - DNA, 19 bp, Mus musculus
  siRNA target sequence for Birc6 (NM_007566.1,4788-4806).
cttatcagacgttctttca

SEQ ID NO: 615712 - DNA, 19 bp, Mus musculus
  siRNA target sequence for Birc6 (NM_007566.1,4875-4893).
ggttgaacctcttcacttt

SEQ ID NO: 615713 - DNA, 19 bp, Mus musculus
  siRNA target sequence for Birc6 (NM_007566.1,4876-4894).
gttgaacctcttcacttta

SEQ ID NO: 615714 - DNA, 19 bp, Mus musculus
  siRNA target sequence for Birc6 (NM_007566.1,4908-4926).
cagtgatgggaccagaata

SEQ ID NO: 615715 - DNA, 19 bp, Mus musculus
  siRNA target sequence for Birc6 (NM_007566.1,4933-4951).
gatgatgcaagtacgttta

SEQ ID NO: 615716 - DNA, 19 bp, Mus musculus
  siRNA target sequence for Birc6 (NM_007566.1,4978-4996).
gcagtaggtggcctatcat

SEQ ID NO: 615717 - DNA, 19 bp, Mus musculus
  siRNA target sequence for Birc6 (NM_007566.1,5033-5051).
cagcagcccaggtagcttt

SEQ ID NO: 615718 - DNA, 19 bp, Mus musculus
  siRNA target sequence for Birc6 (NM_007566.1,5219-5237).
cagcaggtcctgttcacaa

SEQ ID NO: 615719 - DNA, 19 bp, Mus musculus
  siRNA target sequence for Birc6 (NM_007566.1,5280-5298).
ccatccatctgatgttatt

SEQ ID NO: 615720 - DNA, 19 bp, Mus musculus
  siRNA target sequence for Birc6 (NM_007566.1,5349-5367).
gcccaacgaagctgtttct

SEQ ID NO: 615721 - DNA, 19 bp, Mus musculus
  siRNA target sequence for Birc6 (NM_007566.1,5351-5369).
ccaacgaagctgtttctgt

SEQ ID NO: 615722 - DNA, 19 bp, Mus musculus
  siRNA target sequence for Birc6 (NM_007566.1,5381-5399).
ctgagcttgcccagctttt

SEQ ID NO: 615723 - DNA, 19 bp, Mus musculus
  siRNA target sequence for Birc6 (NM_007566.1,5400-5418).
cccaggctcagtcattgat

SEQ ID NO: 615724 - DNA, 19 bp, Mus musculus
  siRNA target sequence for Birc6 (NM_007566.1,5448-5466).
caaaaactccagcaaatct

SEQ ID NO: 615725 - DNA, 19 bp, Mus musculus
  siRNA target sequence for Birc6 (NM_007566.1,5493-5511).
ggcccttgcaatttctcat

SEQ ID NO: 615726 - DNA, 19 bp, Mus musculus
  siRNA target sequence for Birc6 (NM_007566.1,5587-5605).
gtcaccctggattttggaa

SEQ ID NO: 615727 - DNA, 19 bp, Mus musculus
  siRNA target sequence for Birc6 (NM_007566.1,5647-5665).
gacttggcgtctttatcaa

SEQ ID NO: 615728 - DNA, 19 bp, Mus musculus
  siRNA target sequence for Birc6 (NM_007566.1,5649-5667).
cttggcgtctttatcaatt

SEQ ID NO: 615729 - DNA, 19 bp, Mus musculus
  siRNA target sequence for Birc6 (NM_007566.1,5653-5671).
gcgtctttatcaattgaca

SEQ ID NO: 615730 - DNA, 19 bp, Mus musculus
  siRNA target sequence for Birc6 (NM_007566.1,5654-5672).
cgtctttatcaattgacat

SEQ ID NO: 615731 - DNA, 19 bp, Mus musculus
  siRNA target sequence for Birc6 (NM_007566.1,5655-5673).
gtctttatcaattgacata

SEQ ID NO: 615732 - DNA, 19 bp, Mus musculus
  siRNA target sequence for Birc6 (NM_007566.1,5710-5728).
gttgtggcaactgatatca

SEQ ID NO: 615733 - DNA, 19 bp, Mus musculus
  siRNA target sequence for Birc6 (NM_007566.1,5713-5731).
gtggcaactgatatcagta

SEQ ID NO: 615734 - DNA, 19 bp, Mus musculus
  siRNA target sequence for Birc6 (NM_007566.1,5727-5745).
cagtactcattcactaatt

SEQ ID NO: 615735 - DNA, 19 bp, Mus musculus
  siRNA target sequence for Birc6 (NM_007566.1,5767-5785).
cctgtatgcagattcatga

SEQ ID NO: 615736 - DNA, 19 bp, Mus musculus
  siRNA target sequence for Birc6 (NM_007566.1,5794-5812).
gtcattggacgctatggaa

SEQ ID NO: 615737 - DNA, 19 bp, Mus musculus
  siRNA target sequence for Birc6 (NM_007566.1,5964-5982).
gatggttgctctacaagaa

SEQ ID NO: 615738 - DNA, 19 bp, Mus musculus
  siRNA target sequence for Birc6 (NM_007566.1,5967-5985).
ggttgctctacaagaagat

SEQ ID NO: 615739 - DNA, 19 bp, Mus musculus
  siRNA target sequence for Birc6 (NM_007566.1,5968-5986).
gttgctctacaagaagata

SEQ ID NO: 615740 - DNA, 19 bp, Mus musculus
  siRNA target sequence for Birc6 (NM_007566.1,5983-6001).
gatatacagtgcagatata

SEQ ID NO: 615741 - DNA, 19 bp, Mus musculus
  siRNA target sequence for Birc6 (NM_007566.1,6043-6061).
gatcttcctccgctcaata

SEQ ID NO: 615742 - DNA, 19 bp, Mus musculus
  siRNA target sequence for Birc6 (NM_007566.1,6053-6071).
cgctcaatagtgctaacaa

SEQ ID NO: 615743 - DNA, 19 bp, Mus musculus
  siRNA target sequence for Birc6 (NM_007566.1,6054-6072).
gctcaatagtgctaacaat

SEQ ID NO: 615744 - DNA, 19 bp, Mus musculus
  siRNA target sequence for Birc6 (NM_007566.1,6065-6083).
ctaacaatgcacagtactt

SEQ ID NO: 615745 - DNA, 19 bp, Mus musculus
  siRNA target sequence for Birc6 (NM_007566.1,6073-6091).
gcacagtactttttgagaa

SEQ ID NO: 615746 - DNA, 19 bp, Mus musculus
  siRNA target sequence for Birc6 (NM_007566.1,6111-6129).
ggaagacagtagagttttt

SEQ ID NO: 615747 - DNA, 19 bp, Mus musculus
  siRNA target sequence for Birc6 (NM_007566.1,6122-6140).
gagttttttctgcttatca

SEQ ID NO: 615748 - DNA, 19 bp, Mus musculus
  siRNA target sequence for Birc6 (NM_007566.1,6153-6171).
gctacagcttcaattaaat

SEQ ID NO: 615749 - DNA, 19 bp, Mus musculus
  siRNA target sequence for Birc6 (NM_007566.1,6185-6203).
cagtgcagaggctcaaagt

SEQ ID NO: 615750 - DNA, 19 bp, Mus musculus
  siRNA target sequence for Birc6 (NM_007566.1,6211-6229).
ggtgcaagtcggaagttgt

SEQ ID NO: 615751 - DNA, 19 bp, Mus musculus
  siRNA target sequence for Birc6 (NM_007566.1,6212-6230).
gtgcaagtcggaagttgtt

SEQ ID NO: 615752 - DNA, 19 bp, Mus musculus
  siRNA target sequence for Birc6 (NM_007566.1,6214-6232).
gcaagtcggaagttgttga

SEQ ID NO: 615753 - DNA, 19 bp, Mus musculus
  siRNA target sequence for Birc6 (NM_007566.1,6215-6233).
caagtcggaagttgttgaa

SEQ ID NO: 615754 - DNA, 19 bp, Mus musculus
  siRNA target sequence for Birc6 (NM_007566.1,6280-6298).
cagttacgcaccattgtga

SEQ ID NO: 615755 - DNA, 19 bp, Mus musculus
  siRNA target sequence for Birc6 (NM_007566.1,6299-6317).
gatacttactggatacact

SEQ ID NO: 615756 - DNA, 19 bp, Mus musculus
  siRNA target sequence for Birc6 (NM_007566.1,6394-6412).
gaagaactgtttaaacact

SEQ ID NO: 615757 - DNA, 19 bp, Mus musculus
  siRNA target sequence for Birc6 (NM_007566.1,6430-6448).
ccaaagatacggttgcata

SEQ ID NO: 615758 - DNA, 19 bp, Mus musculus
  siRNA target sequence for Birc6 (NM_007566.1,6514-6532).
cttcaggaactgtataatt

SEQ ID NO: 615759 - DNA, 19 bp, Mus musculus
  siRNA target sequence for Birc6 (NM_007566.1,6544-6562).
ctcatcttcccacaagata

SEQ ID NO: 615760 - DNA, 19 bp, Mus musculus
  siRNA target sequence for Birc6 (NM_007566.1,6553-6571).
ccacaagatagggtcttta

SEQ ID NO: 615761 - DNA, 19 bp, Mus musculus
  siRNA target sequence for Birc6 (NM_007566.1,6554-6572).
cacaagatagggtctttat

SEQ ID NO: 615762 - DNA, 19 bp, Mus musculus
  siRNA target sequence for Birc6 (NM_007566.1,6585-6603).
cattggacagcgatcactt

SEQ ID NO: 615763 - DNA, 19 bp, Mus musculus
  siRNA target sequence for Birc6 (NM_007566.1,6589-6607).
ggacagcgatcacttagta

SEQ ID NO: 615764 - DNA, 19 bp, Mus musculus
  siRNA target sequence for Birc6 (NM_007566.1,6592-6610).
cagcgatcacttagtaaca

SEQ ID NO: 615765 - DNA, 19 bp, Mus musculus
  siRNA target sequence for Birc6 (NM_007566.1,6594-6612).
gcgatcacttagtaacagt

SEQ ID NO: 615766 - DNA, 19 bp, Mus musculus
  siRNA target sequence for Birc6 (NM_007566.1,6741-6759).
gtccaggttactggattat

SEQ ID NO: 615767 - DNA, 19 bp, Mus musculus
  siRNA target sequence for Birc6 (NM_007566.1,6818-6836).
ggagttttattaacaataa

SEQ ID NO: 615768 - DNA, 19 bp, Mus musculus
  siRNA target sequence for Birc6 (NM_007566.1,6821-6839).
gttttattaacaataatct

SEQ ID NO: 615769 - DNA, 19 bp, Mus musculus
  siRNA target sequence for Birc6 (NM_007566.1,6840-6858).
gcatactcagaacttaaat

SEQ ID NO: 615770 - DNA, 19 bp, Mus musculus
  siRNA target sequence for Birc6 (NM_007566.1,6874-6892).
ggcagtagcctcgatagat

SEQ ID NO: 615771 - DNA, 19 bp, Mus musculus
  siRNA target sequence for Birc6 (NM_007566.1,6875-6893).
gcagtagcctcgatagatt

SEQ ID NO: 615772 - DNA, 19 bp, Mus musculus
  siRNA target sequence for Birc6 (NM_007566.1,6876-6894).
cagtagcctcgatagatta

SEQ ID NO: 615773 - DNA, 19 bp, Mus musculus
  siRNA target sequence for Birc6 (NM_007566.1,6883-6901).
ctcgatagattatattcca

SEQ ID NO: 615774 - DNA, 19 bp, Mus musculus
  siRNA target sequence for Birc6 (NM_007566.1,6925-6943).
catcataagcagcaactta

SEQ ID NO: 615775 - DNA, 19 bp, Mus musculus
  siRNA target sequence for Birc6 (NM_007566.1,7004-7022).
gtaacaaaggctcatcata

SEQ ID NO: 615776 - DNA, 19 bp, Mus musculus
  siRNA target sequence for Birc6 (NM_007566.1,7054-7072).
caggcgacctccaagcatt

SEQ ID NO: 615777 - DNA, 19 bp, Mus musculus
  siRNA target sequence for Birc6 (NM_007566.1,7056-7074).
ggcgacctccaagcatttt

SEQ ID NO: 615778 - DNA, 19 bp, Mus musculus
  siRNA target sequence for Birc6 (NM_007566.1,7057-7075).
gcgacctccaagcatttta

SEQ ID NO: 615779 - DNA, 19 bp, Mus musculus
  siRNA target sequence for Birc6 (NM_007566.1,7105-7123).
gaatggtctcgttctaatt

SEQ ID NO: 615780 - DNA, 19 bp, Mus musculus
  siRNA target sequence for Birc6 (NM_007566.1,7109-7127).
ggtctcgttctaatttaga

SEQ ID NO: 615781 - DNA, 19 bp, Mus musculus
  siRNA target sequence for Birc6 (NM_007566.1,7186-7204).
gcccatgaccgttgtatct

SEQ ID NO: 615782 - DNA, 19 bp, Mus musculus
  siRNA target sequence for Birc6 (NM_007566.1,7199-7217).
gtatctcagtagtgcaaaa

SEQ ID NO: 615783 - DNA, 19 bp, Mus musculus
  siRNA target sequence for Birc6 (NM_007566.1,7255-7273).
catgcagacctcttactgt

SEQ ID NO: 615784 - DNA, 19 bp, Mus musculus
  siRNA target sequence for Birc6 (NM_007566.1,7285-7303).
gttcttgcacgcattgcaa

SEQ ID NO: 615785 - DNA, 19 bp, Mus musculus
  siRNA target sequence for Birc6 (NM_007566.1,7307-7325).
cgaccaggccaactattca

SEQ ID NO: 615786 - DNA, 19 bp, Mus musculus
  siRNA target sequence for Birc6 (NM_007566.1,7308-7326).
gaccaggccaactattcat

SEQ ID NO: 615787 - DNA, 19 bp, Mus musculus
  siRNA target sequence for Birc6 (NM_007566.1,7310-7328).
ccaggccaactattcatct

SEQ ID NO: 615788 - DNA, 19 bp, Mus musculus
  siRNA target sequence for Birc6 (NM_007566.1,7341-7359).
gaatgagccgcagttagaa

SEQ ID NO: 615789 - DNA, 19 bp, Mus musculus
  siRNA target sequence for Birc6 (NM_007566.1,7351-7369).
cagttagaaagactgttat

SEQ ID NO: 615790 - DNA, 19 bp, Mus musculus
  siRNA target sequence for Birc6 (NM_007566.1,7584-7602).
gctggaaaccatagatgaa

SEQ ID NO: 615791 - DNA, 19 bp, Mus musculus
  siRNA target sequence for Birc6 (NM_007566.1,7738-7756).
cttgcagccaaagttttta

SEQ ID NO: 615792 - DNA, 19 bp, Mus musculus
  siRNA target sequence for Birc6 (NM_007566.1,7782-7800).
ctactggggtgctgattat

SEQ ID NO: 615793 - DNA, 19 bp, Mus musculus
  siRNA target sequence for Birc6 (NM_007566.1,7792-7810).
gctgattatggtacctata

SEQ ID NO: 615794 - DNA, 19 bp, Mus musculus
  siRNA target sequence for Birc6 (NM_007566.1,7793-7811).
ctgattatggtacctataa

SEQ ID NO: 615795 - DNA, 19 bp, Mus musculus
  siRNA target sequence for Birc6 (NM_007566.1,7795-7813).
gattatggtacctataatt

SEQ ID NO: 615796 - DNA, 19 bp, Mus musculus
  siRNA target sequence for Birc6 (NM_007566.1,7805-7823).
cctataattataatcctta

SEQ ID NO: 615797 - DNA, 19 bp, Mus musculus
  siRNA target sequence for Birc6 (NM_007566.1,7836-7854).
ggggatgcctgtagcaaaa

SEQ ID NO: 615798 - DNA, 19 bp, Mus musculus
  siRNA target sequence for Birc6 (NM_007566.1,7901-7919).
cggtgtctcaggctttaga

SEQ ID NO: 615799 - DNA, 19 bp, Mus musculus
  siRNA target sequence for Birc6 (NM_007566.1,7957-7975).
cttatgttgaaaatgatgt

SEQ ID NO: 615800 - DNA, 19 bp, Mus musculus
  siRNA target sequence for Birc6 (NM_007566.1,7998-8016).
cttacaagcattaacaaat

SEQ ID NO: 615801 - DNA, 19 bp, Mus musculus
  siRNA target sequence for Birc6 (NM_007566.1,8120-8138).
ctgtcccaatgttaaatgt

SEQ ID NO: 615802 - DNA, 19 bp, Mus musculus
  siRNA target sequence for Birc6 (NM_007566.1,8137-8155).
gtttgtttcaataaactct

SEQ ID NO: 615803 - DNA, 19 bp, Mus musculus
  siRNA target sequence for Birc6 (NM_007566.1,8208-8226).
gctcacattgagccttaat

SEQ ID NO: 615804 - DNA, 19 bp, Mus musculus
  siRNA target sequence for Birc6 (NM_007566.1,8217-8235).
gagccttaattctagttca

SEQ ID NO: 615805 - DNA, 19 bp, Mus musculus
  siRNA target sequence for Birc6 (NM_007566.1,8220-8238).
ccttaattctagttcatca

SEQ ID NO: 615806 - DNA, 19 bp, Mus musculus
  siRNA target sequence for Birc6 (NM_007566.1,8337-8355).
gctagcttggtatccaaat

SEQ ID NO: 615807 - DNA, 19 bp, Mus musculus
  siRNA target sequence for Birc6 (NM_007566.1,8338-8356).
ctagcttggtatccaaata

SEQ ID NO: 615808 - DNA, 19 bp, Mus musculus
  siRNA target sequence for Birc6 (NM_007566.1,8376-8394).
ccttgtgcttcatagctta

SEQ ID NO: 615809 - DNA, 19 bp, Mus musculus
  siRNA target sequence for Birc6 (NM_007566.1,8396-8414).
cactcatgacgaatatgca

SEQ ID NO: 615810 - DNA, 19 bp, Mus musculus
  siRNA target sequence for Birc6 (NM_007566.1,8403-8421).
gacgaatatgcagcttaat

SEQ ID NO: 615811 - DNA, 19 bp, Mus musculus
  siRNA target sequence for Birc6 (NM_007566.1,8406-8424).
gaatatgcagcttaattct

SEQ ID NO: 615812 - DNA, 19 bp, Mus musculus
  siRNA target sequence for Birc6 (NM_007566.1,8429-8447).
ccagcagttctattggaat

SEQ ID NO: 615813 - DNA, 19 bp, Mus musculus
  siRNA target sequence for Birc6 (NM_007566.1,8430-8448).
cagcagttctattggaatt

SEQ ID NO: 615814 - DNA, 19 bp, Mus musculus
  siRNA target sequence for Birc6 (NM_007566.1,8432-8450).
gcagttctattggaattca

SEQ ID NO: 615815 - DNA, 19 bp, Mus musculus
  siRNA target sequence for Birc6 (NM_007566.1,8483-8501).
caaaccttattcatgtgtt

SEQ ID NO: 615816 - DNA, 19 bp, Mus musculus
  siRNA target sequence for Birc6 (NM_007566.1,8488-8506).
cttattcatgtgttagtga

SEQ ID NO: 615817 - DNA, 19 bp, Mus musculus
  siRNA target sequence for Birc6 (NM_007566.1,8597-8615).
cccgactacaagtgcattt

SEQ ID NO: 615818 - DNA, 19 bp, Mus musculus
  siRNA target sequence for Birc6 (NM_007566.1,8599-8617).
cgactacaagtgcatttgt

SEQ ID NO: 615819 - DNA, 19 bp, Mus musculus
  siRNA target sequence for Birc6 (NM_007566.1,8605-8623).
caagtgcatttgtcttcaa

SEQ ID NO: 615820 - DNA, 19 bp, Mus musculus
  siRNA target sequence for Birc6 (NM_007566.1,8621-8639).
caacatgtccccagatatt

SEQ ID NO: 615821 - DNA, 19 bp, Mus musculus
  siRNA target sequence for Birc6 (NM_007566.1,8642-8660).
gtgaacttttgctcaagtt

SEQ ID NO: 615822 - DNA, 19 bp, Mus musculus
  siRNA target sequence for Birc6 (NM_007566.1,8652-8670).
gctcaagttaattcacata

SEQ ID NO: 615823 - DNA, 19 bp, Mus musculus
  siRNA target sequence for Birc6 (NM_007566.1,8711-8729).
ctcttgatgcccaagtgaa

SEQ ID NO: 615824 - DNA, 19 bp, Mus musculus
  siRNA target sequence for Birc6 (NM_007566.1,8725-8743).
gtgaagctgttagagttta

SEQ ID NO: 615825 - DNA, 19 bp, Mus musculus
  siRNA target sequence for Birc6 (NM_007566.1,8761-8779).
gaagttgtctcagttagta

SEQ ID NO: 615826 - DNA, 19 bp, Mus musculus
  siRNA target sequence for Birc6 (NM_007566.1,8767-8785).
gtctcagttagtacgattt

SEQ ID NO: 615827 - DNA, 19 bp, Mus musculus
  siRNA target sequence for Birc6 (NM_007566.1,8769-8787).
ctcagttagtacgatttct

SEQ ID NO: 615828 - DNA, 19 bp, Mus musculus
  siRNA target sequence for Birc6 (NM_007566.1,8962-8980).
gatcaactcatgtttgatt

SEQ ID NO: 615829 - DNA, 19 bp, Mus musculus
  siRNA target sequence for Birc6 (NM_007566.1,9046-9064).
gtgtccgtgaccaccaata

SEQ ID NO: 615830 - DNA, 19 bp, Mus musculus
  siRNA target sequence for Birc6 (NM_007566.1,9048-9066).
gtccgtgaccaccaataca

SEQ ID NO: 615831 - DNA, 19 bp, Mus musculus
  siRNA target sequence for Birc6 (NM_007566.1,9051-9069).
cgtgaccaccaatacaaca

SEQ ID NO: 615832 - DNA, 19 bp, Mus musculus
  siRNA target sequence for Birc6 (NM_007566.1,9057-9075).
caccaatacaacagatagt

SEQ ID NO: 615833 - DNA, 19 bp, Mus musculus
  siRNA target sequence for Birc6 (NM_007566.1,9059-9077).
ccaatacaacagatagtgt

SEQ ID NO: 615834 - DNA, 19 bp, Mus musculus
  siRNA target sequence for Birc6 (NM_007566.1,9060-9078).
caatacaacagatagtgtt

SEQ ID NO: 615835 - DNA, 19 bp, Mus musculus
  siRNA target sequence for Birc6 (NM_007566.1,9065-9083).
caacagatagtgtttcaga

SEQ ID NO: 615836 - DNA, 19 bp, Mus musculus
  siRNA target sequence for Birc6 (NM_007566.1,9103-9121).
ggcaaagatgtcaatggaa

SEQ ID NO: 615837 - DNA, 19 bp, Mus musculus
  siRNA target sequence for Birc6 (NM_007566.1,9149-9167).
catgtgttgctgacttagt

SEQ ID NO: 615838 - DNA, 19 bp, Mus musculus
  siRNA target sequence for Birc6 (NM_007566.1,9152-9170).
gtgttgctgacttagtctt

SEQ ID NO: 615839 - DNA, 19 bp, Mus musculus
  siRNA target sequence for Birc6 (NM_007566.1,9168-9186).
cttagccaaccagcaaatt

SEQ ID NO: 615840 - DNA, 19 bp, Mus musculus
  siRNA target sequence for Birc6 (NM_007566.1,9227-9245).
gtgccatggcaatgataat

SEQ ID NO: 615841 - DNA, 19 bp, Mus musculus
  siRNA target sequence for Birc6 (NM_007566.1,9248-9266).
gtgcaagtggcttacatct

SEQ ID NO: 615842 - DNA, 19 bp, Mus musculus
  siRNA target sequence for Birc6 (NM_007566.1,9258-9276).
cttacatctcaccaaacat

SEQ ID NO: 615843 - DNA, 19 bp, Mus musculus
  siRNA target sequence for Birc6 (NM_007566.1,9282-9300).
cttccatggtgggttagat

SEQ ID NO: 615844 - DNA, 19 bp, Mus musculus
  siRNA target sequence for Birc6 (NM_007566.1,9293-9311).
ggttagatgccatatcagt

SEQ ID NO: 615845 - DNA, 19 bp, Mus musculus
  siRNA target sequence for Birc6 (NM_007566.1,9294-9312).
gttagatgccatatcagtt

SEQ ID NO: 615846 - DNA, 19 bp, Mus musculus
  siRNA target sequence for Birc6 (NM_007566.1,9308-9326).
cagttggagatggattatt

SEQ ID NO: 615847 - DNA, 19 bp, Mus musculus
  siRNA target sequence for Birc6 (NM_007566.1,9330-9348).
catattgacaacacttagt

SEQ ID NO: 615848 - DNA, 19 bp, Mus musculus
  siRNA target sequence for Birc6 (NM_007566.1,9336-9354).
gacaacacttagtaagaaa

SEQ ID NO: 615849 - DNA, 19 bp, Mus musculus
  siRNA target sequence for Birc6 (NM_007566.1,9434-9452).
ctacttgccagttatctga

SEQ ID NO: 615850 - DNA, 19 bp, Mus musculus
  siRNA target sequence for Birc6 (NM_007566.1,9491-9509).
gtgatgcattgaaagcttt

SEQ ID NO: 615851 - DNA, 19 bp, Mus musculus
  siRNA target sequence for Birc6 (NM_007566.1,9523-9541).
ggagttcagctcatatgca

SEQ ID NO: 615852 - DNA, 19 bp, Mus musculus
  siRNA target sequence for Birc6 (NM_007566.1,9529-9547).
cagctcatatgcaataata

SEQ ID NO: 615853 - DNA, 19 bp, Mus musculus
  siRNA target sequence for Birc6 (NM_007566.1,9576-9594).
cactgcaagaagtatggta

SEQ ID NO: 615854 - DNA, 19 bp, Mus musculus
  siRNA target sequence for Birc6 (NM_007566.1,9580-9598).
gcaagaagtatggtatcaa

SEQ ID NO: 615855 - DNA, 19 bp, Mus musculus
  siRNA target sequence for Birc6 (NM_007566.1,9591-9609).
ggtatcaactattatgaaa

SEQ ID NO: 615856 - DNA, 19 bp, Mus musculus
  siRNA target sequence for Birc6 (NM_007566.1,9685-9703).
gcagaaggaatccataact

SEQ ID NO: 615857 - DNA, 19 bp, Mus musculus
  siRNA target sequence for Birc6 (NM_007566.1,9712-9730).
cttggtaccatcacttcta

SEQ ID NO: 615858 - DNA, 19 bp, Mus musculus
  siRNA target sequence for Birc6 (NM_007566.1,9715-9733).
ggtaccatcacttctagta

SEQ ID NO: 615859 - DNA, 19 bp, Mus musculus
  siRNA target sequence for Birc6 (NM_007566.1,9799-9817).
gctgcttggtcctacatct

SEQ ID NO: 615860 - DNA, 19 bp, Mus musculus
  siRNA target sequence for Birc6 (NM_007566.1,9803-9821).
cttggtcctacatctttct

SEQ ID NO: 615861 - DNA, 19 bp, Mus musculus
  siRNA target sequence for Birc6 (NM_007566.1,9833-9851).
cctggtgtgaccttaccat

SEQ ID NO: 615862 - DNA, 19 bp, Mus musculus
  siRNA target sequence for Birc6 (NM_007566.1,9947-9965).
gtgcagatggtgttaatat

SEQ ID NO: 615863 - DNA, 19 bp, Mus musculus
  siRNA target sequence for Birc6 (NM_007566.1,9995-10013).
gcggtctcacctacataaa

SEQ ID NO: 615864 - DNA, 19 bp, Mus musculus
  siRNA target sequence for Birc6 (NM_007566.1,9996-10014).
cggtctcacctacataaaa

SEQ ID NO: 615865 - DNA, 19 bp, Mus musculus
  siRNA target sequence for Birc6 (NM_007566.1,9997-10015).
ggtctcacctacataaaaa

SEQ ID NO: 615866 - DNA, 19 bp, Mus musculus
  siRNA target sequence for Birc6 (NM_007566.1,9998-10016).
gtctcacctacataaaaat

SEQ ID NO: 615867 - DNA, 19 bp, Mus musculus
  siRNA target sequence for Birc6 (NM_007566.1,10087-10105).
ctaggcctctcacagatta

SEQ ID NO: 615868 - DNA, 19 bp, Mus musculus
  siRNA target sequence for Birc6 (NM_007566.1,10091-10109).
gcctctcacagattaaatt

SEQ ID NO: 615869 - DNA, 19 bp, Mus musculus
  siRNA target sequence for Birc6 (NM_007566.1,10095-10113).
ctcacagattaaattatta

SEQ ID NO: 615870 - DNA, 19 bp, Mus musculus
  siRNA target sequence for Birc6 (NM_007566.1,10114-10132).
ggccttactgcttttggta

SEQ ID NO: 615871 - DNA, 19 bp, Mus musculus
  siRNA target sequence for Birc6 (NM_007566.1,10137-10155).
ctcatcagccacagttaat

SEQ ID NO: 615872 - DNA, 19 bp, Mus musculus
  siRNA target sequence for Birc6 (NM_007566.1,10168-10186).
ccatctgaagatcaagttt

SEQ ID NO: 615873 - DNA, 19 bp, Mus musculus
  siRNA target sequence for Birc6 (NM_007566.1,10202-10220).
gatggttacggttattaca

SEQ ID NO: 615874 - DNA, 19 bp, Mus musculus
  siRNA target sequence for Birc6 (NM_007566.1,10206-10224).
gttacggttattacatcat

SEQ ID NO: 615875 - DNA, 19 bp, Mus musculus
  siRNA target sequence for Birc6 (NM_007566.1,10219-10237).
catcattgccttacacata

SEQ ID NO: 615876 - DNA, 19 bp, Mus musculus
  siRNA target sequence for Birc6 (NM_007566.1,10226-10244).
gccttacacatataagtga

SEQ ID NO: 615877 - DNA, 19 bp, Mus musculus
  siRNA target sequence for Birc6 (NM_007566.1,10227-10245).
ccttacacatataagtgat

SEQ ID NO: 615878 - DNA, 19 bp, Mus musculus
  siRNA target sequence for Birc6 (NM_007566.1,10232-10250).
cacatataagtgatctaga

SEQ ID NO: 615879 - DNA, 19 bp, Mus musculus
  siRNA target sequence for Birc6 (NM_007566.1,10298-10316).
cttgtgctgccttactgat

SEQ ID NO: 615880 - DNA, 19 bp, Mus musculus
  siRNA target sequence for Birc6 (NM_007566.1,10321-10339).
ccatactgtgggatgcatt

SEQ ID NO: 615881 - DNA, 19 bp, Mus musculus
  siRNA target sequence for Birc6 (NM_007566.1,10332-10350).
gatgcattcccccaacatt

SEQ ID NO: 615882 - DNA, 19 bp, Mus musculus
  siRNA target sequence for Birc6 (NM_007566.1,10372-10390).
gggttgcagtccactagaa

SEQ ID NO: 615883 - DNA, 19 bp, Mus musculus
  siRNA target sequence for Birc6 (NM_007566.1,10374-10392).
gttgcagtccactagaatt

SEQ ID NO: 615884 - DNA, 19 bp, Mus musculus
  siRNA target sequence for Birc6 (NM_007566.1,10393-10411).
ggcctgaagcttattgaca

SEQ ID NO: 615885 - DNA, 19 bp, Mus musculus
  siRNA target sequence for Birc6 (NM_007566.1,10394-10412).
gcctgaagcttattgacat

SEQ ID NO: 615886 - DNA, 19 bp, Mus musculus
  siRNA target sequence for Birc6 (NM_007566.1,10395-10413).
cctgaagcttattgacatt

SEQ ID NO: 615887 - DNA, 19 bp, Mus musculus
  siRNA target sequence for Birc6 (NM_007566.1,10438-10456).
ggcagcgatcctacagatt

SEQ ID NO: 615888 - DNA, 19 bp, Mus musculus
  siRNA target sequence for Birc6 (NM_007566.1,10439-10457).
gcagcgatcctacagattt

SEQ ID NO: 615889 - DNA, 19 bp, Mus musculus
  siRNA target sequence for Birc6 (NM_007566.1,10440-10458).
cagcgatcctacagattta

SEQ ID NO: 615890 - DNA, 19 bp, Mus musculus
  siRNA target sequence for Birc6 (NM_007566.1,10442-10460).
gcgatcctacagatttaaa

SEQ ID NO: 615891 - DNA, 19 bp, Mus musculus
  siRNA target sequence for Birc6 (NM_007566.1,10443-10461).
cgatcctacagatttaaat

SEQ ID NO: 615892 - DNA, 19 bp, Mus musculus
  siRNA target sequence for Birc6 (NM_007566.1,10444-10462).
gatcctacagatttaaata

SEQ ID NO: 615893 - DNA, 19 bp, Mus musculus
  siRNA target sequence for Birc6 (NM_007566.1,10492-10510).
ctgtcctctgattctacaa

SEQ ID NO: 615894 - DNA, 19 bp, Mus musculus
  siRNA target sequence for Birc6 (NM_007566.1,10494-10512).
gtcctctgattctacaata

SEQ ID NO: 615895 - DNA, 19 bp, Mus musculus
  siRNA target sequence for Birc6 (NM_007566.1,10496-10514).
cctctgattctacaataga

SEQ ID NO: 615896 - DNA, 19 bp, Mus musculus
  siRNA target sequence for Birc6 (NM_007566.1,10497-10515).
ctctgattctacaatagat

SEQ ID NO: 615897 - DNA, 19 bp, Mus musculus
  siRNA target sequence for Birc6 (NM_007566.1,10499-10517).
ctgattctacaatagatat

SEQ ID NO: 615898 - DNA, 19 bp, Mus musculus
  siRNA target sequence for Birc6 (NM_007566.1,10508-10526).
caatagatattctttacca

SEQ ID NO: 615899 - DNA, 19 bp, Mus musculus
  siRNA target sequence for Birc6 (NM_007566.1,10538-10556).
ctcaggatcctggaactaa

SEQ ID NO: 615900 - DNA, 19 bp, Mus musculus
  siRNA target sequence for Birc6 (NM_007566.1,10624-10642).
ggcagaatgaactatatgt

SEQ ID NO: 615901 - DNA, 19 bp, Mus musculus
  siRNA target sequence for Birc6 (NM_007566.1,10770-10788).
ccgagagctctttgagtta

SEQ ID NO: 615902 - DNA, 19 bp, Mus musculus
  siRNA target sequence for Birc6 (NM_007566.1,10777-10795).
ctctttgagttacttttta

SEQ ID NO: 615903 - DNA, 19 bp, Mus musculus
  siRNA target sequence for Birc6 (NM_007566.1,10813-10831).
ccatgcaacgtggttttga

SEQ ID NO: 615904 - DNA, 19 bp, Mus musculus
  siRNA target sequence for Birc6 (NM_007566.1,10814-10832).
catgcaacgtggttttgaa

SEQ ID NO: 615905 - DNA, 19 bp, Mus musculus
  siRNA target sequence for Birc6 (NM_007566.1,10856-10874).
gctccatgtgccatataca

SEQ ID NO: 615906 - DNA, 19 bp, Mus musculus
  siRNA target sequence for Birc6 (NM_007566.1,10863-10881).
gtgccatatacatccaaat

SEQ ID NO: 615907 - DNA, 19 bp, Mus musculus
  siRNA target sequence for Birc6 (NM_007566.1,10924-10942).
ccggtgcagtgtcatcata

SEQ ID NO: 615908 - DNA, 19 bp, Mus musculus
  siRNA target sequence for Birc6 (NM_007566.1,10926-10944).
ggtgcagtgtcatcataga

SEQ ID NO: 615909 - DNA, 19 bp, Mus musculus
  siRNA target sequence for Birc6 (NM_007566.1,10929-10947).
gcagtgtcatcatagacta

SEQ ID NO: 615910 - DNA, 19 bp, Mus musculus
  siRNA target sequence for Birc6 (NM_007566.1,10945-10963).
ctatccatgacagatgata

SEQ ID NO: 615911 - DNA, 19 bp, Mus musculus
  siRNA target sequence for Birc6 (NM_007566.1,10949-10967).
ccatgacagatgatagcaa

SEQ ID NO: 615912 - DNA, 19 bp, Mus musculus
  siRNA target sequence for Birc6 (NM_007566.1,10971-10989).
gcaagatcttagttcatca

SEQ ID NO: 615913 - DNA, 19 bp, Mus musculus
  siRNA target sequence for Birc6 (NM_007566.1,10992-11010).
gacagatgactccaaaaat

SEQ ID NO: 615914 - DNA, 19 bp, Mus musculus
  siRNA target sequence for Birc6 (NM_007566.1,11047-11065).
gcaactcttgcttcttctt

SEQ ID NO: 615915 - DNA, 19 bp, Mus musculus
  siRNA target sequence for Birc6 (NM_007566.1,11070-11088).
gtccccagaagctatcaaa

SEQ ID NO: 615916 - DNA, 19 bp, Mus musculus
  siRNA target sequence for Birc6 (NM_007566.1,11072-11090).
ccccagaagctatcaaaca

SEQ ID NO: 615917 - DNA, 19 bp, Mus musculus
  siRNA target sequence for Birc6 (NM_007566.1,11124-11142).
gaggagtctggctagcttt

SEQ ID NO: 615918 - DNA, 19 bp, Mus musculus
  siRNA target sequence for Birc6 (NM_007566.1,11135-11153).
ctagcttttgttttagtca

SEQ ID NO: 615919 - DNA, 19 bp, Mus musculus
  siRNA target sequence for Birc6 (NM_007566.1,11172-11190).
cattgcccagtcagtagat

SEQ ID NO: 615920 - DNA, 19 bp, Mus musculus
  siRNA target sequence for Birc6 (NM_007566.1,11176-11194).
gcccagtcagtagataatt

SEQ ID NO: 615921 - DNA, 19 bp, Mus musculus
  siRNA target sequence for Birc6 (NM_007566.1,11220-11238).
cgttccacagcactgtaat

SEQ ID NO: 615922 - DNA, 19 bp, Mus musculus
  siRNA target sequence for Birc6 (NM_007566.1,11266-11284).
gctcccatccttaggtttt

SEQ ID NO: 615923 - DNA, 19 bp, Mus musculus
  siRNA target sequence for Birc6 (NM_007566.1,11269-11287).
cccatccttaggtttttga

SEQ ID NO: 615924 - DNA, 19 bp, Mus musculus
  siRNA target sequence for Birc6 (NM_007566.1,11286-11304).
gacagaagttggcaatagt

SEQ ID NO: 615925 - DNA, 19 bp, Mus musculus
  siRNA target sequence for Birc6 (NM_007566.1,11293-11311).
gttggcaatagtcatatca

SEQ ID NO: 615926 - DNA, 19 bp, Mus musculus
  siRNA target sequence for Birc6 (NM_007566.1,11296-11314).
ggcaatagtcatatcatga

SEQ ID NO: 615927 - DNA, 19 bp, Mus musculus
  siRNA target sequence for Birc6 (NM_007566.1,11297-11315).
gcaatagtcatatcatgaa

SEQ ID NO: 615928 - DNA, 19 bp, Mus musculus
  siRNA target sequence for Birc6 (NM_007566.1,11351-11369).
ggacagcacttctgttttt

SEQ ID NO: 615929 - DNA, 19 bp, Mus musculus
  siRNA target sequence for Birc6 (NM_007566.1,11387-11405).
ctaccgctggaggacataa

SEQ ID NO: 615930 - DNA, 19 bp, Mus musculus
  siRNA target sequence for Birc6 (NM_007566.1,11390-11408).
ccgctggaggacataattt

SEQ ID NO: 615931 - DNA, 19 bp, Mus musculus
  siRNA target sequence for Birc6 (NM_007566.1,11391-11409).
cgctggaggacataattta

SEQ ID NO: 615932 - DNA, 19 bp, Mus musculus
  siRNA target sequence for Birc6 (NM_007566.1,11601-11619).
gggtagccttccaacatct

SEQ ID NO: 615933 - DNA, 19 bp, Mus musculus
  siRNA target sequence for Birc6 (NM_007566.1,11634-11652).
gtttgtgcgaagactgttt

SEQ ID NO: 615934 - DNA, 19 bp, Mus musculus
  siRNA target sequence for Birc6 (NM_007566.1,11645-11663).
gactgtttctacagttgat

SEQ ID NO: 615935 - DNA, 19 bp, Mus musculus
  siRNA target sequence for Birc6 (NM_007566.1,11745-11763).
catccaacacccaatgttt

SEQ ID NO: 615936 - DNA, 19 bp, Mus musculus
  siRNA target sequence for Birc6 (NM_007566.1,11767-11785).
gcaggccataagtttcgta

SEQ ID NO: 615937 - DNA, 19 bp, Mus musculus
  siRNA target sequence for Birc6 (NM_007566.1,11824-11842).
cttgatagagtttcagata

SEQ ID NO: 615938 - DNA, 19 bp, Mus musculus
  siRNA target sequence for Birc6 (NM_007566.1,11849-11867).
gtatcacagctaaacttat

SEQ ID NO: 615939 - DNA, 19 bp, Mus musculus
  siRNA target sequence for Birc6 (NM_007566.1,11920-11938).
gttaaggcggaaaatggat

SEQ ID NO: 615940 - DNA, 19 bp, Mus musculus
  siRNA target sequence for Birc6 (NM_007566.1,11935-11953).
ggatttcaggataactaca

SEQ ID NO: 615941 - DNA, 19 bp, Mus musculus
  siRNA target sequence for Birc6 (NM_007566.1,11972-11990).
ggctgaaatcacagtctaa

SEQ ID NO: 615942 - DNA, 19 bp, Mus musculus
  siRNA target sequence for Birc6 (NM_007566.1,12099-12117).
caccgtgcccgtgtttcat

SEQ ID NO: 615943 - DNA, 19 bp, Mus musculus
  siRNA target sequence for Birc6 (NM_007566.1,12101-12119).
ccgtgcccgtgtttcatct

SEQ ID NO: 615944 - DNA, 19 bp, Mus musculus
  siRNA target sequence for Birc6 (NM_007566.1,12212-12230).
gttaccgttcaatagatct

SEQ ID NO: 615945 - DNA, 19 bp, Mus musculus
  siRNA target sequence for Birc6 (NM_007566.1,12216-12234).
ccgttcaatagatcttact

SEQ ID NO: 615946 - DNA, 19 bp, Mus musculus
  siRNA target sequence for Birc6 (NM_007566.1,12218-12236).
gttcaatagatcttactgt

SEQ ID NO: 615947 - DNA, 19 bp, Mus musculus
  siRNA target sequence for Birc6 (NM_007566.1,12233-12251).
ctgttaaattgggatcaaa

SEQ ID NO: 615948 - DNA, 19 bp, Mus musculus
  siRNA target sequence for Birc6 (NM_007566.1,12262-12280).
gatccaagtttgtcaaaaa

SEQ ID NO: 615949 - DNA, 19 bp, Mus musculus
  siRNA target sequence for Birc6 (NM_007566.1,12382-12400).
ggagtattggatgaatctt

SEQ ID NO: 615950 - DNA, 19 bp, Mus musculus
  siRNA target sequence for Birc6 (NM_007566.1,12383-12401).
gagtattggatgaatcttt

SEQ ID NO: 615951 - DNA, 19 bp, Mus musculus
  siRNA target sequence for Birc6 (NM_007566.1,12416-12434).
ctattcagtcaccattaca

SEQ ID NO: 615952 - DNA, 19 bp, Mus musculus
  siRNA target sequence for Birc6 (NM_007566.1,12423-12441).
gtcaccattacaagttttt

SEQ ID NO: 615953 - DNA, 19 bp, Mus musculus
  siRNA target sequence for Birc6 (NM_007566.1,12450-12468).
gggtggactggctcttatt

SEQ ID NO: 615954 - DNA, 19 bp, Mus musculus
  siRNA target sequence for Birc6 (NM_007566.1,12486-12504).
gctctatccagaagtgatt

SEQ ID NO: 615955 - DNA, 19 bp, Mus musculus
  siRNA target sequence for Birc6 (NM_007566.1,12530-12548).
cttccaccactcaggaaaa

SEQ ID NO: 615956 - DNA, 19 bp, Mus musculus
  siRNA target sequence for Birc6 (NM_007566.1,12593-12611).
caggtgaactggtttatga

SEQ ID NO: 615957 - DNA, 19 bp, Mus musculus
  siRNA target sequence for Birc6 (NM_007566.1,12636-12654).
gcctccacctgttaagtca

SEQ ID NO: 615958 - DNA, 19 bp, Mus musculus
  siRNA target sequence for Birc6 (NM_007566.1,12691-12709).
ctggctgcttttggattat

SEQ ID NO: 615959 - DNA, 19 bp, Mus musculus
  siRNA target sequence for Birc6 (NM_007566.1,12780-12798).
ggtgttgggagttacagat

SEQ ID NO: 615960 - DNA, 19 bp, Mus musculus
  siRNA target sequence for Birc6 (NM_007566.1,12864-12882).
cgttcttcgcagcttgttt

SEQ ID NO: 615961 - DNA, 19 bp, Mus musculus
  siRNA target sequence for Birc6 (NM_007566.1,12865-12883).
gttcttcgcagcttgttta

SEQ ID NO: 615962 - DNA, 19 bp, Mus musculus
  siRNA target sequence for Birc6 (NM_007566.1,12942-12960).
cggagctttgcacctaatt

SEQ ID NO: 615963 - DNA, 19 bp, Mus musculus
  siRNA target sequence for Birc6 (NM_007566.1,12944-12962).
gagctttgcacctaattct

SEQ ID NO: 615964 - DNA, 19 bp, Mus musculus
  siRNA target sequence for Birc6 (NM_007566.1,12994-13012).
ccgcgagttccaaactcta

SEQ ID NO: 615965 - DNA, 19 bp, Mus musculus
  siRNA target sequence for Birc6 (NM_007566.1,13025-13043).
ctgagccgcaggtgtcaaa

SEQ ID NO: 615966 - DNA, 19 bp, Mus musculus
  siRNA target sequence for Birc6 (NM_007566.1,13134-13152).
cgtggaacaagccttaact

SEQ ID NO: 615967 - DNA, 19 bp, Mus musculus
  siRNA target sequence for Birc6 (NM_007566.1,13135-13153).
gtggaacaagccttaacta

SEQ ID NO: 615968 - DNA, 19 bp, Mus musculus
  siRNA target sequence for Birc6 (NM_007566.1,13137-13155).
ggaacaagccttaactaaa

SEQ ID NO: 615969 - DNA, 19 bp, Mus musculus
  siRNA target sequence for Birc6 (NM_007566.1,13194-13212).
ggtccttgcgagttacata

SEQ ID NO: 615970 - DNA, 19 bp, Mus musculus
  siRNA target sequence for Birc6 (NM_007566.1,13195-13213).
gtccttgcgagttacataa

SEQ ID NO: 615971 - DNA, 19 bp, Mus musculus
  siRNA target sequence for Birc6 (NM_007566.1,13218-13236).
catgagtggtgctgtcaat

SEQ ID NO: 615972 - DNA, 19 bp, Mus musculus
  siRNA target sequence for Birc6 (NM_007566.1,13452-13470).
gttgttgcctctttctaca

SEQ ID NO: 615973 - DNA, 19 bp, Mus musculus
  siRNA target sequence for Birc6 (NM_007566.1,13458-13476).
gcctctttctacagagaat

SEQ ID NO: 615974 - DNA, 19 bp, Mus musculus
  siRNA target sequence for Birc6 (NM_007566.1,13566-13584).
caaccgcctaagatctaaa

SEQ ID NO: 615975 - DNA, 19 bp, Mus musculus
  siRNA target sequence for Birc6 (NM_007566.1,13611-13629).
gccggacgcgcctgatcaa

SEQ ID NO: 615976 - DNA, 19 bp, Mus musculus
  siRNA target sequence for Birc6 (NM_007566.1,13613-13631).
cggacgcgcctgatcaaga

SEQ ID NO: 615977 - DNA, 19 bp, Mus musculus
  siRNA target sequence for Birc6 (NM_007566.1,13710-13728).
gcaagccaatcaagaaaaa

SEQ ID NO: 615978 - DNA, 19 bp, Mus musculus
  siRNA target sequence for Birc6 (NM_007566.1,13732-13750).
ctaggtgaatactcaaaga

SEQ ID NO: 615979 - DNA, 19 bp, Mus musculus
  siRNA target sequence for Birc6 (NM_007566.1,13767-13785).
caaacctctgtcagtatta

SEQ ID NO: 615980 - DNA, 19 bp, Mus musculus
  siRNA target sequence for Birc6 (NM_007566.1,13776-13794).
gtcagtattaaaatcactt

SEQ ID NO: 615981 - DNA, 19 bp, Mus musculus
  siRNA target sequence for Birc6 (NM_007566.1,14071-14089).
gcggacaccccctatgcaa

SEQ ID NO: 615982 - DNA, 19 bp, Mus musculus
  siRNA target sequence for Birc6 (NM_007566.1,14072-14090).
cggacaccccctatgcaaa

SEQ ID NO: 615983 - DNA, 19 bp, Mus musculus
  siRNA target sequence for Birc6 (NM_007566.1,14073-14091).
ggacaccccctatgcaaat

SEQ ID NO: 615984 - DNA, 19 bp, Mus musculus
  siRNA target sequence for Birc6 (NM_007566.1,14094-14112).
ctgctttgagtttgatgta

SEQ ID NO: 615985 - DNA, 19 bp, Mus musculus
  siRNA target sequence for Birc6 (NM_007566.1,14096-14114).
gctttgagtttgatgtata

SEQ ID NO: 615986 - DNA, 19 bp, Mus musculus
  siRNA target sequence for Birc6 (NM_007566.1,14135-14153).
gctcacctcctctagtgaa

SEQ ID NO: 615987 - DNA, 19 bp, Mus musculus
  siRNA target sequence for Birc6 (NM_007566.1,14209-14227).
ggcaaggtttgtttaagca

SEQ ID NO: 615988 - DNA, 19 bp, Mus musculus
  siRNA target sequence for Birc6 (NM_007566.1,14268-14286).
ccctcagacatcaagcttt

SEQ ID NO: 615989 - DNA, 19 bp, Mus musculus
  siRNA target sequence for Birc6 (NM_007566.1,14270-14288).
ctcagacatcaagcttttt

SEQ ID NO: 615990 - DNA, 19 bp, Mus musculus
  siRNA target sequence for Birc6 (NM_007566.1,14274-14292).
gacatcaagctttttgcaa

SEQ ID NO: 615991 - DNA, 19 bp, Mus musculus
  siRNA target sequence for Birc6 (NM_007566.1,14323-14341).
gtagctgagccttacttca

SEQ ID NO: 615992 - DNA, 19 bp, Mus musculus
  siRNA target sequence for Birc6 (NM_007566.1,14337-14355).
cttcaatgaaccaggatat

SEQ ID NO: 615993 - DNA, 19 bp, Mus musculus
  siRNA target sequence for Birc6 (NM_007566.1,14384-14402).
cacagagctctcgagaata

SEQ ID NO: 615994 - DNA, 19 bp, Mus musculus
  siRNA target sequence for Birc6 (NM_007566.1,14388-14406).
gagctctcgagaatacgat

SEQ ID NO: 615995 - DNA, 19 bp, Mus musculus
  siRNA target sequence for Birc6 (NM_007566.1,14415-14433).
ccgacaagcaacggttaaa

SEQ ID NO: 615996 - DNA, 19 bp, Mus musculus
  siRNA target sequence for Birc6 (NM_007566.1,14416-14434).
cgacaagcaacggttaaat

SEQ ID NO: 615997 - DNA, 19 bp, Mus musculus
  siRNA target sequence for Birc6 (NM_007566.1,14465-14483).
caccgtgctttaaagaagt

SEQ ID NO: 615998 - DNA, 19 bp, Mus musculus
  siRNA target sequence for Birc6 (NM_007566.1,14658-14676).
ctgccctgaaggcttagat

SEQ ID NO: 615999 - DNA, 19 bp, Mus musculus
  siRNA target sequence for Birc6 (NM_007566.1,14669-14687).
gcttagatccggacattga

SEQ ID NO: 616000 - DNA, 19 bp, Mus musculus
  siRNA target sequence for Birc6 (NM_007566.1,14773-14791).
ctccccagtgacttccaat

SEQ ID NO: 616001 - DNA, 19 bp, Mus musculus
  siRNA target sequence for Birc6 (NM_007566.1,14775-14793).
ccccagtgacttccaatta

SEQ ID NO: 616002 - DNA, 19 bp, Mus musculus
  siRNA target sequence for Birc6 (NM_007566.1,14776-14794).
cccagtgacttccaattat

SEQ ID NO: 616003 - DNA, 19 bp, Mus musculus
  siRNA target sequence for D11Moh35 (NM_172300.2,401-419).
cggattaagcgggatatca

SEQ ID NO: 616004 - DNA, 19 bp, Mus musculus
  siRNA target sequence for D11Moh35 (NM_172300.2,402-420).
ggattaagcgggatatcat

SEQ ID NO: 616005 - DNA, 19 bp, Mus musculus
  siRNA target sequence for D11Moh35 (NM_172300.2,410-428).
cgggatatcatgtccattt

SEQ ID NO: 616006 - DNA, 19 bp, Mus musculus
  siRNA target sequence for D11Moh35 (NM_172300.2,411-429).
gggatatcatgtccattta

SEQ ID NO: 616007 - DNA, 19 bp, Mus musculus
  siRNA target sequence for D11Moh35 (NM_172300.2,469-487).
ctgttgacatgactaagat

SEQ ID NO: 616008 - DNA, 19 bp, Mus musculus
  siRNA target sequence for D11Moh35 (NM_172300.2,579-597).
ccacctcgggtcaaactga

SEQ ID NO: 616009 - DNA, 19 bp, Mus musculus
  siRNA target sequence for D11Moh35 (NM_172300.2,580-598).
cacctcgggtcaaactgat

SEQ ID NO: 616010 - DNA, 19 bp, Mus musculus
  siRNA target sequence for D11Moh35 (NM_172300.2,585-603).
cgggtcaaactgatgacaa

SEQ ID NO: 616011 - DNA, 19 bp, Mus musculus
  siRNA target sequence for D11Moh35 (NM_172300.2,622-640).
ggtttaaccccaacttcta

SEQ ID NO: 616012 - DNA, 19 bp, Mus musculus
  siRNA target sequence for D11Moh35 (NM_172300.2,764-782).
caacgaaccaggctttgaa

SEQ ID NO: 616013 - DNA, 19 bp, Mus musculus
  siRNA target sequence for D11Moh35 (NM_172300.2,914-932).
gtccttcctggagtattat

SEQ ID NO: 616014 - DNA, 19 bp, Mus musculus
  siRNA target sequence for D11Moh35 (NM_172300.2,923-941).
ggagtattatgacttctat

SEQ ID NO: 616015 - DNA, 19 bp, Mus musculus
  siRNA target sequence for D11Moh35 (NM_172300.2,1037-1055).
gatgcgcctcggactgatt

SEQ ID NO: 616016 - DNA, 19 bp, Mus musculus
  siRNA target sequence for D11Moh35 (NM_172300.2,1046-1064).
cggactgattcgacagaaa

SEQ ID NO: 616017 - DNA, 19 bp, Mus musculus
  siRNA target sequence for D11Moh35 (NM_172300.2,1067-1085).
gctggaaaggctccataat

SEQ ID NO: 616018 - DNA, 19 bp, Mus musculus
  siRNA target sequence for D11Moh35 (NM_172300.2,1076-1094).
gctccataatgaaaatgct

SEQ ID NO: 616019 - DNA, 19 bp, Mus musculus
  siRNA target sequence for Fts (NM_010241.1,278-296).
cattagcaggagatgtgaa

SEQ ID NO: 616020 - DNA, 19 bp, Mus musculus
  siRNA target sequence for Fts (NM_010241.1,405-423).
cggcacccatgcctcttat

SEQ ID NO: 616021 - DNA, 19 bp, Mus musculus
  siRNA target sequence for Fts (NM_010241.1,408-426).
cacccatgcctcttatgga

SEQ ID NO: 616022 - DNA, 19 bp, Mus musculus
  siRNA target sequence for Fts (NM_010241.1,425-443).
gacccttctacctggaata

SEQ ID NO: 616023 - DNA, 19 bp, Mus musculus
  siRNA target sequence for Fts (NM_010241.1,530-548).
ggtttggagtaatattcat

SEQ ID NO: 616024 - DNA, 19 bp, Mus musculus
  siRNA target sequence for Fts (NM_010241.1,531-549).
gtttggagtaatattcata

SEQ ID NO: 616025 - DNA, 19 bp, Mus musculus
  siRNA target sequence for Fts (NM_010241.1,587-605).
cggtgtatattcctgataa

SEQ ID NO: 616026 - DNA, 19 bp, Mus musculus
  siRNA target sequence for Fts (NM_010241.1,589-607).
gtgtatattcctgataact

SEQ ID NO: 616027 - DNA, 19 bp, Mus musculus
  siRNA target sequence for Fts (NM_010241.1,625-643).
ccgcgcttgctgtttgata

SEQ ID NO: 616028 - DNA, 19 bp, Mus musculus
  siRNA target sequence for Fts (NM_010241.1,626-644).
cgcgcttgctgtttgatat

SEQ ID NO: 616029 - DNA, 19 bp, Mus musculus
  siRNA target sequence for Fts (NM_010241.1,627-645).
gcgcttgctgtttgatatt

SEQ ID NO: 616030 - DNA, 19 bp, Mus musculus
  siRNA target sequence for Fts (NM_010241.1,678-696).
gggtgagctggatgtgaaa

SEQ ID NO: 616031 - DNA, 19 bp, Mus musculus
  siRNA target sequence for Fts (NM_010241.1,716-734).
ggcggaaccataaccatat

SEQ ID NO: 616032 - DNA, 19 bp, Mus musculus
  siRNA target sequence for Fts (NM_010241.1,717-735).
gcggaaccataaccatata

SEQ ID NO: 616033 - DNA, 19 bp, Mus musculus
  siRNA target sequence for Fts (NM_010241.1,718-736).
cggaaccataaccatatat

SEQ ID NO: 616034 - DNA, 19 bp, Mus musculus
  siRNA target sequence for Fts (NM_010241.1,805-823).
gccgcagtgctgtatgaaa

SEQ ID NO: 616035 - DNA, 19 bp, Mus musculus
  siRNA target sequence for Fts (NM_010241.1,853-871).
gtcgacagtgttaaagtgt

SEQ ID NO: 616036 - DNA, 19 bp, Mus musculus
  siRNA target sequence for Fts (NM_010241.1,870-888).
gtgtactgcccgtcttttt

SEQ ID NO: 616037 - DNA, 19 bp, Mus musculus
  siRNA target sequence for Fts (NM_010241.1,907-925).
gacccctacgccattagct

SEQ ID NO: 616038 - DNA, 19 bp, Mus musculus
  siRNA target sequence for Fts (NM_010241.1,909-927).
cccctacgccattagcttt

SEQ ID NO: 616039 - DNA, 19 bp, Mus musculus
  siRNA target sequence for Fts (NM_010241.1,910-928).
ccctacgccattagctttt

SEQ ID NO: 616040 - DNA, 19 bp, Mus musculus
  siRNA target sequence for Fts (NM_010241.1,912-930).
ctacgccattagcttttct

SEQ ID NO: 616041 - DNA, 19 bp, Mus musculus
  siRNA target sequence for Fts (NM_010241.1,935-953).
ggaacccttctgtacatga

SEQ ID NO: 616042 - DNA, 19 bp, Mus musculus
  siRNA target sequence for Fts (NM_010241.1,999-1017).
gcacaataaaagtgttcat

SEQ ID NO: 616043 - DNA, 19 bp, Mus musculus
  siRNA target sequence for Fts (NM_010241.1,1002-1020).
caataaaagtgttcatgtt

SEQ ID NO: 616044 - DNA, 19 bp, Mus musculus
  siRNA target sequence for Fts (NM_010241.1,1043-1061).
ctggctcagtacaaccttt

SEQ ID NO: 616045 - DNA, 19 bp, Mus musculus
  siRNA target sequence for Gtl6 (NM_133975.2,306-324).
cagccaagacctgaagata

SEQ ID NO: 616046 - DNA, 19 bp, Mus musculus
  siRNA target sequence for Gtl6 (NM_133975.2,308-326).
gccaagacctgaagatagt

SEQ ID NO: 616047 - DNA, 19 bp, Mus musculus
  siRNA target sequence for Gtl6 (NM_133975.2,309-327).
ccaagacctgaagatagta

SEQ ID NO: 616048 - DNA, 19 bp, Mus musculus
  siRNA target sequence for Gtl6 (NM_133975.2,335-353).
ctcttcagatggcagaaat

SEQ ID NO: 616049 - DNA, 19 bp, Mus musculus
  siRNA target sequence for Gtl6 (NM_133975.2,347-365).
cagaaatcctaatgcaaaa

SEQ ID NO: 616050 - DNA, 19 bp, Mus musculus
  siRNA target sequence for Gtl6 (NM_133975.2,360-378).
gcaaaagttacctgatatt

SEQ ID NO: 616051 - DNA, 19 bp, Mus musculus
  siRNA target sequence for Gtl6 (NM_133975.2,366-384).
gttacctgatatttttagt

SEQ ID NO: 616052 - DNA, 19 bp, Mus musculus
  siRNA target sequence for Gtl6 (NM_133975.2,404-422).
gtgtgatgcatcaagtcaa

SEQ ID NO: 616053 - DNA, 19 bp, Mus musculus
  siRNA target sequence for Gtl6 (NM_133975.2,457-475).
ccccccaaggcatgtacaa

SEQ ID NO: 616054 - DNA, 19 bp, Mus musculus
  siRNA target sequence for Gtl6 (NM_133975.2,458-476).
cccccaaggcatgtacaaa

SEQ ID NO: 616055 - DNA, 19 bp, Mus musculus
  siRNA target sequence for Gtl6 (NM_133975.2,600-618).
gagccctcaaggtcgatta

SEQ ID NO: 616056 - DNA, 19 bp, Mus musculus
  siRNA target sequence for Gtl6 (NM_133975.2,603-621).
ccctcaaggtcgattaagt

SEQ ID NO: 616057 - DNA, 19 bp, Mus musculus
  siRNA target sequence for Gtl6 (NM_133975.2,605-623).
ctcaaggtcgattaagtga

SEQ ID NO: 616058 - DNA, 19 bp, Mus musculus
  siRNA target sequence for Gtl6 (NM_133975.2,611-629).
gtcgattaagtgatgttct

SEQ ID NO: 616059 - DNA, 19 bp, Mus musculus
  siRNA target sequence for Gtl6 (NM_133975.2,614-632).
gattaagtgatgttctcaa

SEQ ID NO: 616060 - DNA, 19 bp, Mus musculus
  siRNA target sequence for Gtl6 (NM_133975.2,620-638).
gtgatgttctcaagagaaa

SEQ ID NO: 616061 - DNA, 19 bp, Mus musculus
  siRNA target sequence for Gtl6 (NM_133975.2,655-673).
gggccaagaaggccaaaat

SEQ ID NO: 616062 - DNA, 19 bp, Mus musculus
  siRNA target sequence for Gtl6 (NM_133975.2,657-675).
gccaagaaggccaaaatat

SEQ ID NO: 616063 - DNA, 19 bp, Mus musculus
  siRNA target sequence for Gtl6 (NM_133975.2,683-701).
caagagatgatgacaaagt

SEQ ID NO: 616064 - DNA, 19 bp, Mus musculus
  siRNA target sequence for Gtl6 (NM_133975.2,700-718).
gtagacaatcaagctaaaa

SEQ ID NO: 616065 - DNA, 19 bp, Mus musculus
  siRNA target sequence for Gtl6 (NM_133975.2,726-744).
cactactcagtcacctaaa

SEQ ID NO: 616066 - DNA, 19 bp, Mus musculus
  siRNA target sequence for Gtl6 (NM_133975.2,756-774).
ggcaagcttgaatccaaaa

SEQ ID NO: 616067 - DNA, 19 bp, Mus musculus
  siRNA target sequence for Gtl6 (NM_133975.2,757-775).
gcaagcttgaatccaaaaa

SEQ ID NO: 616068 - DNA, 19 bp, Mus musculus
  siRNA target sequence for Gtl6 (NM_133975.2,796-814).
cagtccaacagcaacaata

SEQ ID NO: 616069 - DNA, 19 bp, Mus musculus
  siRNA target sequence for Gtl6 (NM_133975.2,800-818).
ccaacagcaacaatatcga

SEQ ID NO: 616070 - DNA, 19 bp, Mus musculus
  siRNA target sequence for Gtl6 (NM_133975.2,870-888).
caccatatccaataataga

SEQ ID NO: 616071 - DNA, 19 bp, Mus musculus
  siRNA target sequence for Gtl6 (NM_133975.2,872-890).
ccatatccaataatagaga

SEQ ID NO: 616072 - DNA, 19 bp, Mus musculus
  siRNA target sequence for Gtl6 (NM_133975.2,873-891).
catatccaataatagagaa

SEQ ID NO: 616073 - DNA, 19 bp, Mus musculus
  siRNA target sequence for Gtl6 (NM_133975.2,1040-1058).
gagctgagtgccttgtaga

SEQ ID NO: 616074 - DNA, 19 bp, Mus musculus
  siRNA target sequence for Gtl6 (NM_133975.2,1042-1060).
gctgagtgccttgtagaaa

SEQ ID NO: 616075 - DNA, 19 bp, Mus musculus
  siRNA target sequence for Gtl6 (NM_133975.2,1057-1075).
gaaatccgtagcatagtct

SEQ ID NO: 616076 - DNA, 19 bp, Mus musculus
  siRNA target sequence for Gtl6 (NM_133975.2,1078-1096).
gagtcagatgtttcttcat

SEQ ID NO: 616077 - DNA, 19 bp, Mus musculus
  siRNA target sequence for Gtl6 (NM_133975.2,1112-1130).
gtgggtttgtgaaacaact

SEQ ID NO: 616078 - DNA, 19 bp, Mus musculus
  siRNA target sequence for Gtl6 (NM_133975.2,1115-1133).
ggtttgtgaaacaactgtt

SEQ ID NO: 616079 - DNA, 19 bp, Mus musculus
  siRNA target sequence for Gtl6 (NM_133975.2,1135-1153).
ctgtatttgacatctaaga

SEQ ID NO: 616080 - DNA, 19 bp, Mus musculus
  siRNA target sequence for Gtl6 (NM_133975.2,1137-1155).
gtatttgacatctaagaat

SEQ ID NO: 616081 - DNA, 19 bp, Mus musculus
  siRNA target sequence for Gtl6 (NM_133975.2,1177-1195).
gagatccggttaaaacgtt

SEQ ID NO: 616082 - DNA, 19 bp, Mus musculus
  siRNA target sequence for Gtl6 (NM_133975.2,1182-1200).
ccggttaaaacgtttcctt

SEQ ID NO: 616083 - DNA, 19 bp, Mus musculus
  siRNA target sequence for Gtl6 (NM_133975.2,1285-1303).
gttcacaagatgaacaact

SEQ ID NO: 616084 - DNA, 19 bp, Mus musculus
  siRNA target sequence for Gtl6 (NM_133975.2,1413-1431).
caacacacatcagttaaaa

SEQ ID NO: 616085 - DNA, 19 bp, Mus musculus
  siRNA target sequence for Gtl6 (NM_133975.2,1416-1434).
cacacatcagttaaaatgt

SEQ ID NO: 616086 - DNA, 19 bp, Mus musculus
  siRNA target sequence for Gtl6 (NM_133975.2,1537-1555).
gtggttagaggatatggaa

SEQ ID NO: 616087 - DNA, 19 bp, Mus musculus
  siRNA target sequence for Gtl6 (NM_133975.2,1620-1638).
ggctgctcaattcttaaat

SEQ ID NO: 616088 - DNA, 19 bp, Mus musculus
  siRNA target sequence for Gtl6 (NM_133975.2,1621-1639).
gctgctcaattcttaaatt

SEQ ID NO: 616089 - DNA, 19 bp, Mus musculus
  siRNA target sequence for Gtl6 (NM_133975.2,1632-1650).
cttaaattcgggaaatgta

SEQ ID NO: 616090 - DNA, 19 bp, Mus musculus
  siRNA target sequence for Gtl6 (NM_133975.2,1653-1671).
gcacaggctacagttttat

SEQ ID NO: 616091 - DNA, 19 bp, Mus musculus
  siRNA target sequence for Gtl6 (NM_133975.2,1659-1677).
gctacagttttatattgga

SEQ ID NO: 616092 - DNA, 19 bp, Mus musculus
  siRNA target sequence for Gtl6 (NM_133975.2,1676-1694).
gagaacatttactaccata

SEQ ID NO: 616093 - DNA, 19 bp, Mus musculus
  siRNA target sequence for Gtl6 (NM_133975.2,1711-1729).
caggcagtgcggcaattca

SEQ ID NO: 616094 - DNA, 19 bp, Mus musculus
  siRNA target sequence for Gtl6 (NM_133975.2,1799-1817).
ggacaaagactcatacaat

SEQ ID NO: 616095 - DNA, 19 bp, Mus musculus
  siRNA target sequence for Gtl6 (NM_133975.2,1800-1818).
gacaaagactcatacaata

SEQ ID NO: 616096 - DNA, 19 bp, Mus musculus
  siRNA target sequence for Gtl6 (NM_133975.2,1956-1974).
gtgcccgtcagtagcaaat

SEQ ID NO: 616097 - DNA, 19 bp, Mus musculus
  siRNA target sequence for Gtl6 (NM_133975.2,1959-1977).
cccgtcagtagcaaatcct

SEQ ID NO: 616098 - DNA, 19 bp, Mus musculus
  siRNA target sequence for Gtl6 (NM_133975.2,1961-1979).
cgtcagtagcaaatccttt

SEQ ID NO: 616099 - DNA, 19 bp, Mus musculus
  siRNA target sequence for Gtl6 (NM_133975.2,1962-1980).
gtcagtagcaaatccttta

SEQ ID NO: 616100 - DNA, 19 bp, Mus musculus
  siRNA target sequence for Gtl6 (NM_133975.2,1964-1982).
cagtagcaaatcctttaga

SEQ ID NO: 616101 - DNA, 19 bp, Mus musculus
  siRNA target sequence for Gtl6 (NM_133975.2,1996-2014).
cccacaccacctgaaaata

SEQ ID NO: 616102 - DNA, 19 bp, Mus musculus
  siRNA target sequence for Gtl6 (NM_133975.2,1997-2015).
ccacaccacctgaaaatat

SEQ ID NO: 616103 - DNA, 19 bp, Mus musculus
  siRNA target sequence for Gtl6 (NM_133975.2,2028-2046).
cccatccttagatgtaata

SEQ ID NO: 616104 - DNA, 19 bp, Mus musculus
  siRNA target sequence for Gtl6 (NM_133975.2,2030-2048).
catccttagatgtaatact

SEQ ID NO: 616105 - DNA, 19 bp, Mus musculus
  siRNA target sequence for Gtl6 (NM_133975.2,2033-2051).
ccttagatgtaatacttct

SEQ ID NO: 616106 - DNA, 19 bp, Mus musculus
  siRNA target sequence for Gtl6 (NM_133975.2,2068-2086).
gccatcagtcgatattggt

SEQ ID NO: 616107 - DNA, 19 bp, Mus musculus
  siRNA target sequence for Gtl6 (NM_133975.2,2069-2087).
ccatcagtcgatattggta

SEQ ID NO: 616108 - DNA, 19 bp, Mus musculus
  siRNA target sequence for Gtl6 (NM_133975.2,2077-2095).
cgatattggtattacttgt

SEQ ID NO: 616109 - DNA, 19 bp, Mus musculus
  siRNA target sequence for Gtl6 (NM_133975.2,2078-2096).
gatattggtattacttgta

SEQ ID NO: 616110 - DNA, 19 bp, Mus musculus
  siRNA target sequence for Gtl6 (NM_133975.2,2084-2102).
ggtattacttgtatgataa

SEQ ID NO: 616111 - DNA, 19 bp, Mus musculus
  siRNA target sequence for Gtl6 (NM_133975.2,2085-2103).
gtattacttgtatgataat

SEQ ID NO: 616112 - DNA, 19 bp, Mus musculus
  siRNA target sequence for Gtl6 (NM_133975.2,2104-2122).
gcgatgtgcaaggagatta

SEQ ID NO: 616113 - DNA, 19 bp, Mus musculus
  siRNA target sequence for Gtl6 (NM_133975.2,2105-2123).
cgatgtgcaaggagattat

SEQ ID NO: 616114 - DNA, 19 bp, Mus musculus
  siRNA target sequence for Gtl6 (NM_133975.2,2109-2127).
gtgcaaggagattattcca

SEQ ID NO: 616115 - DNA, 19 bp, Mus musculus
  siRNA target sequence for Gtl6 (NM_133975.2,2126-2144).
caactagtgaatttattaa

SEQ ID NO: 616116 - DNA, 19 bp, Mus musculus
  siRNA target sequence for Gtl6 (NM_133975.2,2165-2183).
caaataggcagcttcaaga

SEQ ID NO: 616117 - DNA, 19 bp, Mus musculus
  siRNA target sequence for Gtl6 (NM_133975.2,2175-2193).
gcttcaagaccctctagta

SEQ ID NO: 616118 - DNA, 19 bp, Mus musculus
  siRNA target sequence for Gtl6 (NM_133975.2,2176-2194).
cttcaagaccctctagtaa

SEQ ID NO: 616119 - DNA, 19 bp, Mus musculus
  siRNA target sequence for Gtl6 (NM_133975.2,2179-2197).
caagaccctctagtaatca

SEQ ID NO: 616120 - DNA, 19 bp, Mus musculus
  siRNA target sequence for Gtl6 (NM_133975.2,2182-2200).
gaccctctagtaatcatga

SEQ ID NO: 616121 - DNA, 19 bp, Mus musculus
  siRNA target sequence for Gtl6 (NM_133975.2,2219-2237).
ggctcactgagctaggaaa

SEQ ID NO: 616122 - DNA, 19 bp, Mus musculus
  siRNA target sequence for Gtl6 (NM_133975.2,2221-2239).
ctcactgagctaggaaaaa

SEQ ID NO: 616123 - DNA, 19 bp, Mus musculus
  siRNA target sequence for Gtl6 (NM_133975.2,2258-2276).
cttttgatacccgacaaat

SEQ ID NO: 616124 - DNA, 19 bp, Mus musculus
  siRNA target sequence for Gtl6 (NM_133975.2,2263-2281).
gatacccgacaaatgcttt

SEQ ID NO: 616125 - DNA, 19 bp, Mus musculus
  siRNA target sequence for Gtl6 (NM_133975.2,2267-2285).
cccgacaaatgctttttta

SEQ ID NO: 616126 - DNA, 19 bp, Mus musculus
  siRNA target sequence for Gtl6 (NM_133975.2,2268-2286).
ccgacaaatgcttttttat

SEQ ID NO: 616127 - DNA, 19 bp, Mus musculus
  siRNA target sequence for Gtl6 (NM_133975.2,2270-2288).
gacaaatgcttttttatgt

SEQ ID NO: 616128 - DNA, 19 bp, Mus musculus
  siRNA target sequence for Gtl6 (NM_133975.2,2302-2320).
cgggaccgggcaatgcaaa

SEQ ID NO: 616129 - DNA, 19 bp, Mus musculus
  siRNA target sequence for Gtl6 (NM_133975.2,2305-2323).
gaccgggcaatgcaaagat

SEQ ID NO: 616130 - DNA, 19 bp, Mus musculus
  siRNA target sequence for Gtl6 (NM_133975.2,2307-2325).
ccgggcaatgcaaagatta

SEQ ID NO: 616131 - DNA, 19 bp, Mus musculus
  siRNA target sequence for Gtl6 (NM_133975.2,2310-2328).
ggcaatgcaaagattactt

SEQ ID NO: 616132 - DNA, 19 bp, Mus musculus
  siRNA target sequence for Gtl6 (NM_133975.2,2346-2364).
caaccagtctgattctcaa

SEQ ID NO: 616133 - DNA, 19 bp, Mus musculus
  siRNA target sequence for Gtl6 (NM_133975.2,2374-2392).
gttgcgcctagattggata

SEQ ID NO: 616134 - DNA, 19 bp, Mus musculus
  siRNA target sequence for Gtl6 (NM_133975.2,2377-2395).
gcgcctagattggatagaa

SEQ ID NO: 616135 - DNA, 19 bp, Mus musculus
  siRNA target sequence for Gtl6 (NM_133975.2,2378-2396).
cgcctagattggatagaaa

SEQ ID NO: 616136 - DNA, 19 bp, Mus musculus
  siRNA target sequence for Gtl6 (NM_133975.2,2379-2397).
gcctagattggatagaaaa

SEQ ID NO: 616137 - DNA, 19 bp, Mus musculus
  siRNA target sequence for Gtl6 (NM_133975.2,2380-2398).
cctagattggatagaaaaa

SEQ ID NO: 616138 - DNA, 19 bp, Mus musculus
  siRNA target sequence for Gtl6 (NM_133975.2,2460-2478).
cagctctcgggccatgtta

SEQ ID NO: 616139 - DNA, 19 bp, Mus musculus
  siRNA target sequence for Gtl6 (NM_133975.2,2462-2480).
gctctcgggccatgttaga

SEQ ID NO: 616140 - DNA, 19 bp, Mus musculus
  siRNA target sequence for Gtl6 (NM_133975.2,2465-2483).
ctcgggccatgttagaaat

SEQ ID NO: 616141 - DNA, 19 bp, Mus musculus
  siRNA target sequence for Gtl6 (NM_133975.2,2468-2486).
gggccatgttagaaatcca

SEQ ID NO: 616142 - DNA, 19 bp, Mus musculus
  siRNA target sequence for Gtl6 (NM_133975.2,2470-2488).
gccatgttagaaatccaat

SEQ ID NO: 616143 - DNA, 19 bp, Mus musculus
  siRNA target sequence for Gtl6 (NM_133975.2,2475-2493).
gttagaaatccaatatgaa

SEQ ID NO: 616144 - DNA, 19 bp, Mus musculus
  siRNA target sequence for Gtl6 (NM_133975.2,2584-2602).
ggtgaagaagtaactctta

SEQ ID NO: 616145 - DNA, 19 bp, Mus musculus
  siRNA target sequence for Gtl6 (NM_133975.2,2693-2711).
ctcacatcgcaaaggttaa

SEQ ID NO: 616146 - DNA, 19 bp, Mus musculus
  siRNA target sequence for Gtl6 (NM_133975.2,2695-2713).
cacatcgcaaaggttaaga

SEQ ID NO: 616147 - DNA, 19 bp, Mus musculus
  siRNA target sequence for Gtl6 (NM_133975.2,2701-2719).
gcaaaggttaagatgaagt

SEQ ID NO: 616148 - DNA, 19 bp, Mus musculus
  siRNA target sequence for Gtl6 (NM_133975.2,2722-2740).
cgcttcttaggaaaattaa

SEQ ID NO: 616149 - DNA, 19 bp, Mus musculus
  siRNA target sequence for Gtl6 (NM_133975.2,2743-2761).
gctaaggctatcatggatt

SEQ ID NO: 616150 - DNA, 19 bp, Mus musculus
  siRNA target sequence for Gtl6 (NM_133975.2,2815-2833).
caggaaacttcattgacat

SEQ ID NO: 616151 - DNA, 19 bp, Mus musculus
  siRNA target sequence for Gtl6 (NM_133975.2,2860-2878).
gttgtagccagatcagtat

SEQ ID NO: 616152 - DNA, 19 bp, Mus musculus
  siRNA target sequence for Gtl6 (NM_133975.2,2934-2952).
gaccaaagagagtctacaa

SEQ ID NO: 616153 - DNA, 19 bp, Mus musculus
  siRNA target sequence for Gtl6 (NM_133975.2,2936-2954).
ccaaagagagtctacaata

SEQ ID NO: 616154 - DNA, 19 bp, Mus musculus
  siRNA target sequence for Gtl6 (NM_133975.2,2937-2955).
caaagagagtctacaatat

SEQ ID NO: 616155 - DNA, 19 bp, Mus musculus
  siRNA target sequence for Gtl6 (NM_133975.2,2957-2975).
cattggaaactcttacgat

SEQ ID NO: 616156 - DNA, 19 bp, Mus musculus
  siRNA target sequence for Gtl6 (NM_133975.2,2961-2979).
ggaaactcttacgatgaat

SEQ ID NO: 616157 - DNA, 19 bp, Mus musculus
  siRNA target sequence for Gtl6 (NM_133975.2,2992-3010).
gaagatctgggattggatt

SEQ ID NO: 616158 - DNA, 19 bp, Mus musculus
  siRNA target sequence for Gtl6 (NM_133975.2,2995-3013).
gatctgggattggatttta

SEQ ID NO: 616159 - DNA, 19 bp, Mus musculus
  siRNA target sequence for Gtl6 (NM_133975.2,3054-3072).
gaaggatattccagttact

SEQ ID NO: 616160 - DNA, 19 bp, Mus musculus
  siRNA target sequence for Gtl6 (NM_133975.2,3105-3123).
gatattctgggcactaaat

SEQ ID NO: 616161 - DNA, 19 bp, Mus musculus
  siRNA target sequence for Gtl6 (NM_133975.2,3130-3148).
gtttgtcgacagtttgact

SEQ ID NO: 616162 - DNA, 19 bp, Mus musculus
  siRNA target sequence for Gtl6 (NM_133975.2,3134-3152).
gtcgacagtttgactcatt

SEQ ID NO: 616163 - DNA, 19 bp, Mus musculus
  siRNA target sequence for Gtl6 (NM_133975.2,3136-3154).
cgacagtttgactcattca

SEQ ID NO: 616164 - DNA, 19 bp, Mus musculus
  siRNA target sequence for Gtl6 (NM_133975.2,3185-3203).
gccatcttcagtacttcta

SEQ ID NO: 616165 - DNA, 19 bp, Mus musculus
  siRNA target sequence for Gtl6 (NM_133975.2,3225-3243).
cctgtgtggcagtaaagca

SEQ ID NO: 616166 - DNA, 19 bp, Mus musculus
  siRNA target sequence for Gtl6 (NM_133975.2,3282-3300).
gcctgatcatggctatact

SEQ ID NO: 616167 - DNA, 19 bp, Mus musculus
  siRNA target sequence for Gtl6 (NM_133975.2,3284-3302).
ctgatcatggctatactca

SEQ ID NO: 616168 - DNA, 19 bp, Mus musculus
  siRNA target sequence for Gtl6 (NM_133975.2,3308-3326).
gtcgggctgtgaagttctt

SEQ ID NO: 616169 - DNA, 19 bp, Mus musculus
  siRNA target sequence for Gtl6 (NM_133975.2,3310-3328).
cgggctgtgaagttcttgt

SEQ ID NO: 616170 - DNA, 19 bp, Mus musculus
  siRNA target sequence for Gtl6 (NM_133975.2,3316-3334).
gtgaagttcttgtttgaga

SEQ ID NO: 616171 - DNA, 19 bp, Mus musculus
  siRNA target sequence for Gtl6 (NM_133975.2,3365-3383).
ggttgtttctccagtttgt

SEQ ID NO: 616172 - DNA, 19 bp, Mus musculus
  siRNA target sequence for Gtl6 (NM_133975.2,3410-3428).
gaggatttcggagtttaaa

SEQ ID NO: 616173 - DNA, 19 bp, Mus musculus
  siRNA target sequence for Gtl6 (NM_133975.2,3486-3504).
cttaccatcagtaatgact

SEQ ID NO: 616174 - DNA, 19 bp, Mus musculus
  siRNA target sequence for Gtl6 (NM_133975.2,3501-3519).
gacttgtgtgaactatctt

SEQ ID NO: 616175 - DNA, 19 bp, Mus musculus
  siRNA target sequence for Gtl6 (NM_133975.2,3503-3521).
cttgtgtgaactatcttaa

SEQ ID NO: 616176 - DNA, 19 bp, Mus musculus
  siRNA target sequence for Gtl6 (NM_133975.2,3529-3547).
gactactcgagcattgaca

SEQ ID NO: 616177 - DNA, 19 bp, Mus musculus
  siRNA target sequence for Gtl6 (NM_133975.2,3531-3549).
ctactcgagcattgacata

SEQ ID NO: 616178 - DNA, 19 bp, Mus musculus
  siRNA target sequence for Gtl6 (NM_133975.2,3552-3570).
gcgggacaaactcttgata

SEQ ID NO: 616179 - DNA, 19 bp, Mus musculus
  siRNA target sequence for Herc2 (NM_010418.1,114-132).
gactccaaatggttgaaaa

SEQ ID NO: 616180 - DNA, 19 bp, Mus musculus
  siRNA target sequence for Herc2 (NM_010418.1,133-151).
cagatatccagcttgcatt

SEQ ID NO: 616181 - DNA, 19 bp, Mus musculus
  siRNA target sequence for Herc2 (NM_010418.1,178-196).
ggaacgaaatggttaaaga

SEQ ID NO: 616182 - DNA, 19 bp, Mus musculus
  siRNA target sequence for Herc2 (NM_010418.1,212-230).
cactggaacagaattagca

SEQ ID NO: 616183 - DNA, 19 bp, Mus musculus
  siRNA target sequence for Herc2 (NM_010418.1,345-363).
gtgtatagagccaagtcaa

SEQ ID NO: 616184 - DNA, 19 bp, Mus musculus
  siRNA target sequence for Herc2 (NM_010418.1,389-407).
gcagccagatgtgaatgaa

SEQ ID NO: 616185 - DNA, 19 bp, Mus musculus
  siRNA target sequence for Herc2 (NM_010418.1,551-569).
ccaggagaatgtcaaagtt

SEQ ID NO: 616186 - DNA, 19 bp, Mus musculus
  siRNA target sequence for Herc2 (NM_010418.1,552-570).
caggagaatgtcaaagtta

SEQ ID NO: 616187 - DNA, 19 bp, Mus musculus
  siRNA target sequence for Herc2 (NM_010418.1,866-884).
cgtgactggagatgttcat

SEQ ID NO: 616188 - DNA, 19 bp, Mus musculus
  siRNA target sequence for Herc2 (NM_010418.1,975-993).
ggcacgcttagccaaatgt

SEQ ID NO: 616189 - DNA, 19 bp, Mus musculus
  siRNA target sequence for Herc2 (NM_010418.1,976-994).
gcacgcttagccaaatgtt

SEQ ID NO: 616190 - DNA, 19 bp, Mus musculus
  siRNA target sequence for Herc2 (NM_010418.1,1145-1163).
gagcgacatgcatctttta

SEQ ID NO: 616191 - DNA, 19 bp, Mus musculus
  siRNA target sequence for Herc2 (NM_010418.1,1170-1188).
cctttaagccccaatgaga

SEQ ID NO: 616192 - DNA, 19 bp, Mus musculus
  siRNA target sequence for Herc2 (NM_010418.1,1232-1250).
cattgatttacgacaaact

SEQ ID NO: 616193 - DNA, 19 bp, Mus musculus
  siRNA target sequence for Herc2 (NM_010418.1,1243-1261).
gacaaactgcagttgttgt

SEQ ID NO: 616194 - DNA, 19 bp, Mus musculus
  siRNA target sequence for Herc2 (NM_010418.1,1312-1330).
gctctccaacatctcataa

SEQ ID NO: 616195 - DNA, 19 bp, Mus musculus
  siRNA target sequence for Herc2 (NM_010418.1,1321-1339).
catctcataagggatcatt

SEQ ID NO: 616196 - DNA, 19 bp, Mus musculus
  siRNA target sequence for Herc2 (NM_010418.1,1349-1367).
cataggttgggggttaata

SEQ ID NO: 616197 - DNA, 19 bp, Mus musculus
  siRNA target sequence for Herc2 (NM_010418.1,1360-1378).
ggttaataggctggaaata

SEQ ID NO: 616198 - DNA, 19 bp, Mus musculus
  siRNA target sequence for Herc2 (NM_010418.1,1450-1468).
cagaaaagcggttcttgat

SEQ ID NO: 616199 - DNA, 19 bp, Mus musculus
  siRNA target sequence for Herc2 (NM_010418.1,1452-1470).
gaaaagcggttcttgatct

SEQ ID NO: 616200 - DNA, 19 bp, Mus musculus
  siRNA target sequence for Herc2 (NM_010418.1,1474-1492).
cccgcaatggtcgtgtata

SEQ ID NO: 616201 - DNA, 19 bp, Mus musculus
  siRNA target sequence for Herc2 (NM_010418.1,1476-1494).
cgcaatggtcgtgtataca

SEQ ID NO: 616202 - DNA, 19 bp, Mus musculus
  siRNA target sequence for Herc2 (NM_010418.1,1823-1841).
gggccatggctctagtgaa

SEQ ID NO: 616203 - DNA, 19 bp, Mus musculus
  siRNA target sequence for Herc2 (NM_010418.1,1839-1857).
gaagatgaggccattccaa

SEQ ID NO: 616204 - DNA, 19 bp, Mus musculus
  siRNA target sequence for Herc2 (NM_010418.1,1879-1897).
gtctaaaggtcattgatgt

SEQ ID NO: 616205 - DNA, 19 bp, Mus musculus
  siRNA target sequence for Herc2 (NM_010418.1,2014-2032).
ccccaaagctgattgaaaa

SEQ ID NO: 616206 - DNA, 19 bp, Mus musculus
  siRNA target sequence for Herc2 (NM_010418.1,2017-2035).
caaagctgattgaaaaact

SEQ ID NO: 616207 - DNA, 19 bp, Mus musculus
  siRNA target sequence for Herc2 (NM_010418.1,2061-2079).
cgctgtggaagtcagtttt

SEQ ID NO: 616208 - DNA, 19 bp, Mus musculus
  siRNA target sequence for Herc2 (NM_010418.1,2080-2098).
ctattgccttgacaaaaga

SEQ ID NO: 616209 - DNA, 19 bp, Mus musculus
  siRNA target sequence for Herc2 (NM_010418.1,2097-2115).
gatggccaagtttattcat

SEQ ID NO: 616210 - DNA, 19 bp, Mus musculus
  siRNA target sequence for Herc2 (NM_010418.1,2348-2366).
ggacagcaaacacatagtt

SEQ ID NO: 616211 - DNA, 19 bp, Mus musculus
  siRNA target sequence for Herc2 (NM_010418.1,2393-2411).
ctttgcgtggtcatcttgt

SEQ ID NO: 616212 - DNA, 19 bp, Mus musculus
  siRNA target sequence for Herc2 (NM_010418.1,2591-2609).
gttgcatgctgccattagt

SEQ ID NO: 616213 - DNA, 19 bp, Mus musculus
  siRNA target sequence for Herc2 (NM_010418.1,2615-2633).
ggttgacccggaattcctt

SEQ ID NO: 616214 - DNA, 19 bp, Mus musculus
  siRNA target sequence for Herc2 (NM_010418.1,2728-2746).
ctgcccaggctgtactaca

SEQ ID NO: 616215 - DNA, 19 bp, Mus musculus
  siRNA target sequence for Herc2 (NM_010418.1,2807-2825).
cttgccctgcacagtttca

SEQ ID NO: 616216 - DNA, 19 bp, Mus musculus
  siRNA target sequence for Herc2 (NM_010418.1,2902-2920).
gattggagtcagctttaaa

SEQ ID NO: 616217 - DNA, 19 bp, Mus musculus
  siRNA target sequence for Herc2 (NM_010418.1,2906-2924).
ggagtcagctttaaatgca

SEQ ID NO: 616218 - DNA, 19 bp, Mus musculus
  siRNA target sequence for Herc2 (NM_010418.1,2926-2944).
ccattactgcagaaattca

SEQ ID NO: 616219 - DNA, 19 bp, Mus musculus
  siRNA target sequence for Herc2 (NM_010418.1,3025-3043).
gtaggactcctctggataa

SEQ ID NO: 616220 - DNA, 19 bp, Mus musculus
  siRNA target sequence for Herc2 (NM_010418.1,3038-3056).
ggataaagacctaattaat

SEQ ID NO: 616221 - DNA, 19 bp, Mus musculus
  siRNA target sequence for Herc2 (NM_010418.1,3039-3057).
gataaagacctaattaata

SEQ ID NO: 616222 - DNA, 19 bp, Mus musculus
  siRNA target sequence for Herc2 (NM_010418.1,3069-3087).
gaatcatctggcaaacagt

SEQ ID NO: 616223 - DNA, 19 bp, Mus musculus
  siRNA target sequence for Herc2 (NM_010418.1,3092-3110).
gcctctagttcaactcata

SEQ ID NO: 616224 - DNA, 19 bp, Mus musculus
  siRNA target sequence for Herc2 (NM_010418.1,3094-3112).
ctctagttcaactcataca

SEQ ID NO: 616225 - DNA, 19 bp, Mus musculus
  siRNA target sequence for Herc2 (NM_010418.1,3140-3158).
gactgtagccagactgaaa

SEQ ID NO: 616226 - DNA, 19 bp, Mus musculus
  siRNA target sequence for Herc2 (NM_010418.1,3178-3196).
cctcatgtctggactttga

SEQ ID NO: 616227 - DNA, 19 bp, Mus musculus
  siRNA target sequence for Herc2 (NM_010418.1,3246-3264).
caacgcctgctcattagta

SEQ ID NO: 616228 - DNA, 19 bp, Mus musculus
  siRNA target sequence for Herc2 (NM_010418.1,3281-3299).
gaagattggtccaatctca

SEQ ID NO: 616229 - DNA, 19 bp, Mus musculus
  siRNA target sequence for Herc2 (NM_010418.1,3304-3322).
cttccagtcctgagctaat

SEQ ID NO: 616230 - DNA, 19 bp, Mus musculus
  siRNA target sequence for Herc2 (NM_010418.1,3327-3345).
gttggctctttgctgaaaa

SEQ ID NO: 616231 - DNA, 19 bp, Mus musculus
  siRNA target sequence for Herc2 (NM_010418.1,3444-3462).
gtaatggaaggggacttta

SEQ ID NO: 616232 - DNA, 19 bp, Mus musculus
  siRNA target sequence for Herc2 (NM_010418.1,3515-3533).
gaacgccagcctaatgcaa

SEQ ID NO: 616233 - DNA, 19 bp, Mus musculus
  siRNA target sequence for Herc2 (NM_010418.1,3576-3594).
ctggatcgtttcaaccatt

SEQ ID NO: 616234 - DNA, 19 bp, Mus musculus
  siRNA target sequence for Herc2 (NM_010418.1,3578-3596).
ggatcgtttcaaccattta

SEQ ID NO: 616235 - DNA, 19 bp, Mus musculus
  siRNA target sequence for Herc2 (NM_010418.1,3640-3658).
ctgggattatggagtcatt

SEQ ID NO: 616236 - DNA, 19 bp, Mus musculus
  siRNA target sequence for Herc2 (NM_010418.1,3711-3729).
gctgatttggagaaccata

SEQ ID NO: 616237 - DNA, 19 bp, Mus musculus
  siRNA target sequence for Herc2 (NM_010418.1,3712-3730).
ctgatttggagaaccataa

SEQ ID NO: 616238 - DNA, 19 bp, Mus musculus
  siRNA target sequence for Herc2 (NM_010418.1,3907-3925).
gtgttggccagtatttgga

SEQ ID NO: 616239 - DNA, 19 bp, Mus musculus
  siRNA target sequence for Herc2 (NM_010418.1,4004-4022).
cctacttcttggattgcat

SEQ ID NO: 616240 - DNA, 19 bp, Mus musculus
  siRNA target sequence for Herc2 (NM_010418.1,4124-4142).
gattcactacagctacaat

SEQ ID NO: 616241 - DNA, 19 bp, Mus musculus
  siRNA target sequence for Herc2 (NM_010418.1,4292-4310).
ggactttctgtgtcaaatt

SEQ ID NO: 616242 - DNA, 19 bp, Mus musculus
  siRNA target sequence for Herc2 (NM_010418.1,4305-4323).
caaattgaaaggtactgta

SEQ ID NO: 616243 - DNA, 19 bp, Mus musculus
  siRNA target sequence for Herc2 (NM_010418.1,4379-4397).
ggttggccgtcttctgtta

SEQ ID NO: 616244 - DNA, 19 bp, Mus musculus
  siRNA target sequence for Herc2 (NM_010418.1,4380-4398).
gttggccgtcttctgttat

SEQ ID NO: 616245 - DNA, 19 bp, Mus musculus
  siRNA target sequence for Herc2 (NM_010418.1,4383-4401).
ggccgtcttctgttatgct

SEQ ID NO: 616246 - DNA, 19 bp, Mus musculus
  siRNA target sequence for Herc2 (NM_010418.1,4399-4417).
gctgcctcttaaaacatga

SEQ ID NO: 616247 - DNA, 19 bp, Mus musculus
  siRNA target sequence for Herc2 (NM_010418.1,4400-4418).
ctgcctcttaaaacatgaa

SEQ ID NO: 616248 - DNA, 19 bp, Mus musculus
  siRNA target sequence for Herc2 (NM_010418.1,4402-4420).
gcctcttaaaacatgaaga

SEQ ID NO: 616249 - DNA, 19 bp, Mus musculus
  siRNA target sequence for Herc2 (NM_010418.1,4404-4422).
ctcttaaaacatgaagatt

SEQ ID NO: 616250 - DNA, 19 bp, Mus musculus
  siRNA target sequence for Herc2 (NM_010418.1,4465-4483).
gtattgagcaagtaaagca

SEQ ID NO: 616251 - DNA, 19 bp, Mus musculus
  siRNA target sequence for Herc2 (NM_010418.1,4482-4500).
cacagaacattgcctaaat

SEQ ID NO: 616252 - DNA, 19 bp, Mus musculus
  siRNA target sequence for Herc2 (NM_010418.1,4519-4537).
gagttgtctaccaagcaaa

SEQ ID NO: 616253 - DNA, 19 bp, Mus musculus
  siRNA target sequence for Herc2 (NM_010418.1,4521-4539).
gttgtctaccaagcaaaat

SEQ ID NO: 616254 - DNA, 19 bp, Mus musculus
  siRNA target sequence for Herc2 (NM_010418.1,4524-4542).
gtctaccaagcaaaatgct

SEQ ID NO: 616255 - DNA, 19 bp, Mus musculus
  siRNA target sequence for Herc2 (NM_010418.1,4533-4551).
gcaaaatgctcactcatta

SEQ ID NO: 616256 - DNA, 19 bp, Mus musculus
  siRNA target sequence for Herc2 (NM_010418.1,4534-4552).
caaaatgctcactcattaa

SEQ ID NO: 616257 - DNA, 19 bp, Mus musculus
  siRNA target sequence for Herc2 (NM_010418.1,4599-4617).
gtcattgaacgcttgagat

SEQ ID NO: 616258 - DNA, 19 bp, Mus musculus
  siRNA target sequence for Herc2 (NM_010418.1,4613-4631).
gagatttctcttcaatgaa

SEQ ID NO: 616259 - DNA, 19 bp, Mus musculus
  siRNA target sequence for Herc2 (NM_010418.1,4648-4666).
gtagtgacctctctataat

SEQ ID NO: 616260 - DNA, 19 bp, Mus musculus
  siRNA target sequence for Herc2 (NM_010418.1,4653-4671).
gacctctctataatgtcta

SEQ ID NO: 616261 - DNA, 19 bp, Mus musculus
  siRNA target sequence for Herc2 (NM_010418.1,4656-4674).
ctctctataatgtctaagt

SEQ ID NO: 616262 - DNA, 19 bp, Mus musculus
  siRNA target sequence for Herc2 (NM_010418.1,4660-4678).
ctataatgtctaagtttaa

SEQ ID NO: 616263 - DNA, 19 bp, Mus musculus
  siRNA target sequence for Herc2 (NM_010418.1,4679-4697).
gctgttaggttcattacca

SEQ ID NO: 616264 - DNA, 19 bp, Mus musculus
  siRNA target sequence for Herc2 (NM_010418.1,4708-4726).
ggatagctcagaagatcat

SEQ ID NO: 616265 - DNA, 19 bp, Mus musculus
  siRNA target sequence for Herc2 (NM_010418.1,4753-4771).
ctaagaaaccagaatctat

SEQ ID NO: 616266 - DNA, 19 bp, Mus musculus
  siRNA target sequence for Herc2 (NM_010418.1,4757-4775).
gaaaccagaatctattgat

SEQ ID NO: 616267 - DNA, 19 bp, Mus musculus
  siRNA target sequence for Herc2 (NM_010418.1,4829-4847).
gcctcatagtcctataaat

SEQ ID NO: 616268 - DNA, 19 bp, Mus musculus
  siRNA target sequence for Herc2 (NM_010418.1,4831-4849).
ctcatagtcctataaatgt

SEQ ID NO: 616269 - DNA, 19 bp, Mus musculus
  siRNA target sequence for Herc2 (NM_010418.1,4848-4866).
gtagacaaaagacctattt

SEQ ID NO: 616270 - DNA, 19 bp, Mus musculus
  siRNA target sequence for Herc2 (NM_010418.1,4871-4889).
gaagtctcccaaggataaa

SEQ ID NO: 616271 - DNA, 19 bp, Mus musculus
  siRNA target sequence for Herc2 (NM_010418.1,4892-4910).
gcaaccattgttgaataca

SEQ ID NO: 616272 - DNA, 19 bp, Mus musculus
  siRNA target sequence for Herc2 (NM_010418.1,4896-4914).
ccattgttgaatacagtta

SEQ ID NO: 616273 - DNA, 19 bp, Mus musculus
  siRNA target sequence for Herc2 (NM_010418.1,4915-4933).
caggggttcataaatataa

SEQ ID NO: 616274 - DNA, 19 bp, Mus musculus
  siRNA target sequence for Herc2 (NM_010418.1,4917-4935).
ggggttcataaatataaat

SEQ ID NO: 616275 - DNA, 19 bp, Mus musculus
  siRNA target sequence for Herc2 (NM_010418.1,4970-4988).
gtctgcactcctcaataca

SEQ ID NO: 616276 - DNA, 19 bp, Mus musculus
  siRNA target sequence for Herc2 (NM_010418.1,4972-4990).
ctgcactcctcaatacaat

SEQ ID NO: 616277 - DNA, 19 bp, Mus musculus
  siRNA target sequence for Herc2 (NM_010418.1,4975-4993).
cactcctcaatacaattgt

SEQ ID NO: 616278 - DNA, 19 bp, Mus musculus
  siRNA target sequence for Herc2 (NM_010418.1,5076-5094).
cgtctggaagggatagata

SEQ ID NO: 616279 - DNA, 19 bp, Mus musculus
  siRNA target sequence for Herc2 (NM_010418.1,5086-5104).
ggatagatacaattctgaa

SEQ ID NO: 616280 - DNA, 19 bp, Mus musculus
  siRNA target sequence for Herc2 (NM_010418.1,5110-5128).
cagccaaaagttttttact

SEQ ID NO: 616281 - DNA, 19 bp, Mus musculus
  siRNA target sequence for Herc2 (NM_010418.1,5252-5270).
gctgctggaagtgactttt

SEQ ID NO: 616282 - DNA, 19 bp, Mus musculus
  siRNA target sequence for Herc2 (NM_010418.1,5288-5306).
ggcagttcagaatattcga

SEQ ID NO: 616283 - DNA, 19 bp, Mus musculus
  siRNA target sequence for Herc2 (NM_010418.1,5289-5307).
gcagttcagaatattcgat

SEQ ID NO: 616284 - DNA, 19 bp, Mus musculus
  siRNA target sequence for Herc2 (NM_010418.1,5356-5374).
ctgttcccctacaaaccat

SEQ ID NO: 616285 - DNA, 19 bp, Mus musculus
  siRNA target sequence for Herc2 (NM_010418.1,5361-5379).
cccctacaaaccattacca

SEQ ID NO: 616286 - DNA, 19 bp, Mus musculus
  siRNA target sequence for Herc2 (NM_010418.1,5367-5385).
caaaccattaccaatgaga

SEQ ID NO: 616287 - DNA, 19 bp, Mus musculus
  siRNA target sequence for Herc2 (NM_010418.1,5411-5429).
catcccacaagctcgattt

SEQ ID NO: 616288 - DNA, 19 bp, Mus musculus
  siRNA target sequence for Herc2 (NM_010418.1,5414-5432).
cccacaagctcgatttctt

SEQ ID NO: 616289 - DNA, 19 bp, Mus musculus
  siRNA target sequence for Herc2 (NM_010418.1,5416-5434).
cacaagctcgatttcttct

SEQ ID NO: 616290 - DNA, 19 bp, Mus musculus
  siRNA target sequence for Herc2 (NM_010418.1,5531-5549).
gctgatcggtcctacttgt

SEQ ID NO: 616291 - DNA, 19 bp, Mus musculus
  siRNA target sequence for Herc2 (NM_010418.1,5554-5572).
gtgttgaggacgacatgaa

SEQ ID NO: 616292 - DNA, 19 bp, Mus musculus
  siRNA target sequence for Herc2 (NM_010418.1,5658-5676).
gaactggctgctatgatga

SEQ ID NO: 616293 - DNA, 19 bp, Mus musculus
  siRNA target sequence for Herc2 (NM_010418.1,5960-5978).
gatgctgaccagcgttatt

SEQ ID NO: 616294 - DNA, 19 bp, Mus musculus
  siRNA target sequence for Herc2 (NM_010418.1,5964-5982).
ctgaccagcgttattaact

SEQ ID NO: 616295 - DNA, 19 bp, Mus musculus
  siRNA target sequence for Herc2 (NM_010418.1,5966-5984).
gaccagcgttattaactta

SEQ ID NO: 616296 - DNA, 19 bp, Mus musculus
  siRNA target sequence for Herc2 (NM_010418.1,5968-5986).
ccagcgttattaacttact

SEQ ID NO: 616297 - DNA, 19 bp, Mus musculus
  siRNA target sequence for Herc2 (NM_010418.1,6047-6065).
gactttgtgtggactactt

SEQ ID NO: 616298 - DNA, 19 bp, Mus musculus
  siRNA target sequence for Herc2 (NM_010418.1,6055-6073).
gtggactacttcgaatgtt

SEQ ID NO: 616299 - DNA, 19 bp, Mus musculus
  siRNA target sequence for Herc2 (NM_010418.1,6058-6076).
gactacttcgaatgttagt

SEQ ID NO: 616300 - DNA, 19 bp, Mus musculus
  siRNA target sequence for Herc2 (NM_010418.1,6380-6398).
cttcttgggcagtttgctt

SEQ ID NO: 616301 - DNA, 19 bp, Mus musculus
  siRNA target sequence for Herc2 (NM_010418.1,6386-6404).
gggcagtttgcttactact

SEQ ID NO: 616302 - DNA, 19 bp, Mus musculus
  siRNA target sequence for Herc2 (NM_010418.1,6387-6405).
ggcagtttgcttactactt

SEQ ID NO: 616303 - DNA, 19 bp, Mus musculus
  siRNA target sequence for Herc2 (NM_010418.1,6389-6407).
cagtttgcttactacttgt

SEQ ID NO: 616304 - DNA, 19 bp, Mus musculus
  siRNA target sequence for Herc2 (NM_010418.1,6395-6413).
gcttactacttgttcttct

SEQ ID NO: 616305 - DNA, 19 bp, Mus musculus
  siRNA target sequence for Herc2 (NM_010418.1,6417-6435).
gttccgttacttagagaat

SEQ ID NO: 616306 - DNA, 19 bp, Mus musculus
  siRNA target sequence for Herc2 (NM_010418.1,6430-6448).
gagaatccacgttgagaaa

SEQ ID NO: 616307 - DNA, 19 bp, Mus musculus
  siRNA target sequence for Herc2 (NM_010418.1,6585-6603).
ctttgctctgtcacacaaa

SEQ ID NO: 616308 - DNA, 19 bp, Mus musculus
  siRNA target sequence for Herc2 (NM_010418.1,6590-6608).
ctctgtcacacaaagctat

SEQ ID NO: 616309 - DNA, 19 bp, Mus musculus
  siRNA target sequence for Herc2 (NM_010418.1,6609-6627).
gccggaaagacatcagaaa

SEQ ID NO: 616310 - DNA, 19 bp, Mus musculus
  siRNA target sequence for Herc2 (NM_010418.1,6630-6648).
gcccagctagaagattact

SEQ ID NO: 616311 - DNA, 19 bp, Mus musculus
  siRNA target sequence for Herc2 (NM_010418.1,6830-6848).
ccgagtttgcccactgaat

SEQ ID NO: 616312 - DNA, 19 bp, Mus musculus
  siRNA target sequence for Herc2 (NM_010418.1,6863-6881).
ccctgctgtggcctttagt

SEQ ID NO: 616313 - DNA, 19 bp, Mus musculus
  siRNA target sequence for Herc2 (NM_010418.1,6865-6883).
ctgctgtggcctttagtgt

SEQ ID NO: 616314 - DNA, 19 bp, Mus musculus
  siRNA target sequence for Herc2 (NM_010418.1,6873-6891).
gcctttagtgtgaacaatt

SEQ ID NO: 616315 - DNA, 19 bp, Mus musculus
  siRNA target sequence for Herc2 (NM_010418.1,6874-6892).
cctttagtgtgaacaattt

SEQ ID NO: 616316 - DNA, 19 bp, Mus musculus
  siRNA target sequence for Herc2 (NM_010418.1,6942-6960).
gctggaagcaaattggaaa

SEQ ID NO: 616317 - DNA, 19 bp, Mus musculus
  siRNA target sequence for Herc2 (NM_010418.1,7249-7267).
ctcctgtgaaggcaatatt

SEQ ID NO: 616318 - DNA, 19 bp, Mus musculus
  siRNA target sequence for Herc2 (NM_010418.1,7444-7462).
ctgctctgcctattgtagt

SEQ ID NO: 616319 - DNA, 19 bp, Mus musculus
  siRNA target sequence for Herc2 (NM_010418.1,7758-7776).
gattatgccgtgtatgtga

SEQ ID NO: 616320 - DNA, 19 bp, Mus musculus
  siRNA target sequence for Herc2 (NM_010418.1,7805-7823).
gagatgctgtcgaacatat

SEQ ID NO: 616321 - DNA, 19 bp, Mus musculus
  siRNA target sequence for Herc2 (NM_010418.1,7807-7825).
gatgctgtcgaacatatga

SEQ ID NO: 616322 - DNA, 19 bp, Mus musculus
  siRNA target sequence for Herc2 (NM_010418.1,7810-7828).
gctgtcgaacatatgaaga

SEQ ID NO: 616323 - DNA, 19 bp, Mus musculus
  siRNA target sequence for Herc2 (NM_010418.1,7811-7829).
ctgtcgaacatatgaagaa

SEQ ID NO: 616324 - DNA, 19 bp, Mus musculus
  siRNA target sequence for Herc2 (NM_010418.1,7813-7831).
gtcgaacatatgaagaagt

SEQ ID NO: 616325 - DNA, 19 bp, Mus musculus
  siRNA target sequence for Herc2 (NM_010418.1,7815-7833).
cgaacatatgaagaagtat

SEQ ID NO: 616326 - DNA, 19 bp, Mus musculus
  siRNA target sequence for Herc2 (NM_010418.1,7840-7858).
gtgatgtgggcaaagtcat

SEQ ID NO: 616327 - DNA, 19 bp, Mus musculus
  siRNA target sequence for Herc2 (NM_010418.1,7911-7929).
cagaaaggcggcacttact

SEQ ID NO: 616328 - DNA, 19 bp, Mus musculus
  siRNA target sequence for Herc2 (NM_010418.1,7921-7939).
gcacttactgggttaggta

SEQ ID NO: 616329 - DNA, 19 bp, Mus musculus
  siRNA target sequence for Herc2 (NM_010418.1,7928-7946).
ctgggttaggtatattcat

SEQ ID NO: 616330 - DNA, 19 bp, Mus musculus
  siRNA target sequence for Herc2 (NM_010418.1,7931-7949).
ggttaggtatattcatgtt

SEQ ID NO: 616331 - DNA, 19 bp, Mus musculus
  siRNA target sequence for Herc2 (NM_010418.1,7965-7983).
cctccaccaagttcttctt

SEQ ID NO: 616332 - DNA, 19 bp, Mus musculus
  siRNA target sequence for Herc2 (NM_010418.1,7978-7996).
cttcttctcacatcaagat

SEQ ID NO: 616333 - DNA, 19 bp, Mus musculus
  siRNA target sequence for Herc2 (NM_010418.1,7991-8009).
caagatcggtgataaagta

SEQ ID NO: 616334 - DNA, 19 bp, Mus musculus
  siRNA target sequence for Herc2 (NM_010418.1,8048-8066).
gggatccgtcactcatcaa

SEQ ID NO: 616335 - DNA, 19 bp, Mus musculus
  siRNA target sequence for Herc2 (NM_010418.1,8049-8067).
ggatccgtcactcatcaaa

SEQ ID NO: 616336 - DNA, 19 bp, Mus musculus
  siRNA target sequence for Herc2 (NM_010418.1,8162-8180).
ggagttggtgcctagtatt

SEQ ID NO: 616337 - DNA, 19 bp, Mus musculus
  siRNA target sequence for Herc2 (NM_010418.1,8197-8215).
gtgacggctgtcagacttt

SEQ ID NO: 616338 - DNA, 19 bp, Mus musculus
  siRNA target sequence for Herc2 (NM_010418.1,8206-8224).
gtcagacttttcctatcaa

SEQ ID NO: 616339 - DNA, 19 bp, Mus musculus
  siRNA target sequence for Herc2 (NM_010418.1,8295-8313).
cacaacaccaggcatactt

SEQ ID NO: 616340 - DNA, 19 bp, Mus musculus
  siRNA target sequence for Herc2 (NM_010418.1,8307-8325).
catactttcggcaggatta

SEQ ID NO: 616341 - DNA, 19 bp, Mus musculus
  siRNA target sequence for Herc2 (NM_010418.1,8311-8329).
ctttcggcaggattaatga

SEQ ID NO: 616342 - DNA, 19 bp, Mus musculus
  siRNA target sequence for Herc2 (NM_010418.1,8334-8352).
gggcagtctgcagtgtttt

SEQ ID NO: 616343 - DNA, 19 bp, Mus musculus
  siRNA target sequence for Herc2 (NM_010418.1,8430-8448).
gtgaaaagcctgaacgttt

SEQ ID NO: 616344 - DNA, 19 bp, Mus musculus
  siRNA target sequence for Herc2 (NM_010418.1,8462-8480).
ccaggcttctcgtctcatt

SEQ ID NO: 616345 - DNA, 19 bp, Mus musculus
  siRNA target sequence for Herc2 (NM_010418.1,8559-8577).
cttgttcatagattaaaaa

SEQ ID NO: 616346 - DNA, 19 bp, Mus musculus
  siRNA target sequence for Herc2 (NM_010418.1,8562-8580).
gttcatagattaaaaatga

SEQ ID NO: 616347 - DNA, 19 bp, Mus musculus
  siRNA target sequence for Herc2 (NM_010418.1,8621-8639).
cgtggtgtcaggtggaaat

SEQ ID NO: 616348 - DNA, 19 bp, Mus musculus
  siRNA target sequence for Herc2 (NM_010418.1,8622-8640).
gtggtgtcaggtggaaatt

SEQ ID NO: 616349 - DNA, 19 bp, Mus musculus
  siRNA target sequence for Herc2 (NM_010418.1,8625-8643).
gtgtcaggtggaaattcct

SEQ ID NO: 616350 - DNA, 19 bp, Mus musculus
  siRNA target sequence for Herc2 (NM_010418.1,8627-8645).
gtcaggtggaaattcctta

SEQ ID NO: 616351 - DNA, 19 bp, Mus musculus
  siRNA target sequence for Herc2 (NM_010418.1,8629-8647).
caggtggaaattccttaaa

SEQ ID NO: 616352 - DNA, 19 bp, Mus musculus
  siRNA target sequence for Herc2 (NM_010418.1,8631-8649).
ggtggaaattccttaaata

SEQ ID NO: 616353 - DNA, 19 bp, Mus musculus
  siRNA target sequence for Herc2 (NM_010418.1,8661-8679).
ctaaagacaattaatatca

SEQ ID NO: 616354 - DNA, 19 bp, Mus musculus
  siRNA target sequence for Herc2 (NM_010418.1,8695-8713).
ctgtacccctgctaagtga

SEQ ID NO: 616355 - DNA, 19 bp, Mus musculus
  siRNA target sequence for Herc2 (NM_010418.1,8731-8749).
ggtacattgagattgcaat

SEQ ID NO: 616356 - DNA, 19 bp, Mus musculus
  siRNA target sequence for Herc2 (NM_010418.1,8732-8750).
gtacattgagattgcaata

SEQ ID NO: 616357 - DNA, 19 bp, Mus musculus
  siRNA target sequence for Herc2 (NM_010418.1,8770-8788).
gaatcgactgcaaaatcca

SEQ ID NO: 616358 - DNA, 19 bp, Mus musculus
  siRNA target sequence for Herc2 (NM_010418.1,8886-8904).
ggcagcactgggagtctta

SEQ ID NO: 616359 - DNA, 19 bp, Mus musculus
  siRNA target sequence for Herc2 (NM_010418.1,8887-8905).
gcagcactgggagtcttat

SEQ ID NO: 616360 - DNA, 19 bp, Mus musculus
  siRNA target sequence for Herc2 (NM_010418.1,8891-8909).
cactgggagtcttattaga

SEQ ID NO: 616361 - DNA, 19 bp, Mus musculus
  siRNA target sequence for Herc2 (NM_010418.1,8895-8913).
gggagtcttattagaaaga

SEQ ID NO: 616362 - DNA, 19 bp, Mus musculus
  siRNA target sequence for Herc2 (NM_010418.1,8896-8914).
ggagtcttattagaaagaa

SEQ ID NO: 616363 - DNA, 19 bp, Mus musculus
  siRNA target sequence for Herc2 (NM_010418.1,8928-8946).
gaatcaacagctacaataa

SEQ ID NO: 616364 - DNA, 19 bp, Mus musculus
  siRNA target sequence for Herc2 (NM_010418.1,8961-8979).
gtgtggggactgaatgaca

SEQ ID NO: 616365 - DNA, 19 bp, Mus musculus
  siRNA target sequence for Herc2 (NM_010418.1,8996-9014).
ccttaaaggctcgaagata

SEQ ID NO: 616366 - DNA, 19 bp, Mus musculus
  siRNA target sequence for Herc2 (NM_010418.1,8997-9015).
cttaaaggctcgaagataa

SEQ ID NO: 616367 - DNA, 19 bp, Mus musculus
  siRNA target sequence for Herc2 (NM_010418.1,9160-9178).
ccagtgggacggttcctat

SEQ ID NO: 616368 - DNA, 19 bp, Mus musculus
  siRNA target sequence for Herc2 (NM_010418.1,9161-9179).
cagtgggacggttcctatt

SEQ ID NO: 616369 - DNA, 19 bp, Mus musculus
  siRNA target sequence for Herc2 (NM_010418.1,9174-9192).
cctattcctcggcagatta

SEQ ID NO: 616370 - DNA, 19 bp, Mus musculus
  siRNA target sequence for Herc2 (NM_010418.1,9652-9670).
gtaatattccccagaacat

SEQ ID NO: 616371 - DNA, 19 bp, Mus musculus
  siRNA target sequence for Herc2 (NM_010418.1,9665-9683).
gaacattgagagactaaat

SEQ ID NO: 616372 - DNA, 19 bp, Mus musculus
  siRNA target sequence for Herc2 (NM_010418.1,9762-9780).
gggaagggcgactacttca

SEQ ID NO: 616373 - DNA, 19 bp, Mus musculus
  siRNA target sequence for Herc2 (NM_010418.1,10016-10034).
ggcttgtgggtcatcacat

SEQ ID NO: 616374 - DNA, 19 bp, Mus musculus
  siRNA target sequence for Herc2 (NM_010418.1,10021-10039).
gtgggtcatcacatagtgt

SEQ ID NO: 616375 - DNA, 19 bp, Mus musculus
  siRNA target sequence for Herc2 (NM_010418.1,10111-10129).
cgctaggtgcttcttactt

SEQ ID NO: 616376 - DNA, 19 bp, Mus musculus
  siRNA target sequence for Herc2 (NM_010418.1,10112-10130).
gctaggtgcttcttactta

SEQ ID NO: 616377 - DNA, 19 bp, Mus musculus
  siRNA target sequence for Herc2 (NM_010418.1,10136-10154).
cccttcggatgctgattct

SEQ ID NO: 616378 - DNA, 19 bp, Mus musculus
  siRNA target sequence for Herc2 (NM_010418.1,10137-10155).
ccttcggatgctgattctt

SEQ ID NO: 616379 - DNA, 19 bp, Mus musculus
  siRNA target sequence for Herc2 (NM_010418.1,10156-10174).
cttcttccagcaataagat

SEQ ID NO: 616380 - DNA, 19 bp, Mus musculus
  siRNA target sequence for Herc2 (NM_010418.1,10196-10214).
gcctaatcgcccttctctt

SEQ ID NO: 616381 - DNA, 19 bp, Mus musculus
  siRNA target sequence for Herc2 (NM_010418.1,10350-10368).
gtggaatgcccctcattct

SEQ ID NO: 616382 - DNA, 19 bp, Mus musculus
  siRNA target sequence for Herc2 (NM_010418.1,10405-10423).
ccagtcccatgcatatgga

SEQ ID NO: 616383 - DNA, 19 bp, Mus musculus
  siRNA target sequence for Herc2 (NM_010418.1,10847-10865).
ctgtgtcaccgagttagaa

SEQ ID NO: 616384 - DNA, 19 bp, Mus musculus
  siRNA target sequence for Herc2 (NM_010418.1,10849-10867).
gtgtcaccgagttagaaga

SEQ ID NO: 616385 - DNA, 19 bp, Mus musculus
  siRNA target sequence for Herc2 (NM_010418.1,11180-11198).
ctggcgcttcacagtttat

SEQ ID NO: 616386 - DNA, 19 bp, Mus musculus
  siRNA target sequence for Herc2 (NM_010418.1,11285-11303).
cttggacttccgactcaat

SEQ ID NO: 616387 - DNA, 19 bp, Mus musculus
  siRNA target sequence for Herc2 (NM_010418.1,11289-11307).
gacttccgactcaatctca

SEQ ID NO: 616388 - DNA, 19 bp, Mus musculus
  siRNA target sequence for Herc2 (NM_010418.1,11430-11448).
gaatttgggcagtcaatta

SEQ ID NO: 616389 - DNA, 19 bp, Mus musculus
  siRNA target sequence for Herc2 (NM_010418.1,11456-11474).
caggctgctgggagaaaat

SEQ ID NO: 616390 - DNA, 19 bp, Mus musculus
  siRNA target sequence for Herc2 (NM_010418.1,11669-11687).
ctgcgcagagacccataaa

SEQ ID NO: 616391 - DNA, 19 bp, Mus musculus
  siRNA target sequence for Herc2 (NM_010418.1,11689-11707).
gggcttggttccgaagata

SEQ ID NO: 616392 - DNA, 19 bp, Mus musculus
  siRNA target sequence for Herc2 (NM_010418.1,11691-11709).
gcttggttccgaagatact

SEQ ID NO: 616393 - DNA, 19 bp, Mus musculus
  siRNA target sequence for Herc2 (NM_010418.1,11758-11776).
ctcgtctgtttcttgatga

SEQ ID NO: 616394 - DNA, 19 bp, Mus musculus
  siRNA target sequence for Herc2 (NM_010418.1,11835-11853).
gaaagccacagcatcttta

SEQ ID NO: 616395 - DNA, 19 bp, Mus musculus
  siRNA target sequence for Herc2 (NM_010418.1,11874-11892).
cttgtgcagtggatgaaca

SEQ ID NO: 616396 - DNA, 19 bp, Mus musculus
  siRNA target sequence for Herc2 (NM_010418.1,11943-11961).
gggtgggggcataatcata

SEQ ID NO: 616397 - DNA, 19 bp, Mus musculus
  siRNA target sequence for Herc2 (NM_010418.1,12030-12048).
ctcagacctgtgcagttaa

SEQ ID NO: 616398 - DNA, 19 bp, Mus musculus
  siRNA target sequence for Herc2 (NM_010418.1,12084-12102).
gatgggaagctctatgcta

SEQ ID NO: 616399 - DNA, 19 bp, Mus musculus
  siRNA target sequence for Herc2 (NM_010418.1,12175-12193).
ccattcagcatgtgttcat

SEQ ID NO: 616400 - DNA, 19 bp, Mus musculus
  siRNA target sequence for Herc2 (NM_010418.1,12241-12259).
cttcagaaggcgaagttta

SEQ ID NO: 616401 - DNA, 19 bp, Mus musculus
  siRNA target sequence for Herc2 (NM_010418.1,12246-12264).
gaaggcgaagtttactctt

SEQ ID NO: 616402 - DNA, 19 bp, Mus musculus
  siRNA target sequence for Herc2 (NM_010418.1,12317-12335).
ccgccctcgtgtcattgaa

SEQ ID NO: 616403 - DNA, 19 bp, Mus musculus
  siRNA target sequence for Herc2 (NM_010418.1,12318-12336).
cgccctcgtgtcattgaat

SEQ ID NO: 616404 - DNA, 19 bp, Mus musculus
  siRNA target sequence for Herc2 (NM_010418.1,12337-12355).
ccctgagaggaattgaagt

SEQ ID NO: 616405 - DNA, 19 bp, Mus musculus
  siRNA target sequence for Herc2 (NM_010418.1,12456-12474).
gacagtgaggaccagttaa

SEQ ID NO: 616406 - DNA, 19 bp, Mus musculus
  siRNA target sequence for Herc2 (NM_010418.1,12502-12520).
gccatcgtgtcatagacat

SEQ ID NO: 616407 - DNA, 19 bp, Mus musculus
  siRNA target sequence for Herc2 (NM_010418.1,12503-12521).
ccatcgtgtcatagacatt

SEQ ID NO: 616408 - DNA, 19 bp, Mus musculus
  siRNA target sequence for Herc2 (NM_010418.1,12638-12656).
gcccatgaagattgattct

SEQ ID NO: 616409 - DNA, 19 bp, Mus musculus
  siRNA target sequence for Herc2 (NM_010418.1,12875-12893).
ggatggtgaagtttacaca

SEQ ID NO: 616410 - DNA, 19 bp, Mus musculus
  siRNA target sequence for Herc2 (NM_010418.1,12892-12910).
catggggtgacaatgatga

SEQ ID NO: 616411 - DNA, 19 bp, Mus musculus
  siRNA target sequence for Herc2 (NM_010418.1,12918-12936).
ctaggagatggaacaacaa

SEQ ID NO: 616412 - DNA, 19 bp, Mus musculus
  siRNA target sequence for Herc2 (NM_010418.1,12969-12987).
cttcagggtaagaaggtta

SEQ ID NO: 616413 - DNA, 19 bp, Mus musculus
  siRNA target sequence for Herc2 (NM_010418.1,12974-12992).
gggtaagaaggttaatcga

SEQ ID NO: 616414 - DNA, 19 bp, Mus musculus
  siRNA target sequence for Herc2 (NM_010418.1,13071-13089).
cccatggagtacaaccatt

SEQ ID NO: 616415 - DNA, 19 bp, Mus musculus
  siRNA target sequence for Herc2 (NM_010418.1,13076-13094).
ggagtacaaccatttacaa

SEQ ID NO: 616416 - DNA, 19 bp, Mus musculus
  siRNA target sequence for Herc2 (NM_010418.1,13234-13252).
cactccgtgggatcttaat

SEQ ID NO: 616417 - DNA, 19 bp, Mus musculus
  siRNA target sequence for Herc2 (NM_010418.1,13236-13254).
ctccgtgggatcttaatat

SEQ ID NO: 616418 - DNA, 19 bp, Mus musculus
  siRNA target sequence for Herc2 (NM_010418.1,13238-13256).
ccgtgggatcttaatatct

SEQ ID NO: 616419 - DNA, 19 bp, Mus musculus
  siRNA target sequence for Herc2 (NM_010418.1,13240-13258).
gtgggatcttaatatctca

SEQ ID NO: 616420 - DNA, 19 bp, Mus musculus
  siRNA target sequence for Herc2 (NM_010418.1,13337-13355).
gaaccgcatccaggttaaa

SEQ ID NO: 616421 - DNA, 19 bp, Mus musculus
  siRNA target sequence for Herc2 (NM_010418.1,13464-13482).
caccgagtctggaaagtca

SEQ ID NO: 616422 - DNA, 19 bp, Mus musculus
  siRNA target sequence for Herc2 (NM_010418.1,13520-13538).
ctacagtgagtctatagca

SEQ ID NO: 616423 - DNA, 19 bp, Mus musculus
  siRNA target sequence for Herc2 (NM_010418.1,13527-13545).
gagtctatagcagagattt

SEQ ID NO: 616424 - DNA, 19 bp, Mus musculus
  siRNA target sequence for Herc2 (NM_010418.1,13529-13547).
gtctatagcagagatttgt

SEQ ID NO: 616425 - DNA, 19 bp, Mus musculus
  siRNA target sequence for Herc2 (NM_010418.1,13531-13549).
ctatagcagagatttgtga

SEQ ID NO: 616426 - DNA, 19 bp, Mus musculus
  siRNA target sequence for Herc2 (NM_010418.1,13564-13582).
gactcacacctcttctgat

SEQ ID NO: 616427 - DNA, 19 bp, Mus musculus
  siRNA target sequence for Herc2 (NM_010418.1,13616-13634).
caacagagactgttaccta

SEQ ID NO: 616428 - DNA, 19 bp, Mus musculus
  siRNA target sequence for Herc2 (NM_010418.1,13621-13639).
gagactgttacctattaaa

SEQ ID NO: 616429 - DNA, 19 bp, Mus musculus
  siRNA target sequence for Herc2 (NM_010418.1,13677-13695).
cgattcctaggggtgttat

SEQ ID NO: 616430 - DNA, 19 bp, Mus musculus
  siRNA target sequence for Herc2 (NM_010418.1,13678-13696).
gattcctaggggtgttatt

SEQ ID NO: 616431 - DNA, 19 bp, Mus musculus
  siRNA target sequence for Herc2 (NM_010418.1,13714-13732).
ctgggagtccactaagttt

SEQ ID NO: 616432 - DNA, 19 bp, Mus musculus
  siRNA target sequence for Herc2 (NM_010418.1,13718-13736).
gagtccactaagtttgaat

SEQ ID NO: 616433 - DNA, 19 bp, Mus musculus
  siRNA target sequence for Herc2 (NM_010418.1,13788-13806).
gacctgagtgaggtagata

SEQ ID NO: 616434 - DNA, 19 bp, Mus musculus
  siRNA target sequence for Herc2 (NM_010418.1,13793-13811).
gagtgaggtagataaagat

SEQ ID NO: 616435 - DNA, 19 bp, Mus musculus
  siRNA target sequence for Herc2 (NM_010418.1,13795-13813).
gtgaggtagataaagattt

SEQ ID NO: 616436 - DNA, 19 bp, Mus musculus
  siRNA target sequence for Herc2 (NM_010418.1,13797-13815).
gaggtagataaagatttta

SEQ ID NO: 616437 - DNA, 19 bp, Mus musculus
  siRNA target sequence for Herc2 (NM_010418.1,13949-13967).
ggacaaccgtgcagaatat

SEQ ID NO: 616438 - DNA, 19 bp, Mus musculus
  siRNA target sequence for Herc2 (NM_010418.1,13985-14003).
ctacagactccatgaattt

SEQ ID NO: 616439 - DNA, 19 bp, Mus musculus
  siRNA target sequence for Herc2 (NM_010418.1,13988-14006).
cagactccatgaatttgat

SEQ ID NO: 616440 - DNA, 19 bp, Mus musculus
  siRNA target sequence for Herc2 (NM_010418.1,14077-14095).
gatacgaactggagacaat

SEQ ID NO: 616441 - DNA, 19 bp, Mus musculus
  siRNA target sequence for Herc2 (NM_010418.1,14135-14153).
gtcagtggcaacgtataaa

SEQ ID NO: 616442 - DNA, 19 bp, Mus musculus
  siRNA target sequence for Herc2 (NM_010418.1,14196-14214).
gtgatggaatctttctcta

SEQ ID NO: 616443 - DNA, 19 bp, Mus musculus
  siRNA target sequence for Herc2 (NM_010418.1,14218-14236).
cggaacgctccctctttct

SEQ ID NO: 616444 - DNA, 19 bp, Mus musculus
  siRNA target sequence for Herc2 (NM_010418.1,14219-14237).
ggaacgctccctctttctt

SEQ ID NO: 616445 - DNA, 19 bp, Mus musculus
  siRNA target sequence for Herc2 (NM_010418.1,14432-14450).
ccacttttgcaaatccata

SEQ ID NO: 616446 - DNA, 19 bp, Mus musculus
  siRNA target sequence for Herc2 (NM_010418.1,14447-14465).
catagacacagatgactat

SEQ ID NO: 616447 - DNA, 19 bp, Mus musculus
  siRNA target sequence for Herc2 (NM_010418.1,14528-14546).
ggacgccgactcttttgct

SEQ ID NO: 616448 - DNA, 19 bp, Mus musculus
  siRNA target sequence for Herc2 (NM_010418.1,14529-14547).
gacgccgactcttttgctt

SEQ ID NO: 616449 - DNA, 19 bp, Mus musculus
  siRNA target sequence for Herc2 (NM_010418.1,14548-14566).
cagactctacacaagacta

SEQ ID NO: 616450 - DNA, 19 bp, Mus musculus
  siRNA target sequence for Hip2 (NM_016786.2,423-441).
cccctaaggtccggtttat

SEQ ID NO: 616451 - DNA, 19 bp, Mus musculus
  siRNA target sequence for Hip2 (NM_016786.2,425-443).
cctaaggtccggtttatca

SEQ ID NO: 616452 - DNA, 19 bp, Mus musculus
  siRNA target sequence for Hip2 (NM_016786.2,472-490).
cgtcacaggggctatttgt

SEQ ID NO: 616453 - DNA, 19 bp, Mus musculus
  siRNA target sequence for Hip2 (NM_016786.2,480-498).
gggctatttgtttggatat

SEQ ID NO: 616454 - DNA, 19 bp, Mus musculus
  siRNA target sequence for Hip2 (NM_016786.2,526-544).
gactctgcgcacggtatta

SEQ ID NO: 616455 - DNA, 19 bp, Mus musculus
  siRNA target sequence for Hip2 (NM_016786.2,528-546).
ctctgcgcacggtattatt

SEQ ID NO: 616456 - DNA, 19 bp, Mus musculus
  siRNA target sequence for Hip2 (NM_016786.2,530-548).
ctgcgcacggtattattgt

SEQ ID NO: 616457 - DNA, 19 bp, Mus musculus
  siRNA target sequence for Hip2 (NM_016786.2,532-550).
gcgcacggtattattgtca

SEQ ID NO: 616458 - DNA, 19 bp, Mus musculus
  siRNA target sequence for Hip2 (NM_016786.2,533-551).
cgcacggtattattgtcat

SEQ ID NO: 616459 - DNA, 19 bp, Mus musculus
  siRNA target sequence for Hip2 (NM_016786.2,534-552).
gcacggtattattgtcatt

SEQ ID NO: 616460 - DNA, 19 bp, Mus musculus
  siRNA target sequence for Hip2 (NM_016786.2,596-614).
gcagtagtagcgaatcagt

SEQ ID NO: 616461 - DNA, 19 bp, Mus musculus
  siRNA target sequence for Hip2 (NM_016786.2,597-615).
cagtagtagcgaatcagta

SEQ ID NO: 616462 - DNA, 19 bp, Mus musculus
  siRNA target sequence for Hip2 (NM_016786.2,620-638).
cagaatcctgaaatgttca

SEQ ID NO: 616463 - DNA, 19 bp, Mus musculus
  siRNA target sequence for Mgrn1 (NM_029657.2,212-230).
ctccgaagtccggaaacta

SEQ ID NO: 616464 - DNA, 19 bp, Mus musculus
  siRNA target sequence for Mgrn1 (NM_029657.2,214-232).
ccgaagtccggaaactact

SEQ ID NO: 616465 - DNA, 19 bp, Mus musculus
  siRNA target sequence for Mgrn1 (NM_029657.2,215-233).
cgaagtccggaaactactt

SEQ ID NO: 616466 - DNA, 19 bp, Mus musculus
  siRNA target sequence for Mgrn1 (NM_029657.2,216-234).
gaagtccggaaactacttt

SEQ ID NO: 616467 - DNA, 19 bp, Mus musculus
  siRNA target sequence for Mgrn1 (NM_029657.2,420-438).
ccggcttgtgaggtacaaa

SEQ ID NO: 616468 - DNA, 19 bp, Mus musculus
  siRNA target sequence for Mgrn1 (NM_029657.2,455-473).
ccacggaggacggtgaaaa

SEQ ID NO: 616469 - DNA, 19 bp, Mus musculus
  siRNA target sequence for Mgrn1 (NM_029657.2,484-502).
ctctacagtctggaattca

SEQ ID NO: 616470 - DNA, 19 bp, Mus musculus
  siRNA target sequence for Mgrn1 (NM_029657.2,525-543).
ggctatcaccatctattgt

SEQ ID NO: 616471 - DNA, 19 bp, Mus musculus
  siRNA target sequence for Mgrn1 (NM_029657.2,833-851).
ccgtgaagccattaaagca

SEQ ID NO: 616472 - DNA, 19 bp, Mus musculus
  siRNA target sequence for Mgrn1 (NM_029657.2,924-942).
gactaagccttctgatgat

SEQ ID NO: 616473 - DNA, 19 bp, Mus musculus
  siRNA target sequence for Mgrn1 (NM_029657.2,926-944).
ctaagccttctgatgatga

SEQ ID NO: 616474 - DNA, 19 bp, Mus musculus
  siRNA target sequence for Mgrn1 (NM_029657.2,1186-1204).
cacgatgagcactctagtt

SEQ ID NO: 616475 - DNA, 19 bp, Mus musculus
  siRNA target sequence for Mgrn1 (NM_029657.2,1188-1206).
cgatgagcactctagttct

SEQ ID NO: 616476 - DNA, 19 bp, Mus musculus
  siRNA target sequence for Mgrn1 (NM_029657.2,1239-1257).
cttgcttgaggcactcaat

SEQ ID NO: 616477 - DNA, 19 bp, Mus musculus
  siRNA target sequence for Mgrn1 (NM_029657.2,1361-1379).
ctggacttgatcgaatcat

SEQ ID NO: 616478 - DNA, 19 bp, Mus musculus
  siRNA target sequence for Mgrn1 (NM_029657.2,1538-1556).
gcagctcccctgagagttt

SEQ ID NO: 616479 - DNA, 19 bp, Mus musculus
  siRNA target sequence for Mgrn1 (NM_029657.2,1596-1614).
gagccgagtaccctctatt

SEQ ID NO: 616480 - DNA, 19 bp, Mus musculus
  siRNA target sequence for Mgrn1 (NM_029657.2,1598-1616).
gccgagtaccctctattga

SEQ ID NO: 616481 - DNA, 19 bp, Mus musculus
  siRNA target sequence for Mgrn1 (NM_029657.2,1599-1617).
ccgagtaccctctattgat

SEQ ID NO: 616482 - DNA, 19 bp, Mus musculus
  siRNA target sequence for Mgrn1 (NM_029657.2,1601-1619).
gagtaccctctattgatga

SEQ ID NO: 616483 - DNA, 19 bp, Mus musculus
  siRNA target sequence for Mgrn1 (NM_029657.2,1707-1725).
gtcgtgctctgttggtata

SEQ ID NO: 616484 - DNA, 19 bp, Mus musculus
  siRNA target sequence for Mgrn1 (NM_029657.2,1709-1727).
cgtgctctgttggtataga

SEQ ID NO: 616485 - DNA, 19 bp, Mus musculus
  siRNA target sequence for Nedd4l (NM_031881.1,373-391).
gcgacctagaagtcataaa

SEQ ID NO: 616486 - DNA, 19 bp, Mus musculus
  siRNA target sequence for Nedd4l (NM_031881.1,393-411).
ctcgagtcaaggggttttt

SEQ ID NO: 616487 - DNA, 19 bp, Mus musculus
  siRNA target sequence for Nedd4l (NM_031881.1,395-413).
cgagtcaaggggtttttga

SEQ ID NO: 616488 - DNA, 19 bp, Mus musculus
  siRNA target sequence for Nedd4l (NM_031881.1,403-421).
ggggtttttgaggttgaaa

SEQ ID NO: 616489 - DNA, 19 bp, Mus musculus
  siRNA target sequence for Nedd4l (NM_031881.1,442-460).
cggaggtcaggatgaagaa

SEQ ID NO: 616490 - DNA, 19 bp, Mus musculus
  siRNA target sequence for Nedd4l (NM_031881.1,465-483).
gcgagcagagggatgacat

SEQ ID NO: 616491 - DNA, 19 bp, Mus musculus
  siRNA target sequence for Nedd4l (NM_031881.1,593-611).
ggccgaacttactatgtca

SEQ ID NO: 616492 - DNA, 19 bp, Mus musculus
  siRNA target sequence for Nedd4l (NM_031881.1,594-612).
gccgaacttactatgtcaa

SEQ ID NO: 616493 - DNA, 19 bp, Mus musculus
  siRNA target sequence for Nedd4l (NM_031881.1,661-679).
gtcctcggaatcagacaat

SEQ ID NO: 616494 - DNA, 19 bp, Mus musculus
  siRNA target sequence for Nedd4l (NM_031881.1,724-742).
ctctcggaggcacattagt

SEQ ID NO: 616495 - DNA, 19 bp, Mus musculus
  siRNA target sequence for Nedd4l (NM_031881.1,730-748).
gaggcacattagtgaagat

SEQ ID NO: 616496 - DNA, 19 bp, Mus musculus
  siRNA target sequence for Nedd4l (NM_031881.1,989-1007).
cttcggtcctgcagtgtta

SEQ ID NO: 616497 - DNA, 19 bp, Mus musculus
  siRNA target sequence for Nedd4l (NM_031881.1,1166-1184).
gcaaagggacgcacatact

SEQ ID NO: 616498 - DNA, 19 bp, Mus musculus
  siRNA target sequence for Nedd4l (NM_031881.1,1172-1190).
ggacgcacatactatgtca

SEQ ID NO: 616499 - DNA, 19 bp, Mus musculus
  siRNA target sequence for Nedd4l (NM_031881.1,1173-1191).
gacgcacatactatgtcaa

SEQ ID NO: 616500 - DNA, 19 bp, Mus musculus
  siRNA target sequence for Nedd4l (NM_031881.1,1183-1201).
ctatgtcaatcataacaat

SEQ ID NO: 616501 - DNA, 19 bp, Mus musculus
  siRNA target sequence for Nedd4l (NM_031881.1,1212-1230).
cttggactcggccaatcat

SEQ ID NO: 616502 - DNA, 19 bp, Mus musculus
  siRNA target sequence for Nedd4l (NM_031881.1,1256-1274).
ggatcagccacaaacagta

SEQ ID NO: 616503 - DNA, 19 bp, Mus musculus
  siRNA target sequence for Nedd4l (NM_031881.1,1257-1275).
gatcagccacaaacagtaa

SEQ ID NO: 616504 - DNA, 19 bp, Mus musculus
  siRNA target sequence for Nedd4l (NM_031881.1,1318-1336).
cagctcgccaacagtaact

SEQ ID NO: 616505 - DNA, 19 bp, Mus musculus
  siRNA target sequence for Nedd4l (NM_031881.1,1320-1338).
gctcgccaacagtaacttt

SEQ ID NO: 616506 - DNA, 19 bp, Mus musculus
  siRNA target sequence for Nedd4l (NM_031881.1,1321-1339).
ctcgccaacagtaacttta

SEQ ID NO: 616507 - DNA, 19 bp, Mus musculus
  siRNA target sequence for Nedd4l (NM_031881.1,1375-1393).
ccgccgtgccgtgaaagat

SEQ ID NO: 616508 - DNA, 19 bp, Mus musculus
  siRNA target sequence for Nedd4l (NM_031881.1,1376-1394).
cgccgtgccgtgaaagata

SEQ ID NO: 616509 - DNA, 19 bp, Mus musculus
  siRNA target sequence for Nedd4l (NM_031881.1,1387-1405).
gaaagataccctttccaat

SEQ ID NO: 616510 - DNA, 19 bp, Mus musculus
  siRNA target sequence for Nedd4l (NM_031881.1,1509-1527).
gccgacccttcttcattga

SEQ ID NO: 616511 - DNA, 19 bp, Mus musculus
  siRNA target sequence for Nedd4l (NM_031881.1,1580-1598).
cacatgcggtcaaaagcat

SEQ ID NO: 616512 - DNA, 19 bp, Mus musculus
  siRNA target sequence for Nedd4l (NM_031881.1,1585-1603).
gcggtcaaaagcatcttta

SEQ ID NO: 616513 - DNA, 19 bp, Mus musculus
  siRNA target sequence for Nedd4l (NM_031881.1,1668-1686).
cgttttacattgaccataa

SEQ ID NO: 616514 - DNA, 19 bp, Mus musculus
  siRNA target sequence for Nedd4l (NM_031881.1,1751-1769).
ccgtactccagagagttta

SEQ ID NO: 616515 - DNA, 19 bp, Mus musculus
  siRNA target sequence for Nedd4l (NM_031881.1,1752-1770).
cgtactccagagagtttaa

SEQ ID NO: 616516 - DNA, 19 bp, Mus musculus
  siRNA target sequence for Nedd4l (NM_031881.1,1761-1779).
gagagtttaagcagaaata

SEQ ID NO: 616517 - DNA, 19 bp, Mus musculus
  siRNA target sequence for Nedd4l (NM_031881.1,1772-1790).
cagaaatacgactacttta

SEQ ID NO: 616518 - DNA, 19 bp, Mus musculus
  siRNA target sequence for Nedd4l (NM_031881.1,1780-1798).
cgactactttaggaagaaa

SEQ ID NO: 616519 - DNA, 19 bp, Mus musculus
  siRNA target sequence for Nedd4l (NM_031881.1,1827-1845).
ggtttgaaatgaaacttca

SEQ ID NO: 616520 - DNA, 19 bp, Mus musculus
  siRNA target sequence for Nedd4l (NM_031881.1,1914-1932).
ctaggctgtggattgagtt

SEQ ID NO: 616521 - DNA, 19 bp, Mus musculus
  siRNA target sequence for Nedd4l (NM_031881.1,1918-1936).
gctgtggattgagtttgaa

SEQ ID NO: 616522 - DNA, 19 bp, Mus musculus
  siRNA target sequence for Nedd4l (NM_031881.1,1921-1939).
gtggattgagtttgaatca

SEQ ID NO: 616523 - DNA, 19 bp, Mus musculus
  siRNA target sequence for Nedd4l (NM_031881.1,1923-1941).
ggattgagtttgaatcaga

SEQ ID NO: 616524 - DNA, 19 bp, Mus musculus
  siRNA target sequence for Nedd4l (NM_031881.1,1973-1991).
gaatggttcttcttactgt

SEQ ID NO: 616525 - DNA, 19 bp, Mus musculus
  siRNA target sequence for Nedd4l (NM_031881.1,1999-2017).
gatgtttaacccctactat

SEQ ID NO: 616526 - DNA, 19 bp, Mus musculus
  siRNA target sequence for Nedd4l (NM_031881.1,2087-2105).
gaagaccatttgtcctatt

SEQ ID NO: 616527 - DNA, 19 bp, Mus musculus
  siRNA target sequence for Nedd4l (NM_031881.1,2127-2145).
ctggcctagcggtgtttca

SEQ ID NO: 616528 - DNA, 19 bp, Mus musculus
  siRNA target sequence for Nedd4l (NM_031881.1,2174-2192).
cgaccattctacaagatga

SEQ ID NO: 616529 - DNA, 19 bp, Mus musculus
  siRNA target sequence for Nedd4l (NM_031881.1,2175-2193).
gaccattctacaagatgat

SEQ ID NO: 616530 - DNA, 19 bp, Mus musculus
  siRNA target sequence for Nedd4l (NM_031881.1,2229-2247).
ccgtggacagcgagtacta

SEQ ID NO: 616531 - DNA, 19 bp, Mus musculus
  siRNA target sequence for Nedd4l (NM_031881.1,2238-2256).
gcgagtactacaactcttt

SEQ ID NO: 616532 - DNA, 19 bp, Mus musculus
  siRNA target sequence for Nedd4l (NM_031881.1,2240-2258).
gagtactacaactctttga

SEQ ID NO: 616533 - DNA, 19 bp, Mus musculus
  siRNA target sequence for Nedd4l (NM_031881.1,2253-2271).
ctttgaagtggatcttaga

SEQ ID NO: 616534 - DNA, 19 bp, Mus musculus
  siRNA target sequence for Nedd4l (NM_031881.1,2283-2301).
cggaacttgacctcatgtt

SEQ ID NO: 616535 - DNA, 19 bp, Mus musculus
  siRNA target sequence for Nedd4l (NM_031881.1,2350-2368).
gcccaacgggtcagaaata

SEQ ID NO: 616536 - DNA, 19 bp, Mus musculus
  siRNA target sequence for Nedd4l (NM_031881.1,2351-2369).
cccaacgggtcagaaataa

SEQ ID NO: 616537 - DNA, 19 bp, Mus musculus
  siRNA target sequence for Nedd4l (NM_031881.1,2352-2370).
ccaacgggtcagaaataat

SEQ ID NO: 616538 - DNA, 19 bp, Mus musculus
  siRNA target sequence for Nedd4l (NM_031881.1,2356-2374).
cgggtcagaaataatggta

SEQ ID NO: 616539 - DNA, 19 bp, Mus musculus
  siRNA target sequence for Nedd4l (NM_031881.1,2453-2471).
gccttcttggagggattta

SEQ ID NO: 616540 - DNA, 19 bp, Mus musculus
  siRNA target sequence for Nedd4l (NM_031881.1,2455-2473).
cttcttggagggatttaca

SEQ ID NO: 616541 - DNA, 19 bp, Mus musculus
  siRNA target sequence for Nedd4l (NM_031881.1,2480-2498).
cttccaatcgacttgatta

SEQ ID NO: 616542 - DNA, 19 bp, Mus musculus
  siRNA target sequence for Nedd4l (NM_031881.1,2565-2583).
ggagacagcactctattta

SEQ ID NO: 616543 - DNA, 19 bp, Mus musculus
  siRNA target sequence for Nedd4l (NM_031881.1,2661-2679).
gcatccggttactacagtt

SEQ ID NO: 616544 - DNA, 19 bp, Mus musculus
  siRNA target sequence for Nedd4l (NM_031881.1,2742-2760).
ctcagctgtttacaataga

SEQ ID NO: 616545 - DNA, 19 bp, Mus musculus
  siRNA target sequence for Nedd4l (NM_031881.1,2766-2784).
ggggcagtcccgaaaaact

SEQ ID NO: 616546 - DNA, 19 bp, Mus musculus
  siRNA target sequence for Nedd4l (NM_031881.1,2767-2785).
gggcagtcccgaaaaacta

SEQ ID NO: 616547 - DNA, 19 bp, Mus musculus
  siRNA target sequence for Nedd4l (NM_031881.1,2812-2830).
ccttgatttacctccatat

SEQ ID NO: 616548 - DNA, 19 bp, Mus musculus
  siRNA target sequence for Ubc-rs2 (NM_145578.1,335-353).
gcgcagctccggattcaga

SEQ ID NO: 616549 - DNA, 19 bp, Mus musculus
  siRNA target sequence for Ubc-rs2 (NM_145578.1,344-362).
cggattcagaaggacatta

SEQ ID NO: 616550 - DNA, 19 bp, Mus musculus
  siRNA target sequence for Ubc-rs2 (NM_145578.1,433-451).
ggtgatctgtcctgatgaa

SEQ ID NO: 616551 - DNA, 19 bp, Mus musculus
  siRNA target sequence for Ubc-rs2 (NM_145578.1,444-462).
ctgatgaaggcttctacaa

SEQ ID NO: 616552 - DNA, 19 bp, Mus musculus
  siRNA target sequence for Ubc-rs2 (NM_145578.1,446-464).
gatgaaggcttctacaaaa

SEQ ID NO: 616553 - DNA, 19 bp, Mus musculus
  siRNA target sequence for Ubc-rs2 (NM_145578.1,457-475).
ctacaaaagtggcaagttt

SEQ ID NO: 616554 - DNA, 19 bp, Mus musculus
  siRNA target sequence for Ubc-rs2 (NM_145578.1,460-478).
caaaagtggcaagtttgta

SEQ ID NO: 616555 - DNA, 19 bp, Mus musculus
  siRNA target sequence for Ubc-rs2 (NM_145578.1,603-621).
ggaagccagtccttacgat

SEQ ID NO: 616556 - DNA, 19 bp, Mus musculus
  siRNA target sequence for Ubc-rs2 (NM_145578.1,604-622).
gaagccagtccttacgata

SEQ ID NO: 616557 - DNA, 19 bp, Mus musculus
  siRNA target sequence for Ubc-rs2 (NM_145578.1,608-626).
ccagtccttacgataaact

SEQ ID NO: 616558 - DNA, 19 bp, Mus musculus
  siRNA target sequence for Ubc-rs2 (NM_145578.1,614-632).
cttacgataaactccataa

SEQ ID NO: 616559 - DNA, 19 bp, Mus musculus
  siRNA target sequence for Ubc-rs2 (NM_145578.1,618-636).
cgataaactccataattta

SEQ ID NO: 616560 - DNA, 19 bp, Mus musculus
  siRNA target sequence for Ubc-rs2 (NM_145578.1,747-765).
ccatgagaggtggttacat

SEQ ID NO: 616561 - DNA, 19 bp, Mus musculus
  siRNA target sequence for Ubce8 (NM_019949.1,237-255).
ccagggagtatccattcaa

SEQ ID NO: 616562 - DNA, 19 bp, Mus musculus
  siRNA target sequence for Ubce8 (NM_019949.1,270-288).
gattcaccaccaagatcta

SEQ ID NO: 616563 - DNA, 19 bp, Mus musculus
  siRNA target sequence for Ubce8 (NM_019949.1,354-372).
cttacaccaagccttatca

SEQ ID NO: 616564 - DNA, 19 bp, Mus musculus
  siRNA target sequence for Ubce8 (NM_019949.1,360-378).
ccaagccttatcaagtctt

SEQ ID NO: 616565 - DNA, 19 bp, Mus musculus
  siRNA target sequence for Ubce8 (NM_019949.1,388-406).
caatgtgctggtgagtaaa

SEQ ID NO: 616566 - DNA, 19 bp, Mus musculus
  siRNA target sequence for Ubce8 (NM_019949.1,485-503).
gaagagttcacccttaaat

SEQ ID NO: 616567 - DNA, 19 bp, Mus musculus
  siRNA target sequence for Ube2b (NM_009458.2,74-92).
ggctcatgcgggatttcaa

SEQ ID NO: 616568 - DNA, 19 bp, Mus musculus
  siRNA target sequence for Ube2b (NM_009458.2,84-102).
ggatttcaagcgattgcaa

SEQ ID NO: 616569 - DNA, 19 bp, Mus musculus
  siRNA target sequence for Ube2b (NM_009458.2,202-220).
ggtacttttaaactagtaa

SEQ ID NO: 616570 - DNA, 19 bp, Mus musculus
  siRNA target sequence for Ube2b (NM_009458.2,206-224).
cttttaaactagtaataga

SEQ ID NO: 616571 - DNA, 19 bp, Mus musculus
  siRNA target sequence for Ube2b (NM_009458.2,250-268).
ccaccaaccgttaggtttt

SEQ ID NO: 616572 - DNA, 19 bp, Mus musculus
  siRNA target sequence for Ube2b (NM_009458.2,251-269).
caccaaccgttaggttttt

SEQ ID NO: 616573 - DNA, 19 bp, Mus musculus
  siRNA target sequence for Ube2b (NM_009458.2,253-271).
ccaaccgttaggtttttat

SEQ ID NO: 616574 - DNA, 19 bp, Mus musculus
  siRNA target sequence for Ube2b (NM_009458.2,257-275).
ccgttaggtttttatccaa

SEQ ID NO: 616575 - DNA, 19 bp, Mus musculus
  siRNA target sequence for Ube2b (NM_009458.2,258-276).
cgttaggtttttatccaaa

SEQ ID NO: 616576 - DNA, 19 bp, Mus musculus
  siRNA target sequence for Ube2b (NM_009458.2,259-277).
gttaggtttttatccaaaa

SEQ ID NO: 616577 - DNA, 19 bp, Mus musculus
  siRNA target sequence for Ube2b (NM_009458.2,308-326).
gcatatgtttagatatcct

SEQ ID NO: 616578 - DNA, 19 bp, Mus musculus
  siRNA target sequence for Ube2b (NM_009458.2,319-337).
gatatcctgcagaatcgat

SEQ ID NO: 616579 - DNA, 19 bp, Mus musculus
  siRNA target sequence for Ube2b (NM_009458.2,335-353).
gatggagtcccacatatga

SEQ ID NO: 616580 - DNA, 19 bp, Mus musculus
  siRNA target sequence for Ube2b (NM_009458.2,388-406).
ctggatgaaccgaatccaa

SEQ ID NO: 616581 - DNA, 19 bp, Mus musculus
  siRNA target sequence for Ube2b (NM_009458.2,433-451).
cagctttatcaggaaaaca

SEQ ID NO: 616582 - DNA, 19 bp, Mus musculus
  siRNA target sequence for Ube2b (NM_009458.2,468-486).
gagagtttcggccattgtt

SEQ ID NO: 616583 - DNA, 19 bp, Mus musculus
  siRNA target sequence for Ube2b (NM_009458.2,487-505).
gagcaaagctggaatgatt

SEQ ID NO: 616584 - DNA, 19 bp, Mus musculus
  siRNA target sequence for Ube2b (NM_009458.2,489-507).
gcaaagctggaatgattca

SEQ ID NO: 616585 - DNA, 19 bp, Mus musculus
  siRNA target sequence for Ube2c (NM_026785.1,178-196).
catgacatctggtgacaaa

SEQ ID NO: 616586 - DNA, 19 bp, Mus musculus
  siRNA target sequence for Ube2c (NM_026785.1,258-276).
cagccggcaccgtatatga

SEQ ID NO: 616587 - DNA, 19 bp, Mus musculus
  siRNA target sequence for Ube2c (NM_026785.1,261-279).
ccggcaccgtatatgaaga

SEQ ID NO: 616588 - DNA, 19 bp, Mus musculus
  siRNA target sequence for Ube2c (NM_026785.1,309-327).
ccagcggctacccttacaa

SEQ ID NO: 616589 - DNA, 19 bp, Mus musculus
  siRNA target sequence for Ube2c (NM_026785.1,417-435).
ggtctgcactatatgatgt

SEQ ID NO: 616590 - DNA, 19 bp, Mus musculus
  siRNA target sequence for Ube2c (NM_026785.1,470-488).
ggagaacccaacatcgata

SEQ ID NO: 616591 - DNA, 19 bp, Mus musculus
  siRNA target sequence for Ube2c (NM_026785.1,506-524).
gctgcggaactctggaaaa

SEQ ID NO: 616592 - DNA, 19 bp, Mus musculus
  siRNA target sequence for Ube2c (NM_026785.1,548-566).
ctgcaagaaacctattcaa

SEQ ID NO: 616593 - DNA, 19 bp, Mus musculus
  siRNA target sequence for Ube2e1 (NM_009455.2,302-320).
gcatgagcaaaaattcgaa

SEQ ID NO: 616594 - DNA, 19 bp, Mus musculus
  siRNA target sequence for Ube2e3 (NM_009454.2,546-564).
caaaacgactgctaagtta

SEQ ID NO: 616595 - DNA, 19 bp, Mus musculus
  siRNA target sequence for Ube2e3 (NM_009454.2,561-579).
gttatccactagtgctaaa

SEQ ID NO: 616596 - DNA, 19 bp, Mus musculus
  siRNA target sequence for Ube2e3 (NM_009454.2,566-584).
ccactagtgctaaaagaat

SEQ ID NO: 616597 - DNA, 19 bp, Mus musculus
  siRNA target sequence for Ube2e3 (NM_009454.2,567-585).
cactagtgctaaaagaatt

SEQ ID NO: 616598 - DNA, 19 bp, Mus musculus
  siRNA target sequence for Ube2e3 (NM_009454.2,682-700).
ggtccaccaggttctgtat

SEQ ID NO: 616599 - DNA, 19 bp, Mus musculus
  siRNA target sequence for Ube2e3 (NM_009454.2,712-730).
gttttttttctggatatca

SEQ ID NO: 616600 - DNA, 19 bp, Mus musculus
  siRNA target sequence for Ube2e3 (NM_009454.2,737-755).
cttcagattatccatttaa

SEQ ID NO: 616601 - DNA, 19 bp, Mus musculus
  siRNA target sequence for Ube2e3 (NM_009454.2,812-830).
gagtcatctgcctggatat

SEQ ID NO: 616602 - DNA, 19 bp, Mus musculus
  siRNA target sequence for Ube2e3 (NM_009454.2,819-837).
ctgcctggatattctgaaa

SEQ ID NO: 616603 - DNA, 19 bp, Mus musculus
  siRNA target sequence for Ube2e3 (NM_009454.2,845-863).
ggagtcctgctttgactat

SEQ ID NO: 616604 - DNA, 19 bp, Mus musculus
  siRNA target sequence for Ube2e3 (NM_009454.2,870-888).
ggttttgctctctatttgt

SEQ ID NO: 616605 - DNA, 19 bp, Mus musculus
  siRNA target sequence for Ube2g1 (NM_025985.2,281-299).
gcttttcagcaggtttaat

SEQ ID NO: 616606 - DNA, 19 bp, Mus musculus
  siRNA target sequence for Ube2g1 (NM_025985.2,293-311).
gtttaatagacgacaatga

SEQ ID NO: 616607 - DNA, 19 bp, Mus musculus
  siRNA target sequence for Ube2g1 (NM_025985.2,304-322).
gacaatgatctctatcgtt

SEQ ID NO: 616608 - DNA, 19 bp, Mus musculus
  siRNA target sequence for Ube2g1 (NM_025985.2,320-338).
gttgggaagtccttattat

SEQ ID NO: 616609 - DNA, 19 bp, Mus musculus
  siRNA target sequence for Ube2g1 (NM_025985.2,387-405).
cactttcccaaaagattat

SEQ ID NO: 616610 - DNA, 19 bp, Mus musculus
  siRNA target sequence for Ube2g1 (NM_025985.2,407-425).
ccctccggcctcctaaaat

SEQ ID NO: 616611 - DNA, 19 bp, Mus musculus
  siRNA target sequence for Ube2g1 (NM_025985.2,412-430).
cggcctcctaaaatgaaat

SEQ ID NO: 616612 - DNA, 19 bp, Mus musculus
  siRNA target sequence for Ube2g1 (NM_025985.2,416-434).
ctcctaaaatgaaattcat

SEQ ID NO: 616613 - DNA, 19 bp, Mus musculus
  siRNA target sequence for Ube2g1 (NM_025985.2,418-436).
cctaaaatgaaattcatta

SEQ ID NO: 616614 - DNA, 19 bp, Mus musculus
  siRNA target sequence for Ube2g1 (NM_025985.2,496-514).
gagcctggggaggataaat

SEQ ID NO: 616615 - DNA, 19 bp, Mus musculus
  siRNA target sequence for Ube2g1 (NM_025985.2,502-520).
ggggaggataaatatggtt

SEQ ID NO: 616616 - DNA, 19 bp, Mus musculus
  siRNA target sequence for Ube2g1 (NM_025985.2,503-521).
gggaggataaatatggtta

SEQ ID NO: 616617 - DNA, 19 bp, Mus musculus
  siRNA target sequence for Ube2g1 (NM_025985.2,504-522).
ggaggataaatatggttat

SEQ ID NO: 616618 - DNA, 19 bp, Mus musculus
  siRNA target sequence for Ube2g1 (NM_025985.2,532-550).
gaggaacgctggttaccta

SEQ ID NO: 616619 - DNA, 19 bp, Mus musculus
  siRNA target sequence for Ube2g1 (NM_025985.2,559-577).
gtggaaaccatcatgatta

SEQ ID NO: 616620 - DNA, 19 bp, Mus musculus
  siRNA target sequence for Ube2g1 (NM_025985.2,587-605).
ctatgctggcagatcctaa

SEQ ID NO: 616621 - DNA, 19 bp, Mus musculus
  siRNA target sequence for Ube2g1 (NM_025985.2,591-609).
gctggcagatcctaatgga

SEQ ID NO: 616622 - DNA, 19 bp, Mus musculus
  siRNA target sequence for Ube2g1 (NM_025985.2,625-643).
gtagatgctgcgaaagaat

SEQ ID NO: 616623 - DNA, 19 bp, Mus musculus
  siRNA target sequence for Ube2g1 (NM_025985.2,682-700).
gcccgctgtgtaagaaaaa

SEQ ID NO: 616624 - DNA, 19 bp, Mus musculus
  siRNA target sequence for Ube2g1 (NM_025985.2,701-719).
gccaagaaactgcttttga

SEQ ID NO: 616625 - DNA, 19 bp, Mus musculus
  siRNA target sequence for Ube2g1 (NM_025985.2,703-721).
caagaaactgcttttgagt

SEQ ID NO: 616626 - DNA, 19 bp, Mus musculus
  siRNA target sequence for Ube2g2 (NM_019803.2,125-143).
cgtggcaggccccatgaat

SEQ ID NO: 616627 - DNA, 19 bp, Mus musculus
  siRNA target sequence for Ube2g2 (NM_019803.2,130-148).
caggccccatgaatgaaga

SEQ ID NO: 616628 - DNA, 19 bp, Mus musculus
  siRNA target sequence for Ube2g2 (NM_019803.2,159-177).
gaatgggaggcattgatca

SEQ ID NO: 616629 - DNA, 19 bp, Mus musculus
  siRNA target sequence for Ube2g2 (NM_019803.2,182-200).
ccctgaagacacttgtttt

SEQ ID NO: 616630 - DNA, 19 bp, Mus musculus
  siRNA target sequence for Ube2g2 (NM_019803.2,186-204).
gaagacacttgttttgagt

SEQ ID NO: 616631 - DNA, 19 bp, Mus musculus
  siRNA target sequence for Ube2g2 (NM_019803.2,253-271).
gccctccgaagatgagatt

SEQ ID NO: 616632 - DNA, 19 bp, Mus musculus
  siRNA target sequence for Ube2g2 (NM_019803.2,255-273).
cctccgaagatgagattca

SEQ ID NO: 616633 - DNA, 19 bp, Mus musculus
  siRNA target sequence for Ube2g2 (NM_019803.2,465-483).
gtagatgcttccaagatgt

SEQ ID NO: 616634 - DNA, 19 bp, Mus musculus
  siRNA target sequence for Ube2g2 (NM_019803.2,496-514).
gggagcagttctacaagat

SEQ ID NO: 616635 - DNA, 19 bp, Mus musculus
  siRNA target sequence for Ube2h (NM_009459.1,570-588).
gagtacaagcagaaaatta

SEQ ID NO: 616636 - DNA, 19 bp, Mus musculus
  siRNA target sequence for Ube2i (NM_011665.2,165-183).
gccttgcgcaggaaaggaa

SEQ ID NO: 616637 - DNA, 19 bp, Mus musculus
  siRNA target sequence for Ube2i (NM_011665.2,215-233).
gtagctgtcccaacaaaga

SEQ ID NO: 616638 - DNA, 19 bp, Mus musculus
  siRNA target sequence for Ube2i (NM_011665.2,243-261).
gcacaatgaacctgatgaa

SEQ ID NO: 616639 - DNA, 19 bp, Mus musculus
  siRNA target sequence for Ube2i (NM_011665.2,270-288).
gcgctatccctggaaagaa

SEQ ID NO: 616640 - DNA, 19 bp, Mus musculus
  siRNA target sequence for Ube2i (NM_011665.2,347-365).
ccgtcctcaccaccaaaat

SEQ ID NO: 616641 - DNA, 19 bp, Mus musculus
  siRNA target sequence for Ube2i (NM_011665.2,349-367).
gtcctcaccaccaaaatgt

SEQ ID NO: 616642 - DNA, 19 bp, Mus musculus
  siRNA target sequence for Ube2i (NM_011665.2,351-369).
cctcaccaccaaaatgtaa

SEQ ID NO: 616643 - DNA, 19 bp, Mus musculus
  siRNA target sequence for Ube2i (NM_011665.2,352-370).
ctcaccaccaaaatgtaaa

SEQ ID NO: 616644 - DNA, 19 bp, Mus musculus
  siRNA target sequence for Ube2i (NM_011665.2,389-407).
catccaaacgtgtatcctt

SEQ ID NO: 616645 - DNA, 19 bp, Mus musculus
  siRNA target sequence for Ube2i (NM_011665.2,459-477).
ctatcaccatcaaacagat

SEQ ID NO: 616646 - DNA, 19 bp, Mus musculus
  siRNA target sequence for Ube2j1 (NM_019586.2,80-98).
gccgttaagcgattgatga

SEQ ID NO: 616647 - DNA, 19 bp, Mus musculus
  siRNA target sequence for Ube2j1 (NM_019586.2,145-163).
gcctctggaggataacctt

SEQ ID NO: 616648 - DNA, 19 bp, Mus musculus
  siRNA target sequence for Ube2j1 (NM_019586.2,146-164).
cctctggaggataaccttt

SEQ ID NO: 616649 - DNA, 19 bp, Mus musculus
  siRNA target sequence for Ube2j1 (NM_019586.2,152-170).
gaggataacctttttgaat

SEQ ID NO: 616650 - DNA, 19 bp, Mus musculus
  siRNA target sequence for Ube2j1 (NM_019586.2,192-210).
ccccagattccgattttga

SEQ ID NO: 616651 - DNA, 19 bp, Mus musculus
  siRNA target sequence for Ube2j1 (NM_019586.2,256-274).
catgaaaccaccaagcatt

SEQ ID NO: 616652 - DNA, 19 bp, Mus musculus
  siRNA target sequence for Ube2j1 (NM_019586.2,277-295).
cctgctaacagctaatgga

SEQ ID NO: 616653 - DNA, 19 bp, Mus musculus
  siRNA target sequence for Ube2j1 (NM_019586.2,285-303).
cagctaatggacgatttga

SEQ ID NO: 616654 - DNA, 19 bp, Mus musculus
  siRNA target sequence for Ube2j1 (NM_019586.2,288-306).
ctaatggacgatttgaagt

SEQ ID NO: 616655 - DNA, 19 bp, Mus musculus
  siRNA target sequence for Ube2j1 (NM_019586.2,305-323).
gtaggcaagaagatctgtt

SEQ ID NO: 616656 - DNA, 19 bp, Mus musculus
  siRNA target sequence for Ube2j1 (NM_019586.2,356-374).
cagccttcatggagcataa

SEQ ID NO: 616657 - DNA, 19 bp, Mus musculus
  siRNA target sequence for Ube2j1 (NM_019586.2,397-415).
cgggtttatgccgactaaa

SEQ ID NO: 616658 - DNA, 19 bp, Mus musculus
  siRNA target sequence for Ube2j1 (NM_019586.2,400-418).
gtttatgccgactaaagga

SEQ ID NO: 616659 - DNA, 19 bp, Mus musculus
  siRNA target sequence for Ube2j1 (NM_019586.2,424-442).
ggccataggttctctagat

SEQ ID NO: 616660 - DNA, 19 bp, Mus musculus
  siRNA target sequence for Ube2j1 (NM_019586.2,425-443).
gccataggttctctagatt

SEQ ID NO: 616661 - DNA, 19 bp, Mus musculus
  siRNA target sequence for Ube2j1 (NM_019586.2,470-488).
gccaaaaaatcgcaagatt

SEQ ID NO: 616662 - DNA, 19 bp, Mus musculus
  siRNA target sequence for Ube2j1 (NM_019586.2,471-489).
ccaaaaaatcgcaagattt

SEQ ID NO: 616663 - DNA, 19 bp, Mus musculus
  siRNA target sequence for Ube2j1 (NM_019586.2,587-605).
gccaggcagattagtttta

SEQ ID NO: 616664 - DNA, 19 bp, Mus musculus
  siRNA target sequence for Ube2j1 (NM_019586.2,600-618).
gttttaaggccgaagtcaa

SEQ ID NO: 616665 - DNA, 19 bp, Mus musculus
  siRNA target sequence for Ube2j1 (NM_019586.2,607-625).
ggccgaagtcaattcatct

SEQ ID NO: 616666 - DNA, 19 bp, Mus musculus
  siRNA target sequence for Ube2j1 (NM_019586.2,676-694).
ctcacaagacgatttacct

SEQ ID NO: 616667 - DNA, 19 bp, Mus musculus
  siRNA target sequence for Ube2j1 (NM_019586.2,773-791).
cagccagctcctaagaata

SEQ ID NO: 616668 - DNA, 19 bp, Mus musculus
  siRNA target sequence for Ube2j1 (NM_019586.2,906-924).
ggtccgccatgctgatcat

SEQ ID NO: 616669 - DNA, 19 bp, Mus musculus
  siRNA target sequence for Ube2j1 (NM_019586.2,919-937).
gatcatcatcctgacttta

SEQ ID NO: 616670 - DNA, 19 bp, Mus musculus
  siRNA target sequence for Ube2j1 (NM_019586.2,938-956).
gcattggcggctcttatat

SEQ ID NO: 616671 - DNA, 19 bp, Mus musculus
  siRNA target sequence for Ube2j1 (NM_019586.2,939-957).
cattggcggctcttatatt

SEQ ID NO: 616672 - DNA, 19 bp, Mus musculus
  siRNA target sequence for Ube2j1 (NM_019586.2,950-968).
cttatattccgacgaatat

SEQ ID NO: 616673 - DNA, 19 bp, Mus musculus
  siRNA target sequence for Ube2j1 (NM_019586.2,973-991).
ggccaatgagtacatattt

SEQ ID NO: 616674 - DNA, 19 bp, Mus musculus
  siRNA target sequence for Ube2j1 (NM_019586.2,975-993).
ccaatgagtacatatttga

SEQ ID NO: 616675 - DNA, 19 bp, Mus musculus
  siRNA target sequence for Ube2r2 (NM_026275.2,217-235).
gctacttcaaggcacatat

SEQ ID NO: 616676 - DNA, 19 bp, Mus musculus
  siRNA target sequence for Ube2r2 (NM_026275.2,229-247).
cacatattaagtttcctat

SEQ ID NO: 616677 - DNA, 19 bp, Mus musculus
  siRNA target sequence for Ube2r2 (NM_026275.2,299-317).
ccccaacatttatgagaat

SEQ ID NO: 616678 - DNA, 19 bp, Mus musculus
  siRNA target sequence for Ube2r2 (NM_026275.2,314-332).
gaatggagatgtatgcatt

SEQ ID NO: 616679 - DNA, 19 bp, Mus musculus
  siRNA target sequence for Ube2r2 (NM_026275.2,319-337).
gagatgtatgcatttcaat

SEQ ID NO: 616680 - DNA, 19 bp, Mus musculus
  siRNA target sequence for Ube2r2 (NM_026275.2,408-426).
gttaggactatcctgttaa

SEQ ID NO: 616681 - DNA, 19 bp, Mus musculus
  siRNA target sequence for Ube2r2 (NM_026275.2,527-545).
ggaatatgctgagatcatt

SEQ ID NO: 616682 - DNA, 19 bp, Mus musculus
  siRNA target sequence for Ube2r2 (NM_026275.2,528-546).
gaatatgctgagatcatta

SEQ ID NO: 616683 - DNA, 19 bp, Mus musculus
  siRNA target sequence for Ube2r2 (NM_026275.2,554-572).
ggtctcagccactaaagct

SEQ ID NO: 616684 - DNA, 19 bp, Mus musculus
  siRNA target sequence for Ube2r2 (NM_026275.2,650-668).
caacagctcagatttgctt

SEQ ID NO: 616685 - DNA, 19 bp, Mus musculus
  siRNA target sequence for Ube2r2 (NM_026275.2,653-671).
cagctcagatttgctttat

SEQ ID NO: 616686 - DNA, 19 bp, Mus musculus
  siRNA target sequence for Ube2r2 (NM_026275.2,655-673).
gctcagatttgctttatga

SEQ ID NO: 616687 - DNA, 19 bp, Mus musculus
  siRNA target sequence for Ube2r2 (NM_026275.2,665-683).
gctttatgacgacttgtat

SEQ ID NO: 616688 - DNA, 19 bp, Mus musculus
  siRNA target sequence for Ube2s (NM_133777.1,754-772).
gggtcccatggccaagaaa

SEQ ID NO: 616689 - DNA, 19 bp, Mus musculus
  siRNA target sequence for Ube2s (NM_133777.1,777-795).
caggtgagcgagataagaa

SEQ ID NO: 616690 - DNA, 19 bp, Mus musculus
  siRNA target sequence for Ube3b (NM_054093.1,595-613).
ggattacggcctcaatgat

SEQ ID NO: 616691 - DNA, 19 bp, Mus musculus
  siRNA target sequence for Ube3b (NM_054093.1,596-614).
gattacggcctcaatgatt

SEQ ID NO: 616692 - DNA, 19 bp, Mus musculus
  siRNA target sequence for Ube3b (NM_054093.1,862-880).
gcggaaggtctgcaacatt

SEQ ID NO: 616693 - DNA, 19 bp, Mus musculus
  siRNA target sequence for Ube3b (NM_054093.1,863-881).
cggaaggtctgcaacattt

SEQ ID NO: 616694 - DNA, 19 bp, Mus musculus
  siRNA target sequence for Ube3b (NM_054093.1,1114-1132).
catcctcgatgacattgaa

SEQ ID NO: 616695 - DNA, 19 bp, Mus musculus
  siRNA target sequence for Ube3b (NM_054093.1,1213-1231).
gatctgggacggaattgta

SEQ ID NO: 616696 - DNA, 19 bp, Mus musculus
  siRNA target sequence for Ube3b (NM_054093.1,1218-1236).
gggacggaattgtagagaa

SEQ ID NO: 616697 - DNA, 19 bp, Mus musculus
  siRNA target sequence for Ube3b (NM_054093.1,1219-1237).
ggacggaattgtagagaat

SEQ ID NO: 616698 - DNA, 19 bp, Mus musculus
  siRNA target sequence for Ube3b (NM_054093.1,1281-1299).
ggctgatggtgctgtatga

SEQ ID NO: 616699 - DNA, 19 bp, Mus musculus
  siRNA target sequence for Ube3b (NM_054093.1,1430-1448).
gtcgtgcctcacaagaaca

SEQ ID NO: 616700 - DNA, 19 bp, Mus musculus
  siRNA target sequence for Ube3b (NM_054093.1,1457-1475).
ctgttccggaacatggtta

SEQ ID NO: 616701 - DNA, 19 bp, Mus musculus
  siRNA target sequence for Ube3b (NM_054093.1,1614-1632).
gtgtgatccgagtgaagtt

SEQ ID NO: 616702 - DNA, 19 bp, Mus musculus
  siRNA target sequence for Ube3b (NM_054093.1,1725-1743).
ccgcactcaacctgttcaa

SEQ ID NO: 616703 - DNA, 19 bp, Mus musculus
  siRNA target sequence for Ube3b (NM_054093.1,1730-1748).
ctcaacctgttcaagacaa

SEQ ID NO: 616704 - DNA, 19 bp, Mus musculus
  siRNA target sequence for Ube3b (NM_054093.1,1954-1972).
cctggactcggagttttat

SEQ ID NO: 616705 - DNA, 19 bp, Mus musculus
  siRNA target sequence for Ube3b (NM_054093.1,1955-1973).
ctggactcggagttttata

SEQ ID NO: 616706 - DNA, 19 bp, Mus musculus
  siRNA target sequence for Ube3b (NM_054093.1,1957-1975).
ggactcggagttttataaa

SEQ ID NO: 616707 - DNA, 19 bp, Mus musculus
  siRNA target sequence for Ube3b (NM_054093.1,1958-1976).
gactcggagttttataaaa

SEQ ID NO: 616708 - DNA, 19 bp, Mus musculus
  siRNA target sequence for Ube3b (NM_054093.1,1962-1980).
cggagttttataaaaacct

SEQ ID NO: 616709 - DNA, 19 bp, Mus musculus
  siRNA target sequence for Ube3b (NM_054093.1,2023-2041).
gctgacgctgtcttacgat

SEQ ID NO: 616710 - DNA, 19 bp, Mus musculus
  siRNA target sequence for Ube3b (NM_054093.1,2092-2110).
gaccatcccggttacagat

SEQ ID NO: 616711 - DNA, 19 bp, Mus musculus
  siRNA target sequence for Ube3b (NM_054093.1,2101-2119).
ggttacagatgagaacaaa

SEQ ID NO: 616712 - DNA, 19 bp, Mus musculus
  siRNA target sequence for Ube3b (NM_054093.1,2108-2126).
gatgagaacaaaattagct

SEQ ID NO: 616713 - DNA, 19 bp, Mus musculus
  siRNA target sequence for Ube3b (NM_054093.1,2149-2167).
ccgaatgcacactcaaatt

SEQ ID NO: 616714 - DNA, 19 bp, Mus musculus
  siRNA target sequence for Ube3b (NM_054093.1,2195-2213).
ggcttccgttccatcatca

SEQ ID NO: 616715 - DNA, 19 bp, Mus musculus
  siRNA target sequence for Ube3b (NM_054093.1,2219-2237).
gagtggatccgaatgttct

SEQ ID NO: 616716 - DNA, 19 bp, Mus musculus
  siRNA target sequence for Ube3b (NM_054093.1,2266-2284).
cggggacaacgctgagata

SEQ ID NO: 616717 - DNA, 19 bp, Mus musculus
  siRNA target sequence for Ube3b (NM_054093.1,2281-2299).
gatagatctggaagactta

SEQ ID NO: 616718 - DNA, 19 bp, Mus musculus
  siRNA target sequence for Ube3b (NM_054093.1,2314-2332).
gtactacggtggctttcat

SEQ ID NO: 616719 - DNA, 19 bp, Mus musculus
  siRNA target sequence for Ube3b (NM_054093.1,2377-2395).
cgacttcacgcctgaagaa

SEQ ID NO: 616720 - DNA, 19 bp, Mus musculus
  siRNA target sequence for Ube3b (NM_054093.1,2479-2497).
ccgctgtgtggaagtatca

SEQ ID NO: 616721 - DNA, 19 bp, Mus musculus
  siRNA target sequence for Ube3b (NM_054093.1,2481-2499).
gctgtgtggaagtatcaga

SEQ ID NO: 616722 - DNA, 19 bp, Mus musculus
  siRNA target sequence for Ube3b (NM_054093.1,2595-2613).
cttgcttcaacctgcttaa

SEQ ID NO: 616723 - DNA, 19 bp, Mus musculus
  siRNA target sequence for Ube3b (NM_054093.1,2609-2627).
cttaagctgcccaactaca

SEQ ID NO: 616724 - DNA, 19 bp, Mus musculus
  siRNA target sequence for Ube3b (NM_054093.1,2635-2653).
gagcgtactgcgagagaaa

SEQ ID NO: 616725 - DNA, 19 bp, Mus musculus
  siRNA target sequence for Ube3b (NM_054093.1,2637-2655).
gcgtactgcgagagaaact

SEQ ID NO: 616726 - DNA, 19 bp, Mus musculus
  siRNA target sequence for Ube3b (NM_054093.1,2638-2656).
cgtactgcgagagaaacta

SEQ ID NO: 616727 - DNA, 19 bp, Mus musculus
  siRNA target sequence for 1700019P01Rik (NM_172818.1,528-546).
gtcagatggagatcacaaa

SEQ ID NO: 616728 - DNA, 19 bp, Mus musculus
  siRNA target sequence for 1700019P01Rik (NM_172818.1,595-613).
cccaaattagacagataca

SEQ ID NO: 616729 - DNA, 19 bp, Mus musculus
  siRNA target sequence for 1700019P01Rik (NM_172818.1,597-615).
caaattagacagatacaaa

SEQ ID NO: 616730 - DNA, 19 bp, Mus musculus
  siRNA target sequence for 1700019P01Rik (NM_172818.1,838-856).
gtgatgtccaggttggtaa

SEQ ID NO: 616731 - DNA, 19 bp, Mus musculus
  siRNA target sequence for 1700019P01Rik (NM_172818.1,920-938).
cctgtgaccagatgctaaa

SEQ ID NO: 616732 - DNA, 19 bp, Mus musculus
  siRNA target sequence for 1700019P01Rik (NM_172818.1,925-943).
gaccagatgctaaatcact

SEQ ID NO: 616733 - DNA, 19 bp, Mus musculus
  siRNA target sequence for 1700019P01Rik (NM_172818.1,1374-1392).
cctgacacagcagtactat

SEQ ID NO: 616734 - DNA, 19 bp, Mus musculus
  siRNA target sequence for 1700019P01Rik (NM_172818.1,1379-1397).
cacagcagtactatctact

SEQ ID NO: 616735 - DNA, 19 bp, Mus musculus
  siRNA target sequence for 1700019P01Rik (NM_172818.1,1412-1430).
cttccatcactgattcgaa

SEQ ID NO: 616736 - DNA, 19 bp, Mus musculus
  siRNA target sequence for 1700019P01Rik (NM_172818.1,1421-1439).
ctgattcgaaaagttactt

SEQ ID NO: 616737 - DNA, 19 bp, Mus musculus
  siRNA target sequence for 1700019P01Rik (NM_172818.1,1723-1741).
ctaaccatctggttctaca

SEQ ID NO: 616738 - DNA, 19 bp, Mus musculus
  siRNA target sequence for 1700019P01Rik (NM_172818.1,1727-1745).
ccatctggttctacaaaga

SEQ ID NO: 616739 - DNA, 19 bp, Mus musculus
  siRNA target sequence for 1700019P01Rik (NM_172818.1,1796-1814).
gcgccatccacctgtgtaa

SEQ ID NO: 616740 - DNA, 19 bp, Mus musculus
  siRNA target sequence for 1700019P01Rik (NM_172818.1,1827-1845).
gaggcgcctcaaaaatgat

SEQ ID NO: 616741 - DNA, 19 bp, Mus musculus
  siRNA target sequence for 1700019P01Rik (NM_172818.1,1829-1847).
ggcgcctcaaaaatgataa

SEQ ID NO: 616742 - DNA, 19 bp, Mus musculus
  siRNA target sequence for 1700019P01Rik (NM_172818.1,1830-1848).
gcgcctcaaaaatgataaa

SEQ ID NO: 616743 - DNA, 19 bp, Mus musculus
  siRNA target sequence for 1700019P01Rik (NM_172818.1,1858-1876).
ccgctgctaccttgtcata

SEQ ID NO: 616744 - DNA, 19 bp, Mus musculus
  siRNA target sequence for 1700019P01Rik (NM_172818.1,1859-1877).
cgctgctaccttgtcataa

SEQ ID NO: 616745 - DNA, 19 bp, Mus musculus
  siRNA target sequence for 1700019P01Rik (NM_172818.1,1861-1879).
ctgctaccttgtcataaca

SEQ ID NO: 616746 - DNA, 19 bp, Mus musculus
  siRNA target sequence for 1700019P01Rik (NM_172818.1,1934-1952).
cgtggggtagcatcatcta

SEQ ID NO: 616747 - DNA, 19 bp, Mus musculus
  siRNA target sequence for 1700019P01Rik (NM_172818.1,1947-1965).
catctacccgtctatgaaa

SEQ ID NO: 616748 - DNA, 19 bp, Mus musculus
  siRNA target sequence for 1700019P01Rik (NM_172818.1,1950-1968).
ctacccgtctatgaaaaga

SEQ ID NO: 616749 - DNA, 19 bp, Mus musculus
  siRNA target sequence for 1700019P01Rik (NM_172818.1,2005-2023).
gtagaagcccgtaagaaca

SEQ ID NO: 616750 - DNA, 19 bp, Mus musculus
  siRNA target sequence for 1700019P01Rik (NM_172818.1,2072-2090).
catggcttatcgagatcaa

SEQ ID NO: 616751 - DNA, 19 bp, Mus musculus
  siRNA target sequence for 1700019P01Rik (NM_172818.1,2181-2199).
caaactggaccgaaactgt

SEQ ID NO: 616752 - DNA, 19 bp, Mus musculus
  siRNA target sequence for 1700019P01Rik (NM_172818.1,2196-2214).
ctgtgacatcggcaacttt

SEQ ID NO: 616753 - DNA, 19 bp, Mus musculus
  siRNA target sequence for 1700019P01Rik (NM_172818.1,2328-2346).
cgtcggcctctcagaatca

SEQ ID NO: 616754 - DNA, 19 bp, Mus musculus
  siRNA target sequence for 1700019P01Rik (NM_172818.1,2446-2464).
gaagcaaaggtactttcaa

SEQ ID NO: 616755 - DNA, 19 bp, Mus musculus
  siRNA target sequence for 1700019P01Rik (NM_172818.1,2472-2490).
gtccatgccagtaatggat

SEQ ID NO: 616756 - DNA, 19 bp, Mus musculus
  siRNA target sequence for 1700019P01Rik (NM_172818.1,2510-2528).
caaagcccatctatgcatt

SEQ ID NO: 616757 - DNA, 19 bp, Mus musculus
  siRNA target sequence for 1700019P01Rik (NM_172818.1,2524-2542).
gcattcgaggtcaatgact

SEQ ID NO: 616758 - DNA, 19 bp, Mus musculus
  siRNA target sequence for 1700019P01Rik (NM_172818.1,2525-2543).
cattcgaggtcaatgacta

SEQ ID NO: 616759 - DNA, 19 bp, Mus musculus
  siRNA target sequence for 1700019P01Rik (NM_172818.1,2535-2553).
caatgactaccaacatgta

SEQ ID NO: 616760 - DNA, 19 bp, Mus musculus
  siRNA target sequence for 1700019P01Rik (NM_172818.1,2545-2563).
caacatgtagacaataagt

SEQ ID NO: 616761 - DNA, 19 bp, Mus musculus
  siRNA target sequence for 1700019P01Rik (NM_172818.1,2583-2601).
cagagtccaatccagtaaa

SEQ ID NO: 616762 - DNA, 19 bp, Mus musculus
  siRNA target sequence for 1700019P01Rik (NM_172818.1,2585-2603).
gagtccaatccagtaaagt

SEQ ID NO: 616763 - DNA, 19 bp, Mus musculus
  siRNA target sequence for 1700019P01Rik (NM_172818.1,2602-2620).
gtcccaggggtaaccttaa

SEQ ID NO: 616764 - DNA, 19 bp, Mus musculus
  siRNA target sequence for 1700019P01Rik (NM_172818.1,2604-2622).
cccaggggtaaccttaaca

SEQ ID NO: 616765 - DNA, 19 bp, Mus musculus
  siRNA target sequence for 1700019P01Rik (NM_172818.1,2605-2623).
ccaggggtaaccttaacaa

SEQ ID NO: 616766 - DNA, 19 bp, Mus musculus
  siRNA target sequence for 1700019P01Rik (NM_172818.1,2751-2769).
ctggctccaccccaattct

SEQ ID NO: 616767 - DNA, 19 bp, Mus musculus
  siRNA target sequence for 2410003M22Rik (NM_027192.1,216-234).
gtggtgcgcgacgagaata

SEQ ID NO: 616768 - DNA, 19 bp, Mus musculus
  siRNA target sequence for 2410003M22Rik (NM_027192.1,219-237).
gtgcgcgacgagaatagca

SEQ ID NO: 616769 - DNA, 19 bp, Mus musculus
  siRNA target sequence for 2410003M22Rik (NM_027192.1,378-396).
gcacagctggtgaattact

SEQ ID NO: 616770 - DNA, 19 bp, Mus musculus
  siRNA target sequence for 2410003M22Rik (NM_027192.1,379-397).
cacagctggtgaattacta

SEQ ID NO: 616771 - DNA, 19 bp, Mus musculus
  siRNA target sequence for 2410003M22Rik (NM_027192.1,430-448).
ccttagtaaagctagtcaa

SEQ ID NO: 616772 - DNA, 19 bp, Mus musculus
  siRNA target sequence for 2410003M22Rik (NM_027192.1,485-503).
ccccgagtcgtatgtgatt

SEQ ID NO: 616773 - DNA, 19 bp, Mus musculus
  siRNA target sequence for 2410003M22Rik (NM_027192.1,486-504).
cccgagtcgtatgtgattt

SEQ ID NO: 616774 - DNA, 19 bp, Mus musculus
  siRNA target sequence for 2410003M22Rik (NM_027192.1,487-505).
ccgagtcgtatgtgattta

SEQ ID NO: 616775 - DNA, 19 bp, Mus musculus
  siRNA target sequence for 2410003M22Rik (NM_027192.1,488-506).
cgagtcgtatgtgatttat

SEQ ID NO: 616776 - DNA, 19 bp, Mus musculus
  siRNA target sequence for 2410003M22Rik (NM_027192.1,491-509).
gtcgtatgtgatttatcca

SEQ ID NO: 616777 - DNA, 19 bp, Mus musculus
  siRNA target sequence for 2410003M22Rik (NM_027192.1,552-570).
caacttccggtcagtaact

SEQ ID NO: 616778 - DNA, 19 bp, Mus musculus
  siRNA target sequence for 2410003M22Rik (NM_027192.1,574-592).
ggacagatgagagagaatt

SEQ ID NO: 616779 - DNA, 19 bp, Mus musculus
  siRNA target sequence for 2410003M22Rik (NM_027192.1,624-642).
gacggggagggcaacgttt

SEQ ID NO: 616780 - DNA, 19 bp, Mus musculus
  siRNA target sequence for 2410003M22Rik (NM_027192.1,633-651).
ggcaacgtttggattgcaa

SEQ ID NO: 616781 - DNA, 19 bp, Mus musculus
  siRNA target sequence for 2410003M22Rik (NM_027192.1,634-652).
gcaacgtttggattgcaaa

SEQ ID NO: 616782 - DNA, 19 bp, Mus musculus
  siRNA target sequence for 2410003M22Rik (NM_027192.1,700-718).
catcggagcttctggattt

SEQ ID NO: 616783 - DNA, 19 bp, Mus musculus
  siRNA target sequence for 2410003M22Rik (NM_027192.1,786-804).
ggccaccgcaagtttgaca

SEQ ID NO: 616784 - DNA, 19 bp, Mus musculus
  siRNA target sequence for 2410003M22Rik (NM_027192.1,787-805).
gccaccgcaagtttgacat

SEQ ID NO: 616785 - DNA, 19 bp, Mus musculus
  siRNA target sequence for 2410003M22Rik (NM_027192.1,788-806).
ccaccgcaagtttgacatt

SEQ ID NO: 616786 - DNA, 19 bp, Mus musculus
  siRNA target sequence for 2410003M22Rik (NM_027192.1,792-810).
cgcaagtttgacattcgaa

SEQ ID NO: 616787 - DNA, 19 bp, Mus musculus
  siRNA target sequence for 2410003M22Rik (NM_027192.1,819-837).
ctggttgaccatcagtata

SEQ ID NO: 616788 - DNA, 19 bp, Mus musculus
  siRNA target sequence for 2410003M22Rik (NM_027192.1,877-895).
cagaaccatatcatgttga

SEQ ID NO: 616789 - DNA, 19 bp, Mus musculus
  siRNA target sequence for 2410003M22Rik (NM_027192.1,891-909).
gttgataatttccaagata

SEQ ID NO: 616790 - DNA, 19 bp, Mus musculus
  siRNA target sequence for 2410003M22Rik (NM_027192.1,930-948).
cactgcattcagaaagagt

SEQ ID NO: 616791 - DNA, 19 bp, Mus musculus
  siRNA target sequence for 2410003M22Rik (NM_027192.1,956-974).
gaactatgggaaatacgaa

SEQ ID NO: 616792 - DNA, 19 bp, Mus musculus
  siRNA target sequence for 2410003M22Rik (NM_027192.1,989-1007).
gttcttcgaagagttcaat

SEQ ID NO: 616793 - DNA, 19 bp, Mus musculus
  siRNA target sequence for 2410003M22Rik (NM_027192.1,1026-1044).
ctgaacatcaccttagaaa

SEQ ID NO: 616794 - DNA, 19 bp, Mus musculus
  siRNA target sequence for 2410003M22Rik (NM_027192.1,1048-1066).
gcattttgctgcaaatcaa

SEQ ID NO: 616795 - DNA, 19 bp, Mus musculus
  siRNA target sequence for 2410003M22Rik (NM_027192.1,1058-1076).
gcaaatcaaacacataata

SEQ ID NO: 616796 - DNA, 19 bp, Mus musculus
  siRNA target sequence for 2410003M22Rik (NM_027192.1,1140-1158).
cagctcctcggctttgact

SEQ ID NO: 616797 - DNA, 19 bp, Mus musculus
  siRNA target sequence for 2410003M22Rik (NM_027192.1,1213-1231).
cgtgtgcccagaaactcta

SEQ ID NO: 616798 - DNA, 19 bp, Mus musculus
  siRNA target sequence for 2410003M22Rik (NM_027192.1,1214-1232).
gtgtgcccagaaactctat

SEQ ID NO: 616799 - DNA, 19 bp, Mus musculus
  siRNA target sequence for 4833441J24Rik (NM_133923.2,336-354).
gactcagaaacgccaaaat

SEQ ID NO: 616800 - DNA, 19 bp, Mus musculus
  siRNA target sequence for 4833441J24Rik (NM_133923.2,626-644).
gggatacatgctttgatgt

SEQ ID NO: 616801 - DNA, 19 bp, Mus musculus
  siRNA target sequence for 4833441J24Rik (NM_133923.2,643-661).
gtcccgcatggttcgaaat

SEQ ID NO: 616802 - DNA, 19 bp, Mus musculus
  siRNA target sequence for 4833441J24Rik (NM_133923.2,645-663).
cccgcatggttcgaaatga

SEQ ID NO: 616803 - DNA, 19 bp, Mus musculus
  siRNA target sequence for 4833441J24Rik (NM_133923.2,647-665).
cgcatggttcgaaatgaga

SEQ ID NO: 616804 - DNA, 19 bp, Mus musculus
  siRNA target sequence for 4833441J24Rik (NM_133923.2,701-719).
ctggattgtcgcttccttt

SEQ ID NO: 616805 - DNA, 19 bp, Mus musculus
  siRNA target sequence for 4833441J24Rik (NM_133923.2,724-742).
ggatcagatgataaaccat

SEQ ID NO: 616806 - DNA, 19 bp, Mus musculus
  siRNA target sequence for 4833441J24Rik (NM_133923.2,725-743).
gatcagatgataaaccatt

SEQ ID NO: 616807 - DNA, 19 bp, Mus musculus
  siRNA target sequence for 4833441J24Rik (NM_133923.2,768-786).
caaaggtgggcctttgtct

SEQ ID NO: 616808 - DNA, 19 bp, Mus musculus
  siRNA target sequence for 4833441J24Rik (NM_133923.2,796-814).
gaatctgccgtggtttgat

SEQ ID NO: 616809 - DNA, 19 bp, Mus musculus
  siRNA target sequence for 4833441J24Rik (NM_133923.2,1060-1078).
ccctgtagcgggttctaga

SEQ ID NO: 616810 - DNA, 19 bp, Mus musculus
  siRNA target sequence for 4833441J24Rik (NM_133923.2,1149-1167).
ggtctctaaggcaaagtaa

SEQ ID NO: 616811 - DNA, 19 bp, Mus musculus
  siRNA target sequence for 4921538O11 (NM_177765.2,698-716).
gacatgaagaggtttcaga

SEQ ID NO: 616812 - DNA, 19 bp, Mus musculus
  siRNA target sequence for 4921538O11 (NM_177765.2,731-749).
cctggcatgacggaaatct

SEQ ID NO: 616813 - DNA, 19 bp, Mus musculus
  siRNA target sequence for 4921538O11 (NM_177765.2,877-895).
gcggaaaacccgcacttat

SEQ ID NO: 616814 - DNA, 19 bp, Mus musculus
  siRNA target sequence for 4921538O11 (NM_177765.2,878-896).
cggaaaacccgcacttata

SEQ ID NO: 616815 - DNA, 19 bp, Mus musculus
  siRNA target sequence for 4921538O11 (NM_177765.2,920-938).
caggggcgtggcatcttta

SEQ ID NO: 616816 - DNA, 19 bp, Mus musculus
  siRNA target sequence for 4921538O11 (NM_177765.2,1027-1045).
gtttgacatgcgaatctat

SEQ ID NO: 616817 - DNA, 19 bp, Mus musculus
  siRNA target sequence for 4921538O11 (NM_177765.2,1090-1108).
ggaaggcctggctcgtttt

SEQ ID NO: 616818 - DNA, 19 bp, Mus musculus
  siRNA target sequence for 4921538O11 (NM_177765.2,1124-1142).
gtggaacctagccataaca

SEQ ID NO: 616819 - DNA, 19 bp, Mus musculus
  siRNA target sequence for 4921538O11 (NM_177765.2,1198-1216).
gaattttgtccgagatgat

SEQ ID NO: 616820 - DNA, 19 bp, Mus musculus
  siRNA target sequence for 4921538O11 (NM_177765.2,1234-1252).
gaagctgtcgacactcaat

SEQ ID NO: 616821 - DNA, 19 bp, Mus musculus
  siRNA target sequence for 4921538O11 (NM_177765.2,1341-1359).
ctgtgcttcgccacaacta

SEQ ID NO: 616822 - DNA, 19 bp, Mus musculus
  siRNA target sequence for 4921538O11 (NM_177765.2,1455-1473).
ggcttctagaggtaaacca

SEQ ID NO: 616823 - DNA, 19 bp, Mus musculus
  siRNA target sequence for 4921538O11 (NM_177765.2,1647-1665).
ccaggcgagaacagtttga

SEQ ID NO: 616824 - DNA, 19 bp, Mus musculus
  siRNA target sequence for 4921538O11 (NM_177765.2,1650-1668).
ggcgagaacagtttgagtt

SEQ ID NO: 616825 - DNA, 19 bp, Mus musculus
  siRNA target sequence for 4921538O11 (NM_177765.2,1651-1669).
gcgagaacagtttgagtta

SEQ ID NO: 616826 - DNA, 19 bp, Mus musculus
  siRNA target sequence for 4921538O11 (NM_177765.2,1652-1670).
cgagaacagtttgagttat

SEQ ID NO: 616827 - DNA, 19 bp, Mus musculus
  siRNA target sequence for 4921538O11 (NM_177765.2,2116-2134).
ccgcagcctgggcattgta

SEQ ID NO: 616828 - DNA, 19 bp, Mus musculus
  siRNA target sequence for 4921538O11 (NM_177765.2,2163-2181).
gccaccggagccacagaaa

SEQ ID NO: 616829 - DNA, 19 bp, Mus musculus
  siRNA target sequence for 4921538O11 (NM_177765.2,2167-2185).
ccggagccacagaaagctt

SEQ ID NO: 616830 - DNA, 19 bp, Mus musculus
  siRNA target sequence for 4921538O11 (NM_177765.2,2172-2190).
gccacagaaagcttcatga

SEQ ID NO: 616831 - DNA, 19 bp, Mus musculus
  siRNA target sequence for 4921538O11 (NM_177765.2,2215-2233).
cgggctgagcagtcaagaa

SEQ ID NO: 616832 - DNA, 19 bp, Mus musculus
  siRNA target sequence for 4921538O11 (NM_177765.2,2362-2380).
catcaatcccgcaattgca

SEQ ID NO: 616833 - DNA, 19 bp, Mus musculus
  siRNA target sequence for 4921538O11 (NM_177765.2,2416-2434).
caactggataggagattca

SEQ ID NO: 616834 - DNA, 19 bp, Mus musculus
  siRNA target sequence for 4921538O11 (NM_177765.2,2447-2465).
ccctgttcattgtcaatga

SEQ ID NO: 616835 - DNA, 19 bp, Mus musculus
  siRNA target sequence for 4921538O11 (NM_177765.2,2474-2492).
gggaggcactatatttcca

SEQ ID NO: 616836 - DNA, 19 bp, Mus musculus
  siRNA target sequence for 4921538O11 (NM_177765.2,2506-2524).
gctcactagccgtaaaaga

SEQ ID NO: 616837 - DNA, 19 bp, Mus musculus
  siRNA target sequence for 4921538O11 (NM_177765.2,2507-2525).
ctcactagccgtaaaagaa

SEQ ID NO: 616838 - DNA, 19 bp, Mus musculus
  siRNA target sequence for 4921538O11 (NM_177765.2,2558-2576).
ggtcttcaatctttgctaa

SEQ ID NO: 616839 - DNA, 19 bp, Mus musculus
  siRNA target sequence for 4921538O11 (NM_177765.2,2559-2577).
gtcttcaatctttgctaat

SEQ ID NO: 616840 - DNA, 19 bp, Mus musculus
  siRNA target sequence for 4921538O11 (NM_177765.2,2684-2702).
ctttggggatcggtaaaga

SEQ ID NO: 616841 - DNA, 19 bp, Mus musculus
  siRNA target sequence for 4921538O11 (NM_177765.2,2688-2706).
ggggatcggtaaagactaa

SEQ ID NO: 616842 - DNA, 19 bp, Mus musculus
  siRNA target sequence for 4921538O11 (NM_177765.2,2689-2707).
gggatcggtaaagactaaa

SEQ ID NO: 616843 - DNA, 19 bp, Mus musculus
  siRNA target sequence for 4930509O20Rik (NM_029064.1,41-59).
cgcgacagaagaatcaaaa

SEQ ID NO: 616844 - DNA, 19 bp, Mus musculus
  siRNA target sequence for 4930509O20Rik (NM_029064.1,42-60).
gcgacagaagaatcaaaat

SEQ ID NO: 616845 - DNA, 19 bp, Mus musculus
  siRNA target sequence for 4930509O20Rik (NM_029064.1,70-88).
catggagtgtcgaaaggaa

SEQ ID NO: 616846 - DNA, 19 bp, Mus musculus
  siRNA target sequence for 4930509O20Rik (NM_029064.1,167-185).
ccggatgggtggaagtcaa

SEQ ID NO: 616847 - DNA, 19 bp, Mus musculus
  siRNA target sequence for 4930509O20Rik (NM_029064.1,168-186).
cggatgggtggaagtcaaa

SEQ ID NO: 616848 - DNA, 19 bp, Mus musculus
  siRNA target sequence for 4930509O20Rik (NM_029064.1,170-188).
gatgggtggaagtcaaaga

SEQ ID NO: 616849 - DNA, 19 bp, Mus musculus
  siRNA target sequence for 4930509O20Rik (NM_029064.1,190-208).
gaaggcgaatgggatttct

SEQ ID NO: 616850 - DNA, 19 bp, Mus musculus
  siRNA target sequence for 4930509O20Rik (NM_029064.1,193-211).
ggcgaatgggatttctatt

SEQ ID NO: 616851 - DNA, 19 bp, Mus musculus
  siRNA target sequence for 4930509O20Rik (NM_029064.1,298-316).
gagcttaccaggaaaaact

SEQ ID NO: 616852 - DNA, 19 bp, Mus musculus
  siRNA target sequence for 4930509O20Rik (NM_029064.1,422-440).
gtgagtaccatctgtttgt

SEQ ID NO: 616853 - DNA, 19 bp, Mus musculus
  siRNA target sequence for 4930509O20Rik (NM_029064.1,497-515).
ctcaggggaagggcatatt

SEQ ID NO: 616854 - DNA, 19 bp, Mus musculus
  siRNA target sequence for 4930509O20Rik (NM_029064.1,502-520).
gggaagggcatatttctct

SEQ ID NO: 616855 - DNA, 19 bp, Mus musculus
  siRNA target sequence for 4930509O20Rik (NM_029064.1,503-521).
ggaagggcatatttctctt

SEQ ID NO: 616856 - DNA, 19 bp, Mus musculus
  siRNA target sequence for 4930509O20Rik (NM_029064.1,555-573).
gggcacttcggggaagaaa

SEQ ID NO: 616857 - DNA, 19 bp, Mus musculus
  siRNA target sequence for 4930509O20Rik (NM_029064.1,595-613).
cctgctcgagccaacatga

SEQ ID NO: 616858 - DNA, 19 bp, Mus musculus
  siRNA target sequence for 4930509O20Rik (NM_029064.1,596-614).
ctgctcgagccaacatgaa

SEQ ID NO: 616859 - DNA, 19 bp, Mus musculus
  siRNA target sequence for 4930509O20Rik (NM_029064.1,810-828).
ctccaacacccgattcaca

SEQ ID NO: 616860 - DNA, 19 bp, Mus musculus
  siRNA target sequence for 4930509O20Rik (NM_029064.1,816-834).
cacccgattcacactgaat

SEQ ID NO: 616861 - DNA, 19 bp, Mus musculus
  siRNA target sequence for 4930509O20Rik (NM_029064.1,820-838).
cgattcacactgaatagca

SEQ ID NO: 616862 - DNA, 19 bp, Mus musculus
  siRNA target sequence for 4930509O20Rik (NM_029064.1,821-839).
gattcacactgaatagcat

SEQ ID NO: 616863 - DNA, 19 bp, Mus musculus
  siRNA target sequence for 4930509O20Rik (NM_029064.1,836-854).
gcatcgatgaccactatgt

SEQ ID NO: 616864 - DNA, 19 bp, Mus musculus
  siRNA target sequence for 4930509O20Rik (NM_029064.1,837-855).
catcgatgaccactatgtt

SEQ ID NO: 616865 - DNA, 19 bp, Mus musculus
  siRNA target sequence for 4930509O20Rik (NM_029064.1,868-886).
gttgctgtgcagaagacat

SEQ ID NO: 616866 - DNA, 19 bp, Mus musculus
  siRNA target sequence for 4930509O20Rik (NM_029064.1,887-905).
cgcctgactaccacctaaa

SEQ ID NO: 616867 - DNA, 19 bp, Mus musculus
  siRNA target sequence for 4930509O20Rik (NM_029064.1,989-1007).
gtgacatggacaatatctt

SEQ ID NO: 616868 - DNA, 19 bp, Mus musculus
  siRNA target sequence for 4930509O20Rik (NM_029064.1,991-1009).
gacatggacaatatcttca

SEQ ID NO: 616869 - DNA, 19 bp, Mus musculus
  siRNA target sequence for 4930509O20Rik (NM_029064.1,1025-1043).
gcgtgcagaaggtgatcat

SEQ ID NO: 616870 - DNA, 19 bp, Mus musculus
  siRNA target sequence for 4930509O20Rik (NM_029064.1,1063-1081).
gagctctatggctatgaca

SEQ ID NO: 616871 - DNA, 19 bp, Mus musculus
  siRNA target sequence for 4930509O20Rik (NM_029064.1,1073-1091).
gctatgacatcctcattga

SEQ ID NO: 616872 - DNA, 19 bp, Mus musculus
  siRNA target sequence for 4930509O20Rik (NM_029064.1,1107-1125).
gtggctcctagaagtcaat

SEQ ID NO: 616873 - DNA, 19 bp, Mus musculus
  siRNA target sequence for 4930509O20Rik (NM_029064.1,1254-1272).
cgatctcatgtggaatgat

SEQ ID NO: 616874 - DNA, 19 bp, Mus musculus
  siRNA target sequence for 4930509O20Rik (NM_029064.1,1310-1328).
cagggatggggaactttgt

SEQ ID NO: 616875 - DNA, 19 bp, Mus musculus
  siRNA target sequence for 4930509O20Rik (NM_029064.1,1369-1387).
gagtgggagagaaacatca

SEQ ID NO: 616876 - DNA, 19 bp, Mus musculus
  siRNA target sequence for 4930509O20Rik (NM_029064.1,1371-1389).
gtgggagagaaacatcata

SEQ ID NO: 616877 - DNA, 19 bp, Mus musculus
  siRNA target sequence for 4932418K24Rik (NM_172799.1,1087-1105).
ctgccagctttatatctca

SEQ ID NO: 616878 - DNA, 19 bp, Mus musculus
  siRNA target sequence for 4932418K24Rik (NM_172799.1,1089-1107).
gccagctttatatctcaaa

SEQ ID NO: 616879 - DNA, 19 bp, Mus musculus
  siRNA target sequence for 4932418K24Rik (NM_172799.1,1117-1135).
catcgacgggttcaagttt

SEQ ID NO: 616880 - DNA, 19 bp, Mus musculus
  siRNA target sequence for 4932418K24Rik (NM_172799.1,1132-1150).
gtttgaccttcgggtttat

SEQ ID NO: 616881 - DNA, 19 bp, Mus musculus
  siRNA target sequence for 4932418K24Rik (NM_172799.1,1230-1248).
cccaccctaacctagacaa

SEQ ID NO: 616882 - DNA, 19 bp, Mus musculus
  siRNA target sequence for 4932418K24Rik (NM_172799.1,1263-1281).
gtatgcacctgactaatta

SEQ ID NO: 616883 - DNA, 19 bp, Mus musculus
  siRNA target sequence for 4932418K24Rik (NM_172799.1,1271-1289).
ctgactaattattctatca

SEQ ID NO: 616884 - DNA, 19 bp, Mus musculus
  siRNA target sequence for 4932418K24Rik (NM_172799.1,1273-1291).
gactaattattctatcaat

SEQ ID NO: 616885 - DNA, 19 bp, Mus musculus
  siRNA target sequence for 4932418K24Rik (NM_172799.1,1275-1293).
ctaattattctatcaataa

SEQ ID NO: 616886 - DNA, 19 bp, Mus musculus
  siRNA target sequence for 4932418K24Rik (NM_172799.1,1309-1327).
cgttcaagacgctttttct

SEQ ID NO: 616887 - DNA, 19 bp, Mus musculus
  siRNA target sequence for 4932418K24Rik (NM_172799.1,1438-1456).
cgctcacccggtcatcaaa

SEQ ID NO: 616888 - DNA, 19 bp, Mus musculus
  siRNA target sequence for 4932418K24Rik (NM_172799.1,1442-1460).
cacccggtcatcaaacaca

SEQ ID NO: 616889 - DNA, 19 bp, Mus musculus
  siRNA target sequence for 4932418K24Rik (NM_172799.1,1531-1549).
gttggaccggaaactcaaa

SEQ ID NO: 616890 - DNA, 19 bp, Mus musculus
  siRNA target sequence for 4932418K24Rik (NM_172799.1,1711-1729).
cttgcagcagtgtccaaat

SEQ ID NO: 616891 - DNA, 19 bp, Mus musculus
  siRNA target sequence for 4932418K24Rik (NM_172799.1,1763-1781).
caggccatgaggttacaga

SEQ ID NO: 616892 - DNA, 19 bp, Mus musculus
  siRNA target sequence for 4932418K24Rik (NM_172799.1,1765-1783).
ggccatgaggttacagaaa

SEQ ID NO: 616893 - DNA, 19 bp, Mus musculus
  siRNA target sequence for 4932418K24Rik (NM_172799.1,1766-1784).
gccatgaggttacagaaaa

SEQ ID NO: 616894 - DNA, 19 bp, Mus musculus
  siRNA target sequence for 4932418K24Rik (NM_172799.1,1812-1830).
ggggcttccggctcatcta

SEQ ID NO: 616895 - DNA, 19 bp, Mus musculus
  siRNA target sequence for 4932418K24Rik (NM_172799.1,2094-2112).
gtccccccaaacaatcctt

SEQ ID NO: 616896 - DNA, 19 bp, Mus musculus
  siRNA target sequence for 4932418K24Rik (NM_172799.1,2098-2116).
ccccaaacaatccttacat

SEQ ID NO: 616897 - DNA, 19 bp, Mus musculus
  siRNA target sequence for 4932418K24Rik (NM_172799.1,2243-2261).
gtgtcggcaaggaactaca

SEQ ID NO: 616898 - DNA, 19 bp, Mus musculus
  siRNA target sequence for 4932418K24Rik (NM_172799.1,2349-2367).
cggcctttatggtgaacat

SEQ ID NO: 616899 - DNA, 19 bp, Mus musculus
  siRNA target sequence for 4932418K24Rik (NM_172799.1,2350-2368).
ggcctttatggtgaacata

SEQ ID NO: 616900 - DNA, 19 bp, Mus musculus
  siRNA target sequence for 4932418K24Rik (NM_172799.1,2386-2404).
cataacgtctgtagaaagt

SEQ ID NO: 616901 - DNA, 19 bp, Mus musculus
  siRNA target sequence for 4932418K24Rik (NM_172799.1,2425-2443).
catctcaacctctctagaa

SEQ ID NO: 616902 - DNA, 19 bp, Mus musculus
  siRNA target sequence for 4932418K24Rik (NM_172799.1,2487-2505).
gcccggagagtgtccatat

SEQ ID NO: 616903 - DNA, 19 bp, Mus musculus
  siRNA target sequence for 4932418K24Rik (NM_172799.1,2498-2516).
gtccatatggtgtcctata

SEQ ID NO: 616904 - DNA, 19 bp, Mus musculus
  siRNA target sequence for 4932418K24Rik (NM_172799.1,2572-2590).
gcctctcatgttttccaaa

SEQ ID NO: 616905 - DNA, 19 bp, Mus musculus
  siRNA target sequence for 4932418K24Rik (NM_172799.1,2644-2662).
gtatctgatgtcagagata

SEQ ID NO: 616906 - DNA, 19 bp, Mus musculus
  siRNA target sequence for 4932418K24Rik (NM_172799.1,2702-2720).
ccggctcccaagtcacaat

SEQ ID NO: 616907 - DNA, 19 bp, Mus musculus
  siRNA target sequence for 4932418K24Rik (NM_172799.1,2703-2721).
cggctcccaagtcacaata

SEQ ID NO: 616908 - DNA, 19 bp, Mus musculus
  siRNA target sequence for Gclc (NM_010295.1,165-183).
ggtgtccttcgatcatgaa

SEQ ID NO: 616909 - DNA, 19 bp, Mus musculus
  siRNA target sequence for Gclc (NM_010295.1,166-184).
gtgtccttcgatcatgaaa

SEQ ID NO: 616910 - DNA, 19 bp, Mus musculus
  siRNA target sequence for Gclc (NM_010295.1,188-206).
ggaaagtccagttgttact

SEQ ID NO: 616911 - DNA, 19 bp, Mus musculus
  siRNA target sequence for Gclc (NM_010295.1,207-225).
gaatggaggcgatgttctt

SEQ ID NO: 616912 - DNA, 19 bp, Mus musculus
  siRNA target sequence for Gclc (NM_010295.1,335-353).
gaacgatgtctgagttcaa

SEQ ID NO: 616913 - DNA, 19 bp, Mus musculus
  siRNA target sequence for Gclc (NM_010295.1,384-402).
gaaggaggctacttctgta

SEQ ID NO: 616914 - DNA, 19 bp, Mus musculus
  siRNA target sequence for Gclc (NM_010295.1,387-405).
ggaggctacttctgtacta

SEQ ID NO: 616915 - DNA, 19 bp, Mus musculus
  siRNA target sequence for Gclc (NM_010295.1,418-436).
gctctctgcaccatcactt

SEQ ID NO: 616916 - DNA, 19 bp, Mus musculus
  siRNA target sequence for Gclc (NM_010295.1,506-524).
catcaaagtccctcttctt

SEQ ID NO: 616917 - DNA, 19 bp, Mus musculus
  siRNA target sequence for Gclc (NM_010295.1,552-570).
ccgcttcggtactctaaca

SEQ ID NO: 616918 - DNA, 19 bp, Mus musculus
  siRNA target sequence for Gclc (NM_010295.1,553-571).
cgcttcggtactctaacaa

SEQ ID NO: 616919 - DNA, 19 bp, Mus musculus
  siRNA target sequence for Gclc (NM_010295.1,555-573).
cttcggtactctaacaaga

SEQ ID NO: 616920 - DNA, 19 bp, Mus musculus
  siRNA target sequence for Gclc (NM_010295.1,604-622).
gtcatcaatgtgccaatat

SEQ ID NO: 616921 - DNA, 19 bp, Mus musculus
  siRNA target sequence for Gclc (NM_010295.1,692-710).
ctcagccagaccatatcta

SEQ ID NO: 616922 - DNA, 19 bp, Mus musculus
  siRNA target sequence for Gclc (NM_010295.1,773-791).
gcatatctgaggcaagata

SEQ ID NO: 616923 - DNA, 19 bp, Mus musculus
  siRNA target sequence for Gclc (NM_010295.1,779-797).
ctgaggcaagataccttta

SEQ ID NO: 616924 - DNA, 19 bp, Mus musculus
  siRNA target sequence for Gclc (NM_010295.1,783-801).
ggcaagatacctttatgat

SEQ ID NO: 616925 - DNA, 19 bp, Mus musculus
  siRNA target sequence for Gclc (NM_010295.1,785-803).
caagatacctttatgatca

SEQ ID NO: 616926 - DNA, 19 bp, Mus musculus
  siRNA target sequence for Gclc (NM_010295.1,809-827).
ccactatctgcccaattgt

SEQ ID NO: 616927 - DNA, 19 bp, Mus musculus
  siRNA target sequence for Gclc (NM_010295.1,810-828).
cactatctgcccaattgtt

SEQ ID NO: 616928 - DNA, 19 bp, Mus musculus
  siRNA target sequence for Gclc (NM_010295.1,812-830).
ctatctgcccaattgttat

SEQ ID NO: 616929 - DNA, 19 bp, Mus musculus
  siRNA target sequence for Gclc (NM_010295.1,863-881).
gctacgtgtcagacattga

SEQ ID NO: 616930 - DNA, 19 bp, Mus musculus
  siRNA target sequence for Gclc (NM_010295.1,864-882).
ctacgtgtcagacattgat

SEQ ID NO: 616931 - DNA, 19 bp, Mus musculus
  siRNA target sequence for Gclc (NM_010295.1,867-885).
cgtgtcagacattgattgt

SEQ ID NO: 616932 - DNA, 19 bp, Mus musculus
  siRNA target sequence for Gclc (NM_010295.1,906-924).
ctctgtagatgatagaaca

SEQ ID NO: 616933 - DNA, 19 bp, Mus musculus
  siRNA target sequence for Gclc (NM_010295.1,961-979).
cgctttaggatcagtaagt

SEQ ID NO: 616934 - DNA, 19 bp, Mus musculus
  siRNA target sequence for Gclc (NM_010295.1,963-981).
ctttaggatcagtaagtct

SEQ ID NO: 616935 - DNA, 19 bp, Mus musculus
  siRNA target sequence for Gclc (NM_010295.1,978-996).
gtctcggtatgactcaata

SEQ ID NO: 616936 - DNA, 19 bp, Mus musculus
  siRNA target sequence for Gclc (NM_010295.1,980-998).
ctcggtatgactcaataga

SEQ ID NO: 616937 - DNA, 19 bp, Mus musculus
  siRNA target sequence for Gclc (NM_010295.1,982-1000).
cggtatgactcaatagata

SEQ ID NO: 616938 - DNA, 19 bp, Mus musculus
  siRNA target sequence for Gclc (NM_010295.1,997-1015).
gatagctacctgtctaagt

SEQ ID NO: 616939 - DNA, 19 bp, Mus musculus
  siRNA target sequence for Gclc (NM_010295.1,1019-1037).
gggagaagtacaatgacat

SEQ ID NO: 616940 - DNA, 19 bp, Mus musculus
  siRNA target sequence for Gclc (NM_010295.1,1110-1128).
cgttgctcatctctttatt

SEQ ID NO: 616941 - DNA, 19 bp, Mus musculus
  siRNA target sequence for Gclc (NM_010295.1,1115-1133).
ctcatctctttattagaga

SEQ ID NO: 616942 - DNA, 19 bp, Mus musculus
  siRNA target sequence for Gclc (NM_010295.1,1175-1193).
ccaacgagtctgaccattt

SEQ ID NO: 616943 - DNA, 19 bp, Mus musculus
  siRNA target sequence for Gclc (NM_010295.1,1176-1194).
caacgagtctgaccatttt

SEQ ID NO: 616944 - DNA, 19 bp, Mus musculus
  siRNA target sequence for Gclc (NM_010295.1,1195-1213).
gagaatattcagtctacaa

SEQ ID NO: 616945 - DNA, 19 bp, Mus musculus
  siRNA target sequence for Gclc (NM_010295.1,1217-1235).
ggcagacaatgaggtttaa

SEQ ID NO: 616946 - DNA, 19 bp, Mus musculus
  siRNA target sequence for Gclc (NM_010295.1,1294-1312).
cagttaacagactttgaga

SEQ ID NO: 616947 - DNA, 19 bp, Mus musculus
  siRNA target sequence for Gclc (NM_010295.1,1316-1334).
ctgcctatgtggtattcgt

SEQ ID NO: 616948 - DNA, 19 bp, Mus musculus
  siRNA target sequence for Gclc (NM_010295.1,1346-1364).
ctagggtgatcctctcata

SEQ ID NO: 616949 - DNA, 19 bp, Mus musculus
  siRNA target sequence for Gclc (NM_010295.1,1349-1367).
gggtgatcctctcatacaa

SEQ ID NO: 616950 - DNA, 19 bp, Mus musculus
  siRNA target sequence for Gclc (NM_010295.1,1395-1413).
ggttgacgagaacatgaaa

SEQ ID NO: 616951 - DNA, 19 bp, Mus musculus
  siRNA target sequence for Gclc (NM_010295.1,1437-1455).
cttgcaggggatgttttat

SEQ ID NO: 616952 - DNA, 19 bp, Mus musculus
  siRNA target sequence for Gclc (NM_010295.1,1578-1596).
gaaggaaggggtatttcct

SEQ ID NO: 616953 - DNA, 19 bp, Mus musculus
  siRNA target sequence for Gclc (NM_010295.1,1597-1615).
ggactcatccccattctga

SEQ ID NO: 616954 - DNA, 19 bp, Mus musculus
  siRNA target sequence for Gclc (NM_010295.1,1647-1665).
ggacacccgatgcagtatt

SEQ ID NO: 616955 - DNA, 19 bp, Mus musculus
  siRNA target sequence for Gclc (NM_010295.1,1652-1670).
cccgatgcagtattctgaa

SEQ ID NO: 616956 - DNA, 19 bp, Mus musculus
  siRNA target sequence for Gclc (NM_010295.1,1661-1679).
gtattctgaactacctaaa

SEQ ID NO: 616957 - DNA, 19 bp, Mus musculus
  siRNA target sequence for Gclc (NM_010295.1,1666-1684).
ctgaactacctaaagctaa

SEQ ID NO: 616958 - DNA, 19 bp, Mus musculus
  siRNA target sequence for Gclc (NM_010295.1,1668-1686).
gaactacctaaagctaatt

SEQ ID NO: 616959 - DNA, 19 bp, Mus musculus
  siRNA target sequence for Gclc (NM_010295.1,1694-1712).
gagcatctggagaactaat

SEQ ID NO: 616960 - DNA, 19 bp, Mus musculus
  siRNA target sequence for Gclc (NM_010295.1,1696-1714).
gcatctggagaactaatga

SEQ ID NO: 616961 - DNA, 19 bp, Mus musculus
  siRNA target sequence for Gclc (NM_010295.1,1725-1743).
gtggatgagagagttcatt

SEQ ID NO: 616962 - DNA, 19 bp, Mus musculus
  siRNA target sequence for Gclc (NM_010295.1,1772-1790).
gtgtaataactgatgaaat

SEQ ID NO: 616963 - DNA, 19 bp, Mus musculus
  siRNA target sequence for Gclc (NM_010295.1,1809-1827).
gaagtgcaaccaaattgca

SEQ ID NO: 616964 - DNA, 19 bp, Mus musculus
  siRNA target sequence for Gclc (NM_010295.1,1838-1856).
gtgaatgtccagagttact

SEQ ID NO: 616965 - DNA, 19 bp, Mus musculus
  siRNA target sequence for Gclc (NM_010295.1,1851-1869).
gttacttggatcaggattt

SEQ ID NO: 616966 - DNA, 19 bp, Mus musculus
  siRNA target sequence for Gclm (NM_008129.2,521-539).
gcttcgggactgtatccaa

SEQ ID NO: 616967 - DNA, 19 bp, Mus musculus
  siRNA target sequence for Gclm (NM_008129.2,522-540).
cttcgggactgtatccaaa

SEQ ID NO: 616968 - DNA, 19 bp, Mus musculus
  siRNA target sequence for Gclm (NM_008129.2,586-604).
gggagtttccagatgtttt

SEQ ID NO: 616969 - DNA, 19 bp, Mus musculus
  siRNA target sequence for Gclm (NM_008129.2,620-638).
ccatgcagtggagaagata

SEQ ID NO: 616970 - DNA, 19 bp, Mus musculus
  siRNA target sequence for Gclm (NM_008129.2,635-653).
gataaatcccgatgaaaga

SEQ ID NO: 616971 - DNA, 19 bp, Mus musculus
  siRNA target sequence for Gclm (NM_008129.2,680-698).
gttcattgtaggatcgaat

SEQ ID NO: 616972 - DNA, 19 bp, Mus musculus
  siRNA target sequence for Gclm (NM_008129.2,776-794).
ggcttcgcctccgattgaa

SEQ ID NO: 616973 - DNA, 19 bp, Mus musculus
  siRNA target sequence for Gclm (NM_008129.2,778-796).
cttcgcctccgattgaaga

SEQ ID NO: 616974 - DNA, 19 bp, Mus musculus
  siRNA target sequence for Gclm (NM_008129.2,788-806).
gattgaagatggagttaat

SEQ ID NO: 616975 - DNA, 19 bp, Mus musculus
  siRNA target sequence for Gclm (NM_008129.2,827-845).
gccttactgggaggaatta

SEQ ID NO: 616976 - DNA, 19 bp, Mus musculus
  siRNA target sequence for Gclm (NM_008129.2,862-880).
gcaagaaaattgttgctat

SEQ ID NO: 616977 - DNA, 19 bp, Mus musculus
  siRNA target sequence for Gclm (NM_008129.2,863-881).
caagaaaattgttgctata

SEQ ID NO: 616978 - DNA, 19 bp, Mus musculus
  siRNA target sequence for Gclm (NM_008129.2,883-901).
gcacctctgatctagacaa

SEQ ID NO: 616979 - DNA, 19 bp, Mus musculus
  siRNA target sequence for Gclm (NM_008129.2,942-960).
cccaatagtaaccaagtta

SEQ ID NO: 616980 - DNA, 19 bp, Mus musculus
  siRNA target sequence for Gclm (NM_008129.2,943-961).
ccaatagtaaccaagttaa

SEQ ID NO: 616981 - DNA, 19 bp, Mus musculus
  siRNA target sequence for Gclm (NM_008129.2,997-1015).
ctgcctttgctaaacaatt

SEQ ID NO: 616982 - DNA, 19 bp, Mus musculus
  siRNA target sequence for Gclm (NM_008129.2,1165-1183).
ggggaatcatcaagtctaa

SEQ ID NO: 616983 - DNA, 19 bp, Mus musculus
  siRNA target sequence for Gclm (NM_008129.2,1166-1184).
gggaatcatcaagtctaaa

SEQ ID NO: 616984 - DNA, 19 bp, Mus musculus
  siRNA target sequence for Paics (NM_025939.2,414-432).
cgacagccgtagtagtgaa

SEQ ID NO: 616985 - DNA, 19 bp, Mus musculus
  siRNA target sequence for Paics (NM_025939.2,683-701).
gaaatgatccccattgagt

SEQ ID NO: 616986 - DNA, 19 bp, Mus musculus
  siRNA target sequence for Paics (NM_025939.2,700-718).
gtgggtgtgccgaagaata

SEQ ID NO: 616987 - DNA, 19 bp, Mus musculus
  siRNA target sequence for Paics (NM_025939.2,752-770).
gtacaggaggggtacaagt

SEQ ID NO: 616988 - DNA, 19 bp, Mus musculus
  siRNA target sequence for Paics (NM_025939.2,777-795).
cacccaaagtggagatgtt

SEQ ID NO: 616989 - DNA, 19 bp, Mus musculus
  siRNA target sequence for Paics (NM_025939.2,779-797).
cccaaagtggagatgttct

SEQ ID NO: 616990 - DNA, 19 bp, Mus musculus
  siRNA target sequence for Paics (NM_025939.2,780-798).
ccaaagtggagatgttctt

SEQ ID NO: 616991 - DNA, 19 bp, Mus musculus
  siRNA target sequence for Paics (NM_025939.2,1658-1676).
gataagaaggtcagacaat

SEQ ID NO: 616992 - DNA, 19 bp, Mus musculus
  siRNA target sequence for Paics (NM_025939.2,1663-1681).
gaaggtcagacaatgcaat

SEQ ID NO: 616993 - DNA, 19 bp, Mus musculus
  siRNA target sequence for Ctps (NM_016748.1,352-370).
cgtctcaccaaggacaata

SEQ ID NO: 616994 - DNA, 19 bp, Mus musculus
  siRNA target sequence for Ctps (NM_016748.1,414-432).
gcgcaaaggggattactta

SEQ ID NO: 616995 - DNA, 19 bp, Mus musculus
  siRNA target sequence for Ctps (NM_016748.1,455-473).
ctcacatcactgatgcaat

SEQ ID NO: 616996 - DNA, 19 bp, Mus musculus
  siRNA target sequence for Ctps (NM_016748.1,484-502).
gtgatgagacaggcattaa

SEQ ID NO: 616997 - DNA, 19 bp, Mus musculus
  siRNA target sequence for Ctps (NM_016748.1,486-504).
gatgagacaggcattaata

SEQ ID NO: 616998 - DNA, 19 bp, Mus musculus
  siRNA target sequence for Ctps (NM_016748.1,526-544).
gaacctcaagtgtgtgtta

SEQ ID NO: 616999 - DNA, 19 bp, Mus musculus
  siRNA target sequence for Ctps (NM_016748.1,530-548).
ctcaagtgtgtgttattga

SEQ ID NO: 617000 - DNA, 19 bp, Mus musculus
  siRNA target sequence for Ctps (NM_016748.1,624-642).
gagggaaaacttttgtaat

SEQ ID NO: 617001 - DNA, 19 bp, Mus musculus
  siRNA target sequence for Ctps (NM_016748.1,708-726).
cagtgttcgggaacttaga

SEQ ID NO: 617002 - DNA, 19 bp, Mus musculus
  siRNA target sequence for Ctps (NM_016748.1,732-750).
cgggctttctccagactta

SEQ ID NO: 617003 - DNA, 19 bp, Mus musculus
  siRNA target sequence for Ctps (NM_016748.1,753-771).
ggtgtgcaggtgctcaaat

SEQ ID NO: 617004 - DNA, 19 bp, Mus musculus
  siRNA target sequence for Ctps (NM_016748.1,893-911).
gggttgtagactactttct

SEQ ID NO: 617005 - DNA, 19 bp, Mus musculus
  siRNA target sequence for Ctps (NM_016748.1,894-912).
ggttgtagactactttctt

SEQ ID NO: 617006 - DNA, 19 bp, Mus musculus
  siRNA target sequence for Ctps (NM_016748.1,914-932).
ggagacttgaccttcctat

SEQ ID NO: 617007 - DNA, 19 bp, Mus musculus
  siRNA target sequence for Ctps (NM_016748.1,915-933).
gagacttgaccttcctatt

SEQ ID NO: 617008 - DNA, 19 bp, Mus musculus
  siRNA target sequence for Ctps (NM_016748.1,919-937).
cttgaccttcctattgaga

SEQ ID NO: 617009 - DNA, 19 bp, Mus musculus
  siRNA target sequence for Ctps (NM_016748.1,1047-1065).
ctcgtacgcctctgtcatt

SEQ ID NO: 617010 - DNA, 19 bp, Mus musculus
  siRNA target sequence for Ctps (NM_016748.1,1049-1067).
cgtacgcctctgtcattaa

SEQ ID NO: 617011 - DNA, 19 bp, Mus musculus
  siRNA target sequence for Ctps (NM_016748.1,1050-1068).
gtacgcctctgtcattaaa

SEQ ID NO: 617012 - DNA, 19 bp, Mus musculus
  siRNA target sequence for Ctps (NM_016748.1,1212-1230).
gctggttccaggaggattt

SEQ ID NO: 617013 - DNA, 19 bp, Mus musculus
  siRNA target sequence for Ctps (NM_016748.1,1215-1233).
ggttccaggaggatttggt

SEQ ID NO: 617014 - DNA, 19 bp, Mus musculus
  siRNA target sequence for Ctps (NM_016748.1,1320-1338).
gctagcagtggtagaattt

SEQ ID NO: 617015 - DNA, 19 bp, Mus musculus
  siRNA target sequence for Ctps (NM_016748.1,1321-1339).
ctagcagtggtagaatttt

SEQ ID NO: 617016 - DNA, 19 bp, Mus musculus
  siRNA target sequence for Ctps (NM_016748.1,1329-1347).
ggtagaattttcaagaaat

SEQ ID NO: 617017 - DNA, 19 bp, Mus musculus
  siRNA target sequence for Ctps (NM_016748.1,1378-1396).
gagtttgaccccaagacta

SEQ ID NO: 617018 - DNA, 19 bp, Mus musculus
  siRNA target sequence for Ctps (NM_016748.1,1394-1412).
ctagtcaccctgtggttat

SEQ ID NO: 617019 - DNA, 19 bp, Mus musculus
  siRNA target sequence for Ctps (NM_016748.1,1397-1415).
gtcaccctgtggttataga

SEQ ID NO: 617020 - DNA, 19 bp, Mus musculus
  siRNA target sequence for Ctps (NM_016748.1,1399-1417).
caccctgtggttatagaca

SEQ ID NO: 617021 - DNA, 19 bp, Mus musculus
  siRNA target sequence for Ctps (NM_016748.1,1650-1668).
gttggaagatcatccattt

SEQ ID NO: 617022 - DNA, 19 bp, Mus musculus
  siRNA target sequence for Ctps (NM_016748.1,1764-1782).
cccacattaccttcagaaa

SEQ ID NO: 617023 - DNA, 19 bp, Mus musculus
  siRNA target sequence for Ctps (NM_016748.1,1844-1862).
cggaaatcactgaactcaa

SEQ ID NO: 617024 - DNA, 19 bp, Mus musculus
  siRNA target sequence for Ctps2 (NM_018737.2,305-323).
catctcaggcattggtaaa

SEQ ID NO: 617025 - DNA, 19 bp, Mus musculus
  siRNA target sequence for Ctps2 (NM_018737.2,313-331).
gcattggtaaagggattat

SEQ ID NO: 617026 - DNA, 19 bp, Mus musculus
  siRNA target sequence for Ctps2 (NM_018737.2,340-358).
gcattgggactattctcaa

SEQ ID NO: 617027 - DNA, 19 bp, Mus musculus
  siRNA target sequence for Ctps2 (NM_018737.2,372-390).
cgagttactgccatcaaaa

SEQ ID NO: 617028 - DNA, 19 bp, Mus musculus
  siRNA target sequence for Ctps2 (NM_018737.2,410-428).
cgatgctggaactttctca

SEQ ID NO: 617029 - DNA, 19 bp, Mus musculus
  siRNA target sequence for Ctps2 (NM_018737.2,486-504).
cttggaaactatgaaagat

SEQ ID NO: 617030 - DNA, 19 bp, Mus musculus
  siRNA target sequence for Ctps2 (NM_018737.2,502-520).
gattcttggacattaatct

SEQ ID NO: 617031 - DNA, 19 bp, Mus musculus
  siRNA target sequence for Ctps2 (NM_018737.2,509-527).
ggacattaatctctataaa

SEQ ID NO: 617032 - DNA, 19 bp, Mus musculus
  siRNA target sequence for Ctps2 (NM_018737.2,609-627).
caagttgtcccccatatta

SEQ ID NO: 617033 - DNA, 19 bp, Mus musculus
  siRNA target sequence for Ctps2 (NM_018737.2,619-637).
cccatattactgatgctat

SEQ ID NO: 617034 - DNA, 19 bp, Mus musculus
  siRNA target sequence for Ctps2 (NM_018737.2,638-656).
ccaggagtgggttatgaat

SEQ ID NO: 617035 - DNA, 19 bp, Mus musculus
  siRNA target sequence for Ctps2 (NM_018737.2,694-712).
cccagatatgtgttattga

SEQ ID NO: 617036 - DNA, 19 bp, Mus musculus
  siRNA target sequence for Ctps2 (NM_018737.2,898-916).
gcttgtctccggatctgat

SEQ ID NO: 617037 - DNA, 19 bp, Mus musculus
  siRNA target sequence for Ctps2 (NM_018737.2,914-932).
gatcgtctgccgtagttca

SEQ ID NO: 617038 - DNA, 19 bp, Mus musculus
  siRNA target sequence for Ctps2 (NM_018737.2,928-946).
gttcaacccccattgagat

SEQ ID NO: 617039 - DNA, 19 bp, Mus musculus
  siRNA target sequence for Ctps2 (NM_018737.2,956-974).
ggagaagatttctatgttt

SEQ ID NO: 617040 - DNA, 19 bp, Mus musculus
  siRNA target sequence for Ctps2 (NM_018737.2,998-1016).
catctgtatccatgatgtt

SEQ ID NO: 617041 - DNA, 19 bp, Mus musculus
  siRNA target sequence for Ctps2 (NM_018737.2,1049-1067).
ggagcaaggtgtggttaaa

SEQ ID NO: 617042 - DNA, 19 bp, Mus musculus
  siRNA target sequence for Ctps2 (NM_018737.2,1050-1068).
gagcaaggtgtggttaaat

SEQ ID NO: 617043 - DNA, 19 bp, Mus musculus
  siRNA target sequence for Ctps2 (NM_018737.2,1052-1070).
gcaaggtgtggttaaatat

SEQ ID NO: 617044 - DNA, 19 bp, Mus musculus
  siRNA target sequence for Ctps2 (NM_018737.2,1053-1071).
caaggtgtggttaaatatt

SEQ ID NO: 617045 - DNA, 19 bp, Mus musculus
  siRNA target sequence for Ctps2 (NM_018737.2,1086-1104).
ggcctgcccatcaatgatt

SEQ ID NO: 617046 - DNA, 19 bp, Mus musculus
  siRNA target sequence for Ctps2 (NM_018737.2,1088-1106).
cctgcccatcaatgattgt

SEQ ID NO: 617047 - DNA, 19 bp, Mus musculus
  siRNA target sequence for Ctps2 (NM_018737.2,1094-1112).
catcaatgattgttcaagt

SEQ ID NO: 617048 - DNA, 19 bp, Mus musculus
  siRNA target sequence for Ctps2 (NM_018737.2,1179-1197).
gccctggttggtaaataca

SEQ ID NO: 617049 - DNA, 19 bp, Mus musculus
  siRNA target sequence for Ctps2 (NM_018737.2,1214-1232).
ctacgcctctgtgttcaaa

SEQ ID NO: 617050 - DNA, 19 bp, Mus musculus
  siRNA target sequence for Ctps2 (NM_018737.2,1254-1272).
gccatcaaccacaagttga

SEQ ID NO: 617051 - DNA, 19 bp, Mus musculus
  siRNA target sequence for Ctps2 (NM_018737.2,1322-1340).
ggatcctgtgaaattccat

SEQ ID NO: 617052 - DNA, 19 bp, Mus musculus
  siRNA target sequence for Ctps2 (NM_018737.2,1380-1398).
gtgcccggagggtttggaa

SEQ ID NO: 617053 - DNA, 19 bp, Mus musculus
  siRNA target sequence for Ctps2 (NM_018737.2,1478-1496).
gatgcaactggcagtgatt

SEQ ID NO: 617054 - DNA, 19 bp, Mus musculus
  siRNA target sequence for Ctps2 (NM_018737.2,1482-1500).
caactggcagtgattgagt

SEQ ID NO: 617055 - DNA, 19 bp, Mus musculus
  siRNA target sequence for Ctps2 (NM_018737.2,1488-1506).
gcagtgattgagtttgcaa

SEQ ID NO: 617056 - DNA, 19 bp, Mus musculus
  siRNA target sequence for Ctps2 (NM_018737.2,1556-1574).
cactccagtcccattggta

SEQ ID NO: 617057 - DNA, 19 bp, Mus musculus
  siRNA target sequence for Ctps2 (NM_018737.2,1558-1576).
ctccagtcccattggtaat

SEQ ID NO: 617058 - DNA, 19 bp, Mus musculus
  siRNA target sequence for Ctps2 (NM_018737.2,1561-1579).
cagtcccattggtaattga

SEQ ID NO: 617059 - DNA, 19 bp, Mus musculus
  siRNA target sequence for Ctps2 (NM_018737.2,1563-1581).
gtcccattggtaattgaca

SEQ ID NO: 617060 - DNA, 19 bp, Mus musculus
  siRNA target sequence for Ctps2 (NM_018737.2,1600-1618).
gcgatttgggaggaacaat

SEQ ID NO: 617061 - DNA, 19 bp, Mus musculus
  siRNA target sequence for Ctps2 (NM_018737.2,1602-1620).
gatttgggaggaacaatga

SEQ ID NO: 617062 - DNA, 19 bp, Mus musculus
  siRNA target sequence for Ctps2 (NM_018737.2,1625-1643).
ggggttaagacgaactgtt

SEQ ID NO: 617063 - DNA, 19 bp, Mus musculus
  siRNA target sequence for Ctps2 (NM_018737.2,1626-1644).
gggttaagacgaactgttt

SEQ ID NO: 617064 - DNA, 19 bp, Mus musculus
  siRNA target sequence for Ctps2 (NM_018737.2,1627-1645).
ggttaagacgaactgtttt

SEQ ID NO: 617065 - DNA, 19 bp, Mus musculus
  siRNA target sequence for Ctps2 (NM_018737.2,1681-1699).
gtgacgttccttacataga

SEQ ID NO: 617066 - DNA, 19 bp, Mus musculus
  siRNA target sequence for Ctps2 (NM_018737.2,1685-1703).
cgttccttacatagaagaa

SEQ ID NO: 617067 - DNA, 19 bp, Mus musculus
  siRNA target sequence for Ctps2 (NM_018737.2,1731-1749).
cctaacctgatcaaccaat

SEQ ID NO: 617068 - DNA, 19 bp, Mus musculus
  siRNA target sequence for Ctps2 (NM_018737.2,1732-1750).
ctaacctgatcaaccaatt

SEQ ID NO: 617069 - DNA, 19 bp, Mus musculus
  siRNA target sequence for Ctps2 (NM_018737.2,1737-1755).
ctgatcaaccaatttgaga

SEQ ID NO: 617070 - DNA, 19 bp, Mus musculus
  siRNA target sequence for Ctps2 (NM_018737.2,1754-1772).
gaataaagacctttgtttt

SEQ ID NO: 617071 - DNA, 19 bp, Mus musculus
  siRNA target sequence for Ctps2 (NM_018737.2,1798-1816).
ggatggaaattgttgagtt

SEQ ID NO: 617072 - DNA, 19 bp, Mus musculus
  siRNA target sequence for Ctps2 (NM_018737.2,1814-1832).
gttgacaagtcatccatat

SEQ ID NO: 617073 - DNA, 19 bp, Mus musculus
  siRNA target sequence for Ctps2 (NM_018737.2,1819-1837).
caagtcatccatatttcat

SEQ ID NO: 617074 - DNA, 19 bp, Mus musculus
  siRNA target sequence for Ctps2 (NM_018737.2,1844-1862).
ccagttccatcctgagttt

SEQ ID NO: 617075 - DNA, 19 bp, Mus musculus
  siRNA target sequence for Ctps2 (NM_018737.2,1891-1909).
cgtacctggggctcttact

SEQ ID NO: 617076 - DNA, 19 bp, Mus musculus
  siRNA target sequence for Ctps2 (NM_018737.2,1892-1910).
gtacctggggctcttactt

SEQ ID NO: 617077 - DNA, 19 bp, Mus musculus
  siRNA target sequence for Hlcs (NM_139145.2,215-233).
cccagaagatcgtttcagt

SEQ ID NO: 617078 - DNA, 19 bp, Mus musculus
  siRNA target sequence for Hlcs (NM_139145.2,356-374).
ctggccaaggtgattgcaa

SEQ ID NO: 617079 - DNA, 19 bp, Mus musculus
  siRNA target sequence for Hlcs (NM_139145.2,505-523).
ctggagctcgagaacagta

SEQ ID NO: 617080 - DNA, 19 bp, Mus musculus
  siRNA target sequence for Hlcs (NM_139145.2,510-528).
gctcgagaacagtaccatt

SEQ ID NO: 617081 - DNA, 19 bp, Mus musculus
  siRNA target sequence for Hlcs (NM_139145.2,659-677).
ccaatatcttgctgtatgt

SEQ ID NO: 617082 - DNA, 19 bp, Mus musculus
  siRNA target sequence for Hlcs (NM_139145.2,845-863).
ccatccccaaagacataca

SEQ ID NO: 617083 - DNA, 19 bp, Mus musculus
  siRNA target sequence for Hlcs (NM_139145.2,856-874).
gacatacagcacaagttca

SEQ ID NO: 617084 - DNA, 19 bp, Mus musculus
  siRNA target sequence for Hlcs (NM_139145.2,1027-1045).
ctgagcagcggctacgttt

SEQ ID NO: 617085 - DNA, 19 bp, Mus musculus
  siRNA target sequence for Hlcs (NM_139145.2,1032-1050).
cagcggctacgtttatgaa

SEQ ID NO: 617086 - DNA, 19 bp, Mus musculus
  siRNA target sequence for Hlcs (NM_139145.2,1034-1052).
gcggctacgtttatgaaga

SEQ ID NO: 617087 - DNA, 19 bp, Mus musculus
  siRNA target sequence for Hlcs (NM_139145.2,1035-1053).
cggctacgtttatgaagaa

SEQ ID NO: 617088 - DNA, 19 bp, Mus musculus
  siRNA target sequence for Hlcs (NM_139145.2,1198-1216).
cagactgcagacgacttta

SEQ ID NO: 617089 - DNA, 19 bp, Mus musculus
  siRNA target sequence for Hlcs (NM_139145.2,1202-1220).
ctgcagacgactttaacgt

SEQ ID NO: 617090 - DNA, 19 bp, Mus musculus
  siRNA target sequence for Hlcs (NM_139145.2,1241-1259).
gaagacacgaggtccttaa

SEQ ID NO: 617091 - DNA, 19 bp, Mus musculus
  siRNA target sequence for Hlcs (NM_139145.2,1310-1328).
ccttaacgcccctgtactt

SEQ ID NO: 617092 - DNA, 19 bp, Mus musculus
  siRNA target sequence for Hlcs (NM_139145.2,1311-1329).
cttaacgcccctgtactta

SEQ ID NO: 617093 - DNA, 19 bp, Mus musculus
  siRNA target sequence for Hlcs (NM_139145.2,1412-1430).
gcaagctctcccttcagtt

SEQ ID NO: 617094 - DNA, 19 bp, Mus musculus
  siRNA target sequence for Hlcs (NM_139145.2,1489-1507).
gacccagaagccttttcat

SEQ ID NO: 617095 - DNA, 19 bp, Mus musculus
  siRNA target sequence for Hlcs (NM_139145.2,1553-1571).
cgcgccttgggaaagtgat

SEQ ID NO: 617096 - DNA, 19 bp, Mus musculus
  siRNA target sequence for Hlcs (NM_139145.2,1558-1576).
cttgggaaagtgattctgt

SEQ ID NO: 617097 - DNA, 19 bp, Mus musculus
  siRNA target sequence for Hlcs (NM_139145.2,1634-1652).
cgcaggaaatgggcttaat

SEQ ID NO: 617098 - DNA, 19 bp, Mus musculus
  siRNA target sequence for Hlcs (NM_139145.2,1767-1785).
gggacagaggattccattt

SEQ ID NO: 617099 - DNA, 19 bp, Mus musculus
  siRNA target sequence for Hlcs (NM_139145.2,1835-1853).
cagggtatgaggatatcaa

SEQ ID NO: 617100 - DNA, 19 bp, Mus musculus
  siRNA target sequence for Hlcs (NM_139145.2,1837-1855).
gggtatgaggatatcaact

SEQ ID NO: 617101 - DNA, 19 bp, Mus musculus
  siRNA target sequence for Hlcs (NM_139145.2,1863-1881).
gaagtggcccaacgatatt

SEQ ID NO: 617102 - DNA, 19 bp, Mus musculus
  siRNA target sequence for Hlcs (NM_139145.2,1868-1886).
ggcccaacgatatttatta

SEQ ID NO: 617103 - DNA, 19 bp, Mus musculus
  siRNA target sequence for Hlcs (NM_139145.2,1905-1923).
cggtggggttctggttaat

SEQ ID NO: 617104 - DNA, 19 bp, Mus musculus
  siRNA target sequence for Hlcs (NM_139145.2,1911-1929).
ggttctggttaattcaaca

SEQ ID NO: 617105 - DNA, 19 bp, Mus musculus
  siRNA target sequence for Hlcs (NM_139145.2,1915-1933).
ctggttaattcaacactta

SEQ ID NO: 617106 - DNA, 19 bp, Mus musculus
  siRNA target sequence for Hlcs (NM_139145.2,1971-1989).
caatgtgacgaacagtaat

SEQ ID NO: 617107 - DNA, 19 bp, Mus musculus
  siRNA target sequence for Hlcs (NM_139145.2,1975-1993).
gtgacgaacagtaatccta

SEQ ID NO: 617108 - DNA, 19 bp, Mus musculus
  siRNA target sequence for Hlcs (NM_139145.2,1985-2003).
gtaatcctaccatttgtat

SEQ ID NO: 617109 - DNA, 19 bp, Mus musculus
  siRNA target sequence for Hlcs (NM_139145.2,2011-2029).
ctcatcgaagaacacaata

SEQ ID NO: 617110 - DNA, 19 bp, Mus musculus
  siRNA target sequence for Hlcs (NM_139145.2,2058-2076).
gcgagcggactgtctcata

SEQ ID NO: 617111 - DNA, 19 bp, Mus musculus
  siRNA target sequence for Hlcs (NM_139145.2,2138-2156).
gcgttcttcccctctatta

SEQ ID NO: 617112 - DNA, 19 bp, Mus musculus
  siRNA target sequence for Hlcs (NM_139145.2,2139-2157).
cgttcttcccctctattat

SEQ ID NO: 617113 - DNA, 19 bp, Mus musculus
  siRNA target sequence for Hlcs (NM_139145.2,2140-2158).
gttcttcccctctattata

SEQ ID NO: 617114 - DNA, 19 bp, Mus musculus
  siRNA target sequence for Hlcs (NM_139145.2,2146-2164).
cccctctattataaatact

SEQ ID NO: 617115 - DNA, 19 bp, Mus musculus
  siRNA target sequence for Hlcs (NM_139145.2,2205-2223).
ggggccacaggcatctatt

SEQ ID NO: 617116 - DNA, 19 bp, Mus musculus
  siRNA target sequence for Hlcs (NM_139145.2,2207-2225).
ggccacaggcatctattgt

SEQ ID NO: 617117 - DNA, 19 bp, Mus musculus
  siRNA target sequence for Hlcs (NM_139145.2,2303-2321).
ccttcgacatgctgagaaa

SEQ ID NO: 617118 - DNA, 19 bp, Mus musculus
  siRNA target sequence for Pccb (NM_025835.1,60-78).
cgaggctcagcgttctgaa

SEQ ID NO: 617119 - DNA, 19 bp, Mus musculus
  siRNA target sequence for Pccb (NM_025835.1,61-79).
gaggctcagcgttctgaat

SEQ ID NO: 617120 - DNA, 19 bp, Mus musculus
  siRNA target sequence for Pccb (NM_025835.1,114-132).
gccagccggtttcagttaa

SEQ ID NO: 617121 - DNA, 19 bp, Mus musculus
  siRNA target sequence for Pccb (NM_025835.1,115-133).
ccagccggtttcagttaaa

SEQ ID NO: 617122 - DNA, 19 bp, Mus musculus
  siRNA target sequence for Pccb (NM_025835.1,200-218).
cacaagcgagggaagctaa

SEQ ID NO: 617123 - DNA, 19 bp, Mus musculus
  siRNA target sequence for Pccb (NM_025835.1,262-280).
catggagagcgacatgttt

SEQ ID NO: 617124 - DNA, 19 bp, Mus musculus
  siRNA target sequence for Pccb (NM_025835.1,312-330).
ctgctgataagaataagtt

SEQ ID NO: 617125 - DNA, 19 bp, Mus musculus
  siRNA target sequence for Pccb (NM_025835.1,367-385).
caatggacgattggtttat

SEQ ID NO: 617126 - DNA, 19 bp, Mus musculus
  siRNA target sequence for Pccb (NM_025835.1,371-389).
ggacgattggtttatgtct

SEQ ID NO: 617127 - DNA, 19 bp, Mus musculus
  siRNA target sequence for Pccb (NM_025835.1,372-390).
gacgattggtttatgtctt

SEQ ID NO: 617128 - DNA, 19 bp, Mus musculus
  siRNA target sequence for Pccb (NM_025835.1,431-449).
gcacatgctcaaaagatct

SEQ ID NO: 617129 - DNA, 19 bp, Mus musculus
  siRNA target sequence for Pccb (NM_025835.1,486-504).
cagtgatcgggctcaatga

SEQ ID NO: 617130 - DNA, 19 bp, Mus musculus
  siRNA target sequence for Pccb (NM_025835.1,488-506).
gtgatcgggctcaatgact

SEQ ID NO: 617131 - DNA, 19 bp, Mus musculus
  siRNA target sequence for Pccb (NM_025835.1,546-564).
ctggctacgcggacatctt

SEQ ID NO: 617132 - DNA, 19 bp, Mus musculus
  siRNA target sequence for Pccb (NM_025835.1,597-615).
cgcagatttctctgatcat

SEQ ID NO: 617133 - DNA, 19 bp, Mus musculus
  siRNA target sequence for Pccb (NM_025835.1,650-668).
gccctaacagacttcacat

SEQ ID NO: 617134 - DNA, 19 bp, Mus musculus
  siRNA target sequence for Pccb (NM_025835.1,680-698).
gacacatcttacctgttta

SEQ ID NO: 617135 - DNA, 19 bp, Mus musculus
  siRNA target sequence for Pccb (NM_025835.1,710-728).
gaagttgtgaagtctgtta

SEQ ID NO: 617136 - DNA, 19 bp, Mus musculus
  siRNA target sequence for Pccb (NM_025835.1,801-819).
gagctttcgacaatgatgt

SEQ ID NO: 617137 - DNA, 19 bp, Mus musculus
  siRNA target sequence for Pccb (NM_025835.1,831-849).
gtaacctgcgtgaattctt

SEQ ID NO: 617138 - DNA, 19 bp, Mus musculus
  siRNA target sequence for Pccb (NM_025835.1,835-853).
cctgcgtgaattcttcaat

SEQ ID NO: 617139 - DNA, 19 bp, Mus musculus
  siRNA target sequence for Pccb (NM_025835.1,836-854).
ctgcgtgaattcttcaatt

SEQ ID NO: 617140 - DNA, 19 bp, Mus musculus
  siRNA target sequence for Pccb (NM_025835.1,979-997).
catcatccacgcagtgatt

SEQ ID NO: 617141 - DNA, 19 bp, Mus musculus
  siRNA target sequence for Pccb (NM_025835.1,994-1012).
gattgacgagagagagttt

SEQ ID NO: 617142 - DNA, 19 bp, Mus musculus
  siRNA target sequence for Pccb (NM_025835.1,1024-1042).
gcccagttacgcaaaaaat

SEQ ID NO: 617143 - DNA, 19 bp, Mus musculus
  siRNA target sequence for Pccb (NM_025835.1,1025-1043).
cccagttacgcaaaaaata

SEQ ID NO: 617144 - DNA, 19 bp, Mus musculus
  siRNA target sequence for Pccb (NM_025835.1,1029-1047).
gttacgcaaaaaatattgt

SEQ ID NO: 617145 - DNA, 19 bp, Mus musculus
  siRNA target sequence for Pccb (NM_025835.1,1049-1067).
gttggcttcgcaagaatga

SEQ ID NO: 617146 - DNA, 19 bp, Mus musculus
  siRNA target sequence for Pccb (NM_025835.1,1138-1156).
cgtgaagggggctcgtttt

SEQ ID NO: 617147 - DNA, 19 bp, Mus musculus
  siRNA target sequence for Pccb (NM_025835.1,1289-1307).
gcaactgtgcccaaaatca

SEQ ID NO: 617148 - DNA, 19 bp, Mus musculus
  siRNA target sequence for Pccb (NM_025835.1,1332-1350).
gaggtgcctatgatgtcat

SEQ ID NO: 617149 - DNA, 19 bp, Mus musculus
  siRNA target sequence for Pccb (NM_025835.1,1615-1633).
ctggaggaaacatgcaaat

SEQ ID NO: 617150 - DNA, 19 bp, Mus musculus
  siRNA target sequence for Pccb (NM_025835.1,1617-1635).
ggaggaaacatgcaaatat

SEQ ID NO: 617151 - DNA, 19 bp, Mus musculus
  siRNA target sequence for Lias (NM_024471.2,165-183).
gcctggggtcccggatatt

SEQ ID NO: 617152 - DNA, 19 bp, Mus musculus
  siRNA target sequence for Lias (NM_024471.2,166-184).
cctggggtcccggatattt

SEQ ID NO: 617153 - DNA, 19 bp, Mus musculus
  siRNA target sequence for Lias (NM_024471.2,169-187).
ggggtcccggatatttgga

SEQ ID NO: 617154 - DNA, 19 bp, Mus musculus
  siRNA target sequence for Lias (NM_024471.2,174-192).
cccggatatttggaagata

SEQ ID NO: 617155 - DNA, 19 bp, Mus musculus
  siRNA target sequence for Lias (NM_024471.2,196-214).
gttcacggttagagcatta

SEQ ID NO: 617156 - DNA, 19 bp, Mus musculus
  siRNA target sequence for Lias (NM_024471.2,199-217).
cacggttagagcattaagt

SEQ ID NO: 617157 - DNA, 19 bp, Mus musculus
  siRNA target sequence for Lias (NM_024471.2,202-220).
ggttagagcattaagttct

SEQ ID NO: 617158 - DNA, 19 bp, Mus musculus
  siRNA target sequence for Lias (NM_024471.2,203-221).
gttagagcattaagttctt

SEQ ID NO: 617159 - DNA, 19 bp, Mus musculus
  siRNA target sequence for Lias (NM_024471.2,258-276).
cagaccttcaagattttgt

SEQ ID NO: 617160 - DNA, 19 bp, Mus musculus
  siRNA target sequence for Lias (NM_024471.2,262-280).
ccttcaagattttgtatct

SEQ ID NO: 617161 - DNA, 19 bp, Mus musculus
  siRNA target sequence for Lias (NM_024471.2,287-305).
cttgcagacaagagtacat

SEQ ID NO: 617162 - DNA, 19 bp, Mus musculus
  siRNA target sequence for Lias (NM_024471.2,359-377).
cctccatggctaaagacaa

SEQ ID NO: 617163 - DNA, 19 bp, Mus musculus
  siRNA target sequence for Lias (NM_024471.2,417-435).
cattgcggaatttaagtct

SEQ ID NO: 617164 - DNA, 19 bp, Mus musculus
  siRNA target sequence for Lias (NM_024471.2,506-524).
gccacagccacgatcatgt

SEQ ID NO: 617165 - DNA, 19 bp, Mus musculus
  siRNA target sequence for Lias (NM_024471.2,564-582).
ccgttaagaccgcaagaaa

SEQ ID NO: 617166 - DNA, 19 bp, Mus musculus
  siRNA target sequence for Lias (NM_024471.2,565-583).
cgttaagaccgcaagaaat

SEQ ID NO: 617167 - DNA, 19 bp, Mus musculus
  siRNA target sequence for Lias (NM_024471.2,599-617).
gccaatgagcccgacaata

SEQ ID NO: 617168 - DNA, 19 bp, Mus musculus
  siRNA target sequence for Lias (NM_024471.2,611-629).
gacaatacggccaaagcaa

SEQ ID NO: 617169 - DNA, 19 bp, Mus musculus
  siRNA target sequence for Lias (NM_024471.2,613-631).
caatacggccaaagcaatt

SEQ ID NO: 617170 - DNA, 19 bp, Mus musculus
  siRNA target sequence for Lias (NM_024471.2,637-655).
gtggggtctggattatgtt

SEQ ID NO: 617171 - DNA, 19 bp, Mus musculus
  siRNA target sequence for Lias (NM_024471.2,664-682).
gtcggtggatcgagatgat

SEQ ID NO: 617172 - DNA, 19 bp, Mus musculus
  siRNA target sequence for Lias (NM_024471.2,810-828).
ctctgtctggattagatgt

SEQ ID NO: 617173 - DNA, 19 bp, Mus musculus
  siRNA target sequence for Lias (NM_024471.2,856-874).
cgagttacagaggaaagtt

SEQ ID NO: 617174 - DNA, 19 bp, Mus musculus
  siRNA target sequence for Lias (NM_024471.2,931-949).
ggtccagcctgatgttgtt

SEQ ID NO: 617175 - DNA, 19 bp, Mus musculus
  siRNA target sequence for Lias (NM_024471.2,947-965).
gtttccaaaacatcgataa

SEQ ID NO: 617176 - DNA, 19 bp, Mus musculus
  siRNA target sequence for Lias (NM_024471.2,1025-1043).
gccgacgtggactgtttaa

SEQ ID NO: 617177 - DNA, 19 bp, Mus musculus
  siRNA target sequence for Lias (NM_024471.2,1027-1045).
cgacgtggactgtttaact

SEQ ID NO: 617178 - DNA, 19 bp, Mus musculus
  siRNA target sequence for Lias (NM_024471.2,1030-1048).
cgtggactgtttaactcta

SEQ ID NO: 617179 - DNA, 19 bp, Mus musculus
  siRNA target sequence for Lias (NM_024471.2,1074-1092).
gccaccttaaggttgaaga

SEQ ID NO: 617180 - DNA, 19 bp, Mus musculus
  siRNA target sequence for Lias (NM_024471.2,1084-1102).
ggttgaagaatatgttact

SEQ ID NO: 617181 - DNA, 19 bp, Mus musculus
  siRNA target sequence for Lias (NM_024471.2,1101-1119).
ctcctgagaagttcaaata

SEQ ID NO: 617182 - DNA, 19 bp, Mus musculus
  siRNA target sequence for Lias (NM_024471.2,1170-1188).
ctttggtgcgatcttcata

SEQ ID NO: 617183 - DNA, 19 bp, Mus musculus
  siRNA target sequence for Lias (NM_024471.2,1174-1192).
ggtgcgatcttcatataaa

SEQ ID NO: 617184 - DNA, 19 bp, Mus musculus
  siRNA target sequence for Lias (NM_024471.2,1177-1195).
gcgatcttcatataaagca

SEQ ID NO: 617185 - DNA, 19 bp, Mus musculus
  siRNA target sequence for Coro2a (NM_178893.2,485-503).
cgctgtggtcactgaatgt

SEQ ID NO: 617186 - DNA, 19 bp, Mus musculus
  siRNA target sequence for Coro2a (NM_178893.2,589-607).
ggaacgtcttggacatcaa

SEQ ID NO: 617187 - DNA, 19 bp, Mus musculus
  siRNA target sequence for Coro2a (NM_178893.2,590-608).
gaacgtcttggacatcaaa

SEQ ID NO: 617188 - DNA, 19 bp, Mus musculus
  siRNA target sequence for Coro2a (NM_178893.2,596-614).
cttggacatcaaatggaat

SEQ ID NO: 617189 - DNA, 19 bp, Mus musculus
  siRNA target sequence for Coro2a (NM_178893.2,605-623).
caaatggaatcctttcaat

SEQ ID NO: 617190 - DNA, 19 bp, Mus musculus
  siRNA target sequence for Coro2a (NM_178893.2,615-633).
cctttcaatgactttgaga

SEQ ID NO: 617191 - DNA, 19 bp, Mus musculus
  siRNA target sequence for Coro2a (NM_178893.2,651-669).
gatgccacgattaagatct

SEQ ID NO: 617192 - DNA, 19 bp, Mus musculus
  siRNA target sequence for Coro2a (NM_178893.2,678-696).
cccaagcaactgttgacaa

SEQ ID NO: 617193 - DNA, 19 bp, Mus musculus
  siRNA target sequence for Coro2a (NM_178893.2,766-784).
ccacaactgccaacattct

SEQ ID NO: 617194 - DNA, 19 bp, Mus musculus
  siRNA target sequence for Coro2a (NM_178893.2,853-871).
ggccagtgaagacaatcaa

SEQ ID NO: 617195 - DNA, 19 bp, Mus musculus
  siRNA target sequence for Coro2a (NM_178893.2,944-962).
ccgcaagattcggattgtt

SEQ ID NO: 617196 - DNA, 19 bp, Mus musculus
  siRNA target sequence for Coro2a (NM_178893.2,1097-1115).
gtgggaccaggaaaacctt

SEQ ID NO: 617197 - DNA, 19 bp, Mus musculus
  siRNA target sequence for Coro2a (NM_178893.2,1217-1235).
cgggaacatccgctactat

SEQ ID NO: 617198 - DNA, 19 bp, Mus musculus
  siRNA target sequence for Coro2a (NM_178893.2,1228-1246).
gctactatgaggtaagcat

SEQ ID NO: 617199 - DNA, 19 bp, Mus musculus
  siRNA target sequence for Coro2a (NM_178893.2,1307-1325).
cggtatcatgccaaagaga

SEQ ID NO: 617200 - DNA, 19 bp, Mus musculus
  siRNA target sequence for Coro2a (NM_178893.2,1349-1367).
gatcttccgcttctataaa

SEQ ID NO: 617201 - DNA, 19 bp, Mus musculus
  siRNA target sequence for Coro2a (NM_178893.2,1391-1409).
cgagccagtgtccatgatt

SEQ ID NO: 617202 - DNA, 19 bp, Mus musculus
  siRNA target sequence for Coro2a (NM_178893.2,1616-1634).
gcccttagaacccatgaaa

SEQ ID NO: 617203 - DNA, 19 bp, Mus musculus
  siRNA target sequence for Coro2a (NM_178893.2,1696-1714).
ggaccgcagagcatcatct

SEQ ID NO: 617204 - DNA, 19 bp, Mus musculus
  siRNA target sequence for Coro2a (NM_178893.2,1721-1739).
gaagtcctgcctcactaat

SEQ ID NO: 617205 - DNA, 19 bp, Mus musculus
  siRNA target sequence for Gluld1 (NM_153601.1,119-137).
gtcaccaaaccacatcttt

SEQ ID NO: 617206 - DNA, 19 bp, Mus musculus
  siRNA target sequence for Gluld1 (NM_153601.1,238-256).
ctcgcacagtgccaaagat

SEQ ID NO: 617207 - DNA, 19 bp, Mus musculus
  siRNA target sequence for Gluld1 (NM_153601.1,265-283).
cccgacaccagtggtaaaa

SEQ ID NO: 617208 - DNA, 19 bp, Mus musculus
  siRNA target sequence for Gluld1 (NM_153601.1,309-327).
gtgctcctgatgctgaatt

SEQ ID NO: 617209 - DNA, 19 bp, Mus musculus
  siRNA target sequence for Gluld1 (NM_153601.1,378-396).
ctcaactttctgctagaat

SEQ ID NO: 617210 - DNA, 19 bp, Mus musculus
  siRNA target sequence for Gluld1 (NM_153601.1,380-398).
caactttctgctagaatga

SEQ ID NO: 617211 - DNA, 19 bp, Mus musculus
  siRNA target sequence for Gluld1 (NM_153601.1,387-405).
ctgctagaatgaaacacat

SEQ ID NO: 617212 - DNA, 19 bp, Mus musculus
  siRNA target sequence for Gluld1 (NM_153601.1,430-448).
cctccagtttgtacgattt

SEQ ID NO: 617213 - DNA, 19 bp, Mus musculus
  siRNA target sequence for Gluld1 (NM_153601.1,433-451).
ccagtttgtacgatttgaa

SEQ ID NO: 617214 - DNA, 19 bp, Mus musculus
  siRNA target sequence for Gluld1 (NM_153601.1,467-485).
ggtgtctccagatctaaga

SEQ ID NO: 617215 - DNA, 19 bp, Mus musculus
  siRNA target sequence for Gluld1 (NM_153601.1,537-555).
cccgtgggtatctggaatt

SEQ ID NO: 617216 - DNA, 19 bp, Mus musculus
  siRNA target sequence for Gluld1 (NM_153601.1,539-557).
cgtgggtatctggaattga

SEQ ID NO: 617217 - DNA, 19 bp, Mus musculus
  siRNA target sequence for Gluld1 (NM_153601.1,540-558).
gtgggtatctggaattgat

SEQ ID NO: 617218 - DNA, 19 bp, Mus musculus
  siRNA target sequence for Gluld1 (NM_153601.1,561-579).
cgaaccctaaggacaatga

SEQ ID NO: 617219 - DNA, 19 bp, Mus musculus
  siRNA target sequence for Gluld1 (NM_153601.1,670-688).
gactgcgagggtgatttgt

SEQ ID NO: 617220 - DNA, 19 bp, Mus musculus
  siRNA target sequence for Gluld1 (NM_153601.1,672-690).
ctgcgagggtgatttgtga

SEQ ID NO: 617221 - DNA, 19 bp, Mus musculus
  siRNA target sequence for Gluld1 (NM_153601.1,780-798).
gcctgctgtccgctttcat

SEQ ID NO: 617222 - DNA, 19 bp, Mus musculus
  siRNA target sequence for Gluld1 (NM_153601.1,784-802).
gctgtccgctttcatctat

SEQ ID NO: 617223 - DNA, 19 bp, Mus musculus
  siRNA target sequence for Gluld1 (NM_153601.1,787-805).
gtccgctttcatctatgat

SEQ ID NO: 617224 - DNA, 19 bp, Mus musculus
  siRNA target sequence for Gluld1 (NM_153601.1,819-837).
gtgtgcccgaagtgatcaa

SEQ ID NO: 617225 - DNA, 19 bp, Mus musculus
  siRNA target sequence for Gluld1 (NM_153601.1,821-839).
gtgcccgaagtgatcaatt

SEQ ID NO: 617226 - DNA, 19 bp, Mus musculus
  siRNA target sequence for Gluld1 (NM_153601.1,823-841).
gcccgaagtgatcaattca

SEQ ID NO: 617227 - DNA, 19 bp, Mus musculus
  siRNA target sequence for Gluld1 (NM_153601.1,824-842).
cccgaagtgatcaattcaa

SEQ ID NO: 617228 - DNA, 19 bp, Mus musculus
  siRNA target sequence for Gluld1 (NM_153601.1,825-843).
ccgaagtgatcaattcaaa

SEQ ID NO: 617229 - DNA, 19 bp, Mus musculus
  siRNA target sequence for Gluld1 (NM_153601.1,835-853).
caattcaaagaccatatct

SEQ ID NO: 617230 - DNA, 19 bp, Mus musculus
  siRNA target sequence for Gluld1 (NM_153601.1,865-883).
cacattactaagtaaccat

SEQ ID NO: 617231 - DNA, 19 bp, Mus musculus
  siRNA target sequence for Gluld1 (NM_153601.1,908-926).
gttgagggcctgtatcaga

SEQ ID NO: 617232 - DNA, 19 bp, Mus musculus
  siRNA target sequence for Gluld1 (NM_153601.1,1002-1020).
gcattagctcagctgataa

SEQ ID NO: 617233 - DNA, 19 bp, Mus musculus
  siRNA target sequence for Gluld1 (NM_153601.1,1003-1021).
cattagctcagctgataat

SEQ ID NO: 617234 - DNA, 19 bp, Mus musculus
  siRNA target sequence for Gluld1 (NM_153601.1,1052-1070).
gtggccaggagatataatt

SEQ ID NO: 617235 - DNA, 19 bp, Mus musculus
  siRNA target sequence for Gluld1 (NM_153601.1,1072-1090).
catagctagccttgtaatt

SEQ ID NO: 617236 - DNA, 19 bp, Mus musculus
  siRNA target sequence for Gluld1 (NM_153601.1,1145-1163).
gggaagacaaatatgttct

SEQ ID NO: 617237 - DNA, 19 bp, Mus musculus
  siRNA target sequence for Gluld1 (NM_153601.1,1320-1338).
ccaccacgtggggatacaa

SEQ ID NO: 617238 - DNA, 19 bp, Mus musculus
  siRNA target sequence for Gluld1 (NM_153601.1,1321-1339).
caccacgtggggatacaat

SEQ ID NO: 617239 - DNA, 19 bp, Mus musculus
  siRNA target sequence for Gluld1 (NM_153601.1,1323-1341).
ccacgtggggatacaatga

SEQ ID NO: 617240 - DNA, 19 bp, Mus musculus
  siRNA target sequence for Gluld1 (NM_153601.1,1326-1344).
cgtggggatacaatgacaa

SEQ ID NO: 617241 - DNA, 19 bp, Mus musculus
  siRNA target sequence for Gluld1 (NM_153601.1,1507-1525).
gagtcaggatctctatcaa

SEQ ID NO: 617242 - DNA, 19 bp, Mus musculus
  siRNA target sequence for Gluld1 (NM_153601.1,1536-1554).
ccgagatccctttgaagat

SEQ ID NO: 617243 - DNA, 19 bp, Mus musculus
  siRNA target sequence for Hal (NM_010401.3,457-475).
gtgcgacgctacatgaaga

SEQ ID NO: 617244 - DNA, 19 bp, Mus musculus
  siRNA target sequence for Hal (NM_010401.3,461-479).
gacgctacatgaagaacaa

SEQ ID NO: 617245 - DNA, 19 bp, Mus musculus
  siRNA target sequence for Hal (NM_010401.3,503-521).
cggtggatgaagtgcaatt

SEQ ID NO: 617246 - DNA, 19 bp, Mus musculus
  siRNA target sequence for Hal (NM_010401.3,580-598).
gccttagaggacaatgagt

SEQ ID NO: 617247 - DNA, 19 bp, Mus musculus
  siRNA target sequence for Hal (NM_010401.3,581-599).
ccttagaggacaatgagtt

SEQ ID NO: 617248 - DNA, 19 bp, Mus musculus
  siRNA target sequence for Hal (NM_010401.3,627-645).
gatgtctcctgatttcatt

SEQ ID NO: 617249 - DNA, 19 bp, Mus musculus
  siRNA target sequence for Hal (NM_010401.3,650-668).
cgcagccagaaggagtttt

SEQ ID NO: 617250 - DNA, 19 bp, Mus musculus
  siRNA target sequence for Hal (NM_010401.3,654-672).
gccagaaggagttttccta

SEQ ID NO: 617251 - DNA, 19 bp, Mus musculus
  siRNA target sequence for Hal (NM_010401.3,655-673).
ccagaaggagttttcctat

SEQ ID NO: 617252 - DNA, 19 bp, Mus musculus
  siRNA target sequence for Hal (NM_010401.3,656-674).
cagaaggagttttcctata

SEQ ID NO: 617253 - DNA, 19 bp, Mus musculus
  siRNA target sequence for Hal (NM_010401.3,658-676).
gaaggagttttcctataca

SEQ ID NO: 617254 - DNA, 19 bp, Mus musculus
  siRNA target sequence for Hal (NM_010401.3,751-769).
ggcaagggacgttacaaga

SEQ ID NO: 617255 - DNA, 19 bp, Mus musculus
  siRNA target sequence for Hal (NM_010401.3,752-770).
gcaagggacgttacaagat

SEQ ID NO: 617256 - DNA, 19 bp, Mus musculus
  siRNA target sequence for Hal (NM_010401.3,768-786).
gataaagctcacttcaatt

SEQ ID NO: 617257 - DNA, 19 bp, Mus musculus
  siRNA target sequence for Hal (NM_010401.3,779-797).
cttcaattgctgagaagaa

SEQ ID NO: 617258 - DNA, 19 bp, Mus musculus
  siRNA target sequence for Hal (NM_010401.3,890-908).
ctgtaatccctgccaataa

SEQ ID NO: 617259 - DNA, 19 bp, Mus musculus
  siRNA target sequence for Hal (NM_010401.3,1024-1042).
ggttacagtgggatttcct

SEQ ID NO: 617260 - DNA, 19 bp, Mus musculus
  siRNA target sequence for Hal (NM_010401.3,1041-1059).
cttggagacgctgaaacaa

SEQ ID NO: 617261 - DNA, 19 bp, Mus musculus
  siRNA target sequence for Hal (NM_010401.3,1044-1062).
ggagacgctgaaacaagtt

SEQ ID NO: 617262 - DNA, 19 bp, Mus musculus
  siRNA target sequence for Hal (NM_010401.3,1045-1063).
gagacgctgaaacaagtta

SEQ ID NO: 617263 - DNA, 19 bp, Mus musculus
  siRNA target sequence for Hal (NM_010401.3,1049-1067).
cgctgaaacaagttattga

SEQ ID NO: 617264 - DNA, 19 bp, Mus musculus
  siRNA target sequence for Hal (NM_010401.3,1160-1178).
ggctcatcggagaaggaaa

SEQ ID NO: 617265 - DNA, 19 bp, Mus musculus
  siRNA target sequence for Hal (NM_010401.3,1228-1246).
gcccatggactgaaaccaa

SEQ ID NO: 617266 - DNA, 19 bp, Mus musculus
  siRNA target sequence for Hal (NM_010401.3,1229-1247).
cccatggactgaaaccaat

SEQ ID NO: 617267 - DNA, 19 bp, Mus musculus
  siRNA target sequence for Hal (NM_010401.3,1230-1248).
ccatggactgaaaccaatt

SEQ ID NO: 617268 - DNA, 19 bp, Mus musculus
  siRNA target sequence for Hal (NM_010401.3,1234-1252).
ggactgaaaccaattgtct

SEQ ID NO: 617269 - DNA, 19 bp, Mus musculus
  siRNA target sequence for Hal (NM_010401.3,1285-1303).
gggacacagatgatcactt

SEQ ID NO: 617270 - DNA, 19 bp, Mus musculus
  siRNA target sequence for Hal (NM_010401.3,1437-1455).
ccgtgggcaaattgaagtt

SEQ ID NO: 617271 - DNA, 19 bp, Mus musculus
  siRNA target sequence for Hal (NM_010401.3,1577-1595).
gtgtggtgaacgacacaat

SEQ ID NO: 617272 - DNA, 19 bp, Mus musculus
  siRNA target sequence for Hal (NM_010401.3,1603-1621).
gtgaaggacatcatcacta

SEQ ID NO: 617273 - DNA, 19 bp, Mus musculus
  siRNA target sequence for Hal (NM_010401.3,1629-1647).
gaacagcgccacagacaat

SEQ ID NO: 617274 - DNA, 19 bp, Mus musculus
  siRNA target sequence for Hal (NM_010401.3,1661-1679).
ccagtcgaggggagacaat

SEQ ID NO: 617275 - DNA, 19 bp, Mus musculus
  siRNA target sequence for Hal (NM_010401.3,1662-1680).
cagtcgaggggagacaatt

SEQ ID NO: 617276 - DNA, 19 bp, Mus musculus
  siRNA target sequence for Hal (NM_010401.3,1688-1706).
gaaacttccatggtgaata

SEQ ID NO: 617277 - DNA, 19 bp, Mus musculus
  siRNA target sequence for Hal (NM_010401.3,1711-1729).
gccaaagccctggactatt

SEQ ID NO: 617278 - DNA, 19 bp, Mus musculus
  siRNA target sequence for Hal (NM_010401.3,1712-1730).
ccaaagccctggactattt

SEQ ID NO: 617279 - DNA, 19 bp, Mus musculus
  siRNA target sequence for Hal (NM_010401.3,1744-1762).
catgaacttgcggcaatta

SEQ ID NO: 617280 - DNA, 19 bp, Mus musculus
  siRNA target sequence for Hal (NM_010401.3,1753-1771).
gcggcaattagtgaaagaa

SEQ ID NO: 617281 - DNA, 19 bp, Mus musculus
  siRNA target sequence for Hal (NM_010401.3,1772-1790).
gaatcgaaaggctgtgtaa

SEQ ID NO: 617282 - DNA, 19 bp, Mus musculus
  siRNA target sequence for Hal (NM_010401.3,1776-1794).
cgaaaggctgtgtaatcct

SEQ ID NO: 617283 - DNA, 19 bp, Mus musculus
  siRNA target sequence for Hal (NM_010401.3,1839-1857).
caattctgggttcatgata

SEQ ID NO: 617284 - DNA, 19 bp, Mus musculus
  siRNA target sequence for Hal (NM_010401.3,2042-2060).
cctgccagggtatagagtt

SEQ ID NO: 617285 - DNA, 19 bp, Mus musculus
  siRNA target sequence for Hal (NM_010401.3,2043-2061).
ctgccagggtatagagttt

SEQ ID NO: 617286 - DNA, 19 bp, Mus musculus
  siRNA target sequence for Hal (NM_010401.3,2045-2063).
gccagggtatagagtttct

SEQ ID NO: 617287 - DNA, 19 bp, Mus musculus
  siRNA target sequence for Hal (NM_010401.3,2107-2125).
ctggtgcgctccgtagtaa

SEQ ID NO: 617288 - DNA, 19 bp, Mus musculus
  siRNA target sequence for Hal (NM_010401.3,2177-2195).
ggttgcttcttgaccaaaa

SEQ ID NO: 617289 - DNA, 19 bp, Mus musculus
  siRNA target sequence for Hal (NM_010401.3,2212-2230).
gcaccgtacatcgagaaat

SEQ ID NO: 617290 - DNA, 19 bp, Mus musculus
  siRNA target sequence for Hal (NM_010401.3,2213-2231).
caccgtacatcgagaaata

SEQ ID NO: 617291 - DNA, 19 bp, Mus musculus
  siRNA target sequence for Hal (NM_010401.3,2215-2233).
ccgtacatcgagaaataca

SEQ ID NO: 617292 - DNA, 19 bp, Mus musculus
  siRNA target sequence for Hal (NM_010401.3,2217-2235).
gtacatcgagaaatacaga

SEQ ID NO: 617293 - DNA, 19 bp, Mus musculus
  siRNA target sequence for Hal (NM_010401.3,2287-2305).
gaatctctccgaaagaact

SEQ ID NO: 617294 - DNA, 19 bp, Mus musculus
  siRNA target sequence for Hal (NM_010401.3,2317-2335).
ccagagtctgacgatcttt

SEQ ID NO: 617295 - DNA, 19 bp, Mus musculus
  siRNA target sequence for Asns (NM_012055.1,151-169).
gtctgagtgcgatgaagat

SEQ ID NO: 617296 - DNA, 19 bp, Mus musculus
  siRNA target sequence for Asns (NM_012055.1,255-273).
gttgacccgctgtttggaa

SEQ ID NO: 617297 - DNA, 19 bp, Mus musculus
  siRNA target sequence for Asns (NM_012055.1,271-289).
gaatgcagccgataagagt

SEQ ID NO: 617298 - DNA, 19 bp, Mus musculus
  siRNA target sequence for Asns (NM_012055.1,288-306).
gtgaggaaatacccttatt

SEQ ID NO: 617299 - DNA, 19 bp, Mus musculus
  siRNA target sequence for Asns (NM_012055.1,316-334).
gttacaatggtgaaatcta

SEQ ID NO: 617300 - DNA, 19 bp, Mus musculus
  siRNA target sequence for Asns (NM_012055.1,344-362).
ggcgctacagcaacgtttt

SEQ ID NO: 617301 - DNA, 19 bp, Mus musculus
  siRNA target sequence for Asns (NM_012055.1,346-364).
cgctacagcaacgttttga

SEQ ID NO: 617302 - DNA, 19 bp, Mus musculus
  siRNA target sequence for Asns (NM_012055.1,447-465).
ctggacggggtgtttgcat

SEQ ID NO: 617303 - DNA, 19 bp, Mus musculus
  siRNA target sequence for Asns (NM_012055.1,455-473).
ggtgtttgcattcatctta

SEQ ID NO: 617304 - DNA, 19 bp, Mus musculus
  siRNA target sequence for Asns (NM_012055.1,484-502).
ccaataagaaagtatttct

SEQ ID NO: 617305 - DNA, 19 bp, Mus musculus
  siRNA target sequence for Asns (NM_012055.1,519-537).
ggagtcaggcccttgttta

SEQ ID NO: 617306 - DNA, 19 bp, Mus musculus
  siRNA target sequence for Asns (NM_012055.1,520-538).
gagtcaggcccttgtttaa

SEQ ID NO: 617307 - DNA, 19 bp, Mus musculus
  siRNA target sequence for Asns (NM_012055.1,576-594).
gaagctaaaggccttgttt

SEQ ID NO: 617308 - DNA, 19 bp, Mus musculus
  siRNA target sequence for Asns (NM_012055.1,608-626).
caccactcccttcttaaaa

SEQ ID NO: 617309 - DNA, 19 bp, Mus musculus
  siRNA target sequence for Asns (NM_012055.1,610-628).
ccactcccttcttaaaagt

SEQ ID NO: 617310 - DNA, 19 bp, Mus musculus
  siRNA target sequence for Asns (NM_012055.1,646-664).
gacactatgaagttttgga

SEQ ID NO: 617311 - DNA, 19 bp, Mus musculus
  siRNA target sequence for Asns (NM_012055.1,730-748).
cattgcatgccatctatga

SEQ ID NO: 617312 - DNA, 19 bp, Mus musculus
  siRNA target sequence for Asns (NM_012055.1,794-812).
gaacaatctgcgtatcctt

SEQ ID NO: 617313 - DNA, 19 bp, Mus musculus
  siRNA target sequence for Asns (NM_012055.1,797-815).
caatctgcgtatccttttt

SEQ ID NO: 617314 - DNA, 19 bp, Mus musculus
  siRNA target sequence for Asns (NM_012055.1,801-819).
ctgcgtatcctttttgaca

SEQ ID NO: 617315 - DNA, 19 bp, Mus musculus
  siRNA target sequence for Asns (NM_012055.1,851-869).
gaggattggctgcctttta

SEQ ID NO: 617316 - DNA, 19 bp, Mus musculus
  siRNA target sequence for Asns (NM_012055.1,923-941).
ggaggcccaagttcagtat

SEQ ID NO: 617317 - DNA, 19 bp, Mus musculus
  siRNA target sequence for Asns (NM_012055.1,943-961).
ctctccagacatttgctat

SEQ ID NO: 617318 - DNA, 19 bp, Mus musculus
  siRNA target sequence for Asns (NM_012055.1,1067-1085).
cctggatgaagtcatattt

SEQ ID NO: 617319 - DNA, 19 bp, Mus musculus
  siRNA target sequence for Asns (NM_012055.1,1087-1105).
ccttggaaacttatgatat

SEQ ID NO: 617320 - DNA, 19 bp, Mus musculus
  siRNA target sequence for Asns (NM_012055.1,1088-1106).
cttggaaacttatgatatt

SEQ ID NO: 617321 - DNA, 19 bp, Mus musculus
  siRNA target sequence for Asns (NM_012055.1,1092-1110).
gaaacttatgatattacga

SEQ ID NO: 617322 - DNA, 19 bp, Mus musculus
  siRNA target sequence for Asns (NM_012055.1,1128-1146).
ggcatgtatttaatttcca

SEQ ID NO: 617323 - DNA, 19 bp, Mus musculus
  siRNA target sequence for Asns (NM_012055.1,1165-1183).
cagacagcgtggtgatctt

SEQ ID NO: 617324 - DNA, 19 bp, Mus musculus
  siRNA target sequence for Asns (NM_012055.1,1167-1185).
gacagcgtggtgatcttct

SEQ ID NO: 617325 - DNA, 19 bp, Mus musculus
  siRNA target sequence for Asns (NM_012055.1,1191-1209).
gaggggtcagatgaactta

SEQ ID NO: 617326 - DNA, 19 bp, Mus musculus
  siRNA target sequence for Asns (NM_012055.1,1195-1213).
ggtcagatgaacttacaca

SEQ ID NO: 617327 - DNA, 19 bp, Mus musculus
  siRNA target sequence for Asns (NM_012055.1,1206-1224).
cttacacagggctatatat

SEQ ID NO: 617328 - DNA, 19 bp, Mus musculus
  siRNA target sequence for Asns (NM_012055.1,1210-1228).
cacagggctatatatattt

SEQ ID NO: 617329 - DNA, 19 bp, Mus musculus
  siRNA target sequence for Asns (NM_012055.1,1365-1383).
catcggttttcttcctatt

SEQ ID NO: 617330 - DNA, 19 bp, Mus musculus
  siRNA target sequence for Asns (NM_012055.1,1392-1410).
ctgccgccagatatgagaa

SEQ ID NO: 617331 - DNA, 19 bp, Mus musculus
  siRNA target sequence for Asns (NM_012055.1,1394-1412).
gccgccagatatgagaatt

SEQ ID NO: 617332 - DNA, 19 bp, Mus musculus
  siRNA target sequence for Asns (NM_012055.1,1413-1431).
ccaaaaaatggcatagaaa

SEQ ID NO: 617333 - DNA, 19 bp, Mus musculus
  siRNA target sequence for Asns (NM_012055.1,1516-1534).
ggatcacctcagtcaagaa

SEQ ID NO: 617334 - DNA, 19 bp, Mus musculus
  siRNA target sequence for Asns (NM_012055.1,1537-1555).
cctggttcaagattttgca

SEQ ID NO: 617335 - DNA, 19 bp, Mus musculus
  siRNA target sequence for Asns (NM_012055.1,1607-1625).
gaagtttcccttcaatact

SEQ ID NO: 617336 - DNA, 19 bp, Mus musculus
  siRNA target sequence for Asns (NM_012055.1,1616-1634).
cttcaatactcccaaaact

SEQ ID NO: 617337 - DNA, 19 bp, Mus musculus
  siRNA target sequence for Asns (NM_012055.1,1633-1651).
ctaaggaaggctacttcta

SEQ ID NO: 617338 - DNA, 19 bp, Mus musculus
  siRNA target sequence for Asns (NM_012055.1,1646-1664).
cttctaccgtcagatcttt

SEQ ID NO: 617339 - DNA, 19 bp, Mus musculus
  siRNA target sequence for Asns (NM_012055.1,1649-1667).
ctaccgtcagatctttgaa

SEQ ID NO: 617340 - DNA, 19 bp, Mus musculus
  siRNA target sequence for Asns (NM_012055.1,1687-1705).
ctgattggctgactcatta

SEQ ID NO: 617341 - DNA, 19 bp, Mus musculus
  siRNA target sequence for Asns (NM_012055.1,1693-1711).
ggctgactcattattggat

SEQ ID NO: 617342 - DNA, 19 bp, Mus musculus
  siRNA target sequence for Asns (NM_012055.1,1713-1731).
cctaagtggatcaatgcta

SEQ ID NO: 617343 - DNA, 19 bp, Mus musculus
  siRNA target sequence for Asns (NM_012055.1,1745-1763).
ccgcactctgacccattat

SEQ ID NO: 617344 - DNA, 19 bp, Mus musculus
  siRNA target sequence for Asns (NM_012055.1,1746-1764).
cgcactctgacccattata

SEQ ID NO: 617345 - DNA, 19 bp, Mus musculus
  siRNA target sequence for Asns (NM_012055.1,1747-1765).
gcactctgacccattataa

SEQ ID NO: 617346 - DNA, 19 bp, Mus musculus
  siRNA target sequence for Pet112l (NM_144896.2,50-68).
ggaagacgctgggctttaa

SEQ ID NO: 617347 - DNA, 19 bp, Mus musculus
  siRNA target sequence for Pet112l (NM_144896.2,199-217).
caaatgggcagctgtagta

SEQ ID NO: 617348 - DNA, 19 bp, Mus musculus
  siRNA target sequence for Pet112l (NM_144896.2,223-241).
ggaaattcatgcacagatt

SEQ ID NO: 617349 - DNA, 19 bp, Mus musculus
  siRNA target sequence for Pet112l (NM_144896.2,238-256).
gatttcctccaactctaaa

SEQ ID NO: 617350 - DNA, 19 bp, Mus musculus
  siRNA target sequence for Pet112l (NM_144896.2,333-351).
gaacattaccggttctcaa

SEQ ID NO: 617351 - DNA, 19 bp, Mus musculus
  siRNA target sequence for Pet112l (NM_144896.2,389-407).
gcactgaactgccacataa

SEQ ID NO: 617352 - DNA, 19 bp, Mus musculus
  siRNA target sequence for Pet112l (NM_144896.2,392-410).
ctgaactgccacataaaca

SEQ ID NO: 617353 - DNA, 19 bp, Mus musculus
  siRNA target sequence for Pet112l (NM_144896.2,425-443).
gaccggaagcactacttct

SEQ ID NO: 617354 - DNA, 19 bp, Mus musculus
  siRNA target sequence for Pet112l (NM_144896.2,428-446).
cggaagcactacttctact

SEQ ID NO: 617355 - DNA, 19 bp, Mus musculus
  siRNA target sequence for Pet112l (NM_144896.2,503-521).
ggacacttgacctactgta

SEQ ID NO: 617356 - DNA, 19 bp, Mus musculus
  siRNA target sequence for Pet112l (NM_144896.2,504-522).
gacacttgacctactgtat

SEQ ID NO: 617357 - DNA, 19 bp, Mus musculus
  siRNA target sequence for Pet112l (NM_144896.2,511-529).
gacctactgtatctatcta

SEQ ID NO: 617358 - DNA, 19 bp, Mus musculus
  siRNA target sequence for Pet112l (NM_144896.2,625-643).
gtcacagacactcattgat

SEQ ID NO: 617359 - DNA, 19 bp, Mus musculus
  siRNA target sequence for Pet112l (NM_144896.2,790-808).
gagagtggatgccaatata

SEQ ID NO: 617360 - DNA, 19 bp, Mus musculus
  siRNA target sequence for Pet112l (NM_144896.2,796-814).
ggatgccaatatatctgta

SEQ ID NO: 617361 - DNA, 19 bp, Mus musculus
  siRNA target sequence for Pet112l (NM_144896.2,801-819).
ccaatatatctgtacatca

SEQ ID NO: 617362 - DNA, 19 bp, Mus musculus
  siRNA target sequence for Pet112l (NM_144896.2,837-855).
gtgtcaggactgaggtaaa

SEQ ID NO: 617363 - DNA, 19 bp, Mus musculus
  siRNA target sequence for Pet112l (NM_144896.2,843-861).
ggactgaggtaaagaatct

SEQ ID NO: 617364 - DNA, 19 bp, Mus musculus
  siRNA target sequence for Pet112l (NM_144896.2,880-898).
ggccaaagccatagattat

SEQ ID NO: 617365 - DNA, 19 bp, Mus musculus
  siRNA target sequence for Pet112l (NM_144896.2,883-901).
caaagccatagattatgaa

SEQ ID NO: 617366 - DNA, 19 bp, Mus musculus
  siRNA target sequence for Pet112l (NM_144896.2,933-951).
gaggtgaaattctgaatga

SEQ ID NO: 617367 - DNA, 19 bp, Mus musculus
  siRNA target sequence for Pet112l (NM_144896.2,935-953).
ggtgaaattctgaatgaaa

SEQ ID NO: 617368 - DNA, 19 bp, Mus musculus
  siRNA target sequence for Pet112l (NM_144896.2,954-972).
ctcgttcatttgattataa

SEQ ID NO: 617369 - DNA, 19 bp, Mus musculus
  siRNA target sequence for Pet112l (NM_144896.2,957-975).
gttcatttgattataagct

SEQ ID NO: 617370 - DNA, 19 bp, Mus musculus
  siRNA target sequence for Pet112l (NM_144896.2,1095-1113).
ctcagcaggtgatcaatat

SEQ ID NO: 617371 - DNA, 19 bp, Mus musculus
  siRNA target sequence for Pet112l (NM_144896.2,1196-1214).
cacagctttgcgttactga

SEQ ID NO: 617372 - DNA, 19 bp, Mus musculus
  siRNA target sequence for Pet112l (NM_144896.2,1200-1218).
gctttgcgttactgaatga

SEQ ID NO: 617373 - DNA, 19 bp, Mus musculus
  siRNA target sequence for Pet112l (NM_144896.2,1260-1278).
ctaggacagagccaaaaaa

SEQ ID NO: 617374 - DNA, 19 bp, Mus musculus
  siRNA target sequence for Pet112l (NM_144896.2,1263-1281).
ggacagagccaaaaaaggt

SEQ ID NO: 617375 - DNA, 19 bp, Mus musculus
  siRNA target sequence for Pet112l (NM_144896.2,1292-1310).
gtcctgaacacttttctgt

SEQ ID NO: 617376 - DNA, 19 bp, Mus musculus
  siRNA target sequence for Pet112l (NM_144896.2,1387-1405).
gctggacaggaaagcaatt

SEQ ID NO: 617377 - DNA, 19 bp, Mus musculus
  siRNA target sequence for Pet112l (NM_144896.2,1393-1411).
caggaaagcaatttcttca

SEQ ID NO: 617378 - DNA, 19 bp, Mus musculus
  siRNA target sequence for Pet112l (NM_144896.2,1416-1434).
cagctaagcaggtgtttga

SEQ ID NO: 617379 - DNA, 19 bp, Mus musculus
  siRNA target sequence for Pet112l (NM_144896.2,1581-1599).
gaaaccccaaagctataaa

SEQ ID NO: 617380 - DNA, 19 bp, Mus musculus
  siRNA target sequence for Pet112l (NM_144896.2,1639-1657).
ggcagacccggctctgata

SEQ ID NO: 617381 - DNA, 19 bp, Mus musculus
  siRNA target sequence for Pet112l (NM_144896.2,1640-1658).
gcagacccggctctgataa

SEQ ID NO: 617382 - DNA, 19 bp, Mus musculus
  siRNA target sequence for Pet112l (NM_144896.2,1641-1659).
cagacccggctctgataaa

SEQ ID NO: 617383 - DNA, 19 bp, Mus musculus
  siRNA target sequence for Pet112l (NM_144896.2,1643-1661).
gacccggctctgataaaga

SEQ ID NO: 617384 - DNA, 19 bp, Mus musculus
  siRNA target sequence for Bcl7c (NM_009746.2,355-373).
gagacacttcccttcgaat

SEQ ID NO: 617385 - DNA, 19 bp, Mus musculus
  siRNA target sequence for Bcl7c (NM_009746.2,500-518).
catcctactggatctcaat

SEQ ID NO: 617386 - DNA, 19 bp, Mus musculus
  siRNA target sequence for Bcl7c (NM_009746.2,503-521).
cctactggatctcaatgat

SEQ ID NO: 617387 - DNA, 19 bp, Mus musculus
  siRNA target sequence for Rcl1 (NM_021525.2,312-330).
gttctcgaattgaaatcaa

SEQ ID NO: 617388 - DNA, 19 bp, Mus musculus
  siRNA target sequence for Rcl1 (NM_021525.2,317-335).
cgaattgaaatcaaccaaa

SEQ ID NO: 617389 - DNA, 19 bp, Mus musculus
  siRNA target sequence for Rcl1 (NM_021525.2,336-354).
caggaacaaccttatacta

SEQ ID NO: 617390 - DNA, 19 bp, Mus musculus
  siRNA target sequence for Rcl1 (NM_021525.2,508-526).
cccttcggttgatgttctt

SEQ ID NO: 617391 - DNA, 19 bp, Mus musculus
  siRNA target sequence for Rcl1 (NM_021525.2,509-527).
ccttcggttgatgttctta

SEQ ID NO: 617392 - DNA, 19 bp, Mus musculus
  siRNA target sequence for Rcl1 (NM_021525.2,541-559).
ccctctactgaaacagttt

SEQ ID NO: 617393 - DNA, 19 bp, Mus musculus
  siRNA target sequence for Rcl1 (NM_021525.2,561-579).
ggatcgatggagaatcatt

SEQ ID NO: 617394 - DNA, 19 bp, Mus musculus
  siRNA target sequence for Rcl1 (NM_021525.2,562-580).
gatcgatggagaatcattt

SEQ ID NO: 617395 - DNA, 19 bp, Mus musculus
  siRNA target sequence for Rcl1 (NM_021525.2,715-733).
gtactcagttcgtgtatca

SEQ ID NO: 617396 - DNA, 19 bp, Mus musculus
  siRNA target sequence for Rcl1 (NM_021525.2,805-823).
ctacacggatcacatgaaa

SEQ ID NO: 617397 - DNA, 19 bp, Mus musculus
  siRNA target sequence for Rcl1 (NM_021525.2,966-984).
gtgcaaagctgctacttga

SEQ ID NO: 617398 - DNA, 19 bp, Mus musculus
  siRNA target sequence for Rcl1 (NM_021525.2,1007-1025).
gtagactcgaccaaccaaa

SEQ ID NO: 617399 - DNA, 19 bp, Mus musculus
  siRNA target sequence for Rcl1 (NM_021525.2,1012-1030).
ctcgaccaaccaaagtcta

SEQ ID NO: 617400 - DNA, 19 bp, Mus musculus
  siRNA target sequence for Rcl1 (NM_021525.2,1015-1033).
gaccaaccaaagtctagtt

SEQ ID NO: 617401 - DNA, 19 bp, Mus musculus
  siRNA target sequence for Rcl1 (NM_021525.2,1017-1035).
ccaaccaaagtctagttct

SEQ ID NO: 617402 - DNA, 19 bp, Mus musculus
  siRNA target sequence for Rcl1 (NM_021525.2,1053-1071).
gacagcaggacgtttccaa

SEQ ID NO: 617403 - DNA, 19 bp, Mus musculus
  siRNA target sequence for Rcl1 (NM_021525.2,1090-1108).
ctcaccctacacgatagaa

SEQ ID NO: 617404 - DNA, 19 bp, Mus musculus
  siRNA target sequence for Rcl1 (NM_021525.2,1092-1110).
caccctacacgatagaatt

SEQ ID NO: 617405 - DNA, 19 bp, Mus musculus
  siRNA target sequence for Rcl1 (NM_021525.2,1094-1112).
ccctacacgatagaatttt

SEQ ID NO: 617406 - DNA, 19 bp, Mus musculus
  siRNA target sequence for Rcl1 (NM_021525.2,1164-1182).
catgtggtgaagaactgaa

SEQ ID NO: 617407 - DNA, 19 bp, Mus musculus
  siRNA target sequence for Acas2 (NM_019811.2,230-248).
gaggagccacgggagtttt

SEQ ID NO: 617408 - DNA, 19 bp, Mus musculus
  siRNA target sequence for Acas2 (NM_019811.2,252-270).
gaaacattgccaaggaatt

SEQ ID NO: 617409 - DNA, 19 bp, Mus musculus
  siRNA target sequence for Acas2 (NM_019811.2,296-314).
ccattcctccagtacaact

SEQ ID NO: 617410 - DNA, 19 bp, Mus musculus
  siRNA target sequence for Acas2 (NM_019811.2,297-315).
cattcctccagtacaactt

SEQ ID NO: 617411 - DNA, 19 bp, Mus musculus
  siRNA target sequence for Acas2 (NM_019811.2,310-328).
caactttgatgtgactaaa

SEQ ID NO: 617412 - DNA, 19 bp, Mus musculus
  siRNA target sequence for Acas2 (NM_019811.2,349-367).
gatgaaaggagcaactaca

SEQ ID NO: 617413 - DNA, 19 bp, Mus musculus
  siRNA target sequence for Acas2 (NM_019811.2,356-374).
ggagcaactacaaacatct

SEQ ID NO: 617414 - DNA, 19 bp, Mus musculus
  siRNA target sequence for Acas2 (NM_019811.2,379-397).
caacgtgctggatcgaaat

SEQ ID NO: 617415 - DNA, 19 bp, Mus musculus
  siRNA target sequence for Acas2 (NM_019811.2,417-435).
gcgacaaagttgcttttta

SEQ ID NO: 617416 - DNA, 19 bp, Mus musculus
  siRNA target sequence for Acas2 (NM_019811.2,419-437).
gacaaagttgctttttact

SEQ ID NO: 617417 - DNA, 19 bp, Mus musculus
  siRNA target sequence for Acas2 (NM_019811.2,617-635).
gctttgcactccattgtgt

SEQ ID NO: 617418 - DNA, 19 bp, Mus musculus
  siRNA target sequence for Acas2 (NM_019811.2,907-925).
gaacgaaggggttgactta

SEQ ID NO: 617419 - DNA, 19 bp, Mus musculus
  siRNA target sequence for Acas2 (NM_019811.2,911-929).
gaaggggttgacttatggt

SEQ ID NO: 617420 - DNA, 19 bp, Mus musculus
  siRNA target sequence for Acas2 (NM_019811.2,986-1004).
gaggacccactcttcatct

SEQ ID NO: 617421 - DNA, 19 bp, Mus musculus
  siRNA target sequence for Acas2 (NM_019811.2,989-1007).
gacccactcttcatcttgt

SEQ ID NO: 617422 - DNA, 19 bp, Mus musculus
  siRNA target sequence for Acas2 (NM_019811.2,992-1010).
ccactcttcatcttgtaca

SEQ ID NO: 617423 - DNA, 19 bp, Mus musculus
  siRNA target sequence for Acas2 (NM_019811.2,1036-1054).
gggtgtggtgcacacaatt

SEQ ID NO: 617424 - DNA, 19 bp, Mus musculus
  siRNA target sequence for Acas2 (NM_019811.2,1050-1068).
caattggaggctatatgct

SEQ ID NO: 617425 - DNA, 19 bp, Mus musculus
  siRNA target sequence for Acas2 (NM_019811.2,1066-1084).
gctctatgtggctacaact

SEQ ID NO: 617426 - DNA, 19 bp, Mus musculus
  siRNA target sequence for Acas2 (NM_019811.2,1146-1164).
ggatcactggtcattccta

SEQ ID NO: 617427 - DNA, 19 bp, Mus musculus
  siRNA target sequence for Acas2 (NM_019811.2,1147-1165).
gatcactggtcattcctat

SEQ ID NO: 617428 - DNA, 19 bp, Mus musculus
  siRNA target sequence for Acas2 (NM_019811.2,1219-1237).
ccccacatacccagatgaa

SEQ ID NO: 617429 - DNA, 19 bp, Mus musculus
  siRNA target sequence for Acas2 (NM_019811.2,1248-1266).
ggagcattgtggacaaata

SEQ ID NO: 617430 - DNA, 19 bp, Mus musculus
  siRNA target sequence for Acas2 (NM_019811.2,1303-1321).
ccggatgctcatgaagttt

SEQ ID NO: 617431 - DNA, 19 bp, Mus musculus
  siRNA target sequence for Acas2 (NM_019811.2,1432-1450).
ccagcgctgccccattgta

SEQ ID NO: 617432 - DNA, 19 bp, Mus musculus
  siRNA target sequence for Acas2 (NM_019811.2,1554-1572).
cgcctgcaatcctgaatga

SEQ ID NO: 617433 - DNA, 19 bp, Mus musculus
  siRNA target sequence for Acas2 (NM_019811.2,1556-1574).
cctgcaatcctgaatgagt

SEQ ID NO: 617434 - DNA, 19 bp, Mus musculus
  siRNA target sequence for Acas2 (NM_019811.2,1593-1611).
gggaagctgaaggttatct

SEQ ID NO: 617435 - DNA, 19 bp, Mus musculus
  siRNA target sequence for Acas2 (NM_019811.2,1636-1654).
gatcatgcgcacagtctat

SEQ ID NO: 617436 - DNA, 19 bp, Mus musculus
  siRNA target sequence for Acas2 (NM_019811.2,1677-1695).
ccacctactttaagaagtt

SEQ ID NO: 617437 - DNA, 19 bp, Mus musculus
  siRNA target sequence for Acas2 (NM_019811.2,1731-1749).
gggatcaggatggctatta

SEQ ID NO: 617438 - DNA, 19 bp, Mus musculus
  siRNA target sequence for Acas2 (NM_019811.2,2015-2033).
gcacctggcttgcctaaaa

SEQ ID NO: 617439 - DNA, 19 bp, Mus musculus
  siRNA target sequence for Acas2 (NM_019811.2,2056-2074).
gcgagttctccggaagatt

SEQ ID NO: 617440 - DNA, 19 bp, Mus musculus
  siRNA target sequence for Acas2 (NM_019811.2,2065-2083).
ccggaagattgctcagaat

SEQ ID NO: 617441 - DNA, 19 bp, Mus musculus
  siRNA target sequence for Acas2 (NM_019811.2,2087-2105).
catgacctgggggatacat

SEQ ID NO: 617442 - DNA, 19 bp, Mus musculus
  siRNA target sequence for Acas2 (NM_019811.2,2090-2108).
gacctgggggatacatcta

SEQ ID NO: 617443 - DNA, 19 bp, Mus musculus
  siRNA target sequence for Acas2l (NM_080575.1,379-397).
ctgagaccatagctttgat

SEQ ID NO: 617444 - DNA, 19 bp, Mus musculus
  siRNA target sequence for Acas2l (NM_080575.1,381-399).
gagaccatagctttgatct

SEQ ID NO: 617445 - DNA, 19 bp, Mus musculus
  siRNA target sequence for Acas2l (NM_080575.1,463-481).
gccgcctggccaatacact

SEQ ID NO: 617446 - DNA, 19 bp, Mus musculus
  siRNA target sequence for Acas2l (NM_080575.1,620-638).
cttggctgggaggatcaat

SEQ ID NO: 617447 - DNA, 19 bp, Mus musculus
  siRNA target sequence for Acas2l (NM_080575.1,623-641).
ggctgggaggatcaatgat

SEQ ID NO: 617448 - DNA, 19 bp, Mus musculus
  siRNA target sequence for Acas2l (NM_080575.1,914-932).
caagggactcgttcataca

SEQ ID NO: 617449 - DNA, 19 bp, Mus musculus
  siRNA target sequence for Acas2l (NM_080575.1,931-949).
cacaggcaggctatctact

SEQ ID NO: 617450 - DNA, 19 bp, Mus musculus
  siRNA target sequence for Acas2l (NM_080575.1,935-953).
ggcaggctatctactgtat

SEQ ID NO: 617451 - DNA, 19 bp, Mus musculus
  siRNA target sequence for Acas2l (NM_080575.1,964-982).
cgcacaagctcgtgtttga

SEQ ID NO: 617452 - DNA, 19 bp, Mus musculus
  siRNA target sequence for Acas2l (NM_080575.1,966-984).
cacaagctcgtgtttgact

SEQ ID NO: 617453 - DNA, 19 bp, Mus musculus
  siRNA target sequence for Acas2l (NM_080575.1,1206-1224).
gatgcctgggtgaaaaagt

SEQ ID NO: 617454 - DNA, 19 bp, Mus musculus
  siRNA target sequence for Acas2l (NM_080575.1,1255-1273).
cagtgggagagcctatcaa

SEQ ID NO: 617455 - DNA, 19 bp, Mus musculus
  siRNA target sequence for Acas2l (NM_080575.1,1285-1303).
gggagtggctccacaaagt

SEQ ID NO: 617456 - DNA, 19 bp, Mus musculus
  siRNA target sequence for Acas2l (NM_080575.1,1307-1325).
gggtgatggcagatgtaca

SEQ ID NO: 617457 - DNA, 19 bp, Mus musculus
  siRNA target sequence for Acas2l (NM_080575.1,1435-1453).
gcatcgttcctgtactcat

SEQ ID NO: 617458 - DNA, 19 bp, Mus musculus
  siRNA target sequence for Acas2l (NM_080575.1,1444-1462).
ctgtactcatggatgagaa

SEQ ID NO: 617459 - DNA, 19 bp, Mus musculus
  siRNA target sequence for Acas2l (NM_080575.1,1488-1506).
gtctctggggccttgtgta

SEQ ID NO: 617460 - DNA, 19 bp, Mus musculus
  siRNA target sequence for Acas2l (NM_080575.1,1579-1597).
gagcgtacccaggttatta

SEQ ID NO: 617461 - DNA, 19 bp, Mus musculus
  siRNA target sequence for Acas2l (NM_080575.1,1581-1599).
gcgtacccaggttattact

SEQ ID NO: 617462 - DNA, 19 bp, Mus musculus
  siRNA target sequence for Acas2l (NM_080575.1,1582-1600).
cgtacccaggttattactt

SEQ ID NO: 617463 - DNA, 19 bp, Mus musculus
  siRNA target sequence for Acas2l (NM_080575.1,1624-1642).
cagagggtggctattacca

SEQ ID NO: 617464 - DNA, 19 bp, Mus musculus
  siRNA target sequence for Acas2l (NM_080575.1,1751-1769).
cattgggtaccctcatgat

SEQ ID NO: 617465 - DNA, 19 bp, Mus musculus
  siRNA target sequence for Acas2l (NM_080575.1,1755-1773).
gggtaccctcatgatatca

SEQ ID NO: 617466 - DNA, 19 bp, Mus musculus
  siRNA target sequence for Acas2l (NM_080575.1,1756-1774).
ggtaccctcatgatatcaa

SEQ ID NO: 617467 - DNA, 19 bp, Mus musculus
  siRNA target sequence for Acas2l (NM_080575.1,1757-1775).
gtaccctcatgatatcaaa

SEQ ID NO: 617468 - DNA, 19 bp, Mus musculus
  siRNA target sequence for Acas2l (NM_080575.1,1862-1880).
caccaagatcgccaagtat

SEQ ID NO: 617469 - DNA, 19 bp, Mus musculus
  siRNA target sequence for Acas2l (NM_080575.1,1948-1966).
gactactgaggaagatcat

SEQ ID NO: 617470 - DNA, 19 bp, Mus musculus
  siRNA target sequence for Aacs (NM_030210.1,227-245).
gcctggcgcttgggaatta

SEQ ID NO: 617471 - DNA, 19 bp, Mus musculus
  siRNA target sequence for Aacs (NM_030210.1,229-247).
ctggcgcttgggaattaca

SEQ ID NO: 617472 - DNA, 19 bp, Mus musculus
  siRNA target sequence for Aacs (NM_030210.1,231-249).
ggcgcttgggaattacaat

SEQ ID NO: 617473 - DNA, 19 bp, Mus musculus
  siRNA target sequence for Aacs (NM_030210.1,238-256).
gggaattacaatgacttat

SEQ ID NO: 617474 - DNA, 19 bp, Mus musculus
  siRNA target sequence for Aacs (NM_030210.1,239-257).
ggaattacaatgacttata

SEQ ID NO: 617475 - DNA, 19 bp, Mus musculus
  siRNA target sequence for Aacs (NM_030210.1,263-281).
ggtctgtccggtcgtatat

SEQ ID NO: 617476 - DNA, 19 bp, Mus musculus
  siRNA target sequence for Aacs (NM_030210.1,271-289).
cggtcgtatatggactttt

SEQ ID NO: 617477 - DNA, 19 bp, Mus musculus
  siRNA target sequence for Aacs (NM_030210.1,318-336).
cgtctactcacgcatgtat

SEQ ID NO: 617478 - DNA, 19 bp, Mus musculus
  siRNA target sequence for Aacs (NM_030210.1,321-339).
ctactcacgcatgtatgat

SEQ ID NO: 617479 - DNA, 19 bp, Mus musculus
  siRNA target sequence for Aacs (NM_030210.1,389-407).
gaggcagccgcctcaacta

SEQ ID NO: 617480 - DNA, 19 bp, Mus musculus
  siRNA target sequence for Aacs (NM_030210.1,480-498).
gatcgtgaaggtgactttt

SEQ ID NO: 617481 - DNA, 19 bp, Mus musculus
  siRNA target sequence for Aacs (NM_030210.1,567-585).
ccgtgtggtcggctatcta

SEQ ID NO: 617482 - DNA, 19 bp, Mus musculus
  siRNA target sequence for Aacs (NM_030210.1,682-700).
ctggaccgcttttctcaaa

SEQ ID NO: 617483 - DNA, 19 bp, Mus musculus
  siRNA target sequence for Aacs (NM_030210.1,684-702).
ggaccgcttttctcaaatt

SEQ ID NO: 617484 - DNA, 19 bp, Mus musculus
  siRNA target sequence for Aacs (NM_030210.1,703-721).
cagccgaaacttatcttct

SEQ ID NO: 617485 - DNA, 19 bp, Mus musculus
  siRNA target sequence for Aacs (NM_030210.1,722-740).
cggtggaggctgttgtcta

SEQ ID NO: 617486 - DNA, 19 bp, Mus musculus
  siRNA target sequence for Aacs (NM_030210.1,771-789).
gctgcagcgagttgtgaaa

SEQ ID NO: 617487 - DNA, 19 bp, Mus musculus
  siRNA target sequence for Aacs (NM_030210.1,950-968).
gccaccctctgttcatcat

SEQ ID NO: 617488 - DNA, 19 bp, Mus musculus
  siRNA target sequence for Aacs (NM_030210.1,952-970).
caccctctgttcatcatgt

SEQ ID NO: 617489 - DNA, 19 bp, Mus musculus
  siRNA target sequence for Aacs (NM_030210.1,1076-1094).
gtgacatcctgctctacta

SEQ ID NO: 617490 - DNA, 19 bp, Mus musculus
  siRNA target sequence for Aacs (NM_030210.1,1352-1370).
cccagagttacgagtatgt

SEQ ID NO: 617491 - DNA, 19 bp, Mus musculus
  siRNA target sequence for Aacs (NM_030210.1,1354-1372).
cagagttacgagtatgtgt

SEQ ID NO: 617492 - DNA, 19 bp, Mus musculus
  siRNA target sequence for Aacs (NM_030210.1,1691-1709).
ccaaaacaggaggcattat

SEQ ID NO: 617493 - DNA, 19 bp, Mus musculus
  siRNA target sequence for Aacs (NM_030210.1,1760-1778).
gcagctcggagatctacaa

SEQ ID NO: 617494 - DNA, 19 bp, Mus musculus
  siRNA target sequence for Bucs1 (NM_054094.4,157-175).
gctgcacagacggttgttt

SEQ ID NO: 617495 - DNA, 19 bp, Mus musculus
  siRNA target sequence for Bucs1 (NM_054094.4,160-178).
gcacagacggttgttttca

SEQ ID NO: 617496 - DNA, 19 bp, Mus musculus
  siRNA target sequence for Bucs1 (NM_054094.4,163-181).
cagacggttgttttcaaga

SEQ ID NO: 617497 - DNA, 19 bp, Mus musculus
  siRNA target sequence for Bucs1 (NM_054094.4,287-305).
ccaagtccagccttttggt

SEQ ID NO: 617498 - DNA, 19 bp, Mus musculus
  siRNA target sequence for Bucs1 (NM_054094.4,379-397).
cgtctttgagcagatttgt

SEQ ID NO: 617499 - DNA, 19 bp, Mus musculus
  siRNA target sequence for Bucs1 (NM_054094.4,477-495).
gaacagggatcatcttcat

SEQ ID NO: 617500 - DNA, 19 bp, Mus musculus
  siRNA target sequence for Bucs1 (NM_054094.4,498-516).
ctgggactacccaactgaa

SEQ ID NO: 617501 - DNA, 19 bp, Mus musculus
  siRNA target sequence for Bucs1 (NM_054094.4,526-544).
cattctctaccgaatacaa

SEQ ID NO: 617502 - DNA, 19 bp, Mus musculus
  siRNA target sequence for Bucs1 (NM_054094.4,530-548).
ctctaccgaatacaaatat

SEQ ID NO: 617503 - DNA, 19 bp, Mus musculus
  siRNA target sequence for Bucs1 (NM_054094.4,551-569).
cgagccaaagccattgtga

SEQ ID NO: 617504 - DNA, 19 bp, Mus musculus
  siRNA target sequence for Bucs1 (NM_054094.4,656-674).
catgaagggtggcttgatt

SEQ ID NO: 617505 - DNA, 19 bp, Mus musculus
  siRNA target sequence for Bucs1 (NM_054094.4,701-719).
ccagaccatacttgtatta

SEQ ID NO: 617506 - DNA, 19 bp, Mus musculus
  siRNA target sequence for Bucs1 (NM_054094.4,702-720).
cagaccatacttgtattaa

SEQ ID NO: 617507 - DNA, 19 bp, Mus musculus
  siRNA target sequence for Bucs1 (NM_054094.4,704-722).
gaccatacttgtattaagt

SEQ ID NO: 617508 - DNA, 19 bp, Mus musculus
  siRNA target sequence for Bucs1 (NM_054094.4,714-732).
gtattaagtcaaagatgaa

SEQ ID NO: 617509 - DNA, 19 bp, Mus musculus
  siRNA target sequence for Bucs1 (NM_054094.4,803-821).
cttgccttccggtcatata

SEQ ID NO: 617510 - DNA, 19 bp, Mus musculus
  siRNA target sequence for Bucs1 (NM_054094.4,970-988).
cgaccccaaagtcattgta

SEQ ID NO: 617511 - DNA, 19 bp, Mus musculus
  siRNA target sequence for Bucs1 (NM_054094.4,986-1004).
gtagaggtactgttcaaat

SEQ ID NO: 617512 - DNA, 19 bp, Mus musculus
  siRNA target sequence for Bucs1 (NM_054094.4,1028-1046).
gccccaggcgtgtatcgaa

SEQ ID NO: 617513 - DNA, 19 bp, Mus musculus
  siRNA target sequence for Bucs1 (NM_054094.4,1029-1047).
ccccaggcgtgtatcgaat

SEQ ID NO: 617514 - DNA, 19 bp, Mus musculus
  siRNA target sequence for Bucs1 (NM_054094.4,1208-1226).
gccaccctccgggaaatga

SEQ ID NO: 617515 - DNA, 19 bp, Mus musculus
  siRNA target sequence for Bucs1 (NM_054094.4,1308-1326).
ccaacactgaaggatacat

SEQ ID NO: 617516 - DNA, 19 bp, Mus musculus
  siRNA target sequence for Bucs1 (NM_054094.4,1350-1368).
ggcctctaggcctcttcat

SEQ ID NO: 617517 - DNA, 19 bp, Mus musculus
  siRNA target sequence for Bucs1 (NM_054094.4,1408-1426).
gtgtggggacttttacaat

SEQ ID NO: 617518 - DNA, 19 bp, Mus musculus
  siRNA target sequence for Bucs1 (NM_054094.4,1432-1450).
ggatagagcgaccattgat

SEQ ID NO: 617519 - DNA, 19 bp, Mus musculus
  siRNA target sequence for Bucs1 (NM_054094.4,1437-1455).
gagcgaccattgatgaaga

SEQ ID NO: 617520 - DNA, 19 bp, Mus musculus
  siRNA target sequence for Bucs1 (NM_054094.4,1476-1494).
gaaggggcgatgatgtcat

SEQ ID NO: 617521 - DNA, 19 bp, Mus musculus
  siRNA target sequence for Bucs1 (NM_054094.4,1480-1498).
gggcgatgatgtcatcaat

SEQ ID NO: 617522 - DNA, 19 bp, Mus musculus
  siRNA target sequence for Bucs1 (NM_054094.4,1727-1745).
gtggagtttgtttcagaat

SEQ ID NO: 617523 - DNA, 19 bp, Mus musculus
  siRNA target sequence for Bucs1 (NM_054094.4,1740-1758).
cagaattgcccaaaactgt

SEQ ID NO: 617524 - DNA, 19 bp, Mus musculus
  siRNA target sequence for Sah (NM_016870.2,495-513).
cctatgagagtcttgtata

SEQ ID NO: 617525 - DNA, 19 bp, Mus musculus
  siRNA target sequence for Sah (NM_016870.2,496-514).
ctatgagagtcttgtataa

SEQ ID NO: 617526 - DNA, 19 bp, Mus musculus
  siRNA target sequence for Sah (NM_016870.2,504-522).
gtcttgtataaagattaca

SEQ ID NO: 617527 - DNA, 19 bp, Mus musculus
  siRNA target sequence for Sah (NM_016870.2,506-524).
cttgtataaagattacaga

SEQ ID NO: 617528 - DNA, 19 bp, Mus musculus
  siRNA target sequence for Sah (NM_016870.2,528-546).
gcgacccctcagaactttt

SEQ ID NO: 617529 - DNA, 19 bp, Mus musculus
  siRNA target sequence for Sah (NM_016870.2,548-566).
caactatgagtccatgaaa

SEQ ID NO: 617530 - DNA, 19 bp, Mus musculus
  siRNA target sequence for Sah (NM_016870.2,567-585).
caagacttcaaaatagaga

SEQ ID NO: 617531 - DNA, 19 bp, Mus musculus
  siRNA target sequence for Sah (NM_016870.2,618-636).
ctggaccaatggaccaata

SEQ ID NO: 617532 - DNA, 19 bp, Mus musculus
  siRNA target sequence for Sah (NM_016870.2,848-866).
gcgaacagggacagtttta

SEQ ID NO: 617533 - DNA, 19 bp, Mus musculus
  siRNA target sequence for Sah (NM_016870.2,849-867).
cgaacagggacagttttaa

SEQ ID NO: 617534 - DNA, 19 bp, Mus musculus
  siRNA target sequence for Sah (NM_016870.2,891-909).
cagaaagacatcctctata

SEQ ID NO: 617535 - DNA, 19 bp, Mus musculus
  siRNA target sequence for Sah (NM_016870.2,899-917).
catcctctatagactacaa

SEQ ID NO: 617536 - DNA, 19 bp, Mus musculus
  siRNA target sequence for Sah (NM_016870.2,902-920).
cctctatagactacaatct

SEQ ID NO: 617537 - DNA, 19 bp, Mus musculus
  siRNA target sequence for Sah (NM_016870.2,903-921).
ctctatagactacaatctt

SEQ ID NO: 617538 - DNA, 19 bp, Mus musculus
  siRNA target sequence for Sah (NM_016870.2,912-930).
ctacaatcttcaaaagcta

SEQ ID NO: 617539 - DNA, 19 bp, Mus musculus
  siRNA target sequence for Sah (NM_016870.2,935-953).
cattattaccgatgatact

SEQ ID NO: 617540 - DNA, 19 bp, Mus musculus
  siRNA target sequence for Sah (NM_016870.2,969-987).
gatgccgtggcagctaaat

SEQ ID NO: 617541 - DNA, 19 bp, Mus musculus
  siRNA target sequence for Sah (NM_016870.2,973-991).
ccgtggcagctaaatgtga

SEQ ID NO: 617542 - DNA, 19 bp, Mus musculus
  siRNA target sequence for Sah (NM_016870.2,974-992).
cgtggcagctaaatgtgaa

SEQ ID NO: 617543 - DNA, 19 bp, Mus musculus
  siRNA target sequence for Sah (NM_016870.2,977-995).
ggcagctaaatgtgaaaat

SEQ ID NO: 617544 - DNA, 19 bp, Mus musculus
  siRNA target sequence for Sah (NM_016870.2,990-1008).
gaaaatctccactccaaat

SEQ ID NO: 617545 - DNA, 19 bp, Mus musculus
  siRNA target sequence for Sah (NM_016870.2,999-1017).
cactccaaattaattgtgt

SEQ ID NO: 617546 - DNA, 19 bp, Mus musculus
  siRNA target sequence for Sah (NM_016870.2,1096-1114).
caaaacacgacgagatgat

SEQ ID NO: 617547 - DNA, 19 bp, Mus musculus
  siRNA target sequence for Sah (NM_016870.2,1232-1250).
cgatgtgatgtggaatact

SEQ ID NO: 617548 - DNA, 19 bp, Mus musculus
  siRNA target sequence for Sah (NM_016870.2,1233-1251).
gatgtgatgtggaatactt

SEQ ID NO: 617549 - DNA, 19 bp, Mus musculus
  siRNA target sequence for Sah (NM_016870.2,1238-1256).
gatgtggaatacttcagat

SEQ ID NO: 617550 - DNA, 19 bp, Mus musculus
  siRNA target sequence for Sah (NM_016870.2,1334-1352).
gccccgttttgaatcaact

SEQ ID NO: 617551 - DNA, 19 bp, Mus musculus
  siRNA target sequence for Sah (NM_016870.2,1335-1353).
ccccgttttgaatcaactt

SEQ ID NO: 617552 - DNA, 19 bp, Mus musculus
  siRNA target sequence for Sah (NM_016870.2,1411-1429).
cctaccggatgcttgttca

SEQ ID NO: 617553 - DNA, 19 bp, Mus musculus
  siRNA target sequence for Sah (NM_016870.2,1415-1433).
ccggatgcttgttcagaat

SEQ ID NO: 617554 - DNA, 19 bp, Mus musculus
  siRNA target sequence for Sah (NM_016870.2,1417-1435).
ggatgcttgttcagaatga

SEQ ID NO: 617555 - DNA, 19 bp, Mus musculus
  siRNA target sequence for Sah (NM_016870.2,1434-1452).
gacatgagcagctataagt

SEQ ID NO: 617556 - DNA, 19 bp, Mus musculus
  siRNA target sequence for Sah (NM_016870.2,1526-1544).
gacgggcctagacatctat

SEQ ID NO: 617557 - DNA, 19 bp, Mus musculus
  siRNA target sequence for Sah (NM_016870.2,1528-1546).
cgggcctagacatctatga

SEQ ID NO: 617558 - DNA, 19 bp, Mus musculus
  siRNA target sequence for Sah (NM_016870.2,1529-1547).
gggcctagacatctatgaa

SEQ ID NO: 617559 - DNA, 19 bp, Mus musculus
  siRNA target sequence for Sah (NM_016870.2,1625-1643).
gccttctcctgcttttgat

SEQ ID NO: 617560 - DNA, 19 bp, Mus musculus
  siRNA target sequence for Sah (NM_016870.2,1633-1651).
ctgcttttgatgtgaagat

SEQ ID NO: 617561 - DNA, 19 bp, Mus musculus
  siRNA target sequence for Sah (NM_016870.2,1721-1739).
gcgaccatttggccttttt

SEQ ID NO: 617562 - DNA, 19 bp, Mus musculus
  siRNA target sequence for Sah (NM_016870.2,1722-1740).
cgaccatttggccttttta

SEQ ID NO: 617563 - DNA, 19 bp, Mus musculus
  siRNA target sequence for Sah (NM_016870.2,1732-1750).
gcctttttactcattatgt

SEQ ID NO: 617564 - DNA, 19 bp, Mus musculus
  siRNA target sequence for Sah (NM_016870.2,1733-1751).
cctttttactcattatgta

SEQ ID NO: 617565 - DNA, 19 bp, Mus musculus
  siRNA target sequence for Sah (NM_016870.2,1763-1781).
caaaacggcttcaactcta

SEQ ID NO: 617566 - DNA, 19 bp, Mus musculus
  siRNA target sequence for Sah (NM_016870.2,1777-1795).
ctctacgagggagtttcta

SEQ ID NO: 617567 - DNA, 19 bp, Mus musculus
  siRNA target sequence for Sah (NM_016870.2,1779-1797).
ctacgagggagtttctaca

SEQ ID NO: 617568 - DNA, 19 bp, Mus musculus
  siRNA target sequence for Sah (NM_016870.2,1782-1800).
cgagggagtttctacatta

SEQ ID NO: 617569 - DNA, 19 bp, Mus musculus
  siRNA target sequence for Sah (NM_016870.2,1838-1856).
ctggtttgttgcaagatca

SEQ ID NO: 617570 - DNA, 19 bp, Mus musculus
  siRNA target sequence for Sah (NM_016870.2,1841-1859).
gtttgttgcaagatcagat

SEQ ID NO: 617571 - DNA, 19 bp, Mus musculus
  siRNA target sequence for Sah (NM_016870.2,1849-1867).
caagatcagatgatatcat

SEQ ID NO: 617572 - DNA, 19 bp, Mus musculus
  siRNA target sequence for Sah (NM_016870.2,1857-1875).
gatgatatcatattatctt

SEQ ID NO: 617573 - DNA, 19 bp, Mus musculus
  siRNA target sequence for Sah (NM_016870.2,1998-2016).
gtcctgaatcctgattaca

SEQ ID NO: 617574 - DNA, 19 bp, Mus musculus
  siRNA target sequence for Sah (NM_016870.2,2055-2073).
gagcacgtgaagaagacta

SEQ ID NO: 617575 - DNA, 19 bp, Mus musculus
  siRNA target sequence for Sah (NM_016870.2,2084-2102).
caaataccccagaaaggta

SEQ ID NO: 617576 - DNA, 19 bp, Mus musculus
  siRNA target sequence for Sah (NM_016870.2,2132-2150).
cagtgggaaggtcaaaaga

SEQ ID NO: 617577 - DNA, 19 bp, Mus musculus
  siRNA target sequence for Btrc (NM_009771.1,117-135).
ggagaaagcgcttaagttt

SEQ ID NO: 617578 - DNA, 19 bp, Mus musculus
  siRNA target sequence for Btrc (NM_009771.1,118-136).
gagaaagcgcttaagttta

SEQ ID NO: 617579 - DNA, 19 bp, Mus musculus
  siRNA target sequence for Btrc (NM_009771.1,124-142).
gcgcttaagtttatgaatt

SEQ ID NO: 617580 - DNA, 19 bp, Mus musculus
  siRNA target sequence for Btrc (NM_009771.1,127-145).
cttaagtttatgaattcct

SEQ ID NO: 617581 - DNA, 19 bp, Mus musculus
  siRNA target sequence for Btrc (NM_009771.1,148-166).
gagagagaagactgtaata

SEQ ID NO: 617582 - DNA, 19 bp, Mus musculus
  siRNA target sequence for Btrc (NM_009771.1,171-189).
cgaaccccctaggaagata

SEQ ID NO: 617583 - DNA, 19 bp, Mus musculus
  siRNA target sequence for Btrc (NM_009771.1,172-190).
gaaccccctaggaagataa

SEQ ID NO: 617584 - DNA, 19 bp, Mus musculus
  siRNA target sequence for Btrc (NM_009771.1,208-226).
cttagacagacttacaaca

SEQ ID NO: 617585 - DNA, 19 bp, Mus musculus
  siRNA target sequence for Btrc (NM_009771.1,227-245).
gctgtgccaggctttgcat

SEQ ID NO: 617586 - DNA, 19 bp, Mus musculus
  siRNA target sequence for Btrc (NM_009771.1,228-246).
ctgtgccaggctttgcata

SEQ ID NO: 617587 - DNA, 19 bp, Mus musculus
  siRNA target sequence for Btrc (NM_009771.1,249-267).
ccaagagacagtatgtcta

SEQ ID NO: 617588 - DNA, 19 bp, Mus musculus
  siRNA target sequence for Btrc (NM_009771.1,277-295).
gctatgaagactgaaaatt

SEQ ID NO: 617589 - DNA, 19 bp, Mus musculus
  siRNA target sequence for Btrc (NM_009771.1,323-341).
gcacttccagcatgattgt

SEQ ID NO: 617590 - DNA, 19 bp, Mus musculus
  siRNA target sequence for Btrc (NM_009771.1,354-372).
gaaactctcagcaagctat

SEQ ID NO: 617591 - DNA, 19 bp, Mus musculus
  siRNA target sequence for Btrc (NM_009771.1,387-405).
gctgtgtgtcaagtatttt

SEQ ID NO: 617592 - DNA, 19 bp, Mus musculus
  siRNA target sequence for Btrc (NM_009771.1,445-463).
caccttatatcccaaatgt

SEQ ID NO: 617593 - DNA, 19 bp, Mus musculus
  siRNA target sequence for Btrc (NM_009771.1,447-465).
ccttatatcccaaatgtgt

SEQ ID NO: 617594 - DNA, 19 bp, Mus musculus
  siRNA target sequence for Btrc (NM_009771.1,472-490).
cagcatgggcacatcaact

SEQ ID NO: 617595 - DNA, 19 bp, Mus musculus
  siRNA target sequence for Btrc (NM_009771.1,486-504).
caactcctacctaaaacct

SEQ ID NO: 617596 - DNA, 19 bp, Mus musculus
  siRNA target sequence for Btrc (NM_009771.1,510-528).
gcagagggatttcataact

SEQ ID NO: 617597 - DNA, 19 bp, Mus musculus
  siRNA target sequence for Btrc (NM_009771.1,560-578).
ctgagaacattctgtcata

SEQ ID NO: 617598 - DNA, 19 bp, Mus musculus
  siRNA target sequence for Btrc (NM_009771.1,562-580).
gagaacattctgtcatact

SEQ ID NO: 617599 - DNA, 19 bp, Mus musculus
  siRNA target sequence for Btrc (NM_009771.1,721-739).
ggctggggacagtacttat

SEQ ID NO: 617600 - DNA, 19 bp, Mus musculus
  siRNA target sequence for Btrc (NM_009771.1,722-740).
gctggggacagtacttatt

SEQ ID NO: 617601 - DNA, 19 bp, Mus musculus
  siRNA target sequence for Btrc (NM_009771.1,725-743).
ggggacagtacttattcaa

SEQ ID NO: 617602 - DNA, 19 bp, Mus musculus
  siRNA target sequence for Btrc (NM_009771.1,780-798).
cttttatagagcgctttat

SEQ ID NO: 617603 - DNA, 19 bp, Mus musculus
  siRNA target sequence for Btrc (NM_009771.1,788-806).
gagcgctttatcctaaaat

SEQ ID NO: 617604 - DNA, 19 bp, Mus musculus
  siRNA target sequence for Btrc (NM_009771.1,790-808).
gcgctttatcctaaaatca

SEQ ID NO: 617605 - DNA, 19 bp, Mus musculus
  siRNA target sequence for Btrc (NM_009771.1,791-809).
cgctttatcctaaaatcat

SEQ ID NO: 617606 - DNA, 19 bp, Mus musculus
  siRNA target sequence for Btrc (NM_009771.1,792-810).
gctttatcctaaaatcata

SEQ ID NO: 617607 - DNA, 19 bp, Mus musculus
  siRNA target sequence for Btrc (NM_009771.1,800-818).
ctaaaatcatacaagacat

SEQ ID NO: 617608 - DNA, 19 bp, Mus musculus
  siRNA target sequence for Btrc (NM_009771.1,820-838).
gagacaatagagtccaatt

SEQ ID NO: 617609 - DNA, 19 bp, Mus musculus
  siRNA target sequence for Btrc (NM_009771.1,840-858).
gagatgtgggcgacatagt

SEQ ID NO: 617610 - DNA, 19 bp, Mus musculus
  siRNA target sequence for Btrc (NM_009771.1,851-869).
gacatagtttacagagaat

SEQ ID NO: 617611 - DNA, 19 bp, Mus musculus
  siRNA target sequence for Btrc (NM_009771.1,873-891).
ctgccggagtgaaacaagt

SEQ ID NO: 617612 - DNA, 19 bp, Mus musculus
  siRNA target sequence for Btrc (NM_009771.1,875-893).
gccggagtgaaacaagtaa

SEQ ID NO: 617613 - DNA, 19 bp, Mus musculus
  siRNA target sequence for Btrc (NM_009771.1,876-894).
ccggagtgaaacaagtaaa

SEQ ID NO: 617614 - DNA, 19 bp, Mus musculus
  siRNA target sequence for Btrc (NM_009771.1,890-908).
gtaaaggggtttactgttt

SEQ ID NO: 617615 - DNA, 19 bp, Mus musculus
  siRNA target sequence for Btrc (NM_009771.1,895-913).
ggggtttactgtttacagt

SEQ ID NO: 617616 - DNA, 19 bp, Mus musculus
  siRNA target sequence for Btrc (NM_009771.1,912-930).
gtacgacgaccagaagata

SEQ ID NO: 617617 - DNA, 19 bp, Mus musculus
  siRNA target sequence for Btrc (NM_009771.1,916-934).
gacgaccagaagatagtca

SEQ ID NO: 617618 - DNA, 19 bp, Mus musculus
  siRNA target sequence for Btrc (NM_009771.1,982-1000).
gaatgcaagcggattctca

SEQ ID NO: 617619 - DNA, 19 bp, Mus musculus
  siRNA target sequence for Btrc (NM_009771.1,1096-1114).
gcaggtgagatgctaaaca

SEQ ID NO: 617620 - DNA, 19 bp, Mus musculus
  siRNA target sequence for Btrc (NM_009771.1,1141-1159).
ctgcacctgcgcttcaata

SEQ ID NO: 617621 - DNA, 19 bp, Mus musculus
  siRNA target sequence for Btrc (NM_009771.1,1143-1161).
gcacctgcgcttcaataat

SEQ ID NO: 617622 - DNA, 19 bp, Mus musculus
  siRNA target sequence for Btrc (NM_009771.1,1285-1303).
gatgacaagtacatcgttt

SEQ ID NO: 617623 - DNA, 19 bp, Mus musculus
  siRNA target sequence for Btrc (NM_009771.1,1308-1326).
ctctggagatagaaccata

SEQ ID NO: 617624 - DNA, 19 bp, Mus musculus
  siRNA target sequence for Btrc (NM_009771.1,1340-1358).
caagtacctgtgaattcgt

SEQ ID NO: 617625 - DNA, 19 bp, Mus musculus
  siRNA target sequence for Btrc (NM_009771.1,1506-1524).
ggtacgctgcattcgattt

SEQ ID NO: 617626 - DNA, 19 bp, Mus musculus
  siRNA target sequence for Btrc (NM_009771.1,1510-1528).
cgctgcattcgatttgata

SEQ ID NO: 617627 - DNA, 19 bp, Mus musculus
  siRNA target sequence for Btrc (NM_009771.1,1659-1677).
ccgcctccagtttgatgaa

SEQ ID NO: 617628 - DNA, 19 bp, Mus musculus
  siRNA target sequence for Btrc (NM_009771.1,1660-1678).
cgcctccagtttgatgaat

SEQ ID NO: 617629 - DNA, 19 bp, Mus musculus
  siRNA target sequence for Btrc (NM_009771.1,1661-1679).
gcctccagtttgatgaatt

SEQ ID NO: 617630 - DNA, 19 bp, Mus musculus
  siRNA target sequence for Btrc (NM_009771.1,1680-1698).
ccagattgtcagtagttca

SEQ ID NO: 617631 - DNA, 19 bp, Mus musculus
  siRNA target sequence for Btrc (NM_009771.1,1694-1712).
gttcacatgatgacacaat

SEQ ID NO: 617632 - DNA, 19 bp, Mus musculus
  siRNA target sequence for Btrc (NM_009771.1,1697-1715).
cacatgatgacacaattct

SEQ ID NO: 617633 - DNA, 19 bp, Mus musculus
  siRNA target sequence for Facl6 (NM_144823.1,384-402).
gggttgcactcaattgctt

SEQ ID NO: 617634 - DNA, 19 bp, Mus musculus
  siRNA target sequence for Facl6 (NM_144823.1,385-403).
ggttgcactcaattgctta

SEQ ID NO: 617635 - DNA, 19 bp, Mus musculus
  siRNA target sequence for Facl6 (NM_144823.1,597-615).
gcagttcgttggtgttttt

SEQ ID NO: 617636 - DNA, 19 bp, Mus musculus
  siRNA target sequence for Facl6 (NM_144823.1,649-667).
ctggcctgctacacgtatt

SEQ ID NO: 617637 - DNA, 19 bp, Mus musculus
  siRNA target sequence for Facl6 (NM_144823.1,706-724).
gggtctatcagctacatca

SEQ ID NO: 617638 - DNA, 19 bp, Mus musculus
  siRNA target sequence for Facl6 (NM_144823.1,707-725).
ggtctatcagctacatcat

SEQ ID NO: 617639 - DNA, 19 bp, Mus musculus
  siRNA target sequence for Facl6 (NM_144823.1,743-761).
gcacggtaatcgtcgataa

SEQ ID NO: 617640 - DNA, 19 bp, Mus musculus
  siRNA target sequence for Facl6 (NM_144823.1,744-762).
cacggtaatcgtcgataaa

SEQ ID NO: 617641 - DNA, 19 bp, Mus musculus
  siRNA target sequence for Facl6 (NM_144823.1,912-930).
ggactgtggccgagagaat

SEQ ID NO: 617642 - DNA, 19 bp, Mus musculus
  siRNA target sequence for Facl6 (NM_144823.1,915-933).
ctgtggccgagagaatcat

SEQ ID NO: 617643 - DNA, 19 bp, Mus musculus
  siRNA target sequence for Facl6 (NM_144823.1,964-982).
ctctccatcgtgtgtttca

SEQ ID NO: 617644 - DNA, 19 bp, Mus musculus
  siRNA target sequence for Facl6 (NM_144823.1,966-984).
ctccatcgtgtgtttcaca

SEQ ID NO: 617645 - DNA, 19 bp, Mus musculus
  siRNA target sequence for Facl6 (NM_144823.1,1093-1111).
gcggacgtccacttttcct

SEQ ID NO: 617646 - DNA, 19 bp, Mus musculus
  siRNA target sequence for Facl6 (NM_144823.1,1094-1112).
cggacgtccacttttccta

SEQ ID NO: 617647 - DNA, 19 bp, Mus musculus
  siRNA target sequence for Facl6 (NM_144823.1,1264-1282).
ctgaatcggatgtatgaca

SEQ ID NO: 617648 - DNA, 19 bp, Mus musculus
  siRNA target sequence for Facl6 (NM_144823.1,1357-1375).
gtccggagcggaatcatca

SEQ ID NO: 617649 - DNA, 19 bp, Mus musculus
  siRNA target sequence for Facl6 (NM_144823.1,1360-1378).
cggagcggaatcatcagaa

SEQ ID NO: 617650 - DNA, 19 bp, Mus musculus
  siRNA target sequence for Facl6 (NM_144823.1,1364-1382).
gcggaatcatcagaaacaa

SEQ ID NO: 617651 - DNA, 19 bp, Mus musculus
  siRNA target sequence for Facl6 (NM_144823.1,1385-1403).
gtatctgggatgaactctt

SEQ ID NO: 617652 - DNA, 19 bp, Mus musculus
  siRNA target sequence for Facl6 (NM_144823.1,1392-1410).
ggatgaactcttctttaat

SEQ ID NO: 617653 - DNA, 19 bp, Mus musculus
  siRNA target sequence for Facl6 (NM_144823.1,1791-1809).
gccggagggaacactcaaa

SEQ ID NO: 617654 - DNA, 19 bp, Mus musculus
  siRNA target sequence for Facl6 (NM_144823.1,1792-1810).
ccggagggaacactcaaaa

SEQ ID NO: 617655 - DNA, 19 bp, Mus musculus
  siRNA target sequence for Facl6 (NM_144823.1,1793-1811).
cggagggaacactcaaaat

SEQ ID NO: 617656 - DNA, 19 bp, Mus musculus
  siRNA target sequence for Facl6 (NM_144823.1,1797-1815).
gggaacactcaaaatcatt

SEQ ID NO: 617657 - DNA, 19 bp, Mus musculus
  siRNA target sequence for Facl6 (NM_144823.1,1895-1913).
gtgagcctgtggcacaaat

SEQ ID NO: 617658 - DNA, 19 bp, Mus musculus
  siRNA target sequence for Facl6 (NM_144823.1,1897-1915).
gagcctgtggcacaaatct

SEQ ID NO: 617659 - DNA, 19 bp, Mus musculus
  siRNA target sequence for Facl6 (NM_144823.1,1918-1936).
gtccacggggacagcttaa

SEQ ID NO: 617660 - DNA, 19 bp, Mus musculus
  siRNA target sequence for Facl6 (NM_144823.1,2091-2109).
cggactgcattcttttgaa

SEQ ID NO: 617661 - DNA, 19 bp, Mus musculus
  siRNA target sequence for Facl6 (NM_144823.1,2110-2128).
caggttaaagccatttaca

SEQ ID NO: 617662 - DNA, 19 bp, Mus musculus
  siRNA target sequence for Facl6 (NM_144823.1,2161-2179).
ctgctgacaccaacactaa

SEQ ID NO: 617663 - DNA, 19 bp, Mus musculus
  siRNA target sequence for Facl6 (NM_144823.1,2224-2242).
gaagagctttacttagtct

SEQ ID NO: 617664 - DNA, 19 bp, Mus musculus
  siRNA target sequence for Rnf25 (NM_021313.1,61-79).
ccctctgaagttgaagtat

SEQ ID NO: 617665 - DNA, 19 bp, Mus musculus
  siRNA target sequence for Rnf25 (NM_021313.1,63-81).
ctctgaagttgaagtatta

SEQ ID NO: 617666 - DNA, 19 bp, Mus musculus
  siRNA target sequence for Rnf25 (NM_021313.1,67-85).
gaagttgaagtattagagt

SEQ ID NO: 617667 - DNA, 19 bp, Mus musculus
  siRNA target sequence for Rnf25 (NM_021313.1,178-196).
caagattcgcagtttgtct

SEQ ID NO: 617668 - DNA, 19 bp, Mus musculus
  siRNA target sequence for Rnf25 (NM_021313.1,283-301).
gagcagatccacaagatct

SEQ ID NO: 617669 - DNA, 19 bp, Mus musculus
  siRNA target sequence for Rnf25 (NM_021313.1,338-356).
gcactgccatgctctatga

SEQ ID NO: 617670 - DNA, 19 bp, Mus musculus
  siRNA target sequence for Rnf25 (NM_021313.1,339-357).
cactgccatgctctatgaa

SEQ ID NO: 617671 - DNA, 19 bp, Mus musculus
  siRNA target sequence for Rnf25 (NM_021313.1,341-359).
ctgccatgctctatgaact

SEQ ID NO: 617672 - DNA, 19 bp, Mus musculus
  siRNA target sequence for Rnf25 (NM_021313.1,344-362).
ccatgctctatgaactcat

SEQ ID NO: 617673 - DNA, 19 bp, Mus musculus
  siRNA target sequence for Rnf25 (NM_021313.1,415-433).
gtcatctgcctctatggtt

SEQ ID NO: 617674 - DNA, 19 bp, Mus musculus
  siRNA target sequence for Rnf25 (NM_021313.1,444-462).
ggaggcctttaccaaaaca

SEQ ID NO: 617675 - DNA, 19 bp, Mus musculus
  siRNA target sequence for Rnf25 (NM_021313.1,606-624).
cagggagccccttgtgtat

SEQ ID NO: 617676 - DNA, 19 bp, Mus musculus
  siRNA target sequence for Rnf25 (NM_021313.1,609-627).
ggagccccttgtgtatgat

SEQ ID NO: 617677 - DNA, 19 bp, Mus musculus
  siRNA target sequence for Rnf25 (NM_021313.1,612-630).
gccccttgtgtatgatctt

SEQ ID NO: 617678 - DNA, 19 bp, Mus musculus
  siRNA target sequence for Rnf25 (NM_021313.1,741-759).
ggaaaagggtggtatcatt

SEQ ID NO: 617679 - DNA, 19 bp, Mus musculus
  siRNA target sequence for Rnf25 (NM_021313.1,772-790).
gaacggaaccgatacttca

SEQ ID NO: 617680 - DNA, 19 bp, Mus musculus
  siRNA target sequence for Rnf25 (NM_021313.1,775-793).
cggaaccgatacttcatta

SEQ ID NO: 617681 - DNA, 19 bp, Mus musculus
  siRNA target sequence for Rnf25 (NM_021313.1,822-840).
gccggagtcagctgtagat

SEQ ID NO: 617682 - DNA, 19 bp, Mus musculus
  siRNA target sequence for Rnf25 (NM_021313.1,824-842).
cggagtcagctgtagatgt

SEQ ID NO: 617683 - DNA, 19 bp, Mus musculus
  siRNA target sequence for Rnf25 (NM_021313.1,868-886).
gccctttctgcagaacaat

SEQ ID NO: 617684 - DNA, 19 bp, Mus musculus
  siRNA target sequence for Rnf25 (NM_021313.1,894-912).
cctagctgaccaatcaact

SEQ ID NO: 617685 - DNA, 19 bp, Mus musculus
  siRNA target sequence for Rnf25 (NM_021313.1,938-956).
cccagtatacgtatgagaa

SEQ ID NO: 617686 - DNA, 19 bp, Mus musculus
  siRNA target sequence for Rnf25 (NM_021313.1,1038-1056).
ctcctggcgacagtatgat

SEQ ID NO: 617687 - DNA, 19 bp, Mus musculus
  siRNA target sequence for Rnf25 (NM_021313.1,1080-1098).
gtgctgcaccccaaaaggt

SEQ ID NO: 617688 - DNA, 19 bp, Mus musculus
  siRNA target sequence for Rnf25 (NM_021313.1,1140-1158).
caaggagactgtagactta

SEQ ID NO: 617689 - DNA, 19 bp, Mus musculus
  siRNA target sequence for Rnf25 (NM_021313.1,1258-1276).
cgctgggaacgctccaaaa

SEQ ID NO: 617690 - DNA, 19 bp, Mus musculus
  siRNA target sequence for Slc27a2 (NM_011978.1,389-407).
ccatggcgtgcctcaacta

SEQ ID NO: 617691 - DNA, 19 bp, Mus musculus
  siRNA target sequence for Slc27a2 (NM_011978.1,395-413).
cgtgcctcaactacaacat

SEQ ID NO: 617692 - DNA, 19 bp, Mus musculus
  siRNA target sequence for Slc27a2 (NM_011978.1,396-414).
gtgcctcaactacaacatt

SEQ ID NO: 617693 - DNA, 19 bp, Mus musculus
  siRNA target sequence for Slc27a2 (NM_011978.1,523-541).
gatgccgtgtccgtctttt

SEQ ID NO: 617694 - DNA, 19 bp, Mus musculus
  siRNA target sequence for Slc27a2 (NM_011978.1,527-545).
ccgtgtccgtcttttacgt

SEQ ID NO: 617695 - DNA, 19 bp, Mus musculus
  siRNA target sequence for Slc27a2 (NM_011978.1,528-546).
cgtgtccgtcttttacgta

SEQ ID NO: 617696 - DNA, 19 bp, Mus musculus
  siRNA target sequence for Slc27a2 (NM_011978.1,529-547).
gtgtccgtcttttacgtaa

SEQ ID NO: 617697 - DNA, 19 bp, Mus musculus
  siRNA target sequence for Slc27a2 (NM_011978.1,549-567).
cagaacttctaacacaaat

SEQ ID NO: 617698 - DNA, 19 bp, Mus musculus
  siRNA target sequence for Slc27a2 (NM_011978.1,630-648).
gaggtctgaagtcactttt

SEQ ID NO: 617699 - DNA, 19 bp, Mus musculus
  siRNA target sequence for Slc27a2 (NM_011978.1,650-668).
ccacgccagcagtatacat

SEQ ID NO: 617700 - DNA, 19 bp, Mus musculus
  siRNA target sequence for Slc27a2 (NM_011978.1,651-669).
cacgccagcagtatacatt

SEQ ID NO: 617701 - DNA, 19 bp, Mus musculus
  siRNA target sequence for Slc27a2 (NM_011978.1,658-676).
gcagtatacatttatactt

SEQ ID NO: 617702 - DNA, 19 bp, Mus musculus
  siRNA target sequence for Slc27a2 (NM_011978.1,680-698).
gaaccacaggtcttccaaa

SEQ ID NO: 617703 - DNA, 19 bp, Mus musculus
  siRNA target sequence for Slc27a2 (NM_011978.1,991-1009).
gaccgggaccacaaagtga

SEQ ID NO: 617704 - DNA, 19 bp, Mus musculus
  siRNA target sequence for Slc27a2 (NM_011978.1,994-1012).
cgggaccacaaagtgaaaa

SEQ ID NO: 617705 - DNA, 19 bp, Mus musculus
  siRNA target sequence for Slc27a2 (NM_011978.1,1049-1067).
gagagttcatcaagagatt

SEQ ID NO: 617706 - DNA, 19 bp, Mus musculus
  siRNA target sequence for Slc27a2 (NM_011978.1,1070-1088).
gggacatccacgtgtatga

SEQ ID NO: 617707 - DNA, 19 bp, Mus musculus
  siRNA target sequence for Slc27a2 (NM_011978.1,1103-1121).
ctgaaggcaacattggatt

SEQ ID NO: 617708 - DNA, 19 bp, Mus musculus
  siRNA target sequence for Slc27a2 (NM_011978.1,1187-1205).
ggtatgagctgatcaagta

SEQ ID NO: 617709 - DNA, 19 bp, Mus musculus
  siRNA target sequence for Slc27a2 (NM_011978.1,1230-1248).
ccgtgacgcaaatggatat

SEQ ID NO: 617710 - DNA, 19 bp, Mus musculus
  siRNA target sequence for Slc27a2 (NM_011978.1,1231-1249).
cgtgacgcaaatggatatt

SEQ ID NO: 617711 - DNA, 19 bp, Mus musculus
  siRNA target sequence for Slc27a2 (NM_011978.1,1234-1252).
gacgcaaatggatattgca

SEQ ID NO: 617712 - DNA, 19 bp, Mus musculus
  siRNA target sequence for Slc27a2 (NM_011978.1,1276-1294).
ggactcttggtttgcaaaa

SEQ ID NO: 617713 - DNA, 19 bp, Mus musculus
  siRNA target sequence for Slc27a2 (NM_011978.1,1357-1375).
ctcagagatgtctttaaga

SEQ ID NO: 617714 - DNA, 19 bp, Mus musculus
  siRNA target sequence for Slc27a2 (NM_011978.1,1397-1415).
gcggagacctcctgatgat

SEQ ID NO: 617715 - DNA, 19 bp, Mus musculus
  siRNA target sequence for Slc27a2 (NM_011978.1,1421-1439).
gtgagaacttcgtctactt

SEQ ID NO: 617716 - DNA, 19 bp, Mus musculus
  siRNA target sequence for Slc27a2 (NM_011978.1,1512-1530).
gggactggtagattttgtt

SEQ ID NO: 617717 - DNA, 19 bp, Mus musculus
  siRNA target sequence for Slc27a2 (NM_011978.1,1587-1605).
ggcctccctcaagatcaaa

SEQ ID NO: 617718 - DNA, 19 bp, Mus musculus
  siRNA target sequence for Slc27a2 (NM_011978.1,1614-1632).
cgagttcaatggaaagaaa

SEQ ID NO: 617719 - DNA, 19 bp, Mus musculus
  siRNA target sequence for Slc27a2 (NM_011978.1,1679-1697).
ggttcctgaggatacaaga

SEQ ID NO: 617720 - DNA, 19 bp, Mus musculus
  siRNA target sequence for Slc27a2 (NM_011978.1,1680-1698).
gttcctgaggatacaagat

SEQ ID NO: 617721 - DNA, 19 bp, Mus musculus
  siRNA target sequence for Slc27a2 (NM_011978.1,1686-1704).
gaggatacaagataccatt

SEQ ID NO: 617722 - DNA, 19 bp, Mus musculus
  siRNA target sequence for Slc27a2 (NM_011978.1,1743-1761).
gatggaagagggcttcaat

SEQ ID NO: 617723 - DNA, 19 bp, Mus musculus
  siRNA target sequence for Slc27a2 (NM_011978.1,1770-1788).
catcaaagataccttgtat

SEQ ID NO: 617724 - DNA, 19 bp, Mus musculus
  siRNA target sequence for Slc27a2 (NM_011978.1,1818-1836).
gcccatgactgagaacatt

SEQ ID NO: 617725 - DNA, 19 bp, Mus musculus
  siRNA target sequence for Slc27a2 (NM_011978.1,1819-1837).
cccatgactgagaacattt

SEQ ID NO: 617726 - DNA, 19 bp, Mus musculus
  siRNA target sequence for Slc27a2 (NM_011978.1,1821-1839).
catgactgagaacatttat

SEQ ID NO: 617727 - DNA, 19 bp, Mus musculus
  siRNA target sequence for Slc27a2 (NM_011978.1,1844-1862).
ccataattgataaaactct

SEQ ID NO: 617728 - DNA, 19 bp, Mus musculus
  siRNA target sequence for Ube1x (NM_009457.2,116-134).
ctcgccgctgtccaagaaa

SEQ ID NO: 617729 - DNA, 19 bp, Mus musculus
  siRNA target sequence for Ube1x (NM_009457.2,156-174).
ccaaagccgggttctaact

SEQ ID NO: 617730 - DNA, 19 bp, Mus musculus
  siRNA target sequence for Ube1x (NM_009457.2,274-292).
cccggcagctgtacgtttt

SEQ ID NO: 617731 - DNA, 19 bp, Mus musculus
  siRNA target sequence for Ube1x (NM_009457.2,470-488).
ggacattggtaaaaatcga

SEQ ID NO: 617732 - DNA, 19 bp, Mus musculus
  siRNA target sequence for Ube1x (NM_009457.2,558-576).
cttgtcgaggacttcctta

SEQ ID NO: 617733 - DNA, 19 bp, Mus musculus
  siRNA target sequence for Ube1x (NM_009457.2,561-579).
gtcgaggacttccttagta

SEQ ID NO: 617734 - DNA, 19 bp, Mus musculus
  siRNA target sequence for Ube1x (NM_009457.2,643-661).
gtcatagccgtggtatcaa

SEQ ID NO: 617735 - DNA, 19 bp, Mus musculus
  siRNA target sequence for Ube1x (NM_009457.2,693-711).
gggcaacttttctgtgatt

SEQ ID NO: 617736 - DNA, 19 bp, Mus musculus
  siRNA target sequence for Ube1x (NM_009457.2,725-743).
ggtcctcacagattccaat

SEQ ID NO: 617737 - DNA, 19 bp, Mus musculus
  siRNA target sequence for Ube1x (NM_009457.2,819-837).
gcccgacatggctttgaga

SEQ ID NO: 617738 - DNA, 19 bp, Mus musculus
  siRNA target sequence for Ube1x (NM_009457.2,838-856).
ctggtgacttcgtctcatt

SEQ ID NO: 617739 - DNA, 19 bp, Mus musculus
  siRNA target sequence for Ube1x (NM_009457.2,869-887).
gggcatgatccaactcaat

SEQ ID NO: 617740 - DNA, 19 bp, Mus musculus
  siRNA target sequence for Ube1x (NM_009457.2,892-910).
gtcagcccatggagatcaa

SEQ ID NO: 617741 - DNA, 19 bp, Mus musculus
  siRNA target sequence for Ube1x (NM_009457.2,980-998).
cgtcagtcaggtcaaagta

SEQ ID NO: 617742 - DNA, 19 bp, Mus musculus
  siRNA target sequence for Ube1x (NM_009457.2,990-1008).
gtcaaagtaccgaaaaaga

SEQ ID NO: 617743 - DNA, 19 bp, Mus musculus
  siRNA target sequence for Ube1x (NM_009457.2,999-1017).
ccgaaaaagattagtttta

SEQ ID NO: 617744 - DNA, 19 bp, Mus musculus
  siRNA target sequence for Ube1x (NM_009457.2,1000-1018).
cgaaaaagattagttttaa

SEQ ID NO: 617745 - DNA, 19 bp, Mus musculus
  siRNA target sequence for Ube1x (NM_009457.2,1058-1076).
gactgactttgccaagtat

SEQ ID NO: 617746 - DNA, 19 bp, Mus musculus
  siRNA target sequence for Ube1x (NM_009457.2,1107-1125).
caagctctgcaccaattct

SEQ ID NO: 617747 - DNA, 19 bp, Mus musculus
  siRNA target sequence for Ube1x (NM_009457.2,1209-1227).
cggtccccaccttcagtaa

SEQ ID NO: 617748 - DNA, 19 bp, Mus musculus
  siRNA target sequence for Ube1x (NM_009457.2,1237-1255).
gcttggatgaagaccttat

SEQ ID NO: 617749 - DNA, 19 bp, Mus musculus
  siRNA target sequence for Ube1x (NM_009457.2,1537-1555).
gggccattggctgtgaatt

SEQ ID NO: 617750 - DNA, 19 bp, Mus musculus
  siRNA target sequence for Ube1x (NM_009457.2,1670-1688).
ctgggatgtcacgaagtta

SEQ ID NO: 617751 - DNA, 19 bp, Mus musculus
  siRNA target sequence for Ube1x (NM_009457.2,1672-1690).
gggatgtcacgaagttaaa

SEQ ID NO: 617752 - DNA, 19 bp, Mus musculus
  siRNA target sequence for Ube1x (NM_009457.2,1674-1692).
gatgtcacgaagttaaagt

SEQ ID NO: 617753 - DNA, 19 bp, Mus musculus
  siRNA target sequence for Ube1x (NM_009457.2,1772-1790).
cactgagcgcatctatgat

SEQ ID NO: 617754 - DNA, 19 bp, Mus musculus
  siRNA target sequence for Ube1x (NM_009457.2,2105-2123).
cctcacagactccaaattt

SEQ ID NO: 617755 - DNA, 19 bp, Mus musculus
  siRNA target sequence for Ube1x (NM_009457.2,2248-2266).
ggcacacccagtactgtaa

SEQ ID NO: 617756 - DNA, 19 bp, Mus musculus
  siRNA target sequence for Ube1x (NM_009457.2,2250-2268).
cacacccagtactgtaaca

SEQ ID NO: 617757 - DNA, 19 bp, Mus musculus
  siRNA target sequence for Ube1x (NM_009457.2,2275-2293).
ggcaactgctgcacaactt

SEQ ID NO: 617758 - DNA, 19 bp, Mus musculus
  siRNA target sequence for Ube1x (NM_009457.2,2831-2849).
gctctacaaggtagttcaa

SEQ ID NO: 617759 - DNA, 19 bp, Mus musculus
  siRNA target sequence for Ube1x (NM_009457.2,2861-2879).
gctcgattcctacaaaaat

SEQ ID NO: 617760 - DNA, 19 bp, Mus musculus
  siRNA target sequence for Ube1x (NM_009457.2,2932-2950).
cacctcgtcaccagtacta

SEQ ID NO: 617761 - DNA, 19 bp, Mus musculus
  siRNA target sequence for Ube1x (NM_009457.2,2934-2952).
cctcgtcaccagtactata

SEQ ID NO: 617762 - DNA, 19 bp, Mus musculus
  siRNA target sequence for Ube1x (NM_009457.2,2935-2953).
ctcgtcaccagtactataa

SEQ ID NO: 617763 - DNA, 19 bp, Mus musculus
  siRNA target sequence for Ube1x (NM_009457.2,3021-3039).
ctcaagcagttccttgatt

SEQ ID NO: 617764 - DNA, 19 bp, Mus musculus
  siRNA target sequence for Ube1x (NM_009457.2,3121-3139).
ctaagctcaaggaacgatt

SEQ ID NO: 617765 - DNA, 19 bp, Mus musculus
  siRNA target sequence for Ube1x (NM_009457.2,3162-3180).
gtgagccgagtgtcaaaga

SEQ ID NO: 617766 - DNA, 19 bp, Mus musculus
  siRNA target sequence for Ube1x (NM_009457.2,3166-3184).
gccgagtgtcaaagagaaa

SEQ ID NO: 617767 - DNA, 19 bp, Mus musculus
  siRNA target sequence for Ube1x (NM_009457.2,3219-3237).
ctgtgctgcaacgatgaaa

SEQ ID NO: 617768 - DNA, 19 bp, Mus musculus
  siRNA target sequence for Ube1x (NM_009457.2,3255-3273).
gtcccttatgtccgatata

SEQ ID NO: 617769 - DNA, 19 bp, Mus musculus
  siRNA target sequence for Ube1x (NM_009457.2,3258-3276).
ccttatgtccgatatacca

SEQ ID NO: 617770 - DNA, 19 bp, Mus musculus
  siRNA target sequence for Ube1x (NM_009457.2,3259-3277).
cttatgtccgatataccat

SEQ ID NO: 617771 - DNA, 19 bp, Mus musculus
  siRNA target sequence for Ube1y1 (NM_011667.1,170-188).
ggtctcctacctattctgt

SEQ ID NO: 617772 - DNA, 19 bp, Mus musculus
  siRNA target sequence for Ube1y1 (NM_011667.1,210-228).
gccaaccaacgaaatgtca

SEQ ID NO: 617773 - DNA, 19 bp, Mus musculus
  siRNA target sequence for Ube1y1 (NM_011667.1,212-230).
caaccaacgaaatgtcaaa

SEQ ID NO: 617774 - DNA, 19 bp, Mus musculus
  siRNA target sequence for Ube1y1 (NM_011667.1,312-330).
ggcttccagtgtactgata

SEQ ID NO: 617775 - DNA, 19 bp, Mus musculus
  siRNA target sequence for Ube1y1 (NM_011667.1,342-360).
gggtctgggtgtggaaatt

SEQ ID NO: 617776 - DNA, 19 bp, Mus musculus
  siRNA target sequence for Ube1y1 (NM_011667.1,449-467).
gcctacgtgaggaagatat

SEQ ID NO: 617777 - DNA, 19 bp, Mus musculus
  siRNA target sequence for Ube1y1 (NM_011667.1,450-468).
cctacgtgaggaagatatt

SEQ ID NO: 617778 - DNA, 19 bp, Mus musculus
  siRNA target sequence for Ube1y1 (NM_011667.1,454-472).
cgtgaggaagatattggta

SEQ ID NO: 617779 - DNA, 19 bp, Mus musculus
  siRNA target sequence for Ube1y1 (NM_011667.1,455-473).
gtgaggaagatattggtaa

SEQ ID NO: 617780 - DNA, 19 bp, Mus musculus
  siRNA target sequence for Ube1y1 (NM_011667.1,516-534).
cagttacgttcctgtgttt

SEQ ID NO: 617781 - DNA, 19 bp, Mus musculus
  siRNA target sequence for Ube1y1 (NM_011667.1,536-554).
cctacactggacctctaat

SEQ ID NO: 617782 - DNA, 19 bp, Mus musculus
  siRNA target sequence for Ube1y1 (NM_011667.1,593-611).
ccaacactcctttggaata

SEQ ID NO: 617783 - DNA, 19 bp, Mus musculus
  siRNA target sequence for Ube1y1 (NM_011667.1,616-634).
ctgcaggtgggtgaattct

SEQ ID NO: 617784 - DNA, 19 bp, Mus musculus
  siRNA target sequence for Ube1y1 (NM_011667.1,677-695).
gcctagttggacaactctt

SEQ ID NO: 617785 - DNA, 19 bp, Mus musculus
  siRNA target sequence for Ube1y1 (NM_011667.1,712-730).
gaaatgattctcactgatt

SEQ ID NO: 617786 - DNA, 19 bp, Mus musculus
  siRNA target sequence for Ube1y1 (NM_011667.1,807-825).
ggactcccggcatggattt

SEQ ID NO: 617787 - DNA, 19 bp, Mus musculus
  siRNA target sequence for Ube1y1 (NM_011667.1,810-828).
ctcccggcatggatttgaa

SEQ ID NO: 617788 - DNA, 19 bp, Mus musculus
  siRNA target sequence for Ube1y1 (NM_011667.1,813-831).
ccggcatggatttgaaagt

SEQ ID NO: 617789 - DNA, 19 bp, Mus musculus
  siRNA target sequence for Ube1y1 (NM_011667.1,968-986).
gcattgtcagtcaagtgaa

SEQ ID NO: 617790 - DNA, 19 bp, Mus musculus
  siRNA target sequence for Ube1y1 (NM_011667.1,988-1006).
gtacctcggaagatcaatt

SEQ ID NO: 617791 - DNA, 19 bp, Mus musculus
  siRNA target sequence for Ube1y1 (NM_011667.1,991-1009).
cctcggaagatcaatttta

SEQ ID NO: 617792 - DNA, 19 bp, Mus musculus
  siRNA target sequence for Ube1y1 (NM_011667.1,1041-1059).
gtttgtggtcacagatttt

SEQ ID NO: 617793 - DNA, 19 bp, Mus musculus
  siRNA target sequence for Ube1y1 (NM_011667.1,1102-1120).
gccctgcatcagttctgta

SEQ ID NO: 617794 - DNA, 19 bp, Mus musculus
  siRNA target sequence for Ube1y1 (NM_011667.1,1190-1208).
ctgtgaatgctcaagcttt

SEQ ID NO: 617795 - DNA, 19 bp, Mus musculus
  siRNA target sequence for Ube1y1 (NM_011667.1,1287-1305).
catgaatgccttttttggt

SEQ ID NO: 617796 - DNA, 19 bp, Mus musculus
  siRNA target sequence for Ube1y1 (NM_011667.1,1323-1341).
ggtcatgaaggcttgttct

SEQ ID NO: 617797 - DNA, 19 bp, Mus musculus
  siRNA target sequence for Ube1y1 (NM_011667.1,1660-1678).
ccctgggacatcacaaaat

SEQ ID NO: 617798 - DNA, 19 bp, Mus musculus
  siRNA target sequence for Ube1y1 (NM_011667.1,1668-1686).
catcacaaaattaaagtct

SEQ ID NO: 617799 - DNA, 19 bp, Mus musculus
  siRNA target sequence for Ube1y1 (NM_011667.1,1699-1717).
gcagcagtgcgtgacataa

SEQ ID NO: 617800 - DNA, 19 bp, Mus musculus
  siRNA target sequence for Ube1y1 (NM_011667.1,1764-1782).
gacagaacacgtctatgat

SEQ ID NO: 617801 - DNA, 19 bp, Mus musculus
  siRNA target sequence for Ube1y1 (NM_011667.1,1812-1830).
ggccaatgccctagacaat

SEQ ID NO: 617802 - DNA, 19 bp, Mus musculus
  siRNA target sequence for Ube1y1 (NM_011667.1,1814-1832).
ccaatgccctagacaatgt

SEQ ID NO: 617803 - DNA, 19 bp, Mus musculus
  siRNA target sequence for Ube1y1 (NM_011667.1,1848-1866).
cgtggaccgccgttgtgtt

SEQ ID NO: 617804 - DNA, 19 bp, Mus musculus
  siRNA target sequence for Ube1y1 (NM_011667.1,1849-1867).
gtggaccgccgttgtgttt

SEQ ID NO: 617805 - DNA, 19 bp, Mus musculus
  siRNA target sequence for Ube1y1 (NM_011667.1,1852-1870).
gaccgccgttgtgtttact

SEQ ID NO: 617806 - DNA, 19 bp, Mus musculus
  siRNA target sequence for Ube1y1 (NM_011667.1,1854-1872).
ccgccgttgtgtttactat

SEQ ID NO: 617807 - DNA, 19 bp, Mus musculus
  siRNA target sequence for Ube1y1 (NM_011667.1,1858-1876).
cgttgtgtttactatcgta

SEQ ID NO: 617808 - DNA, 19 bp, Mus musculus
  siRNA target sequence for Ube1y1 (NM_011667.1,1859-1877).
gttgtgtttactatcgtaa

SEQ ID NO: 617809 - DNA, 19 bp, Mus musculus
  siRNA target sequence for Ube1y1 (NM_011667.1,1924-1942).
gtggttgttcccttcttga

SEQ ID NO: 617810 - DNA, 19 bp, Mus musculus
  siRNA target sequence for Ube1y1 (NM_011667.1,2158-2176).
gtactggaggccatacact

SEQ ID NO: 617811 - DNA, 19 bp, Mus musculus
  siRNA target sequence for Ube1y1 (NM_011667.1,2240-2258).
ggcacacccagtattctca

SEQ ID NO: 617812 - DNA, 19 bp, Mus musculus
  siRNA target sequence for Ube1y1 (NM_011667.1,2350-2368).
cctctcacctttgacataa

SEQ ID NO: 617813 - DNA, 19 bp, Mus musculus
  siRNA target sequence for Ube1y1 (NM_011667.1,2659-2677).
gacgacagcaactttcaca

SEQ ID NO: 617814 - DNA, 19 bp, Mus musculus
  siRNA target sequence for Ube1y1 (NM_011667.1,2731-2749).
ccagcagaccggcataaga

SEQ ID NO: 617815 - DNA, 19 bp, Mus musculus
  siRNA target sequence for Ube1y1 (NM_011667.1,2740-2758).
cggcataagagcaaactga

SEQ ID NO: 617816 - DNA, 19 bp, Mus musculus
  siRNA target sequence for Ube1y1 (NM_011667.1,2741-2759).
ggcataagagcaaactgat

SEQ ID NO: 617817 - DNA, 19 bp, Mus musculus
  siRNA target sequence for Ube1y1 (NM_011667.1,2742-2760).
gcataagagcaaactgatt

SEQ ID NO: 617818 - DNA, 19 bp, Mus musculus
  siRNA target sequence for Ube1y1 (NM_011667.1,2790-2808).
caccacatctgctatagtt

SEQ ID NO: 617819 - DNA, 19 bp, Mus musculus
  siRNA target sequence for Ube1y1 (NM_011667.1,2859-2877).
ggagtcttataaaaacagt

SEQ ID NO: 617820 - DNA, 19 bp, Mus musculus
  siRNA target sequence for Ube1y1 (NM_011667.1,3243-3261).
catagaggttccttatgta

SEQ ID NO: 617821 - DNA, 19 bp, Mus musculus
  siRNA target sequence for Ube1y1 (NM_011667.1,3253-3271).
ccttatgtacgatacatca

SEQ ID NO: 617822 - DNA, 19 bp, Mus musculus
  siRNA target sequence for Ube1y1 (NM_011667.1,3254-3272).
cttatgtacgatacatcat

SEQ ID NO: 617823 - DNA, 19 bp, Mus musculus
  siRNA target sequence for 2610009I02Rik (NM_028115.2,40-58).
ggtggtttcacctctgatt

SEQ ID NO: 617824 - DNA, 19 bp, Mus musculus
  siRNA target sequence for 2610009I02Rik (NM_028115.2,414-432).
cggggtccaagaggtatat

SEQ ID NO: 617825 - DNA, 19 bp, Mus musculus
  siRNA target sequence for 2610009I02Rik (NM_028115.2,416-434).
gggtccaagaggtatatca

SEQ ID NO: 617826 - DNA, 19 bp, Mus musculus
  siRNA target sequence for 2610009I02Rik (NM_028115.2,470-488).
gattctactgggaaggtaa

SEQ ID NO: 617827 - DNA, 19 bp, Mus musculus
  siRNA target sequence for 2610009I02Rik (NM_028115.2,491-509).
gaagagaagccgtatgata

SEQ ID NO: 617828 - DNA, 19 bp, Mus musculus
  siRNA target sequence for 2610009I02Rik (NM_028115.2,494-512).
gagaagccgtatgataaaa

SEQ ID NO: 617829 - DNA, 19 bp, Mus musculus
  siRNA target sequence for 2610009I02Rik (NM_028115.2,496-514).
gaagccgtatgataaaata

SEQ ID NO: 617830 - DNA, 19 bp, Mus musculus
  siRNA target sequence for 2610009I02Rik (NM_028115.2,499-517).
gccgtatgataaaataaca

SEQ ID NO: 617831 - DNA, 19 bp, Mus musculus
  siRNA target sequence for 2610009I02Rik (NM_028115.2,609-627).
gactctcaacgctaatgaa

SEQ ID NO: 617832 - DNA, 19 bp, Mus musculus
  siRNA target sequence for 2610009I02Rik (NM_028115.2,917-935).
ccggaggagctgacattta

SEQ ID NO: 617833 - DNA, 19 bp, Mus musculus
  siRNA target sequence for 2610009I02Rik (NM_028115.2,918-936).
cggaggagctgacatttaa

SEQ ID NO: 617834 - DNA, 19 bp, Mus musculus
  siRNA target sequence for 2610009I02Rik (NM_028115.2,955-973).
ctccagtgaccaggttata

SEQ ID NO: 617835 - DNA, 19 bp, Mus musculus
  siRNA target sequence for 2610009I02Rik (NM_028115.2,967-985).
ggttataagctgtggatat

SEQ ID NO: 617836 - DNA, 19 bp, Mus musculus
  siRNA target sequence for 4921503C21Rik (NM_173450.1,55-73).
gctgcctacgggacattgt

SEQ ID NO: 617837 - DNA, 19 bp, Mus musculus
  siRNA target sequence for 4921503C21Rik (NM_173450.1,404-422).
cgtgccgcctccgaagaaa

SEQ ID NO: 617838 - DNA, 19 bp, Mus musculus
  siRNA target sequence for 4921503C21Rik (NM_173450.1,426-444).
cgcaccggggtgagcttta

SEQ ID NO: 617839 - DNA, 19 bp, Mus musculus
  siRNA target sequence for 4921503C21Rik (NM_173450.1,459-477).
gcagagactacctactact

SEQ ID NO: 617840 - DNA, 19 bp, Mus musculus
  siRNA target sequence for 4921503C21Rik (NM_173450.1,460-478).
cagagactacctactactt

SEQ ID NO: 617841 - DNA, 19 bp, Mus musculus
  siRNA target sequence for 4921503C21Rik (NM_173450.1,521-539).
ccagacctactgtaaaggt

SEQ ID NO: 617842 - DNA, 19 bp, Mus musculus
  siRNA target sequence for 4921503C21Rik (NM_173450.1,586-604).
gatcccagccactgtctta

SEQ ID NO: 617843 - DNA, 19 bp, Mus musculus
  siRNA target sequence for 4921503C21Rik (NM_173450.1,761-779).
caacgatgtggttgttata

SEQ ID NO: 617844 - DNA, 19 bp, Mus musculus
  siRNA target sequence for 4921503C21Rik (NM_173450.1,850-868).
gcaaggagcaccaactgaa

SEQ ID NO: 617845 - DNA, 19 bp, Mus musculus
  siRNA target sequence for 4921503C21Rik (NM_173450.1,904-922).
cctcaggagtgctcatgtt

SEQ ID NO: 617846 - DNA, 19 bp, Mus musculus
  siRNA target sequence for 4921503C21Rik (NM_173450.1,934-952).
ctgcagtctcggagaagat

SEQ ID NO: 617847 - DNA, 19 bp, Mus musculus
  siRNA target sequence for 4921503C21Rik (NM_173450.1,1020-1038).
gacaaggaggtaatttgta

SEQ ID NO: 617848 - DNA, 19 bp, Mus musculus
  siRNA target sequence for 4921503C21Rik (NM_173450.1,1025-1043).
ggaggtaatttgtaaggaa

SEQ ID NO: 617849 - DNA, 19 bp, Mus musculus
  siRNA target sequence for 4921503C21Rik (NM_173450.1,1209-1227).
ctgggccacccgattctca

SEQ ID NO: 617850 - DNA, 19 bp, Mus musculus
  siRNA target sequence for 4921503C21Rik (NM_173450.1,1211-1229).
gggccacccgattctcaat

SEQ ID NO: 617851 - DNA, 19 bp, Mus musculus
  siRNA target sequence for 4921503C21Rik (NM_173450.1,1213-1231).
gccacccgattctcaatga

SEQ ID NO: 617852 - DNA, 19 bp, Mus musculus
  siRNA target sequence for 4921503C21Rik (NM_173450.1,1230-1248).
gaccccatctacaattcaa

SEQ ID NO: 617853 - DNA, 19 bp, Mus musculus
  siRNA target sequence for 4921503C21Rik (NM_173450.1,1232-1250).
ccccatctacaattcaact

SEQ ID NO: 617854 - DNA, 19 bp, Mus musculus
  siRNA target sequence for 4921503C21Rik (NM_173450.1,1272-1290).
cagggtggccacattccaa

SEQ ID NO: 617855 - DNA, 19 bp, Mus musculus
  siRNA target sequence for 4921503C21Rik (NM_173450.1,1326-1344).
gaacatcaggccaaagaaa

SEQ ID NO: 617856 - DNA, 19 bp, Mus musculus
  siRNA target sequence for 4921503C21Rik (NM_173450.1,1460-1478).
gaagatagatggaatagct

SEQ ID NO: 617857 - DNA, 19 bp, Mus musculus
  siRNA target sequence for 4921503C21Rik (NM_173450.1,1524-1542).
gcagatgtgactcaagaaa

SEQ ID NO: 617858 - DNA, 19 bp, Mus musculus
  siRNA target sequence for G430055L02Rik (NM_145520.2,925-943).
gctcttcgctgtctataaa

SEQ ID NO: 617859 - DNA, 19 bp, Mus musculus
  siRNA target sequence for G430055L02Rik (NM_145520.2,985-1003).
gttgcaactgcttaaaggt

SEQ ID NO: 617860 - DNA, 19 bp, Mus musculus
  siRNA target sequence for G430055L02Rik (NM_145520.2,1136-1154).
cgtggtccagcattcacaa

SEQ ID NO: 617861 - DNA, 19 bp, Mus musculus
  siRNA target sequence for G430055L02Rik (NM_145520.2,1137-1155).
gtggtccagcattcacaaa

SEQ ID NO: 617862 - DNA, 19 bp, Mus musculus
  siRNA target sequence for G430055L02Rik (NM_145520.2,1257-1275).
ctcatctcaccaaggatta

SEQ ID NO: 617863 - DNA, 19 bp, Mus musculus
  siRNA target sequence for G430055L02Rik (NM_145520.2,1322-1340).
gatggacggctgatagaga

SEQ ID NO: 617864 - DNA, 19 bp, Mus musculus
  siRNA target sequence for G430055L02Rik (NM_145520.2,1449-1467).
cccaggaggcctatgagat

SEQ ID NO: 617865 - DNA, 19 bp, Mus musculus
  siRNA target sequence for G430055L02Rik (NM_145520.2,1541-1559).
gcacctcccgagtttcttt

SEQ ID NO: 617866 - DNA, 19 bp, Mus musculus
  siRNA target sequence for G430055L02Rik (NM_145520.2,1763-1781).
gcagcggaactgcaaaaga

SEQ ID NO: 617867 - DNA, 19 bp, Mus musculus
  siRNA target sequence for Pus1 (NM_019700.2,476-494).
gctgccaaagcgaaaaatt

SEQ ID NO: 617868 - DNA, 19 bp, Mus musculus
  siRNA target sequence for Pus1 (NM_019700.2,957-975).
ggcacccataacttccata

SEQ ID NO: 617869 - DNA, 19 bp, Mus musculus
  siRNA target sequence for Pus1 (NM_019700.2,1018-1036).
gctacattctggagatgta

SEQ ID NO: 617870 - DNA, 19 bp, Mus musculus
  siRNA target sequence for Pus1 (NM_019700.2,1336-1354).
ctttcaaggagcagtacat

SEQ ID NO: 617871 - DNA, 19 bp, Mus musculus
  siRNA target sequence for Pus1 (NM_019700.2,1349-1367).
gtacatttaccctaccatt

SEQ ID NO: 617872 - DNA, 19 bp, Mus musculus
  siRNA target sequence for Pus1 (NM_019700.2,1414-1432).
ctttgccgatccacaactt

SEQ ID NO: 617873 - DNA, 19 bp, Mus musculus
  siRNA target sequence for 6430537H07Rik (NM_178689.2,54-72).
cgcagaggcgggatcacta

SEQ ID NO: 617874 - DNA, 19 bp, Mus musculus
  siRNA target sequence for 6430537H07Rik (NM_178689.2,194-212).
cctgaaggcaaactacttt

SEQ ID NO: 617875 - DNA, 19 bp, Mus musculus
  siRNA target sequence for 6430537H07Rik (NM_178689.2,232-250).
cctccatatgcaaaatagt

SEQ ID NO: 617876 - DNA, 19 bp, Mus musculus
  siRNA target sequence for 6430537H07Rik (NM_178689.2,346-364).
cgatccctacgcactttga

SEQ ID NO: 617877 - DNA, 19 bp, Mus musculus
  siRNA target sequence for 6430537H07Rik (NM_178689.2,436-454).
cggtgcagtggatcaatca

SEQ ID NO: 617878 - DNA, 19 bp, Mus musculus
  siRNA target sequence for 6430537H07Rik (NM_178689.2,679-697).
ggagggatacgcttttgga

SEQ ID NO: 617879 - DNA, 19 bp, Mus musculus
  siRNA target sequence for 6430537H07Rik (NM_178689.2,799-817).
ccagcgatcctctctactt

SEQ ID NO: 617880 - DNA, 19 bp, Mus musculus
  siRNA target sequence for 6430537H07Rik (NM_178689.2,800-818).
cagcgatcctctctactta

SEQ ID NO: 617881 - DNA, 19 bp, Mus musculus
  siRNA target sequence for 6430537H07Rik (NM_178689.2,848-866).
gcagccgtcaacattctct

SEQ ID NO: 617882 - DNA, 19 bp, Mus musculus
  siRNA target sequence for 6430537H07Rik (NM_178689.2,849-867).
cagccgtcaacattctcta

SEQ ID NO: 617883 - DNA, 19 bp, Mus musculus
  siRNA target sequence for 6430537H07Rik (NM_178689.2,1030-1048).
cgcttccacctccaaaaca

SEQ ID NO: 617884 - DNA, 19 bp, Mus musculus
  siRNA target sequence for 6430537H07Rik (NM_178689.2,1052-1070).
gaccaaaaaagggcataat

SEQ ID NO: 617885 - DNA, 19 bp, Mus musculus
  siRNA target sequence for 6430537H07Rik (NM_178689.2,1092-1110).
ccgatcactggcaaggtat

SEQ ID NO: 617886 - DNA, 19 bp, Mus musculus
  siRNA target sequence for 6430537H07Rik (NM_178689.2,1113-1131).
caccttggctgtttaacca

SEQ ID NO: 617887 - DNA, 19 bp, Mus musculus
  siRNA target sequence for 6430537H07Rik (NM_178689.2,1119-1137).
ggctgtttaaccatcaact

SEQ ID NO: 617888 - DNA, 19 bp, Mus musculus
  siRNA target sequence for 6430537H07Rik (NM_178689.2,1120-1138).
gctgtttaaccatcaacta

SEQ ID NO: 617889 - DNA, 19 bp, Mus musculus
  siRNA target sequence for 6430537H07Rik (NM_178689.2,1244-1262).
gctgatggactacagtaaa

SEQ ID NO: 617890 - DNA, 19 bp, Mus musculus
  siRNA target sequence for 6430537H07Rik (NM_178689.2,1334-1352).
caacaagtatccttccata

SEQ ID NO: 617891 - DNA, 19 bp, Mus musculus
  siRNA target sequence for 6430537H07Rik (NM_178689.2,1345-1363).
cttccataatcgccttaat

SEQ ID NO: 617892 - DNA, 19 bp, Mus musculus
  siRNA target sequence for 6430537H07Rik (NM_178689.2,1348-1366).
ccataatcgccttaattga

SEQ ID NO: 617893 - DNA, 19 bp, Mus musculus
  siRNA target sequence for 6430537H07Rik (NM_178689.2,1349-1367).
cataatcgccttaattgat

SEQ ID NO: 617894 - DNA, 19 bp, Mus musculus
  siRNA target sequence for 6430537H07Rik (NM_178689.2,1424-1442).
ccggtgctacctaattgca

SEQ ID NO: 617895 - DNA, 19 bp, Mus musculus
  siRNA target sequence for 6430537H07Rik (NM_178689.2,1450-1468).
cttccgggagtgtctctaa

SEQ ID NO: 617896 - DNA, 19 bp, Mus musculus
  siRNA target sequence for 6430537H07Rik (NM_178689.2,1453-1471).
ccgggagtgtctctaaact

SEQ ID NO: 617897 - DNA, 19 bp, Mus musculus
  siRNA target sequence for 6430537H07Rik (NM_178689.2,1504-1522).
cccacggactgatcataaa

SEQ ID NO: 617898 - DNA, 19 bp, Mus musculus
  siRNA target sequence for 6430537H07Rik (NM_178689.2,1517-1535).
cataaagcacacaaaccaa

SEQ ID NO: 617899 - DNA, 19 bp, Mus musculus
  siRNA target sequence for 6430537H07Rik (NM_178689.2,1554-1572).
gtggaaataacccatctta

SEQ ID NO: 617900 - DNA, 19 bp, Mus musculus
  siRNA target sequence for 6430537H07Rik (NM_178689.2,1557-1575).
gaaataacccatcttatca

SEQ ID NO: 617901 - DNA, 19 bp, Mus musculus
  siRNA target sequence for 6430537H07Rik (NM_178689.2,1587-1605).
ctcctggccgtctttggaa

SEQ ID NO: 617902 - DNA, 19 bp, Mus musculus
  siRNA target sequence for 6430537H07Rik (NM_178689.2,1654-1672).
gattcggtgcccggtttat

SEQ ID NO: 617903 - DNA, 19 bp, Mus musculus
  siRNA target sequence for 6430537H07Rik (NM_178689.2,1659-1677).
ggtgcccggtttatcaagt

SEQ ID NO: 617904 - DNA, 19 bp, Mus musculus
  siRNA target sequence for 6430537H07Rik (NM_178689.2,1660-1678).
gtgcccggtttatcaagtt

SEQ ID NO: 617905 - DNA, 19 bp, Mus musculus
  siRNA target sequence for 6430537H07Rik (NM_178689.2,1673-1691).
caagttggggggtctttct

SEQ ID NO: 617906 - DNA, 19 bp, Mus musculus
  siRNA target sequence for 6430537H07Rik (NM_178689.2,1695-1713).
ggtgaacggatgaccaaat

SEQ ID NO: 617907 - DNA, 19 bp, Mus musculus
  siRNA target sequence for 6430537H07Rik (NM_178689.2,1696-1714).
gtgaacggatgaccaaata

SEQ ID NO: 617908 - DNA, 19 bp, Mus musculus
  siRNA target sequence for 6430537H07Rik (NM_178689.2,1715-1733).
caaccgccttcttgctata

SEQ ID NO: 617909 - DNA, 19 bp, Mus musculus
  siRNA target sequence for 6430537H07Rik (NM_178689.2,1754-1772).
gggagtatggggtttcagt

SEQ ID NO: 617910 - DNA, 19 bp, Mus musculus
  siRNA target sequence for 6430537H07Rik (NM_178689.2,1762-1780).
ggggtttcagtgaagaaca

SEQ ID NO: 617911 - DNA, 19 bp, Mus musculus
  siRNA target sequence for 6430537H07Rik (NM_178689.2,1816-1834).
caatggctgaggaaactct

SEQ ID NO: 617912 - DNA, 19 bp, Mus musculus
  siRNA target sequence for Aco2 (NM_080633.1,801-819).
cctcacccaaagatgtgat

SEQ ID NO: 617913 - DNA, 19 bp, Mus musculus
  siRNA target sequence for Aco2 (NM_080633.1,852-870).
gtggcacaggtgctattgt

SEQ ID NO: 617914 - DNA, 19 bp, Mus musculus
  siRNA target sequence for Aco2 (NM_080633.1,882-900).
gacccggtgtcgattccat

SEQ ID NO: 617915 - DNA, 19 bp, Mus musculus
  siRNA target sequence for Aco2 (NM_080633.1,927-945).
gcaacatgggtgcagaaat

SEQ ID NO: 617916 - DNA, 19 bp, Mus musculus
  siRNA target sequence for Aco2 (NM_080633.1,957-975).
cgtcagtgttcccatacaa

SEQ ID NO: 617917 - DNA, 19 bp, Mus musculus
  siRNA target sequence for Aco2 (NM_080633.1,1003-1021).
gacaggccgaacagacatt

SEQ ID NO: 617918 - DNA, 19 bp, Mus musculus
  siRNA target sequence for Aco2 (NM_080633.1,1022-1040).
gccaacctagcagaagaat

SEQ ID NO: 617919 - DNA, 19 bp, Mus musculus
  siRNA target sequence for Aco2 (NM_080633.1,1071-1089).
gccagtatgaccaagtgat

SEQ ID NO: 617920 - DNA, 19 bp, Mus musculus
  siRNA target sequence for Aco2 (NM_080633.1,1072-1090).
ccagtatgaccaagtgatt

SEQ ID NO: 617921 - DNA, 19 bp, Mus musculus
  siRNA target sequence for Aco2 (NM_080633.1,1075-1093).
gtatgaccaagtgattgaa

SEQ ID NO: 617922 - DNA, 19 bp, Mus musculus
  siRNA target sequence for Aco2 (NM_080633.1,1079-1097).
gaccaagtgattgaaatta

SEQ ID NO: 617923 - DNA, 19 bp, Mus musculus
  siRNA target sequence for Aco2 (NM_080633.1,1108-1126).
gctaaagccacatatcaat

SEQ ID NO: 617924 - DNA, 19 bp, Mus musculus
  siRNA target sequence for Aco2 (NM_080633.1,1339-1357).
gcagatccgtgccactatt

SEQ ID NO: 617925 - DNA, 19 bp, Mus musculus
  siRNA target sequence for Aco2 (NM_080633.1,1934-1952).
ggtgccatcaacatcgaaa

SEQ ID NO: 617926 - DNA, 19 bp, Mus musculus
  siRNA target sequence for Aco2 (NM_080633.1,1935-1953).
gtgccatcaacatcgaaaa

SEQ ID NO: 617927 - DNA, 19 bp, Mus musculus
  siRNA target sequence for Aco2 (NM_080633.1,2009-2027).
gacactgctcgctactaca

SEQ ID NO: 617928 - DNA, 19 bp, Mus musculus
  siRNA target sequence for Aco2 (NM_080633.1,2013-2031).
ctgctcgctactacaagaa

SEQ ID NO: 617929 - DNA, 19 bp, Mus musculus
  siRNA target sequence for Aco2 (NM_080633.1,2016-2034).
ctcgctactacaagaaaca

SEQ ID NO: 617930 - DNA, 19 bp, Mus musculus
  siRNA target sequence for Aco2 (NM_080633.1,2152-2170).
caggatccacgaaaccaat

SEQ ID NO: 617931 - DNA, 19 bp, Mus musculus
  siRNA target sequence for Aco2 (NM_080633.1,2155-2173).
gatccacgaaaccaatcta

SEQ ID NO: 617932 - DNA, 19 bp, Mus musculus
  siRNA target sequence for Aco2 (NM_080633.1,2159-2177).
cacgaaaccaatctaaaga

SEQ ID NO: 617933 - DNA, 19 bp, Mus musculus
  siRNA target sequence for Aco2 (NM_080633.1,2204-2222).
gctgacccctccgactata

SEQ ID NO: 617934 - DNA, 19 bp, Mus musculus
  siRNA target sequence for Aco2 (NM_080633.1,2207-2225).
gacccctccgactataaca

SEQ ID NO: 617935 - DNA, 19 bp, Mus musculus
  siRNA target sequence for Aco2 (NM_080633.1,2210-2228).
ccctccgactataacaaga

SEQ ID NO: 617936 - DNA, 19 bp, Mus musculus
  siRNA target sequence for Aco2 (NM_080633.1,2211-2229).
cctccgactataacaagat

SEQ ID NO: 617937 - DNA, 19 bp, Mus musculus
  siRNA target sequence for Aco2 (NM_080633.1,2212-2230).
ctccgactataacaagatt

SEQ ID NO: 617938 - DNA, 19 bp, Mus musculus
  siRNA target sequence for Aco2 (NM_080633.1,2214-2232).
ccgactataacaagattca

SEQ ID NO: 617939 - DNA, 19 bp, Mus musculus
  siRNA target sequence for Aco2 (NM_080633.1,2215-2233).
cgactataacaagattcat

SEQ ID NO: 617940 - DNA, 19 bp, Mus musculus
  siRNA target sequence for Aco2 (NM_080633.1,2239-2257).
ggacaagctgaccattcaa

SEQ ID NO: 617941 - DNA, 19 bp, Mus musculus
  siRNA target sequence for Aco2 (NM_080633.1,2286-2304).
ctctgaagtgcgtcatcaa

SEQ ID NO: 617942 - DNA, 19 bp, Mus musculus
  siRNA target sequence for Uros (NM_009479.1,258-276).
cagcggcctggatccatat

SEQ ID NO: 617943 - DNA, 19 bp, Mus musculus
  siRNA target sequence for Uros (NM_009479.1,260-278).
gcggcctggatccatatat

SEQ ID NO: 617944 - DNA, 19 bp, Mus musculus
  siRNA target sequence for Uros (NM_009479.1,263-281).
gcctggatccatatatcca

SEQ ID NO: 617945 - DNA, 19 bp, Mus musculus
  siRNA target sequence for Uros (NM_009479.1,327-345).
gtcatttgagtttatgtct

SEQ ID NO: 617946 - DNA, 19 bp, Mus musculus
  siRNA target sequence for Uros (NM_009479.1,346-364).
ctccccagtttgtcagaaa

SEQ ID NO: 617947 - DNA, 19 bp, Mus musculus
  siRNA target sequence for Uros (NM_009479.1,524-542).
ccaccgcttctctagtgaa

SEQ ID NO: 617948 - DNA, 19 bp, Mus musculus
  siRNA target sequence for Uros (NM_009479.1,525-543).
caccgcttctctagtgaat

SEQ ID NO: 617949 - DNA, 19 bp, Mus musculus
  siRNA target sequence for Uros (NM_009479.1,527-545).
ccgcttctctagtgaataa

SEQ ID NO: 617950 - DNA, 19 bp, Mus musculus
  siRNA target sequence for Uros (NM_009479.1,528-546).
cgcttctctagtgaataaa

SEQ ID NO: 617951 - DNA, 19 bp, Mus musculus
  siRNA target sequence for Uros (NM_009479.1,529-547).
gcttctctagtgaataaaa

SEQ ID NO: 617952 - DNA, 19 bp, Mus musculus
  siRNA target sequence for Uros (NM_009479.1,586-604).
gaaaagcttgctgaatata

SEQ ID NO: 617953 - DNA, 19 bp, Mus musculus
  siRNA target sequence for Uros (NM_009479.1,653-671).
ctatcaaaggagatactct

SEQ ID NO: 617954 - DNA, 19 bp, Mus musculus
  siRNA target sequence for Uros (NM_009479.1,753-771).
gagcctgaagagctactat

SEQ ID NO: 617955 - DNA, 19 bp, Mus musculus
  siRNA target sequence for Uros (NM_009479.1,756-774).
cctgaagagctactatgaa

SEQ ID NO: 617956 - DNA, 19 bp, Mus musculus
  siRNA target sequence for Uros (NM_009479.1,787-805).
ccagccagcatcacgtttt

SEQ ID NO: 617957 - DNA, 19 bp, Mus musculus
  siRNA target sequence for Uros (NM_009479.1,788-806).
cagccagcatcacgttttt

SEQ ID NO: 617958 - DNA, 19 bp, Mus musculus
  siRNA target sequence for Uros (NM_009479.1,790-808).
gccagcatcacgtttttca

SEQ ID NO: 617959 - DNA, 19 bp, Mus musculus
  siRNA target sequence for Uros (NM_009479.1,807-825).
cagtccctccggccttaaa

SEQ ID NO: 617960 - DNA, 19 bp, Mus musculus
  siRNA target sequence for Uros (NM_009479.1,809-827).
gtccctccggccttaaata

SEQ ID NO: 617961 - DNA, 19 bp, Mus musculus
  siRNA target sequence for Uros (NM_009479.1,811-829).
ccctccggccttaaataca

SEQ ID NO: 617962 - DNA, 19 bp, Mus musculus
  siRNA target sequence for Uros (NM_009479.1,837-855).
gtatattcaggcgttatct

SEQ ID NO: 617963 - DNA, 19 bp, Mus musculus
  siRNA target sequence for Uros (NM_009479.1,860-878).
gcagctttgaccagattaa

SEQ ID NO: 617964 - DNA, 19 bp, Mus musculus
  siRNA target sequence for Alad (NM_008525.3,439-457).
ccaggtatggcgtaaacca

SEQ ID NO: 617965 - DNA, 19 bp, Mus musculus
  siRNA target sequence for Alad (NM_008525.3,860-878).
gagctatagtgccaaattt

SEQ ID NO: 617966 - DNA, 19 bp, Mus musculus
  siRNA target sequence for Alad (NM_008525.3,934-952).
gagaccgacgctgttatca

SEQ ID NO: 617967 - DNA, 19 bp, Mus musculus
  siRNA target sequence for Alad (NM_008525.3,992-1010).
ggcccgagacattcaagaa

SEQ ID NO: 617968 - DNA, 19 bp, Mus musculus
  siRNA target sequence for Alad (NM_008525.3,1204-1222).
gagccggtgccgacatcat

SEQ ID NO: 617969 - DNA, 19 bp, Mus musculus
  siRNA target sequence for Alad (NM_008525.3,1206-1224).
gccggtgccgacatcatca

SEQ ID NO: 617970 - DNA, 19 bp, Mus musculus
  siRNA target sequence for Alad (NM_008525.3,1207-1225).
ccggtgccgacatcatcat

SEQ ID NO: 617971 - DNA, 19 bp, Mus musculus
  siRNA target sequence for Fh1 (NM_010209.1,123-141).
cgaatggcaagccaaaatt

SEQ ID NO: 617972 - DNA, 19 bp, Mus musculus
  siRNA target sequence for Fh1 (NM_010209.1,159-177).
gacacctttggtgaattga

SEQ ID NO: 617973 - DNA, 19 bp, Mus musculus
  siRNA target sequence for Fh1 (NM_010209.1,179-197).
ggttccaaccgataagtat

SEQ ID NO: 617974 - DNA, 19 bp, Mus musculus
  siRNA target sequence for Fh1 (NM_010209.1,180-198).
gttccaaccgataagtatt

SEQ ID NO: 617975 - DNA, 19 bp, Mus musculus
  siRNA target sequence for Fh1 (NM_010209.1,201-219).
ggtgctcagaccgtaagat

SEQ ID NO: 617976 - DNA, 19 bp, Mus musculus
  siRNA target sequence for Fh1 (NM_010209.1,204-222).
gctcagaccgtaagatcta

SEQ ID NO: 617977 - DNA, 19 bp, Mus musculus
  siRNA target sequence for Fh1 (NM_010209.1,213-231).
gtaagatctacgatgaact

SEQ ID NO: 617978 - DNA, 19 bp, Mus musculus
  siRNA target sequence for Fh1 (NM_010209.1,217-235).
gatctacgatgaactttaa

SEQ ID NO: 617979 - DNA, 19 bp, Mus musculus
  siRNA target sequence for Fh1 (NM_010209.1,220-238).
ctacgatgaactttaagat

SEQ ID NO: 617980 - DNA, 19 bp, Mus musculus
  siRNA target sequence for Fh1 (NM_010209.1,260-278).
gccaatcccagtcattcaa

SEQ ID NO: 617981 - DNA, 19 bp, Mus musculus
  siRNA target sequence for Fh1 (NM_010209.1,276-294).
caagctttcggcatcttga

SEQ ID NO: 617982 - DNA, 19 bp, Mus musculus
  siRNA target sequence for Fh1 (NM_010209.1,301-319).
ctgctgctgaagtaaacca

SEQ ID NO: 617983 - DNA, 19 bp, Mus musculus
  siRNA target sequence for Fh1 (NM_010209.1,372-390).
gaggtagctgaaggtaaat

SEQ ID NO: 617984 - DNA, 19 bp, Mus musculus
  siRNA target sequence for Fh1 (NM_010209.1,374-392).
ggtagctgaaggtaaatta

SEQ ID NO: 617985 - DNA, 19 bp, Mus musculus
  siRNA target sequence for Fh1 (NM_010209.1,453-471).
gtaaatgaagtcattagca

SEQ ID NO: 617986 - DNA, 19 bp, Mus musculus
  siRNA target sequence for Fh1 (NM_010209.1,521-539).
gcaccccaatgatcatgtt

SEQ ID NO: 617987 - DNA, 19 bp, Mus musculus
  siRNA target sequence for Fh1 (NM_010209.1,522-540).
caccccaatgatcatgtta

SEQ ID NO: 617988 - DNA, 19 bp, Mus musculus
  siRNA target sequence for Fh1 (NM_010209.1,734-752).
ggaattcagtggttacgtt

SEQ ID NO: 617989 - DNA, 19 bp, Mus musculus
  siRNA target sequence for Fh1 (NM_010209.1,787-805).
ccgccatgccaagaatcta

SEQ ID NO: 617990 - DNA, 19 bp, Mus musculus
  siRNA target sequence for Fh1 (NM_010209.1,831-849).
gtggggacggggttaaaca

SEQ ID NO: 617991 - DNA, 19 bp, Mus musculus
  siRNA target sequence for Fh1 (NM_010209.1,985-1003).
ctgccgcctgcagtctaat

SEQ ID NO: 617992 - DNA, 19 bp, Mus musculus
  siRNA target sequence for Fh1 (NM_010209.1,987-1005).
gccgcctgcagtctaatga

SEQ ID NO: 617993 - DNA, 19 bp, Mus musculus
  siRNA target sequence for Fh1 (NM_010209.1,992-1010).
ctgcagtctaatgaagata

SEQ ID NO: 617994 - DNA, 19 bp, Mus musculus
  siRNA target sequence for Fh1 (NM_010209.1,1004-1022).
gaagatagcgaatgatatt

SEQ ID NO: 617995 - DNA, 19 bp, Mus musculus
  siRNA target sequence for Fh1 (NM_010209.1,1217-1235).
gtttaaaccaatgatgatt

SEQ ID NO: 617996 - DNA, 19 bp, Mus musculus
  siRNA target sequence for Fh1 (NM_010209.1,1323-1341).
gagcggatcaacaagctaa

SEQ ID NO: 617997 - DNA, 19 bp, Mus musculus
  siRNA target sequence for Fh1 (NM_010209.1,1326-1344).
cggatcaacaagctaatga

SEQ ID NO: 617998 - DNA, 19 bp, Mus musculus
  siRNA target sequence for Fh1 (NM_010209.1,1327-1345).
ggatcaacaagctaatgaa

SEQ ID NO: 617999 - DNA, 19 bp, Mus musculus
  siRNA target sequence for Fh1 (NM_010209.1,1328-1346).
gatcaacaagctaatgaat

SEQ ID NO: 618000 - DNA, 19 bp, Mus musculus
  siRNA target sequence for Fh1 (NM_010209.1,1338-1356).
ctaatgaatgagtctttaa

SEQ ID NO: 618001 - DNA, 19 bp, Mus musculus
  siRNA target sequence for Fh1 (NM_010209.1,1361-1379).
ggtcacagctcttaatcca

SEQ ID NO: 618002 - DNA, 19 bp, Mus musculus
  siRNA target sequence for Fh1 (NM_010209.1,1366-1384).
cagctcttaatccacatat

SEQ ID NO: 618003 - DNA, 19 bp, Mus musculus
  siRNA target sequence for Fh1 (NM_010209.1,1445-1463).
ggaaacggctattgaactt

SEQ ID NO: 618004 - DNA, 19 bp, Mus musculus
  siRNA target sequence for Fh1 (NM_010209.1,1474-1492).
cagcagagcagtttgatga

SEQ ID NO: 618005 - DNA, 19 bp, Mus musculus
  siRNA target sequence for Cbs (NM_144855.1,316-334).
gataccccaagcagatgta

SEQ ID NO: 618006 - DNA, 19 bp, Mus musculus
  siRNA target sequence for Cbs (NM_144855.1,390-408).
caaatcccccaaaatttta

SEQ ID NO: 618007 - DNA, 19 bp, Mus musculus
  siRNA target sequence for Cbs (NM_144855.1,398-416).
ccaaaattttaccagatat

SEQ ID NO: 618008 - DNA, 19 bp, Mus musculus
  siRNA target sequence for Cbs (NM_144855.1,437-455).
cccctatggtcagaatcaa

SEQ ID NO: 618009 - DNA, 19 bp, Mus musculus
  siRNA target sequence for Cbs (NM_144855.1,439-457).
cctatggtcagaatcaaca

SEQ ID NO: 618010 - DNA, 19 bp, Mus musculus
  siRNA target sequence for Cbs (NM_144855.1,440-458).
ctatggtcagaatcaacaa

SEQ ID NO: 618011 - DNA, 19 bp, Mus musculus
  siRNA target sequence for Cbs (NM_144855.1,566-584).
ctgagcgagctggaaactt

SEQ ID NO: 618012 - DNA, 19 bp, Mus musculus
  siRNA target sequence for Cbs (NM_144855.1,588-606).
gcctggagacactatcatt

SEQ ID NO: 618013 - DNA, 19 bp, Mus musculus
  siRNA target sequence for Cbs (NM_144855.1,590-608).
ctggagacactatcattga

SEQ ID NO: 618014 - DNA, 19 bp, Mus musculus
  siRNA target sequence for Cbs (NM_144855.1,662-680).
gctatcgctgcattatcgt

SEQ ID NO: 618015 - DNA, 19 bp, Mus musculus
  siRNA target sequence for Cbs (NM_144855.1,800-818).
ggcgactgaagaacgaaat

SEQ ID NO: 618016 - DNA, 19 bp, Mus musculus
  siRNA target sequence for Cbs (NM_144855.1,810-828).
gaacgaaatccctaattct

SEQ ID NO: 618017 - DNA, 19 bp, Mus musculus
  siRNA target sequence for Cbs (NM_144855.1,908-926).
gtgacgggaagctggatat

SEQ ID NO: 618018 - DNA, 19 bp, Mus musculus
  siRNA target sequence for Cbs (NM_144855.1,987-1005).
gaagtgccctggctgtaaa

SEQ ID NO: 618019 - DNA, 19 bp, Mus musculus
  siRNA target sequence for Cbs (NM_144855.1,992-1010).
gccctggctgtaaaatcat

SEQ ID NO: 618020 - DNA, 19 bp, Mus musculus
  siRNA target sequence for Cbs (NM_144855.1,1091-1109).
ggattggctacgacttcat

SEQ ID NO: 618021 - DNA, 19 bp, Mus musculus
  siRNA target sequence for Cbs (NM_144855.1,1135-1153).
gtggataagtggttcaaga

SEQ ID NO: 618022 - DNA, 19 bp, Mus musculus
  siRNA target sequence for Cbs (NM_144855.1,1303-1321).
gactctgtgcggaactaca

SEQ ID NO: 618023 - DNA, 19 bp, Mus musculus
  siRNA target sequence for Cbs (NM_144855.1,1401-1419).
gtggcgtctgcgtgttcaa

SEQ ID NO: 618024 - DNA, 19 bp, Mus musculus
  siRNA target sequence for Cbs (NM_144855.1,1403-1421).
ggcgtctgcgtgttcaaga

SEQ ID NO: 618025 - DNA, 19 bp, Mus musculus
  siRNA target sequence for Cbs (NM_144855.1,1822-1840).
gccattgacctgctaaact

SEQ ID NO: 618026 - DNA, 19 bp, Mus musculus
  siRNA target sequence for Cbs (NM_144855.1,1823-1841).
ccattgacctgctaaactt

SEQ ID NO: 618027 - DNA, 19 bp, Mus musculus
  siRNA target sequence for Cbs (NM_178224.1,1701-1719).
cacgagcagatccaatact

SEQ ID NO: 618028 - DNA, 19 bp, Mus musculus
  siRNA target sequence for BC022133 (NM_144940.1,92-110).
ccacatgctccggttagaa

SEQ ID NO: 618029 - DNA, 19 bp, Mus musculus
  siRNA target sequence for BC022133 (NM_144940.1,150-168).
ggaatgccttgcgctattt

SEQ ID NO: 618030 - DNA, 19 bp, Mus musculus
  siRNA target sequence for BC022133 (NM_144940.1,221-239).
cagtttggacacatctaca

SEQ ID NO: 618031 - DNA, 19 bp, Mus musculus
  siRNA target sequence for BC022133 (NM_144940.1,315-333).
cagccatcatgcacatgat

SEQ ID NO: 618032 - DNA, 19 bp, Mus musculus
  siRNA target sequence for BC022133 (NM_144940.1,390-408).
gaggcaacgggcaagtgtt

SEQ ID NO: 618033 - DNA, 19 bp, Mus musculus
  siRNA target sequence for BC022133 (NM_144940.1,467-485).
cagactctggtcatgtaca

SEQ ID NO: 618034 - DNA, 19 bp, Mus musculus
  siRNA target sequence for BC022133 (NM_144940.1,570-588).
cctccaggacagagtatga

SEQ ID NO: 618035 - DNA, 19 bp, Mus musculus
  siRNA target sequence for BC022133 (NM_144940.1,601-619).
cttgggggtgaccatgtat

SEQ ID NO: 618036 - DNA, 19 bp, Mus musculus
  siRNA target sequence for BC022133 (NM_144940.1,731-749).
gcagggaaggtctttgtca

SEQ ID NO: 618037 - DNA, 19 bp, Mus musculus
  siRNA target sequence for BC022133 (NM_144940.1,829-847).
ggataaagctgcacttgta

SEQ ID NO: 618038 - DNA, 19 bp, Mus musculus
  siRNA target sequence for BC022133 (NM_144940.1,1048-1066).
ctgtcacaacccgttcaat

SEQ ID NO: 618039 - DNA, 19 bp, Mus musculus
  siRNA target sequence for BC022133 (NM_144940.1,1188-1206).
ggttggcccaagagaagtt

SEQ ID NO: 618040 - DNA, 19 bp, Mus musculus
  siRNA target sequence for BC022133 (NM_144940.1,1308-1326).
cctatgtccagcacattat

SEQ ID NO: 618041 - DNA, 19 bp, Mus musculus
  siRNA target sequence for BC022133 (NM_144940.1,1318-1336).
gcacattatgggggatata

SEQ ID NO: 618042 - DNA, 19 bp, Mus musculus
  siRNA target sequence for BC022133 (NM_144940.1,1319-1337).
cacattatgggggatatat

SEQ ID NO: 618043 - DNA, 19 bp, Mus musculus
  siRNA target sequence for BC022133 (NM_144940.1,1461-1479).
ctgtgaagctacagtatat

SEQ ID NO: 618044 - DNA, 19 bp, Mus musculus
  siRNA target sequence for BC022133 (NM_144940.1,1675-1693).
cttcagggagacttcgaat

SEQ ID NO: 618045 - DNA, 19 bp, Mus musculus
  siRNA target sequence for BC022133 (NM_144940.1,1678-1696).
cagggagacttcgaatatt

SEQ ID NO: 618046 - DNA, 19 bp, Mus musculus
  siRNA target sequence for BC022133 (NM_144940.1,1680-1698).
gggagacttcgaatattta

SEQ ID NO: 618047 - DNA, 19 bp, Mus musculus
  siRNA target sequence for BC022133 (NM_144940.1,1768-1786).
ctgggttgcacttcacaat

SEQ ID NO: 618048 - DNA, 19 bp, Mus musculus
  siRNA target sequence for BC022133 (NM_144940.1,1800-1818).
gctggggtgaagtcatcaa

SEQ ID NO: 618049 - DNA, 19 bp, Mus musculus
  siRNA target sequence for MGC59076 (NM_178413.3,187-205).
cctcttctctggttatgca

SEQ ID NO: 618050 - DNA, 19 bp, Mus musculus
  siRNA target sequence for MGC59076 (NM_178413.3,323-341).
ggtctggagcttattccaa

SEQ ID NO: 618051 - DNA, 19 bp, Mus musculus
  siRNA target sequence for MGC59076 (NM_178413.3,339-357).
caagacatgacttaaatga

SEQ ID NO: 618052 - DNA, 19 bp, Mus musculus
  siRNA target sequence for MGC59076 (NM_178413.3,378-396).
gcagattccgccacagaaa

SEQ ID NO: 618053 - DNA, 19 bp, Mus musculus
  siRNA target sequence for MGC59076 (NM_178413.3,379-397).
cagattccgccacagaaat

SEQ ID NO: 618054 - DNA, 19 bp, Mus musculus
  siRNA target sequence for MGC59076 (NM_178413.3,381-399).
gattccgccacagaaatgt

SEQ ID NO: 618055 - DNA, 19 bp, Mus musculus
  siRNA target sequence for MGC59076 (NM_178413.3,445-463).
gtggcatggggtcacatat

SEQ ID NO: 618056 - DNA, 19 bp, Mus musculus
  siRNA target sequence for MGC59076 (NM_178413.3,682-700).
ggagaacgttcatgtgttt

SEQ ID NO: 618057 - DNA, 19 bp, Mus musculus
  siRNA target sequence for MGC59076 (NM_178413.3,833-851).
caccacttcttcgcttatt

SEQ ID NO: 618058 - DNA, 19 bp, Mus musculus
  siRNA target sequence for MGC59076 (NM_178413.3,939-957).
ggtgcattgctcagaagat

SEQ ID NO: 618059 - DNA, 19 bp, Mus musculus
  siRNA target sequence for MGC59076 (NM_178413.3,955-973).
gatgggcctgcctatctgt

SEQ ID NO: 618060 - DNA, 19 bp, Mus musculus
  siRNA target sequence for MGC59076 (NM_178413.3,988-1006).
gaaccgcaacgacatcatt

SEQ ID NO: 618061 - DNA, 19 bp, Mus musculus
  siRNA target sequence for MGC59076 (NM_178413.3,992-1010).
cgcaacgacatcattcaca

SEQ ID NO: 618062 - DNA, 19 bp, Mus musculus
  siRNA target sequence for MGC59076 (NM_178413.3,1311-1329).
cggccacagcggtgaacta

SEQ ID NO: 618063 - DNA, 19 bp, Mus musculus
  siRNA target sequence for MGC59076 (NM_178413.3,1317-1335).
cagcggtgaactaccatta

SEQ ID NO: 618064 - DNA, 19 bp, Mus musculus
  siRNA target sequence for MGC59076 (NM_178413.3,1320-1338).
cggtgaactaccattacca

SEQ ID NO: 618065 - DNA, 19 bp, Mus musculus
  siRNA target sequence for Pts (NM_011220.2,88-106).
catctctgagcgatgaaga

SEQ ID NO: 618066 - DNA, 19 bp, Mus musculus
  siRNA target sequence for Pts (NM_011220.2,95-113).
gagcgatgaagagaactta

SEQ ID NO: 618067 - DNA, 19 bp, Mus musculus
  siRNA target sequence for Pts (NM_011220.2,98-116).
cgatgaagagaacttaaga

SEQ ID NO: 618068 - DNA, 19 bp, Mus musculus
  siRNA target sequence for Pts (NM_011220.2,151-169).
ggcacaactataaagttgt

SEQ ID NO: 618069 - DNA, 19 bp, Mus musculus
  siRNA target sequence for Pts (NM_011220.2,173-191).
gacagtccatggagagatt

SEQ ID NO: 618070 - DNA, 19 bp, Mus musculus
  siRNA target sequence for Pts (NM_011220.2,202-220).
caggaatggttatgaattt

SEQ ID NO: 618071 - DNA, 19 bp, Mus musculus
  siRNA target sequence for Pts (NM_011220.2,223-241).
ccgacctcaaagaatacat

SEQ ID NO: 618072 - DNA, 19 bp, Mus musculus
  siRNA target sequence for Pts (NM_011220.2,309-327).
gctgtgagcacgacagaaa

SEQ ID NO: 618073 - DNA, 19 bp, Mus musculus
  siRNA target sequence for Pts (NM_011220.2,314-332).
gagcacgacagaaaatgta

SEQ ID NO: 618074 - DNA, 19 bp, Mus musculus
  siRNA target sequence for Pts (NM_011220.2,370-388).
cagtgggagctctttataa

SEQ ID NO: 618075 - DNA, 19 bp, Mus musculus
  siRNA target sequence for Pts (NM_011220.2,410-428).
caacaacatcgtagtctat

SEQ ID NO: 618076 - DNA, 19 bp, Mus musculus
  siRNA target sequence for Pts (NM_011220.2,413-431).
caacatcgtagtctataaa

SEQ ID NO: 618077 - DNA, 19 bp, Mus musculus
  siRNA target sequence for Pts (NM_011220.2,416-434).
catcgtagtctataaagga

SEQ ID NO: 618078 - DNA, 19 bp, Mus musculus
  siRNA target sequence for Gad1 (NM_008077.2,223-241).
cgcgggagcggatcctaat

SEQ ID NO: 618079 - DNA, 19 bp, Mus musculus
  siRNA target sequence for Gad1 (NM_008077.2,224-242).
gcgggagcggatcctaata

SEQ ID NO: 618080 - DNA, 19 bp, Mus musculus
  siRNA target sequence for Gad1 (NM_008077.2,227-245).
ggagcggatcctaatacta

SEQ ID NO: 618081 - DNA, 19 bp, Mus musculus
  siRNA target sequence for Gad1 (NM_008077.2,253-271).
gcgccctacaacgtatgat

SEQ ID NO: 618082 - DNA, 19 bp, Mus musculus
  siRNA target sequence for Gad1 (NM_008077.2,254-272).
cgccctacaacgtatgata

SEQ ID NO: 618083 - DNA, 19 bp, Mus musculus
  siRNA target sequence for Gad1 (NM_008077.2,256-274).
ccctacaacgtatgatact

SEQ ID NO: 618084 - DNA, 19 bp, Mus musculus
  siRNA target sequence for Gad1 (NM_008077.2,257-275).
cctacaacgtatgatactt

SEQ ID NO: 618085 - DNA, 19 bp, Mus musculus
  siRNA target sequence for Gad1 (NM_008077.2,409-427).
gctttcctgtgaaaacagt

SEQ ID NO: 618086 - DNA, 19 bp, Mus musculus
  siRNA target sequence for Gad1 (NM_008077.2,469-487).
caacctgtttgctcaagat

SEQ ID NO: 618087 - DNA, 19 bp, Mus musculus
  siRNA target sequence for Gad1 (NM_008077.2,559-577).
ctatgtccgcaagacattt

SEQ ID NO: 618088 - DNA, 19 bp, Mus musculus
  siRNA target sequence for Gad1 (NM_008077.2,724-742).
cacaggtcaccctcgattt

SEQ ID NO: 618089 - DNA, 19 bp, Mus musculus
  siRNA target sequence for Gad1 (NM_008077.2,726-744).
caggtcaccctcgattttt

SEQ ID NO: 618090 - DNA, 19 bp, Mus musculus
  siRNA target sequence for Gad1 (NM_008077.2,728-746).
ggtcaccctcgatttttca

SEQ ID NO: 618091 - DNA, 19 bp, Mus musculus
  siRNA target sequence for Gad1 (NM_008077.2,756-774).
ctactggtttggatatcat

SEQ ID NO: 618092 - DNA, 19 bp, Mus musculus
  siRNA target sequence for Gad1 (NM_008077.2,761-779).
ggtttggatatcattggtt

SEQ ID NO: 618093 - DNA, 19 bp, Mus musculus
  siRNA target sequence for Gad1 (NM_008077.2,762-780).
gtttggatatcattggttt

SEQ ID NO: 618094 - DNA, 19 bp, Mus musculus
  siRNA target sequence for Gad1 (NM_008077.2,766-784).
ggatatcattggtttagct

SEQ ID NO: 618095 - DNA, 19 bp, Mus musculus
  siRNA target sequence for Gad1 (NM_008077.2,798-816).
catcgactgccaataccaa

SEQ ID NO: 618096 - DNA, 19 bp, Mus musculus
  siRNA target sequence for Gad1 (NM_008077.2,801-819).
cgactgccaataccaatat

SEQ ID NO: 618097 - DNA, 19 bp, Mus musculus
  siRNA target sequence for Gad1 (NM_008077.2,804-822).
ctgccaataccaatatgtt

SEQ ID NO: 618098 - DNA, 19 bp, Mus musculus
  siRNA target sequence for Gad1 (NM_008077.2,857-875).
gaacagattactcttaaga

SEQ ID NO: 618099 - DNA, 19 bp, Mus musculus
  siRNA target sequence for Gad1 (NM_008077.2,860-878).
cagattactcttaagaaga

SEQ ID NO: 618100 - DNA, 19 bp, Mus musculus
  siRNA target sequence for Gad1 (NM_008077.2,886-904).
gatcgttggatggtcaaat

SEQ ID NO: 618101 - DNA, 19 bp, Mus musculus
  siRNA target sequence for Gad1 (NM_008077.2,889-907).
cgttggatggtcaaataaa

SEQ ID NO: 618102 - DNA, 19 bp, Mus musculus
  siRNA target sequence for Gad1 (NM_008077.2,929-947).
cctgggggagccatatcca

SEQ ID NO: 618103 - DNA, 19 bp, Mus musculus
  siRNA target sequence for Gad1 (NM_008077.2,930-948).
ctgggggagccatatccaa

SEQ ID NO: 618104 - DNA, 19 bp, Mus musculus
  siRNA target sequence for Gad1 (NM_008077.2,932-950).
gggggagccatatccaata

SEQ ID NO: 618105 - DNA, 19 bp, Mus musculus
  siRNA target sequence for Gad1 (NM_008077.2,936-954).
gagccatatccaatatgta

SEQ ID NO: 618106 - DNA, 19 bp, Mus musculus
  siRNA target sequence for Gad1 (NM_008077.2,938-956).
gccatatccaatatgtaca

SEQ ID NO: 618107 - DNA, 19 bp, Mus musculus
  siRNA target sequence for Gad1 (NM_008077.2,965-983).
gctgctcgttacaagtact

SEQ ID NO: 618108 - DNA, 19 bp, Mus musculus
  siRNA target sequence for Gad1 (NM_008077.2,966-984).
ctgctcgttacaagtactt

SEQ ID NO: 618109 - DNA, 19 bp, Mus musculus
  siRNA target sequence for Gad1 (NM_008077.2,1039-1057).
ctcagaacacagtcactat

SEQ ID NO: 618110 - DNA, 19 bp, Mus musculus
  siRNA target sequence for Gad1 (NM_008077.2,1043-1061).
gaacacagtcactattcca

SEQ ID NO: 618111 - DNA, 19 bp, Mus musculus
  siRNA target sequence for Gad1 (NM_008077.2,1076-1094).
gctgcgcttggctttggaa

SEQ ID NO: 618112 - DNA, 19 bp, Mus musculus
  siRNA target sequence for Gad1 (NM_008077.2,1086-1104).
gctttggaaccgacaatgt

SEQ ID NO: 618113 - DNA, 19 bp, Mus musculus
  siRNA target sequence for Gad1 (NM_008077.2,1091-1109).
ggaaccgacaatgtgattt

SEQ ID NO: 618114 - DNA, 19 bp, Mus musculus
  siRNA target sequence for Gad1 (NM_008077.2,1092-1110).
gaaccgacaatgtgatttt

SEQ ID NO: 618115 - DNA, 19 bp, Mus musculus
  siRNA target sequence for Gad1 (NM_008077.2,1135-1153).
gataattccggctgattta

SEQ ID NO: 618116 - DNA, 19 bp, Mus musculus
  siRNA target sequence for Gad1 (NM_008077.2,1193-1211).
cccctttatgtcaatgcaa

SEQ ID NO: 618117 - DNA, 19 bp, Mus musculus
  siRNA target sequence for Gad1 (NM_008077.2,1212-1230).
ccgcaggcacgactgttta

SEQ ID NO: 618118 - DNA, 19 bp, Mus musculus
  siRNA target sequence for Gad1 (NM_008077.2,1240-1258).
cgatccaatccaggaaatt

SEQ ID NO: 618119 - DNA, 19 bp, Mus musculus
  siRNA target sequence for Gad1 (NM_008077.2,1252-1270).
ggaaattgcggacatatgt

SEQ ID NO: 618120 - DNA, 19 bp, Mus musculus
  siRNA target sequence for Gad1 (NM_008077.2,1259-1277).
gcggacatatgtgagaaat

SEQ ID NO: 618121 - DNA, 19 bp, Mus musculus
  siRNA target sequence for Gad1 (NM_008077.2,1526-1544).
ggggacaaggcgattcagt

SEQ ID NO: 618122 - DNA, 19 bp, Mus musculus
  siRNA target sequence for Gad1 (NM_008077.2,1596-1614).
gcaccgtgggatttgaaaa

SEQ ID NO: 618123 - DNA, 19 bp, Mus musculus
  siRNA target sequence for Gad1 (NM_008077.2,1654-1672).
cgccaagattaaaaacaga

SEQ ID NO: 618124 - DNA, 19 bp, Mus musculus
  siRNA target sequence for Gad1 (NM_008077.2,1678-1696).
gtttgagatggttttcgat

SEQ ID NO: 618125 - DNA, 19 bp, Mus musculus
  siRNA target sequence for Gad1 (NM_008077.2,1698-1716).
gtgagcctgagcacacaaa

SEQ ID NO: 618126 - DNA, 19 bp, Mus musculus
  siRNA target sequence for Gad1 (NM_008077.2,1764-1782).
gccctgagcgacgagaaaa

SEQ ID NO: 618127 - DNA, 19 bp, Mus musculus
  siRNA target sequence for Gad2 (NM_008078.1,441-459).
gccaggtggcccaaaagtt

SEQ ID NO: 618128 - DNA, 19 bp, Mus musculus
  siRNA target sequence for Gad2 (NM_008078.1,600-618).
ccaaaggggatgtcaacta

SEQ ID NO: 618129 - DNA, 19 bp, Mus musculus
  siRNA target sequence for Gad2 (NM_008078.1,683-701).
ctacaagatgttatgaaca

SEQ ID NO: 618130 - DNA, 19 bp, Mus musculus
  siRNA target sequence for Gad2 (NM_008078.1,710-728).
cagtacgtggtgaaaagtt

SEQ ID NO: 618131 - DNA, 19 bp, Mus musculus
  siRNA target sequence for Gad2 (NM_008078.1,715-733).
cgtggtgaaaagtttcgat

SEQ ID NO: 618132 - DNA, 19 bp, Mus musculus
  siRNA target sequence for Gad2 (NM_008078.1,716-734).
gtggtgaaaagtttcgata

SEQ ID NO: 618133 - DNA, 19 bp, Mus musculus
  siRNA target sequence for Gad2 (NM_008078.1,719-737).
gtgaaaagtttcgatagat

SEQ ID NO: 618134 - DNA, 19 bp, Mus musculus
  siRNA target sequence for Gad2 (NM_008078.1,721-739).
gaaaagtttcgatagatca

SEQ ID NO: 618135 - DNA, 19 bp, Mus musculus
  siRNA target sequence for Gad2 (NM_008078.1,726-744).
gtttcgatagatcaactaa

SEQ ID NO: 618136 - DNA, 19 bp, Mus musculus
  siRNA target sequence for Gad2 (NM_008078.1,738-756).
caactaaagtgatcgattt

SEQ ID NO: 618137 - DNA, 19 bp, Mus musculus
  siRNA target sequence for Gad2 (NM_008078.1,741-759).
ctaaagtgatcgatttcca

SEQ ID NO: 618138 - DNA, 19 bp, Mus musculus
  siRNA target sequence for Gad2 (NM_008078.1,770-788).
gagcttcttcaagagtata

SEQ ID NO: 618139 - DNA, 19 bp, Mus musculus
  siRNA target sequence for Gad2 (NM_008078.1,772-790).
gcttcttcaagagtataat

SEQ ID NO: 618140 - DNA, 19 bp, Mus musculus
  siRNA target sequence for Gad2 (NM_008078.1,773-791).
cttcttcaagagtataatt

SEQ ID NO: 618141 - DNA, 19 bp, Mus musculus
  siRNA target sequence for Gad2 (NM_008078.1,799-817).
ggcagaccaaccgcaaaat

SEQ ID NO: 618142 - DNA, 19 bp, Mus musculus
  siRNA target sequence for Gad2 (NM_008078.1,832-850).
gacgcattgccaaacaact

SEQ ID NO: 618143 - DNA, 19 bp, Mus musculus
  siRNA target sequence for Gad2 (NM_008078.1,835-853).
gcattgccaaacaactcta

SEQ ID NO: 618144 - DNA, 19 bp, Mus musculus
  siRNA target sequence for Gad2 (NM_008078.1,840-858).
gccaaacaactctaaaata

SEQ ID NO: 618145 - DNA, 19 bp, Mus musculus
  siRNA target sequence for Gad2 (NM_008078.1,870-888).
cagggcatccccgatattt

SEQ ID NO: 618146 - DNA, 19 bp, Mus musculus
  siRNA target sequence for Gad2 (NM_008078.1,872-890).
gggcatccccgatatttta

SEQ ID NO: 618147 - DNA, 19 bp, Mus musculus
  siRNA target sequence for Gad2 (NM_008078.1,873-891).
ggcatccccgatattttaa

SEQ ID NO: 618148 - DNA, 19 bp, Mus musculus
  siRNA target sequence for Gad2 (NM_008078.1,874-892).
gcatccccgatattttaat

SEQ ID NO: 618149 - DNA, 19 bp, Mus musculus
  siRNA target sequence for Gad2 (NM_008078.1,900-918).
ctactggattggatatggt

SEQ ID NO: 618150 - DNA, 19 bp, Mus musculus
  siRNA target sequence for Gad2 (NM_008078.1,948-966).
cagcaaacactaacatgtt

SEQ ID NO: 618151 - DNA, 19 bp, Mus musculus
  siRNA target sequence for Gad2 (NM_008078.1,986-1004).
gtatttgtgctgctagaat

SEQ ID NO: 618152 - DNA, 19 bp, Mus musculus
  siRNA target sequence for Gad2 (NM_008078.1,994-1012).
gctgctagaatatgttaca

SEQ ID NO: 618153 - DNA, 19 bp, Mus musculus
  siRNA target sequence for Gad2 (NM_008078.1,998-1016).
ctagaatatgttacactaa

SEQ ID NO: 618154 - DNA, 19 bp, Mus musculus
  siRNA target sequence for Gad2 (NM_008078.1,1050-1068).
gctctggcgatggaatctt

SEQ ID NO: 618155 - DNA, 19 bp, Mus musculus
  siRNA target sequence for Gad2 (NM_008078.1,1051-1069).
ctctggcgatggaatcttt

SEQ ID NO: 618156 - DNA, 19 bp, Mus musculus
  siRNA target sequence for Gad2 (NM_008078.1,1106-1124).
ctcattgcccgctataaga

SEQ ID NO: 618157 - DNA, 19 bp, Mus musculus
  siRNA target sequence for Gad2 (NM_008078.1,1194-1212).
gtcacttttctctcaagaa

SEQ ID NO: 618158 - DNA, 19 bp, Mus musculus
  siRNA target sequence for Gad2 (NM_008078.1,1236-1254).
gaacagacagtgtgattct

SEQ ID NO: 618159 - DNA, 19 bp, Mus musculus
  siRNA target sequence for Gad2 (NM_008078.1,1239-1257).
cagacagtgtgattctgat

SEQ ID NO: 618160 - DNA, 19 bp, Mus musculus
  siRNA target sequence for Gad2 (NM_008078.1,1241-1259).
gacagtgtgattctgatta

SEQ ID NO: 618161 - DNA, 19 bp, Mus musculus
  siRNA target sequence for Gad2 (NM_008078.1,1263-1281).
gtgacgagagagggaaaat

SEQ ID NO: 618162 - DNA, 19 bp, Mus musculus
  siRNA target sequence for Gad2 (NM_008078.1,1267-1285).
cgagagagggaaaatgatt

SEQ ID NO: 618163 - DNA, 19 bp, Mus musculus
  siRNA target sequence for Gad2 (NM_008078.1,1282-1300).
gattccatctgatcttgaa

SEQ ID NO: 618164 - DNA, 19 bp, Mus musculus
  siRNA target sequence for Gad2 (NM_008078.1,1369-1387).
cgtgtatggggcttttgat

SEQ ID NO: 618165 - DNA, 19 bp, Mus musculus
  siRNA target sequence for Gad2 (NM_008078.1,1406-1424).
gacatctgcaaaaagtata

SEQ ID NO: 618166 - DNA, 19 bp, Mus musculus
  siRNA target sequence for Gad2 (NM_008078.1,1452-1470).
ggggtggagggttactgat

SEQ ID NO: 618167 - DNA, 19 bp, Mus musculus
  siRNA target sequence for Gad2 (NM_008078.1,1466-1484).
ctgatgtcccggaaacaca

SEQ ID NO: 618168 - DNA, 19 bp, Mus musculus
  siRNA target sequence for Gad2 (NM_008078.1,1778-1796).
gagctagcagagtatttat

SEQ ID NO: 618169 - DNA, 19 bp, Mus musculus
  siRNA target sequence for Gad2 (NM_008078.1,1784-1802).
gcagagtatttatacacta

SEQ ID NO: 618170 - DNA, 19 bp, Mus musculus
  siRNA target sequence for Gad2 (NM_008078.1,1785-1803).
cagagtatttatacactat

SEQ ID NO: 618171 - DNA, 19 bp, Mus musculus
  siRNA target sequence for Gad2 (NM_008078.1,1821-1839).
gctatgaaatggtgtttga

SEQ ID NO: 618172 - DNA, 19 bp, Mus musculus
  siRNA target sequence for Gad2 (NM_008078.1,1822-1840).
ctatgaaatggtgtttgat

SEQ ID NO: 618173 - DNA, 19 bp, Mus musculus
  siRNA target sequence for Gad2 (NM_008078.1,1893-1911).
gcactctggaagacaatga

SEQ ID NO: 618174 - DNA, 19 bp, Mus musculus
  siRNA target sequence for Gad2 (NM_008078.1,1917-1935).
gaatgagccgcctctcaaa

SEQ ID NO: 618175 - DNA, 19 bp, Mus musculus
  siRNA target sequence for Gad2 (NM_008078.1,2046-2064).
cagcaactcaccaagacat

SEQ ID NO: 618176 - DNA, 19 bp, Mus musculus
  siRNA target sequence for Gad2 (NM_008078.1,2090-2108).
cgcctcggacaagatttgt

SEQ ID NO: 618177 - DNA, 19 bp, Mus musculus
  siRNA target sequence for Urod (NM_009478.1,295-313).
ggttcggactccagaattt

SEQ ID NO: 618178 - DNA, 19 bp, Mus musculus
  siRNA target sequence for Urod (NM_009478.1,401-419).
ccgctacttaccagagttt

SEQ ID NO: 618179 - DNA, 19 bp, Mus musculus
  siRNA target sequence for Urod (NM_009478.1,402-420).
cgctacttaccagagttta

SEQ ID NO: 618180 - DNA, 19 bp, Mus musculus
  siRNA target sequence for Urod (NM_009478.1,533-551).
ctctgacatccttgttgta

SEQ ID NO: 618181 - DNA, 19 bp, Mus musculus
  siRNA target sequence for Urod (NM_009478.1,718-736).
ccggacgtgtgccactaat

SEQ ID NO: 618182 - DNA, 19 bp, Mus musculus
  siRNA target sequence for Urod (NM_009478.1,719-737).
cggacgtgtgccactaatt

SEQ ID NO: 618183 - DNA, 19 bp, Mus musculus
  siRNA target sequence for Urod (NM_009478.1,873-891).
gttctggtcccatacctaa

SEQ ID NO: 618184 - DNA, 19 bp, Mus musculus
  siRNA target sequence for Urod (NM_009478.1,878-896).
ggtcccatacctaatagga

SEQ ID NO: 618185 - DNA, 19 bp, Mus musculus
  siRNA target sequence for Urod (NM_009478.1,918-936).
gcattgcagctctttgagt

SEQ ID NO: 618186 - DNA, 19 bp, Mus musculus
  siRNA target sequence for Urod (NM_009478.1,935-953).
gtcccacgcaggacatctt

SEQ ID NO: 618187 - DNA, 19 bp, Mus musculus
  siRNA target sequence for Urod (NM_009478.1,1196-1214).
ggatccctgtgccttgtat

SEQ ID NO: 618188 - DNA, 19 bp, Mus musculus
  siRNA target sequence for Urod (NM_009478.1,1234-1252).
gtcggctggtgcagcaaat

SEQ ID NO: 618189 - DNA, 19 bp, Mus musculus
  siRNA target sequence for Urod (NM_009478.1,1344-1362).
gatgctgtacacaaacatt

SEQ ID NO: 618190 - DNA, 19 bp, Mus musculus
  siRNA target sequence for Urod (NM_009478.1,1365-1383).
cgcctgcttcgacagaatt

SEQ ID NO: 618191 - DNA, 19 bp, Mus musculus
  siRNA target sequence for Hdc (NM_008230.4,139-157).
cgagctagagggaaagaga

SEQ ID NO: 618192 - DNA, 19 bp, Mus musculus
  siRNA target sequence for Hdc (NM_008230.4,140-158).
gagctagagggaaagagat

SEQ ID NO: 618193 - DNA, 19 bp, Mus musculus
  siRNA target sequence for Hdc (NM_008230.4,198-216).
gaggcaggtgactccaaat

SEQ ID NO: 618194 - DNA, 19 bp, Mus musculus
  siRNA target sequence for Hdc (NM_008230.4,200-218).
ggcaggtgactccaaatgt

SEQ ID NO: 618195 - DNA, 19 bp, Mus musculus
  siRNA target sequence for Hdc (NM_008230.4,409-427).
gccattaactgcttaggat

SEQ ID NO: 618196 - DNA, 19 bp, Mus musculus
  siRNA target sequence for Hdc (NM_008230.4,410-428).
ccattaactgcttaggatt

SEQ ID NO: 618197 - DNA, 19 bp, Mus musculus
  siRNA target sequence for Hdc (NM_008230.4,537-555).
ccgagggggaggtgtctta

SEQ ID NO: 618198 - DNA, 19 bp, Mus musculus
  siRNA target sequence for Hdc (NM_008230.4,541-559).
gggggaggtgtcttacaga

SEQ ID NO: 618199 - DNA, 19 bp, Mus musculus
  siRNA target sequence for Hdc (NM_008230.4,565-583).
gtcagcgaatccactttaa

SEQ ID NO: 618200 - DNA, 19 bp, Mus musculus
  siRNA target sequence for Hdc (NM_008230.4,567-585).
cagcgaatccactttaatt

SEQ ID NO: 618201 - DNA, 19 bp, Mus musculus
  siRNA target sequence for Hdc (NM_008230.4,592-610).
ctggcagcaagaaagaaca

SEQ ID NO: 618202 - DNA, 19 bp, Mus musculus
  siRNA target sequence for Hdc (NM_008230.4,629-647).
catgcgagcccgatgctaa

SEQ ID NO: 618203 - DNA, 19 bp, Mus musculus
  siRNA target sequence for Hdc (NM_008230.4,632-650).
gcgagcccgatgctaatga

SEQ ID NO: 618204 - DNA, 19 bp, Mus musculus
  siRNA target sequence for Hdc (NM_008230.4,634-652).
gagcccgatgctaatgagt

SEQ ID NO: 618205 - DNA, 19 bp, Mus musculus
  siRNA target sequence for Hdc (NM_008230.4,728-746).
cccttgtgaagatcagatt

SEQ ID NO: 618206 - DNA, 19 bp, Mus musculus
  siRNA target sequence for Hdc (NM_008230.4,834-852).
gtttgtctgtgcaacgtta

SEQ ID NO: 618207 - DNA, 19 bp, Mus musculus
  siRNA target sequence for Hdc (NM_008230.4,927-945).
ccacgtcgatgctgcttat

SEQ ID NO: 618208 - DNA, 19 bp, Mus musculus
  siRNA target sequence for Hdc (NM_008230.4,930-948).
cgtcgatgctgcttatgca

SEQ ID NO: 618209 - DNA, 19 bp, Mus musculus
  siRNA target sequence for Hdc (NM_008230.4,1004-1022).
ctgactccttcacctttaa

SEQ ID NO: 618210 - DNA, 19 bp, Mus musculus
  siRNA target sequence for Hdc (NM_008230.4,1034-1052).
ggatgatggtacactttga

SEQ ID NO: 618211 - DNA, 19 bp, Mus musculus
  siRNA target sequence for Hdc (NM_008230.4,1184-1202).
gctttcgctccattaagct

SEQ ID NO: 618212 - DNA, 19 bp, Mus musculus
  siRNA target sequence for Hdc (NM_008230.4,1218-1236).
gtccttcggggtgaagaat

SEQ ID NO: 618213 - DNA, 19 bp, Mus musculus
  siRNA target sequence for Hdc (NM_008230.4,1258-1276).
ggcacagaaatggctaaat

SEQ ID NO: 618214 - DNA, 19 bp, Mus musculus
  siRNA target sequence for Hdc (NM_008230.4,1259-1277).
gcacagaaatggctaaata

SEQ ID NO: 618215 - DNA, 19 bp, Mus musculus
  siRNA target sequence for Hdc (NM_008230.4,1269-1287).
ggctaaatactttgaatct

SEQ ID NO: 618216 - DNA, 19 bp, Mus musculus
  siRNA target sequence for Hdc (NM_008230.4,1298-1316).
gcgacccttccttcgaaat

SEQ ID NO: 618217 - DNA, 19 bp, Mus musculus
  siRNA target sequence for Hdc (NM_008230.4,1299-1317).
cgacccttccttcgaaatt

SEQ ID NO: 618218 - DNA, 19 bp, Mus musculus
  siRNA target sequence for Hdc (NM_008230.4,1302-1320).
cccttccttcgaaattcct

SEQ ID NO: 618219 - DNA, 19 bp, Mus musculus
  siRNA target sequence for Hdc (NM_008230.4,1350-1368).
ccgtctgaagggtcctaat

SEQ ID NO: 618220 - DNA, 19 bp, Mus musculus
  siRNA target sequence for Hdc (NM_008230.4,1351-1369).
cgtctgaagggtcctaatt

SEQ ID NO: 618221 - DNA, 19 bp, Mus musculus
  siRNA target sequence for Hdc (NM_008230.4,1376-1394).
cagaaagtgtgttaaagga

SEQ ID NO: 618222 - DNA, 19 bp, Mus musculus
  siRNA target sequence for Hdc (NM_008230.4,1422-1440).
catcccggctactatccaa

SEQ ID NO: 618223 - DNA, 19 bp, Mus musculus
  siRNA target sequence for Hdc (NM_008230.4,1427-1445).
cggctactatccaagacaa

SEQ ID NO: 618224 - DNA, 19 bp, Mus musculus
  siRNA target sequence for Hdc (NM_008230.4,1712-1730).
gctctgatctggaaacgat

SEQ ID NO: 618225 - DNA, 19 bp, Mus musculus
  siRNA target sequence for Hdc (NM_008230.4,1732-1750).
ccggatccctttgatgatt

SEQ ID NO: 618226 - DNA, 19 bp, Mus musculus
  siRNA target sequence for Hdc (NM_008230.4,1793-1811).
cgtcctttctgttcagtta

SEQ ID NO: 618227 - DNA, 19 bp, Mus musculus
  siRNA target sequence for Ddc (NM_016672.1,45-63).
ggagatggtggattatata

SEQ ID NO: 618228 - DNA, 19 bp, Mus musculus
  siRNA target sequence for Ddc (NM_016672.1,48-66).
gatggtggattatatagct

SEQ ID NO: 618229 - DNA, 19 bp, Mus musculus
  siRNA target sequence for Ddc (NM_016672.1,54-72).
ggattatatagctgactat

SEQ ID NO: 618230 - DNA, 19 bp, Mus musculus
  siRNA target sequence for Ddc (NM_016672.1,167-185).
catacgaggacataatcaa

SEQ ID NO: 618231 - DNA, 19 bp, Mus musculus
  siRNA target sequence for Ddc (NM_016672.1,224-242).
ggcacagtccctatttctt

SEQ ID NO: 618232 - DNA, 19 bp, Mus musculus
  siRNA target sequence for Ddc (NM_016672.1,301-319).
gctattggctgcattggtt

SEQ ID NO: 618233 - DNA, 19 bp, Mus musculus
  siRNA target sequence for Ddc (NM_016672.1,483-501).
ggctgctcggactaaagtt

SEQ ID NO: 618234 - DNA, 19 bp, Mus musculus
  siRNA target sequence for Ddc (NM_016672.1,484-502).
gctgctcggactaaagtta

SEQ ID NO: 618235 - DNA, 19 bp, Mus musculus
  siRNA target sequence for Ddc (NM_016672.1,485-503).
ctgctcggactaaagttat

SEQ ID NO: 618236 - DNA, 19 bp, Mus musculus
  siRNA target sequence for Ddc (NM_016672.1,582-600).
ggcgcattcctctgtagaa

SEQ ID NO: 618237 - DNA, 19 bp, Mus musculus
  siRNA target sequence for Ddc (NM_016672.1,583-601).
gcgcattcctctgtagaaa

SEQ ID NO: 618238 - DNA, 19 bp, Mus musculus
  siRNA target sequence for Ddc (NM_016672.1,585-603).
gcattcctctgtagaaaga

SEQ ID NO: 618239 - DNA, 19 bp, Mus musculus
  siRNA target sequence for Ddc (NM_016672.1,607-625).
gggttaattggtggaataa

SEQ ID NO: 618240 - DNA, 19 bp, Mus musculus
  siRNA target sequence for Ddc (NM_016672.1,639-657).
cccttcggatggcaacttt

SEQ ID NO: 618241 - DNA, 19 bp, Mus musculus
  siRNA target sequence for Ddc (NM_016672.1,640-658).
ccttcggatggcaactttt

SEQ ID NO: 618242 - DNA, 19 bp, Mus musculus
  siRNA target sequence for Ddc (NM_016672.1,644-662).
cggatggcaacttttccat

SEQ ID NO: 618243 - DNA, 19 bp, Mus musculus
  siRNA target sequence for Ddc (NM_016672.1,845-863).
cctttatctgtcctgaatt

SEQ ID NO: 618244 - DNA, 19 bp, Mus musculus
  siRNA target sequence for Ddc (NM_016672.1,975-993).
cttaaccggagcctttaat

SEQ ID NO: 618245 - DNA, 19 bp, Mus musculus
  siRNA target sequence for Ddc (NM_016672.1,1065-1083).
cccactggggcgacgattt

SEQ ID NO: 618246 - DNA, 19 bp, Mus musculus
  siRNA target sequence for Ddc (NM_016672.1,1075-1093).
cgacgatttcgctctttga

SEQ ID NO: 618247 - DNA, 19 bp, Mus musculus
  siRNA target sequence for Ddc (NM_016672.1,1078-1096).
cgatttcgctctttgaaaa

SEQ ID NO: 618248 - DNA, 19 bp, Mus musculus
  siRNA target sequence for Ddc (NM_016672.1,1192-1210).
caggaccctcgctttgaaa

SEQ ID NO: 618249 - DNA, 19 bp, Mus musculus
  siRNA target sequence for Ddc (NM_016672.1,1194-1212).
ggaccctcgctttgaaatt

SEQ ID NO: 618250 - DNA, 19 bp, Mus musculus
  siRNA target sequence for Ddc (NM_016672.1,1195-1213).
gaccctcgctttgaaattt

SEQ ID NO: 618251 - DNA, 19 bp, Mus musculus
  siRNA target sequence for Ddc (NM_016672.1,1198-1216).
cctcgctttgaaatttgca

SEQ ID NO: 618252 - DNA, 19 bp, Mus musculus
  siRNA target sequence for Ddc (NM_016672.1,1266-1284).
gttgaacgaaactctctta

SEQ ID NO: 618253 - DNA, 19 bp, Mus musculus
  siRNA target sequence for Ddc (NM_016672.1,1269-1287).
gaacgaaactctcttacaa

SEQ ID NO: 618254 - DNA, 19 bp, Mus musculus
  siRNA target sequence for Ddc (NM_016672.1,1289-1307).
gaataaacagcgccaaaaa

SEQ ID NO: 618255 - DNA, 19 bp, Mus musculus
  siRNA target sequence for Ddc (NM_016672.1,1325-1343).
gtcgtctccgagacaagtt

SEQ ID NO: 618256 - DNA, 19 bp, Mus musculus
  siRNA target sequence for Ddc (NM_016672.1,1328-1346).
gtctccgagacaagtttgt

SEQ ID NO: 618257 - DNA, 19 bp, Mus musculus
  siRNA target sequence for Ddc (NM_016672.1,1404-1422).
ggaacacatcagtgatcta

SEQ ID NO: 618258 - DNA, 19 bp, Mus musculus
  siRNA target sequence for Sgpl1 (NM_009163.2,177-195).
cttatttggagattttgga

SEQ ID NO: 618259 - DNA, 19 bp, Mus musculus
  siRNA target sequence for Sgpl1 (NM_009163.2,330-348).
gtttatggtctcggtttaa

SEQ ID NO: 618260 - DNA, 19 bp, Mus musculus
  siRNA target sequence for Sgpl1 (NM_009163.2,381-399).
catttattggacgtaagat

SEQ ID NO: 618261 - DNA, 19 bp, Mus musculus
  siRNA target sequence for Sgpl1 (NM_009163.2,390-408).
gacgtaagatcgaacaaca

SEQ ID NO: 618262 - DNA, 19 bp, Mus musculus
  siRNA target sequence for Sgpl1 (NM_009163.2,436-454).
caagaacatgccattccta

SEQ ID NO: 618263 - DNA, 19 bp, Mus musculus
  siRNA target sequence for Sgpl1 (NM_009163.2,651-669).
cactgcatccagatatctt

SEQ ID NO: 618264 - DNA, 19 bp, Mus musculus
  siRNA target sequence for Sgpl1 (NM_009163.2,670-688).
ccctggattgcggaagtta

SEQ ID NO: 618265 - DNA, 19 bp, Mus musculus
  siRNA target sequence for Sgpl1 (NM_009163.2,685-703).
gttagaggcagaaatcgtt

SEQ ID NO: 618266 - DNA, 19 bp, Mus musculus
  siRNA target sequence for Sgpl1 (NM_009163.2,695-713).
gaaatcgttaggatgactt

SEQ ID NO: 618267 - DNA, 19 bp, Mus musculus
  siRNA target sequence for Sgpl1 (NM_009163.2,759-777).
ctgggggaacggaaagcat

SEQ ID NO: 618268 - DNA, 19 bp, Mus musculus
  siRNA target sequence for Sgpl1 (NM_009163.2,800-818).
cgggacttggcgttagaga

SEQ ID NO: 618269 - DNA, 19 bp, Mus musculus
  siRNA target sequence for Sgpl1 (NM_009163.2,871-889).
cgacaaagcagctcattat

SEQ ID NO: 618270 - DNA, 19 bp, Mus musculus
  siRNA target sequence for Sgpl1 (NM_009163.2,872-890).
gacaaagcagctcattatt

SEQ ID NO: 618271 - DNA, 19 bp, Mus musculus
  siRNA target sequence for Sgpl1 (NM_009163.2,905-923).
gtccgagttgcactgaaaa

SEQ ID NO: 618272 - DNA, 19 bp, Mus musculus
  siRNA target sequence for Sgpl1 (NM_009163.2,908-926).
cgagttgcactgaaaaaga

SEQ ID NO: 618273 - DNA, 19 bp, Mus musculus
  siRNA target sequence for Sgpl1 (NM_009163.2,909-927).
gagttgcactgaaaaagaa

SEQ ID NO: 618274 - DNA, 19 bp, Mus musculus
  siRNA target sequence for Sgpl1 (NM_009163.2,911-929).
gttgcactgaaaaagaaca

SEQ ID NO: 618275 - DNA, 19 bp, Mus musculus
  siRNA target sequence for Sgpl1 (NM_009163.2,988-1006).
ctgttctaccccacagttt

SEQ ID NO: 618276 - DNA, 19 bp, Mus musculus
  siRNA target sequence for Sgpl1 (NM_009163.2,1041-1059).
ccaagttggctgtcagata

SEQ ID NO: 618277 - DNA, 19 bp, Mus musculus
  siRNA target sequence for Sgpl1 (NM_009163.2,1042-1060).
caagttggctgtcagatat

SEQ ID NO: 618278 - DNA, 19 bp, Mus musculus
  siRNA target sequence for Sgpl1 (NM_009163.2,1195-1213).
gtatggctatgctcctaaa

SEQ ID NO: 618279 - DNA, 19 bp, Mus musculus
  siRNA target sequence for Sgpl1 (NM_009163.2,1221-1239).
cagtggtgatgtactctaa

SEQ ID NO: 618280 - DNA, 19 bp, Mus musculus
  siRNA target sequence for Sgpl1 (NM_009163.2,1251-1269).
ggacgtaccagttctttgt

SEQ ID NO: 618281 - DNA, 19 bp, Mus musculus
  siRNA target sequence for Sgpl1 (NM_009163.2,1294-1312).
ctacgcatctccaagcata

SEQ ID NO: 618282 - DNA, 19 bp, Mus musculus
  siRNA target sequence for Sgpl1 (NM_009163.2,1369-1387).
cggtgagaacggctatgtt

SEQ ID NO: 618283 - DNA, 19 bp, Mus musculus
  siRNA target sequence for Sgpl1 (NM_009163.2,1385-1403).
gttgaagctaccaaacaga

SEQ ID NO: 618284 - DNA, 19 bp, Mus musculus
  siRNA target sequence for Sgpl1 (NM_009163.2,1465-1483).
cggtgatcctcaattgtca

SEQ ID NO: 618285 - DNA, 19 bp, Mus musculus
  siRNA target sequence for Sgpl1 (NM_009163.2,1491-1509).
ctctgggatccaacgattt

SEQ ID NO: 618286 - DNA, 19 bp, Mus musculus
  siRNA target sequence for Sgpl1 (NM_009163.2,1497-1515).
gatccaacgattttgacat

SEQ ID NO: 618287 - DNA, 19 bp, Mus musculus
  siRNA target sequence for Sgpl1 (NM_009163.2,1511-1529).
gacatttaccgactatcta

SEQ ID NO: 618288 - DNA, 19 bp, Mus musculus
  siRNA target sequence for Sgpl1 (NM_009163.2,1513-1531).
catttaccgactatctaat

SEQ ID NO: 618289 - DNA, 19 bp, Mus musculus
  siRNA target sequence for Sgpl1 (NM_009163.2,1542-1560).
ctaaggggtggaattttaa

SEQ ID NO: 618290 - DNA, 19 bp, Mus musculus
  siRNA target sequence for Sgpl1 (NM_009163.2,1591-1609).
ctgcattacgttagtacat

SEQ ID NO: 618291 - DNA, 19 bp, Mus musculus
  siRNA target sequence for Sgpl1 (NM_009163.2,1594-1612).
cattacgttagtacatact

SEQ ID NO: 618292 - DNA, 19 bp, Mus musculus
  siRNA target sequence for Sgpl1 (NM_009163.2,1626-1644).
cgatccagttcctaaagga

SEQ ID NO: 618293 - DNA, 19 bp, Mus musculus
  siRNA target sequence for Sgpl1 (NM_009163.2,1627-1645).
gatccagttcctaaaggat

SEQ ID NO: 618294 - DNA, 19 bp, Mus musculus
  siRNA target sequence for Sgpl1 (NM_009163.2,1649-1667).
cgggaatcagtcacacaaa

SEQ ID NO: 618295 - DNA, 19 bp, Mus musculus
  siRNA target sequence for Sgpl1 (NM_009163.2,1652-1670).
gaatcagtcacacaaatca

SEQ ID NO: 618296 - DNA, 19 bp, Mus musculus
  siRNA target sequence for Sgpl1 (NM_009163.2,1717-1735).
catggcccaggcaaccatt

SEQ ID NO: 618297 - DNA, 19 bp, Mus musculus
  siRNA target sequence for 4921524E03Rik (NM_181346.2,786-804).
ggtgaccatgacttgagtt

SEQ ID NO: 618298 - DNA, 19 bp, Mus musculus
  siRNA target sequence for 4933425L11Rik (NM_025754.1,651-669).
gaagcactgtcagtatgta

SEQ ID NO: 618299 - DNA, 19 bp, Mus musculus
  siRNA target sequence for 4933425L11Rik (NM_025754.1,720-738).
ctacctggaaggaacctta

SEQ ID NO: 618300 - DNA, 19 bp, Mus musculus
  siRNA target sequence for 4933425L11Rik (NM_025754.1,724-742).
ctggaaggaaccttactga

SEQ ID NO: 618301 - DNA, 19 bp, Mus musculus
  siRNA target sequence for 4933425L11Rik (NM_025754.1,769-787).
gcttgcactcaggtatttt

SEQ ID NO: 618302 - DNA, 19 bp, Mus musculus
  siRNA target sequence for Aldo2 (NM_144903.2,182-200).
gaaaccgcctgcaaaggat

SEQ ID NO: 618303 - DNA, 19 bp, Mus musculus
  siRNA target sequence for Aldo2 (NM_144903.2,188-206).
gcctgcaaaggataaaggt

SEQ ID NO: 618304 - DNA, 19 bp, Mus musculus
  siRNA target sequence for Aldo2 (NM_144903.2,237-255).
ccgagaactcctctttagt

SEQ ID NO: 618305 - DNA, 19 bp, Mus musculus
  siRNA target sequence for Aldo2 (NM_144903.2,284-302).
gcggagtgatccttttcca

SEQ ID NO: 618306 - DNA, 19 bp, Mus musculus
  siRNA target sequence for Aldo2 (NM_144903.2,605-623).
ggctggtccctattgttga

SEQ ID NO: 618307 - DNA, 19 bp, Mus musculus
  siRNA target sequence for Aldo2 (NM_144903.2,740-758).
ccttgctaaagccaaacat

SEQ ID NO: 618308 - DNA, 19 bp, Mus musculus
  siRNA target sequence for Aldo2 (NM_144903.2,772-790).
catgcctgcacgaagaagt

SEQ ID NO: 618309 - DNA, 19 bp, Mus musculus
  siRNA target sequence for Aldo2 (NM_144903.2,775-793).
gcctgcacgaagaagtata

SEQ ID NO: 618310 - DNA, 19 bp, Mus musculus
  siRNA target sequence for Aldo2 (NM_144903.2,777-795).
ctgcacgaagaagtataca

SEQ ID NO: 618311 - DNA, 19 bp, Mus musculus
  siRNA target sequence for Aldo2 (NM_144903.2,902-920).
cacttaacctcaatgctat

SEQ ID NO: 618312 - DNA, 19 bp, Mus musculus
  siRNA target sequence for 2500002K03Rik (NM_172733.1,69-87).
gctggatctccaaagttca

SEQ ID NO: 618313 - DNA, 19 bp, Mus musculus
  siRNA target sequence for 2500002K03Rik (NM_172733.1,72-90).
ggatctccaaagttcaagt

SEQ ID NO: 618314 - DNA, 19 bp, Mus musculus
  siRNA target sequence for 2500002K03Rik (NM_172733.1,173-191).
ctgaaagctgtcacgttta

SEQ ID NO: 618315 - DNA, 19 bp, Mus musculus
  siRNA target sequence for 2500002K03Rik (NM_172733.1,180-198).
ctgtcacgtttatagatct

SEQ ID NO: 618316 - DNA, 19 bp, Mus musculus
  siRNA target sequence for 2500002K03Rik (NM_172733.1,182-200).
gtcacgtttatagatctta

SEQ ID NO: 618317 - DNA, 19 bp, Mus musculus
  siRNA target sequence for 2500002K03Rik (NM_172733.1,213-231).
gcgatgacacgttttccaa

SEQ ID NO: 618318 - DNA, 19 bp, Mus musculus
  siRNA target sequence for 2500002K03Rik (NM_172733.1,232-250).
cgttcaacgactctgttat

SEQ ID NO: 618319 - DNA, 19 bp, Mus musculus
  siRNA target sequence for 2500002K03Rik (NM_172733.1,233-251).
gttcaacgactctgttata

SEQ ID NO: 618320 - DNA, 19 bp, Mus musculus
  siRNA target sequence for 2500002K03Rik (NM_172733.1,268-286).
ccgggcagacctcttaaaa

SEQ ID NO: 618321 - DNA, 19 bp, Mus musculus
  siRNA target sequence for 2500002K03Rik (NM_172733.1,271-289).
ggcagacctcttaaaagct

SEQ ID NO: 618322 - DNA, 19 bp, Mus musculus
  siRNA target sequence for 2500002K03Rik (NM_172733.1,272-290).
gcagacctcttaaaagctt

SEQ ID NO: 618323 - DNA, 19 bp, Mus musculus
  siRNA target sequence for 2500002K03Rik (NM_172733.1,273-291).
cagacctcttaaaagcttt

SEQ ID NO: 618324 - DNA, 19 bp, Mus musculus
  siRNA target sequence for 2500002K03Rik (NM_172733.1,422-440).
gctggacagactcatttaa

SEQ ID NO: 618325 - DNA, 19 bp, Mus musculus
  siRNA target sequence for 2500002K03Rik (NM_172733.1,547-565).
cgatgaggtcactcagttt

SEQ ID NO: 618326 - DNA, 19 bp, Mus musculus
  siRNA target sequence for 2500002K03Rik (NM_172733.1,551-569).
gaggtcactcagtttcgaa

SEQ ID NO: 618327 - DNA, 19 bp, Mus musculus
  siRNA target sequence for 2500002K03Rik (NM_172733.1,576-594).
gtggcgaggcccatctcaa

SEQ ID NO: 618328 - DNA, 19 bp, Mus musculus
  siRNA target sequence for 2500002K03Rik (NM_172733.1,578-596).
ggcgaggcccatctcaaaa

SEQ ID NO: 618329 - DNA, 19 bp, Mus musculus
  siRNA target sequence for 2500002K03Rik (NM_172733.1,664-682).
ggcaggatcagattttatt

SEQ ID NO: 618330 - DNA, 19 bp, Mus musculus
  siRNA target sequence for 2500002K03Rik (NM_172733.1,917-935).
gacatcgagagacagattt

SEQ ID NO: 618331 - DNA, 19 bp, Mus musculus
  siRNA target sequence for 2500002K03Rik (NM_172733.1,922-940).
cgagagacagatttaccat

SEQ ID NO: 618332 - DNA, 19 bp, Mus musculus
  siRNA target sequence for 2500002K03Rik (NM_172733.1,951-969).
gacgctacgcggcttatca

SEQ ID NO: 618333 - DNA, 19 bp, Mus musculus
  siRNA target sequence for 2500002K03Rik (NM_172733.1,954-972).
gctacgcggcttatcatga

SEQ ID NO: 618334 - DNA, 19 bp, Mus musculus
  siRNA target sequence for 2500002K03Rik (NM_172733.1,955-973).
ctacgcggcttatcatgat

SEQ ID NO: 618335 - DNA, 19 bp, Mus musculus
  siRNA target sequence for 2500002K03Rik (NM_172733.1,968-986).
catgatcttccgatgtctt

SEQ ID NO: 618336 - DNA, 19 bp, Mus musculus
  siRNA target sequence for Cry1 (NM_007771.2,621-639).
ggaatggaacatcactaaa

SEQ ID NO: 618337 - DNA, 19 bp, Mus musculus
  siRNA target sequence for Cry1 (NM_007771.2,679-697).
cgagatgcagctatcaaga

SEQ ID NO: 618338 - DNA, 19 bp, Mus musculus
  siRNA target sequence for Cry1 (NM_007771.2,729-747).
cgtgcgcatttcacataca

SEQ ID NO: 618339 - DNA, 19 bp, Mus musculus
  siRNA target sequence for Cry1 (NM_007771.2,783-801).
cggacagccacctctaaca

SEQ ID NO: 618340 - DNA, 19 bp, Mus musculus
  siRNA target sequence for Cry1 (NM_007771.2,787-805).
cagccacctctaacatata

SEQ ID NO: 618341 - DNA, 19 bp, Mus musculus
  siRNA target sequence for Cry1 (NM_007771.2,860-878).
ccatcacatcagatgtgat

SEQ ID NO: 618342 - DNA, 19 bp, Mus musculus
  siRNA target sequence for Cry1 (NM_007771.2,861-879).
catcacatcagatgtgata

SEQ ID NO: 618343 - DNA, 19 bp, Mus musculus
  siRNA target sequence for Cry1 (NM_007771.2,940-958).
gaagagctcggctttgata

SEQ ID NO: 618344 - DNA, 19 bp, Mus musculus
  siRNA target sequence for Cry1 (NM_007771.2,945-963).
gctcggctttgatacagat

SEQ ID NO: 618345 - DNA, 19 bp, Mus musculus
  siRNA target sequence for Cry1 (NM_007771.2,1002-1020).
ggcacttacacgtttggaa

SEQ ID NO: 618346 - DNA, 19 bp, Mus musculus
  siRNA target sequence for Cry1 (NM_007771.2,1003-1021).
gcacttacacgtttggaaa

SEQ ID NO: 618347 - DNA, 19 bp, Mus musculus
  siRNA target sequence for Cry1 (NM_007771.2,1060-1078).
cgacctcgaatgaatgcaa

SEQ ID NO: 618348 - DNA, 19 bp, Mus musculus
  siRNA target sequence for Cry1 (NM_007771.2,1111-1129).
ccttatctccgctttggtt

SEQ ID NO: 618349 - DNA, 19 bp, Mus musculus
  siRNA target sequence for Cry1 (NM_007771.2,1119-1137).
ccgctttggttgtttatca

SEQ ID NO: 618350 - DNA, 19 bp, Mus musculus
  siRNA target sequence for Cry1 (NM_007771.2,1120-1138).
cgctttggttgtttatcat

SEQ ID NO: 618351 - DNA, 19 bp, Mus musculus
  siRNA target sequence for Cry1 (NM_007771.2,1122-1140).
ctttggttgtttatcatgt

SEQ ID NO: 618352 - DNA, 19 bp, Mus musculus
  siRNA target sequence for Cry1 (NM_007771.2,1136-1154).
catgtcggctgttttattt

SEQ ID NO: 618353 - DNA, 19 bp, Mus musculus
  siRNA target sequence for Cry1 (NM_007771.2,1139-1157).
gtcggctgttttatttcaa

SEQ ID NO: 618354 - DNA, 19 bp, Mus musculus
  siRNA target sequence for Cry1 (NM_007771.2,1165-1183).
gatctctacaaaaaggtaa

SEQ ID NO: 618355 - DNA, 19 bp, Mus musculus
  siRNA target sequence for Cry1 (NM_007771.2,1260-1278).
caacccacgctttgacaaa

SEQ ID NO: 618356 - DNA, 19 bp, Mus musculus
  siRNA target sequence for Cry1 (NM_007771.2,1513-1531).
gatgcagattggagcataa

SEQ ID NO: 618357 - DNA, 19 bp, Mus musculus
  siRNA target sequence for Cry1 (NM_007771.2,1621-1639).
gatcccaatggagactata

SEQ ID NO: 618358 - DNA, 19 bp, Mus musculus
  siRNA target sequence for Cry1 (NM_007771.2,1624-1642).
cccaatggagactatatta

SEQ ID NO: 618359 - DNA, 19 bp, Mus musculus
  siRNA target sequence for Cry1 (NM_007771.2,1633-1651).
gactatattaggcgttatt

SEQ ID NO: 618360 - DNA, 19 bp, Mus musculus
  siRNA target sequence for Cry1 (NM_007771.2,1635-1653).
ctatattaggcgttattta

SEQ ID NO: 618361 - DNA, 19 bp, Mus musculus
  siRNA target sequence for Cry1 (NM_007771.2,1664-1682).
gaggcttccctgcaaaata

SEQ ID NO: 618362 - DNA, 19 bp, Mus musculus
  siRNA target sequence for Cry1 (NM_007771.2,1666-1684).
ggcttccctgcaaaatata

SEQ ID NO: 618363 - DNA, 19 bp, Mus musculus
  siRNA target sequence for Cry1 (NM_007771.2,1733-1751).
gtttgataggagttaatta

SEQ ID NO: 618364 - DNA, 19 bp, Mus musculus
  siRNA target sequence for Cry1 (NM_007771.2,1859-1877).
cggtcccttctaactctaa

SEQ ID NO: 618365 - DNA, 19 bp, Mus musculus
  siRNA target sequence for Cry1 (NM_007771.2,1860-1878).
ggtcccttctaactctaat

SEQ ID NO: 618366 - DNA, 19 bp, Mus musculus
  siRNA target sequence for Cry1 (NM_007771.2,1983-2001).
gagctgtagcggtggaaat

SEQ ID NO: 618367 - DNA, 19 bp, Mus musculus
  siRNA target sequence for Cry1 (NM_007771.2,2004-2022).
ctctcaaggaagtggtatt

SEQ ID NO: 618368 - DNA, 19 bp, Mus musculus
  siRNA target sequence for Cry1 (NM_007771.2,2011-2029).
ggaagtggtattttacact

SEQ ID NO: 618369 - DNA, 19 bp, Mus musculus
  siRNA target sequence for Cry1 (NM_007771.2,2012-2030).
gaagtggtattttacacta

SEQ ID NO: 618370 - DNA, 19 bp, Mus musculus
  siRNA target sequence for Cry2 (NM_009963.2,157-175).
gtgtgcgctgcgtctacat

SEQ ID NO: 618371 - DNA, 19 bp, Mus musculus
  siRNA target sequence for Cry2 (NM_009963.2,249-267).
gatctggacacaagcttaa

SEQ ID NO: 618372 - DNA, 19 bp, Mus musculus
  siRNA target sequence for Cry2 (NM_009963.2,275-293).
gaattcgcgtctgtttgta

SEQ ID NO: 618373 - DNA, 19 bp, Mus musculus
  siRNA target sequence for Cry2 (NM_009963.2,349-367).
cccgtttgacctttgaata

SEQ ID NO: 618374 - DNA, 19 bp, Mus musculus
  siRNA target sequence for Cry2 (NM_009963.2,350-368).
ccgtttgacctttgaatat

SEQ ID NO: 618375 - DNA, 19 bp, Mus musculus
  siRNA target sequence for Cry2 (NM_009963.2,476-494).
cagaatcatcgaactgaat

SEQ ID NO: 618376 - DNA, 19 bp, Mus musculus
  siRNA target sequence for Cry2 (NM_009963.2,752-770).
ggcctgggttgccaactat

SEQ ID NO: 618377 - DNA, 19 bp, Mus musculus
  siRNA target sequence for Cry2 (NM_009963.2,754-772).
cctgggttgccaactatga

SEQ ID NO: 618378 - DNA, 19 bp, Mus musculus
  siRNA target sequence for Cry2 (NM_009963.2,780-798).
cggatgaatgccaattcct

SEQ ID NO: 618379 - DNA, 19 bp, Mus musculus
  siRNA target sequence for Cry2 (NM_009963.2,781-799).
ggatgaatgccaattcctt

SEQ ID NO: 618380 - DNA, 19 bp, Mus musculus
  siRNA target sequence for Cry2 (NM_009963.2,825-843).
ccctacctgcgctttggat

SEQ ID NO: 618381 - DNA, 19 bp, Mus musculus
  siRNA target sequence for Cry2 (NM_009963.2,870-888).
cgcctgtgggacttgtaca

SEQ ID NO: 618382 - DNA, 19 bp, Mus musculus
  siRNA target sequence for Cry2 (NM_009963.2,939-957).
ctgtggcgagaattcttct

SEQ ID NO: 618383 - DNA, 19 bp, Mus musculus
  siRNA target sequence for Cry2 (NM_009963.2,1193-1211).
gagcggggtccgggtattt

SEQ ID NO: 618384 - DNA, 19 bp, Mus musculus
  siRNA target sequence for Cry2 (NM_009963.2,1195-1213).
gcggggtccgggtatttga

SEQ ID NO: 618385 - DNA, 19 bp, Mus musculus
  siRNA target sequence for Cry2 (NM_009963.2,1223-1241).
cctggatgccgatttcagt

SEQ ID NO: 618386 - DNA, 19 bp, Mus musculus
  siRNA target sequence for Cry2 (NM_009963.2,1359-1377).
cggtacctgcccaaactga

SEQ ID NO: 618387 - DNA, 19 bp, Mus musculus
  siRNA target sequence for Cry2 (NM_009963.2,1360-1378).
ggtacctgcccaaactgaa

SEQ ID NO: 618388 - DNA, 19 bp, Mus musculus
  siRNA target sequence for Cry2 (NM_009963.2,1361-1379).
gtacctgcccaaactgaaa

SEQ ID NO: 618389 - DNA, 19 bp, Mus musculus
  siRNA target sequence for Cry2 (NM_009963.2,1385-1403).
cccctctcgatacatctat

SEQ ID NO: 618390 - DNA, 19 bp, Mus musculus
  siRNA target sequence for Cry2 (NM_009963.2,1468-1486).
cacggcccatcgtcaatca

SEQ ID NO: 618391 - DNA, 19 bp, Mus musculus
  siRNA target sequence for Cry2 (NM_009963.2,1495-1513).
ctagtcggctcaacattga

SEQ ID NO: 618392 - DNA, 19 bp, Mus musculus
  siRNA target sequence for Hmgcl (NM_008254.1,166-184).
gcagaatgaaaagagtatt

SEQ ID NO: 618393 - DNA, 19 bp, Mus musculus
  siRNA target sequence for Hmgcl (NM_008254.1,305-323).
gtcttgaagggcattcaga

SEQ ID NO: 618394 - DNA, 19 bp, Mus musculus
  siRNA target sequence for Hmgcl (NM_008254.1,445-463).
gaacgcgaactgctctata

SEQ ID NO: 618395 - DNA, 19 bp, Mus musculus
  siRNA target sequence for Hmgcl (NM_008254.1,615-633).
cgatgggctgctatgagat

SEQ ID NO: 618396 - DNA, 19 bp, Mus musculus
  siRNA target sequence for Hmgcl (NM_008254.1,730-748).
ccactgccatgatacctat

SEQ ID NO: 618397 - DNA, 19 bp, Mus musculus
  siRNA target sequence for Hmgcl (NM_008254.1,824-842).
ggaggctgtccctatgcaa

SEQ ID NO: 618398 - DNA, 19 bp, Mus musculus
  siRNA target sequence for Hmgcl (NM_008254.1,952-970).
ctgtcaagcccttaacaga

SEQ ID NO: 618399 - DNA, 19 bp, Mus musculus
  siRNA target sequence for Hmgcl (NM_008254.1,954-972).
gtcaagcccttaacagaaa

SEQ ID NO: 618400 - DNA, 19 bp, Mus musculus
  siRNA target sequence for Hmgcl (NM_008254.1,959-977).
gcccttaacagaaaaacta

SEQ ID NO: 618401 - DNA, 19 bp, Mus musculus
  siRNA target sequence for Adcy2 (NM_153534.1,702-720).
ccggatcaagctggaattt

SEQ ID NO: 618402 - DNA, 19 bp, Mus musculus
  siRNA target sequence for Adcy2 (NM_153534.1,763-781).
gctcacattgccatggaaa

SEQ ID NO: 618403 - DNA, 19 bp, Mus musculus
  siRNA target sequence for Adcy2 (NM_153534.1,764-782).
ctcacattgccatggaaat

SEQ ID NO: 618404 - DNA, 19 bp, Mus musculus
  siRNA target sequence for Adcy2 (NM_153534.1,871-889).
cacaccaacgtgagcatat

SEQ ID NO: 618405 - DNA, 19 bp, Mus musculus
  siRNA target sequence for Adcy2 (NM_153534.1,873-891).
caccaacgtgagcatatta

SEQ ID NO: 618406 - DNA, 19 bp, Mus musculus
  siRNA target sequence for Adcy2 (NM_153534.1,876-894).
caacgtgagcatattatat

SEQ ID NO: 618407 - DNA, 19 bp, Mus musculus
  siRNA target sequence for Adcy2 (NM_153534.1,879-897).
cgtgagcatattatatgct

SEQ ID NO: 618408 - DNA, 19 bp, Mus musculus
  siRNA target sequence for Adcy2 (NM_153534.1,948-966).
ggtccacatgctgaatgaa

SEQ ID NO: 618409 - DNA, 19 bp, Mus musculus
  siRNA target sequence for Adcy2 (NM_153534.1,1049-1067).
ccgggctcccgatatctct

SEQ ID NO: 618410 - DNA, 19 bp, Mus musculus
  siRNA target sequence for Adcy2 (NM_153534.1,1069-1087).
cctaaccatgccaagaact

SEQ ID NO: 618411 - DNA, 19 bp, Mus musculus
  siRNA target sequence for Adcy2 (NM_153534.1,1112-1130).
gcgaagccataaagaaagt

SEQ ID NO: 618412 - DNA, 19 bp, Mus musculus
  siRNA target sequence for Adcy2 (NM_153534.1,1138-1156).
gctactggggtcgatatca

SEQ ID NO: 618413 - DNA, 19 bp, Mus musculus
  siRNA target sequence for Adcy2 (NM_153534.1,1139-1157).
ctactggggtcgatatcaa

SEQ ID NO: 618414 - DNA, 19 bp, Mus musculus
  siRNA target sequence for Adcy2 (NM_153534.1,1142-1160).
ctggggtcgatatcaacat

SEQ ID NO: 618415 - DNA, 19 bp, Mus musculus
  siRNA target sequence for Adcy2 (NM_153534.1,1228-1246).
gtgtggtctcatgatgtta

SEQ ID NO: 618416 - DNA, 19 bp, Mus musculus
  siRNA target sequence for Adcy2 (NM_153534.1,1230-1248).
gtggtctcatgatgttact

SEQ ID NO: 618417 - DNA, 19 bp, Mus musculus
  siRNA target sequence for Adcy2 (NM_153534.1,1232-1250).
ggtctcatgatgttacttt

SEQ ID NO: 618418 - DNA, 19 bp, Mus musculus
  siRNA target sequence for Adcy2 (NM_153534.1,1279-1297).
cctggacgtgttcacattt

SEQ ID NO: 618419 - DNA, 19 bp, Mus musculus
  siRNA target sequence for Adcy2 (NM_153534.1,1282-1300).
ggacgtgttcacatttcct

SEQ ID NO: 618420 - DNA, 19 bp, Mus musculus
  siRNA target sequence for Adcy2 (NM_153534.1,1305-1323).
cactctggagcacttgaat

SEQ ID NO: 618421 - DNA, 19 bp, Mus musculus
  siRNA target sequence for Adcy2 (NM_153534.1,1315-1333).
cacttgaatggggcttata

SEQ ID NO: 618422 - DNA, 19 bp, Mus musculus
  siRNA target sequence for Adcy2 (NM_153534.1,1354-1372).
gagataagagacccatatt

SEQ ID NO: 618423 - DNA, 19 bp, Mus musculus
  siRNA target sequence for Adcy2 (NM_153534.1,1378-1396).
cagcatttggtgaaaacct

SEQ ID NO: 618424 - DNA, 19 bp, Mus musculus
  siRNA target sequence for Adcy2 (NM_153534.1,1386-1404).
ggtgaaaacctactttgta

SEQ ID NO: 618425 - DNA, 19 bp, Mus musculus
  siRNA target sequence for Adcy2 (NM_153534.1,1387-1405).
gtgaaaacctactttgtaa

SEQ ID NO: 618426 - DNA, 19 bp, Mus musculus
  siRNA target sequence for Adcy2 (NM_153534.1,1570-1588).
gagaatgggaagattagca

SEQ ID NO: 618427 - DNA, 19 bp, Mus musculus
  siRNA target sequence for Adcy2 (NM_153534.1,1597-1615).
gtgccaatgggtcaacata

SEQ ID NO: 618428 - DNA, 19 bp, Mus musculus
  siRNA target sequence for Adcy2 (NM_153534.1,1599-1617).
gccaatgggtcaacataat

SEQ ID NO: 618429 - DNA, 19 bp, Mus musculus
  siRNA target sequence for Adcy2 (NM_153534.1,1600-1618).
ccaatgggtcaacataatt

SEQ ID NO: 618430 - DNA, 19 bp, Mus musculus
  siRNA target sequence for Adcy2 (NM_153534.1,1601-1619).
caatgggtcaacataattt

SEQ ID NO: 618431 - DNA, 19 bp, Mus musculus
  siRNA target sequence for Adcy2 (NM_153534.1,1605-1623).
gggtcaacataattttcaa

SEQ ID NO: 618432 - DNA, 19 bp, Mus musculus
  siRNA target sequence for Adcy2 (NM_153534.1,1606-1624).
ggtcaacataattttcaaa

SEQ ID NO: 618433 - DNA, 19 bp, Mus musculus
  siRNA target sequence for Adcy2 (NM_153534.1,1621-1639).
caaaatcgcaccttaagaa

SEQ ID NO: 618434 - DNA, 19 bp, Mus musculus
  siRNA target sequence for Adcy2 (NM_153534.1,1627-1645).
cgcaccttaagaactaagt

SEQ ID NO: 618435 - DNA, 19 bp, Mus musculus
  siRNA target sequence for Adcy2 (NM_153534.1,1629-1647).
caccttaagaactaagtca

SEQ ID NO: 618436 - DNA, 19 bp, Mus musculus
  siRNA target sequence for Adcy2 (NM_153534.1,1682-1700).
ggatgatccaagcaattga

SEQ ID NO: 618437 - DNA, 19 bp, Mus musculus
  siRNA target sequence for Adcy2 (NM_153534.1,1804-1822).
ctgccagcattcaagtact

SEQ ID NO: 618438 - DNA, 19 bp, Mus musculus
  siRNA target sequence for Adcy2 (NM_153534.1,1907-1925).
cctttggagctgcatttct

SEQ ID NO: 618439 - DNA, 19 bp, Mus musculus
  siRNA target sequence for Adcy2 (NM_153534.1,1956-1974).
cgctggacagcttttgcaa

SEQ ID NO: 618440 - DNA, 19 bp, Mus musculus
  siRNA target sequence for Adcy2 (NM_153534.1,2004-2022).
gtggcttttgaaatcatca

SEQ ID NO: 618441 - DNA, 19 bp, Mus musculus
  siRNA target sequence for Adcy2 (NM_153534.1,2013-2031).
gaaatcatcaggcatcata

SEQ ID NO: 618442 - DNA, 19 bp, Mus musculus
  siRNA target sequence for Adcy2 (NM_153534.1,2067-2085).
cgtcaccacagctatcata

SEQ ID NO: 618443 - DNA, 19 bp, Mus musculus
  siRNA target sequence for Adcy2 (NM_153534.1,2070-2088).
caccacagctatcatacta

SEQ ID NO: 618444 - DNA, 19 bp, Mus musculus
  siRNA target sequence for Adcy2 (NM_153534.1,2075-2093).
cagctatcatactaaccat

SEQ ID NO: 618445 - DNA, 19 bp, Mus musculus
  siRNA target sequence for Adcy2 (NM_153534.1,2090-2108).
ccatggctgtgtttaacat

SEQ ID NO: 618446 - DNA, 19 bp, Mus musculus
  siRNA target sequence for Adcy2 (NM_153534.1,2140-2158).
cttccgactgccaatgcat

SEQ ID NO: 618447 - DNA, 19 bp, Mus musculus
  siRNA target sequence for Adcy2 (NM_153534.1,2144-2162).
cgactgccaatgcatctaa

SEQ ID NO: 618448 - DNA, 19 bp, Mus musculus
  siRNA target sequence for Adcy2 (NM_153534.1,2145-2163).
gactgccaatgcatctaat

SEQ ID NO: 618449 - DNA, 19 bp, Mus musculus
  siRNA target sequence for Adcy2 (NM_153534.1,2149-2167).
gccaatgcatctaatgcaa

SEQ ID NO: 618450 - DNA, 19 bp, Mus musculus
  siRNA target sequence for Adcy2 (NM_153534.1,2150-2168).
ccaatgcatctaatgcaaa

SEQ ID NO: 618451 - DNA, 19 bp, Mus musculus
  siRNA target sequence for Adcy2 (NM_153534.1,2203-2221).
catgcacgaaacttgtttt

SEQ ID NO: 618452 - DNA, 19 bp, Mus musculus
  siRNA target sequence for Adcy2 (NM_153534.1,2224-2242).
ctcccgtacttcatataca

SEQ ID NO: 618453 - DNA, 19 bp, Mus musculus
  siRNA target sequence for Adcy2 (NM_153534.1,2320-2338).
gcactcgtgggctacaaca

SEQ ID NO: 618454 - DNA, 19 bp, Mus musculus
  siRNA target sequence for Adcy2 (NM_153534.1,2321-2339).
cactcgtgggctacaacat

SEQ ID NO: 618455 - DNA, 19 bp, Mus musculus
  siRNA target sequence for Adcy2 (NM_153534.1,2476-2494).
ggtagacagagtgaatatt

SEQ ID NO: 618456 - DNA, 19 bp, Mus musculus
  siRNA target sequence for Adcy2 (NM_153534.1,2482-2500).
cagagtgaatattactgta

SEQ ID NO: 618457 - DNA, 19 bp, Mus musculus
  siRNA target sequence for Adcy2 (NM_153534.1,2620-2638).
ctggccaggagcctgaaaa

SEQ ID NO: 618458 - DNA, 19 bp, Mus musculus
  siRNA target sequence for Adcy2 (NM_153534.1,2752-2770).
ctccggctcctgaatgaga

SEQ ID NO: 618459 - DNA, 19 bp, Mus musculus
  siRNA target sequence for Adcy2 (NM_153534.1,2899-2917).
gaacccgagcgtcaataca

SEQ ID NO: 618460 - DNA, 19 bp, Mus musculus
  siRNA target sequence for Adcy2 (NM_153534.1,2961-2979).
gaaactggatgccatcaat

SEQ ID NO: 618461 - DNA, 19 bp, Mus musculus
  siRNA target sequence for Adcy2 (NM_153534.1,3018-3036).
caaccatggacctgtaata

SEQ ID NO: 618462 - DNA, 19 bp, Mus musculus
  siRNA target sequence for Adcy2 (NM_153534.1,3021-3039).
ccatggacctgtaatagct

SEQ ID NO: 618463 - DNA, 19 bp, Mus musculus
  siRNA target sequence for Adcy2 (NM_153534.1,3051-3069).
ggctcagaagccacaatat

SEQ ID NO: 618464 - DNA, 19 bp, Mus musculus
  siRNA target sequence for Adcy2 (NM_153534.1,3053-3071).
ctcagaagccacaatatga

SEQ ID NO: 618465 - DNA, 19 bp, Mus musculus
  siRNA target sequence for Adcy2 (NM_153534.1,3116-3134).
ccggagtcctggacaaaat

SEQ ID NO: 618466 - DNA, 19 bp, Mus musculus
  siRNA target sequence for Adcy2 (NM_153534.1,3117-3135).
cggagtcctggacaaaata

SEQ ID NO: 618467 - DNA, 19 bp, Mus musculus
  siRNA target sequence for Adcy2 (NM_153534.1,3172-3190).
cttggctacacgtgtacat

SEQ ID NO: 618468 - DNA, 19 bp, Mus musculus
  siRNA target sequence for Adcy2 (NM_153534.1,3185-3203).
gtacatgtcgaggtatcat

SEQ ID NO: 618469 - DNA, 19 bp, Mus musculus
  siRNA target sequence for Adcy2 (NM_153534.1,3188-3206).
catgtcgaggtatcatcaa

SEQ ID NO: 618470 - DNA, 19 bp, Mus musculus
  siRNA target sequence for Adcy2 (NM_153534.1,3225-3243).
cctgaagacgtactttgta

SEQ ID NO: 618471 - DNA, 19 bp, Mus musculus
  siRNA target sequence for Adcy2 (NM_153534.1,3226-3244).
ctgaagacgtactttgtaa

SEQ ID NO: 618472 - DNA, 19 bp, Mus musculus
  siRNA target sequence for Gucy1a3 (NM_021896.3,231-249).
ggaagttcaaggatctcaa

SEQ ID NO: 618473 - DNA, 19 bp, Mus musculus
  siRNA target sequence for Gucy1a3 (NM_021896.3,352-370).
gcccatctgccagtacttt

SEQ ID NO: 618474 - DNA, 19 bp, Mus musculus
  siRNA target sequence for Gucy1a3 (NM_021896.3,436-454).
caccctggcagagagtatt

SEQ ID NO: 618475 - DNA, 19 bp, Mus musculus
  siRNA target sequence for Gucy1a3 (NM_021896.3,776-794).
gaagatgcctccatcttat

SEQ ID NO: 618476 - DNA, 19 bp, Mus musculus
  siRNA target sequence for Gucy1a3 (NM_021896.3,805-823).
ggaccaggactttctaaat

SEQ ID NO: 618477 - DNA, 19 bp, Mus musculus
  siRNA target sequence for Gucy1a3 (NM_021896.3,881-899).
gcggctgctcgcatactgt

SEQ ID NO: 618478 - DNA, 19 bp, Mus musculus
  siRNA target sequence for Gucy1a3 (NM_021896.3,882-900).
cggctgctcgcatactgta

SEQ ID NO: 618479 - DNA, 19 bp, Mus musculus
  siRNA target sequence for Gucy1a3 (NM_021896.3,887-905).
gctcgcatactgtacgaaa

SEQ ID NO: 618480 - DNA, 19 bp, Mus musculus
  siRNA target sequence for Gucy1a3 (NM_021896.3,945-963).
gtgactgtaccgagtttgt

SEQ ID NO: 618481 - DNA, 19 bp, Mus musculus
  siRNA target sequence for Gucy1a3 (NM_021896.3,947-965).
gactgtaccgagtttgtga

SEQ ID NO: 618482 - DNA, 19 bp, Mus musculus
  siRNA target sequence for Gucy1a3 (NM_021896.3,1162-1180).
ccaagggaagcccaacttt

SEQ ID NO: 618483 - DNA, 19 bp, Mus musculus
  siRNA target sequence for Gucy1a3 (NM_021896.3,1278-1296).
gggataactcggtgaagaa

SEQ ID NO: 618484 - DNA, 19 bp, Mus musculus
  siRNA target sequence for Gucy1a3 (NM_021896.3,1420-1438).
gtccgacatcccaattcat

SEQ ID NO: 618485 - DNA, 19 bp, Mus musculus
  siRNA target sequence for Gucy1a3 (NM_021896.3,1422-1440).
ccgacatcccaattcataa

SEQ ID NO: 618486 - DNA, 19 bp, Mus musculus
  siRNA target sequence for Gucy1a3 (NM_021896.3,1443-1461).
ccctgagggatgttgtctt

SEQ ID NO: 618487 - DNA, 19 bp, Mus musculus
  siRNA target sequence for Gucy1a3 (NM_021896.3,1447-1465).
gagggatgttgtcttgata

SEQ ID NO: 618488 - DNA, 19 bp, Mus musculus
  siRNA target sequence for Gucy1a3 (NM_021896.3,1482-1500).
ctcaagatggcctcaagaa

SEQ ID NO: 618489 - DNA, 19 bp, Mus musculus
  siRNA target sequence for Gucy1a3 (NM_021896.3,1615-1633).
gctgtggcaaggacaaatt

SEQ ID NO: 618490 - DNA, 19 bp, Mus musculus
  siRNA target sequence for Gucy1a3 (NM_021896.3,1653-1671).
gcgaggtcaccatgctttt

SEQ ID NO: 618491 - DNA, 19 bp, Mus musculus
  siRNA target sequence for Gucy1a3 (NM_021896.3,1666-1684).
gcttttctcagatatcgta

SEQ ID NO: 618492 - DNA, 19 bp, Mus musculus
  siRNA target sequence for Gucy1a3 (NM_021896.3,1798-1816).
gaccatcggggatgcatat

SEQ ID NO: 618493 - DNA, 19 bp, Mus musculus
  siRNA target sequence for Gucy1a3 (NM_021896.3,1801-1819).
catcggggatgcatattgt

SEQ ID NO: 618494 - DNA, 19 bp, Mus musculus
  siRNA target sequence for Gucy1a3 (NM_021896.3,1974-1992).
gagttgtcggagtgaagat

SEQ ID NO: 618495 - DNA, 19 bp, Mus musculus
  siRNA target sequence for Gucy1a3 (NM_021896.3,2049-2067).
gcagtgtgcctcggaaaat

SEQ ID NO: 618496 - DNA, 19 bp, Mus musculus
  siRNA target sequence for Gucy1a3 (NM_021896.3,2052-2070).
gtgtgcctcggaaaatcaa

SEQ ID NO: 618497 - DNA, 19 bp, Mus musculus
  siRNA target sequence for Gucy1a3 (NM_021896.3,2082-2100).
ccacatacaggttactcaa

SEQ ID NO: 618498 - DNA, 19 bp, Mus musculus
  siRNA target sequence for Gucy1a3 (NM_021896.3,2083-2101).
cacatacaggttactcaaa

SEQ ID NO: 618499 - DNA, 19 bp, Mus musculus
  siRNA target sequence for Gucy1a3 (NM_021896.3,2085-2103).
catacaggttactcaaaga

SEQ ID NO: 618500 - DNA, 19 bp, Mus musculus
  siRNA target sequence for Gucy1a3 (NM_021896.3,2204-2222).
catcaaggacctaattcca

SEQ ID NO: 618501 - DNA, 19 bp, Mus musculus
  siRNA target sequence for Gucy1a3 (NM_021896.3,2210-2228).
ggacctaattccaaaccat

SEQ ID NO: 618502 - DNA, 19 bp, Mus musculus
  siRNA target sequence for Gucy1a3 (NM_021896.3,2229-2247).
ggttccaggataaagatgt

SEQ ID NO: 618503 - DNA, 19 bp, Mus musculus
  siRNA target sequence for Gucy1a3 (NM_021896.3,2252-2270).
gatggaaacgccaacttct

SEQ ID NO: 618504 - DNA, 19 bp, Mus musculus
  siRNA target sequence for Gucy1b2 (NM_172810.1,108-126).
gtgttgtgtgctgagtata

SEQ ID NO: 618505 - DNA, 19 bp, Mus musculus
  siRNA target sequence for Gucy1b2 (NM_172810.1,120-138).
gagtatacgctaaaagtta

SEQ ID NO: 618506 - DNA, 19 bp, Mus musculus
  siRNA target sequence for Gucy1b2 (NM_172810.1,122-140).
gtatacgctaaaagttaaa

SEQ ID NO: 618507 - DNA, 19 bp, Mus musculus
  siRNA target sequence for Gucy1b2 (NM_172810.1,177-195).
ctgcgagcggagtttagga

SEQ ID NO: 618508 - DNA, 19 bp, Mus musculus
  siRNA target sequence for Gucy1b2 (NM_172810.1,196-214).
gcaagcgaacccatctaca

SEQ ID NO: 618509 - DNA, 19 bp, Mus musculus
  siRNA target sequence for Gucy1b2 (NM_172810.1,330-348).
gacaccatgtacggattta

SEQ ID NO: 618510 - DNA, 19 bp, Mus musculus
  siRNA target sequence for Gucy1b2 (NM_172810.1,334-352).
ccatgtacggatttatcaa

SEQ ID NO: 618511 - DNA, 19 bp, Mus musculus
  siRNA target sequence for Gucy1b2 (NM_172810.1,426-444).
gtgcaagatgtcttcatga

SEQ ID NO: 618512 - DNA, 19 bp, Mus musculus
  siRNA target sequence for Gucy1b2 (NM_172810.1,443-461).
gacctacaccgtgtatgat

SEQ ID NO: 618513 - DNA, 19 bp, Mus musculus
  siRNA target sequence for Gucy1b2 (NM_172810.1,445-463).
cctacaccgtgtatgatga

SEQ ID NO: 618514 - DNA, 19 bp, Mus musculus
  siRNA target sequence for Gucy1b2 (NM_172810.1,451-469).
ccgtgtatgatgataccat

SEQ ID NO: 618515 - DNA, 19 bp, Mus musculus
  siRNA target sequence for Gucy1b2 (NM_172810.1,534-552).
ctctttggcgaatacttct

SEQ ID NO: 618516 - DNA, 19 bp, Mus musculus
  siRNA target sequence for Gucy1b2 (NM_172810.1,540-558).
ggcgaatacttctttaagt

SEQ ID NO: 618517 - DNA, 19 bp, Mus musculus
  siRNA target sequence for Gucy1b2 (NM_172810.1,541-559).
gcgaatacttctttaagtt

SEQ ID NO: 618518 - DNA, 19 bp, Mus musculus
  siRNA target sequence for Gucy1b2 (NM_172810.1,604-622).
gaaatctcacagagtttat

SEQ ID NO: 618519 - DNA, 19 bp, Mus musculus
  siRNA target sequence for Gucy1b2 (NM_172810.1,655-673).
cactgtcctatcaggaaat

SEQ ID NO: 618520 - DNA, 19 bp, Mus musculus
  siRNA target sequence for Gucy1b2 (NM_172810.1,712-730).
gggcaatgcgtctccatta

SEQ ID NO: 618521 - DNA, 19 bp, Mus musculus
  siRNA target sequence for Gucy1b2 (NM_172810.1,714-732).
gcaatgcgtctccattact

SEQ ID NO: 618522 - DNA, 19 bp, Mus musculus
  siRNA target sequence for Gucy1b2 (NM_172810.1,715-733).
caatgcgtctccattacta

SEQ ID NO: 618523 - DNA, 19 bp, Mus musculus
  siRNA target sequence for Gucy1b2 (NM_172810.1,758-776).
catcgtaccaggcatcatt

SEQ ID NO: 618524 - DNA, 19 bp, Mus musculus
  siRNA target sequence for Gucy1b2 (NM_172810.1,761-779).
cgtaccaggcatcattgaa

SEQ ID NO: 618525 - DNA, 19 bp, Mus musculus
  siRNA target sequence for Gucy1b2 (NM_172810.1,805-823).
ctgatgtggccatgagtat

SEQ ID NO: 618526 - DNA, 19 bp, Mus musculus
  siRNA target sequence for Gucy1b2 (NM_172810.1,813-831).
gccatgagtatccttgata

SEQ ID NO: 618527 - DNA, 19 bp, Mus musculus
  siRNA target sequence for Gucy1b2 (NM_172810.1,818-836).
gagtatccttgatatgaat

SEQ ID NO: 618528 - DNA, 19 bp, Mus musculus
  siRNA target sequence for Gucy1b2 (NM_172810.1,820-838).
gtatccttgatatgaatga

SEQ ID NO: 618529 - DNA, 19 bp, Mus musculus
  siRNA target sequence for Gucy1b2 (NM_172810.1,890-908).
gaaggctcgaagacagata

SEQ ID NO: 618530 - DNA, 19 bp, Mus musculus
  siRNA target sequence for Gucy1b2 (NM_172810.1,905-923).
gataagaggggcaaaggta

SEQ ID NO: 618531 - DNA, 19 bp, Mus musculus
  siRNA target sequence for Gucy1b2 (NM_172810.1,989-1007).
gaagaaggagaggtattta

SEQ ID NO: 618532 - DNA, 19 bp, Mus musculus
  siRNA target sequence for Gucy1b2 (NM_172810.1,1193-1211).
gcaagctggagtgaatatt

SEQ ID NO: 618533 - DNA, 19 bp, Mus musculus
  siRNA target sequence for Gucy1b2 (NM_172810.1,1244-1262).
gtttggtctagatgagtat

SEQ ID NO: 618534 - DNA, 19 bp, Mus musculus
  siRNA target sequence for Gucy1b2 (NM_172810.1,1271-1289).
cgtccaccctcaagttact

SEQ ID NO: 618535 - DNA, 19 bp, Mus musculus
  siRNA target sequence for Gucy1b2 (NM_172810.1,1272-1290).
gtccaccctcaagttactt

SEQ ID NO: 618536 - DNA, 19 bp, Mus musculus
  siRNA target sequence for Gucy1b2 (NM_172810.1,1300-1318).
ccagcatctgcaagttcat

SEQ ID NO: 618537 - DNA, 19 bp, Mus musculus
  siRNA target sequence for Gucy1b2 (NM_172810.1,1307-1325).
ctgcaagttcattaacagt

SEQ ID NO: 618538 - DNA, 19 bp, Mus musculus
  siRNA target sequence for Gucy1b2 (NM_172810.1,1373-1391).
gagccagccgacactcaaa

SEQ ID NO: 618539 - DNA, 19 bp, Mus musculus
  siRNA target sequence for Gucy1b2 (NM_172810.1,1620-1638).
cacctggccattgaaaaga

SEQ ID NO: 618540 - DNA, 19 bp, Mus musculus
  siRNA target sequence for Gucy1b2 (NM_172810.1,1728-1746).
gagacgtgtaccatccttt

SEQ ID NO: 618541 - DNA, 19 bp, Mus musculus
  siRNA target sequence for Gucy1b2 (NM_172810.1,1781-1799).
ggcctgtgaacctatccaa

SEQ ID NO: 618542 - DNA, 19 bp, Mus musculus
  siRNA target sequence for Gucy1b2 (NM_172810.1,1782-1800).
gcctgtgaacctatccaaa

SEQ ID NO: 618543 - DNA, 19 bp, Mus musculus
  siRNA target sequence for Gucy1b2 (NM_172810.1,1783-1801).
cctgtgaacctatccaaat

SEQ ID NO: 618544 - DNA, 19 bp, Mus musculus
  siRNA target sequence for Gucy1b2 (NM_172810.1,1786-1804).
gtgaacctatccaaatagt

SEQ ID NO: 618545 - DNA, 19 bp, Mus musculus
  siRNA target sequence for Gucy1b2 (NM_172810.1,1792-1810).
ctatccaaatagtgaacat

SEQ ID NO: 618546 - DNA, 19 bp, Mus musculus
  siRNA target sequence for Gucy1b2 (NM_172810.1,1819-1837).
caatgtactccaagtttga

SEQ ID NO: 618547 - DNA, 19 bp, Mus musculus
  siRNA target sequence for Gucy1b2 (NM_172810.1,1846-1864).
ccaacatccatgatgtcta

SEQ ID NO: 618548 - DNA, 19 bp, Mus musculus
  siRNA target sequence for Gucy1b2 (NM_172810.1,1847-1865).
caacatccatgatgtctat

SEQ ID NO: 618549 - DNA, 19 bp, Mus musculus
  siRNA target sequence for Gucy1b2 (NM_172810.1,1908-1926).
gtaccagtacccgttgaaa

SEQ ID NO: 618550 - DNA, 19 bp, Mus musculus
  siRNA target sequence for Gucy1b2 (NM_172810.1,1966-1984).
gaatttctgcaaaagaagt

SEQ ID NO: 618551 - DNA, 19 bp, Mus musculus
  siRNA target sequence for Gucy1b2 (NM_172810.1,2030-2048).
ccatactggaccagtctta

SEQ ID NO: 618552 - DNA, 19 bp, Mus musculus
  siRNA target sequence for Gucy1b3 (NM_017469.2,144-162).
gctggtgatccgcaattat

SEQ ID NO: 618553 - DNA, 19 bp, Mus musculus
  siRNA target sequence for Gucy1b3 (NM_017469.2,147-165).
ggtgatccgcaattatggt

SEQ ID NO: 618554 - DNA, 19 bp, Mus musculus
  siRNA target sequence for Gucy1b3 (NM_017469.2,215-233).
gccagtttcttgtcagaat

SEQ ID NO: 618555 - DNA, 19 bp, Mus musculus
  siRNA target sequence for Gucy1b3 (NM_017469.2,216-234).
ccagtttcttgtcagaata

SEQ ID NO: 618556 - DNA, 19 bp, Mus musculus
  siRNA target sequence for Gucy1b3 (NM_017469.2,219-237).
gtttcttgtcagaataata

SEQ ID NO: 618557 - DNA, 19 bp, Mus musculus
  siRNA target sequence for Gucy1b3 (NM_017469.2,302-320).
gcgaaatcctgcagatgtt

SEQ ID NO: 618558 - DNA, 19 bp, Mus musculus
  siRNA target sequence for Gucy1b3 (NM_017469.2,345-363).
ccaggagtctggctatgat

SEQ ID NO: 618559 - DNA, 19 bp, Mus musculus
  siRNA target sequence for Gucy1b3 (NM_017469.2,372-390).
gcgtgtcctgggatctaat

SEQ ID NO: 618560 - DNA, 19 bp, Mus musculus
  siRNA target sequence for Gucy1b3 (NM_017469.2,427-445).
gaccacctcgccaccattt

SEQ ID NO: 618561 - DNA, 19 bp, Mus musculus
  siRNA target sequence for Gucy1b3 (NM_017469.2,547-565).
gtgatcgggattatcaaga

SEQ ID NO: 618562 - DNA, 19 bp, Mus musculus
  siRNA target sequence for Gucy1b3 (NM_017469.2,579-597).
gatacacggcactgagata

SEQ ID NO: 618563 - DNA, 19 bp, Mus musculus
  siRNA target sequence for Gucy1b3 (NM_017469.2,696-714).
ggataggtttgaagagaat

SEQ ID NO: 618564 - DNA, 19 bp, Mus musculus
  siRNA target sequence for Gucy1b3 (NM_017469.2,997-1015).
ctgactggagcagagatta

SEQ ID NO: 618565 - DNA, 19 bp, Mus musculus
  siRNA target sequence for Gucy1b3 (NM_017469.2,1024-1042).
cgtctcaaaggccaaatga

SEQ ID NO: 618566 - DNA, 19 bp, Mus musculus
  siRNA target sequence for Gucy1b3 (NM_017469.2,1101-1119).
ggacgacctaacaagaaga

SEQ ID NO: 618567 - DNA, 19 bp, Mus musculus
  siRNA target sequence for Gucy1b3 (NM_017469.2,1157-1175).
cccgagacctggttctttt

SEQ ID NO: 618568 - DNA, 19 bp, Mus musculus
  siRNA target sequence for Gucy1b3 (NM_017469.2,1185-1203).
gttccgggaggagtacaaa

SEQ ID NO: 618569 - DNA, 19 bp, Mus musculus
  siRNA target sequence for Gucy1b3 (NM_017469.2,1534-1552).
gttggtgacaagtatatga

SEQ ID NO: 618570 - DNA, 19 bp, Mus musculus
  siRNA target sequence for Gucy1b3 (NM_017469.2,1716-1734).
gcggatgcctcggtattgt

SEQ ID NO: 618571 - DNA, 19 bp, Mus musculus
  siRNA target sequence for Gucy1b3 (NM_017469.2,1718-1736).
ggatgcctcggtattgtct

SEQ ID NO: 618572 - DNA, 19 bp, Mus musculus
  siRNA target sequence for Gucy1b3 (NM_017469.2,1794-1812).
gataaatgtttccgaatat

SEQ ID NO: 618573 - DNA, 19 bp, Mus musculus
  siRNA target sequence for Gucy1b3 (NM_017469.2,1801-1819).
gtttccgaatatacataca

SEQ ID NO: 618574 - DNA, 19 bp, Mus musculus
  siRNA target sequence for Gucy1b3 (NM_017469.2,1823-1841).
gtctcatgtctccagaaaa

SEQ ID NO: 618575 - DNA, 19 bp, Mus musculus
  siRNA target sequence for Gucy1b3 (NM_017469.2,1825-1843).
ctcatgtctccagaaaact

SEQ ID NO: 618576 - DNA, 19 bp, Mus musculus
  siRNA target sequence for Gucy1b3 (NM_017469.2,1844-1862).
cggatccactgttccattt

SEQ ID NO: 618577 - DNA, 19 bp, Mus musculus
  siRNA target sequence for Gucy1b3 (NM_017469.2,1916-1934).
ggttcctatccaggaaaaa

SEQ ID NO: 618578 - DNA, 19 bp, Mus musculus
  siRNA target sequence for Sacy (NM_173029.1,245-263).
cagggcaatcgtcaagata

SEQ ID NO: 618579 - DNA, 19 bp, Mus musculus
  siRNA target sequence for Sacy (NM_173029.1,287-305).
cgtctacggagatttctct

SEQ ID NO: 618580 - DNA, 19 bp, Mus musculus
  siRNA target sequence for Sacy (NM_173029.1,306-324).
ccggaacggccgtcagtaa

SEQ ID NO: 618581 - DNA, 19 bp, Mus musculus
  siRNA target sequence for Sacy (NM_173029.1,307-325).
cggaacggccgtcagtaaa

SEQ ID NO: 618582 - DNA, 19 bp, Mus musculus
  siRNA target sequence for Sacy (NM_173029.1,308-326).
ggaacggccgtcagtaaaa

SEQ ID NO: 618583 - DNA, 19 bp, Mus musculus
  siRNA target sequence for Sacy (NM_173029.1,312-330).
cggccgtcagtaaaatgtt

SEQ ID NO: 618584 - DNA, 19 bp, Mus musculus
  siRNA target sequence for Sacy (NM_173029.1,316-334).
cgtcagtaaaatgttttga

SEQ ID NO: 618585 - DNA, 19 bp, Mus musculus
  siRNA target sequence for Sacy (NM_173029.1,483-501).
ggaggagacatcctaaaat

SEQ ID NO: 618586 - DNA, 19 bp, Mus musculus
  siRNA target sequence for Sacy (NM_173029.1,530-548).
gaaagtggaacgaaagcaa

SEQ ID NO: 618587 - DNA, 19 bp, Mus musculus
  siRNA target sequence for Sacy (NM_173029.1,630-648).
ctggacattcgagttaaga

SEQ ID NO: 618588 - DNA, 19 bp, Mus musculus
  siRNA target sequence for Sacy (NM_173029.1,632-650).
ggacattcgagttaagata

SEQ ID NO: 618589 - DNA, 19 bp, Mus musculus
  siRNA target sequence for Sacy (NM_173029.1,690-708).
gatgaaacacggaactact

SEQ ID NO: 618590 - DNA, 19 bp, Mus musculus
  siRNA target sequence for Sacy (NM_173029.1,760-778).
ctcagatgaacgacgttat

SEQ ID NO: 618591 - DNA, 19 bp, Mus musculus
  siRNA target sequence for Sacy (NM_173029.1,762-780).
cagatgaacgacgttattt

SEQ ID NO: 618592 - DNA, 19 bp, Mus musculus
  siRNA target sequence for Sacy (NM_173029.1,767-785).
gaacgacgttattttgtca

SEQ ID NO: 618593 - DNA, 19 bp, Mus musculus
  siRNA target sequence for Sacy (NM_173029.1,807-825).
gatcggagcatgattgaaa

SEQ ID NO: 618594 - DNA, 19 bp, Mus musculus
  siRNA target sequence for Sacy (NM_173029.1,811-829).
ggagcatgattgaaattga

SEQ ID NO: 618595 - DNA, 19 bp, Mus musculus
  siRNA target sequence for Sacy (NM_173029.1,877-895).
ccccaacctttaattttga

SEQ ID NO: 618596 - DNA, 19 bp, Mus musculus
  siRNA target sequence for Sacy (NM_173029.1,894-912).
gacgagtttttcacaaaat

SEQ ID NO: 618597 - DNA, 19 bp, Mus musculus
  siRNA target sequence for Sacy (NM_173029.1,913-931).
gtatgggcttcatggatta

SEQ ID NO: 618598 - DNA, 19 bp, Mus musculus
  siRNA target sequence for Sacy (NM_173029.1,1011-1029).
caaaagtacgtgatggaaa

SEQ ID NO: 618599 - DNA, 19 bp, Mus musculus
  siRNA target sequence for Sacy (NM_173029.1,1016-1034).
gtacgtgatggaaatcatt

SEQ ID NO: 618600 - DNA, 19 bp, Mus musculus
  siRNA target sequence for Sacy (NM_173029.1,1079-1097).
gcttcgccctgtgacaatt

SEQ ID NO: 618601 - DNA, 19 bp, Mus musculus
  siRNA target sequence for Sacy (NM_173029.1,1196-1214).
cttccgaggccagatcaat

SEQ ID NO: 618602 - DNA, 19 bp, Mus musculus
  siRNA target sequence for Sacy (NM_173029.1,1304-1322).
ggaaagtgccgtggatata

SEQ ID NO: 618603 - DNA, 19 bp, Mus musculus
  siRNA target sequence for Sacy (NM_173029.1,1309-1327).
gtgccgtggatatatttga

SEQ ID NO: 618604 - DNA, 19 bp, Mus musculus
  siRNA target sequence for Sacy (NM_173029.1,1312-1330).
ccgtggatatatttgactt

SEQ ID NO: 618605 - DNA, 19 bp, Mus musculus
  siRNA target sequence for Sacy (NM_173029.1,1333-1351).
gctcccaggtccacaaaat

SEQ ID NO: 618606 - DNA, 19 bp, Mus musculus
  siRNA target sequence for Sacy (NM_173029.1,1436-1454).
cggtcagaaggtcaacatt

SEQ ID NO: 618607 - DNA, 19 bp, Mus musculus
  siRNA target sequence for Sacy (NM_173029.1,1523-1541).
cctaccagcctactttttt

SEQ ID NO: 618608 - DNA, 19 bp, Mus musculus
  siRNA target sequence for Sacy (NM_173029.1,1524-1542).
ctaccagcctactttttta

SEQ ID NO: 618609 - DNA, 19 bp, Mus musculus
  siRNA target sequence for Sacy (NM_173029.1,1581-1599).
cctggacccgtgtatcagt

SEQ ID NO: 618610 - DNA, 19 bp, Mus musculus
  siRNA target sequence for Sacy (NM_173029.1,1585-1603).
gacccgtgtatcagtgttt

SEQ ID NO: 618611 - DNA, 19 bp, Mus musculus
  siRNA target sequence for Sacy (NM_173029.1,1600-1618).
gtttgggcctcaatgagaa

SEQ ID NO: 618612 - DNA, 19 bp, Mus musculus
  siRNA target sequence for Sacy (NM_173029.1,1605-1623).
ggcctcaatgagaaagtca

SEQ ID NO: 618613 - DNA, 19 bp, Mus musculus
  siRNA target sequence for Sacy (NM_173029.1,1606-1624).
gcctcaatgagaaagtcat

SEQ ID NO: 618614 - DNA, 19 bp, Mus musculus
  siRNA target sequence for Sacy (NM_173029.1,1683-1701).
gttagggagatcgactatt

SEQ ID NO: 618615 - DNA, 19 bp, Mus musculus
  siRNA target sequence for Sacy (NM_173029.1,1687-1705).
gggagatcgactatttcat

SEQ ID NO: 618616 - DNA, 19 bp, Mus musculus
  siRNA target sequence for Sacy (NM_173029.1,1689-1707).
gagatcgactatttcatgt

SEQ ID NO: 618617 - DNA, 19 bp, Mus musculus
  siRNA target sequence for Sacy (NM_173029.1,1695-1713).
gactatttcatgtctacta

SEQ ID NO: 618618 - DNA, 19 bp, Mus musculus
  siRNA target sequence for Sacy (NM_173029.1,1733-1751).
gaactgcagccgagttcta

SEQ ID NO: 618619 - DNA, 19 bp, Mus musculus
  siRNA target sequence for Sacy (NM_173029.1,1738-1756).
gcagccgagttctaatgta

SEQ ID NO: 618620 - DNA, 19 bp, Mus musculus
  siRNA target sequence for Sacy (NM_173029.1,1739-1757).
cagccgagttctaatgtat

SEQ ID NO: 618621 - DNA, 19 bp, Mus musculus
  siRNA target sequence for Sacy (NM_173029.1,1741-1759).
gccgagttctaatgtatga

SEQ ID NO: 618622 - DNA, 19 bp, Mus musculus
  siRNA target sequence for Sacy (NM_173029.1,1742-1760).
ccgagttctaatgtatgaa

SEQ ID NO: 618623 - DNA, 19 bp, Mus musculus
  siRNA target sequence for Sacy (NM_173029.1,1787-1805).
ggtactcatggaaatcgaa

SEQ ID NO: 618624 - DNA, 19 bp, Mus musculus
  siRNA target sequence for Sacy (NM_173029.1,1842-1860).
gctattgcactgactaaga

SEQ ID NO: 618625 - DNA, 19 bp, Mus musculus
  siRNA target sequence for Sacy (NM_173029.1,1843-1861).
ctattgcactgactaagat

SEQ ID NO: 618626 - DNA, 19 bp, Mus musculus
  siRNA target sequence for Sacy (NM_173029.1,1862-1880).
cagcttccatcaaaatttt

SEQ ID NO: 618627 - DNA, 19 bp, Mus musculus
  siRNA target sequence for Sacy (NM_173029.1,1864-1882).
gcttccatcaaaattttta

SEQ ID NO: 618628 - DNA, 19 bp, Mus musculus
  siRNA target sequence for Sacy (NM_173029.1,1868-1886).
ccatcaaaatttttatact

SEQ ID NO: 618629 - DNA, 19 bp, Mus musculus
  siRNA target sequence for Sacy (NM_173029.1,1911-1929).
ctaggtctggacacttgta

SEQ ID NO: 618630 - DNA, 19 bp, Mus musculus
  siRNA target sequence for Sacy (NM_173029.1,1945-1963).
gacagaccaatcttcaaaa

SEQ ID NO: 618631 - DNA, 19 bp, Mus musculus
  siRNA target sequence for Sacy (NM_173029.1,1949-1967).
gaccaatcttcaaaataga

SEQ ID NO: 618632 - DNA, 19 bp, Mus musculus
  siRNA target sequence for Sacy (NM_173029.1,2048-2066).
gtccaggatgagcaagata

SEQ ID NO: 618633 - DNA, 19 bp, Mus musculus
  siRNA target sequence for Sacy (NM_173029.1,2202-2220).
cgctctatgcccatcttca

SEQ ID NO: 618634 - DNA, 19 bp, Mus musculus
  siRNA target sequence for Sacy (NM_173029.1,2262-2280).
gctgccaatgccataatga

SEQ ID NO: 618635 - DNA, 19 bp, Mus musculus
  siRNA target sequence for Sacy (NM_173029.1,2314-2332).
ccatgcagcctcaggaaat

SEQ ID NO: 618636 - DNA, 19 bp, Mus musculus
  siRNA target sequence for Sacy (NM_173029.1,2407-2425).
gctgcgggattccgtatta

SEQ ID NO: 618637 - DNA, 19 bp, Mus musculus
  siRNA target sequence for Sacy (NM_173029.1,2411-2429).
cgggattccgtattactgt

SEQ ID NO: 618638 - DNA, 19 bp, Mus musculus
  siRNA target sequence for Sacy (NM_173029.1,2459-2477).
cagagttctcctttttcaa

SEQ ID NO: 618639 - DNA, 19 bp, Mus musculus
  siRNA target sequence for Sacy (NM_173029.1,2500-2518).
caaacgtgacctggaataa

SEQ ID NO: 618640 - DNA, 19 bp, Mus musculus
  siRNA target sequence for Sacy (NM_173029.1,2509-2527).
cctggaataacatgttcaa

SEQ ID NO: 618641 - DNA, 19 bp, Mus musculus
  siRNA target sequence for Sacy (NM_173029.1,2547-2565).
gatgacatgcaacttttca

SEQ ID NO: 618642 - DNA, 19 bp, Mus musculus
  siRNA target sequence for Sacy (NM_173029.1,2638-2656).
cagcatcgctaaaagagat

SEQ ID NO: 618643 - DNA, 19 bp, Mus musculus
  siRNA target sequence for Sacy (NM_173029.1,2640-2658).
gcatcgctaaaagagatat

SEQ ID NO: 618644 - DNA, 19 bp, Mus musculus
  siRNA target sequence for Sacy (NM_173029.1,2716-2734).
ccatcattggcctaacctt

SEQ ID NO: 618645 - DNA, 19 bp, Mus musculus
  siRNA target sequence for Sacy (NM_173029.1,2799-2817).
gccaccctagtggaatcaa

SEQ ID NO: 618646 - DNA, 19 bp, Mus musculus
  siRNA target sequence for Sacy (NM_173029.1,2800-2818).
ccaccctagtggaatcaaa

SEQ ID NO: 618647 - DNA, 19 bp, Mus musculus
  siRNA target sequence for Sacy (NM_173029.1,2801-2819).
caccctagtggaatcaaat

SEQ ID NO: 618648 - DNA, 19 bp, Mus musculus
  siRNA target sequence for Sacy (NM_173029.1,2803-2821).
ccctagtggaatcaaatgt

SEQ ID NO: 618649 - DNA, 19 bp, Mus musculus
  siRNA target sequence for Sacy (NM_173029.1,2805-2823).
ctagtggaatcaaatgttt

SEQ ID NO: 618650 - DNA, 19 bp, Mus musculus
  siRNA target sequence for Sacy (NM_173029.1,2808-2826).
gtggaatcaaatgttttca

SEQ ID NO: 618651 - DNA, 19 bp, Mus musculus
  siRNA target sequence for Sacy (NM_173029.1,2810-2828).
ggaatcaaatgttttcaat

SEQ ID NO: 618652 - DNA, 19 bp, Mus musculus
  siRNA target sequence for Sacy (NM_173029.1,2831-2849).
cttccggagtagcaaagat

SEQ ID NO: 618653 - DNA, 19 bp, Mus musculus
  siRNA target sequence for Sacy (NM_173029.1,2834-2852).
ccggagtagcaaagatctt

SEQ ID NO: 618654 - DNA, 19 bp, Mus musculus
  siRNA target sequence for Sacy (NM_173029.1,2877-2895).
ccaacatttgaggttcatt

SEQ ID NO: 618655 - DNA, 19 bp, Mus musculus
  siRNA target sequence for Sacy (NM_173029.1,2995-3013).
ggttctgcagacccataat

SEQ ID NO: 618656 - DNA, 19 bp, Mus musculus
  siRNA target sequence for Sacy (NM_173029.1,3077-3095).
ccgctttttggaagaaagt

SEQ ID NO: 618657 - DNA, 19 bp, Mus musculus
  siRNA target sequence for Sacy (NM_173029.1,3107-3125).
caaccactgcagaaacgta

SEQ ID NO: 618658 - DNA, 19 bp, Mus musculus
  siRNA target sequence for Sacy (NM_173029.1,3115-3133).
gcagaaacgtagacttcat

SEQ ID NO: 618659 - DNA, 19 bp, Mus musculus
  siRNA target sequence for Sacy (NM_173029.1,3116-3134).
cagaaacgtagacttcatt

SEQ ID NO: 618660 - DNA, 19 bp, Mus musculus
  siRNA target sequence for Sacy (NM_173029.1,3136-3154).
cctaccaccatttcatagt

SEQ ID NO: 618661 - DNA, 19 bp, Mus musculus
  siRNA target sequence for Sacy (NM_173029.1,3156-3174).
gacattcgactcaacactt

SEQ ID NO: 618662 - DNA, 19 bp, Mus musculus
  siRNA target sequence for Sacy (NM_173029.1,3162-3180).
cgactcaacactttggata

SEQ ID NO: 618663 - DNA, 19 bp, Mus musculus
  siRNA target sequence for Sacy (NM_173029.1,3251-3269).
gtcagagctccctaggaaa

SEQ ID NO: 618664 - DNA, 19 bp, Mus musculus
  siRNA target sequence for Sacy (NM_173029.1,3503-3521).
catcctgggagacaactat

SEQ ID NO: 618665 - DNA, 19 bp, Mus musculus
  siRNA target sequence for Sacy (NM_173029.1,3506-3524).
cctgggagacaactataat

SEQ ID NO: 618666 - DNA, 19 bp, Mus musculus
  siRNA target sequence for Sacy (NM_173029.1,3560-3578).
gaaatctctgacgaatgaa

SEQ ID NO: 618667 - DNA, 19 bp, Mus musculus
  siRNA target sequence for Sacy (NM_173029.1,3567-3585).
ctgacgaatgaagattctt

SEQ ID NO: 618668 - DNA, 19 bp, Mus musculus
  siRNA target sequence for Sacy (NM_173029.1,3586-3604).
ggagtcagacctttgaata

SEQ ID NO: 618669 - DNA, 19 bp, Mus musculus
  siRNA target sequence for Sacy (NM_173029.1,3596-3614).
ctttgaatatgctaccttt

SEQ ID NO: 618670 - DNA, 19 bp, Mus musculus
  siRNA target sequence for Sacy (NM_173029.1,3623-3641).
caaggctgaggtctgtttt

SEQ ID NO: 618671 - DNA, 19 bp, Mus musculus
  siRNA target sequence for Sacy (NM_173029.1,3692-3710).
gctgctcaacagaatgttt

SEQ ID NO: 618672 - DNA, 19 bp, Mus musculus
  siRNA target sequence for Sacy (NM_173029.1,3727-3745).
ccctgactttccaaatgca

SEQ ID NO: 618673 - DNA, 19 bp, Mus musculus
  siRNA target sequence for Sacy (NM_173029.1,3760-3778).
gactctcccacttcatgaa

SEQ ID NO: 618674 - DNA, 19 bp, Mus musculus
  siRNA target sequence for Sacy (NM_173029.1,3932-3950).
cacttccctggaaactcaa

SEQ ID NO: 618675 - DNA, 19 bp, Mus musculus
  siRNA target sequence for Sacy (NM_173029.1,3937-3955).
ccctggaaactcaaaatga

SEQ ID NO: 618676 - DNA, 19 bp, Mus musculus
  siRNA target sequence for Sacy (NM_173029.1,4014-4032).
cagggcgtgtggttcaaat

SEQ ID NO: 618677 - DNA, 19 bp, Mus musculus
  siRNA target sequence for Sacy (NM_173029.1,4016-4034).
gggcgtgtggttcaaatat

SEQ ID NO: 618678 - DNA, 19 bp, Mus musculus
  siRNA target sequence for Sacy (NM_173029.1,4018-4036).
gcgtgtggttcaaatatga

SEQ ID NO: 618679 - DNA, 19 bp, Mus musculus
  siRNA target sequence for Sacy (NM_173029.1,4078-4096).
gcgaggccattgagatcat

SEQ ID NO: 618680 - DNA, 19 bp, Mus musculus
  siRNA target sequence for Sacy (NM_173029.1,4114-4132).
cactgggccacatcaagtt

SEQ ID NO: 618681 - DNA, 19 bp, Mus musculus
  siRNA target sequence for Sacy (NM_173029.1,4116-4134).
ctgggccacatcaagttct

SEQ ID NO: 618682 - DNA, 19 bp, Mus musculus
  siRNA target sequence for Sacy (NM_173029.1,4118-4136).
gggccacatcaagttctta

SEQ ID NO: 618683 - DNA, 19 bp, Mus musculus
  siRNA target sequence for Sacy (NM_173029.1,4119-4137).
ggccacatcaagttcttaa

SEQ ID NO: 618684 - DNA, 19 bp, Mus musculus
  siRNA target sequence for Sacy (NM_173029.1,4120-4138).
gccacatcaagttcttaat

SEQ ID NO: 618685 - DNA, 19 bp, Mus musculus
  siRNA target sequence for Sacy (NM_173029.1,4181-4199).
caggatgtggtcacttctt

SEQ ID NO: 618686 - DNA, 19 bp, Mus musculus
  siRNA target sequence for Sacy (NM_173029.1,4197-4215).
cttcggaatcccaacaaat

SEQ ID NO: 618687 - DNA, 19 bp, Mus musculus
  siRNA target sequence for Sacy (NM_173029.1,4300-4318).
gggacctttctgtaacaga

SEQ ID NO: 618688 - DNA, 19 bp, Mus musculus
  siRNA target sequence for Sacy (NM_173029.1,4301-4319).
ggacctttctgtaacagaa

SEQ ID NO: 618689 - DNA, 19 bp, Mus musculus
  siRNA target sequence for Sacy (NM_173029.1,4361-4379).
ggacatcatgctttattct

SEQ ID NO: 618690 - DNA, 19 bp, Mus musculus
  siRNA target sequence for Sacy (NM_173029.1,4498-4516).
ggtatgccagacttcaaga

SEQ ID NO: 618691 - DNA, 19 bp, Mus musculus
  siRNA target sequence for Sacy (NM_173029.1,4512-4530).
caagagtgggacaacttta

SEQ ID NO: 618692 - DNA, 19 bp, Mus musculus
  siRNA target sequence for Sacy (NM_173029.1,4570-4588).
gaaccccgacagttcttta

SEQ ID NO: 618693 - DNA, 19 bp, Mus musculus
  siRNA target sequence for Sacy (NM_173029.1,4573-4591).
ccccgacagttctttacta

SEQ ID NO: 618694 - DNA, 19 bp, Mus musculus
  siRNA target sequence for Sacy (NM_173029.1,4675-4693).
gtggggtggagatactcaa

SEQ ID NO: 618695 - DNA, 19 bp, Mus musculus
  siRNA target sequence for Sacy (NM_173029.1,4744-4762).
cgaggctctaccatctgat

SEQ ID NO: 618696 - DNA, 19 bp, Mus musculus
  siRNA target sequence for Sacy (NM_173029.1,4755-4773).
catctgatggcctatgtct

SEQ ID NO: 618697 - DNA, 19 bp, Mus musculus
  siRNA target sequence for Sacy (NM_173029.1,4764-4782).
gcctatgtctgcatactaa

SEQ ID NO: 618698 - DNA, 19 bp, Mus musculus
  siRNA target sequence for Sacy (NM_173029.1,4765-4783).
cctatgtctgcatactaat

SEQ ID NO: 618699 - DNA, 19 bp, Mus musculus
  siRNA target sequence for Sacy (NM_173029.1,4895-4913).
ctcagcctccgagttaaca

SEQ ID NO: 618700 - DNA, 19 bp, Mus musculus
  siRNA target sequence for Sacy (NM_173029.1,4905-4923).
gagttaacaggagatcaat

SEQ ID NO: 618701 - DNA, 19 bp, Mus musculus
  siRNA target sequence for Sacy (NM_173029.1,4948-4966).
catcatgggataaaattgt

SEQ ID NO: 618702 - DNA, 19 bp, Mus musculus
  siRNA target sequence for Sacy (NM_173029.1,5006-5024).
gttctgtccccccaacttt

SEQ ID NO: 618703 - DNA, 19 bp, Mus musculus
  siRNA target sequence for 2700085E05Rik (NM_026029.1,26-44).
cgagctctgcacttcgttt

SEQ ID NO: 618704 - DNA, 19 bp, Mus musculus
  siRNA target sequence for 2700085E05Rik (NM_026029.1,27-45).
gagctctgcacttcgtttt

SEQ ID NO: 618705 - DNA, 19 bp, Mus musculus
  siRNA target sequence for 2700085E05Rik (NM_026029.1,60-78).
gcttccagacagtgcattt

SEQ ID NO: 618706 - DNA, 19 bp, Mus musculus
  siRNA target sequence for 2700085E05Rik (NM_026029.1,64-82).
ccagacagtgcatttcttt

SEQ ID NO: 618707 - DNA, 19 bp, Mus musculus
  siRNA target sequence for 2700085E05Rik (NM_026029.1,109-127).
ccgccatgaggaatttgaa

SEQ ID NO: 618708 - DNA, 19 bp, Mus musculus
  siRNA target sequence for 2700085E05Rik (NM_026029.1,161-179).
gatgggaagtggagtaaaa

SEQ ID NO: 618709 - DNA, 19 bp, Mus musculus
  siRNA target sequence for 2700085E05Rik (NM_026029.1,164-182).
gggaagtggagtaaaacaa

SEQ ID NO: 618710 - DNA, 19 bp, Mus musculus
  siRNA target sequence for 2700085E05Rik (NM_026029.1,198-216).
ccgaggatgatcattttgt

SEQ ID NO: 618711 - DNA, 19 bp, Mus musculus
  siRNA target sequence for 2700085E05Rik (NM_026029.1,209-227).
cattttgttgcagaattga

SEQ ID NO: 618712 - DNA, 19 bp, Mus musculus
  siRNA target sequence for 2700085E05Rik (NM_026029.1,374-392).
ggaggatataagttctact

SEQ ID NO: 618713 - DNA, 19 bp, Mus musculus
  siRNA target sequence for 2700085E05Rik (NM_026029.1,417-435).
cagatcctgtattaaaggt

SEQ ID NO: 618714 - DNA, 19 bp, Mus musculus
  siRNA target sequence for 2700085E05Rik (NM_026029.1,455-473).
ctccagaagtccttgaact

SEQ ID NO: 618715 - DNA, 19 bp, Mus musculus
  siRNA target sequence for 2700085E05Rik (NM_026029.1,458-476).
cagaagtccttgaactact

SEQ ID NO: 618716 - DNA, 19 bp, Mus musculus
  siRNA target sequence for 2700085E05Rik (NM_026029.1,600-618).
cagcggcctttggaagaat

SEQ ID NO: 618717 - DNA, 19 bp, Mus musculus
  siRNA target sequence for 2700085E05Rik (NM_026029.1,792-810).
cttttcgagaactctctaa

SEQ ID NO: 618718 - DNA, 19 bp, Mus musculus
  siRNA target sequence for 2700085E05Rik (NM_026029.1,805-823).
ctctaagatggatccaaaa

SEQ ID NO: 618719 - DNA, 19 bp, Mus musculus
  siRNA target sequence for 2700085E05Rik (NM_026029.1,814-832).
ggatccaaaaggaagcaaa

SEQ ID NO: 618720 - DNA, 19 bp, Mus musculus
  siRNA target sequence for 2700085E05Rik (NM_026029.1,873-891).
ggtttgctacgaggaataa

SEQ ID NO: 618721 - DNA, 19 bp, Mus musculus
  siRNA target sequence for 2700085E05Rik (NM_026029.1,878-896).
gctacgaggaataaaccaa

SEQ ID NO: 618722 - DNA, 19 bp, Mus musculus
  siRNA target sequence for 2700085E05Rik (NM_026029.1,879-897).
ctacgaggaataaaccaaa

SEQ ID NO: 618723 - DNA, 19 bp, Mus musculus
  siRNA target sequence for Glo1 (NM_025374.2,500-518).
ctaggtgtcaagtttgtga

SEQ ID NO: 618724 - DNA, 19 bp, Mus musculus
  siRNA target sequence for Hccs (NM_008222.2,228-246).
ctcctgctactgcagtaaa

SEQ ID NO: 618725 - DNA, 19 bp, Mus musculus
  siRNA target sequence for Hccs (NM_008222.2,242-260).
gtaaacgcctcgaatgctt

SEQ ID NO: 618726 - DNA, 19 bp, Mus musculus
  siRNA target sequence for Hccs (NM_008222.2,247-265).
cgcctcgaatgcttcagat

SEQ ID NO: 618727 - DNA, 19 bp, Mus musculus
  siRNA target sequence for Hccs (NM_008222.2,288-306).
caggatgcccgatgcataa

SEQ ID NO: 618728 - DNA, 19 bp, Mus musculus
  siRNA target sequence for Hccs (NM_008222.2,428-446).
ggtgctagagctaaggata

SEQ ID NO: 618729 - DNA, 19 bp, Mus musculus
  siRNA target sequence for Hccs (NM_008222.2,429-447).
gtgctagagctaaggataa

SEQ ID NO: 618730 - DNA, 19 bp, Mus musculus
  siRNA target sequence for Hccs (NM_008222.2,432-450).
ctagagctaaggataagga

SEQ ID NO: 618731 - DNA, 19 bp, Mus musculus
  siRNA target sequence for Hccs (NM_008222.2,499-517).
cccagatcagccatttact

SEQ ID NO: 618732 - DNA, 19 bp, Mus musculus
  siRNA target sequence for Hccs (NM_008222.2,500-518).
ccagatcagccatttactt

SEQ ID NO: 618733 - DNA, 19 bp, Mus musculus
  siRNA target sequence for Hccs (NM_008222.2,503-521).
gatcagccatttactttgt

SEQ ID NO: 618734 - DNA, 19 bp, Mus musculus
  siRNA target sequence for Hccs (NM_008222.2,528-546).
caagagaggagtcatcaat

SEQ ID NO: 618735 - DNA, 19 bp, Mus musculus
  siRNA target sequence for Hccs (NM_008222.2,766-784).
ggtccgatttggaggtaaa

SEQ ID NO: 618736 - DNA, 19 bp, Mus musculus
  siRNA target sequence for Hccs (NM_008222.2,769-787).
ccgatttggaggtaaagca

SEQ ID NO: 618737 - DNA, 19 bp, Mus musculus
  siRNA target sequence for Hccs (NM_008222.2,770-788).
cgatttggaggtaaagcaa

SEQ ID NO: 618738 - DNA, 19 bp, Mus musculus
  siRNA target sequence for Hccs (NM_008222.2,828-846).
ggtatgaattgccttttga

SEQ ID NO: 618739 - DNA, 19 bp, Mus musculus
  siRNA target sequence for Hccs (NM_008222.2,849-867).
gccatgactggatcatcaa

SEQ ID NO: 618740 - DNA, 19 bp, Mus musculus
  siRNA target sequence for Hccs (NM_008222.2,850-868).
ccatgactggatcatcaat

SEQ ID NO: 618741 - DNA, 19 bp, Mus musculus
  siRNA target sequence for Hccs (NM_008222.2,869-887).
cgttgtggcacagaagtta

SEQ ID NO: 618742 - DNA, 19 bp, Mus musculus
  siRNA target sequence for Hccs (NM_008222.2,876-894).
gcacagaagttagatatgt

SEQ ID NO: 618743 - DNA, 19 bp, Mus musculus
  siRNA target sequence for Hccs (NM_008222.2,879-897).
cagaagttagatatgtgat

SEQ ID NO: 618744 - DNA, 19 bp, Mus musculus
  siRNA target sequence for Cth (NM_145953.2,37-55).
cagaaggacgcctctttga

SEQ ID NO: 618745 - DNA, 19 bp, Mus musculus
  siRNA target sequence for Cth (NM_145953.2,56-74).
gcggcttcctgcctagttt

SEQ ID NO: 618746 - DNA, 19 bp, Mus musculus
  siRNA target sequence for Cth (NM_145953.2,114-132).
gcctgagcaatggaattct

SEQ ID NO: 618747 - DNA, 19 bp, Mus musculus
  siRNA target sequence for Cth (NM_145953.2,139-157).
gtggtgctgcccatttcgt

SEQ ID NO: 618748 - DNA, 19 bp, Mus musculus
  siRNA target sequence for Cth (NM_145953.2,155-173).
cgttggccaccacatttaa

SEQ ID NO: 618749 - DNA, 19 bp, Mus musculus
  siRNA target sequence for Cth (NM_145953.2,188-206).
gccagtcctcgggttttga

SEQ ID NO: 618750 - DNA, 19 bp, Mus musculus
  siRNA target sequence for Cth (NM_145953.2,189-207).
ccagtcctcgggttttgaa

SEQ ID NO: 618751 - DNA, 19 bp, Mus musculus
  siRNA target sequence for Cth (NM_145953.2,190-208).
cagtcctcgggttttgaat

SEQ ID NO: 618752 - DNA, 19 bp, Mus musculus
  siRNA target sequence for Cth (NM_145953.2,298-316).
ggtcttgctgccaccatta

SEQ ID NO: 618753 - DNA, 19 bp, Mus musculus
  siRNA target sequence for Cth (NM_145953.2,304-322).
gctgccaccattacgatta

SEQ ID NO: 618754 - DNA, 19 bp, Mus musculus
  siRNA target sequence for Cth (NM_145953.2,341-359).
gagatgaaatcatttgcat

SEQ ID NO: 618755 - DNA, 19 bp, Mus musculus
  siRNA target sequence for Cth (NM_145953.2,407-425).
ctgaatttggactgaagat

SEQ ID NO: 618756 - DNA, 19 bp, Mus musculus
  siRNA target sequence for Cth (NM_145953.2,433-451).
gtagattgttccaaaacca

SEQ ID NO: 618757 - DNA, 19 bp, Mus musculus
  siRNA target sequence for Cth (NM_145953.2,456-474).
gctagaggcagcgattaca

SEQ ID NO: 618758 - DNA, 19 bp, Mus musculus
  siRNA target sequence for Cth (NM_145953.2,467-485).
cgattacaccacaaaccaa

SEQ ID NO: 618759 - DNA, 19 bp, Mus musculus
  siRNA target sequence for Cth (NM_145953.2,475-493).
ccacaaaccaagcttgttt

SEQ ID NO: 618760 - DNA, 19 bp, Mus musculus
  siRNA target sequence for Cth (NM_145953.2,505-523).
cccacaaacccaactttga

SEQ ID NO: 618761 - DNA, 19 bp, Mus musculus
  siRNA target sequence for Cth (NM_145953.2,506-524).
ccacaaacccaactttgaa

SEQ ID NO: 618762 - DNA, 19 bp, Mus musculus
  siRNA target sequence for Cth (NM_145953.2,539-557).
gagcctgcgcacaaattgt

SEQ ID NO: 618763 - DNA, 19 bp, Mus musculus
  siRNA target sequence for Cth (NM_145953.2,586-604).
gtagataacaccttcatgt

SEQ ID NO: 618764 - DNA, 19 bp, Mus musculus
  siRNA target sequence for Cth (NM_145953.2,634-652).
ggtgctgatatttgtatgt

SEQ ID NO: 618765 - DNA, 19 bp, Mus musculus
  siRNA target sequence for Cth (NM_145953.2,677-695).
gccacagcgatgttgtcat

SEQ ID NO: 618766 - DNA, 19 bp, Mus musculus
  siRNA target sequence for Cth (NM_145953.2,688-706).
gttgtcatgggtttagtgt

SEQ ID NO: 618767 - DNA, 19 bp, Mus musculus
  siRNA target sequence for Cth (NM_145953.2,770-788).
cttctccttttgattgtta

SEQ ID NO: 618768 - DNA, 19 bp, Mus musculus
  siRNA target sequence for Cth (NM_145953.2,819-837).
ggtccggatggagaaacat

SEQ ID NO: 618769 - DNA, 19 bp, Mus musculus
  siRNA target sequence for Cth (NM_145953.2,820-838).
gtccggatggagaaacatt

SEQ ID NO: 618770 - DNA, 19 bp, Mus musculus
  siRNA target sequence for Cth (NM_145953.2,823-841).
cggatggagaaacatttca

SEQ ID NO: 618771 - DNA, 19 bp, Mus musculus
  siRNA target sequence for Cth (NM_145953.2,883-901).
cgggtagaaaaggttgttt

SEQ ID NO: 618772 - DNA, 19 bp, Mus musculus
  siRNA target sequence for Cth (NM_145953.2,884-902).
gggtagaaaaggttgttta

SEQ ID NO: 618773 - DNA, 19 bp, Mus musculus
  siRNA target sequence for Cth (NM_145953.2,885-903).
ggtagaaaaggttgtttat

SEQ ID NO: 618774 - DNA, 19 bp, Mus musculus
  siRNA target sequence for Cth (NM_145953.2,961-979).
ccagggatggtcagtttct

SEQ ID NO: 618775 - DNA, 19 bp, Mus musculus
  siRNA target sequence for Cth (NM_145953.2,962-980).
cagggatggtcagtttcta

SEQ ID NO: 618776 - DNA, 19 bp, Mus musculus
  siRNA target sequence for Cth (NM_145953.2,989-1007).
gtgctctgcagcatgctaa

SEQ ID NO: 618777 - DNA, 19 bp, Mus musculus
  siRNA target sequence for Cth (NM_145953.2,1008-1026).
ggccttcctcaaaaatcta

SEQ ID NO: 618778 - DNA, 19 bp, Mus musculus
  siRNA target sequence for Cth (NM_145953.2,1009-1027).
gccttcctcaaaaatctaa

SEQ ID NO: 618779 - DNA, 19 bp, Mus musculus
  siRNA target sequence for Cth (NM_145953.2,1124-1142).
ctaccctcgggatcaatga

SEQ ID NO: 618780 - DNA, 19 bp, Mus musculus
  siRNA target sequence for Cth (NM_145953.2,1134-1152).
gatcaatgacacactgata

SEQ ID NO: 618781 - DNA, 19 bp, Mus musculus
  siRNA target sequence for Cth (NM_145953.2,1145-1163).
cactgatacgactttctgt

SEQ ID NO: 618782 - DNA, 19 bp, Mus musculus
  siRNA target sequence for Asl (NM_133768.1,254-272).
ccgagatgcagcagatact

SEQ ID NO: 618783 - DNA, 19 bp, Mus musculus
  siRNA target sequence for Asl (NM_133768.1,303-321).
ggcccaaggcaccttcaaa

SEQ ID NO: 618784 - DNA, 19 bp, Mus musculus
  siRNA target sequence for Asl (NM_133768.1,304-322).
gcccaaggcaccttcaaat

SEQ ID NO: 618785 - DNA, 19 bp, Mus musculus
  siRNA target sequence for Asl (NM_133768.1,306-324).
ccaaggcaccttcaaatta

SEQ ID NO: 618786 - DNA, 19 bp, Mus musculus
  siRNA target sequence for Asl (NM_133768.1,456-474).
gaggcagacctgctcaaaa

SEQ ID NO: 618787 - DNA, 19 bp, Mus musculus
  siRNA target sequence for Asl (NM_133768.1,460-478).
cagacctgctcaaaactct

SEQ ID NO: 618788 - DNA, 19 bp, Mus musculus
  siRNA target sequence for Asl (NM_133768.1,487-505).
ctccgggtgctcattggaa

SEQ ID NO: 618789 - DNA, 19 bp, Mus musculus
  siRNA target sequence for Asl (NM_133768.1,617-635).
cgctgacacgagattcaga

SEQ ID NO: 618790 - DNA, 19 bp, Mus musculus
  siRNA target sequence for Asl (NM_133768.1,648-666).
ggtgcagaagcggatcaat

SEQ ID NO: 618791 - DNA, 19 bp, Mus musculus
  siRNA target sequence for Asl (NM_133768.1,652-670).
cagaagcggatcaatgtct

SEQ ID NO: 618792 - DNA, 19 bp, Mus musculus
  siRNA target sequence for Asl (NM_133768.1,796-814).
gtggctgagttcctgtttt

SEQ ID NO: 618793 - DNA, 19 bp, Mus musculus
  siRNA target sequence for Asl (NM_133768.1,856-874).
gacctaattctctatggta

SEQ ID NO: 618794 - DNA, 19 bp, Mus musculus
  siRNA target sequence for Asl (NM_133768.1,1131-1149).
ctctacattgcagattcat

SEQ ID NO: 618795 - DNA, 19 bp, Mus musculus
  siRNA target sequence for Asl (NM_133768.1,1373-1391).
gtcacagcgtggaacagta

SEQ ID NO: 618796 - DNA, 19 bp, Mus musculus
  siRNA target sequence for Adsl (NM_009634.3,94-112).
gccagccgcgagatgtgtt

SEQ ID NO: 618797 - DNA, 19 bp, Mus musculus
  siRNA target sequence for Adsl (NM_009634.3,195-213).
gcctatcacagatgaacaa

SEQ ID NO: 618798 - DNA, 19 bp, Mus musculus
  siRNA target sequence for Adsl (NM_009634.3,211-229).
caaatccaggagatgaagt

SEQ ID NO: 618799 - DNA, 19 bp, Mus musculus
  siRNA target sequence for Adsl (NM_009634.3,329-347).
cgaaagctgcgggcattat

SEQ ID NO: 618800 - DNA, 19 bp, Mus musculus
  siRNA target sequence for Adsl (NM_009634.3,330-348).
gaaagctgcgggcattatt

SEQ ID NO: 618801 - DNA, 19 bp, Mus musculus
  siRNA target sequence for Adsl (NM_009634.3,335-353).
ctgcgggcattattcatct

SEQ ID NO: 618802 - DNA, 19 bp, Mus musculus
  siRNA target sequence for Adsl (NM_009634.3,379-397).
gacaatacggacctgatta

SEQ ID NO: 618803 - DNA, 19 bp, Mus musculus
  siRNA target sequence for Adsl (NM_009634.3,452-470).
ggcttgccgactttgctaa

SEQ ID NO: 618804 - DNA, 19 bp, Mus musculus
  siRNA target sequence for Adsl (NM_009634.3,481-499).
gatctgcccacgttaggtt

SEQ ID NO: 618805 - DNA, 19 bp, Mus musculus
  siRNA target sequence for Adsl (NM_009634.3,492-510).
gttaggtttcacacacttt

SEQ ID NO: 618806 - DNA, 19 bp, Mus musculus
  siRNA target sequence for Adsl (NM_009634.3,569-587).
gcatggatctccagaactt

SEQ ID NO: 618807 - DNA, 19 bp, Mus musculus
  siRNA target sequence for Adsl (NM_009634.3,806-824).
gagcatcggtgcacaagat

SEQ ID NO: 618808 - DNA, 19 bp, Mus musculus
  siRNA target sequence for Adsl (NM_009634.3,808-826).
gcatcggtgcacaagattt

SEQ ID NO: 618809 - DNA, 19 bp, Mus musculus
  siRNA target sequence for Adsl (NM_009634.3,819-837).
caagatttgcactgacata

SEQ ID NO: 618810 - DNA, 19 bp, Mus musculus
  siRNA target sequence for Adsl (NM_009634.3,1033-1051).
gccaaccgacggatctgtt

SEQ ID NO: 618811 - DNA, 19 bp, Mus musculus
  siRNA target sequence for Adsl (NM_009634.3,1034-1052).
ccaaccgacggatctgttt

SEQ ID NO: 618812 - DNA, 19 bp, Mus musculus
  siRNA target sequence for Adsl (NM_009634.3,1066-1084).
ctcactgcagatactatat

SEQ ID NO: 618813 - DNA, 19 bp, Mus musculus
  siRNA target sequence for Adsl (NM_009634.3,1116-1134).
ggtggtgtaccccaaagta

SEQ ID NO: 618814 - DNA, 19 bp, Mus musculus
  siRNA target sequence for Adsl (NM_009634.3,1119-1137).
ggtgtaccccaaagtaatt

SEQ ID NO: 618815 - DNA, 19 bp, Mus musculus
  siRNA target sequence for Adsl (NM_009634.3,1122-1140).
gtaccccaaagtaattgaa

SEQ ID NO: 618816 - DNA, 19 bp, Mus musculus
  siRNA target sequence for Adsl (NM_009634.3,1226-1244).
gccatgagaaaattagagt

SEQ ID NO: 618817 - DNA, 19 bp, Mus musculus
  siRNA target sequence for 2310001A20Rik (NM_027977.1,148-166).
ggcagagtcttcagaatga

SEQ ID NO: 618818 - DNA, 19 bp, Mus musculus
  siRNA target sequence for 2310001A20Rik (NM_027977.1,222-240).
gttggagtcccccatagat

SEQ ID NO: 618819 - DNA, 19 bp, Mus musculus
  siRNA target sequence for 2310001A20Rik (NM_027977.1,283-301).
gttctgcatccaaatacga

SEQ ID NO: 618820 - DNA, 19 bp, Mus musculus
  siRNA target sequence for 2310001A20Rik (NM_027977.1,343-361).
ggaccagaatccatagtaa

SEQ ID NO: 618821 - DNA, 19 bp, Mus musculus
  siRNA target sequence for 2310001A20Rik (NM_027977.1,344-362).
gaccagaatccatagtaaa

SEQ ID NO: 618822 - DNA, 19 bp, Mus musculus
  siRNA target sequence for 2310001A20Rik (NM_027977.1,346-364).
ccagaatccatagtaaata

SEQ ID NO: 618823 - DNA, 19 bp, Mus musculus
  siRNA target sequence for 2310001A20Rik (NM_027977.1,347-365).
cagaatccatagtaaatat

SEQ ID NO: 618824 - DNA, 19 bp, Mus musculus
  siRNA target sequence for 2310001A20Rik (NM_027977.1,391-409).
gcagatggccgagttgtaa

SEQ ID NO: 618825 - DNA, 19 bp, Mus musculus
  siRNA target sequence for 2310001A20Rik (NM_027977.1,392-410).
cagatggccgagttgtaaa

SEQ ID NO: 618826 - DNA, 19 bp, Mus musculus
  siRNA target sequence for 2310001A20Rik (NM_027977.1,462-480).
caaaacccgagatgatgaa

SEQ ID NO: 618827 - DNA, 19 bp, Mus musculus
  siRNA target sequence for 2310001A20Rik (NM_027977.1,514-532).
gggcccaatgggactcttt

SEQ ID NO: 618828 - DNA, 19 bp, Mus musculus
  siRNA target sequence for 2310001A20Rik (NM_027977.1,515-533).
ggcccaatgggactctttt

SEQ ID NO: 618829 - DNA, 19 bp, Mus musculus
  siRNA target sequence for 2310001A20Rik (NM_027977.1,552-570).
gggactgttcgaagtaaat

SEQ ID NO: 618830 - DNA, 19 bp, Mus musculus
  siRNA target sequence for 2310001A20Rik (NM_027977.1,565-583).
gtaaatcctcagaaacgtt

SEQ ID NO: 618831 - DNA, 19 bp, Mus musculus
  siRNA target sequence for 2310001A20Rik (NM_027977.1,613-631).
cccattgagggcaagaaga

SEQ ID NO: 618832 - DNA, 19 bp, Mus musculus
  siRNA target sequence for 2310001A20Rik (NM_027977.1,614-632).
ccattgagggcaagaagat

SEQ ID NO: 618833 - DNA, 19 bp, Mus musculus
  siRNA target sequence for 2310001A20Rik (NM_027977.1,640-658).
gtgaatgacctcactgtta

SEQ ID NO: 618834 - DNA, 19 bp, Mus musculus
  siRNA target sequence for 2310001A20Rik (NM_027977.1,661-679).
cgggatggaaggaagattt

SEQ ID NO: 618835 - DNA, 19 bp, Mus musculus
  siRNA target sequence for 2310001A20Rik (NM_027977.1,754-772).
cgcctgttagagtatgata

SEQ ID NO: 618836 - DNA, 19 bp, Mus musculus
  siRNA target sequence for 2310001A20Rik (NM_027977.1,756-774).
cctgttagagtatgatact

SEQ ID NO: 618837 - DNA, 19 bp, Mus musculus
  siRNA target sequence for 2310001A20Rik (NM_027977.1,879-897).
caggatacgaagagtctat

SEQ ID NO: 618838 - DNA, 19 bp, Mus musculus
  siRNA target sequence for 2310001A20Rik (NM_027977.1,881-899).
ggatacgaagagtctatgt

SEQ ID NO: 618839 - DNA, 19 bp, Mus musculus
  siRNA target sequence for 2310001A20Rik (NM_027977.1,917-935).
gaggggcagatatgtttgt

SEQ ID NO: 618840 - DNA, 19 bp, Mus musculus
  siRNA target sequence for 2310001A20Rik (NM_027977.1,947-965).
ctggatttcctgacaatat

SEQ ID NO: 618841 - DNA, 19 bp, Mus musculus
  siRNA target sequence for 2310001A20Rik (NM_027977.1,993-1011).
ggttgctgctgcaaccatt

SEQ ID NO: 618842 - DNA, 19 bp, Mus musculus
  siRNA target sequence for 2310001A20Rik (NM_027977.1,1107-1125).
gaagtttgtgccacgatat

SEQ ID NO: 618843 - DNA, 19 bp, Mus musculus
  siRNA target sequence for 2310001A20Rik (NM_027977.1,1189-1207).
caggtggtcacctatgtga

SEQ ID NO: 618844 - DNA, 19 bp, Mus musculus
  siRNA target sequence for 2310001A20Rik (NM_027977.1,1206-1224).
gagtgaggcgcatgaacat

SEQ ID NO: 618845 - DNA, 19 bp, Mus musculus
  siRNA target sequence for 2310001A20Rik (NM_027977.1,1208-1226).
gtgaggcgcatgaacatga

SEQ ID NO: 618846 - DNA, 19 bp, Mus musculus
  siRNA target sequence for 2310001A20Rik (NM_027977.1,1214-1232).
cgcatgaacatgatggata

SEQ ID NO: 618847 - DNA, 19 bp, Mus musculus
  siRNA target sequence for Fech (NM_007998.3,234-252).
ccacggagaaggtacatca

SEQ ID NO: 618848 - DNA, 19 bp, Mus musculus
  siRNA target sequence for Fech (NM_007998.3,235-253).
cacggagaaggtacatcat

SEQ ID NO: 618849 - DNA, 19 bp, Mus musculus
  siRNA target sequence for Fech (NM_007998.3,699-717).
gcagcttaaatgccattta

SEQ ID NO: 618850 - DNA, 19 bp, Mus musculus
  siRNA target sequence for Fech (NM_007998.3,855-873).
gaagcgaggtggtcattct

SEQ ID NO: 618851 - DNA, 19 bp, Mus musculus
  siRNA target sequence for Fech (NM_007998.3,1050-1068).
ctatcaaagggctttgtga

SEQ ID NO: 618852 - DNA, 19 bp, Mus musculus
  siRNA target sequence for Fech (NM_007998.3,1088-1106).
ctcttggttccaatagcat

SEQ ID NO: 618853 - DNA, 19 bp, Mus musculus
  siRNA target sequence for Fech (NM_007998.3,1090-1108).
cttggttccaatagcattt

SEQ ID NO: 618854 - DNA, 19 bp, Mus musculus
  siRNA target sequence for Fech (NM_007998.3,1094-1112).
gttccaatagcatttacca

SEQ ID NO: 618855 - DNA, 19 bp, Mus musculus
  siRNA target sequence for Fech (NM_007998.3,1129-1147).
gctctacgaactggatatt

SEQ ID NO: 618856 - DNA, 19 bp, Mus musculus
  siRNA target sequence for Fech (NM_007998.3,1178-1196).
ggagctgagaacatcagaa

SEQ ID NO: 618857 - DNA, 19 bp, Mus musculus
  siRNA target sequence for Fech (NM_007998.3,1323-1341).
ctgtctgcaggaagactaa

SEQ ID NO: 618858 - DNA, 19 bp, Mus musculus
  siRNA target sequence for Fech (NM_007998.3,1325-1343).
gtctgcaggaagactaaat

SEQ ID NO: 618859 - DNA, 19 bp, Mus musculus
  siRNA target sequence for Fech (NM_007998.3,1329-1347).
gcaggaagactaaatcctt

SEQ ID NO: 618860 - DNA, 19 bp, Mus musculus
  siRNA target sequence for 4432411H13Rik (NM_133902.2,159-177).
gccggtcttcctcaaatat

SEQ ID NO: 618861 - DNA, 19 bp, Mus musculus
  siRNA target sequence for 4432411H13Rik (NM_133902.2,161-179).
cggtcttcctcaaatatga

SEQ ID NO: 618862 - DNA, 19 bp, Mus musculus
  siRNA target sequence for 4432411H13Rik (NM_133902.2,211-229).
cggggcatcggacatttct

SEQ ID NO: 618863 - DNA, 19 bp, Mus musculus
  siRNA target sequence for 4432411H13Rik (NM_133902.2,985-1003).
gtgtgcggtggcaacaaca

SEQ ID NO: 618864 - DNA, 19 bp, Mus musculus
  siRNA target sequence for 4432411H13Rik (NM_133902.2,987-1005).
gtgcggtggcaacaacatt

SEQ ID NO: 618865 - DNA, 19 bp, Mus musculus
  siRNA target sequence for Sds (NM_145565.1,100-118).
gcatggcgttgtccaaatt

SEQ ID NO: 618866 - DNA, 19 bp, Mus musculus
  siRNA target sequence for Sds (NM_145565.1,123-141).
ggcaccagcgtgttcctaa

SEQ ID NO: 618867 - DNA, 19 bp, Mus musculus
  siRNA target sequence for Sds (NM_145565.1,125-143).
caccagcgtgttcctaaaa

SEQ ID NO: 618868 - DNA, 19 bp, Mus musculus
  siRNA target sequence for Sds (NM_145565.1,127-145).
ccagcgtgttcctaaaaat

SEQ ID NO: 618869 - DNA, 19 bp, Mus musculus
  siRNA target sequence for Sds (NM_145565.1,293-311).
catcccagccactatcgtt

SEQ ID NO: 618870 - DNA, 19 bp, Mus musculus
  siRNA target sequence for Sds (NM_145565.1,338-356).
cattgagcggctcaagaat

SEQ ID NO: 618871 - DNA, 19 bp, Mus musculus
  siRNA target sequence for Sds (NM_145565.1,434-452).
cccgggttgggtgtacatt

SEQ ID NO: 618872 - DNA, 19 bp, Mus musculus
  siRNA target sequence for Sds (NM_145565.1,435-453).
ccgggttgggtgtacattt

SEQ ID NO: 618873 - DNA, 19 bp, Mus musculus
  siRNA target sequence for Sds (NM_145565.1,484-502).
gccacacttcccttgtgaa

SEQ ID NO: 618874 - DNA, 19 bp, Mus musculus
  siRNA target sequence for Sds (NM_145565.1,749-767).
cctgaagctgttttacgaa

SEQ ID NO: 618875 - DNA, 19 bp, Mus musculus
  siRNA target sequence for Sds (NM_145565.1,959-977).
gtgtggcggcagcaacata

SEQ ID NO: 618876 - DNA, 19 bp, Mus musculus
  siRNA target sequence for Srr (NM_013761.2,428-446).
gcagggcgcaatcttttct

SEQ ID NO: 618877 - DNA, 19 bp, Mus musculus
  siRNA target sequence for Srr (NM_013761.2,429-447).
cagggcgcaatcttttctt

SEQ ID NO: 618878 - DNA, 19 bp, Mus musculus
  siRNA target sequence for Srr (NM_013761.2,431-449).
gggcgcaatcttttcttca

SEQ ID NO: 618879 - DNA, 19 bp, Mus musculus
  siRNA target sequence for Srr (NM_013761.2,432-450).
ggcgcaatcttttcttcaa

SEQ ID NO: 618880 - DNA, 19 bp, Mus musculus
  siRNA target sequence for Srr (NM_013761.2,433-451).
gcgcaatcttttcttcaaa

SEQ ID NO: 618881 - DNA, 19 bp, Mus musculus
  siRNA target sequence for Srr (NM_013761.2,434-452).
cgcaatcttttcttcaaat

SEQ ID NO: 618882 - DNA, 19 bp, Mus musculus
  siRNA target sequence for Srr (NM_013761.2,484-502).
gattcgaggtgcccttaat

SEQ ID NO: 618883 - DNA, 19 bp, Mus musculus
  siRNA target sequence for Srr (NM_013761.2,505-523).
catcagaggcttaattcct

SEQ ID NO: 618884 - DNA, 19 bp, Mus musculus
  siRNA target sequence for Srr (NM_013761.2,541-559).
gcccaaagccgtagttact

SEQ ID NO: 618885 - DNA, 19 bp, Mus musculus
  siRNA target sequence for Srr (NM_013761.2,597-615).
ctgctaaactggaaggaat

SEQ ID NO: 618886 - DNA, 19 bp, Mus musculus
  siRNA target sequence for Srr (NM_013761.2,612-630).
gaattcctgcttacattgt

SEQ ID NO: 618887 - DNA, 19 bp, Mus musculus
  siRNA target sequence for Srr (NM_013761.2,645-663).
ctcccaactgcaagaaact

SEQ ID NO: 618888 - DNA, 19 bp, Mus musculus
  siRNA target sequence for Srr (NM_013761.2,655-673).
caagaaactggcaatccaa

SEQ ID NO: 618889 - DNA, 19 bp, Mus musculus
  siRNA target sequence for Srr (NM_013761.2,676-694).
ctatggagcatcgatagta

SEQ ID NO: 618890 - DNA, 19 bp, Mus musculus
  siRNA target sequence for Srr (NM_013761.2,680-698).
ggagcatcgatagtatact

SEQ ID NO: 618891 - DNA, 19 bp, Mus musculus
  siRNA target sequence for Srr (NM_013761.2,1025-1043).
gcagatggtgtcaaatcca

SEQ ID NO: 618892 - DNA, 19 bp, Mus musculus
  siRNA target sequence for Srr (NM_013761.2,1054-1072).
gaatacctggcctattata

SEQ ID NO: 618893 - DNA, 19 bp, Mus musculus
  siRNA target sequence for Srr (NM_013761.2,1059-1077).
cctggcctattataagaga

SEQ ID NO: 618894 - DNA, 19 bp, Mus musculus
  siRNA target sequence for Srr (NM_013761.2,1191-1209).
cagtgctgtctcagcattt

SEQ ID NO: 618895 - DNA, 19 bp, Mus musculus
  siRNA target sequence for Peo1 (NM_153796.2,142-160).
ccgcagaaggtacagaaaa

SEQ ID NO: 618896 - DNA, 19 bp, Mus musculus
  siRNA target sequence for Peo1 (NM_153796.2,164-182).
gcgctcccagccttagaga

SEQ ID NO: 618897 - DNA, 19 bp, Mus musculus
  siRNA target sequence for Peo1 (NM_153796.2,165-183).
cgctcccagccttagagat

SEQ ID NO: 618898 - DNA, 19 bp, Mus musculus
  siRNA target sequence for Peo1 (NM_153796.2,194-212).
ccggtgactacgactgaaa

SEQ ID NO: 618899 - DNA, 19 bp, Mus musculus
  siRNA target sequence for Peo1 (NM_153796.2,195-213).
cggtgactacgactgaaat

SEQ ID NO: 618900 - DNA, 19 bp, Mus musculus
  siRNA target sequence for Peo1 (NM_153796.2,207-225).
ctgaaatccgccagtattt

SEQ ID NO: 618901 - DNA, 19 bp, Mus musculus
  siRNA target sequence for Peo1 (NM_153796.2,292-310).
gtcctcagacatcaaaaat

SEQ ID NO: 618902 - DNA, 19 bp, Mus musculus
  siRNA target sequence for Peo1 (NM_153796.2,294-312).
cctcagacatcaaaaatga

SEQ ID NO: 618903 - DNA, 19 bp, Mus musculus
  siRNA target sequence for Peo1 (NM_153796.2,559-577).
gctagctcgtgtgatgttt

SEQ ID NO: 618904 - DNA, 19 bp, Mus musculus
  siRNA target sequence for Peo1 (NM_153796.2,706-724).
ggctgagggtcaggaaaat

SEQ ID NO: 618905 - DNA, 19 bp, Mus musculus
  siRNA target sequence for Peo1 (NM_153796.2,756-774).
ggcctggtgtctatcacaa

SEQ ID NO: 618906 - DNA, 19 bp, Mus musculus
  siRNA target sequence for Peo1 (NM_153796.2,761-779).
ggtgtctatcacaacctat

SEQ ID NO: 618907 - DNA, 19 bp, Mus musculus
  siRNA target sequence for Peo1 (NM_153796.2,762-780).
gtgtctatcacaacctatt

SEQ ID NO: 618908 - DNA, 19 bp, Mus musculus
  siRNA target sequence for Peo1 (NM_153796.2,766-784).
ctatcacaacctatttgga

SEQ ID NO: 618909 - DNA, 19 bp, Mus musculus
  siRNA target sequence for Peo1 (NM_153796.2,791-809).
ctgatcagccggagagata

SEQ ID NO: 618910 - DNA, 19 bp, Mus musculus
  siRNA target sequence for Peo1 (NM_153796.2,793-811).
gatcagccggagagatact

SEQ ID NO: 618911 - DNA, 19 bp, Mus musculus
  siRNA target sequence for Peo1 (NM_153796.2,935-953).
cagttccgtcggattgtgt

SEQ ID NO: 618912 - DNA, 19 bp, Mus musculus
  siRNA target sequence for Peo1 (NM_153796.2,981-999).
gggaagctgccaaactgtt

SEQ ID NO: 618913 - DNA, 19 bp, Mus musculus
  siRNA target sequence for Peo1 (NM_153796.2,982-1000).
ggaagctgccaaactgttt

SEQ ID NO: 618914 - DNA, 19 bp, Mus musculus
  siRNA target sequence for Peo1 (NM_153796.2,1063-1081).
cctggaggccttaaaccaa

SEQ ID NO: 618915 - DNA, 19 bp, Mus musculus
  siRNA target sequence for Peo1 (NM_153796.2,1118-1136).
cctgcctggcacaagtcta

SEQ ID NO: 618916 - DNA, 19 bp, Mus musculus
  siRNA target sequence for Peo1 (NM_153796.2,1153-1171).
gctccgagaggaggtttta

SEQ ID NO: 618917 - DNA, 19 bp, Mus musculus
  siRNA target sequence for Peo1 (NM_153796.2,1156-1174).
ccgagaggaggttttagga

SEQ ID NO: 618918 - DNA, 19 bp, Mus musculus
  siRNA target sequence for Peo1 (NM_153796.2,1173-1191).
gagaactgtcaaatgtaga

SEQ ID NO: 618919 - DNA, 19 bp, Mus musculus
  siRNA target sequence for Peo1 (NM_153796.2,1259-1277).
ggcgagttgacggtcttta

SEQ ID NO: 618920 - DNA, 19 bp, Mus musculus
  siRNA target sequence for Peo1 (NM_153796.2,1261-1279).
cgagttgacggtctttaca

SEQ ID NO: 618921 - DNA, 19 bp, Mus musculus
  siRNA target sequence for Peo1 (NM_153796.2,1481-1499).
cctctctacttcatgactt

SEQ ID NO: 618922 - DNA, 19 bp, Mus musculus
  siRNA target sequence for Peo1 (NM_153796.2,1515-1533).
gcatcaggtccgtcataga

SEQ ID NO: 618923 - DNA, 19 bp, Mus musculus
  siRNA target sequence for Peo1 (NM_153796.2,1521-1539).
ggtccgtcatagacacaat

SEQ ID NO: 618924 - DNA, 19 bp, Mus musculus
  siRNA target sequence for Peo1 (NM_153796.2,1558-1576).
ctatgacgtctgtcatgta

SEQ ID NO: 618925 - DNA, 19 bp, Mus musculus
  siRNA target sequence for Peo1 (NM_153796.2,1569-1587).
gtcatgtagtcattgacaa

SEQ ID NO: 618926 - DNA, 19 bp, Mus musculus
  siRNA target sequence for Peo1 (NM_153796.2,1583-1601).
gacaacttgcagttcatga

SEQ ID NO: 618927 - DNA, 19 bp, Mus musculus
  siRNA target sequence for Peo1 (NM_153796.2,1798-1816).
gatcttacaggataggaaa

SEQ ID NO: 618928 - DNA, 19 bp, Mus musculus
  siRNA target sequence for Peo1 (NM_153796.2,1852-1870).
gtccaagaatcgctttgat

SEQ ID NO: 618929 - DNA, 19 bp, Mus musculus
  siRNA target sequence for Peo1 (NM_153796.2,1892-1910).
ctggagttcaacaagaatt

SEQ ID NO: 618930 - DNA, 19 bp, Mus musculus
  siRNA target sequence for Peo1 (NM_153796.2,1943-1961).
gcccgactcaagaagatca

SEQ ID NO: 618931 - DNA, 19 bp, Mus musculus
  siRNA target sequence for Peo1 (NM_153796.2,1973-1991).
ggactagtggccaaaaaat

SEQ ID NO: 618932 - DNA, 19 bp, Mus musculus
  siRNA target sequence for Peo1 (NM_153796.2,1976-1994).
ctagtggccaaaaaatcct

SEQ ID NO: 618933 - DNA, 19 bp, Mus musculus
  siRNA target sequence for Dhx38 (NM_178380.1,187-205).
ctcaggttggtggtcttat

SEQ ID NO: 618934 - DNA, 19 bp, Mus musculus
  siRNA target sequence for Dhx38 (NM_178380.1,350-368).
cagagtctcttcttacaaa

SEQ ID NO: 618935 - DNA, 19 bp, Mus musculus
  siRNA target sequence for Dhx38 (NM_178380.1,555-573).
ggggtctatgcctcatcta

SEQ ID NO: 618936 - DNA, 19 bp, Mus musculus
  siRNA target sequence for Dhx38 (NM_178380.1,556-574).
gggtctatgcctcatctaa

SEQ ID NO: 618937 - DNA, 19 bp, Mus musculus
  siRNA target sequence for Dhx38 (NM_178380.1,557-575).
ggtctatgcctcatctaaa

SEQ ID NO: 618938 - DNA, 19 bp, Mus musculus
  siRNA target sequence for Dhx38 (NM_178380.1,604-622).
cccgggatcgagactatga

SEQ ID NO: 618939 - DNA, 19 bp, Mus musculus
  siRNA target sequence for Dhx38 (NM_178380.1,830-848).
ctccccaacaccttcctat

SEQ ID NO: 618940 - DNA, 19 bp, Mus musculus
  siRNA target sequence for Dhx38 (NM_178380.1,885-903).
gatcgagacaggtctataa

SEQ ID NO: 618941 - DNA, 19 bp, Mus musculus
  siRNA target sequence for Dhx38 (NM_178380.1,888-906).
cgagacaggtctataagga

SEQ ID NO: 618942 - DNA, 19 bp, Mus musculus
  siRNA target sequence for Dhx38 (NM_178380.1,930-948).
ctgccgaccccctcctata

SEQ ID NO: 618943 - DNA, 19 bp, Mus musculus
  siRNA target sequence for Dhx38 (NM_178380.1,933-951).
ccgaccccctcctataagt

SEQ ID NO: 618944 - DNA, 19 bp, Mus musculus
  siRNA target sequence for Dhx38 (NM_178380.1,934-952).
cgaccccctcctataagta

SEQ ID NO: 618945 - DNA, 19 bp, Mus musculus
  siRNA target sequence for Dhx38 (NM_178380.1,937-955).
ccccctcctataagtacaa

SEQ ID NO: 618946 - DNA, 19 bp, Mus musculus
  siRNA target sequence for Dhx38 (NM_178380.1,938-956).
cccctcctataagtacaat

SEQ ID NO: 618947 - DNA, 19 bp, Mus musculus
  siRNA target sequence for Dhx38 (NM_178380.1,957-975).
gaatgggctgatgatagaa

SEQ ID NO: 618948 - DNA, 19 bp, Mus musculus
  siRNA target sequence for Dhx38 (NM_178380.1,1098-1116).
gaccgggactggtacatga

SEQ ID NO: 618949 - DNA, 19 bp, Mus musculus
  siRNA target sequence for Dhx38 (NM_178380.1,1224-1242).
gcgcagcgcaggcaaatca

SEQ ID NO: 618950 - DNA, 19 bp, Mus musculus
  siRNA target sequence for Dhx38 (NM_178380.1,1225-1243).
cgcagcgcaggcaaatcaa

SEQ ID NO: 618951 - DNA, 19 bp, Mus musculus
  siRNA target sequence for Dhx38 (NM_178380.1,1336-1354).
cggccaaggtgcatctgat

SEQ ID NO: 618952 - DNA, 19 bp, Mus musculus
  siRNA target sequence for Dhx38 (NM_178380.1,1380-1398).
ctggatgggcgcatcgttt

SEQ ID NO: 618953 - DNA, 19 bp, Mus musculus
  siRNA target sequence for Dhx38 (NM_178380.1,1383-1401).
gatgggcgcatcgttttca

SEQ ID NO: 618954 - DNA, 19 bp, Mus musculus
  siRNA target sequence for Dhx38 (NM_178380.1,1441-1459).
cctctgacctggccattat

SEQ ID NO: 618955 - DNA, 19 bp, Mus musculus
  siRNA target sequence for Dhx38 (NM_178380.1,1442-1460).
ctctgacctggccattatt

SEQ ID NO: 618956 - DNA, 19 bp, Mus musculus
  siRNA target sequence for Dhx38 (NM_178380.1,1547-1565).
gaccaaactaggagacata

SEQ ID NO: 618957 - DNA, 19 bp, Mus musculus
  siRNA target sequence for Dhx38 (NM_178380.1,1584-1602).
gaggagccggataaagcta

SEQ ID NO: 618958 - DNA, 19 bp, Mus musculus
  siRNA target sequence for Dhx38 (NM_178380.1,1628-1646).
caggacggagcagaagttt

SEQ ID NO: 618959 - DNA, 19 bp, Mus musculus
  siRNA target sequence for Dhx38 (NM_178380.1,1670-1688).
cgaggccagcagtgagttt

SEQ ID NO: 618960 - DNA, 19 bp, Mus musculus
  siRNA target sequence for Dhx38 (NM_178380.1,1768-1786).
gagacaacagcattgtgat

SEQ ID NO: 618961 - DNA, 19 bp, Mus musculus
  siRNA target sequence for Dhx38 (NM_178380.1,1980-1998).
gactgcacttcggaaaaca

SEQ ID NO: 618962 - DNA, 19 bp, Mus musculus
  siRNA target sequence for Dhx38 (NM_178380.1,1990-2008).
cggaaaacaccttgatcaa

SEQ ID NO: 618963 - DNA, 19 bp, Mus musculus
  siRNA target sequence for Dhx38 (NM_178380.1,1992-2010).
gaaaacaccttgatcaagt

SEQ ID NO: 618964 - DNA, 19 bp, Mus musculus
  siRNA target sequence for Dhx38 (NM_178380.1,2177-2195).
cacgtcagctactatggat

SEQ ID NO: 618965 - DNA, 19 bp, Mus musculus
  siRNA target sequence for Dhx38 (NM_178380.1,2251-2269).
ggacttttcctgttgacat

SEQ ID NO: 618966 - DNA, 19 bp, Mus musculus
  siRNA target sequence for Dhx38 (NM_178380.1,2284-2302).
ccccgcaggaagattacgt

SEQ ID NO: 618967 - DNA, 19 bp, Mus musculus
  siRNA target sequence for Dhx38 (NM_178380.1,2451-2469).
gcggtactgcccatctact

SEQ ID NO: 618968 - DNA, 19 bp, Mus musculus
  siRNA target sequence for Dhx38 (NM_178380.1,2558-2576).
gacgtctctgactgttgat

SEQ ID NO: 618969 - DNA, 19 bp, Mus musculus
  siRNA target sequence for Dhx38 (NM_178380.1,2574-2592).
gatggcatcatgtttgtca

SEQ ID NO: 618970 - DNA, 19 bp, Mus musculus
  siRNA target sequence for Dhx38 (NM_178380.1,2597-2615).
ctctggctactgcaagtta

SEQ ID NO: 618971 - DNA, 19 bp, Mus musculus
  siRNA target sequence for Dhx38 (NM_178380.1,2599-2617).
ctggctactgcaagttaaa

SEQ ID NO: 618972 - DNA, 19 bp, Mus musculus
  siRNA target sequence for Dhx38 (NM_178380.1,2602-2620).
gctactgcaagttaaaggt

SEQ ID NO: 618973 - DNA, 19 bp, Mus musculus
  siRNA target sequence for Dhx38 (NM_178380.1,2608-2626).
gcaagttaaaggtcttcaa

SEQ ID NO: 618974 - DNA, 19 bp, Mus musculus
  siRNA target sequence for Dhx38 (NM_178380.1,2740-2758).
cgcagagcgcttacaagaa

SEQ ID NO: 618975 - DNA, 19 bp, Mus musculus
  siRNA target sequence for Dhx38 (NM_178380.1,3102-3120).
gaagaggagagcgatcaaa

SEQ ID NO: 618976 - DNA, 19 bp, Mus musculus
  siRNA target sequence for Dhx38 (NM_178380.1,3211-3229).
ggtgcaatgaccacttcat

SEQ ID NO: 618977 - DNA, 19 bp, Mus musculus
  siRNA target sequence for Dhx38 (NM_178380.1,3267-3285).
gcccagcttaaggatatta

SEQ ID NO: 618978 - DNA, 19 bp, Mus musculus
  siRNA target sequence for Dhx38 (NM_178380.1,3346-3364).
gtatctgtgctgcctattt

SEQ ID NO: 618979 - DNA, 19 bp, Mus musculus
  siRNA target sequence for Dhx38 (NM_178380.1,3418-3436).
ggatgccctgccacttaca

SEQ ID NO: 618980 - DNA, 19 bp, Mus musculus
  siRNA target sequence for Dhx38 (NM_178380.1,3463-3481).
gctacacccctgactacat

SEQ ID NO: 618981 - DNA, 19 bp, Mus musculus
  siRNA target sequence for Dhx38 (NM_178380.1,3472-3490).
ctgactacattgtgtatca

SEQ ID NO: 618982 - DNA, 19 bp, Mus musculus
  siRNA target sequence for Dhx38 (NM_178380.1,3726-3744).
gtcaggtccacaaagatct

SEQ ID NO: 618983 - DNA, 19 bp, Mus musculus
  siRNA target sequence for Fkbp11 (NM_024169.2,284-302).
gagacacgctccacataca

SEQ ID NO: 618984 - DNA, 19 bp, Mus musculus
  siRNA target sequence for Fkbp11 (NM_024169.2,286-304).
gacacgctccacatacact

SEQ ID NO: 618985 - DNA, 19 bp, Mus musculus
  siRNA target sequence for Fkbp11 (NM_024169.2,303-321).
ctacacgggcagtttggta

SEQ ID NO: 618986 - DNA, 19 bp, Mus musculus
  siRNA target sequence for Fkbp11 (NM_024169.2,322-340).
gatggacgcattattgaca

SEQ ID NO: 618987 - DNA, 19 bp, Mus musculus
  siRNA target sequence for Fkbp11 (NM_024169.2,353-371).
gagatcctctggtcataga

SEQ ID NO: 618988 - DNA, 19 bp, Mus musculus
  siRNA target sequence for Fkbp11 (NM_024169.2,479-497).
gagggtacccgccatctat

SEQ ID NO: 618989 - DNA, 19 bp, Mus musculus
  siRNA target sequence for Fkbp11 (NM_024169.2,631-649).
gggtatcacctgtacagaa

SEQ ID NO: 618990 - DNA, 19 bp, Mus musculus
  siRNA target sequence for Fkbp11 (NM_024169.2,682-700).
ctaaaagaggagaaacgaa

SEQ ID NO: 618991 - DNA, 19 bp, Mus musculus
  siRNA target sequence for Fkbp1a (NM_008019.1,178-196).
cacggggatgcttgaagat

SEQ ID NO: 618992 - DNA, 19 bp, Mus musculus
  siRNA target sequence for Fkbp1a (NM_008019.1,306-324).
gtcagagagccaaactgat

SEQ ID NO: 618993 - DNA, 19 bp, Mus musculus
  siRNA target sequence for Fkbp1a (NM_008019.1,322-340).
gataatctcctcagactat

SEQ ID NO: 618994 - DNA, 19 bp, Mus musculus
  siRNA target sequence for Fkbp1b (NM_016863.2,189-207).
cctaagaagggtcagatat

SEQ ID NO: 618995 - DNA, 19 bp, Mus musculus
  siRNA target sequence for Fkbp2 (NM_008020.2,96-114).
ctgacaatactgtccattt

SEQ ID NO: 618996 - DNA, 19 bp, Mus musculus
  siRNA target sequence for Fkbp2 (NM_008020.2,189-207).
gaccactgtcctatcaagt

SEQ ID NO: 618997 - DNA, 19 bp, Mus musculus
  siRNA target sequence for Fkbp2 (NM_008020.2,192-210).
cactgtcctatcaagtcta

SEQ ID NO: 618998 - DNA, 19 bp, Mus musculus
  siRNA target sequence for Fkbp2 (NM_008020.2,196-214).
gtcctatcaagtctagaaa

SEQ ID NO: 618999 - DNA, 19 bp, Mus musculus
  siRNA target sequence for Fkbp2 (NM_008020.2,312-330).
ggcactggccaggttatca

SEQ ID NO: 619000 - DNA, 19 bp, Mus musculus
  siRNA target sequence for Fkbp3 (NM_013902.2,101-119).
cccaagaaggacattatca

SEQ ID NO: 619001 - DNA, 19 bp, Mus musculus
  siRNA target sequence for Fkbp3 (NM_013902.2,127-145).
gcaggatcacggttcagat

SEQ ID NO: 619002 - DNA, 19 bp, Mus musculus
  siRNA target sequence for Fkbp3 (NM_013902.2,128-146).
caggatcacggttcagatt

SEQ ID NO: 619003 - DNA, 19 bp, Mus musculus
  siRNA target sequence for Fkbp3 (NM_013902.2,147-165).
cgtttcttgcagagcataa

SEQ ID NO: 619004 - DNA, 19 bp, Mus musculus
  siRNA target sequence for Fkbp3 (NM_013902.2,148-166).
gtttcttgcagagcataaa

SEQ ID NO: 619005 - DNA, 19 bp, Mus musculus
  siRNA target sequence for Fkbp3 (NM_013902.2,198-216).
ctgctaataaggaccattt

SEQ ID NO: 619006 - DNA, 19 bp, Mus musculus
  siRNA target sequence for Fkbp3 (NM_013902.2,250-268).
gcgtttcaagggtactgaa

SEQ ID NO: 619007 - DNA, 19 bp, Mus musculus
  siRNA target sequence for Fkbp3 (NM_013902.2,256-274).
caagggtactgaaactata

SEQ ID NO: 619008 - DNA, 19 bp, Mus musculus
  siRNA target sequence for Fkbp3 (NM_013902.2,259-277).
gggtactgaaactataagt

SEQ ID NO: 619009 - DNA, 19 bp, Mus musculus
  siRNA target sequence for Fkbp3 (NM_013902.2,260-278).
ggtactgaaactataagta

SEQ ID NO: 619010 - DNA, 19 bp, Mus musculus
  siRNA target sequence for Fkbp3 (NM_013902.2,261-279).
gtactgaaactataagtaa

SEQ ID NO: 619011 - DNA, 19 bp, Mus musculus
  siRNA target sequence for Fkbp3 (NM_013902.2,283-301).
gtctgaacaggtgaaaaat

SEQ ID NO: 619012 - DNA, 19 bp, Mus musculus
  siRNA target sequence for Fkbp3 (NM_013902.2,353-371).
gatgagggtccaccaaaat

SEQ ID NO: 619013 - DNA, 19 bp, Mus musculus
  siRNA target sequence for Fkbp3 (NM_013902.2,356-374).
gagggtccaccaaaataca

SEQ ID NO: 619014 - DNA, 19 bp, Mus musculus
  siRNA target sequence for Fkbp3 (NM_013902.2,358-376).
gggtccaccaaaatacaca

SEQ ID NO: 619015 - DNA, 19 bp, Mus musculus
  siRNA target sequence for Fkbp3 (NM_013902.2,398-416).
gataaaaccaactttccta

SEQ ID NO: 619016 - DNA, 19 bp, Mus musculus
  siRNA target sequence for Fkbp3 (NM_013902.2,428-446).
gttgttcactgctggtata

SEQ ID NO: 619017 - DNA, 19 bp, Mus musculus
  siRNA target sequence for Fkbp3 (NM_013902.2,455-473).
ctcccagatgggactgttt

SEQ ID NO: 619018 - DNA, 19 bp, Mus musculus
  siRNA target sequence for Fkbp3 (NM_013902.2,461-479).
gatgggactgtttttgata

SEQ ID NO: 619019 - DNA, 19 bp, Mus musculus
  siRNA target sequence for Fkbp3 (NM_013902.2,464-482).
gggactgtttttgatacta

SEQ ID NO: 619020 - DNA, 19 bp, Mus musculus
  siRNA target sequence for Fkbp3 (NM_013902.2,539-557).
ggagtaggcaaggttatca

SEQ ID NO: 619021 - DNA, 19 bp, Mus musculus
  siRNA target sequence for Fkbp3 (NM_013902.2,566-584).
gatgaagcgctcttgacta

SEQ ID NO: 619022 - DNA, 19 bp, Mus musculus
  siRNA target sequence for Fkbp3 (NM_013902.2,572-590).
gcgctcttgactatgagta

SEQ ID NO: 619023 - DNA, 19 bp, Mus musculus
  siRNA target sequence for Fkbp3 (NM_013902.2,573-591).
cgctcttgactatgagtaa

SEQ ID NO: 619024 - DNA, 19 bp, Mus musculus
  siRNA target sequence for Fkbp3 (NM_013902.2,574-592).
gctcttgactatgagtaaa

SEQ ID NO: 619025 - DNA, 19 bp, Mus musculus
  siRNA target sequence for Fkbp3 (NM_013902.2,668-686).
ccaaacaccaagctcattt

SEQ ID NO: 619026 - DNA, 19 bp, Mus musculus
  siRNA target sequence for Fkbp3 (NM_013902.2,695-713).
gaattagtagacattgact

SEQ ID NO: 619027 - DNA, 19 bp, Mus musculus
  siRNA target sequence for Fkbp4 (NM_010219.2,265-283).
gatcggggaccgagtcttt

SEQ ID NO: 619028 - DNA, 19 bp, Mus musculus
  siRNA target sequence for Fkbp4 (NM_010219.2,304-322).
gctagatggcacaaagttt

SEQ ID NO: 619029 - DNA, 19 bp, Mus musculus
  siRNA target sequence for Fkbp4 (NM_010219.2,308-326).
gatggcacaaagtttgact

SEQ ID NO: 619030 - DNA, 19 bp, Mus musculus
  siRNA target sequence for Fkbp4 (NM_010219.2,335-353).
gaccgcaaggacaaattct

SEQ ID NO: 619031 - DNA, 19 bp, Mus musculus
  siRNA target sequence for Fkbp4 (NM_010219.2,491-509).
cccaacgccacacttgtat

SEQ ID NO: 619032 - DNA, 19 bp, Mus musculus
  siRNA target sequence for Fkbp4 (NM_010219.2,492-510).
ccaacgccacacttgtatt

SEQ ID NO: 619033 - DNA, 19 bp, Mus musculus
  siRNA target sequence for Fkbp4 (NM_010219.2,493-511).
caacgccacacttgtattt

SEQ ID NO: 619034 - DNA, 19 bp, Mus musculus
  siRNA target sequence for Fkbp4 (NM_010219.2,529-547).
gttcaaaggagaagatctt

SEQ ID NO: 619035 - DNA, 19 bp, Mus musculus
  siRNA target sequence for Fkbp4 (NM_010219.2,565-583).
cgggatcatccgcagaata

SEQ ID NO: 619036 - DNA, 19 bp, Mus musculus
  siRNA target sequence for Fkbp4 (NM_010219.2,778-796).
gtacctcaaacctagctat

SEQ ID NO: 619037 - DNA, 19 bp, Mus musculus
  siRNA target sequence for Fkbp4 (NM_010219.2,784-802).
caaacctagctatgctttt

SEQ ID NO: 619038 - DNA, 19 bp, Mus musculus
  siRNA target sequence for Fkbp4 (NM_010219.2,843-861).
ctgagctgaggtatgaagt

SEQ ID NO: 619039 - DNA, 19 bp, Mus musculus
  siRNA target sequence for Fkbp4 (NM_010219.2,948-966).
ggggcaccgcgtacttcaa

SEQ ID NO: 619040 - DNA, 19 bp, Mus musculus
  siRNA target sequence for Fkbp4 (NM_010219.2,986-1004).
gcgttactgcagtacaaga

SEQ ID NO: 619041 - DNA, 19 bp, Mus musculus
  siRNA target sequence for Fkbp4 (NM_010219.2,987-1005).
cgttactgcagtacaagaa

SEQ ID NO: 619042 - DNA, 19 bp, Mus musculus
  siRNA target sequence for Fkbp4 (NM_010219.2,1039-1057).
ctccggtgaggaaatgcaa

SEQ ID NO: 619043 - DNA, 19 bp, Mus musculus
  siRNA target sequence for Fkbp4 (NM_010219.2,1041-1059).
ccggtgaggaaatgcaaaa

SEQ ID NO: 619044 - DNA, 19 bp, Mus musculus
  siRNA target sequence for Fkbp4 (NM_010219.2,1098-1116).
ccatgtgtcacctgaaact

SEQ ID NO: 619045 - DNA, 19 bp, Mus musculus
  siRNA target sequence for Fkbp4 (NM_010219.2,1210-1228).
cctggccgtgaatgacttt

SEQ ID NO: 619046 - DNA, 19 bp, Mus musculus
  siRNA target sequence for Fkbp4 (NM_010219.2,1441-1459).
gaagggtgagcggaacaat

SEQ ID NO: 619047 - DNA, 19 bp, Mus musculus
  siRNA target sequence for Fkbp5 (NM_010220.2,168-186).
gatgagggcaccagtaaca

SEQ ID NO: 619048 - DNA, 19 bp, Mus musculus
  siRNA target sequence for Fkbp5 (NM_010220.2,214-232).
ctgagcagggtgaagatat

SEQ ID NO: 619049 - DNA, 19 bp, Mus musculus
  siRNA target sequence for Fkbp5 (NM_010220.2,218-236).
gcagggtgaagatatcact

SEQ ID NO: 619050 - DNA, 19 bp, Mus musculus
  siRNA target sequence for Fkbp5 (NM_010220.2,219-237).
cagggtgaagatatcacta

SEQ ID NO: 619051 - DNA, 19 bp, Mus musculus
  siRNA target sequence for Fkbp5 (NM_010220.2,252-270).
ggagtattaaagattgtca

SEQ ID NO: 619052 - DNA, 19 bp, Mus musculus
  siRNA target sequence for Fkbp5 (NM_010220.2,253-271).
gagtattaaagattgtcaa

SEQ ID NO: 619053 - DNA, 19 bp, Mus musculus
  siRNA target sequence for Fkbp5 (NM_010220.2,255-273).
gtattaaagattgtcaaaa

SEQ ID NO: 619054 - DNA, 19 bp, Mus musculus
  siRNA target sequence for Fkbp5 (NM_010220.2,286-304).
gtgacgaggccccaatgtt

SEQ ID NO: 619055 - DNA, 19 bp, Mus musculus
  siRNA target sequence for Fkbp5 (NM_010220.2,324-342).
cactacaaagggatgttgt

SEQ ID NO: 619056 - DNA, 19 bp, Mus musculus
  siRNA target sequence for Fkbp5 (NM_010220.2,334-352).
ggatgttgtcagatggaaa

SEQ ID NO: 619057 - DNA, 19 bp, Mus musculus
  siRNA target sequence for Fkbp5 (NM_010220.2,341-359).
gtcagatggaaagaagttt

SEQ ID NO: 619058 - DNA, 19 bp, Mus musculus
  siRNA target sequence for Fkbp5 (NM_010220.2,402-420).
ggccaaggccaggttatca

SEQ ID NO: 619059 - DNA, 19 bp, Mus musculus
  siRNA target sequence for Fkbp5 (NM_010220.2,403-421).
gccaaggccaggttatcaa

SEQ ID NO: 619060 - DNA, 19 bp, Mus musculus
  siRNA target sequence for Fkbp5 (NM_010220.2,404-422).
ccaaggccaggttatcaaa

SEQ ID NO: 619061 - DNA, 19 bp, Mus musculus
  siRNA target sequence for Fkbp5 (NM_010220.2,429-447).
gacattggggtgtctacta

SEQ ID NO: 619062 - DNA, 19 bp, Mus musculus
  siRNA target sequence for Fkbp5 (NM_010220.2,435-453).
ggggtgtctactatgaaga

SEQ ID NO: 619063 - DNA, 19 bp, Mus musculus
  siRNA target sequence for Fkbp5 (NM_010220.2,456-474).
ggcgagatctgccatttat

SEQ ID NO: 619064 - DNA, 19 bp, Mus musculus
  siRNA target sequence for Fkbp5 (NM_010220.2,457-475).
gcgagatctgccatttatt

SEQ ID NO: 619065 - DNA, 19 bp, Mus musculus
  siRNA target sequence for Fkbp5 (NM_010220.2,458-476).
cgagatctgccatttatta

SEQ ID NO: 619066 - DNA, 19 bp, Mus musculus
  siRNA target sequence for Fkbp5 (NM_010220.2,459-477).
gagatctgccatttattat

SEQ ID NO: 619067 - DNA, 19 bp, Mus musculus
  siRNA target sequence for Fkbp5 (NM_010220.2,461-479).
gatctgccatttattatgt

SEQ ID NO: 619068 - DNA, 19 bp, Mus musculus
  siRNA target sequence for Fkbp5 (NM_010220.2,505-523).
ctggccacctccaaaaaat

SEQ ID NO: 619069 - DNA, 19 bp, Mus musculus
  siRNA target sequence for Fkbp5 (NM_010220.2,510-528).
cacctccaaaaaattccat

SEQ ID NO: 619070 - DNA, 19 bp, Mus musculus
  siRNA target sequence for Fkbp5 (NM_010220.2,529-547).
caaatgcaactctcttttt

SEQ ID NO: 619071 - DNA, 19 bp, Mus musculus
  siRNA target sequence for Fkbp5 (NM_010220.2,549-567).
gagattgagctccttgatt

SEQ ID NO: 619072 - DNA, 19 bp, Mus musculus
  siRNA target sequence for Fkbp5 (NM_010220.2,578-596).
ggatttatttgaagattca

SEQ ID NO: 619073 - DNA, 19 bp, Mus musculus
  siRNA target sequence for Fkbp5 (NM_010220.2,595-613).
caggcgttatccgtagaat

SEQ ID NO: 619074 - DNA, 19 bp, Mus musculus
  siRNA target sequence for Fkbp5 (NM_010220.2,597-615).
ggcgttatccgtagaatca

SEQ ID NO: 619075 - DNA, 19 bp, Mus musculus
  siRNA target sequence for Fkbp5 (NM_010220.2,598-616).
gcgttatccgtagaatcaa

SEQ ID NO: 619076 - DNA, 19 bp, Mus musculus
  siRNA target sequence for Fkbp5 (NM_010220.2,599-617).
cgttatccgtagaatcaaa

SEQ ID NO: 619077 - DNA, 19 bp, Mus musculus
  siRNA target sequence for Fkbp5 (NM_010220.2,620-638).
gaaaggcgagggatactca

SEQ ID NO: 619078 - DNA, 19 bp, Mus musculus
  siRNA target sequence for Fkbp5 (NM_010220.2,647-665).
cgaaggagcaacggtaaaa

SEQ ID NO: 619079 - DNA, 19 bp, Mus musculus
  siRNA target sequence for Fkbp5 (NM_010220.2,868-886).
ccaatgctgagcttatgta

SEQ ID NO: 619080 - DNA, 19 bp, Mus musculus
  siRNA target sequence for Fkbp5 (NM_010220.2,960-978).
gctgccatcgtgaaagaga

SEQ ID NO: 619081 - DNA, 19 bp, Mus musculus
  siRNA target sequence for Fkbp5 (NM_010220.2,1012-1030).
cgcaggccgtgattcagta

SEQ ID NO: 619082 - DNA, 19 bp, Mus musculus
  siRNA target sequence for Nktr (NM_010918.1,200-218).
ggaaccggttggtcgaatt

SEQ ID NO: 619083 - DNA, 19 bp, Mus musculus
  siRNA target sequence for Nktr (NM_010918.1,201-219).
gaaccggttggtcgaatta

SEQ ID NO: 619084 - DNA, 19 bp, Mus musculus
  siRNA target sequence for Nktr (NM_010918.1,204-222).
ccggttggtcgaattatgt

SEQ ID NO: 619085 - DNA, 19 bp, Mus musculus
  siRNA target sequence for Nktr (NM_010918.1,205-223).
cggttggtcgaattatgtt

SEQ ID NO: 619086 - DNA, 19 bp, Mus musculus
  siRNA target sequence for Nktr (NM_010918.1,206-224).
ggttggtcgaattatgttt

SEQ ID NO: 619087 - DNA, 19 bp, Mus musculus
  siRNA target sequence for Nktr (NM_010918.1,233-251).
ctcagacatatgtccaaaa

SEQ ID NO: 619088 - DNA, 19 bp, Mus musculus
  siRNA target sequence for Nktr (NM_010918.1,246-264).
ccaaaaacatgcaaaaact

SEQ ID NO: 619089 - DNA, 19 bp, Mus musculus
  siRNA target sequence for Nktr (NM_010918.1,337-355).
cattccaccgtgtggttaa

SEQ ID NO: 619090 - DNA, 19 bp, Mus musculus
  siRNA target sequence for Nktr (NM_010918.1,342-360).
caccgtgtggttaaaaact

SEQ ID NO: 619091 - DNA, 19 bp, Mus musculus
  siRNA target sequence for Nktr (NM_010918.1,344-362).
ccgtgtggttaaaaacttt

SEQ ID NO: 619092 - DNA, 19 bp, Mus musculus
  siRNA target sequence for Nktr (NM_010918.1,456-474).
catgacagagcgttccttt

SEQ ID NO: 619093 - DNA, 19 bp, Mus musculus
  siRNA target sequence for Nktr (NM_010918.1,461-479).
cagagcgttccttttgtca

SEQ ID NO: 619094 - DNA, 19 bp, Mus musculus
  siRNA target sequence for Nktr (NM_010918.1,483-501).
gcaaatcgagggaaacata

SEQ ID NO: 619095 - DNA, 19 bp, Mus musculus
  siRNA target sequence for Nktr (NM_010918.1,512-530).
ccagtttttcataactaca

SEQ ID NO: 619096 - DNA, 19 bp, Mus musculus
  siRNA target sequence for Nktr (NM_010918.1,564-582).
gtttttggactggtaatat

SEQ ID NO: 619097 - DNA, 19 bp, Mus musculus
  siRNA target sequence for Nktr (NM_010918.1,594-612).
gtaattgaacagattgaaa

SEQ ID NO: 619098 - DNA, 19 bp, Mus musculus
  siRNA target sequence for Nktr (NM_010918.1,646-664).
cagatgtccgagttattga

SEQ ID NO: 619099 - DNA, 19 bp, Mus musculus
  siRNA target sequence for Nktr (NM_010918.1,648-666).
gatgtccgagttattgact

SEQ ID NO: 619100 - DNA, 19 bp, Mus musculus
  siRNA target sequence for Nktr (NM_010918.1,719-737).
gaaaccaacctgttcagaa

SEQ ID NO: 619101 - DNA, 19 bp, Mus musculus
  siRNA target sequence for Nktr (NM_010918.1,735-753).
gaaggctcggactcttctt

SEQ ID NO: 619102 - DNA, 19 bp, Mus musculus
  siRNA target sequence for Nktr (NM_010918.1,781-799).
cctcagagagtgaagttga

SEQ ID NO: 619103 - DNA, 19 bp, Mus musculus
  siRNA target sequence for Nktr (NM_010918.1,838-856).
caaaagtcagacatgctaa

SEQ ID NO: 619104 - DNA, 19 bp, Mus musculus
  siRNA target sequence for Nktr (NM_010918.1,907-925).
cagtaagccctgaaggtta

SEQ ID NO: 619105 - DNA, 19 bp, Mus musculus
  siRNA target sequence for Nktr (NM_010918.1,909-927).
gtaagccctgaaggttatt

SEQ ID NO: 619106 - DNA, 19 bp, Mus musculus
  siRNA target sequence for Nktr (NM_010918.1,958-976).
cagttgactcaaacactaa

SEQ ID NO: 619107 - DNA, 19 bp, Mus musculus
  siRNA target sequence for Nktr (NM_010918.1,1017-1035).
gttcccgagaaccgatttt

SEQ ID NO: 619108 - DNA, 19 bp, Mus musculus
  siRNA target sequence for Nktr (NM_010918.1,1021-1039).
ccgagaaccgatttttact

SEQ ID NO: 619109 - DNA, 19 bp, Mus musculus
  siRNA target sequence for Nktr (NM_010918.1,1022-1040).
cgagaaccgatttttactt

SEQ ID NO: 619110 - DNA, 19 bp, Mus musculus
  siRNA target sequence for Nktr (NM_010918.1,1025-1043).
gaaccgatttttacttaga

SEQ ID NO: 619111 - DNA, 19 bp, Mus musculus
  siRNA target sequence for Nktr (NM_010918.1,1028-1046).
ccgatttttacttagaaga

SEQ ID NO: 619112 - DNA, 19 bp, Mus musculus
  siRNA target sequence for Nktr (NM_010918.1,1063-1081).
ctgtggagcctgaacagaa

SEQ ID NO: 619113 - DNA, 19 bp, Mus musculus
  siRNA target sequence for Nktr (NM_010918.1,1099-1117).
ctgttgtaagtgatcagaa

SEQ ID NO: 619114 - DNA, 19 bp, Mus musculus
  siRNA target sequence for Nktr (NM_010918.1,1110-1128).
gatcagaaaccctctgtat

SEQ ID NO: 619115 - DNA, 19 bp, Mus musculus
  siRNA target sequence for Nktr (NM_010918.1,1113-1131).
cagaaaccctctgtatcaa

SEQ ID NO: 619116 - DNA, 19 bp, Mus musculus
  siRNA target sequence for Nktr (NM_010918.1,1129-1147).
caaagtctggacggaaaat

SEQ ID NO: 619117 - DNA, 19 bp, Mus musculus
  siRNA target sequence for Nktr (NM_010918.1,1199-1217).
ctctgagtccaaagatgat

SEQ ID NO: 619118 - DNA, 19 bp, Mus musculus
  siRNA target sequence for Nktr (NM_010918.1,1314-1332).
ctgagtgacccctgttcaa

SEQ ID NO: 619119 - DNA, 19 bp, Mus musculus
  siRNA target sequence for Nktr (NM_010918.1,1367-1385).
cagatcatggtcctataat

SEQ ID NO: 619120 - DNA, 19 bp, Mus musculus
  siRNA target sequence for Nktr (NM_010918.1,1372-1390).
catggtcctataatggata

SEQ ID NO: 619121 - DNA, 19 bp, Mus musculus
  siRNA target sequence for Nktr (NM_010918.1,1375-1393).
ggtcctataatggatacta

SEQ ID NO: 619122 - DNA, 19 bp, Mus musculus
  siRNA target sequence for Nktr (NM_010918.1,1386-1404).
ggatactattcagatctta

SEQ ID NO: 619123 - DNA, 19 bp, Mus musculus
  siRNA target sequence for Nktr (NM_010918.1,1391-1409).
ctattcagatcttagtaca

SEQ ID NO: 619124 - DNA, 19 bp, Mus musculus
  siRNA target sequence for Nktr (NM_010918.1,1425-1443).
ggtcaccataagaaacaca

SEQ ID NO: 619125 - DNA, 19 bp, Mus musculus
  siRNA target sequence for Nktr (NM_010918.1,1525-1543).
gaatagttatgcctgattt

SEQ ID NO: 619126 - DNA, 19 bp, Mus musculus
  siRNA target sequence for Nktr (NM_010918.1,1539-1557).
gatttggaaccctcaagat

SEQ ID NO: 619127 - DNA, 19 bp, Mus musculus
  siRNA target sequence for Nktr (NM_010918.1,1558-1576).
ctcccacccaccgaatgaa

SEQ ID NO: 619128 - DNA, 19 bp, Mus musculus
  siRNA target sequence for Nktr (NM_010918.1,1560-1578).
cccacccaccgaatgaagt

SEQ ID NO: 619129 - DNA, 19 bp, Mus musculus
  siRNA target sequence for Nktr (NM_010918.1,1637-1655).
caagcgcgactggtctaaa

SEQ ID NO: 619130 - DNA, 19 bp, Mus musculus
  siRNA target sequence for Nktr (NM_010918.1,1640-1658).
gcgcgactggtctaaatca

SEQ ID NO: 619131 - DNA, 19 bp, Mus musculus
  siRNA target sequence for Nktr (NM_010918.1,1642-1660).
gcgactggtctaaatcaga

SEQ ID NO: 619132 - DNA, 19 bp, Mus musculus
  siRNA target sequence for Nktr (NM_010918.1,1715-1733).
gtctcattcacgatcagat

SEQ ID NO: 619133 - DNA, 19 bp, Mus musculus
  siRNA target sequence for Nktr (NM_010918.1,1719-1737).
cattcacgatcagattcta

SEQ ID NO: 619134 - DNA, 19 bp, Mus musculus
  siRNA target sequence for Nktr (NM_010918.1,1785-1803).
ctcaacagatcaaaatcta

SEQ ID NO: 619135 - DNA, 19 bp, Mus musculus
  siRNA target sequence for Nktr (NM_010918.1,1817-1835).
gtcaggaccccgaagaaca

SEQ ID NO: 619136 - DNA, 19 bp, Mus musculus
  siRNA target sequence for Nktr (NM_010918.1,1821-1839).
ggaccccgaagaacatcaa

SEQ ID NO: 619137 - DNA, 19 bp, Mus musculus
  siRNA target sequence for Nktr (NM_010918.1,1822-1840).
gaccccgaagaacatcaat

SEQ ID NO: 619138 - DNA, 19 bp, Mus musculus
  siRNA target sequence for Nktr (NM_010918.1,1824-1842).
ccccgaagaacatcaatat

SEQ ID NO: 619139 - DNA, 19 bp, Mus musculus
  siRNA target sequence for Nktr (NM_010918.1,1879-1897).
cagttaagacagaaccttt

SEQ ID NO: 619140 - DNA, 19 bp, Mus musculus
  siRNA target sequence for Nktr (NM_010918.1,1901-1919).
gccgtcagtgccacagaat

SEQ ID NO: 619141 - DNA, 19 bp, Mus musculus
  siRNA target sequence for Nktr (NM_010918.1,2026-2044).
cctcttacgagcgaattca

SEQ ID NO: 619142 - DNA, 19 bp, Mus musculus
  siRNA target sequence for Nktr (NM_010918.1,2076-2094).
cctgtccaaagcacataca

SEQ ID NO: 619143 - DNA, 19 bp, Mus musculus
  siRNA target sequence for Nktr (NM_010918.1,2112-2130).
gcaaccgtgagttcatcat

SEQ ID NO: 619144 - DNA, 19 bp, Mus musculus
  siRNA target sequence for Nktr (NM_010918.1,2116-2134).
ccgtgagttcatcatctta

SEQ ID NO: 619145 - DNA, 19 bp, Mus musculus
  siRNA target sequence for Nktr (NM_010918.1,2117-2135).
cgtgagttcatcatcttat

SEQ ID NO: 619146 - DNA, 19 bp, Mus musculus
  siRNA target sequence for Nktr (NM_010918.1,2128-2146).
catcttatcacaaaagaga

SEQ ID NO: 619147 - DNA, 19 bp, Mus musculus
  siRNA target sequence for Nktr (NM_010918.1,2167-2185).
ggagtgcttattcaaagta

SEQ ID NO: 619148 - DNA, 19 bp, Mus musculus
  siRNA target sequence for Nktr (NM_010918.1,2183-2201).
gtacagtgatagaagttct

SEQ ID NO: 619149 - DNA, 19 bp, Mus musculus
  siRNA target sequence for Nktr (NM_010918.1,2326-2344).
ctcactcaccaaataagta

SEQ ID NO: 619150 - DNA, 19 bp, Mus musculus
  siRNA target sequence for Nktr (NM_010918.1,2328-2346).
cactcaccaaataagtaca

SEQ ID NO: 619151 - DNA, 19 bp, Mus musculus
  siRNA target sequence for Nktr (NM_010918.1,2361-2379).
cacagtaggtcatcttcat

SEQ ID NO: 619152 - DNA, 19 bp, Mus musculus
  siRNA target sequence for Nktr (NM_010918.1,2403-2421).
ggaagacgagccatgttta

SEQ ID NO: 619153 - DNA, 19 bp, Mus musculus
  siRNA target sequence for Nktr (NM_010918.1,2460-2478).
catcgcagcaactctgaaa

SEQ ID NO: 619154 - DNA, 19 bp, Mus musculus
  siRNA target sequence for Nktr (NM_010918.1,2480-2498).
gacacttcacagtaaatat

SEQ ID NO: 619155 - DNA, 19 bp, Mus musculus
  siRNA target sequence for Nktr (NM_010918.1,2526-2544).
cacagaaagtatagtgaaa

SEQ ID NO: 619156 - DNA, 19 bp, Mus musculus
  siRNA target sequence for Nktr (NM_010918.1,2528-2546).
cagaaagtatagtgaaagt

SEQ ID NO: 619157 - DNA, 19 bp, Mus musculus
  siRNA target sequence for Nktr (NM_010918.1,2534-2552).
gtatagtgaaagtagatca

SEQ ID NO: 619158 - DNA, 19 bp, Mus musculus
  siRNA target sequence for Nktr (NM_010918.1,2539-2557).
gtgaaagtagatcatcttt

SEQ ID NO: 619159 - DNA, 19 bp, Mus musculus
  siRNA target sequence for Nktr (NM_010918.1,2580-2598).
cagtcacatgttcaagtat

SEQ ID NO: 619160 - DNA, 19 bp, Mus musculus
  siRNA target sequence for Nktr (NM_010918.1,2692-2710).
gggaatgtcctcgttctaa

SEQ ID NO: 619161 - DNA, 19 bp, Mus musculus
  siRNA target sequence for Nktr (NM_010918.1,2693-2711).
ggaatgtcctcgttctaaa

SEQ ID NO: 619162 - DNA, 19 bp, Mus musculus
  siRNA target sequence for Nktr (NM_010918.1,2748-2766).
gtgtccaaagggaagaatt

SEQ ID NO: 619163 - DNA, 19 bp, Mus musculus
  siRNA target sequence for Nktr (NM_010918.1,2762-2780).
gaattgtgcggggagtaaa

SEQ ID NO: 619164 - DNA, 19 bp, Mus musculus
  siRNA target sequence for Nktr (NM_010918.1,2800-2818).
cagaacaagatgtgactaa

SEQ ID NO: 619165 - DNA, 19 bp, Mus musculus
  siRNA target sequence for Nktr (NM_010918.1,2961-2979).
gacggtgcctggaagtcta

SEQ ID NO: 619166 - DNA, 19 bp, Mus musculus
  siRNA target sequence for Nktr (NM_010918.1,3020-3038).
ctccaacttggggaacatt

SEQ ID NO: 619167 - DNA, 19 bp, Mus musculus
  siRNA target sequence for Nktr (NM_010918.1,3043-3061).
gagagccccagaagcaaaa

SEQ ID NO: 619168 - DNA, 19 bp, Mus musculus
  siRNA target sequence for Nktr (NM_010918.1,3279-3297).
gtgaaagacggcattccaa

SEQ ID NO: 619169 - DNA, 19 bp, Mus musculus
  siRNA target sequence for Nktr (NM_010918.1,3294-3312).
ccaaacgtcgagaaaacct

SEQ ID NO: 619170 - DNA, 19 bp, Mus musculus
  siRNA target sequence for Nktr (NM_010918.1,3340-3358).
ccaagaagggtactttaga

SEQ ID NO: 619171 - DNA, 19 bp, Mus musculus
  siRNA target sequence for Nktr (NM_010918.1,3504-3522).
gatgacaacatggagattt

SEQ ID NO: 619172 - DNA, 19 bp, Mus musculus
  siRNA target sequence for Nktr (NM_010918.1,3557-3575).
ggtggtgtcccctttagca

SEQ ID NO: 619173 - DNA, 19 bp, Mus musculus
  siRNA target sequence for Nktr (NM_010918.1,3765-3783).
gctgagaagagccaaatga

SEQ ID NO: 619174 - DNA, 19 bp, Mus musculus
  siRNA target sequence for Nktr (NM_010918.1,3810-3828).
caaggtgtagggaatctgt

SEQ ID NO: 619175 - DNA, 19 bp, Mus musculus
  siRNA target sequence for Nktr (NM_010918.1,3860-3878).
ggatgtgaaggcattatct

SEQ ID NO: 619176 - DNA, 19 bp, Mus musculus
  siRNA target sequence for Nktr (NM_010918.1,3861-3879).
gatgtgaaggcattatcta

SEQ ID NO: 619177 - DNA, 19 bp, Mus musculus
  siRNA target sequence for Nktr (NM_010918.1,3877-3895).
ctactgtgcctgaagtgaa

SEQ ID NO: 619178 - DNA, 19 bp, Mus musculus
  siRNA target sequence for Nktr (NM_010918.1,3940-3958).
ggcctgggtctctctttga

SEQ ID NO: 619179 - DNA, 19 bp, Mus musculus
  siRNA target sequence for Nktr (NM_010918.1,3947-3965).
gtctctctttgatgaagta

SEQ ID NO: 619180 - DNA, 19 bp, Mus musculus
  siRNA target sequence for Nktr (NM_010918.1,3971-3989).
gacggcacgcctaaatcga

SEQ ID NO: 619181 - DNA, 19 bp, Mus musculus
  siRNA target sequence for Nktr (NM_010918.1,4065-4083).
cacagatctcgaagcaaat

SEQ ID NO: 619182 - DNA, 19 bp, Mus musculus
  siRNA target sequence for Nktr (NM_010918.1,4105-4123).
gaacaaggtctgtctcata

SEQ ID NO: 619183 - DNA, 19 bp, Mus musculus
  siRNA target sequence for Nktr (NM_010918.1,4130-4148).
ctcacgaagtcgatctaga

SEQ ID NO: 619184 - DNA, 19 bp, Mus musculus
  siRNA target sequence for Nktr (NM_010918.1,4167-4185).
cgatcaagaagctactcta

SEQ ID NO: 619185 - DNA, 19 bp, Mus musculus
  siRNA target sequence for Nktr (NM_010918.1,4191-4209).
cggagcagggactggtata

SEQ ID NO: 619186 - DNA, 19 bp, Mus musculus
  siRNA target sequence for Nktr (NM_010918.1,4226-4244).
cagccggagcagttcctat

SEQ ID NO: 619187 - DNA, 19 bp, Mus musculus
  siRNA target sequence for Nktr (NM_010918.1,4230-4248).
cggagcagttcctatggaa

SEQ ID NO: 619188 - DNA, 19 bp, Mus musculus
  siRNA target sequence for Nktr (NM_010918.1,4324-4342).
cctacacctacgatagcta

SEQ ID NO: 619189 - DNA, 19 bp, Mus musculus
  siRNA target sequence for Nktr (NM_010918.1,4392-4410).
catcggggtagaagttaca

SEQ ID NO: 619190 - DNA, 19 bp, Mus musculus
  siRNA target sequence for Nktr (NM_010918.1,4395-4413).
cggggtagaagttacaaca

SEQ ID NO: 619191 - DNA, 19 bp, Mus musculus
  siRNA target sequence for Nktr (NM_010918.1,4421-4439).
caggagtggtagatcctat

SEQ ID NO: 619192 - DNA, 19 bp, Mus musculus
  siRNA target sequence for Pin1 (NM_023371.2,41-59).
ctgggagaagcgtatgagt

SEQ ID NO: 619193 - DNA, 19 bp, Mus musculus
  siRNA target sequence for Pin1 (NM_023371.2,399-417).
ggtcagatgcagaaaccat

SEQ ID NO: 619194 - DNA, 19 bp, Mus musculus
  siRNA target sequence for Ppib (NM_011149.1,201-219).
gctccgtcgtcttcctttt

SEQ ID NO: 619195 - DNA, 19 bp, Mus musculus
  siRNA target sequence for Ppib (NM_011149.1,266-284).
gtcacagtcaaggtatact

SEQ ID NO: 619196 - DNA, 19 bp, Mus musculus
  siRNA target sequence for Ppib (NM_011149.1,272-290).
gtcaaggtatactttgatt

SEQ ID NO: 619197 - DNA, 19 bp, Mus musculus
  siRNA target sequence for Ppib (NM_011149.1,350-368).
ccaaaaacagtggataatt

SEQ ID NO: 619198 - DNA, 19 bp, Mus musculus
  siRNA target sequence for Ppic (NM_008908.1,129-147).
ctcaggcgtccgaaaacga

SEQ ID NO: 619199 - DNA, 19 bp, Mus musculus
  siRNA target sequence for Ppic (NM_008908.1,383-401).
gcatctatggtgagacatt

SEQ ID NO: 619200 - DNA, 19 bp, Mus musculus
  siRNA target sequence for Ppic (NM_008908.1,525-543).
caaacacgttgtatttgga

SEQ ID NO: 619201 - DNA, 19 bp, Mus musculus
  siRNA target sequence for Ppic (NM_008908.1,561-579).
gactgtggtacattccatt

SEQ ID NO: 619202 - DNA, 19 bp, Mus musculus
  siRNA target sequence for Ppic (NM_008908.1,567-585).
ggtacattccattgaactt

SEQ ID NO: 619203 - DNA, 19 bp, Mus musculus
  siRNA target sequence for Ppic (NM_008908.1,630-648).
cgtcaacagtggcaagata

SEQ ID NO: 619204 - DNA, 19 bp, Mus musculus
  siRNA target sequence for Ppic (NM_008908.1,638-656).
gtggcaagatagatgtgaa

SEQ ID NO: 619205 - DNA, 19 bp, Mus musculus
  siRNA target sequence for Ppid (NM_026352.2,757-775).
gacttaaaaaacattggaa

SEQ ID NO: 619206 - DNA, 19 bp, Mus musculus
  siRNA target sequence for Ppif (NM_134084.1,190-208).
ggaacccgctcgtgtactt

SEQ ID NO: 619207 - DNA, 19 bp, Mus musculus
  siRNA target sequence for Ppif (NM_134084.1,240-258).
cgcgtggtgctggagttaa

SEQ ID NO: 619208 - DNA, 19 bp, Mus musculus
  siRNA target sequence for Ppif (NM_134084.1,241-259).
gcgtggtgctggagttaaa

SEQ ID NO: 619209 - DNA, 19 bp, Mus musculus
  siRNA target sequence for Ppif (NM_134084.1,430-448).
gctttcccgacgagaactt

SEQ ID NO: 619210 - DNA, 19 bp, Mus musculus
  siRNA target sequence for Ppif (NM_134084.1,566-584).
cgtgttcggccatgtcaaa

SEQ ID NO: 619211 - DNA, 19 bp, Mus musculus
  siRNA target sequence for Ppif (NM_134084.1,612-630).
gaatctttcggctcaaaaa

SEQ ID NO: 619212 - DNA, 19 bp, Mus musculus
  siRNA target sequence for Ppif (NM_134084.1,631-649).
gtgggaagacgtctaagaa

SEQ ID NO: 619213 - DNA, 19 bp, Mus musculus
  siRNA target sequence for Ppif (NM_134084.1,633-651).
gggaagacgtctaagaaga

SEQ ID NO: 619214 - DNA, 19 bp, Mus musculus
  siRNA target sequence for Ppif (NM_134084.1,640-658).
cgtctaagaagattgtcat

SEQ ID NO: 619215 - DNA, 19 bp, Mus musculus
  siRNA target sequence for Ppil1 (NM_026845.1,98-116).
ctagcatgggagtcattgt

SEQ ID NO: 619216 - DNA, 19 bp, Mus musculus
  siRNA target sequence for Ppil1 (NM_026845.1,257-275).
gtcgaggtggcgcatctat

SEQ ID NO: 619217 - DNA, 19 bp, Mus musculus
  siRNA target sequence for Ppil1 (NM_026845.1,259-277).
cgaggtggcgcatctattt

SEQ ID NO: 619218 - DNA, 19 bp, Mus musculus
  siRNA target sequence for Ppil1 (NM_026845.1,260-278).
gaggtggcgcatctattta

SEQ ID NO: 619219 - DNA, 19 bp, Mus musculus
  siRNA target sequence for Ppil1 (NM_026845.1,409-427).
ctggacggcaagcatacta

SEQ ID NO: 619220 - DNA, 19 bp, Mus musculus
  siRNA target sequence for Ppil1 (NM_026845.1,411-429).
ggacggcaagcatactatt

SEQ ID NO: 619221 - DNA, 19 bp, Mus musculus
  siRNA target sequence for Ppil1 (NM_026845.1,412-430).
gacggcaagcatactattt

SEQ ID NO: 619222 - DNA, 19 bp, Mus musculus
  siRNA target sequence for Ppil1 (NM_026845.1,507-525).
ggacgacgtgaagattctt

SEQ ID NO: 619223 - DNA, 19 bp, Mus musculus
  siRNA target sequence for Ppil1 (NM_026845.1,508-526).
gacgacgtgaagattctta

SEQ ID NO: 619224 - DNA, 19 bp, Mus musculus
  siRNA target sequence for Ppil2 (NM_144954.1,64-82).
gacaagatgtatatcactt

SEQ ID NO: 619225 - DNA, 19 bp, Mus musculus
  siRNA target sequence for Ppil2 (NM_144954.1,83-101).
gtgctgagtatactcattt

SEQ ID NO: 619226 - DNA, 19 bp, Mus musculus
  siRNA target sequence for Ppil2 (NM_144954.1,85-103).
gctgagtatactcatttct

SEQ ID NO: 619227 - DNA, 19 bp, Mus musculus
  siRNA target sequence for Ppil2 (NM_144954.1,121-139).
gatatctcacagacaagtt

SEQ ID NO: 619228 - DNA, 19 bp, Mus musculus
  siRNA target sequence for Ppil2 (NM_144954.1,137-155).
gttttcgccgattaccttt

SEQ ID NO: 619229 - DNA, 19 bp, Mus musculus
  siRNA target sequence for Ppil2 (NM_144954.1,206-224).
cagaaggtgtcgtctttga

SEQ ID NO: 619230 - DNA, 19 bp, Mus musculus
  siRNA target sequence for Ppil2 (NM_144954.1,369-387).
cactgacaacacccatatt

SEQ ID NO: 619231 - DNA, 19 bp, Mus musculus
  siRNA target sequence for Ppil2 (NM_144954.1,371-389).
ctgacaacacccatattgt

SEQ ID NO: 619232 - DNA, 19 bp, Mus musculus
  siRNA target sequence for Ppil2 (NM_144954.1,428-446).
cagtggagcagctaaacat

SEQ ID NO: 619233 - DNA, 19 bp, Mus musculus
  siRNA target sequence for Ppil2 (NM_144954.1,520-538).
cccaccaatttggacaaat

SEQ ID NO: 619234 - DNA, 19 bp, Mus musculus
  siRNA target sequence for Ppil2 (NM_144954.1,524-542).
ccaatttggacaaattcaa

SEQ ID NO: 619235 - DNA, 19 bp, Mus musculus
  siRNA target sequence for Ppil2 (NM_144954.1,613-631).
gacccatcttattatttga

SEQ ID NO: 619236 - DNA, 19 bp, Mus musculus
  siRNA target sequence for Ppil2 (NM_144954.1,854-872).
gctaccagtttgtgaagaa

SEQ ID NO: 619237 - DNA, 19 bp, Mus musculus
  siRNA target sequence for Ppil2 (NM_144954.1,896-914).
ccaacaagggcgaccttaa

SEQ ID NO: 619238 - DNA, 19 bp, Mus musculus
  siRNA target sequence for Ppil2 (NM_144954.1,900-918).
caagggcgaccttaactta

SEQ ID NO: 619239 - DNA, 19 bp, Mus musculus
  siRNA target sequence for Ppil2 (NM_144954.1,947-965).
cctgtgaaaacttcatcaa

SEQ ID NO: 619240 - DNA, 19 bp, Mus musculus
  siRNA target sequence for Ppil2 (NM_144954.1,960-978).
catcaagctctgcaagaaa

SEQ ID NO: 619241 - DNA, 19 bp, Mus musculus
  siRNA target sequence for Ppil2 (NM_144954.1,971-989).
gcaagaaacagtattatga

SEQ ID NO: 619242 - DNA, 19 bp, Mus musculus
  siRNA target sequence for Ppil2 (NM_144954.1,1007-1025).
ggtccatcaggaactttgt

SEQ ID NO: 619243 - DNA, 19 bp, Mus musculus
  siRNA target sequence for Ppil2 (NM_144954.1,1096-1114).
gagttccgtcccaaccttt

SEQ ID NO: 619244 - DNA, 19 bp, Mus musculus
  siRNA target sequence for Ppil2 (NM_144954.1,1196-1214).
cctgcgcttacctggataa

SEQ ID NO: 619245 - DNA, 19 bp, Mus musculus
  siRNA target sequence for Ppil2 (NM_144954.1,1309-1327).
gaggaagtgctcatatgta

SEQ ID NO: 619246 - DNA, 19 bp, Mus musculus
  siRNA target sequence for Ppil2 (NM_144954.1,1311-1329).
ggaagtgctcatatgtaca

SEQ ID NO: 619247 - DNA, 19 bp, Mus musculus
  siRNA target sequence for Ppil2 (NM_144954.1,1312-1330).
gaagtgctcatatgtacaa

SEQ ID NO: 619248 - DNA, 19 bp, Mus musculus
  siRNA target sequence for Ppil2 (NM_144954.1,1498-1516).
cctgcggccacgaaacgat

SEQ ID NO: 619249 - DNA, 19 bp, Mus musculus
  siRNA target sequence for Ranbp2 (NM_011240.2,193-211).
cccgagagaagtcaatgaa

SEQ ID NO: 619250 - DNA, 19 bp, Mus musculus
  siRNA target sequence for Ranbp2 (NM_011240.2,203-221).
gtcaatgaaaggattctat

SEQ ID NO: 619251 - DNA, 19 bp, Mus musculus
  siRNA target sequence for Ranbp2 (NM_011240.2,230-248).
gctgtactatgaagctaaa

SEQ ID NO: 619252 - DNA, 19 bp, Mus musculus
  siRNA target sequence for Ranbp2 (NM_011240.2,272-290).
catttctacgtatattaat

SEQ ID NO: 619253 - DNA, 19 bp, Mus musculus
  siRNA target sequence for Ranbp2 (NM_011240.2,317-335).
cagatttttgggtcttctt

SEQ ID NO: 619254 - DNA, 19 bp, Mus musculus
  siRNA target sequence for Ranbp2 (NM_011240.2,357-375).
gacaaagctgtagaatgtt

SEQ ID NO: 619255 - DNA, 19 bp, Mus musculus
  siRNA target sequence for Ranbp2 (NM_011240.2,359-377).
caaagctgtagaatgttat

SEQ ID NO: 619256 - DNA, 19 bp, Mus musculus
  siRNA target sequence for Ranbp2 (NM_011240.2,398-416).
cccaacgcaaaaagatctt

SEQ ID NO: 619257 - DNA, 19 bp, Mus musculus
  siRNA target sequence for Ranbp2 (NM_011240.2,400-418).
caacgcaaaaagatcttgt

SEQ ID NO: 619258 - DNA, 19 bp, Mus musculus
  siRNA target sequence for Ranbp2 (NM_011240.2,511-529).
gtcctgccatttataagtt

SEQ ID NO: 619259 - DNA, 19 bp, Mus musculus
  siRNA target sequence for Ranbp2 (NM_011240.2,514-532).
ctgccatttataagttaaa

SEQ ID NO: 619260 - DNA, 19 bp, Mus musculus
  siRNA target sequence for Ranbp2 (NM_011240.2,517-535).
ccatttataagttaaagga

SEQ ID NO: 619261 - DNA, 19 bp, Mus musculus
  siRNA target sequence for Ranbp2 (NM_011240.2,556-574).
gtgaagatggatggaataa

SEQ ID NO: 619262 - DNA, 19 bp, Mus musculus
  siRNA target sequence for Ranbp2 (NM_011240.2,591-609).
cagtcagaactttatgcaa

SEQ ID NO: 619263 - DNA, 19 bp, Mus musculus
  siRNA target sequence for Ranbp2 (NM_011240.2,610-628).
gacctgatgatattcatgt

SEQ ID NO: 619264 - DNA, 19 bp, Mus musculus
  siRNA target sequence for Ranbp2 (NM_011240.2,612-630).
cctgatgatattcatgtaa

SEQ ID NO: 619265 - DNA, 19 bp, Mus musculus
  siRNA target sequence for Ranbp2 (NM_011240.2,613-631).
ctgatgatattcatgtaaa

SEQ ID NO: 619266 - DNA, 19 bp, Mus musculus
  siRNA target sequence for Ranbp2 (NM_011240.2,645-663).
gagctttaccgttcaaata

SEQ ID NO: 619267 - DNA, 19 bp, Mus musculus
  siRNA target sequence for Ranbp2 (NM_011240.2,647-665).
gctttaccgttcaaataaa

SEQ ID NO: 619268 - DNA, 19 bp, Mus musculus
  siRNA target sequence for Ranbp2 (NM_011240.2,654-672).
cgttcaaataaaagattga

SEQ ID NO: 619269 - DNA, 19 bp, Mus musculus
  siRNA target sequence for Ranbp2 (NM_011240.2,655-673).
gttcaaataaaagattgaa

SEQ ID NO: 619270 - DNA, 19 bp, Mus musculus
  siRNA target sequence for Ranbp2 (NM_011240.2,704-722).
caggaacacagctttacgt

SEQ ID NO: 619271 - DNA, 19 bp, Mus musculus
  siRNA target sequence for Ranbp2 (NM_011240.2,710-728).
cacagctttacgttcaagt

SEQ ID NO: 619272 - DNA, 19 bp, Mus musculus
  siRNA target sequence for Ranbp2 (NM_011240.2,712-730).
cagctttacgttcaagttt

SEQ ID NO: 619273 - DNA, 19 bp, Mus musculus
  siRNA target sequence for Ranbp2 (NM_011240.2,715-733).
ctttacgttcaagtttaga

SEQ ID NO: 619274 - DNA, 19 bp, Mus musculus
  siRNA target sequence for Ranbp2 (NM_011240.2,791-809).
ggattctgataaaagtact

SEQ ID NO: 619275 - DNA, 19 bp, Mus musculus
  siRNA target sequence for Ranbp2 (NM_011240.2,792-810).
gattctgataaaagtactt

SEQ ID NO: 619276 - DNA, 19 bp, Mus musculus
  siRNA target sequence for Ranbp2 (NM_011240.2,808-826).
cttggagagcaaccaataa

SEQ ID NO: 619277 - DNA, 19 bp, Mus musculus
  siRNA target sequence for Ranbp2 (NM_011240.2,811-829).
ggagagcaaccaataaaga

SEQ ID NO: 619278 - DNA, 19 bp, Mus musculus
  siRNA target sequence for Ranbp2 (NM_011240.2,821-839).
caataaagacttacttcta

SEQ ID NO: 619279 - DNA, 19 bp, Mus musculus
  siRNA target sequence for Ranbp2 (NM_011240.2,837-855).
ctagcctatgctaacctta

SEQ ID NO: 619280 - DNA, 19 bp, Mus musculus
  siRNA target sequence for Ranbp2 (NM_011240.2,841-859).
cctatgctaaccttatgct

SEQ ID NO: 619281 - DNA, 19 bp, Mus musculus
  siRNA target sequence for Ranbp2 (NM_011240.2,842-860).
ctatgctaaccttatgcta

SEQ ID NO: 619282 - DNA, 19 bp, Mus musculus
  siRNA target sequence for Ranbp2 (NM_011240.2,846-864).
gctaaccttatgctactta

SEQ ID NO: 619283 - DNA, 19 bp, Mus musculus
  siRNA target sequence for Ranbp2 (NM_011240.2,884-902).
gcaggaaggtagagaacta

SEQ ID NO: 619284 - DNA, 19 bp, Mus musculus
  siRNA target sequence for Ranbp2 (NM_011240.2,891-909).
ggtagagaactattggaaa

SEQ ID NO: 619285 - DNA, 19 bp, Mus musculus
  siRNA target sequence for Ranbp2 (NM_011240.2,900-918).
ctattggaaagctttgata

SEQ ID NO: 619286 - DNA, 19 bp, Mus musculus
  siRNA target sequence for Ranbp2 (NM_011240.2,1049-1067).
ccagtggcgagctctttct

SEQ ID NO: 619287 - DNA, 19 bp, Mus musculus
  siRNA target sequence for Ranbp2 (NM_011240.2,1073-1091).
ggctgcattgtgctatctt

SEQ ID NO: 619288 - DNA, 19 bp, Mus musculus
  siRNA target sequence for Ranbp2 (NM_011240.2,1104-1122).
gttcccagaccaaaggtta

SEQ ID NO: 619289 - DNA, 19 bp, Mus musculus
  siRNA target sequence for Ranbp2 (NM_011240.2,1183-1201).
gccagtcagggcacatgtt

SEQ ID NO: 619290 - DNA, 19 bp, Mus musculus
  siRNA target sequence for Ranbp2 (NM_011240.2,1187-1205).
gtcagggcacatgttgtta

SEQ ID NO: 619291 - DNA, 19 bp, Mus musculus
  siRNA target sequence for Ranbp2 (NM_011240.2,1194-1212).
cacatgttgttaaacttaa

SEQ ID NO: 619292 - DNA, 19 bp, Mus musculus
  siRNA target sequence for Ranbp2 (NM_011240.2,1213-1231).
gtcgtggcaagcaagactt

SEQ ID NO: 619293 - DNA, 19 bp, Mus musculus
  siRNA target sequence for Ranbp2 (NM_011240.2,1375-1393).
ctgatgacttggctagata

SEQ ID NO: 619294 - DNA, 19 bp, Mus musculus
  siRNA target sequence for Ranbp2 (NM_011240.2,1380-1398).
gacttggctagatatgata

SEQ ID NO: 619295 - DNA, 19 bp, Mus musculus
  siRNA target sequence for Ranbp2 (NM_011240.2,1382-1400).
cttggctagatatgatact

SEQ ID NO: 619296 - DNA, 19 bp, Mus musculus
  siRNA target sequence for Ranbp2 (NM_011240.2,1402-1420).
gtgccgttcgagcacataa

SEQ ID NO: 619297 - DNA, 19 bp, Mus musculus
  siRNA target sequence for Ranbp2 (NM_011240.2,1406-1424).
cgttcgagcacataatggt

SEQ ID NO: 619298 - DNA, 19 bp, Mus musculus
  siRNA target sequence for Ranbp2 (NM_011240.2,1444-1462).
ggcttggcttacaatggaa

SEQ ID NO: 619299 - DNA, 19 bp, Mus musculus
  siRNA target sequence for Ranbp2 (NM_011240.2,1474-1492).
ctttaccagcaattcgaaa

SEQ ID NO: 619300 - DNA, 19 bp, Mus musculus
  siRNA target sequence for Ranbp2 (NM_011240.2,1480-1498).
cagcaattcgaaaatggtt

SEQ ID NO: 619301 - DNA, 19 bp, Mus musculus
  siRNA target sequence for Ranbp2 (NM_011240.2,1527-1545).
gagacgtcaaggcttgaaa

SEQ ID NO: 619302 - DNA, 19 bp, Mus musculus
  siRNA target sequence for Ranbp2 (NM_011240.2,1529-1547).
gacgtcaaggcttgaaaca

SEQ ID NO: 619303 - DNA, 19 bp, Mus musculus
  siRNA target sequence for Ranbp2 (NM_011240.2,1531-1549).
cgtcaaggcttgaaacaaa

SEQ ID NO: 619304 - DNA, 19 bp, Mus musculus
  siRNA target sequence for Ranbp2 (NM_011240.2,1546-1564).
caaatgcacctgaatcaat

SEQ ID NO: 619305 - DNA, 19 bp, Mus musculus
  siRNA target sequence for Ranbp2 (NM_011240.2,1554-1572).
cctgaatcaatctgtattt

SEQ ID NO: 619306 - DNA, 19 bp, Mus musculus
  siRNA target sequence for Ranbp2 (NM_011240.2,1589-1607).
cttacttggagttatatat

SEQ ID NO: 619307 - DNA, 19 bp, Mus musculus
  siRNA target sequence for Ranbp2 (NM_011240.2,1609-1627).
ccagtcacttacaattaaa

SEQ ID NO: 619308 - DNA, 19 bp, Mus musculus
  siRNA target sequence for Ranbp2 (NM_011240.2,1620-1638).
caattaaaggagaagtgta

SEQ ID NO: 619309 - DNA, 19 bp, Mus musculus
  siRNA target sequence for Ranbp2 (NM_011240.2,1729-1747).
cagtttgtactctgattca

SEQ ID NO: 619310 - DNA, 19 bp, Mus musculus
  siRNA target sequence for Ranbp2 (NM_011240.2,1774-1792).
caaaattgcgacttctagt

SEQ ID NO: 619311 - DNA, 19 bp, Mus musculus
  siRNA target sequence for Ranbp2 (NM_011240.2,1788-1806).
ctagttcaacgtgaaataa

SEQ ID NO: 619312 - DNA, 19 bp, Mus musculus
  siRNA target sequence for Ranbp2 (NM_011240.2,1862-1880).
ggcccagagtcttcaaaaa

SEQ ID NO: 619313 - DNA, 19 bp, Mus musculus
  siRNA target sequence for Ranbp2 (NM_011240.2,1945-1963).
ggaggaaagttttaccatt

SEQ ID NO: 619314 - DNA, 19 bp, Mus musculus
  siRNA target sequence for Ranbp2 (NM_011240.2,1973-1991).
gatcagaaagaagaatagt

SEQ ID NO: 619315 - DNA, 19 bp, Mus musculus
  siRNA target sequence for Ranbp2 (NM_011240.2,2037-2055).
gatattcaggcatctgaaa

SEQ ID NO: 619316 - DNA, 19 bp, Mus musculus
  siRNA target sequence for Ranbp2 (NM_011240.2,2113-2131).
gaaatatagaagatgctat

SEQ ID NO: 619317 - DNA, 19 bp, Mus musculus
  siRNA target sequence for Ranbp2 (NM_011240.2,2127-2145).
gctatgactgcttttgaat

SEQ ID NO: 619318 - DNA, 19 bp, Mus musculus
  siRNA target sequence for Ranbp2 (NM_011240.2,2134-2152).
ctgcttttgaatctattaa

SEQ ID NO: 619319 - DNA, 19 bp, Mus musculus
  siRNA target sequence for Ranbp2 (NM_011240.2,2248-2266).
gcaaaaattatctgagaaa

SEQ ID NO: 619320 - DNA, 19 bp, Mus musculus
  siRNA target sequence for Ranbp2 (NM_011240.2,2273-2291).
ggactacctgataaggatt

SEQ ID NO: 619321 - DNA, 19 bp, Mus musculus
  siRNA target sequence for Ranbp2 (NM_011240.2,2274-2292).
gactacctgataaggattt

SEQ ID NO: 619322 - DNA, 19 bp, Mus musculus
  siRNA target sequence for Ranbp2 (NM_011240.2,2276-2294).
ctacctgataaggatttta

SEQ ID NO: 619323 - DNA, 19 bp, Mus musculus
  siRNA target sequence for Ranbp2 (NM_011240.2,2279-2297).
cctgataaggattttagat

SEQ ID NO: 619324 - DNA, 19 bp, Mus musculus
  siRNA target sequence for Ranbp2 (NM_011240.2,2282-2300).
gataaggattttagatgat

SEQ ID NO: 619325 - DNA, 19 bp, Mus musculus
  siRNA target sequence for Ranbp2 (NM_011240.2,2298-2316).
gatagtgattcaaatactt

SEQ ID NO: 619326 - DNA, 19 bp, Mus musculus
  siRNA target sequence for Ranbp2 (NM_011240.2,2337-2355).
gttccccttgagtctgtaa

SEQ ID NO: 619327 - DNA, 19 bp, Mus musculus
  siRNA target sequence for Ranbp2 (NM_011240.2,2341-2359).
cccttgagtctgtaaaaga

SEQ ID NO: 619328 - DNA, 19 bp, Mus musculus
  siRNA target sequence for Ranbp2 (NM_011240.2,2371-2389).
cagttatgcaggaacttga

SEQ ID NO: 619329 - DNA, 19 bp, Mus musculus
  siRNA target sequence for Ranbp2 (NM_011240.2,2398-2416).
gtgaaggaggtactcttta

SEQ ID NO: 619330 - DNA, 19 bp, Mus musculus
  siRNA target sequence for Ranbp2 (NM_011240.2,2400-2418).
gaaggaggtactctttata

SEQ ID NO: 619331 - DNA, 19 bp, Mus musculus
  siRNA target sequence for Ranbp2 (NM_011240.2,2429-2447).
ctggcgaagtgctgattca

SEQ ID NO: 619332 - DNA, 19 bp, Mus musculus
  siRNA target sequence for Ranbp2 (NM_011240.2,2437-2455).
gtgctgattcagagttaaa

SEQ ID NO: 619333 - DNA, 19 bp, Mus musculus
  siRNA target sequence for Ranbp2 (NM_011240.2,2466-2484).
ccatctcctaccaaatatt

SEQ ID NO: 619334 - DNA, 19 bp, Mus musculus
  siRNA target sequence for Ranbp2 (NM_011240.2,2487-2505).
ctatcaccaagtaaaagtt

SEQ ID NO: 619335 - DNA, 19 bp, Mus musculus
  siRNA target sequence for Ranbp2 (NM_011240.2,2530-2548).
ctcgatgggcagaagatca

SEQ ID NO: 619336 - DNA, 19 bp, Mus musculus
  siRNA target sequence for Ranbp2 (NM_011240.2,2532-2550).
cgatgggcagaagatcaaa

SEQ ID NO: 619337 - DNA, 19 bp, Mus musculus
  siRNA target sequence for Ranbp2 (NM_011240.2,2537-2555).
ggcagaagatcaaaattct

SEQ ID NO: 619338 - DNA, 19 bp, Mus musculus
  siRNA target sequence for Ranbp2 (NM_011240.2,2544-2562).
gatcaaaattctttactga

SEQ ID NO: 619339 - DNA, 19 bp, Mus musculus
  siRNA target sequence for Ranbp2 (NM_011240.2,2603-2621).
gcaggaattgaagctaaat

SEQ ID NO: 619340 - DNA, 19 bp, Mus musculus
  siRNA target sequence for Ranbp2 (NM_011240.2,2607-2625).
gaattgaagctaaatagca

SEQ ID NO: 619341 - DNA, 19 bp, Mus musculus
  siRNA target sequence for Ranbp2 (NM_011240.2,2714-2732).
cggggctccactaacagtt

SEQ ID NO: 619342 - DNA, 19 bp, Mus musculus
  siRNA target sequence for Ranbp2 (NM_011240.2,2737-2755).
ctactggcccatcagtata

SEQ ID NO: 619343 - DNA, 19 bp, Mus musculus
  siRNA target sequence for Ranbp2 (NM_011240.2,2740-2758).
ctggcccatcagtatatta

SEQ ID NO: 619344 - DNA, 19 bp, Mus musculus
  siRNA target sequence for Ranbp2 (NM_011240.2,2742-2760).
ggcccatcagtatattata

SEQ ID NO: 619345 - DNA, 19 bp, Mus musculus
  siRNA target sequence for Ranbp2 (NM_011240.2,2744-2762).
cccatcagtatattatagt

SEQ ID NO: 619346 - DNA, 19 bp, Mus musculus
  siRNA target sequence for Ranbp2 (NM_011240.2,2761-2779).
gtcagtcacctgcatataa

SEQ ID NO: 619347 - DNA, 19 bp, Mus musculus
  siRNA target sequence for Ranbp2 (NM_011240.2,2829-2847).
ccagtttatggcatgaata

SEQ ID NO: 619348 - DNA, 19 bp, Mus musculus
  siRNA target sequence for Ranbp2 (NM_011240.2,2850-2868).
cttccaccccaacaacata

SEQ ID NO: 619349 - DNA, 19 bp, Mus musculus
  siRNA target sequence for Ranbp2 (NM_011240.2,2858-2876).
ccaacaacatatttatgca

SEQ ID NO: 619350 - DNA, 19 bp, Mus musculus
  siRNA target sequence for Ranbp2 (NM_011240.2,2859-2877).
caacaacatatttatgcat

SEQ ID NO: 619351 - DNA, 19 bp, Mus musculus
  siRNA target sequence for Ranbp2 (NM_011240.2,2911-2929).
gttcatctgcttgtatgtt

SEQ ID NO: 619352 - DNA, 19 bp, Mus musculus
  siRNA target sequence for Ranbp2 (NM_011240.2,2947-2965).
gtcctcccttgcgttttga

SEQ ID NO: 619353 - DNA, 19 bp, Mus musculus
  siRNA target sequence for Ranbp2 (NM_011240.2,2949-2967).
cctcccttgcgttttgagt

SEQ ID NO: 619354 - DNA, 19 bp, Mus musculus
  siRNA target sequence for Ranbp2 (NM_011240.2,2966-2984).
gtctcctgcaacaggaatt

SEQ ID NO: 619355 - DNA, 19 bp, Mus musculus
  siRNA target sequence for Ranbp2 (NM_011240.2,2991-3009).
cctaggggtgatgattatt

SEQ ID NO: 619356 - DNA, 19 bp, Mus musculus
  siRNA target sequence for Ranbp2 (NM_011240.2,2992-3010).
ctaggggtgatgattattt

SEQ ID NO: 619357 - DNA, 19 bp, Mus musculus
  siRNA target sequence for Ranbp2 (NM_011240.2,3054-3072).
gaaccagggtatttcacaa

SEQ ID NO: 619358 - DNA, 19 bp, Mus musculus
  siRNA target sequence for Ranbp2 (NM_011240.2,3103-3121).
cagcagaatcaaaggttat

SEQ ID NO: 619359 - DNA, 19 bp, Mus musculus
  siRNA target sequence for Ranbp2 (NM_011240.2,3106-3124).
cagaatcaaaggttataga

SEQ ID NO: 619360 - DNA, 19 bp, Mus musculus
  siRNA target sequence for Ranbp2 (NM_011240.2,3108-3126).
gaatcaaaggttatagaat

SEQ ID NO: 619361 - DNA, 19 bp, Mus musculus
  siRNA target sequence for Ranbp2 (NM_011240.2,3204-3222).
cagccaactccctttaaat

SEQ ID NO: 619362 - DNA, 19 bp, Mus musculus
  siRNA target sequence for Ranbp2 (NM_011240.2,3207-3225).
ccaactccctttaaattta

SEQ ID NO: 619363 - DNA, 19 bp, Mus musculus
  siRNA target sequence for Ranbp2 (NM_011240.2,3208-3226).
caactccctttaaatttaa

SEQ ID NO: 619364 - DNA, 19 bp, Mus musculus
  siRNA target sequence for Ranbp2 (NM_011240.2,3213-3231).
ccctttaaatttaactcaa

SEQ ID NO: 619365 - DNA, 19 bp, Mus musculus
  siRNA target sequence for Ranbp2 (NM_011240.2,3246-3264).
gatggcgacttcacatttt

SEQ ID NO: 619366 - DNA, 19 bp, Mus musculus
  siRNA target sequence for Ranbp2 (NM_011240.2,3287-3305).
gcctccttcaacagcttat

SEQ ID NO: 619367 - DNA, 19 bp, Mus musculus
  siRNA target sequence for Ranbp2 (NM_011240.2,3291-3309).
ccttcaacagcttatagca

SEQ ID NO: 619368 - DNA, 19 bp, Mus musculus
  siRNA target sequence for Ranbp2 (NM_011240.2,3327-3345).
ggtcttctgacttcagata

SEQ ID NO: 619369 - DNA, 19 bp, Mus musculus
  siRNA target sequence for Ranbp2 (NM_011240.2,3400-3418).
gtgggtctcggaatacatt

SEQ ID NO: 619370 - DNA, 19 bp, Mus musculus
  siRNA target sequence for Ranbp2 (NM_011240.2,3402-3420).
gggtctcggaatacattca

SEQ ID NO: 619371 - DNA, 19 bp, Mus musculus
  siRNA target sequence for Ranbp2 (NM_011240.2,3404-3422).
gtctcggaatacattcagt

SEQ ID NO: 619372 - DNA, 19 bp, Mus musculus
  siRNA target sequence for Ranbp2 (NM_011240.2,3426-3444).
ggaagcaaaaatacactta

SEQ ID NO: 619373 - DNA, 19 bp, Mus musculus
  siRNA target sequence for Ranbp2 (NM_011240.2,3430-3448).
gcaaaaatacacttacaga

SEQ ID NO: 619374 - DNA, 19 bp, Mus musculus
  siRNA target sequence for Ranbp2 (NM_011240.2,3516-3534).
ggtccagggaagtctgtat

SEQ ID NO: 619375 - DNA, 19 bp, Mus musculus
  siRNA target sequence for Ranbp2 (NM_011240.2,3517-3535).
gtccagggaagtctgtatt

SEQ ID NO: 619376 - DNA, 19 bp, Mus musculus
  siRNA target sequence for Ranbp2 (NM_011240.2,3519-3537).
ccagggaagtctgtattta

SEQ ID NO: 619377 - DNA, 19 bp, Mus musculus
  siRNA target sequence for Ranbp2 (NM_011240.2,3522-3540).
gggaagtctgtatttacaa

SEQ ID NO: 619378 - DNA, 19 bp, Mus musculus
  siRNA target sequence for Ranbp2 (NM_011240.2,3546-3564).
gcttccgagctggcaaata

SEQ ID NO: 619379 - DNA, 19 bp, Mus musculus
  siRNA target sequence for Ranbp2 (NM_011240.2,3547-3565).
cttccgagctggcaaataa

SEQ ID NO: 619380 - DNA, 19 bp, Mus musculus
  siRNA target sequence for Ranbp2 (NM_011240.2,3551-3569).
cgagctggcaaataaaagt

SEQ ID NO: 619381 - DNA, 19 bp, Mus musculus
  siRNA target sequence for Ranbp2 (NM_011240.2,3554-3572).
gctggcaaataaaagtcat

SEQ ID NO: 619382 - DNA, 19 bp, Mus musculus
  siRNA target sequence for Ranbp2 (NM_011240.2,3681-3699).
gaagaagaattcttttgca

SEQ ID NO: 619383 - DNA, 19 bp, Mus musculus
  siRNA target sequence for Ranbp2 (NM_011240.2,3697-3715).
gcaatcgtgcaaagttgtt

SEQ ID NO: 619384 - DNA, 19 bp, Mus musculus
  siRNA target sequence for Ranbp2 (NM_011240.2,3706-3724).
caaagttgttccgttttga

SEQ ID NO: 619385 - DNA, 19 bp, Mus musculus
  siRNA target sequence for Ranbp2 (NM_011240.2,3727-3745).
gtgaatccaaagaatggaa

SEQ ID NO: 619386 - DNA, 19 bp, Mus musculus
  siRNA target sequence for Ranbp2 (NM_011240.2,3750-3768).
cgtgggataggcaatgtaa

SEQ ID NO: 619387 - DNA, 19 bp, Mus musculus
  siRNA target sequence for Ranbp2 (NM_011240.2,3751-3769).
gtgggataggcaatgtaaa

SEQ ID NO: 619388 - DNA, 19 bp, Mus musculus
  siRNA target sequence for Ranbp2 (NM_011240.2,3753-3771).
gggataggcaatgtaaaaa

SEQ ID NO: 619389 - DNA, 19 bp, Mus musculus
  siRNA target sequence for Ranbp2 (NM_011240.2,3755-3773).
gataggcaatgtaaaaata

SEQ ID NO: 619390 - DNA, 19 bp, Mus musculus
  siRNA target sequence for Ranbp2 (NM_011240.2,3866-3884).
gaaactgacgccaaatgct

SEQ ID NO: 619391 - DNA, 19 bp, Mus musculus
  siRNA target sequence for Ranbp2 (NM_011240.2,3882-3900).
gctggctcagatagatctt

SEQ ID NO: 619392 - DNA, 19 bp, Mus musculus
  siRNA target sequence for Ranbp2 (NM_011240.2,3883-3901).
ctggctcagatagatcttt

SEQ ID NO: 619393 - DNA, 19 bp, Mus musculus
  siRNA target sequence for Ranbp2 (NM_011240.2,3886-3904).
gctcagatagatcttttgt

SEQ ID NO: 619394 - DNA, 19 bp, Mus musculus
  siRNA target sequence for Ranbp2 (NM_011240.2,3887-3905).
ctcagatagatcttttgta

SEQ ID NO: 619395 - DNA, 19 bp, Mus musculus
  siRNA target sequence for Ranbp2 (NM_011240.2,3903-3921).
gtatggcatgcccttgatt

SEQ ID NO: 619396 - DNA, 19 bp, Mus musculus
  siRNA target sequence for Ranbp2 (NM_011240.2,3908-3926).
gcatgcccttgattatgca

SEQ ID NO: 619397 - DNA, 19 bp, Mus musculus
  siRNA target sequence for Ranbp2 (NM_011240.2,3948-3966).
cagcttgcaattagattca

SEQ ID NO: 619398 - DNA, 19 bp, Mus musculus
  siRNA target sequence for Ranbp2 (NM_011240.2,3950-3968).
gcttgcaattagattcaaa

SEQ ID NO: 619399 - DNA, 19 bp, Mus musculus
  siRNA target sequence for Ranbp2 (NM_011240.2,3973-3991).
ctgaggaagcagcactatt

SEQ ID NO: 619400 - DNA, 19 bp, Mus musculus
  siRNA target sequence for Ranbp2 (NM_011240.2,3982-4000).
cagcactatttaagtgtaa

SEQ ID NO: 619401 - DNA, 19 bp, Mus musculus
  siRNA target sequence for Ranbp2 (NM_011240.2,4010-4028).
ggcccagaacattttaaaa

SEQ ID NO: 619402 - DNA, 19 bp, Mus musculus
  siRNA target sequence for Ranbp2 (NM_011240.2,4051-4069).
cagcaccaaatcatactct

SEQ ID NO: 619403 - DNA, 19 bp, Mus musculus
  siRNA target sequence for Ranbp2 (NM_011240.2,4057-4075).
caaatcatactcttagaat

SEQ ID NO: 619404 - DNA, 19 bp, Mus musculus
  siRNA target sequence for Ranbp2 (NM_011240.2,4062-4080).
catactcttagaattgtaa

SEQ ID NO: 619405 - DNA, 19 bp, Mus musculus
  siRNA target sequence for Ranbp2 (NM_011240.2,4066-4084).
ctcttagaattgtaaagga

SEQ ID NO: 619406 - DNA, 19 bp, Mus musculus
  siRNA target sequence for Ranbp2 (NM_011240.2,4120-4138).
ctgatggtggaaacttgaa

SEQ ID NO: 619407 - DNA, 19 bp, Mus musculus
  siRNA target sequence for Ranbp2 (NM_011240.2,4122-4140).
gatggtggaaacttgaatt

SEQ ID NO: 619408 - DNA, 19 bp, Mus musculus
  siRNA target sequence for Ranbp2 (NM_011240.2,4164-4182).
gaagggccttactggaatt

SEQ ID NO: 619409 - DNA, 19 bp, Mus musculus
  siRNA target sequence for Ranbp2 (NM_011240.2,4167-4185).
gggccttactggaattgta

SEQ ID NO: 619410 - DNA, 19 bp, Mus musculus
  siRNA target sequence for Ranbp2 (NM_011240.2,4168-4186).
ggccttactggaattgtaa

SEQ ID NO: 619411 - DNA, 19 bp, Mus musculus
  siRNA target sequence for Ranbp2 (NM_011240.2,4183-4201).
gtaacagctgctcctttaa

SEQ ID NO: 619412 - DNA, 19 bp, Mus musculus
  siRNA target sequence for Ranbp2 (NM_011240.2,4215-4233).
gctaagaaatgtgtatcat

SEQ ID NO: 619413 - DNA, 19 bp, Mus musculus
  siRNA target sequence for Ranbp2 (NM_011240.2,4227-4245).
gtatcatgccagaatacaa

SEQ ID NO: 619414 - DNA, 19 bp, Mus musculus
  siRNA target sequence for Ranbp2 (NM_011240.2,4243-4261).
caaacccaaccagtaacaa

SEQ ID NO: 619415 - DNA, 19 bp, Mus musculus
  siRNA target sequence for Ranbp2 (NM_011240.2,4265-4283).
gctcctaggtcctccatta

SEQ ID NO: 619416 - DNA, 19 bp, Mus musculus
  siRNA target sequence for Ranbp2 (NM_011240.2,4268-4286).
cctaggtcctccattagtt

SEQ ID NO: 619417 - DNA, 19 bp, Mus musculus
  siRNA target sequence for Ranbp2 (NM_011240.2,4323-4341).
gctcaagatcgatttgcaa

SEQ ID NO: 619418 - DNA, 19 bp, Mus musculus
  siRNA target sequence for Ranbp2 (NM_011240.2,4329-4347).
gatcgatttgcaacaatga

SEQ ID NO: 619419 - DNA, 19 bp, Mus musculus
  siRNA target sequence for Ranbp2 (NM_011240.2,4338-4356).
gcaacaatgactgcaaata

SEQ ID NO: 619420 - DNA, 19 bp, Mus musculus
  siRNA target sequence for Ranbp2 (NM_011240.2,4339-4357).
caacaatgactgcaaataa

SEQ ID NO: 619421 - DNA, 19 bp, Mus musculus
  siRNA target sequence for Ranbp2 (NM_011240.2,4342-4360).
caatgactgcaaataaaga

SEQ ID NO: 619422 - DNA, 19 bp, Mus musculus
  siRNA target sequence for Ranbp2 (NM_011240.2,4439-4457).
gtctgcgtcttcgtttgtt

SEQ ID NO: 619423 - DNA, 19 bp, Mus musculus
  siRNA target sequence for Ranbp2 (NM_011240.2,4441-4459).
ctgcgtcttcgtttgttca

SEQ ID NO: 619424 - DNA, 19 bp, Mus musculus
  siRNA target sequence for Ranbp2 (NM_011240.2,4450-4468).
cgtttgttcaaacttcttt

SEQ ID NO: 619425 - DNA, 19 bp, Mus musculus
  siRNA target sequence for Ranbp2 (NM_011240.2,4563-4581).
ctagtccgaaatgaaagaa

SEQ ID NO: 619426 - DNA, 19 bp, Mus musculus
  siRNA target sequence for Ranbp2 (NM_011240.2,4642-4660).
gtttgtgctcggtgaaaaa

SEQ ID NO: 619427 - DNA, 19 bp, Mus musculus
  siRNA target sequence for Ranbp2 (NM_011240.2,4701-4719).
gttacaccaagtttatcta

SEQ ID NO: 619428 - DNA, 19 bp, Mus musculus
  siRNA target sequence for Ranbp2 (NM_011240.2,4743-4761).
ggtacctcagagatgagta

SEQ ID NO: 619429 - DNA, 19 bp, Mus musculus
  siRNA target sequence for Ranbp2 (NM_011240.2,4763-4781).
gcctttcaggattggattt

SEQ ID NO: 619430 - DNA, 19 bp, Mus musculus
  siRNA target sequence for Ranbp2 (NM_011240.2,4786-4804).
gtatgttcgccaagaaaga

SEQ ID NO: 619431 - DNA, 19 bp, Mus musculus
  siRNA target sequence for Ranbp2 (NM_011240.2,4813-4831).
gggactgtagcttgtgttt

SEQ ID NO: 619432 - DNA, 19 bp, Mus musculus
  siRNA target sequence for Ranbp2 (NM_011240.2,4826-4844).
gtgttttgtccgaaatgaa

SEQ ID NO: 619433 - DNA, 19 bp, Mus musculus
  siRNA target sequence for Ranbp2 (NM_011240.2,4847-4865).
cagtgctactcactgtatt

SEQ ID NO: 619434 - DNA, 19 bp, Mus musculus
  siRNA target sequence for Ranbp2 (NM_011240.2,4866-4884).
gcttgtcagtatccaaata

SEQ ID NO: 619435 - DNA, 19 bp, Mus musculus
  siRNA target sequence for Ranbp2 (NM_011240.2,4867-4885).
cttgtcagtatccaaataa

SEQ ID NO: 619436 - DNA, 19 bp, Mus musculus
  siRNA target sequence for Ranbp2 (NM_011240.2,4886-4904).
gcagaatcagcctacatct

SEQ ID NO: 619437 - DNA, 19 bp, Mus musculus
  siRNA target sequence for Ranbp2 (NM_011240.2,5021-5039).
gagctcttccctaaaatgt

SEQ ID NO: 619438 - DNA, 19 bp, Mus musculus
  siRNA target sequence for Ranbp2 (NM_011240.2,5023-5041).
gctcttccctaaaatgtgt

SEQ ID NO: 619439 - DNA, 19 bp, Mus musculus
  siRNA target sequence for Ranbp2 (NM_011240.2,5052-5070).
gcctccaagccaactcata

SEQ ID NO: 619440 - DNA, 19 bp, Mus musculus
  siRNA target sequence for Ranbp2 (NM_011240.2,5137-5155).
gtcaagtgggaacagaatt

SEQ ID NO: 619441 - DNA, 19 bp, Mus musculus
  siRNA target sequence for Ranbp2 (NM_011240.2,5191-5209).
gcatttcagagcagaaatt

SEQ ID NO: 619442 - DNA, 19 bp, Mus musculus
  siRNA target sequence for Ranbp2 (NM_011240.2,5218-5236).
ggcatgtggatcaagaaaa

SEQ ID NO: 619443 - DNA, 19 bp, Mus musculus
  siRNA target sequence for Ranbp2 (NM_011240.2,5258-5276).
gggtggctctaatacagaa

SEQ ID NO: 619444 - DNA, 19 bp, Mus musculus
  siRNA target sequence for Ranbp2 (NM_011240.2,5259-5277).
ggtggctctaatacagaat

SEQ ID NO: 619445 - DNA, 19 bp, Mus musculus
  siRNA target sequence for Ranbp2 (NM_011240.2,5260-5278).
gtggctctaatacagaatt

SEQ ID NO: 619446 - DNA, 19 bp, Mus musculus
  siRNA target sequence for Ranbp2 (NM_011240.2,5263-5281).
gctctaatacagaatttaa

SEQ ID NO: 619447 - DNA, 19 bp, Mus musculus
  siRNA target sequence for Ranbp2 (NM_011240.2,5588-5606).
cggcaaagtggctgagaaa

SEQ ID NO: 619448 - DNA, 19 bp, Mus musculus
  siRNA target sequence for Ranbp2 (NM_011240.2,5598-5616).
gctgagaaagcaaatacgt

SEQ ID NO: 619449 - DNA, 19 bp, Mus musculus
  siRNA target sequence for Ranbp2 (NM_011240.2,5617-5635).
cttctgatctcgagaaaga

SEQ ID NO: 619450 - DNA, 19 bp, Mus musculus
  siRNA target sequence for Ranbp2 (NM_011240.2,5858-5876).
gctgatgcgaagagaacaa

SEQ ID NO: 619451 - DNA, 19 bp, Mus musculus
  siRNA target sequence for Ranbp2 (NM_011240.2,5892-5910).
gccaatcattggataacca

SEQ ID NO: 619452 - DNA, 19 bp, Mus musculus
  siRNA target sequence for Ranbp2 (NM_011240.2,5928-5946).
cctctctcggggtcagata

SEQ ID NO: 619453 - DNA, 19 bp, Mus musculus
  siRNA target sequence for Ranbp2 (NM_011240.2,5954-5972).
gatgtggctagctagtgat

SEQ ID NO: 619454 - DNA, 19 bp, Mus musculus
  siRNA target sequence for Ranbp2 (NM_011240.2,6062-6080).
gtgtcaacgtcttctctta

SEQ ID NO: 619455 - DNA, 19 bp, Mus musculus
  siRNA target sequence for Ranbp2 (NM_011240.2,6064-6082).
gtcaacgtcttctcttaga

SEQ ID NO: 619456 - DNA, 19 bp, Mus musculus
  siRNA target sequence for Ranbp2 (NM_011240.2,6099-6117).
ccccataaacttgtagata

SEQ ID NO: 619457 - DNA, 19 bp, Mus musculus
  siRNA target sequence for Ranbp2 (NM_011240.2,6101-6119).
ccataaacttgtagatact

SEQ ID NO: 619458 - DNA, 19 bp, Mus musculus
  siRNA target sequence for Ranbp2 (NM_011240.2,6118-6136).
ctggcagggctgctaaatt

SEQ ID NO: 619459 - DNA, 19 bp, Mus musculus
  siRNA target sequence for Ranbp2 (NM_011240.2,6122-6140).
cagggctgctaaattaata

SEQ ID NO: 619460 - DNA, 19 bp, Mus musculus
  siRNA target sequence for Ranbp2 (NM_011240.2,6124-6142).
gggctgctaaattaataca

SEQ ID NO: 619461 - DNA, 19 bp, Mus musculus
  siRNA target sequence for Ranbp2 (NM_011240.2,6126-6144).
gctgctaaattaatacaga

SEQ ID NO: 619462 - DNA, 19 bp, Mus musculus
  siRNA target sequence for Ranbp2 (NM_011240.2,6163-6181).
gcggcctgaaagatttcaa

SEQ ID NO: 619463 - DNA, 19 bp, Mus musculus
  siRNA target sequence for Ranbp2 (NM_011240.2,6164-6182).
cggcctgaaagatttcaaa

SEQ ID NO: 619464 - DNA, 19 bp, Mus musculus
  siRNA target sequence for Ranbp2 (NM_011240.2,6174-6192).
gatttcaaaacctttttga

SEQ ID NO: 619465 - DNA, 19 bp, Mus musculus
  siRNA target sequence for Ranbp2 (NM_011240.2,6271-6289).
ccaagcaaaatcctgataa

SEQ ID NO: 619466 - DNA, 19 bp, Mus musculus
  siRNA target sequence for Ranbp2 (NM_011240.2,6301-6319).
ccttagaatgggataacta

SEQ ID NO: 619467 - DNA, 19 bp, Mus musculus
  siRNA target sequence for Ranbp2 (NM_011240.2,6391-6409).
gccctgtgcggaaaaacct

SEQ ID NO: 619468 - DNA, 19 bp, Mus musculus
  siRNA target sequence for Ranbp2 (NM_011240.2,6423-6441).
gagtccactacaggattta

SEQ ID NO: 619469 - DNA, 19 bp, Mus musculus
  siRNA target sequence for Ranbp2 (NM_011240.2,6427-6445).
ccactacaggatttaactt

SEQ ID NO: 619470 - DNA, 19 bp, Mus musculus
  siRNA target sequence for Ranbp2 (NM_011240.2,6459-6477).
gctctgagtccatctaagt

SEQ ID NO: 619471 - DNA, 19 bp, Mus musculus
  siRNA target sequence for Ranbp2 (NM_011240.2,6472-6490).
ctaagtctccagccaaatt

SEQ ID NO: 619472 - DNA, 19 bp, Mus musculus
  siRNA target sequence for Ranbp2 (NM_011240.2,6494-6512).
ccagagtggagcttcagtt

SEQ ID NO: 619473 - DNA, 19 bp, Mus musculus
  siRNA target sequence for Ranbp2 (NM_011240.2,6524-6542).
ggagtctgatgttactcaa

SEQ ID NO: 619474 - DNA, 19 bp, Mus musculus
  siRNA target sequence for Ranbp2 (NM_011240.2,6551-6569).
gagagatggacagtacttt

SEQ ID NO: 619475 - DNA, 19 bp, Mus musculus
  siRNA target sequence for Ranbp2 (NM_011240.2,6583-6601).
ctttacctgatctagttga

SEQ ID NO: 619476 - DNA, 19 bp, Mus musculus
  siRNA target sequence for Ranbp2 (NM_011240.2,6588-6606).
cctgatctagttgaagtat

SEQ ID NO: 619477 - DNA, 19 bp, Mus musculus
  siRNA target sequence for Ranbp2 (NM_011240.2,6613-6631).
gtgaggaaaatgaacaagt

SEQ ID NO: 619478 - DNA, 19 bp, Mus musculus
  siRNA target sequence for Ranbp2 (NM_011240.2,6640-6658).
gtcacagagcaaaacttta

SEQ ID NO: 619479 - DNA, 19 bp, Mus musculus
  siRNA target sequence for Ranbp2 (NM_011240.2,6642-6660).
cacagagcaaaactttaca

SEQ ID NO: 619480 - DNA, 19 bp, Mus musculus
  siRNA target sequence for Ranbp2 (NM_011240.2,6703-6721).
gagatataaagatcttaca

SEQ ID NO: 619481 - DNA, 19 bp, Mus musculus
  siRNA target sequence for Ranbp2 (NM_011240.2,6755-6773).
gagaagggaccaggtatta

SEQ ID NO: 619482 - DNA, 19 bp, Mus musculus
  siRNA target sequence for Ranbp2 (NM_011240.2,6801-6819).
ccagatatgactttgcaaa

SEQ ID NO: 619483 - DNA, 19 bp, Mus musculus
  siRNA target sequence for Ranbp2 (NM_011240.2,6845-6863).
ggtgtggactgcatgtgat

SEQ ID NO: 619484 - DNA, 19 bp, Mus musculus
  siRNA target sequence for Ranbp2 (NM_011240.2,6846-6864).
gtgtggactgcatgtgatt

SEQ ID NO: 619485 - DNA, 19 bp, Mus musculus
  siRNA target sequence for Ranbp2 (NM_011240.2,6891-6909).
catttggctgttcgtttta

SEQ ID NO: 619486 - DNA, 19 bp, Mus musculus
  siRNA target sequence for Ranbp2 (NM_011240.2,6966-6984).
caagaaaaagattcattga

SEQ ID NO: 619487 - DNA, 19 bp, Mus musculus
  siRNA target sequence for Ranbp2 (NM_011240.2,6983-7001).
gataacacctcatgtttct

SEQ ID NO: 619488 - DNA, 19 bp, Mus musculus
  siRNA target sequence for Ranbp2 (NM_011240.2,7022-7040).
gtcaccatgtggcaaaatt

SEQ ID NO: 619489 - DNA, 19 bp, Mus musculus
  siRNA target sequence for Ranbp2 (NM_011240.2,7098-7116).
gaagtaatagatacaactt

SEQ ID NO: 619490 - DNA, 19 bp, Mus musculus
  siRNA target sequence for Ranbp2 (NM_011240.2,7191-7209).
ggctcagaatctgttaaaa

SEQ ID NO: 619491 - DNA, 19 bp, Mus musculus
  siRNA target sequence for Ranbp2 (NM_011240.2,7339-7357).
gtggatctgaaggaaaagt

SEQ ID NO: 619492 - DNA, 19 bp, Mus musculus
  siRNA target sequence for Ranbp2 (NM_011240.2,7413-7431).
ggcaaagtcaaaaatctca

SEQ ID NO: 619493 - DNA, 19 bp, Mus musculus
  siRNA target sequence for Ranbp2 (NM_011240.2,7446-7464).
gagaactcttcaactagtt

SEQ ID NO: 619494 - DNA, 19 bp, Mus musculus
  siRNA target sequence for Ranbp2 (NM_011240.2,7448-7466).
gaactcttcaactagttat

SEQ ID NO: 619495 - DNA, 19 bp, Mus musculus
  siRNA target sequence for Ranbp2 (NM_011240.2,7453-7471).
cttcaactagttatacatt

SEQ ID NO: 619496 - DNA, 19 bp, Mus musculus
  siRNA target sequence for Ranbp2 (NM_011240.2,7456-7474).
caactagttatacatttaa

SEQ ID NO: 619497 - DNA, 19 bp, Mus musculus
  siRNA target sequence for Ranbp2 (NM_011240.2,7509-7527).
gaagatctcccctcagata

SEQ ID NO: 619498 - DNA, 19 bp, Mus musculus
  siRNA target sequence for Ranbp2 (NM_011240.2,7515-7533).
ctcccctcagataatgata

SEQ ID NO: 619499 - DNA, 19 bp, Mus musculus
  siRNA target sequence for Ranbp2 (NM_011240.2,7517-7535).
cccctcagataatgatatt

SEQ ID NO: 619500 - DNA, 19 bp, Mus musculus
  siRNA target sequence for Ranbp2 (NM_011240.2,7519-7537).
cctcagataatgatattct

SEQ ID NO: 619501 - DNA, 19 bp, Mus musculus
  siRNA target sequence for Ranbp2 (NM_011240.2,7522-7540).
cagataatgatattctcat

SEQ ID NO: 619502 - DNA, 19 bp, Mus musculus
  siRNA target sequence for Ranbp2 (NM_011240.2,7622-7640).
gaataggcctggctatgtt

SEQ ID NO: 619503 - DNA, 19 bp, Mus musculus
  siRNA target sequence for Ranbp2 (NM_011240.2,7628-7646).
gcctggctatgttagtgaa

SEQ ID NO: 619504 - DNA, 19 bp, Mus musculus
  siRNA target sequence for Ranbp2 (NM_011240.2,7676-7694).
ggctgtcaagaagcttaat

SEQ ID NO: 619505 - DNA, 19 bp, Mus musculus
  siRNA target sequence for Ranbp2 (NM_011240.2,7680-7698).
gtcaagaagcttaatggaa

SEQ ID NO: 619506 - DNA, 19 bp, Mus musculus
  siRNA target sequence for Ranbp2 (NM_011240.2,7946-7964).
gactgatagagttggtatt

SEQ ID NO: 619507 - DNA, 19 bp, Mus musculus
  siRNA target sequence for Ranbp2 (NM_011240.2,7948-7966).
ctgatagagttggtattga

SEQ ID NO: 619508 - DNA, 19 bp, Mus musculus
  siRNA target sequence for Ranbp2 (NM_011240.2,7954-7972).
gagttggtattgagcatat

SEQ ID NO: 619509 - DNA, 19 bp, Mus musculus
  siRNA target sequence for Ranbp2 (NM_011240.2,8009-8027).
gtctgaagaacctgattct

SEQ ID NO: 619510 - DNA, 19 bp, Mus musculus
  siRNA target sequence for Ranbp2 (NM_011240.2,8070-8088).
gacaaacctgtcgatttgt

SEQ ID NO: 619511 - DNA, 19 bp, Mus musculus
  siRNA target sequence for Ranbp2 (NM_011240.2,8079-8097).
gtcgatttgtccactagaa

SEQ ID NO: 619512 - DNA, 19 bp, Mus musculus
  siRNA target sequence for Ranbp2 (NM_011240.2,8081-8099).
cgatttgtccactagaaaa

SEQ ID NO: 619513 - DNA, 19 bp, Mus musculus
  siRNA target sequence for Ranbp2 (NM_011240.2,8087-8105).
gtccactagaaaagaaact

SEQ ID NO: 619514 - DNA, 19 bp, Mus musculus
  siRNA target sequence for Ranbp2 (NM_011240.2,8182-8200).
cagacttggcttcaagtaa

SEQ ID NO: 619515 - DNA, 19 bp, Mus musculus
  siRNA target sequence for Ranbp2 (NM_011240.2,8194-8212).
caagtaattctggagattt

SEQ ID NO: 619516 - DNA, 19 bp, Mus musculus
  siRNA target sequence for Ranbp2 (NM_011240.2,8481-8499).
ggagatataaagattctct

SEQ ID NO: 619517 - DNA, 19 bp, Mus musculus
  siRNA target sequence for Ranbp2 (NM_011240.2,8556-8574).
gtgtgtgcaaaccatgtta

SEQ ID NO: 619518 - DNA, 19 bp, Mus musculus
  siRNA target sequence for Ranbp2 (NM_011240.2,8558-8576).
gtgtgcaaaccatgttatt

SEQ ID NO: 619519 - DNA, 19 bp, Mus musculus
  siRNA target sequence for Ranbp2 (NM_011240.2,8562-8580).
gcaaaccatgttattacca

SEQ ID NO: 619520 - DNA, 19 bp, Mus musculus
  siRNA target sequence for Ranbp2 (NM_011240.2,8563-8581).
caaaccatgttattaccaa

SEQ ID NO: 619521 - DNA, 19 bp, Mus musculus
  siRNA target sequence for Ranbp2 (NM_011240.2,8627-8645).
ctggactgcctccgattat

SEQ ID NO: 619522 - DNA, 19 bp, Mus musculus
  siRNA target sequence for Ranbp2 (NM_011240.2,8630-8648).
gactgcctccgattatgct

SEQ ID NO: 619523 - DNA, 19 bp, Mus musculus
  siRNA target sequence for Ranbp2 (NM_011240.2,8673-8691).
cttgcagtgagatttaaga

SEQ ID NO: 619524 - DNA, 19 bp, Mus musculus
  siRNA target sequence for Ranbp2 (NM_011240.2,8696-8714).
ggaaatgactgagagtttt

SEQ ID NO: 619525 - DNA, 19 bp, Mus musculus
  siRNA target sequence for Ranbp2 (NM_011240.2,8774-8792).
ccttgcagcagaattatca

SEQ ID NO: 619526 - DNA, 19 bp, Mus musculus
  siRNA target sequence for Ranbp2 (NM_011240.2,8841-8859).
cctctaggacggataatca

SEQ ID NO: 619527 - DNA, 19 bp, Mus musculus
  siRNA target sequence for Ranbp2 (NM_011240.2,8842-8860).
ctctaggacggataatcat

SEQ ID NO: 619528 - DNA, 19 bp, Mus musculus
  siRNA target sequence for Ranbp2 (NM_011240.2,8847-8865).
ggacggataatcatggaat

SEQ ID NO: 619529 - DNA, 19 bp, Mus musculus
  siRNA target sequence for Ranbp2 (NM_011240.2,8848-8866).
gacggataatcatggaatt

SEQ ID NO: 619530 - DNA, 19 bp, Mus musculus
  siRNA target sequence for Ranbp2 (NM_011240.2,8957-8975).
ccgagtagttccagatttt

SEQ ID NO: 619531 - DNA, 19 bp, Mus musculus
  siRNA target sequence for Ranbp2 (NM_011240.2,8958-8976).
cgagtagttccagatttta

SEQ ID NO: 619532 - DNA, 19 bp, Mus musculus
  siRNA target sequence for Ranbp2 (NM_011240.2,8985-9003).
gggggagatattaccaaat

SEQ ID NO: 619533 - DNA, 19 bp, Mus musculus
  siRNA target sequence for Ranbp2 (NM_011240.2,9076-9094).
gtcctggcttactatccat

SEQ ID NO: 619534 - DNA, 19 bp, Mus musculus
  siRNA target sequence for Ranbp2 (NM_011240.2,9096-9114).
gccaattacggccagaata

SEQ ID NO: 619535 - DNA, 19 bp, Mus musculus
  siRNA target sequence for Ranbp2 (NM_011240.2,9161-9179).
ggactttaagcatgtagta

SEQ ID NO: 619536 - DNA, 19 bp, Mus musculus
  siRNA target sequence for Ranbp2 (NM_011240.2,9162-9180).
gactttaagcatgtagtat

SEQ ID NO: 619537 - DNA, 19 bp, Mus musculus
  siRNA target sequence for Ranbp2 (NM_011240.2,9164-9182).
ctttaagcatgtagtattt

SEQ ID NO: 619538 - DNA, 19 bp, Mus musculus
  siRNA target sequence for Ranbp2 (NM_011240.2,9174-9192).
gtagtatttgggtttgtta

SEQ ID NO: 619539 - DNA, 19 bp, Mus musculus
  siRNA target sequence for Ranbp2 (NM_011240.2,9244-9262).
ggtctgttagtagaagaat

SEQ ID NO: 619540 - DNA, 19 bp, Mus musculus
  siRNA target sequence for Dci (NM_010023.2,146-164).
caggggttgcagtgatgaa

SEQ ID NO: 619541 - DNA, 19 bp, Mus musculus
  siRNA target sequence for Dci (NM_010023.2,149-167).
gggttgcagtgatgaagtt

SEQ ID NO: 619542 - DNA, 19 bp, Mus musculus
  siRNA target sequence for Dci (NM_010023.2,150-168).
ggttgcagtgatgaagtta

SEQ ID NO: 619543 - DNA, 19 bp, Mus musculus
  siRNA target sequence for Dci (NM_010023.2,385-403).
ctctacacgtccaacatga

SEQ ID NO: 619544 - DNA, 19 bp, Mus musculus
  siRNA target sequence for Dci (NM_010023.2,390-408).
cacgtccaacatgatctta

SEQ ID NO: 619545 - DNA, 19 bp, Mus musculus
  siRNA target sequence for Dci (NM_010023.2,392-410).
cgtccaacatgatcttagt

SEQ ID NO: 619546 - DNA, 19 bp, Mus musculus
  siRNA target sequence for Dci (NM_010023.2,480-498).
ggctgacaaccccaaatat

SEQ ID NO: 619547 - DNA, 19 bp, Mus musculus
  siRNA target sequence for Dci (NM_010023.2,490-508).
cccaaatatactataggat

SEQ ID NO: 619548 - DNA, 19 bp, Mus musculus
  siRNA target sequence for Dci (NM_010023.2,767-785).
ccgcagacaacctgatcaa

SEQ ID NO: 619549 - DNA, 19 bp, Mus musculus
  siRNA target sequence for Dci (NM_010023.2,850-868).
ctacacatgtacttggaaa

SEQ ID NO: 619550 - DNA, 19 bp, Mus musculus
  siRNA target sequence for Ebp (NM_007898.2,1043-1061).
gaagaccaagccttcttat

SEQ ID NO: 619551 - DNA, 19 bp, Mus musculus
  siRNA target sequence for Ebp (NM_007898.2,1062-1080).
cccaactctggaaagagta

SEQ ID NO: 619552 - DNA, 19 bp, Mus musculus
  siRNA target sequence for Ebp (NM_007898.2,1089-1107).
gagatagccgatatatcct

SEQ ID NO: 619553 - DNA, 19 bp, Mus musculus
  siRNA target sequence for Ebp (NM_007898.2,1303-1321).
gataggccaccccgtttat

SEQ ID NO: 619554 - DNA, 19 bp, Mus musculus
  siRNA target sequence for Ebp (NM_007898.2,1307-1325).
ggccaccccgtttatttct

SEQ ID NO: 619555 - DNA, 19 bp, Mus musculus
  siRNA target sequence for Ebp (NM_007898.2,1352-1370).
gtatggttggtgataccaa

SEQ ID NO: 619556 - DNA, 19 bp, Mus musculus
  siRNA target sequence for Ebp (NM_007898.2,1381-1399).
gcttgatgccataaagcat

SEQ ID NO: 619557 - DNA, 19 bp, Mus musculus
  siRNA target sequence for Oprs1 (NM_011014.1,90-108).
catggatcaccctgattct

SEQ ID NO: 619558 - DNA, 19 bp, Mus musculus
  siRNA target sequence for Oprs1 (NM_011014.1,158-176).
caaaacttcgtcttctcta

SEQ ID NO: 619559 - DNA, 19 bp, Mus musculus
  siRNA target sequence for Oprs1 (NM_011014.1,483-501).
cgaaaagtgaggtcttcta

SEQ ID NO: 619560 - DNA, 19 bp, Mus musculus
  siRNA target sequence for Oprs1 (NM_011014.1,614-632).
gcactagccgacactttct

SEQ ID NO: 619561 - DNA, 19 bp, Mus musculus
  siRNA target sequence for Oprs1 (NM_011014.1,615-633).
cactagccgacactttctt

SEQ ID NO: 619562 - DNA, 19 bp, Mus musculus
  siRNA target sequence for Oprs1 (NM_011014.1,617-635).
ctagccgacactttcttca

SEQ ID NO: 619563 - DNA, 19 bp, Mus musculus
  siRNA target sequence for Gnpda2 (NM_027681.1,175-193).
gaggcttgtaattcttgat

SEQ ID NO: 619564 - DNA, 19 bp, Mus musculus
  siRNA target sequence for Gnpda2 (NM_027681.1,177-195).
ggcttgtaattcttgataa

SEQ ID NO: 619565 - DNA, 19 bp, Mus musculus
  siRNA target sequence for Gnpda2 (NM_027681.1,229-247).
catctgcaatcgtatcata

SEQ ID NO: 619566 - DNA, 19 bp, Mus musculus
  siRNA target sequence for Gnpda2 (NM_027681.1,232-250).
ctgcaatcgtatcataaaa

SEQ ID NO: 619567 - DNA, 19 bp, Mus musculus
  siRNA target sequence for Gnpda2 (NM_027681.1,296-314).
gggagtacacctttaggat

SEQ ID NO: 619568 - DNA, 19 bp, Mus musculus
  siRNA target sequence for Gnpda2 (NM_027681.1,300-318).
gtacacctttaggatgtta

SEQ ID NO: 619569 - DNA, 19 bp, Mus musculus
  siRNA target sequence for Gnpda2 (NM_027681.1,311-329).
ggatgttataaaaagctaa

SEQ ID NO: 619570 - DNA, 19 bp, Mus musculus
  siRNA target sequence for Gnpda2 (NM_027681.1,315-333).
gttataaaaagctaatcga

SEQ ID NO: 619571 - DNA, 19 bp, Mus musculus
  siRNA target sequence for Gnpda2 (NM_027681.1,428-446).
cattcttatatgtggaata

SEQ ID NO: 619572 - DNA, 19 bp, Mus musculus
  siRNA target sequence for Gnpda2 (NM_027681.1,432-450).
cttatatgtggaataactt

SEQ ID NO: 619573 - DNA, 19 bp, Mus musculus
  siRNA target sequence for Gnpda2 (NM_027681.1,448-466).
cttctttaagcatatcgat

SEQ ID NO: 619574 - DNA, 19 bp, Mus musculus
  siRNA target sequence for Gnpda2 (NM_027681.1,451-469).
ctttaagcatatcgatata

SEQ ID NO: 619575 - DNA, 19 bp, Mus musculus
  siRNA target sequence for Gnpda2 (NM_027681.1,463-481).
cgatatagatccgaacaat

SEQ ID NO: 619576 - DNA, 19 bp, Mus musculus
  siRNA target sequence for Gnpda2 (NM_027681.1,555-573).
ctggaggaatagacctttt

SEQ ID NO: 619577 - DNA, 19 bp, Mus musculus
  siRNA target sequence for Gnpda2 (NM_027681.1,558-576).
gaggaatagacctttttgt

SEQ ID NO: 619578 - DNA, 19 bp, Mus musculus
  siRNA target sequence for Gnpda2 (NM_027681.1,584-602).
ccagatggccatattgctt

SEQ ID NO: 619579 - DNA, 19 bp, Mus musculus
  siRNA target sequence for Gnpda2 (NM_027681.1,585-603).
cagatggccatattgcttt

SEQ ID NO: 619580 - DNA, 19 bp, Mus musculus
  siRNA target sequence for Gnpda2 (NM_027681.1,591-609).
gccatattgctttcaatga

SEQ ID NO: 619581 - DNA, 19 bp, Mus musculus
  siRNA target sequence for Gnpda2 (NM_027681.1,592-610).
ccatattgctttcaatgaa

SEQ ID NO: 619582 - DNA, 19 bp, Mus musculus
  siRNA target sequence for Gnpda2 (NM_027681.1,611-629).
ccaggatccagtttagtat

SEQ ID NO: 619583 - DNA, 19 bp, Mus musculus
  siRNA target sequence for Gnpda2 (NM_027681.1,614-632).
ggatccagtttagtatcaa

SEQ ID NO: 619584 - DNA, 19 bp, Mus musculus
  siRNA target sequence for Gnpda2 (NM_027681.1,626-644).
gtatcaagaacgagattaa

SEQ ID NO: 619585 - DNA, 19 bp, Mus musculus
  siRNA target sequence for Gnpda2 (NM_027681.1,639-657).
gattaaagacgctagcaat

SEQ ID NO: 619586 - DNA, 19 bp, Mus musculus
  siRNA target sequence for Gnpda2 (NM_027681.1,650-668).
ctagcaatggacaccattt

SEQ ID NO: 619587 - DNA, 19 bp, Mus musculus
  siRNA target sequence for Gnpda2 (NM_027681.1,856-874).
gcaacatccacgcactatt

SEQ ID NO: 619588 - DNA, 19 bp, Mus musculus
  siRNA target sequence for Gnpda2 (NM_027681.1,857-875).
caacatccacgcactattt

SEQ ID NO: 619589 - DNA, 19 bp, Mus musculus
  siRNA target sequence for Gnpda2 (NM_027681.1,894-912).
ccactctagaattaagagt

SEQ ID NO: 619590 - DNA, 19 bp, Mus musculus
  siRNA target sequence for Gnpda2 (NM_027681.1,895-913).
cactctagaattaagagtt

SEQ ID NO: 619591 - DNA, 19 bp, Mus musculus
  siRNA target sequence for Gnpda2 (NM_027681.1,911-929).
gttaaaactgtgaaatact

SEQ ID NO: 619592 - DNA, 19 bp, Mus musculus
  siRNA target sequence for Gnpda2 (NM_027681.1,920-938).
gtgaaatactttaaaggtt

SEQ ID NO: 619593 - DNA, 19 bp, Mus musculus
  siRNA target sequence for Gnpda2 (NM_027681.1,943-961).
gcatgtgcacaataaactt

SEQ ID NO: 619594 - DNA, 19 bp, Mus musculus
  siRNA target sequence for Gnpda2 (NM_027681.1,965-983).
gacccactctacagtatga

SEQ ID NO: 619595 - DNA, 19 bp, Mus musculus
  siRNA target sequence for Gnpda2 (NM_027681.1,967-985).
cccactctacagtatgaaa

SEQ ID NO: 619596 - DNA, 19 bp, Mus musculus
  siRNA target sequence for Gnpda2 (NM_027681.1,969-987).
cactctacagtatgaaaga

SEQ ID NO: 619597 - DNA, 19 bp, Mus musculus
  siRNA target sequence for Tpi (NM_009415.1,418-436).
caccgcccaccgcttacat

SEQ ID NO: 619598 - DNA, 19 bp, Mus musculus
  siRNA target sequence for Rpia (NM_009075.1,261-279).
ccacgtgaagaataaccaa

SEQ ID NO: 619599 - DNA, 19 bp, Mus musculus
  siRNA target sequence for Rpia (NM_009075.1,315-333).
cgctgtgcagcgaatagct

SEQ ID NO: 619600 - DNA, 19 bp, Mus musculus
  siRNA target sequence for Rpia (NM_009075.1,321-339).
gcagcgaatagctgaaaga

SEQ ID NO: 619601 - DNA, 19 bp, Mus musculus
  siRNA target sequence for Rpia (NM_009075.1,485-503).
ctgagctcaatctcatcaa

SEQ ID NO: 619602 - DNA, 19 bp, Mus musculus
  siRNA target sequence for Rpia (NM_009075.1,534-552).
gatcgtggctggttatgca

SEQ ID NO: 619603 - DNA, 19 bp, Mus musculus
  siRNA target sequence for Rpia (NM_009075.1,550-568).
gcaagtcgtttcattgtga

SEQ ID NO: 619604 - DNA, 19 bp, Mus musculus
  siRNA target sequence for Rpia (NM_009075.1,551-569).
caagtcgtttcattgtgat

SEQ ID NO: 619605 - DNA, 19 bp, Mus musculus
  siRNA target sequence for Rpia (NM_009075.1,571-589).
gctgatttcaggaaagatt

SEQ ID NO: 619606 - DNA, 19 bp, Mus musculus
  siRNA target sequence for Rpia (NM_009075.1,574-592).
gatttcaggaaagattcaa

SEQ ID NO: 619607 - DNA, 19 bp, Mus musculus
  siRNA target sequence for Rpia (NM_009075.1,689-707).
gtgaggtggaacttcgaat

SEQ ID NO: 619608 - DNA, 19 bp, Mus musculus
  siRNA target sequence for Rpia (NM_009075.1,735-753).
gacggataacgggaatttt

SEQ ID NO: 619609 - DNA, 19 bp, Mus musculus
  siRNA target sequence for Rpia (NM_009075.1,768-786).
gtttgaccgggtgcataaa

SEQ ID NO: 619610 - DNA, 19 bp, Mus musculus
  siRNA target sequence for Ptgds2 (NM_019455.2,113-131).
cgaaattattcgctacata

SEQ ID NO: 619611 - DNA, 19 bp, Mus musculus
  siRNA target sequence for Ptgds2 (NM_019455.2,114-132).
gaaattattcgctacatat

SEQ ID NO: 619612 - DNA, 19 bp, Mus musculus
  siRNA target sequence for Ptgds2 (NM_019455.2,123-141).
cgctacatattcgcttatt

SEQ ID NO: 619613 - DNA, 19 bp, Mus musculus
  siRNA target sequence for Ptgds2 (NM_019455.2,124-142).
gctacatattcgcttattt

SEQ ID NO: 619614 - DNA, 19 bp, Mus musculus
  siRNA target sequence for Ptgds2 (NM_019455.2,174-192).
caagctgactggcctaaaa

SEQ ID NO: 619615 - DNA, 19 bp, Mus musculus
  siRNA target sequence for Ptgds2 (NM_019455.2,214-232).
gcaaaatccctgttttgga

SEQ ID NO: 619616 - DNA, 19 bp, Mus musculus
  siRNA target sequence for Ptgds2 (NM_019455.2,230-248).
ggaggtggaaggacttaca

SEQ ID NO: 619617 - DNA, 19 bp, Mus musculus
  siRNA target sequence for Ptgds2 (NM_019455.2,255-273).
cagagcctcgcaatagcaa

SEQ ID NO: 619618 - DNA, 19 bp, Mus musculus
  siRNA target sequence for Ptgds2 (NM_019455.2,260-278).
cctcgcaatagcaagatat

SEQ ID NO: 619619 - DNA, 19 bp, Mus musculus
  siRNA target sequence for Ptgds2 (NM_019455.2,261-279).
ctcgcaatagcaagatatt

SEQ ID NO: 619620 - DNA, 19 bp, Mus musculus
  siRNA target sequence for Ptgds2 (NM_019455.2,270-288).
gcaagatatttgaccaaaa

SEQ ID NO: 619621 - DNA, 19 bp, Mus musculus
  siRNA target sequence for Ptgds2 (NM_019455.2,405-423).
gagcggatgttcaatgaat

SEQ ID NO: 619622 - DNA, 19 bp, Mus musculus
  siRNA target sequence for Ptgds2 (NM_019455.2,409-427).
ggatgttcaatgaattgct

SEQ ID NO: 619623 - DNA, 19 bp, Mus musculus
  siRNA target sequence for Ptgds2 (NM_019455.2,441-459).
cctcgccttctgaaagatt

SEQ ID NO: 619624 - DNA, 19 bp, Mus musculus
  siRNA target sequence for Ptgds2 (NM_019455.2,442-460).
ctcgccttctgaaagattt

SEQ ID NO: 619625 - DNA, 19 bp, Mus musculus
  siRNA target sequence for Ptgds2 (NM_019455.2,475-493).
gagacaaagagtggtttat

SEQ ID NO: 619626 - DNA, 19 bp, Mus musculus
  siRNA target sequence for Ptgds2 (NM_019455.2,485-503).
gtggtttataggcaattat

SEQ ID NO: 619627 - DNA, 19 bp, Mus musculus
  siRNA target sequence for Ptgds2 (NM_019455.2,487-505).
ggtttataggcaattatgt

SEQ ID NO: 619628 - DNA, 19 bp, Mus musculus
  siRNA target sequence for Ptgds2 (NM_019455.2,488-506).
gtttataggcaattatgta

SEQ ID NO: 619629 - DNA, 19 bp, Mus musculus
  siRNA target sequence for Ptgds2 (NM_019455.2,516-534).
gacttctactgggatatct

SEQ ID NO: 619630 - DNA, 19 bp, Mus musculus
  siRNA target sequence for Ptgds2 (NM_019455.2,535-553).
gcagcaccacacttttggt

SEQ ID NO: 619631 - DNA, 19 bp, Mus musculus
  siRNA target sequence for Ptgds2 (NM_019455.2,536-554).
cagcaccacacttttggtt

SEQ ID NO: 619632 - DNA, 19 bp, Mus musculus
  siRNA target sequence for Ptgds2 (NM_019455.2,590-608).
ggtgtcattacggaacaaa

SEQ ID NO: 619633 - DNA, 19 bp, Mus musculus
  siRNA target sequence for Ptgds2 (NM_019455.2,601-619).
ggaacaaagtccaagctat

SEQ ID NO: 619634 - DNA, 19 bp, Mus musculus
  siRNA target sequence for Ptgis (NM_008968.2,141-159).
gcctcctggccgtgctatt

SEQ ID NO: 619635 - DNA, 19 bp, Mus musculus
  siRNA target sequence for Ptgis (NM_008968.2,295-313).
ggaaaagcacggtgacata

SEQ ID NO: 619636 - DNA, 19 bp, Mus musculus
  siRNA target sequence for Ptgis (NM_008968.2,446-464).
gatctgcagcttccaaatt

SEQ ID NO: 619637 - DNA, 19 bp, Mus musculus
  siRNA target sequence for Ptgis (NM_008968.2,449-467).
ctgcagcttccaaatttca

SEQ ID NO: 619638 - DNA, 19 bp, Mus musculus
  siRNA target sequence for Ptgis (NM_008968.2,531-549).
cagaagccatgtataccaa

SEQ ID NO: 619639 - DNA, 19 bp, Mus musculus
  siRNA target sequence for Ptgis (NM_008968.2,646-664).
cggctacctgaccctatat

SEQ ID NO: 619640 - DNA, 19 bp, Mus musculus
  siRNA target sequence for Ptgis (NM_008968.2,713-731).
gtccactcagcggatgttt

SEQ ID NO: 619641 - DNA, 19 bp, Mus musculus
  siRNA target sequence for Ptgis (NM_008968.2,718-736).
ctcagcggatgttttccat

SEQ ID NO: 619642 - DNA, 19 bp, Mus musculus
  siRNA target sequence for Ptgis (NM_008968.2,723-741).
cggatgttttccatacctt

SEQ ID NO: 619643 - DNA, 19 bp, Mus musculus
  siRNA target sequence for Ptgis (NM_008968.2,879-897).
gcagctggctggagagtta

SEQ ID NO: 619644 - DNA, 19 bp, Mus musculus
  siRNA target sequence for Ptgis (NM_008968.2,880-898).
cagctggctggagagttat

SEQ ID NO: 619645 - DNA, 19 bp, Mus musculus
  siRNA target sequence for Ptgis (NM_008968.2,1229-1247).
gcagacgggagggaattct

SEQ ID NO: 619646 - DNA, 19 bp, Mus musculus
  siRNA target sequence for Ptgis (NM_008968.2,1465-1483).
caacagcatcaaacaattt

SEQ ID NO: 619647 - DNA, 19 bp, Mus musculus
  siRNA target sequence for Ptgis (NM_008968.2,1487-1505).
gtcctactgctgactcatt

SEQ ID NO: 619648 - DNA, 19 bp, Mus musculus
  siRNA target sequence for Pmm1 (NM_013872.1,136-154).
cgccagctcgccagaaaat

SEQ ID NO: 619649 - DNA, 19 bp, Mus musculus
  siRNA target sequence for Pmm1 (NM_013872.1,137-155).
gccagctcgccagaaaatt

SEQ ID NO: 619650 - DNA, 19 bp, Mus musculus
  siRNA target sequence for Pmm1 (NM_013872.1,139-157).
cagctcgccagaaaattga

SEQ ID NO: 619651 - DNA, 19 bp, Mus musculus
  siRNA target sequence for Pmm1 (NM_013872.1,216-234).
ggtggctctgactactcta

SEQ ID NO: 619652 - DNA, 19 bp, Mus musculus
  siRNA target sequence for Pmm1 (NM_013872.1,327-345).
cggctactctccaaacaga

SEQ ID NO: 619653 - DNA, 19 bp, Mus musculus
  siRNA target sequence for Pmm1 (NM_013872.1,431-449).
gaagcgtgggaccttcatt

SEQ ID NO: 619654 - DNA, 19 bp, Mus musculus
  siRNA target sequence for Pmm1 (NM_013872.1,435-453).
cgtgggaccttcattgagt

SEQ ID NO: 619655 - DNA, 19 bp, Mus musculus
  siRNA target sequence for Pmm1 (NM_013872.1,724-742).
gtcctggcgggaatgactt

SEQ ID NO: 619656 - DNA, 19 bp, Mus musculus
  siRNA target sequence for Pmm1 (NM_013872.1,727-745).
ctggcgggaatgactttga

SEQ ID NO: 619657 - DNA, 19 bp, Mus musculus
  siRNA target sequence for Pmm1 (NM_013872.1,729-747).
ggcgggaatgactttgaga

SEQ ID NO: 619658 - DNA, 19 bp, Mus musculus
  siRNA target sequence for Pmm1 (NM_013872.1,808-826).
gatgccgtgagctcttctt

SEQ ID NO: 619659 - DNA, 19 bp, Mus musculus
  siRNA target sequence for Pgm3 (NM_028352.2,146-164).
gccccaggggctcattctt

SEQ ID NO: 619660 - DNA, 19 bp, Mus musculus
  siRNA target sequence for Pgm3 (NM_028352.2,195-213).
gcccagcatctcgatcata

SEQ ID NO: 619661 - DNA, 19 bp, Mus musculus
  siRNA target sequence for Pgm3 (NM_028352.2,196-214).
cccagcatctcgatcatat

SEQ ID NO: 619662 - DNA, 19 bp, Mus musculus
  siRNA target sequence for Pgm3 (NM_028352.2,201-219).
catctcgatcatatcatgt

SEQ ID NO: 619663 - DNA, 19 bp, Mus musculus
  siRNA target sequence for Pgm3 (NM_028352.2,218-236).
gtttcgaatgggattgcta

SEQ ID NO: 619664 - DNA, 19 bp, Mus musculus
  siRNA target sequence for Pgm3 (NM_028352.2,243-261).
ctgcggtcaaagcaaacaa

SEQ ID NO: 619665 - DNA, 19 bp, Mus musculus
  siRNA target sequence for Pgm3 (NM_028352.2,245-263).
gcggtcaaagcaaacaaga

SEQ ID NO: 619666 - DNA, 19 bp, Mus musculus
  siRNA target sequence for Pgm3 (NM_028352.2,246-264).
cggtcaaagcaaacaagat

SEQ ID NO: 619667 - DNA, 19 bp, Mus musculus
  siRNA target sequence for Pgm3 (NM_028352.2,311-329).
caatggtgtgaaattggtt

SEQ ID NO: 619668 - DNA, 19 bp, Mus musculus
  siRNA target sequence for Pgm3 (NM_028352.2,535-553).
ctgttttaggaggtcaatt

SEQ ID NO: 619669 - DNA, 19 bp, Mus musculus
  siRNA target sequence for Pgm3 (NM_028352.2,543-561).
ggaggtcaattccatgatt

SEQ ID NO: 619670 - DNA, 19 bp, Mus musculus
  siRNA target sequence for Pgm3 (NM_028352.2,659-677).
gctctccaaggctttcgta

SEQ ID NO: 619671 - DNA, 19 bp, Mus musculus
  siRNA target sequence for Pgm3 (NM_028352.2,670-688).
ctttcgtagaccttacgaa

SEQ ID NO: 619672 - DNA, 19 bp, Mus musculus
  siRNA target sequence for Pgm3 (NM_028352.2,751-769).
gggccttgaagctaagaga

SEQ ID NO: 619673 - DNA, 19 bp, Mus musculus
  siRNA target sequence for Pgm3 (NM_028352.2,753-771).
gccttgaagctaagagaaa

SEQ ID NO: 619674 - DNA, 19 bp, Mus musculus
  siRNA target sequence for Pgm3 (NM_028352.2,766-784).
gagaaatggaacactactt

SEQ ID NO: 619675 - DNA, 19 bp, Mus musculus
  siRNA target sequence for Pgm3 (NM_028352.2,799-817).
cggttctgctgtttaatga

SEQ ID NO: 619676 - DNA, 19 bp, Mus musculus
  siRNA target sequence for Pgm3 (NM_028352.2,800-818).
ggttctgctgtttaatgat

SEQ ID NO: 619677 - DNA, 19 bp, Mus musculus
  siRNA target sequence for Pgm3 (NM_028352.2,848-866).
cggtgctgactttgtgaaa

SEQ ID NO: 619678 - DNA, 19 bp, Mus musculus
  siRNA target sequence for Pgm3 (NM_028352.2,849-867).
ggtgctgactttgtgaaaa

SEQ ID NO: 619679 - DNA, 19 bp, Mus musculus
  siRNA target sequence for Pgm3 (NM_028352.2,936-954).
gcggacaggatcgtgtatt

SEQ ID NO: 619680 - DNA, 19 bp, Mus musculus
  siRNA target sequence for Pgm3 (NM_028352.2,937-955).
cggacaggatcgtgtatta

SEQ ID NO: 619681 - DNA, 19 bp, Mus musculus
  siRNA target sequence for Pgm3 (NM_028352.2,939-957).
gacaggatcgtgtattact

SEQ ID NO: 619682 - DNA, 19 bp, Mus musculus
  siRNA target sequence for Pgm3 (NM_028352.2,996-1014).
gacaagatagcgacgttaa

SEQ ID NO: 619683 - DNA, 19 bp, Mus musculus
  siRNA target sequence for Pgm3 (NM_028352.2,998-1016).
caagatagcgacgttaatt

SEQ ID NO: 619684 - DNA, 19 bp, Mus musculus
  siRNA target sequence for Pgm3 (NM_028352.2,1010-1028).
gttaattagcagtttcctt

SEQ ID NO: 619685 - DNA, 19 bp, Mus musculus
  siRNA target sequence for Pgm3 (NM_028352.2,1040-1058).
gttggagattggagaaagt

SEQ ID NO: 619686 - DNA, 19 bp, Mus musculus
  siRNA target sequence for Pgm3 (NM_028352.2,1103-1121).
cacgcggtaccttgaagaa

SEQ ID NO: 619687 - DNA, 19 bp, Mus musculus
  siRNA target sequence for Pgm3 (NM_028352.2,1108-1126).
ggtaccttgaagaagttat

SEQ ID NO: 619688 - DNA, 19 bp, Mus musculus
  siRNA target sequence for Pgm3 (NM_028352.2,1144-1162).
gcaccaaaactggtgttaa

SEQ ID NO: 619689 - DNA, 19 bp, Mus musculus
  siRNA target sequence for Pgm3 (NM_028352.2,1147-1165).
ccaaaactggtgttaaaca

SEQ ID NO: 619690 - DNA, 19 bp, Mus musculus
  siRNA target sequence for Pgm3 (NM_028352.2,1187-1205).
gtttgacatcggagtttat

SEQ ID NO: 619691 - DNA, 19 bp, Mus musculus
  siRNA target sequence for Pgm3 (NM_028352.2,1281-1299).
ctagacgatggaaaaggaa

SEQ ID NO: 619692 - DNA, 19 bp, Mus musculus
  siRNA target sequence for Pgm3 (NM_028352.2,1317-1335).
gcgagcatcatcgacttat

SEQ ID NO: 619693 - DNA, 19 bp, Mus musculus
  siRNA target sequence for Pgm3 (NM_028352.2,1363-1381).
ctgacatgttggtgattga

SEQ ID NO: 619694 - DNA, 19 bp, Mus musculus
  siRNA target sequence for Pgm3 (NM_028352.2,1444-1462).
ctaacagacaactcaaagt

SEQ ID NO: 619695 - DNA, 19 bp, Mus musculus
  siRNA target sequence for Pgm3 (NM_028352.2,1467-1485).
gtcgcggacaggagagtta

SEQ ID NO: 619696 - DNA, 19 bp, Mus musculus
  siRNA target sequence for Pgm3 (NM_028352.2,1470-1488).
gcggacaggagagttatta

SEQ ID NO: 619697 - DNA, 19 bp, Mus musculus
  siRNA target sequence for Pgm3 (NM_028352.2,1473-1491).
gacaggagagttattagca

SEQ ID NO: 619698 - DNA, 19 bp, Mus musculus
  siRNA target sequence for Pgm3 (NM_028352.2,1528-1546).
gactccaagaggcaatcaa

SEQ ID NO: 619699 - DNA, 19 bp, Mus musculus
  siRNA target sequence for Pgm3 (NM_028352.2,1565-1583).
cacacttgcccgagctttt

SEQ ID NO: 619700 - DNA, 19 bp, Mus musculus
  siRNA target sequence for Pgm3 (NM_028352.2,1567-1585).
cacttgcccgagcttttgt

SEQ ID NO: 619701 - DNA, 19 bp, Mus musculus
  siRNA target sequence for Pgm3 (NM_028352.2,1607-1625).
cattgtccgagtatatgca

SEQ ID NO: 619702 - DNA, 19 bp, Mus musculus
  siRNA target sequence for Pgm1 (NM_025700.1,191-209).
gaagagctgcggaaatgct

SEQ ID NO: 619703 - DNA, 19 bp, Mus musculus
  siRNA target sequence for Pgm1 (NM_025700.1,425-443).
ctggctgcgactgcattta

SEQ ID NO: 619704 - DNA, 19 bp, Mus musculus
  siRNA target sequence for Pgm1 (NM_025700.1,428-446).
gctgcgactgcatttatca

SEQ ID NO: 619705 - DNA, 19 bp, Mus musculus
  siRNA target sequence for Pgm1 (NM_025700.1,461-479).
gtatacctcttctctgata

SEQ ID NO: 619706 - DNA, 19 bp, Mus musculus
  siRNA target sequence for Pgm1 (NM_025700.1,507-525).
ccgtgtcgcacctgaaact

SEQ ID NO: 619707 - DNA, 19 bp, Mus musculus
  siRNA target sequence for Pgm1 (NM_025700.1,509-527).
gtgtcgcacctgaaactct

SEQ ID NO: 619708 - DNA, 19 bp, Mus musculus
  siRNA target sequence for Pgm1 (NM_025700.1,546-564).
ctgcctcgcacaatccaaa

SEQ ID NO: 619709 - DNA, 19 bp, Mus musculus
  siRNA target sequence for Pgm1 (NM_025700.1,619-637).
ccacgatcgcggcatttct

SEQ ID NO: 619710 - DNA, 19 bp, Mus musculus
  siRNA target sequence for Pgm1 (NM_025700.1,640-658).
ggccattgaggaaaatcta

SEQ ID NO: 619711 - DNA, 19 bp, Mus musculus
  siRNA target sequence for Pgm1 (NM_025700.1,699-717).
gtagtccccttcttcacaa

SEQ ID NO: 619712 - DNA, 19 bp, Mus musculus
  siRNA target sequence for Pgm1 (NM_025700.1,723-741).
gcgcgtccatcggtaatga

SEQ ID NO: 619713 - DNA, 19 bp, Mus musculus
  siRNA target sequence for Pgm1 (NM_025700.1,725-743).
gcgtccatcggtaatgact

SEQ ID NO: 619714 - DNA, 19 bp, Mus musculus
  siRNA target sequence for Pgm1 (NM_025700.1,729-747).
ccatcggtaatgactactt

SEQ ID NO: 619715 - DNA, 19 bp, Mus musculus
  siRNA target sequence for Pgm1 (NM_025700.1,733-751).
cggtaatgactactttgaa

SEQ ID NO: 619716 - DNA, 19 bp, Mus musculus
  siRNA target sequence for Pgm1 (NM_025700.1,752-770).
gaccttaaaaaatactgtt

SEQ ID NO: 619717 - DNA, 19 bp, Mus musculus
  siRNA target sequence for Pgm1 (NM_025700.1,916-934).
cgagtttccaactgtcaaa

SEQ ID NO: 619718 - DNA, 19 bp, Mus musculus
  siRNA target sequence for Pgm1 (NM_025700.1,980-998).
gccttggctgacaaaatca

SEQ ID NO: 619719 - DNA, 19 bp, Mus musculus
  siRNA target sequence for Pgm1 (NM_025700.1,981-999).
ccttggctgacaaaatcaa

SEQ ID NO: 619720 - DNA, 19 bp, Mus musculus
  siRNA target sequence for Pgm1 (NM_025700.1,1112-1130).
ggatggtggctcttcactt

SEQ ID NO: 619721 - DNA, 19 bp, Mus musculus
  siRNA target sequence for Pgm1 (NM_025700.1,1238-1256).
catttcgaggaaacattaa

SEQ ID NO: 619722 - DNA, 19 bp, Mus musculus
  siRNA target sequence for Pgm1 (NM_025700.1,1294-1312).
cggagaccaggggaaaaca

SEQ ID NO: 619723 - DNA, 19 bp, Mus musculus
  siRNA target sequence for Pgm1 (NM_025700.1,1331-1349).
gaagctatcggatacatgt

SEQ ID NO: 619724 - DNA, 19 bp, Mus musculus
  siRNA target sequence for Pgm1 (NM_025700.1,1378-1396).
cgtcagtgctgctgttatt

SEQ ID NO: 619725 - DNA, 19 bp, Mus musculus
  siRNA target sequence for Pgm1 (NM_025700.1,1379-1397).
gtcagtgctgctgttattt

SEQ ID NO: 619726 - DNA, 19 bp, Mus musculus
  siRNA target sequence for Pgm1 (NM_025700.1,1381-1399).
cagtgctgctgttatttgt

SEQ ID NO: 619727 - DNA, 19 bp, Mus musculus
  siRNA target sequence for Pgm1 (NM_025700.1,1414-1432).
ctttctagcaacgaagaat

SEQ ID NO: 619728 - DNA, 19 bp, Mus musculus
  siRNA target sequence for Pgm1 (NM_025700.1,1418-1436).
ctagcaacgaagaatttgt

SEQ ID NO: 619729 - DNA, 19 bp, Mus musculus
  siRNA target sequence for Pgm1 (NM_025700.1,1447-1465).
gcagctaaatgccatctat

SEQ ID NO: 619730 - DNA, 19 bp, Mus musculus
  siRNA target sequence for Pgm1 (NM_025700.1,1466-1484).
gtggagtacggctatcata

SEQ ID NO: 619731 - DNA, 19 bp, Mus musculus
  siRNA target sequence for Pgm1 (NM_025700.1,1469-1487).
gagtacggctatcatatta

SEQ ID NO: 619732 - DNA, 19 bp, Mus musculus
  siRNA target sequence for Pgm1 (NM_025700.1,1510-1528).
ccatgatcagggcacaatt

SEQ ID NO: 619733 - DNA, 19 bp, Mus musculus
  siRNA target sequence for Pgm1 (NM_025700.1,1514-1532).
gatcagggcacaattcaaa

SEQ ID NO: 619734 - DNA, 19 bp, Mus musculus
  siRNA target sequence for Pgm1 (NM_025700.1,1520-1538).
ggcacaattcaaaacttat

SEQ ID NO: 619735 - DNA, 19 bp, Mus musculus
  siRNA target sequence for Pgm1 (NM_025700.1,1521-1539).
gcacaattcaaaacttatt

SEQ ID NO: 619736 - DNA, 19 bp, Mus musculus
  siRNA target sequence for Pgm1 (NM_025700.1,1555-1573).
ctatgacgggaagaataat

SEQ ID NO: 619737 - DNA, 19 bp, Mus musculus
  siRNA target sequence for Pgm1 (NM_025700.1,1696-1714).
cttcacctttgctaatgga

SEQ ID NO: 619738 - DNA, 19 bp, Mus musculus
  siRNA target sequence for Pgm1 (NM_025700.1,1745-1763).
gagcccaaaatcaagtact

SEQ ID NO: 619739 - DNA, 19 bp, Mus musculus
  siRNA target sequence for Pgm1 (NM_025700.1,1794-1812).
gtgatccggagcatctgaa

SEQ ID NO: 619740 - DNA, 19 bp, Mus musculus
  siRNA target sequence for Pgm1 (NM_025700.1,1800-1818).
cggagcatctgaaaaagga

SEQ ID NO: 619741 - DNA, 19 bp, Mus musculus
  siRNA target sequence for Pgm1 (NM_025700.1,1828-1846).
gttagtcggtgccattgaa

SEQ ID NO: 619742 - DNA, 19 bp, Mus musculus
  siRNA target sequence for Mut (NM_008650.1,49-67).
gttgagagctaagaatcaa

SEQ ID NO: 619743 - DNA, 19 bp, Mus musculus
  siRNA target sequence for Mut (NM_008650.1,54-72).
gagctaagaatcaactttt

SEQ ID NO: 619744 - DNA, 19 bp, Mus musculus
  siRNA target sequence for Mut (NM_008650.1,91-109).
cctgaagcagctaaacatt

SEQ ID NO: 619745 - DNA, 19 bp, Mus musculus
  siRNA target sequence for Mut (NM_008650.1,123-141).
gatggaaacgccttctaca

SEQ ID NO: 619746 - DNA, 19 bp, Mus musculus
  siRNA target sequence for Mut (NM_008650.1,168-186).
gggctgtactggccaaaaa

SEQ ID NO: 619747 - DNA, 19 bp, Mus musculus
  siRNA target sequence for Mut (NM_008650.1,228-246).
ccccagaagggatctctat

SEQ ID NO: 619748 - DNA, 19 bp, Mus musculus
  siRNA target sequence for Mut (NM_008650.1,241-259).
ctctataaagcccttatat

SEQ ID NO: 619749 - DNA, 19 bp, Mus musculus
  siRNA target sequence for Mut (NM_008650.1,313-331).
cacacggggaccatatcct

SEQ ID NO: 619750 - DNA, 19 bp, Mus musculus
  siRNA target sequence for Mut (NM_008650.1,323-341).
ccatatcctaccatgtata

SEQ ID NO: 619751 - DNA, 19 bp, Mus musculus
  siRNA target sequence for Mut (NM_008650.1,352-370).
ctggaccatccgtcagtat

SEQ ID NO: 619752 - DNA, 19 bp, Mus musculus
  siRNA target sequence for Mut (NM_008650.1,367-385).
gtatgcaggctttagtact

SEQ ID NO: 619753 - DNA, 19 bp, Mus musculus
  siRNA target sequence for Mut (NM_008650.1,396-414).
gcaataaattctataagga

SEQ ID NO: 619754 - DNA, 19 bp, Mus musculus
  siRNA target sequence for Mut (NM_008650.1,451-469).
ctttgacttggcaacacat

SEQ ID NO: 619755 - DNA, 19 bp, Mus musculus
  siRNA target sequence for Mut (NM_008650.1,460-478).
ggcaacacatcgtggttat

SEQ ID NO: 619756 - DNA, 19 bp, Mus musculus
  siRNA target sequence for Mut (NM_008650.1,462-480).
caacacatcgtggttatga

SEQ ID NO: 619757 - DNA, 19 bp, Mus musculus
  siRNA target sequence for Mut (NM_008650.1,493-511).
cagagttcgtggagatgtt

SEQ ID NO: 619758 - DNA, 19 bp, Mus musculus
  siRNA target sequence for Mut (NM_008650.1,513-531).
gaatggctggagttgctat

SEQ ID NO: 619759 - DNA, 19 bp, Mus musculus
  siRNA target sequence for Mut (NM_008650.1,528-546).
ctattgacactgtagaaga

SEQ ID NO: 619760 - DNA, 19 bp, Mus musculus
  siRNA target sequence for Mut (NM_008650.1,547-565).
caccaaaatcctatttgat

SEQ ID NO: 619761 - DNA, 19 bp, Mus musculus
  siRNA target sequence for Mut (NM_008650.1,563-581).
gatggcattcctttagaaa

SEQ ID NO: 619762 - DNA, 19 bp, Mus musculus
  siRNA target sequence for Mut (NM_008650.1,673-691).
gaagctcactggcacaatt

SEQ ID NO: 619763 - DNA, 19 bp, Mus musculus
  siRNA target sequence for Mut (NM_008650.1,677-695).
ctcactggcacaattcaga

SEQ ID NO: 619764 - DNA, 19 bp, Mus musculus
  siRNA target sequence for Mut (NM_008650.1,684-702).
gcacaattcagaatgacat

SEQ ID NO: 619765 - DNA, 19 bp, Mus musculus
  siRNA target sequence for Mut (NM_008650.1,709-727).
ggagtttatggtcagaaat

SEQ ID NO: 619766 - DNA, 19 bp, Mus musculus
  siRNA target sequence for Mut (NM_008650.1,788-806).
gcacagcacatgccaaaat

SEQ ID NO: 619767 - DNA, 19 bp, Mus musculus
  siRNA target sequence for Mut (NM_008650.1,819-837).
cgattagcgggtaccatat

SEQ ID NO: 619768 - DNA, 19 bp, Mus musculus
  siRNA target sequence for Mut (NM_008650.1,923-941).
ggactcacaattgatgaat

SEQ ID NO: 619769 - DNA, 19 bp, Mus musculus
  siRNA target sequence for Mut (NM_008650.1,924-942).
gactcacaattgatgaatt

SEQ ID NO: 619770 - DNA, 19 bp, Mus musculus
  siRNA target sequence for Mut (NM_008650.1,928-946).
cacaattgatgaatttgca

SEQ ID NO: 619771 - DNA, 19 bp, Mus musculus
  siRNA target sequence for Mut (NM_008650.1,945-963).
caccaaggttgtctttctt

SEQ ID NO: 619772 - DNA, 19 bp, Mus musculus
  siRNA target sequence for Mut (NM_008650.1,968-986).
ggaattggaatgaacttct

SEQ ID NO: 619773 - DNA, 19 bp, Mus musculus
  siRNA target sequence for Mut (NM_008650.1,969-987).
gaattggaatgaacttcta

SEQ ID NO: 619774 - DNA, 19 bp, Mus musculus
  siRNA target sequence for Mut (NM_008650.1,1024-1042).
gtgggctcacttaatagaa

SEQ ID NO: 619775 - DNA, 19 bp, Mus musculus
  siRNA target sequence for Mut (NM_008650.1,1027-1045).
ggctcacttaatagaaaaa

SEQ ID NO: 619776 - DNA, 19 bp, Mus musculus
  siRNA target sequence for Mut (NM_008650.1,1052-1070).
cagcctaaaaactctaaat

SEQ ID NO: 619777 - DNA, 19 bp, Mus musculus
  siRNA target sequence for Mut (NM_008650.1,1054-1072).
gcctaaaaactctaaatct

SEQ ID NO: 619778 - DNA, 19 bp, Mus musculus
  siRNA target sequence for Mut (NM_008650.1,1101-1119).
cggggtggtcacttactga

SEQ ID NO: 619779 - DNA, 19 bp, Mus musculus
  siRNA target sequence for Mut (NM_008650.1,1314-1332).
ggggagggtcgtacatgat

SEQ ID NO: 619780 - DNA, 19 bp, Mus musculus
  siRNA target sequence for Mut (NM_008650.1,1330-1348).
gatggagtcgctcacaaat

SEQ ID NO: 619781 - DNA, 19 bp, Mus musculus
  siRNA target sequence for Mut (NM_008650.1,1338-1356).
cgctcacaaatgacgttta

SEQ ID NO: 619782 - DNA, 19 bp, Mus musculus
  siRNA target sequence for Mut (NM_008650.1,1339-1357).
gctcacaaatgacgtttat

SEQ ID NO: 619783 - DNA, 19 bp, Mus musculus
  siRNA target sequence for Mut (NM_008650.1,1431-1449).
ctaaacttcgcattgaaga

SEQ ID NO: 619784 - DNA, 19 bp, Mus musculus
  siRNA target sequence for Mut (NM_008650.1,1665-1683).
ccagtggagatggcaatat

SEQ ID NO: 619785 - DNA, 19 bp, Mus musculus
  siRNA target sequence for Mut (NM_008650.1,1703-1721).
gcagctcgtgcaagatgta

SEQ ID NO: 619786 - DNA, 19 bp, Mus musculus
  siRNA target sequence for Mut (NM_008650.1,1761-1779).
gtgagcataaagctaatga

SEQ ID NO: 619787 - DNA, 19 bp, Mus musculus
  siRNA target sequence for Mut (NM_008650.1,1836-1854).
ctgccatcaagagagttaa

SEQ ID NO: 619788 - DNA, 19 bp, Mus musculus
  siRNA target sequence for Mut (NM_008650.1,1838-1856).
gccatcaagagagttaata

SEQ ID NO: 619789 - DNA, 19 bp, Mus musculus
  siRNA target sequence for Mut (NM_008650.1,1839-1857).
ccatcaagagagttaataa

SEQ ID NO: 619790 - DNA, 19 bp, Mus musculus
  siRNA target sequence for Mut (NM_008650.1,2079-2097).
ccctcgttcctgagcttat

SEQ ID NO: 619791 - DNA, 19 bp, Mus musculus
  siRNA target sequence for Mut (NM_008650.1,2081-2099).
ctcgttcctgagcttatca

SEQ ID NO: 619792 - DNA, 19 bp, Mus musculus
  siRNA target sequence for Mut (NM_008650.1,2083-2101).
cgttcctgagcttatcaaa

SEQ ID NO: 619793 - DNA, 19 bp, Mus musculus
  siRNA target sequence for Mut (NM_008650.1,2152-2170).
gattccaccacaggattat

SEQ ID NO: 619794 - DNA, 19 bp, Mus musculus
  siRNA target sequence for Mut (NM_008650.1,2157-2175).
caccacaggattatgaatt

SEQ ID NO: 619795 - DNA, 19 bp, Mus musculus
  siRNA target sequence for Mut (NM_008650.1,2235-2253).
ctgtccaagtgcttgatga

SEQ ID NO: 619796 - DNA, 19 bp, Mus musculus
  siRNA target sequence for Mut (NM_008650.1,2237-2255).
gtccaagtgcttgatgata

SEQ ID NO: 619797 - DNA, 19 bp, Mus musculus
  siRNA target sequence for Mut (NM_008650.1,2239-2257).
ccaagtgcttgatgatatt

SEQ ID NO: 619798 - DNA, 19 bp, Mus musculus
  siRNA target sequence for Pdcd4 (NM_011050.1,123-141).
cccactgaccctgacaatt

SEQ ID NO: 619799 - DNA, 19 bp, Mus musculus
  siRNA target sequence for Pdcd4 (NM_011050.1,217-235).
ggatttccgcatctactat

SEQ ID NO: 619800 - DNA, 19 bp, Mus musculus
  siRNA target sequence for Pdcd4 (NM_011050.1,218-236).
gatttccgcatctactatt

SEQ ID NO: 619801 - DNA, 19 bp, Mus musculus
  siRNA target sequence for Pdcd4 (NM_011050.1,223-241).
ccgcatctactattaatga

SEQ ID NO: 619802 - DNA, 19 bp, Mus musculus
  siRNA target sequence for Pdcd4 (NM_011050.1,224-242).
cgcatctactattaatgaa

SEQ ID NO: 619803 - DNA, 19 bp, Mus musculus
  siRNA target sequence for Pdcd4 (NM_011050.1,232-250).
ctattaatgaagctagaat

SEQ ID NO: 619804 - DNA, 19 bp, Mus musculus
  siRNA target sequence for Pdcd4 (NM_011050.1,270-288).
cgactgcggaaaaattcat

SEQ ID NO: 619805 - DNA, 19 bp, Mus musculus
  siRNA target sequence for Pdcd4 (NM_011050.1,360-378).
cccaccagtccaaaaggaa

SEQ ID NO: 619806 - DNA, 19 bp, Mus musculus
  siRNA target sequence for Pdcd4 (NM_011050.1,463-481).
cacctggacaggtgtatga

SEQ ID NO: 619807 - DNA, 19 bp, Mus musculus
  siRNA target sequence for Pdcd4 (NM_011050.1,466-484).
ctggacaggtgtatgatgt

SEQ ID NO: 619808 - DNA, 19 bp, Mus musculus
  siRNA target sequence for Pdcd4 (NM_011050.1,564-582).
gatgagaccgcatttgaga

SEQ ID NO: 619809 - DNA, 19 bp, Mus musculus
  siRNA target sequence for Pdcd4 (NM_011050.1,581-599).
gaagactctaacaccaatt

SEQ ID NO: 619810 - DNA, 19 bp, Mus musculus
  siRNA target sequence for Pdcd4 (NM_011050.1,584-602).
gactctaacaccaattata

SEQ ID NO: 619811 - DNA, 19 bp, Mus musculus
  siRNA target sequence for Pdcd4 (NM_011050.1,586-604).
ctctaacaccaattataca

SEQ ID NO: 619812 - DNA, 19 bp, Mus musculus
  siRNA target sequence for Pdcd4 (NM_011050.1,633-651).
gaagttgcggagatgttaa

SEQ ID NO: 619813 - DNA, 19 bp, Mus musculus
  siRNA target sequence for Pdcd4 (NM_011050.1,641-659).
ggagatgttaagagactta

SEQ ID NO: 619814 - DNA, 19 bp, Mus musculus
  siRNA target sequence for Pdcd4 (NM_011050.1,642-660).
gagatgttaagagacttaa

SEQ ID NO: 619815 - DNA, 19 bp, Mus musculus
  siRNA target sequence for Pdcd4 (NM_011050.1,647-665).
gttaagagacttaaacctt

SEQ ID NO: 619816 - DNA, 19 bp, Mus musculus
  siRNA target sequence for Pdcd4 (NM_011050.1,772-790).
cggtgatgatcacaaatga

SEQ ID NO: 619817 - DNA, 19 bp, Mus musculus
  siRNA target sequence for Pdcd4 (NM_011050.1,863-881).
gttggtgggccagtttatt

SEQ ID NO: 619818 - DNA, 19 bp, Mus musculus
  siRNA target sequence for Pdcd4 (NM_011050.1,867-885).
gtgggccagtttattgcta

SEQ ID NO: 619819 - DNA, 19 bp, Mus musculus
  siRNA target sequence for Pdcd4 (NM_011050.1,891-909).
gttggagatggaatcttat

SEQ ID NO: 619820 - DNA, 19 bp, Mus musculus
  siRNA target sequence for Pdcd4 (NM_011050.1,916-934).
cctatatcgatagttacaa

SEQ ID NO: 619821 - DNA, 19 bp, Mus musculus
  siRNA target sequence for Pdcd4 (NM_011050.1,917-935).
ctatatcgatagttacaaa

SEQ ID NO: 619822 - DNA, 19 bp, Mus musculus
  siRNA target sequence for Pdcd4 (NM_011050.1,958-976).
ctcgagctgctctggataa

SEQ ID NO: 619823 - DNA, 19 bp, Mus musculus
  siRNA target sequence for Pdcd4 (NM_011050.1,1053-1071).
cctgtcaatcaccttgtta

SEQ ID NO: 619824 - DNA, 19 bp, Mus musculus
  siRNA target sequence for Pdcd4 (NM_011050.1,1076-1094).
gattgatatgctgcttaaa

SEQ ID NO: 619825 - DNA, 19 bp, Mus musculus
  siRNA target sequence for Pdcd4 (NM_011050.1,1182-1200).
gaagccattataatggttt

SEQ ID NO: 619826 - DNA, 19 bp, Mus musculus
  siRNA target sequence for Pdcd4 (NM_011050.1,1212-1230).
ggagaaagtgcattcaaga

SEQ ID NO: 619827 - DNA, 19 bp, Mus musculus
  siRNA target sequence for Pdcd4 (NM_011050.1,1215-1233).
gaaagtgcattcaagatga

SEQ ID NO: 619828 - DNA, 19 bp, Mus musculus
  siRNA target sequence for Pdcd4 (NM_011050.1,1219-1237).
gtgcattcaagatgatctt

SEQ ID NO: 619829 - DNA, 19 bp, Mus musculus
  siRNA target sequence for Pdcd4 (NM_011050.1,1253-1271).
cttgtggaagtcttctact

SEQ ID NO: 619830 - DNA, 19 bp, Mus musculus
  siRNA target sequence for Pdcd4 (NM_011050.1,1270-1288).
ctattaccatagaccaaat

SEQ ID NO: 619831 - DNA, 19 bp, Mus musculus
  siRNA target sequence for Pdcd4 (NM_011050.1,1298-1316).
ctatgagagaatttacaat

SEQ ID NO: 619832 - DNA, 19 bp, Mus musculus
  siRNA target sequence for Pdcd4 (NM_011050.1,1313-1331).
caatgaaatcccagacatt

SEQ ID NO: 619833 - DNA, 19 bp, Mus musculus
  siRNA target sequence for Pdcd4 (NM_011050.1,1389-1407).
caggctggaataatttcca

SEQ ID NO: 619834 - DNA, 19 bp, Mus musculus
  siRNA target sequence for Pdcd4 (NM_011050.1,1406-1424).
caaacaactccgtgatctt

SEQ ID NO: 619835 - DNA, 19 bp, Mus musculus
  siRNA target sequence for Pdcd4 (NM_011050.1,1435-1453).
ggggaagaaagcgttttgt

SEQ ID NO: 619836 - DNA, 19 bp, Mus musculus
  siRNA target sequence for Pdcd4 (NM_011050.1,1436-1454).
gggaagaaagcgttttgta

SEQ ID NO: 619837 - DNA, 19 bp, Mus musculus
  siRNA target sequence for Pdcd4 (NM_011050.1,1437-1455).
ggaagaaagcgttttgtaa

SEQ ID NO: 619838 - DNA, 19 bp, Mus musculus
  siRNA target sequence for Pdcd4 (NM_011050.1,1441-1459).
gaaagcgttttgtaagtga

SEQ ID NO: 619839 - DNA, 19 bp, Mus musculus
  siRNA target sequence for Pdcd4 (NM_011050.1,1462-1480).
gagatggaggccgtcttaa

SEQ ID NO: 619840 - DNA, 19 bp, Mus musculus
  siRNA target sequence for Rpe (NM_025683.1,163-181).
ggtcaccctgtggttgaaa

SEQ ID NO: 619841 - DNA, 19 bp, Mus musculus
  siRNA target sequence for Rpe (NM_025683.1,202-220).
caggaccctttctttgata

SEQ ID NO: 619842 - DNA, 19 bp, Mus musculus
  siRNA target sequence for Rpe (NM_025683.1,240-258).
gccagaacagtgggtaaaa

SEQ ID NO: 619843 - DNA, 19 bp, Mus musculus
  siRNA target sequence for Rpe (NM_025683.1,244-262).
gaacagtgggtaaaaccaa

SEQ ID NO: 619844 - DNA, 19 bp, Mus musculus
  siRNA target sequence for Rpe (NM_025683.1,268-286).
gtggcaggtgccaatcaat

SEQ ID NO: 619845 - DNA, 19 bp, Mus musculus
  siRNA target sequence for Rpe (NM_025683.1,270-288).
ggcaggtgccaatcaatat

SEQ ID NO: 619846 - DNA, 19 bp, Mus musculus
  siRNA target sequence for Rpe (NM_025683.1,274-292).
ggtgccaatcaatatacct

SEQ ID NO: 619847 - DNA, 19 bp, Mus musculus
  siRNA target sequence for Rpe (NM_025683.1,275-293).
gtgccaatcaatatacctt

SEQ ID NO: 619848 - DNA, 19 bp, Mus musculus
  siRNA target sequence for Rpe (NM_025683.1,319-337).
ggggctttgattaaagaca

SEQ ID NO: 619849 - DNA, 19 bp, Mus musculus
  siRNA target sequence for Rpe (NM_025683.1,376-394).
ccaggaactacagttgaat

SEQ ID NO: 619850 - DNA, 19 bp, Mus musculus
  siRNA target sequence for Rpe (NM_025683.1,377-395).
caggaactacagttgaata

SEQ ID NO: 619851 - DNA, 19 bp, Mus musculus
  siRNA target sequence for Rpe (NM_025683.1,379-397).
ggaactacagttgaatatt

SEQ ID NO: 619852 - DNA, 19 bp, Mus musculus
  siRNA target sequence for Rpe (NM_025683.1,399-417).
ggccccatgggctaatcaa

SEQ ID NO: 619853 - DNA, 19 bp, Mus musculus
  siRNA target sequence for Rpe (NM_025683.1,400-418).
gccccatgggctaatcaaa

SEQ ID NO: 619854 - DNA, 19 bp, Mus musculus
  siRNA target sequence for Rpe (NM_025683.1,401-419).
ccccatgggctaatcaaat

SEQ ID NO: 619855 - DNA, 19 bp, Mus musculus
  siRNA target sequence for Rpe (NM_025683.1,402-420).
cccatgggctaatcaaata

SEQ ID NO: 619856 - DNA, 19 bp, Mus musculus
  siRNA target sequence for Rpe (NM_025683.1,404-422).
catgggctaatcaaataga

SEQ ID NO: 619857 - DNA, 19 bp, Mus musculus
  siRNA target sequence for Rpe (NM_025683.1,407-425).
gggctaatcaaatagatat

SEQ ID NO: 619858 - DNA, 19 bp, Mus musculus
  siRNA target sequence for Rpe (NM_025683.1,452-470).
ggtttggagggcagaaatt

SEQ ID NO: 619859 - DNA, 19 bp, Mus musculus
  siRNA target sequence for Rpe (NM_025683.1,506-524).
ggacccagtttccaacttt

SEQ ID NO: 619860 - DNA, 19 bp, Mus musculus
  siRNA target sequence for Rpe (NM_025683.1,579-597).
ggcaggagctaacatgatt

SEQ ID NO: 619861 - DNA, 19 bp, Mus musculus
  siRNA target sequence for Rpe (NM_025683.1,628-646).
gaccccagagctgttatca

SEQ ID NO: 619862 - DNA, 19 bp, Mus musculus
  siRNA target sequence for Rpe (NM_025683.1,632-650).
ccagagctgttatcaactt

SEQ ID NO: 619863 - DNA, 19 bp, Mus musculus
  siRNA target sequence for Rpe (NM_025683.1,633-651).
cagagctgttatcaactta

SEQ ID NO: 619864 - DNA, 19 bp, Mus musculus
  siRNA target sequence for Rpe (NM_025683.1,635-653).
gagctgttatcaacttact

SEQ ID NO: 619865 - DNA, 19 bp, Mus musculus
  siRNA target sequence for Rpe (NM_025683.1,645-663).
caacttactaagaaacgtt

SEQ ID NO: 619866 - DNA, 19 bp, Mus musculus
  siRNA target sequence for Rpe (NM_025683.1,670-688).
gaagcggctcagaaacgtt

SEQ ID NO: 619867 - DNA, 19 bp, Mus musculus
  siRNA target sequence for Gale (NM_178389.2,215-233).
gcagccacacggtattgga

SEQ ID NO: 619868 - DNA, 19 bp, Mus musculus
  siRNA target sequence for Gale (NM_178389.2,388-406).
ctacagcacctctttaaga

SEQ ID NO: 619869 - DNA, 19 bp, Mus musculus
  siRNA target sequence for Gale (NM_178389.2,473-491).
ctctggactactatagagt

SEQ ID NO: 619870 - DNA, 19 bp, Mus musculus
  siRNA target sequence for Gale (NM_178389.2,475-493).
ctggactactatagagtta

SEQ ID NO: 619871 - DNA, 19 bp, Mus musculus
  siRNA target sequence for Gale (NM_178389.2,483-501).
ctatagagttaacttaaca

SEQ ID NO: 619872 - DNA, 19 bp, Mus musculus
  siRNA target sequence for Gale (NM_178389.2,714-732).
gctgcttcggtacttcaat

SEQ ID NO: 619873 - DNA, 19 bp, Mus musculus
  siRNA target sequence for Gale (NM_178389.2,827-845).
gacgagaggccctgaatgt

SEQ ID NO: 619874 - DNA, 19 bp, Mus musculus
  siRNA target sequence for Gale (NM_178389.2,878-896).
caggtgtgagggattacat

SEQ ID NO: 619875 - DNA, 19 bp, Mus musculus
  siRNA target sequence for Gale (NM_178389.2,881-899).
gtgtgagggattacattca

SEQ ID NO: 619876 - DNA, 19 bp, Mus musculus
  siRNA target sequence for Gale (NM_178389.2,909-927).
cctggcgaagggccatata

SEQ ID NO: 619877 - DNA, 19 bp, Mus musculus
  siRNA target sequence for Gale (NM_178389.2,922-940).
catatagcagccttgaaga

SEQ ID NO: 619878 - DNA, 19 bp, Mus musculus
  siRNA target sequence for Glce (NM_033320.1,252-270).
ggcagctcgggtcaactat

SEQ ID NO: 619879 - DNA, 19 bp, Mus musculus
  siRNA target sequence for Glce (NM_033320.1,253-271).
gcagctcgggtcaactata

SEQ ID NO: 619880 - DNA, 19 bp, Mus musculus
  siRNA target sequence for Glce (NM_033320.1,256-274).
gctcgggtcaactataaga

SEQ ID NO: 619881 - DNA, 19 bp, Mus musculus
  siRNA target sequence for Glce (NM_033320.1,259-277).
cgggtcaactataagactt

SEQ ID NO: 619882 - DNA, 19 bp, Mus musculus
  siRNA target sequence for Glce (NM_033320.1,260-278).
gggtcaactataagacttt

SEQ ID NO: 619883 - DNA, 19 bp, Mus musculus
  siRNA target sequence for Glce (NM_033320.1,262-280).
gtcaactataagactttga

SEQ ID NO: 619884 - DNA, 19 bp, Mus musculus
  siRNA target sequence for Glce (NM_033320.1,285-303).
catctgtgcgctattcact

SEQ ID NO: 619885 - DNA, 19 bp, Mus musculus
  siRNA target sequence for Glce (NM_033320.1,316-334).
cttttgtggaataagtgtt

SEQ ID NO: 619886 - DNA, 19 bp, Mus musculus
  siRNA target sequence for Glce (NM_033320.1,467-485).
catttcctcaggaacaaca

SEQ ID NO: 619887 - DNA, 19 bp, Mus musculus
  siRNA target sequence for Glce (NM_033320.1,502-520).
gttgggggcttcaatagca

SEQ ID NO: 619888 - DNA, 19 bp, Mus musculus
  siRNA target sequence for Glce (NM_033320.1,534-552).
ggtgttagggctcaaatat

SEQ ID NO: 619889 - DNA, 19 bp, Mus musculus
  siRNA target sequence for Glce (NM_033320.1,576-594).
cgatgagcacaccattaaa

SEQ ID NO: 619890 - DNA, 19 bp, Mus musculus
  siRNA target sequence for Glce (NM_033320.1,601-619).
cgagaggggaatgaagttt

SEQ ID NO: 619891 - DNA, 19 bp, Mus musculus
  siRNA target sequence for Glce (NM_033320.1,635-653).
gggtagagaaatactttga

SEQ ID NO: 619892 - DNA, 19 bp, Mus musculus
  siRNA target sequence for Glce (NM_033320.1,681-699).
cggctatgatcgatttgaa

SEQ ID NO: 619893 - DNA, 19 bp, Mus musculus
  siRNA target sequence for Glce (NM_033320.1,682-700).
ggctatgatcgatttgaat

SEQ ID NO: 619894 - DNA, 19 bp, Mus musculus
  siRNA target sequence for Glce (NM_033320.1,683-701).
gctatgatcgatttgaatt

SEQ ID NO: 619895 - DNA, 19 bp, Mus musculus
  siRNA target sequence for Glce (NM_033320.1,691-709).
cgatttgaattctctcata

SEQ ID NO: 619896 - DNA, 19 bp, Mus musculus
  siRNA target sequence for Glce (NM_033320.1,748-766).
cctgacggtgtgtttatgt

SEQ ID NO: 619897 - DNA, 19 bp, Mus musculus
  siRNA target sequence for Glce (NM_033320.1,792-810).
ccgagacagagtcaaatgt

SEQ ID NO: 619898 - DNA, 19 bp, Mus musculus
  siRNA target sequence for Glce (NM_033320.1,886-904).
cagtatgggctaagtcatt

SEQ ID NO: 619899 - DNA, 19 bp, Mus musculus
  siRNA target sequence for Glce (NM_033320.1,899-917).
gtcattacagcaagaatct

SEQ ID NO: 619900 - DNA, 19 bp, Mus musculus
  siRNA target sequence for Glce (NM_033320.1,924-942).
gaaaccccctcacatagaa

SEQ ID NO: 619901 - DNA, 19 bp, Mus musculus
  siRNA target sequence for Glce (NM_033320.1,932-950).
ctcacatagaagtatatga

SEQ ID NO: 619902 - DNA, 19 bp, Mus musculus
  siRNA target sequence for Glce (NM_033320.1,936-954).
catagaagtatatgaaaca

SEQ ID NO: 619903 - DNA, 19 bp, Mus musculus
  siRNA target sequence for Glce (NM_033320.1,969-987).
cagaaacatcagacctaat

SEQ ID NO: 619904 - DNA, 19 bp, Mus musculus
  siRNA target sequence for Glce (NM_033320.1,971-989).
gaaacatcagacctaatga

SEQ ID NO: 619905 - DNA, 19 bp, Mus musculus
  siRNA target sequence for Glce (NM_033320.1,1024-1042).
gtggcagacaagtctagat

SEQ ID NO: 619906 - DNA, 19 bp, Mus musculus
  siRNA target sequence for Glce (NM_033320.1,1035-1053).
gtctagatccaccaatgtt

SEQ ID NO: 619907 - DNA, 19 bp, Mus musculus
  siRNA target sequence for Glce (NM_033320.1,1037-1055).
ctagatccaccaatgttaa

SEQ ID NO: 619908 - DNA, 19 bp, Mus musculus
  siRNA target sequence for Glce (NM_033320.1,1040-1058).
gatccaccaatgttaaaca

SEQ ID NO: 619909 - DNA, 19 bp, Mus musculus
  siRNA target sequence for Glce (NM_033320.1,1044-1062).
caccaatgttaaacagttt

SEQ ID NO: 619910 - DNA, 19 bp, Mus musculus
  siRNA target sequence for Glce (NM_033320.1,1076-1094).
ccagtgaaggtgtgtcttt

SEQ ID NO: 619911 - DNA, 19 bp, Mus musculus
  siRNA target sequence for Glce (NM_033320.1,1204-1222).
gtgcattatgtctcaaaca

SEQ ID NO: 619912 - DNA, 19 bp, Mus musculus
  siRNA target sequence for Glce (NM_033320.1,1261-1279).
ggcattgggcccagaactt

SEQ ID NO: 619913 - DNA, 19 bp, Mus musculus
  siRNA target sequence for Glce (NM_033320.1,1263-1281).
cattgggcccagaacttca

SEQ ID NO: 619914 - DNA, 19 bp, Mus musculus
  siRNA target sequence for Glce (NM_033320.1,1373-1391).
ccaaaaaggtggttaggtt

SEQ ID NO: 619915 - DNA, 19 bp, Mus musculus
  siRNA target sequence for Glce (NM_033320.1,1383-1401).
ggttaggttgattgcaaaa

SEQ ID NO: 619916 - DNA, 19 bp, Mus musculus
  siRNA target sequence for Glce (NM_033320.1,1417-1435).
gacaacattaccatctcaa

SEQ ID NO: 619917 - DNA, 19 bp, Mus musculus
  siRNA target sequence for Glce (NM_033320.1,1502-1520).
gtggctggccaattatggt

SEQ ID NO: 619918 - DNA, 19 bp, Mus musculus
  siRNA target sequence for Glce (NM_033320.1,1602-1620).
cttagtcagggcctatctt

SEQ ID NO: 619919 - DNA, 19 bp, Mus musculus
  siRNA target sequence for Glce (NM_033320.1,1610-1628).
gggcctatcttctaacgaa

SEQ ID NO: 619920 - DNA, 19 bp, Mus musculus
  siRNA target sequence for Glce (NM_033320.1,1621-1639).
ctaacgaaagactatgtat

SEQ ID NO: 619921 - DNA, 19 bp, Mus musculus
  siRNA target sequence for Glce (NM_033320.1,1625-1643).
cgaaagactatgtattcct

SEQ ID NO: 619922 - DNA, 19 bp, Mus musculus
  siRNA target sequence for Glce (NM_033320.1,1697-1715).
gagttaaagccgtgttcat

SEQ ID NO: 619923 - DNA, 19 bp, Mus musculus
  siRNA target sequence for Glce (NM_033320.1,1699-1717).
gttaaagccgtgttcatga

SEQ ID NO: 619924 - DNA, 19 bp, Mus musculus
  siRNA target sequence for Glce (NM_033320.1,1706-1724).
ccgtgttcatgaataaaca

SEQ ID NO: 619925 - DNA, 19 bp, Mus musculus
  siRNA target sequence for Glce (NM_033320.1,1863-1881).
cggcatggaatctcttaaa

SEQ ID NO: 619926 - DNA, 19 bp, Mus musculus
  siRNA target sequence for Glce (NM_033320.1,1884-1902).
catgctgcccttgtatgat

SEQ ID NO: 619927 - DNA, 19 bp, Mus musculus
  siRNA target sequence for Glce (NM_033320.1,1907-1925).
gctccgggaccatctatga

SEQ ID NO: 619928 - DNA, 19 bp, Mus musculus
  siRNA target sequence for Glce (NM_033320.1,2020-2038).
gatgagtccccaatcttca

SEQ ID NO: 619929 - DNA, 19 bp, Mus musculus
  siRNA target sequence for Glce (NM_033320.1,2054-2072).
ggtggaaaagctaccttaa

SEQ ID NO: 619930 - DNA, 19 bp, Mus musculus
  siRNA target sequence for Amacr (NM_008537.1,74-92).
ggctccacgggcgagaatt

SEQ ID NO: 619931 - DNA, 19 bp, Mus musculus
  siRNA target sequence for Amacr (NM_008537.1,75-93).
gctccacgggcgagaattt

SEQ ID NO: 619932 - DNA, 19 bp, Mus musculus
  siRNA target sequence for Amacr (NM_008537.1,76-94).
ctccacgggcgagaatttt

SEQ ID NO: 619933 - DNA, 19 bp, Mus musculus
  siRNA target sequence for Amacr (NM_008537.1,242-260).
ctactgcaggacaatccaa

SEQ ID NO: 619934 - DNA, 19 bp, Mus musculus
  siRNA target sequence for Amacr (NM_008537.1,320-338).
ggccatgacatcaactatt

SEQ ID NO: 619935 - DNA, 19 bp, Mus musculus
  siRNA target sequence for Amacr (NM_008537.1,321-339).
gccatgacatcaactattt

SEQ ID NO: 619936 - DNA, 19 bp, Mus musculus
  siRNA target sequence for Amacr (NM_008537.1,348-366).
caggcgttctgtcaaagat

SEQ ID NO: 619937 - DNA, 19 bp, Mus musculus
  siRNA target sequence for Amacr (NM_008537.1,387-405).
cctacccaccgctgaatct

SEQ ID NO: 619938 - DNA, 19 bp, Mus musculus
  siRNA target sequence for Amacr (NM_008537.1,515-533).
gaagggactgcatacttaa

SEQ ID NO: 619939 - DNA, 19 bp, Mus musculus
  siRNA target sequence for Amacr (NM_008537.1,518-536).
gggactgcatacttaagtt

SEQ ID NO: 619940 - DNA, 19 bp, Mus musculus
  siRNA target sequence for Amacr (NM_008537.1,575-593).
cagcctcgaggacaaaaca

SEQ ID NO: 619941 - DNA, 19 bp, Mus musculus
  siRNA target sequence for Amacr (NM_008537.1,578-596).
cctcgaggacaaaacatct

SEQ ID NO: 619942 - DNA, 19 bp, Mus musculus
  siRNA target sequence for Amacr (NM_008537.1,579-597).
ctcgaggacaaaacatctt

SEQ ID NO: 619943 - DNA, 19 bp, Mus musculus
  siRNA target sequence for Amacr (NM_008537.1,582-600).
gaggacaaaacatcttaga

SEQ ID NO: 619944 - DNA, 19 bp, Mus musculus
  siRNA target sequence for Amacr (NM_008537.1,602-620).
ggcggtgcacctttctaca

SEQ ID NO: 619945 - DNA, 19 bp, Mus musculus
  siRNA target sequence for Amacr (NM_008537.1,605-623).
ggtgcacctttctacacaa

SEQ ID NO: 619946 - DNA, 19 bp, Mus musculus
  siRNA target sequence for Amacr (NM_008537.1,633-651).
cggcagacggggagttcat

SEQ ID NO: 619947 - DNA, 19 bp, Mus musculus
  siRNA target sequence for Amacr (NM_008537.1,999-1017).
gggagcacaccgtagaagt

SEQ ID NO: 619948 - DNA, 19 bp, Mus musculus
  siRNA target sequence for Amacr (NM_008537.1,1008-1026).
ccgtagaagtgcttagaga

SEQ ID NO: 619949 - DNA, 19 bp, Mus musculus
  siRNA target sequence for Amacr (NM_008537.1,1016-1034).
gtgcttagagagtatggat

SEQ ID NO: 619950 - DNA, 19 bp, Mus musculus
  siRNA target sequence for Amacr (NM_008537.1,1052-1070).
cttcagctgcactcagata

SEQ ID NO: 619951 - DNA, 19 bp, Mus musculus
  siRNA target sequence for Amacr (NM_008537.1,1055-1073).
cagctgcactcagatagaa

SEQ ID NO: 619952 - DNA, 19 bp, Mus musculus
  siRNA target sequence for Amacr (NM_008537.1,1060-1078).
gcactcagatagaatcgtt

SEQ ID NO: 619953 - DNA, 19 bp, Mus musculus
  siRNA target sequence for Amacr (NM_008537.1,1071-1089).
gaatcgttgaaagtgataa

SEQ ID NO: 619954 - DNA, 19 bp, Mus musculus
  siRNA target sequence for Amacr (NM_008537.1,1075-1093).
cgttgaaagtgataagcta

SEQ ID NO: 619955 - DNA, 19 bp, Mus musculus
  siRNA target sequence for Slc6a5 (NM_148931.2,362-380).
gtccggagtagggttttgt

SEQ ID NO: 619956 - DNA, 19 bp, Mus musculus
  siRNA target sequence for Slc6a5 (NM_148931.2,364-382).
ccggagtagggttttgtaa

SEQ ID NO: 619957 - DNA, 19 bp, Mus musculus
  siRNA target sequence for Slc6a5 (NM_148931.2,365-383).
cggagtagggttttgtaat

SEQ ID NO: 619958 - DNA, 19 bp, Mus musculus
  siRNA target sequence for Slc6a5 (NM_148931.2,556-574).
gcacgctggagcacaacaa

SEQ ID NO: 619959 - DNA, 19 bp, Mus musculus
  siRNA target sequence for Slc6a5 (NM_148931.2,604-622).
gccagagcacagtagtgtt

SEQ ID NO: 619960 - DNA, 19 bp, Mus musculus
  siRNA target sequence for Slc6a5 (NM_148931.2,687-705).
gagcaaggggatgagaata

SEQ ID NO: 619961 - DNA, 19 bp, Mus musculus
  siRNA target sequence for Slc6a5 (NM_148931.2,958-976).
gcattgcgatgctcatcat

SEQ ID NO: 619962 - DNA, 19 bp, Mus musculus
  siRNA target sequence for Slc6a5 (NM_148931.2,979-997).
ctgtcctcatagccatata

SEQ ID NO: 619963 - DNA, 19 bp, Mus musculus
  siRNA target sequence for Slc6a5 (NM_148931.2,981-999).
gtcctcatagccatatact

SEQ ID NO: 619964 - DNA, 19 bp, Mus musculus
  siRNA target sequence for Slc6a5 (NM_148931.2,1188-1206).
gcctatccgaacttgacaa

SEQ ID NO: 619965 - DNA, 19 bp, Mus musculus
  siRNA target sequence for Slc6a5 (NM_148931.2,1189-1207).
cctatccgaacttgacaat

SEQ ID NO: 619966 - DNA, 19 bp, Mus musculus
  siRNA target sequence for Slc6a5 (NM_148931.2,1194-1212).
ccgaacttgacaatggtta

SEQ ID NO: 619967 - DNA, 19 bp, Mus musculus
  siRNA target sequence for Slc6a5 (NM_148931.2,1195-1213).
cgaacttgacaatggttaa

SEQ ID NO: 619968 - DNA, 19 bp, Mus musculus
  siRNA target sequence for Slc6a5 (NM_148931.2,1223-1241).
ccagaccaataagacattt

SEQ ID NO: 619969 - DNA, 19 bp, Mus musculus
  siRNA target sequence for Slc6a5 (NM_148931.2,1246-1264).
gcgggagtgaagagtactt

SEQ ID NO: 619970 - DNA, 19 bp, Mus musculus
  siRNA target sequence for Slc6a5 (NM_148931.2,1268-1286).
gtattttgtgctgaagatt

SEQ ID NO: 619971 - DNA, 19 bp, Mus musculus
  siRNA target sequence for Slc6a5 (NM_148931.2,1365-1383).
gcatcactggcgaaaggaa

SEQ ID NO: 619972 - DNA, 19 bp, Mus musculus
  siRNA target sequence for Slc6a5 (NM_148931.2,1366-1384).
catcactggcgaaaggaat

SEQ ID NO: 619973 - DNA, 19 bp, Mus musculus
  siRNA target sequence for Slc6a5 (NM_148931.2,1371-1389).
ctggcgaaaggaattaagt

SEQ ID NO: 619974 - DNA, 19 bp, Mus musculus
  siRNA target sequence for Slc6a5 (NM_148931.2,1373-1391).
ggcgaaaggaattaagtca

SEQ ID NO: 619975 - DNA, 19 bp, Mus musculus
  siRNA target sequence for Slc6a5 (NM_148931.2,1390-1408).
catcaggaaaagtagtcta

SEQ ID NO: 619976 - DNA, 19 bp, Mus musculus
  siRNA target sequence for Slc6a5 (NM_148931.2,1395-1413).
ggaaaagtagtctacttca

SEQ ID NO: 619977 - DNA, 19 bp, Mus musculus
  siRNA target sequence for Slc6a5 (NM_148931.2,1482-1500).
gccggcatctggtacttca

SEQ ID NO: 619978 - DNA, 19 bp, Mus musculus
  siRNA target sequence for Slc6a5 (NM_148931.2,1483-1501).
ccggcatctggtacttcat

SEQ ID NO: 619979 - DNA, 19 bp, Mus musculus
  siRNA target sequence for Slc6a5 (NM_148931.2,1502-1520).
cacacctaagtgggaaaaa

SEQ ID NO: 619980 - DNA, 19 bp, Mus musculus
  siRNA target sequence for Slc6a5 (NM_148931.2,1504-1522).
cacctaagtgggaaaaact

SEQ ID NO: 619981 - DNA, 19 bp, Mus musculus
  siRNA target sequence for Slc6a5 (NM_148931.2,1525-1543).
cggatgccacggtatggaa

SEQ ID NO: 619982 - DNA, 19 bp, Mus musculus
  siRNA target sequence for Slc6a5 (NM_148931.2,1592-1610).
gctcatcactctttcttct

SEQ ID NO: 619983 - DNA, 19 bp, Mus musculus
  siRNA target sequence for Slc6a5 (NM_148931.2,1602-1620).
ctttcttcttacaacaaat

SEQ ID NO: 619984 - DNA, 19 bp, Mus musculus
  siRNA target sequence for Slc6a5 (NM_148931.2,1631-1649).
ctgctacagggatacgtta

SEQ ID NO: 619985 - DNA, 19 bp, Mus musculus
  siRNA target sequence for Slc6a5 (NM_148931.2,1633-1651).
gctacagggatacgttaat

SEQ ID NO: 619986 - DNA, 19 bp, Mus musculus
  siRNA target sequence for Slc6a5 (NM_148931.2,1634-1652).
ctacagggatacgttaatt

SEQ ID NO: 619987 - DNA, 19 bp, Mus musculus
  siRNA target sequence for Slc6a5 (NM_148931.2,1637-1655).
cagggatacgttaattgta

SEQ ID NO: 619988 - DNA, 19 bp, Mus musculus
  siRNA target sequence for Slc6a5 (NM_148931.2,1667-1685).
cagtgccactagcatcttt

SEQ ID NO: 619989 - DNA, 19 bp, Mus musculus
  siRNA target sequence for Slc6a5 (NM_148931.2,1727-1745).
cgagcgcaaagtcaacatt

SEQ ID NO: 619990 - DNA, 19 bp, Mus musculus
  siRNA target sequence for Slc6a5 (NM_148931.2,1731-1749).
cgcaaagtcaacattgaga

SEQ ID NO: 619991 - DNA, 19 bp, Mus musculus
  siRNA target sequence for Slc6a5 (NM_148931.2,1761-1779).
caagggcctggcattgcat

SEQ ID NO: 619992 - DNA, 19 bp, Mus musculus
  siRNA target sequence for Slc6a5 (NM_148931.2,2054-2072).
ctatgcccttgtcatcatt

SEQ ID NO: 619993 - DNA, 19 bp, Mus musculus
  siRNA target sequence for Slc6a5 (NM_148931.2,2148-2166).
ggattcaagcccaacattt

SEQ ID NO: 619994 - DNA, 19 bp, Mus musculus
  siRNA target sequence for Slc6a5 (NM_148931.2,2149-2167).
gattcaagcccaacatttt

SEQ ID NO: 619995 - DNA, 19 bp, Mus musculus
  siRNA target sequence for Slc6a5 (NM_148931.2,2190-2208).
gtcacaccgaccattttga

SEQ ID NO: 619996 - DNA, 19 bp, Mus musculus
  siRNA target sequence for Slc6a5 (NM_148931.2,2192-2210).
cacaccgaccattttgact

SEQ ID NO: 619997 - DNA, 19 bp, Mus musculus
  siRNA target sequence for Slc6a5 (NM_148931.2,2196-2214).
ccgaccattttgactttta

SEQ ID NO: 619998 - DNA, 19 bp, Mus musculus
  siRNA target sequence for Slc6a5 (NM_148931.2,2197-2215).
cgaccattttgacttttat

SEQ ID NO: 619999 - DNA, 19 bp, Mus musculus
  siRNA target sequence for Slc6a5 (NM_148931.2,2200-2218).
ccattttgacttttatcct

SEQ ID NO: 620000 - DNA, 19 bp, Mus musculus
  siRNA target sequence for Slc6a5 (NM_148931.2,2328-2346).
ccgattatgttcgtgataa

SEQ ID NO: 620001 - DNA, 19 bp, Mus musculus
  siRNA target sequence for Slc6a5 (NM_148931.2,2329-2347).
cgattatgttcgtgataaa

SEQ ID NO: 620002 - DNA, 19 bp, Mus musculus
  siRNA target sequence for Slc6a5 (NM_148931.2,2359-2377).
ctcccgggagatttattga

SEQ ID NO: 620003 - DNA, 19 bp, Mus musculus
  siRNA target sequence for Slc6a5 (NM_148931.2,2442-2460).
gaacgctacaagaatatga

SEQ ID NO: 620004 - DNA, 19 bp, Mus musculus
  siRNA target sequence for Slc6a5 (NM_148931.2,2498-2516).
gcccgtgaaggatttggaa

SEQ ID NO: 620005 - DNA, 19 bp, Mus musculus
  siRNA target sequence for 2700053F16Rik (NM_028295.1,183-201).
cttcgctcattgagagaat

SEQ ID NO: 620006 - DNA, 19 bp, Mus musculus
  siRNA target sequence for 2700053F16Rik (NM_028295.1,271-289).
cgaggtagcagctgaaagt

SEQ ID NO: 620007 - DNA, 19 bp, Mus musculus
  siRNA target sequence for 2700053F16Rik (NM_028295.1,365-383).
gcagagagtagaaaattgt

SEQ ID NO: 620008 - DNA, 19 bp, Mus musculus
  siRNA target sequence for 2700053F16Rik (NM_028295.1,453-471).
cctttcacatgcagtatga

SEQ ID NO: 620009 - DNA, 19 bp, Mus musculus
  siRNA target sequence for 2700053F16Rik (NM_028295.1,473-491).
cgagctgtgacgttgaagt

SEQ ID NO: 620010 - DNA, 19 bp, Mus musculus
  siRNA target sequence for 2700053F16Rik (NM_028295.1,618-636).
cactgctcatgatgttcta

SEQ ID NO: 620011 - DNA, 19 bp, Mus musculus
  siRNA target sequence for 2700053F16Rik (NM_028295.1,820-838).
gttcccgtatgagaactat

SEQ ID NO: 620012 - DNA, 19 bp, Mus musculus
  siRNA target sequence for 2700053F16Rik (NM_028295.1,859-877).
cgtggagtggttgaagaat

SEQ ID NO: 620013 - DNA, 19 bp, Mus musculus
  siRNA target sequence for 2700053F16Rik (NM_028295.1,943-961).
cctgaccgatgaagacttt

SEQ ID NO: 620014 - DNA, 19 bp, Mus musculus
  siRNA target sequence for 2700053F16Rik (NM_028295.1,1145-1163).
cacatctcagcgtttccta

SEQ ID NO: 620015 - DNA, 19 bp, Mus musculus
  siRNA target sequence for 2700053F16Rik (NM_028295.1,1155-1173).
cgtttcctaccctgaagta

SEQ ID NO: 620016 - DNA, 19 bp, Mus musculus
  siRNA target sequence for 2700053F16Rik (NM_028295.1,1304-1322).
catctggtgggggataact

SEQ ID NO: 620017 - DNA, 19 bp, Mus musculus
  siRNA target sequence for 2700053F16Rik (NM_028295.1,1547-1565).
gggaagctcgtagaaaagt

SEQ ID NO: 620018 - DNA, 19 bp, Mus musculus
  siRNA target sequence for 2700053F16Rik (NM_028295.1,1553-1571).
ctcgtagaaaagtatgaga

SEQ ID NO: 620019 - DNA, 19 bp, Mus musculus
  siRNA target sequence for 2700053F16Rik (NM_028295.1,1577-1595).
cgcacggagttgggattta

SEQ ID NO: 620020 - DNA, 19 bp, Mus musculus
  siRNA target sequence for 2810429C13Rik (NM_176979.4,102-120).
cggacaattcagaatgctt

SEQ ID NO: 620021 - DNA, 19 bp, Mus musculus
  siRNA target sequence for 2810429C13Rik (NM_176979.4,129-147).
ctcttgagtcaataaagga

SEQ ID NO: 620022 - DNA, 19 bp, Mus musculus
  siRNA target sequence for 2810429C13Rik (NM_176979.4,131-149).
cttgagtcaataaaggaat

SEQ ID NO: 620023 - DNA, 19 bp, Mus musculus
  siRNA target sequence for 2810429C13Rik (NM_176979.4,212-230).
gacaaatcgctttatatct

SEQ ID NO: 620024 - DNA, 19 bp, Mus musculus
  siRNA target sequence for 2810429C13Rik (NM_176979.4,214-232).
caaatcgctttatatctgt

SEQ ID NO: 620025 - DNA, 19 bp, Mus musculus
  siRNA target sequence for 2810429C13Rik (NM_176979.4,249-267).
ctgtttttgatcaccttaa

SEQ ID NO: 620026 - DNA, 19 bp, Mus musculus
  siRNA target sequence for 2810429C13Rik (NM_176979.4,291-309).
gtcctcaagtggtcacatt

SEQ ID NO: 620027 - DNA, 19 bp, Mus musculus
  siRNA target sequence for 2810429C13Rik (NM_176979.4,355-373).
ctacaacatgataatgtct

SEQ ID NO: 620028 - DNA, 19 bp, Mus musculus
  siRNA target sequence for 2810429C13Rik (NM_176979.4,387-405).
cctgtacaagcctggataa

SEQ ID NO: 620029 - DNA, 19 bp, Mus musculus
  siRNA target sequence for 2810429C13Rik (NM_176979.4,388-406).
ctgtacaagcctggataaa

SEQ ID NO: 620030 - DNA, 19 bp, Mus musculus
  siRNA target sequence for 2810429C13Rik (NM_176979.4,390-408).
gtacaagcctggataaaga

SEQ ID NO: 620031 - DNA, 19 bp, Mus musculus
  siRNA target sequence for 2810429C13Rik (NM_176979.4,413-431).
cgggaagaagttcataaat

SEQ ID NO: 620032 - DNA, 19 bp, Mus musculus
  siRNA target sequence for 2810429C13Rik (NM_176979.4,422-440).
gttcataaatacgtacaaa

SEQ ID NO: 620033 - DNA, 19 bp, Mus musculus
  siRNA target sequence for 2810429C13Rik (NM_176979.4,453-471).
gagtatacagagaccttaa

SEQ ID NO: 620034 - DNA, 19 bp, Mus musculus
  siRNA target sequence for 2810429C13Rik (NM_176979.4,462-480).
gagaccttaatgtatcagt

SEQ ID NO: 620035 - DNA, 19 bp, Mus musculus
  siRNA target sequence for 2810429C13Rik (NM_176979.4,487-505).
ccttattgcaggagaagtt

SEQ ID NO: 620036 - DNA, 19 bp, Mus musculus
  siRNA target sequence for 2810429C13Rik (NM_176979.4,507-525).
ggagcaaaaagtacttagt

SEQ ID NO: 620037 - DNA, 19 bp, Mus musculus
  siRNA target sequence for 2810429C13Rik (NM_176979.4,508-526).
gagcaaaaagtacttagtt

SEQ ID NO: 620038 - DNA, 19 bp, Mus musculus
  siRNA target sequence for 2810429C13Rik (NM_176979.4,517-535).
gtacttagttgctgctaat

SEQ ID NO: 620039 - DNA, 19 bp, Mus musculus
  siRNA target sequence for 2810429C13Rik (NM_176979.4,606-624).
ccaagtacactgatgtaaa

SEQ ID NO: 620040 - DNA, 19 bp, Mus musculus
  siRNA target sequence for 2810429C13Rik (NM_176979.4,632-650).
gactttaagtgtcctattt

SEQ ID NO: 620041 - DNA, 19 bp, Mus musculus
  siRNA target sequence for 2810429C13Rik (NM_176979.4,671-689).
gtgactggcttaaatggaa

SEQ ID NO: 620042 - DNA, 19 bp, Mus musculus
  siRNA target sequence for 2810429C13Rik (NM_176979.4,677-695).
ggcttaaatggaatacaca

SEQ ID NO: 620043 - DNA, 19 bp, Mus musculus
  siRNA target sequence for 2810429C13Rik (NM_176979.4,881-899).
caggatgaatctatataca

SEQ ID NO: 620044 - DNA, 19 bp, Mus musculus
  siRNA target sequence for 2810429C13Rik (NM_176979.4,925-943).
gatggtgcctgatacttca

SEQ ID NO: 620045 - DNA, 19 bp, Mus musculus
  siRNA target sequence for 2810429C13Rik (NM_176979.4,928-946).
ggtgcctgatacttcaaca

SEQ ID NO: 620046 - DNA, 19 bp, Mus musculus
  siRNA target sequence for 2810429C13Rik (NM_176979.4,983-1001).
gcagatgtcagccatatat

SEQ ID NO: 620047 - DNA, 19 bp, Mus musculus
  siRNA target sequence for 2810429C13Rik (NM_176979.4,986-1004).
gatgtcagccatatatcca

SEQ ID NO: 620048 - DNA, 19 bp, Mus musculus
  siRNA target sequence for 2810429C13Rik (NM_176979.4,991-1009).
cagccatatatccaacata

SEQ ID NO: 620049 - DNA, 19 bp, Mus musculus
  siRNA target sequence for 2810429C13Rik (NM_176979.4,993-1011).
gccatatatccaacataaa

SEQ ID NO: 620050 - DNA, 19 bp, Mus musculus
  siRNA target sequence for 2810429C13Rik (NM_176979.4,994-1012).
ccatatatccaacataaat

SEQ ID NO: 620051 - DNA, 19 bp, Mus musculus
  siRNA target sequence for 2810429C13Rik (NM_176979.4,1110-1128).
ctcctgaagacttattaga

SEQ ID NO: 620052 - DNA, 19 bp, Mus musculus
  siRNA target sequence for 2810429C13Rik (NM_176979.4,1130-1148).
ggctgtcggatatatcttt

SEQ ID NO: 620053 - DNA, 19 bp, Mus musculus
  siRNA target sequence for 2810429C13Rik (NM_176979.4,1132-1150).
ctgtcggatatatctttgt

SEQ ID NO: 620054 - DNA, 19 bp, Mus musculus
  siRNA target sequence for 2810429C13Rik (NM_176979.4,1178-1196).
ctgagaaggcttattaaca

SEQ ID NO: 620055 - DNA, 19 bp, Mus musculus
  siRNA target sequence for 2810429C13Rik (NM_176979.4,1197-1215).
gtggaggtggagttcgatt

SEQ ID NO: 620056 - DNA, 19 bp, Mus musculus
  siRNA target sequence for 2810429C13Rik (NM_176979.4,1199-1217).
ggaggtggagttcgattta

SEQ ID NO: 620057 - DNA, 19 bp, Mus musculus
  siRNA target sequence for 2810429C13Rik (NM_176979.4,1200-1218).
gaggtggagttcgatttaa

SEQ ID NO: 620058 - DNA, 19 bp, Mus musculus
  siRNA target sequence for 2810429C13Rik (NM_176979.4,1229-1247).
gaagatgtaactcatgtaa

SEQ ID NO: 620059 - DNA, 19 bp, Mus musculus
  siRNA target sequence for 2810429C13Rik (NM_176979.4,1358-1376).
cttcctgaagagtcctata

SEQ ID NO: 620060 - DNA, 19 bp, Mus musculus
  siRNA target sequence for 2810429C13Rik (NM_176979.4,1514-1532).
ctgcttgctcagtatggaa

SEQ ID NO: 620061 - DNA, 19 bp, Mus musculus
  siRNA target sequence for 2810429C13Rik (NM_176979.4,1542-1560).
ccacgatggttgaagctaa

SEQ ID NO: 620062 - DNA, 19 bp, Mus musculus
  siRNA target sequence for 2810429C13Rik (NM_176979.4,1546-1564).
gatggttgaagctaagcta

SEQ ID NO: 620063 - DNA, 19 bp, Mus musculus
  siRNA target sequence for 2810429C13Rik (NM_176979.4,1612-1630).
ccgtgagccctgtgatgat

SEQ ID NO: 620064 - DNA, 19 bp, Mus musculus
  siRNA target sequence for 2810429C13Rik (NM_176979.4,1625-1643).
gatgattccactcacattt

SEQ ID NO: 620065 - DNA, 19 bp, Mus musculus
  siRNA target sequence for 2810429C13Rik (NM_176979.4,1665-1683).
cgtctgtcagtcattgcat

SEQ ID NO: 620066 - DNA, 19 bp, Mus musculus
  siRNA target sequence for 2810429C13Rik (NM_176979.4,1693-1711).
ctctacagttcgtgaagaa

SEQ ID NO: 620067 - DNA, 19 bp, Mus musculus
  siRNA target sequence for 2810429C13Rik (NM_176979.4,1822-1840).
cagaattgttgctgactat

SEQ ID NO: 620068 - DNA, 19 bp, Mus musculus
  siRNA target sequence for 2810429C13Rik (NM_176979.4,1873-1891).
cgtgacggtgggagaagtt

SEQ ID NO: 620069 - DNA, 19 bp, Mus musculus
  siRNA target sequence for 2810429C13Rik (NM_176979.4,1879-1897).
ggtgggagaagttgttaca

SEQ ID NO: 620070 - DNA, 19 bp, Mus musculus
  siRNA target sequence for 2810429C13Rik (NM_176979.4,1905-1923).
ggctggttacgtgtataga

SEQ ID NO: 620071 - DNA, 19 bp, Mus musculus
  siRNA target sequence for 2810429C13Rik (NM_176979.4,1907-1925).
ctggttacgtgtatagaca

SEQ ID NO: 620072 - DNA, 19 bp, Mus musculus
  siRNA target sequence for 2810429C13Rik (NM_176979.4,1917-1935).
gtatagacaaccagacatt

SEQ ID NO: 620073 - DNA, 19 bp, Mus musculus
  siRNA target sequence for 2810429C13Rik (NM_176979.4,1981-1999).
gtcgggagtgactccttta

SEQ ID NO: 620074 - DNA, 19 bp, Mus musculus
  siRNA target sequence for 2810429C13Rik (NM_176979.4,1983-2001).
cgggagtgactcctttaga

SEQ ID NO: 620075 - DNA, 19 bp, Mus musculus
  siRNA target sequence for 2810429C13Rik (NM_176979.4,2075-2093).
ggagcaagtgttcaagaat

SEQ ID NO: 620076 - DNA, 19 bp, Mus musculus
  siRNA target sequence for 2810429C13Rik (NM_176979.4,2076-2094).
gagcaagtgttcaagaatt

SEQ ID NO: 620077 - DNA, 19 bp, Mus musculus
  siRNA target sequence for 2810429C13Rik (NM_176979.4,2078-2096).
gcaagtgttcaagaattct

SEQ ID NO: 620078 - DNA, 19 bp, Mus musculus
  siRNA target sequence for 2810429C13Rik (NM_176979.4,2079-2097).
caagtgttcaagaattctt

SEQ ID NO: 620079 - DNA, 19 bp, Mus musculus
  siRNA target sequence for 2810429C13Rik (NM_176979.4,2099-2117).
gttcgcaaagccaatgcaa

SEQ ID NO: 620080 - DNA, 19 bp, Mus musculus
  siRNA target sequence for 2810429C13Rik (NM_176979.4,2131-2149).
cgccagcacacatcttata

SEQ ID NO: 620081 - DNA, 19 bp, Mus musculus
  siRNA target sequence for 2810429C13Rik (NM_176979.4,2156-2174).
gaaccgactggttccaaat

SEQ ID NO: 620082 - DNA, 19 bp, Mus musculus
  siRNA target sequence for 2810429C13Rik (NM_176979.4,2160-2178).
cgactggttccaaatacga

SEQ ID NO: 620083 - DNA, 19 bp, Mus musculus
  siRNA target sequence for 2810429C13Rik (NM_176979.4,2161-2179).
gactggttccaaatacgaa

SEQ ID NO: 620084 - DNA, 19 bp, Mus musculus
  siRNA target sequence for 2810429C13Rik (NM_176979.4,2193-2211).
ggagtttgccggcagttaa

SEQ ID NO: 620085 - DNA, 19 bp, Mus musculus
  siRNA target sequence for 2810429C13Rik (NM_176979.4,2196-2214).
gtttgccggcagttaacat

SEQ ID NO: 620086 - DNA, 19 bp, Mus musculus
  siRNA target sequence for 2810429C13Rik (NM_176979.4,2201-2219).
ccggcagttaacatttcat

SEQ ID NO: 620087 - DNA, 19 bp, Mus musculus
  siRNA target sequence for 2810429C13Rik (NM_176979.4,2248-2266).
gagagcagatgaaaaccat

SEQ ID NO: 620088 - DNA, 19 bp, Mus musculus
  siRNA target sequence for 2810429C13Rik (NM_176979.4,2250-2268).
gagcagatgaaaaccattt

SEQ ID NO: 620089 - DNA, 19 bp, Mus musculus
  siRNA target sequence for 2810429C13Rik (NM_176979.4,2281-2299).
cgcacctaaacaagaacaa

SEQ ID NO: 620090 - DNA, 19 bp, Mus musculus
  siRNA target sequence for 2810429C13Rik (NM_176979.4,2285-2303).
cctaaacaagaacaagttt

SEQ ID NO: 620091 - DNA, 19 bp, Mus musculus
  siRNA target sequence for 2810429C13Rik (NM_176979.4,2319-2337).
caaatggagtgagttcaaa

SEQ ID NO: 620092 - DNA, 19 bp, Mus musculus
  siRNA target sequence for 2810429C13Rik (NM_176979.4,2483-2501).
gtacggcagccccttacta

SEQ ID NO: 620093 - DNA, 19 bp, Mus musculus
  siRNA target sequence for 2810429C13Rik (NM_176979.4,2499-2517).
ctaaggagccctctttaca

SEQ ID NO: 620094 - DNA, 19 bp, Mus musculus
  siRNA target sequence for 2810429C13Rik (NM_176979.4,2519-2537).
ctggacacaccatcaaagt

SEQ ID NO: 620095 - DNA, 19 bp, Mus musculus
  siRNA target sequence for 2810429C13Rik (NM_176979.4,2675-2693).
gttgctttggcaaatagtt

SEQ ID NO: 620096 - DNA, 19 bp, Mus musculus
  siRNA target sequence for 2810429C13Rik (NM_176979.4,2873-2891).
gatgagactgttactcatt

SEQ ID NO: 620097 - DNA, 19 bp, Mus musculus
  siRNA target sequence for 2810429C13Rik (NM_176979.4,2876-2894).
gagactgttactcatttca

SEQ ID NO: 620098 - DNA, 19 bp, Mus musculus
  siRNA target sequence for 2810429C13Rik (NM_176979.4,2880-2898).
ctgttactcatttcattta

SEQ ID NO: 620099 - DNA, 19 bp, Mus musculus
  siRNA target sequence for 2810429C13Rik (NM_176979.4,2900-2918).
cagggtcgggcaaatgaca

SEQ ID NO: 620100 - DNA, 19 bp, Mus musculus
  siRNA target sequence for 2810429C13Rik (NM_176979.4,2904-2922).
gtcgggcaaatgacagtaa

SEQ ID NO: 620101 - DNA, 19 bp, Mus musculus
  siRNA target sequence for 2810429C13Rik (NM_176979.4,2908-2926).
ggcaaatgacagtaatcga

SEQ ID NO: 620102 - DNA, 19 bp, Mus musculus
  siRNA target sequence for 2810429C13Rik (NM_176979.4,2915-2933).
gacagtaatcgagaatata

SEQ ID NO: 620103 - DNA, 19 bp, Mus musculus
  siRNA target sequence for 2810429C13Rik (NM_176979.4,2965-2983).
gtccgagcattggctatta

SEQ ID NO: 620104 - DNA, 19 bp, Mus musculus
  siRNA target sequence for 2810429C13Rik (NM_176979.4,2967-2985).
ccgagcattggctattaga

SEQ ID NO: 620105 - DNA, 19 bp, Mus musculus
  siRNA target sequence for 2810429C13Rik (NM_176979.4,2969-2987).
gagcattggctattagagt

SEQ ID NO: 620106 - DNA, 19 bp, Mus musculus
  siRNA target sequence for 2810429C13Rik (NM_176979.4,3155-3173).
ggaaatgagacaaacacta

SEQ ID NO: 620107 - DNA, 19 bp, Mus musculus
  siRNA target sequence for 2810429C13Rik (NM_176979.4,3278-3296).
cagctgcaagagatcatgt

SEQ ID NO: 620108 - DNA, 19 bp, Mus musculus
  siRNA target sequence for 2810429C13Rik (NM_176979.4,3471-3489).
cccagaacgagcagatcat

SEQ ID NO: 620109 - DNA, 19 bp, Mus musculus
  siRNA target sequence for 2810429C13Rik (NM_176979.4,3614-3632).
cgaaagcctgtgtaccatt

SEQ ID NO: 620110 - DNA, 19 bp, Mus musculus
  siRNA target sequence for 2810429C13Rik (NM_176979.4,3619-3637).
gcctgtgtaccattcagaa

SEQ ID NO: 620111 - DNA, 19 bp, Mus musculus
  siRNA target sequence for 2810429C13Rik (NM_176979.4,3644-3662).
gagcaggcctcgtgtgtta

SEQ ID NO: 620112 - DNA, 19 bp, Mus musculus
  siRNA target sequence for 2810429C13Rik (NM_176979.4,3646-3664).
gcaggcctcgtgtgttact

SEQ ID NO: 620113 - DNA, 19 bp, Mus musculus
  siRNA target sequence for 2810429C13Rik (NM_176979.4,3649-3667).
ggcctcgtgtgttactcaa

SEQ ID NO: 620114 - DNA, 19 bp, Mus musculus
  siRNA target sequence for 2810429C13Rik (NM_176979.4,3811-3829).
ggaggagacgcacagaaaa

SEQ ID NO: 620115 - DNA, 19 bp, Mus musculus
  siRNA target sequence for 2810429C13Rik (NM_176979.4,3817-3835).
gacgcacagaaaagttaaa

SEQ ID NO: 620116 - DNA, 19 bp, Mus musculus
  siRNA target sequence for 2810429C13Rik (NM_176979.4,3851-3869).
cagatgtcgtctctgaatt

SEQ ID NO: 620117 - DNA, 19 bp, Mus musculus
  siRNA target sequence for 2810429C13Rik (NM_176979.4,3856-3874).
gtcgtctctgaattctcaa

SEQ ID NO: 620118 - DNA, 19 bp, Mus musculus
  siRNA target sequence for 2810429C13Rik (NM_176979.4,3870-3888).
ctcaagagcggattgatta

SEQ ID NO: 620119 - DNA, 19 bp, Mus musculus
  siRNA target sequence for 2810429C13Rik (NM_176979.4,3872-3890).
caagagcggattgattact

SEQ ID NO: 620120 - DNA, 19 bp, Mus musculus
  siRNA target sequence for 2810429C13Rik (NM_176979.4,3884-3902).
gattactgtcgcctgatta

SEQ ID NO: 620121 - DNA, 19 bp, Mus musculus
  siRNA target sequence for 2810429C13Rik (NM_176979.4,3891-3909).
gtcgcctgattaaagactt

SEQ ID NO: 620122 - DNA, 19 bp, Mus musculus
  siRNA target sequence for 2810429C13Rik (NM_176979.4,3975-3993).
cactgcgcaatgagaagta

SEQ ID NO: 620123 - DNA, 19 bp, Mus musculus
  siRNA target sequence for 2810429C13Rik (NM_176979.4,3977-3995).
ctgcgcaatgagaagtact

SEQ ID NO: 620124 - DNA, 19 bp, Mus musculus
  siRNA target sequence for 2810429C13Rik (NM_176979.4,3979-3997).
gcgcaatgagaagtactta

SEQ ID NO: 620125 - DNA, 19 bp, Mus musculus
  siRNA target sequence for 2810429C13Rik (NM_176979.4,4095-4113).
gaagtagctccatacttga

SEQ ID NO: 620126 - DNA, 19 bp, Mus musculus
  siRNA target sequence for 2810429C13Rik (NM_176979.4,4150-4168).
cgcactggcggcaatgaga

SEQ ID NO: 620127 - DNA, 19 bp, Mus musculus
  siRNA target sequence for 2810429C13Rik (NM_176979.4,4151-4169).
gcactggcggcaatgagat

SEQ ID NO: 620128 - DNA, 19 bp, Mus musculus
  siRNA target sequence for 2810429C13Rik (NM_176979.4,4269-4287).
ggttcaaacgccttcttca

SEQ ID NO: 620129 - DNA, 19 bp, Mus musculus
  siRNA target sequence for 2810429C13Rik (NM_176979.4,4316-4334).
catccagaacctttactta

SEQ ID NO: 620130 - DNA, 19 bp, Mus musculus
  siRNA target sequence for 2810429C13Rik (NM_176979.4,4337-4355).
gatgctacgcatctctttt

SEQ ID NO: 620131 - DNA, 19 bp, Mus musculus
  siRNA target sequence for 2810429C13Rik (NM_176979.4,4341-4359).
ctacgcatctcttttgtga

SEQ ID NO: 620132 - DNA, 19 bp, Mus musculus
  siRNA target sequence for 2810429C13Rik (NM_176979.4,4428-4446).
gcttgaaaacagaatatat

SEQ ID NO: 620133 - DNA, 19 bp, Mus musculus
  siRNA target sequence for 2810429C13Rik (NM_176979.4,4437-4455).
cagaatatatcgctgatta

SEQ ID NO: 620134 - DNA, 19 bp, Mus musculus
  siRNA target sequence for 2810429C13Rik (NM_176979.4,4560-4578).
ctcctgcagagaatgtagt

SEQ ID NO: 620135 - DNA, 19 bp, Mus musculus
  siRNA target sequence for 2810429C13Rik (NM_176979.4,4563-4581).
ctgcagagaatgtagtcaa

SEQ ID NO: 620136 - DNA, 19 bp, Mus musculus
  siRNA target sequence for 5730442K12Rik (NM_026598.1,197-215).
cgactcactggttcacttt

SEQ ID NO: 620137 - DNA, 19 bp, Mus musculus
  siRNA target sequence for 5730442K12Rik (NM_026598.1,225-243).
ggcgcttttgtctacttgt

SEQ ID NO: 620138 - DNA, 19 bp, Mus musculus
  siRNA target sequence for 5730442K12Rik (NM_026598.1,303-321).
ggcaaggctgacacaagat

SEQ ID NO: 620139 - DNA, 19 bp, Mus musculus
  siRNA target sequence for 5730442K12Rik (NM_026598.1,312-330).
gacacaagatggctgtatt

SEQ ID NO: 620140 - DNA, 19 bp, Mus musculus
  siRNA target sequence for 5730442K12Rik (NM_026598.1,384-402).
ctggcgttggtcctcattt

SEQ ID NO: 620141 - DNA, 19 bp, Mus musculus
  siRNA target sequence for 5730442K12Rik (NM_026598.1,604-622).
ggcagtcatgggtagaact

SEQ ID NO: 620142 - DNA, 19 bp, Mus musculus
  siRNA target sequence for Ddt (NM_010027.1,55-73).
ccattcgttgagttggaaa

SEQ ID NO: 620143 - DNA, 19 bp, Mus musculus
  siRNA target sequence for Ddt (NM_010027.1,159-177).
ccgcgtgagcgttacgata

SEQ ID NO: 620144 - DNA, 19 bp, Mus musculus
  siRNA target sequence for Ech1 (NM_016772.1,27-45).
gctaccgcgatgacagttt

SEQ ID NO: 620145 - DNA, 19 bp, Mus musculus
  siRNA target sequence for Ech1 (NM_016772.1,85-103).
gtaccagccagctgtactt

SEQ ID NO: 620146 - DNA, 19 bp, Mus musculus
  siRNA target sequence for Ech1 (NM_016772.1,176-194).
ccacaactatgagtctatt

SEQ ID NO: 620147 - DNA, 19 bp, Mus musculus
  siRNA target sequence for Ech1 (NM_016772.1,290-308).
ggaatgcttccaaaagata

SEQ ID NO: 620148 - DNA, 19 bp, Mus musculus
  siRNA target sequence for Ech1 (NM_016772.1,291-309).
gaatgcttccaaaagatat

SEQ ID NO: 620149 - DNA, 19 bp, Mus musculus
  siRNA target sequence for Ech1 (NM_016772.1,343-361).
ccggtgcaggaaagatgtt

SEQ ID NO: 620150 - DNA, 19 bp, Mus musculus
  siRNA target sequence for Ech1 (NM_016772.1,345-363).
ggtgcaggaaagatgttca

SEQ ID NO: 620151 - DNA, 19 bp, Mus musculus
  siRNA target sequence for Ech1 (NM_016772.1,404-422).
gcagccctcaggagatgat

SEQ ID NO: 620152 - DNA, 19 bp, Mus musculus
  siRNA target sequence for Ech1 (NM_016772.1,554-572).
cgtttctgcctgtgacatt

SEQ ID NO: 620153 - DNA, 19 bp, Mus musculus
  siRNA target sequence for Renbp (NM_023132.1,227-245).
gccgtgatgggaaggtata

SEQ ID NO: 620154 - DNA, 19 bp, Mus musculus
  siRNA target sequence for Renbp (NM_023132.1,228-246).
ccgtgatgggaaggtatat

SEQ ID NO: 620155 - DNA, 19 bp, Mus musculus
  siRNA target sequence for Renbp (NM_023132.1,241-259).
gtatatgatcacctcaaat

SEQ ID NO: 620156 - DNA, 19 bp, Mus musculus
  siRNA target sequence for Renbp (NM_023132.1,276-294).
gaggcaggtatggatgtat

SEQ ID NO: 620157 - DNA, 19 bp, Mus musculus
  siRNA target sequence for Renbp (NM_023132.1,287-305).
ggatgtattgtcgcttata

SEQ ID NO: 620158 - DNA, 19 bp, Mus musculus
  siRNA target sequence for Renbp (NM_023132.1,299-317).
gcttataccgcagttttga

SEQ ID NO: 620159 - DNA, 19 bp, Mus musculus
  siRNA target sequence for Renbp (NM_023132.1,350-368).
caagagcaggtggtgaatt

SEQ ID NO: 620160 - DNA, 19 bp, Mus musculus
  siRNA target sequence for Renbp (NM_023132.1,356-374).
caggtggtgaatttttgct

SEQ ID NO: 620161 - DNA, 19 bp, Mus musculus
  siRNA target sequence for Renbp (NM_023132.1,390-408).
ggcaccacctggcaagaaa

SEQ ID NO: 620162 - DNA, 19 bp, Mus musculus
  siRNA target sequence for Renbp (NM_023132.1,391-409).
gcaccacctggcaagaaat

SEQ ID NO: 620163 - DNA, 19 bp, Mus musculus
  siRNA target sequence for Renbp (NM_023132.1,512-530).
cgggggaagtgcgttatca

SEQ ID NO: 620164 - DNA, 19 bp, Mus musculus
  siRNA target sequence for Renbp (NM_023132.1,514-532).
ggggaagtgcgttatcaga

SEQ ID NO: 620165 - DNA, 19 bp, Mus musculus
  siRNA target sequence for Renbp (NM_023132.1,758-776).
gggatggacaagttgtact

SEQ ID NO: 620166 - DNA, 19 bp, Mus musculus
  siRNA target sequence for Renbp (NM_023132.1,769-787).
gttgtactggagaatgtat

SEQ ID NO: 620167 - DNA, 19 bp, Mus musculus
  siRNA target sequence for Renbp (NM_023132.1,904-922).
cgaatgcacatcattgaca

SEQ ID NO: 620168 - DNA, 19 bp, Mus musculus
  siRNA target sequence for Renbp (NM_023132.1,905-923).
gaatgcacatcattgacaa

SEQ ID NO: 620169 - DNA, 19 bp, Mus musculus
  siRNA target sequence for Renbp (NM_023132.1,1007-1025).
ctacccagctggaatggaa

SEQ ID NO: 620170 - DNA, 19 bp, Mus musculus
  siRNA target sequence for Renbp (NM_023132.1,1063-1081).
gccttcctcatgggttata

SEQ ID NO: 620171 - DNA, 19 bp, Mus musculus
  siRNA target sequence for Renbp (NM_023132.1,1146-1164).
gtttcgtgatcctgagtat

SEQ ID NO: 620172 - DNA, 19 bp, Mus musculus
  siRNA target sequence for Renbp (NM_023132.1,1157-1175).
ctgagtatggggaatggtt

SEQ ID NO: 620173 - DNA, 19 bp, Mus musculus
  siRNA target sequence for Renbp (NM_023132.1,1263-1281).
catgtgcgagcagattcta

SEQ ID NO: 620174 - DNA, 19 bp, Mus musculus
  siRNA target sequence for Topors (NM_134097.2,338-356).
ccgcgtcctcggagataat

SEQ ID NO: 620175 - DNA, 19 bp, Mus musculus
  siRNA target sequence for Topors (NM_134097.2,357-375).
ggcctcagctgctaaggaa

SEQ ID NO: 620176 - DNA, 19 bp, Mus musculus
  siRNA target sequence for Topors (NM_134097.2,358-376).
gcctcagctgctaaggaat

SEQ ID NO: 620177 - DNA, 19 bp, Mus musculus
  siRNA target sequence for Topors (NM_134097.2,384-402).
ggacaacttttcacctaaa

SEQ ID NO: 620178 - DNA, 19 bp, Mus musculus
  siRNA target sequence for Topors (NM_134097.2,404-422).
ctggcactagcaaattgca

SEQ ID NO: 620179 - DNA, 19 bp, Mus musculus
  siRNA target sequence for Topors (NM_134097.2,442-460).
gcgtctcctgattctaagt

SEQ ID NO: 620180 - DNA, 19 bp, Mus musculus
  siRNA target sequence for Topors (NM_134097.2,455-473).
ctaagtgtcctatatgctt

SEQ ID NO: 620181 - DNA, 19 bp, Mus musculus
  siRNA target sequence for Topors (NM_134097.2,470-488).
gcttggatagatttgataa

SEQ ID NO: 620182 - DNA, 19 bp, Mus musculus
  siRNA target sequence for Topors (NM_134097.2,502-520).
gatcgttgcctacataagt

SEQ ID NO: 620183 - DNA, 19 bp, Mus musculus
  siRNA target sequence for Topors (NM_134097.2,505-523).
cgttgcctacataagttct

SEQ ID NO: 620184 - DNA, 19 bp, Mus musculus
  siRNA target sequence for Topors (NM_134097.2,522-540).
ctgttttcgctgtgtacaa

SEQ ID NO: 620185 - DNA, 19 bp, Mus musculus
  siRNA target sequence for Topors (NM_134097.2,524-542).
gttttcgctgtgtacaaga

SEQ ID NO: 620186 - DNA, 19 bp, Mus musculus
  siRNA target sequence for Topors (NM_134097.2,535-553).
gtacaagagtggtccaaaa

SEQ ID NO: 620187 - DNA, 19 bp, Mus musculus
  siRNA target sequence for Topors (NM_134097.2,560-578).
ccgaatgcccactgtgtaa

SEQ ID NO: 620188 - DNA, 19 bp, Mus musculus
  siRNA target sequence for Topors (NM_134097.2,561-579).
cgaatgcccactgtgtaaa

SEQ ID NO: 620189 - DNA, 19 bp, Mus musculus
  siRNA target sequence for Topors (NM_134097.2,637-655).
gtcctgaggccttcctata

SEQ ID NO: 620190 - DNA, 19 bp, Mus musculus
  siRNA target sequence for Topors (NM_134097.2,639-657).
cctgaggccttcctataat

SEQ ID NO: 620191 - DNA, 19 bp, Mus musculus
  siRNA target sequence for Topors (NM_134097.2,642-660).
gaggccttcctataatggt

SEQ ID NO: 620192 - DNA, 19 bp, Mus musculus
  siRNA target sequence for Topors (NM_134097.2,672-690).
ccctgaggttcgaaggttt

SEQ ID NO: 620193 - DNA, 19 bp, Mus musculus
  siRNA target sequence for Topors (NM_134097.2,691-709).
cgctaccggacaactatga

SEQ ID NO: 620194 - DNA, 19 bp, Mus musculus
  siRNA target sequence for Topors (NM_134097.2,715-733).
gaacggagcgcctctcttt

SEQ ID NO: 620195 - DNA, 19 bp, Mus musculus
  siRNA target sequence for Topors (NM_134097.2,718-736).
cggagcgcctctctttatt

SEQ ID NO: 620196 - DNA, 19 bp, Mus musculus
  siRNA target sequence for Topors (NM_134097.2,720-738).
gagcgcctctctttattca

SEQ ID NO: 620197 - DNA, 19 bp, Mus musculus
  siRNA target sequence for Topors (NM_134097.2,739-757).
cccagtagtactgtaagta

SEQ ID NO: 620198 - DNA, 19 bp, Mus musculus
  siRNA target sequence for Topors (NM_134097.2,796-814).
gaagggttaggcatttcga

SEQ ID NO: 620199 - DNA, 19 bp, Mus musculus
  siRNA target sequence for Topors (NM_134097.2,813-831).
gacaagacctagagatgtt

SEQ ID NO: 620200 - DNA, 19 bp, Mus musculus
  siRNA target sequence for Topors (NM_134097.2,818-836).
gacctagagatgttgacat

SEQ ID NO: 620201 - DNA, 19 bp, Mus musculus
  siRNA target sequence for Topors (NM_134097.2,832-850).
gacattcctcaatttatga

SEQ ID NO: 620202 - DNA, 19 bp, Mus musculus
  siRNA target sequence for Topors (NM_134097.2,834-852).
cattcctcaatttatgaga

SEQ ID NO: 620203 - DNA, 19 bp, Mus musculus
  siRNA target sequence for Topors (NM_134097.2,839-857).
ctcaatttatgagacaaat

SEQ ID NO: 620204 - DNA, 19 bp, Mus musculus
  siRNA target sequence for Topors (NM_134097.2,888-906).
gagatctttgcggaaaatt

SEQ ID NO: 620205 - DNA, 19 bp, Mus musculus
  siRNA target sequence for Topors (NM_134097.2,890-908).
gatctttgcggaaaattca

SEQ ID NO: 620206 - DNA, 19 bp, Mus musculus
  siRNA target sequence for Topors (NM_134097.2,930-948).
caggcgaactctttatcgt

SEQ ID NO: 620207 - DNA, 19 bp, Mus musculus
  siRNA target sequence for Topors (NM_134097.2,949-967).
gctggtgttcgagttagaa

SEQ ID NO: 620208 - DNA, 19 bp, Mus musculus
  siRNA target sequence for Topors (NM_134097.2,952-970).
ggtgttcgagttagaagta

SEQ ID NO: 620209 - DNA, 19 bp, Mus musculus
  siRNA target sequence for Topors (NM_134097.2,953-971).
gtgttcgagttagaagtat

SEQ ID NO: 620210 - DNA, 19 bp, Mus musculus
  siRNA target sequence for Topors (NM_134097.2,959-977).
gagttagaagtattgaaga

SEQ ID NO: 620211 - DNA, 19 bp, Mus musculus
  siRNA target sequence for Topors (NM_134097.2,982-1000).
ggccgctacagggatattt

SEQ ID NO: 620212 - DNA, 19 bp, Mus musculus
  siRNA target sequence for Topors (NM_134097.2,984-1002).
ccgctacagggatatttca

SEQ ID NO: 620213 - DNA, 19 bp, Mus musculus
  siRNA target sequence for Topors (NM_134097.2,1004-1022).
ctgagttcttccgtagaaa

SEQ ID NO: 620214 - DNA, 19 bp, Mus musculus
  siRNA target sequence for Topors (NM_134097.2,1008-1026).
gttcttccgtagaaatcca

SEQ ID NO: 620215 - DNA, 19 bp, Mus musculus
  siRNA target sequence for Topors (NM_134097.2,1028-1046).
cttgccttcacagattagt

SEQ ID NO: 620216 - DNA, 19 bp, Mus musculus
  siRNA target sequence for Topors (NM_134097.2,1085-1103).
cccatggttcgctagtcaa

SEQ ID NO: 620217 - DNA, 19 bp, Mus musculus
  siRNA target sequence for Topors (NM_134097.2,1086-1104).
ccatggttcgctagtcaat

SEQ ID NO: 620218 - DNA, 19 bp, Mus musculus
  siRNA target sequence for Topors (NM_134097.2,1087-1105).
catggttcgctagtcaata

SEQ ID NO: 620219 - DNA, 19 bp, Mus musculus
  siRNA target sequence for Topors (NM_134097.2,1091-1109).
gttcgctagtcaatatcgt

SEQ ID NO: 620220 - DNA, 19 bp, Mus musculus
  siRNA target sequence for Topors (NM_134097.2,1119-1137).
catcatgagtaatgttact

SEQ ID NO: 620221 - DNA, 19 bp, Mus musculus
  siRNA target sequence for Topors (NM_134097.2,1158-1176).
ggcatttgtgtctgactta

SEQ ID NO: 620222 - DNA, 19 bp, Mus musculus
  siRNA target sequence for Topors (NM_134097.2,1159-1177).
gcatttgtgtctgacttaa

SEQ ID NO: 620223 - DNA, 19 bp, Mus musculus
  siRNA target sequence for Topors (NM_134097.2,1231-1249).
gctagatctcccttcaata

SEQ ID NO: 620224 - DNA, 19 bp, Mus musculus
  siRNA target sequence for Topors (NM_134097.2,1232-1250).
ctagatctcccttcaatat

SEQ ID NO: 620225 - DNA, 19 bp, Mus musculus
  siRNA target sequence for Topors (NM_134097.2,1256-1274).
cttttgaccagcatgctaa

SEQ ID NO: 620226 - DNA, 19 bp, Mus musculus
  siRNA target sequence for Topors (NM_134097.2,1284-1302).
ccctccttcatctgaagaa

SEQ ID NO: 620227 - DNA, 19 bp, Mus musculus
  siRNA target sequence for Topors (NM_134097.2,1539-1557).
gaccaatgacgatgtcaat

SEQ ID NO: 620228 - DNA, 19 bp, Mus musculus
  siRNA target sequence for Topors (NM_134097.2,1541-1559).
ccaatgacgatgtcaataa

SEQ ID NO: 620229 - DNA, 19 bp, Mus musculus
  siRNA target sequence for Topors (NM_134097.2,1546-1564).
gacgatgtcaataatgaca

SEQ ID NO: 620230 - DNA, 19 bp, Mus musculus
  siRNA target sequence for Topors (NM_134097.2,1552-1570).
gtcaataatgacagtgatt

SEQ ID NO: 620231 - DNA, 19 bp, Mus musculus
  siRNA target sequence for Topors (NM_134097.2,1565-1583).
gtgattcatcgtcagataa

SEQ ID NO: 620232 - DNA, 19 bp, Mus musculus
  siRNA target sequence for Topors (NM_134097.2,1567-1585).
gattcatcgtcagataatt

SEQ ID NO: 620233 - DNA, 19 bp, Mus musculus
  siRNA target sequence for Topors (NM_134097.2,1571-1589).
catcgtcagataattgtgt

SEQ ID NO: 620234 - DNA, 19 bp, Mus musculus
  siRNA target sequence for Topors (NM_134097.2,1577-1595).
cagataattgtgtcattgt

SEQ ID NO: 620235 - DNA, 19 bp, Mus musculus
  siRNA target sequence for Topors (NM_134097.2,1625-1643).
ccccggaacttgttgaact

SEQ ID NO: 620236 - DNA, 19 bp, Mus musculus
  siRNA target sequence for Topors (NM_134097.2,1705-1723).
caagagcagtcgtacagtt

SEQ ID NO: 620237 - DNA, 19 bp, Mus musculus
  siRNA target sequence for Topors (NM_134097.2,1761-1779).
ctctgtccttggaaaagat

SEQ ID NO: 620238 - DNA, 19 bp, Mus musculus
  siRNA target sequence for Topors (NM_134097.2,1771-1789).
ggaaaagatgaacaaatga

SEQ ID NO: 620239 - DNA, 19 bp, Mus musculus
  siRNA target sequence for Topors (NM_134097.2,1804-1822).
gattctgacacaagaataa

SEQ ID NO: 620240 - DNA, 19 bp, Mus musculus
  siRNA target sequence for Topors (NM_134097.2,1834-1852).
gaagagaaacgatctacat

SEQ ID NO: 620241 - DNA, 19 bp, Mus musculus
  siRNA target sequence for Topors (NM_134097.2,1837-1855).
gagaaacgatctacatcat

SEQ ID NO: 620242 - DNA, 19 bp, Mus musculus
  siRNA target sequence for Topors (NM_134097.2,1895-1913).
gggtatgctccccatataa

SEQ ID NO: 620243 - DNA, 19 bp, Mus musculus
  siRNA target sequence for Topors (NM_134097.2,1978-1996).
catgacccgaggaatcaca

SEQ ID NO: 620244 - DNA, 19 bp, Mus musculus
  siRNA target sequence for Topors (NM_134097.2,1995-2013).
caggaagcacgggaagaaa

SEQ ID NO: 620245 - DNA, 19 bp, Mus musculus
  siRNA target sequence for Topors (NM_134097.2,2113-2131).
cggaggagccagacacttt

SEQ ID NO: 620246 - DNA, 19 bp, Mus musculus
  siRNA target sequence for Topors (NM_134097.2,2122-2140).
cagacactttctctaagta

SEQ ID NO: 620247 - DNA, 19 bp, Mus musculus
  siRNA target sequence for Topors (NM_134097.2,2163-2181).
gtctcgtagcagtgatcat

SEQ ID NO: 620248 - DNA, 19 bp, Mus musculus
  siRNA target sequence for Topors (NM_134097.2,2204-2222).
gaaatcgagatcgctatta

SEQ ID NO: 620249 - DNA, 19 bp, Mus musculus
  siRNA target sequence for Topors (NM_134097.2,2209-2227).
cgagatcgctattatttaa

SEQ ID NO: 620250 - DNA, 19 bp, Mus musculus
  siRNA target sequence for Topors (NM_134097.2,2212-2230).
gatcgctattatttaagaa

SEQ ID NO: 620251 - DNA, 19 bp, Mus musculus
  siRNA target sequence for Topors (NM_134097.2,2264-2282).
cttactacagcagaaacaa

SEQ ID NO: 620252 - DNA, 19 bp, Mus musculus
  siRNA target sequence for Topors (NM_134097.2,2313-2331).
gaggaggactctttcaaga

SEQ ID NO: 620253 - DNA, 19 bp, Mus musculus
  siRNA target sequence for Topors (NM_134097.2,2323-2341).
ctttcaagagcccattact

SEQ ID NO: 620254 - DNA, 19 bp, Mus musculus
  siRNA target sequence for Topors (NM_134097.2,2340-2358).
ctctagacagtcttcaagt

SEQ ID NO: 620255 - DNA, 19 bp, Mus musculus
  siRNA target sequence for Topors (NM_134097.2,2349-2367).
gtcttcaagtccagaattt

SEQ ID NO: 620256 - DNA, 19 bp, Mus musculus
  siRNA target sequence for Topors (NM_134097.2,2354-2372).
caagtccagaatttagaat

SEQ ID NO: 620257 - DNA, 19 bp, Mus musculus
  siRNA target sequence for Topors (NM_134097.2,2417-2435).
gtgaaaggaaatactacta

SEQ ID NO: 620258 - DNA, 19 bp, Mus musculus
  siRNA target sequence for Topors (NM_134097.2,2498-2516).
ccgaccgggtgagaaatga

SEQ ID NO: 620259 - DNA, 19 bp, Mus musculus
  siRNA target sequence for Topors (NM_134097.2,2524-2542).
ggagggaaacgcaagtaca

SEQ ID NO: 620260 - DNA, 19 bp, Mus musculus
  siRNA target sequence for Topors (NM_134097.2,2541-2559).
caaaacccggcatttggaa

SEQ ID NO: 620261 - DNA, 19 bp, Mus musculus
  siRNA target sequence for Topors (NM_134097.2,2581-2599).
ccggctcgggagttcactt

SEQ ID NO: 620262 - DNA, 19 bp, Mus musculus
  siRNA target sequence for Topors (NM_134097.2,2611-2629).
gacagtcattaccaaaaat

SEQ ID NO: 620263 - DNA, 19 bp, Mus musculus
  siRNA target sequence for Topors (NM_134097.2,2613-2631).
cagtcattaccaaaaatca

SEQ ID NO: 620264 - DNA, 19 bp, Mus musculus
  siRNA target sequence for Topors (NM_134097.2,2723-2741).
ggacccggagcctaagtgt

SEQ ID NO: 620265 - DNA, 19 bp, Mus musculus
  siRNA target sequence for Topors (NM_134097.2,2730-2748).
gagcctaagtgtagagata

SEQ ID NO: 620266 - DNA, 19 bp, Mus musculus
  siRNA target sequence for Topors (NM_134097.2,2732-2750).
gcctaagtgtagagatagt

SEQ ID NO: 620267 - DNA, 19 bp, Mus musculus
  siRNA target sequence for Topors (NM_134097.2,2733-2751).
cctaagtgtagagatagtt

SEQ ID NO: 620268 - DNA, 19 bp, Mus musculus
  siRNA target sequence for Topors (NM_134097.2,2763-2781).
ggctacggacacaagcaaa

SEQ ID NO: 620269 - DNA, 19 bp, Mus musculus
  siRNA target sequence for Topors (NM_134097.2,2846-2864).
cacggtcgccggtggttat

SEQ ID NO: 620270 - DNA, 19 bp, Mus musculus
  siRNA target sequence for Topors (NM_134097.2,2848-2866).
cggtcgccggtggttataa

SEQ ID NO: 620271 - DNA, 19 bp, Mus musculus
  siRNA target sequence for Topors (NM_134097.2,2852-2870).
cgccggtggttataaccat

SEQ ID NO: 620272 - DNA, 19 bp, Mus musculus
  siRNA target sequence for Topors (NM_134097.2,2899-2917).
gtaaaggcgggtattgaat

SEQ ID NO: 620273 - DNA, 19 bp, Mus musculus
  siRNA target sequence for Topors (NM_134097.2,2930-2948).
gtcttccacagcctataca

SEQ ID NO: 620274 - DNA, 19 bp, Mus musculus
  siRNA target sequence for Topors (NM_134097.2,2950-2968).
gatggagcatttgaaacta

SEQ ID NO: 620275 - DNA, 19 bp, Mus musculus
  siRNA target sequence for Topors (NM_134097.2,3054-3072).
ccaaactgtggagaattgt

SEQ ID NO: 620276 - DNA, 19 bp, Mus musculus
  siRNA target sequence for Topors (NM_134097.2,3094-3112).
gaacaaactcttgatgtaa

SEQ ID NO: 620277 - DNA, 19 bp, Mus musculus
  siRNA target sequence for Topors (NM_134097.2,3141-3159).
ggagagccagtcgagtaat

SEQ ID NO: 620278 - DNA, 19 bp, Mus musculus
  siRNA target sequence for Topors (NM_134097.2,3150-3168).
gtcgagtaatgtgtctatt

SEQ ID NO: 620279 - DNA, 19 bp, Mus musculus
  siRNA target sequence for 1110021H02Rik (NM_025388.1,198-216).
ccccgagatcgggaattgt

SEQ ID NO: 620280 - DNA, 19 bp, Mus musculus
  siRNA target sequence for 1110021H02Rik (NM_025388.1,224-242).
gcgactaaaggaggaatat

SEQ ID NO: 620281 - DNA, 19 bp, Mus musculus
  siRNA target sequence for 1110021H02Rik (NM_025388.1,226-244).
gactaaaggaggaatatca

SEQ ID NO: 620282 - DNA, 19 bp, Mus musculus
  siRNA target sequence for 1110021H02Rik (NM_025388.1,228-246).
ctaaaggaggaatatcagt

SEQ ID NO: 620283 - DNA, 19 bp, Mus musculus
  siRNA target sequence for 1110021H02Rik (NM_025388.1,256-274).
ggtatgtggagaacaacaa

SEQ ID NO: 620284 - DNA, 19 bp, Mus musculus
  siRNA target sequence for 1110021H02Rik (NM_025388.1,319-337).
ggacccggtggtttggaaa

SEQ ID NO: 620285 - DNA, 19 bp, Mus musculus
  siRNA target sequence for 1110021H02Rik (NM_025388.1,320-338).
gacccggtggtttggaaaa

SEQ ID NO: 620286 - DNA, 19 bp, Mus musculus
  siRNA target sequence for 1110021H02Rik (NM_025388.1,324-342).
cggtggtttggaaaatgct

SEQ ID NO: 620287 - DNA, 19 bp, Mus musculus
  siRNA target sequence for 1110021H02Rik (NM_025388.1,343-361).
ggtacatccacgatttcct

SEQ ID NO: 620288 - DNA, 19 bp, Mus musculus
  siRNA target sequence for 1110021H02Rik (NM_025388.1,371-389).
gttcgacatcgagtttgaa

SEQ ID NO: 620289 - DNA, 19 bp, Mus musculus
  siRNA target sequence for 1110021H02Rik (NM_025388.1,374-392).
cgacatcgagtttgaaatt

SEQ ID NO: 620290 - DNA, 19 bp, Mus musculus
  siRNA target sequence for 1110021H02Rik (NM_025388.1,383-401).
gtttgaaattcctatcaca

SEQ ID NO: 620291 - DNA, 19 bp, Mus musculus
  siRNA target sequence for 1110021H02Rik (NM_025388.1,511-529).
ccaggaatgtgcctaagtt

SEQ ID NO: 620292 - DNA, 19 bp, Mus musculus
  siRNA target sequence for 1110021H02Rik (NM_025388.1,512-530).
caggaatgtgcctaagttt

SEQ ID NO: 620293 - DNA, 19 bp, Mus musculus
  siRNA target sequence for 1110021H02Rik (NM_025388.1,612-630).
cagcacaaagaaaaatgca

SEQ ID NO: 620294 - DNA, 19 bp, Mus musculus
  siRNA target sequence for 2310012M18Rik (NM_027315.2,557-575).
ctgacctgtgtaaactcta

SEQ ID NO: 620295 - DNA, 19 bp, Mus musculus
  siRNA target sequence for 2310012M18Rik (NM_027315.2,697-715).
ctagatcactatgaaatga

SEQ ID NO: 620296 - DNA, 19 bp, Mus musculus
  siRNA target sequence for 2310012M18Rik (NM_027315.2,779-797).
ccatcctagagaaaattaa

SEQ ID NO: 620297 - DNA, 19 bp, Mus musculus
  siRNA target sequence for 2310012M18Rik (NM_027315.2,805-823).
cagaggcaagattacttaa

SEQ ID NO: 620298 - DNA, 19 bp, Mus musculus
  siRNA target sequence for 2310012M18Rik (NM_027315.2,807-825).
gaggcaagattacttaaat

SEQ ID NO: 620299 - DNA, 19 bp, Mus musculus
  siRNA target sequence for 2310012M18Rik (NM_027315.2,810-828).
gcaagattacttaaatggt

SEQ ID NO: 620300 - DNA, 19 bp, Mus musculus
  siRNA target sequence for 2310012M18Rik (NM_027315.2,888-906).
ccgatcacagagtttcaaa

SEQ ID NO: 620301 - DNA, 19 bp, Mus musculus
  siRNA target sequence for 2310012M18Rik (NM_027315.2,899-917).
gtttcaaaggcggaaacta

SEQ ID NO: 620302 - DNA, 19 bp, Mus musculus
  siRNA target sequence for 2310012M18Rik (NM_027315.2,920-938).
cagtcgaactcgtgaatga

SEQ ID NO: 620303 - DNA, 19 bp, Mus musculus
  siRNA target sequence for 2310012M18Rik (NM_027315.2,922-940).
gtcgaactcgtgaatgaca

SEQ ID NO: 620304 - DNA, 19 bp, Mus musculus
  siRNA target sequence for 2310012M18Rik (NM_027315.2,986-1004).
gcgctttgcacaatgatct

SEQ ID NO: 620305 - DNA, 19 bp, Mus musculus
  siRNA target sequence for 2310012M18Rik (NM_027315.2,987-1005).
cgctttgcacaatgatctt

SEQ ID NO: 620306 - DNA, 19 bp, Mus musculus
  siRNA target sequence for 2310012M18Rik (NM_027315.2,1042-1060).
ctacttaacttctccttta

SEQ ID NO: 620307 - DNA, 19 bp, Mus musculus
  siRNA target sequence for 2310012M18Rik (NM_027315.2,1190-1208).
ccatagagtccgtgatcat

SEQ ID NO: 620308 - DNA, 19 bp, Mus musculus
  siRNA target sequence for 2310012M18Rik (NM_027315.2,1258-1276).
gccaacaaatctcagtata

SEQ ID NO: 620309 - DNA, 19 bp, Mus musculus
  siRNA target sequence for 2310012M18Rik (NM_027315.2,1288-1306).
gcacagcagtcctacaagt

SEQ ID NO: 620310 - DNA, 19 bp, Mus musculus
  siRNA target sequence for 3010021M21Rik (NM_180600.1,1173-1191).
cactttgtatggaacttct

SEQ ID NO: 620311 - DNA, 19 bp, Mus musculus
  siRNA target sequence for 3010021M21Rik (NM_180600.1,1221-1239).
caatagaatctgtcatcat

SEQ ID NO: 620312 - DNA, 19 bp, Mus musculus
  siRNA target sequence for 3010021M21Rik (NM_180600.1,1322-1340).
caacagtcctataattcca

SEQ ID NO: 620313 - DNA, 19 bp, Mus musculus
  siRNA target sequence for 3010021M21Rik (NM_180600.1,1327-1345).
gtcctataattccattgta

SEQ ID NO: 620314 - DNA, 19 bp, Mus musculus
  siRNA target sequence for Attp (NM_016855.1,69-87).
ggctgctaggcaagtacaa

SEQ ID NO: 620315 - DNA, 19 bp, Mus musculus
  siRNA target sequence for Attp (NM_016855.1,71-89).
ctgctaggcaagtacaagt

SEQ ID NO: 620316 - DNA, 19 bp, Mus musculus
  siRNA target sequence for Attp (NM_016855.1,74-92).
ctaggcaagtacaagttca

SEQ ID NO: 620317 - DNA, 19 bp, Mus musculus
  siRNA target sequence for Attp (NM_016855.1,155-173).
gtggacacctatgttttca

SEQ ID NO: 620318 - DNA, 19 bp, Mus musculus
  siRNA target sequence for Attp (NM_016855.1,157-175).
ggacacctatgttttcaaa

SEQ ID NO: 620319 - DNA, 19 bp, Mus musculus
  siRNA target sequence for Attp (NM_016855.1,163-181).
ctatgttttcaaagataca

SEQ ID NO: 620320 - DNA, 19 bp, Mus musculus
  siRNA target sequence for Attp (NM_016855.1,199-217).
gaatttcaccggtacaatt

SEQ ID NO: 620321 - DNA, 19 bp, Mus musculus
  siRNA target sequence for Attp (NM_016855.1,353-371).
gccaaaggcagaatatact

SEQ ID NO: 620322 - DNA, 19 bp, Mus musculus
  siRNA target sequence for Attp (NM_016855.1,407-425).
gccatcgttggattaatta

SEQ ID NO: 620323 - DNA, 19 bp, Mus musculus
  siRNA target sequence for Attp (NM_016855.1,408-426).
ccatcgttggattaattaa

SEQ ID NO: 620324 - DNA, 19 bp, Mus musculus
  siRNA target sequence for Attp (NM_016855.1,474-492).
cataccgtcgtccaatgaa

SEQ ID NO: 620325 - DNA, 19 bp, Mus musculus
  siRNA target sequence for Attp (NM_016855.1,511-529).
ctggcctatatcacaaaaa

SEQ ID NO: 620326 - DNA, 19 bp, Mus musculus
  siRNA target sequence for Attp (NM_016855.1,514-532).
gcctatatcacaaaaatca

SEQ ID NO: 620327 - DNA, 19 bp, Mus musculus
  siRNA target sequence for Attp (NM_016855.1,524-542).
caaaaatcacggaaggttt

SEQ ID NO: 620328 - DNA, 19 bp, Mus musculus
  siRNA target sequence for Bre (NM_144541.1,140-158).
gatgctacaaactgtttga

SEQ ID NO: 620329 - DNA, 19 bp, Mus musculus
  siRNA target sequence for Bre (NM_144541.1,143-161).
gctacaaactgtttgagaa

SEQ ID NO: 620330 - DNA, 19 bp, Mus musculus
  siRNA target sequence for Bre (NM_144541.1,238-256).
cgctggggagacgttaaaa

SEQ ID NO: 620331 - DNA, 19 bp, Mus musculus
  siRNA target sequence for Bre (NM_144541.1,454-472).
gagctcgcgcctcatgttt

SEQ ID NO: 620332 - DNA, 19 bp, Mus musculus
  siRNA target sequence for Bre (NM_144541.1,456-474).
gctcgcgcctcatgtttga

SEQ ID NO: 620333 - DNA, 19 bp, Mus musculus
  siRNA target sequence for Bre (NM_144541.1,459-477).
cgcgcctcatgtttgagta

SEQ ID NO: 620334 - DNA, 19 bp, Mus musculus
  siRNA target sequence for Bre (NM_144541.1,498-516).
ctcagtatggagagaacat

SEQ ID NO: 620335 - DNA, 19 bp, Mus musculus
  siRNA target sequence for Bre (NM_144541.1,544-562).
ctggactggtgaattttca

SEQ ID NO: 620336 - DNA, 19 bp, Mus musculus
  siRNA target sequence for Bre (NM_144541.1,561-579).
cagctcgttttctattgaa

SEQ ID NO: 620337 - DNA, 19 bp, Mus musculus
  siRNA target sequence for Bre (NM_144541.1,563-581).
gctcgttttctattgaagt

SEQ ID NO: 620338 - DNA, 19 bp, Mus musculus
  siRNA target sequence for Bre (NM_144541.1,564-582).
ctcgttttctattgaagtt

SEQ ID NO: 620339 - DNA, 19 bp, Mus musculus
  siRNA target sequence for Bre (NM_144541.1,613-631).
ccttctcaaggatgtaaat

SEQ ID NO: 620340 - DNA, 19 bp, Mus musculus
  siRNA target sequence for Bre (NM_144541.1,775-793).
cggaggaggatgtctcatt

SEQ ID NO: 620341 - DNA, 19 bp, Mus musculus
  siRNA target sequence for Bre (NM_144541.1,783-801).
gatgtctcattgattatgt

SEQ ID NO: 620342 - DNA, 19 bp, Mus musculus
  siRNA target sequence for Bre (NM_144541.1,825-843).
ccaacaaggtacagtatgt

SEQ ID NO: 620343 - DNA, 19 bp, Mus musculus
  siRNA target sequence for Bre (NM_144541.1,842-860).
gtgattcaaggctatcaca

SEQ ID NO: 620344 - DNA, 19 bp, Mus musculus
  siRNA target sequence for Bre (NM_144541.1,844-862).
gattcaaggctatcacaaa

SEQ ID NO: 620345 - DNA, 19 bp, Mus musculus
  siRNA target sequence for Bre (NM_144541.1,930-948).
gcttcacaaaacttactct

SEQ ID NO: 620346 - DNA, 19 bp, Mus musculus
  siRNA target sequence for Bre (NM_144541.1,1019-1037).
cctacgctcacatttcagt

SEQ ID NO: 620347 - DNA, 19 bp, Mus musculus
  siRNA target sequence for Bre (NM_144541.1,1034-1052).
cagtcagtctatcacttta

SEQ ID NO: 620348 - DNA, 19 bp, Mus musculus
  siRNA target sequence for Bre (NM_144541.1,1038-1056).
cagtctatcactttaccaa

SEQ ID NO: 620349 - DNA, 19 bp, Mus musculus
  siRNA target sequence for Bre (NM_144541.1,1102-1120).
ccccagatgggatggaaat

SEQ ID NO: 620350 - DNA, 19 bp, Mus musculus
  siRNA target sequence for Cdc34 (NM_177613.2,558-576).
gtggaaccccacacagaat

SEQ ID NO: 620351 - DNA, 19 bp, Mus musculus
  siRNA target sequence for Cdc34 (NM_177613.2,560-578).
ggaaccccacacagaatgt

SEQ ID NO: 620352 - DNA, 19 bp, Mus musculus
  siRNA target sequence for E330021D16Rik (NM_175527.2,572-590).
cagacagttcgcttagtca

SEQ ID NO: 620353 - DNA, 19 bp, Mus musculus
  siRNA target sequence for E330021D16Rik (NM_175527.2,742-760).
ctggacgactcggattatt

SEQ ID NO: 620354 - DNA, 19 bp, Mus musculus
  siRNA target sequence for E330021D16Rik (NM_175527.2,744-762).
ggacgactcggattattat

SEQ ID NO: 620355 - DNA, 19 bp, Mus musculus
  siRNA target sequence for E330021D16Rik (NM_175527.2,748-766).
gactcggattattatgaca

SEQ ID NO: 620356 - DNA, 19 bp, Mus musculus
  siRNA target sequence for E330021D16Rik (NM_175527.2,778-796).
gagacgagtagtgagaaaa

SEQ ID NO: 620357 - DNA, 19 bp, Mus musculus
  siRNA target sequence for E330021D16Rik (NM_175527.2,812-830).
ggcttgagaaagaggattt

SEQ ID NO: 620358 - DNA, 19 bp, Mus musculus
  siRNA target sequence for E330021D16Rik (NM_175527.2,894-912).
ctcagtgtgtgcttcagat

SEQ ID NO: 620359 - DNA, 19 bp, Mus musculus
  siRNA target sequence for E330021D16Rik (NM_175527.2,957-975).
caaatcagggactttttca

SEQ ID NO: 620360 - DNA, 19 bp, Mus musculus
  siRNA target sequence for E330021D16Rik (NM_175527.2,1056-1074).
ccttcagcgcttgaaacaa

SEQ ID NO: 620361 - DNA, 19 bp, Mus musculus
  siRNA target sequence for E330021D16Rik (NM_175527.2,1244-1262).
ccatagaatcggtcatctt

SEQ ID NO: 620362 - DNA, 19 bp, Mus musculus
  siRNA target sequence for E330021D16Rik (NM_175527.2,1339-1357).
gctagacgggtctataaat

SEQ ID NO: 620363 - DNA, 19 bp, Mus musculus
  siRNA target sequence for E330021D16Rik (NM_175527.2,1343-1361).
gacgggtctataaatccat

SEQ ID NO: 620364 - DNA, 19 bp, Mus musculus
  siRNA target sequence for Ubl1 (NM_009460.1,149-167).
gaggacttaggcgataaga

SEQ ID NO: 620365 - DNA, 19 bp, Mus musculus
  siRNA target sequence for 5730469D23Rik (NM_172712.2,69-87).
gcctgcggtgcaagtaaaa

SEQ ID NO: 620366 - DNA, 19 bp, Mus musculus
  siRNA target sequence for 5730469D23Rik (NM_172712.2,70-88).
cctgcggtgcaagtaaaaa

SEQ ID NO: 620367 - DNA, 19 bp, Mus musculus
  siRNA target sequence for 5730469D23Rik (NM_172712.2,71-89).
ctgcggtgcaagtaaaaat

SEQ ID NO: 620368 - DNA, 19 bp, Mus musculus
  siRNA target sequence for 5730469D23Rik (NM_172712.2,74-92).
cggtgcaagtaaaaattta

SEQ ID NO: 620369 - DNA, 19 bp, Mus musculus
  siRNA target sequence for 5730469D23Rik (NM_172712.2,97-115).
ccatgacaacagaatcttt

SEQ ID NO: 620370 - DNA, 19 bp, Mus musculus
  siRNA target sequence for 5730469D23Rik (NM_172712.2,103-121).
caacagaatctttggaaat

SEQ ID NO: 620371 - DNA, 19 bp, Mus musculus
  siRNA target sequence for 5730469D23Rik (NM_172712.2,116-134).
ggaaatcgatgatggatta

SEQ ID NO: 620372 - DNA, 19 bp, Mus musculus
  siRNA target sequence for 5730469D23Rik (NM_172712.2,117-135).
gaaatcgatgatggattat

SEQ ID NO: 620373 - DNA, 19 bp, Mus musculus
  siRNA target sequence for 5730469D23Rik (NM_172712.2,122-140).
cgatgatggattatacagt

SEQ ID NO: 620374 - DNA, 19 bp, Mus musculus
  siRNA target sequence for 5730469D23Rik (NM_172712.2,137-155).
cagtcgccagagatatgtt

SEQ ID NO: 620375 - DNA, 19 bp, Mus musculus
  siRNA target sequence for 5730469D23Rik (NM_172712.2,139-157).
gtcgccagagatatgttct

SEQ ID NO: 620376 - DNA, 19 bp, Mus musculus
  siRNA target sequence for 5730469D23Rik (NM_172712.2,188-206).
gtcctgtgtcttcttaagt

SEQ ID NO: 620377 - DNA, 19 bp, Mus musculus
  siRNA target sequence for 5730469D23Rik (NM_172712.2,219-237).
cttggagtggaaattgcaa

SEQ ID NO: 620378 - DNA, 19 bp, Mus musculus
  siRNA target sequence for 5730469D23Rik (NM_172712.2,257-275).
gattaaggccctaacaatt

SEQ ID NO: 620379 - DNA, 19 bp, Mus musculus
  siRNA target sequence for 5730469D23Rik (NM_172712.2,263-281).
ggccctaacaattcatgat

SEQ ID NO: 620380 - DNA, 19 bp, Mus musculus
  siRNA target sequence for 5730469D23Rik (NM_172712.2,264-282).
gccctaacaattcatgata

SEQ ID NO: 620381 - DNA, 19 bp, Mus musculus
  siRNA target sequence for 5730469D23Rik (NM_172712.2,267-285).
ctaacaattcatgatacaa

SEQ ID NO: 620382 - DNA, 19 bp, Mus musculus
  siRNA target sequence for 5730469D23Rik (NM_172712.2,301-319).
gggatctagggaccaattt

SEQ ID NO: 620383 - DNA, 19 bp, Mus musculus
  siRNA target sequence for 5730469D23Rik (NM_172712.2,328-346).
gtgaagatgatgttgttaa

SEQ ID NO: 620384 - DNA, 19 bp, Mus musculus
  siRNA target sequence for 5730469D23Rik (NM_172712.2,375-393).
catcgtattgcagaactaa

SEQ ID NO: 620385 - DNA, 19 bp, Mus musculus
  siRNA target sequence for 5730469D23Rik (NM_172712.2,444-462).
gacctctctttcttagaaa

SEQ ID NO: 620386 - DNA, 19 bp, Mus musculus
  siRNA target sequence for 5730469D23Rik (NM_172712.2,451-469).
ctttcttagaaaaatatca

SEQ ID NO: 620387 - DNA, 19 bp, Mus musculus
  siRNA target sequence for 5730469D23Rik (NM_172712.2,474-492).
gtagtattgactgaaataa

SEQ ID NO: 620388 - DNA, 19 bp, Mus musculus
  siRNA target sequence for 5730469D23Rik (NM_172712.2,534-552).
cattgccctccaattaagt

SEQ ID NO: 620389 - DNA, 19 bp, Mus musculus
  siRNA target sequence for 5730469D23Rik (NM_172712.2,538-556).
gccctccaattaagttcat

SEQ ID NO: 620390 - DNA, 19 bp, Mus musculus
  siRNA target sequence for 5730469D23Rik (NM_172712.2,539-557).
ccctccaattaagttcatt

SEQ ID NO: 620391 - DNA, 19 bp, Mus musculus
  siRNA target sequence for 5730469D23Rik (NM_172712.2,551-569).
gttcattagtgcagatgta

SEQ ID NO: 620392 - DNA, 19 bp, Mus musculus
  siRNA target sequence for 5730469D23Rik (NM_172712.2,559-577).
gtgcagatgtacatggaat

SEQ ID NO: 620393 - DNA, 19 bp, Mus musculus
  siRNA target sequence for 5730469D23Rik (NM_172712.2,561-579).
gcagatgtacatggaattt

SEQ ID NO: 620394 - DNA, 19 bp, Mus musculus
  siRNA target sequence for 5730469D23Rik (NM_172712.2,564-582).
gatgtacatggaatttggt

SEQ ID NO: 620395 - DNA, 19 bp, Mus musculus
  siRNA target sequence for 5730469D23Rik (NM_172712.2,580-598).
ggtccaggttgttttgtga

SEQ ID NO: 620396 - DNA, 19 bp, Mus musculus
  siRNA target sequence for 5730469D23Rik (NM_172712.2,581-599).
gtccaggttgttttgtgat

SEQ ID NO: 620397 - DNA, 19 bp, Mus musculus
  siRNA target sequence for 5730469D23Rik (NM_172712.2,661-679).
caaacataacgcaagctaa

SEQ ID NO: 620398 - DNA, 19 bp, Mus musculus
  siRNA target sequence for 5730469D23Rik (NM_172712.2,665-683).
cataacgcaagctaatcca

SEQ ID NO: 620399 - DNA, 19 bp, Mus musculus
  siRNA target sequence for 5730469D23Rik (NM_172712.2,675-693).
gctaatccaggtattgtca

SEQ ID NO: 620400 - DNA, 19 bp, Mus musculus
  siRNA target sequence for 5730469D23Rik (NM_172712.2,798-816).
gtcatatcaccattttcct

SEQ ID NO: 620401 - DNA, 19 bp, Mus musculus
  siRNA target sequence for 5730469D23Rik (NM_172712.2,818-836).
cagcattggtgatactaca

SEQ ID NO: 620402 - DNA, 19 bp, Mus musculus
  siRNA target sequence for 5730469D23Rik (NM_172712.2,820-838).
gcattggtgatactacaaa

SEQ ID NO: 620403 - DNA, 19 bp, Mus musculus
  siRNA target sequence for 5730469D23Rik (NM_172712.2,872-890).
gcaggtgaagactcctaaa

SEQ ID NO: 620404 - DNA, 19 bp, Mus musculus
  siRNA target sequence for 5730469D23Rik (NM_172712.2,934-952).
ggtgccttattgcagattt

SEQ ID NO: 620405 - DNA, 19 bp, Mus musculus
  siRNA target sequence for 5730469D23Rik (NM_172712.2,935-953).
gtgccttattgcagatttt

SEQ ID NO: 620406 - DNA, 19 bp, Mus musculus
  siRNA target sequence for 5730469D23Rik (NM_172712.2,956-974).
caaacctgaggcaccttta

SEQ ID NO: 620407 - DNA, 19 bp, Mus musculus
  siRNA target sequence for 5730469D23Rik (NM_172712.2,961-979).
ctgaggcacctttagagat

SEQ ID NO: 620408 - DNA, 19 bp, Mus musculus
  siRNA target sequence for 5730469D23Rik (NM_172712.2,965-983).
ggcacctttagagattcat

SEQ ID NO: 620409 - DNA, 19 bp, Mus musculus
  siRNA target sequence for 5730469D23Rik (NM_172712.2,967-985).
cacctttagagattcatct

SEQ ID NO: 620410 - DNA, 19 bp, Mus musculus
  siRNA target sequence for 5730469D23Rik (NM_172712.2,977-995).
gattcatctcgctatgctt

SEQ ID NO: 620411 - DNA, 19 bp, Mus musculus
  siRNA target sequence for 5730469D23Rik (NM_172712.2,1025-1043).
ccgtaagccaaatatcaga

SEQ ID NO: 620412 - DNA, 19 bp, Mus musculus
  siRNA target sequence for 5730469D23Rik (NM_172712.2,1026-1044).
cgtaagccaaatatcagat

SEQ ID NO: 620413 - DNA, 19 bp, Mus musculus
  siRNA target sequence for 5730469D23Rik (NM_172712.2,1050-1068).
caggattcagatgaactat

SEQ ID NO: 620414 - DNA, 19 bp, Mus musculus
  siRNA target sequence for 5730469D23Rik (NM_172712.2,1053-1071).
gattcagatgaactattga

SEQ ID NO: 620415 - DNA, 19 bp, Mus musculus
  siRNA target sequence for 5730469D23Rik (NM_172712.2,1073-1091).
gctaacagtatctataaat

SEQ ID NO: 620416 - DNA, 19 bp, Mus musculus
  siRNA target sequence for 5730469D23Rik (NM_172712.2,1218-1236).
gctgtgacggggaagttct

SEQ ID NO: 620417 - DNA, 19 bp, Mus musculus
  siRNA target sequence for 5730469D23Rik (NM_172712.2,1237-1255).
cgcccttgtgtcaatggtt

SEQ ID NO: 620418 - DNA, 19 bp, Mus musculus
  siRNA target sequence for 5730469D23Rik (NM_172712.2,1297-1315).
ctgggcatgaagagtttct

SEQ ID NO: 620419 - DNA, 19 bp, Mus musculus
  siRNA target sequence for 5730469D23Rik (NM_172712.2,1314-1332).
ctcccacgaggagatagat

SEQ ID NO: 620420 - DNA, 19 bp, Mus musculus
  siRNA target sequence for 5730469D23Rik (NM_172712.2,1316-1334).
cccacgaggagatagatat

SEQ ID NO: 620421 - DNA, 19 bp, Mus musculus
  siRNA target sequence for 5730469D23Rik (NM_172712.2,1318-1336).
cacgaggagatagatatga

SEQ ID NO: 620422 - DNA, 19 bp, Mus musculus
  siRNA target sequence for 5730469D23Rik (NM_172712.2,1377-1395).
ctacaaaatttgaatatct

SEQ ID NO: 620423 - DNA, 19 bp, Mus musculus
  siRNA target sequence for 5730469D23Rik (NM_172712.2,1414-1432).
ccataggctgtgaaatgtt

SEQ ID NO: 620424 - DNA, 19 bp, Mus musculus
  siRNA target sequence for 5730469D23Rik (NM_172712.2,1419-1437).
ggctgtgaaatgttaaaaa

SEQ ID NO: 620425 - DNA, 19 bp, Mus musculus
  siRNA target sequence for 5730469D23Rik (NM_172712.2,1472-1490).
gaaaggaatggtaacagtt

SEQ ID NO: 620426 - DNA, 19 bp, Mus musculus
  siRNA target sequence for 5730469D23Rik (NM_172712.2,1477-1495).
gaatggtaacagttacaga

SEQ ID NO: 620427 - DNA, 19 bp, Mus musculus
  siRNA target sequence for 5730469D23Rik (NM_172712.2,1492-1510).
cagatcctgacttgataga

SEQ ID NO: 620428 - DNA, 19 bp, Mus musculus
  siRNA target sequence for 5730469D23Rik (NM_172712.2,1494-1512).
gatcctgacttgatagaaa

SEQ ID NO: 620429 - DNA, 19 bp, Mus musculus
  siRNA target sequence for 5730469D23Rik (NM_172712.2,1505-1523).
gatagaaaaatccaattta

SEQ ID NO: 620430 - DNA, 19 bp, Mus musculus
  siRNA target sequence for 5730469D23Rik (NM_172712.2,1538-1556).
gtttcgtcctcatcacata

SEQ ID NO: 620431 - DNA, 19 bp, Mus musculus
  siRNA target sequence for 5730469D23Rik (NM_172712.2,1559-1577).
gaaacctaaaagctatact

SEQ ID NO: 620432 - DNA, 19 bp, Mus musculus
  siRNA target sequence for 5730469D23Rik (NM_172712.2,1581-1599).
gctgaagcaactctgaaaa

SEQ ID NO: 620433 - DNA, 19 bp, Mus musculus
  siRNA target sequence for 5730469D23Rik (NM_172712.2,1642-1660).
gtccagccactgagagtat

SEQ ID NO: 620434 - DNA, 19 bp, Mus musculus
  siRNA target sequence for 5730469D23Rik (NM_172712.2,1645-1663).
cagccactgagagtatata

SEQ ID NO: 620435 - DNA, 19 bp, Mus musculus
  siRNA target sequence for 5730469D23Rik (NM_172712.2,1647-1665).
gccactgagagtatataca

SEQ ID NO: 620436 - DNA, 19 bp, Mus musculus
  siRNA target sequence for 5730469D23Rik (NM_172712.2,1679-1697).
cactaagcaagatatcatt

SEQ ID NO: 620437 - DNA, 19 bp, Mus musculus
  siRNA target sequence for 5730469D23Rik (NM_172712.2,1685-1703).
gcaagatatcattattaca

SEQ ID NO: 620438 - DNA, 19 bp, Mus musculus
  siRNA target sequence for 5730469D23Rik (NM_172712.2,1737-1755).
gacagtcgctgtttagcaa

SEQ ID NO: 620439 - DNA, 19 bp, Mus musculus
  siRNA target sequence for 5730469D23Rik (NM_172712.2,1739-1757).
cagtcgctgtttagcaaat

SEQ ID NO: 620440 - DNA, 19 bp, Mus musculus
  siRNA target sequence for 5730469D23Rik (NM_172712.2,1758-1776).
ctacggcctctcttagatt

SEQ ID NO: 620441 - DNA, 19 bp, Mus musculus
  siRNA target sequence for 5730469D23Rik (NM_172712.2,1789-1807).
gcaccaagggacatactga

SEQ ID NO: 620442 - DNA, 19 bp, Mus musculus
  siRNA target sequence for 5730469D23Rik (NM_172712.2,1798-1816).
gacatactgaaattatcgt

SEQ ID NO: 620443 - DNA, 19 bp, Mus musculus
  siRNA target sequence for 5730469D23Rik (NM_172712.2,1814-1832).
cgtacctcaattaactgaa

SEQ ID NO: 620444 - DNA, 19 bp, Mus musculus
  siRNA target sequence for 5730469D23Rik (NM_172712.2,1815-1833).
gtacctcaattaactgaat

SEQ ID NO: 620445 - DNA, 19 bp, Mus musculus
  siRNA target sequence for 5730469D23Rik (NM_172712.2,1857-1875).
cccgaagaggaaataccat

SEQ ID NO: 620446 - DNA, 19 bp, Mus musculus
  siRNA target sequence for 5730469D23Rik (NM_172712.2,1896-1914).
ccagcagctatcgaacata

SEQ ID NO: 620447 - DNA, 19 bp, Mus musculus
  siRNA target sequence for 5730469D23Rik (NM_172712.2,1899-1917).
gcagctatcgaacatacta

SEQ ID NO: 620448 - DNA, 19 bp, Mus musculus
  siRNA target sequence for 5730469D23Rik (NM_172712.2,1900-1918).
cagctatcgaacatactat

SEQ ID NO: 620449 - DNA, 19 bp, Mus musculus
  siRNA target sequence for 5730469D23Rik (NM_172712.2,1924-1942).
gggcaagagacaagtttga

SEQ ID NO: 620450 - DNA, 19 bp, Mus musculus
  siRNA target sequence for 5730469D23Rik (NM_172712.2,2055-2073).
caagttattaagctactta

SEQ ID NO: 620451 - DNA, 19 bp, Mus musculus
  siRNA target sequence for 5730469D23Rik (NM_172712.2,2092-2110).
ggtcccagtgtgtagagtt

SEQ ID NO: 620452 - DNA, 19 bp, Mus musculus
  siRNA target sequence for 5730469D23Rik (NM_172712.2,2093-2111).
gtcccagtgtgtagagtta

SEQ ID NO: 620453 - DNA, 19 bp, Mus musculus
  siRNA target sequence for 5730469D23Rik (NM_172712.2,2097-2115).
cagtgtgtagagttagcaa

SEQ ID NO: 620454 - DNA, 19 bp, Mus musculus
  siRNA target sequence for 5730469D23Rik (NM_172712.2,2106-2124).
gagttagcaagactaaagt

SEQ ID NO: 620455 - DNA, 19 bp, Mus musculus
  siRNA target sequence for 5730469D23Rik (NM_172712.2,2173-2191).
ctcttgagacaagactaaa

SEQ ID NO: 620456 - DNA, 19 bp, Mus musculus
  siRNA target sequence for 5730469D23Rik (NM_172712.2,2227-2245).
cgccttctccaataaaatt

SEQ ID NO: 620457 - DNA, 19 bp, Mus musculus
  siRNA target sequence for 5730469D23Rik (NM_172712.2,2280-2298).
cagagtgctgcaaaactat

SEQ ID NO: 620458 - DNA, 19 bp, Mus musculus
  siRNA target sequence for 5730469D23Rik (NM_172712.2,2282-2300).
gagtgctgcaaaactatat

SEQ ID NO: 620459 - DNA, 19 bp, Mus musculus
  siRNA target sequence for 5730469D23Rik (NM_172712.2,2295-2313).
ctatatgctacagtatatt

SEQ ID NO: 620460 - DNA, 19 bp, Mus musculus
  siRNA target sequence for 5730469D23Rik (NM_172712.2,2326-2344).
cagaaaaggacttatcagt

SEQ ID NO: 620461 - DNA, 19 bp, Mus musculus
  siRNA target sequence for 5730469D23Rik (NM_172712.2,2351-2369).
cctcatggacattctttca

SEQ ID NO: 620462 - DNA, 19 bp, Mus musculus
  siRNA target sequence for 5730469D23Rik (NM_172712.2,2357-2375).
ggacattctttcagaagtt

SEQ ID NO: 620463 - DNA, 19 bp, Mus musculus
  siRNA target sequence for 5730469D23Rik (NM_172712.2,2399-2417).
caacaaggttgttcaaaca

SEQ ID NO: 620464 - DNA, 19 bp, Mus musculus
  siRNA target sequence for 5730469D23Rik (NM_172712.2,2518-2536).
ccaaaagtgaccttcagat

SEQ ID NO: 620465 - DNA, 19 bp, Mus musculus
  siRNA target sequence for 5730469D23Rik (NM_172712.2,2568-2586).
cgtaatggacacatagatt

SEQ ID NO: 620466 - DNA, 19 bp, Mus musculus
  siRNA target sequence for 5730469D23Rik (NM_172712.2,2602-2620).
ccaaccttcgagccaaaat

SEQ ID NO: 620467 - DNA, 19 bp, Mus musculus
  siRNA target sequence for 5730469D23Rik (NM_172712.2,2607-2625).
cttcgagccaaaatgtata

SEQ ID NO: 620468 - DNA, 19 bp, Mus musculus
  siRNA target sequence for 5730469D23Rik (NM_172712.2,2610-2628).
cgagccaaaatgtatagca

SEQ ID NO: 620469 - DNA, 19 bp, Mus musculus
  siRNA target sequence for 5730469D23Rik (NM_172712.2,2634-2652).
ccagctgaccgttttaaaa

SEQ ID NO: 620470 - DNA, 19 bp, Mus musculus
  siRNA target sequence for 5730469D23Rik (NM_172712.2,2637-2655).
gctgaccgttttaaaacta

SEQ ID NO: 620471 - DNA, 19 bp, Mus musculus
  siRNA target sequence for 5730469D23Rik (NM_172712.2,2638-2656).
ctgaccgttttaaaactaa

SEQ ID NO: 620472 - DNA, 19 bp, Mus musculus
  siRNA target sequence for 5730469D23Rik (NM_172712.2,2658-2676).
cgcatagctggtaaaatta

SEQ ID NO: 620473 - DNA, 19 bp, Mus musculus
  siRNA target sequence for 5730469D23Rik (NM_172712.2,2754-2772).
cccttcgacgcttacaaaa

SEQ ID NO: 620474 - DNA, 19 bp, Mus musculus
  siRNA target sequence for 5730469D23Rik (NM_172712.2,2759-2777).
cgacgcttacaaaaactgt

SEQ ID NO: 620475 - DNA, 19 bp, Mus musculus
  siRNA target sequence for 5730469D23Rik (NM_172712.2,2790-2808).
gccattccaataatagtgt

SEQ ID NO: 620476 - DNA, 19 bp, Mus musculus
  siRNA target sequence for 5730469D23Rik (NM_172712.2,2791-2809).
ccattccaataatagtgtt

SEQ ID NO: 620477 - DNA, 19 bp, Mus musculus
  siRNA target sequence for 5730469D23Rik (NM_172712.2,2898-2916).
gatttcaccctctcagatt

SEQ ID NO: 620478 - DNA, 19 bp, Mus musculus
  siRNA target sequence for 5730469D23Rik (NM_172712.2,2969-2987).
gggagtcaaaatgctttat

SEQ ID NO: 620479 - DNA, 19 bp, Mus musculus
  siRNA target sequence for 5730469D23Rik (NM_172712.2,2971-2989).
gagtcaaaatgctttatgt

SEQ ID NO: 620480 - DNA, 19 bp, Mus musculus
  siRNA target sequence for 5730469D23Rik (NM_172712.2,3009-3027).
gcaaaaaggctaaagttaa

SEQ ID NO: 620481 - DNA, 19 bp, Mus musculus
  siRNA target sequence for 5730469D23Rik (NM_172712.2,3023-3041).
gttaacaatgcacaaactt

SEQ ID NO: 620482 - DNA, 19 bp, Mus musculus
  siRNA target sequence for 5730469D23Rik (NM_172712.2,3062-3080).
gaaatatgtggatcttact

SEQ ID NO: 620483 - DNA, 19 bp, Mus musculus
  siRNA target sequence for 5730469D23Rik (NM_172712.2,3143-3161).
cttcagtcatgacactaat

SEQ ID NO: 620484 - DNA, 19 bp, Mus musculus
  siRNA target sequence for Ube1c (NM_011666.1,82-100).
ggtcgctggaaccatgtaa

SEQ ID NO: 620485 - DNA, 19 bp, Mus musculus
  siRNA target sequence for Ube1c (NM_011666.1,83-101).
gtcgctggaaccatgtaaa

SEQ ID NO: 620486 - DNA, 19 bp, Mus musculus
  siRNA target sequence for Ube1c (NM_011666.1,85-103).
cgctggaaccatgtaaaga

SEQ ID NO: 620487 - DNA, 19 bp, Mus musculus
  siRNA target sequence for Ube1c (NM_011666.1,86-104).
gctggaaccatgtaaagaa

SEQ ID NO: 620488 - DNA, 19 bp, Mus musculus
  siRNA target sequence for Ube1c (NM_011666.1,129-147).
cacacaccccgatttcgaa

SEQ ID NO: 620489 - DNA, 19 bp, Mus musculus
  siRNA target sequence for Ube1c (NM_011666.1,165-183).
ccagttcttgttagataca

SEQ ID NO: 620490 - DNA, 19 bp, Mus musculus
  siRNA target sequence for Ube1c (NM_011666.1,174-192).
gttagatacatgtaaagtt

SEQ ID NO: 620491 - DNA, 19 bp, Mus musculus
  siRNA target sequence for Ube1c (NM_011666.1,240-258).
ggcattatctggttttaga

SEQ ID NO: 620492 - DNA, 19 bp, Mus musculus
  siRNA target sequence for Ube1c (NM_011666.1,242-260).
cattatctggttttagaca

SEQ ID NO: 620493 - DNA, 19 bp, Mus musculus
  siRNA target sequence for Ube1c (NM_011666.1,400-418).
gtaccacatttcaacaaga

SEQ ID NO: 620494 - DNA, 19 bp, Mus musculus
  siRNA target sequence for Ube1c (NM_011666.1,424-442).
gattttaacgacactttct

SEQ ID NO: 620495 - DNA, 19 bp, Mus musculus
  siRNA target sequence for Ube1c (NM_011666.1,435-453).
cactttctaccgacaattt

SEQ ID NO: 620496 - DNA, 19 bp, Mus musculus
  siRNA target sequence for Ube1c (NM_011666.1,437-455).
ctttctaccgacaatttca

SEQ ID NO: 620497 - DNA, 19 bp, Mus musculus
  siRNA target sequence for Ube1c (NM_011666.1,444-462).
ccgacaatttcatatcatt

SEQ ID NO: 620498 - DNA, 19 bp, Mus musculus
  siRNA target sequence for Ube1c (NM_011666.1,546-564).
ggatccaagctccattgta

SEQ ID NO: 620499 - DNA, 19 bp, Mus musculus
  siRNA target sequence for Ube1c (NM_011666.1,578-596).
gggggacagaaggctttaa

SEQ ID NO: 620500 - DNA, 19 bp, Mus musculus
  siRNA target sequence for Ube1c (NM_011666.1,579-597).
ggggacagaaggctttaaa

SEQ ID NO: 620501 - DNA, 19 bp, Mus musculus
  siRNA target sequence for Ube1c (NM_011666.1,598-616).
gggaatgcccgagtgattt

SEQ ID NO: 620502 - DNA, 19 bp, Mus musculus
  siRNA target sequence for Ube1c (NM_011666.1,599-617).
ggaatgcccgagtgatttt

SEQ ID NO: 620503 - DNA, 19 bp, Mus musculus
  siRNA target sequence for Ube1c (NM_011666.1,623-641).
gaatgaccgcttgtattga

SEQ ID NO: 620504 - DNA, 19 bp, Mus musculus
  siRNA target sequence for Ube1c (NM_011666.1,640-658).
gagtgcactctggaacttt

SEQ ID NO: 620505 - DNA, 19 bp, Mus musculus
  siRNA target sequence for Ube1c (NM_011666.1,707-725).
ggctcccagaacactgtat

SEQ ID NO: 620506 - DNA, 19 bp, Mus musculus
  siRNA target sequence for Ube1c (NM_011666.1,835-853).
gagagagcatcacaatata

SEQ ID NO: 620507 - DNA, 19 bp, Mus musculus
  siRNA target sequence for Ube1c (NM_011666.1,837-855).
gagagcatcacaatataat

SEQ ID NO: 620508 - DNA, 19 bp, Mus musculus
  siRNA target sequence for Ube1c (NM_011666.1,839-857).
gagcatcacaatataatat

SEQ ID NO: 620509 - DNA, 19 bp, Mus musculus
  siRNA target sequence for Ube1c (NM_011666.1,879-897).
cactcaaggggtggtaaaa

SEQ ID NO: 620510 - DNA, 19 bp, Mus musculus
  siRNA target sequence for Ube1c (NM_011666.1,887-905).
gggtggtaaaacgaatcat

SEQ ID NO: 620511 - DNA, 19 bp, Mus musculus
  siRNA target sequence for Ube1c (NM_011666.1,955-973).
gaggttttcaagatagcta

SEQ ID NO: 620512 - DNA, 19 bp, Mus musculus
  siRNA target sequence for Ube1c (NM_011666.1,979-997).
gcgtacattccccttaata

SEQ ID NO: 620513 - DNA, 19 bp, Mus musculus
  siRNA target sequence for Ube1c (NM_011666.1,980-998).
cgtacattccccttaataa

SEQ ID NO: 620514 - DNA, 19 bp, Mus musculus
  siRNA target sequence for Ube1c (NM_011666.1,999-1017).
ctacctggtattcaatgat

SEQ ID NO: 620515 - DNA, 19 bp, Mus musculus
  siRNA target sequence for Ube1c (NM_011666.1,1002-1020).
cctggtattcaatgatgta

SEQ ID NO: 620516 - DNA, 19 bp, Mus musculus
  siRNA target sequence for Ube1c (NM_011666.1,1005-1023).
ggtattcaatgatgtagat

SEQ ID NO: 620517 - DNA, 19 bp, Mus musculus
  siRNA target sequence for Ube1c (NM_011666.1,1018-1036).
gtagatgggctgtacactt

SEQ ID NO: 620518 - DNA, 19 bp, Mus musculus
  siRNA target sequence for Ube1c (NM_011666.1,1029-1047).
gtacacttacacgtttgaa

SEQ ID NO: 620519 - DNA, 19 bp, Mus musculus
  siRNA target sequence for Ube1c (NM_011666.1,1080-1098).
ccaacttcctcaaaacatt

SEQ ID NO: 620520 - DNA, 19 bp, Mus musculus
  siRNA target sequence for Ube1c (NM_011666.1,1101-1119).
gttttccccatcagctaaa

SEQ ID NO: 620521 - DNA, 19 bp, Mus musculus
  siRNA target sequence for Ube1c (NM_011666.1,1106-1124).
ccccatcagctaaactaca

SEQ ID NO: 620522 - DNA, 19 bp, Mus musculus
  siRNA target sequence for Ube1c (NM_011666.1,1126-1144).
gaggtcttagactacctaa

SEQ ID NO: 620523 - DNA, 19 bp, Mus musculus
  siRNA target sequence for Ube1c (NM_011666.1,1167-1185).
gaagtctccggctatcaca

SEQ ID NO: 620524 - DNA, 19 bp, Mus musculus
  siRNA target sequence for Ube1c (NM_011666.1,1176-1194).
ggctatcacagccacatta

SEQ ID NO: 620525 - DNA, 19 bp, Mus musculus
  siRNA target sequence for Ube1c (NM_011666.1,1178-1196).
ctatcacagccacattaga

SEQ ID NO: 620526 - DNA, 19 bp, Mus musculus
  siRNA target sequence for Ube1c (NM_011666.1,1203-1221).
gaacaggacactttactta

SEQ ID NO: 620527 - DNA, 19 bp, Mus musculus
  siRNA target sequence for Ube1c (NM_011666.1,1213-1231).
ctttacttacagtcagtaa

SEQ ID NO: 620528 - DNA, 19 bp, Mus musculus
  siRNA target sequence for Ube1c (NM_011666.1,1224-1242).
gtcagtaacgtctattgaa

SEQ ID NO: 620529 - DNA, 19 bp, Mus musculus
  siRNA target sequence for Ube1c (NM_011666.1,1226-1244).
cagtaacgtctattgaaga

SEQ ID NO: 620530 - DNA, 19 bp, Mus musculus
  siRNA target sequence for Ube1c (NM_011666.1,1246-1264).
cgaaccaggcccaatcttt

SEQ ID NO: 620531 - DNA, 19 bp, Mus musculus
  siRNA target sequence for Ube1c (NM_011666.1,1335-1353).
gactgtactattcaaactt

SEQ ID NO: 620532 - DNA, 19 bp, Mus musculus
  siRNA target sequence for Uble1b (NM_016682.1,145-163).
cccacatcgacctgattga

SEQ ID NO: 620533 - DNA, 19 bp, Mus musculus
  siRNA target sequence for Uble1b (NM_016682.1,146-164).
ccacatcgacctgattgat

SEQ ID NO: 620534 - DNA, 19 bp, Mus musculus
  siRNA target sequence for Uble1b (NM_016682.1,196-214).
ggcagttcttgtttcaaaa

SEQ ID NO: 620535 - DNA, 19 bp, Mus musculus
  siRNA target sequence for Uble1b (NM_016682.1,329-347).
ggagttttttcgacagttt

SEQ ID NO: 620536 - DNA, 19 bp, Mus musculus
  siRNA target sequence for Uble1b (NM_016682.1,330-348).
gagttttttcgacagttta

SEQ ID NO: 620537 - DNA, 19 bp, Mus musculus
  siRNA target sequence for Uble1b (NM_016682.1,359-377).
gaatgcattagataacaga

SEQ ID NO: 620538 - DNA, 19 bp, Mus musculus
  siRNA target sequence for Uble1b (NM_016682.1,381-399).
gcacgaaaccacgtgaata

SEQ ID NO: 620539 - DNA, 19 bp, Mus musculus
  siRNA target sequence for Uble1b (NM_016682.1,384-402).
cgaaaccacgtgaatagga

SEQ ID NO: 620540 - DNA, 19 bp, Mus musculus
  siRNA target sequence for Uble1b (NM_016682.1,385-403).
gaaaccacgtgaataggat

SEQ ID NO: 620541 - DNA, 19 bp, Mus musculus
  siRNA target sequence for Uble1b (NM_016682.1,456-474).
ggacaggtgaccactatca

SEQ ID NO: 620542 - DNA, 19 bp, Mus musculus
  siRNA target sequence for Uble1b (NM_016682.1,457-475).
gacaggtgaccactatcaa

SEQ ID NO: 620543 - DNA, 19 bp, Mus musculus
  siRNA target sequence for Uble1b (NM_016682.1,483-501).
gtgactgagtgttacgaat

SEQ ID NO: 620544 - DNA, 19 bp, Mus musculus
  siRNA target sequence for Uble1b (NM_016682.1,487-505).
ctgagtgttacgaatgtca

SEQ ID NO: 620545 - DNA, 19 bp, Mus musculus
  siRNA target sequence for Uble1b (NM_016682.1,527-545).
gttccctggctgtacgatt

SEQ ID NO: 620546 - DNA, 19 bp, Mus musculus
  siRNA target sequence for Uble1b (NM_016682.1,559-577).
cagaacctatccattgcat

SEQ ID NO: 620547 - DNA, 19 bp, Mus musculus
  siRNA target sequence for Uble1b (NM_016682.1,564-582).
cctatccattgcatcgtat

SEQ ID NO: 620548 - DNA, 19 bp, Mus musculus
  siRNA target sequence for Uble1b (NM_016682.1,694-712).
gagctcgagcatctaatga

SEQ ID NO: 620549 - DNA, 19 bp, Mus musculus
  siRNA target sequence for Uble1b (NM_016682.1,697-715).
ctcgagcatctaatgaaga

SEQ ID NO: 620550 - DNA, 19 bp, Mus musculus
  siRNA target sequence for Uble1b (NM_016682.1,717-735).
ggagacattaagcgtattt

SEQ ID NO: 620551 - DNA, 19 bp, Mus musculus
  siRNA target sequence for Uble1b (NM_016682.1,720-738).
gacattaagcgtatttcca

SEQ ID NO: 620552 - DNA, 19 bp, Mus musculus
  siRNA target sequence for Uble1b (NM_016682.1,728-746).
gcgtatttccactaaggaa

SEQ ID NO: 620553 - DNA, 19 bp, Mus musculus
  siRNA target sequence for Uble1b (NM_016682.1,749-767).
ggctaagtcaactggatat

SEQ ID NO: 620554 - DNA, 19 bp, Mus musculus
  siRNA target sequence for Uble1b (NM_016682.1,751-769).
ctaagtcaactggatatga

SEQ ID NO: 620555 - DNA, 19 bp, Mus musculus
  siRNA target sequence for Uble1b (NM_016682.1,768-786).
gatccagttaaacttttta

SEQ ID NO: 620556 - DNA, 19 bp, Mus musculus
  siRNA target sequence for Uble1b (NM_016682.1,771-789).
ccagttaaactttttacca

SEQ ID NO: 620557 - DNA, 19 bp, Mus musculus
  siRNA target sequence for Uble1b (NM_016682.1,897-915).
gccaatgccgatcaacaaa

SEQ ID NO: 620558 - DNA, 19 bp, Mus musculus
  siRNA target sequence for Uble1b (NM_016682.1,898-916).
ccaatgccgatcaacaaaa

SEQ ID NO: 620559 - DNA, 19 bp, Mus musculus
  siRNA target sequence for Uble1b (NM_016682.1,899-917).
caatgccgatcaacaaaat

SEQ ID NO: 620560 - DNA, 19 bp, Mus musculus
  siRNA target sequence for Uble1b (NM_016682.1,920-938).
gccccagttgggtttgaaa

SEQ ID NO: 620561 - DNA, 19 bp, Mus musculus
  siRNA target sequence for Uble1b (NM_016682.1,945-963).
caggttctggatgtaaaga

SEQ ID NO: 620562 - DNA, 19 bp, Mus musculus
  siRNA target sequence for Uble1b (NM_016682.1,962-980).
gagctatgcgagtctgttt

SEQ ID NO: 620563 - DNA, 19 bp, Mus musculus
  siRNA target sequence for Uble1b (NM_016682.1,965-983).
ctatgcgagtctgttttca

SEQ ID NO: 620564 - DNA, 19 bp, Mus musculus
  siRNA target sequence for Uble1b (NM_016682.1,995-1013).
gactctgcgagtccattta

SEQ ID NO: 620565 - DNA, 19 bp, Mus musculus
  siRNA target sequence for Uble1b (NM_016682.1,1055-1073).
cgacccacctgcaatggat

SEQ ID NO: 620566 - DNA, 19 bp, Mus musculus
  siRNA target sequence for Uble1b (NM_016682.1,1056-1074).
gacccacctgcaatggatt

SEQ ID NO: 620567 - DNA, 19 bp, Mus musculus
  siRNA target sequence for Uble1b (NM_016682.1,1103-1121).
gcacattttcagcatgaat

SEQ ID NO: 620568 - DNA, 19 bp, Mus musculus
  siRNA target sequence for Uble1b (NM_016682.1,1132-1150).
ggtttgatataaaatcaat

SEQ ID NO: 620569 - DNA, 19 bp, Mus musculus
  siRNA target sequence for Uble1b (NM_016682.1,1157-1175).
gaatatcattcctgctata

SEQ ID NO: 620570 - DNA, 19 bp, Mus musculus
  siRNA target sequence for Uble1b (NM_016682.1,1167-1185).
cctgctatagctactacta

SEQ ID NO: 620571 - DNA, 19 bp, Mus musculus
  siRNA target sequence for Uble1b (NM_016682.1,1205-1223).
gatagtgttggaaggatta

SEQ ID NO: 620572 - DNA, 19 bp, Mus musculus
  siRNA target sequence for Uble1b (NM_016682.1,1226-1244).
gattttatctggaaaaata

SEQ ID NO: 620573 - DNA, 19 bp, Mus musculus
  siRNA target sequence for Uble1b (NM_016682.1,1245-1263).
gaccagtgtagaactattt

SEQ ID NO: 620574 - DNA, 19 bp, Mus musculus
  siRNA target sequence for Uble1b (NM_016682.1,1321-1339).
ctcccaacaccaactgtta

SEQ ID NO: 620575 - DNA, 19 bp, Mus musculus
  siRNA target sequence for Uble1b (NM_016682.1,1325-1343).
caacaccaactgttacgtt

SEQ ID NO: 620576 - DNA, 19 bp, Mus musculus
  siRNA target sequence for Uble1b (NM_016682.1,1372-1390).
ggctgaatgtccacaaagt

SEQ ID NO: 620577 - DNA, 19 bp, Mus musculus
  siRNA target sequence for Uble1b (NM_016682.1,1442-1460).
ggcaccagatgtccaaatt

SEQ ID NO: 620578 - DNA, 19 bp, Mus musculus
  siRNA target sequence for Uble1b (NM_016682.1,1599-1617).
ctgatcaacattcttcata

SEQ ID NO: 620579 - DNA, 19 bp, Mus musculus
  siRNA target sequence for Uble1b (NM_016682.1,1601-1619).
gatcaacattcttcatagt

SEQ ID NO: 620580 - DNA, 19 bp, Mus musculus
  siRNA target sequence for Uble1b (NM_016682.1,1797-1815).
gaaggcccttcaaatagca

SEQ ID NO: 620581 - DNA, 19 bp, Mus musculus
  siRNA target sequence for Uble1b (NM_016682.1,1917-1935).
gacgtcatagcgttagact

SEQ ID NO: 620582 - DNA, 19 bp, Mus musculus
  siRNA target sequence for 4930579E17Rik (NM_178629.2,409-427).
ccgctcatcagctacactt

SEQ ID NO: 620583 - DNA, 19 bp, Mus musculus
  siRNA target sequence for 4930579E17Rik (NM_178629.2,410-428).
cgctcatcagctacacttt

SEQ ID NO: 620584 - DNA, 19 bp, Mus musculus
  siRNA target sequence for 4930579E17Rik (NM_178629.2,449-467).
gctggataaaggacattgt

SEQ ID NO: 620585 - DNA, 19 bp, Mus musculus
  siRNA target sequence for 4930579E17Rik (NM_178629.2,556-574).
gccacgcgccacagatcaa

SEQ ID NO: 620586 - DNA, 19 bp, Mus musculus
  siRNA target sequence for 4930579E17Rik (NM_178629.2,557-575).
ccacgcgccacagatcaat

SEQ ID NO: 620587 - DNA, 19 bp, Mus musculus
  siRNA target sequence for 4930579E17Rik (NM_178629.2,558-576).
cacgcgccacagatcaatt

SEQ ID NO: 620588 - DNA, 19 bp, Mus musculus
  siRNA target sequence for 4930579E17Rik (NM_178629.2,560-578).
cgcgccacagatcaatttt

SEQ ID NO: 620589 - DNA, 19 bp, Mus musculus
  siRNA target sequence for 4930579E17Rik (NM_178629.2,562-580).
cgccacagatcaattttca

SEQ ID NO: 620590 - DNA, 19 bp, Mus musculus
  siRNA target sequence for 4930579E17Rik (NM_178629.2,564-582).
ccacagatcaattttcaat

SEQ ID NO: 620591 - DNA, 19 bp, Mus musculus
  siRNA target sequence for 4930579E17Rik (NM_178629.2,611-629).
cagactgtaaactcactaa

SEQ ID NO: 620592 - DNA, 19 bp, Mus musculus
  siRNA target sequence for 4930579E17Rik (NM_178629.2,654-672).
cgccgtgagaccttttgtt

SEQ ID NO: 620593 - DNA, 19 bp, Mus musculus
  siRNA target sequence for 4930579E17Rik (NM_178629.2,664-682).
ccttttgttgaggaagata

SEQ ID NO: 620594 - DNA, 19 bp, Mus musculus
  siRNA target sequence for 4930579E17Rik (NM_178629.2,684-702).
cctcctgagagttgtctta

SEQ ID NO: 620595 - DNA, 19 bp, Mus musculus
  siRNA target sequence for 4930579E17Rik (NM_178629.2,720-738).
ggcagcaggagcaattcga

SEQ ID NO: 620596 - DNA, 19 bp, Mus musculus
  siRNA target sequence for 4930579E17Rik (NM_178629.2,765-783).
ctctgctgatggtcactta

SEQ ID NO: 620597 - DNA, 19 bp, Mus musculus
  siRNA target sequence for 4930579E17Rik (NM_178629.2,793-811).
ctggaccgtgccaagcata

SEQ ID NO: 620598 - DNA, 19 bp, Mus musculus
  siRNA target sequence for 4930579E17Rik (NM_178629.2,840-858).
ctttgatgtcatctatgaa

SEQ ID NO: 620599 - DNA, 19 bp, Mus musculus
  siRNA target sequence for 4930579E17Rik (NM_178629.2,861-879).
gtatcagcagtgtagtgat

SEQ ID NO: 620600 - DNA, 19 bp, Mus musculus
  siRNA target sequence for 4930579E17Rik (NM_178629.2,868-886).
cagtgtagtgattttgact

SEQ ID NO: 620601 - DNA, 19 bp, Mus musculus
  siRNA target sequence for 4930579E17Rik (NM_178629.2,912-930).
gttggctctaaaatactgt

SEQ ID NO: 620602 - DNA, 19 bp, Mus musculus
  siRNA target sequence for 4930579E17Rik (NM_178629.2,1001-1019).
cagctgaagccatgattaa

SEQ ID NO: 620603 - DNA, 19 bp, Mus musculus
  siRNA target sequence for 4930579E17Rik (NM_178629.2,1047-1065).
ggtcatgaacacaaaagat

SEQ ID NO: 620604 - DNA, 19 bp, Mus musculus
  siRNA target sequence for 4930579E17Rik (NM_178629.2,1096-1114).
gcgctaagaaaggaactaa

SEQ ID NO: 620605 - DNA, 19 bp, Mus musculus
  siRNA target sequence for 4930579E17Rik (NM_178629.2,1097-1115).
cgctaagaaaggaactaaa

SEQ ID NO: 620606 - DNA, 19 bp, Mus musculus
  siRNA target sequence for 4930579E17Rik (NM_178629.2,1111-1129).
ctaaatgtaagcattcaaa

SEQ ID NO: 620607 - DNA, 19 bp, Mus musculus
  siRNA target sequence for 4930579E17Rik (NM_178629.2,1139-1157).
ggatcaagtgtcacacatt

SEQ ID NO: 620608 - DNA, 19 bp, Mus musculus
  siRNA target sequence for 4930579E17Rik (NM_178629.2,1140-1158).
gatcaagtgtcacacattt

SEQ ID NO: 620609 - DNA, 19 bp, Mus musculus
  siRNA target sequence for 4933433B15Rik (NM_026341.1,85-103).
gtctctgtattgtagaaca

SEQ ID NO: 620610 - DNA, 19 bp, Mus musculus
  siRNA target sequence for 4933433B15Rik (NM_026341.1,154-172).
cactaaggcacgatactta

SEQ ID NO: 620611 - DNA, 19 bp, Mus musculus
  siRNA target sequence for 4933433B15Rik (NM_026341.1,156-174).
ctaaggcacgatacttatt

SEQ ID NO: 620612 - DNA, 19 bp, Mus musculus
  siRNA target sequence for 4933433B15Rik (NM_026341.1,333-351).
gacaggattcgcaaagaat

SEQ ID NO: 620613 - DNA, 19 bp, Mus musculus
  siRNA target sequence for 4933433B15Rik (NM_026341.1,441-459).
cctccttgccgaaatctga

SEQ ID NO: 620614 - DNA, 19 bp, Mus musculus
  siRNA target sequence for 4933433B15Rik (NM_026341.1,444-462).
ccttgccgaaatctgaaat

SEQ ID NO: 620615 - DNA, 19 bp, Mus musculus
  siRNA target sequence for 4933433B15Rik (NM_026341.1,448-466).
gccgaaatctgaaatggaa

SEQ ID NO: 620616 - DNA, 19 bp, Mus musculus
  siRNA target sequence for 4933433B15Rik (NM_026341.1,648-666).
ccagtaaaatcatctatta

SEQ ID NO: 620617 - DNA, 19 bp, Mus musculus
  siRNA target sequence for 4933433B15Rik (NM_026341.1,771-789).
gtgacataggtgaaagtgt

SEQ ID NO: 620618 - DNA, 19 bp, Mus musculus
  siRNA target sequence for 4933433B15Rik (NM_026341.1,876-894).
ccaatagctcactcatgat

SEQ ID NO: 620619 - DNA, 19 bp, Mus musculus
  siRNA target sequence for Nans (NM_053179.2,174-192).
ccgactgcgctaagtttca

SEQ ID NO: 620620 - DNA, 19 bp, Mus musculus
  siRNA target sequence for Nans (NM_053179.2,176-194).
gactgcgctaagtttcaga

SEQ ID NO: 620621 - DNA, 19 bp, Mus musculus
  siRNA target sequence for Nans (NM_053179.2,226-244).
ggccctggagagaccatat

SEQ ID NO: 620622 - DNA, 19 bp, Mus musculus
  siRNA target sequence for Nans (NM_053179.2,227-245).
gccctggagagaccatata

SEQ ID NO: 620623 - DNA, 19 bp, Mus musculus
  siRNA target sequence for Nans (NM_053179.2,239-257).
ccatatacttcgaagcatt

SEQ ID NO: 620624 - DNA, 19 bp, Mus musculus
  siRNA target sequence for Nans (NM_053179.2,391-409).
gtttctgcacgaactgaat

SEQ ID NO: 620625 - DNA, 19 bp, Mus musculus
  siRNA target sequence for Nans (NM_053179.2,428-446).
ggatctggggacactaaca

SEQ ID NO: 620626 - DNA, 19 bp, Mus musculus
  siRNA target sequence for Nans (NM_053179.2,498-516).
ccagcgggatgcagtcaat

SEQ ID NO: 620627 - DNA, 19 bp, Mus musculus
  siRNA target sequence for Nans (NM_053179.2,522-540).
ccatgaagcaagtctatca

SEQ ID NO: 620628 - DNA, 19 bp, Mus musculus
  siRNA target sequence for Nans (NM_053179.2,624-642).
gcgtcatctcggaatacca

SEQ ID NO: 620629 - DNA, 19 bp, Mus musculus
  siRNA target sequence for Nans (NM_053179.2,685-703).
gacgggcatcgccatatct

SEQ ID NO: 620630 - DNA, 19 bp, Mus musculus
  siRNA target sequence for Nans (NM_053179.2,687-705).
cgggcatcgccatatctgt

SEQ ID NO: 620631 - DNA, 19 bp, Mus musculus
  siRNA target sequence for Nans (NM_053179.2,730-748).
ggtgttggaacgtcacata

SEQ ID NO: 620632 - DNA, 19 bp, Mus musculus
  siRNA target sequence for Nans (NM_053179.2,731-749).
gtgttggaacgtcacataa

SEQ ID NO: 620633 - DNA, 19 bp, Mus musculus
  siRNA target sequence for Nans (NM_053179.2,914-932).
gtggtagccaaagtgaaaa

SEQ ID NO: 620634 - DNA, 19 bp, Mus musculus
  siRNA target sequence for Nans (NM_053179.2,998-1016).
cctcctgaagacatcttca

SEQ ID NO: 620635 - DNA, 19 bp, Mus musculus
  siRNA target sequence for Nans (NM_053179.2,999-1017).
ctcctgaagacatcttcaa

SEQ ID NO: 620636 - DNA, 19 bp, Mus musculus
  siRNA target sequence for Nans (NM_053179.2,1033-1051).
ggtgctggtcactatcgaa

SEQ ID NO: 620637 - DNA, 19 bp, Mus musculus
  siRNA target sequence for Nans (NM_053179.2,1039-1057).
ggtcactatcgaagaagat

SEQ ID NO: 620638 - DNA, 19 bp, Mus musculus
  siRNA target sequence for 0610012H03Rik (NM_028747.1,85-103).
cggctgctgagaaatatct

SEQ ID NO: 620639 - DNA, 19 bp, Mus musculus
  siRNA target sequence for 0610012H03Rik (NM_028747.1,88-106).
ctgctgagaaatatctgtt

SEQ ID NO: 620640 - DNA, 19 bp, Mus musculus
  siRNA target sequence for 0610012H03Rik (NM_028747.1,90-108).
gctgagaaatatctgttta

SEQ ID NO: 620641 - DNA, 19 bp, Mus musculus
  siRNA target sequence for 0610012H03Rik (NM_028747.1,130-148).
gacgcagcaatcactatga

SEQ ID NO: 620642 - DNA, 19 bp, Mus musculus
  siRNA target sequence for 0610012H03Rik (NM_028747.1,132-150).
cgcagcaatcactatgatt

SEQ ID NO: 620643 - DNA, 19 bp, Mus musculus
  siRNA target sequence for 0610012H03Rik (NM_028747.1,161-179).
ggaggcttcttcctagaaa

SEQ ID NO: 620644 - DNA, 19 bp, Mus musculus
  siRNA target sequence for 0610012H03Rik (NM_028747.1,181-199).
gccgctcgttccgtatcta

SEQ ID NO: 620645 - DNA, 19 bp, Mus musculus
  siRNA target sequence for 0610012H03Rik (NM_028747.1,183-201).
cgctcgttccgtatctaca

SEQ ID NO: 620646 - DNA, 19 bp, Mus musculus
  siRNA target sequence for 0610012H03Rik (NM_028747.1,184-202).
gctcgttccgtatctacat

SEQ ID NO: 620647 - DNA, 19 bp, Mus musculus
  siRNA target sequence for 0610012H03Rik (NM_028747.1,275-293).
cccggtggcaggacaatga

SEQ ID NO: 620648 - DNA, 19 bp, Mus musculus
  siRNA target sequence for 0610012H03Rik (NM_028747.1,283-301).
caggacaatgaccagaata

SEQ ID NO: 620649 - DNA, 19 bp, Mus musculus
  siRNA target sequence for 0610012H03Rik (NM_028747.1,522-540).
ggctctgtttcctcctaaa

SEQ ID NO: 620650 - DNA, 19 bp, Mus musculus
  siRNA target sequence for 0610012H03Rik (NM_028747.1,594-612).
cgcaggccaccctaaatta

SEQ ID NO: 620651 - DNA, 19 bp, Mus musculus
  siRNA target sequence for 0610012H03Rik (NM_028747.1,603-621).
ccctaaattagcacagttt

SEQ ID NO: 620652 - DNA, 19 bp, Mus musculus
  siRNA target sequence for 0610012H03Rik (NM_028747.1,644-662).
ggtcttcagtccatgtctt

SEQ ID NO: 620653 - DNA, 19 bp, Mus musculus
  siRNA target sequence for 0610012H03Rik (NM_028747.1,645-663).
gtcttcagtccatgtcttt

SEQ ID NO: 620654 - DNA, 19 bp, Mus musculus
  siRNA target sequence for 0610039C21Rik (NM_025802.1,271-289).
gaagcaggtgccaacatta

SEQ ID NO: 620655 - DNA, 19 bp, Mus musculus
  siRNA target sequence for 0610039C21Rik (NM_025802.1,275-293).
caggtgccaacattattga

SEQ ID NO: 620656 - DNA, 19 bp, Mus musculus
  siRNA target sequence for 0610039C21Rik (NM_025802.1,360-378).
catccgtggctgtctacta

SEQ ID NO: 620657 - DNA, 19 bp, Mus musculus
  siRNA target sequence for 0610039C21Rik (NM_025802.1,450-468).
cggagagaacgtcatcata

SEQ ID NO: 620658 - DNA, 19 bp, Mus musculus
  siRNA target sequence for 0610039C21Rik (NM_025802.1,460-478).
gtcatcatatcccacttta

SEQ ID NO: 620659 - DNA, 19 bp, Mus musculus
  siRNA target sequence for 0610039C21Rik (NM_025802.1,581-599).
gcggcatttcagacaactt

SEQ ID NO: 620660 - DNA, 19 bp, Mus musculus
  siRNA target sequence for 0710007A14Rik (NM_023343.1,149-167).
gacgacccgtgctctttga

SEQ ID NO: 620661 - DNA, 19 bp, Mus musculus
  siRNA target sequence for 0710007A14Rik (NM_023343.1,200-218).
gctctgggggacctttact

SEQ ID NO: 620662 - DNA, 19 bp, Mus musculus
  siRNA target sequence for 0710007A14Rik (NM_023343.1,203-221).
ctgggggacctttactctt

SEQ ID NO: 620663 - DNA, 19 bp, Mus musculus
  siRNA target sequence for 0710007A14Rik (NM_023343.1,451-469).
catgtcatcctgaacgata

SEQ ID NO: 620664 - DNA, 19 bp, Mus musculus
  siRNA target sequence for 0710007A14Rik (NM_023343.1,454-472).
gtcatcctgaacgatatca

SEQ ID NO: 620665 - DNA, 19 bp, Mus musculus
  siRNA target sequence for 0710007A14Rik (NM_023343.1,480-498).
gtgtaatcctccatcatct

SEQ ID NO: 620666 - DNA, 19 bp, Mus musculus
  siRNA target sequence for 0710007A14Rik (NM_023343.1,499-517).
ctcattactcgggtttcat

SEQ ID NO: 620667 - DNA, 19 bp, Mus musculus
  siRNA target sequence for 0710007A14Rik (NM_023343.1,751-769).
gtggacaacatcctgtata

SEQ ID NO: 620668 - DNA, 19 bp, Mus musculus
  siRNA target sequence for 0710007A14Rik (NM_023343.1,771-789).
cgccaaccttggagatagt

SEQ ID NO: 620669 - DNA, 19 bp, Mus musculus
  siRNA target sequence for 0710007A14Rik (NM_023343.1,792-810).
ggcaatcctgtgtcgatat

SEQ ID NO: 620670 - DNA, 19 bp, Mus musculus
  siRNA target sequence for 0710007A14Rik (NM_023343.1,793-811).
gcaatcctgtgtcgatata

SEQ ID NO: 620671 - DNA, 19 bp, Mus musculus
  siRNA target sequence for 0710007A14Rik (NM_023343.1,794-812).
caatcctgtgtcgatataa

SEQ ID NO: 620672 - DNA, 19 bp, Mus musculus
  siRNA target sequence for 0710007A14Rik (NM_023343.1,806-824).
gatataatgaggaaagtca

SEQ ID NO: 620673 - DNA, 19 bp, Mus musculus
  siRNA target sequence for 0710007A14Rik (NM_023343.1,855-873).
gcacaacccaactcagtat

SEQ ID NO: 620674 - DNA, 19 bp, Mus musculus
  siRNA target sequence for 0710007A14Rik (NM_023343.1,877-895).
gagcgcatgaggatacaga

SEQ ID NO: 620675 - DNA, 19 bp, Mus musculus
  siRNA target sequence for 0710007A14Rik (NM_023343.1,879-897).
gcgcatgaggatacagaaa

SEQ ID NO: 620676 - DNA, 19 bp, Mus musculus
  siRNA target sequence for 0710007A14Rik (NM_023343.1,939-957).
ggaggtatcgcgttccatt

SEQ ID NO: 620677 - DNA, 19 bp, Mus musculus
  siRNA target sequence for 0710007A14Rik (NM_023343.1,1048-1066).
gcttgcgacgggcttttca

SEQ ID NO: 620678 - DNA, 19 bp, Mus musculus
  siRNA target sequence for 0710007A14Rik (NM_023343.1,1049-1067).
cttgcgacgggcttttcaa

SEQ ID NO: 620679 - DNA, 19 bp, Mus musculus
  siRNA target sequence for 1110003P22Rik (NM_144522.2,967-985).
gcgcaagacggacaagtat

SEQ ID NO: 620680 - DNA, 19 bp, Mus musculus
  siRNA target sequence for 1110003P22Rik (NM_144522.2,1070-1088).
ctggagatgttcagtaact

SEQ ID NO: 620681 - DNA, 19 bp, Mus musculus
  siRNA target sequence for 1110003P22Rik (NM_144522.2,1107-1125).
ggcgtttccagaaggtaaa

SEQ ID NO: 620682 - DNA, 19 bp, Mus musculus
  siRNA target sequence for 1110003P22Rik (NM_144522.2,1170-1188).
cctggcagtacctgtctaa

SEQ ID NO: 620683 - DNA, 19 bp, Mus musculus
  siRNA target sequence for 1110003P22Rik (NM_144522.2,1175-1193).
cagtacctgtctaatagca

SEQ ID NO: 620684 - DNA, 19 bp, Mus musculus
  siRNA target sequence for 1110003P22Rik (NM_144522.2,1260-1278).
ggctcgatgtgattgagaa

SEQ ID NO: 620685 - DNA, 19 bp, Mus musculus
  siRNA target sequence for 1110003P22Rik (NM_144522.2,1528-1546).
gttggatggagaaatcttt

SEQ ID NO: 620686 - DNA, 19 bp, Mus musculus
  siRNA target sequence for 1110003P22Rik (NM_144522.2,1723-1741).
ccgagtggctctggtttta

SEQ ID NO: 620687 - DNA, 19 bp, Mus musculus
  siRNA target sequence for 1110003P22Rik (NM_144522.2,1779-1797).
catgtcaaggcatgtatga

SEQ ID NO: 620688 - DNA, 19 bp, Mus musculus
  siRNA target sequence for 1110025H10Rik (NM_023480.1,208-226).
gagggctcaccggtgttaa

SEQ ID NO: 620689 - DNA, 19 bp, Mus musculus
  siRNA target sequence for 1110025H10Rik (NM_023480.1,406-424).
ctggctaagagctttacgt

SEQ ID NO: 620690 - DNA, 19 bp, Mus musculus
  siRNA target sequence for 1110025H10Rik (NM_023480.1,519-537).
ggagggcaaaacatcatct

SEQ ID NO: 620691 - DNA, 19 bp, Mus musculus
  siRNA target sequence for 1110025H10Rik (NM_023480.1,566-584).
gctatgtttctaagataat

SEQ ID NO: 620692 - DNA, 19 bp, Mus musculus
  siRNA target sequence for 1110025H10Rik (NM_023480.1,595-613).
gaaggagatcttatcttga

SEQ ID NO: 620693 - DNA, 19 bp, Mus musculus
  siRNA target sequence for 1110025H10Rik (NM_023480.1,627-645).
gggagttgggccaattaaa

SEQ ID NO: 620694 - DNA, 19 bp, Mus musculus
  siRNA target sequence for 1110025H10Rik (NM_023480.1,629-647).
gagttgggccaattaaaga

SEQ ID NO: 620695 - DNA, 19 bp, Mus musculus
  siRNA target sequence for 1110025H10Rik (NM_023480.1,673-691).
gatggggtggttagtatga

SEQ ID NO: 620696 - DNA, 19 bp, Mus musculus
  siRNA target sequence for 1110025H10Rik (NM_023480.1,693-711).
gttcaaggtgaaaagatca

SEQ ID NO: 620697 - DNA, 19 bp, Mus musculus
  siRNA target sequence for 1110033O09Rik (NM_026812.1,59-77).
ccgacagcagcgacgaaaa

SEQ ID NO: 620698 - DNA, 19 bp, Mus musculus
  siRNA target sequence for 1110033O09Rik (NM_026812.1,114-132).
ggtgtagcccggatcctaa

SEQ ID NO: 620699 - DNA, 19 bp, Mus musculus
  siRNA target sequence for 1110033O09Rik (NM_026812.1,140-158).
ggctggaatcactgatatt

SEQ ID NO: 620700 - DNA, 19 bp, Mus musculus
  siRNA target sequence for 1110033O09Rik (NM_026812.1,179-197).
gctccatgacacagtagaa

SEQ ID NO: 620701 - DNA, 19 bp, Mus musculus
  siRNA target sequence for 1110033O09Rik (NM_026812.1,362-380).
ggcagacaagctatacaat

SEQ ID NO: 620702 - DNA, 19 bp, Mus musculus
  siRNA target sequence for 1110033O09Rik (NM_026812.1,449-467).
ggcagcccaggtggtaaaa

SEQ ID NO: 620703 - DNA, 19 bp, Mus musculus
  siRNA target sequence for 1110038F21Rik (NM_025416.1,308-326).
gacagatttgaaagattat

SEQ ID NO: 620704 - DNA, 19 bp, Mus musculus
  siRNA target sequence for 1110038F21Rik (NM_025416.1,339-357).
gccagctggtgttcagata

SEQ ID NO: 620705 - DNA, 19 bp, Mus musculus
  siRNA target sequence for 1110038F21Rik (NM_025416.1,340-358).
ccagctggtgttcagatat

SEQ ID NO: 620706 - DNA, 19 bp, Mus musculus
  siRNA target sequence for 1110038F21Rik (NM_025416.1,359-377).
gctgagtctgtatcaagaa

SEQ ID NO: 620707 - DNA, 19 bp, Mus musculus
  siRNA target sequence for 1110038F21Rik (NM_025416.1,397-415).
caggcggctggattaaact

SEQ ID NO: 620708 - DNA, 19 bp, Mus musculus
  siRNA target sequence for 1110038F21Rik (NM_025416.1,492-510).
caggactggcgcctcttta

SEQ ID NO: 620709 - DNA, 19 bp, Mus musculus
  siRNA target sequence for 1110038F21Rik (NM_025416.1,506-524).
ctttaccaggtccatacaa

SEQ ID NO: 620710 - DNA, 19 bp, Mus musculus
  siRNA target sequence for 1110038F21Rik (NM_025416.1,532-550).
gacaaggctatgaatacgt

SEQ ID NO: 620711 - DNA, 19 bp, Mus musculus
  siRNA target sequence for 1110038F21Rik (NM_025416.1,538-556).
gctatgaatacgtcatctt

SEQ ID NO: 620712 - DNA, 19 bp, Mus musculus
  siRNA target sequence for 1110038F21Rik (NM_025416.1,539-557).
ctatgaatacgtcatcttt

SEQ ID NO: 620713 - DNA, 19 bp, Mus musculus
  siRNA target sequence for 1110038F21Rik (NM_025416.1,659-677).
ggatgagacatattcgaaa

SEQ ID NO: 620714 - DNA, 19 bp, Mus musculus
  siRNA target sequence for 1110038F21Rik (NM_025416.1,660-678).
gatgagacatattcgaaaa

SEQ ID NO: 620715 - DNA, 19 bp, Mus musculus
  siRNA target sequence for 1110038F21Rik (NM_025416.1,696-714).
gaaggactattcacactaa

SEQ ID NO: 620716 - DNA, 19 bp, Mus musculus
  siRNA target sequence for 1110038F21Rik (NM_025416.1,700-718).
gactattcacactaagtct

SEQ ID NO: 620717 - DNA, 19 bp, Mus musculus
  siRNA target sequence for 1110038F21Rik (NM_025416.1,770-788).
cattcaagtagaaaagatt

SEQ ID NO: 620718 - DNA, 19 bp, Mus musculus
  siRNA target sequence for 1110038F21Rik (NM_025416.1,850-868).
ccaagtcctccggtgtttt

SEQ ID NO: 620719 - DNA, 19 bp, Mus musculus
  siRNA target sequence for 1110057K04Rik (NM_172401.2,101-119).
ctgtgcgtgaggagttctt

SEQ ID NO: 620720 - DNA, 19 bp, Mus musculus
  siRNA target sequence for 1110057K04Rik (NM_172401.2,130-148).
ggagttgaaaccaagatca

SEQ ID NO: 620721 - DNA, 19 bp, Mus musculus
  siRNA target sequence for 1110057K04Rik (NM_172401.2,133-151).
gttgaaaccaagatcataa

SEQ ID NO: 620722 - DNA, 19 bp, Mus musculus
  siRNA target sequence for 1110057K04Rik (NM_172401.2,164-182).
ggactaacctctttgagaa

SEQ ID NO: 620723 - DNA, 19 bp, Mus musculus
  siRNA target sequence for 1110057K04Rik (NM_172401.2,165-183).
gactaacctctttgagaaa

SEQ ID NO: 620724 - DNA, 19 bp, Mus musculus
  siRNA target sequence for 1110057K04Rik (NM_172401.2,194-212).
gcaagccaaaacagcttat

SEQ ID NO: 620725 - DNA, 19 bp, Mus musculus
  siRNA target sequence for 1110057K04Rik (NM_172401.2,233-251).
caggctattccgcattcta

SEQ ID NO: 620726 - DNA, 19 bp, Mus musculus
  siRNA target sequence for 1110057K04Rik (NM_172401.2,262-280).
gcaaaggccttgtacactt

SEQ ID NO: 620727 - DNA, 19 bp, Mus musculus
  siRNA target sequence for 1110057K04Rik (NM_172401.2,268-286).
gccttgtacactttgatga

SEQ ID NO: 620728 - DNA, 19 bp, Mus musculus
  siRNA target sequence for 1110057K04Rik (NM_172401.2,269-287).
ccttgtacactttgatgaa

SEQ ID NO: 620729 - DNA, 19 bp, Mus musculus
  siRNA target sequence for 1110057K04Rik (NM_172401.2,290-308).
gccgcttcccggtatggat

SEQ ID NO: 620730 - DNA, 19 bp, Mus musculus
  siRNA target sequence for 1110057K04Rik (NM_172401.2,291-309).
ccgcttcccggtatggata

SEQ ID NO: 620731 - DNA, 19 bp, Mus musculus
  siRNA target sequence for 1110057K04Rik (NM_172401.2,292-310).
cgcttcccggtatggataa

SEQ ID NO: 620732 - DNA, 19 bp, Mus musculus
  siRNA target sequence for 1110057K04Rik (NM_172401.2,293-311).
gcttcccggtatggataat

SEQ ID NO: 620733 - DNA, 19 bp, Mus musculus
  siRNA target sequence for 1110057K04Rik (NM_172401.2,297-315).
cccggtatggataatctct

SEQ ID NO: 620734 - DNA, 19 bp, Mus musculus
  siRNA target sequence for 1110057K04Rik (NM_172401.2,329-347).
cggtgactcccaaagacaa

SEQ ID NO: 620735 - DNA, 19 bp, Mus musculus
  siRNA target sequence for 1110057K04Rik (NM_172401.2,407-425).
gtctgaatggtcaaataga

SEQ ID NO: 620736 - DNA, 19 bp, Mus musculus
  siRNA target sequence for 1110057K04Rik (NM_172401.2,415-433).
ggtcaaatagagcacaaaa

SEQ ID NO: 620737 - DNA, 19 bp, Mus musculus
  siRNA target sequence for 1110057K04Rik (NM_172401.2,416-434).
gtcaaatagagcacaaaat

SEQ ID NO: 620738 - DNA, 19 bp, Mus musculus
  siRNA target sequence for 1110057K04Rik (NM_172401.2,457-475).
ccaaaggatgtgaagctta

SEQ ID NO: 620739 - DNA, 19 bp, Mus musculus
  siRNA target sequence for 1110057K04Rik (NM_172401.2,487-505).
cattccgtaggcacctata

SEQ ID NO: 620740 - DNA, 19 bp, Mus musculus
  siRNA target sequence for 1110057K04Rik (NM_172401.2,561-579).
gctcttcccaactatcgaa

SEQ ID NO: 620741 - DNA, 19 bp, Mus musculus
  siRNA target sequence for 1110057K04Rik (NM_172401.2,645-663).
ctatgctaccagctactta

SEQ ID NO: 620742 - DNA, 19 bp, Mus musculus
  siRNA target sequence for 1110057K04Rik (NM_172401.2,653-671).
ccagctacttactttttaa

SEQ ID NO: 620743 - DNA, 19 bp, Mus musculus
  siRNA target sequence for 1110057K04Rik (NM_172401.2,672-690).
gccgtgtcctgaagtcata

SEQ ID NO: 620744 - DNA, 19 bp, Mus musculus
  siRNA target sequence for 1110057K04Rik (NM_172401.2,695-713).
ctttcataatccaaaagct

SEQ ID NO: 620745 - DNA, 19 bp, Mus musculus
  siRNA target sequence for 1110057K04Rik (NM_172401.2,846-864).
ggagtttctccctaagctt

SEQ ID NO: 620746 - DNA, 19 bp, Mus musculus
  siRNA target sequence for 1110057K04Rik (NM_172401.2,857-875).
ctaagcttaagttttacta

SEQ ID NO: 620747 - DNA, 19 bp, Mus musculus
  siRNA target sequence for 1110057K04Rik (NM_172401.2,889-907).
ggctggtgtccagtaaagt

SEQ ID NO: 620748 - DNA, 19 bp, Mus musculus
  siRNA target sequence for 1110057K04Rik (NM_172401.2,890-908).
gctggtgtccagtaaagta

SEQ ID NO: 620749 - DNA, 19 bp, Mus musculus
  siRNA target sequence for 1110057K04Rik (NM_172401.2,893-911).
ggtgtccagtaaagtacta

SEQ ID NO: 620750 - DNA, 19 bp, Mus musculus
  siRNA target sequence for 1110057K04Rik (NM_172401.2,894-912).
gtgtccagtaaagtactat

SEQ ID NO: 620751 - DNA, 19 bp, Mus musculus
  siRNA target sequence for 1110057K04Rik (NM_172401.2,896-914).
gtccagtaaagtactatga

SEQ ID NO: 620752 - DNA, 19 bp, Mus musculus
  siRNA target sequence for 1110057K04Rik (NM_172401.2,976-994).
gcttttgttctcgatttta

SEQ ID NO: 620753 - DNA, 19 bp, Mus musculus
  siRNA target sequence for 1200006O19Rik (NM_026164.1,317-335).
ggcgcatgaaccatgtcaa

SEQ ID NO: 620754 - DNA, 19 bp, Mus musculus
  siRNA target sequence for 1200006O19Rik (NM_026164.1,318-336).
gcgcatgaaccatgtcaat

SEQ ID NO: 620755 - DNA, 19 bp, Mus musculus
  siRNA target sequence for 1200006O19Rik (NM_026164.1,320-338).
gcatgaaccatgtcaatgt

SEQ ID NO: 620756 - DNA, 19 bp, Mus musculus
  siRNA target sequence for 1200006O19Rik (NM_026164.1,344-362).
gagagtttcacacaagtaa

SEQ ID NO: 620757 - DNA, 19 bp, Mus musculus
  siRNA target sequence for 1200006O19Rik (NM_026164.1,467-485).
ctcccaagggacttacaaa

SEQ ID NO: 620758 - DNA, 19 bp, Mus musculus
  siRNA target sequence for 1200006O19Rik (NM_026164.1,501-519).
gtcccgtattaaaagtact

SEQ ID NO: 620759 - DNA, 19 bp, Mus musculus
  siRNA target sequence for 1200006O19Rik (NM_026164.1,503-521).
cccgtattaaaagtacttt

SEQ ID NO: 620760 - DNA, 19 bp, Mus musculus
  siRNA target sequence for 1200006O19Rik (NM_026164.1,569-587).
cacggttagctcaatttaa

SEQ ID NO: 620761 - DNA, 19 bp, Mus musculus
  siRNA target sequence for 1200006O19Rik (NM_026164.1,588-606).
gccaagttctcgaatatta

SEQ ID NO: 620762 - DNA, 19 bp, Mus musculus
  siRNA target sequence for 1200006O19Rik (NM_026164.1,589-607).
ccaagttctcgaatattaa

SEQ ID NO: 620763 - DNA, 19 bp, Mus musculus
  siRNA target sequence for 1200006O19Rik (NM_026164.1,593-611).
gttctcgaatattaagaaa

SEQ ID NO: 620764 - DNA, 19 bp, Mus musculus
  siRNA target sequence for 1200006O19Rik (NM_026164.1,596-614).
ctcgaatattaagaaaagt

SEQ ID NO: 620765 - DNA, 19 bp, Mus musculus
  siRNA target sequence for 1200006O19Rik (NM_026164.1,656-674).
ccgtcgagtctctgaaaaa

SEQ ID NO: 620766 - DNA, 19 bp, Mus musculus
  siRNA target sequence for 1200006O19Rik (NM_026164.1,667-685).
ctgaaaaactatagtgata

SEQ ID NO: 620767 - DNA, 19 bp, Mus musculus
  siRNA target sequence for 1200006O19Rik (NM_026164.1,742-760).
gaagattcaggtaaacaca

SEQ ID NO: 620768 - DNA, 19 bp, Mus musculus
  siRNA target sequence for 1200006O19Rik (NM_026164.1,757-775).
cacagccttttccattaca

SEQ ID NO: 620769 - DNA, 19 bp, Mus musculus
  siRNA target sequence for 1200006O19Rik (NM_026164.1,761-779).
gccttttccattacacata

SEQ ID NO: 620770 - DNA, 19 bp, Mus musculus
  siRNA target sequence for 1200006O19Rik (NM_026164.1,769-787).
cattacacatacggtataa

SEQ ID NO: 620771 - DNA, 19 bp, Mus musculus
  siRNA target sequence for 1200006O19Rik (NM_026164.1,780-798).
cggtataaccaccagattt

SEQ ID NO: 620772 - DNA, 19 bp, Mus musculus
  siRNA target sequence for 1200006O19Rik (NM_026164.1,804-822).
gtcattctccgttttagca

SEQ ID NO: 620773 - DNA, 19 bp, Mus musculus
  siRNA target sequence for 1200006O19Rik (NM_026164.1,806-824).
cattctccgttttagcaaa

SEQ ID NO: 620774 - DNA, 19 bp, Mus musculus
  siRNA target sequence for 1200006O19Rik (NM_026164.1,813-831).
cgttttagcaaatcatatt

SEQ ID NO: 620775 - DNA, 19 bp, Mus musculus
  siRNA target sequence for 1200006O19Rik (NM_026164.1,814-832).
gttttagcaaatcatatta

SEQ ID NO: 620776 - DNA, 19 bp, Mus musculus
  siRNA target sequence for 1200006O19Rik (NM_026164.1,821-839).
caaatcatattaattccta

SEQ ID NO: 620777 - DNA, 19 bp, Mus musculus
  siRNA target sequence for 1200006O19Rik (NM_026164.1,962-980).
cggaatctcccctagaagt

SEQ ID NO: 620778 - DNA, 19 bp, Mus musculus
  siRNA target sequence for 1200006O19Rik (NM_026164.1,970-988).
cccctagaagttaaagaca

SEQ ID NO: 620779 - DNA, 19 bp, Mus musculus
  siRNA target sequence for 1200006O19Rik (NM_026164.1,971-989).
ccctagaagttaaagacaa

SEQ ID NO: 620780 - DNA, 19 bp, Mus musculus
  siRNA target sequence for 1200006O19Rik (NM_026164.1,1085-1103).
ccttagtcggtggttacat

SEQ ID NO: 620781 - DNA, 19 bp, Mus musculus
  siRNA target sequence for 1200006O19Rik (NM_026164.1,1086-1104).
cttagtcggtggttacatt

SEQ ID NO: 620782 - DNA, 19 bp, Mus musculus
  siRNA target sequence for 1200006O19Rik (NM_026164.1,1106-1124).
gtggacttgtacccaaatt

SEQ ID NO: 620783 - DNA, 19 bp, Mus musculus
  siRNA target sequence for 1200006O19Rik (NM_026164.1,1175-1193).
cagagcaggctgttaacaa

SEQ ID NO: 620784 - DNA, 19 bp, Mus musculus
  siRNA target sequence for 1200006O19Rik (NM_026164.1,1249-1267).
gcaagagtgagtattgata

SEQ ID NO: 620785 - DNA, 19 bp, Mus musculus
  siRNA target sequence for 1200006O19Rik (NM_026164.1,1250-1268).
caagagtgagtattgataa

SEQ ID NO: 620786 - DNA, 19 bp, Mus musculus
  siRNA target sequence for 1200006O19Rik (NM_026164.1,1269-1287).
cagaactcgagccttagtt

SEQ ID NO: 620787 - DNA, 19 bp, Mus musculus
  siRNA target sequence for 1200006O19Rik (NM_026164.1,1271-1289).
gaactcgagccttagttca

SEQ ID NO: 620788 - DNA, 19 bp, Mus musculus
  siRNA target sequence for 1200006O19Rik (NM_026164.1,1307-1325).
ccgacccaaagctctgtat

SEQ ID NO: 620789 - DNA, 19 bp, Mus musculus
  siRNA target sequence for 1200006O19Rik (NM_026164.1,1308-1326).
cgacccaaagctctgtatt

SEQ ID NO: 620790 - DNA, 19 bp, Mus musculus
  siRNA target sequence for 1200006O19Rik (NM_026164.1,1322-1340).
gtattactagggttgaaga

SEQ ID NO: 620791 - DNA, 19 bp, Mus musculus
  siRNA target sequence for 1200006O19Rik (NM_026164.1,1331-1349).
gggttgaagaactgacttt

SEQ ID NO: 620792 - DNA, 19 bp, Mus musculus
  siRNA target sequence for 1200006O19Rik (NM_026164.1,1346-1364).
cttttcatcttctagaatt

SEQ ID NO: 620793 - DNA, 19 bp, Mus musculus
  siRNA target sequence for 1200006O19Rik (NM_026164.1,1379-1397).
gagtggctatcaaggaaaa

SEQ ID NO: 620794 - DNA, 19 bp, Mus musculus
  siRNA target sequence for 1200006O19Rik (NM_026164.1,1419-1437).
gctgagacaagttaaggat

SEQ ID NO: 620795 - DNA, 19 bp, Mus musculus
  siRNA target sequence for 1200006O19Rik (NM_026164.1,1512-1530).
ccgaatcctcaccattgat

SEQ ID NO: 620796 - DNA, 19 bp, Mus musculus
  siRNA target sequence for 1200006O19Rik (NM_026164.1,1599-1617).
gattcatcagctttttgat

SEQ ID NO: 620797 - DNA, 19 bp, Mus musculus
  siRNA target sequence for 1200006O19Rik (NM_026164.1,1635-1653).
cacaggggccatattagca

SEQ ID NO: 620798 - DNA, 19 bp, Mus musculus
  siRNA target sequence for 1200006O19Rik (NM_026164.1,1640-1658).
gggccatattagcatttat

SEQ ID NO: 620799 - DNA, 19 bp, Mus musculus
  siRNA target sequence for 1200006O19Rik (NM_026164.1,1652-1670).
catttatgctgggattgtt

SEQ ID NO: 620800 - DNA, 19 bp, Mus musculus
  siRNA target sequence for 1200006O19Rik (NM_026164.1,1672-1690).
cacatgccgctggatgaat

SEQ ID NO: 620801 - DNA, 19 bp, Mus musculus
  siRNA target sequence for 1200006O19Rik (NM_026164.1,1674-1692).
catgccgctggatgaatgt

SEQ ID NO: 620802 - DNA, 19 bp, Mus musculus
  siRNA target sequence for 1200006O19Rik (NM_026164.1,1691-1709).
gtgaggaactctatcgaaa

SEQ ID NO: 620803 - DNA, 19 bp, Mus musculus
  siRNA target sequence for 1200006O19Rik (NM_026164.1,1725-1743).
gttcacacagaatgtcatt

SEQ ID NO: 620804 - DNA, 19 bp, Mus musculus
  siRNA target sequence for 1200006O19Rik (NM_026164.1,1744-1762).
gtcgggaccgtcaaaatga

SEQ ID NO: 620805 - DNA, 19 bp, Mus musculus
  siRNA target sequence for 1200006O19Rik (NM_026164.1,1747-1765).
gggaccgtcaaaatgagtt

SEQ ID NO: 620806 - DNA, 19 bp, Mus musculus
  siRNA target sequence for 1200006O19Rik (NM_026164.1,1766-1784).
ggagccatgcgttttatga

SEQ ID NO: 620807 - DNA, 19 bp, Mus musculus
  siRNA target sequence for 1200006O19Rik (NM_026164.1,1803-1821).
gatcctcaaggatagaatt

SEQ ID NO: 620808 - DNA, 19 bp, Mus musculus
  siRNA target sequence for 1200006O19Rik (NM_026164.1,1854-1872).
ccccgcatgtcctaaggta

SEQ ID NO: 620809 - DNA, 19 bp, Mus musculus
  siRNA target sequence for 1200006O19Rik (NM_026164.1,1876-1894).
gctataagtaccatagtaa

SEQ ID NO: 620810 - DNA, 19 bp, Mus musculus
  siRNA target sequence for 1200006O19Rik (NM_026164.1,1877-1895).
ctataagtaccatagtaaa

SEQ ID NO: 620811 - DNA, 19 bp, Mus musculus
  siRNA target sequence for 1200006O19Rik (NM_026164.1,1972-1990).
ggctgtcagtataaaatgt

SEQ ID NO: 620812 - DNA, 19 bp, Mus musculus
  siRNA target sequence for 1200006O19Rik (NM_026164.1,2040-2058).
cgcgctggggagtgatctt

SEQ ID NO: 620813 - DNA, 19 bp, Mus musculus
  siRNA target sequence for 1200006O19Rik (NM_026164.1,2042-2060).
cgctggggagtgatcttca

SEQ ID NO: 620814 - DNA, 19 bp, Mus musculus
  siRNA target sequence for 1200006O19Rik (NM_026164.1,2043-2061).
gctggggagtgatcttcat

SEQ ID NO: 620815 - DNA, 19 bp, Mus musculus
  siRNA target sequence for 1200006O19Rik (NM_026164.1,2049-2067).
gagtgatcttcatcaagat

SEQ ID NO: 620816 - DNA, 19 bp, Mus musculus
  siRNA target sequence for 1200006O19Rik (NM_026164.1,2100-2118).
ggcccttcacgaatgtaaa

SEQ ID NO: 620817 - DNA, 19 bp, Mus musculus
  siRNA target sequence for 1200006O19Rik (NM_026164.1,2101-2119).
gcccttcacgaatgtaaat

SEQ ID NO: 620818 - DNA, 19 bp, Mus musculus
  siRNA target sequence for 1200006O19Rik (NM_026164.1,2104-2122).
cttcacgaatgtaaatgca

SEQ ID NO: 620819 - DNA, 19 bp, Mus musculus
  siRNA target sequence for 1200006O19Rik (NM_026164.1,2135-2153).
cgccactggagtgtatagt

SEQ ID NO: 620820 - DNA, 19 bp, Mus musculus
  siRNA target sequence for 1200006O19Rik (NM_026164.1,2136-2154).
gccactggagtgtatagta

SEQ ID NO: 620821 - DNA, 19 bp, Mus musculus
  siRNA target sequence for 1200006O19Rik (NM_026164.1,2161-2179).
ggcacaggacggtatgaga

SEQ ID NO: 620822 - DNA, 19 bp, Mus musculus
  siRNA target sequence for 1200006O19Rik (NM_026164.1,2185-2203).
gtgaggaatacctcaacat

SEQ ID NO: 620823 - DNA, 19 bp, Mus musculus
  siRNA target sequence for 1200006O19Rik (NM_026164.1,2217-2235).
gaccaagctctctaatgtt

SEQ ID NO: 620824 - DNA, 19 bp, Mus musculus
  siRNA target sequence for 1200006O19Rik (NM_026164.1,2219-2237).
ccaagctctctaatgttat

SEQ ID NO: 620825 - DNA, 19 bp, Mus musculus
  siRNA target sequence for 1200006O19Rik (NM_026164.1,2238-2256).
cagcagtgctacagataca

SEQ ID NO: 620826 - DNA, 19 bp, Mus musculus
  siRNA target sequence for 1200006O19Rik (NM_026164.1,2251-2269).
gatacagaggaagttcata

SEQ ID NO: 620827 - DNA, 19 bp, Mus musculus
  siRNA target sequence for 1200006O19Rik (NM_026164.1,2255-2273).
cagaggaagttcatatcat

SEQ ID NO: 620828 - DNA, 19 bp, Mus musculus
  siRNA target sequence for 1200006O19Rik (NM_026164.1,2290-2308).
ccttctgacacgtacttta

SEQ ID NO: 620829 - DNA, 19 bp, Mus musculus
  siRNA target sequence for 1200006O19Rik (NM_026164.1,2296-2314).
gacacgtactttagattta

SEQ ID NO: 620830 - DNA, 19 bp, Mus musculus
  siRNA target sequence for 1200006O19Rik (NM_026164.1,2298-2316).
cacgtactttagatttaat

SEQ ID NO: 620831 - DNA, 19 bp, Mus musculus
  siRNA target sequence for 1200006O19Rik (NM_026164.1,2301-2319).
gtactttagatttaatcct

SEQ ID NO: 620832 - DNA, 19 bp, Mus musculus
  siRNA target sequence for 1200006O19Rik (NM_026164.1,2379-2397).
gctggaagggatgaagtat

SEQ ID NO: 620833 - DNA, 19 bp, Mus musculus
  siRNA target sequence for 1200006O19Rik (NM_026164.1,2380-2398).
ctggaagggatgaagtata

SEQ ID NO: 620834 - DNA, 19 bp, Mus musculus
  siRNA target sequence for 1200006O19Rik (NM_026164.1,2466-2484).
gaagatcaatgattggata

SEQ ID NO: 620835 - DNA, 19 bp, Mus musculus
  siRNA target sequence for 1200006O19Rik (NM_026164.1,2472-2490).
caatgattggataaaatta

SEQ ID NO: 620836 - DNA, 19 bp, Mus musculus
  siRNA target sequence for 1200006O19Rik (NM_026164.1,2595-2613).
ggaacggtgtgattcaaca

SEQ ID NO: 620837 - DNA, 19 bp, Mus musculus
  siRNA target sequence for 1200006O19Rik (NM_026164.1,2596-2614).
gaacggtgtgattcaacat

SEQ ID NO: 620838 - DNA, 19 bp, Mus musculus
  siRNA target sequence for 1200011M11Rik (NM_024262.1,200-218).
gcctcaactccgagaagtt

SEQ ID NO: 620839 - DNA, 19 bp, Mus musculus
  siRNA target sequence for 1200011M11Rik (NM_024262.1,431-449).
gtcttttgcaggcctatta

SEQ ID NO: 620840 - DNA, 19 bp, Mus musculus
  siRNA target sequence for 1200011M11Rik (NM_024262.1,433-451).
cttttgcaggcctattaca

SEQ ID NO: 620841 - DNA, 19 bp, Mus musculus
  siRNA target sequence for 1200011M11Rik (NM_024262.1,663-681).
ccatccgacgtgttccttt

SEQ ID NO: 620842 - DNA, 19 bp, Mus musculus
  siRNA target sequence for 1200011M11Rik (NM_024262.1,667-685).
ccgacgtgttcctttgaca

SEQ ID NO: 620843 - DNA, 19 bp, Mus musculus
  siRNA target sequence for 1200011M11Rik (NM_024262.1,668-686).
cgacgtgttcctttgacat

SEQ ID NO: 620844 - DNA, 19 bp, Mus musculus
  siRNA target sequence for 1200011M11Rik (NM_024262.1,674-692).
gttcctttgacatcactta

SEQ ID NO: 620845 - DNA, 19 bp, Mus musculus
  siRNA target sequence for 1200011M11Rik (NM_024262.1,677-695).
cctttgacatcacttatga

SEQ ID NO: 620846 - DNA, 19 bp, Mus musculus
  siRNA target sequence for 1200011M11Rik (NM_024262.1,934-952).
ctggaggaccagatctata

SEQ ID NO: 620847 - DNA, 19 bp, Mus musculus
  siRNA target sequence for 1200011M11Rik (NM_024262.1,968-986).
gtcgagtcttgactaatca

SEQ ID NO: 620848 - DNA, 19 bp, Mus musculus
  siRNA target sequence for 1200011M11Rik (NM_024262.1,1084-1102).
cagcttaggagccattgta

SEQ ID NO: 620849 - DNA, 19 bp, Mus musculus
  siRNA target sequence for 1200011M11Rik (NM_024262.1,1231-1249).
ggccagctagtggatttca

SEQ ID NO: 620850 - DNA, 19 bp, Mus musculus
  siRNA target sequence for 1200011M11Rik (NM_024262.1,1284-1302).
ggtcctaagcaaaaaaggt

SEQ ID NO: 620851 - DNA, 19 bp, Mus musculus
  siRNA target sequence for 1200011M11Rik (NM_024262.1,1292-1310).
gcaaaaaaggttttgatga

SEQ ID NO: 620852 - DNA, 19 bp, Mus musculus
  siRNA target sequence for 1200011M11Rik (NM_024262.1,1326-1344).
cccacagccttcccatttt

SEQ ID NO: 620853 - DNA, 19 bp, Mus musculus
  siRNA target sequence for 1200011M11Rik (NM_024262.1,1328-1346).
cacagccttcccattttga

SEQ ID NO: 620854 - DNA, 19 bp, Mus musculus
  siRNA target sequence for 1200011M11Rik (NM_024262.1,1379-1397).
cagcaaagttgtatgaagt

SEQ ID NO: 620855 - DNA, 19 bp, Mus musculus
  siRNA target sequence for 1200011M11Rik (NM_024262.1,1389-1407).
gtatgaagtggctatcgat

SEQ ID NO: 620856 - DNA, 19 bp, Mus musculus
  siRNA target sequence for 1200011M11Rik (NM_024262.1,1436-1454).
ctggggagctaacatctaa

SEQ ID NO: 620857 - DNA, 19 bp, Mus musculus
  siRNA target sequence for 1200011M11Rik (NM_024262.1,1438-1456).
ggggagctaacatctaaga

SEQ ID NO: 620858 - DNA, 19 bp, Mus musculus
  siRNA target sequence for 1200011M11Rik (NM_024262.1,1439-1457).
gggagctaacatctaagat

SEQ ID NO: 620859 - DNA, 19 bp, Mus musculus
  siRNA target sequence for 1200011M11Rik (NM_024262.1,1463-1481).
gcagtattaaagtcttaga

SEQ ID NO: 620860 - DNA, 19 bp, Mus musculus
  siRNA target sequence for 1200011M11Rik (NM_024262.1,1550-1568).
gtgcctaccagtcaaactt

SEQ ID NO: 620861 - DNA, 19 bp, Mus musculus
  siRNA target sequence for 1200011M11Rik (NM_024262.1,1560-1578).
gtcaaacttgccgcataat

SEQ ID NO: 620862 - DNA, 19 bp, Mus musculus
  siRNA target sequence for 1200011M11Rik (NM_024262.1,1562-1580).
caaacttgccgcataatta

SEQ ID NO: 620863 - DNA, 19 bp, Mus musculus
  siRNA target sequence for 1200011M11Rik (NM_024262.1,1614-1632).
ggctcttcgggtatacagt

SEQ ID NO: 620864 - DNA, 19 bp, Mus musculus
  siRNA target sequence for 1200011M11Rik (NM_024262.1,1642-1660).
cgaggtccagcctttcaca

SEQ ID NO: 620865 - DNA, 19 bp, Mus musculus
  siRNA target sequence for 1200011M11Rik (NM_024262.1,1645-1663).
ggtccagcctttcacaaat

SEQ ID NO: 620866 - DNA, 19 bp, Mus musculus
  siRNA target sequence for 1200011M11Rik (NM_024262.1,1646-1664).
gtccagcctttcacaaata

SEQ ID NO: 620867 - DNA, 19 bp, Mus musculus
  siRNA target sequence for 1200011M11Rik (NM_024262.1,1657-1675).
cacaaatatgccatgcaat

SEQ ID NO: 620868 - DNA, 19 bp, Mus musculus
  siRNA target sequence for 1200011M11Rik (NM_024262.1,1659-1677).
caaatatgccatgcaatta

SEQ ID NO: 620869 - DNA, 19 bp, Mus musculus
  siRNA target sequence for 1200011M11Rik (NM_024262.1,1680-1698).
cgaagactgctacaaattt

SEQ ID NO: 620870 - DNA, 19 bp, Mus musculus
  siRNA target sequence for 1200011M11Rik (NM_024262.1,1749-1767).
ctgtgtccacaaatttcat

SEQ ID NO: 620871 - DNA, 19 bp, Mus musculus
  siRNA target sequence for 1200011M11Rik (NM_024262.1,1882-1900).
cgagacgaccccttcgata

SEQ ID NO: 620872 - DNA, 19 bp, Mus musculus
  siRNA target sequence for 1200011M11Rik (NM_024262.1,1883-1901).
gagacgaccccttcgatat

SEQ ID NO: 620873 - DNA, 19 bp, Mus musculus
  siRNA target sequence for 1200011M11Rik (NM_024262.1,1885-1903).
gacgaccccttcgatatca

SEQ ID NO: 620874 - DNA, 19 bp, Mus musculus
  siRNA target sequence for 1200011M11Rik (NM_024262.1,1906-1924).
gctgctaactatgactttt

SEQ ID NO: 620875 - DNA, 19 bp, Mus musculus
  siRNA target sequence for 1200011M11Rik (NM_024262.1,1907-1925).
ctgctaactatgactttta

SEQ ID NO: 620876 - DNA, 19 bp, Mus musculus
  siRNA target sequence for 1200011M11Rik (NM_024262.1,1910-1928).
ctaactatgacttttacca

SEQ ID NO: 620877 - DNA, 19 bp, Mus musculus
  siRNA target sequence for 1200011M11Rik (NM_024262.1,1929-1947).
gcttctggaagaaaaatgt

SEQ ID NO: 620878 - DNA, 19 bp, Mus musculus
  siRNA target sequence for 1200011M11Rik (NM_024262.1,1952-1970).
ggaaattggatcatatcaa

SEQ ID NO: 620879 - DNA, 19 bp, Mus musculus
  siRNA target sequence for 1200011M11Rik (NM_024262.1,2118-2136).
cttgggccagtcaacagat

SEQ ID NO: 620880 - DNA, 19 bp, Mus musculus
  siRNA target sequence for 1200011M11Rik (NM_024262.1,2244-2262).
ggcatccacagttgaatat

SEQ ID NO: 620881 - DNA, 19 bp, Mus musculus
  siRNA target sequence for 1200011M11Rik (NM_024262.1,2246-2264).
catccacagttgaatatct

SEQ ID NO: 620882 - DNA, 19 bp, Mus musculus
  siRNA target sequence for 1200011M11Rik (NM_024262.1,2269-2287).
ggcatgctacattcaaatt

SEQ ID NO: 620883 - DNA, 19 bp, Mus musculus
  siRNA target sequence for 1200011M11Rik (NM_024262.1,2313-2331).
ctccagctggtctttggtt

SEQ ID NO: 620884 - DNA, 19 bp, Mus musculus
  siRNA target sequence for 1200011M11Rik (NM_024262.1,2346-2364).
caagtcttacaactttcat

SEQ ID NO: 620885 - DNA, 19 bp, Mus musculus
  siRNA target sequence for 1200011M11Rik (NM_024262.1,2384-2402).
gcttcgttccaggaacaaa

SEQ ID NO: 620886 - DNA, 19 bp, Mus musculus
  siRNA target sequence for 1200011M11Rik (NM_024262.1,2392-2410).
ccaggaacaaactatctta

SEQ ID NO: 620887 - DNA, 19 bp, Mus musculus
  siRNA target sequence for 1200011M11Rik (NM_024262.1,2393-2411).
caggaacaaactatcttat

SEQ ID NO: 620888 - DNA, 19 bp, Mus musculus
  siRNA target sequence for 1200011M11Rik (NM_024262.1,2430-2448).
caggactagagctgaagat

SEQ ID NO: 620889 - DNA, 19 bp, Mus musculus
  siRNA target sequence for 1200011M11Rik (NM_024262.1,2469-2487).
ctcctggcctgctccaaat

SEQ ID NO: 620890 - DNA, 19 bp, Mus musculus
  siRNA target sequence for 1200011M11Rik (NM_024262.1,2471-2489).
cctggcctgctccaaataa

SEQ ID NO: 620891 - DNA, 19 bp, Mus musculus
  siRNA target sequence for 1200011M11Rik (NM_024262.1,2531-2549).
gaaggcggagggatgacat

SEQ ID NO: 620892 - DNA, 19 bp, Mus musculus
  siRNA target sequence for 1200011M11Rik (NM_024262.1,2558-2576).
cctttgttggctttgagta

SEQ ID NO: 620893 - DNA, 19 bp, Mus musculus
  siRNA target sequence for 1200011M11Rik (NM_024262.1,2587-2605).
cgaggtcggaggttcatgt

SEQ ID NO: 620894 - DNA, 19 bp, Mus musculus
  siRNA target sequence for 1200011M11Rik (NM_024262.1,2611-2629).
gggcctgacaaagtaatga

SEQ ID NO: 620895 - DNA, 19 bp, Mus musculus
  siRNA target sequence for 1200011M11Rik (NM_024262.1,2612-2630).
ggcctgacaaagtaatgaa

SEQ ID NO: 620896 - DNA, 19 bp, Mus musculus
  siRNA target sequence for 1200011M11Rik (NM_024262.1,2613-2631).
gcctgacaaagtaatgaaa

SEQ ID NO: 620897 - DNA, 19 bp, Mus musculus
  siRNA target sequence for 1200011M11Rik (NM_024262.1,2649-2667).
caaggagtcggctttaaaa

SEQ ID NO: 620898 - DNA, 19 bp, Mus musculus
  siRNA target sequence for 1200011M11Rik (NM_024262.1,2717-2735).
gagggctgaagccacatta

SEQ ID NO: 620899 - DNA, 19 bp, Mus musculus
  siRNA target sequence for 1200011M11Rik (NM_024262.1,2777-2795).
ctttgcagataatactgat

SEQ ID NO: 620900 - DNA, 19 bp, Mus musculus
  siRNA target sequence for 1200011M11Rik (NM_024262.1,2872-2890).
ggcctttgggtcttgagat

SEQ ID NO: 620901 - DNA, 19 bp, Mus musculus
  siRNA target sequence for 1200011M11Rik (NM_024262.1,2873-2891).
gcctttgggtcttgagatt

SEQ ID NO: 620902 - DNA, 19 bp, Mus musculus
  siRNA target sequence for 1200011M11Rik (NM_024262.1,2879-2897).
gggtcttgagatttcctta

SEQ ID NO: 620903 - DNA, 19 bp, Mus musculus
  siRNA target sequence for 1700010C24Rik (NM_027401.1,406-424).
gcttctgacataccatatt

SEQ ID NO: 620904 - DNA, 19 bp, Mus musculus
  siRNA target sequence for 1700010C24Rik (NM_027401.1,514-532).
cggctggtgaagacattca

SEQ ID NO: 620905 - DNA, 19 bp, Mus musculus
  siRNA target sequence for 1700010C24Rik (NM_027401.1,614-632).
ccatgacagatcgattgtt

SEQ ID NO: 620906 - DNA, 19 bp, Mus musculus
  siRNA target sequence for 1700010C24Rik (NM_027401.1,625-643).
cgattgttggatgagatta

SEQ ID NO: 620907 - DNA, 19 bp, Mus musculus
  siRNA target sequence for 1700010C24Rik (NM_027401.1,626-644).
gattgttggatgagattat

SEQ ID NO: 620908 - DNA, 19 bp, Mus musculus
  siRNA target sequence for 1700010C24Rik (NM_027401.1,630-648).
gttggatgagattattcaa

SEQ ID NO: 620909 - DNA, 19 bp, Mus musculus
  siRNA target sequence for 1700010C24Rik (NM_027401.1,667-685).
ctctccatatcccgaatta

SEQ ID NO: 620910 - DNA, 19 bp, Mus musculus
  siRNA target sequence for 1700010C24Rik (NM_027401.1,671-689).
ccatatcccgaattagctt

SEQ ID NO: 620911 - DNA, 19 bp, Mus musculus
  siRNA target sequence for 1700010C24Rik (NM_027401.1,687-705).
cttcatcggccattctctt

SEQ ID NO: 620912 - DNA, 19 bp, Mus musculus
  siRNA target sequence for 1700010C24Rik (NM_027401.1,706-724).
ggcaacattatcatcagat

SEQ ID NO: 620913 - DNA, 19 bp, Mus musculus
  siRNA target sequence for 1700010C24Rik (NM_027401.1,740-758).
cccggttccggtattacct

SEQ ID NO: 620914 - DNA, 19 bp, Mus musculus
  siRNA target sequence for 1700010C24Rik (NM_027401.1,749-767).
ggtattacctcaacaaact

SEQ ID NO: 620915 - DNA, 19 bp, Mus musculus
  siRNA target sequence for 1700010C24Rik (NM_027401.1,802-820).
gggactctgtacaacaata

SEQ ID NO: 620916 - DNA, 19 bp, Mus musculus
  siRNA target sequence for 1700010C24Rik (NM_027401.1,904-922).
gctgatctgcgcaaatgtt

SEQ ID NO: 620917 - DNA, 19 bp, Mus musculus
  siRNA target sequence for 1700010C24Rik (NM_027401.1,905-923).
ctgatctgcgcaaatgttt

SEQ ID NO: 620918 - DNA, 19 bp, Mus musculus
  siRNA target sequence for 1700010C24Rik (NM_027401.1,999-1017).
ctatgtgccatttcattca

SEQ ID NO: 620919 - DNA, 19 bp, Mus musculus
  siRNA target sequence for 1700010C24Rik (NM_027401.1,1246-1264).
gcaggactcaactatttca

SEQ ID NO: 620920 - DNA, 19 bp, Mus musculus
  siRNA target sequence for 1700010C24Rik (NM_027401.1,1247-1265).
caggactcaactatttcaa

SEQ ID NO: 620921 - DNA, 19 bp, Mus musculus
  siRNA target sequence for 1700010C24Rik (NM_027401.1,1249-1267).
ggactcaactatttcaagt

SEQ ID NO: 620922 - DNA, 19 bp, Mus musculus
  siRNA target sequence for 1700095H12 (NM_183181.1,102-120).
gtgtcatctgctttgtgaa

SEQ ID NO: 620923 - DNA, 19 bp, Mus musculus
  siRNA target sequence for 1700095H12 (NM_183181.1,123-141).
cactagtgcacgtgttcaa

SEQ ID NO: 620924 - DNA, 19 bp, Mus musculus
  siRNA target sequence for 1700095H12 (NM_183181.1,128-146).
gtgcacgtgttcaagatct

SEQ ID NO: 620925 - DNA, 19 bp, Mus musculus
  siRNA target sequence for 1700095H12 (NM_183181.1,131-149).
cacgtgttcaagatctact

SEQ ID NO: 620926 - DNA, 19 bp, Mus musculus
  siRNA target sequence for 1700095H12 (NM_183181.1,134-152).
gtgttcaagatctacttga

SEQ ID NO: 620927 - DNA, 19 bp, Mus musculus
  siRNA target sequence for 1700095H12 (NM_183181.1,156-174).
caaactacagttacaactt

SEQ ID NO: 620928 - DNA, 19 bp, Mus musculus
  siRNA target sequence for 1700095H12 (NM_183181.1,215-233).
gccccaagcactggtaata

SEQ ID NO: 620929 - DNA, 19 bp, Mus musculus
  siRNA target sequence for 1700095H12 (NM_183181.1,438-456).
ccggttctatgttcttgat

SEQ ID NO: 620930 - DNA, 19 bp, Mus musculus
  siRNA target sequence for 1700095H12 (NM_183181.1,451-469).
cttgatgacgcgtgcatta

SEQ ID NO: 620931 - DNA, 19 bp, Mus musculus
  siRNA target sequence for 1700095H12 (NM_183181.1,465-483).
cattaatgcctctactaca

SEQ ID NO: 620932 - DNA, 19 bp, Mus musculus
  siRNA target sequence for 1700095H12 (NM_183181.1,541-559).
ctgcgacggcaatgagatt

SEQ ID NO: 620933 - DNA, 19 bp, Mus musculus
  siRNA target sequence for 1700095H12 (NM_183181.1,554-572).
gagattgacaccatgttca

SEQ ID NO: 620934 - DNA, 19 bp, Mus musculus
  siRNA target sequence for 1700095H12 (NM_183181.1,608-626).
ggcctttgtctggtcatat

SEQ ID NO: 620935 - DNA, 19 bp, Mus musculus
  siRNA target sequence for 1700095H12 (NM_183181.1,738-756).
cacctttcccacaacatga

SEQ ID NO: 620936 - DNA, 19 bp, Mus musculus
  siRNA target sequence for 1700095H12 (NM_183181.1,788-806).
gcgctgcaccgtttgaact

SEQ ID NO: 620937 - DNA, 19 bp, Mus musculus
  siRNA target sequence for 1700095H12 (NM_183181.1,789-807).
cgctgcaccgtttgaactt

SEQ ID NO: 620938 - DNA, 19 bp, Mus musculus
  siRNA target sequence for 1700095H12 (NM_183181.1,813-831).
cagcacacgtggtggttta

SEQ ID NO: 620939 - DNA, 19 bp, Mus musculus
  siRNA target sequence for 1700095H12 (NM_183181.1,861-879).
cttgggccaccatgactta

SEQ ID NO: 620940 - DNA, 19 bp, Mus musculus
  siRNA target sequence for 1700095H12 (NM_183181.1,978-996).
gcactgtacgggaacactt

SEQ ID NO: 620941 - DNA, 19 bp, Mus musculus
  siRNA target sequence for 1700095H12 (NM_183181.1,981-999).
ctgtacgggaacacttcaa

SEQ ID NO: 620942 - DNA, 19 bp, Mus musculus
  siRNA target sequence for 1700095H12 (NM_183181.1,986-1004).
cgggaacacttcaatctca

SEQ ID NO: 620943 - DNA, 19 bp, Mus musculus
  siRNA target sequence for 1700095H12 (NM_183181.1,987-1005).
gggaacacttcaatctcaa

SEQ ID NO: 620944 - DNA, 19 bp, Mus musculus
  siRNA target sequence for 1700095H12 (NM_183181.1,988-1006).
ggaacacttcaatctcaat

SEQ ID NO: 620945 - DNA, 19 bp, Mus musculus
  siRNA target sequence for 1700095H12 (NM_183181.1,1045-1063).
cttgctcagacgtacacaa

SEQ ID NO: 620946 - DNA, 19 bp, Mus musculus
  siRNA target sequence for 1700095H12 (NM_183181.1,1051-1069).
cagacgtacacaagatgat

SEQ ID NO: 620947 - DNA, 19 bp, Mus musculus
  siRNA target sequence for 1700095H12 (NM_183181.1,1056-1074).
gtacacaagatgatgttgt

SEQ ID NO: 620948 - DNA, 19 bp, Mus musculus
  siRNA target sequence for 1700095H12 (NM_183181.1,1073-1091).
gtcagcacctcgaaccata

SEQ ID NO: 620949 - DNA, 19 bp, Mus musculus
  siRNA target sequence for 1700095H12 (NM_183181.1,1075-1093).
cagcacctcgaaccatata

SEQ ID NO: 620950 - DNA, 19 bp, Mus musculus
  siRNA target sequence for 1700095H12 (NM_183181.1,1161-1179).
gccttctacagcacagata

SEQ ID NO: 620951 - DNA, 19 bp, Mus musculus
  siRNA target sequence for 1700095H12 (NM_183181.1,1243-1261).
ggctcaagaaactgcatta

SEQ ID NO: 620952 - DNA, 19 bp, Mus musculus
  siRNA target sequence for 1700095H12 (NM_183181.1,1266-1284).
cacgctaccgcgttgatga

SEQ ID NO: 620953 - DNA, 19 bp, Mus musculus
  siRNA target sequence for 1700095H12 (NM_183181.1,1269-1287).
gctaccgcgttgatgatga

SEQ ID NO: 620954 - DNA, 19 bp, Mus musculus
  siRNA target sequence for 1700095H12 (NM_183181.1,1283-1301).
gatgagtggtgcttagcaa

SEQ ID NO: 620955 - DNA, 19 bp, Mus musculus
  siRNA target sequence for 1700095H12 (NM_183181.1,1288-1306).
gtggtgcttagcaacactt

SEQ ID NO: 620956 - DNA, 19 bp, Mus musculus
  siRNA target sequence for 1700095H12 (NM_183181.1,1439-1457).
gcacgcaggcaccttaaga

SEQ ID NO: 620957 - DNA, 19 bp, Mus musculus
  siRNA target sequence for 1700095H12 (NM_183181.1,1440-1458).
cacgcaggcaccttaagaa

SEQ ID NO: 620958 - DNA, 19 bp, Mus musculus
  siRNA target sequence for 1810013B01Rik (NM_029631.2,387-405).
gatcagtccatcattaagt

SEQ ID NO: 620959 - DNA, 19 bp, Mus musculus
  siRNA target sequence for 2210412D01Rik (NM_133722.1,338-356).
gccgtcgaggtcttcttct

SEQ ID NO: 620960 - DNA, 19 bp, Mus musculus
  siRNA target sequence for 2210412D01Rik (NM_133722.1,461-479).
cagatgtgtagcttctaca

SEQ ID NO: 620961 - DNA, 19 bp, Mus musculus
  siRNA target sequence for 2210412D01Rik (NM_133722.1,485-503).
ctgggctcgcgcatcaact

SEQ ID NO: 620962 - DNA, 19 bp, Mus musculus
  siRNA target sequence for 2210412D01Rik (NM_133722.1,550-568).
caagccctccgaaaagaat

SEQ ID NO: 620963 - DNA, 19 bp, Mus musculus
  siRNA target sequence for 2210412D01Rik (NM_133722.1,752-770).
ccggataccaggaaaacat

SEQ ID NO: 620964 - DNA, 19 bp, Mus musculus
  siRNA target sequence for 2210412D01Rik (NM_133722.1,753-771).
cggataccaggaaaacata

SEQ ID NO: 620965 - DNA, 19 bp, Mus musculus
  siRNA target sequence for 2210412D01Rik (NM_133722.1,755-773).
gataccaggaaaacatact

SEQ ID NO: 620966 - DNA, 19 bp, Mus musculus
  siRNA target sequence for 2210412D01Rik (NM_133722.1,763-781).
gaaaacatactgctttgat

SEQ ID NO: 620967 - DNA, 19 bp, Mus musculus
  siRNA target sequence for 2210412D01Rik (NM_133722.1,788-806).
cccagcattgacaagatat

SEQ ID NO: 620968 - DNA, 19 bp, Mus musculus
  siRNA target sequence for 2210412D01Rik (NM_133722.1,792-810).
gcattgacaagatatctaa

SEQ ID NO: 620969 - DNA, 19 bp, Mus musculus
  siRNA target sequence for 2210412D01Rik (NM_133722.1,868-886).
ccatggcttggcgatgtat

SEQ ID NO: 620970 - DNA, 19 bp, Mus musculus
  siRNA target sequence for 2210412D01Rik (NM_133722.1,928-946).
ggctgggcacaatgatata

SEQ ID NO: 620971 - DNA, 19 bp, Mus musculus
  siRNA target sequence for 2210412D01Rik (NM_133722.1,965-983).
ctagaacgactaaaacagt

SEQ ID NO: 620972 - DNA, 19 bp, Mus musculus
  siRNA target sequence for 2210412D01Rik (NM_133722.1,971-989).
cgactaaaacagttcatat

SEQ ID NO: 620973 - DNA, 19 bp, Mus musculus
  siRNA target sequence for 2610025M23Rik (NM_029578.1,111-129).
cattgcgtcccatgtgatt

SEQ ID NO: 620974 - DNA, 19 bp, Mus musculus
  siRNA target sequence for 2610025M23Rik (NM_029578.1,115-133).
gcgtcccatgtgattgtct

SEQ ID NO: 620975 - DNA, 19 bp, Mus musculus
  siRNA target sequence for 2610025M23Rik (NM_029578.1,132-150).
ctccctagtagaggattat

SEQ ID NO: 620976 - DNA, 19 bp, Mus musculus
  siRNA target sequence for 2610025M23Rik (NM_029578.1,142-160).
gaggattatcccgactata

SEQ ID NO: 620977 - DNA, 19 bp, Mus musculus
  siRNA target sequence for 2610025M23Rik (NM_029578.1,151-169).
cccgactatatgatcgtaa

SEQ ID NO: 620978 - DNA, 19 bp, Mus musculus
  siRNA target sequence for 2610025M23Rik (NM_029578.1,152-170).
ccgactatatgatcgtaaa

SEQ ID NO: 620979 - DNA, 19 bp, Mus musculus
  siRNA target sequence for 2610025M23Rik (NM_029578.1,153-171).
cgactatatgatcgtaaat

SEQ ID NO: 620980 - DNA, 19 bp, Mus musculus
  siRNA target sequence for 2610025M23Rik (NM_029578.1,156-174).
ctatatgatcgtaaatcta

SEQ ID NO: 620981 - DNA, 19 bp, Mus musculus
  siRNA target sequence for 2610025M23Rik (NM_029578.1,172-190).
ctagacaagctggattact

SEQ ID NO: 620982 - DNA, 19 bp, Mus musculus
  siRNA target sequence for 2610025M23Rik (NM_029578.1,191-209).
gtgcaagcttgaagaatct

SEQ ID NO: 620983 - DNA, 19 bp, Mus musculus
  siRNA target sequence for 2610025M23Rik (NM_029578.1,208-226).
ctggaaccagtctctaaca

SEQ ID NO: 620984 - DNA, 19 bp, Mus musculus
  siRNA target sequence for 2610025M23Rik (NM_029578.1,228-246).
gcaaaactacaagtttata

SEQ ID NO: 620985 - DNA, 19 bp, Mus musculus
  siRNA target sequence for 2610025M23Rik (NM_029578.1,240-258).
gtttatacagggtgacatt

SEQ ID NO: 620986 - DNA, 19 bp, Mus musculus
  siRNA target sequence for 2610025M23Rik (NM_029578.1,247-265).
cagggtgacatttgtgatt

SEQ ID NO: 620987 - DNA, 19 bp, Mus musculus
  siRNA target sequence for 2610025M23Rik (NM_029578.1,255-273).
catttgtgattctcacttt

SEQ ID NO: 620988 - DNA, 19 bp, Mus musculus
  siRNA target sequence for 2610025M23Rik (NM_029578.1,294-312).
ggagaaaatagatatagta

SEQ ID NO: 620989 - DNA, 19 bp, Mus musculus
  siRNA target sequence for 2610025M23Rik (NM_029578.1,330-348).
gacacatgtagatctttca

SEQ ID NO: 620990 - DNA, 19 bp, Mus musculus
  siRNA target sequence for 2610025M23Rik (NM_029578.1,366-384).
gtttacgtacgtcaatgtt

SEQ ID NO: 620991 - DNA, 19 bp, Mus musculus
  siRNA target sequence for 2610025M23Rik (NM_029578.1,372-390).
gtacgtcaatgtttatggt

SEQ ID NO: 620992 - DNA, 19 bp, Mus musculus
  siRNA target sequence for 2610025M23Rik (NM_029578.1,388-406).
ggtactcatgttttggtaa

SEQ ID NO: 620993 - DNA, 19 bp, Mus musculus
  siRNA target sequence for 2610025M23Rik (NM_029578.1,389-407).
gtactcatgttttggtaaa

SEQ ID NO: 620994 - DNA, 19 bp, Mus musculus
  siRNA target sequence for 2610025M23Rik (NM_029578.1,421-439).
gccggagtggagaaattta

SEQ ID NO: 620995 - DNA, 19 bp, Mus musculus
  siRNA target sequence for 2610025M23Rik (NM_029578.1,422-440).
ccggagtggagaaatttat

SEQ ID NO: 620996 - DNA, 19 bp, Mus musculus
  siRNA target sequence for 2610025M23Rik (NM_029578.1,447-465).
cagcacagatgaagtttat

SEQ ID NO: 620997 - DNA, 19 bp, Mus musculus
  siRNA target sequence for 2610025M23Rik (NM_029578.1,473-491).
gtctcgaccaggagtttga

SEQ ID NO: 620998 - DNA, 19 bp, Mus musculus
  siRNA target sequence for 2610025M23Rik (NM_029578.1,628-646).
cagtatccagaaaaggtta

SEQ ID NO: 620999 - DNA, 19 bp, Mus musculus
  siRNA target sequence for 2610025M23Rik (NM_029578.1,642-660).
ggttattccaaagttcata

SEQ ID NO: 621000 - DNA, 19 bp, Mus musculus
  siRNA target sequence for 2610025M23Rik (NM_029578.1,773-791).
gcgagccaggcgagatcta

SEQ ID NO: 621001 - DNA, 19 bp, Mus musculus
  siRNA target sequence for 2610025M23Rik (NM_029578.1,775-793).
gagccaggcgagatctaca

SEQ ID NO: 621002 - DNA, 19 bp, Mus musculus
  siRNA target sequence for 2610025M23Rik (NM_029578.1,778-796).
ccaggcgagatctacaaca

SEQ ID NO: 621003 - DNA, 19 bp, Mus musculus
  siRNA target sequence for 2610025M23Rik (NM_029578.1,828-846).
gcttgcgaaagagctaata

SEQ ID NO: 621004 - DNA, 19 bp, Mus musculus
  siRNA target sequence for 2610025M23Rik (NM_029578.1,850-868).
ctgatcaaagagaccaatt

SEQ ID NO: 621005 - DNA, 19 bp, Mus musculus
  siRNA target sequence for 2610025M23Rik (NM_029578.1,905-923).
gtgacagacctcacaatga

SEQ ID NO: 621006 - DNA, 19 bp, Mus musculus
  siRNA target sequence for 2610025M23Rik (NM_029578.1,913-931).
cctcacaatgacatgagat

SEQ ID NO: 621007 - DNA, 19 bp, Mus musculus
  siRNA target sequence for 2610025M23Rik (NM_029578.1,914-932).
ctcacaatgacatgagata

SEQ ID NO: 621008 - DNA, 19 bp, Mus musculus
  siRNA target sequence for 2610025M23Rik (NM_029578.1,918-936).
caatgacatgagatatcca

SEQ ID NO: 621009 - DNA, 19 bp, Mus musculus
  siRNA target sequence for 2610025M23Rik (NM_029578.1,981-999).
gccatgggaagaaggaata

SEQ ID NO: 621010 - DNA, 19 bp, Mus musculus
  siRNA target sequence for 2610034N03Rik (NM_025478.2,382-400).
gttccgtccagccatcaaa

SEQ ID NO: 621011 - DNA, 19 bp, Mus musculus
  siRNA target sequence for 2610034N03Rik (NM_025478.2,386-404).
cgtccagccatcaaatact

SEQ ID NO: 621012 - DNA, 19 bp, Mus musculus
  siRNA target sequence for 2610034N03Rik (NM_025478.2,439-457).
gcaaggagctcggatctta

SEQ ID NO: 621013 - DNA, 19 bp, Mus musculus
  siRNA target sequence for 2610034N03Rik (NM_025478.2,467-485).
gttatcataacggaacaat

SEQ ID NO: 621014 - DNA, 19 bp, Mus musculus
  siRNA target sequence for 2610034N03Rik (NM_025478.2,501-519).
gcagcaccgttcaagaaat

SEQ ID NO: 621015 - DNA, 19 bp, Mus musculus
  siRNA target sequence for 2610034N03Rik (NM_025478.2,504-522).
gcaccgttcaagaaatcga

SEQ ID NO: 621016 - DNA, 19 bp, Mus musculus
  siRNA target sequence for 2610034N03Rik (NM_025478.2,520-538).
cgacttaacaggtgtgaaa

SEQ ID NO: 621017 - DNA, 19 bp, Mus musculus
  siRNA target sequence for 2610034N03Rik (NM_025478.2,548-566).
ccaaagaccaagttttcta

SEQ ID NO: 621018 - DNA, 19 bp, Mus musculus
  siRNA target sequence for 2610034N03Rik (NM_025478.2,549-567).
caaagaccaagttttctat

SEQ ID NO: 621019 - DNA, 19 bp, Mus musculus
  siRNA target sequence for 2610034N03Rik (NM_025478.2,613-631).
ccggagtgtcgtgttgttt

SEQ ID NO: 621020 - DNA, 19 bp, Mus musculus
  siRNA target sequence for 2610034N03Rik (NM_025478.2,684-702).
gaggcatcgaggttcacat

SEQ ID NO: 621021 - DNA, 19 bp, Mus musculus
  siRNA target sequence for 2610034N03Rik (NM_025478.2,830-848).
cacccgaagttcaaggaaa

SEQ ID NO: 621022 - DNA, 19 bp, Mus musculus
  siRNA target sequence for 2610034N03Rik (NM_025478.2,845-863).
gaaattcagaacctaatta

SEQ ID NO: 621023 - DNA, 19 bp, Mus musculus
  siRNA target sequence for 2610034N03Rik (NM_025478.2,880-898).
gtcgggtctgctttctaaa

SEQ ID NO: 621024 - DNA, 19 bp, Mus musculus
  siRNA target sequence for 2610209A20Rik (NM_026010.1,444-462).
ctgggggagcgcaagatct

SEQ ID NO: 621025 - DNA, 19 bp, Mus musculus
  siRNA target sequence for 2610209A20Rik (NM_026010.1,590-608).
gagtgaggcgcttcaaaga

SEQ ID NO: 621026 - DNA, 19 bp, Mus musculus
  siRNA target sequence for 2610209A20Rik (NM_026010.1,592-610).
gtgaggcgcttcaaagact

SEQ ID NO: 621027 - DNA, 19 bp, Mus musculus
  siRNA target sequence for 2610209A20Rik (NM_026010.1,665-683).
caagtgcacgttaatctct

SEQ ID NO: 621028 - DNA, 19 bp, Mus musculus
  siRNA target sequence for 2810423O19Rik (NM_198931.1,225-243).
ccacctcgcacctcactta

SEQ ID NO: 621029 - DNA, 19 bp, Mus musculus
  siRNA target sequence for 2810457I06Rik (NM_176860.3,491-509).
gtcgatggaaatgtaagtt

SEQ ID NO: 621030 - DNA, 19 bp, Mus musculus
  siRNA target sequence for 2810457I06Rik (NM_176860.3,578-596).
gcgctgaagtcctcaagaa

SEQ ID NO: 621031 - DNA, 19 bp, Mus musculus
  siRNA target sequence for 2810457I06Rik (NM_176860.3,594-612).
gaagttcgcggctgacttt

SEQ ID NO: 621032 - DNA, 19 bp, Mus musculus
  siRNA target sequence for 2810457I06Rik (NM_176860.3,643-661).
cacgtggagcctcataaga

SEQ ID NO: 621033 - DNA, 19 bp, Mus musculus
  siRNA target sequence for 2810457I06Rik (NM_176860.3,757-775).
gactgggtggccaccatat

SEQ ID NO: 621034 - DNA, 19 bp, Mus musculus
  siRNA target sequence for 2810457I06Rik (NM_176860.3,781-799).
cgggatatccggtttgcta

SEQ ID NO: 621035 - DNA, 19 bp, Mus musculus
  siRNA target sequence for 2810457I06Rik (NM_176860.3,782-800).
gggatatccggtttgctaa

SEQ ID NO: 621036 - DNA, 19 bp, Mus musculus
  siRNA target sequence for 2810457I06Rik (NM_176860.3,807-825).
gacgttacaggtgatctat

SEQ ID NO: 621037 - DNA, 19 bp, Mus musculus
  siRNA target sequence for 2810457I06Rik (NM_176860.3,816-834).
ggtgatctatccctattca

SEQ ID NO: 621038 - DNA, 19 bp, Mus musculus
  siRNA target sequence for 2810457I06Rik (NM_176860.3,1063-1081).
ggcgatggagcgttagaga

SEQ ID NO: 621039 - DNA, 19 bp, Mus musculus
  siRNA target sequence for 2810457I06Rik (NM_176860.3,1080-1098).
gaggcggcagtatgaagat

SEQ ID NO: 621040 - DNA, 19 bp, Mus musculus
  siRNA target sequence for 2810457I06Rik (NM_176860.3,1083-1101).
gcggcagtatgaagatcaa

SEQ ID NO: 621041 - DNA, 19 bp, Mus musculus
  siRNA target sequence for 2810457I06Rik (NM_176860.3,1182-1200).
gaagcgatgcctctttgta

SEQ ID NO: 621042 - DNA, 19 bp, Mus musculus
  siRNA target sequence for 2810457I06Rik (NM_176860.3,1185-1203).
gcgatgcctctttgtatgt

SEQ ID NO: 621043 - DNA, 19 bp, Mus musculus
  siRNA target sequence for 2810457I06Rik (NM_176860.3,1213-1231).
gagaggatggacgttgtat

SEQ ID NO: 621044 - DNA, 19 bp, Mus musculus
  siRNA target sequence for 2810457I06Rik (NM_176860.3,1215-1233).
gaggatggacgttgtattt

SEQ ID NO: 621045 - DNA, 19 bp, Mus musculus
  siRNA target sequence for 2810457I06Rik (NM_176860.3,1225-1243).
gttgtatttgggaagtact

SEQ ID NO: 621046 - DNA, 19 bp, Mus musculus
  siRNA target sequence for 2810457I06Rik (NM_176860.3,1296-1314).
catgcctcacagtttacct

SEQ ID NO: 621047 - DNA, 19 bp, Mus musculus
  siRNA target sequence for 2810457I06Rik (NM_176860.3,1325-1343).
gcggtttccgggattacga

SEQ ID NO: 621048 - DNA, 19 bp, Mus musculus
  siRNA target sequence for 2810457I06Rik (NM_176860.3,1332-1350).
ccgggattacgagaaagat

SEQ ID NO: 621049 - DNA, 19 bp, Mus musculus
  siRNA target sequence for 2810457I06Rik (NM_176860.3,1371-1389).
gtgtatgcaagcaagacta

SEQ ID NO: 621050 - DNA, 19 bp, Mus musculus
  siRNA target sequence for 2810457I06Rik (NM_176860.3,1396-1414).
gaagccttgttagaaagta

SEQ ID NO: 621051 - DNA, 19 bp, Mus musculus
  siRNA target sequence for 2810457I06Rik (NM_176860.3,1399-1417).
gccttgttagaaagtaata

SEQ ID NO: 621052 - DNA, 19 bp, Mus musculus
  siRNA target sequence for 2810457I06Rik (NM_176860.3,1412-1430).
gtaatactgttattgatca

SEQ ID NO: 621053 - DNA, 19 bp, Mus musculus
  siRNA target sequence for 2810457I06Rik (NM_176860.3,1420-1438).
gttattgatcacgtgtatt

SEQ ID NO: 621054 - DNA, 19 bp, Mus musculus
  siRNA target sequence for 2810457I06Rik (NM_176860.3,1457-1475).
gcgttcagactgcacataa

SEQ ID NO: 621055 - DNA, 19 bp, Mus musculus
  siRNA target sequence for 2810457I06Rik (NM_176860.3,1458-1476).
cgttcagactgcacataat

SEQ ID NO: 621056 - DNA, 19 bp, Mus musculus
  siRNA target sequence for 2810457I06Rik (NM_176860.3,1551-1569).
ggttgctgggagcacatta

SEQ ID NO: 621057 - DNA, 19 bp, Mus musculus
  siRNA target sequence for 2810457I06Rik (NM_176860.3,1563-1581).
cacattaccggcatggata

SEQ ID NO: 621058 - DNA, 19 bp, Mus musculus
  siRNA target sequence for 2810457I06Rik (NM_176860.3,1656-1674).
ggcgatttcggaatcctat

SEQ ID NO: 621059 - DNA, 19 bp, Mus musculus
  siRNA target sequence for 2810457I06Rik (NM_176860.3,1675-1693).
gacacctacatcaatagga

SEQ ID NO: 621060 - DNA, 19 bp, Mus musculus
  siRNA target sequence for 2810457I06Rik (NM_176860.3,1698-1716).
ccaggtgacgaaagagata

SEQ ID NO: 621061 - DNA, 19 bp, Mus musculus
  siRNA target sequence for 2810457I06Rik (NM_176860.3,1704-1722).
gacgaaagagataataagt

SEQ ID NO: 621062 - DNA, 19 bp, Mus musculus
  siRNA target sequence for 2810457I06Rik (NM_176860.3,1706-1724).
cgaaagagataataagtga

SEQ ID NO: 621063 - DNA, 19 bp, Mus musculus
  siRNA target sequence for 2810457I06Rik (NM_176860.3,1804-1822).
ctatccccgcagaactcaa

SEQ ID NO: 621064 - DNA, 19 bp, Mus musculus
  siRNA target sequence for 2810457I06Rik (NM_176860.3,1842-1860).
ccggaagatcccataccta

SEQ ID NO: 621065 - DNA, 19 bp, Mus musculus
  siRNA target sequence for 2810457I06Rik (NM_176860.3,1852-1870).
ccatacctaggcttctgtt

SEQ ID NO: 621066 - DNA, 19 bp, Mus musculus
  siRNA target sequence for 2810457I06Rik (NM_176860.3,1875-1893).
cgaagaattgggagaaact

SEQ ID NO: 621067 - DNA, 19 bp, Mus musculus
  siRNA target sequence for 4921523A10Rik (NM_173449.1,267-285).
cctttaagagtgttttgga

SEQ ID NO: 621068 - DNA, 19 bp, Mus musculus
  siRNA target sequence for 4921523A10Rik (NM_173449.1,294-312).
gtgtgggatgagaaaactt

SEQ ID NO: 621069 - DNA, 19 bp, Mus musculus
  siRNA target sequence for 4921523A10Rik (NM_173449.1,296-314).
gtgggatgagaaaacttca

SEQ ID NO: 621070 - DNA, 19 bp, Mus musculus
  siRNA target sequence for 4921523A10Rik (NM_173449.1,299-317).
ggatgagaaaacttcaaca

SEQ ID NO: 621071 - DNA, 19 bp, Mus musculus
  siRNA target sequence for 4921523A10Rik (NM_173449.1,300-318).
gatgagaaaacttcaacat

SEQ ID NO: 621072 - DNA, 19 bp, Mus musculus
  siRNA target sequence for 4921523A10Rik (NM_173449.1,305-323).
gaaaacttcaacatttact

SEQ ID NO: 621073 - DNA, 19 bp, Mus musculus
  siRNA target sequence for 4921523A10Rik (NM_173449.1,338-356).
caagattggcaaaatggtt

SEQ ID NO: 621074 - DNA, 19 bp, Mus musculus
  siRNA target sequence for 4921523A10Rik (NM_173449.1,470-488).
gaacaaagctaggaatttt

SEQ ID NO: 621075 - DNA, 19 bp, Mus musculus
  siRNA target sequence for 4921523A10Rik (NM_173449.1,584-602).
gtgtataatctctaacctt

SEQ ID NO: 621076 - DNA, 19 bp, Mus musculus
  siRNA target sequence for 4921523A10Rik (NM_173449.1,586-604).
gtataatctctaacctttt

SEQ ID NO: 621077 - DNA, 19 bp, Mus musculus
  siRNA target sequence for 4921523A10Rik (NM_173449.1,605-623).
gagatcttctacatacaat

SEQ ID NO: 621078 - DNA, 19 bp, Mus musculus
  siRNA target sequence for 4921523A10Rik (NM_173449.1,675-693).
caagttccatcatacttca

SEQ ID NO: 621079 - DNA, 19 bp, Mus musculus
  siRNA target sequence for 4921523A10Rik (NM_173449.1,685-703).
catacttcaaactttgtga

SEQ ID NO: 621080 - DNA, 19 bp, Mus musculus
  siRNA target sequence for 4921523A10Rik (NM_173449.1,711-729).
ggcgagacttctacgtatt

SEQ ID NO: 621081 - DNA, 19 bp, Mus musculus
  siRNA target sequence for 4921523A10Rik (NM_173449.1,713-731).
cgagacttctacgtattct

SEQ ID NO: 621082 - DNA, 19 bp, Mus musculus
  siRNA target sequence for 4921523A10Rik (NM_173449.1,737-755).
cagcaaccatctgatgatt

SEQ ID NO: 621083 - DNA, 19 bp, Mus musculus
  siRNA target sequence for 4921523A10Rik (NM_173449.1,740-758).
caaccatctgatgattaaa

SEQ ID NO: 621084 - DNA, 19 bp, Mus musculus
  siRNA target sequence for 4921523A10Rik (NM_173449.1,743-761).
ccatctgatgattaaaggt

SEQ ID NO: 621085 - DNA, 19 bp, Mus musculus
  siRNA target sequence for 4921523A10Rik (NM_173449.1,770-788).
ctgtagcaataataattca

SEQ ID NO: 621086 - DNA, 19 bp, Mus musculus
  siRNA target sequence for 4921523A10Rik (NM_173449.1,798-816).
gcggagccgaactgtaaat

SEQ ID NO: 621087 - DNA, 19 bp, Mus musculus
  siRNA target sequence for 4921523A10Rik (NM_173449.1,799-817).
cggagccgaactgtaaatt

SEQ ID NO: 621088 - DNA, 19 bp, Mus musculus
  siRNA target sequence for 4921523A10Rik (NM_173449.1,801-819).
gagccgaactgtaaattca

SEQ ID NO: 621089 - DNA, 19 bp, Mus musculus
  siRNA target sequence for 4921523A10Rik (NM_173449.1,818-836).
cacggtcgtgaacgatttt

SEQ ID NO: 621090 - DNA, 19 bp, Mus musculus
  siRNA target sequence for 4921523A10Rik (NM_173449.1,821-839).
ggtcgtgaacgattttggt

SEQ ID NO: 621091 - DNA, 19 bp, Mus musculus
  siRNA target sequence for 4921523A10Rik (NM_173449.1,856-874).
gctttttcggtttatttga

SEQ ID NO: 621092 - DNA, 19 bp, Mus musculus
  siRNA target sequence for 4921523A10Rik (NM_173449.1,857-875).
ctttttcggtttatttgat

SEQ ID NO: 621093 - DNA, 19 bp, Mus musculus
  siRNA target sequence for 4921523A10Rik (NM_173449.1,895-913).
cagcagacctggcatcaaa

SEQ ID NO: 621094 - DNA, 19 bp, Mus musculus
  siRNA target sequence for 4921523A10Rik (NM_173449.1,951-969).
caggatccttcctaccaaa

SEQ ID NO: 621095 - DNA, 19 bp, Mus musculus
  siRNA target sequence for 4921523A10Rik (NM_173449.1,981-999).
cagaagcaactcatcaatt

SEQ ID NO: 621096 - DNA, 19 bp, Mus musculus
  siRNA target sequence for 4921523A10Rik (NM_173449.1,986-1004).
gcaactcatcaattccttt

SEQ ID NO: 621097 - DNA, 19 bp, Mus musculus
  siRNA target sequence for 4921523A10Rik (NM_173449.1,1009-1027).
cggtgttcagggaggaata

SEQ ID NO: 621098 - DNA, 19 bp, Mus musculus
  siRNA target sequence for 4921523A10Rik (NM_173449.1,1189-1207).
gctcggcactcacttgtat

SEQ ID NO: 621099 - DNA, 19 bp, Mus musculus
  siRNA target sequence for 4921523A10Rik (NM_173449.1,1190-1208).
ctcggcactcacttgtata

SEQ ID NO: 621100 - DNA, 19 bp, Mus musculus
  siRNA target sequence for 4921523A10Rik (NM_173449.1,1226-1244).
gaacccacatgctaataaa

SEQ ID NO: 621101 - DNA, 19 bp, Mus musculus
  siRNA target sequence for 4921523A10Rik (NM_173449.1,1295-1313).
gactccacagatcatatct

SEQ ID NO: 621102 - DNA, 19 bp, Mus musculus
  siRNA target sequence for 4921523A10Rik (NM_173449.1,1304-1322).
gatcatatctggagtacta

SEQ ID NO: 621103 - DNA, 19 bp, Mus musculus
  siRNA target sequence for 4921523A10Rik (NM_173449.1,1475-1493).
cctggatgggcacatcaaa

SEQ ID NO: 621104 - DNA, 19 bp, Mus musculus
  siRNA target sequence for 4921523A10Rik (NM_173449.1,1476-1494).
ctggatgggcacatcaaaa

SEQ ID NO: 621105 - DNA, 19 bp, Mus musculus
  siRNA target sequence for 4921523A10Rik (NM_173449.1,1569-1587).
gtccctatagatgatctat

SEQ ID NO: 621106 - DNA, 19 bp, Mus musculus
  siRNA target sequence for 4921523A10Rik (NM_173449.1,1571-1589).
ccctatagatgatctatgt

SEQ ID NO: 621107 - DNA, 19 bp, Mus musculus
  siRNA target sequence for 4921523A10Rik (NM_173449.1,1573-1591).
ctatagatgatctatgtca

SEQ ID NO: 621108 - DNA, 19 bp, Mus musculus
  siRNA target sequence for 4921523A10Rik (NM_173449.1,1598-1616).
catcttagccactaatgga

SEQ ID NO: 621109 - DNA, 19 bp, Mus musculus
  siRNA target sequence for 4921523A10Rik (NM_173449.1,1621-1639).
ggcaagttttggacaagaa

SEQ ID NO: 621110 - DNA, 19 bp, Mus musculus
  siRNA target sequence for 4921523A10Rik (NM_173449.1,1689-1707).
catgttcctcgccctaaaa

SEQ ID NO: 621111 - DNA, 19 bp, Mus musculus
  siRNA target sequence for 4921523A10Rik (NM_173449.1,1692-1710).
gttcctcgccctaaaagca

SEQ ID NO: 621112 - DNA, 19 bp, Mus musculus
  siRNA target sequence for 4921523A10Rik (NM_173449.1,1719-1737).
ccacctataggccttcttt

SEQ ID NO: 621113 - DNA, 19 bp, Mus musculus
  siRNA target sequence for 4921523A10Rik (NM_173449.1,1813-1831).
ggacgaaagggctatctga

SEQ ID NO: 621114 - DNA, 19 bp, Mus musculus
  siRNA target sequence for 4921523A10Rik (NM_173449.1,1834-1852).
caatatatgctgaagctta

SEQ ID NO: 621115 - DNA, 19 bp, Mus musculus
  siRNA target sequence for 4921523A10Rik (NM_173449.1,1853-1871).
cactcatcagggtacattt

SEQ ID NO: 621116 - DNA, 19 bp, Mus musculus
  siRNA target sequence for 4921523A10Rik (NM_173449.1,1862-1880).
gggtacattttctccaaaa

SEQ ID NO: 621117 - DNA, 19 bp, Mus musculus
  siRNA target sequence for 4921523A10Rik (NM_173449.1,1876-1894).
caaaagtgaccccttatga

SEQ ID NO: 621118 - DNA, 19 bp, Mus musculus
  siRNA target sequence for 4921523A10Rik (NM_173449.1,1918-1936).
gcagcttacccactataga

SEQ ID NO: 621119 - DNA, 19 bp, Mus musculus
  siRNA target sequence for 4921523A10Rik (NM_173449.1,2044-2062).
gagacagcatcactgttat

SEQ ID NO: 621120 - DNA, 19 bp, Mus musculus
  siRNA target sequence for 4921523A10Rik (NM_173449.1,2048-2066).
cagcatcactgttatggta

SEQ ID NO: 621121 - DNA, 19 bp, Mus musculus
  siRNA target sequence for 4921523A10Rik (NM_173449.1,2050-2068).
gcatcactgttatggtaat

SEQ ID NO: 621122 - DNA, 19 bp, Mus musculus
  siRNA target sequence for 4921523A10Rik (NM_173449.1,2056-2074).
ctgttatggtaatgtttct

SEQ ID NO: 621123 - DNA, 19 bp, Mus musculus
  siRNA target sequence for 4921523A10Rik (NM_173449.1,2058-2076).
gttatggtaatgtttctca

SEQ ID NO: 621124 - DNA, 19 bp, Mus musculus
  siRNA target sequence for 4921533L14Rik (NM_026604.2,83-101).
ggccagtaaaacggataaa

SEQ ID NO: 621125 - DNA, 19 bp, Mus musculus
  siRNA target sequence for 4921533L14Rik (NM_026604.2,86-104).
cagtaaaacggataaacat

SEQ ID NO: 621126 - DNA, 19 bp, Mus musculus
  siRNA target sequence for 4921533L14Rik (NM_026604.2,88-106).
gtaaaacggataaacatga

SEQ ID NO: 621127 - DNA, 19 bp, Mus musculus
  siRNA target sequence for 4921533L14Rik (NM_026604.2,119-137).
ctctgtagtaggactttct

SEQ ID NO: 621128 - DNA, 19 bp, Mus musculus
  siRNA target sequence for 4921533L14Rik (NM_026604.2,162-180).
gctgttgcctccagtaatt

SEQ ID NO: 621129 - DNA, 19 bp, Mus musculus
  siRNA target sequence for 4921533L14Rik (NM_026604.2,165-183).
gttgcctccagtaattgct

SEQ ID NO: 621130 - DNA, 19 bp, Mus musculus
  siRNA target sequence for 4921533L14Rik (NM_026604.2,168-186).
gcctccagtaattgctata

SEQ ID NO: 621131 - DNA, 19 bp, Mus musculus
  siRNA target sequence for 4921533L14Rik (NM_026604.2,172-190).
ccagtaattgctatacaga

SEQ ID NO: 621132 - DNA, 19 bp, Mus musculus
  siRNA target sequence for 4921533L14Rik (NM_026604.2,173-191).
cagtaattgctatacagaa

SEQ ID NO: 621133 - DNA, 19 bp, Mus musculus
  siRNA target sequence for 4921533L14Rik (NM_026604.2,260-278).
cactaagctcatgaaaaca

SEQ ID NO: 621134 - DNA, 19 bp, Mus musculus
  siRNA target sequence for 4921533L14Rik (NM_026604.2,347-365).
caaatgtttgaaaactaca

SEQ ID NO: 621135 - DNA, 19 bp, Mus musculus
  siRNA target sequence for 4921533L14Rik (NM_026604.2,361-379).
ctacagcctcaagtgattt

SEQ ID NO: 621136 - DNA, 19 bp, Mus musculus
  siRNA target sequence for 4921533L14Rik (NM_026604.2,366-384).
gcctcaagtgatttcacta

SEQ ID NO: 621137 - DNA, 19 bp, Mus musculus
  siRNA target sequence for 4921533L14Rik (NM_026604.2,367-385).
cctcaagtgatttcactaa

SEQ ID NO: 621138 - DNA, 19 bp, Mus musculus
  siRNA target sequence for 4921533L14Rik (NM_026604.2,368-386).
ctcaagtgatttcactaaa

SEQ ID NO: 621139 - DNA, 19 bp, Mus musculus
  siRNA target sequence for 4921533L14Rik (NM_026604.2,373-391).
gtgatttcactaaatgctt

SEQ ID NO: 621140 - DNA, 19 bp, Mus musculus
  siRNA target sequence for 4921533L14Rik (NM_026604.2,393-411).
gaaggcagtccttcacata

SEQ ID NO: 621141 - DNA, 19 bp, Mus musculus
  siRNA target sequence for 4921533L14Rik (NM_026604.2,567-585).
cagttcgagctcttgaact

SEQ ID NO: 621142 - DNA, 19 bp, Mus musculus
  siRNA target sequence for 4921533L14Rik (NM_026604.2,581-599).
gaactctggcagcctaaat

SEQ ID NO: 621143 - DNA, 19 bp, Mus musculus
  siRNA target sequence for 4921533L14Rik (NM_026604.2,584-602).
ctctggcagcctaaatctt

SEQ ID NO: 621144 - DNA, 19 bp, Mus musculus
  siRNA target sequence for 4921533L14Rik (NM_026604.2,593-611).
cctaaatctttgtgcaaat

SEQ ID NO: 621145 - DNA, 19 bp, Mus musculus
  siRNA target sequence for 4921533L14Rik (NM_026604.2,594-612).
ctaaatctttgtgcaaatt

SEQ ID NO: 621146 - DNA, 19 bp, Mus musculus
  siRNA target sequence for 4921533L14Rik (NM_026604.2,614-632).
gtccatttcaggtaaactt

SEQ ID NO: 621147 - DNA, 19 bp, Mus musculus
  siRNA target sequence for 4921533L14Rik (NM_026604.2,640-658).
cccaagacaatagtgatat

SEQ ID NO: 621148 - DNA, 19 bp, Mus musculus
  siRNA target sequence for 4921533L14Rik (NM_026604.2,641-659).
ccaagacaatagtgatatt

SEQ ID NO: 621149 - DNA, 19 bp, Mus musculus
  siRNA target sequence for 4921533L14Rik (NM_026604.2,661-679).
cagatacggaacacaatct

SEQ ID NO: 621150 - DNA, 19 bp, Mus musculus
  siRNA target sequence for 4921533L14Rik (NM_026604.2,697-715).
caaatgattgccatgacta

SEQ ID NO: 621151 - DNA, 19 bp, Mus musculus
  siRNA target sequence for 4921533L14Rik (NM_026604.2,725-743).
cccatcttcgggagttaga

SEQ ID NO: 621152 - DNA, 19 bp, Mus musculus
  siRNA target sequence for 4921533L14Rik (NM_026604.2,869-887).
ggccttagactctaatgat

SEQ ID NO: 621153 - DNA, 19 bp, Mus musculus
  siRNA target sequence for 4921533L14Rik (NM_026604.2,870-888).
gccttagactctaatgata

SEQ ID NO: 621154 - DNA, 19 bp, Mus musculus
  siRNA target sequence for 4921533L14Rik (NM_026604.2,871-889).
ccttagactctaatgataa

SEQ ID NO: 621155 - DNA, 19 bp, Mus musculus
  siRNA target sequence for 4921533L14Rik (NM_026604.2,957-975).
gaatcattaactaaattca

SEQ ID NO: 621156 - DNA, 19 bp, Mus musculus
  siRNA target sequence for 4921533L14Rik (NM_026604.2,997-1015).
ctacaaaagaatatcatgt

SEQ ID NO: 621157 - DNA, 19 bp, Mus musculus
  siRNA target sequence for 4921533L14Rik (NM_026604.2,1020-1038).
gtaagtagtgacacgatta

SEQ ID NO: 621158 - DNA, 19 bp, Mus musculus
  siRNA target sequence for 4921533L14Rik (NM_026604.2,1024-1042).
gtagtgacacgattaaatt

SEQ ID NO: 621159 - DNA, 19 bp, Mus musculus
  siRNA target sequence for 4921533L14Rik (NM_026604.2,1060-1078).
cgtatgcctcctctagatt

SEQ ID NO: 621160 - DNA, 19 bp, Mus musculus
  siRNA target sequence for 4921533L14Rik (NM_026604.2,1070-1088).
ctctagattctcagattca

SEQ ID NO: 621161 - DNA, 19 bp, Mus musculus
  siRNA target sequence for 4921533L14Rik (NM_026604.2,1131-1149).
ccggagatagcctttgaga

SEQ ID NO: 621162 - DNA, 19 bp, Mus musculus
  siRNA target sequence for 4921533L14Rik (NM_026604.2,1159-1177).
ggccaggtccttgcaataa

SEQ ID NO: 621163 - DNA, 19 bp, Mus musculus
  siRNA target sequence for 4921533L14Rik (NM_026604.2,1160-1178).
gccaggtccttgcaataat

SEQ ID NO: 621164 - DNA, 19 bp, Mus musculus
  siRNA target sequence for 4921533L14Rik (NM_026604.2,1162-1180).
caggtccttgcaataatga

SEQ ID NO: 621165 - DNA, 19 bp, Mus musculus
  siRNA target sequence for 4921533L14Rik (NM_026604.2,1164-1182).
ggtccttgcaataatgaaa

SEQ ID NO: 621166 - DNA, 19 bp, Mus musculus
  siRNA target sequence for 4921533L14Rik (NM_026604.2,1205-1223).
gaagcctgatcacaatgta

SEQ ID NO: 621167 - DNA, 19 bp, Mus musculus
  siRNA target sequence for 4921533L14Rik (NM_026604.2,1212-1230).
gatcacaatgtaaaatttt

SEQ ID NO: 621168 - DNA, 19 bp, Mus musculus
  siRNA target sequence for 4921533L14Rik (NM_026604.2,1251-1269).
gagagcacaagtgctttaa

SEQ ID NO: 621169 - DNA, 19 bp, Mus musculus
  siRNA target sequence for 4921533L14Rik (NM_026604.2,1255-1273).
gcacaagtgctttaagtga

SEQ ID NO: 621170 - DNA, 19 bp, Mus musculus
  siRNA target sequence for 4921533L14Rik (NM_026604.2,1261-1279).
gtgctttaagtgaaataca

SEQ ID NO: 621171 - DNA, 19 bp, Mus musculus
  siRNA target sequence for 4921533L14Rik (NM_026604.2,1327-1345).
cacccgatgacaactgtaa

SEQ ID NO: 621172 - DNA, 19 bp, Mus musculus
  siRNA target sequence for 4921533L14Rik (NM_026604.2,1329-1347).
cccgatgacaactgtaaga

SEQ ID NO: 621173 - DNA, 19 bp, Mus musculus
  siRNA target sequence for 4921533L14Rik (NM_026604.2,1330-1348).
ccgatgacaactgtaagaa

SEQ ID NO: 621174 - DNA, 19 bp, Mus musculus
  siRNA target sequence for 4921533L14Rik (NM_026604.2,1358-1376).
gcctgactgtcatctaagt

SEQ ID NO: 621175 - DNA, 19 bp, Mus musculus
  siRNA target sequence for 4921533L14Rik (NM_026604.2,1379-1397).
cagtaaaactgtattcaat

SEQ ID NO: 621176 - DNA, 19 bp, Mus musculus
  siRNA target sequence for 4921533L14Rik (NM_026604.2,1394-1412).
caatctaggaacaatggat

SEQ ID NO: 621177 - DNA, 19 bp, Mus musculus
  siRNA target sequence for 4921533L14Rik (NM_026604.2,1416-1434).
ccaaaatgcgacgatacta

SEQ ID NO: 621178 - DNA, 19 bp, Mus musculus
  siRNA target sequence for 4921533L14Rik (NM_026604.2,1417-1435).
caaaatgcgacgatactaa

SEQ ID NO: 621179 - DNA, 19 bp, Mus musculus
  siRNA target sequence for 4921533L14Rik (NM_026604.2,1424-1442).
cgacgatactaaaaagtca

SEQ ID NO: 621180 - DNA, 19 bp, Mus musculus
  siRNA target sequence for 4921533L14Rik (NM_026604.2,1425-1443).
gacgatactaaaaagtcaa

SEQ ID NO: 621181 - DNA, 19 bp, Mus musculus
  siRNA target sequence for 4921533L14Rik (NM_026604.2,1428-1446).
gatactaaaaagtcaagta

SEQ ID NO: 621182 - DNA, 19 bp, Mus musculus
  siRNA target sequence for 4921533L14Rik (NM_026604.2,1432-1450).
ctaaaaagtcaagtattat

SEQ ID NO: 621183 - DNA, 19 bp, Mus musculus
  siRNA target sequence for 4921533L14Rik (NM_026604.2,1439-1457).
gtcaagtattattttgcaa

SEQ ID NO: 621184 - DNA, 19 bp, Mus musculus
  siRNA target sequence for 4921533L14Rik (NM_026604.2,1494-1512).
gatacgttagcaatgcatt

SEQ ID NO: 621185 - DNA, 19 bp, Mus musculus
  siRNA target sequence for 4921533L14Rik (NM_026604.2,1498-1516).
cgttagcaatgcattcctt

SEQ ID NO: 621186 - DNA, 19 bp, Mus musculus
  siRNA target sequence for 4921533L14Rik (NM_026604.2,1503-1521).
gcaatgcattccttagatt

SEQ ID NO: 621187 - DNA, 19 bp, Mus musculus
  siRNA target sequence for 4921533L14Rik (NM_026604.2,1504-1522).
caatgcattccttagattt

SEQ ID NO: 621188 - DNA, 19 bp, Mus musculus
  siRNA target sequence for 4921533L14Rik (NM_026604.2,1509-1527).
cattccttagatttaagca

SEQ ID NO: 621189 - DNA, 19 bp, Mus musculus
  siRNA target sequence for 4921533L14Rik (NM_026604.2,1547-1565).
cgttttcttggatgaagat

SEQ ID NO: 621190 - DNA, 19 bp, Mus musculus
  siRNA target sequence for 4921533L14Rik (NM_026604.2,1631-1649).
ccagagtcagggtacatct

SEQ ID NO: 621191 - DNA, 19 bp, Mus musculus
  siRNA target sequence for 4921533L14Rik (NM_026604.2,1634-1652).
gagtcagggtacatctagt

SEQ ID NO: 621192 - DNA, 19 bp, Mus musculus
  siRNA target sequence for 4921533L14Rik (NM_026604.2,1638-1656).
cagggtacatctagtaaca

SEQ ID NO: 621193 - DNA, 19 bp, Mus musculus
  siRNA target sequence for 4921533L14Rik (NM_026604.2,1641-1659).
ggtacatctagtaacaact

SEQ ID NO: 621194 - DNA, 19 bp, Mus musculus
  siRNA target sequence for 4921533L14Rik (NM_026604.2,1665-1683).
gaatcagtgccaacactaa

SEQ ID NO: 621195 - DNA, 19 bp, Mus musculus
  siRNA target sequence for 4921533L14Rik (NM_026604.2,1675-1693).
caacactaaattcaaaact

SEQ ID NO: 621196 - DNA, 19 bp, Mus musculus
  siRNA target sequence for 4921533L14Rik (NM_026604.2,1680-1698).
ctaaattcaaaactgattt

SEQ ID NO: 621197 - DNA, 19 bp, Mus musculus
  siRNA target sequence for 4921533L14Rik (NM_026604.2,1780-1798).
gcggtgagccattaaatca

SEQ ID NO: 621198 - DNA, 19 bp, Mus musculus
  siRNA target sequence for 4921533L14Rik (NM_026604.2,1787-1805).
gccattaaatcacaaacaa

SEQ ID NO: 621199 - DNA, 19 bp, Mus musculus
  siRNA target sequence for 4921533L14Rik (NM_026604.2,1789-1807).
cattaaatcacaaacaagt

SEQ ID NO: 621200 - DNA, 19 bp, Mus musculus
  siRNA target sequence for 4921533L14Rik (NM_026604.2,1869-1887).
caagggctggtggaaaatt

SEQ ID NO: 621201 - DNA, 19 bp, Mus musculus
  siRNA target sequence for 4921533L14Rik (NM_026604.2,1872-1890).
gggctggtggaaaattatt

SEQ ID NO: 621202 - DNA, 19 bp, Mus musculus
  siRNA target sequence for 4921533L14Rik (NM_026604.2,1920-1938).
gatgcatgtgctattacct

SEQ ID NO: 621203 - DNA, 19 bp, Mus musculus
  siRNA target sequence for 4921533L14Rik (NM_026604.2,1967-1985).
ctgcgacaaagggattagt

SEQ ID NO: 621204 - DNA, 19 bp, Mus musculus
  siRNA target sequence for 4921533L14Rik (NM_026604.2,1969-1987).
gcgacaaagggattagtga

SEQ ID NO: 621205 - DNA, 19 bp, Mus musculus
  siRNA target sequence for 4921533L14Rik (NM_026604.2,1970-1988).
cgacaaagggattagtgat

SEQ ID NO: 621206 - DNA, 19 bp, Mus musculus
  siRNA target sequence for 4921533L14Rik (NM_026604.2,2036-2054).
ggttcaaaatgggtatcat

SEQ ID NO: 621207 - DNA, 19 bp, Mus musculus
  siRNA target sequence for 4921533L14Rik (NM_026604.2,2073-2091).
gctacggatggaacagtaa

SEQ ID NO: 621208 - DNA, 19 bp, Mus musculus
  siRNA target sequence for 4921533L14Rik (NM_026604.2,2077-2095).
cggatggaacagtaagtgt

SEQ ID NO: 621209 - DNA, 19 bp, Mus musculus
  siRNA target sequence for 4921533L14Rik (NM_026604.2,2151-2169).
ctaagcagcaactatctga

SEQ ID NO: 621210 - DNA, 19 bp, Mus musculus
  siRNA target sequence for 4921533L14Rik (NM_026604.2,2231-2249).
gcgagagtctccttgtgtt

SEQ ID NO: 621211 - DNA, 19 bp, Mus musculus
  siRNA target sequence for 4921533L14Rik (NM_026604.2,2235-2253).
gagtctccttgtgttaaat

SEQ ID NO: 621212 - DNA, 19 bp, Mus musculus
  siRNA target sequence for 4921533L14Rik (NM_026604.2,2296-2314).
gcagcatttcttacaactt

SEQ ID NO: 621213 - DNA, 19 bp, Mus musculus
  siRNA target sequence for 4921533L14Rik (NM_026604.2,2486-2504).
ggacggcgtgcatctcatt

SEQ ID NO: 621214 - DNA, 19 bp, Mus musculus
  siRNA target sequence for 4921533L14Rik (NM_026604.2,2490-2508).
ggcgtgcatctcattgtct

SEQ ID NO: 621215 - DNA, 19 bp, Mus musculus
  siRNA target sequence for 4921533L14Rik (NM_026604.2,2576-2594).
gcctgggggaagagttgat

SEQ ID NO: 621216 - DNA, 19 bp, Mus musculus
  siRNA target sequence for 4921533L14Rik (NM_026604.2,2648-2666).
gactgatcgccttttggat

SEQ ID NO: 621217 - DNA, 19 bp, Mus musculus
  siRNA target sequence for 4921533L14Rik (NM_026604.2,2664-2682).
gatgagatcatacagtata

SEQ ID NO: 621218 - DNA, 19 bp, Mus musculus
  siRNA target sequence for 4921533L14Rik (NM_026604.2,2695-2713).
gtttaacagtctcaaaaat

SEQ ID NO: 621219 - DNA, 19 bp, Mus musculus
  siRNA target sequence for 4921533L14Rik (NM_026604.2,2701-2719).
cagtctcaaaaataagctt

SEQ ID NO: 621220 - DNA, 19 bp, Mus musculus
  siRNA target sequence for 4921533L14Rik (NM_026604.2,2716-2734).
gctttattggacattcgtt

SEQ ID NO: 621221 - DNA, 19 bp, Mus musculus
  siRNA target sequence for 4921533L14Rik (NM_026604.2,2725-2743).
gacattcgttaggcaattt

SEQ ID NO: 621222 - DNA, 19 bp, Mus musculus
  siRNA target sequence for 4921533L14Rik (NM_026604.2,2727-2745).
cattcgttaggcaatttaa

SEQ ID NO: 621223 - DNA, 19 bp, Mus musculus
  siRNA target sequence for 4921533L14Rik (NM_026604.2,2731-2749).
cgttaggcaatttaataat

SEQ ID NO: 621224 - DNA, 19 bp, Mus musculus
  siRNA target sequence for 4921533L14Rik (NM_026604.2,2764-2782).
caaggccaaggtttaaata

SEQ ID NO: 621225 - DNA, 19 bp, Mus musculus
  siRNA target sequence for 4921533L14Rik (NM_026604.2,2829-2847).
cttggtacactctacaaca

SEQ ID NO: 621226 - DNA, 19 bp, Mus musculus
  siRNA target sequence for 4921533L14Rik (NM_026604.2,2849-2867).
cagtgctctcgtcaataca

SEQ ID NO: 621227 - DNA, 19 bp, Mus musculus
  siRNA target sequence for 4921533L14Rik (NM_026604.2,2866-2884).
caggtctctggtttatgca

SEQ ID NO: 621228 - DNA, 19 bp, Mus musculus
  siRNA target sequence for 4921533L14Rik (NM_026604.2,2915-2933).
gttgacatgtcgagatcat

SEQ ID NO: 621229 - DNA, 19 bp, Mus musculus
  siRNA target sequence for 4921533L14Rik (NM_026604.2,2918-2936).
gacatgtcgagatcattca

SEQ ID NO: 621230 - DNA, 19 bp, Mus musculus
  siRNA target sequence for 4921533L14Rik (NM_026604.2,2937-2955).
gaccctcgccaaacatttt

SEQ ID NO: 621231 - DNA, 19 bp, Mus musculus
  siRNA target sequence for 4921533L14Rik (NM_026604.2,2939-2957).
ccctcgccaaacattttta

SEQ ID NO: 621232 - DNA, 19 bp, Mus musculus
  siRNA target sequence for 4921533L14Rik (NM_026604.2,2940-2958).
cctcgccaaacatttttat

SEQ ID NO: 621233 - DNA, 19 bp, Mus musculus
  siRNA target sequence for 4921533L14Rik (NM_026604.2,2943-2961).
cgccaaacatttttatata

SEQ ID NO: 621234 - DNA, 19 bp, Mus musculus
  siRNA target sequence for 4921533L14Rik (NM_026604.2,2976-2994).
gcgggacttcattatttca

SEQ ID NO: 621235 - DNA, 19 bp, Mus musculus
  siRNA target sequence for 4921533L14Rik (NM_026604.2,2977-2995).
cgggacttcattatttcaa

SEQ ID NO: 621236 - DNA, 19 bp, Mus musculus
  siRNA target sequence for 4921533L14Rik (NM_026604.2,3017-3035).
cctgcaggatcgctatgtt

SEQ ID NO: 621237 - DNA, 19 bp, Mus musculus
  siRNA target sequence for 4921533L14Rik (NM_026604.2,3027-3045).
cgctatgttccttaccatt

SEQ ID NO: 621238 - DNA, 19 bp, Mus musculus
  siRNA target sequence for 4921533L14Rik (NM_026604.2,3041-3059).
ccattctgcccgcattgaa

SEQ ID NO: 621239 - DNA, 19 bp, Mus musculus
  siRNA target sequence for 4921533L14Rik (NM_026604.2,3087-3105).
cagtcaggacaaatctatt

SEQ ID NO: 621240 - DNA, 19 bp, Mus musculus
  siRNA target sequence for 4921533L14Rik (NM_026604.2,3096-3114).
caaatctattccgaaatga

SEQ ID NO: 621241 - DNA, 19 bp, Mus musculus
  siRNA target sequence for 4921533L14Rik (NM_026604.2,3161-3179).
ggttcggtacaatgtcatt

SEQ ID NO: 621242 - DNA, 19 bp, Mus musculus
  siRNA target sequence for 4921533L14Rik (NM_026604.2,3162-3180).
gttcggtacaatgtcatta

SEQ ID NO: 621243 - DNA, 19 bp, Mus musculus
  siRNA target sequence for 4921533L14Rik (NM_026604.2,3279-3297).
gccctcaaatattttcagt

SEQ ID NO: 621244 - DNA, 19 bp, Mus musculus
  siRNA target sequence for 4933429I20Rik (NM_172875.1,334-352).
gctggctatctgagtgaat

SEQ ID NO: 621245 - DNA, 19 bp, Mus musculus
  siRNA target sequence for 4933429I20Rik (NM_172875.1,347-365).
gtgaatcggactttgtgat

SEQ ID NO: 621246 - DNA, 19 bp, Mus musculus
  siRNA target sequence for 4933429I20Rik (NM_172875.1,511-529).
cctcgagtccggccttttt

SEQ ID NO: 621247 - DNA, 19 bp, Mus musculus
  siRNA target sequence for 4933429I20Rik (NM_172875.1,512-530).
ctcgagtccggccttttta

SEQ ID NO: 621248 - DNA, 19 bp, Mus musculus
  siRNA target sequence for 4933429I20Rik (NM_172875.1,638-656).
gtgtccctgccagtaagat

SEQ ID NO: 621249 - DNA, 19 bp, Mus musculus
  siRNA target sequence for 4933429I20Rik (NM_172875.1,640-658).
gtccctgccagtaagatca

SEQ ID NO: 621250 - DNA, 19 bp, Mus musculus
  siRNA target sequence for 4933429I20Rik (NM_172875.1,643-661).
cctgccagtaagatcatct

SEQ ID NO: 621251 - DNA, 19 bp, Mus musculus
  siRNA target sequence for 4933429I20Rik (NM_172875.1,679-697).
caagttgcacagatcaagt

SEQ ID NO: 621252 - DNA, 19 bp, Mus musculus
  siRNA target sequence for 4933429I20Rik (NM_172875.1,807-825).
ggactcccactctctgaat

SEQ ID NO: 621253 - DNA, 19 bp, Mus musculus
  siRNA target sequence for 4933429I20Rik (NM_172875.1,844-862).
ggggcgtcgctgaaatcct

SEQ ID NO: 621254 - DNA, 19 bp, Mus musculus
  siRNA target sequence for 4933429I20Rik (NM_172875.1,909-927).
gggtgtgagttttcacatt

SEQ ID NO: 621255 - DNA, 19 bp, Mus musculus
  siRNA target sequence for 4933429I20Rik (NM_172875.1,976-994).
gctaggctggtgtttcaga

SEQ ID NO: 621256 - DNA, 19 bp, Mus musculus
  siRNA target sequence for 4933429I20Rik (NM_172875.1,977-995).
ctaggctggtgtttcagat

SEQ ID NO: 621257 - DNA, 19 bp, Mus musculus
  siRNA target sequence for 4933429I20Rik (NM_172875.1,1081-1099).
gagatggcctcagtaatta

SEQ ID NO: 621258 - DNA, 19 bp, Mus musculus
  siRNA target sequence for 4933429I20Rik (NM_172875.1,1086-1104).
ggcctcagtaattaactca

SEQ ID NO: 621259 - DNA, 19 bp, Mus musculus
  siRNA target sequence for 4933429I20Rik (NM_172875.1,1262-1280).
ctaagagcatcgtgtacta

SEQ ID NO: 621260 - DNA, 19 bp, Mus musculus
  siRNA target sequence for 4933429I20Rik (NM_172875.1,1292-1310).
gcgtttatggggtcttcaa

SEQ ID NO: 621261 - DNA, 19 bp, Mus musculus
  siRNA target sequence for 4933429I20Rik (NM_172875.1,1294-1312).
gtttatggggtcttcaact

SEQ ID NO: 621262 - DNA, 19 bp, Mus musculus
  siRNA target sequence for 4933429I20Rik (NM_172875.1,1442-1460).
ggctgccgcaactacaagt

SEQ ID NO: 621263 - DNA, 19 bp, Mus musculus
  siRNA target sequence for 4933429I20Rik (NM_172875.1,1443-1461).
gctgccgcaactacaagta

SEQ ID NO: 621264 - DNA, 19 bp, Mus musculus
  siRNA target sequence for 4933429I20Rik (NM_172875.1,1493-1511).
cttacaccgtggacacaaa

SEQ ID NO: 621265 - DNA, 19 bp, Mus musculus
  siRNA target sequence for 6330583M11Rik (NM_024465.1,157-175).
gcactccatgtttttgact

SEQ ID NO: 621266 - DNA, 19 bp, Mus musculus
  siRNA target sequence for 6330583M11Rik (NM_024465.1,230-248).
gcaccggagtggcaacaaa

SEQ ID NO: 621267 - DNA, 19 bp, Mus musculus
  siRNA target sequence for 6330583M11Rik (NM_024465.1,233-251).
ccggagtggcaacaaatct

SEQ ID NO: 621268 - DNA, 19 bp, Mus musculus
  siRNA target sequence for 6330583M11Rik (NM_024465.1,284-302).
cagatgcccttatattgga

SEQ ID NO: 621269 - DNA, 19 bp, Mus musculus
  siRNA target sequence for 6330583M11Rik (NM_024465.1,350-368).
cagtgatataccgatactt

SEQ ID NO: 621270 - DNA, 19 bp, Mus musculus
  siRNA target sequence for 6330583M11Rik (NM_024465.1,387-405).
cttcctcgaccccattaca

SEQ ID NO: 621271 - DNA, 19 bp, Mus musculus
  siRNA target sequence for 6330583M11Rik (NM_024465.1,399-417).
cattacaagcagtggaatt

SEQ ID NO: 621272 - DNA, 19 bp, Mus musculus
  siRNA target sequence for 6330583M11Rik (NM_024465.1,497-515).
cctttcatctcggtagaaa

SEQ ID NO: 621273 - DNA, 19 bp, Mus musculus
  siRNA target sequence for 6330583M11Rik (NM_024465.1,505-523).
ctcggtagaaagctataca

SEQ ID NO: 621274 - DNA, 19 bp, Mus musculus
  siRNA target sequence for 6330583M11Rik (NM_024465.1,593-611).
gctacagacataaatacat

SEQ ID NO: 621275 - DNA, 19 bp, Mus musculus
  siRNA target sequence for 6330583M11Rik (NM_024465.1,621-639).
cccagagcttccaaggata

SEQ ID NO: 621276 - DNA, 19 bp, Mus musculus
  siRNA target sequence for 6330583M11Rik (NM_024465.1,625-643).
gagcttccaaggatactga

SEQ ID NO: 621277 - DNA, 19 bp, Mus musculus
  siRNA target sequence for 9130017A15Rik (NM_177242.2,440-458).
gtaagggcctgctcaagaa

SEQ ID NO: 621278 - DNA, 19 bp, Mus musculus
  siRNA target sequence for 9130017A15Rik (NM_177242.2,596-614).
catgcgagcggttagtgaa

SEQ ID NO: 621279 - DNA, 19 bp, Mus musculus
  siRNA target sequence for 9130017A15Rik (NM_177242.2,599-617).
gcgagcggttagtgaaaga

SEQ ID NO: 621280 - DNA, 19 bp, Mus musculus
  siRNA target sequence for 9130017A15Rik (NM_177242.2,600-618).
cgagcggttagtgaaagaa

SEQ ID NO: 621281 - DNA, 19 bp, Mus musculus
  siRNA target sequence for 9130017A15Rik (NM_177242.2,907-925).
gctgctgatagcacatctt

SEQ ID NO: 621282 - DNA, 19 bp, Mus musculus
  siRNA target sequence for 9130017A15Rik (NM_177242.2,908-926).
ctgctgatagcacatcttt

SEQ ID NO: 621283 - DNA, 19 bp, Mus musculus
  siRNA target sequence for 9130017A15Rik (NM_177242.2,931-949).
gtccagttaggagatatca

SEQ ID NO: 621284 - DNA, 19 bp, Mus musculus
  siRNA target sequence for 9130017A15Rik (NM_177242.2,1047-1065).
gcggactgcaagaagcatt

SEQ ID NO: 621285 - DNA, 19 bp, Mus musculus
  siRNA target sequence for 9130017A15Rik (NM_177242.2,1086-1104).
ggcctatgacccaaattat

SEQ ID NO: 621286 - DNA, 19 bp, Mus musculus
  siRNA target sequence for 9130017A15Rik (NM_177242.2,1088-1106).
cctatgacccaaattatat

SEQ ID NO: 621287 - DNA, 19 bp, Mus musculus
  siRNA target sequence for 9130017A15Rik (NM_177242.2,1107-1125).
gtcaccttttgcacagttt

SEQ ID NO: 621288 - DNA, 19 bp, Mus musculus
  siRNA target sequence for 9130017A15Rik (NM_177242.2,1111-1129).
ccttttgcacagtttgcat

SEQ ID NO: 621289 - DNA, 19 bp, Mus musculus
  siRNA target sequence for 9130017A15Rik (NM_177242.2,1126-1144).
gcatgtgacaatggattaa

SEQ ID NO: 621290 - DNA, 19 bp, Mus musculus
  siRNA target sequence for 9130017A15Rik (NM_177242.2,1173-1191).
caccgtcctcctctcaata

SEQ ID NO: 621291 - DNA, 19 bp, Mus musculus
  siRNA target sequence for 9130017A15Rik (NM_177242.2,1175-1193).
ccgtcctcctctcaatagt

SEQ ID NO: 621292 - DNA, 19 bp, Mus musculus
  siRNA target sequence for 9630033F20Rik (NM_177003.2,103-121).
ccgccatggtgaaacaaga

SEQ ID NO: 621293 - DNA, 19 bp, Mus musculus
  siRNA target sequence for 9630033F20Rik (NM_177003.2,110-128).
ggtgaaacaagacttaata

SEQ ID NO: 621294 - DNA, 19 bp, Mus musculus
  siRNA target sequence for 9630033F20Rik (NM_177003.2,120-138).
gacttaataaggagaaaat

SEQ ID NO: 621295 - DNA, 19 bp, Mus musculus
  siRNA target sequence for 9630033F20Rik (NM_177003.2,259-277).
gactaagcagaccatacat

SEQ ID NO: 621296 - DNA, 19 bp, Mus musculus
  siRNA target sequence for 9630033F20Rik (NM_177003.2,410-428).
gaagagtgccccatgttca

SEQ ID NO: 621297 - DNA, 19 bp, Mus musculus
  siRNA target sequence for 9630033F20Rik (NM_177003.2,447-465).
cagttgagcaggtaaagat

SEQ ID NO: 621298 - DNA, 19 bp, Mus musculus
  siRNA target sequence for 9630033F20Rik (NM_177003.2,469-487).
cggaaaggatttctttgat

SEQ ID NO: 621299 - DNA, 19 bp, Mus musculus
  siRNA target sequence for 9630033F20Rik (NM_177003.2,547-565).
gccaggcagcggtttggaa

SEQ ID NO: 621300 - DNA, 19 bp, Mus musculus
  siRNA target sequence for 9630033F20Rik (NM_177003.2,668-686).
catggcgcttacatgagaa

SEQ ID NO: 621301 - DNA, 19 bp, Mus musculus
  siRNA target sequence for 9630033F20Rik (NM_177003.2,728-746).
ccaggagcgagagacaaat

SEQ ID NO: 621302 - DNA, 19 bp, Mus musculus
  siRNA target sequence for 9630033F20Rik (NM_177003.2,822-840).
cgattcagtgcgtttgtat

SEQ ID NO: 621303 - DNA, 19 bp, Mus musculus
  siRNA target sequence for 9630044M06 (NM_172459.1,49-67).
cacacctgtgtcacaaatt

SEQ ID NO: 621304 - DNA, 19 bp, Mus musculus
  siRNA target sequence for 9630044M06 (NM_172459.1,51-69).
cacctgtgtcacaaattta

SEQ ID NO: 621305 - DNA, 19 bp, Mus musculus
  siRNA target sequence for 9630044M06 (NM_172459.1,71-89).
cgaaacctcggcaaaagca

SEQ ID NO: 621306 - DNA, 19 bp, Mus musculus
  siRNA target sequence for 9630044M06 (NM_172459.1,114-132).
gatggtgggaaatctagta

SEQ ID NO: 621307 - DNA, 19 bp, Mus musculus
  siRNA target sequence for 9630044M06 (NM_172459.1,288-306).
caactgtcggggaacaata

SEQ ID NO: 621308 - DNA, 19 bp, Mus musculus
  siRNA target sequence for 9630044M06 (NM_172459.1,293-311).
gtcggggaacaatagcaaa

SEQ ID NO: 621309 - DNA, 19 bp, Mus musculus
  siRNA target sequence for 9630044M06 (NM_172459.1,295-313).
cggggaacaatagcaaatt

SEQ ID NO: 621310 - DNA, 19 bp, Mus musculus
  siRNA target sequence for 9630044M06 (NM_172459.1,314-332).
ccttgacatgtgttcaact

SEQ ID NO: 621311 - DNA, 19 bp, Mus musculus
  siRNA target sequence for 9630044M06 (NM_172459.1,394-412).
gaccatgtggcattagtct

SEQ ID NO: 621312 - DNA, 19 bp, Mus musculus
  siRNA target sequence for 9630044M06 (NM_172459.1,416-434).
ctccaggaatagaccttat

SEQ ID NO: 621313 - DNA, 19 bp, Mus musculus
  siRNA target sequence for 9630044M06 (NM_172459.1,427-445).
gaccttatcgctgcatttt

SEQ ID NO: 621314 - DNA, 19 bp, Mus musculus
  siRNA target sequence for 9630044M06 (NM_172459.1,493-511).
catccacagaacattgcaa

SEQ ID NO: 621315 - DNA, 19 bp, Mus musculus
  siRNA target sequence for 9630044M06 (NM_172459.1,515-533).
cattgcctacagtcaagat

SEQ ID NO: 621316 - DNA, 19 bp, Mus musculus
  siRNA target sequence for 9630044M06 (NM_172459.1,564-582).
catgacaacacaactgata

SEQ ID NO: 621317 - DNA, 19 bp, Mus musculus
  siRNA target sequence for 9630044M06 (NM_172459.1,567-585).
gacaacacaactgatatgt

SEQ ID NO: 621318 - DNA, 19 bp, Mus musculus
  siRNA target sequence for 9630044M06 (NM_172459.1,746-764).
ggatgctagctggtgtaaa

SEQ ID NO: 621319 - DNA, 19 bp, Mus musculus
  siRNA target sequence for 9630044M06 (NM_172459.1,751-769).
ctagctggtgtaaagatgt

SEQ ID NO: 621320 - DNA, 19 bp, Mus musculus
  siRNA target sequence for 9630044M06 (NM_172459.1,787-805).
gccttttgccgttctatta

SEQ ID NO: 621321 - DNA, 19 bp, Mus musculus
  siRNA target sequence for 9630044M06 (NM_172459.1,788-806).
ccttttgccgttctattaa

SEQ ID NO: 621322 - DNA, 19 bp, Mus musculus
  siRNA target sequence for 9630044M06 (NM_172459.1,816-834).
cgagctttacccttctaga

SEQ ID NO: 621323 - DNA, 19 bp, Mus musculus
  siRNA target sequence for 9630044M06 (NM_172459.1,967-985).
cttgctgtgagtcaataca

SEQ ID NO: 621324 - DNA, 19 bp, Mus musculus
  siRNA target sequence for 9630044M06 (NM_172459.1,988-1006).
gtccgggataccttctgtt

SEQ ID NO: 621325 - DNA, 19 bp, Mus musculus
  siRNA target sequence for 9630044M06 (NM_172459.1,1037-1055).
ggctgggctcacaaactga

SEQ ID NO: 621326 - DNA, 19 bp, Mus musculus
  siRNA target sequence for 9630044M06 (NM_172459.1,1078-1096).
gacttgtcccgggtaagaa

SEQ ID NO: 621327 - DNA, 19 bp, Mus musculus
  siRNA target sequence for 9630044M06 (NM_172459.1,1124-1142).
cccgaatcgcccttacaca

SEQ ID NO: 621328 - DNA, 19 bp, Mus musculus
  siRNA target sequence for 9630044M06 (NM_172459.1,1176-1194).
ccacccacgagctgttagt

SEQ ID NO: 621329 - DNA, 19 bp, Mus musculus
  siRNA target sequence for 9630044M06 (NM_172459.1,1177-1195).
cacccacgagctgttagta

SEQ ID NO: 621330 - DNA, 19 bp, Mus musculus
  siRNA target sequence for 9630044M06 (NM_172459.1,1180-1198).
ccacgagctgttagtactt

SEQ ID NO: 621331 - DNA, 19 bp, Mus musculus
  siRNA target sequence for 9630044M06 (NM_172459.1,1183-1201).
cgagctgttagtacttcat

SEQ ID NO: 621332 - DNA, 19 bp, Mus musculus
  siRNA target sequence for 9630044M06 (NM_172459.1,1259-1277).
ccactgtctatgttgacat

SEQ ID NO: 621333 - DNA, 19 bp, Mus musculus
  siRNA target sequence for 9630044M06 (NM_172459.1,1363-1381).
cctggggtccggatcatta

SEQ ID NO: 621334 - DNA, 19 bp, Mus musculus
  siRNA target sequence for 9630044M06 (NM_172459.1,1364-1382).
ctggggtccggatcattat

SEQ ID NO: 621335 - DNA, 19 bp, Mus musculus
  siRNA target sequence for 9630044M06 (NM_172459.1,1452-1470).
caatgccagtggctatttt

SEQ ID NO: 621336 - DNA, 19 bp, Mus musculus
  siRNA target sequence for 9630044M06 (NM_172459.1,1464-1482).
ctattttaccatttatgga

SEQ ID NO: 621337 - DNA, 19 bp, Mus musculus
  siRNA target sequence for 9630044M06 (NM_172459.1,1509-1527).
caactcccggttaagtttt

SEQ ID NO: 621338 - DNA, 19 bp, Mus musculus
  siRNA target sequence for 9630044M06 (NM_172459.1,1512-1530).
ctcccggttaagttttgga

SEQ ID NO: 621339 - DNA, 19 bp, Mus musculus
  siRNA target sequence for 9630044M06 (NM_172459.1,1611-1629).
ccatgatgccctctatgta

SEQ ID NO: 621340 - DNA, 19 bp, Mus musculus
  siRNA target sequence for 9630044M06 (NM_172459.1,1670-1688).
ggtaccacccaatagacat

SEQ ID NO: 621341 - DNA, 19 bp, Mus musculus
  siRNA target sequence for 9630044M06 (NM_172459.1,1671-1689).
gtaccacccaatagacata

SEQ ID NO: 621342 - DNA, 19 bp, Mus musculus
  siRNA target sequence for 9630044M06 (NM_172459.1,1675-1693).
cacccaatagacatagaga

SEQ ID NO: 621343 - DNA, 19 bp, Mus musculus
  siRNA target sequence for 9630044M06 (NM_172459.1,1699-1717).
gtcatcagagcccacaaaa

SEQ ID NO: 621344 - DNA, 19 bp, Mus musculus
  siRNA target sequence for 9630044M06 (NM_172459.1,1726-1744).
gaatgtgctgtctttacct

SEQ ID NO: 621345 - DNA, 19 bp, Mus musculus
  siRNA target sequence for 9630044M06 (NM_172459.1,1742-1760).
cctggacaaacctgttagt

SEQ ID NO: 621346 - DNA, 19 bp, Mus musculus
  siRNA target sequence for 9630044M06 (NM_172459.1,1761-1779).
ggttgtggttgaacttgat

SEQ ID NO: 621347 - DNA, 19 bp, Mus musculus
  siRNA target sequence for 9630044M06 (NM_172459.1,1806-1824).
ggttcccttggtaaccaat

SEQ ID NO: 621348 - DNA, 19 bp, Mus musculus
  siRNA target sequence for A430075L18Rik (NM_176919.2,483-501).
gaaagccggaaccattact

SEQ ID NO: 621349 - DNA, 19 bp, Mus musculus
  siRNA target sequence for A430075L18Rik (NM_176919.2,547-565).
ggggaaggcctgcagttaa

SEQ ID NO: 621350 - DNA, 19 bp, Mus musculus
  siRNA target sequence for A430075L18Rik (NM_176919.2,548-566).
gggaaggcctgcagttaaa

SEQ ID NO: 621351 - DNA, 19 bp, Mus musculus
  siRNA target sequence for A430075L18Rik (NM_176919.2,901-919).
gagagcgctttcaaggaaa

SEQ ID NO: 621352 - DNA, 19 bp, Mus musculus
  siRNA target sequence for A430075L18Rik (NM_176919.2,905-923).
gcgctttcaaggaaatgga

SEQ ID NO: 621353 - DNA, 19 bp, Mus musculus
  siRNA target sequence for A430075L18Rik (NM_176919.2,938-956).
gcgagaggagtgcgtataa

SEQ ID NO: 621354 - DNA, 19 bp, Mus musculus
  siRNA target sequence for A430075L18Rik (NM_176919.2,939-957).
cgagaggagtgcgtataat

SEQ ID NO: 621355 - DNA, 19 bp, Mus musculus
  siRNA target sequence for A430075L18Rik (NM_176919.2,940-958).
gagaggagtgcgtataata

SEQ ID NO: 621356 - DNA, 19 bp, Mus musculus
  siRNA target sequence for A430075L18Rik (NM_176919.2,942-960).
gaggagtgcgtataatata

SEQ ID NO: 621357 - DNA, 19 bp, Mus musculus
  siRNA target sequence for A430075L18Rik (NM_176919.2,1027-1045).
gacagcagggccataatca

SEQ ID NO: 621358 - DNA, 19 bp, Mus musculus
  siRNA target sequence for A430075L18Rik (NM_176919.2,1034-1052).
gggccataatcatcagaaa

SEQ ID NO: 621359 - DNA, 19 bp, Mus musculus
  siRNA target sequence for A430075L18Rik (NM_176919.2,1066-1084).
cccatgtcttccgaattca

SEQ ID NO: 621360 - DNA, 19 bp, Mus musculus
  siRNA target sequence for A430075L18Rik (NM_176919.2,1135-1153).
cacttgctgggaaatgagt

SEQ ID NO: 621361 - DNA, 19 bp, Mus musculus
  siRNA target sequence for A430075L18Rik (NM_176919.2,1269-1287).
gaagttcccccttatatat

SEQ ID NO: 621362 - DNA, 19 bp, Mus musculus
  siRNA target sequence for A430075L18Rik (NM_176919.2,1272-1290).
gttcccccttatatatgga

SEQ ID NO: 621363 - DNA, 19 bp, Mus musculus
  siRNA target sequence for A430075L18Rik (NM_176919.2,1305-1323).
ccgagtaatggcaactatt

SEQ ID NO: 621364 - DNA, 19 bp, Mus musculus
  siRNA target sequence for A430075L18Rik (NM_176919.2,1339-1357).
cttggggaccatgacttaa

SEQ ID NO: 621365 - DNA, 19 bp, Mus musculus
  siRNA target sequence for A430075L18Rik (NM_176919.2,1366-1384).
gactccaacatctacataa

SEQ ID NO: 621366 - DNA, 19 bp, Mus musculus
  siRNA target sequence for A430075L18Rik (NM_176919.2,1371-1389).
caacatctacataaaacca

SEQ ID NO: 621367 - DNA, 19 bp, Mus musculus
  siRNA target sequence for A430075L18Rik (NM_176919.2,1419-1437).
ctacgatctctccagatat

SEQ ID NO: 621368 - DNA, 19 bp, Mus musculus
  siRNA target sequence for A530016O06Rik (NM_178767.2,282-300).
ccaagacaatgtttcagtt

SEQ ID NO: 621369 - DNA, 19 bp, Mus musculus
  siRNA target sequence for A530016O06Rik (NM_178767.2,306-324).
gggtatgcgagcgatgttt

SEQ ID NO: 621370 - DNA, 19 bp, Mus musculus
  siRNA target sequence for A530016O06Rik (NM_178767.2,307-325).
ggtatgcgagcgatgtttt

SEQ ID NO: 621371 - DNA, 19 bp, Mus musculus
  siRNA target sequence for A530016O06Rik (NM_178767.2,308-326).
gtatgcgagcgatgtttta

SEQ ID NO: 621372 - DNA, 19 bp, Mus musculus
  siRNA target sequence for A530016O06Rik (NM_178767.2,313-331).
cgagcgatgttttacatga

SEQ ID NO: 621373 - DNA, 19 bp, Mus musculus
  siRNA target sequence for A530016O06Rik (NM_178767.2,367-385).
gaggtgcctgattacgtaa

SEQ ID NO: 621374 - DNA, 19 bp, Mus musculus
  siRNA target sequence for A530016O06Rik (NM_178767.2,369-387).
ggtgcctgattacgtaaaa

SEQ ID NO: 621375 - DNA, 19 bp, Mus musculus
  siRNA target sequence for A530016O06Rik (NM_178767.2,370-388).
gtgcctgattacgtaaaaa

SEQ ID NO: 621376 - DNA, 19 bp, Mus musculus
  siRNA target sequence for A530016O06Rik (NM_178767.2,391-409).
gcgactccattttttatct

SEQ ID NO: 621377 - DNA, 19 bp, Mus musculus
  siRNA target sequence for A530016O06Rik (NM_178767.2,430-448).
gtcatcagctggattctca

SEQ ID NO: 621378 - DNA, 19 bp, Mus musculus
  siRNA target sequence for A530016O06Rik (NM_178767.2,432-450).
catcagctggattctcaaa

SEQ ID NO: 621379 - DNA, 19 bp, Mus musculus
  siRNA target sequence for A530016O06Rik (NM_178767.2,472-490).
gatgatgctctcacatcta

SEQ ID NO: 621380 - DNA, 19 bp, Mus musculus
  siRNA target sequence for A530016O06Rik (NM_178767.2,475-493).
gatgctctcacatctatat

SEQ ID NO: 621381 - DNA, 19 bp, Mus musculus
  siRNA target sequence for A530016O06Rik (NM_178767.2,541-559).
gaagtgaccagttatattt

SEQ ID NO: 621382 - DNA, 19 bp, Mus musculus
  siRNA target sequence for A530016O06Rik (NM_178767.2,586-604).
gaattgccttgggattcta

SEQ ID NO: 621383 - DNA, 19 bp, Mus musculus
  siRNA target sequence for A530016O06Rik (NM_178767.2,602-620).
ctacctggacgtggtattt

SEQ ID NO: 621384 - DNA, 19 bp, Mus musculus
  siRNA target sequence for A530016O06Rik (NM_178767.2,606-624).
ctggacgtggtatttcact

SEQ ID NO: 621385 - DNA, 19 bp, Mus musculus
  siRNA target sequence for A530016O06Rik (NM_178767.2,611-629).
cgtggtatttcactttctt

SEQ ID NO: 621386 - DNA, 19 bp, Mus musculus
  siRNA target sequence for A530016O06Rik (NM_178767.2,634-652).
gttgactttggctactact

SEQ ID NO: 621387 - DNA, 19 bp, Mus musculus
  siRNA target sequence for A530016O06Rik (NM_178767.2,660-678).
ccgcatggctcatgagatt

SEQ ID NO: 621388 - DNA, 19 bp, Mus musculus
  siRNA target sequence for A530016O06Rik (NM_178767.2,661-679).
cgcatggctcatgagatta

SEQ ID NO: 621389 - DNA, 19 bp, Mus musculus
  siRNA target sequence for A530016O06Rik (NM_178767.2,662-680).
gcatggctcatgagattaa

SEQ ID NO: 621390 - DNA, 19 bp, Mus musculus
  siRNA target sequence for A530016O06Rik (NM_178767.2,663-681).
catggctcatgagattaat

SEQ ID NO: 621391 - DNA, 19 bp, Mus musculus
  siRNA target sequence for A530016O06Rik (NM_178767.2,666-684).
ggctcatgagattaatatt

SEQ ID NO: 621392 - DNA, 19 bp, Mus musculus
  siRNA target sequence for A530016O06Rik (NM_178767.2,667-685).
gctcatgagattaatattt

SEQ ID NO: 621393 - DNA, 19 bp, Mus musculus
  siRNA target sequence for A530016O06Rik (NM_178767.2,708-726).
ccacagttctgaagactat

SEQ ID NO: 621394 - DNA, 19 bp, Mus musculus
  siRNA target sequence for A530016O06Rik (NM_178767.2,709-727).
cacagttctgaagactata

SEQ ID NO: 621395 - DNA, 19 bp, Mus musculus
  siRNA target sequence for A530016O06Rik (NM_178767.2,788-806).
gtccactggcccttttcat

SEQ ID NO: 621396 - DNA, 19 bp, Mus musculus
  siRNA target sequence for A530016O06Rik (NM_178767.2,823-841).
gctgttcatattcaattca

SEQ ID NO: 621397 - DNA, 19 bp, Mus musculus
  siRNA target sequence for A530016O06Rik (NM_178767.2,844-862).
ctcctctaccaattttgga

SEQ ID NO: 621398 - DNA, 19 bp, Mus musculus
  siRNA target sequence for A530016O06Rik (NM_178767.2,892-910).
cctttggaagtgatcctta

SEQ ID NO: 621399 - DNA, 19 bp, Mus musculus
  siRNA target sequence for A530016O06Rik (NM_178767.2,893-911).
ctttggaagtgatccttaa

SEQ ID NO: 621400 - DNA, 19 bp, Mus musculus
  siRNA target sequence for A530016O06Rik (NM_178767.2,949-967).
cgttactgcattgataaaa

SEQ ID NO: 621401 - DNA, 19 bp, Mus musculus
  siRNA target sequence for A530016O06Rik (NM_178767.2,1049-1067).
cccatcccattggtacatt

SEQ ID NO: 621402 - DNA, 19 bp, Mus musculus
  siRNA target sequence for A530016O06Rik (NM_178767.2,1061-1079).
gtacatttgagccattcaa

SEQ ID NO: 621403 - DNA, 19 bp, Mus musculus
  siRNA target sequence for A530016O06Rik (NM_178767.2,1073-1091).
cattcaacgtgcaggtaat

SEQ ID NO: 621404 - DNA, 19 bp, Mus musculus
  siRNA target sequence for A530016O06Rik (NM_178767.2,1077-1095).
caacgtgcaggtaattcat

SEQ ID NO: 621405 - DNA, 19 bp, Mus musculus
  siRNA target sequence for A530016O06Rik (NM_178767.2,1080-1098).
cgtgcaggtaattcattca

SEQ ID NO: 621406 - DNA, 19 bp, Mus musculus
  siRNA target sequence for AI132321 (NM_178911.2,247-265).
gctctgtgactctcatctt

SEQ ID NO: 621407 - DNA, 19 bp, Mus musculus
  siRNA target sequence for AI132321 (NM_178911.2,498-516).
cacattgcctcgtactact

SEQ ID NO: 621408 - DNA, 19 bp, Mus musculus
  siRNA target sequence for AI132321 (NM_178911.2,534-552).
gacattggagtcaatgact

SEQ ID NO: 621409 - DNA, 19 bp, Mus musculus
  siRNA target sequence for AI132321 (NM_178911.2,568-586).
gagaggcccttctacagaa

SEQ ID NO: 621410 - DNA, 19 bp, Mus musculus
  siRNA target sequence for AI132321 (NM_178911.2,719-737).
gcttactgggggtgttcta

SEQ ID NO: 621411 - DNA, 19 bp, Mus musculus
  siRNA target sequence for AI132321 (NM_178911.2,909-927).
caagctgttctccctaaaa

SEQ ID NO: 621412 - DNA, 19 bp, Mus musculus
  siRNA target sequence for AI132321 (NM_178911.2,971-989).
cttgcggggtccctttgat

SEQ ID NO: 621413 - DNA, 19 bp, Mus musculus
  siRNA target sequence for AI132321 (NM_178911.2,996-1014).
cccaccacggcctatttct

SEQ ID NO: 621414 - DNA, 19 bp, Mus musculus
  siRNA target sequence for AI132321 (NM_178911.2,1086-1104).
ggtgctcgccagttcatct

SEQ ID NO: 621415 - DNA, 19 bp, Mus musculus
  siRNA target sequence for AI132321 (NM_178911.2,1087-1105).
gtgctcgccagttcatcta

SEQ ID NO: 621416 - DNA, 19 bp, Mus musculus
  siRNA target sequence for AI132321 (NM_178911.2,1090-1108).
ctcgccagttcatctatgt

SEQ ID NO: 621417 - DNA, 19 bp, Mus musculus
  siRNA target sequence for AI132321 (NM_178911.2,1092-1110).
cgccagttcatctatgtct

SEQ ID NO: 621418 - DNA, 19 bp, Mus musculus
  siRNA target sequence for AI132321 (NM_178911.2,1252-1270).
ccaccatgttcgcttatct

SEQ ID NO: 621419 - DNA, 19 bp, Mus musculus
  siRNA target sequence for AI132321 (NM_178911.2,1555-1573).
ggagttcccactatgctat

SEQ ID NO: 621420 - DNA, 19 bp, Mus musculus
  siRNA target sequence for AI317237 (NM_172819.1,169-187).
gggtgtccacaaaaattca

SEQ ID NO: 621421 - DNA, 19 bp, Mus musculus
  siRNA target sequence for AI317237 (NM_172819.1,339-357).
ctgggcgtcatctgtaact

SEQ ID NO: 621422 - DNA, 19 bp, Mus musculus
  siRNA target sequence for AI317237 (NM_172819.1,448-466).
cagtctacactctcacata

SEQ ID NO: 621423 - DNA, 19 bp, Mus musculus
  siRNA target sequence for AI317237 (NM_172819.1,457-475).
ctctcacatacggaaagtt

SEQ ID NO: 621424 - DNA, 19 bp, Mus musculus
  siRNA target sequence for AI317237 (NM_172819.1,459-477).
ctcacatacggaaagttgt

SEQ ID NO: 621425 - DNA, 19 bp, Mus musculus
  siRNA target sequence for AI317237 (NM_172819.1,635-653).
gattccagtacccatagaa

SEQ ID NO: 621426 - DNA, 19 bp, Mus musculus
  siRNA target sequence for AI317237 (NM_172819.1,857-875).
ctggcagccacacatatca

SEQ ID NO: 621427 - DNA, 19 bp, Mus musculus
  siRNA target sequence for AI317237 (NM_172819.1,883-901).
gcacggaaccggcatacat

SEQ ID NO: 621428 - DNA, 19 bp, Mus musculus
  siRNA target sequence for AI317237 (NM_172819.1,884-902).
cacggaaccggcatacatt

SEQ ID NO: 621429 - DNA, 19 bp, Mus musculus
  siRNA target sequence for AI317237 (NM_172819.1,886-904).
cggaaccggcatacattga

SEQ ID NO: 621430 - DNA, 19 bp, Mus musculus
  siRNA target sequence for AI317237 (NM_172819.1,888-906).
gaaccggcatacattgagt

SEQ ID NO: 621431 - DNA, 19 bp, Mus musculus
  siRNA target sequence for AI317237 (NM_172819.1,891-909).
ccggcatacattgagtata

SEQ ID NO: 621432 - DNA, 19 bp, Mus musculus
  siRNA target sequence for AI317237 (NM_172819.1,892-910).
cggcatacattgagtataa

SEQ ID NO: 621433 - DNA, 19 bp, Mus musculus
  siRNA target sequence for AI317237 (NM_172819.1,893-911).
ggcatacattgagtataaa

SEQ ID NO: 621434 - DNA, 19 bp, Mus musculus
  siRNA target sequence for AI317237 (NM_172819.1,1102-1120).
gtgtaccctactctgttat

SEQ ID NO: 621435 - DNA, 19 bp, Mus musculus
  siRNA target sequence for AI317237 (NM_172819.1,1104-1122).
gtaccctactctgttatga

SEQ ID NO: 621436 - DNA, 19 bp, Mus musculus
  siRNA target sequence for AI317237 (NM_172819.1,1251-1269).
ctgcggatgctgattgtca

SEQ ID NO: 621437 - DNA, 19 bp, Mus musculus
  siRNA target sequence for AI317237 (NM_172819.1,1432-1450).
gaagagccattctctcaat

SEQ ID NO: 621438 - DNA, 19 bp, Mus musculus
  siRNA target sequence for AI317237 (NM_172819.1,1467-1485).
ggggtcatacgggtcaata

SEQ ID NO: 621439 - DNA, 19 bp, Mus musculus
  siRNA target sequence for AI317237 (NM_172819.1,1469-1487).
ggtcatacgggtcaatact

SEQ ID NO: 621440 - DNA, 19 bp, Mus musculus
  siRNA target sequence for AI317237 (NM_172819.1,1479-1497).
gtcaatactgaggataaaa

SEQ ID NO: 621441 - DNA, 19 bp, Mus musculus
  siRNA target sequence for AI317237 (NM_172819.1,1657-1675).
gtgtgaccaaaaatacatt

SEQ ID NO: 621442 - DNA, 19 bp, Mus musculus
  siRNA target sequence for AI317237 (NM_172819.1,1769-1787).
ggtgttcgtggttggaaaa

SEQ ID NO: 621443 - DNA, 19 bp, Mus musculus
  siRNA target sequence for AI317237 (NM_172819.1,1775-1793).
cgtggttggaaaaatggat

SEQ ID NO: 621444 - DNA, 19 bp, Mus musculus
  siRNA target sequence for AI317237 (NM_172819.1,1783-1801).
gaaaaatggatggattact

SEQ ID NO: 621445 - DNA, 19 bp, Mus musculus
  siRNA target sequence for AI317237 (NM_172819.1,1819-1837).
gacataacgccgatgacat

SEQ ID NO: 621446 - DNA, 19 bp, Mus musculus
  siRNA target sequence for AI317237 (NM_172819.1,1873-1891).
ccgtctatcgaggaagaat

SEQ ID NO: 621447 - DNA, 19 bp, Mus musculus
  siRNA target sequence for AI317237 (NM_172819.1,1874-1892).
cgtctatcgaggaagaatt

SEQ ID NO: 621448 - DNA, 19 bp, Mus musculus
  siRNA target sequence for AI317237 (NM_172819.1,1884-1902).
ggaagaattgctgtgtttt

SEQ ID NO: 621449 - DNA, 19 bp, Mus musculus
  siRNA target sequence for AI317237 (NM_172819.1,2053-2071).
cagctaacacgttaccaaa

SEQ ID NO: 621450 - DNA, 19 bp, Mus musculus
  siRNA target sequence for AI317237 (NM_172819.1,2055-2073).
gctaacacgttaccaaaaa

SEQ ID NO: 621451 - DNA, 19 bp, Mus musculus
  siRNA target sequence for AI317237 (NM_172819.1,2076-2094).
ccactaggaggaatccata

SEQ ID NO: 621452 - DNA, 19 bp, Mus musculus
  siRNA target sequence for AI317237 (NM_172819.1,2077-2095).
cactaggaggaatccatat

SEQ ID NO: 621453 - DNA, 19 bp, Mus musculus
  siRNA target sequence for AI317237 (NM_172819.1,2079-2097).
ctaggaggaatccatatat

SEQ ID NO: 621454 - DNA, 19 bp, Mus musculus
  siRNA target sequence for AI317237 (NM_172819.1,2128-2146).
ctctacacccgtgtaatat

SEQ ID NO: 621455 - DNA, 19 bp, Mus musculus
  siRNA target sequence for AI317237 (NM_172819.1,2182-2200).
caaagccccgacaaaagca

SEQ ID NO: 621456 - DNA, 19 bp, Mus musculus
  siRNA target sequence for AI317237 (NM_172819.1,2275-2293).
gggacctgggccaaataga

SEQ ID NO: 621457 - DNA, 19 bp, Mus musculus
  siRNA target sequence for AI317237 (NM_172819.1,2447-2465).
gaggatcgcttcagtactt

SEQ ID NO: 621458 - DNA, 19 bp, Mus musculus
  siRNA target sequence for AI317237 (NM_172819.1,2483-2501).
gaatgcaggggacaatgta

SEQ ID NO: 621459 - DNA, 19 bp, Mus musculus
  siRNA target sequence for AI317237 (NM_172819.1,2487-2505).
gcaggggacaatgtagtat

SEQ ID NO: 621460 - DNA, 19 bp, Mus musculus
  siRNA target sequence for AI317237 (NM_172819.1,2488-2506).
caggggacaatgtagtatt

SEQ ID NO: 621461 - DNA, 19 bp, Mus musculus
  siRNA target sequence for AI317237 (NM_172819.1,2515-2533).
cgcctggcatcgagttgat

SEQ ID NO: 621462 - DNA, 19 bp, Mus musculus
  siRNA target sequence for AI317237 (NM_172819.1,2555-2573).
gtatgcaggatgtatacct

SEQ ID NO: 621463 - DNA, 19 bp, Mus musculus
  siRNA target sequence for AI317237 (NM_172819.1,2731-2749).
cctggccagccatcattga

SEQ ID NO: 621464 - DNA, 19 bp, Mus musculus
  siRNA target sequence for AI317237 (NM_172819.1,2732-2750).
ctggccagccatcattgat

SEQ ID NO: 621465 - DNA, 19 bp, Mus musculus
  siRNA target sequence for AI317237 (NM_172819.1,2735-2753).
gccagccatcattgataca

SEQ ID NO: 621466 - DNA, 19 bp, Mus musculus
  siRNA target sequence for AI317237 (NM_172819.1,2772-2790).
cggctacctcagctgtata

SEQ ID NO: 621467 - DNA, 19 bp, Mus musculus
  siRNA target sequence for AI317237 (NM_172819.1,2773-2791).
ggctacctcagctgtataa

SEQ ID NO: 621468 - DNA, 19 bp, Mus musculus
  siRNA target sequence for AI317237 (NM_172819.1,2794-2812).
cgcccactcctgagatgtt

SEQ ID NO: 621469 - DNA, 19 bp, Mus musculus
  siRNA target sequence for AI317237 (NM_172819.1,2807-2825).
gatgttggcgtatcttgat

SEQ ID NO: 621470 - DNA, 19 bp, Mus musculus
  siRNA target sequence for AI317237 (NM_172819.1,2910-2928).
cagtgcgaattgtactctt

SEQ ID NO: 621471 - DNA, 19 bp, Mus musculus
  siRNA target sequence for AI317237 (NM_172819.1,3007-3025).
gtcaccagtccgtcttgat

SEQ ID NO: 621472 - DNA, 19 bp, Mus musculus
  siRNA target sequence for AI317237 (NM_172819.1,3072-3090).
gtcaaccagtacaagatca

SEQ ID NO: 621473 - DNA, 19 bp, Mus musculus
  siRNA target sequence for AI317237 (NM_172819.1,3116-3134).
catggagctgtgcactaaa

SEQ ID NO: 621474 - DNA, 19 bp, Mus musculus
  siRNA target sequence for AI317237 (NM_172819.1,3164-3182).
gaccagagggatcaatctt

SEQ ID NO: 621475 - DNA, 19 bp, Mus musculus
  siRNA target sequence for AI317237 (NM_172819.1,3167-3185).
cagagggatcaatctttct

SEQ ID NO: 621476 - DNA, 19 bp, Mus musculus
  siRNA target sequence for AI317237 (NM_172819.1,3288-3306).
gtcagcaccacttttggat

SEQ ID NO: 621477 - DNA, 19 bp, Mus musculus
  siRNA target sequence for AI317237 (NM_172819.1,3455-3473).
gatcttacctggagtaaaa

SEQ ID NO: 621478 - DNA, 19 bp, Mus musculus
  siRNA target sequence for AI317237 (NM_172819.1,3458-3476).
cttacctggagtaaaagta

SEQ ID NO: 621479 - DNA, 19 bp, Mus musculus
  siRNA target sequence for AI317237 (NM_172819.1,3468-3486).
gtaaaagtagttattgtca

SEQ ID NO: 621480 - DNA, 19 bp, Mus musculus
  siRNA target sequence for AI317237 (NM_172819.1,3587-3605).
gactcttcaagctgatcat

SEQ ID NO: 621481 - DNA, 19 bp, Mus musculus
  siRNA target sequence for AI317237 (NM_172819.1,3712-3730).
gccatgacgccttgtatgt

SEQ ID NO: 621482 - DNA, 19 bp, Mus musculus
  siRNA target sequence for AI317237 (NM_172819.1,3766-3784).
gattgcgataccatcctat

SEQ ID NO: 621483 - DNA, 19 bp, Mus musculus
  siRNA target sequence for AI317237 (NM_172819.1,3770-3788).
gcgataccatcctatcgat

SEQ ID NO: 621484 - DNA, 19 bp, Mus musculus
  siRNA target sequence for AI317237 (NM_172819.1,3771-3789).
cgataccatcctatcgata

SEQ ID NO: 621485 - DNA, 19 bp, Mus musculus
  siRNA target sequence for AI317237 (NM_172819.1,3772-3790).
gataccatcctatcgatat

SEQ ID NO: 621486 - DNA, 19 bp, Mus musculus
  siRNA target sequence for AI317237 (NM_172819.1,3777-3795).
catcctatcgatatagaga

SEQ ID NO: 621487 - DNA, 19 bp, Mus musculus
  siRNA target sequence for AI317237 (NM_172819.1,3861-3879).
gtggtcgttgtggaactat

SEQ ID NO: 621488 - DNA, 19 bp, Mus musculus
  siRNA target sequence for AI317237 (NM_172819.1,4049-4067).
ccagttagaccctatctat

SEQ ID NO: 621489 - DNA, 19 bp, Mus musculus
  siRNA target sequence for AI836256 (NM_133821.1,336-354).
caagacgacaggtcattct

SEQ ID NO: 621490 - DNA, 19 bp, Mus musculus
  siRNA target sequence for AI836256 (NM_133821.1,355-373).
gtgcgggacgtgcttgata

SEQ ID NO: 621491 - DNA, 19 bp, Mus musculus
  siRNA target sequence for AI836256 (NM_133821.1,357-375).
gcgggacgtgcttgatagt

SEQ ID NO: 621492 - DNA, 19 bp, Mus musculus
  siRNA target sequence for AI836256 (NM_133821.1,359-377).
gggacgtgcttgatagtgt

SEQ ID NO: 621493 - DNA, 19 bp, Mus musculus
  siRNA target sequence for AI836256 (NM_133821.1,374-392).
gtgtcgtccgtgaaagaca

SEQ ID NO: 621494 - DNA, 19 bp, Mus musculus
  siRNA target sequence for AI836256 (NM_133821.1,420-438).
ccctcattggtggaaaagt

SEQ ID NO: 621495 - DNA, 19 bp, Mus musculus
  siRNA target sequence for AI836256 (NM_133821.1,505-523).
ctacatctgctttgatact

SEQ ID NO: 621496 - DNA, 19 bp, Mus musculus
  siRNA target sequence for AI836256 (NM_133821.1,563-581).
gttgcatcacagcgtataa

SEQ ID NO: 621497 - DNA, 19 bp, Mus musculus
  siRNA target sequence for AI836256 (NM_133821.1,566-584).
gcatcacagcgtataagct

SEQ ID NO: 621498 - DNA, 19 bp, Mus musculus
  siRNA target sequence for AI836256 (NM_133821.1,587-605).
gtagacctctcctgttgta

SEQ ID NO: 621499 - DNA, 19 bp, Mus musculus
  siRNA target sequence for AI836256 (NM_133821.1,597-615).
cctgttgtagccttgaaca

SEQ ID NO: 621500 - DNA, 19 bp, Mus musculus
  siRNA target sequence for AI836256 (NM_133821.1,598-616).
ctgttgtagccttgaacat

SEQ ID NO: 621501 - DNA, 19 bp, Mus musculus
  siRNA target sequence for AI836256 (NM_133821.1,637-655).
cagccaagaccttactcat

SEQ ID NO: 621502 - DNA, 19 bp, Mus musculus
  siRNA target sequence for AI836256 (NM_133821.1,647-665).
cttactcatctcaacttaa

SEQ ID NO: 621503 - DNA, 19 bp, Mus musculus
  siRNA target sequence for AI836256 (NM_133821.1,722-740).
ctgcaaaggttcaccaaat

SEQ ID NO: 621504 - DNA, 19 bp, Mus musculus
  siRNA target sequence for AI836256 (NM_133821.1,817-835).
gctgaatgtatcttgcaat

SEQ ID NO: 621505 - DNA, 19 bp, Mus musculus
  siRNA target sequence for AI836256 (NM_133821.1,981-999).
ctgacattccagaggtatt

SEQ ID NO: 621506 - DNA, 19 bp, Mus musculus
  siRNA target sequence for AI836256 (NM_133821.1,1099-1117).
ggacctaagactgaacata

SEQ ID NO: 621507 - DNA, 19 bp, Mus musculus
  siRNA target sequence for AI836256 (NM_133821.1,1103-1121).
ctaagactgaacatactca

SEQ ID NO: 621508 - DNA, 19 bp, Mus musculus
  siRNA target sequence for AI836256 (NM_133821.1,1168-1186).
gcttgacctgcgagacaat

SEQ ID NO: 621509 - DNA, 19 bp, Mus musculus
  siRNA target sequence for AI836256 (NM_133821.1,1169-1187).
cttgacctgcgagacaata

SEQ ID NO: 621510 - DNA, 19 bp, Mus musculus
  siRNA target sequence for AI836256 (NM_133821.1,1183-1201).
caataagcttggtgatcta

SEQ ID NO: 621511 - DNA, 19 bp, Mus musculus
  siRNA target sequence for AI836256 (NM_133821.1,1196-1214).
gatctagatgctatgatct

SEQ ID NO: 621512 - DNA, 19 bp, Mus musculus
  siRNA target sequence for AI836256 (NM_133821.1,1199-1217).
ctagatgctatgatcttca

SEQ ID NO: 621513 - DNA, 19 bp, Mus musculus
  siRNA target sequence for AI836256 (NM_133821.1,1206-1224).
ctatgatcttcaacaacat

SEQ ID NO: 621514 - DNA, 19 bp, Mus musculus
  siRNA target sequence for AI836256 (NM_133821.1,1268-1286).
gtttgtggctatttcctaa

SEQ ID NO: 621515 - DNA, 19 bp, Mus musculus
  siRNA target sequence for AI836256 (NM_133821.1,1283-1301).
ctaaaggcactctatgctt

SEQ ID NO: 621516 - DNA, 19 bp, Mus musculus
  siRNA target sequence for AI836256 (NM_133821.1,1288-1306).
ggcactctatgcttcttct

SEQ ID NO: 621517 - DNA, 19 bp, Mus musculus
  siRNA target sequence for AI836256 (NM_133821.1,1289-1307).
gcactctatgcttcttcta

SEQ ID NO: 621518 - DNA, 19 bp, Mus musculus
  siRNA target sequence for AI836256 (NM_133821.1,1330-1348).
ctacccagttccgaattat

SEQ ID NO: 621519 - DNA, 19 bp, Mus musculus
  siRNA target sequence for AI836256 (NM_133821.1,1334-1352).
ccagttccgaattatctct

SEQ ID NO: 621520 - DNA, 19 bp, Mus musculus
  siRNA target sequence for AI836256 (NM_133821.1,1391-1409).
cctgagtgggtatgtgaaa

SEQ ID NO: 621521 - DNA, 19 bp, Mus musculus
  siRNA target sequence for AI836256 (NM_133821.1,1410-1428).
gccggaaattagaagtttt

SEQ ID NO: 621522 - DNA, 19 bp, Mus musculus
  siRNA target sequence for AI836256 (NM_133821.1,1437-1455).
gccataatcaaatatgtga

SEQ ID NO: 621523 - DNA, 19 bp, Mus musculus
  siRNA target sequence for AI836256 (NM_133821.1,1466-1484).
cgcctgttttgtaatagta

SEQ ID NO: 621524 - DNA, 19 bp, Mus musculus
  siRNA target sequence for AI836256 (NM_133821.1,1468-1486).
cctgttttgtaatagtagt

SEQ ID NO: 621525 - DNA, 19 bp, Mus musculus
  siRNA target sequence for AI836256 (NM_133821.1,1482-1500).
gtagtctccggaaattgct

SEQ ID NO: 621526 - DNA, 19 bp, Mus musculus
  siRNA target sequence for AI836256 (NM_133821.1,1532-1550).
gaaaggctggagagaactt

SEQ ID NO: 621527 - DNA, 19 bp, Mus musculus
  siRNA target sequence for AI836256 (NM_133821.1,1625-1643).
ctgagattcctgaatgcat

SEQ ID NO: 621528 - DNA, 19 bp, Mus musculus
  siRNA target sequence for AI836256 (NM_133821.1,1698-1716).
gtatattacaggagttgta

SEQ ID NO: 621529 - DNA, 19 bp, Mus musculus
  siRNA target sequence for AI836256 (NM_133821.1,1709-1727).
gagttgtacctgacaaaca

SEQ ID NO: 621530 - DNA, 19 bp, Mus musculus
  siRNA target sequence for AI836256 (NM_133821.1,1764-1782).
ggcacccccgtctgaagat

SEQ ID NO: 621531 - DNA, 19 bp, Mus musculus
  siRNA target sequence for AI836256 (NM_133821.1,1810-1828).
gagcttcccggcaagtaaa

SEQ ID NO: 621532 - DNA, 19 bp, Mus musculus
  siRNA target sequence for AI836256 (NM_133821.1,1925-1943).
gtgattgctcactccaatt

SEQ ID NO: 621533 - DNA, 19 bp, Mus musculus
  siRNA target sequence for AI836256 (NM_133821.1,1927-1945).
gattgctcactccaattgt

SEQ ID NO: 621534 - DNA, 19 bp, Mus musculus
  siRNA target sequence for AI836256 (NM_133821.1,1938-1956).
ccaattgtatcgaagtctt

SEQ ID NO: 621535 - DNA, 19 bp, Mus musculus
  siRNA target sequence for AI836256 (NM_133821.1,1939-1957).
caattgtatcgaagtcttt

SEQ ID NO: 621536 - DNA, 19 bp, Mus musculus
  siRNA target sequence for AI836256 (NM_133821.1,2103-2121).
gcctggagctgctcaataa

SEQ ID NO: 621537 - DNA, 19 bp, Mus musculus
  siRNA target sequence for AI836256 (NM_133821.1,2107-2125).
ggagctgctcaataacatt

SEQ ID NO: 621538 - DNA, 19 bp, Mus musculus
  siRNA target sequence for AI836256 (NM_133821.1,2122-2140).
cattcgctgcttcaagatt

SEQ ID NO: 621539 - DNA, 19 bp, Mus musculus
  siRNA target sequence for AI836256 (NM_133821.1,2199-2217).
ctgaagcatcgggagtaaa

SEQ ID NO: 621540 - DNA, 19 bp, Mus musculus
  siRNA target sequence for AI836256 (NM_133821.1,2231-2249).
gtcgcagccctgtctgtaa

SEQ ID NO: 621541 - DNA, 19 bp, Mus musculus
  siRNA target sequence for AI836256 (NM_133821.1,2274-2292).
ccctctatggtgtgtttga

SEQ ID NO: 621542 - DNA, 19 bp, Mus musculus
  siRNA target sequence for AI836256 (NM_133821.1,2329-2347).
gtgcaccatgagtgacatt

SEQ ID NO: 621543 - DNA, 19 bp, Mus musculus
  siRNA target sequence for AI836256 (NM_133821.1,2331-2349).
gcaccatgagtgacatttt

SEQ ID NO: 621544 - DNA, 19 bp, Mus musculus
  siRNA target sequence for AI836256 (NM_133821.1,2389-2407).
catggtcaatacattcata

SEQ ID NO: 621545 - DNA, 19 bp, Mus musculus
  siRNA target sequence for AI836256 (NM_133821.1,2393-2411).
gtcaatacattcatagtca

SEQ ID NO: 621546 - DNA, 19 bp, Mus musculus
  siRNA target sequence for AI836256 (NM_133821.1,2509-2527).
cctgacctctgctaatgtt

SEQ ID NO: 621547 - DNA, 19 bp, Mus musculus
  siRNA target sequence for AI836256 (NM_133821.1,2571-2589).
ctctgtccaggtcatacat

SEQ ID NO: 621548 - DNA, 19 bp, Mus musculus
  siRNA target sequence for AI836256 (NM_133821.1,2603-2621).
gaagagcggaagaggatta

SEQ ID NO: 621549 - DNA, 19 bp, Mus musculus
  siRNA target sequence for AI836256 (NM_133821.1,2753-2771).
ccacaggatgagtttttca

SEQ ID NO: 621550 - DNA, 19 bp, Mus musculus
  siRNA target sequence for AI836256 (NM_133821.1,2791-2809).
gtgggacagcctatccatt

SEQ ID NO: 621551 - DNA, 19 bp, Mus musculus
  siRNA target sequence for AI836256 (NM_133821.1,3015-3033).
ccgtcaacatggtcatcaa

SEQ ID NO: 621552 - DNA, 19 bp, Mus musculus
  siRNA target sequence for AI836256 (NM_133821.1,3159-3177).
cgtctggagtcctgaatga

SEQ ID NO: 621553 - DNA, 19 bp, Mus musculus
  siRNA target sequence for AI836256 (NM_133821.1,3435-3453).
gtgatgagggcattgtcat

SEQ ID NO: 621554 - DNA, 19 bp, Mus musculus
  siRNA target sequence for AI836256 (NM_133821.1,3554-3572).
gaaaggagccataatgtga

SEQ ID NO: 621555 - DNA, 19 bp, Mus musculus
  siRNA target sequence for AI836256 (NM_133821.1,3558-3576).
ggagccataatgtgataga

SEQ ID NO: 621556 - DNA, 19 bp, Mus musculus
  siRNA target sequence for AI836256 (NM_133821.1,3601-3619).
gaagccaggaggctatttt

SEQ ID NO: 621557 - DNA, 19 bp, Mus musculus
  siRNA target sequence for AI836256 (NM_133821.1,3636-3654).
cagatccagatgatcagtt

SEQ ID NO: 621558 - DNA, 19 bp, Mus musculus
  siRNA target sequence for AI836256 (NM_133821.1,3803-3821).
ccacagcggcacttccaaa

SEQ ID NO: 621559 - DNA, 19 bp, Mus musculus
  siRNA target sequence for AI836256 (NM_133821.1,3804-3822).
cacagcggcacttccaaat

SEQ ID NO: 621560 - DNA, 19 bp, Mus musculus
  siRNA target sequence for AI836256 (NM_133821.1,3808-3826).
gcggcacttccaaatggat

SEQ ID NO: 621561 - DNA, 19 bp, Mus musculus
  siRNA target sequence for AI836256 (NM_133821.1,3829-3847).
cctgccagactgttacgat

SEQ ID NO: 621562 - DNA, 19 bp, Mus musculus
  siRNA target sequence for AI836256 (NM_133821.1,3830-3848).
ctgccagactgttacgata

SEQ ID NO: 621563 - DNA, 19 bp, Mus musculus
  siRNA target sequence for Appbp1 (NM_144931.1,142-160).
ctgctcatgtttgcttaat

SEQ ID NO: 621564 - DNA, 19 bp, Mus musculus
  siRNA target sequence for Appbp1 (NM_144931.1,169-187).
cggctacaggaactgaaat

SEQ ID NO: 621565 - DNA, 19 bp, Mus musculus
  siRNA target sequence for Appbp1 (NM_144931.1,200-218).
ggtgctgccaggtattgga

SEQ ID NO: 621566 - DNA, 19 bp, Mus musculus
  siRNA target sequence for Appbp1 (NM_144931.1,210-228).
ggtattggatcatttacaa

SEQ ID NO: 621567 - DNA, 19 bp, Mus musculus
  siRNA target sequence for Appbp1 (NM_144931.1,211-229).
gtattggatcatttacaat

SEQ ID NO: 621568 - DNA, 19 bp, Mus musculus
  siRNA target sequence for Appbp1 (NM_144931.1,278-296).
ccttcaaaaaagcagtatt

SEQ ID NO: 621569 - DNA, 19 bp, Mus musculus
  siRNA target sequence for Appbp1 (NM_144931.1,399-417).
gatccttcatttttctgta

SEQ ID NO: 621570 - DNA, 19 bp, Mus musculus
  siRNA target sequence for Appbp1 (NM_144931.1,435-453).
gcaactcagcttcttgaaa

SEQ ID NO: 621571 - DNA, 19 bp, Mus musculus
  siRNA target sequence for Appbp1 (NM_144931.1,517-535).
catatggactagttggtta

SEQ ID NO: 621572 - DNA, 19 bp, Mus musculus
  siRNA target sequence for Appbp1 (NM_144931.1,522-540).
ggactagttggttatatga

SEQ ID NO: 621573 - DNA, 19 bp, Mus musculus
  siRNA target sequence for Appbp1 (NM_144931.1,528-546).
gttggttatatgaggatta

SEQ ID NO: 621574 - DNA, 19 bp, Mus musculus
  siRNA target sequence for Appbp1 (NM_144931.1,532-550).
gttatatgaggattattat

SEQ ID NO: 621575 - DNA, 19 bp, Mus musculus
  siRNA target sequence for Appbp1 (NM_144931.1,539-557).
gaggattattataaaagaa

SEQ ID NO: 621576 - DNA, 19 bp, Mus musculus
  siRNA target sequence for Appbp1 (NM_144931.1,555-573).
gaacacccagtaatagaat

SEQ ID NO: 621577 - DNA, 19 bp, Mus musculus
  siRNA target sequence for Appbp1 (NM_144931.1,560-578).
cccagtaatagaatctcat

SEQ ID NO: 621578 - DNA, 19 bp, Mus musculus
  siRNA target sequence for Appbp1 (NM_144931.1,574-592).
ctcatccagataatgcatt

SEQ ID NO: 621579 - DNA, 19 bp, Mus musculus
  siRNA target sequence for Appbp1 (NM_144931.1,594-612).
gaggatctacgactagata

SEQ ID NO: 621580 - DNA, 19 bp, Mus musculus
  siRNA target sequence for Appbp1 (NM_144931.1,631-649).
gagaacatcttcagtctta

SEQ ID NO: 621581 - DNA, 19 bp, Mus musculus
  siRNA target sequence for Appbp1 (NM_144931.1,636-654).
catcttcagtcttatgact

SEQ ID NO: 621582 - DNA, 19 bp, Mus musculus
  siRNA target sequence for Appbp1 (NM_144931.1,646-664).
cttatgacttggaccatat

SEQ ID NO: 621583 - DNA, 19 bp, Mus musculus
  siRNA target sequence for Appbp1 (NM_144931.1,688-706).
ctccatggattgtgatcat

SEQ ID NO: 621584 - DNA, 19 bp, Mus musculus
  siRNA target sequence for Appbp1 (NM_144931.1,694-712).
ggattgtgatcatagctaa

SEQ ID NO: 621585 - DNA, 19 bp, Mus musculus
  siRNA target sequence for Appbp1 (NM_144931.1,695-713).
gattgtgatcatagctaaa

SEQ ID NO: 621586 - DNA, 19 bp, Mus musculus
  siRNA target sequence for Appbp1 (NM_144931.1,699-717).
gtgatcatagctaaatatt

SEQ ID NO: 621587 - DNA, 19 bp, Mus musculus
  siRNA target sequence for Appbp1 (NM_144931.1,701-719).
gatcatagctaaatattta

SEQ ID NO: 621588 - DNA, 19 bp, Mus musculus
  siRNA target sequence for Appbp1 (NM_144931.1,725-743).
gtggtataatgaaacaaat

SEQ ID NO: 621589 - DNA, 19 bp, Mus musculus
  siRNA target sequence for Appbp1 (NM_144931.1,739-757).
caaatggacggattcctaa

SEQ ID NO: 621590 - DNA, 19 bp, Mus musculus
  siRNA target sequence for Appbp1 (NM_144931.1,744-762).
ggacggattcctaaaagtt

SEQ ID NO: 621591 - DNA, 19 bp, Mus musculus
  siRNA target sequence for Appbp1 (NM_144931.1,745-763).
gacggattcctaaaagtta

SEQ ID NO: 621592 - DNA, 19 bp, Mus musculus
  siRNA target sequence for Appbp1 (NM_144931.1,747-765).
cggattcctaaaagttata

SEQ ID NO: 621593 - DNA, 19 bp, Mus musculus
  siRNA target sequence for Appbp1 (NM_144931.1,776-794).
ggacttcagagatttgata

SEQ ID NO: 621594 - DNA, 19 bp, Mus musculus
  siRNA target sequence for Appbp1 (NM_144931.1,779-797).
cttcagagatttgataaga

SEQ ID NO: 621595 - DNA, 19 bp, Mus musculus
  siRNA target sequence for Appbp1 (NM_144931.1,782-800).
cagagatttgataagacaa

SEQ ID NO: 621596 - DNA, 19 bp, Mus musculus
  siRNA target sequence for Appbp1 (NM_144931.1,791-809).
gataagacaagggatttta

SEQ ID NO: 621597 - DNA, 19 bp, Mus musculus
  siRNA target sequence for Appbp1 (NM_144931.1,796-814).
gacaagggattttaaagaa

SEQ ID NO: 621598 - DNA, 19 bp, Mus musculus
  siRNA target sequence for Appbp1 (NM_144931.1,869-887).
gaacacagcactaaataca

SEQ ID NO: 621599 - DNA, 19 bp, Mus musculus
  siRNA target sequence for Appbp1 (NM_144931.1,897-915).
ccaagcagtattgaagata

SEQ ID NO: 621600 - DNA, 19 bp, Mus musculus
  siRNA target sequence for Appbp1 (NM_144931.1,898-916).
caagcagtattgaagatat

SEQ ID NO: 621601 - DNA, 19 bp, Mus musculus
  siRNA target sequence for Appbp1 (NM_144931.1,924-942).
gatgatcgatgcataaata

SEQ ID NO: 621602 - DNA, 19 bp, Mus musculus
  siRNA target sequence for Appbp1 (NM_144931.1,927-945).
gatcgatgcataaatatca

SEQ ID NO: 621603 - DNA, 19 bp, Mus musculus
  siRNA target sequence for Appbp1 (NM_144931.1,975-993).
gctcgtgccttaaaggaat

SEQ ID NO: 621604 - DNA, 19 bp, Mus musculus
  siRNA target sequence for Appbp1 (NM_144931.1,976-994).
ctcgtgccttaaaggaatt

SEQ ID NO: 621605 - DNA, 19 bp, Mus musculus
  siRNA target sequence for Appbp1 (NM_144931.1,1030-1048).
gaggcacaattcctgatat

SEQ ID NO: 621606 - DNA, 19 bp, Mus musculus
  siRNA target sequence for Appbp1 (NM_144931.1,1033-1051).
gcacaattcctgatatgat

SEQ ID NO: 621607 - DNA, 19 bp, Mus musculus
  siRNA target sequence for Appbp1 (NM_144931.1,1034-1052).
cacaattcctgatatgatt

SEQ ID NO: 621608 - DNA, 19 bp, Mus musculus
  siRNA target sequence for Appbp1 (NM_144931.1,1049-1067).
gattgcagattcaaacaaa

SEQ ID NO: 621609 - DNA, 19 bp, Mus musculus
  siRNA target sequence for Appbp1 (NM_144931.1,1086-1104).
gtttaccgagagaaagcaa

SEQ ID NO: 621610 - DNA, 19 bp, Mus musculus
  siRNA target sequence for Appbp1 (NM_144931.1,1126-1144).
gcaatcacgttgccaaatt

SEQ ID NO: 621611 - DNA, 19 bp, Mus musculus
  siRNA target sequence for Appbp1 (NM_144931.1,1161-1179).
caggcaccagagtccattt

SEQ ID NO: 621612 - DNA, 19 bp, Mus musculus
  siRNA target sequence for Appbp1 (NM_144931.1,1229-1247).
ggtaagatgtcgatcttta

SEQ ID NO: 621613 - DNA, 19 bp, Mus musculus
  siRNA target sequence for Appbp1 (NM_144931.1,1298-1316).
catggacaatccggataat

SEQ ID NO: 621614 - DNA, 19 bp, Mus musculus
  siRNA target sequence for Appbp1 (NM_144931.1,1302-1320).
gacaatccggataatgaga

SEQ ID NO: 621615 - DNA, 19 bp, Mus musculus
  siRNA target sequence for Appbp1 (NM_144931.1,1304-1322).
caatccggataatgagata

SEQ ID NO: 621616 - DNA, 19 bp, Mus musculus
  siRNA target sequence for Appbp1 (NM_144931.1,1334-1352).
gatgttgcgggctgttgat

SEQ ID NO: 621617 - DNA, 19 bp, Mus musculus
  siRNA target sequence for Appbp1 (NM_144931.1,1340-1358).
gcgggctgttgatcgattt

SEQ ID NO: 621618 - DNA, 19 bp, Mus musculus
  siRNA target sequence for Appbp1 (NM_144931.1,1373-1391).
cagatacccaggagtatct

SEQ ID NO: 621619 - DNA, 19 bp, Mus musculus
  siRNA target sequence for Appbp1 (NM_144931.1,1379-1397).
cccaggagtatctaactat

SEQ ID NO: 621620 - DNA, 19 bp, Mus musculus
  siRNA target sequence for Appbp1 (NM_144931.1,1381-1399).
caggagtatctaactatca

SEQ ID NO: 621621 - DNA, 19 bp, Mus musculus
  siRNA target sequence for Appbp1 (NM_144931.1,1394-1412).
ctatcaagttgaagaagat

SEQ ID NO: 621622 - DNA, 19 bp, Mus musculus
  siRNA target sequence for Appbp1 (NM_144931.1,1410-1428).
gatatagggaagttgaagt

SEQ ID NO: 621623 - DNA, 19 bp, Mus musculus
  siRNA target sequence for Appbp1 (NM_144931.1,1452-1470).
gaatatgggctgtctgtaa

SEQ ID NO: 621624 - DNA, 19 bp, Mus musculus
  siRNA target sequence for Appbp1 (NM_144931.1,1479-1497).
gacgattatgtccatgaat

SEQ ID NO: 621625 - DNA, 19 bp, Mus musculus
  siRNA target sequence for Appbp1 (NM_144931.1,1481-1499).
cgattatgtccatgaattt

SEQ ID NO: 621626 - DNA, 19 bp, Mus musculus
  siRNA target sequence for Appbp1 (NM_144931.1,1551-1569).
gctgctgctcaagaagtta

SEQ ID NO: 621627 - DNA, 19 bp, Mus musculus
  siRNA target sequence for B430104H02Rik (NM_026568.1,351-369).
gagagaccaccctttcagt

SEQ ID NO: 621628 - DNA, 19 bp, Mus musculus
  siRNA target sequence for B430104H02Rik (NM_026568.1,710-728).
gctcgggactggcaaatga

SEQ ID NO: 621629 - DNA, 19 bp, Mus musculus
  siRNA target sequence for B430104H02Rik (NM_026568.1,713-731).
cgggactggcaaatgagaa

SEQ ID NO: 621630 - DNA, 19 bp, Mus musculus
  siRNA target sequence for B430104H02Rik (NM_026568.1,779-797).
ctgggccctgccttggtta

SEQ ID NO: 621631 - DNA, 19 bp, Mus musculus
  siRNA target sequence for B430104H02Rik (NM_026568.1,793-811).
ggttaccaaggataccata

SEQ ID NO: 621632 - DNA, 19 bp, Mus musculus
  siRNA target sequence for B430104H02Rik (NM_026568.1,808-826).
catagcagatccacacaat

SEQ ID NO: 621633 - DNA, 19 bp, Mus musculus
  siRNA target sequence for B430104H02Rik (NM_026568.1,815-833).
gatccacacaatttaaaga

SEQ ID NO: 621634 - DNA, 19 bp, Mus musculus
  siRNA target sequence for B430104H02Rik (NM_026568.1,876-894).
ccaaccagatggtgttcaa

SEQ ID NO: 621635 - DNA, 19 bp, Mus musculus
  siRNA target sequence for B430104H02Rik (NM_026568.1,892-910).
caagactgaatatctgata

SEQ ID NO: 621636 - DNA, 19 bp, Mus musculus
  siRNA target sequence for B430104H02Rik (NM_026568.1,912-930).
cctgggtctcccagtttgt

SEQ ID NO: 621637 - DNA, 19 bp, Mus musculus
  siRNA target sequence for B430104H02Rik (NM_026568.1,971-989).
ccaggtgttggcatgttta

SEQ ID NO: 621638 - DNA, 19 bp, Mus musculus
  siRNA target sequence for B430104H02Rik (NM_026568.1,974-992).
ggtgttggcatgtttagga

SEQ ID NO: 621639 - DNA, 19 bp, Mus musculus
  siRNA target sequence for B430104H02Rik (NM_026568.1,1046-1064).
cttggtgtcatcatcaaca

SEQ ID NO: 621640 - DNA, 19 bp, Mus musculus
  siRNA target sequence for B430104H02Rik (NM_029629.1,266-284).
gacttaaatgcttttgact

SEQ ID NO: 621641 - DNA, 19 bp, Mus musculus
  siRNA target sequence for B430104H02Rik (NM_029629.1,283-301).
ctcaacactccctaagaca

SEQ ID NO: 621642 - DNA, 19 bp, Mus musculus
  siRNA target sequence for B430104H02Rik (NM_029629.1,285-303).
caacactccctaagacaat

SEQ ID NO: 621643 - DNA, 19 bp, Mus musculus
  siRNA target sequence for Bat5 (NM_178592.2,156-174).
ccagctcctgggatacgta

SEQ ID NO: 621644 - DNA, 19 bp, Mus musculus
  siRNA target sequence for Bat5 (NM_178592.2,159-177).
gctcctgggatacgtatta

SEQ ID NO: 621645 - DNA, 19 bp, Mus musculus
  siRNA target sequence for Bat5 (NM_178592.2,160-178).
ctcctgggatacgtattat

SEQ ID NO: 621646 - DNA, 19 bp, Mus musculus
  siRNA target sequence for Bat5 (NM_178592.2,162-180).
cctgggatacgtattatca

SEQ ID NO: 621647 - DNA, 19 bp, Mus musculus
  siRNA target sequence for Bat5 (NM_178592.2,441-459).
ggaaccagtctgcagaaaa

SEQ ID NO: 621648 - DNA, 19 bp, Mus musculus
  siRNA target sequence for Bat5 (NM_178592.2,465-483).
ggcagctggccaactataa

SEQ ID NO: 621649 - DNA, 19 bp, Mus musculus
  siRNA target sequence for Bat5 (NM_178592.2,467-485).
cagctggccaactataact

SEQ ID NO: 621650 - DNA, 19 bp, Mus musculus
  siRNA target sequence for Bat5 (NM_178592.2,609-627).
cagcagacacgtttctcaa

SEQ ID NO: 621651 - DNA, 19 bp, Mus musculus
  siRNA target sequence for Bat5 (NM_178592.2,762-780).
gactggtggaagagtgtaa

SEQ ID NO: 621652 - DNA, 19 bp, Mus musculus
  siRNA target sequence for Bat5 (NM_178592.2,803-821).
gcctgtgatggtaatgaga

SEQ ID NO: 621653 - DNA, 19 bp, Mus musculus
  siRNA target sequence for Bat5 (NM_178592.2,934-952).
cctagaagctggctattct

SEQ ID NO: 621654 - DNA, 19 bp, Mus musculus
  siRNA target sequence for Bat5 (NM_178592.2,984-1002).
gaagcacgggggtaccatt

SEQ ID NO: 621655 - DNA, 19 bp, Mus musculus
  siRNA target sequence for Bat5 (NM_178592.2,1027-1045).
ggatgtggtggttcagttt

SEQ ID NO: 621656 - DNA, 19 bp, Mus musculus
  siRNA target sequence for Bat5 (NM_178592.2,1140-1158).
cagacatcagtgctgttat

SEQ ID NO: 621657 - DNA, 19 bp, Mus musculus
  siRNA target sequence for Bat5 (NM_178592.2,1314-1332).
gaaccaaggacgagatcat

SEQ ID NO: 621658 - DNA, 19 bp, Mus musculus
  siRNA target sequence for Bat5 (NM_178592.2,1475-1493).
gaggaagcctccatttaca

SEQ ID NO: 621659 - DNA, 19 bp, Mus musculus
  siRNA target sequence for Bat5 (NM_178592.2,1477-1495).
ggaagcctccatttacagt

SEQ ID NO: 621660 - DNA, 19 bp, Mus musculus
  siRNA target sequence for Bat5 (NM_178592.2,1632-1650).
ggaagcatctacacaactt

SEQ ID NO: 621661 - DNA, 19 bp, Mus musculus
  siRNA target sequence for Bat5 (NM_178592.2,1633-1651).
gaagcatctacacaacttt

SEQ ID NO: 621662 - DNA, 19 bp, Mus musculus
  siRNA target sequence for BC005632 (NM_145421.1,617-635).
ccgcatcgcctgcatgtat

SEQ ID NO: 621663 - DNA, 19 bp, Mus musculus
  siRNA target sequence for BC005632 (NM_145421.1,704-722).
gatgtgcagcttctatgtt

SEQ ID NO: 621664 - DNA, 19 bp, Mus musculus
  siRNA target sequence for BC005632 (NM_145421.1,1057-1075).
cgtcaccggtgctcatcat

SEQ ID NO: 621665 - DNA, 19 bp, Mus musculus
  siRNA target sequence for BC005632 (NM_145421.1,1169-1187).
cgctgggcacaatgacatt

SEQ ID NO: 621666 - DNA, 19 bp, Mus musculus
  siRNA target sequence for BC005632 (NM_145421.1,1212-1230).
cgcctacgccgcttcattt

SEQ ID NO: 621667 - DNA, 19 bp, Mus musculus
  siRNA target sequence for BC021611 (NM_144932.2,600-618).
gtggaagtacgcatcatct

SEQ ID NO: 621668 - DNA, 19 bp, Mus musculus
  siRNA target sequence for BC021611 (NM_144932.2,733-751).
cctcggtgttccgagaata

SEQ ID NO: 621669 - DNA, 19 bp, Mus musculus
  siRNA target sequence for BC021611 (NM_144932.2,811-829).
gagacaccgccgtgttcaa

SEQ ID NO: 621670 - DNA, 19 bp, Mus musculus
  siRNA target sequence for BC021611 (NM_144932.2,941-959).
caccgatgtcgctgtaatt

SEQ ID NO: 621671 - DNA, 19 bp, Mus musculus
  siRNA target sequence for BC021611 (NM_144932.2,944-962).
cgatgtcgctgtaattgga

SEQ ID NO: 621672 - DNA, 19 bp, Mus musculus
  siRNA target sequence for BC021611 (NM_144932.2,960-978).
ggagttcctgatatgacat

SEQ ID NO: 621673 - DNA, 19 bp, Mus musculus
  siRNA target sequence for BC027340 (NM_146106.1,186-204).
caagcacgtgctaaaccaa

SEQ ID NO: 621674 - DNA, 19 bp, Mus musculus
  siRNA target sequence for BC027340 (NM_146106.1,195-213).
gctaaaccaagacttaaca

SEQ ID NO: 621675 - DNA, 19 bp, Mus musculus
  siRNA target sequence for BC027340 (NM_146106.1,196-214).
ctaaaccaagacttaacat

SEQ ID NO: 621676 - DNA, 19 bp, Mus musculus
  siRNA target sequence for BC027340 (NM_146106.1,212-230).
cattccagcacataaagat

SEQ ID NO: 621677 - DNA, 19 bp, Mus musculus
  siRNA target sequence for BC027340 (NM_146106.1,246-264).
cccctccaggccgtatact

SEQ ID NO: 621678 - DNA, 19 bp, Mus musculus
  siRNA target sequence for BC027340 (NM_146106.1,274-292).
ggagggctctccaatgtgt

SEQ ID NO: 621679 - DNA, 19 bp, Mus musculus
  siRNA target sequence for BC027340 (NM_146106.1,291-309).
gtggtttgacagatttaaa

SEQ ID NO: 621680 - DNA, 19 bp, Mus musculus
  siRNA target sequence for BC027340 (NM_146106.1,298-316).
gacagatttaaaatatcta

SEQ ID NO: 621681 - DNA, 19 bp, Mus musculus
  siRNA target sequence for BC027340 (NM_146106.1,326-344).
cagaacaccttgaatcaat

SEQ ID NO: 621682 - DNA, 19 bp, Mus musculus
  siRNA target sequence for BC027340 (NM_146106.1,333-351).
ccttgaatcaattgatagt

SEQ ID NO: 621683 - DNA, 19 bp, Mus musculus
  siRNA target sequence for BC027340 (NM_146106.1,334-352).
cttgaatcaattgatagta

SEQ ID NO: 621684 - DNA, 19 bp, Mus musculus
  siRNA target sequence for BC027340 (NM_146106.1,442-460).
ggctgcatggcgatgcatt

SEQ ID NO: 621685 - DNA, 19 bp, Mus musculus
  siRNA target sequence for BC027340 (NM_146106.1,444-462).
ctgcatggcgatgcattta

SEQ ID NO: 621686 - DNA, 19 bp, Mus musculus
  siRNA target sequence for BC027340 (NM_146106.1,516-534).
gaataaagcatctgttgtt

SEQ ID NO: 621687 - DNA, 19 bp, Mus musculus
  siRNA target sequence for BC027340 (NM_146106.1,617-635).
cttggggcaaggagacaaa

SEQ ID NO: 621688 - DNA, 19 bp, Mus musculus
  siRNA target sequence for BC027340 (NM_146106.1,658-676).
gtgagcacaacgtttcaca

SEQ ID NO: 621689 - DNA, 19 bp, Mus musculus
  siRNA target sequence for BC027340 (NM_146106.1,673-691).
cacagtcttccgaatctta

SEQ ID NO: 621690 - DNA, 19 bp, Mus musculus
  siRNA target sequence for BC027340 (NM_146106.1,693-711).
ccatgagctcaacaaaact

SEQ ID NO: 621691 - DNA, 19 bp, Mus musculus
  siRNA target sequence for BC027342 (NM_146251.2,302-320).
gctgatggggattggaatt

SEQ ID NO: 621692 - DNA, 19 bp, Mus musculus
  siRNA target sequence for BC027342 (NM_146251.2,334-352).
ccctagccttcgttggtat

SEQ ID NO: 621693 - DNA, 19 bp, Mus musculus
  siRNA target sequence for BC027342 (NM_146251.2,336-354).
ctagccttcgttggtatta

SEQ ID NO: 621694 - DNA, 19 bp, Mus musculus
  siRNA target sequence for BC027342 (NM_146251.2,339-357).
gccttcgttggtattacct

SEQ ID NO: 621695 - DNA, 19 bp, Mus musculus
  siRNA target sequence for BC027342 (NM_146251.2,344-362).
cgttggtattaccttcttt

SEQ ID NO: 621696 - DNA, 19 bp, Mus musculus
  siRNA target sequence for BC027342 (NM_146251.2,345-363).
gttggtattaccttctttt

SEQ ID NO: 621697 - DNA, 19 bp, Mus musculus
  siRNA target sequence for BC027342 (NM_146251.2,536-554).
gaccaaagtgctgtcttta

SEQ ID NO: 621698 - DNA, 19 bp, Mus musculus
  siRNA target sequence for BC027342 (NM_146251.2,562-580).
ggattctgcgctttaagaa

SEQ ID NO: 621699 - DNA, 19 bp, Mus musculus
  siRNA target sequence for BC027342 (NM_146251.2,563-581).
gattctgcgctttaagaaa

SEQ ID NO: 621700 - DNA, 19 bp, Mus musculus
  siRNA target sequence for BC027342 (NM_146251.2,567-585).
ctgcgctttaagaaagagt

SEQ ID NO: 621701 - DNA, 19 bp, Mus musculus
  siRNA target sequence for BC027342 (NM_146251.2,589-607).
ccactttgcagccaaaaga

SEQ ID NO: 621702 - DNA, 19 bp, Mus musculus
  siRNA target sequence for BC027342 (NM_146251.2,669-687).
ccatcagaagtcttgtaca

SEQ ID NO: 621703 - DNA, 19 bp, Mus musculus
  siRNA target sequence for BC027342 (NM_146251.2,670-688).
catcagaagtcttgtacat

SEQ ID NO: 621704 - DNA, 19 bp, Mus musculus
  siRNA target sequence for BC027342 (NM_146251.2,673-691).
cagaagtcttgtacatgtt

SEQ ID NO: 621705 - DNA, 19 bp, Mus musculus
  siRNA target sequence for BC027342 (NM_146251.2,916-934).
gtctcctcagcattttgga

SEQ ID NO: 621706 - DNA, 19 bp, Mus musculus
  siRNA target sequence for BC027342 (NM_146251.2,952-970).
ctgcaccatacaaaacagt

SEQ ID NO: 621707 - DNA, 19 bp, Mus musculus
  siRNA target sequence for BC027342 (NM_146251.2,954-972).
gcaccatacaaaacagttt

SEQ ID NO: 621708 - DNA, 19 bp, Mus musculus
  siRNA target sequence for BC027342 (NM_146251.2,1205-1223).
caagagacagatgtcatat

SEQ ID NO: 621709 - DNA, 19 bp, Mus musculus
  siRNA target sequence for BC027342 (NM_146251.2,1385-1403).
gggaagtggctctaacact

SEQ ID NO: 621710 - DNA, 19 bp, Mus musculus
  siRNA target sequence for BC027342 (NM_146251.2,1488-1506).
gagcaacttgggaactctt

SEQ ID NO: 621711 - DNA, 19 bp, Mus musculus
  siRNA target sequence for BC027342 (NM_146251.2,1556-1574).
cttccactactcagaaaat

SEQ ID NO: 621712 - DNA, 19 bp, Mus musculus
  siRNA target sequence for BC027342 (NM_146251.2,1704-1722).
cctgcaggcaccttagtgt

SEQ ID NO: 621713 - DNA, 19 bp, Mus musculus
  siRNA target sequence for BC027342 (NM_146251.2,1708-1726).
caggcaccttagtgtcaaa

SEQ ID NO: 621714 - DNA, 19 bp, Mus musculus
  siRNA target sequence for BC027342 (NM_146251.2,1730-1748).
gggagatcaggatgtcaat

SEQ ID NO: 621715 - DNA, 19 bp, Mus musculus
  siRNA target sequence for BC027342 (NM_146251.2,1869-1887).
ggagaacccctaatgttca

SEQ ID NO: 621716 - DNA, 19 bp, Mus musculus
  siRNA target sequence for BC027342 (NM_146251.2,1902-1920).
cgagactgcagctttttgt

SEQ ID NO: 621717 - DNA, 19 bp, Mus musculus
  siRNA target sequence for BC027342 (NM_146251.2,1925-1943).
ctcgaaggcccacttctat

SEQ ID NO: 621718 - DNA, 19 bp, Mus musculus
  siRNA target sequence for BC027342 (NM_146251.2,1927-1945).
cgaaggcccacttctatga

SEQ ID NO: 621719 - DNA, 19 bp, Mus musculus
  siRNA target sequence for BC027342 (NM_146251.2,1992-2010).
gttgtgaagaggatgtcat

SEQ ID NO: 621720 - DNA, 19 bp, Mus musculus
  siRNA target sequence for BC027342 (NM_146251.2,2000-2018).
gaggatgtcatcctttgta

SEQ ID NO: 621721 - DNA, 19 bp, Mus musculus
  siRNA target sequence for BC027342 (NM_146251.2,2011-2029).
cctttgtacggcagattga

SEQ ID NO: 621722 - DNA, 19 bp, Mus musculus
  siRNA target sequence for BC027342 (NM_146251.2,2058-2076).
gctggacgtgccatataca

SEQ ID NO: 621723 - DNA, 19 bp, Mus musculus
  siRNA target sequence for BC027342 (NM_146251.2,2280-2298).
ggagctctgacgtctatca

SEQ ID NO: 621724 - DNA, 19 bp, Mus musculus
  siRNA target sequence for BC027342 (NM_146251.2,2315-2333).
ggttgtaacgcgactgatt

SEQ ID NO: 621725 - DNA, 19 bp, Mus musculus
  siRNA target sequence for BC027342 (NM_146251.2,2323-2341).
cgcgactgattcatctctt

SEQ ID NO: 621726 - DNA, 19 bp, Mus musculus
  siRNA target sequence for BC027342 (NM_146251.2,2337-2355).
ctcttgggcgagaagatct

SEQ ID NO: 621727 - DNA, 19 bp, Mus musculus
  siRNA target sequence for BC027342 (NM_146251.2,2339-2357).
cttgggcgagaagatctta

SEQ ID NO: 621728 - DNA, 19 bp, Mus musculus
  siRNA target sequence for BC027342 (NM_146251.2,2802-2820).
gcccagaagcagctaatct

SEQ ID NO: 621729 - DNA, 19 bp, Mus musculus
  siRNA target sequence for BC027342 (NM_146251.2,2803-2821).
cccagaagcagctaatctt

SEQ ID NO: 621730 - DNA, 19 bp, Mus musculus
  siRNA target sequence for BC027342 (NM_146251.2,2985-3003).
ccagaccgtcattctgatt

SEQ ID NO: 621731 - DNA, 19 bp, Mus musculus
  siRNA target sequence for BC027342 (NM_146251.2,2986-3004).
cagaccgtcattctgattt

SEQ ID NO: 621732 - DNA, 19 bp, Mus musculus
  siRNA target sequence for BC027342 (NM_146251.2,2988-3006).
gaccgtcattctgattttt

SEQ ID NO: 621733 - DNA, 19 bp, Mus musculus
  siRNA target sequence for BC027342 (NM_146251.2,3222-3240).
gcagagggtatgacatcaa

SEQ ID NO: 621734 - DNA, 19 bp, Mus musculus
  siRNA target sequence for BC027342 (NM_146251.2,3223-3241).
cagagggtatgacatcaat

SEQ ID NO: 621735 - DNA, 19 bp, Mus musculus
  siRNA target sequence for BC027342 (NM_146251.2,3228-3246).
ggtatgacatcaatgatga

SEQ ID NO: 621736 - DNA, 19 bp, Mus musculus
  siRNA target sequence for BC027342 (NM_146251.2,3261-3279).
ctgacctacccaatcacat

SEQ ID NO: 621737 - DNA, 19 bp, Mus musculus
  siRNA target sequence for BC027342 (NM_146251.2,3291-3309).
ggcactggcttcaatagca

SEQ ID NO: 621738 - DNA, 19 bp, Mus musculus
  siRNA target sequence for BC027342 (NM_146251.2,3660-3678).
cccttggctacaaaagtca

SEQ ID NO: 621739 - DNA, 19 bp, Mus musculus
  siRNA target sequence for BC027342 (NM_146251.2,3661-3679).
ccttggctacaaaagtcaa

SEQ ID NO: 621740 - DNA, 19 bp, Mus musculus
  siRNA target sequence for BC027342 (NM_146251.2,3670-3688).
caaaagtcaaggtgttgaa

SEQ ID NO: 621741 - DNA, 19 bp, Mus musculus
  siRNA target sequence for BC027342 (NM_146251.2,3683-3701).
gttgaacatggcagagatt

SEQ ID NO: 621742 - DNA, 19 bp, Mus musculus
  siRNA target sequence for BC027342 (NM_146251.2,3778-3796).
ggcctcccatcgacagtta

SEQ ID NO: 621743 - DNA, 19 bp, Mus musculus
  siRNA target sequence for BC027342 (NM_146251.2,3806-3824).
ggacttcggcaaatttgat

SEQ ID NO: 621744 - DNA, 19 bp, Mus musculus
  siRNA target sequence for BC027342 (NM_146251.2,3852-3870).
gggcggacagtgtttgaca

SEQ ID NO: 621745 - DNA, 19 bp, Mus musculus
  siRNA target sequence for BC027342 (NM_146251.2,3853-3871).
ggcggacagtgtttgacat

SEQ ID NO: 621746 - DNA, 19 bp, Mus musculus
  siRNA target sequence for BC027342 (NM_146251.2,4025-4043).
ggatgatgagtctgactat

SEQ ID NO: 621747 - DNA, 19 bp, Mus musculus
  siRNA target sequence for BC027342 (NM_146251.2,4073-4091).
catccccaaggaaacgtat

SEQ ID NO: 621748 - DNA, 19 bp, Mus musculus
  siRNA target sequence for BC027342 (NM_146251.2,4158-4176).
ggaccccccagcttgactt

SEQ ID NO: 621749 - DNA, 19 bp, Mus musculus
  siRNA target sequence for BC027342 (NM_146251.2,4202-4220).
cccttggctccctaatcaa

SEQ ID NO: 621750 - DNA, 19 bp, Mus musculus
  siRNA target sequence for BC055815 (NM_172837.1,111-129).
gtggcttttagcaacaaca

SEQ ID NO: 621751 - DNA, 19 bp, Mus musculus
  siRNA target sequence for BC055815 (NM_172837.1,114-132).
gcttttagcaacaacatgt

SEQ ID NO: 621752 - DNA, 19 bp, Mus musculus
  siRNA target sequence for BC055815 (NM_172837.1,149-167).
gacccatagatggctataa

SEQ ID NO: 621753 - DNA, 19 bp, Mus musculus
  siRNA target sequence for BC055815 (NM_172837.1,182-200).
caaatcctgaagccaatat

SEQ ID NO: 621754 - DNA, 19 bp, Mus musculus
  siRNA target sequence for BC055815 (NM_172837.1,187-205).
cctgaagccaatatgaata

SEQ ID NO: 621755 - DNA, 19 bp, Mus musculus
  siRNA target sequence for BC055815 (NM_172837.1,195-213).
caatatgaatattagtgaa

SEQ ID NO: 621756 - DNA, 19 bp, Mus musculus
  siRNA target sequence for BC055815 (NM_172837.1,227-245).
ggggctatccttatgaaaa

SEQ ID NO: 621757 - DNA, 19 bp, Mus musculus
  siRNA target sequence for BC055815 (NM_172837.1,231-249).
ctatccttatgaaaagcat

SEQ ID NO: 621758 - DNA, 19 bp, Mus musculus
  siRNA target sequence for BC055815 (NM_172837.1,329-347).
cgaaggcagttgtgtatct

SEQ ID NO: 621759 - DNA, 19 bp, Mus musculus
  siRNA target sequence for BC055815 (NM_172837.1,370-388).
gccaataactggatttgca

SEQ ID NO: 621760 - DNA, 19 bp, Mus musculus
  siRNA target sequence for BC055815 (NM_172837.1,371-389).
ccaataactggatttgcaa

SEQ ID NO: 621761 - DNA, 19 bp, Mus musculus
  siRNA target sequence for BC055815 (NM_172837.1,496-514).
cctaaatcaccgcaatatt

SEQ ID NO: 621762 - DNA, 19 bp, Mus musculus
  siRNA target sequence for BC055815 (NM_172837.1,531-549).
cgagatggcgaaatatgat

SEQ ID NO: 621763 - DNA, 19 bp, Mus musculus
  siRNA target sequence for BC055815 (NM_172837.1,534-552).
gatggcgaaatatgatctt

SEQ ID NO: 621764 - DNA, 19 bp, Mus musculus
  siRNA target sequence for BC055815 (NM_172837.1,554-572).
cagctacagtcaatctgat

SEQ ID NO: 621765 - DNA, 19 bp, Mus musculus
  siRNA target sequence for BC055815 (NM_172837.1,557-575).
ctacagtcaatctgatctt

SEQ ID NO: 621766 - DNA, 19 bp, Mus musculus
  siRNA target sequence for BC055815 (NM_172837.1,560-578).
cagtcaatctgatcttaga

SEQ ID NO: 621767 - DNA, 19 bp, Mus musculus
  siRNA target sequence for BC055815 (NM_172837.1,562-580).
gtcaatctgatcttagaga

SEQ ID NO: 621768 - DNA, 19 bp, Mus musculus
  siRNA target sequence for BC055815 (NM_172837.1,624-642).
caccaccatagcgttcata

SEQ ID NO: 621769 - DNA, 19 bp, Mus musculus
  siRNA target sequence for BC055815 (NM_172837.1,629-647).
ccatagcgttcatagcatt

SEQ ID NO: 621770 - DNA, 19 bp, Mus musculus
  siRNA target sequence for BC055815 (NM_172837.1,634-652).
gcgttcatagcattctcta

SEQ ID NO: 621771 - DNA, 19 bp, Mus musculus
  siRNA target sequence for BC055815 (NM_172837.1,703-721).
gtggccacagtaaaataca

SEQ ID NO: 621772 - DNA, 19 bp, Mus musculus
  siRNA target sequence for BC055815 (NM_172837.1,705-723).
ggccacagtaaaatacact

SEQ ID NO: 621773 - DNA, 19 bp, Mus musculus
  siRNA target sequence for BC055815 (NM_172837.1,720-738).
cactcgaagcccaatgaaa

SEQ ID NO: 621774 - DNA, 19 bp, Mus musculus
  siRNA target sequence for BC055815 (NM_172837.1,758-776).
ggaaagctgtcaaggtatt

SEQ ID NO: 621775 - DNA, 19 bp, Mus musculus
  siRNA target sequence for BC055815 (NM_172837.1,771-789).
ggtattgtttggtgacaaa

SEQ ID NO: 621776 - DNA, 19 bp, Mus musculus
  siRNA target sequence for BC055815 (NM_172837.1,772-790).
gtattgtttggtgacaaaa

SEQ ID NO: 621777 - DNA, 19 bp, Mus musculus
  siRNA target sequence for BC055815 (NM_172837.1,806-824).
cgtggtttgaacaattcat

SEQ ID NO: 621778 - DNA, 19 bp, Mus musculus
  siRNA target sequence for BC055815 (NM_172837.1,835-853).
gtgtgcaaccggaagttat

SEQ ID NO: 621779 - DNA, 19 bp, Mus musculus
  siRNA target sequence for BC055815 (NM_172837.1,839-857).
gcaaccggaagttattcca

SEQ ID NO: 621780 - DNA, 19 bp, Mus musculus
  siRNA target sequence for BC055815 (NM_172837.1,840-858).
caaccggaagttattccat

SEQ ID NO: 621781 - DNA, 19 bp, Mus musculus
  siRNA target sequence for BC055815 (NM_172837.1,898-916).
gatccccaaaacttaaaca

SEQ ID NO: 621782 - DNA, 19 bp, Mus musculus
  siRNA target sequence for BC055815 (NM_172837.1,922-940).
cgcttggatgtttatctgt

SEQ ID NO: 621783 - DNA, 19 bp, Mus musculus
  siRNA target sequence for BC055815 (NM_172837.1,981-999).
ctgggcccaggctgtcaat

SEQ ID NO: 621784 - DNA, 19 bp, Mus musculus
  siRNA target sequence for BC055815 (NM_172837.1,1197-1215).
ggagattccacactacaat

SEQ ID NO: 621785 - DNA, 19 bp, Mus musculus
  siRNA target sequence for BC055815 (NM_172837.1,1205-1223).
cacactacaatcatatgga

SEQ ID NO: 621786 - DNA, 19 bp, Mus musculus
  siRNA target sequence for BC055815 (NM_172837.1,1207-1225).
cactacaatcatatggatt

SEQ ID NO: 621787 - DNA, 19 bp, Mus musculus
  siRNA target sequence for BC055815 (NM_172837.1,1240-1258).
gacgcaccccaggaagttt

SEQ ID NO: 621788 - DNA, 19 bp, Mus musculus
  siRNA target sequence for BC055815 (NM_172837.1,1242-1260).
cgcaccccaggaagtttat

SEQ ID NO: 621789 - DNA, 19 bp, Mus musculus
  siRNA target sequence for BC055815 (NM_172837.1,1255-1273).
gtttatggagacctaatta

SEQ ID NO: 621790 - DNA, 19 bp, Mus musculus
  siRNA target sequence for BC055815 (NM_172837.1,1261-1279).
ggagacctaattagaatga

SEQ ID NO: 621791 - DNA, 19 bp, Mus musculus
  siRNA target sequence for BC055815 (NM_172837.1,1266-1284).
cctaattagaatgatagaa

SEQ ID NO: 621792 - DNA, 19 bp, Mus musculus
  siRNA target sequence for BC055815 (NM_172837.1,1274-1292).
gaatgatagaagaatcttt

SEQ ID NO: 621793 - DNA, 19 bp, Mus musculus
  siRNA target sequence for C130079G13 (NM_177661.2,1018-1036).
gtatcctggcctacaatca

SEQ ID NO: 621794 - DNA, 19 bp, Mus musculus
  siRNA target sequence for C130079G13 (NM_177661.2,1053-1071).
catcccatcaagagtatca

SEQ ID NO: 621795 - DNA, 19 bp, Mus musculus
  siRNA target sequence for C130079G13 (NM_177661.2,1066-1084).
gtatcaacatggtccaatt

SEQ ID NO: 621796 - DNA, 19 bp, Mus musculus
  siRNA target sequence for C130079G13 (NM_177661.2,1092-1110).
gggagatgataattaagtt

SEQ ID NO: 621797 - DNA, 19 bp, Mus musculus
  siRNA target sequence for C130079G13 (NM_177661.2,1126-1144).
gactgaagacaaagttcta

SEQ ID NO: 621798 - DNA, 19 bp, Mus musculus
  siRNA target sequence for C130079G13 (NM_177661.2,1284-1302).
cttcctatccagtacttgt

SEQ ID NO: 621799 - DNA, 19 bp, Mus musculus
  siRNA target sequence for C130079G13 (NM_177661.2,1311-1329).
gattgtcccctttgctatt

SEQ ID NO: 621800 - DNA, 19 bp, Mus musculus
  siRNA target sequence for C130079G13 (NM_177661.2,1315-1333).
gtcccctttgctattcaat

SEQ ID NO: 621801 - DNA, 19 bp, Mus musculus
  siRNA target sequence for C130079G13 (NM_177661.2,1319-1337).
cctttgctattcaatgaca

SEQ ID NO: 621802 - DNA, 19 bp, Mus musculus
  siRNA target sequence for C130079G13 (NM_177661.2,1346-1364).
cagagtttgccattaacat

SEQ ID NO: 621803 - DNA, 19 bp, Mus musculus
  siRNA target sequence for C130079G13 (NM_177661.2,1390-1408).
cttaagagatgatagtctt

SEQ ID NO: 621804 - DNA, 19 bp, Mus musculus
  siRNA target sequence for C130079G13 (NM_177661.2,1414-1432).
catttcacggcttagaaat

SEQ ID NO: 621805 - DNA, 19 bp, Mus musculus
  siRNA target sequence for C130079G13 (NM_177661.2,1449-1467).
ctcatgagcatatagagaa

SEQ ID NO: 621806 - DNA, 19 bp, Mus musculus
  siRNA target sequence for C130079G13 (NM_177661.2,1475-1493).
catggagccctatcattca

SEQ ID NO: 621807 - DNA, 19 bp, Mus musculus
  siRNA target sequence for C230090D14 (NM_173019.2,268-286).
gtgcctactcgggaattca

SEQ ID NO: 621808 - DNA, 19 bp, Mus musculus
  siRNA target sequence for C230090D14 (NM_173019.2,313-331).
gtcaagacgtacaaatctt

SEQ ID NO: 621809 - DNA, 19 bp, Mus musculus
  siRNA target sequence for C230090D14 (NM_173019.2,315-333).
caagacgtacaaatctttt

SEQ ID NO: 621810 - DNA, 19 bp, Mus musculus
  siRNA target sequence for C230090D14 (NM_173019.2,434-452).
gacatgtggcggtttttga

SEQ ID NO: 621811 - DNA, 19 bp, Mus musculus
  siRNA target sequence for C230090D14 (NM_173019.2,472-490).
gagcggagagcgatgatct

SEQ ID NO: 621812 - DNA, 19 bp, Mus musculus
  siRNA target sequence for C230090D14 (NM_173019.2,513-531).
ctacaagaccttctttgtt

SEQ ID NO: 621813 - DNA, 19 bp, Mus musculus
  siRNA target sequence for C230090D14 (NM_173019.2,516-534).
caagaccttctttgttgaa

SEQ ID NO: 621814 - DNA, 19 bp, Mus musculus
  siRNA target sequence for C230090D14 (NM_173019.2,566-584).
ccaacatcgtgcaagtgaa

SEQ ID NO: 621815 - DNA, 19 bp, Mus musculus
  siRNA target sequence for C230090D14 (NM_173019.2,625-643).
gccaccgaagacttcatga

SEQ ID NO: 621816 - DNA, 19 bp, Mus musculus
  siRNA target sequence for C230090D14 (NM_173019.2,636-654).
cttcatgaggcgcattgaa

SEQ ID NO: 621817 - DNA, 19 bp, Mus musculus
  siRNA target sequence for C230090D14 (NM_173019.2,642-660).
gaggcgcattgaatgctat

SEQ ID NO: 621818 - DNA, 19 bp, Mus musculus
  siRNA target sequence for C230090D14 (NM_173019.2,645-663).
gcgcattgaatgctatgaa

SEQ ID NO: 621819 - DNA, 19 bp, Mus musculus
  siRNA target sequence for C230090D14 (NM_173019.2,768-786).
ccagagtcgcatcgtttat

SEQ ID NO: 621820 - DNA, 19 bp, Mus musculus
  siRNA target sequence for C230090D14 (NM_173019.2,769-787).
cagagtcgcatcgtttatt

SEQ ID NO: 621821 - DNA, 19 bp, Mus musculus
  siRNA target sequence for C230090D14 (NM_173019.2,773-791).
gtcgcatcgtttattacct

SEQ ID NO: 621822 - DNA, 19 bp, Mus musculus
  siRNA target sequence for C230090D14 (NM_173019.2,935-953).
gtgaccagaacattaagga

SEQ ID NO: 621823 - DNA, 19 bp, Mus musculus
  siRNA target sequence for C230090D14 (NM_173019.2,1004-1022).
cgctgagcgtcccttatga

SEQ ID NO: 621824 - DNA, 19 bp, Mus musculus
  siRNA target sequence for C230090D14 (NM_173019.2,1066-1084).
gaaatgacctacgaagaaa

SEQ ID NO: 621825 - DNA, 19 bp, Mus musculus
  siRNA target sequence for C230090D14 (NM_173019.2,1149-1167).
gaagggtgagtcctatgaa

SEQ ID NO: 621826 - DNA, 19 bp, Mus musculus
  siRNA target sequence for C230090D14 (NM_173019.2,1340-1358).
ccgtggcttacggttgtaa

SEQ ID NO: 621827 - DNA, 19 bp, Mus musculus
  siRNA target sequence for C230090D14 (NM_173019.2,1341-1359).
cgtggcttacggttgtaaa

SEQ ID NO: 621828 - DNA, 19 bp, Mus musculus
  siRNA target sequence for C230090D14 (NM_173019.2,1401-1419).
ccgagacagacctcagaat

SEQ ID NO: 621829 - DNA, 19 bp, Mus musculus
  siRNA target sequence for C230090D14 (NM_173019.2,1409-1427).
gacctcagaatgtagacat

SEQ ID NO: 621830 - DNA, 19 bp, Mus musculus
  siRNA target sequence for C330001M22 (NM_177823.2,542-560).
ctgaccttggcccataagt

SEQ ID NO: 621831 - DNA, 19 bp, Mus musculus
  siRNA target sequence for C330001M22 (NM_177823.2,546-564).
ccttggcccataagttcta

SEQ ID NO: 621832 - DNA, 19 bp, Mus musculus
  siRNA target sequence for C330001M22 (NM_177823.2,648-666).
cccgagacatgcgttttgt

SEQ ID NO: 621833 - DNA, 19 bp, Mus musculus
  siRNA target sequence for C330001M22 (NM_177823.2,732-750).
gtgctggtgactacatctt

SEQ ID NO: 621834 - DNA, 19 bp, Mus musculus
  siRNA target sequence for C330001M22 (NM_177823.2,825-843).
gcttcttgccagagaacta

SEQ ID NO: 621835 - DNA, 19 bp, Mus musculus
  siRNA target sequence for C330001M22 (NM_177823.2,875-893).
gttaagcacaggacgtata

SEQ ID NO: 621836 - DNA, 19 bp, Mus musculus
  siRNA target sequence for C330001M22 (NM_177823.2,881-899).
cacaggacgtatacattca

SEQ ID NO: 621837 - DNA, 19 bp, Mus musculus
  siRNA target sequence for C330001M22 (NM_177823.2,883-901).
caggacgtatacattcaat

SEQ ID NO: 621838 - DNA, 19 bp, Mus musculus
  siRNA target sequence for C330001M22 (NM_177823.2,885-903).
ggacgtatacattcaatct

SEQ ID NO: 621839 - DNA, 19 bp, Mus musculus
  siRNA target sequence for C330001M22 (NM_177823.2,886-904).
gacgtatacattcaatcta

SEQ ID NO: 621840 - DNA, 19 bp, Mus musculus
  siRNA target sequence for C330001M22 (NM_177823.2,916-934).
gaactctaggaaggatttt

SEQ ID NO: 621841 - DNA, 19 bp, Mus musculus
  siRNA target sequence for C330001M22 (NM_177823.2,962-980).
ccccacactccgtcaatgt

SEQ ID NO: 621842 - DNA, 19 bp, Mus musculus
  siRNA target sequence for C330001M22 (NM_177823.2,964-982).
ccacactccgtcaatgtca

SEQ ID NO: 621843 - DNA, 19 bp, Mus musculus
  siRNA target sequence for C330001M22 (NM_177823.2,965-983).
cacactccgtcaatgtcaa

SEQ ID NO: 621844 - DNA, 19 bp, Mus musculus
  siRNA target sequence for C330001M22 (NM_177823.2,985-1003).
gagtgttagcagcatacaa

SEQ ID NO: 621845 - DNA, 19 bp, Mus musculus
  siRNA target sequence for C330001M22 (NM_177823.2,1087-1105).
gctacagcagtgtactact

SEQ ID NO: 621846 - DNA, 19 bp, Mus musculus
  siRNA target sequence for C330001M22 (NM_177823.2,1159-1177).
gaggagcaacggcatcaaa

SEQ ID NO: 621847 - DNA, 19 bp, Mus musculus
  siRNA target sequence for C330001M22 (NM_177823.2,1165-1183).
caacggcatcaaagacttt

SEQ ID NO: 621848 - DNA, 19 bp, Mus musculus
  siRNA target sequence for C330001M22 (NM_177823.2,1198-1216).
gctatcatcctgtggaatt

SEQ ID NO: 621849 - DNA, 19 bp, Mus musculus
  siRNA target sequence for C330001M22 (NM_177823.2,1199-1217).
ctatcatcctgtggaattt

SEQ ID NO: 621850 - DNA, 19 bp, Mus musculus
  siRNA target sequence for C330001M22 (NM_177823.2,1312-1330).
caagcacatcctagaagaa

SEQ ID NO: 621851 - DNA, 19 bp, Mus musculus
  siRNA target sequence for C330001M22 (NM_177823.2,1751-1769).
gtgaatccgccagtaaaga

SEQ ID NO: 621852 - DNA, 19 bp, Mus musculus
  siRNA target sequence for C330001M22 (NM_177823.2,1781-1799).
ggggccaactcggtcttta

SEQ ID NO: 621853 - DNA, 19 bp, Mus musculus
  siRNA target sequence for C330001M22 (NM_177823.2,1782-1800).
gggccaactcggtctttaa

SEQ ID NO: 621854 - DNA, 19 bp, Mus musculus
  siRNA target sequence for C330001M22 (NM_177823.2,1793-1811).
gtctttaactggagaaact

SEQ ID NO: 621855 - DNA, 19 bp, Mus musculus
  siRNA target sequence for C730027J19Rik (NM_178758.2,293-311).
ccagtgcccgagtacttca

SEQ ID NO: 621856 - DNA, 19 bp, Mus musculus
  siRNA target sequence for C730027J19Rik (NM_178758.2,296-314).
gtgcccgagtacttcaact

SEQ ID NO: 621857 - DNA, 19 bp, Mus musculus
  siRNA target sequence for C730027J19Rik (NM_178758.2,298-316).
gcccgagtacttcaacttt

SEQ ID NO: 621858 - DNA, 19 bp, Mus musculus
  siRNA target sequence for C730027J19Rik (NM_178758.2,561-579).
gaacaggtgtggtcatgat

SEQ ID NO: 621859 - DNA, 19 bp, Mus musculus
  siRNA target sequence for C730027J19Rik (NM_178758.2,630-648).
ctgccagggccaagtctat

SEQ ID NO: 621860 - DNA, 19 bp, Mus musculus
  siRNA target sequence for C730027J19Rik (NM_178758.2,739-757).
ccgtccaggctggatcaat

SEQ ID NO: 621861 - DNA, 19 bp, Mus musculus
  siRNA target sequence for C730027J19Rik (NM_178758.2,740-758).
cgtccaggctggatcaatt

SEQ ID NO: 621862 - DNA, 19 bp, Mus musculus
  siRNA target sequence for C730027J19Rik (NM_178758.2,741-759).
gtccaggctggatcaattt

SEQ ID NO: 621863 - DNA, 19 bp, Mus musculus
  siRNA target sequence for C730027J19Rik (NM_178758.2,818-836).
gattcagtggccatctact

SEQ ID NO: 621864 - DNA, 19 bp, Mus musculus
  siRNA target sequence for C730027J19Rik (NM_178758.2,860-878).
cccaagatggtggaacatt

SEQ ID NO: 621865 - DNA, 19 bp, Mus musculus
  siRNA target sequence for C730027J19Rik (NM_178758.2,931-949).
cttgactgagtctgacata

SEQ ID NO: 621866 - DNA, 19 bp, Mus musculus
  siRNA target sequence for C730027J19Rik (NM_178758.2,1011-1029).
ccaatggagcttgcatttt

SEQ ID NO: 621867 - DNA, 19 bp, Mus musculus
  siRNA target sequence for C730027J19Rik (NM_178758.2,1012-1030).
caatggagcttgcattttt

SEQ ID NO: 621868 - DNA, 19 bp, Mus musculus
  siRNA target sequence for C730027J19Rik (NM_178758.2,1045-1063).
ccgagttgatgccaaaact

SEQ ID NO: 621869 - DNA, 19 bp, Mus musculus
  siRNA target sequence for C730027J19Rik (NM_178758.2,1046-1064).
cgagttgatgccaaaacta

SEQ ID NO: 621870 - DNA, 19 bp, Mus musculus
  siRNA target sequence for C730027J19Rik (NM_178758.2,1047-1065).
gagttgatgccaaaactat

SEQ ID NO: 621871 - DNA, 19 bp, Mus musculus
  siRNA target sequence for C730027J19Rik (NM_178758.2,1120-1138).
cttccggctgcttgtacaa

SEQ ID NO: 621872 - DNA, 19 bp, Mus musculus
  siRNA target sequence for C730027J19Rik (NM_178758.2,1142-1160).
gatctgacaaggtacaagt

SEQ ID NO: 621873 - DNA, 19 bp, Mus musculus
  siRNA target sequence for C730027J19Rik (NM_178758.2,1308-1326).
caatcaagtctggatctat

SEQ ID NO: 621874 - DNA, 19 bp, Mus musculus
  siRNA target sequence for C730027J19Rik (NM_178758.2,1319-1337).
ggatctatggggaaagcaa

SEQ ID NO: 621875 - DNA, 19 bp, Mus musculus
  siRNA target sequence for C730027J19Rik (NM_178758.2,1388-1406).
ccaggaaaagagggaaata

SEQ ID NO: 621876 - DNA, 19 bp, Mus musculus
  siRNA target sequence for C730027J19Rik (NM_178758.2,1414-1432).
ccgaatcaagcctactaga

SEQ ID NO: 621877 - DNA, 19 bp, Mus musculus
  siRNA target sequence for C730027J19Rik (NM_178758.2,1425-1443).
ctactagacccttctgttt

SEQ ID NO: 621878 - DNA, 19 bp, Mus musculus
  siRNA target sequence for C730027J19Rik (NM_178758.2,1431-1449).
gacccttctgtttcttcaa

SEQ ID NO: 621879 - DNA, 19 bp, Mus musculus
  siRNA target sequence for C730027J19Rik (NM_178758.2,1528-1546).
ggacgaggatggctacttt

SEQ ID NO: 621880 - DNA, 19 bp, Mus musculus
  siRNA target sequence for C730027J19Rik (NM_178758.2,1591-1609).
ccggattggtcctgttgaa

SEQ ID NO: 621881 - DNA, 19 bp, Mus musculus
  siRNA target sequence for C79127 (NM_177691.2,999-1017).
ccttgtgaggaggcaatta

SEQ ID NO: 621882 - DNA, 19 bp, Mus musculus
  siRNA target sequence for C79127 (NM_177691.2,1003-1021).
gtgaggaggcaattagcaa

SEQ ID NO: 621883 - DNA, 19 bp, Mus musculus
  siRNA target sequence for C79127 (NM_177691.2,1083-1101).
gaacctccaggcctaaaca

SEQ ID NO: 621884 - DNA, 19 bp, Mus musculus
  siRNA target sequence for C79127 (NM_177691.2,1092-1110).
ggcctaaacacggttttca

SEQ ID NO: 621885 - DNA, 19 bp, Mus musculus
  siRNA target sequence for C79127 (NM_177691.2,1174-1192).
ctgtcattgctgaagctta

SEQ ID NO: 621886 - DNA, 19 bp, Mus musculus
  siRNA target sequence for C79127 (NM_177691.2,1208-1226).
gaccccaggggaatgtcaa

SEQ ID NO: 621887 - DNA, 19 bp, Mus musculus
  siRNA target sequence for D230019K24Rik (NM_172511.2,157-175).
ccttaaccgatcagaactt

SEQ ID NO: 621888 - DNA, 19 bp, Mus musculus
  siRNA target sequence for D230019K24Rik (NM_172511.2,173-191).
cttccaaacctggcttata

SEQ ID NO: 621889 - DNA, 19 bp, Mus musculus
  siRNA target sequence for D230019K24Rik (NM_172511.2,176-194).
ccaaacctggcttataaga

SEQ ID NO: 621890 - DNA, 19 bp, Mus musculus
  siRNA target sequence for D230019K24Rik (NM_172511.2,203-221).
ggcaaaaccccaggaatta

SEQ ID NO: 621891 - DNA, 19 bp, Mus musculus
  siRNA target sequence for D230019K24Rik (NM_172511.2,204-222).
gcaaaaccccaggaattat

SEQ ID NO: 621892 - DNA, 19 bp, Mus musculus
  siRNA target sequence for D230019K24Rik (NM_172511.2,239-257).
ctttctaacatgaatggta

SEQ ID NO: 621893 - DNA, 19 bp, Mus musculus
  siRNA target sequence for D230019K24Rik (NM_172511.2,291-309).
ctctaggtcacgcctttat

SEQ ID NO: 621894 - DNA, 19 bp, Mus musculus
  siRNA target sequence for D230019K24Rik (NM_172511.2,293-311).
ctaggtcacgcctttataa

SEQ ID NO: 621895 - DNA, 19 bp, Mus musculus
  siRNA target sequence for D230019K24Rik (NM_172511.2,296-314).
ggtcacgcctttataaggt

SEQ ID NO: 621896 - DNA, 19 bp, Mus musculus
  siRNA target sequence for D230019K24Rik (NM_172511.2,297-315).
gtcacgcctttataaggtt

SEQ ID NO: 621897 - DNA, 19 bp, Mus musculus
  siRNA target sequence for D230019K24Rik (NM_172511.2,302-320).
gcctttataaggtttgact

SEQ ID NO: 621898 - DNA, 19 bp, Mus musculus
  siRNA target sequence for D230019K24Rik (NM_172511.2,303-321).
cctttataaggtttgacta

SEQ ID NO: 621899 - DNA, 19 bp, Mus musculus
  siRNA target sequence for D230019K24Rik (NM_172511.2,317-335).
gactactcagggattggaa

SEQ ID NO: 621900 - DNA, 19 bp, Mus musculus
  siRNA target sequence for D230019K24Rik (NM_172511.2,322-340).
ctcagggattggaagttca

SEQ ID NO: 621901 - DNA, 19 bp, Mus musculus
  siRNA target sequence for D230019K24Rik (NM_172511.2,378-396).
gaaaggatgtcctttccat

SEQ ID NO: 621902 - DNA, 19 bp, Mus musculus
  siRNA target sequence for D230019K24Rik (NM_172511.2,457-475).
catgctgcatgctgcaatt

SEQ ID NO: 621903 - DNA, 19 bp, Mus musculus
  siRNA target sequence for D230019K24Rik (NM_172511.2,491-509).
gtcatagctcttattggta

SEQ ID NO: 621904 - DNA, 19 bp, Mus musculus
  siRNA target sequence for D230019K24Rik (NM_172511.2,493-511).
catagctcttattggtata

SEQ ID NO: 621905 - DNA, 19 bp, Mus musculus
  siRNA target sequence for D230019K24Rik (NM_172511.2,497-515).
gctcttattggtatagcta

SEQ ID NO: 621906 - DNA, 19 bp, Mus musculus
  siRNA target sequence for D230019K24Rik (NM_172511.2,524-542).
gatggattggtgacacaat

SEQ ID NO: 621907 - DNA, 19 bp, Mus musculus
  siRNA target sequence for D230019K24Rik (NM_172511.2,528-546).
gattggtgacacaatatca

SEQ ID NO: 621908 - DNA, 19 bp, Mus musculus
  siRNA target sequence for D230019K24Rik (NM_172511.2,592-610).
gtggaccttgccatctaga

SEQ ID NO: 621909 - DNA, 19 bp, Mus musculus
  siRNA target sequence for D230019K24Rik (NM_172511.2,594-612).
ggaccttgccatctagata

SEQ ID NO: 621910 - DNA, 19 bp, Mus musculus
  siRNA target sequence for D230019K24Rik (NM_172511.2,597-615).
ccttgccatctagatacaa

SEQ ID NO: 621911 - DNA, 19 bp, Mus musculus
  siRNA target sequence for D230019K24Rik (NM_172511.2,633-651).
gaatcccgtacagtttcat

SEQ ID NO: 621912 - DNA, 19 bp, Mus musculus
  siRNA target sequence for D230019K24Rik (NM_172511.2,639-657).
cgtacagtttcattaaaga

SEQ ID NO: 621913 - DNA, 19 bp, Mus musculus
  siRNA target sequence for D230019K24Rik (NM_172511.2,719-737).
cacggcatgaaggatgaaa

SEQ ID NO: 621914 - DNA, 19 bp, Mus musculus
  siRNA target sequence for D230019K24Rik (NM_172511.2,721-739).
cggcatgaaggatgaaata

SEQ ID NO: 621915 - DNA, 19 bp, Mus musculus
  siRNA target sequence for D230019K24Rik (NM_172511.2,764-782).
gtcgcggaccgaatagtca

SEQ ID NO: 621916 - DNA, 19 bp, Mus musculus
  siRNA target sequence for D230019K24Rik (NM_172511.2,861-879).
gtactattgatgacttgat

SEQ ID NO: 621917 - DNA, 19 bp, Mus musculus
  siRNA target sequence for D230019K24Rik (NM_172511.2,872-890).
gacttgattgacaagcttt

SEQ ID NO: 621918 - DNA, 19 bp, Mus musculus
  siRNA target sequence for D4Ertd765e (NM_026728.1,277-295).
cgggtcctgctcttcagaa

SEQ ID NO: 621919 - DNA, 19 bp, Mus musculus
  siRNA target sequence for D4Ertd765e (NM_026728.1,510-528).
ggctgtcatggggctaatt

SEQ ID NO: 621920 - DNA, 19 bp, Mus musculus
  siRNA target sequence for D4Ertd765e (NM_026728.1,514-532).
gtcatggggctaattgaga

SEQ ID NO: 621921 - DNA, 19 bp, Mus musculus
  siRNA target sequence for D4Ertd765e (NM_026728.1,650-668).
gtgagttgggcctggtaaa

SEQ ID NO: 621922 - DNA, 19 bp, Mus musculus
  siRNA target sequence for D4Ertd765e (NM_026728.1,654-672).
gttgggcctggtaaatcat

SEQ ID NO: 621923 - DNA, 19 bp, Mus musculus
  siRNA target sequence for D4Ertd765e (NM_026728.1,815-833).
ggatggccatagaacagat

SEQ ID NO: 621924 - DNA, 19 bp, Mus musculus
  siRNA target sequence for D4Ertd765e (NM_026728.1,894-912).
gaaacgagctcccaaattt

SEQ ID NO: 621925 - DNA, 19 bp, Mus musculus
  siRNA target sequence for D5Ertd593e (NM_175096.2,300-318).
gaaagcaacggacatttga

SEQ ID NO: 621926 - DNA, 19 bp, Mus musculus
  siRNA target sequence for D5Ertd593e (NM_175096.2,355-373).
cacagcggctgcagaatgt

SEQ ID NO: 621927 - DNA, 19 bp, Mus musculus
  siRNA target sequence for D5Ertd593e (NM_175096.2,386-404).
ggtcaatgccagagagttt

SEQ ID NO: 621928 - DNA, 19 bp, Mus musculus
  siRNA target sequence for D5Ertd593e (NM_175096.2,389-407).
caatgccagagagtttgtt

SEQ ID NO: 621929 - DNA, 19 bp, Mus musculus
  siRNA target sequence for D5Ertd593e (NM_175096.2,446-464).
ctctgaagcggcaagaaat

SEQ ID NO: 621930 - DNA, 19 bp, Mus musculus
  siRNA target sequence for D5Ertd593e (NM_175096.2,450-468).
gaagcggcaagaaatcaaa

SEQ ID NO: 621931 - DNA, 19 bp, Mus musculus
  siRNA target sequence for D5Ertd593e (NM_175096.2,630-648).
gtgtctaggcactcatctt

SEQ ID NO: 621932 - DNA, 19 bp, Mus musculus
  siRNA target sequence for D5Ertd593e (NM_175096.2,965-983).
gttcgtgttggtagagaat

SEQ ID NO: 621933 - DNA, 19 bp, Mus musculus
  siRNA target sequence for D5Ertd593e (NM_175096.2,975-993).
gtagagaataaggaagtta

SEQ ID NO: 621934 - DNA, 19 bp, Mus musculus
  siRNA target sequence for D5Ertd593e (NM_175096.2,1028-1046).
gactggccatgaggataaa

SEQ ID NO: 621935 - DNA, 19 bp, Mus musculus
  siRNA target sequence for D9Wsu18e (NM_138584.1,253-271).
gtactgttcccctgaaaaa

SEQ ID NO: 621936 - DNA, 19 bp, Mus musculus
  siRNA target sequence for D9Wsu18e (NM_138584.1,258-276).
gttcccctgaaaaagataa

SEQ ID NO: 621937 - DNA, 19 bp, Mus musculus
  siRNA target sequence for D9Wsu18e (NM_138584.1,367-385).
gcggaactgcagatgtgtt

SEQ ID NO: 621938 - DNA, 19 bp, Mus musculus
  siRNA target sequence for D9Wsu18e (NM_138584.1,368-386).
cggaactgcagatgtgttt

SEQ ID NO: 621939 - DNA, 19 bp, Mus musculus
  siRNA target sequence for D9Wsu18e (NM_138584.1,418-436).
gttaccgggttatagcttt

SEQ ID NO: 621940 - DNA, 19 bp, Mus musculus
  siRNA target sequence for D9Wsu18e (NM_138584.1,500-518).
cttacaactggataaagtt

SEQ ID NO: 621941 - DNA, 19 bp, Mus musculus
  siRNA target sequence for D9Wsu18e (NM_138584.1,541-559).
gaggctttttggctcaaaa

SEQ ID NO: 621942 - DNA, 19 bp, Mus musculus
  siRNA target sequence for D9Wsu18e (NM_138584.1,543-561).
ggctttttggctcaaaaat

SEQ ID NO: 621943 - DNA, 19 bp, Mus musculus
  siRNA target sequence for D9Wsu18e (NM_138584.1,622-640).
gtgacacgtctatcttcaa

SEQ ID NO: 621944 - DNA, 19 bp, Mus musculus
  siRNA target sequence for D9Wsu18e (NM_138584.1,667-685).
ggttgatgccagcgtttat

SEQ ID NO: 621945 - DNA, 19 bp, Mus musculus
  siRNA target sequence for D9Wsu18e (NM_138584.1,773-791).
ggagagtttgggtcaaagt

SEQ ID NO: 621946 - DNA, 19 bp, Mus musculus
  siRNA target sequence for D9Wsu18e (NM_138584.1,813-831).
ctcaactgtcagaattcct

SEQ ID NO: 621947 - DNA, 19 bp, Mus musculus
  siRNA target sequence for D9Wsu18e (NM_138584.1,829-847).
cctatgtggagccacataa

SEQ ID NO: 621948 - DNA, 19 bp, Mus musculus
  siRNA target sequence for D9Wsu18e (NM_138584.1,866-884).
caccatcatggatgtgttt

SEQ ID NO: 621949 - DNA, 19 bp, Mus musculus
  siRNA target sequence for D9Wsu18e (NM_138584.1,890-908).
gagtgcgctgtcaacagaa

SEQ ID NO: 621950 - DNA, 19 bp, Mus musculus
  siRNA target sequence for D9Wsu18e (NM_138584.1,943-961).
cgcggagagcccaccttaa

SEQ ID NO: 621951 - DNA, 19 bp, Mus musculus
  siRNA target sequence for D9Wsu18e (NM_138584.1,945-963).
cggagagcccaccttaaga

SEQ ID NO: 621952 - DNA, 19 bp, Mus musculus
  siRNA target sequence for D9Wsu18e (NM_138584.1,994-1012).
gtgcagaggtcaatcttta

SEQ ID NO: 621953 - DNA, 19 bp, Mus musculus
  siRNA target sequence for D9Wsu18e (NM_138584.1,997-1015).
cagaggtcaatctttatgt

SEQ ID NO: 621954 - DNA, 19 bp, Mus musculus
  siRNA target sequence for Echdc1 (NM_025855.2,82-100).
caattctaagccgatttct

SEQ ID NO: 621955 - DNA, 19 bp, Mus musculus
  siRNA target sequence for Echdc1 (NM_025855.2,87-105).
ctaagccgatttctgaata

SEQ ID NO: 621956 - DNA, 19 bp, Mus musculus
  siRNA target sequence for Echdc1 (NM_025855.2,189-207).
caggagtgtcgctttataa

SEQ ID NO: 621957 - DNA, 19 bp, Mus musculus
  siRNA target sequence for Echdc1 (NM_025855.2,191-209).
ggagtgtcgctttataata

SEQ ID NO: 621958 - DNA, 19 bp, Mus musculus
  siRNA target sequence for Echdc1 (NM_025855.2,194-212).
gtgtcgctttataatacga

SEQ ID NO: 621959 - DNA, 19 bp, Mus musculus
  siRNA target sequence for Echdc1 (NM_025855.2,267-285).
gatccattgacctcctaaa

SEQ ID NO: 621960 - DNA, 19 bp, Mus musculus
  siRNA target sequence for Echdc1 (NM_025855.2,303-321).
gcattctgacgctaaacaa

SEQ ID NO: 621961 - DNA, 19 bp, Mus musculus
  siRNA target sequence for Echdc1 (NM_025855.2,312-330).
cgctaaacaaccccaataa

SEQ ID NO: 621962 - DNA, 19 bp, Mus musculus
  siRNA target sequence for Echdc1 (NM_025855.2,313-331).
gctaaacaaccccaataaa

SEQ ID NO: 621963 - DNA, 19 bp, Mus musculus
  siRNA target sequence for Echdc1 (NM_025855.2,348-366).
gtgtcatgatgctacaact

SEQ ID NO: 621964 - DNA, 19 bp, Mus musculus
  siRNA target sequence for Echdc1 (NM_025855.2,355-373).
gatgctacaacttttggaa

SEQ ID NO: 621965 - DNA, 19 bp, Mus musculus
  siRNA target sequence for Echdc1 (NM_025855.2,401-419).
gaagggaaaggcctcatta

SEQ ID NO: 621966 - DNA, 19 bp, Mus musculus
  siRNA target sequence for Echdc1 (NM_025855.2,415-433).
cattatccatggagcaaaa

SEQ ID NO: 621967 - DNA, 19 bp, Mus musculus
  siRNA target sequence for Echdc1 (NM_025855.2,421-439).
ccatggagcaaaaaatact

SEQ ID NO: 621968 - DNA, 19 bp, Mus musculus
  siRNA target sequence for Echdc1 (NM_025855.2,492-510).
gtggagtggccttatctat

SEQ ID NO: 621969 - DNA, 19 bp, Mus musculus
  siRNA target sequence for Echdc1 (NM_025855.2,494-512).
ggagtggccttatctatgt

SEQ ID NO: 621970 - DNA, 19 bp, Mus musculus
  siRNA target sequence for Echdc1 (NM_025855.2,495-513).
gagtggccttatctatgtt

SEQ ID NO: 621971 - DNA, 19 bp, Mus musculus
  siRNA target sequence for Echdc1 (NM_025855.2,497-515).
gtggccttatctatgttca

SEQ ID NO: 621972 - DNA, 19 bp, Mus musculus
  siRNA target sequence for Echdc1 (NM_025855.2,514-532).
catgcaaaacacgttaaca

SEQ ID NO: 621973 - DNA, 19 bp, Mus musculus
  siRNA target sequence for Echdc1 (NM_025855.2,517-535).
gcaaaacacgttaacaaga

SEQ ID NO: 621974 - DNA, 19 bp, Mus musculus
  siRNA target sequence for Echdc1 (NM_025855.2,518-536).
caaaacacgttaacaagat

SEQ ID NO: 621975 - DNA, 19 bp, Mus musculus
  siRNA target sequence for Echdc1 (NM_025855.2,526-544).
gttaacaagatttatgaga

SEQ ID NO: 621976 - DNA, 19 bp, Mus musculus
  siRNA target sequence for Echdc1 (NM_025855.2,541-559).
gagactaccgttaataagt

SEQ ID NO: 621977 - DNA, 19 bp, Mus musculus
  siRNA target sequence for Echdc1 (NM_025855.2,543-561).
gactaccgttaataagtgt

SEQ ID NO: 621978 - DNA, 19 bp, Mus musculus
  siRNA target sequence for Echdc1 (NM_025855.2,696-714).
ccagccgtctggttgaaat

SEQ ID NO: 621979 - DNA, 19 bp, Mus musculus
  siRNA target sequence for Echdc1 (NM_025855.2,699-717).
gccgtctggttgaaatcat

SEQ ID NO: 621980 - DNA, 19 bp, Mus musculus
  siRNA target sequence for Echdc1 (NM_025855.2,700-718).
ccgtctggttgaaatcatt

SEQ ID NO: 621981 - DNA, 19 bp, Mus musculus
  siRNA target sequence for Echdc1 (NM_025855.2,870-888).
gtgggcctccacaagtcat

SEQ ID NO: 621982 - DNA, 19 bp, Mus musculus
  siRNA target sequence for Echdc1 (NM_025855.2,881-899).
caagtcattaggggtttaa

SEQ ID NO: 621983 - DNA, 19 bp, Mus musculus
  siRNA target sequence for Echdc1 (NM_025855.2,884-902).
gtcattaggggtttaaaaa

SEQ ID NO: 621984 - DNA, 19 bp, Mus musculus
  siRNA target sequence for Echdc1 (NM_025855.2,912-930).
gctctgcccgagaactgta

SEQ ID NO: 621985 - DNA, 19 bp, Mus musculus
  siRNA target sequence for Echdc1 (NM_025855.2,913-931).
ctctgcccgagaactgtat

SEQ ID NO: 621986 - DNA, 19 bp, Mus musculus
  siRNA target sequence for Echdc1 (NM_025855.2,915-933).
ctgcccgagaactgtatat

SEQ ID NO: 621987 - DNA, 19 bp, Mus musculus
  siRNA target sequence for Echdc1 (NM_025855.2,937-955).
ggaggcgttacagaatgaa

SEQ ID NO: 621988 - DNA, 19 bp, Mus musculus
  siRNA target sequence for Echdc3 (NM_024208.3,305-323).
cctgaaagtcattataatt

SEQ ID NO: 621989 - DNA, 19 bp, Mus musculus
  siRNA target sequence for Echdc3 (NM_024208.3,306-324).
ctgaaagtcattataattt

SEQ ID NO: 621990 - DNA, 19 bp, Mus musculus
  siRNA target sequence for Echdc3 (NM_024208.3,330-348).
gagggccctgtgttttcat

SEQ ID NO: 621991 - DNA, 19 bp, Mus musculus
  siRNA target sequence for Echdc3 (NM_024208.3,349-367).
ctggacatgatttgaaaga

SEQ ID NO: 621992 - DNA, 19 bp, Mus musculus
  siRNA target sequence for Echdc3 (NM_024208.3,504-522).
ctcgtggccagctgtgata

SEQ ID NO: 621993 - DNA, 19 bp, Mus musculus
  siRNA target sequence for Echdc3 (NM_024208.3,506-524).
cgtggccagctgtgatatt

SEQ ID NO: 621994 - DNA, 19 bp, Mus musculus
  siRNA target sequence for Echdc3 (NM_024208.3,509-527).
ggccagctgtgatattgct

SEQ ID NO: 621995 - DNA, 19 bp, Mus musculus
  siRNA target sequence for Echdc3 (NM_024208.3,725-743).
ggcagagaccatgagaata

SEQ ID NO: 621996 - DNA, 19 bp, Mus musculus
  siRNA target sequence for Echdc3 (NM_024208.3,786-804).
ggcaaggccaccttttaca

SEQ ID NO: 621997 - DNA, 19 bp, Mus musculus
  siRNA target sequence for Echdc3 (NM_024208.3,810-828).
ctgccacaagaccttagaa

SEQ ID NO: 621998 - DNA, 19 bp, Mus musculus
  siRNA target sequence for Echs1 (NM_053119.1,111-129).
cgcctcgggtgctaacttt

SEQ ID NO: 621999 - DNA, 19 bp, Mus musculus
  siRNA target sequence for Echs1 (NM_053119.1,119-137).
gtgctaactttcagtacat

SEQ ID NO: 622000 - DNA, 19 bp, Mus musculus
  siRNA target sequence for Echs1 (NM_053119.1,122-140).
ctaactttcagtacatcat

SEQ ID NO: 622001 - DNA, 19 bp, Mus musculus
  siRNA target sequence for Echs1 (NM_053119.1,347-365).
gaacatttcaggactgtta

SEQ ID NO: 622002 - DNA, 19 bp, Mus musculus
  siRNA target sequence for Echs1 (NM_053119.1,396-414).
catcacccgggtcaagaaa

SEQ ID NO: 622003 - DNA, 19 bp, Mus musculus
  siRNA target sequence for Echs1 (NM_053119.1,417-435).
ggtcatcgcagctgtcaat

SEQ ID NO: 622004 - DNA, 19 bp, Mus musculus
  siRNA target sequence for Echs1 (NM_053119.1,423-441).
cgcagctgtcaatggttat

SEQ ID NO: 622005 - DNA, 19 bp, Mus musculus
  siRNA target sequence for Echs1 (NM_053119.1,463-481).
cttgccatgatgtgtgata

SEQ ID NO: 622006 - DNA, 19 bp, Mus musculus
  siRNA target sequence for Echs1 (NM_053119.1,467-485).
ccatgatgtgtgatatcat

SEQ ID NO: 622007 - DNA, 19 bp, Mus musculus
  siRNA target sequence for Echs1 (NM_053119.1,649-667).
ggtcttgtaagcaagattt

SEQ ID NO: 622008 - DNA, 19 bp, Mus musculus
  siRNA target sequence for Echs1 (NM_053119.1,663-681).
gatttttcctgttgaaaaa

SEQ ID NO: 622009 - DNA, 19 bp, Mus musculus
  siRNA target sequence for Echs1 (NM_053119.1,720-738).
cagcaattctaaaatcgta

SEQ ID NO: 622010 - DNA, 19 bp, Mus musculus
  siRNA target sequence for Echs1 (NM_053119.1,780-798).
gacgttaacagaaggaaat

SEQ ID NO: 622011 - DNA, 19 bp, Mus musculus
  siRNA target sequence for Echs1 (NM_053119.1,804-822).
ggagaagaggcttttctat

SEQ ID NO: 622012 - DNA, 19 bp, Mus musculus
  siRNA target sequence for Fa2h (NM_178086.2,290-308).
ggctggagcagtactatgt

SEQ ID NO: 622013 - DNA, 19 bp, Mus musculus
  siRNA target sequence for Fa2h (NM_178086.2,467-485).
gccacttgggggagaagta

SEQ ID NO: 622014 - DNA, 19 bp, Mus musculus
  siRNA target sequence for Fa2h (NM_178086.2,468-486).
ccacttgggggagaagtat

SEQ ID NO: 622015 - DNA, 19 bp, Mus musculus
  siRNA target sequence for Fa2h (NM_178086.2,471-489).
cttgggggagaagtatgat

SEQ ID NO: 622016 - DNA, 19 bp, Mus musculus
  siRNA target sequence for Fa2h (NM_178086.2,667-685).
ctcacaagagagtattcaa

SEQ ID NO: 622017 - DNA, 19 bp, Mus musculus
  siRNA target sequence for Fa2h (NM_178086.2,671-689).
caagagagtattcaatgat

SEQ ID NO: 622018 - DNA, 19 bp, Mus musculus
  siRNA target sequence for Fa2h (NM_178086.2,674-692).
gagagtattcaatgatgat

SEQ ID NO: 622019 - DNA, 19 bp, Mus musculus
  siRNA target sequence for Fa2h (NM_178086.2,693-711).
gccggagtcggtgttcata

SEQ ID NO: 622020 - DNA, 19 bp, Mus musculus
  siRNA target sequence for Fa2h (NM_178086.2,740-758).
ggacctttgtggaatacgt

SEQ ID NO: 622021 - DNA, 19 bp, Mus musculus
  siRNA target sequence for Fa2h (NM_178086.2,763-781).
caccgcttcctgttccata

SEQ ID NO: 622022 - DNA, 19 bp, Mus musculus
  siRNA target sequence for Fa2h (NM_178086.2,766-784).
cgcttcctgttccatatga

SEQ ID NO: 622023 - DNA, 19 bp, Mus musculus
  siRNA target sequence for Fa2h (NM_178086.2,843-861).
ccacaaggcaccgtttgat

SEQ ID NO: 622024 - DNA, 19 bp, Mus musculus
  siRNA target sequence for Fa2h (NM_178086.2,982-1000).
ggctatgtcctctatgaca

SEQ ID NO: 622025 - DNA, 19 bp, Mus musculus
  siRNA target sequence for Fa2h (NM_178086.2,991-1009).
ctctatgacatgacacatt

SEQ ID NO: 622026 - DNA, 19 bp, Mus musculus
  siRNA target sequence for Fa2h (NM_178086.2,1039-1057).
ggctcctacctgtacaaca

SEQ ID NO: 622027 - DNA, 19 bp, Mus musculus
  siRNA target sequence for Fa2h (NM_178086.2,1040-1058).
gctcctacctgtacaacat

SEQ ID NO: 622028 - DNA, 19 bp, Mus musculus
  siRNA target sequence for Fa2h (NM_178086.2,1081-1099).
cacttcgaataccagaaat

SEQ ID NO: 622029 - DNA, 19 bp, Mus musculus
  siRNA target sequence for Fntb (NM_145927.1,52-70).
cgagttccttcacctatta

SEQ ID NO: 622030 - DNA, 19 bp, Mus musculus
  siRNA target sequence for Fntb (NM_145927.1,53-71).
gagttccttcacctattat

SEQ ID NO: 622031 - DNA, 19 bp, Mus musculus
  siRNA target sequence for Fntb (NM_145927.1,98-116).
gtcagaaccgctgtatagt

SEQ ID NO: 622032 - DNA, 19 bp, Mus musculus
  siRNA target sequence for Fntb (NM_145927.1,100-118).
cagaaccgctgtatagtct

SEQ ID NO: 622033 - DNA, 19 bp, Mus musculus
  siRNA target sequence for Fntb (NM_145927.1,215-233).
cttcagttcttacaagttt

SEQ ID NO: 622034 - DNA, 19 bp, Mus musculus
  siRNA target sequence for Fntb (NM_145927.1,220-238).
gttcttacaagtttaacca

SEQ ID NO: 622035 - DNA, 19 bp, Mus musculus
  siRNA target sequence for Fntb (NM_145927.1,240-258).
cttgtaccaaggctcattt

SEQ ID NO: 622036 - DNA, 19 bp, Mus musculus
  siRNA target sequence for Fntb (NM_145927.1,488-506).
cctcgcacccacttatgca

SEQ ID NO: 622037 - DNA, 19 bp, Mus musculus
  siRNA target sequence for Fntb (NM_145927.1,540-558).
gaagcctacaacgtcatta

SEQ ID NO: 622038 - DNA, 19 bp, Mus musculus
  siRNA target sequence for Fntb (NM_145927.1,543-561).
gcctacaacgtcattaaca

SEQ ID NO: 622039 - DNA, 19 bp, Mus musculus
  siRNA target sequence for Fntb (NM_145927.1,562-580).
gggagaaactccttcagta

SEQ ID NO: 622040 - DNA, 19 bp, Mus musculus
  siRNA target sequence for Fntb (NM_145927.1,563-581).
ggagaaactccttcagtat

SEQ ID NO: 622041 - DNA, 19 bp, Mus musculus
  siRNA target sequence for Fntb (NM_145927.1,570-588).
ctccttcagtatttgtact

SEQ ID NO: 622042 - DNA, 19 bp, Mus musculus
  siRNA target sequence for Fntb (NM_145927.1,596-614).
gcaacccgacggctctttt

SEQ ID NO: 622043 - DNA, 19 bp, Mus musculus
  siRNA target sequence for Fntb (NM_145927.1,600-618).
cccgacggctcttttctca

SEQ ID NO: 622044 - DNA, 19 bp, Mus musculus
  siRNA target sequence for Fntb (NM_145927.1,601-619).
ccgacggctcttttctcat

SEQ ID NO: 622045 - DNA, 19 bp, Mus musculus
  siRNA target sequence for Fntb (NM_145927.1,1105-1123).
gcaagtcacgtgacttcta

SEQ ID NO: 622046 - DNA, 19 bp, Mus musculus
  siRNA target sequence for Fntb (NM_145927.1,1177-1195).
gagccatgttgcacgatat

SEQ ID NO: 622047 - DNA, 19 bp, Mus musculus
  siRNA target sequence for Fntb (NM_145927.1,1180-1198).
ccatgttgcacgatatggt

SEQ ID NO: 622048 - DNA, 19 bp, Mus musculus
  siRNA target sequence for Fntb (NM_145927.1,1202-1220).
gggtgtgcccgaaaacgtt

SEQ ID NO: 622049 - DNA, 19 bp, Mus musculus
  siRNA target sequence for Fntb (NM_145927.1,1231-1249).
cacaccctgtgtacaacat

SEQ ID NO: 622050 - DNA, 19 bp, Mus musculus
  siRNA target sequence for Gpr56 (NM_018882.2,197-215).
gcaccctccactatgatca

SEQ ID NO: 622051 - DNA, 19 bp, Mus musculus
  siRNA target sequence for Gpr56 (NM_018882.2,198-216).
caccctccactatgatcaa

SEQ ID NO: 622052 - DNA, 19 bp, Mus musculus
  siRNA target sequence for Gpr56 (NM_018882.2,201-219).
cctccactatgatcaatct

SEQ ID NO: 622053 - DNA, 19 bp, Mus musculus
  siRNA target sequence for Gpr56 (NM_018882.2,202-220).
ctccactatgatcaatctt

SEQ ID NO: 622054 - DNA, 19 bp, Mus musculus
  siRNA target sequence for Gpr56 (NM_018882.2,223-241).
gagcctcacatctttgtgt

SEQ ID NO: 622055 - DNA, 19 bp, Mus musculus
  siRNA target sequence for Gpr56 (NM_018882.2,252-270).
ggagaccctcacaattcgt

SEQ ID NO: 622056 - DNA, 19 bp, Mus musculus
  siRNA target sequence for Gpr56 (NM_018882.2,279-297).
cctggcagccccagatatt

SEQ ID NO: 622057 - DNA, 19 bp, Mus musculus
  siRNA target sequence for Gpr56 (NM_018882.2,316-334).
cctagagggctctatcact

SEQ ID NO: 622058 - DNA, 19 bp, Mus musculus
  siRNA target sequence for Gpr56 (NM_018882.2,317-335).
ctagagggctctatcactt

SEQ ID NO: 622059 - DNA, 19 bp, Mus musculus
  siRNA target sequence for Gpr56 (NM_018882.2,523-541).
ggggctccgagcttcatct

SEQ ID NO: 622060 - DNA, 19 bp, Mus musculus
  siRNA target sequence for Gpr56 (NM_018882.2,524-542).
gggctccgagcttcatctt

SEQ ID NO: 622061 - DNA, 19 bp, Mus musculus
  siRNA target sequence for Gpr56 (NM_018882.2,664-682).
cccaccgcagcgttcatca

SEQ ID NO: 622062 - DNA, 19 bp, Mus musculus
  siRNA target sequence for Gpr56 (NM_018882.2,754-772).
gaggaccgggtcaatgcta

SEQ ID NO: 622063 - DNA, 19 bp, Mus musculus
  siRNA target sequence for Gpr56 (NM_018882.2,800-818).
gtctagaggatctgcatat

SEQ ID NO: 622064 - DNA, 19 bp, Mus musculus
  siRNA target sequence for Gpr56 (NM_018882.2,1015-1033).
gtgcagaacaccaaagtca

SEQ ID NO: 622065 - DNA, 19 bp, Mus musculus
  siRNA target sequence for Gpr56 (NM_018882.2,1075-1093).
cctcagccaaaaaatgtga

SEQ ID NO: 622066 - DNA, 19 bp, Mus musculus
  siRNA target sequence for Gpr56 (NM_018882.2,1103-1121).
gcgtgttctgggttgaaga

SEQ ID NO: 622067 - DNA, 19 bp, Mus musculus
  siRNA target sequence for Gpr56 (NM_018882.2,1364-1382).
gtgactacaccatcaaagt

SEQ ID NO: 622068 - DNA, 19 bp, Mus musculus
  siRNA target sequence for Gpr56 (NM_018882.2,1531-1549).
ctcgagggctacaatctct

SEQ ID NO: 622069 - DNA, 19 bp, Mus musculus
  siRNA target sequence for Gpr56 (NM_018882.2,1563-1581).
ggaggtcttcggtacctat

SEQ ID NO: 622070 - DNA, 19 bp, Mus musculus
  siRNA target sequence for Gpr56 (NM_018882.2,1611-1629).
cgtgggctggggttttcct

SEQ ID NO: 622071 - DNA, 19 bp, Mus musculus
  siRNA target sequence for Gpr56 (NM_018882.2,1650-1668).
ggcgttggtggatgtgaat

SEQ ID NO: 622072 - DNA, 19 bp, Mus musculus
  siRNA target sequence for Gpr56 (NM_018882.2,1651-1669).
gcgttggtggatgtgaata

SEQ ID NO: 622073 - DNA, 19 bp, Mus musculus
  siRNA target sequence for Gpr56 (NM_018882.2,1652-1670).
cgttggtggatgtgaataa

SEQ ID NO: 622074 - DNA, 19 bp, Mus musculus
  siRNA target sequence for Gpr56 (NM_018882.2,1714-1732).
gtcacctacccctctatgt

SEQ ID NO: 622075 - DNA, 19 bp, Mus musculus
  siRNA target sequence for Gpr56 (NM_018882.2,1946-1964).
gcaccttccagcttgtcat

SEQ ID NO: 622076 - DNA, 19 bp, Mus musculus
  siRNA target sequence for Gria3 (NM_016886.1,98-116).
ggcttttgggtcattctca

SEQ ID NO: 622077 - DNA, 19 bp, Mus musculus
  siRNA target sequence for Gria3 (NM_016886.1,140-158).
gcataggtggacttttcat

SEQ ID NO: 622078 - DNA, 19 bp, Mus musculus
  siRNA target sequence for Gria3 (NM_016886.1,145-163).
ggtggacttttcatgagaa

SEQ ID NO: 622079 - DNA, 19 bp, Mus musculus
  siRNA target sequence for Gria3 (NM_016886.1,190-208).
cgctttgctgtgcagttat

SEQ ID NO: 622080 - DNA, 19 bp, Mus musculus
  siRNA target sequence for Gria3 (NM_016886.1,265-283).
cacttggattcctccaata

SEQ ID NO: 622081 - DNA, 19 bp, Mus musculus
  siRNA target sequence for Gria3 (NM_016886.1,352-370).
gaccagatgtcaatgaaca

SEQ ID NO: 622082 - DNA, 19 bp, Mus musculus
  siRNA target sequence for Gria3 (NM_016886.1,433-451).
gccgatgtgcagtttgtca

SEQ ID NO: 622083 - DNA, 19 bp, Mus musculus
  siRNA target sequence for Gria3 (NM_016886.1,434-452).
ccgatgtgcagtttgtcat

SEQ ID NO: 622084 - DNA, 19 bp, Mus musculus
  siRNA target sequence for Gria3 (NM_016886.1,490-508).
cttctgggttactacaagt

SEQ ID NO: 622085 - DNA, 19 bp, Mus musculus
  siRNA target sequence for Gria3 (NM_016886.1,536-554).
cagaacgagggttttccat

SEQ ID NO: 622086 - DNA, 19 bp, Mus musculus
  siRNA target sequence for Gria3 (NM_016886.1,551-569).
ccatcctgcaagcaattat

SEQ ID NO: 622087 - DNA, 19 bp, Mus musculus
  siRNA target sequence for Gria3 (NM_016886.1,636-654).
ggaattcagacgcatcatt

SEQ ID NO: 622088 - DNA, 19 bp, Mus musculus
  siRNA target sequence for Gria3 (NM_016886.1,644-662).
gacgcatcattgaagaaat

SEQ ID NO: 622089 - DNA, 19 bp, Mus musculus
  siRNA target sequence for Gria3 (NM_016886.1,700-718).
gaagtcgaaaggattaaca

SEQ ID NO: 622090 - DNA, 19 bp, Mus musculus
  siRNA target sequence for Gria3 (NM_016886.1,703-721).
gtcgaaaggattaacacaa

SEQ ID NO: 622091 - DNA, 19 bp, Mus musculus
  siRNA target sequence for Gria3 (NM_016886.1,705-723).
cgaaaggattaacacaatt

SEQ ID NO: 622092 - DNA, 19 bp, Mus musculus
  siRNA target sequence for Gria3 (NM_016886.1,755-773).
caagaggttatcactacat

SEQ ID NO: 622093 - DNA, 19 bp, Mus musculus
  siRNA target sequence for Gria3 (NM_016886.1,775-793).
cttgctaacctgggtttta

SEQ ID NO: 622094 - DNA, 19 bp, Mus musculus
  siRNA target sequence for Gria3 (NM_016886.1,933-951).
gaatgcaccactaaagtat

SEQ ID NO: 622095 - DNA, 19 bp, Mus musculus
  siRNA target sequence for Gria3 (NM_016886.1,937-955).
gcaccactaaagtatacat

SEQ ID NO: 622096 - DNA, 19 bp, Mus musculus
  siRNA target sequence for Gria3 (NM_016886.1,1080-1098).
gagtcaaggaattgatatt

SEQ ID NO: 622097 - DNA, 19 bp, Mus musculus
  siRNA target sequence for Gria3 (NM_016886.1,1082-1100).
gtcaaggaattgatattga

SEQ ID NO: 622098 - DNA, 19 bp, Mus musculus
  siRNA target sequence for Gria3 (NM_016886.1,1119-1137).
gcaagtacaaggaatgact

SEQ ID NO: 622099 - DNA, 19 bp, Mus musculus
  siRNA target sequence for Gria3 (NM_016886.1,1143-1161).
catccaatttgacacttat

SEQ ID NO: 622100 - DNA, 19 bp, Mus musculus
  siRNA target sequence for Gria3 (NM_016886.1,1146-1164).
ccaatttgacacttatgga

SEQ ID NO: 622101 - DNA, 19 bp, Mus musculus
  siRNA target sequence for Gria3 (NM_016886.1,1165-1183).
cgtaggacaaattatacca

SEQ ID NO: 622102 - DNA, 19 bp, Mus musculus
  siRNA target sequence for Gria3 (NM_016886.1,1166-1184).
gtaggacaaattataccat

SEQ ID NO: 622103 - DNA, 19 bp, Mus musculus
  siRNA target sequence for Gria3 (NM_016886.1,1170-1188).
gacaaattataccattgat

SEQ ID NO: 622104 - DNA, 19 bp, Mus musculus
  siRNA target sequence for Gria3 (NM_016886.1,1222-1240).
gctggttactggaatgagt

SEQ ID NO: 622105 - DNA, 19 bp, Mus musculus
  siRNA target sequence for Gria3 (NM_016886.1,1232-1250).
ggaatgagtatgaaaggtt

SEQ ID NO: 622106 - DNA, 19 bp, Mus musculus
  siRNA target sequence for Gria3 (NM_016886.1,1255-1273).
cccttctcagatcaacaaa

SEQ ID NO: 622107 - DNA, 19 bp, Mus musculus
  siRNA target sequence for Gria3 (NM_016886.1,1256-1274).
ccttctcagatcaacaaat

SEQ ID NO: 622108 - DNA, 19 bp, Mus musculus
  siRNA target sequence for Gria3 (NM_016886.1,1330-1348).
gaatcaccatatgtaatgt

SEQ ID NO: 622109 - DNA, 19 bp, Mus musculus
  siRNA target sequence for Gria3 (NM_016886.1,1336-1354).
ccatatgtaatgtataaaa

SEQ ID NO: 622110 - DNA, 19 bp, Mus musculus
  siRNA target sequence for Gria3 (NM_016886.1,1404-1422).
cgatttagcctatgaaata

SEQ ID NO: 622111 - DNA, 19 bp, Mus musculus
  siRNA target sequence for Gria3 (NM_016886.1,1425-1443).
caaacacgtaaggatcaaa

SEQ ID NO: 622112 - DNA, 19 bp, Mus musculus
  siRNA target sequence for Gria3 (NM_016886.1,1429-1447).
cacgtaaggatcaaataca

SEQ ID NO: 622113 - DNA, 19 bp, Mus musculus
  siRNA target sequence for Gria3 (NM_016886.1,1484-1502).
gggatccagagactaaaat

SEQ ID NO: 622114 - DNA, 19 bp, Mus musculus
  siRNA target sequence for Gria3 (NM_016886.1,1486-1504).
gatccagagactaaaatat

SEQ ID NO: 622115 - DNA, 19 bp, Mus musculus
  siRNA target sequence for Gria3 (NM_016886.1,1530-1548).
ctatggaagagctgatata

SEQ ID NO: 622116 - DNA, 19 bp, Mus musculus
  siRNA target sequence for Gria3 (NM_016886.1,1550-1568).
ctgttgctccactcactat

SEQ ID NO: 622117 - DNA, 19 bp, Mus musculus
  siRNA target sequence for Gria3 (NM_016886.1,1552-1570).
gttgctccactcactataa

SEQ ID NO: 622118 - DNA, 19 bp, Mus musculus
  siRNA target sequence for Gria3 (NM_016886.1,1555-1573).
gctccactcactataacat

SEQ ID NO: 622119 - DNA, 19 bp, Mus musculus
  siRNA target sequence for Gria3 (NM_016886.1,1575-1593).
ggtccgtgaagaagtcata

SEQ ID NO: 622120 - DNA, 19 bp, Mus musculus
  siRNA target sequence for Gria3 (NM_016886.1,1578-1596).
ccgtgaagaagtcatagat

SEQ ID NO: 622121 - DNA, 19 bp, Mus musculus
  siRNA target sequence for Gria3 (NM_016886.1,1579-1597).
cgtgaagaagtcatagatt

SEQ ID NO: 622122 - DNA, 19 bp, Mus musculus
  siRNA target sequence for Gria3 (NM_016886.1,1620-1638).
ggggatctccatcatgata

SEQ ID NO: 622123 - DNA, 19 bp, Mus musculus
  siRNA target sequence for Gria3 (NM_016886.1,1621-1639).
gggatctccatcatgataa

SEQ ID NO: 622124 - DNA, 19 bp, Mus musculus
  siRNA target sequence for Gria3 (NM_016886.1,1622-1640).
ggatctccatcatgataaa

SEQ ID NO: 622125 - DNA, 19 bp, Mus musculus
  siRNA target sequence for Gria3 (NM_016886.1,1677-1695).
cctggatcctttagcttat

SEQ ID NO: 622126 - DNA, 19 bp, Mus musculus
  siRNA target sequence for Gria3 (NM_016886.1,1709-1727).
gcattgtcttcgcttacat

SEQ ID NO: 622127 - DNA, 19 bp, Mus musculus
  siRNA target sequence for Gria3 (NM_016886.1,1710-1728).
cattgtcttcgcttacatt

SEQ ID NO: 622128 - DNA, 19 bp, Mus musculus
  siRNA target sequence for Gria3 (NM_016886.1,1825-1843).
cctgatcctcccaatgaat

SEQ ID NO: 622129 - DNA, 19 bp, Mus musculus
  siRNA target sequence for Gria3 (NM_016886.1,1826-1844).
ctgatcctcccaatgaatt

SEQ ID NO: 622130 - DNA, 19 bp, Mus musculus
  siRNA target sequence for Gria3 (NM_016886.1,1834-1852).
cccaatgaatttggaatat

SEQ ID NO: 622131 - DNA, 19 bp, Mus musculus
  siRNA target sequence for Gria3 (NM_016886.1,1846-1864).
ggaatatttaacagtcttt

SEQ ID NO: 622132 - DNA, 19 bp, Mus musculus
  siRNA target sequence for Gria3 (NM_016886.1,1950-1968).
gttcttcaccctgatcata

SEQ ID NO: 622133 - DNA, 19 bp, Mus musculus
  siRNA target sequence for Gria3 (NM_016886.1,2028-2046).
catagagagcgctgaagat

SEQ ID NO: 622134 - DNA, 19 bp, Mus musculus
  siRNA target sequence for Gria3 (NM_016886.1,2080-2098).
ctggactctggttcaacaa

SEQ ID NO: 622135 - DNA, 19 bp, Mus musculus
  siRNA target sequence for Gria3 (NM_016886.1,2283-2301).
gtgtgatacgatgaaagtt

SEQ ID NO: 622136 - DNA, 19 bp, Mus musculus
  siRNA target sequence for Gria3 (NM_016886.1,2340-2358).
ccctaaaggctcagcatta

SEQ ID NO: 622137 - DNA, 19 bp, Mus musculus
  siRNA target sequence for Gria3 (NM_016886.1,2391-2409).
cagtgaacaaggcatctta

SEQ ID NO: 622138 - DNA, 19 bp, Mus musculus
  siRNA target sequence for Gria3 (NM_016886.1,2615-2633).
caaagaacacccaaaactt

SEQ ID NO: 622139 - DNA, 19 bp, Mus musculus
  siRNA target sequence for Gria3 (NM_016886.1,2648-2666).
ccaccaacactcagaatta

SEQ ID NO: 622140 - DNA, 19 bp, Mus musculus
  siRNA target sequence for Gria3 (NM_016886.1,2657-2675).
ctcagaattacgctacata

SEQ ID NO: 622141 - DNA, 19 bp, Mus musculus
  siRNA target sequence for Gria3 (NM_016886.1,2659-2677).
cagaattacgctacataca

SEQ ID NO: 622142 - DNA, 19 bp, Mus musculus
  siRNA target sequence for Gria3 (NM_016886.1,2661-2679).
gaattacgctacatacaga

SEQ ID NO: 622143 - DNA, 19 bp, Mus musculus
  siRNA target sequence for Gria3 (NM_016886.1,2691-2709).
cgtgtatggaacagaaagt

SEQ ID NO: 622144 - DNA, 19 bp, Mus musculus
  siRNA target sequence for Hmgcll1 (NM_173731.1,121-139).
cgaagcactgcctcaacta

SEQ ID NO: 622145 - DNA, 19 bp, Mus musculus
  siRNA target sequence for Hmgcll1 (NM_173731.1,228-246).
ctccctgaatatgtgaaaa

SEQ ID NO: 622146 - DNA, 19 bp, Mus musculus
  siRNA target sequence for Hmgcll1 (NM_173731.1,278-296).
gaatgaaaaggttatagtt

SEQ ID NO: 622147 - DNA, 19 bp, Mus musculus
  siRNA target sequence for Hmgcll1 (NM_173731.1,315-333).
gaactcatcaatcaacttt

SEQ ID NO: 622148 - DNA, 19 bp, Mus musculus
  siRNA target sequence for Hmgcll1 (NM_173731.1,419-437).
gcgaggcattcgtcagtat

SEQ ID NO: 622149 - DNA, 19 bp, Mus musculus
  siRNA target sequence for Hmgcll1 (NM_173731.1,454-472).
ctgtccttacacctaatct

SEQ ID NO: 622150 - DNA, 19 bp, Mus musculus
  siRNA target sequence for Hmgcll1 (NM_173731.1,505-523).
ccacggagatagcagtttt

SEQ ID NO: 622151 - DNA, 19 bp, Mus musculus
  siRNA target sequence for Hmgcll1 (NM_173731.1,506-524).
cacggagatagcagttttt

SEQ ID NO: 622152 - DNA, 19 bp, Mus musculus
  siRNA target sequence for Hmgcll1 (NM_173731.1,528-546).
gctgcttcagaatctttta

SEQ ID NO: 622153 - DNA, 19 bp, Mus musculus
  siRNA target sequence for Hmgcll1 (NM_173731.1,531-549).
gcttcagaatcttttagca

SEQ ID NO: 622154 - DNA, 19 bp, Mus musculus
  siRNA target sequence for Hmgcll1 (NM_173731.1,537-555).
gaatcttttagcaagaaga

SEQ ID NO: 622155 - DNA, 19 bp, Mus musculus
  siRNA target sequence for Hmgcll1 (NM_173731.1,709-727).
caaagagattgtatggtat

SEQ ID NO: 622156 - DNA, 19 bp, Mus musculus
  siRNA target sequence for Hmgcll1 (NM_173731.1,724-742).
gtatgggctgctatgaaat

SEQ ID NO: 622157 - DNA, 19 bp, Mus musculus
  siRNA target sequence for Hmgcll1 (NM_173731.1,775-793).
caggcagcatgaagatgat

SEQ ID NO: 622158 - DNA, 19 bp, Mus musculus
  siRNA target sequence for Hmgcll1 (NM_173731.1,794-812).
gttggaaagtgtcatgaaa

SEQ ID NO: 622159 - DNA, 19 bp, Mus musculus
  siRNA target sequence for Hmgcll1 (NM_173731.1,858-876).
ggacaagccctcgcaaata

SEQ ID NO: 622160 - DNA, 19 bp, Mus musculus
  siRNA target sequence for Hmgcll1 (NM_173731.1,859-877).
gacaagccctcgcaaatat

SEQ ID NO: 622161 - DNA, 19 bp, Mus musculus
  siRNA target sequence for Hmgcll1 (NM_173731.1,864-882).
gccctcgcaaatatcctaa

SEQ ID NO: 622162 - DNA, 19 bp, Mus musculus
  siRNA target sequence for Hmgcll1 (NM_173731.1,933-951).
ggtggctgcccttatgcaa

SEQ ID NO: 622163 - DNA, 19 bp, Mus musculus
  siRNA target sequence for Hmgcll1 (NM_173731.1,974-992).
cactgaggatttgatatat

SEQ ID NO: 622164 - DNA, 19 bp, Mus musculus
  siRNA target sequence for Liph (NM_153404.1,101-119).
ctatgttttttcatcagtt

SEQ ID NO: 622165 - DNA, 19 bp, Mus musculus
  siRNA target sequence for Liph (NM_153404.1,283-301).
cttaaatgtgaccaagaaa

SEQ ID NO: 622166 - DNA, 19 bp, Mus musculus
  siRNA target sequence for Liph (NM_153404.1,336-354).
gctcccctccggtttggat

SEQ ID NO: 622167 - DNA, 19 bp, Mus musculus
  siRNA target sequence for Liph (NM_153404.1,337-355).
ctcccctccggtttggata

SEQ ID NO: 622168 - DNA, 19 bp, Mus musculus
  siRNA target sequence for Liph (NM_153404.1,370-388).
gagtttgatcagtgtacaa

SEQ ID NO: 622169 - DNA, 19 bp, Mus musculus
  siRNA target sequence for Liph (NM_153404.1,463-481).
cagacaagtagcttctatt

SEQ ID NO: 622170 - DNA, 19 bp, Mus musculus
  siRNA target sequence for Liph (NM_153404.1,538-556).
catgattggagtaagtcta

SEQ ID NO: 622171 - DNA, 19 bp, Mus musculus
  siRNA target sequence for Liph (NM_153404.1,562-580).
ccacatagctggatttgtt

SEQ ID NO: 622172 - DNA, 19 bp, Mus musculus
  siRNA target sequence for Liph (NM_153404.1,708-726).
ctgacactgacggtataaa

SEQ ID NO: 622173 - DNA, 19 bp, Mus musculus
  siRNA target sequence for Liph (NM_153404.1,710-728).
gacactgacggtataaagt

SEQ ID NO: 622174 - DNA, 19 bp, Mus musculus
  siRNA target sequence for Liph (NM_153404.1,714-732).
ctgacggtataaagtactt

SEQ ID NO: 622175 - DNA, 19 bp, Mus musculus
  siRNA target sequence for Liph (NM_153404.1,816-834).
cctatcgggattataggaa

SEQ ID NO: 622176 - DNA, 19 bp, Mus musculus
  siRNA target sequence for Liph (NM_153404.1,850-868).
ctgtggcgctggacaaatt

SEQ ID NO: 622177 - DNA, 19 bp, Mus musculus
  siRNA target sequence for Liph (NM_153404.1,973-991).
gccatactgcatgtatcat

SEQ ID NO: 622178 - DNA, 19 bp, Mus musculus
  siRNA target sequence for Liph (NM_153404.1,1023-1041).
gcgtaagaagagggtttat

SEQ ID NO: 622179 - DNA, 19 bp, Mus musculus
  siRNA target sequence for Liph (NM_153404.1,1024-1042).
cgtaagaagagggtttatt

SEQ ID NO: 622180 - DNA, 19 bp, Mus musculus
  siRNA target sequence for Liph (NM_153404.1,1029-1047).
gaagagggtttattacaat

SEQ ID NO: 622181 - DNA, 19 bp, Mus musculus
  siRNA target sequence for Liph (NM_153404.1,1032-1050).
gagggtttattacaatcaa

SEQ ID NO: 622182 - DNA, 19 bp, Mus musculus
  siRNA target sequence for Liph (NM_153404.1,1056-1074).
gaggcgaagatggcaatat

SEQ ID NO: 622183 - DNA, 19 bp, Mus musculus
  siRNA target sequence for Liph (NM_153404.1,1060-1078).
cgaagatggcaatatcaca

SEQ ID NO: 622184 - DNA, 19 bp, Mus musculus
  siRNA target sequence for Liph (NM_153404.1,1131-1149).
gtctcctcgcaagatttaa

SEQ ID NO: 622185 - DNA, 19 bp, Mus musculus
  siRNA target sequence for Liph (NM_153404.1,1270-1288).
gcctcacttgtgtcgatat

SEQ ID NO: 622186 - DNA, 19 bp, Mus musculus
  siRNA target sequence for Liph (NM_153404.1,1284-1302).
gatatgatctcgtccttat

SEQ ID NO: 622187 - DNA, 19 bp, Mus musculus
  siRNA target sequence for Lypla2 (NM_011942.1,248-266).
ggcttcctcatgtcaagta

SEQ ID NO: 622188 - DNA, 19 bp, Mus musculus
  siRNA target sequence for Lypla2 (NM_011942.1,293-311).
ctgtgacactcaacatgaa

SEQ ID NO: 622189 - DNA, 19 bp, Mus musculus
  siRNA target sequence for Lypla2 (NM_011942.1,699-717).
cagggtccagtttaagaca

SEQ ID NO: 622190 - DNA, 19 bp, Mus musculus
  siRNA target sequence for Lypla2 (NM_011942.1,701-719).
gggtccagtttaagacata

SEQ ID NO: 622191 - DNA, 19 bp, Mus musculus
  siRNA target sequence for Mcoln1 (NM_053177.1,280-298).
ctgcaggtggtcaagatct

SEQ ID NO: 622192 - DNA, 19 bp, Mus musculus
  siRNA target sequence for Mcoln1 (NM_053177.1,308-326).
ctgtgcagctcattctctt

SEQ ID NO: 622193 - DNA, 19 bp, Mus musculus
  siRNA target sequence for Mcoln1 (NM_053177.1,453-471).
ctaccaagccatcttctat

SEQ ID NO: 622194 - DNA, 19 bp, Mus musculus
  siRNA target sequence for Mcoln1 (NM_053177.1,477-495).
ggaccagtacctgatacta

SEQ ID NO: 622195 - DNA, 19 bp, Mus musculus
  siRNA target sequence for Mcoln1 (NM_053177.1,486-504).
cctgatactacctgagata

SEQ ID NO: 622196 - DNA, 19 bp, Mus musculus
  siRNA target sequence for Mcoln1 (NM_053177.1,487-505).
ctgatactacctgagatat

SEQ ID NO: 622197 - DNA, 19 bp, Mus musculus
  siRNA target sequence for Mcoln1 (NM_053177.1,541-559).
gggccttgggccaatggat

SEQ ID NO: 622198 - DNA, 19 bp, Mus musculus
  siRNA target sequence for Mcoln1 (NM_053177.1,638-656).
gggtagtcactgactgtat

SEQ ID NO: 622199 - DNA, 19 bp, Mus musculus
  siRNA target sequence for Mcoln1 (NM_053177.1,780-798).
cttccagctgaagacaatt

SEQ ID NO: 622200 - DNA, 19 bp, Mus musculus
  siRNA target sequence for Mcoln1 (NM_053177.1,819-837).
caatgagatccctgattgt

SEQ ID NO: 622201 - DNA, 19 bp, Mus musculus
  siRNA target sequence for Mcoln1 (NM_053177.1,832-850).
gattgttacaccttcagta

SEQ ID NO: 622202 - DNA, 19 bp, Mus musculus
  siRNA target sequence for Mcoln1 (NM_053177.1,852-870).
cctgatcacatttgacaat

SEQ ID NO: 622203 - DNA, 19 bp, Mus musculus
  siRNA target sequence for Mcoln1 (NM_053177.1,853-871).
ctgatcacatttgacaata

SEQ ID NO: 622204 - DNA, 19 bp, Mus musculus
  siRNA target sequence for Mcoln1 (NM_053177.1,1057-1075).
cagaacgagtttgttgtat

SEQ ID NO: 622205 - DNA, 19 bp, Mus musculus
  siRNA target sequence for Mcoln1 (NM_053177.1,1178-1196).
cggggactgtcatgaagat

SEQ ID NO: 622206 - DNA, 19 bp, Mus musculus
  siRNA target sequence for Mcoln1 (NM_053177.1,1281-1299).
cattcgctacctgacattt

SEQ ID NO: 622207 - DNA, 19 bp, Mus musculus
  siRNA target sequence for Mcoln1 (NM_053177.1,1295-1313).
catttttccacaagtacaa

SEQ ID NO: 622208 - DNA, 19 bp, Mus musculus
  siRNA target sequence for Mcoln1 (NM_053177.1,1421-1439).
ggccctaccatgtgaagtt

SEQ ID NO: 622209 - DNA, 19 bp, Mus musculus
  siRNA target sequence for Mcoln1 (NM_053177.1,1441-1459).
cgctcgctgtccatggttt

SEQ ID NO: 622210 - DNA, 19 bp, Mus musculus
  siRNA target sequence for Mcoln1 (NM_053177.1,1466-1484).
gtctgttctcactcatcaa

SEQ ID NO: 622211 - DNA, 19 bp, Mus musculus
  siRNA target sequence for Mcoln1 (NM_053177.1,1486-1504).
ggagacgacatgtttgtga

SEQ ID NO: 622212 - DNA, 19 bp, Mus musculus
  siRNA target sequence for MGC37245 (NM_146197.1,219-237).
gttcaacttcgctagtgat

SEQ ID NO: 622213 - DNA, 19 bp, Mus musculus
  siRNA target sequence for MGC37245 (NM_146197.1,225-243).
cttcgctagtgatgtgata

SEQ ID NO: 622214 - DNA, 19 bp, Mus musculus
  siRNA target sequence for MGC37245 (NM_146197.1,230-248).
ctagtgatgtgatagatca

SEQ ID NO: 622215 - DNA, 19 bp, Mus musculus
  siRNA target sequence for MGC37245 (NM_146197.1,348-366).
gagtgaagccagtaaacaa

SEQ ID NO: 622216 - DNA, 19 bp, Mus musculus
  siRNA target sequence for MGC37245 (NM_146197.1,472-490).
cggacaggccttgttttca

SEQ ID NO: 622217 - DNA, 19 bp, Mus musculus
  siRNA target sequence for MGC37245 (NM_146197.1,730-748).
gaatcagcagccatctact

SEQ ID NO: 622218 - DNA, 19 bp, Mus musculus
  siRNA target sequence for MGC37245 (NM_146197.1,736-754).
gcagccatctacttcacta

SEQ ID NO: 622219 - DNA, 19 bp, Mus musculus
  siRNA target sequence for MGC37245 (NM_146197.1,843-861).
cctgagtacttctgacata

SEQ ID NO: 622220 - DNA, 19 bp, Mus musculus
  siRNA target sequence for MGC37245 (NM_146197.1,844-862).
ctgagtacttctgacataa

SEQ ID NO: 622221 - DNA, 19 bp, Mus musculus
  siRNA target sequence for MGC37245 (NM_146197.1,846-864).
gagtacttctgacataata

SEQ ID NO: 622222 - DNA, 19 bp, Mus musculus
  siRNA target sequence for MGC37245 (NM_146197.1,877-895).
gacacggcttggataatga

SEQ ID NO: 622223 - DNA, 19 bp, Mus musculus
  siRNA target sequence for MGC37245 (NM_146197.1,924-942).
ggtattgggagcatgcata

SEQ ID NO: 622224 - DNA, 19 bp, Mus musculus
  siRNA target sequence for MGC37245 (NM_146197.1,925-943).
gtattgggagcatgcatat

SEQ ID NO: 622225 - DNA, 19 bp, Mus musculus
  siRNA target sequence for MGC37245 (NM_146197.1,948-966).
ccatcttttgccaaagttt

SEQ ID NO: 622226 - DNA, 19 bp, Mus musculus
  siRNA target sequence for MGC37245 (NM_146197.1,958-976).
ccaaagtttgattcacaaa

SEQ ID NO: 622227 - DNA, 19 bp, Mus musculus
  siRNA target sequence for MGC37245 (NM_146197.1,971-989).
cacaaactgttctaaaggt

SEQ ID NO: 622228 - DNA, 19 bp, Mus musculus
  siRNA target sequence for MGC37245 (NM_146197.1,1056-1074).
ggatctttccagttacaaa

SEQ ID NO: 622229 - DNA, 19 bp, Mus musculus
  siRNA target sequence for MGC37245 (NM_146197.1,1154-1172).
gactggaaatccgagaaat

SEQ ID NO: 622230 - DNA, 19 bp, Mus musculus
  siRNA target sequence for MGC37245 (NM_146197.1,1156-1174).
ctggaaatccgagaaatct

SEQ ID NO: 622231 - DNA, 19 bp, Mus musculus
  siRNA target sequence for MGC37245 (NM_146197.1,1471-1489).
gggcggtcagacgatatca

SEQ ID NO: 622232 - DNA, 19 bp, Mus musculus
  siRNA target sequence for MGC37245 (NM_146197.1,1472-1490).
ggcggtcagacgatatcat

SEQ ID NO: 622233 - DNA, 19 bp, Mus musculus
  siRNA target sequence for MGC37245 (NM_146197.1,1473-1491).
gcggtcagacgatatcatt

SEQ ID NO: 622234 - DNA, 19 bp, Mus musculus
  siRNA target sequence for MGC37245 (NM_146197.1,1474-1492).
cggtcagacgatatcatta

SEQ ID NO: 622235 - DNA, 19 bp, Mus musculus
  siRNA target sequence for MGC37245 (NM_146197.1,1475-1493).
ggtcagacgatatcattaa

SEQ ID NO: 622236 - DNA, 19 bp, Mus musculus
  siRNA target sequence for MGC37245 (NM_146197.1,1476-1494).
gtcagacgatatcattaat

SEQ ID NO: 622237 - DNA, 19 bp, Mus musculus
  siRNA target sequence for MGC37245 (NM_146197.1,1514-1532).
gaccttccgaggtggaaaa

SEQ ID NO: 622238 - DNA, 19 bp, Mus musculus
  siRNA target sequence for MGC56918 (NM_178414.2,264-282).
cattacccaagaactttaa

SEQ ID NO: 622239 - DNA, 19 bp, Mus musculus
  siRNA target sequence for MGC56918 (NM_178414.2,531-549).
gaacagggcttgtattcat

SEQ ID NO: 622240 - DNA, 19 bp, Mus musculus
  siRNA target sequence for MGC56918 (NM_178414.2,563-581).
caactgaccagaaaagaca

SEQ ID NO: 622241 - DNA, 19 bp, Mus musculus
  siRNA target sequence for MGC56918 (NM_178414.2,643-661).
cgcagtggactccattgta

SEQ ID NO: 622242 - DNA, 19 bp, Mus musculus
  siRNA target sequence for MGC56918 (NM_178414.2,712-730).
ggatggatggctcaacttt

SEQ ID NO: 622243 - DNA, 19 bp, Mus musculus
  siRNA target sequence for MGC56918 (NM_178414.2,777-795).
cgggaagtcaagaaccaat

SEQ ID NO: 622244 - DNA, 19 bp, Mus musculus
  siRNA target sequence for MGC56918 (NM_178414.2,788-806).
gaaccaatggccatttact

SEQ ID NO: 622245 - DNA, 19 bp, Mus musculus
  siRNA target sequence for MGC56918 (NM_178414.2,899-917).
gacttgacatcctcagata

SEQ ID NO: 622246 - DNA, 19 bp, Mus musculus
  siRNA target sequence for MGC56918 (NM_178414.2,956-974).
gccattggtagtgtgtttt

SEQ ID NO: 622247 - DNA, 19 bp, Mus musculus
  siRNA target sequence for MGC56918 (NM_178414.2,983-1001).
cttcgaggggcctgtgttt

SEQ ID NO: 622248 - DNA, 19 bp, Mus musculus
  siRNA target sequence for MGC56918 (NM_178414.2,987-1005).
gaggggcctgtgtttttgt

SEQ ID NO: 622249 - DNA, 19 bp, Mus musculus
  siRNA target sequence for MGC56918 (NM_178414.2,1016-1034).
gcccagttcgacactgata

SEQ ID NO: 622250 - DNA, 19 bp, Mus musculus
  siRNA target sequence for MGC56918 (NM_178414.2,1017-1035).
cccagttcgacactgatat

SEQ ID NO: 622251 - DNA, 19 bp, Mus musculus
  siRNA target sequence for MGC56918 (NM_178414.2,1098-1116).
ggatgctcgtacaaaagga

SEQ ID NO: 622252 - DNA, 19 bp, Mus musculus
  siRNA target sequence for MGC56918 (NM_178414.2,1106-1124).
gtacaaaaggaccttaaga

SEQ ID NO: 622253 - DNA, 19 bp, Mus musculus
  siRNA target sequence for MGC56918 (NM_178414.2,1114-1132).
ggaccttaagagatatcaa

SEQ ID NO: 622254 - DNA, 19 bp, Mus musculus
  siRNA target sequence for MGC56918 (NM_178414.2,1115-1133).
gaccttaagagatatcaat

SEQ ID NO: 622255 - DNA, 19 bp, Mus musculus
  siRNA target sequence for MGC56918 (NM_178414.2,1238-1256).
cagaccgaagtgggaataa

SEQ ID NO: 622256 - DNA, 19 bp, Mus musculus
  siRNA target sequence for MGC56918 (NM_178414.2,1240-1258).
gaccgaagtgggaataatt

SEQ ID NO: 622257 - DNA, 19 bp, Mus musculus
  siRNA target sequence for MGC56918 (NM_178414.2,1268-1286).
cgcaaaggagaagcaatta

SEQ ID NO: 622258 - DNA, 19 bp, Mus musculus
  siRNA target sequence for MGC56918 (NM_178414.2,1269-1287).
gcaaaggagaagcaattaa

SEQ ID NO: 622259 - DNA, 19 bp, Mus musculus
  siRNA target sequence for MGC56918 (NM_178414.2,1363-1381).
cggcaaggaaggggaaatt

SEQ ID NO: 622260 - DNA, 19 bp, Mus musculus
  siRNA target sequence for MGC56918 (NM_178414.2,1398-1416).
ccgatcggcccttctgttt

SEQ ID NO: 622261 - DNA, 19 bp, Mus musculus
  siRNA target sequence for MGC56918 (NM_178414.2,1400-1418).
gatcggcccttctgtttct

SEQ ID NO: 622262 - DNA, 19 bp, Mus musculus
  siRNA target sequence for MGC56918 (NM_178414.2,1501-1519).
ggatgatgacggatacttt

SEQ ID NO: 622263 - DNA, 19 bp, Mus musculus
  siRNA target sequence for MGC56918 (NM_178414.2,1505-1523).
gatgacggatacttttggt

SEQ ID NO: 622264 - DNA, 19 bp, Mus musculus
  siRNA target sequence for MGC56918 (NM_178414.2,1564-1582).
ccgaattgggccttttgaa

SEQ ID NO: 622265 - DNA, 19 bp, Mus musculus
  siRNA target sequence for MGC56918 (NM_178414.2,1566-1584).
gaattgggccttttgaagt

SEQ ID NO: 622266 - DNA, 19 bp, Mus musculus
  siRNA target sequence for MGC56918 (NM_178414.2,1701-1719).
gctccaaccgtgagaagtt

SEQ ID NO: 622267 - DNA, 19 bp, Mus musculus
  siRNA target sequence for MGC56918 (NM_178414.2,1702-1720).
ctccaaccgtgagaagtta

SEQ ID NO: 622268 - DNA, 19 bp, Mus musculus
  siRNA target sequence for MGC56918 (NM_178414.2,1733-1751).
caggatcatgtgaaaaatt

SEQ ID NO: 622269 - DNA, 19 bp, Mus musculus
  siRNA target sequence for MGC56918 (NM_178414.2,1796-1814).
gaactcccaaagacaatca

SEQ ID NO: 622270 - DNA, 19 bp, Mus musculus
  siRNA target sequence for MGC56918 (NM_178414.2,1825-1843).
caaacgcaacgtgttaaga

SEQ ID NO: 622271 - DNA, 19 bp, Mus musculus
  siRNA target sequence for Ndr3 (NM_013865.1,103-121).
gagatcaaaccgcttctaa

SEQ ID NO: 622272 - DNA, 19 bp, Mus musculus
  siRNA target sequence for Ndr3 (NM_013865.1,105-123).
gatcaaaccgcttctaaat

SEQ ID NO: 622273 - DNA, 19 bp, Mus musculus
  siRNA target sequence for Ndr3 (NM_013865.1,112-130).
ccgcttctaaatgataaga

SEQ ID NO: 622274 - DNA, 19 bp, Mus musculus
  siRNA target sequence for Ndr3 (NM_013865.1,159-177).
ctgtcaggaacatgacatt

SEQ ID NO: 622275 - DNA, 19 bp, Mus musculus
  siRNA target sequence for Ndr3 (NM_013865.1,233-251).
gacctgttatcctgacata

SEQ ID NO: 622276 - DNA, 19 bp, Mus musculus
  siRNA target sequence for Ndr3 (NM_013865.1,256-274).
gacattgggctcaaccata

SEQ ID NO: 622277 - DNA, 19 bp, Mus musculus
  siRNA target sequence for Ndr3 (NM_013865.1,271-289).
cataagtcctgcttcaaca

SEQ ID NO: 622278 - DNA, 19 bp, Mus musculus
  siRNA target sequence for Ndr3 (NM_013865.1,495-513).
ctacattctcagcagattt

SEQ ID NO: 622279 - DNA, 19 bp, Mus musculus
  siRNA target sequence for Ndr3 (NM_013865.1,498-516).
cattctcagcagatttgca

SEQ ID NO: 622280 - DNA, 19 bp, Mus musculus
  siRNA target sequence for Ndr3 (NM_013865.1,506-524).
gcagatttgcactgaatca

SEQ ID NO: 622281 - DNA, 19 bp, Mus musculus
  siRNA target sequence for Ndr3 (NM_013865.1,507-525).
cagatttgcactgaatcat

SEQ ID NO: 622282 - DNA, 19 bp, Mus musculus
  siRNA target sequence for Ndr3 (NM_013865.1,674-692).
ccaatttggacctcattca

SEQ ID NO: 622283 - DNA, 19 bp, Mus musculus
  siRNA target sequence for Ndr3 (NM_013865.1,675-693).
caatttggacctcattcaa

SEQ ID NO: 622284 - DNA, 19 bp, Mus musculus
  siRNA target sequence for Ndr3 (NM_013865.1,703-721).
ctgcacattgctcaagata

SEQ ID NO: 622285 - DNA, 19 bp, Mus musculus
  siRNA target sequence for Ndr3 (NM_013865.1,706-724).
cacattgctcaagatatca

SEQ ID NO: 622286 - DNA, 19 bp, Mus musculus
  siRNA target sequence for Ndr3 (NM_013865.1,742-760).
ctcttcctgggttcctata

SEQ ID NO: 622287 - DNA, 19 bp, Mus musculus
  siRNA target sequence for Ndr3 (NM_013865.1,791-809).
ctatactgggccaaaatga

SEQ ID NO: 622288 - DNA, 19 bp, Mus musculus
  siRNA target sequence for Ndr3 (NM_013865.1,796-814).
ctgggccaaaatgataaca

SEQ ID NO: 622289 - DNA, 19 bp, Mus musculus
  siRNA target sequence for Ndr3 (NM_013865.1,798-816).
gggccaaaatgataacaga

SEQ ID NO: 622290 - DNA, 19 bp, Mus musculus
  siRNA target sequence for Ndr3 (NM_013865.1,799-817).
ggccaaaatgataacagat

SEQ ID NO: 622291 - DNA, 19 bp, Mus musculus
  siRNA target sequence for Ndr3 (NM_013865.1,802-820).
caaaatgataacagattga

SEQ ID NO: 622292 - DNA, 19 bp, Mus musculus
  siRNA target sequence for Ndr3 (NM_013865.1,825-843).
gctaaagtgttctacctta

SEQ ID NO: 622293 - DNA, 19 bp, Mus musculus
  siRNA target sequence for Ndr3 (NM_013865.1,846-864).
ggtggtgggggacaattca

SEQ ID NO: 622294 - DNA, 19 bp, Mus musculus
  siRNA target sequence for Ndr3 (NM_013865.1,876-894).
ggctgtggttgaatgtaat

SEQ ID NO: 622295 - DNA, 19 bp, Mus musculus
  siRNA target sequence for Ndr3 (NM_013865.1,896-914).
ctcgcctcgaccctataaa

SEQ ID NO: 622296 - DNA, 19 bp, Mus musculus
  siRNA target sequence for Ndr3 (NM_013865.1,898-916).
cgcctcgaccctataaata

SEQ ID NO: 622297 - DNA, 19 bp, Mus musculus
  siRNA target sequence for Ndr3 (NM_013865.1,900-918).
cctcgaccctataaataca

SEQ ID NO: 622298 - DNA, 19 bp, Mus musculus
  siRNA target sequence for Ndr3 (NM_013865.1,901-919).
ctcgaccctataaatacaa

SEQ ID NO: 622299 - DNA, 19 bp, Mus musculus
  siRNA target sequence for Ndr3 (NM_013865.1,903-921).
cgaccctataaatacaact

SEQ ID NO: 622300 - DNA, 19 bp, Mus musculus
  siRNA target sequence for Ndr3 (NM_013865.1,904-922).
gaccctataaatacaactt

SEQ ID NO: 622301 - DNA, 19 bp, Mus musculus
  siRNA target sequence for Ndr3 (NM_013865.1,1006-1024).
ggaatgggctacataccat

SEQ ID NO: 622302 - DNA, 19 bp, Mus musculus
  siRNA target sequence for Ndr3 (NM_013865.1,1062-1080).
ctccacctcaagtagcatt

SEQ ID NO: 622303 - DNA, 19 bp, Mus musculus
  siRNA target sequence for Ndr3 (NM_013865.1,1087-1105).
ggagaaagtccctttagca

SEQ ID NO: 622304 - DNA, 19 bp, Mus musculus
  siRNA target sequence for Nlgn3 (NM_172932.1,398-416).
ggcacccacagtcaatact

SEQ ID NO: 622305 - DNA, 19 bp, Mus musculus
  siRNA target sequence for Nlgn3 (NM_172932.1,510-528).
ccgatcggcgagaaacgtt

SEQ ID NO: 622306 - DNA, 19 bp, Mus musculus
  siRNA target sequence for Nlgn3 (NM_172932.1,511-529).
cgatcggcgagaaacgttt

SEQ ID NO: 622307 - DNA, 19 bp, Mus musculus
  siRNA target sequence for Nlgn3 (NM_172932.1,613-631).
cagctgtgcccgaagtcat

SEQ ID NO: 622308 - DNA, 19 bp, Mus musculus
  siRNA target sequence for Nlgn3 (NM_172932.1,649-667).
ctgccaacttggatatcgt

SEQ ID NO: 622309 - DNA, 19 bp, Mus musculus
  siRNA target sequence for Nlgn3 (NM_172932.1,659-677).
ggatatcgtcgccacttat

SEQ ID NO: 622310 - DNA, 19 bp, Mus musculus
  siRNA target sequence for Nlgn3 (NM_172932.1,660-678).
gatatcgtcgccacttata

SEQ ID NO: 622311 - DNA, 19 bp, Mus musculus
  siRNA target sequence for Nlgn3 (NM_172932.1,758-776).
cgaggacttagcggataat

SEQ ID NO: 622312 - DNA, 19 bp, Mus musculus
  siRNA target sequence for Nlgn3 (NM_172932.1,880-898).
gcagtgttcttgcaagtta

SEQ ID NO: 622313 - DNA, 19 bp, Mus musculus
  siRNA target sequence for Nlgn3 (NM_172932.1,931-949).
gggtcggggtgctaggttt

SEQ ID NO: 622314 - DNA, 19 bp, Mus musculus
  siRNA target sequence for Nlgn3 (NM_172932.1,1047-1065).
ggagatccccgtagaatta

SEQ ID NO: 622315 - DNA, 19 bp, Mus musculus
  siRNA target sequence for Nlgn3 (NM_172932.1,1096-1114).
gtgtcagtctccttacact

SEQ ID NO: 622316 - DNA, 19 bp, Mus musculus
  siRNA target sequence for Nlgn3 (NM_172932.1,1190-1208).
ctaccaaccagtgaagtat

SEQ ID NO: 622317 - DNA, 19 bp, Mus musculus
  siRNA target sequence for Nlgn3 (NM_172932.1,1492-1510).
cgggcactgactttgacta

SEQ ID NO: 622318 - DNA, 19 bp, Mus musculus
  siRNA target sequence for Nlgn3 (NM_172932.1,1506-1524).
gactactctgtctccaatt

SEQ ID NO: 622319 - DNA, 19 bp, Mus musculus
  siRNA target sequence for Nlgn3 (NM_172932.1,1519-1537).
ccaattttgtggacaatct

SEQ ID NO: 622320 - DNA, 19 bp, Mus musculus
  siRNA target sequence for Nlgn3 (NM_172932.1,1566-1584).
ctgcgggagactatcaagt

SEQ ID NO: 622321 - DNA, 19 bp, Mus musculus
  siRNA target sequence for Nlgn3 (NM_172932.1,1791-1809).
gatgaagtgccctatgttt

SEQ ID NO: 622322 - DNA, 19 bp, Mus musculus
  siRNA target sequence for Nlgn3 (NM_172932.1,2031-2049).
cacatcgggctgaaaccaa

SEQ ID NO: 622323 - DNA, 19 bp, Mus musculus
  siRNA target sequence for Nlgn3 (NM_172932.1,2121-2139).
catgacatgttccactata

SEQ ID NO: 622324 - DNA, 19 bp, Mus musculus
  siRNA target sequence for Nlgn3 (NM_172932.1,2124-2142).
gacatgttccactatacat

SEQ ID NO: 622325 - DNA, 19 bp, Mus musculus
  siRNA target sequence for Nlgn3 (NM_172932.1,2299-2317).
ggccactcctggttgagaa

SEQ ID NO: 622326 - DNA, 19 bp, Mus musculus
  siRNA target sequence for Nlgn3 (NM_172932.1,2322-2340).
cgagactactccactgaat

SEQ ID NO: 622327 - DNA, 19 bp, Mus musculus
  siRNA target sequence for Nlgn3 (NM_172932.1,2323-2341).
gagactactccactgaatt

SEQ ID NO: 622328 - DNA, 19 bp, Mus musculus
  siRNA target sequence for Nlgn3 (NM_172932.1,2335-2353).
ctgaattaagtgtcactat

SEQ ID NO: 622329 - DNA, 19 bp, Mus musculus
  siRNA target sequence for Nlgn3 (NM_172932.1,2464-2482).
gaactggtgcccctgaatt

SEQ ID NO: 622330 - DNA, 19 bp, Mus musculus
  siRNA target sequence for Nlgn3 (NM_172932.1,2502-2520).
gagctggcagcattacagt

SEQ ID NO: 622331 - DNA, 19 bp, Mus musculus
  siRNA target sequence for Nlgn3 (NM_172932.1,2523-2541).
ggtcccactcaccatgaat

SEQ ID NO: 622332 - DNA, 19 bp, Mus musculus
  siRNA target sequence for Nlgn3 (NM_172932.1,2527-2545).
ccactcaccatgaatgtga

SEQ ID NO: 622333 - DNA, 19 bp, Mus musculus
  siRNA target sequence for Nlgn3 (NM_172932.1,2648-2666).
catcactatgattcctaat

SEQ ID NO: 622334 - DNA, 19 bp, Mus musculus
  siRNA target sequence for Nlgn3 (NM_172932.1,2709-2727).
gccgcagggttcaacagta

SEQ ID NO: 622335 - DNA, 19 bp, Mus musculus
  siRNA target sequence for Nte (NM_015801.1,495-513).
cttaacattgccaagaaga

SEQ ID NO: 622336 - DNA, 19 bp, Mus musculus
  siRNA target sequence for Nte (NM_015801.1,504-522).
gccaagaagatcttacgta

SEQ ID NO: 622337 - DNA, 19 bp, Mus musculus
  siRNA target sequence for Nte (NM_015801.1,509-527).
gaagatcttacgtatccaa

SEQ ID NO: 622338 - DNA, 19 bp, Mus musculus
  siRNA target sequence for Nte (NM_015801.1,619-637).
cctctgaggtactctacat

SEQ ID NO: 622339 - DNA, 19 bp, Mus musculus
  siRNA target sequence for Nte (NM_015801.1,624-642).
gaggtactctacatgctta

SEQ ID NO: 622340 - DNA, 19 bp, Mus musculus
  siRNA target sequence for Nte (NM_015801.1,627-645).
gtactctacatgcttaaga

SEQ ID NO: 622341 - DNA, 19 bp, Mus musculus
  siRNA target sequence for Nte (NM_015801.1,950-968).
gctgagactcccagtagaa

SEQ ID NO: 622342 - DNA, 19 bp, Mus musculus
  siRNA target sequence for Nte (NM_015801.1,988-1006).
ccaagtaccctgagagttt

SEQ ID NO: 622343 - DNA, 19 bp, Mus musculus
  siRNA target sequence for Nte (NM_015801.1,1017-1035).
gtacagatcatcatggtaa

SEQ ID NO: 622344 - DNA, 19 bp, Mus musculus
  siRNA target sequence for Nte (NM_015801.1,1078-1096).
gtctgaccaatgaactctt

SEQ ID NO: 622345 - DNA, 19 bp, Mus musculus
  siRNA target sequence for Nte (NM_015801.1,1280-1298).
gaagcccacatccttagaa

SEQ ID NO: 622346 - DNA, 19 bp, Mus musculus
  siRNA target sequence for Nte (NM_015801.1,1302-1320).
cccccagccccgttactga

SEQ ID NO: 622347 - DNA, 19 bp, Mus musculus
  siRNA target sequence for Nte (NM_015801.1,1362-1380).
ggtggccctcgttctgatt

SEQ ID NO: 622348 - DNA, 19 bp, Mus musculus
  siRNA target sequence for Nte (NM_015801.1,1368-1386).
cctcgttctgattttgaca

SEQ ID NO: 622349 - DNA, 19 bp, Mus musculus
  siRNA target sequence for Nte (NM_015801.1,1398-1416).
cgtggacggatatctgttt

SEQ ID NO: 622350 - DNA, 19 bp, Mus musculus
  siRNA target sequence for Nte (NM_015801.1,1402-1420).
gacggatatctgtttctct

SEQ ID NO: 622351 - DNA, 19 bp, Mus musculus
  siRNA target sequence for Nte (NM_015801.1,1494-1512).
gcgggtgcctgtgaatata

SEQ ID NO: 622352 - DNA, 19 bp, Mus musculus
  siRNA target sequence for Nte (NM_015801.1,1498-1516).
gtgcctgtgaatatagcta

SEQ ID NO: 622353 - DNA, 19 bp, Mus musculus
  siRNA target sequence for Nte (NM_015801.1,1837-1855).
ctggggaacctctcatctt

SEQ ID NO: 622354 - DNA, 19 bp, Mus musculus
  siRNA target sequence for Nte (NM_015801.1,1897-1915).
ccaaatcccacttctatga

SEQ ID NO: 622355 - DNA, 19 bp, Mus musculus
  siRNA target sequence for Nte (NM_015801.1,2060-2078).
ctccgactgcacctacatt

SEQ ID NO: 622356 - DNA, 19 bp, Mus musculus
  siRNA target sequence for Nte (NM_015801.1,2062-2080).
ccgactgcacctacattgt

SEQ ID NO: 622357 - DNA, 19 bp, Mus musculus
  siRNA target sequence for Nte (NM_015801.1,2063-2081).
cgactgcacctacattgta

SEQ ID NO: 622358 - DNA, 19 bp, Mus musculus
  siRNA target sequence for Nte (NM_015801.1,2251-2269).
gcaccttaggccacatcaa

SEQ ID NO: 622359 - DNA, 19 bp, Mus musculus
  siRNA target sequence for Nte (NM_015801.1,2285-2303).
ggttgtgacccgccttatt

SEQ ID NO: 622360 - DNA, 19 bp, Mus musculus
  siRNA target sequence for Nte (NM_015801.1,2309-2327).
gctaagccagaaaattcta

SEQ ID NO: 622361 - DNA, 19 bp, Mus musculus
  siRNA target sequence for Nte (NM_015801.1,2503-2521).
gtcccacgctcctccttaa

SEQ ID NO: 622362 - DNA, 19 bp, Mus musculus
  siRNA target sequence for Nte (NM_015801.1,2551-2569).
cttcagcactggatagcat

SEQ ID NO: 622363 - DNA, 19 bp, Mus musculus
  siRNA target sequence for Nte (NM_015801.1,2557-2575).
cactggatagcattcaaga

SEQ ID NO: 622364 - DNA, 19 bp, Mus musculus
  siRNA target sequence for Nte (NM_015801.1,2988-3006).
gtactcacaggaaacacta

SEQ ID NO: 622365 - DNA, 19 bp, Mus musculus
  siRNA target sequence for Nte (NM_015801.1,3035-3053).
cagaggctgctcgcatatt

SEQ ID NO: 622366 - DNA, 19 bp, Mus musculus
  siRNA target sequence for Nte (NM_015801.1,3102-3120).
ggaggcacatccataggtt

SEQ ID NO: 622367 - DNA, 19 bp, Mus musculus
  siRNA target sequence for Nte (NM_015801.1,3151-3169).
gcagcgccagccgaactaa

SEQ ID NO: 622368 - DNA, 19 bp, Mus musculus
  siRNA target sequence for Nte (NM_015801.1,3152-3170).
cagcgccagccgaactaaa

SEQ ID NO: 622369 - DNA, 19 bp, Mus musculus
  siRNA target sequence for Nte (NM_015801.1,3154-3172).
gcgccagccgaactaaaca

SEQ ID NO: 622370 - DNA, 19 bp, Mus musculus
  siRNA target sequence for Nte (NM_015801.1,3155-3173).
cgccagccgaactaaacaa

SEQ ID NO: 622371 - DNA, 19 bp, Mus musculus
  siRNA target sequence for Nte (NM_015801.1,3237-3255).
cctgtcacctccatgttta

SEQ ID NO: 622372 - DNA, 19 bp, Mus musculus
  siRNA target sequence for Nte (NM_015801.1,3319-3337).
ggctgccttacttcaatgt

SEQ ID NO: 622373 - DNA, 19 bp, Mus musculus
  siRNA target sequence for Nte (NM_015801.1,3321-3339).
ctgccttacttcaatgtga

SEQ ID NO: 622374 - DNA, 19 bp, Mus musculus
  siRNA target sequence for Nte (NM_015801.1,3361-3379).
ccatgcgcgtccacaaaga

SEQ ID NO: 622375 - DNA, 19 bp, Mus musculus
  siRNA target sequence for Nte (NM_015801.1,3362-3380).
catgcgcgtccacaaagat

SEQ ID NO: 622376 - DNA, 19 bp, Mus musculus
  siRNA target sequence for Nte (NM_015801.1,3383-3401).
ctccctgtggcggtatgta

SEQ ID NO: 622377 - DNA, 19 bp, Mus musculus
  siRNA target sequence for Nte (NM_015801.1,3488-3506).
caacctgccagcggatatt

SEQ ID NO: 622378 - DNA, 19 bp, Mus musculus
  siRNA target sequence for Nte (NM_015801.1,3694-3712).
gtgtgcggcagctagaagt

SEQ ID NO: 622379 - DNA, 19 bp, Mus musculus
  siRNA target sequence for Nte (NM_015801.1,3714-3732).
gtcaagtccagctcctatt

SEQ ID NO: 622380 - DNA, 19 bp, Mus musculus
  siRNA target sequence for Nte (NM_015801.1,3737-3755).
gtaccttcgtccatccatt

SEQ ID NO: 622381 - DNA, 19 bp, Mus musculus
  siRNA target sequence for Nte (NM_015801.1,3781-3799).
gaaagtttgaccagatcta

SEQ ID NO: 622382 - DNA, 19 bp, Mus musculus
  siRNA target sequence for Nte (NM_015801.1,3785-3803).
gtttgaccagatctatgat

SEQ ID NO: 622383 - DNA, 19 bp, Mus musculus
  siRNA target sequence for Nte (NM_015801.1,3841-3859).
ggacccgtggtgaagtcat

SEQ ID NO: 622384 - DNA, 19 bp, Mus musculus
  siRNA target sequence for Nte (NM_015801.1,3842-3860).
gacccgtggtgaagtcatt

SEQ ID NO: 622385 - DNA, 19 bp, Mus musculus
  siRNA target sequence for Nte (NM_015801.1,3844-3862).
cccgtggtgaagtcattga

SEQ ID NO: 622386 - DNA, 19 bp, Mus musculus
  siRNA target sequence for Nte (NM_015801.1,3870-3888).
ctcacagaccggagatcta

SEQ ID NO: 622387 - DNA, 19 bp, Mus musculus
  siRNA target sequence for Nte (NM_015801.1,3880-3898).
ggagatctacagaccttaa

SEQ ID NO: 622388 - DNA, 19 bp, Mus musculus
  siRNA target sequence for Nte (NM_015801.1,3881-3899).
gagatctacagaccttaat

SEQ ID NO: 622389 - DNA, 19 bp, Mus musculus
  siRNA target sequence for Nte (NM_015801.1,3883-3901).
gatctacagaccttaatga

SEQ ID NO: 622390 - DNA, 19 bp, Mus musculus
  siRNA target sequence for Nte (NM_015801.1,3902-3920).
gagtcgccgtgcagatata

SEQ ID NO: 622391 - DNA, 19 bp, Mus musculus
  siRNA target sequence for Nte (NM_015801.1,3904-3922).
gtcgccgtgcagatatact

SEQ ID NO: 622392 - DNA, 19 bp, Mus musculus
  siRNA target sequence for Nte (NM_015801.1,3944-3962).
cactgacttggctgagatt

SEQ ID NO: 622393 - DNA, 19 bp, Mus musculus
  siRNA target sequence for Nte (NM_015801.1,4015-4033).
gggaggagtcggattgctt

SEQ ID NO: 622394 - DNA, 19 bp, Mus musculus
  siRNA target sequence for Oazin (NM_018745.2,885-903).
gcaagaattgggtgtatct

SEQ ID NO: 622395 - DNA, 19 bp, Mus musculus
  siRNA target sequence for Oazin (NM_018745.2,991-1009).
gacaatgagattgaattaa

SEQ ID NO: 622396 - DNA, 19 bp, Mus musculus
  siRNA target sequence for Oazin (NM_018745.2,1031-1049).
caaatgccaaggtcttact

SEQ ID NO: 622397 - DNA, 19 bp, Mus musculus
  siRNA target sequence for Oazin (NM_018745.2,1078-1096).
ggtgaagatggtaacatga

SEQ ID NO: 622398 - DNA, 19 bp, Mus musculus
  siRNA target sequence for Oazin (NM_018745.2,1159-1177).
caaataattggggttaaat

SEQ ID NO: 622399 - DNA, 19 bp, Mus musculus
  siRNA target sequence for Oazin (NM_018745.2,1193-1211).
cttgcaaagaatatcaagt

SEQ ID NO: 622400 - DNA, 19 bp, Mus musculus
  siRNA target sequence for Oazin (NM_018745.2,1261-1279).
gagtttggctttacaatga

SEQ ID NO: 622401 - DNA, 19 bp, Mus musculus
  siRNA target sequence for Oazin (NM_018745.2,1267-1285).
ggctttacaatgaacatgt

SEQ ID NO: 622402 - DNA, 19 bp, Mus musculus
  siRNA target sequence for Oazin (NM_018745.2,1274-1292).
caatgaacatgttagacat

SEQ ID NO: 622403 - DNA, 19 bp, Mus musculus
  siRNA target sequence for Oazin (NM_018745.2,1301-1319).
gcttcacaggaactgaaat

SEQ ID NO: 622404 - DNA, 19 bp, Mus musculus
  siRNA target sequence for Oazin (NM_018745.2,1326-1344).
ggaagaggttaatcatgtt

SEQ ID NO: 622405 - DNA, 19 bp, Mus musculus
  siRNA target sequence for Oazin (NM_018745.2,1330-1348).
gaggttaatcatgttatca

SEQ ID NO: 622406 - DNA, 19 bp, Mus musculus
  siRNA target sequence for Oazin (NM_018745.2,1332-1350).
ggttaatcatgttatcagt

SEQ ID NO: 622407 - DNA, 19 bp, Mus musculus
  siRNA target sequence for Oazin (NM_018745.2,1408-1426).
ggaagctactatgtatctt

SEQ ID NO: 622408 - DNA, 19 bp, Mus musculus
  siRNA target sequence for Oazin (NM_018745.2,1519-1537).
ccagccttcgtgtattaca

SEQ ID NO: 622409 - DNA, 19 bp, Mus musculus
  siRNA target sequence for Oazin (NM_018745.2,1520-1538).
cagccttcgtgtattacat

SEQ ID NO: 622410 - DNA, 19 bp, Mus musculus
  siRNA target sequence for Oazin (NM_018745.2,1522-1540).
gccttcgtgtattacatga

SEQ ID NO: 622411 - DNA, 19 bp, Mus musculus
  siRNA target sequence for Oazin (NM_018745.2,1523-1541).
ccttcgtgtattacatgaa

SEQ ID NO: 622412 - DNA, 19 bp, Mus musculus
  siRNA target sequence for Oazin (NM_018745.2,1524-1542).
cttcgtgtattacatgaat

SEQ ID NO: 622413 - DNA, 19 bp, Mus musculus
  siRNA target sequence for Oazin (NM_018745.2,1527-1545).
cgtgtattacatgaatgat

SEQ ID NO: 622414 - DNA, 19 bp, Mus musculus
  siRNA target sequence for Oazin (NM_018745.2,1539-1557).
gaatgatggtgtttatggt

SEQ ID NO: 622415 - DNA, 19 bp, Mus musculus
  siRNA target sequence for Oazin (NM_018745.2,1714-1732).
gtgggagattggcttatct

SEQ ID NO: 622416 - DNA, 19 bp, Mus musculus
  siRNA target sequence for Oazin (NM_018745.2,1716-1734).
gggagattggcttatcttt

SEQ ID NO: 622417 - DNA, 19 bp, Mus musculus
  siRNA target sequence for Oazin (NM_018745.2,1758-1776).
ccacgaaccatctgctttt

SEQ ID NO: 622418 - DNA, 19 bp, Mus musculus
  siRNA target sequence for Oazin (NM_018745.2,1812-1830).
gtcattcagtgattggtat

SEQ ID NO: 622419 - DNA, 19 bp, Mus musculus
  siRNA target sequence for Oazin (NM_018745.2,1881-1899).
ctttgcaccctcttgtatt

SEQ ID NO: 622420 - DNA, 19 bp, Mus musculus
  siRNA target sequence for Papln (NM_130887.1,112-130).
ggtcttgggctcgaaatgt

SEQ ID NO: 622421 - DNA, 19 bp, Mus musculus
  siRNA target sequence for Papln (NM_130887.1,395-413).
cgcagcccctaataagtgt

SEQ ID NO: 622422 - DNA, 19 bp, Mus musculus
  siRNA target sequence for Papln (NM_130887.1,429-447).
cccaaggggcagaacttct

SEQ ID NO: 622423 - DNA, 19 bp, Mus musculus
  siRNA target sequence for Papln (NM_130887.1,435-453).
gggcagaacttctactaca

SEQ ID NO: 622424 - DNA, 19 bp, Mus musculus
  siRNA target sequence for Papln (NM_130887.1,546-564).
cacaagctagactcaatca

SEQ ID NO: 622425 - DNA, 19 bp, Mus musculus
  siRNA target sequence for Papln (NM_130887.1,649-667).
gcagaggctacaaccaaat

SEQ ID NO: 622426 - DNA, 19 bp, Mus musculus
  siRNA target sequence for Papln (NM_130887.1,655-673).
gctacaaccaaatcttcat

SEQ ID NO: 622427 - DNA, 19 bp, Mus musculus
  siRNA target sequence for Papln (NM_130887.1,712-730).
ccgctgccagcaggaattt

SEQ ID NO: 622428 - DNA, 19 bp, Mus musculus
  siRNA target sequence for Papln (NM_130887.1,745-763).
gcatccgtggcgagtacta

SEQ ID NO: 622429 - DNA, 19 bp, Mus musculus
  siRNA target sequence for Papln (NM_130887.1,750-768).
cgtggcgagtactatctca

SEQ ID NO: 622430 - DNA, 19 bp, Mus musculus
  siRNA target sequence for Papln (NM_130887.1,751-769).
gtggcgagtactatctcaa

SEQ ID NO: 622431 - DNA, 19 bp, Mus musculus
  siRNA target sequence for Papln (NM_130887.1,934-952).
gagtacactacgagtacta

SEQ ID NO: 622432 - DNA, 19 bp, Mus musculus
  siRNA target sequence for Papln (NM_130887.1,1046-1064).
cctggtattctgcactatt

SEQ ID NO: 622433 - DNA, 19 bp, Mus musculus
  siRNA target sequence for Papln (NM_130887.1,1361-1379).
gggagagtgctcagttaca

SEQ ID NO: 622434 - DNA, 19 bp, Mus musculus
  siRNA target sequence for Papln (NM_130887.1,1362-1380).
ggagagtgctcagttacat

SEQ ID NO: 622435 - DNA, 19 bp, Mus musculus
  siRNA target sequence for Papln (NM_130887.1,1443-1461).
gctgcagcgtgcttgttga

SEQ ID NO: 622436 - DNA, 19 bp, Mus musculus
  siRNA target sequence for Papln (NM_130887.1,1444-1462).
ctgcagcgtgcttgttgaa

SEQ ID NO: 622437 - DNA, 19 bp, Mus musculus
  siRNA target sequence for Papln (NM_130887.1,1478-1496).
cacggagccctgtgtacaa

SEQ ID NO: 622438 - DNA, 19 bp, Mus musculus
  siRNA target sequence for Papln (NM_130887.1,1480-1498).
cggagccctgtgtacaaga

SEQ ID NO: 622439 - DNA, 19 bp, Mus musculus
  siRNA target sequence for Papln (NM_130887.1,1533-1551).
gttggctcatggagtctat

SEQ ID NO: 622440 - DNA, 19 bp, Mus musculus
  siRNA target sequence for Papln (NM_130887.1,2099-2117).
gtctcacggcagtgacaat

SEQ ID NO: 622441 - DNA, 19 bp, Mus musculus
  siRNA target sequence for Papln (NM_130887.1,2208-2226).
cgaagctctaggtttggat

SEQ ID NO: 622442 - DNA, 19 bp, Mus musculus
  siRNA target sequence for Papln (NM_130887.1,2280-2298).
ggccagcccagctatgctt

SEQ ID NO: 622443 - DNA, 19 bp, Mus musculus
  siRNA target sequence for Papln (NM_130887.1,2382-2400).
cggtgtaaccgcttttggt

SEQ ID NO: 622444 - DNA, 19 bp, Mus musculus
  siRNA target sequence for Papln (NM_130887.1,2383-2401).
ggtgtaaccgcttttggta

SEQ ID NO: 622445 - DNA, 19 bp, Mus musculus
  siRNA target sequence for Papln (NM_130887.1,2384-2402).
gtgtaaccgcttttggtat

SEQ ID NO: 622446 - DNA, 19 bp, Mus musculus
  siRNA target sequence for Papln (NM_130887.1,2815-2833).
cagggcaggcggtacaact

SEQ ID NO: 622447 - DNA, 19 bp, Mus musculus
  siRNA target sequence for Papln (NM_130887.1,2820-2838).
caggcggtacaactctttt

SEQ ID NO: 622448 - DNA, 19 bp, Mus musculus
  siRNA target sequence for Papln (NM_130887.1,3283-3301).
ccatcgagtggcaaagaga

SEQ ID NO: 622449 - DNA, 19 bp, Mus musculus
  siRNA target sequence for Papln (NM_130887.1,3284-3302).
catcgagtggcaaagagat

SEQ ID NO: 622450 - DNA, 19 bp, Mus musculus
  siRNA target sequence for Papln (NM_130887.1,3647-3665).
ggacgagggctcttacaca

SEQ ID NO: 622451 - DNA, 19 bp, Mus musculus
  siRNA target sequence for Papln (NM_130887.1,3648-3666).
gacgagggctcttacacat

SEQ ID NO: 622452 - DNA, 19 bp, Mus musculus
  siRNA target sequence for Pggtb1 (NM_172627.1,76-94).
gagaacggctggatttcct

SEQ ID NO: 622453 - DNA, 19 bp, Mus musculus
  siRNA target sequence for Pggtb1 (NM_172627.1,101-119).
ccggcacgtgcggttcttt

SEQ ID NO: 622454 - DNA, 19 bp, Mus musculus
  siRNA target sequence for Pggtb1 (NM_172627.1,162-180).
gagaccagcaggttgacaa

SEQ ID NO: 622455 - DNA, 19 bp, Mus musculus
  siRNA target sequence for Pggtb1 (NM_172627.1,164-182).
gaccagcaggttgacaatt

SEQ ID NO: 622456 - DNA, 19 bp, Mus musculus
  siRNA target sequence for Pggtb1 (NM_172627.1,312-330).
ggtttccgaggttcttcat

SEQ ID NO: 622457 - DNA, 19 bp, Mus musculus
  siRNA target sequence for Pggtb1 (NM_172627.1,328-346).
catacctgggtattccatt

SEQ ID NO: 622458 - DNA, 19 bp, Mus musculus
  siRNA target sequence for Pggtb1 (NM_172627.1,332-350).
cctgggtattccattcaat

SEQ ID NO: 622459 - DNA, 19 bp, Mus musculus
  siRNA target sequence for Pggtb1 (NM_172627.1,562-580).
gcgcatcctgcatttgcta

SEQ ID NO: 622460 - DNA, 19 bp, Mus musculus
  siRNA target sequence for Pggtb1 (NM_172627.1,563-581).
cgcatcctgcatttgctat

SEQ ID NO: 622461 - DNA, 19 bp, Mus musculus
  siRNA target sequence for Pggtb1 (NM_172627.1,564-582).
gcatcctgcatttgctata

SEQ ID NO: 622462 - DNA, 19 bp, Mus musculus
  siRNA target sequence for Pggtb1 (NM_172627.1,565-583).
catcctgcatttgctatat

SEQ ID NO: 622463 - DNA, 19 bp, Mus musculus
  siRNA target sequence for Pggtb1 (NM_172627.1,623-641).
cagctacattagaagaagt

SEQ ID NO: 622464 - DNA, 19 bp, Mus musculus
  siRNA target sequence for Pggtb1 (NM_172627.1,637-655).
gaagtatgtcctatgacaa

SEQ ID NO: 622465 - DNA, 19 bp, Mus musculus
  siRNA target sequence for Pggtb1 (NM_172627.1,762-780).
gaactgaacaggataaaga

SEQ ID NO: 622466 - DNA, 19 bp, Mus musculus
  siRNA target sequence for Pggtb1 (NM_172627.1,861-879).
ggcgcaacactgaagcttt

SEQ ID NO: 622467 - DNA, 19 bp, Mus musculus
  siRNA target sequence for Pggtb1 (NM_172627.1,891-909).
cagtacactaactttgaga

SEQ ID NO: 622468 - DNA, 19 bp, Mus musculus
  siRNA target sequence for Pggtb1 (NM_172627.1,917-935).
gaactacatcttatcaact

SEQ ID NO: 622469 - DNA, 19 bp, Mus musculus
  siRNA target sequence for Pggtb1 (NM_172627.1,920-938).
ctacatcttatcaactcaa

SEQ ID NO: 622470 - DNA, 19 bp, Mus musculus
  siRNA target sequence for Pggtb1 (NM_172627.1,923-941).
catcttatcaactcaagat

SEQ ID NO: 622471 - DNA, 19 bp, Mus musculus
  siRNA target sequence for Pggtb1 (NM_172627.1,1092-1110).
ctccgtgatctccatcaaa

SEQ ID NO: 622472 - DNA, 19 bp, Mus musculus
  siRNA target sequence for Pggtb1 (NM_172627.1,1130-1148).
caaacagtgctcagacaat

SEQ ID NO: 622473 - DNA, 19 bp, Mus musculus
  siRNA target sequence for Pla1a (NM_134102.2,368-386).
ccaagtgcacggactttca

SEQ ID NO: 622474 - DNA, 19 bp, Mus musculus
  siRNA target sequence for Pla1a (NM_134102.2,512-530).
gtctgggaaccaaagtaat

SEQ ID NO: 622475 - DNA, 19 bp, Mus musculus
  siRNA target sequence for Pla1a (NM_134102.2,514-532).
ctgggaaccaaagtaatta

SEQ ID NO: 622476 - DNA, 19 bp, Mus musculus
  siRNA target sequence for Pla1a (NM_134102.2,563-581).
cttcttggatcgacaagtt

SEQ ID NO: 622477 - DNA, 19 bp, Mus musculus
  siRNA target sequence for Pla1a (NM_134102.2,566-584).
cttggatcgacaagtttat

SEQ ID NO: 622478 - DNA, 19 bp, Mus musculus
  siRNA target sequence for Pla1a (NM_134102.2,597-615).
gcgggctgcggatgctaat

SEQ ID NO: 622479 - DNA, 19 bp, Mus musculus
  siRNA target sequence for Pla1a (NM_134102.2,600-618).
ggctgcggatgctaatgta

SEQ ID NO: 622480 - DNA, 19 bp, Mus musculus
  siRNA target sequence for Pla1a (NM_134102.2,601-619).
gctgcggatgctaatgtaa

SEQ ID NO: 622481 - DNA, 19 bp, Mus musculus
  siRNA target sequence for Pla1a (NM_134102.2,602-620).
ctgcggatgctaatgtaat

SEQ ID NO: 622482 - DNA, 19 bp, Mus musculus
  siRNA target sequence for Pla1a (NM_134102.2,624-642).
ggtggactgggtttatggt

SEQ ID NO: 622483 - DNA, 19 bp, Mus musculus
  siRNA target sequence for Pla1a (NM_134102.2,625-643).
gtggactgggtttatggtt

SEQ ID NO: 622484 - DNA, 19 bp, Mus musculus
  siRNA target sequence for Pla1a (NM_134102.2,641-659).
gttctacgggcgtgtacta

SEQ ID NO: 622485 - DNA, 19 bp, Mus musculus
  siRNA target sequence for Pla1a (NM_134102.2,785-803).
gaggcatggtgggacattt

SEQ ID NO: 622486 - DNA, 19 bp, Mus musculus
  siRNA target sequence for Pla1a (NM_134102.2,788-806).
gcatggtgggacatttcta

SEQ ID NO: 622487 - DNA, 19 bp, Mus musculus
  siRNA target sequence for Pla1a (NM_134102.2,792-810).
ggtgggacatttctacaaa

SEQ ID NO: 622488 - DNA, 19 bp, Mus musculus
  siRNA target sequence for Pla1a (NM_134102.2,893-911).
gagacgccctgtttgtaga

SEQ ID NO: 622489 - DNA, 19 bp, Mus musculus
  siRNA target sequence for Pla1a (NM_134102.2,1014-1032).
ctttcacgcaggttacaat

SEQ ID NO: 622490 - DNA, 19 bp, Mus musculus
  siRNA target sequence for Pla1a (NM_134102.2,1018-1036).
cacgcaggttacaattact

SEQ ID NO: 622491 - DNA, 19 bp, Mus musculus
  siRNA target sequence for Pla1a (NM_134102.2,1021-1039).
gcaggttacaattacttga

SEQ ID NO: 622492 - DNA, 19 bp, Mus musculus
  siRNA target sequence for Pla1a (NM_134102.2,1022-1040).
caggttacaattacttgat

SEQ ID NO: 622493 - DNA, 19 bp, Mus musculus
  siRNA target sequence for Pla1a (NM_134102.2,1057-1075).
gcagtacacctctacatca

SEQ ID NO: 622494 - DNA, 19 bp, Mus musculus
  siRNA target sequence for Pla1a (NM_134102.2,1142-1160).
gagactgtctggattgctt

SEQ ID NO: 622495 - DNA, 19 bp, Mus musculus
  siRNA target sequence for Pla1a (NM_134102.2,1144-1162).
gactgtctggattgcttta

SEQ ID NO: 622496 - DNA, 19 bp, Mus musculus
  siRNA target sequence for Pla1a (NM_134102.2,1226-1244).
cgctccccaaggaagtgaa

SEQ ID NO: 622497 - DNA, 19 bp, Mus musculus
  siRNA target sequence for Pla1a (NM_134102.2,1232-1250).
ccaaggaagtgaaggttta

SEQ ID NO: 622498 - DNA, 19 bp, Mus musculus
  siRNA target sequence for Pla1a (NM_134102.2,1246-1264).
gtttatctcctgactacat

SEQ ID NO: 622499 - DNA, 19 bp, Mus musculus
  siRNA target sequence for Pla1a (NM_134102.2,1418-1436).
gggtcatggctcatcctaa

SEQ ID NO: 622500 - DNA, 19 bp, Mus musculus
  siRNA target sequence for Pla1a (NM_134102.2,1439-1457).
cacagtgccagataaacca

SEQ ID NO: 622501 - DNA, 19 bp, Mus musculus
  siRNA target sequence for Pla1a (NM_134102.2,1486-1504).
cgggtttggagaaaagaca

SEQ ID NO: 622502 - DNA, 19 bp, Mus musculus
  siRNA target sequence for Pla1a (NM_134102.2,1510-1528).
cctgttgttgggactttct

SEQ ID NO: 622503 - DNA, 19 bp, Mus musculus
  siRNA target sequence for Pla1a (NM_134102.2,1535-1553).
cccctctgccggtcaatga

SEQ ID NO: 622504 - DNA, 19 bp, Mus musculus
  siRNA target sequence for Pla1a (NM_134102.2,1537-1555).
cctctgccggtcaatgaca

SEQ ID NO: 622505 - DNA, 19 bp, Mus musculus
  siRNA target sequence for Pld3 (NM_011116.1,471-489).
gggagaactgcccttgaat

SEQ ID NO: 622506 - DNA, 19 bp, Mus musculus
  siRNA target sequence for Pld3 (NM_011116.1,596-614).
gggaatacggggacttaca

SEQ ID NO: 622507 - DNA, 19 bp, Mus musculus
  siRNA target sequence for Pld3 (NM_011116.1,603-621).
cggggacttacatctattt

SEQ ID NO: 622508 - DNA, 19 bp, Mus musculus
  siRNA target sequence for Pld3 (NM_011116.1,778-796).
gacatcgcatccttctact

SEQ ID NO: 622509 - DNA, 19 bp, Mus musculus
  siRNA target sequence for Pld3 (NM_011116.1,795-813).
ctggaccctcacaaataat

SEQ ID NO: 622510 - DNA, 19 bp, Mus musculus
  siRNA target sequence for Pld3 (NM_011116.1,881-899).
cacctcgaggtgtaaaggt

SEQ ID NO: 622511 - DNA, 19 bp, Mus musculus
  siRNA target sequence for Pld3 (NM_011116.1,1214-1232).
cctttgacacccgatataa

SEQ ID NO: 622512 - DNA, 19 bp, Mus musculus
  siRNA target sequence for Pld3 (NM_011116.1,1215-1233).
ctttgacacccgatataat

SEQ ID NO: 622513 - DNA, 19 bp, Mus musculus
  siRNA target sequence for Pld3 (NM_011116.1,1221-1239).
cacccgatataatcaagaa

SEQ ID NO: 622514 - DNA, 19 bp, Mus musculus
  siRNA target sequence for Pld3 (NM_011116.1,1224-1242).
ccgatataatcaagaaaca

SEQ ID NO: 622515 - DNA, 19 bp, Mus musculus
  siRNA target sequence for Pld3 (NM_011116.1,1363-1381).
gcccgaagcttcatctaca

SEQ ID NO: 622516 - DNA, 19 bp, Mus musculus
  siRNA target sequence for Pld3 (NM_011116.1,1364-1382).
cccgaagcttcatctacat

SEQ ID NO: 622517 - DNA, 19 bp, Mus musculus
  siRNA target sequence for Pld3 (NM_011116.1,1365-1383).
ccgaagcttcatctacatt

SEQ ID NO: 622518 - DNA, 19 bp, Mus musculus
  siRNA target sequence for Pld3 (NM_011116.1,1458-1476).
gagacgggctgcgtatgaa

SEQ ID NO: 622519 - DNA, 19 bp, Mus musculus
  siRNA target sequence for Pld3 (NM_011116.1,1583-1601).
ccgacatccaggtgaaact

SEQ ID NO: 622520 - DNA, 19 bp, Mus musculus
  siRNA target sequence for Pld3 (NM_011116.1,1648-1666).
cgtgtcaaccacaacaagt

SEQ ID NO: 622521 - DNA, 19 bp, Mus musculus
  siRNA target sequence for Pld3 (NM_011116.1,1651-1669).
gtcaaccacaacaagtaca

SEQ ID NO: 622522 - DNA, 19 bp, Mus musculus
  siRNA target sequence for Pld3 (NM_011116.1,1676-1694).
ctgaacgtgcctcatacat

SEQ ID NO: 622523 - DNA, 19 bp, Mus musculus
  siRNA target sequence for Pld3 (NM_011116.1,1681-1699).
cgtgcctcatacattggaa

SEQ ID NO: 622524 - DNA, 19 bp, Mus musculus
  siRNA target sequence for Pnliprp1 (NM_018874.1,172-190).
gacaatccctcttttccta

SEQ ID NO: 622525 - DNA, 19 bp, Mus musculus
  siRNA target sequence for Pnliprp1 (NM_018874.1,224-242).
gacaaccttggatgctttt

SEQ ID NO: 622526 - DNA, 19 bp, Mus musculus
  siRNA target sequence for Pnliprp1 (NM_018874.1,270-288).
ctatcaggcccctaaaact

SEQ ID NO: 622527 - DNA, 19 bp, Mus musculus
  siRNA target sequence for Pnliprp1 (NM_018874.1,388-406).
cattgaggcctccaatttt

SEQ ID NO: 622528 - DNA, 19 bp, Mus musculus
  siRNA target sequence for Pnliprp1 (NM_018874.1,417-435).
ggaagactcggttcatcat

SEQ ID NO: 622529 - DNA, 19 bp, Mus musculus
  siRNA target sequence for Pnliprp1 (NM_018874.1,611-629).
gacatccttgtgagaaact

SEQ ID NO: 622530 - DNA, 19 bp, Mus musculus
  siRNA target sequence for Pnliprp1 (NM_018874.1,620-638).
gtgagaaacttcaactact

SEQ ID NO: 622531 - DNA, 19 bp, Mus musculus
  siRNA target sequence for Pnliprp1 (NM_018874.1,710-728).
ccaggtcttggcaggatta

SEQ ID NO: 622532 - DNA, 19 bp, Mus musculus
  siRNA target sequence for Pnliprp1 (NM_018874.1,737-755).
gatcctgtagaagcaaatt

SEQ ID NO: 622533 - DNA, 19 bp, Mus musculus
  siRNA target sequence for Pnliprp1 (NM_018874.1,790-808).
ctcggatgctgactttgtt

SEQ ID NO: 622534 - DNA, 19 bp, Mus musculus
  siRNA target sequence for Pnliprp1 (NM_018874.1,792-810).
cggatgctgactttgttga

SEQ ID NO: 622535 - DNA, 19 bp, Mus musculus
  siRNA target sequence for Pnliprp1 (NM_018874.1,894-912).
ccaacggaggacagtacat

SEQ ID NO: 622536 - DNA, 19 bp, Mus musculus
  siRNA target sequence for Pnliprp1 (NM_018874.1,928-946).
gaacgctctgtcacagatt

SEQ ID NO: 622537 - DNA, 19 bp, Mus musculus
  siRNA target sequence for Pnliprp1 (NM_018874.1,969-987).
caggaacccgggactttgt

SEQ ID NO: 622538 - DNA, 19 bp, Mus musculus
  siRNA target sequence for Pnliprp1 (NM_018874.1,1068-1086).
cttcctacagggactttga

SEQ ID NO: 622539 - DNA, 19 bp, Mus musculus
  siRNA target sequence for Pnliprp1 (NM_018874.1,1077-1095).
gggactttgagtctaacaa

SEQ ID NO: 622540 - DNA, 19 bp, Mus musculus
  siRNA target sequence for Pnliprp1 (NM_018874.1,1099-1117).
cttcccctgcccagatcaa

SEQ ID NO: 622541 - DNA, 19 bp, Mus musculus
  siRNA target sequence for Pnliprp1 (NM_018874.1,1133-1151).
ggtcactatgctgataagt

SEQ ID NO: 622542 - DNA, 19 bp, Mus musculus
  siRNA target sequence for Pnliprp1 (NM_018874.1,1169-1187).
gtggagccacagaagttct

SEQ ID NO: 622543 - DNA, 19 bp, Mus musculus
  siRNA target sequence for Pnliprp1 (NM_018874.1,1224-1242).
ggaggtaccgtgtttcctt

SEQ ID NO: 622544 - DNA, 19 bp, Mus musculus
  siRNA target sequence for Pnliprp1 (NM_018874.1,1260-1278).
cggtcacaggccaagtcaa

SEQ ID NO: 622545 - DNA, 19 bp, Mus musculus
  siRNA target sequence for Pnliprp1 (NM_018874.1,1261-1279).
ggtcacaggccaagtcaaa

SEQ ID NO: 622546 - DNA, 19 bp, Mus musculus
  siRNA target sequence for Pnliprp1 (NM_018874.1,1308-1326).
ctcgccagtgtgatatctt

SEQ ID NO: 622547 - DNA, 19 bp, Mus musculus
  siRNA target sequence for Pnliprp1 (NM_018874.1,1344-1362).
ccggtgctacgcattccaa

SEQ ID NO: 622548 - DNA, 19 bp, Mus musculus
  siRNA target sequence for Pnliprp1 (NM_018874.1,1345-1363).
cggtgctacgcattccaat

SEQ ID NO: 622549 - DNA, 19 bp, Mus musculus
  siRNA target sequence for Pnliprp1 (NM_018874.1,1349-1367).
gctacgcattccaatgagt

SEQ ID NO: 622550 - DNA, 19 bp, Mus musculus
  siRNA target sequence for Pnliprp1 (NM_018874.1,1378-1396).
gcttgatgtgggaacaatt

SEQ ID NO: 622551 - DNA, 19 bp, Mus musculus
  siRNA target sequence for Pnliprp1 (NM_018874.1,1382-1400).
gatgtgggaacaattgaga

SEQ ID NO: 622552 - DNA, 19 bp, Mus musculus
  siRNA target sequence for Pnliprp1 (NM_018874.1,1416-1434).
ggaataaccacgtggtaaa

SEQ ID NO: 622553 - DNA, 19 bp, Mus musculus
  siRNA target sequence for Pnliprp1 (NM_018874.1,1451-1469).
gtgggcgcagccaagatca

SEQ ID NO: 622554 - DNA, 19 bp, Mus musculus
  siRNA target sequence for Pnliprp1 (NM_018874.1,1490-1508).
cggacagagcacaacttct

SEQ ID NO: 622555 - DNA, 19 bp, Mus musculus
  siRNA target sequence for Serac1 (NM_177311.2,158-176).
cctttgctccccgatcaaa

SEQ ID NO: 622556 - DNA, 19 bp, Mus musculus
  siRNA target sequence for Serac1 (NM_177311.2,159-177).
ctttgctccccgatcaaaa

SEQ ID NO: 622557 - DNA, 19 bp, Mus musculus
  siRNA target sequence for Serac1 (NM_177311.2,181-199).
cgcacgccctggagaaata

SEQ ID NO: 622558 - DNA, 19 bp, Mus musculus
  siRNA target sequence for Serac1 (NM_177311.2,182-200).
gcacgccctggagaaatat

SEQ ID NO: 622559 - DNA, 19 bp, Mus musculus
  siRNA target sequence for Serac1 (NM_177311.2,191-209).
ggagaaatatccgaaatat

SEQ ID NO: 622560 - DNA, 19 bp, Mus musculus
  siRNA target sequence for Serac1 (NM_177311.2,192-210).
gagaaatatccgaaatata

SEQ ID NO: 622561 - DNA, 19 bp, Mus musculus
  siRNA target sequence for Serac1 (NM_177311.2,194-212).
gaaatatccgaaatataat

SEQ ID NO: 622562 - DNA, 19 bp, Mus musculus
  siRNA target sequence for Serac1 (NM_177311.2,201-219).
ccgaaatataataagattt

SEQ ID NO: 622563 - DNA, 19 bp, Mus musculus
  siRNA target sequence for Serac1 (NM_177311.2,231-249).
cattgtagggggttctcta

SEQ ID NO: 622564 - DNA, 19 bp, Mus musculus
  siRNA target sequence for Serac1 (NM_177311.2,235-253).
gtagggggttctctattta

SEQ ID NO: 622565 - DNA, 19 bp, Mus musculus
  siRNA target sequence for Serac1 (NM_177311.2,238-256).
gggggttctctatttatta

SEQ ID NO: 622566 - DNA, 19 bp, Mus musculus
  siRNA target sequence for Serac1 (NM_177311.2,240-258).
gggttctctatttattaca

SEQ ID NO: 622567 - DNA, 19 bp, Mus musculus
  siRNA target sequence for Serac1 (NM_177311.2,241-259).
ggttctctatttattacat

SEQ ID NO: 622568 - DNA, 19 bp, Mus musculus
  siRNA target sequence for Serac1 (NM_177311.2,313-331).
cgagaaaaaatgaagtctt

SEQ ID NO: 622569 - DNA, 19 bp, Mus musculus
  siRNA target sequence for Serac1 (NM_177311.2,352-370).
cctgtagacaggttagaca

SEQ ID NO: 622570 - DNA, 19 bp, Mus musculus
  siRNA target sequence for Serac1 (NM_177311.2,367-385).
gacaaccgtgactctttca

SEQ ID NO: 622571 - DNA, 19 bp, Mus musculus
  siRNA target sequence for Serac1 (NM_177311.2,469-487).
caggccgtgcgtgaaatgt

SEQ ID NO: 622572 - DNA, 19 bp, Mus musculus
  siRNA target sequence for Serac1 (NM_177311.2,471-489).
ggccgtgcgtgaaatgtca

SEQ ID NO: 622573 - DNA, 19 bp, Mus musculus
  siRNA target sequence for Serac1 (NM_177311.2,513-531).
ccagtacaggataattgct

SEQ ID NO: 622574 - DNA, 19 bp, Mus musculus
  siRNA target sequence for Serac1 (NM_177311.2,543-561).
cccgaggacccttattggt

SEQ ID NO: 622575 - DNA, 19 bp, Mus musculus
  siRNA target sequence for Serac1 (NM_177311.2,544-562).
ccgaggacccttattggtt

SEQ ID NO: 622576 - DNA, 19 bp, Mus musculus
  siRNA target sequence for Serac1 (NM_177311.2,545-563).
cgaggacccttattggttt

SEQ ID NO: 622577 - DNA, 19 bp, Mus musculus
  siRNA target sequence for Serac1 (NM_177311.2,581-599).
gtgatcttcggttttttct

SEQ ID NO: 622578 - DNA, 19 bp, Mus musculus
  siRNA target sequence for Serac1 (NM_177311.2,792-810).
gccttacgcagaaagcttt

SEQ ID NO: 622579 - DNA, 19 bp, Mus musculus
  siRNA target sequence for Serac1 (NM_177311.2,845-863).
gtttagaagccatagtaaa

SEQ ID NO: 622580 - DNA, 19 bp, Mus musculus
  siRNA target sequence for Serac1 (NM_177311.2,998-1016).
ctttgaacgagcatcttca

SEQ ID NO: 622581 - DNA, 19 bp, Mus musculus
  siRNA target sequence for Serac1 (NM_177311.2,1181-1199).
ggacaagtcagcccattaa

SEQ ID NO: 622582 - DNA, 19 bp, Mus musculus
  siRNA target sequence for Serac1 (NM_177311.2,1202-1220).
ccgatgtcctttttattca

SEQ ID NO: 622583 - DNA, 19 bp, Mus musculus
  siRNA target sequence for Serac1 (NM_177311.2,1297-1315).
gatgaagacaggtacacta

SEQ ID NO: 622584 - DNA, 19 bp, Mus musculus
  siRNA target sequence for Serac1 (NM_177311.2,1300-1318).
gaagacaggtacactacat

SEQ ID NO: 622585 - DNA, 19 bp, Mus musculus
  siRNA target sequence for Serac1 (NM_177311.2,1350-1368).
cccctcacttcgcatcata

SEQ ID NO: 622586 - DNA, 19 bp, Mus musculus
  siRNA target sequence for Serac1 (NM_177311.2,1351-1369).
ccctcacttcgcatcatat

SEQ ID NO: 622587 - DNA, 19 bp, Mus musculus
  siRNA target sequence for Serac1 (NM_177311.2,1353-1371).
ctcacttcgcatcatatct

SEQ ID NO: 622588 - DNA, 19 bp, Mus musculus
  siRNA target sequence for Serac1 (NM_177311.2,1355-1373).
cacttcgcatcatatctgt

SEQ ID NO: 622589 - DNA, 19 bp, Mus musculus
  siRNA target sequence for Serac1 (NM_177311.2,1409-1427).
ggtgccctatggagagaaa

SEQ ID NO: 622590 - DNA, 19 bp, Mus musculus
  siRNA target sequence for Serac1 (NM_177311.2,1420-1438).
gagagaaagtcgattgcat

SEQ ID NO: 622591 - DNA, 19 bp, Mus musculus
  siRNA target sequence for Serac1 (NM_177311.2,1483-1501).
ggggataggccaatgattt

SEQ ID NO: 622592 - DNA, 19 bp, Mus musculus
  siRNA target sequence for Serac1 (NM_177311.2,1486-1504).
gataggccaatgatttgga

SEQ ID NO: 622593 - DNA, 19 bp, Mus musculus
  siRNA target sequence for Serac1 (NM_177311.2,1512-1530).
cagcatgggaggtcttctt

SEQ ID NO: 622594 - DNA, 19 bp, Mus musculus
  siRNA target sequence for Serac1 (NM_177311.2,1514-1532).
gcatgggaggtcttcttgt

SEQ ID NO: 622595 - DNA, 19 bp, Mus musculus
  siRNA target sequence for Serac1 (NM_177311.2,1543-1561).
ctgttggaagcctctaaga

SEQ ID NO: 622596 - DNA, 19 bp, Mus musculus
  siRNA target sequence for Serac1 (NM_177311.2,1556-1574).
ctaagaagcccgaactgaa

SEQ ID NO: 622597 - DNA, 19 bp, Mus musculus
  siRNA target sequence for Serac1 (NM_177311.2,1565-1583).
ccgaactgaatgctcttat

SEQ ID NO: 622598 - DNA, 19 bp, Mus musculus
  siRNA target sequence for Serac1 (NM_177311.2,1566-1584).
cgaactgaatgctcttata

SEQ ID NO: 622599 - DNA, 19 bp, Mus musculus
  siRNA target sequence for Serac1 (NM_177311.2,1567-1585).
gaactgaatgctcttataa

SEQ ID NO: 622600 - DNA, 19 bp, Mus musculus
  siRNA target sequence for Serac1 (NM_177311.2,1576-1594).
gctcttataaacaatacca

SEQ ID NO: 622601 - DNA, 19 bp, Mus musculus
  siRNA target sequence for Serac1 (NM_177311.2,1628-1646).
ggtcacgtttggctgaata

SEQ ID NO: 622602 - DNA, 19 bp, Mus musculus
  siRNA target sequence for Serac1 (NM_177311.2,1638-1656).
ggctgaatactccgttaat

SEQ ID NO: 622603 - DNA, 19 bp, Mus musculus
  siRNA target sequence for Serac1 (NM_177311.2,1640-1658).
ctgaatactccgttaatat

SEQ ID NO: 622604 - DNA, 19 bp, Mus musculus
  siRNA target sequence for Serac1 (NM_177311.2,1647-1665).
ctccgttaatattcgatat

SEQ ID NO: 622605 - DNA, 19 bp, Mus musculus
  siRNA target sequence for Serac1 (NM_177311.2,1649-1667).
ccgttaatattcgatatct

SEQ ID NO: 622606 - DNA, 19 bp, Mus musculus
  siRNA target sequence for Serac1 (NM_177311.2,1650-1668).
cgttaatattcgatatctt

SEQ ID NO: 622607 - DNA, 19 bp, Mus musculus
  siRNA target sequence for Serac1 (NM_177311.2,1724-1742).
cgctacaggacgactttct

SEQ ID NO: 622608 - DNA, 19 bp, Mus musculus
  siRNA target sequence for Serac1 (NM_177311.2,1741-1759).
ctggagttcgcgaaagaca

SEQ ID NO: 622609 - DNA, 19 bp, Mus musculus
  siRNA target sequence for Serac1 (NM_177311.2,1770-1788).
ggtgctgaactttgtagaa

SEQ ID NO: 622610 - DNA, 19 bp, Mus musculus
  siRNA target sequence for Serac1 (NM_177311.2,1786-1804).
gaaacacaaccgacattta

SEQ ID NO: 622611 - DNA, 19 bp, Mus musculus
  siRNA target sequence for Serac1 (NM_177311.2,1836-1854).
cgtggagtcagcagattta

SEQ ID NO: 622612 - DNA, 19 bp, Mus musculus
  siRNA target sequence for Serac1 (NM_177311.2,1879-1897).
gacgtcaaccacttgaaca

SEQ ID NO: 622613 - DNA, 19 bp, Mus musculus
  siRNA target sequence for Serac1 (NM_177311.2,1881-1899).
cgtcaaccacttgaacatt

SEQ ID NO: 622614 - DNA, 19 bp, Mus musculus
  siRNA target sequence for Serac1 (NM_177311.2,1913-1931).
caaaggatgcgtttttgta

SEQ ID NO: 622615 - DNA, 19 bp, Mus musculus
  siRNA target sequence for Serac1 (NM_177311.2,1936-1954).
cgtactctacagttcatct

SEQ ID NO: 622616 - DNA, 19 bp, Mus musculus
  siRNA target sequence for Serac1 (NM_177311.2,1945-1963).
cagttcatctgcgaaactt

SEQ ID NO: 622617 - DNA, 19 bp, Mus musculus
  siRNA target sequence for Serac1 (NM_177311.2,1947-1965).
gttcatctgcgaaacttta

SEQ ID NO: 622618 - DNA, 19 bp, Mus musculus
  siRNA target sequence for Serac1 (NM_177311.2,1961-1979).
ctttagccagagatcttga

SEQ ID NO: 622619 - DNA, 19 bp, Mus musculus
  siRNA target sequence for Slc27a1 (NM_011977.2,243-261).
cactggcgctgctttggtt

SEQ ID NO: 622620 - DNA, 19 bp, Mus musculus
  siRNA target sequence for Slc27a1 (NM_011977.2,493-511).
ggacgccagtagtggtata

SEQ ID NO: 622621 - DNA, 19 bp, Mus musculus
  siRNA target sequence for Slc27a1 (NM_011977.2,494-512).
gacgccagtagtggtatat

SEQ ID NO: 622622 - DNA, 19 bp, Mus musculus
  siRNA target sequence for Slc27a1 (NM_011977.2,497-515).
gccagtagtggtatatgct

SEQ ID NO: 622623 - DNA, 19 bp, Mus musculus
  siRNA target sequence for Slc27a1 (NM_011977.2,795-813).
ggaagagcctcctcaagtt

SEQ ID NO: 622624 - DNA, 19 bp, Mus musculus
  siRNA target sequence for Slc27a1 (NM_011977.2,929-947).
gatcggctgttttacatct

SEQ ID NO: 622625 - DNA, 19 bp, Mus musculus
  siRNA target sequence for Slc27a1 (NM_011977.2,932-950).
cggctgttttacatctata

SEQ ID NO: 622626 - DNA, 19 bp, Mus musculus
  siRNA target sequence for Slc27a1 (NM_011977.2,934-952).
gctgttttacatctatact

SEQ ID NO: 622627 - DNA, 19 bp, Mus musculus
  siRNA target sequence for Slc27a1 (NM_011977.2,1139-1157).
gtactgcgcaagaagttct

SEQ ID NO: 622628 - DNA, 19 bp, Mus musculus
  siRNA target sequence for Slc27a1 (NM_011977.2,1178-1196).
gactgtgtcaagtacaatt

SEQ ID NO: 622629 - DNA, 19 bp, Mus musculus
  siRNA target sequence for Slc27a1 (NM_011977.2,1197-1215).
gcacggtagtgcagtacat

SEQ ID NO: 622630 - DNA, 19 bp, Mus musculus
  siRNA target sequence for Slc27a1 (NM_011977.2,1198-1216).
cacggtagtgcagtacata

SEQ ID NO: 622631 - DNA, 19 bp, Mus musculus
  siRNA target sequence for Slc27a1 (NM_011977.2,1347-1365).
cacagatcggcgagttcta

SEQ ID NO: 622632 - DNA, 19 bp, Mus musculus
  siRNA target sequence for Slc27a1 (NM_011977.2,1437-1455).
gtatcctcacgcatgtgta

SEQ ID NO: 622633 - DNA, 19 bp, Mus musculus
  siRNA target sequence for Slc27a1 (NM_011977.2,1464-1482).
gtctggtcaaggtcaatga

SEQ ID NO: 622634 - DNA, 19 bp, Mus musculus
  siRNA target sequence for Slc27a1 (NM_011977.2,1585-1603).
gcggcgtttcgatggttat

SEQ ID NO: 622635 - DNA, 19 bp, Mus musculus
  siRNA target sequence for Slc27a1 (NM_011977.2,1587-1605).
ggcgtttcgatggttatgt

SEQ ID NO: 622636 - DNA, 19 bp, Mus musculus
  siRNA target sequence for Slc27a1 (NM_011977.2,1588-1606).
gcgtttcgatggttatgtt

SEQ ID NO: 622637 - DNA, 19 bp, Mus musculus
  siRNA target sequence for Slc27a1 (NM_011977.2,1589-1607).
cgtttcgatggttatgtta

SEQ ID NO: 622638 - DNA, 19 bp, Mus musculus
  siRNA target sequence for Slc27a1 (NM_011977.2,1924-1942).
gaaggttcttgcatcctat

SEQ ID NO: 622639 - DNA, 19 bp, Mus musculus
  siRNA target sequence for Slc27a1 (NM_011977.2,2074-2092).
gaagcagggacgctatgta

SEQ ID NO: 622640 - DNA, 19 bp, Mus musculus
  siRNA target sequence for Slc27a5 (NM_009512.1,91-109).
gggtatttggaagaaacta

SEQ ID NO: 622641 - DNA, 19 bp, Mus musculus
  siRNA target sequence for Slc27a5 (NM_009512.1,288-306).
gagcagctcttaccttatt

SEQ ID NO: 622642 - DNA, 19 bp, Mus musculus
  siRNA target sequence for Slc27a5 (NM_009512.1,293-311).
gctcttaccttattcctat

SEQ ID NO: 622643 - DNA, 19 bp, Mus musculus
  siRNA target sequence for Slc27a5 (NM_009512.1,377-395).
cttttctatggcctaaagt

SEQ ID NO: 622644 - DNA, 19 bp, Mus musculus
  siRNA target sequence for Slc27a5 (NM_009512.1,399-417).
ggcgacgccttaacaaaca

SEQ ID NO: 622645 - DNA, 19 bp, Mus musculus
  siRNA target sequence for Slc27a5 (NM_009512.1,400-418).
gcgacgccttaacaaacat

SEQ ID NO: 622646 - DNA, 19 bp, Mus musculus
  siRNA target sequence for Slc27a5 (NM_009512.1,502-520).
gggctcctcaatcacaaat

SEQ ID NO: 622647 - DNA, 19 bp, Mus musculus
  siRNA target sequence for Slc27a5 (NM_009512.1,503-521).
ggctcctcaatcacaaata

SEQ ID NO: 622648 - DNA, 19 bp, Mus musculus
  siRNA target sequence for Slc27a5 (NM_009512.1,581-599).
gccgtaatccagaacacaa

SEQ ID NO: 622649 - DNA, 19 bp, Mus musculus
  siRNA target sequence for Slc27a5 (NM_009512.1,623-641).
ctcccgtccaagaccattt

SEQ ID NO: 622650 - DNA, 19 bp, Mus musculus
  siRNA target sequence for Slc27a5 (NM_009512.1,625-643).
cccgtccaagaccatttct

SEQ ID NO: 622651 - DNA, 19 bp, Mus musculus
  siRNA target sequence for Slc27a5 (NM_009512.1,808-826).
gctgctagctgagaacatt

SEQ ID NO: 622652 - DNA, 19 bp, Mus musculus
  siRNA target sequence for Slc27a5 (NM_009512.1,812-830).
ctagctgagaacattcact

SEQ ID NO: 622653 - DNA, 19 bp, Mus musculus
  siRNA target sequence for Slc27a5 (NM_009512.1,919-937).
cagccttcgagctacgatt

SEQ ID NO: 622654 - DNA, 19 bp, Mus musculus
  siRNA target sequence for Slc27a5 (NM_009512.1,921-939).
gccttcgagctacgattaa

SEQ ID NO: 622655 - DNA, 19 bp, Mus musculus
  siRNA target sequence for Slc27a5 (NM_009512.1,929-947).
gctacgattaagtggaaat

SEQ ID NO: 622656 - DNA, 19 bp, Mus musculus
  siRNA target sequence for Slc27a5 (NM_009512.1,948-966).
ctcctgccatattcatctt

SEQ ID NO: 622657 - DNA, 19 bp, Mus musculus
  siRNA target sequence for Slc27a5 (NM_009512.1,950-968).
cctgccatattcatcttta

SEQ ID NO: 622658 - DNA, 19 bp, Mus musculus
  siRNA target sequence for Slc27a5 (NM_009512.1,955-973).
catattcatctttacttca

SEQ ID NO: 622659 - DNA, 19 bp, Mus musculus
  siRNA target sequence for Slc27a5 (NM_009512.1,994-1012).
gccagccatcttatcacat

SEQ ID NO: 622660 - DNA, 19 bp, Mus musculus
  siRNA target sequence for Slc27a5 (NM_009512.1,1062-1080).
ctgatgatgtggtctatga

SEQ ID NO: 622661 - DNA, 19 bp, Mus musculus
  siRNA target sequence for Slc27a5 (NM_009512.1,1082-1100).
gtcctacctctgtaccata

SEQ ID NO: 622662 - DNA, 19 bp, Mus musculus
  siRNA target sequence for Slc27a5 (NM_009512.1,2106-2124).
gtctgatgccagatgtgta

SEQ ID NO: 622663 - DNA, 19 bp, Mus musculus
  siRNA target sequence for Uble1a (NM_019748.1,272-290).
cctggagctcagttcttga

SEQ ID NO: 622664 - DNA, 19 bp, Mus musculus
  siRNA target sequence for Uble1a (NM_019748.1,278-296).
gctcagttcttgattcaga

SEQ ID NO: 622665 - DNA, 19 bp, Mus musculus
  siRNA target sequence for Uble1a (NM_019748.1,357-375).
ccatggtggatgtaaaggt

SEQ ID NO: 622666 - DNA, 19 bp, Mus musculus
  siRNA target sequence for Uble1a (NM_019748.1,406-424).
gtccttcttcacgaagttt

SEQ ID NO: 622667 - DNA, 19 bp, Mus musculus
  siRNA target sequence for Uble1a (NM_019748.1,409-427).
cttcttcacgaagtttgat

SEQ ID NO: 622668 - DNA, 19 bp, Mus musculus
  siRNA target sequence for Uble1a (NM_019748.1,535-553).
gtacacctttgcgaatctt

SEQ ID NO: 622669 - DNA, 19 bp, Mus musculus
  siRNA target sequence for Uble1a (NM_019748.1,785-803).
ctgaaattccgcacagata

SEQ ID NO: 622670 - DNA, 19 bp, Mus musculus
  siRNA target sequence for Uble1a (NM_019748.1,863-881).
cggaatgacgtgtttgact

SEQ ID NO: 622671 - DNA, 19 bp, Mus musculus
  siRNA target sequence for Uble1a (NM_019748.1,1013-1031).
cctcctcacaacaacttct

SEQ ID NO: 622672 - DNA, 19 bp, Mus musculus
  siRNA target sequence for Uxs1 (NM_026430.1,143-161).
gtttggggcaactttgtta

SEQ ID NO: 622673 - DNA, 19 bp, Mus musculus
  siRNA target sequence for Uxs1 (NM_026430.1,697-715).
ctactggggccatgtgaat

SEQ ID NO: 622674 - DNA, 19 bp, Mus musculus
  siRNA target sequence for Uxs1 (NM_026430.1,726-744).
cccgagcctgctatgatga

SEQ ID NO: 622675 - DNA, 19 bp, Mus musculus
  siRNA target sequence for Uxs1 (NM_026430.1,806-824).
cgggtggcaaggatcttca

SEQ ID NO: 622676 - DNA, 19 bp, Mus musculus
  siRNA target sequence for Uxs1 (NM_026430.1,834-852).
ggccgagaatgcacatgaa

SEQ ID NO: 622677 - DNA, 19 bp, Mus musculus
  siRNA target sequence for Uxs1 (NM_026430.1,838-856).
gagaatgcacatgaatgat

SEQ ID NO: 622678 - DNA, 19 bp, Mus musculus
  siRNA target sequence for Uxs1 (NM_026430.1,865-883).
ggtcagcaacttcatctta

SEQ ID NO: 622679 - DNA, 19 bp, Mus musculus
  siRNA target sequence for Uxs1 (NM_026430.1,877-895).
catcttacaagcactacaa

SEQ ID NO: 622680 - DNA, 19 bp, Mus musculus
  siRNA target sequence for Uxs1 (NM_026430.1,935-953).
cgggcattccagtacgtaa

SEQ ID NO: 622681 - DNA, 19 bp, Mus musculus
  siRNA target sequence for Uxs1 (NM_026430.1,939-957).
cattccagtacgtaagtga

SEQ ID NO: 622682 - DNA, 19 bp, Mus musculus
  siRNA target sequence for Uxs1 (NM_026430.1,969-987).
gcctggtagcactgatgaa

SEQ ID NO: 622683 - DNA, 19 bp, Mus musculus
  siRNA target sequence for Uxs1 (NM_026430.1,971-989).
ctggtagcactgatgaaca

SEQ ID NO: 622684 - DNA, 19 bp, Mus musculus
  siRNA target sequence for Uxs1 (NM_026430.1,1033-1051).
cacaatcctggaatttgct

SEQ ID NO: 622685 - DNA, 19 bp, Mus musculus
  siRNA target sequence for Uxs1 (NM_026430.1,1039-1057).
cctggaatttgctcagtta

SEQ ID NO: 622686 - DNA, 19 bp, Mus musculus
  siRNA target sequence for Uxs1 (NM_026430.1,1040-1058).
ctggaatttgctcagttaa

SEQ ID NO: 622687 - DNA, 19 bp, Mus musculus
  siRNA target sequence for Uxs1 (NM_026430.1,1050-1068).
ctcagttaattaaaaacct

SEQ ID NO: 622688 - DNA, 19 bp, Mus musculus
  siRNA target sequence for Uxs1 (NM_026430.1,1077-1095).
gtggaagtgaaattcagtt

SEQ ID NO: 622689 - DNA, 19 bp, Mus musculus
  siRNA target sequence for Uxs1 (NM_026430.1,1211-1229).
cactacttccggaaggaat

SEQ ID NO: 622690 - DNA, 19 bp, Mus musculus
  siRNA target sequence for Opn1mw (NM_008106.1,85-103).
gcaagcatcttcacctata

SEQ ID NO: 622691 - DNA, 19 bp, Mus musculus
  siRNA target sequence for Opn1mw (NM_008106.1,117-135).
caccaaaggtccctttgaa

SEQ ID NO: 622692 - DNA, 19 bp, Mus musculus
  siRNA target sequence for Opn1mw (NM_008106.1,177-195).
caccagcacctggatgatt

SEQ ID NO: 622693 - DNA, 19 bp, Mus musculus
  siRNA target sequence for Opn1mw (NM_008106.1,400-418).
ggctacattgtctcattgt

SEQ ID NO: 622694 - DNA, 19 bp, Mus musculus
  siRNA target sequence for Opn1mw (NM_008106.1,402-420).
ctacattgtctcattgtgt

SEQ ID NO: 622695 - DNA, 19 bp, Mus musculus
  siRNA target sequence for Opn1mw (NM_008106.1,485-503).
cctttggcaatgtgagatt

SEQ ID NO: 622696 - DNA, 19 bp, Mus musculus
  siRNA target sequence for Opn1mw (NM_008106.1,540-558).
ctgggtctgggctgctata

SEQ ID NO: 622697 - DNA, 19 bp, Mus musculus
  siRNA target sequence for Opn1mw (NM_008106.1,854-872).
ggggaccctatactttctt

SEQ ID NO: 622698 - DNA, 19 bp, Mus musculus
  siRNA target sequence for Opn1mw (NM_008106.1,924-942).
ctccctaccatcctacttt

SEQ ID NO: 622699 - DNA, 19 bp, Mus musculus
  siRNA target sequence for Opn1mw (NM_008106.1,943-961).
gccaaaagtgccactatct

SEQ ID NO: 622700 - DNA, 19 bp, Mus musculus
  siRNA target sequence for Opn1mw (NM_008106.1,944-962).
ccaaaagtgccactatcta

SEQ ID NO: 622701 - DNA, 19 bp, Mus musculus
  siRNA target sequence for Opn1mw (NM_008106.1,996-1014).
gtttcgaaactgcatctta

SEQ ID NO: 622702 - DNA, 19 bp, Mus musculus
  siRNA target sequence for Opn3 (NM_010098.1,421-439).
gggttcgtttccattacca

SEQ ID NO: 622703 - DNA, 19 bp, Mus musculus
  siRNA target sequence for Opn3 (NM_010098.1,451-469).
ctggcctatgaacgttata

SEQ ID NO: 622704 - DNA, 19 bp, Mus musculus
  siRNA target sequence for Opn3 (NM_010098.1,481-499).
catgccagagtgatcaact

SEQ ID NO: 622705 - DNA, 19 bp, Mus musculus
  siRNA target sequence for Opn3 (NM_010098.1,579-597).
caggtacatcctagacata

SEQ ID NO: 622706 - DNA, 19 bp, Mus musculus
  siRNA target sequence for Opn3 (NM_010098.1,581-599).
ggtacatcctagacataca

SEQ ID NO: 622707 - DNA, 19 bp, Mus musculus
  siRNA target sequence for Opn3 (NM_010098.1,582-600).
gtacatcctagacatacat

SEQ ID NO: 622708 - DNA, 19 bp, Mus musculus
  siRNA target sequence for Opn3 (NM_010098.1,684-702).
ggtgcccgtgggcatcata

SEQ ID NO: 622709 - DNA, 19 bp, Mus musculus
  siRNA target sequence for Opn3 (NM_010098.1,695-713).
gcatcatagcccattgcta

SEQ ID NO: 622710 - DNA, 19 bp, Mus musculus
  siRNA target sequence for Opn3 (NM_010098.1,726-744).
ctattctgttcgaatgctt

SEQ ID NO: 622711 - DNA, 19 bp, Mus musculus
  siRNA target sequence for Opn3 (NM_010098.1,780-798).
caagatgctaagatatgaa

SEQ ID NO: 622712 - DNA, 19 bp, Mus musculus
  siRNA target sequence for Opn3 (NM_010098.1,805-823).
gtagcaaagatgtgctttt

SEQ ID NO: 622713 - DNA, 19 bp, Mus musculus
  siRNA target sequence for Opn3 (NM_010098.1,808-826).
gcaaagatgtgctttttga

SEQ ID NO: 622714 - DNA, 19 bp, Mus musculus
  siRNA target sequence for Opn3 (NM_010098.1,809-827).
caaagatgtgctttttgat

SEQ ID NO: 622715 - DNA, 19 bp, Mus musculus
  siRNA target sequence for Opn3 (NM_010098.1,848-866).
gctggatgccttacattgt

SEQ ID NO: 622716 - DNA, 19 bp, Mus musculus
  siRNA target sequence for Opn3 (NM_010098.1,1040-1058).
gccagcggcctgctaaaaa

SEQ ID NO: 622717 - DNA, 19 bp, Mus musculus
  siRNA target sequence for Opn3 (NM_010098.1,1064-1082).
cagcggctgagagtgaaat

SEQ ID NO: 622718 - DNA, 19 bp, Mus musculus
  siRNA target sequence for Opn3 (NM_010098.1,1067-1085).
cggctgagagtgaaatgca

SEQ ID NO: 622719 - DNA, 19 bp, Mus musculus
  siRNA target sequence for Opn3 (NM_010098.1,1220-1238).
catctaaggtcgatgtcat

SEQ ID NO: 622720 - DNA, 19 bp, Mus musculus
  siRNA target sequence for Opn4 (NM_013887.1,255-273).
ccctgcaaggcatttggaa

SEQ ID NO: 622721 - DNA, 19 bp, Mus musculus
  siRNA target sequence for Opn4 (NM_013887.1,377-395).
ccagaccatgctcactata

SEQ ID NO: 622722 - DNA, 19 bp, Mus musculus
  siRNA target sequence for Opn4 (NM_013887.1,431-449).
gggatgctgggcaatctga

SEQ ID NO: 622723 - DNA, 19 bp, Mus musculus
  siRNA target sequence for Opn4 (NM_013887.1,441-459).
gcaatctgacggtcatcta

SEQ ID NO: 622724 - DNA, 19 bp, Mus musculus
  siRNA target sequence for Opn4 (NM_013887.1,601-619).
gacaggttgcgagttctat

SEQ ID NO: 622725 - DNA, 19 bp, Mus musculus
  siRNA target sequence for Opn4 (NM_013887.1,715-733).
catcggcaggggatccaaa

SEQ ID NO: 622726 - DNA, 19 bp, Mus musculus
  siRNA target sequence for Opn4 (NM_013887.1,718-736).
cggcaggggatccaaaaga

SEQ ID NO: 622727 - DNA, 19 bp, Mus musculus
  siRNA target sequence for Opn4 (NM_013887.1,754-772).
gctaggcgtctggctttat

SEQ ID NO: 622728 - DNA, 19 bp, Mus musculus
  siRNA target sequence for Opn4 (NM_013887.1,1059-1077).
ccaaggtcgcactgattgt

SEQ ID NO: 622729 - DNA, 19 bp, Mus musculus
  siRNA target sequence for Opn4 (NM_013887.1,1063-1081).
ggtcgcactgattgtcatt

SEQ ID NO: 622730 - DNA, 19 bp, Mus musculus
  siRNA target sequence for Opn4 (NM_013887.1,1066-1084).
cgcactgattgtcattctt

SEQ ID NO: 622731 - DNA, 19 bp, Mus musculus
  siRNA target sequence for Opn4 (NM_013887.1,1203-1221).
ccatccacaatcccattat

SEQ ID NO: 622732 - DNA, 19 bp, Mus musculus
  siRNA target sequence for Opn4 (NM_013887.1,1282-1300).
ggtgcttctcggtgtatca

SEQ ID NO: 622733 - DNA, 19 bp, Mus musculus
  siRNA target sequence for Opn4 (NM_013887.1,1497-1515).
gcagtcagaacctagaaga

SEQ ID NO: 622734 - DNA, 19 bp, Mus musculus
  siRNA target sequence for Opn4 (NM_013887.1,1498-1516).
cagtcagaacctagaagat

SEQ ID NO: 622735 - DNA, 19 bp, Mus musculus
  siRNA target sequence for Opn4 (NM_013887.1,1546-1564).
ggtacagagatctaagact

SEQ ID NO: 622736 - DNA, 19 bp, Mus musculus
  siRNA target sequence for Opn4 (NM_013887.1,1702-1720).
gtttccccttgctttccta

SEQ ID NO: 622737 - DNA, 19 bp, Mus musculus
  siRNA target sequence for Rds (NM_008938.1,602-620).
ggcttacggactcaagaat

SEQ ID NO: 622738 - DNA, 19 bp, Mus musculus
  siRNA target sequence for Rds (NM_008938.1,657-675).
cggtgcttcatgaaaaaga

SEQ ID NO: 622739 - DNA, 19 bp, Mus musculus
  siRNA target sequence for Rds (NM_008938.1,727-745).
gggactggttcgagattca

SEQ ID NO: 622740 - DNA, 19 bp, Mus musculus
  siRNA target sequence for Rds (NM_008938.1,786-804).
gtcaaagatcgcatcaaga

SEQ ID NO: 622741 - DNA, 19 bp, Mus musculus
  siRNA target sequence for Rds (NM_008938.1,967-985).
ccgctctgctgaattacta

SEQ ID NO: 622742 - DNA, 19 bp, Mus musculus
  siRNA target sequence for Rom1 (NM_009073.1,171-189).
cctggcaccctcttgttca

SEQ ID NO: 622743 - DNA, 19 bp, Mus musculus
  siRNA target sequence for Rom1 (NM_009073.1,431-449).
ctgccttggctcactacaa

SEQ ID NO: 622744 - DNA, 19 bp, Mus musculus
  siRNA target sequence for Rom1 (NM_009073.1,560-578).
gggtcagcaaccgttactt

SEQ ID NO: 622745 - DNA, 19 bp, Mus musculus
  siRNA target sequence for Rom1 (NM_009073.1,617-635).
gcaatgtggaaggcttata

SEQ ID NO: 622746 - DNA, 19 bp, Mus musculus
  siRNA target sequence for Rom1 (NM_009073.1,618-636).
caatgtggaaggcttatat

SEQ ID NO: 622747 - DNA, 19 bp, Mus musculus
  siRNA target sequence for Rom1 (NM_009073.1,622-640).
gtggaaggcttatatctga

SEQ ID NO: 622748 - DNA, 19 bp, Mus musculus
  siRNA target sequence for Rom1 (NM_009073.1,624-642).
ggaaggcttatatctgatt

SEQ ID NO: 622749 - DNA, 19 bp, Mus musculus
  siRNA target sequence for Rom1 (NM_009073.1,651-669).
ccccttctcctgttgtaat

SEQ ID NO: 622750 - DNA, 19 bp, Mus musculus
  siRNA target sequence for Rom1 (NM_009073.1,736-754).
cctcggcagcccaacctaa

SEQ ID NO: 622751 - DNA, 19 bp, Mus musculus
  siRNA target sequence for Rom1 (NM_009073.1,737-755).
ctcggcagcccaacctaaa

SEQ ID NO: 622752 - DNA, 19 bp, Mus musculus
  siRNA target sequence for Rom1 (NM_009073.1,740-758).
ggcagcccaacctaaacct

SEQ ID NO: 622753 - DNA, 19 bp, Mus musculus
  siRNA target sequence for Rom1 (NM_009073.1,790-808).
gaacacctgcagggtttat

SEQ ID NO: 622754 - DNA, 19 bp, Mus musculus
  siRNA target sequence for Rom1 (NM_009073.1,839-857).
ccttattgctgcagattct

SEQ ID NO: 622755 - DNA, 19 bp, Mus musculus
  siRNA target sequence for Rom1 (NM_009073.1,840-858).
cttattgctgcagattcta

SEQ ID NO: 622756 - DNA, 19 bp, Mus musculus
  siRNA target sequence for Rom1 (NM_009073.1,955-973).
gggctgaaagacatactga

SEQ ID NO: 622757 - DNA, 19 bp, Mus musculus
  siRNA target sequence for Rom1 (NM_009073.1,1020-1038).
ggaggccccaccagatgaa

SEQ ID NO: 622758 - DNA, 19 bp, Mus musculus
  siRNA target sequence for Rom1 (NM_009073.1,1023-1041).
ggccccaccagatgaagaa

SEQ ID NO: 622759 - DNA, 19 bp, Mus musculus
  siRNA target sequence for Tub (NM_021885.2,241-259).
cttacagtgtcctagatga

SEQ ID NO: 622760 - DNA, 19 bp, Mus musculus
  siRNA target sequence for Tub (NM_021885.2,1043-1061).
catgtaccccacctacttt

SEQ ID NO: 622761 - DNA, 19 bp, Mus musculus
  siRNA target sequence for Tub (NM_021885.2,1126-1144).
gtaaaacttccaattacct

SEQ ID NO: 622762 - DNA, 19 bp, Mus musculus
  siRNA target sequence for Tub (NM_021885.2,1171-1189).
ctcggggaggcgatagcta

SEQ ID NO: 622763 - DNA, 19 bp, Mus musculus
  siRNA target sequence for Tub (NM_021885.2,1173-1191).
cggggaggcgatagctata

SEQ ID NO: 622764 - DNA, 19 bp, Mus musculus
  siRNA target sequence for Tub (NM_021885.2,1220-1238).
caccaagttcaccgtttat

SEQ ID NO: 622765 - DNA, 19 bp, Mus musculus
  siRNA target sequence for Tub (NM_021885.2,1226-1244).
gttcaccgtttatgacaat

SEQ ID NO: 622766 - DNA, 19 bp, Mus musculus
  siRNA target sequence for Tub (NM_021885.2,1312-1330).
cggtgtgctatgagacaaa

SEQ ID NO: 622767 - DNA, 19 bp, Mus musculus
  siRNA target sequence for Tub (NM_021885.2,1457-1475).
gaacacggagagcatcatt

SEQ ID NO: 622768 - DNA, 19 bp, Mus musculus
  siRNA target sequence for Tub (NM_021885.2,1490-1508).
gacgccagtctggaatgat

SEQ ID NO: 622769 - DNA, 19 bp, Mus musculus
  siRNA target sequence for Tub (NM_021885.2,1492-1510).
cgccagtctggaatgatga

SEQ ID NO: 622770 - DNA, 19 bp, Mus musculus
  siRNA target sequence for Tub (NM_021885.2,1515-1533).
cagtcctatgtacttaact

SEQ ID NO: 622771 - DNA, 19 bp, Mus musculus
  siRNA target sequence for Tub (NM_021885.2,1632-1650).
gatgtgttcaccatggatt

SEQ ID NO: 622772 - DNA, 19 bp, Mus musculus
  siRNA target sequence for Tulp1 (NM_021478.1,172-190).
ccgactccctggaatccaa

SEQ ID NO: 622773 - DNA, 19 bp, Mus musculus
  siRNA target sequence for Tulp1 (NM_021478.1,173-191).
cgactccctggaatccaaa

SEQ ID NO: 622774 - DNA, 19 bp, Mus musculus
  siRNA target sequence for Tulp1 (NM_021478.1,546-564).
ccgctccgaaccaagaaga

SEQ ID NO: 622775 - DNA, 19 bp, Mus musculus
  siRNA target sequence for Tulp1 (NM_021478.1,1018-1036).
ctgagaagaaggtgtttct

SEQ ID NO: 622776 - DNA, 19 bp, Mus musculus
  siRNA target sequence for Tulp1 (NM_021478.1,1061-1079).
gagtaagacagccaactat

SEQ ID NO: 622777 - DNA, 19 bp, Mus musculus
  siRNA target sequence for Tulp1 (NM_021478.1,1063-1081).
gtaagacagccaactatct

SEQ ID NO: 622778 - DNA, 19 bp, Mus musculus
  siRNA target sequence for Tulp1 (NM_021478.1,1111-1129).
ggggaggcgagaatttcat

SEQ ID NO: 622779 - DNA, 19 bp, Mus musculus
  siRNA target sequence for Tulp1 (NM_021478.1,1130-1148).
cgggaagctgaggtctaat

SEQ ID NO: 622780 - DNA, 19 bp, Mus musculus
  siRNA target sequence for Tulp1 (NM_021478.1,1161-1179).
cgcttcacggtctttgaca

SEQ ID NO: 622781 - DNA, 19 bp, Mus musculus
  siRNA target sequence for Tulp1 (NM_021478.1,1285-1303).
gccgtatgactgtcatcat

SEQ ID NO: 622782 - DNA, 19 bp, Mus musculus
  siRNA target sequence for Tulp1 (NM_021478.1,1399-1417).
gtctcatcgagctccataa

SEQ ID NO: 622783 - DNA, 19 bp, Mus musculus
  siRNA target sequence for Tulp1 (NM_021478.1,1482-1500).
caggcctccgtcaagaact

SEQ ID NO: 622784 - DNA, 19 bp, Mus musculus
  siRNA target sequence for Tulp1 (NM_021478.1,1484-1502).
ggcctccgtcaagaacttt

SEQ ID NO: 622785 - DNA, 19 bp, Mus musculus
  siRNA target sequence for Tulp1 (NM_021478.1,1514-1532).
cgctgatgaccctgactat

SEQ ID NO: 622786 - DNA, 19 bp, Mus musculus
  siRNA target sequence for Edg1 (NM_007901.3,522-540).
ctagcatcccggaggttaa

SEQ ID NO: 622787 - DNA, 19 bp, Mus musculus
  siRNA target sequence for Edg1 (NM_007901.3,526-544).
catcccggaggttaaagct

SEQ ID NO: 622788 - DNA, 19 bp, Mus musculus
  siRNA target sequence for Edg1 (NM_007901.3,559-577).
ctctgactatgggaactat

SEQ ID NO: 622789 - DNA, 19 bp, Mus musculus
  siRNA target sequence for Edg1 (NM_007901.3,570-588).
ggaactatgatatcatagt

SEQ ID NO: 622790 - DNA, 19 bp, Mus musculus
  siRNA target sequence for Edg1 (NM_007901.3,587-605).
gtccggcattacaactaca

SEQ ID NO: 622791 - DNA, 19 bp, Mus musculus
  siRNA target sequence for Edg1 (NM_007901.3,635-653).
gaccatggcattaaactga

SEQ ID NO: 622792 - DNA, 19 bp, Mus musculus
  siRNA target sequence for Edg1 (NM_007901.3,681-699).
gcttcatcatcctagagaa

SEQ ID NO: 622793 - DNA, 19 bp, Mus musculus
  siRNA target sequence for Edg1 (NM_007901.3,713-731).
ctaactatttggaaaacca

SEQ ID NO: 622794 - DNA, 19 bp, Mus musculus
  siRNA target sequence for Edg1 (NM_007901.3,775-793).
cctctcggacctattagca

SEQ ID NO: 622795 - DNA, 19 bp, Mus musculus
  siRNA target sequence for Edg1 (NM_007901.3,1100-1118).
ctctaccacaagcactata

SEQ ID NO: 622796 - DNA, 19 bp, Mus musculus
  siRNA target sequence for Edg1 (NM_007901.3,1102-1120).
ctaccacaagcactatatt

SEQ ID NO: 622797 - DNA, 19 bp, Mus musculus
  siRNA target sequence for Edg1 (NM_007901.3,1273-1291).
gctgaagacggtgatcatt

SEQ ID NO: 622798 - DNA, 19 bp, Mus musculus
  siRNA target sequence for Edg1 (NM_007901.3,1327-1345).
cttcatcctactactgtta

SEQ ID NO: 622799 - DNA, 19 bp, Mus musculus
  siRNA target sequence for Edg1 (NM_007901.3,1330-1348).
catcctactactgttagat

SEQ ID NO: 622800 - DNA, 19 bp, Mus musculus
  siRNA target sequence for Edg1 (NM_007901.3,1369-1387).
ctgtgacatcctgtacaaa

SEQ ID NO: 622801 - DNA, 19 bp, Mus musculus
  siRNA target sequence for Edg1 (NM_007901.3,1472-1490).
gccttcatccggatcgtat

SEQ ID NO: 622802 - DNA, 19 bp, Mus musculus
  siRNA target sequence for Edg1 (NM_007901.3,1556-1574).
gaatttagccgcagcaaat

SEQ ID NO: 622803 - DNA, 19 bp, Mus musculus
  siRNA target sequence for Edg2 (NM_010336.1,227-245).
ctacttccagccctgtaat

SEQ ID NO: 622804 - DNA, 19 bp, Mus musculus
  siRNA target sequence for Edg2 (NM_010336.1,263-281).
cagccatgaacgaacaaca

SEQ ID NO: 622805 - DNA, 19 bp, Mus musculus
  siRNA target sequence for Edg2 (NM_010336.1,274-292).
gaacaacagtgcttctaca

SEQ ID NO: 622806 - DNA, 19 bp, Mus musculus
  siRNA target sequence for Edg2 (NM_010336.1,297-315).
gtctatcgccttcttttat

SEQ ID NO: 622807 - DNA, 19 bp, Mus musculus
  siRNA target sequence for Edg2 (NM_010336.1,299-317).
ctatcgccttcttttataa

SEQ ID NO: 622808 - DNA, 19 bp, Mus musculus
  siRNA target sequence for Edg2 (NM_010336.1,386-404).
ctgtttgcgtgttcatcat

SEQ ID NO: 622809 - DNA, 19 bp, Mus musculus
  siRNA target sequence for Edg2 (NM_010336.1,388-406).
gtttgcgtgttcatcatgt

SEQ ID NO: 622810 - DNA, 19 bp, Mus musculus
  siRNA target sequence for Edg2 (NM_010336.1,448-466).
cgcttccatttccctattt

SEQ ID NO: 622811 - DNA, 19 bp, Mus musculus
  siRNA target sequence for Edg2 (NM_010336.1,506-524).
ctggattggcctacttcta

SEQ ID NO: 622812 - DNA, 19 bp, Mus musculus
  siRNA target sequence for Edg2 (NM_010336.1,515-533).
cctacttctacctgatgtt

SEQ ID NO: 622813 - DNA, 19 bp, Mus musculus
  siRNA target sequence for Edg2 (NM_010336.1,531-549).
gttcaatacaggacctaat

SEQ ID NO: 622814 - DNA, 19 bp, Mus musculus
  siRNA target sequence for Edg2 (NM_010336.1,583-601).
cggcagggcctcattgaca

SEQ ID NO: 622815 - DNA, 19 bp, Mus musculus
  siRNA target sequence for Edg2 (NM_010336.1,728-746).
ggactatggccattgtgat

SEQ ID NO: 622816 - DNA, 19 bp, Mus musculus
  siRNA target sequence for Edg2 (NM_010336.1,774-792).
ctgcatctgtgatatcgat

SEQ ID NO: 622817 - DNA, 19 bp, Mus musculus
  siRNA target sequence for Edg2 (NM_010336.1,821-839).
gtgactcctacttagtctt

SEQ ID NO: 622818 - DNA, 19 bp, Mus musculus
  siRNA target sequence for Edg2 (NM_010336.1,907-925).
gttcgccagaggactatga

SEQ ID NO: 622819 - DNA, 19 bp, Mus musculus
  siRNA target sequence for Edg2 (NM_010336.1,927-945).
gatgtctcggcatagttct

SEQ ID NO: 622820 - DNA, 19 bp, Mus musculus
  siRNA target sequence for Edg2 (NM_010336.1,1003-1021).
cttggtgcctttattgtct

SEQ ID NO: 622821 - DNA, 19 bp, Mus musculus
  siRNA target sequence for Edg2 (NM_010336.1,1028-1046).
ctccgggattggtcttgtt

SEQ ID NO: 622822 - DNA, 19 bp, Mus musculus
  siRNA target sequence for Edg2 (NM_010336.1,1030-1048).
ccgggattggtcttgttat

SEQ ID NO: 622823 - DNA, 19 bp, Mus musculus
  siRNA target sequence for Edg2 (NM_010336.1,1031-1049).
cgggattggtcttgttatt

SEQ ID NO: 622824 - DNA, 19 bp, Mus musculus
  siRNA target sequence for Edg2 (NM_010336.1,1034-1052).
gattggtcttgttattgct

SEQ ID NO: 622825 - DNA, 19 bp, Mus musculus
  siRNA target sequence for Edg2 (NM_010336.1,1148-1166).
cctaccgcgacaaagagat

SEQ ID NO: 622826 - DNA, 19 bp, Mus musculus
  siRNA target sequence for Edg4 (NM_020028.2,314-332).
gagaccatcggctttttct

SEQ ID NO: 622827 - DNA, 19 bp, Mus musculus
  siRNA target sequence for Edg4 (NM_020028.2,316-334).
gaccatcggctttttctat

SEQ ID NO: 622828 - DNA, 19 bp, Mus musculus
  siRNA target sequence for Edg4 (NM_020028.2,318-336).
ccatcggctttttctataa

SEQ ID NO: 622829 - DNA, 19 bp, Mus musculus
  siRNA target sequence for Edg4 (NM_020028.2,319-337).
catcggctttttctataat

SEQ ID NO: 622830 - DNA, 19 bp, Mus musculus
  siRNA target sequence for Edg4 (NM_020028.2,468-486).
gcttccaccagcccatata

SEQ ID NO: 622831 - DNA, 19 bp, Mus musculus
  siRNA target sequence for Edg4 (NM_020028.2,899-917).
gctgtctacacacgaattt

SEQ ID NO: 622832 - DNA, 19 bp, Mus musculus
  siRNA target sequence for Edg4 (NM_020028.2,902-920).
gtctacacacgaattttct

SEQ ID NO: 622833 - DNA, 19 bp, Mus musculus
  siRNA target sequence for Edg4 (NM_020028.2,907-925).
cacacgaattttcttctat

SEQ ID NO: 622834 - DNA, 19 bp, Mus musculus
  siRNA target sequence for Edg4 (NM_020028.2,909-927).
cacgaattttcttctatgt

SEQ ID NO: 622835 - DNA, 19 bp, Mus musculus
  siRNA target sequence for Edg4 (NM_020028.2,1150-1168).
ggtcaatgcagtggtatat

SEQ ID NO: 622836 - DNA, 19 bp, Mus musculus
  siRNA target sequence for Edg4 (NM_020028.2,1151-1169).
gtcaatgcagtggtatatt

SEQ ID NO: 622837 - DNA, 19 bp, Mus musculus
  siRNA target sequence for Edg6 (NM_010102.1,577-595).
cattgtcctgcactacaat

SEQ ID NO: 622838 - DNA, 19 bp, Mus musculus
  siRNA target sequence for Edg6 (NM_010102.1,1396-1414).
gttcaactcagccattaat

SEQ ID NO: 622839 - DNA, 19 bp, Mus musculus
  siRNA target sequence for Edg6 (NM_010102.1,1570-1588).
gaggcccagggacagtttt

SEQ ID NO: 622840 - DNA, 19 bp, Mus musculus
  siRNA target sequence for Edg6 (NM_010102.1,1622-1640).
gagccgctgtccagcattt

SEQ ID NO: 622841 - DNA, 19 bp, Mus musculus
  siRNA target sequence for Edg7 (NM_022983.2,262-280).
cagggacaaagcttgtgat

SEQ ID NO: 622842 - DNA, 19 bp, Mus musculus
  siRNA target sequence for Edg7 (NM_022983.2,299-317).
gttcttctgcctctttata

SEQ ID NO: 622843 - DNA, 19 bp, Mus musculus
  siRNA target sequence for Edg7 (NM_022983.2,435-453).
gtgttcctgatgtttaaca

SEQ ID NO: 622844 - DNA, 19 bp, Mus musculus
  siRNA target sequence for Edg7 (NM_022983.2,529-547).
cctccctggccaatttgct

SEQ ID NO: 622845 - DNA, 19 bp, Mus musculus
  siRNA target sequence for Edg7 (NM_022983.2,788-806).
catggtggcggtatacgta

SEQ ID NO: 622846 - DNA, 19 bp, Mus musculus
  siRNA target sequence for Edg7 (NM_022983.2,798-816).
gtatacgtacgcatctaca

SEQ ID NO: 622847 - DNA, 19 bp, Mus musculus
  siRNA target sequence for Edg7 (NM_022983.2,803-821).
cgtacgcatctacatgtat

SEQ ID NO: 622848 - DNA, 19 bp, Mus musculus
  siRNA target sequence for Edg7 (NM_022983.2,830-848).
gaaaaccaacgtcttatct

SEQ ID NO: 622849 - DNA, 19 bp, Mus musculus
  siRNA target sequence for Edg7 (NM_022983.2,1116-1134).
gccctgcaggacagcaata

SEQ ID NO: 622850 - DNA, 19 bp, Mus musculus
  siRNA target sequence for Edg8 (NM_053190.1,237-255).
cggtgagtgaggttattgt

SEQ ID NO: 622851 - DNA, 19 bp, Mus musculus
  siRNA target sequence for Edg8 (NM_053190.1,254-272).
gtccttcactacaactaca

SEQ ID NO: 622852 - DNA, 19 bp, Mus musculus
  siRNA target sequence for Edg8 (NM_053190.1,431-449).
cttggcagcctcactttgt

SEQ ID NO: 622853 - DNA, 19 bp, Mus musculus
  siRNA target sequence for Edg8 (NM_053190.1,836-854).
gcgctctatgcaaggattt

SEQ ID NO: 622854 - DNA, 19 bp, Mus musculus
  siRNA target sequence for Edg8 (NM_053190.1,837-855).
cgctctatgcaaggattta

SEQ ID NO: 622855 - DNA, 19 bp, Mus musculus
  siRNA target sequence for Edg8 (NM_053190.1,841-859).
ctatgcaaggatttactgt

SEQ ID NO: 622856 - DNA, 19 bp, Mus musculus
  siRNA target sequence for Edg8 (NM_053190.1,1008-1026).
cgctgtttctcttgctatt

SEQ ID NO: 622857 - DNA, 19 bp, Mus musculus
  siRNA target sequence for Adora3 (NM_009631.1,530-548).
ctgtcagcctgcaagtcaa

SEQ ID NO: 622858 - DNA, 19 bp, Mus musculus
  siRNA target sequence for Adora3 (NM_009631.1,658-676).
ctgacagtcagatatagaa

SEQ ID NO: 622859 - DNA, 19 bp, Mus musculus
  siRNA target sequence for Adora3 (NM_009631.1,779-797).
ccttagcgagctctcaaaa

SEQ ID NO: 622860 - DNA, 19 bp, Mus musculus
  siRNA target sequence for Adora3 (NM_009631.1,780-798).
cttagcgagctctcaaaat

SEQ ID NO: 622861 - DNA, 19 bp, Mus musculus
  siRNA target sequence for Adora3 (NM_009631.1,963-981).
cagagagacgcgtgcattt

SEQ ID NO: 622862 - DNA, 19 bp, Mus musculus
  siRNA target sequence for Adora3 (NM_009631.1,965-983).
gagagacgcgtgcatttta

SEQ ID NO: 622863 - DNA, 19 bp, Mus musculus
  siRNA target sequence for Adora3 (NM_009631.1,969-987).
gacgcgtgcattttatgga

SEQ ID NO: 622864 - DNA, 19 bp, Mus musculus
  siRNA target sequence for Adora3 (NM_009631.1,1051-1069).
cctttgtccatcatcaatt

SEQ ID NO: 622865 - DNA, 19 bp, Mus musculus
  siRNA target sequence for Adora3 (NM_009631.1,1132-1150).
cacgcgaactccatgatga

SEQ ID NO: 622866 - DNA, 19 bp, Mus musculus
  siRNA target sequence for Adora3 (NM_009631.1,1222-1240).
ctctgtcagacctcagatt

SEQ ID NO: 622867 - DNA, 19 bp, Mus musculus
  siRNA target sequence for Adora3 (NM_009631.1,1226-1244).
gtcagacctcagattcttt

SEQ ID NO: 622868 - DNA, 19 bp, Mus musculus
  siRNA target sequence for Adora2a (NM_009630.1,300-318).
catcgccatccgaattcca

SEQ ID NO: 622869 - DNA, 19 bp, Mus musculus
  siRNA target sequence for Adora2a (NM_009630.1,358-376).
ggcatcattgcgatttgct

SEQ ID NO: 622870 - DNA, 19 bp, Mus musculus
  siRNA target sequence for Adora2a (NM_009630.1,503-521).
ccatgaattacatggttta

SEQ ID NO: 622871 - DNA, 19 bp, Mus musculus
  siRNA target sequence for Adora2a (NM_009630.1,568-586).
gccatctacctaaggattt

SEQ ID NO: 622872 - DNA, 19 bp, Mus musculus
  siRNA target sequence for Adora2a (NM_009630.1,779-797).
cccctccttggctcatgta

SEQ ID NO: 622873 - DNA, 19 bp, Mus musculus
  siRNA target sequence for P2ry12 (NM_027571.2,532-550).
gtacaccgtcctgttcttt

SEQ ID NO: 622874 - DNA, 19 bp, Mus musculus
  siRNA target sequence for P2ry12 (NM_027571.2,593-611).
cagatccgcagtaaatcca

SEQ ID NO: 622875 - DNA, 19 bp, Mus musculus
  siRNA target sequence for P2ry12 (NM_027571.2,599-617).
cgcagtaaatccaacttca

SEQ ID NO: 622876 - DNA, 19 bp, Mus musculus
  siRNA target sequence for P2ry12 (NM_027571.2,600-618).
gcagtaaatccaacttcat

SEQ ID NO: 622877 - DNA, 19 bp, Mus musculus
  siRNA target sequence for P2ry12 (NM_027571.2,637-655).
ggtcatctctgatctacta

SEQ ID NO: 622878 - DNA, 19 bp, Mus musculus
  siRNA target sequence for P2ry12 (NM_027571.2,638-656).
gtcatctctgatctactaa

SEQ ID NO: 622879 - DNA, 19 bp, Mus musculus
  siRNA target sequence for P2ry12 (NM_027571.2,721-739).
cttggtgtgccaagttact

SEQ ID NO: 622880 - DNA, 19 bp, Mus musculus
  siRNA target sequence for P2ry12 (NM_027571.2,781-799).
cctggggttgataaccatt

SEQ ID NO: 622881 - DNA, 19 bp, Mus musculus
  siRNA target sequence for P2ry12 (NM_027571.2,853-871).
cttgggtgcaaagattctt

SEQ ID NO: 622882 - DNA, 19 bp, Mus musculus
  siRNA target sequence for P2ry12 (NM_027571.2,878-896).
gtcatctgggccttcatgt

SEQ ID NO: 622883 - DNA, 19 bp, Mus musculus
  siRNA target sequence for P2ry12 (NM_027571.2,883-901).
ctgggccttcatgttctta

SEQ ID NO: 622884 - DNA, 19 bp, Mus musculus
  siRNA target sequence for P2ry12 (NM_027571.2,885-903).
gggccttcatgttcttaat

SEQ ID NO: 622885 - DNA, 19 bp, Mus musculus
  siRNA target sequence for P2ry12 (NM_027571.2,886-904).
ggccttcatgttcttaatt

SEQ ID NO: 622886 - DNA, 19 bp, Mus musculus
  siRNA target sequence for P2ry12 (NM_027571.2,887-905).
gccttcatgttcttaattt

SEQ ID NO: 622887 - DNA, 19 bp, Mus musculus
  siRNA target sequence for P2ry12 (NM_027571.2,906-924).
cactgcctaacatgattct

SEQ ID NO: 622888 - DNA, 19 bp, Mus musculus
  siRNA target sequence for P2ry12 (NM_027571.2,976-994).
gtcagagtttggtctagtt

SEQ ID NO: 622889 - DNA, 19 bp, Mus musculus
  siRNA target sequence for P2ry12 (NM_027571.2,987-1005).
gtctagtttggcacgaaat

SEQ ID NO: 622890 - DNA, 19 bp, Mus musculus
  siRNA target sequence for P2ry12 (NM_027571.2,992-1010).
gtttggcacgaaatagtca

SEQ ID NO: 622891 - DNA, 19 bp, Mus musculus
  siRNA target sequence for P2ry12 (NM_027571.2,996-1014).
ggcacgaaatagtcaatta

SEQ ID NO: 622892 - DNA, 19 bp, Mus musculus
  siRNA target sequence for P2ry12 (NM_027571.2,998-1016).
cacgaaatagtcaattaca

SEQ ID NO: 622893 - DNA, 19 bp, Mus musculus
  siRNA target sequence for P2ry12 (NM_027571.2,1058-1076).
gtttgttatagcctcatta

SEQ ID NO: 622894 - DNA, 19 bp, Mus musculus
  siRNA target sequence for P2ry12 (NM_027571.2,1091-1109).
cggtcttatgtcagaacaa

SEQ ID NO: 622895 - DNA, 19 bp, Mus musculus
  siRNA target sequence for P2ry12 (NM_027571.2,1139-1157).
gtaaacgtcaaggttttca

SEQ ID NO: 622896 - DNA, 19 bp, Mus musculus
  siRNA target sequence for P2ry12 (NM_027571.2,1311-1329).
cctgccttgatccattcat

SEQ ID NO: 622897 - DNA, 19 bp, Mus musculus
  siRNA target sequence for P2ry12 (NM_027571.2,1375-1393).
gctgaggtgctcaaactct

SEQ ID NO: 622898 - DNA, 19 bp, Mus musculus
  siRNA target sequence for P2ry12 (NM_027571.2,1376-1394).
ctgaggtgctcaaactcta

SEQ ID NO: 622899 - DNA, 19 bp, Mus musculus
  siRNA target sequence for P2ry12 (NM_027571.2,1398-1416).
caacatctgggacaaacaa

SEQ ID NO: 622900 - DNA, 19 bp, Mus musculus
  siRNA target sequence for Gpr105 (NM_133200.2,431-449).
ggaacaccctgatcacaaa

SEQ ID NO: 622901 - DNA, 19 bp, Mus musculus
  siRNA target sequence for Gpr105 (NM_133200.2,495-513).
cctcctcaatgggatatca

SEQ ID NO: 622902 - DNA, 19 bp, Mus musculus
  siRNA target sequence for Gpr105 (NM_133200.2,532-550).
gtgcccagctccaagagtt

SEQ ID NO: 622903 - DNA, 19 bp, Mus musculus
  siRNA target sequence for Gpr105 (NM_133200.2,535-553).
cccagctccaagagtttta

SEQ ID NO: 622904 - DNA, 19 bp, Mus musculus
  siRNA target sequence for Gpr105 (NM_133200.2,536-554).
ccagctccaagagttttat

SEQ ID NO: 622905 - DNA, 19 bp, Mus musculus
  siRNA target sequence for Gpr105 (NM_133200.2,542-560).
ccaagagttttatcatcta

SEQ ID NO: 622906 - DNA, 19 bp, Mus musculus
  siRNA target sequence for Gpr105 (NM_133200.2,555-573).
catctatctcaagaacata

SEQ ID NO: 622907 - DNA, 19 bp, Mus musculus
  siRNA target sequence for Gpr105 (NM_133200.2,668-686).
gggtctctgccgtcatctt

SEQ ID NO: 622908 - DNA, 19 bp, Mus musculus
  siRNA target sequence for Gpr105 (NM_133200.2,676-694).
gccgtcatcttctatgtta

SEQ ID NO: 622909 - DNA, 19 bp, Mus musculus
  siRNA target sequence for Gpr105 (NM_133200.2,677-695).
ccgtcatcttctatgttaa

SEQ ID NO: 622910 - DNA, 19 bp, Mus musculus
  siRNA target sequence for Gpr105 (NM_133200.2,678-696).
cgtcatcttctatgttaat

SEQ ID NO: 622911 - DNA, 19 bp, Mus musculus
  siRNA target sequence for Gpr105 (NM_133200.2,679-697).
gtcatcttctatgttaata

SEQ ID NO: 622912 - DNA, 19 bp, Mus musculus
  siRNA target sequence for Gpr105 (NM_133200.2,702-720).
cgtcagcatcgtgttcttt

SEQ ID NO: 622913 - DNA, 19 bp, Mus musculus
  siRNA target sequence for Gpr105 (NM_133200.2,721-739).
gggctcatcagctttgaca

SEQ ID NO: 622914 - DNA, 19 bp, Mus musculus
  siRNA target sequence for Gpr105 (NM_133200.2,759-777).
gccccttctgacgtctatt

SEQ ID NO: 622915 - DNA, 19 bp, Mus musculus
  siRNA target sequence for Gpr105 (NM_133200.2,761-779).
cccttctgacgtctattgt

SEQ ID NO: 622916 - DNA, 19 bp, Mus musculus
  siRNA target sequence for Gpr105 (NM_133200.2,778-796).
gtgcagtcggtgaactata

SEQ ID NO: 622917 - DNA, 19 bp, Mus musculus
  siRNA target sequence for Gpr105 (NM_133200.2,880-898).
gaggtcacgaagatacagt

SEQ ID NO: 622918 - DNA, 19 bp, Mus musculus
  siRNA target sequence for Gpr105 (NM_133200.2,895-913).
cagtgcatggagctcaaaa

SEQ ID NO: 622919 - DNA, 19 bp, Mus musculus
  siRNA target sequence for Gpr105 (NM_133200.2,932-950).
ggcacaaggcgtctaacta

SEQ ID NO: 622920 - DNA, 19 bp, Mus musculus
  siRNA target sequence for Gpr105 (NM_133200.2,933-951).
gcacaaggcgtctaactat

SEQ ID NO: 622921 - DNA, 19 bp, Mus musculus
  siRNA target sequence for Gpr105 (NM_133200.2,934-952).
cacaaggcgtctaactata

SEQ ID NO: 622922 - DNA, 19 bp, Mus musculus
  siRNA target sequence for Gpr105 (NM_133200.2,1094-1112).
gcatcgtgctcgtttttgt

SEQ ID NO: 622923 - DNA, 19 bp, Mus musculus
  siRNA target sequence for Gpr105 (NM_133200.2,1200-1218).
cctgctctatgcgaaagaa

SEQ ID NO: 622924 - DNA, 19 bp, Mus musculus
  siRNA target sequence for Gpr105 (NM_133200.2,1201-1219).
ctgctctatgcgaaagaat

SEQ ID NO: 622925 - DNA, 19 bp, Mus musculus
  siRNA target sequence for Gpr105 (NM_133200.2,1231-1249).
ctctcggctgccaatgtgt

SEQ ID NO: 622926 - DNA, 19 bp, Mus musculus
  siRNA target sequence for Gpr105 (NM_133200.2,1339-1357).
gacctagaggtttccaaaa

SEQ ID NO: 622927 - DNA, 19 bp, Mus musculus
  siRNA target sequence for Gpr105 (NM_133200.2,1364-1382).
gggaaaatgcgattcatga

SEQ ID NO: 622928 - DNA, 19 bp, Mus musculus
  siRNA target sequence for Gpr86 (NM_028808.1,90-108).
gggatgcagggcttcaaca

SEQ ID NO: 622929 - DNA, 19 bp, Mus musculus
  siRNA target sequence for Gpr86 (NM_028808.1,152-170).
gttcccggttctctatact

SEQ ID NO: 622930 - DNA, 19 bp, Mus musculus
  siRNA target sequence for Gpr86 (NM_028808.1,268-286).
ctctggtggcagacttgat

SEQ ID NO: 622931 - DNA, 19 bp, Mus musculus
  siRNA target sequence for Gpr86 (NM_028808.1,380-398).
cttctatgagacgatgtat

SEQ ID NO: 622932 - DNA, 19 bp, Mus musculus
  siRNA target sequence for Gpr86 (NM_028808.1,436-454).
ggttcctcaagatcatcat

SEQ ID NO: 622933 - DNA, 19 bp, Mus musculus
  siRNA target sequence for Gpr86 (NM_028808.1,455-473).
gccgttcaggaaaaccttt

SEQ ID NO: 622934 - DNA, 19 bp, Mus musculus
  siRNA target sequence for Gpr86 (NM_028808.1,484-502).
cggctttcgcaaaaacagt

SEQ ID NO: 622935 - DNA, 19 bp, Mus musculus
  siRNA target sequence for Gpr86 (NM_028808.1,511-529).
ccgtctggtccctgatgtt

SEQ ID NO: 622936 - DNA, 19 bp, Mus musculus
  siRNA target sequence for Gpr86 (NM_028808.1,571-589).
cgccatcatccgtgaagaa

SEQ ID NO: 622937 - DNA, 19 bp, Mus musculus
  siRNA target sequence for Gpr86 (NM_028808.1,714-732).
gtgtacaactcctatagga

SEQ ID NO: 622938 - DNA, 19 bp, Mus musculus
  siRNA target sequence for Gpr86 (NM_028808.1,719-737).
caactcctataggaagttt

SEQ ID NO: 622939 - DNA, 19 bp, Mus musculus
  siRNA target sequence for Gpr86 (NM_028808.1,813-831).
gccccactgcattttgtca

SEQ ID NO: 622940 - DNA, 19 bp, Mus musculus
  siRNA target sequence for Gpr86 (NM_028808.1,821-839).
gcattttgtcagaatacca

SEQ ID NO: 622941 - DNA, 19 bp, Mus musculus
  siRNA target sequence for Gpr86 (NM_028808.1,828-846).
gtcagaataccatacactt

SEQ ID NO: 622942 - DNA, 19 bp, Mus musculus
  siRNA target sequence for Gpr86 (NM_028808.1,837-855).
ccatacacttacagtcaaa

SEQ ID NO: 622943 - DNA, 19 bp, Mus musculus
  siRNA target sequence for Gpr86 (NM_028808.1,866-884).
gactgactgtaggttagaa

SEQ ID NO: 622944 - DNA, 19 bp, Mus musculus
  siRNA target sequence for Gpr86 (NM_028808.1,923-941).
ggcaacaactaacatttgt

SEQ ID NO: 622945 - DNA, 19 bp, Mus musculus
  siRNA target sequence for Gpr86 (NM_028808.1,925-943).
caacaactaacatttgtat

SEQ ID NO: 622946 - DNA, 19 bp, Mus musculus
  siRNA target sequence for Gpr86 (NM_028808.1,940-958).
gtatggaccccttaatata

SEQ ID NO: 622947 - DNA, 19 bp, Mus musculus
  siRNA target sequence for Gpr86 (NM_028808.1,945-963).
gaccccttaatatacataa

SEQ ID NO: 622948 - DNA, 19 bp, Mus musculus
  siRNA target sequence for Gpr86 (NM_028808.1,970-988).
gcaagaagttcacacaaaa

SEQ ID NO: 622949 - DNA, 19 bp, Mus musculus
  siRNA target sequence for Gpr87 (NM_032399.1,3-21).
ggctgtccctaatgtgaat

SEQ ID NO: 622950 - DNA, 19 bp, Mus musculus
  siRNA target sequence for Gpr87 (NM_032399.1,5-23).
ctgtccctaatgtgaatgt

SEQ ID NO: 622951 - DNA, 19 bp, Mus musculus
  siRNA target sequence for Gpr87 (NM_032399.1,7-25).
gtccctaatgtgaatgttt

SEQ ID NO: 622952 - DNA, 19 bp, Mus musculus
  siRNA target sequence for Gpr87 (NM_032399.1,9-27).
ccctaatgtgaatgtttct

SEQ ID NO: 622953 - DNA, 19 bp, Mus musculus
  siRNA target sequence for Gpr87 (NM_032399.1,26-44).
ctacttttgcaggtaatga

SEQ ID NO: 622954 - DNA, 19 bp, Mus musculus
  siRNA target sequence for Gpr87 (NM_032399.1,104-122).
ctaccctgcacaacaaatt

SEQ ID NO: 622955 - DNA, 19 bp, Mus musculus
  siRNA target sequence for Gpr87 (NM_032399.1,107-125).
ccctgcacaacaaatttga

SEQ ID NO: 622956 - DNA, 19 bp, Mus musculus
  siRNA target sequence for Gpr87 (NM_032399.1,109-127).
ctgcacaacaaatttgaca

SEQ ID NO: 622957 - DNA, 19 bp, Mus musculus
  siRNA target sequence for Gpr87 (NM_032399.1,139-157).
ccagtgctttacctagtta

SEQ ID NO: 622958 - DNA, 19 bp, Mus musculus
  siRNA target sequence for Gpr87 (NM_032399.1,140-158).
cagtgctttacctagttat

SEQ ID NO: 622959 - DNA, 19 bp, Mus musculus
  siRNA target sequence for Gpr87 (NM_032399.1,142-160).
gtgctttacctagttatct

SEQ ID NO: 622960 - DNA, 19 bp, Mus musculus
  siRNA target sequence for Gpr87 (NM_032399.1,204-222).
cttccacattcggaataaa

SEQ ID NO: 622961 - DNA, 19 bp, Mus musculus
  siRNA target sequence for Gpr87 (NM_032399.1,208-226).
cacattcggaataaaacca

SEQ ID NO: 622962 - DNA, 19 bp, Mus musculus
  siRNA target sequence for Gpr87 (NM_032399.1,281-299).
cattcccattccgaatagt

SEQ ID NO: 622963 - DNA, 19 bp, Mus musculus
  siRNA target sequence for Gpr87 (NM_032399.1,320-338).
cttggtacttcgagtttat

SEQ ID NO: 622964 - DNA, 19 bp, Mus musculus
  siRNA target sequence for Gpr87 (NM_032399.1,323-341).
ggtacttcgagtttatcct

SEQ ID NO: 622965 - DNA, 19 bp, Mus musculus
  siRNA target sequence for Gpr87 (NM_032399.1,344-362).
gcagatacacctcagtttt

SEQ ID NO: 622966 - DNA, 19 bp, Mus musculus
  siRNA target sequence for Gpr87 (NM_032399.1,347-365).
gatacacctcagttttgtt

SEQ ID NO: 622967 - DNA, 19 bp, Mus musculus
  siRNA target sequence for Gpr87 (NM_032399.1,408-426).
cagtgttgatcggtatcta

SEQ ID NO: 622968 - DNA, 19 bp, Mus musculus
  siRNA target sequence for Gpr87 (NM_032399.1,410-428).
gtgttgatcggtatctaaa

SEQ ID NO: 622969 - DNA, 19 bp, Mus musculus
  siRNA target sequence for Gpr87 (NM_032399.1,419-437).
ggtatctaaaggtggtaaa

SEQ ID NO: 622970 - DNA, 19 bp, Mus musculus
  siRNA target sequence for Gpr87 (NM_032399.1,445-463).
ggtgactctcgcatgtaca

SEQ ID NO: 622971 - DNA, 19 bp, Mus musculus
  siRNA target sequence for Gpr87 (NM_032399.1,454-472).
cgcatgtacagcataacct

SEQ ID NO: 622972 - DNA, 19 bp, Mus musculus
  siRNA target sequence for Gpr87 (NM_032399.1,455-473).
gcatgtacagcataacctt

SEQ ID NO: 622973 - DNA, 19 bp, Mus musculus
  siRNA target sequence for Gpr87 (NM_032399.1,465-483).
cataaccttcaccaaagtt

SEQ ID NO: 622974 - DNA, 19 bp, Mus musculus
  siRNA target sequence for Gpr87 (NM_032399.1,471-489).
cttcaccaaagttttatca

SEQ ID NO: 622975 - DNA, 19 bp, Mus musculus
  siRNA target sequence for Gpr87 (NM_032399.1,542-560).
ctaatgggcagccaactaa

SEQ ID NO: 622976 - DNA, 19 bp, Mus musculus
  siRNA target sequence for Gpr87 (NM_032399.1,552-570).
gccaactaaggaaaatatt

SEQ ID NO: 622977 - DNA, 19 bp, Mus musculus
  siRNA target sequence for Gpr87 (NM_032399.1,571-589).
catgactgcatgaaactca

SEQ ID NO: 622978 - DNA, 19 bp, Mus musculus
  siRNA target sequence for Gpr87 (NM_032399.1,666-684).
cctgattggatgctacata

SEQ ID NO: 622979 - DNA, 19 bp, Mus musculus
  siRNA target sequence for Gpr87 (NM_032399.1,775-793).
gtggctgtgttttttacct

SEQ ID NO: 622980 - DNA, 19 bp, Mus musculus
  siRNA target sequence for Gpr87 (NM_032399.1,825-843).
ctttaccttcagtaactta

SEQ ID NO: 622981 - DNA, 19 bp, Mus musculus
  siRNA target sequence for Gpr87 (NM_032399.1,926-944).
gcctggatccgataattta

SEQ ID NO: 622982 - DNA, 19 bp, Mus musculus
  siRNA target sequence for Gpr87 (NM_032399.1,927-945).
cctggatccgataatttat

SEQ ID NO: 622983 - DNA, 19 bp, Mus musculus
  siRNA target sequence for Gpr87 (NM_032399.1,928-946).
ctggatccgataatttatt

SEQ ID NO: 622984 - DNA, 19 bp, Mus musculus
  siRNA target sequence for Gpr87 (NM_032399.1,1026-1044).
gcaaagcgtccgaagatca

SEQ ID NO: 622985 - DNA, 19 bp, Mus musculus
  siRNA target sequence for Gpr87 (NM_032399.1,1048-1066).
gtgcgcatctattatgact

SEQ ID NO: 622986 - DNA, 19 bp, Mus musculus
  siRNA target sequence for Hrh3 (NM_133849.1,712-730).
ccttcctcagcgttacctt

SEQ ID NO: 622987 - DNA, 19 bp, Mus musculus
  siRNA target sequence for Hrh3 (NM_133849.1,1201-1219).
cgtacacactcctcatgat

SEQ ID NO: 622988 - DNA, 19 bp, Mus musculus
  siRNA target sequence for Hrh4 (NM_153087.1,106-124).
gtccccttggcatttttaa

SEQ ID NO: 622989 - DNA, 19 bp, Mus musculus
  siRNA target sequence for Hrh4 (NM_153087.1,195-213).
ccttagacatcgaagtaat

SEQ ID NO: 622990 - DNA, 19 bp, Mus musculus
  siRNA target sequence for Hrh4 (NM_153087.1,196-214).
cttagacatcgaagtaatt

SEQ ID NO: 622991 - DNA, 19 bp, Mus musculus
  siRNA target sequence for Hrh4 (NM_153087.1,249-267).
cgtgggtttgatttccatt

SEQ ID NO: 622992 - DNA, 19 bp, Mus musculus
  siRNA target sequence for Hrh4 (NM_153087.1,291-309).
gtttaactggaattttgga

SEQ ID NO: 622993 - DNA, 19 bp, Mus musculus
  siRNA target sequence for Hrh4 (NM_153087.1,330-348).
gctcattactgactatctt

SEQ ID NO: 622994 - DNA, 19 bp, Mus musculus
  siRNA target sequence for Hrh4 (NM_153087.1,354-372).
caccgcatctgtctacaat

SEQ ID NO: 622995 - DNA, 19 bp, Mus musculus
  siRNA target sequence for Hrh4 (NM_153087.1,357-375).
cgcatctgtctacaatatt

SEQ ID NO: 622996 - DNA, 19 bp, Mus musculus
  siRNA target sequence for Hrh4 (NM_153087.1,394-412).
cgataccagtcagtttcaa

SEQ ID NO: 622997 - DNA, 19 bp, Mus musculus
  siRNA target sequence for Hrh4 (NM_153087.1,440-458).
ctggcatcatgaagattgt

SEQ ID NO: 622998 - DNA, 19 bp, Mus musculus
  siRNA target sequence for Hrh4 (NM_153087.1,495-513).
ggtaaatggcccgatgatt

SEQ ID NO: 622999 - DNA, 19 bp, Mus musculus
  siRNA target sequence for Hrh4 (NM_153087.1,582-600).
gtacatcctcaccattaca

SEQ ID NO: 623000 - DNA, 19 bp, Mus musculus
  siRNA target sequence for Hrh4 (NM_153087.1,638-656).
cttatttcaatgtacagat

SEQ ID NO: 623001 - DNA, 19 bp, Mus musculus
  siRNA target sequence for Hrh4 (NM_153087.1,762-780).
ggcttgcaggacaagtaat

SEQ ID NO: 623002 - DNA, 19 bp, Mus musculus
  siRNA target sequence for Hrh4 (NM_153087.1,851-869).
ccttaaggactcacatgaa

SEQ ID NO: 623003 - DNA, 19 bp, Mus musculus
  siRNA target sequence for Hrh4 (NM_153087.1,875-893).
gtatcactgccttcaaagt

SEQ ID NO: 623004 - DNA, 19 bp, Mus musculus
  siRNA target sequence for Hrh4 (NM_153087.1,1032-1050).
cacaattgtcctttcaact

SEQ ID NO: 623005 - DNA, 19 bp, Mus musculus
  siRNA target sequence for Hrh4 (NM_153087.1,1102-1120).
ctgcaatggttcaattcgt

SEQ ID NO: 623006 - DNA, 19 bp, Mus musculus
  siRNA target sequence for Hrh4 (NM_153087.1,1104-1122).
gcaatggttcaattcgttt

SEQ ID NO: 623007 - DNA, 19 bp, Mus musculus
  siRNA target sequence for Hrh4 (NM_153087.1,1109-1127).
ggttcaattcgtttgttaa

SEQ ID NO: 623008 - DNA, 19 bp, Mus musculus
  siRNA target sequence for Hrh4 (NM_153087.1,1110-1128).
gttcaattcgtttgttaat

SEQ ID NO: 623009 - DNA, 19 bp, Mus musculus
  siRNA target sequence for Hrh4 (NM_153087.1,1215-1233).
gaaccagtcagtatcttct

SEQ ID NO: 623010 - DNA, 19 bp, Mus musculus
  siRNA target sequence for Drd1a (NM_010076.1,696-714).
cttctttgtcatctcttta

SEQ ID NO: 623011 - DNA, 19 bp, Mus musculus
  siRNA target sequence for Drd1a (NM_010076.1,836-854).
ccacggcatccatccttaa

SEQ ID NO: 623012 - DNA, 19 bp, Mus musculus
  siRNA target sequence for Drd1a (NM_010076.1,839-857).
cggcatccatccttaacct

SEQ ID NO: 623013 - DNA, 19 bp, Mus musculus
  siRNA target sequence for Drd1a (NM_010076.1,893-911).
ccagccctttccagtatga

SEQ ID NO: 623014 - DNA, 19 bp, Mus musculus
  siRNA target sequence for Drd1a (NM_010076.1,951-969).
cgtagcatggactttgtct

SEQ ID NO: 623015 - DNA, 19 bp, Mus musculus
  siRNA target sequence for Drd1a (NM_010076.1,959-977).
ggactttgtctgttctcat

SEQ ID NO: 623016 - DNA, 19 bp, Mus musculus
  siRNA target sequence for Drd1a (NM_010076.1,960-978).
gactttgtctgttctcata

SEQ ID NO: 623017 - DNA, 19 bp, Mus musculus
  siRNA target sequence for Drd1a (NM_010076.1,1025-1043).
ggcccttggatggcaattt

SEQ ID NO: 623018 - DNA, 19 bp, Mus musculus
  siRNA target sequence for Drd1a (NM_010076.1,1026-1044).
gcccttggatggcaatttt

SEQ ID NO: 623019 - DNA, 19 bp, Mus musculus
  siRNA target sequence for Drd1a (NM_010076.1,1027-1045).
cccttggatggcaatttta

SEQ ID NO: 623020 - DNA, 19 bp, Mus musculus
  siRNA target sequence for Drd1a (NM_010076.1,1109-1127).
catcctccctcataagctt

SEQ ID NO: 623021 - DNA, 19 bp, Mus musculus
  siRNA target sequence for Drd1a (NM_010076.1,1112-1130).
cctccctcataagctttta

SEQ ID NO: 623022 - DNA, 19 bp, Mus musculus
  siRNA target sequence for Drd1a (NM_010076.1,1153-1171).
gtcacttacaccagtatct

SEQ ID NO: 623023 - DNA, 19 bp, Mus musculus
  siRNA target sequence for Drd1a (NM_010076.1,1175-1193).
ggattgcccagaagcaaat

SEQ ID NO: 623024 - DNA, 19 bp, Mus musculus
  siRNA target sequence for Drd1a (NM_010076.1,1267-1285).
cctgtcgaatgctctcaat

SEQ ID NO: 623025 - DNA, 19 bp, Mus musculus
  siRNA target sequence for Drd1a (NM_010076.1,1272-1290).
cgaatgctctcaatcagaa

SEQ ID NO: 623026 - DNA, 19 bp, Mus musculus
  siRNA target sequence for Drd1a (NM_010076.1,1295-1313).
cctttaagatgtcctttaa

SEQ ID NO: 623027 - DNA, 19 bp, Mus musculus
  siRNA target sequence for Drd1a (NM_010076.1,1307-1325).
cctttaagagggagactaa

SEQ ID NO: 623028 - DNA, 19 bp, Mus musculus
  siRNA target sequence for Drd1a (NM_010076.1,1308-1326).
ctttaagagggagactaaa

SEQ ID NO: 623029 - DNA, 19 bp, Mus musculus
  siRNA target sequence for Drd1a (NM_010076.1,1514-1532).
cttttaatgccgattttca

SEQ ID NO: 623030 - DNA, 19 bp, Mus musculus
  siRNA target sequence for Drd1a (NM_010076.1,1545-1563).
gaccctcttaggatgctat

SEQ ID NO: 623031 - DNA, 19 bp, Mus musculus
  siRNA target sequence for Drd1a (NM_010076.1,1614-1632).
caacggggctgtgatgttt

SEQ ID NO: 623032 - DNA, 19 bp, Mus musculus
  siRNA target sequence for Drd1a (NM_010076.1,1781-1799).
cggtcatattggactatga

SEQ ID NO: 623033 - DNA, 19 bp, Mus musculus
  siRNA target sequence for Drd1a (NM_010076.1,1802-1820).
ccgatgtctctctagaaaa

SEQ ID NO: 623034 - DNA, 19 bp, Mus musculus
  siRNA target sequence for Adra2b (NM_009633.1,84-102).
cggcaatgcgctggtaatt

SEQ ID NO: 623035 - DNA, 19 bp, Mus musculus
  siRNA target sequence for Adra2b (NM_009633.1,125-143).
ctctccgtgcaccacaaaa

SEQ ID NO: 623036 - DNA, 19 bp, Mus musculus
  siRNA target sequence for Adra2b (NM_009633.1,174-192).
catcctagtggctactctt

SEQ ID NO: 623037 - DNA, 19 bp, Mus musculus
  siRNA target sequence for Adra2b (NM_009633.1,344-362).
gccgagcattggagtacaa

SEQ ID NO: 623038 - DNA, 19 bp, Mus musculus
  siRNA target sequence for Adra2b (NM_009633.1,346-364).
cgagcattggagtacaact

SEQ ID NO: 623039 - DNA, 19 bp, Mus musculus
  siRNA target sequence for Adra2b (NM_009633.1,372-390).
cactccacgccgcatcaaa

SEQ ID NO: 623040 - DNA, 19 bp, Mus musculus
  siRNA target sequence for Adra2b (NM_009633.1,376-394).
ccacgccgcatcaaatgca

SEQ ID NO: 623041 - DNA, 19 bp, Mus musculus
  siRNA target sequence for Adra2b (NM_009633.1,377-395).
cacgccgcatcaaatgcat

SEQ ID NO: 623042 - DNA, 19 bp, Mus musculus
  siRNA target sequence for Adra2b (NM_009633.1,412-430).
ctcattgcagccgtcattt

SEQ ID NO: 623043 - DNA, 19 bp, Mus musculus
  siRNA target sequence for Adra2b (NM_009633.1,527-545).
ccagcatcggatctttttt

SEQ ID NO: 623044 - DNA, 19 bp, Mus musculus
  siRNA target sequence for Adra2b (NM_009633.1,531-549).
catcggatctttttttgct

SEQ ID NO: 623045 - DNA, 19 bp, Mus musculus
  siRNA target sequence for Adra2b (NM_009633.1,570-588).
cgtctacctgcgaatctat

SEQ ID NO: 623046 - DNA, 19 bp, Mus musculus
  siRNA target sequence for Adra2b (NM_009633.1,576-594).
cctgcgaatctatgtaatt

SEQ ID NO: 623047 - DNA, 19 bp, Mus musculus
  siRNA target sequence for Adra2b (NM_009633.1,1115-1133).
cggtggtcattggtgtttt

SEQ ID NO: 623048 - DNA, 19 bp, Mus musculus
  siRNA target sequence for Adra2b (NM_009633.1,1300-1318).
gcctttcgaaggatccttt

SEQ ID NO: 623049 - DNA, 19 bp, Mus musculus
  siRNA target sequence for Cysltr2 (NM_133720.1,633-651).
gggacccccagcagttata

SEQ ID NO: 623050 - DNA, 19 bp, Mus musculus
  siRNA target sequence for Cysltr2 (NM_133720.1,652-670).
gtaacaggaactgtacaat

SEQ ID NO: 623051 - DNA, 19 bp, Mus musculus
  siRNA target sequence for Cysltr2 (NM_133720.1,662-680).
ctgtacaatagaaaacttt

SEQ ID NO: 623052 - DNA, 19 bp, Mus musculus
  siRNA target sequence for Cysltr2 (NM_133720.1,686-704).
ggaattttaccccatcata

SEQ ID NO: 623053 - DNA, 19 bp, Mus musculus
  siRNA target sequence for Cysltr2 (NM_133720.1,687-705).
gaattttaccccatcatat

SEQ ID NO: 623054 - DNA, 19 bp, Mus musculus
  siRNA target sequence for Cysltr2 (NM_133720.1,696-714).
cccatcatatacctgataa

SEQ ID NO: 623055 - DNA, 19 bp, Mus musculus
  siRNA target sequence for Cysltr2 (NM_133720.1,698-716).
catcatatacctgataata

SEQ ID NO: 623056 - DNA, 19 bp, Mus musculus
  siRNA target sequence for Cysltr2 (NM_133720.1,742-760).
gcttttccatatatgtctt

SEQ ID NO: 623057 - DNA, 19 bp, Mus musculus
  siRNA target sequence for Cysltr2 (NM_133720.1,762-780).
ctacagacttgcaagaagt

SEQ ID NO: 623058 - DNA, 19 bp, Mus musculus
  siRNA target sequence for Cysltr2 (NM_133720.1,776-794).
gaagtccacatctgtaaat

SEQ ID NO: 623059 - DNA, 19 bp, Mus musculus
  siRNA target sequence for Cysltr2 (NM_133720.1,812-830).
ggccacttccgattttcta

SEQ ID NO: 623060 - DNA, 19 bp, Mus musculus
  siRNA target sequence for Cysltr2 (NM_133720.1,813-831).
gccacttccgattttctat

SEQ ID NO: 623061 - DNA, 19 bp, Mus musculus
  siRNA target sequence for Cysltr2 (NM_133720.1,845-863).
gcccttcagggctgactat

SEQ ID NO: 623062 - DNA, 19 bp, Mus musculus
  siRNA target sequence for Cysltr2 (NM_133720.1,846-864).
cccttcagggctgactatt

SEQ ID NO: 623063 - DNA, 19 bp, Mus musculus
  siRNA target sequence for Cysltr2 (NM_133720.1,847-865).
ccttcagggctgactatta

SEQ ID NO: 623064 - DNA, 19 bp, Mus musculus
  siRNA target sequence for Cysltr2 (NM_133720.1,848-866).
cttcagggctgactattat

SEQ ID NO: 623065 - DNA, 19 bp, Mus musculus
  siRNA target sequence for Cysltr2 (NM_133720.1,854-872).
ggctgactattatttcaga

SEQ ID NO: 623066 - DNA, 19 bp, Mus musculus
  siRNA target sequence for Cysltr2 (NM_133720.1,911-929).
catgtcttattccttatat

SEQ ID NO: 623067 - DNA, 19 bp, Mus musculus
  siRNA target sequence for Cysltr2 (NM_133720.1,916-934).
cttattccttatatgtcaa

SEQ ID NO: 623068 - DNA, 19 bp, Mus musculus
  siRNA target sequence for Cysltr2 (NM_133720.1,922-940).
ccttatatgtcaacatgta

SEQ ID NO: 623069 - DNA, 19 bp, Mus musculus
  siRNA target sequence for Cysltr2 (NM_133720.1,935-953).
catgtatactagcatttat

SEQ ID NO: 623070 - DNA, 19 bp, Mus musculus
  siRNA target sequence for Cysltr2 (NM_133720.1,1040-1058).
gatcctctgtgggatcata

SEQ ID NO: 623071 - DNA, 19 bp, Mus musculus
  siRNA target sequence for Cysltr2 (NM_133720.1,1051-1069).
ggatcatatgggttttcat

SEQ ID NO: 623072 - DNA, 19 bp, Mus musculus
  siRNA target sequence for Cysltr2 (NM_133720.1,1198-1216).
gcttcttgctcccatttct

SEQ ID NO: 623073 - DNA, 19 bp, Mus musculus
  siRNA target sequence for Cysltr2 (NM_133720.1,1239-1257).
ctgatcatccggatcttgt

SEQ ID NO: 623074 - DNA, 19 bp, Mus musculus
  siRNA target sequence for Cysltr2 (NM_133720.1,1241-1259).
gatcatccggatcttgtta

SEQ ID NO: 623075 - DNA, 19 bp, Mus musculus
  siRNA target sequence for Cysltr2 (NM_133720.1,1306-1324).
cgctgaccaccattgtcat

SEQ ID NO: 623076 - DNA, 19 bp, Mus musculus
  siRNA target sequence for Cysltr2 (NM_133720.1,1386-1404).
gtcacatgggataaagatt

SEQ ID NO: 623077 - DNA, 19 bp, Mus musculus
  siRNA target sequence for Cysltr2 (NM_133720.1,1388-1406).
cacatgggataaagattca

SEQ ID NO: 623078 - DNA, 19 bp, Mus musculus
  siRNA target sequence for Cysltr2 (NM_133720.1,1512-1530).
gctcgattaagggctatat

SEQ ID NO: 623079 - DNA, 19 bp, Mus musculus
  siRNA target sequence for Cysltr2 (NM_133720.1,1513-1531).
ctcgattaagggctatatt

SEQ ID NO: 623080 - DNA, 19 bp, Mus musculus
  siRNA target sequence for Cysltr2 (NM_133720.1,1515-1533).
cgattaagggctatattca

SEQ ID NO: 623081 - DNA, 19 bp, Mus musculus
  siRNA target sequence for Cysltr2 (NM_133720.1,1523-1541).
ggctatattcagcaaagtt

SEQ ID NO: 623082 - DNA, 19 bp, Mus musculus
  siRNA target sequence for Cysltr2 (NM_133720.1,1525-1543).
ctatattcagcaaagttca

SEQ ID NO: 623083 - DNA, 19 bp, Mus musculus
  siRNA target sequence for Cysltr1 (NM_021476.2,451-469).
ctgacgacatctctcatta

SEQ ID NO: 623084 - DNA, 19 bp, Mus musculus
  siRNA target sequence for Cysltr1 (NM_021476.2,453-471).
gacgacatctctcattaat

SEQ ID NO: 623085 - DNA, 19 bp, Mus musculus
  siRNA target sequence for Cysltr1 (NM_021476.2,474-492).
cacgtgtcatgacacaatt

SEQ ID NO: 623086 - DNA, 19 bp, Mus musculus
  siRNA target sequence for Cysltr1 (NM_021476.2,476-494).
cgtgtcatgacacaattga

SEQ ID NO: 623087 - DNA, 19 bp, Mus musculus
  siRNA target sequence for Cysltr1 (NM_021476.2,477-495).
gtgtcatgacacaattgat

SEQ ID NO: 623088 - DNA, 19 bp, Mus musculus
  siRNA target sequence for Cysltr1 (NM_021476.2,479-497).
gtcatgacacaattgatga

SEQ ID NO: 623089 - DNA, 19 bp, Mus musculus
  siRNA target sequence for Cysltr1 (NM_021476.2,496-514).
gaattccgaaatcaagtat

SEQ ID NO: 623090 - DNA, 19 bp, Mus musculus
  siRNA target sequence for Cysltr1 (NM_021476.2,548-566).
gtttctttggcaatagctt

SEQ ID NO: 623091 - DNA, 19 bp, Mus musculus
  siRNA target sequence for Cysltr1 (NM_021476.2,570-588).
gctctatgtcctcataaaa

SEQ ID NO: 623092 - DNA, 19 bp, Mus musculus
  siRNA target sequence for Cysltr1 (NM_021476.2,571-589).
ctctatgtcctcataaaaa

SEQ ID NO: 623093 - DNA, 19 bp, Mus musculus
  siRNA target sequence for Cysltr1 (NM_021476.2,579-597).
cctcataaaaacataccat

SEQ ID NO: 623094 - DNA, 19 bp, Mus musculus
  siRNA target sequence for Cysltr1 (NM_021476.2,605-623).
cagccttccaagtatacat

SEQ ID NO: 623095 - DNA, 19 bp, Mus musculus
  siRNA target sequence for Cysltr1 (NM_021476.2,607-625).
gccttccaagtatacatga

SEQ ID NO: 623096 - DNA, 19 bp, Mus musculus
  siRNA target sequence for Cysltr1 (NM_021476.2,608-626).
ccttccaagtatacatgat

SEQ ID NO: 623097 - DNA, 19 bp, Mus musculus
  siRNA target sequence for Cysltr1 (NM_021476.2,612-630).
ccaagtatacatgattaat

SEQ ID NO: 623098 - DNA, 19 bp, Mus musculus
  siRNA target sequence for Cysltr1 (NM_021476.2,643-661).
gatctactctgtgtatgta

SEQ ID NO: 623099 - DNA, 19 bp, Mus musculus
  siRNA target sequence for Cysltr1 (NM_021476.2,646-664).
ctactctgtgtatgtacat

SEQ ID NO: 623100 - DNA, 19 bp, Mus musculus
  siRNA target sequence for Cysltr1 (NM_021476.2,667-685).
cctctccgtgtggtctatt

SEQ ID NO: 623101 - DNA, 19 bp, Mus musculus
  siRNA target sequence for Cysltr1 (NM_021476.2,668-686).
ctctccgtgtggtctatta

SEQ ID NO: 623102 - DNA, 19 bp, Mus musculus
  siRNA target sequence for Cysltr1 (NM_021476.2,672-690).
ccgtgtggtctattatgtt

SEQ ID NO: 623103 - DNA, 19 bp, Mus musculus
  siRNA target sequence for Cysltr1 (NM_021476.2,674-692).
gtgtggtctattatgttca

SEQ ID NO: 623104 - DNA, 19 bp, Mus musculus
  siRNA target sequence for Cysltr1 (NM_021476.2,737-755).
cctatgccttgtacgttaa

SEQ ID NO: 623105 - DNA, 19 bp, Mus musculus
  siRNA target sequence for Cysltr1 (NM_021476.2,747-765).
gtacgttaacctctattgt

SEQ ID NO: 623106 - DNA, 19 bp, Mus musculus
  siRNA target sequence for Cysltr1 (NM_021476.2,757-775).
ctctattgtagcatcttct

SEQ ID NO: 623107 - DNA, 19 bp, Mus musculus
  siRNA target sequence for Cysltr1 (NM_021476.2,820-838).
ccagtccagaacattaatt

SEQ ID NO: 623108 - DNA, 19 bp, Mus musculus
  siRNA target sequence for Cysltr1 (NM_021476.2,821-839).
cagtccagaacattaattt

SEQ ID NO: 623109 - DNA, 19 bp, Mus musculus
  siRNA target sequence for Cysltr1 (NM_021476.2,826-844).
cagaacattaatttggtta

SEQ ID NO: 623110 - DNA, 19 bp, Mus musculus
  siRNA target sequence for Cysltr1 (NM_021476.2,926-944).
cttaccaagatgagaaaaa

SEQ ID NO: 623111 - DNA, 19 bp, Mus musculus
  siRNA target sequence for Cysltr1 (NM_021476.2,972-990).
gaacaatcaagctaaaaaa

SEQ ID NO: 623112 - DNA, 19 bp, Mus musculus
  siRNA target sequence for Cysltr1 (NM_021476.2,979-997).
caagctaaaaaatacgttt

SEQ ID NO: 623113 - DNA, 19 bp, Mus musculus
  siRNA target sequence for Cysltr1 (NM_021476.2,1028-1046).
gtttcatcatcccttttgt

SEQ ID NO: 623114 - DNA, 19 bp, Mus musculus
  siRNA target sequence for Cysltr1 (NM_021476.2,1050-1068).
cataattgtctgttacaca

SEQ ID NO: 623115 - DNA, 19 bp, Mus musculus
  siRNA target sequence for Cysltr1 (NM_021476.2,1057-1075).
gtctgttacacaatgatca

SEQ ID NO: 623116 - DNA, 19 bp, Mus musculus
  siRNA target sequence for Cysltr1 (NM_021476.2,1071-1089).
gatcattctgaccttacta

SEQ ID NO: 623117 - DNA, 19 bp, Mus musculus
  siRNA target sequence for Cysltr1 (NM_021476.2,1130-1148).
ctatagggatgatcatagt

SEQ ID NO: 623118 - DNA, 19 bp, Mus musculus
  siRNA target sequence for Cysltr1 (NM_021476.2,1170-1188).
gagcttcatgccatatcat

SEQ ID NO: 623119 - DNA, 19 bp, Mus musculus
  siRNA target sequence for Cysltr1 (NM_021476.2,1172-1190).
gcttcatgccatatcatat

SEQ ID NO: 623120 - DNA, 19 bp, Mus musculus
  siRNA target sequence for Cysltr1 (NM_021476.2,1173-1191).
cttcatgccatatcatatt

SEQ ID NO: 623121 - DNA, 19 bp, Mus musculus
  siRNA target sequence for Cysltr1 (NM_021476.2,1212-1230).
ccttttacacagtgaaact

SEQ ID NO: 623122 - DNA, 19 bp, Mus musculus
  siRNA target sequence for Cysltr1 (NM_021476.2,1225-1243).
gaaactagaccctgtgatt

SEQ ID NO: 623123 - DNA, 19 bp, Mus musculus
  siRNA target sequence for Cysltr1 (NM_021476.2,1269-1287).
ggtcataaccttatctcta

SEQ ID NO: 623124 - DNA, 19 bp, Mus musculus
  siRNA target sequence for Cysltr1 (NM_021476.2,1285-1303).
ctagctgcatcaaattgtt

SEQ ID NO: 623125 - DNA, 19 bp, Mus musculus
  siRNA target sequence for Cysltr1 (NM_021476.2,1352-1370).
ggctatctacatttagaaa

SEQ ID NO: 623126 - DNA, 19 bp, Mus musculus
  siRNA target sequence for Cysltr1 (NM_021476.2,1432-1450).
gaagaaatatgtaacgaat

SEQ ID NO: 623127 - DNA, 19 bp, Mus musculus
  siRNA target sequence for Ltb4r1 (NM_008519.1,91-109).
ggctgcaaacactacatct

SEQ ID NO: 623128 - DNA, 19 bp, Mus musculus
  siRNA target sequence for Ltb4r1 (NM_008519.1,188-206).
gggcttcctggcaatagct

SEQ ID NO: 623129 - DNA, 19 bp, Mus musculus
  siRNA target sequence for Ltb4r1 (NM_008519.1,189-207).
ggcttcctggcaatagctt

SEQ ID NO: 623130 - DNA, 19 bp, Mus musculus
  siRNA target sequence for Ltb4r1 (NM_008519.1,190-208).
gcttcctggcaatagcttt

SEQ ID NO: 623131 - DNA, 19 bp, Mus musculus
  siRNA target sequence for Ltb4r1 (NM_008519.1,363-381).
gccgcctgtgccactatgt

SEQ ID NO: 623132 - DNA, 19 bp, Mus musculus
  siRNA target sequence for Ltb4r1 (NM_008519.1,459-477).
cctttatgtcccaaaaggt

SEQ ID NO: 623133 - DNA, 19 bp, Mus musculus
  siRNA target sequence for Ltb4r1 (NM_008519.1,460-478).
ctttatgtcccaaaaggtt

SEQ ID NO: 623134 - DNA, 19 bp, Mus musculus
  siRNA target sequence for Ltb4r1 (NM_008519.1,468-486).
cccaaaaggttcgtactaa

SEQ ID NO: 623135 - DNA, 19 bp, Mus musculus
  siRNA target sequence for Ltb4r1 (NM_008519.1,514-532).
catctgggtggtgtctttt

SEQ ID NO: 623136 - DNA, 19 bp, Mus musculus
  siRNA target sequence for Ltb4r1 (NM_008519.1,540-558).
ccataccggtccttgtgta

SEQ ID NO: 623137 - DNA, 19 bp, Mus musculus
  siRNA target sequence for Ltb4r1 (NM_008519.1,550-568).
ccttgtgtaccgtacagta

SEQ ID NO: 623138 - DNA, 19 bp, Mus musculus
  siRNA target sequence for Ltb4r1 (NM_008519.1,551-569).
cttgtgtaccgtacagtaa

SEQ ID NO: 623139 - DNA, 19 bp, Mus musculus
  siRNA target sequence for Ltb4r1 (NM_008519.1,554-572).
gtgtaccgtacagtaaaat

SEQ ID NO: 623140 - DNA, 19 bp, Mus musculus
  siRNA target sequence for Ltb4r1 (NM_008519.1,600-618).
cgaactatcccaacaaaga

SEQ ID NO: 623141 - DNA, 19 bp, Mus musculus
  siRNA target sequence for Ltb4r2 (NM_020490.1,16-34).
cgtccgcctgggaatgaga

SEQ ID NO: 623142 - DNA, 19 bp, Mus musculus
  siRNA target sequence for Ltb4r2 (NM_020490.1,109-127).
ggcaatggcttcgtagtat

SEQ ID NO: 623143 - DNA, 19 bp, Mus musculus
  siRNA target sequence for Ltb4r2 (NM_020490.1,278-296).
gctgcaaggcggtgtacta

SEQ ID NO: 623144 - DNA, 19 bp, Mus musculus
  siRNA target sequence for Ltb4r2 (NM_020490.1,716-734).
cctaccacgcggtcaatct

SEQ ID NO: 623145 - DNA, 19 bp, Mus musculus
  siRNA target sequence for Ltb4r2 (NM_020490.1,972-990).
catggaactccgaactact

SEQ ID NO: 623146 - DNA, 19 bp, Mus musculus
  siRNA target sequence for Ltb4r2 (NM_020490.1,986-1004).
ctactcctaagctgaaagt

SEQ ID NO: 623147 - DNA, 19 bp, Mus musculus
  siRNA target sequence for Ltb4r2 (NM_020490.1,989-1007).
ctcctaagctgaaagtaat

SEQ ID NO: 623148 - DNA, 19 bp, Mus musculus
  siRNA target sequence for Tshr (NM_011648.2,362-380).
cggctggaaccacattctt

SEQ ID NO: 623149 - DNA, 19 bp, Mus musculus
  siRNA target sequence for Tshr (NM_011648.2,391-409).
gagtaaaatgactcacata

SEQ ID NO: 623150 - DNA, 19 bp, Mus musculus
  siRNA target sequence for Tshr (NM_011648.2,416-434).
cggaacaccagaagcttaa

SEQ ID NO: 623151 - DNA, 19 bp, Mus musculus
  siRNA target sequence for Tshr (NM_011648.2,421-439).
caccagaagcttaacctat

SEQ ID NO: 623152 - DNA, 19 bp, Mus musculus
  siRNA target sequence for Tshr (NM_011648.2,423-441).
ccagaagcttaacctatat

SEQ ID NO: 623153 - DNA, 19 bp, Mus musculus
  siRNA target sequence for Tshr (NM_011648.2,463-481).
gctccccttgctcaagttt

SEQ ID NO: 623154 - DNA, 19 bp, Mus musculus
  siRNA target sequence for Tshr (NM_011648.2,466-484).
ccccttgctcaagtttctt

SEQ ID NO: 623155 - DNA, 19 bp, Mus musculus
  siRNA target sequence for Tshr (NM_011648.2,493-511).
caatactggacttagaata

SEQ ID NO: 623156 - DNA, 19 bp, Mus musculus
  siRNA target sequence for Tshr (NM_011648.2,515-533).
cctgacttgaccaaaattt

SEQ ID NO: 623157 - DNA, 19 bp, Mus musculus
  siRNA target sequence for Tshr (NM_011648.2,569-587).
gacaacccttacatgactt

SEQ ID NO: 623158 - DNA, 19 bp, Mus musculus
  siRNA target sequence for Tshr (NM_011648.2,627-645).
ccttgaccctgaaactgta

SEQ ID NO: 623159 - DNA, 19 bp, Mus musculus
  siRNA target sequence for Tshr (NM_011648.2,643-661).
gtacaacaatggatttact

SEQ ID NO: 623160 - DNA, 19 bp, Mus musculus
  siRNA target sequence for Tshr (NM_011648.2,695-713).
ctggatgctgtttacctaa

SEQ ID NO: 623161 - DNA, 19 bp, Mus musculus
  siRNA target sequence for Tshr (NM_011648.2,749-767).
gcctttggaggagtataca

SEQ ID NO: 623162 - DNA, 19 bp, Mus musculus
  siRNA target sequence for Tshr (NM_011648.2,842-860).
gaactgatcgcaaaagaca

SEQ ID NO: 623163 - DNA, 19 bp, Mus musculus
  siRNA target sequence for Tshr (NM_011648.2,857-875).
gacacctggactctcaaaa

SEQ ID NO: 623164 - DNA, 19 bp, Mus musculus
  siRNA target sequence for Tshr (NM_011648.2,861-879).
cctggactctcaaaaagct

SEQ ID NO: 623165 - DNA, 19 bp, Mus musculus
  siRNA target sequence for Tshr (NM_011648.2,878-896).
ctcccgctgtcgttgagtt

SEQ ID NO: 623166 - DNA, 19 bp, Mus musculus
  siRNA target sequence for Tshr (NM_011648.2,933-951).
gccactgctgcgcttttaa

SEQ ID NO: 623167 - DNA, 19 bp, Mus musculus
  siRNA target sequence for Tshr (NM_011648.2,979-997).
ggagtctttgatgtgtaat

SEQ ID NO: 623168 - DNA, 19 bp, Mus musculus
  siRNA target sequence for Tshr (NM_011648.2,1053-1071).
ccatctaccaggaatatga

SEQ ID NO: 623169 - DNA, 19 bp, Mus musculus
  siRNA target sequence for Tshr (NM_011648.2,1087-1105).
caacagtgttgggtacaaa

SEQ ID NO: 623170 - DNA, 19 bp, Mus musculus
  siRNA target sequence for Tshr (NM_011648.2,1129-1147).
cccaagcaactctcactat

SEQ ID NO: 623171 - DNA, 19 bp, Mus musculus
  siRNA target sequence for Tshr (NM_011648.2,1134-1152).
gcaactctcactattacgt

SEQ ID NO: 623172 - DNA, 19 bp, Mus musculus
  siRNA target sequence for Tshr (NM_011648.2,1140-1158).
ctcactattacgtcttctt

SEQ ID NO: 623173 - DNA, 19 bp, Mus musculus
  siRNA target sequence for Tshr (NM_011648.2,1150-1168).
cgtcttctttgaagaacaa

SEQ ID NO: 623174 - DNA, 19 bp, Mus musculus
  siRNA target sequence for Tshr (NM_011648.2,1189-1207).
cggccaagagctcaaaaat

SEQ ID NO: 623175 - DNA, 19 bp, Mus musculus
  siRNA target sequence for Tshr (NM_011648.2,1230-1248).
ccttcgagagccactatga

SEQ ID NO: 623176 - DNA, 19 bp, Mus musculus
  siRNA target sequence for Tshr (NM_011648.2,1289-1307).
cccaagtcggacgagttta

SEQ ID NO: 623177 - DNA, 19 bp, Mus musculus
  siRNA target sequence for Tshr (NM_011648.2,1290-1308).
ccaagtcggacgagtttaa

SEQ ID NO: 623178 - DNA, 19 bp, Mus musculus
  siRNA target sequence for Tshr (NM_011648.2,1483-1501).
ggtatacctgcttctcatt

SEQ ID NO: 623179 - DNA, 19 bp, Mus musculus
  siRNA target sequence for Tshr (NM_011648.2,1595-1613).
gttttcgccagtgagttat

SEQ ID NO: 623180 - DNA, 19 bp, Mus musculus
  siRNA target sequence for Tshr (NM_011648.2,1884-1902).
gttcctgctatgtgaagat

SEQ ID NO: 623181 - DNA, 19 bp, Mus musculus
  siRNA target sequence for Tshr (NM_011648.2,1927-1945).
gtacaaccctcgagataaa

SEQ ID NO: 623182 - DNA, 19 bp, Mus musculus
  siRNA target sequence for Tshr (NM_011648.2,2021-2039).
gcgctgtcggcacttatga

SEQ ID NO: 623183 - DNA, 19 bp, Mus musculus
  siRNA target sequence for Tshr (NM_011648.2,2022-2040).
cgctgtcggcacttatgaa

SEQ ID NO: 623184 - DNA, 19 bp, Mus musculus
  siRNA target sequence for Tshr (NM_011648.2,2024-2042).
ctgtcggcacttatgaaca

SEQ ID NO: 623185 - DNA, 19 bp, Mus musculus
  siRNA target sequence for Tshr (NM_011648.2,2044-2062).
gcctctaatcactgttact

SEQ ID NO: 623186 - DNA, 19 bp, Mus musculus
  siRNA target sequence for Tshr (NM_011648.2,2048-2066).
ctaatcactgttactaact

SEQ ID NO: 623187 - DNA, 19 bp, Mus musculus
  siRNA target sequence for Tshr (NM_011648.2,2055-2073).
ctgttactaactccaaaat

SEQ ID NO: 623188 - DNA, 19 bp, Mus musculus
  siRNA target sequence for Tshr (NM_011648.2,2057-2075).
gttactaactccaaaatct

SEQ ID NO: 623189 - DNA, 19 bp, Mus musculus
  siRNA target sequence for Tshr (NM_011648.2,2230-2248).
caacaatagcactggtatt

SEQ ID NO: 623190 - DNA, 19 bp, Mus musculus
  siRNA target sequence for Tshr (NM_011648.2,2241-2259).
ctggtattcagatccaaaa

SEQ ID NO: 623191 - DNA, 19 bp, Mus musculus
  siRNA target sequence for Tshr (NM_011648.2,2243-2261).
ggtattcagatccaaaaga

SEQ ID NO: 623192 - DNA, 19 bp, Mus musculus
  siRNA target sequence for Tshr (NM_011648.2,2289-2307).
ccaacatgcaagataccta

SEQ ID NO: 623193 - DNA, 19 bp, Mus musculus
  siRNA target sequence for Tshr (NM_011648.2,2290-2308).
caacatgcaagatacctat

SEQ ID NO: 623194 - DNA, 19 bp, Mus musculus
  siRNA target sequence for Tshr (NM_011648.2,2293-2311).
catgcaagatacctatgaa

SEQ ID NO: 623195 - DNA, 19 bp, Mus musculus
  siRNA target sequence for Tshr (NM_011648.2,2304-2322).
cctatgaactgcttggaaa

SEQ ID NO: 623196 - DNA, 19 bp, Mus musculus
  siRNA target sequence for Tshr (NM_011648.2,2349-2367).
gacaaatctcagaagagta

SEQ ID NO: 623197 - DNA, 19 bp, Mus musculus
  siRNA target sequence for Gpr24 (NM_145132.1,53-71).
ccgatggccaggataattt

SEQ ID NO: 623198 - DNA, 19 bp, Mus musculus
  siRNA target sequence for Gpr24 (NM_145132.1,58-76).
ggccaggataatttcacat

SEQ ID NO: 623199 - DNA, 19 bp, Mus musculus
  siRNA target sequence for Gpr24 (NM_145132.1,59-77).
gccaggataatttcacatt

SEQ ID NO: 623200 - DNA, 19 bp, Mus musculus
  siRNA target sequence for Gpr24 (NM_145132.1,168-186).
gggaaactccacagtcatt

SEQ ID NO: 623201 - DNA, 19 bp, Mus musculus
  siRNA target sequence for Gpr24 (NM_145132.1,169-187).
ggaaactccacagtcattt

SEQ ID NO: 623202 - DNA, 19 bp, Mus musculus
  siRNA target sequence for Gpr24 (NM_145132.1,190-208).
gccgtggtgaagaaatcca

SEQ ID NO: 623203 - DNA, 19 bp, Mus musculus
  siRNA target sequence for Gpr24 (NM_145132.1,191-209).
ccgtggtgaagaaatccaa

SEQ ID NO: 623204 - DNA, 19 bp, Mus musculus
  siRNA target sequence for Gpr24 (NM_145132.1,303-321).
ccagctcatgggtaatggt

SEQ ID NO: 623205 - DNA, 19 bp, Mus musculus
  siRNA target sequence for Gpr24 (NM_145132.1,326-344).
ggcactttggggaaaccat

SEQ ID NO: 623206 - DNA, 19 bp, Mus musculus
  siRNA target sequence for Gpr24 (NM_145132.1,506-524).
ctctctcgttcattagcat

SEQ ID NO: 623207 - DNA, 19 bp, Mus musculus
  siRNA target sequence for Gpr24 (NM_145132.1,581-599).
gtggcatccgcctaccaaa

SEQ ID NO: 623208 - DNA, 19 bp, Mus musculus
  siRNA target sequence for Gpr24 (NM_145132.1,601-619).
ccagatactgatctttact

SEQ ID NO: 623209 - DNA, 19 bp, Mus musculus
  siRNA target sequence for Gpr24 (NM_145132.1,621-639).
gttcactctgtatcagttt

SEQ ID NO: 623210 - DNA, 19 bp, Mus musculus
  siRNA target sequence for Gpr24 (NM_145132.1,674-692).
ctgctgcgtacgtgaaaat

SEQ ID NO: 623211 - DNA, 19 bp, Mus musculus
  siRNA target sequence for Gpr24 (NM_145132.1,863-881).
cattcgtctacctgtacaa

SEQ ID NO: 623212 - DNA, 19 bp, Mus musculus
  siRNA target sequence for Gpr24 (NM_145132.1,942-960).
ctgtgagacctttcgaaaa

SEQ ID NO: 623213 - DNA, 19 bp, Mus musculus
  siRNA target sequence for Gpr106 (NM_080468.1,198-216).
ggctcctacttcatgtcat

SEQ ID NO: 623214 - DNA, 19 bp, Mus musculus
  siRNA target sequence for Gpr106 (NM_080468.1,221-239).
ctgacagaggtcaaagatt

SEQ ID NO: 623215 - DNA, 19 bp, Mus musculus
  siRNA target sequence for Gpr106 (NM_080468.1,393-411).
gtggatggacaaccatatt

SEQ ID NO: 623216 - DNA, 19 bp, Mus musculus
  siRNA target sequence for Gpr106 (NM_080468.1,417-435).
cagtccatgggaatgtcaa

SEQ ID NO: 623217 - DNA, 19 bp, Mus musculus
  siRNA target sequence for Gpr106 (NM_080468.1,431-449).
gtcaataaagtgacattga

SEQ ID NO: 623218 - DNA, 19 bp, Mus musculus
  siRNA target sequence for Gpr106 (NM_080468.1,513-531).
gtgtaaaggctgacttaaa

SEQ ID NO: 623219 - DNA, 19 bp, Mus musculus
  siRNA target sequence for Gpr106 (NM_080468.1,549-567).
ccagcaacgtaacattact

SEQ ID NO: 623220 - DNA, 19 bp, Mus musculus
  siRNA target sequence for Gpr106 (NM_080468.1,550-568).
cagcaacgtaacattacta

SEQ ID NO: 623221 - DNA, 19 bp, Mus musculus
  siRNA target sequence for Gpr106 (NM_080468.1,553-571).
caacgtaacattactatct

SEQ ID NO: 623222 - DNA, 19 bp, Mus musculus
  siRNA target sequence for Gpr106 (NM_080468.1,556-574).
cgtaacattactatctctt

SEQ ID NO: 623223 - DNA, 19 bp, Mus musculus
  siRNA target sequence for Gpr106 (NM_080468.1,561-579).
cattactatctcttaagaa

SEQ ID NO: 623224 - DNA, 19 bp, Mus musculus
  siRNA target sequence for Gpr106 (NM_080468.1,607-625).
ggtcttcagcagatacaca

SEQ ID NO: 623225 - DNA, 19 bp, Mus musculus
  siRNA target sequence for Gpr106 (NM_080468.1,678-696).
gagcattccttggattaca

SEQ ID NO: 623226 - DNA, 19 bp, Mus musculus
  siRNA target sequence for Gpr106 (NM_080468.1,685-703).
ccttggattacataatcta

SEQ ID NO: 623227 - DNA, 19 bp, Mus musculus
  siRNA target sequence for Gpr106 (NM_080468.1,689-707).
ggattacataatctacaaa

SEQ ID NO: 623228 - DNA, 19 bp, Mus musculus
  siRNA target sequence for Gpr106 (NM_080468.1,716-734).
ctcagccataactgcatta

SEQ ID NO: 623229 - DNA, 19 bp, Mus musculus
  siRNA target sequence for Gpr106 (NM_080468.1,744-762).
ggcctgggatattcaaaga

SEQ ID NO: 623230 - DNA, 19 bp, Mus musculus
  siRNA target sequence for Gpr106 (NM_080468.1,772-790).
gcttgcttggctaatttta

SEQ ID NO: 623231 - DNA, 19 bp, Mus musculus
  siRNA target sequence for Gpr106 (NM_080468.1,799-817).
cccgatcaccagaatctca

SEQ ID NO: 623232 - DNA, 19 bp, Mus musculus
  siRNA target sequence for Gpr106 (NM_080468.1,833-851).
gggttaaactccttgtttt

SEQ ID NO: 623233 - DNA, 19 bp, Mus musculus
  siRNA target sequence for Gpr106 (NM_080468.1,877-895).
cgaggcccttcctgaaaca

SEQ ID NO: 623234 - DNA, 19 bp, Mus musculus
  siRNA target sequence for Gpr106 (NM_080468.1,878-896).
gaggcccttcctgaaacat

SEQ ID NO: 623235 - DNA, 19 bp, Mus musculus
  siRNA target sequence for Gpr106 (NM_080468.1,881-899).
gcccttcctgaaacattgt

SEQ ID NO: 623236 - DNA, 19 bp, Mus musculus
  siRNA target sequence for Gpr106 (NM_080468.1,924-942).
gggtggatctggcaaacaa

SEQ ID NO: 623237 - DNA, 19 bp, Mus musculus
  siRNA target sequence for Gpr106 (NM_080468.1,925-943).
ggtggatctggcaaacaat

SEQ ID NO: 623238 - DNA, 19 bp, Mus musculus
  siRNA target sequence for Gpr106 (NM_080468.1,945-963).
gaataaagtacataacgaa

SEQ ID NO: 623239 - DNA, 19 bp, Mus musculus
  siRNA target sequence for Gpr106 (NM_080468.1,985-1003).
ctcgctcacggttctgttt

SEQ ID NO: 623240 - DNA, 19 bp, Mus musculus
  siRNA target sequence for Gpr106 (NM_080468.1,1006-1024).
gcctagaaatcaaattggt

SEQ ID NO: 623241 - DNA, 19 bp, Mus musculus
  siRNA target sequence for Gpr106 (NM_080468.1,1007-1025).
cctagaaatcaaattggtt

SEQ ID NO: 623242 - DNA, 19 bp, Mus musculus
  siRNA target sequence for Gpr106 (NM_080468.1,1008-1026).
ctagaaatcaaattggttt

SEQ ID NO: 623243 - DNA, 19 bp, Mus musculus
  siRNA target sequence for Gpr106 (NM_080468.1,1070-1088).
ctggacctgtctagcaata

SEQ ID NO: 623244 - DNA, 19 bp, Mus musculus
  siRNA target sequence for Gpr106 (NM_080468.1,1073-1091).
gacctgtctagcaatatga

SEQ ID NO: 623245 - DNA, 19 bp, Mus musculus
  siRNA target sequence for Gpr106 (NM_080468.1,1075-1093).
cctgtctagcaatatgata

SEQ ID NO: 623246 - DNA, 19 bp, Mus musculus
  siRNA target sequence for Gpr106 (NM_080468.1,1076-1094).
ctgtctagcaatatgataa

SEQ ID NO: 623247 - DNA, 19 bp, Mus musculus
  siRNA target sequence for Gpr106 (NM_080468.1,1078-1096).
gtctagcaatatgataaca

SEQ ID NO: 623248 - DNA, 19 bp, Mus musculus
  siRNA target sequence for Gpr106 (NM_080468.1,1080-1098).
ctagcaatatgataacaaa

SEQ ID NO: 623249 - DNA, 19 bp, Mus musculus
  siRNA target sequence for Gpr106 (NM_080468.1,1152-1170).
catccaaccctcttctgta

SEQ ID NO: 623250 - DNA, 19 bp, Mus musculus
  siRNA target sequence for Gpr106 (NM_080468.1,1223-1241).
gaaaggatagagattccaa

SEQ ID NO: 623251 - DNA, 19 bp, Mus musculus
  siRNA target sequence for Gpr106 (NM_080468.1,1227-1245).
ggatagagattccaaacat

SEQ ID NO: 623252 - DNA, 19 bp, Mus musculus
  siRNA target sequence for Gpr106 (NM_080468.1,1228-1246).
gatagagattccaaacata

SEQ ID NO: 623253 - DNA, 19 bp, Mus musculus
  siRNA target sequence for Gpr106 (NM_080468.1,1266-1284).
caatgaagaacctttctca

SEQ ID NO: 623254 - DNA, 19 bp, Mus musculus
  siRNA target sequence for Gpr106 (NM_080468.1,1321-1339).
cccccatgtccgaatctgt

SEQ ID NO: 623255 - DNA, 19 bp, Mus musculus
  siRNA target sequence for Gpr106 (NM_080468.1,1322-1340).
ccccatgtccgaatctgta

SEQ ID NO: 623256 - DNA, 19 bp, Mus musculus
  siRNA target sequence for Gpr106 (NM_080468.1,1323-1341).
cccatgtccgaatctgtat

SEQ ID NO: 623257 - DNA, 19 bp, Mus musculus
  siRNA target sequence for Gpr106 (NM_080468.1,1345-1363).
gtcgactgatggtatttct

SEQ ID NO: 623258 - DNA, 19 bp, Mus musculus
  siRNA target sequence for Gpr106 (NM_080468.1,1454-1472).
gccgtgagatctctcatta

SEQ ID NO: 623259 - DNA, 19 bp, Mus musculus
  siRNA target sequence for Gpr106 (NM_080468.1,1455-1473).
ccgtgagatctctcattaa

SEQ ID NO: 623260 - DNA, 19 bp, Mus musculus
  siRNA target sequence for Gpr106 (NM_080468.1,1466-1484).
ctcattaaggctgagaata

SEQ ID NO: 623261 - DNA, 19 bp, Mus musculus
  siRNA target sequence for Gpr106 (NM_080468.1,1468-1486).
cattaaggctgagaataca

SEQ ID NO: 623262 - DNA, 19 bp, Mus musculus
  siRNA target sequence for Gpr106 (NM_080468.1,1490-1508).
cacgctatgtccatcaaaa

SEQ ID NO: 623263 - DNA, 19 bp, Mus musculus
  siRNA target sequence for Gpr106 (NM_080468.1,1501-1519).
catcaaaatcctttgttgt

SEQ ID NO: 623264 - DNA, 19 bp, Mus musculus
  siRNA target sequence for Gpr106 (NM_080468.1,1699-1717).
gaagttccttgtcatagta

SEQ ID NO: 623265 - DNA, 19 bp, Mus musculus
  siRNA target sequence for Gpr106 (NM_080468.1,1809-1827).
cgttcaccagagaggatta

SEQ ID NO: 623266 - DNA, 19 bp, Mus musculus
  siRNA target sequence for Gpr106 (NM_080468.1,1822-1840).
ggattatttcggcaacttt

SEQ ID NO: 623267 - DNA, 19 bp, Mus musculus
  siRNA target sequence for Gpr106 (NM_080468.1,1823-1841).
gattatttcggcaactttt

SEQ ID NO: 623268 - DNA, 19 bp, Mus musculus
  siRNA target sequence for Gpr106 (NM_080468.1,1833-1851).
gcaacttttatgggaaaaa

SEQ ID NO: 623269 - DNA, 19 bp, Mus musculus
  siRNA target sequence for Gpr106 (NM_080468.1,1949-1967).
ctcgtcatcgtgatttcct

SEQ ID NO: 623270 - DNA, 19 bp, Mus musculus
  siRNA target sequence for Gpr106 (NM_080468.1,1951-1969).
cgtcatcgtgatttcctat

SEQ ID NO: 623271 - DNA, 19 bp, Mus musculus
  siRNA target sequence for Gpr106 (NM_080468.1,2048-2066).
gttgcaaaccggttctttt

SEQ ID NO: 623272 - DNA, 19 bp, Mus musculus
  siRNA target sequence for Gpr106 (NM_080468.1,2051-2069).
gcaaaccggttctttttta

SEQ ID NO: 623273 - DNA, 19 bp, Mus musculus
  siRNA target sequence for Gpr106 (NM_080468.1,2099-2117).
cctgtgtttgtcgttaaga

SEQ ID NO: 623274 - DNA, 19 bp, Mus musculus
  siRNA target sequence for Gpr106 (NM_080468.1,2100-2118).
ctgtgtttgtcgttaagat

SEQ ID NO: 623275 - DNA, 19 bp, Mus musculus
  siRNA target sequence for Gpr106 (NM_080468.1,2140-2158).
gataccaggcacaatcact

SEQ ID NO: 623276 - DNA, 19 bp, Mus musculus
  siRNA target sequence for Gpr106 (NM_080468.1,2160-2178).
cctggatcgtggttttttt

SEQ ID NO: 623277 - DNA, 19 bp, Mus musculus
  siRNA target sequence for Gpr106 (NM_080468.1,2184-2202).
cggtgaacagcgccttaaa

SEQ ID NO: 623278 - DNA, 19 bp, Mus musculus
  siRNA target sequence for Gpr106 (NM_080468.1,2217-2235).
ctctgacgacctccttttt

SEQ ID NO: 623279 - DNA, 19 bp, Mus musculus
  siRNA target sequence for Gpr106 (NM_080468.1,2223-2241).
cgacctccttttttaagga

SEQ ID NO: 623280 - DNA, 19 bp, Mus musculus
  siRNA target sequence for Gpr106 (NM_080468.1,2275-2293).
gaaacccatcttcaaagtt

SEQ ID NO: 623281 - DNA, 19 bp, Mus musculus
  siRNA target sequence for Gpr106 (NM_080468.1,2279-2297).
cccatcttcaaagttaaga

SEQ ID NO: 623282 - DNA, 19 bp, Mus musculus
  siRNA target sequence for Gpr106 (NM_080468.1,2326-2344).
gacagacgagtcttcactt

SEQ ID NO: 623283 - DNA, 19 bp, Mus musculus
  siRNA target sequence for Gpr106 (NM_080468.1,2328-2346).
cagacgagtcttcacttaa

SEQ ID NO: 623284 - DNA, 19 bp, Mus musculus
  siRNA target sequence for Gpr106 (NM_080468.1,2332-2350).
cgagtcttcacttaaactt

SEQ ID NO: 623285 - DNA, 19 bp, Mus musculus
  siRNA target sequence for Gpr106 (NM_080468.1,2348-2366).
cttggagtgttgagcaaaa

SEQ ID NO: 623286 - DNA, 19 bp, Mus musculus
  siRNA target sequence for 1110065N12Rik (NM_178406.1,284-302).
ccacccacatgctcaatgt

SEQ ID NO: 623287 - DNA, 19 bp, Mus musculus
  siRNA target sequence for 1110065N12Rik (NM_178406.1,385-403).
gtcttcgtgtcgacattct

SEQ ID NO: 623288 - DNA, 19 bp, Mus musculus
  siRNA target sequence for 1110065N12Rik (NM_178406.1,508-526).
caggcggtgcacacagtta

SEQ ID NO: 623289 - DNA, 19 bp, Mus musculus
  siRNA target sequence for 1110065N12Rik (NM_178406.1,807-825).
gcgtcgctcctccattgat

SEQ ID NO: 623290 - DNA, 19 bp, Mus musculus
  siRNA target sequence for 1110065N12Rik (NM_178406.1,839-857).
ccagaacttcgctacagat

SEQ ID NO: 623291 - DNA, 19 bp, Mus musculus
  siRNA target sequence for 1110065N12Rik (NM_178406.1,875-893).
ccattgtggtcatctatga

SEQ ID NO: 623292 - DNA, 19 bp, Mus musculus
  siRNA target sequence for 1110065N12Rik (NM_178406.1,916-934).
ctggtggtgagcttcagta

SEQ ID NO: 623293 - DNA, 19 bp, Mus musculus
  siRNA target sequence for 1110065N12Rik (NM_178406.1,1017-1035).
gttcctctggacttgtgat

SEQ ID NO: 623294 - DNA, 19 bp, Mus musculus
  siRNA target sequence for 1110065N12Rik (NM_178406.1,1092-1110).
cgacgaagattctgacaat

SEQ ID NO: 623295 - DNA, 19 bp, Mus musculus
  siRNA target sequence for 1110065N12Rik (NM_178406.1,1136-1154).
cccccgacatggtattgga

SEQ ID NO: 623296 - DNA, 19 bp, Mus musculus
  siRNA target sequence for 1110065N12Rik (NM_178406.1,1153-1171).
gagcgctctcttgactata

SEQ ID NO: 623297 - DNA, 19 bp, Mus musculus
  siRNA target sequence for 1110065N12Rik (NM_178406.1,1158-1176).
ctctcttgactatagctat

SEQ ID NO: 623298 - DNA, 19 bp, Mus musculus
  siRNA target sequence for 1110065N12Rik (NM_178406.1,1202-1220).
ggatggccaagtatgaact

SEQ ID NO: 623299 - DNA, 19 bp, Mus musculus
  siRNA target sequence for 1110065N12Rik (NM_178406.1,1464-1482).
ggcagctctggcacactta

SEQ ID NO: 623300 - DNA, 19 bp, Mus musculus
  siRNA target sequence for 4833406I20Rik (NM_175531.2,75-93).
gagatttcctaatcaagaa

SEQ ID NO: 623301 - DNA, 19 bp, Mus musculus
  siRNA target sequence for 4833406I20Rik (NM_175531.2,107-125).
gcctggaaaacgaacatca

SEQ ID NO: 623302 - DNA, 19 bp, Mus musculus
  siRNA target sequence for 4833406I20Rik (NM_175531.2,345-363).
gtcttcttattgcctttta

SEQ ID NO: 623303 - DNA, 19 bp, Mus musculus
  siRNA target sequence for 4833406I20Rik (NM_175531.2,466-484).
gcgctgcttgtctgtaata

SEQ ID NO: 623304 - DNA, 19 bp, Mus musculus
  siRNA target sequence for 4833406I20Rik (NM_175531.2,490-508).
catttggtatcgctgtaaa

SEQ ID NO: 623305 - DNA, 19 bp, Mus musculus
  siRNA target sequence for 4833406I20Rik (NM_175531.2,586-604).
ggcatgtggcttactgttt

SEQ ID NO: 623306 - DNA, 19 bp, Mus musculus
  siRNA target sequence for 4833406I20Rik (NM_175531.2,599-617).
ctgtttaatagctttgact

SEQ ID NO: 623307 - DNA, 19 bp, Mus musculus
  siRNA target sequence for 4833406I20Rik (NM_175531.2,616-634).
ctcttattggtgtgaaaca

SEQ ID NO: 623308 - DNA, 19 bp, Mus musculus
  siRNA target sequence for 4833406I20Rik (NM_175531.2,618-636).
cttattggtgtgaaacatt

SEQ ID NO: 623309 - DNA, 19 bp, Mus musculus
  siRNA target sequence for 4833406I20Rik (NM_175531.2,633-651).
catttgatgttatcactaa

SEQ ID NO: 623310 - DNA, 19 bp, Mus musculus
  siRNA target sequence for 4833406I20Rik (NM_175531.2,722-740).
ggctcacagcgaattccta

SEQ ID NO: 623311 - DNA, 19 bp, Mus musculus
  siRNA target sequence for 4833406I20Rik (NM_175531.2,723-741).
gctcacagcgaattcctat

SEQ ID NO: 623312 - DNA, 19 bp, Mus musculus
  siRNA target sequence for 4833406I20Rik (NM_175531.2,806-824).
gggatctattggatactct

SEQ ID NO: 623313 - DNA, 19 bp, Mus musculus
  siRNA target sequence for 4833406I20Rik (NM_175531.2,807-825).
ggatctattggatactcta

SEQ ID NO: 623314 - DNA, 19 bp, Mus musculus
  siRNA target sequence for 4833406I20Rik (NM_175531.2,808-826).
gatctattggatactctat

SEQ ID NO: 623315 - DNA, 19 bp, Mus musculus
  siRNA target sequence for 4833406I20Rik (NM_175531.2,832-850).
gattagcaatttttattat

SEQ ID NO: 623316 - DNA, 19 bp, Mus musculus
  siRNA target sequence for 4931403F16Rik (NM_175673.2,746-764).
ctgctcgccatctttctgt

SEQ ID NO: 623317 - DNA, 19 bp, Mus musculus
  siRNA target sequence for 4931403F16Rik (NM_175673.2,828-846).
gagcaactgttttttacct

SEQ ID NO: 623318 - DNA, 19 bp, Mus musculus
  siRNA target sequence for 4931403F16Rik (NM_175673.2,938-956).
gttactgtgtgcttagctt

SEQ ID NO: 623319 - DNA, 19 bp, Mus musculus
  siRNA target sequence for 4931403F16Rik (NM_175673.2,977-995).
ggtccagttgtgatgcttt

SEQ ID NO: 623320 - DNA, 19 bp, Mus musculus
  siRNA target sequence for 4931403F16Rik (NM_175673.2,1057-1075).
ggcaaatctctcatgttta

SEQ ID NO: 623321 - DNA, 19 bp, Mus musculus
  siRNA target sequence for 4931403F16Rik (NM_175673.2,1059-1077).
caaatctctcatgtttaga

SEQ ID NO: 623322 - DNA, 19 bp, Mus musculus
  siRNA target sequence for 4931403F16Rik (NM_175673.2,1083-1101).
ggtcggttgagatgctatt

SEQ ID NO: 623323 - DNA, 19 bp, Mus musculus
  siRNA target sequence for 4931403F16Rik (NM_175673.2,1084-1102).
gtcggttgagatgctattt

SEQ ID NO: 623324 - DNA, 19 bp, Mus musculus
  siRNA target sequence for 4931403F16Rik (NM_175673.2,1086-1104).
cggttgagatgctattttt

SEQ ID NO: 623325 - DNA, 19 bp, Mus musculus
  siRNA target sequence for 4931403F16Rik (NM_175673.2,1087-1105).
ggttgagatgctatttttt

SEQ ID NO: 623326 - DNA, 19 bp, Mus musculus
  siRNA target sequence for 4931403F16Rik (NM_175673.2,1416-1434).
cactgtccagggttaaatt

SEQ ID NO: 623327 - DNA, 19 bp, Mus musculus
  siRNA target sequence for 4933433E02Rik (NM_028910.1,720-738).
gagggatgtgcccttcaat

SEQ ID NO: 623328 - DNA, 19 bp, Mus musculus
  siRNA target sequence for 4933433E02Rik (NM_028910.1,977-995).
ggttcctccattgttgaaa

SEQ ID NO: 623329 - DNA, 19 bp, Mus musculus
  siRNA target sequence for 4933433E02Rik (NM_028910.1,978-996).
gttcctccattgttgaaat

SEQ ID NO: 623330 - DNA, 19 bp, Mus musculus
  siRNA target sequence for 4933433E02Rik (NM_028910.1,1325-1343).
ggtgattggagctgttaga

SEQ ID NO: 623331 - DNA, 19 bp, Mus musculus
  siRNA target sequence for 4933433E02Rik (NM_028910.1,1326-1344).
gtgattggagctgttagaa

SEQ ID NO: 623332 - DNA, 19 bp, Mus musculus
  siRNA target sequence for 4933433E02Rik (NM_028910.1,1328-1346).
gattggagctgttagaaga

SEQ ID NO: 623333 - DNA, 19 bp, Mus musculus
  siRNA target sequence for 4933433E02Rik (NM_028910.1,1345-1363).
gagtactggggagacatat

SEQ ID NO: 623334 - DNA, 19 bp, Mus musculus
  siRNA target sequence for 9330128H10Rik (NM_175678.2,137-155).
gtgccgatgctagattctt

SEQ ID NO: 623335 - DNA, 19 bp, Mus musculus
  siRNA target sequence for 9330128H10Rik (NM_175678.2,158-176).
ccagtagcttgcactgaaa

SEQ ID NO: 623336 - DNA, 19 bp, Mus musculus
  siRNA target sequence for 9330128H10Rik (NM_175678.2,159-177).
cagtagcttgcactgaaat

SEQ ID NO: 623337 - DNA, 19 bp, Mus musculus
  siRNA target sequence for 9330128H10Rik (NM_175678.2,219-237).
ccttctactcctcctttaa

SEQ ID NO: 623338 - DNA, 19 bp, Mus musculus
  siRNA target sequence for 9330128H10Rik (NM_175678.2,277-295).
cactattgtgggaaactct

SEQ ID NO: 623339 - DNA, 19 bp, Mus musculus
  siRNA target sequence for 9330128H10Rik (NM_175678.2,381-399).
cgggcctgatcaacatctt

SEQ ID NO: 623340 - DNA, 19 bp, Mus musculus
  siRNA target sequence for 9330128H10Rik (NM_175678.2,406-424).
cattatttggcgattcaca

SEQ ID NO: 623341 - DNA, 19 bp, Mus musculus
  siRNA target sequence for 9330128H10Rik (NM_175678.2,509-527).
gtgtccctcagcatagaca

SEQ ID NO: 623342 - DNA, 19 bp, Mus musculus
  siRNA target sequence for 9330128H10Rik (NM_175678.2,517-535).
cagcatagacagataccat

SEQ ID NO: 623343 - DNA, 19 bp, Mus musculus
  siRNA target sequence for 9330128H10Rik (NM_175678.2,528-546).
gataccatgccatcgttta

SEQ ID NO: 623344 - DNA, 19 bp, Mus musculus
  siRNA target sequence for 9330128H10Rik (NM_175678.2,625-643).
cattcccacgctgatcata

SEQ ID NO: 623345 - DNA, 19 bp, Mus musculus
  siRNA target sequence for 9330128H10Rik (NM_175678.2,735-753).
cctttctggtgtacttcat

SEQ ID NO: 623346 - DNA, 19 bp, Mus musculus
  siRNA target sequence for 9330128H10Rik (NM_175678.2,762-780).
caattatcagcgttatcta

SEQ ID NO: 623347 - DNA, 19 bp, Mus musculus
  siRNA target sequence for 9330128H10Rik (NM_175678.2,783-801).
gccttgtgatccgaactat

SEQ ID NO: 623348 - DNA, 19 bp, Mus musculus
  siRNA target sequence for 9330128H10Rik (NM_175678.2,784-802).
ccttgtgatccgaactatt

SEQ ID NO: 623349 - DNA, 19 bp, Mus musculus
  siRNA target sequence for 9330128H10Rik (NM_175678.2,785-803).
cttgtgatccgaactattt

SEQ ID NO: 623350 - DNA, 19 bp, Mus musculus
  siRNA target sequence for 9330128H10Rik (NM_175678.2,788-806).
gtgatccgaactatttgga

SEQ ID NO: 623351 - DNA, 19 bp, Mus musculus
  siRNA target sequence for 9330128H10Rik (NM_175678.2,793-811).
ccgaactatttggatgaaa

SEQ ID NO: 623352 - DNA, 19 bp, Mus musculus
  siRNA target sequence for 9330128H10Rik (NM_175678.2,794-812).
cgaactatttggatgaaaa

SEQ ID NO: 623353 - DNA, 19 bp, Mus musculus
  siRNA target sequence for 9330128H10Rik (NM_175678.2,821-839).
catgagacggtgatttcca

SEQ ID NO: 623354 - DNA, 19 bp, Mus musculus
  siRNA target sequence for 9330128H10Rik (NM_175678.2,965-983).
ctctttgacatattagaca

SEQ ID NO: 623355 - DNA, 19 bp, Mus musculus
  siRNA target sequence for 9330128H10Rik (NM_175678.2,971-989).
gacatattagacaacttca

SEQ ID NO: 623356 - DNA, 19 bp, Mus musculus
  siRNA target sequence for 9330128H10Rik (NM_175678.2,1050-1068).
ccttgaacagtgccattaa

SEQ ID NO: 623357 - DNA, 19 bp, Mus musculus
  siRNA target sequence for 9330128H10Rik (NM_175678.2,1109-1127).
ccctgcaagatgcaaagat

SEQ ID NO: 623358 - DNA, 19 bp, Mus musculus
  siRNA target sequence for 9330128H10Rik (NM_175678.2,1130-1148).
caggattccagaatgacat

SEQ ID NO: 623359 - DNA, 19 bp, Mus musculus
  siRNA target sequence for 9330128H10Rik (NM_175678.2,1169-1187).
cacgagatgcagattctct

SEQ ID NO: 623360 - DNA, 19 bp, Mus musculus
  siRNA target sequence for A530099J19Rik (NM_175688.2,414-432).
cctatagtgtggtcttctt

SEQ ID NO: 623361 - DNA, 19 bp, Mus musculus
  siRNA target sequence for A530099J19Rik (NM_175688.2,415-433).
ctatagtgtggtcttcttt

SEQ ID NO: 623362 - DNA, 19 bp, Mus musculus
  siRNA target sequence for A530099J19Rik (NM_175688.2,441-459).
ccgttggaacagttatgat

SEQ ID NO: 623363 - DNA, 19 bp, Mus musculus
  siRNA target sequence for A530099J19Rik (NM_175688.2,480-498).
ggaattgccaatcaatgat

SEQ ID NO: 623364 - DNA, 19 bp, Mus musculus
  siRNA target sequence for A530099J19Rik (NM_175688.2,492-510).
caatgattgccactatcat

SEQ ID NO: 623365 - DNA, 19 bp, Mus musculus
  siRNA target sequence for A530099J19Rik (NM_175688.2,500-518).
gccactatcatcattaata

SEQ ID NO: 623366 - DNA, 19 bp, Mus musculus
  siRNA target sequence for A530099J19Rik (NM_175688.2,501-519).
ccactatcatcattaatat

SEQ ID NO: 623367 - DNA, 19 bp, Mus musculus
  siRNA target sequence for A530099J19Rik (NM_175688.2,530-548).
cactcccttctcctgatta

SEQ ID NO: 623368 - DNA, 19 bp, Mus musculus
  siRNA target sequence for A530099J19Rik (NM_175688.2,554-572).
ccattccgcctcagttact

SEQ ID NO: 623369 - DNA, 19 bp, Mus musculus
  siRNA target sequence for A530099J19Rik (NM_175688.2,555-573).
cattccgcctcagttacta

SEQ ID NO: 623370 - DNA, 19 bp, Mus musculus
  siRNA target sequence for A530099J19Rik (NM_175688.2,616-634).
ggttagtggcgtcatatat

SEQ ID NO: 623371 - DNA, 19 bp, Mus musculus
  siRNA target sequence for A530099J19Rik (NM_175688.2,624-642).
gcgtcatatatggtcatat

SEQ ID NO: 623372 - DNA, 19 bp, Mus musculus
  siRNA target sequence for A530099J19Rik (NM_175688.2,626-644).
gtcatatatggtcatatgt

SEQ ID NO: 623373 - DNA, 19 bp, Mus musculus
  siRNA target sequence for A530099J19Rik (NM_175688.2,643-661).
gtaccttaccttcattttt

SEQ ID NO: 623374 - DNA, 19 bp, Mus musculus
  siRNA target sequence for A530099J19Rik (NM_175688.2,680-698).
cttcggctgctcatctatt

SEQ ID NO: 623375 - DNA, 19 bp, Mus musculus
  siRNA target sequence for A530099J19Rik (NM_175688.2,683-701).
cggctgctcatctatttta

SEQ ID NO: 623376 - DNA, 19 bp, Mus musculus
  siRNA target sequence for A530099J19Rik (NM_175688.2,684-702).
ggctgctcatctattttaa

SEQ ID NO: 623377 - DNA, 19 bp, Mus musculus
  siRNA target sequence for A530099J19Rik (NM_175688.2,733-751).
ccatgccgtggctctaagt

SEQ ID NO: 623378 - DNA, 19 bp, Mus musculus
  siRNA target sequence for A530099J19Rik (NM_175688.2,734-752).
catgccgtggctctaagta

SEQ ID NO: 623379 - DNA, 19 bp, Mus musculus
  siRNA target sequence for A530099J19Rik (NM_175688.2,737-755).
gccgtggctctaagtatta

SEQ ID NO: 623380 - DNA, 19 bp, Mus musculus
  siRNA target sequence for A530099J19Rik (NM_175688.2,738-756).
ccgtggctctaagtattat

SEQ ID NO: 623381 - DNA, 19 bp, Mus musculus
  siRNA target sequence for A530099J19Rik (NM_175688.2,739-757).
cgtggctctaagtattatt

SEQ ID NO: 623382 - DNA, 19 bp, Mus musculus
  siRNA target sequence for A530099J19Rik (NM_175688.2,778-796).
catctttttaccaatattt

SEQ ID NO: 623383 - DNA, 19 bp, Mus musculus
  siRNA target sequence for A530099J19Rik (NM_175688.2,809-827).
ggcacagatccaagttata

SEQ ID NO: 623384 - DNA, 19 bp, Mus musculus
  siRNA target sequence for A530099J19Rik (NM_175688.2,838-856).
gcggtgctttgagtttcat

SEQ ID NO: 623385 - DNA, 19 bp, Mus musculus
  siRNA target sequence for A530099J19Rik (NM_175688.2,841-859).
gtgctttgagtttcataaa

SEQ ID NO: 623386 - DNA, 19 bp, Mus musculus
  siRNA target sequence for A530099J19Rik (NM_175688.2,880-898).
catcatcataaactattct

SEQ ID NO: 623387 - DNA, 19 bp, Mus musculus
  siRNA target sequence for A530099J19Rik (NM_175688.2,929-947).
ctcctctttctgatacaga

SEQ ID NO: 623388 - DNA, 19 bp, Mus musculus
  siRNA target sequence for A530099J19Rik (NM_175688.2,946-964).
gatggctgtcattcttcat

SEQ ID NO: 623389 - DNA, 19 bp, Mus musculus
  siRNA target sequence for A530099J19Rik (NM_175688.2,974-992).
gcctattggcctgatatgt

SEQ ID NO: 623390 - DNA, 19 bp, Mus musculus
  siRNA target sequence for A530099J19Rik (NM_175688.2,1004-1022).
gagtacagagctcaaatca

SEQ ID NO: 623391 - DNA, 19 bp, Mus musculus
  siRNA target sequence for A530099J19Rik (NM_175688.2,1013-1031).
gctcaaatcaagagttttt

SEQ ID NO: 623392 - DNA, 19 bp, Mus musculus
  siRNA target sequence for A530099J19Rik (NM_175688.2,1078-1096).
cagggtatattttattcaa

SEQ ID NO: 623393 - DNA, 19 bp, Mus musculus
  siRNA target sequence for A530099J19Rik (NM_175688.2,1103-1121).
ccagagcaagaaaattcta

SEQ ID NO: 623394 - DNA, 19 bp, Mus musculus
  siRNA target sequence for A530099J19Rik (NM_175688.2,1108-1126).
gcaagaaaattctaagtta

SEQ ID NO: 623395 - DNA, 19 bp, Mus musculus
  siRNA target sequence for A530099J19Rik (NM_175688.2,1119-1137).
ctaagttaattctgtacaa

SEQ ID NO: 623396 - DNA, 19 bp, Mus musculus
  siRNA target sequence for A530099J19Rik (NM_175688.2,1165-1183).
ctgctgcctggatatgtta

SEQ ID NO: 623397 - DNA, 19 bp, Mus musculus
  siRNA target sequence for A530099J19Rik (NM_175688.2,1168-1186).
ctgcctggatatgttatgt

SEQ ID NO: 623398 - DNA, 19 bp, Mus musculus
  siRNA target sequence for A530099J19Rik (NM_175688.2,1170-1188).
gcctggatatgttatgttt

SEQ ID NO: 623399 - DNA, 19 bp, Mus musculus
  siRNA target sequence for A630033H20Rik (NM_175442.2,788-806).
gtatgatgtggctatcagt

SEQ ID NO: 623400 - DNA, 19 bp, Mus musculus
  siRNA target sequence for A630033H20Rik (NM_175442.2,808-826).
ctgctgtctggatcattgt

SEQ ID NO: 623401 - DNA, 19 bp, Mus musculus
  siRNA target sequence for A630033H20Rik (NM_175442.2,890-908).
gtgctttgctgatttagga

SEQ ID NO: 623402 - DNA, 19 bp, Mus musculus
  siRNA target sequence for A630033H20Rik (NM_175442.2,957-975).
gaacttggagggtttgtat

SEQ ID NO: 623403 - DNA, 19 bp, Mus musculus
  siRNA target sequence for A630033H20Rik (NM_175442.2,972-990).
gtattgcctgttgtaatta

SEQ ID NO: 623404 - DNA, 19 bp, Mus musculus
  siRNA target sequence for A630033H20Rik (NM_175442.2,977-995).
gcctgttgtaattattaca

SEQ ID NO: 623405 - DNA, 19 bp, Mus musculus
  siRNA target sequence for A630033H20Rik (NM_175442.2,1091-1109).
gtgtgcagtggtattcata

SEQ ID NO: 623406 - DNA, 19 bp, Mus musculus
  siRNA target sequence for A630033H20Rik (NM_175442.2,1093-1111).
gtgcagtggtattcatagt

SEQ ID NO: 623407 - DNA, 19 bp, Mus musculus
  siRNA target sequence for A630033H20Rik (NM_175442.2,1140-1158).
ccattctttatgatggtaa

SEQ ID NO: 623408 - DNA, 19 bp, Mus musculus
  siRNA target sequence for A630033H20Rik (NM_175442.2,1161-1179).
caacgtgtcttttcaaact

SEQ ID NO: 623409 - DNA, 19 bp, Mus musculus
  siRNA target sequence for A630033H20Rik (NM_175442.2,1246-1264).
gtcttgatccagttgtgta

SEQ ID NO: 623410 - DNA, 19 bp, Mus musculus
  siRNA target sequence for A630033H20Rik (NM_175442.2,1248-1266).
cttgatccagttgtgtatt

SEQ ID NO: 623411 - DNA, 19 bp, Mus musculus
  siRNA target sequence for A630033H20Rik (NM_175442.2,1251-1269).
gatccagttgtgtattatt

SEQ ID NO: 623412 - DNA, 19 bp, Mus musculus
  siRNA target sequence for A630033H20Rik (NM_175442.2,1279-1297).
cagaatttcgtgatcaatt

SEQ ID NO: 623413 - DNA, 19 bp, Mus musculus
  siRNA target sequence for A630033H20Rik (NM_175442.2,1281-1299).
gaatttcgtgatcaatttt

SEQ ID NO: 623414 - DNA, 19 bp, Mus musculus
  siRNA target sequence for A630033H20Rik (NM_175442.2,1413-1431).
ccaacacaatgtgatgaaa

SEQ ID NO: 623415 - DNA, 19 bp, Mus musculus
  siRNA target sequence for A630033H20Rik (NM_175442.2,1417-1435).
cacaatgtgatgaaatggt

SEQ ID NO: 623416 - DNA, 19 bp, Mus musculus
  siRNA target sequence for Admr (NM_007412.1,154-172).
cggacaatgattttagaga

SEQ ID NO: 623417 - DNA, 19 bp, Mus musculus
  siRNA target sequence for Admr (NM_007412.1,287-305).
cttcgtggtaggcttagta

SEQ ID NO: 623418 - DNA, 19 bp, Mus musculus
  siRNA target sequence for Admr (NM_007412.1,306-324).
gagaacgtcctggtgatat

SEQ ID NO: 623419 - DNA, 19 bp, Mus musculus
  siRNA target sequence for Admr (NM_007412.1,308-326).
gaacgtcctggtgatatgt

SEQ ID NO: 623420 - DNA, 19 bp, Mus musculus
  siRNA target sequence for Admr (NM_007412.1,355-373).
ggatgctgaacctgtacat

SEQ ID NO: 623421 - DNA, 19 bp, Mus musculus
  siRNA target sequence for Admr (NM_007412.1,467-485).
cttctcctgtcgcttcatt

SEQ ID NO: 623422 - DNA, 19 bp, Mus musculus
  siRNA target sequence for Admr (NM_007412.1,470-488).
ctcctgtcgcttcattcat

SEQ ID NO: 623423 - DNA, 19 bp, Mus musculus
  siRNA target sequence for Admr (NM_007412.1,472-490).
cctgtcgcttcattcatta

SEQ ID NO: 623424 - DNA, 19 bp, Mus musculus
  siRNA target sequence for Admr (NM_007412.1,473-491).
ctgtcgcttcattcattat

SEQ ID NO: 623425 - DNA, 19 bp, Mus musculus
  siRNA target sequence for Admr (NM_007412.1,475-493).
gtcgcttcattcattattt

SEQ ID NO: 623426 - DNA, 19 bp, Mus musculus
  siRNA target sequence for Admr (NM_007412.1,872-890).
gttgatgtgggcttacata

SEQ ID NO: 623427 - DNA, 19 bp, Mus musculus
  siRNA target sequence for Admr (NM_007412.1,875-893).
gatgtgggcttacatagtt

SEQ ID NO: 623428 - DNA, 19 bp, Mus musculus
  siRNA target sequence for Admr (NM_007412.1,880-898).
gggcttacatagttgtctt

SEQ ID NO: 623429 - DNA, 19 bp, Mus musculus
  siRNA target sequence for Admr (NM_007412.1,881-899).
ggcttacatagttgtcttt

SEQ ID NO: 623430 - DNA, 19 bp, Mus musculus
  siRNA target sequence for Admr (NM_007412.1,990-1008).
ctctacttcttctacgaaa

SEQ ID NO: 623431 - DNA, 19 bp, Mus musculus
  siRNA target sequence for Admr (NM_007412.1,1228-1246).
ccaccccatccgaaacgtt

SEQ ID NO: 623432 - DNA, 19 bp, Mus musculus
  siRNA target sequence for Adora2b (NM_007413.2,219-237).
gcctcgagtgcattacaga

SEQ ID NO: 623433 - DNA, 19 bp, Mus musculus
  siRNA target sequence for Adora2b (NM_007413.2,441-459).
cgcgtcccgctcaggtata

SEQ ID NO: 623434 - DNA, 19 bp, Mus musculus
  siRNA target sequence for Adora2b (NM_007413.2,442-460).
gcgtcccgctcaggtataa

SEQ ID NO: 623435 - DNA, 19 bp, Mus musculus
  siRNA target sequence for Adora2b (NM_007413.2,443-461).
cgtcccgctcaggtataaa

SEQ ID NO: 623436 - DNA, 19 bp, Mus musculus
  siRNA target sequence for Adora2b (NM_007413.2,447-465).
ccgctcaggtataaaggtt

SEQ ID NO: 623437 - DNA, 19 bp, Mus musculus
  siRNA target sequence for Adora2b (NM_007413.2,448-466).
cgctcaggtataaaggttt

SEQ ID NO: 623438 - DNA, 19 bp, Mus musculus
  siRNA target sequence for Adora2b (NM_007413.2,546-564).
gggtggaacagtaaagaca

SEQ ID NO: 623439 - DNA, 19 bp, Mus musculus
  siRNA target sequence for Adora2b (NM_007413.2,592-610).
gggatggcatcgcgaataa

SEQ ID NO: 623440 - DNA, 19 bp, Mus musculus
  siRNA target sequence for Adora2b (NM_007413.2,593-611).
ggatggcatcgcgaataaa

SEQ ID NO: 623441 - DNA, 19 bp, Mus musculus
  siRNA target sequence for Adora2b (NM_007413.2,597-615).
ggcatcgcgaataaaagct

SEQ ID NO: 623442 - DNA, 19 bp, Mus musculus
  siRNA target sequence for Adora2b (NM_007413.2,622-640).
ctgtgacatgtctctttga

SEQ ID NO: 623443 - DNA, 19 bp, Mus musculus
  siRNA target sequence for Adora2b (NM_007413.2,624-642).
gtgacatgtctctttgaga

SEQ ID NO: 623444 - DNA, 19 bp, Mus musculus
  siRNA target sequence for Adora2b (NM_007413.2,713-731).
gctggtgatctacatcaaa

SEQ ID NO: 623445 - DNA, 19 bp, Mus musculus
  siRNA target sequence for Adora2b (NM_007413.2,829-847).
ctatgatcgtgggcatttt

SEQ ID NO: 623446 - DNA, 19 bp, Mus musculus
  siRNA target sequence for Adora2b (NM_007413.2,833-851).
gatcgtgggcatttttgct

SEQ ID NO: 623447 - DNA, 19 bp, Mus musculus
  siRNA target sequence for Adora2b (NM_007413.2,867-885).
gtgcatgccatcaactgta

SEQ ID NO: 623448 - DNA, 19 bp, Mus musculus
  siRNA target sequence for Adora2b (NM_007413.2,870-888).
catgccatcaactgtatca

SEQ ID NO: 623449 - DNA, 19 bp, Mus musculus
  siRNA target sequence for Adora2b (NM_007413.2,922-940).
ccaagtgggtgatgaatgt

SEQ ID NO: 623450 - DNA, 19 bp, Mus musculus
  siRNA target sequence for Adora2b (NM_007413.2,1002-1020).
cgagacttccgctacagtt

SEQ ID NO: 623451 - DNA, 19 bp, Mus musculus
  siRNA target sequence for Adora2b (NM_007413.2,1012-1030).
gctacagtttccacaagat

SEQ ID NO: 623452 - DNA, 19 bp, Mus musculus
  siRNA target sequence for Adra1a (NM_013461.2,989-1007).
cacaggtgaacatttctaa

SEQ ID NO: 623453 - DNA, 19 bp, Mus musculus
  siRNA target sequence for Adra1a (NM_013461.2,999-1017).
catttctaaggccattcta

SEQ ID NO: 623454 - DNA, 19 bp, Mus musculus
  siRNA target sequence for Adra1a (NM_013461.2,1050-1068).
cggggtcttggggaatatt

SEQ ID NO: 623455 - DNA, 19 bp, Mus musculus
  siRNA target sequence for Adra1a (NM_013461.2,1052-1070).
gggtcttggggaatatttt

SEQ ID NO: 623456 - DNA, 19 bp, Mus musculus
  siRNA target sequence for Adra1a (NM_013461.2,1109-1127).
cggtgactcactactacat

SEQ ID NO: 623457 - DNA, 19 bp, Mus musculus
  siRNA target sequence for Adra1a (NM_013461.2,1110-1128).
ggtgactcactactacatt

SEQ ID NO: 623458 - DNA, 19 bp, Mus musculus
  siRNA target sequence for Adra1a (NM_013461.2,1115-1133).
ctcactactacattgtcaa

SEQ ID NO: 623459 - DNA, 19 bp, Mus musculus
  siRNA target sequence for Adra1a (NM_013461.2,1330-1348).
cgctaccccaccattgtca

SEQ ID NO: 623460 - DNA, 19 bp, Mus musculus
  siRNA target sequence for Adra1a (NM_013461.2,1633-1651).
ctccgtatccaccgtaaaa

SEQ ID NO: 623461 - DNA, 19 bp, Mus musculus
  siRNA target sequence for Adra1a (NM_013461.2,1635-1653).
ccgtatccaccgtaaaaat

SEQ ID NO: 623462 - DNA, 19 bp, Mus musculus
  siRNA target sequence for Adra1a (NM_013461.2,1817-1835).
ggtccttcttcccgaattt

SEQ ID NO: 623463 - DNA, 19 bp, Mus musculus
  siRNA target sequence for Adra1a (NM_013461.2,1843-1861).
ccggaaacagttttcaaaa

SEQ ID NO: 623464 - DNA, 19 bp, Mus musculus
  siRNA target sequence for Adra1a (NM_013461.2,1872-1890).
gcttgggtacctaaatagt

SEQ ID NO: 623465 - DNA, 19 bp, Mus musculus
  siRNA target sequence for Adra1a (NM_013461.2,1889-1907).
gttgcatcaaccctatcat

SEQ ID NO: 623466 - DNA, 19 bp, Mus musculus
  siRNA target sequence for Adra1a (NM_013461.2,1892-1910).
gcatcaaccctatcatata

SEQ ID NO: 623467 - DNA, 19 bp, Mus musculus
  siRNA target sequence for Adra1a (NM_013461.2,2075-2093).
caggagagactttctataa

SEQ ID NO: 623468 - DNA, 19 bp, Mus musculus
  siRNA target sequence for Adra1a (NM_013461.2,2078-2096).
gagagactttctataagat

SEQ ID NO: 623469 - DNA, 19 bp, Mus musculus
  siRNA target sequence for Adra1a (NM_013461.2,2113-2131).
gtccgtgaatggaagtttt

SEQ ID NO: 623470 - DNA, 19 bp, Mus musculus
  siRNA target sequence for Adra1a (NM_013461.2,2116-2134).
cgtgaatggaagtttttct

SEQ ID NO: 623471 - DNA, 19 bp, Mus musculus
  siRNA target sequence for Adra1a (NM_013461.2,2146-2164).
cagggatcggccaggatta

SEQ ID NO: 623472 - DNA, 19 bp, Mus musculus
  siRNA target sequence for Adra1a (NM_013461.2,2149-2167).
ggatcggccaggattacca

SEQ ID NO: 623473 - DNA, 19 bp, Mus musculus
  siRNA target sequence for Adra1a (NM_013461.2,2150-2168).
gatcggccaggattaccat

SEQ ID NO: 623474 - DNA, 19 bp, Mus musculus
  siRNA target sequence for Adra1a (NM_013461.2,2255-2273).
cacgccctgaagaaaatca

SEQ ID NO: 623475 - DNA, 19 bp, Mus musculus
  siRNA target sequence for Adra1b (NM_007416.1,768-786).
ccactggggagagttgaaa

SEQ ID NO: 623476 - DNA, 19 bp, Mus musculus
  siRNA target sequence for Adra1b (NM_007416.1,1257-1275).
gcctctccttggatggaaa

SEQ ID NO: 623477 - DNA, 19 bp, Mus musculus
  siRNA target sequence for Adra1b (NM_007416.1,1284-1302).
gcccaatgacgacaaagaa

SEQ ID NO: 623478 - DNA, 19 bp, Mus musculus
  siRNA target sequence for Adra1b (NM_007416.1,1285-1303).
cccaatgacgacaaagaat

SEQ ID NO: 623479 - DNA, 19 bp, Mus musculus
  siRNA target sequence for Adra1b (NM_007416.1,1287-1305).
caatgacgacaaagaatgt

SEQ ID NO: 623480 - DNA, 19 bp, Mus musculus
  siRNA target sequence for Adra1b (NM_007416.1,1435-1453).
gcgggagtcatgaaggaaa

SEQ ID NO: 623481 - DNA, 19 bp, Mus musculus
  siRNA target sequence for Adra1b (NM_007416.1,1436-1454).
cgggagtcatgaaggaaat

SEQ ID NO: 623482 - DNA, 19 bp, Mus musculus
  siRNA target sequence for Adra1b (NM_007416.1,1485-1503).
ccactctaagaactttcat

SEQ ID NO: 623483 - DNA, 19 bp, Mus musculus
  siRNA target sequence for Adra1b (NM_007416.1,1548-1566).
gagttccatagctgtcaaa

SEQ ID NO: 623484 - DNA, 19 bp, Mus musculus
  siRNA target sequence for Adra1b (NM_007416.1,1550-1568).
gttccatagctgtcaaact

SEQ ID NO: 623485 - DNA, 19 bp, Mus musculus
  siRNA target sequence for Adra1b (NM_007416.1,1558-1576).
gctgtcaaactttttaagt

SEQ ID NO: 623486 - DNA, 19 bp, Mus musculus
  siRNA target sequence for Adra1b (NM_007416.1,1559-1577).
ctgtcaaactttttaagtt

SEQ ID NO: 623487 - DNA, 19 bp, Mus musculus
  siRNA target sequence for Adra1b (NM_007416.1,1610-1628).
gcattgtagtcggaatgtt

SEQ ID NO: 623488 - DNA, 19 bp, Mus musculus
  siRNA target sequence for Adra1b (NM_007416.1,1615-1633).
gtagtcggaatgttcatct

SEQ ID NO: 623489 - DNA, 19 bp, Mus musculus
  siRNA target sequence for Adra1b (NM_007416.1,1620-1638).
cggaatgttcatcttatgt

SEQ ID NO: 623490 - DNA, 19 bp, Mus musculus
  siRNA target sequence for Adra1b (NM_007416.1,2117-2135).
ggccactcttcactttcaa

SEQ ID NO: 623491 - DNA, 19 bp, Mus musculus
  siRNA target sequence for Adra1d (NM_013460.1,693-711).
gcgccactcgctcaagtat

SEQ ID NO: 623492 - DNA, 19 bp, Mus musculus
  siRNA target sequence for Adra1d (NM_013460.1,708-726).
gtatccagccattatgaca

SEQ ID NO: 623493 - DNA, 19 bp, Mus musculus
  siRNA target sequence for Adra1d (NM_013460.1,853-871).
gtgggctatgcgatcttct

SEQ ID NO: 623494 - DNA, 19 bp, Mus musculus
  siRNA target sequence for Adra1d (NM_013460.1,856-874).
ggctatgcgatcttctctt

SEQ ID NO: 623495 - DNA, 19 bp, Mus musculus
  siRNA target sequence for Adra1d (NM_013460.1,902-920).
cagtgatcgtggtcatgta

SEQ ID NO: 623496 - DNA, 19 bp, Mus musculus
  siRNA target sequence for Adra1d (NM_013460.1,1033-1051).
gccactagcgccaaaggaa

SEQ ID NO: 623497 - DNA, 19 bp, Mus musculus
  siRNA target sequence for Adra1d (NM_013460.1,1235-1253).
catcagagggcgtcttcaa

SEQ ID NO: 623498 - DNA, 19 bp, Mus musculus
  siRNA target sequence for Adra1d (NM_013460.1,1244-1262).
gcgtcttcaaggtcatctt

SEQ ID NO: 623499 - DNA, 19 bp, Mus musculus
  siRNA target sequence for Adra1d (NM_013460.1,1310-1328).
gctccagtcgcgagttcaa

SEQ ID NO: 623500 - DNA, 19 bp, Mus musculus
  siRNA target sequence for Adra1d (NM_013460.1,1785-1803).
cctccgggagactgacatt

SEQ ID NO: 623501 - DNA, 19 bp, Mus musculus
  siRNA target sequence for Adra1d (NM_013460.1,1786-1804).
ctccgggagactgacattt

SEQ ID NO: 623502 - DNA, 19 bp, Mus musculus
  siRNA target sequence for Adra2a (NM_007417.1,129-147).
catgctgttcacagtattt

SEQ ID NO: 623503 - DNA, 19 bp, Mus musculus
  siRNA target sequence for Adra2a (NM_007417.1,149-167).
gcaacgtgctggttattat

SEQ ID NO: 623504 - DNA, 19 bp, Mus musculus
  siRNA target sequence for Adra2a (NM_007417.1,269-287).
ctttggccaacgaggttat

SEQ ID NO: 623505 - DNA, 19 bp, Mus musculus
  siRNA target sequence for Adra2a (NM_007417.1,290-308).
gttactggtactttggtaa

SEQ ID NO: 623506 - DNA, 19 bp, Mus musculus
  siRNA target sequence for Adra2a (NM_007417.1,331-349).
gctctcgacgtgctctttt

SEQ ID NO: 623507 - DNA, 19 bp, Mus musculus
  siRNA target sequence for Adra2a (NM_007417.1,407-425).
cgcaggccatcgagtacaa

SEQ ID NO: 623508 - DNA, 19 bp, Mus musculus
  siRNA target sequence for Adra2a (NM_007417.1,502-520).
ccactcatctccatagaga

SEQ ID NO: 623509 - DNA, 19 bp, Mus musculus
  siRNA target sequence for Adra2a (NM_007417.1,503-521).
cactcatctccatagagaa

SEQ ID NO: 623510 - DNA, 19 bp, Mus musculus
  siRNA target sequence for Adra2a (NM_007417.1,803-821).
cgctgcccacccagcttaa

SEQ ID NO: 623511 - DNA, 19 bp, Mus musculus
  siRNA target sequence for Adra2a (NM_007417.1,1146-1164).
gttcgtggtgtgttggttt

SEQ ID NO: 623512 - DNA, 19 bp, Mus musculus
  siRNA target sequence for Adra2a (NM_007417.1,1155-1173).
gtgttggtttccgttcttt

SEQ ID NO: 623513 - DNA, 19 bp, Mus musculus
  siRNA target sequence for Adra2a (NM_007417.1,1300-1318).
cgacgcgccttcaagaaga

SEQ ID NO: 623514 - DNA, 19 bp, Mus musculus
  siRNA target sequence for Adra2c (NM_007418.2,1334-1352).
gtgggtttcctcatcgttt

SEQ ID NO: 623515 - DNA, 19 bp, Mus musculus
  siRNA target sequence for Adra2c (NM_007418.2,1337-1355).
ggtttcctcatcgttttca

SEQ ID NO: 623516 - DNA, 19 bp, Mus musculus
  siRNA target sequence for Adra2c (NM_007418.2,1778-1796).
gatgagacctggtacatct

SEQ ID NO: 623517 - DNA, 19 bp, Mus musculus
  siRNA target sequence for Adra2c (NM_007418.2,2199-2217).
cgcgctccgtcgagttctt

SEQ ID NO: 623518 - DNA, 19 bp, Mus musculus
  siRNA target sequence for Adra2c (NM_007418.2,2393-2411).
ccagaaccgctctttaagt

SEQ ID NO: 623519 - DNA, 19 bp, Mus musculus
  siRNA target sequence for Adra2c (NM_007418.2,2394-2412).
cagaaccgctctttaagtt

SEQ ID NO: 623520 - DNA, 19 bp, Mus musculus
  siRNA target sequence for Adra2c (NM_007418.2,2396-2414).
gaaccgctctttaagtttt

SEQ ID NO: 623521 - DNA, 19 bp, Mus musculus
  siRNA target sequence for Adra2c (NM_007418.2,2399-2417).
ccgctctttaagtttttct

SEQ ID NO: 623522 - DNA, 19 bp, Mus musculus
  siRNA target sequence for Adrb1 (NM_007419.1,373-391).
gagtacggctccttcttct

SEQ ID NO: 623523 - DNA, 19 bp, Mus musculus
  siRNA target sequence for Adrb1 (NM_007419.1,488-506).
cctttcgctaccagagttt

SEQ ID NO: 623524 - DNA, 19 bp, Mus musculus
  siRNA target sequence for Adrb1 (NM_007419.1,638-656).
ccaagtgctgcgatttcgt

SEQ ID NO: 623525 - DNA, 19 bp, Mus musculus
  siRNA target sequence for Adrb2 (NM_007420.2,221-239).
ggaacgacagcgacttctt

SEQ ID NO: 623526 - DNA, 19 bp, Mus musculus
  siRNA target sequence for Adrb2 (NM_007420.2,384-402).
caagttcgagcgactacaa

SEQ ID NO: 623527 - DNA, 19 bp, Mus musculus
  siRNA target sequence for Adrb2 (NM_007420.2,429-447).
cttggcgtgtgctgatcta

SEQ ID NO: 623528 - DNA, 19 bp, Mus musculus
  siRNA target sequence for Adrb2 (NM_007420.2,434-452).
cgtgtgctgatctagtcat

SEQ ID NO: 623529 - DNA, 19 bp, Mus musculus
  siRNA target sequence for Adrb2 (NM_007420.2,476-494).
gggccagtcacatccttat

SEQ ID NO: 623530 - DNA, 19 bp, Mus musculus
  siRNA target sequence for Adrb2 (NM_007420.2,480-498).
cagtcacatccttatgaaa

SEQ ID NO: 623531 - DNA, 19 bp, Mus musculus
  siRNA target sequence for Adrb2 (NM_007420.2,490-508).
cttatgaaaatgtggaatt

SEQ ID NO: 623532 - DNA, 19 bp, Mus musculus
  siRNA target sequence for Adrb2 (NM_007420.2,525-543).
cgagttctggacttccatt

SEQ ID NO: 623533 - DNA, 19 bp, Mus musculus
  siRNA target sequence for Adrb2 (NM_007420.2,528-546).
gttctggacttccattgat

SEQ ID NO: 623534 - DNA, 19 bp, Mus musculus
  siRNA target sequence for Adrb2 (NM_007420.2,598-616).
cgctatgttgctatcacat

SEQ ID NO: 623535 - DNA, 19 bp, Mus musculus
  siRNA target sequence for Adrb2 (NM_007420.2,689-707).
ctggccttacctccttttt

SEQ ID NO: 623536 - DNA, 19 bp, Mus musculus
  siRNA target sequence for Adrb2 (NM_007420.2,729-747).
ccgtgccacccacaagaaa

SEQ ID NO: 623537 - DNA, 19 bp, Mus musculus
  siRNA target sequence for Adrb2 (NM_007420.2,738-756).
ccacaagaaagctatcgat

SEQ ID NO: 623538 - DNA, 19 bp, Mus musculus
  siRNA target sequence for Adrb2 (NM_007420.2,739-757).
cacaagaaagctatcgatt

SEQ ID NO: 623539 - DNA, 19 bp, Mus musculus
  siRNA target sequence for Adrb2 (NM_007420.2,897-915).
gcagaagatagacaaatct

SEQ ID NO: 623540 - DNA, 19 bp, Mus musculus
  siRNA target sequence for Adrb2 (NM_007420.2,923-941).
gattccacgcccaaaacct

SEQ ID NO: 623541 - DNA, 19 bp, Mus musculus
  siRNA target sequence for Adrb2 (NM_007420.2,1111-1129).
ctcatccctaaggaagttt

SEQ ID NO: 623542 - DNA, 19 bp, Mus musculus
  siRNA target sequence for Adrb2 (NM_007420.2,1126-1144).
gtttacatcctccttaact

SEQ ID NO: 623543 - DNA, 19 bp, Mus musculus
  siRNA target sequence for Adrb2 (NM_007420.2,1165-1183).
gccttcaatcctcttatct

SEQ ID NO: 623544 - DNA, 19 bp, Mus musculus
  siRNA target sequence for Adrb2 (NM_007420.2,1239-1257).
gtcttcttcgaaaacctat

SEQ ID NO: 623545 - DNA, 19 bp, Mus musculus
  siRNA target sequence for Adrb2 (NM_007420.2,1260-1278).
gaacggctactctagcaat

SEQ ID NO: 623546 - DNA, 19 bp, Mus musculus
  siRNA target sequence for Adrb2 (NM_007420.2,1299-1317).
cacaggggagccaaacact

SEQ ID NO: 623547 - DNA, 19 bp, Mus musculus
  siRNA target sequence for Adrb2 (NM_007420.2,1426-1444).
caaggaaggaactgtagta

SEQ ID NO: 623548 - DNA, 19 bp, Mus musculus
  siRNA target sequence for Adrb3 (NM_013462.1,174-192).
gaggcaacctgctggtaat

SEQ ID NO: 623549 - DNA, 19 bp, Mus musculus
  siRNA target sequence for Adrb3 (NM_013462.1,178-196).
caacctgctggtaatcata

SEQ ID NO: 623550 - DNA, 19 bp, Mus musculus
  siRNA target sequence for Adrb3 (NM_013462.1,216-234).
gactacagaccataaccaa

SEQ ID NO: 623551 - DNA, 19 bp, Mus musculus
  siRNA target sequence for Adrb3 (NM_013462.1,362-380).
gtggacgtgctctgtgtaa

SEQ ID NO: 623552 - DNA, 19 bp, Mus musculus
  siRNA target sequence for Adrb3 (NM_013462.1,364-382).
ggacgtgctctgtgtaact

SEQ ID NO: 623553 - DNA, 19 bp, Mus musculus
  siRNA target sequence for Adrb3 (NM_013462.1,889-907).
gcgcaccttaggtctcatt

SEQ ID NO: 623554 - DNA, 19 bp, Mus musculus
  siRNA target sequence for Adrb3 (NM_013462.1,890-908).
cgcaccttaggtctcatta

SEQ ID NO: 623555 - DNA, 19 bp, Mus musculus
  siRNA target sequence for Agtr1 (NM_177322.2,513-531).
cccctgtgggctgtctata

SEQ ID NO: 623556 - DNA, 19 bp, Mus musculus
  siRNA target sequence for Agtr1 (NM_177322.2,931-949).
ctctaaagaaggcttatga

SEQ ID NO: 623557 - DNA, 19 bp, Mus musculus
  siRNA target sequence for Agtr1 (NM_177322.2,1250-1268).
ctcaagcctgtctacgaaa

SEQ ID NO: 623558 - DNA, 19 bp, Mus musculus
  siRNA target sequence for Agtr1 (NM_177322.2,1252-1270).
caagcctgtctacgaaaat

SEQ ID NO: 623559 - DNA, 19 bp, Mus musculus
  siRNA target sequence for Agtr1b (NM_175086.2,182-200).
gatccttaactcttctatt

SEQ ID NO: 623560 - DNA, 19 bp, Mus musculus
  siRNA target sequence for Agtr1b (NM_175086.2,791-809).
cgtgttccctttcgttatt

SEQ ID NO: 623561 - DNA, 19 bp, Mus musculus
  siRNA target sequence for Agtr1b (NM_175086.2,841-859).
ccctaaagaaggcttacaa

SEQ ID NO: 623562 - DNA, 19 bp, Mus musculus
  siRNA target sequence for Agtr1b (NM_175086.2,842-860).
cctaaagaaggcttacaaa

SEQ ID NO: 623563 - DNA, 19 bp, Mus musculus
  siRNA target sequence for Agtr1b (NM_175086.2,869-887).
gaatacgccaaggaatgat

SEQ ID NO: 623564 - DNA, 19 bp, Mus musculus
  siRNA target sequence for Agtr1b (NM_175086.2,1158-1176).
catgcagggttatcaacaa

SEQ ID NO: 623565 - DNA, 19 bp, Mus musculus
  siRNA target sequence for Agtr1b (NM_175086.2,1161-1179).
gcagggttatcaacaaaaa

SEQ ID NO: 623566 - DNA, 19 bp, Mus musculus
  siRNA target sequence for Agtr1b (NM_175086.2,1162-1180).
cagggttatcaacaaaaat

SEQ ID NO: 623567 - DNA, 19 bp, Mus musculus
  siRNA target sequence for Agtr1b (NM_175086.2,1164-1182).
gggttatcaacaaaaatga

SEQ ID NO: 623568 - DNA, 19 bp, Mus musculus
  siRNA target sequence for Agtr1b (NM_175086.2,1166-1184).
gttatcaacaaaaatgagt

SEQ ID NO: 623569 - DNA, 19 bp, Mus musculus
  siRNA target sequence for Agtr1b (NM_175086.2,1226-1244).
caggaagtctgcgtattgt

SEQ ID NO: 623570 - DNA, 19 bp, Mus musculus
  siRNA target sequence for Agtr1b (NM_175086.2,1232-1250).
gtctgcgtattgttttgaa

SEQ ID NO: 623571 - DNA, 19 bp, Mus musculus
  siRNA target sequence for Agtr1b (NM_175086.2,1234-1252).
ctgcgtattgttttgaagt

SEQ ID NO: 623572 - DNA, 19 bp, Mus musculus
  siRNA target sequence for Agtr2 (NM_007429.2,218-236).
cgtccttttgataatctca

SEQ ID NO: 623573 - DNA, 19 bp, Mus musculus
  siRNA target sequence for Agtr2 (NM_007429.2,219-237).
gtccttttgataatctcaa

SEQ ID NO: 623574 - DNA, 19 bp, Mus musculus
  siRNA target sequence for Agtr2 (NM_007429.2,239-257).
gcaactggcaccaatgagt

SEQ ID NO: 623575 - DNA, 19 bp, Mus musculus
  siRNA target sequence for Agtr2 (NM_007429.2,249-267).
ccaatgagtccgcctttaa

SEQ ID NO: 623576 - DNA, 19 bp, Mus musculus
  siRNA target sequence for Agtr2 (NM_007429.2,250-268).
caatgagtccgcctttaat

SEQ ID NO: 623577 - DNA, 19 bp, Mus musculus
  siRNA target sequence for Agtr2 (NM_007429.2,254-272).
gagtccgcctttaattgct

SEQ ID NO: 623578 - DNA, 19 bp, Mus musculus
  siRNA target sequence for Agtr2 (NM_007429.2,271-289).
ctcacacaaaccatcagat

SEQ ID NO: 623579 - DNA, 19 bp, Mus musculus
  siRNA target sequence for Agtr2 (NM_007429.2,277-295).
caaaccatcagataagcat

SEQ ID NO: 623580 - DNA, 19 bp, Mus musculus
  siRNA target sequence for Agtr2 (NM_007429.2,309-327).
ctgttctctactacatgat

SEQ ID NO: 623581 - DNA, 19 bp, Mus musculus
  siRNA target sequence for Agtr2 (NM_007429.2,311-329).
gttctctactacatgattt

SEQ ID NO: 623582 - DNA, 19 bp, Mus musculus
  siRNA target sequence for Agtr2 (NM_007429.2,319-337).
ctacatgatttttgtgatt

SEQ ID NO: 623583 - DNA, 19 bp, Mus musculus
  siRNA target sequence for Agtr2 (NM_007429.2,364-382).
ctcactgttttgttgtcaa

SEQ ID NO: 623584 - DNA, 19 bp, Mus musculus
  siRNA target sequence for Agtr2 (NM_007429.2,457-475).
ccctctctgggcaacctat

SEQ ID NO: 623585 - DNA, 19 bp, Mus musculus
  siRNA target sequence for Agtr2 (NM_007429.2,459-477).
ctctctgggcaacctatta

SEQ ID NO: 623586 - DNA, 19 bp, Mus musculus
  siRNA target sequence for Agtr2 (NM_007429.2,461-479).
ctctgggcaacctattact

SEQ ID NO: 623587 - DNA, 19 bp, Mus musculus
  siRNA target sequence for Agtr2 (NM_007429.2,463-481).
ctgggcaacctattactct

SEQ ID NO: 623588 - DNA, 19 bp, Mus musculus
  siRNA target sequence for Agtr2 (NM_007429.2,465-483).
gggcaacctattactctta

SEQ ID NO: 623589 - DNA, 19 bp, Mus musculus
  siRNA target sequence for Agtr2 (NM_007429.2,471-489).
cctattactcttatagata

SEQ ID NO: 623590 - DNA, 19 bp, Mus musculus
  siRNA target sequence for Agtr2 (NM_007429.2,472-490).
ctattactcttatagatat

SEQ ID NO: 623591 - DNA, 19 bp, Mus musculus
  siRNA target sequence for Agtr2 (NM_007429.2,576-594).
gcatgagtgtcgataggta

SEQ ID NO: 623592 - DNA, 19 bp, Mus musculus
  siRNA target sequence for Agtr2 (NM_007429.2,591-609).
ggtaccaatcggtcatcta

SEQ ID NO: 623593 - DNA, 19 bp, Mus musculus
  siRNA target sequence for Agtr2 (NM_007429.2,600-618).
cggtcatctacccttttct

SEQ ID NO: 623594 - DNA, 19 bp, Mus musculus
  siRNA target sequence for Agtr2 (NM_007429.2,602-620).
gtcatctacccttttctgt

SEQ ID NO: 623595 - DNA, 19 bp, Mus musculus
  siRNA target sequence for Agtr2 (NM_007429.2,636-654).
cctggcaagcatcttatgt

SEQ ID NO: 623596 - DNA, 19 bp, Mus musculus
  siRNA target sequence for Agtr2 (NM_007429.2,637-655).
ctggcaagcatcttatgta

SEQ ID NO: 623597 - DNA, 19 bp, Mus musculus
  siRNA target sequence for Agtr2 (NM_007429.2,639-657).
ggcaagcatcttatgtagt

SEQ ID NO: 623598 - DNA, 19 bp, Mus musculus
  siRNA target sequence for Agtr2 (NM_007429.2,640-658).
gcaagcatcttatgtagtt

SEQ ID NO: 623599 - DNA, 19 bp, Mus musculus
  siRNA target sequence for Agtr2 (NM_007429.2,709-727).
ccgggatgtcagaaccatt

SEQ ID NO: 623600 - DNA, 19 bp, Mus musculus
  siRNA target sequence for Agtr2 (NM_007429.2,712-730).
ggatgtcagaaccattgaa

SEQ ID NO: 623601 - DNA, 19 bp, Mus musculus
  siRNA target sequence for Agtr2 (NM_007429.2,716-734).
gtcagaaccattgaatact

SEQ ID NO: 623602 - DNA, 19 bp, Mus musculus
  siRNA target sequence for Agtr2 (NM_007429.2,718-736).
cagaaccattgaatactta

SEQ ID NO: 623603 - DNA, 19 bp, Mus musculus
  siRNA target sequence for Agtr2 (NM_007429.2,737-755).
ggtgtgaatgcttgtatta

SEQ ID NO: 623604 - DNA, 19 bp, Mus musculus
  siRNA target sequence for Agtr2 (NM_007429.2,792-810).
ctgggattgccttaatgaa

SEQ ID NO: 623605 - DNA, 19 bp, Mus musculus
  siRNA target sequence for Agtr2 (NM_007429.2,794-812).
gggattgccttaatgaaaa

SEQ ID NO: 623606 - DNA, 19 bp, Mus musculus
  siRNA target sequence for Agtr2 (NM_007429.2,795-813).
ggattgccttaatgaaaaa

SEQ ID NO: 623607 - DNA, 19 bp, Mus musculus
  siRNA target sequence for Agtr2 (NM_007429.2,844-862).
catagcaacgtgttacttt

SEQ ID NO: 623608 - DNA, 19 bp, Mus musculus
  siRNA target sequence for Agtr2 (NM_007429.2,848-866).
gcaacgtgttactttggaa

SEQ ID NO: 623609 - DNA, 19 bp, Mus musculus
  siRNA target sequence for Agtr2 (NM_007429.2,849-867).
caacgtgttactttggaat

SEQ ID NO: 623610 - DNA, 19 bp, Mus musculus
  siRNA target sequence for Agtr2 (NM_007429.2,878-896).
ctgctgaagactaatagct

SEQ ID NO: 623611 - DNA, 19 bp, Mus musculus
  siRNA target sequence for Agtr2 (NM_007429.2,880-898).
gctgaagactaatagctat

SEQ ID NO: 623612 - DNA, 19 bp, Mus musculus
  siRNA target sequence for Agtr2 (NM_007429.2,950-968).
gtgttggcattcatcattt

SEQ ID NO: 623613 - DNA, 19 bp, Mus musculus
  siRNA target sequence for Agtr2 (NM_007429.2,1009-1027).
gacctggatgggtatcatt

SEQ ID NO: 623614 - DNA, 19 bp, Mus musculus
  siRNA target sequence for Agtr2 (NM_007429.2,1011-1029).
cctggatgggtatcattaa

SEQ ID NO: 623615 - DNA, 19 bp, Mus musculus
  siRNA target sequence for Agtr2 (NM_007429.2,1012-1030).
ctggatgggtatcattaat

SEQ ID NO: 623616 - DNA, 19 bp, Mus musculus
  siRNA target sequence for Agtr2 (NM_007429.2,1103-1121).
gttaatcccttcctgtatt

SEQ ID NO: 623617 - DNA, 19 bp, Mus musculus
  siRNA target sequence for Agtr2 (NM_007429.2,1147-1165).
gaagctccgcagtgtgttt

SEQ ID NO: 623618 - DNA, 19 bp, Mus musculus
  siRNA target sequence for Agtr2 (NM_007429.2,1150-1168).
gctccgcagtgtgtttaga

SEQ ID NO: 623619 - DNA, 19 bp, Mus musculus
  siRNA target sequence for Agtr2 (NM_007429.2,1190-1208).
ggcaagagagagactatgt

SEQ ID NO: 623620 - DNA, 19 bp, Mus musculus
  siRNA target sequence for Agtr2 (NM_007429.2,1201-1219).
gactatgtcttgcagaaaa

SEQ ID NO: 623621 - DNA, 19 bp, Mus musculus
  siRNA target sequence for Agtrl1 (NM_011784.2,384-402).
ctctggaccgtgtttcgaa

SEQ ID NO: 623622 - DNA, 19 bp, Mus musculus
  siRNA target sequence for Agtrl1 (NM_011784.2,399-417).
cgaaccagccgcgaaaaga

SEQ ID NO: 623623 - DNA, 19 bp, Mus musculus
  siRNA target sequence for Agtrl1 (NM_011784.2,418-436).
gacgctcagctgacatctt

SEQ ID NO: 623624 - DNA, 19 bp, Mus musculus
  siRNA target sequence for Agtrl1 (NM_011784.2,420-438).
cgctcagctgacatcttca

SEQ ID NO: 623625 - DNA, 19 bp, Mus musculus
  siRNA target sequence for Agtrl1 (NM_011784.2,422-440).
ctcagctgacatcttcatt

SEQ ID NO: 623626 - DNA, 19 bp, Mus musculus
  siRNA target sequence for Agtrl1 (NM_011784.2,482-500).
gccactgtgggccacttat

SEQ ID NO: 623627 - DNA, 19 bp, Mus musculus
  siRNA target sequence for Agtrl1 (NM_011784.2,483-501).
ccactgtgggccacttata

SEQ ID NO: 623628 - DNA, 19 bp, Mus musculus
  siRNA target sequence for Agtrl1 (NM_011784.2,486-504).
ctgtgggccacttatacct

SEQ ID NO: 623629 - DNA, 19 bp, Mus musculus
  siRNA target sequence for Agtrl1 (NM_011784.2,553-571).
gctacctcatctttgtcaa

SEQ ID NO: 623630 - DNA, 19 bp, Mus musculus
  siRNA target sequence for Agtrl1 (NM_011784.2,677-695).
cgtggccacagcagtctta

SEQ ID NO: 623631 - DNA, 19 bp, Mus musculus
  siRNA target sequence for Agtrl1 (NM_011784.2,890-908).
gacatgttacttcttcatt

SEQ ID NO: 623632 - DNA, 19 bp, Mus musculus
  siRNA target sequence for Agtrl1 (NM_011784.2,970-988).
ggctgctcagcattatcgt

SEQ ID NO: 623633 - DNA, 19 bp, Mus musculus
  siRNA target sequence for Agtrl1 (NM_011784.2,1067-1085).
gcactggccctgtgacttt

SEQ ID NO: 623634 - DNA, 19 bp, Mus musculus
  siRNA target sequence for Agtrl1 (NM_011784.2,1072-1090).
ggccctgtgactttgacat

SEQ ID NO: 623635 - DNA, 19 bp, Mus musculus
  siRNA target sequence for Agtrl1 (NM_011784.2,1117-1135).
gcacctgcatcagttatgt

SEQ ID NO: 623636 - DNA, 19 bp, Mus musculus
  siRNA target sequence for Agtrl1 (NM_011784.2,1257-1275).
gagaagtcagccagttatt

SEQ ID NO: 623637 - DNA, 19 bp, Mus musculus
  siRNA target sequence for Agtrl1 (NM_011784.2,1321-1339).
gagagcagatgcatgagaa

SEQ ID NO: 623638 - DNA, 19 bp, Mus musculus
  siRNA target sequence for Agtrl1 (NM_011784.2,1326-1344).
cagatgcatgagaaatcga

SEQ ID NO: 623639 - DNA, 19 bp, Mus musculus
  siRNA target sequence for Agtrl1 (NM_011784.2,1328-1346).
gatgcatgagaaatcgatt

SEQ ID NO: 623640 - DNA, 19 bp, Mus musculus
  siRNA target sequence for Avpr1a (NM_016847.2,499-517).
gccgtgctgggtaatagca

SEQ ID NO: 623641 - DNA, 19 bp, Mus musculus
  siRNA target sequence for Avpr1a (NM_016847.2,538-556).
cgcacgccacgcaagacat

SEQ ID NO: 623642 - DNA, 19 bp, Mus musculus
  siRNA target sequence for Avpr1a (NM_016847.2,849-867).
gagcataccacagtacttt

SEQ ID NO: 623643 - DNA, 19 bp, Mus musculus
  siRNA target sequence for Avpr1a (NM_016847.2,851-869).
gcataccacagtactttat

SEQ ID NO: 623644 - DNA, 19 bp, Mus musculus
  siRNA target sequence for Avpr1a (NM_016847.2,882-900).
cgaatttgaggtgaacaat

SEQ ID NO: 623645 - DNA, 19 bp, Mus musculus
  siRNA target sequence for Avpr1a (NM_016847.2,988-1006).
gtggtacccgtgatcatct

SEQ ID NO: 623646 - DNA, 19 bp, Mus musculus
  siRNA target sequence for Avpr1a (NM_016847.2,1260-1278).
gtcagtctgggataccaat

SEQ ID NO: 623647 - DNA, 19 bp, Mus musculus
  siRNA target sequence for Avpr1a (NM_016847.2,1354-1372).
ccgtggatctacatgtttt

SEQ ID NO: 623648 - DNA, 19 bp, Mus musculus
  siRNA target sequence for Avpr1a (NM_016847.2,1355-1373).
cgtggatctacatgttttt

SEQ ID NO: 623649 - DNA, 19 bp, Mus musculus
  siRNA target sequence for Avpr1a (NM_016847.2,1420-1438).
caaagcatagcgcagaaat

SEQ ID NO: 623650 - DNA, 19 bp, Mus musculus
  siRNA target sequence for Avpr1a (NM_016847.2,1466-1484).
gccggagacagacatctta

SEQ ID NO: 623651 - DNA, 19 bp, Mus musculus
  siRNA target sequence for Avpr1a (NM_016847.2,1467-1485).
ccggagacagacatcttat

SEQ ID NO: 623652 - DNA, 19 bp, Mus musculus
  siRNA target sequence for Avpr1a (NM_016847.2,1468-1486).
cggagacagacatcttatt

SEQ ID NO: 623653 - DNA, 19 bp, Mus musculus
  siRNA target sequence for Avpr1a (NM_016847.2,1470-1488).
gagacagacatcttattct

SEQ ID NO: 623654 - DNA, 19 bp, Mus musculus
  siRNA target sequence for Avpr1a (NM_016847.2,1472-1490).
gacagacatcttattctaa

SEQ ID NO: 623655 - DNA, 19 bp, Mus musculus
  siRNA target sequence for Avpr1a (NM_016847.2,1474-1492).
cagacatcttattctaaca

SEQ ID NO: 623656 - DNA, 19 bp, Mus musculus
  siRNA target sequence for Avpr1a (NM_016847.2,1524-1542).
gaaggattcacctaaatct

SEQ ID NO: 623657 - DNA, 19 bp, Mus musculus
  siRNA target sequence for Avpr1a (NM_016847.2,1527-1545).
ggattcacctaaatcttca

SEQ ID NO: 623658 - DNA, 19 bp, Mus musculus
  siRNA target sequence for Avpr1a (NM_016847.2,1528-1546).
gattcacctaaatcttcaa

SEQ ID NO: 623659 - DNA, 19 bp, Mus musculus
  siRNA target sequence for Avpr1a (NM_016847.2,1541-1559).
cttcaaagtccatcagatt

SEQ ID NO: 623660 - DNA, 19 bp, Mus musculus
  siRNA target sequence for Avpr1b (NM_011924.1,49-67).
ctgtttgtccccaatacca

SEQ ID NO: 623661 - DNA, 19 bp, Mus musculus
  siRNA target sequence for Avpr1b (NM_011924.1,152-170).
gcaacctggctgtactact

SEQ ID NO: 623662 - DNA, 19 bp, Mus musculus
  siRNA target sequence for Avpr1b (NM_011924.1,323-341).
gggctgtcaaatatctaca

SEQ ID NO: 623663 - DNA, 19 bp, Mus musculus
  siRNA target sequence for Avpr1b (NM_011924.1,639-657).
ggtgctcacagcttgctat

SEQ ID NO: 623664 - DNA, 19 bp, Mus musculus
  siRNA target sequence for Avpr1b (NM_011924.1,668-686).
gccacgagatctacaagaa

SEQ ID NO: 623665 - DNA, 19 bp, Mus musculus
  siRNA target sequence for Avpr1b (NM_011924.1,912-930).
cgagaatgcccctaatgaa

SEQ ID NO: 623666 - DNA, 19 bp, Mus musculus
  siRNA target sequence for Avpr1b (NM_011924.1,919-937).
gcccctaatgaagattcta

SEQ ID NO: 623667 - DNA, 19 bp, Mus musculus
  siRNA target sequence for Avpr1b (NM_011924.1,1201-1219).
gcgggctcgctgaaggatt

SEQ ID NO: 623668 - DNA, 19 bp, Mus musculus
  siRNA target sequence for Avpr1b (NM_011924.1,1202-1220).
cgggctcgctgaaggattt

SEQ ID NO: 623669 - DNA, 19 bp, Mus musculus
  siRNA target sequence for Avpr2 (NM_019404.1,263-281).
ctggccctgctatctacaa

SEQ ID NO: 623670 - DNA, 19 bp, Mus musculus
  siRNA target sequence for Avpr2 (NM_019404.1,265-283).
ggccctgctatctacaatt

SEQ ID NO: 623671 - DNA, 19 bp, Mus musculus
  siRNA target sequence for Avpr2 (NM_019404.1,266-284).
gccctgctatctacaattt

SEQ ID NO: 623672 - DNA, 19 bp, Mus musculus
  siRNA target sequence for Avpr2 (NM_019404.1,267-285).
ccctgctatctacaatttt

SEQ ID NO: 623673 - DNA, 19 bp, Mus musculus
  siRNA target sequence for Avpr2 (NM_019404.1,365-383).
cacgtcttcatcagtcatt

SEQ ID NO: 623674 - DNA, 19 bp, Mus musculus
  siRNA target sequence for Avpr2 (NM_019404.1,743-761).
ggccttcgtgcctatgtca

SEQ ID NO: 623675 - DNA, 19 bp, Mus musculus
  siRNA target sequence for Avpr2 (NM_019404.1,809-827).
gcctgccaggttcttatct

SEQ ID NO: 623676 - DNA, 19 bp, Mus musculus
  siRNA target sequence for Avpr2 (NM_019404.1,810-828).
cctgccaggttcttatctt

SEQ ID NO: 623677 - DNA, 19 bp, Mus musculus
  siRNA target sequence for Avpr2 (NM_019404.1,1076-1094).
ctgctggctagccttaaca

SEQ ID NO: 623678 - DNA, 19 bp, Mus musculus
  siRNA target sequence for BC003323 (NM_030258.2,240-258).
gagcttaggctataatgct

SEQ ID NO: 623679 - DNA, 19 bp, Mus musculus
  siRNA target sequence for BC003323 (NM_030258.2,299-317).
ccatgcccgacgtgtactt

SEQ ID NO: 623680 - DNA, 19 bp, Mus musculus
  siRNA target sequence for BC003323 (NM_030258.2,431-449).
cactgctcatcctgttcaa

SEQ ID NO: 623681 - DNA, 19 bp, Mus musculus
  siRNA target sequence for BC003323 (NM_030258.2,487-505).
ctgagccttgactactaca

SEQ ID NO: 623682 - DNA, 19 bp, Mus musculus
  siRNA target sequence for BC003323 (NM_030258.2,624-642).
cagtcacgtgtcttctaga

SEQ ID NO: 623683 - DNA, 19 bp, Mus musculus
  siRNA target sequence for BC003323 (NM_030258.2,626-644).
gtcacgtgtcttctagaat

SEQ ID NO: 623684 - DNA, 19 bp, Mus musculus
  siRNA target sequence for BC003323 (NM_030258.2,671-689).
cggaggcagccgatgctat

SEQ ID NO: 623685 - DNA, 19 bp, Mus musculus
  siRNA target sequence for BC003323 (NM_030258.2,831-849).
caccgtgtgcactcagttt

SEQ ID NO: 623686 - DNA, 19 bp, Mus musculus
  siRNA target sequence for BC003323 (NM_030258.2,909-927).
gaccgtggaggggcattat

SEQ ID NO: 623687 - DNA, 19 bp, Mus musculus
  siRNA target sequence for BC003323 (NM_030258.2,911-929).
ccgtggaggggcattatct

SEQ ID NO: 623688 - DNA, 19 bp, Mus musculus
  siRNA target sequence for BC003323 (NM_030258.2,932-950).
gcatcctacaggttgctaa

SEQ ID NO: 623689 - DNA, 19 bp, Mus musculus
  siRNA target sequence for BC003323 (NM_030258.2,1002-1020).
ctaccgttacatcaacaaa

SEQ ID NO: 623690 - DNA, 19 bp, Mus musculus
  siRNA target sequence for BC019711 (NM_145379.1,276-294).
ctccgccagctgtcacaaa

SEQ ID NO: 623691 - DNA, 19 bp, Mus musculus
  siRNA target sequence for BC019711 (NM_145379.1,278-296).
ccgccagctgtcacaaact

SEQ ID NO: 623692 - DNA, 19 bp, Mus musculus
  siRNA target sequence for BC019711 (NM_145379.1,279-297).
cgccagctgtcacaaacta

SEQ ID NO: 623693 - DNA, 19 bp, Mus musculus
  siRNA target sequence for BC019711 (NM_145379.1,338-356).
gggctggtcctctggtttt

SEQ ID NO: 623694 - DNA, 19 bp, Mus musculus
  siRNA target sequence for BC019711 (NM_145379.1,339-357).
ggctggtcctctggttttt

SEQ ID NO: 623695 - DNA, 19 bp, Mus musculus
  siRNA target sequence for BC019711 (NM_145379.1,849-867).
gctctgccaagctcaatca

SEQ ID NO: 623696 - DNA, 19 bp, Mus musculus
  siRNA target sequence for BC053073 (NM_178717.2,835-853).
gggagctggggctagagtt

SEQ ID NO: 623697 - DNA, 19 bp, Mus musculus
  siRNA target sequence for BC053073 (NM_178717.2,933-951).
ctcatcagcgcggtttact

SEQ ID NO: 623698 - DNA, 19 bp, Mus musculus
  siRNA target sequence for BC053073 (NM_178717.2,1014-1032).
caaggctggcgcaaatcct

SEQ ID NO: 623699 - DNA, 19 bp, Mus musculus
  siRNA target sequence for BC053073 (NM_178717.2,1332-1350).
gtgctgtgtgggttgatct

SEQ ID NO: 623700 - DNA, 19 bp, Mus musculus
  siRNA target sequence for BC053073 (NM_178717.2,2017-2035).
ccgaacctgacctgatcta

SEQ ID NO: 623701 - DNA, 19 bp, Mus musculus
  siRNA target sequence for Bdkrb2 (NM_009747.2,460-478).
ccatcgccaataactttga

SEQ ID NO: 623702 - DNA, 19 bp, Mus musculus
  siRNA target sequence for Bdkrb2 (NM_009747.2,507-525).
gtggtgaacaccatgatct

SEQ ID NO: 623703 - DNA, 19 bp, Mus musculus
  siRNA target sequence for Bdkrb2 (NM_009747.2,624-642).
gtgcgctgggccaaactct

SEQ ID NO: 623704 - DNA, 19 bp, Mus musculus
  siRNA target sequence for Bdkrb2 (NM_009747.2,718-736).
gcgaagagggccacaatgt

SEQ ID NO: 623705 - DNA, 19 bp, Mus musculus
  siRNA target sequence for Bdkrb2 (NM_009747.2,1047-1065).
gtcatcacgcagatcagtt

SEQ ID NO: 623706 - DNA, 19 bp, Mus musculus
  siRNA target sequence for Blr1 (NM_007551.1,27-45).
gggctccatcacatacaat

SEQ ID NO: 623707 - DNA, 19 bp, Mus musculus
  siRNA target sequence for Blr1 (NM_007551.1,28-46).
ggctccatcacatacaata

SEQ ID NO: 623708 - DNA, 19 bp, Mus musculus
  siRNA target sequence for Blr1 (NM_007551.1,32-50).
ccatcacatacaatatgga

SEQ ID NO: 623709 - DNA, 19 bp, Mus musculus
  siRNA target sequence for Blr1 (NM_007551.1,33-51).
catcacatacaatatggat

SEQ ID NO: 623710 - DNA, 19 bp, Mus musculus
  siRNA target sequence for Blr1 (NM_007551.1,100-118).
ctacaggacagtaacttct

SEQ ID NO: 623711 - DNA, 19 bp, Mus musculus
  siRNA target sequence for Blr1 (NM_007551.1,127-145).
gtcgagggacccttactga

SEQ ID NO: 623712 - DNA, 19 bp, Mus musculus
  siRNA target sequence for Blr1 (NM_007551.1,136-154).
cccttactgacgtccttta

SEQ ID NO: 623713 - DNA, 19 bp, Mus musculus
  siRNA target sequence for Blr1 (NM_007551.1,137-155).
ccttactgacgtcctttaa

SEQ ID NO: 623714 - DNA, 19 bp, Mus musculus
  siRNA target sequence for Blr1 (NM_007551.1,149-167).
cctttaaggcggtattcat

SEQ ID NO: 623715 - DNA, 19 bp, Mus musculus
  siRNA target sequence for Blr1 (NM_007551.1,292-310).
gccgaccttctcttagtct

SEQ ID NO: 623716 - DNA, 19 bp, Mus musculus
  siRNA target sequence for Blr1 (NM_007551.1,309-327).
cttcatcctgccttttgca

SEQ ID NO: 623717 - DNA, 19 bp, Mus musculus
  siRNA target sequence for Blr1 (NM_007551.1,358-376).
gggaccttcctctgcaaaa

SEQ ID NO: 623718 - DNA, 19 bp, Mus musculus
  siRNA target sequence for Blr1 (NM_007551.1,384-402).
cgctctgcacaagatcaat

SEQ ID NO: 623719 - DNA, 19 bp, Mus musculus
  siRNA target sequence for Blr1 (NM_007551.1,574-592).
gttggccaacctcataaca

SEQ ID NO: 623720 - DNA, 19 bp, Mus musculus
  siRNA target sequence for Blr1 (NM_007551.1,611-629).
gcaccttctcccaggaaaa

SEQ ID NO: 623721 - DNA, 19 bp, Mus musculus
  siRNA target sequence for Blr1 (NM_007551.1,776-794).
cggtcagggtggccatttt

SEQ ID NO: 623722 - DNA, 19 bp, Mus musculus
  siRNA target sequence for Blr1 (NM_007551.1,821-839).
ggtcgccctaccacattgt

SEQ ID NO: 623723 - DNA, 19 bp, Mus musculus
  siRNA target sequence for Blr1 (NM_007551.1,865-883).
ctgaaggctgtgaatagca

SEQ ID NO: 623724 - DNA, 19 bp, Mus musculus
  siRNA target sequence for Blr1 (NM_007551.1,974-992).
ccttcgctggcgtaaagtt

SEQ ID NO: 623725 - DNA, 19 bp, Mus musculus
  siRNA target sequence for Blr1 (NM_007551.1,1042-1060).
gcctccctttgccaacttt

SEQ ID NO: 623726 - DNA, 19 bp, Mus musculus
  siRNA target sequence for Blr1 (NM_007551.1,1043-1061).
cctccctttgccaactttt

SEQ ID NO: 623727 - DNA, 19 bp, Mus musculus
  siRNA target sequence for Blr1 (NM_007551.1,1063-1081).
cccaactggcgcaagagta

SEQ ID NO: 623728 - DNA, 19 bp, Mus musculus
  siRNA target sequence for Brs3 (NM_009766.2,184-202).
gcagtctcagtcacctaat

SEQ ID NO: 623729 - DNA, 19 bp, Mus musculus
  siRNA target sequence for Brs3 (NM_009766.2,195-213).
cacctaatcagactttaat

SEQ ID NO: 623730 - DNA, 19 bp, Mus musculus
  siRNA target sequence for Brs3 (NM_009766.2,197-215).
cctaatcagactttaattt

SEQ ID NO: 623731 - DNA, 19 bp, Mus musculus
  siRNA target sequence for Brs3 (NM_009766.2,248-266).
gtcgtctccaacgatacta

SEQ ID NO: 623732 - DNA, 19 bp, Mus musculus
  siRNA target sequence for Brs3 (NM_009766.2,250-268).
cgtctccaacgatactaca

SEQ ID NO: 623733 - DNA, 19 bp, Mus musculus
  siRNA target sequence for Brs3 (NM_009766.2,253-271).
ctccaacgatactacacat

SEQ ID NO: 623734 - DNA, 19 bp, Mus musculus
  siRNA target sequence for Brs3 (NM_009766.2,255-273).
ccaacgatactacacataa

SEQ ID NO: 623735 - DNA, 19 bp, Mus musculus
  siRNA target sequence for Brs3 (NM_009766.2,256-274).
caacgatactacacataaa

SEQ ID NO: 623736 - DNA, 19 bp, Mus musculus
  siRNA target sequence for Brs3 (NM_009766.2,315-333).
gtgccatctatatcactta

SEQ ID NO: 623737 - DNA, 19 bp, Mus musculus
  siRNA target sequence for Brs3 (NM_009766.2,319-337).
catctatatcacttatgct

SEQ ID NO: 623738 - DNA, 19 bp, Mus musculus
  siRNA target sequence for Brs3 (NM_009766.2,328-346).
cacttatgctgggatcatt

SEQ ID NO: 623739 - DNA, 19 bp, Mus musculus
  siRNA target sequence for Brs3 (NM_009766.2,353-371).
ggcatcctcggaaatgcta

SEQ ID NO: 623740 - DNA, 19 bp, Mus musculus
  siRNA target sequence for Brs3 (NM_009766.2,368-386).
gctatcctcatcaaagtct

SEQ ID NO: 623741 - DNA, 19 bp, Mus musculus
  siRNA target sequence for Brs3 (NM_009766.2,383-401).
gtctttttcaagactaaat

SEQ ID NO: 623742 - DNA, 19 bp, Mus musculus
  siRNA target sequence for Brs3 (NM_009766.2,411-429).
cagttccaaatattttcat

SEQ ID NO: 623743 - DNA, 19 bp, Mus musculus
  siRNA target sequence for Brs3 (NM_009766.2,413-431).
gttccaaatattttcatca

SEQ ID NO: 623744 - DNA, 19 bp, Mus musculus
  siRNA target sequence for Brs3 (NM_009766.2,441-459).
ctttcggagacctgttact

SEQ ID NO: 623745 - DNA, 19 bp, Mus musculus
  siRNA target sequence for Brs3 (NM_009766.2,573-591).
cagtgttcacgctaacaat

SEQ ID NO: 623746 - DNA, 19 bp, Mus musculus
  siRNA target sequence for Brs3 (NM_009766.2,681-699).
gcatctggatcgtgtctat

SEQ ID NO: 623747 - DNA, 19 bp, Mus musculus
  siRNA target sequence for Brs3 (NM_009766.2,685-703).
ctggatcgtgtctatgata

SEQ ID NO: 623748 - DNA, 19 bp, Mus musculus
  siRNA target sequence for Brs3 (NM_009766.2,691-709).
cgtgtctatgatatttgct

SEQ ID NO: 623749 - DNA, 19 bp, Mus musculus
  siRNA target sequence for Brs3 (NM_009766.2,707-725).
gctctgccagaggctatat

SEQ ID NO: 623750 - DNA, 19 bp, Mus musculus
  siRNA target sequence for Brs3 (NM_009766.2,708-726).
ctctgccagaggctatatt

SEQ ID NO: 623751 - DNA, 19 bp, Mus musculus
  siRNA target sequence for Brs3 (NM_009766.2,710-728).
ctgccagaggctatattct

SEQ ID NO: 623752 - DNA, 19 bp, Mus musculus
  siRNA target sequence for Brs3 (NM_009766.2,712-730).
gccagaggctatattctca

SEQ ID NO: 623753 - DNA, 19 bp, Mus musculus
  siRNA target sequence for Brs3 (NM_009766.2,713-731).
ccagaggctatattctcaa

SEQ ID NO: 623754 - DNA, 19 bp, Mus musculus
  siRNA target sequence for Brs3 (NM_009766.2,718-736).
ggctatattctcaaatgta

SEQ ID NO: 623755 - DNA, 19 bp, Mus musculus
  siRNA target sequence for Brs3 (NM_009766.2,719-737).
gctatattctcaaatgtat

SEQ ID NO: 623756 - DNA, 19 bp, Mus musculus
  siRNA target sequence for Brs3 (NM_009766.2,720-738).
ctatattctcaaatgtata

SEQ ID NO: 623757 - DNA, 19 bp, Mus musculus
  siRNA target sequence for Brs3 (NM_009766.2,856-874).
cccgctctcgattatctct

SEQ ID NO: 623758 - DNA, 19 bp, Mus musculus
  siRNA target sequence for Brs3 (NM_009766.2,862-880).
ctcgattatctctgtctat

SEQ ID NO: 623759 - DNA, 19 bp, Mus musculus
  siRNA target sequence for Brs3 (NM_009766.2,1018-1036).
ctgctggttgccgaatcat

SEQ ID NO: 623760 - DNA, 19 bp, Mus musculus
  siRNA target sequence for Brs3 (NM_009766.2,1020-1038).
gctggttgccgaatcatct

SEQ ID NO: 623761 - DNA, 19 bp, Mus musculus
  siRNA target sequence for Brs3 (NM_009766.2,1046-1064).
ctctaccactccttcactt

SEQ ID NO: 623762 - DNA, 19 bp, Mus musculus
  siRNA target sequence for Brs3 (NM_009766.2,1056-1074).
ccttcacttatgaaagcta

SEQ ID NO: 623763 - DNA, 19 bp, Mus musculus
  siRNA target sequence for Brs3 (NM_009766.2,1093-1111).
cccttttgttatcatcatt

SEQ ID NO: 623764 - DNA, 19 bp, Mus musculus
  siRNA target sequence for C030001A19Rik (NM_175495.2,187-205).
cagcctcgcaattctgaat

SEQ ID NO: 623765 - DNA, 19 bp, Mus musculus
  siRNA target sequence for C030001A19Rik (NM_175495.2,208-226).
cgcatccaacctttctgta

SEQ ID NO: 623766 - DNA, 19 bp, Mus musculus
  siRNA target sequence for C030001A19Rik (NM_175495.2,321-339).
ggatccatctggtcttctt

SEQ ID NO: 623767 - DNA, 19 bp, Mus musculus
  siRNA target sequence for C030001A19Rik (NM_175495.2,841-859).
ggtctacgcgctctatgaa

SEQ ID NO: 623768 - DNA, 19 bp, Mus musculus
  siRNA target sequence for C030001A19Rik (NM_175495.2,1185-1203).
gcgccatcaaccctttgat

SEQ ID NO: 623769 - DNA, 19 bp, Mus musculus
  siRNA target sequence for C030001A19Rik (NM_175495.2,1341-1359).
gctggccccaccctcatta

SEQ ID NO: 623770 - DNA, 19 bp, Mus musculus
  siRNA target sequence for C030001A19Rik (NM_175495.2,1342-1360).
ctggccccaccctcattat

SEQ ID NO: 623771 - DNA, 19 bp, Mus musculus
  siRNA target sequence for C130060K24Rik (NM_175524.2,92-110).
gcaacgccctggtagtcta

SEQ ID NO: 623772 - DNA, 19 bp, Mus musculus
  siRNA target sequence for C130060K24Rik (NM_175524.2,260-278).
gcaaaatggtcccatttgt

SEQ ID NO: 623773 - DNA, 19 bp, Mus musculus
  siRNA target sequence for C130060K24Rik (NM_175524.2,295-313).
gtgacagaaatccttacta

SEQ ID NO: 623774 - DNA, 19 bp, Mus musculus
  siRNA target sequence for C130060K24Rik (NM_175524.2,369-387).
gcggcagtacaccaatcaa

SEQ ID NO: 623775 - DNA, 19 bp, Mus musculus
  siRNA target sequence for C130060K24Rik (NM_175524.2,370-388).
cggcagtacaccaatcaaa

SEQ ID NO: 623776 - DNA, 19 bp, Mus musculus
  siRNA target sequence for C130060K24Rik (NM_175524.2,454-472).
gtgcagcgacttgagatta

SEQ ID NO: 623777 - DNA, 19 bp, Mus musculus
  siRNA target sequence for C130060K24Rik (NM_175524.2,459-477).
gcgacttgagattaagtat

SEQ ID NO: 623778 - DNA, 19 bp, Mus musculus
  siRNA target sequence for C130060K24Rik (NM_175524.2,529-547).
cccgtgcaccagaagatct

SEQ ID NO: 623779 - DNA, 19 bp, Mus musculus
  siRNA target sequence for C130060K24Rik (NM_175524.2,659-677).
cagtgctccgaactattca

SEQ ID NO: 623780 - DNA, 19 bp, Mus musculus
  siRNA target sequence for C130060K24Rik (NM_175524.2,666-684).
ccgaactattcatggaaaa

SEQ ID NO: 623781 - DNA, 19 bp, Mus musculus
  siRNA target sequence for C130060K24Rik (NM_175524.2,735-753).
gacagtcgtggttctcttt

SEQ ID NO: 623782 - DNA, 19 bp, Mus musculus
  siRNA target sequence for C130060K24Rik (NM_175524.2,770-788).
ctttccacatcgttcacat

SEQ ID NO: 623783 - DNA, 19 bp, Mus musculus
  siRNA target sequence for C130060K24Rik (NM_175524.2,775-793).
cacatcgttcacatgatga

SEQ ID NO: 623784 - DNA, 19 bp, Mus musculus
  siRNA target sequence for C130060K24Rik (NM_175524.2,777-795).
catcgttcacatgatgatt

SEQ ID NO: 623785 - DNA, 19 bp, Mus musculus
  siRNA target sequence for C130060K24Rik (NM_175524.2,780-798).
cgttcacatgatgattgaa

SEQ ID NO: 623786 - DNA, 19 bp, Mus musculus
  siRNA target sequence for C130060K24Rik (NM_175524.2,856-874).
gtgcaaataattggatttt

SEQ ID NO: 623787 - DNA, 19 bp, Mus musculus
  siRNA target sequence for C130060K24Rik (NM_175524.2,885-903).
ctgtaatcccattatttat

SEQ ID NO: 623788 - DNA, 19 bp, Mus musculus
  siRNA target sequence for C130060K24Rik (NM_175524.2,893-911).
ccattatttatgcacttat

SEQ ID NO: 623789 - DNA, 19 bp, Mus musculus
  siRNA target sequence for C130060K24Rik (NM_175524.2,1078-1096).
gggggcagcaacatcgata

SEQ ID NO: 623790 - DNA, 19 bp, Mus musculus
  siRNA target sequence for C130060K24Rik (NM_175524.2,1079-1097).
ggggcagcaacatcgatat

SEQ ID NO: 623791 - DNA, 19 bp, Mus musculus
  siRNA target sequence for C130060K24Rik (NM_175524.2,1103-1121).
ggtgtgaacagccagaaaa

SEQ ID NO: 623792 - DNA, 19 bp, Mus musculus
  siRNA target sequence for C130069N09Rik (NM_175534.2,187-205).
ctgagcgtgcacacagatt

SEQ ID NO: 623793 - DNA, 19 bp, Mus musculus
  siRNA target sequence for C130069N09Rik (NM_175534.2,307-325).
ctgctcaaccaaaatgtct

SEQ ID NO: 623794 - DNA, 19 bp, Mus musculus
  siRNA target sequence for C130069N09Rik (NM_175534.2,330-348).
gaaccccttctccatctat

SEQ ID NO: 623795 - DNA, 19 bp, Mus musculus
  siRNA target sequence for C130069N09Rik (NM_175534.2,429-447).
gctgaacttccctgaattt

SEQ ID NO: 623796 - DNA, 19 bp, Mus musculus
  siRNA target sequence for C130069N09Rik (NM_175534.2,471-489).
gcggttcttctgctacatt

SEQ ID NO: 623797 - DNA, 19 bp, Mus musculus
  siRNA target sequence for C130069N09Rik (NM_175534.2,473-491).
ggttcttctgctacattgt

SEQ ID NO: 623798 - DNA, 19 bp, Mus musculus
  siRNA target sequence for C130082O03Rik (NM_181543.1,66-84).
gggtttgccgacaccaatt

SEQ ID NO: 623799 - DNA, 19 bp, Mus musculus
  siRNA target sequence for C130082O03Rik (NM_181543.1,268-286).
cgatccactccctgattct

SEQ ID NO: 623800 - DNA, 19 bp, Mus musculus
  siRNA target sequence for C130082O03Rik (NM_181543.1,275-293).
ctccctgattctgaatcta

SEQ ID NO: 623801 - DNA, 19 bp, Mus musculus
  siRNA target sequence for C130082O03Rik (NM_181543.1,424-442).
ccaagagcttgacatttgt

SEQ ID NO: 623802 - DNA, 19 bp, Mus musculus
  siRNA target sequence for C130082O03Rik (NM_181543.1,441-459).
gttgtggtagccaaagcat

SEQ ID NO: 623803 - DNA, 19 bp, Mus musculus
  siRNA target sequence for C130082O03Rik (NM_181543.1,481-499).
cagccaagcaagagagtat

SEQ ID NO: 623804 - DNA, 19 bp, Mus musculus
  siRNA target sequence for C130082O03Rik (NM_181543.1,592-610).
gtcacgcaggtgtggaaat

SEQ ID NO: 623805 - DNA, 19 bp, Mus musculus
  siRNA target sequence for C130082O03Rik (NM_181543.1,594-612).
cacgcaggtgtggaaatgt

SEQ ID NO: 623806 - DNA, 19 bp, Mus musculus
  siRNA target sequence for C130082O03Rik (NM_181543.1,633-651).
gtggcagaagaattcatgt

SEQ ID NO: 623807 - DNA, 19 bp, Mus musculus
  siRNA target sequence for C130082O03Rik (NM_181543.1,723-741).
cgagcttatgaccaatgta

SEQ ID NO: 623808 - DNA, 19 bp, Mus musculus
  siRNA target sequence for C130082O03Rik (NM_181543.1,724-742).
gagcttatgaccaatgtaa

SEQ ID NO: 623809 - DNA, 19 bp, Mus musculus
  siRNA target sequence for C130082O03Rik (NM_181543.1,726-744).
gcttatgaccaatgtaaga

SEQ ID NO: 623810 - DNA, 19 bp, Mus musculus
  siRNA target sequence for C130082O03Rik (NM_181543.1,743-761).
gacacgatgtacgaaaact

SEQ ID NO: 623811 - DNA, 19 bp, Mus musculus
  siRNA target sequence for C130082O03Rik (NM_181543.1,751-769).
gtacgaaaactcgaaatct

SEQ ID NO: 623812 - DNA, 19 bp, Mus musculus
  siRNA target sequence for C130082O03Rik (NM_181543.1,772-790).
gagaccagatgcgttcaaa

SEQ ID NO: 623813 - DNA, 19 bp, Mus musculus
  siRNA target sequence for C130082O03Rik (NM_181543.1,776-794).
ccagatgcgttcaaagcaa

SEQ ID NO: 623814 - DNA, 19 bp, Mus musculus
  siRNA target sequence for C130082O03Rik (NM_181543.1,914-932).
catagccctgtctcaagtt

SEQ ID NO: 623815 - DNA, 19 bp, Mus musculus
  siRNA target sequence for C130082O03Rik (NM_181543.1,959-977).
ccctctcatttttctagtt

SEQ ID NO: 623816 - DNA, 19 bp, Mus musculus
  siRNA target sequence for C130082O03Rik (NM_181543.1,1000-1018).
gcttgaaaggcctatggaa

SEQ ID NO: 623817 - DNA, 19 bp, Mus musculus
  siRNA target sequence for C130082O03Rik (NM_181543.1,1001-1019).
cttgaaaggcctatggaaa

SEQ ID NO: 623818 - DNA, 19 bp, Mus musculus
  siRNA target sequence for C130082O03Rik (NM_181543.1,1064-1082).
ggcacctgctggaaacaca

SEQ ID NO: 623819 - DNA, 19 bp, Mus musculus
  siRNA target sequence for C130082O03Rik (NM_181543.1,1241-1259).
cccttcagcacaagacaat

SEQ ID NO: 623820 - DNA, 19 bp, Mus musculus
  siRNA target sequence for C3ar1 (NM_009779.1,43-61).
gatgctgacaccaattcaa

SEQ ID NO: 623821 - DNA, 19 bp, Mus musculus
  siRNA target sequence for C3ar1 (NM_009779.1,72-90).
ctcacggcctctgtttcaa

SEQ ID NO: 623822 - DNA, 19 bp, Mus musculus
  siRNA target sequence for C3ar1 (NM_009779.1,167-185).
gggtagctggcgtaaagat

SEQ ID NO: 623823 - DNA, 19 bp, Mus musculus
  siRNA target sequence for C3ar1 (NM_009779.1,319-337).
cttatcccatccatcatta

SEQ ID NO: 623824 - DNA, 19 bp, Mus musculus
  siRNA target sequence for C3ar1 (NM_009779.1,325-343).
ccatccatcattattctca

SEQ ID NO: 623825 - DNA, 19 bp, Mus musculus
  siRNA target sequence for C3ar1 (NM_009779.1,326-344).
catccatcattattctcaa

SEQ ID NO: 623826 - DNA, 19 bp, Mus musculus
  siRNA target sequence for C3ar1 (NM_009779.1,333-351).
cattattctcaacatgttt

SEQ ID NO: 623827 - DNA, 19 bp, Mus musculus
  siRNA target sequence for C3ar1 (NM_009779.1,381-399).
cctggaccgatgtctgata

SEQ ID NO: 623828 - DNA, 19 bp, Mus musculus
  siRNA target sequence for C3ar1 (NM_009779.1,384-402).
ggaccgatgtctgatagta

SEQ ID NO: 623829 - DNA, 19 bp, Mus musculus
  siRNA target sequence for C3ar1 (NM_009779.1,387-405).
ccgatgtctgatagtacat

SEQ ID NO: 623830 - DNA, 19 bp, Mus musculus
  siRNA target sequence for C3ar1 (NM_009779.1,388-406).
cgatgtctgatagtacata

SEQ ID NO: 623831 - DNA, 19 bp, Mus musculus
  siRNA target sequence for C3ar1 (NM_009779.1,389-407).
gatgtctgatagtacataa

SEQ ID NO: 623832 - DNA, 19 bp, Mus musculus
  siRNA target sequence for C3ar1 (NM_009779.1,410-428).
caatctggtgccagaatca

SEQ ID NO: 623833 - DNA, 19 bp, Mus musculus
  siRNA target sequence for C3ar1 (NM_009779.1,491-509).
gtgtgcccgtatttgtata

SEQ ID NO: 623834 - DNA, 19 bp, Mus musculus
  siRNA target sequence for C3ar1 (NM_009779.1,512-530).
gtgatctgttcattatgga

SEQ ID NO: 623835 - DNA, 19 bp, Mus musculus
  siRNA target sequence for C3ar1 (NM_009779.1,528-546).
ggacaatcgcagtatatgt

SEQ ID NO: 623836 - DNA, 19 bp, Mus musculus
  siRNA target sequence for C3ar1 (NM_009779.1,529-547).
gacaatcgcagtatatgta

SEQ ID NO: 623837 - DNA, 19 bp, Mus musculus
  siRNA target sequence for C3ar1 (NM_009779.1,531-549).
caatcgcagtatatgtaga

SEQ ID NO: 623838 - DNA, 19 bp, Mus musculus
  siRNA target sequence for C3ar1 (NM_009779.1,535-553).
cgcagtatatgtagatata

SEQ ID NO: 623839 - DNA, 19 bp, Mus musculus
  siRNA target sequence for C3ar1 (NM_009779.1,564-582).
ctccaggtcatatgattat

SEQ ID NO: 623840 - DNA, 19 bp, Mus musculus
  siRNA target sequence for C3ar1 (NM_009779.1,584-602).
gggactacgtgtacaaact

SEQ ID NO: 623841 - DNA, 19 bp, Mus musculus
  siRNA target sequence for C3ar1 (NM_009779.1,585-603).
ggactacgtgtacaaacta

SEQ ID NO: 623842 - DNA, 19 bp, Mus musculus
  siRNA target sequence for C3ar1 (NM_009779.1,586-604).
gactacgtgtacaaactaa

SEQ ID NO: 623843 - DNA, 19 bp, Mus musculus
  siRNA target sequence for C3ar1 (NM_009779.1,588-606).
ctacgtgtacaaactaagt

SEQ ID NO: 623844 - DNA, 19 bp, Mus musculus
  siRNA target sequence for C3ar1 (NM_009779.1,591-609).
cgtgtacaaactaagtcta

SEQ ID NO: 623845 - DNA, 19 bp, Mus musculus
  siRNA target sequence for C3ar1 (NM_009779.1,613-631).
gaaagcaattctactgata

SEQ ID NO: 623846 - DNA, 19 bp, Mus musculus
  siRNA target sequence for C3ar1 (NM_009779.1,641-659).
ctcagctaactggacatat

SEQ ID NO: 623847 - DNA, 19 bp, Mus musculus
  siRNA target sequence for C3ar1 (NM_009779.1,691-709).
gcaagggattacttttgga

SEQ ID NO: 623848 - DNA, 19 bp, Mus musculus
  siRNA target sequence for C3ar1 (NM_009779.1,800-818).
gtggaaagcctcctaatgt

SEQ ID NO: 623849 - DNA, 19 bp, Mus musculus
  siRNA target sequence for C3ar1 (NM_009779.1,837-855).
cagcgggtttcctgttgaa

SEQ ID NO: 623850 - DNA, 19 bp, Mus musculus
  siRNA target sequence for C3ar1 (NM_009779.1,847-865).
cctgttgaagatcgtaaat

SEQ ID NO: 623851 - DNA, 19 bp, Mus musculus
  siRNA target sequence for C3ar1 (NM_009779.1,850-868).
gttgaagatcgtaaatcca

SEQ ID NO: 623852 - DNA, 19 bp, Mus musculus
  siRNA target sequence for C3ar1 (NM_009779.1,959-977).
gggattatgttgaccaatt

SEQ ID NO: 623853 - DNA, 19 bp, Mus musculus
  siRNA target sequence for C3ar1 (NM_009779.1,961-979).
gattatgttgaccaattca

SEQ ID NO: 623854 - DNA, 19 bp, Mus musculus
  siRNA target sequence for C3ar1 (NM_009779.1,970-988).
gaccaattcacgtatgaca

SEQ ID NO: 623855 - DNA, 19 bp, Mus musculus
  siRNA target sequence for C3ar1 (NM_009779.1,1045-1063).
ctggtgccgtttttcatca

SEQ ID NO: 623856 - DNA, 19 bp, Mus musculus
  siRNA target sequence for C3ar1 (NM_009779.1,1051-1069).
ccgtttttcatcatggtaa

SEQ ID NO: 623857 - DNA, 19 bp, Mus musculus
  siRNA target sequence for C3ar1 (NM_009779.1,1087-1105).
gtcttcagaatgcgaaaaa

SEQ ID NO: 623858 - DNA, 19 bp, Mus musculus
  siRNA target sequence for C3ar1 (NM_009779.1,1119-1137).
gtctcggaacaaaaccttt

SEQ ID NO: 623859 - DNA, 19 bp, Mus musculus
  siRNA target sequence for C3ar1 (NM_009779.1,1195-1213).
gtcggagtcctgctattga

SEQ ID NO: 623860 - DNA, 19 bp, Mus musculus
  siRNA target sequence for C3ar1 (NM_009779.1,1197-1215).
cggagtcctgctattgatt

SEQ ID NO: 623861 - DNA, 19 bp, Mus musculus
  siRNA target sequence for C3ar1 (NM_009779.1,1198-1216).
ggagtcctgctattgatta

SEQ ID NO: 623862 - DNA, 19 bp, Mus musculus
  siRNA target sequence for C3ar1 (NM_009779.1,1258-1276).
gaccacatgtccattgctt

SEQ ID NO: 623863 - DNA, 19 bp, Mus musculus
  siRNA target sequence for C3ar1 (NM_009779.1,1341-1359).
gaaagcaagacagtctata

SEQ ID NO: 623864 - DNA, 19 bp, Mus musculus
  siRNA target sequence for C3ar1 (NM_009779.1,1406-1424).
ccaactgtacccaagacaa

SEQ ID NO: 623865 - DNA, 19 bp, Mus musculus
  siRNA target sequence for Cckar (NM_009827.1,751-769).
gtggtcgacagccttctta

SEQ ID NO: 623866 - DNA, 19 bp, Mus musculus
  siRNA target sequence for Cckar (NM_009827.1,756-774).
cgacagccttcttatgaat

SEQ ID NO: 623867 - DNA, 19 bp, Mus musculus
  siRNA target sequence for Cckar (NM_009827.1,811-829).
gaaaatgagacgcttttct

SEQ ID NO: 623868 - DNA, 19 bp, Mus musculus
  siRNA target sequence for Cckar (NM_009827.1,885-903).
gtactccttcatattcctt

SEQ ID NO: 623869 - DNA, 19 bp, Mus musculus
  siRNA target sequence for Cckar (NM_009827.1,916-934).
gggaacacgctggttatca

SEQ ID NO: 623870 - DNA, 19 bp, Mus musculus
  siRNA target sequence for Cckar (NM_009827.1,935-953).
cggtgctgattcgaaacaa

SEQ ID NO: 623871 - DNA, 19 bp, Mus musculus
  siRNA target sequence for Cckar (NM_009827.1,997-1015).
gtcagtgacctcatgcttt

SEQ ID NO: 623872 - DNA, 19 bp, Mus musculus
  siRNA target sequence for Cckar (NM_009827.1,1108-1126).
ggcacttccgtgagtgttt

SEQ ID NO: 623873 - DNA, 19 bp, Mus musculus
  siRNA target sequence for Cckar (NM_009827.1,1287-1305).
cttggtgccttttactaaa

SEQ ID NO: 623874 - DNA, 19 bp, Mus musculus
  siRNA target sequence for Cckar (NM_009827.1,1452-1470).
ctaccaaggaatcaaattt

SEQ ID NO: 623875 - DNA, 19 bp, Mus musculus
  siRNA target sequence for Cckar (NM_009827.1,1558-1576).
gatagcgatggctgttact

SEQ ID NO: 623876 - DNA, 19 bp, Mus musculus
  siRNA target sequence for Cckar (NM_009827.1,1567-1585).
ggctgttacttgcagaaat

SEQ ID NO: 623877 - DNA, 19 bp, Mus musculus
  siRNA target sequence for Cckar (NM_009827.1,1704-1722).
ccgcatgctcattgtcatt

SEQ ID NO: 623878 - DNA, 19 bp, Mus musculus
  siRNA target sequence for Cckar (NM_009827.1,1787-1805).
cggtttctgccgagaaaca

SEQ ID NO: 623879 - DNA, 19 bp, Mus musculus
  siRNA target sequence for Cckbr (NM_007627.2,375-393).
cattcgaatcaccctttat

SEQ ID NO: 623880 - DNA, 19 bp, Mus musculus
  siRNA target sequence for Cckbr (NM_007627.2,386-404).
ccctttatgcggtgatctt

SEQ ID NO: 623881 - DNA, 19 bp, Mus musculus
  siRNA target sequence for Cckbr (NM_007627.2,387-405).
cctttatgcggtgatcttt

SEQ ID NO: 623882 - DNA, 19 bp, Mus musculus
  siRNA target sequence for Cckbr (NM_007627.2,419-437).
gcggaaacgtgctcatcat

SEQ ID NO: 623883 - DNA, 19 bp, Mus musculus
  siRNA target sequence for Cckbr (NM_007627.2,624-642).
gagtgtgtccactctaaat

SEQ ID NO: 623884 - DNA, 19 bp, Mus musculus
  siRNA target sequence for Cckbr (NM_007627.2,626-644).
gtgtgtccactctaaatct

SEQ ID NO: 623885 - DNA, 19 bp, Mus musculus
  siRNA target sequence for Cckbr (NM_007627.2,720-738).
cgcagctcgggtgatctta

SEQ ID NO: 623886 - DNA, 19 bp, Mus musculus
  siRNA target sequence for Cckbr (NM_007627.2,800-818).
cagtggggcctcgaatact

SEQ ID NO: 623887 - DNA, 19 bp, Mus musculus
  siRNA target sequence for Cckbr (NM_007627.2,842-860).
gtgaacgtgtccaacaaat

SEQ ID NO: 623888 - DNA, 19 bp, Mus musculus
  siRNA target sequence for Cckbr (NM_007627.2,844-862).
gaacgtgtccaacaaatgt

SEQ ID NO: 623889 - DNA, 19 bp, Mus musculus
  siRNA target sequence for Cckbr (NM_007627.2,864-882).
gtccgtgcttctgctaata

SEQ ID NO: 623890 - DNA, 19 bp, Mus musculus
  siRNA target sequence for Cckbr (NM_007627.2,866-884).
ccgtgcttctgctaatact

SEQ ID NO: 623891 - DNA, 19 bp, Mus musculus
  siRNA target sequence for Cckbr (NM_007627.2,948-966).
cctagggctccgctttgat

SEQ ID NO: 623892 - DNA, 19 bp, Mus musculus
  siRNA target sequence for Cckbr (NM_007627.2,957-975).
ccgctttgatggtgataat

SEQ ID NO: 623893 - DNA, 19 bp, Mus musculus
  siRNA target sequence for Cckbr (NM_007627.2,1525-1543).
ctgtccaggctaagctata

SEQ ID NO: 623894 - DNA, 19 bp, Mus musculus
  siRNA target sequence for Ccr1l1 (NM_007718.1,90-108).
gagggcatttggaatcaca

SEQ ID NO: 623895 - DNA, 19 bp, Mus musculus
  siRNA target sequence for Ccr1l1 (NM_007718.1,146-164).
gcgtgataggccatgtctt

SEQ ID NO: 623896 - DNA, 19 bp, Mus musculus
  siRNA target sequence for Ccr1l1 (NM_007718.1,249-267).
cttcctctccacattacct

SEQ ID NO: 623897 - DNA, 19 bp, Mus musculus
  siRNA target sequence for Ccr1l1 (NM_007718.1,272-290).
gggttgactatatcatgaa

SEQ ID NO: 623898 - DNA, 19 bp, Mus musculus
  siRNA target sequence for Ccr1l1 (NM_007718.1,273-291).
ggttgactatatcatgaaa

SEQ ID NO: 623899 - DNA, 19 bp, Mus musculus
  siRNA target sequence for Ccr1l1 (NM_007718.1,307-325).
ggtaacgccatgtgtaagt

SEQ ID NO: 623900 - DNA, 19 bp, Mus musculus
  siRNA target sequence for Ccr1l1 (NM_007718.1,308-326).
gtaacgccatgtgtaagtt

SEQ ID NO: 623901 - DNA, 19 bp, Mus musculus
  siRNA target sequence for Ccr1l1 (NM_007718.1,378-396).
cctgcttacgattgataga

SEQ ID NO: 623902 - DNA, 19 bp, Mus musculus
  siRNA target sequence for Ccr1l1 (NM_007718.1,379-397).
ctgcttacgattgatagat

SEQ ID NO: 623903 - DNA, 19 bp, Mus musculus
  siRNA target sequence for Ccr1l1 (NM_007718.1,524-542).
cccagatggagttcactta

SEQ ID NO: 623904 - DNA, 19 bp, Mus musculus
  siRNA target sequence for Ccr1l1 (NM_007718.1,543-561).
ccatacctgcagagcaatt

SEQ ID NO: 623905 - DNA, 19 bp, Mus musculus
  siRNA target sequence for Ccr1l1 (NM_007718.1,577-595).
ctgatacgttttttaaggt

SEQ ID NO: 623906 - DNA, 19 bp, Mus musculus
  siRNA target sequence for Ccr1l1 (NM_007718.1,612-630).
gaacatccttgggctaatt

SEQ ID NO: 623907 - DNA, 19 bp, Mus musculus
  siRNA target sequence for Ccr1l1 (NM_007718.1,634-652).
cctctgttggccatgatta

SEQ ID NO: 623908 - DNA, 19 bp, Mus musculus
  siRNA target sequence for Ccr1l1 (NM_007718.1,635-653).
ctctgttggccatgattat

SEQ ID NO: 623909 - DNA, 19 bp, Mus musculus
  siRNA target sequence for Ccr1l1 (NM_007718.1,637-655).
ctgttggccatgattatct

SEQ ID NO: 623910 - DNA, 19 bp, Mus musculus
  siRNA target sequence for Ccr1l1 (NM_007718.1,657-675).
ctacacacggatcatcaat

SEQ ID NO: 623911 - DNA, 19 bp, Mus musculus
  siRNA target sequence for Ccr1l1 (NM_007718.1,660-678).
cacacggatcatcaatgtt

SEQ ID NO: 623912 - DNA, 19 bp, Mus musculus
  siRNA target sequence for Ccr1l1 (NM_007718.1,714-732).
catgcgcctgatttttgtt

SEQ ID NO: 623913 - DNA, 19 bp, Mus musculus
  siRNA target sequence for Ccr1l1 (NM_007718.1,718-736).
cgcctgatttttgttatta

SEQ ID NO: 623914 - DNA, 19 bp, Mus musculus
  siRNA target sequence for Ccr1l1 (NM_007718.1,753-771).
cctcttggccccttattat

SEQ ID NO: 623915 - DNA, 19 bp, Mus musculus
  siRNA target sequence for Ccr1l1 (NM_007718.1,804-822).
cctattcacccctagttgt

SEQ ID NO: 623916 - DNA, 19 bp, Mus musculus
  siRNA target sequence for Ccr1l1 (NM_007718.1,805-823).
ctattcacccctagttgtt

SEQ ID NO: 623917 - DNA, 19 bp, Mus musculus
  siRNA target sequence for Ccr1l1 (NM_007718.1,840-858).
ggacctgtccttgatgata

SEQ ID NO: 623918 - DNA, 19 bp, Mus musculus
  siRNA target sequence for Ccr1l1 (NM_007718.1,841-859).
gacctgtccttgatgataa

SEQ ID NO: 623919 - DNA, 19 bp, Mus musculus
  siRNA target sequence for Ccr1l1 (NM_007718.1,933-951).
gtacctctggcagttgttt

SEQ ID NO: 623920 - DNA, 19 bp, Mus musculus
  siRNA target sequence for Ccr1l1 (NM_007718.1,952-970).
cggaggcatacagctataa

SEQ ID NO: 623921 - DNA, 19 bp, Mus musculus
  siRNA target sequence for Ccr1l1 (NM_007718.1,1034-1052).
catccacagtggaaattga

SEQ ID NO: 623922 - DNA, 19 bp, Mus musculus
  siRNA target sequence for Ccr1l1 (NM_007718.1,1051-1069).
gagacctctgccgacttat

SEQ ID NO: 623923 - DNA, 19 bp, Mus musculus
  siRNA target sequence for Ccrl2 (NM_017466.3,540-558).
cggacgatgaatatgatgt

SEQ ID NO: 623924 - DNA, 19 bp, Mus musculus
  siRNA target sequence for Ccrl2 (NM_017466.3,732-750).
ggaacatctacttcctaaa

SEQ ID NO: 623925 - DNA, 19 bp, Mus musculus
  siRNA target sequence for Ccrl2 (NM_017466.3,828-846).
gcaatgggacctgtaaagt

SEQ ID NO: 623926 - DNA, 19 bp, Mus musculus
  siRNA target sequence for Ccrl2 (NM_017466.3,829-847).
caatgggacctgtaaagtt

SEQ ID NO: 623927 - DNA, 19 bp, Mus musculus
  siRNA target sequence for Ccrl2 (NM_017466.3,834-852).
ggacctgtaaagttcttgt

SEQ ID NO: 623928 - DNA, 19 bp, Mus musculus
  siRNA target sequence for Ccrl2 (NM_017466.3,911-929).
caaggatacagggtgtttt

SEQ ID NO: 623929 - DNA, 19 bp, Mus musculus
  siRNA target sequence for Ccrl2 (NM_017466.3,960-978).
cagtgtcttgtggtattgt

SEQ ID NO: 623930 - DNA, 19 bp, Mus musculus
  siRNA target sequence for Ccrl2 (NM_017466.3,1021-1039).
gcccgagtctgtgttttat

SEQ ID NO: 623931 - DNA, 19 bp, Mus musculus
  siRNA target sequence for Ccrl2 (NM_017466.3,1120-1138).
gtacgttctgacgtcaaaa

SEQ ID NO: 623932 - DNA, 19 bp, Mus musculus
  siRNA target sequence for Ccrl2 (NM_017466.3,1124-1142).
gttctgacgtcaaaaatga

SEQ ID NO: 623933 - DNA, 19 bp, Mus musculus
  siRNA target sequence for Ccrl2 (NM_017466.3,1127-1145).
ctgacgtcaaaaatgatca

SEQ ID NO: 623934 - DNA, 19 bp, Mus musculus
  siRNA target sequence for Ccrl2 (NM_017466.3,1131-1149).
cgtcaaaaatgatcatctt

SEQ ID NO: 623935 - DNA, 19 bp, Mus musculus
  siRNA target sequence for Ccrl2 (NM_017466.3,1260-1278).
cgggcgtgttccttttgat

SEQ ID NO: 623936 - DNA, 19 bp, Mus musculus
  siRNA target sequence for Ccrl2 (NM_017466.3,1357-1375).
ccacctggacgcaagtgtt

SEQ ID NO: 623937 - DNA, 19 bp, Mus musculus
  siRNA target sequence for Ccrl2 (NM_017466.3,1417-1435).
cccgctgctctatttgctt

SEQ ID NO: 623938 - DNA, 19 bp, Mus musculus
  siRNA target sequence for Ccrl2 (NM_017466.3,1439-1457).
gaccggaaggcctttatga

SEQ ID NO: 623939 - DNA, 19 bp, Mus musculus
  siRNA target sequence for Ccrl2 (NM_017466.3,1441-1459).
ccggaaggcctttatgaga

SEQ ID NO: 623940 - DNA, 19 bp, Mus musculus
  siRNA target sequence for Ccrl2 (NM_017466.3,1442-1460).
cggaaggcctttatgagat

SEQ ID NO: 623941 - DNA, 19 bp, Mus musculus
  siRNA target sequence for Ccrl2 (NM_017466.3,1474-1492).
gttcccacggtgcaatgat

SEQ ID NO: 623942 - DNA, 19 bp, Mus musculus
  siRNA target sequence for Ccrl2 (NM_017466.3,1486-1504).
caatgatatcccctatcaa

SEQ ID NO: 623943 - DNA, 19 bp, Mus musculus
  siRNA target sequence for Ccrl2 (NM_017466.3,1490-1508).
gatatcccctatcaaagta

SEQ ID NO: 623944 - DNA, 19 bp, Mus musculus
  siRNA target sequence for Ccrl2 (NM_017466.3,1576-1594).
gcatcaaaggcaggatata

SEQ ID NO: 623945 - DNA, 19 bp, Mus musculus
  siRNA target sequence for Ccrl2 (NM_017466.3,1577-1595).
catcaaaggcaggatataa

SEQ ID NO: 623946 - DNA, 19 bp, Mus musculus
  siRNA target sequence for Ccrl2 (NM_017466.3,1580-1598).
caaaggcaggatataatat

SEQ ID NO: 623947 - DNA, 19 bp, Mus musculus
  siRNA target sequence for Chrm1 (NM_007698.2,203-221).
gctgtcagtcccaacatca

SEQ ID NO: 623948 - DNA, 19 bp, Mus musculus
  siRNA target sequence for Chrm1 (NM_007698.2,601-619).
cagggcagctctgatgatt

SEQ ID NO: 623949 - DNA, 19 bp, Mus musculus
  siRNA target sequence for Chrm1 (NM_007698.2,620-638).
ggcctcgcgtggttggttt

SEQ ID NO: 623950 - DNA, 19 bp, Mus musculus
  siRNA target sequence for Chrm1 (NM_007698.2,732-750).
cccaacccatcatcacttt

SEQ ID NO: 623951 - DNA, 19 bp, Mus musculus
  siRNA target sequence for Chrm1 (NM_007698.2,733-751).
ccaacccatcatcactttt

SEQ ID NO: 623952 - DNA, 19 bp, Mus musculus
  siRNA target sequence for Chrm1 (NM_007698.2,993-1011).
cctacagctggaaagaaga

SEQ ID NO: 623953 - DNA, 19 bp, Mus musculus
  siRNA target sequence for Chrm1 (NM_007698.2,1074-1092).
cagaagtggtgatcaagat

SEQ ID NO: 623954 - DNA, 19 bp, Mus musculus
  siRNA target sequence for Chrm1 (NM_007698.2,1138-1156).
caaaagctccccaaataca

SEQ ID NO: 623955 - DNA, 19 bp, Mus musculus
  siRNA target sequence for Chrm1 (NM_007698.2,1209-1227).
cccgagggaaggaacaact

SEQ ID NO: 623956 - DNA, 19 bp, Mus musculus
  siRNA target sequence for Chrm1 (NM_007698.2,1220-1238).
gaacaactggccaagagaa

SEQ ID NO: 623957 - DNA, 19 bp, Mus musculus
  siRNA target sequence for Chrm1 (NM_007698.2,1334-1352).
gtgctggtgtctacattct

SEQ ID NO: 623958 - DNA, 19 bp, Mus musculus
  siRNA target sequence for Chrm1 (NM_007698.2,1432-1450).
ctacgcactctgcaacaaa

SEQ ID NO: 623959 - DNA, 19 bp, Mus musculus
  siRNA target sequence for Chrm3 (NM_033269.2,1056-1074).
catttaaggtcaacaaaca

SEQ ID NO: 623960 - DNA, 19 bp, Mus musculus
  siRNA target sequence for Chrm3 (NM_033269.2,1151-1169).
ctgttcacgacctacatca

SEQ ID NO: 623961 - DNA, 19 bp, Mus musculus
  siRNA target sequence for Chrm3 (NM_033269.2,1153-1171).
gttcacgacctacatcatt

SEQ ID NO: 623962 - DNA, 19 bp, Mus musculus
  siRNA target sequence for Chrm3 (NM_033269.2,1158-1176).
cgacctacatcattatgaa

SEQ ID NO: 623963 - DNA, 19 bp, Mus musculus
  siRNA target sequence for Chrm3 (NM_033269.2,1180-1198).
ctgggctctggggaactta

SEQ ID NO: 623964 - DNA, 19 bp, Mus musculus
  siRNA target sequence for Chrm3 (NM_033269.2,1203-1221).
gtgacctctggctttccat

SEQ ID NO: 623965 - DNA, 19 bp, Mus musculus
  siRNA target sequence for Chrm3 (NM_033269.2,1270-1288).
ctttgacaggtacttttct

SEQ ID NO: 623966 - DNA, 19 bp, Mus musculus
  siRNA target sequence for Chrm3 (NM_033269.2,1309-1327).
ccgagccaaacgaacaaca

SEQ ID NO: 623967 - DNA, 19 bp, Mus musculus
  siRNA target sequence for Chrm3 (NM_033269.2,1310-1328).
cgagccaaacgaacaacaa

SEQ ID NO: 623968 - DNA, 19 bp, Mus musculus
  siRNA target sequence for Chrm3 (NM_033269.2,1396-1414).
gttctggcaatactttgta

SEQ ID NO: 623969 - DNA, 19 bp, Mus musculus
  siRNA target sequence for Chrm3 (NM_033269.2,1434-1452).
ccggagaatgtttcattca

SEQ ID NO: 623970 - DNA, 19 bp, Mus musculus
  siRNA target sequence for Chrm3 (NM_033269.2,1485-1503).
cggcgatcgctgcctttta

SEQ ID NO: 623971 - DNA, 19 bp, Mus musculus
  siRNA target sequence for Chrm3 (NM_033269.2,1487-1505).
gcgatcgctgccttttaca

SEQ ID NO: 623972 - DNA, 19 bp, Mus musculus
  siRNA target sequence for Chrm3 (NM_033269.2,1488-1506).
cgatcgctgccttttacat

SEQ ID NO: 623973 - DNA, 19 bp, Mus musculus
  siRNA target sequence for Chrm3 (NM_033269.2,1676-1694).
ggcacgaaacggtcatcta

SEQ ID NO: 623974 - DNA, 19 bp, Mus musculus
  siRNA target sequence for Chrm3 (NM_033269.2,1779-1797).
gcagtgacagttggaataa

SEQ ID NO: 623975 - DNA, 19 bp, Mus musculus
  siRNA target sequence for Chrm3 (NM_033269.2,1974-1992).
ctatggatgtagagagaaa

SEQ ID NO: 623976 - DNA, 19 bp, Mus musculus
  siRNA target sequence for Chrm3 (NM_033269.2,1987-2005).
gagaaatgcccataagctt

SEQ ID NO: 623977 - DNA, 19 bp, Mus musculus
  siRNA target sequence for Chrm3 (NM_033269.2,2003-2021).
cttcaggcccagaagagta

SEQ ID NO: 623978 - DNA, 19 bp, Mus musculus
  siRNA target sequence for Chrm3 (NM_033269.2,2060-2078).
ctccccatccagttagagt

SEQ ID NO: 623979 - DNA, 19 bp, Mus musculus
  siRNA target sequence for Chrm3 (NM_033269.2,2289-2307).
cgtggaccccctacaacat

SEQ ID NO: 623980 - DNA, 19 bp, Mus musculus
  siRNA target sequence for Chrm3 (NM_033269.2,2337-2355).
gctgcatacccaaaaccta

SEQ ID NO: 623981 - DNA, 19 bp, Mus musculus
  siRNA target sequence for Chrm3 (NM_033269.2,2338-2356).
ctgcatacccaaaacctat

SEQ ID NO: 623982 - DNA, 19 bp, Mus musculus
  siRNA target sequence for Chrm3 (NM_033269.2,2414-2432).
gccctgtgcaacaagacat

SEQ ID NO: 623983 - DNA, 19 bp, Mus musculus
  siRNA target sequence for Chrm3 (NM_033269.2,2415-2433).
ccctgtgcaacaagacatt

SEQ ID NO: 623984 - DNA, 19 bp, Mus musculus
  siRNA target sequence for Chrm3 (NM_033269.2,2508-2526).
gacagtccgtcatttttca

SEQ ID NO: 623985 - DNA, 19 bp, Mus musculus
  siRNA target sequence for Chrm3 (NM_033269.2,2510-2528).
cagtccgtcatttttcaca

SEQ ID NO: 623986 - DNA, 19 bp, Mus musculus
  siRNA target sequence for Cmklr1 (NM_008153.1,285-303).
cgactccggcatctatgat

SEQ ID NO: 623987 - DNA, 19 bp, Mus musculus
  siRNA target sequence for Cmklr1 (NM_008153.1,288-306).
ctccggcatctatgatgat

SEQ ID NO: 623988 - DNA, 19 bp, Mus musculus
  siRNA target sequence for Cmklr1 (NM_008153.1,290-308).
ccggcatctatgatgatga

SEQ ID NO: 623989 - DNA, 19 bp, Mus musculus
  siRNA target sequence for Cmklr1 (NM_008153.1,428-446).
gcaacggcctggtgattgt

SEQ ID NO: 623990 - DNA, 19 bp, Mus musculus
  siRNA target sequence for Cmklr1 (NM_008153.1,508-526).
gccgacttcctgttcaaca

SEQ ID NO: 623991 - DNA, 19 bp, Mus musculus
  siRNA target sequence for Cmklr1 (NM_008153.1,613-631).
ctcagccacaacatgtaca

SEQ ID NO: 623992 - DNA, 19 bp, Mus musculus
  siRNA target sequence for Cmklr1 (NM_008153.1,770-788).
gctccccgtcccttgtctt

SEQ ID NO: 623993 - DNA, 19 bp, Mus musculus
  siRNA target sequence for Cmklr1 (NM_008153.1,789-807).
ccgggacaccgccaacatt

SEQ ID NO: 623994 - DNA, 19 bp, Mus musculus
  siRNA target sequence for Cmklr1 (NM_008153.1,791-809).
gggacaccgccaacattca

SEQ ID NO: 623995 - DNA, 19 bp, Mus musculus
  siRNA target sequence for Cmklr1 (NM_008153.1,792-810).
ggacaccgccaacattcat

SEQ ID NO: 623996 - DNA, 19 bp, Mus musculus
  siRNA target sequence for Cmklr1 (NM_008153.1,871-889).
gcccactcgcaagtagttt

SEQ ID NO: 623997 - DNA, 19 bp, Mus musculus
  siRNA target sequence for Cmklr1 (NM_008153.1,1216-1234).
ggccacgacttcagaaaat

SEQ ID NO: 623998 - DNA, 19 bp, Mus musculus
  siRNA target sequence for Cmklr1 (NM_008153.1,1219-1237).
cacgacttcagaaaattca

SEQ ID NO: 623999 - DNA, 19 bp, Mus musculus
  siRNA target sequence for Cmklr1 (NM_008153.1,1319-1337).
ccaagatgtcgtctttgaa

SEQ ID NO: 624000 - DNA, 19 bp, Mus musculus
  siRNA target sequence for Cmkor1 (NM_007722.2,250-268).
cctctccttcatctacatt

SEQ ID NO: 624001 - DNA, 19 bp, Mus musculus
  siRNA target sequence for Cmkor1 (NM_007722.2,274-292).
cttcgtgatcggcatgatt

SEQ ID NO: 624002 - DNA, 19 bp, Mus musculus
  siRNA target sequence for Cmkor1 (NM_007722.2,420-438).
gtctcgtgcagcataacca

SEQ ID NO: 624003 - DNA, 19 bp, Mus musculus
  siRNA target sequence for Cmkor1 (NM_007722.2,452-470).
gagctcacatgcaagatca

SEQ ID NO: 624004 - DNA, 19 bp, Mus musculus
  siRNA target sequence for Cmkor1 (NM_007722.2,561-579).
ccggcacctccagctataa

SEQ ID NO: 624005 - DNA, 19 bp, Mus musculus
  siRNA target sequence for Cmkor1 (NM_007722.2,563-581).
ggcacctccagctataaga

SEQ ID NO: 624006 - DNA, 19 bp, Mus musculus
  siRNA target sequence for Cmkor1 (NM_007722.2,586-604).
gatggtacgccgtgttgta

SEQ ID NO: 624007 - DNA, 19 bp, Mus musculus
  siRNA target sequence for Cmkor1 (NM_007722.2,789-807).
ctatcattgcgatcttcta

SEQ ID NO: 624008 - DNA, 19 bp, Mus musculus
  siRNA target sequence for Cmkor1 (NM_007722.2,887-905).
gtggtcttcctggtatgtt

SEQ ID NO: 624009 - DNA, 19 bp, Mus musculus
  siRNA target sequence for Cmkor1 (NM_007722.2,903-921).
gttggctgccgtaccattt

SEQ ID NO: 624010 - DNA, 19 bp, Mus musculus
  siRNA target sequence for Cmkor1 (NM_007722.2,906-924).
ggctgccgtaccattttgt

SEQ ID NO: 624011 - DNA, 19 bp, Mus musculus
  siRNA target sequence for Cmkor1 (NM_007722.2,953-971).
cactacatcccgtttacct

SEQ ID NO: 624012 - DNA, 19 bp, Mus musculus
  siRNA target sequence for Cmkor1 (NM_007722.2,1108-1126).
caagtactcggccaaaaca

SEQ ID NO: 624013 - DNA, 19 bp, Mus musculus
  siRNA target sequence for Cnr1 (NM_007726.1,164-182).
gtagtcccttccaagaaaa

SEQ ID NO: 624014 - DNA, 19 bp, Mus musculus
  siRNA target sequence for Cnr1 (NM_007726.1,169-187).
cccttccaagaaaagatga

SEQ ID NO: 624015 - DNA, 19 bp, Mus musculus
  siRNA target sequence for Cnr1 (NM_007726.1,315-333).
catggagtgcttcatgatt

SEQ ID NO: 624016 - DNA, 19 bp, Mus musculus
  siRNA target sequence for Cnr1 (NM_007726.1,452-470).
ggccttcctaccacttcat

SEQ ID NO: 624017 - DNA, 19 bp, Mus musculus
  siRNA target sequence for Cnr1 (NM_007726.1,453-471).
gccttcctaccacttcatt

SEQ ID NO: 624018 - DNA, 19 bp, Mus musculus
  siRNA target sequence for Cnr1 (NM_007726.1,495-513).
cctgggaagtgtcatcttt

SEQ ID NO: 624019 - DNA, 19 bp, Mus musculus
  siRNA target sequence for Cnr1 (NM_007726.1,537-555).
cgtgttccaccgcaaagat

SEQ ID NO: 624020 - DNA, 19 bp, Mus musculus
  siRNA target sequence for Cnr1 (NM_007726.1,538-556).
gtgttccaccgcaaagata

SEQ ID NO: 624021 - DNA, 19 bp, Mus musculus
  siRNA target sequence for Cnr1 (NM_007726.1,540-558).
gttccaccgcaaagatagt

SEQ ID NO: 624022 - DNA, 19 bp, Mus musculus
  siRNA target sequence for Cnr1 (NM_007726.1,725-743).
ggactattgcaatagtaat

SEQ ID NO: 624023 - DNA, 19 bp, Mus musculus
  siRNA target sequence for Cnr1 (NM_007726.1,774-792).
caagaagctgcaatctgtt

SEQ ID NO: 624024 - DNA, 19 bp, Mus musculus
  siRNA target sequence for Cnr1 (NM_007726.1,880-898).
gcatacatgtacattctct

SEQ ID NO: 624025 - DNA, 19 bp, Mus musculus
  siRNA target sequence for Cnr1 (NM_007726.1,957-975).
cattcacacctcagaagat

SEQ ID NO: 624026 - DNA, 19 bp, Mus musculus
  siRNA target sequence for Cnr1 (NM_007726.1,1003-1021).
caagcccgcatggacatta

SEQ ID NO: 624027 - DNA, 19 bp, Mus musculus
  siRNA target sequence for Cnr1 (NM_007726.1,1254-1272).
cactgcgcagcctctagat

SEQ ID NO: 624028 - DNA, 19 bp, Mus musculus
  siRNA target sequence for Cnr1 (NM_007726.1,1256-1274).
ctgcgcagcctctagataa

SEQ ID NO: 624029 - DNA, 19 bp, Mus musculus
  siRNA target sequence for Cnr1 (NM_007726.1,1258-1276).
gcgcagcctctagataaca

SEQ ID NO: 624030 - DNA, 19 bp, Mus musculus
  siRNA target sequence for Cnr1 (NM_007726.1,1300-1318).
cacaagcacgccaataaca

SEQ ID NO: 624031 - DNA, 19 bp, Mus musculus
  siRNA target sequence for Cnr1 (NM_007726.1,1302-1320).
caagcacgccaataacaca

SEQ ID NO: 624032 - DNA, 19 bp, Mus musculus
  siRNA target sequence for Cnr1 (NM_007726.1,1349-1367).
gcatcaagagcactgttaa

SEQ ID NO: 624033 - DNA, 19 bp, Mus musculus
  siRNA target sequence for Cnr2 (NM_009924.2,336-354).
catggccgtgctctatatt

SEQ ID NO: 624034 - DNA, 19 bp, Mus musculus
  siRNA target sequence for Cnr2 (NM_009924.2,575-593).
gctacctatgtctgtgtta

SEQ ID NO: 624035 - DNA, 19 bp, Mus musculus
  siRNA target sequence for Cnr2 (NM_009924.2,656-674).
gggtcctctcagcattgat

SEQ ID NO: 624036 - DNA, 19 bp, Mus musculus
  siRNA target sequence for Cnr2 (NM_009924.2,786-804).
cttttccggcatcatctat

SEQ ID NO: 624037 - DNA, 19 bp, Mus musculus
  siRNA target sequence for Cnr2 (NM_009924.2,792-810).
cggcatcatctatacctat

SEQ ID NO: 624038 - DNA, 19 bp, Mus musculus
  siRNA target sequence for Cnr2 (NM_009924.2,1181-1199).
caaggtcctcggttacaga

SEQ ID NO: 624039 - DNA, 19 bp, Mus musculus
  siRNA target sequence for Cnr2 (NM_009924.2,1204-1222).
gaggctgatgtgaaaacca

SEQ ID NO: 624040 - DNA, 19 bp, Mus musculus
  siRNA target sequence for Cog8 (NM_139229.2,270-288).
gctttcgccaactacaaga

SEQ ID NO: 624041 - DNA, 19 bp, Mus musculus
  siRNA target sequence for Cog8 (NM_139229.2,278-296).
caactacaagacgttcatt

SEQ ID NO: 624042 - DNA, 19 bp, Mus musculus
  siRNA target sequence for Cog8 (NM_139229.2,521-539).
ccgaaacagctatcatgaa

SEQ ID NO: 624043 - DNA, 19 bp, Mus musculus
  siRNA target sequence for Cog8 (NM_139229.2,548-566).
ggagcttgccgcctatgta

SEQ ID NO: 624044 - DNA, 19 bp, Mus musculus
  siRNA target sequence for Cog8 (NM_139229.2,570-588).
cgactggaaaggaagtact

SEQ ID NO: 624045 - DNA, 19 bp, Mus musculus
  siRNA target sequence for Cog8 (NM_139229.2,701-719).
ccgtgtcataggctatctt

SEQ ID NO: 624046 - DNA, 19 bp, Mus musculus
  siRNA target sequence for Cog8 (NM_139229.2,800-818).
gactgccatccctaatgat

SEQ ID NO: 624047 - DNA, 19 bp, Mus musculus
  siRNA target sequence for Cog8 (NM_139229.2,856-874).
gccgggtccatctctttga

SEQ ID NO: 624048 - DNA, 19 bp, Mus musculus
  siRNA target sequence for Cog8 (NM_139229.2,857-875).
ccgggtccatctctttgat

SEQ ID NO: 624049 - DNA, 19 bp, Mus musculus
  siRNA target sequence for Cog8 (NM_139229.2,858-876).
cgggtccatctctttgata

SEQ ID NO: 624050 - DNA, 19 bp, Mus musculus
  siRNA target sequence for Cog8 (NM_139229.2,864-882).
catctctttgatatcatca

SEQ ID NO: 624051 - DNA, 19 bp, Mus musculus
  siRNA target sequence for Cog8 (NM_139229.2,881-899).
cacccagtaccgtgctatt

SEQ ID NO: 624052 - DNA, 19 bp, Mus musculus
  siRNA target sequence for Cog8 (NM_139229.2,885-903).
cagtaccgtgctattttct

SEQ ID NO: 624053 - DNA, 19 bp, Mus musculus
  siRNA target sequence for Cog8 (NM_139229.2,935-953).
gggcgagtacactgtgaat

SEQ ID NO: 624054 - DNA, 19 bp, Mus musculus
  siRNA target sequence for Cog8 (NM_139229.2,1022-1040).
cctttaccggggtatagga

SEQ ID NO: 624055 - DNA, 19 bp, Mus musculus
  siRNA target sequence for Cog8 (NM_139229.2,1093-1111).
gccgggtgggggctgattt

SEQ ID NO: 624056 - DNA, 19 bp, Mus musculus
  siRNA target sequence for Cog8 (NM_139229.2,1297-1315).
caccgatggtgctcttaga

SEQ ID NO: 624057 - DNA, 19 bp, Mus musculus
  siRNA target sequence for Cog8 (NM_139229.2,1299-1317).
ccgatggtgctcttagact

SEQ ID NO: 624058 - DNA, 19 bp, Mus musculus
  siRNA target sequence for Cog8 (NM_139229.2,1300-1318).
cgatggtgctcttagactt

SEQ ID NO: 624059 - DNA, 19 bp, Mus musculus
  siRNA target sequence for Cog8 (NM_139229.2,1331-1349).
ctgtttcctcaacaacatt

SEQ ID NO: 624060 - DNA, 19 bp, Mus musculus
  siRNA target sequence for Cog8 (NM_139229.2,1352-1370).
ggttgctttcaatgattta

SEQ ID NO: 624061 - DNA, 19 bp, Mus musculus
  siRNA target sequence for Cog8 (NM_139229.2,1406-1424).
gactgggaccttggaaaat

SEQ ID NO: 624062 - DNA, 19 bp, Mus musculus
  siRNA target sequence for Cog8 (NM_139229.2,1427-1445).
ccttaccaaggtaaccaaa

SEQ ID NO: 624063 - DNA, 19 bp, Mus musculus
  siRNA target sequence for Cog8 (NM_139229.2,1428-1446).
cttaccaaggtaaccaaaa

SEQ ID NO: 624064 - DNA, 19 bp, Mus musculus
  siRNA target sequence for Cog8 (NM_139229.2,1492-1510).
gggagcatgagatctttgt

SEQ ID NO: 624065 - DNA, 19 bp, Mus musculus
  siRNA target sequence for Cog8 (NM_139229.2,1595-1613).
ccagactttaggcatttca

SEQ ID NO: 624066 - DNA, 19 bp, Mus musculus
  siRNA target sequence for Cog8 (NM_139229.2,1692-1710).
cctaagagagaaacagttt

SEQ ID NO: 624067 - DNA, 19 bp, Mus musculus
  siRNA target sequence for Cog8 (NM_139229.2,1705-1723).
cagttttctgtttagatga

SEQ ID NO: 624068 - DNA, 19 bp, Mus musculus
  siRNA target sequence for Cog8 (NM_139229.2,1783-1801).
gcatggagcctgtaacaga

SEQ ID NO: 624069 - DNA, 19 bp, Mus musculus
  siRNA target sequence for Cxcr4 (NM_009911.2,126-144).
ccgatcagtgtgagtatat

SEQ ID NO: 624070 - DNA, 19 bp, Mus musculus
  siRNA target sequence for Cxcr4 (NM_009911.2,127-145).
cgatcagtgtgagtatata

SEQ ID NO: 624071 - DNA, 19 bp, Mus musculus
  siRNA target sequence for Cxcr4 (NM_009911.2,137-155).
gagtatatacacttctgat

SEQ ID NO: 624072 - DNA, 19 bp, Mus musculus
  siRNA target sequence for Cxcr4 (NM_009911.2,208-226).
gcttccgggatgaaaacgt

SEQ ID NO: 624073 - DNA, 19 bp, Mus musculus
  siRNA target sequence for Cxcr4 (NM_009911.2,214-232).
gggatgaaaacgtccattt

SEQ ID NO: 624074 - DNA, 19 bp, Mus musculus
  siRNA target sequence for Cxcr4 (NM_009911.2,216-234).
gatgaaaacgtccatttca

SEQ ID NO: 624075 - DNA, 19 bp, Mus musculus
  siRNA target sequence for Cxcr4 (NM_009911.2,219-237).
gaaaacgtccatttcaata

SEQ ID NO: 624076 - DNA, 19 bp, Mus musculus
  siRNA target sequence for Cxcr4 (NM_009911.2,279-297).
ggcatagtcggcaatggat

SEQ ID NO: 624077 - DNA, 19 bp, Mus musculus
  siRNA target sequence for Cxcr4 (NM_009911.2,280-298).
gcatagtcggcaatggatt

SEQ ID NO: 624078 - DNA, 19 bp, Mus musculus
  siRNA target sequence for Cxcr4 (NM_009911.2,568-586).
ggaaactgctggctgaaaa

SEQ ID NO: 624079 - DNA, 19 bp, Mus musculus
  siRNA target sequence for Cxcr4 (NM_009911.2,578-596).
ggctgaaaaggcagtctat

SEQ ID NO: 624080 - DNA, 19 bp, Mus musculus
  siRNA target sequence for Cxcr4 (NM_009911.2,580-598).
ctgaaaaggcagtctatgt

SEQ ID NO: 624081 - DNA, 19 bp, Mus musculus
  siRNA target sequence for Cxcr4 (NM_009911.2,617-635).
cctcctcctgactatacct

SEQ ID NO: 624082 - DNA, 19 bp, Mus musculus
  siRNA target sequence for Cxcr4 (NM_009911.2,678-696).
ggggatgacaggtacatct

SEQ ID NO: 624083 - DNA, 19 bp, Mus musculus
  siRNA target sequence for Cxcr4 (NM_009911.2,722-740).
gtggatggtggtgtttcaa

SEQ ID NO: 624084 - DNA, 19 bp, Mus musculus
  siRNA target sequence for Cxcr4 (NM_009911.2,892-910).
gctggctgccatattatgt

SEQ ID NO: 624085 - DNA, 19 bp, Mus musculus
  siRNA target sequence for Cxcr4 (NM_009911.2,1158-1176).
gtctccacggagtcagaat

SEQ ID NO: 624086 - DNA, 19 bp, Mus musculus
  siRNA target sequence for Dfy (NM_010045.1,96-114).
ctttcgacagctggaatta

SEQ ID NO: 624087 - DNA, 19 bp, Mus musculus
  siRNA target sequence for Dfy (NM_010045.1,101-119).
gacagctggaattattcgt

SEQ ID NO: 624088 - DNA, 19 bp, Mus musculus
  siRNA target sequence for Dfy (NM_010045.1,103-121).
cagctggaattattcgttt

SEQ ID NO: 624089 - DNA, 19 bp, Mus musculus
  siRNA target sequence for Dfy (NM_010045.1,109-127).
gaattattcgtttgaagat

SEQ ID NO: 624090 - DNA, 19 bp, Mus musculus
  siRNA target sequence for Dfy (NM_010045.1,273-291).
cgattctcagacctttctt

SEQ ID NO: 624091 - DNA, 19 bp, Mus musculus
  siRNA target sequence for Dfy (NM_010045.1,374-392).
ctggcaccaggcttacaca

SEQ ID NO: 624092 - DNA, 19 bp, Mus musculus
  siRNA target sequence for Dfy (NM_010045.1,424-442).
ctactgggtatggtatact

SEQ ID NO: 624093 - DNA, 19 bp, Mus musculus
  siRNA target sequence for Dfy (NM_010045.1,427-445).
ctgggtatggtatacttct

SEQ ID NO: 624094 - DNA, 19 bp, Mus musculus
  siRNA target sequence for Dfy (NM_010045.1,656-674).
cattatgccatctgtttta

SEQ ID NO: 624095 - DNA, 19 bp, Mus musculus
  siRNA target sequence for Dfy (NM_010045.1,794-812).
catgggatggttctcatat

SEQ ID NO: 624096 - DNA, 19 bp, Mus musculus
  siRNA target sequence for Drd2 (NM_010077.1,221-239).
ggccccactacaactacta

SEQ ID NO: 624097 - DNA, 19 bp, Mus musculus
  siRNA target sequence for Drd2 (NM_010077.1,222-240).
gccccactacaactactat

SEQ ID NO: 624098 - DNA, 19 bp, Mus musculus
  siRNA target sequence for Drd2 (NM_010077.1,535-553).
gtggccatgcctatgttgt

SEQ ID NO: 624099 - DNA, 19 bp, Mus musculus
  siRNA target sequence for Drd2 (NM_010077.1,537-555).
ggccatgcctatgttgtat

SEQ ID NO: 624100 - DNA, 19 bp, Mus musculus
  siRNA target sequence for Drd2 (NM_010077.1,538-556).
gccatgcctatgttgtata

SEQ ID NO: 624101 - DNA, 19 bp, Mus musculus
  siRNA target sequence for Drd2 (NM_010077.1,539-557).
ccatgcctatgttgtataa

SEQ ID NO: 624102 - DNA, 19 bp, Mus musculus
  siRNA target sequence for Drd2 (NM_010077.1,543-561).
gcctatgttgtataacaca

SEQ ID NO: 624103 - DNA, 19 bp, Mus musculus
  siRNA target sequence for Drd2 (NM_010077.1,570-588).
ctccaagcgccgagttact

SEQ ID NO: 624104 - DNA, 19 bp, Mus musculus
  siRNA target sequence for Drd2 (NM_010077.1,572-590).
ccaagcgccgagttactgt

SEQ ID NO: 624105 - DNA, 19 bp, Mus musculus
  siRNA target sequence for Drd2 (NM_010077.1,589-607).
gtcatgatcgccattgtct

SEQ ID NO: 624106 - DNA, 19 bp, Mus musculus
  siRNA target sequence for Drd2 (NM_010077.1,663-681).
ccagaatgagtgtatcatt

SEQ ID NO: 624107 - DNA, 19 bp, Mus musculus
  siRNA target sequence for Drd2 (NM_010077.1,844-862).
ccactcaagggcaactgta

SEQ ID NO: 624108 - DNA, 19 bp, Mus musculus
  siRNA target sequence for Drd2 (NM_010077.1,883-901).
ctctgcaccgttatcatga

SEQ ID NO: 624109 - DNA, 19 bp, Mus musculus
  siRNA target sequence for Drd2 (NM_010077.1,890-908).
ccgttatcatgaagtctaa

SEQ ID NO: 624110 - DNA, 19 bp, Mus musculus
  siRNA target sequence for Drd2 (NM_010077.1,891-909).
cgttatcatgaagtctaat

SEQ ID NO: 624111 - DNA, 19 bp, Mus musculus
  siRNA target sequence for Drd2 (NM_010077.1,924-942).
gaacaggcggagaatggat

SEQ ID NO: 624112 - DNA, 19 bp, Mus musculus
  siRNA target sequence for Drd2 (NM_010077.1,953-971).
gagctcaggagctggaaat

SEQ ID NO: 624113 - DNA, 19 bp, Mus musculus
  siRNA target sequence for Drd2 (NM_010077.1,1136-1154).
ccaggattgccaagttctt

SEQ ID NO: 624114 - DNA, 19 bp, Mus musculus
  siRNA target sequence for Drd2 (NM_010077.1,1305-1323).
cacgcacatcctgaatata

SEQ ID NO: 624115 - DNA, 19 bp, Mus musculus
  siRNA target sequence for Drd2 (NM_010077.1,1307-1325).
cgcacatcctgaatataca

SEQ ID NO: 624116 - DNA, 19 bp, Mus musculus
  siRNA target sequence for Drd2 (NM_010077.1,1351-1369).
ctctacagcgccttcacat

SEQ ID NO: 624117 - DNA, 19 bp, Mus musculus
  siRNA target sequence for Drd3 (NM_007877.1,275-293).
caggtggagtctggaattt

SEQ ID NO: 624118 - DNA, 19 bp, Mus musculus
  siRNA target sequence for Drd3 (NM_007877.1,277-295).
ggtggagtctggaatttca

SEQ ID NO: 624119 - DNA, 19 bp, Mus musculus
  siRNA target sequence for Drd3 (NM_007877.1,298-316).
cgcatttgctgtgatgttt

SEQ ID NO: 624120 - DNA, 19 bp, Mus musculus
  siRNA target sequence for Drd3 (NM_007877.1,396-414).
ggtcatgccagttcactat

SEQ ID NO: 624121 - DNA, 19 bp, Mus musculus
  siRNA target sequence for Drd3 (NM_007877.1,443-461).
gacgtgtggcgctcatgat

SEQ ID NO: 624122 - DNA, 19 bp, Mus musculus
  siRNA target sequence for Drd3 (NM_007877.1,502-520).
ctcctctttggtttcaaca

SEQ ID NO: 624123 - DNA, 19 bp, Mus musculus
  siRNA target sequence for Drd3 (NM_007877.1,552-570).
caaccctgattttgtcatt

SEQ ID NO: 624124 - DNA, 19 bp, Mus musculus
  siRNA target sequence for Drd3 (NM_007877.1,619-637).
gtctatgccaggatctaca

SEQ ID NO: 624125 - DNA, 19 bp, Mus musculus
  siRNA target sequence for Drd3 (NM_007877.1,742-760).
catcccattcggcagtttt

SEQ ID NO: 624126 - DNA, 19 bp, Mus musculus
  siRNA target sequence for Drd3 (NM_007877.1,745-763).
cccattcggcagttttcaa

SEQ ID NO: 624127 - DNA, 19 bp, Mus musculus
  siRNA target sequence for Drd3 (NM_007877.1,746-764).
ccattcggcagttttcaat

SEQ ID NO: 624128 - DNA, 19 bp, Mus musculus
  siRNA target sequence for Drd3 (NM_007877.1,747-765).
cattcggcagttttcaata

SEQ ID NO: 624129 - DNA, 19 bp, Mus musculus
  siRNA target sequence for Drd3 (NM_007877.1,782-800).
cagatgccacgggacaaat

SEQ ID NO: 624130 - DNA, 19 bp, Mus musculus
  siRNA target sequence for Drd3 (NM_007877.1,843-861).
ccctctcttgtcacatcta

SEQ ID NO: 624131 - DNA, 19 bp, Mus musculus
  siRNA target sequence for Drd3 (NM_007877.1,892-910).
gagctgaaacgctactaca

SEQ ID NO: 624132 - DNA, 19 bp, Mus musculus
  siRNA target sequence for Drd3 (NM_007877.1,929-947).
ccttgaggcatccaaactt

SEQ ID NO: 624133 - DNA, 19 bp, Mus musculus
  siRNA target sequence for Drd3 (NM_007877.1,1020-1038).
cagcttagaggttcgaaaa

SEQ ID NO: 624134 - DNA, 19 bp, Mus musculus
  siRNA target sequence for Drd3 (NM_007877.1,1022-1040).
gcttagaggttcgaaaact

SEQ ID NO: 624135 - DNA, 19 bp, Mus musculus
  siRNA target sequence for Drd3 (NM_007877.1,1315-1333).
gccttcctcaagattctat

SEQ ID NO: 624136 - DNA, 19 bp, Mus musculus
  siRNA target sequence for Drd4 (NM_007878.2,527-545).
ggtgtgtggcctcaatgat

SEQ ID NO: 624137 - DNA, 19 bp, Mus musculus
  siRNA target sequence for Drd4 (NM_007878.2,575-593).
cctggagaaccgagactat

SEQ ID NO: 624138 - DNA, 19 bp, Mus musculus
  siRNA target sequence for Drd4 (NM_007878.2,636-654).
ctcatgctactgctttact

SEQ ID NO: 624139 - DNA, 19 bp, Mus musculus
  siRNA target sequence for Drd4 (NM_007878.2,956-974).
ggagcgcaaggcaatgaga

SEQ ID NO: 624140 - DNA, 19 bp, Mus musculus
  siRNA target sequence for Drd5 (NM_013503.1,561-579).
gaccggtactgggctattt

SEQ ID NO: 624141 - DNA, 19 bp, Mus musculus
  siRNA target sequence for Drd5 (NM_013503.1,564-582).
cggtactgggctatttcca

SEQ ID NO: 624142 - DNA, 19 bp, Mus musculus
  siRNA target sequence for Drd5 (NM_013503.1,591-609).
cgctacgagcgcaagatga

SEQ ID NO: 624143 - DNA, 19 bp, Mus musculus
  siRNA target sequence for Drd5 (NM_013503.1,829-847).
cgctcatcagcttctatat

SEQ ID NO: 624144 - DNA, 19 bp, Mus musculus
  siRNA target sequence for Drd5 (NM_013503.1,848-866).
cccggtagccatcatgata

SEQ ID NO: 624145 - DNA, 19 bp, Mus musculus
  siRNA target sequence for Drd5 (NM_013503.1,850-868).
cggtagccatcatgatagt

SEQ ID NO: 624146 - DNA, 19 bp, Mus musculus
  siRNA target sequence for Drd5 (NM_013503.1,1290-1308).
cccgtgcagacggtaaaca

SEQ ID NO: 624147 - DNA, 19 bp, Mus musculus
  siRNA target sequence for Drd5 (NM_013503.1,1291-1309).
ccgtgcagacggtaaacat

SEQ ID NO: 624148 - DNA, 19 bp, Mus musculus
  siRNA target sequence for Drd5 (NM_013503.1,1293-1311).
gtgcagacggtaaacatca

SEQ ID NO: 624149 - DNA, 19 bp, Mus musculus
  siRNA target sequence for Drd5 (NM_013503.1,1296-1314).
cagacggtaaacatcagta

SEQ ID NO: 624150 - DNA, 19 bp, Mus musculus
  siRNA target sequence for Drd5 (NM_013503.1,1298-1316).
gacggtaaacatcagtaat

SEQ ID NO: 624151 - DNA, 19 bp, Mus musculus
  siRNA target sequence for Drd5 (NM_013503.1,1307-1325).
catcagtaatgaacttatt

SEQ ID NO: 624152 - DNA, 19 bp, Mus musculus
  siRNA target sequence for Drd5 (NM_013503.1,1312-1330).
gtaatgaacttatttccta

SEQ ID NO: 624153 - DNA, 19 bp, Mus musculus
  siRNA target sequence for Drd5 (NM_013503.1,1539-1557).
gtttccttaggcaaaatct

SEQ ID NO: 624154 - DNA, 19 bp, Mus musculus
  siRNA target sequence for Drd5 (NM_013503.1,1561-1579).
cactcacccccaattgttt

SEQ ID NO: 624155 - DNA, 19 bp, Mus musculus
  siRNA target sequence for Drd5 (NM_013503.1,1567-1585).
cccccaattgtttccataa

SEQ ID NO: 624156 - DNA, 19 bp, Mus musculus
  siRNA target sequence for Drd5 (NM_013503.1,1568-1586).
ccccaattgtttccataaa

SEQ ID NO: 624157 - DNA, 19 bp, Mus musculus
  siRNA target sequence for Drd5 (NM_013503.1,1569-1587).
cccaattgtttccataaaa

SEQ ID NO: 624158 - DNA, 19 bp, Mus musculus
  siRNA target sequence for Drd5 (NM_013503.1,1571-1589).
caattgtttccataaaact

SEQ ID NO: 624159 - DNA, 19 bp, Mus musculus
  siRNA target sequence for E030029A11Rik (NM_176912.2,159-177).
cacaccaccagcgagtatt

SEQ ID NO: 624160 - DNA, 19 bp, Mus musculus
  siRNA target sequence for E030029A11Rik (NM_176912.2,161-179).
caccaccagcgagtattat

SEQ ID NO: 624161 - DNA, 19 bp, Mus musculus
  siRNA target sequence for E030029A11Rik (NM_176912.2,166-184).
ccagcgagtattatgacta

SEQ ID NO: 624162 - DNA, 19 bp, Mus musculus
  siRNA target sequence for E030029A11Rik (NM_176912.2,167-185).
cagcgagtattatgactat

SEQ ID NO: 624163 - DNA, 19 bp, Mus musculus
  siRNA target sequence for E030029A11Rik (NM_176912.2,169-187).
gcgagtattatgactatga

SEQ ID NO: 624164 - DNA, 19 bp, Mus musculus
  siRNA target sequence for E030029A11Rik (NM_176912.2,250-268).
gcttcactagtgatgtcta

SEQ ID NO: 624165 - DNA, 19 bp, Mus musculus
  siRNA target sequence for E030029A11Rik (NM_176912.2,401-419).
ggccgacttgctttgttgt

SEQ ID NO: 624166 - DNA, 19 bp, Mus musculus
  siRNA target sequence for E030029A11Rik (NM_176912.2,506-524).
caccattctgtctatgtat

SEQ ID NO: 624167 - DNA, 19 bp, Mus musculus
  siRNA target sequence for E030029A11Rik (NM_176912.2,717-735).
cttgtgtgtggcatagact

SEQ ID NO: 624168 - DNA, 19 bp, Mus musculus
  siRNA target sequence for E030029A11Rik (NM_176912.2,763-781).
ccatcaccactgttcgatt

SEQ ID NO: 624169 - DNA, 19 bp, Mus musculus
  siRNA target sequence for E030029A11Rik (NM_176912.2,879-897).
gtcgtggtggggtttttca

SEQ ID NO: 624170 - DNA, 19 bp, Mus musculus
  siRNA target sequence for E030029A11Rik (NM_176912.2,881-899).
cgtggtggggtttttcatt

SEQ ID NO: 624171 - DNA, 19 bp, Mus musculus
  siRNA target sequence for E030029A11Rik (NM_176912.2,915-933).
cacgtcctgcgggtaatca

SEQ ID NO: 624172 - DNA, 19 bp, Mus musculus
  siRNA target sequence for E030029A11Rik (NM_176912.2,917-935).
cgtcctgcgggtaatcatt

SEQ ID NO: 624173 - DNA, 19 bp, Mus musculus
  siRNA target sequence for E030029A11Rik (NM_176912.2,980-998).
ggcggagcctctgtttaat

SEQ ID NO: 624174 - DNA, 19 bp, Mus musculus
  siRNA target sequence for E030029A11Rik (NM_176912.2,1023-1041).
ctcaatcccataatgtttt

SEQ ID NO: 624175 - DNA, 19 bp, Mus musculus
  siRNA target sequence for E030029A11Rik (NM_176912.2,1126-1144).
cggtgaccaaggtatccat

SEQ ID NO: 624176 - DNA, 19 bp, Mus musculus
  siRNA target sequence for Ednrb (NM_007904.2,335-353).
gtcacttctcgggactaaa

SEQ ID NO: 624177 - DNA, 19 bp, Mus musculus
  siRNA target sequence for Ednrb (NM_007904.2,337-355).
cacttctcgggactaaaga

SEQ ID NO: 624178 - DNA, 19 bp, Mus musculus
  siRNA target sequence for Ednrb (NM_007904.2,481-499).
ctcctccgtgccaacgaaa

SEQ ID NO: 624179 - DNA, 19 bp, Mus musculus
  siRNA target sequence for Ednrb (NM_007904.2,483-501).
cctccgtgccaacgaaata

SEQ ID NO: 624180 - DNA, 19 bp, Mus musculus
  siRNA target sequence for Ednrb (NM_007904.2,484-502).
ctccgtgccaacgaaatat

SEQ ID NO: 624181 - DNA, 19 bp, Mus musculus
  siRNA target sequence for Ednrb (NM_007904.2,487-505).
cgtgccaacgaaatattga

SEQ ID NO: 624182 - DNA, 19 bp, Mus musculus
  siRNA target sequence for Ednrb (NM_007904.2,490-508).
gccaacgaaatattgagat

SEQ ID NO: 624183 - DNA, 19 bp, Mus musculus
  siRNA target sequence for Ednrb (NM_007904.2,511-529).
gcaagacttttaaatacat

SEQ ID NO: 624184 - DNA, 19 bp, Mus musculus
  siRNA target sequence for Ednrb (NM_007904.2,580-598).
ccacgctgctaagaatcat

SEQ ID NO: 624185 - DNA, 19 bp, Mus musculus
  siRNA target sequence for Ednrb (NM_007904.2,583-601).
cgctgctaagaatcatcta

SEQ ID NO: 624186 - DNA, 19 bp, Mus musculus
  siRNA target sequence for Ednrb (NM_007904.2,618-636).
cgcaatggtcccaatatct

SEQ ID NO: 624187 - DNA, 19 bp, Mus musculus
  siRNA target sequence for Ednrb (NM_007904.2,619-637).
gcaatggtcccaatatctt

SEQ ID NO: 624188 - DNA, 19 bp, Mus musculus
  siRNA target sequence for Ednrb (NM_007904.2,662-680).
cctactgcacatcatcata

SEQ ID NO: 624189 - DNA, 19 bp, Mus musculus
  siRNA target sequence for Ednrb (NM_007904.2,687-705).
cccattaacacctacaagt

SEQ ID NO: 624190 - DNA, 19 bp, Mus musculus
  siRNA target sequence for Ednrb (NM_007904.2,793-811).
gtctttgtgctctaagtat

SEQ ID NO: 624191 - DNA, 19 bp, Mus musculus
  siRNA target sequence for Ednrb (NM_007904.2,802-820).
ctctaagtattgacagata

SEQ ID NO: 624192 - DNA, 19 bp, Mus musculus
  siRNA target sequence for Ednrb (NM_007904.2,831-849).
gcttcttggagtcgaatta

SEQ ID NO: 624193 - DNA, 19 bp, Mus musculus
  siRNA target sequence for Ednrb (NM_007904.2,832-850).
cttcttggagtcgaattaa

SEQ ID NO: 624194 - DNA, 19 bp, Mus musculus
  siRNA target sequence for Ednrb (NM_007904.2,838-856).
ggagtcgaattaaaggaat

SEQ ID NO: 624195 - DNA, 19 bp, Mus musculus
  siRNA target sequence for Ednrb (NM_007904.2,872-890).
gacagcagtagaaattgtt

SEQ ID NO: 624196 - DNA, 19 bp, Mus musculus
  siRNA target sequence for Ednrb (NM_007904.2,923-941).
ccccgaagccataggtttt

SEQ ID NO: 624197 - DNA, 19 bp, Mus musculus
  siRNA target sequence for Ednrb (NM_007904.2,925-943).
ccgaagccataggttttga

SEQ ID NO: 624198 - DNA, 19 bp, Mus musculus
  siRNA target sequence for Ednrb (NM_007904.2,926-944).
cgaagccataggttttgat

SEQ ID NO: 624199 - DNA, 19 bp, Mus musculus
  siRNA target sequence for Ednrb (NM_007904.2,927-945).
gaagccataggttttgata

SEQ ID NO: 624200 - DNA, 19 bp, Mus musculus
  siRNA target sequence for Ednrb (NM_007904.2,930-948).
gccataggttttgatatga

SEQ ID NO: 624201 - DNA, 19 bp, Mus musculus
  siRNA target sequence for Ednrb (NM_007904.2,936-954).
ggttttgatatgattacgt

SEQ ID NO: 624202 - DNA, 19 bp, Mus musculus
  siRNA target sequence for Ednrb (NM_007904.2,947-965).
gattacgtcggactacaaa

SEQ ID NO: 624203 - DNA, 19 bp, Mus musculus
  siRNA target sequence for Ednrb (NM_007904.2,952-970).
cgtcggactacaaaggaaa

SEQ ID NO: 624204 - DNA, 19 bp, Mus musculus
  siRNA target sequence for Ednrb (NM_007904.2,1041-1059).
gattggtggctgttcagtt

SEQ ID NO: 624205 - DNA, 19 bp, Mus musculus
  siRNA target sequence for Ednrb (NM_007904.2,1135-1153).
gcggtatgcagattgcttt

SEQ ID NO: 624206 - DNA, 19 bp, Mus musculus
  siRNA target sequence for Ednrb (NM_007904.2,1317-1335).
gttttggactacattggta

SEQ ID NO: 624207 - DNA, 19 bp, Mus musculus
  siRNA target sequence for Ednrb (NM_007904.2,1333-1351).
gtatcaacatggcttcttt

SEQ ID NO: 624208 - DNA, 19 bp, Mus musculus
  siRNA target sequence for Ednrb (NM_007904.2,1364-1382).
caatccaatcgctctgtat

SEQ ID NO: 624209 - DNA, 19 bp, Mus musculus
  siRNA target sequence for Ednrb (NM_007904.2,1369-1387).
caatcgctctgtatttggt

SEQ ID NO: 624210 - DNA, 19 bp, Mus musculus
  siRNA target sequence for Ednrb (NM_007904.2,1385-1403).
ggtgagcaaaagattcaaa

SEQ ID NO: 624211 - DNA, 19 bp, Mus musculus
  siRNA target sequence for Ednrb (NM_007904.2,1396-1414).
gattcaaaaactgctttaa

SEQ ID NO: 624212 - DNA, 19 bp, Mus musculus
  siRNA target sequence for Ednrb (NM_007904.2,1426-1444).
gctgctggtgccaaacgtt

SEQ ID NO: 624213 - DNA, 19 bp, Mus musculus
  siRNA target sequence for Ednrb (NM_007904.2,1427-1445).
ctgctggtgccaaacgttt

SEQ ID NO: 624214 - DNA, 19 bp, Mus musculus
  siRNA target sequence for Ednrb (NM_007904.2,1435-1453).
gccaaacgtttgaggaaaa

SEQ ID NO: 624215 - DNA, 19 bp, Mus musculus
  siRNA target sequence for Ednrb (NM_007904.2,1495-1513).
ccaacgatcacggatatga

SEQ ID NO: 624216 - DNA, 19 bp, Mus musculus
  siRNA target sequence for F2r (NM_010169.2,192-210).
ctaaggaatcccagtgaaa

SEQ ID NO: 624217 - DNA, 19 bp, Mus musculus
  siRNA target sequence for F2r (NM_010169.2,278-296).
gggtagggcagtctactta

SEQ ID NO: 624218 - DNA, 19 bp, Mus musculus
  siRNA target sequence for F2r (NM_010169.2,345-363).
gacgcctccggatatctga

SEQ ID NO: 624219 - DNA, 19 bp, Mus musculus
  siRNA target sequence for F2r (NM_010169.2,398-416).
gtacacgattgtgttcatt

SEQ ID NO: 624220 - DNA, 19 bp, Mus musculus
  siRNA target sequence for F2r (NM_010169.2,532-550).
cggtgctccccttcaagat

SEQ ID NO: 624221 - DNA, 19 bp, Mus musculus
  siRNA target sequence for F2r (NM_010169.2,534-552).
gtgctccccttcaagatca

SEQ ID NO: 624222 - DNA, 19 bp, Mus musculus
  siRNA target sequence for F2r (NM_010169.2,615-633).
gcgttttacgggaacatgt

SEQ ID NO: 624223 - DNA, 19 bp, Mus musculus
  siRNA target sequence for F2r (NM_010169.2,616-634).
cgttttacgggaacatgta

SEQ ID NO: 624224 - DNA, 19 bp, Mus musculus
  siRNA target sequence for F2r (NM_010169.2,723-741).
ggccgagccaacttcactt

SEQ ID NO: 624225 - DNA, 19 bp, Mus musculus
  siRNA target sequence for F2r (NM_010169.2,808-826).
gagttccgggactcaacat

SEQ ID NO: 624226 - DNA, 19 bp, Mus musculus
  siRNA target sequence for F2r (NM_010169.2,810-828).
gttccgggactcaacatca

SEQ ID NO: 624227 - DNA, 19 bp, Mus musculus
  siRNA target sequence for F2r (NM_010169.2,867-885).
ggcttttactcgtactact

SEQ ID NO: 624228 - DNA, 19 bp, Mus musculus
  siRNA target sequence for F2r (NM_010169.2,868-886).
gcttttactcgtactactt

SEQ ID NO: 624229 - DNA, 19 bp, Mus musculus
  siRNA target sequence for F2r (NM_010169.2,912-930).
cttgtgccgttgatcgttt

SEQ ID NO: 624230 - DNA, 19 bp, Mus musculus
  siRNA target sequence for F2r (NM_010169.2,1060-1078).
ccaacgtcctcctgattgt

SEQ ID NO: 624231 - DNA, 19 bp, Mus musculus
  siRNA target sequence for F2r (NM_010169.2,1113-1131).
gaggcagcctactttgctt

SEQ ID NO: 624232 - DNA, 19 bp, Mus musculus
  siRNA target sequence for F2r (NM_010169.2,1166-1184).
ctgcatcgatccgttgatt

SEQ ID NO: 624233 - DNA, 19 bp, Mus musculus
  siRNA target sequence for F2r (NM_010169.2,1168-1186).
gcatcgatccgttgattta

SEQ ID NO: 624234 - DNA, 19 bp, Mus musculus
  siRNA target sequence for F2r (NM_010169.2,1173-1191).
gatccgttgatttactact

SEQ ID NO: 624235 - DNA, 19 bp, Mus musculus
  siRNA target sequence for F2r (NM_010169.2,1277-1295).
ccagctgatgccgagtaaa

SEQ ID NO: 624236 - DNA, 19 bp, Mus musculus
  siRNA target sequence for F2r (NM_010169.2,1278-1296).
cagctgatgccgagtaaaa

SEQ ID NO: 624237 - DNA, 19 bp, Mus musculus
  siRNA target sequence for F2r (NM_010169.2,1327-1345).
gcatatacaaaaagctatt

SEQ ID NO: 624238 - DNA, 19 bp, Mus musculus
  siRNA target sequence for F2rl1 (NM_007974.2,183-201).
gcaccgggacgcaacaaca

SEQ ID NO: 624239 - DNA, 19 bp, Mus musculus
  siRNA target sequence for F2rl1 (NM_007974.2,187-205).
cgggacgcaacaacagtaa

SEQ ID NO: 624240 - DNA, 19 bp, Mus musculus
  siRNA target sequence for F2rl1 (NM_007974.2,188-206).
gggacgcaacaacagtaaa

SEQ ID NO: 624241 - DNA, 19 bp, Mus musculus
  siRNA target sequence for F2rl1 (NM_007974.2,277-295).
gcttttccatcgatgagtt

SEQ ID NO: 624242 - DNA, 19 bp, Mus musculus
  siRNA target sequence for F2rl1 (NM_007974.2,336-354).
cttccggtcgtctacatta

SEQ ID NO: 624243 - DNA, 19 bp, Mus musculus
  siRNA target sequence for F2rl1 (NM_007974.2,405-423).
cttttccgaacgaagaaga

SEQ ID NO: 624244 - DNA, 19 bp, Mus musculus
  siRNA target sequence for F2rl1 (NM_007974.2,813-831).
ggggacatgttcaattact

SEQ ID NO: 624245 - DNA, 19 bp, Mus musculus
  siRNA target sequence for F2rl1 (NM_007974.2,883-901).
ctgcctacgtgctcatgat

SEQ ID NO: 624246 - DNA, 19 bp, Mus musculus
  siRNA target sequence for F2rl1 (NM_007974.2,885-903).
gcctacgtgctcatgatca

SEQ ID NO: 624247 - DNA, 19 bp, Mus musculus
  siRNA target sequence for F2rl1 (NM_007974.2,911-929).
ccgctcttctgctatggat

SEQ ID NO: 624248 - DNA, 19 bp, Mus musculus
  siRNA target sequence for F2rl1 (NM_007974.2,957-975).
gctatccgactcatcatca

SEQ ID NO: 624249 - DNA, 19 bp, Mus musculus
  siRNA target sequence for F2rl1 (NM_007974.2,976-994).
ccgtgctggccatgtactt

SEQ ID NO: 624250 - DNA, 19 bp, Mus musculus
  siRNA target sequence for F2rl1 (NM_007974.2,1020-1038).
ctgctcgtagtgcattatt

SEQ ID NO: 624251 - DNA, 19 bp, Mus musculus
  siRNA target sequence for F2rl1 (NM_007974.2,1118-1136).
catagacccctttgtctat

SEQ ID NO: 624252 - DNA, 19 bp, Mus musculus
  siRNA target sequence for F2rl1 (NM_007974.2,1203-1221).
gtgaatcgcatgcaaatct

SEQ ID NO: 624253 - DNA, 19 bp, Mus musculus
  siRNA target sequence for F2rl1 (NM_007974.2,1267-1285).
caagctcaaccagtgttaa

SEQ ID NO: 624254 - DNA, 19 bp, Mus musculus
  siRNA target sequence for F2rl2 (NM_010170.2,164-182).
gccaaagtggcataaatgt

SEQ ID NO: 624255 - DNA, 19 bp, Mus musculus
  siRNA target sequence for F2rl2 (NM_010170.2,236-254).
cccaaaatacctttgaaga

SEQ ID NO: 624256 - DNA, 19 bp, Mus musculus
  siRNA target sequence for F2rl2 (NM_010170.2,284-302).
caggagccaccacaactat

SEQ ID NO: 624257 - DNA, 19 bp, Mus musculus
  siRNA target sequence for F2rl2 (NM_010170.2,286-304).
ggagccaccacaactataa

SEQ ID NO: 624258 - DNA, 19 bp, Mus musculus
  siRNA target sequence for F2rl2 (NM_010170.2,287-305).
gagccaccacaactataaa

SEQ ID NO: 624259 - DNA, 19 bp, Mus musculus
  siRNA target sequence for F2rl2 (NM_010170.2,312-330).
gtgtcccgaggacagtatt

SEQ ID NO: 624260 - DNA, 19 bp, Mus musculus
  siRNA target sequence for F2rl2 (NM_010170.2,316-334).
cccgaggacagtatttcaa

SEQ ID NO: 624261 - DNA, 19 bp, Mus musculus
  siRNA target sequence for F2rl2 (NM_010170.2,318-336).
cgaggacagtatttcaact

SEQ ID NO: 624262 - DNA, 19 bp, Mus musculus
  siRNA target sequence for F2rl2 (NM_010170.2,332-350).
caactctccacgtgaataa

SEQ ID NO: 624263 - DNA, 19 bp, Mus musculus
  siRNA target sequence for F2rl2 (NM_010170.2,337-355).
ctccacgtgaataatgcta

SEQ ID NO: 624264 - DNA, 19 bp, Mus musculus
  siRNA target sequence for F2rl2 (NM_010170.2,342-360).
cgtgaataatgctaccata

SEQ ID NO: 624265 - DNA, 19 bp, Mus musculus
  siRNA target sequence for F2rl2 (NM_010170.2,377-395).
ccttaagtacccaagtgat

SEQ ID NO: 624266 - DNA, 19 bp, Mus musculus
  siRNA target sequence for F2rl2 (NM_010170.2,378-396).
cttaagtacccaagtgata

SEQ ID NO: 624267 - DNA, 19 bp, Mus musculus
  siRNA target sequence for F2rl2 (NM_010170.2,391-409).
gtgatacctgccatctaca

SEQ ID NO: 624268 - DNA, 19 bp, Mus musculus
  siRNA target sequence for F2rl2 (NM_010170.2,460-478).
ctctccttaaggaccaaat

SEQ ID NO: 624269 - DNA, 19 bp, Mus musculus
  siRNA target sequence for F2rl2 (NM_010170.2,512-530).
ccatcgcagatctcctttt

SEQ ID NO: 624270 - DNA, 19 bp, Mus musculus
  siRNA target sequence for F2rl2 (NM_010170.2,552-570).
gatcgcctaccatctcaat

SEQ ID NO: 624271 - DNA, 19 bp, Mus musculus
  siRNA target sequence for F2rl2 (NM_010170.2,562-580).
catctcaatggcaacaact

SEQ ID NO: 624272 - DNA, 19 bp, Mus musculus
  siRNA target sequence for F2rl2 (NM_010170.2,604-622).
cggatcaccacggttgttt

SEQ ID NO: 624273 - DNA, 19 bp, Mus musculus
  siRNA target sequence for F2rl2 (NM_010170.2,605-623).
ggatcaccacggttgtttt

SEQ ID NO: 624274 - DNA, 19 bp, Mus musculus
  siRNA target sequence for F2rl2 (NM_010170.2,619-637).
gttttctacggcaacatgt

SEQ ID NO: 624275 - DNA, 19 bp, Mus musculus
  siRNA target sequence for F2rl2 (NM_010170.2,689-707).
cggctcaccctttcacata

SEQ ID NO: 624276 - DNA, 19 bp, Mus musculus
  siRNA target sequence for F2rl2 (NM_010170.2,756-774).
gtgggtcatggttttctta

SEQ ID NO: 624277 - DNA, 19 bp, Mus musculus
  siRNA target sequence for F2rl2 (NM_010170.2,758-776).
gggtcatggttttcttata

SEQ ID NO: 624278 - DNA, 19 bp, Mus musculus
  siRNA target sequence for F2rl2 (NM_010170.2,872-890).
catccttccgattctacta

SEQ ID NO: 624279 - DNA, 19 bp, Mus musculus
  siRNA target sequence for F2rl2 (NM_010170.2,925-943).
ccgtttgtgatcatcatct

SEQ ID NO: 624280 - DNA, 19 bp, Mus musculus
  siRNA target sequence for F2rl2 (NM_010170.2,926-944).
cgtttgtgatcatcatctt

SEQ ID NO: 624281 - DNA, 19 bp, Mus musculus
  siRNA target sequence for F2rl2 (NM_010170.2,953-971).
cgactctcatccacaaact

SEQ ID NO: 624282 - DNA, 19 bp, Mus musculus
  siRNA target sequence for F2rl2 (NM_010170.2,1049-1067).
cccccaccaacatcatact

SEQ ID NO: 624283 - DNA, 19 bp, Mus musculus
  siRNA target sequence for F2rl2 (NM_010170.2,1116-1134).
ctttatgtatcttattgct

SEQ ID NO: 624284 - DNA, 19 bp, Mus musculus
  siRNA target sequence for F2rl2 (NM_010170.2,1141-1159).
ctggggagcctgaatagct

SEQ ID NO: 624285 - DNA, 19 bp, Mus musculus
  siRNA target sequence for F2rl2 (NM_010170.2,1179-1197).
ctttgtcatgtcgaaagtt

SEQ ID NO: 624286 - DNA, 19 bp, Mus musculus
  siRNA target sequence for F2rl2 (NM_010170.2,1198-1216).
gtagatcagcttaatcctt

SEQ ID NO: 624287 - DNA, 19 bp, Mus musculus
  siRNA target sequence for F2rl3 (NM_007975.2,392-410).
ccaccattctgctcatgaa

SEQ ID NO: 624288 - DNA, 19 bp, Mus musculus
  siRNA target sequence for F2rl3 (NM_007975.2,705-723).
gcagaccttccgattagct

SEQ ID NO: 624289 - DNA, 19 bp, Mus musculus
  siRNA target sequence for F730001G15Rik (NM_173398.1,310-328).
gatctggaaccatttacct

SEQ ID NO: 624290 - DNA, 19 bp, Mus musculus
  siRNA target sequence for F730001G15Rik (NM_173398.1,315-333).
ggaaccatttacctatttt

SEQ ID NO: 624291 - DNA, 19 bp, Mus musculus
  siRNA target sequence for F730001G15Rik (NM_173398.1,355-373).
ggaattattggaagttgtt

SEQ ID NO: 624292 - DNA, 19 bp, Mus musculus
  siRNA target sequence for F730001G15Rik (NM_173398.1,356-374).
gaattattggaagttgttt

SEQ ID NO: 624293 - DNA, 19 bp, Mus musculus
  siRNA target sequence for F730001G15Rik (NM_173398.1,377-395).
ccacgtgggcttttataca

SEQ ID NO: 624294 - DNA, 19 bp, Mus musculus
  siRNA target sequence for F730001G15Rik (NM_173398.1,416-434).
gtgtcagcatatacttaat

SEQ ID NO: 624295 - DNA, 19 bp, Mus musculus
  siRNA target sequence for F730001G15Rik (NM_173398.1,418-436).
gtcagcatatacttaatta

SEQ ID NO: 624296 - DNA, 19 bp, Mus musculus
  siRNA target sequence for F730001G15Rik (NM_173398.1,512-530).
ggaagctaaggatattcca

SEQ ID NO: 624297 - DNA, 19 bp, Mus musculus
  siRNA target sequence for F730001G15Rik (NM_173398.1,544-562).
gcctgcctcatctacatca

SEQ ID NO: 624298 - DNA, 19 bp, Mus musculus
  siRNA target sequence for F730001G15Rik (NM_173398.1,603-621).
cgatcgctgtcttcagtta

SEQ ID NO: 624299 - DNA, 19 bp, Mus musculus
  siRNA target sequence for F730001G15Rik (NM_173398.1,604-622).
gatcgctgtcttcagttaa

SEQ ID NO: 624300 - DNA, 19 bp, Mus musculus
  siRNA target sequence for F730001G15Rik (NM_173398.1,636-654).
gatataccgaatacaagaa

SEQ ID NO: 624301 - DNA, 19 bp, Mus musculus
  siRNA target sequence for F730001G15Rik (NM_173398.1,802-820).
catttgctaacaaacttca

SEQ ID NO: 624302 - DNA, 19 bp, Mus musculus
  siRNA target sequence for F730001G15Rik (NM_173398.1,867-885).
caacttccttgcaatcaga

SEQ ID NO: 624303 - DNA, 19 bp, Mus musculus
  siRNA target sequence for F730001G15Rik (NM_173398.1,877-895).
gcaatcagacaactctata

SEQ ID NO: 624304 - DNA, 19 bp, Mus musculus
  siRNA target sequence for F730001G15Rik (NM_173398.1,882-900).
cagacaactctatagaaat

SEQ ID NO: 624305 - DNA, 19 bp, Mus musculus
  siRNA target sequence for F730001G15Rik (NM_173398.1,904-922).
gacaacacaaactatccaa

SEQ ID NO: 624306 - DNA, 19 bp, Mus musculus
  siRNA target sequence for F730001G15Rik (NM_173398.1,955-973).
gtgacagctagttacatca

SEQ ID NO: 624307 - DNA, 19 bp, Mus musculus
  siRNA target sequence for F730001G15Rik (NM_173398.1,957-975).
gacagctagttacatcata

SEQ ID NO: 624308 - DNA, 19 bp, Mus musculus
  siRNA target sequence for F730001G15Rik (NM_173398.1,961-979).
gctagttacatcatatgct

SEQ ID NO: 624309 - DNA, 19 bp, Mus musculus
  siRNA target sequence for F730001G15Rik (NM_173398.1,1023-1041).
gacagaggtcatatctgat

SEQ ID NO: 624310 - DNA, 19 bp, Mus musculus
  siRNA target sequence for F730001G15Rik (NM_173398.1,1049-1067).
ctaggatcgcactcttcaa

SEQ ID NO: 624311 - DNA, 19 bp, Mus musculus
  siRNA target sequence for F730001G15Rik (NM_173398.1,1092-1110).
ggcggtgtctaatttgtgt

SEQ ID NO: 624312 - DNA, 19 bp, Mus musculus
  siRNA target sequence for F730001G15Rik (NM_173398.1,1093-1111).
gcggtgtctaatttgtgtt

SEQ ID NO: 624313 - DNA, 19 bp, Mus musculus
  siRNA target sequence for F730001G15Rik (NM_173398.1,1094-1112).
cggtgtctaatttgtgttt

SEQ ID NO: 624314 - DNA, 19 bp, Mus musculus
  siRNA target sequence for F730001G15Rik (NM_173398.1,1118-1136).
caatcctgtactatcatct

SEQ ID NO: 624315 - DNA, 19 bp, Mus musculus
  siRNA target sequence for F730001G15Rik (NM_173398.1,1139-1157).
caaaagcctttcgactaaa

SEQ ID NO: 624316 - DNA, 19 bp, Mus musculus
  siRNA target sequence for F730001G15Rik (NM_173398.1,1167-1185).
gactttcgcctcacctaaa

SEQ ID NO: 624317 - DNA, 19 bp, Mus musculus
  siRNA target sequence for F730001G15Rik (NM_173398.1,1169-1187).
ctttcgcctcacctaaaaa

SEQ ID NO: 624318 - DNA, 19 bp, Mus musculus
  siRNA target sequence for F730001G15Rik (NM_173398.1,1208-1226).
gattgagaagtgagaatga

SEQ ID NO: 624319 - DNA, 19 bp, Mus musculus
  siRNA target sequence for F730108M23Rik (NM_177366.2,570-588).
cggctgcctcgtacttcta

SEQ ID NO: 624320 - DNA, 19 bp, Mus musculus
  siRNA target sequence for F730108M23Rik (NM_177366.2,635-653).
cagggcgctctctctactt

SEQ ID NO: 624321 - DNA, 19 bp, Mus musculus
  siRNA target sequence for F730108M23Rik (NM_177366.2,800-818).
gtggcagccgtctctctaa

SEQ ID NO: 624322 - DNA, 19 bp, Mus musculus
  siRNA target sequence for F730108M23Rik (NM_177366.2,803-821).
gcagccgtctctctaaaga

SEQ ID NO: 624323 - DNA, 19 bp, Mus musculus
  siRNA target sequence for F730108M23Rik (NM_177366.2,804-822).
cagccgtctctctaaagaa

SEQ ID NO: 624324 - DNA, 19 bp, Mus musculus
  siRNA target sequence for F730108M23Rik (NM_177366.2,965-983).
gtcagaaagcacatcaaca

SEQ ID NO: 624325 - DNA, 19 bp, Mus musculus
  siRNA target sequence for F730108M23Rik (NM_177366.2,1076-1094).
gtcctcattccgctcatat

SEQ ID NO: 624326 - DNA, 19 bp, Mus musculus
  siRNA target sequence for F730108M23Rik (NM_177366.2,1079-1097).
ctcattccgctcatattca

SEQ ID NO: 624327 - DNA, 19 bp, Mus musculus
  siRNA target sequence for F730108M23Rik (NM_177366.2,1250-1268).
gtccgcacaaggctctttt

SEQ ID NO: 624328 - DNA, 19 bp, Mus musculus
  siRNA target sequence for F730108M23Rik (NM_177366.2,1252-1270).
ccgcacaaggctcttttct

SEQ ID NO: 624329 - DNA, 19 bp, Mus musculus
  siRNA target sequence for F830045P16 (NM_177653.2,350-368).
ggttgaggaacaacaatga

SEQ ID NO: 624330 - DNA, 19 bp, Mus musculus
  siRNA target sequence for F830045P16 (NM_177653.2,351-369).
gttgaggaacaacaatgaa

SEQ ID NO: 624331 - DNA, 19 bp, Mus musculus
  siRNA target sequence for F830045P16 (NM_177653.2,386-404).
cacacgtggtacatgtcaa

SEQ ID NO: 624332 - DNA, 19 bp, Mus musculus
  siRNA target sequence for F830045P16 (NM_177653.2,400-418).
gtcaacaatgactcttact

SEQ ID NO: 624333 - DNA, 19 bp, Mus musculus
  siRNA target sequence for F830045P16 (NM_177653.2,443-461).
ccctgaccaagcaagatat

SEQ ID NO: 624334 - DNA, 19 bp, Mus musculus
  siRNA target sequence for F830045P16 (NM_177653.2,533-551).
ctcaagttctccgagttat

SEQ ID NO: 624335 - DNA, 19 bp, Mus musculus
  siRNA target sequence for F830045P16 (NM_177653.2,581-599).
cagagatccaagatcatgt

SEQ ID NO: 624336 - DNA, 19 bp, Mus musculus
  siRNA target sequence for F830045P16 (NM_177653.2,595-613).
catgtgcatcaaaaagtga

SEQ ID NO: 624337 - DNA, 19 bp, Mus musculus
  siRNA target sequence for F830045P16 (NM_177653.2,623-641).
gccatgtaaaccacttcta

SEQ ID NO: 624338 - DNA, 19 bp, Mus musculus
  siRNA target sequence for F830045P16 (NM_177653.2,624-642).
ccatgtaaaccacttctat

SEQ ID NO: 624339 - DNA, 19 bp, Mus musculus
  siRNA target sequence for F830045P16 (NM_177653.2,657-675).
cctcatctggactaagaat

SEQ ID NO: 624340 - DNA, 19 bp, Mus musculus
  siRNA target sequence for F830045P16 (NM_177653.2,720-738).
ctctgatgggacttactct

SEQ ID NO: 624341 - DNA, 19 bp, Mus musculus
  siRNA target sequence for F830045P16 (NM_177653.2,737-755).
ctctacagcacacattaca

SEQ ID NO: 624342 - DNA, 19 bp, Mus musculus
  siRNA target sequence for F830045P16 (NM_177653.2,757-775).
gtagatgccatattgaata

SEQ ID NO: 624343 - DNA, 19 bp, Mus musculus
  siRNA target sequence for F830045P16 (NM_177653.2,841-859).
ggagctcccaggaagatca

SEQ ID NO: 624344 - DNA, 19 bp, Mus musculus
  siRNA target sequence for F830045P16 (NM_177653.2,916-934).
ggagcaagcatccaattga

SEQ ID NO: 624345 - DNA, 19 bp, Mus musculus
  siRNA target sequence for F830045P16 (NM_177653.2,917-935).
gagcaagcatccaattgaa

SEQ ID NO: 624346 - DNA, 19 bp, Mus musculus
  siRNA target sequence for F830045P16 (NM_177653.2,919-937).
gcaagcatccaattgaagt

SEQ ID NO: 624347 - DNA, 19 bp, Mus musculus
  siRNA target sequence for F830045P16 (NM_177653.2,939-957).
cacatcctctgcattacaa

SEQ ID NO: 624348 - DNA, 19 bp, Mus musculus
  siRNA target sequence for F830045P16 (NM_177653.2,1033-1051).
ggagagacctacaatgtta

SEQ ID NO: 624349 - DNA, 19 bp, Mus musculus
  siRNA target sequence for F830045P16 (NM_177653.2,1036-1054).
gagacctacaatgttacta

SEQ ID NO: 624350 - DNA, 19 bp, Mus musculus
  siRNA target sequence for F830045P16 (NM_177653.2,1074-1092).
ggagagtgatgacatatta

SEQ ID NO: 624351 - DNA, 19 bp, Mus musculus
  siRNA target sequence for F830045P16 (NM_177653.2,1075-1093).
gagagtgatgacatattat

SEQ ID NO: 624352 - DNA, 19 bp, Mus musculus
  siRNA target sequence for F830045P16 (NM_177653.2,1110-1128).
ggttgagcacaagtcatta

SEQ ID NO: 624353 - DNA, 19 bp, Mus musculus
  siRNA target sequence for F830045P16 (NM_177653.2,1183-1201).
gtgagagtgtcccaatctt

SEQ ID NO: 624354 - DNA, 19 bp, Mus musculus
  siRNA target sequence for F830045P16 (NM_177653.2,1185-1203).
gagagtgtcccaatcttca

SEQ ID NO: 624355 - DNA, 19 bp, Mus musculus
  siRNA target sequence for F830045P16 (NM_177653.2,1233-1251).
ccatgtgcagagattctat

SEQ ID NO: 624356 - DNA, 19 bp, Mus musculus
  siRNA target sequence for F830045P16 (NM_177653.2,1248-1266).
ctatccccaggaggtatat

SEQ ID NO: 624357 - DNA, 19 bp, Mus musculus
  siRNA target sequence for F830045P16 (NM_177653.2,1252-1270).
ccccaggaggtatatctct

SEQ ID NO: 624358 - DNA, 19 bp, Mus musculus
  siRNA target sequence for F830045P16 (NM_177653.2,1287-1305).
ccatgtgatcaggagaata

SEQ ID NO: 624359 - DNA, 19 bp, Mus musculus
  siRNA target sequence for F830045P16 (NM_177653.2,1438-1456).
caggccagcattgtattgt

SEQ ID NO: 624360 - DNA, 19 bp, Mus musculus
  siRNA target sequence for F830045P16 (NM_177653.2,1483-1501).
gccatcaggagcctaagtt

SEQ ID NO: 624361 - DNA, 19 bp, Mus musculus
  siRNA target sequence for F830045P16 (NM_177653.2,1485-1503).
catcaggagcctaagttca

SEQ ID NO: 624362 - DNA, 19 bp, Mus musculus
  siRNA target sequence for F830045P16 (NM_177653.2,1506-1524).
gaaatctatccacgttttt

SEQ ID NO: 624363 - DNA, 19 bp, Mus musculus
  siRNA target sequence for Fpr1 (NM_013521.1,35-53).
ctgcagtgaacctcatgaa

SEQ ID NO: 624364 - DNA, 19 bp, Mus musculus
  siRNA target sequence for Fpr1 (NM_013521.1,42-60).
gaacctcatgaatgtatct

SEQ ID NO: 624365 - DNA, 19 bp, Mus musculus
  siRNA target sequence for Fpr1 (NM_013521.1,55-73).
gtatctgggagtactcaat

SEQ ID NO: 624366 - DNA, 19 bp, Mus musculus
  siRNA target sequence for Fpr1 (NM_013521.1,59-77).
ctgggagtactcaatcagt

SEQ ID NO: 624367 - DNA, 19 bp, Mus musculus
  siRNA target sequence for Fpr1 (NM_013521.1,61-79).
gggagtactcaatcagtat

SEQ ID NO: 624368 - DNA, 19 bp, Mus musculus
  siRNA target sequence for Fpr1 (NM_013521.1,63-81).
gagtactcaatcagtatct

SEQ ID NO: 624369 - DNA, 19 bp, Mus musculus
  siRNA target sequence for Fpr1 (NM_013521.1,103-121).
gtcttctcatatttgatct

SEQ ID NO: 624370 - DNA, 19 bp, Mus musculus
  siRNA target sequence for Fpr1 (NM_013521.1,174-192).
ggctggtttccgcatgaaa

SEQ ID NO: 624371 - DNA, 19 bp, Mus musculus
  siRNA target sequence for Fpr1 (NM_013521.1,176-194).
ctggtttccgcatgaaaca

SEQ ID NO: 624372 - DNA, 19 bp, Mus musculus
  siRNA target sequence for Fpr1 (NM_013521.1,178-196).
ggtttccgcatgaaacaca

SEQ ID NO: 624373 - DNA, 19 bp, Mus musculus
  siRNA target sequence for Fpr1 (NM_013521.1,206-224).
ccatctcttacttgaactt

SEQ ID NO: 624374 - DNA, 19 bp, Mus musculus
  siRNA target sequence for Fpr1 (NM_013521.1,289-307).
ggacattggccatttggtt

SEQ ID NO: 624375 - DNA, 19 bp, Mus musculus
  siRNA target sequence for Fpr1 (NM_013521.1,317-335).
gcaaattcatatatactgt

SEQ ID NO: 624376 - DNA, 19 bp, Mus musculus
  siRNA target sequence for Fpr1 (NM_013521.1,332-350).
ctgtaatagacataaacct

SEQ ID NO: 624377 - DNA, 19 bp, Mus musculus
  siRNA target sequence for Fpr1 (NM_013521.1,334-352).
gtaatagacataaacctat

SEQ ID NO: 624378 - DNA, 19 bp, Mus musculus
  siRNA target sequence for Fpr1 (NM_013521.1,443-461).
gcctagccaagaaggtaat

SEQ ID NO: 624379 - DNA, 19 bp, Mus musculus
  siRNA target sequence for Fpr1 (NM_013521.1,445-463).
ctagccaagaaggtaatca

SEQ ID NO: 624380 - DNA, 19 bp, Mus musculus
  siRNA target sequence for Fpr1 (NM_013521.1,462-480).
catcgtaccctggatttgt

SEQ ID NO: 624381 - DNA, 19 bp, Mus musculus
  siRNA target sequence for Fpr1 (NM_013521.1,519-537).
cacagtccctaatagtaga

SEQ ID NO: 624382 - DNA, 19 bp, Mus musculus
  siRNA target sequence for Fpr1 (NM_013521.1,686-704).
ccatttgctatgggttaat

SEQ ID NO: 624383 - DNA, 19 bp, Mus musculus
  siRNA target sequence for Fpr1 (NM_013521.1,687-705).
catttgctatgggttaata

SEQ ID NO: 624384 - DNA, 19 bp, Mus musculus
  siRNA target sequence for Fpr1 (NM_013521.1,698-716).
ggttaataaccactaaaat

SEQ ID NO: 624385 - DNA, 19 bp, Mus musculus
  siRNA target sequence for Fpr1 (NM_013521.1,724-742).
cagggcctgatcaaatcca

SEQ ID NO: 624386 - DNA, 19 bp, Mus musculus
  siRNA target sequence for Fpr1 (NM_013521.1,792-810).
ctggtgcccatttcaagta

SEQ ID NO: 624387 - DNA, 19 bp, Mus musculus
  siRNA target sequence for Fpr1 (NM_013521.1,805-823).
caagtagtggccctcatat

SEQ ID NO: 624388 - DNA, 19 bp, Mus musculus
  siRNA target sequence for Fpr1 (NM_013521.1,835-853).
gtccgtgaacggttgaaga

SEQ ID NO: 624389 - DNA, 19 bp, Mus musculus
  siRNA target sequence for Fpr1 (NM_013521.1,871-889).
gtaactgctttgaaaatca

SEQ ID NO: 624390 - DNA, 19 bp, Mus musculus
  siRNA target sequence for Fprl1 (NM_008042.1,731-749).
cactacaaagattcacaaa

SEQ ID NO: 624391 - DNA, 19 bp, Mus musculus
  siRNA target sequence for Fprl1 (NM_008042.1,733-751).
ctacaaagattcacaaaaa

SEQ ID NO: 624392 - DNA, 19 bp, Mus musculus
  siRNA target sequence for Fprl1 (NM_008042.1,1047-1065).
ggtcatatcagtgatacaa

SEQ ID NO: 624393 - DNA, 19 bp, Mus musculus
  siRNA target sequence for Fshr (NM_013523.2,102-120).
ctcgggatctggatgtcat

SEQ ID NO: 624394 - DNA, 19 bp, Mus musculus
  siRNA target sequence for Fshr (NM_013523.2,148-166).
gtcttcctctgccaagata

SEQ ID NO: 624395 - DNA, 19 bp, Mus musculus
  siRNA target sequence for Fshr (NM_013523.2,228-246).
caccaagcttcgagtcatt

SEQ ID NO: 624396 - DNA, 19 bp, Mus musculus
  siRNA target sequence for Fshr (NM_013523.2,234-252).
gcttcgagtcattccaaaa

SEQ ID NO: 624397 - DNA, 19 bp, Mus musculus
  siRNA target sequence for Fshr (NM_013523.2,272-290).
gggacctggagaaaataga

SEQ ID NO: 624398 - DNA, 19 bp, Mus musculus
  siRNA target sequence for Fshr (NM_013523.2,365-383).
ggattgaaaaggctaacaa

SEQ ID NO: 624399 - DNA, 19 bp, Mus musculus
  siRNA target sequence for Fshr (NM_013523.2,366-384).
gattgaaaaggctaacaat

SEQ ID NO: 624400 - DNA, 19 bp, Mus musculus
  siRNA target sequence for Fshr (NM_013523.2,377-395).
ctaacaatctgctgtacat

SEQ ID NO: 624401 - DNA, 19 bp, Mus musculus
  siRNA target sequence for Fshr (NM_013523.2,421-439).
cccagtctccgatatctgt

SEQ ID NO: 624402 - DNA, 19 bp, Mus musculus
  siRNA target sequence for Fshr (NM_013523.2,425-443).
gtctccgatatctgttaat

SEQ ID NO: 624403 - DNA, 19 bp, Mus musculus
  siRNA target sequence for Fshr (NM_013523.2,427-445).
ctccgatatctgttaatat

SEQ ID NO: 624404 - DNA, 19 bp, Mus musculus
  siRNA target sequence for Fshr (NM_013523.2,430-448).
cgatatctgttaatatcca

SEQ ID NO: 624405 - DNA, 19 bp, Mus musculus
  siRNA target sequence for Fshr (NM_013523.2,431-449).
gatatctgttaatatccaa

SEQ ID NO: 624406 - DNA, 19 bp, Mus musculus
  siRNA target sequence for Fshr (NM_013523.2,446-464).
ccaacacaggcattaaaca

SEQ ID NO: 624407 - DNA, 19 bp, Mus musculus
  siRNA target sequence for Fshr (NM_013523.2,501-519).
ggttttattagacattcaa

SEQ ID NO: 624408 - DNA, 19 bp, Mus musculus
  siRNA target sequence for Fshr (NM_013523.2,594-612).
gaataagaatgggattcaa

SEQ ID NO: 624409 - DNA, 19 bp, Mus musculus
  siRNA target sequence for Fshr (NM_013523.2,605-623).
ggattcaagaaatacacaa

SEQ ID NO: 624410 - DNA, 19 bp, Mus musculus
  siRNA target sequence for Fshr (NM_013523.2,636-654).
cggaacccagctagatgaa

SEQ ID NO: 624411 - DNA, 19 bp, Mus musculus
  siRNA target sequence for Fshr (NM_013523.2,638-656).
gaacccagctagatgaact

SEQ ID NO: 624412 - DNA, 19 bp, Mus musculus
  siRNA target sequence for Fshr (NM_013523.2,645-663).
gctagatgaactgaatcta

SEQ ID NO: 624413 - DNA, 19 bp, Mus musculus
  siRNA target sequence for Fshr (NM_013523.2,646-664).
ctagatgaactgaatctaa

SEQ ID NO: 624414 - DNA, 19 bp, Mus musculus
  siRNA target sequence for Fshr (NM_013523.2,655-673).
ctgaatctaagcgataaca

SEQ ID NO: 624415 - DNA, 19 bp, Mus musculus
  siRNA target sequence for Fshr (NM_013523.2,665-683).
gcgataacaataatttgga

SEQ ID NO: 624416 - DNA, 19 bp, Mus musculus
  siRNA target sequence for Fshr (NM_013523.2,719-737).
ggccagtcgttttagacat

SEQ ID NO: 624417 - DNA, 19 bp, Mus musculus
  siRNA target sequence for Fshr (NM_013523.2,724-742).
gtcgttttagacatctcaa

SEQ ID NO: 624418 - DNA, 19 bp, Mus musculus
  siRNA target sequence for Fshr (NM_013523.2,762-780).
gcccaaccatggcttagaa

SEQ ID NO: 624419 - DNA, 19 bp, Mus musculus
  siRNA target sequence for Fshr (NM_013523.2,804-822).
gtcaacataccgcttgaaa

SEQ ID NO: 624420 - DNA, 19 bp, Mus musculus
  siRNA target sequence for Fshr (NM_013523.2,806-824).
caacataccgcttgaaaaa

SEQ ID NO: 624421 - DNA, 19 bp, Mus musculus
  siRNA target sequence for Fshr (NM_013523.2,819-837).
gaaaaagctccctagtcta

SEQ ID NO: 624422 - DNA, 19 bp, Mus musculus
  siRNA target sequence for Fshr (NM_013523.2,830-848).
ctagtctagacaagtttgt

SEQ ID NO: 624423 - DNA, 19 bp, Mus musculus
  siRNA target sequence for Fshr (NM_013523.2,833-851).
gtctagacaagtttgtcat

SEQ ID NO: 624424 - DNA, 19 bp, Mus musculus
  siRNA target sequence for Fshr (NM_013523.2,909-927).
gcggcaaacctctgaactt

SEQ ID NO: 624425 - DNA, 19 bp, Mus musculus
  siRNA target sequence for Fshr (NM_013523.2,912-930).
gcaaacctctgaacttcat

SEQ ID NO: 624426 - DNA, 19 bp, Mus musculus
  siRNA target sequence for Fshr (NM_013523.2,931-949).
ccaatttgcaacaagtcta

SEQ ID NO: 624427 - DNA, 19 bp, Mus musculus
  siRNA target sequence for Fshr (NM_013523.2,932-950).
caatttgcaacaagtctat

SEQ ID NO: 624428 - DNA, 19 bp, Mus musculus
  siRNA target sequence for Fshr (NM_013523.2,1012-1030).
gatgaacccagttatggaa

SEQ ID NO: 624429 - DNA, 19 bp, Mus musculus
  siRNA target sequence for Fshr (NM_013523.2,1033-1051).
ggatctgacatgttgtata

SEQ ID NO: 624430 - DNA, 19 bp, Mus musculus
  siRNA target sequence for Fshr (NM_013523.2,1037-1055).
ctgacatgttgtatagtga

SEQ ID NO: 624431 - DNA, 19 bp, Mus musculus
  siRNA target sequence for Fshr (NM_013523.2,1039-1057).
gacatgttgtatagtgaat

SEQ ID NO: 624432 - DNA, 19 bp, Mus musculus
  siRNA target sequence for Fshr (NM_013523.2,1100-1118).
cgccaaagccagatgcatt

SEQ ID NO: 624433 - DNA, 19 bp, Mus musculus
  siRNA target sequence for Fshr (NM_013523.2,1101-1119).
gccaaagccagatgcattt

SEQ ID NO: 624434 - DNA, 19 bp, Mus musculus
  siRNA target sequence for Fshr (NM_013523.2,1108-1126).
ccagatgcatttaatccat

SEQ ID NO: 624435 - DNA, 19 bp, Mus musculus
  siRNA target sequence for Fshr (NM_013523.2,1132-1150).
gacatcatggggtacaaca

SEQ ID NO: 624436 - DNA, 19 bp, Mus musculus
  siRNA target sequence for Fshr (NM_013523.2,1153-1171).
ctcagagtcttgatatggt

SEQ ID NO: 624437 - DNA, 19 bp, Mus musculus
  siRNA target sequence for Fshr (NM_013523.2,1157-1175).
gagtcttgatatggtttat

SEQ ID NO: 624438 - DNA, 19 bp, Mus musculus
  siRNA target sequence for Fshr (NM_013523.2,1159-1177).
gtcttgatatggtttatca

SEQ ID NO: 624439 - DNA, 19 bp, Mus musculus
  siRNA target sequence for Fshr (NM_013523.2,1285-1303).
ctttgcattgggatctact

SEQ ID NO: 624440 - DNA, 19 bp, Mus musculus
  siRNA target sequence for Fshr (NM_013523.2,1295-1313).
ggatctacttgctacttat

SEQ ID NO: 624441 - DNA, 19 bp, Mus musculus
  siRNA target sequence for Fshr (NM_013523.2,1296-1314).
gatctacttgctacttata

SEQ ID NO: 624442 - DNA, 19 bp, Mus musculus
  siRNA target sequence for Fshr (NM_013523.2,1309-1327).
cttatagcctcagttgata

SEQ ID NO: 624443 - DNA, 19 bp, Mus musculus
  siRNA target sequence for Fshr (NM_013523.2,1315-1333).
gcctcagttgatatccata

SEQ ID NO: 624444 - DNA, 19 bp, Mus musculus
  siRNA target sequence for Fshr (NM_013523.2,1319-1337).
cagttgatatccatactaa

SEQ ID NO: 624445 - DNA, 19 bp, Mus musculus
  siRNA target sequence for Fshr (NM_013523.2,1321-1339).
gttgatatccatactaaga

SEQ ID NO: 624446 - DNA, 19 bp, Mus musculus
  siRNA target sequence for Fshr (NM_013523.2,1385-1403).
gcgatgccgctggcttttt

SEQ ID NO: 624447 - DNA, 19 bp, Mus musculus
  siRNA target sequence for Fshr (NM_013523.2,1444-1462).
gccataaccctagaaagat

SEQ ID NO: 624448 - DNA, 19 bp, Mus musculus
  siRNA target sequence for Fshr (NM_013523.2,1481-1499).
ccatgcaactggaatgcaa

SEQ ID NO: 624449 - DNA, 19 bp, Mus musculus
  siRNA target sequence for Fshr (NM_013523.2,1581-1599).
catcagtagctacatgaaa

SEQ ID NO: 624450 - DNA, 19 bp, Mus musculus
  siRNA target sequence for Fshr (NM_013523.2,1720-1738).
ctcacagtgaggaatccta

SEQ ID NO: 624451 - DNA, 19 bp, Mus musculus
  siRNA target sequence for Fshr (NM_013523.2,1724-1742).
cagtgaggaatcctaacat

SEQ ID NO: 624452 - DNA, 19 bp, Mus musculus
  siRNA target sequence for Fshr (NM_013523.2,1752-1770).
gtcaagagacaccaagatt

SEQ ID NO: 624453 - DNA, 19 bp, Mus musculus
  siRNA target sequence for Fshr (NM_013523.2,1807-1825).
ctctgcatggccccaattt

SEQ ID NO: 624454 - DNA, 19 bp, Mus musculus
  siRNA target sequence for Fshr (NM_013523.2,1809-1827).
ctgcatggccccaatttta

SEQ ID NO: 624455 - DNA, 19 bp, Mus musculus
  siRNA target sequence for Fshr (NM_013523.2,1811-1829).
gcatggccccaattttatt

SEQ ID NO: 624456 - DNA, 19 bp, Mus musculus
  siRNA target sequence for Fshr (NM_013523.2,1897-1915).
ctgttctaccccatcaatt

SEQ ID NO: 624457 - DNA, 19 bp, Mus musculus
  siRNA target sequence for Fshr (NM_013523.2,1983-2001).
gagcaagtttggctgttat

SEQ ID NO: 624458 - DNA, 19 bp, Mus musculus
  siRNA target sequence for Fshr (NM_013523.2,2005-2023).
gtgcaagcccagatttaca

SEQ ID NO: 624459 - DNA, 19 bp, Mus musculus
  siRNA target sequence for Fshr (NM_013523.2,2036-2054).
catctattacccacaactt

SEQ ID NO: 624460 - DNA, 19 bp, Mus musculus
  siRNA target sequence for Fshr (NM_013523.2,2109-2127).
gcttgtccctctaaatcat

SEQ ID NO: 624461 - DNA, 19 bp, Mus musculus
  siRNA target sequence for Galr1 (NM_008082.1,758-776).
gtagtgtttggcctgattt

SEQ ID NO: 624462 - DNA, 19 bp, Mus musculus
  siRNA target sequence for Galr1 (NM_008082.1,958-976).
cgccttcatctgcaagttt

SEQ ID NO: 624463 - DNA, 19 bp, Mus musculus
  siRNA target sequence for Galr1 (NM_008082.1,969-987).
gcaagtttatacactactt

SEQ ID NO: 624464 - DNA, 19 bp, Mus musculus
  siRNA target sequence for Galr1 (NM_008082.1,1158-1176).
cctaccaccagcgtctttt

SEQ ID NO: 624465 - DNA, 19 bp, Mus musculus
  siRNA target sequence for Galr1 (NM_008082.1,1313-1331).
cttaatcatctgcataaaa

SEQ ID NO: 624466 - DNA, 19 bp, Mus musculus
  siRNA target sequence for Galr1 (NM_008082.1,1403-1421).
gtagtatttggcatatcct

SEQ ID NO: 624467 - DNA, 19 bp, Mus musculus
  siRNA target sequence for Galr1 (NM_008082.1,1581-1599).
cgtacaagcaagtgttcaa

SEQ ID NO: 624468 - DNA, 19 bp, Mus musculus
  siRNA target sequence for Galr1 (NM_008082.1,1592-1610).
gtgttcaagtgtcatgttt

SEQ ID NO: 624469 - DNA, 19 bp, Mus musculus
  siRNA target sequence for Galr1 (NM_008082.1,1620-1638).
ctccacgcagtgaaactaa

SEQ ID NO: 624470 - DNA, 19 bp, Mus musculus
  siRNA target sequence for Galr2 (NM_010254.2,620-638).
ggtcctcgtacccctattt

SEQ ID NO: 624471 - DNA, 19 bp, Mus musculus
  siRNA target sequence for Galr2 (NM_010254.2,621-639).
gtcctcgtacccctatttt

SEQ ID NO: 624472 - DNA, 19 bp, Mus musculus
  siRNA target sequence for Galr2 (NM_010254.2,714-732).
gtcagcaccacgaacctat

SEQ ID NO: 624473 - DNA, 19 bp, Mus musculus
  siRNA target sequence for Galr2 (NM_010254.2,718-736).
gcaccacgaacctattcat

SEQ ID NO: 624474 - DNA, 19 bp, Mus musculus
  siRNA target sequence for Galr2 (NM_010254.2,748-766).
gtgtggccgacctgtgttt

SEQ ID NO: 624475 - DNA, 19 bp, Mus musculus
  siRNA target sequence for Galr2 (NM_010254.2,838-856).
gcaaggccgttcatttcct

SEQ ID NO: 624476 - DNA, 19 bp, Mus musculus
  siRNA target sequence for Galr2 (NM_010254.2,1114-1132).
gcacttttgtctttagcta

SEQ ID NO: 624477 - DNA, 19 bp, Mus musculus
  siRNA target sequence for Galr2 (NM_010254.2,1360-1378).
ccctgcgcatcctttcaca

SEQ ID NO: 624478 - DNA, 19 bp, Mus musculus
  siRNA target sequence for Galr2 (NM_010254.2,1361-1379).
cctgcgcatcctttcacat

SEQ ID NO: 624479 - DNA, 19 bp, Mus musculus
  siRNA target sequence for Galr2 (NM_010254.2,1364-1382).
gcgcatcctttcacatcta

SEQ ID NO: 624480 - DNA, 19 bp, Mus musculus
  siRNA target sequence for Galr2 (NM_010254.2,1366-1384).
gcatcctttcacatctagt

SEQ ID NO: 624481 - DNA, 19 bp, Mus musculus
  siRNA target sequence for Galr2 (NM_010254.2,1367-1385).
catcctttcacatctagta

SEQ ID NO: 624482 - DNA, 19 bp, Mus musculus
  siRNA target sequence for Galr2 (NM_010254.2,1406-1424).
caaccccatcgtttatgct

SEQ ID NO: 624483 - DNA, 19 bp, Mus musculus
  siRNA target sequence for GA_x5J8B7W4T2P-84764-83847 (NM_146262.1,44-62).
ggattgaagtcttactctt

SEQ ID NO: 624484 - DNA, 19 bp, Mus musculus
  siRNA target sequence for GA_x5J8B7W4T2P-84764-83847 (NM_146262.1,58-76).
ctcttcatggtgttttcaa

SEQ ID NO: 624485 - DNA, 19 bp, Mus musculus
  siRNA target sequence for GA_x5J8B7W4T2P-84764-83847 (NM_146262.1,439-457).
gtacatgctcttagtcatt

SEQ ID NO: 624486 - DNA, 19 bp, Mus musculus
  siRNA target sequence for GA_x5J8B7W4T2P-84764-83847 (NM_146262.1,555-573).
ccgtgacttggatgttcta

SEQ ID NO: 624487 - DNA, 19 bp, Mus musculus
  siRNA target sequence for GA_x5J8B7W4T2P-84764-83847 (NM_146262.1,556-574).
cgtgacttggatgttctaa

SEQ ID NO: 624488 - DNA, 19 bp, Mus musculus
  siRNA target sequence for GA_x5J8B7W4T2P-84764-83847 (NM_146262.1,557-575).
gtgacttggatgttctaat

SEQ ID NO: 624489 - DNA, 19 bp, Mus musculus
  siRNA target sequence for Ghsr (NM_177330.2,892-910).
gggtgtcgagcgtcttctt

SEQ ID NO: 624490 - DNA, 19 bp, Mus musculus
  siRNA target sequence for Ghsr (NM_177330.2,894-912).
gtgtcgagcgtcttcttct

SEQ ID NO: 624491 - DNA, 19 bp, Mus musculus
  siRNA target sequence for Ghsr (NM_177330.2,1083-1101).
cacgtgggaagatatctgt

SEQ ID NO: 624492 - DNA, 19 bp, Mus musculus
  siRNA target sequence for Ghsr (NM_177330.2,1085-1103).
cgtgggaagatatctgttt

SEQ ID NO: 624493 - DNA, 19 bp, Mus musculus
  siRNA target sequence for Ghsr (NM_177330.2,1194-1212).
gccatcaaccccattctct

SEQ ID NO: 624494 - DNA, 19 bp, Mus musculus
  siRNA target sequence for Ghsr (NM_177330.2,1235-1253).
ccgggtggccgtgttcaaa

SEQ ID NO: 624495 - DNA, 19 bp, Mus musculus
  siRNA target sequence for Ghsr (NM_177330.2,1237-1255).
gggtggccgtgttcaaact

SEQ ID NO: 624496 - DNA, 19 bp, Mus musculus
  siRNA target sequence for Ghsr (NM_177330.2,1238-1256).
ggtggccgtgttcaaactt

SEQ ID NO: 624497 - DNA, 19 bp, Mus musculus
  siRNA target sequence for Ghsr (NM_177330.2,1241-1259).
ggccgtgttcaaacttcta

SEQ ID NO: 624498 - DNA, 19 bp, Mus musculus
  siRNA target sequence for Ghsr (NM_177330.2,1322-1340).
gacaaagtcgagcatcaat

SEQ ID NO: 624499 - DNA, 19 bp, Mus musculus
  siRNA target sequence for Gnrhr (NM_010323.1,67-85).
gagcaggacccaaatcact

SEQ ID NO: 624500 - DNA, 19 bp, Mus musculus
  siRNA target sequence for Gnrhr (NM_010323.1,121-139).
ggcaagctcccgactctaa

SEQ ID NO: 624501 - DNA, 19 bp, Mus musculus
  siRNA target sequence for Gnrhr (NM_010323.1,266-284).
caaggatgaaggtgctttt

SEQ ID NO: 624502 - DNA, 19 bp, Mus musculus
  siRNA target sequence for Gnrhr (NM_010323.1,336-354).
ggatgggatgtggaatatt

SEQ ID NO: 624503 - DNA, 19 bp, Mus musculus
  siRNA target sequence for Gnrhr (NM_010323.1,337-355).
gatgggatgtggaatatta

SEQ ID NO: 624504 - DNA, 19 bp, Mus musculus
  siRNA target sequence for Gnrhr (NM_010323.1,341-359).
ggatgtggaatattactgt

SEQ ID NO: 624505 - DNA, 19 bp, Mus musculus
  siRNA target sequence for Gnrhr (NM_010323.1,478-496).
cagccccttgctgtacaaa

SEQ ID NO: 624506 - DNA, 19 bp, Mus musculus
  siRNA target sequence for Gnrhr (NM_010323.1,497-515).
gcaacagcaagcttgaaca

SEQ ID NO: 624507 - DNA, 19 bp, Mus musculus
  siRNA target sequence for Gnrhr (NM_010323.1,508-526).
cttgaacagtctatgatca

SEQ ID NO: 624508 - DNA, 19 bp, Mus musculus
  siRNA target sequence for Gnrhr (NM_010323.1,537-555).
gattctcagcattgtcttt

SEQ ID NO: 624509 - DNA, 19 bp, Mus musculus
  siRNA target sequence for Gnrhr (NM_010323.1,556-574).
gcaggaccacagttatata

SEQ ID NO: 624510 - DNA, 19 bp, Mus musculus
  siRNA target sequence for Gnrhr (NM_010323.1,562-580).
ccacagttatatatcttca

SEQ ID NO: 624511 - DNA, 19 bp, Mus musculus
  siRNA target sequence for Gnrhr (NM_010323.1,614-632).
cagtcttctcgcaatgtgt

SEQ ID NO: 624512 - DNA, 19 bp, Mus musculus
  siRNA target sequence for Gnrhr (NM_010323.1,667-685).
gccttctacaactttttca

SEQ ID NO: 624513 - DNA, 19 bp, Mus musculus
  siRNA target sequence for Gnrhr (NM_010323.1,731-749).
gcaatgccaaaatcatctt

SEQ ID NO: 624514 - DNA, 19 bp, Mus musculus
  siRNA target sequence for Gnrhr (NM_010323.1,756-774).
cacgcgagtccttcatcaa

SEQ ID NO: 624515 - DNA, 19 bp, Mus musculus
  siRNA target sequence for Gnrhr (NM_010323.1,758-776).
cgcgagtccttcatcaaga

SEQ ID NO: 624516 - DNA, 19 bp, Mus musculus
  siRNA target sequence for Gnrhr (NM_010323.1,792-810).
gctgaatcagtccaagaat

SEQ ID NO: 624517 - DNA, 19 bp, Mus musculus
  siRNA target sequence for Gnrhr (NM_010323.1,793-811).
ctgaatcagtccaagaata

SEQ ID NO: 624518 - DNA, 19 bp, Mus musculus
  siRNA target sequence for Gnrhr (NM_010323.1,795-813).
gaatcagtccaagaataat

SEQ ID NO: 624519 - DNA, 19 bp, Mus musculus
  siRNA target sequence for Gnrhr (NM_010323.1,826-844).
cggctgagaacgctaaaga

SEQ ID NO: 624520 - DNA, 19 bp, Mus musculus
  siRNA target sequence for Gnrhr (NM_010323.1,827-845).
ggctgagaacgctaaagat

SEQ ID NO: 624521 - DNA, 19 bp, Mus musculus
  siRNA target sequence for Gnrhr (NM_010323.1,829-847).
ctgagaacgctaaagatga

SEQ ID NO: 624522 - DNA, 19 bp, Mus musculus
  siRNA target sequence for Gnrhr (NM_010323.1,878-896).
gctggactccctactatgt

SEQ ID NO: 624523 - DNA, 19 bp, Mus musculus
  siRNA target sequence for Gnrhr (NM_010323.1,903-921).
catttggtactggtttgat

SEQ ID NO: 624524 - DNA, 19 bp, Mus musculus
  siRNA target sequence for Gnrhr (NM_010323.1,919-937).
gatccagaaatgttgaaca

SEQ ID NO: 624525 - DNA, 19 bp, Mus musculus
  siRNA target sequence for Gnrhr (NM_010323.1,944-962).
cagagccagtgaatcactt

SEQ ID NO: 624526 - DNA, 19 bp, Mus musculus
  siRNA target sequence for Gnrhr (NM_010323.1,946-964).
gagccagtgaatcactttt

SEQ ID NO: 624527 - DNA, 19 bp, Mus musculus
  siRNA target sequence for Gnrhr (NM_010323.1,990-1008).
gtgcttcgacccactcata

SEQ ID NO: 624528 - DNA, 19 bp, Mus musculus
  siRNA target sequence for Gnrhr (NM_010323.1,992-1010).
gcttcgacccactcatata

SEQ ID NO: 624529 - DNA, 19 bp, Mus musculus
  siRNA target sequence for Gnrhr (NM_010323.1,993-1011).
cttcgacccactcatatat

SEQ ID NO: 624530 - DNA, 19 bp, Mus musculus
  siRNA target sequence for Gpbar1 (NM_174985.1,156-174).
cttcctaagcctactacta

SEQ ID NO: 624531 - DNA, 19 bp, Mus musculus
  siRNA target sequence for Gpbar1 (NM_174985.1,262-280).
cacttgacccccaactttt

SEQ ID NO: 624532 - DNA, 19 bp, Mus musculus
  siRNA target sequence for Gpbar1 (NM_174985.1,264-282).
cttgacccccaacttttgt

SEQ ID NO: 624533 - DNA, 19 bp, Mus musculus
  siRNA target sequence for Gpbar1 (NM_174985.1,392-410).
gggtcagctccctgttctt

SEQ ID NO: 624534 - DNA, 19 bp, Mus musculus
  siRNA target sequence for Gpbar1 (NM_174985.1,393-411).
ggtcagctccctgttcttt

SEQ ID NO: 624535 - DNA, 19 bp, Mus musculus
  siRNA target sequence for Gpbar1 (NM_174985.1,769-787).
gggcctggaactctgttat

SEQ ID NO: 624536 - DNA, 19 bp, Mus musculus
  siRNA target sequence for Gpbar1 (NM_174985.1,781-799).
ctgttatcgctcatctcat

SEQ ID NO: 624537 - DNA, 19 bp, Mus musculus
  siRNA target sequence for Gpcr25 (NM_008152.1,525-543).
gcgccacctcgaacactat

SEQ ID NO: 624538 - DNA, 19 bp, Mus musculus
  siRNA target sequence for Gpcr25 (NM_008152.1,526-544).
cgccacctcgaacactatt

SEQ ID NO: 624539 - DNA, 19 bp, Mus musculus
  siRNA target sequence for Gpcr25 (NM_008152.1,529-547).
cacctcgaacactatttgt

SEQ ID NO: 624540 - DNA, 19 bp, Mus musculus
  siRNA target sequence for Gpcr25 (NM_008152.1,546-564).
gttcccggtggtctacata

SEQ ID NO: 624541 - DNA, 19 bp, Mus musculus
  siRNA target sequence for Gpcr25 (NM_008152.1,549-567).
cccggtggtctacataatt

SEQ ID NO: 624542 - DNA, 19 bp, Mus musculus
  siRNA target sequence for Gpcr25 (NM_008152.1,587-605).
cagccaacatcggatcttt

SEQ ID NO: 624543 - DNA, 19 bp, Mus musculus
  siRNA target sequence for Gpcr25 (NM_008152.1,589-607).
gccaacatcggatctttat

SEQ ID NO: 624544 - DNA, 19 bp, Mus musculus
  siRNA target sequence for Gpcr25 (NM_008152.1,599-617).
gatctttatgcgtatcctt

SEQ ID NO: 624545 - DNA, 19 bp, Mus musculus
  siRNA target sequence for Gpcr25 (NM_008152.1,708-726).
gatcaattacacttggaat

SEQ ID NO: 624546 - DNA, 19 bp, Mus musculus
  siRNA target sequence for Gpcr25 (NM_008152.1,748-766).
cccaccttgtgcaaaggaa

SEQ ID NO: 624547 - DNA, 19 bp, Mus musculus
  siRNA target sequence for Gpcr25 (NM_008152.1,758-776).
gcaaaggaagcgttttctt

SEQ ID NO: 624548 - DNA, 19 bp, Mus musculus
  siRNA target sequence for Gpcr25 (NM_008152.1,804-822).
ggcgttcctcacttgcatt

SEQ ID NO: 624549 - DNA, 19 bp, Mus musculus
  siRNA target sequence for Gpcr25 (NM_008152.1,846-864).
cgtctaccctctgaagttt

SEQ ID NO: 624550 - DNA, 19 bp, Mus musculus
  siRNA target sequence for Gpcr25 (NM_008152.1,878-896).
cgagaagattcgcgtttat

SEQ ID NO: 624551 - DNA, 19 bp, Mus musculus
  siRNA target sequence for Gpcr25 (NM_008152.1,879-897).
gagaagattcgcgtttatt

SEQ ID NO: 624552 - DNA, 19 bp, Mus musculus
  siRNA target sequence for Gpcr25 (NM_008152.1,902-920).
gcctctccatctggatatt

SEQ ID NO: 624553 - DNA, 19 bp, Mus musculus
  siRNA target sequence for Gpcr25 (NM_008152.1,903-921).
cctctccatctggatatta

SEQ ID NO: 624554 - DNA, 19 bp, Mus musculus
  siRNA target sequence for Gpcr25 (NM_008152.1,915-933).
gatattagagtccttcttt

SEQ ID NO: 624555 - DNA, 19 bp, Mus musculus
  siRNA target sequence for Gpcr25 (NM_008152.1,922-940).
gagtccttctttaactcta

SEQ ID NO: 624556 - DNA, 19 bp, Mus musculus
  siRNA target sequence for Gpcr25 (NM_008152.1,927-945).
cttctttaactctatgctt

SEQ ID NO: 624557 - DNA, 19 bp, Mus musculus
  siRNA target sequence for Gpcr25 (NM_008152.1,955-973).
gatgaaacgagtgttgaat

SEQ ID NO: 624558 - DNA, 19 bp, Mus musculus
  siRNA target sequence for Gpcr25 (NM_008152.1,979-997).
gactcggacaaatctaatt

SEQ ID NO: 624559 - DNA, 19 bp, Mus musculus
  siRNA target sequence for Gpcr25 (NM_008152.1,1197-1215).
gactttcgtcctatgcttt

SEQ ID NO: 624560 - DNA, 19 bp, Mus musculus
  siRNA target sequence for Gpcr25 (NM_008152.1,1236-1254).
gctcatccgctgcgtttta

SEQ ID NO: 624561 - DNA, 19 bp, Mus musculus
  siRNA target sequence for Gpcr25 (NM_008152.1,1318-1336).
gtagccctgacgagtctaa

SEQ ID NO: 624562 - DNA, 19 bp, Mus musculus
  siRNA target sequence for Gpcr25 (NM_008152.1,1321-1339).
gccctgacgagtctaaact

SEQ ID NO: 624563 - DNA, 19 bp, Mus musculus
  siRNA target sequence for Gpcr25 (NM_008152.1,1323-1341).
cctgacgagtctaaactgt

SEQ ID NO: 624564 - DNA, 19 bp, Mus musculus
  siRNA target sequence for Gpcr25 (NM_008152.1,1342-1360).
gttgccgatcccattctgt

SEQ ID NO: 624565 - DNA, 19 bp, Mus musculus
  siRNA target sequence for Gpcr25 (NM_008152.1,1387-1405).
gctgatatgtggaacatat

SEQ ID NO: 624566 - DNA, 19 bp, Mus musculus
  siRNA target sequence for Gpcr25 (NM_008152.1,1418-1436).
ctaggaaacacaatagaca

SEQ ID NO: 624567 - DNA, 19 bp, Mus musculus
  siRNA target sequence for Gpcr25 (NM_008152.1,1470-1488).
cacaagagatgctgtagaa

SEQ ID NO: 624568 - DNA, 19 bp, Mus musculus
  siRNA target sequence for Gpcr25 (NM_008152.1,1477-1495).
gatgctgtagaattagaga

SEQ ID NO: 624569 - DNA, 19 bp, Mus musculus
  siRNA target sequence for Gpr1 (NM_146250.1,255-273).
gttggacaactattcctat

SEQ ID NO: 624570 - DNA, 19 bp, Mus musculus
  siRNA target sequence for Gpr1 (NM_146250.1,264-282).
ctattcctatgccttagat

SEQ ID NO: 624571 - DNA, 19 bp, Mus musculus
  siRNA target sequence for Gpr1 (NM_146250.1,269-287).
cctatgccttagattatta

SEQ ID NO: 624572 - DNA, 19 bp, Mus musculus
  siRNA target sequence for Gpr1 (NM_146250.1,339-357).
gatctccctgttcttatat

SEQ ID NO: 624573 - DNA, 19 bp, Mus musculus
  siRNA target sequence for Gpr1 (NM_146250.1,351-369).
cttatatgccctagcattt

SEQ ID NO: 624574 - DNA, 19 bp, Mus musculus
  siRNA target sequence for Gpr1 (NM_146250.1,440-458).
ctctttggttcctcaatct

SEQ ID NO: 624575 - DNA, 19 bp, Mus musculus
  siRNA target sequence for Gpr1 (NM_146250.1,462-480).
catcgcagacttcatcttt

SEQ ID NO: 624576 - DNA, 19 bp, Mus musculus
  siRNA target sequence for Gpr1 (NM_146250.1,465-483).
cgcagacttcatctttgtt

SEQ ID NO: 624577 - DNA, 19 bp, Mus musculus
  siRNA target sequence for Gpr1 (NM_146250.1,490-508).
ctgcccctgtacatttcct

SEQ ID NO: 624578 - DNA, 19 bp, Mus musculus
  siRNA target sequence for Gpr1 (NM_146250.1,543-561).
gtggctctgcaaggttaat

SEQ ID NO: 624579 - DNA, 19 bp, Mus musculus
  siRNA target sequence for Gpr1 (NM_146250.1,552-570).
caaggttaattccttcatt

SEQ ID NO: 624580 - DNA, 19 bp, Mus musculus
  siRNA target sequence for Gpr1 (NM_146250.1,571-589).
gcccaactgaacatgtttt

SEQ ID NO: 624581 - DNA, 19 bp, Mus musculus
  siRNA target sequence for Gpr1 (NM_146250.1,658-676).
catcggcaccggactctaa

SEQ ID NO: 624582 - DNA, 19 bp, Mus musculus
  siRNA target sequence for Gpr1 (NM_146250.1,661-679).
cggcaccggactctaaaga

SEQ ID NO: 624583 - DNA, 19 bp, Mus musculus
  siRNA target sequence for Gpr1 (NM_146250.1,683-701).
cactggttgttgttatact

SEQ ID NO: 624584 - DNA, 19 bp, Mus musculus
  siRNA target sequence for Gpr1 (NM_146250.1,728-746).
gaggtcctaccttatactt

SEQ ID NO: 624585 - DNA, 19 bp, Mus musculus
  siRNA target sequence for Gpr1 (NM_146250.1,762-780).
ggtcaacaaccacatcatt

SEQ ID NO: 624586 - DNA, 19 bp, Mus musculus
  siRNA target sequence for Gpr1 (NM_146250.1,774-792).
catcatttgttataataat

SEQ ID NO: 624587 - DNA, 19 bp, Mus musculus
  siRNA target sequence for Gpr1 (NM_146250.1,921-939).
gcggaacatcctgatatct

SEQ ID NO: 624588 - DNA, 19 bp, Mus musculus
  siRNA target sequence for Gpr1 (NM_146250.1,922-940).
cggaacatcctgatatcta

SEQ ID NO: 624589 - DNA, 19 bp, Mus musculus
  siRNA target sequence for Gpr1 (NM_146250.1,997-1015).
ccttatcacctgtttagca

SEQ ID NO: 624590 - DNA, 19 bp, Mus musculus
  siRNA target sequence for Gpr1 (NM_146250.1,998-1016).
cttatcacctgtttagcat

SEQ ID NO: 624591 - DNA, 19 bp, Mus musculus
  siRNA target sequence for Gpr1 (NM_146250.1,1019-1037).
gggagctcagcattcatca

SEQ ID NO: 624592 - DNA, 19 bp, Mus musculus
  siRNA target sequence for Gpr1 (NM_146250.1,1098-1116).
cctcaatagctgcttgaat

SEQ ID NO: 624593 - DNA, 19 bp, Mus musculus
  siRNA target sequence for Gpr1 (NM_146250.1,1119-1137).
catcctttacgtcctaata

SEQ ID NO: 624594 - DNA, 19 bp, Mus musculus
  siRNA target sequence for Gpr1 (NM_146250.1,1123-1141).
ctttacgtcctaataagca

SEQ ID NO: 624595 - DNA, 19 bp, Mus musculus
  siRNA target sequence for Gpr1 (NM_146250.1,1217-1235).
gtacagtcagtgaacaact

SEQ ID NO: 624596 - DNA, 19 bp, Mus musculus
  siRNA target sequence for Gpr132 (NM_019925.2,364-382).
ccattgtggatcatctaca

SEQ ID NO: 624597 - DNA, 19 bp, Mus musculus
  siRNA target sequence for Gpr132 (NM_019925.2,561-579).
catttctgcgtgtgtgatt

SEQ ID NO: 624598 - DNA, 19 bp, Mus musculus
  siRNA target sequence for Gpr132 (NM_019925.2,566-584).
ctgcgtgtgtgattcttct

SEQ ID NO: 624599 - DNA, 19 bp, Mus musculus
  siRNA target sequence for Gpr132 (NM_019925.2,580-598).
cttcttgttggacttgtta

SEQ ID NO: 624600 - DNA, 19 bp, Mus musculus
  siRNA target sequence for Gpr132 (NM_019925.2,779-797).
gcgctgcgcagaagaacaa

SEQ ID NO: 624601 - DNA, 19 bp, Mus musculus
  siRNA target sequence for Gpr132 (NM_019925.2,913-931).
gccgtgtgtgcctttgaaa

SEQ ID NO: 624602 - DNA, 19 bp, Mus musculus
  siRNA target sequence for Gpr132 (NM_019925.2,935-953).
gactgtacacagtctctat

SEQ ID NO: 624603 - DNA, 19 bp, Mus musculus
  siRNA target sequence for Gpr132 (NM_019925.2,946-964).
gtctctatggtgtttctgt

SEQ ID NO: 624604 - DNA, 19 bp, Mus musculus
  siRNA target sequence for Gpr132 (NM_019925.2,1048-1066).
cacacagggtggaaaaagt

SEQ ID NO: 624605 - DNA, 19 bp, Mus musculus
  siRNA target sequence for Gpr132 (NM_019925.2,1071-1089).
cacaaagacatatgttaca

SEQ ID NO: 624606 - DNA, 19 bp, Mus musculus
  siRNA target sequence for Gpr132 (NM_019925.2,1122-1140).
cacagagctttcaaacaca

SEQ ID NO: 624607 - DNA, 19 bp, Mus musculus
  siRNA target sequence for Gpr132 (NM_019925.2,1179-1197).
gccagcgaagctaggttta

SEQ ID NO: 624608 - DNA, 19 bp, Mus musculus
  siRNA target sequence for Gpr132 (NM_019925.2,1181-1199).
cagcgaagctaggtttact

SEQ ID NO: 624609 - DNA, 19 bp, Mus musculus
  siRNA target sequence for Gpr132 (NM_019925.2,1183-1201).
gcgaagctaggtttactgt

SEQ ID NO: 624610 - DNA, 19 bp, Mus musculus
  siRNA target sequence for Gpr14 (NM_145440.1,231-249).
ggcgtggtgggcaatgtgt

SEQ ID NO: 624611 - DNA, 19 bp, Mus musculus
  siRNA target sequence for Gpr14 (NM_145440.1,232-250).
gcgtggtgggcaatgtgta

SEQ ID NO: 624612 - DNA, 19 bp, Mus musculus
  siRNA target sequence for Gpr14 (NM_145440.1,402-420).
ggctgccgagttctcttta

SEQ ID NO: 624613 - DNA, 19 bp, Mus musculus
  siRNA target sequence for Gpr14 (NM_145440.1,425-443).
ggacttcctgacaatgcat

SEQ ID NO: 624614 - DNA, 19 bp, Mus musculus
  siRNA target sequence for Gpr14 (NM_145440.1,609-627).
gtccgtaggggctctaaga

SEQ ID NO: 624615 - DNA, 19 bp, Mus musculus
  siRNA target sequence for Gpr14 (NM_145440.1,915-933).
gagactgcacgcatcatca

SEQ ID NO: 624616 - DNA, 19 bp, Mus musculus
  siRNA target sequence for Gpr14 (NM_145440.1,919-937).
ctgcacgcatcatcaacta

SEQ ID NO: 624617 - DNA, 19 bp, Mus musculus
  siRNA target sequence for Gpr14 (NM_145440.1,991-1009).
ctctgctcaccaagaacta

SEQ ID NO: 624618 - DNA, 19 bp, Mus musculus
  siRNA target sequence for Gpr18 (NM_182806.1,202-220).
gcagccctagtcttctaca

SEQ ID NO: 624619 - DNA, 19 bp, Mus musculus
  siRNA target sequence for Gpr18 (NM_182806.1,238-256).
gggctgtttgttaatgtca

SEQ ID NO: 624620 - DNA, 19 bp, Mus musculus
  siRNA target sequence for Gpr18 (NM_182806.1,301-319).
gtgaccatctacatgatga

SEQ ID NO: 624621 - DNA, 19 bp, Mus musculus
  siRNA target sequence for Gpr18 (NM_182806.1,326-344).
cactactggacctcgtatt

SEQ ID NO: 624622 - DNA, 19 bp, Mus musculus
  siRNA target sequence for Gpr18 (NM_182806.1,328-346).
ctactggacctcgtattta

SEQ ID NO: 624623 - DNA, 19 bp, Mus musculus
  siRNA target sequence for Gpr18 (NM_182806.1,355-373).
ctgccctttcggatgtttt

SEQ ID NO: 624624 - DNA, 19 bp, Mus musculus
  siRNA target sequence for Gpr18 (NM_182806.1,366-384).
gatgttttactatgcaaaa

SEQ ID NO: 624625 - DNA, 19 bp, Mus musculus
  siRNA target sequence for Gpr18 (NM_182806.1,462-480).
gcttcttgctttcattagt

SEQ ID NO: 624626 - DNA, 19 bp, Mus musculus
  siRNA target sequence for Gpr18 (NM_182806.1,496-514).
gccatcgtacagccaaaat

SEQ ID NO: 624627 - DNA, 19 bp, Mus musculus
  siRNA target sequence for Gpr18 (NM_182806.1,497-515).
ccatcgtacagccaaaata

SEQ ID NO: 624628 - DNA, 19 bp, Mus musculus
  siRNA target sequence for Gpr18 (NM_182806.1,498-516).
catcgtacagccaaaatat

SEQ ID NO: 624629 - DNA, 19 bp, Mus musculus
  siRNA target sequence for Gpr18 (NM_182806.1,659-677).
ccgacatcacccacttaaa

SEQ ID NO: 624630 - DNA, 19 bp, Mus musculus
  siRNA target sequence for Gpr18 (NM_182806.1,660-678).
cgacatcacccacttaaaa

SEQ ID NO: 624631 - DNA, 19 bp, Mus musculus
  siRNA target sequence for Gpr18 (NM_182806.1,680-698).
ctgtcaacgtgctcaactt

SEQ ID NO: 624632 - DNA, 19 bp, Mus musculus
  siRNA target sequence for Gpr18 (NM_182806.1,693-711).
caacttcacgcgactcata

SEQ ID NO: 624633 - DNA, 19 bp, Mus musculus
  siRNA target sequence for Gpr18 (NM_182806.1,696-714).
cttcacgcgactcatattt

SEQ ID NO: 624634 - DNA, 19 bp, Mus musculus
  siRNA target sequence for Gpr18 (NM_182806.1,701-719).
cgcgactcatatttttctt

SEQ ID NO: 624635 - DNA, 19 bp, Mus musculus
  siRNA target sequence for Gpr18 (NM_182806.1,747-765).
gtgctacgtggtcatcatt

SEQ ID NO: 624636 - DNA, 19 bp, Mus musculus
  siRNA target sequence for Gpr18 (NM_182806.1,976-994).
gatgtagtcctctactaca

SEQ ID NO: 624637 - DNA, 19 bp, Mus musculus
  siRNA target sequence for Gpr18 (NM_182806.1,987-1005).
ctactacatcgtttccaaa

SEQ ID NO: 624638 - DNA, 19 bp, Mus musculus
  siRNA target sequence for Gpr18 (NM_182806.1,1035-1053).
gctgtaccgcaattacctt

SEQ ID NO: 624639 - DNA, 19 bp, Mus musculus
  siRNA target sequence for Gpr18 (NM_182806.1,1084-1102).
ggcagtttacggtcactta

SEQ ID NO: 624640 - DNA, 19 bp, Mus musculus
  siRNA target sequence for Gpr18 (NM_182806.1,1088-1106).
gtttacggtcacttagcaa

SEQ ID NO: 624641 - DNA, 19 bp, Mus musculus
  siRNA target sequence for Gpr19 (NM_008157.1,320-338).
gcaattccctggtatgtct

SEQ ID NO: 624642 - DNA, 19 bp, Mus musculus
  siRNA target sequence for Gpr19 (NM_008157.1,552-570).
ctgcatcgaccgcttctat

SEQ ID NO: 624643 - DNA, 19 bp, Mus musculus
  siRNA target sequence for Gpr19 (NM_008157.1,657-675).
cgtgacgcctgtcttcttt

SEQ ID NO: 624644 - DNA, 19 bp, Mus musculus
  siRNA target sequence for Gpr19 (NM_008157.1,853-871).
ctgagaaggacgatgaaca

SEQ ID NO: 624645 - DNA, 19 bp, Mus musculus
  siRNA target sequence for Gpr19 (NM_008157.1,857-875).
gaaggacgatgaacattgt

SEQ ID NO: 624646 - DNA, 19 bp, Mus musculus
  siRNA target sequence for Gpr19 (NM_008157.1,1015-1033).
gcagtcacgtgggtatctt

SEQ ID NO: 624647 - DNA, 19 bp, Mus musculus
  siRNA target sequence for Gpr19 (NM_008157.1,1093-1111).
gggatgaaagagacattct

SEQ ID NO: 624648 - DNA, 19 bp, Mus musculus
  siRNA target sequence for Gpr19 (NM_008157.1,1110-1128).
ctgcatgtcctcgatgaaa

SEQ ID NO: 624649 - DNA, 19 bp, Mus musculus
  siRNA target sequence for Gpr19 (NM_008157.1,1229-1247).
ccaaagactccatctatga

SEQ ID NO: 624650 - DNA, 19 bp, Mus musculus
  siRNA target sequence for Gpr19 (NM_008157.1,1238-1256).
ccatctatgactcatttga

SEQ ID NO: 624651 - DNA, 19 bp, Mus musculus
  siRNA target sequence for Gpr19 (NM_008157.1,1279-1297).
ctcgcctggcccatcaact

SEQ ID NO: 624652 - DNA, 19 bp, Mus musculus
  siRNA target sequence for Gpr19 (NM_008157.1,1282-1300).
gcctggcccatcaactcaa

SEQ ID NO: 624653 - DNA, 19 bp, Mus musculus
  siRNA target sequence for Gpr19 (NM_008157.1,1283-1301).
cctggcccatcaactcaaa

SEQ ID NO: 624654 - DNA, 19 bp, Mus musculus
  siRNA target sequence for Gpr19 (NM_008157.1,1298-1316).
caaaccctccaaacacttt

SEQ ID NO: 624655 - DNA, 19 bp, Mus musculus
  siRNA target sequence for Gpr20 (NM_173365.1,356-374).
gcctgtggcaagcactaat

SEQ ID NO: 624656 - DNA, 19 bp, Mus musculus
  siRNA target sequence for Gpr20 (NM_173365.1,414-432).
caacggactggcactgtat

SEQ ID NO: 624657 - DNA, 19 bp, Mus musculus
  siRNA target sequence for Gpr20 (NM_173365.1,527-545).
cacgctttgctgtcttcta

SEQ ID NO: 624658 - DNA, 19 bp, Mus musculus
  siRNA target sequence for Gpr20 (NM_173365.1,954-972).
cttcctggtctgtttcaca

SEQ ID NO: 624659 - DNA, 19 bp, Mus musculus
  siRNA target sequence for Gpr20 (NM_173365.1,999-1017).
ggcactgtggcctaacgta

SEQ ID NO: 624660 - DNA, 19 bp, Mus musculus
  siRNA target sequence for Gpr20 (NM_173365.1,1008-1026).
gcctaacgtacctaagcat

SEQ ID NO: 624661 - DNA, 19 bp, Mus musculus
  siRNA target sequence for Gpr20 (NM_173365.1,1009-1027).
cctaacgtacctaagcata

SEQ ID NO: 624662 - DNA, 19 bp, Mus musculus
  siRNA target sequence for Gpr20 (NM_173365.1,1084-1102).
gaccccattgtctactgtt

SEQ ID NO: 624663 - DNA, 19 bp, Mus musculus
  siRNA target sequence for Gpr20 (NM_173365.1,1127-1145).
ctgtccgaggcctcttcta

SEQ ID NO: 624664 - DNA, 19 bp, Mus musculus
  siRNA target sequence for Gpr20 (NM_173365.1,1164-1182).
caagcccagcagtatggat

SEQ ID NO: 624665 - DNA, 19 bp, Mus musculus
  siRNA target sequence for Gpr20 (NM_173365.1,1210-1228).
gcctcagctcccattcaca

SEQ ID NO: 624666 - DNA, 19 bp, Mus musculus
  siRNA target sequence for Gpr21 (NM_177383.2,466-484).
ctccacctgggatggtaat

SEQ ID NO: 624667 - DNA, 19 bp, Mus musculus
  siRNA target sequence for Gpr21 (NM_177383.2,468-486).
ccacctgggatggtaatca

SEQ ID NO: 624668 - DNA, 19 bp, Mus musculus
  siRNA target sequence for Gpr21 (NM_177383.2,557-575).
ctgattattgtctttctaa

SEQ ID NO: 624669 - DNA, 19 bp, Mus musculus
  siRNA target sequence for Gpr21 (NM_177383.2,559-577).
gattattgtctttctaact

SEQ ID NO: 624670 - DNA, 19 bp, Mus musculus
  siRNA target sequence for Gpr21 (NM_177383.2,566-584).
gtctttctaactgtattga

SEQ ID NO: 624671 - DNA, 19 bp, Mus musculus
  siRNA target sequence for Gpr21 (NM_177383.2,568-586).
ctttctaactgtattgatt

SEQ ID NO: 624672 - DNA, 19 bp, Mus musculus
  siRNA target sequence for Gpr21 (NM_177383.2,595-613).
caacatcattgtgattttt

SEQ ID NO: 624673 - DNA, 19 bp, Mus musculus
  siRNA target sequence for Gpr21 (NM_177383.2,632-650).
ctgttgaaccatcattcta

SEQ ID NO: 624674 - DNA, 19 bp, Mus musculus
  siRNA target sequence for Gpr21 (NM_177383.2,640-658).
ccatcattctacaagttat

SEQ ID NO: 624675 - DNA, 19 bp, Mus musculus
  siRNA target sequence for Gpr21 (NM_177383.2,641-659).
catcattctacaagttatt

SEQ ID NO: 624676 - DNA, 19 bp, Mus musculus
  siRNA target sequence for Gpr21 (NM_177383.2,717-735).
ccttatcactcctctacta

SEQ ID NO: 624677 - DNA, 19 bp, Mus musculus
  siRNA target sequence for Gpr21 (NM_177383.2,760-778).
gacttgccaagtatttggt

SEQ ID NO: 624678 - DNA, 19 bp, Mus musculus
  siRNA target sequence for Gpr21 (NM_177383.2,840-858).
gatatattgccatcactaa

SEQ ID NO: 624679 - DNA, 19 bp, Mus musculus
  siRNA target sequence for Gpr21 (NM_177383.2,891-909).
ggagactacgcctctgtat

SEQ ID NO: 624680 - DNA, 19 bp, Mus musculus
  siRNA target sequence for Gpr21 (NM_177383.2,892-910).
gagactacgcctctgtatt

SEQ ID NO: 624681 - DNA, 19 bp, Mus musculus
  siRNA target sequence for Gpr21 (NM_177383.2,894-912).
gactacgcctctgtatttt

SEQ ID NO: 624682 - DNA, 19 bp, Mus musculus
  siRNA target sequence for Gpr21 (NM_177383.2,914-932).
ctgatttggctgtattcca

SEQ ID NO: 624683 - DNA, 19 bp, Mus musculus
  siRNA target sequence for Gpr21 (NM_177383.2,963-981).
ggggtaaacccggatatca

SEQ ID NO: 624684 - DNA, 19 bp, Mus musculus
  siRNA target sequence for Gpr21 (NM_177383.2,964-982).
gggtaaacccggatatcat

SEQ ID NO: 624685 - DNA, 19 bp, Mus musculus
  siRNA target sequence for Gpr21 (NM_177383.2,973-991).
cggatatcatggagatgta

SEQ ID NO: 624686 - DNA, 19 bp, Mus musculus
  siRNA target sequence for Gpr21 (NM_177383.2,974-992).
ggatatcatggagatgtat

SEQ ID NO: 624687 - DNA, 19 bp, Mus musculus
  siRNA target sequence for Gpr21 (NM_177383.2,975-993).
gatatcatggagatgtatt

SEQ ID NO: 624688 - DNA, 19 bp, Mus musculus
  siRNA target sequence for Gpr21 (NM_177383.2,1064-1082).
ccagctgccctcattgtct

SEQ ID NO: 624689 - DNA, 19 bp, Mus musculus
  siRNA target sequence for Gpr21 (NM_177383.2,1079-1097).
gtctgcttcacgtatttca

SEQ ID NO: 624690 - DNA, 19 bp, Mus musculus
  siRNA target sequence for Gpr21 (NM_177383.2,1083-1101).
gcttcacgtatttcaacat

SEQ ID NO: 624691 - DNA, 19 bp, Mus musculus
  siRNA target sequence for Gpr21 (NM_177383.2,1185-1203).
cccagacctgtccagataa

SEQ ID NO: 624692 - DNA, 19 bp, Mus musculus
  siRNA target sequence for Gpr21 (NM_177383.2,1250-1268).
ctctggttgccatacatca

SEQ ID NO: 624693 - DNA, 19 bp, Mus musculus
  siRNA target sequence for Gpr21 (NM_177383.2,1324-1342).
gactacctggcttgctatt

SEQ ID NO: 624694 - DNA, 19 bp, Mus musculus
  siRNA target sequence for Gpr21 (NM_177383.2,1333-1351).
gcttgctattagtaacagt

SEQ ID NO: 624695 - DNA, 19 bp, Mus musculus
  siRNA target sequence for Gpr21 (NM_177383.2,1334-1352).
cttgctattagtaacagtt

SEQ ID NO: 624696 - DNA, 19 bp, Mus musculus
  siRNA target sequence for Gpr21 (NM_177383.2,1480-1498).
caaaggaccccctaatgga

SEQ ID NO: 624697 - DNA, 19 bp, Mus musculus
  siRNA target sequence for Gpr21 (NM_177383.2,1490-1508).
cctaatggatctcatatct

SEQ ID NO: 624698 - DNA, 19 bp, Mus musculus
  siRNA target sequence for Gpr22 (NM_175191.2,1448-1466).
cacggtgcgagatgacatt

SEQ ID NO: 624699 - DNA, 19 bp, Mus musculus
  siRNA target sequence for Gpr22 (NM_175191.2,1450-1468).
cggtgcgagatgacattga

SEQ ID NO: 624700 - DNA, 19 bp, Mus musculus
  siRNA target sequence for Gpr22 (NM_175191.2,1467-1485).
gatgacatcgacaccaata

SEQ ID NO: 624701 - DNA, 19 bp, Mus musculus
  siRNA target sequence for Gpr22 (NM_175191.2,1470-1488).
gacatcgacaccaatatgt

SEQ ID NO: 624702 - DNA, 19 bp, Mus musculus
  siRNA target sequence for Gpr22 (NM_175191.2,1499-1517).
gtcatacccactaagcttt

SEQ ID NO: 624703 - DNA, 19 bp, Mus musculus
  siRNA target sequence for Gpr22 (NM_175191.2,1529-1547).
cactggatttctcatgtta

SEQ ID NO: 624704 - DNA, 19 bp, Mus musculus
  siRNA target sequence for Gpr22 (NM_175191.2,1531-1549).
ctggatttctcatgttaga

SEQ ID NO: 624705 - DNA, 19 bp, Mus musculus
  siRNA target sequence for Gpr22 (NM_175191.2,1534-1552).
gatttctcatgttagagat

SEQ ID NO: 624706 - DNA, 19 bp, Mus musculus
  siRNA target sequence for Gpr22 (NM_175191.2,1575-1593).
cttaccgtcctggtacttt

SEQ ID NO: 624707 - DNA, 19 bp, Mus musculus
  siRNA target sequence for Gpr22 (NM_175191.2,1586-1604).
ggtactttactgcatgaaa

SEQ ID NO: 624708 - DNA, 19 bp, Mus musculus
  siRNA target sequence for Gpr22 (NM_175191.2,1616-1634).
caactctgtcagtaacatt

SEQ ID NO: 624709 - DNA, 19 bp, Mus musculus
  siRNA target sequence for Gpr22 (NM_175191.2,1623-1641).
gtcagtaacattattacaa

SEQ ID NO: 624710 - DNA, 19 bp, Mus musculus
  siRNA target sequence for Gpr22 (NM_175191.2,1649-1667).
ccatgtacttgatgtcata

SEQ ID NO: 624711 - DNA, 19 bp, Mus musculus
  siRNA target sequence for Gpr22 (NM_175191.2,1676-1694).
gggatgcattcctctaact

SEQ ID NO: 624712 - DNA, 19 bp, Mus musculus
  siRNA target sequence for Gpr22 (NM_175191.2,1678-1696).
gatgcattcctctaactat

SEQ ID NO: 624713 - DNA, 19 bp, Mus musculus
  siRNA target sequence for Gpr22 (NM_175191.2,1710-1728).
ctctcactggagagtaaca

SEQ ID NO: 624714 - DNA, 19 bp, Mus musculus
  siRNA target sequence for Gpr22 (NM_175191.2,1774-1792).
gtgtttcgacagcaatcaa

SEQ ID NO: 624715 - DNA, 19 bp, Mus musculus
  siRNA target sequence for Gpr22 (NM_175191.2,1780-1798).
cgacagcaatcaacgtttt

SEQ ID NO: 624716 - DNA, 19 bp, Mus musculus
  siRNA target sequence for Gpr22 (NM_175191.2,1781-1799).
gacagcaatcaacgttttt

SEQ ID NO: 624717 - DNA, 19 bp, Mus musculus
  siRNA target sequence for Gpr22 (NM_175191.2,1785-1803).
gcaatcaacgtttttgcta

SEQ ID NO: 624718 - DNA, 19 bp, Mus musculus
  siRNA target sequence for Gpr22 (NM_175191.2,1786-1804).
caatcaacgtttttgctat

SEQ ID NO: 624719 - DNA, 19 bp, Mus musculus
  siRNA target sequence for Gpr22 (NM_175191.2,1861-1879).
gcagagctgtaatgctaat

SEQ ID NO: 624720 - DNA, 19 bp, Mus musculus
  siRNA target sequence for Gpr22 (NM_175191.2,1916-1934).
gattcccttcattgaagta

SEQ ID NO: 624721 - DNA, 19 bp, Mus musculus
  siRNA target sequence for Gpr22 (NM_175191.2,1921-1939).
ccttcattgaagtaaattt

SEQ ID NO: 624722 - DNA, 19 bp, Mus musculus
  siRNA target sequence for Gpr22 (NM_175191.2,1947-1965).
cttcaaagtggaaatacat

SEQ ID NO: 624723 - DNA, 19 bp, Mus musculus
  siRNA target sequence for Gpr22 (NM_175191.2,1985-2003).
gtgtgtcagtacaagtgaa

SEQ ID NO: 624724 - DNA, 19 bp, Mus musculus
  siRNA target sequence for Gpr22 (NM_175191.2,1991-2009).
cagtacaagtgaatactat

SEQ ID NO: 624725 - DNA, 19 bp, Mus musculus
  siRNA target sequence for Gpr22 (NM_175191.2,1996-2014).
caagtgaatactatactga

SEQ ID NO: 624726 - DNA, 19 bp, Mus musculus
  siRNA target sequence for Gpr22 (NM_175191.2,2011-2029).
ctgagctcgggatgtacta

SEQ ID NO: 624727 - DNA, 19 bp, Mus musculus
  siRNA target sequence for Gpr22 (NM_175191.2,2020-2038).
ggatgtactatcacctttt

SEQ ID NO: 624728 - DNA, 19 bp, Mus musculus
  siRNA target sequence for Gpr22 (NM_175191.2,2067-2085).
gttatagtcatgttgatca

SEQ ID NO: 624729 - DNA, 19 bp, Mus musculus
  siRNA target sequence for Gpr22 (NM_175191.2,2081-2099).
gatcacatacactaagata

SEQ ID NO: 624730 - DNA, 19 bp, Mus musculus
  siRNA target sequence for Gpr22 (NM_175191.2,2118-2136).
cgcataggcactagattct

SEQ ID NO: 624731 - DNA, 19 bp, Mus musculus
  siRNA target sequence for Gpr22 (NM_175191.2,2120-2138).
cataggcactagattctca

SEQ ID NO: 624732 - DNA, 19 bp, Mus musculus
  siRNA target sequence for Gpr22 (NM_175191.2,2248-2266).
gaacttcagtttctgtaat

SEQ ID NO: 624733 - DNA, 19 bp, Mus musculus
  siRNA target sequence for Gpr22 (NM_175191.2,2330-2348).
caaaatgtcgttattgatt

SEQ ID NO: 624734 - DNA, 19 bp, Mus musculus
  siRNA target sequence for Gpr22 (NM_175191.2,2336-2354).
gtcgttattgattatttct

SEQ ID NO: 624735 - DNA, 19 bp, Mus musculus
  siRNA target sequence for Gpr22 (NM_175191.2,2364-2382).
ctctgttggacaccaattt

SEQ ID NO: 624736 - DNA, 19 bp, Mus musculus
  siRNA target sequence for Gpr22 (NM_175191.2,2413-2431).
gcccaagtgaccttttagt

SEQ ID NO: 624737 - DNA, 19 bp, Mus musculus
  siRNA target sequence for Gpr22 (NM_175191.2,2414-2432).
cccaagtgaccttttagta

SEQ ID NO: 624738 - DNA, 19 bp, Mus musculus
  siRNA target sequence for Gpr22 (NM_175191.2,2415-2433).
ccaagtgaccttttagtaa

SEQ ID NO: 624739 - DNA, 19 bp, Mus musculus
  siRNA target sequence for Gpr22 (NM_175191.2,2416-2434).
caagtgaccttttagtaaa

SEQ ID NO: 624740 - DNA, 19 bp, Mus musculus
  siRNA target sequence for Gpr22 (NM_175191.2,2451-2469).
ctagtcatggcttatggaa

SEQ ID NO: 624741 - DNA, 19 bp, Mus musculus
  siRNA target sequence for Gpr22 (NM_175191.2,2459-2477).
ggcttatggaacaacgata

SEQ ID NO: 624742 - DNA, 19 bp, Mus musculus
  siRNA target sequence for Gpr22 (NM_175191.2,2461-2479).
cttatggaacaacgatatt

SEQ ID NO: 624743 - DNA, 19 bp, Mus musculus
  siRNA target sequence for Gpr22 (NM_175191.2,2517-2535).
caaaaggtcttaaagagta

SEQ ID NO: 624744 - DNA, 19 bp, Mus musculus
  siRNA target sequence for Gpr22 (NM_175191.2,2546-2564).
gcgagttgtttccatagtt

SEQ ID NO: 624745 - DNA, 19 bp, Mus musculus
  siRNA target sequence for Gpr22 (NM_175191.2,2568-2586).
gctgatcccatgcctaata

SEQ ID NO: 624746 - DNA, 19 bp, Mus musculus
  siRNA target sequence for Gpr22 (NM_175191.2,2569-2587).
ctgatcccatgcctaataa

SEQ ID NO: 624747 - DNA, 19 bp, Mus musculus
  siRNA target sequence for Gpr22 (NM_175191.2,2579-2597).
gcctaataacgctgtaata

SEQ ID NO: 624748 - DNA, 19 bp, Mus musculus
  siRNA target sequence for Gpr22 (NM_175191.2,2603-2621).
ctcatggatagatcctaaa

SEQ ID NO: 624749 - DNA, 19 bp, Mus musculus
  siRNA target sequence for Gpr22 (NM_175191.2,2627-2645).
caaaaaggttacctatgaa

SEQ ID NO: 624750 - DNA, 19 bp, Mus musculus
  siRNA target sequence for Gpr23 (NM_175271.2,543-561).
cttccaattccaagattta

SEQ ID NO: 624751 - DNA, 19 bp, Mus musculus
  siRNA target sequence for Gpr23 (NM_175271.2,577-595).
cccaggttgggaaatgcaa

SEQ ID NO: 624752 - DNA, 19 bp, Mus musculus
  siRNA target sequence for Gpr23 (NM_175271.2,587-605).
gaaatgcaactgccaataa

SEQ ID NO: 624753 - DNA, 19 bp, Mus musculus
  siRNA target sequence for Gpr23 (NM_175271.2,592-610).
gcaactgccaataatactt

SEQ ID NO: 624754 - DNA, 19 bp, Mus musculus
  siRNA target sequence for Gpr23 (NM_175271.2,600-618).
caataatacttgcattgtt

SEQ ID NO: 624755 - DNA, 19 bp, Mus musculus
  siRNA target sequence for Gpr23 (NM_175271.2,611-629).
gcattgttgatgattcctt

SEQ ID NO: 624756 - DNA, 19 bp, Mus musculus
  siRNA target sequence for Gpr23 (NM_175271.2,619-637).
gatgattccttcaagtata

SEQ ID NO: 624757 - DNA, 19 bp, Mus musculus
  siRNA target sequence for Gpr23 (NM_175271.2,649-667).
gctgtctatagtgttgtat

SEQ ID NO: 624758 - DNA, 19 bp, Mus musculus
  siRNA target sequence for Gpr23 (NM_175271.2,731-749).
gaagtgagacggctatttt

SEQ ID NO: 624759 - DNA, 19 bp, Mus musculus
  siRNA target sequence for Gpr23 (NM_175271.2,791-809).
ccctacctttcaaaatatt

SEQ ID NO: 624760 - DNA, 19 bp, Mus musculus
  siRNA target sequence for Gpr23 (NM_175271.2,792-810).
cctacctttcaaaatattt

SEQ ID NO: 624761 - DNA, 19 bp, Mus musculus
  siRNA target sequence for Gpr23 (NM_175271.2,841-859).
gacaccctctgtaagatct

SEQ ID NO: 624762 - DNA, 19 bp, Mus musculus
  siRNA target sequence for Gpr23 (NM_175271.2,868-886).
gcgttcctcaccaacatct

SEQ ID NO: 624763 - DNA, 19 bp, Mus musculus
  siRNA target sequence for Gpr23 (NM_175271.2,1015-1033).
gtcctcagtggtggtattt

SEQ ID NO: 624764 - DNA, 19 bp, Mus musculus
  siRNA target sequence for Gpr23 (NM_175271.2,1049-1067).
ccaccactaatgtcaacaa

SEQ ID NO: 624765 - DNA, 19 bp, Mus musculus
  siRNA target sequence for Gpr23 (NM_175271.2,1071-1089).
gaccaccacttgctttgaa

SEQ ID NO: 624766 - DNA, 19 bp, Mus musculus
  siRNA target sequence for Gpr23 (NM_175271.2,1131-1149).
cactatattcattgaagtt

SEQ ID NO: 624767 - DNA, 19 bp, Mus musculus
  siRNA target sequence for Gpr23 (NM_175271.2,1161-1179).
cattcctctgatattgaat

SEQ ID NO: 624768 - DNA, 19 bp, Mus musculus
  siRNA target sequence for Gpr23 (NM_175271.2,1213-1231).
cgcaagcctgcaacattgt

SEQ ID NO: 624769 - DNA, 19 bp, Mus musculus
  siRNA target sequence for Gpr23 (NM_175271.2,1232-1250).
ctcagattgggaccaataa

SEQ ID NO: 624770 - DNA, 19 bp, Mus musculus
  siRNA target sequence for Gpr23 (NM_175271.2,1234-1252).
cagattgggaccaataaaa

SEQ ID NO: 624771 - DNA, 19 bp, Mus musculus
  siRNA target sequence for Gpr23 (NM_175271.2,1290-1308).
gtttgtggtatgctttgta

SEQ ID NO: 624772 - DNA, 19 bp, Mus musculus
  siRNA target sequence for Gpr23 (NM_175271.2,1310-1328).
catacaactccgttctctt

SEQ ID NO: 624773 - DNA, 19 bp, Mus musculus
  siRNA target sequence for Gpr23 (NM_175271.2,1314-1332).
caactccgttctcttttta

SEQ ID NO: 624774 - DNA, 19 bp, Mus musculus
  siRNA target sequence for Gpr23 (NM_175271.2,1345-1363).
cgctcccaagccattacta

SEQ ID NO: 624775 - DNA, 19 bp, Mus musculus
  siRNA target sequence for Gpr23 (NM_175271.2,1346-1364).
gctcccaagccattactaa

SEQ ID NO: 624776 - DNA, 19 bp, Mus musculus
  siRNA target sequence for Gpr23 (NM_175271.2,1347-1365).
ctcccaagccattactaat

SEQ ID NO: 624777 - DNA, 19 bp, Mus musculus
  siRNA target sequence for Gpr23 (NM_175271.2,1351-1369).
caagccattactaattgct

SEQ ID NO: 624778 - DNA, 19 bp, Mus musculus
  siRNA target sequence for Gpr23 (NM_175271.2,1476-1494).
gaagtccttttatatcaat

SEQ ID NO: 624779 - DNA, 19 bp, Mus musculus
  siRNA target sequence for Gpr23 (NM_175271.2,1505-1523).
ggatggagtcgctgtttaa

SEQ ID NO: 624780 - DNA, 19 bp, Mus musculus
  siRNA target sequence for Gpr23 (NM_175271.2,1509-1527).
ggagtcgctgtttaagact

SEQ ID NO: 624781 - DNA, 19 bp, Mus musculus
  siRNA target sequence for Gpr23 (NM_175271.2,1572-1590).
ggaagttagtgatcaaaca

SEQ ID NO: 624782 - DNA, 19 bp, Mus musculus
  siRNA target sequence for Gpr23 (NM_175271.2,1576-1594).
gttagtgatcaaacaacaa

SEQ ID NO: 624783 - DNA, 19 bp, Mus musculus
  siRNA target sequence for Gpr23 (NM_175271.2,1592-1610).
caaataatggtggtgaatt

SEQ ID NO: 624784 - DNA, 19 bp, Mus musculus
  siRNA target sequence for Gpr27 (NM_008158.1,977-995).
cctcggtgtggctgacatt

SEQ ID NO: 624785 - DNA, 19 bp, Mus musculus
  siRNA target sequence for Gpr3 (NM_008154.1,1391-1409).
cctttcgcaaccaagatgt

SEQ ID NO: 624786 - DNA, 19 bp, Mus musculus
  siRNA target sequence for Gpr3 (NM_008154.1,1467-1485).
gtcccggtcccctagtgat

SEQ ID NO: 624787 - DNA, 19 bp, Mus musculus
  siRNA target sequence for Gpr33 (NM_008159.1,176-194).
cctccactcatgtgatcaa

SEQ ID NO: 624788 - DNA, 19 bp, Mus musculus
  siRNA target sequence for Gpr33 (NM_008159.1,177-195).
ctccactcatgtgatcaat

SEQ ID NO: 624789 - DNA, 19 bp, Mus musculus
  siRNA target sequence for Gpr33 (NM_008159.1,196-214).
gtgtctacctcgttaacaa

SEQ ID NO: 624790 - DNA, 19 bp, Mus musculus
  siRNA target sequence for Gpr33 (NM_008159.1,294-312).
cagcaacggcctctatcta

SEQ ID NO: 624791 - DNA, 19 bp, Mus musculus
  siRNA target sequence for Gpr33 (NM_008159.1,314-332).
ggatgctgcaattcaagat

SEQ ID NO: 624792 - DNA, 19 bp, Mus musculus
  siRNA target sequence for Gpr33 (NM_008159.1,330-348).
gatgcaaaggactgtcaat

SEQ ID NO: 624793 - DNA, 19 bp, Mus musculus
  siRNA target sequence for Gpr33 (NM_008159.1,333-351).
gcaaaggactgtcaatact

SEQ ID NO: 624794 - DNA, 19 bp, Mus musculus
  siRNA target sequence for Gpr33 (NM_008159.1,338-356).
ggactgtcaatactctttt

SEQ ID NO: 624795 - DNA, 19 bp, Mus musculus
  siRNA target sequence for Gpr33 (NM_008159.1,339-357).
gactgtcaatactctttta

SEQ ID NO: 624796 - DNA, 19 bp, Mus musculus
  siRNA target sequence for Gpr33 (NM_008159.1,522-540).
catcagtgttgctcgttat

SEQ ID NO: 624797 - DNA, 19 bp, Mus musculus
  siRNA target sequence for Gpr33 (NM_008159.1,527-545).
gtgttgctcgttattacct

SEQ ID NO: 624798 - DNA, 19 bp, Mus musculus
  siRNA target sequence for Gpr33 (NM_008159.1,596-614).
cccggattgccttgcaaat

SEQ ID NO: 624799 - DNA, 19 bp, Mus musculus
  siRNA target sequence for Gpr33 (NM_008159.1,598-616).
cggattgccttgcaaatct

SEQ ID NO: 624800 - DNA, 19 bp, Mus musculus
  siRNA target sequence for Gpr33 (NM_008159.1,633-651).
cctcagcataccctattta

SEQ ID NO: 624801 - DNA, 19 bp, Mus musculus
  siRNA target sequence for Gpr33 (NM_008159.1,636-654).
cagcataccctatttagtt

SEQ ID NO: 624802 - DNA, 19 bp, Mus musculus
  siRNA target sequence for Gpr33 (NM_008159.1,695-713).
gccagaataactacattgt

SEQ ID NO: 624803 - DNA, 19 bp, Mus musculus
  siRNA target sequence for Gpr33 (NM_008159.1,697-715).
cagaataactacattgtgt

SEQ ID NO: 624804 - DNA, 19 bp, Mus musculus
  siRNA target sequence for Gpr33 (NM_008159.1,729-747).
gagcaaagagcatcaaaca

SEQ ID NO: 624805 - DNA, 19 bp, Mus musculus
  siRNA target sequence for Gpr33 (NM_008159.1,731-749).
gcaaagagcatcaaacact

SEQ ID NO: 624806 - DNA, 19 bp, Mus musculus
  siRNA target sequence for Gpr33 (NM_008159.1,838-856).
cgagtggccaccaagatga

SEQ ID NO: 624807 - DNA, 19 bp, Mus musculus
  siRNA target sequence for Gpr33 (NM_008159.1,953-971).
gtggcttggtcctcactaa

SEQ ID NO: 624808 - DNA, 19 bp, Mus musculus
  siRNA target sequence for Gpr33 (NM_008159.1,955-973).
ggcttggtcctcactaaga

SEQ ID NO: 624809 - DNA, 19 bp, Mus musculus
  siRNA target sequence for Gpr33 (NM_008159.1,957-975).
cttggtcctcactaagagt

SEQ ID NO: 624810 - DNA, 19 bp, Mus musculus
  siRNA target sequence for Gpr33 (NM_008159.1,972-990).
gagtcagccattaccttta

SEQ ID NO: 624811 - DNA, 19 bp, Mus musculus
  siRNA target sequence for Gpr33 (NM_008159.1,974-992).
gtcagccattacctttaca

SEQ ID NO: 624812 - DNA, 19 bp, Mus musculus
  siRNA target sequence for Gpr33 (NM_008159.1,1006-1024).
cttgcagtggtgactattt

SEQ ID NO: 624813 - DNA, 19 bp, Mus musculus
  siRNA target sequence for Gpr33 (NM_008159.1,1012-1030).
gtggtgactatttctttta

SEQ ID NO: 624814 - DNA, 19 bp, Mus musculus
  siRNA target sequence for Gpr33 (NM_008159.1,1107-1125).
ctttaactcaacattcagt

SEQ ID NO: 624815 - DNA, 19 bp, Mus musculus
  siRNA target sequence for Gpr33 (NM_008159.1,1122-1140).
cagtgatatctcttctaca

SEQ ID NO: 624816 - DNA, 19 bp, Mus musculus
  siRNA target sequence for Gpr34 (NM_011823.2,296-314).
gaatgcactttataactaa

SEQ ID NO: 624817 - DNA, 19 bp, Mus musculus
  siRNA target sequence for Gpr34 (NM_011823.2,300-318).
gcactttataactaattat

SEQ ID NO: 624818 - DNA, 19 bp, Mus musculus
  siRNA target sequence for Gpr34 (NM_011823.2,360-378).
cactagctgtccaatggat

SEQ ID NO: 624819 - DNA, 19 bp, Mus musculus
  siRNA target sequence for Gpr34 (NM_011823.2,368-386).
gtccaatggatgaaaaatt

SEQ ID NO: 624820 - DNA, 19 bp, Mus musculus
  siRNA target sequence for Gpr34 (NM_011823.2,375-393).
ggatgaaaaattactatct

SEQ ID NO: 624821 - DNA, 19 bp, Mus musculus
  siRNA target sequence for Gpr34 (NM_011823.2,450-468).
cattgccctctatgtattt

SEQ ID NO: 624822 - DNA, 19 bp, Mus musculus
  siRNA target sequence for Gpr34 (NM_011823.2,469-487).
ctgggcattcaccgtaaaa

SEQ ID NO: 624823 - DNA, 19 bp, Mus musculus
  siRNA target sequence for Gpr34 (NM_011823.2,471-489).
gggcattcaccgtaaaaga

SEQ ID NO: 624824 - DNA, 19 bp, Mus musculus
  siRNA target sequence for Gpr34 (NM_011823.2,472-490).
ggcattcaccgtaaaagaa

SEQ ID NO: 624825 - DNA, 19 bp, Mus musculus
  siRNA target sequence for Gpr34 (NM_011823.2,473-491).
gcattcaccgtaaaagaaa

SEQ ID NO: 624826 - DNA, 19 bp, Mus musculus
  siRNA target sequence for Gpr34 (NM_011823.2,478-496).
caccgtaaaagaaattcca

SEQ ID NO: 624827 - DNA, 19 bp, Mus musculus
  siRNA target sequence for Gpr34 (NM_011823.2,480-498).
ccgtaaaagaaattccatt

SEQ ID NO: 624828 - DNA, 19 bp, Mus musculus
  siRNA target sequence for Gpr34 (NM_011823.2,488-506).
gaaattccattcaaattta

SEQ ID NO: 624829 - DNA, 19 bp, Mus musculus
  siRNA target sequence for Gpr34 (NM_011823.2,495-513).
cattcaaatttatctactt

SEQ ID NO: 624830 - DNA, 19 bp, Mus musculus
  siRNA target sequence for Gpr34 (NM_011823.2,550-568).
ctccctttccgcataatgt

SEQ ID NO: 624831 - DNA, 19 bp, Mus musculus
  siRNA target sequence for Gpr34 (NM_011823.2,552-570).
ccctttccgcataatgtat

SEQ ID NO: 624832 - DNA, 19 bp, Mus musculus
  siRNA target sequence for Gpr34 (NM_011823.2,554-572).
ctttccgcataatgtatca

SEQ ID NO: 624833 - DNA, 19 bp, Mus musculus
  siRNA target sequence for Gpr34 (NM_011823.2,588-606).
gtggacactaggtgtgatt

SEQ ID NO: 624834 - DNA, 19 bp, Mus musculus
  siRNA target sequence for Gpr34 (NM_011823.2,599-617).
gtgtgattctttgtaaagt

SEQ ID NO: 624835 - DNA, 19 bp, Mus musculus
  siRNA target sequence for Gpr34 (NM_011823.2,616-634).
gttgtggggacactatttt

SEQ ID NO: 624836 - DNA, 19 bp, Mus musculus
  siRNA target sequence for Gpr34 (NM_011823.2,622-640).
gggacactattttacatga

SEQ ID NO: 624837 - DNA, 19 bp, Mus musculus
  siRNA target sequence for Gpr34 (NM_011823.2,623-641).
ggacactattttacatgaa

SEQ ID NO: 624838 - DNA, 19 bp, Mus musculus
  siRNA target sequence for Gpr34 (NM_011823.2,626-644).
cactattttacatgaacat

SEQ ID NO: 624839 - DNA, 19 bp, Mus musculus
  siRNA target sequence for Gpr34 (NM_011823.2,642-660).
catgtacattagcattatt

SEQ ID NO: 624840 - DNA, 19 bp, Mus musculus
  siRNA target sequence for Gpr34 (NM_011823.2,699-717).
caatcggtctatacaacaa

SEQ ID NO: 624841 - DNA, 19 bp, Mus musculus
  siRNA target sequence for Gpr34 (NM_011823.2,715-733).
caaagaagggcaataacca

SEQ ID NO: 624842 - DNA, 19 bp, Mus musculus
  siRNA target sequence for Gpr34 (NM_011823.2,734-752).
ccaagcaaagtatttatgt

SEQ ID NO: 624843 - DNA, 19 bp, Mus musculus
  siRNA target sequence for Gpr34 (NM_011823.2,735-753).
caagcaaagtatttatgtt

SEQ ID NO: 624844 - DNA, 19 bp, Mus musculus
  siRNA target sequence for Gpr34 (NM_011823.2,784-802).
ggatttctaactatgatca

SEQ ID NO: 624845 - DNA, 19 bp, Mus musculus
  siRNA target sequence for Gpr34 (NM_011823.2,785-803).
gatttctaactatgatcat

SEQ ID NO: 624846 - DNA, 19 bp, Mus musculus
  siRNA target sequence for Gpr34 (NM_011823.2,813-831).
gaagaagggaggtcataat

SEQ ID NO: 624847 - DNA, 19 bp, Mus musculus
  siRNA target sequence for Gpr34 (NM_011823.2,826-844).
cataattccacaatgtgtt

SEQ ID NO: 624848 - DNA, 19 bp, Mus musculus
  siRNA target sequence for Gpr34 (NM_011823.2,982-1000).
cggaggtcaaaatttccaa

SEQ ID NO: 624849 - DNA, 19 bp, Mus musculus
  siRNA target sequence for Gpr34 (NM_011823.2,983-1001).
ggaggtcaaaatttccaaa

SEQ ID NO: 624850 - DNA, 19 bp, Mus musculus
  siRNA target sequence for Gpr34 (NM_011823.2,1022-1040).
cagcccggaactcctttat

SEQ ID NO: 624851 - DNA, 19 bp, Mus musculus
  siRNA target sequence for Gpr34 (NM_011823.2,1025-1043).
cccggaactcctttattgt

SEQ ID NO: 624852 - DNA, 19 bp, Mus musculus
  siRNA target sequence for Gpr34 (NM_011823.2,1026-1044).
ccggaactcctttattgta

SEQ ID NO: 624853 - DNA, 19 bp, Mus musculus
  siRNA target sequence for Gpr34 (NM_011823.2,1028-1046).
ggaactcctttattgtact

SEQ ID NO: 624854 - DNA, 19 bp, Mus musculus
  siRNA target sequence for Gpr34 (NM_011823.2,1077-1095).
ccatgcctttcggttcatt

SEQ ID NO: 624855 - DNA, 19 bp, Mus musculus
  siRNA target sequence for Gpr34 (NM_011823.2,1078-1096).
catgcctttcggttcattt

SEQ ID NO: 624856 - DNA, 19 bp, Mus musculus
  siRNA target sequence for Gpr34 (NM_011823.2,1133-1151).
ggaaggaaatcattcacaa

SEQ ID NO: 624857 - DNA, 19 bp, Mus musculus
  siRNA target sequence for Gpr34 (NM_011823.2,1134-1152).
gaaggaaatcattcacaaa

SEQ ID NO: 624858 - DNA, 19 bp, Mus musculus
  siRNA target sequence for Gpr34 (NM_011823.2,1137-1155).
ggaaatcattcacaaaact

SEQ ID NO: 624859 - DNA, 19 bp, Mus musculus
  siRNA target sequence for Gpr34 (NM_011823.2,1215-1233).
cctgatgtccagtaatatt

SEQ ID NO: 624860 - DNA, 19 bp, Mus musculus
  siRNA target sequence for Gpr34 (NM_011823.2,1223-1241).
ccagtaatattcgcaaaat

SEQ ID NO: 624861 - DNA, 19 bp, Mus musculus
  siRNA target sequence for Gpr34 (NM_011823.2,1226-1244).
gtaatattcgcaaaatcat

SEQ ID NO: 624862 - DNA, 19 bp, Mus musculus
  siRNA target sequence for Gpr34 (NM_011823.2,1316-1334).
gacattccttgcatgatct

SEQ ID NO: 624863 - DNA, 19 bp, Mus musculus
  siRNA target sequence for Gpr34 (NM_011823.2,1333-1351).
ctgtccgtgacagtcaaaa

SEQ ID NO: 624864 - DNA, 19 bp, Mus musculus
  siRNA target sequence for Gpr35 (NM_022320.2,228-246).
ggcctgcttccgtcaacaa

SEQ ID NO: 624865 - DNA, 19 bp, Mus musculus
  siRNA target sequence for Gpr35 (NM_022320.2,230-248).
cctgcttccgtcaacaact

SEQ ID NO: 624866 - DNA, 19 bp, Mus musculus
  siRNA target sequence for Gpr35 (NM_022320.2,231-249).
ctgcttccgtcaacaactt

SEQ ID NO: 624867 - DNA, 19 bp, Mus musculus
  siRNA target sequence for Gpr35 (NM_022320.2,302-320).
gtggcactctgggtattct

SEQ ID NO: 624868 - DNA, 19 bp, Mus musculus
  siRNA target sequence for Gpr35 (NM_022320.2,340-358).
gacagagacccgcatctat

SEQ ID NO: 624869 - DNA, 19 bp, Mus musculus
  siRNA target sequence for Gpr35 (NM_022320.2,342-360).
cagagacccgcatctatat

SEQ ID NO: 624870 - DNA, 19 bp, Mus musculus
  siRNA target sequence for Gpr35 (NM_022320.2,413-431).
ctgtactccctgaaatata

SEQ ID NO: 624871 - DNA, 19 bp, Mus musculus
  siRNA target sequence for Gpr35 (NM_022320.2,415-433).
gtactccctgaaatatagt

SEQ ID NO: 624872 - DNA, 19 bp, Mus musculus
  siRNA target sequence for Gpr35 (NM_022320.2,852-870).
ccaacttggctgtgtttgt

SEQ ID NO: 624873 - DNA, 19 bp, Mus musculus
  siRNA target sequence for Gpr35 (NM_022320.2,961-979).
cctgtccatcacaggtaaa

SEQ ID NO: 624874 - DNA, 19 bp, Mus musculus
  siRNA target sequence for Gpr35 (NM_022320.2,1004-1022).
gatgccatctgttactact

SEQ ID NO: 624875 - DNA, 19 bp, Mus musculus
  siRNA target sequence for Gpr35 (NM_022320.2,1007-1025).
gccatctgttactactaca

SEQ ID NO: 624876 - DNA, 19 bp, Mus musculus
  siRNA target sequence for Gpr35 (NM_022320.2,1008-1026).
ccatctgttactactacat

SEQ ID NO: 624877 - DNA, 19 bp, Mus musculus
  siRNA target sequence for Gpr37 (NM_010338.1,1810-1828).
ctgggaattcggcaaaaga

SEQ ID NO: 624878 - DNA, 19 bp, Mus musculus
  siRNA target sequence for Gpr37 (NM_010338.1,1913-1931).
cggtgacacaggtgtgatt

SEQ ID NO: 624879 - DNA, 19 bp, Mus musculus
  siRNA target sequence for Gpr37 (NM_010338.1,2013-2031).
gaaccatccgggcatttga

SEQ ID NO: 624880 - DNA, 19 bp, Mus musculus
  siRNA target sequence for Gpr37 (NM_010338.1,2044-2062).
ccacggatccccaactctt

SEQ ID NO: 624881 - DNA, 19 bp, Mus musculus
  siRNA target sequence for Gpr37 (NM_010338.1,2047-2065).
cggatccccaactcttctt

SEQ ID NO: 624882 - DNA, 19 bp, Mus musculus
  siRNA target sequence for Gpr37 (NM_010338.1,2449-2467).
gcatcgtgtgtcacaatta

SEQ ID NO: 624883 - DNA, 19 bp, Mus musculus
  siRNA target sequence for Gpr37 (NM_010338.1,2454-2472).
gtgtgtcacaattactaca

SEQ ID NO: 624884 - DNA, 19 bp, Mus musculus
  siRNA target sequence for Gpr37 (NM_010338.1,2539-2557).
gcctccccctggtcatctt

SEQ ID NO: 624885 - DNA, 19 bp, Mus musculus
  siRNA target sequence for Gpr37 (NM_010338.1,2559-2577).
catgagttgactaagaagt

SEQ ID NO: 624886 - DNA, 19 bp, Mus musculus
  siRNA target sequence for Gpr37 (NM_010338.1,2599-2617).
gcaagatcgtgccctatat

SEQ ID NO: 624887 - DNA, 19 bp, Mus musculus
  siRNA target sequence for Gpr37 (NM_010338.1,2686-2704).
ccaccaacgtccagatgta

SEQ ID NO: 624888 - DNA, 19 bp, Mus musculus
  siRNA target sequence for Gpr37 (NM_010338.1,2689-2707).
ccaacgtccagatgtacta

SEQ ID NO: 624889 - DNA, 19 bp, Mus musculus
  siRNA target sequence for Gpr37 (NM_010338.1,2690-2708).
caacgtccagatgtactat

SEQ ID NO: 624890 - DNA, 19 bp, Mus musculus
  siRNA target sequence for Gpr37 (NM_010338.1,2739-2757).
gccaaacttgccgttatct

SEQ ID NO: 624891 - DNA, 19 bp, Mus musculus
  siRNA target sequence for Gpr37 (NM_010338.1,2813-2831).
ggaagatttgggctttagt

SEQ ID NO: 624892 - DNA, 19 bp, Mus musculus
  siRNA target sequence for Gpr37 (NM_010338.1,2844-2862).
gcagaacggtgtgtcataa

SEQ ID NO: 624893 - DNA, 19 bp, Mus musculus
  siRNA target sequence for Gpr37 (NM_010338.1,2845-2863).
cagaacggtgtgtcataaa

SEQ ID NO: 624894 - DNA, 19 bp, Mus musculus
  siRNA target sequence for Gpr37 (NM_010338.1,2847-2865).
gaacggtgtgtcataaaga

SEQ ID NO: 624895 - DNA, 19 bp, Mus musculus
  siRNA target sequence for Gpr37 (NM_010338.1,2850-2868).
cggtgtgtcataaagatct

SEQ ID NO: 624896 - DNA, 19 bp, Mus musculus
  siRNA target sequence for Gpr37 (NM_010338.1,2872-2890).
ctgatttaccggacacaat

SEQ ID NO: 624897 - DNA, 19 bp, Mus musculus
  siRNA target sequence for Gpr37 (NM_010338.1,2874-2892).
gatttaccggacacaatct

SEQ ID NO: 624898 - DNA, 19 bp, Mus musculus
  siRNA target sequence for Gpr37 (NM_010338.1,2880-2898).
ccggacacaatctatgttt

SEQ ID NO: 624899 - DNA, 19 bp, Mus musculus
  siRNA target sequence for Gpr37 (NM_010338.1,2881-2899).
cggacacaatctatgtttt

SEQ ID NO: 624900 - DNA, 19 bp, Mus musculus
  siRNA target sequence for Gpr37 (NM_010338.1,3401-3419).
ggagatgtccacttttgct

SEQ ID NO: 624901 - DNA, 19 bp, Mus musculus
  siRNA target sequence for Gpr37l1 (NM_134438.1,340-358).
gtttgctgtgggtatcgtt

SEQ ID NO: 624902 - DNA, 19 bp, Mus musculus
  siRNA target sequence for Gpr37l1 (NM_134438.1,387-405).
ggcacagctactacttgaa

SEQ ID NO: 624903 - DNA, 19 bp, Mus musculus
  siRNA target sequence for Gpr37l1 (NM_134438.1,474-492).
caattgtcatcttcaatga

SEQ ID NO: 624904 - DNA, 19 bp, Mus musculus
  siRNA target sequence for Gpr37l1 (NM_134438.1,508-526).
gctactcggggatgtttct

SEQ ID NO: 624905 - DNA, 19 bp, Mus musculus
  siRNA target sequence for Gpr37l1 (NM_134438.1,509-527).
ctactcggggatgtttctt

SEQ ID NO: 624906 - DNA, 19 bp, Mus musculus
  siRNA target sequence for Gpr37l1 (NM_134438.1,592-610).
gggcatagaccgattccat

SEQ ID NO: 624907 - DNA, 19 bp, Mus musculus
  siRNA target sequence for Gpr37l1 (NM_134438.1,640-658).
gcccattgagcgatgtcaa

SEQ ID NO: 624908 - DNA, 19 bp, Mus musculus
  siRNA target sequence for Gpr37l1 (NM_134438.1,641-659).
cccattgagcgatgtcaat

SEQ ID NO: 624909 - DNA, 19 bp, Mus musculus
  siRNA target sequence for Gpr37l1 (NM_134438.1,643-661).
cattgagcgatgtcaatca

SEQ ID NO: 624910 - DNA, 19 bp, Mus musculus
  siRNA target sequence for Gpr37l1 (NM_134438.1,767-785).
gtggactcgtgtatcatga

SEQ ID NO: 624911 - DNA, 19 bp, Mus musculus
  siRNA target sequence for Gpr37l1 (NM_134438.1,769-787).
ggactcgtgtatcatgaaa

SEQ ID NO: 624912 - DNA, 19 bp, Mus musculus
  siRNA target sequence for Gpr37l1 (NM_134438.1,842-860).
gcccgcatgtggtggtatt

SEQ ID NO: 624913 - DNA, 19 bp, Mus musculus
  siRNA target sequence for Gpr37l1 (NM_134438.1,843-861).
cccgcatgtggtggtattt

SEQ ID NO: 624914 - DNA, 19 bp, Mus musculus
  siRNA target sequence for Gpr37l1 (NM_134438.1,844-862).
ccgcatgtggtggtatttt

SEQ ID NO: 624915 - DNA, 19 bp, Mus musculus
  siRNA target sequence for Gpr37l1 (NM_134438.1,847-865).
catgtggtggtattttggt

SEQ ID NO: 624916 - DNA, 19 bp, Mus musculus
  siRNA target sequence for Gpr37l1 (NM_134438.1,1016-1034).
gtggtctatgccttctgta

SEQ ID NO: 624917 - DNA, 19 bp, Mus musculus
  siRNA target sequence for Gpr37l1 (NM_134438.1,1295-1313).
gtgtcctcttctatctact

SEQ ID NO: 624918 - DNA, 19 bp, Mus musculus
  siRNA target sequence for Gpr39 (NM_027677.1,632-650).
cccgcagccccctcatctt

SEQ ID NO: 624919 - DNA, 19 bp, Mus musculus
  siRNA target sequence for Gpr4 (NM_175668.2,1002-1020).
gcaggtgcgccaacacaat

SEQ ID NO: 624920 - DNA, 19 bp, Mus musculus
  siRNA target sequence for Gpr4 (NM_175668.2,1027-1045).
ggcgtctacctgatgaact

SEQ ID NO: 624921 - DNA, 19 bp, Mus musculus
  siRNA target sequence for Gpr4 (NM_175668.2,1028-1046).
gcgtctacctgatgaactt

SEQ ID NO: 624922 - DNA, 19 bp, Mus musculus
  siRNA target sequence for Gpr4 (NM_175668.2,1082-1100).
cgctgtgggtcgactactt

SEQ ID NO: 624923 - DNA, 19 bp, Mus musculus
  siRNA target sequence for Gpr4 (NM_175668.2,1322-1340).
caccgctcttccatgatga

SEQ ID NO: 624924 - DNA, 19 bp, Mus musculus
  siRNA target sequence for Gpr4 (NM_175668.2,1511-1529).
ccgagcgccaggagaaagt

SEQ ID NO: 624925 - DNA, 19 bp, Mus musculus
  siRNA target sequence for Gpr4 (NM_175668.2,1647-1665).
cttcgaggagcgagtcttt

SEQ ID NO: 624926 - DNA, 19 bp, Mus musculus
  siRNA target sequence for Gpr4 (NM_175668.2,1650-1668).
cgaggagcgagtcttttct

SEQ ID NO: 624927 - DNA, 19 bp, Mus musculus
  siRNA target sequence for Gpr40 (NM_194057.1,50-68).
cgctgggctttccattgaa

SEQ ID NO: 624928 - DNA, 19 bp, Mus musculus
  siRNA target sequence for Gpr40 (NM_194057.1,56-74).
gctttccattgaacttgtt

SEQ ID NO: 624929 - DNA, 19 bp, Mus musculus
  siRNA target sequence for Gpr40 (NM_194057.1,539-557).
gccctgcccgtctcagttt

SEQ ID NO: 624930 - DNA, 19 bp, Mus musculus
  siRNA target sequence for Gpr40 (NM_194057.1,541-559).
cctgcccgtctcagtttct

SEQ ID NO: 624931 - DNA, 19 bp, Mus musculus
  siRNA target sequence for Gpr40 (NM_194057.1,728-746).
ccaatgtggctagtttcat

SEQ ID NO: 624932 - DNA, 19 bp, Mus musculus
  siRNA target sequence for Gpr40 (NM_194057.1,847-865).
cctggacggggaacaatat

SEQ ID NO: 624933 - DNA, 19 bp, Mus musculus
  siRNA target sequence for Gpr40 (NM_194057.1,851-869).
gacggggaacaatatgtgt

SEQ ID NO: 624934 - DNA, 19 bp, Mus musculus
  siRNA target sequence for Gpr43 (NM_146187.2,756-774).
gctggtacctaccaaagat

SEQ ID NO: 624935 - DNA, 19 bp, Mus musculus
  siRNA target sequence for Gpr43 (NM_146187.2,875-893).
ccggtgcagtacaagttat

SEQ ID NO: 624936 - DNA, 19 bp, Mus musculus
  siRNA target sequence for Gpr43 (NM_146187.2,1205-1223).
gctgttgtgacgcttctta

SEQ ID NO: 624937 - DNA, 19 bp, Mus musculus
  siRNA target sequence for Gpr43 (NM_146187.2,1206-1224).
ctgttgtgacgcttcttaa

SEQ ID NO: 624938 - DNA, 19 bp, Mus musculus
  siRNA target sequence for Gpr43 (NM_146187.2,1208-1226).
gttgtgacgcttcttaatt

SEQ ID NO: 624939 - DNA, 19 bp, Mus musculus
  siRNA target sequence for Gpr43 (NM_146187.2,1304-1322).
gaggctgtggtgttcagtt

SEQ ID NO: 624940 - DNA, 19 bp, Mus musculus
  siRNA target sequence for Gpr43 (NM_146187.2,1332-1350).
ccagcctggatccattatt

SEQ ID NO: 624941 - DNA, 19 bp, Mus musculus
  siRNA target sequence for Gpr43 (NM_146187.2,1340-1358).
gatccattattgttctact

SEQ ID NO: 624942 - DNA, 19 bp, Mus musculus
  siRNA target sequence for Gpr44 (NM_009962.2,469-487).
ggcgctatccgacttgtta

SEQ ID NO: 624943 - DNA, 19 bp, Mus musculus
  siRNA target sequence for Gpr44 (NM_009962.2,722-740).
ctggcggtgctcaacacaa

SEQ ID NO: 624944 - DNA, 19 bp, Mus musculus
  siRNA target sequence for Gpr44 (NM_009962.2,724-742).
ggcggtgctcaacacaata

SEQ ID NO: 624945 - DNA, 19 bp, Mus musculus
  siRNA target sequence for Gpr44 (NM_009962.2,776-794).
cttgatggccgcatcatgt

SEQ ID NO: 624946 - DNA, 19 bp, Mus musculus
  siRNA target sequence for Gpr44 (NM_009962.2,863-881).
gccctggcggtcagcaaat

SEQ ID NO: 624947 - DNA, 19 bp, Mus musculus
  siRNA target sequence for Gpr44 (NM_009962.2,898-916).
ggtacctctggccataatt

SEQ ID NO: 624948 - DNA, 19 bp, Mus musculus
  siRNA target sequence for Gpr44 (NM_009962.2,1170-1188).
catgccccgacatgttgta

SEQ ID NO: 624949 - DNA, 19 bp, Mus musculus
  siRNA target sequence for Gpr44 (NM_009962.2,1173-1191).
gccccgacatgttgtacaa

SEQ ID NO: 624950 - DNA, 19 bp, Mus musculus
  siRNA target sequence for Gpr44 (NM_009962.2,1174-1192).
ccccgacatgttgtacaaa

SEQ ID NO: 624951 - DNA, 19 bp, Mus musculus
  siRNA target sequence for Gpr44 (NM_009962.2,1176-1194).
ccgacatgttgtacaaact

SEQ ID NO: 624952 - DNA, 19 bp, Mus musculus
  siRNA target sequence for Gpr49 (NM_010195.1,282-300).
gttacgtcttgctggaaat

SEQ ID NO: 624953 - DNA, 19 bp, Mus musculus
  siRNA target sequence for Gpr49 (NM_010195.1,286-304).
cgtcttgctggaaatgctt

SEQ ID NO: 624954 - DNA, 19 bp, Mus musculus
  siRNA target sequence for Gpr49 (NM_010195.1,344-362).
gcctcaaagtgcttatgct

SEQ ID NO: 624955 - DNA, 19 bp, Mus musculus
  siRNA target sequence for Gpr49 (NM_010195.1,391-409).
gaggaagcgctacagaatt

SEQ ID NO: 624956 - DNA, 19 bp, Mus musculus
  siRNA target sequence for Gpr49 (NM_010195.1,394-412).
gaagcgctacagaatttga

SEQ ID NO: 624957 - DNA, 19 bp, Mus musculus
  siRNA target sequence for Gpr49 (NM_010195.1,397-415).
gcgctacagaatttgagaa

SEQ ID NO: 624958 - DNA, 19 bp, Mus musculus
  siRNA target sequence for Gpr49 (NM_010195.1,576-594).
cttggccctgaacaaaata

SEQ ID NO: 624959 - DNA, 19 bp, Mus musculus
  siRNA target sequence for Gpr49 (NM_010195.1,604-622).
gcagactacgcctttggaa

SEQ ID NO: 624960 - DNA, 19 bp, Mus musculus
  siRNA target sequence for Gpr49 (NM_010195.1,605-623).
cagactacgcctttggaaa

SEQ ID NO: 624961 - DNA, 19 bp, Mus musculus
  siRNA target sequence for Gpr49 (NM_010195.1,639-657).
ggttctgcatctccataat

SEQ ID NO: 624962 - DNA, 19 bp, Mus musculus
  siRNA target sequence for Gpr49 (NM_010195.1,704-722).
gcctggagactttagattt

SEQ ID NO: 624963 - DNA, 19 bp, Mus musculus
  siRNA target sequence for Gpr49 (NM_010195.1,709-727).
gagactttagatttaaatt

SEQ ID NO: 624964 - DNA, 19 bp, Mus musculus
  siRNA target sequence for Gpr49 (NM_010195.1,787-805).
ggattccacagcaacaaca

SEQ ID NO: 624965 - DNA, 19 bp, Mus musculus
  siRNA target sequence for Gpr49 (NM_010195.1,831-849).
cgtaggcaacccttctctt

SEQ ID NO: 624966 - DNA, 19 bp, Mus musculus
  siRNA target sequence for Gpr49 (NM_010195.1,832-850).
gtaggcaacccttctctta

SEQ ID NO: 624967 - DNA, 19 bp, Mus musculus
  siRNA target sequence for Gpr49 (NM_010195.1,835-853).
ggcaacccttctcttatca

SEQ ID NO: 624968 - DNA, 19 bp, Mus musculus
  siRNA target sequence for Gpr49 (NM_010195.1,879-897).
ccaatttgttggagtatct

SEQ ID NO: 624969 - DNA, 19 bp, Mus musculus
  siRNA target sequence for Gpr49 (NM_010195.1,907-925).
catttgcctgaactaagaa

SEQ ID NO: 624970 - DNA, 19 bp, Mus musculus
  siRNA target sequence for Gpr49 (NM_010195.1,943-961).
gcctcgcacattactgaat

SEQ ID NO: 624971 - DNA, 19 bp, Mus musculus
  siRNA target sequence for Gpr49 (NM_010195.1,944-962).
cctcgcacattactgaatt

SEQ ID NO: 624972 - DNA, 19 bp, Mus musculus
  siRNA target sequence for Gpr49 (NM_010195.1,945-963).
ctcgcacattactgaattt

SEQ ID NO: 624973 - DNA, 19 bp, Mus musculus
  siRNA target sequence for Gpr49 (NM_010195.1,948-966).
gcacattactgaatttcct

SEQ ID NO: 624974 - DNA, 19 bp, Mus musculus
  siRNA target sequence for Gpr49 (NM_010195.1,1035-1053).
ggccgtctgtgatcagtta

SEQ ID NO: 624975 - DNA, 19 bp, Mus musculus
  siRNA target sequence for Gpr49 (NM_010195.1,1039-1057).
gtctgtgatcagttaccta

SEQ ID NO: 624976 - DNA, 19 bp, Mus musculus
  siRNA target sequence for Gpr49 (NM_010195.1,1043-1061).
gtgatcagttacctaatct

SEQ ID NO: 624977 - DNA, 19 bp, Mus musculus
  siRNA target sequence for Gpr49 (NM_010195.1,1062-1080).
ccaagtgctagatttgtct

SEQ ID NO: 624978 - DNA, 19 bp, Mus musculus
  siRNA target sequence for Gpr49 (NM_010195.1,1063-1081).
caagtgctagatttgtctt

SEQ ID NO: 624979 - DNA, 19 bp, Mus musculus
  siRNA target sequence for Gpr49 (NM_010195.1,1083-1101).
caacctactcgaagactta

SEQ ID NO: 624980 - DNA, 19 bp, Mus musculus
  siRNA target sequence for Gpr49 (NM_010195.1,1093-1111).
gaagacttacccagtttgt

SEQ ID NO: 624981 - DNA, 19 bp, Mus musculus
  siRNA target sequence for Gpr49 (NM_010195.1,1197-1215).
cctccgatctctgaactta

SEQ ID NO: 624982 - DNA, 19 bp, Mus musculus
  siRNA target sequence for Gpr49 (NM_010195.1,1207-1225).
ctgaacttagcatggaata

SEQ ID NO: 624983 - DNA, 19 bp, Mus musculus
  siRNA target sequence for Gpr49 (NM_010195.1,1209-1227).
gaacttagcatggaataaa

SEQ ID NO: 624984 - DNA, 19 bp, Mus musculus
  siRNA target sequence for Gpr49 (NM_010195.1,1240-1258).
caccccaatgcgttttcta

SEQ ID NO: 624985 - DNA, 19 bp, Mus musculus
  siRNA target sequence for Gpr49 (NM_010195.1,1256-1274).
ctacgttgccgtctctaat

SEQ ID NO: 624986 - DNA, 19 bp, Mus musculus
  siRNA target sequence for Gpr49 (NM_010195.1,1259-1277).
cgttgccgtctctaataaa

SEQ ID NO: 624987 - DNA, 19 bp, Mus musculus
  siRNA target sequence for Gpr49 (NM_010195.1,1278-1296).
gttggacctatcatccaat

SEQ ID NO: 624988 - DNA, 19 bp, Mus musculus
  siRNA target sequence for Gpr49 (NM_010195.1,1311-1329).
ccctgtgactgggttacat

SEQ ID NO: 624989 - DNA, 19 bp, Mus musculus
  siRNA target sequence for Gpr49 (NM_010195.1,1322-1340).
ggttacatggtttaactca

SEQ ID NO: 624990 - DNA, 19 bp, Mus musculus
  siRNA target sequence for Gpr49 (NM_010195.1,1330-1348).
ggtttaactcacttaaaat

SEQ ID NO: 624991 - DNA, 19 bp, Mus musculus
  siRNA target sequence for Gpr49 (NM_010195.1,1354-1372).
gggaaccgagccttacaga

SEQ ID NO: 624992 - DNA, 19 bp, Mus musculus
  siRNA target sequence for Gpr49 (NM_010195.1,1449-1467).
ggggtgtgagaatgtctat

SEQ ID NO: 624993 - DNA, 19 bp, Mus musculus
  siRNA target sequence for Gpr49 (NM_010195.1,1450-1468).
gggtgtgagaatgtctata

SEQ ID NO: 624994 - DNA, 19 bp, Mus musculus
  siRNA target sequence for Gpr49 (NM_010195.1,1451-1469).
ggtgtgagaatgtctataa

SEQ ID NO: 624995 - DNA, 19 bp, Mus musculus
  siRNA target sequence for Gpr49 (NM_010195.1,1452-1470).
gtgtgagaatgtctataaa

SEQ ID NO: 624996 - DNA, 19 bp, Mus musculus
  siRNA target sequence for Gpr49 (NM_010195.1,1475-1493).
ctaaccaatggaataaaga

SEQ ID NO: 624997 - DNA, 19 bp, Mus musculus
  siRNA target sequence for Gpr49 (NM_010195.1,1505-1523).
gtgtggacgaccttcataa

SEQ ID NO: 624998 - DNA, 19 bp, Mus musculus
  siRNA target sequence for Gpr49 (NM_010195.1,1509-1527).
ggacgaccttcataagaaa

SEQ ID NO: 624999 - DNA, 19 bp, Mus musculus
  siRNA target sequence for Gpr49 (NM_010195.1,1530-1548).
cgctgggttatttcaagtt

SEQ ID NO: 625000 - DNA, 19 bp, Mus musculus
  siRNA target sequence for Gpr49 (NM_010195.1,1555-1573).
gagcgggaccttgaagatt

SEQ ID NO: 625001 - DNA, 19 bp, Mus musculus
  siRNA target sequence for Gpr49 (NM_010195.1,1559-1577).
gggaccttgaagatttcct

SEQ ID NO: 625002 - DNA, 19 bp, Mus musculus
  siRNA target sequence for Gpr49 (NM_010195.1,1560-1578).
ggaccttgaagatttccta

SEQ ID NO: 625003 - DNA, 19 bp, Mus musculus
  siRNA target sequence for Gpr49 (NM_010195.1,1759-1777).
ctgtacatctcttccataa

SEQ ID NO: 625004 - DNA, 19 bp, Mus musculus
  siRNA target sequence for Gpr49 (NM_010195.1,1769-1787).
cttccataaagctgctaat

SEQ ID NO: 625005 - DNA, 19 bp, Mus musculus
  siRNA target sequence for Gpr49 (NM_010195.1,1844-1862).
ccgtggatgcattcacttt

SEQ ID NO: 625006 - DNA, 19 bp, Mus musculus
  siRNA target sequence for Gpr49 (NM_010195.1,1901-1919).
gaatcggctgccaaatcgt

SEQ ID NO: 625007 - DNA, 19 bp, Mus musculus
  siRNA target sequence for Gpr49 (NM_010195.1,1998-2016).
caagtgctcttcgaagttt

SEQ ID NO: 625008 - DNA, 19 bp, Mus musculus
  siRNA target sequence for Gpr49 (NM_010195.1,2006-2024).
cttcgaagtttgaagtgaa

SEQ ID NO: 625009 - DNA, 19 bp, Mus musculus
  siRNA target sequence for Gpr49 (NM_010195.1,2039-2057).
gcctgagagcgatcgtttt

SEQ ID NO: 625010 - DNA, 19 bp, Mus musculus
  siRNA target sequence for Gpr49 (NM_010195.1,2043-2061).
gagagcgatcgttttgcta

SEQ ID NO: 625011 - DNA, 19 bp, Mus musculus
  siRNA target sequence for Gpr49 (NM_010195.1,2048-2066).
cgatcgttttgctatgtgt

SEQ ID NO: 625012 - DNA, 19 bp, Mus musculus
  siRNA target sequence for Gpr49 (NM_010195.1,2101-2119).
ctaggaggcagtaagtaca

SEQ ID NO: 625013 - DNA, 19 bp, Mus musculus
  siRNA target sequence for Gpr49 (NM_010195.1,2320-2338).
gccaactgcatcctttact

SEQ ID NO: 625014 - DNA, 19 bp, Mus musculus
  siRNA target sequence for Gpr49 (NM_010195.1,2392-2410).
cctgacgtcattaaattta

SEQ ID NO: 625015 - DNA, 19 bp, Mus musculus
  siRNA target sequence for Gpr49 (NM_010195.1,2393-2411).
ctgacgtcattaaatttat

SEQ ID NO: 625016 - DNA, 19 bp, Mus musculus
  siRNA target sequence for Gpr49 (NM_010195.1,2474-2492).
cccattttaaggaggatat

SEQ ID NO: 625017 - DNA, 19 bp, Mus musculus
  siRNA target sequence for Gpr49 (NM_010195.1,2539-2557).
gcgagtctgctgtccatta

SEQ ID NO: 625018 - DNA, 19 bp, Mus musculus
  siRNA target sequence for Gpr49 (NM_010195.1,2540-2558).
cgagtctgctgtccattaa

SEQ ID NO: 625019 - DNA, 19 bp, Mus musculus
  siRNA target sequence for Gpr49 (NM_010195.1,2589-2607).
gtcaacccaagccttagta

SEQ ID NO: 625020 - DNA, 19 bp, Mus musculus
  siRNA target sequence for Gpr49 (NM_010195.1,2594-2612).
cccaagccttagtatcctt

SEQ ID NO: 625021 - DNA, 19 bp, Mus musculus
  siRNA target sequence for Gpr49 (NM_010195.1,2596-2614).
caagccttagtatccttta

SEQ ID NO: 625022 - DNA, 19 bp, Mus musculus
  siRNA target sequence for Gpr49 (NM_010195.1,2620-2638).
gccagcatagcctatgact

SEQ ID NO: 625023 - DNA, 19 bp, Mus musculus
  siRNA target sequence for Gpr49 (NM_010195.1,2665-2683).
gcttaccccatgactgaaa

SEQ ID NO: 625024 - DNA, 19 bp, Mus musculus
  siRNA target sequence for Gpr50 (NM_010340.1,45-63).
gcaacatgggacctacaaa

SEQ ID NO: 625025 - DNA, 19 bp, Mus musculus
  siRNA target sequence for Gpr50 (NM_010340.1,119-137).
ccgccagctctaatcatct

SEQ ID NO: 625026 - DNA, 19 bp, Mus musculus
  siRNA target sequence for Gpr50 (NM_010340.1,120-138).
cgccagctctaatcatctt

SEQ ID NO: 625027 - DNA, 19 bp, Mus musculus
  siRNA target sequence for Gpr50 (NM_010340.1,126-144).
ctctaatcatcttcatgtt

SEQ ID NO: 625028 - DNA, 19 bp, Mus musculus
  siRNA target sequence for Gpr50 (NM_010340.1,128-146).
ctaatcatcttcatgttct

SEQ ID NO: 625029 - DNA, 19 bp, Mus musculus
  siRNA target sequence for Gpr50 (NM_010340.1,183-201).
ggaactccatggtcatttt

SEQ ID NO: 625030 - DNA, 19 bp, Mus musculus
  siRNA target sequence for Gpr50 (NM_010340.1,383-401).
gtagtcggttccatcttca

SEQ ID NO: 625031 - DNA, 19 bp, Mus musculus
  siRNA target sequence for Gpr50 (NM_010340.1,388-406).
cggttccatcttcaacatt

SEQ ID NO: 625032 - DNA, 19 bp, Mus musculus
  siRNA target sequence for Gpr50 (NM_010340.1,452-470).
caatacaagcggatcttca

SEQ ID NO: 625033 - DNA, 19 bp, Mus musculus
  siRNA target sequence for Gpr50 (NM_010340.1,475-493).
gcgcaacacttgcatctat

SEQ ID NO: 625034 - DNA, 19 bp, Mus musculus
  siRNA target sequence for Gpr50 (NM_010340.1,477-495).
gcaacacttgcatctatct

SEQ ID NO: 625035 - DNA, 19 bp, Mus musculus
  siRNA target sequence for Gpr50 (NM_010340.1,524-542).
gctgtcctgcctaacatgt

SEQ ID NO: 625036 - DNA, 19 bp, Mus musculus
  siRNA target sequence for Gpr50 (NM_010340.1,527-545).
gtcctgcctaacatgtaca

SEQ ID NO: 625037 - DNA, 19 bp, Mus musculus
  siRNA target sequence for Gpr50 (NM_010340.1,662-680).
ggttattgctacacgaaaa

SEQ ID NO: 625038 - DNA, 19 bp, Mus musculus
  siRNA target sequence for Gpr50 (NM_010340.1,736-754).
gtttgctgaggttcgaaat

SEQ ID NO: 625039 - DNA, 19 bp, Mus musculus
  siRNA target sequence for Gpr50 (NM_010340.1,743-761).
gaggttcgaaattttctaa

SEQ ID NO: 625040 - DNA, 19 bp, Mus musculus
  siRNA target sequence for Gpr50 (NM_010340.1,933-951).
gtatcctcaatgagagttt

SEQ ID NO: 625041 - DNA, 19 bp, Mus musculus
  siRNA target sequence for Gpr50 (NM_010340.1,944-962).
gagagtttccgaagagaat

SEQ ID NO: 625042 - DNA, 19 bp, Mus musculus
  siRNA target sequence for Gpr50 (NM_010340.1,989-1007).
caccctatcctgttcatct

SEQ ID NO: 625043 - DNA, 19 bp, Mus musculus
  siRNA target sequence for Gpr50 (NM_010340.1,1008-1026).
ctcacctcatcagtgatat

SEQ ID NO: 625044 - DNA, 19 bp, Mus musculus
  siRNA target sequence for Gpr50 (NM_010340.1,1138-1156).
gaacgtccggaatgttcta

SEQ ID NO: 625045 - DNA, 19 bp, Mus musculus
  siRNA target sequence for Gpr50 (NM_010340.1,1211-1229).
ccccaaaccaggtctactt

SEQ ID NO: 625046 - DNA, 19 bp, Mus musculus
  siRNA target sequence for Gpr50 (NM_010340.1,1213-1231).
ccaaaccaggtctacttct

SEQ ID NO: 625047 - DNA, 19 bp, Mus musculus
  siRNA target sequence for Gpr50 (NM_010340.1,1311-1329).
cctcctctgtccattgcaa

SEQ ID NO: 625048 - DNA, 19 bp, Mus musculus
  siRNA target sequence for Gpr50 (NM_010340.1,1483-1501).
ggctggctacattaaatct

SEQ ID NO: 625049 - DNA, 19 bp, Mus musculus
  siRNA target sequence for Gpr50 (NM_010340.1,1518-1536).
ccaccaccactgttgacta

SEQ ID NO: 625050 - DNA, 19 bp, Mus musculus
  siRNA target sequence for Gpr50 (NM_010340.1,1738-1756).
caaggtcgtgcttattgat

SEQ ID NO: 625051 - DNA, 19 bp, Mus musculus
  siRNA target sequence for Gpr50 (NM_010340.1,1741-1759).
ggtcgtgcttattgatgat

SEQ ID NO: 625052 - DNA, 19 bp, Mus musculus
  siRNA target sequence for Gpr50 (NM_010340.1,1744-1762).
cgtgcttattgatgatgat

SEQ ID NO: 625053 - DNA, 19 bp, Mus musculus
  siRNA target sequence for Gpr50 (NM_010340.1,1745-1763).
gtgcttattgatgatgatt

SEQ ID NO: 625054 - DNA, 19 bp, Mus musculus
  siRNA target sequence for Gpr61 (NM_175470.2,879-897).
gccctccgaaaatttgttt

SEQ ID NO: 625055 - DNA, 19 bp, Mus musculus
  siRNA target sequence for Gpr61 (NM_175470.2,880-898).
ccctccgaaaatttgtttt

SEQ ID NO: 625056 - DNA, 19 bp, Mus musculus
  siRNA target sequence for Gpr61 (NM_175470.2,1022-1040).
gttcctgagcgtttgcttt

SEQ ID NO: 625057 - DNA, 19 bp, Mus musculus
  siRNA target sequence for Gpr61 (NM_175470.2,1041-1059).
gtcagcctggccatccttt

SEQ ID NO: 625058 - DNA, 19 bp, Mus musculus
  siRNA target sequence for Gpr61 (NM_175470.2,1343-1361).
ggtctactgcagcatgttt

SEQ ID NO: 625059 - DNA, 19 bp, Mus musculus
  siRNA target sequence for Gpr61 (NM_175470.2,1564-1582).
ggttgccctacttctcttt

SEQ ID NO: 625060 - DNA, 19 bp, Mus musculus
  siRNA target sequence for Gpr61 (NM_175470.2,1653-1671).
ggctacttttgcttcactt

SEQ ID NO: 625061 - DNA, 19 bp, Mus musculus
  siRNA target sequence for Gpr61 (NM_175470.2,1714-1732).
gcgagcttagcaaacagtt

SEQ ID NO: 625062 - DNA, 19 bp, Mus musculus
  siRNA target sequence for Gpr61 (NM_175470.2,1715-1733).
cgagcttagcaaacagttt

SEQ ID NO: 625063 - DNA, 19 bp, Mus musculus
  siRNA target sequence for Gpr61 (NM_175470.2,1719-1737).
cttagcaaacagtttgtct

SEQ ID NO: 625064 - DNA, 19 bp, Mus musculus
  siRNA target sequence for Gpr61 (NM_175470.2,1789-1807).
gctccattgaggagaattt

SEQ ID NO: 625065 - DNA, 19 bp, Mus musculus
  siRNA target sequence for Gpr61 (NM_175470.2,1876-1894).
caccccctgttgttgactt

SEQ ID NO: 625066 - DNA, 19 bp, Mus musculus
  siRNA target sequence for Gpr61 (NM_175470.2,1881-1899).
cctgttgttgactttcgaa

SEQ ID NO: 625067 - DNA, 19 bp, Mus musculus
  siRNA target sequence for Gpr63 (NM_030733.2,477-495).
ccaacacgacgtttgtagt

SEQ ID NO: 625068 - DNA, 19 bp, Mus musculus
  siRNA target sequence for Gpr63 (NM_030733.2,483-501).
cgacgtttgtagtctttga

SEQ ID NO: 625069 - DNA, 19 bp, Mus musculus
  siRNA target sequence for Gpr63 (NM_030733.2,484-502).
gacgtttgtagtctttgaa

SEQ ID NO: 625070 - DNA, 19 bp, Mus musculus
  siRNA target sequence for Gpr63 (NM_030733.2,500-518).
gaaaactcccacgtgaata

SEQ ID NO: 625071 - DNA, 19 bp, Mus musculus
  siRNA target sequence for Gpr63 (NM_030733.2,554-572).
ggtccgctgcttagataca

SEQ ID NO: 625072 - DNA, 19 bp, Mus musculus
  siRNA target sequence for Gpr63 (NM_030733.2,567-585).
gatacagccttgaaaccat

SEQ ID NO: 625073 - DNA, 19 bp, Mus musculus
  siRNA target sequence for Gpr63 (NM_030733.2,583-601).
catgactagccctggattt

SEQ ID NO: 625074 - DNA, 19 bp, Mus musculus
  siRNA target sequence for Gpr63 (NM_030733.2,668-686).
gcggttcagattatccttt

SEQ ID NO: 625075 - DNA, 19 bp, Mus musculus
  siRNA target sequence for Gpr63 (NM_030733.2,682-700).
cctttcagccataatgata

SEQ ID NO: 625076 - DNA, 19 bp, Mus musculus
  siRNA target sequence for Gpr63 (NM_030733.2,741-759).
gcctcatggtgtaccaaaa

SEQ ID NO: 625077 - DNA, 19 bp, Mus musculus
  siRNA target sequence for Gpr63 (NM_030733.2,745-763).
catggtgtaccaaaaagct

SEQ ID NO: 625078 - DNA, 19 bp, Mus musculus
  siRNA target sequence for Gpr63 (NM_030733.2,764-782).
gccatgcgttctgcaatta

SEQ ID NO: 625079 - DNA, 19 bp, Mus musculus
  siRNA target sequence for Gpr63 (NM_030733.2,839-857).
ccctttgctctggtaacta

SEQ ID NO: 625080 - DNA, 19 bp, Mus musculus
  siRNA target sequence for Gpr63 (NM_030733.2,840-858).
cctttgctctggtaactat

SEQ ID NO: 625081 - DNA, 19 bp, Mus musculus
  siRNA target sequence for Gpr63 (NM_030733.2,845-863).
gctctggtaactattctta

SEQ ID NO: 625082 - DNA, 19 bp, Mus musculus
  siRNA target sequence for Gpr63 (NM_030733.2,848-866).
ctggtaactattcttacta

SEQ ID NO: 625083 - DNA, 19 bp, Mus musculus
  siRNA target sequence for Gpr63 (NM_030733.2,870-888).
gatggatatttgggaaatt

SEQ ID NO: 625084 - DNA, 19 bp, Mus musculus
  siRNA target sequence for Gpr63 (NM_030733.2,895-913).
ccggttgtcggctatgttt

SEQ ID NO: 625085 - DNA, 19 bp, Mus musculus
  siRNA target sequence for Gpr63 (NM_030733.2,896-914).
cggttgtcggctatgtttt

SEQ ID NO: 625086 - DNA, 19 bp, Mus musculus
  siRNA target sequence for Gpr63 (NM_030733.2,949-967).
gctcattattagtatcgat

SEQ ID NO: 625087 - DNA, 19 bp, Mus musculus
  siRNA target sequence for Gpr63 (NM_030733.2,950-968).
ctcattattagtatcgata

SEQ ID NO: 625088 - DNA, 19 bp, Mus musculus
  siRNA target sequence for Gpr63 (NM_030733.2,960-978).
gtatcgataggtttctgat

SEQ ID NO: 625089 - DNA, 19 bp, Mus musculus
  siRNA target sequence for Gpr63 (NM_030733.2,964-982).
cgataggtttctgattata

SEQ ID NO: 625090 - DNA, 19 bp, Mus musculus
  siRNA target sequence for Gpr63 (NM_030733.2,988-1006).
gaggcaagataagctaaat

SEQ ID NO: 625091 - DNA, 19 bp, Mus musculus
  siRNA target sequence for Gpr63 (NM_030733.2,1085-1103).
cctgatctgcagatacctt

SEQ ID NO: 625092 - DNA, 19 bp, Mus musculus
  siRNA target sequence for Gpr63 (NM_030733.2,1143-1161).
ctggataccaggcttatgt

SEQ ID NO: 625093 - DNA, 19 bp, Mus musculus
  siRNA target sequence for Gpr63 (NM_030733.2,1146-1164).
gataccaggcttatgtgat

SEQ ID NO: 625094 - DNA, 19 bp, Mus musculus
  siRNA target sequence for Gpr63 (NM_030733.2,1153-1171).
ggcttatgtgattttgatt

SEQ ID NO: 625095 - DNA, 19 bp, Mus musculus
  siRNA target sequence for Gpr63 (NM_030733.2,1193-1211).
cctttcctggtcatattat

SEQ ID NO: 625096 - DNA, 19 bp, Mus musculus
  siRNA target sequence for Gpr63 (NM_030733.2,1199-1217).
ctggtcatattatattcat

SEQ ID NO: 625097 - DNA, 19 bp, Mus musculus
  siRNA target sequence for Gpr63 (NM_030733.2,1231-1249).
caatacccttcggcataat

SEQ ID NO: 625098 - DNA, 19 bp, Mus musculus
  siRNA target sequence for Gpr63 (NM_030733.2,1251-1269).
ccttgaggattcatagcta

SEQ ID NO: 625099 - DNA, 19 bp, Mus musculus
  siRNA target sequence for Gpr63 (NM_030733.2,1319-1337).
ctacagagacccttccaaa

SEQ ID NO: 625100 - DNA, 19 bp, Mus musculus
  siRNA target sequence for Gpr63 (NM_030733.2,1341-1359).
gcatcgacatgggctttaa

SEQ ID NO: 625101 - DNA, 19 bp, Mus musculus
  siRNA target sequence for Gpr63 (NM_030733.2,1342-1360).
catcgacatgggctttaaa

SEQ ID NO: 625102 - DNA, 19 bp, Mus musculus
  siRNA target sequence for Gpr63 (NM_030733.2,1345-1363).
cgacatgggctttaaaaca

SEQ ID NO: 625103 - DNA, 19 bp, Mus musculus
  siRNA target sequence for Gpr63 (NM_030733.2,1452-1470).
gtaagcacttctactatca

SEQ ID NO: 625104 - DNA, 19 bp, Mus musculus
  siRNA target sequence for Gpr63 (NM_030733.2,1471-1489).
gcacaacttctttgagatt

SEQ ID NO: 625105 - DNA, 19 bp, Mus musculus
  siRNA target sequence for Gpr63 (NM_030733.2,1472-1490).
cacaacttctttgagatta

SEQ ID NO: 625106 - DNA, 19 bp, Mus musculus
  siRNA target sequence for Gpr63 (NM_030733.2,1526-1544).
gcattgaacccactgatat

SEQ ID NO: 625107 - DNA, 19 bp, Mus musculus
  siRNA target sequence for Gpr63 (NM_030733.2,1527-1545).
cattgaacccactgatata

SEQ ID NO: 625108 - DNA, 19 bp, Mus musculus
  siRNA target sequence for Gpr63 (NM_030733.2,1567-1585).
ccacgatgcctgcttagat

SEQ ID NO: 625109 - DNA, 19 bp, Mus musculus
  siRNA target sequence for Gpr63 (NM_030733.2,1568-1586).
cacgatgcctgcttagata

SEQ ID NO: 625110 - DNA, 19 bp, Mus musculus
  siRNA target sequence for Gpr63 (NM_030733.2,1571-1589).
gatgcctgcttagatatga

SEQ ID NO: 625111 - DNA, 19 bp, Mus musculus
  siRNA target sequence for Gpr68 (NM_175493.2,333-351).
ggggaacatcactacagaa

SEQ ID NO: 625112 - DNA, 19 bp, Mus musculus
  siRNA target sequence for Gpr68 (NM_175493.2,334-352).
gggaacatcactacagaaa

SEQ ID NO: 625113 - DNA, 19 bp, Mus musculus
  siRNA target sequence for Gpr68 (NM_175493.2,627-645).
cctcctctatgagaacatt

SEQ ID NO: 625114 - DNA, 19 bp, Mus musculus
  siRNA target sequence for Gpr68 (NM_175493.2,872-890).
ggcagcgtagcatcaacta

SEQ ID NO: 625115 - DNA, 19 bp, Mus musculus
  siRNA target sequence for Gpr68 (NM_175493.2,874-892).
cagcgtagcatcaactact

SEQ ID NO: 625116 - DNA, 19 bp, Mus musculus
  siRNA target sequence for Gpr68 (NM_175493.2,1333-1351).
ggcgaggaacctgaattgt

SEQ ID NO: 625117 - DNA, 19 bp, Mus musculus
  siRNA target sequence for Gpr68 (NM_175493.2,1334-1352).
gcgaggaacctgaattgtt

SEQ ID NO: 625118 - DNA, 19 bp, Mus musculus
  siRNA target sequence for Gpr68 (NM_175493.2,1335-1353).
cgaggaacctgaattgtta

SEQ ID NO: 625119 - DNA, 19 bp, Mus musculus
  siRNA target sequence for Gpr68 (NM_175493.2,1339-1357).
gaacctgaattgttaacca

SEQ ID NO: 625120 - DNA, 19 bp, Mus musculus
  siRNA target sequence for Gpr73 (NM_021381.3,331-349).
caaaccggctcgttaccat

SEQ ID NO: 625121 - DNA, 19 bp, Mus musculus
  siRNA target sequence for Gpr73 (NM_021381.3,336-354).
cggctcgttaccattcact

SEQ ID NO: 625122 - DNA, 19 bp, Mus musculus
  siRNA target sequence for Gpr73 (NM_021381.3,337-355).
ggctcgttaccattcactt

SEQ ID NO: 625123 - DNA, 19 bp, Mus musculus
  siRNA target sequence for Gpr73 (NM_021381.3,338-356).
gctcgttaccattcacttt

SEQ ID NO: 625124 - DNA, 19 bp, Mus musculus
  siRNA target sequence for Gpr73 (NM_021381.3,391-409).
gaggaagatgtgaccaatt

SEQ ID NO: 625125 - DNA, 19 bp, Mus musculus
  siRNA target sequence for Gpr73 (NM_021381.3,404-422).
ccaattctcggactttctt

SEQ ID NO: 625126 - DNA, 19 bp, Mus musculus
  siRNA target sequence for Gpr73 (NM_021381.3,405-423).
caattctcggactttcttt

SEQ ID NO: 625127 - DNA, 19 bp, Mus musculus
  siRNA target sequence for Gpr73 (NM_021381.3,473-491).
gtggcatcggcaacttcat

SEQ ID NO: 625128 - DNA, 19 bp, Mus musculus
  siRNA target sequence for Gpr73 (NM_021381.3,477-495).
catcggcaacttcatcttt

SEQ ID NO: 625129 - DNA, 19 bp, Mus musculus
  siRNA target sequence for Gpr73 (NM_021381.3,549-567).
cgccaacctggccatttca

SEQ ID NO: 625130 - DNA, 19 bp, Mus musculus
  siRNA target sequence for Gpr73 (NM_021381.3,656-674).
gcgcctctgtcaactactt

SEQ ID NO: 625131 - DNA, 19 bp, Mus musculus
  siRNA target sequence for Gpr73 (NM_021381.3,754-772).
ctgagaccgcggatgaagt

SEQ ID NO: 625132 - DNA, 19 bp, Mus musculus
  siRNA target sequence for Gpr73 (NM_021381.3,760-778).
ccgcggatgaagtgtcaaa

SEQ ID NO: 625133 - DNA, 19 bp, Mus musculus
  siRNA target sequence for Gpr73 (NM_021381.3,762-780).
gcggatgaagtgtcaaaca

SEQ ID NO: 625134 - DNA, 19 bp, Mus musculus
  siRNA target sequence for Gpr73 (NM_021381.3,1374-1392).
caggaccacgggaatacct

SEQ ID NO: 625135 - DNA, 19 bp, Mus musculus
  siRNA target sequence for Gpr73l1 (NM_144944.2,287-305).
gaacagaaacactagcttt

SEQ ID NO: 625136 - DNA, 19 bp, Mus musculus
  siRNA target sequence for Gpr73l1 (NM_144944.2,301-319).
gctttgcaccagacttgaa

SEQ ID NO: 625137 - DNA, 19 bp, Mus musculus
  siRNA target sequence for Gpr73l1 (NM_144944.2,409-427).
ccttctttgcagccaaaat

SEQ ID NO: 625138 - DNA, 19 bp, Mus musculus
  siRNA target sequence for Gpr73l1 (NM_144944.2,464-482).
ctgcggcattggcaacttt

SEQ ID NO: 625139 - DNA, 19 bp, Mus musculus
  siRNA target sequence for Gpr73l1 (NM_144944.2,749-767).
gaaaccacggatgaattat

SEQ ID NO: 625140 - DNA, 19 bp, Mus musculus
  siRNA target sequence for Gpr73l1 (NM_144944.2,753-771).
ccacggatgaattatcaga

SEQ ID NO: 625141 - DNA, 19 bp, Mus musculus
  siRNA target sequence for Gpr73l1 (NM_144944.2,844-862).
cagaaaccatcctcgttat

SEQ ID NO: 625142 - DNA, 19 bp, Mus musculus
  siRNA target sequence for Gpr73l1 (NM_144944.2,854-872).
cctcgttatcgtcaagaat

SEQ ID NO: 625143 - DNA, 19 bp, Mus musculus
  siRNA target sequence for Gpr73l1 (NM_144944.2,857-875).
cgttatcgtcaagaatcaa

SEQ ID NO: 625144 - DNA, 19 bp, Mus musculus
  siRNA target sequence for Gpr73l1 (NM_144944.2,911-929).
ccagcagctctactacaaa

SEQ ID NO: 625145 - DNA, 19 bp, Mus musculus
  siRNA target sequence for Gpr73l1 (NM_144944.2,912-930).
cagcagctctactacaaat

SEQ ID NO: 625146 - DNA, 19 bp, Mus musculus
  siRNA target sequence for Gpr73l1 (NM_144944.2,966-984).
ggtcccgtggtcactatga

SEQ ID NO: 625147 - DNA, 19 bp, Mus musculus
  siRNA target sequence for Gpr73l1 (NM_144944.2,1134-1152).
ccgttctatggctttacca

SEQ ID NO: 625148 - DNA, 19 bp, Mus musculus
  siRNA target sequence for Gpr73l1 (NM_144944.2,1135-1153).
cgttctatggctttaccat

SEQ ID NO: 625149 - DNA, 19 bp, Mus musculus
  siRNA target sequence for Gpr73l1 (NM_144944.2,1150-1168).
ccatagtgcgagacttctt

SEQ ID NO: 625150 - DNA, 19 bp, Mus musculus
  siRNA target sequence for Gpr73l1 (NM_144944.2,1398-1416).
gtggattgtatcagactaa

SEQ ID NO: 625151 - DNA, 19 bp, Mus musculus
  siRNA target sequence for Gpr75 (NM_175490.2,204-222).
ggggaagcagcctaattgt

SEQ ID NO: 625152 - DNA, 19 bp, Mus musculus
  siRNA target sequence for Gpr75 (NM_175490.2,205-223).
gggaagcagcctaattgta

SEQ ID NO: 625153 - DNA, 19 bp, Mus musculus
  siRNA target sequence for Gpr75 (NM_175490.2,207-225).
gaagcagcctaattgtaca

SEQ ID NO: 625154 - DNA, 19 bp, Mus musculus
  siRNA target sequence for Gpr75 (NM_175490.2,262-280).
ctctgggcgaccagcttta

SEQ ID NO: 625155 - DNA, 19 bp, Mus musculus
  siRNA target sequence for Gpr75 (NM_175490.2,264-282).
ctgggcgaccagctttaca

SEQ ID NO: 625156 - DNA, 19 bp, Mus musculus
  siRNA target sequence for Gpr75 (NM_175490.2,266-284).
gggcgaccagctttacact

SEQ ID NO: 625157 - DNA, 19 bp, Mus musculus
  siRNA target sequence for Gpr75 (NM_175490.2,267-285).
ggcgaccagctttacactt

SEQ ID NO: 625158 - DNA, 19 bp, Mus musculus
  siRNA target sequence for Gpr75 (NM_175490.2,328-346).
ctccccatgtccagtctta

SEQ ID NO: 625159 - DNA, 19 bp, Mus musculus
  siRNA target sequence for Gpr75 (NM_175490.2,374-392).
ctctgtatgttgttgactt

SEQ ID NO: 625160 - DNA, 19 bp, Mus musculus
  siRNA target sequence for Gpr75 (NM_175490.2,573-591).
gtataggaaccagaattat

SEQ ID NO: 625161 - DNA, 19 bp, Mus musculus
  siRNA target sequence for Gpr75 (NM_175490.2,616-634).
catggatacactaagaata

SEQ ID NO: 625162 - DNA, 19 bp, Mus musculus
  siRNA target sequence for Gpr75 (NM_175490.2,676-694).
gtatcagccatcaacttct

SEQ ID NO: 625163 - DNA, 19 bp, Mus musculus
  siRNA target sequence for Gpr75 (NM_175490.2,695-713).
ctactgccaaggattccaa

SEQ ID NO: 625164 - DNA, 19 bp, Mus musculus
  siRNA target sequence for Gpr75 (NM_175490.2,773-791).
ggatttccctggtgcaaat

SEQ ID NO: 625165 - DNA, 19 bp, Mus musculus
  siRNA target sequence for Gpr75 (NM_175490.2,837-855).
gtttggatttactctgata

SEQ ID NO: 625166 - DNA, 19 bp, Mus musculus
  siRNA target sequence for Gpr75 (NM_175490.2,842-860).
gatttactctgatattttt

SEQ ID NO: 625167 - DNA, 19 bp, Mus musculus
  siRNA target sequence for Gpr75 (NM_175490.2,869-887).
gattaaatccttttatata

SEQ ID NO: 625168 - DNA, 19 bp, Mus musculus
  siRNA target sequence for Gpr75 (NM_175490.2,999-1017).
gaaccttgaaatcaataga

SEQ ID NO: 625169 - DNA, 19 bp, Mus musculus
  siRNA target sequence for Gpr75 (NM_175490.2,1123-1141).
gcagcgagtcccaaagttt

SEQ ID NO: 625170 - DNA, 19 bp, Mus musculus
  siRNA target sequence for Gpr75 (NM_175490.2,1190-1208).
ctaggattgaaccttacta

SEQ ID NO: 625171 - DNA, 19 bp, Mus musculus
  siRNA target sequence for Gpr75 (NM_175490.2,1201-1219).
ccttactatagcatctata

SEQ ID NO: 625172 - DNA, 19 bp, Mus musculus
  siRNA target sequence for Gpr75 (NM_175490.2,1308-1326).
ctattacaccaccaatgat

SEQ ID NO: 625173 - DNA, 19 bp, Mus musculus
  siRNA target sequence for Gpr75 (NM_175490.2,1344-1362).
cagcacgtcagcaaaacaa

SEQ ID NO: 625174 - DNA, 19 bp, Mus musculus
  siRNA target sequence for Gpr75 (NM_175490.2,1350-1368).
gtcagcaaaacaaattcct

SEQ ID NO: 625175 - DNA, 19 bp, Mus musculus
  siRNA target sequence for Gpr75 (NM_175490.2,1352-1370).
cagcaaaacaaattcctat

SEQ ID NO: 625176 - DNA, 19 bp, Mus musculus
  siRNA target sequence for Gpr81 (NM_175520.2,541-559).
ctggaagtcaagcactatt

SEQ ID NO: 625177 - DNA, 19 bp, Mus musculus
  siRNA target sequence for Gpr81 (NM_175520.2,547-565).
gtcaagcactatttacctt

SEQ ID NO: 625178 - DNA, 19 bp, Mus musculus
  siRNA target sequence for Gpr81 (NM_175520.2,552-570).
gcactatttaccttttcaa

SEQ ID NO: 625179 - DNA, 19 bp, Mus musculus
  siRNA target sequence for Gpr81 (NM_175520.2,582-600).
ccgattttctcctcatgat

SEQ ID NO: 625180 - DNA, 19 bp, Mus musculus
  siRNA target sequence for Gpr81 (NM_175520.2,609-627).
cccttcggacagactacta

SEQ ID NO: 625181 - DNA, 19 bp, Mus musculus
  siRNA target sequence for Gpr81 (NM_175520.2,835-853).
cttggggactgtgtatctt

SEQ ID NO: 625182 - DNA, 19 bp, Mus musculus
  siRNA target sequence for Gpr81 (NM_175520.2,1219-1237).
gctggatccccttgtatat

SEQ ID NO: 625183 - DNA, 19 bp, Mus musculus
  siRNA target sequence for Gpr81 (NM_175520.2,1220-1238).
ctggatccccttgtatatt

SEQ ID NO: 625184 - DNA, 19 bp, Mus musculus
  siRNA target sequence for Gpr81 (NM_175520.2,1223-1241).
gatccccttgtatattact

SEQ ID NO: 625185 - DNA, 19 bp, Mus musculus
  siRNA target sequence for Gpr81 (NM_175520.2,1229-1247).
cttgtatattacttctcaa

SEQ ID NO: 625186 - DNA, 19 bp, Mus musculus
  siRNA target sequence for Gpr81 (NM_175520.2,1334-1352).
gaagagatgccaatttcga

SEQ ID NO: 625187 - DNA, 19 bp, Mus musculus
  siRNA target sequence for Gpr81 (NM_175520.2,1372-1390).
catcgatggggcaaatcgt

SEQ ID NO: 625188 - DNA, 19 bp, Mus musculus
  siRNA target sequence for Gpr82 (NM_175669.2,329-347).
gctttaccggtcacttaca

SEQ ID NO: 625189 - DNA, 19 bp, Mus musculus
  siRNA target sequence for Gpr82 (NM_175669.2,330-348).
ctttaccggtcacttacat

SEQ ID NO: 625190 - DNA, 19 bp, Mus musculus
  siRNA target sequence for Gpr82 (NM_175669.2,539-557).
caatgcagactggtcaatt

SEQ ID NO: 625191 - DNA, 19 bp, Mus musculus
  siRNA target sequence for Gpr82 (NM_175669.2,562-580).
gggaactctttctatgcat

SEQ ID NO: 625192 - DNA, 19 bp, Mus musculus
  siRNA target sequence for Gpr82 (NM_175669.2,573-591).
ctatgcatgtaagtatgtt

SEQ ID NO: 625193 - DNA, 19 bp, Mus musculus
  siRNA target sequence for Gpr82 (NM_175669.2,620-638).
gccataagccgctatgcta

SEQ ID NO: 625194 - DNA, 19 bp, Mus musculus
  siRNA target sequence for Gpr82 (NM_175669.2,627-645).
gccgctatgctaccttaat

SEQ ID NO: 625195 - DNA, 19 bp, Mus musculus
  siRNA target sequence for Gpr82 (NM_175669.2,629-647).
cgctatgctaccttaatga

SEQ ID NO: 625196 - DNA, 19 bp, Mus musculus
  siRNA target sequence for Gpr82 (NM_175669.2,630-648).
gctatgctaccttaatgaa

SEQ ID NO: 625197 - DNA, 19 bp, Mus musculus
  siRNA target sequence for Gpr82 (NM_175669.2,631-649).
ctatgctaccttaatgaaa

SEQ ID NO: 625198 - DNA, 19 bp, Mus musculus
  siRNA target sequence for Gpr82 (NM_175669.2,636-654).
ctaccttaatgaaaaagga

SEQ ID NO: 625199 - DNA, 19 bp, Mus musculus
  siRNA target sequence for Gpr82 (NM_175669.2,672-690).
cctcatgctacgagagaat

SEQ ID NO: 625200 - DNA, 19 bp, Mus musculus
  siRNA target sequence for Gpr82 (NM_175669.2,675-693).
catgctacgagagaatgtt

SEQ ID NO: 625201 - DNA, 19 bp, Mus musculus
  siRNA target sequence for Gpr82 (NM_175669.2,678-696).
gctacgagagaatgtttta

SEQ ID NO: 625202 - DNA, 19 bp, Mus musculus
  siRNA target sequence for Gpr82 (NM_175669.2,682-700).
cgagagaatgttttatggt

SEQ ID NO: 625203 - DNA, 19 bp, Mus musculus
  siRNA target sequence for Gpr82 (NM_175669.2,698-716).
ggtcacgtactgaaaagat

SEQ ID NO: 625204 - DNA, 19 bp, Mus musculus
  siRNA target sequence for Gpr82 (NM_175669.2,699-717).
gtcacgtactgaaaagatt

SEQ ID NO: 625205 - DNA, 19 bp, Mus musculus
  siRNA target sequence for Gpr82 (NM_175669.2,759-777).
ggggagttgtgcttgtcat

SEQ ID NO: 625206 - DNA, 19 bp, Mus musculus
  siRNA target sequence for Gpr82 (NM_175669.2,760-778).
gggagttgtgcttgtcata

SEQ ID NO: 625207 - DNA, 19 bp, Mus musculus
  siRNA target sequence for Gpr82 (NM_175669.2,761-779).
ggagttgtgcttgtcataa

SEQ ID NO: 625208 - DNA, 19 bp, Mus musculus
  siRNA target sequence for Gpr82 (NM_175669.2,769-787).
gcttgtcataattattcca

SEQ ID NO: 625209 - DNA, 19 bp, Mus musculus
  siRNA target sequence for Gpr82 (NM_175669.2,896-914).
ggaaccacatttattggat

SEQ ID NO: 625210 - DNA, 19 bp, Mus musculus
  siRNA target sequence for Gpr82 (NM_175669.2,926-944).
gtagtagtgacatcatact

SEQ ID NO: 625211 - DNA, 19 bp, Mus musculus
  siRNA target sequence for Gpr82 (NM_175669.2,929-947).
gtagtgacatcatactatt

SEQ ID NO: 625212 - DNA, 19 bp, Mus musculus
  siRNA target sequence for Gpr82 (NM_175669.2,984-1002).
cctccattaccgagaaaga

SEQ ID NO: 625213 - DNA, 19 bp, Mus musculus
  siRNA target sequence for Gpr82 (NM_175669.2,987-1005).
ccattaccgagaaagattt

SEQ ID NO: 625214 - DNA, 19 bp, Mus musculus
  siRNA target sequence for Gpr82 (NM_175669.2,1042-1060).
ccaggtcctcctagtagtt

SEQ ID NO: 625215 - DNA, 19 bp, Mus musculus
  siRNA target sequence for Gpr82 (NM_175669.2,1048-1066).
cctcctagtagtttgcttt

SEQ ID NO: 625216 - DNA, 19 bp, Mus musculus
  siRNA target sequence for Gpr82 (NM_175669.2,1188-1206).
gtagtacagaccccattat

SEQ ID NO: 625217 - DNA, 19 bp, Mus musculus
  siRNA target sequence for Gpr82 (NM_175669.2,1196-1214).
gaccccattatatttcttt

SEQ ID NO: 625218 - DNA, 19 bp, Mus musculus
  siRNA target sequence for Gpr82 (NM_175669.2,1231-1249).
caagaagacactatatggt

SEQ ID NO: 625219 - DNA, 19 bp, Mus musculus
  siRNA target sequence for Gpr82 (NM_175669.2,1241-1259).
ctatatggtctccttacaa

SEQ ID NO: 625220 - DNA, 19 bp, Mus musculus
  siRNA target sequence for Gpr83 (NM_010287.1,413-431).
ggccaactacactttctct

SEQ ID NO: 625221 - DNA, 19 bp, Mus musculus
  siRNA target sequence for Gpr83 (NM_010287.1,446-464).
cgtgggcaggagacgttat

SEQ ID NO: 625222 - DNA, 19 bp, Mus musculus
  siRNA target sequence for Gpr83 (NM_010287.1,501-519).
ctcatcgtggcctactcat

SEQ ID NO: 625223 - DNA, 19 bp, Mus musculus
  siRNA target sequence for Gpr83 (NM_010287.1,621-639).
gcagtggcggacatcatga

SEQ ID NO: 625224 - DNA, 19 bp, Mus musculus
  siRNA target sequence for Gpr83 (NM_010287.1,622-640).
cagtggcggacatcatgat

SEQ ID NO: 625225 - DNA, 19 bp, Mus musculus
  siRNA target sequence for Gpr83 (NM_010287.1,627-645).
gcggacatcatgatcacat

SEQ ID NO: 625226 - DNA, 19 bp, Mus musculus
  siRNA target sequence for Gpr83 (NM_010287.1,648-666).
ctcaacacgcccttcactt

SEQ ID NO: 625227 - DNA, 19 bp, Mus musculus
  siRNA target sequence for Gpr83 (NM_010287.1,664-682).
ctttggtccgctttgtgaa

SEQ ID NO: 625228 - DNA, 19 bp, Mus musculus
  siRNA target sequence for Gpr83 (NM_010287.1,827-845).
catcaccaagggtgtcata

SEQ ID NO: 625229 - DNA, 19 bp, Mus musculus
  siRNA target sequence for Gpr83 (NM_010287.1,832-850).
ccaagggtgtcatatatat

SEQ ID NO: 625230 - DNA, 19 bp, Mus musculus
  siRNA target sequence for Gpr83 (NM_010287.1,833-851).
caagggtgtcatatatatt

SEQ ID NO: 625231 - DNA, 19 bp, Mus musculus
  siRNA target sequence for Gpr83 (NM_010287.1,836-854).
gggtgtcatatatattgct

SEQ ID NO: 625232 - DNA, 19 bp, Mus musculus
  siRNA target sequence for Gpr83 (NM_010287.1,894-912).
gccatctgccagaaactgt

SEQ ID NO: 625233 - DNA, 19 bp, Mus musculus
  siRNA target sequence for Gpr83 (NM_010287.1,895-913).
ccatctgccagaaactgtt

SEQ ID NO: 625234 - DNA, 19 bp, Mus musculus
  siRNA target sequence for Gpr83 (NM_010287.1,1283-1301).
catgagcagtacttgttat

SEQ ID NO: 625235 - DNA, 19 bp, Mus musculus
  siRNA target sequence for Gpr83 (NM_010287.1,1459-1477).
gggctccactacctaatca

SEQ ID NO: 625236 - DNA, 19 bp, Mus musculus
  siRNA target sequence for Gpr83 (NM_010287.1,1533-1551).
cccgttgtggccatgagtt

SEQ ID NO: 625237 - DNA, 19 bp, Mus musculus
  siRNA target sequence for Gpr84 (NM_030720.1,181-199).
ctgtgttgggctatcgata

SEQ ID NO: 625238 - DNA, 19 bp, Mus musculus
  siRNA target sequence for Gpr84 (NM_030720.1,185-203).
gttgggctatcgatacttt

SEQ ID NO: 625239 - DNA, 19 bp, Mus musculus
  siRNA target sequence for Gpr84 (NM_030720.1,190-208).
gctatcgatactttgcaat

SEQ ID NO: 625240 - DNA, 19 bp, Mus musculus
  siRNA target sequence for Gpr84 (NM_030720.1,191-209).
ctatcgatactttgcaatt

SEQ ID NO: 625241 - DNA, 19 bp, Mus musculus
  siRNA target sequence for Gpr84 (NM_030720.1,195-213).
cgatactttgcaattatct

SEQ ID NO: 625242 - DNA, 19 bp, Mus musculus
  siRNA target sequence for Gpr84 (NM_030720.1,325-343).
ccctggctgatctactcta

SEQ ID NO: 625243 - DNA, 19 bp, Mus musculus
  siRNA target sequence for Gpr84 (NM_030720.1,361-379).
ctttctccgtggacacata

SEQ ID NO: 625244 - DNA, 19 bp, Mus musculus
  siRNA target sequence for Gpr84 (NM_030720.1,405-423).
gcggtcttctgtagaatat

SEQ ID NO: 625245 - DNA, 19 bp, Mus musculus
  siRNA target sequence for Gpr84 (NM_030720.1,406-424).
cggtcttctgtagaatatt

SEQ ID NO: 625246 - DNA, 19 bp, Mus musculus
  siRNA target sequence for Gpr84 (NM_030720.1,410-428).
cttctgtagaatatttgga

SEQ ID NO: 625247 - DNA, 19 bp, Mus musculus
  siRNA target sequence for Gpr84 (NM_030720.1,432-450).
ctcctctttacttccaatt

SEQ ID NO: 625248 - DNA, 19 bp, Mus musculus
  siRNA target sequence for Gpr84 (NM_030720.1,518-536).
ctttccccaggttttcagt

SEQ ID NO: 625249 - DNA, 19 bp, Mus musculus
  siRNA target sequence for Gpr84 (NM_030720.1,680-698).
cctcatgggcatctacttt

SEQ ID NO: 625250 - DNA, 19 bp, Mus musculus
  siRNA target sequence for Gpr84 (NM_030720.1,712-730).
gcagcgtgggcgtcttcta

SEQ ID NO: 625251 - DNA, 19 bp, Mus musculus
  siRNA target sequence for Gpr84 (NM_030720.1,763-781).
ctcgagcactggaccaata

SEQ ID NO: 625252 - DNA, 19 bp, Mus musculus
  siRNA target sequence for Gpr84 (NM_030720.1,884-902).
gcccagcgaggggatttca

SEQ ID NO: 625253 - DNA, 19 bp, Mus musculus
  siRNA target sequence for Gpr84 (NM_030720.1,885-903).
cccagcgaggggatttcat

SEQ ID NO: 625254 - DNA, 19 bp, Mus musculus
  siRNA target sequence for Gpr84 (NM_030720.1,887-905).
cagcgaggggatttcatct

SEQ ID NO: 625255 - DNA, 19 bp, Mus musculus
  siRNA target sequence for Gpr84 (NM_030720.1,1139-1157).
cttcctgttgctcaacatt

SEQ ID NO: 625256 - DNA, 19 bp, Mus musculus
  siRNA target sequence for Gpr85 (NM_145066.3,366-384).
cagccgacaacattttgca

SEQ ID NO: 625257 - DNA, 19 bp, Mus musculus
  siRNA target sequence for Gpr85 (NM_145066.3,471-489).
ccattttgctagtgaaaga

SEQ ID NO: 625258 - DNA, 19 bp, Mus musculus
  siRNA target sequence for Gpr85 (NM_145066.3,472-490).
cattttgctagtgaaagat

SEQ ID NO: 625259 - DNA, 19 bp, Mus musculus
  siRNA target sequence for Gpr85 (NM_145066.3,500-518).
catagagctccttactact

SEQ ID NO: 625260 - DNA, 19 bp, Mus musculus
  siRNA target sequence for Gpr85 (NM_145066.3,691-709).
cagcgtcaccagatactta

SEQ ID NO: 625261 - DNA, 19 bp, Mus musculus
  siRNA target sequence for Gpr85 (NM_145066.3,718-736).
ccatcaccgcttctataca

SEQ ID NO: 625262 - DNA, 19 bp, Mus musculus
  siRNA target sequence for Gpr85 (NM_145066.3,719-737).
catcaccgcttctatacaa

SEQ ID NO: 625263 - DNA, 19 bp, Mus musculus
  siRNA target sequence for Gpr85 (NM_145066.3,722-740).
caccgcttctatacaaaga

SEQ ID NO: 625264 - DNA, 19 bp, Mus musculus
  siRNA target sequence for Gpr85 (NM_145066.3,802-820).
ggcattccccccagtttta

SEQ ID NO: 625265 - DNA, 19 bp, Mus musculus
  siRNA target sequence for Gpr85 (NM_145066.3,804-822).
cattccccccagttttaga

SEQ ID NO: 625266 - DNA, 19 bp, Mus musculus
  siRNA target sequence for Gpr85 (NM_145066.3,808-826).
ccccccagttttagatgta

SEQ ID NO: 625267 - DNA, 19 bp, Mus musculus
  siRNA target sequence for Gpr85 (NM_145066.3,827-845).
ggcacctactccttcatta

SEQ ID NO: 625268 - DNA, 19 bp, Mus musculus
  siRNA target sequence for Gpr85 (NM_145066.3,888-906).
ctaacgattccctaggatt

SEQ ID NO: 625269 - DNA, 19 bp, Mus musculus
  siRNA target sequence for Gpr85 (NM_145066.3,949-967).
ctacctcaagctgatattt

SEQ ID NO: 625270 - DNA, 19 bp, Mus musculus
  siRNA target sequence for Gpr85 (NM_145066.3,952-970).
cctcaagctgatatttttt

SEQ ID NO: 625271 - DNA, 19 bp, Mus musculus
  siRNA target sequence for Gpr85 (NM_145066.3,974-992).
cacgatcgaaggaaaatga

SEQ ID NO: 625272 - DNA, 19 bp, Mus musculus
  siRNA target sequence for Gpr85 (NM_145066.3,1069-1087).
caattggctagcaggattt

SEQ ID NO: 625273 - DNA, 19 bp, Mus musculus
  siRNA target sequence for Gpr85 (NM_145066.3,1146-1164).
gcagaaggcggctattggt

SEQ ID NO: 625274 - DNA, 19 bp, Mus musculus
  siRNA target sequence for Gpr85 (NM_145066.3,1257-1275).
cctgctattggagagtttt

SEQ ID NO: 625275 - DNA, 19 bp, Mus musculus
  siRNA target sequence for Gpr85 (NM_145066.3,1261-1279).
ctattggagagtttttgca

SEQ ID NO: 625276 - DNA, 19 bp, Mus musculus
  siRNA target sequence for Gpr85 (NM_145066.3,1292-1310).
gtaccagggggatttctaa

SEQ ID NO: 625277 - DNA, 19 bp, Mus musculus
  siRNA target sequence for Gpr85 (NM_145066.3,1333-1351).
cgcccaagcaggaatcaat

SEQ ID NO: 625278 - DNA, 19 bp, Mus musculus
  siRNA target sequence for Gpr85 (NM_145066.3,1379-1397).
gagctgaggcgctgtttca

SEQ ID NO: 625279 - DNA, 19 bp, Mus musculus
  siRNA target sequence for Gpr85 (NM_145066.3,1437-1455).
gggaaccttactgtgttat

SEQ ID NO: 625280 - DNA, 19 bp, Mus musculus
  siRNA target sequence for Gpr85 (NM_145066.3,1438-1456).
ggaaccttactgtgttata

SEQ ID NO: 625281 - DNA, 19 bp, Mus musculus
  siRNA target sequence for Gpr88 (NM_022427.1,556-574).
ccaacggtatggtcatcta

SEQ ID NO: 625282 - DNA, 19 bp, Mus musculus
  siRNA target sequence for Gpr88 (NM_022427.1,557-575).
caacggtatggtcatctat

SEQ ID NO: 625283 - DNA, 19 bp, Mus musculus
  siRNA target sequence for Gpr90 (NM_030726.1,936-954).
cggatgaccacacttactt

SEQ ID NO: 625284 - DNA, 19 bp, Mus musculus
  siRNA target sequence for Gpr90 (NM_030726.1,938-956).
gatgaccacacttacttct

SEQ ID NO: 625285 - DNA, 19 bp, Mus musculus
  siRNA target sequence for Gpr90 (NM_030726.1,1001-1019).
cttttgatatggttcctaa

SEQ ID NO: 625286 - DNA, 19 bp, Mus musculus
  siRNA target sequence for Gpr90 (NM_030726.1,1011-1029).
ggttcctaatcttctgtat

SEQ ID NO: 625287 - DNA, 19 bp, Mus musculus
  siRNA target sequence for Gpr90 (NM_030726.1,1101-1119).
ccatcatgaagctagtgaa

SEQ ID NO: 625288 - DNA, 19 bp, Mus musculus
  siRNA target sequence for Gpr90 (NM_030726.1,1120-1138).
cacttttcacatctacaat

SEQ ID NO: 625289 - DNA, 19 bp, Mus musculus
  siRNA target sequence for Gpr90 (NM_030726.1,1225-1243).
gtgcctctccgtgctttat

SEQ ID NO: 625290 - DNA, 19 bp, Mus musculus
  siRNA target sequence for Gpr90 (NM_030726.1,1228-1246).
cctctccgtgctttatcca

SEQ ID NO: 625291 - DNA, 19 bp, Mus musculus
  siRNA target sequence for Gpr90 (NM_030726.1,1319-1337).
ctcgtgtctggtttggaaa

SEQ ID NO: 625292 - DNA, 19 bp, Mus musculus
  siRNA target sequence for Gpr90 (NM_030726.1,1380-1398).
gccgatacgtgtacatatt

SEQ ID NO: 625293 - DNA, 19 bp, Mus musculus
  siRNA target sequence for Gpr90 (NM_030726.1,1382-1400).
cgatacgtgtacatattct

SEQ ID NO: 625294 - DNA, 19 bp, Mus musculus
  siRNA target sequence for Gpr90 (NM_030726.1,1496-1514).
ccgaccaagctctatgtga

SEQ ID NO: 625295 - DNA, 19 bp, Mus musculus
  siRNA target sequence for Gpr90 (NM_030726.1,1497-1515).
cgaccaagctctatgtgat

SEQ ID NO: 625296 - DNA, 19 bp, Mus musculus
  siRNA target sequence for Gpr90 (NM_030726.1,1525-1543).
cacggtcatcctgtttctt

SEQ ID NO: 625297 - DNA, 19 bp, Mus musculus
  siRNA target sequence for Gpr90 (NM_030726.1,1527-1545).
cggtcatcctgtttcttgt

SEQ ID NO: 625298 - DNA, 19 bp, Mus musculus
  siRNA target sequence for Gpr90 (NM_030726.1,1556-1574).
cccatgaaggtgttgctta

SEQ ID NO: 625299 - DNA, 19 bp, Mus musculus
  siRNA target sequence for Gpr90 (NM_030726.1,1579-1597).
cggctactattctagttct

SEQ ID NO: 625300 - DNA, 19 bp, Mus musculus
  siRNA target sequence for Gpr90 (NM_030726.1,1659-1677).
gcatcaacccaattgtcta

SEQ ID NO: 625301 - DNA, 19 bp, Mus musculus
  siRNA target sequence for Gpr90 (NM_030726.1,1708-1726).
gagtaggaagtccctaaaa

SEQ ID NO: 625302 - DNA, 19 bp, Mus musculus
  siRNA target sequence for Gpr90 (NM_030726.1,1766-1784).
gcctcgagggagaatgtga

SEQ ID NO: 625303 - DNA, 19 bp, Mus musculus
  siRNA target sequence for Gpr91 (NM_032400.1,76-94).
ggcacagaatttatcttgt

SEQ ID NO: 625304 - DNA, 19 bp, Mus musculus
  siRNA target sequence for Gpr91 (NM_032400.1,108-126).
caacagaggctatcttgaa

SEQ ID NO: 625305 - DNA, 19 bp, Mus musculus
  siRNA target sequence for Gpr91 (NM_032400.1,117-135).
ctatcttgaataagtacta

SEQ ID NO: 625306 - DNA, 19 bp, Mus musculus
  siRNA target sequence for Gpr91 (NM_032400.1,285-303).
cccttcccatcctgataaa

SEQ ID NO: 625307 - DNA, 19 bp, Mus musculus
  siRNA target sequence for Gpr91 (NM_032400.1,345-363).
gtataagcaaccgatatgt

SEQ ID NO: 625308 - DNA, 19 bp, Mus musculus
  siRNA target sequence for Gpr91 (NM_032400.1,419-437).
cgatatctgctcatgaagt

SEQ ID NO: 625309 - DNA, 19 bp, Mus musculus
  siRNA target sequence for Gpr91 (NM_032400.1,494-512).
gctgtctgggccttagtga

SEQ ID NO: 625310 - DNA, 19 bp, Mus musculus
  siRNA target sequence for Gpr91 (NM_032400.1,502-520).
ggccttagtgaccttagaa

SEQ ID NO: 625311 - DNA, 19 bp, Mus musculus
  siRNA target sequence for Gpr91 (NM_032400.1,504-522).
ccttagtgaccttagaagt

SEQ ID NO: 625312 - DNA, 19 bp, Mus musculus
  siRNA target sequence for Gpr91 (NM_032400.1,505-523).
cttagtgaccttagaagtt

SEQ ID NO: 625313 - DNA, 19 bp, Mus musculus
  siRNA target sequence for Gpr91 (NM_032400.1,527-545).
cccatgctcactttcatca

SEQ ID NO: 625314 - DNA, 19 bp, Mus musculus
  siRNA target sequence for Gpr91 (NM_032400.1,528-546).
ccatgctcactttcatcaa

SEQ ID NO: 625315 - DNA, 19 bp, Mus musculus
  siRNA target sequence for Gpr91 (NM_032400.1,577-595).
catcgactatgcaagttct

SEQ ID NO: 625316 - DNA, 19 bp, Mus musculus
  siRNA target sequence for Gpr91 (NM_032400.1,597-615).
gaaaccctgaacacaatct

SEQ ID NO: 625317 - DNA, 19 bp, Mus musculus
  siRNA target sequence for Gpr91 (NM_032400.1,605-623).
gaacacaatctcatttaca

SEQ ID NO: 625318 - DNA, 19 bp, Mus musculus
  siRNA target sequence for Gpr91 (NM_032400.1,767-785).
ctggcagttgtgatcttct

SEQ ID NO: 625319 - DNA, 19 bp, Mus musculus
  siRNA target sequence for Gpr91 (NM_032400.1,770-788).
gcagttgtgatcttctcta

SEQ ID NO: 625320 - DNA, 19 bp, Mus musculus
  siRNA target sequence for Gpr91 (NM_032400.1,830-848).
gcctcacgcctggatagtt

SEQ ID NO: 625321 - DNA, 19 bp, Mus musculus
  siRNA target sequence for Gpr91 (NM_032400.1,868-886).
gaaggccatcaaatctata

SEQ ID NO: 625322 - DNA, 19 bp, Mus musculus
  siRNA target sequence for Gpr91 (NM_032400.1,872-890).
gccatcaaatctatataca

SEQ ID NO: 625323 - DNA, 19 bp, Mus musculus
  siRNA target sequence for Gpr91 (NM_032400.1,947-965).
ctcatgggagaccattaca

SEQ ID NO: 625324 - DNA, 19 bp, Mus musculus
  siRNA target sequence for Gpr91 (NM_032400.1,981-999).
gtaagttcagacaatactt

SEQ ID NO: 625325 - DNA, 19 bp, Mus musculus
  siRNA target sequence for Grca (NM_013533.2,846-864).
cctggccggtactcatata

SEQ ID NO: 625326 - DNA, 19 bp, Mus musculus
  siRNA target sequence for Grca (NM_013533.2,850-868).
gccggtactcatatactca

SEQ ID NO: 625327 - DNA, 19 bp, Mus musculus
  siRNA target sequence for Grca (NM_013533.2,851-869).
ccggtactcatatactcat

SEQ ID NO: 625328 - DNA, 19 bp, Mus musculus
  siRNA target sequence for Grca (NM_013533.2,1039-1057).
gtgcgatggcccgttaact

SEQ ID NO: 625329 - DNA, 19 bp, Mus musculus
  siRNA target sequence for Grca (NM_013533.2,1142-1160).
ccatcggctggcacaacaa

SEQ ID NO: 625330 - DNA, 19 bp, Mus musculus
  siRNA target sequence for Grca (NM_013533.2,1158-1176).
caacggggagcgctactat

SEQ ID NO: 625331 - DNA, 19 bp, Mus musculus
  siRNA target sequence for Grca (NM_013533.2,1179-1197).
ccgaggctgccagttcata

SEQ ID NO: 625332 - DNA, 19 bp, Mus musculus
  siRNA target sequence for Grca (NM_013533.2,1206-1224).
gatcggcctcggttttggt

SEQ ID NO: 625333 - DNA, 19 bp, Mus musculus
  siRNA target sequence for Grca (NM_013533.2,1269-1287).
ggtctgtgtggctatcaca

SEQ ID NO: 625334 - DNA, 19 bp, Mus musculus
  siRNA target sequence for Grca (NM_013533.2,1505-1523).
gcgccatcgtctttctcta

SEQ ID NO: 625335 - DNA, 19 bp, Mus musculus
  siRNA target sequence for Grca (NM_013533.2,1506-1524).
cgccatcgtctttctctat

SEQ ID NO: 625336 - DNA, 19 bp, Mus musculus
  siRNA target sequence for Grca (NM_013533.2,1776-1794).
gtgcaaaattcgctttgat

SEQ ID NO: 625337 - DNA, 19 bp, Mus musculus
  siRNA target sequence for Grca (NM_013533.2,1874-1892).
cgctggagagagtacacta

SEQ ID NO: 625338 - DNA, 19 bp, Mus musculus
  siRNA target sequence for Grca (NM_013533.2,1902-1920).
ccctttgtcccgacgatta

SEQ ID NO: 625339 - DNA, 19 bp, Mus musculus
  siRNA target sequence for Grca (NM_013533.2,1903-1921).
cctttgtcccgacgattat

SEQ ID NO: 625340 - DNA, 19 bp, Mus musculus
  siRNA target sequence for Grca (NM_013533.2,1930-1948).
gagaccaacatcttttcta

SEQ ID NO: 625341 - DNA, 19 bp, Mus musculus
  siRNA target sequence for Grca (NM_013533.2,1982-2000).
ggtcctcatcggatgatat

SEQ ID NO: 625342 - DNA, 19 bp, Mus musculus
  siRNA target sequence for Grca (NM_013533.2,2115-2133).
cagccttcgacagtttcta

SEQ ID NO: 625343 - DNA, 19 bp, Mus musculus
  siRNA target sequence for Grca (NM_013533.2,2167-2185).
ccacgaggtcccggttttt

SEQ ID NO: 625344 - DNA, 19 bp, Mus musculus
  siRNA target sequence for Grca (NM_013533.2,2321-2339).
gagccgttggacttccttt

SEQ ID NO: 625345 - DNA, 19 bp, Mus musculus
  siRNA target sequence for Grpr (NM_008177.1,406-424).
gcaacgacaccttcaatca

SEQ ID NO: 625346 - DNA, 19 bp, Mus musculus
  siRNA target sequence for Grpr (NM_008177.1,486-504).
gcagtttatgggcttatca

SEQ ID NO: 625347 - DNA, 19 bp, Mus musculus
  siRNA target sequence for Grpr (NM_008177.1,487-505).
cagtttatgggcttatcat

SEQ ID NO: 625348 - DNA, 19 bp, Mus musculus
  siRNA target sequence for Grpr (NM_008177.1,503-521).
catcgtgataggtcttatt

SEQ ID NO: 625349 - DNA, 19 bp, Mus musculus
  siRNA target sequence for Grpr (NM_008177.1,523-541).
gcaacatcacgctcatcaa

SEQ ID NO: 625350 - DNA, 19 bp, Mus musculus
  siRNA target sequence for Grpr (NM_008177.1,698-716).
gatcccctttatacaactt

SEQ ID NO: 625351 - DNA, 19 bp, Mus musculus
  siRNA target sequence for Grpr (NM_008177.1,701-719).
cccctttatacaacttact

SEQ ID NO: 625352 - DNA, 19 bp, Mus musculus
  siRNA target sequence for Grpr (NM_008177.1,702-720).
ccctttatacaacttactt

SEQ ID NO: 625353 - DNA, 19 bp, Mus musculus
  siRNA target sequence for Grpr (NM_008177.1,776-794).
cattgtacggccaatggat

SEQ ID NO: 625354 - DNA, 19 bp, Mus musculus
  siRNA target sequence for Grpr (NM_008177.1,807-825).
catgccctgatgaagatct

SEQ ID NO: 625355 - DNA, 19 bp, Mus musculus
  siRNA target sequence for Grpr (NM_008177.1,826-844).
gtctcaaagctgctttgat

SEQ ID NO: 625356 - DNA, 19 bp, Mus musculus
  siRNA target sequence for Grpr (NM_008177.1,899-917).
ccccttccatgtgaaagat

SEQ ID NO: 625357 - DNA, 19 bp, Mus musculus
  siRNA target sequence for Grpr (NM_008177.1,923-941).
ccaaaccttcattagttgt

SEQ ID NO: 625358 - DNA, 19 bp, Mus musculus
  siRNA target sequence for Grpr (NM_008177.1,1096-1114).
gcaatatacatgtcaagaa

SEQ ID NO: 625359 - DNA, 19 bp, Mus musculus
  siRNA target sequence for Grpr (NM_008177.1,1346-1364).
gcagttcaacactcaactt

SEQ ID NO: 625360 - DNA, 19 bp, Mus musculus
  siRNA target sequence for Grpr (NM_008177.1,1374-1392).
cagcctggcctgatgaaca

SEQ ID NO: 625361 - DNA, 19 bp, Mus musculus
  siRNA target sequence for Hrh1 (NM_008285.2,455-473).
cggtagcagacctgattgt

SEQ ID NO: 625362 - DNA, 19 bp, Mus musculus
  siRNA target sequence for Hrh1 (NM_008285.2,456-474).
ggtagcagacctgattgta

SEQ ID NO: 625363 - DNA, 19 bp, Mus musculus
  siRNA target sequence for Hrh1 (NM_008285.2,481-499).
gtcgtcatgcccatgaaca

SEQ ID NO: 625364 - DNA, 19 bp, Mus musculus
  siRNA target sequence for Hrh1 (NM_008285.2,491-509).
ccatgaacatcctctatct

SEQ ID NO: 625365 - DNA, 19 bp, Mus musculus
  siRNA target sequence for Hrh1 (NM_008285.2,549-567).
cttttggctctctatggat

SEQ ID NO: 625366 - DNA, 19 bp, Mus musculus
  siRNA target sequence for Hrh1 (NM_008285.2,554-572).
ggctctctatggattatgt

SEQ ID NO: 625367 - DNA, 19 bp, Mus musculus
  siRNA target sequence for Hrh1 (NM_008285.2,579-597).
cacggcatccatctttagt

SEQ ID NO: 625368 - DNA, 19 bp, Mus musculus
  siRNA target sequence for Hrh1 (NM_008285.2,581-599).
cggcatccatctttagtgt

SEQ ID NO: 625369 - DNA, 19 bp, Mus musculus
  siRNA target sequence for Hrh1 (NM_008285.2,646-664).
cggtacctgaggtatcgaa

SEQ ID NO: 625370 - DNA, 19 bp, Mus musculus
  siRNA target sequence for Hrh1 (NM_008285.2,714-732).
cctgtgggttatacctata

SEQ ID NO: 625371 - DNA, 19 bp, Mus musculus
  siRNA target sequence for Hrh1 (NM_008285.2,930-948).
cgggtccctccctaccttt

SEQ ID NO: 625372 - DNA, 19 bp, Mus musculus
  siRNA target sequence for Hrh1 (NM_008285.2,1223-1241).
ccttgagccagcccaaaat

SEQ ID NO: 625373 - DNA, 19 bp, Mus musculus
  siRNA target sequence for Hrh1 (NM_008285.2,1375-1393).
gcgagaagcaggtctaaca

SEQ ID NO: 625374 - DNA, 19 bp, Mus musculus
  siRNA target sequence for Hrh1 (NM_008285.2,1505-1523).
gtatcatggcagcattcat

SEQ ID NO: 625375 - DNA, 19 bp, Mus musculus
  siRNA target sequence for Hrh1 (NM_008285.2,1594-1612).
gtgcacatgttcaccattt

SEQ ID NO: 625376 - DNA, 19 bp, Mus musculus
  siRNA target sequence for Hrh1 (NM_008285.2,1655-1673).
cgctgtgcaacgagaactt

SEQ ID NO: 625377 - DNA, 19 bp, Mus musculus
  siRNA target sequence for Hrh2 (NM_008286.1,7-25).
cccaatggcacggttcatt

SEQ ID NO: 625378 - DNA, 19 bp, Mus musculus
  siRNA target sequence for Hrh2 (NM_008286.1,26-44).
cctgctgtttggactctat

SEQ ID NO: 625379 - DNA, 19 bp, Mus musculus
  siRNA target sequence for Hrh2 (NM_008286.1,30-48).
ctgtttggactctattgca

SEQ ID NO: 625380 - DNA, 19 bp, Mus musculus
  siRNA target sequence for Hrh2 (NM_008286.1,32-50).
gtttggactctattgcatt

SEQ ID NO: 625381 - DNA, 19 bp, Mus musculus
  siRNA target sequence for Hrh2 (NM_008286.1,145-163).
ctccgcagtctgaccaatt

SEQ ID NO: 625382 - DNA, 19 bp, Mus musculus
  siRNA target sequence for Hrh2 (NM_008286.1,148-166).
cgcagtctgaccaattgct

SEQ ID NO: 625383 - DNA, 19 bp, Mus musculus
  siRNA target sequence for Hrh2 (NM_008286.1,149-167).
gcagtctgaccaattgctt

SEQ ID NO: 625384 - DNA, 19 bp, Mus musculus
  siRNA target sequence for Hrh2 (NM_008286.1,525-543).
gcaggtcaacgaggtatat

SEQ ID NO: 625385 - DNA, 19 bp, Mus musculus
  siRNA target sequence for Hrh2 (NM_008286.1,595-613).
gtcacctactacagaatct

SEQ ID NO: 625386 - DNA, 19 bp, Mus musculus
  siRNA target sequence for Hrh2 (NM_008286.1,599-617).
cctactacagaatctttaa

SEQ ID NO: 625387 - DNA, 19 bp, Mus musculus
  siRNA target sequence for Hrh2 (NM_008286.1,710-728).
ccgtcatgggagcattcat

SEQ ID NO: 625388 - DNA, 19 bp, Mus musculus
  siRNA target sequence for Htr1a (NM_008308.2,550-568).
gggacaggcggcaacgata

SEQ ID NO: 625389 - DNA, 19 bp, Mus musculus
  siRNA target sequence for Htr1a (NM_008308.2,902-920).
caatcaccgaccctataga

SEQ ID NO: 625390 - DNA, 19 bp, Mus musculus
  siRNA target sequence for Htr1a (NM_008308.2,1069-1087).
cacgggtacaccatctact

SEQ ID NO: 625391 - DNA, 19 bp, Mus musculus
  siRNA target sequence for Htr1a (NM_008308.2,1088-1106).
ccactttcggcgctttcta

SEQ ID NO: 625392 - DNA, 19 bp, Mus musculus
  siRNA target sequence for Htr1a (NM_008308.2,1089-1107).
cactttcggcgctttctat

SEQ ID NO: 625393 - DNA, 19 bp, Mus musculus
  siRNA target sequence for Htr1a (NM_008308.2,1091-1109).
ctttcggcgctttctatat

SEQ ID NO: 625394 - DNA, 19 bp, Mus musculus
  siRNA target sequence for Htr1a (NM_008308.2,1446-1464).
cgcctgcttggagagaaaa

SEQ ID NO: 625395 - DNA, 19 bp, Mus musculus
  siRNA target sequence for Htr1a (NM_008308.2,1449-1467).
ctgcttggagagaaaaaat

SEQ ID NO: 625396 - DNA, 19 bp, Mus musculus
  siRNA target sequence for Htr1a (NM_008308.2,1616-1634).
gccacatgcctgagttgtt

SEQ ID NO: 625397 - DNA, 19 bp, Mus musculus
  siRNA target sequence for Htr1a (NM_008308.2,1629-1647).
gttgttgggtgccataatt

SEQ ID NO: 625398 - DNA, 19 bp, Mus musculus
  siRNA target sequence for Htr1a (NM_008308.2,1680-1698).
cccagttatttatgcttat

SEQ ID NO: 625399 - DNA, 19 bp, Mus musculus
  siRNA target sequence for Htr1a (NM_008308.2,1681-1699).
ccagttatttatgcttatt

SEQ ID NO: 625400 - DNA, 19 bp, Mus musculus
  siRNA target sequence for Htr1a (NM_008308.2,1714-1732).
caaaacgcttttaagaaga

SEQ ID NO: 625401 - DNA, 19 bp, Mus musculus
  siRNA target sequence for Htr1b (NM_010482.1,87-105).
cagcgccgacggctacatt

SEQ ID NO: 625402 - DNA, 19 bp, Mus musculus
  siRNA target sequence for Htr1b (NM_010482.1,89-107).
gcgccgacggctacattta

SEQ ID NO: 625403 - DNA, 19 bp, Mus musculus
  siRNA target sequence for Htr1b (NM_010482.1,92-110).
ccgacggctacatttacca

SEQ ID NO: 625404 - DNA, 19 bp, Mus musculus
  siRNA target sequence for Htr1b (NM_010482.1,180-198).
gctctccaacgcctttgta

SEQ ID NO: 625405 - DNA, 19 bp, Mus musculus
  siRNA target sequence for Htr1b (NM_010482.1,181-199).
ctctccaacgcctttgtaa

SEQ ID NO: 625406 - DNA, 19 bp, Mus musculus
  siRNA target sequence for Htr1b (NM_010482.1,444-462).
cgatgcggtggagtattct

SEQ ID NO: 625407 - DNA, 19 bp, Mus musculus
  siRNA target sequence for Htr1b (NM_010482.1,623-641).
ccacggtgggcgctttcta

SEQ ID NO: 625408 - DNA, 19 bp, Mus musculus
  siRNA target sequence for Htr1b (NM_010482.1,624-642).
cacggtgggcgctttctat

SEQ ID NO: 625409 - DNA, 19 bp, Mus musculus
  siRNA target sequence for Htr1b (NM_010482.1,627-645).
ggtgggcgctttctattta

SEQ ID NO: 625410 - DNA, 19 bp, Mus musculus
  siRNA target sequence for Htr1b (NM_010482.1,692-710).
cccgctctcggattttgaa

SEQ ID NO: 625411 - DNA, 19 bp, Mus musculus
  siRNA target sequence for Htr1b (NM_010482.1,693-711).
ccgctctcggattttgaaa

SEQ ID NO: 625412 - DNA, 19 bp, Mus musculus
  siRNA target sequence for Htr1b (NM_010482.1,695-713).
gctctcggattttgaaaca

SEQ ID NO: 625413 - DNA, 19 bp, Mus musculus
  siRNA target sequence for Htr1b (NM_010482.1,741-759).
gacccgagcccagttgata

SEQ ID NO: 625414 - DNA, 19 bp, Mus musculus
  siRNA target sequence for Htr1b (NM_010482.1,744-762).
ccgagcccagttgataaca

SEQ ID NO: 625415 - DNA, 19 bp, Mus musculus
  siRNA target sequence for Htr1b (NM_010482.1,746-764).
gagcccagttgataacaga

SEQ ID NO: 625416 - DNA, 19 bp, Mus musculus
  siRNA target sequence for Htr1b (NM_010482.1,843-861).
gtacgtgaaccaagtcaaa

SEQ ID NO: 625417 - DNA, 19 bp, Mus musculus
  siRNA target sequence for Htr1b (NM_010482.1,930-948).
gaccctagggatcatttta

SEQ ID NO: 625418 - DNA, 19 bp, Mus musculus
  siRNA target sequence for Htr1b (NM_010482.1,996-1014).
gatgcctatctgtaaggat

SEQ ID NO: 625419 - DNA, 19 bp, Mus musculus
  siRNA target sequence for Htr1b (NM_010482.1,1012-1030).
gatgcctgctggtttcaca

SEQ ID NO: 625420 - DNA, 19 bp, Mus musculus
  siRNA target sequence for Htr1b (NM_010482.1,1035-1053).
catttttgacttcttcaat

SEQ ID NO: 625421 - DNA, 19 bp, Mus musculus
  siRNA target sequence for Htr1b (NM_010482.1,1050-1068).
caattggttaggctatctt

SEQ ID NO: 625422 - DNA, 19 bp, Mus musculus
  siRNA target sequence for Htr1b (NM_010482.1,1120-1138).
caagcgttccacaaactga

SEQ ID NO: 625423 - DNA, 19 bp, Mus musculus
  siRNA target sequence for Htr1d (NM_008309.2,1136-1154).
cgtccttaccaccattcta

SEQ ID NO: 625424 - DNA, 19 bp, Mus musculus
  siRNA target sequence for Htr1d (NM_008309.2,1175-1193).
cccagccaattatctcatt

SEQ ID NO: 625425 - DNA, 19 bp, Mus musculus
  siRNA target sequence for Htr1d (NM_008309.2,1210-1228).
cggacctcctggtttctat

SEQ ID NO: 625426 - DNA, 19 bp, Mus musculus
  siRNA target sequence for Htr1d (NM_008309.2,1212-1230).
gacctcctggtttctatct

SEQ ID NO: 625427 - DNA, 19 bp, Mus musculus
  siRNA target sequence for Htr1d (NM_008309.2,1262-1280).
cacccgcacctggaacttt

SEQ ID NO: 625428 - DNA, 19 bp, Mus musculus
  siRNA target sequence for Htr1d (NM_008309.2,1421-1439).
ccacgcagcagccatgatt

SEQ ID NO: 625429 - DNA, 19 bp, Mus musculus
  siRNA target sequence for Htr1d (NM_008309.2,1444-1462).
ccgtctggatcatctctat

SEQ ID NO: 625430 - DNA, 19 bp, Mus musculus
  siRNA target sequence for Htr1d (NM_008309.2,1445-1463).
cgtctggatcatctctatt

SEQ ID NO: 625431 - DNA, 19 bp, Mus musculus
  siRNA target sequence for Htr1d (NM_008309.2,1450-1468).
ggatcatctctatttgtat

SEQ ID NO: 625432 - DNA, 19 bp, Mus musculus
  siRNA target sequence for Htr1d (NM_008309.2,1521-1539).
gactgcctggtgaacacat

SEQ ID NO: 625433 - DNA, 19 bp, Mus musculus
  siRNA target sequence for Htr1d (NM_008309.2,1588-1606).
catccatcttgctcattat

SEQ ID NO: 625434 - DNA, 19 bp, Mus musculus
  siRNA target sequence for Htr1d (NM_008309.2,1982-2000).
cttcacgtggctaggttat

SEQ ID NO: 625435 - DNA, 19 bp, Mus musculus
  siRNA target sequence for Htr1d (NM_008309.2,1985-2003).
cacgtggctaggttattta

SEQ ID NO: 625436 - DNA, 19 bp, Mus musculus
  siRNA target sequence for Htr1d (NM_008309.2,2073-2091).
gtccatttccggaagatct

SEQ ID NO: 625437 - DNA, 19 bp, Mus musculus
  siRNA target sequence for Htr1f (NM_008310.2,395-413).
gcatcagaccaaaacttga

SEQ ID NO: 625438 - DNA, 19 bp, Mus musculus
  siRNA target sequence for Htr1f (NM_008310.2,541-559).
gcaccacccagccaactat

SEQ ID NO: 625439 - DNA, 19 bp, Mus musculus
  siRNA target sequence for Htr1f (NM_008310.2,545-563).
cacccagccaactatttaa

SEQ ID NO: 625440 - DNA, 19 bp, Mus musculus
  siRNA target sequence for Htr1f (NM_008310.2,632-650).
gtgagagagagctggatta

SEQ ID NO: 625441 - DNA, 19 bp, Mus musculus
  siRNA target sequence for Htr1f (NM_008310.2,683-701).
gtcgacatcatctgttgta

SEQ ID NO: 625442 - DNA, 19 bp, Mus musculus
  siRNA target sequence for Htr1f (NM_008310.2,726-744).
ctatagccttggataggta

SEQ ID NO: 625443 - DNA, 19 bp, Mus musculus
  siRNA target sequence for Htr1f (NM_008310.2,792-810).
ggcatgccggcatcatgat

SEQ ID NO: 625444 - DNA, 19 bp, Mus musculus
  siRNA target sequence for Htr1f (NM_008310.2,794-812).
catgccggcatcatgatca

SEQ ID NO: 625445 - DNA, 19 bp, Mus musculus
  siRNA target sequence for Htr1f (NM_008310.2,811-829).
cacgatcgtgtgggttata

SEQ ID NO: 625446 - DNA, 19 bp, Mus musculus
  siRNA target sequence for Htr1f (NM_008310.2,814-832).
gatcgtgtgggttatatct

SEQ ID NO: 625447 - DNA, 19 bp, Mus musculus
  siRNA target sequence for Htr1f (NM_008310.2,873-891).
gaactagccgtgatgatga

SEQ ID NO: 625448 - DNA, 19 bp, Mus musculus
  siRNA target sequence for Htr1f (NM_008310.2,933-951).
ccacgtttggagctttcta

SEQ ID NO: 625449 - DNA, 19 bp, Mus musculus
  siRNA target sequence for Htr1f (NM_008310.2,936-954).
cgtttggagctttctacat

SEQ ID NO: 625450 - DNA, 19 bp, Mus musculus
  siRNA target sequence for Htr1f (NM_008310.2,952-970).
catcccgcttgtattgata

SEQ ID NO: 625451 - DNA, 19 bp, Mus musculus
  siRNA target sequence for Htr1f (NM_008310.2,957-975).
cgcttgtattgatattgat

SEQ ID NO: 625452 - DNA, 19 bp, Mus musculus
  siRNA target sequence for Htr1f (NM_008310.2,977-995).
ctctactacaaaatataca

SEQ ID NO: 625453 - DNA, 19 bp, Mus musculus
  siRNA target sequence for Htr1f (NM_008310.2,1025-1043).
caagcgagtcggatgataa

SEQ ID NO: 625454 - DNA, 19 bp, Mus musculus
  siRNA target sequence for Htr1f (NM_008310.2,1029-1047).
cgagtcggatgataaagga

SEQ ID NO: 625455 - DNA, 19 bp, Mus musculus
  siRNA target sequence for Htr1f (NM_008310.2,1080-1098).
gtgagaagagcattaaact

SEQ ID NO: 625456 - DNA, 19 bp, Mus musculus
  siRNA target sequence for Htr1f (NM_008310.2,1104-1122).
ccacatcctacatgttaga

SEQ ID NO: 625457 - DNA, 19 bp, Mus musculus
  siRNA target sequence for Htr1f (NM_008310.2,1139-1157).
ccatcaacggactttgata

SEQ ID NO: 625458 - DNA, 19 bp, Mus musculus
  siRNA target sequence for Htr1f (NM_008310.2,1254-1272).
ccactaccctgggattgat

SEQ ID NO: 625459 - DNA, 19 bp, Mus musculus
  siRNA target sequence for Htr1f (NM_008310.2,1273-1291).
cttgggtgcatttgtaata

SEQ ID NO: 625460 - DNA, 19 bp, Mus musculus
  siRNA target sequence for Htr1f (NM_008310.2,1296-1314).
ggctgcccttttttgtaaa

SEQ ID NO: 625461 - DNA, 19 bp, Mus musculus
  siRNA target sequence for Htr1f (NM_008310.2,1322-1340).
gttgttaatgtctgtgaaa

SEQ ID NO: 625462 - DNA, 19 bp, Mus musculus
  siRNA target sequence for Htr1f (NM_008310.2,1400-1418).
cttataaatccactgattt

SEQ ID NO: 625463 - DNA, 19 bp, Mus musculus
  siRNA target sequence for Htr1f (NM_008310.2,1460-1478).
cttgtacgatgccgatatt

SEQ ID NO: 625464 - DNA, 19 bp, Mus musculus
  siRNA target sequence for Htr2a (NM_172812.1,1136-1154).
ccaaactccttaatgcaat

SEQ ID NO: 625465 - DNA, 19 bp, Mus musculus
  siRNA target sequence for Htr2a (NM_172812.1,1170-1188).
ggctctaccctaatgactt

SEQ ID NO: 625466 - DNA, 19 bp, Mus musculus
  siRNA target sequence for Htr2a (NM_172812.1,1218-1236).
cctcgaactggacaattga

SEQ ID NO: 625467 - DNA, 19 bp, Mus musculus
  siRNA target sequence for Htr2a (NM_172812.1,1219-1237).
ctcgaactggacaattgat

SEQ ID NO: 625468 - DNA, 19 bp, Mus musculus
  siRNA target sequence for Htr2a (NM_172812.1,1284-1302).
catgcctctccattcttca

SEQ ID NO: 625469 - DNA, 19 bp, Mus musculus
  siRNA target sequence for Htr2a (NM_172812.1,1335-1353).
caactgtcgtgattattct

SEQ ID NO: 625470 - DNA, 19 bp, Mus musculus
  siRNA target sequence for Htr2a (NM_172812.1,1474-1492).
catgcccgtgtccatgtta

SEQ ID NO: 625471 - DNA, 19 bp, Mus musculus
  siRNA target sequence for Htr2a (NM_172812.1,1536-1554).
gtgccgtctggatttacct

SEQ ID NO: 625472 - DNA, 19 bp, Mus musculus
  siRNA target sequence for Htr2a (NM_172812.1,1637-1655).
caccatagccgcttcaact

SEQ ID NO: 625473 - DNA, 19 bp, Mus musculus
  siRNA target sequence for Htr2a (NM_172812.1,1692-1710).
ggaccatatccgtaggtat

SEQ ID NO: 625474 - DNA, 19 bp, Mus musculus
  siRNA target sequence for Htr2a (NM_172812.1,1693-1711).
gaccatatccgtaggtata

SEQ ID NO: 625475 - DNA, 19 bp, Mus musculus
  siRNA target sequence for Htr2a (NM_172812.1,1773-1791).
gcctgctcgccgatgacaa

SEQ ID NO: 625476 - DNA, 19 bp, Mus musculus
  siRNA target sequence for Htr2a (NM_172812.1,1909-1927).
cagcactcgggccaaatta

SEQ ID NO: 625477 - DNA, 19 bp, Mus musculus
  siRNA target sequence for Htr2a (NM_172812.1,2038-2056).
cagcaacgagcaaaaagca

SEQ ID NO: 625478 - DNA, 19 bp, Mus musculus
  siRNA target sequence for Htr2a (NM_172812.1,2069-2087).
ggcatcgtgttctttctgt

SEQ ID NO: 625479 - DNA, 19 bp, Mus musculus
  siRNA target sequence for Htr2a (NM_172812.1,2140-2158).
caaagaatcctgcaatgaa

SEQ ID NO: 625480 - DNA, 19 bp, Mus musculus
  siRNA target sequence for Htr2a (NM_172812.1,2214-2232).
ccgtcaacccactggtata

SEQ ID NO: 625481 - DNA, 19 bp, Mus musculus
  siRNA target sequence for Htr2a (NM_172812.1,2215-2233).
cgtcaacccactggtatat

SEQ ID NO: 625482 - DNA, 19 bp, Mus musculus
  siRNA target sequence for Htr2a (NM_172812.1,2216-2234).
gtcaacccactggtatata

SEQ ID NO: 625483 - DNA, 19 bp, Mus musculus
  siRNA target sequence for Htr2a (NM_172812.1,2225-2243).
ctggtatatacgttgttca

SEQ ID NO: 625484 - DNA, 19 bp, Mus musculus
  siRNA target sequence for Htr2a (NM_172812.1,2227-2245).
ggtatatacgttgttcaat

SEQ ID NO: 625485 - DNA, 19 bp, Mus musculus
  siRNA target sequence for Htr2a (NM_172812.1,2228-2246).
gtatatacgttgttcaata

SEQ ID NO: 625486 - DNA, 19 bp, Mus musculus
  siRNA target sequence for Htr2a (NM_172812.1,2235-2253).
cgttgttcaataaaactta

SEQ ID NO: 625487 - DNA, 19 bp, Mus musculus
  siRNA target sequence for Htr2a (NM_172812.1,2260-2278).
cgccttctcacggtacatt

SEQ ID NO: 625488 - DNA, 19 bp, Mus musculus
  siRNA target sequence for Htr2a (NM_172812.1,2301-2319).
gaaagccgctgcagttaat

SEQ ID NO: 625489 - DNA, 19 bp, Mus musculus
  siRNA target sequence for Htr2a (NM_172812.1,2305-2323).
gccgctgcagttaatttta

SEQ ID NO: 625490 - DNA, 19 bp, Mus musculus
  siRNA target sequence for Htr2a (NM_172812.1,2336-2354).
ccaacattggcctacaagt

SEQ ID NO: 625491 - DNA, 19 bp, Mus musculus
  siRNA target sequence for Htr2a (NM_172812.1,2362-2380).
gctccaggtgggacaaaaa

SEQ ID NO: 625492 - DNA, 19 bp, Mus musculus
  siRNA target sequence for Htr2a (NM_172812.1,2363-2381).
ctccaggtgggacaaaaaa

SEQ ID NO: 625493 - DNA, 19 bp, Mus musculus
  siRNA target sequence for Htr2a (NM_172812.1,2419-2437).
ctgctccatggttacacta

SEQ ID NO: 625494 - DNA, 19 bp, Mus musculus
  siRNA target sequence for Htr2a (NM_172812.1,2447-2465).
cactcggaagagatgtgta

SEQ ID NO: 625495 - DNA, 19 bp, Mus musculus
  siRNA target sequence for Htr2a (NM_172812.1,2461-2479).
gtgtacagacaatattgaa

SEQ ID NO: 625496 - DNA, 19 bp, Mus musculus
  siRNA target sequence for Htr2b (NM_008311.1,39-57).
gcttcatcttataaaatgt

SEQ ID NO: 625497 - DNA, 19 bp, Mus musculus
  siRNA target sequence for Htr2b (NM_008311.1,116-134).
gactaaccgttctggatta

SEQ ID NO: 625498 - DNA, 19 bp, Mus musculus
  siRNA target sequence for Htr2b (NM_008311.1,118-136).
ctaaccgttctggattaga

SEQ ID NO: 625499 - DNA, 19 bp, Mus musculus
  siRNA target sequence for Htr2b (NM_008311.1,210-228).
ctgatactcgcggtgataa

SEQ ID NO: 625500 - DNA, 19 bp, Mus musculus
  siRNA target sequence for Htr2b (NM_008311.1,212-230).
gatactcgcggtgataata

SEQ ID NO: 625501 - DNA, 19 bp, Mus musculus
  siRNA target sequence for Htr2b (NM_008311.1,244-262).
ggaacatccttgtgattct

SEQ ID NO: 625502 - DNA, 19 bp, Mus musculus
  siRNA target sequence for Htr2b (NM_008311.1,288-306).
cagtacgctaccaactact

SEQ ID NO: 625503 - DNA, 19 bp, Mus musculus
  siRNA target sequence for Htr2b (NM_008311.1,290-308).
gtacgctaccaactacttt

SEQ ID NO: 625504 - DNA, 19 bp, Mus musculus
  siRNA target sequence for Htr2b (NM_008311.1,293-311).
cgctaccaactacttttta

SEQ ID NO: 625505 - DNA, 19 bp, Mus musculus
  siRNA target sequence for Htr2b (NM_008311.1,295-313).
ctaccaactactttttaat

SEQ ID NO: 625506 - DNA, 19 bp, Mus musculus
  siRNA target sequence for Htr2b (NM_008311.1,316-334).
ccttggcgatagcagattt

SEQ ID NO: 625507 - DNA, 19 bp, Mus musculus
  siRNA target sequence for Htr2b (NM_008311.1,357-375).
ccgattgccctcttgacaa

SEQ ID NO: 625508 - DNA, 19 bp, Mus musculus
  siRNA target sequence for Htr2b (NM_008311.1,358-376).
cgattgccctcttgacaat

SEQ ID NO: 625509 - DNA, 19 bp, Mus musculus
  siRNA target sequence for Htr2b (NM_008311.1,363-381).
gccctcttgacaatcatgt

SEQ ID NO: 625510 - DNA, 19 bp, Mus musculus
  siRNA target sequence for Htr2b (NM_008311.1,364-382).
ccctcttgacaatcatgtt

SEQ ID NO: 625511 - DNA, 19 bp, Mus musculus
  siRNA target sequence for Htr2b (NM_008311.1,365-383).
cctcttgacaatcatgttt

SEQ ID NO: 625512 - DNA, 19 bp, Mus musculus
  siRNA target sequence for Htr2b (NM_008311.1,411-429).
ctgtgtcctgcctggttat

SEQ ID NO: 625513 - DNA, 19 bp, Mus musculus
  siRNA target sequence for Htr2b (NM_008311.1,415-433).
gtcctgcctggttattcct

SEQ ID NO: 625514 - DNA, 19 bp, Mus musculus
  siRNA target sequence for Htr2b (NM_008311.1,424-442).
ggttattcctcgatgttct

SEQ ID NO: 625515 - DNA, 19 bp, Mus musculus
  siRNA target sequence for Htr2b (NM_008311.1,431-449).
cctcgatgttctcttttca

SEQ ID NO: 625516 - DNA, 19 bp, Mus musculus
  siRNA target sequence for Htr2b (NM_008311.1,432-450).
ctcgatgttctcttttcaa

SEQ ID NO: 625517 - DNA, 19 bp, Mus musculus
  siRNA target sequence for Htr2b (NM_008311.1,434-452).
cgatgttctcttttcaact

SEQ ID NO: 625518 - DNA, 19 bp, Mus musculus
  siRNA target sequence for Htr2b (NM_008311.1,488-506).
ccgctatatagccatcaaa

SEQ ID NO: 625519 - DNA, 19 bp, Mus musculus
  siRNA target sequence for Htr2b (NM_008311.1,489-507).
cgctatatagccatcaaaa

SEQ ID NO: 625520 - DNA, 19 bp, Mus musculus
  siRNA target sequence for Htr2b (NM_008311.1,538-556).
gggctactgcattcatcaa

SEQ ID NO: 625521 - DNA, 19 bp, Mus musculus
  siRNA target sequence for Htr2b (NM_008311.1,540-558).
gctactgcattcatcaaga

SEQ ID NO: 625522 - DNA, 19 bp, Mus musculus
  siRNA target sequence for Htr2b (NM_008311.1,591-609).
gccatcccagtccctatta

SEQ ID NO: 625523 - DNA, 19 bp, Mus musculus
  siRNA target sequence for Htr2b (NM_008311.1,620-638).
gactgatgtgattaatcca

SEQ ID NO: 625524 - DNA, 19 bp, Mus musculus
  siRNA target sequence for Htr2b (NM_008311.1,724-742).
ccatcatggtagtcactta

SEQ ID NO: 625525 - DNA, 19 bp, Mus musculus
  siRNA target sequence for Htr2b (NM_008311.1,732-750).
gtagtcacttactttctca

SEQ ID NO: 625526 - DNA, 19 bp, Mus musculus
  siRNA target sequence for Htr2b (NM_008311.1,751-769).
ccattcacactttacagaa

SEQ ID NO: 625527 - DNA, 19 bp, Mus musculus
  siRNA target sequence for Htr2b (NM_008311.1,774-792).
gcttacttggtcaaaaata

SEQ ID NO: 625528 - DNA, 19 bp, Mus musculus
  siRNA target sequence for Htr2b (NM_008311.1,842-860).
ggaagactcatccttttca

SEQ ID NO: 625529 - DNA, 19 bp, Mus musculus
  siRNA target sequence for Htr2b (NM_008311.1,889-907).
ggtctcacagggataaaat

SEQ ID NO: 625530 - DNA, 19 bp, Mus musculus
  siRNA target sequence for Htr2b (NM_008311.1,890-908).
gtctcacagggataaaatt

SEQ ID NO: 625531 - DNA, 19 bp, Mus musculus
  siRNA target sequence for Htr2b (NM_008311.1,1005-1023).
gcccttggagtcgtgtttt

SEQ ID NO: 625532 - DNA, 19 bp, Mus musculus
  siRNA target sequence for Htr2b (NM_008311.1,1006-1024).
cccttggagtcgtgttttt

SEQ ID NO: 625533 - DNA, 19 bp, Mus musculus
  siRNA target sequence for Htr2b (NM_008311.1,1011-1029).
ggagtcgtgtttttccttt

SEQ ID NO: 625534 - DNA, 19 bp, Mus musculus
  siRNA target sequence for Htr2b (NM_008311.1,1043-1061).
gtgccccttttttattaca

SEQ ID NO: 625535 - DNA, 19 bp, Mus musculus
  siRNA target sequence for Htr2b (NM_008311.1,1128-1146).
gtgtggataggctacgttt

SEQ ID NO: 625536 - DNA, 19 bp, Mus musculus
  siRNA target sequence for Htr2b (NM_008311.1,1187-1205).
gacatttcgggaagcattt

SEQ ID NO: 625537 - DNA, 19 bp, Mus musculus
  siRNA target sequence for Htr2b (NM_008311.1,1200-1218).
gcatttggcaggtacatca

SEQ ID NO: 625538 - DNA, 19 bp, Mus musculus
  siRNA target sequence for Htr2b (NM_008311.1,1210-1228).
ggtacatcacctgcaatta

SEQ ID NO: 625539 - DNA, 19 bp, Mus musculus
  siRNA target sequence for Htr2b (NM_008311.1,1230-1248).
cgagccacaaagtcagtaa

SEQ ID NO: 625540 - DNA, 19 bp, Mus musculus
  siRNA target sequence for Htr2b (NM_008311.1,1243-1261).
cagtaaaagcacttaggaa

SEQ ID NO: 625541 - DNA, 19 bp, Mus musculus
  siRNA target sequence for Htr2b (NM_008311.1,1251-1269).
gcacttaggaagttttcca

SEQ ID NO: 625542 - DNA, 19 bp, Mus musculus
  siRNA target sequence for Htr2b (NM_008311.1,1262-1280).
gttttccagtacactttgt

SEQ ID NO: 625543 - DNA, 19 bp, Mus musculus
  siRNA target sequence for Htr2b (NM_008311.1,1285-1303).
ggaattcaatggtagaaaa

SEQ ID NO: 625544 - DNA, 19 bp, Mus musculus
  siRNA target sequence for Htr2b (NM_008311.1,1316-1334).
cacaaaacatggaattcga

SEQ ID NO: 625545 - DNA, 19 bp, Mus musculus
  siRNA target sequence for Htr2b (NM_008311.1,1318-1336).
caaaacatggaattcgaaa

SEQ ID NO: 625546 - DNA, 19 bp, Mus musculus
  siRNA target sequence for Htr2b (NM_008311.1,1420-1438).
cccttctcactgaaaacga

SEQ ID NO: 625547 - DNA, 19 bp, Mus musculus
  siRNA target sequence for Htr2b (NM_008311.1,1421-1439).
ccttctcactgaaaacgat

SEQ ID NO: 625548 - DNA, 19 bp, Mus musculus
  siRNA target sequence for Htr2c (NM_008312.2,748-766).
gtttggcagttcgatattt

SEQ ID NO: 625549 - DNA, 19 bp, Mus musculus
  siRNA target sequence for Htr2c (NM_008312.2,753-771).
gcagttcgatatttccata

SEQ ID NO: 625550 - DNA, 19 bp, Mus musculus
  siRNA target sequence for Htr2c (NM_008312.2,756-774).
gttcgatatttccataagt

SEQ ID NO: 625551 - DNA, 19 bp, Mus musculus
  siRNA target sequence for Htr2c (NM_008312.2,773-791).
gtccagtagcagctatagt

SEQ ID NO: 625552 - DNA, 19 bp, Mus musculus
  siRNA target sequence for Htr2c (NM_008312.2,775-793).
ccagtagcagctatagtaa

SEQ ID NO: 625553 - DNA, 19 bp, Mus musculus
  siRNA target sequence for Htr2c (NM_008312.2,790-808).
gtaactgacacttttaatt

SEQ ID NO: 625554 - DNA, 19 bp, Mus musculus
  siRNA target sequence for Htr2c (NM_008312.2,817-835).
ggtggacgcttgtttcaat

SEQ ID NO: 625555 - DNA, 19 bp, Mus musculus
  siRNA target sequence for Htr2c (NM_008312.2,838-856).
ccggacggggtacaaaact

SEQ ID NO: 625556 - DNA, 19 bp, Mus musculus
  siRNA target sequence for Htr2c (NM_008312.2,865-883).
ctttcaatagtcgtgatta

SEQ ID NO: 625557 - DNA, 19 bp, Mus musculus
  siRNA target sequence for Htr2c (NM_008312.2,874-892).
gtcgtgattataatcatga

SEQ ID NO: 625558 - DNA, 19 bp, Mus musculus
  siRNA target sequence for Htr2c (NM_008312.2,891-909).
gacaatagggggcaacatt

SEQ ID NO: 625559 - DNA, 19 bp, Mus musculus
  siRNA target sequence for Htr2c (NM_008312.2,899-917).
ggggcaacattctcgttat

SEQ ID NO: 625560 - DNA, 19 bp, Mus musculus
  siRNA target sequence for Htr2c (NM_008312.2,902-920).
gcaacattctcgttatcat

SEQ ID NO: 625561 - DNA, 19 bp, Mus musculus
  siRNA target sequence for Htr2c (NM_008312.2,923-941).
cagtaagcatggagaagaa

SEQ ID NO: 625562 - DNA, 19 bp, Mus musculus
  siRNA target sequence for Htr2c (NM_008312.2,974-992).
ccctagccattgctgatat

SEQ ID NO: 625563 - DNA, 19 bp, Mus musculus
  siRNA target sequence for Htr2c (NM_008312.2,1022-1040).
ctctgcttgcaattcttta

SEQ ID NO: 625564 - DNA, 19 bp, Mus musculus
  siRNA target sequence for Htr2c (NM_008312.2,1071-1089).
gtgccccgtctggatttca

SEQ ID NO: 625565 - DNA, 19 bp, Mus musculus
  siRNA target sequence for Htr2c (NM_008312.2,1073-1091).
gccccgtctggatttcact

SEQ ID NO: 625566 - DNA, 19 bp, Mus musculus
  siRNA target sequence for Htr2c (NM_008312.2,1074-1092).
ccccgtctggatttcacta

SEQ ID NO: 625567 - DNA, 19 bp, Mus musculus
  siRNA target sequence for Htr2c (NM_008312.2,1077-1095).
cgtctggatttcactagat

SEQ ID NO: 625568 - DNA, 19 bp, Mus musculus
  siRNA target sequence for Htr2c (NM_008312.2,1174-1192).
gagcatagccggttcaatt

SEQ ID NO: 625569 - DNA, 19 bp, Mus musculus
  siRNA target sequence for Htr2c (NM_008312.2,1195-1213).
cggactaaggccatcatga

SEQ ID NO: 625570 - DNA, 19 bp, Mus musculus
  siRNA target sequence for Htr2c (NM_008312.2,1219-1237).
gccatcgtttgggcaatat

SEQ ID NO: 625571 - DNA, 19 bp, Mus musculus
  siRNA target sequence for Htr2c (NM_008312.2,1221-1239).
catcgtttgggcaatatca

SEQ ID NO: 625572 - DNA, 19 bp, Mus musculus
  siRNA target sequence for Htr2c (NM_008312.2,1224-1242).
cgtttgggcaatatcaata

SEQ ID NO: 625573 - DNA, 19 bp, Mus musculus
  siRNA target sequence for Htr2c (NM_008312.2,1277-1295).
gggacgaaagcaaagtgtt

SEQ ID NO: 625574 - DNA, 19 bp, Mus musculus
  siRNA target sequence for Htr2c (NM_008312.2,1287-1305).
caaagtgttcgtgaataat

SEQ ID NO: 625575 - DNA, 19 bp, Mus musculus
  siRNA target sequence for Htr2c (NM_008312.2,1291-1309).
gtgttcgtgaataatacta

SEQ ID NO: 625576 - DNA, 19 bp, Mus musculus
  siRNA target sequence for Htr2c (NM_008312.2,1307-1325).
ctacctgcgtgctcaatga

SEQ ID NO: 625577 - DNA, 19 bp, Mus musculus
  siRNA target sequence for Htr2c (NM_008312.2,1346-1364).
ggtccttcgtggcattctt

SEQ ID NO: 625578 - DNA, 19 bp, Mus musculus
  siRNA target sequence for Htr2c (NM_008312.2,1349-1367).
ccttcgtggcattcttcat

SEQ ID NO: 625579 - DNA, 19 bp, Mus musculus
  siRNA target sequence for Htr2c (NM_008312.2,1362-1380).
cttcatcccgttgacaatt

SEQ ID NO: 625580 - DNA, 19 bp, Mus musculus
  siRNA target sequence for Htr2c (NM_008312.2,1418-1436).
gccgtcaaaccctgatgtt

SEQ ID NO: 625581 - DNA, 19 bp, Mus musculus
  siRNA target sequence for Htr2c (NM_008312.2,1419-1437).
ccgtcaaaccctgatgtta

SEQ ID NO: 625582 - DNA, 19 bp, Mus musculus
  siRNA target sequence for Htr2c (NM_008312.2,1453-1471).
gaggaggaactgcgtaata

SEQ ID NO: 625583 - DNA, 19 bp, Mus musculus
  siRNA target sequence for Htr2c (NM_008312.2,1466-1484).
gtaatatcagcctgaactt

SEQ ID NO: 625584 - DNA, 19 bp, Mus musculus
  siRNA target sequence for Htr2c (NM_008312.2,1586-1604).
gcaccatgcaagctatcaa

SEQ ID NO: 625585 - DNA, 19 bp, Mus musculus
  siRNA target sequence for Htr2c (NM_008312.2,1590-1608).
catgcaagctatcaacaat

SEQ ID NO: 625586 - DNA, 19 bp, Mus musculus
  siRNA target sequence for Htr2c (NM_008312.2,1627-1645).
gtccttggcattgtattct

SEQ ID NO: 625587 - DNA, 19 bp, Mus musculus
  siRNA target sequence for Htr2c (NM_008312.2,1639-1657).
gtattctttgtgtttctga

SEQ ID NO: 625588 - DNA, 19 bp, Mus musculus
  siRNA target sequence for Htr2c (NM_008312.2,1710-1728).
ggcctgtaaccaaaagcta

SEQ ID NO: 625589 - DNA, 19 bp, Mus musculus
  siRNA target sequence for Htr2c (NM_008312.2,1712-1730).
cctgtaaccaaaagctaat

SEQ ID NO: 625590 - DNA, 19 bp, Mus musculus
  siRNA target sequence for Htr2c (NM_008312.2,1715-1733).
gtaaccaaaagctaatgga

SEQ ID NO: 625591 - DNA, 19 bp, Mus musculus
  siRNA target sequence for Htr2c (NM_008312.2,1797-1815).
cactctcttcaacaaaatt

SEQ ID NO: 625592 - DNA, 19 bp, Mus musculus
  siRNA target sequence for Htr2c (NM_008312.2,1799-1817).
ctctcttcaacaaaattta

SEQ ID NO: 625593 - DNA, 19 bp, Mus musculus
  siRNA target sequence for Htr2c (NM_008312.2,1819-1837).
cgaagggctttctctaaat

SEQ ID NO: 625594 - DNA, 19 bp, Mus musculus
  siRNA target sequence for Htr2c (NM_008312.2,1823-1841).
gggctttctctaaatattt

SEQ ID NO: 625595 - DNA, 19 bp, Mus musculus
  siRNA target sequence for Htr2c (NM_008312.2,1848-1866).
cgattataagccagacaaa

SEQ ID NO: 625596 - DNA, 19 bp, Mus musculus
  siRNA target sequence for Htr2c (NM_008312.2,1869-1887).
gcctcctgttcgacagatt

SEQ ID NO: 625597 - DNA, 19 bp, Mus musculus
  siRNA target sequence for Htr2c (NM_008312.2,1873-1891).
cctgttcgacagattccta

SEQ ID NO: 625598 - DNA, 19 bp, Mus musculus
  siRNA target sequence for Htr2c (NM_008312.2,1935-1953).
catttatcggcataccaat

SEQ ID NO: 625599 - DNA, 19 bp, Mus musculus
  siRNA target sequence for Htr2c (NM_008312.2,1957-1975).
cgtgtagttaggaaagcta

SEQ ID NO: 625600 - DNA, 19 bp, Mus musculus
  siRNA target sequence for Htr2c (NM_008312.2,1998-2016).
gatgcaggtagagaattta

SEQ ID NO: 625601 - DNA, 19 bp, Mus musculus
  siRNA target sequence for Htr2c (NM_008312.2,2022-2040).
gccggtcaatccctctaat

SEQ ID NO: 625602 - DNA, 19 bp, Mus musculus
  siRNA target sequence for Htr2c (NM_008312.2,2024-2042).
cggtcaatccctctaatgt

SEQ ID NO: 625603 - DNA, 19 bp, Mus musculus
  siRNA target sequence for Htr2c (NM_008312.2,2043-2061).
ggtcagcgagaggattagt

SEQ ID NO: 625604 - DNA, 19 bp, Mus musculus
  siRNA target sequence for Htr2c (NM_008312.2,2046-2064).
cagcgagaggattagtagt

SEQ ID NO: 625605 - DNA, 19 bp, Mus musculus
  siRNA target sequence for Htr4 (NM_008313.1,73-91).
cgttccttgcagtggttat

SEQ ID NO: 625606 - DNA, 19 bp, Mus musculus
  siRNA target sequence for Htr4 (NM_008313.1,259-277).
gggcttatggggagatgtt

SEQ ID NO: 625607 - DNA, 19 bp, Mus musculus
  siRNA target sequence for Htr4 (NM_008313.1,313-331).
ccacagcatcgatctttca

SEQ ID NO: 625608 - DNA, 19 bp, Mus musculus
  siRNA target sequence for Htr4 (NM_008313.1,384-402).
gtttataggaacaagatga

SEQ ID NO: 625609 - DNA, 19 bp, Mus musculus
  siRNA target sequence for Htr4 (NM_008313.1,405-423).
cctctacgcatcgcattaa

SEQ ID NO: 625610 - DNA, 19 bp, Mus musculus
  siRNA target sequence for Htr4 (NM_008313.1,406-424).
ctctacgcatcgcattaat

SEQ ID NO: 625611 - DNA, 19 bp, Mus musculus
  siRNA target sequence for Htr4 (NM_008313.1,408-426).
ctacgcatcgcattaatgt

SEQ ID NO: 625612 - DNA, 19 bp, Mus musculus
  siRNA target sequence for Htr4 (NM_008313.1,437-455).
ctgggtccttcccatgttt

SEQ ID NO: 625613 - DNA, 19 bp, Mus musculus
  siRNA target sequence for Htr4 (NM_008313.1,440-458).
ggtccttcccatgtttata

SEQ ID NO: 625614 - DNA, 19 bp, Mus musculus
  siRNA target sequence for Htr4 (NM_008313.1,441-459).
gtccttcccatgtttatat

SEQ ID NO: 625615 - DNA, 19 bp, Mus musculus
  siRNA target sequence for Htr4 (NM_008313.1,485-503).
gaacaacatcggcatagtt

SEQ ID NO: 625616 - DNA, 19 bp, Mus musculus
  siRNA target sequence for Htr4 (NM_008313.1,488-506).
caacatcggcatagttgat

SEQ ID NO: 625617 - DNA, 19 bp, Mus musculus
  siRNA target sequence for Htr4 (NM_008313.1,494-512).
cggcatagttgatgtgata

SEQ ID NO: 625618 - DNA, 19 bp, Mus musculus
  siRNA target sequence for Htr4 (NM_008313.1,544-562).
ccacgtggtgtgtcttcat

SEQ ID NO: 625619 - DNA, 19 bp, Mus musculus
  siRNA target sequence for Htr4 (NM_008313.1,632-650).
ggcctattaccgaatctat

SEQ ID NO: 625620 - DNA, 19 bp, Mus musculus
  siRNA target sequence for Htr4 (NM_008313.1,634-652).
cctattaccgaatctatgt

SEQ ID NO: 625621 - DNA, 19 bp, Mus musculus
  siRNA target sequence for Htr4 (NM_008313.1,770-788).
ggcagccaagactttatgt

SEQ ID NO: 625622 - DNA, 19 bp, Mus musculus
  siRNA target sequence for Htr4 (NM_008313.1,772-790).
cagccaagactttatgtgt

SEQ ID NO: 625623 - DNA, 19 bp, Mus musculus
  siRNA target sequence for Htr4 (NM_008313.1,916-934).
cggggttgaacccttttct

SEQ ID NO: 625624 - DNA, 19 bp, Mus musculus
  siRNA target sequence for Htr4 (NM_008313.1,918-936).
gggttgaacccttttctct

SEQ ID NO: 625625 - DNA, 19 bp, Mus musculus
  siRNA target sequence for Htr4 (NM_008313.1,933-951).
ctctatgccttcttgaata

SEQ ID NO: 625626 - DNA, 19 bp, Mus musculus
  siRNA target sequence for Htr4 (NM_008313.1,944-962).
cttgaataagtctttcaga

SEQ ID NO: 625627 - DNA, 19 bp, Mus musculus
  siRNA target sequence for Htr4 (NM_008313.1,990-1008).
gatgatgagcgctacaaaa

SEQ ID NO: 625628 - DNA, 19 bp, Mus musculus
  siRNA target sequence for Htr4 (NM_008313.1,1039-1057).
gttcaaccacaaccattaa

SEQ ID NO: 625629 - DNA, 19 bp, Mus musculus
  siRNA target sequence for Htr4 (NM_008313.1,1059-1077).
ggatccacccatgtactaa

SEQ ID NO: 625630 - DNA, 19 bp, Mus musculus
  siRNA target sequence for Htr4 (NM_008313.1,1149-1167).
gctcagcccagtgatactt

SEQ ID NO: 625631 - DNA, 19 bp, Mus musculus
  siRNA target sequence for Htr5a (NM_008314.1,515-533).
gtaaacttgacctcctttt

SEQ ID NO: 625632 - DNA, 19 bp, Mus musculus
  siRNA target sequence for Htr5a (NM_008314.1,591-609).
gccctagtcggccttttct

SEQ ID NO: 625633 - DNA, 19 bp, Mus musculus
  siRNA target sequence for Htr5a (NM_008314.1,593-611).
cctagtcggccttttctct

SEQ ID NO: 625634 - DNA, 19 bp, Mus musculus
  siRNA target sequence for Htr5a (NM_008314.1,786-804).
cactgagcctggtacatga

SEQ ID NO: 625635 - DNA, 19 bp, Mus musculus
  siRNA target sequence for Htr5a (NM_008314.1,969-987).
gtgtctccaatgtgatgat

SEQ ID NO: 625636 - DNA, 19 bp, Mus musculus
  siRNA target sequence for Htr5a (NM_008314.1,1040-1058).
ggctggggagagacttatt

SEQ ID NO: 625637 - DNA, 19 bp, Mus musculus
  siRNA target sequence for Htr5a (NM_008314.1,1474-1492).
gtggttgggctattctaat

SEQ ID NO: 625638 - DNA, 19 bp, Mus musculus
  siRNA target sequence for Htr5b (NM_010483.2,762-780).
gatcgctactggactatca

SEQ ID NO: 625639 - DNA, 19 bp, Mus musculus
  siRNA target sequence for Htr5b (NM_010483.2,817-835).
gtgcttctgcgctcatgat

SEQ ID NO: 625640 - DNA, 19 bp, Mus musculus
  siRNA target sequence for Htr5b (NM_010483.2,890-908).
ctggggcgaagcctatgat

SEQ ID NO: 625641 - DNA, 19 bp, Mus musculus
  siRNA target sequence for Htr5b (NM_010483.2,1205-1223).
gatggtcgggatcttgatt

SEQ ID NO: 625642 - DNA, 19 bp, Mus musculus
  siRNA target sequence for Htr5b (NM_010483.2,1297-1315).
cacccatctggaaaagcat

SEQ ID NO: 625643 - DNA, 19 bp, Mus musculus
  siRNA target sequence for Htr5b (NM_010483.2,1299-1317).
cccatctggaaaagcatat

SEQ ID NO: 625644 - DNA, 19 bp, Mus musculus
  siRNA target sequence for Htr5b (NM_010483.2,1322-1340).
gtggcttggatattccaat

SEQ ID NO: 625645 - DNA, 19 bp, Mus musculus
  siRNA target sequence for Htr5b (NM_010483.2,1326-1344).
cttggatattccaattcgt

SEQ ID NO: 625646 - DNA, 19 bp, Mus musculus
  siRNA target sequence for Htr5b (NM_010483.2,1364-1382).
cactgcctttaataagaat

SEQ ID NO: 625647 - DNA, 19 bp, Mus musculus
  siRNA target sequence for Htr6 (NM_021358.1,197-215).
ctgcgcaacacgtctaact

SEQ ID NO: 625648 - DNA, 19 bp, Mus musculus
  siRNA target sequence for Htr6 (NM_021358.1,200-218).
cgcaacacgtctaacttct

SEQ ID NO: 625649 - DNA, 19 bp, Mus musculus
  siRNA target sequence for Htr6 (NM_021358.1,201-219).
gcaacacgtctaacttctt

SEQ ID NO: 625650 - DNA, 19 bp, Mus musculus
  siRNA target sequence for Htr6 (NM_021358.1,357-375).
gcagcgcctccattctcaa

SEQ ID NO: 625651 - DNA, 19 bp, Mus musculus
  siRNA target sequence for Htr6 (NM_021358.1,535-553).
gggcaaagctcgaacatct

SEQ ID NO: 625652 - DNA, 19 bp, Mus musculus
  siRNA target sequence for Htr6 (NM_021358.1,602-620).
gcgtccggcgtcacctttt

SEQ ID NO: 625653 - DNA, 19 bp, Mus musculus
  siRNA target sequence for Htr6 (NM_021358.1,603-621).
cgtccggcgtcaccttttt

SEQ ID NO: 625654 - DNA, 19 bp, Mus musculus
  siRNA target sequence for Htr6 (NM_021358.1,606-624).
ccggcgtcacctttttcct

SEQ ID NO: 625655 - DNA, 19 bp, Mus musculus
  siRNA target sequence for Htr6 (NM_021358.1,854-872).
ctgagcatgttctttgtca

SEQ ID NO: 625656 - DNA, 19 bp, Mus musculus
  siRNA target sequence for Htr6 (NM_021358.1,949-967).
cacatggctgggatactgt

SEQ ID NO: 625657 - DNA, 19 bp, Mus musculus
  siRNA target sequence for Htr6 (NM_021358.1,972-990).
gcaccatgaaccctatcat

SEQ ID NO: 625658 - DNA, 19 bp, Mus musculus
  siRNA target sequence for Htr6 (NM_021358.1,1156-1174).
gccacccaactcagattca

SEQ ID NO: 625659 - DNA, 19 bp, Mus musculus
  siRNA target sequence for Htr6 (NM_021358.1,1269-1287).
cccctactgtggtcaactt

SEQ ID NO: 625660 - DNA, 19 bp, Mus musculus
  siRNA target sequence for Htr7 (NM_008315.1,327-345).
cggggagcagatcaactat

SEQ ID NO: 625661 - DNA, 19 bp, Mus musculus
  siRNA target sequence for Htr7 (NM_008315.1,350-368).
gagtcgagaaagttgtgat

SEQ ID NO: 625662 - DNA, 19 bp, Mus musculus
  siRNA target sequence for Htr7 (NM_008315.1,513-531).
ggcggtcatgcctttcgtt

SEQ ID NO: 625663 - DNA, 19 bp, Mus musculus
  siRNA target sequence for Htr7 (NM_008315.1,514-532).
gcggtcatgcctttcgtta

SEQ ID NO: 625664 - DNA, 19 bp, Mus musculus
  siRNA target sequence for Htr7 (NM_008315.1,710-728).
gtatggccaaaatgattct

SEQ ID NO: 625665 - DNA, 19 bp, Mus musculus
  siRNA target sequence for Htr7 (NM_008315.1,771-789).
cttcggatgggctcagaat

SEQ ID NO: 625666 - DNA, 19 bp, Mus musculus
  siRNA target sequence for Htr7 (NM_008315.1,775-793).
ggatgggctcagaatgtga

SEQ ID NO: 625667 - DNA, 19 bp, Mus musculus
  siRNA target sequence for Htr7 (NM_008315.1,776-794).
gatgggctcagaatgtgaa

SEQ ID NO: 625668 - DNA, 19 bp, Mus musculus
  siRNA target sequence for Htr7 (NM_008315.1,786-804).
gaatgtgaacgatgacaaa

SEQ ID NO: 625669 - DNA, 19 bp, Mus musculus
  siRNA target sequence for Htr7 (NM_008315.1,790-808).
gtgaacgatgacaaagtgt

SEQ ID NO: 625670 - DNA, 19 bp, Mus musculus
  siRNA target sequence for Htr7 (NM_008315.1,848-866).
ccgcagtggcgttttatat

SEQ ID NO: 625671 - DNA, 19 bp, Mus musculus
  siRNA target sequence for Htr7 (NM_008315.1,885-903).
gttcatgtactatcagatt

SEQ ID NO: 625672 - DNA, 19 bp, Mus musculus
  siRNA target sequence for Htr7 (NM_008315.1,923-941).
gcgcagccaaacacaagtt

SEQ ID NO: 625673 - DNA, 19 bp, Mus musculus
  siRNA target sequence for Htr7 (NM_008315.1,1042-1060).
ctcaaacacgaaaggaaaa

SEQ ID NO: 625674 - DNA, 19 bp, Mus musculus
  siRNA target sequence for Htr7 (NM_008315.1,1048-1066).
cacgaaaggaaaaacattt

SEQ ID NO: 625675 - DNA, 19 bp, Mus musculus
  siRNA target sequence for Htr7 (NM_008315.1,1157-1175).
ccacagcaaggccctttat

SEQ ID NO: 625676 - DNA, 19 bp, Mus musculus
  siRNA target sequence for Htr7 (NM_008315.1,1249-1267).
ctcattaacccttttatat

SEQ ID NO: 625677 - DNA, 19 bp, Mus musculus
  siRNA target sequence for Htr7 (NM_008315.1,1362-1380).
gcacgaagccctgaaactt

SEQ ID NO: 625678 - DNA, 19 bp, Mus musculus
  siRNA target sequence for Htr7 (NM_008315.1,1391-1409).
ctgagagaagcgagtttgt

SEQ ID NO: 625679 - DNA, 19 bp, Mus musculus
  siRNA target sequence for Htr7 (NM_008315.1,1400-1418).
gcgagtttgtgctacaaaa

SEQ ID NO: 625680 - DNA, 19 bp, Mus musculus
  siRNA target sequence for Htr7 (NM_008315.1,1404-1422).
gtttgtgctacaaaactgt

SEQ ID NO: 625681 - DNA, 19 bp, Mus musculus
  siRNA target sequence for Il8ra (NM_178241.1,34-52).
cctgagggtgactttgaga

SEQ ID NO: 625682 - DNA, 19 bp, Mus musculus
  siRNA target sequence for Il8ra (NM_178241.1,78-96).
gctgcccactggagattat

SEQ ID NO: 625683 - DNA, 19 bp, Mus musculus
  siRNA target sequence for Il8ra (NM_178241.1,104-122).
cctgtaagagagttccaat

SEQ ID NO: 625684 - DNA, 19 bp, Mus musculus
  siRNA target sequence for Il8ra (NM_178241.1,105-123).
ctgtaagagagttccaata

SEQ ID NO: 625685 - DNA, 19 bp, Mus musculus
  siRNA target sequence for Il8ra (NM_178241.1,125-143).
ccaacaggcaggctttagt

SEQ ID NO: 625686 - DNA, 19 bp, Mus musculus
  siRNA target sequence for Il8ra (NM_178241.1,126-144).
caacaggcaggctttagtt

SEQ ID NO: 625687 - DNA, 19 bp, Mus musculus
  siRNA target sequence for Il8ra (NM_178241.1,135-153).
ggctttagttgtcttttat

SEQ ID NO: 625688 - DNA, 19 bp, Mus musculus
  siRNA target sequence for Il8ra (NM_178241.1,188-206).
cgctggtgatgctggttat

SEQ ID NO: 625689 - DNA, 19 bp, Mus musculus
  siRNA target sequence for Il8ra (NM_178241.1,227-245).
gatccgtcatggatgtcta

SEQ ID NO: 625690 - DNA, 19 bp, Mus musculus
  siRNA target sequence for Il8ra (NM_178241.1,264-282).
cgccgacctactcttttca

SEQ ID NO: 625691 - DNA, 19 bp, Mus musculus
  siRNA target sequence for Il8ra (NM_178241.1,265-283).
gccgacctactcttttcat

SEQ ID NO: 625692 - DNA, 19 bp, Mus musculus
  siRNA target sequence for Il8ra (NM_178241.1,266-284).
ccgacctactcttttcatt

SEQ ID NO: 625693 - DNA, 19 bp, Mus musculus
  siRNA target sequence for Il8ra (NM_178241.1,457-475).
cgaaagcgctacttggtta

SEQ ID NO: 625694 - DNA, 19 bp, Mus musculus
  siRNA target sequence for Il8ra (NM_178241.1,458-476).
gaaagcgctacttggttaa

SEQ ID NO: 625695 - DNA, 19 bp, Mus musculus
  siRNA target sequence for Il8ra (NM_178241.1,464-482).
gctacttggttaaattcgt

SEQ ID NO: 625696 - DNA, 19 bp, Mus musculus
  siRNA target sequence for Il8ra (NM_178241.1,497-515).
ggggtctatctttgattct

SEQ ID NO: 625697 - DNA, 19 bp, Mus musculus
  siRNA target sequence for Il8ra (NM_178241.1,499-517).
ggtctatctttgattctgt

SEQ ID NO: 625698 - DNA, 19 bp, Mus musculus
  siRNA target sequence for Il8ra (NM_178241.1,537-555).
ccgccaggcatataaacca

SEQ ID NO: 625699 - DNA, 19 bp, Mus musculus
  siRNA target sequence for Il8ra (NM_178241.1,538-556).
cgccaggcatataaaccat

SEQ ID NO: 625700 - DNA, 19 bp, Mus musculus
  siRNA target sequence for Il8ra (NM_178241.1,566-584).
gtacagtctgctatgaagt

SEQ ID NO: 625701 - DNA, 19 bp, Mus musculus
  siRNA target sequence for Il8ra (NM_178241.1,588-606).
gggtgaagccacaacagat

SEQ ID NO: 625702 - DNA, 19 bp, Mus musculus
  siRNA target sequence for Il8ra (NM_178241.1,589-607).
ggtgaagccacaacagatt

SEQ ID NO: 625703 - DNA, 19 bp, Mus musculus
  siRNA target sequence for Il8ra (NM_178241.1,622-640).
cggggtctgtcccacatat

SEQ ID NO: 625704 - DNA, 19 bp, Mus musculus
  siRNA target sequence for Il8ra (NM_178241.1,623-641).
ggggtctgtcccacatatt

SEQ ID NO: 625705 - DNA, 19 bp, Mus musculus
  siRNA target sequence for Il8ra (NM_178241.1,776-794).
gttgtctgccctacaatct

SEQ ID NO: 625706 - DNA, 19 bp, Mus musculus
  siRNA target sequence for Il8ra (NM_178241.1,801-819).
gctctcagacactctctta

SEQ ID NO: 625707 - DNA, 19 bp, Mus musculus
  siRNA target sequence for Il8ra (NM_178241.1,816-834).
cttaggagcccacttgatt

SEQ ID NO: 625708 - DNA, 19 bp, Mus musculus
  siRNA target sequence for Il8ra (NM_178241.1,821-839).
gagcccacttgattgaaga

SEQ ID NO: 625709 - DNA, 19 bp, Mus musculus
  siRNA target sequence for Il8ra (NM_178241.1,823-841).
gcccacttgattgaagata

SEQ ID NO: 625710 - DNA, 19 bp, Mus musculus
  siRNA target sequence for Il8ra (NM_178241.1,825-843).
ccacttgattgaagatact

SEQ ID NO: 625711 - DNA, 19 bp, Mus musculus
  siRNA target sequence for Il8ra (NM_178241.1,826-844).
cacttgattgaagatactt

SEQ ID NO: 625712 - DNA, 19 bp, Mus musculus
  siRNA target sequence for Il8ra (NM_178241.1,845-863).
gcgaacgccgcaatgacat

SEQ ID NO: 625713 - DNA, 19 bp, Mus musculus
  siRNA target sequence for Il8ra (NM_178241.1,846-864).
cgaacgccgcaatgacatt

SEQ ID NO: 625714 - DNA, 19 bp, Mus musculus
  siRNA target sequence for Il8ra (NM_178241.1,888-906).
gatcctgggcttttctcat

SEQ ID NO: 625715 - DNA, 19 bp, Mus musculus
  siRNA target sequence for Il8ra (NM_178241.1,891-909).
cctgggcttttctcatagt

SEQ ID NO: 625716 - DNA, 19 bp, Mus musculus
  siRNA target sequence for Il8ra (NM_178241.1,931-949).
gccttcgttggccaaaatt

SEQ ID NO: 625717 - DNA, 19 bp, Mus musculus
  siRNA target sequence for Il8ra (NM_178241.1,932-950).
ccttcgttggccaaaattt

SEQ ID NO: 625718 - DNA, 19 bp, Mus musculus
  siRNA target sequence for Il8ra (NM_178241.1,933-951).
cttcgttggccaaaatttt

SEQ ID NO: 625719 - DNA, 19 bp, Mus musculus
  siRNA target sequence for Il8ra (NM_178241.1,953-971).
gccatgaattcctcaagat

SEQ ID NO: 625720 - DNA, 19 bp, Mus musculus
  siRNA target sequence for Il8ra (NM_178241.1,991-1009).
gttcgcaaggaggttttga

SEQ ID NO: 625721 - DNA, 19 bp, Mus musculus
  siRNA target sequence for Il8ra (NM_178241.1,1034-1052).
cgtctctcaccgctattta

SEQ ID NO: 625722 - DNA, 19 bp, Mus musculus
  siRNA target sequence for Il8ra (NM_178241.1,1035-1053).
gtctctcaccgctatttat

SEQ ID NO: 625723 - DNA, 19 bp, Mus musculus
  siRNA target sequence for Il8rb (NM_009909.2,163-181).
cagtggagatcttgatatt

SEQ ID NO: 625724 - DNA, 19 bp, Mus musculus
  siRNA target sequence for Il8rb (NM_009909.2,165-183).
gtggagatcttgatatttt

SEQ ID NO: 625725 - DNA, 19 bp, Mus musculus
  siRNA target sequence for Il8rb (NM_009909.2,167-185).
ggagatcttgatattttca

SEQ ID NO: 625726 - DNA, 19 bp, Mus musculus
  siRNA target sequence for Il8rb (NM_009909.2,176-194).
gatattttcaattatagct

SEQ ID NO: 625727 - DNA, 19 bp, Mus musculus
  siRNA target sequence for Il8rb (NM_009909.2,193-211).
ctctggcatgccctctatt

SEQ ID NO: 625728 - DNA, 19 bp, Mus musculus
  siRNA target sequence for Il8rb (NM_009909.2,195-213).
ctggcatgccctctattct

SEQ ID NO: 625729 - DNA, 19 bp, Mus musculus
  siRNA target sequence for Il8rb (NM_009909.2,247-265).
ggaaatcaacagttatgct

SEQ ID NO: 625730 - DNA, 19 bp, Mus musculus
  siRNA target sequence for Il8rb (NM_009909.2,258-276).
gttatgctgtggttgtaat

SEQ ID NO: 625731 - DNA, 19 bp, Mus musculus
  siRNA target sequence for Il8rb (NM_009909.2,264-282).
ctgtggttgtaatatacgt

SEQ ID NO: 625732 - DNA, 19 bp, Mus musculus
  siRNA target sequence for Il8rb (NM_009909.2,467-485).
ctgtgcaagatattctcat

SEQ ID NO: 625733 - DNA, 19 bp, Mus musculus
  siRNA target sequence for Il8rb (NM_009909.2,613-631).
catagccatgtggttacta

SEQ ID NO: 625734 - DNA, 19 bp, Mus musculus
  siRNA target sequence for Il8rb (NM_009909.2,622-640).
gtggttactatcagtaatt

SEQ ID NO: 625735 - DNA, 19 bp, Mus musculus
  siRNA target sequence for Il8rb (NM_009909.2,624-642).
ggttactatcagtaattct

SEQ ID NO: 625736 - DNA, 19 bp, Mus musculus
  siRNA target sequence for Il8rb (NM_009909.2,652-670).
catcttaattctacgaaat

SEQ ID NO: 625737 - DNA, 19 bp, Mus musculus
  siRNA target sequence for Il8rb (NM_009909.2,655-673).
cttaattctacgaaatcct

SEQ ID NO: 625738 - DNA, 19 bp, Mus musculus
  siRNA target sequence for Il8rb (NM_009909.2,665-683).
cgaaatcctgttaaggtaa

SEQ ID NO: 625739 - DNA, 19 bp, Mus musculus
  siRNA target sequence for Il8rb (NM_009909.2,666-684).
gaaatcctgttaaggtaaa

SEQ ID NO: 625740 - DNA, 19 bp, Mus musculus
  siRNA target sequence for Il8rb (NM_009909.2,671-689).
cctgttaaggtaaaccttt

SEQ ID NO: 625741 - DNA, 19 bp, Mus musculus
  siRNA target sequence for Il8rb (NM_009909.2,679-697).
ggtaaacctttctacctta

SEQ ID NO: 625742 - DNA, 19 bp, Mus musculus
  siRNA target sequence for Il8rb (NM_009909.2,702-720).
gctatgaggatgtaggtaa

SEQ ID NO: 625743 - DNA, 19 bp, Mus musculus
  siRNA target sequence for Il8rb (NM_009909.2,707-725).
gaggatgtaggtaacaata

SEQ ID NO: 625744 - DNA, 19 bp, Mus musculus
  siRNA target sequence for Il8rb (NM_009909.2,710-728).
gatgtaggtaacaatacat

SEQ ID NO: 625745 - DNA, 19 bp, Mus musculus
  siRNA target sequence for Il8rb (NM_009909.2,1060-1078).
ctttattggccagaaattt

SEQ ID NO: 625746 - DNA, 19 bp, Mus musculus
  siRNA target sequence for Il8rb (NM_009909.2,1080-1098).
gccatggacttctcaagat

SEQ ID NO: 625747 - DNA, 19 bp, Mus musculus
  siRNA target sequence for Il8rb (NM_009909.2,1082-1100).
catggacttctcaagatca

SEQ ID NO: 625748 - DNA, 19 bp, Mus musculus
  siRNA target sequence for Mas1 (NM_008552.2,1046-1064).
gtgcactgggtcatcatga

SEQ ID NO: 625749 - DNA, 19 bp, Mus musculus
  siRNA target sequence for Mas1 (NM_008552.2,1117-1135).
cttccggatgaggagaaat

SEQ ID NO: 625750 - DNA, 19 bp, Mus musculus
  siRNA target sequence for Mas1 (NM_008552.2,1136-1154).
cccttcacggtctacatta

SEQ ID NO: 625751 - DNA, 19 bp, Mus musculus
  siRNA target sequence for Mas1 (NM_008552.2,1249-1267).
ctacacaatcgtgacatta

SEQ ID NO: 625752 - DNA, 19 bp, Mus musculus
  siRNA target sequence for Mas1 (NM_008552.2,1263-1281).
cattatcggtgacttttct

SEQ ID NO: 625753 - DNA, 19 bp, Mus musculus
  siRNA target sequence for Mas1 (NM_008552.2,1343-1361).
gtcctctaccccatatggt

SEQ ID NO: 625754 - DNA, 19 bp, Mus musculus
  siRNA target sequence for Mas1 (NM_008552.2,1465-1483).
cggagaagagagtcattct

SEQ ID NO: 625755 - DNA, 19 bp, Mus musculus
  siRNA target sequence for Mas1 (NM_008552.2,1537-1555).
cttcactccgctcatgtta

SEQ ID NO: 625756 - DNA, 19 bp, Mus musculus
  siRNA target sequence for Mas1 (NM_008552.2,1577-1595).
gtgaagatacggaagaaca

SEQ ID NO: 625757 - DNA, 19 bp, Mus musculus
  siRNA target sequence for Mas1 (NM_008552.2,1611-1629).
cttcgaagctgtacattgt

SEQ ID NO: 625758 - DNA, 19 bp, Mus musculus
  siRNA target sequence for Mas1 (NM_008552.2,1761-1779).
gcagcgccaaccctttcat

SEQ ID NO: 625759 - DNA, 19 bp, Mus musculus
  siRNA target sequence for Mas1 (NM_008552.2,1811-1829).
cgcttcagggagtccttaa

SEQ ID NO: 625760 - DNA, 19 bp, Mus musculus
  siRNA target sequence for Mas1 (NM_008552.2,1883-1901).
ggcaacggcaacactgtat

SEQ ID NO: 625761 - DNA, 19 bp, Mus musculus
  siRNA target sequence for Mas1 (NM_008552.2,1888-1906).
cggcaacactgtatccatt

SEQ ID NO: 625762 - DNA, 19 bp, Mus musculus
  siRNA target sequence for Mc1r (NM_008559.1,186-204).
gtgatagccatcaccaaaa

SEQ ID NO: 625763 - DNA, 19 bp, Mus musculus
  siRNA target sequence for Mc1r (NM_008559.1,252-270).
ctgtctgacctgatggtaa

SEQ ID NO: 625764 - DNA, 19 bp, Mus musculus
  siRNA target sequence for Mc1r (NM_008559.1,256-274).
ctgacctgatggtaagtgt

SEQ ID NO: 625765 - DNA, 19 bp, Mus musculus
  siRNA target sequence for Mc1r (NM_008559.1,282-300).
gtgctggagactactatca

SEQ ID NO: 625766 - DNA, 19 bp, Mus musculus
  siRNA target sequence for Mc1r (NM_008559.1,410-428).
cctgggcatcattgctata

SEQ ID NO: 625767 - DNA, 19 bp, Mus musculus
  siRNA target sequence for Mc1r (NM_008559.1,580-598).
gcctcgtcactttctttct

SEQ ID NO: 625768 - DNA, 19 bp, Mus musculus
  siRNA target sequence for Mc1r (NM_008559.1,581-599).
cctcgtcactttctttcta

SEQ ID NO: 625769 - DNA, 19 bp, Mus musculus
  siRNA target sequence for Mc1r (NM_008559.1,609-627).
gcactcatggcgattctgt

SEQ ID NO: 625770 - DNA, 19 bp, Mus musculus
  siRNA target sequence for Mc1r (NM_008559.1,610-628).
cactcatggcgattctgta

SEQ ID NO: 625771 - DNA, 19 bp, Mus musculus
  siRNA target sequence for Mc1r (NM_008559.1,883-901).
ctgttgaccccctcatcta

SEQ ID NO: 625772 - DNA, 19 bp, Mus musculus
  siRNA target sequence for Mc2r (NM_008560.2,288-306).
ccaatgacaccgcaagaaa

SEQ ID NO: 625773 - DNA, 19 bp, Mus musculus
  siRNA target sequence for Mc2r (NM_008560.2,289-307).
caatgacaccgcaagaaat

SEQ ID NO: 625774 - DNA, 19 bp, Mus musculus
  siRNA target sequence for Mc2r (NM_008560.2,314-332).
gattgtcctgatgtagttt

SEQ ID NO: 625775 - DNA, 19 bp, Mus musculus
  siRNA target sequence for Mc2r (NM_008560.2,338-356).
gaagagatatttttcacaa

SEQ ID NO: 625776 - DNA, 19 bp, Mus musculus
  siRNA target sequence for Mc2r (NM_008560.2,369-387).
gcatattggagaacttgat

SEQ ID NO: 625777 - DNA, 19 bp, Mus musculus
  siRNA target sequence for Mc2r (NM_008560.2,370-388).
catattggagaacttgatt

SEQ ID NO: 625778 - DNA, 19 bp, Mus musculus
  siRNA target sequence for Mc2r (NM_008560.2,447-465).
gcagtttggccatttctga

SEQ ID NO: 625779 - DNA, 19 bp, Mus musculus
  siRNA target sequence for Mc2r (NM_008560.2,473-491).
ggcagtctgtataagatct

SEQ ID NO: 625780 - DNA, 19 bp, Mus musculus
  siRNA target sequence for Mc2r (NM_008560.2,516-534).
gaaacatgggttatcttaa

SEQ ID NO: 625781 - DNA, 19 bp, Mus musculus
  siRNA target sequence for Mc2r (NM_008560.2,535-553).
gcctcgtggcagttttgaa

SEQ ID NO: 625782 - DNA, 19 bp, Mus musculus
  siRNA target sequence for Mc2r (NM_008560.2,656-674).
catgccctgcaataccata

SEQ ID NO: 625783 - DNA, 19 bp, Mus musculus
  siRNA target sequence for Mc2r (NM_008560.2,660-678).
ccctgcaataccatagcat

SEQ ID NO: 625784 - DNA, 19 bp, Mus musculus
  siRNA target sequence for Mc2r (NM_008560.2,661-679).
cctgcaataccatagcatt

SEQ ID NO: 625785 - DNA, 19 bp, Mus musculus
  siRNA target sequence for Mc2r (NM_008560.2,665-683).
caataccatagcattgtga

SEQ ID NO: 625786 - DNA, 19 bp, Mus musculus
  siRNA target sequence for Mc2r (NM_008560.2,741-759).
gcatcaccatggtgatctt

SEQ ID NO: 625787 - DNA, 19 bp, Mus musculus
  siRNA target sequence for Mc2r (NM_008560.2,792-810).
catcgctgttccctttgat

SEQ ID NO: 625788 - DNA, 19 bp, Mus musculus
  siRNA target sequence for Mc2r (NM_008560.2,832-850).
ctacatccacatgttctta

SEQ ID NO: 625789 - DNA, 19 bp, Mus musculus
  siRNA target sequence for Mc2r (NM_008560.2,906-924).
gtgccatgacactaaccat

SEQ ID NO: 625790 - DNA, 19 bp, Mus musculus
  siRNA target sequence for Mc2r (NM_008560.2,962-980).
gtgctccatgttctcttaa

SEQ ID NO: 625791 - DNA, 19 bp, Mus musculus
  siRNA target sequence for Mc2r (NM_008560.2,991-1009).
cccaaataacccttactgt

SEQ ID NO: 625792 - DNA, 19 bp, Mus musculus
  siRNA target sequence for Mc2r (NM_008560.2,1062-1080).
cagttattgacccctttat

SEQ ID NO: 625793 - DNA, 19 bp, Mus musculus
  siRNA target sequence for Mc3r (NM_008561.2,887-905).
gcatctgcggcgtgatgtt

SEQ ID NO: 625794 - DNA, 19 bp, Mus musculus
  siRNA target sequence for Mc3r (NM_008561.2,893-911).
gcggcgtgatgttcatcat

SEQ ID NO: 625795 - DNA, 19 bp, Mus musculus
  siRNA target sequence for Mc3r (NM_008561.2,895-913).
ggcgtgatgttcatcatct

SEQ ID NO: 625796 - DNA, 19 bp, Mus musculus
  siRNA target sequence for Mc3r (NM_008561.2,896-914).
gcgtgatgttcatcatcta

SEQ ID NO: 625797 - DNA, 19 bp, Mus musculus
  siRNA target sequence for Mc3r (NM_008561.2,972-990).
cctcatgggcaccctatat

SEQ ID NO: 625798 - DNA, 19 bp, Mus musculus
  siRNA target sequence for Mc3r (NM_008561.2,973-991).
ctcatgggcaccctatata

SEQ ID NO: 625799 - DNA, 19 bp, Mus musculus
  siRNA target sequence for Mc3r (NM_008561.2,983-1001).
ccctatatatccacatgtt

SEQ ID NO: 625800 - DNA, 19 bp, Mus musculus
  siRNA target sequence for Mc3r (NM_008561.2,1087-1105).
ggggctgtcaccatcacta

SEQ ID NO: 625801 - DNA, 19 bp, Mus musculus
  siRNA target sequence for Mc3r (NM_008561.2,1088-1106).
gggctgtcaccatcactat

SEQ ID NO: 625802 - DNA, 19 bp, Mus musculus
  siRNA target sequence for Mc3r (NM_008561.2,1196-1214).
gctacacggcccatttcaa

SEQ ID NO: 625803 - DNA, 19 bp, Mus musculus
  siRNA target sequence for Mc3r (NM_008561.2,1315-1333).
ggctgcaacagcatgaact

SEQ ID NO: 625804 - DNA, 19 bp, Mus musculus
  siRNA target sequence for Mc4r (NM_016977.1,105-123).
cccggacggaggatgctat

SEQ ID NO: 625805 - DNA, 19 bp, Mus musculus
  siRNA target sequence for Mc4r (NM_016977.1,115-133).
ggatgctatgagcaacttt

SEQ ID NO: 625806 - DNA, 19 bp, Mus musculus
  siRNA target sequence for Mc4r (NM_016977.1,154-172).
gtgactctgggtgtcataa

SEQ ID NO: 625807 - DNA, 19 bp, Mus musculus
  siRNA target sequence for Mc4r (NM_016977.1,199-217).
gtggcgatagccaagaaca

SEQ ID NO: 625808 - DNA, 19 bp, Mus musculus
  siRNA target sequence for Mc4r (NM_016977.1,273-291).
gctggtgagcgtttcgaat

SEQ ID NO: 625809 - DNA, 19 bp, Mus musculus
  siRNA target sequence for Mc4r (NM_016977.1,287-305).
cgaatgggtcggaaaccat

SEQ ID NO: 625810 - DNA, 19 bp, Mus musculus
  siRNA target sequence for Mc4r (NM_016977.1,307-325).
gtcattaccctgttaaaca

SEQ ID NO: 625811 - DNA, 19 bp, Mus musculus
  siRNA target sequence for Mc4r (NM_016977.1,393-411).
ctccttgctcgcatccatt

SEQ ID NO: 625812 - DNA, 19 bp, Mus musculus
  siRNA target sequence for Mc4r (NM_016977.1,436-454).
gacaggtatttcactatct

SEQ ID NO: 625813 - DNA, 19 bp, Mus musculus
  siRNA target sequence for Mc4r (NM_016977.1,460-478).
gcgctccagtaccataaca

SEQ ID NO: 625814 - DNA, 19 bp, Mus musculus
  siRNA target sequence for Mc4r (NM_016977.1,461-479).
cgctccagtaccataacat

SEQ ID NO: 625815 - DNA, 19 bp, Mus musculus
  siRNA target sequence for Mc4r (NM_016977.1,491-509).
ggcgggtcgggatcatcat

SEQ ID NO: 625816 - DNA, 19 bp, Mus musculus
  siRNA target sequence for Mc4r (NM_016977.1,492-510).
gcgggtcgggatcatcata

SEQ ID NO: 625817 - DNA, 19 bp, Mus musculus
  siRNA target sequence for Mc4r (NM_016977.1,493-511).
cgggtcgggatcatcataa

SEQ ID NO: 625818 - DNA, 19 bp, Mus musculus
  siRNA target sequence for Mc4r (NM_016977.1,495-513).
ggtcgggatcatcataagt

SEQ ID NO: 625819 - DNA, 19 bp, Mus musculus
  siRNA target sequence for Mc4r (NM_016977.1,496-514).
gtcgggatcatcataagtt

SEQ ID NO: 625820 - DNA, 19 bp, Mus musculus
  siRNA target sequence for Mc4r (NM_016977.1,499-517).
gggatcatcataagttgta

SEQ ID NO: 625821 - DNA, 19 bp, Mus musculus
  siRNA target sequence for Mc4r (NM_016977.1,500-518).
ggatcatcataagttgtat

SEQ ID NO: 625822 - DNA, 19 bp, Mus musculus
  siRNA target sequence for Mc4r (NM_016977.1,629-647).
ctctctatgtccacatgtt

SEQ ID NO: 625823 - DNA, 19 bp, Mus musculus
  siRNA target sequence for Mc4r (NM_016977.1,651-669).
gatggcgaggcttcacatt

SEQ ID NO: 625824 - DNA, 19 bp, Mus musculus
  siRNA target sequence for Mc4r (NM_016977.1,655-673).
gcgaggcttcacattaaga

SEQ ID NO: 625825 - DNA, 19 bp, Mus musculus
  siRNA target sequence for Mc4r (NM_016977.1,706-724).
cgccagggtaccaacatga

SEQ ID NO: 625826 - DNA, 19 bp, Mus musculus
  siRNA target sequence for Mc4r (NM_016977.1,707-725).
gccagggtaccaacatgaa

SEQ ID NO: 625827 - DNA, 19 bp, Mus musculus
  siRNA target sequence for Mc4r (NM_016977.1,777-795).
cccgttctttctccattta

SEQ ID NO: 625828 - DNA, 19 bp, Mus musculus
  siRNA target sequence for Mc4r (NM_016977.1,804-822).
catctcttgccctcagaat

SEQ ID NO: 625829 - DNA, 19 bp, Mus musculus
  siRNA target sequence for Mc4r (NM_016977.1,832-850).
gtgtgcttcatgtctcatt

SEQ ID NO: 625830 - DNA, 19 bp, Mus musculus
  siRNA target sequence for Mc4r (NM_016977.1,908-926).
ccctccggagtcaagaact

SEQ ID NO: 625831 - DNA, 19 bp, Mus musculus
  siRNA target sequence for Mc4r (NM_016977.1,970-988).
ggcatctgtgagttgtcta

SEQ ID NO: 625832 - DNA, 19 bp, Mus musculus
  siRNA target sequence for Mc4r (NM_016977.1,979-997).
gagttgtctagcaggtatt

SEQ ID NO: 625833 - DNA, 19 bp, Mus musculus
  siRNA target sequence for Mc5r (NM_013596.1,35-53).
gaccagagcccggtaaaca

SEQ ID NO: 625834 - DNA, 19 bp, Mus musculus
  siRNA target sequence for Mc5r (NM_013596.1,37-55).
ccagagcccggtaaacaga

SEQ ID NO: 625835 - DNA, 19 bp, Mus musculus
  siRNA target sequence for Mc5r (NM_013596.1,38-56).
cagagcccggtaaacagaa

SEQ ID NO: 625836 - DNA, 19 bp, Mus musculus
  siRNA target sequence for Mc5r (NM_013596.1,42-60).
gcccggtaaacagaagatt

SEQ ID NO: 625837 - DNA, 19 bp, Mus musculus
  siRNA target sequence for Mc5r (NM_013596.1,44-62).
ccggtaaacagaagattca

SEQ ID NO: 625838 - DNA, 19 bp, Mus musculus
  siRNA target sequence for Mc5r (NM_013596.1,45-63).
cggtaaacagaagattcaa

SEQ ID NO: 625839 - DNA, 19 bp, Mus musculus
  siRNA target sequence for Mc5r (NM_013596.1,80-98).
ggaacccgtgaagaatcat

SEQ ID NO: 625840 - DNA, 19 bp, Mus musculus
  siRNA target sequence for Mc5r (NM_013596.1,85-103).
ccgtgaagaatcatgctta

SEQ ID NO: 625841 - DNA, 19 bp, Mus musculus
  siRNA target sequence for Mc5r (NM_013596.1,180-198).
cctccaccctgactgtatt

SEQ ID NO: 625842 - DNA, 19 bp, Mus musculus
  siRNA target sequence for Mc5r (NM_013596.1,183-201).
ccaccctgactgtattgaa

SEQ ID NO: 625843 - DNA, 19 bp, Mus musculus
  siRNA target sequence for Mc5r (NM_013596.1,184-202).
caccctgactgtattgaat

SEQ ID NO: 625844 - DNA, 19 bp, Mus musculus
  siRNA target sequence for Mc5r (NM_013596.1,186-204).
ccctgactgtattgaatct

SEQ ID NO: 625845 - DNA, 19 bp, Mus musculus
  siRNA target sequence for Mc5r (NM_013596.1,187-205).
cctgactgtattgaatctt

SEQ ID NO: 625846 - DNA, 19 bp, Mus musculus
  siRNA target sequence for Mc5r (NM_013596.1,188-206).
ctgactgtattgaatctta

SEQ ID NO: 625847 - DNA, 19 bp, Mus musculus
  siRNA target sequence for Mc5r (NM_013596.1,237-255).
gatcaaatgtcaagaacaa

SEQ ID NO: 625848 - DNA, 19 bp, Mus musculus
  siRNA target sequence for Mc5r (NM_013596.1,309-327).
gtctcgtcagcctcttaga

SEQ ID NO: 625849 - DNA, 19 bp, Mus musculus
  siRNA target sequence for Mc5r (NM_013596.1,344-362).
ggggccatagtaaagaaca

SEQ ID NO: 625850 - DNA, 19 bp, Mus musculus
  siRNA target sequence for Mc5r (NM_013596.1,345-363).
gggccatagtaaagaacaa

SEQ ID NO: 625851 - DNA, 19 bp, Mus musculus
  siRNA target sequence for Mc5r (NM_013596.1,346-364).
ggccatagtaaagaacaaa

SEQ ID NO: 625852 - DNA, 19 bp, Mus musculus
  siRNA target sequence for Mc5r (NM_013596.1,441-459).
gggagactgtcaccatata

SEQ ID NO: 625853 - DNA, 19 bp, Mus musculus
  siRNA target sequence for Mc5r (NM_013596.1,443-461).
gagactgtcaccatatact

SEQ ID NO: 625854 - DNA, 19 bp, Mus musculus
  siRNA target sequence for Mc5r (NM_013596.1,449-467).
gtcaccatatacttgctaa

SEQ ID NO: 625855 - DNA, 19 bp, Mus musculus
  siRNA target sequence for Mc5r (NM_013596.1,453-471).
ccatatacttgctaaataa

SEQ ID NO: 625856 - DNA, 19 bp, Mus musculus
  siRNA target sequence for Mc5r (NM_013596.1,454-472).
catatacttgctaaataat

SEQ ID NO: 625857 - DNA, 19 bp, Mus musculus
  siRNA target sequence for Mc5r (NM_013596.1,614-632).
cgctaccaccacatcatga

SEQ ID NO: 625858 - DNA, 19 bp, Mus musculus
  siRNA target sequence for Mc5r (NM_013596.1,639-657).
ggcgctcgggggtgatcat

SEQ ID NO: 625859 - DNA, 19 bp, Mus musculus
  siRNA target sequence for Mc5r (NM_013596.1,679-697).
cataagctgcggcattgtt

SEQ ID NO: 625860 - DNA, 19 bp, Mus musculus
  siRNA target sequence for Mc5r (NM_013596.1,684-702).
gctgcggcattgttttcat

SEQ ID NO: 625861 - DNA, 19 bp, Mus musculus
  siRNA target sequence for Mc5r (NM_013596.1,687-705).
gcggcattgttttcatcat

SEQ ID NO: 625862 - DNA, 19 bp, Mus musculus
  siRNA target sequence for Mc5r (NM_013596.1,689-707).
ggcattgttttcatcatct

SEQ ID NO: 625863 - DNA, 19 bp, Mus musculus
  siRNA target sequence for Mc5r (NM_013596.1,690-708).
gcattgttttcatcatcta

SEQ ID NO: 625864 - DNA, 19 bp, Mus musculus
  siRNA target sequence for Mc5r (NM_013596.1,827-845).
gcagcttcccccagataca

SEQ ID NO: 625865 - DNA, 19 bp, Mus musculus
  siRNA target sequence for Mc5r (NM_013596.1,895-913).
gctactggggattttcatt

SEQ ID NO: 625866 - DNA, 19 bp, Mus musculus
  siRNA target sequence for Mc5r (NM_013596.1,899-917).
ctggggattttcattgtct

SEQ ID NO: 625867 - DNA, 19 bp, Mus musculus
  siRNA target sequence for Mc5r (NM_013596.1,938-956).
caccttatcttaatgatct

SEQ ID NO: 625868 - DNA, 19 bp, Mus musculus
  siRNA target sequence for Mc5r (NM_013596.1,970-988).
cgtctactgctcttgcttt

SEQ ID NO: 625869 - DNA, 19 bp, Mus musculus
  siRNA target sequence for Mc5r (NM_013596.1,1070-1088).
gagatgcggaggaccttta

SEQ ID NO: 625870 - DNA, 19 bp, Mus musculus
  siRNA target sequence for MOR103-1 (NM_147064.1,23-41).
gggtcaccaagttcattct

SEQ ID NO: 625871 - DNA, 19 bp, Mus musculus
  siRNA target sequence for MOR103-1 (NM_147064.1,119-137).
ctgaaaacgtgatcatcat

SEQ ID NO: 625872 - DNA, 19 bp, Mus musculus
  siRNA target sequence for MOR103-1 (NM_147064.1,278-296).
ctttcactcactgtatgat

SEQ ID NO: 625873 - DNA, 19 bp, Mus musculus
  siRNA target sequence for MOR103-1 (NM_147064.1,461-479).
gcatctctttggcaaagat

SEQ ID NO: 625874 - DNA, 19 bp, Mus musculus
  siRNA target sequence for MOR103-1 (NM_147064.1,538-556).
gatatctctcccgttctta

SEQ ID NO: 625875 - DNA, 19 bp, Mus musculus
  siRNA target sequence for MOR103-1 (NM_147064.1,624-642).
ctttccgctgtcaatcact

SEQ ID NO: 625876 - DNA, 19 bp, Mus musculus
  siRNA target sequence for MOR103-1 (NM_147064.1,629-647).
cgctgtcaatcactgtttt

SEQ ID NO: 625877 - DNA, 19 bp, Mus musculus
  siRNA target sequence for MOR103-1 (NM_147064.1,630-648).
gctgtcaatcactgtttta

SEQ ID NO: 625878 - DNA, 19 bp, Mus musculus
  siRNA target sequence for MOR103-1 (NM_147064.1,633-651).
gtcaatcactgttttatca

SEQ ID NO: 625879 - DNA, 19 bp, Mus musculus
  siRNA target sequence for MOR103-1 (NM_147064.1,774-792).
ccgaccccgagctatccat

SEQ ID NO: 625880 - DNA, 19 bp, Mus musculus
  siRNA target sequence for MOR103-1 (NM_147064.1,785-803).
ctatccatgccttcaacat

SEQ ID NO: 625881 - DNA, 19 bp, Mus musculus
  siRNA target sequence for MOR103-10 (NM_146761.1,37-55).
gtcttggtggggtttccta

SEQ ID NO: 625882 - DNA, 19 bp, Mus musculus
  siRNA target sequence for MOR103-10 (NM_146761.1,108-126).
gttgacgttactggaaaat

SEQ ID NO: 625883 - DNA, 19 bp, Mus musculus
  siRNA target sequence for MOR103-10 (NM_146761.1,113-131).
cgttactggaaaatgtact

SEQ ID NO: 625884 - DNA, 19 bp, Mus musculus
  siRNA target sequence for MOR103-10 (NM_146761.1,130-148).
ctcattgtttcgacaatct

SEQ ID NO: 625885 - DNA, 19 bp, Mus musculus
  siRNA target sequence for MOR103-10 (NM_146761.1,215-233).
ggtacatcaatgttactat

SEQ ID NO: 625886 - DNA, 19 bp, Mus musculus
  siRNA target sequence for MOR103-10 (NM_146761.1,448-466).
ggcagcgggttcttcagtt

SEQ ID NO: 625887 - DNA, 19 bp, Mus musculus
  siRNA target sequence for MOR103-10 (NM_146761.1,576-594).
ggaacaggccgagttagta

SEQ ID NO: 625888 - DNA, 19 bp, Mus musculus
  siRNA target sequence for MOR103-10 (NM_146761.1,608-626).
cgctggtcatgattctgtt

SEQ ID NO: 625889 - DNA, 19 bp, Mus musculus
  siRNA target sequence for MOR103-10 (NM_146761.1,648-666).
ctcatatgccgccatcatt

SEQ ID NO: 625890 - DNA, 19 bp, Mus musculus
  siRNA target sequence for MOR103-10 (NM_146761.1,781-799).
cgaccccgagccatgtaca

SEQ ID NO: 625891 - DNA, 19 bp, Mus musculus
  siRNA target sequence for MOR103-11 (NM_146385.1,493-511).
gtggtctcggcgataaaga

SEQ ID NO: 625892 - DNA, 19 bp, Mus musculus
  siRNA target sequence for MOR103-11 (NM_146385.1,495-513).
ggtctcggcgataaagaca

SEQ ID NO: 625893 - DNA, 19 bp, Mus musculus
  siRNA target sequence for MOR103-11 (NM_146385.1,496-514).
gtctcggcgataaagacaa

SEQ ID NO: 625894 - DNA, 19 bp, Mus musculus
  siRNA target sequence for MOR103-11 (NM_146385.1,498-516).
ctcggcgataaagacaaaa

SEQ ID NO: 625895 - DNA, 19 bp, Mus musculus
  siRNA target sequence for MOR103-11 (NM_146385.1,502-520).
gcgataaagacaaaatgca

SEQ ID NO: 625896 - DNA, 19 bp, Mus musculus
  siRNA target sequence for MOR103-2 (NM_147039.1,838-856).
gttcttacacccatcttga

SEQ ID NO: 625897 - DNA, 19 bp, Mus musculus
  siRNA target sequence for MOR103-4 (NM_147035.1,3-21).
gctggatatgaacattact

SEQ ID NO: 625898 - DNA, 19 bp, Mus musculus
  siRNA target sequence for MOR103-4 (NM_147035.1,65-83).
ggctacagatcctcctatt

SEQ ID NO: 625899 - DNA, 19 bp, Mus musculus
  siRNA target sequence for MOR103-4 (NM_147035.1,72-90).
gatcctcctattcttcatt

SEQ ID NO: 625900 - DNA, 19 bp, Mus musculus
  siRNA target sequence for MOR103-4 (NM_147035.1,94-112).
cttgtagtctatatgttga

SEQ ID NO: 625901 - DNA, 19 bp, Mus musculus
  siRNA target sequence for MOR103-4 (NM_147035.1,97-115).
gtagtctatatgttgatta

SEQ ID NO: 625902 - DNA, 19 bp, Mus musculus
  siRNA target sequence for MOR103-4 (NM_147035.1,108-126).
gttgattatagcagaaaat

SEQ ID NO: 625903 - DNA, 19 bp, Mus musculus
  siRNA target sequence for MOR103-4 (NM_147035.1,300-318).
gctctacttctttatctca

SEQ ID NO: 625904 - DNA, 19 bp, Mus musculus
  siRNA target sequence for MOR103-4 (NM_147035.1,429-447).
gctaatggccctttcctat

SEQ ID NO: 625905 - DNA, 19 bp, Mus musculus
  siRNA target sequence for MOR103-4 (NM_147035.1,430-448).
ctaatggccctttcctatt

SEQ ID NO: 625906 - DNA, 19 bp, Mus musculus
  siRNA target sequence for MOR103-4 (NM_147035.1,443-461).
cctattttagtggtttcat

SEQ ID NO: 625907 - DNA, 19 bp, Mus musculus
  siRNA target sequence for MOR103-4 (NM_147035.1,472-490).
gtcaaagtctatttcattt

SEQ ID NO: 625908 - DNA, 19 bp, Mus musculus
  siRNA target sequence for MOR103-4 (NM_147035.1,552-570).
cctcaaattggcatgcaaa

SEQ ID NO: 625909 - DNA, 19 bp, Mus musculus
  siRNA target sequence for MOR103-4 (NM_147035.1,581-599).
cagctgagctagtagactt

SEQ ID NO: 625910 - DNA, 19 bp, Mus musculus
  siRNA target sequence for MOR103-4 (NM_147035.1,657-675).
ctacatagtgtctaccatt

SEQ ID NO: 625911 - DNA, 19 bp, Mus musculus
  siRNA target sequence for MOR103-4 (NM_147035.1,737-755).
ctgtggtcataatttatta

SEQ ID NO: 625912 - DNA, 19 bp, Mus musculus
  siRNA target sequence for MOR103-4 (NM_147035.1,739-757).
gtggtcataatttattaca

SEQ ID NO: 625913 - DNA, 19 bp, Mus musculus
  siRNA target sequence for MOR103-4 (NM_147035.1,780-798).
ccgacccagggctattgca

SEQ ID NO: 625914 - DNA, 19 bp, Mus musculus
  siRNA target sequence for MOR103-4 (NM_147035.1,781-799).
cgacccagggctattgcat

SEQ ID NO: 625915 - DNA, 19 bp, Mus musculus
  siRNA target sequence for MOR103-4 (NM_147035.1,786-804).
cagggctattgcatctttt

SEQ ID NO: 625916 - DNA, 19 bp, Mus musculus
  siRNA target sequence for MOR103-7 (NM_146915.1,279-297).
ctgtcatgttccattcaca

SEQ ID NO: 625917 - DNA, 19 bp, Mus musculus
  siRNA target sequence for MOR103-7 (NM_146915.1,471-489).
gctggtctcagtgatcaaa

SEQ ID NO: 625918 - DNA, 19 bp, Mus musculus
  siRNA target sequence for MOR103-7 (NM_146915.1,474-492).
ggtctcagtgatcaaaaca

SEQ ID NO: 625919 - DNA, 19 bp, Mus musculus
  siRNA target sequence for MOR103-7 (NM_146915.1,792-810).
ccgacccagccgcatagaa

SEQ ID NO: 625920 - DNA, 19 bp, Mus musculus
  siRNA target sequence for MOR103-9 (NM_146913.1,477-495).
ctcagtggccaaaacaaca

SEQ ID NO: 625921 - DNA, 19 bp, Mus musculus
  siRNA target sequence for MOR104-1 (NM_146621.1,17-35).
ggactctagcccaagactt

SEQ ID NO: 625922 - DNA, 19 bp, Mus musculus
  siRNA target sequence for MOR104-1 (NM_146621.1,135-153).
cttgctattggttagtact

SEQ ID NO: 625923 - DNA, 19 bp, Mus musculus
  siRNA target sequence for MOR104-1 (NM_146621.1,149-167).
gtacttcacaccagttaca

SEQ ID NO: 625924 - DNA, 19 bp, Mus musculus
  siRNA target sequence for MOR104-1 (NM_146621.1,253-271).
ctggtggggaagagtcaat

SEQ ID NO: 625925 - DNA, 19 bp, Mus musculus
  siRNA target sequence for MOR104-1 (NM_146621.1,258-276).
ggggaagagtcaatccata

SEQ ID NO: 625926 - DNA, 19 bp, Mus musculus
  siRNA target sequence for MOR104-1 (NM_146621.1,259-277).
gggaagagtcaatccatat

SEQ ID NO: 625927 - DNA, 19 bp, Mus musculus
  siRNA target sequence for MOR104-1 (NM_146621.1,261-279).
gaagagtcaatccatatca

SEQ ID NO: 625928 - DNA, 19 bp, Mus musculus
  siRNA target sequence for MOR104-1 (NM_146621.1,300-318).
gatgtacttggttttctca

SEQ ID NO: 625929 - DNA, 19 bp, Mus musculus
  siRNA target sequence for MOR104-1 (NM_146621.1,317-335).
cattaggttgcacagaata

SEQ ID NO: 625930 - DNA, 19 bp, Mus musculus
  siRNA target sequence for MOR104-1 (NM_146621.1,386-404).
ctctacactaccagactat

SEQ ID NO: 625931 - DNA, 19 bp, Mus musculus
  siRNA target sequence for MOR104-1 (NM_146621.1,391-409).
cactaccagactattatga

SEQ ID NO: 625932 - DNA, 19 bp, Mus musculus
  siRNA target sequence for MOR104-1 (NM_146621.1,509-527).
gcacccatgctatcaatca

SEQ ID NO: 625933 - DNA, 19 bp, Mus musculus
  siRNA target sequence for MOR104-1 (NM_146621.1,510-528).
cacccatgctatcaatcat

SEQ ID NO: 625934 - DNA, 19 bp, Mus musculus
  siRNA target sequence for MOR104-1 (NM_146621.1,693-711).
cagtggtcgcagaaaagct

SEQ ID NO: 625935 - DNA, 19 bp, Mus musculus
  siRNA target sequence for MOR104-1 (NM_146621.1,742-760).
gtactcatctggtatggat

SEQ ID NO: 625936 - DNA, 19 bp, Mus musculus
  siRNA target sequence for MOR104-1 (NM_146621.1,747-765).
catctggtatggatctaca

SEQ ID NO: 625937 - DNA, 19 bp, Mus musculus
  siRNA target sequence for MOR104-1 (NM_146621.1,750-768).
ctggtatggatctacaatt

SEQ ID NO: 625938 - DNA, 19 bp, Mus musculus
  siRNA target sequence for MOR104-1 (NM_146621.1,752-770).
ggtatggatctacaatttt

SEQ ID NO: 625939 - DNA, 19 bp, Mus musculus
  siRNA target sequence for MOR104-1 (NM_146621.1,782-800).
gaacatccatcaaagatga

SEQ ID NO: 625940 - DNA, 19 bp, Mus musculus
  siRNA target sequence for MOR104-1 (NM_146621.1,785-803).
catccatcaaagatgattt

SEQ ID NO: 625941 - DNA, 19 bp, Mus musculus
  siRNA target sequence for MOR104-1 (NM_146621.1,885-903).
ggaggtcagagaaattcta

SEQ ID NO: 625942 - DNA, 19 bp, Mus musculus
  siRNA target sequence for MOR104-4 (NM_146518.1,50-68).
caccaggaccattcatctt

SEQ ID NO: 625943 - DNA, 19 bp, Mus musculus
  siRNA target sequence for MOR104-4 (NM_146518.1,126-144).
catgtatctgcttacagta

SEQ ID NO: 625944 - DNA, 19 bp, Mus musculus
  siRNA target sequence for MOR104-4 (NM_146518.1,482-500).
gcttttctgcaatcatagt

SEQ ID NO: 625945 - DNA, 19 bp, Mus musculus
  siRNA target sequence for MOR104-4 (NM_146518.1,533-551).
gcggctcacgtgtcatcaa

SEQ ID NO: 625946 - DNA, 19 bp, Mus musculus
  siRNA target sequence for MOR104-4 (NM_146518.1,779-797).
ggtatggctctactatctt

SEQ ID NO: 625947 - DNA, 19 bp, Mus musculus
  siRNA target sequence for MOR104-4 (NM_146518.1,844-862).
gctgtcacagtgctcaata

SEQ ID NO: 625948 - DNA, 19 bp, Mus musculus
  siRNA target sequence for MOR104-4 (NM_146518.1,853-871).
gtgctcaataccattgtca

SEQ ID NO: 625949 - DNA, 19 bp, Mus musculus
  siRNA target sequence for MOR104-4 (NM_146518.1,876-894).
cgtcttgaaccctttcata

SEQ ID NO: 625950 - DNA, 19 bp, Mus musculus
  siRNA target sequence for MOR108-1 (NM_146556.1,50-68).
gtgatccaaagctaaacat

SEQ ID NO: 625951 - DNA, 19 bp, Mus musculus
  siRNA target sequence for MOR108-1 (NM_146556.1,135-153).
cctcactctgatagattca

SEQ ID NO: 625952 - DNA, 19 bp, Mus musculus
  siRNA target sequence for MOR108-1 (NM_146556.1,259-277).
gatatgaccatctcctata

SEQ ID NO: 625953 - DNA, 19 bp, Mus musculus
  siRNA target sequence for MOR108-1 (NM_146556.1,381-399).
cttgcattacaccacaata

SEQ ID NO: 625954 - DNA, 19 bp, Mus musculus
  siRNA target sequence for MOR108-1 (NM_146556.1,446-464).
ctggatttctcatcatctt

SEQ ID NO: 625955 - DNA, 19 bp, Mus musculus
  siRNA target sequence for MOR108-1 (NM_146556.1,619-637).
gtaaccttaacattagtaa

SEQ ID NO: 625956 - DNA, 19 bp, Mus musculus
  siRNA target sequence for MOR108-1 (NM_146556.1,623-641).
ccttaacattagtaattct

SEQ ID NO: 625957 - DNA, 19 bp, Mus musculus
  siRNA target sequence for MOR108-1 (NM_146556.1,657-675).
ccttaggacaattctaaga

SEQ ID NO: 625958 - DNA, 19 bp, Mus musculus
  siRNA target sequence for MOR108-1 (NM_146556.1,894-912).
cttcaggaatttgatcaaa

SEQ ID NO: 625959 - DNA, 19 bp, Mus musculus
  siRNA target sequence for MOR110-10 (NM_146285.1,903-921).
ggtgcttcaccgactgtat

SEQ ID NO: 625960 - DNA, 19 bp, Mus musculus
  siRNA target sequence for MOR110-4 (NM_146555.1,107-125).
gcttgatagggaacttaat

SEQ ID NO: 625961 - DNA, 19 bp, Mus musculus
  siRNA target sequence for MOR110-4 (NM_146555.1,115-133).
gggaacttaataattatct

SEQ ID NO: 625962 - DNA, 19 bp, Mus musculus
  siRNA target sequence for MOR110-4 (NM_146555.1,221-239).
cttgcattccacgattctt

SEQ ID NO: 625963 - DNA, 19 bp, Mus musculus
  siRNA target sequence for MOR110-4 (NM_146555.1,306-324).
ctttctattactaatcaca

SEQ ID NO: 625964 - DNA, 19 bp, Mus musculus
  siRNA target sequence for MOR110-4 (NM_146555.1,500-518).
gtgcttccaaactgataga

SEQ ID NO: 625965 - DNA, 19 bp, Mus musculus
  siRNA target sequence for MOR110-4 (NM_146555.1,503-521).
cttccaaactgatagatca

SEQ ID NO: 625966 - DNA, 19 bp, Mus musculus
  siRNA target sequence for MOR110-4 (NM_146555.1,506-524).
ccaaactgatagatcactt

SEQ ID NO: 625967 - DNA, 19 bp, Mus musculus
  siRNA target sequence for MOR111-1 (NM_146932.1,185-203).
ggaacttctctgttttaga

SEQ ID NO: 625968 - DNA, 19 bp, Mus musculus
  siRNA target sequence for MOR111-1 (NM_146932.1,209-227).
ccttcacaaccgtcactat

SEQ ID NO: 625969 - DNA, 19 bp, Mus musculus
  siRNA target sequence for MOR111-1 (NM_146932.1,220-238).
gtcactatacccaagttct

SEQ ID NO: 625970 - DNA, 19 bp, Mus musculus
  siRNA target sequence for MOR111-1 (NM_146932.1,222-240).
cactatacccaagttctta

SEQ ID NO: 625971 - DNA, 19 bp, Mus musculus
  siRNA target sequence for MOR111-1 (NM_146932.1,618-636).
gttaactttggtgttaata

SEQ ID NO: 625972 - DNA, 19 bp, Mus musculus
  siRNA target sequence for MOR114-5 (NM_146863.1,46-64).
gaggatccacaaattcaaa

SEQ ID NO: 625973 - DNA, 19 bp, Mus musculus
  siRNA target sequence for MOR114-5 (NM_146863.1,93-111).
ctacttgttgaatataact

SEQ ID NO: 625974 - DNA, 19 bp, Mus musculus
  siRNA target sequence for MOR114-5 (NM_146863.1,122-140).
caattatcttacttacatt

SEQ ID NO: 625975 - DNA, 19 bp, Mus musculus
  siRNA target sequence for MOR114-5 (NM_146863.1,207-225).
gttcacatcagcttgtatt

SEQ ID NO: 625976 - DNA, 19 bp, Mus musculus
  siRNA target sequence for MOR114-5 (NM_146863.1,283-301).
gccagtcaagcatttttca

SEQ ID NO: 625977 - DNA, 19 bp, Mus musculus
  siRNA target sequence for MOR114-5 (NM_146863.1,293-311).
catttttcaccgacctttt

SEQ ID NO: 625978 - DNA, 19 bp, Mus musculus
  siRNA target sequence for MOR114-5 (NM_146863.1,568-586).
gtcattgagcagatggtta

SEQ ID NO: 625979 - DNA, 19 bp, Mus musculus
  siRNA target sequence for MOR114-5 (NM_146863.1,638-656).
cctatgtgtacataatcaa

SEQ ID NO: 625980 - DNA, 19 bp, Mus musculus
  siRNA target sequence for MOR114-5 (NM_146863.1,798-816).
caacaagggggtaatagta

SEQ ID NO: 625981 - DNA, 19 bp, Mus musculus
  siRNA target sequence for MOR114-5 (NM_146863.1,801-819).
caagggggtaatagtacta

SEQ ID NO: 625982 - DNA, 19 bp, Mus musculus
  siRNA target sequence for MOR114-5 (NM_146863.1,804-822).
gggggtaatagtactaact

SEQ ID NO: 625983 - DNA, 19 bp, Mus musculus
  siRNA target sequence for MOR114-5 (NM_146863.1,805-823).
ggggtaatagtactaacta

SEQ ID NO: 625984 - DNA, 19 bp, Mus musculus
  siRNA target sequence for MOR114-5 (NM_146863.1,886-904).
gccttcaacgattcaatca

SEQ ID NO: 625985 - DNA, 19 bp, Mus musculus
  siRNA target sequence for MOR114-5 (NM_146863.1,887-905).
ccttcaacgattcaatcaa

SEQ ID NO: 625986 - DNA, 19 bp, Mus musculus
  siRNA target sequence for MOR114-5 (NM_146863.1,888-906).
cttcaacgattcaatcaaa

SEQ ID NO: 625987 - DNA, 19 bp, Mus musculus
  siRNA target sequence for MOR114-5 (NM_146863.1,894-912).
cgattcaatcaaaaaaatt

SEQ ID NO: 625988 - DNA, 19 bp, Mus musculus
  siRNA target sequence for MOR114-7 (NM_146548.1,588-606).
gatagtttgtgcagtgttt

SEQ ID NO: 625989 - DNA, 19 bp, Mus musculus
  siRNA target sequence for MOR114-7 (NM_146548.1,598-616).
gcagtgtttacatttatca

SEQ ID NO: 625990 - DNA, 19 bp, Mus musculus
  siRNA target sequence for MOR114-8 (NM_146547.1,68-86).
caatttttgtgtttctatt

SEQ ID NO: 625991 - DNA, 19 bp, Mus musculus
  siRNA target sequence for MOR114-8 (NM_146547.1,112-130).
gggaatctgactatcatat

SEQ ID NO: 625992 - DNA, 19 bp, Mus musculus
  siRNA target sequence for MOR114-8 (NM_146547.1,122-140).
ctatcatatccctcactat

SEQ ID NO: 625993 - DNA, 19 bp, Mus musculus
  siRNA target sequence for MOR114-8 (NM_146547.1,178-196).
ctacaaaatttctccatat

SEQ ID NO: 625994 - DNA, 19 bp, Mus musculus
  siRNA target sequence for MOR114-8 (NM_146547.1,226-244).
cctcgatatttgtacaaca

SEQ ID NO: 625995 - DNA, 19 bp, Mus musculus
  siRNA target sequence for MOR114-8 (NM_146547.1,252-270).
cggagacaggtcaatcact

SEQ ID NO: 625996 - DNA, 19 bp, Mus musculus
  siRNA target sequence for MOR114-8 (NM_146547.1,253-271).
ggagacaggtcaatcactt

SEQ ID NO: 625997 - DNA, 19 bp, Mus musculus
  siRNA target sequence for MOR114-8 (NM_146547.1,254-272).
gagacaggtcaatcactta

SEQ ID NO: 625998 - DNA, 19 bp, Mus musculus
  siRNA target sequence for MOR114-8 (NM_146547.1,260-278).
ggtcaatcacttataatgt

SEQ ID NO: 625999 - DNA, 19 bp, Mus musculus
  siRNA target sequence for MOR114-8 (NM_146547.1,261-279).
gtcaatcacttataatgtt

SEQ ID NO: 626000 - DNA, 19 bp, Mus musculus
  siRNA target sequence for MOR114-8 (NM_146547.1,283-301).
gtcattcaagtgtttttta

SEQ ID NO: 626001 - DNA, 19 bp, Mus musculus
  siRNA target sequence for MOR114-8 (NM_146547.1,372-390).
caaacccctacattatgta

SEQ ID NO: 626002 - DNA, 19 bp, Mus musculus
  siRNA target sequence for MOR114-8 (NM_146547.1,480-498).
cctaaacttgagattctgt

SEQ ID NO: 626003 - DNA, 19 bp, Mus musculus
  siRNA target sequence for MOR114-8 (NM_146547.1,499-517).
gactcaaatgttattgatt

SEQ ID NO: 626004 - DNA, 19 bp, Mus musculus
  siRNA target sequence for MOR114-8 (NM_146547.1,527-545).
gcgatgcatctcctatctt

SEQ ID NO: 626005 - DNA, 19 bp, Mus musculus
  siRNA target sequence for MOR114-8 (NM_146547.1,532-550).
gcatctcctatcttgaaga

SEQ ID NO: 626006 - DNA, 19 bp, Mus musculus
  siRNA target sequence for MOR114-8 (NM_146547.1,599-617).
cagtgctgaccttcattct

SEQ ID NO: 626007 - DNA, 19 bp, Mus musculus
  siRNA target sequence for MOR114-8 (NM_146547.1,618-636).
gacccttgtgtgtgttact

SEQ ID NO: 626008 - DNA, 19 bp, Mus musculus
  siRNA target sequence for MOR114-8 (NM_146547.1,620-638).
cccttgtgtgtgttactct

SEQ ID NO: 626009 - DNA, 19 bp, Mus musculus
  siRNA target sequence for MOR114-8 (NM_146547.1,635-653).
ctctgtcctacgtacatat

SEQ ID NO: 626010 - DNA, 19 bp, Mus musculus
  siRNA target sequence for MOR114-8 (NM_146547.1,637-655).
ctgtcctacgtacatatca

SEQ ID NO: 626011 - DNA, 19 bp, Mus musculus
  siRNA target sequence for MOR114-8 (NM_146547.1,755-773).
gtattttcatttacatcaa

SEQ ID NO: 626012 - DNA, 19 bp, Mus musculus
  siRNA target sequence for MOR114-8 (NM_146547.1,786-804).
ggaatcggtggccatcaat

SEQ ID NO: 626013 - DNA, 19 bp, Mus musculus
  siRNA target sequence for MOR114-8 (NM_146547.1,787-805).
gaatcggtggccatcaata

SEQ ID NO: 626014 - DNA, 19 bp, Mus musculus
  siRNA target sequence for MOR114-8 (NM_146547.1,811-829).
gtggctgttctgatgacat

SEQ ID NO: 626015 - DNA, 19 bp, Mus musculus
  siRNA target sequence for MOR114-8 (NM_146547.1,917-935).
ccattatctcaatgaagaa

SEQ ID NO: 626016 - DNA, 19 bp, Mus musculus
  siRNA target sequence for MOR114-9 (NM_146544.1,592-610).
gtttctgcggtattaacat

SEQ ID NO: 626017 - DNA, 19 bp, Mus musculus
  siRNA target sequence for MOR114-9 (NM_146544.1,598-616).
gcggtattaacatttatca

SEQ ID NO: 626018 - DNA, 19 bp, Mus musculus
  siRNA target sequence for MOR116-1 (NM_146675.1,40-58).
ggattgacaaatgatatca

SEQ ID NO: 626019 - DNA, 19 bp, Mus musculus
  siRNA target sequence for MOR116-1 (NM_146675.1,90-108).
cttaacttatatcttaagt

SEQ ID NO: 626020 - DNA, 19 bp, Mus musculus
  siRNA target sequence for MOR116-1 (NM_146675.1,193-211).
gcgtttttggagatatctt

SEQ ID NO: 626021 - DNA, 19 bp, Mus musculus
  siRNA target sequence for MOR116-1 (NM_146675.1,226-244).
gttcccaagatgctaatca

SEQ ID NO: 626022 - DNA, 19 bp, Mus musculus
  siRNA target sequence for MOR116-1 (NM_146675.1,231-249).
caagatgctaatcaatatt

SEQ ID NO: 626023 - DNA, 19 bp, Mus musculus
  siRNA target sequence for MOR116-1 (NM_146675.1,281-299).
gttgcttcacacagtattt

SEQ ID NO: 626024 - DNA, 19 bp, Mus musculus
  siRNA target sequence for MOR116-1 (NM_146675.1,410-428).
gactttgcttccaactagt

SEQ ID NO: 626025 - DNA, 19 bp, Mus musculus
  siRNA target sequence for MOR116-1 (NM_146675.1,438-456).
ctggttatctggttttata

SEQ ID NO: 626026 - DNA, 19 bp, Mus musculus
  siRNA target sequence for MOR116-1 (NM_146675.1,440-458).
ggttatctggttttatagt

SEQ ID NO: 626027 - DNA, 19 bp, Mus musculus
  siRNA target sequence for MOR116-1 (NM_146675.1,500-518).
gtgcatccaacatcatcaa

SEQ ID NO: 626028 - DNA, 19 bp, Mus musculus
  siRNA target sequence for MOR116-1 (NM_146675.1,503-521).
catccaacatcatcaatca

SEQ ID NO: 626029 - DNA, 19 bp, Mus musculus
  siRNA target sequence for MOR116-1 (NM_146675.1,530-548).
gtgactacactatattgct

SEQ ID NO: 626030 - DNA, 19 bp, Mus musculus
  siRNA target sequence for MOR116-1 (NM_146675.1,735-753).
ggtctcactctcttatgga

SEQ ID NO: 626031 - DNA, 19 bp, Mus musculus
  siRNA target sequence for MOR116-1 (NM_146675.1,814-832).
gtagctgttttaaatacct

SEQ ID NO: 626032 - DNA, 19 bp, Mus musculus
  siRNA target sequence for MOR116-1 (NM_146675.1,901-919).
gatatgctaagcaagacta

SEQ ID NO: 626033 - DNA, 19 bp, Mus musculus
  siRNA target sequence for MOR116-1 (NM_146675.1,906-924).
gctaagcaagactataagt

SEQ ID NO: 626034 - DNA, 19 bp, Mus musculus
  siRNA target sequence for MOR116-1 (NM_146675.1,907-925).
ctaagcaagactataagtt

SEQ ID NO: 626035 - DNA, 19 bp, Mus musculus
  siRNA target sequence for MOR116-1 (NM_146675.1,911-929).
gcaagactataagtttctt

SEQ ID NO: 626036 - DNA, 19 bp, Mus musculus
  siRNA target sequence for MOR116-1 (NM_146675.1,912-930).
caagactataagtttcttt

SEQ ID NO: 626037 - DNA, 19 bp, Mus musculus
  siRNA target sequence for MOR117-1 (NM_146929.1,54-72).
cccaaagtggcaaattgta

SEQ ID NO: 626038 - DNA, 19 bp, Mus musculus
  siRNA target sequence for MOR117-1 (NM_146929.1,55-73).
ccaaagtggcaaattgtaa

SEQ ID NO: 626039 - DNA, 19 bp, Mus musculus
  siRNA target sequence for MOR117-1 (NM_146929.1,111-129).
cactggaaatcttactatt

SEQ ID NO: 626040 - DNA, 19 bp, Mus musculus
  siRNA target sequence for MOR117-1 (NM_146929.1,116-134).
gaaatcttactattatcct

SEQ ID NO: 626041 - DNA, 19 bp, Mus musculus
  siRNA target sequence for MOR117-1 (NM_146929.1,246-264).
catagtgaccatggataaa

SEQ ID NO: 626042 - DNA, 19 bp, Mus musculus
  siRNA target sequence for MOR117-1 (NM_146929.1,250-268).
gtgaccatggataaaacta

SEQ ID NO: 626043 - DNA, 19 bp, Mus musculus
  siRNA target sequence for MOR117-1 (NM_146929.1,252-270).
gaccatggataaaactatt

SEQ ID NO: 626044 - DNA, 19 bp, Mus musculus
  siRNA target sequence for MOR117-1 (NM_146929.1,279-297).
ggcttgcttcacacagtta

SEQ ID NO: 626045 - DNA, 19 bp, Mus musculus
  siRNA target sequence for MOR117-1 (NM_146929.1,280-298).
gcttgcttcacacagttat

SEQ ID NO: 626046 - DNA, 19 bp, Mus musculus
  siRNA target sequence for MOR117-1 (NM_146929.1,281-299).
cttgcttcacacagttatt

SEQ ID NO: 626047 - DNA, 19 bp, Mus musculus
  siRNA target sequence for MOR117-1 (NM_146929.1,285-303).
cttcacacagttatttgct

SEQ ID NO: 626048 - DNA, 19 bp, Mus musculus
  siRNA target sequence for MOR117-1 (NM_146929.1,316-334).
ggcatagcacagtttttct

SEQ ID NO: 626049 - DNA, 19 bp, Mus musculus
  siRNA target sequence for MOR117-1 (NM_146929.1,459-477).
gatctgccctggagtcatt

SEQ ID NO: 626050 - DNA, 19 bp, Mus musculus
  siRNA target sequence for MOR117-1 (NM_146929.1,502-520).
gatactattattgaacatt

SEQ ID NO: 626051 - DNA, 19 bp, Mus musculus
  siRNA target sequence for MOR117-1 (NM_146929.1,529-547).
gactactcccccatcttga

SEQ ID NO: 626052 - DNA, 19 bp, Mus musculus
  siRNA target sequence for MOR117-1 (NM_146929.1,639-657).
ctcttatgggaaaatcata

SEQ ID NO: 626053 - DNA, 19 bp, Mus musculus
  siRNA target sequence for MOR117-1 (NM_146929.1,646-664).
gggaaaatcataagtacaa

SEQ ID NO: 626054 - DNA, 19 bp, Mus musculus
  siRNA target sequence for MOR117-1 (NM_146929.1,647-665).
ggaaaatcataagtacaat

SEQ ID NO: 626055 - DNA, 19 bp, Mus musculus
  siRNA target sequence for MOR123-1 (NM_146717.1,610-628).
gtggccactggatgcaatt

SEQ ID NO: 626056 - DNA, 19 bp, Mus musculus
  siRNA target sequence for MOR123-1 (NM_146717.1,612-630).
ggccactggatgcaatttt

SEQ ID NO: 626057 - DNA, 19 bp, Mus musculus
  siRNA target sequence for MOR123-1 (NM_146717.1,864-882).
ctattcccttcgcaacaaa

SEQ ID NO: 626058 - DNA, 19 bp, Mus musculus
  siRNA target sequence for MOR123-1 (NM_146717.1,898-916).
gtgaagagggtcagtgaaa

SEQ ID NO: 626059 - DNA, 19 bp, Mus musculus
  siRNA target sequence for MOR125-1 (NM_146711.1,58-76).
cagcgggagcaggaatatt

SEQ ID NO: 626060 - DNA, 19 bp, Mus musculus
  siRNA target sequence for MOR125-1 (NM_146711.1,61-79).
cgggagcaggaatatttct

SEQ ID NO: 626061 - DNA, 19 bp, Mus musculus
  siRNA target sequence for MOR125-1 (NM_146711.1,62-80).
gggagcaggaatatttctt

SEQ ID NO: 626062 - DNA, 19 bp, Mus musculus
  siRNA target sequence for MOR125-1 (NM_146711.1,64-82).
gagcaggaatatttcttct

SEQ ID NO: 626063 - DNA, 19 bp, Mus musculus
  siRNA target sequence for MOR125-1 (NM_146711.1,152-170).
ctgacactcgcctccataa

SEQ ID NO: 626064 - DNA, 19 bp, Mus musculus
  siRNA target sequence for MOR128-2 (NM_146292.1,6-24).
gccatttaacgatgaagat

SEQ ID NO: 626065 - DNA, 19 bp, Mus musculus
  siRNA target sequence for MOR128-2 (NM_146292.1,22-40).
gatgaattttcccttttta

SEQ ID NO: 626066 - DNA, 19 bp, Mus musculus
  siRNA target sequence for MOR128-2 (NM_146292.1,165-183).
cactatggtaggaaactca

SEQ ID NO: 626067 - DNA, 19 bp, Mus musculus
  siRNA target sequence for MOR128-2 (NM_146292.1,172-190).
gtaggaaactcacttatta

SEQ ID NO: 626068 - DNA, 19 bp, Mus musculus
  siRNA target sequence for MOR128-2 (NM_146292.1,193-211).
ctggcaatcatcagtgata

SEQ ID NO: 626069 - DNA, 19 bp, Mus musculus
  siRNA target sequence for MOR128-2 (NM_146292.1,195-213).
ggcaatcatcagtgatact

SEQ ID NO: 626070 - DNA, 19 bp, Mus musculus
  siRNA target sequence for MOR128-2 (NM_146292.1,197-215).
caatcatcagtgatactca

SEQ ID NO: 626071 - DNA, 19 bp, Mus musculus
  siRNA target sequence for MOR128-2 (NM_146292.1,279-297).
cactacagtccctaaaata

SEQ ID NO: 626072 - DNA, 19 bp, Mus musculus
  siRNA target sequence for MOR128-2 (NM_146292.1,333-351).
ctttgtaggatgctttaca

SEQ ID NO: 626073 - DNA, 19 bp, Mus musculus
  siRNA target sequence for MOR128-2 (NM_146292.1,373-391).
ctggtggacttggacaatt

SEQ ID NO: 626074 - DNA, 19 bp, Mus musculus
  siRNA target sequence for MOR128-2 (NM_146292.1,445-463).
cactatgctgcactgttaa

SEQ ID NO: 626075 - DNA, 19 bp, Mus musculus
  siRNA target sequence for MOR128-2 (NM_146292.1,447-465).
ctatgctgcactgttaaat

SEQ ID NO: 626076 - DNA, 19 bp, Mus musculus
  siRNA target sequence for MOR128-2 (NM_146292.1,490-508).
gtggttccatgggttatct

SEQ ID NO: 626077 - DNA, 19 bp, Mus musculus
  siRNA target sequence for MOR128-2 (NM_146292.1,492-510).
ggttccatgggttatctct

SEQ ID NO: 626078 - DNA, 19 bp, Mus musculus
  siRNA target sequence for MOR128-2 (NM_146292.1,493-511).
gttccatgggttatctcta

SEQ ID NO: 626079 - DNA, 19 bp, Mus musculus
  siRNA target sequence for MOR128-2 (NM_146292.1,500-518).
gggttatctctaatctagt

SEQ ID NO: 626080 - DNA, 19 bp, Mus musculus
  siRNA target sequence for MOR128-2 (NM_146292.1,592-610).
gatctggaacccgtgttaa

SEQ ID NO: 626081 - DNA, 19 bp, Mus musculus
  siRNA target sequence for MOR128-2 (NM_146292.1,606-624).
gttaaggcttgcttgttca

SEQ ID NO: 626082 - DNA, 19 bp, Mus musculus
  siRNA target sequence for MOR128-2 (NM_146292.1,617-635).
cttgttcagacactcaaat

SEQ ID NO: 626083 - DNA, 19 bp, Mus musculus
  siRNA target sequence for MOR128-2 (NM_146292.1,620-638).
gttcagacactcaaatcaa

SEQ ID NO: 626084 - DNA, 19 bp, Mus musculus
  siRNA target sequence for MOR128-2 (NM_146292.1,629-647).
ctcaaatcaacaatttgct

SEQ ID NO: 626085 - DNA, 19 bp, Mus musculus
  siRNA target sequence for MOR128-2 (NM_146292.1,658-676).
gttgggggaacagttatct

SEQ ID NO: 626086 - DNA, 19 bp, Mus musculus
  siRNA target sequence for MOR128-2 (NM_146292.1,729-747).
gcttaatgttccatcagta

SEQ ID NO: 626087 - DNA, 19 bp, Mus musculus
  siRNA target sequence for MOR129-2 (NM_146910.1,20-38).
caacagccatagaattcct

SEQ ID NO: 626088 - DNA, 19 bp, Mus musculus
  siRNA target sequence for MOR129-2 (NM_146910.1,644-662).
ctgtttcctatgggtatat

SEQ ID NO: 626089 - DNA, 19 bp, Mus musculus
  siRNA target sequence for MOR129-2 (NM_146910.1,689-707).
ctattcagggaataaggaa

SEQ ID NO: 626090 - DNA, 19 bp, Mus musculus
  siRNA target sequence for MOR129-2 (NM_146910.1,781-799).
cacccttcgtctacatatt

SEQ ID NO: 626091 - DNA, 19 bp, Mus musculus
  siRNA target sequence for MOR129-2 (NM_146910.1,783-801).
cccttcgtctacatattca

SEQ ID NO: 626092 - DNA, 19 bp, Mus musculus
  siRNA target sequence for MOR129-2 (NM_146910.1,873-891).
gaggaatcgtgatgtcaaa

SEQ ID NO: 626093 - DNA, 19 bp, Mus musculus
  siRNA target sequence for MOR129-2 (NM_146910.1,898-916).
ctcaggaaactcatgtgta

SEQ ID NO: 626094 - DNA, 19 bp, Mus musculus
  siRNA target sequence for MOR129-2 (NM_146910.1,922-940).
ctcacttcttcgagattct

SEQ ID NO: 626095 - DNA, 19 bp, Mus musculus
  siRNA target sequence for MOR13-1 (NM_147121.1,542-560).
gtctgcatcctgatctgat

SEQ ID NO: 626096 - DNA, 19 bp, Mus musculus
  siRNA target sequence for MOR13-1 (NM_147121.1,574-592).
ggtgacacttccattaata

SEQ ID NO: 626097 - DNA, 19 bp, Mus musculus
  siRNA target sequence for MOR13-1 (NM_147121.1,804-822).
gcatgcccctcactatgta

SEQ ID NO: 626098 - DNA, 19 bp, Mus musculus
  siRNA target sequence for MOR13-1 (NM_147121.1,874-892).
gtcatctactccatcaaaa

SEQ ID NO: 626099 - DNA, 19 bp, Mus musculus
  siRNA target sequence for MOR13-1 (NM_147121.1,905-923).
gtcggaggttttgcaaaat

SEQ ID NO: 626100 - DNA, 19 bp, Mus musculus
  siRNA target sequence for MOR13-2 (NM_147077.1,103-121).
gtcctctacactgtttcta

SEQ ID NO: 626101 - DNA, 19 bp, Mus musculus
  siRNA target sequence for MOR13-2 (NM_147077.1,105-123).
cctctacactgtttctata

SEQ ID NO: 626102 - DNA, 19 bp, Mus musculus
  siRNA target sequence for MOR13-2 (NM_147077.1,197-215).
ctctgctgtcactcaatga

SEQ ID NO: 626103 - DNA, 19 bp, Mus musculus
  siRNA target sequence for MOR13-2 (NM_147077.1,210-228).
caatgacctgggtgtatct

SEQ ID NO: 626104 - DNA, 19 bp, Mus musculus
  siRNA target sequence for MOR13-2 (NM_147077.1,217-235).
ctgggtgtatctttctcta

SEQ ID NO: 626105 - DNA, 19 bp, Mus musculus
  siRNA target sequence for MOR13-2 (NM_147077.1,568-586).
ccctgtggggatattacca

SEQ ID NO: 626106 - DNA, 19 bp, Mus musculus
  siRNA target sequence for MOR13-2 (NM_147077.1,570-588).
ctgtggggatattaccatt

SEQ ID NO: 626107 - DNA, 19 bp, Mus musculus
  siRNA target sequence for MOR13-2 (NM_147077.1,572-590).
gtggggatattaccattaa

SEQ ID NO: 626108 - DNA, 19 bp, Mus musculus
  siRNA target sequence for MOR13-2 (NM_147077.1,574-592).
ggggatattaccattaata

SEQ ID NO: 626109 - DNA, 19 bp, Mus musculus
  siRNA target sequence for MOR13-2 (NM_147077.1,575-593).
gggatattaccattaataa

SEQ ID NO: 626110 - DNA, 19 bp, Mus musculus
  siRNA target sequence for MOR13-2 (NM_147077.1,576-594).
ggatattaccattaataat

SEQ ID NO: 626111 - DNA, 19 bp, Mus musculus
  siRNA target sequence for MOR13-2 (NM_147077.1,577-595).
gatattaccattaataata

SEQ ID NO: 626112 - DNA, 19 bp, Mus musculus
  siRNA target sequence for MOR13-2 (NM_147077.1,601-619).
ggcttgttcatagtcatat

SEQ ID NO: 626113 - DNA, 19 bp, Mus musculus
  siRNA target sequence for MOR13-2 (NM_147077.1,603-621).
cttgttcatagtcatatct

SEQ ID NO: 626114 - DNA, 19 bp, Mus musculus
  siRNA target sequence for MOR13-2 (NM_147077.1,801-819).
gaggcatgccccaaggtat

SEQ ID NO: 626115 - DNA, 19 bp, Mus musculus
  siRNA target sequence for MOR13-2 (NM_147077.1,825-843).
caccctgctctcacttgtt

SEQ ID NO: 626116 - DNA, 19 bp, Mus musculus
  siRNA target sequence for MOR13-2 (NM_147077.1,832-850).
ctctcacttgtttatctgt

SEQ ID NO: 626117 - DNA, 19 bp, Mus musculus
  siRNA target sequence for MOR13-2 (NM_147077.1,904-922).
cgtcgaaggctccacaaaa

SEQ ID NO: 626118 - DNA, 19 bp, Mus musculus
  siRNA target sequence for MOR13-2 (NM_147077.1,905-923).
gtcgaaggctccacaaaat

SEQ ID NO: 626119 - DNA, 19 bp, Mus musculus
  siRNA target sequence for MOR13-2 (NM_147077.1,908-926).
gaaggctccacaaaatcct

SEQ ID NO: 626120 - DNA, 19 bp, Mus musculus
  siRNA target sequence for MOR13-6 (NM_146329.1,108-126).
gtatgttatctccatagta

SEQ ID NO: 626121 - DNA, 19 bp, Mus musculus
  siRNA target sequence for MOR13-6 (NM_146329.1,167-185).
gtttgcaccatcctatgta

SEQ ID NO: 626122 - DNA, 19 bp, Mus musculus
  siRNA target sequence for MOR13-6 (NM_146329.1,220-238).
ggagtgtctttttctacat

SEQ ID NO: 626123 - DNA, 19 bp, Mus musculus
  siRNA target sequence for MOR13-6 (NM_146329.1,221-239).
gagtgtctttttctacatt

SEQ ID NO: 626124 - DNA, 19 bp, Mus musculus
  siRNA target sequence for MOR13-6 (NM_146329.1,507-525).
cttctgtaaggccaatgtt

SEQ ID NO: 626125 - DNA, 19 bp, Mus musculus
  siRNA target sequence for MOR13-6 (NM_146329.1,759-777).
ctatgtacccatgattagt

SEQ ID NO: 626126 - DNA, 19 bp, Mus musculus
  siRNA target sequence for MOR13-6 (NM_146329.1,767-785).
ccatgattagtgtgtcaat

SEQ ID NO: 626127 - DNA, 19 bp, Mus musculus
  siRNA target sequence for MOR13-6 (NM_146329.1,778-796).
gtgtcaatggtccatagat

SEQ ID NO: 626128 - DNA, 19 bp, Mus musculus
  siRNA target sequence for MOR13-6 (NM_146329.1,782-800).
caatggtccatagatttgt

SEQ ID NO: 626129 - DNA, 19 bp, Mus musculus
  siRNA target sequence for MOR13-6 (NM_146329.1,786-804).
ggtccatagatttgtaaaa

SEQ ID NO: 626130 - DNA, 19 bp, Mus musculus
  siRNA target sequence for MOR13-6 (NM_146329.1,833-851).
catccctggtctatctctt

SEQ ID NO: 626131 - DNA, 19 bp, Mus musculus
  siRNA target sequence for MOR13-6 (NM_146329.1,905-923).
gtaggagactgcacaagat

SEQ ID NO: 626132 - DNA, 19 bp, Mus musculus
  siRNA target sequence for MOR13-6 (NM_146329.1,909-927).
gagactgcacaagatgtta

SEQ ID NO: 626133 - DNA, 19 bp, Mus musculus
  siRNA target sequence for MOR13-6 (NM_146329.1,911-929).
gactgcacaagatgttact

SEQ ID NO: 626134 - DNA, 19 bp, Mus musculus
  siRNA target sequence for MOR135-1 (NM_147025.1,815-833).
cttctattgccataatgta

SEQ ID NO: 626135 - DNA, 19 bp, Mus musculus
  siRNA target sequence for MOR135-1 (NM_147025.1,894-912).
ggaggcccttataaacgtt

SEQ ID NO: 626136 - DNA, 19 bp, Mus musculus
  siRNA target sequence for MOR135-1 (NM_147025.1,898-916).
gcccttataaacgttctta

SEQ ID NO: 626137 - DNA, 19 bp, Mus musculus
  siRNA target sequence for MOR135-1 (NM_147025.1,899-917).
cccttataaacgttcttat

SEQ ID NO: 626138 - DNA, 19 bp, Mus musculus
  siRNA target sequence for MOR135-1 (NM_147025.1,901-919).
cttataaacgttcttatca

SEQ ID NO: 626139 - DNA, 19 bp, Mus musculus
  siRNA target sequence for MOR135-1 (NM_147025.1,913-931).
cttatcaagaaaatacctt

SEQ ID NO: 626140 - DNA, 19 bp, Mus musculus
  siRNA target sequence for MOR135-10 (NM_147005.1,405-423).
catgagcaccaaattttgt

SEQ ID NO: 626141 - DNA, 19 bp, Mus musculus
  siRNA target sequence for MOR135-10 (NM_147005.1,413-431).
ccaaattttgtgctttact

SEQ ID NO: 626142 - DNA, 19 bp, Mus musculus
  siRNA target sequence for MOR135-10 (NM_147005.1,414-432).
caaattttgtgctttacta

SEQ ID NO: 626143 - DNA, 19 bp, Mus musculus
  siRNA target sequence for MOR135-10 (NM_147005.1,618-636).
cagtattattccatttcta

SEQ ID NO: 626144 - DNA, 19 bp, Mus musculus
  siRNA target sequence for MOR135-12 (NM_146922.1,267-285).
gagccaggatccatcaatt

SEQ ID NO: 626145 - DNA, 19 bp, Mus musculus
  siRNA target sequence for MOR135-2 (NM_147024.1,523-541).
ccccactacttttgtgata

SEQ ID NO: 626146 - DNA, 19 bp, Mus musculus
  siRNA target sequence for MOR135-2 (NM_147024.1,573-591).
cacccatgataatgaatta

SEQ ID NO: 626147 - DNA, 19 bp, Mus musculus
  siRNA target sequence for MOR135-2 (NM_147024.1,577-595).
catgataatgaattagcaa

SEQ ID NO: 626148 - DNA, 19 bp, Mus musculus
  siRNA target sequence for MOR135-2 (NM_147024.1,790-808).
gctaataacacttatgtga

SEQ ID NO: 626149 - DNA, 19 bp, Mus musculus
  siRNA target sequence for MOR135-26 (NM_146347.1,20-38).
ctatcatctctcagttctt

SEQ ID NO: 626150 - DNA, 19 bp, Mus musculus
  siRNA target sequence for MOR135-26 (NM_146347.1,62-80).
ctgagtacgagcacttgtt

SEQ ID NO: 626151 - DNA, 19 bp, Mus musculus
  siRNA target sequence for MOR135-26 (NM_146347.1,446-464).
gggtgctgaccacattgta

SEQ ID NO: 626152 - DNA, 19 bp, Mus musculus
  siRNA target sequence for MOR135-26 (NM_146347.1,447-465).
ggtgctgaccacattgtat

SEQ ID NO: 626153 - DNA, 19 bp, Mus musculus
  siRNA target sequence for MOR135-4 (NM_147022.1,899-917).
cccttgtaagagtccttat

SEQ ID NO: 626154 - DNA, 19 bp, Mus musculus
  siRNA target sequence for MOR135-4 (NM_147022.1,900-918).
ccttgtaagagtccttata

SEQ ID NO: 626155 - DNA, 19 bp, Mus musculus
  siRNA target sequence for MOR135-4 (NM_147022.1,901-919).
cttgtaagagtccttataa

SEQ ID NO: 626156 - DNA, 19 bp, Mus musculus
  siRNA target sequence for MOR135-4 (NM_147022.1,904-922).
gtaagagtccttataaaga

SEQ ID NO: 626157 - DNA, 19 bp, Mus musculus
  siRNA target sequence for MOR135-6 (NM_147009.1,414-432).
caagttctgtacttcacta

SEQ ID NO: 626158 - DNA, 19 bp, Mus musculus
  siRNA target sequence for MOR135-6 (NM_147009.1,603-621).
catgggaggtatcattatt

SEQ ID NO: 626159 - DNA, 19 bp, Mus musculus
  siRNA target sequence for MOR135-9 (NM_147006.1,414-432).
caagctctgtgtttcacta

SEQ ID NO: 626160 - DNA, 19 bp, Mus musculus
  siRNA target sequence for MOR135-9 (NM_147006.1,446-464).
ggatgttgactatattcca

SEQ ID NO: 626161 - DNA, 19 bp, Mus musculus
  siRNA target sequence for MOR135-9 (NM_147006.1,447-465).
gatgttgactatattccat

SEQ ID NO: 626162 - DNA, 19 bp, Mus musculus
  siRNA target sequence for MOR135-9 (NM_147006.1,628-646).
ccgttcctactcattggta

SEQ ID NO: 626163 - DNA, 19 bp, Mus musculus
  siRNA target sequence for MOR135-9 (NM_147006.1,629-647).
cgttcctactcattggtat

SEQ ID NO: 626164 - DNA, 19 bp, Mus musculus
  siRNA target sequence for MOR136-11 (NM_146938.1,443-461).
cctgggccttatctttagt

SEQ ID NO: 626165 - DNA, 19 bp, Mus musculus
  siRNA target sequence for MOR136-11 (NM_146938.1,757-775).
ggatctgtcattggattat

SEQ ID NO: 626166 - DNA, 19 bp, Mus musculus
  siRNA target sequence for MOR136-11 (NM_146938.1,758-776).
gatctgtcattggattata

SEQ ID NO: 626167 - DNA, 19 bp, Mus musculus
  siRNA target sequence for MOR136-7 (NM_146945.1,579-597).
catcaatgaattggttatt

SEQ ID NO: 626168 - DNA, 19 bp, Mus musculus
  siRNA target sequence for MOR136-7 (NM_146945.1,582-600).
caatgaattggttattctt

SEQ ID NO: 626169 - DNA, 19 bp, Mus musculus
  siRNA target sequence for MOR136-7 (NM_146945.1,916-934).
ggtaggagactgtgttcat

SEQ ID NO: 626170 - DNA, 19 bp, Mus musculus
  siRNA target sequence for MOR139-2 (NM_147042.1,17-35).
ggacaagagttgcagaatt

SEQ ID NO: 626171 - DNA, 19 bp, Mus musculus
  siRNA target sequence for MOR139-2 (NM_147042.1,18-36).
gacaagagttgcagaattt

SEQ ID NO: 626172 - DNA, 19 bp, Mus musculus
  siRNA target sequence for MOR139-2 (NM_147042.1,20-38).
caagagttgcagaatttct

SEQ ID NO: 626173 - DNA, 19 bp, Mus musculus
  siRNA target sequence for MOR139-2 (NM_147042.1,64-82).
gacctgcaacccattattt

SEQ ID NO: 626174 - DNA, 19 bp, Mus musculus
  siRNA target sequence for MOR139-2 (NM_147042.1,69-87).
gcaacccattatttatggt

SEQ ID NO: 626175 - DNA, 19 bp, Mus musculus
  siRNA target sequence for MOR139-2 (NM_147042.1,102-120).
gtacctggttactgttgtt

SEQ ID NO: 626176 - DNA, 19 bp, Mus musculus
  siRNA target sequence for MOR139-2 (NM_147042.1,115-133).
gttgttgggaacatgttaa

SEQ ID NO: 626177 - DNA, 19 bp, Mus musculus
  siRNA target sequence for MOR139-2 (NM_147042.1,215-233).
gtttcatttcaactactat

SEQ ID NO: 626178 - DNA, 19 bp, Mus musculus
  siRNA target sequence for MOR139-2 (NM_147042.1,286-304).
gggtgcattacccagatat

SEQ ID NO: 626179 - DNA, 19 bp, Mus musculus
  siRNA target sequence for MOR139-2 (NM_147042.1,287-305).
ggtgcattacccagatata

SEQ ID NO: 626180 - DNA, 19 bp, Mus musculus
  siRNA target sequence for MOR139-2 (NM_147042.1,411-429).
ctaccagctctgtggattt

SEQ ID NO: 626181 - DNA, 19 bp, Mus musculus
  siRNA target sequence for MOR139-2 (NM_147042.1,436-454).
ctggtgtcttggattgtaa

SEQ ID NO: 626182 - DNA, 19 bp, Mus musculus
  siRNA target sequence for MOR139-2 (NM_147042.1,438-456).
ggtgtcttggattgtaagt

SEQ ID NO: 626183 - DNA, 19 bp, Mus musculus
  siRNA target sequence for MOR139-2 (NM_147042.1,455-473).
gtgttctgcatgccttatt

SEQ ID NO: 626184 - DNA, 19 bp, Mus musculus
  siRNA target sequence for MOR139-2 (NM_147042.1,542-560).
ctaatcaggtgattcaact

SEQ ID NO: 626185 - DNA, 19 bp, Mus musculus
  siRNA target sequence for MOR139-2 (NM_147042.1,550-568).
gtgattcaactcacttgtt

SEQ ID NO: 626186 - DNA, 19 bp, Mus musculus
  siRNA target sequence for MOR139-2 (NM_147042.1,629-647).
ctcttgctggtgtcttcta

SEQ ID NO: 626187 - DNA, 19 bp, Mus musculus
  siRNA target sequence for MOR139-2 (NM_147042.1,637-655).
ggtgtcttctattcttact

SEQ ID NO: 626188 - DNA, 19 bp, Mus musculus
  siRNA target sequence for MOR139-2 (NM_147042.1,645-663).
ctattcttacttcaagata

SEQ ID NO: 626189 - DNA, 19 bp, Mus musculus
  siRNA target sequence for MOR139-2 (NM_147042.1,720-738).
ctgtgcatctcatctatta

SEQ ID NO: 626190 - DNA, 19 bp, Mus musculus
  siRNA target sequence for MOR139-2 (NM_147042.1,742-760).
gtatcattattttactgta

SEQ ID NO: 626191 - DNA, 19 bp, Mus musculus
  siRNA target sequence for MOR139-2 (NM_147042.1,780-798).
cagttctgctgcaaaccat

SEQ ID NO: 626192 - DNA, 19 bp, Mus musculus
  siRNA target sequence for MOR139-2 (NM_147042.1,795-813).
ccatgggtcacaaacaagt

SEQ ID NO: 626193 - DNA, 19 bp, Mus musculus
  siRNA target sequence for MOR139-2 (NM_147042.1,826-844).
gtcacgtacactgtagtta

SEQ ID NO: 626194 - DNA, 19 bp, Mus musculus
  siRNA target sequence for MOR139-2 (NM_147042.1,908-926).
gactcttcgtgaggaaatt

SEQ ID NO: 626195 - DNA, 19 bp, Mus musculus
  siRNA target sequence for MOR139-2 (NM_147042.1,910-928).
ctcttcgtgaggaaattat

SEQ ID NO: 626196 - DNA, 19 bp, Mus musculus
  siRNA target sequence for MOR139-4 (NM_147040.1,297-315).
cacccaggtatacttttta

SEQ ID NO: 626197 - DNA, 19 bp, Mus musculus
  siRNA target sequence for MOR139-4 (NM_147040.1,303-321).
ggtatactttttactactt

SEQ ID NO: 626198 - DNA, 19 bp, Mus musculus
  siRNA target sequence for MOR139-4 (NM_147040.1,574-592).
gacatctctcttaatgaca

SEQ ID NO: 626199 - DNA, 19 bp, Mus musculus
  siRNA target sequence for MOR139-4 (NM_147040.1,875-893).
gtttaaggaataatgacat

SEQ ID NO: 626200 - DNA, 19 bp, Mus musculus
  siRNA target sequence for MOR139-4 (NM_147040.1,900-918).
ggctctgaaaatagtttta

SEQ ID NO: 626201 - DNA, 19 bp, Mus musculus
  siRNA target sequence for MOR139-4 (NM_147040.1,925-943).
gtaactagaaacagactaa

SEQ ID NO: 626202 - DNA, 19 bp, Mus musculus
  siRNA target sequence for MOR143-1 (NM_146339.2,383-401).
gaaccatacagccatagta

SEQ ID NO: 626203 - DNA, 19 bp, Mus musculus
  siRNA target sequence for MOR143-1 (NM_146339.2,386-404).
ccatacagccatagtacat

SEQ ID NO: 626204 - DNA, 19 bp, Mus musculus
  siRNA target sequence for MOR143-1 (NM_146339.2,387-405).
catacagccatagtacatt

SEQ ID NO: 626205 - DNA, 19 bp, Mus musculus
  siRNA target sequence for MOR143-1 (NM_146339.2,407-425).
cctccttattggtctttca

SEQ ID NO: 626206 - DNA, 19 bp, Mus musculus
  siRNA target sequence for MOR143-1 (NM_146339.2,410-428).
ccttattggtctttcagaa

SEQ ID NO: 626207 - DNA, 19 bp, Mus musculus
  siRNA target sequence for MOR143-1 (NM_146339.2,450-468).
ctttttggactattcctat

SEQ ID NO: 626208 - DNA, 19 bp, Mus musculus
  siRNA target sequence for MOR143-1 (NM_146339.2,456-474).
ggactattcctatctatgt

SEQ ID NO: 626209 - DNA, 19 bp, Mus musculus
  siRNA target sequence for MOR143-1 (NM_146339.2,457-475).
gactattcctatctatgtt

SEQ ID NO: 626210 - DNA, 19 bp, Mus musculus
  siRNA target sequence for MOR143-1 (NM_146339.2,469-487).
ctatgttcctgattaccat

SEQ ID NO: 626211 - DNA, 19 bp, Mus musculus
  siRNA target sequence for MOR143-1 (NM_146339.2,629-647).
catgcacaccatgaagata

SEQ ID NO: 626212 - DNA, 19 bp, Mus musculus
  siRNA target sequence for MOR143-1 (NM_146339.2,793-811).
gtggccttctggttctttt

SEQ ID NO: 626213 - DNA, 19 bp, Mus musculus
  siRNA target sequence for MOR143-1 (NM_146339.2,807-825).
cttttatcttggatcatta

SEQ ID NO: 626214 - DNA, 19 bp, Mus musculus
  siRNA target sequence for MOR143-1 (NM_146339.2,832-850).
gggtttccttgattcatat

SEQ ID NO: 626215 - DNA, 19 bp, Mus musculus
  siRNA target sequence for MOR143-1 (NM_146339.2,864-882).
caactgaacttctctacta

SEQ ID NO: 626216 - DNA, 19 bp, Mus musculus
  siRNA target sequence for MOR143-1 (NM_146339.2,936-954).
cgctctgatacccacataa

SEQ ID NO: 626217 - DNA, 19 bp, Mus musculus
  siRNA target sequence for MOR143-1 (NM_146339.2,942-960).
gatacccacataaataaca

SEQ ID NO: 626218 - DNA, 19 bp, Mus musculus
  siRNA target sequence for MOR143-1 (NM_146339.2,979-997).
ctgcagtgctaggtatgtt

SEQ ID NO: 626219 - DNA, 19 bp, Mus musculus
  siRNA target sequence for MOR143-1 (NM_146339.2,999-1017).
cctgtcattgggatagctt

SEQ ID NO: 626220 - DNA, 19 bp, Mus musculus
  siRNA target sequence for MOR143-1 (NM_146339.2,1000-1018).
ctgtcattgggatagcttt

SEQ ID NO: 626221 - DNA, 19 bp, Mus musculus
  siRNA target sequence for MOR143-1 (NM_146339.2,1008-1026).
gggatagctttctcttatt

SEQ ID NO: 626222 - DNA, 19 bp, Mus musculus
  siRNA target sequence for MOR143-1 (NM_146339.2,1057-1075).
cctccattaagaataagta

SEQ ID NO: 626223 - DNA, 19 bp, Mus musculus
  siRNA target sequence for MOR143-1 (NM_146339.2,1058-1076).
ctccattaagaataagtat

SEQ ID NO: 626224 - DNA, 19 bp, Mus musculus
  siRNA target sequence for MOR143-1 (NM_146339.2,1129-1147).
ggacaggatttgtagttca

SEQ ID NO: 626225 - DNA, 19 bp, Mus musculus
  siRNA target sequence for MOR143-1 (NM_146339.2,1132-1150).
caggatttgtagttcatct

SEQ ID NO: 626226 - DNA, 19 bp, Mus musculus
  siRNA target sequence for MOR143-1 (NM_146339.2,1164-1182).
gcccattcatccaagagaa

SEQ ID NO: 626227 - DNA, 19 bp, Mus musculus
  siRNA target sequence for MOR143-1 (NM_146339.2,1186-1204).
caatcacttcaataatgta

SEQ ID NO: 626228 - DNA, 19 bp, Mus musculus
  siRNA target sequence for MOR143-1 (NM_146339.2,1279-1297).
gactccttagaagagttaa

SEQ ID NO: 626229 - DNA, 19 bp, Mus musculus
  siRNA target sequence for MOR144-1 (NM_146825.1,10-28).
gaaaatcacacagaactat

SEQ ID NO: 626230 - DNA, 19 bp, Mus musculus
  siRNA target sequence for MOR144-1 (NM_146825.1,20-38).
cagaactatcacaattcct

SEQ ID NO: 626231 - DNA, 19 bp, Mus musculus
  siRNA target sequence for MOR144-1 (NM_146825.1,62-80).
ctaaattgcagcctattct

SEQ ID NO: 626232 - DNA, 19 bp, Mus musculus
  siRNA target sequence for MOR144-1 (NM_146825.1,208-226).
gacatgtgtttcacttcta

SEQ ID NO: 626233 - DNA, 19 bp, Mus musculus
  siRNA target sequence for MOR144-1 (NM_146825.1,322-340).
gctggaatggataatttct

SEQ ID NO: 626234 - DNA, 19 bp, Mus musculus
  siRNA target sequence for MOR144-1 (NM_146825.1,433-451).
gtgctaatgtgctggatta

SEQ ID NO: 626235 - DNA, 19 bp, Mus musculus
  siRNA target sequence for MOR144-1 (NM_146825.1,465-483).
ctccctgtttcatagtcta

SEQ ID NO: 626236 - DNA, 19 bp, Mus musculus
  siRNA target sequence for MOR144-1 (NM_146825.1,467-485).
ccctgtttcatagtctatt

SEQ ID NO: 626237 - DNA, 19 bp, Mus musculus
  siRNA target sequence for MOR144-1 (NM_146825.1,468-486).
cctgtttcatagtctatta

SEQ ID NO: 626238 - DNA, 19 bp, Mus musculus
  siRNA target sequence for MOR144-1 (NM_146825.1,469-487).
ctgtttcatagtctattaa

SEQ ID NO: 626239 - DNA, 19 bp, Mus musculus
  siRNA target sequence for MOR144-1 (NM_146825.1,538-556).
gagttggctcaaattctca

SEQ ID NO: 626240 - DNA, 19 bp, Mus musculus
  siRNA target sequence for MOR144-1 (NM_146825.1,562-580).
gcaagctctgatattctca

SEQ ID NO: 626241 - DNA, 19 bp, Mus musculus
  siRNA target sequence for MOR144-1 (NM_146825.1,601-619).
gtggctactgccctgttat

SEQ ID NO: 626242 - DNA, 19 bp, Mus musculus
  siRNA target sequence for MOR144-1 (NM_146825.1,628-646).
cctgtcactggaattctct

SEQ ID NO: 626243 - DNA, 19 bp, Mus musculus
  siRNA target sequence for MOR144-1 (NM_146825.1,664-682).
gtctcctccttattgaata

SEQ ID NO: 626244 - DNA, 19 bp, Mus musculus
  siRNA target sequence for MOR144-1 (NM_146825.1,669-687).
ctccttattgaatatgtct

SEQ ID NO: 626245 - DNA, 19 bp, Mus musculus
  siRNA target sequence for MOR144-1 (NM_146825.1,761-779).
cagcactgggggtttacct

SEQ ID NO: 626246 - DNA, 19 bp, Mus musculus
  siRNA target sequence for MOR144-1 (NM_146825.1,899-917).
ctctggtaagaatccttaa

SEQ ID NO: 626247 - DNA, 19 bp, Mus musculus
  siRNA target sequence for MOR144-1 (NM_146825.1,903-921).
ggtaagaatccttaaagta

SEQ ID NO: 626248 - DNA, 19 bp, Mus musculus
  siRNA target sequence for MOR144-1 (NM_146825.1,904-922).
gtaagaatccttaaagtat

SEQ ID NO: 626249 - DNA, 19 bp, Mus musculus
  siRNA target sequence for MOR144-1 (NM_146825.1,912-930).
ccttaaagtatattcttgt

SEQ ID NO: 626250 - DNA, 19 bp, Mus musculus
  siRNA target sequence for MOR146-2 (NM_146528.1,262-280).
cataacagaaccataactt

SEQ ID NO: 626251 - DNA, 19 bp, Mus musculus
  siRNA target sequence for MOR146-2 (NM_146528.1,573-591).
cacctctataaatagcata

SEQ ID NO: 626252 - DNA, 19 bp, Mus musculus
  siRNA target sequence for MOR146-2 (NM_146528.1,576-594).
ctctataaatagcatagtt

SEQ ID NO: 626253 - DNA, 19 bp, Mus musculus
  siRNA target sequence for MOR146-2 (NM_146528.1,578-596).
ctataaatagcatagttat

SEQ ID NO: 626254 - DNA, 19 bp, Mus musculus
  siRNA target sequence for MOR146-2 (NM_146528.1,587-605).
gcatagttatatttcttgt

SEQ ID NO: 626255 - DNA, 19 bp, Mus musculus
  siRNA target sequence for MOR146-2 (NM_146528.1,772-790).
gtataccttagctcatcta

SEQ ID NO: 626256 - DNA, 19 bp, Mus musculus
  siRNA target sequence for MOR146-2 (NM_146528.1,904-922).
cagaaaattttcagtcaaa

SEQ ID NO: 626257 - DNA, 19 bp, Mus musculus
  siRNA target sequence for MOR149-1 (NM_146605.1,45-63).
gggaataacagatgatata

SEQ ID NO: 626258 - DNA, 19 bp, Mus musculus
  siRNA target sequence for MOR149-1 (NM_146605.1,180-198).
catatttctctctaatcta

SEQ ID NO: 626259 - DNA, 19 bp, Mus musculus
  siRNA target sequence for MOR149-1 (NM_146605.1,213-231).
ctgcttaagcacaaccata

SEQ ID NO: 626260 - DNA, 19 bp, Mus musculus
  siRNA target sequence for MOR149-1 (NM_146605.1,215-233).
gcttaagcacaaccataat

SEQ ID NO: 626261 - DNA, 19 bp, Mus musculus
  siRNA target sequence for MOR149-1 (NM_146605.1,216-234).
cttaagcacaaccataatt

SEQ ID NO: 626262 - DNA, 19 bp, Mus musculus
  siRNA target sequence for MOR149-1 (NM_146605.1,424-442).
ggtctgctaattctattat

SEQ ID NO: 626263 - DNA, 19 bp, Mus musculus
  siRNA target sequence for MOR149-1 (NM_146605.1,429-447).
gctaattctattatctcta

SEQ ID NO: 626264 - DNA, 19 bp, Mus musculus
  siRNA target sequence for MOR149-1 (NM_146605.1,450-468).
cataagtcttgtgaatagt

SEQ ID NO: 626265 - DNA, 19 bp, Mus musculus
  siRNA target sequence for MOR149-1 (NM_146605.1,571-589).
gacaccctagtaaattata

SEQ ID NO: 626266 - DNA, 19 bp, Mus musculus
  siRNA target sequence for MOR149-1 (NM_146605.1,573-591).
caccctagtaaattatatt

SEQ ID NO: 626267 - DNA, 19 bp, Mus musculus
  siRNA target sequence for MOR149-1 (NM_146605.1,601-619).
cttgcaacaatcatactta

SEQ ID NO: 626268 - DNA, 19 bp, Mus musculus
  siRNA target sequence for MOR149-1 (NM_146605.1,761-779).
cagcattgggtgtttatat

SEQ ID NO: 626269 - DNA, 19 bp, Mus musculus
  siRNA target sequence for MOR149-1 (NM_146605.1,821-839).
cttatgtgatgtgtacatt

SEQ ID NO: 626270 - DNA, 19 bp, Mus musculus
  siRNA target sequence for MOR149-1 (NM_146605.1,833-851).
gtacattggtcccacaaat

SEQ ID NO: 626271 - DNA, 19 bp, Mus musculus
  siRNA target sequence for MOR149-1 (NM_146605.1,836-854).
cattggtcccacaaatgtt

SEQ ID NO: 626272 - DNA, 19 bp, Mus musculus
  siRNA target sequence for MOR149-1 (NM_146605.1,840-858).
ggtcccacaaatgttgaat

SEQ ID NO: 626273 - DNA, 19 bp, Mus musculus
  siRNA target sequence for MOR149-1 (NM_146605.1,912-930).
catcaatagggcaatgtgt

SEQ ID NO: 626274 - DNA, 19 bp, Mus musculus
  siRNA target sequence for MOR149-1 (NM_146605.1,915-933).
caatagggcaatgtgttta

SEQ ID NO: 626275 - DNA, 19 bp, Mus musculus
  siRNA target sequence for MOR149-2 (NM_146525.1,20-38).
caggcacatcctactttat

SEQ ID NO: 626276 - DNA, 19 bp, Mus musculus
  siRNA target sequence for MOR149-2 (NM_146525.1,42-60).
gatgagactaaactatgat

SEQ ID NO: 626277 - DNA, 19 bp, Mus musculus
  siRNA target sequence for MOR149-2 (NM_146525.1,101-119).
catatctggttacaattgt

SEQ ID NO: 626278 - DNA, 19 bp, Mus musculus
  siRNA target sequence for MOR149-2 (NM_146525.1,315-333).
gagtttcgctgtattagaa

SEQ ID NO: 626279 - DNA, 19 bp, Mus musculus
  siRNA target sequence for MOR149-2 (NM_146525.1,455-473).
gcactgcgaacagcttatt

SEQ ID NO: 626280 - DNA, 19 bp, Mus musculus
  siRNA target sequence for MOR149-2 (NM_146525.1,456-474).
cactgcgaacagcttatta

SEQ ID NO: 626281 - DNA, 19 bp, Mus musculus
  siRNA target sequence for MOR149-2 (NM_146525.1,490-508).
ctgcggttgtcattttgca

SEQ ID NO: 626282 - DNA, 19 bp, Mus musculus
  siRNA target sequence for MOR149-2 (NM_146525.1,689-707).
ccctgagaggaagatacaa

SEQ ID NO: 626283 - DNA, 19 bp, Mus musculus
  siRNA target sequence for MOR149-2 (NM_146525.1,719-737).
cgtgtgggtcacattttgt

SEQ ID NO: 626284 - DNA, 19 bp, Mus musculus
  siRNA target sequence for MOR149-2 (NM_146525.1,720-738).
gtgtgggtcacattttgta

SEQ ID NO: 626285 - DNA, 19 bp, Mus musculus
  siRNA target sequence for MOR149-2 (NM_146525.1,736-754).
gtagttgtatccttattct

SEQ ID NO: 626286 - DNA, 19 bp, Mus musculus
  siRNA target sequence for MOR149-2 (NM_146525.1,758-776).
gtgcagcagtgggagtata

SEQ ID NO: 626287 - DNA, 19 bp, Mus musculus
  siRNA target sequence for MOR149-2 (NM_146525.1,760-778).
gcagcagtgggagtataca

SEQ ID NO: 626288 - DNA, 19 bp, Mus musculus
  siRNA target sequence for MOR149-2 (NM_146525.1,763-781).
gcagtgggagtatacatct

SEQ ID NO: 626289 - DNA, 19 bp, Mus musculus
  siRNA target sequence for MOR149-2 (NM_146525.1,780-798).
ctgttctgcaattactgtt

SEQ ID NO: 626290 - DNA, 19 bp, Mus musculus
  siRNA target sequence for MOR160-2 (NM_146457.1,69-87).
cccggctctactttttgct

SEQ ID NO: 626291 - DNA, 19 bp, Mus musculus
  siRNA target sequence for MOR160-2 (NM_146457.1,252-270).
cctcctatcggcgaagaaa

SEQ ID NO: 626292 - DNA, 19 bp, Mus musculus
  siRNA target sequence for MOR160-2 (NM_146457.1,253-271).
ctcctatcggcgaagaaaa

SEQ ID NO: 626293 - DNA, 19 bp, Mus musculus
  siRNA target sequence for MOR160-2 (NM_146457.1,256-274).
ctatcggcgaagaaaacca

SEQ ID NO: 626294 - DNA, 19 bp, Mus musculus
  siRNA target sequence for MOR160-2 (NM_146457.1,262-280).
gcgaagaaaaccatctcaa

SEQ ID NO: 626295 - DNA, 19 bp, Mus musculus
  siRNA target sequence for MOR160-2 (NM_146457.1,263-281).
cgaagaaaaccatctcaat

SEQ ID NO: 626296 - DNA, 19 bp, Mus musculus
  siRNA target sequence for MOR160-2 (NM_146457.1,264-282).
gaagaaaaccatctcaata

SEQ ID NO: 626297 - DNA, 19 bp, Mus musculus
  siRNA target sequence for MOR160-2 (NM_146457.1,396-414).
cggccaggtgatgagaaat

SEQ ID NO: 626298 - DNA, 19 bp, Mus musculus
  siRNA target sequence for MOR160-2 (NM_146457.1,400-418).
caggtgatgagaaatgagt

SEQ ID NO: 626299 - DNA, 19 bp, Mus musculus
  siRNA target sequence for MOR160-2 (NM_146457.1,626-644).
gaacctttatccctatctt

SEQ ID NO: 626300 - DNA, 19 bp, Mus musculus
  siRNA target sequence for MOR160-2 (NM_146457.1,905-923).
ccctgagaaagtatttgct

SEQ ID NO: 626301 - DNA, 19 bp, Mus musculus
  siRNA target sequence for MOR160-5 (NM_146280.1,324-342).
gggaaccgaagcctttctt

SEQ ID NO: 626302 - DNA, 19 bp, Mus musculus
  siRNA target sequence for MOR160-5 (NM_146280.1,334-352).
gcctttcttctgtcaatga

SEQ ID NO: 626303 - DNA, 19 bp, Mus musculus
  siRNA target sequence for MOR160-5 (NM_146280.1,458-476).
ctctcagttcagtagtcat

SEQ ID NO: 626304 - DNA, 19 bp, Mus musculus
  siRNA target sequence for MOR160-5 (NM_146280.1,525-543).
ccactacacgtgtgagtta

SEQ ID NO: 626305 - DNA, 19 bp, Mus musculus
  siRNA target sequence for MOR160-5 (NM_146280.1,578-596).
ccatcaacgtggacatctt

SEQ ID NO: 626306 - DNA, 19 bp, Mus musculus
  siRNA target sequence for MOR160-5 (NM_146280.1,698-716).
ggagaagcaaggcgtttaa

SEQ ID NO: 626307 - DNA, 19 bp, Mus musculus
  siRNA target sequence for MOR160-5 (NM_146280.1,757-775).
gggtccggcttgattcgtt

SEQ ID NO: 626308 - DNA, 19 bp, Mus musculus
  siRNA target sequence for MOR160-5 (NM_146280.1,758-776).
ggtccggcttgattcgtta

SEQ ID NO: 626309 - DNA, 19 bp, Mus musculus
  siRNA target sequence for MOR160-5 (NM_146280.1,759-777).
gtccggcttgattcgttat

SEQ ID NO: 626310 - DNA, 19 bp, Mus musculus
  siRNA target sequence for MOR160-5 (NM_146280.1,761-779).
ccggcttgattcgttatct

SEQ ID NO: 626311 - DNA, 19 bp, Mus musculus
  siRNA target sequence for MOR160-5 (NM_146280.1,762-780).
cggcttgattcgttatctt

SEQ ID NO: 626312 - DNA, 19 bp, Mus musculus
  siRNA target sequence for MOR160-5 (NM_146280.1,764-782).
gcttgattcgttatcttat

SEQ ID NO: 626313 - DNA, 19 bp, Mus musculus
  siRNA target sequence for MOR160-5 (NM_146280.1,911-929).
ggaagtgcctgcgatactt

SEQ ID NO: 626314 - DNA, 19 bp, Mus musculus
  siRNA target sequence for MOR161-2 (NM_146882.1,585-603).
gctcgtaatctttattgtt

SEQ ID NO: 626315 - DNA, 19 bp, Mus musculus
  siRNA target sequence for MOR161-3 (NM_146781.1,40-58).
ctggttggcttaacagaat

SEQ ID NO: 626316 - DNA, 19 bp, Mus musculus
  siRNA target sequence for MOR161-3 (NM_146781.1,43-61).
gttggcttaacagaatata

SEQ ID NO: 626317 - DNA, 19 bp, Mus musculus
  siRNA target sequence for MOR161-3 (NM_146781.1,138-156).
cactctgattggaatgaat

SEQ ID NO: 626318 - DNA, 19 bp, Mus musculus
  siRNA target sequence for MOR161-3 (NM_146781.1,180-198).
ctacttcctctttaattta

SEQ ID NO: 626319 - DNA, 19 bp, Mus musculus
  siRNA target sequence for MOR161-3 (NM_146781.1,226-244).
gttattactccaaaactgt

SEQ ID NO: 626320 - DNA, 19 bp, Mus musculus
  siRNA target sequence for MOR161-3 (NM_146781.1,233-251).
ctccaaaactgttagtaaa

SEQ ID NO: 626321 - DNA, 19 bp, Mus musculus
  siRNA target sequence for MOR161-3 (NM_146781.1,241-259).
ctgttagtaaactttgttt

SEQ ID NO: 626322 - DNA, 19 bp, Mus musculus
  siRNA target sequence for MOR161-3 (NM_146781.1,427-445).
ctgttgactctcattgtat

SEQ ID NO: 626323 - DNA, 19 bp, Mus musculus
  siRNA target sequence for MOR161-3 (NM_146781.1,633-651).
catcaccatcgttgtttct

SEQ ID NO: 626324 - DNA, 19 bp, Mus musculus
  siRNA target sequence for MOR161-3 (NM_146781.1,639-657).
catcgttgtttcttacaca

SEQ ID NO: 626325 - DNA, 19 bp, Mus musculus
  siRNA target sequence for MOR161-3 (NM_146781.1,722-740).
gtagctcacatattattgt

SEQ ID NO: 626326 - DNA, 19 bp, Mus musculus
  siRNA target sequence for MOR161-4 (NM_146749.1,240-258).
gcttacaagttttatctca

SEQ ID NO: 626327 - DNA, 19 bp, Mus musculus
  siRNA target sequence for MOR161-4 (NM_146749.1,566-584).
gcaacaccttcacaaatga

SEQ ID NO: 626328 - DNA, 19 bp, Mus musculus
  siRNA target sequence for MOR161-4 (NM_146749.1,597-615).
cattgttgtggcatttggt

SEQ ID NO: 626329 - DNA, 19 bp, Mus musculus
  siRNA target sequence for MOR161-5 (NM_146417.1,429-447).
ccttttgtcaggtgtctat

SEQ ID NO: 626330 - DNA, 19 bp, Mus musculus
  siRNA target sequence for MOR161-5 (NM_146417.1,444-462).
ctatgggatgggagttttt

SEQ ID NO: 626331 - DNA, 19 bp, Mus musculus
  siRNA target sequence for MOR161-5 (NM_146417.1,471-489).
ggcccatatgggaaaccta

SEQ ID NO: 626332 - DNA, 19 bp, Mus musculus
  siRNA target sequence for MOR161-5 (NM_146417.1,480-498).
gggaaacctacagtttata

SEQ ID NO: 626333 - DNA, 19 bp, Mus musculus
  siRNA target sequence for MOR161-5 (NM_146417.1,528-546).
ctatatgtgtgacataatt

SEQ ID NO: 626334 - DNA, 19 bp, Mus musculus
  siRNA target sequence for MOR161-5 (NM_146417.1,563-581).
cctgcaatagctcatacat

SEQ ID NO: 626335 - DNA, 19 bp, Mus musculus
  siRNA target sequence for MOR161-5 (NM_146417.1,722-740).
gtacgtcccatattattgt

SEQ ID NO: 626336 - DNA, 19 bp, Mus musculus
  siRNA target sequence for MOR161-5 (NM_146417.1,725-743).
cgtcccatattattgtagt

SEQ ID NO: 626337 - DNA, 19 bp, Mus musculus
  siRNA target sequence for MOR161-5 (NM_146417.1,777-795).
cctcaaaccaccttctagt

SEQ ID NO: 626338 - DNA, 19 bp, Mus musculus
  siRNA target sequence for MOR161-5 (NM_146417.1,778-796).
ctcaaaccaccttctagtt

SEQ ID NO: 626339 - DNA, 19 bp, Mus musculus
  siRNA target sequence for MOR161-5 (NM_146417.1,844-862).
gtgcccatgttcaatccat

SEQ ID NO: 626340 - DNA, 19 bp, Mus musculus
  siRNA target sequence for MOR162-1 (NM_146827.1,618-636).
gggtgtcagtataatagtt

SEQ ID NO: 626341 - DNA, 19 bp, Mus musculus
  siRNA target sequence for MOR162-1 (NM_146827.1,759-777).
gttttttggatcatcatca

SEQ ID NO: 626342 - DNA, 19 bp, Mus musculus
  siRNA target sequence for MOR162-1 (NM_146827.1,811-829).
gtggataaagataagatat

SEQ ID NO: 626343 - DNA, 19 bp, Mus musculus
  siRNA target sequence for MOR162-4 (NM_146424.1,491-509).
ctggtagcatgctaagtct

SEQ ID NO: 626344 - DNA, 19 bp, Mus musculus
  siRNA target sequence for MOR162-4 (NM_146424.1,621-639).
gggtgtcaatgtaataata

SEQ ID NO: 626345 - DNA, 19 bp, Mus musculus
  siRNA target sequence for MOR162-5 (NM_146423.1,463-481).
gctgtggcacacatcattt

SEQ ID NO: 626346 - DNA, 19 bp, Mus musculus
  siRNA target sequence for MOR162-5 (NM_146423.1,660-678).
cctttccaatattcttagt

SEQ ID NO: 626347 - DNA, 19 bp, Mus musculus
  siRNA target sequence for MOR165-1 (NM_146873.1,573-591).
cacttatgccaatgaaata

SEQ ID NO: 626348 - DNA, 19 bp, Mus musculus
  siRNA target sequence for MOR165-1 (NM_146873.1,575-593).
cttatgccaatgaaataga

SEQ ID NO: 626349 - DNA, 19 bp, Mus musculus
  siRNA target sequence for MOR165-1 (NM_146873.1,660-678).
cattctctcaaatatcctt

SEQ ID NO: 626350 - DNA, 19 bp, Mus musculus
  siRNA target sequence for MOR165-1 (NM_146873.1,720-738).
ctgtagctcccatatactt

SEQ ID NO: 626351 - DNA, 19 bp, Mus musculus
  siRNA target sequence for MOR165-3 (NM_146811.1,657-675).
cttcatcctctctaatatt

SEQ ID NO: 626352 - DNA, 19 bp, Mus musculus
  siRNA target sequence for MOR165-6 (NM_146787.1,219-237).
ctcttctgtaattatacca

SEQ ID NO: 626353 - DNA, 19 bp, Mus musculus
  siRNA target sequence for MOR165-6 (NM_146787.1,279-297).
ctatgtgggttgtatgact

SEQ ID NO: 626354 - DNA, 19 bp, Mus musculus
  siRNA target sequence for MOR165-6 (NM_146787.1,320-338).
gtgtcattttggagtgtta

SEQ ID NO: 626355 - DNA, 19 bp, Mus musculus
  siRNA target sequence for MOR165-6 (NM_146787.1,335-353).
gttatattctcacatcaat

SEQ ID NO: 626356 - DNA, 19 bp, Mus musculus
  siRNA target sequence for MOR165-6 (NM_146787.1,663-681).
cctttccagcatatttcaa

SEQ ID NO: 626357 - DNA, 19 bp, Mus musculus
  siRNA target sequence for MOR165-6 (NM_146787.1,664-682).
ctttccagcatatttcaaa

SEQ ID NO: 626358 - DNA, 19 bp, Mus musculus
  siRNA target sequence for MOR165-6 (NM_146787.1,668-686).
ccagcatatttcaaatgaa

SEQ ID NO: 626359 - DNA, 19 bp, Mus musculus
  siRNA target sequence for MOR165-6 (NM_146787.1,785-803).
ccaactcaactggaacaat

SEQ ID NO: 626360 - DNA, 19 bp, Mus musculus
  siRNA target sequence for MOR165-6 (NM_146787.1,812-830).
gaaagataccttcaataat

SEQ ID NO: 626361 - DNA, 19 bp, Mus musculus
  siRNA target sequence for MOR165-8 (NM_146782.1,115-133).
gtattcggtaatttgactt

SEQ ID NO: 626362 - DNA, 19 bp, Mus musculus
  siRNA target sequence for MOR165-8 (NM_146782.1,120-138).
cggtaatttgactttgata

SEQ ID NO: 626363 - DNA, 19 bp, Mus musculus
  siRNA target sequence for MOR165-8 (NM_146782.1,121-139).
ggtaatttgactttgatat

SEQ ID NO: 626364 - DNA, 19 bp, Mus musculus
  siRNA target sequence for MOR165-8 (NM_146782.1,321-339).
cataatttctgaatgttat

SEQ ID NO: 626365 - DNA, 19 bp, Mus musculus
  siRNA target sequence for MOR165-8 (NM_146782.1,413-431).
caagggtgtgttcttatct

SEQ ID NO: 626366 - DNA, 19 bp, Mus musculus
  siRNA target sequence for MOR165-8 (NM_146782.1,416-434).
gggtgtgttcttatctcat

SEQ ID NO: 626367 - DNA, 19 bp, Mus musculus
  siRNA target sequence for MOR165-8 (NM_146782.1,791-809).
ctgctgtatctattgatca

SEQ ID NO: 626368 - DNA, 19 bp, Mus musculus
  siRNA target sequence for MOR167-3 (NM_146801.1,135-153).
gataattcttattgtacta

SEQ ID NO: 626369 - DNA, 19 bp, Mus musculus
  siRNA target sequence for MOR167-3 (NM_146801.1,261-279).
gagcaagaatgcaatttct

SEQ ID NO: 626370 - DNA, 19 bp, Mus musculus
  siRNA target sequence for MOR167-3 (NM_146801.1,287-305).
gatgtttaacccagctata

SEQ ID NO: 626371 - DNA, 19 bp, Mus musculus
  siRNA target sequence for MOR167-3 (NM_146801.1,290-308).
gtttaacccagctatattt

SEQ ID NO: 626372 - DNA, 19 bp, Mus musculus
  siRNA target sequence for MOR167-3 (NM_146801.1,403-421).
gccatgtcccctaaattgt

SEQ ID NO: 626373 - DNA, 19 bp, Mus musculus
  siRNA target sequence for MOR167-3 (NM_146801.1,625-643).
gtgccaagcatcactatct

SEQ ID NO: 626374 - DNA, 19 bp, Mus musculus
  siRNA target sequence for MOR168-1 (NM_146784.1,70-88).
caaatacccttgttcttta

SEQ ID NO: 626375 - DNA, 19 bp, Mus musculus
  siRNA target sequence for MOR168-1 (NM_146784.1,243-261).
gttgatgaactttataaca

SEQ ID NO: 626376 - DNA, 19 bp, Mus musculus
  siRNA target sequence for MOR168-1 (NM_146784.1,286-304).
gaatgtatgagccaacttt

SEQ ID NO: 626377 - DNA, 19 bp, Mus musculus
  siRNA target sequence for MOR168-1 (NM_146784.1,294-312).
gagccaactttatttcttt

SEQ ID NO: 626378 - DNA, 19 bp, Mus musculus
  siRNA target sequence for MOR168-1 (NM_146784.1,553-571).
ctccaactttcctgtacaa

SEQ ID NO: 626379 - DNA, 19 bp, Mus musculus
  siRNA target sequence for MOR168-1 (NM_146784.1,585-603).
caagcttgtagtttttgtt

SEQ ID NO: 626380 - DNA, 19 bp, Mus musculus
  siRNA target sequence for MOR168-1 (NM_146784.1,601-619).
gttgcttctagcatcaata

SEQ ID NO: 626381 - DNA, 19 bp, Mus musculus
  siRNA target sequence for MOR168-1 (NM_146784.1,604-622).
gcttctagcatcaatatca

SEQ ID NO: 626382 - DNA, 19 bp, Mus musculus
  siRNA target sequence for MOR168-1 (NM_146784.1,605-623).
cttctagcatcaatatcat

SEQ ID NO: 626383 - DNA, 19 bp, Mus musculus
  siRNA target sequence for MOR168-1 (NM_146784.1,625-643).
gttcccatttcaactatat

SEQ ID NO: 626384 - DNA, 19 bp, Mus musculus
  siRNA target sequence for MOR168-1 (NM_146784.1,629-647).
ccatttcaactatatttat

SEQ ID NO: 626385 - DNA, 19 bp, Mus musculus
  siRNA target sequence for MOR168-1 (NM_146784.1,675-693).
ctttcacatccattcttct

SEQ ID NO: 626386 - DNA, 19 bp, Mus musculus
  siRNA target sequence for MOR168-1 (NM_146784.1,913-931).
ctgagcaagaggaacattt

SEQ ID NO: 626387 - DNA, 19 bp, Mus musculus
  siRNA target sequence for MOR170-1 (NM_146875.1,7-25).
ctcaatgcacaaaagacta

SEQ ID NO: 626388 - DNA, 19 bp, Mus musculus
  siRNA target sequence for MOR170-1 (NM_146875.1,398-416).
gtcagccactgctctacaa

SEQ ID NO: 626389 - DNA, 19 bp, Mus musculus
  siRNA target sequence for MOR170-1 (NM_146875.1,435-453).
catctgctttctattgata

SEQ ID NO: 626390 - DNA, 19 bp, Mus musculus
  siRNA target sequence for MOR170-1 (NM_146875.1,473-491).
ggcttgttagtgccttatt

SEQ ID NO: 626391 - DNA, 19 bp, Mus musculus
  siRNA target sequence for MOR170-1 (NM_146875.1,516-534).
caacttttgtgattctaat

SEQ ID NO: 626392 - DNA, 19 bp, Mus musculus
  siRNA target sequence for MOR170-1 (NM_146875.1,668-686).
cttatggtatgatccttta

SEQ ID NO: 626393 - DNA, 19 bp, Mus musculus
  siRNA target sequence for MOR170-1 (NM_146875.1,760-778).
gttagcttgttctatgtaa

SEQ ID NO: 626394 - DNA, 19 bp, Mus musculus
  siRNA target sequence for MOR170-8 (NM_146479.1,101-119).
ggtggcccttatttgttct

SEQ ID NO: 626395 - DNA, 19 bp, Mus musculus
  siRNA target sequence for MOR170-8 (NM_146479.1,555-573).
ccactacatgtgtgatact

SEQ ID NO: 626396 - DNA, 19 bp, Mus musculus
  siRNA target sequence for MOR170-8 (NM_146479.1,556-574).
cactacatgtgtgatactt

SEQ ID NO: 626397 - DNA, 19 bp, Mus musculus
  siRNA target sequence for MOR170-8 (NM_146479.1,639-657).
ggctgtcgttgttgttata

SEQ ID NO: 626398 - DNA, 19 bp, Mus musculus
  siRNA target sequence for MOR170-8 (NM_146479.1,643-661).
gtcgttgttgttatatcta

SEQ ID NO: 626399 - DNA, 19 bp, Mus musculus
  siRNA target sequence for MOR170-8 (NM_146479.1,840-858).
gaggaaatttttttcagta

SEQ ID NO: 626400 - DNA, 19 bp, Mus musculus
  siRNA target sequence for MOR170-8 (NM_146479.1,843-861).
gaaatttttttcagtagtt

SEQ ID NO: 626401 - DNA, 19 bp, Mus musculus
  siRNA target sequence for MOR170-8 (NM_146479.1,928-946).
gctttgaagagaacactaa

SEQ ID NO: 626402 - DNA, 19 bp, Mus musculus
  siRNA target sequence for MOR170-8 (NM_146479.1,960-978).
ccaagggaagtgcttatgt

SEQ ID NO: 626403 - DNA, 19 bp, Mus musculus
  siRNA target sequence for MOR171-1 (NM_147107.1,20-38).
ctgaagcatccttatttgt

SEQ ID NO: 626404 - DNA, 19 bp, Mus musculus
  siRNA target sequence for MOR171-1 (NM_147107.1,86-104).
ccctgtttctgttgatcta

SEQ ID NO: 626405 - DNA, 19 bp, Mus musculus
  siRNA target sequence for MOR171-1 (NM_147107.1,87-105).
cctgtttctgttgatctat

SEQ ID NO: 626406 - DNA, 19 bp, Mus musculus
  siRNA target sequence for MOR171-1 (NM_147107.1,88-106).
ctgtttctgttgatctatt

SEQ ID NO: 626407 - DNA, 19 bp, Mus musculus
  siRNA target sequence for MOR171-1 (NM_147107.1,121-139).
ggaaacctgggcttagtct

SEQ ID NO: 626408 - DNA, 19 bp, Mus musculus
  siRNA target sequence for MOR171-1 (NM_147107.1,215-233).
gctactcctccgttataat

SEQ ID NO: 626409 - DNA, 19 bp, Mus musculus
  siRNA target sequence for MOR171-1 (NM_147107.1,226-244).
gttataatccccaagatgt

SEQ ID NO: 626410 - DNA, 19 bp, Mus musculus
  siRNA target sequence for MOR171-1 (NM_147107.1,456-474).
ggccttcggggctacagtt

SEQ ID NO: 626411 - DNA, 19 bp, Mus musculus
  siRNA target sequence for MOR171-1 (NM_147107.1,459-477).
cttcggggctacagttcat

SEQ ID NO: 626412 - DNA, 19 bp, Mus musculus
  siRNA target sequence for MOR171-1 (NM_147107.1,462-480).
cggggctacagttcataca

SEQ ID NO: 626413 - DNA, 19 bp, Mus musculus
  siRNA target sequence for MOR171-1 (NM_147107.1,472-490).
gttcatacaagctacatat

SEQ ID NO: 626414 - DNA, 19 bp, Mus musculus
  siRNA target sequence for MOR171-1 (NM_147107.1,538-556).
gacatcctccctcttataa

SEQ ID NO: 626415 - DNA, 19 bp, Mus musculus
  siRNA target sequence for MOR171-1 (NM_147107.1,540-558).
catcctccctcttataaat

SEQ ID NO: 626416 - DNA, 19 bp, Mus musculus
  siRNA target sequence for MOR171-1 (NM_147107.1,546-564).
ccctcttataaatatagct

SEQ ID NO: 626417 - DNA, 19 bp, Mus musculus
  siRNA target sequence for MOR171-1 (NM_147107.1,547-565).
cctcttataaatatagctt

SEQ ID NO: 626418 - DNA, 19 bp, Mus musculus
  siRNA target sequence for MOR171-1 (NM_147107.1,562-580).
gcttgctctagagactata

SEQ ID NO: 626419 - DNA, 19 bp, Mus musculus
  siRNA target sequence for MOR171-1 (NM_147107.1,566-584).
gctctagagactataccaa

SEQ ID NO: 626420 - DNA, 19 bp, Mus musculus
  siRNA target sequence for MOR171-1 (NM_147107.1,574-592).
gactataccaaggagtttt

SEQ ID NO: 626421 - DNA, 19 bp, Mus musculus
  siRNA target sequence for MOR171-1 (NM_147107.1,600-618).
gatacttgttggatttaat

SEQ ID NO: 626422 - DNA, 19 bp, Mus musculus
  siRNA target sequence for MOR171-1 (NM_147107.1,737-755).
cagctgttggagtcttcta

SEQ ID NO: 626423 - DNA, 19 bp, Mus musculus
  siRNA target sequence for MOR171-1 (NM_147107.1,783-801).
gccatctacaggtaacaca

SEQ ID NO: 626424 - DNA, 19 bp, Mus musculus
  siRNA target sequence for MOR171-1 (NM_147107.1,784-802).
ccatctacaggtaacacaa

SEQ ID NO: 626425 - DNA, 19 bp, Mus musculus
  siRNA target sequence for MOR171-12 (NM_146745.1,261-279).
ggtgaagagtgtcatttct

SEQ ID NO: 626426 - DNA, 19 bp, Mus musculus
  siRNA target sequence for MOR171-12 (NM_146745.1,264-282).
gaagagtgtcatttcttat

SEQ ID NO: 626427 - DNA, 19 bp, Mus musculus
  siRNA target sequence for MOR171-12 (NM_146745.1,559-577).
caatcctgttccaatacat

SEQ ID NO: 626428 - DNA, 19 bp, Mus musculus
  siRNA target sequence for MOR171-16 (NM_146611.1,130-148).
ggtatgattatcctgatat

SEQ ID NO: 626429 - DNA, 19 bp, Mus musculus
  siRNA target sequence for MOR171-16 (NM_146611.1,504-522).
ctgtaaggcaaatgtgata

SEQ ID NO: 626430 - DNA, 19 bp, Mus musculus
  siRNA target sequence for MOR171-16 (NM_146611.1,638-656).
ctattttaacctcttacat

SEQ ID NO: 626431 - DNA, 19 bp, Mus musculus
  siRNA target sequence for MOR171-17 (NM_146610.1,21-39).
cggagtaactgagttcaat

SEQ ID NO: 626432 - DNA, 19 bp, Mus musculus
  siRNA target sequence for MOR171-17 (NM_146610.1,298-316).
cagctatgcttttttgcta

SEQ ID NO: 626433 - DNA, 19 bp, Mus musculus
  siRNA target sequence for MOR171-17 (NM_146610.1,506-524).
gtaacgccaatgtaataaa

SEQ ID NO: 626434 - DNA, 19 bp, Mus musculus
  siRNA target sequence for MOR171-17 (NM_146610.1,510-528).
cgccaatgtaataaatcat

SEQ ID NO: 626435 - DNA, 19 bp, Mus musculus
  siRNA target sequence for MOR171-24 (NM_146439.1,20-38).
gcatgttacctgagttcat

SEQ ID NO: 626436 - DNA, 19 bp, Mus musculus
  siRNA target sequence for MOR171-24 (NM_146439.1,21-39).
catgttacctgagttcatt

SEQ ID NO: 626437 - DNA, 19 bp, Mus musculus
  siRNA target sequence for MOR171-24 (NM_146439.1,131-149).
gcatgattacactgattaa

SEQ ID NO: 626438 - DNA, 19 bp, Mus musculus
  siRNA target sequence for MOR171-24 (NM_146439.1,429-447).
cctgatctttggagtctat

SEQ ID NO: 626439 - DNA, 19 bp, Mus musculus
  siRNA target sequence for MOR171-24 (NM_146439.1,430-448).
ctgatctttggagtctata

SEQ ID NO: 626440 - DNA, 19 bp, Mus musculus
  siRNA target sequence for MOR171-24 (NM_146439.1,482-500).
gcttcatgatcagaataca

SEQ ID NO: 626441 - DNA, 19 bp, Mus musculus
  siRNA target sequence for MOR171-24 (NM_146439.1,506-524).
gtaacttagaggtgatcaa

SEQ ID NO: 626442 - DNA, 19 bp, Mus musculus
  siRNA target sequence for MOR171-24 (NM_146439.1,556-574).
gagcttgctcactctagta

SEQ ID NO: 626443 - DNA, 19 bp, Mus musculus
  siRNA target sequence for MOR171-24 (NM_146439.1,563-581).
ctcactctagtacttatgt

SEQ ID NO: 626444 - DNA, 19 bp, Mus musculus
  siRNA target sequence for MOR171-24 (NM_146439.1,565-583).
cactctagtacttatgtta

SEQ ID NO: 626445 - DNA, 19 bp, Mus musculus
  siRNA target sequence for MOR171-24 (NM_146439.1,602-620).
gttttggtacatttaacat

SEQ ID NO: 626446 - DNA, 19 bp, Mus musculus
  siRNA target sequence for MOR171-24 (NM_146439.1,608-626).
gtacatttaacattgttgt

SEQ ID NO: 626447 - DNA, 19 bp, Mus musculus
  siRNA target sequence for MOR171-25 (NM_146438.1,93-111).
cctagctgtatatttggtt

SEQ ID NO: 626448 - DNA, 19 bp, Mus musculus
  siRNA target sequence for MOR171-25 (NM_146438.1,262-280).
gagatgaatatcatctcat

SEQ ID NO: 626449 - DNA, 19 bp, Mus musculus
  siRNA target sequence for MOR171-25 (NM_146438.1,486-504).
cctactaagagtgcttttt

SEQ ID NO: 626450 - DNA, 19 bp, Mus musculus
  siRNA target sequence for MOR171-25 (NM_146438.1,564-582).
gtgctctagtacttatatt

SEQ ID NO: 626451 - DNA, 19 bp, Mus musculus
  siRNA target sequence for MOR171-44 (NM_146326.1,490-508).
ggcttcatgagtaggatta

SEQ ID NO: 626452 - DNA, 19 bp, Mus musculus
  siRNA target sequence for MOR171-44 (NM_146326.1,491-509).
gcttcatgagtaggattaa

SEQ ID NO: 626453 - DNA, 19 bp, Mus musculus
  siRNA target sequence for MOR171-44 (NM_146326.1,636-654).
cccattgctaacggttatt

SEQ ID NO: 626454 - DNA, 19 bp, Mus musculus
  siRNA target sequence for MOR171-44 (NM_146326.1,637-655).
ccattgctaacggttatta

SEQ ID NO: 626455 - DNA, 19 bp, Mus musculus
  siRNA target sequence for MOR171-7 (NM_146826.1,504-522).
ctgtaagactgatgtaata

SEQ ID NO: 626456 - DNA, 19 bp, Mus musculus
  siRNA target sequence for MOR171-7 (NM_146826.1,784-802).
ccatcttcggtcaactcta

SEQ ID NO: 626457 - DNA, 19 bp, Mus musculus
  siRNA target sequence for MOR171-7 (NM_146826.1,785-803).
catcttcggtcaactctat

SEQ ID NO: 626458 - DNA, 19 bp, Mus musculus
  siRNA target sequence for MOR172-2 (NM_146844.1,20-38).
caggggtcaaggaattcat

SEQ ID NO: 626459 - DNA, 19 bp, Mus musculus
  siRNA target sequence for MOR172-2 (NM_146844.1,901-919).
gccaagaagttcattggta

SEQ ID NO: 626460 - DNA, 19 bp, Mus musculus
  siRNA target sequence for MOR172-4 (NM_146769.1,40-58).
ctggtaggcctgactgaaa

SEQ ID NO: 626461 - DNA, 19 bp, Mus musculus
  siRNA target sequence for MOR172-4 (NM_146769.1,42-60).
ggtaggcctgactgaaaat

SEQ ID NO: 626462 - DNA, 19 bp, Mus musculus
  siRNA target sequence for MOR172-4 (NM_146769.1,757-775).
gggtctttgacttttaatt

SEQ ID NO: 626463 - DNA, 19 bp, Mus musculus
  siRNA target sequence for MOR172-4 (NM_146769.1,897-915).
ggcagcaaaaaggttgatt

SEQ ID NO: 626464 - DNA, 19 bp, Mus musculus
  siRNA target sequence for MOR174-1 (NM_146849.1,236-254).
ctaaaatgctagctaacat

SEQ ID NO: 626465 - DNA, 19 bp, Mus musculus
  siRNA target sequence for MOR174-1 (NM_146849.1,287-305).
catgtatggtccaattcta

SEQ ID NO: 626466 - DNA, 19 bp, Mus musculus
  siRNA target sequence for MOR174-1 (NM_146849.1,443-461).
gctacctgtgtgcatcaat

SEQ ID NO: 626467 - DNA, 19 bp, Mus musculus
  siRNA target sequence for MOR174-1 (NM_146849.1,448-466).
ctgtgtgcatcaatgtgtt

SEQ ID NO: 626468 - DNA, 19 bp, Mus musculus
  siRNA target sequence for MOR174-1 (NM_146849.1,569-587).
ctgatgtcactgttaataa

SEQ ID NO: 626469 - DNA, 19 bp, Mus musculus
  siRNA target sequence for MOR174-1 (NM_146849.1,612-630).
cttcaatgagagctttagt

SEQ ID NO: 626470 - DNA, 19 bp, Mus musculus
  siRNA target sequence for MOR174-1 (NM_146849.1,615-633).
caatgagagctttagtatt

SEQ ID NO: 626471 - DNA, 19 bp, Mus musculus
  siRNA target sequence for MOR174-1 (NM_146849.1,759-777).
gacgatcctttccatttat

SEQ ID NO: 626472 - DNA, 19 bp, Mus musculus
  siRNA target sequence for MOR174-1 (NM_146849.1,910-928).
gttgtgaactctaagatat

SEQ ID NO: 626473 - DNA, 19 bp, Mus musculus
  siRNA target sequence for MOR174-13 (NM_146531.1,14-32).
gttctgtaaccacatttat

SEQ ID NO: 626474 - DNA, 19 bp, Mus musculus
  siRNA target sequence for MOR174-13 (NM_146531.1,255-273).
ggaacatagaactatttct

SEQ ID NO: 626475 - DNA, 19 bp, Mus musculus
  siRNA target sequence for MOR174-13 (NM_146531.1,397-415).
gctatgtctcatcaattgt

SEQ ID NO: 626476 - DNA, 19 bp, Mus musculus
  siRNA target sequence for MOR174-13 (NM_146531.1,423-441).
cctagtagctggaagttat

SEQ ID NO: 626477 - DNA, 19 bp, Mus musculus
  siRNA target sequence for MOR174-13 (NM_146531.1,456-474).
gtgtgctgtgataatcaca

SEQ ID NO: 626478 - DNA, 19 bp, Mus musculus
  siRNA target sequence for MOR174-13 (NM_146531.1,458-476).
gtgctgtgataatcacata

SEQ ID NO: 626479 - DNA, 19 bp, Mus musculus
  siRNA target sequence for MOR174-13 (NM_146531.1,481-499).
cttgtagagctctcttatt

SEQ ID NO: 626480 - DNA, 19 bp, Mus musculus
  siRNA target sequence for MOR174-13 (NM_146531.1,500-518).
gtgaacctggcatcattga

SEQ ID NO: 626481 - DNA, 19 bp, Mus musculus
  siRNA target sequence for MOR174-13 (NM_146531.1,532-550).
gaatattcagccattgtct

SEQ ID NO: 626482 - DNA, 19 bp, Mus musculus
  siRNA target sequence for MOR174-13 (NM_146531.1,576-594).
cagccagatggtatgctta

SEQ ID NO: 626483 - DNA, 19 bp, Mus musculus
  siRNA target sequence for MOR174-13 (NM_146531.1,582-600).
gatggtatgcttagtcatt

SEQ ID NO: 626484 - DNA, 19 bp, Mus musculus
  siRNA target sequence for MOR174-13 (NM_146531.1,586-604).
gtatgcttagtcatttcca

SEQ ID NO: 626485 - DNA, 19 bp, Mus musculus
  siRNA target sequence for MOR174-13 (NM_146531.1,616-634).
ggtagtagccttcttatca

SEQ ID NO: 626486 - DNA, 19 bp, Mus musculus
  siRNA target sequence for MOR174-13 (NM_146531.1,794-812).
caaagctgctggtcaaagt

SEQ ID NO: 626487 - DNA, 19 bp, Mus musculus
  siRNA target sequence for MOR174-13 (NM_146531.1,902-920).
ggctcatcagctcaaaatt

SEQ ID NO: 626488 - DNA, 19 bp, Mus musculus
  siRNA target sequence for MOR174-6 (NM_146650.1,267-285).
ggaagataggactgtatct

SEQ ID NO: 626489 - DNA, 19 bp, Mus musculus
  siRNA target sequence for MOR174-6 (NM_146650.1,602-620).
ccttagtcattgctatagt

SEQ ID NO: 626490 - DNA, 19 bp, Mus musculus
  siRNA target sequence for MOR174-6 (NM_146650.1,609-627).
cattgctatagttagtgaa

SEQ ID NO: 626491 - DNA, 19 bp, Mus musculus
  siRNA target sequence for MOR174-6 (NM_146650.1,613-631).
gctatagttagtgaatctt

SEQ ID NO: 626492 - DNA, 19 bp, Mus musculus
  siRNA target sequence for MOR174-8 (NM_146644.1,3-21).
ggtgccactggaaataaat

SEQ ID NO: 626493 - DNA, 19 bp, Mus musculus
  siRNA target sequence for MOR174-8 (NM_146644.1,22-40).
gtgagtgtggagattaact

SEQ ID NO: 626494 - DNA, 19 bp, Mus musculus
  siRNA target sequence for MOR174-8 (NM_146644.1,26-44).
gtgtggagattaactttgt

SEQ ID NO: 626495 - DNA, 19 bp, Mus musculus
  siRNA target sequence for MOR174-8 (NM_146644.1,57-75).
cacagactaccctaacctt

SEQ ID NO: 626496 - DNA, 19 bp, Mus musculus
  siRNA target sequence for MOR174-8 (NM_146644.1,91-109).
ctaatctttctctttatgt

SEQ ID NO: 626497 - DNA, 19 bp, Mus musculus
  siRNA target sequence for MOR174-8 (NM_146644.1,137-155).
gcatgacagtgctcatcaa

SEQ ID NO: 626498 - DNA, 19 bp, Mus musculus
  siRNA target sequence for MOR174-8 (NM_146644.1,138-156).
catgacagtgctcatcaat

SEQ ID NO: 626499 - DNA, 19 bp, Mus musculus
  siRNA target sequence for MOR174-8 (NM_146644.1,141-159).
gacagtgctcatcaatatt

SEQ ID NO: 626500 - DNA, 19 bp, Mus musculus
  siRNA target sequence for MOR174-8 (NM_146644.1,143-161).
cagtgctcatcaatattga

SEQ ID NO: 626501 - DNA, 19 bp, Mus musculus
  siRNA target sequence for MOR174-8 (NM_146644.1,239-257).
cacccaagctgcttgaaaa

SEQ ID NO: 626502 - DNA, 19 bp, Mus musculus
  siRNA target sequence for MOR174-8 (NM_146644.1,258-276).
cttggtcctggctgataaa

SEQ ID NO: 626503 - DNA, 19 bp, Mus musculus
  siRNA target sequence for MOR174-8 (NM_146644.1,267-285).
ggctgataaaactatactt

SEQ ID NO: 626504 - DNA, 19 bp, Mus musculus
  siRNA target sequence for MOR174-8 (NM_146644.1,293-311).
gctgcatgttgcagtactt

SEQ ID NO: 626505 - DNA, 19 bp, Mus musculus
  siRNA target sequence for MOR174-8 (NM_146644.1,330-348).
ggtgtctgagtcctactta

SEQ ID NO: 626506 - DNA, 19 bp, Mus musculus
  siRNA target sequence for MOR174-8 (NM_146644.1,333-351).
gtctgagtcctacttacta

SEQ ID NO: 626507 - DNA, 19 bp, Mus musculus
  siRNA target sequence for MOR174-8 (NM_146644.1,341-359).
cctacttactagcagttat

SEQ ID NO: 626508 - DNA, 19 bp, Mus musculus
  siRNA target sequence for MOR174-8 (NM_146644.1,435-453).
gcttgtgactgggtcatat

SEQ ID NO: 626509 - DNA, 19 bp, Mus musculus
  siRNA target sequence for MOR174-8 (NM_146644.1,458-476).
ggagtacctttgaaacatt

SEQ ID NO: 626510 - DNA, 19 bp, Mus musculus
  siRNA target sequence for MOR174-8 (NM_146644.1,556-574).
ctcattgttgtctctagtt

SEQ ID NO: 626511 - DNA, 19 bp, Mus musculus
  siRNA target sequence for MOR174-8 (NM_146644.1,558-576).
cattgttgtctctagttct

SEQ ID NO: 626512 - DNA, 19 bp, Mus musculus
  siRNA target sequence for MOR174-8 (NM_146644.1,569-587).
ctagttctgatatacacat

SEQ ID NO: 626513 - DNA, 19 bp, Mus musculus
  siRNA target sequence for MOR174-8 (NM_146644.1,593-611).
gcctgctactcttctgttt

SEQ ID NO: 626514 - DNA, 19 bp, Mus musculus
  siRNA target sequence for MOR174-8 (NM_146644.1,597-615).
gctactcttctgttttgca

SEQ ID NO: 626515 - DNA, 19 bp, Mus musculus
  siRNA target sequence for MOR174-8 (NM_146644.1,630-648).
gagtacactcctgatcatt

SEQ ID NO: 626516 - DNA, 19 bp, Mus musculus
  siRNA target sequence for MOR174-8 (NM_146644.1,642-660).
gatcattctcacttcttat

SEQ ID NO: 626517 - DNA, 19 bp, Mus musculus
  siRNA target sequence for MOR174-8 (NM_146644.1,673-691).
gtgacggtattaaaaatta

SEQ ID NO: 626518 - DNA, 19 bp, Mus musculus
  siRNA target sequence for MOR174-8 (NM_146644.1,787-805).
gtaccgaactccaaaaatt

SEQ ID NO: 626519 - DNA, 19 bp, Mus musculus
  siRNA target sequence for MOR174-8 (NM_146644.1,790-808).
ccgaactccaaaaattcta

SEQ ID NO: 626520 - DNA, 19 bp, Mus musculus
  siRNA target sequence for MOR174-8 (NM_146644.1,806-824).
ctaggaatgccgtcaaagt

SEQ ID NO: 626521 - DNA, 19 bp, Mus musculus
  siRNA target sequence for MOR174-8 (NM_146644.1,844-862).
gttgtcaaccccttgctta

SEQ ID NO: 626522 - DNA, 19 bp, Mus musculus
  siRNA target sequence for MOR174-8 (NM_146644.1,904-922).
gtttttcagaaattagtga

SEQ ID NO: 626523 - DNA, 19 bp, Mus musculus
  siRNA target sequence for MOR175-2 (NM_146573.1,465-483).
cactgtggtccatactact

SEQ ID NO: 626524 - DNA, 19 bp, Mus musculus
  siRNA target sequence for MOR176-1 (NM_147030.1,10-28).
gagaatttcaccatgttga

SEQ ID NO: 626525 - DNA, 19 bp, Mus musculus
  siRNA target sequence for MOR176-1 (NM_147030.1,460-478).
gtagattcagcaatccata

SEQ ID NO: 626526 - DNA, 19 bp, Mus musculus
  siRNA target sequence for MOR176-1 (NM_147030.1,463-481).
gattcagcaatccatacaa

SEQ ID NO: 626527 - DNA, 19 bp, Mus musculus
  siRNA target sequence for MOR176-1 (NM_147030.1,485-503).
gtacattccgattatcctt

SEQ ID NO: 626528 - DNA, 19 bp, Mus musculus
  siRNA target sequence for MOR176-1 (NM_147030.1,614-632).
gtgttgtagggattagcat

SEQ ID NO: 626529 - DNA, 19 bp, Mus musculus
  siRNA target sequence for MOR176-2 (NM_146351.1,4-22).
cagtttgaaaactttacca

SEQ ID NO: 626530 - DNA, 19 bp, Mus musculus
  siRNA target sequence for MOR177-14 (NM_146293.1,29-47).
gttcttcctttactgaatt

SEQ ID NO: 626531 - DNA, 19 bp, Mus musculus
  siRNA target sequence for MOR177-14 (NM_146293.1,35-53).
cctttactgaattcatact

SEQ ID NO: 626532 - DNA, 19 bp, Mus musculus
  siRNA target sequence for MOR177-14 (NM_146293.1,36-54).
ctttactgaattcatacta

SEQ ID NO: 626533 - DNA, 19 bp, Mus musculus
  siRNA target sequence for MOR177-14 (NM_146293.1,65-83).
ccaacaactctgaggtaaa

SEQ ID NO: 626534 - DNA, 19 bp, Mus musculus
  siRNA target sequence for MOR177-14 (NM_146293.1,106-124).
ctactggtctatctaatca

SEQ ID NO: 626535 - DNA, 19 bp, Mus musculus
  siRNA target sequence for MOR177-14 (NM_146293.1,112-130).
gtctatctaatcaatctca

SEQ ID NO: 626536 - DNA, 19 bp, Mus musculus
  siRNA target sequence for MOR177-14 (NM_146293.1,114-132).
ctatctaatcaatctcatt

SEQ ID NO: 626537 - DNA, 19 bp, Mus musculus
  siRNA target sequence for MOR177-14 (NM_146293.1,245-263).
ggcccaagatgttaatgga

SEQ ID NO: 626538 - DNA, 19 bp, Mus musculus
  siRNA target sequence for MOR177-14 (NM_146293.1,262-280).
gacatatttggtaatgata

SEQ ID NO: 626539 - DNA, 19 bp, Mus musculus
  siRNA target sequence for MOR177-14 (NM_146293.1,299-317).
gctgtgctctccaattctt

SEQ ID NO: 626540 - DNA, 19 bp, Mus musculus
  siRNA target sequence for MOR177-14 (NM_146293.1,403-421).
ctttatacaacaaacatgt

SEQ ID NO: 626541 - DNA, 19 bp, Mus musculus
  siRNA target sequence for MOR177-14 (NM_146293.1,466-484).
ggtgtggcagactctttga

SEQ ID NO: 626542 - DNA, 19 bp, Mus musculus
  siRNA target sequence for MOR177-14 (NM_146293.1,467-485).
gtgtggcagactctttgat

SEQ ID NO: 626543 - DNA, 19 bp, Mus musculus
  siRNA target sequence for MOR177-14 (NM_146293.1,472-490).
gcagactctttgatccata

SEQ ID NO: 626544 - DNA, 19 bp, Mus musculus
  siRNA target sequence for MOR177-14 (NM_146293.1,475-493).
gactctttgatccatacaa

SEQ ID NO: 626545 - DNA, 19 bp, Mus musculus
  siRNA target sequence for MOR177-14 (NM_146293.1,831-849).
gagctccctgttttatatt

SEQ ID NO: 626546 - DNA, 19 bp, Mus musculus
  siRNA target sequence for MOR177-6 (NM_146642.1,20-38).
cctccatcactgaatttat

SEQ ID NO: 626547 - DNA, 19 bp, Mus musculus
  siRNA target sequence for MOR177-6 (NM_146642.1,290-308).
gtgcattacagtttttctt

SEQ ID NO: 626548 - DNA, 19 bp, Mus musculus
  siRNA target sequence for MOR177-6 (NM_146642.1,386-404).
ccctgatgtatgttgtaga

SEQ ID NO: 626549 - DNA, 19 bp, Mus musculus
  siRNA target sequence for MOR177-6 (NM_146642.1,400-418).
gtagacatgtccagtagat

SEQ ID NO: 626550 - DNA, 19 bp, Mus musculus
  siRNA target sequence for MOR177-6 (NM_146642.1,440-458).
gagtttatgtattagcaat

SEQ ID NO: 626551 - DNA, 19 bp, Mus musculus
  siRNA target sequence for MOR177-6 (NM_146642.1,463-481).
gatactctgatgcaaacta

SEQ ID NO: 626552 - DNA, 19 bp, Mus musculus
  siRNA target sequence for MOR177-6 (NM_146642.1,467-485).
ctctgatgcaaactataat

SEQ ID NO: 626553 - DNA, 19 bp, Mus musculus
  siRNA target sequence for MOR177-6 (NM_146642.1,469-487).
ctgatgcaaactataataa

SEQ ID NO: 626554 - DNA, 19 bp, Mus musculus
  siRNA target sequence for MOR177-6 (NM_146642.1,474-492).
gcaaactataataaccttt

SEQ ID NO: 626555 - DNA, 19 bp, Mus musculus
  siRNA target sequence for MOR177-6 (NM_146642.1,536-554).
gtgatcttccacctattct

SEQ ID NO: 626556 - DNA, 19 bp, Mus musculus
  siRNA target sequence for MOR177-6 (NM_146642.1,566-584).
gctcagatatatatgtcaa

SEQ ID NO: 626557 - DNA, 19 bp, Mus musculus
  siRNA target sequence for MOR177-6 (NM_146642.1,616-634).
gttgagttgtgcactattt

SEQ ID NO: 626558 - DNA, 19 bp, Mus musculus
  siRNA target sequence for MOR177-6 (NM_146642.1,640-658).
cttcttgtttcttacagtt

SEQ ID NO: 626559 - DNA, 19 bp, Mus musculus
  siRNA target sequence for MOR177-6 (NM_146642.1,811-829).
gataaaacaacctcattgt

SEQ ID NO: 626560 - DNA, 19 bp, Mus musculus
  siRNA target sequence for MOR177-8 (NM_146639.1,10-28).
gggaactgctccacattga

SEQ ID NO: 626561 - DNA, 19 bp, Mus musculus
  siRNA target sequence for MOR177-8 (NM_146639.1,54-72).
cagtaaccctgaggtaaaa

SEQ ID NO: 626562 - DNA, 19 bp, Mus musculus
  siRNA target sequence for MOR177-8 (NM_146639.1,250-268).
gacctactgtctaagaata

SEQ ID NO: 626563 - DNA, 19 bp, Mus musculus
  siRNA target sequence for MOR177-8 (NM_146639.1,252-270).
cctactgtctaagaataca

SEQ ID NO: 626564 - DNA, 19 bp, Mus musculus
  siRNA target sequence for MOR177-8 (NM_146639.1,253-271).
ctactgtctaagaatacat

SEQ ID NO: 626565 - DNA, 19 bp, Mus musculus
  siRNA target sequence for MOR177-8 (NM_146639.1,258-276).
gtctaagaatacatctatt

SEQ ID NO: 626566 - DNA, 19 bp, Mus musculus
  siRNA target sequence for MOR177-8 (NM_146639.1,364-382).
cgatataaggccattagta

SEQ ID NO: 626567 - DNA, 19 bp, Mus musculus
  siRNA target sequence for MOR177-8 (NM_146639.1,365-383).
gatataaggccattagtaa

SEQ ID NO: 626568 - DNA, 19 bp, Mus musculus
  siRNA target sequence for MOR177-8 (NM_146639.1,413-431).
ggaaagtgtgcttccaatt

SEQ ID NO: 626569 - DNA, 19 bp, Mus musculus
  siRNA target sequence for MOR177-8 (NM_146639.1,414-432).
gaaagtgtgcttccaatta

SEQ ID NO: 626570 - DNA, 19 bp, Mus musculus
  siRNA target sequence for MOR177-8 (NM_146639.1,418-436).
gtgtgcttccaattattga

SEQ ID NO: 626571 - DNA, 19 bp, Mus musculus
  siRNA target sequence for MOR177-8 (NM_146639.1,577-595).
caggtcaatgttttagtca

SEQ ID NO: 626572 - DNA, 19 bp, Mus musculus
  siRNA target sequence for MOR177-8 (NM_146639.1,819-837).
gacgtcccttttttataca

SEQ ID NO: 626573 - DNA, 19 bp, Mus musculus
  siRNA target sequence for MOR177-8 (NM_146639.1,821-839).
cgtcccttttttatacact

SEQ ID NO: 626574 - DNA, 19 bp, Mus musculus
  siRNA target sequence for MOR177-8 (NM_146639.1,895-913).
gaggcacttcaaagaataa

SEQ ID NO: 626575 - DNA, 19 bp, Mus musculus
  siRNA target sequence for MOR177-8 (NM_146639.1,897-915).
ggcacttcaaagaataaga

SEQ ID NO: 626576 - DNA, 19 bp, Mus musculus
  siRNA target sequence for MOR178-1 (NM_146374.1,54-72).
cttggggatcacaaatcgt

SEQ ID NO: 626577 - DNA, 19 bp, Mus musculus
  siRNA target sequence for MOR178-1 (NM_146374.1,147-165).
ggtgctactcattcgtata

SEQ ID NO: 626578 - DNA, 19 bp, Mus musculus
  siRNA target sequence for MOR178-1 (NM_146374.1,150-168).
gctactcattcgtatagat

SEQ ID NO: 626579 - DNA, 19 bp, Mus musculus
  siRNA target sequence for MOR178-1 (NM_146374.1,278-296).
gtgccaccatcccttatgt

SEQ ID NO: 626580 - DNA, 19 bp, Mus musculus
  siRNA target sequence for MOR178-1 (NM_146374.1,304-322).
gccctccagatgtttgtct

SEQ ID NO: 626581 - DNA, 19 bp, Mus musculus
  siRNA target sequence for MOR178-1 (NM_146374.1,405-423).
ctataccacagttatgtca

SEQ ID NO: 626582 - DNA, 19 bp, Mus musculus
  siRNA target sequence for MOR178-1 (NM_146374.1,478-496).
gcctttgtacatacaactt

SEQ ID NO: 626583 - DNA, 19 bp, Mus musculus
  siRNA target sequence for MOR178-1 (NM_146374.1,518-536).
gtggctccctggaagtcaa

SEQ ID NO: 626584 - DNA, 19 bp, Mus musculus
  siRNA target sequence for MOR178-1 (NM_146374.1,582-600).
cgacaccagtctcaatgaa

SEQ ID NO: 626585 - DNA, 19 bp, Mus musculus
  siRNA target sequence for MOR179-2 (NM_146592.1,19-37).
gtcacagaatttatactga

SEQ ID NO: 626586 - DNA, 19 bp, Mus musculus
  siRNA target sequence for MOR179-2 (NM_146592.1,204-222).
cgcctgctattctactgtt

SEQ ID NO: 626587 - DNA, 19 bp, Mus musculus
  siRNA target sequence for MOR179-2 (NM_146592.1,317-335).
gtacaactgaatgttttct

SEQ ID NO: 626588 - DNA, 19 bp, Mus musculus
  siRNA target sequence for MOR179-2 (NM_146592.1,471-489).
cacggtggctactttcaga

SEQ ID NO: 626589 - DNA, 19 bp, Mus musculus
  siRNA target sequence for MOR179-2 (NM_146592.1,506-524).
ccaataaaatcagtcatat

SEQ ID NO: 626590 - DNA, 19 bp, Mus musculus
  siRNA target sequence for MOR179-6 (NM_146366.1,20-38).
ctgtggatgtccacaatat

SEQ ID NO: 626591 - DNA, 19 bp, Mus musculus
  siRNA target sequence for MOR179-6 (NM_146366.1,28-46).
gtccacaatattccattaa

SEQ ID NO: 626592 - DNA, 19 bp, Mus musculus
  siRNA target sequence for MOR179-6 (NM_146366.1,62-80).
ccaccatgtttattctctt

SEQ ID NO: 626593 - DNA, 19 bp, Mus musculus
  siRNA target sequence for MOR179-6 (NM_146366.1,147-165).
cactctggtaggaaacttt

SEQ ID NO: 626594 - DNA, 19 bp, Mus musculus
  siRNA target sequence for MOR179-6 (NM_146366.1,279-297).
gttggtcaactttctaagt

SEQ ID NO: 626595 - DNA, 19 bp, Mus musculus
  siRNA target sequence for MOR179-6 (NM_146366.1,282-300).
ggtcaactttctaagtgaa

SEQ ID NO: 626596 - DNA, 19 bp, Mus musculus
  siRNA target sequence for MOR179-6 (NM_146366.1,283-301).
gtcaactttctaagtgaaa

SEQ ID NO: 626597 - DNA, 19 bp, Mus musculus
  siRNA target sequence for MOR179-6 (NM_146366.1,439-457).
gccatgtcacccagagtat

SEQ ID NO: 626598 - DNA, 19 bp, Mus musculus
  siRNA target sequence for MOR179-6 (NM_146366.1,636-654).
gtacttggtgggcttgatt

SEQ ID NO: 626599 - DNA, 19 bp, Mus musculus
  siRNA target sequence for MOR179-6 (NM_146366.1,642-660).
ggtgggcttgattgagatt

SEQ ID NO: 626600 - DNA, 19 bp, Mus musculus
  siRNA target sequence for MOR179-6 (NM_146366.1,769-787).
ctcactggagtctctattt

SEQ ID NO: 626601 - DNA, 19 bp, Mus musculus
  siRNA target sequence for MOR179-6 (NM_146366.1,794-812).
gtacaatccttttcactta

SEQ ID NO: 626602 - DNA, 19 bp, Mus musculus
  siRNA target sequence for MOR179-6 (NM_146366.1,830-848).
gttatgcttcaaatcatga

SEQ ID NO: 626603 - DNA, 19 bp, Mus musculus
  siRNA target sequence for MOR18-1 (NM_147093.1,3-21).
ggtgggcttcaatagcaat

SEQ ID NO: 626604 - DNA, 19 bp, Mus musculus
  siRNA target sequence for MOR18-1 (NM_147093.1,6-24).
gggcttcaatagcaatgaa

SEQ ID NO: 626605 - DNA, 19 bp, Mus musculus
  siRNA target sequence for MOR18-1 (NM_147093.1,7-25).
ggcttcaatagcaatgaat

SEQ ID NO: 626606 - DNA, 19 bp, Mus musculus
  siRNA target sequence for MOR18-1 (NM_147093.1,22-40).
gaatccagtgccacatatt

SEQ ID NO: 626607 - DNA, 19 bp, Mus musculus
  siRNA target sequence for MOR18-1 (NM_147093.1,29-47).
gtgccacatatttcatctt

SEQ ID NO: 626608 - DNA, 19 bp, Mus musculus
  siRNA target sequence for MOR18-1 (NM_147093.1,62-80).
gattggaagaggttcagtt

SEQ ID NO: 626609 - DNA, 19 bp, Mus musculus
  siRNA target sequence for MOR18-1 (NM_147093.1,99-117).
gtgttccctctaccttatt

SEQ ID NO: 626610 - DNA, 19 bp, Mus musculus
  siRNA target sequence for MOR18-1 (NM_147093.1,118-136).
gctgtgctaggtaacttga

SEQ ID NO: 626611 - DNA, 19 bp, Mus musculus
  siRNA target sequence for MOR18-1 (NM_147093.1,124-142).
ctaggtaacttgacaatca

SEQ ID NO: 626612 - DNA, 19 bp, Mus musculus
  siRNA target sequence for MOR18-1 (NM_147093.1,272-290).
ccactaccatccagtttga

SEQ ID NO: 626613 - DNA, 19 bp, Mus musculus
  siRNA target sequence for MOR18-1 (NM_147093.1,273-291).
cactaccatccagtttgat

SEQ ID NO: 626614 - DNA, 19 bp, Mus musculus
  siRNA target sequence for MOR18-1 (NM_147093.1,420-438).
gcctcgtgttgccaagatt

SEQ ID NO: 626615 - DNA, 19 bp, Mus musculus
  siRNA target sequence for MOR18-1 (NM_147093.1,453-471).
ggtcaggggtgcagtacta

SEQ ID NO: 626616 - DNA, 19 bp, Mus musculus
  siRNA target sequence for MOR18-1 (NM_147093.1,577-595).
gacatccgtgtcaatatca

SEQ ID NO: 626617 - DNA, 19 bp, Mus musculus
  siRNA target sequence for MOR18-1 (NM_147093.1,579-597).
catccgtgtcaatatcatt

SEQ ID NO: 626618 - DNA, 19 bp, Mus musculus
  siRNA target sequence for MOR18-1 (NM_147093.1,582-600).
ccgtgtcaatatcatttat

SEQ ID NO: 626619 - DNA, 19 bp, Mus musculus
  siRNA target sequence for MOR18-1 (NM_147093.1,601-619).
ggactcattgtcatcatct

SEQ ID NO: 626620 - DNA, 19 bp, Mus musculus
  siRNA target sequence for MOR18-1 (NM_147093.1,629-647).
gtttggactcacttctcat

SEQ ID NO: 626621 - DNA, 19 bp, Mus musculus
  siRNA target sequence for MOR18-1 (NM_147093.1,733-751).
catgtgtgtgctgttttca

SEQ ID NO: 626622 - DNA, 19 bp, Mus musculus
  siRNA target sequence for MOR181-2 (NM_146593.1,20-38).
ccaagccaacagagtttat

SEQ ID NO: 626623 - DNA, 19 bp, Mus musculus
  siRNA target sequence for MOR181-2 (NM_146593.1,21-39).
caagccaacagagtttata

SEQ ID NO: 626624 - DNA, 19 bp, Mus musculus
  siRNA target sequence for MOR181-2 (NM_146593.1,26-44).
caacagagtttatatttat

SEQ ID NO: 626625 - DNA, 19 bp, Mus musculus
  siRNA target sequence for MOR181-2 (NM_146593.1,96-114).
catagtttacaccttaact

SEQ ID NO: 626626 - DNA, 19 bp, Mus musculus
  siRNA target sequence for MOR181-2 (NM_146593.1,130-148).
ggcttaataatcctagtta

SEQ ID NO: 626627 - DNA, 19 bp, Mus musculus
  siRNA target sequence for MOR181-2 (NM_146593.1,131-149).
gcttaataatcctagttaa

SEQ ID NO: 626628 - DNA, 19 bp, Mus musculus
  siRNA target sequence for MOR181-2 (NM_146593.1,132-150).
cttaataatcctagttaat

SEQ ID NO: 626629 - DNA, 19 bp, Mus musculus
  siRNA target sequence for MOR181-2 (NM_146593.1,177-195).
gtatcactttcttagcaat

SEQ ID NO: 626630 - DNA, 19 bp, Mus musculus
  siRNA target sequence for MOR181-2 (NM_146593.1,181-199).
cactttcttagcaatctgt

SEQ ID NO: 626631 - DNA, 19 bp, Mus musculus
  siRNA target sequence for MOR181-2 (NM_146593.1,499-517).
ccatactgtaggtccaata

SEQ ID NO: 626632 - DNA, 19 bp, Mus musculus
  siRNA target sequence for MOR181-2 (NM_146593.1,506-524).
gtaggtccaatattgtcaa

SEQ ID NO: 626633 - DNA, 19 bp, Mus musculus
  siRNA target sequence for MOR181-2 (NM_146593.1,633-651).
catggtcatccttatttct

SEQ ID NO: 626634 - DNA, 19 bp, Mus musculus
  siRNA target sequence for MOR181-2 (NM_146593.1,656-674).
cttgcatcctcattactgt

SEQ ID NO: 626635 - DNA, 19 bp, Mus musculus
  siRNA target sequence for MOR181-2 (NM_146593.1,780-798).
gcgtcccaccactagctat

SEQ ID NO: 626636 - DNA, 19 bp, Mus musculus
  siRNA target sequence for MOR181-2 (NM_146593.1,781-799).
cgtcccaccactagctatt

SEQ ID NO: 626637 - DNA, 19 bp, Mus musculus
  siRNA target sequence for MOR181-2 (NM_146593.1,809-827).
ctgataaggtagttgcttt

SEQ ID NO: 626638 - DNA, 19 bp, Mus musculus
  siRNA target sequence for MOR181-2 (NM_146593.1,916-934).
gatagactggggatcttca

SEQ ID NO: 626639 - DNA, 19 bp, Mus musculus
  siRNA target sequence for MOR183-2 (NM_146485.1,68-86).
ggaaacctctcctattcct

SEQ ID NO: 626640 - DNA, 19 bp, Mus musculus
  siRNA target sequence for MOR183-2 (NM_146485.1,69-87).
gaaacctctcctattccta

SEQ ID NO: 626641 - DNA, 19 bp, Mus musculus
  siRNA target sequence for MOR183-2 (NM_146485.1,229-247).
gtgacaccgaggatgctat

SEQ ID NO: 626642 - DNA, 19 bp, Mus musculus
  siRNA target sequence for MOR183-2 (NM_146485.1,231-249).
gacaccgaggatgctattt

SEQ ID NO: 626643 - DNA, 19 bp, Mus musculus
  siRNA target sequence for MOR183-2 (NM_146485.1,233-251).
caccgaggatgctatttaa

SEQ ID NO: 626644 - DNA, 19 bp, Mus musculus
  siRNA target sequence for MOR183-2 (NM_146485.1,259-277).
gacaagggcaaggtgattt

SEQ ID NO: 626645 - DNA, 19 bp, Mus musculus
  siRNA target sequence for MOR183-2 (NM_146485.1,427-445).
cgcctattagccttatcat

SEQ ID NO: 626646 - DNA, 19 bp, Mus musculus
  siRNA target sequence for MOR183-2 (NM_146485.1,428-446).
gcctattagccttatcatt

SEQ ID NO: 626647 - DNA, 19 bp, Mus musculus
  siRNA target sequence for MOR183-2 (NM_146485.1,429-447).
cctattagccttatcattt

SEQ ID NO: 626648 - DNA, 19 bp, Mus musculus
  siRNA target sequence for MOR183-2 (NM_146485.1,430-448).
ctattagccttatcattta

SEQ ID NO: 626649 - DNA, 19 bp, Mus musculus
  siRNA target sequence for MOR183-2 (NM_146485.1,538-556).
gatgtgataccattgttaa

SEQ ID NO: 626650 - DNA, 19 bp, Mus musculus
  siRNA target sequence for MOR183-2 (NM_146485.1,541-559).
gtgataccattgttaaaaa

SEQ ID NO: 626651 - DNA, 19 bp, Mus musculus
  siRNA target sequence for MOR183-2 (NM_146485.1,543-561).
gataccattgttaaaaatt

SEQ ID NO: 626652 - DNA, 19 bp, Mus musculus
  siRNA target sequence for MOR183-2 (NM_146485.1,564-582).
ctgtactgatccttcttta

SEQ ID NO: 626653 - DNA, 19 bp, Mus musculus
  siRNA target sequence for MOR183-2 (NM_146485.1,569-587).
ctgatccttctttaaatta

SEQ ID NO: 626654 - DNA, 19 bp, Mus musculus
  siRNA target sequence for MOR183-2 (NM_146485.1,689-707).
ctgacaagggcataaggaa

SEQ ID NO: 626655 - DNA, 19 bp, Mus musculus
  siRNA target sequence for MOR183-2 (NM_146485.1,729-747).
ccacctcttgtctgtatct

SEQ ID NO: 626656 - DNA, 19 bp, Mus musculus
  siRNA target sequence for MOR183-2 (NM_146485.1,838-856).
gttataatccccgtattaa

SEQ ID NO: 626657 - DNA, 19 bp, Mus musculus
  siRNA target sequence for MOR183-8 (NM_146322.1,115-133).
gtgggaaacgtcagtttga

SEQ ID NO: 626658 - DNA, 19 bp, Mus musculus
  siRNA target sequence for MOR183-8 (NM_146322.1,118-136).
ggaaacgtcagtttgatca

SEQ ID NO: 626659 - DNA, 19 bp, Mus musculus
  siRNA target sequence for MOR183-8 (NM_146322.1,425-443).
ggctaatagccttgtcttt

SEQ ID NO: 626660 - DNA, 19 bp, Mus musculus
  siRNA target sequence for MOR183-8 (NM_146322.1,426-444).
gctaatagccttgtctttt

SEQ ID NO: 626661 - DNA, 19 bp, Mus musculus
  siRNA target sequence for MOR183-8 (NM_146322.1,605-623).
ctggctcgatccaggtttt

SEQ ID NO: 626662 - DNA, 19 bp, Mus musculus
  siRNA target sequence for MOR183-8 (NM_146322.1,615-633).
ccaggttttcactatttca

SEQ ID NO: 626663 - DNA, 19 bp, Mus musculus
  siRNA target sequence for MOR183-8 (NM_146322.1,624-642).
cactatttcaactatcctt

SEQ ID NO: 626664 - DNA, 19 bp, Mus musculus
  siRNA target sequence for MOR183-8 (NM_146322.1,639-657).
ccttgtctcttacactatt

SEQ ID NO: 626665 - DNA, 19 bp, Mus musculus
  siRNA target sequence for MOR184-1 (NM_147002.1,616-634).
gttcaaaccttttccatta

SEQ ID NO: 626666 - DNA, 19 bp, Mus musculus
  siRNA target sequence for MOR184-1 (NM_147002.1,788-806).
gttctatcaacgaaggaaa

SEQ ID NO: 626667 - DNA, 19 bp, Mus musculus
  siRNA target sequence for MOR184-4 (NM_146999.1,460-478).
ctgcattccttgatacata

SEQ ID NO: 626668 - DNA, 19 bp, Mus musculus
  siRNA target sequence for MOR184-4 (NM_146999.1,462-480).
gcattccttgatacataca

SEQ ID NO: 626669 - DNA, 19 bp, Mus musculus
  siRNA target sequence for MOR184-4 (NM_146999.1,475-493).
catacaggctgtctgttaa

SEQ ID NO: 626670 - DNA, 19 bp, Mus musculus
  siRNA target sequence for MOR184-4 (NM_146999.1,481-499).
ggctgtctgttaagattaa

SEQ ID NO: 626671 - DNA, 19 bp, Mus musculus
  siRNA target sequence for MOR184-4 (NM_146999.1,482-500).
gctgtctgttaagattaaa

SEQ ID NO: 626672 - DNA, 19 bp, Mus musculus
  siRNA target sequence for MOR184-4 (NM_146999.1,483-501).
ctgtctgttaagattaaat

SEQ ID NO: 626673 - DNA, 19 bp, Mus musculus
  siRNA target sequence for MOR184-4 (NM_146999.1,485-503).
gtctgttaagattaaattt

SEQ ID NO: 626674 - DNA, 19 bp, Mus musculus
  siRNA target sequence for MOR184-4 (NM_146999.1,506-524).
gtaaatctagaagaattga

SEQ ID NO: 626675 - DNA, 19 bp, Mus musculus
  siRNA target sequence for MOR184-4 (NM_146999.1,515-533).
gaagaattgatcacttctt

SEQ ID NO: 626676 - DNA, 19 bp, Mus musculus
  siRNA target sequence for MOR184-4 (NM_146999.1,771-789).
gtatattggaccatccaaa

SEQ ID NO: 626677 - DNA, 19 bp, Mus musculus
  siRNA target sequence for MOR184-4 (NM_146999.1,778-796).
ggaccatccaaaaatagta

SEQ ID NO: 626678 - DNA, 19 bp, Mus musculus
  siRNA target sequence for MOR184-4 (NM_146999.1,782-800).
catccaaaaatagtaacaa

SEQ ID NO: 626679 - DNA, 19 bp, Mus musculus
  siRNA target sequence for MOR184-5 (NM_146998.1,5-23).
ctgagaacaactattctgt

SEQ ID NO: 626680 - DNA, 19 bp, Mus musculus
  siRNA target sequence for MOR184-5 (NM_146998.1,432-450).
gaccatgggatcctacata

SEQ ID NO: 626681 - DNA, 19 bp, Mus musculus
  siRNA target sequence for MOR184-5 (NM_146998.1,462-480).
gcatcctatgattgaagta

SEQ ID NO: 626682 - DNA, 19 bp, Mus musculus
  siRNA target sequence for MOR184-5 (NM_146998.1,481-499).
gggcttttgttgaggttaa

SEQ ID NO: 626683 - DNA, 19 bp, Mus musculus
  siRNA target sequence for MOR184-5 (NM_146998.1,563-581).
cctgtactgatccaaatat

SEQ ID NO: 626684 - DNA, 19 bp, Mus musculus
  siRNA target sequence for MOR184-5 (NM_146998.1,566-584).
gtactgatccaaatatcaa

SEQ ID NO: 626685 - DNA, 19 bp, Mus musculus
  siRNA target sequence for MOR184-5 (NM_146998.1,603-621).
cttggcaggttcaattcaa

SEQ ID NO: 626686 - DNA, 19 bp, Mus musculus
  siRNA target sequence for MOR184-5 (NM_146998.1,624-642).
ctttactatctccatagtt

SEQ ID NO: 626687 - DNA, 19 bp, Mus musculus
  siRNA target sequence for MOR184-5 (NM_146998.1,629-647).
ctatctccatagttctagt

SEQ ID NO: 626688 - DNA, 19 bp, Mus musculus
  siRNA target sequence for MOR184-5 (NM_146998.1,635-653).
ccatagttctagtgtctta

SEQ ID NO: 626689 - DNA, 19 bp, Mus musculus
  siRNA target sequence for MOR184-5 (NM_146998.1,656-674).
cctgtatccttttcactat

SEQ ID NO: 626690 - DNA, 19 bp, Mus musculus
  siRNA target sequence for MOR184-5 (NM_146998.1,774-792).
gtatgctcaaccacattca

SEQ ID NO: 626691 - DNA, 19 bp, Mus musculus
  siRNA target sequence for MOR184-5 (NM_146998.1,898-916).
gtaatgaaaaaaactatga

SEQ ID NO: 626692 - DNA, 19 bp, Mus musculus
  siRNA target sequence for MOR184-6 (NM_146997.1,457-475).
gccagtaacctgatttcca

SEQ ID NO: 626693 - DNA, 19 bp, Mus musculus
  siRNA target sequence for MOR184-6 (NM_146997.1,481-499).
catgtagggtgtctcttaa

SEQ ID NO: 626694 - DNA, 19 bp, Mus musculus
  siRNA target sequence for MOR184-6 (NM_146997.1,484-502).
gtagggtgtctcttaaggt

SEQ ID NO: 626695 - DNA, 19 bp, Mus musculus
  siRNA target sequence for MOR184-6 (NM_146997.1,487-505).
gggtgtctcttaaggttaa

SEQ ID NO: 626696 - DNA, 19 bp, Mus musculus
  siRNA target sequence for MOR184-6 (NM_146997.1,489-507).
gtgtctcttaaggttaact

SEQ ID NO: 626697 - DNA, 19 bp, Mus musculus
  siRNA target sequence for MOR184-6 (NM_146997.1,620-638).
caattcaatttcttaccat

SEQ ID NO: 626698 - DNA, 19 bp, Mus musculus
  siRNA target sequence for MOR184-6 (NM_146997.1,785-803).
gaccatttgatgacagtaa

SEQ ID NO: 626699 - DNA, 19 bp, Mus musculus
  siRNA target sequence for MOR184-6 (NM_146997.1,787-805).
ccatttgatgacagtaata

SEQ ID NO: 626700 - DNA, 19 bp, Mus musculus
  siRNA target sequence for MOR184-6 (NM_146997.1,788-806).
catttgatgacagtaataa

SEQ ID NO: 626701 - DNA, 19 bp, Mus musculus
  siRNA target sequence for MOR184-6 (NM_146997.1,821-839).
ccatattttatacaataat

SEQ ID NO: 626702 - DNA, 19 bp, Mus musculus
  siRNA target sequence for MOR184-8 (NM_146993.1,388-406).
ctgcagtatcatacaatga

SEQ ID NO: 626703 - DNA, 19 bp, Mus musculus
  siRNA target sequence for MOR184-8 (NM_146993.1,391-409).
cagtatcatacaatgatgt

SEQ ID NO: 626704 - DNA, 19 bp, Mus musculus
  siRNA target sequence for MOR184-8 (NM_146993.1,608-626).
ctggtatagctcaaacttt

SEQ ID NO: 626705 - DNA, 19 bp, Mus musculus
  siRNA target sequence for MOR184-8 (NM_146993.1,914-932).
gcagagacaattgtaacat

SEQ ID NO: 626706 - DNA, 19 bp, Mus musculus
  siRNA target sequence for MOR184-8 (NM_146993.1,915-933).
cagagacaattgtaacatt

SEQ ID NO: 626707 - DNA, 19 bp, Mus musculus
  siRNA target sequence for MOR185-1 (NM_147078.1,606-624).
ctcagcgacaaacttgttt

SEQ ID NO: 626708 - DNA, 19 bp, Mus musculus
  siRNA target sequence for MOR185-1 (NM_147078.1,610-628).
gcgacaaacttgtttttct

SEQ ID NO: 626709 - DNA, 19 bp, Mus musculus
  siRNA target sequence for MOR185-1 (NM_147078.1,640-658).
gtacttatatcctatttca

SEQ ID NO: 626710 - DNA, 19 bp, Mus musculus
  siRNA target sequence for MOR185-1 (NM_147078.1,650-668).
cctatttcaacatagtact

SEQ ID NO: 626711 - DNA, 19 bp, Mus musculus
  siRNA target sequence for MOR185-1 (NM_147078.1,657-675).
caacatagtacttgcaatt

SEQ ID NO: 626712 - DNA, 19 bp, Mus musculus
  siRNA target sequence for MOR185-1 (NM_147078.1,828-846).
gttctacaccctaataata

SEQ ID NO: 626713 - DNA, 19 bp, Mus musculus
  siRNA target sequence for MOR185-1 (NM_147078.1,898-916).
gcattgaaagaattcctaa

SEQ ID NO: 626714 - DNA, 19 bp, Mus musculus
  siRNA target sequence for MOR185-1 (NM_147078.1,899-917).
cattgaaagaattcctaaa

SEQ ID NO: 626715 - DNA, 19 bp, Mus musculus
  siRNA target sequence for MOR185-3 (NM_147013.1,20-38).
cctatgtcagtgaattcat

SEQ ID NO: 626716 - DNA, 19 bp, Mus musculus
  siRNA target sequence for MOR185-3 (NM_147013.1,25-43).
gtcagtgaattcattctaa

SEQ ID NO: 626717 - DNA, 19 bp, Mus musculus
  siRNA target sequence for MOR185-3 (NM_147013.1,126-144).
ccttgggttgattgtcata

SEQ ID NO: 626718 - DNA, 19 bp, Mus musculus
  siRNA target sequence for MOR185-3 (NM_147013.1,189-207).
cagtcacctagcctttgtt

SEQ ID NO: 626719 - DNA, 19 bp, Mus musculus
  siRNA target sequence for MOR185-3 (NM_147013.1,256-274).
gtggtagagcgcaacacta

SEQ ID NO: 626720 - DNA, 19 bp, Mus musculus
  siRNA target sequence for MOR185-3 (NM_147013.1,308-326).
gttttcttaccttcatgat

SEQ ID NO: 626721 - DNA, 19 bp, Mus musculus
  siRNA target sequence for MOR185-3 (NM_147013.1,414-432).
gagagtgtgcattcaatta

SEQ ID NO: 626722 - DNA, 19 bp, Mus musculus
  siRNA target sequence for MOR185-3 (NM_147013.1,416-434).
gagtgtgcattcaattagt

SEQ ID NO: 626723 - DNA, 19 bp, Mus musculus
  siRNA target sequence for MOR185-3 (NM_147013.1,466-484).
gcccttttccatacaatca

SEQ ID NO: 626724 - DNA, 19 bp, Mus musculus
  siRNA target sequence for MOR185-3 (NM_147013.1,467-485).
cccttttccatacaatcat

SEQ ID NO: 626725 - DNA, 19 bp, Mus musculus
  siRNA target sequence for MOR185-3 (NM_147013.1,486-504).
cacctttcgcttgacatat

SEQ ID NO: 626726 - DNA, 19 bp, Mus musculus
  siRNA target sequence for MOR185-3 (NM_147013.1,489-507).
ctttcgcttgacatattgt

SEQ ID NO: 626727 - DNA, 19 bp, Mus musculus
  siRNA target sequence for MOR185-3 (NM_147013.1,511-529).
cctaatgtaatcaaccatt

SEQ ID NO: 626728 - DNA, 19 bp, Mus musculus
  siRNA target sequence for MOR185-3 (NM_147013.1,573-591).
cacgcacatgaaggaaatt

SEQ ID NO: 626729 - DNA, 19 bp, Mus musculus
  siRNA target sequence for MOR185-3 (NM_147013.1,621-639).
gatctgctcctcttccata

SEQ ID NO: 626730 - DNA, 19 bp, Mus musculus
  siRNA target sequence for MOR185-3 (NM_147013.1,922-940).
gggtatgaaaccttaaaaa

SEQ ID NO: 626731 - DNA, 19 bp, Mus musculus
  siRNA target sequence for MOR185-4 (NM_147011.1,102-120).
ctatcttttcacaacactt

SEQ ID NO: 626732 - DNA, 19 bp, Mus musculus
  siRNA target sequence for MOR185-4 (NM_147011.1,130-148).
ggactgatcctagtcatta

SEQ ID NO: 626733 - DNA, 19 bp, Mus musculus
  siRNA target sequence for MOR185-4 (NM_147011.1,133-151).
ctgatcctagtcattagaa

SEQ ID NO: 626734 - DNA, 19 bp, Mus musculus
  siRNA target sequence for MOR185-4 (NM_147011.1,391-409).
ctctatatggtcctaatgt

SEQ ID NO: 626735 - DNA, 19 bp, Mus musculus
  siRNA target sequence for MOR185-4 (NM_147011.1,433-451).
gtagctgccccctatagct

SEQ ID NO: 626736 - DNA, 19 bp, Mus musculus
  siRNA target sequence for MOR185-4 (NM_147011.1,601-619).
gtctgcgctggcatcatgt

SEQ ID NO: 626737 - DNA, 19 bp, Mus musculus
  siRNA target sequence for MOR185-4 (NM_147011.1,607-625).
gctggcatcatgttcattt

SEQ ID NO: 626738 - DNA, 19 bp, Mus musculus
  siRNA target sequence for MOR185-4 (NM_147011.1,719-737).
catgtggttcccatatgct

SEQ ID NO: 626739 - DNA, 19 bp, Mus musculus
  siRNA target sequence for MOR185-4 (NM_147011.1,736-754).
ctagcagtgaccattttct

SEQ ID NO: 626740 - DNA, 19 bp, Mus musculus
  siRNA target sequence for MOR185-4 (NM_147011.1,895-913).
gatgccttgaagaaattaa

SEQ ID NO: 626741 - DNA, 19 bp, Mus musculus
  siRNA target sequence for MOR185-4 (NM_147011.1,906-924).
gaaattaattgccagtaaa

SEQ ID NO: 626742 - DNA, 19 bp, Mus musculus
  siRNA target sequence for MOR185-4 (NM_147011.1,916-934).
gccagtaaaaaccaaatgt

SEQ ID NO: 626743 - DNA, 19 bp, Mus musculus
  siRNA target sequence for MOR185-4 (NM_147011.1,917-935).
ccagtaaaaaccaaatgtt

SEQ ID NO: 626744 - DNA, 19 bp, Mus musculus
  siRNA target sequence for MOR187-1 (NM_147016.1,3-21).
ggggcaaccaaatataaca

SEQ ID NO: 626745 - DNA, 19 bp, Mus musculus
  siRNA target sequence for MOR187-1 (NM_147016.1,4-22).
gggcaaccaaatataacaa

SEQ ID NO: 626746 - DNA, 19 bp, Mus musculus
  siRNA target sequence for MOR187-1 (NM_147016.1,5-23).
ggcaaccaaatataacaat

SEQ ID NO: 626747 - DNA, 19 bp, Mus musculus
  siRNA target sequence for MOR187-1 (NM_147016.1,86-104).
cagtcttcctcactatcta

SEQ ID NO: 626748 - DNA, 19 bp, Mus musculus
  siRNA target sequence for MOR187-1 (NM_147016.1,388-406).
ctgctctatagtgctataa

SEQ ID NO: 626749 - DNA, 19 bp, Mus musculus
  siRNA target sequence for MOR187-1 (NM_147016.1,393-411).
ctatagtgctataatgtct

SEQ ID NO: 626750 - DNA, 19 bp, Mus musculus
  siRNA target sequence for MOR187-1 (NM_147016.1,471-489).
gctgttccctattaggtat

SEQ ID NO: 626751 - DNA, 19 bp, Mus musculus
  siRNA target sequence for MOR187-1 (NM_147016.1,472-490).
ctgttccctattaggtatt

SEQ ID NO: 626752 - DNA, 19 bp, Mus musculus
  siRNA target sequence for MOR187-1 (NM_147016.1,479-497).
ctattaggtatttcacatt

SEQ ID NO: 626753 - DNA, 19 bp, Mus musculus
  siRNA target sequence for MOR187-1 (NM_147016.1,485-503).
ggtatttcacattaagctt

SEQ ID NO: 626754 - DNA, 19 bp, Mus musculus
  siRNA target sequence for MOR187-1 (NM_147016.1,547-565).
cccttactacctttgatct

SEQ ID NO: 626755 - DNA, 19 bp, Mus musculus
  siRNA target sequence for MOR187-1 (NM_147016.1,582-600).
gacagaattattgactata

SEQ ID NO: 626756 - DNA, 19 bp, Mus musculus
  siRNA target sequence for MOR187-1 (NM_147016.1,603-621).
gttttcagccttcaattta

SEQ ID NO: 626757 - DNA, 19 bp, Mus musculus
  siRNA target sequence for MOR187-1 (NM_147016.1,774-792).
gtatgttcagcctaaatct

SEQ ID NO: 626758 - DNA, 19 bp, Mus musculus
  siRNA target sequence for MOR187-1 (NM_147016.1,796-814).
cactcatttgaatatgaca

SEQ ID NO: 626759 - DNA, 19 bp, Mus musculus
  siRNA target sequence for MOR187-1 (NM_147016.1,898-916).
gcctttcatagagtattta

SEQ ID NO: 626760 - DNA, 19 bp, Mus musculus
  siRNA target sequence for MOR187-2 (NM_147014.1,57-75).
cattctgacaagaattaca

SEQ ID NO: 626761 - DNA, 19 bp, Mus musculus
  siRNA target sequence for MOR187-2 (NM_147014.1,99-117).
gcttttgggcgtcttcata

SEQ ID NO: 626762 - DNA, 19 bp, Mus musculus
  siRNA target sequence for MOR187-2 (NM_147014.1,123-141).
ctacggagttgccatgata

SEQ ID NO: 626763 - DNA, 19 bp, Mus musculus
  siRNA target sequence for MOR187-2 (NM_147014.1,236-254).
gaaattgcactgtcattta

SEQ ID NO: 626764 - DNA, 19 bp, Mus musculus
  siRNA target sequence for MOR187-2 (NM_147014.1,247-265).
gtcatttaccccaagatga

SEQ ID NO: 626765 - DNA, 19 bp, Mus musculus
  siRNA target sequence for MOR187-2 (NM_147014.1,292-310).
gtcatctcttactatgctt

SEQ ID NO: 626766 - DNA, 19 bp, Mus musculus
  siRNA target sequence for MOR187-2 (NM_147014.1,314-332).
ccgtgcagatggcattcta

SEQ ID NO: 626767 - DNA, 19 bp, Mus musculus
  siRNA target sequence for MOR187-2 (NM_147014.1,316-334).
gtgcagatggcattctaca

SEQ ID NO: 626768 - DNA, 19 bp, Mus musculus
  siRNA target sequence for MOR187-2 (NM_147014.1,484-502).
caagctgtgatgataacta

SEQ ID NO: 626769 - DNA, 19 bp, Mus musculus
  siRNA target sequence for MOR187-2 (NM_147014.1,490-508).
gtgatgataactagtaaga

SEQ ID NO: 626770 - DNA, 19 bp, Mus musculus
  siRNA target sequence for MOR187-2 (NM_147014.1,492-510).
gatgataactagtaagatt

SEQ ID NO: 626771 - DNA, 19 bp, Mus musculus
  siRNA target sequence for MOR187-2 (NM_147014.1,561-579).
caatgtccctatgttactt

SEQ ID NO: 626772 - DNA, 19 bp, Mus musculus
  siRNA target sequence for MOR187-2 (NM_147014.1,599-617).
gggatatagaactgttgat

SEQ ID NO: 626773 - DNA, 19 bp, Mus musculus
  siRNA target sequence for MOR187-2 (NM_147014.1,642-660).
gatctcctccctctttgta

SEQ ID NO: 626774 - DNA, 19 bp, Mus musculus
  siRNA target sequence for MOR187-2 (NM_147014.1,650-668).
ccctctttgtagtcttagt

SEQ ID NO: 626775 - DNA, 19 bp, Mus musculus
  siRNA target sequence for MOR187-2 (NM_147014.1,685-703).
ctactggccatatatagaa

SEQ ID NO: 626776 - DNA, 19 bp, Mus musculus
  siRNA target sequence for MOR187-2 (NM_147014.1,754-772).
ctgacagtggtagtagtat

SEQ ID NO: 626777 - DNA, 19 bp, Mus musculus
  siRNA target sequence for MOR187-2 (NM_147014.1,756-774).
gacagtggtagtagtattt

SEQ ID NO: 626778 - DNA, 19 bp, Mus musculus
  siRNA target sequence for MOR187-2 (NM_147014.1,762-780).
ggtagtagtattttatgga

SEQ ID NO: 626779 - DNA, 19 bp, Mus musculus
  siRNA target sequence for MOR187-2 (NM_147014.1,922-940).
gttctaagagtctttaggt

SEQ ID NO: 626780 - DNA, 19 bp, Mus musculus
  siRNA target sequence for MOR187-2 (NM_147014.1,933-951).
ctttaggtatcaatgcaaa

SEQ ID NO: 626781 - DNA, 19 bp, Mus musculus
  siRNA target sequence for MOR188-2 (NM_147019.1,259-277).
gtcaatcagaatacaatca

SEQ ID NO: 626782 - DNA, 19 bp, Mus musculus
  siRNA target sequence for MOR188-2 (NM_147019.1,267-285).
gaatacaatcagtaatcat

SEQ ID NO: 626783 - DNA, 19 bp, Mus musculus
  siRNA target sequence for MOR188-2 (NM_147019.1,290-308).
gtgcaatacagctaacttt

SEQ ID NO: 626784 - DNA, 19 bp, Mus musculus
  siRNA target sequence for MOR188-2 (NM_147019.1,292-310).
gcaatacagctaactttct

SEQ ID NO: 626785 - DNA, 19 bp, Mus musculus
  siRNA target sequence for MOR188-2 (NM_147019.1,436-454).
gcagttccttatttctata

SEQ ID NO: 626786 - DNA, 19 bp, Mus musculus
  siRNA target sequence for MOR188-2 (NM_147019.1,457-475).
gtcattatttctcttctaa

SEQ ID NO: 626787 - DNA, 19 bp, Mus musculus
  siRNA target sequence for MOR188-2 (NM_147019.1,493-511).
gctttacctttttgtgatt

SEQ ID NO: 626788 - DNA, 19 bp, Mus musculus
  siRNA target sequence for MOR188-2 (NM_147019.1,524-542).
gtcatttctgcgatagtct

SEQ ID NO: 626789 - DNA, 19 bp, Mus musculus
  siRNA target sequence for MOR188-2 (NM_147019.1,533-551).
gcgatagtctccctttaat

SEQ ID NO: 626790 - DNA, 19 bp, Mus musculus
  siRNA target sequence for MOR188-2 (NM_147019.1,534-552).
cgatagtctccctttaata

SEQ ID NO: 626791 - DNA, 19 bp, Mus musculus
  siRNA target sequence for MOR188-2 (NM_147019.1,563-581).
gttctaatacacatgatat

SEQ ID NO: 626792 - DNA, 19 bp, Mus musculus
  siRNA target sequence for MOR188-2 (NM_147019.1,597-615).
gatttcagcggggtttaat

SEQ ID NO: 626793 - DNA, 19 bp, Mus musculus
  siRNA target sequence for MOR188-2 (NM_147019.1,602-620).
cagcggggtttaatttggt

SEQ ID NO: 626794 - DNA, 19 bp, Mus musculus
  siRNA target sequence for MOR188-2 (NM_147019.1,604-622).
gcggggtttaatttggttt

SEQ ID NO: 626795 - DNA, 19 bp, Mus musculus
  siRNA target sequence for MOR188-2 (NM_147019.1,628-646).
ctcgtggtactcctctttt

SEQ ID NO: 626796 - DNA, 19 bp, Mus musculus
  siRNA target sequence for MOR188-2 (NM_147019.1,631-649).
gtggtactcctcttttctt

SEQ ID NO: 626797 - DNA, 19 bp, Mus musculus
  siRNA target sequence for MOR188-2 (NM_147019.1,633-651).
ggtactcctcttttcttat

SEQ ID NO: 626798 - DNA, 19 bp, Mus musculus
  siRNA target sequence for MOR188-2 (NM_147019.1,783-801).
caaatcaagtcactcattt

SEQ ID NO: 626799 - DNA, 19 bp, Mus musculus
  siRNA target sequence for MOR188-2 (NM_147019.1,911-929).
ggaaaatgttaggcaatat

SEQ ID NO: 626800 - DNA, 19 bp, Mus musculus
  siRNA target sequence for MOR188-2 (NM_147019.1,918-936).
gttaggcaatattttttct

SEQ ID NO: 626801 - DNA, 19 bp, Mus musculus
  siRNA target sequence for MOR189-1 (NM_146407.1,230-248).
ctgctattggacctaaaat

SEQ ID NO: 626802 - DNA, 19 bp, Mus musculus
  siRNA target sequence for MOR189-1 (NM_146407.1,422-440).
ctgtatgttgggtacttgt

SEQ ID NO: 626803 - DNA, 19 bp, Mus musculus
  siRNA target sequence for MOR189-1 (NM_146407.1,583-601).
gataaaatcggactgataa

SEQ ID NO: 626804 - DNA, 19 bp, Mus musculus
  siRNA target sequence for MOR189-1 (NM_146407.1,591-609).
cggactgataattttaatt

SEQ ID NO: 626805 - DNA, 19 bp, Mus musculus
  siRNA target sequence for MOR189-3 (NM_146405.1,290-308).
gtgctgtccagttaacttt

SEQ ID NO: 626806 - DNA, 19 bp, Mus musculus
  siRNA target sequence for MOR189-3 (NM_146405.1,292-310).
gctgtccagttaactttct

SEQ ID NO: 626807 - DNA, 19 bp, Mus musculus
  siRNA target sequence for MOR189-3 (NM_146405.1,436-454).
gccattccttacatttaca

SEQ ID NO: 626808 - DNA, 19 bp, Mus musculus
  siRNA target sequence for MOR189-3 (NM_146405.1,438-456).
cattccttacatttacagt

SEQ ID NO: 626809 - DNA, 19 bp, Mus musculus
  siRNA target sequence for MOR189-3 (NM_146405.1,467-485).
ctctcctaatcagcataaa

SEQ ID NO: 626810 - DNA, 19 bp, Mus musculus
  siRNA target sequence for MOR189-3 (NM_146405.1,469-487).
ctcctaatcagcataaata

SEQ ID NO: 626811 - DNA, 19 bp, Mus musculus
  siRNA target sequence for MOR192-1 (NM_146409.1,583-601).
gttgaacttatagttatga

SEQ ID NO: 626812 - DNA, 19 bp, Mus musculus
  siRNA target sequence for MOR192-1 (NM_146409.1,629-647).
cccttgtcgttgtgcttat

SEQ ID NO: 626813 - DNA, 19 bp, Mus musculus
  siRNA target sequence for MOR192-1 (NM_146409.1,732-750).
cctgacagtagttacagta

SEQ ID NO: 626814 - DNA, 19 bp, Mus musculus
  siRNA target sequence for MOR192-1 (NM_146409.1,795-813).
ccattcaattgatactgat

SEQ ID NO: 626815 - DNA, 19 bp, Mus musculus
  siRNA target sequence for MOR195-1 (NM_146723.1,10-28).
ggcaatcgcaccacagtaa

SEQ ID NO: 626816 - DNA, 19 bp, Mus musculus
  siRNA target sequence for MOR195-1 (NM_146723.1,16-34).
cgcaccacagtaacagaat

SEQ ID NO: 626817 - DNA, 19 bp, Mus musculus
  siRNA target sequence for MOR195-1 (NM_146723.1,87-105).
ggtgttcctgattctcatt

SEQ ID NO: 626818 - DNA, 19 bp, Mus musculus
  siRNA target sequence for MOR195-1 (NM_146723.1,310-328).
gcttttgtcactactgaat

SEQ ID NO: 626819 - DNA, 19 bp, Mus musculus
  siRNA target sequence for MOR195-1 (NM_146723.1,653-671).
gcatcctagtgtccattat

SEQ ID NO: 626820 - DNA, 19 bp, Mus musculus
  siRNA target sequence for MOR195-1 (NM_146723.1,683-701).
cttcccagggcaagtgtaa

SEQ ID NO: 626821 - DNA, 19 bp, Mus musculus
  siRNA target sequence for MOR195-1 (NM_146723.1,752-770).
ggacgttatttttcatgta

SEQ ID NO: 626822 - DNA, 19 bp, Mus musculus
  siRNA target sequence for MOR195-1 (NM_146723.1,768-786).
gtacatgcggcaaccaaaa

SEQ ID NO: 626823 - DNA, 19 bp, Mus musculus
  siRNA target sequence for MOR195-1 (NM_146723.1,771-789).
catgcggcaaccaaaaact

SEQ ID NO: 626824 - DNA, 19 bp, Mus musculus
  siRNA target sequence for MOR195-1 (NM_146723.1,790-808).
gggagttcgtggaagtata

SEQ ID NO: 626825 - DNA, 19 bp, Mus musculus
  siRNA target sequence for MOR195-1 (NM_146723.1,794-812).
gttcgtggaagtatagcaa

SEQ ID NO: 626826 - DNA, 19 bp, Mus musculus
  siRNA target sequence for MOR195-1 (NM_146723.1,800-818).
ggaagtatagcaaagtgat

SEQ ID NO: 626827 - DNA, 19 bp, Mus musculus
  siRNA target sequence for MOR195-1 (NM_146723.1,885-903).
ggtaaaggatactctgaaa

SEQ ID NO: 626828 - DNA, 19 bp, Mus musculus
  siRNA target sequence for MOR196-2 (NM_146588.1,156-174).
ggtgttgatcaggatagat

SEQ ID NO: 626829 - DNA, 19 bp, Mus musculus
  siRNA target sequence for MOR196-2 (NM_146588.1,157-175).
gtgttgatcaggatagatt

SEQ ID NO: 626830 - DNA, 19 bp, Mus musculus
  siRNA target sequence for MOR196-2 (NM_146588.1,308-326).
gtttagtccagtgttattt

SEQ ID NO: 626831 - DNA, 19 bp, Mus musculus
  siRNA target sequence for MOR196-2 (NM_146588.1,335-353).
ctatggtgattactgaata

SEQ ID NO: 626832 - DNA, 19 bp, Mus musculus
  siRNA target sequence for MOR196-2 (NM_146588.1,639-657).
ctccaactccctgttcata

SEQ ID NO: 626833 - DNA, 19 bp, Mus musculus
  siRNA target sequence for MOR196-2 (NM_146588.1,641-659).
ccaactccctgttcataat

SEQ ID NO: 626834 - DNA, 19 bp, Mus musculus
  siRNA target sequence for MOR196-2 (NM_146588.1,777-795).
gacgctattctgcatgtat

SEQ ID NO: 626835 - DNA, 19 bp, Mus musculus
  siRNA target sequence for MOR196-2 (NM_146588.1,779-797).
cgctattctgcatgtatgt

SEQ ID NO: 626836 - DNA, 19 bp, Mus musculus
  siRNA target sequence for MOR196-2 (NM_146588.1,780-798).
gctattctgcatgtatgtt

SEQ ID NO: 626837 - DNA, 19 bp, Mus musculus
  siRNA target sequence for MOR196-2 (NM_146588.1,796-814).
gttagacctcccacagata

SEQ ID NO: 626838 - DNA, 19 bp, Mus musculus
  siRNA target sequence for MOR196-2 (NM_146588.1,818-836).
cagtggagcagtccaaaat

SEQ ID NO: 626839 - DNA, 19 bp, Mus musculus
  siRNA target sequence for MOR196-2 (NM_146588.1,822-840).
ggagcagtccaaaattatt

SEQ ID NO: 626840 - DNA, 19 bp, Mus musculus
  siRNA target sequence for MOR196-2 (NM_146588.1,907-925).
gtgaaacatgctttttgga

SEQ ID NO: 626841 - DNA, 19 bp, Mus musculus
  siRNA target sequence for MOR199-2 (NM_146578.1,31-49).
gtccttttgggattaacca

SEQ ID NO: 626842 - DNA, 19 bp, Mus musculus
  siRNA target sequence for MOR201-2 (NM_146580.1,9-27).
gagtggaaaaggaatccaa

SEQ ID NO: 626843 - DNA, 19 bp, Mus musculus
  siRNA target sequence for MOR201-2 (NM_146580.1,810-828).
ctctagctactctatggaa

SEQ ID NO: 626844 - DNA, 19 bp, Mus musculus
  siRNA target sequence for MOR202-12 (NM_146694.1,203-221).
ccctggtggatgttattta

SEQ ID NO: 626845 - DNA, 19 bp, Mus musculus
  siRNA target sequence for MOR202-12 (NM_146694.1,244-262).
gtcatggctggtctcataa

SEQ ID NO: 626846 - DNA, 19 bp, Mus musculus
  siRNA target sequence for MOR202-12 (NM_146694.1,246-264).
catggctggtctcataata

SEQ ID NO: 626847 - DNA, 19 bp, Mus musculus
  siRNA target sequence for MOR202-12 (NM_146694.1,249-267).
ggctggtctcataatagga

SEQ ID NO: 626848 - DNA, 19 bp, Mus musculus
  siRNA target sequence for MOR202-12 (NM_146694.1,731-749).
cccactttactgctgtttt

SEQ ID NO: 626849 - DNA, 19 bp, Mus musculus
  siRNA target sequence for MOR202-12 (NM_146694.1,733-751).
cactttactgctgttttta

SEQ ID NO: 626850 - DNA, 19 bp, Mus musculus
  siRNA target sequence for MOR202-12 (NM_146694.1,767-785).
caatcttcatgtatttgca

SEQ ID NO: 626851 - DNA, 19 bp, Mus musculus
  siRNA target sequence for MOR202-12 (NM_146694.1,901-919).
gcattcatgaaagtagttt

SEQ ID NO: 626852 - DNA, 19 bp, Mus musculus
  siRNA target sequence for MOR202-19 (NM_146635.1,424-442).
ctcattgtgggttcttaca

SEQ ID NO: 626853 - DNA, 19 bp, Mus musculus
  siRNA target sequence for MOR202-19 (NM_146635.1,597-615).
cttggcagcactcaatata

SEQ ID NO: 626854 - DNA, 19 bp, Mus musculus
  siRNA target sequence for MOR202-19 (NM_146635.1,600-618).
ggcagcactcaatatagct

SEQ ID NO: 626855 - DNA, 19 bp, Mus musculus
  siRNA target sequence for MOR202-19 (NM_146635.1,602-620).
cagcactcaatatagcttt

SEQ ID NO: 626856 - DNA, 19 bp, Mus musculus
  siRNA target sequence for MOR202-19 (NM_146635.1,604-622).
gcactcaatatagctttaa

SEQ ID NO: 626857 - DNA, 19 bp, Mus musculus
  siRNA target sequence for MOR202-19 (NM_146635.1,617-635).
ctttaactatattggttat

SEQ ID NO: 626858 - DNA, 19 bp, Mus musculus
  siRNA target sequence for MOR202-19 (NM_146635.1,630-648).
ggttatcgtgaactcttat

SEQ ID NO: 626859 - DNA, 19 bp, Mus musculus
  siRNA target sequence for MOR202-19 (NM_146635.1,637-655).
gtgaactcttatgtactta

SEQ ID NO: 626860 - DNA, 19 bp, Mus musculus
  siRNA target sequence for MOR202-2 (NM_146704.1,419-437).
gtgtgtatacaaggattat

SEQ ID NO: 626861 - DNA, 19 bp, Mus musculus
  siRNA target sequence for MOR202-2 (NM_146704.1,442-460).
gcctcttatgggatcagtt

SEQ ID NO: 626862 - DNA, 19 bp, Mus musculus
  siRNA target sequence for MOR202-2 (NM_146704.1,443-461).
cctcttatgggatcagttt

SEQ ID NO: 626863 - DNA, 19 bp, Mus musculus
  siRNA target sequence for MOR202-2 (NM_146704.1,446-464).
cttatgggatcagtttcat

SEQ ID NO: 626864 - DNA, 19 bp, Mus musculus
  siRNA target sequence for MOR202-20 (NM_146575.1,9-27).
gatggagaataatacaaaa

SEQ ID NO: 626865 - DNA, 19 bp, Mus musculus
  siRNA target sequence for MOR202-20 (NM_146575.1,76-94).
cttcccctcttcttgatat

SEQ ID NO: 626866 - DNA, 19 bp, Mus musculus
  siRNA target sequence for MOR202-20 (NM_146575.1,405-423).
cactatgactacaagagta

SEQ ID NO: 626867 - DNA, 19 bp, Mus musculus
  siRNA target sequence for MOR202-20 (NM_146575.1,416-434).
caagagtatgcatctatct

SEQ ID NO: 626868 - DNA, 19 bp, Mus musculus
  siRNA target sequence for MOR202-20 (NM_146575.1,509-527).
gtaggtacaatatgattca

SEQ ID NO: 626869 - DNA, 19 bp, Mus musculus
  siRNA target sequence for MOR202-20 (NM_146575.1,512-530).
ggtacaatatgattcatca

SEQ ID NO: 626870 - DNA, 19 bp, Mus musculus
  siRNA target sequence for MOR202-20 (NM_146575.1,566-584).
cttgctcagacagatactt

SEQ ID NO: 626871 - DNA, 19 bp, Mus musculus
  siRNA target sequence for MOR202-20 (NM_146575.1,582-600).
cttcagtgagctacttctt

SEQ ID NO: 626872 - DNA, 19 bp, Mus musculus
  siRNA target sequence for MOR202-20 (NM_146575.1,585-603).
cagtgagctacttcttgtt

SEQ ID NO: 626873 - DNA, 19 bp, Mus musculus
  siRNA target sequence for MOR202-20 (NM_146575.1,607-625).
gtagtgagcttcagtatat

SEQ ID NO: 626874 - DNA, 19 bp, Mus musculus
  siRNA target sequence for MOR202-20 (NM_146575.1,922-940).
gtggcaaaacagtctgtaa

SEQ ID NO: 626875 - DNA, 19 bp, Mus musculus
  siRNA target sequence for MOR202-3 (NM_146703.1,244-262).
gtcatgaatgggctactaa

SEQ ID NO: 626876 - DNA, 19 bp, Mus musculus
  siRNA target sequence for MOR202-3 (NM_146703.1,246-264).
catgaatgggctactaata

SEQ ID NO: 626877 - DNA, 19 bp, Mus musculus
  siRNA target sequence for MOR202-3 (NM_146703.1,249-267).
gaatgggctactaatagga

SEQ ID NO: 626878 - DNA, 19 bp, Mus musculus
  siRNA target sequence for MOR202-3 (NM_146703.1,254-272).
ggctactaataggaaacaa

SEQ ID NO: 626879 - DNA, 19 bp, Mus musculus
  siRNA target sequence for MOR202-4 (NM_146702.1,133-151).
gggatgatggtcatcatct

SEQ ID NO: 626880 - DNA, 19 bp, Mus musculus
  siRNA target sequence for MOR202-4 (NM_146702.1,134-152).
ggatgatggtcatcatctt

SEQ ID NO: 626881 - DNA, 19 bp, Mus musculus
  siRNA target sequence for MOR202-4 (NM_146702.1,208-226).
gtagatctgggatactcat

SEQ ID NO: 626882 - DNA, 19 bp, Mus musculus
  siRNA target sequence for MOR202-4 (NM_146702.1,379-397).
gtgtgtaggcctcttcatt

SEQ ID NO: 626883 - DNA, 19 bp, Mus musculus
  siRNA target sequence for MOR202-4 (NM_146702.1,418-436).
ggtgtgtgtaccatcctaa

SEQ ID NO: 626884 - DNA, 19 bp, Mus musculus
  siRNA target sequence for MOR202-4 (NM_146702.1,578-596).
cacacatcagtaaattggt

SEQ ID NO: 626885 - DNA, 19 bp, Mus musculus
  siRNA target sequence for MOR202-4 (NM_146702.1,585-603).
cagtaaattggttgtcttt

SEQ ID NO: 626886 - DNA, 19 bp, Mus musculus
  siRNA target sequence for MOR202-4 (NM_146702.1,673-691).
gctattcaaaacatgaagt

SEQ ID NO: 626887 - DNA, 19 bp, Mus musculus
  siRNA target sequence for MOR202-4 (NM_146702.1,897-915).
gagtgctctatggaaaata

SEQ ID NO: 626888 - DNA, 19 bp, Mus musculus
  siRNA target sequence for MOR202-4 (NM_146702.1,899-917).
gtgctctatggaaaatact

SEQ ID NO: 626889 - DNA, 19 bp, Mus musculus
  siRNA target sequence for MOR202-4 (NM_146702.1,901-919).
gctctatggaaaatactca

SEQ ID NO: 626890 - DNA, 19 bp, Mus musculus
  siRNA target sequence for MOR202-4 (NM_146702.1,902-920).
ctctatggaaaatactcaa

SEQ ID NO: 626891 - DNA, 19 bp, Mus musculus
  siRNA target sequence for MOR202-5 (NM_146701.1,623-641).
ctattgtagtcattacgat

SEQ ID NO: 626892 - DNA, 19 bp, Mus musculus
  siRNA target sequence for MOR202-5 (NM_146701.1,639-657).
gatctcctatctgcttatt

SEQ ID NO: 626893 - DNA, 19 bp, Mus musculus
  siRNA target sequence for MOR202-5 (NM_146701.1,882-900).
ggttaaaggtgcatttaaa

SEQ ID NO: 626894 - DNA, 19 bp, Mus musculus
  siRNA target sequence for MOR202-5 (NM_146701.1,883-901).
gttaaaggtgcatttaaaa

SEQ ID NO: 626895 - DNA, 19 bp, Mus musculus
  siRNA target sequence for MOR202-5 (NM_146701.1,925-943).
gccttaacattcttatttt

SEQ ID NO: 626896 - DNA, 19 bp, Mus musculus
  siRNA target sequence for MOR202-6 (NM_146700.1,537-555).
ccttgcagtaatgattgta

SEQ ID NO: 626897 - DNA, 19 bp, Mus musculus
  siRNA target sequence for MOR202-8 (NM_146698.1,82-100).
ctgttcactcttatctact

SEQ ID NO: 626898 - DNA, 19 bp, Mus musculus
  siRNA target sequence for MOR202-8 (NM_146698.1,89-107).
ctcttatctacttcatcaa

SEQ ID NO: 626899 - DNA, 19 bp, Mus musculus
  siRNA target sequence for MOR202-8 (NM_146698.1,320-338).
cggcagaaaattttctctt

SEQ ID NO: 626900 - DNA, 19 bp, Mus musculus
  siRNA target sequence for MOR202-8 (NM_146698.1,578-596).
gtgagatggtcctcctata

SEQ ID NO: 626901 - DNA, 19 bp, Mus musculus
  siRNA target sequence for MOR202-9 (NM_146697.1,68-86).
cccctctgtttatcataat

SEQ ID NO: 626902 - DNA, 19 bp, Mus musculus
  siRNA target sequence for MOR202-9 (NM_146697.1,218-236).
cagctgtagctccaacaat

SEQ ID NO: 626903 - DNA, 19 bp, Mus musculus
  siRNA target sequence for MOR202-9 (NM_146697.1,220-238).
gctgtagctccaacaattt

SEQ ID NO: 626904 - DNA, 19 bp, Mus musculus
  siRNA target sequence for MOR202-9 (NM_146697.1,289-307).
gctcagatgatctcattct

SEQ ID NO: 626905 - DNA, 19 bp, Mus musculus
  siRNA target sequence for MOR202-9 (NM_146697.1,402-420).
gactccaactgtgtgtata

SEQ ID NO: 626906 - DNA, 19 bp, Mus musculus
  siRNA target sequence for MOR202-9 (NM_146697.1,582-600).
gatagtactcatttatgga

SEQ ID NO: 626907 - DNA, 19 bp, Mus musculus
  siRNA target sequence for MOR203-1 (NM_146865.1,45-63).
gggattcgctggtcaaaat

SEQ ID NO: 626908 - DNA, 19 bp, Mus musculus
  siRNA target sequence for MOR203-1 (NM_146865.1,47-65).
gattcgctggtcaaaatga

SEQ ID NO: 626909 - DNA, 19 bp, Mus musculus
  siRNA target sequence for MOR203-1 (NM_146865.1,68-86).
cttggcacatcctctttgt

SEQ ID NO: 626910 - DNA, 19 bp, Mus musculus
  siRNA target sequence for MOR203-1 (NM_146865.1,239-257).
ggacactgcaaaattttgt

SEQ ID NO: 626911 - DNA, 19 bp, Mus musculus
  siRNA target sequence for MOR203-1 (NM_146865.1,284-302).
caggatgcttggctcaatt

SEQ ID NO: 626912 - DNA, 19 bp, Mus musculus
  siRNA target sequence for MOR203-1 (NM_146865.1,298-316).
caattactggtctatggta

SEQ ID NO: 626913 - DNA, 19 bp, Mus musculus
  siRNA target sequence for MOR203-1 (NM_146865.1,307-325).
gtctatggtatctttgtaa

SEQ ID NO: 626914 - DNA, 19 bp, Mus musculus
  siRNA target sequence for MOR203-1 (NM_146865.1,386-404).
cactgcgctatcctattat

SEQ ID NO: 626915 - DNA, 19 bp, Mus musculus
  siRNA target sequence for MOR203-1 (NM_146865.1,388-406).
ctgcgctatcctattatca

SEQ ID NO: 626916 - DNA, 19 bp, Mus musculus
  siRNA target sequence for MOR203-1 (NM_146865.1,391-409).
cgctatcctattatcatgt

SEQ ID NO: 626917 - DNA, 19 bp, Mus musculus
  siRNA target sequence for MOR203-1 (NM_146865.1,459-477).
cctaaatgccactgtaaat

SEQ ID NO: 626918 - DNA, 19 bp, Mus musculus
  siRNA target sequence for MOR203-1 (NM_146865.1,482-500).
gttttactttcttatctaa

SEQ ID NO: 626919 - DNA, 19 bp, Mus musculus
  siRNA target sequence for MOR203-1 (NM_146865.1,497-515).
ctaacttctgcaaatccaa

SEQ ID NO: 626920 - DNA, 19 bp, Mus musculus
  siRNA target sequence for MOR203-1 (NM_146865.1,569-587).
ccagtattgacctcaatat

SEQ ID NO: 626921 - DNA, 19 bp, Mus musculus
  siRNA target sequence for MOR203-1 (NM_146865.1,572-590).
gtattgacctcaatatcat

SEQ ID NO: 626922 - DNA, 19 bp, Mus musculus
  siRNA target sequence for MOR203-1 (NM_146865.1,607-625).
gttggttttaacttgacat

SEQ ID NO: 626923 - DNA, 19 bp, Mus musculus
  siRNA target sequence for MOR203-1 (NM_146865.1,618-636).
cttgacattcactgtatct

SEQ ID NO: 626924 - DNA, 19 bp, Mus musculus
  siRNA target sequence for MOR203-1 (NM_146865.1,621-639).
gacattcactgtatctgtt

SEQ ID NO: 626925 - DNA, 19 bp, Mus musculus
  siRNA target sequence for MOR203-1 (NM_146865.1,778-796).
gtacttcatgggactaaca

SEQ ID NO: 626926 - DNA, 19 bp, Mus musculus
  siRNA target sequence for MOR203-1 (NM_146865.1,791-809).
ctaacagatctcaagaaca

SEQ ID NO: 626927 - DNA, 19 bp, Mus musculus
  siRNA target sequence for MOR203-1 (NM_146865.1,820-838).
gcttctgtgttctatggta

SEQ ID NO: 626928 - DNA, 19 bp, Mus musculus
  siRNA target sequence for MOR203-1 (NM_146865.1,824-842).
ctgtgttctatggtattat

SEQ ID NO: 626929 - DNA, 19 bp, Mus musculus
  siRNA target sequence for MOR203-1 (NM_146865.1,826-844).
gtgttctatggtattatga

SEQ ID NO: 626930 - DNA, 19 bp, Mus musculus
  siRNA target sequence for MOR203-1 (NM_146865.1,828-846).
gttctatggtattatgatt

SEQ ID NO: 626931 - DNA, 19 bp, Mus musculus
  siRNA target sequence for MOR203-1 (NM_146865.1,906-924).
gcacataggaaacaaatgt

SEQ ID NO: 626932 - DNA, 19 bp, Mus musculus
  siRNA target sequence for MOR203-4 (NM_146433.1,255-273).
catggtcgaagataaatca

SEQ ID NO: 626933 - DNA, 19 bp, Mus musculus
  siRNA target sequence for MOR203-4 (NM_146433.1,258-276).
ggtcgaagataaatcaata

SEQ ID NO: 626934 - DNA, 19 bp, Mus musculus
  siRNA target sequence for MOR203-4 (NM_146433.1,259-277).
gtcgaagataaatcaataa

SEQ ID NO: 626935 - DNA, 19 bp, Mus musculus
  siRNA target sequence for MOR203-4 (NM_146433.1,500-518).
ccttctgtgcatcaaaaat

SEQ ID NO: 626936 - DNA, 19 bp, Mus musculus
  siRNA target sequence for MOR203-4 (NM_146433.1,506-524).
gtgcatcaaaaatcaatca

SEQ ID NO: 626937 - DNA, 19 bp, Mus musculus
  siRNA target sequence for MOR203-4 (NM_146433.1,508-526).
gcatcaaaaatcaatcact

SEQ ID NO: 626938 - DNA, 19 bp, Mus musculus
  siRNA target sequence for MOR203-4 (NM_146433.1,509-527).
catcaaaaatcaatcactt

SEQ ID NO: 626939 - DNA, 19 bp, Mus musculus
  siRNA target sequence for MOR203-4 (NM_146433.1,533-551).
gtgacattccgccaattgt

SEQ ID NO: 626940 - DNA, 19 bp, Mus musculus
  siRNA target sequence for MOR203-4 (NM_146433.1,535-553).
gacattccgccaattgtca

SEQ ID NO: 626941 - DNA, 19 bp, Mus musculus
  siRNA target sequence for MOR203-4 (NM_146433.1,541-559).
ccgccaattgtcactcttt

SEQ ID NO: 626942 - DNA, 19 bp, Mus musculus
  siRNA target sequence for MOR203-4 (NM_146433.1,574-592).
gacattaatttcatgctaa

SEQ ID NO: 626943 - DNA, 19 bp, Mus musculus
  siRNA target sequence for MOR203-4 (NM_146433.1,576-594).
cattaatttcatgctaatt

SEQ ID NO: 626944 - DNA, 19 bp, Mus musculus
  siRNA target sequence for MOR203-4 (NM_146433.1,626-644).
ctgtgtcagttgttatctt

SEQ ID NO: 626945 - DNA, 19 bp, Mus musculus
  siRNA target sequence for MOR203-4 (NM_146433.1,630-648).
gtcagttgttatcttatca

SEQ ID NO: 626946 - DNA, 19 bp, Mus musculus
  siRNA target sequence for MOR203-4 (NM_146433.1,632-650).
cagttgttatcttatcata

SEQ ID NO: 626947 - DNA, 19 bp, Mus musculus
  siRNA target sequence for MOR204-11 (NM_146736.1,129-147).
cagcataataaatttagta

SEQ ID NO: 626948 - DNA, 19 bp, Mus musculus
  siRNA target sequence for MOR204-11 (NM_146736.1,243-261).
gttaataggattcattgta

SEQ ID NO: 626949 - DNA, 19 bp, Mus musculus
  siRNA target sequence for MOR204-11 (NM_146736.1,403-421).
catatgtcttcccaaatct

SEQ ID NO: 626950 - DNA, 19 bp, Mus musculus
  siRNA target sequence for MOR204-11 (NM_146736.1,429-447).
cttagttggggcatcctat

SEQ ID NO: 626951 - DNA, 19 bp, Mus musculus
  siRNA target sequence for MOR204-13 (NM_146734.1,265-283).
ctggtggaaagacatacaa

SEQ ID NO: 626952 - DNA, 19 bp, Mus musculus
  siRNA target sequence for MOR204-13 (NM_146734.1,268-286).
gtggaaagacatacaatct

SEQ ID NO: 626953 - DNA, 19 bp, Mus musculus
  siRNA target sequence for MOR204-13 (NM_146734.1,303-321).
catccagctaggttctgtt

SEQ ID NO: 626954 - DNA, 19 bp, Mus musculus
  siRNA target sequence for MOR204-13 (NM_146734.1,431-449).
gtgtccaattgctcttaat

SEQ ID NO: 626955 - DNA, 19 bp, Mus musculus
  siRNA target sequence for MOR204-13 (NM_146734.1,460-478).
ggtggttttcttaacacat

SEQ ID NO: 626956 - DNA, 19 bp, Mus musculus
  siRNA target sequence for MOR204-13 (NM_146734.1,469-487).
cttaacacatggtctttca

SEQ ID NO: 626957 - DNA, 19 bp, Mus musculus
  siRNA target sequence for MOR204-13 (NM_146734.1,479-497).
ggtctttcactatatgttt

SEQ ID NO: 626958 - DNA, 19 bp, Mus musculus
  siRNA target sequence for MOR204-13 (NM_146734.1,482-500).
ctttcactatatgtttcta

SEQ ID NO: 626959 - DNA, 19 bp, Mus musculus
  siRNA target sequence for MOR204-13 (NM_146734.1,488-506).
ctatatgtttctattcgtt

SEQ ID NO: 626960 - DNA, 19 bp, Mus musculus
  siRNA target sequence for MOR204-13 (NM_146734.1,494-512).
gtttctattcgttagtctt

SEQ ID NO: 626961 - DNA, 19 bp, Mus musculus
  siRNA target sequence for MOR204-13 (NM_146734.1,518-536).
gacccaatggtgtcaatca

SEQ ID NO: 626962 - DNA, 19 bp, Mus musculus
  siRNA target sequence for MOR204-13 (NM_146734.1,521-539).
ccaatggtgtcaatcactt

SEQ ID NO: 626963 - DNA, 19 bp, Mus musculus
  siRNA target sequence for MOR204-13 (NM_146734.1,522-540).
caatggtgtcaatcacttt

SEQ ID NO: 626964 - DNA, 19 bp, Mus musculus
  siRNA target sequence for MOR204-13 (NM_146734.1,553-571).
gctccattaatagaacttt

SEQ ID NO: 626965 - DNA, 19 bp, Mus musculus
  siRNA target sequence for MOR204-14 (NM_146733.1,261-279).
cttcctggcagagaataat

SEQ ID NO: 626966 - DNA, 19 bp, Mus musculus
  siRNA target sequence for MOR204-14 (NM_146733.1,460-478).
gggagttctctaaatgctt

SEQ ID NO: 626967 - DNA, 19 bp, Mus musculus
  siRNA target sequence for MOR204-14 (NM_146733.1,608-626).
catgttctgctggcttaat

SEQ ID NO: 626968 - DNA, 19 bp, Mus musculus
  siRNA target sequence for MOR204-16 (NM_146499.1,475-493).
gcctcctttgccacagttt

SEQ ID NO: 626969 - DNA, 19 bp, Mus musculus
  siRNA target sequence for MOR204-6 (NM_146773.1,25-43).
gtaacagaggtgattcttt

SEQ ID NO: 626970 - DNA, 19 bp, Mus musculus
  siRNA target sequence for MOR204-6 (NM_146773.1,34-52).
gtgattcttttgggattta

SEQ ID NO: 626971 - DNA, 19 bp, Mus musculus
  siRNA target sequence for MOR204-6 (NM_146773.1,127-145).
gcgagcataatcatgctaa

SEQ ID NO: 626972 - DNA, 19 bp, Mus musculus
  siRNA target sequence for MOR204-6 (NM_146773.1,128-146).
cgagcataatcatgctaat

SEQ ID NO: 626973 - DNA, 19 bp, Mus musculus
  siRNA target sequence for MOR204-6 (NM_146773.1,294-312).
ggctcaactctgttctgta

SEQ ID NO: 626974 - DNA, 19 bp, Mus musculus
  siRNA target sequence for MOR204-6 (NM_146773.1,479-497).
ctggatgtttattaaacct

SEQ ID NO: 626975 - DNA, 19 bp, Mus musculus
  siRNA target sequence for MOR204-6 (NM_146773.1,603-621).
ctcttcagggtcgatcatt

SEQ ID NO: 626976 - DNA, 19 bp, Mus musculus
  siRNA target sequence for MOR204-6 (NM_146773.1,605-623).
cttcagggtcgatcattgt

SEQ ID NO: 626977 - DNA, 19 bp, Mus musculus
  siRNA target sequence for MOR206-1 (NM_146845.1,423-441).
ctacatcgttggagctata

SEQ ID NO: 626978 - DNA, 19 bp, Mus musculus
  siRNA target sequence for MOR206-1 (NM_146845.1,426-444).
catcgttggagctatagat

SEQ ID NO: 626979 - DNA, 19 bp, Mus musculus
  siRNA target sequence for MOR208-4 (NM_146277.1,495-513).
gaccagcctcacttttcaa

SEQ ID NO: 626980 - DNA, 19 bp, Mus musculus
  siRNA target sequence for MOR208-4 (NM_146277.1,530-548).
ccaatcacatcgaccattt

SEQ ID NO: 626981 - DNA, 19 bp, Mus musculus
  siRNA target sequence for MOR208-4 (NM_146277.1,598-616).
gtcaatgagctggtaatgt

SEQ ID NO: 626982 - DNA, 19 bp, Mus musculus
  siRNA target sequence for MOR208-4 (NM_146277.1,620-638).
ccatctgtggtttcattct

SEQ ID NO: 626983 - DNA, 19 bp, Mus musculus
  siRNA target sequence for MOR208-4 (NM_146277.1,776-794).
gaactgggattgctatata

SEQ ID NO: 626984 - DNA, 19 bp, Mus musculus
  siRNA target sequence for MOR208-4 (NM_146277.1,806-824).
gaggtttggcatctaaaga

SEQ ID NO: 626985 - DNA, 19 bp, Mus musculus
  siRNA target sequence for MOR210-2 (NM_146676.1,551-569).
ctcgaccagttcagagatt

SEQ ID NO: 626986 - DNA, 19 bp, Mus musculus
  siRNA target sequence for MOR210-2 (NM_146676.1,559-577).
gttcagagattatcttgta

SEQ ID NO: 626987 - DNA, 19 bp, Mus musculus
  siRNA target sequence for MOR210-2 (NM_146676.1,562-580).
cagagattatcttgtaata

SEQ ID NO: 626988 - DNA, 19 bp, Mus musculus
  siRNA target sequence for MOR210-2 (NM_146676.1,611-629).
cattatccagcatcattat

SEQ ID NO: 626989 - DNA, 19 bp, Mus musculus
  siRNA target sequence for MOR212-1 (NM_146741.1,21-39).
cttcgtgactgagttcttt

SEQ ID NO: 626990 - DNA, 19 bp, Mus musculus
  siRNA target sequence for MOR212-1 (NM_146741.1,42-60).
gactgcattcactgaacat

SEQ ID NO: 626991 - DNA, 19 bp, Mus musculus
  siRNA target sequence for MOR212-1 (NM_146741.1,128-146).
caggaatgatcattctaat

SEQ ID NO: 626992 - DNA, 19 bp, Mus musculus
  siRNA target sequence for MOR212-1 (NM_146741.1,150-168).
gaagaaccgccgacttcaa

SEQ ID NO: 626993 - DNA, 19 bp, Mus musculus
  siRNA target sequence for MOR212-1 (NM_146741.1,153-171).
gaaccgccgacttcaaaca

SEQ ID NO: 626994 - DNA, 19 bp, Mus musculus
  siRNA target sequence for MOR212-1 (NM_146741.1,258-276).
ggaacatggctcaaccatt

SEQ ID NO: 626995 - DNA, 19 bp, Mus musculus
  siRNA target sequence for MOR212-1 (NM_146741.1,259-277).
gaacatggctcaaccattt

SEQ ID NO: 626996 - DNA, 19 bp, Mus musculus
  siRNA target sequence for MOR212-1 (NM_146741.1,287-305).
gctgtgcagttcaattctt

SEQ ID NO: 626997 - DNA, 19 bp, Mus musculus
  siRNA target sequence for MOR212-1 (NM_146741.1,378-396).
gtgccaaccattgctttat

SEQ ID NO: 626998 - DNA, 19 bp, Mus musculus
  siRNA target sequence for MOR212-1 (NM_146741.1,380-398).
gccaaccattgctttatgt

SEQ ID NO: 626999 - DNA, 19 bp, Mus musculus
  siRNA target sequence for MOR212-1 (NM_146741.1,442-460).
gcatatgtggctggttttt

SEQ ID NO: 627000 - DNA, 19 bp, Mus musculus
  siRNA target sequence for MOR212-1 (NM_146741.1,538-556).
gacctccccccattgttaa

SEQ ID NO: 627001 - DNA, 19 bp, Mus musculus
  siRNA target sequence for MOR212-1 (NM_146741.1,566-584).
gtggggacagctacattca

SEQ ID NO: 627002 - DNA, 19 bp, Mus musculus
  siRNA target sequence for MOR212-1 (NM_146741.1,569-587).
gggacagctacattcaaga

SEQ ID NO: 627003 - DNA, 19 bp, Mus musculus
  siRNA target sequence for MOR212-1 (NM_146741.1,588-606).
ggtggtgataattgttttt

SEQ ID NO: 627004 - DNA, 19 bp, Mus musculus
  siRNA target sequence for MOR212-1 (NM_146741.1,663-681).
cattgtggccattatgcaa

SEQ ID NO: 627005 - DNA, 19 bp, Mus musculus
  siRNA target sequence for MOR212-1 (NM_146741.1,695-713).
gaggccgagccaaaacttt

SEQ ID NO: 627006 - DNA, 19 bp, Mus musculus
  siRNA target sequence for MOR212-1 (NM_146741.1,697-715).
ggccgagccaaaactttct

SEQ ID NO: 627007 - DNA, 19 bp, Mus musculus
  siRNA target sequence for MOR212-1 (NM_146741.1,771-789).
catgtacttgagagataat

SEQ ID NO: 627008 - DNA, 19 bp, Mus musculus
  siRNA target sequence for MOR212-1 (NM_146741.1,774-792).
gtacttgagagataataca

SEQ ID NO: 627009 - DNA, 19 bp, Mus musculus
  siRNA target sequence for MOR212-1 (NM_146741.1,838-856).
gtggtgaccccattactga

SEQ ID NO: 627010 - DNA, 19 bp, Mus musculus
  siRNA target sequence for MOR212-1 (NM_146741.1,840-858).
ggtgaccccattactgaat

SEQ ID NO: 627011 - DNA, 19 bp, Mus musculus
  siRNA target sequence for MOR212-1 (NM_146741.1,889-907).
gtaaaagaggcaattacga

SEQ ID NO: 627012 - DNA, 19 bp, Mus musculus
  siRNA target sequence for MOR213-2 (NM_146762.1,3-21).
ggatcagaataataatact

SEQ ID NO: 627013 - DNA, 19 bp, Mus musculus
  siRNA target sequence for MOR213-2 (NM_146762.1,9-27).
gaataataatactgttagt

SEQ ID NO: 627014 - DNA, 19 bp, Mus musculus
  siRNA target sequence for MOR213-2 (NM_146762.1,48-66).
cacaacagatcctgtgata

SEQ ID NO: 627015 - DNA, 19 bp, Mus musculus
  siRNA target sequence for MOR213-2 (NM_146762.1,94-112).
gttgtgtacacattgactt

SEQ ID NO: 627016 - DNA, 19 bp, Mus musculus
  siRNA target sequence for MOR213-2 (NM_146762.1,97-115).
gtgtacacattgactttga

SEQ ID NO: 627017 - DNA, 19 bp, Mus musculus
  siRNA target sequence for MOR213-2 (NM_146762.1,118-136).
ggaaatagctccctcatta

SEQ ID NO: 627018 - DNA, 19 bp, Mus musculus
  siRNA target sequence for MOR213-2 (NM_146762.1,202-220).
ctggaccttggattgtctt

SEQ ID NO: 627019 - DNA, 19 bp, Mus musculus
  siRNA target sequence for MOR213-2 (NM_146762.1,316-334).
ctggactatactgaatgtt

SEQ ID NO: 627020 - DNA, 19 bp, Mus musculus
  siRNA target sequence for MOR213-2 (NM_146762.1,466-484).
gtgatcattaccaaagaca

SEQ ID NO: 627021 - DNA, 19 bp, Mus musculus
  siRNA target sequence for MOR213-3 (NM_146571.1,475-493).
catactgccaacactttca

SEQ ID NO: 627022 - DNA, 19 bp, Mus musculus
  siRNA target sequence for MOR213-3 (NM_146571.1,538-556).
gatgtgcttccattggtaa

SEQ ID NO: 627023 - DNA, 19 bp, Mus musculus
  siRNA target sequence for MOR213-3 (NM_146571.1,541-559).
gtgcttccattggtaaaaa

SEQ ID NO: 627024 - DNA, 19 bp, Mus musculus
  siRNA target sequence for MOR213-3 (NM_146571.1,573-591).
cacccgtgtctatgtgaaa

SEQ ID NO: 627025 - DNA, 19 bp, Mus musculus
  siRNA target sequence for MOR213-3 (NM_146571.1,817-835).
gtagctgccatgttctata

SEQ ID NO: 627026 - DNA, 19 bp, Mus musculus
  siRNA target sequence for MOR213-3 (NM_146571.1,906-924).
gaagttgatgcagactata

SEQ ID NO: 627027 - DNA, 19 bp, Mus musculus
  siRNA target sequence for MOR213-4 (NM_146570.1,137-155).
cattgtcagggaacatgtt

SEQ ID NO: 627028 - DNA, 19 bp, Mus musculus
  siRNA target sequence for MOR213-4 (NM_146570.1,250-268).
gtatatacccccaaaatat

SEQ ID NO: 627029 - DNA, 19 bp, Mus musculus
  siRNA target sequence for MOR213-4 (NM_146570.1,378-396).
ggcttatgaccgacattct

SEQ ID NO: 627030 - DNA, 19 bp, Mus musculus
  siRNA target sequence for MOR213-4 (NM_146570.1,385-403).
gaccgacattctgcaattt

SEQ ID NO: 627031 - DNA, 19 bp, Mus musculus
  siRNA target sequence for MOR213-4 (NM_146570.1,454-472).
ctagtagctgggtgttaca

SEQ ID NO: 627032 - DNA, 19 bp, Mus musculus
  siRNA target sequence for MOR213-4 (NM_146570.1,562-580).
gatgcaccacccttggtaa

SEQ ID NO: 627033 - DNA, 19 bp, Mus musculus
  siRNA target sequence for MOR213-4 (NM_146570.1,565-583).
gcaccacccttggtaaaaa

SEQ ID NO: 627034 - DNA, 19 bp, Mus musculus
  siRNA target sequence for MOR213-4 (NM_146570.1,566-584).
caccacccttggtaaaaat

SEQ ID NO: 627035 - DNA, 19 bp, Mus musculus
  siRNA target sequence for MOR213-4 (NM_146570.1,595-613).
gatacccgtgtctatgaaa

SEQ ID NO: 627036 - DNA, 19 bp, Mus musculus
  siRNA target sequence for MOR213-4 (NM_146570.1,599-617).
cccgtgtctatgaaaaagt

SEQ ID NO: 627037 - DNA, 19 bp, Mus musculus
  siRNA target sequence for MOR213-4 (NM_146570.1,762-780).
ctctgtcatgctgttctat

SEQ ID NO: 627038 - DNA, 19 bp, Mus musculus
  siRNA target sequence for MOR213-4 (NM_146570.1,766-784).
gtcatgctgttctatggtt

SEQ ID NO: 627039 - DNA, 19 bp, Mus musculus
  siRNA target sequence for MOR213-4 (NM_146570.1,815-833).
caacctactctctagaaaa

SEQ ID NO: 627040 - DNA, 19 bp, Mus musculus
  siRNA target sequence for MOR213-4 (NM_146570.1,818-836).
cctactctctagaaaagga

SEQ ID NO: 627041 - DNA, 19 bp, Mus musculus
  siRNA target sequence for MOR213-5 (NM_146569.1,119-137).
gaaacagcaccctcattgt

SEQ ID NO: 627042 - DNA, 19 bp, Mus musculus
  siRNA target sequence for MOR213-5 (NM_146569.1,125-143).
gcaccctcattgtgttgat

SEQ ID NO: 627043 - DNA, 19 bp, Mus musculus
  siRNA target sequence for MOR213-5 (NM_146569.1,211-229).
ggattgtccacagtctata

SEQ ID NO: 627044 - DNA, 19 bp, Mus musculus
  siRNA target sequence for MOR213-5 (NM_146569.1,311-329).
ctggacttgggtatactga

SEQ ID NO: 627045 - DNA, 19 bp, Mus musculus
  siRNA target sequence for MOR213-5 (NM_146569.1,320-338).
ggtatactgagtgttatct

SEQ ID NO: 627046 - DNA, 19 bp, Mus musculus
  siRNA target sequence for MOR213-5 (NM_146569.1,495-513).
gactttctgcaatgataat

SEQ ID NO: 627047 - DNA, 19 bp, Mus musculus
  siRNA target sequence for MOR213-5 (NM_146569.1,497-515).
ctttctgcaatgataatgt

SEQ ID NO: 627048 - DNA, 19 bp, Mus musculus
  siRNA target sequence for MOR213-5 (NM_146569.1,576-594).
gagctttcagtctgtgtta

SEQ ID NO: 627049 - DNA, 19 bp, Mus musculus
  siRNA target sequence for MOR213-5 (NM_146569.1,783-801).
ccggtccagctactcttta

SEQ ID NO: 627050 - DNA, 19 bp, Mus musculus
  siRNA target sequence for MOR213-5 (NM_146569.1,785-803).
ggtccagctactctttaga

SEQ ID NO: 627051 - DNA, 19 bp, Mus musculus
  siRNA target sequence for MOR213-5 (NM_146569.1,786-804).
gtccagctactctttagat

SEQ ID NO: 627052 - DNA, 19 bp, Mus musculus
  siRNA target sequence for MOR213-6 (NM_146568.1,95-113).
gagtatattccctgacatt

SEQ ID NO: 627053 - DNA, 19 bp, Mus musculus
  siRNA target sequence for MOR213-6 (NM_146568.1,125-143).
ccaccctcatcatattgat

SEQ ID NO: 627054 - DNA, 19 bp, Mus musculus
  siRNA target sequence for MOR213-6 (NM_146568.1,126-144).
caccctcatcatattgata

SEQ ID NO: 627055 - DNA, 19 bp, Mus musculus
  siRNA target sequence for MOR213-6 (NM_146568.1,132-150).
catcatattgatatgcaat

SEQ ID NO: 627056 - DNA, 19 bp, Mus musculus
  siRNA target sequence for MOR213-6 (NM_146568.1,280-298).
gcaggatgtctgtctcaat

SEQ ID NO: 627057 - DNA, 19 bp, Mus musculus
  siRNA target sequence for MOR213-6 (NM_146568.1,287-305).
gtctgtctcaattcttttt

SEQ ID NO: 627058 - DNA, 19 bp, Mus musculus
  siRNA target sequence for MOR213-6 (NM_146568.1,375-393).
ctcgaatcccctgctttat

SEQ ID NO: 627059 - DNA, 19 bp, Mus musculus
  siRNA target sequence for MOR213-6 (NM_146568.1,449-467).
gaggatttgtcaatgcaat

SEQ ID NO: 627060 - DNA, 19 bp, Mus musculus
  siRNA target sequence for MOR213-6 (NM_146568.1,459-477).
caatgcaataatattaact

SEQ ID NO: 627061 - DNA, 19 bp, Mus musculus
  siRNA target sequence for MOR213-6 (NM_146568.1,476-494).
ctagcaacacattcacatt

SEQ ID NO: 627062 - DNA, 19 bp, Mus musculus
  siRNA target sequence for MOR213-6 (NM_146568.1,508-526).
gacaatgtcattgatgatt

SEQ ID NO: 627063 - DNA, 19 bp, Mus musculus
  siRNA target sequence for MOR213-6 (NM_146568.1,549-567).
ggtgaagttggcatgtgat

SEQ ID NO: 627064 - DNA, 19 bp, Mus musculus
  siRNA target sequence for MOR213-6 (NM_146568.1,604-622).
ctagcttccaatgtcattt

SEQ ID NO: 627065 - DNA, 19 bp, Mus musculus
  siRNA target sequence for MOR213-6 (NM_146568.1,778-796).
cggccaagttccagttatt

SEQ ID NO: 627066 - DNA, 19 bp, Mus musculus
  siRNA target sequence for MOR214-2 (NM_146687.1,271-289).
caaaaaaggcaaactatca

SEQ ID NO: 627067 - DNA, 19 bp, Mus musculus
  siRNA target sequence for MOR214-2 (NM_146687.1,466-484).
ggatttataggttctgtat

SEQ ID NO: 627068 - DNA, 19 bp, Mus musculus
  siRNA target sequence for MOR214-2 (NM_146687.1,596-614).
cacacgtagagcttctcat

SEQ ID NO: 627069 - DNA, 19 bp, Mus musculus
  siRNA target sequence for MOR214-2 (NM_146687.1,601-619).
gtagagcttctcatattaa

SEQ ID NO: 627070 - DNA, 19 bp, Mus musculus
  siRNA target sequence for MOR214-2 (NM_146687.1,643-661).
gctttagtcatcataatat

SEQ ID NO: 627071 - DNA, 19 bp, Mus musculus
  siRNA target sequence for MOR214-2 (NM_146687.1,765-783).
ctacacctccactgctttt

SEQ ID NO: 627072 - DNA, 19 bp, Mus musculus
  siRNA target sequence for MOR214-2 (NM_146687.1,910-928).
gctggaaagaggttacaga

SEQ ID NO: 627073 - DNA, 19 bp, Mus musculus
  siRNA target sequence for MOR214-3 (NM_146686.1,72-90).
cacagtacctctttttgta

SEQ ID NO: 627074 - DNA, 19 bp, Mus musculus
  siRNA target sequence for MOR214-3 (NM_146686.1,115-133).
gctgtaacctggaactttt

SEQ ID NO: 627075 - DNA, 19 bp, Mus musculus
  siRNA target sequence for MOR214-4 (NM_146685.1,587-605).
cacatgtcctacttgtcat

SEQ ID NO: 627076 - DNA, 19 bp, Mus musculus
  siRNA target sequence for MOR214-4 (NM_146685.1,668-686).
cctcgtccatcatgaagat

SEQ ID NO: 627077 - DNA, 19 bp, Mus musculus
  siRNA target sequence for MOR215-3 (NM_146682.1,29-47).
catcagtaaccatgttcat

SEQ ID NO: 627078 - DNA, 19 bp, Mus musculus
  siRNA target sequence for MOR215-3 (NM_146682.1,79-97).
cgaatcttcctctttctga

SEQ ID NO: 627079 - DNA, 19 bp, Mus musculus
  siRNA target sequence for MOR215-3 (NM_146682.1,96-114).
gactttcttgagcatctat

SEQ ID NO: 627080 - DNA, 19 bp, Mus musculus
  siRNA target sequence for MOR215-3 (NM_146682.1,156-174).
cagaggtgacatccattta

SEQ ID NO: 627081 - DNA, 19 bp, Mus musculus
  siRNA target sequence for MOR215-3 (NM_146682.1,160-178).
ggtgacatccatttacaca

SEQ ID NO: 627082 - DNA, 19 bp, Mus musculus
  siRNA target sequence for MOR215-3 (NM_146682.1,264-282).
ctttcgagagcaaaagact

SEQ ID NO: 627083 - DNA, 19 bp, Mus musculus
  siRNA target sequence for MOR215-3 (NM_146682.1,268-286).
cgagagcaaaagactatct

SEQ ID NO: 627084 - DNA, 19 bp, Mus musculus
  siRNA target sequence for MOR215-3 (NM_146682.1,601-619).
gtgaatttcctcatagtga

SEQ ID NO: 627085 - DNA, 19 bp, Mus musculus
  siRNA target sequence for MOR215-3 (NM_146682.1,628-646).
ggtgggacgtcatttctca

SEQ ID NO: 627086 - DNA, 19 bp, Mus musculus
  siRNA target sequence for MOR215-3 (NM_146682.1,629-647).
gtgggacgtcatttctcat

SEQ ID NO: 627087 - DNA, 19 bp, Mus musculus
  siRNA target sequence for MOR215-3 (NM_146682.1,654-672).
gatctcctacagttacata

SEQ ID NO: 627088 - DNA, 19 bp, Mus musculus
  siRNA target sequence for MOR215-3 (NM_146682.1,767-785).
ggacggcacttttcatgta

SEQ ID NO: 627089 - DNA, 19 bp, Mus musculus
  siRNA target sequence for MOR220-2 (NM_146620.1,322-340).
gtagagattcaattcctta

SEQ ID NO: 627090 - DNA, 19 bp, Mus musculus
  siRNA target sequence for MOR220-2 (NM_146620.1,629-647).
cattcattgctgtatcata

SEQ ID NO: 627091 - DNA, 19 bp, Mus musculus
  siRNA target sequence for MOR220-2 (NM_146620.1,755-773).
ctggggcgtatgtatatct

SEQ ID NO: 627092 - DNA, 19 bp, Mus musculus
  siRNA target sequence for MOR220-2 (NM_146620.1,757-775).
ggggcgtatgtatatctaa

SEQ ID NO: 627093 - DNA, 19 bp, Mus musculus
  siRNA target sequence for MOR220-3 (NM_146618.1,382-400).
ctcctctaccctatgatta

SEQ ID NO: 627094 - DNA, 19 bp, Mus musculus
  siRNA target sequence for MOR220-3 (NM_146618.1,461-479).
caggtatgaacactttcaa

SEQ ID NO: 627095 - DNA, 19 bp, Mus musculus
  siRNA target sequence for MOR224-10 (NM_146367.1,122-140).
ccttgttcctggtctttta

SEQ ID NO: 627096 - DNA, 19 bp, Mus musculus
  siRNA target sequence for MOR224-10 (NM_146367.1,332-350).
cacagattttcttctatca

SEQ ID NO: 627097 - DNA, 19 bp, Mus musculus
  siRNA target sequence for MOR224-10 (NM_146367.1,428-446).
gatatacggtcatcatgaa

SEQ ID NO: 627098 - DNA, 19 bp, Mus musculus
  siRNA target sequence for MOR224-10 (NM_146367.1,453-471).
ggtgtgtacctgctttaca

SEQ ID NO: 627099 - DNA, 19 bp, Mus musculus
  siRNA target sequence for MOR224-10 (NM_146367.1,619-637).
gcgcagactgtgagtttta

SEQ ID NO: 627100 - DNA, 19 bp, Mus musculus
  siRNA target sequence for MOR224-10 (NM_146367.1,621-639).
gcagactgtgagttttact

SEQ ID NO: 627101 - DNA, 19 bp, Mus musculus
  siRNA target sequence for MOR224-10 (NM_146367.1,622-640).
cagactgtgagttttacta

SEQ ID NO: 627102 - DNA, 19 bp, Mus musculus
  siRNA target sequence for MOR224-10 (NM_146367.1,624-642).
gactgtgagttttactaat

SEQ ID NO: 627103 - DNA, 19 bp, Mus musculus
  siRNA target sequence for MOR224-10 (NM_146367.1,649-667).
gttgttgcgctcacatgtt

SEQ ID NO: 627104 - DNA, 19 bp, Mus musculus
  siRNA target sequence for MOR224-10 (NM_146367.1,681-699).
cacttcttacactcgtatt

SEQ ID NO: 627105 - DNA, 19 bp, Mus musculus
  siRNA target sequence for MOR224-10 (NM_146367.1,797-815).
ccgtgattctcgtgtatct

SEQ ID NO: 627106 - DNA, 19 bp, Mus musculus
  siRNA target sequence for MOR224-10 (NM_146367.1,799-817).
gtgattctcgtgtatctca

SEQ ID NO: 627107 - DNA, 19 bp, Mus musculus
  siRNA target sequence for MOR224-10 (NM_146367.1,930-948).
cctgagaaagatgttaagt

SEQ ID NO: 627108 - DNA, 19 bp, Mus musculus
  siRNA target sequence for MOR224-10 (NM_146367.1,933-951).
gagaaagatgttaagtcaa

SEQ ID NO: 627109 - DNA, 19 bp, Mus musculus
  siRNA target sequence for MOR224-10 (NM_146367.1,947-965).
gtcaagcaatgcaaccttt

SEQ ID NO: 627110 - DNA, 19 bp, Mus musculus
  siRNA target sequence for MOR224-10 (NM_146367.1,961-979).
cctttggggtataaggaat

SEQ ID NO: 627111 - DNA, 19 bp, Mus musculus
  siRNA target sequence for MOR224-3 (NM_146508.1,116-134).
gaaacttattaatcttact

SEQ ID NO: 627112 - DNA, 19 bp, Mus musculus
  siRNA target sequence for MOR224-3 (NM_146508.1,181-199).
ctatgtaaattgtctattt

SEQ ID NO: 627113 - DNA, 19 bp, Mus musculus
  siRNA target sequence for MOR224-3 (NM_146508.1,378-396).
cccattacgctactcaata

SEQ ID NO: 627114 - DNA, 19 bp, Mus musculus
  siRNA target sequence for MOR224-3 (NM_146508.1,379-397).
ccattacgctactcaataa

SEQ ID NO: 627115 - DNA, 19 bp, Mus musculus
  siRNA target sequence for MOR224-3 (NM_146508.1,380-398).
cattacgctactcaataat

SEQ ID NO: 627116 - DNA, 19 bp, Mus musculus
  siRNA target sequence for MOR224-3 (NM_146508.1,426-444).
ggccacggggacatccttt

SEQ ID NO: 627117 - DNA, 19 bp, Mus musculus
  siRNA target sequence for MOR224-3 (NM_146508.1,427-445).
gccacggggacatcctttt

SEQ ID NO: 627118 - DNA, 19 bp, Mus musculus
  siRNA target sequence for MOR224-3 (NM_146508.1,429-447).
cacggggacatcctttttt

SEQ ID NO: 627119 - DNA, 19 bp, Mus musculus
  siRNA target sequence for MOR224-3 (NM_146508.1,607-625).
ctgatgccgctcagttgtt

SEQ ID NO: 627120 - DNA, 19 bp, Mus musculus
  siRNA target sequence for MOR224-3 (NM_146508.1,651-669).
ctgcatcgtctgctctatt

SEQ ID NO: 627121 - DNA, 19 bp, Mus musculus
  siRNA target sequence for MOR224-3 (NM_146508.1,731-749).
ctgccatcttgcttttcta

SEQ ID NO: 627122 - DNA, 19 bp, Mus musculus
  siRNA target sequence for MOR224-3 (NM_146508.1,757-775).
gttgtcctcatatacttaa

SEQ ID NO: 627123 - DNA, 19 bp, Mus musculus
  siRNA target sequence for MOR224-3 (NM_146508.1,889-907).
ctgtggaaggtcttacgta

SEQ ID NO: 627124 - DNA, 19 bp, Mus musculus
  siRNA target sequence for MOR224-3 (NM_146508.1,891-909).
gtggaaggtcttacgtaaa

SEQ ID NO: 627125 - DNA, 19 bp, Mus musculus
  siRNA target sequence for MOR224-3 (NM_146508.1,894-912).
gaaggtcttacgtaaacct

SEQ ID NO: 627126 - DNA, 19 bp, Mus musculus
  siRNA target sequence for MOR225-4 (NM_146778.1,52-70).
gaggatgtcaaggcaatat

SEQ ID NO: 627127 - DNA, 19 bp, Mus musculus
  siRNA target sequence for MOR225-4 (NM_146778.1,54-72).
ggatgtcaaggcaatatgt

SEQ ID NO: 627128 - DNA, 19 bp, Mus musculus
  siRNA target sequence for MOR225-4 (NM_146778.1,110-128).
gtggaaacctggttgttct

SEQ ID NO: 627129 - DNA, 19 bp, Mus musculus
  siRNA target sequence for MOR225-4 (NM_146778.1,117-135).
cctggttgttcttcttact

SEQ ID NO: 627130 - DNA, 19 bp, Mus musculus
  siRNA target sequence for MOR225-4 (NM_146778.1,118-136).
ctggttgttcttcttacta

SEQ ID NO: 627131 - DNA, 19 bp, Mus musculus
  siRNA target sequence for MOR225-4 (NM_146778.1,121-139).
gttgttcttcttactatca

SEQ ID NO: 627132 - DNA, 19 bp, Mus musculus
  siRNA target sequence for MOR225-4 (NM_146778.1,241-259).
ggcctattggtacaatgta

SEQ ID NO: 627133 - DNA, 19 bp, Mus musculus
  siRNA target sequence for MOR225-4 (NM_146778.1,242-260).
gcctattggtacaatgtaa

SEQ ID NO: 627134 - DNA, 19 bp, Mus musculus
  siRNA target sequence for MOR225-4 (NM_146778.1,244-262).
ctattggtacaatgtaaca

SEQ ID NO: 627135 - DNA, 19 bp, Mus musculus
  siRNA target sequence for MOR225-4 (NM_146778.1,281-299).
gcatagcccagatgtttta

SEQ ID NO: 627136 - DNA, 19 bp, Mus musculus
  siRNA target sequence for MOR225-4 (NM_146778.1,371-389).
gcagacccctttactacat

SEQ ID NO: 627137 - DNA, 19 bp, Mus musculus
  siRNA target sequence for MOR225-4 (NM_146778.1,374-392).
gacccctttactacatgat

SEQ ID NO: 627138 - DNA, 19 bp, Mus musculus
  siRNA target sequence for MOR225-4 (NM_146778.1,376-394).
cccctttactacatgatca

SEQ ID NO: 627139 - DNA, 19 bp, Mus musculus
  siRNA target sequence for MOR225-4 (NM_146778.1,421-439).
cttgtgataggctcagttt

SEQ ID NO: 627140 - DNA, 19 bp, Mus musculus
  siRNA target sequence for MOR225-4 (NM_146778.1,492-510).
cttttgtggcagcaatgaa

SEQ ID NO: 627141 - DNA, 19 bp, Mus musculus
  siRNA target sequence for MOR225-4 (NM_146778.1,566-584).
caagactcctggttattgt

SEQ ID NO: 627142 - DNA, 19 bp, Mus musculus
  siRNA target sequence for MOR225-4 (NM_146778.1,569-587).
gactcctggttattgtaat

SEQ ID NO: 627143 - DNA, 19 bp, Mus musculus
  siRNA target sequence for MOR225-4 (NM_146778.1,571-589).
ctcctggttattgtaatca

SEQ ID NO: 627144 - DNA, 19 bp, Mus musculus
  siRNA target sequence for MOR225-4 (NM_146778.1,576-594).
ggttattgtaatcattact

SEQ ID NO: 627145 - DNA, 19 bp, Mus musculus
  siRNA target sequence for MOR225-4 (NM_146778.1,577-595).
gttattgtaatcattacta

SEQ ID NO: 627146 - DNA, 19 bp, Mus musculus
  siRNA target sequence for MOR225-4 (NM_146778.1,609-627).
gtccattctgacctttgtt

SEQ ID NO: 627147 - DNA, 19 bp, Mus musculus
  siRNA target sequence for MOR225-4 (NM_146778.1,747-765).
gccactcatctttacctat

SEQ ID NO: 627148 - DNA, 19 bp, Mus musculus
  siRNA target sequence for MOR225-4 (NM_146778.1,795-813).
caaggtgtttgctctgttt

SEQ ID NO: 627149 - DNA, 19 bp, Mus musculus
  siRNA target sequence for MOR225-4 (NM_146778.1,818-836).
ccatgattgccccattgtt

SEQ ID NO: 627150 - DNA, 19 bp, Mus musculus
  siRNA target sequence for MOR225-4 (NM_146778.1,891-909).
ggtgtggtgccaagacaaa

SEQ ID NO: 627151 - DNA, 19 bp, Mus musculus
  siRNA target sequence for MOR227-1 (NM_146985.1,134-152).
caatggtcattgtcagtaa

SEQ ID NO: 627152 - DNA, 19 bp, Mus musculus
  siRNA target sequence for MOR227-1 (NM_146985.1,138-156).
ggtcattgtcagtaagagt

SEQ ID NO: 627153 - DNA, 19 bp, Mus musculus
  siRNA target sequence for MOR227-1 (NM_146985.1,312-330).
cttgggagtggctgagata

SEQ ID NO: 627154 - DNA, 19 bp, Mus musculus
  siRNA target sequence for MOR227-1 (NM_146985.1,574-592).
gtggagagtgtcattgtaa

SEQ ID NO: 627155 - DNA, 19 bp, Mus musculus
  siRNA target sequence for MOR227-1 (NM_146985.1,585-603).
cattgtaatggccaatagt

SEQ ID NO: 627156 - DNA, 19 bp, Mus musculus
  siRNA target sequence for MOR227-1 (NM_146985.1,597-615).
caatagtggtttaattgct

SEQ ID NO: 627157 - DNA, 19 bp, Mus musculus
  siRNA target sequence for MOR227-1 (NM_146985.1,661-679).
gtcaatttgaggaagcatt

SEQ ID NO: 627158 - DNA, 19 bp, Mus musculus
  siRNA target sequence for MOR227-5 (NM_146793.1,3-21).
ggtccatgaaaataacgta

SEQ ID NO: 627159 - DNA, 19 bp, Mus musculus
  siRNA target sequence for MOR227-5 (NM_146793.1,4-22).
gtccatgaaaataacgtaa

SEQ ID NO: 627160 - DNA, 19 bp, Mus musculus
  siRNA target sequence for MOR229-1 (NM_146979.1,10-28).
gcaagcaatgttacagaaa

SEQ ID NO: 627161 - DNA, 19 bp, Mus musculus
  siRNA target sequence for MOR229-1 (NM_146979.1,14-32).
gcaatgttacagaaataat

SEQ ID NO: 627162 - DNA, 19 bp, Mus musculus
  siRNA target sequence for MOR229-1 (NM_146979.1,122-140).
gccttattgtggtgactat

SEQ ID NO: 627163 - DNA, 19 bp, Mus musculus
  siRNA target sequence for MOR229-1 (NM_146979.1,199-217).
gtagaagtctgctactgtt

SEQ ID NO: 627164 - DNA, 19 bp, Mus musculus
  siRNA target sequence for MOR229-1 (NM_146979.1,463-481).
gctggacaaactttcctta

SEQ ID NO: 627165 - DNA, 19 bp, Mus musculus
  siRNA target sequence for MOR229-1 (NM_146979.1,574-592).
ctcattagcctgttagtca

SEQ ID NO: 627166 - DNA, 19 bp, Mus musculus
  siRNA target sequence for MOR229-1 (NM_146979.1,680-698).
cagcagaaggacgacataa

SEQ ID NO: 627167 - DNA, 19 bp, Mus musculus
  siRNA target sequence for MOR229-1 (NM_146979.1,694-712).
cataaggcactctctactt

SEQ ID NO: 627168 - DNA, 19 bp, Mus musculus
  siRNA target sequence for MOR229-1 (NM_146979.1,844-862).
cccattatttactctttca

SEQ ID NO: 627169 - DNA, 19 bp, Mus musculus
  siRNA target sequence for MOR230-4 (NM_146753.1,123-141).
ccttatcattgttactatt

SEQ ID NO: 627170 - DNA, 19 bp, Mus musculus
  siRNA target sequence for MOR230-4 (NM_146753.1,438-456).
ctgtgtgggatcctgtata

SEQ ID NO: 627171 - DNA, 19 bp, Mus musculus
  siRNA target sequence for MOR230-4 (NM_146753.1,445-463).
ggatcctgtatacattcat

SEQ ID NO: 627172 - DNA, 19 bp, Mus musculus
  siRNA target sequence for MOR230-4 (NM_146753.1,457-475).
cattcatcagttcagataa

SEQ ID NO: 627173 - DNA, 19 bp, Mus musculus
  siRNA target sequence for MOR230-4 (NM_146753.1,461-479).
catcagttcagataattct

SEQ ID NO: 627174 - DNA, 19 bp, Mus musculus
  siRNA target sequence for MOR230-4 (NM_146753.1,634-652).
ctcatggtctcatatatca

SEQ ID NO: 627175 - DNA, 19 bp, Mus musculus
  siRNA target sequence for MOR230-4 (NM_146753.1,636-654).
catggtctcatatatcatt

SEQ ID NO: 627176 - DNA, 19 bp, Mus musculus
  siRNA target sequence for MOR230-4 (NM_146753.1,900-918).
gagcaaaaaaatttctgat

SEQ ID NO: 627177 - DNA, 19 bp, Mus musculus
  siRNA target sequence for MOR230-7 (NM_146461.1,124-142).
cttatcattgctacaatca

SEQ ID NO: 627178 - DNA, 19 bp, Mus musculus
  siRNA target sequence for MOR230-7 (NM_146461.1,221-239).
ccatagctccaagaacaat

SEQ ID NO: 627179 - DNA, 19 bp, Mus musculus
  siRNA target sequence for MOR230-7 (NM_146461.1,222-240).
catagctccaagaacaatt

SEQ ID NO: 627180 - DNA, 19 bp, Mus musculus
  siRNA target sequence for MOR230-8 (NM_146458.1,906-924).
gaaaatcgtgtcagatgat

SEQ ID NO: 627181 - DNA, 19 bp, Mus musculus
  siRNA target sequence for MOR231-1 (NM_146983.1,90-108).
gctctcctatgttttgact

SEQ ID NO: 627182 - DNA, 19 bp, Mus musculus
  siRNA target sequence for MOR231-1 (NM_146983.1,126-144).
cattgttatgactgtaact

SEQ ID NO: 627183 - DNA, 19 bp, Mus musculus
  siRNA target sequence for MOR231-1 (NM_146983.1,199-217).
gtggatatcatttattctt

SEQ ID NO: 627184 - DNA, 19 bp, Mus musculus
  siRNA target sequence for MOR231-1 (NM_146983.1,249-267).
gttctttggtcaaaataca

SEQ ID NO: 627185 - DNA, 19 bp, Mus musculus
  siRNA target sequence for MOR231-1 (NM_146983.1,294-312).
gctattcacagaacacttt

SEQ ID NO: 627186 - DNA, 19 bp, Mus musculus
  siRNA target sequence for MOR231-1 (NM_146983.1,421-439).
gtgctgttgatattatctt

SEQ ID NO: 627187 - DNA, 19 bp, Mus musculus
  siRNA target sequence for MOR231-1 (NM_146983.1,440-458).
ggatcggaggatttttgca

SEQ ID NO: 627188 - DNA, 19 bp, Mus musculus
  siRNA target sequence for MOR231-1 (NM_146983.1,449-467).
gatttttgcactcagtaat

SEQ ID NO: 627189 - DNA, 19 bp, Mus musculus
  siRNA target sequence for MOR231-1 (NM_146983.1,471-489).
gctcagtactatttatgga

SEQ ID NO: 627190 - DNA, 19 bp, Mus musculus
  siRNA target sequence for MOR231-1 (NM_146983.1,560-578).
gtattgacacctatgtcat

SEQ ID NO: 627191 - DNA, 19 bp, Mus musculus
  siRNA target sequence for MOR231-1 (NM_146983.1,574-592).
gtcattggcctcttagtga

SEQ ID NO: 627192 - DNA, 19 bp, Mus musculus
  siRNA target sequence for MOR231-1 (NM_146983.1,609-627).
gatctgcacggttgtgttt

SEQ ID NO: 627193 - DNA, 19 bp, Mus musculus
  siRNA target sequence for MOR231-1 (NM_146983.1,633-651).
cctgctcatctcttatggt

SEQ ID NO: 627194 - DNA, 19 bp, Mus musculus
  siRNA target sequence for MOR231-1 (NM_146983.1,897-915).
gtggagaaggaaaattatt

SEQ ID NO: 627195 - DNA, 19 bp, Mus musculus
  siRNA target sequence for MOR231-13 (NM_146476.1,55-73).
cctgttggccaaaaagcat

SEQ ID NO: 627196 - DNA, 19 bp, Mus musculus
  siRNA target sequence for MOR231-13 (NM_146476.1,58-76).
gttggccaaaaagcattat

SEQ ID NO: 627197 - DNA, 19 bp, Mus musculus
  siRNA target sequence for MOR231-13 (NM_146476.1,107-125).
ccatggcaggcaatttgat

SEQ ID NO: 627198 - DNA, 19 bp, Mus musculus
  siRNA target sequence for MOR231-13 (NM_146476.1,108-126).
catggcaggcaatttgatt

SEQ ID NO: 627199 - DNA, 19 bp, Mus musculus
  siRNA target sequence for MOR231-13 (NM_146476.1,111-129).
ggcaggcaatttgattatt

SEQ ID NO: 627200 - DNA, 19 bp, Mus musculus
  siRNA target sequence for MOR231-13 (NM_146476.1,461-479).
ccatggctcaagttctctt

SEQ ID NO: 627201 - DNA, 19 bp, Mus musculus
  siRNA target sequence for MOR231-13 (NM_146476.1,526-544).
gcctgtgatatgtatccat

SEQ ID NO: 627202 - DNA, 19 bp, Mus musculus
  siRNA target sequence for MOR231-13 (NM_146476.1,621-639).
ggtgtttgttattctgtta

SEQ ID NO: 627203 - DNA, 19 bp, Mus musculus
  siRNA target sequence for MOR231-13 (NM_146476.1,729-747).
ggtcgttatcctatttttt

SEQ ID NO: 627204 - DNA, 19 bp, Mus musculus
  siRNA target sequence for MOR231-13 (NM_146476.1,732-750).
cgttatcctattttttgtt

SEQ ID NO: 627205 - DNA, 19 bp, Mus musculus
  siRNA target sequence for MOR231-13 (NM_146476.1,790-808).
cctgttgataaatcagtta

SEQ ID NO: 627206 - DNA, 19 bp, Mus musculus
  siRNA target sequence for MOR231-13 (NM_146476.1,793-811).
gttgataaatcagttacta

SEQ ID NO: 627207 - DNA, 19 bp, Mus musculus
  siRNA target sequence for MOR231-13 (NM_146476.1,919-937).
gatagactaaggaaatctt

SEQ ID NO: 627208 - DNA, 19 bp, Mus musculus
  siRNA target sequence for MOR231-14 (NM_146455.1,105-123).
gactatagtaggtaatcta

SEQ ID NO: 627209 - DNA, 19 bp, Mus musculus
  siRNA target sequence for MOR231-14 (NM_146455.1,107-125).
ctatagtaggtaatctact

SEQ ID NO: 627210 - DNA, 19 bp, Mus musculus
  siRNA target sequence for MOR231-14 (NM_146455.1,155-173).
ccttagggactccaatgta

SEQ ID NO: 627211 - DNA, 19 bp, Mus musculus
  siRNA target sequence for MOR231-14 (NM_146455.1,249-267).
gctctgtgatagaaaaaca

SEQ ID NO: 627212 - DNA, 19 bp, Mus musculus
  siRNA target sequence for MOR231-14 (NM_146455.1,608-626).
caatatgtatgttagtctt

SEQ ID NO: 627213 - DNA, 19 bp, Mus musculus
  siRNA target sequence for MOR231-14 (NM_146455.1,634-652).
ctcataatttcctatggaa

SEQ ID NO: 627214 - DNA, 19 bp, Mus musculus
  siRNA target sequence for MOR231-14 (NM_146455.1,882-900).
gtctatggaaaatctatta

SEQ ID NO: 627215 - DNA, 19 bp, Mus musculus
  siRNA target sequence for MOR231-14 (NM_146455.1,906-924).
ggtattccctagagataaa

SEQ ID NO: 627216 - DNA, 19 bp, Mus musculus
  siRNA target sequence for MOR231-14 (NM_146455.1,907-925).
gtattccctagagataaaa

SEQ ID NO: 627217 - DNA, 19 bp, Mus musculus
  siRNA target sequence for MOR231-2 (NM_146973.1,62-80).
gccaaaaggttctgtttgt

SEQ ID NO: 627218 - DNA, 19 bp, Mus musculus
  siRNA target sequence for MOR231-2 (NM_146973.1,181-199).
ctggcttatttgtcattta

SEQ ID NO: 627219 - DNA, 19 bp, Mus musculus
  siRNA target sequence for MOR231-2 (NM_146973.1,202-220).
gatactgtctattctactt

SEQ ID NO: 627220 - DNA, 19 bp, Mus musculus
  siRNA target sequence for MOR231-2 (NM_146973.1,244-262).
gacttgctctatgaaacaa

SEQ ID NO: 627221 - DNA, 19 bp, Mus musculus
  siRNA target sequence for MOR231-2 (NM_146973.1,279-297).
ggcttgtatgactcaagtt

SEQ ID NO: 627222 - DNA, 19 bp, Mus musculus
  siRNA target sequence for MOR231-2 (NM_146973.1,280-298).
gcttgtatgactcaagttt

SEQ ID NO: 627223 - DNA, 19 bp, Mus musculus
  siRNA target sequence for MOR231-2 (NM_146973.1,281-299).
cttgtatgactcaagtttt

SEQ ID NO: 627224 - DNA, 19 bp, Mus musculus
  siRNA target sequence for MOR231-2 (NM_146973.1,284-302).
gtatgactcaagtttttat

SEQ ID NO: 627225 - DNA, 19 bp, Mus musculus
  siRNA target sequence for MOR231-2 (NM_146973.1,292-310).
caagtttttatagatcatt

SEQ ID NO: 627226 - DNA, 19 bp, Mus musculus
  siRNA target sequence for MOR231-2 (NM_146973.1,317-335).
ctggagctgaggttattct

SEQ ID NO: 627227 - DNA, 19 bp, Mus musculus
  siRNA target sequence for MOR231-2 (NM_146973.1,320-338).
gagctgaggttattcttct

SEQ ID NO: 627228 - DNA, 19 bp, Mus musculus
  siRNA target sequence for MOR231-2 (NM_146973.1,561-579).
caccaatacctaccttata

SEQ ID NO: 627229 - DNA, 19 bp, Mus musculus
  siRNA target sequence for MOR231-2 (NM_146973.1,580-598).
gggctttgtatgattgcta

SEQ ID NO: 627230 - DNA, 19 bp, Mus musculus
  siRNA target sequence for MOR231-2 (NM_146973.1,581-599).
ggctttgtatgattgctaa

SEQ ID NO: 627231 - DNA, 19 bp, Mus musculus
  siRNA target sequence for MOR231-2 (NM_146973.1,614-632).
gtaccgtcacctttttaat

SEQ ID NO: 627232 - DNA, 19 bp, Mus musculus
  siRNA target sequence for MOR231-2 (NM_146973.1,617-635).
ccgtcacctttttaattct

SEQ ID NO: 627233 - DNA, 19 bp, Mus musculus
  siRNA target sequence for MOR231-2 (NM_146973.1,663-681).
ctcccttaaggcacatagt

SEQ ID NO: 627234 - DNA, 19 bp, Mus musculus
  siRNA target sequence for MOR231-2 (NM_146973.1,665-683).
cccttaaggcacatagtct

SEQ ID NO: 627235 - DNA, 19 bp, Mus musculus
  siRNA target sequence for MOR231-2 (NM_146973.1,775-793).
cctacatccacatttccaa

SEQ ID NO: 627236 - DNA, 19 bp, Mus musculus
  siRNA target sequence for MOR231-2 (NM_146973.1,779-797).
catccacatttccaattga

SEQ ID NO: 627237 - DNA, 19 bp, Mus musculus
  siRNA target sequence for MOR231-2 (NM_146973.1,918-936).
catcgtaagtgggctatat

SEQ ID NO: 627238 - DNA, 19 bp, Mus musculus
  siRNA target sequence for MOR231-2 (NM_146973.1,922-940).
gtaagtgggctatatcact

SEQ ID NO: 627239 - DNA, 19 bp, Mus musculus
  siRNA target sequence for MOR231-3 (NM_146970.1,58-76).
gaaggccagaaaatattat

SEQ ID NO: 627240 - DNA, 19 bp, Mus musculus
  siRNA target sequence for MOR231-3 (NM_146970.1,107-125).
caatggcaggcaatctact

SEQ ID NO: 627241 - DNA, 19 bp, Mus musculus
  siRNA target sequence for MOR231-3 (NM_146970.1,144-162).
ggtcagcccaagtttagat

SEQ ID NO: 627242 - DNA, 19 bp, Mus musculus
  siRNA target sequence for MOR231-3 (NM_146970.1,177-195).
ctttcttggctacttatca

SEQ ID NO: 627243 - DNA, 19 bp, Mus musculus
  siRNA target sequence for MOR231-3 (NM_146970.1,221-239).
cagttacaccaaatatgat

SEQ ID NO: 627244 - DNA, 19 bp, Mus musculus
  siRNA target sequence for MOR231-3 (NM_146970.1,246-264).
cttactctatgagaagaaa

SEQ ID NO: 627245 - DNA, 19 bp, Mus musculus
  siRNA target sequence for MOR231-3 (NM_146970.1,320-338).
gagctgagatcttactatt

SEQ ID NO: 627246 - DNA, 19 bp, Mus musculus
  siRNA target sequence for MOR231-3 (NM_146970.1,323-341).
ctgagatcttactattagt

SEQ ID NO: 627247 - DNA, 19 bp, Mus musculus
  siRNA target sequence for MOR231-3 (NM_146970.1,534-552).
catgtatcccttattaaaa

SEQ ID NO: 627248 - DNA, 19 bp, Mus musculus
  siRNA target sequence for MOR231-3 (NM_146970.1,639-657).
catttcttacggggtaatt

SEQ ID NO: 627249 - DNA, 19 bp, Mus musculus
  siRNA target sequence for MOR231-3 (NM_146970.1,792-810).
cattgataagtcattgact

SEQ ID NO: 627250 - DNA, 19 bp, Mus musculus
  siRNA target sequence for MOR231-3 (NM_146970.1,891-909).
gaaactatgggcaagtaaa

SEQ ID NO: 627251 - DNA, 19 bp, Mus musculus
  siRNA target sequence for MOR231-4 (NM_146969.1,229-247).
cccaatttgattataggtt

SEQ ID NO: 627252 - DNA, 19 bp, Mus musculus
  siRNA target sequence for MOR231-4 (NM_146969.1,769-787).
gctaggcctgtttccaatt

SEQ ID NO: 627253 - DNA, 19 bp, Mus musculus
  siRNA target sequence for MOR231-4 (NM_146969.1,770-788).
ctaggcctgtttccaattt

SEQ ID NO: 627254 - DNA, 19 bp, Mus musculus
  siRNA target sequence for MOR231-4 (NM_146969.1,782-800).
ccaatttttccattgataa

SEQ ID NO: 627255 - DNA, 19 bp, Mus musculus
  siRNA target sequence for MOR231-4 (NM_146969.1,822-840).
ggttgttagtcctatgctt

SEQ ID NO: 627256 - DNA, 19 bp, Mus musculus
  siRNA target sequence for MOR231-5 (NM_146968.1,30-48).
catttttgtgggtcttagt

SEQ ID NO: 627257 - DNA, 19 bp, Mus musculus
  siRNA target sequence for MOR231-5 (NM_146968.1,126-144).
cattgcacttacagtgatt

SEQ ID NO: 627258 - DNA, 19 bp, Mus musculus
  siRNA target sequence for MOR231-5 (NM_146968.1,680-698).
gtcgggaaggaagacataa

SEQ ID NO: 627259 - DNA, 19 bp, Mus musculus
  siRNA target sequence for MOR231-5 (NM_146968.1,900-918).
gtgtaaaactctaacaaca

SEQ ID NO: 627260 - DNA, 19 bp, Mus musculus
  siRNA target sequence for MOR231-6 (NM_146966.1,4-22).
ggagagactaacaatgtca

SEQ ID NO: 627261 - DNA, 19 bp, Mus musculus
  siRNA target sequence for MOR231-6 (NM_146966.1,244-262).
gacttagtttgtgataaaa

SEQ ID NO: 627262 - DNA, 19 bp, Mus musculus
  siRNA target sequence for MOR231-6 (NM_146966.1,409-427).
caggtttgtatctcacttt

SEQ ID NO: 627263 - DNA, 19 bp, Mus musculus
  siRNA target sequence for MOR231-6 (NM_146966.1,628-646).
gtccttcttctattttcct

SEQ ID NO: 627264 - DNA, 19 bp, Mus musculus
  siRNA target sequence for MOR231-6 (NM_146966.1,637-655).
ctattttcctatggaatta

SEQ ID NO: 627265 - DNA, 19 bp, Mus musculus
  siRNA target sequence for MOR231-6 (NM_146966.1,657-675).
cttaagctcccttaagact

SEQ ID NO: 627266 - DNA, 19 bp, Mus musculus
  siRNA target sequence for MOR231-6 (NM_146966.1,894-912).
gctctggagtaaaatgata

SEQ ID NO: 627267 - DNA, 19 bp, Mus musculus
  siRNA target sequence for MOR231-6 (NM_146966.1,899-917).
ggagtaaaatgataagtat

SEQ ID NO: 627268 - DNA, 19 bp, Mus musculus
  siRNA target sequence for MOR231-6 (NM_146966.1,923-941).
gagtaagaatttttgcata

SEQ ID NO: 627269 - DNA, 19 bp, Mus musculus
  siRNA target sequence for MOR231-8 (NM_146808.1,252-270).
ctgcaatagaagaacaatt

SEQ ID NO: 627270 - DNA, 19 bp, Mus musculus
  siRNA target sequence for MOR231-8 (NM_146808.1,285-303).
cattggccagctctttgta

SEQ ID NO: 627271 - DNA, 19 bp, Mus musculus
  siRNA target sequence for MOR231-8 (NM_146808.1,466-484).
gttcaagtcatcgttgttt

SEQ ID NO: 627272 - DNA, 19 bp, Mus musculus
  siRNA target sequence for MOR231-8 (NM_146808.1,541-559).
ccattactgggcttagcat

SEQ ID NO: 627273 - DNA, 19 bp, Mus musculus
  siRNA target sequence for MOR231-8 (NM_146808.1,614-632).
gtatgacggtctttatcct

SEQ ID NO: 627274 - DNA, 19 bp, Mus musculus
  siRNA target sequence for MOR231-8 (NM_146808.1,899-917).
ggtgtgaaagattaactat

SEQ ID NO: 627275 - DNA, 19 bp, Mus musculus
  siRNA target sequence for MOR231-8 (NM_146808.1,904-922).
gaaagattaactatggaaa

SEQ ID NO: 627276 - DNA, 19 bp, Mus musculus
  siRNA target sequence for MOR231-8 (NM_146808.1,908-926).
gattaactatggaaagatt

SEQ ID NO: 627277 - DNA, 19 bp, Mus musculus
  siRNA target sequence for MOR231-8 (NM_146808.1,914-932).
ctatggaaagattgagaat

SEQ ID NO: 627278 - DNA, 19 bp, Mus musculus
  siRNA target sequence for MOR232-2 (NM_146981.1,261-279).
gaaaacaatctccttcaat

SEQ ID NO: 627279 - DNA, 19 bp, Mus musculus
  siRNA target sequence for MOR232-2 (NM_146981.1,382-400).
ctacactacatgatcacaa

SEQ ID NO: 627280 - DNA, 19 bp, Mus musculus
  siRNA target sequence for MOR232-2 (NM_146981.1,532-550).
gaccttttcccgctcttaa

SEQ ID NO: 627281 - DNA, 19 bp, Mus musculus
  siRNA target sequence for MOR232-2 (NM_146981.1,570-588).
ccacatctttggactcttt

SEQ ID NO: 627282 - DNA, 19 bp, Mus musculus
  siRNA target sequence for MOR232-2 (NM_146981.1,603-621).
cgggctaatgtgtatgcta

SEQ ID NO: 627283 - DNA, 19 bp, Mus musculus
  siRNA target sequence for MOR232-2 (NM_146981.1,604-622).
gggctaatgtgtatgctaa

SEQ ID NO: 627284 - DNA, 19 bp, Mus musculus
  siRNA target sequence for MOR232-2 (NM_146981.1,605-623).
ggctaatgtgtatgctaat

SEQ ID NO: 627285 - DNA, 19 bp, Mus musculus
  siRNA target sequence for MOR232-2 (NM_146981.1,606-624).
gctaatgtgtatgctaatt

SEQ ID NO: 627286 - DNA, 19 bp, Mus musculus
  siRNA target sequence for MOR232-2 (NM_146981.1,607-625).
ctaatgtgtatgctaattt

SEQ ID NO: 627287 - DNA, 19 bp, Mus musculus
  siRNA target sequence for MOR232-2 (NM_146981.1,781-799).
gtcatcttcccctttgaca

SEQ ID NO: 627288 - DNA, 19 bp, Mus musculus
  siRNA target sequence for MOR232-3 (NM_146978.1,244-262).
gactcactccatgaaaaaa

SEQ ID NO: 627289 - DNA, 19 bp, Mus musculus
  siRNA target sequence for MOR232-3 (NM_146978.1,435-453).
ggtatgggtcggaggtttt

SEQ ID NO: 627290 - DNA, 19 bp, Mus musculus
  siRNA target sequence for MOR232-3 (NM_146978.1,713-731).
gtgtctcccacataacagt

SEQ ID NO: 627291 - DNA, 19 bp, Mus musculus
  siRNA target sequence for MOR232-3 (NM_146978.1,779-797).
cagccactttgtctattga

SEQ ID NO: 627292 - DNA, 19 bp, Mus musculus
  siRNA target sequence for MOR232-3 (NM_146978.1,782-800).
ccactttgtctattgataa

SEQ ID NO: 627293 - DNA, 19 bp, Mus musculus
  siRNA target sequence for MOR232-3 (NM_146978.1,783-801).
cactttgtctattgataaa

SEQ ID NO: 627294 - DNA, 19 bp, Mus musculus
  siRNA target sequence for MOR232-3 (NM_146978.1,805-823).
gttgctgtcttctacacta

SEQ ID NO: 627295 - DNA, 19 bp, Mus musculus
  siRNA target sequence for MOR232-3 (NM_146978.1,813-831).
cttctacactatgataact

SEQ ID NO: 627296 - DNA, 19 bp, Mus musculus
  siRNA target sequence for MOR232-3 (NM_146978.1,883-901).
gccattaagaaattgtgta

SEQ ID NO: 627297 - DNA, 19 bp, Mus musculus
  siRNA target sequence for MOR232-3 (NM_146978.1,891-909).
gaaattgtgtagatggaaa

SEQ ID NO: 627298 - DNA, 19 bp, Mus musculus
  siRNA target sequence for MOR232-9 (NM_146341.1,910-928).
gtaacttcagatagtaatt

SEQ ID NO: 627299 - DNA, 19 bp, Mus musculus
  siRNA target sequence for MOR233-1 (NM_146971.1,102-120).
gaacatactgtgtgttgta

SEQ ID NO: 627300 - DNA, 19 bp, Mus musculus
  siRNA target sequence for MOR233-10 (NM_146892.1,107-125).
ctattggaggcaacatagt

SEQ ID NO: 627301 - DNA, 19 bp, Mus musculus
  siRNA target sequence for MOR233-10 (NM_146892.1,124-142).
gtaattgtggtaacaatct

SEQ ID NO: 627302 - DNA, 19 bp, Mus musculus
  siRNA target sequence for MOR233-10 (NM_146892.1,902-920).
ggaggagattgtttaatat

SEQ ID NO: 627303 - DNA, 19 bp, Mus musculus
  siRNA target sequence for MOR233-13 (NM_146459.1,3-21).
gcaaaaccaaaccattgta

SEQ ID NO: 627304 - DNA, 19 bp, Mus musculus
  siRNA target sequence for MOR233-13 (NM_146459.1,64-82).
gagaagctcctatttgtta

SEQ ID NO: 627305 - DNA, 19 bp, Mus musculus
  siRNA target sequence for MOR233-13 (NM_146459.1,919-937).
gctcctgacatattaaaat

SEQ ID NO: 627306 - DNA, 19 bp, Mus musculus
  siRNA target sequence for MOR233-18 (NM_146323.1,247-265).
gactctctctacaagagaa

SEQ ID NO: 627307 - DNA, 19 bp, Mus musculus
  siRNA target sequence for MOR233-18 (NM_146323.1,249-267).
ctctctctacaagagaaaa

SEQ ID NO: 627308 - DNA, 19 bp, Mus musculus
  siRNA target sequence for MOR233-18 (NM_146323.1,320-338).
gtggggctgagatgattct

SEQ ID NO: 627309 - DNA, 19 bp, Mus musculus
  siRNA target sequence for MOR233-18 (NM_146323.1,523-541).
catttcatgtgcgacttat

SEQ ID NO: 627310 - DNA, 19 bp, Mus musculus
  siRNA target sequence for MOR233-18 (NM_146323.1,531-549).
gtgcgacttatttccatta

SEQ ID NO: 627311 - DNA, 19 bp, Mus musculus
  siRNA target sequence for MOR233-18 (NM_146323.1,563-581).
gcaccgacactcacatctt

SEQ ID NO: 627312 - DNA, 19 bp, Mus musculus
  siRNA target sequence for MOR233-18 (NM_146323.1,605-623).
gtgggttgatctgtattat

SEQ ID NO: 627313 - DNA, 19 bp, Mus musculus
  siRNA target sequence for MOR233-18 (NM_146323.1,608-626).
ggttgatctgtattatagt

SEQ ID NO: 627314 - DNA, 19 bp, Mus musculus
  siRNA target sequence for MOR233-18 (NM_146323.1,828-846).
gctatcccccttgcttaat

SEQ ID NO: 627315 - DNA, 19 bp, Mus musculus
  siRNA target sequence for MOR233-18 (NM_146323.1,912-930).
ggtaatggtttcagatgaa

SEQ ID NO: 627316 - DNA, 19 bp, Mus musculus
  siRNA target sequence for MOR233-18 (NM_146323.1,913-931).
gtaatggtttcagatgaaa

SEQ ID NO: 627317 - DNA, 19 bp, Mus musculus
  siRNA target sequence for MOR233-3 (NM_146902.1,480-498).
gtttactttgcaattacca

SEQ ID NO: 627318 - DNA, 19 bp, Mus musculus
  siRNA target sequence for MOR233-5 (NM_146900.1,117-135).
caacatgatgattatagca

SEQ ID NO: 627319 - DNA, 19 bp, Mus musculus
  siRNA target sequence for MOR233-5 (NM_146900.1,228-246).
cacacccaagcttatttta

SEQ ID NO: 627320 - DNA, 19 bp, Mus musculus
  siRNA target sequence for MOR233-5 (NM_146900.1,568-586).
gatacacacatttttgtct

SEQ ID NO: 627321 - DNA, 19 bp, Mus musculus
  siRNA target sequence for MOR233-5 (NM_146900.1,583-601).
gtctttttggtctttgcaa

SEQ ID NO: 627322 - DNA, 19 bp, Mus musculus
  siRNA target sequence for MOR233-5 (NM_146900.1,598-616).
gcaaatagtggctctatct

SEQ ID NO: 627323 - DNA, 19 bp, Mus musculus
  siRNA target sequence for MOR233-5 (NM_146900.1,683-701).
gttccgaaggacgacttaa

SEQ ID NO: 627324 - DNA, 19 bp, Mus musculus
  siRNA target sequence for MOR233-5 (NM_146900.1,687-705).
cgaaggacgacttaaagct

SEQ ID NO: 627325 - DNA, 19 bp, Mus musculus
  siRNA target sequence for MOR233-5 (NM_146900.1,782-800).
catcaccattcccatatga

SEQ ID NO: 627326 - DNA, 19 bp, Mus musculus
  siRNA target sequence for MOR233-5 (NM_146900.1,911-929).
ctaaagtggtttctgataa

SEQ ID NO: 627327 - DNA, 19 bp, Mus musculus
  siRNA target sequence for MOR233-7 (NM_146898.1,93-111).
catctacattgcaacagtt

SEQ ID NO: 627328 - DNA, 19 bp, Mus musculus
  siRNA target sequence for MOR233-7 (NM_146898.1,132-150).
ggtaaccatcatatgtagt

SEQ ID NO: 627329 - DNA, 19 bp, Mus musculus
  siRNA target sequence for MOR233-7 (NM_146898.1,223-241).
gtcatcacaccaaaggtaa

SEQ ID NO: 627330 - DNA, 19 bp, Mus musculus
  siRNA target sequence for MOR233-7 (NM_146898.1,238-256).
gtaactgtggacttgcttt

SEQ ID NO: 627331 - DNA, 19 bp, Mus musculus
  siRNA target sequence for MOR233-7 (NM_146898.1,264-282).
gagaaccatttcttttgaa

SEQ ID NO: 627332 - DNA, 19 bp, Mus musculus
  siRNA target sequence for MOR234-1 (NM_146974.1,431-449).
gaatcgtggggtttgttca

SEQ ID NO: 627333 - DNA, 19 bp, Mus musculus
  siRNA target sequence for MOR234-1 (NM_146974.1,440-458).
ggtttgttcatggaatgat

SEQ ID NO: 627334 - DNA, 19 bp, Mus musculus
  siRNA target sequence for MOR234-1 (NM_146974.1,456-474).
gatacagactacatttata

SEQ ID NO: 627335 - DNA, 19 bp, Mus musculus
  siRNA target sequence for MOR234-1 (NM_146974.1,564-582).
cactctggggccactgata

SEQ ID NO: 627336 - DNA, 19 bp, Mus musculus
  siRNA target sequence for MOR234-1 (NM_146974.1,777-795).
cttccacattgacaaaatt

SEQ ID NO: 627337 - DNA, 19 bp, Mus musculus
  siRNA target sequence for MOR234-1 (NM_146974.1,893-911).
ggtcaaatcatgtcaaaca

SEQ ID NO: 627338 - DNA, 19 bp, Mus musculus
  siRNA target sequence for MOR234-2 (NM_146794.1,444-462).
cattcacggagcaatacaa

SEQ ID NO: 627339 - DNA, 19 bp, Mus musculus
  siRNA target sequence for MOR234-2 (NM_146794.1,448-466).
cacggagcaatacaaactt

SEQ ID NO: 627340 - DNA, 19 bp, Mus musculus
  siRNA target sequence for MOR234-2 (NM_146794.1,455-473).
caatacaaactttatttat

SEQ ID NO: 627341 - DNA, 19 bp, Mus musculus
  siRNA target sequence for MOR234-3 (NM_146474.1,447-465).
ccatggagggatacagatt

SEQ ID NO: 627342 - DNA, 19 bp, Mus musculus
  siRNA target sequence for MOR235-2 (NM_146454.1,9-27).
ccacagtcctcccagtaat

SEQ ID NO: 627343 - DNA, 19 bp, Mus musculus
  siRNA target sequence for MOR235-2 (NM_146454.1,19-37).
cccagtaatgtgactgaat

SEQ ID NO: 627344 - DNA, 19 bp, Mus musculus
  siRNA target sequence for MOR235-2 (NM_146454.1,20-38).
ccagtaatgtgactgaatt

SEQ ID NO: 627345 - DNA, 19 bp, Mus musculus
  siRNA target sequence for MOR235-2 (NM_146454.1,23-41).
gtaatgtgactgaatttgt

SEQ ID NO: 627346 - DNA, 19 bp, Mus musculus
  siRNA target sequence for MOR235-2 (NM_146454.1,60-78).
gaatccacgcttgcaaaaa

SEQ ID NO: 627347 - DNA, 19 bp, Mus musculus
  siRNA target sequence for MOR235-2 (NM_146454.1,65-83).
cacgcttgcaaaaaatact

SEQ ID NO: 627348 - DNA, 19 bp, Mus musculus
  siRNA target sequence for MOR235-2 (NM_146454.1,72-90).
gcaaaaaatactgttcatt

SEQ ID NO: 627349 - DNA, 19 bp, Mus musculus
  siRNA target sequence for MOR235-2 (NM_146454.1,322-340).
ctgggaggatcagagatta

SEQ ID NO: 627350 - DNA, 19 bp, Mus musculus
  siRNA target sequence for MOR235-2 (NM_146454.1,336-354).
gattatcctcctcattgtt

SEQ ID NO: 627351 - DNA, 19 bp, Mus musculus
  siRNA target sequence for MOR235-2 (NM_146454.1,447-465).
ctggattggagggatctta

SEQ ID NO: 627352 - DNA, 19 bp, Mus musculus
  siRNA target sequence for MOR235-2 (NM_146454.1,449-467).
ggattggagggatcttaca

SEQ ID NO: 627353 - DNA, 19 bp, Mus musculus
  siRNA target sequence for MOR235-2 (NM_146454.1,450-468).
gattggagggatcttacat

SEQ ID NO: 627354 - DNA, 19 bp, Mus musculus
  siRNA target sequence for MOR235-2 (NM_146454.1,470-488).
ccaccatgcaaatattttt

SEQ ID NO: 627355 - DNA, 19 bp, Mus musculus
  siRNA target sequence for MOR235-2 (NM_146454.1,541-559).
gatctcttcccattgttga

SEQ ID NO: 627356 - DNA, 19 bp, Mus musculus
  siRNA target sequence for MOR235-2 (NM_146454.1,613-631).
ggggctatgtgctttctca

SEQ ID NO: 627357 - DNA, 19 bp, Mus musculus
  siRNA target sequence for MOR235-2 (NM_146454.1,614-632).
gggctatgtgctttctcat

SEQ ID NO: 627358 - DNA, 19 bp, Mus musculus
  siRNA target sequence for MOR235-2 (NM_146454.1,642-660).
gcttctcatctcatacata

SEQ ID NO: 627359 - DNA, 19 bp, Mus musculus
  siRNA target sequence for MOR235-2 (NM_146454.1,670-688).
cgatccttgaagtctcata

SEQ ID NO: 627360 - DNA, 19 bp, Mus musculus
  siRNA target sequence for MOR235-2 (NM_146454.1,675-693).
cttgaagtctcatagttct

SEQ ID NO: 627361 - DNA, 19 bp, Mus musculus
  siRNA target sequence for MOR235-2 (NM_146454.1,757-775).
gtcccttgcatatttactt

SEQ ID NO: 627362 - DNA, 19 bp, Mus musculus
  siRNA target sequence for MOR235-2 (NM_146454.1,794-812).
cctacccagtggataagct

SEQ ID NO: 627363 - DNA, 19 bp, Mus musculus
  siRNA target sequence for MOR235-2 (NM_146454.1,814-832).
gtgactgtgttttttgcaa

SEQ ID NO: 627364 - DNA, 19 bp, Mus musculus
  siRNA target sequence for MOR235-2 (NM_146454.1,818-836).
ctgtgttttttgcaattct

SEQ ID NO: 627365 - DNA, 19 bp, Mus musculus
  siRNA target sequence for MOR235-2 (NM_146454.1,888-906).
gaacgctatgaggaatcta

SEQ ID NO: 627366 - DNA, 19 bp, Mus musculus
  siRNA target sequence for MOR238-1 (NM_146972.1,197-215).
gctattcctcttctatcat

SEQ ID NO: 627367 - DNA, 19 bp, Mus musculus
  siRNA target sequence for MOR238-1 (NM_146972.1,264-282).
ccatggctgcatgatacaa

SEQ ID NO: 627368 - DNA, 19 bp, Mus musculus
  siRNA target sequence for MOR238-1 (NM_146972.1,409-427).
gtcctagtcggggtatgtt

SEQ ID NO: 627369 - DNA, 19 bp, Mus musculus
  siRNA target sequence for MOR238-1 (NM_146972.1,415-433).
gtcggggtatgttggataa

SEQ ID NO: 627370 - DNA, 19 bp, Mus musculus
  siRNA target sequence for MOR238-1 (NM_146972.1,581-599).
ctgcaaatggtggtgtaat

SEQ ID NO: 627371 - DNA, 19 bp, Mus musculus
  siRNA target sequence for MOR238-1 (NM_146972.1,633-651).
ctatgcggtcattctcttt

SEQ ID NO: 627372 - DNA, 19 bp, Mus musculus
  siRNA target sequence for MOR238-1 (NM_146972.1,637-655).
gcggtcattctcttttcct

SEQ ID NO: 627373 - DNA, 19 bp, Mus musculus
  siRNA target sequence for MOR238-1 (NM_146972.1,638-656).
cggtcattctcttttcctt

SEQ ID NO: 627374 - DNA, 19 bp, Mus musculus
  siRNA target sequence for MOR238-1 (NM_146972.1,738-756).
gccatgcatttatacatat

SEQ ID NO: 627375 - DNA, 19 bp, Mus musculus
  siRNA target sequence for MOR238-1 (NM_146972.1,759-777).
gcggccagtaacaactttt

SEQ ID NO: 627376 - DNA, 19 bp, Mus musculus
  siRNA target sequence for MOR238-1 (NM_146972.1,761-779).
ggccagtaacaacttttca

SEQ ID NO: 627377 - DNA, 19 bp, Mus musculus
  siRNA target sequence for MOR238-1 (NM_146972.1,762-780).
gccagtaacaacttttcat

SEQ ID NO: 627378 - DNA, 19 bp, Mus musculus
  siRNA target sequence for MOR238-1 (NM_146972.1,770-788).
caacttttcatacagataa

SEQ ID NO: 627379 - DNA, 19 bp, Mus musculus
  siRNA target sequence for MOR238-1 (NM_146972.1,792-810).
catagcagtgttttacact

SEQ ID NO: 627380 - DNA, 19 bp, Mus musculus
  siRNA target sequence for MOR238-1 (NM_146972.1,871-889).
gccattagaatgatactaa

SEQ ID NO: 627381 - DNA, 19 bp, Mus musculus
  siRNA target sequence for MOR238-1 (NM_146972.1,872-890).
ccattagaatgatactaaa

SEQ ID NO: 627382 - DNA, 19 bp, Mus musculus
  siRNA target sequence for MOR238-1 (NM_146972.1,873-891).
cattagaatgatactaaaa

SEQ ID NO: 627383 - DNA, 19 bp, Mus musculus
  siRNA target sequence for MOR238-2 (NM_146919.1,94-112).
ctattttttgtgttactca

SEQ ID NO: 627384 - DNA, 19 bp, Mus musculus
  siRNA target sequence for MOR238-2 (NM_146919.1,239-257).
cttgcacaatccctaagat

SEQ ID NO: 627385 - DNA, 19 bp, Mus musculus
  siRNA target sequence for MOR238-2 (NM_146919.1,293-311).
cattcaatggctgcatatt

SEQ ID NO: 627386 - DNA, 19 bp, Mus musculus
  siRNA target sequence for MOR238-2 (NM_146919.1,301-319).
ggctgcatattgcaacttt

SEQ ID NO: 627387 - DNA, 19 bp, Mus musculus
  siRNA target sequence for MOR238-2 (NM_146919.1,442-460).
cttctagtgggaatatgtt

SEQ ID NO: 627388 - DNA, 19 bp, Mus musculus
  siRNA target sequence for MOR238-2 (NM_146919.1,792-810).
gcgaccagtggcaaccttt

SEQ ID NO: 627389 - DNA, 19 bp, Mus musculus
  siRNA target sequence for MOR238-2 (NM_146919.1,807-825).
ctttcccatggataaagca

SEQ ID NO: 627390 - DNA, 19 bp, Mus musculus
  siRNA target sequence for MOR238-2 (NM_146919.1,824-842).
caatagccgtgttttatat

SEQ ID NO: 627391 - DNA, 19 bp, Mus musculus
  siRNA target sequence for MOR238-2 (NM_146919.1,829-847).
gccgtgttttatatcatca

SEQ ID NO: 627392 - DNA, 19 bp, Mus musculus
  siRNA target sequence for MOR238-2 (NM_146919.1,843-861).
catcatcacacctttgtta

SEQ ID NO: 627393 - DNA, 19 bp, Mus musculus
  siRNA target sequence for MOR238-2 (NM_146919.1,904-922).
gccattagaatgctcttaa

SEQ ID NO: 627394 - DNA, 19 bp, Mus musculus
  siRNA target sequence for MOR239-1 (NM_146809.2,555-573).
gagcatggtgctctttctt

SEQ ID NO: 627395 - DNA, 19 bp, Mus musculus
  siRNA target sequence for MOR239-1 (NM_146809.2,1383-1401).
gagacttagaaaaagactt

SEQ ID NO: 627396 - DNA, 19 bp, Mus musculus
  siRNA target sequence for MOR239-3 (NM_146680.1,11-29).
gaaatgacaccagagtaaa

SEQ ID NO: 627397 - DNA, 19 bp, Mus musculus
  siRNA target sequence for MOR239-3 (NM_146680.1,16-34).
gacaccagagtaaaagaat

SEQ ID NO: 627398 - DNA, 19 bp, Mus musculus
  siRNA target sequence for MOR239-3 (NM_146680.1,20-38).
ccagagtaaaagaatttat

SEQ ID NO: 627399 - DNA, 19 bp, Mus musculus
  siRNA target sequence for MOR239-3 (NM_146680.1,69-87).
gagcctggtcttatgtctt

SEQ ID NO: 627400 - DNA, 19 bp, Mus musculus
  siRNA target sequence for MOR239-3 (NM_146680.1,72-90).
cctggtcttatgtcttgtt

SEQ ID NO: 627401 - DNA, 19 bp, Mus musculus
  siRNA target sequence for MOR239-3 (NM_146680.1,191-209).
gaaaccttgccgttctaga

SEQ ID NO: 627402 - DNA, 19 bp, Mus musculus
  siRNA target sequence for MOR239-3 (NM_146680.1,885-903).
gtcagccataagaagacta

SEQ ID NO: 627403 - DNA, 19 bp, Mus musculus
  siRNA target sequence for MOR239-3 (NM_146680.1,913-931).
ctcactcctcttgaaaagt

SEQ ID NO: 627404 - DNA, 19 bp, Mus musculus
  siRNA target sequence for MOR239-5 (NM_146678.1,36-54).
cgtcttcctggcacttact

SEQ ID NO: 627405 - DNA, 19 bp, Mus musculus
  siRNA target sequence for MOR239-5 (NM_146678.1,208-226).
gatattgtcttttcatcta

SEQ ID NO: 627406 - DNA, 19 bp, Mus musculus
  siRNA target sequence for MOR239-5 (NM_146678.1,246-264).
ggtggatcttttatcagaa

SEQ ID NO: 627407 - DNA, 19 bp, Mus musculus
  siRNA target sequence for MOR239-5 (NM_146678.1,276-294).
ctcctataatggttgttta

SEQ ID NO: 627408 - DNA, 19 bp, Mus musculus
  siRNA target sequence for MOR239-5 (NM_146678.1,319-337).
gctggtggggcagatattt

SEQ ID NO: 627409 - DNA, 19 bp, Mus musculus
  siRNA target sequence for MOR239-5 (NM_146678.1,365-383).
ggtaccttgcaattgctaa

SEQ ID NO: 627410 - DNA, 19 bp, Mus musculus
  siRNA target sequence for MOR239-5 (NM_146678.1,366-384).
gtaccttgcaattgctaaa

SEQ ID NO: 627411 - DNA, 19 bp, Mus musculus
  siRNA target sequence for MOR239-5 (NM_146678.1,450-468).
gggtggtggtttacattca

SEQ ID NO: 627412 - DNA, 19 bp, Mus musculus
  siRNA target sequence for MOR239-5 (NM_146678.1,452-470).
gtggtggtttacattcaat

SEQ ID NO: 627413 - DNA, 19 bp, Mus musculus
  siRNA target sequence for MOR239-5 (NM_146678.1,455-473).
gtggtttacattcaattgt

SEQ ID NO: 627414 - DNA, 19 bp, Mus musculus
  siRNA target sequence for MOR239-5 (NM_146678.1,463-481).
cattcaattgttcagataa

SEQ ID NO: 627415 - DNA, 19 bp, Mus musculus
  siRNA target sequence for MOR239-5 (NM_146678.1,519-537).
cttggatgccttttactgt

SEQ ID NO: 627416 - DNA, 19 bp, Mus musculus
  siRNA target sequence for MOR239-5 (NM_146678.1,575-593).
cctttgccctcgaacttct

SEQ ID NO: 627417 - DNA, 19 bp, Mus musculus
  siRNA target sequence for MOR239-5 (NM_146678.1,581-599).
ccctcgaacttctcatgat

SEQ ID NO: 627418 - DNA, 19 bp, Mus musculus
  siRNA target sequence for MOR239-5 (NM_146678.1,583-601).
ctcgaacttctcatgatct

SEQ ID NO: 627419 - DNA, 19 bp, Mus musculus
  siRNA target sequence for MOR239-5 (NM_146678.1,647-665).
gctcctacaccatcattct

SEQ ID NO: 627420 - DNA, 19 bp, Mus musculus
  siRNA target sequence for MOR239-5 (NM_146678.1,802-820).
gacacagccatatctatca

SEQ ID NO: 627421 - DNA, 19 bp, Mus musculus
  siRNA target sequence for MOR239-5 (NM_146678.1,808-826).
gccatatctatcaataaca

SEQ ID NO: 627422 - DNA, 19 bp, Mus musculus
  siRNA target sequence for MOR239-5 (NM_146678.1,810-828).
catatctatcaataacact

SEQ ID NO: 627423 - DNA, 19 bp, Mus musculus
  siRNA target sequence for MOR239-5 (NM_146678.1,916-934).
gggccttctgagagcaata

SEQ ID NO: 627424 - DNA, 19 bp, Mus musculus
  siRNA target sequence for MOR240-2 (NM_146412.1,163-181).
ctggacatgcctatgtatt

SEQ ID NO: 627425 - DNA, 19 bp, Mus musculus
  siRNA target sequence for MOR240-2 (NM_146412.1,165-183).
ggacatgcctatgtatttt

SEQ ID NO: 627426 - DNA, 19 bp, Mus musculus
  siRNA target sequence for MOR240-2 (NM_146412.1,202-220).
gtcatagatctcagctatt

SEQ ID NO: 627427 - DNA, 19 bp, Mus musculus
  siRNA target sequence for MOR240-2 (NM_146412.1,907-925).
gaacacttggtacttacta

SEQ ID NO: 627428 - DNA, 19 bp, Mus musculus
  siRNA target sequence for MOR241-3 (NM_146494.2,114-132).
cctggtcttcgcactgatt

SEQ ID NO: 627429 - DNA, 19 bp, Mus musculus
  siRNA target sequence for MOR241-3 (NM_146494.2,115-133).
ctggtcttcgcactgattt

SEQ ID NO: 627430 - DNA, 19 bp, Mus musculus
  siRNA target sequence for MOR241-3 (NM_146494.2,117-135).
ggtcttcgcactgatttca

SEQ ID NO: 627431 - DNA, 19 bp, Mus musculus
  siRNA target sequence for MOR241-3 (NM_146494.2,120-138).
cttcgcactgatttcagtt

SEQ ID NO: 627432 - DNA, 19 bp, Mus musculus
  siRNA target sequence for MOR241-3 (NM_146494.2,124-142).
gcactgatttcagttttct

SEQ ID NO: 627433 - DNA, 19 bp, Mus musculus
  siRNA target sequence for MOR241-3 (NM_146494.2,411-429).
cgctatatgccgtccttta

SEQ ID NO: 627434 - DNA, 19 bp, Mus musculus
  siRNA target sequence for MOR241-3 (NM_146494.2,412-430).
gctatatgccgtcctttat

SEQ ID NO: 627435 - DNA, 19 bp, Mus musculus
  siRNA target sequence for MOR241-3 (NM_146494.2,413-431).
ctatatgccgtcctttata

SEQ ID NO: 627436 - DNA, 19 bp, Mus musculus
  siRNA target sequence for MOR241-3 (NM_146494.2,447-465).
gaaccctagagtctgttat

SEQ ID NO: 627437 - DNA, 19 bp, Mus musculus
  siRNA target sequence for MOR241-3 (NM_146494.2,455-473).
gagtctgttatgccttatt

SEQ ID NO: 627438 - DNA, 19 bp, Mus musculus
  siRNA target sequence for MOR241-3 (NM_146494.2,457-475).
gtctgttatgccttattgt

SEQ ID NO: 627439 - DNA, 19 bp, Mus musculus
  siRNA target sequence for MOR241-3 (NM_146494.2,492-510).
gggttttgctcattccatt

SEQ ID NO: 627440 - DNA, 19 bp, Mus musculus
  siRNA target sequence for MOR241-3 (NM_146494.2,500-518).
ctcattccattgtacaagt

SEQ ID NO: 627441 - DNA, 19 bp, Mus musculus
  siRNA target sequence for MOR241-3 (NM_146494.2,514-532).
caagtggctcttatcctaa

SEQ ID NO: 627442 - DNA, 19 bp, Mus musculus
  siRNA target sequence for MOR241-3 (NM_146494.2,548-566).
ggccaaaccagctggataa

SEQ ID NO: 627443 - DNA, 19 bp, Mus musculus
  siRNA target sequence for MOR241-3 (NM_146494.2,577-595).
gatgttccacaggttgtaa

SEQ ID NO: 627444 - DNA, 19 bp, Mus musculus
  siRNA target sequence for MOR241-3 (NM_146494.2,649-667).
ggtctacttaccctcttat

SEQ ID NO: 627445 - DNA, 19 bp, Mus musculus
  siRNA target sequence for MOR241-3 (NM_146494.2,652-670).
ctacttaccctcttatgct

SEQ ID NO: 627446 - DNA, 19 bp, Mus musculus
  siRNA target sequence for MOR241-3 (NM_146494.2,708-726).
ccacgtaaaaggacattct

SEQ ID NO: 627447 - DNA, 19 bp, Mus musculus
  siRNA target sequence for MOR241-3 (NM_146494.2,709-727).
cacgtaaaaggacattctt

SEQ ID NO: 627448 - DNA, 19 bp, Mus musculus
  siRNA target sequence for MOR241-3 (NM_146494.2,758-776).
gcaccacccatattataat

SEQ ID NO: 627449 - DNA, 19 bp, Mus musculus
  siRNA target sequence for MOR241-3 (NM_146494.2,759-777).
caccacccatattataatt

SEQ ID NO: 627450 - DNA, 19 bp, Mus musculus
  siRNA target sequence for MOR241-3 (NM_146494.2,761-779).
ccacccatattataattgt

SEQ ID NO: 627451 - DNA, 19 bp, Mus musculus
  siRNA target sequence for MOR241-3 (NM_146494.2,764-782).
cccatattataattgtgtt

SEQ ID NO: 627452 - DNA, 19 bp, Mus musculus
  siRNA target sequence for MOR241-3 (NM_146494.2,866-884).
cggtcatctttcctttgat

SEQ ID NO: 627453 - DNA, 19 bp, Mus musculus
  siRNA target sequence for MOR241-3 (NM_146494.2,870-888).
catctttcctttgatgaat

SEQ ID NO: 627454 - DNA, 19 bp, Mus musculus
  siRNA target sequence for MOR241-3 (NM_146494.2,936-954).
gaagttgttaagtcagtat

SEQ ID NO: 627455 - DNA, 19 bp, Mus musculus
  siRNA target sequence for MOR246-2 (NM_146319.1,601-619).
gcagatagtggatttctat

SEQ ID NO: 627456 - DNA, 19 bp, Mus musculus
  siRNA target sequence for MOR246-2 (NM_146319.1,610-628).
ggatttctatccatgagtt

SEQ ID NO: 627457 - DNA, 19 bp, Mus musculus
  siRNA target sequence for MOR246-2 (NM_146319.1,782-800).
cctttagcagctattcagt

SEQ ID NO: 627458 - DNA, 19 bp, Mus musculus
  siRNA target sequence for MOR246-2 (NM_146319.1,788-806).
gcagctattcagttgacaa

SEQ ID NO: 627459 - DNA, 19 bp, Mus musculus
  siRNA target sequence for MOR246-2 (NM_146319.1,926-944).
gacaggtttctgcattgat

SEQ ID NO: 627460 - DNA, 19 bp, Mus musculus
  siRNA target sequence for MOR246-3 (NM_146317.1,648-666).
ctcctacactgtggtttta

SEQ ID NO: 627461 - DNA, 19 bp, Mus musculus
  siRNA target sequence for MOR247-2 (NM_146492.1,536-554).
gcgaccttcccctggtaat

SEQ ID NO: 627462 - DNA, 19 bp, Mus musculus
  siRNA target sequence for MOR247-2 (NM_146492.1,559-577).
cttgcttgtattgaaacat

SEQ ID NO: 627463 - DNA, 19 bp, Mus musculus
  siRNA target sequence for MOR247-2 (NM_146492.1,562-580).
gcttgtattgaaacataca

SEQ ID NO: 627464 - DNA, 19 bp, Mus musculus
  siRNA target sequence for MOR247-2 (NM_146492.1,575-593).
catacactctagagttgtt

SEQ ID NO: 627465 - DNA, 19 bp, Mus musculus
  siRNA target sequence for MOR247-2 (NM_146492.1,608-626).
gtgggctgctctcctttat

SEQ ID NO: 627466 - DNA, 19 bp, Mus musculus
  siRNA target sequence for MOR248-10 (NM_146403.1,45-63).
gggactttcccactcaaaa

SEQ ID NO: 627467 - DNA, 19 bp, Mus musculus
  siRNA target sequence for MOR248-10 (NM_146403.1,46-64).
ggactttcccactcaaaaa

SEQ ID NO: 627468 - DNA, 19 bp, Mus musculus
  siRNA target sequence for MOR248-10 (NM_146403.1,635-653).
gtctcttgcttatatcata

SEQ ID NO: 627469 - DNA, 19 bp, Mus musculus
  siRNA target sequence for MOR248-3 (NM_146889.1,63-81).
ccactcacagaatattcaa

SEQ ID NO: 627470 - DNA, 19 bp, Mus musculus
  siRNA target sequence for MOR248-3 (NM_146889.1,515-533).
gtagcgccaaggaaatcga

SEQ ID NO: 627471 - DNA, 19 bp, Mus musculus
  siRNA target sequence for MOR248-3 (NM_146889.1,520-538).
gccaaggaaatcgatagtt

SEQ ID NO: 627472 - DNA, 19 bp, Mus musculus
  siRNA target sequence for MOR248-3 (NM_146889.1,898-916).
gctatgagacggttcataa

SEQ ID NO: 627473 - DNA, 19 bp, Mus musculus
  siRNA target sequence for MOR248-3 (NM_146889.1,899-917).
ctatgagacggttcataaa

SEQ ID NO: 627474 - DNA, 19 bp, Mus musculus
  siRNA target sequence for MOR248-3 (NM_146889.1,905-923).
gacggttcataaacaacta

SEQ ID NO: 627475 - DNA, 19 bp, Mus musculus
  siRNA target sequence for MOR248-3 (NM_146889.1,907-925).
cggttcataaacaactaca

SEQ ID NO: 627476 - DNA, 19 bp, Mus musculus
  siRNA target sequence for MOR248-4 (NM_146888.1,673-691).
gttcatcagaattcgaaaa

SEQ ID NO: 627477 - DNA, 19 bp, Mus musculus
  siRNA target sequence for MOR248-4 (NM_146888.1,761-779).
gtttcttcatctatgtgtt

SEQ ID NO: 627478 - DNA, 19 bp, Mus musculus
  siRNA target sequence for MOR248-4 (NM_146888.1,771-789).
ctatgtgtttcccctaaat

SEQ ID NO: 627479 - DNA, 19 bp, Mus musculus
  siRNA target sequence for MOR248-4 (NM_146888.1,775-793).
gtgtttcccctaaatatca

SEQ ID NO: 627480 - DNA, 19 bp, Mus musculus
  siRNA target sequence for MOR248-7 (NM_146885.1,567-585).
catggattatcattattta

SEQ ID NO: 627481 - DNA, 19 bp, Mus musculus
  siRNA target sequence for MOR248-7 (NM_146885.1,664-682).
cttatgactgtatgtaaga

SEQ ID NO: 627482 - DNA, 19 bp, Mus musculus
  siRNA target sequence for MOR248-7 (NM_146885.1,734-752).
cagtcgtgctaatcttttt

SEQ ID NO: 627483 - DNA, 19 bp, Mus musculus
  siRNA target sequence for MOR248-7 (NM_146885.1,912-930).
ctttctgggtcccaaagta

SEQ ID NO: 627484 - DNA, 19 bp, Mus musculus
  siRNA target sequence for MOR248-8 (NM_146884.1,223-241).
ccaaaaatggtcatagact

SEQ ID NO: 627485 - DNA, 19 bp, Mus musculus
  siRNA target sequence for MOR248-8 (NM_146884.1,496-514).
ggcccattggaaatagaca

SEQ ID NO: 627486 - DNA, 19 bp, Mus musculus
  siRNA target sequence for MOR248-8 (NM_146884.1,531-549).
gccactagtaatcaaacta

SEQ ID NO: 627487 - DNA, 19 bp, Mus musculus
  siRNA target sequence for MOR248-8 (NM_146884.1,563-581).
cccatgatttggacatttt

SEQ ID NO: 627488 - DNA, 19 bp, Mus musculus
  siRNA target sequence for MOR248-8 (NM_146884.1,564-582).
ccatgatttggacatttta

SEQ ID NO: 627489 - DNA, 19 bp, Mus musculus
  siRNA target sequence for MOR248-8 (NM_146884.1,568-586).
gatttggacattttaatga

SEQ ID NO: 627490 - DNA, 19 bp, Mus musculus
  siRNA target sequence for MOR248-8 (NM_146884.1,598-616).
gggattgtagttgtatctt

SEQ ID NO: 627491 - DNA, 19 bp, Mus musculus
  siRNA target sequence for MOR248-8 (NM_146884.1,887-905).
gatttaaaagctatgttat

SEQ ID NO: 627492 - DNA, 19 bp, Mus musculus
  siRNA target sequence for MOR249-2 (NM_146328.1,22-40).
gctccatctgaattcatca

SEQ ID NO: 627493 - DNA, 19 bp, Mus musculus
  siRNA target sequence for MOR249-2 (NM_146328.1,64-82).
gaattgcagtatttactct

SEQ ID NO: 627494 - DNA, 19 bp, Mus musculus
  siRNA target sequence for MOR249-2 (NM_146328.1,99-117).
gacctacatatgcacttta

SEQ ID NO: 627495 - DNA, 19 bp, Mus musculus
  siRNA target sequence for MOR249-2 (NM_146328.1,111-129).
cactttaggaggcaatgtt

SEQ ID NO: 627496 - DNA, 19 bp, Mus musculus
  siRNA target sequence for MOR249-2 (NM_146328.1,119-137).
gaggcaatgtttttatcat

SEQ ID NO: 627497 - DNA, 19 bp, Mus musculus
  siRNA target sequence for MOR249-2 (NM_146328.1,177-195).
gtattatttcctaggaaat

SEQ ID NO: 627498 - DNA, 19 bp, Mus musculus
  siRNA target sequence for MOR249-2 (NM_146328.1,215-233).
gctacactactactaatgt

SEQ ID NO: 627499 - DNA, 19 bp, Mus musculus
  siRNA target sequence for MOR249-2 (NM_146328.1,292-310).
gtgacccagctctttgcat

SEQ ID NO: 627500 - DNA, 19 bp, Mus musculus
  siRNA target sequence for MOR249-2 (NM_146328.1,384-402).
gccgttaaggtactcattt

SEQ ID NO: 627501 - DNA, 19 bp, Mus musculus
  siRNA target sequence for MOR249-2 (NM_146328.1,385-403).
ccgttaaggtactcattta

SEQ ID NO: 627502 - DNA, 19 bp, Mus musculus
  siRNA target sequence for MOR249-2 (NM_146328.1,386-404).
cgttaaggtactcatttat

SEQ ID NO: 627503 - DNA, 19 bp, Mus musculus
  siRNA target sequence for MOR249-2 (NM_146328.1,387-405).
gttaaggtactcatttatt

SEQ ID NO: 627504 - DNA, 19 bp, Mus musculus
  siRNA target sequence for MOR249-2 (NM_146328.1,392-410).
ggtactcatttattatgaa

SEQ ID NO: 627505 - DNA, 19 bp, Mus musculus
  siRNA target sequence for MOR249-2 (NM_146328.1,446-464).
ggacaggtgggtttctcaa

SEQ ID NO: 627506 - DNA, 19 bp, Mus musculus
  siRNA target sequence for MOR249-2 (NM_146328.1,500-518).
ccttttgtggtaacaatca

SEQ ID NO: 627507 - DNA, 19 bp, Mus musculus
  siRNA target sequence for MOR249-2 (NM_146328.1,517-535).
cagatcaattatttcttct

SEQ ID NO: 627508 - DNA, 19 bp, Mus musculus
  siRNA target sequence for MOR249-2 (NM_146328.1,558-576).
cttgtcttgtggtgatact

SEQ ID NO: 627509 - DNA, 19 bp, Mus musculus
  siRNA target sequence for MOR249-2 (NM_146328.1,728-746).
cccacctgctcattgttat

SEQ ID NO: 627510 - DNA, 19 bp, Mus musculus
  siRNA target sequence for MOR249-2 (NM_146328.1,729-747).
ccacctgctcattgttatt

SEQ ID NO: 627511 - DNA, 19 bp, Mus musculus
  siRNA target sequence for MOR249-2 (NM_146328.1,735-753).
gctcattgttattctctat

SEQ ID NO: 627512 - DNA, 19 bp, Mus musculus
  siRNA target sequence for MOR249-2 (NM_146328.1,819-837).
gatctcagtgctgtatagt

SEQ ID NO: 627513 - DNA, 19 bp, Mus musculus
  siRNA target sequence for MOR249-2 (NM_146328.1,822-840).
ctcagtgctgtatagtgtt

SEQ ID NO: 627514 - DNA, 19 bp, Mus musculus
  siRNA target sequence for MOR250-3 (NM_146833.1,209-227).
cctactccactgtaacagt

SEQ ID NO: 627515 - DNA, 19 bp, Mus musculus
  siRNA target sequence for MOR250-3 (NM_146833.1,434-452).
ccatctggaccattgcttt

SEQ ID NO: 627516 - DNA, 19 bp, Mus musculus
  siRNA target sequence for MOR250-3 (NM_146833.1,500-518).
gtggtctcaatcatattca

SEQ ID NO: 627517 - DNA, 19 bp, Mus musculus
  siRNA target sequence for MOR250-3 (NM_146833.1,503-521).
gtctcaatcatattcatca

SEQ ID NO: 627518 - DNA, 19 bp, Mus musculus
  siRNA target sequence for MOR250-3 (NM_146833.1,505-523).
ctcaatcatattcatcatt

SEQ ID NO: 627519 - DNA, 19 bp, Mus musculus
  siRNA target sequence for MOR250-3 (NM_146833.1,530-548).
gtgatgttaagccattact

SEQ ID NO: 627520 - DNA, 19 bp, Mus musculus
  siRNA target sequence for MOR250-3 (NM_146833.1,886-904).
gtgaggagtgcattgaata

SEQ ID NO: 627521 - DNA, 19 bp, Mus musculus
  siRNA target sequence for MOR251-3 (NM_146953.1,51-69).
gcctcaccttcggatacta

SEQ ID NO: 627522 - DNA, 19 bp, Mus musculus
  siRNA target sequence for MOR251-3 (NM_146953.1,53-71).
ctcaccttcggatactact

SEQ ID NO: 627523 - DNA, 19 bp, Mus musculus
  siRNA target sequence for MOR251-3 (NM_146953.1,250-268).
gggggaaggaccatctctt

SEQ ID NO: 627524 - DNA, 19 bp, Mus musculus
  siRNA target sequence for MOR251-3 (NM_146953.1,445-463).
ctgactaacaccagcataa

SEQ ID NO: 627525 - DNA, 19 bp, Mus musculus
  siRNA target sequence for MOR251-3 (NM_146953.1,549-567).
ctcttgtgctccaacacaa

SEQ ID NO: 627526 - DNA, 19 bp, Mus musculus
  siRNA target sequence for MOR252-1 (NM_146520.2,817-835).
ccacctttatcaacaatgt

SEQ ID NO: 627527 - DNA, 19 bp, Mus musculus
  siRNA target sequence for MOR252-1 (NM_146520.2,1003-1021).
ctactgctctatatactta

SEQ ID NO: 627528 - DNA, 19 bp, Mus musculus
  siRNA target sequence for MOR253-7 (NM_146954.1,581-599).
catatgtgaatagtgttat

SEQ ID NO: 627529 - DNA, 19 bp, Mus musculus
  siRNA target sequence for MOR253-7 (NM_146954.1,911-929).
gcagacgtttgccatcttt

SEQ ID NO: 627530 - DNA, 19 bp, Mus musculus
  siRNA target sequence for MOR253-7 (NM_146954.1,914-932).
gacgtttgccatcttttta

SEQ ID NO: 627531 - DNA, 19 bp, Mus musculus
  siRNA target sequence for MOR255-3 (NM_146709.1,233-251).
gtgtcactgtcccatcaat

SEQ ID NO: 627532 - DNA, 19 bp, Mus musculus
  siRNA target sequence for MOR255-3 (NM_146709.1,235-253).
gtcactgtcccatcaatgt

SEQ ID NO: 627533 - DNA, 19 bp, Mus musculus
  siRNA target sequence for MOR255-3 (NM_146709.1,629-647).
ctggtgcacctgtgattct

SEQ ID NO: 627534 - DNA, 19 bp, Mus musculus
  siRNA target sequence for MOR256-10 (NM_146543.1,20-38).
gcatctcacgggagttcat

SEQ ID NO: 627535 - DNA, 19 bp, Mus musculus
  siRNA target sequence for MOR256-10 (NM_146543.1,21-39).
catctcacgggagttcatt

SEQ ID NO: 627536 - DNA, 19 bp, Mus musculus
  siRNA target sequence for MOR256-12 (NM_146541.1,72-90).
ccgtcctcacctagaactt

SEQ ID NO: 627537 - DNA, 19 bp, Mus musculus
  siRNA target sequence for MOR256-12 (NM_146541.1,73-91).
cgtcctcacctagaactta

SEQ ID NO: 627538 - DNA, 19 bp, Mus musculus
  siRNA target sequence for MOR256-12 (NM_146541.1,74-92).
gtcctcacctagaacttat

SEQ ID NO: 627539 - DNA, 19 bp, Mus musculus
  siRNA target sequence for MOR256-12 (NM_146541.1,302-320).
gttgtgctatccaactgta

SEQ ID NO: 627540 - DNA, 19 bp, Mus musculus
  siRNA target sequence for MOR256-12 (NM_146541.1,331-349).
gccctgggaggggtagaat

SEQ ID NO: 627541 - DNA, 19 bp, Mus musculus
  siRNA target sequence for MOR256-12 (NM_146541.1,465-483).
gagcggctttggcaattct

SEQ ID NO: 627542 - DNA, 19 bp, Mus musculus
  siRNA target sequence for MOR256-12 (NM_146541.1,493-511).
gcaccccagacgttgatgt

SEQ ID NO: 627543 - DNA, 19 bp, Mus musculus
  siRNA target sequence for MOR256-12 (NM_146541.1,532-550).
cgggtggaccactttctct

SEQ ID NO: 627544 - DNA, 19 bp, Mus musculus
  siRNA target sequence for MOR256-12 (NM_146541.1,611-629).
cttttgcgttggcgatttt

SEQ ID NO: 627545 - DNA, 19 bp, Mus musculus
  siRNA target sequence for MOR256-12 (NM_146541.1,617-635).
cgttggcgatttttatcat

SEQ ID NO: 627546 - DNA, 19 bp, Mus musculus
  siRNA target sequence for MOR256-12 (NM_146541.1,643-661).
ccgctcatcctcatcctta

SEQ ID NO: 627547 - DNA, 19 bp, Mus musculus
  siRNA target sequence for MOR256-12 (NM_146541.1,644-662).
cgctcatcctcatccttat

SEQ ID NO: 627548 - DNA, 19 bp, Mus musculus
  siRNA target sequence for MOR256-12 (NM_146541.1,765-783).
cttctacggtaccatcata

SEQ ID NO: 627549 - DNA, 19 bp, Mus musculus
  siRNA target sequence for MOR256-12 (NM_146541.1,796-814).
cagccggcaaacacttact

SEQ ID NO: 627550 - DNA, 19 bp, Mus musculus
  siRNA target sequence for MOR256-12 (NM_146541.1,866-884).
gtgttaaccccctgatcta

SEQ ID NO: 627551 - DNA, 19 bp, Mus musculus
  siRNA target sequence for MOR256-12 (NM_146541.1,933-951).
gaaggggagcatagaagta

SEQ ID NO: 627552 - DNA, 19 bp, Mus musculus
  siRNA target sequence for MOR256-13 (NM_146540.1,38-56).
gctgccaggaacagttcat

SEQ ID NO: 627553 - DNA, 19 bp, Mus musculus
  siRNA target sequence for MOR256-13 (NM_146540.1,73-91).
gacagaccgaggctagaat

SEQ ID NO: 627554 - DNA, 19 bp, Mus musculus
  siRNA target sequence for MOR256-13 (NM_146540.1,117-135).
cttctacctggtgacttta

SEQ ID NO: 627555 - DNA, 19 bp, Mus musculus
  siRNA target sequence for MOR256-13 (NM_146540.1,223-241).
cttgacctctgtttcacta

SEQ ID NO: 627556 - DNA, 19 bp, Mus musculus
  siRNA target sequence for MOR256-13 (NM_146540.1,285-303).
caagagcatcagttacatt

SEQ ID NO: 627557 - DNA, 19 bp, Mus musculus
  siRNA target sequence for MOR256-13 (NM_146540.1,308-326).
gtgcagtccagctgttcat

SEQ ID NO: 627558 - DNA, 19 bp, Mus musculus
  siRNA target sequence for MOR256-13 (NM_146540.1,411-429).
ctactcggtcattatgcat

SEQ ID NO: 627559 - DNA, 19 bp, Mus musculus
  siRNA target sequence for MOR256-13 (NM_146540.1,416-434).
cggtcattatgcattctca

SEQ ID NO: 627560 - DNA, 19 bp, Mus musculus
  siRNA target sequence for MOR256-13 (NM_146540.1,561-579).
gccagctctgataaaaatt

SEQ ID NO: 627561 - DNA, 19 bp, Mus musculus
  siRNA target sequence for MOR256-13 (NM_146540.1,651-669).
gactctcatcctcatttct

SEQ ID NO: 627562 - DNA, 19 bp, Mus musculus
  siRNA target sequence for MOR256-13 (NM_146540.1,753-771).
caccgtagtctccttgttt

SEQ ID NO: 627563 - DNA, 19 bp, Mus musculus
  siRNA target sequence for MOR256-13 (NM_146540.1,755-773).
ccgtagtctccttgtttta

SEQ ID NO: 627564 - DNA, 19 bp, Mus musculus
  siRNA target sequence for MOR256-13 (NM_146540.1,838-856).
cttaccctcttctacaact

SEQ ID NO: 627565 - DNA, 19 bp, Mus musculus
  siRNA target sequence for MOR256-13 (NM_146540.1,855-873).
cttggtaacccccatgtta

SEQ ID NO: 627566 - DNA, 19 bp, Mus musculus
  siRNA target sequence for MOR256-13 (NM_146540.1,924-942).
gaggcttgtgactacgaaa

SEQ ID NO: 627567 - DNA, 19 bp, Mus musculus
  siRNA target sequence for MOR256-15 (NM_146534.1,64-82).
caactggagcacatcatct

SEQ ID NO: 627568 - DNA, 19 bp, Mus musculus
  siRNA target sequence for MOR256-15 (NM_146534.1,117-135).
ggtaggaaacacaaccatt

SEQ ID NO: 627569 - DNA, 19 bp, Mus musculus
  siRNA target sequence for MOR256-15 (NM_146534.1,204-222).
cgtggacctctgttatact

SEQ ID NO: 627570 - DNA, 19 bp, Mus musculus
  siRNA target sequence for MOR256-15 (NM_146534.1,213-231).
ctgttatactactagcatt

SEQ ID NO: 627571 - DNA, 19 bp, Mus musculus
  siRNA target sequence for MOR256-15 (NM_146534.1,261-279).
cccaaagaagtctattaca

SEQ ID NO: 627572 - DNA, 19 bp, Mus musculus
  siRNA target sequence for MOR256-15 (NM_146534.1,287-305).
ggtgtgtactccagttctt

SEQ ID NO: 627573 - DNA, 19 bp, Mus musculus
  siRNA target sequence for MOR256-15 (NM_146534.1,290-308).
gtgtactccagttcttctt

SEQ ID NO: 627574 - DNA, 19 bp, Mus musculus
  siRNA target sequence for MOR256-15 (NM_146534.1,388-406).
cttcactacacagtaataa

SEQ ID NO: 627575 - DNA, 19 bp, Mus musculus
  siRNA target sequence for MOR256-15 (NM_146534.1,455-473).
gtctcggcagtgcgttaat

SEQ ID NO: 627576 - DNA, 19 bp, Mus musculus
  siRNA target sequence for MOR256-15 (NM_146534.1,459-477).
cggcagtgcgttaattctt

SEQ ID NO: 627577 - DNA, 19 bp, Mus musculus
  siRNA target sequence for MOR256-15 (NM_146534.1,460-478).
ggcagtgcgttaattcttt

SEQ ID NO: 627578 - DNA, 19 bp, Mus musculus
  siRNA target sequence for MOR256-15 (NM_146534.1,462-480).
cagtgcgttaattctttgt

SEQ ID NO: 627579 - DNA, 19 bp, Mus musculus
  siRNA target sequence for MOR256-15 (NM_146534.1,510-528).
gcaccgggaagtggataat

SEQ ID NO: 627580 - DNA, 19 bp, Mus musculus
  siRNA target sequence for MOR256-15 (NM_146534.1,511-529).
caccgggaagtggataatt

SEQ ID NO: 627581 - DNA, 19 bp, Mus musculus
  siRNA target sequence for MOR256-15 (NM_146534.1,513-531).
ccgggaagtggataatttt

SEQ ID NO: 627582 - DNA, 19 bp, Mus musculus
  siRNA target sequence for MOR256-15 (NM_146534.1,514-532).
cgggaagtggataattttt

SEQ ID NO: 627583 - DNA, 19 bp, Mus musculus
  siRNA target sequence for MOR256-15 (NM_146534.1,536-554).
gcgaaatgcctgcattgat

SEQ ID NO: 627584 - DNA, 19 bp, Mus musculus
  siRNA target sequence for MOR256-15 (NM_146534.1,588-606).
gatcgttgtgtttactctt

SEQ ID NO: 627585 - DNA, 19 bp, Mus musculus
  siRNA target sequence for MOR256-15 (NM_146534.1,597-615).
gtttactcttggagtcata

SEQ ID NO: 627586 - DNA, 19 bp, Mus musculus
  siRNA target sequence for MOR256-15 (NM_146534.1,750-768).
gttttacggaacactcatt

SEQ ID NO: 627587 - DNA, 19 bp, Mus musculus
  siRNA target sequence for MOR256-15 (NM_146534.1,785-803).
cacagaacaccatatctca

SEQ ID NO: 627588 - DNA, 19 bp, Mus musculus
  siRNA target sequence for MOR256-15 (NM_146534.1,800-818).
ctcatgaggaaggacaatt

SEQ ID NO: 627589 - DNA, 19 bp, Mus musculus
  siRNA target sequence for MOR256-15 (NM_146534.1,913-931).
ctaggaatggacaagcatt

SEQ ID NO: 627590 - DNA, 19 bp, Mus musculus
  siRNA target sequence for MOR256-21 (NM_146477.1,450-468).
cctagtggagtcagtagtt

SEQ ID NO: 627591 - DNA, 19 bp, Mus musculus
  siRNA target sequence for MOR256-23 (NM_146472.1,231-249).
gcccaaacttctaatcagt

SEQ ID NO: 627592 - DNA, 19 bp, Mus musculus
  siRNA target sequence for MOR256-23 (NM_146472.1,254-272).
cccgaggtgatcagactat

SEQ ID NO: 627593 - DNA, 19 bp, Mus musculus
  siRNA target sequence for MOR256-23 (NM_146472.1,775-793).
cagcctatccacacgtatt

SEQ ID NO: 627594 - DNA, 19 bp, Mus musculus
  siRNA target sequence for MOR256-23 (NM_146472.1,777-795).
gcctatccacacgtattct

SEQ ID NO: 627595 - DNA, 19 bp, Mus musculus
  siRNA target sequence for MOR256-23 (NM_146472.1,895-913).
ctgtgcaaggtacttgtaa

SEQ ID NO: 627596 - DNA, 19 bp, Mus musculus
  siRNA target sequence for MOR256-23 (NM_146472.1,929-947).
ctaagactagaagaaagat

SEQ ID NO: 627597 - DNA, 19 bp, Mus musculus
  siRNA target sequence for MOR256-3 (NM_147062.1,112-130).
gccttatttggtaatatct

SEQ ID NO: 627598 - DNA, 19 bp, Mus musculus
  siRNA target sequence for MOR256-3 (NM_147062.1,253-271).
cttagagggcctgaaaaga

SEQ ID NO: 627599 - DNA, 19 bp, Mus musculus
  siRNA target sequence for MOR256-3 (NM_147062.1,315-333).
ggctttgggctcaactgaa

SEQ ID NO: 627600 - DNA, 19 bp, Mus musculus
  siRNA target sequence for MOR256-3 (NM_147062.1,316-334).
gctttgggctcaactgaat

SEQ ID NO: 627601 - DNA, 19 bp, Mus musculus
  siRNA target sequence for MOR256-3 (NM_147062.1,364-382).
cgttttgctgccatttgca

SEQ ID NO: 627602 - DNA, 19 bp, Mus musculus
  siRNA target sequence for MOR256-3 (NM_147062.1,408-426).
gaaccagaaacgatgcatt

SEQ ID NO: 627603 - DNA, 19 bp, Mus musculus
  siRNA target sequence for MOR256-3 (NM_147062.1,411-429).
ccagaaacgatgcattcat

SEQ ID NO: 627604 - DNA, 19 bp, Mus musculus
  siRNA target sequence for MOR256-3 (NM_147062.1,444-462).
ctggattagcggatttgca

SEQ ID NO: 627605 - DNA, 19 bp, Mus musculus
  siRNA target sequence for MOR256-3 (NM_147062.1,446-464).
ggattagcggatttgcaaa

SEQ ID NO: 627606 - DNA, 19 bp, Mus musculus
  siRNA target sequence for MOR256-3 (NM_147062.1,504-522).
gtgtggacagagggtaata

SEQ ID NO: 627607 - DNA, 19 bp, Mus musculus
  siRNA target sequence for MOR256-3 (NM_147062.1,515-533).
gggtaatagaccatttctt

SEQ ID NO: 627608 - DNA, 19 bp, Mus musculus
  siRNA target sequence for MOR256-3 (NM_147062.1,567-585).
cactgacacaagtgtgaat

SEQ ID NO: 627609 - DNA, 19 bp, Mus musculus
  siRNA target sequence for MOR256-3 (NM_147062.1,569-587).
ctgacacaagtgtgaatga

SEQ ID NO: 627610 - DNA, 19 bp, Mus musculus
  siRNA target sequence for MOR256-3 (NM_147062.1,636-654).
cctcatcctgggtacctat

SEQ ID NO: 627611 - DNA, 19 bp, Mus musculus
  siRNA target sequence for MOR256-3 (NM_147062.1,645-663).
gggtacctatgtgttcatt

SEQ ID NO: 627612 - DNA, 19 bp, Mus musculus
  siRNA target sequence for MOR256-3 (NM_147062.1,901-919).
ctgaggagggcactaacaa

SEQ ID NO: 627613 - DNA, 19 bp, Mus musculus
  siRNA target sequence for MOR256-3 (NM_147062.1,910-928).
gcactaacaaaggagtttt

SEQ ID NO: 627614 - DNA, 19 bp, Mus musculus
  siRNA target sequence for MOR256-7 (NM_146807.1,477-495).
ggctacacttacattacaa

SEQ ID NO: 627615 - DNA, 19 bp, Mus musculus
  siRNA target sequence for MOR256-7 (NM_146807.1,478-496).
gctacacttacattacaat

SEQ ID NO: 627616 - DNA, 19 bp, Mus musculus
  siRNA target sequence for MOR256-7 (NM_146807.1,479-497).
ctacacttacattacaatt

SEQ ID NO: 627617 - DNA, 19 bp, Mus musculus
  siRNA target sequence for MOR256-7 (NM_146807.1,498-516).
gccattgtgtggcatacat

SEQ ID NO: 627618 - DNA, 19 bp, Mus musculus
  siRNA target sequence for MOR256-7 (NM_146807.1,499-517).
ccattgtgtggcatacata

SEQ ID NO: 627619 - DNA, 19 bp, Mus musculus
  siRNA target sequence for MOR256-7 (NM_146807.1,500-518).
cattgtgtggcatacataa

SEQ ID NO: 627620 - DNA, 19 bp, Mus musculus
  siRNA target sequence for MOR256-7 (NM_146807.1,543-561).
cccagttctcataaaaact

SEQ ID NO: 627621 - DNA, 19 bp, Mus musculus
  siRNA target sequence for MOR256-7 (NM_146807.1,635-653).
gcttaattcttgcttctta

SEQ ID NO: 627622 - DNA, 19 bp, Mus musculus
  siRNA target sequence for MOR256-7 (NM_146807.1,664-682).
gggtgtgcagtacttagaa

SEQ ID NO: 627623 - DNA, 19 bp, Mus musculus
  siRNA target sequence for MOR256-7 (NM_146807.1,665-683).
ggtgtgcagtacttagaat

SEQ ID NO: 627624 - DNA, 19 bp, Mus musculus
  siRNA target sequence for MOR256-7 (NM_146807.1,666-684).
gtgtgcagtacttagaatt

SEQ ID NO: 627625 - DNA, 19 bp, Mus musculus
  siRNA target sequence for MOR256-7 (NM_146807.1,668-686).
gtgcagtacttagaattaa

SEQ ID NO: 627626 - DNA, 19 bp, Mus musculus
  siRNA target sequence for MOR256-7 (NM_146807.1,729-747).
ccatcttgttgtagtttct

SEQ ID NO: 627627 - DNA, 19 bp, Mus musculus
  siRNA target sequence for MOR256-7 (NM_146807.1,781-799).
cagccttcttcatccatta

SEQ ID NO: 627628 - DNA, 19 bp, Mus musculus
  siRNA target sequence for MOR256-7 (NM_146807.1,783-801).
gccttcttcatccattaca

SEQ ID NO: 627629 - DNA, 19 bp, Mus musculus
  siRNA target sequence for MOR256-7 (NM_146807.1,784-802).
ccttcttcatccattacaa

SEQ ID NO: 627630 - DNA, 19 bp, Mus musculus
  siRNA target sequence for MOR256-7 (NM_146807.1,840-858).
gataactcctacactgaat

SEQ ID NO: 627631 - DNA, 19 bp, Mus musculus
  siRNA target sequence for MOR256-9 (NM_146630.1,14-32).
gtgtcagtagtgacttcat

SEQ ID NO: 627632 - DNA, 19 bp, Mus musculus
  siRNA target sequence for MOR256-9 (NM_146630.1,49-67).
gatcagcctcagttggaaa

SEQ ID NO: 627633 - DNA, 19 bp, Mus musculus
  siRNA target sequence for MOR256-9 (NM_146630.1,69-87).
gagactcttcattgtagtt

SEQ ID NO: 627634 - DNA, 19 bp, Mus musculus
  siRNA target sequence for MOR256-9 (NM_146630.1,111-129).
ggtgggaaatacaatcatt

SEQ ID NO: 627635 - DNA, 19 bp, Mus musculus
  siRNA target sequence for MOR256-9 (NM_146630.1,135-153).
gatttcttcaatagattct

SEQ ID NO: 627636 - DNA, 19 bp, Mus musculus
  siRNA target sequence for MOR256-9 (NM_146630.1,140-158).
cttcaatagattctaaact

SEQ ID NO: 627637 - DNA, 19 bp, Mus musculus
  siRNA target sequence for MOR256-9 (NM_146630.1,143-161).
caatagattctaaactcaa

SEQ ID NO: 627638 - DNA, 19 bp, Mus musculus
  siRNA target sequence for MOR256-9 (NM_146630.1,185-203).
ctcacctctcctttgttga

SEQ ID NO: 627639 - DNA, 19 bp, Mus musculus
  siRNA target sequence for MOR256-9 (NM_146630.1,209-227).
gtttcaccaccagtattgt

SEQ ID NO: 627640 - DNA, 19 bp, Mus musculus
  siRNA target sequence for MOR256-9 (NM_146630.1,309-327).
gactctgggctctactgaa

SEQ ID NO: 627641 - DNA, 19 bp, Mus musculus
  siRNA target sequence for MOR256-9 (NM_146630.1,387-405).
ctatgtagcagtgatgaat

SEQ ID NO: 627642 - DNA, 19 bp, Mus musculus
  siRNA target sequence for MOR256-9 (NM_146630.1,421-439).
gctctagcaggaatctcat

SEQ ID NO: 627643 - DNA, 19 bp, Mus musculus
  siRNA target sequence for MOR256-9 (NM_146630.1,440-458).
ggctcagtggaataggaaa

SEQ ID NO: 627644 - DNA, 19 bp, Mus musculus
  siRNA target sequence for MOR256-9 (NM_146630.1,441-459).
gctcagtggaataggaaat

SEQ ID NO: 627645 - DNA, 19 bp, Mus musculus
  siRNA target sequence for MOR256-9 (NM_146630.1,465-483).
catccaaggaacaatcact

SEQ ID NO: 627646 - DNA, 19 bp, Mus musculus
  siRNA target sequence for MOR256-9 (NM_146630.1,469-487).
caaggaacaatcactcttt

SEQ ID NO: 627647 - DNA, 19 bp, Mus musculus
  siRNA target sequence for MOR256-9 (NM_146630.1,532-550).
gaagtcccctccatgatca

SEQ ID NO: 627648 - DNA, 19 bp, Mus musculus
  siRNA target sequence for MOR256-9 (NM_146630.1,622-640).
cccttagccctgatactga

SEQ ID NO: 627649 - DNA, 19 bp, Mus musculus
  siRNA target sequence for MOR256-9 (NM_146630.1,639-657).
gacgtcctatggacatata

SEQ ID NO: 627650 - DNA, 19 bp, Mus musculus
  siRNA target sequence for MOR256-9 (NM_146630.1,642-660).
gtcctatggacatatagct

SEQ ID NO: 627651 - DNA, 19 bp, Mus musculus
  siRNA target sequence for MOR256-9 (NM_146630.1,644-662).
cctatggacatatagctaa

SEQ ID NO: 627652 - DNA, 19 bp, Mus musculus
  siRNA target sequence for MOR256-9 (NM_146630.1,658-676).
gctaaggcagttataagaa

SEQ ID NO: 627653 - DNA, 19 bp, Mus musculus
  siRNA target sequence for MOR256-9 (NM_146630.1,659-677).
ctaaggcagttataagaat

SEQ ID NO: 627654 - DNA, 19 bp, Mus musculus
  siRNA target sequence for MOR256-9 (NM_146630.1,664-682).
gcagttataagaatcaagt

SEQ ID NO: 627655 - DNA, 19 bp, Mus musculus
  siRNA target sequence for MOR256-9 (NM_146630.1,667-685).
gttataagaatcaagtcat

SEQ ID NO: 627656 - DNA, 19 bp, Mus musculus
  siRNA target sequence for MOR256-9 (NM_146630.1,774-792).
ccagccgaacagttcatat

SEQ ID NO: 627657 - DNA, 19 bp, Mus musculus
  siRNA target sequence for MOR256-9 (NM_146630.1,807-825).
gaagttcatctctctcttt

SEQ ID NO: 627658 - DNA, 19 bp, Mus musculus
  siRNA target sequence for MOR256-9 (NM_146630.1,820-838).
ctcttttacactgttatga

SEQ ID NO: 627659 - DNA, 19 bp, Mus musculus
  siRNA target sequence for MOR256-9 (NM_146630.1,893-911).
ctctcggacggctcttcaa

SEQ ID NO: 627660 - DNA, 19 bp, Mus musculus
  siRNA target sequence for MOR256-9 (NM_146630.1,897-915).
cggacggctcttcaataga

SEQ ID NO: 627661 - DNA, 19 bp, Mus musculus
  siRNA target sequence for MOR257-3 (NM_146445.1,104-122).
ccatgtatgtcgtaactgt

SEQ ID NO: 627662 - DNA, 19 bp, Mus musculus
  siRNA target sequence for MOR257-3 (NM_146445.1,105-123).
catgtatgtcgtaactgtt

SEQ ID NO: 627663 - DNA, 19 bp, Mus musculus
  siRNA target sequence for MOR257-3 (NM_146445.1,126-144).
ggggaatactctgattctt

SEQ ID NO: 627664 - DNA, 19 bp, Mus musculus
  siRNA target sequence for MOR257-3 (NM_146445.1,127-145).
gggaatactctgattcttt

SEQ ID NO: 627665 - DNA, 19 bp, Mus musculus
  siRNA target sequence for MOR257-3 (NM_146445.1,202-220).
ctgtccatagtggatcttt

SEQ ID NO: 627666 - DNA, 19 bp, Mus musculus
  siRNA target sequence for MOR257-3 (NM_146445.1,206-224).
ccatagtggatctttgcta

SEQ ID NO: 627667 - DNA, 19 bp, Mus musculus
  siRNA target sequence for MOR257-3 (NM_146445.1,207-225).
catagtggatctttgctat

SEQ ID NO: 627668 - DNA, 19 bp, Mus musculus
  siRNA target sequence for MOR257-3 (NM_146445.1,233-251).
gtattgccccacaaatgct

SEQ ID NO: 627669 - DNA, 19 bp, Mus musculus
  siRNA target sequence for MOR257-3 (NM_146445.1,298-316).
gtgttccagctctatatct

SEQ ID NO: 627670 - DNA, 19 bp, Mus musculus
  siRNA target sequence for MOR257-3 (NM_146445.1,450-468).
cttgatggctggtttcttt

SEQ ID NO: 627671 - DNA, 19 bp, Mus musculus
  siRNA target sequence for MOR257-3 (NM_146445.1,560-578).
ggctagcctgtgtagacat

SEQ ID NO: 627672 - DNA, 19 bp, Mus musculus
  siRNA target sequence for MOR257-3 (NM_146445.1,566-584).
cctgtgtagacatctcttt

SEQ ID NO: 627673 - DNA, 19 bp, Mus musculus
  siRNA target sequence for MOR257-3 (NM_146445.1,638-656).
gcctggttctattctctta

SEQ ID NO: 627674 - DNA, 19 bp, Mus musculus
  siRNA target sequence for MOR257-3 (NM_146445.1,639-657).
cctggttctattctcttat

SEQ ID NO: 627675 - DNA, 19 bp, Mus musculus
  siRNA target sequence for MOR257-3 (NM_146445.1,640-658).
ctggttctattctcttata

SEQ ID NO: 627676 - DNA, 19 bp, Mus musculus
  siRNA target sequence for MOR257-3 (NM_146445.1,653-671).
cttatactcggatagtcat

SEQ ID NO: 627677 - DNA, 19 bp, Mus musculus
  siRNA target sequence for MOR257-3 (NM_146445.1,673-691).
gccattctgcgcattcgat

SEQ ID NO: 627678 - DNA, 19 bp, Mus musculus
  siRNA target sequence for MOR257-3 (NM_146445.1,760-778).
ggggccacaatcttcactt

SEQ ID NO: 627679 - DNA, 19 bp, Mus musculus
  siRNA target sequence for MOR257-3 (NM_146445.1,761-779).
gggccacaatcttcactta

SEQ ID NO: 627680 - DNA, 19 bp, Mus musculus
  siRNA target sequence for MOR257-3 (NM_146445.1,765-783).
cacaatcttcacttaccta

SEQ ID NO: 627681 - DNA, 19 bp, Mus musculus
  siRNA target sequence for MOR257-3 (NM_146445.1,794-812).
ctgcctcatctgaggataa

SEQ ID NO: 627682 - DNA, 19 bp, Mus musculus
  siRNA target sequence for MOR257-3 (NM_146445.1,892-910).
gttatggctgctcttacaa

SEQ ID NO: 627683 - DNA, 19 bp, Mus musculus
  siRNA target sequence for MOR257-3 (NM_146445.1,899-917).
ctgctcttacaaaacttgt

SEQ ID NO: 627684 - DNA, 19 bp, Mus musculus
  siRNA target sequence for MOR258-3 (NM_146713.1,419-437).
gccgtcttgtgtgtatcaa

SEQ ID NO: 627685 - DNA, 19 bp, Mus musculus
  siRNA target sequence for MOR258-3 (NM_146713.1,657-675).
ctcctatgcctgcatcttt

SEQ ID NO: 627686 - DNA, 19 bp, Mus musculus
  siRNA target sequence for MOR258-3 (NM_146713.1,898-916).
gtaaagggtgcttttctga

SEQ ID NO: 627687 - DNA, 19 bp, Mus musculus
  siRNA target sequence for MOR258-3 (NM_146713.1,905-923).
gtgcttttctgaaagtact

SEQ ID NO: 627688 - DNA, 19 bp, Mus musculus
  siRNA target sequence for MOR259-8 (NM_146334.1,10-28).
gttctaggacagaaccaaa

SEQ ID NO: 627689 - DNA, 19 bp, Mus musculus
  siRNA target sequence for MOR259-8 (NM_146334.1,422-440).
ggggcctctgcatacattt

SEQ ID NO: 627690 - DNA, 19 bp, Mus musculus
  siRNA target sequence for MOR259-8 (NM_146334.1,833-851).
cactcttttataatacctt

SEQ ID NO: 627691 - DNA, 19 bp, Mus musculus
  siRNA target sequence for MOR260-2 (NM_146604.1,16-34).
cagagctttgtagatgaat

SEQ ID NO: 627692 - DNA, 19 bp, Mus musculus
  siRNA target sequence for MOR260-2 (NM_146604.1,287-305).
gctgtgtgacacaggtaat

SEQ ID NO: 627693 - DNA, 19 bp, Mus musculus
  siRNA target sequence for MOR260-2 (NM_146604.1,288-306).
ctgtgtgacacaggtaatt

SEQ ID NO: 627694 - DNA, 19 bp, Mus musculus
  siRNA target sequence for MOR260-2 (NM_146604.1,290-308).
gtgtgacacaggtaattgt

SEQ ID NO: 627695 - DNA, 19 bp, Mus musculus
  siRNA target sequence for MOR260-2 (NM_146604.1,292-310).
gtgacacaggtaattgtct

SEQ ID NO: 627696 - DNA, 19 bp, Mus musculus
  siRNA target sequence for MOR260-2 (NM_146604.1,402-420).
catcatgacccaacaacta

SEQ ID NO: 627697 - DNA, 19 bp, Mus musculus
  siRNA target sequence for MOR260-2 (NM_146604.1,448-466).
gccagtgggctcctagtat

SEQ ID NO: 627698 - DNA, 19 bp, Mus musculus
  siRNA target sequence for MOR260-2 (NM_146604.1,450-468).
cagtgggctcctagtatgt

SEQ ID NO: 627699 - DNA, 19 bp, Mus musculus
  siRNA target sequence for MOR260-2 (NM_146604.1,452-470).
gtgggctcctagtatgttt

SEQ ID NO: 627700 - DNA, 19 bp, Mus musculus
  siRNA target sequence for MOR260-2 (NM_146604.1,516-534).
catagtcagccattacttt

SEQ ID NO: 627701 - DNA, 19 bp, Mus musculus
  siRNA target sequence for MOR260-2 (NM_146604.1,558-576).
ggtggcttcagcagatact

SEQ ID NO: 627702 - DNA, 19 bp, Mus musculus
  siRNA target sequence for MOR260-2 (NM_146604.1,648-666).
ctcctactggaacatcata

SEQ ID NO: 627703 - DNA, 19 bp, Mus musculus
  siRNA target sequence for MOR260-2 (NM_146604.1,757-775).
gggtctgcaatatttaact

SEQ ID NO: 627704 - DNA, 19 bp, Mus musculus
  siRNA target sequence for MOR260-2 (NM_146604.1,801-819).
gaagaaacaggataagata

SEQ ID NO: 627705 - DNA, 19 bp, Mus musculus
  siRNA target sequence for MOR260-2 (NM_146604.1,913-931).
gctgcaagagtggtattct

SEQ ID NO: 627706 - DNA, 19 bp, Mus musculus
  siRNA target sequence for MOR260-2 (NM_146604.1,914-932).
ctgcaagagtggtattctt

SEQ ID NO: 627707 - DNA, 19 bp, Mus musculus
  siRNA target sequence for MOR260-2 (NM_146604.1,924-942).
ggtattctttcgaaagcaa

SEQ ID NO: 627708 - DNA, 19 bp, Mus musculus
  siRNA target sequence for MOR260-2 (NM_146604.1,925-943).
gtattctttcgaaagcaat

SEQ ID NO: 627709 - DNA, 19 bp, Mus musculus
  siRNA target sequence for MOR260-4 (NM_146597.1,15-33).
ccaaacttatattgtagaa

SEQ ID NO: 627710 - DNA, 19 bp, Mus musculus
  siRNA target sequence for MOR260-4 (NM_146597.1,51-69).
ctcagagaatcctaaagta

SEQ ID NO: 627711 - DNA, 19 bp, Mus musculus
  siRNA target sequence for MOR260-4 (NM_146597.1,86-104).
gtattttcctgatcatcta

SEQ ID NO: 627712 - DNA, 19 bp, Mus musculus
  siRNA target sequence for MOR260-4 (NM_146597.1,244-262).
ctggtccacttcctttcaa

SEQ ID NO: 627713 - DNA, 19 bp, Mus musculus
  siRNA target sequence for MOR260-4 (NM_146597.1,287-305).
gatgttcaatacagatagt

SEQ ID NO: 627714 - DNA, 19 bp, Mus musculus
  siRNA target sequence for MOR260-4 (NM_146597.1,447-465).
gatcagtggggcatttgca

SEQ ID NO: 627715 - DNA, 19 bp, Mus musculus
  siRNA target sequence for MOR260-4 (NM_146597.1,562-580).
gcttcagctgacacctata

SEQ ID NO: 627716 - DNA, 19 bp, Mus musculus
  siRNA target sequence for MOR260-4 (NM_146597.1,563-581).
cttcagctgacacctataa

SEQ ID NO: 627717 - DNA, 19 bp, Mus musculus
  siRNA target sequence for MOR260-4 (NM_146597.1,604-622).
gtgggggtgattattctat

SEQ ID NO: 627718 - DNA, 19 bp, Mus musculus
  siRNA target sequence for MOR260-4 (NM_146597.1,606-624).
gggggtgattattctatta

SEQ ID NO: 627719 - DNA, 19 bp, Mus musculus
  siRNA target sequence for MOR260-4 (NM_146597.1,609-627).
ggtgattattctattagct

SEQ ID NO: 627720 - DNA, 19 bp, Mus musculus
  siRNA target sequence for MOR260-4 (NM_146597.1,737-755).
ctgttgtggtcctctacta

SEQ ID NO: 627721 - DNA, 19 bp, Mus musculus
  siRNA target sequence for MOR260-4 (NM_146597.1,937-955).
ggcggtgctgcagaaatgt

SEQ ID NO: 627722 - DNA, 19 bp, Mus musculus
  siRNA target sequence for MOR260-5 (NM_146586.1,118-136).
gtggttggcaatatcatca

SEQ ID NO: 627723 - DNA, 19 bp, Mus musculus
  siRNA target sequence for MOR260-5 (NM_146586.1,216-234).
ctgctacacatccactaat

SEQ ID NO: 627724 - DNA, 19 bp, Mus musculus
  siRNA target sequence for MOR260-5 (NM_146586.1,218-236).
gctacacatccactaatgt

SEQ ID NO: 627725 - DNA, 19 bp, Mus musculus
  siRNA target sequence for MOR260-5 (NM_146586.1,463-481).
ctcagttccatggttatca

SEQ ID NO: 627726 - DNA, 19 bp, Mus musculus
  siRNA target sequence for MOR260-5 (NM_146586.1,470-488).
ccatggttatcaatgttct

SEQ ID NO: 627727 - DNA, 19 bp, Mus musculus
  siRNA target sequence for MOR260-5 (NM_146586.1,659-677).
cccgcatccttctttctgt

SEQ ID NO: 627728 - DNA, 19 bp, Mus musculus
  siRNA target sequence for MOR260-5 (NM_146586.1,660-678).
ccgcatccttctttctgtt

SEQ ID NO: 627729 - DNA, 19 bp, Mus musculus
  siRNA target sequence for MOR260-5 (NM_146586.1,736-754).
ctcacagttgtgaccttat

SEQ ID NO: 627730 - DNA, 19 bp, Mus musculus
  siRNA target sequence for MOR261-11 (NM_146296.1,48-66).
ccagctcagcgcaggtata

SEQ ID NO: 627731 - DNA, 19 bp, Mus musculus
  siRNA target sequence for MOR261-11 (NM_146296.1,51-69).
gctcagcgcaggtatagaa

SEQ ID NO: 627732 - DNA, 19 bp, Mus musculus
  siRNA target sequence for MOR261-11 (NM_146296.1,52-70).
ctcagcgcaggtatagaaa

SEQ ID NO: 627733 - DNA, 19 bp, Mus musculus
  siRNA target sequence for MOR261-11 (NM_146296.1,108-126).
cagcctgctcgcaaatgga

SEQ ID NO: 627734 - DNA, 19 bp, Mus musculus
  siRNA target sequence for MOR261-11 (NM_146296.1,110-128).
gcctgctcgcaaatggaat

SEQ ID NO: 627735 - DNA, 19 bp, Mus musculus
  siRNA target sequence for MOR261-11 (NM_146296.1,111-129).
cctgctcgcaaatggaata

SEQ ID NO: 627736 - DNA, 19 bp, Mus musculus
  siRNA target sequence for MOR261-11 (NM_146296.1,112-130).
ctgctcgcaaatggaataa

SEQ ID NO: 627737 - DNA, 19 bp, Mus musculus
  siRNA target sequence for MOR261-11 (NM_146296.1,115-133).
ctcgcaaatggaataatct

SEQ ID NO: 627738 - DNA, 19 bp, Mus musculus
  siRNA target sequence for MOR261-11 (NM_146296.1,119-137).
caaatggaataatcttagt

SEQ ID NO: 627739 - DNA, 19 bp, Mus musculus
  siRNA target sequence for MOR261-11 (NM_146296.1,259-277).
cagaaaagaaccatctcat

SEQ ID NO: 627740 - DNA, 19 bp, Mus musculus
  siRNA target sequence for MOR261-11 (NM_146296.1,284-302).
catgcatcacacagacatt

SEQ ID NO: 627741 - DNA, 19 bp, Mus musculus
  siRNA target sequence for MOR261-11 (NM_146296.1,321-339).
cgcttcggagtgcttgatt

SEQ ID NO: 627742 - DNA, 19 bp, Mus musculus
  siRNA target sequence for MOR261-11 (NM_146296.1,322-340).
gcttcggagtgcttgattt

SEQ ID NO: 627743 - DNA, 19 bp, Mus musculus
  siRNA target sequence for MOR261-11 (NM_146296.1,323-341).
cttcggagtgcttgatttt

SEQ ID NO: 627744 - DNA, 19 bp, Mus musculus
  siRNA target sequence for MOR261-11 (NM_146296.1,476-494).
caattctcctgctaaggtt

SEQ ID NO: 627745 - DNA, 19 bp, Mus musculus
  siRNA target sequence for MOR261-11 (NM_146296.1,563-581).
gcgccgacactttgatcaa

SEQ ID NO: 627746 - DNA, 19 bp, Mus musculus
  siRNA target sequence for MOR261-11 (NM_146296.1,568-586).
gacactttgatcaaccaaa

SEQ ID NO: 627747 - DNA, 19 bp, Mus musculus
  siRNA target sequence for MOR261-11 (NM_146296.1,572-590).
ctttgatcaaccaaatcgt

SEQ ID NO: 627748 - DNA, 19 bp, Mus musculus
  siRNA target sequence for MOR261-11 (NM_146296.1,741-759).
ggggctcttctttggtata

SEQ ID NO: 627749 - DNA, 19 bp, Mus musculus
  siRNA target sequence for MOR261-11 (NM_146296.1,754-772).
ggtatagccatgttggttt

SEQ ID NO: 627750 - DNA, 19 bp, Mus musculus
  siRNA target sequence for MOR261-11 (NM_146296.1,755-773).
gtatagccatgttggttta

SEQ ID NO: 627751 - DNA, 19 bp, Mus musculus
  siRNA target sequence for MOR261-11 (NM_146296.1,761-779).
ccatgttggtttatatggt

SEQ ID NO: 627752 - DNA, 19 bp, Mus musculus
  siRNA target sequence for MOR261-11 (NM_146296.1,833-851).
gtctctttaacccaatgtt

SEQ ID NO: 627753 - DNA, 19 bp, Mus musculus
  siRNA target sequence for MOR261-11 (NM_146296.1,835-853).
ctctttaacccaatgttga

SEQ ID NO: 627754 - DNA, 19 bp, Mus musculus
  siRNA target sequence for MOR261-11 (NM_146296.1,837-855).
ctttaacccaatgttgaat

SEQ ID NO: 627755 - DNA, 19 bp, Mus musculus
  siRNA target sequence for MOR261-12 (NM_146295.1,465-483).
ccatatcacgctcattcta

SEQ ID NO: 627756 - DNA, 19 bp, Mus musculus
  siRNA target sequence for MOR261-12 (NM_146295.1,466-484).
catatcacgctcattctaa

SEQ ID NO: 627757 - DNA, 19 bp, Mus musculus
  siRNA target sequence for MOR261-12 (NM_146295.1,571-589).
ctcaatcaagtcgttcttt

SEQ ID NO: 627758 - DNA, 19 bp, Mus musculus
  siRNA target sequence for MOR261-12 (NM_146295.1,630-648).
ggtgttagtctcctataca

SEQ ID NO: 627759 - DNA, 19 bp, Mus musculus
  siRNA target sequence for MOR261-12 (NM_146295.1,889-907).
gccttgagacgagttcttt

SEQ ID NO: 627760 - DNA, 19 bp, Mus musculus
  siRNA target sequence for MOR261-12 (NM_146295.1,898-916).
cgagttctttggaaacaga

SEQ ID NO: 627761 - DNA, 19 bp, Mus musculus
  siRNA target sequence for MOR262-1 (NM_146920.1,55-73).
cggtacccgaggttagaga

SEQ ID NO: 627762 - DNA, 19 bp, Mus musculus
  siRNA target sequence for MOR262-1 (NM_146920.1,56-74).
ggtacccgaggttagagat

SEQ ID NO: 627763 - DNA, 19 bp, Mus musculus
  siRNA target sequence for MOR262-1 (NM_146920.1,57-75).
gtacccgaggttagagatt

SEQ ID NO: 627764 - DNA, 19 bp, Mus musculus
  siRNA target sequence for MOR262-1 (NM_146920.1,60-78).
cccgaggttagagattgtt

SEQ ID NO: 627765 - DNA, 19 bp, Mus musculus
  siRNA target sequence for MOR262-1 (NM_146920.1,65-83).
ggttagagattgttctgtt

SEQ ID NO: 627766 - DNA, 19 bp, Mus musculus
  siRNA target sequence for MOR262-1 (NM_146920.1,122-140).
gtaactgtactcttatctt

SEQ ID NO: 627767 - DNA, 19 bp, Mus musculus
  siRNA target sequence for MOR262-1 (NM_146920.1,151-169).
ctggattcacgccttcaaa

SEQ ID NO: 627768 - DNA, 19 bp, Mus musculus
  siRNA target sequence for MOR262-1 (NM_146920.1,215-233).
gttacacgtctgcttctat

SEQ ID NO: 627769 - DNA, 19 bp, Mus musculus
  siRNA target sequence for MOR262-1 (NM_146920.1,287-305).
ggtgtgctgtgcagatgta

SEQ ID NO: 627770 - DNA, 19 bp, Mus musculus
  siRNA target sequence for MOR262-1 (NM_146920.1,321-339).
ggggtccacagagtgtata

SEQ ID NO: 627771 - DNA, 19 bp, Mus musculus
  siRNA target sequence for MOR262-1 (NM_146920.1,621-639).
cattccaatgctcttgatt

SEQ ID NO: 627772 - DNA, 19 bp, Mus musculus
  siRNA target sequence for MOR262-1 (NM_146920.1,653-671).
gcttcatcctttctacaat

SEQ ID NO: 627773 - DNA, 19 bp, Mus musculus
  siRNA target sequence for MOR262-1 (NM_146920.1,654-672).
cttcatcctttctacaatt

SEQ ID NO: 627774 - DNA, 19 bp, Mus musculus
  siRNA target sequence for MOR262-1 (NM_146920.1,816-834).
catctcgttgctttatgga

SEQ ID NO: 627775 - DNA, 19 bp, Mus musculus
  siRNA target sequence for MOR262-7 (NM_146839.1,63-81).
gaagctgcagacggtttta

SEQ ID NO: 627776 - DNA, 19 bp, Mus musculus
  siRNA target sequence for MOR262-7 (NM_146839.1,66-84).
gctgcagacggttttattt

SEQ ID NO: 627777 - DNA, 19 bp, Mus musculus
  siRNA target sequence for MOR262-7 (NM_146839.1,282-300).
ctctgagtgtatgattcaa

SEQ ID NO: 627778 - DNA, 19 bp, Mus musculus
  siRNA target sequence for MOR262-7 (NM_146839.1,284-302).
ctgagtgtatgattcaaat

SEQ ID NO: 627779 - DNA, 19 bp, Mus musculus
  siRNA target sequence for MOR262-7 (NM_146839.1,400-418).
gtcatcatgagcaaggata

SEQ ID NO: 627780 - DNA, 19 bp, Mus musculus
  siRNA target sequence for MOR262-7 (NM_146839.1,479-497).
cctctcttgcagtgcaatt

SEQ ID NO: 627781 - DNA, 19 bp, Mus musculus
  siRNA target sequence for MOR262-7 (NM_146839.1,484-502).
cttgcagtgcaattaccat

SEQ ID NO: 627782 - DNA, 19 bp, Mus musculus
  siRNA target sequence for MOR262-7 (NM_146839.1,563-581).
cttgtgcagatatttcaat

SEQ ID NO: 627783 - DNA, 19 bp, Mus musculus
  siRNA target sequence for MOR262-7 (NM_146839.1,591-609).
cagcctaacagggtcaaat

SEQ ID NO: 627784 - DNA, 19 bp, Mus musculus
  siRNA target sequence for MOR262-7 (NM_146839.1,593-611).
gcctaacagggtcaaatct

SEQ ID NO: 627785 - DNA, 19 bp, Mus musculus
  siRNA target sequence for MOR262-7 (NM_146839.1,602-620).
ggtcaaatctgctttttct

SEQ ID NO: 627786 - DNA, 19 bp, Mus musculus
  siRNA target sequence for MOR262-7 (NM_146839.1,777-795).
cgcaaagcccaagtctaaa

SEQ ID NO: 627787 - DNA, 19 bp, Mus musculus
  siRNA target sequence for MOR262-7 (NM_146839.1,934-952).
ggaaggaaaacgttgagta

SEQ ID NO: 627788 - DNA, 19 bp, Mus musculus
  siRNA target sequence for MOR262-8 (NM_146824.1,15-33).
ccagacgtttgtttctgaa

SEQ ID NO: 627789 - DNA, 19 bp, Mus musculus
  siRNA target sequence for MOR262-8 (NM_146824.1,60-78).
cccaaagactgagatcatt

SEQ ID NO: 627790 - DNA, 19 bp, Mus musculus
  siRNA target sequence for MOR262-8 (NM_146824.1,99-117).
catgtatctagtgattcta

SEQ ID NO: 627791 - DNA, 19 bp, Mus musculus
  siRNA target sequence for MOR262-8 (NM_146824.1,102-120).
gtatctagtgattctaact

SEQ ID NO: 627792 - DNA, 19 bp, Mus musculus
  siRNA target sequence for MOR262-8 (NM_146824.1,122-140).
gcaatggtgttctgatcat

SEQ ID NO: 627793 - DNA, 19 bp, Mus musculus
  siRNA target sequence for MOR262-8 (NM_146824.1,123-141).
caatggtgttctgatcata

SEQ ID NO: 627794 - DNA, 19 bp, Mus musculus
  siRNA target sequence for MOR262-8 (NM_146824.1,135-153).
gatcatagcaagcatcttt

SEQ ID NO: 627795 - DNA, 19 bp, Mus musculus
  siRNA target sequence for MOR262-8 (NM_146824.1,247-265).
gtgagcctaatttcaaaga

SEQ ID NO: 627796 - DNA, 19 bp, Mus musculus
  siRNA target sequence for MOR262-8 (NM_146824.1,300-318).
gatgttctttggatttgca

SEQ ID NO: 627797 - DNA, 19 bp, Mus musculus
  siRNA target sequence for MOR262-8 (NM_146824.1,450-468).
ctctggcagcatcaattca

SEQ ID NO: 627798 - DNA, 19 bp, Mus musculus
  siRNA target sequence for MOR262-8 (NM_146824.1,504-522).
ctgtgggaataatgtgatt

SEQ ID NO: 627799 - DNA, 19 bp, Mus musculus
  siRNA target sequence for MOR262-8 (NM_146824.1,506-524).
gtgggaataatgtgattaa

SEQ ID NO: 627800 - DNA, 19 bp, Mus musculus
  siRNA target sequence for MOR262-8 (NM_146824.1,558-576).
gctagcatgtgctgatata

SEQ ID NO: 627801 - DNA, 19 bp, Mus musculus
  siRNA target sequence for MOR262-8 (NM_146824.1,563-581).
catgtgctgatatatctct

SEQ ID NO: 627802 - DNA, 19 bp, Mus musculus
  siRNA target sequence for MOR262-8 (NM_146824.1,568-586).
gctgatatatctctcaata

SEQ ID NO: 627803 - DNA, 19 bp, Mus musculus
  siRNA target sequence for MOR262-8 (NM_146824.1,569-587).
ctgatatatctctcaatat

SEQ ID NO: 627804 - DNA, 19 bp, Mus musculus
  siRNA target sequence for MOR262-8 (NM_146824.1,628-646).
ccactactagtcatctttt

SEQ ID NO: 627805 - DNA, 19 bp, Mus musculus
  siRNA target sequence for MOR262-8 (NM_146824.1,907-925).
gttaaagctgccgtaaaat

SEQ ID NO: 627806 - DNA, 19 bp, Mus musculus
  siRNA target sequence for MOR262-8 (NM_146824.1,914-932).
ctgccgtaaaatacatact

SEQ ID NO: 627807 - DNA, 19 bp, Mus musculus
  siRNA target sequence for MOR262-8 (NM_146824.1,916-934).
gccgtaaaatacatactga

SEQ ID NO: 627808 - DNA, 19 bp, Mus musculus
  siRNA target sequence for MOR262-8 (NM_146824.1,917-935).
ccgtaaaatacatactgaa

SEQ ID NO: 627809 - DNA, 19 bp, Mus musculus
  siRNA target sequence for MOR263-10 (NM_146288.1,649-667).
gcggcagtcctctgcatat

SEQ ID NO: 627810 - DNA, 19 bp, Mus musculus
  siRNA target sequence for MOR263-10 (NM_146288.1,650-668).
cggcagtcctctgcatatt

SEQ ID NO: 627811 - DNA, 19 bp, Mus musculus
  siRNA target sequence for MOR263-10 (NM_146288.1,681-699).
gctgattatttcttcctat

SEQ ID NO: 627812 - DNA, 19 bp, Mus musculus
  siRNA target sequence for MOR263-10 (NM_146288.1,845-863).
caccagaagtggataaact

SEQ ID NO: 627813 - DNA, 19 bp, Mus musculus
  siRNA target sequence for MOR263-9 (NM_146327.1,654-672).
catcctctgtatttctagt

SEQ ID NO: 627814 - DNA, 19 bp, Mus musculus
  siRNA target sequence for MOR263-9 (NM_146327.1,660-678).
ctgtatttctagtccattt

SEQ ID NO: 627815 - DNA, 19 bp, Mus musculus
  siRNA target sequence for MOR264-2 (NM_147029.1,65-83).
ggttctctggcgtacctaa

SEQ ID NO: 627816 - DNA, 19 bp, Mus musculus
  siRNA target sequence for MOR264-2 (NM_147029.1,76-94).
gtacctaacctgcaaacat

SEQ ID NO: 627817 - DNA, 19 bp, Mus musculus
  siRNA target sequence for MOR264-2 (NM_147029.1,120-138).
gtatgtggttatcttaata

SEQ ID NO: 627818 - DNA, 19 bp, Mus musculus
  siRNA target sequence for MOR264-2 (NM_147029.1,124-142).
gtggttatcttaataggaa

SEQ ID NO: 627819 - DNA, 19 bp, Mus musculus
  siRNA target sequence for MOR264-2 (NM_147029.1,140-158).
gaaacacctctatacttgt

SEQ ID NO: 627820 - DNA, 19 bp, Mus musculus
  siRNA target sequence for MOR264-2 (NM_147029.1,254-272).
cccgcattctctacaatct

SEQ ID NO: 627821 - DNA, 19 bp, Mus musculus
  siRNA target sequence for MOR264-2 (NM_147029.1,255-273).
ccgcattctctacaatctt

SEQ ID NO: 627822 - DNA, 19 bp, Mus musculus
  siRNA target sequence for MOR264-2 (NM_147029.1,256-274).
cgcattctctacaatcttt

SEQ ID NO: 627823 - DNA, 19 bp, Mus musculus
  siRNA target sequence for MOR264-2 (NM_147029.1,300-318).
cctggcctgtgctattcaa

SEQ ID NO: 627824 - DNA, 19 bp, Mus musculus
  siRNA target sequence for MOR264-2 (NM_147029.1,490-508).
ggacaaacttgtcgaatat

SEQ ID NO: 627825 - DNA, 19 bp, Mus musculus
  siRNA target sequence for MOR264-2 (NM_147029.1,491-509).
gacaaacttgtcgaatatt

SEQ ID NO: 627826 - DNA, 19 bp, Mus musculus
  siRNA target sequence for MOR264-2 (NM_147029.1,923-941).
gaaggcttttacttaaaat

SEQ ID NO: 627827 - DNA, 19 bp, Mus musculus
  siRNA target sequence for MOR264-5 (NM_146837.1,301-319).
gtgagctgtgccacacaaa

SEQ ID NO: 627828 - DNA, 19 bp, Mus musculus
  siRNA target sequence for MOR264-5 (NM_146837.1,582-600).
ctgtggagatacttcaata

SEQ ID NO: 627829 - DNA, 19 bp, Mus musculus
  siRNA target sequence for MOR264-5 (NM_146837.1,584-602).
gtggagatacttcaataca

SEQ ID NO: 627830 - DNA, 19 bp, Mus musculus
  siRNA target sequence for MOR264-5 (NM_146837.1,641-659).
cattccctttcttgttgat

SEQ ID NO: 627831 - DNA, 19 bp, Mus musculus
  siRNA target sequence for MOR266-8 (NM_146345.1,65-83).
ccaatgctcctgaattcca

SEQ ID NO: 627832 - DNA, 19 bp, Mus musculus
  siRNA target sequence for MOR266-8 (NM_146345.1,327-345).
cactctgggaggtactgat

SEQ ID NO: 627833 - DNA, 19 bp, Mus musculus
  siRNA target sequence for MOR266-8 (NM_146345.1,337-355).
ggtactgattgctttctct

SEQ ID NO: 627834 - DNA, 19 bp, Mus musculus
  siRNA target sequence for MOR266-8 (NM_146345.1,804-822).
ctcgagcagctctgatgat

SEQ ID NO: 627835 - DNA, 19 bp, Mus musculus
  siRNA target sequence for MOR266-8 (NM_146345.1,920-938).
ggaactccatcttctgtaa

SEQ ID NO: 627836 - DNA, 19 bp, Mus musculus
  siRNA target sequence for MOR267-4 (NM_146764.1,734-752).
ctgtagtagtgattcacta

SEQ ID NO: 627837 - DNA, 19 bp, Mus musculus
  siRNA target sequence for MOR267-4 (NM_146764.1,758-776).
gtgcctccattgtatactt

SEQ ID NO: 627838 - DNA, 19 bp, Mus musculus
  siRNA target sequence for MOR267-4 (NM_146764.1,760-778).
gcctccattgtatacttca

SEQ ID NO: 627839 - DNA, 19 bp, Mus musculus
  siRNA target sequence for MOR267-5 (NM_146763.1,802-820).
gaccaggatcagttgatct

SEQ ID NO: 627840 - DNA, 19 bp, Mus musculus
  siRNA target sequence for MOR267-5 (NM_146763.1,901-919).
cgaaaagtgttgggtaaaa

SEQ ID NO: 627841 - DNA, 19 bp, Mus musculus
  siRNA target sequence for MOR273-1 (NM_146958.1,23-41).
cttttaacagcgacttcat

SEQ ID NO: 627842 - DNA, 19 bp, Mus musculus
  siRNA target sequence for MOR273-1 (NM_146958.1,60-78).
ctcttcaaagataagctta

SEQ ID NO: 627843 - DNA, 19 bp, Mus musculus
  siRNA target sequence for MOR275-2 (NM_146502.1,5-23).
gcaactatactggacaatt

SEQ ID NO: 627844 - DNA, 19 bp, Mus musculus
  siRNA target sequence for MOR275-2 (NM_146502.1,6-24).
caactatactggacaattt

SEQ ID NO: 627845 - DNA, 19 bp, Mus musculus
  siRNA target sequence for MOR276-2 (NM_146337.1,56-74).
catccacagatgactttat

SEQ ID NO: 627846 - DNA, 19 bp, Mus musculus
  siRNA target sequence for MOR276-2 (NM_146337.1,59-77).
ccacagatgactttatcct

SEQ ID NO: 627847 - DNA, 19 bp, Mus musculus
  siRNA target sequence for MOR276-2 (NM_146337.1,96-114).
cagcccaagagatcttctt

SEQ ID NO: 627848 - DNA, 19 bp, Mus musculus
  siRNA target sequence for MOR276-2 (NM_146337.1,318-336).
cgtaggttgtggcatacaa

SEQ ID NO: 627849 - DNA, 19 bp, Mus musculus
  siRNA target sequence for MOR276-2 (NM_146337.1,319-337).
gtaggttgtggcatacaaa

SEQ ID NO: 627850 - DNA, 19 bp, Mus musculus
  siRNA target sequence for MOR276-2 (NM_146337.1,574-592).
gagatgctctccttgctaa

SEQ ID NO: 627851 - DNA, 19 bp, Mus musculus
  siRNA target sequence for MOR276-2 (NM_146337.1,611-629).
catccctatttgagaagat

SEQ ID NO: 627852 - DNA, 19 bp, Mus musculus
  siRNA target sequence for MOR276-2 (NM_146337.1,672-690).
catcattgtagcctcttat

SEQ ID NO: 627853 - DNA, 19 bp, Mus musculus
  siRNA target sequence for MOR276-2 (NM_146337.1,704-722).
gaaccgtactccatatgca

SEQ ID NO: 627854 - DNA, 19 bp, Mus musculus
  siRNA target sequence for MOR276-2 (NM_146337.1,714-732).
ccatatgcactctgctaaa

SEQ ID NO: 627855 - DNA, 19 bp, Mus musculus
  siRNA target sequence for MOR276-2 (NM_146337.1,836-854).
ccccaagccaggacaagat

SEQ ID NO: 627856 - DNA, 19 bp, Mus musculus
  siRNA target sequence for MOR276-2 (NM_146337.1,912-930).
gaggaatcgcgatgtgata

SEQ ID NO: 627857 - DNA, 19 bp, Mus musculus
  siRNA target sequence for MOR277-1 (NM_146877.1,388-406).
ccgctgagatactctgtaa

SEQ ID NO: 627858 - DNA, 19 bp, Mus musculus
  siRNA target sequence for MOR277-1 (NM_146877.1,389-407).
cgctgagatactctgtaat

SEQ ID NO: 627859 - DNA, 19 bp, Mus musculus
  siRNA target sequence for MOR277-1 (NM_146877.1,391-409).
ctgagatactctgtaatca

SEQ ID NO: 627860 - DNA, 19 bp, Mus musculus
  siRNA target sequence for MOR277-1 (NM_146877.1,585-603).
ctacgagaccatgatctat

SEQ ID NO: 627861 - DNA, 19 bp, Mus musculus
  siRNA target sequence for MOR277-1 (NM_146877.1,589-607).
gagaccatgatctatgtct

SEQ ID NO: 627862 - DNA, 19 bp, Mus musculus
  siRNA target sequence for MOR277-1 (NM_146877.1,761-779).
gggctgccatgatcacata

SEQ ID NO: 627863 - DNA, 19 bp, Mus musculus
  siRNA target sequence for MOR277-1 (NM_146877.1,763-781).
gctgccatgatcacataca

SEQ ID NO: 627864 - DNA, 19 bp, Mus musculus
  siRNA target sequence for MOR277-1 (NM_146877.1,803-821).
cctccaagcaggacaaagt

SEQ ID NO: 627865 - DNA, 19 bp, Mus musculus
  siRNA target sequence for MOR277-1 (NM_146877.1,897-915).
cggagccctgaggaaacta

SEQ ID NO: 627866 - DNA, 19 bp, Mus musculus
  siRNA target sequence for MOR277-1 (NM_146877.1,899-917).
gagccctgaggaaactact

SEQ ID NO: 627867 - DNA, 19 bp, Mus musculus
  siRNA target sequence for MOR278-1 (NM_146538.1,23-41).
cagaggcggacttcattct

SEQ ID NO: 627868 - DNA, 19 bp, Mus musculus
  siRNA target sequence for MOR278-1 (NM_146538.1,365-383).
gctacgtagccatatgctt

SEQ ID NO: 627869 - DNA, 19 bp, Mus musculus
  siRNA target sequence for MOR278-1 (NM_146538.1,366-384).
ctacgtagccatatgcttt

SEQ ID NO: 627870 - DNA, 19 bp, Mus musculus
  siRNA target sequence for MOR278-1 (NM_146538.1,506-524).
gccactctcgaacaatcaa

SEQ ID NO: 627871 - DNA, 19 bp, Mus musculus
  siRNA target sequence for MOR278-1 (NM_146538.1,798-816).
gccaggcaagagtgacaaa

SEQ ID NO: 627872 - DNA, 19 bp, Mus musculus
  siRNA target sequence for MOR278-1 (NM_146538.1,849-867).
ggtgctgaaccctctcata

SEQ ID NO: 627873 - DNA, 19 bp, Mus musculus
  siRNA target sequence for MOR283-6 (NM_146598.1,86-104).
ccattatcatagcactata

SEQ ID NO: 627874 - DNA, 19 bp, Mus musculus
  siRNA target sequence for MOR283-6 (NM_146598.1,210-228).
cctcctccaaccatcagtt

SEQ ID NO: 627875 - DNA, 19 bp, Mus musculus
  siRNA target sequence for MOR283-6 (NM_146598.1,211-229).
ctcctccaaccatcagtta

SEQ ID NO: 627876 - DNA, 19 bp, Mus musculus
  siRNA target sequence for MOR283-6 (NM_146598.1,214-232).
ctccaaccatcagttatca

SEQ ID NO: 627877 - DNA, 19 bp, Mus musculus
  siRNA target sequence for MOR283-6 (NM_146598.1,216-234).
ccaaccatcagttatcatt

SEQ ID NO: 627878 - DNA, 19 bp, Mus musculus
  siRNA target sequence for MOR283-6 (NM_146598.1,236-254).
ccaaggccgtactagattt

SEQ ID NO: 627879 - DNA, 19 bp, Mus musculus
  siRNA target sequence for MOR283-6 (NM_146598.1,237-255).
caaggccgtactagatttt

SEQ ID NO: 627880 - DNA, 19 bp, Mus musculus
  siRNA target sequence for MOR283-6 (NM_146598.1,878-896).
ggaataatgaggttattga

SEQ ID NO: 627881 - DNA, 19 bp, Mus musculus
  siRNA target sequence for MOR283-6 (NM_146598.1,889-907).
gttattgaggctttgaaaa

SEQ ID NO: 627882 - DNA, 19 bp, Mus musculus
  siRNA target sequence for MOR283-9 (NM_146452.1,231-249).
cactccaaaggccatacta

SEQ ID NO: 627883 - DNA, 19 bp, Mus musculus
  siRNA target sequence for MOR283-9 (NM_146452.1,233-251).
ctccaaaggccatactaga

SEQ ID NO: 627884 - DNA, 19 bp, Mus musculus
  siRNA target sequence for MOR283-9 (NM_146452.1,236-254).
caaaggccatactagatta

SEQ ID NO: 627885 - DNA, 19 bp, Mus musculus
  siRNA target sequence for MOR283-9 (NM_146452.1,763-781).
gctattgtcatgtatgtat

SEQ ID NO: 627886 - DNA, 19 bp, Mus musculus
  siRNA target sequence for MOR283-9 (NM_146452.1,821-839).
gctcagttttttatacaat

SEQ ID NO: 627887 - DNA, 19 bp, Mus musculus
  siRNA target sequence for MOR31-11 (NM_146813.1,102-120).
ctatgttgtggctattgta

SEQ ID NO: 627888 - DNA, 19 bp, Mus musculus
  siRNA target sequence for MOR31-11 (NM_146813.1,166-184).
cacgagcccatgtttatat

SEQ ID NO: 627889 - DNA, 19 bp, Mus musculus
  siRNA target sequence for MOR31-11 (NM_146813.1,237-255).
caaactgctcagtaacctt

SEQ ID NO: 627890 - DNA, 19 bp, Mus musculus
  siRNA target sequence for MOR31-11 (NM_146813.1,262-280).
gggtcccaagaaataacct

SEQ ID NO: 627891 - DNA, 19 bp, Mus musculus
  siRNA target sequence for MOR31-11 (NM_146813.1,263-281).
ggtcccaagaaataacctt

SEQ ID NO: 627892 - DNA, 19 bp, Mus musculus
  siRNA target sequence for MOR31-11 (NM_146813.1,410-428).
ctccgcaggtgattgtcaa

SEQ ID NO: 627893 - DNA, 19 bp, Mus musculus
  siRNA target sequence for MOR31-11 (NM_146813.1,413-431).
cgcaggtgattgtcaagat

SEQ ID NO: 627894 - DNA, 19 bp, Mus musculus
  siRNA target sequence for MOR31-11 (NM_146813.1,414-432).
gcaggtgattgtcaagatt

SEQ ID NO: 627895 - DNA, 19 bp, Mus musculus
  siRNA target sequence for MOR31-11 (NM_146813.1,415-433).
caggtgattgtcaagatta

SEQ ID NO: 627896 - DNA, 19 bp, Mus musculus
  siRNA target sequence for MOR31-11 (NM_146813.1,463-481).
gtcatcctgccagatgttt

SEQ ID NO: 627897 - DNA, 19 bp, Mus musculus
  siRNA target sequence for MOR31-11 (NM_146813.1,487-505).
ctgaggcggttgccatttt

SEQ ID NO: 627898 - DNA, 19 bp, Mus musculus
  siRNA target sequence for MOR31-11 (NM_146813.1,491-509).
ggcggttgccattttgcaa

SEQ ID NO: 627899 - DNA, 19 bp, Mus musculus
  siRNA target sequence for MOR31-11 (NM_146813.1,563-581).
cctctgcagacatctctat

SEQ ID NO: 627900 - DNA, 19 bp, Mus musculus
  siRNA target sequence for MOR31-11 (NM_146813.1,604-622).
gttccgctcatgactgtaa

SEQ ID NO: 627901 - DNA, 19 bp, Mus musculus
  siRNA target sequence for MOR31-11 (NM_146813.1,643-661).
gcagtatcctacatcttca

SEQ ID NO: 627902 - DNA, 19 bp, Mus musculus
  siRNA target sequence for MOR31-11 (NM_146813.1,660-678).
catcctccgggcagttttt

SEQ ID NO: 627903 - DNA, 19 bp, Mus musculus
  siRNA target sequence for MOR31-11 (NM_146813.1,663-681).
cctccgggcagtttttcta

SEQ ID NO: 627904 - DNA, 19 bp, Mus musculus
  siRNA target sequence for MOR31-11 (NM_146813.1,800-818).
gtgttcctcgtaatgttct

SEQ ID NO: 627905 - DNA, 19 bp, Mus musculus
  siRNA target sequence for MOR31-11 (NM_146813.1,806-824).
ctcgtaatgttctcatctt

SEQ ID NO: 627906 - DNA, 19 bp, Mus musculus
  siRNA target sequence for MOR31-11 (NM_146813.1,808-826).
cgtaatgttctcatcttat

SEQ ID NO: 627907 - DNA, 19 bp, Mus musculus
  siRNA target sequence for MOR31-11 (NM_146813.1,822-840).
cttatttgccaacttctat

SEQ ID NO: 627908 - DNA, 19 bp, Mus musculus
  siRNA target sequence for MOR31-11 (NM_146813.1,894-912).
gatccaggacaaattcctt

SEQ ID NO: 627909 - DNA, 19 bp, Mus musculus
  siRNA target sequence for MOR31-7 (NM_147055.1,89-107).
gtatccctttctgctttat

SEQ ID NO: 627910 - DNA, 19 bp, Mus musculus
  siRNA target sequence for MOR31-7 (NM_147055.1,138-156).
ccttctctaccttattgca

SEQ ID NO: 627911 - DNA, 19 bp, Mus musculus
  siRNA target sequence for MOR31-7 (NM_147055.1,205-223).
gccatgactgacctcatat

SEQ ID NO: 627912 - DNA, 19 bp, Mus musculus
  siRNA target sequence for MOR31-7 (NM_147055.1,243-261).
caagacccttagcatcttt

SEQ ID NO: 627913 - DNA, 19 bp, Mus musculus
  siRNA target sequence for MOR31-7 (NM_147055.1,393-411).
cttgaggtataccactatt

SEQ ID NO: 627914 - DNA, 19 bp, Mus musculus
  siRNA target sequence for MOR31-7 (NM_147055.1,446-464).
gaatctctttccgaagttt

SEQ ID NO: 627915 - DNA, 19 bp, Mus musculus
  siRNA target sequence for MOR31-7 (NM_147055.1,618-636).
catgacagtgattatagat

SEQ ID NO: 627916 - DNA, 19 bp, Mus musculus
  siRNA target sequence for MOR31-7 (NM_147055.1,750-768).
cctcatgttctatatacca

SEQ ID NO: 627917 - DNA, 19 bp, Mus musculus
  siRNA target sequence for MOR34-5 (NM_147049.1,4-22).
gtcatgtcagtgcagaata

SEQ ID NO: 627918 - DNA, 19 bp, Mus musculus
  siRNA target sequence for MOR34-5 (NM_147049.1,192-210).
ctactttttagcaatgctt

SEQ ID NO: 627919 - DNA, 19 bp, Mus musculus
  siRNA target sequence for MOR34-5 (NM_147049.1,226-244).
gtcatgtgctctagtacaa

SEQ ID NO: 627920 - DNA, 19 bp, Mus musculus
  siRNA target sequence for MOR34-5 (NM_147049.1,279-297).
caaagaaattggatttgat

SEQ ID NO: 627921 - DNA, 19 bp, Mus musculus
  siRNA target sequence for MOR34-5 (NM_147049.1,403-421).
cgttactccaccattctca

SEQ ID NO: 627922 - DNA, 19 bp, Mus musculus
  siRNA target sequence for MOR34-5 (NM_147049.1,464-482).
ggggcgttctgctaattat

SEQ ID NO: 627923 - DNA, 19 bp, Mus musculus
  siRNA target sequence for MOR34-5 (NM_147049.1,465-483).
gggcgttctgctaattatt

SEQ ID NO: 627924 - DNA, 19 bp, Mus musculus
  siRNA target sequence for MOR34-5 (NM_147049.1,468-486).
cgttctgctaattattcca

SEQ ID NO: 627925 - DNA, 19 bp, Mus musculus
  siRNA target sequence for MOR34-5 (NM_147049.1,475-493).
ctaattattccattcacat

SEQ ID NO: 627926 - DNA, 19 bp, Mus musculus
  siRNA target sequence for MOR34-5 (NM_147049.1,513-531).
ctactgtcgaggcaatata

SEQ ID NO: 627927 - DNA, 19 bp, Mus musculus
  siRNA target sequence for MOR34-5 (NM_147049.1,516-534).
ctgtcgaggcaatataata

SEQ ID NO: 627928 - DNA, 19 bp, Mus musculus
  siRNA target sequence for MOR34-5 (NM_147049.1,523-541).
ggcaatataataaaccata

SEQ ID NO: 627929 - DNA, 19 bp, Mus musculus
  siRNA target sequence for MOR34-5 (NM_147049.1,640-658).
gacatcctgtgcatcacaa

SEQ ID NO: 627930 - DNA, 19 bp, Mus musculus
  siRNA target sequence for MOR34-5 (NM_147049.1,938-956).
cagggtctaaggattccaa

SEQ ID NO: 627931 - DNA, 19 bp, Mus musculus
  siRNA target sequence for MOR34-6 (NM_147043.1,31-49).
ccgcagtctttcattctta

SEQ ID NO: 627932 - DNA, 19 bp, Mus musculus
  siRNA target sequence for MOR34-6 (NM_147043.1,36-54).
gtctttcattcttaatgga

SEQ ID NO: 627933 - DNA, 19 bp, Mus musculus
  siRNA target sequence for MOR34-6 (NM_147043.1,42-60).
cattcttaatggaattcct

SEQ ID NO: 627934 - DNA, 19 bp, Mus musculus
  siRNA target sequence for MOR34-6 (NM_147043.1,62-80).
gtctcgaagcagtgcatat

SEQ ID NO: 627935 - DNA, 19 bp, Mus musculus
  siRNA target sequence for MOR34-6 (NM_147043.1,89-107).
ctcttccactctgtacaat

SEQ ID NO: 627936 - DNA, 19 bp, Mus musculus
  siRNA target sequence for MOR34-6 (NM_147043.1,94-112).
ccactctgtacaatgtaca

SEQ ID NO: 627937 - DNA, 19 bp, Mus musculus
  siRNA target sequence for MOR34-6 (NM_147043.1,128-146).
gcaaccttggccttgtata

SEQ ID NO: 627938 - DNA, 19 bp, Mus musculus
  siRNA target sequence for MOR34-6 (NM_147043.1,139-157).
cttgtatatctcatttact

SEQ ID NO: 627939 - DNA, 19 bp, Mus musculus
  siRNA target sequence for MOR34-6 (NM_147043.1,167-185).
ccttacatcgcccaatgta

SEQ ID NO: 627940 - DNA, 19 bp, Mus musculus
  siRNA target sequence for MOR34-6 (NM_147043.1,168-186).
cttacatcgcccaatgtat

SEQ ID NO: 627941 - DNA, 19 bp, Mus musculus
  siRNA target sequence for MOR34-6 (NM_147043.1,397-415).
cgctatgcaaccatactta

SEQ ID NO: 627942 - DNA, 19 bp, Mus musculus
  siRNA target sequence for MOR34-6 (NM_147043.1,450-468).
cttcttgagaggtgtgtta

SEQ ID NO: 627943 - DNA, 19 bp, Mus musculus
  siRNA target sequence for MOR34-6 (NM_147043.1,523-541).
gtcatctcccatacatatt

SEQ ID NO: 627944 - DNA, 19 bp, Mus musculus
  siRNA target sequence for MOR34-6 (NM_147043.1,525-543).
catctcccatacatattgt

SEQ ID NO: 627945 - DNA, 19 bp, Mus musculus
  siRNA target sequence for MOR34-6 (NM_147043.1,736-754).
cacatatctgccatcatca

SEQ ID NO: 627946 - DNA, 19 bp, Mus musculus
  siRNA target sequence for MOR34-6 (NM_147043.1,738-756).
catatctgccatcatcatt

SEQ ID NO: 627947 - DNA, 19 bp, Mus musculus
  siRNA target sequence for MOR34-6 (NM_147043.1,901-919).
cagatcagagatagtatca

SEQ ID NO: 627948 - DNA, 19 bp, Mus musculus
  siRNA target sequence for MOR34-6 (NM_147043.1,903-921).
gatcagagatagtatcatt

SEQ ID NO: 627949 - DNA, 19 bp, Mus musculus
  siRNA target sequence for MOR34-6 (NM_147043.1,906-924).
cagagatagtatcattaaa

SEQ ID NO: 627950 - DNA, 19 bp, Mus musculus
  siRNA target sequence for MOR34-6 (NM_147043.1,927-945).
ctttcacggtgaaaaaggt

SEQ ID NO: 627951 - DNA, 19 bp, Mus musculus
  siRNA target sequence for MOR40-1 (NM_147045.1,527-545).
gatattgtgcaagaattat

SEQ ID NO: 627952 - DNA, 19 bp, Mus musculus
  siRNA target sequence for MOR40-1 (NM_147045.1,592-610).
gatgacatcacttttaata

SEQ ID NO: 627953 - DNA, 19 bp, Mus musculus
  siRNA target sequence for MOR40-1 (NM_147045.1,928-946).
ggaatacggaaccttctta

SEQ ID NO: 627954 - DNA, 19 bp, Mus musculus
  siRNA target sequence for MOR40-4 (NM_146748.1,133-151).
ctcattgccaacatactta

SEQ ID NO: 627955 - DNA, 19 bp, Mus musculus
  siRNA target sequence for MOR40-4 (NM_146748.1,148-166).
cttattgtgactgtcattt

SEQ ID NO: 627956 - DNA, 19 bp, Mus musculus
  siRNA target sequence for MOR40-4 (NM_146748.1,228-246).
cgtgggtctggcaactact

SEQ ID NO: 627957 - DNA, 19 bp, Mus musculus
  siRNA target sequence for MOR40-4 (NM_146748.1,229-247).
gtgggtctggcaactacta

SEQ ID NO: 627958 - DNA, 19 bp, Mus musculus
  siRNA target sequence for MOR40-4 (NM_146748.1,232-250).
ggtctggcaactactatca

SEQ ID NO: 627959 - DNA, 19 bp, Mus musculus
  siRNA target sequence for MOR40-4 (NM_146748.1,233-251).
gtctggcaactactatcat

SEQ ID NO: 627960 - DNA, 19 bp, Mus musculus
  siRNA target sequence for MOR40-4 (NM_146748.1,266-284).
ccatcttatggttcaatga

SEQ ID NO: 627961 - DNA, 19 bp, Mus musculus
  siRNA target sequence for MOR40-4 (NM_146748.1,267-285).
catcttatggttcaatgat

SEQ ID NO: 627962 - DNA, 19 bp, Mus musculus
  siRNA target sequence for MOR40-4 (NM_146748.1,408-426).
gagatactcttcaatagtt

SEQ ID NO: 627963 - DNA, 19 bp, Mus musculus
  siRNA target sequence for MOR40-4 (NM_146748.1,456-474).
gataatggccatcagaaat

SEQ ID NO: 627964 - DNA, 19 bp, Mus musculus
  siRNA target sequence for MOR40-4 (NM_146748.1,546-564).
ctgcttgtgctctaacctt

SEQ ID NO: 627965 - DNA, 19 bp, Mus musculus
  siRNA target sequence for MOR40-4 (NM_146748.1,641-659).
ggagtgaccttgctttgat

SEQ ID NO: 627966 - DNA, 19 bp, Mus musculus
  siRNA target sequence for MOR40-4 (NM_146748.1,642-660).
gagtgaccttgctttgatt

SEQ ID NO: 627967 - DNA, 19 bp, Mus musculus
  siRNA target sequence for MOR40-4 (NM_146748.1,646-664).
gaccttgctttgattatga

SEQ ID NO: 627968 - DNA, 19 bp, Mus musculus
  siRNA target sequence for MOR40-4 (NM_146748.1,718-736).
gcatctaaagccttaagta

SEQ ID NO: 627969 - DNA, 19 bp, Mus musculus
  siRNA target sequence for MOR40-4 (NM_146748.1,746-764).
ctcacctcatcctaatctt

SEQ ID NO: 627970 - DNA, 19 bp, Mus musculus
  siRNA target sequence for MOR40-4 (NM_146748.1,748-766).
cacctcatcctaatctttt

SEQ ID NO: 627971 - DNA, 19 bp, Mus musculus
  siRNA target sequence for MOR40-4 (NM_146748.1,757-775).
ctaatctttttcttctaca

SEQ ID NO: 627972 - DNA, 19 bp, Mus musculus
  siRNA target sequence for MOR40-4 (NM_146748.1,787-805).
gtcatatccatcactcata

SEQ ID NO: 627973 - DNA, 19 bp, Mus musculus
  siRNA target sequence for MOR40-4 (NM_146748.1,789-807).
catatccatcactcatagt

SEQ ID NO: 627974 - DNA, 19 bp, Mus musculus
  siRNA target sequence for MOR40-4 (NM_146748.1,846-864).
cgtgctgcacaatgttatt

SEQ ID NO: 627975 - DNA, 19 bp, Mus musculus
  siRNA target sequence for MOR40-4 (NM_146748.1,885-903).
ggtgtatgcacttaagaat

SEQ ID NO: 627976 - DNA, 19 bp, Mus musculus
  siRNA target sequence for MOR8-2 (NM_147111.1,8-26).
ctggtatgtccattttcaa

SEQ ID NO: 627977 - DNA, 19 bp, Mus musculus
  siRNA target sequence for MOR8-2 (NM_147111.1,24-42).
caacctctcagttactgaa

SEQ ID NO: 627978 - DNA, 19 bp, Mus musculus
  siRNA target sequence for MOR8-2 (NM_147111.1,40-58).
gaagtttctacgttccatt

SEQ ID NO: 627979 - DNA, 19 bp, Mus musculus
  siRNA target sequence for MOR8-2 (NM_147111.1,85-103).
gcccacatttggatcttca

SEQ ID NO: 627980 - DNA, 19 bp, Mus musculus
  siRNA target sequence for MOR8-2 (NM_147111.1,253-271).
cctaccatgcttaaggttt

SEQ ID NO: 627981 - DNA, 19 bp, Mus musculus
  siRNA target sequence for MOR8-2 (NM_147111.1,254-272).
ctaccatgcttaaggtttt

SEQ ID NO: 627982 - DNA, 19 bp, Mus musculus
  siRNA target sequence for MOR8-2 (NM_147111.1,314-332).
cccaggagttttttattca

SEQ ID NO: 627983 - DNA, 19 bp, Mus musculus
  siRNA target sequence for MOR8-2 (NM_147111.1,315-333).
ccaggagttttttattcat

SEQ ID NO: 627984 - DNA, 19 bp, Mus musculus
  siRNA target sequence for MOR8-2 (NM_147111.1,318-336).
ggagttttttattcatgaa

SEQ ID NO: 627985 - DNA, 19 bp, Mus musculus
  siRNA target sequence for MOR8-2 (NM_147111.1,319-337).
gagttttttattcatgaat

SEQ ID NO: 627986 - DNA, 19 bp, Mus musculus
  siRNA target sequence for MOR8-2 (NM_147111.1,431-449).
gtgccagggtccttcaaat

SEQ ID NO: 627987 - DNA, 19 bp, Mus musculus
  siRNA target sequence for MOR8-2 (NM_147111.1,503-521).
ctctagtgcgtctaagata

SEQ ID NO: 627988 - DNA, 19 bp, Mus musculus
  siRNA target sequence for MOR8-2 (NM_147111.1,505-523).
ctagtgcgtctaagatact

SEQ ID NO: 627989 - DNA, 19 bp, Mus musculus
  siRNA target sequence for MOR8-2 (NM_147111.1,580-598).
gcctgctcagacaacaagt

SEQ ID NO: 627990 - DNA, 19 bp, Mus musculus
  siRNA target sequence for MOR8-2 (NM_147111.1,585-603).
ctcagacaacaagttcaat

SEQ ID NO: 627991 - DNA, 19 bp, Mus musculus
  siRNA target sequence for MOR8-2 (NM_147111.1,587-605).
cagacaacaagttcaatgt

SEQ ID NO: 627992 - DNA, 19 bp, Mus musculus
  siRNA target sequence for MOR8-2 (NM_147111.1,643-661).
gacataaccttcattttca

SEQ ID NO: 627993 - DNA, 19 bp, Mus musculus
  siRNA target sequence for MOR8-2 (NM_147111.1,720-738).
caaggtcctcagtacttgt

SEQ ID NO: 627994 - DNA, 19 bp, Mus musculus
  siRNA target sequence for MOR8-2 (NM_147111.1,814-832).
cgtagttcccccatatcta

SEQ ID NO: 627995 - DNA, 19 bp, Mus musculus
  siRNA target sequence for MOR8-2 (NM_147111.1,815-833).
gtagttcccccatatctaa

SEQ ID NO: 627996 - DNA, 19 bp, Mus musculus
  siRNA target sequence for MOR8-2 (NM_147111.1,818-836).
gttcccccatatctaagat

SEQ ID NO: 627997 - DNA, 19 bp, Mus musculus
  siRNA target sequence for MOR8-2 (NM_147111.1,821-839).
cccccatatctaagattct

SEQ ID NO: 627998 - DNA, 19 bp, Mus musculus
  siRNA target sequence for MrgA1 (NM_153095.1,300-318).
cctaggtcacatcatagat

SEQ ID NO: 627999 - DNA, 19 bp, Mus musculus
  siRNA target sequence for MrgA1 (NM_153095.1,321-339).
catactgcttcttctcaat

SEQ ID NO: 628000 - DNA, 19 bp, Mus musculus
  siRNA target sequence for MrgA1 (NM_153095.1,368-386).
gcttttacacgatcatgat

SEQ ID NO: 628001 - DNA, 19 bp, Mus musculus
  siRNA target sequence for MrgA1 (NM_153095.1,377-395).
cgatcatgatggttctcta

SEQ ID NO: 628002 - DNA, 19 bp, Mus musculus
  siRNA target sequence for MrgA1 (NM_153095.1,976-994).
cctgagacagccaaaatca

SEQ ID NO: 628003 - DNA, 19 bp, Mus musculus
  siRNA target sequence for MrgA2 (NM_153101.1,323-341).
ctcagtagtatcatagctt

SEQ ID NO: 628004 - DNA, 19 bp, Mus musculus
  siRNA target sequence for MrgA2 (NM_153101.1,367-385).
ctacctcagcatcatcttt

SEQ ID NO: 628005 - DNA, 19 bp, Mus musculus
  siRNA target sequence for MrgA2 (NM_153101.1,393-411).
gctttaacaccattatgat

SEQ ID NO: 628006 - DNA, 19 bp, Mus musculus
  siRNA target sequence for MrgA2 (NM_153101.1,402-420).
ccattatgatggttgtcta

SEQ ID NO: 628007 - DNA, 19 bp, Mus musculus
  siRNA target sequence for MrgA2 (NM_153101.1,502-520).
ccgtccagtacatacatca

SEQ ID NO: 628008 - DNA, 19 bp, Mus musculus
  siRNA target sequence for MrgA2 (NM_153101.1,503-521).
cgtccagtacatacatcaa

SEQ ID NO: 628009 - DNA, 19 bp, Mus musculus
  siRNA target sequence for MrgA2 (NM_153101.1,592-610).
cttacataccagatatgat

SEQ ID NO: 628010 - DNA, 19 bp, Mus musculus
  siRNA target sequence for MrgA2 (NM_153101.1,645-663).
ccgcctcgtacatgatatt

SEQ ID NO: 628011 - DNA, 19 bp, Mus musculus
  siRNA target sequence for MrgA2 (NM_153101.1,648-666).
cctcgtacatgatattttt

SEQ ID NO: 628012 - DNA, 19 bp, Mus musculus
  siRNA target sequence for MrgA2 (NM_153101.1,651-669).
cgtacatgatatttttgct

SEQ ID NO: 628013 - DNA, 19 bp, Mus musculus
  siRNA target sequence for MrgA2 (NM_153101.1,652-670).
gtacatgatatttttgctt

SEQ ID NO: 628014 - DNA, 19 bp, Mus musculus
  siRNA target sequence for MrgA2 (NM_153101.1,733-751).
gaagcttaccagatttcat

SEQ ID NO: 628015 - DNA, 19 bp, Mus musculus
  siRNA target sequence for MrgA2 (NM_153101.1,844-862).
ccatgtattagatgttaat

SEQ ID NO: 628016 - DNA, 19 bp, Mus musculus
  siRNA target sequence for Mrga3 (NM_153067.1,378-396).
ccctacccaaaggaatttt

SEQ ID NO: 628017 - DNA, 19 bp, Mus musculus
  siRNA target sequence for Mrga3 (NM_153067.1,379-397).
cctacccaaaggaattttt

SEQ ID NO: 628018 - DNA, 19 bp, Mus musculus
  siRNA target sequence for Mrga3 (NM_153067.1,414-432).
ctatcaaaagggttctcta

SEQ ID NO: 628019 - DNA, 19 bp, Mus musculus
  siRNA target sequence for Mrga3 (NM_153067.1,597-615).
gcggttacttagataacca

SEQ ID NO: 628020 - DNA, 19 bp, Mus musculus
  siRNA target sequence for Mrga3 (NM_153067.1,598-616).
cggttacttagataaccat

SEQ ID NO: 628021 - DNA, 19 bp, Mus musculus
  siRNA target sequence for Mrga3 (NM_153067.1,613-631).
ccattatttcaattactct

SEQ ID NO: 628022 - DNA, 19 bp, Mus musculus
  siRNA target sequence for Mrga3 (NM_153067.1,636-654).
gtcaggcatgggacatctt

SEQ ID NO: 628023 - DNA, 19 bp, Mus musculus
  siRNA target sequence for Mrga3 (NM_153067.1,729-747).
gtggtgctaggaatatgaa

SEQ ID NO: 628024 - DNA, 19 bp, Mus musculus
  siRNA target sequence for Mrga3 (NM_153067.1,849-867).
ctggtgtgtttgtactaga

SEQ ID NO: 628025 - DNA, 19 bp, Mus musculus
  siRNA target sequence for Mrga3 (NM_153067.1,851-869).
ggtgtgtttgtactagatt

SEQ ID NO: 628026 - DNA, 19 bp, Mus musculus
  siRNA target sequence for Mrga3 (NM_153067.1,852-870).
gtgtgtttgtactagatta

SEQ ID NO: 628027 - DNA, 19 bp, Mus musculus
  siRNA target sequence for Mrga3 (NM_153067.1,881-899).
ctggtcctaactgctatta

SEQ ID NO: 628028 - DNA, 19 bp, Mus musculus
  siRNA target sequence for Mrga3 (NM_153067.1,943-961).
caggcaacggttgaataaa

SEQ ID NO: 628029 - DNA, 19 bp, Mus musculus
  siRNA target sequence for Mrga3 (NM_153067.1,945-963).
ggcaacggttgaataaaca

SEQ ID NO: 628030 - DNA, 19 bp, Mus musculus
  siRNA target sequence for Mrga3 (NM_153067.1,947-965).
caacggttgaataaacaga

SEQ ID NO: 628031 - DNA, 19 bp, Mus musculus
  siRNA target sequence for MrgA4 (NM_153524.1,694-712).
ggttcacctacccaacaat

SEQ ID NO: 628032 - DNA, 19 bp, Mus musculus
  siRNA target sequence for MrgA4 (NM_153524.1,695-713).
gttcacctacccaacaata

SEQ ID NO: 628033 - DNA, 19 bp, Mus musculus
  siRNA target sequence for MrgA4 (NM_153524.1,698-716).
cacctacccaacaatattt

SEQ ID NO: 628034 - DNA, 19 bp, Mus musculus
  siRNA target sequence for MrgA4 (NM_153524.1,930-948).
gtcccaaatatgtaattga

SEQ ID NO: 628035 - DNA, 19 bp, Mus musculus
  siRNA target sequence for MrgA4 (NM_153524.1,962-980).
gcaacgaacttctttatca

SEQ ID NO: 628036 - DNA, 19 bp, Mus musculus
  siRNA target sequence for MrgA4 (NM_153524.1,1162-1180).
gattaaccgtgatttcagt

SEQ ID NO: 628037 - DNA, 19 bp, Mus musculus
  siRNA target sequence for MrgA4 (NM_153524.1,1168-1186).
ccgtgatttcagtgtacta

SEQ ID NO: 628038 - DNA, 19 bp, Mus musculus
  siRNA target sequence for MrgA4 (NM_153524.1,1172-1190).
gatttcagtgtactagatt

SEQ ID NO: 628039 - DNA, 19 bp, Mus musculus
  siRNA target sequence for MrgA4 (NM_153524.1,1181-1199).
gtactagattatatacttt

SEQ ID NO: 628040 - DNA, 19 bp, Mus musculus
  siRNA target sequence for MrgA4 (NM_153524.1,1187-1205).
gattatatactttttcaga

SEQ ID NO: 628041 - DNA, 19 bp, Mus musculus
  siRNA target sequence for MrgA4 (NM_153524.1,1211-1229).
cttgtcctaacttctgtta

SEQ ID NO: 628042 - DNA, 19 bp, Mus musculus
  siRNA target sequence for Mtnr1a (NM_008639.1,185-203).
ggaactcagggaatatatt

SEQ ID NO: 628043 - DNA, 19 bp, Mus musculus
  siRNA target sequence for Mtnr1a (NM_008639.1,186-204).
gaactcagggaatatattt

SEQ ID NO: 628044 - DNA, 19 bp, Mus musculus
  siRNA target sequence for Mtnr1a (NM_008639.1,253-271).
cccttggtgctgacatcta

SEQ ID NO: 628045 - DNA, 19 bp, Mus musculus
  siRNA target sequence for Mtnr1a (NM_008639.1,259-277).
gtgctgacatctatcctta

SEQ ID NO: 628046 - DNA, 19 bp, Mus musculus
  siRNA target sequence for Mtnr1a (NM_008639.1,262-280).
ctgacatctatccttaaca

SEQ ID NO: 628047 - DNA, 19 bp, Mus musculus
  siRNA target sequence for Mtnr1a (NM_008639.1,273-291).
ccttaacaacggatggaat

SEQ ID NO: 628048 - DNA, 19 bp, Mus musculus
  siRNA target sequence for Mtnr1a (NM_008639.1,308-326).
gtcaagtcagcgcatttct

SEQ ID NO: 628049 - DNA, 19 bp, Mus musculus
  siRNA target sequence for Mtnr1a (NM_008639.1,340-358).
gtcatcggctcgatattca

SEQ ID NO: 628050 - DNA, 19 bp, Mus musculus
  siRNA target sequence for Mtnr1a (NM_008639.1,346-364).
ggctcgatattcaacatca

SEQ ID NO: 628051 - DNA, 19 bp, Mus musculus
  siRNA target sequence for Mtnr1a (NM_008639.1,405-423).
cctcaagtacgacaaaata

SEQ ID NO: 628052 - DNA, 19 bp, Mus musculus
  siRNA target sequence for Mtnr1a (NM_008639.1,406-424).
ctcaagtacgacaaaatat

SEQ ID NO: 628053 - DNA, 19 bp, Mus musculus
  siRNA target sequence for Mtnr1a (NM_008639.1,411-429).
gtacgacaaaatatacagt

SEQ ID NO: 628054 - DNA, 19 bp, Mus musculus
  siRNA target sequence for Mtnr1a (NM_008639.1,572-590).
cgatagcagtggtggtttt

SEQ ID NO: 628055 - DNA, 19 bp, Mus musculus
  siRNA target sequence for Mtnr1a (NM_008639.1,580-598).
gtggtggttttccatttca

SEQ ID NO: 628056 - DNA, 19 bp, Mus musculus
  siRNA target sequence for Mtnr1a (NM_008639.1,601-619).
gtgcctatgattattgtca

SEQ ID NO: 628057 - DNA, 19 bp, Mus musculus
  siRNA target sequence for Mtnr1a (NM_008639.1,621-639).
cttctgctacttaaggata

SEQ ID NO: 628058 - DNA, 19 bp, Mus musculus
  siRNA target sequence for Mtnr1a (NM_008639.1,668-686).
gggtgaaacccgacaacaa

SEQ ID NO: 628059 - DNA, 19 bp, Mus musculus
  siRNA target sequence for Mtnr1a (NM_008639.1,679-697).
gacaacaagcccaaactga

SEQ ID NO: 628060 - DNA, 19 bp, Mus musculus
  siRNA target sequence for Mtnr1a (NM_008639.1,723-741).
caccatgttcgtagttttt

SEQ ID NO: 628061 - DNA, 19 bp, Mus musculus
  siRNA target sequence for Mtnr1a (NM_008639.1,726-744).
catgttcgtagtttttgta

SEQ ID NO: 628062 - DNA, 19 bp, Mus musculus
  siRNA target sequence for Mtnr1a (NM_008639.1,729-747).
gttcgtagtttttgtactt

SEQ ID NO: 628063 - DNA, 19 bp, Mus musculus
  siRNA target sequence for Mtnr1a (NM_008639.1,771-789).
caacctcataggtcttatt

SEQ ID NO: 628064 - DNA, 19 bp, Mus musculus
  siRNA target sequence for Mtnr1a (NM_008639.1,833-851).
ggctgttcgtggctagtta

SEQ ID NO: 628065 - DNA, 19 bp, Mus musculus
  siRNA target sequence for Mtnr1a (NM_008639.1,835-853).
ctgttcgtggctagttact

SEQ ID NO: 628066 - DNA, 19 bp, Mus musculus
  siRNA target sequence for Mtnr1a (NM_008639.1,873-891).
ctgcctcaacgcaattata

SEQ ID NO: 628067 - DNA, 19 bp, Mus musculus
  siRNA target sequence for Mtnr1a (NM_008639.1,875-893).
gcctcaacgcaattatata

SEQ ID NO: 628068 - DNA, 19 bp, Mus musculus
  siRNA target sequence for Mtnr1a (NM_008639.1,898-916).
ctactgaatcagaatttca

SEQ ID NO: 628069 - DNA, 19 bp, Mus musculus
  siRNA target sequence for Mtnr1a (NM_008639.1,966-984).
ctttgtggagagttcaaat

SEQ ID NO: 628070 - DNA, 19 bp, Mus musculus
  siRNA target sequence for Mtnr1a (NM_008639.1,988-1006).
gaagcagataagattaaat

SEQ ID NO: 628071 - DNA, 19 bp, Mus musculus
  siRNA target sequence for Mtnr1a (NM_008639.1,1007-1025).
gtaagccctctccactaat

SEQ ID NO: 628072 - DNA, 19 bp, Mus musculus
  siRNA target sequence for Mtnr1a (NM_008639.1,1016-1034).
ctccactaatacccaataa

SEQ ID NO: 628073 - DNA, 19 bp, Mus musculus
  siRNA target sequence for Mtnr1a (NM_008639.1,1027-1045).
cccaataataacttaataa

SEQ ID NO: 628074 - DNA, 19 bp, Mus musculus
  siRNA target sequence for Mtnr1b (NM_145712.1,117-135).
ggctcccatgctatctaca

SEQ ID NO: 628075 - DNA, 19 bp, Mus musculus
  siRNA target sequence for Mtnr1b (NM_145712.1,210-228).
gctgcggaacgcaggtaat

SEQ ID NO: 628076 - DNA, 19 bp, Mus musculus
  siRNA target sequence for Mtnr1b (NM_145712.1,211-229).
ctgcggaacgcaggtaatt

SEQ ID NO: 628077 - DNA, 19 bp, Mus musculus
  siRNA target sequence for Mtnr1b (NM_145712.1,214-232).
cggaacgcaggtaatttgt

SEQ ID NO: 628078 - DNA, 19 bp, Mus musculus
  siRNA target sequence for Mtnr1b (NM_145712.1,215-233).
ggaacgcaggtaatttgtt

SEQ ID NO: 628079 - DNA, 19 bp, Mus musculus
  siRNA target sequence for Mtnr1b (NM_145712.1,216-234).
gaacgcaggtaatttgttt

SEQ ID NO: 628080 - DNA, 19 bp, Mus musculus
  siRNA target sequence for Mtnr1b (NM_145712.1,451-469).
gtctgcagtcactggtata

SEQ ID NO: 628081 - DNA, 19 bp, Mus musculus
  siRNA target sequence for Mtnr1b (NM_145712.1,453-471).
ctgcagtcactggtatact

SEQ ID NO: 628082 - DNA, 19 bp, Mus musculus
  siRNA target sequence for Mtnr1b (NM_145712.1,464-482).
ggtatactcccatctacat

SEQ ID NO: 628083 - DNA, 19 bp, Mus musculus
  siRNA target sequence for Mtnr1b (NM_145712.1,534-552).
ggggtctttagagtatgat

SEQ ID NO: 628084 - DNA, 19 bp, Mus musculus
  siRNA target sequence for Mtnr1b (NM_145712.1,546-564).
gtatgatccacgcatctat

SEQ ID NO: 628085 - DNA, 19 bp, Mus musculus
  siRNA target sequence for Mtnr1b (NM_145712.1,550-568).
gatccacgcatctattcct

SEQ ID NO: 628086 - DNA, 19 bp, Mus musculus
  siRNA target sequence for Mtnr1b (NM_145712.1,721-739).
cgtctgagaccgagtgatt

SEQ ID NO: 628087 - DNA, 19 bp, Mus musculus
  siRNA target sequence for Mtnr1b (NM_145712.1,722-740).
gtctgagaccgagtgattt

SEQ ID NO: 628088 - DNA, 19 bp, Mus musculus
  siRNA target sequence for Mtnr1b (NM_145712.1,736-754).
gatttgcgcagtttcctaa

SEQ ID NO: 628089 - DNA, 19 bp, Mus musculus
  siRNA target sequence for Mtnr1b (NM_145712.1,903-921).
ctgccttaatgccattgtt

SEQ ID NO: 628090 - DNA, 19 bp, Mus musculus
  siRNA target sequence for Mtnr1b (NM_145712.1,996-1014).
catacagcatgcttccaaa

SEQ ID NO: 628091 - DNA, 19 bp, Mus musculus
  siRNA target sequence for Nmbr (NM_008703.1,120-138).
ggtgatccgctgtgtgata

SEQ ID NO: 628092 - DNA, 19 bp, Mus musculus
  siRNA target sequence for Nmbr (NM_008703.1,143-161).
ccctctacctaatcatcat

SEQ ID NO: 628093 - DNA, 19 bp, Mus musculus
  siRNA target sequence for Nmbr (NM_008703.1,169-187).
ggtttgctgggcaacatca

SEQ ID NO: 628094 - DNA, 19 bp, Mus musculus
  siRNA target sequence for Nmbr (NM_008703.1,223-241).
cggaatgtccctaacatct

SEQ ID NO: 628095 - DNA, 19 bp, Mus musculus
  siRNA target sequence for Nmbr (NM_008703.1,224-242).
ggaatgtccctaacatctt

SEQ ID NO: 628096 - DNA, 19 bp, Mus musculus
  siRNA target sequence for Nmbr (NM_008703.1,232-250).
cctaacatcttcatctcta

SEQ ID NO: 628097 - DNA, 19 bp, Mus musculus
  siRNA target sequence for Nmbr (NM_008703.1,298-316).
gacgcctcccgttacttct

SEQ ID NO: 628098 - DNA, 19 bp, Mus musculus
  siRNA target sequence for Nmbr (NM_008703.1,307-325).
cgttacttctttgatgaat

SEQ ID NO: 628099 - DNA, 19 bp, Mus musculus
  siRNA target sequence for Nmbr (NM_008703.1,547-565).
gaagtagcacgcattggta

SEQ ID NO: 628100 - DNA, 19 bp, Mus musculus
  siRNA target sequence for Nmbr (NM_008703.1,579-597).
cagtttcacagcatgcata

SEQ ID NO: 628101 - DNA, 19 bp, Mus musculus
  siRNA target sequence for Nmbr (NM_008703.1,603-621).
cccacaaacagatgagtta

SEQ ID NO: 628102 - DNA, 19 bp, Mus musculus
  siRNA target sequence for Nmbr (NM_008703.1,673-691).
cttgttatcatcagcattt

SEQ ID NO: 628103 - DNA, 19 bp, Mus musculus
  siRNA target sequence for Nmbr (NM_008703.1,676-694).
gttatcatcagcatttatt

SEQ ID NO: 628104 - DNA, 19 bp, Mus musculus
  siRNA target sequence for Nmbr (NM_008703.1,782-800).
ggaaacgcctggctaagat

SEQ ID NO: 628105 - DNA, 19 bp, Mus musculus
  siRNA target sequence for Nmbr (NM_008703.1,783-801).
gaaacgcctggctaagatt

SEQ ID NO: 628106 - DNA, 19 bp, Mus musculus
  siRNA target sequence for Nmbr (NM_008703.1,842-860).
ccaaccacgtcctctactt

SEQ ID NO: 628107 - DNA, 19 bp, Mus musculus
  siRNA target sequence for Nmbr (NM_008703.1,846-864).
ccacgtcctctacttgtat

SEQ ID NO: 628108 - DNA, 19 bp, Mus musculus
  siRNA target sequence for Nmbr (NM_008703.1,847-865).
cacgtcctctacttgtata

SEQ ID NO: 628109 - DNA, 19 bp, Mus musculus
  siRNA target sequence for Nmbr (NM_008703.1,850-868).
gtcctctacttgtataggt

SEQ ID NO: 628110 - DNA, 19 bp, Mus musculus
  siRNA target sequence for Nmbr (NM_008703.1,873-891).
caactacaaggagatagat

SEQ ID NO: 628111 - DNA, 19 bp, Mus musculus
  siRNA target sequence for Nmbr (NM_008703.1,975-993).
cctgctcagcgaaagcttt

SEQ ID NO: 628112 - DNA, 19 bp, Mus musculus
  siRNA target sequence for Nmbr (NM_008703.1,976-994).
ctgctcagcgaaagcttta

SEQ ID NO: 628113 - DNA, 19 bp, Mus musculus
  siRNA target sequence for Nmbr (NM_008703.1,1075-1093).
gcagtaagaatgacttctt

SEQ ID NO: 628114 - DNA, 19 bp, Mus musculus
  siRNA target sequence for Nmbr (NM_008703.1,1078-1096).
gtaagaatgacttctttga

SEQ ID NO: 628115 - DNA, 19 bp, Mus musculus
  siRNA target sequence for Nmbr (NM_008703.1,1086-1104).
gacttctttgaaaagcaat

SEQ ID NO: 628116 - DNA, 19 bp, Mus musculus
  siRNA target sequence for Olfr140 (NM_020515.1,4-22).
gatagtccacgcaatgtca

SEQ ID NO: 628117 - DNA, 19 bp, Mus musculus
  siRNA target sequence for Olfr140 (NM_020515.1,10-28).
ccacgcaatgtcacagaat

SEQ ID NO: 628118 - DNA, 19 bp, Mus musculus
  siRNA target sequence for Olfr140 (NM_020515.1,60-78).
ggtgcagaggatgttgttt

SEQ ID NO: 628119 - DNA, 19 bp, Mus musculus
  siRNA target sequence for Olfr140 (NM_020515.1,124-142).
ctcatcattatcacgatta

SEQ ID NO: 628120 - DNA, 19 bp, Mus musculus
  siRNA target sequence for Olfr140 (NM_020515.1,210-228).
ctattcctcttgtatgaca

SEQ ID NO: 628121 - DNA, 19 bp, Mus musculus
  siRNA target sequence for Olfr140 (NM_020515.1,461-479).
caacagctcagctctttct

SEQ ID NO: 628122 - DNA, 19 bp, Mus musculus
  siRNA target sequence for Olfr140 (NM_020515.1,652-670).
gtcatcctgcgcactttga

SEQ ID NO: 628123 - DNA, 19 bp, Mus musculus
  siRNA target sequence for Olfr140 (NM_020515.1,789-807).
gtccatagacaaaatagta

SEQ ID NO: 628124 - DNA, 19 bp, Mus musculus
  siRNA target sequence for Olfr140 (NM_020515.1,798-816).
caaaatagtagctgtgttt

SEQ ID NO: 628125 - DNA, 19 bp, Mus musculus
  siRNA target sequence for Olfr140 (NM_020515.1,805-823).
gtagctgtgttttattgta

SEQ ID NO: 628126 - DNA, 19 bp, Mus musculus
  siRNA target sequence for Olfr155 (NM_019473.1,470-488).
gcaggtggtatcactaatt

SEQ ID NO: 628127 - DNA, 19 bp, Mus musculus
  siRNA target sequence for Olfr157 (NM_019475.1,46-64).
ccagacgactgtaacagaa

SEQ ID NO: 628128 - DNA, 19 bp, Mus musculus
  siRNA target sequence for Olfr157 (NM_019475.1,47-65).
cagacgactgtaacagaat

SEQ ID NO: 628129 - DNA, 19 bp, Mus musculus
  siRNA target sequence for Olfr157 (NM_019475.1,763-781).
cctcaccgtggtgatcatt

SEQ ID NO: 628130 - DNA, 19 bp, Mus musculus
  siRNA target sequence for Olfr157 (NM_019475.1,764-782).
ctcaccgtggtgatcattt

SEQ ID NO: 628131 - DNA, 19 bp, Mus musculus
  siRNA target sequence for Olfr159 (NM_019476.1,469-487).
gccacagtgcagatatctt

SEQ ID NO: 628132 - DNA, 19 bp, Mus musculus
  siRNA target sequence for Olfr159 (NM_019476.1,470-488).
ccacagtgcagatatcttt

SEQ ID NO: 628133 - DNA, 19 bp, Mus musculus
  siRNA target sequence for Olfr159 (NM_019476.1,480-498).
gatatctttagcaatgaca

SEQ ID NO: 628134 - DNA, 19 bp, Mus musculus
  siRNA target sequence for Olfr159 (NM_019476.1,604-622).
gtggctaatgcaatgtttt

SEQ ID NO: 628135 - DNA, 19 bp, Mus musculus
  siRNA target sequence for Olfr159 (NM_019476.1,937-955).
ggccagaaacacttcaagt

SEQ ID NO: 628136 - DNA, 19 bp, Mus musculus
  siRNA target sequence for Olfr160 (NM_030553.1,40-58).
ctcagagggctaactaaca

SEQ ID NO: 628137 - DNA, 19 bp, Mus musculus
  siRNA target sequence for Olfr160 (NM_030553.1,322-340).
gtcattgctgagtgttaca

SEQ ID NO: 628138 - DNA, 19 bp, Mus musculus
  siRNA target sequence for Olfr160 (NM_030553.1,385-403).
cccttgctttataacatca

SEQ ID NO: 628139 - DNA, 19 bp, Mus musculus
  siRNA target sequence for Olfr160 (NM_030553.1,386-404).
ccttgctttataacatcat

SEQ ID NO: 628140 - DNA, 19 bp, Mus musculus
  siRNA target sequence for Olfr160 (NM_030553.1,444-462).
ctatgccatgggactcata

SEQ ID NO: 628141 - DNA, 19 bp, Mus musculus
  siRNA target sequence for Olfr160 (NM_030553.1,455-473).
gactcataggctcaacaat

SEQ ID NO: 628142 - DNA, 19 bp, Mus musculus
  siRNA target sequence for Olfr160 (NM_030553.1,475-493).
gagactagcctcatgttga

SEQ ID NO: 628143 - DNA, 19 bp, Mus musculus
  siRNA target sequence for Olfr160 (NM_030553.1,477-495).
gactagcctcatgttgaaa

SEQ ID NO: 628144 - DNA, 19 bp, Mus musculus
  siRNA target sequence for Olfr160 (NM_030553.1,482-500).
gcctcatgttgaaattaaa

SEQ ID NO: 628145 - DNA, 19 bp, Mus musculus
  siRNA target sequence for Olfr160 (NM_030553.1,484-502).
ctcatgttgaaattaaact

SEQ ID NO: 628146 - DNA, 19 bp, Mus musculus
  siRNA target sequence for Olfr160 (NM_030553.1,563-581).
gctctagtacctatgatat

SEQ ID NO: 628147 - DNA, 19 bp, Mus musculus
  siRNA target sequence for Olfr160 (NM_030553.1,564-582).
ctctagtacctatgatata

SEQ ID NO: 628148 - DNA, 19 bp, Mus musculus
  siRNA target sequence for Olfr160 (NM_030553.1,566-584).
ctagtacctatgatataga

SEQ ID NO: 628149 - DNA, 19 bp, Mus musculus
  siRNA target sequence for Olfr160 (NM_030553.1,607-625).
gggttcaacattatagtta

SEQ ID NO: 628150 - DNA, 19 bp, Mus musculus
  siRNA target sequence for Olfr160 (NM_030553.1,626-644).
ccagcttaaccgtactcat

SEQ ID NO: 628151 - DNA, 19 bp, Mus musculus
  siRNA target sequence for Olfr160 (NM_030553.1,627-645).
cagcttaaccgtactcatt

SEQ ID NO: 628152 - DNA, 19 bp, Mus musculus
  siRNA target sequence for Olfr160 (NM_030553.1,637-655).
gtactcatttcctatgcat

SEQ ID NO: 628153 - DNA, 19 bp, Mus musculus
  siRNA target sequence for Olfr160 (NM_030553.1,734-752).
cagctgtgggcttgttcta

SEQ ID NO: 628154 - DNA, 19 bp, Mus musculus
  siRNA target sequence for Olfr17 (NM_020598.1,53-71).
caagcttgtcctatgaagt

SEQ ID NO: 628155 - DNA, 19 bp, Mus musculus
  siRNA target sequence for Olfr17 (NM_020598.1,56-74).
gcttgtcctatgaagtaca

SEQ ID NO: 628156 - DNA, 19 bp, Mus musculus
  siRNA target sequence for Olfr17 (NM_020598.1,79-97).
ctgctatttctcctgtttt

SEQ ID NO: 628157 - DNA, 19 bp, Mus musculus
  siRNA target sequence for Olfr17 (NM_020598.1,208-226).
ctggaaataggcttcaact

SEQ ID NO: 628158 - DNA, 19 bp, Mus musculus
  siRNA target sequence for Olfr17 (NM_020598.1,256-274).
ctgatactccaggacaaaa

SEQ ID NO: 628159 - DNA, 19 bp, Mus musculus
  siRNA target sequence for Olfr17 (NM_020598.1,561-579).
cctagtctgtgctgataca

SEQ ID NO: 628160 - DNA, 19 bp, Mus musculus
  siRNA target sequence for Olfr17 (NM_020598.1,639-657).
gttgattctgggttcctat

SEQ ID NO: 628161 - DNA, 19 bp, Mus musculus
  siRNA target sequence for Olfr17 (NM_020598.1,761-779).
gcactgccatcctcacata

SEQ ID NO: 628162 - DNA, 19 bp, Mus musculus
  siRNA target sequence for Olfr17 (NM_020598.1,899-917).
ctgcattgaggcgaatcat

SEQ ID NO: 628163 - DNA, 19 bp, Mus musculus
  siRNA target sequence for Olfr17 (NM_020598.1,902-920).
cattgaggcgaatcattca

SEQ ID NO: 628164 - DNA, 19 bp, Mus musculus
  siRNA target sequence for Olfr19 (NM_146335.1,138-156).
cattgccaccattacagat

SEQ ID NO: 628165 - DNA, 19 bp, Mus musculus
  siRNA target sequence for Olfr19 (NM_146335.1,290-308).
gcatttctcaagtattctt

SEQ ID NO: 628166 - DNA, 19 bp, Mus musculus
  siRNA target sequence for Olfr19 (NM_146335.1,316-334).
ctatttggagttttagata

SEQ ID NO: 628167 - DNA, 19 bp, Mus musculus
  siRNA target sequence for Olfr19 (NM_146335.1,446-464).
gggtcacaacagcattgaa

SEQ ID NO: 628168 - DNA, 19 bp, Mus musculus
  siRNA target sequence for Olfr19 (NM_146335.1,447-465).
ggtcacaacagcattgaat

SEQ ID NO: 628169 - DNA, 19 bp, Mus musculus
  siRNA target sequence for Olfr19 (NM_146335.1,448-466).
gtcacaacagcattgaatt

SEQ ID NO: 628170 - DNA, 19 bp, Mus musculus
  siRNA target sequence for Olfr19 (NM_146335.1,452-470).
caacagcattgaattcctt

SEQ ID NO: 628171 - DNA, 19 bp, Mus musculus
  siRNA target sequence for Olfr19 (NM_146335.1,487-505).
gcactgcggctgtcctttt

SEQ ID NO: 628172 - DNA, 19 bp, Mus musculus
  siRNA target sequence for Olfr19 (NM_146335.1,566-584).
gtaatgacacctttcctaa

SEQ ID NO: 628173 - DNA, 19 bp, Mus musculus
  siRNA target sequence for Olfr19 (NM_146335.1,761-779).
cactcttgggtgtgtatct

SEQ ID NO: 628174 - DNA, 19 bp, Mus musculus
  siRNA target sequence for Olfr19 (NM_146335.1,812-830).
ctgcacgagcatctgttat

SEQ ID NO: 628175 - DNA, 19 bp, Mus musculus
  siRNA target sequence for Olfr19 (NM_146335.1,814-832).
gcacgagcatctgttatgt

SEQ ID NO: 628176 - DNA, 19 bp, Mus musculus
  siRNA target sequence for Olfr19 (NM_146335.1,815-833).
cacgagcatctgttatgta

SEQ ID NO: 628177 - DNA, 19 bp, Mus musculus
  siRNA target sequence for Olfr19 (NM_146335.1,817-835).
cgagcatctgttatgtaca

SEQ ID NO: 628178 - DNA, 19 bp, Mus musculus
  siRNA target sequence for Olfr19 (NM_146335.1,901-919).
ctgagaagactcttaagaa

SEQ ID NO: 628179 - DNA, 19 bp, Mus musculus
  siRNA target sequence for Olfr24 (NM_146606.1,115-133).
gtggtggggaacttgttga

SEQ ID NO: 628180 - DNA, 19 bp, Mus musculus
  siRNA target sequence for Olfr24 (NM_146606.1,123-141).
gaacttgttgatcattctt

SEQ ID NO: 628181 - DNA, 19 bp, Mus musculus
  siRNA target sequence for Olfr24 (NM_146606.1,256-274).
caaactaggaacaaatcta

SEQ ID NO: 628182 - DNA, 19 bp, Mus musculus
  siRNA target sequence for Olfr24 (NM_146606.1,489-507).
ggcccgtctggtattctgt

SEQ ID NO: 628183 - DNA, 19 bp, Mus musculus
  siRNA target sequence for Olfr24 (NM_146606.1,498-516).
ggtattctgtggcaaaaat

SEQ ID NO: 628184 - DNA, 19 bp, Mus musculus
  siRNA target sequence for Olfr24 (NM_146606.1,517-535).
gagctcccccactacttct

SEQ ID NO: 628185 - DNA, 19 bp, Mus musculus
  siRNA target sequence for Olfr24 (NM_146606.1,647-665).
cctcctatgctcgaatcat

SEQ ID NO: 628186 - DNA, 19 bp, Mus musculus
  siRNA target sequence for Olfr24 (NM_146606.1,761-779).
ccaccattggagtctatct

SEQ ID NO: 628187 - DNA, 19 bp, Mus musculus
  siRNA target sequence for Olfr24 (NM_146606.1,817-835).
gcttctgcagtaatgtaca

SEQ ID NO: 628188 - DNA, 19 bp, Mus musculus
  siRNA target sequence for Olfr24 (NM_146606.1,889-907).
ctgaagggagccctaaaga

SEQ ID NO: 628189 - DNA, 19 bp, Mus musculus
  siRNA target sequence for Olfr25 (NM_146870.1,102-120).
cttgctgaaccatactgtt

SEQ ID NO: 628190 - DNA, 19 bp, Mus musculus
  siRNA target sequence for Olfr25 (NM_146870.1,105-123).
gctgaaccatactgttata

SEQ ID NO: 628191 - DNA, 19 bp, Mus musculus
  siRNA target sequence for Olfr25 (NM_146870.1,118-136).
gttatagtggtgggtaatt

SEQ ID NO: 628192 - DNA, 19 bp, Mus musculus
  siRNA target sequence for Olfr25 (NM_146870.1,140-158).
gcttaatgagtcttattat

SEQ ID NO: 628193 - DNA, 19 bp, Mus musculus
  siRNA target sequence for Olfr25 (NM_146870.1,265-283).
gtttcagagaagaatatca

SEQ ID NO: 628194 - DNA, 19 bp, Mus musculus
  siRNA target sequence for Olfr25 (NM_146870.1,276-294).
gaatatcatcccttttaca

SEQ ID NO: 628195 - DNA, 19 bp, Mus musculus
  siRNA target sequence for Olfr25 (NM_146870.1,400-418).
ctgtacaaggctatcatgt

SEQ ID NO: 628196 - DNA, 19 bp, Mus musculus
  siRNA target sequence for Olfr25 (NM_146870.1,438-456).
gctgatgtttgtgtcatat

SEQ ID NO: 628197 - DNA, 19 bp, Mus musculus
  siRNA target sequence for Olfr25 (NM_146870.1,481-499).
gttctggcaggtttaatga

SEQ ID NO: 628198 - DNA, 19 bp, Mus musculus
  siRNA target sequence for Olfr25 (NM_146870.1,484-502).
ctggcaggtttaatgatta

SEQ ID NO: 628199 - DNA, 19 bp, Mus musculus
  siRNA target sequence for Olfr27 (NM_010974.1,430-448).
ctgatttcggggtcatata

SEQ ID NO: 628200 - DNA, 19 bp, Mus musculus
  siRNA target sequence for Olfr27 (NM_010974.1,432-450).
gatttcggggtcatatatt

SEQ ID NO: 628201 - DNA, 19 bp, Mus musculus
  siRNA target sequence for Olfr30 (NM_146878.1,132-150).
ggccatggtccttctgatt

SEQ ID NO: 628202 - DNA, 19 bp, Mus musculus
  siRNA target sequence for Olfr30 (NM_146878.1,133-151).
gccatggtccttctgattt

SEQ ID NO: 628203 - DNA, 19 bp, Mus musculus
  siRNA target sequence for Olfr30 (NM_146878.1,265-283).
ggttggacgagcatctctt

SEQ ID NO: 628204 - DNA, 19 bp, Mus musculus
  siRNA target sequence for Olfr30 (NM_146878.1,266-284).
gttggacgagcatctcttt

SEQ ID NO: 628205 - DNA, 19 bp, Mus musculus
  siRNA target sequence for Olfr30 (NM_146878.1,463-481).
ctcaacgcctccattcaga

SEQ ID NO: 628206 - DNA, 19 bp, Mus musculus
  siRNA target sequence for Olfr30 (NM_146878.1,518-536).
ggaagatctcccacttctt

SEQ ID NO: 628207 - DNA, 19 bp, Mus musculus
  siRNA target sequence for Olfr30 (NM_146878.1,583-601).
gcctacaagcaggtactat

SEQ ID NO: 628208 - DNA, 19 bp, Mus musculus
  siRNA target sequence for Olfr30 (NM_146878.1,584-602).
cctacaagcaggtactatt

SEQ ID NO: 628209 - DNA, 19 bp, Mus musculus
  siRNA target sequence for Olfr30 (NM_146878.1,622-640).
ctcctggtgcctattacct

SEQ ID NO: 628210 - DNA, 19 bp, Mus musculus
  siRNA target sequence for Olfr30 (NM_146878.1,627-645).
ggtgcctattaccttcatt

SEQ ID NO: 628211 - DNA, 19 bp, Mus musculus
  siRNA target sequence for Olfr30 (NM_146878.1,736-754).
ctgacagtcgtcaatctct

SEQ ID NO: 628212 - DNA, 19 bp, Mus musculus
  siRNA target sequence for Olfr30 (NM_146878.1,740-758).
cagtcgtcaatctcttcta

SEQ ID NO: 628213 - DNA, 19 bp, Mus musculus
  siRNA target sequence for Olfr30 (NM_146878.1,780-798).
catgttacctgcttcctat

SEQ ID NO: 628214 - DNA, 19 bp, Mus musculus
  siRNA target sequence for Olfr30 (NM_146878.1,808-826).
ggccaagacgatgtagtat

SEQ ID NO: 628215 - DNA, 19 bp, Mus musculus
  siRNA target sequence for Olfr30 (NM_146878.1,810-828).
ccaagacgatgtagtatct

SEQ ID NO: 628216 - DNA, 19 bp, Mus musculus
  siRNA target sequence for Olfr30 (NM_146878.1,816-834).
cgatgtagtatctgtcttt

SEQ ID NO: 628217 - DNA, 19 bp, Mus musculus
  siRNA target sequence for Olfr30 (NM_146878.1,892-910).
gttacaggagccatgaaga

SEQ ID NO: 628218 - DNA, 19 bp, Mus musculus
  siRNA target sequence for Olfr30 (NM_146878.1,921-939).
gaggtgtggcgtcaataga

SEQ ID NO: 628219 - DNA, 19 bp, Mus musculus
  siRNA target sequence for Olfr30 (NM_146878.1,923-941).
ggtgtggcgtcaatagaaa

SEQ ID NO: 628220 - DNA, 19 bp, Mus musculus
  siRNA target sequence for Olfr30 (NM_146878.1,924-942).
gtgtggcgtcaatagaaat

SEQ ID NO: 628221 - DNA, 19 bp, Mus musculus
  siRNA target sequence for Olfr31 (NM_147027.1,60-78).
ggaaacctcaggtcttgta

SEQ ID NO: 628222 - DNA, 19 bp, Mus musculus
  siRNA target sequence for Olfr31 (NM_147027.1,61-79).
gaaacctcaggtcttgtat

SEQ ID NO: 628223 - DNA, 19 bp, Mus musculus
  siRNA target sequence for Olfr31 (NM_147027.1,119-137).
ccaatggaattatgatctt

SEQ ID NO: 628224 - DNA, 19 bp, Mus musculus
  siRNA target sequence for Olfr31 (NM_147027.1,233-251).
ccaagatgctagttgatta

SEQ ID NO: 628225 - DNA, 19 bp, Mus musculus
  siRNA target sequence for Olfr31 (NM_147027.1,234-252).
caagatgctagttgattat

SEQ ID NO: 628226 - DNA, 19 bp, Mus musculus
  siRNA target sequence for Olfr31 (NM_147027.1,256-274).
ctagggcaaaggactattt

SEQ ID NO: 628227 - DNA, 19 bp, Mus musculus
  siRNA target sequence for Olfr31 (NM_147027.1,293-311).
ctcaacactttctatacct

SEQ ID NO: 628228 - DNA, 19 bp, Mus musculus
  siRNA target sequence for Olfr31 (NM_147027.1,323-341).
gagccgagttctttcttct

SEQ ID NO: 628229 - DNA, 19 bp, Mus musculus
  siRNA target sequence for Olfr31 (NM_147027.1,412-430).
cggatctgttggattatca

SEQ ID NO: 628230 - DNA, 19 bp, Mus musculus
  siRNA target sequence for Olfr31 (NM_147027.1,413-431).
ggatctgttggattatcat

SEQ ID NO: 628231 - DNA, 19 bp, Mus musculus
  siRNA target sequence for Olfr31 (NM_147027.1,501-519).
ctgtagatcacgagagatt

SEQ ID NO: 628232 - DNA, 19 bp, Mus musculus
  siRNA target sequence for Olfr31 (NM_147027.1,503-521).
gtagatcacgagagattaa

SEQ ID NO: 628233 - DNA, 19 bp, Mus musculus
  siRNA target sequence for Olfr31 (NM_147027.1,605-623).
gcgttctgatgctgttgat

SEQ ID NO: 628234 - DNA, 19 bp, Mus musculus
  siRNA target sequence for Olfr31 (NM_147027.1,800-818).
catcccaagacaaaatttt

SEQ ID NO: 628235 - DNA, 19 bp, Mus musculus
  siRNA target sequence for Olfr32 (NM_010980.1,276-294).
gggctgcctagctcagatt

SEQ ID NO: 628236 - DNA, 19 bp, Mus musculus
  siRNA target sequence for Olfr32 (NM_010980.1,376-394).
cctctttactacacaacta

SEQ ID NO: 628237 - DNA, 19 bp, Mus musculus
  siRNA target sequence for Olfr32 (NM_010980.1,377-395).
ctctttactacacaactat

SEQ ID NO: 628238 - DNA, 19 bp, Mus musculus
  siRNA target sequence for Olfr32 (NM_010980.1,396-414).
catgagtaggcccaaatgt

SEQ ID NO: 628239 - DNA, 19 bp, Mus musculus
  siRNA target sequence for Olfr32 (NM_010980.1,439-457).
gtggggggattttttcatt

SEQ ID NO: 628240 - DNA, 19 bp, Mus musculus
  siRNA target sequence for Olfr32 (NM_010980.1,532-550).
ctccatcccttattcaagt

SEQ ID NO: 628241 - DNA, 19 bp, Mus musculus
  siRNA target sequence for Olfr32 (NM_010980.1,571-589).
gtggtgggggttattatgt

SEQ ID NO: 628242 - DNA, 19 bp, Mus musculus
  siRNA target sequence for Olfr32 (NM_010980.1,577-595).
ggggttattatgtttgtta

SEQ ID NO: 628243 - DNA, 19 bp, Mus musculus
  siRNA target sequence for Olfr32 (NM_010980.1,907-925).
gtgagctcaagtttggaat

SEQ ID NO: 628244 - DNA, 19 bp, Mus musculus
  siRNA target sequence for Olfr33 (NM_147073.1,11-29).
caaaggcttttgtcaatat

SEQ ID NO: 628245 - DNA, 19 bp, Mus musculus
  siRNA target sequence for Olfr45 (NM_146963.1,599-617).
ctcttttgggagattcctt

SEQ ID NO: 628246 - DNA, 19 bp, Mus musculus
  siRNA target sequence for Olfr46 (NM_146934.1,470-488).
ggtccatctgcgcactaaa

SEQ ID NO: 628247 - DNA, 19 bp, Mus musculus
  siRNA target sequence for Olfr46 (NM_146934.1,471-489).
gtccatctgcgcactaaat

SEQ ID NO: 628248 - DNA, 19 bp, Mus musculus
  siRNA target sequence for Olfr47 (NM_146370.1,288-306).
catgacacagacttatcta

SEQ ID NO: 628249 - DNA, 19 bp, Mus musculus
  siRNA target sequence for Olfr47 (NM_146370.1,324-342).
caccgaatgtcttcttctt

SEQ ID NO: 628250 - DNA, 19 bp, Mus musculus
  siRNA target sequence for Olfr47 (NM_146370.1,462-480).
gtctctggtccatttactt

SEQ ID NO: 628251 - DNA, 19 bp, Mus musculus
  siRNA target sequence for Olfr52 (NM_146583.1,53-71).
cagatcgcaaggagttaaa

SEQ ID NO: 628252 - DNA, 19 bp, Mus musculus
  siRNA target sequence for Olfr52 (NM_146583.1,55-73).
gatcgcaaggagttaaaga

SEQ ID NO: 628253 - DNA, 19 bp, Mus musculus
  siRNA target sequence for Olfr52 (NM_146583.1,122-140).
gcaatctgggattgatctt

SEQ ID NO: 628254 - DNA, 19 bp, Mus musculus
  siRNA target sequence for Olfr52 (NM_146583.1,130-148).
ggattgatcttggtcatta

SEQ ID NO: 628255 - DNA, 19 bp, Mus musculus
  siRNA target sequence for Olfr52 (NM_146583.1,271-289).
gccatatccttcaatgcat

SEQ ID NO: 628256 - DNA, 19 bp, Mus musculus
  siRNA target sequence for Olfr52 (NM_146583.1,305-323).
gctgctttctcacatttat

SEQ ID NO: 628257 - DNA, 19 bp, Mus musculus
  siRNA target sequence for Olfr52 (NM_146583.1,422-440).
gcattcagcttgtagttgt

SEQ ID NO: 628258 - DNA, 19 bp, Mus musculus
  siRNA target sequence for Olfr52 (NM_146583.1,433-451).
gtagttgtgccctatagct

SEQ ID NO: 628259 - DNA, 19 bp, Mus musculus
  siRNA target sequence for Olfr52 (NM_146583.1,436-454).
gttgtgccctatagctata

SEQ ID NO: 628260 - DNA, 19 bp, Mus musculus
  siRNA target sequence for Olfr52 (NM_146583.1,439-457).
gtgccctatagctatagtt

SEQ ID NO: 628261 - DNA, 19 bp, Mus musculus
  siRNA target sequence for Olfr52 (NM_146583.1,455-473).
gtttcctcatggcattgat

SEQ ID NO: 628262 - DNA, 19 bp, Mus musculus
  siRNA target sequence for Olfr52 (NM_146583.1,460-478).
ctcatggcattgattcaca

SEQ ID NO: 628263 - DNA, 19 bp, Mus musculus
  siRNA target sequence for Olfr52 (NM_146583.1,496-514).
ctatcctattgccattcta

SEQ ID NO: 628264 - DNA, 19 bp, Mus musculus
  siRNA target sequence for Olfr52 (NM_146583.1,507-525).
ccattctaatatcatcaat

SEQ ID NO: 628265 - DNA, 19 bp, Mus musculus
  siRNA target sequence for Olfr52 (NM_146583.1,600-618).
ggcctgtgctggaatcaca

SEQ ID NO: 628266 - DNA, 19 bp, Mus musculus
  siRNA target sequence for Olfr52 (NM_146583.1,738-756).
ggcagtgagcatattctat

SEQ ID NO: 628267 - DNA, 19 bp, Mus musculus
  siRNA target sequence for Olfr52 (NM_146583.1,786-804).
gagctctgaccattctctt

SEQ ID NO: 628268 - DNA, 19 bp, Mus musculus
  siRNA target sequence for Olfr52 (NM_146583.1,795-813).
ccattctcttgatacagat

SEQ ID NO: 628269 - DNA, 19 bp, Mus musculus
  siRNA target sequence for Olfr52 (NM_146583.1,906-924).
gagggtcatggacaataga

SEQ ID NO: 628270 - DNA, 19 bp, Mus musculus
  siRNA target sequence for Olfr54 (NM_010997.1,764-782).
gcacagtactgggtatcta

SEQ ID NO: 628271 - DNA, 19 bp, Mus musculus
  siRNA target sequence for Olfr54 (NM_010997.1,765-783).
cacagtactgggtatctat

SEQ ID NO: 628272 - DNA, 19 bp, Mus musculus
  siRNA target sequence for Olfr54 (NM_010997.1,767-785).
cagtactgggtatctatat

SEQ ID NO: 628273 - DNA, 19 bp, Mus musculus
  siRNA target sequence for Olfr54 (NM_010997.1,916-934).
ctcaacaggggctctaagt

SEQ ID NO: 628274 - DNA, 19 bp, Mus musculus
  siRNA target sequence for Olfr56 (NM_010999.1,847-865).
cgtggcgctctgtggaaat

SEQ ID NO: 628275 - DNA, 19 bp, Mus musculus
  siRNA target sequence for Olfr56 (NM_010999.1,1022-1040).
gccggctgtggcatacaaa

SEQ ID NO: 628276 - DNA, 19 bp, Mus musculus
  siRNA target sequence for Olfr56 (NM_010999.1,1031-1049).
ggcatacaaatcggatttt

SEQ ID NO: 628277 - DNA, 19 bp, Mus musculus
  siRNA target sequence for Olfr56 (NM_010999.1,1032-1050).
gcatacaaatcggattttt

SEQ ID NO: 628278 - DNA, 19 bp, Mus musculus
  siRNA target sequence for Olfr56 (NM_010999.1,1037-1055).
caaatcggattttttgtct

SEQ ID NO: 628279 - DNA, 19 bp, Mus musculus
  siRNA target sequence for Olfr56 (NM_010999.1,1065-1083).
gatcagagggtctcttgtt

SEQ ID NO: 628280 - DNA, 19 bp, Mus musculus
  siRNA target sequence for Olfr56 (NM_010999.1,1195-1213).
gatccttgatggaataatt

SEQ ID NO: 628281 - DNA, 19 bp, Mus musculus
  siRNA target sequence for Olfr56 (NM_010999.1,1243-1261).
ctgtggctcacggtatata

SEQ ID NO: 628282 - DNA, 19 bp, Mus musculus
  siRNA target sequence for Olfr56 (NM_010999.1,1251-1269).
cacggtatatagatcactt

SEQ ID NO: 628283 - DNA, 19 bp, Mus musculus
  siRNA target sequence for Olfr56 (NM_010999.1,1254-1272).
ggtatatagatcacttctt

SEQ ID NO: 628284 - DNA, 19 bp, Mus musculus
  siRNA target sequence for Olfr56 (NM_010999.1,1275-1293).
gtgaagtgccggctttact

SEQ ID NO: 628285 - DNA, 19 bp, Mus musculus
  siRNA target sequence for Olfr56 (NM_010999.1,1277-1295).
gaagtgccggctttactga

SEQ ID NO: 628286 - DNA, 19 bp, Mus musculus
  siRNA target sequence for Olfr56 (NM_010999.1,1375-1393).
gatcattgtgacttcctat

SEQ ID NO: 628287 - DNA, 19 bp, Mus musculus
  siRNA target sequence for Olfr56 (NM_010999.1,1536-1554).
gcgctcctagccatgacaa

SEQ ID NO: 628288 - DNA, 19 bp, Mus musculus
  siRNA target sequence for Olfr56 (NM_010999.1,1537-1555).
cgctcctagccatgacaaa

SEQ ID NO: 628289 - DNA, 19 bp, Mus musculus
  siRNA target sequence for Olfr56 (NM_010999.1,1542-1560).
ctagccatgacaaagttgt

SEQ ID NO: 628290 - DNA, 19 bp, Mus musculus
  siRNA target sequence for Olfr57 (NM_147041.1,105-123).
gtatatattgactttcact

SEQ ID NO: 628291 - DNA, 19 bp, Mus musculus
  siRNA target sequence for Olfr57 (NM_147041.1,589-607).
gatatggtaatttacatta

SEQ ID NO: 628292 - DNA, 19 bp, Mus musculus
  siRNA target sequence for Olfr57 (NM_147041.1,815-833).
ctgcaacagcttcattgat

SEQ ID NO: 628293 - DNA, 19 bp, Mus musculus
  siRNA target sequence for Olfr57 (NM_147041.1,912-930).
cctgttagggagtgtaact

SEQ ID NO: 628294 - DNA, 19 bp, Mus musculus
  siRNA target sequence for Olfr60 (NM_146955.1,93-111).
cttcttgtccctctatgta

SEQ ID NO: 628295 - DNA, 19 bp, Mus musculus
  siRNA target sequence for Olfr60 (NM_146955.1,567-585).
ctgtagccccacatacgta

SEQ ID NO: 628296 - DNA, 19 bp, Mus musculus
  siRNA target sequence for Olfr60 (NM_146955.1,569-587).
gtagccccacatacgtaaa

SEQ ID NO: 628297 - DNA, 19 bp, Mus musculus
  siRNA target sequence for Olfr60 (NM_146955.1,578-596).
catacgtaaacagcattat

SEQ ID NO: 628298 - DNA, 19 bp, Mus musculus
  siRNA target sequence for Olfr60 (NM_146955.1,591-609).
cattatgactctaatagca

SEQ ID NO: 628299 - DNA, 19 bp, Mus musculus
  siRNA target sequence for Olfr61 (NM_146964.1,633-651).
ctttgtgctaaccttgtta

SEQ ID NO: 628300 - DNA, 19 bp, Mus musculus
  siRNA target sequence for Olfr62 (NM_146315.1,29-47).
gctctcttaccgagtttgt

SEQ ID NO: 628301 - DNA, 19 bp, Mus musculus
  siRNA target sequence for Olfr62 (NM_146315.1,52-70).
ctaggattctctagtaaca

SEQ ID NO: 628302 - DNA, 19 bp, Mus musculus
  siRNA target sequence for Olfr62 (NM_146315.1,75-93).
gataaatggcattctgttt

SEQ ID NO: 628303 - DNA, 19 bp, Mus musculus
  siRNA target sequence for Olfr62 (NM_146315.1,390-408).
ccatcccctcagatacaaa

SEQ ID NO: 628304 - DNA, 19 bp, Mus musculus
  siRNA target sequence for Olfr62 (NM_146315.1,471-489).
ctgtgccctgatatatact

SEQ ID NO: 628305 - DNA, 19 bp, Mus musculus
  siRNA target sequence for Olfr62 (NM_146315.1,655-673).
gttgtctacatcaatatct

SEQ ID NO: 628306 - DNA, 19 bp, Mus musculus
  siRNA target sequence for Olfr62 (NM_146315.1,764-782).
ccatcccgtgtatggttat

SEQ ID NO: 628307 - DNA, 19 bp, Mus musculus
  siRNA target sequence for Olfr62 (NM_146315.1,768-786).
cccgtgtatggttatgtat

SEQ ID NO: 628308 - DNA, 19 bp, Mus musculus
  siRNA target sequence for Olfr62 (NM_146315.1,769-787).
ccgtgtatggttatgtata

SEQ ID NO: 628309 - DNA, 19 bp, Mus musculus
  siRNA target sequence for Olfr70 (NM_019485.1,66-84).
cctcgagatcgctctgttt

SEQ ID NO: 628310 - DNA, 19 bp, Mus musculus
  siRNA target sequence for Olfr70 (NM_019485.1,88-106).
ctctgtctgggtatctact

SEQ ID NO: 628311 - DNA, 19 bp, Mus musculus
  siRNA target sequence for Olfr70 (NM_019485.1,92-110).
gtctgggtatctactgtat

SEQ ID NO: 628312 - DNA, 19 bp, Mus musculus
  siRNA target sequence for Olfr70 (NM_019485.1,96-114).
gggtatctactgtatgact

SEQ ID NO: 628313 - DNA, 19 bp, Mus musculus
  siRNA target sequence for Olfr70 (NM_019485.1,133-151).
cttgtggggctgattgtgt

SEQ ID NO: 628314 - DNA, 19 bp, Mus musculus
  siRNA target sequence for Olfr70 (NM_019485.1,233-251).
cacctatgatgcttctcaa

SEQ ID NO: 628315 - DNA, 19 bp, Mus musculus
  siRNA target sequence for Olfr70 (NM_019485.1,503-521).
gtggtcattacatcatcaa

SEQ ID NO: 628316 - DNA, 19 bp, Mus musculus
  siRNA target sequence for Olfr70 (NM_019485.1,508-526).
cattacatcatcaaccatt

SEQ ID NO: 628317 - DNA, 19 bp, Mus musculus
  siRNA target sequence for Olfr70 (NM_019485.1,576-594).
cctcaacgcgctgatatta

SEQ ID NO: 628318 - DNA, 19 bp, Mus musculus
  siRNA target sequence for Olfr70 (NM_019485.1,577-595).
ctcaacgcgctgatattaa

SEQ ID NO: 628319 - DNA, 19 bp, Mus musculus
  siRNA target sequence for Olfr70 (NM_019485.1,734-752).
cggtggtggtgattttcta

SEQ ID NO: 628320 - DNA, 19 bp, Mus musculus
  siRNA target sequence for Olfr70 (NM_019485.1,795-813).
ccccagcgtgggtaagatt

SEQ ID NO: 628321 - DNA, 19 bp, Mus musculus
  siRNA target sequence for Olfr70 (NM_019485.1,796-814).
cccagcgtgggtaagatta

SEQ ID NO: 628322 - DNA, 19 bp, Mus musculus
  siRNA target sequence for Olfr70 (NM_019485.1,797-815).
ccagcgtgggtaagattat

SEQ ID NO: 628323 - DNA, 19 bp, Mus musculus
  siRNA target sequence for Olfr70 (NM_019485.1,916-934).
ggtctactcaccaggaaaa

SEQ ID NO: 628324 - DNA, 19 bp, Mus musculus
  siRNA target sequence for Olfr70 (NM_019485.1,917-935).
gtctactcaccaggaaaat

SEQ ID NO: 628325 - DNA, 19 bp, Mus musculus
  siRNA target sequence for Olfr70 (NM_019485.1,919-937).
ctactcaccaggaaaatgt

SEQ ID NO: 628326 - DNA, 19 bp, Mus musculus
  siRNA target sequence for Olfr71 (NM_019486.1,65-83).
ccctcgagcggctactctt

SEQ ID NO: 628327 - DNA, 19 bp, Mus musculus
  siRNA target sequence for Olfr71 (NM_019486.1,215-233).
gctacacatctacttttgt

SEQ ID NO: 628328 - DNA, 19 bp, Mus musculus
  siRNA target sequence for Olfr71 (NM_019486.1,216-234).
ctacacatctacttttgta

SEQ ID NO: 628329 - DNA, 19 bp, Mus musculus
  siRNA target sequence for Olfr71 (NM_019486.1,446-464).
gggtgctctgcctcttcaa

SEQ ID NO: 628330 - DNA, 19 bp, Mus musculus
  siRNA target sequence for Olfr71 (NM_019486.1,809-827).
cagaccaggtctttacagt

SEQ ID NO: 628331 - DNA, 19 bp, Mus musculus
  siRNA target sequence for Olfr78 (NM_130866.2,1167-1185).
caccttcctgcttattggt

SEQ ID NO: 628332 - DNA, 19 bp, Mus musculus
  siRNA target sequence for Olfr78 (NM_130866.2,1173-1191).
cctgcttattggtattcca

SEQ ID NO: 628333 - DNA, 19 bp, Mus musculus
  siRNA target sequence for Olfr78 (NM_130866.2,1200-1218).
ggaagctcacttttggttt

SEQ ID NO: 628334 - DNA, 19 bp, Mus musculus
  siRNA target sequence for Olfr78 (NM_130866.2,1220-1238).
gcttccccctgctttccat

SEQ ID NO: 628335 - DNA, 19 bp, Mus musculus
  siRNA target sequence for Olfr78 (NM_130866.2,1224-1242).
ccccctgctttccatgtat

SEQ ID NO: 628336 - DNA, 19 bp, Mus musculus
  siRNA target sequence for Olfr78 (NM_130866.2,1243-1261).
gctgtagcattgtttggaa

SEQ ID NO: 628337 - DNA, 19 bp, Mus musculus
  siRNA target sequence for Olfr78 (NM_130866.2,1401-1419).
ctcccgggagattactttt

SEQ ID NO: 628338 - DNA, 19 bp, Mus musculus
  siRNA target sequence for Olfr78 (NM_130866.2,1403-1421).
cccgggagattacttttga

SEQ ID NO: 628339 - DNA, 19 bp, Mus musculus
  siRNA target sequence for Olfr78 (NM_130866.2,1404-1422).
ccgggagattacttttgat

SEQ ID NO: 628340 - DNA, 19 bp, Mus musculus
  siRNA target sequence for Olfr78 (NM_130866.2,1458-1476).
ctcagcaattgaatctact

SEQ ID NO: 628341 - DNA, 19 bp, Mus musculus
  siRNA target sequence for Olfr78 (NM_130866.2,1540-1558).
gtcctcaacaatacagtaa

SEQ ID NO: 628342 - DNA, 19 bp, Mus musculus
  siRNA target sequence for Olfr78 (NM_130866.2,1585-1603).
gtccggggatccctattct

SEQ ID NO: 628343 - DNA, 19 bp, Mus musculus
  siRNA target sequence for Olfr78 (NM_130866.2,1589-1607).
ggggatccctattcttttt

SEQ ID NO: 628344 - DNA, 19 bp, Mus musculus
  siRNA target sequence for Olfr78 (NM_130866.2,1749-1767).
gctagtcatgggtgtagat

SEQ ID NO: 628345 - DNA, 19 bp, Mus musculus
  siRNA target sequence for Olfr78 (NM_130866.2,1859-1877).
gtgtgtcacacattagtgt

SEQ ID NO: 628346 - DNA, 19 bp, Mus musculus
  siRNA target sequence for Olfr78 (NM_130866.2,1945-1963).
cccattgtgcatgttctaa

SEQ ID NO: 628347 - DNA, 19 bp, Mus musculus
  siRNA target sequence for Olfr78 (NM_130866.2,1946-1964).
ccattgtgcatgttctaat

SEQ ID NO: 628348 - DNA, 19 bp, Mus musculus
  siRNA target sequence for Olfr78 (NM_130866.2,2039-2057).
cacgggttctggctatgtt

SEQ ID NO: 628349 - DNA, 19 bp, Mus musculus
  siRNA target sequence for Oprk1 (NM_011011.1,283-301).
gggcagaatccgacagtaa

SEQ ID NO: 628350 - DNA, 19 bp, Mus musculus
  siRNA target sequence for Oprk1 (NM_011011.1,349-367).
ctccggccatccctgttat

SEQ ID NO: 628351 - DNA, 19 bp, Mus musculus
  siRNA target sequence for Oprk1 (NM_011011.1,403-421).
gcttagtgggcaattctct

SEQ ID NO: 628352 - DNA, 19 bp, Mus musculus
  siRNA target sequence for Oprk1 (NM_011011.1,413-431).
caattctctggtcatgttt

SEQ ID NO: 628353 - DNA, 19 bp, Mus musculus
  siRNA target sequence for Oprk1 (NM_011011.1,495-513).
gcagatgctttggttacta

SEQ ID NO: 628354 - DNA, 19 bp, Mus musculus
  siRNA target sequence for Oprk1 (NM_011011.1,570-588).
gtgctatgcaagattgtca

SEQ ID NO: 628355 - DNA, 19 bp, Mus musculus
  siRNA target sequence for Oprk1 (NM_011011.1,572-590).
gctatgcaagattgtcatt

SEQ ID NO: 628356 - DNA, 19 bp, Mus musculus
  siRNA target sequence for Oprk1 (NM_011011.1,667-685).
gccaccctgtgaaagcttt

SEQ ID NO: 628357 - DNA, 19 bp, Mus musculus
  siRNA target sequence for Oprk1 (NM_011011.1,689-707).
cttccgaacacctttgaaa

SEQ ID NO: 628358 - DNA, 19 bp, Mus musculus
  siRNA target sequence for Oprk1 (NM_011011.1,740-758).
ggcatcatctgttggtata

SEQ ID NO: 628359 - DNA, 19 bp, Mus musculus
  siRNA target sequence for Oprk1 (NM_011011.1,741-759).
gcatcatctgttggtatat

SEQ ID NO: 628360 - DNA, 19 bp, Mus musculus
  siRNA target sequence for Oprk1 (NM_011011.1,828-846).
cctgatgatgaatattcct

SEQ ID NO: 628361 - DNA, 19 bp, Mus musculus
  siRNA target sequence for Oprk1 (NM_011011.1,1020-1038).
gtagttgcagtcttcatca

SEQ ID NO: 628362 - DNA, 19 bp, Mus musculus
  siRNA target sequence for Oprk1 (NM_011011.1,1023-1041).
gttgcagtcttcatcatct

SEQ ID NO: 628363 - DNA, 19 bp, Mus musculus
  siRNA target sequence for Oprk1 (NM_011011.1,1156-1174).
gcctgaatcctgttctcta

SEQ ID NO: 628364 - DNA, 19 bp, Mus musculus
  siRNA target sequence for Oprk1 (NM_011011.1,1212-1230).
gacttctgcttccctatta

SEQ ID NO: 628365 - DNA, 19 bp, Mus musculus
  siRNA target sequence for Oprk1 (NM_011011.1,1242-1260).
gagcgccagagcaccaata

SEQ ID NO: 628366 - DNA, 19 bp, Mus musculus
  siRNA target sequence for Oprk1 (NM_011011.1,1244-1262).
gcgccagagcaccaataga

SEQ ID NO: 628367 - DNA, 19 bp, Mus musculus
  siRNA target sequence for Oprk1 (NM_011011.1,1246-1264).
gccagagcaccaatagagt

SEQ ID NO: 628368 - DNA, 19 bp, Mus musculus
  siRNA target sequence for Oprk1 (NM_011011.1,1250-1268).
gagcaccaatagagttaga

SEQ ID NO: 628369 - DNA, 19 bp, Mus musculus
  siRNA target sequence for Oprk1 (NM_011011.1,1252-1270).
gcaccaatagagttagaaa

SEQ ID NO: 628370 - DNA, 19 bp, Mus musculus
  siRNA target sequence for Oprl (NM_011012.2,243-261).
cattctgggaggtcttgta

SEQ ID NO: 628371 - DNA, 19 bp, Mus musculus
  siRNA target sequence for Oprl (NM_011012.2,280-298).
gaacctgtctctcctaaat

SEQ ID NO: 628372 - DNA, 19 bp, Mus musculus
  siRNA target sequence for Oprl (NM_011012.2,314-332).
cacctgctcctcaatgcta

SEQ ID NO: 628373 - DNA, 19 bp, Mus musculus
  siRNA target sequence for Oprl (NM_011012.2,369-387).
ccatcgtggggctctactt

SEQ ID NO: 628374 - DNA, 19 bp, Mus musculus
  siRNA target sequence for Oprl (NM_011012.2,414-432).
ggaactgcctcgtcatgta

SEQ ID NO: 628375 - DNA, 19 bp, Mus musculus
  siRNA target sequence for Oprl (NM_011012.2,415-433).
gaactgcctcgtcatgtat

SEQ ID NO: 628376 - DNA, 19 bp, Mus musculus
  siRNA target sequence for Oprl (NM_011012.2,420-438).
gcctcgtcatgtatgtcat

SEQ ID NO: 628377 - DNA, 19 bp, Mus musculus
  siRNA target sequence for Oprl (NM_011012.2,440-458).
ctcaggcacaccaagatga

SEQ ID NO: 628378 - DNA, 19 bp, Mus musculus
  siRNA target sequence for Oprl (NM_011012.2,579-597).
gcaagacggtcattgctat

SEQ ID NO: 628379 - DNA, 19 bp, Mus musculus
  siRNA target sequence for Oprl (NM_011012.2,593-611).
gctatcgactactacaaca

SEQ ID NO: 628380 - DNA, 19 bp, Mus musculus
  siRNA target sequence for Oprl (NM_011012.2,613-631).
gtttaccagcactttcact

SEQ ID NO: 628381 - DNA, 19 bp, Mus musculus
  siRNA target sequence for Oprl (NM_011012.2,643-661).
gagtgtagaccgttatgta

SEQ ID NO: 628382 - DNA, 19 bp, Mus musculus
  siRNA target sequence for Oprl (NM_011012.2,675-693).
ctatccgtgcccttgatgt

SEQ ID NO: 628383 - DNA, 19 bp, Mus musculus
  siRNA target sequence for Oprl (NM_011012.2,999-1017).
ggctggtactggtagttgt

SEQ ID NO: 628384 - DNA, 19 bp, Mus musculus
  siRNA target sequence for Or10 (NM_020513.1,62-80).
ctacaaatccattagtaca

SEQ ID NO: 628385 - DNA, 19 bp, Mus musculus
  siRNA target sequence for Or10 (NM_020513.1,899-917).
ccttaaacaagttaattaa

SEQ ID NO: 628386 - DNA, 19 bp, Mus musculus
  siRNA target sequence for Or83 (NM_020514.1,3-21).
gggagctctaaatcaaaca

SEQ ID NO: 628387 - DNA, 19 bp, Mus musculus
  siRNA target sequence for Or83 (NM_020514.1,16-34).
caaacaagagtgactgaat

SEQ ID NO: 628388 - DNA, 19 bp, Mus musculus
  siRNA target sequence for Or83 (NM_020514.1,69-87).
ggagattctgtttttcgta

SEQ ID NO: 628389 - DNA, 19 bp, Mus musculus
  siRNA target sequence for Or83 (NM_020514.1,78-96).
gtttttcgtaccatttaca

SEQ ID NO: 628390 - DNA, 19 bp, Mus musculus
  siRNA target sequence for Or83 (NM_020514.1,247-265).
gagggtttgcttttagaga

SEQ ID NO: 628391 - DNA, 19 bp, Mus musculus
  siRNA target sequence for Or83 (NM_020514.1,398-416).
ccaatgtgatgaacatgaa

SEQ ID NO: 628392 - DNA, 19 bp, Mus musculus
  siRNA target sequence for Or83 (NM_020514.1,453-471).
gggcactattcattcactt

SEQ ID NO: 628393 - DNA, 19 bp, Mus musculus
  siRNA target sequence for Or83 (NM_020514.1,469-487).
cttgtgcagaccttcttga

SEQ ID NO: 628394 - DNA, 19 bp, Mus musculus
  siRNA target sequence for Or83 (NM_020514.1,472-490).
gtgcagaccttcttgacta

SEQ ID NO: 628395 - DNA, 19 bp, Mus musculus
  siRNA target sequence for Or83 (NM_020514.1,474-492).
gcagaccttcttgactatt

SEQ ID NO: 628396 - DNA, 19 bp, Mus musculus
  siRNA target sequence for Or83 (NM_020514.1,477-495).
gaccttcttgactattcgt

SEQ ID NO: 628397 - DNA, 19 bp, Mus musculus
  siRNA target sequence for Or83 (NM_020514.1,506-524).
gtggcccaaacattatcga

SEQ ID NO: 628398 - DNA, 19 bp, Mus musculus
  siRNA target sequence for Or83 (NM_020514.1,508-526).
ggcccaaacattatcgata

SEQ ID NO: 628399 - DNA, 19 bp, Mus musculus
  siRNA target sequence for Or83 (NM_020514.1,564-582).
ctgcacagatacatacctt

SEQ ID NO: 628400 - DNA, 19 bp, Mus musculus
  siRNA target sequence for Or83 (NM_020514.1,614-632).
ccatctccctcgtatgttt

SEQ ID NO: 628401 - DNA, 19 bp, Mus musculus
  siRNA target sequence for Or83 (NM_020514.1,618-636).
ctccctcgtatgttttcta

SEQ ID NO: 628402 - DNA, 19 bp, Mus musculus
  siRNA target sequence for Or83 (NM_020514.1,639-657).
cttggtcacttcttacaca

SEQ ID NO: 628403 - DNA, 19 bp, Mus musculus
  siRNA target sequence for Ors1 (NM_020288.1,257-275).
ccactattcctaacatact

SEQ ID NO: 628404 - DNA, 19 bp, Mus musculus
  siRNA target sequence for Ors1 (NM_020288.1,258-276).
cactattcctaacatacta

SEQ ID NO: 628405 - DNA, 19 bp, Mus musculus
  siRNA target sequence for Ors1 (NM_020288.1,473-491).
gctggctcattggatttct

SEQ ID NO: 628406 - DNA, 19 bp, Mus musculus
  siRNA target sequence for Ors1 (NM_020288.1,494-512).
ggtacccaatccctatctt

SEQ ID NO: 628407 - DNA, 19 bp, Mus musculus
  siRNA target sequence for Ors1 (NM_020288.1,657-675).
cactattgcatacattctt

SEQ ID NO: 628408 - DNA, 19 bp, Mus musculus
  siRNA target sequence for Ors1 (NM_020288.1,669-687).
cattcttcggtcctatatt

SEQ ID NO: 628409 - DNA, 19 bp, Mus musculus
  siRNA target sequence for Ors1 (NM_020288.1,690-708).
gttgctcagggctgttttt

SEQ ID NO: 628410 - DNA, 19 bp, Mus musculus
  siRNA target sequence for Ors1 (NM_020288.1,783-801).
ctatggtacagtaatggta

SEQ ID NO: 628411 - DNA, 19 bp, Mus musculus
  siRNA target sequence for Ors1 (NM_020288.1,787-805).
ggtacagtaatggtaatgt

SEQ ID NO: 628412 - DNA, 19 bp, Mus musculus
  siRNA target sequence for Ors1 (NM_020288.1,804-822).
gtatgtgagtcctacatat

SEQ ID NO: 628413 - DNA, 19 bp, Mus musculus
  siRNA target sequence for Ors1 (NM_020288.1,840-858).
gcagaagatccttacactt

SEQ ID NO: 628414 - DNA, 19 bp, Mus musculus
  siRNA target sequence for Ors1 (NM_020288.1,843-861).
gaagatccttacacttgta

SEQ ID NO: 628415 - DNA, 19 bp, Mus musculus
  siRNA target sequence for Ors1 (NM_020288.1,849-867).
ccttacacttgtatactct

SEQ ID NO: 628416 - DNA, 19 bp, Mus musculus
  siRNA target sequence for Ors1 (NM_020288.1,868-886).
gtaatgactcctctcttta

SEQ ID NO: 628417 - DNA, 19 bp, Mus musculus
  siRNA target sequence for Ors1 (NM_020288.1,880-898).
ctctttaatcctctgattt

SEQ ID NO: 628418 - DNA, 19 bp, Mus musculus
  siRNA target sequence for Ors6 (NM_020289.1,320-338).
gcatctacttccttattgt

SEQ ID NO: 628419 - DNA, 19 bp, Mus musculus
  siRNA target sequence for Ors6 (NM_020289.1,610-628).
ctcactgttcgcatcttca

SEQ ID NO: 628420 - DNA, 19 bp, Mus musculus
  siRNA target sequence for Ors6 (NM_020289.1,970-988).
cagtccctgccctcgaata

SEQ ID NO: 628421 - DNA, 19 bp, Mus musculus
  siRNA target sequence for Ors6 (NM_020289.1,972-990).
gtccctgccctcgaataga

SEQ ID NO: 628422 - DNA, 19 bp, Mus musculus
  siRNA target sequence for Ors6 (NM_020289.1,974-992).
ccctgccctcgaatagaga

SEQ ID NO: 628423 - DNA, 19 bp, Mus musculus
  siRNA target sequence for P2ry1 (NM_008772.2,808-826).
ctgccggctgtctacattt

SEQ ID NO: 628424 - DNA, 19 bp, Mus musculus
  siRNA target sequence for P2ry1 (NM_008772.2,810-828).
gccggctgtctacatttta

SEQ ID NO: 628425 - DNA, 19 bp, Mus musculus
  siRNA target sequence for P2ry1 (NM_008772.2,814-832).
gctgtctacattttagtgt

SEQ ID NO: 628426 - DNA, 19 bp, Mus musculus
  siRNA target sequence for P2ry1 (NM_008772.2,862-880).
gctatctggatgttcgttt

SEQ ID NO: 628427 - DNA, 19 bp, Mus musculus
  siRNA target sequence for P2ry1 (NM_008772.2,899-917).
gcggcatctccgtgtacat

SEQ ID NO: 628428 - DNA, 19 bp, Mus musculus
  siRNA target sequence for P2ry1 (NM_008772.2,906-924).
ctccgtgtacatgttcaat

SEQ ID NO: 628429 - DNA, 19 bp, Mus musculus
  siRNA target sequence for P2ry1 (NM_008772.2,908-926).
ccgtgtacatgttcaattt

SEQ ID NO: 628430 - DNA, 19 bp, Mus musculus
  siRNA target sequence for P2ry1 (NM_008772.2,998-1016).
ggatcttcggggatgctat

SEQ ID NO: 628431 - DNA, 19 bp, Mus musculus
  siRNA target sequence for P2ry1 (NM_008772.2,1124-1142).
ctctgggcaggctcaagaa

SEQ ID NO: 628432 - DNA, 19 bp, Mus musculus
  siRNA target sequence for P2ry1 (NM_008772.2,1220-1238).
gcactgggactcggaaaaa

SEQ ID NO: 628433 - DNA, 19 bp, Mus musculus
  siRNA target sequence for P2ry1 (NM_008772.2,1227-1245).
gactcggaaaaacaaaact

SEQ ID NO: 628434 - DNA, 19 bp, Mus musculus
  siRNA target sequence for P2ry1 (NM_008772.2,1273-1291).
gattacctgcgaagttatt

SEQ ID NO: 628435 - DNA, 19 bp, Mus musculus
  siRNA target sequence for P2ry1 (NM_008772.2,1282-1300).
cgaagttatttcatctaca

SEQ ID NO: 628436 - DNA, 19 bp, Mus musculus
  siRNA target sequence for P2ry1 (NM_008772.2,1286-1304).
gttatttcatctacagtat

SEQ ID NO: 628437 - DNA, 19 bp, Mus musculus
  siRNA target sequence for P2ry1 (NM_008772.2,1341-1359).
gctgatcttgggctgttat

SEQ ID NO: 628438 - DNA, 19 bp, Mus musculus
  siRNA target sequence for P2ry1 (NM_008772.2,1344-1362).
gatcttgggctgttatgga

SEQ ID NO: 628439 - DNA, 19 bp, Mus musculus
  siRNA target sequence for P2ry1 (NM_008772.2,1353-1371).
ctgttatggattaattgtt

SEQ ID NO: 628440 - DNA, 19 bp, Mus musculus
  siRNA target sequence for P2ry1 (NM_008772.2,1355-1373).
gttatggattaattgttaa

SEQ ID NO: 628441 - DNA, 19 bp, Mus musculus
  siRNA target sequence for P2ry1 (NM_008772.2,1361-1379).
gattaattgttaaagcttt

SEQ ID NO: 628442 - DNA, 19 bp, Mus musculus
  siRNA target sequence for P2ry1 (NM_008772.2,1405-1423).
ccgctccggaggaaatcca

SEQ ID NO: 628443 - DNA, 19 bp, Mus musculus
  siRNA target sequence for P2ry1 (NM_008772.2,1412-1430).
ggaggaaatccatttacct

SEQ ID NO: 628444 - DNA, 19 bp, Mus musculus
  siRNA target sequence for P2ry1 (NM_008772.2,1421-1439).
ccatttacctggtgataat

SEQ ID NO: 628445 - DNA, 19 bp, Mus musculus
  siRNA target sequence for P2ry1 (NM_008772.2,1422-1440).
catttacctggtgataatt

SEQ ID NO: 628446 - DNA, 19 bp, Mus musculus
  siRNA target sequence for P2ry1 (NM_008772.2,1450-1468).
gtgtttgctgtgtcttata

SEQ ID NO: 628447 - DNA, 19 bp, Mus musculus
  siRNA target sequence for P2ry1 (NM_008772.2,1480-1498).
gtgatgaaaacgatgaatt

SEQ ID NO: 628448 - DNA, 19 bp, Mus musculus
  siRNA target sequence for P2ry1 (NM_008772.2,1502-1520).
gagcacggttggatttcca

SEQ ID NO: 628449 - DNA, 19 bp, Mus musculus
  siRNA target sequence for P2ry1 (NM_008772.2,1550-1568).
gggtttatgccacttatca

SEQ ID NO: 628450 - DNA, 19 bp, Mus musculus
  siRNA target sequence for P2ry1 (NM_008772.2,1560-1578).
cacttatcaggtaacaaga

SEQ ID NO: 628451 - DNA, 19 bp, Mus musculus
  siRNA target sequence for P2ry1 (NM_008772.2,1626-1644).
ggctggagatacattcaga

SEQ ID NO: 628452 - DNA, 19 bp, Mus musculus
  siRNA target sequence for P2ry1 (NM_008772.2,1657-1675).
cgagccaccaggaaagctt

SEQ ID NO: 628453 - DNA, 19 bp, Mus musculus
  siRNA target sequence for P2ry1 (NM_008772.2,1679-1697).
ggaggagtgaggccaattt

SEQ ID NO: 628454 - DNA, 19 bp, Mus musculus
  siRNA target sequence for P2ry1 (NM_008772.2,1683-1701).
gagtgaggccaatttacaa

SEQ ID NO: 628455 - DNA, 19 bp, Mus musculus
  siRNA target sequence for P2ry1 (NM_008772.2,1699-1717).
caatccaagagtgaagaaa

SEQ ID NO: 628456 - DNA, 19 bp, Mus musculus
  siRNA target sequence for P2ry1 (NM_008772.2,1711-1729).
gaagaaatgactctcaata

SEQ ID NO: 628457 - DNA, 19 bp, Mus musculus
  siRNA target sequence for P2ry1 (NM_008772.2,1719-1737).
gactctcaatattttatct

SEQ ID NO: 628458 - DNA, 19 bp, Mus musculus
  siRNA target sequence for P2ry1 (NM_008772.2,1721-1739).
ctctcaatattttatctga

SEQ ID NO: 628459 - DNA, 19 bp, Mus musculus
  siRNA target sequence for P2ry10 (NM_172435.2,808-826).
gccaatagcacagattctt

SEQ ID NO: 628460 - DNA, 19 bp, Mus musculus
  siRNA target sequence for P2ry10 (NM_172435.2,873-891).
caccatggttgtaattgct

SEQ ID NO: 628461 - DNA, 19 bp, Mus musculus
  siRNA target sequence for P2ry10 (NM_172435.2,913-931).
ccagtgatcaccattgcat

SEQ ID NO: 628462 - DNA, 19 bp, Mus musculus
  siRNA target sequence for P2ry10 (NM_172435.2,918-936).
gatcaccattgcatgttgt

SEQ ID NO: 628463 - DNA, 19 bp, Mus musculus
  siRNA target sequence for P2ry10 (NM_172435.2,960-978).
gaaacacccaccaattgct

SEQ ID NO: 628464 - DNA, 19 bp, Mus musculus
  siRNA target sequence for P2ry10 (NM_172435.2,966-984).
cccaccaattgcttttcaa

SEQ ID NO: 628465 - DNA, 19 bp, Mus musculus
  siRNA target sequence for P2ry10 (NM_172435.2,977-995).
cttttcaagggattagtga

SEQ ID NO: 628466 - DNA, 19 bp, Mus musculus
  siRNA target sequence for P2ry10 (NM_172435.2,986-1004).
ggattagtgagaggaaaaa

SEQ ID NO: 628467 - DNA, 19 bp, Mus musculus
  siRNA target sequence for P2ry10 (NM_172435.2,1007-1025).
cattgcggatggttttcat

SEQ ID NO: 628468 - DNA, 19 bp, Mus musculus
  siRNA target sequence for P2ry10 (NM_172435.2,1028-1046).
gtgctgcagtcttcgttat

SEQ ID NO: 628469 - DNA, 19 bp, Mus musculus
  siRNA target sequence for P2ry10 (NM_172435.2,1030-1048).
gctgcagtcttcgttatct

SEQ ID NO: 628470 - DNA, 19 bp, Mus musculus
  siRNA target sequence for P2ry10 (NM_172435.2,1049-1067).
gcttcactccttatcacat

SEQ ID NO: 628471 - DNA, 19 bp, Mus musculus
  siRNA target sequence for P2ry10 (NM_172435.2,1055-1073).
ctccttatcacattaactt

SEQ ID NO: 628472 - DNA, 19 bp, Mus musculus
  siRNA target sequence for P2ry10 (NM_172435.2,1109-1127).
ccagttgtcccactgtaaa

SEQ ID NO: 628473 - DNA, 19 bp, Mus musculus
  siRNA target sequence for P2ry10 (NM_172435.2,1110-1128).
cagttgtcccactgtaaaa

SEQ ID NO: 628474 - DNA, 19 bp, Mus musculus
  siRNA target sequence for P2ry10 (NM_172435.2,1185-1203).
ggacccaattctgtactat

SEQ ID NO: 628475 - DNA, 19 bp, Mus musculus
  siRNA target sequence for P2ry10 (NM_172435.2,1218-1236).
gtttcgtgaccaactatct

SEQ ID NO: 628476 - DNA, 19 bp, Mus musculus
  siRNA target sequence for P2ry10 (NM_172435.2,1237-1255).
cgtcatggaagctctgtta

SEQ ID NO: 628477 - DNA, 19 bp, Mus musculus
  siRNA target sequence for P2ry10 (NM_172435.2,1275-1293).
cagggagagtggatcatca

SEQ ID NO: 628478 - DNA, 19 bp, Mus musculus
  siRNA target sequence for P2ry10 (NM_172435.2,1277-1295).
gggagagtggatcatcaat

SEQ ID NO: 628479 - DNA, 19 bp, Mus musculus
  siRNA target sequence for P2ry10 (NM_172435.2,1283-1301).
gtggatcatcaatggttaa

SEQ ID NO: 628480 - DNA, 19 bp, Mus musculus
  siRNA target sequence for P2ry10 (NM_172435.2,1285-1303).
ggatcatcaatggttaact

SEQ ID NO: 628481 - DNA, 19 bp, Mus musculus
  siRNA target sequence for P2ry2 (NM_008773.2,529-547).
gggacgaactgggatacaa

SEQ ID NO: 628482 - DNA, 19 bp, Mus musculus
  siRNA target sequence for P2ry2 (NM_008773.2,626-644).
gaacgtcgtggctctctat

SEQ ID NO: 628483 - DNA, 19 bp, Mus musculus
  siRNA target sequence for P2ry2 (NM_008773.2,630-648).
gtcgtggctctctatatct

SEQ ID NO: 628484 - DNA, 19 bp, Mus musculus
  siRNA target sequence for P2ry2 (NM_008773.2,651-669).
ctatgccgcctcaaaacct

SEQ ID NO: 628485 - DNA, 19 bp, Mus musculus
  siRNA target sequence for P2ry2 (NM_008773.2,730-748).
ccctgccgctgttggttta

SEQ ID NO: 628486 - DNA, 19 bp, Mus musculus
  siRNA target sequence for P2ry2 (NM_008773.2,731-749).
cctgccgctgttggtttat

SEQ ID NO: 628487 - DNA, 19 bp, Mus musculus
  siRNA target sequence for P2ry2 (NM_008773.2,732-750).
ctgccgctgttggtttatt

SEQ ID NO: 628488 - DNA, 19 bp, Mus musculus
  siRNA target sequence for P2ry2 (NM_008773.2,735-753).
ccgctgttggtttattact

SEQ ID NO: 628489 - DNA, 19 bp, Mus musculus
  siRNA target sequence for P2ry2 (NM_008773.2,736-754).
cgctgttggtttattacta

SEQ ID NO: 628490 - DNA, 19 bp, Mus musculus
  siRNA target sequence for P2ry2 (NM_008773.2,1005-1023).
cggggaacccggatcactt

SEQ ID NO: 628491 - DNA, 19 bp, Mus musculus
  siRNA target sequence for P2ry2 (NM_008773.2,1111-1129).
ccgtaatcctggtctgtta

SEQ ID NO: 628492 - DNA, 19 bp, Mus musculus
  siRNA target sequence for P2ry2 (NM_008773.2,1323-1341).
gccatcaacatggcatata

SEQ ID NO: 628493 - DNA, 19 bp, Mus musculus
  siRNA target sequence for P2ry2 (NM_008773.2,1356-1374).
ctggccagcgccaacagtt

SEQ ID NO: 628494 - DNA, 19 bp, Mus musculus
  siRNA target sequence for P2ry2 (NM_008773.2,1375-1393).
gtcttgacccggtactcta

SEQ ID NO: 628495 - DNA, 19 bp, Mus musculus
  siRNA target sequence for P2ry2 (NM_008773.2,1487-1505).
cctgcacaggcctaacaga

SEQ ID NO: 628496 - DNA, 19 bp, Mus musculus
  siRNA target sequence for P2ry2 (NM_008773.2,1488-1506).
ctgcacaggcctaacagaa

SEQ ID NO: 628497 - DNA, 19 bp, Mus musculus
  siRNA target sequence for P2ry2 (NM_008773.2,1504-1522).
gaactgtgaggaaagattt

SEQ ID NO: 628498 - DNA, 19 bp, Mus musculus
  siRNA target sequence for P2ry4 (NM_020621.2,308-326).
gcagactccttgctattca

SEQ ID NO: 628499 - DNA, 19 bp, Mus musculus
  siRNA target sequence for P2ry4 (NM_020621.2,311-329).
gactccttgctattcacat

SEQ ID NO: 628500 - DNA, 19 bp, Mus musculus
  siRNA target sequence for P2ry4 (NM_020621.2,356-374).
gatggtgattgtaagttta

SEQ ID NO: 628501 - DNA, 19 bp, Mus musculus
  siRNA target sequence for P2ry4 (NM_020621.2,366-384).
gtaagtttaatgaggaatt

SEQ ID NO: 628502 - DNA, 19 bp, Mus musculus
  siRNA target sequence for P2ry4 (NM_020621.2,492-510).
caacagccacttacatgtt

SEQ ID NO: 628503 - DNA, 19 bp, Mus musculus
  siRNA target sequence for P2ry4 (NM_020621.2,497-515).
gccacttacatgttccatt

SEQ ID NO: 628504 - DNA, 19 bp, Mus musculus
  siRNA target sequence for P2ry4 (NM_020621.2,508-526).
gttccatttggcattgtca

SEQ ID NO: 628505 - DNA, 19 bp, Mus musculus
  siRNA target sequence for P2ry4 (NM_020621.2,552-570).
ccaccctcgtctactacta

SEQ ID NO: 628506 - DNA, 19 bp, Mus musculus
  siRNA target sequence for P2ry4 (NM_020621.2,553-571).
caccctcgtctactactat

SEQ ID NO: 628507 - DNA, 19 bp, Mus musculus
  siRNA target sequence for P2ry4 (NM_020621.2,610-628).
caagttcgtccgctttctt

SEQ ID NO: 628508 - DNA, 19 bp, Mus musculus
  siRNA target sequence for P2ry4 (NM_020621.2,791-809).
cccaacctcttctttgtga

SEQ ID NO: 628509 - DNA, 19 bp, Mus musculus
  siRNA target sequence for P2ry4 (NM_020621.2,869-887).
gaccactacgtatacttca

SEQ ID NO: 628510 - DNA, 19 bp, Mus musculus
  siRNA target sequence for P2ry4 (NM_020621.2,872-890).
cactacgtatacttcagtt

SEQ ID NO: 628511 - DNA, 19 bp, Mus musculus
  siRNA target sequence for P2ry4 (NM_020621.2,1069-1087).
ccacatcacccgcacaatt

SEQ ID NO: 628512 - DNA, 19 bp, Mus musculus
  siRNA target sequence for P2ry4 (NM_020621.2,1070-1088).
cacatcacccgcacaattt

SEQ ID NO: 628513 - DNA, 19 bp, Mus musculus
  siRNA target sequence for P2ry4 (NM_020621.2,1072-1090).
catcacccgcacaatttat

SEQ ID NO: 628514 - DNA, 19 bp, Mus musculus
  siRNA target sequence for P2ry4 (NM_020621.2,1119-1137).
gccgggtgctgaacattgt

SEQ ID NO: 628515 - DNA, 19 bp, Mus musculus
  siRNA target sequence for P2ry4 (NM_020621.2,1121-1139).
cgggtgctgaacattgtca

SEQ ID NO: 628516 - DNA, 19 bp, Mus musculus
  siRNA target sequence for P2ry4 (NM_020621.2,1163-1181).
cccctggccagtgctaata

SEQ ID NO: 628517 - DNA, 19 bp, Mus musculus
  siRNA target sequence for P2ry4 (NM_020621.2,1166-1184).
ctggccagtgctaatagct

SEQ ID NO: 628518 - DNA, 19 bp, Mus musculus
  siRNA target sequence for P2ry4 (NM_020621.2,1190-1208).
gatccagtgctctatctgt

SEQ ID NO: 628519 - DNA, 19 bp, Mus musculus
  siRNA target sequence for P2ry4 (NM_020621.2,1207-1225).
gttcacgggggacaagtat

SEQ ID NO: 628520 - DNA, 19 bp, Mus musculus
  siRNA target sequence for P2ry4 (NM_020621.2,1212-1230).
cgggggacaagtatcgaaa

SEQ ID NO: 628521 - DNA, 19 bp, Mus musculus
  siRNA target sequence for P2ry6 (NM_183168.1,449-467).
gcgtctaccgtgaggattt

SEQ ID NO: 628522 - DNA, 19 bp, Mus musculus
  siRNA target sequence for P2ry6 (NM_183168.1,451-469).
gtctaccgtgaggatttca

SEQ ID NO: 628523 - DNA, 19 bp, Mus musculus
  siRNA target sequence for P2ry6 (NM_183168.1,478-496).
ctgctaaccccggtatact

SEQ ID NO: 628524 - DNA, 19 bp, Mus musculus
  siRNA target sequence for P2ry6 (NM_183168.1,602-620).
cactggcggacctgatgta

SEQ ID NO: 628525 - DNA, 19 bp, Mus musculus
  siRNA target sequence for P2ry6 (NM_183168.1,629-647).
cactacccctacttatcta

SEQ ID NO: 628526 - DNA, 19 bp, Mus musculus
  siRNA target sequence for P2ry6 (NM_183168.1,631-649).
ctacccctacttatctata

SEQ ID NO: 628527 - DNA, 19 bp, Mus musculus
  siRNA target sequence for P2ry6 (NM_183168.1,634-652).
cccctacttatctataact

SEQ ID NO: 628528 - DNA, 19 bp, Mus musculus
  siRNA target sequence for P2ry6 (NM_183168.1,684-702).
cctcgcctgccgctttgta

SEQ ID NO: 628529 - DNA, 19 bp, Mus musculus
  siRNA target sequence for P2ry6 (NM_183168.1,1015-1033).
gccttactggcttgttatt

SEQ ID NO: 628530 - DNA, 19 bp, Mus musculus
  siRNA target sequence for P2ry6 (NM_183168.1,1326-1344).
gcaaccccacgatctctta

SEQ ID NO: 628531 - DNA, 19 bp, Mus musculus
  siRNA target sequence for P2ry6 (NM_183168.1,1330-1348).
ccccacgatctcttacaga

SEQ ID NO: 628532 - DNA, 19 bp, Mus musculus
  siRNA target sequence for P2y5 (NM_175116.2,858-876).
gaaactacaacgtacatga

SEQ ID NO: 628533 - DNA, 19 bp, Mus musculus
  siRNA target sequence for P2y5 (NM_175116.2,862-880).
ctacaacgtacatgattaa

SEQ ID NO: 628534 - DNA, 19 bp, Mus musculus
  siRNA target sequence for P2y5 (NM_175116.2,865-883).
caacgtacatgattaacct

SEQ ID NO: 628535 - DNA, 19 bp, Mus musculus
  siRNA target sequence for P2y5 (NM_175116.2,875-893).
gattaacctggcaatgtca

SEQ ID NO: 628536 - DNA, 19 bp, Mus musculus
  siRNA target sequence for P2y5 (NM_175116.2,913-931).
ctttgccatttcggatttt

SEQ ID NO: 628537 - DNA, 19 bp, Mus musculus
  siRNA target sequence for P2y5 (NM_175116.2,919-937).
catttcggattttttactt

SEQ ID NO: 628538 - DNA, 19 bp, Mus musculus
  siRNA target sequence for P2y5 (NM_175116.2,960-978).
ggagatctactctgtaaga

SEQ ID NO: 628539 - DNA, 19 bp, Mus musculus
  siRNA target sequence for P2y5 (NM_175116.2,961-979).
gagatctactctgtaagat

SEQ ID NO: 628540 - DNA, 19 bp, Mus musculus
  siRNA target sequence for P2y5 (NM_175116.2,963-981).
gatctactctgtaagattt

SEQ ID NO: 628541 - DNA, 19 bp, Mus musculus
  siRNA target sequence for P2y5 (NM_175116.2,990-1008).
ctgttttacaccaatatgt

SEQ ID NO: 628542 - DNA, 19 bp, Mus musculus
  siRNA target sequence for P2y5 (NM_175116.2,1022-1040).
gttcttaacctgtatcagt

SEQ ID NO: 628543 - DNA, 19 bp, Mus musculus
  siRNA target sequence for P2y5 (NM_175116.2,1068-1086).
ccatttaagtcaaagactt

SEQ ID NO: 628544 - DNA, 19 bp, Mus musculus
  siRNA target sequence for P2y5 (NM_175116.2,1098-1116).
cgaaatgcaaagatcgttt

SEQ ID NO: 628545 - DNA, 19 bp, Mus musculus
  siRNA target sequence for P2y5 (NM_175116.2,1147-1165).
gaagtgcgcctgcagtttt

SEQ ID NO: 628546 - DNA, 19 bp, Mus musculus
  siRNA target sequence for P2y5 (NM_175116.2,1150-1168).
gtgcgcctgcagttttctt

SEQ ID NO: 628547 - DNA, 19 bp, Mus musculus
  siRNA target sequence for P2y5 (NM_175116.2,1153-1171).
cgcctgcagttttctttca

SEQ ID NO: 628548 - DNA, 19 bp, Mus musculus
  siRNA target sequence for P2y5 (NM_175116.2,1179-1197).
cactctcaggggaacaata

SEQ ID NO: 628549 - DNA, 19 bp, Mus musculus
  siRNA target sequence for P2y5 (NM_175116.2,1224-1242).
ccagcggccacatggaaaa

SEQ ID NO: 628550 - DNA, 19 bp, Mus musculus
  siRNA target sequence for P2y5 (NM_175116.2,1228-1246).
cggccacatggaaaactta

SEQ ID NO: 628551 - DNA, 19 bp, Mus musculus
  siRNA target sequence for P2y5 (NM_175116.2,1255-1273).
ggattgtgattttcattga

SEQ ID NO: 628552 - DNA, 19 bp, Mus musculus
  siRNA target sequence for P2y5 (NM_175116.2,1304-1322).
gaacgtaacttgttctagt

SEQ ID NO: 628553 - DNA, 19 bp, Mus musculus
  siRNA target sequence for P2y5 (NM_175116.2,1354-1372).
cattaagtagaagcaaaat

SEQ ID NO: 628554 - DNA, 19 bp, Mus musculus
  siRNA target sequence for P2y5 (NM_175116.2,1569-1587).
cctattgtttactacttca

SEQ ID NO: 628555 - DNA, 19 bp, Mus musculus
  siRNA target sequence for P2y5 (NM_175116.2,1689-1707).
cacaacctacagaccttaa

SEQ ID NO: 628556 - DNA, 19 bp, Mus musculus
  siRNA target sequence for Pkhd1l1 (NM_138674.2,91-109).
cccaaagtgacagaagtta

SEQ ID NO: 628557 - DNA, 19 bp, Mus musculus
  siRNA target sequence for Pkhd1l1 (NM_138674.2,112-130).
cctaaatatggcagcataa

SEQ ID NO: 628558 - DNA, 19 bp, Mus musculus
  siRNA target sequence for Pkhd1l1 (NM_138674.2,113-131).
ctaaatatggcagcataaa

SEQ ID NO: 628559 - DNA, 19 bp, Mus musculus
  siRNA target sequence for Pkhd1l1 (NM_138674.2,126-144).
cataaacggagcaacaaga

SEQ ID NO: 628560 - DNA, 19 bp, Mus musculus
  siRNA target sequence for Pkhd1l1 (NM_138674.2,149-167).
ccatcaagggagaaggttt

SEQ ID NO: 628561 - DNA, 19 bp, Mus musculus
  siRNA target sequence for Pkhd1l1 (NM_138674.2,170-188).
ctcaagcaagtcagttcaa

SEQ ID NO: 628562 - DNA, 19 bp, Mus musculus
  siRNA target sequence for Pkhd1l1 (NM_138674.2,186-204).
caactatggagctgacaat

SEQ ID NO: 628563 - DNA, 19 bp, Mus musculus
  siRNA target sequence for Pkhd1l1 (NM_138674.2,189-207).
ctatggagctgacaatact

SEQ ID NO: 628564 - DNA, 19 bp, Mus musculus
  siRNA target sequence for Pkhd1l1 (NM_138674.2,243-261).
ccagtcgattacttgtgat

SEQ ID NO: 628565 - DNA, 19 bp, Mus musculus
  siRNA target sequence for Pkhd1l1 (NM_138674.2,275-293).
caagtcattcaactcaaat

SEQ ID NO: 628566 - DNA, 19 bp, Mus musculus
  siRNA target sequence for Pkhd1l1 (NM_138674.2,353-371).
gagtgccagttgcagaaaa

SEQ ID NO: 628567 - DNA, 19 bp, Mus musculus
  siRNA target sequence for Pkhd1l1 (NM_138674.2,393-411).
cagcagctgggcatgtagt

SEQ ID NO: 628568 - DNA, 19 bp, Mus musculus
  siRNA target sequence for Pkhd1l1 (NM_138674.2,403-421).
gcatgtagtttcagtacaa

SEQ ID NO: 628569 - DNA, 19 bp, Mus musculus
  siRNA target sequence for Pkhd1l1 (NM_138674.2,404-422).
catgtagtttcagtacaaa

SEQ ID NO: 628570 - DNA, 19 bp, Mus musculus
  siRNA target sequence for Pkhd1l1 (NM_138674.2,410-428).
gtttcagtacaaaaagttt

SEQ ID NO: 628571 - DNA, 19 bp, Mus musculus
  siRNA target sequence for Pkhd1l1 (NM_138674.2,447-465).
gagcatcacacctttatct

SEQ ID NO: 628572 - DNA, 19 bp, Mus musculus
  siRNA target sequence for Pkhd1l1 (NM_138674.2,464-482).
ctggaactccaggtacatt

SEQ ID NO: 628573 - DNA, 19 bp, Mus musculus
  siRNA target sequence for Pkhd1l1 (NM_138674.2,472-490).
ccaggtacattaataacaa

SEQ ID NO: 628574 - DNA, 19 bp, Mus musculus
  siRNA target sequence for Pkhd1l1 (NM_138674.2,473-491).
caggtacattaataacaat

SEQ ID NO: 628575 - DNA, 19 bp, Mus musculus
  siRNA target sequence for Pkhd1l1 (NM_138674.2,500-518).
ggctcttcactgatgtcta

SEQ ID NO: 628576 - DNA, 19 bp, Mus musculus
  siRNA target sequence for Pkhd1l1 (NM_138674.2,501-519).
gctcttcactgatgtctat

SEQ ID NO: 628577 - DNA, 19 bp, Mus musculus
  siRNA target sequence for Pkhd1l1 (NM_138674.2,532-550).
gcactgagctcaaatggaa

SEQ ID NO: 628578 - DNA, 19 bp, Mus musculus
  siRNA target sequence for Pkhd1l1 (NM_138674.2,539-557).
gctcaaatggaagaaatgt

SEQ ID NO: 628579 - DNA, 19 bp, Mus musculus
  siRNA target sequence for Pkhd1l1 (NM_138674.2,560-578).
ggattctaagaatttatat

SEQ ID NO: 628580 - DNA, 19 bp, Mus musculus
  siRNA target sequence for Pkhd1l1 (NM_138674.2,607-625).
ccacattctgatgatttgt

SEQ ID NO: 628581 - DNA, 19 bp, Mus musculus
  siRNA target sequence for Pkhd1l1 (NM_138674.2,847-865).
gaaggtggcaccctattga

SEQ ID NO: 628582 - DNA, 19 bp, Mus musculus
  siRNA target sequence for Pkhd1l1 (NM_138674.2,850-868).
ggtggcaccctattgacaa

SEQ ID NO: 628583 - DNA, 19 bp, Mus musculus
  siRNA target sequence for Pkhd1l1 (NM_138674.2,851-869).
gtggcaccctattgacaat

SEQ ID NO: 628584 - DNA, 19 bp, Mus musculus
  siRNA target sequence for Pkhd1l1 (NM_138674.2,854-872).
gcaccctattgacaataca

SEQ ID NO: 628585 - DNA, 19 bp, Mus musculus
  siRNA target sequence for Pkhd1l1 (NM_138674.2,866-884).
caatacacgggcacttctt

SEQ ID NO: 628586 - DNA, 19 bp, Mus musculus
  siRNA target sequence for Pkhd1l1 (NM_138674.2,990-1008).
catcctcaaagctacatat

SEQ ID NO: 628587 - DNA, 19 bp, Mus musculus
  siRNA target sequence for Pkhd1l1 (NM_138674.2,993-1011).
cctcaaagctacatatcca

SEQ ID NO: 628588 - DNA, 19 bp, Mus musculus
  siRNA target sequence for Pkhd1l1 (NM_138674.2,1063-1081).
cttgaagatatacttgaat

SEQ ID NO: 628589 - DNA, 19 bp, Mus musculus
  siRNA target sequence for Pkhd1l1 (NM_138674.2,1119-1137).
gacggattctgcttcctat

SEQ ID NO: 628590 - DNA, 19 bp, Mus musculus
  siRNA target sequence for Pkhd1l1 (NM_138674.2,1123-1141).
gattctgcttcctatgttt

SEQ ID NO: 628591 - DNA, 19 bp, Mus musculus
  siRNA target sequence for Pkhd1l1 (NM_138674.2,1133-1151).
cctatgtttggcctataga

SEQ ID NO: 628592 - DNA, 19 bp, Mus musculus
  siRNA target sequence for Pkhd1l1 (NM_138674.2,1134-1152).
ctatgtttggcctatagaa

SEQ ID NO: 628593 - DNA, 19 bp, Mus musculus
  siRNA target sequence for Pkhd1l1 (NM_138674.2,1193-1211).
ccccagattctgatgttta

SEQ ID NO: 628594 - DNA, 19 bp, Mus musculus
  siRNA target sequence for Pkhd1l1 (NM_138674.2,1228-1246).
ggtgatgaccgctatgcta

SEQ ID NO: 628595 - DNA, 19 bp, Mus musculus
  siRNA target sequence for Pkhd1l1 (NM_138674.2,1229-1247).
gtgatgaccgctatgctat

SEQ ID NO: 628596 - DNA, 19 bp, Mus musculus
  siRNA target sequence for Pkhd1l1 (NM_138674.2,1231-1249).
gatgaccgctatgctattt

SEQ ID NO: 628597 - DNA, 19 bp, Mus musculus
  siRNA target sequence for Pkhd1l1 (NM_138674.2,1234-1252).
gaccgctatgctatttatt

SEQ ID NO: 628598 - DNA, 19 bp, Mus musculus
  siRNA target sequence for Pkhd1l1 (NM_138674.2,1282-1300).
gtgaggattgcgtattact

SEQ ID NO: 628599 - DNA, 19 bp, Mus musculus
  siRNA target sequence for Pkhd1l1 (NM_138674.2,1284-1302).
gaggattgcgtattactct

SEQ ID NO: 628600 - DNA, 19 bp, Mus musculus
  siRNA target sequence for Pkhd1l1 (NM_138674.2,1367-1385).
gaaaagagtattacattga

SEQ ID NO: 628601 - DNA, 19 bp, Mus musculus
  siRNA target sequence for Pkhd1l1 (NM_138674.2,1393-1411).
ctgcaagagtatacattaa

SEQ ID NO: 628602 - DNA, 19 bp, Mus musculus
  siRNA target sequence for Pkhd1l1 (NM_138674.2,1395-1413).
gcaagagtatacattaagt

SEQ ID NO: 628603 - DNA, 19 bp, Mus musculus
  siRNA target sequence for Pkhd1l1 (NM_138674.2,1401-1419).
gtatacattaagtgctttt

SEQ ID NO: 628604 - DNA, 19 bp, Mus musculus
  siRNA target sequence for Pkhd1l1 (NM_138674.2,1467-1485).
gacaggagatgcactaaat

SEQ ID NO: 628605 - DNA, 19 bp, Mus musculus
  siRNA target sequence for Pkhd1l1 (NM_138674.2,1500-1518).
caaatctcagtcaacagtt

SEQ ID NO: 628606 - DNA, 19 bp, Mus musculus
  siRNA target sequence for Pkhd1l1 (NM_138674.2,1514-1532).
cagttgtccccgaagtaca

SEQ ID NO: 628607 - DNA, 19 bp, Mus musculus
  siRNA target sequence for Pkhd1l1 (NM_138674.2,1519-1537).
gtccccgaagtacagatta

SEQ ID NO: 628608 - DNA, 19 bp, Mus musculus
  siRNA target sequence for Pkhd1l1 (NM_138674.2,1521-1539).
ccccgaagtacagattata

SEQ ID NO: 628609 - DNA, 19 bp, Mus musculus
  siRNA target sequence for Pkhd1l1 (NM_138674.2,1522-1540).
cccgaagtacagattataa

SEQ ID NO: 628610 - DNA, 19 bp, Mus musculus
  siRNA target sequence for Pkhd1l1 (NM_138674.2,1524-1542).
cgaagtacagattataaca

SEQ ID NO: 628611 - DNA, 19 bp, Mus musculus
  siRNA target sequence for Pkhd1l1 (NM_138674.2,1525-1543).
gaagtacagattataacat

SEQ ID NO: 628612 - DNA, 19 bp, Mus musculus
  siRNA target sequence for Pkhd1l1 (NM_138674.2,1531-1549).
cagattataacattggaaa

SEQ ID NO: 628613 - DNA, 19 bp, Mus musculus
  siRNA target sequence for Pkhd1l1 (NM_138674.2,1609-1627).
gtgggagctaactcatgtt

SEQ ID NO: 628614 - DNA, 19 bp, Mus musculus
  siRNA target sequence for Pkhd1l1 (NM_138674.2,1628-1646).
ccctttcccaatacagatt

SEQ ID NO: 628615 - DNA, 19 bp, Mus musculus
  siRNA target sequence for Pkhd1l1 (NM_138674.2,1634-1652).
cccaatacagattcatcta

SEQ ID NO: 628616 - DNA, 19 bp, Mus musculus
  siRNA target sequence for Pkhd1l1 (NM_138674.2,1636-1654).
caatacagattcatctaca

SEQ ID NO: 628617 - DNA, 19 bp, Mus musculus
  siRNA target sequence for Pkhd1l1 (NM_138674.2,1698-1716).
cacgttgaaatcagcttta

SEQ ID NO: 628618 - DNA, 19 bp, Mus musculus
  siRNA target sequence for Pkhd1l1 (NM_138674.2,1785-1803).
ctacacaataacctttgta

SEQ ID NO: 628619 - DNA, 19 bp, Mus musculus
  siRNA target sequence for Pkhd1l1 (NM_138674.2,1805-1823).
caactagaggagactttga

SEQ ID NO: 628620 - DNA, 19 bp, Mus musculus
  siRNA target sequence for Pkhd1l1 (NM_138674.2,1853-1871).
gtaatgtcacgctgagtat

SEQ ID NO: 628621 - DNA, 19 bp, Mus musculus
  siRNA target sequence for Pkhd1l1 (NM_138674.2,1894-1912).
cccaatttggagacgttta

SEQ ID NO: 628622 - DNA, 19 bp, Mus musculus
  siRNA target sequence for Pkhd1l1 (NM_138674.2,1896-1914).
caatttggagacgtttaca

SEQ ID NO: 628623 - DNA, 19 bp, Mus musculus
  siRNA target sequence for Pkhd1l1 (NM_138674.2,1922-1940).
gggatgggattgcttctaa

SEQ ID NO: 628624 - DNA, 19 bp, Mus musculus
  siRNA target sequence for Pkhd1l1 (NM_138674.2,1958-1976).
catcggaagctgaatttca

SEQ ID NO: 628625 - DNA, 19 bp, Mus musculus
  siRNA target sequence for Pkhd1l1 (NM_138674.2,2015-2033).
cggaaatagcacatttgga

SEQ ID NO: 628626 - DNA, 19 bp, Mus musculus
  siRNA target sequence for Pkhd1l1 (NM_138674.2,2106-2124).
gaagacggccgaaacagat

SEQ ID NO: 628627 - DNA, 19 bp, Mus musculus
  siRNA target sequence for Pkhd1l1 (NM_138674.2,2111-2129).
cggccgaaacagatgcata

SEQ ID NO: 628628 - DNA, 19 bp, Mus musculus
  siRNA target sequence for Pkhd1l1 (NM_138674.2,2113-2131).
gccgaaacagatgcatatt

SEQ ID NO: 628629 - DNA, 19 bp, Mus musculus
  siRNA target sequence for Pkhd1l1 (NM_138674.2,2135-2153).
gccgttactccctgaaaaa

SEQ ID NO: 628630 - DNA, 19 bp, Mus musculus
  siRNA target sequence for Pkhd1l1 (NM_138674.2,2155-2173).
ccagctgtactttttgact

SEQ ID NO: 628631 - DNA, 19 bp, Mus musculus
  siRNA target sequence for Pkhd1l1 (NM_138674.2,2179-2197).
gatgttaagccaaacaaat

SEQ ID NO: 628632 - DNA, 19 bp, Mus musculus
  siRNA target sequence for Pkhd1l1 (NM_138674.2,2200-2218).
ccatatggagacattttat

SEQ ID NO: 628633 - DNA, 19 bp, Mus musculus
  siRNA target sequence for Pkhd1l1 (NM_138674.2,2224-2242).
ccttataatcagttgtgtt

SEQ ID NO: 628634 - DNA, 19 bp, Mus musculus
  siRNA target sequence for Pkhd1l1 (NM_138674.2,2254-2272).
ggatctctggccaacttca

SEQ ID NO: 628635 - DNA, 19 bp, Mus musculus
  siRNA target sequence for Pkhd1l1 (NM_138674.2,2258-2276).
ctctggccaacttcattga

SEQ ID NO: 628636 - DNA, 19 bp, Mus musculus
  siRNA target sequence for Pkhd1l1 (NM_138674.2,2310-2328).
cattagaagtgctgatgta

SEQ ID NO: 628637 - DNA, 19 bp, Mus musculus
  siRNA target sequence for Pkhd1l1 (NM_138674.2,2315-2333).
gaagtgctgatgtacaatt

SEQ ID NO: 628638 - DNA, 19 bp, Mus musculus
  siRNA target sequence for Pkhd1l1 (NM_138674.2,2326-2344).
gtacaatttgaatataact

SEQ ID NO: 628639 - DNA, 19 bp, Mus musculus
  siRNA target sequence for Pkhd1l1 (NM_138674.2,2353-2371).
ggaaataagtggacttaca

SEQ ID NO: 628640 - DNA, 19 bp, Mus musculus
  siRNA target sequence for Pkhd1l1 (NM_138674.2,2361-2379).
gtggacttacacttgcata

SEQ ID NO: 628641 - DNA, 19 bp, Mus musculus
  siRNA target sequence for Pkhd1l1 (NM_138674.2,2375-2393).
gcatagatcttctagattt

SEQ ID NO: 628642 - DNA, 19 bp, Mus musculus
  siRNA target sequence for Pkhd1l1 (NM_138674.2,2394-2412).
cttacaaaccaaatatgct

SEQ ID NO: 628643 - DNA, 19 bp, Mus musculus
  siRNA target sequence for Pkhd1l1 (NM_138674.2,2426-2444).
ctctacaaaggattacctt

SEQ ID NO: 628644 - DNA, 19 bp, Mus musculus
  siRNA target sequence for Pkhd1l1 (NM_138674.2,2431-2449).
caaaggattaccttacaaa

SEQ ID NO: 628645 - DNA, 19 bp, Mus musculus
  siRNA target sequence for Pkhd1l1 (NM_138674.2,2540-2558).
gacctccagcactagcaaa

SEQ ID NO: 628646 - DNA, 19 bp, Mus musculus
  siRNA target sequence for Pkhd1l1 (NM_138674.2,2551-2569).
ctagcaaacaaaggaatat

SEQ ID NO: 628647 - DNA, 19 bp, Mus musculus
  siRNA target sequence for Pkhd1l1 (NM_138674.2,2584-2602).
caggttaatcggaccaaat

SEQ ID NO: 628648 - DNA, 19 bp, Mus musculus
  siRNA target sequence for Pkhd1l1 (NM_138674.2,2586-2604).
ggttaatcggaccaaatta

SEQ ID NO: 628649 - DNA, 19 bp, Mus musculus
  siRNA target sequence for Pkhd1l1 (NM_138674.2,2587-2605).
gttaatcggaccaaattaa

SEQ ID NO: 628650 - DNA, 19 bp, Mus musculus
  siRNA target sequence for Pkhd1l1 (NM_138674.2,2612-2630).
cagctatgacaattcagta

SEQ ID NO: 628651 - DNA, 19 bp, Mus musculus
  siRNA target sequence for Pkhd1l1 (NM_138674.2,2614-2632).
gctatgacaattcagtatt

SEQ ID NO: 628652 - DNA, 19 bp, Mus musculus
  siRNA target sequence for Pkhd1l1 (NM_138674.2,2635-2653).
gttaccataacttcatata

SEQ ID NO: 628653 - DNA, 19 bp, Mus musculus
  siRNA target sequence for Pkhd1l1 (NM_138674.2,2648-2666).
catataactgcagtcataa

SEQ ID NO: 628654 - DNA, 19 bp, Mus musculus
  siRNA target sequence for Pkhd1l1 (NM_138674.2,2655-2673).
ctgcagtcataatatacct

SEQ ID NO: 628655 - DNA, 19 bp, Mus musculus
  siRNA target sequence for Pkhd1l1 (NM_138674.2,2657-2675).
gcagtcataatatacctat

SEQ ID NO: 628656 - DNA, 19 bp, Mus musculus
  siRNA target sequence for Pkhd1l1 (NM_138674.2,2660-2678).
gtcataatatacctatgat

SEQ ID NO: 628657 - DNA, 19 bp, Mus musculus
  siRNA target sequence for Pkhd1l1 (NM_138674.2,2693-2711).
gacagataatcacaaatga

SEQ ID NO: 628658 - DNA, 19 bp, Mus musculus
  siRNA target sequence for Pkhd1l1 (NM_138674.2,2747-2765).
ggccaggggagtcaaagat

SEQ ID NO: 628659 - DNA, 19 bp, Mus musculus
  siRNA target sequence for Pkhd1l1 (NM_138674.2,2748-2766).
gccaggggagtcaaagatt

SEQ ID NO: 628660 - DNA, 19 bp, Mus musculus
  siRNA target sequence for Pkhd1l1 (NM_138674.2,2752-2770).
ggggagtcaaagattcgta

SEQ ID NO: 628661 - DNA, 19 bp, Mus musculus
  siRNA target sequence for Pkhd1l1 (NM_138674.2,2753-2771).
gggagtcaaagattcgtat

SEQ ID NO: 628662 - DNA, 19 bp, Mus musculus
  siRNA target sequence for Pkhd1l1 (NM_138674.2,2757-2775).
gtcaaagattcgtattcaa

SEQ ID NO: 628663 - DNA, 19 bp, Mus musculus
  siRNA target sequence for Pkhd1l1 (NM_138674.2,2763-2781).
gattcgtattcaaaaaatt

SEQ ID NO: 628664 - DNA, 19 bp, Mus musculus
  siRNA target sequence for Pkhd1l1 (NM_138674.2,2784-2802).
ggaagcttctccacctata

SEQ ID NO: 628665 - DNA, 19 bp, Mus musculus
  siRNA target sequence for Pkhd1l1 (NM_138674.2,2785-2803).
gaagcttctccacctataa

SEQ ID NO: 628666 - DNA, 19 bp, Mus musculus
  siRNA target sequence for Pkhd1l1 (NM_138674.2,2804-2822).
gcggcagctttgatgttca

SEQ ID NO: 628667 - DNA, 19 bp, Mus musculus
  siRNA target sequence for Pkhd1l1 (NM_138674.2,2805-2823).
cggcagctttgatgttcaa

SEQ ID NO: 628668 - DNA, 19 bp, Mus musculus
  siRNA target sequence for Pkhd1l1 (NM_138674.2,3000-3018).
gatcaatgattccaacatt

SEQ ID NO: 628669 - DNA, 19 bp, Mus musculus
  siRNA target sequence for Pkhd1l1 (NM_138674.2,3011-3029).
ccaacattatcggagaaaa

SEQ ID NO: 628670 - DNA, 19 bp, Mus musculus
  siRNA target sequence for Pkhd1l1 (NM_138674.2,3021-3039).
cggagaaaaggctaatgta

SEQ ID NO: 628671 - DNA, 19 bp, Mus musculus
  siRNA target sequence for Pkhd1l1 (NM_138674.2,3093-3111).
catgcttcgtacactgaat

SEQ ID NO: 628672 - DNA, 19 bp, Mus musculus
  siRNA target sequence for Pkhd1l1 (NM_138674.2,3119-3137).
cacaggttgaagtctatgt

SEQ ID NO: 628673 - DNA, 19 bp, Mus musculus
  siRNA target sequence for Pkhd1l1 (NM_138674.2,3123-3141).
ggttgaagtctatgtcaat

SEQ ID NO: 628674 - DNA, 19 bp, Mus musculus
  siRNA target sequence for Pkhd1l1 (NM_138674.2,3201-3219).
cctgatcttgacaacaaca

SEQ ID NO: 628675 - DNA, 19 bp, Mus musculus
  siRNA target sequence for Pkhd1l1 (NM_138674.2,3238-3256).
gcagaaagcacgattctaa

SEQ ID NO: 628676 - DNA, 19 bp, Mus musculus
  siRNA target sequence for Pkhd1l1 (NM_138674.2,3351-3369).
caagtgccagattctgaat

SEQ ID NO: 628677 - DNA, 19 bp, Mus musculus
  siRNA target sequence for Pkhd1l1 (NM_138674.2,3437-3455).
gtgagggatcccacttcat

SEQ ID NO: 628678 - DNA, 19 bp, Mus musculus
  siRNA target sequence for Pkhd1l1 (NM_138674.2,3506-3524).
gtggtactctgctgacaat

SEQ ID NO: 628679 - DNA, 19 bp, Mus musculus
  siRNA target sequence for Pkhd1l1 (NM_138674.2,3508-3526).
ggtactctgctgacaatat

SEQ ID NO: 628680 - DNA, 19 bp, Mus musculus
  siRNA target sequence for Pkhd1l1 (NM_138674.2,3516-3534).
gctgacaatatctggattt

SEQ ID NO: 628681 - DNA, 19 bp, Mus musculus
  siRNA target sequence for Pkhd1l1 (NM_138674.2,3551-3569).
caacagttttagttggaaa

SEQ ID NO: 628682 - DNA, 19 bp, Mus musculus
  siRNA target sequence for Pkhd1l1 (NM_138674.2,3583-3601).
gtgatcgaaggagatttga

SEQ ID NO: 628683 - DNA, 19 bp, Mus musculus
  siRNA target sequence for Pkhd1l1 (NM_138674.2,3585-3603).
gatcgaaggagatttgaat

SEQ ID NO: 628684 - DNA, 19 bp, Mus musculus
  siRNA target sequence for Pkhd1l1 (NM_138674.2,3595-3613).
gatttgaataggataacct

SEQ ID NO: 628685 - DNA, 19 bp, Mus musculus
  siRNA target sequence for Pkhd1l1 (NM_138674.2,3634-3652).
gagggtacagttgatattt

SEQ ID NO: 628686 - DNA, 19 bp, Mus musculus
  siRNA target sequence for Pkhd1l1 (NM_138674.2,3636-3654).
gggtacagttgatatttct

SEQ ID NO: 628687 - DNA, 19 bp, Mus musculus
  siRNA target sequence for Pkhd1l1 (NM_138674.2,3646-3664).
gatatttctgtcattacca

SEQ ID NO: 628688 - DNA, 19 bp, Mus musculus
  siRNA target sequence for Pkhd1l1 (NM_138674.2,3683-3701).
caaaggacagttttagtta

SEQ ID NO: 628689 - DNA, 19 bp, Mus musculus
  siRNA target sequence for Pkhd1l1 (NM_138674.2,3754-3772).
gttctgggaaaggtcaatt

SEQ ID NO: 628690 - DNA, 19 bp, Mus musculus
  siRNA target sequence for Pkhd1l1 (NM_138674.2,3761-3779).
gaaaggtcaatttaacaat

SEQ ID NO: 628691 - DNA, 19 bp, Mus musculus
  siRNA target sequence for Pkhd1l1 (NM_138674.2,3809-3827).
cacaaaatacggtgtatgt

SEQ ID NO: 628692 - DNA, 19 bp, Mus musculus
  siRNA target sequence for Pkhd1l1 (NM_138674.2,3818-3836).
cggtgtatgttggaagaaa

SEQ ID NO: 628693 - DNA, 19 bp, Mus musculus
  siRNA target sequence for Pkhd1l1 (NM_138674.2,3847-3865).
gtacttcactcaaacttca

SEQ ID NO: 628694 - DNA, 19 bp, Mus musculus
  siRNA target sequence for Pkhd1l1 (NM_138674.2,3888-3906).
cacgttacctccaggaaaa

SEQ ID NO: 628695 - DNA, 19 bp, Mus musculus
  siRNA target sequence for Pkhd1l1 (NM_138674.2,3902-3920).
gaaaacatgatatctatgt

SEQ ID NO: 628696 - DNA, 19 bp, Mus musculus
  siRNA target sequence for Pkhd1l1 (NM_138674.2,3910-3928).
gatatctatgtgaaagtca

SEQ ID NO: 628697 - DNA, 19 bp, Mus musculus
  siRNA target sequence for Pkhd1l1 (NM_138674.2,3943-3961).
gcgtcaacaaggaacaagt

SEQ ID NO: 628698 - DNA, 19 bp, Mus musculus
  siRNA target sequence for Pkhd1l1 (NM_138674.2,3944-3962).
cgtcaacaaggaacaagtt

SEQ ID NO: 628699 - DNA, 19 bp, Mus musculus
  siRNA target sequence for Pkhd1l1 (NM_138674.2,3967-3985).
gcttccatactgtacattt

SEQ ID NO: 628700 - DNA, 19 bp, Mus musculus
  siRNA target sequence for Pkhd1l1 (NM_138674.2,3968-3986).
cttccatactgtacatttt

SEQ ID NO: 628701 - DNA, 19 bp, Mus musculus
  siRNA target sequence for Pkhd1l1 (NM_138674.2,3971-3989).
ccatactgtacattttgga

SEQ ID NO: 628702 - DNA, 19 bp, Mus musculus
  siRNA target sequence for Pkhd1l1 (NM_138674.2,4028-4046).
gtggcactgaaatcactat

SEQ ID NO: 628703 - DNA, 19 bp, Mus musculus
  siRNA target sequence for Pkhd1l1 (NM_138674.2,4031-4049).
gcactgaaatcactataat

SEQ ID NO: 628704 - DNA, 19 bp, Mus musculus
  siRNA target sequence for Pkhd1l1 (NM_138674.2,4057-4075).
gggttcagcacaataccaa

SEQ ID NO: 628705 - DNA, 19 bp, Mus musculus
  siRNA target sequence for Pkhd1l1 (NM_138674.2,4104-4122).
cccatgtgacattacatca

SEQ ID NO: 628706 - DNA, 19 bp, Mus musculus
  siRNA target sequence for Pkhd1l1 (NM_138674.2,4105-4123).
ccatgtgacattacatcat

SEQ ID NO: 628707 - DNA, 19 bp, Mus musculus
  siRNA target sequence for Pkhd1l1 (NM_138674.2,4162-4180).
gggacagtattcagaatta

SEQ ID NO: 628708 - DNA, 19 bp, Mus musculus
  siRNA target sequence for Pkhd1l1 (NM_138674.2,4166-4184).
cagtattcagaattaccaa

SEQ ID NO: 628709 - DNA, 19 bp, Mus musculus
  siRNA target sequence for Pkhd1l1 (NM_138674.2,4182-4200).
caacaacggttcacattta

SEQ ID NO: 628710 - DNA, 19 bp, Mus musculus
  siRNA target sequence for Pkhd1l1 (NM_138674.2,4221-4239).
ctggtcaccatcagtctta

SEQ ID NO: 628711 - DNA, 19 bp, Mus musculus
  siRNA target sequence for Pkhd1l1 (NM_138674.2,4223-4241).
ggtcaccatcagtcttaaa

SEQ ID NO: 628712 - DNA, 19 bp, Mus musculus
  siRNA target sequence for Pkhd1l1 (NM_138674.2,4224-4242).
gtcaccatcagtcttaaat

SEQ ID NO: 628713 - DNA, 19 bp, Mus musculus
  siRNA target sequence for Pkhd1l1 (NM_138674.2,4295-4313).
ggggtatagggtacagaat

SEQ ID NO: 628714 - DNA, 19 bp, Mus musculus
  siRNA target sequence for Pkhd1l1 (NM_138674.2,4296-4314).
gggtatagggtacagaatt

SEQ ID NO: 628715 - DNA, 19 bp, Mus musculus
  siRNA target sequence for Pkhd1l1 (NM_138674.2,4328-4346).
gtcccggaagtgtaactta

SEQ ID NO: 628716 - DNA, 19 bp, Mus musculus
  siRNA target sequence for Pkhd1l1 (NM_138674.2,4384-4402).
gcatccggttcattttctt

SEQ ID NO: 628717 - DNA, 19 bp, Mus musculus
  siRNA target sequence for Pkhd1l1 (NM_138674.2,4417-4435).
cctggaatctattactaca

SEQ ID NO: 628718 - DNA, 19 bp, Mus musculus
  siRNA target sequence for Pkhd1l1 (NM_138674.2,4431-4449).
ctacagcagcgggtatgtt

SEQ ID NO: 628719 - DNA, 19 bp, Mus musculus
  siRNA target sequence for Pkhd1l1 (NM_138674.2,4436-4454).
gcagcgggtatgttgatga

SEQ ID NO: 628720 - DNA, 19 bp, Mus musculus
  siRNA target sequence for Pkhd1l1 (NM_138674.2,4539-4557).
cattgaggcgacatatgtt

SEQ ID NO: 628721 - DNA, 19 bp, Mus musculus
  siRNA target sequence for Pkhd1l1 (NM_138674.2,4565-4583).
gccctgcgcatttacagtt

SEQ ID NO: 628722 - DNA, 19 bp, Mus musculus
  siRNA target sequence for Pkhd1l1 (NM_138674.2,4619-4637).
ccctgtgtggtctgaatga

SEQ ID NO: 628723 - DNA, 19 bp, Mus musculus
  siRNA target sequence for Pkhd1l1 (NM_138674.2,4620-4638).
cctgtgtggtctgaatgat

SEQ ID NO: 628724 - DNA, 19 bp, Mus musculus
  siRNA target sequence for Pkhd1l1 (NM_138674.2,4621-4639).
ctgtgtggtctgaatgata

SEQ ID NO: 628725 - DNA, 19 bp, Mus musculus
  siRNA target sequence for Pkhd1l1 (NM_138674.2,4623-4641).
gtgtggtctgaatgataca

SEQ ID NO: 628726 - DNA, 19 bp, Mus musculus
  siRNA target sequence for Pkhd1l1 (NM_138674.2,4632-4650).
gaatgatacaagggttaaa

SEQ ID NO: 628727 - DNA, 19 bp, Mus musculus
  siRNA target sequence for Pkhd1l1 (NM_138674.2,4640-4658).
caagggttaaacattcaaa

SEQ ID NO: 628728 - DNA, 19 bp, Mus musculus
  siRNA target sequence for Pkhd1l1 (NM_138674.2,4691-4709).
caccctctatcatcaacat

SEQ ID NO: 628729 - DNA, 19 bp, Mus musculus
  siRNA target sequence for Pkhd1l1 (NM_138674.2,4718-4736).
ctaccggaacagcaaatga

SEQ ID NO: 628730 - DNA, 19 bp, Mus musculus
  siRNA target sequence for Pkhd1l1 (NM_138674.2,4729-4747).
gcaaatgaacttataacta

SEQ ID NO: 628731 - DNA, 19 bp, Mus musculus
  siRNA target sequence for Pkhd1l1 (NM_138674.2,4730-4748).
caaatgaacttataactat

SEQ ID NO: 628732 - DNA, 19 bp, Mus musculus
  siRNA target sequence for Pkhd1l1 (NM_138674.2,4774-4792).
ccatgtgctaataaggtta

SEQ ID NO: 628733 - DNA, 19 bp, Mus musculus
  siRNA target sequence for Pkhd1l1 (NM_138674.2,4778-4796).
gtgctaataaggttacaat

SEQ ID NO: 628734 - DNA, 19 bp, Mus musculus
  siRNA target sequence for Pkhd1l1 (NM_138674.2,4802-4820).
gctacccttgtgttgtaga

SEQ ID NO: 628735 - DNA, 19 bp, Mus musculus
  siRNA target sequence for Pkhd1l1 (NM_138674.2,4803-4821).
ctacccttgtgttgtagaa

SEQ ID NO: 628736 - DNA, 19 bp, Mus musculus
  siRNA target sequence for Pkhd1l1 (NM_138674.2,4806-4824).
cccttgtgttgtagaagaa

SEQ ID NO: 628737 - DNA, 19 bp, Mus musculus
  siRNA target sequence for Pkhd1l1 (NM_138674.2,4838-4856).
ctattatatgtcatattga

SEQ ID NO: 628738 - DNA, 19 bp, Mus musculus
  siRNA target sequence for Pkhd1l1 (NM_138674.2,4857-4875).
cccacaaaactcaatgaat

SEQ ID NO: 628739 - DNA, 19 bp, Mus musculus
  siRNA target sequence for Pkhd1l1 (NM_138674.2,4951-4969).
gacaggcggtttgtacttt

SEQ ID NO: 628740 - DNA, 19 bp, Mus musculus
  siRNA target sequence for Pkhd1l1 (NM_138674.2,5015-5033).
gaatgacaagggtaaccat

SEQ ID NO: 628741 - DNA, 19 bp, Mus musculus
  siRNA target sequence for Pkhd1l1 (NM_138674.2,5082-5100).
gggtgatttcccatgtaaa

SEQ ID NO: 628742 - DNA, 19 bp, Mus musculus
  siRNA target sequence for Pkhd1l1 (NM_138674.2,5118-5136).
cacagctattgaatgtgaa

SEQ ID NO: 628743 - DNA, 19 bp, Mus musculus
  siRNA target sequence for Pkhd1l1 (NM_138674.2,5151-5169).
ccaacagcttgttcttgta

SEQ ID NO: 628744 - DNA, 19 bp, Mus musculus
  siRNA target sequence for Pkhd1l1 (NM_138674.2,5157-5175).
gcttgttcttgtagacatt

SEQ ID NO: 628745 - DNA, 19 bp, Mus musculus
  siRNA target sequence for Pkhd1l1 (NM_138674.2,5268-5286).
ctcaatccaaggatatgga

SEQ ID NO: 628746 - DNA, 19 bp, Mus musculus
  siRNA target sequence for Pkhd1l1 (NM_138674.2,5315-5333).
ggacagtgttggaagagat

SEQ ID NO: 628747 - DNA, 19 bp, Mus musculus
  siRNA target sequence for Pkhd1l1 (NM_138674.2,5397-5415).
cctcatgactccactagaa

SEQ ID NO: 628748 - DNA, 19 bp, Mus musculus
  siRNA target sequence for Pkhd1l1 (NM_138674.2,5410-5428).
ctagaagctggacttcatt

SEQ ID NO: 628749 - DNA, 19 bp, Mus musculus
  siRNA target sequence for Pkhd1l1 (NM_138674.2,5454-5472).
gggcttggctctaggaaat

SEQ ID NO: 628750 - DNA, 19 bp, Mus musculus
  siRNA target sequence for Pkhd1l1 (NM_138674.2,5462-5480).
ctctaggaaatctaaccat

SEQ ID NO: 628751 - DNA, 19 bp, Mus musculus
  siRNA target sequence for Pkhd1l1 (NM_138674.2,5527-5545).
gctggtggaacgactttga

SEQ ID NO: 628752 - DNA, 19 bp, Mus musculus
  siRNA target sequence for Pkhd1l1 (NM_138674.2,5528-5546).
ctggtggaacgactttgat

SEQ ID NO: 628753 - DNA, 19 bp, Mus musculus
  siRNA target sequence for Pkhd1l1 (NM_138674.2,5531-5549).
gtggaacgactttgatgat

SEQ ID NO: 628754 - DNA, 19 bp, Mus musculus
  siRNA target sequence for Pkhd1l1 (NM_138674.2,5533-5551).
ggaacgactttgatgataa

SEQ ID NO: 628755 - DNA, 19 bp, Mus musculus
  siRNA target sequence for Pkhd1l1 (NM_138674.2,5547-5565).
gataacaggcaatggattt

SEQ ID NO: 628756 - DNA, 19 bp, Mus musculus
  siRNA target sequence for Pkhd1l1 (NM_138674.2,5593-5611).
ggggatcagccttgtcaaa

SEQ ID NO: 628757 - DNA, 19 bp, Mus musculus
  siRNA target sequence for Pkhd1l1 (NM_138674.2,5595-5613).
ggatcagccttgtcaaatt

SEQ ID NO: 628758 - DNA, 19 bp, Mus musculus
  siRNA target sequence for Pkhd1l1 (NM_138674.2,5596-5614).
gatcagccttgtcaaatta

SEQ ID NO: 628759 - DNA, 19 bp, Mus musculus
  siRNA target sequence for Pkhd1l1 (NM_138674.2,5599-5617).
cagccttgtcaaattacgt

SEQ ID NO: 628760 - DNA, 19 bp, Mus musculus
  siRNA target sequence for Pkhd1l1 (NM_138674.2,5672-5690).
ccaatctgaagattagtgt

SEQ ID NO: 628761 - DNA, 19 bp, Mus musculus
  siRNA target sequence for Pkhd1l1 (NM_138674.2,5703-5721).
ctacccacctttgtcattt

SEQ ID NO: 628762 - DNA, 19 bp, Mus musculus
  siRNA target sequence for Pkhd1l1 (NM_138674.2,5706-5724).
cccacctttgtcatttaca

SEQ ID NO: 628763 - DNA, 19 bp, Mus musculus
  siRNA target sequence for Pkhd1l1 (NM_138674.2,5707-5725).
ccacctttgtcatttacat

SEQ ID NO: 628764 - DNA, 19 bp, Mus musculus
  siRNA target sequence for Pkhd1l1 (NM_138674.2,5807-5825).
ctaatcttggatttgctat

SEQ ID NO: 628765 - DNA, 19 bp, Mus musculus
  siRNA target sequence for Pkhd1l1 (NM_138674.2,5822-5840).
ctatctccgatgtttcagt

SEQ ID NO: 628766 - DNA, 19 bp, Mus musculus
  siRNA target sequence for Pkhd1l1 (NM_138674.2,5829-5847).
cgatgtttcagtgatgata

SEQ ID NO: 628767 - DNA, 19 bp, Mus musculus
  siRNA target sequence for Pkhd1l1 (NM_138674.2,5844-5862).
gataaaagagagtgtatgt

SEQ ID NO: 628768 - DNA, 19 bp, Mus musculus
  siRNA target sequence for Pkhd1l1 (NM_138674.2,5934-5952).
gacgatgcttcataagaca

SEQ ID NO: 628769 - DNA, 19 bp, Mus musculus
  siRNA target sequence for Pkhd1l1 (NM_138674.2,5936-5954).
cgatgcttcataagacaaa

SEQ ID NO: 628770 - DNA, 19 bp, Mus musculus
  siRNA target sequence for Pkhd1l1 (NM_138674.2,5969-5987).
cctctgttgcatttgagta

SEQ ID NO: 628771 - DNA, 19 bp, Mus musculus
  siRNA target sequence for Pkhd1l1 (NM_138674.2,6074-6092).
catggaattcaaccatatt

SEQ ID NO: 628772 - DNA, 19 bp, Mus musculus
  siRNA target sequence for Pkhd1l1 (NM_138674.2,6087-6105).
catattggtctgtaactct

SEQ ID NO: 628773 - DNA, 19 bp, Mus musculus
  siRNA target sequence for Pkhd1l1 (NM_138674.2,6112-6130).
gcagttgacaaactaagat

SEQ ID NO: 628774 - DNA, 19 bp, Mus musculus
  siRNA target sequence for Pkhd1l1 (NM_138674.2,6115-6133).
gttgacaaactaagatcta

SEQ ID NO: 628775 - DNA, 19 bp, Mus musculus
  siRNA target sequence for Pkhd1l1 (NM_138674.2,6118-6136).
gacaaactaagatctaact

SEQ ID NO: 628776 - DNA, 19 bp, Mus musculus
  siRNA target sequence for Pkhd1l1 (NM_138674.2,6124-6142).
ctaagatctaactctacaa

SEQ ID NO: 628777 - DNA, 19 bp, Mus musculus
  siRNA target sequence for Pkhd1l1 (NM_138674.2,6152-6170).
gtgtgattcctcctaacaa

SEQ ID NO: 628778 - DNA, 19 bp, Mus musculus
  siRNA target sequence for Pkhd1l1 (NM_138674.2,6173-6191).
gcaagggacatgatcaagt

SEQ ID NO: 628779 - DNA, 19 bp, Mus musculus
  siRNA target sequence for Pkhd1l1 (NM_138674.2,6227-6245).
ctcattccacgaagctatt

SEQ ID NO: 628780 - DNA, 19 bp, Mus musculus
  siRNA target sequence for Pkhd1l1 (NM_138674.2,6229-6247).
cattccacgaagctattta

SEQ ID NO: 628781 - DNA, 19 bp, Mus musculus
  siRNA target sequence for Pkhd1l1 (NM_138674.2,6233-6251).
ccacgaagctatttacata

SEQ ID NO: 628782 - DNA, 19 bp, Mus musculus
  siRNA target sequence for Pkhd1l1 (NM_138674.2,6270-6288).
cctcatcactgaaatatct

SEQ ID NO: 628783 - DNA, 19 bp, Mus musculus
  siRNA target sequence for Pkhd1l1 (NM_138674.2,6311-6329).
ggggcaccaggcttacagt

SEQ ID NO: 628784 - DNA, 19 bp, Mus musculus
  siRNA target sequence for Pkhd1l1 (NM_138674.2,6375-6393).
cgtaggcaacagcaaatgt

SEQ ID NO: 628785 - DNA, 19 bp, Mus musculus
  siRNA target sequence for Pkhd1l1 (NM_138674.2,6387-6405).
caaatgtgatatccaatat

SEQ ID NO: 628786 - DNA, 19 bp, Mus musculus
  siRNA target sequence for Pkhd1l1 (NM_138674.2,6407-6425).
ccaacaagacacatatcgt

SEQ ID NO: 628787 - DNA, 19 bp, Mus musculus
  siRNA target sequence for Pkhd1l1 (NM_138674.2,6423-6441).
cgtctgcatgacaagtgtt

SEQ ID NO: 628788 - DNA, 19 bp, Mus musculus
  siRNA target sequence for Pkhd1l1 (NM_138674.2,6426-6444).
ctgcatgacaagtgttcat

SEQ ID NO: 628789 - DNA, 19 bp, Mus musculus
  siRNA target sequence for Pkhd1l1 (NM_138674.2,6428-6446).
gcatgacaagtgttcatgt

SEQ ID NO: 628790 - DNA, 19 bp, Mus musculus
  siRNA target sequence for Pkhd1l1 (NM_138674.2,6429-6447).
catgacaagtgttcatgtt

SEQ ID NO: 628791 - DNA, 19 bp, Mus musculus
  siRNA target sequence for Pkhd1l1 (NM_138674.2,6455-6473).
gatgggttccagttcatgt

SEQ ID NO: 628792 - DNA, 19 bp, Mus musculus
  siRNA target sequence for Pkhd1l1 (NM_138674.2,6464-6482).
cagttcatgtcaacatcaa

SEQ ID NO: 628793 - DNA, 19 bp, Mus musculus
  siRNA target sequence for Pkhd1l1 (NM_138674.2,6505-6523).
gagaatgctgacttcttat

SEQ ID NO: 628794 - DNA, 19 bp, Mus musculus
  siRNA target sequence for Pkhd1l1 (NM_138674.2,6580-6598).
ggatcacttgccgttatta

SEQ ID NO: 628795 - DNA, 19 bp, Mus musculus
  siRNA target sequence for Pkhd1l1 (NM_138674.2,6599-6617).
caaaagggcagataattct

SEQ ID NO: 628796 - DNA, 19 bp, Mus musculus
  siRNA target sequence for Pkhd1l1 (NM_138674.2,6621-6639).
ggaccaaagtactcctatt

SEQ ID NO: 628797 - DNA, 19 bp, Mus musculus
  siRNA target sequence for Pkhd1l1 (NM_138674.2,6625-6643).
caaagtactcctattctta

SEQ ID NO: 628798 - DNA, 19 bp, Mus musculus
  siRNA target sequence for Pkhd1l1 (NM_138674.2,6662-6680).
gtgggactctgatatttga

SEQ ID NO: 628799 - DNA, 19 bp, Mus musculus
  siRNA target sequence for Pkhd1l1 (NM_138674.2,6665-6683).
ggactctgatatttgatga

SEQ ID NO: 628800 - DNA, 19 bp, Mus musculus
  siRNA target sequence for Pkhd1l1 (NM_138674.2,6666-6684).
gactctgatatttgatgaa

SEQ ID NO: 628801 - DNA, 19 bp, Mus musculus
  siRNA target sequence for Pkhd1l1 (NM_138674.2,6703-6721).
gcagaaaatatcctaatca

SEQ ID NO: 628802 - DNA, 19 bp, Mus musculus
  siRNA target sequence for Pkhd1l1 (NM_138674.2,6766-6784).
caacaccgggctgtcatta

SEQ ID NO: 628803 - DNA, 19 bp, Mus musculus
  siRNA target sequence for Pkhd1l1 (NM_138674.2,6771-6789).
ccgggctgtcattactctt

SEQ ID NO: 628804 - DNA, 19 bp, Mus musculus
  siRNA target sequence for Pkhd1l1 (NM_138674.2,6774-6792).
ggctgtcattactcttcat

SEQ ID NO: 628805 - DNA, 19 bp, Mus musculus
  siRNA target sequence for Pkhd1l1 (NM_138674.2,6903-6921).
gacccatacggcaaatgca

SEQ ID NO: 628806 - DNA, 19 bp, Mus musculus
  siRNA target sequence for Pkhd1l1 (NM_138674.2,6929-6947).
ggactttaactgtacaaga

SEQ ID NO: 628807 - DNA, 19 bp, Mus musculus
  siRNA target sequence for Pkhd1l1 (NM_138674.2,7040-7058).
cggtgtccgctgatggaat

SEQ ID NO: 628808 - DNA, 19 bp, Mus musculus
  siRNA target sequence for Pkhd1l1 (NM_138674.2,7054-7072).
ggaatgcacataaccttaa

SEQ ID NO: 628809 - DNA, 19 bp, Mus musculus
  siRNA target sequence for Pkhd1l1 (NM_138674.2,7140-7158).
cagggcagaagttggaatt

SEQ ID NO: 628810 - DNA, 19 bp, Mus musculus
  siRNA target sequence for Pkhd1l1 (NM_138674.2,7142-7160).
gggcagaagttggaattct

SEQ ID NO: 628811 - DNA, 19 bp, Mus musculus
  siRNA target sequence for Pkhd1l1 (NM_138674.2,7144-7162).
gcagaagttggaattctta

SEQ ID NO: 628812 - DNA, 19 bp, Mus musculus
  siRNA target sequence for Pkhd1l1 (NM_138674.2,7217-7235).
catcatgtcccgatggatt

SEQ ID NO: 628813 - DNA, 19 bp, Mus musculus
  siRNA target sequence for Pkhd1l1 (NM_138674.2,7220-7238).
catgtcccgatggatttga

SEQ ID NO: 628814 - DNA, 19 bp, Mus musculus
  siRNA target sequence for Pkhd1l1 (NM_138674.2,7262-7280).
catgccttcaaggaaagtt

SEQ ID NO: 628815 - DNA, 19 bp, Mus musculus
  siRNA target sequence for Pkhd1l1 (NM_138674.2,7303-7321).
cagtttggaggctgtatta

SEQ ID NO: 628816 - DNA, 19 bp, Mus musculus
  siRNA target sequence for Pkhd1l1 (NM_138674.2,7410-7428).
gggacgatacccaatacat

SEQ ID NO: 628817 - DNA, 19 bp, Mus musculus
  siRNA target sequence for Pkhd1l1 (NM_138674.2,7411-7429).
ggacgatacccaatacatt

SEQ ID NO: 628818 - DNA, 19 bp, Mus musculus
  siRNA target sequence for Pkhd1l1 (NM_138674.2,7435-7453).
ctgcttggagatttacagt

SEQ ID NO: 628819 - DNA, 19 bp, Mus musculus
  siRNA target sequence for Pkhd1l1 (NM_138674.2,7467-7485).
gaaaggctgtgcaattcat

SEQ ID NO: 628820 - DNA, 19 bp, Mus musculus
  siRNA target sequence for Pkhd1l1 (NM_138674.2,7477-7495).
gcaattcatcaatcataca

SEQ ID NO: 628821 - DNA, 19 bp, Mus musculus
  siRNA target sequence for Pkhd1l1 (NM_138674.2,7478-7496).
caattcatcaatcatacaa

SEQ ID NO: 628822 - DNA, 19 bp, Mus musculus
  siRNA target sequence for Pkhd1l1 (NM_138674.2,7501-7519).
gctattacaatccacaata

SEQ ID NO: 628823 - DNA, 19 bp, Mus musculus
  siRNA target sequence for Pkhd1l1 (NM_138674.2,7600-7618).
ggcaacattctgcaatata

SEQ ID NO: 628824 - DNA, 19 bp, Mus musculus
  siRNA target sequence for Pkhd1l1 (NM_138674.2,7601-7619).
gcaacattctgcaatataa

SEQ ID NO: 628825 - DNA, 19 bp, Mus musculus
  siRNA target sequence for Pkhd1l1 (NM_138674.2,7602-7620).
caacattctgcaatataat

SEQ ID NO: 628826 - DNA, 19 bp, Mus musculus
  siRNA target sequence for Pkhd1l1 (NM_138674.2,7676-7694).
ctgcattctgggtaaccaa

SEQ ID NO: 628827 - DNA, 19 bp, Mus musculus
  siRNA target sequence for Pkhd1l1 (NM_138674.2,7685-7703).
gggtaaccaatcctaacaa

SEQ ID NO: 628828 - DNA, 19 bp, Mus musculus
  siRNA target sequence for Pkhd1l1 (NM_138674.2,7687-7705).
gtaaccaatcctaacaaca

SEQ ID NO: 628829 - DNA, 19 bp, Mus musculus
  siRNA target sequence for Pkhd1l1 (NM_138674.2,7701-7719).
caacaccattcgacacaat

SEQ ID NO: 628830 - DNA, 19 bp, Mus musculus
  siRNA target sequence for Pkhd1l1 (NM_138674.2,7781-7799).
catcttttgaccgaaacat

SEQ ID NO: 628831 - DNA, 19 bp, Mus musculus
  siRNA target sequence for Pkhd1l1 (NM_138674.2,7797-7815).
catttgccaaaaacgaatt

SEQ ID NO: 628832 - DNA, 19 bp, Mus musculus
  siRNA target sequence for Pkhd1l1 (NM_138674.2,7811-7829).
gaattccgcttggagaatt

SEQ ID NO: 628833 - DNA, 19 bp, Mus musculus
  siRNA target sequence for Pkhd1l1 (NM_138674.2,7816-7834).
ccgcttggagaattcttta

SEQ ID NO: 628834 - DNA, 19 bp, Mus musculus
  siRNA target sequence for Pkhd1l1 (NM_138674.2,7817-7835).
cgcttggagaattctttaa

SEQ ID NO: 628835 - DNA, 19 bp, Mus musculus
  siRNA target sequence for Pkhd1l1 (NM_138674.2,7830-7848).
ctttaacaatactgttcat

SEQ ID NO: 628836 - DNA, 19 bp, Mus musculus
  siRNA target sequence for Pkhd1l1 (NM_138674.2,7859-7877).
ggtttggactgtggatttt

SEQ ID NO: 628837 - DNA, 19 bp, Mus musculus
  siRNA target sequence for Pkhd1l1 (NM_138674.2,7882-7900).
gagtatttccccatgcaaa

SEQ ID NO: 628838 - DNA, 19 bp, Mus musculus
  siRNA target sequence for Pkhd1l1 (NM_138674.2,7927-7945).
gtgcctgccatctttaact

SEQ ID NO: 628839 - DNA, 19 bp, Mus musculus
  siRNA target sequence for Pkhd1l1 (NM_138674.2,7952-7970).
ctgtgtggaactgtcaaaa

SEQ ID NO: 628840 - DNA, 19 bp, Mus musculus
  siRNA target sequence for Pkhd1l1 (NM_138674.2,7998-8016).
cctgcagttccacaacttt

SEQ ID NO: 628841 - DNA, 19 bp, Mus musculus
  siRNA target sequence for Pkhd1l1 (NM_138674.2,8058-8076).
gatcctggctccctatgtt

SEQ ID NO: 628842 - DNA, 19 bp, Mus musculus
  siRNA target sequence for Pkhd1l1 (NM_138674.2,8118-8136).
caaaatcgttggtcatctt

SEQ ID NO: 628843 - DNA, 19 bp, Mus musculus
  siRNA target sequence for Pkhd1l1 (NM_138674.2,8146-8164).
ggaatgggacccacatttt

SEQ ID NO: 628844 - DNA, 19 bp, Mus musculus
  siRNA target sequence for Pkhd1l1 (NM_138674.2,8155-8173).
cccacattttgcacttcaa

SEQ ID NO: 628845 - DNA, 19 bp, Mus musculus
  siRNA target sequence for Pkhd1l1 (NM_138674.2,8253-8271).
ggctttaggagtaacatca

SEQ ID NO: 628846 - DNA, 19 bp, Mus musculus
  siRNA target sequence for Pkhd1l1 (NM_138674.2,8270-8288).
caatcactggggtgtgtaa

SEQ ID NO: 628847 - DNA, 19 bp, Mus musculus
  siRNA target sequence for Pkhd1l1 (NM_138674.2,8304-8322).
ctggagtgctaagtttgtt

SEQ ID NO: 628848 - DNA, 19 bp, Mus musculus
  siRNA target sequence for Pkhd1l1 (NM_138674.2,8389-8407).
gacgttgacggctcactaa

SEQ ID NO: 628849 - DNA, 19 bp, Mus musculus
  siRNA target sequence for Pkhd1l1 (NM_138674.2,8391-8409).
cgttgacggctcactaaca

SEQ ID NO: 628850 - DNA, 19 bp, Mus musculus
  siRNA target sequence for Pkhd1l1 (NM_138674.2,8530-8548).
caccggctagcattcaaca

SEQ ID NO: 628851 - DNA, 19 bp, Mus musculus
  siRNA target sequence for Pkhd1l1 (NM_138674.2,8550-8568).
gccttccccagtatcttta

SEQ ID NO: 628852 - DNA, 19 bp, Mus musculus
  siRNA target sequence for Pkhd1l1 (NM_138674.2,8556-8574).
cccagtatctttacttgaa

SEQ ID NO: 628853 - DNA, 19 bp, Mus musculus
  siRNA target sequence for Pkhd1l1 (NM_138674.2,8609-8627).
gcattgttccctttcagaa

SEQ ID NO: 628854 - DNA, 19 bp, Mus musculus
  siRNA target sequence for Pkhd1l1 (NM_138674.2,8701-8719).
ggtgtggagcacttaacca

SEQ ID NO: 628855 - DNA, 19 bp, Mus musculus
  siRNA target sequence for Pkhd1l1 (NM_138674.2,8706-8724).
ggagcacttaaccaacata

SEQ ID NO: 628856 - DNA, 19 bp, Mus musculus
  siRNA target sequence for Pkhd1l1 (NM_138674.2,8707-8725).
gagcacttaaccaacatat

SEQ ID NO: 628857 - DNA, 19 bp, Mus musculus
  siRNA target sequence for Pkhd1l1 (NM_138674.2,8709-8727).
gcacttaaccaacatatca

SEQ ID NO: 628858 - DNA, 19 bp, Mus musculus
  siRNA target sequence for Pkhd1l1 (NM_138674.2,8710-8728).
cacttaaccaacatatcat

SEQ ID NO: 628859 - DNA, 19 bp, Mus musculus
  siRNA target sequence for Pkhd1l1 (NM_138674.2,8732-8750).
cttccacattctatggatt

SEQ ID NO: 628860 - DNA, 19 bp, Mus musculus
  siRNA target sequence for Pkhd1l1 (NM_138674.2,8738-8756).
cattctatggatttaagga

SEQ ID NO: 628861 - DNA, 19 bp, Mus musculus
  siRNA target sequence for Pkhd1l1 (NM_138674.2,8798-8816).
ctgatatgtttaatgttgt

SEQ ID NO: 628862 - DNA, 19 bp, Mus musculus
  siRNA target sequence for Pkhd1l1 (NM_138674.2,8831-8849).
gctccgcaaacccattgaa

SEQ ID NO: 628863 - DNA, 19 bp, Mus musculus
  siRNA target sequence for Pkhd1l1 (NM_138674.2,8832-8850).
ctccgcaaacccattgaat

SEQ ID NO: 628864 - DNA, 19 bp, Mus musculus
  siRNA target sequence for Pkhd1l1 (NM_138674.2,8842-8860).
ccattgaattggaattcta

SEQ ID NO: 628865 - DNA, 19 bp, Mus musculus
  siRNA target sequence for Pkhd1l1 (NM_138674.2,8894-8912).
ccagtactctctattattt

SEQ ID NO: 628866 - DNA, 19 bp, Mus musculus
  siRNA target sequence for Pkhd1l1 (NM_138674.2,8897-8915).
gtactctctattatttggt

SEQ ID NO: 628867 - DNA, 19 bp, Mus musculus
  siRNA target sequence for Pkhd1l1 (NM_138674.2,8971-8989).
ggtgtgaaggatgtgatta

SEQ ID NO: 628868 - DNA, 19 bp, Mus musculus
  siRNA target sequence for Pkhd1l1 (NM_138674.2,8976-8994).
gaaggatgtgattattaat

SEQ ID NO: 628869 - DNA, 19 bp, Mus musculus
  siRNA target sequence for Pkhd1l1 (NM_138674.2,9076-9094).
gccgcttacaatttatggt

SEQ ID NO: 628870 - DNA, 19 bp, Mus musculus
  siRNA target sequence for Pkhd1l1 (NM_138674.2,9116-9134).
catccccagagaacaatta

SEQ ID NO: 628871 - DNA, 19 bp, Mus musculus
  siRNA target sequence for Pkhd1l1 (NM_138674.2,9122-9140).
cagagaacaattatactgt

SEQ ID NO: 628872 - DNA, 19 bp, Mus musculus
  siRNA target sequence for Pkhd1l1 (NM_138674.2,9143-9161).
ctcgcccaggagcaaatgt

SEQ ID NO: 628873 - DNA, 19 bp, Mus musculus
  siRNA target sequence for Pkhd1l1 (NM_138674.2,9208-9226).
ccagtggaaagactcatta

SEQ ID NO: 628874 - DNA, 19 bp, Mus musculus
  siRNA target sequence for Pkhd1l1 (NM_138674.2,9209-9227).
cagtggaaagactcattat

SEQ ID NO: 628875 - DNA, 19 bp, Mus musculus
  siRNA target sequence for Pkhd1l1 (NM_138674.2,9238-9256).
ctagaaatggaagataaat

SEQ ID NO: 628876 - DNA, 19 bp, Mus musculus
  siRNA target sequence for Pkhd1l1 (NM_138674.2,9268-9286).
gtagcaggccccacctata

SEQ ID NO: 628877 - DNA, 19 bp, Mus musculus
  siRNA target sequence for Pkhd1l1 (NM_138674.2,9276-9294).
ccccacctatagaagagtt

SEQ ID NO: 628878 - DNA, 19 bp, Mus musculus
  siRNA target sequence for Pkhd1l1 (NM_138674.2,9279-9297).
cacctatagaagagttgtt

SEQ ID NO: 628879 - DNA, 19 bp, Mus musculus
  siRNA target sequence for Pkhd1l1 (NM_138674.2,9281-9299).
cctatagaagagttgtttt

SEQ ID NO: 628880 - DNA, 19 bp, Mus musculus
  siRNA target sequence for Pkhd1l1 (NM_138674.2,9347-9365).
gggaagataacccctttaa

SEQ ID NO: 628881 - DNA, 19 bp, Mus musculus
  siRNA target sequence for Pkhd1l1 (NM_138674.2,9477-9495).
gcatggacttccacattca

SEQ ID NO: 628882 - DNA, 19 bp, Mus musculus
  siRNA target sequence for Pkhd1l1 (NM_138674.2,9482-9500).
gacttccacattcagttta

SEQ ID NO: 628883 - DNA, 19 bp, Mus musculus
  siRNA target sequence for Pkhd1l1 (NM_138674.2,9529-9547).
gcaggctccaaaatcttat

SEQ ID NO: 628884 - DNA, 19 bp, Mus musculus
  siRNA target sequence for Pkhd1l1 (NM_138674.2,9574-9592).
gagggagaagatgttgtaa

SEQ ID NO: 628885 - DNA, 19 bp, Mus musculus
  siRNA target sequence for Pkhd1l1 (NM_138674.2,9576-9594).
gggagaagatgttgtaata

SEQ ID NO: 628886 - DNA, 19 bp, Mus musculus
  siRNA target sequence for Pkhd1l1 (NM_138674.2,9596-9614).
ctaccacaagctatgattt

SEQ ID NO: 628887 - DNA, 19 bp, Mus musculus
  siRNA target sequence for Pkhd1l1 (NM_138674.2,9616-9634).
caccagacggagatcagaa

SEQ ID NO: 628888 - DNA, 19 bp, Mus musculus
  siRNA target sequence for Pkhd1l1 (NM_138674.2,9621-9639).
gacggagatcagaaggatt

SEQ ID NO: 628889 - DNA, 19 bp, Mus musculus
  siRNA target sequence for Pkhd1l1 (NM_138674.2,9625-9643).
gagatcagaaggattgcta

SEQ ID NO: 628890 - DNA, 19 bp, Mus musculus
  siRNA target sequence for Pkhd1l1 (NM_138674.2,9693-9711).
cactcaccttgctgaaaga

SEQ ID NO: 628891 - DNA, 19 bp, Mus musculus
  siRNA target sequence for Pkhd1l1 (NM_138674.2,9741-9759).
cacattatcagctgatgtt

SEQ ID NO: 628892 - DNA, 19 bp, Mus musculus
  siRNA target sequence for Pkhd1l1 (NM_138674.2,9768-9786).
gagtaggaacatcaaaata

SEQ ID NO: 628893 - DNA, 19 bp, Mus musculus
  siRNA target sequence for Pkhd1l1 (NM_138674.2,9793-9811).
gacgattactcggttttgt

SEQ ID NO: 628894 - DNA, 19 bp, Mus musculus
  siRNA target sequence for Pkhd1l1 (NM_138674.2,9856-9874).
ggaaacatgatgacattta

SEQ ID NO: 628895 - DNA, 19 bp, Mus musculus
  siRNA target sequence for Pkhd1l1 (NM_138674.2,9975-9993).
gggacagattcaagatcat

SEQ ID NO: 628896 - DNA, 19 bp, Mus musculus
  siRNA target sequence for Pkhd1l1 (NM_138674.2,9985-10003).
caagatcatggcttgtctt

SEQ ID NO: 628897 - DNA, 19 bp, Mus musculus
  siRNA target sequence for Pkhd1l1 (NM_138674.2,10013-10031).
gctgtgcatttcatcatgt

SEQ ID NO: 628898 - DNA, 19 bp, Mus musculus
  siRNA target sequence for Pkhd1l1 (NM_138674.2,10016-10034).
gtgcatttcatcatgtgtt

SEQ ID NO: 628899 - DNA, 19 bp, Mus musculus
  siRNA target sequence for Pkhd1l1 (NM_138674.2,10032-10050).
gttctccccagcaattggt

SEQ ID NO: 628900 - DNA, 19 bp, Mus musculus
  siRNA target sequence for Pkhd1l1 (NM_138674.2,10038-10056).
cccagcaattggtgtgttt

SEQ ID NO: 628901 - DNA, 19 bp, Mus musculus
  siRNA target sequence for Pkhd1l1 (NM_138674.2,10067-10085).
gggtggacatagatgacaa

SEQ ID NO: 628902 - DNA, 19 bp, Mus musculus
  siRNA target sequence for Pkhd1l1 (NM_138674.2,10139-10157).
gagtacgtggaaatttggt

SEQ ID NO: 628903 - DNA, 19 bp, Mus musculus
  siRNA target sequence for Pkhd1l1 (NM_138674.2,10177-10195).
ggaacctaccagaacagaa

SEQ ID NO: 628904 - DNA, 19 bp, Mus musculus
  siRNA target sequence for Pkhd1l1 (NM_138674.2,10198-10216).
gacttgagttcgacacttt

SEQ ID NO: 628905 - DNA, 19 bp, Mus musculus
  siRNA target sequence for Pkhd1l1 (NM_138674.2,10217-10235).
ggcatgcagcaattgagat

SEQ ID NO: 628906 - DNA, 19 bp, Mus musculus
  siRNA target sequence for Pkhd1l1 (NM_138674.2,10218-10236).
gcatgcagcaattgagata

SEQ ID NO: 628907 - DNA, 19 bp, Mus musculus
  siRNA target sequence for Pkhd1l1 (NM_138674.2,10219-10237).
catgcagcaattgagataa

SEQ ID NO: 628908 - DNA, 19 bp, Mus musculus
  siRNA target sequence for Pkhd1l1 (NM_138674.2,10222-10240).
gcagcaattgagataaaca

SEQ ID NO: 628909 - DNA, 19 bp, Mus musculus
  siRNA target sequence for Pkhd1l1 (NM_138674.2,10244-10262).
ggaccaatacagtcttaca

SEQ ID NO: 628910 - DNA, 19 bp, Mus musculus
  siRNA target sequence for Pkhd1l1 (NM_138674.2,10275-10293).
cgctggatttggaagagta

SEQ ID NO: 628911 - DNA, 19 bp, Mus musculus
  siRNA target sequence for Pkhd1l1 (NM_138674.2,10322-10340).
caagccaggctaattccat

SEQ ID NO: 628912 - DNA, 19 bp, Mus musculus
  siRNA target sequence for Pkhd1l1 (NM_138674.2,10327-10345).
caggctaattccatggaaa

SEQ ID NO: 628913 - DNA, 19 bp, Mus musculus
  siRNA target sequence for Pkhd1l1 (NM_138674.2,10337-10355).
ccatggaaaactggtttaa

SEQ ID NO: 628914 - DNA, 19 bp, Mus musculus
  siRNA target sequence for Pkhd1l1 (NM_138674.2,10372-10390).
ggtttgtatggcatctaca

SEQ ID NO: 628915 - DNA, 19 bp, Mus musculus
  siRNA target sequence for Pkhd1l1 (NM_138674.2,10373-10391).
gtttgtatggcatctacat

SEQ ID NO: 628916 - DNA, 19 bp, Mus musculus
  siRNA target sequence for Pkhd1l1 (NM_138674.2,10420-10438).
cttattcaaggatttacta

SEQ ID NO: 628917 - DNA, 19 bp, Mus musculus
  siRNA target sequence for Pkhd1l1 (NM_138674.2,10448-10466).
gctgggactatggaattta

SEQ ID NO: 628918 - DNA, 19 bp, Mus musculus
  siRNA target sequence for Pkhd1l1 (NM_138674.2,10475-10493).
ccacggagagcgtgcatat

SEQ ID NO: 628919 - DNA, 19 bp, Mus musculus
  siRNA target sequence for Pkhd1l1 (NM_138674.2,10484-10502).
gcgtgcatatctataacgt

SEQ ID NO: 628920 - DNA, 19 bp, Mus musculus
  siRNA target sequence for Pkhd1l1 (NM_138674.2,10520-10538).
ggatgagcatcttttcaat

SEQ ID NO: 628921 - DNA, 19 bp, Mus musculus
  siRNA target sequence for Pkhd1l1 (NM_138674.2,10553-10571).
cttctgtgtcccacaaaat

SEQ ID NO: 628922 - DNA, 19 bp, Mus musculus
  siRNA target sequence for Pkhd1l1 (NM_138674.2,10558-10576).
gtgtcccacaaaatttcca

SEQ ID NO: 628923 - DNA, 19 bp, Mus musculus
  siRNA target sequence for Pkhd1l1 (NM_138674.2,10632-10650).
ctgttctgacgtcttaact

SEQ ID NO: 628924 - DNA, 19 bp, Mus musculus
  siRNA target sequence for Pkhd1l1 (NM_138674.2,10634-10652).
gttctgacgtcttaactaa

SEQ ID NO: 628925 - DNA, 19 bp, Mus musculus
  siRNA target sequence for Pkhd1l1 (NM_138674.2,10637-10655).
ctgacgtcttaactaatga

SEQ ID NO: 628926 - DNA, 19 bp, Mus musculus
  siRNA target sequence for Pkhd1l1 (NM_138674.2,10639-10657).
gacgtcttaactaatgaca

SEQ ID NO: 628927 - DNA, 19 bp, Mus musculus
  siRNA target sequence for Pkhd1l1 (NM_138674.2,10677-10695).
ctctgcacatcgaagttct

SEQ ID NO: 628928 - DNA, 19 bp, Mus musculus
  siRNA target sequence for Pkhd1l1 (NM_138674.2,10736-10754).
catttgcttcagctcataa

SEQ ID NO: 628929 - DNA, 19 bp, Mus musculus
  siRNA target sequence for Pkhd1l1 (NM_138674.2,10771-10789).
cctcatgccgggatcatga

SEQ ID NO: 628930 - DNA, 19 bp, Mus musculus
  siRNA target sequence for Pkhd1l1 (NM_138674.2,10774-10792).
catgccgggatcatgagtt

SEQ ID NO: 628931 - DNA, 19 bp, Mus musculus
  siRNA target sequence for Pkhd1l1 (NM_138674.2,10777-10795).
gccgggatcatgagttaca

SEQ ID NO: 628932 - DNA, 19 bp, Mus musculus
  siRNA target sequence for Pkhd1l1 (NM_138674.2,10778-10796).
ccgggatcatgagttacaa

SEQ ID NO: 628933 - DNA, 19 bp, Mus musculus
  siRNA target sequence for Pkhd1l1 (NM_138674.2,10859-10877).
caggagaaactaatgtgat

SEQ ID NO: 628934 - DNA, 19 bp, Mus musculus
  siRNA target sequence for Pkhd1l1 (NM_138674.2,10864-10882).
gaaactaatgtgatattca

SEQ ID NO: 628935 - DNA, 19 bp, Mus musculus
  siRNA target sequence for Pkhd1l1 (NM_138674.2,10905-10923).
cttacagcatccaatccat

SEQ ID NO: 628936 - DNA, 19 bp, Mus musculus
  siRNA target sequence for Pkhd1l1 (NM_138674.2,10926-10944).
gaagaatgtccaactcatt

SEQ ID NO: 628937 - DNA, 19 bp, Mus musculus
  siRNA target sequence for Pkhd1l1 (NM_138674.2,10947-10965).
cactattgaacaatccaaa

SEQ ID NO: 628938 - DNA, 19 bp, Mus musculus
  siRNA target sequence for Pkhd1l1 (NM_138674.2,10954-10972).
gaacaatccaaagtattca

SEQ ID NO: 628939 - DNA, 19 bp, Mus musculus
  siRNA target sequence for Pkhd1l1 (NM_138674.2,10971-10989).
catacatagacctgatata

SEQ ID NO: 628940 - DNA, 19 bp, Mus musculus
  siRNA target sequence for Pkhd1l1 (NM_138674.2,10975-10993).
catagacctgatataagta

SEQ ID NO: 628941 - DNA, 19 bp, Mus musculus
  siRNA target sequence for Pkhd1l1 (NM_138674.2,10979-10997).
gacctgatataagtaaagt

SEQ ID NO: 628942 - DNA, 19 bp, Mus musculus
  siRNA target sequence for Pkhd1l1 (NM_138674.2,10981-10999).
cctgatataagtaaagtga

SEQ ID NO: 628943 - DNA, 19 bp, Mus musculus
  siRNA target sequence for Pkhd1l1 (NM_138674.2,10982-11000).
ctgatataagtaaagtgaa

SEQ ID NO: 628944 - DNA, 19 bp, Mus musculus
  siRNA target sequence for Pkhd1l1 (NM_138674.2,11023-11041).
gtttgtgatgccaagagaa

SEQ ID NO: 628945 - DNA, 19 bp, Mus musculus
  siRNA target sequence for Pkhd1l1 (NM_138674.2,11094-11112).
gatccctcaagctgagtat

SEQ ID NO: 628946 - DNA, 19 bp, Mus musculus
  siRNA target sequence for Pkhd1l1 (NM_138674.2,11137-11155).
ggaattggagactacagaa

SEQ ID NO: 628947 - DNA, 19 bp, Mus musculus
  siRNA target sequence for Pkhd1l1 (NM_138674.2,11159-11177).
caaaggcgatgctcacata

SEQ ID NO: 628948 - DNA, 19 bp, Mus musculus
  siRNA target sequence for Pkhd1l1 (NM_138674.2,11164-11182).
gcgatgctcacatacttga

SEQ ID NO: 628949 - DNA, 19 bp, Mus musculus
  siRNA target sequence for Pkhd1l1 (NM_138674.2,11165-11183).
cgatgctcacatacttgaa

SEQ ID NO: 628950 - DNA, 19 bp, Mus musculus
  siRNA target sequence for Pkhd1l1 (NM_138674.2,11170-11188).
ctcacatacttgaatggaa

SEQ ID NO: 628951 - DNA, 19 bp, Mus musculus
  siRNA target sequence for Pkhd1l1 (NM_138674.2,11189-11207).
gtagaattcctgtaactga

SEQ ID NO: 628952 - DNA, 19 bp, Mus musculus
  siRNA target sequence for Pkhd1l1 (NM_138674.2,11215-11233).
cctcataaagggattatta

SEQ ID NO: 628953 - DNA, 19 bp, Mus musculus
  siRNA target sequence for Pkhd1l1 (NM_138674.2,11236-11254).
gatgcaacctgtaaataca

SEQ ID NO: 628954 - DNA, 19 bp, Mus musculus
  siRNA target sequence for Pkhd1l1 (NM_138674.2,11282-11300).
ctggaatggaatatgcaat

SEQ ID NO: 628955 - DNA, 19 bp, Mus musculus
  siRNA target sequence for Pkhd1l1 (NM_138674.2,11285-11303).
gaatggaatatgcaatgat

SEQ ID NO: 628956 - DNA, 19 bp, Mus musculus
  siRNA target sequence for Pkhd1l1 (NM_138674.2,11357-11375).
ctatcatgagcaatggtta

SEQ ID NO: 628957 - DNA, 19 bp, Mus musculus
  siRNA target sequence for Pkhd1l1 (NM_138674.2,11361-11379).
catgagcaatggttatgtt

SEQ ID NO: 628958 - DNA, 19 bp, Mus musculus
  siRNA target sequence for Pkhd1l1 (NM_138674.2,11364-11382).
gagcaatggttatgttgat

SEQ ID NO: 628959 - DNA, 19 bp, Mus musculus
  siRNA target sequence for Pkhd1l1 (NM_138674.2,11366-11384).
gcaatggttatgttgatct

SEQ ID NO: 628960 - DNA, 19 bp, Mus musculus
  siRNA target sequence for Pkhd1l1 (NM_138674.2,11371-11389).
ggttatgttgatctcatta

SEQ ID NO: 628961 - DNA, 19 bp, Mus musculus
  siRNA target sequence for Pkhd1l1 (NM_138674.2,11409-11427).
ctggtgtgcggggtataca

SEQ ID NO: 628962 - DNA, 19 bp, Mus musculus
  siRNA target sequence for Pkhd1l1 (NM_138674.2,11419-11437).
gggtatacatgccaaagaa

SEQ ID NO: 628963 - DNA, 19 bp, Mus musculus
  siRNA target sequence for Pkhd1l1 (NM_138674.2,11456-11474).
gcatagtggctctgaacaa

SEQ ID NO: 628964 - DNA, 19 bp, Mus musculus
  siRNA target sequence for Pkhd1l1 (NM_138674.2,11457-11475).
catagtggctctgaacaaa

SEQ ID NO: 628965 - DNA, 19 bp, Mus musculus
  siRNA target sequence for Pkhd1l1 (NM_138674.2,11461-11479).
gtggctctgaacaaaaagt

SEQ ID NO: 628966 - DNA, 19 bp, Mus musculus
  siRNA target sequence for Pkhd1l1 (NM_138674.2,11496-11514).
cgggaccagtcctcagaat

SEQ ID NO: 628967 - DNA, 19 bp, Mus musculus
  siRNA target sequence for Pkhd1l1 (NM_138674.2,11515-11533).
cttcggctgatgttgctta

SEQ ID NO: 628968 - DNA, 19 bp, Mus musculus
  siRNA target sequence for Pkhd1l1 (NM_138674.2,11519-11537).
ggctgatgttgcttaatgt

SEQ ID NO: 628969 - DNA, 19 bp, Mus musculus
  siRNA target sequence for Pkhd1l1 (NM_138674.2,11523-11541).
gatgttgcttaatgttgaa

SEQ ID NO: 628970 - DNA, 19 bp, Mus musculus
  siRNA target sequence for Pkhd1l1 (NM_138674.2,11551-11569).
gcagttctagtaggaattt

SEQ ID NO: 628971 - DNA, 19 bp, Mus musculus
  siRNA target sequence for Pkhd1l1 (NM_138674.2,11552-11570).
cagttctagtaggaatttt

SEQ ID NO: 628972 - DNA, 19 bp, Mus musculus
  siRNA target sequence for Pkhd1l1 (NM_138674.2,11554-11572).
gttctagtaggaatttttt

SEQ ID NO: 628973 - DNA, 19 bp, Mus musculus
  siRNA target sequence for Pkhd1l1 (NM_138674.2,11593-11611).
gatgtctatgtgaacaatt

SEQ ID NO: 628974 - DNA, 19 bp, Mus musculus
  siRNA target sequence for Pkhd1l1 (NM_138674.2,11616-11634).
ggtctgtcccaaaaataca

SEQ ID NO: 628975 - DNA, 19 bp, Mus musculus
  siRNA target sequence for Pkhd1l1 (NM_138674.2,11636-11654).
catggaatgcccaaaagaa

SEQ ID NO: 628976 - DNA, 19 bp, Mus musculus
  siRNA target sequence for Pkhd1l1 (NM_138674.2,11714-11732).
ctgtccctggtgaaaacta

SEQ ID NO: 628977 - DNA, 19 bp, Mus musculus
  siRNA target sequence for Pkhd1l1 (NM_138674.2,11716-11734).
gtccctggtgaaaactact

SEQ ID NO: 628978 - DNA, 19 bp, Mus musculus
  siRNA target sequence for Pkhd1l1 (NM_138674.2,11823-11841).
ccacctgccggttatgaca

SEQ ID NO: 628979 - DNA, 19 bp, Mus musculus
  siRNA target sequence for Pkhd1l1 (NM_138674.2,11842-11860).
gcagatgagttttttagct

SEQ ID NO: 628980 - DNA, 19 bp, Mus musculus
  siRNA target sequence for Pkhd1l1 (NM_138674.2,11861-11879).
cacacaacctggttagaaa

SEQ ID NO: 628981 - DNA, 19 bp, Mus musculus
  siRNA target sequence for Pkhd1l1 (NM_138674.2,11916-11934).
ccgtgtcagcagaataata

SEQ ID NO: 628982 - DNA, 19 bp, Mus musculus
  siRNA target sequence for Pkhd1l1 (NM_138674.2,11955-11973).
gcgatccacaggacacata

SEQ ID NO: 628983 - DNA, 19 bp, Mus musculus
  siRNA target sequence for Pkhd1l1 (NM_138674.2,11995-12013).
gctcccactcagttcttga

SEQ ID NO: 628984 - DNA, 19 bp, Mus musculus
  siRNA target sequence for Pkhd1l1 (NM_138674.2,12042-12060).
gtctgagctccaggaaatt

SEQ ID NO: 628985 - DNA, 19 bp, Mus musculus
  siRNA target sequence for Pkhd1l1 (NM_138674.2,12082-12100).
gttgtcctaggaaaaatta

SEQ ID NO: 628986 - DNA, 19 bp, Mus musculus
  siRNA target sequence for Pkhd1l1 (NM_138674.2,12087-12105).
cctaggaaaaattagtact

SEQ ID NO: 628987 - DNA, 19 bp, Mus musculus
  siRNA target sequence for Pkhd1l1 (NM_138674.2,12088-12106).
ctaggaaaaattagtacta

SEQ ID NO: 628988 - DNA, 19 bp, Mus musculus
  siRNA target sequence for Pkhd1l1 (NM_138674.2,12104-12122).
ctattcttggattcaatat

SEQ ID NO: 628989 - DNA, 19 bp, Mus musculus
  siRNA target sequence for Pkhd1l1 (NM_138674.2,12147-12165).
catcccccaaccaactgat

SEQ ID NO: 628990 - DNA, 19 bp, Mus musculus
  siRNA target sequence for Pkhd1l1 (NM_138674.2,12161-12179).
ctgattctggctggattaa

SEQ ID NO: 628991 - DNA, 19 bp, Mus musculus
  siRNA target sequence for Pkhd1l1 (NM_138674.2,12183-12201).
gactgcccagccagttgaa

SEQ ID NO: 628992 - DNA, 19 bp, Mus musculus
  siRNA target sequence for Pkhd1l1 (NM_138674.2,12206-12224).
ctgcatttcccgttcacta

SEQ ID NO: 628993 - DNA, 19 bp, Mus musculus
  siRNA target sequence for Pkhd1l1 (NM_138674.2,12322-12340).
cctgagggtaactgtgtat

SEQ ID NO: 628994 - DNA, 19 bp, Mus musculus
  siRNA target sequence for Pkhd1l1 (NM_138674.2,12346-12364).
ggaattacatcgcttactt

SEQ ID NO: 628995 - DNA, 19 bp, Mus musculus
  siRNA target sequence for Pkhd1l1 (NM_138674.2,12347-12365).
gaattacatcgcttacttt

SEQ ID NO: 628996 - DNA, 19 bp, Mus musculus
  siRNA target sequence for Pkhd1l1 (NM_138674.2,12406-12424).
ggccttagtggaaatacaa

SEQ ID NO: 628997 - DNA, 19 bp, Mus musculus
  siRNA target sequence for Pkhd1l1 (NM_138674.2,12408-12426).
ccttagtggaaatacaaca

SEQ ID NO: 628998 - DNA, 19 bp, Mus musculus
  siRNA target sequence for Pkhd1l1 (NM_138674.2,12415-12433).
ggaaatacaacaattccat

SEQ ID NO: 628999 - DNA, 19 bp, Mus musculus
  siRNA target sequence for Pkhd1l1 (NM_138674.2,12438-12456).
cacctgttgggccaactat

SEQ ID NO: 629000 - DNA, 19 bp, Mus musculus
  siRNA target sequence for Pkhd1l1 (NM_138674.2,12441-12459).
ctgttgggccaactataca

SEQ ID NO: 629001 - DNA, 19 bp, Mus musculus
  siRNA target sequence for Pkhd1l1 (NM_138674.2,12443-12461).
gttgggccaactatacaga

SEQ ID NO: 629002 - DNA, 19 bp, Mus musculus
  siRNA target sequence for Pkhd1l1 (NM_138674.2,12645-12663).
ccagacactggctgtcata

SEQ ID NO: 629003 - DNA, 19 bp, Mus musculus
  siRNA target sequence for Pkhd1l1 (NM_138674.2,12646-12664).
cagacactggctgtcataa

SEQ ID NO: 629004 - DNA, 19 bp, Mus musculus
  siRNA target sequence for Pkhd1l1 (NM_138674.2,12669-12687).
gtgccttgtaggaagacta

SEQ ID NO: 629005 - DNA, 19 bp, Mus musculus
  siRNA target sequence for Ptgdr (NM_008962.2,374-392).
ctgcctacgcgcaaaacca

SEQ ID NO: 629006 - DNA, 19 bp, Mus musculus
  siRNA target sequence for Ptgdr (NM_008962.2,412-430).
cctgcctcaggcaatcagt

SEQ ID NO: 629007 - DNA, 19 bp, Mus musculus
  siRNA target sequence for Ptgdr (NM_008962.2,413-431).
ctgcctcaggcaatcagtt

SEQ ID NO: 629008 - DNA, 19 bp, Mus musculus
  siRNA target sequence for Ptgdr (NM_008962.2,415-433).
gcctcaggcaatcagttat

SEQ ID NO: 629009 - DNA, 19 bp, Mus musculus
  siRNA target sequence for Ptgdr (NM_008962.2,684-702).
ccacaaggagcgttcattt

SEQ ID NO: 629010 - DNA, 19 bp, Mus musculus
  siRNA target sequence for Ptgdr (NM_008962.2,693-711).
gcgttcattttcggtaata

SEQ ID NO: 629011 - DNA, 19 bp, Mus musculus
  siRNA target sequence for Ptgdr (NM_008962.2,782-800).
ccatgtacaacctctatga

SEQ ID NO: 629012 - DNA, 19 bp, Mus musculus
  siRNA target sequence for Ptgdr (NM_008962.2,934-952).
gtgctcttcaccatgtgtt

SEQ ID NO: 629013 - DNA, 19 bp, Mus musculus
  siRNA target sequence for Ptger1 (NM_013641.1,354-372).
caggctccccaatacatct

SEQ ID NO: 629014 - DNA, 19 bp, Mus musculus
  siRNA target sequence for Ptger1 (NM_013641.1,404-422).
caccagcgctgcctatctt

SEQ ID NO: 629015 - DNA, 19 bp, Mus musculus
  siRNA target sequence for Ptger1 (NM_013641.1,406-424).
ccagcgctgcctatcttct

SEQ ID NO: 629016 - DNA, 19 bp, Mus musculus
  siRNA target sequence for Ptger1 (NM_013641.1,580-598).
ctggtgcttcgcctgtata

SEQ ID NO: 629017 - DNA, 19 bp, Mus musculus
  siRNA target sequence for Ptger1 (NM_013641.1,582-600).
ggtgcttcgcctgtatact

SEQ ID NO: 629018 - DNA, 19 bp, Mus musculus
  siRNA target sequence for Ptger1 (NM_013641.1,830-848).
gtcgctacgagttacagta

SEQ ID NO: 629019 - DNA, 19 bp, Mus musculus
  siRNA target sequence for Ptger1 (NM_013641.1,849-867).
ccctggcacctggtgtttt

SEQ ID NO: 629020 - DNA, 19 bp, Mus musculus
  siRNA target sequence for Ptger1 (NM_013641.1,853-871).
ggcacctggtgttttatta

SEQ ID NO: 629021 - DNA, 19 bp, Mus musculus
  siRNA target sequence for Ptger1 (NM_013641.1,941-959).
cgctccttgcggcattagt

SEQ ID NO: 629022 - DNA, 19 bp, Mus musculus
  siRNA target sequence for Ptger1 (NM_013641.1,943-961).
ctccttgcggcattagtgt

SEQ ID NO: 629023 - DNA, 19 bp, Mus musculus
  siRNA target sequence for Ptger1 (NM_013641.1,949-967).
gcggcattagtgtgcaata

SEQ ID NO: 629024 - DNA, 19 bp, Mus musculus
  siRNA target sequence for Ptger2 (NM_008964.2,553-571).
ggcagcaggacctctatct

SEQ ID NO: 629025 - DNA, 19 bp, Mus musculus
  siRNA target sequence for Ptger2 (NM_008964.2,695-713).
gtcacgcgtgtacctattt

SEQ ID NO: 629026 - DNA, 19 bp, Mus musculus
  siRNA target sequence for Ptger2 (NM_008964.2,788-806).
ccatcgggtacccttactt

SEQ ID NO: 629027 - DNA, 19 bp, Mus musculus
  siRNA target sequence for Ptger2 (NM_008964.2,884-902).
ccctgccgctgctcaacta

SEQ ID NO: 629028 - DNA, 19 bp, Mus musculus
  siRNA target sequence for Ptger2 (NM_008964.2,951-969).
cgggaggactgcatacctt

SEQ ID NO: 629029 - DNA, 19 bp, Mus musculus
  siRNA target sequence for Ptger2 (NM_008964.2,1009-1027).
gtgctcgcctgcaacatca

SEQ ID NO: 629030 - DNA, 19 bp, Mus musculus
  siRNA target sequence for Ptger2 (NM_008964.2,1019-1037).
gcaacatcagcgttatcct

SEQ ID NO: 629031 - DNA, 19 bp, Mus musculus
  siRNA target sequence for Ptger2 (NM_008964.2,1054-1072).
caccgtcggagcagaagaa

SEQ ID NO: 629032 - DNA, 19 bp, Mus musculus
  siRNA target sequence for Ptger2 (NM_008964.2,1202-1220).
gctccttgcctttcacaat

SEQ ID NO: 629033 - DNA, 19 bp, Mus musculus
  siRNA target sequence for Ptger2 (NM_008964.2,1270-1288).
cgagctcttcggtttttat

SEQ ID NO: 629034 - DNA, 19 bp, Mus musculus
  siRNA target sequence for Ptger2 (NM_008964.2,1279-1297).
cggtttttatcagttaact

SEQ ID NO: 629035 - DNA, 19 bp, Mus musculus
  siRNA target sequence for Ptger2 (NM_008964.2,1289-1307).
cagttaactctataattga

SEQ ID NO: 629036 - DNA, 19 bp, Mus musculus
  siRNA target sequence for Ptger4 (NM_008965.1,175-193).
gctccaacgctgtgtgtta

SEQ ID NO: 629037 - DNA, 19 bp, Mus musculus
  siRNA target sequence for Ptger4 (NM_008965.1,178-196).
ccaacgctgtgtgttacta

SEQ ID NO: 629038 - DNA, 19 bp, Mus musculus
  siRNA target sequence for Ptger4 (NM_008965.1,179-197).
caacgctgtgtgttactaa

SEQ ID NO: 629039 - DNA, 19 bp, Mus musculus
  siRNA target sequence for Ptger4 (NM_008965.1,273-291).
ccattcccgcagtgatgtt

SEQ ID NO: 629040 - DNA, 19 bp, Mus musculus
  siRNA target sequence for Ptger4 (NM_008965.1,317-335).
gtggccatcgtagtattgt

SEQ ID NO: 629041 - DNA, 19 bp, Mus musculus
  siRNA target sequence for Ptger4 (NM_008965.1,364-382).
gaccttttacactctagta

SEQ ID NO: 629042 - DNA, 19 bp, Mus musculus
  siRNA target sequence for Ptger4 (NM_008965.1,367-385).
cttttacactctagtatgt

SEQ ID NO: 629043 - DNA, 19 bp, Mus musculus
  siRNA target sequence for Ptger4 (NM_008965.1,431-449).
gtgaccatcgccacataca

SEQ ID NO: 629044 - DNA, 19 bp, Mus musculus
  siRNA target sequence for Ptger4 (NM_008965.1,473-491).
caggcactgtgtgactata

SEQ ID NO: 629045 - DNA, 19 bp, Mus musculus
  siRNA target sequence for Ptger4 (NM_008965.1,492-510).
gcaccttcatcctactttt

SEQ ID NO: 629046 - DNA, 19 bp, Mus musculus
  siRNA target sequence for Ptger4 (NM_008965.1,622-640).
cacactcttcgccatctat

SEQ ID NO: 629047 - DNA, 19 bp, Mus musculus
  siRNA target sequence for Ptger4 (NM_008965.1,626-644).
ctcttcgccatctatgcat

SEQ ID NO: 629048 - DNA, 19 bp, Mus musculus
  siRNA target sequence for Ptger4 (NM_008965.1,1018-1036).
gatccagatggtcatctta

SEQ ID NO: 629049 - DNA, 19 bp, Mus musculus
  siRNA target sequence for Ptger4 (NM_008965.1,1081-1099).
cgtggtgcgagtgttcatt

SEQ ID NO: 629050 - DNA, 19 bp, Mus musculus
  siRNA target sequence for Ptger4 (NM_008965.1,1082-1100).
gtggtgcgagtgttcatta

SEQ ID NO: 629051 - DNA, 19 bp, Mus musculus
  siRNA target sequence for Ptger4 (NM_008965.1,1216-1234).
gaagactgtgctcagtaaa

SEQ ID NO: 629052 - DNA, 19 bp, Mus musculus
  siRNA target sequence for Ptger4 (NM_008965.1,1235-1253).
gccatagagaagatcaagt

SEQ ID NO: 629053 - DNA, 19 bp, Mus musculus
  siRNA target sequence for Ptger4 (NM_008965.1,1431-1449).
gcctcggaggcaggaattt

SEQ ID NO: 629054 - DNA, 19 bp, Mus musculus
  siRNA target sequence for Ptger4 (NM_008965.1,1435-1453).
cggaggcaggaatttgctt

SEQ ID NO: 629055 - DNA, 19 bp, Mus musculus
  siRNA target sequence for Ptger4 (NM_008965.1,1597-1615).
ggagcctgcctctaaagga

SEQ ID NO: 629056 - DNA, 19 bp, Mus musculus
  siRNA target sequence for Ptger4 (NM_008965.1,1632-1650).
cattccccagtgaaactct

SEQ ID NO: 629057 - DNA, 19 bp, Mus musculus
  siRNA target sequence for Ptger4 (NM_008965.1,1647-1665).
ctctgaaattatctgaaaa

SEQ ID NO: 629058 - DNA, 19 bp, Mus musculus
  siRNA target sequence for Ptgfr (NM_008966.2,275-293).
cggagaaccggctttcagt

SEQ ID NO: 629059 - DNA, 19 bp, Mus musculus
  siRNA target sequence for Ptgfr (NM_008966.2,279-297).
gaaccggctttcagtattt

SEQ ID NO: 629060 - DNA, 19 bp, Mus musculus
  siRNA target sequence for Ptgfr (NM_008966.2,344-362).
ccatcgccattctcatgaa

SEQ ID NO: 629061 - DNA, 19 bp, Mus musculus
  siRNA target sequence for Ptgfr (NM_008966.2,363-381).
ggcctaccagagatttaga

SEQ ID NO: 629062 - DNA, 19 bp, Mus musculus
  siRNA target sequence for Ptgfr (NM_008966.2,456-474).
cggaggcatagctgtcttt

SEQ ID NO: 629063 - DNA, 19 bp, Mus musculus
  siRNA target sequence for Ptgfr (NM_008966.2,458-476).
gaggcatagctgtctttgt

SEQ ID NO: 629064 - DNA, 19 bp, Mus musculus
  siRNA target sequence for Ptgfr (NM_008966.2,460-478).
ggcatagctgtctttgtat

SEQ ID NO: 629065 - DNA, 19 bp, Mus musculus
  siRNA target sequence for Ptgfr (NM_008966.2,538-556).
ggaatctccatggtctttt

SEQ ID NO: 629066 - DNA, 19 bp, Mus musculus
  siRNA target sequence for Ptgfr (NM_008966.2,591-609).
ggccatcgagaggtgtata

SEQ ID NO: 629067 - DNA, 19 bp, Mus musculus
  siRNA target sequence for Ptgfr (NM_008966.2,610-628).
ggagtcaccaatcctatat

SEQ ID NO: 629068 - DNA, 19 bp, Mus musculus
  siRNA target sequence for Ptgfr (NM_008966.2,611-629).
gagtcaccaatcctatatt

SEQ ID NO: 629069 - DNA, 19 bp, Mus musculus
  siRNA target sequence for Ptgfr (NM_008966.2,631-649).
cactctacgaagatcacat

SEQ ID NO: 629070 - DNA, 19 bp, Mus musculus
  siRNA target sequence for Ptgfr (NM_008966.2,635-653).
ctacgaagatcacatctaa

SEQ ID NO: 629071 - DNA, 19 bp, Mus musculus
  siRNA target sequence for Ptgfr (NM_008966.2,638-656).
cgaagatcacatctaaaca

SEQ ID NO: 629072 - DNA, 19 bp, Mus musculus
  siRNA target sequence for Ptgfr (NM_008966.2,647-665).
catctaaacacgtgaaaat

SEQ ID NO: 629073 - DNA, 19 bp, Mus musculus
  siRNA target sequence for Ptgfr (NM_008966.2,717-735).
ccttggacaccgagattat

SEQ ID NO: 629074 - DNA, 19 bp, Mus musculus
  siRNA target sequence for Ptgfr (NM_008966.2,721-739).
ggacaccgagattatcaaa

SEQ ID NO: 629075 - DNA, 19 bp, Mus musculus
  siRNA target sequence for Ptgfr (NM_008966.2,789-807).
ctgggaagacagattttat

SEQ ID NO: 629076 - DNA, 19 bp, Mus musculus
  siRNA target sequence for Ptgfr (NM_008966.2,873-891).
gggagtcacactcttaaga

SEQ ID NO: 629077 - DNA, 19 bp, Mus musculus
  siRNA target sequence for Ptgfr (NM_008966.2,992-1010).
gtccctttctggtaacaat

SEQ ID NO: 629078 - DNA, 19 bp, Mus musculus
  siRNA target sequence for Ptgfr (NM_008966.2,1011-1029).
ggccaacattgcaataaat

SEQ ID NO: 629079 - DNA, 19 bp, Mus musculus
  siRNA target sequence for Ptgfr (NM_008966.2,1082-1100).
caacgtggaatcagatctt

SEQ ID NO: 629080 - DNA, 19 bp, Mus musculus
  siRNA target sequence for Ptgfr (NM_008966.2,1135-1153).
gtccttaggaacctgtata

SEQ ID NO: 629081 - DNA, 19 bp, Mus musculus
  siRNA target sequence for Ptgfr (NM_008966.2,1163-1181).
gtcgttgctgtggagttaa

SEQ ID NO: 629082 - DNA, 19 bp, Mus musculus
  siRNA target sequence for Ptgfr (NM_008966.2,1169-1187).
gctgtggagttaacatcat

SEQ ID NO: 629083 - DNA, 19 bp, Mus musculus
  siRNA target sequence for Ptgfr (NM_008966.2,1214-1232).
ccatcaagaattccttaaa

SEQ ID NO: 629084 - DNA, 19 bp, Mus musculus
  siRNA target sequence for Ptgfr (NM_008966.2,1227-1245).
cttaaaggttgctgctatt

SEQ ID NO: 629085 - DNA, 19 bp, Mus musculus
  siRNA target sequence for Ptgir (NM_008967.1,428-446).
ccaccatggctcgtttgta

SEQ ID NO: 629086 - DNA, 19 bp, Mus musculus
  siRNA target sequence for Ptgir (NM_008967.1,459-477).
gcacgagaggatgaagttt

SEQ ID NO: 629087 - DNA, 19 bp, Mus musculus
  siRNA target sequence for Ptgir (NM_008967.1,460-478).
cacgagaggatgaagttta

SEQ ID NO: 629088 - DNA, 19 bp, Mus musculus
  siRNA target sequence for Ptgir (NM_008967.1,709-727).
ctgtccatggggatttgca

SEQ ID NO: 629089 - DNA, 19 bp, Mus musculus
  siRNA target sequence for Rgr (NM_021340.2,65-83).
ctggtttgggggaacttga

SEQ ID NO: 629090 - DNA, 19 bp, Mus musculus
  siRNA target sequence for Rgr (NM_021340.2,142-160).
ggcctgaccatcttctctt

SEQ ID NO: 629091 - DNA, 19 bp, Mus musculus
  siRNA target sequence for Rgr (NM_021340.2,143-161).
gcctgaccatcttctcttt

SEQ ID NO: 629092 - DNA, 19 bp, Mus musculus
  siRNA target sequence for Rgr (NM_021340.2,299-317).
gctgccaggttcatggttt

SEQ ID NO: 629093 - DNA, 19 bp, Mus musculus
  siRNA target sequence for Rgr (NM_021340.2,363-381).
cgttgcctggggacgttat

SEQ ID NO: 629094 - DNA, 19 bp, Mus musculus
  siRNA target sequence for Rgr (NM_021340.2,484-502).
ggctggggccactatgact

SEQ ID NO: 629095 - DNA, 19 bp, Mus musculus
  siRNA target sequence for Rgr (NM_021340.2,539-557).
cgaggggtgacagaaactt

SEQ ID NO: 629096 - DNA, 19 bp, Mus musculus
  siRNA target sequence for Rgr (NM_021340.2,595-613).
ctcgtacccctgttcatca

SEQ ID NO: 629097 - DNA, 19 bp, Mus musculus
  siRNA target sequence for Rgr (NM_021340.2,658-676).
ggccatctcccggtgaata

SEQ ID NO: 629098 - DNA, 19 bp, Mus musculus
  siRNA target sequence for Rgr (NM_021340.2,660-678).
ccatctcccggtgaatact

SEQ ID NO: 629099 - DNA, 19 bp, Mus musculus
  siRNA target sequence for Rgr (NM_021340.2,661-679).
catctcccggtgaatacta

SEQ ID NO: 629100 - DNA, 19 bp, Mus musculus
  siRNA target sequence for Rgr (NM_021340.2,666-684).
cccggtgaatactactctt

SEQ ID NO: 629101 - DNA, 19 bp, Mus musculus
  siRNA target sequence for Rgr (NM_021340.2,815-833).
caatcaacgccatcaacta

SEQ ID NO: 629102 - DNA, 19 bp, Mus musculus
  siRNA target sequence for Rho (NM_145383.1,283-301).
cgcacacccctcaactaca

SEQ ID NO: 629103 - DNA, 19 bp, Mus musculus
  siRNA target sequence for Rho (NM_145383.1,284-302).
gcacacccctcaactacat

SEQ ID NO: 629104 - DNA, 19 bp, Mus musculus
  siRNA target sequence for Rho (NM_145383.1,317-335).
ccgtggctgacctcttcat

SEQ ID NO: 629105 - DNA, 19 bp, Mus musculus
  siRNA target sequence for Rho (NM_145383.1,395-413).
ggcccacaggctgtaatct

SEQ ID NO: 629106 - DNA, 19 bp, Mus musculus
  siRNA target sequence for Rho (NM_145383.1,524-542).
gggagaatcacgctatcat

SEQ ID NO: 629107 - DNA, 19 bp, Mus musculus
  siRNA target sequence for Rho (NM_145383.1,616-634).
cctgagggcatgcaatgtt

SEQ ID NO: 629108 - DNA, 19 bp, Mus musculus
  siRNA target sequence for Rho (NM_145383.1,632-650).
gttcatgcgggattgacta

SEQ ID NO: 629109 - DNA, 19 bp, Mus musculus
  siRNA target sequence for Rho (NM_145383.1,635-653).
catgcgggattgactacta

SEQ ID NO: 629110 - DNA, 19 bp, Mus musculus
  siRNA target sequence for Rho (NM_145383.1,669-687).
ggtcaacaacgaatccttt

SEQ ID NO: 629111 - DNA, 19 bp, Mus musculus
  siRNA target sequence for Rho (NM_145383.1,706-724).
gtccacttcaccattccta

SEQ ID NO: 629112 - DNA, 19 bp, Mus musculus
  siRNA target sequence for Rho (NM_145383.1,823-841).
gaagtcacccgcatggtta

SEQ ID NO: 629113 - DNA, 19 bp, Mus musculus
  siRNA target sequence for Rho (NM_145383.1,826-844).
gtcacccgcatggttatca

SEQ ID NO: 629114 - DNA, 19 bp, Mus musculus
  siRNA target sequence for Rho (NM_145383.1,830-848).
cccgcatggttatcatcat

SEQ ID NO: 629115 - DNA, 19 bp, Mus musculus
  siRNA target sequence for Rho (NM_145383.1,883-901).
gccagtgtggccttctaca

SEQ ID NO: 629116 - DNA, 19 bp, Mus musculus
  siRNA target sequence for Rho (NM_145383.1,884-902).
ccagtgtggccttctacat

SEQ ID NO: 629117 - DNA, 19 bp, Mus musculus
  siRNA target sequence for Rho (NM_145383.1,1038-1056).
gctgtgctgcggcaagaat

SEQ ID NO: 629118 - DNA, 19 bp, Mus musculus
  siRNA target sequence for Rrh (NM_009102.2,17-35).
gagtgaggcttcggatttt

SEQ ID NO: 629119 - DNA, 19 bp, Mus musculus
  siRNA target sequence for Rrh (NM_009102.2,19-37).
gtgaggcttcggattttaa

SEQ ID NO: 629120 - DNA, 19 bp, Mus musculus
  siRNA target sequence for Rrh (NM_009102.2,117-135).
ggtatcacgagcattctca

SEQ ID NO: 629121 - DNA, 19 bp, Mus musculus
  siRNA target sequence for Rrh (NM_009102.2,186-204).
cccaccaatgcagtgatta

SEQ ID NO: 629122 - DNA, 19 bp, Mus musculus
  siRNA target sequence for Rrh (NM_009102.2,187-205).
ccaccaatgcagtgattat

SEQ ID NO: 629123 - DNA, 19 bp, Mus musculus
  siRNA target sequence for Rrh (NM_009102.2,190-208).
ccaatgcagtgattatcaa

SEQ ID NO: 629124 - DNA, 19 bp, Mus musculus
  siRNA target sequence for Rrh (NM_009102.2,209-227).
cctggctttcacggatata

SEQ ID NO: 629125 - DNA, 19 bp, Mus musculus
  siRNA target sequence for Rrh (NM_009102.2,251-269).
catgtctgcggcttcagat

SEQ ID NO: 629126 - DNA, 19 bp, Mus musculus
  siRNA target sequence for Rrh (NM_009102.2,294-312).
catgcaggctgtcagattt

SEQ ID NO: 629127 - DNA, 19 bp, Mus musculus
  siRNA target sequence for Rrh (NM_009102.2,315-333).
gcaggactgaatatcttct

SEQ ID NO: 629128 - DNA, 19 bp, Mus musculus
  siRNA target sequence for Rrh (NM_009102.2,342-360).
gtgagcattggcttactca

SEQ ID NO: 629129 - DNA, 19 bp, Mus musculus
  siRNA target sequence for Rrh (NM_009102.2,359-377).
cacggttgtagctatggat

SEQ ID NO: 629130 - DNA, 19 bp, Mus musculus
  siRNA target sequence for Rrh (NM_009102.2,476-494).
ggctttgatgcccatcata

SEQ ID NO: 629131 - DNA, 19 bp, Mus musculus
  siRNA target sequence for Rrh (NM_009102.2,491-509).
catagggtgggctagttat

SEQ ID NO: 629132 - DNA, 19 bp, Mus musculus
  siRNA target sequence for Rrh (NM_009102.2,525-543).
ggggccacgtgtaccataa

SEQ ID NO: 629133 - DNA, 19 bp, Mus musculus
  siRNA target sequence for Rrh (NM_009102.2,526-544).
gggccacgtgtaccataaa

SEQ ID NO: 629134 - DNA, 19 bp, Mus musculus
  siRNA target sequence for Rrh (NM_009102.2,528-546).
gccacgtgtaccataaact

SEQ ID NO: 629135 - DNA, 19 bp, Mus musculus
  siRNA target sequence for Rrh (NM_009102.2,538-556).
ccataaactggcggaataa

SEQ ID NO: 629136 - DNA, 19 bp, Mus musculus
  siRNA target sequence for Rrh (NM_009102.2,539-557).
cataaactggcggaataat

SEQ ID NO: 629137 - DNA, 19 bp, Mus musculus
  siRNA target sequence for Rrh (NM_009102.2,588-606).
gttatcgtggtgaacttca

SEQ ID NO: 629138 - DNA, 19 bp, Mus musculus
  siRNA target sequence for Rrh (NM_009102.2,611-629).
gcccttgacagtgatgttt

SEQ ID NO: 629139 - DNA, 19 bp, Mus musculus
  siRNA target sequence for Rrh (NM_009102.2,711-729).
gaccaggcagatgtaacaa

SEQ ID NO: 629140 - DNA, 19 bp, Mus musculus
  siRNA target sequence for Rrh (NM_009102.2,762-780).
ctggcatggtccccttatt

SEQ ID NO: 629141 - DNA, 19 bp, Mus musculus
  siRNA target sequence for Rrh (NM_009102.2,766-784).
catggtccccttattccat

SEQ ID NO: 629142 - DNA, 19 bp, Mus musculus
  siRNA target sequence for Rrh (NM_009102.2,826-844).
ctccttcaatggctatcat

SEQ ID NO: 629143 - DNA, 19 bp, Mus musculus
  siRNA target sequence for Rrh (NM_009102.2,894-912).
gtggctgcgcataagaagt

SEQ ID NO: 629144 - DNA, 19 bp, Mus musculus
  siRNA target sequence for Rrh (NM_009102.2,896-914).
ggctgcgcataagaagttt

SEQ ID NO: 629145 - DNA, 19 bp, Mus musculus
  siRNA target sequence for Rrh (NM_009102.2,962-980).
gcctgagccaagtactcta

SEQ ID NO: 629146 - DNA, 19 bp, Mus musculus
  siRNA target sequence for Sstr3 (NM_009218.1,842-860).
ctttctatctgctcaacat

SEQ ID NO: 629147 - DNA, 19 bp, Mus musculus
  siRNA target sequence for Sstr4 (NM_009219.1,119-137).
cagcgggcatggtcactat

SEQ ID NO: 629148 - DNA, 19 bp, Mus musculus
  siRNA target sequence for Sstr4 (NM_009219.1,132-150).
cactatccagtgcatctat

SEQ ID NO: 629149 - DNA, 19 bp, Mus musculus
  siRNA target sequence for Sstr4 (NM_009219.1,179-197).
gaaacgccctggtcatctt

SEQ ID NO: 629150 - DNA, 19 bp, Mus musculus
  siRNA target sequence for Sstr4 (NM_009219.1,359-377).
gcgtggacggcctgaacat

SEQ ID NO: 629151 - DNA, 19 bp, Mus musculus
  siRNA target sequence for Sstr4 (NM_009219.1,364-382).
gacggcctgaacatgttca

SEQ ID NO: 629152 - DNA, 19 bp, Mus musculus
  siRNA target sequence for Sstr4 (NM_009219.1,466-484).
cccagcgtggccaagctaa

SEQ ID NO: 629153 - DNA, 19 bp, Mus musculus
  siRNA target sequence for Sstr4 (NM_009219.1,467-485).
ccagcgtggccaagctaat

SEQ ID NO: 629154 - DNA, 19 bp, Mus musculus
  siRNA target sequence for Sstr4 (NM_009219.1,605-623).
cctggtctgcggtctttgt

SEQ ID NO: 629155 - DNA, 19 bp, Mus musculus
  siRNA target sequence for Sstr4 (NM_009219.1,611-629).
ctgcggtctttgtgatcta

SEQ ID NO: 629156 - DNA, 19 bp, Mus musculus
  siRNA target sequence for Sstr4 (NM_009219.1,613-631).
gcggtctttgtgatctata

SEQ ID NO: 629157 - DNA, 19 bp, Mus musculus
  siRNA target sequence for Sstr4 (NM_009219.1,658-676).
gttctggccatcggattat

SEQ ID NO: 629158 - DNA, 19 bp, Mus musculus
  siRNA target sequence for Sstr4 (NM_009219.1,661-679).
ctggccatcggattatgct

SEQ ID NO: 629159 - DNA, 19 bp, Mus musculus
  siRNA target sequence for Sstr4 (NM_009219.1,761-779).
ctaggctcgtgctaatggt

SEQ ID NO: 629160 - DNA, 19 bp, Mus musculus
  siRNA target sequence for Sstr4 (NM_009219.1,1051-1069).
gggggtgcaggatgcatat

SEQ ID NO: 629161 - DNA, 19 bp, Mus musculus
  siRNA target sequence for Tacr1 (NM_009313.2,632-650).
ctgagtctaaccagtttgt

SEQ ID NO: 629162 - DNA, 19 bp, Mus musculus
  siRNA target sequence for Tacr1 (NM_009313.2,651-669).
gcaacctacctggcaaatt

SEQ ID NO: 629163 - DNA, 19 bp, Mus musculus
  siRNA target sequence for Tacr1 (NM_009313.2,718-736).
ggcaacgtagtggtgatat

SEQ ID NO: 629164 - DNA, 19 bp, Mus musculus
  siRNA target sequence for Tacr1 (NM_009313.2,866-884).
ggtactacggcctctttta

SEQ ID NO: 629165 - DNA, 19 bp, Mus musculus
  siRNA target sequence for Tacr1 (NM_009313.2,916-934).
gctctcttcgccagtatct

SEQ ID NO: 629166 - DNA, 19 bp, Mus musculus
  siRNA target sequence for Tacr1 (NM_009313.2,917-935).
ctctcttcgccagtatcta

SEQ ID NO: 629167 - DNA, 19 bp, Mus musculus
  siRNA target sequence for Tacr1 (NM_009313.2,999-1017).
gtcggccactgctaccaaa

SEQ ID NO: 629168 - DNA, 19 bp, Mus musculus
  siRNA target sequence for Tacr1 (NM_009313.2,1010-1028).
ctaccaaagtggtcatctt

SEQ ID NO: 629169 - DNA, 19 bp, Mus musculus
  siRNA target sequence for Tacr1 (NM_009313.2,1101-1119).
cagagtagtgtgcatgatt

SEQ ID NO: 629170 - DNA, 19 bp, Mus musculus
  siRNA target sequence for Tacr1 (NM_009313.2,1169-1187).
gtgtgactgtgctgatcta

SEQ ID NO: 629171 - DNA, 19 bp, Mus musculus
  siRNA target sequence for Tacr1 (NM_009313.2,1171-1189).
gtgactgtgctgatctact

SEQ ID NO: 629172 - DNA, 19 bp, Mus musculus
  siRNA target sequence for Tacr1 (NM_009313.2,1221-1239).
cactgtggtagggattaca

SEQ ID NO: 629173 - DNA, 19 bp, Mus musculus
  siRNA target sequence for Tacr1 (NM_009313.2,1223-1241).
ctgtggtagggattacact

SEQ ID NO: 629174 - DNA, 19 bp, Mus musculus
  siRNA target sequence for Tacr1 (NM_009313.2,1266-1284).
ctcctctgaccgttaccat

SEQ ID NO: 629175 - DNA, 19 bp, Mus musculus
  siRNA target sequence for Tacr1 (NM_009313.2,1303-1321).
cgcaaggtggtcaaaatga

SEQ ID NO: 629176 - DNA, 19 bp, Mus musculus
  siRNA target sequence for Tacr1 (NM_009313.2,1304-1322).
gcaaggtggtcaaaatgat

SEQ ID NO: 629177 - DNA, 19 bp, Mus musculus
  siRNA target sequence for Tacr1 (NM_009313.2,1762-1780).
gaaagctccagcttctact

SEQ ID NO: 629178 - DNA, 19 bp, Mus musculus
  siRNA target sequence for Tacr1 (NM_009313.2,1769-1787).
ccagcttctactctaacat

SEQ ID NO: 629179 - DNA, 19 bp, Mus musculus
  siRNA target sequence for Tacr2 (NM_009314.2,127-145).
ggcgttacagccttctcta

SEQ ID NO: 629180 - DNA, 19 bp, Mus musculus
  siRNA target sequence for Tacr2 (NM_009314.2,192-210).
ggtgctggtggctgtaaca

SEQ ID NO: 629181 - DNA, 19 bp, Mus musculus
  siRNA target sequence for Tacr2 (NM_009314.2,501-519).
cagcaccaaggcggttatt

SEQ ID NO: 629182 - DNA, 19 bp, Mus musculus
  siRNA target sequence for Tacr2 (NM_009314.2,504-522).
caccaaggcggttattgct

SEQ ID NO: 629183 - DNA, 19 bp, Mus musculus
  siRNA target sequence for Tacr2 (NM_009314.2,547-565).
ctcgcctccccacaatgtt

SEQ ID NO: 629184 - DNA, 19 bp, Mus musculus
  siRNA target sequence for Tacr2 (NM_009314.2,550-568).
gcctccccacaatgtttct

SEQ ID NO: 629185 - DNA, 19 bp, Mus musculus
  siRNA target sequence for Tacr2 (NM_009314.2,610-628).
gtggcctggcccaatgaca

SEQ ID NO: 629186 - DNA, 19 bp, Mus musculus
  siRNA target sequence for Tacr2 (NM_009314.2,635-653).
gcaagatgctcctactgta

SEQ ID NO: 629187 - DNA, 19 bp, Mus musculus
  siRNA target sequence for Tacr2 (NM_009314.2,639-657).
gatgctcctactgtatcat

SEQ ID NO: 629188 - DNA, 19 bp, Mus musculus
  siRNA target sequence for Tacr3 (NM_021382.1,10-28).
gttcccaccggcgaaaact

SEQ ID NO: 629189 - DNA, 19 bp, Mus musculus
  siRNA target sequence for Tacr3 (NM_021382.1,264-282).
cggaaacctcatcgttatt

SEQ ID NO: 629190 - DNA, 19 bp, Mus musculus
  siRNA target sequence for Tacr3 (NM_021382.1,377-395).
ccttggtcaatttcatcta

SEQ ID NO: 629191 - DNA, 19 bp, Mus musculus
  siRNA target sequence for Tacr3 (NM_021382.1,378-396).
cttggtcaatttcatctat

SEQ ID NO: 629192 - DNA, 19 bp, Mus musculus
  siRNA target sequence for Tacr3 (NM_021382.1,510-528).
gtatatggccattatcgat

SEQ ID NO: 629193 - DNA, 19 bp, Mus musculus
  siRNA target sequence for Tacr3 (NM_021382.1,518-536).
ccattatcgatcctttgaa

SEQ ID NO: 629194 - DNA, 19 bp, Mus musculus
  siRNA target sequence for Tacr3 (NM_021382.1,529-547).
cctttgaaacccagactat

SEQ ID NO: 629195 - DNA, 19 bp, Mus musculus
  siRNA target sequence for Tacr3 (NM_021382.1,564-582).
gattgtcatcggaagtatt

SEQ ID NO: 629196 - DNA, 19 bp, Mus musculus
  siRNA target sequence for Tacr3 (NM_021382.1,570-588).
catcggaagtatttggatt

SEQ ID NO: 629197 - DNA, 19 bp, Mus musculus
  siRNA target sequence for Tacr3 (NM_021382.1,584-602).
ggattttggcatttctact

SEQ ID NO: 629198 - DNA, 19 bp, Mus musculus
  siRNA target sequence for Tacr3 (NM_021382.1,644-662).
caggccgtaccctttgcta

SEQ ID NO: 629199 - DNA, 19 bp, Mus musculus
  siRNA target sequence for Tacr3 (NM_021382.1,758-776).
cctacaccatcgttggaat

SEQ ID NO: 629200 - DNA, 19 bp, Mus musculus
  siRNA target sequence for Tacr3 (NM_021382.1,759-777).
ctacaccatcgttggaatt

SEQ ID NO: 629201 - DNA, 19 bp, Mus musculus
  siRNA target sequence for Tacr3 (NM_021382.1,828-846).
gcagcttaaggctaaacga

SEQ ID NO: 629202 - DNA, 19 bp, Mus musculus
  siRNA target sequence for Tacr3 (NM_021382.1,896-914).
ggctaccctaccatgtgta

SEQ ID NO: 629203 - DNA, 19 bp, Mus musculus
  siRNA target sequence for Tacr3 (NM_021382.1,928-946).
gcgatctaccaacagttaa

SEQ ID NO: 629204 - DNA, 19 bp, Mus musculus
  siRNA target sequence for Tacr3 (NM_021382.1,1305-1323).
caccacatcaagtttcata

SEQ ID NO: 629205 - DNA, 19 bp, Mus musculus
  siRNA target sequence for Tbxa2r (NM_009325.1,504-522).
gggtagctatggtgttctt

SEQ ID NO: 629206 - DNA, 19 bp, Mus musculus
  siRNA target sequence for Tbxa2r (NM_009325.1,1127-1145).
ctgcatccgcggttcagtt

SEQ ID NO: 629207 - DNA, 19 bp, Mus musculus
  siRNA target sequence for Trhr (NM_013696.1,268-286).
gatactgtcagtgaaatga

SEQ ID NO: 629208 - DNA, 19 bp, Mus musculus
  siRNA target sequence for Trhr (NM_013696.1,330-348).
ccaggtggttaccatctta

SEQ ID NO: 629209 - DNA, 19 bp, Mus musculus
  siRNA target sequence for Trhr (NM_013696.1,333-351).
ggtggttaccatcttactt

SEQ ID NO: 629210 - DNA, 19 bp, Mus musculus
  siRNA target sequence for Trhr (NM_013696.1,428-446).
gaacccctacaaactgtta

SEQ ID NO: 629211 - DNA, 19 bp, Mus musculus
  siRNA target sequence for Trhr (NM_013696.1,500-518).
ccaacataaccgacagtat

SEQ ID NO: 629212 - DNA, 19 bp, Mus musculus
  siRNA target sequence for Trhr (NM_013696.1,504-522).
cataaccgacagtatctat

SEQ ID NO: 629213 - DNA, 19 bp, Mus musculus
  siRNA target sequence for Trhr (NM_013696.1,544-562).
gttggctgcctctgcatta

SEQ ID NO: 629214 - DNA, 19 bp, Mus musculus
  siRNA target sequence for Trhr (NM_013696.1,551-569).
gcctctgcattacatatct

SEQ ID NO: 629215 - DNA, 19 bp, Mus musculus
  siRNA target sequence for Trhr (NM_013696.1,580-598).
ggcattaatgcatcttcat

SEQ ID NO: 629216 - DNA, 19 bp, Mus musculus
  siRNA target sequence for Trhr (NM_013696.1,602-620).
caataacggcctttaccat

SEQ ID NO: 629217 - DNA, 19 bp, Mus musculus
  siRNA target sequence for Trhr (NM_013696.1,611-629).
cctttaccattgaaaggta

SEQ ID NO: 629218 - DNA, 19 bp, Mus musculus
  siRNA target sequence for Trhr (NM_013696.1,671-689).
cgttttccagagccaaaaa

SEQ ID NO: 629219 - DNA, 19 bp, Mus musculus
  siRNA target sequence for Trhr (NM_013696.1,705-723).
ctgggccttcacatccatt

SEQ ID NO: 629220 - DNA, 19 bp, Mus musculus
  siRNA target sequence for Trhr (NM_013696.1,707-725).
gggccttcacatccattta

SEQ ID NO: 629221 - DNA, 19 bp, Mus musculus
  siRNA target sequence for Trhr (NM_013696.1,813-831).
gaactactactcacctatt

SEQ ID NO: 629222 - DNA, 19 bp, Mus musculus
  siRNA target sequence for Trhr (NM_013696.1,819-837).
ctactcacctatttaccta

SEQ ID NO: 629223 - DNA, 19 bp, Mus musculus
  siRNA target sequence for Trhr (NM_013696.1,876-894).
ggccactgtgctttatgga

SEQ ID NO: 629224 - DNA, 19 bp, Mus musculus
  siRNA target sequence for Trhr (NM_013696.1,877-895).
gccactgtgctttatggat

SEQ ID NO: 629225 - DNA, 19 bp, Mus musculus
  siRNA target sequence for Trhr (NM_013696.1,879-897).
cactgtgctttatggattt

SEQ ID NO: 629226 - DNA, 19 bp, Mus musculus
  siRNA target sequence for Trhr (NM_013696.1,901-919).
gctagaatcctcttcttaa

SEQ ID NO: 629227 - DNA, 19 bp, Mus musculus
  siRNA target sequence for Trhr (NM_013696.1,934-952).
gaccctaaagaaaactcta

SEQ ID NO: 629228 - DNA, 19 bp, Mus musculus
  siRNA target sequence for Trhr (NM_013696.1,937-955).
cctaaagaaaactctaaga

SEQ ID NO: 629229 - DNA, 19 bp, Mus musculus
  siRNA target sequence for Trhr (NM_013696.1,960-978).
gaaaaatgactcaatccat

SEQ ID NO: 629230 - DNA, 19 bp, Mus musculus
  siRNA target sequence for Trhr (NM_013696.1,1059-1077).
gctcgcagtggttgtaatt

SEQ ID NO: 629231 - DNA, 19 bp, Mus musculus
  siRNA target sequence for Trhr (NM_013696.1,1111-1129).
cttgtggttgtcaactcat

SEQ ID NO: 629232 - DNA, 19 bp, Mus musculus
  siRNA target sequence for Trhr (NM_013696.1,1165-1183).
ctcttttgcagaatttgca

SEQ ID NO: 629233 - DNA, 19 bp, Mus musculus
  siRNA target sequence for Trhr (NM_013696.1,1175-1193).
gaatttgcatttatctcaa

SEQ ID NO: 629234 - DNA, 19 bp, Mus musculus
  siRNA target sequence for Trhr (NM_013696.1,1253-1271).
ggaagctctgcaattgcaa

SEQ ID NO: 629235 - DNA, 19 bp, Mus musculus
  siRNA target sequence for Trhr (NM_013696.1,1283-1301).
cagaaaaagctgctaacta

SEQ ID NO: 629236 - DNA, 19 bp, Mus musculus
  siRNA target sequence for Trhr (NM_013696.1,1299-1317).
ctacagtgtggccctaaat

SEQ ID NO: 629237 - DNA, 19 bp, Mus musculus
  siRNA target sequence for Trhr (NM_013696.1,1368-1386).
caccgtcaccgatacgtat

SEQ ID NO: 629238 - DNA, 19 bp, Mus musculus
  siRNA target sequence for V1ra1 (NM_011683.1,1241-1259).
cgtaaatctctccatcata

SEQ ID NO: 629239 - DNA, 19 bp, Mus musculus
  siRNA target sequence for V1ra1 (NM_011683.1,1668-1686).
caacatcttacaatatgca

SEQ ID NO: 629240 - DNA, 19 bp, Mus musculus
  siRNA target sequence for V1ra1 (NM_011683.1,1674-1692).
cttacaatatgcaaatctt

SEQ ID NO: 629241 - DNA, 19 bp, Mus musculus
  siRNA target sequence for V1rb2 (NM_011911.1,548-566).
gcaggttttccactcttat

SEQ ID NO: 629242 - DNA, 19 bp, Mus musculus
  siRNA target sequence for V1rb2 (NM_011911.1,760-778).
gaaagagttgtcttccaat

SEQ ID NO: 629243 - DNA, 19 bp, Mus musculus
  siRNA target sequence for V1rb2 (NM_011911.1,796-814).
gattgctcagtattctact

SEQ ID NO: 629244 - DNA, 19 bp, Mus musculus
  siRNA target sequence for V1rb2 (NM_011911.1,800-818).
gctcagtattctactttgt

SEQ ID NO: 629245 - DNA, 19 bp, Mus musculus
  siRNA target sequence for V1rc15 (NM_134170.2,1685-1703).
gataaccgaatgatcatca

SEQ ID NO: 629246 - DNA, 19 bp, Mus musculus
  siRNA target sequence for V1rc32 (NM_134187.2,570-588).
caccaggggacttattttt

SEQ ID NO: 629247 - DNA, 19 bp, Mus musculus
  siRNA target sequence for V1rc32 (NM_134187.2,940-958).
cagtcaaagcaccatttga

SEQ ID NO: 629248 - DNA, 19 bp, Mus musculus
  siRNA target sequence for V1re11 (NM_134230.1,19-37).
gacttagggaatctatcaa

SEQ ID NO: 629249 - DNA, 19 bp, Mus musculus
  siRNA target sequence for V1re11 (NM_134230.1,25-43).
gggaatctatcaatcaaaa

SEQ ID NO: 629250 - DNA, 19 bp, Mus musculus
  siRNA target sequence for V1re11 (NM_134230.1,376-394).
gccaaagttgcaaagtata

SEQ ID NO: 629251 - DNA, 19 bp, Mus musculus
  siRNA target sequence for V1re11 (NM_134230.1,419-437).
gggttttgtccatctttat

SEQ ID NO: 629252 - DNA, 19 bp, Mus musculus
  siRNA target sequence for V1re11 (NM_134230.1,420-438).
ggttttgtccatctttata

SEQ ID NO: 629253 - DNA, 19 bp, Mus musculus
  siRNA target sequence for V1re11 (NM_134230.1,428-446).
ccatctttatacatttcat

SEQ ID NO: 629254 - DNA, 19 bp, Mus musculus
  siRNA target sequence for V1re11 (NM_134230.1,494-512).
ggaagctagattttgagta

SEQ ID NO: 629255 - DNA, 19 bp, Mus musculus
  siRNA target sequence for V1re11 (NM_134230.1,513-531).
ctgctcctatgttaaccat

SEQ ID NO: 629256 - DNA, 19 bp, Mus musculus
  siRNA target sequence for V1re11 (NM_134230.1,548-566).
cagtttatgcagcattagt

SEQ ID NO: 629257 - DNA, 19 bp, Mus musculus
  siRNA target sequence for V1re11 (NM_134230.1,550-568).
gtttatgcagcattagtga

SEQ ID NO: 629258 - DNA, 19 bp, Mus musculus
  siRNA target sequence for V1re11 (NM_134230.1,615-633).
ctctatgactgtcattcta

SEQ ID NO: 629259 - DNA, 19 bp, Mus musculus
  siRNA target sequence for V1re11 (NM_134230.1,716-734).
caatcctgtccctagtgtt

SEQ ID NO: 629260 - DNA, 19 bp, Mus musculus
  siRNA target sequence for V1re11 (NM_134230.1,764-782).
ccatcttacgaggttacat

SEQ ID NO: 629261 - DNA, 19 bp, Mus musculus
  siRNA target sequence for V1re11 (NM_134230.1,765-783).
catcttacgaggttacatt

SEQ ID NO: 629262 - DNA, 19 bp, Mus musculus
  siRNA target sequence for V1re11 (NM_134230.1,886-904).
gttaggccaagactaagtt

SEQ ID NO: 629263 - DNA, 19 bp, Mus musculus
  siRNA target sequence for V1re11 (NM_134230.1,902-920).
gtttggtctggatgagaaa

SEQ ID NO: 629264 - DNA, 19 bp, Mus musculus
  siRNA target sequence for V1re13 (NM_145848.2,905-923).
cagatttgattttaatgaa

SEQ ID NO: 629265 - DNA, 19 bp, Mus musculus
  siRNA target sequence for V1re13 (NM_145848.2,935-953).
ccaatctggtgatacttct

SEQ ID NO: 629266 - DNA, 19 bp, Mus musculus
  siRNA target sequence for V1re13 (NM_145848.2,942-960).
ggtgatacttctctctata

SEQ ID NO: 629267 - DNA, 19 bp, Mus musculus
  siRNA target sequence for V1re13 (NM_145848.2,945-963).
gatacttctctctataggt

SEQ ID NO: 629268 - DNA, 19 bp, Mus musculus
  siRNA target sequence for V1re13 (NM_145848.2,1032-1050).
gttcgttcaaggatttagt

SEQ ID NO: 629269 - DNA, 19 bp, Mus musculus
  siRNA target sequence for V1re13 (NM_145848.2,1042-1060).
ggatttagtcgaagtatgt

SEQ ID NO: 629270 - DNA, 19 bp, Mus musculus
  siRNA target sequence for V1re13 (NM_145848.2,1051-1069).
cgaagtatgtccatttgca

SEQ ID NO: 629271 - DNA, 19 bp, Mus musculus
  siRNA target sequence for V1re13 (NM_145848.2,1142-1160).
ccaacgcagccaagtacat

SEQ ID NO: 629272 - DNA, 19 bp, Mus musculus
  siRNA target sequence for V1re13 (NM_145848.2,1184-1202).
gggtcttgcacgtgttgat

SEQ ID NO: 629273 - DNA, 19 bp, Mus musculus
  siRNA target sequence for V1re13 (NM_145848.2,1185-1203).
ggtcttgcacgtgttgatt

SEQ ID NO: 629274 - DNA, 19 bp, Mus musculus
  siRNA target sequence for V1re13 (NM_145848.2,1186-1204).
gtcttgcacgtgttgatta

SEQ ID NO: 629275 - DNA, 19 bp, Mus musculus
  siRNA target sequence for V1re13 (NM_145848.2,1188-1206).
cttgcacgtgttgattaat

SEQ ID NO: 629276 - DNA, 19 bp, Mus musculus
  siRNA target sequence for V1re13 (NM_145848.2,1192-1210).
cacgtgttgattaatttca

SEQ ID NO: 629277 - DNA, 19 bp, Mus musculus
  siRNA target sequence for V1re13 (NM_145848.2,1486-1504).
ctcacagtggtgtctactt

SEQ ID NO: 629278 - DNA, 19 bp, Mus musculus
  siRNA target sequence for V1re13 (NM_145848.2,1530-1548).
catcttaagaggctttgta

SEQ ID NO: 629279 - DNA, 19 bp, Mus musculus
  siRNA target sequence for V1re13 (NM_145848.2,1538-1556).
gaggctttgtagctctttt

SEQ ID NO: 629280 - DNA, 19 bp, Mus musculus
  siRNA target sequence for V1re13 (NM_145848.2,1605-1623).
gtgcttccccacttttgca

SEQ ID NO: 629281 - DNA, 19 bp, Mus musculus
  siRNA target sequence for V1re3 (NM_134192.2,249-267).
ggctcaacctagaaaagtt

SEQ ID NO: 629282 - DNA, 19 bp, Mus musculus
  siRNA target sequence for V1re3 (NM_134192.2,251-269).
ctcaacctagaaaagttca

SEQ ID NO: 629283 - DNA, 19 bp, Mus musculus
  siRNA target sequence for V1re3 (NM_134192.2,253-271).
caacctagaaaagttcaaa

SEQ ID NO: 629284 - DNA, 19 bp, Mus musculus
  siRNA target sequence for V1re3 (NM_134192.2,282-300).
gctcagagacatgattgtt

SEQ ID NO: 629285 - DNA, 19 bp, Mus musculus
  siRNA target sequence for V1re3 (NM_134192.2,291-309).
catgattgttgccattatt

SEQ ID NO: 629286 - DNA, 19 bp, Mus musculus
  siRNA target sequence for V1re3 (NM_134192.2,294-312).
gattgttgccattattcaa

SEQ ID NO: 629287 - DNA, 19 bp, Mus musculus
  siRNA target sequence for V1re3 (NM_134192.2,348-366).
ggacatggcagtaggaata

SEQ ID NO: 629288 - DNA, 19 bp, Mus musculus
  siRNA target sequence for V1re3 (NM_134192.2,369-387).
gctctcatttgagattcta

SEQ ID NO: 629289 - DNA, 19 bp, Mus musculus
  siRNA target sequence for V1re3 (NM_134192.2,372-390).
ctcatttgagattctactt

SEQ ID NO: 629290 - DNA, 19 bp, Mus musculus
  siRNA target sequence for V1re3 (NM_134192.2,624-642).
cactaccacctgtttctta

SEQ ID NO: 629291 - DNA, 19 bp, Mus musculus
  siRNA target sequence for V1re3 (NM_134192.2,700-718).
gttaagactacaaagttta

SEQ ID NO: 629292 - DNA, 19 bp, Mus musculus
  siRNA target sequence for V1re3 (NM_134192.2,734-752).
ccttctactgggtcatgtt

SEQ ID NO: 629293 - DNA, 19 bp, Mus musculus
  siRNA target sequence for V1re3 (NM_134192.2,743-761).
gggtcatgttcatcttact

SEQ ID NO: 629294 - DNA, 19 bp, Mus musculus
  siRNA target sequence for V1re3 (NM_134192.2,744-762).
ggtcatgttcatcttacta

SEQ ID NO: 629295 - DNA, 19 bp, Mus musculus
  siRNA target sequence for V1re3 (NM_134192.2,745-763).
gtcatgttcatcttactaa

SEQ ID NO: 629296 - DNA, 19 bp, Mus musculus
  siRNA target sequence for V1re3 (NM_134192.2,788-806).
ctagcaatagtaatagaga

SEQ ID NO: 629297 - DNA, 19 bp, Mus musculus
  siRNA target sequence for V1re3 (NM_134192.2,892-910).
gtgtttccggaagtcttat

SEQ ID NO: 629298 - DNA, 19 bp, Mus musculus
  siRNA target sequence for V1re3 (NM_134192.2,991-1009).
cataaacatgcttctctta

SEQ ID NO: 629299 - DNA, 19 bp, Mus musculus
  siRNA target sequence for V1re3 (NM_134192.2,997-1015).
catgcttctcttagaatct

SEQ ID NO: 629300 - DNA, 19 bp, Mus musculus
  siRNA target sequence for V1re3 (NM_134192.2,1140-1158).
gaatataacagcaatcata

SEQ ID NO: 629301 - DNA, 19 bp, Mus musculus
  siRNA target sequence for V1re7 (NM_134196.1,4-22).
gttaatgacaagatggatt

SEQ ID NO: 629302 - DNA, 19 bp, Mus musculus
  siRNA target sequence for V1re7 (NM_134196.1,23-41).
ccaaaaatctggcaatatt

SEQ ID NO: 629303 - DNA, 19 bp, Mus musculus
  siRNA target sequence for V1re7 (NM_134196.1,43-61).
gtaatactcatccttcaat

SEQ ID NO: 629304 - DNA, 19 bp, Mus musculus
  siRNA target sequence for V1re7 (NM_134196.1,105-123).
cttaatgcttcattataat

SEQ ID NO: 629305 - DNA, 19 bp, Mus musculus
  siRNA target sequence for V1re7 (NM_134196.1,129-147).
cacattaaaacgaattgat

SEQ ID NO: 629306 - DNA, 19 bp, Mus musculus
  siRNA target sequence for V1re7 (NM_134196.1,139-157).
cgaattgatttgattttca

SEQ ID NO: 629307 - DNA, 19 bp, Mus musculus
  siRNA target sequence for V1re7 (NM_134196.1,145-163).
gatttgattttcatgaaca

SEQ ID NO: 629308 - DNA, 19 bp, Mus musculus
  siRNA target sequence for V1re7 (NM_134196.1,202-220).
gtgctacagacaatgcaaa

SEQ ID NO: 629309 - DNA, 19 bp, Mus musculus
  siRNA target sequence for V1re7 (NM_134196.1,221-239).
cttttgggatggaactgtt

SEQ ID NO: 629310 - DNA, 19 bp, Mus musculus
  siRNA target sequence for V1re7 (NM_134196.1,226-244).
gggatggaactgttcttca

SEQ ID NO: 629311 - DNA, 19 bp, Mus musculus
  siRNA target sequence for V1re7 (NM_134196.1,264-282).
ccctatgtatactgaaaga

SEQ ID NO: 629312 - DNA, 19 bp, Mus musculus
  siRNA target sequence for V1re7 (NM_134196.1,351-369).
cagtgactcgtgccttaat

SEQ ID NO: 629313 - DNA, 19 bp, Mus musculus
  siRNA target sequence for V1re7 (NM_134196.1,360-378).
gtgccttaatggccttaaa

SEQ ID NO: 629314 - DNA, 19 bp, Mus musculus
  siRNA target sequence for V1re7 (NM_134196.1,388-406).
ccaaagtacatcaaccttt

SEQ ID NO: 629315 - DNA, 19 bp, Mus musculus
  siRNA target sequence for V1re7 (NM_134196.1,393-411).
gtacatcaacctttctatt

SEQ ID NO: 629316 - DNA, 19 bp, Mus musculus
  siRNA target sequence for V1re7 (NM_134196.1,426-444).
cctgtttttggggttaaat

SEQ ID NO: 629317 - DNA, 19 bp, Mus musculus
  siRNA target sequence for V1re7 (NM_134196.1,427-445).
ctgtttttggggttaaata

SEQ ID NO: 629318 - DNA, 19 bp, Mus musculus
  siRNA target sequence for V1re7 (NM_134196.1,435-453).
ggggttaaatatgatttca

SEQ ID NO: 629319 - DNA, 19 bp, Mus musculus
  siRNA target sequence for V1re7 (NM_134196.1,454-472).
ccaatgtatgtatatatta

SEQ ID NO: 629320 - DNA, 19 bp, Mus musculus
  siRNA target sequence for V1re7 (NM_134196.1,548-566).
gcccaatgattacaacatt

SEQ ID NO: 629321 - DNA, 19 bp, Mus musculus
  siRNA target sequence for V1re7 (NM_134196.1,604-622).
gtctgttctgggagcttaa

SEQ ID NO: 629322 - DNA, 19 bp, Mus musculus
  siRNA target sequence for V1re7 (NM_134196.1,608-626).
gttctgggagcttaatggt

SEQ ID NO: 629323 - DNA, 19 bp, Mus musculus
  siRNA target sequence for V1re7 (NM_134196.1,615-633).
gagcttaatggtcaacatt

SEQ ID NO: 629324 - DNA, 19 bp, Mus musculus
  siRNA target sequence for V1re7 (NM_134196.1,687-705).
cagaacatcgcatgaatca

SEQ ID NO: 629325 - DNA, 19 bp, Mus musculus
  siRNA target sequence for V1re7 (NM_134196.1,726-744).
ggtgctagtgtcactcttt

SEQ ID NO: 629326 - DNA, 19 bp, Mus musculus
  siRNA target sequence for V1re7 (NM_134196.1,727-745).
gtgctagtgtcactcttta

SEQ ID NO: 629327 - DNA, 19 bp, Mus musculus
  siRNA target sequence for V1re7 (NM_134196.1,729-747).
gctagtgtcactctttatt

SEQ ID NO: 629328 - DNA, 19 bp, Mus musculus
  siRNA target sequence for V1re7 (NM_134196.1,802-820).
gctggctggtggatgatta

SEQ ID NO: 629329 - DNA, 19 bp, Mus musculus
  siRNA target sequence for V1re7 (NM_134196.1,803-821).
ctggctggtggatgattaa

SEQ ID NO: 629330 - DNA, 19 bp, Mus musculus
  siRNA target sequence for V1re7 (NM_134196.1,805-823).
ggctggtggatgattaaca

SEQ ID NO: 629331 - DNA, 19 bp, Mus musculus
  siRNA target sequence for V1re7 (NM_134196.1,854-872).
ctttgggaccctttattgt

SEQ ID NO: 629332 - DNA, 19 bp, Mus musculus
  siRNA target sequence for V1re9 (NM_145842.2,687-705).
gggtgtagccacaattaaa

SEQ ID NO: 629333 - DNA, 19 bp, Mus musculus
  siRNA target sequence for V1re9 (NM_145842.2,695-713).
ccacaattaaagagaatca

SEQ ID NO: 629334 - DNA, 19 bp, Mus musculus
  siRNA target sequence for V1re9 (NM_145842.2,715-733).
gcccaatcgaagatggatt

SEQ ID NO: 629335 - DNA, 19 bp, Mus musculus
  siRNA target sequence for V1re9 (NM_145842.2,817-835).
gtagtctactatatagtat

SEQ ID NO: 629336 - DNA, 19 bp, Mus musculus
  siRNA target sequence for V1re9 (NM_145842.2,867-885).
gcacctagtgacatcgaat

SEQ ID NO: 629337 - DNA, 19 bp, Mus musculus
  siRNA target sequence for V1re9 (NM_145842.2,934-952).
ggcttgacacacttattaa

SEQ ID NO: 629338 - DNA, 19 bp, Mus musculus
  siRNA target sequence for V1re9 (NM_145842.2,936-954).
cttgacacacttattaaat

SEQ ID NO: 629339 - DNA, 19 bp, Mus musculus
  siRNA target sequence for V1re9 (NM_145842.2,941-959).
cacacttattaaatgattt

SEQ ID NO: 629340 - DNA, 19 bp, Mus musculus
  siRNA target sequence for V1re9 (NM_145842.2,991-1009).
gttggccggagtatatcca

SEQ ID NO: 629341 - DNA, 19 bp, Mus musculus
  siRNA target sequence for V1re9 (NM_145842.2,1016-1034).
gtacctgtctcttgagtat

SEQ ID NO: 629342 - DNA, 19 bp, Mus musculus
  siRNA target sequence for V1re9 (NM_145842.2,1067-1085).
cttgttataagggtcaaaa

SEQ ID NO: 629343 - DNA, 19 bp, Mus musculus
  siRNA target sequence for V1re9 (NM_145842.2,1070-1088).
gttataagggtcaaaaagt

SEQ ID NO: 629344 - DNA, 19 bp, Mus musculus
  siRNA target sequence for V1re9 (NM_145842.2,1126-1144).
ctctgggtcctgcacattt

SEQ ID NO: 629345 - DNA, 19 bp, Mus musculus
  siRNA target sequence for V1re9 (NM_145842.2,1130-1148).
gggtcctgcacatttttat

SEQ ID NO: 629346 - DNA, 19 bp, Mus musculus
  siRNA target sequence for V1re9 (NM_145842.2,1205-1223).
gagaccgtgattttaaata

SEQ ID NO: 629347 - DNA, 19 bp, Mus musculus
  siRNA target sequence for V1re9 (NM_145842.2,1234-1252).
gtagggcaaaatgaattca

SEQ ID NO: 629348 - DNA, 19 bp, Mus musculus
  siRNA target sequence for V1re9 (NM_145842.2,1246-1264).
gaattcagtgacttactct

SEQ ID NO: 629349 - DNA, 19 bp, Mus musculus
  siRNA target sequence for V1re9 (NM_145842.2,1434-1452).
ggtcctcgtgtctacattt

SEQ ID NO: 629350 - DNA, 19 bp, Mus musculus
  siRNA target sequence for V1re9 (NM_145842.2,1501-1519).
cagaataatcccaattggt

SEQ ID NO: 629351 - DNA, 19 bp, Mus musculus
  siRNA target sequence for V1re9 (NM_145842.2,1517-1535).
ggtggctcctaaacatcaa

SEQ ID NO: 629352 - DNA, 19 bp, Mus musculus
  siRNA target sequence for V1re9 (NM_145842.2,1518-1536).
gtggctcctaaacatcaat

SEQ ID NO: 629353 - DNA, 19 bp, Mus musculus
  siRNA target sequence for V1re9 (NM_145842.2,1576-1594).
gttttgatgagccattact

SEQ ID NO: 629354 - DNA, 19 bp, Mus musculus
  siRNA target sequence for V1re9 (NM_145842.2,1609-1627).
ctcagtttgacctggataa

SEQ ID NO: 629355 - DNA, 19 bp, Mus musculus
  siRNA target sequence for V1rf2 (NM_134199.2,336-354).
gctgtcagtgcctcatctt

SEQ ID NO: 629356 - DNA, 19 bp, Mus musculus
  siRNA target sequence for V1rf2 (NM_134199.2,408-426).
gaatatggccctaggtata

SEQ ID NO: 629357 - DNA, 19 bp, Mus musculus
  siRNA target sequence for V1rf2 (NM_134199.2,415-433).
gccctaggtataatcttct

SEQ ID NO: 629358 - DNA, 19 bp, Mus musculus
  siRNA target sequence for V1rf2 (NM_134199.2,524-542).
cagactggatgttgaatta

SEQ ID NO: 629359 - DNA, 19 bp, Mus musculus
  siRNA target sequence for V1rf2 (NM_134199.2,526-544).
gactggatgttgaattatt

SEQ ID NO: 629360 - DNA, 19 bp, Mus musculus
  siRNA target sequence for V1rf2 (NM_134199.2,634-652).
gggtgcaatctcctctttt

SEQ ID NO: 629361 - DNA, 19 bp, Mus musculus
  siRNA target sequence for V1rf2 (NM_134199.2,646-664).
ctcttttacattcacaaaa

SEQ ID NO: 629362 - DNA, 19 bp, Mus musculus
  siRNA target sequence for V1rf2 (NM_134199.2,760-778).
gccaaatcatccaagttca

SEQ ID NO: 629363 - DNA, 19 bp, Mus musculus
  siRNA target sequence for V1rf2 (NM_134199.2,813-831).
catcctcatgagtacttat

SEQ ID NO: 629364 - DNA, 19 bp, Mus musculus
  siRNA target sequence for V1rf2 (NM_134199.2,827-845).
cttataatctcttttacat

SEQ ID NO: 629365 - DNA, 19 bp, Mus musculus
  siRNA target sequence for V1rf2 (NM_134199.2,862-880).
cacagaaatatgacaatta

SEQ ID NO: 629366 - DNA, 19 bp, Mus musculus
  siRNA target sequence for V1rf2 (NM_134199.2,864-882).
cagaaatatgacaattata

SEQ ID NO: 629367 - DNA, 19 bp, Mus musculus
  siRNA target sequence for V1rf2 (NM_134199.2,899-917).
gctctgtttgtcttgacaa

SEQ ID NO: 629368 - DNA, 19 bp, Mus musculus
  siRNA target sequence for V1rf2 (NM_134199.2,900-918).
ctctgtttgtcttgacaaa

SEQ ID NO: 629369 - DNA, 19 bp, Mus musculus
  siRNA target sequence for V1rf2 (NM_134199.2,925-943).
caaatcctgcatactatat

SEQ ID NO: 629370 - DNA, 19 bp, Mus musculus
  siRNA target sequence for V1rf2 (NM_134199.2,987-1005).
gaccagcatatctactgtt

SEQ ID NO: 629371 - DNA, 19 bp, Mus musculus
  siRNA target sequence for V1rf2 (NM_134199.2,1076-1094).
cggagtccagggttataaa

SEQ ID NO: 629372 - DNA, 19 bp, Mus musculus
  siRNA target sequence for V1rf2 (NM_134199.2,1113-1131).
gagtacatttatgttatgt

SEQ ID NO: 629373 - DNA, 19 bp, Mus musculus
  siRNA target sequence for V1rf2 (NM_134199.2,1179-1197).
cccaagctggttactcata

SEQ ID NO: 629374 - DNA, 19 bp, Mus musculus
  siRNA target sequence for V1rf2 (NM_134199.2,1181-1199).
caagctggttactcataaa

SEQ ID NO: 629375 - DNA, 19 bp, Mus musculus
  siRNA target sequence for V1rf2 (NM_134199.2,1200-1218).
catatccattgtcatttct

SEQ ID NO: 629376 - DNA, 19 bp, Mus musculus
  siRNA target sequence for V1rf2 (NM_134199.2,1221-1239).
gtgtttcccagctatgagt

SEQ ID NO: 629377 - DNA, 19 bp, Mus musculus
  siRNA target sequence for V1rf2 (NM_134199.2,1283-1301).
gtgttccttgcatgagaaa

SEQ ID NO: 629378 - DNA, 19 bp, Mus musculus
  siRNA target sequence for V1rf2 (NM_134199.2,1285-1303).
gttccttgcatgagaaatt

SEQ ID NO: 629379 - DNA, 19 bp, Mus musculus
  siRNA target sequence for V1rh9 (NM_134218.1,99-117).
cagttattggggaagttct

SEQ ID NO: 629380 - DNA, 19 bp, Mus musculus
  siRNA target sequence for V1rl1 (NM_134228.1,119-137).
caaggcctatagacctaat

SEQ ID NO: 629381 - DNA, 19 bp, Mus musculus
  siRNA target sequence for V1rl1 (NM_134228.1,122-140).
ggcctatagacctaattgt

SEQ ID NO: 629382 - DNA, 19 bp, Mus musculus
  siRNA target sequence for V1rl1 (NM_134228.1,123-141).
gcctatagacctaattgtt

SEQ ID NO: 629383 - DNA, 19 bp, Mus musculus
  siRNA target sequence for V1rl1 (NM_134228.1,218-236).
catattttctagacgatat

SEQ ID NO: 629384 - DNA, 19 bp, Mus musculus
  siRNA target sequence for V1rl1 (NM_134228.1,226-244).
ctagacgatattacatgta

SEQ ID NO: 629385 - DNA, 19 bp, Mus musculus
  siRNA target sequence for V1rl1 (NM_134228.1,231-249).
cgatattacatgtaaactt

SEQ ID NO: 629386 - DNA, 19 bp, Mus musculus
  siRNA target sequence for V1rl1 (NM_134228.1,324-342).
cactattagcctcaacaat

SEQ ID NO: 629387 - DNA, 19 bp, Mus musculus
  siRNA target sequence for V1rl1 (NM_134228.1,370-388).
gctcccaaaatcattagtt

SEQ ID NO: 629388 - DNA, 19 bp, Mus musculus
  siRNA target sequence for V1rl1 (NM_134228.1,373-391).
cccaaaatcattagttctt

SEQ ID NO: 629389 - DNA, 19 bp, Mus musculus
  siRNA target sequence for V1rl1 (NM_134228.1,407-425).
ggtccctgtgcctacttgt

SEQ ID NO: 629390 - DNA, 19 bp, Mus musculus
  siRNA target sequence for V1rl1 (NM_134228.1,416-434).
gcctacttgtaaatacctt

SEQ ID NO: 629391 - DNA, 19 bp, Mus musculus
  siRNA target sequence for V1rl1 (NM_134228.1,431-449).
ccttcatgatcctaacagt

SEQ ID NO: 629392 - DNA, 19 bp, Mus musculus
  siRNA target sequence for V1rl1 (NM_134228.1,503-521).
gttcagcagtaaagaattt

SEQ ID NO: 629393 - DNA, 19 bp, Mus musculus
  siRNA target sequence for V1rl1 (NM_134228.1,506-524).
cagcagtaaagaatttcaa

SEQ ID NO: 629394 - DNA, 19 bp, Mus musculus
  siRNA target sequence for V1rl1 (NM_134228.1,509-527).
cagtaaagaatttcaaaca

SEQ ID NO: 629395 - DNA, 19 bp, Mus musculus
  siRNA target sequence for V1rl1 (NM_134228.1,528-546).
cattcacacagtatatgca

SEQ ID NO: 629396 - DNA, 19 bp, Mus musculus
  siRNA target sequence for V1rl1 (NM_134228.1,633-651).
gcagaaggtccagtatatt

SEQ ID NO: 629397 - DNA, 19 bp, Mus musculus
  siRNA target sequence for V1rl1 (NM_134228.1,659-677).
ccttggctactaagtcatt

SEQ ID NO: 629398 - DNA, 19 bp, Mus musculus
  siRNA target sequence for V1rl1 (NM_134228.1,660-678).
cttggctactaagtcattt

SEQ ID NO: 629399 - DNA, 19 bp, Mus musculus
  siRNA target sequence for V1rl1 (NM_134228.1,691-709).
gccacacaaagtatttgta

SEQ ID NO: 629400 - DNA, 19 bp, Mus musculus
  siRNA target sequence for V1rl1 (NM_134228.1,739-757).
ggaacttctttcatcttaa

SEQ ID NO: 629401 - DNA, 19 bp, Mus musculus
  siRNA target sequence for V1rl1 (NM_134228.1,746-764).
ctttcatcttaatgatgta

SEQ ID NO: 629402 - DNA, 19 bp, Mus musculus
  siRNA target sequence for V1rl1 (NM_134228.1,794-812).
ggctggtcagtgtcaatgt

SEQ ID NO: 629403 - DNA, 19 bp, Mus musculus
  siRNA target sequence for V1rl1 (NM_134228.1,852-870).
gctcaccagaaactatact

SEQ ID NO: 629404 - DNA, 19 bp, Mus musculus
  siRNA target sequence for V3R3 (NM_030740.1,755-773).
gcactatatacataatcat

SEQ ID NO: 629405 - DNA, 19 bp, Mus musculus
  siRNA target sequence for V3R3 (NM_030740.1,756-774).
cactatatacataatcata

SEQ ID NO: 629406 - DNA, 19 bp, Mus musculus
  siRNA target sequence for V3R3 (NM_030740.1,914-932).
gaggcatgtcatacaactt

SEQ ID NO: 629407 - DNA, 19 bp, Mus musculus
  siRNA target sequence for V3R3 (NM_030740.1,916-934).
ggcatgtcatacaacttat

SEQ ID NO: 629408 - DNA, 19 bp, Mus musculus
  siRNA target sequence for V3R3 (NM_030740.1,918-936).
catgtcatacaacttatga

SEQ ID NO: 629409 - DNA, 19 bp, Mus musculus
  siRNA target sequence for V3R3 (NM_030740.1,1034-1052).
gactaggggagacattaca

SEQ ID NO: 629410 - DNA, 19 bp, Mus musculus
  siRNA target sequence for V3R4 (NM_030739.1,1206-1224).
gttctctgcacatcattgt

SEQ ID NO: 629411 - DNA, 19 bp, Mus musculus
  siRNA target sequence for V3R6 (NM_030738.1,1374-1392).
caactgaggcccattcaga

SEQ ID NO: 629412 - DNA, 19 bp, Mus musculus
  siRNA target sequence for V3R6 (NM_030738.1,1439-1457).
cttgacatttccaaaccat

SEQ ID NO: 629413 - DNA, 19 bp, Mus musculus
  siRNA target sequence for V3R6 (NM_030738.1,1762-1780).
gctcaacttctggtttcaa

SEQ ID NO: 629414 - DNA, 19 bp, Mus musculus
  siRNA target sequence for V3R6 (NM_030738.1,1763-1781).
ctcaacttctggtttcaat

SEQ ID NO: 629415 - DNA, 19 bp, Mus musculus
  siRNA target sequence for V3R6 (NM_030738.1,1785-1803).
ggcatgagcttcttacagt

SEQ ID NO: 629416 - DNA, 19 bp, Mus musculus
  siRNA target sequence for V3R6 (NM_030738.1,1786-1804).
gcatgagcttcttacagtt

SEQ ID NO: 629417 - DNA, 19 bp, Mus musculus
  siRNA target sequence for V3R6 (NM_030738.1,1787-1805).
catgagcttcttacagttt

SEQ ID NO: 629418 - DNA, 19 bp, Mus musculus
  siRNA target sequence for V3R6 (NM_030738.1,1802-1820).
gtttgcccaggatattatt

SEQ ID NO: 629419 - DNA, 19 bp, Mus musculus
  siRNA target sequence for V3R6 (NM_030738.1,2163-2181).
cgtgtcactgggatatcca

SEQ ID NO: 629420 - DNA, 19 bp, Mus musculus
  siRNA target sequence for V3R7 (NM_030737.1,388-406).
cgttgaccaatgaagttgt

SEQ ID NO: 629421 - DNA, 19 bp, Mus musculus
  siRNA target sequence for V3R7 (NM_030737.1,489-507).
ggaactgcagtcaacattt

SEQ ID NO: 629422 - DNA, 19 bp, Mus musculus
  siRNA target sequence for V3R7 (NM_030737.1,493-511).
ctgcagtcaacatttttct

SEQ ID NO: 629423 - DNA, 19 bp, Mus musculus
  siRNA target sequence for V3R7 (NM_030737.1,554-572).
gagacccataaaagtcatt

SEQ ID NO: 629424 - DNA, 19 bp, Mus musculus
  siRNA target sequence for V3R7 (NM_030737.1,556-574).
gacccataaaagtcattct

SEQ ID NO: 629425 - DNA, 19 bp, Mus musculus
  siRNA target sequence for V3R7 (NM_030737.1,606-624).
ctcctctttgcatttccaa

SEQ ID NO: 629426 - DNA, 19 bp, Mus musculus
  siRNA target sequence for V3R7 (NM_030737.1,615-633).
gcatttccaaacaatatga

SEQ ID NO: 629427 - DNA, 19 bp, Mus musculus
  siRNA target sequence for V3R7 (NM_030737.1,796-814).
gaagagcccccaaatttgt

SEQ ID NO: 629428 - DNA, 19 bp, Mus musculus
  siRNA target sequence for V3R7 (NM_030737.1,805-823).
ccaaatttgtgaggtatat

SEQ ID NO: 629429 - DNA, 19 bp, Mus musculus
  siRNA target sequence for V3R7 (NM_030737.1,900-918).
cataatgataccaatacta

SEQ ID NO: 629430 - DNA, 19 bp, Mus musculus
  siRNA target sequence for V3R7 (NM_030737.1,981-999).
catgatgcagtgttcatca

SEQ ID NO: 629431 - DNA, 19 bp, Mus musculus
  siRNA target sequence for V3R7 (NM_030737.1,1052-1070).
ccaaagattgcagcatatt

SEQ ID NO: 629432 - DNA, 19 bp, Mus musculus
  siRNA target sequence for V3R7 (NM_030737.1,1142-1160).
cacatttgtgacctgttat

SEQ ID NO: 629433 - DNA, 19 bp, Mus musculus
  siRNA target sequence for V3R7 (NM_030737.1,1203-1221).
gactctcggctctggttaa

SEQ ID NO: 629434 - DNA, 19 bp, Mus musculus
  siRNA target sequence for V3R8 (NM_030736.1,1756-1774).
cccaaattttgcgaattat

SEQ ID NO: 629435 - DNA, 19 bp, Mus musculus
  siRNA target sequence for V3R8 (NM_030736.1,1757-1775).
ccaaattttgcgaattatt

SEQ ID NO: 629436 - DNA, 19 bp, Mus musculus
  siRNA target sequence for V3R9 (NM_030735.1,824-842).
gtccacgatgccatattca

SEQ ID NO: 629437 - DNA, 19 bp, Mus musculus
  siRNA target sequence for Grm8 (NM_008174.1,294-312).
gacttgaggccatgcttta

SEQ ID NO: 629438 - DNA, 19 bp, Mus musculus
  siRNA target sequence for Grm8 (NM_008174.1,339-357).
ccgatctcctctccaatat

SEQ ID NO: 629439 - DNA, 19 bp, Mus musculus
  siRNA target sequence for Grm8 (NM_008174.1,424-442).
cttcgtgcaggcactgata

SEQ ID NO: 629440 - DNA, 19 bp, Mus musculus
  siRNA target sequence for Grm8 (NM_008174.1,460-478).
cgtgaagtgtgctaatgga

SEQ ID NO: 629441 - DNA, 19 bp, Mus musculus
  siRNA target sequence for Grm8 (NM_008174.1,496-514).
caagcccgacaagatttct

SEQ ID NO: 629442 - DNA, 19 bp, Mus musculus
  siRNA target sequence for Grm8 (NM_008174.1,556-574).
ggctaacattttaagactt

SEQ ID NO: 629443 - DNA, 19 bp, Mus musculus
  siRNA target sequence for Grm8 (NM_008174.1,589-607).
gattagctatgcatctaca

SEQ ID NO: 629444 - DNA, 19 bp, Mus musculus
  siRNA target sequence for Grm8 (NM_008174.1,623-641).
gacaacaccaggtatgatt

SEQ ID NO: 629445 - DNA, 19 bp, Mus musculus
  siRNA target sequence for Grm8 (NM_008174.1,700-718).
gacagccctgggatggaat

SEQ ID NO: 629446 - DNA, 19 bp, Mus musculus
  siRNA target sequence for Grm8 (NM_008174.1,707-725).
ctgggatggaattatgtgt

SEQ ID NO: 629447 - DNA, 19 bp, Mus musculus
  siRNA target sequence for Grm8 (NM_008174.1,733-751).
ggcttccgaggggaactat

SEQ ID NO: 629448 - DNA, 19 bp, Mus musculus
  siRNA target sequence for Grm8 (NM_008174.1,843-861).
gacctggagaattcgaaaa

SEQ ID NO: 629449 - DNA, 19 bp, Mus musculus
  siRNA target sequence for Grm8 (NM_008174.1,845-863).
cctggagaattcgaaaaaa

SEQ ID NO: 629450 - DNA, 19 bp, Mus musculus
  siRNA target sequence for Grm8 (NM_008174.1,846-864).
ctggagaattcgaaaaaat

SEQ ID NO: 629451 - DNA, 19 bp, Mus musculus
  siRNA target sequence for Grm8 (NM_008174.1,851-869).
gaattcgaaaaaattatca

SEQ ID NO: 629452 - DNA, 19 bp, Mus musculus
  siRNA target sequence for Grm8 (NM_008174.1,889-907).
caacgctcgcgcagtgatt

SEQ ID NO: 629453 - DNA, 19 bp, Mus musculus
  siRNA target sequence for Grm8 (NM_008174.1,893-911).
gctcgcgcagtgattatgt

SEQ ID NO: 629454 - DNA, 19 bp, Mus musculus
  siRNA target sequence for Grm8 (NM_008174.1,894-912).
ctcgcgcagtgattatgtt

SEQ ID NO: 629455 - DNA, 19 bp, Mus musculus
  siRNA target sequence for Grm8 (NM_008174.1,980-998).
ctatggattggctcagata

SEQ ID NO: 629456 - DNA, 19 bp, Mus musculus
  siRNA target sequence for Grm8 (NM_008174.1,995-1013).
gatagttggggatccaaaa

SEQ ID NO: 629457 - DNA, 19 bp, Mus musculus
  siRNA target sequence for Grm8 (NM_008174.1,1009-1027).
caaaatagcacctgtctat

SEQ ID NO: 629458 - DNA, 19 bp, Mus musculus
  siRNA target sequence for Grm8 (NM_008174.1,1066-1084).
gcccaaaagagcatcaatt

SEQ ID NO: 629459 - DNA, 19 bp, Mus musculus
  siRNA target sequence for Grm8 (NM_008174.1,1068-1086).
ccaaaagagcatcaattga

SEQ ID NO: 629460 - DNA, 19 bp, Mus musculus
  siRNA target sequence for Grm8 (NM_008174.1,1069-1087).
caaaagagcatcaattgat

SEQ ID NO: 629461 - DNA, 19 bp, Mus musculus
  siRNA target sequence for Grm8 (NM_008174.1,1102-1120).
ctttagaagccgaactctt

SEQ ID NO: 629462 - DNA, 19 bp, Mus musculus
  siRNA target sequence for Grm8 (NM_008174.1,1110-1128).
gccgaactcttgccaataa

SEQ ID NO: 629463 - DNA, 19 bp, Mus musculus
  siRNA target sequence for Grm8 (NM_008174.1,1122-1140).
ccaataatcgaagaaatgt

SEQ ID NO: 629464 - DNA, 19 bp, Mus musculus
  siRNA target sequence for Grm8 (NM_008174.1,1200-1218).
ggaacagtcatataaagaa

SEQ ID NO: 629465 - DNA, 19 bp, Mus musculus
  siRNA target sequence for Grm8 (NM_008174.1,1235-1253).
cgaattgcacgggattcat

SEQ ID NO: 629466 - DNA, 19 bp, Mus musculus
  siRNA target sequence for Grm8 (NM_008174.1,1254-1272).
cttacgaacaagaaggaaa

SEQ ID NO: 629467 - DNA, 19 bp, Mus musculus
  siRNA target sequence for Grm8 (NM_008174.1,1269-1287).
gaaaggttcaatttgtaat

SEQ ID NO: 629468 - DNA, 19 bp, Mus musculus
  siRNA target sequence for Grm8 (NM_008174.1,1358-1376).
ctttgcccaaggatggtta

SEQ ID NO: 629469 - DNA, 19 bp, Mus musculus
  siRNA target sequence for Grm8 (NM_008174.1,1362-1380).
gcccaaggatggttaccat

SEQ ID NO: 629470 - DNA, 19 bp, Mus musculus
  siRNA target sequence for Grm8 (NM_008174.1,1408-1426).
cagggccgtgaattttaat

SEQ ID NO: 629471 - DNA, 19 bp, Mus musculus
  siRNA target sequence for Grm8 (NM_008174.1,1436-1454).
ggtacacctgtcactttta

SEQ ID NO: 629472 - DNA, 19 bp, Mus musculus
  siRNA target sequence for Grm8 (NM_008174.1,1437-1455).
gtacacctgtcacttttaa

SEQ ID NO: 629473 - DNA, 19 bp, Mus musculus
  siRNA target sequence for Grm8 (NM_008174.1,1440-1458).
cacctgtcacttttaatga

SEQ ID NO: 629474 - DNA, 19 bp, Mus musculus
  siRNA target sequence for Grm8 (NM_008174.1,1469-1487).
gctccgggacgctacgata

SEQ ID NO: 629475 - DNA, 19 bp, Mus musculus
  siRNA target sequence for Grm8 (NM_008174.1,1470-1488).
ctccgggacgctacgatat

SEQ ID NO: 629476 - DNA, 19 bp, Mus musculus
  siRNA target sequence for Grm8 (NM_008174.1,1472-1490).
ccgggacgctacgatatct

SEQ ID NO: 629477 - DNA, 19 bp, Mus musculus
  siRNA target sequence for Grm8 (NM_008174.1,1473-1491).
cgggacgctacgatatctt

SEQ ID NO: 629478 - DNA, 19 bp, Mus musculus
  siRNA target sequence for Grm8 (NM_008174.1,1478-1496).
cgctacgatatcttccaat

SEQ ID NO: 629479 - DNA, 19 bp, Mus musculus
  siRNA target sequence for Grm8 (NM_008174.1,1479-1497).
gctacgatatcttccaata

SEQ ID NO: 629480 - DNA, 19 bp, Mus musculus
  siRNA target sequence for Grm8 (NM_008174.1,1480-1498).
ctacgatatcttccaatat

SEQ ID NO: 629481 - DNA, 19 bp, Mus musculus
  siRNA target sequence for Grm8 (NM_008174.1,1501-1519).
gataaacaacaaaagtaca

SEQ ID NO: 629482 - DNA, 19 bp, Mus musculus
  siRNA target sequence for Grm8 (NM_008174.1,1510-1528).
caaaagtacagaatacaaa

SEQ ID NO: 629483 - DNA, 19 bp, Mus musculus
  siRNA target sequence for Grm8 (NM_008174.1,1536-1554).
gccactggaccaatcaact

SEQ ID NO: 629484 - DNA, 19 bp, Mus musculus
  siRNA target sequence for Grm8 (NM_008174.1,1571-1589).
gacatgcagtgggctaata

SEQ ID NO: 629485 - DNA, 19 bp, Mus musculus
  siRNA target sequence for Grm8 (NM_008174.1,1688-1706).
cgctgcgagggttataact

SEQ ID NO: 629486 - DNA, 19 bp, Mus musculus
  siRNA target sequence for Grm8 (NM_008174.1,1689-1707).
gctgcgagggttataacta

SEQ ID NO: 629487 - DNA, 19 bp, Mus musculus
  siRNA target sequence for Grm8 (NM_008174.1,1745-1763).
gatcagagaccaaacatca

SEQ ID NO: 629488 - DNA, 19 bp, Mus musculus
  siRNA target sequence for Grm8 (NM_008174.1,1879-1897).
gacctttgtccgctataat

SEQ ID NO: 629489 - DNA, 19 bp, Mus musculus
  siRNA target sequence for Grm8 (NM_008174.1,1991-2009).
gcggcacctgacacaatca

SEQ ID NO: 629490 - DNA, 19 bp, Mus musculus
  siRNA target sequence for Grm8 (NM_008174.1,1992-2010).
cggcacctgacacaatcat

SEQ ID NO: 629491 - DNA, 19 bp, Mus musculus
  siRNA target sequence for Grm8 (NM_008174.1,2036-2054).
ggacttggtatgtgtttca

SEQ ID NO: 629492 - DNA, 19 bp, Mus musculus
  siRNA target sequence for Grm8 (NM_008174.1,2085-2103).
gtatccaccgaatattcga

SEQ ID NO: 629493 - DNA, 19 bp, Mus musculus
  siRNA target sequence for Grm8 (NM_008174.1,2101-2119).
cgagcaagggaagaaatct

SEQ ID NO: 629494 - DNA, 19 bp, Mus musculus
  siRNA target sequence for Grm8 (NM_008174.1,2305-2323).
cgatctgtcactcatttgt

SEQ ID NO: 629495 - DNA, 19 bp, Mus musculus
  siRNA target sequence for Grm8 (NM_008174.1,2306-2324).
gatctgtcactcatttgtt

SEQ ID NO: 629496 - DNA, 19 bp, Mus musculus
  siRNA target sequence for Grm8 (NM_008174.1,2322-2340).
gttcactgggatacagtat

SEQ ID NO: 629497 - DNA, 19 bp, Mus musculus
  siRNA target sequence for Grm8 (NM_008174.1,2735-2753).
cttgaaaccaacacttctt

SEQ ID NO: 629498 - DNA, 19 bp, Mus musculus
  siRNA target sequence for Grm8 (NM_008174.1,2738-2756).
gaaaccaacacttcttcta

SEQ ID NO: 629499 - DNA, 19 bp, Mus musculus
  siRNA target sequence for Grm3 (NM_181850.1,890-908).
gccaaactcagcgacaaat

SEQ ID NO: 629500 - DNA, 19 bp, Mus musculus
  siRNA target sequence for Grm3 (NM_181850.1,901-919).
cgacaaatcgcgctatgat

SEQ ID NO: 629501 - DNA, 19 bp, Mus musculus
  siRNA target sequence for Grm3 (NM_181850.1,902-920).
gacaaatcgcgctatgatt

SEQ ID NO: 629502 - DNA, 19 bp, Mus musculus
  siRNA target sequence for Grm3 (NM_181850.1,904-922).
caaatcgcgctatgattat

SEQ ID NO: 629503 - DNA, 19 bp, Mus musculus
  siRNA target sequence for Grm3 (NM_181850.1,970-988).
cgagatcttgcgctacttt

SEQ ID NO: 629504 - DNA, 19 bp, Mus musculus
  siRNA target sequence for Grm3 (NM_181850.1,971-989).
gagatcttgcgctacttta

SEQ ID NO: 629505 - DNA, 19 bp, Mus musculus
  siRNA target sequence for Grm3 (NM_181850.1,1064-1082).
gcaaggctacgcaacatct

SEQ ID NO: 629506 - DNA, 19 bp, Mus musculus
  siRNA target sequence for Grm3 (NM_181850.1,1226-1244).
gccagccgcgtgaatgctt

SEQ ID NO: 629507 - DNA, 19 bp, Mus musculus
  siRNA target sequence for Grm3 (NM_181850.1,1384-1402).
caacccctacaacaatcat

SEQ ID NO: 629508 - DNA, 19 bp, Mus musculus
  siRNA target sequence for Grm3 (NM_181850.1,1389-1407).
cctacaacaatcatcgtaa

SEQ ID NO: 629509 - DNA, 19 bp, Mus musculus
  siRNA target sequence for Grm3 (NM_181850.1,1504-1522).
cagcagcaactatgaacaa

SEQ ID NO: 629510 - DNA, 19 bp, Mus musculus
  siRNA target sequence for Grm3 (NM_181850.1,1506-1524).
gcagcaactatgaacaaga

SEQ ID NO: 629511 - DNA, 19 bp, Mus musculus
  siRNA target sequence for Grm3 (NM_181850.1,1520-1538).
caagaatccaagatcatgt

SEQ ID NO: 629512 - DNA, 19 bp, Mus musculus
  siRNA target sequence for Grm3 (NM_181850.1,1565-1583).
gcgcatgcgctgcacaaaa

SEQ ID NO: 629513 - DNA, 19 bp, Mus musculus
  siRNA target sequence for Grm3 (NM_181850.1,1566-1584).
cgcatgcgctgcacaaaat

SEQ ID NO: 629514 - DNA, 19 bp, Mus musculus
  siRNA target sequence for Grm3 (NM_181850.1,1688-1706).
gctccattcaacccaaata

SEQ ID NO: 629515 - DNA, 19 bp, Mus musculus
  siRNA target sequence for Grm3 (NM_181850.1,1689-1707).
ctccattcaacccaaataa

SEQ ID NO: 629516 - DNA, 19 bp, Mus musculus
  siRNA target sequence for Grm3 (NM_181850.1,1709-1727).
ggagcagacagcattgtga

SEQ ID NO: 629517 - DNA, 19 bp, Mus musculus
  siRNA target sequence for Grm3 (NM_181850.1,1710-1728).
gagcagacagcattgtgaa

SEQ ID NO: 629518 - DNA, 19 bp, Mus musculus
  siRNA target sequence for Grm3 (NM_181850.1,1758-1776).
gatacaacgtgttcaactt

SEQ ID NO: 629519 - DNA, 19 bp, Mus musculus
  siRNA target sequence for Grm3 (NM_181850.1,1771-1789).
caacttccagcatataggt

SEQ ID NO: 629520 - DNA, 19 bp, Mus musculus
  siRNA target sequence for Grm3 (NM_181850.1,1780-1798).
gcatataggtggaaagtat

SEQ ID NO: 629521 - DNA, 19 bp, Mus musculus
  siRNA target sequence for Grm3 (NM_181850.1,1815-1833).
gccactgggcagaaacttt

SEQ ID NO: 629522 - DNA, 19 bp, Mus musculus
  siRNA target sequence for Grm3 (NM_181850.1,1819-1837).
ctgggcagaaactttatat

SEQ ID NO: 629523 - DNA, 19 bp, Mus musculus
  siRNA target sequence for Grm3 (NM_181850.1,1821-1839).
gggcagaaactttatatct

SEQ ID NO: 629524 - DNA, 19 bp, Mus musculus
  siRNA target sequence for Grm3 (NM_181850.1,1904-1922).
gcccccaatgaaatgaaaa

SEQ ID NO: 629525 - DNA, 19 bp, Mus musculus
  siRNA target sequence for Grm3 (NM_181850.1,1960-1978).
cccatgtgagccctatgaa

SEQ ID NO: 629526 - DNA, 19 bp, Mus musculus
  siRNA target sequence for Grm3 (NM_181850.1,1961-1979).
ccatgtgagccctatgaat

SEQ ID NO: 629527 - DNA, 19 bp, Mus musculus
  siRNA target sequence for Grm3 (NM_181850.1,1962-1980).
catgtgagccctatgaata

SEQ ID NO: 629528 - DNA, 19 bp, Mus musculus
  siRNA target sequence for Grm3 (NM_181850.1,1991-2009).
gagttcacctgcatggatt

SEQ ID NO: 629529 - DNA, 19 bp, Mus musculus
  siRNA target sequence for Grm3 (NM_181850.1,2094-2112).
caataggcccagtcactat

SEQ ID NO: 629530 - DNA, 19 bp, Mus musculus
  siRNA target sequence for Grm3 (NM_181850.1,2225-2243).
ggagttagcctgtcctatt

SEQ ID NO: 629531 - DNA, 19 bp, Mus musculus
  siRNA target sequence for Grm3 (NM_181850.1,2228-2246).
gttagcctgtcctattgca

SEQ ID NO: 629532 - DNA, 19 bp, Mus musculus
  siRNA target sequence for Grm3 (NM_181850.1,2336-2354).
gctctcctgaccaagacaa

SEQ ID NO: 629533 - DNA, 19 bp, Mus musculus
  siRNA target sequence for Grm3 (NM_181850.1,2390-2408).
ggcgctcagaggccaaaat

SEQ ID NO: 629534 - DNA, 19 bp, Mus musculus
  siRNA target sequence for Grm3 (NM_181850.1,2391-2409).
gcgctcagaggccaaaatt

SEQ ID NO: 629535 - DNA, 19 bp, Mus musculus
  siRNA target sequence for Grm3 (NM_181850.1,2393-2411).
gctcagaggccaaaattca

SEQ ID NO: 629536 - DNA, 19 bp, Mus musculus
  siRNA target sequence for Grm3 (NM_181850.1,2396-2414).
cagaggccaaaattcatca

SEQ ID NO: 629537 - DNA, 19 bp, Mus musculus
  siRNA target sequence for Grm3 (NM_181850.1,2445-2463).
gtttgatactggtgcaaat

SEQ ID NO: 629538 - DNA, 19 bp, Mus musculus
  siRNA target sequence for Grm3 (NM_181850.1,2494-2512).
gactccaggtactagaaga

SEQ ID NO: 629539 - DNA, 19 bp, Mus musculus
  siRNA target sequence for Grm3 (NM_181850.1,2523-2541).
cagagaagcgggaaacagt

SEQ ID NO: 629540 - DNA, 19 bp, Mus musculus
  siRNA target sequence for Grm3 (NM_181850.1,2531-2549).
cgggaaacagtcatcctaa

SEQ ID NO: 629541 - DNA, 19 bp, Mus musculus
  siRNA target sequence for Grm3 (NM_181850.1,2533-2551).
ggaaacagtcatcctaaaa

SEQ ID NO: 629542 - DNA, 19 bp, Mus musculus
  siRNA target sequence for Grm3 (NM_181850.1,2534-2552).
gaaacagtcatcctaaaat

SEQ ID NO: 629543 - DNA, 19 bp, Mus musculus
  siRNA target sequence for Grm3 (NM_181850.1,2538-2556).
cagtcatcctaaaatgcaa

SEQ ID NO: 629544 - DNA, 19 bp, Mus musculus
  siRNA target sequence for Grm3 (NM_181850.1,2564-2582).
gattccagcatgttgatct

SEQ ID NO: 629545 - DNA, 19 bp, Mus musculus
  siRNA target sequence for Grm3 (NM_181850.1,2596-2614).
cgtggttctggtgattcta

SEQ ID NO: 629546 - DNA, 19 bp, Mus musculus
  siRNA target sequence for Grm3 (NM_181850.1,2597-2615).
gtggttctggtgattctat

SEQ ID NO: 629547 - DNA, 19 bp, Mus musculus
  siRNA target sequence for Grm3 (NM_181850.1,2608-2626).
gattctatgcactgtgtat

SEQ ID NO: 629548 - DNA, 19 bp, Mus musculus
  siRNA target sequence for Grm3 (NM_181850.1,2713-2731).
ggcattcctccctatattt

SEQ ID NO: 629549 - DNA, 19 bp, Mus musculus
  siRNA target sequence for Grm3 (NM_181850.1,2714-2732).
gcattcctccctatatttt

SEQ ID NO: 629550 - DNA, 19 bp, Mus musculus
  siRNA target sequence for Grm3 (NM_181850.1,2715-2733).
cattcctccctatatttta

SEQ ID NO: 629551 - DNA, 19 bp, Mus musculus
  siRNA target sequence for Grm3 (NM_181850.1,2845-2863).
gttccaaccccagaagaat

SEQ ID NO: 629552 - DNA, 19 bp, Mus musculus
  siRNA target sequence for Grm3 (NM_181850.1,2906-2924).
ggaactgcgaccacatatt

SEQ ID NO: 629553 - DNA, 19 bp, Mus musculus
  siRNA target sequence for 4930518C23Rik (NM_175670.2,745-763).
gactctcatcatacacttt

SEQ ID NO: 629554 - DNA, 19 bp, Mus musculus
  siRNA target sequence for 4930518C23Rik (NM_175670.2,1441-1459).
cacttgtgacttattggaa

SEQ ID NO: 629555 - DNA, 19 bp, Mus musculus
  siRNA target sequence for 4930518C23Rik (NM_175670.2,1557-1575).
gagcagaaatagaacttaa

SEQ ID NO: 629556 - DNA, 19 bp, Mus musculus
  siRNA target sequence for 4930518C23Rik (NM_175670.2,1596-1614).
gtgggtattatgatatcct

SEQ ID NO: 629557 - DNA, 19 bp, Mus musculus
  siRNA target sequence for 4930518C23Rik (NM_175670.2,1652-1670).
gtcaaggttggagaataca

SEQ ID NO: 629558 - DNA, 19 bp, Mus musculus
  siRNA target sequence for 4930518C23Rik (NM_175670.2,1697-1715).
gttcttccaaagaactcat

SEQ ID NO: 629559 - DNA, 19 bp, Mus musculus
  siRNA target sequence for D430014M15 (NM_177764.2,2951-2969).
ggtcacctctccatctaga

SEQ ID NO: 629560 - DNA, 19 bp, Mus musculus
  siRNA target sequence for D430014M15 (NM_177764.2,3398-3416).
gtgctacataattttgtta

SEQ ID NO: 629561 - DNA, 19 bp, Mus musculus
  siRNA target sequence for Gabbr1 (NM_019439.2,299-317).
cggaaggttgccagattat

SEQ ID NO: 629562 - DNA, 19 bp, Mus musculus
  siRNA target sequence for Gabbr1 (NM_019439.2,342-360).
caggtaccgtggcttgatt

SEQ ID NO: 629563 - DNA, 19 bp, Mus musculus
  siRNA target sequence for Gabbr1 (NM_019439.2,367-385).
caggtgaaggccatcaatt

SEQ ID NO: 629564 - DNA, 19 bp, Mus musculus
  siRNA target sequence for Gabbr1 (NM_019439.2,394-412).
gtggactatgagattgaat

SEQ ID NO: 629565 - DNA, 19 bp, Mus musculus
  siRNA target sequence for Gabbr1 (NM_019439.2,396-414).
ggactatgagattgaatat

SEQ ID NO: 629566 - DNA, 19 bp, Mus musculus
  siRNA target sequence for Gabbr1 (NM_019439.2,527-545).
cttatttgaccctggaaaa

SEQ ID NO: 629567 - DNA, 19 bp, Mus musculus
  siRNA target sequence for Gabbr1 (NM_019439.2,713-731).
cagaacggcgtgcagtata

SEQ ID NO: 629568 - DNA, 19 bp, Mus musculus
  siRNA target sequence for Gabbr1 (NM_019439.2,715-733).
gaacggcgtgcagtataca

SEQ ID NO: 629569 - DNA, 19 bp, Mus musculus
  siRNA target sequence for Gabbr1 (NM_019439.2,802-820).
gcgctggaggacgttaaca

SEQ ID NO: 629570 - DNA, 19 bp, Mus musculus
  siRNA target sequence for Gabbr1 (NM_019439.2,841-859).
gactacgagctcaagctta

SEQ ID NO: 629571 - DNA, 19 bp, Mus musculus
  siRNA target sequence for Gabbr1 (NM_019439.2,893-911).
ccaccaagtacttgtatga

SEQ ID NO: 629572 - DNA, 19 bp, Mus musculus
  siRNA target sequence for Gabbr1 (NM_019439.2,896-914).
ccaagtacttgtatgaact

SEQ ID NO: 629573 - DNA, 19 bp, Mus musculus
  siRNA target sequence for Gabbr1 (NM_019439.2,897-915).
caagtacttgtatgaacta

SEQ ID NO: 629574 - DNA, 19 bp, Mus musculus
  siRNA target sequence for Gabbr1 (NM_019439.2,988-1006).
gcccggatgtggaacctta

SEQ ID NO: 629575 - DNA, 19 bp, Mus musculus
  siRNA target sequence for Gabbr1 (NM_019439.2,989-1007).
cccggatgtggaaccttat

SEQ ID NO: 629576 - DNA, 19 bp, Mus musculus
  siRNA target sequence for Gabbr1 (NM_019439.2,990-1008).
ccggatgtggaaccttatt

SEQ ID NO: 629577 - DNA, 19 bp, Mus musculus
  siRNA target sequence for Gabbr1 (NM_019439.2,992-1010).
ggatgtggaaccttattgt

SEQ ID NO: 629578 - DNA, 19 bp, Mus musculus
  siRNA target sequence for Gabbr1 (NM_019439.2,1053-1071).
gcggtttccaacgttcttt

SEQ ID NO: 629579 - DNA, 19 bp, Mus musculus
  siRNA target sequence for Gabbr1 (NM_019439.2,1102-1120).
cccacccgggtgaaactct

SEQ ID NO: 629580 - DNA, 19 bp, Mus musculus
  siRNA target sequence for Gabbr1 (NM_019439.2,1103-1121).
ccacccgggtgaaactctt

SEQ ID NO: 629581 - DNA, 19 bp, Mus musculus
  siRNA target sequence for Gabbr1 (NM_019439.2,1108-1126).
cgggtgaaactcttcgaaa

SEQ ID NO: 629582 - DNA, 19 bp, Mus musculus
  siRNA target sequence for Gabbr1 (NM_019439.2,1221-1239).
gattgagatcacttttcga

SEQ ID NO: 629583 - DNA, 19 bp, Mus musculus
  siRNA target sequence for Gabbr1 (NM_019439.2,1286-1304).
gtcaagatgctcgaatcat

SEQ ID NO: 629584 - DNA, 19 bp, Mus musculus
  siRNA target sequence for Gabbr1 (NM_019439.2,1302-1320).
catcgtgggacttttctat

SEQ ID NO: 629585 - DNA, 19 bp, Mus musculus
  siRNA target sequence for Gabbr1 (NM_019439.2,1306-1324).
gtgggacttttctatgaga

SEQ ID NO: 629586 - DNA, 19 bp, Mus musculus
  siRNA target sequence for Gabbr1 (NM_019439.2,1323-1341).
gaccgaagcccggaaagtt

SEQ ID NO: 629587 - DNA, 19 bp, Mus musculus
  siRNA target sequence for Gabbr1 (NM_019439.2,1325-1343).
ccgaagcccggaaagtttt

SEQ ID NO: 629588 - DNA, 19 bp, Mus musculus
  siRNA target sequence for Gabbr1 (NM_019439.2,1331-1349).
cccggaaagttttttgtga

SEQ ID NO: 629589 - DNA, 19 bp, Mus musculus
  siRNA target sequence for Gabbr1 (NM_019439.2,1408-1426).
gctgacaactggttcaaaa

SEQ ID NO: 629590 - DNA, 19 bp, Mus musculus
  siRNA target sequence for Gabbr1 (NM_019439.2,1411-1429).
gacaactggttcaaaacct

SEQ ID NO: 629591 - DNA, 19 bp, Mus musculus
  siRNA target sequence for Gabbr1 (NM_019439.2,1413-1431).
caactggttcaaaacctat

SEQ ID NO: 629592 - DNA, 19 bp, Mus musculus
  siRNA target sequence for Gabbr1 (NM_019439.2,1427-1445).
cctatgacccgtcaatcaa

SEQ ID NO: 629593 - DNA, 19 bp, Mus musculus
  siRNA target sequence for Gabbr1 (NM_019439.2,1428-1446).
ctatgacccgtcaatcaat

SEQ ID NO: 629594 - DNA, 19 bp, Mus musculus
  siRNA target sequence for Gabbr1 (NM_019439.2,1432-1450).
gacccgtcaatcaattgta

SEQ ID NO: 629595 - DNA, 19 bp, Mus musculus
  siRNA target sequence for Gabbr1 (NM_019439.2,1471-1489).
gcggtggagggccatatca

SEQ ID NO: 629596 - DNA, 19 bp, Mus musculus
  siRNA target sequence for Gabbr1 (NM_019439.2,1567-1585).
ctaaccaagcggctgaaaa

SEQ ID NO: 629597 - DNA, 19 bp, Mus musculus
  siRNA target sequence for Gabbr1 (NM_019439.2,1705-1723).
gaggactttaactacaaca

SEQ ID NO: 629598 - DNA, 19 bp, Mus musculus
  siRNA target sequence for Gabbr1 (NM_019439.2,1719-1737).
caacaaccagaccattaca

SEQ ID NO: 629599 - DNA, 19 bp, Mus musculus
  siRNA target sequence for Gabbr1 (NM_019439.2,1730-1748).
ccattacagaccaaatcta

SEQ ID NO: 629600 - DNA, 19 bp, Mus musculus
  siRNA target sequence for Gabbr1 (NM_019439.2,1881-1899).
cagcaccaaggatgatctt

SEQ ID NO: 629601 - DNA, 19 bp, Mus musculus
  siRNA target sequence for Gabbr1 (NM_019439.2,1948-1966).
cagaccttggtcatcaaga

SEQ ID NO: 629602 - DNA, 19 bp, Mus musculus
  siRNA target sequence for Gabbr1 (NM_019439.2,1952-1970).
ccttggtcatcaagacatt

SEQ ID NO: 629603 - DNA, 19 bp, Mus musculus
  siRNA target sequence for Gabbr1 (NM_019439.2,2064-2082).
caactcccacgctcgttat

SEQ ID NO: 629604 - DNA, 19 bp, Mus musculus
  siRNA target sequence for Gabbr1 (NM_019439.2,2074-2092).
gctcgttatatccagaatt

SEQ ID NO: 629605 - DNA, 19 bp, Mus musculus
  siRNA target sequence for Gabbr1 (NM_019439.2,2226-2244).
cttgggcttgggctttagt

SEQ ID NO: 629606 - DNA, 19 bp, Mus musculus
  siRNA target sequence for Gabbr1 (NM_019439.2,2597-2615).
gcgtgtccactgaaaagat

SEQ ID NO: 629607 - DNA, 19 bp, Mus musculus
  siRNA target sequence for Gabbr1 (NM_019439.2,2601-2619).
gtccactgaaaagatcaat

SEQ ID NO: 629608 - DNA, 19 bp, Mus musculus
  siRNA target sequence for Gabbr1 (NM_019439.2,2603-2621).
ccactgaaaagatcaatga

SEQ ID NO: 629609 - DNA, 19 bp, Mus musculus
  siRNA target sequence for Gabbr1 (NM_019439.2,2630-2648).
ccgtgggcatggctatcta

SEQ ID NO: 629610 - DNA, 19 bp, Mus musculus
  siRNA target sequence for Gabbr1 (NM_019439.2,2632-2650).
gtgggcatggctatctaca

SEQ ID NO: 629611 - DNA, 19 bp, Mus musculus
  siRNA target sequence for Gabbr1 (NM_019439.2,2634-2652).
gggcatggctatctacaat

SEQ ID NO: 629612 - DNA, 19 bp, Mus musculus
  siRNA target sequence for Gabbr1 (NM_019439.2,2680-2698).
cctgtgaccatgatccttt

SEQ ID NO: 629613 - DNA, 19 bp, Mus musculus
  siRNA target sequence for Gabbr1 (NM_019439.2,2734-2752).
ctggccatcgtgttctctt

SEQ ID NO: 629614 - DNA, 19 bp, Mus musculus
  siRNA target sequence for Gabbr1 (NM_019439.2,2762-2780).
ctctggttgtgctctttgt

SEQ ID NO: 629615 - DNA, 19 bp, Mus musculus
  siRNA target sequence for Gabbr1 (NM_019439.2,3077-3095).
ggagtcgagtacatttgct

SEQ ID NO: 629616 - DNA, 19 bp, Mus musculus
  siRNA target sequence for Gabbr1 (NM_019439.2,3078-3096).
gagtcgagtacatttgctt

SEQ ID NO: 629617 - DNA, 19 bp, Mus musculus
  siRNA target sequence for Gabbr1 (NM_019439.2,3080-3098).
gtcgagtacatttgcttta

SEQ ID NO: 629618 - DNA, 19 bp, Mus musculus
  siRNA target sequence for Gabbr1 (NM_019439.2,3083-3101).
gagtacatttgctttacaa

SEQ ID NO: 629619 - DNA, 19 bp, Mus musculus
  siRNA target sequence for Gabbr1 (NM_019439.2,3085-3103).
gtacatttgctttacaagt

SEQ ID NO: 629620 - DNA, 19 bp, Mus musculus
  siRNA target sequence for Gpr156 (NM_153394.2,544-562).
cccttcatgatctttgcaa

SEQ ID NO: 629621 - DNA, 19 bp, Mus musculus
  siRNA target sequence for Gpr156 (NM_153394.2,576-594).
gagtcccagcacagtagta

SEQ ID NO: 629622 - DNA, 19 bp, Mus musculus
  siRNA target sequence for Gpr156 (NM_153394.2,616-634).
ctgccctcttggggattat

SEQ ID NO: 629623 - DNA, 19 bp, Mus musculus
  siRNA target sequence for Gpr156 (NM_153394.2,822-840).
gtagaagctctcattcaga

SEQ ID NO: 629624 - DNA, 19 bp, Mus musculus
  siRNA target sequence for Gpr156 (NM_153394.2,899-917).
gagctggcgactctacaaa

SEQ ID NO: 629625 - DNA, 19 bp, Mus musculus
  siRNA target sequence for Gpr156 (NM_153394.2,901-919).
gctggcgactctacaaagt

SEQ ID NO: 629626 - DNA, 19 bp, Mus musculus
  siRNA target sequence for Gpr156 (NM_153394.2,937-955).
cggacaagagagtgatcat

SEQ ID NO: 629627 - DNA, 19 bp, Mus musculus
  siRNA target sequence for Gpr156 (NM_153394.2,941-959).
caagagagtgatcatcaaa

SEQ ID NO: 629628 - DNA, 19 bp, Mus musculus
  siRNA target sequence for Gpr156 (NM_153394.2,1233-1251).
ccagtgaaccagtccttaa

SEQ ID NO: 629629 - DNA, 19 bp, Mus musculus
  siRNA target sequence for Gpr156 (NM_153394.2,1453-1471).
gacacatggccaaatactt

SEQ ID NO: 629630 - DNA, 19 bp, Mus musculus
  siRNA target sequence for Gpr156 (NM_153394.2,1550-1568).
ggagaggctcctaacagaa

SEQ ID NO: 629631 - DNA, 19 bp, Mus musculus
  siRNA target sequence for Gpr156 (NM_153394.2,1551-1569).
gagaggctcctaacagaaa

SEQ ID NO: 629632 - DNA, 19 bp, Mus musculus
  siRNA target sequence for Gpr156 (NM_153394.2,1564-1582).
cagaaaaaaacgcagtaat

SEQ ID NO: 629633 - DNA, 19 bp, Mus musculus
  siRNA target sequence for Gpr156 (NM_153394.2,1729-1747).
ctgctgtttcggagaatga

SEQ ID NO: 629634 - DNA, 19 bp, Mus musculus
  siRNA target sequence for Gpr156 (NM_153394.2,1853-1871).
ggacaacatgcctttaaaa

SEQ ID NO: 629635 - DNA, 19 bp, Mus musculus
  siRNA target sequence for Gpr156 (NM_153394.2,1862-1880).
gcctttaaaacagtattgt

SEQ ID NO: 629636 - DNA, 19 bp, Mus musculus
  siRNA target sequence for Gpr156 (NM_153394.2,2183-2201).
gaagctgtccccatctaaa

SEQ ID NO: 629637 - DNA, 19 bp, Mus musculus
  siRNA target sequence for Gpr156 (NM_153394.2,2286-2304).
gtggggcatcaagcaaata

SEQ ID NO: 629638 - DNA, 19 bp, Mus musculus
  siRNA target sequence for Gpr156 (NM_153394.2,2288-2306).
ggggcatcaagcaaatagt

SEQ ID NO: 629639 - DNA, 19 bp, Mus musculus
  siRNA target sequence for Gpr156 (NM_153394.2,2289-2307).
gggcatcaagcaaatagta

SEQ ID NO: 629640 - DNA, 19 bp, Mus musculus
  siRNA target sequence for Gpr156 (NM_153394.2,2309-2327).
cgtttctagttcacaaagt

SEQ ID NO: 629641 - DNA, 19 bp, Mus musculus
  siRNA target sequence for Gpr156 (NM_153394.2,2320-2338).
cacaaagtgggcttattgt

SEQ ID NO: 629642 - DNA, 19 bp, Mus musculus
  siRNA target sequence for Gpr156 (NM_153394.2,2326-2344).
gtgggcttattgtacagaa

SEQ ID NO: 629643 - DNA, 19 bp, Mus musculus
  siRNA target sequence for Gpr156 (NM_153394.2,2497-2515).
gagcatgcaatgtagcttt

SEQ ID NO: 629644 - DNA, 19 bp, Mus musculus
  siRNA target sequence for Gpr156 (NM_153394.2,2674-2692).
gcagctcagacgagttctt

SEQ ID NO: 629645 - DNA, 19 bp, Mus musculus
  siRNA target sequence for Gprc2a (NM_013803.1,603-621).
caaaagaagggggacatta

SEQ ID NO: 629646 - DNA, 19 bp, Mus musculus
  siRNA target sequence for Gprc2a (NM_013803.1,624-642).
ctaggaggtctctttccta

SEQ ID NO: 629647 - DNA, 19 bp, Mus musculus
  siRNA target sequence for Gprc2a (NM_013803.1,630-648).
ggtctctttcctatccatt

SEQ ID NO: 629648 - DNA, 19 bp, Mus musculus
  siRNA target sequence for Gprc2a (NM_013803.1,696-714).
gtggagtgcatcaggtata

SEQ ID NO: 629649 - DNA, 19 bp, Mus musculus
  siRNA target sequence for Gprc2a (NM_013803.1,699-717).
gagtgcatcaggtataact

SEQ ID NO: 629650 - DNA, 19 bp, Mus musculus
  siRNA target sequence for Gprc2a (NM_013803.1,719-737).
ccgtggattccgatggtta

SEQ ID NO: 629651 - DNA, 19 bp, Mus musculus
  siRNA target sequence for Gprc2a (NM_013803.1,733-751).
ggttacaagccatgatctt

SEQ ID NO: 629652 - DNA, 19 bp, Mus musculus
  siRNA target sequence for Gprc2a (NM_013803.1,734-752).
gttacaagccatgatcttt

SEQ ID NO: 629653 - DNA, 19 bp, Mus musculus
  siRNA target sequence for Gprc2a (NM_013803.1,797-815).
gactctgggatataggata

SEQ ID NO: 629654 - DNA, 19 bp, Mus musculus
  siRNA target sequence for Gprc2a (NM_013803.1,862-880).
gttttgttgcccagaacaa

SEQ ID NO: 629655 - DNA, 19 bp, Mus musculus
  siRNA target sequence for Gprc2a (NM_013803.1,870-888).
gcccagaacaaaatcgatt

SEQ ID NO: 629656 - DNA, 19 bp, Mus musculus
  siRNA target sequence for Gprc2a (NM_013803.1,1036-1054).
gcaggcttctcagcaataa

SEQ ID NO: 629657 - DNA, 19 bp, Mus musculus
  siRNA target sequence for Gprc2a (NM_013803.1,1039-1057).
ggcttctcagcaataagaa

SEQ ID NO: 629658 - DNA, 19 bp, Mus musculus
  siRNA target sequence for Gprc2a (NM_013803.1,1106-1124).
caccgcgatggctgacatt

SEQ ID NO: 629659 - DNA, 19 bp, Mus musculus
  siRNA target sequence for Gprc2a (NM_013803.1,1108-1126).
ccgcgatggctgacattat

SEQ ID NO: 629660 - DNA, 19 bp, Mus musculus
  siRNA target sequence for Gprc2a (NM_013803.1,1111-1129).
cgatggctgacattatcga

SEQ ID NO: 629661 - DNA, 19 bp, Mus musculus
  siRNA target sequence for Gprc2a (NM_013803.1,1116-1134).
gctgacattatcgagtatt

SEQ ID NO: 629662 - DNA, 19 bp, Mus musculus
  siRNA target sequence for Gprc2a (NM_013803.1,1117-1135).
ctgacattatcgagtattt

SEQ ID NO: 629663 - DNA, 19 bp, Mus musculus
  siRNA target sequence for Gprc2a (NM_013803.1,1142-1160).
gaactgggtgggcacaatt

SEQ ID NO: 629664 - DNA, 19 bp, Mus musculus
  siRNA target sequence for Gprc2a (NM_013803.1,1145-1163).
ctgggtgggcacaattgca

SEQ ID NO: 629665 - DNA, 19 bp, Mus musculus
  siRNA target sequence for Gprc2a (NM_013803.1,1309-1327).
ctacagccaaggtcattgt

SEQ ID NO: 629666 - DNA, 19 bp, Mus musculus
  siRNA target sequence for Gprc2a (NM_013803.1,1315-1333).
ccaaggtcattgtcgtttt

SEQ ID NO: 629667 - DNA, 19 bp, Mus musculus
  siRNA target sequence for Gprc2a (NM_013803.1,1357-1375).
ctctcatcaaggagattgt

SEQ ID NO: 629668 - DNA, 19 bp, Mus musculus
  siRNA target sequence for Gprc2a (NM_013803.1,1426-1444).
gttcctccctgattgctat

SEQ ID NO: 629669 - DNA, 19 bp, Mus musculus
  siRNA target sequence for Gprc2a (NM_013803.1,1447-1465).
ctgagtacttccatgtagt

SEQ ID NO: 629670 - DNA, 19 bp, Mus musculus
  siRNA target sequence for Gprc2a (NM_013803.1,1610-1628).
cggcgcaaaaggaccttta

SEQ ID NO: 629671 - DNA, 19 bp, Mus musculus
  siRNA target sequence for Gprc2a (NM_013803.1,1662-1680).
ggcggcaacaggttactca

SEQ ID NO: 629672 - DNA, 19 bp, Mus musculus
  siRNA target sequence for Gprc2a (NM_013803.1,1663-1681).
gcggcaacaggttactcaa

SEQ ID NO: 629673 - DNA, 19 bp, Mus musculus
  siRNA target sequence for Gprc2a (NM_013803.1,1664-1682).
cggcaacaggttactcaat

SEQ ID NO: 629674 - DNA, 19 bp, Mus musculus
  siRNA target sequence for Gprc2a (NM_013803.1,1665-1683).
ggcaacaggttactcaata

SEQ ID NO: 629675 - DNA, 19 bp, Mus musculus
  siRNA target sequence for Gprc2a (NM_013803.1,1732-1750).
gtgtcgagaccccttacat

SEQ ID NO: 629676 - DNA, 19 bp, Mus musculus
  siRNA target sequence for Gprc2a (NM_013803.1,1806-1824).
gcgcacgccctgcaagata

SEQ ID NO: 629677 - DNA, 19 bp, Mus musculus
  siRNA target sequence for Gprc2a (NM_013803.1,1807-1825).
cgcacgccctgcaagatat

SEQ ID NO: 629678 - DNA, 19 bp, Mus musculus
  siRNA target sequence for Gprc2a (NM_013803.1,1808-1826).
gcacgccctgcaagatata

SEQ ID NO: 629679 - DNA, 19 bp, Mus musculus
  siRNA target sequence for Gprc2a (NM_013803.1,1809-1827).
cacgccctgcaagatatat

SEQ ID NO: 629680 - DNA, 19 bp, Mus musculus
  siRNA target sequence for Gprc2a (NM_013803.1,1894-1912).
cctggcaggtcctgaaaca

SEQ ID NO: 629681 - DNA, 19 bp, Mus musculus
  siRNA target sequence for Gprc2a (NM_013803.1,1914-1932).
ctacggcacctgaatttca

SEQ ID NO: 629682 - DNA, 19 bp, Mus musculus
  siRNA target sequence for Gprc2a (NM_013803.1,2042-2060).
ggaagttgggtactacaat

SEQ ID NO: 629683 - DNA, 19 bp, Mus musculus
  siRNA target sequence for Gprc2a (NM_013803.1,2046-2064).
gttgggtactacaatgtgt

SEQ ID NO: 629684 - DNA, 19 bp, Mus musculus
  siRNA target sequence for Gprc2a (NM_013803.1,2076-2094).
ggagaaagactgttcatca

SEQ ID NO: 629685 - DNA, 19 bp, Mus musculus
  siRNA target sequence for Gprc2a (NM_013803.1,2347-2365).
ggactgagccctttggaat

SEQ ID NO: 629686 - DNA, 19 bp, Mus musculus
  siRNA target sequence for Gprc2a (NM_013803.1,2636-2654).
ggtatttgaggccaaaata

SEQ ID NO: 629687 - DNA, 19 bp, Mus musculus
  siRNA target sequence for Gprc2a (NM_013803.1,2796-2814).
gacgaaatcatcttcatca

SEQ ID NO: 629688 - DNA, 19 bp, Mus musculus
  siRNA target sequence for Gprc2a (NM_013803.1,3002-3020).
cagcacctacggcaagttt

SEQ ID NO: 629689 - DNA, 19 bp, Mus musculus
  siRNA target sequence for Gprc2a (NM_013803.1,3004-3022).
gcacctacggcaagtttgt

SEQ ID NO: 629690 - DNA, 19 bp, Mus musculus
  siRNA target sequence for Gprc2a (NM_013803.1,3148-3166).
gcactgcggctcatgcttt

SEQ ID NO: 629691 - DNA, 19 bp, Mus musculus
  siRNA target sequence for Gprc2a (NM_013803.1,3334-3352).
ccctgacccagcaagaaca

SEQ ID NO: 629692 - DNA, 19 bp, Mus musculus
  siRNA target sequence for Gprc2a (NM_013803.1,3468-3486).
gagcctcagaagaatgcta

SEQ ID NO: 629693 - DNA, 19 bp, Mus musculus
  siRNA target sequence for Gprc2a (NM_013803.1,3644-3662).
ccaccagccagaaatagaa

SEQ ID NO: 629694 - DNA, 19 bp, Mus musculus
  siRNA target sequence for Gprc2a (NM_013803.1,3733-3751).
gctctgtgacggaaaacat

SEQ ID NO: 629695 - DNA, 19 bp, Mus musculus
  siRNA target sequence for Gprc2a (NM_013803.1,3734-3752).
ctctgtgacggaaaacata

SEQ ID NO: 629696 - DNA, 19 bp, Mus musculus
  siRNA target sequence for Gprc5b (NM_022420.1,152-170).
gagaacccatcaagtgttt

SEQ ID NO: 629697 - DNA, 19 bp, Mus musculus
  siRNA target sequence for Gprc5b (NM_022420.1,360-378).
gtgagactacccttcatca

SEQ ID NO: 629698 - DNA, 19 bp, Mus musculus
  siRNA target sequence for Gprc5b (NM_022420.1,519-537).
ctcttcgcgctctgctttt

SEQ ID NO: 629699 - DNA, 19 bp, Mus musculus
  siRNA target sequence for Gprc5b (NM_022420.1,887-905).
cctcttcggcaactcatta

SEQ ID NO: 629700 - DNA, 19 bp, Mus musculus
  siRNA target sequence for Gprc5b (NM_022420.1,890-908).
cttcggcaactcattaatt

SEQ ID NO: 629701 - DNA, 19 bp, Mus musculus
  siRNA target sequence for Gprc5b (NM_022420.1,895-913).
gcaactcattaattaagca

SEQ ID NO: 629702 - DNA, 19 bp, Mus musculus
  siRNA target sequence for Gprc5b (NM_022420.1,932-950).
ccccaccttggccattaca

SEQ ID NO: 629703 - DNA, 19 bp, Mus musculus
  siRNA target sequence for Gprc5b (NM_022420.1,934-952).
ccaccttggccattacact

SEQ ID NO: 629704 - DNA, 19 bp, Mus musculus
  siRNA target sequence for Gprc5b (NM_022420.1,961-979).
gcggatgggtctttgtcat

SEQ ID NO: 629705 - DNA, 19 bp, Mus musculus
  siRNA target sequence for Gprc5b (NM_022420.1,1029-1047).
gagaacccacccaactact

SEQ ID NO: 629706 - DNA, 19 bp, Mus musculus
  siRNA target sequence for Gprc5b (NM_022420.1,1081-1099).
catttgatgaggaaatgca

SEQ ID NO: 629707 - DNA, 19 bp, Mus musculus
  siRNA target sequence for Gprc5b (NM_022420.1,1124-1142).
caaggccttctcaatggat

SEQ ID NO: 629708 - DNA, 19 bp, Mus musculus
  siRNA target sequence for Gprc5b (NM_022420.1,1254-1272).
ccgttcagaagcaatgtgt

SEQ ID NO: 629709 - DNA, 19 bp, Mus musculus
  siRNA target sequence for Gprc6a (NM_153071.1,30-48).
ggccctattgattacagta

SEQ ID NO: 629710 - DNA, 19 bp, Mus musculus
  siRNA target sequence for Gprc6a (NM_153071.1,33-51).
cctattgattacagtagtt

SEQ ID NO: 629711 - DNA, 19 bp, Mus musculus
  siRNA target sequence for Gprc6a (NM_153071.1,46-64).
gtagttacttgcttcatga

SEQ ID NO: 629712 - DNA, 19 bp, Mus musculus
  siRNA target sequence for Gprc6a (NM_153071.1,56-74).
gcttcatgattattcttga

SEQ ID NO: 629713 - DNA, 19 bp, Mus musculus
  siRNA target sequence for Gprc6a (NM_153071.1,103-121).
gacttcgtggctatcactt

SEQ ID NO: 629714 - DNA, 19 bp, Mus musculus
  siRNA target sequence for Gprc6a (NM_153071.1,122-140).
ctcctggacatatcatgat

SEQ ID NO: 629715 - DNA, 19 bp, Mus musculus
  siRNA target sequence for Gprc6a (NM_153071.1,196-214).
cgaccacaaatccagaaat

SEQ ID NO: 629716 - DNA, 19 bp, Mus musculus
  siRNA target sequence for Gprc6a (NM_153071.1,233-251).
cagtgtttcttcaaactct

SEQ ID NO: 629717 - DNA, 19 bp, Mus musculus
  siRNA target sequence for Gprc6a (NM_153071.1,279-297).
caataattcaacactgtta

SEQ ID NO: 629718 - DNA, 19 bp, Mus musculus
  siRNA target sequence for Gprc6a (NM_153071.1,302-320).
gagtcaagctgggatatga

SEQ ID NO: 629719 - DNA, 19 bp, Mus musculus
  siRNA target sequence for Gprc6a (NM_153071.1,313-331).
ggatatgaaatctatgaca

SEQ ID NO: 629720 - DNA, 19 bp, Mus musculus
  siRNA target sequence for Gprc6a (NM_153071.1,319-337).
gaaatctatgacacttgta

SEQ ID NO: 629721 - DNA, 19 bp, Mus musculus
  siRNA target sequence for Gprc6a (NM_153071.1,367-385).
ctgaggttcctctcaaaat

SEQ ID NO: 629722 - DNA, 19 bp, Mus musculus
  siRNA target sequence for Gprc6a (NM_153071.1,409-427).
gtctttcagtgtgactatt

SEQ ID NO: 629723 - DNA, 19 bp, Mus musculus
  siRNA target sequence for Gprc6a (NM_153071.1,463-481).
gctggctactctgaaacat

SEQ ID NO: 629724 - DNA, 19 bp, Mus musculus
  siRNA target sequence for Gprc6a (NM_153071.1,492-510).
ctcaaggatgctgaactta

SEQ ID NO: 629725 - DNA, 19 bp, Mus musculus
  siRNA target sequence for Gprc6a (NM_153071.1,494-512).
caaggatgctgaacttaca

SEQ ID NO: 629726 - DNA, 19 bp, Mus musculus
  siRNA target sequence for Gprc6a (NM_153071.1,519-537).
gccacaggtgagttatgaa

SEQ ID NO: 629727 - DNA, 19 bp, Mus musculus
  siRNA target sequence for Gprc6a (NM_153071.1,520-538).
ccacaggtgagttatgaat

SEQ ID NO: 629728 - DNA, 19 bp, Mus musculus
  siRNA target sequence for Gprc6a (NM_153071.1,559-577).
gacaagatccgctttcctt

SEQ ID NO: 629729 - DNA, 19 bp, Mus musculus
  siRNA target sequence for Gprc6a (NM_153071.1,595-613).
cctagtgacttctaccaaa

SEQ ID NO: 629730 - DNA, 19 bp, Mus musculus
  siRNA target sequence for Gprc6a (NM_153071.1,599-617).
gtgacttctaccaaactaa

SEQ ID NO: 629731 - DNA, 19 bp, Mus musculus
  siRNA target sequence for Gprc6a (NM_153071.1,665-683).
ccataacaaccgatgatga

SEQ ID NO: 629732 - DNA, 19 bp, Mus musculus
  siRNA target sequence for Gprc6a (NM_153071.1,666-684).
cataacaaccgatgatgat

SEQ ID NO: 629733 - DNA, 19 bp, Mus musculus
  siRNA target sequence for Gprc6a (NM_153071.1,771-789).
cctctcagataataccatt

SEQ ID NO: 629734 - DNA, 19 bp, Mus musculus
  siRNA target sequence for Gprc6a (NM_153071.1,785-803).
ccattgaagtgagaattaa

SEQ ID NO: 629735 - DNA, 19 bp, Mus musculus
  siRNA target sequence for Gprc6a (NM_153071.1,827-845).
cagaagcccaggttaatgt

SEQ ID NO: 629736 - DNA, 19 bp, Mus musculus
  siRNA target sequence for Gprc6a (NM_153071.1,833-851).
cccaggttaatgtcattgt

SEQ ID NO: 629737 - DNA, 19 bp, Mus musculus
  siRNA target sequence for Gprc6a (NM_153071.1,890-908).
cgaaagccattgaaaggaa

SEQ ID NO: 629738 - DNA, 19 bp, Mus musculus
  siRNA target sequence for Gprc6a (NM_153071.1,918-936).
gatctggattgctagtgat

SEQ ID NO: 629739 - DNA, 19 bp, Mus musculus
  siRNA target sequence for Gprc6a (NM_153071.1,965-983).
ccatccctaatgttaagaa

SEQ ID NO: 629740 - DNA, 19 bp, Mus musculus
  siRNA target sequence for Gprc6a (NM_153071.1,1006-1024).
gcctttaggagaggaaata

SEQ ID NO: 629741 - DNA, 19 bp, Mus musculus
  siRNA target sequence for Gprc6a (NM_153071.1,1080-1098).
caaacccctacatgaattt

SEQ ID NO: 629742 - DNA, 19 bp, Mus musculus
  siRNA target sequence for Gprc6a (NM_153071.1,1104-1122).
gctcgtttctgcctgtaaa

SEQ ID NO: 629743 - DNA, 19 bp, Mus musculus
  siRNA target sequence for Gprc6a (NM_153071.1,1105-1123).
ctcgtttctgcctgtaaat

SEQ ID NO: 629744 - DNA, 19 bp, Mus musculus
  siRNA target sequence for Gprc6a (NM_153071.1,1146-1164).
ccaatgcatatccaactat

SEQ ID NO: 629745 - DNA, 19 bp, Mus musculus
  siRNA target sequence for Gprc6a (NM_153071.1,1147-1165).
caatgcatatccaactatt

SEQ ID NO: 629746 - DNA, 19 bp, Mus musculus
  siRNA target sequence for Gprc6a (NM_153071.1,1151-1169).
gcatatccaactattctca

SEQ ID NO: 629747 - DNA, 19 bp, Mus musculus
  siRNA target sequence for Gprc6a (NM_153071.1,1171-1189).
gcaactttgacctatgaca

SEQ ID NO: 629748 - DNA, 19 bp, Mus musculus
  siRNA target sequence for Gprc6a (NM_153071.1,1228-1246).
gatttcctctggcattata

SEQ ID NO: 629749 - DNA, 19 bp, Mus musculus
  siRNA target sequence for Gprc6a (NM_153071.1,1247-1265).
ctgagccgggactcattta

SEQ ID NO: 629750 - DNA, 19 bp, Mus musculus
  siRNA target sequence for Gprc6a (NM_153071.1,1249-1267).
gagccgggactcatttata

SEQ ID NO: 629751 - DNA, 19 bp, Mus musculus
  siRNA target sequence for Gprc6a (NM_153071.1,1252-1270).
ccgggactcatttatagca

SEQ ID NO: 629752 - DNA, 19 bp, Mus musculus
  siRNA target sequence for Gprc6a (NM_153071.1,1253-1271).
cgggactcatttatagcat

SEQ ID NO: 629753 - DNA, 19 bp, Mus musculus
  siRNA target sequence for Gprc6a (NM_153071.1,1254-1272).
gggactcatttatagcatt

SEQ ID NO: 629754 - DNA, 19 bp, Mus musculus
  siRNA target sequence for Gprc6a (NM_153071.1,1363-1381).
ctacttgccgtgctgaaaa

SEQ ID NO: 629755 - DNA, 19 bp, Mus musculus
  siRNA target sequence for Gprc6a (NM_153071.1,1377-1395).
gaaaaacgtgacattcact

SEQ ID NO: 629756 - DNA, 19 bp, Mus musculus
  siRNA target sequence for Gprc6a (NM_153071.1,1420-1438).
gatgcccacggggatttaa

SEQ ID NO: 629757 - DNA, 19 bp, Mus musculus
  siRNA target sequence for Gprc6a (NM_153071.1,1423-1441).
gcccacggggatttaaata

SEQ ID NO: 629758 - DNA, 19 bp, Mus musculus
  siRNA target sequence for Gprc6a (NM_153071.1,1425-1443).
ccacggggatttaaatact

SEQ ID NO: 629759 - DNA, 19 bp, Mus musculus
  siRNA target sequence for Gprc6a (NM_153071.1,1431-1449).
ggatttaaatactggttat

SEQ ID NO: 629760 - DNA, 19 bp, Mus musculus
  siRNA target sequence for Gprc6a (NM_153071.1,1493-1511).
caaagatggcagaatatga

SEQ ID NO: 629761 - DNA, 19 bp, Mus musculus
  siRNA target sequence for Gprc6a (NM_153071.1,1566-1584).
gaaacttaagcaaattcta

SEQ ID NO: 629762 - DNA, 19 bp, Mus musculus
  siRNA target sequence for Gprc6a (NM_153071.1,1604-1622).
gcagccctggtcaaatgaa

SEQ ID NO: 629763 - DNA, 19 bp, Mus musculus
  siRNA target sequence for Gprc6a (NM_153071.1,1646-1664).
gctgttgctatgaatgtgt

SEQ ID NO: 629764 - DNA, 19 bp, Mus musculus
  siRNA target sequence for Gprc6a (NM_153071.1,1672-1690).
ccagaaaaccactacagta

SEQ ID NO: 629765 - DNA, 19 bp, Mus musculus
  siRNA target sequence for Gprc6a (NM_153071.1,1705-1723).
gatcactgccttttatgca

SEQ ID NO: 629766 - DNA, 19 bp, Mus musculus
  siRNA target sequence for Gprc6a (NM_153071.1,1752-1770).
gagcactacctgctttgaa

SEQ ID NO: 629767 - DNA, 19 bp, Mus musculus
  siRNA target sequence for Gprc6a (NM_153071.1,1887-1905).
gacacctgtcgtgaaatca

SEQ ID NO: 629768 - DNA, 19 bp, Mus musculus
  siRNA target sequence for Gprc6a (NM_153071.1,1899-1917).
gaaatcatctggaggatta

SEQ ID NO: 629769 - DNA, 19 bp, Mus musculus
  siRNA target sequence for Gprc6a (NM_153071.1,2061-2079).
gaccaagtccctgaaaatt

SEQ ID NO: 629770 - DNA, 19 bp, Mus musculus
  siRNA target sequence for Gprc6a (NM_153071.1,2098-2116).
gaccccaagctgacaatgt

SEQ ID NO: 629771 - DNA, 19 bp, Mus musculus
  siRNA target sequence for Gprc6a (NM_153071.1,2164-2182).
ggcattcaagtggtcattt

SEQ ID NO: 629772 - DNA, 19 bp, Mus musculus
  siRNA target sequence for Gprc6a (NM_153071.1,2173-2191).
gtggtcatttgcactcttt

SEQ ID NO: 629773 - DNA, 19 bp, Mus musculus
  siRNA target sequence for Gprc6a (NM_153071.1,2444-2462).
ccacattcggcaagtattt

SEQ ID NO: 629774 - DNA, 19 bp, Mus musculus
  siRNA target sequence for Gprc6a (NM_153071.1,2468-2486).
ccgtggagattatagtcat

SEQ ID NO: 629775 - DNA, 19 bp, Mus musculus
  siRNA target sequence for Gprc6a (NM_153071.1,2469-2487).
cgtggagattatagtcatt

SEQ ID NO: 629776 - DNA, 19 bp, Mus musculus
  siRNA target sequence for Gprc6a (NM_153071.1,2545-2563).
ctttgcaagcagaagacta

SEQ ID NO: 629777 - DNA, 19 bp, Mus musculus
  siRNA target sequence for Gprc6a (NM_153071.1,2576-2594).
ccttcctccagatggttta

SEQ ID NO: 629778 - DNA, 19 bp, Mus musculus
  siRNA target sequence for Gprc6a (NM_153071.1,2647-2665).
gactccaccagctacgata

SEQ ID NO: 629779 - DNA, 19 bp, Mus musculus
  siRNA target sequence for Gprc6a (NM_153071.1,2661-2679).
cgatactgcaacaaccaat

SEQ ID NO: 629780 - DNA, 19 bp, Mus musculus
  siRNA target sequence for Gprc6a (NM_153071.1,2763-2781).
gactatcaaagcgtctaaa

SEQ ID NO: 629781 - DNA, 19 bp, Mus musculus
  siRNA target sequence for Grm1 (NM_016976.1,429-447).
ggtccggctcctcttgatt

SEQ ID NO: 629782 - DNA, 19 bp, Mus musculus
  siRNA target sequence for Grm1 (NM_016976.1,433-451).
cggctcctcttgattttct

SEQ ID NO: 629783 - DNA, 19 bp, Mus musculus
  siRNA target sequence for Grm1 (NM_016976.1,545-563).
gaatggacggagatgtcat

SEQ ID NO: 629784 - DNA, 19 bp, Mus musculus
  siRNA target sequence for Grm1 (NM_016976.1,666-684).
ggccatgttccacacatta

SEQ ID NO: 629785 - DNA, 19 bp, Mus musculus
  siRNA target sequence for Grm1 (NM_016976.1,668-686).
ccatgttccacacattaga

SEQ ID NO: 629786 - DNA, 19 bp, Mus musculus
  siRNA target sequence for Grm1 (NM_016976.1,669-687).
catgttccacacattagat

SEQ ID NO: 629787 - DNA, 19 bp, Mus musculus
  siRNA target sequence for Grm1 (NM_016976.1,675-693).
ccacacattagataagatt

SEQ ID NO: 629788 - DNA, 19 bp, Mus musculus
  siRNA target sequence for Grm1 (NM_016976.1,676-694).
cacacattagataagatta

SEQ ID NO: 629789 - DNA, 19 bp, Mus musculus
  siRNA target sequence for Grm1 (NM_016976.1,778-796).
cagagcattgagttcatca

SEQ ID NO: 629790 - DNA, 19 bp, Mus musculus
  siRNA target sequence for Grm1 (NM_016976.1,997-1015).
gacctgagcgacaaaactt

SEQ ID NO: 629791 - DNA, 19 bp, Mus musculus
  siRNA target sequence for Grm1 (NM_016976.1,1000-1018).
ctgagcgacaaaactttgt

SEQ ID NO: 629792 - DNA, 19 bp, Mus musculus
  siRNA target sequence for Grm1 (NM_016976.1,1005-1023).
cgacaaaactttgtacaaa

SEQ ID NO: 629793 - DNA, 19 bp, Mus musculus
  siRNA target sequence for Grm1 (NM_016976.1,1060-1078).
gcaagggcgatgcttgata

SEQ ID NO: 629794 - DNA, 19 bp, Mus musculus
  siRNA target sequence for Grm1 (NM_016976.1,1061-1079).
caagggcgatgcttgatat

SEQ ID NO: 629795 - DNA, 19 bp, Mus musculus
  siRNA target sequence for Grm1 (NM_016976.1,1064-1082).
gggcgatgcttgatatcgt

SEQ ID NO: 629796 - DNA, 19 bp, Mus musculus
  siRNA target sequence for Grm1 (NM_016976.1,1134-1152).
cggcgagagtggaatggat

SEQ ID NO: 629797 - DNA, 19 bp, Mus musculus
  siRNA target sequence for Grm1 (NM_016976.1,1192-1210).
gcacactcggacaaaatct

SEQ ID NO: 629798 - DNA, 19 bp, Mus musculus
  siRNA target sequence for Grm1 (NM_016976.1,1193-1211).
cacactcggacaaaatcta

SEQ ID NO: 629799 - DNA, 19 bp, Mus musculus
  siRNA target sequence for Grm1 (NM_016976.1,1426-1444).
gccaatgggggaatcacaa

SEQ ID NO: 629800 - DNA, 19 bp, Mus musculus
  siRNA target sequence for Grm1 (NM_016976.1,1427-1445).
ccaatgggggaatcacaat

SEQ ID NO: 629801 - DNA, 19 bp, Mus musculus
  siRNA target sequence for Grm1 (NM_016976.1,1433-1451).
ggggaatcacaataaagct

SEQ ID NO: 629802 - DNA, 19 bp, Mus musculus
  siRNA target sequence for Grm1 (NM_016976.1,1469-1487).
ggtcgtttgatgactactt

SEQ ID NO: 629803 - DNA, 19 bp, Mus musculus
  siRNA target sequence for Grm1 (NM_016976.1,1470-1488).
gtcgtttgatgactacttt

SEQ ID NO: 629804 - DNA, 19 bp, Mus musculus
  siRNA target sequence for Grm1 (NM_016976.1,1472-1490).
cgtttgatgactactttct

SEQ ID NO: 629805 - DNA, 19 bp, Mus musculus
  siRNA target sequence for Grm1 (NM_016976.1,1588-1606).
cccaactttaaaaaagtct

SEQ ID NO: 629806 - DNA, 19 bp, Mus musculus
  siRNA target sequence for Grm1 (NM_016976.1,1728-1746).
ctacgtgggcctttgtgat

SEQ ID NO: 629807 - DNA, 19 bp, Mus musculus
  siRNA target sequence for Grm1 (NM_016976.1,1849-1867).
gcacctggaaggtatgaca

SEQ ID NO: 629808 - DNA, 19 bp, Mus musculus
  siRNA target sequence for Grm1 (NM_016976.1,1850-1868).
cacctggaaggtatgacat

SEQ ID NO: 629809 - DNA, 19 bp, Mus musculus
  siRNA target sequence for Grm1 (NM_016976.1,1859-1877).
ggtatgacattatgaatct

SEQ ID NO: 629810 - DNA, 19 bp, Mus musculus
  siRNA target sequence for Grm1 (NM_016976.1,1888-1906).
gaggctaatcgctatgact

SEQ ID NO: 629811 - DNA, 19 bp, Mus musculus
  siRNA target sequence for Grm1 (NM_016976.1,1890-1908).
ggctaatcgctatgactat

SEQ ID NO: 629812 - DNA, 19 bp, Mus musculus
  siRNA target sequence for Grm1 (NM_016976.1,1892-1910).
ctaatcgctatgactatgt

SEQ ID NO: 629813 - DNA, 19 bp, Mus musculus
  siRNA target sequence for Grm1 (NM_016976.1,1927-1945).
catgaaggtgtgctgaata

SEQ ID NO: 629814 - DNA, 19 bp, Mus musculus
  siRNA target sequence for Grm1 (NM_016976.1,1939-1957).
ctgaatatcgatgattaca

SEQ ID NO: 629815 - DNA, 19 bp, Mus musculus
  siRNA target sequence for Grm1 (NM_016976.1,1941-1959).
gaatatcgatgattacaaa

SEQ ID NO: 629816 - DNA, 19 bp, Mus musculus
  siRNA target sequence for Grm1 (NM_016976.1,1968-1986).
gaacaaaagcggaatggta

SEQ ID NO: 629817 - DNA, 19 bp, Mus musculus
  siRNA target sequence for Grm1 (NM_016976.1,2067-2085).
cacagcctgcaaagagaat

SEQ ID NO: 629818 - DNA, 19 bp, Mus musculus
  siRNA target sequence for Grm1 (NM_016976.1,2075-2093).
gcaaagagaatgagtttgt

SEQ ID NO: 629819 - DNA, 19 bp, Mus musculus
  siRNA target sequence for Grm1 (NM_016976.1,2155-2173).
ggctgtgagcccattacta

SEQ ID NO: 629820 - DNA, 19 bp, Mus musculus
  siRNA target sequence for Grm1 (NM_016976.1,2181-2199).
cctcgagtggagtgacata

SEQ ID NO: 629821 - DNA, 19 bp, Mus musculus
  siRNA target sequence for Grm1 (NM_016976.1,2184-2202).
cgagtggagtgacatagaa

SEQ ID NO: 629822 - DNA, 19 bp, Mus musculus
  siRNA target sequence for Grm1 (NM_016976.1,2189-2207).
ggagtgacatagaatccat

SEQ ID NO: 629823 - DNA, 19 bp, Mus musculus
  siRNA target sequence for Grm1 (NM_016976.1,2239-2257).
ctcgtgacgctatttgtca

SEQ ID NO: 629824 - DNA, 19 bp, Mus musculus
  siRNA target sequence for Grm1 (NM_016976.1,2281-2299).
gacacacctgtggtcaaat

SEQ ID NO: 629825 - DNA, 19 bp, Mus musculus
  siRNA target sequence for Grm1 (NM_016976.1,2306-2324).
gtagagagctctgctatat

SEQ ID NO: 629826 - DNA, 19 bp, Mus musculus
  siRNA target sequence for Grm1 (NM_016976.1,2309-2327).
gagagctctgctatatcat

SEQ ID NO: 629827 - DNA, 19 bp, Mus musculus
  siRNA target sequence for Grm1 (NM_016976.1,2452-2470).
gtgaccaaaaccaatcgta

SEQ ID NO: 629828 - DNA, 19 bp, Mus musculus
  siRNA target sequence for Grm1 (NM_016976.1,2457-2475).
caaaaccaatcgtattgca

SEQ ID NO: 629829 - DNA, 19 bp, Mus musculus
  siRNA target sequence for Grm1 (NM_016976.1,2550-2568).
catagcctccattctgatt

SEQ ID NO: 629830 - DNA, 19 bp, Mus musculus
  siRNA target sequence for Grm1 (NM_016976.1,2555-2573).
cctccattctgattagtgt

SEQ ID NO: 629831 - DNA, 19 bp, Mus musculus
  siRNA target sequence for Grm1 (NM_016976.1,2556-2574).
ctccattctgattagtgta

SEQ ID NO: 629832 - DNA, 19 bp, Mus musculus
  siRNA target sequence for Grm1 (NM_016976.1,2584-2602).
ctagtggtgaccttgatca

SEQ ID NO: 629833 - DNA, 19 bp, Mus musculus
  siRNA target sequence for Grm1 (NM_016976.1,2699-2717).
gttacaacggacttctcat

SEQ ID NO: 629834 - DNA, 19 bp, Mus musculus
  siRNA target sequence for Grm1 (NM_016976.1,2718-2736).
catgagctgtacctactat

SEQ ID NO: 629835 - DNA, 19 bp, Mus musculus
  siRNA target sequence for Grm1 (NM_016976.1,2824-2842).
gcttttgttcccatttact

SEQ ID NO: 629836 - DNA, 19 bp, Mus musculus
  siRNA target sequence for Grm1 (NM_016976.1,2845-2863).
gggagcaactacaagatta

SEQ ID NO: 629837 - DNA, 19 bp, Mus musculus
  siRNA target sequence for Grm1 (NM_016976.1,2850-2868).
caactacaagattatcact

SEQ ID NO: 629838 - DNA, 19 bp, Mus musculus
  siRNA target sequence for Grm1 (NM_016976.1,2925-2943).
caagatgtacatcattatt

SEQ ID NO: 629839 - DNA, 19 bp, Mus musculus
  siRNA target sequence for Grm1 (NM_016976.1,3201-3219).
ccaaacagccgtaattaaa

SEQ ID NO: 629840 - DNA, 19 bp, Mus musculus
  siRNA target sequence for Grm6 (NM_173372.1,253-271).
gattccacccggaaatgca

SEQ ID NO: 629841 - DNA, 19 bp, Mus musculus
  siRNA target sequence for Grm6 (NM_173372.1,327-345).
ccaggactccacctatgaa

SEQ ID NO: 629842 - DNA, 19 bp, Mus musculus
  siRNA target sequence for Grm6 (NM_173372.1,357-375).
ggtgcagttcgtgatagat

SEQ ID NO: 629843 - DNA, 19 bp, Mus musculus
  siRNA target sequence for Grm6 (NM_173372.1,492-510).
ccgagcagtccgcttcaat

SEQ ID NO: 629844 - DNA, 19 bp, Mus musculus
  siRNA target sequence for Grm6 (NM_173372.1,496-514).
gcagtccgcttcaatggta

SEQ ID NO: 629845 - DNA, 19 bp, Mus musculus
  siRNA target sequence for Grm6 (NM_173372.1,524-542).
ccccagtgatgttcaatga

SEQ ID NO: 629846 - DNA, 19 bp, Mus musculus
  siRNA target sequence for Grm6 (NM_173372.1,526-544).
ccagtgatgttcaatgaga

SEQ ID NO: 629847 - DNA, 19 bp, Mus musculus
  siRNA target sequence for Grm6 (NM_173372.1,635-653).
gggcagaggcccttagact

SEQ ID NO: 629848 - DNA, 19 bp, Mus musculus
  siRNA target sequence for Grm6 (NM_173372.1,728-746).
ctggtgaacggaaaaagat

SEQ ID NO: 629849 - DNA, 19 bp, Mus musculus
  siRNA target sequence for Grm6 (NM_173372.1,1660-1678).
ctctatgtgcccaaaacct

SEQ ID NO: 629850 - DNA, 19 bp, Mus musculus
  siRNA target sequence for LOC56544 (NM_019918.1,11-29).
gacagataagcttagcttt

SEQ ID NO: 629851 - DNA, 19 bp, Mus musculus
  siRNA target sequence for LOC56544 (NM_019918.1,15-33).
gataagcttagctttagga

SEQ ID NO: 629852 - DNA, 19 bp, Mus musculus
  siRNA target sequence for LOC56544 (NM_019918.1,53-71).
ctgtattgggtgctcaaaa

SEQ ID NO: 629853 - DNA, 19 bp, Mus musculus
  siRNA target sequence for LOC56544 (NM_019918.1,82-100).
gaagtacaatgcagattga

SEQ ID NO: 629854 - DNA, 19 bp, Mus musculus
  siRNA target sequence for LOC56544 (NM_019918.1,95-113).
gattgatggccaagtttaa

SEQ ID NO: 629855 - DNA, 19 bp, Mus musculus
  siRNA target sequence for LOC56544 (NM_019918.1,102-120).
ggccaagtttaatttgtct

SEQ ID NO: 629856 - DNA, 19 bp, Mus musculus
  siRNA target sequence for LOC56544 (NM_019918.1,122-140).
gatatgtagatgccaaaaa

SEQ ID NO: 629857 - DNA, 19 bp, Mus musculus
  siRNA target sequence for LOC56544 (NM_019918.1,182-200).
gaatcatcccagtagatga

SEQ ID NO: 629858 - DNA, 19 bp, Mus musculus
  siRNA target sequence for LOC56544 (NM_019918.1,189-207).
cccagtagatgaagctatt

SEQ ID NO: 629859 - DNA, 19 bp, Mus musculus
  siRNA target sequence for LOC56544 (NM_019918.1,463-481).
ggatcagggggatcatctt

SEQ ID NO: 629860 - DNA, 19 bp, Mus musculus
  siRNA target sequence for LOC56544 (NM_019918.1,464-482).
gatcagggggatcatcttt

SEQ ID NO: 629861 - DNA, 19 bp, Mus musculus
  siRNA target sequence for LOC56544 (NM_019918.1,499-517).
cgaattctagggttgtatt

SEQ ID NO: 629862 - DNA, 19 bp, Mus musculus
  siRNA target sequence for LOC56544 (NM_019918.1,500-518).
gaattctagggttgtatta

SEQ ID NO: 629863 - DNA, 19 bp, Mus musculus
  siRNA target sequence for LOC56544 (NM_019918.1,522-540).
gcctcaggtgggctatact

SEQ ID NO: 629864 - DNA, 19 bp, Mus musculus
  siRNA target sequence for LOC56544 (NM_019918.1,545-563).
cctgctcaattcttagtga

SEQ ID NO: 629865 - DNA, 19 bp, Mus musculus
  siRNA target sequence for LOC56544 (NM_019918.1,1124-1142).
gcagtgttccttataacgt

SEQ ID NO: 629866 - DNA, 19 bp, Mus musculus
  siRNA target sequence for LOC56544 (NM_019918.1,1390-1408).
gatttctggcagctaatgt

SEQ ID NO: 629867 - DNA, 19 bp, Mus musculus
  siRNA target sequence for LOC56544 (NM_019918.1,1451-1469).
gggtaattctggatgataa

SEQ ID NO: 629868 - DNA, 19 bp, Mus musculus
  siRNA target sequence for LOC56544 (NM_019918.1,1452-1470).
ggtaattctggatgataat

SEQ ID NO: 629869 - DNA, 19 bp, Mus musculus
  siRNA target sequence for LOC56544 (NM_019918.1,1540-1558).
gtgacagttgggagattta

SEQ ID NO: 629870 - DNA, 19 bp, Mus musculus
  siRNA target sequence for LOC56544 (NM_019918.1,1544-1562).
cagttgggagatttaactt

SEQ ID NO: 629871 - DNA, 19 bp, Mus musculus
  siRNA target sequence for LOC56544 (NM_019918.1,1546-1564).
gttgggagatttaacttta

SEQ ID NO: 629872 - DNA, 19 bp, Mus musculus
  siRNA target sequence for LOC56544 (NM_019918.1,1560-1578).
ctttagatctacaaacttt

SEQ ID NO: 629873 - DNA, 19 bp, Mus musculus
  siRNA target sequence for LOC56544 (NM_019918.1,1575-1593).
ctttgagcttgttattcca

SEQ ID NO: 629874 - DNA, 19 bp, Mus musculus
  siRNA target sequence for LOC56544 (NM_019918.1,1585-1603).
gttattccaacgaattcta

SEQ ID NO: 629875 - DNA, 19 bp, Mus musculus
  siRNA target sequence for LOC56544 (NM_019918.1,2013-2031).
gtcttccttgctgttcata

SEQ ID NO: 629876 - DNA, 19 bp, Mus musculus
  siRNA target sequence for LOC56544 (NM_019918.1,2137-2155).
gcctataggatttctgtat

SEQ ID NO: 629877 - DNA, 19 bp, Mus musculus
  siRNA target sequence for Tas1r1 (NM_031867.1,475-493).
ccctggggtatgaactgta

SEQ ID NO: 629878 - DNA, 19 bp, Mus musculus
  siRNA target sequence for Tas1r1 (NM_031867.1,505-523).
cagagtcttccaatgtcta

SEQ ID NO: 629879 - DNA, 19 bp, Mus musculus
  siRNA target sequence for Tas1r1 (NM_031867.1,553-571).
ggacaggccacctagagat

SEQ ID NO: 629880 - DNA, 19 bp, Mus musculus
  siRNA target sequence for Tas1r1 (NM_031867.1,610-628).
cactcattgggcctgataa

SEQ ID NO: 629881 - DNA, 19 bp, Mus musculus
  siRNA target sequence for Tas1r1 (NM_031867.1,612-630).
ctcattgggcctgataaca

SEQ ID NO: 629882 - DNA, 19 bp, Mus musculus
  siRNA target sequence for Tas1r1 (NM_031867.1,748-766).
ccatccccagcgataagta

SEQ ID NO: 629883 - DNA, 19 bp, Mus musculus
  siRNA target sequence for Tas1r1 (NM_031867.1,993-1011).
gtggtcgtggtcttctcta

SEQ ID NO: 629884 - DNA, 19 bp, Mus musculus
  siRNA target sequence for Tas1r1 (NM_031867.1,1331-1349).
catgagcgctgcctacaat

SEQ ID NO: 629885 - DNA, 19 bp, Mus musculus
  siRNA target sequence for Tas1r1 (NM_031867.1,1336-1354).
gcgctgcctacaatgtgta

SEQ ID NO: 629886 - DNA, 19 bp, Mus musculus
  siRNA target sequence for Tas1r1 (NM_031867.1,1337-1355).
cgctgcctacaatgtgtat

SEQ ID NO: 629887 - DNA, 19 bp, Mus musculus
  siRNA target sequence for Tas1r1 (NM_031867.1,1339-1357).
ctgcctacaatgtgtatga

SEQ ID NO: 629888 - DNA, 19 bp, Mus musculus
  siRNA target sequence for Tas1r1 (NM_031867.1,1460-1478).
ctacaaggtgaatttcctt

SEQ ID NO: 629889 - DNA, 19 bp, Mus musculus
  siRNA target sequence for Tas1r1 (NM_031867.1,1514-1532).
ggaccctctaggttattat

SEQ ID NO: 629890 - DNA, 19 bp, Mus musculus
  siRNA target sequence for Tas1r1 (NM_031867.1,1639-1657).
ggcacgggaagaacaatca

SEQ ID NO: 629891 - DNA, 19 bp, Mus musculus
  siRNA target sequence for Tas1r1 (NM_031867.1,1752-1770).
gaagctgggacatttctca

SEQ ID NO: 629892 - DNA, 19 bp, Mus musculus
  siRNA target sequence for Tas1r1 (NM_031867.1,1870-1888).
ggcatgaacccatctcttt

SEQ ID NO: 629893 - DNA, 19 bp, Mus musculus
  siRNA target sequence for Tas1r1 (NM_031867.1,2176-2194).
ccaaggtacccacattcta

SEQ ID NO: 629894 - DNA, 19 bp, Mus musculus
  siRNA target sequence for Tas1r1 (NM_031867.1,2221-2239).
ccggaatattcgtcattgt

SEQ ID NO: 629895 - DNA, 19 bp, Mus musculus
  siRNA target sequence for Tas1r1 (NM_031867.1,2223-2241).
ggaatattcgtcattgtca

SEQ ID NO: 629896 - DNA, 19 bp, Mus musculus
  siRNA target sequence for Tas1r1 (NM_031867.1,2435-2453).
ggaactgccggagaactat

SEQ ID NO: 629897 - DNA, 19 bp, Mus musculus
  siRNA target sequence for Tas1r1 (NM_031867.1,2436-2454).
gaactgccggagaactata

SEQ ID NO: 629898 - DNA, 19 bp, Mus musculus
  siRNA target sequence for Tas1r1 (NM_031867.1,2441-2459).
gccggagaactataacgaa

SEQ ID NO: 629899 - DNA, 19 bp, Mus musculus
  siRNA target sequence for Tas1r1 (NM_031867.1,2481-2499).
ctgctcctccacttcgtat

SEQ ID NO: 629900 - DNA, 19 bp, Mus musculus
  siRNA target sequence for Tas1r1 (NM_031867.1,2590-2608).
gcggcttcagcggctattt

SEQ ID NO: 629901 - DNA, 19 bp, Mus musculus
  siRNA target sequence for Tas1r2 (NM_031873.1,376-394).
ctacttcctgtcacagata

SEQ ID NO: 629902 - DNA, 19 bp, Mus musculus
  siRNA target sequence for Tas1r2 (NM_031873.1,514-532).
cgtgccacaggtcacatat

SEQ ID NO: 629903 - DNA, 19 bp, Mus musculus
  siRNA target sequence for Tas1r2 (NM_031873.1,515-533).
gtgccacaggtcacatata

SEQ ID NO: 629904 - DNA, 19 bp, Mus musculus
  siRNA target sequence for Tas1r2 (NM_031873.1,849-867).
cgcgtgtggtggtgatatt

SEQ ID NO: 629905 - DNA, 19 bp, Mus musculus
  siRNA target sequence for Tas1r2 (NM_031873.1,851-869).
cgtgtggtggtgatattct

SEQ ID NO: 629906 - DNA, 19 bp, Mus musculus
  siRNA target sequence for Tas1r2 (NM_031873.1,905-923).
gtgctgcgctggaacttca

SEQ ID NO: 629907 - DNA, 19 bp, Mus musculus
  siRNA target sequence for Tas1r2 (NM_031873.1,955-973).
ggccatcgaccctgttcta

SEQ ID NO: 629908 - DNA, 19 bp, Mus musculus
  siRNA target sequence for Tas1r2 (NM_031873.1,1265-1283).
gtccgctgcaccaagcaaa

SEQ ID NO: 629909 - DNA, 19 bp, Mus musculus
  siRNA target sequence for Tas1r2 (NM_031873.1,1464-1482).
ggctgacctacattagcaa

SEQ ID NO: 629910 - DNA, 19 bp, Mus musculus
  siRNA target sequence for Tas1r2 (NM_031873.1,1465-1483).
gctgacctacattagcaat

SEQ ID NO: 629911 - DNA, 19 bp, Mus musculus
  siRNA target sequence for Tas1r2 (NM_031873.1,1511-1529).
gtccccatatccatgtgtt

SEQ ID NO: 629912 - DNA, 19 bp, Mus musculus
  siRNA target sequence for Tas1r2 (NM_031873.1,1515-1533).
ccatatccatgtgttctaa

SEQ ID NO: 629913 - DNA, 19 bp, Mus musculus
  siRNA target sequence for Tas1r2 (NM_031873.1,1615-1633).
ctacctcaaccgatcagta

SEQ ID NO: 629914 - DNA, 19 bp, Mus musculus
  siRNA target sequence for Tas1r2 (NM_031873.1,1618-1636).
cctcaaccgatcagtagat

SEQ ID NO: 629915 - DNA, 19 bp, Mus musculus
  siRNA target sequence for Tas1r2 (NM_031873.1,1624-1642).
ccgatcagtagatgagttt

SEQ ID NO: 629916 - DNA, 19 bp, Mus musculus
  siRNA target sequence for Tas1r2 (NM_031873.1,1625-1643).
cgatcagtagatgagttta

SEQ ID NO: 629917 - DNA, 19 bp, Mus musculus
  siRNA target sequence for Tas1r2 (NM_031873.1,1626-1644).
gatcagtagatgagtttaa

SEQ ID NO: 629918 - DNA, 19 bp, Mus musculus
  siRNA target sequence for Tas1r2 (NM_031873.1,1665-1683).
ccatgtggtcttacaagaa

SEQ ID NO: 629919 - DNA, 19 bp, Mus musculus
  siRNA target sequence for Tas1r2 (NM_031873.1,1890-1908).
ggatggtccccgtgtatgt

SEQ ID NO: 629920 - DNA, 19 bp, Mus musculus
  siRNA target sequence for Tas1r2 (NM_031873.1,1994-2012).
cgctccttccagattgtgt

SEQ ID NO: 629921 - DNA, 19 bp, Mus musculus
  siRNA target sequence for Tas1r2 (NM_031873.1,2217-2235).
gcaacgggctactcttcaa

SEQ ID NO: 629922 - DNA, 19 bp, Mus musculus
  siRNA target sequence for Tas1r2 (NM_031873.1,2425-2443).
ggtcactgtgctcaacttt

SEQ ID NO: 629923 - DNA, 19 bp, Mus musculus
  siRNA target sequence for Tas1r2 (NM_031873.1,2503-2521).
gcgcaacacttcagcttat

SEQ ID NO: 629924 - DNA, 19 bp, Mus musculus
  siRNA target sequence for Tas1r2 (NM_031873.1,2504-2522).
cgcaacacttcagcttatt

SEQ ID NO: 629925 - DNA, 19 bp, Mus musculus
  siRNA target sequence for Tas1r2 (NM_031873.1,2505-2523).
gcaacacttcagcttattt

SEQ ID NO: 629926 - DNA, 19 bp, Mus musculus
  siRNA target sequence for Tas1r2 (NM_031873.1,2514-2532).
cagcttatttcaatagcat

SEQ ID NO: 629927 - DNA, 19 bp, Mus musculus
  siRNA target sequence for Tas1r3 (NM_031872.1,109-127).
ggcacaaggggactacata

SEQ ID NO: 629928 - DNA, 19 bp, Mus musculus
  siRNA target sequence for Tas1r3 (NM_031872.1,111-129).
cacaaggggactacatact

SEQ ID NO: 629929 - DNA, 19 bp, Mus musculus
  siRNA target sequence for Tas1r3 (NM_031872.1,300-318).
ggctgggctatgacctatt

SEQ ID NO: 629930 - DNA, 19 bp, Mus musculus
  siRNA target sequence for Tas1r3 (NM_031872.1,301-319).
gctgggctatgacctattt

SEQ ID NO: 629931 - DNA, 19 bp, Mus musculus
  siRNA target sequence for Tas1r3 (NM_031872.1,338-356).
gtggtcaccatgaaatcca

SEQ ID NO: 629932 - DNA, 19 bp, Mus musculus
  siRNA target sequence for Tas1r3 (NM_031872.1,376-394).
ggtgggcagtcaaagcatt

SEQ ID NO: 629933 - DNA, 19 bp, Mus musculus
  siRNA target sequence for Tas1r3 (NM_031872.1,505-523).
gccacaggtcagctatagt

SEQ ID NO: 629934 - DNA, 19 bp, Mus musculus
  siRNA target sequence for Tas1r3 (NM_031872.1,528-546).
gcatggatcggctaagtga

SEQ ID NO: 629935 - DNA, 19 bp, Mus musculus
  siRNA target sequence for Tas1r3 (NM_031872.1,649-667).
cgccttagggagtgatgat

SEQ ID NO: 629936 - DNA, 19 bp, Mus musculus
  siRNA target sequence for Tas1r3 (NM_031872.1,651-669).
ccttagggagtgatgatga

SEQ ID NO: 629937 - DNA, 19 bp, Mus musculus
  siRNA target sequence for Tas1r3 (NM_031872.1,739-757).
gggcctggtgccacaacat

SEQ ID NO: 629938 - DNA, 19 bp, Mus musculus
  siRNA target sequence for Tas1r3 (NM_031872.1,780-798).
gcaaggtgctggatgtact

SEQ ID NO: 629939 - DNA, 19 bp, Mus musculus
  siRNA target sequence for Tas1r3 (NM_031872.1,797-815).
ctacgccaagtgaaccaaa

SEQ ID NO: 629940 - DNA, 19 bp, Mus musculus
  siRNA target sequence for Tas1r3 (NM_031872.1,800-818).
cgccaagtgaaccaaagta

SEQ ID NO: 629941 - DNA, 19 bp, Mus musculus
  siRNA target sequence for Tas1r3 (NM_031872.1,854-872).
gctgtctactcccttttta

SEQ ID NO: 629942 - DNA, 19 bp, Mus musculus
  siRNA target sequence for Tas1r3 (NM_031872.1,890-908).
ggcctctcacccaaggtat

SEQ ID NO: 629943 - DNA, 19 bp, Mus musculus
  siRNA target sequence for Tas1r3 (NM_031872.1,1128-1146).
cacggtgtgacgacatcat

SEQ ID NO: 629944 - DNA, 19 bp, Mus musculus
  siRNA target sequence for Tas1r3 (NM_031872.1,1191-1209).
ggcaattgcaccaccaaat

SEQ ID NO: 629945 - DNA, 19 bp, Mus musculus
  siRNA target sequence for Tas1r3 (NM_031872.1,1192-1210).
gcaattgcaccaccaaata

SEQ ID NO: 629946 - DNA, 19 bp, Mus musculus
  siRNA target sequence for Tas1r3 (NM_031872.1,1193-1211).
caattgcaccaccaaatat

SEQ ID NO: 629947 - DNA, 19 bp, Mus musculus
  siRNA target sequence for Tas1r3 (NM_031872.1,1198-1216).
gcaccaccaaatatttgca

SEQ ID NO: 629948 - DNA, 19 bp, Mus musculus
  siRNA target sequence for Tas1r3 (NM_031872.1,1265-1283).
cagtgcaatgtctcacatt

SEQ ID NO: 629949 - DNA, 19 bp, Mus musculus
  siRNA target sequence for Tas1r3 (NM_031872.1,1278-1296).
cacattgccacgtatcaga

SEQ ID NO: 629950 - DNA, 19 bp, Mus musculus
  siRNA target sequence for Tas1r3 (NM_031872.1,1285-1303).
ccacgtatcagaacatgtt

SEQ ID NO: 629951 - DNA, 19 bp, Mus musculus
  siRNA target sequence for Tas1r3 (NM_031872.1,1288-1306).
cgtatcagaacatgttcta

SEQ ID NO: 629952 - DNA, 19 bp, Mus musculus
  siRNA target sequence for Tas1r3 (NM_031872.1,1324-1342).
gaacatgtacaatatgagt

SEQ ID NO: 629953 - DNA, 19 bp, Mus musculus
  siRNA target sequence for Tas1r3 (NM_031872.1,1330-1348).
gtacaatatgagtttccat

SEQ ID NO: 629954 - DNA, 19 bp, Mus musculus
  siRNA target sequence for Tas1r3 (NM_031872.1,1382-1400).
gggaatgtagacatggaat

SEQ ID NO: 629955 - DNA, 19 bp, Mus musculus
  siRNA target sequence for Tas1r3 (NM_031872.1,1383-1401).
ggaatgtagacatggaata

SEQ ID NO: 629956 - DNA, 19 bp, Mus musculus
  siRNA target sequence for Tas1r3 (NM_031872.1,1475-1493).
cagctgcagcagtctaaaa

SEQ ID NO: 629957 - DNA, 19 bp, Mus musculus
  siRNA target sequence for Tas1r3 (NM_031872.1,1551-1569).
gccaggttcgccgagtaaa

SEQ ID NO: 629958 - DNA, 19 bp, Mus musculus
  siRNA target sequence for Tas1r3 (NM_031872.1,1561-1579).
ccgagtaaagggctttcat

SEQ ID NO: 629959 - DNA, 19 bp, Mus musculus
  siRNA target sequence for Tas1r3 (NM_031872.1,1562-1580).
cgagtaaagggctttcatt

SEQ ID NO: 629960 - DNA, 19 bp, Mus musculus
  siRNA target sequence for Tas1r3 (NM_031872.1,1932-1950).
gccttgcacaacaaccaat

SEQ ID NO: 629961 - DNA, 19 bp, Mus musculus
  siRNA target sequence for Tas1r3 (NM_031872.1,2236-2254).
catcaccaatgcaatgtta

SEQ ID NO: 629962 - DNA, 19 bp, Mus musculus
  siRNA target sequence for Tas1r3 (NM_031872.1,2241-2259).
ccaatgcaatgttagcttt

SEQ ID NO: 629963 - DNA, 19 bp, Mus musculus
  siRNA target sequence for Tas1r3 (NM_031872.1,2329-2347).
cttcgccatgctagcttat

SEQ ID NO: 629964 - DNA, 19 bp, Mus musculus
  siRNA target sequence for Tas1r3 (NM_031872.1,2572-2590).
ggcagctcagggacacaat

SEQ ID NO: 629965 - DNA, 19 bp, Mus musculus
  siRNA target sequence for V2r1b (NM_019917.1,26-44).
ccctagttgttctcatttt

SEQ ID NO: 629966 - DNA, 19 bp, Mus musculus
  siRNA target sequence for V2r1b (NM_019917.1,62-80).
cttgttactacttaactaa

SEQ ID NO: 629967 - DNA, 19 bp, Mus musculus
  siRNA target sequence for V2r1b (NM_019917.1,69-87).
ctacttaactaaatatgct

SEQ ID NO: 629968 - DNA, 19 bp, Mus musculus
  siRNA target sequence for V2r1b (NM_019917.1,191-209).
caagccatatagcagaata

SEQ ID NO: 629969 - DNA, 19 bp, Mus musculus
  siRNA target sequence for V2r1b (NM_019917.1,194-212).
gccatatagcagaatatgt

SEQ ID NO: 629970 - DNA, 19 bp, Mus musculus
  siRNA target sequence for V2r1b (NM_019917.1,569-587).
ctccttatcagttttcaat

SEQ ID NO: 629971 - DNA, 19 bp, Mus musculus
  siRNA target sequence for V2r1b (NM_019917.1,616-634).
gtccaactgctgttatact

SEQ ID NO: 629972 - DNA, 19 bp, Mus musculus
  siRNA target sequence for V2r1b (NM_019917.1,685-703).
ctctatcttagggacatta

SEQ ID NO: 629973 - DNA, 19 bp, Mus musculus
  siRNA target sequence for V2r1b (NM_019917.1,711-729).
gatgatcagccatggaatt

SEQ ID NO: 629974 - DNA, 19 bp, Mus musculus
  siRNA target sequence for V2r1b (NM_019917.1,714-732).
gatcagccatggaatttgt

SEQ ID NO: 629975 - DNA, 19 bp, Mus musculus
  siRNA target sequence for V2r1b (NM_019917.1,815-833).
cacctgttatcattactgt

SEQ ID NO: 629976 - DNA, 19 bp, Mus musculus
  siRNA target sequence for V2r1b (NM_019917.1,850-868).
cttctgcgaattgtctatt

SEQ ID NO: 629977 - DNA, 19 bp, Mus musculus
  siRNA target sequence for V2r1b (NM_019917.1,929-947).
ccacattaccctttgaaca

SEQ ID NO: 629978 - DNA, 19 bp, Mus musculus
  siRNA target sequence for V2r1b (NM_019917.1,932-950).
cattaccctttgaacagaa

SEQ ID NO: 629979 - DNA, 19 bp, Mus musculus
  siRNA target sequence for V2r1b (NM_019917.1,938-956).
cctttgaacagaatttaat

SEQ ID NO: 629980 - DNA, 19 bp, Mus musculus
  siRNA target sequence for V2r1b (NM_019917.1,1119-1137).
cagactctgggatctaagt

SEQ ID NO: 629981 - DNA, 19 bp, Mus musculus
  siRNA target sequence for V2r1b (NM_019917.1,1279-1297).
ggagactcatccaataaat

SEQ ID NO: 629982 - DNA, 19 bp, Mus musculus
  siRNA target sequence for V2r1b (NM_019917.1,1794-1812).
ctccttggccattagttta

SEQ ID NO: 629983 - DNA, 19 bp, Mus musculus
  siRNA target sequence for V2r1b (NM_019917.1,1818-1836).
cttttcagctatgattcta

SEQ ID NO: 629984 - DNA, 19 bp, Mus musculus
  siRNA target sequence for V2r1b (NM_019917.1,2445-2463).
ggccgtggaaattctttca

SEQ ID NO: 629985 - DNA, 19 bp, Mus musculus
  siRNA target sequence for V2r1b (NM_019917.1,2446-2464).
gccgtggaaattctttcaa

SEQ ID NO: 629986 - DNA, 19 bp, Mus musculus
  siRNA target sequence for V2r1b (NM_019917.1,2447-2465).
ccgtggaaattctttcaat

SEQ ID NO: 629987 - DNA, 19 bp, Mus musculus
  siRNA target sequence for V2r4 (NM_009493.1,911-929).
gtcactaacaaatgttatt

SEQ ID NO: 629988 - DNA, 19 bp, Mus musculus
  siRNA target sequence for V2r4 (NM_009493.1,915-933).
ctaacaaatgttattatca

SEQ ID NO: 629989 - DNA, 19 bp, Mus musculus
  siRNA target sequence for V2r9 (NM_009495.1,407-425).
caggatttattgagagtta

SEQ ID NO: 629990 - DNA, 19 bp, Mus musculus
  siRNA target sequence for Bai2 (NM_173071.1,422-440).
ctgcacttcgacaagaact

SEQ ID NO: 629991 - DNA, 19 bp, Mus musculus
  siRNA target sequence for Bai2 (NM_173071.1,424-442).
gcacttcgacaagaacttt

SEQ ID NO: 629992 - DNA, 19 bp, Mus musculus
  siRNA target sequence for Bai2 (NM_173071.1,521-539).
gaggtcttgctgatcaaca

SEQ ID NO: 629993 - DNA, 19 bp, Mus musculus
  siRNA target sequence for Bai2 (NM_173071.1,1179-1197).
gtcccgagctgcagactaa

SEQ ID NO: 629994 - DNA, 19 bp, Mus musculus
  siRNA target sequence for Bai2 (NM_173071.1,1226-1244).
gaaggccagtggctagaat

SEQ ID NO: 629995 - DNA, 19 bp, Mus musculus
  siRNA target sequence for Bai2 (NM_173071.1,1258-1276).
cccatgctcatcatcttgt

SEQ ID NO: 629996 - DNA, 19 bp, Mus musculus
  siRNA target sequence for Bai2 (NM_173071.1,1292-1310).
cagcgcagccggaaatgca

SEQ ID NO: 629997 - DNA, 19 bp, Mus musculus
  siRNA target sequence for Bai2 (NM_173071.1,1551-1569).
gtccagccttccatgagat

SEQ ID NO: 629998 - DNA, 19 bp, Mus musculus
  siRNA target sequence for Bai2 (NM_173071.1,1575-1593).
gggatgagtacgtgatgtt

SEQ ID NO: 629999 - DNA, 19 bp, Mus musculus
  siRNA target sequence for Bai2 (NM_173071.1,1577-1595).
gatgagtacgtgatgttga

SEQ ID NO: 630000 - DNA, 19 bp, Mus musculus
  siRNA target sequence for Bai2 (NM_173071.1,1580-1598).
gagtacgtgatgttgatga

SEQ ID NO: 630001 - DNA, 19 bp, Mus musculus
  siRNA target sequence for Bai2 (NM_173071.1,1611-1629).
cggcagctggcgagatcat

SEQ ID NO: 630002 - DNA, 19 bp, Mus musculus
  siRNA target sequence for Bai2 (NM_173071.1,1616-1634).
gctggcgagatcatttaca

SEQ ID NO: 630003 - DNA, 19 bp, Mus musculus
  siRNA target sequence for Bai2 (NM_173071.1,1686-1704).
gtgcccagggcgtagcata

SEQ ID NO: 630004 - DNA, 19 bp, Mus musculus
  siRNA target sequence for Bai2 (NM_173071.1,1717-1735).
cagctttgctcgttgcata

SEQ ID NO: 630005 - DNA, 19 bp, Mus musculus
  siRNA target sequence for Bai2 (NM_173071.1,1727-1745).
cgttgcatatcccatgaat

SEQ ID NO: 630006 - DNA, 19 bp, Mus musculus
  siRNA target sequence for Bai2 (NM_173071.1,1847-1865).
ctggcacggcgcacttact

SEQ ID NO: 630007 - DNA, 19 bp, Mus musculus
  siRNA target sequence for Bai2 (NM_173071.1,1850-1868).
gcacggcgcacttactaca

SEQ ID NO: 630008 - DNA, 19 bp, Mus musculus
  siRNA target sequence for Bai2 (NM_173071.1,2233-2251).
ctcagaggatcgtctcttt

SEQ ID NO: 630009 - DNA, 19 bp, Mus musculus
  siRNA target sequence for Bai2 (NM_173071.1,2235-2253).
cagaggatcgtctctttct

SEQ ID NO: 630010 - DNA, 19 bp, Mus musculus
  siRNA target sequence for Bai2 (NM_173071.1,2558-2576).
gtggaactctcgtacatca

SEQ ID NO: 630011 - DNA, 19 bp, Mus musculus
  siRNA target sequence for Bai2 (NM_173071.1,2561-2579).
gaactctcgtacatcatca

SEQ ID NO: 630012 - DNA, 19 bp, Mus musculus
  siRNA target sequence for Bai2 (NM_173071.1,2851-2869).
ctggaggtttataaaatca

SEQ ID NO: 630013 - DNA, 19 bp, Mus musculus
  siRNA target sequence for Bai2 (NM_173071.1,2853-2871).
ggaggtttataaaatcaga

SEQ ID NO: 630014 - DNA, 19 bp, Mus musculus
  siRNA target sequence for Bai2 (NM_173071.1,3152-3170).
cgcaccaaaggatatggta

SEQ ID NO: 630015 - DNA, 19 bp, Mus musculus
  siRNA target sequence for Bai2 (NM_173071.1,3225-3243).
gtccagcagcagtcattgt

SEQ ID NO: 630016 - DNA, 19 bp, Mus musculus
  siRNA target sequence for Bai2 (NM_173071.1,3263-3281).
gggattatcgtcttcaaca

SEQ ID NO: 630017 - DNA, 19 bp, Mus musculus
  siRNA target sequence for Bai2 (NM_173071.1,3264-3282).
ggattatcgtcttcaacaa

SEQ ID NO: 630018 - DNA, 19 bp, Mus musculus
  siRNA target sequence for Bai2 (NM_173071.1,3533-3551).
gcactctttgccgttttca

SEQ ID NO: 630019 - DNA, 19 bp, Mus musculus
  siRNA target sequence for Bai2 (NM_173071.1,3534-3552).
cactctttgccgttttcaa

SEQ ID NO: 630020 - DNA, 19 bp, Mus musculus
  siRNA target sequence for Bai2 (NM_173071.1,3536-3554).
ctctttgccgttttcaact

SEQ ID NO: 630021 - DNA, 19 bp, Mus musculus
  siRNA target sequence for Bai2 (NM_173071.1,3729-3747).
cttgtcagacagttctgtt

SEQ ID NO: 630022 - DNA, 19 bp, Mus musculus
  siRNA target sequence for Bai2 (NM_173071.1,3732-3750).
gtcagacagttctgttcaa

SEQ ID NO: 630023 - DNA, 19 bp, Mus musculus
  siRNA target sequence for Bai2 (NM_173071.1,3982-4000).
gttggaccttacatggata

SEQ ID NO: 630024 - DNA, 19 bp, Mus musculus
  siRNA target sequence for Bai2 (NM_173071.1,4350-4368).
gctcccttgagcgaaagaa

SEQ ID NO: 630025 - DNA, 19 bp, Mus musculus
  siRNA target sequence for Bai2 (NM_173071.1,4555-4573).
ctggagcaccttcaaatct

SEQ ID NO: 630026 - DNA, 19 bp, Mus musculus
  siRNA target sequence for Bai3 (NM_175642.2,10-28).
gttcgtaacctgctgattt

SEQ ID NO: 630027 - DNA, 19 bp, Mus musculus
  siRNA target sequence for Bai3 (NM_175642.2,13-31).
cgtaacctgctgatttata

SEQ ID NO: 630028 - DNA, 19 bp, Mus musculus
  siRNA target sequence for Bai3 (NM_175642.2,14-32).
gtaacctgctgatttatat

SEQ ID NO: 630029 - DNA, 19 bp, Mus musculus
  siRNA target sequence for Bai3 (NM_175642.2,99-117).
ggtgaagggagtcatttat

SEQ ID NO: 630030 - DNA, 19 bp, Mus musculus
  siRNA target sequence for Bai3 (NM_175642.2,102-120).
gaagggagtcatttatgga

SEQ ID NO: 630031 - DNA, 19 bp, Mus musculus
  siRNA target sequence for Bai3 (NM_175642.2,109-127).
gtcatttatggatcctatt

SEQ ID NO: 630032 - DNA, 19 bp, Mus musculus
  siRNA target sequence for Bai3 (NM_175642.2,111-129).
catttatggatcctattct

SEQ ID NO: 630033 - DNA, 19 bp, Mus musculus
  siRNA target sequence for Bai3 (NM_175642.2,187-205).
gatccaaccaaatatagca

SEQ ID NO: 630034 - DNA, 19 bp, Mus musculus
  siRNA target sequence for Bai3 (NM_175642.2,229-247).
gaccttagctgctctaact

SEQ ID NO: 630035 - DNA, 19 bp, Mus musculus
  siRNA target sequence for Bai3 (NM_175642.2,232-250).
cttagctgctctaactttt

SEQ ID NO: 630036 - DNA, 19 bp, Mus musculus
  siRNA target sequence for Bai3 (NM_175642.2,251-269).
cccttctggcttatcagtt

SEQ ID NO: 630037 - DNA, 19 bp, Mus musculus
  siRNA target sequence for Bai3 (NM_175642.2,258-276).
ggcttatcagtttgatcat

SEQ ID NO: 630038 - DNA, 19 bp, Mus musculus
  siRNA target sequence for Bai3 (NM_175642.2,259-277).
gcttatcagtttgatcatt

SEQ ID NO: 630039 - DNA, 19 bp, Mus musculus
  siRNA target sequence for Bai3 (NM_175642.2,312-330).
gaaccattccataatgcaa

SEQ ID NO: 630040 - DNA, 19 bp, Mus musculus
  siRNA target sequence for Bai3 (NM_175642.2,316-334).
cattccataatgcaacttt

SEQ ID NO: 630041 - DNA, 19 bp, Mus musculus
  siRNA target sequence for Bai3 (NM_175642.2,355-373).
gtttttctacagtacgata

SEQ ID NO: 630042 - DNA, 19 bp, Mus musculus
  siRNA target sequence for Bai3 (NM_175642.2,361-379).
ctacagtacgataaaaatt

SEQ ID NO: 630043 - DNA, 19 bp, Mus musculus
  siRNA target sequence for Bai3 (NM_175642.2,394-412).
cgggtatttccaactgatt

SEQ ID NO: 630044 - DNA, 19 bp, Mus musculus
  siRNA target sequence for Bai3 (NM_175642.2,395-413).
gggtatttccaactgattt

SEQ ID NO: 630045 - DNA, 19 bp, Mus musculus
  siRNA target sequence for Bai3 (NM_175642.2,495-513).
gtttggttgccatgtctta

SEQ ID NO: 630046 - DNA, 19 bp, Mus musculus
  siRNA target sequence for Bai3 (NM_175642.2,499-517).
ggttgccatgtcttatgca

SEQ ID NO: 630047 - DNA, 19 bp, Mus musculus
  siRNA target sequence for Bai3 (NM_175642.2,521-539).
ggttggaaagctgcttaaa

SEQ ID NO: 630048 - DNA, 19 bp, Mus musculus
  siRNA target sequence for Bai3 (NM_175642.2,522-540).
gttggaaagctgcttaaaa

SEQ ID NO: 630049 - DNA, 19 bp, Mus musculus
  siRNA target sequence for Bai3 (NM_175642.2,566-584).
gtggaattatgtacacaaa

SEQ ID NO: 630050 - DNA, 19 bp, Mus musculus
  siRNA target sequence for Bai3 (NM_175642.2,568-586).
ggaattatgtacacaaaat

SEQ ID NO: 630051 - DNA, 19 bp, Mus musculus
  siRNA target sequence for Bai3 (NM_175642.2,743-761).
gaccacccaaagaagaatt

SEQ ID NO: 630052 - DNA, 19 bp, Mus musculus
  siRNA target sequence for Bai3 (NM_175642.2,749-767).
ccaaagaagaatttggaat

SEQ ID NO: 630053 - DNA, 19 bp, Mus musculus
  siRNA target sequence for Bai3 (NM_175642.2,772-790).
ggagatcatacaattaaaa

SEQ ID NO: 630054 - DNA, 19 bp, Mus musculus
  siRNA target sequence for Bai3 (NM_175642.2,838-856).
gctgatgctgctaaattta

SEQ ID NO: 630055 - DNA, 19 bp, Mus musculus
  siRNA target sequence for Bai3 (NM_175642.2,839-857).
ctgatgctgctaaatttat

SEQ ID NO: 630056 - DNA, 19 bp, Mus musculus
  siRNA target sequence for Bai3 (NM_175642.2,900-918).
gagcgcatgctcagttact

SEQ ID NO: 630057 - DNA, 19 bp, Mus musculus
  siRNA target sequence for Bai3 (NM_175642.2,903-921).
cgcatgctcagttacttgt

SEQ ID NO: 630058 - DNA, 19 bp, Mus musculus
  siRNA target sequence for Bai3 (NM_175642.2,936-954).
ggtgcgaaccagaacttgt

SEQ ID NO: 630059 - DNA, 19 bp, Mus musculus
  siRNA target sequence for Bai3 (NM_175642.2,939-957).
gcgaaccagaacttgtgta

SEQ ID NO: 630060 - DNA, 19 bp, Mus musculus
  siRNA target sequence for Bai3 (NM_175642.2,940-958).
cgaaccagaacttgtgtat

SEQ ID NO: 630061 - DNA, 19 bp, Mus musculus
  siRNA target sequence for Bai3 (NM_175642.2,1162-1180).
catcacaagccttgtaata

SEQ ID NO: 630062 - DNA, 19 bp, Mus musculus
  siRNA target sequence for Bai3 (NM_175642.2,1341-1359).
ctacaaccctgaatgtaca

SEQ ID NO: 630063 - DNA, 19 bp, Mus musculus
  siRNA target sequence for Bai3 (NM_175642.2,1515-1533).
gcggtgcccagcaccttat

SEQ ID NO: 630064 - DNA, 19 bp, Mus musculus
  siRNA target sequence for Bai3 (NM_175642.2,1542-1560).
cccagaggattatcttata

SEQ ID NO: 630065 - DNA, 19 bp, Mus musculus
  siRNA target sequence for Bai3 (NM_175642.2,1543-1561).
ccagaggattatcttatat

SEQ ID NO: 630066 - DNA, 19 bp, Mus musculus
  siRNA target sequence for Bai3 (NM_175642.2,1546-1564).
gaggattatcttatatcaa

SEQ ID NO: 630067 - DNA, 19 bp, Mus musculus
  siRNA target sequence for Bai3 (NM_175642.2,1589-1607).
gcgacctggcattcaatca

SEQ ID NO: 630068 - DNA, 19 bp, Mus musculus
  siRNA target sequence for Bai3 (NM_175642.2,1590-1608).
cgacctggcattcaatcaa

SEQ ID NO: 630069 - DNA, 19 bp, Mus musculus
  siRNA target sequence for Bai3 (NM_175642.2,1686-1704).
gagctttgcaagatgcata

SEQ ID NO: 630070 - DNA, 19 bp, Mus musculus
  siRNA target sequence for Bai3 (NM_175642.2,1697-1715).
gatgcatatccaatgagta

SEQ ID NO: 630071 - DNA, 19 bp, Mus musculus
  siRNA target sequence for Bai3 (NM_175642.2,1718-1736).
gacacttgcagcattcaat

SEQ ID NO: 630072 - DNA, 19 bp, Mus musculus
  siRNA target sequence for Bai3 (NM_175642.2,1720-1738).
cacttgcagcattcaatta

SEQ ID NO: 630073 - DNA, 19 bp, Mus musculus
  siRNA target sequence for Bai3 (NM_175642.2,1722-1740).
cttgcagcattcaattaaa

SEQ ID NO: 630074 - DNA, 19 bp, Mus musculus
  siRNA target sequence for Bai3 (NM_175642.2,1794-1812).
caccaagacactattggat

SEQ ID NO: 630075 - DNA, 19 bp, Mus musculus
  siRNA target sequence for Bai3 (NM_175642.2,1796-1814).
ccaagacactattggattt

SEQ ID NO: 630076 - DNA, 19 bp, Mus musculus
  siRNA target sequence for Bai3 (NM_175642.2,1797-1815).
caagacactattggattta

SEQ ID NO: 630077 - DNA, 19 bp, Mus musculus
  siRNA target sequence for Bai3 (NM_175642.2,1876-1894).
gtgacagacacgtttaaaa

SEQ ID NO: 630078 - DNA, 19 bp, Mus musculus
  siRNA target sequence for Bai3 (NM_175642.2,1886-1904).
cgtttaaaagggcaagtta

SEQ ID NO: 630079 - DNA, 19 bp, Mus musculus
  siRNA target sequence for Bai3 (NM_175642.2,1926-1944).
ccagaacttctttcaaata

SEQ ID NO: 630080 - DNA, 19 bp, Mus musculus
  siRNA target sequence for Bai3 (NM_175642.2,1998-2016).
gatttacccaggctcaata

SEQ ID NO: 630081 - DNA, 19 bp, Mus musculus
  siRNA target sequence for Bai3 (NM_175642.2,2004-2022).
cccaggctcaatagagtta

SEQ ID NO: 630082 - DNA, 19 bp, Mus musculus
  siRNA target sequence for Bai3 (NM_175642.2,2005-2023).
ccaggctcaatagagttaa

SEQ ID NO: 630083 - DNA, 19 bp, Mus musculus
  siRNA target sequence for Bai3 (NM_175642.2,2009-2027).
gctcaatagagttaatgca

SEQ ID NO: 630084 - DNA, 19 bp, Mus musculus
  siRNA target sequence for Bai3 (NM_175642.2,2019-2037).
gttaatgcaggtgattgaa

SEQ ID NO: 630085 - DNA, 19 bp, Mus musculus
  siRNA target sequence for Bai3 (NM_175642.2,2025-2043).
gcaggtgattgaagatttt

SEQ ID NO: 630086 - DNA, 19 bp, Mus musculus
  siRNA target sequence for Bai3 (NM_175642.2,2026-2044).
caggtgattgaagatttta

SEQ ID NO: 630087 - DNA, 19 bp, Mus musculus
  siRNA target sequence for Bai3 (NM_175642.2,2064-2082).
gatgatggactttcaaaat

SEQ ID NO: 630088 - DNA, 19 bp, Mus musculus
  siRNA target sequence for Bai3 (NM_175642.2,2104-2122).
gtagtggcgagcattcaga

SEQ ID NO: 630089 - DNA, 19 bp, Mus musculus
  siRNA target sequence for Bai3 (NM_175642.2,2140-2158).
gttctaaccgacatcaact

SEQ ID NO: 630090 - DNA, 19 bp, Mus musculus
  siRNA target sequence for Bai3 (NM_175642.2,2184-2202).
ggtagactgggcaagaaat

SEQ ID NO: 630091 - DNA, 19 bp, Mus musculus
  siRNA target sequence for Bai3 (NM_175642.2,2185-2203).
gtagactgggcaagaaatt

SEQ ID NO: 630092 - DNA, 19 bp, Mus musculus
  siRNA target sequence for Bai3 (NM_175642.2,2190-2208).
ctgggcaagaaattcagaa

SEQ ID NO: 630093 - DNA, 19 bp, Mus musculus
  siRNA target sequence for Bai3 (NM_175642.2,2209-2227).
gatcgcgttgtgattccaa

SEQ ID NO: 630094 - DNA, 19 bp, Mus musculus
  siRNA target sequence for Bai3 (NM_175642.2,2212-2230).
cgcgttgtgattccaaaaa

SEQ ID NO: 630095 - DNA, 19 bp, Mus musculus
  siRNA target sequence for Bai3 (NM_175642.2,2243-2261).
ccgtgtcttcaaaagaatt

SEQ ID NO: 630096 - DNA, 19 bp, Mus musculus
  siRNA target sequence for Bai3 (NM_175642.2,2284-2302).
cttggagcggtcctataca

SEQ ID NO: 630097 - DNA, 19 bp, Mus musculus
  siRNA target sequence for Bai3 (NM_175642.2,2287-2305).
ggagcggtcctatacaaaa

SEQ ID NO: 630098 - DNA, 19 bp, Mus musculus
  siRNA target sequence for Bai3 (NM_175642.2,2288-2306).
gagcggtcctatacaaaaa

SEQ ID NO: 630099 - DNA, 19 bp, Mus musculus
  siRNA target sequence for Bai3 (NM_175642.2,2290-2308).
gcggtcctatacaaaaact

SEQ ID NO: 630100 - DNA, 19 bp, Mus musculus
  siRNA target sequence for Bai3 (NM_175642.2,2291-2309).
cggtcctatacaaaaactt

SEQ ID NO: 630101 - DNA, 19 bp, Mus musculus
  siRNA target sequence for Bai3 (NM_175642.2,2292-2310).
ggtcctatacaaaaactta

SEQ ID NO: 630102 - DNA, 19 bp, Mus musculus
  siRNA target sequence for Bai3 (NM_175642.2,2301-2319).
caaaaacttagacctaatt

SEQ ID NO: 630103 - DNA, 19 bp, Mus musculus
  siRNA target sequence for Bai3 (NM_175642.2,2372-2390).
caatcaggcctgaacctaa

SEQ ID NO: 630104 - DNA, 19 bp, Mus musculus
  siRNA target sequence for Bai3 (NM_175642.2,2376-2394).
caggcctgaacctaaaaca

SEQ ID NO: 630105 - DNA, 19 bp, Mus musculus
  siRNA target sequence for Bai3 (NM_175642.2,2460-2478).
gttatgggatgactcaaaa

SEQ ID NO: 630106 - DNA, 19 bp, Mus musculus
  siRNA target sequence for Bai3 (NM_175642.2,2465-2483).
gggatgactcaaaatcgaa

SEQ ID NO: 630107 - DNA, 19 bp, Mus musculus
  siRNA target sequence for Bai3 (NM_175642.2,2474-2492).
caaaatcgaacgagtcttt

SEQ ID NO: 630108 - DNA, 19 bp, Mus musculus
  siRNA target sequence for Bai3 (NM_175642.2,2725-2743).
gagaggtccatcattctaa

SEQ ID NO: 630109 - DNA, 19 bp, Mus musculus
  siRNA target sequence for Bai3 (NM_175642.2,2727-2745).
gaggtccatcattctaatt

SEQ ID NO: 630110 - DNA, 19 bp, Mus musculus
  siRNA target sequence for Bai3 (NM_175642.2,2757-2775).
gtctatcatctcatccaat

SEQ ID NO: 630111 - DNA, 19 bp, Mus musculus
  siRNA target sequence for Bai3 (NM_175642.2,2768-2786).
catccaatatcctcatact

SEQ ID NO: 630112 - DNA, 19 bp, Mus musculus
  siRNA target sequence for Bai3 (NM_175642.2,2834-2852).
ccgcgttcctgcatttttt

SEQ ID NO: 630113 - DNA, 19 bp, Mus musculus
  siRNA target sequence for Bai3 (NM_175642.2,2884-2902).
gaggcgtggcagtcgtata

SEQ ID NO: 630114 - DNA, 19 bp, Mus musculus
  siRNA target sequence for Bai3 (NM_175642.2,2905-2923).
gctgtgacaggaaaaatca

SEQ ID NO: 630115 - DNA, 19 bp, Mus musculus
  siRNA target sequence for Bai3 (NM_175642.2,2922-2940).
caggacccggcttataaga

SEQ ID NO: 630116 - DNA, 19 bp, Mus musculus
  siRNA target sequence for Bai3 (NM_175642.2,2924-2942).
ggacccggcttataagaaa

SEQ ID NO: 630117 - DNA, 19 bp, Mus musculus
  siRNA target sequence for Bai3 (NM_175642.2,2963-2981).
gggggctgccagctttagt

SEQ ID NO: 630118 - DNA, 19 bp, Mus musculus
  siRNA target sequence for Bai3 (NM_175642.2,2964-2982).
ggggctgccagctttagta

SEQ ID NO: 630119 - DNA, 19 bp, Mus musculus
  siRNA target sequence for Bai3 (NM_175642.2,3017-3035).
gatacggcacggatcacta

SEQ ID NO: 630120 - DNA, 19 bp, Mus musculus
  siRNA target sequence for Bai3 (NM_175642.2,3149-3167).
gagatgggatcctagataa

SEQ ID NO: 630121 - DNA, 19 bp, Mus musculus
  siRNA target sequence for Bai3 (NM_175642.2,3156-3174).
gatcctagataaaaagcta

SEQ ID NO: 630122 - DNA, 19 bp, Mus musculus
  siRNA target sequence for Bai3 (NM_175642.2,3210-3228).
cggtctgacgctcaaatgt

SEQ ID NO: 630123 - DNA, 19 bp, Mus musculus
  siRNA target sequence for Bai3 (NM_175642.2,3362-3380).
cagataaacgctccatatt

SEQ ID NO: 630124 - DNA, 19 bp, Mus musculus
  siRNA target sequence for Bai3 (NM_175642.2,3370-3388).
cgctccatattgtttcaga

SEQ ID NO: 630125 - DNA, 19 bp, Mus musculus
  siRNA target sequence for Bai3 (NM_175642.2,3371-3389).
gctccatattgtttcagat

SEQ ID NO: 630126 - DNA, 19 bp, Mus musculus
  siRNA target sequence for Bai3 (NM_175642.2,3374-3392).
ccatattgtttcagatact

SEQ ID NO: 630127 - DNA, 19 bp, Mus musculus
  siRNA target sequence for Bai3 (NM_175642.2,3398-3416).
ccgtgtttgattcattaca

SEQ ID NO: 630128 - DNA, 19 bp, Mus musculus
  siRNA target sequence for Bai3 (NM_175642.2,3399-3417).
cgtgtttgattcattacaa

SEQ ID NO: 630129 - DNA, 19 bp, Mus musculus
  siRNA target sequence for Bai3 (NM_175642.2,3502-3520).
ccaatcaatgctgattctt

SEQ ID NO: 630130 - DNA, 19 bp, Mus musculus
  siRNA target sequence for Bai3 (NM_175642.2,3507-3525).
caatgctgattcttcaagt

SEQ ID NO: 630131 - DNA, 19 bp, Mus musculus
  siRNA target sequence for Bai3 (NM_175642.2,3533-3551).
ctaatggacatgctcaaat

SEQ ID NO: 630132 - DNA, 19 bp, Mus musculus
  siRNA target sequence for Bai3 (NM_175642.2,3590-3608).
gatcagtgcttcataagga

SEQ ID NO: 630133 - DNA, 19 bp, Mus musculus
  siRNA target sequence for Bai3 (NM_175642.2,3593-3611).
cagtgcttcataaggatat

SEQ ID NO: 630134 - DNA, 19 bp, Mus musculus
  siRNA target sequence for Bai3 (NM_175642.2,3648-3666).
ctccaggatttctctaaat

SEQ ID NO: 630135 - DNA, 19 bp, Mus musculus
  siRNA target sequence for Bai3 (NM_175642.2,3697-3715).
gaagggctaagctactcaa

SEQ ID NO: 630136 - DNA, 19 bp, Mus musculus
  siRNA target sequence for Bai3 (NM_175642.2,3700-3718).
gggctaagctactcaacat

SEQ ID NO: 630137 - DNA, 19 bp, Mus musculus
  siRNA target sequence for Bai3 (NM_175642.2,3701-3719).
ggctaagctactcaacatt

SEQ ID NO: 630138 - DNA, 19 bp, Mus musculus
  siRNA target sequence for Bai3 (NM_175642.2,3711-3729).
ctcaacattgcctggaaat

SEQ ID NO: 630139 - DNA, 19 bp, Mus musculus
  siRNA target sequence for Bai3 (NM_175642.2,3716-3734).
cattgcctggaaatgtcat

SEQ ID NO: 630140 - DNA, 19 bp, Mus musculus
  siRNA target sequence for Bai3 (NM_175642.2,3765-3783).
cctgcacatgcctatgagt

SEQ ID NO: 630141 - DNA, 19 bp, Mus musculus
  siRNA target sequence for Bai3 (NM_175642.2,3766-3784).
ctgcacatgcctatgagta

SEQ ID NO: 630142 - DNA, 19 bp, Mus musculus
  siRNA target sequence for Bai3 (NM_175642.2,3769-3787).
cacatgcctatgagtatga

SEQ ID NO: 630143 - DNA, 19 bp, Mus musculus
  siRNA target sequence for Bai3 (NM_175642.2,3782-3800).
gtatgaacgagctaagcaa

SEQ ID NO: 630144 - DNA, 19 bp, Mus musculus
  siRNA target sequence for Bai3 (NM_175642.2,3797-3815).
gcaatccgtgtctgaaaaa

SEQ ID NO: 630145 - DNA, 19 bp, Mus musculus
  siRNA target sequence for Bai3 (NM_175642.2,3831-3849).
gcggagaactgtgtactta

SEQ ID NO: 630146 - DNA, 19 bp, Mus musculus
  siRNA target sequence for Bai3 (NM_175642.2,3832-3850).
cggagaactgtgtacttat

SEQ ID NO: 630147 - DNA, 19 bp, Mus musculus
  siRNA target sequence for Bai3 (NM_175642.2,3846-3864).
cttatgcacggatgacaat

SEQ ID NO: 630148 - DNA, 19 bp, Mus musculus
  siRNA target sequence for Bai3 (NM_175642.2,3898-3916).
caagaacgaatgatggaaa

SEQ ID NO: 630149 - DNA, 19 bp, Mus musculus
  siRNA target sequence for Bai3 (NM_175642.2,3950-3968).
gcacccagccatcaatgaa

SEQ ID NO: 630150 - DNA, 19 bp, Mus musculus
  siRNA target sequence for Bai3 (NM_175642.2,3951-3969).
cacccagccatcaatgaaa

SEQ ID NO: 630151 - DNA, 19 bp, Mus musculus
  siRNA target sequence for Bai3 (NM_175642.2,3997-4015).
gaaaccttgccgcatgaaa

SEQ ID NO: 630152 - DNA, 19 bp, Mus musculus
  siRNA target sequence for Bai3 (NM_175642.2,4005-4023).
gccgcatgaaaggctatta

SEQ ID NO: 630153 - DNA, 19 bp, Mus musculus
  siRNA target sequence for Bai3 (NM_175642.2,4007-4025).
cgcatgaaaggctattaca

SEQ ID NO: 630154 - DNA, 19 bp, Mus musculus
  siRNA target sequence for Bai3 (NM_175642.2,4033-4051).
gtaaaccctgaattcaata

SEQ ID NO: 630155 - DNA, 19 bp, Mus musculus
  siRNA target sequence for Bai3 (NM_175642.2,4038-4056).
ccctgaattcaatatgaat

SEQ ID NO: 630156 - DNA, 19 bp, Mus musculus
  siRNA target sequence for Bai3 (NM_175642.2,4061-4079).
ccgtaatggaccagtttaa

SEQ ID NO: 630157 - DNA, 19 bp, Mus musculus
  siRNA target sequence for Bai3 (NM_175642.2,4062-4080).
cgtaatggaccagtttaat

SEQ ID NO: 630158 - DNA, 19 bp, Mus musculus
  siRNA target sequence for Bai3 (NM_175642.2,4063-4081).
gtaatggaccagtttaata

SEQ ID NO: 630159 - DNA, 19 bp, Mus musculus
  siRNA target sequence for Bai3 (NM_175642.2,4069-4087).
gaccagtttaatatgaact

SEQ ID NO: 630160 - DNA, 19 bp, Mus musculus
  siRNA target sequence for Bai3 (NM_175642.2,4071-4089).
ccagtttaatatgaactta

SEQ ID NO: 630161 - DNA, 19 bp, Mus musculus
  siRNA target sequence for Bai3 (NM_175642.2,4074-4092).
gtttaatatgaacttagat

SEQ ID NO: 630162 - DNA, 19 bp, Mus musculus
  siRNA target sequence for Bai3 (NM_175642.2,4103-4121).
caccccaggaacatatgca

SEQ ID NO: 630163 - DNA, 19 bp, Mus musculus
  siRNA target sequence for Bai3 (NM_175642.2,4108-4126).
caggaacatatgcagaatt

SEQ ID NO: 630164 - DNA, 19 bp, Mus musculus
  siRNA target sequence for Bai3 (NM_175642.2,4141-4159).
cgcacagctgtgaagaatt

SEQ ID NO: 630165 - DNA, 19 bp, Mus musculus
  siRNA target sequence for Bai3 (NM_175642.2,4165-4183).
gcctctgagttggatgata

SEQ ID NO: 630166 - DNA, 19 bp, Mus musculus
  siRNA target sequence for Bai3 (NM_175642.2,4204-4222).
gaaactggatcaacgatat

SEQ ID NO: 630167 - DNA, 19 bp, Mus musculus
  siRNA target sequence for Bai3 (NM_175642.2,4208-4226).
ctggatcaacgatatcaat

SEQ ID NO: 630168 - DNA, 19 bp, Mus musculus
  siRNA target sequence for Bai3 (NM_175642.2,4210-4228).
ggatcaacgatatcaatga

SEQ ID NO: 630169 - DNA, 19 bp, Mus musculus
  siRNA target sequence for Bai3 (NM_175642.2,4253-4271).
ggtattctgaccttgactt

SEQ ID NO: 630170 - DNA, 19 bp, Mus musculus
  siRNA target sequence for Bai3 (NM_175642.2,4298-4316).
ggcacatggaattgtttca

SEQ ID NO: 630171 - DNA, 19 bp, Mus musculus
  siRNA target sequence for Bai3 (NM_175642.2,4465-4483).
gacacggaggcaaaggata

SEQ ID NO: 630172 - DNA, 19 bp, Mus musculus
  siRNA target sequence for Crhr2 (NM_009953.1,376-394).
gaccgtgccccgagtactt

SEQ ID NO: 630173 - DNA, 19 bp, Mus musculus
  siRNA target sequence for Crhr2 (NM_009953.1,378-396).
ccgtgccccgagtacttca

SEQ ID NO: 630174 - DNA, 19 bp, Mus musculus
  siRNA target sequence for Crhr2 (NM_009953.1,379-397).
cgtgccccgagtacttcaa

SEQ ID NO: 630175 - DNA, 19 bp, Mus musculus
  siRNA target sequence for Crhr2 (NM_009953.1,380-398).
gtgccccgagtacttcaat

SEQ ID NO: 630176 - DNA, 19 bp, Mus musculus
  siRNA target sequence for Crhr2 (NM_009953.1,457-475).
gggcctcaagggtcaacta

SEQ ID NO: 630177 - DNA, 19 bp, Mus musculus
  siRNA target sequence for Crhr2 (NM_009953.1,459-477).
gcctcaagggtcaactact

SEQ ID NO: 630178 - DNA, 19 bp, Mus musculus
  siRNA target sequence for Crhr2 (NM_009953.1,478-496).
cacactgcgaacccatttt

SEQ ID NO: 630179 - DNA, 19 bp, Mus musculus
  siRNA target sequence for Crhr2 (NM_009953.1,482-500).
ctgcgaacccattttggat

SEQ ID NO: 630180 - DNA, 19 bp, Mus musculus
  siRNA target sequence for Crhr2 (NM_009953.1,528-546).
cgaatcgccctcattgtca

SEQ ID NO: 630181 - DNA, 19 bp, Mus musculus
  siRNA target sequence for Crhr2 (NM_009953.1,529-547).
gaatcgccctcattgtcaa

SEQ ID NO: 630182 - DNA, 19 bp, Mus musculus
  siRNA target sequence for Crhr2 (NM_009953.1,813-831).
ctgcacacggccattgtca

SEQ ID NO: 630183 - DNA, 19 bp, Mus musculus
  siRNA target sequence for Crhr2 (NM_009953.1,886-904).
gcattccctgccctatcat

SEQ ID NO: 630184 - DNA, 19 bp, Mus musculus
  siRNA target sequence for Crhr2 (NM_009953.1,923-941).
caaactctactatgagaat

SEQ ID NO: 630185 - DNA, 19 bp, Mus musculus
  siRNA target sequence for Crhr2 (NM_009953.1,1013-1031).
gctgttgatcaattttgta

SEQ ID NO: 630186 - DNA, 19 bp, Mus musculus
  siRNA target sequence for Crhr2 (NM_009953.1,1014-1032).
ctgttgatcaattttgtat

SEQ ID NO: 630187 - DNA, 19 bp, Mus musculus
  siRNA target sequence for Crhr2 (NM_009953.1,1078-1096).
ccaccacgtccgagacaat

SEQ ID NO: 630188 - DNA, 19 bp, Mus musculus
  siRNA target sequence for Crhr2 (NM_009953.1,1082-1100).
cacgtccgagacaatccaa

SEQ ID NO: 630189 - DNA, 19 bp, Mus musculus
  siRNA target sequence for Crhr2 (NM_009953.1,1084-1102).
cgtccgagacaatccaata

SEQ ID NO: 630190 - DNA, 19 bp, Mus musculus
  siRNA target sequence for 5031409J19Rik (NM_133776.1,554-572).
gtggtcccagcaagatcat

SEQ ID NO: 630191 - DNA, 19 bp, Mus musculus
  siRNA target sequence for 5031409J19Rik (NM_133776.1,577-595).
gtgaaggccaccacatact

SEQ ID NO: 630192 - DNA, 19 bp, Mus musculus
  siRNA target sequence for 5031409J19Rik (NM_133776.1,769-787).
gtttggggcacttttgaaa

SEQ ID NO: 630193 - DNA, 19 bp, Mus musculus
  siRNA target sequence for 5031409J19Rik (NM_133776.1,808-826).
gacctttggaattcatcat

SEQ ID NO: 630194 - DNA, 19 bp, Mus musculus
  siRNA target sequence for 5031409J19Rik (NM_133776.1,816-834).
gaattcatcatctgatgta

SEQ ID NO: 630195 - DNA, 19 bp, Mus musculus
  siRNA target sequence for 5031409J19Rik (NM_133776.1,839-857).
cccactacacagttggaat

SEQ ID NO: 630196 - DNA, 19 bp, Mus musculus
  siRNA target sequence for 5031409J19Rik (NM_133776.1,840-858).
ccactacacagttggaatt

SEQ ID NO: 630197 - DNA, 19 bp, Mus musculus
  siRNA target sequence for 5031409J19Rik (NM_133776.1,843-861).
ctacacagttggaattgaa

SEQ ID NO: 630198 - DNA, 19 bp, Mus musculus
  siRNA target sequence for 5031409J19Rik (NM_133776.1,846-864).
cacagttggaattgaaaat

SEQ ID NO: 630199 - DNA, 19 bp, Mus musculus
  siRNA target sequence for 5031409J19Rik (NM_133776.1,1047-1065).
caaatatggctcttttcga

SEQ ID NO: 630200 - DNA, 19 bp, Mus musculus
  siRNA target sequence for 5031409J19Rik (NM_133776.1,1286-1304).
catctttggtgcaaaacct

SEQ ID NO: 630201 - DNA, 19 bp, Mus musculus
  siRNA target sequence for 5031409J19Rik (NM_133776.1,1366-1384).
cttctgagcaacatttcat

SEQ ID NO: 630202 - DNA, 19 bp, Mus musculus
  siRNA target sequence for 5031409J19Rik (NM_133776.1,1386-1404).
cctgtcgctggcaaactct

SEQ ID NO: 630203 - DNA, 19 bp, Mus musculus
  siRNA target sequence for 5031409J19Rik (NM_133776.1,1387-1405).
ctgtcgctggcaaactctt

SEQ ID NO: 630204 - DNA, 19 bp, Mus musculus
  siRNA target sequence for 5031409J19Rik (NM_133776.1,1389-1407).
gtcgctggcaaactcttta

SEQ ID NO: 630205 - DNA, 19 bp, Mus musculus
  siRNA target sequence for 5031409J19Rik (NM_133776.1,1428-1446).
gatgaacgtcatcaacata

SEQ ID NO: 630206 - DNA, 19 bp, Mus musculus
  siRNA target sequence for 5031409J19Rik (NM_133776.1,1437-1455).
catcaacatagctgatcat

SEQ ID NO: 630207 - DNA, 19 bp, Mus musculus
  siRNA target sequence for 5031409J19Rik (NM_133776.1,1462-1480).
gattcagcctccataacga

SEQ ID NO: 630208 - DNA, 19 bp, Mus musculus
  siRNA target sequence for 5031409J19Rik (NM_133776.1,1637-1655).
gcacacggggctacaacta

SEQ ID NO: 630209 - DNA, 19 bp, Mus musculus
  siRNA target sequence for 5031409J19Rik (NM_133776.1,1638-1656).
cacacggggctacaactat

SEQ ID NO: 630210 - DNA, 19 bp, Mus musculus
  siRNA target sequence for 5031409J19Rik (NM_133776.1,1642-1660).
cggggctacaactatcaga

SEQ ID NO: 630211 - DNA, 19 bp, Mus musculus
  siRNA target sequence for 5031409J19Rik (NM_133776.1,1643-1661).
ggggctacaactatcagat

SEQ ID NO: 630212 - DNA, 19 bp, Mus musculus
  siRNA target sequence for 5031409J19Rik (NM_133776.1,1659-1677).
gatggaaatgagacaaaat

SEQ ID NO: 630213 - DNA, 19 bp, Mus musculus
  siRNA target sequence for 5031409J19Rik (NM_133776.1,1694-1712).
gaggccacgtgtttattga

SEQ ID NO: 630214 - DNA, 19 bp, Mus musculus
  siRNA target sequence for 5031409J19Rik (NM_133776.1,1704-1722).
gtttattgaaccagatcaa

SEQ ID NO: 630215 - DNA, 19 bp, Mus musculus
  siRNA target sequence for 5031409J19Rik (NM_133776.1,1733-1751).
cgcatccaaagactattat

SEQ ID NO: 630216 - DNA, 19 bp, Mus musculus
  siRNA target sequence for 5031409J19Rik (NM_133776.1,1735-1753).
catccaaagactattatca

SEQ ID NO: 630217 - DNA, 19 bp, Mus musculus
  siRNA target sequence for 5031409J19Rik (NM_133776.1,1812-1830).
ggtcaatggcccagtgata

SEQ ID NO: 630218 - DNA, 19 bp, Mus musculus
  siRNA target sequence for 5031409J19Rik (NM_133776.1,1813-1831).
gtcaatggcccagtgatat

SEQ ID NO: 630219 - DNA, 19 bp, Mus musculus
  siRNA target sequence for 5031409J19Rik (NM_133776.1,1823-1841).
cagtgatatccacacttat

SEQ ID NO: 630220 - DNA, 19 bp, Mus musculus
  siRNA target sequence for 5031409J19Rik (NM_133776.1,1827-1845).
gatatccacacttattcaa

SEQ ID NO: 630221 - DNA, 19 bp, Mus musculus
  siRNA target sequence for 5031409J19Rik (NM_133776.1,1848-1866).
ctattccatcagcgaaatt

SEQ ID NO: 630222 - DNA, 19 bp, Mus musculus
  siRNA target sequence for 5031409J19Rik (NM_133776.1,1853-1871).
ccatcagcgaaattttcct

SEQ ID NO: 630223 - DNA, 19 bp, Mus musculus
  siRNA target sequence for 5031409J19Rik (NM_133776.1,1959-1977).
ccaactggttaatgaaact

SEQ ID NO: 630224 - DNA, 19 bp, Mus musculus
  siRNA target sequence for 5031409J19Rik (NM_133776.1,1986-2004).
ggtactgtgccgatgtagt

SEQ ID NO: 630225 - DNA, 19 bp, Mus musculus
  siRNA target sequence for 5031409J19Rik (NM_133776.1,2053-2071).
gttgttcctgtggtaaaat

SEQ ID NO: 630226 - DNA, 19 bp, Mus musculus
  siRNA target sequence for 5031409J19Rik (NM_133776.1,2094-2112).
catctccattgcaagtcta

SEQ ID NO: 630227 - DNA, 19 bp, Mus musculus
  siRNA target sequence for 5031409J19Rik (NM_133776.1,2099-2117).
ccattgcaagtctaatctt

SEQ ID NO: 630228 - DNA, 19 bp, Mus musculus
  siRNA target sequence for 5031409J19Rik (NM_133776.1,2100-2118).
cattgcaagtctaatctta

SEQ ID NO: 630229 - DNA, 19 bp, Mus musculus
  siRNA target sequence for 5031409J19Rik (NM_133776.1,2104-2122).
gcaagtctaatcttatgct

SEQ ID NO: 630230 - DNA, 19 bp, Mus musculus
  siRNA target sequence for 5031409J19Rik (NM_133776.1,2105-2123).
caagtctaatcttatgctt

SEQ ID NO: 630231 - DNA, 19 bp, Mus musculus
  siRNA target sequence for 5031409J19Rik (NM_133776.1,2110-2128).
ctaatcttatgcttgatca

SEQ ID NO: 630232 - DNA, 19 bp, Mus musculus
  siRNA target sequence for 5031409J19Rik (NM_133776.1,2124-2142).
gatcatcgagtctctgttt

SEQ ID NO: 630233 - DNA, 19 bp, Mus musculus
  siRNA target sequence for 5031409J19Rik (NM_133776.1,2199-2217).
catcgccgtgtcactctta

SEQ ID NO: 630234 - DNA, 19 bp, Mus musculus
  siRNA target sequence for 5031409J19Rik (NM_133776.1,2202-2220).
cgccgtgtcactcttaatt

SEQ ID NO: 630235 - DNA, 19 bp, Mus musculus
  siRNA target sequence for 5031409J19Rik (NM_133776.1,2317-2335).
cttgccgtattcttttgga

SEQ ID NO: 630236 - DNA, 19 bp, Mus musculus
  siRNA target sequence for 5031409J19Rik (NM_133776.1,2353-2371).
ctgctggcttatcgaatta

SEQ ID NO: 630237 - DNA, 19 bp, Mus musculus
  siRNA target sequence for 5031409J19Rik (NM_133776.1,2366-2384).
gaattatcctagtgtttca

SEQ ID NO: 630238 - DNA, 19 bp, Mus musculus
  siRNA target sequence for 5031409J19Rik (NM_133776.1,2474-2492).
cccaacctagcaatagcta

SEQ ID NO: 630239 - DNA, 19 bp, Mus musculus
  siRNA target sequence for 5031409J19Rik (NM_133776.1,2475-2493).
ccaacctagcaatagctat

SEQ ID NO: 630240 - DNA, 19 bp, Mus musculus
  siRNA target sequence for 5031409J19Rik (NM_133776.1,2476-2494).
caacctagcaatagctata

SEQ ID NO: 630241 - DNA, 19 bp, Mus musculus
  siRNA target sequence for 5031409J19Rik (NM_133776.1,2503-2521).
gatgtgtgttggcttaact

SEQ ID NO: 630242 - DNA, 19 bp, Mus musculus
  siRNA target sequence for 5031409J19Rik (NM_133776.1,2554-2572).
gttgttcccgcgttgacta

SEQ ID NO: 630243 - DNA, 19 bp, Mus musculus
  siRNA target sequence for 5031409J19Rik (NM_133776.1,2570-2588).
ctattgtggctgtgaactt

SEQ ID NO: 630244 - DNA, 19 bp, Mus musculus
  siRNA target sequence for 5031409J19Rik (NM_133776.1,2800-2818).
cagggatttttcatcttct

SEQ ID NO: 630245 - DNA, 19 bp, Mus musculus
  siRNA target sequence for 5031409J19Rik (NM_133776.1,2840-2858).
ccaagctgcggcaacttct

SEQ ID NO: 630246 - DNA, 19 bp, Mus musculus
  siRNA target sequence for 5031409J19Rik (NM_133776.1,2854-2872).
cttctgtccaacaagttga

SEQ ID NO: 630247 - DNA, 19 bp, Mus musculus
  siRNA target sequence for 5031409J19Rik (NM_133776.1,2857-2875).
ctgtccaacaagttgacta

SEQ ID NO: 630248 - DNA, 19 bp, Mus musculus
  siRNA target sequence for 5031409J19Rik (NM_133776.1,2865-2883).
caagttgactacattaagt

SEQ ID NO: 630249 - DNA, 19 bp, Mus musculus
  siRNA target sequence for 5031409J19Rik (NM_133776.1,2868-2886).
gttgactacattaagttca

SEQ ID NO: 630250 - DNA, 19 bp, Mus musculus
  siRNA target sequence for 5031409J19Rik (NM_133776.1,2907-2925).
gaacgcctcagatacagtt

SEQ ID NO: 630251 - DNA, 19 bp, Mus musculus
  siRNA target sequence for 5031409J19Rik (NM_133776.1,2923-2941).
gttactcagccgaaatgct

SEQ ID NO: 630252 - DNA, 19 bp, Mus musculus
  siRNA target sequence for 5031409J19Rik (NM_133776.1,2929-2947).
cagccgaaatgcttaagga

SEQ ID NO: 630253 - DNA, 19 bp, Mus musculus
  siRNA target sequence for 5031409J19Rik (NM_133776.1,2939-2957).
gcttaaggacattcaacat

SEQ ID NO: 630254 - DNA, 19 bp, Mus musculus
  siRNA target sequence for 5031409J19Rik (NM_133776.1,2940-2958).
cttaaggacattcaacata

SEQ ID NO: 630255 - DNA, 19 bp, Mus musculus
  siRNA target sequence for 9130020O16Rik (NM_172825.1,227-245).
gggtactggtggctattgt

SEQ ID NO: 630256 - DNA, 19 bp, Mus musculus
  siRNA target sequence for 9130020O16Rik (NM_172825.1,229-247).
gtactggtggctattgtgt

SEQ ID NO: 630257 - DNA, 19 bp, Mus musculus
  siRNA target sequence for 9130020O16Rik (NM_172825.1,302-320).
ggatcaacagagggatatt

SEQ ID NO: 630258 - DNA, 19 bp, Mus musculus
  siRNA target sequence for 9130020O16Rik (NM_172825.1,332-350).
caagtatccctgtacagtt

SEQ ID NO: 630259 - DNA, 19 bp, Mus musculus
  siRNA target sequence for 9130020O16Rik (NM_172825.1,405-423).
gaaagggctgcgttgtaca

SEQ ID NO: 630260 - DNA, 19 bp, Mus musculus
  siRNA target sequence for 9130020O16Rik (NM_172825.1,412-430).
ctgcgttgtacaattgcta

SEQ ID NO: 630261 - DNA, 19 bp, Mus musculus
  siRNA target sequence for 9130020O16Rik (NM_172825.1,414-432).
gcgttgtacaattgctaat

SEQ ID NO: 630262 - DNA, 19 bp, Mus musculus
  siRNA target sequence for 9130020O16Rik (NM_172825.1,415-433).
cgttgtacaattgctaatt

SEQ ID NO: 630263 - DNA, 19 bp, Mus musculus
  siRNA target sequence for 9130020O16Rik (NM_172825.1,416-434).
gttgtacaattgctaattt

SEQ ID NO: 630264 - DNA, 19 bp, Mus musculus
  siRNA target sequence for 9130020O16Rik (NM_172825.1,427-445).
gctaatttctgtgaaaata

SEQ ID NO: 630265 - DNA, 19 bp, Mus musculus
  siRNA target sequence for 9130020O16Rik (NM_172825.1,493-511).
ggaccctctttgcaaacat

SEQ ID NO: 630266 - DNA, 19 bp, Mus musculus
  siRNA target sequence for 9130020O16Rik (NM_172825.1,528-546).
caatgcgggcagtcctaaa

SEQ ID NO: 630267 - DNA, 19 bp, Mus musculus
  siRNA target sequence for 9130020O16Rik (NM_172825.1,532-550).
gcgggcagtcctaaagcaa

SEQ ID NO: 630268 - DNA, 19 bp, Mus musculus
  siRNA target sequence for 9130020O16Rik (NM_172825.1,661-679).
gcaagtgctgagaatattt

SEQ ID NO: 630269 - DNA, 19 bp, Mus musculus
  siRNA target sequence for 9130020O16Rik (NM_172825.1,768-786).
cggtaaagccaacaatgaa

SEQ ID NO: 630270 - DNA, 19 bp, Mus musculus
  siRNA target sequence for 9130020O16Rik (NM_172825.1,815-833).
cagtgagtcagattttgga

SEQ ID NO: 630271 - DNA, 19 bp, Mus musculus
  siRNA target sequence for 9130020O16Rik (NM_172825.1,879-897).
caaatcctttagcaatctt

SEQ ID NO: 630272 - DNA, 19 bp, Mus musculus
  siRNA target sequence for 9130020O16Rik (NM_172825.1,890-908).
gcaatcttatcaagcaaat

SEQ ID NO: 630273 - DNA, 19 bp, Mus musculus
  siRNA target sequence for 9130020O16Rik (NM_172825.1,909-927).
ggagaattactcctattct

SEQ ID NO: 630274 - DNA, 19 bp, Mus musculus
  siRNA target sequence for 9130020O16Rik (NM_172825.1,945-963).
ggtggaacccaatatagca

SEQ ID NO: 630275 - DNA, 19 bp, Mus musculus
  siRNA target sequence for 9130020O16Rik (NM_172825.1,975-993).
cactcgagacgacaattca

SEQ ID NO: 630276 - DNA, 19 bp, Mus musculus
  siRNA target sequence for 9130020O16Rik (NM_172825.1,1014-1032).
cgtacagaaaggatctagt

SEQ ID NO: 630277 - DNA, 19 bp, Mus musculus
  siRNA target sequence for 9130020O16Rik (NM_172825.1,1015-1033).
gtacagaaaggatctagta

SEQ ID NO: 630278 - DNA, 19 bp, Mus musculus
  siRNA target sequence for 9130020O16Rik (NM_172825.1,1018-1036).
cagaaaggatctagtaatt

SEQ ID NO: 630279 - DNA, 19 bp, Mus musculus
  siRNA target sequence for 9130020O16Rik (NM_172825.1,1039-1057).
ctggtttctggtagaatat

SEQ ID NO: 630280 - DNA, 19 bp, Mus musculus
  siRNA target sequence for 9130020O16Rik (NM_172825.1,1048-1066).
ggtagaatattgattaaca

SEQ ID NO: 630281 - DNA, 19 bp, Mus musculus
  siRNA target sequence for 9130020O16Rik (NM_172825.1,1059-1077).
gattaacaaaactgcaaat

SEQ ID NO: 630282 - DNA, 19 bp, Mus musculus
  siRNA target sequence for 9130020O16Rik (NM_172825.1,1098-1116).
gaccgaacttcagatctta

SEQ ID NO: 630283 - DNA, 19 bp, Mus musculus
  siRNA target sequence for 9130020O16Rik (NM_172825.1,1100-1118).
ccgaacttcagatcttact

SEQ ID NO: 630284 - DNA, 19 bp, Mus musculus
  siRNA target sequence for 9130020O16Rik (NM_172825.1,1105-1123).
cttcagatcttacttaata

SEQ ID NO: 630285 - DNA, 19 bp, Mus musculus
  siRNA target sequence for 9130020O16Rik (NM_172825.1,1145-1163).
gtggttttatggtgtatca

SEQ ID NO: 630286 - DNA, 19 bp, Mus musculus
  siRNA target sequence for 9130020O16Rik (NM_172825.1,1147-1165).
ggttttatggtgtatcaaa

SEQ ID NO: 630287 - DNA, 19 bp, Mus musculus
  siRNA target sequence for 9130020O16Rik (NM_172825.1,1179-1197).
ccaatcaaaaactttcact

SEQ ID NO: 630288 - DNA, 19 bp, Mus musculus
  siRNA target sequence for 9130020O16Rik (NM_172825.1,1279-1297).
gaaatggtatttaatccta

SEQ ID NO: 630289 - DNA, 19 bp, Mus musculus
  siRNA target sequence for 9130020O16Rik (NM_172825.1,1284-1302).
ggtatttaatcctacgtat

SEQ ID NO: 630290 - DNA, 19 bp, Mus musculus
  siRNA target sequence for 9130020O16Rik (NM_172825.1,1318-1336).
cggcttcactcctatgctt

SEQ ID NO: 630291 - DNA, 19 bp, Mus musculus
  siRNA target sequence for 9130020O16Rik (NM_172825.1,1333-1351).
gcttgtgtctactggaatt

SEQ ID NO: 630292 - DNA, 19 bp, Mus musculus
  siRNA target sequence for 9130020O16Rik (NM_172825.1,1391-1409).
ccgggaacaccacagaatt

SEQ ID NO: 630293 - DNA, 19 bp, Mus musculus
  siRNA target sequence for 9130020O16Rik (NM_172825.1,1424-1442).
gcagccacacgaccaattt

SEQ ID NO: 630294 - DNA, 19 bp, Mus musculus
  siRNA target sequence for 9130020O16Rik (NM_172825.1,1433-1451).
cgaccaatttcgctgtatt

SEQ ID NO: 630295 - DNA, 19 bp, Mus musculus
  siRNA target sequence for 9130020O16Rik (NM_172825.1,1452-1470).
gatgagtttcaaaaaggat

SEQ ID NO: 630296 - DNA, 19 bp, Mus musculus
  siRNA target sequence for 9130020O16Rik (NM_172825.1,1509-1527).
cggctgtgccttatccatt

SEQ ID NO: 630297 - DNA, 19 bp, Mus musculus
  siRNA target sequence for 9130020O16Rik (NM_172825.1,1529-1547).
ctggtctggctctcacaat

SEQ ID NO: 630298 - DNA, 19 bp, Mus musculus
  siRNA target sequence for 9130020O16Rik (NM_172825.1,1538-1556).
ctctcacaatcttattcca

SEQ ID NO: 630299 - DNA, 19 bp, Mus musculus
  siRNA target sequence for 9130020O16Rik (NM_172825.1,1555-1573).
cagattctcaccaggaaaa

SEQ ID NO: 630300 - DNA, 19 bp, Mus musculus
  siRNA target sequence for 9130020O16Rik (NM_172825.1,1602-1620).
ggtcagtttgtgttcatca

SEQ ID NO: 630301 - DNA, 19 bp, Mus musculus
  siRNA target sequence for 9130020O16Rik (NM_172825.1,1651-1669).
ggaattgaaaactccaata

SEQ ID NO: 630302 - DNA, 19 bp, Mus musculus
  siRNA target sequence for 9130020O16Rik (NM_172825.1,1665-1683).
caataagaacctaaagaca

SEQ ID NO: 630303 - DNA, 19 bp, Mus musculus
  siRNA target sequence for 9130020O16Rik (NM_172825.1,1674-1692).
cctaaagacaagtgatagt

SEQ ID NO: 630304 - DNA, 19 bp, Mus musculus
  siRNA target sequence for 9130020O16Rik (NM_172825.1,1682-1700).
caagtgatagtgacatcaa

SEQ ID NO: 630305 - DNA, 19 bp, Mus musculus
  siRNA target sequence for 9130020O16Rik (NM_172825.1,1687-1705).
gatagtgacatcaatgtta

SEQ ID NO: 630306 - DNA, 19 bp, Mus musculus
  siRNA target sequence for 9130020O16Rik (NM_172825.1,1873-1891).
cctcggcatttcattatct

SEQ ID NO: 630307 - DNA, 19 bp, Mus musculus
  siRNA target sequence for 9130020O16Rik (NM_172825.1,1874-1892).
ctcggcatttcattatctt

SEQ ID NO: 630308 - DNA, 19 bp, Mus musculus
  siRNA target sequence for 9130020O16Rik (NM_172825.1,1876-1894).
cggcatttcattatcttca

SEQ ID NO: 630309 - DNA, 19 bp, Mus musculus
  siRNA target sequence for 9130020O16Rik (NM_172825.1,1877-1895).
ggcatttcattatcttcat

SEQ ID NO: 630310 - DNA, 19 bp, Mus musculus
  siRNA target sequence for 9130020O16Rik (NM_172825.1,1913-1931).
gagttccagcaataatagt

SEQ ID NO: 630311 - DNA, 19 bp, Mus musculus
  siRNA target sequence for 9130020O16Rik (NM_172825.1,1992-2010).
ctatcggcaagaggaaatt

SEQ ID NO: 630312 - DNA, 19 bp, Mus musculus
  siRNA target sequence for 9130020O16Rik (NM_172825.1,2021-2039).
ccgttcccaaggacaatga

SEQ ID NO: 630313 - DNA, 19 bp, Mus musculus
  siRNA target sequence for 9130020O16Rik (NM_172825.1,2028-2046).
caaggacaatgattatgca

SEQ ID NO: 630314 - DNA, 19 bp, Mus musculus
  siRNA target sequence for 9130020O16Rik (NM_172825.1,2070-2088).
catcatacctgtaaccatt

SEQ ID NO: 630315 - DNA, 19 bp, Mus musculus
  siRNA target sequence for 9130020O16Rik (NM_172825.1,2092-2110).
ctcatcaccaacattacta

SEQ ID NO: 630316 - DNA, 19 bp, Mus musculus
  siRNA target sequence for 9130020O16Rik (NM_172825.1,2094-2112).
catcaccaacattactata

SEQ ID NO: 630317 - DNA, 19 bp, Mus musculus
  siRNA target sequence for 9130020O16Rik (NM_172825.1,2097-2115).
caccaacattactatattt

SEQ ID NO: 630318 - DNA, 19 bp, Mus musculus
  siRNA target sequence for 9130020O16Rik (NM_172825.1,2160-2178).
gacaagcacaaaaaaagtt

SEQ ID NO: 630319 - DNA, 19 bp, Mus musculus
  siRNA target sequence for 9130020O16Rik (NM_172825.1,2180-2198).
catccctaaagaaggtttt

SEQ ID NO: 630320 - DNA, 19 bp, Mus musculus
  siRNA target sequence for 9130020O16Rik (NM_172825.1,2193-2211).
ggttttcagcacactatct

SEQ ID NO: 630321 - DNA, 19 bp, Mus musculus
  siRNA target sequence for 9130020O16Rik (NM_172825.1,2206-2224).
ctatctatcgctgttgttt

SEQ ID NO: 630322 - DNA, 19 bp, Mus musculus
  siRNA target sequence for 9130020O16Rik (NM_172825.1,2235-2253).
ctggatcttggcatatgct

SEQ ID NO: 630323 - DNA, 19 bp, Mus musculus
  siRNA target sequence for 9130020O16Rik (NM_172825.1,2237-2255).
ggatcttggcatatgctat

SEQ ID NO: 630324 - DNA, 19 bp, Mus musculus
  siRNA target sequence for 9130020O16Rik (NM_172825.1,2244-2262).
ggcatatgctatgctaatt

SEQ ID NO: 630325 - DNA, 19 bp, Mus musculus
  siRNA target sequence for 9130020O16Rik (NM_172825.1,2245-2263).
gcatatgctatgctaatta

SEQ ID NO: 630326 - DNA, 19 bp, Mus musculus
  siRNA target sequence for 9130020O16Rik (NM_172825.1,2324-2342).
gattgcaaatattcattct

SEQ ID NO: 630327 - DNA, 19 bp, Mus musculus
  siRNA target sequence for 9130020O16Rik (NM_172825.1,2343-2361).
ctacactgttcgaacaaaa

SEQ ID NO: 630328 - DNA, 19 bp, Mus musculus
  siRNA target sequence for 9130020O16Rik (NM_172825.1,2346-2364).
cactgttcgaacaaaagta

SEQ ID NO: 630329 - DNA, 19 bp, Mus musculus
  siRNA target sequence for 9130020O16Rik (NM_172825.1,2353-2371).
cgaacaaaagtatttcaga

SEQ ID NO: 630330 - DNA, 19 bp, Mus musculus
  siRNA target sequence for 9130020O16Rik (NM_172825.1,2400-2418).
gtcatcatcctttgataga

SEQ ID NO: 630331 - DNA, 19 bp, Mus musculus
  siRNA target sequence for 9130020O16Rik (NM_172825.1,2435-2453).
cgataaccccgctgaaact

SEQ ID NO: 630332 - DNA, 19 bp, Mus musculus
  siRNA target sequence for 9130020O16Rik (NM_172825.1,2454-2472).
gcgtgtaaggatgtacaat

SEQ ID NO: 630333 - DNA, 19 bp, Mus musculus
  siRNA target sequence for 9130020O16Rik (NM_172825.1,2455-2473).
cgtgtaaggatgtacaata

SEQ ID NO: 630334 - DNA, 19 bp, Mus musculus
  siRNA target sequence for 9130020O16Rik (NM_172825.1,2456-2474).
gtgtaaggatgtacaatat

SEQ ID NO: 630335 - DNA, 19 bp, Mus musculus
  siRNA target sequence for 9130020O16Rik (NM_172825.1,2481-2499).
gtccctaccatccctaaat

SEQ ID NO: 630336 - DNA, 19 bp, Mus musculus
  siRNA target sequence for 9130020O16Rik (NM_172825.1,2483-2501).
ccctaccatccctaaatga

SEQ ID NO: 630337 - DNA, 19 bp, Mus musculus
  siRNA target sequence for 9130020O16Rik (NM_172825.1,2484-2502).
cctaccatccctaaatgaa

SEQ ID NO: 630338 - DNA, 19 bp, Mus musculus
  siRNA target sequence for 9130020O16Rik (NM_172825.1,2527-2545).
ggaatgactgaggaaacat

SEQ ID NO: 630339 - DNA, 19 bp, Mus musculus
  siRNA target sequence for Adcyap1r1 (NM_007407.2,504-522).
gctgcctatggctattgct

SEQ ID NO: 630340 - DNA, 19 bp, Mus musculus
  siRNA target sequence for Adcyap1r1 (NM_007407.2,588-606).
cgacctgatgggcctaaat

SEQ ID NO: 630341 - DNA, 19 bp, Mus musculus
  siRNA target sequence for Adcyap1r1 (NM_007407.2,625-643).
cctggcatgtgggacaata

SEQ ID NO: 630342 - DNA, 19 bp, Mus musculus
  siRNA target sequence for Adcyap1r1 (NM_007407.2,626-644).
ctggcatgtgggacaatat

SEQ ID NO: 630343 - DNA, 19 bp, Mus musculus
  siRNA target sequence for Adcyap1r1 (NM_007407.2,654-672).
gaagcctgctcaaataggt

SEQ ID NO: 630344 - DNA, 19 bp, Mus musculus
  siRNA target sequence for Adcyap1r1 (NM_007407.2,757-775).
ggctttgctgatagtaatt

SEQ ID NO: 630345 - DNA, 19 bp, Mus musculus
  siRNA target sequence for Adcyap1r1 (NM_007407.2,855-873).
cgatgcttgtgggtttgat

SEQ ID NO: 630346 - DNA, 19 bp, Mus musculus
  siRNA target sequence for Adcyap1r1 (NM_007407.2,860-878).
cttgtgggtttgatgacta

SEQ ID NO: 630347 - DNA, 19 bp, Mus musculus
  siRNA target sequence for Adcyap1r1 (NM_007407.2,888-906).
gtctggggatcaggattat

SEQ ID NO: 630348 - DNA, 19 bp, Mus musculus
  siRNA target sequence for Adcyap1r1 (NM_007407.2,890-908).
ctggggatcaggattatta

SEQ ID NO: 630349 - DNA, 19 bp, Mus musculus
  siRNA target sequence for Adcyap1r1 (NM_007407.2,893-911).
gggatcaggattattacta

SEQ ID NO: 630350 - DNA, 19 bp, Mus musculus
  siRNA target sequence for Adcyap1r1 (NM_007407.2,1016-1034).
gtaacttcatccacatgaa

SEQ ID NO: 630351 - DNA, 19 bp, Mus musculus
  siRNA target sequence for Adcyap1r1 (NM_007407.2,1058-1076).
gagctatctctgtcttcat

SEQ ID NO: 630352 - DNA, 19 bp, Mus musculus
  siRNA target sequence for Adcyap1r1 (NM_007407.2,1077-1095).
caaagactggatcttgtat

SEQ ID NO: 630353 - DNA, 19 bp, Mus musculus
  siRNA target sequence for Adcyap1r1 (NM_007407.2,1099-1117).
gagcaggacagcagtcatt

SEQ ID NO: 630354 - DNA, 19 bp, Mus musculus
  siRNA target sequence for Adcyap1r1 (NM_007407.2,1169-1187).
gcgtggtgtccaactactt

SEQ ID NO: 630355 - DNA, 19 bp, Mus musculus
  siRNA target sequence for Adcyap1r1 (NM_007407.2,1171-1189).
gtggtgtccaactacttct

SEQ ID NO: 630356 - DNA, 19 bp, Mus musculus
  siRNA target sequence for Adcyap1r1 (NM_007407.2,1205-1223).
gcctatacctctttacact

SEQ ID NO: 630357 - DNA, 19 bp, Mus musculus
  siRNA target sequence for Adcyap1r1 (NM_007407.2,1246-1264).
gagaggagatatttctact

SEQ ID NO: 630358 - DNA, 19 bp, Mus musculus
  siRNA target sequence for Adcyap1r1 (NM_007407.2,1260-1278).
ctactggtataccatcatt

SEQ ID NO: 630359 - DNA, 19 bp, Mus musculus
  siRNA target sequence for Adcyap1r1 (NM_007407.2,1386-1404).
gatcaaaggccctgtagtt

SEQ ID NO: 630360 - DNA, 19 bp, Mus musculus
  siRNA target sequence for Adcyap1r1 (NM_007407.2,1397-1415).
ctgtagttggctctataat

SEQ ID NO: 630361 - DNA, 19 bp, Mus musculus
  siRNA target sequence for Adcyap1r1 (NM_007407.2,1402-1420).
gttggctctataatggtta

SEQ ID NO: 630362 - DNA, 19 bp, Mus musculus
  siRNA target sequence for Adcyap1r1 (NM_007407.2,1405-1423).
ggctctataatggttaact

SEQ ID NO: 630363 - DNA, 19 bp, Mus musculus
  siRNA target sequence for Adcyap1r1 (NM_007407.2,1406-1424).
gctctataatggttaactt

SEQ ID NO: 630364 - DNA, 19 bp, Mus musculus
  siRNA target sequence for Adcyap1r1 (NM_007407.2,1409-1427).
ctataatggttaactttgt

SEQ ID NO: 630365 - DNA, 19 bp, Mus musculus
  siRNA target sequence for Adcyap1r1 (NM_007407.2,1492-1510).
gagtcgagcatctacttca

SEQ ID NO: 630366 - DNA, 19 bp, Mus musculus
  siRNA target sequence for Adcyap1r1 (NM_007407.2,1511-1529).
gctgcgtgcagaaatgcta

SEQ ID NO: 630367 - DNA, 19 bp, Mus musculus
  siRNA target sequence for Adcyap1r1 (NM_007407.2,1614-1632).
gctgctcatcccactcttt

SEQ ID NO: 630368 - DNA, 19 bp, Mus musculus
  siRNA target sequence for Adcyap1r1 (NM_007407.2,1799-1817).
ggaaggtgaaccgttactt

SEQ ID NO: 630369 - DNA, 19 bp, Mus musculus
  siRNA target sequence for Adcyap1r1 (NM_007407.2,1804-1822).
gtgaaccgttacttcacta

SEQ ID NO: 630370 - DNA, 19 bp, Mus musculus
  siRNA target sequence for Calcr (NM_007588.1,577-595).
caggctcctaccaatctca

SEQ ID NO: 630371 - DNA, 19 bp, Mus musculus
  siRNA target sequence for Calcr (NM_007588.1,596-614).
ctgactccggccttgatca

SEQ ID NO: 630372 - DNA, 19 bp, Mus musculus
  siRNA target sequence for Calcr (NM_007588.1,655-673).
gatgctcagtacaaatgct

SEQ ID NO: 630373 - DNA, 19 bp, Mus musculus
  siRNA target sequence for Calcr (NM_007588.1,671-689).
gctatgaccggattcatca

SEQ ID NO: 630374 - DNA, 19 bp, Mus musculus
  siRNA target sequence for Calcr (NM_007588.1,882-900).
ccgaacctggtccaactat

SEQ ID NO: 630375 - DNA, 19 bp, Mus musculus
  siRNA target sequence for Calcr (NM_007588.1,883-901).
cgaacctggtccaactata

SEQ ID NO: 630376 - DNA, 19 bp, Mus musculus
  siRNA target sequence for Calcr (NM_007588.1,934-952).
caaaatgcgtacgttcttt

SEQ ID NO: 630377 - DNA, 19 bp, Mus musculus
  siRNA target sequence for Calcr (NM_007588.1,941-959).
cgtacgttctttattacct

SEQ ID NO: 630378 - DNA, 19 bp, Mus musculus
  siRNA target sequence for Calcr (NM_007588.1,1084-1102).
ctgaattctatcattatca

SEQ ID NO: 630379 - DNA, 19 bp, Mus musculus
  siRNA target sequence for Calcr (NM_007588.1,1147-1165).
cgggatcctatgcatattt

SEQ ID NO: 630380 - DNA, 19 bp, Mus musculus
  siRNA target sequence for Calcr (NM_007588.1,1148-1166).
gggatcctatgcatatttt

SEQ ID NO: 630381 - DNA, 19 bp, Mus musculus
  siRNA target sequence for Calcr (NM_007588.1,1149-1167).
ggatcctatgcatattttt

SEQ ID NO: 630382 - DNA, 19 bp, Mus musculus
  siRNA target sequence for Calcr (NM_007588.1,1159-1177).
catatttttcatcataaca

SEQ ID NO: 630383 - DNA, 19 bp, Mus musculus
  siRNA target sequence for Calcr (NM_007588.1,1252-1270).
catgccagtgaagtgataa

SEQ ID NO: 630384 - DNA, 19 bp, Mus musculus
  siRNA target sequence for Calcr (NM_007588.1,1329-1347).
gctctgcgaggggatctat

SEQ ID NO: 630385 - DNA, 19 bp, Mus musculus
  siRNA target sequence for Calcr (NM_007588.1,1332-1350).
ctgcgaggggatctatctt

SEQ ID NO: 630386 - DNA, 19 bp, Mus musculus
  siRNA target sequence for Calcr (NM_007588.1,1334-1352).
gcgaggggatctatcttca

SEQ ID NO: 630387 - DNA, 19 bp, Mus musculus
  siRNA target sequence for Calcr (NM_007588.1,1335-1353).
cgaggggatctatcttcat

SEQ ID NO: 630388 - DNA, 19 bp, Mus musculus
  siRNA target sequence for Calcr (NM_007588.1,1336-1354).
gaggggatctatcttcata

SEQ ID NO: 630389 - DNA, 19 bp, Mus musculus
  siRNA target sequence for Calcr (NM_007588.1,1338-1356).
ggggatctatcttcatact

SEQ ID NO: 630390 - DNA, 19 bp, Mus musculus
  siRNA target sequence for Calcr (NM_007588.1,1340-1358).
ggatctatcttcatactct

SEQ ID NO: 630391 - DNA, 19 bp, Mus musculus
  siRNA target sequence for Calcr (NM_007588.1,1344-1362).
ctatcttcatactctgatt

SEQ ID NO: 630392 - DNA, 19 bp, Mus musculus
  siRNA target sequence for Calcr (NM_007588.1,1391-1409).
gcctacgctggtactatct

SEQ ID NO: 630393 - DNA, 19 bp, Mus musculus
  siRNA target sequence for Calcr (NM_007588.1,1392-1410).
cctacgctggtactatctt

SEQ ID NO: 630394 - DNA, 19 bp, Mus musculus
  siRNA target sequence for Calcr (NM_007588.1,1425-1443).
cccgatagtgccaaccatt

SEQ ID NO: 630395 - DNA, 19 bp, Mus musculus
  siRNA target sequence for Calcr (NM_007588.1,1426-1444).
ccgatagtgccaaccatta

SEQ ID NO: 630396 - DNA, 19 bp, Mus musculus
  siRNA target sequence for Calcr (NM_007588.1,1427-1445).
cgatagtgccaaccattat

SEQ ID NO: 630397 - DNA, 19 bp, Mus musculus
  siRNA target sequence for Calcr (NM_007588.1,1724-1742).
ggaagatctatgattatct

SEQ ID NO: 630398 - DNA, 19 bp, Mus musculus
  siRNA target sequence for Calcr (NM_007588.1,1743-1761).
catgcactctctgattcat

SEQ ID NO: 630399 - DNA, 19 bp, Mus musculus
  siRNA target sequence for Calcr (NM_007588.1,1829-1847).
gccagtggacgcagttcaa

SEQ ID NO: 630400 - DNA, 19 bp, Mus musculus
  siRNA target sequence for Calcr (NM_007588.1,1831-1849).
cagtggacgcagttcaaga

SEQ ID NO: 630401 - DNA, 19 bp, Mus musculus
  siRNA target sequence for Calcr (NM_007588.1,1882-1900).
cccaccaaccgcgtagtta

SEQ ID NO: 630402 - DNA, 19 bp, Mus musculus
  siRNA target sequence for Calcr (NM_007588.1,1884-1902).
caccaaccgcgtagttagt

SEQ ID NO: 630403 - DNA, 19 bp, Mus musculus
  siRNA target sequence for Calcr (NM_007588.1,1931-1949).
cagatggcctccccattta

SEQ ID NO: 630404 - DNA, 19 bp, Mus musculus
  siRNA target sequence for Calcr (NM_007588.1,1996-2014).
ggcgaggagagtactgaaa

SEQ ID NO: 630405 - DNA, 19 bp, Mus musculus
  siRNA target sequence for Calcr (NM_007588.1,1997-2015).
gcgaggagagtactgaaat

SEQ ID NO: 630406 - DNA, 19 bp, Mus musculus
  siRNA target sequence for Calcrl (NM_018782.1,225-243).
gttctcttgcctcttaata

SEQ ID NO: 630407 - DNA, 19 bp, Mus musculus
  siRNA target sequence for Calcrl (NM_018782.1,288-306).
gacttgggagtcactagaa

SEQ ID NO: 630408 - DNA, 19 bp, Mus musculus
  siRNA target sequence for Calcrl (NM_018782.1,294-312).
ggagtcactagaaacaaga

SEQ ID NO: 630409 - DNA, 19 bp, Mus musculus
  siRNA target sequence for Calcrl (NM_018782.1,295-313).
gagtcactagaaacaagat

SEQ ID NO: 630410 - DNA, 19 bp, Mus musculus
  siRNA target sequence for Calcrl (NM_018782.1,297-315).
gtcactagaaacaagatca

SEQ ID NO: 630411 - DNA, 19 bp, Mus musculus
  siRNA target sequence for Calcrl (NM_018782.1,314-332).
catgacggctcaatatgaa

SEQ ID NO: 630412 - DNA, 19 bp, Mus musculus
  siRNA target sequence for Calcrl (NM_018782.1,317-335).
gacggctcaatatgaatgt

SEQ ID NO: 630413 - DNA, 19 bp, Mus musculus
  siRNA target sequence for Calcrl (NM_018782.1,319-337).
cggctcaatatgaatgtta

SEQ ID NO: 630414 - DNA, 19 bp, Mus musculus
  siRNA target sequence for Calcrl (NM_018782.1,426-444).
gcagcagggacggaatcaa

SEQ ID NO: 630415 - DNA, 19 bp, Mus musculus
  siRNA target sequence for Calcrl (NM_018782.1,427-445).
cagcagggacggaatcaat

SEQ ID NO: 630416 - DNA, 19 bp, Mus musculus
  siRNA target sequence for Calcrl (NM_018782.1,449-467).
gtactgccctgactatttt

SEQ ID NO: 630417 - DNA, 19 bp, Mus musculus
  siRNA target sequence for Calcrl (NM_018782.1,477-495).
gatccttcagagaaggtta

SEQ ID NO: 630418 - DNA, 19 bp, Mus musculus
  siRNA target sequence for Calcrl (NM_018782.1,528-546).
cggcatccggatagtaata

SEQ ID NO: 630419 - DNA, 19 bp, Mus musculus
  siRNA target sequence for Calcrl (NM_018782.1,530-548).
gcatccggatagtaataga

SEQ ID NO: 630420 - DNA, 19 bp, Mus musculus
  siRNA target sequence for Calcrl (NM_018782.1,534-552).
ccggatagtaatagaacat

SEQ ID NO: 630421 - DNA, 19 bp, Mus musculus
  siRNA target sequence for Calcrl (NM_018782.1,556-574).
ccaactacaccctgtgtaa

SEQ ID NO: 630422 - DNA, 19 bp, Mus musculus
  siRNA target sequence for Calcrl (NM_018782.1,557-575).
caactacaccctgtgtaat

SEQ ID NO: 630423 - DNA, 19 bp, Mus musculus
  siRNA target sequence for Calcrl (NM_018782.1,580-598).
gcacgcatgagaaagtgaa

SEQ ID NO: 630424 - DNA, 19 bp, Mus musculus
  siRNA target sequence for Calcrl (NM_018782.1,617-635).
ctacctaactataattgga

SEQ ID NO: 630425 - DNA, 19 bp, Mus musculus
  siRNA target sequence for Calcrl (NM_018782.1,646-664).
ctattgcatctctgatcat

SEQ ID NO: 630426 - DNA, 19 bp, Mus musculus
  siRNA target sequence for Calcrl (NM_018782.1,662-680).
catctctctcatcatattt

SEQ ID NO: 630427 - DNA, 19 bp, Mus musculus
  siRNA target sequence for Calcrl (NM_018782.1,700-718).
gttgccaacggatcacatt

SEQ ID NO: 630428 - DNA, 19 bp, Mus musculus
  siRNA target sequence for Calcrl (NM_018782.1,704-722).
ccaacggatcacattgcat

SEQ ID NO: 630429 - DNA, 19 bp, Mus musculus
  siRNA target sequence for Calcrl (NM_018782.1,708-726).
cggatcacattgcataaaa

SEQ ID NO: 630430 - DNA, 19 bp, Mus musculus
  siRNA target sequence for Calcrl (NM_018782.1,709-727).
ggatcacattgcataaaaa

SEQ ID NO: 630431 - DNA, 19 bp, Mus musculus
  siRNA target sequence for Calcrl (NM_018782.1,748-766).
gtaattcgattgtaacaat

SEQ ID NO: 630432 - DNA, 19 bp, Mus musculus
  siRNA target sequence for Calcrl (NM_018782.1,778-796).
cggcagtggccaataacca

SEQ ID NO: 630433 - DNA, 19 bp, Mus musculus
  siRNA target sequence for Calcrl (NM_018782.1,835-853).
ctcagtttatccatctcta

SEQ ID NO: 630434 - DNA, 19 bp, Mus musculus
  siRNA target sequence for Calcrl (NM_018782.1,855-873).
ctgatgggctgtaactact

SEQ ID NO: 630435 - DNA, 19 bp, Mus musculus
  siRNA target sequence for Calcrl (NM_018782.1,931-949).
cggagaagcagcacttgat

SEQ ID NO: 630436 - DNA, 19 bp, Mus musculus
  siRNA target sequence for Calcrl (NM_018782.1,939-957).
cagcacttgatgtggtatt

SEQ ID NO: 630437 - DNA, 19 bp, Mus musculus
  siRNA target sequence for Calcrl (NM_018782.1,941-959).
gcacttgatgtggtattat

SEQ ID NO: 630438 - DNA, 19 bp, Mus musculus
  siRNA target sequence for Calcrl (NM_018782.1,942-960).
cacttgatgtggtattatt

SEQ ID NO: 630439 - DNA, 19 bp, Mus musculus
  siRNA target sequence for Calcrl (NM_018782.1,1008-1026).
gccagaagcttgtattaca

SEQ ID NO: 630440 - DNA, 19 bp, Mus musculus
  siRNA target sequence for Calcrl (NM_018782.1,1009-1027).
ccagaagcttgtattacaa

SEQ ID NO: 630441 - DNA, 19 bp, Mus musculus
  siRNA target sequence for Calcrl (NM_018782.1,1087-1105).
gtgctgctttgttggtaaa

SEQ ID NO: 630442 - DNA, 19 bp, Mus musculus
  siRNA target sequence for Calcrl (NM_018782.1,1139-1157).
catcaccaagttgaaagtt

SEQ ID NO: 630443 - DNA, 19 bp, Mus musculus
  siRNA target sequence for Calcrl (NM_018782.1,1142-1160).
caccaagttgaaagttaca

SEQ ID NO: 630444 - DNA, 19 bp, Mus musculus
  siRNA target sequence for Calcrl (NM_018782.1,1159-1177).
cacaccaagtggaatccaa

SEQ ID NO: 630445 - DNA, 19 bp, Mus musculus
  siRNA target sequence for Calcrl (NM_018782.1,1164-1182).
caagtggaatccaatctct

SEQ ID NO: 630446 - DNA, 19 bp, Mus musculus
  siRNA target sequence for Calcrl (NM_018782.1,1170-1188).
gaatccaatctctacatga

SEQ ID NO: 630447 - DNA, 19 bp, Mus musculus
  siRNA target sequence for Calcrl (NM_018782.1,1208-1226).
catcttggtaccactactt

SEQ ID NO: 630448 - DNA, 19 bp, Mus musculus
  siRNA target sequence for Calcrl (NM_018782.1,1219-1237).
cactacttggcattgaatt

SEQ ID NO: 630449 - DNA, 19 bp, Mus musculus
  siRNA target sequence for Calcrl (NM_018782.1,1278-1296).
gaggtgtatgactatgtca

SEQ ID NO: 630450 - DNA, 19 bp, Mus musculus
  siRNA target sequence for Calcrl (NM_018782.1,1287-1305).
gactatgtcatgcacattt

SEQ ID NO: 630451 - DNA, 19 bp, Mus musculus
  siRNA target sequence for Calcrl (NM_018782.1,1381-1399).
gaaattggaaccagtataa

SEQ ID NO: 630452 - DNA, 19 bp, Mus musculus
  siRNA target sequence for Calcrl (NM_018782.1,1391-1409).
ccagtataaaatccaattt

SEQ ID NO: 630453 - DNA, 19 bp, Mus musculus
  siRNA target sequence for Calcrl (NM_018782.1,1450-1468).
cctacacagtgtcaacaat

SEQ ID NO: 630454 - DNA, 19 bp, Mus musculus
  siRNA target sequence for Calcrl (NM_018782.1,1496-1514).
ctgccccactgaacactta

SEQ ID NO: 630455 - DNA, 19 bp, Mus musculus
  siRNA target sequence for Calcrl (NM_018782.1,1498-1516).
gccccactgaacacttaaa

SEQ ID NO: 630456 - DNA, 19 bp, Mus musculus
  siRNA target sequence for Crhr1 (NM_007762.1,257-275).
cgctacaacaccacaaaca

SEQ ID NO: 630457 - DNA, 19 bp, Mus musculus
  siRNA target sequence for Crhr1 (NM_007762.1,258-276).
gctacaacaccacaaacaa

SEQ ID NO: 630458 - DNA, 19 bp, Mus musculus
  siRNA target sequence for Crhr1 (NM_007762.1,307-325).
ctgggcagcccgtgtgaat

SEQ ID NO: 630459 - DNA, 19 bp, Mus musculus
  siRNA target sequence for Crhr1 (NM_007762.1,311-329).
gcagcccgtgtgaattatt

SEQ ID NO: 630460 - DNA, 19 bp, Mus musculus
  siRNA target sequence for Crhr1 (NM_007762.1,602-620).
gtgacagccgcctacaact

SEQ ID NO: 630461 - DNA, 19 bp, Mus musculus
  siRNA target sequence for Crhr1 (NM_007762.1,606-624).
cagccgcctacaactactt

SEQ ID NO: 630462 - DNA, 19 bp, Mus musculus
  siRNA target sequence for Crhr1 (NM_007762.1,626-644).
cacgtaaccaacttcttct

SEQ ID NO: 630463 - DNA, 19 bp, Mus musculus
  siRNA target sequence for Crhr1 (NM_007762.1,768-786).
gggccattgggaaacttta

SEQ ID NO: 630464 - DNA, 19 bp, Mus musculus
  siRNA target sequence for Crhr1 (NM_007762.1,771-789).
ccattgggaaactttacta

SEQ ID NO: 630465 - DNA, 19 bp, Mus musculus
  siRNA target sequence for Crhr1 (NM_007762.1,782-800).
ctttactacgacaatgaaa

SEQ ID NO: 630466 - DNA, 19 bp, Mus musculus
  siRNA target sequence for Crhr1 (NM_007762.1,813-831).
gcaaacgtcctggagtata

SEQ ID NO: 630467 - DNA, 19 bp, Mus musculus
  siRNA target sequence for Crhr1 (NM_007762.1,814-832).
caaacgtcctggagtatat

SEQ ID NO: 630468 - DNA, 19 bp, Mus musculus
  siRNA target sequence for Crhr1 (NM_007762.1,825-843).
gagtatatactgactacat

SEQ ID NO: 630469 - DNA, 19 bp, Mus musculus
  siRNA target sequence for Crhr1 (NM_007762.1,863-881).
ctggtcctgctgatcaact

SEQ ID NO: 630470 - DNA, 19 bp, Mus musculus
  siRNA target sequence for Crhr1 (NM_007762.1,939-957).
catctgagactattcagta

SEQ ID NO: 630471 - DNA, 19 bp, Mus musculus
  siRNA target sequence for Crhr1 (NM_007762.1,1053-1071).
gggttgtcttcatctactt

SEQ ID NO: 630472 - DNA, 19 bp, Mus musculus
  siRNA target sequence for D7Ertd680e (NM_177469.2,1118-1136).
gaggggtccctttcatcat

SEQ ID NO: 630473 - DNA, 19 bp, Mus musculus
  siRNA target sequence for D7Ertd680e (NM_177469.2,1154-1172).
ccacaaacatcagaaatta

SEQ ID NO: 630474 - DNA, 19 bp, Mus musculus
  siRNA target sequence for D7Ertd680e (NM_177469.2,1221-1239).
cagcctgggtgcgttctat

SEQ ID NO: 630475 - DNA, 19 bp, Mus musculus
  siRNA target sequence for D7Ertd680e (NM_177469.2,1544-1562).
gccacttcctggacatgat

SEQ ID NO: 630476 - DNA, 19 bp, Mus musculus
  siRNA target sequence for D7Ertd680e (NM_177469.2,1590-1608).
cgtgacactgggactcttt

SEQ ID NO: 630477 - DNA, 19 bp, Mus musculus
  siRNA target sequence for D7Ertd680e (NM_177469.2,1597-1615).
ctgggactctttgtactta

SEQ ID NO: 630478 - DNA, 19 bp, Mus musculus
  siRNA target sequence for D7Ertd680e (NM_177469.2,1999-2017).
ctcaagggcagaactaagt

SEQ ID NO: 630479 - DNA, 19 bp, Mus musculus
  siRNA target sequence for D7Ertd680e (NM_177469.2,2398-2416).
ggaccctggaaaaatgaaa

SEQ ID NO: 630480 - DNA, 19 bp, Mus musculus
  siRNA target sequence for D7Ertd680e (NM_177469.2,2401-2419).
ccctggaaaaatgaaacta

SEQ ID NO: 630481 - DNA, 19 bp, Mus musculus
  siRNA target sequence for E230012M21 (NM_177734.2,314-332).
ctctacagcatggtgataa

SEQ ID NO: 630482 - DNA, 19 bp, Mus musculus
  siRNA target sequence for E230012M21 (NM_177734.2,355-373).
caagcacctctactactat

SEQ ID NO: 630483 - DNA, 19 bp, Mus musculus
  siRNA target sequence for E230012M21 (NM_177734.2,501-519).
cggctctgttggtcattgt

SEQ ID NO: 630484 - DNA, 19 bp, Mus musculus
  siRNA target sequence for E230012M21 (NM_177734.2,570-588).
gcactgatagctacaagat

SEQ ID NO: 630485 - DNA, 19 bp, Mus musculus
  siRNA target sequence for E230012M21 (NM_177734.2,571-589).
cactgatagctacaagata

SEQ ID NO: 630486 - DNA, 19 bp, Mus musculus
  siRNA target sequence for E230012M21 (NM_177734.2,573-591).
ctgatagctacaagataca

SEQ ID NO: 630487 - DNA, 19 bp, Mus musculus
  siRNA target sequence for E230012M21 (NM_177734.2,652-670).
ggggacctcatgggtattt

SEQ ID NO: 630488 - DNA, 19 bp, Mus musculus
  siRNA target sequence for E230012M21 (NM_177734.2,698-716).
ctggtcttccaatacatgt

SEQ ID NO: 630489 - DNA, 19 bp, Mus musculus
  siRNA target sequence for E230012M21 (NM_177734.2,700-718).
ggtcttccaatacatgttt

SEQ ID NO: 630490 - DNA, 19 bp, Mus musculus
  siRNA target sequence for E230012M21 (NM_177734.2,847-865).
gaacacgaagcctttcagt

SEQ ID NO: 630491 - DNA, 19 bp, Mus musculus
  siRNA target sequence for E230012M21 (NM_177734.2,890-908).
ccaggcacggcatctacaa

SEQ ID NO: 630492 - DNA, 19 bp, Mus musculus
  siRNA target sequence for E230012M21 (NM_177734.2,891-909).
caggcacggcatctacaaa

SEQ ID NO: 630493 - DNA, 19 bp, Mus musculus
  siRNA target sequence for E230012M21 (NM_177734.2,895-913).
cacggcatctacaaagcta

SEQ ID NO: 630494 - DNA, 19 bp, Mus musculus
  siRNA target sequence for Fzd1 (NM_021457.2,858-876).
gctccgccgagctcaagtt

SEQ ID NO: 630495 - DNA, 19 bp, Mus musculus
  siRNA target sequence for Fzd1 (NM_021457.2,1011-1029).
cactcaagtgcgagaagtt

SEQ ID NO: 630496 - DNA, 19 bp, Mus musculus
  siRNA target sequence for Fzd1 (NM_021457.2,1179-1197).
cggtggagcggggaaagtt

SEQ ID NO: 630497 - DNA, 19 bp, Mus musculus
  siRNA target sequence for Fzd1 (NM_021457.2,1181-1199).
gtggagcggggaaagttct

SEQ ID NO: 630498 - DNA, 19 bp, Mus musculus
  siRNA target sequence for Fzd1 (NM_021457.2,1275-1293).
gcgaacccaccaaggttta

SEQ ID NO: 630499 - DNA, 19 bp, Mus musculus
  siRNA target sequence for Fzd1 (NM_021457.2,1289-1307).
gtttacgggctcatgtact

SEQ ID NO: 630500 - DNA, 19 bp, Mus musculus
  siRNA target sequence for Fzd1 (NM_021457.2,1447-1465).
cctgtccggctgttacaca

SEQ ID NO: 630501 - DNA, 19 bp, Mus musculus
  siRNA target sequence for Fzd1 (NM_021457.2,1701-1719).
ccaactcacagtatttcca

SEQ ID NO: 630502 - DNA, 19 bp, Mus musculus
  siRNA target sequence for Fzd1 (NM_021457.2,1736-1754).
gtgccagccatcaaaacta

SEQ ID NO: 630503 - DNA, 19 bp, Mus musculus
  siRNA target sequence for Fzd1 (NM_021457.2,1738-1756).
gccagccatcaaaactata

SEQ ID NO: 630504 - DNA, 19 bp, Mus musculus
  siRNA target sequence for Fzd1 (NM_021457.2,1739-1757).
ccagccatcaaaactataa

SEQ ID NO: 630505 - DNA, 19 bp, Mus musculus
  siRNA target sequence for Fzd1 (NM_021457.2,1852-1870).
ggcgcctctcttcgtttat

SEQ ID NO: 630506 - DNA, 19 bp, Mus musculus
  siRNA target sequence for Fzd1 (NM_021457.2,1854-1872).
cgcctctcttcgtttatct

SEQ ID NO: 630507 - DNA, 19 bp, Mus musculus
  siRNA target sequence for Fzd1 (NM_021457.2,1857-1875).
ctctcttcgtttatctgtt

SEQ ID NO: 630508 - DNA, 19 bp, Mus musculus
  siRNA target sequence for Fzd10 (NM_175284.2,908-926).
cgcaggagcacccactaaa

SEQ ID NO: 630509 - DNA, 19 bp, Mus musculus
  siRNA target sequence for Fzd10 (NM_175284.2,1018-1036).
ggggtggatgtgtattgga

SEQ ID NO: 630510 - DNA, 19 bp, Mus musculus
  siRNA target sequence for Fzd10 (NM_175284.2,1153-1171).
cccgaacgtcctatcatct

SEQ ID NO: 630511 - DNA, 19 bp, Mus musculus
  siRNA target sequence for Fzd10 (NM_175284.2,1154-1172).
ccgaacgtcctatcatctt

SEQ ID NO: 630512 - DNA, 19 bp, Mus musculus
  siRNA target sequence for Fzd10 (NM_175284.2,1179-1197).
catgtgctactgcgtttat

SEQ ID NO: 630513 - DNA, 19 bp, Mus musculus
  siRNA target sequence for Fzd10 (NM_175284.2,1293-1311).
gagcacgggctgtacctta

SEQ ID NO: 630514 - DNA, 19 bp, Mus musculus
  siRNA target sequence for Fzd10 (NM_175284.2,1298-1316).
cgggctgtaccttagtctt

SEQ ID NO: 630515 - DNA, 19 bp, Mus musculus
  siRNA target sequence for Fzd10 (NM_175284.2,1335-1353).
cggcatggccagctcttta

SEQ ID NO: 630516 - DNA, 19 bp, Mus musculus
  siRNA target sequence for Fzd10 (NM_175284.2,1462-1480).
ccggctgtgaagactatct

SEQ ID NO: 630517 - DNA, 19 bp, Mus musculus
  siRNA target sequence for Fzd10 (NM_175284.2,1463-1481).
cggctgtgaagactatctt

SEQ ID NO: 630518 - DNA, 19 bp, Mus musculus
  siRNA target sequence for Fzd10 (NM_175284.2,1465-1483).
gctgtgaagactatcttga

SEQ ID NO: 630519 - DNA, 19 bp, Mus musculus
  siRNA target sequence for Fzd10 (NM_175284.2,1515-1533).
gctcactggtgtgtgttat

SEQ ID NO: 630520 - DNA, 19 bp, Mus musculus
  siRNA target sequence for Fzd10 (NM_175284.2,1622-1640).
ccggctttgtggctttatt

SEQ ID NO: 630521 - DNA, 19 bp, Mus musculus
  siRNA target sequence for Fzd10 (NM_175284.2,1644-1662).
catccggagggtgatgaaa

SEQ ID NO: 630522 - DNA, 19 bp, Mus musculus
  siRNA target sequence for Fzd10 (NM_175284.2,1808-1826).
cccagcacaagtgtaagat

SEQ ID NO: 630523 - DNA, 19 bp, Mus musculus
  siRNA target sequence for Fzd10 (NM_175284.2,1815-1833).
caagtgtaagatgaacaat

SEQ ID NO: 630524 - DNA, 19 bp, Mus musculus
  siRNA target sequence for Fzd10 (NM_175284.2,2033-2051).
ccagtgcagggatctacaa

SEQ ID NO: 630525 - DNA, 19 bp, Mus musculus
  siRNA target sequence for Fzd10 (NM_175284.2,2036-2054).
gtgcagggatctacaaaaa

SEQ ID NO: 630526 - DNA, 19 bp, Mus musculus
  siRNA target sequence for Fzd2 (NM_020510.1,674-692).
gcctccgctgcgagcattt

SEQ ID NO: 630527 - DNA, 19 bp, Mus musculus
  siRNA target sequence for Fzd2 (NM_020510.1,892-910).
ccgtcctatctcagctata

SEQ ID NO: 630528 - DNA, 19 bp, Mus musculus
  siRNA target sequence for Fzd2 (NM_020510.1,893-911).
cgtcctatctcagctataa

SEQ ID NO: 630529 - DNA, 19 bp, Mus musculus
  siRNA target sequence for Fzd2 (NM_020510.1,896-914).
cctatctcagctataagtt

SEQ ID NO: 630530 - DNA, 19 bp, Mus musculus
  siRNA target sequence for Fzd2 (NM_020510.1,959-977).
ccgacggctctatgttctt

SEQ ID NO: 630531 - DNA, 19 bp, Mus musculus
  siRNA target sequence for Fzd2 (NM_020510.1,981-999).
gcaagaggagactcgtttt

SEQ ID NO: 630532 - DNA, 19 bp, Mus musculus
  siRNA target sequence for Fzd2 (NM_020510.1,1034-1052).
gctgcgcttccactttctt

SEQ ID NO: 630533 - DNA, 19 bp, Mus musculus
  siRNA target sequence for Fzd2 (NM_020510.1,1173-1191).
ggagcgcgtggtatgcaat

SEQ ID NO: 630534 - DNA, 19 bp, Mus musculus
  siRNA target sequence for Fzd3 (NM_021458.1,324-342).
ctggattgtctttgatctt

SEQ ID NO: 630535 - DNA, 19 bp, Mus musculus
  siRNA target sequence for Fzd3 (NM_021458.1,392-410).
cttgtgaacctataacctt

SEQ ID NO: 630536 - DNA, 19 bp, Mus musculus
  siRNA target sequence for Fzd3 (NM_021458.1,421-439).
caagatttgccttacaata

SEQ ID NO: 630537 - DNA, 19 bp, Mus musculus
  siRNA target sequence for Fzd3 (NM_021458.1,424-442).
gatttgccttacaatacta

SEQ ID NO: 630538 - DNA, 19 bp, Mus musculus
  siRNA target sequence for Fzd3 (NM_021458.1,451-469).
cctaatcttctgaaccatt

SEQ ID NO: 630539 - DNA, 19 bp, Mus musculus
  siRNA target sequence for Fzd3 (NM_021458.1,452-470).
ctaatcttctgaaccatta

SEQ ID NO: 630540 - DNA, 19 bp, Mus musculus
  siRNA target sequence for Fzd3 (NM_021458.1,478-496).
cagactgcagctttagcaa

SEQ ID NO: 630541 - DNA, 19 bp, Mus musculus
  siRNA target sequence for Fzd3 (NM_021458.1,516-534).
ggtgaacctggattgttct

SEQ ID NO: 630542 - DNA, 19 bp, Mus musculus
  siRNA target sequence for Fzd3 (NM_021458.1,559-577).
gcactctatgcccctattt

SEQ ID NO: 630543 - DNA, 19 bp, Mus musculus
  siRNA target sequence for Fzd3 (NM_021458.1,562-580).
ctctatgcccctatttgta

SEQ ID NO: 630544 - DNA, 19 bp, Mus musculus
  siRNA target sequence for Fzd3 (NM_021458.1,568-586).
gcccctatttgtatggaat

SEQ ID NO: 630545 - DNA, 19 bp, Mus musculus
  siRNA target sequence for Fzd3 (NM_021458.1,569-587).
cccctatttgtatggaata

SEQ ID NO: 630546 - DNA, 19 bp, Mus musculus
  siRNA target sequence for Fzd3 (NM_021458.1,570-588).
ccctatttgtatggaatat

SEQ ID NO: 630547 - DNA, 19 bp, Mus musculus
  siRNA target sequence for Fzd3 (NM_021458.1,629-647).
cctatagcgagtgttcaaa

SEQ ID NO: 630548 - DNA, 19 bp, Mus musculus
  siRNA target sequence for Fzd3 (NM_021458.1,630-648).
ctatagcgagtgttcaaaa

SEQ ID NO: 630549 - DNA, 19 bp, Mus musculus
  siRNA target sequence for Fzd3 (NM_021458.1,667-685).
gtcccgtggcctgaagata

SEQ ID NO: 630550 - DNA, 19 bp, Mus musculus
  siRNA target sequence for Fzd3 (NM_021458.1,695-713).
gtaggtttccagattgtga

SEQ ID NO: 630551 - DNA, 19 bp, Mus musculus
  siRNA target sequence for Fzd3 (NM_021458.1,781-799).
gtgcagagggactatggtt

SEQ ID NO: 630552 - DNA, 19 bp, Mus musculus
  siRNA target sequence for Fzd3 (NM_021458.1,806-824).
gtcccagagagttaaaaat

SEQ ID NO: 630553 - DNA, 19 bp, Mus musculus
  siRNA target sequence for Fzd3 (NM_021458.1,809-827).
ccagagagttaaaaattga

SEQ ID NO: 630554 - DNA, 19 bp, Mus musculus
  siRNA target sequence for Fzd3 (NM_021458.1,850-868).
ctgcacgtgcgagattgtt

SEQ ID NO: 630555 - DNA, 19 bp, Mus musculus
  siRNA target sequence for Fzd3 (NM_021458.1,871-889).
ccaccatgtcccaatatgt

SEQ ID NO: 630556 - DNA, 19 bp, Mus musculus
  siRNA target sequence for Fzd3 (NM_021458.1,931-949).
ggcctgatttcaatcattt

SEQ ID NO: 630557 - DNA, 19 bp, Mus musculus
  siRNA target sequence for Fzd3 (NM_021458.1,985-1003).
ctaattgacgtcacaagat

SEQ ID NO: 630558 - DNA, 19 bp, Mus musculus
  siRNA target sequence for Fzd3 (NM_021458.1,1011-1029).
ccctgaaagacctatcata

SEQ ID NO: 630559 - DNA, 19 bp, Mus musculus
  siRNA target sequence for Fzd3 (NM_021458.1,1012-1030).
cctgaaagacctatcatat

SEQ ID NO: 630560 - DNA, 19 bp, Mus musculus
  siRNA target sequence for Fzd3 (NM_021458.1,1013-1031).
ctgaaagacctatcatatt

SEQ ID NO: 630561 - DNA, 19 bp, Mus musculus
  siRNA target sequence for Fzd3 (NM_021458.1,1044-1062).
ctacatgatggtgtcatta

SEQ ID NO: 630562 - DNA, 19 bp, Mus musculus
  siRNA target sequence for Fzd3 (NM_021458.1,1093-1111).
cgagtagcctgcaatgcat

SEQ ID NO: 630563 - DNA, 19 bp, Mus musculus
  siRNA target sequence for Fzd3 (NM_021458.1,1112-1130).
ctagccctgcacagtataa

SEQ ID NO: 630564 - DNA, 19 bp, Mus musculus
  siRNA target sequence for Fzd3 (NM_021458.1,1165-1183).
gcctgtaccatgctcttta

SEQ ID NO: 630565 - DNA, 19 bp, Mus musculus
  siRNA target sequence for Fzd3 (NM_021458.1,1166-1184).
cctgtaccatgctctttat

SEQ ID NO: 630566 - DNA, 19 bp, Mus musculus
  siRNA target sequence for Fzd3 (NM_021458.1,1169-1187).
gtaccatgctctttatggt

SEQ ID NO: 630567 - DNA, 19 bp, Mus musculus
  siRNA target sequence for Fzd3 (NM_021458.1,1176-1194).
gctctttatggtactatat

SEQ ID NO: 630568 - DNA, 19 bp, Mus musculus
  siRNA target sequence for Fzd3 (NM_021458.1,1179-1197).
ctttatggtactatatttt

SEQ ID NO: 630569 - DNA, 19 bp, Mus musculus
  siRNA target sequence for Fzd3 (NM_021458.1,1212-1230).
cagtgtatggtgggtaatt

SEQ ID NO: 630570 - DNA, 19 bp, Mus musculus
  siRNA target sequence for Fzd3 (NM_021458.1,1216-1234).
gtatggtgggtaattctta

SEQ ID NO: 630571 - DNA, 19 bp, Mus musculus
  siRNA target sequence for Fzd3 (NM_021458.1,1231-1249).
cttaccatcacatggtttt

SEQ ID NO: 630572 - DNA, 19 bp, Mus musculus
  siRNA target sequence for Fzd3 (NM_021458.1,1266-1284).
gtggggcagtgaagctatt

SEQ ID NO: 630573 - DNA, 19 bp, Mus musculus
  siRNA target sequence for Fzd3 (NM_021458.1,1268-1286).
ggggcagtgaagctattga

SEQ ID NO: 630574 - DNA, 19 bp, Mus musculus
  siRNA target sequence for Fzd3 (NM_021458.1,1270-1288).
ggcagtgaagctattgaga

SEQ ID NO: 630575 - DNA, 19 bp, Mus musculus
  siRNA target sequence for Fzd3 (NM_021458.1,1271-1289).
gcagtgaagctattgagaa

SEQ ID NO: 630576 - DNA, 19 bp, Mus musculus
  siRNA target sequence for Fzd3 (NM_021458.1,1327-1345).
cccggaactctaactatca

SEQ ID NO: 630577 - DNA, 19 bp, Mus musculus
  siRNA target sequence for Fzd3 (NM_021458.1,1328-1346).
ccggaactctaactatcat

SEQ ID NO: 630578 - DNA, 19 bp, Mus musculus
  siRNA target sequence for Fzd3 (NM_021458.1,1334-1352).
ctctaactatcatcctttt

SEQ ID NO: 630579 - DNA, 19 bp, Mus musculus
  siRNA target sequence for Fzd3 (NM_021458.1,1407-1425).
ctacgacgttgatgcatta

SEQ ID NO: 630580 - DNA, 19 bp, Mus musculus
  siRNA target sequence for Fzd3 (NM_021458.1,1410-1428).
cgacgttgatgcattaaga

SEQ ID NO: 630581 - DNA, 19 bp, Mus musculus
  siRNA target sequence for Fzd3 (NM_021458.1,1411-1429).
gacgttgatgcattaagat

SEQ ID NO: 630582 - DNA, 19 bp, Mus musculus
  siRNA target sequence for Fzd3 (NM_021458.1,1414-1432).
gttgatgcattaagatatt

SEQ ID NO: 630583 - DNA, 19 bp, Mus musculus
  siRNA target sequence for Fzd3 (NM_021458.1,1479-1497).
ccttttagccggcattata

SEQ ID NO: 630584 - DNA, 19 bp, Mus musculus
  siRNA target sequence for Fzd3 (NM_021458.1,1480-1498).
cttttagccggcattatat

SEQ ID NO: 630585 - DNA, 19 bp, Mus musculus
  siRNA target sequence for Fzd3 (NM_021458.1,1489-1507).
ggcattatatccctaaaca

SEQ ID NO: 630586 - DNA, 19 bp, Mus musculus
  siRNA target sequence for Fzd3 (NM_021458.1,1491-1509).
cattatatccctaaacaga

SEQ ID NO: 630587 - DNA, 19 bp, Mus musculus
  siRNA target sequence for Fzd3 (NM_021458.1,1514-1532).
ggattgagatcccattaga

SEQ ID NO: 630588 - DNA, 19 bp, Mus musculus
  siRNA target sequence for Fzd3 (NM_021458.1,1515-1533).
gattgagatcccattagaa

SEQ ID NO: 630589 - DNA, 19 bp, Mus musculus
  siRNA target sequence for Fzd3 (NM_021458.1,1536-1554).
ggaaaaccaagataagtta

SEQ ID NO: 630590 - DNA, 19 bp, Mus musculus
  siRNA target sequence for Fzd3 (NM_021458.1,1600-1618).
gtgccactcttggttgtaa

SEQ ID NO: 630591 - DNA, 19 bp, Mus musculus
  siRNA target sequence for Fzd3 (NM_021458.1,1602-1620).
gccactcttggttgtaatt

SEQ ID NO: 630592 - DNA, 19 bp, Mus musculus
  siRNA target sequence for Fzd3 (NM_021458.1,1677-1695).
ggaacgctgcagagagtat

SEQ ID NO: 630593 - DNA, 19 bp, Mus musculus
  siRNA target sequence for Fzd3 (NM_021458.1,1681-1699).
cgctgcagagagtatcaca

SEQ ID NO: 630594 - DNA, 19 bp, Mus musculus
  siRNA target sequence for Fzd3 (NM_021458.1,1706-1724).
gtccgtaccaggttactca

SEQ ID NO: 630595 - DNA, 19 bp, Mus musculus
  siRNA target sequence for Fzd3 (NM_021458.1,1730-1748).
gtcgtccagacctgattct

SEQ ID NO: 630596 - DNA, 19 bp, Mus musculus
  siRNA target sequence for Fzd3 (NM_021458.1,1732-1750).
cgtccagacctgattctct

SEQ ID NO: 630597 - DNA, 19 bp, Mus musculus
  siRNA target sequence for Fzd3 (NM_021458.1,1738-1756).
gacctgattctctttctga

SEQ ID NO: 630598 - DNA, 19 bp, Mus musculus
  siRNA target sequence for Fzd3 (NM_021458.1,1780-1798).
gttgggattccctctatat

SEQ ID NO: 630599 - DNA, 19 bp, Mus musculus
  siRNA target sequence for Fzd3 (NM_021458.1,1824-1842).
ctttgaatgggccagtttt

SEQ ID NO: 630600 - DNA, 19 bp, Mus musculus
  siRNA target sequence for Fzd3 (NM_021458.1,1845-1863).
ccatgggcgtaggaaaaaa

SEQ ID NO: 630601 - DNA, 19 bp, Mus musculus
  siRNA target sequence for Fzd3 (NM_021458.1,1918-1936).
ctcctgagggacccaaata

SEQ ID NO: 630602 - DNA, 19 bp, Mus musculus
  siRNA target sequence for Fzd3 (NM_021458.1,1920-1938).
cctgagggacccaaatact

SEQ ID NO: 630603 - DNA, 19 bp, Mus musculus
  siRNA target sequence for Fzd3 (NM_021458.1,1926-1944).
ggacccaaatactccaatt

SEQ ID NO: 630604 - DNA, 19 bp, Mus musculus
  siRNA target sequence for Fzd3 (NM_021458.1,1927-1945).
gacccaaatactccaatta

SEQ ID NO: 630605 - DNA, 19 bp, Mus musculus
  siRNA target sequence for Fzd3 (NM_021458.1,1939-1957).
ccaattataagaaaatcaa

SEQ ID NO: 630606 - DNA, 19 bp, Mus musculus
  siRNA target sequence for Fzd3 (NM_021458.1,1983-2001).
cacacatgcttcttcaact

SEQ ID NO: 630607 - DNA, 19 bp, Mus musculus
  siRNA target sequence for Fzd3 (NM_021458.1,2170-2188).
cattccaggcacagtagtt

SEQ ID NO: 630608 - DNA, 19 bp, Mus musculus
  siRNA target sequence for Fzd3 (NM_021458.1,2175-2193).
caggcacagtagttctcat

SEQ ID NO: 630609 - DNA, 19 bp, Mus musculus
  siRNA target sequence for Fzd3 (NM_021458.1,2271-2289).
cagcatgaaccgtgttatt

SEQ ID NO: 630610 - DNA, 19 bp, Mus musculus
  siRNA target sequence for Fzd3 (NM_021458.1,2273-2291).
gcatgaaccgtgttattga

SEQ ID NO: 630611 - DNA, 19 bp, Mus musculus
  siRNA target sequence for Fzd4 (NM_008055.2,476-494).
ccaagatgcccaacttagt

SEQ ID NO: 630612 - DNA, 19 bp, Mus musculus
  siRNA target sequence for Fzd4 (NM_008055.2,605-623).
caatgtgcacagagaagat

SEQ ID NO: 630613 - DNA, 19 bp, Mus musculus
  siRNA target sequence for Fzd4 (NM_008055.2,842-860).
ccgtgggaagcaattctga

SEQ ID NO: 630614 - DNA, 19 bp, Mus musculus
  siRNA target sequence for Fzd4 (NM_008055.2,943-961).
gagttcacggatatttgga

SEQ ID NO: 630615 - DNA, 19 bp, Mus musculus
  siRNA target sequence for Fzd4 (NM_008055.2,1008-1026).
gctgaccttcctgattgat

SEQ ID NO: 630616 - DNA, 19 bp, Mus musculus
  siRNA target sequence for Fzd4 (NM_008055.2,1009-1027).
ctgaccttcctgattgatt

SEQ ID NO: 630617 - DNA, 19 bp, Mus musculus
  siRNA target sequence for Fzd4 (NM_008055.2,1011-1029).
gaccttcctgattgattca

SEQ ID NO: 630618 - DNA, 19 bp, Mus musculus
  siRNA target sequence for Fzd4 (NM_008055.2,1076-1094).
gctataatatttatagcat

SEQ ID NO: 630619 - DNA, 19 bp, Mus musculus
  siRNA target sequence for Fzd4 (NM_008055.2,1126-1144).
gaaaggatatcctgtgatt

SEQ ID NO: 630620 - DNA, 19 bp, Mus musculus
  siRNA target sequence for Fzd4 (NM_008055.2,1130-1148).
ggatatcctgtgattttga

SEQ ID NO: 630621 - DNA, 19 bp, Mus musculus
  siRNA target sequence for Fzd4 (NM_008055.2,1154-1172).
cggcagagcccgttctcat

SEQ ID NO: 630622 - DNA, 19 bp, Mus musculus
  siRNA target sequence for Fzd4 (NM_008055.2,1195-1213).
ggatgtgcaataattttct

SEQ ID NO: 630623 - DNA, 19 bp, Mus musculus
  siRNA target sequence for Fzd4 (NM_008055.2,1212-1230).
cttgctgatgtactttttt

SEQ ID NO: 630624 - DNA, 19 bp, Mus musculus
  siRNA target sequence for Fzd4 (NM_008055.2,1215-1233).
gctgatgtacttttttgga

SEQ ID NO: 630625 - DNA, 19 bp, Mus musculus
  siRNA target sequence for Fzd4 (NM_008055.2,1216-1234).
ctgatgtacttttttggaa

SEQ ID NO: 630626 - DNA, 19 bp, Mus musculus
  siRNA target sequence for Fzd4 (NM_008055.2,1261-1279).
ctgacactcacttggtttt

SEQ ID NO: 630627 - DNA, 19 bp, Mus musculus
  siRNA target sequence for Fzd4 (NM_008055.2,1350-1368).
ggctattcccgcagtgaaa

SEQ ID NO: 630628 - DNA, 19 bp, Mus musculus
  siRNA target sequence for Fzd4 (NM_008055.2,1351-1369).
gctattcccgcagtgaaaa

SEQ ID NO: 630629 - DNA, 19 bp, Mus musculus
  siRNA target sequence for Fzd4 (NM_008055.2,1370-1388).
ccattgtcatcttgattat

SEQ ID NO: 630630 - DNA, 19 bp, Mus musculus
  siRNA target sequence for Fzd4 (NM_008055.2,1470-1488).
ggctcctctctttacgtat

SEQ ID NO: 630631 - DNA, 19 bp, Mus musculus
  siRNA target sequence for Fzd4 (NM_008055.2,1471-1489).
gctcctctctttacgtatt

SEQ ID NO: 630632 - DNA, 19 bp, Mus musculus
  siRNA target sequence for Fzd4 (NM_008055.2,1472-1490).
ctcctctctttacgtattt

SEQ ID NO: 630633 - DNA, 19 bp, Mus musculus
  siRNA target sequence for Fzd4 (NM_008055.2,1475-1493).
ctctctttacgtatttggt

SEQ ID NO: 630634 - DNA, 19 bp, Mus musculus
  siRNA target sequence for Fzd4 (NM_008055.2,1517-1535).
cgggtttggtggccttatt

SEQ ID NO: 630635 - DNA, 19 bp, Mus musculus
  siRNA target sequence for Fzd4 (NM_008055.2,1536-1554).
caaaatccggtccaatctt

SEQ ID NO: 630636 - DNA, 19 bp, Mus musculus
  siRNA target sequence for Fzd4 (NM_008055.2,1542-1560).
ccggtccaatcttcaaaaa

SEQ ID NO: 630637 - DNA, 19 bp, Mus musculus
  siRNA target sequence for Fzd4 (NM_008055.2,1544-1562).
ggtccaatcttcaaaaaga

SEQ ID NO: 630638 - DNA, 19 bp, Mus musculus
  siRNA target sequence for Fzd4 (NM_008055.2,1677-1695).
ctgggcactctttcgatat

SEQ ID NO: 630639 - DNA, 19 bp, Mus musculus
  siRNA target sequence for Fzd4 (NM_008055.2,1680-1698).
ggcactctttcgatattct

SEQ ID NO: 630640 - DNA, 19 bp, Mus musculus
  siRNA target sequence for Fzd4 (NM_008055.2,1707-1725).
ctcaaacatggcagttgaa

SEQ ID NO: 630641 - DNA, 19 bp, Mus musculus
  siRNA target sequence for Fzd4 (NM_008055.2,1776-1794).
gatttggtctgccaaaact

SEQ ID NO: 630642 - DNA, 19 bp, Mus musculus
  siRNA target sequence for Fzd4 (NM_008055.2,1795-1813).
cttcacacgtggcaaaagt

SEQ ID NO: 630643 - DNA, 19 bp, Mus musculus
  siRNA target sequence for Fzd4 (NM_008055.2,1798-1816).
cacacgtggcaaaagtgtt

SEQ ID NO: 630644 - DNA, 19 bp, Mus musculus
  siRNA target sequence for Fzd4 (NM_008055.2,1802-1820).
cgtggcaaaagtgttctaa

SEQ ID NO: 630645 - DNA, 19 bp, Mus musculus
  siRNA target sequence for Fzd5 (NM_022721.1,91-109).
ccggtgtgccaggaaatca

SEQ ID NO: 630646 - DNA, 19 bp, Mus musculus
  siRNA target sequence for Fzd5 (NM_022721.1,891-909).
gcacagccacattcactat

SEQ ID NO: 630647 - DNA, 19 bp, Mus musculus
  siRNA target sequence for Fzd5 (NM_022721.1,937-955).
gttgtcttcctcttagtct

SEQ ID NO: 630648 - DNA, 19 bp, Mus musculus
  siRNA target sequence for Fzd5 (NM_022721.1,1090-1108).
cccagtgtcaagtccatta

SEQ ID NO: 630649 - DNA, 19 bp, Mus musculus
  siRNA target sequence for Fzd5 (NM_022721.1,1271-1289).
gcatccggagcgtcatcaa

SEQ ID NO: 630650 - DNA, 19 bp, Mus musculus
  siRNA target sequence for Fzd6 (NM_008056.2,391-409).
ccgttcccagatgtatgaa

SEQ ID NO: 630651 - DNA, 19 bp, Mus musculus
  siRNA target sequence for Fzd6 (NM_008056.2,514-532).
gttcaccaaacattgaaat

SEQ ID NO: 630652 - DNA, 19 bp, Mus musculus
  siRNA target sequence for Fzd6 (NM_008056.2,569-587).
gcaaattcatgtagttcta

SEQ ID NO: 630653 - DNA, 19 bp, Mus musculus
  siRNA target sequence for Fzd6 (NM_008056.2,585-603).
ctaccctgtcggaaattgt

SEQ ID NO: 630654 - DNA, 19 bp, Mus musculus
  siRNA target sequence for Fzd6 (NM_008056.2,594-612).
cggaaattgtgtgagaaaa

SEQ ID NO: 630655 - DNA, 19 bp, Mus musculus
  siRNA target sequence for Fzd6 (NM_008056.2,595-613).
ggaaattgtgtgagaaaat

SEQ ID NO: 630656 - DNA, 19 bp, Mus musculus
  siRNA target sequence for Fzd6 (NM_008056.2,653-671).
ccgatggcctgaagaactt

SEQ ID NO: 630657 - DNA, 19 bp, Mus musculus
  siRNA target sequence for Fzd6 (NM_008056.2,666-684).
gaacttgaatgtaacagat

SEQ ID NO: 630658 - DNA, 19 bp, Mus musculus
  siRNA target sequence for Fzd6 (NM_008056.2,699-717).
gacactgttcctgtaactt

SEQ ID NO: 630659 - DNA, 19 bp, Mus musculus
  siRNA target sequence for Fzd6 (NM_008056.2,765-783).
gtcccaagagacattggat

SEQ ID NO: 630660 - DNA, 19 bp, Mus musculus
  siRNA target sequence for Fzd6 (NM_008056.2,813-831).
ggggaccaaggctataggt

SEQ ID NO: 630661 - DNA, 19 bp, Mus musculus
  siRNA target sequence for Fzd6 (NM_008056.2,814-832).
gggaccaaggctataggtt

SEQ ID NO: 630662 - DNA, 19 bp, Mus musculus
  siRNA target sequence for Fzd6 (NM_008056.2,815-833).
ggaccaaggctataggttt

SEQ ID NO: 630663 - DNA, 19 bp, Mus musculus
  siRNA target sequence for Fzd6 (NM_008056.2,856-874).
ctccgtgccccaatatgta

SEQ ID NO: 630664 - DNA, 19 bp, Mus musculus
  siRNA target sequence for Fzd6 (NM_008056.2,858-876).
ccgtgccccaatatgtatt

SEQ ID NO: 630665 - DNA, 19 bp, Mus musculus
  siRNA target sequence for Fzd6 (NM_008056.2,859-877).
cgtgccccaatatgtattt

SEQ ID NO: 630666 - DNA, 19 bp, Mus musculus
  siRNA target sequence for Fzd6 (NM_008056.2,860-878).
gtgccccaatatgtatttt

SEQ ID NO: 630667 - DNA, 19 bp, Mus musculus
  siRNA target sequence for Fzd6 (NM_008056.2,900-918).
gccaaaagtttcataggaa

SEQ ID NO: 630668 - DNA, 19 bp, Mus musculus
  siRNA target sequence for Fzd6 (NM_008056.2,901-919).
ccaaaagtttcataggaat

SEQ ID NO: 630669 - DNA, 19 bp, Mus musculus
  siRNA target sequence for Fzd6 (NM_008056.2,950-968).
gttcacgttccttacattt

SEQ ID NO: 630670 - DNA, 19 bp, Mus musculus
  siRNA target sequence for Fzd6 (NM_008056.2,975-993).
gacgttagacgattcagat

SEQ ID NO: 630671 - DNA, 19 bp, Mus musculus
  siRNA target sequence for Fzd6 (NM_008056.2,996-1014).
ccagagagaccaattatct

SEQ ID NO: 630672 - DNA, 19 bp, Mus musculus
  siRNA target sequence for Fzd6 (NM_008056.2,997-1015).
cagagagaccaattatcta

SEQ ID NO: 630673 - DNA, 19 bp, Mus musculus
  siRNA target sequence for Fzd6 (NM_008056.2,1072-1090).
gcaatagcacggcttgtaa

SEQ ID NO: 630674 - DNA, 19 bp, Mus musculus
  siRNA target sequence for Fzd6 (NM_008056.2,1073-1091).
caatagcacggcttgtaat

SEQ ID NO: 630675 - DNA, 19 bp, Mus musculus
  siRNA target sequence for Fzd6 (NM_008056.2,1125-1143).
gttgtcctagggtcaaaga

SEQ ID NO: 630676 - DNA, 19 bp, Mus musculus
  siRNA target sequence for Fzd6 (NM_008056.2,1148-1166).
ggcttgcagtgtggtattt

SEQ ID NO: 630677 - DNA, 19 bp, Mus musculus
  siRNA target sequence for Fzd6 (NM_008056.2,1149-1167).
gcttgcagtgtggtattta

SEQ ID NO: 630678 - DNA, 19 bp, Mus musculus
  siRNA target sequence for Fzd6 (NM_008056.2,1150-1168).
cttgcagtgtggtatttat

SEQ ID NO: 630679 - DNA, 19 bp, Mus musculus
  siRNA target sequence for Fzd6 (NM_008056.2,1217-1235).
caccattacgtggttctta

SEQ ID NO: 630680 - DNA, 19 bp, Mus musculus
  siRNA target sequence for Fzd6 (NM_008056.2,1252-1270).
ggagttgcgaagctattga

SEQ ID NO: 630681 - DNA, 19 bp, Mus musculus
  siRNA target sequence for Fzd6 (NM_008056.2,1253-1271).
gagttgcgaagctattgaa

SEQ ID NO: 630682 - DNA, 19 bp, Mus musculus
  siRNA target sequence for Fzd6 (NM_008056.2,1255-1273).
gttgcgaagctattgaaca

SEQ ID NO: 630683 - DNA, 19 bp, Mus musculus
  siRNA target sequence for Fzd6 (NM_008056.2,1258-1276).
gcgaagctattgaacaaaa

SEQ ID NO: 630684 - DNA, 19 bp, Mus musculus
  siRNA target sequence for Fzd6 (NM_008056.2,1259-1277).
cgaagctattgaacaaaaa

SEQ ID NO: 630685 - DNA, 19 bp, Mus musculus
  siRNA target sequence for Fzd6 (NM_008056.2,1328-1346).
catgctgctcgctatgaat

SEQ ID NO: 630686 - DNA, 19 bp, Mus musculus
  siRNA target sequence for Fzd6 (NM_008056.2,1334-1352).
gctcgctatgaataaggtt

SEQ ID NO: 630687 - DNA, 19 bp, Mus musculus
  siRNA target sequence for Fzd6 (NM_008056.2,1350-1368).
gttgaaggagacaacatta

SEQ ID NO: 630688 - DNA, 19 bp, Mus musculus
  siRNA target sequence for Fzd6 (NM_008056.2,1378-1396).
gcttcgttggcctgtatga

SEQ ID NO: 630689 - DNA, 19 bp, Mus musculus
  siRNA target sequence for Fzd6 (NM_008056.2,1433-1451).
gtgcctctgcgtatttgtt

SEQ ID NO: 630690 - DNA, 19 bp, Mus musculus
  siRNA target sequence for Fzd6 (NM_008056.2,1472-1490).
cggcatcatctccttgaat

SEQ ID NO: 630691 - DNA, 19 bp, Mus musculus
  siRNA target sequence for Fzd6 (NM_008056.2,1474-1492).
gcatcatctccttgaatca

SEQ ID NO: 630692 - DNA, 19 bp, Mus musculus
  siRNA target sequence for Fzd6 (NM_008056.2,1521-1539).
cggaaccaagagaagctaa

SEQ ID NO: 630693 - DNA, 19 bp, Mus musculus
  siRNA target sequence for Fzd6 (NM_008056.2,1522-1540).
ggaaccaagagaagctaaa

SEQ ID NO: 630694 - DNA, 19 bp, Mus musculus
  siRNA target sequence for Fzd6 (NM_008056.2,1595-1613).
gacacttctcggttgctat

SEQ ID NO: 630695 - DNA, 19 bp, Mus musculus
  siRNA target sequence for Fzd6 (NM_008056.2,1649-1667).
gacatggttctctgatcat

SEQ ID NO: 630696 - DNA, 19 bp, Mus musculus
  siRNA target sequence for Fzd6 (NM_008056.2,1691-1709).
cccttaccaggcaaatcca

SEQ ID NO: 630697 - DNA, 19 bp, Mus musculus
  siRNA target sequence for Fzd6 (NM_008056.2,1692-1710).
ccttaccaggcaaatccaa

SEQ ID NO: 630698 - DNA, 19 bp, Mus musculus
  siRNA target sequence for Fzd6 (NM_008056.2,1693-1711).
cttaccaggcaaatccaaa

SEQ ID NO: 630699 - DNA, 19 bp, Mus musculus
  siRNA target sequence for Fzd6 (NM_008056.2,1708-1726).
caaaagctcgaccagaatt

SEQ ID NO: 630700 - DNA, 19 bp, Mus musculus
  siRNA target sequence for Fzd6 (NM_008056.2,1716-1734).
cgaccagaattggctttat

SEQ ID NO: 630701 - DNA, 19 bp, Mus musculus
  siRNA target sequence for Fzd6 (NM_008056.2,1719-1737).
ccagaattggctttattta

SEQ ID NO: 630702 - DNA, 19 bp, Mus musculus
  siRNA target sequence for Fzd6 (NM_008056.2,1727-1745).
ggctttatttatgataaaa

SEQ ID NO: 630703 - DNA, 19 bp, Mus musculus
  siRNA target sequence for Fzd6 (NM_008056.2,1953-1971).
cataggctgaaggtcattt

SEQ ID NO: 630704 - DNA, 19 bp, Mus musculus
  siRNA target sequence for Fzd6 (NM_008056.2,1991-2009).
cacaggagcgaccacaaat

SEQ ID NO: 630705 - DNA, 19 bp, Mus musculus
  siRNA target sequence for Fzd6 (NM_008056.2,1993-2011).
caggagcgaccacaaatca

SEQ ID NO: 630706 - DNA, 19 bp, Mus musculus
  siRNA target sequence for Fzd6 (NM_008056.2,2028-2046).
gcaatcgctgaccatgatt

SEQ ID NO: 630707 - DNA, 19 bp, Mus musculus
  siRNA target sequence for Fzd6 (NM_008056.2,2033-2051).
cgctgaccatgattactta

SEQ ID NO: 630708 - DNA, 19 bp, Mus musculus
  siRNA target sequence for Fzd6 (NM_008056.2,2086-2104).
cagaagcatccgtcaaaga

SEQ ID NO: 630709 - DNA, 19 bp, Mus musculus
  siRNA target sequence for Fzd6 (NM_008056.2,2295-2313).
gagactggcctgatagact

SEQ ID NO: 630710 - DNA, 19 bp, Mus musculus
  siRNA target sequence for Fzd7 (NM_008057.2,430-448).
cctgagctacgcttcttct

SEQ ID NO: 630711 - DNA, 19 bp, Mus musculus
  siRNA target sequence for Fzd7 (NM_008057.2,431-449).
ctgagctacgcttcttctt

SEQ ID NO: 630712 - DNA, 19 bp, Mus musculus
  siRNA target sequence for Fzd7 (NM_008057.2,436-454).
ctacgcttcttcttatgct

SEQ ID NO: 630713 - DNA, 19 bp, Mus musculus
  siRNA target sequence for Fzd7 (NM_008057.2,578-596).
ggttgcgctgcgagaactt

SEQ ID NO: 630714 - DNA, 19 bp, Mus musculus
  siRNA target sequence for Fzd7 (NM_008057.2,851-869).
gtgctaacggcctcatgta

SEQ ID NO: 630715 - DNA, 19 bp, Mus musculus
  siRNA target sequence for Fzd7 (NM_008057.2,853-871).
gctaacggcctcatgtact

SEQ ID NO: 630716 - DNA, 19 bp, Mus musculus
  siRNA target sequence for Fzd7 (NM_008057.2,854-872).
ctaacggcctcatgtactt

SEQ ID NO: 630717 - DNA, 19 bp, Mus musculus
  siRNA target sequence for Fzd7 (NM_008057.2,1012-1030).
ctgtcgggttgctacttca

SEQ ID NO: 630718 - DNA, 19 bp, Mus musculus
  siRNA target sequence for Fzd7 (NM_008057.2,1266-1284).
caactcgcagtactttcat

SEQ ID NO: 630719 - DNA, 19 bp, Mus musculus
  siRNA target sequence for Fzd7 (NM_008057.2,1309-1327).
gtcaagacaatcaccattt

SEQ ID NO: 630720 - DNA, 19 bp, Mus musculus
  siRNA target sequence for Fzd7 (NM_008057.2,1590-1608).
cgtgttggcctgctacttt

SEQ ID NO: 630721 - DNA, 19 bp, Mus musculus
  siRNA target sequence for Fzd7 (NM_008057.2,1593-1611).
gttggcctgctacttttat

SEQ ID NO: 630722 - DNA, 19 bp, Mus musculus
  siRNA target sequence for Fzd8 (NM_008058.1,128-146).
gcaaaggcatcggttacaa

SEQ ID NO: 630723 - DNA, 19 bp, Mus musculus
  siRNA target sequence for Fzd8 (NM_008058.1,895-913).
gatatggagcgctttaagt

SEQ ID NO: 630724 - DNA, 19 bp, Mus musculus
  siRNA target sequence for Fzd8 (NM_008058.1,1298-1316).
caggctactcgcagtactt

SEQ ID NO: 630725 - DNA, 19 bp, Mus musculus
  siRNA target sequence for Fzd8 (NM_008058.1,1450-1468).
ctggcgccactggttatct

SEQ ID NO: 630726 - DNA, 19 bp, Mus musculus
  siRNA target sequence for Fzd8 (NM_008058.1,1473-1491).
cttcattgggactatgttt

SEQ ID NO: 630727 - DNA, 19 bp, Mus musculus
  siRNA target sequence for Fzd8 (NM_008058.1,1520-1538).
gaatccgttcagtcatcaa

SEQ ID NO: 630728 - DNA, 19 bp, Mus musculus
  siRNA target sequence for Fzd8 (NM_008058.1,1562-1580).
cacacaagctagaaaaact

SEQ ID NO: 630729 - DNA, 19 bp, Mus musculus
  siRNA target sequence for Fzd8 (NM_008058.1,1633-1651).
gttgtcgcctgccttttct

SEQ ID NO: 630730 - DNA, 19 bp, Mus musculus
  siRNA target sequence for Fzd8 (NM_008058.1,1736-1754).
ccgattacgcggtcttcat

SEQ ID NO: 630731 - DNA, 19 bp, Mus musculus
  siRNA target sequence for Fzd8 (NM_008058.1,1774-1792).
ctagtagtgggcatcacat

SEQ ID NO: 630732 - DNA, 19 bp, Mus musculus
  siRNA target sequence for Fzd8 (NM_008058.1,2007-2025).
cacggccagctctgtatct

SEQ ID NO: 630733 - DNA, 19 bp, Mus musculus
  siRNA target sequence for Fzd8 (NM_008058.1,2009-2027).
cggccagctctgtatctta

SEQ ID NO: 630734 - DNA, 19 bp, Mus musculus
  siRNA target sequence for Fzd8 (NM_008058.1,2020-2038).
gtatcttaccctaagcaaa

SEQ ID NO: 630735 - DNA, 19 bp, Mus musculus
  siRNA target sequence for Gcgr (NM_008101.1,197-215).
gagaagtggaagctctata

SEQ ID NO: 630736 - DNA, 19 bp, Mus musculus
  siRNA target sequence for Gcgr (NM_008101.1,199-217).
gaagtggaagctctatagt

SEQ ID NO: 630737 - DNA, 19 bp, Mus musculus
  siRNA target sequence for Gcgr (NM_008101.1,255-273).
ctactgagctggtctgtaa

SEQ ID NO: 630738 - DNA, 19 bp, Mus musculus
  siRNA target sequence for Gcgr (NM_008101.1,374-392).
caccgcctagtgttcaaga

SEQ ID NO: 630739 - DNA, 19 bp, Mus musculus
  siRNA target sequence for Gcgr (NM_008101.1,444-462).
gcaacgcctcccaatgtca

SEQ ID NO: 630740 - DNA, 19 bp, Mus musculus
  siRNA target sequence for Gcgr (NM_008101.1,493-511).
gggggtggccaagatgtat

SEQ ID NO: 630741 - DNA, 19 bp, Mus musculus
  siRNA target sequence for Gcgr (NM_008101.1,494-512).
ggggtggccaagatgtata

SEQ ID NO: 630742 - DNA, 19 bp, Mus musculus
  siRNA target sequence for Gcgr (NM_008101.1,696-714).
cacggtacagccagaagat

SEQ ID NO: 630743 - DNA, 19 bp, Mus musculus
  siRNA target sequence for Gcgr (NM_008101.1,771-789).
gagtggccacagtgatcat

SEQ ID NO: 630744 - DNA, 19 bp, Mus musculus
  siRNA target sequence for Gcgr (NM_008101.1,950-968).
gtcaagtgtctgtttgaga

SEQ ID NO: 630745 - DNA, 19 bp, Mus musculus
  siRNA target sequence for Gcgr (NM_008101.1,1009-1027).
gtggatcctgcgtattcct

SEQ ID NO: 630746 - DNA, 19 bp, Mus musculus
  siRNA target sequence for Gcgr (NM_008101.1,1033-1051).
cctggccttactgatcaat

SEQ ID NO: 630747 - DNA, 19 bp, Mus musculus
  siRNA target sequence for Gcgr (NM_008101.1,1034-1052).
ctggccttactgatcaatt

SEQ ID NO: 630748 - DNA, 19 bp, Mus musculus
  siRNA target sequence for Gcgr (NM_008101.1,1036-1054).
ggccttactgatcaatttt

SEQ ID NO: 630749 - DNA, 19 bp, Mus musculus
  siRNA target sequence for Gcgr (NM_008101.1,1230-1248).
gctccaccaagctcttttt

SEQ ID NO: 630750 - DNA, 19 bp, Mus musculus
  siRNA target sequence for Gcgr (NM_008101.1,1365-1383).
ctcttcaggaggaaaggtt

SEQ ID NO: 630751 - DNA, 19 bp, Mus musculus
  siRNA target sequence for Gcgr (NM_008101.1,1440-1458).
gtgagaaacttcagcttat

SEQ ID NO: 630752 - DNA, 19 bp, Mus musculus
  siRNA target sequence for Gcgr (NM_008101.1,1442-1460).
gagaaacttcagcttatga

SEQ ID NO: 630753 - DNA, 19 bp, Mus musculus
  siRNA target sequence for Gcgr (NM_008101.1,1444-1462).
gaaacttcagcttatgagt

SEQ ID NO: 630754 - DNA, 19 bp, Mus musculus
  siRNA target sequence for Glp1r (NM_021332.1,185-203).
gcaaccggacctttgatga

SEQ ID NO: 630755 - DNA, 19 bp, Mus musculus
  siRNA target sequence for Glp1r (NM_021332.1,189-207).
ccggacctttgatgactat

SEQ ID NO: 630756 - DNA, 19 bp, Mus musculus
  siRNA target sequence for Glp1r (NM_021332.1,230-248).
caggttccttcgtgaatgt

SEQ ID NO: 630757 - DNA, 19 bp, Mus musculus
  siRNA target sequence for Glp1r (NM_021332.1,232-250).
ggttccttcgtgaatgtca

SEQ ID NO: 630758 - DNA, 19 bp, Mus musculus
  siRNA target sequence for Glp1r (NM_021332.1,323-341).
gtctctggctacataagga

SEQ ID NO: 630759 - DNA, 19 bp, Mus musculus
  siRNA target sequence for Glp1r (NM_021332.1,371-389).
cggagtgtgaagagtctaa

SEQ ID NO: 630760 - DNA, 19 bp, Mus musculus
  siRNA target sequence for Glp1r (NM_021332.1,386-404).
ctaagcgaggggagagaaa

SEQ ID NO: 630761 - DNA, 19 bp, Mus musculus
  siRNA target sequence for Glp1r (NM_021332.1,390-408).
gcgaggggagagaaacttt

SEQ ID NO: 630762 - DNA, 19 bp, Mus musculus
  siRNA target sequence for Glp1r (NM_021332.1,421-439).
ctcctgtccctgtacatta

SEQ ID NO: 630763 - DNA, 19 bp, Mus musculus
  siRNA target sequence for Glp1r (NM_021332.1,448-466).
gtggggtacgcactttctt

SEQ ID NO: 630764 - DNA, 19 bp, Mus musculus
  siRNA target sequence for Glp1r (NM_021332.1,451-469).
gggtacgcactttctttct

SEQ ID NO: 630765 - DNA, 19 bp, Mus musculus
  siRNA target sequence for Glp1r (NM_021332.1,569-587).
gagcactgtccgtcttcat

SEQ ID NO: 630766 - DNA, 19 bp, Mus musculus
  siRNA target sequence for Glp1r (NM_021332.1,598-616).
gccctcaagtggatgtata

SEQ ID NO: 630767 - DNA, 19 bp, Mus musculus
  siRNA target sequence for Glp1r (NM_021332.1,707-725).
gcgtggcagccaactacta

SEQ ID NO: 630768 - DNA, 19 bp, Mus musculus
  siRNA target sequence for Glp1r (NM_021332.1,709-727).
gtggcagccaactactact

SEQ ID NO: 630769 - DNA, 19 bp, Mus musculus
  siRNA target sequence for Glp1r (NM_021332.1,735-753).
ggtggaaggcgtgtatcta

SEQ ID NO: 630770 - DNA, 19 bp, Mus musculus
  siRNA target sequence for Glp1r (NM_021332.1,736-754).
gtggaaggcgtgtatctat

SEQ ID NO: 630771 - DNA, 19 bp, Mus musculus
  siRNA target sequence for Glp1r (NM_021332.1,739-757).
gaaggcgtgtatctataca

SEQ ID NO: 630772 - DNA, 19 bp, Mus musculus
  siRNA target sequence for Glp1r (NM_021332.1,782-800).
cggagcagcgcatcttcaa

SEQ ID NO: 630773 - DNA, 19 bp, Mus musculus
  siRNA target sequence for Glp1r (NM_021332.1,826-844).
gttccgctgctgttcgtta

SEQ ID NO: 630774 - DNA, 19 bp, Mus musculus
  siRNA target sequence for Glp1r (NM_021332.1,848-866).
catgggggattgtcaagta

SEQ ID NO: 630775 - DNA, 19 bp, Mus musculus
  siRNA target sequence for Glp1r (NM_021332.1,853-871).
gggattgtcaagtatctct

SEQ ID NO: 630776 - DNA, 19 bp, Mus musculus
  siRNA target sequence for Glp1r (NM_021332.1,854-872).
ggattgtcaagtatctcta

SEQ ID NO: 630777 - DNA, 19 bp, Mus musculus
  siRNA target sequence for Glp1r (NM_021332.1,855-873).
gattgtcaagtatctctat

SEQ ID NO: 630778 - DNA, 19 bp, Mus musculus
  siRNA target sequence for Glp1r (NM_021332.1,927-945).
ccgattgcccattctcttt

SEQ ID NO: 630779 - DNA, 19 bp, Mus musculus
  siRNA target sequence for Glp1r (NM_021332.1,953-971).
gcgtcaactttcttatctt

SEQ ID NO: 630780 - DNA, 19 bp, Mus musculus
  siRNA target sequence for Glp1r (NM_021332.1,955-973).
gtcaactttcttatcttca

SEQ ID NO: 630781 - DNA, 19 bp, Mus musculus
  siRNA target sequence for Glp1r (NM_021332.1,998-1016).
ccaaactgaaggctaatct

SEQ ID NO: 630782 - DNA, 19 bp, Mus musculus
  siRNA target sequence for Glp1r (NM_021332.1,1129-1147).
ggaaccctacgcttcatca

SEQ ID NO: 630783 - DNA, 19 bp, Mus musculus
  siRNA target sequence for Glp1r (NM_021332.1,1130-1148).
gaaccctacgcttcatcaa

SEQ ID NO: 630784 - DNA, 19 bp, Mus musculus
  siRNA target sequence for Glp2r (NM_175681.2,333-351).
gtttccatcaagcaagtta

SEQ ID NO: 630785 - DNA, 19 bp, Mus musculus
  siRNA target sequence for Glp2r (NM_175681.2,338-356).
catcaagcaagttactaca

SEQ ID NO: 630786 - DNA, 19 bp, Mus musculus
  siRNA target sequence for Glp2r (NM_175681.2,402-420).
gagacgtgtctgaaagact

SEQ ID NO: 630787 - DNA, 19 bp, Mus musculus
  siRNA target sequence for Glp2r (NM_175681.2,432-450).
ccttctggtgtattttgta

SEQ ID NO: 630788 - DNA, 19 bp, Mus musculus
  siRNA target sequence for Glp2r (NM_175681.2,448-466).
gtaatggaacatttgataa

SEQ ID NO: 630789 - DNA, 19 bp, Mus musculus
  siRNA target sequence for Glp2r (NM_175681.2,509-527).
cccctgtccttcatactta

SEQ ID NO: 630790 - DNA, 19 bp, Mus musculus
  siRNA target sequence for Glp2r (NM_175681.2,524-542).
cttaccttggtggaataaa

SEQ ID NO: 630791 - DNA, 19 bp, Mus musculus
  siRNA target sequence for Glp2r (NM_175681.2,753-771).
gctcttacactcttcttgt

SEQ ID NO: 630792 - DNA, 19 bp, Mus musculus
  siRNA target sequence for Glp2r (NM_175681.2,764-782).
cttcttgttccttcgaaaa

SEQ ID NO: 630793 - DNA, 19 bp, Mus musculus
  siRNA target sequence for Glp2r (NM_175681.2,905-923).
gagtggatggatgtcatat

SEQ ID NO: 630794 - DNA, 19 bp, Mus musculus
  siRNA target sequence for Glp2r (NM_175681.2,1097-1115).
ccccatgctgtttgttatt

SEQ ID NO: 630795 - DNA, 19 bp, Mus musculus
  siRNA target sequence for Glp2r (NM_175681.2,1150-1168).
cagggtgctgggcagtaaa

SEQ ID NO: 630796 - DNA, 19 bp, Mus musculus
  siRNA target sequence for Glp2r (NM_175681.2,1212-1230).
ctttgtgtaacagttaatt

SEQ ID NO: 630797 - DNA, 19 bp, Mus musculus
  siRNA target sequence for Glp2r (NM_175681.2,1247-1265).
gattctcaagcttctcatt

SEQ ID NO: 630798 - DNA, 19 bp, Mus musculus
  siRNA target sequence for Glp2r (NM_175681.2,1297-1315).
gagactacaaatatagact

SEQ ID NO: 630799 - DNA, 19 bp, Mus musculus
  siRNA target sequence for Glp2r (NM_175681.2,1379-1397).
caccgacgaccaagttcaa

SEQ ID NO: 630800 - DNA, 19 bp, Mus musculus
  siRNA target sequence for Glp2r (NM_175681.2,1439-1457).
gagctccttccatggattt

SEQ ID NO: 630801 - DNA, 19 bp, Mus musculus
  siRNA target sequence for Glp2r (NM_175681.2,1561-1579).
gtgtcctagggaagaactt

SEQ ID NO: 630802 - DNA, 19 bp, Mus musculus
  siRNA target sequence for Gpr124 (NM_054044.1,571-589).
cctagacttctcagactaa

SEQ ID NO: 630803 - DNA, 19 bp, Mus musculus
  siRNA target sequence for Gpr124 (NM_054044.1,577-595).
cttctcagactaaacatat

SEQ ID NO: 630804 - DNA, 19 bp, Mus musculus
  siRNA target sequence for Gpr124 (NM_054044.1,618-636).
gcaacctggggtctttgat

SEQ ID NO: 630805 - DNA, 19 bp, Mus musculus
  siRNA target sequence for Gpr124 (NM_054044.1,639-657).
gctgccagcccttaagatt

SEQ ID NO: 630806 - DNA, 19 bp, Mus musculus
  siRNA target sequence for Gpr124 (NM_054044.1,993-1011).
cgtccttgctgaaaacctt

SEQ ID NO: 630807 - DNA, 19 bp, Mus musculus
  siRNA target sequence for Gpr124 (NM_054044.1,1015-1033).
catgattgcaccttcatca

SEQ ID NO: 630808 - DNA, 19 bp, Mus musculus
  siRNA target sequence for Gpr124 (NM_054044.1,1041-1059).
gctgaccctgtctcacatt

SEQ ID NO: 630809 - DNA, 19 bp, Mus musculus
  siRNA target sequence for Gpr124 (NM_054044.1,1230-1248).
ggcttaccagtcctgttta

SEQ ID NO: 630810 - DNA, 19 bp, Mus musculus
  siRNA target sequence for Gpr124 (NM_054044.1,1518-1536).
gaagtttttgggttacgtt

SEQ ID NO: 630811 - DNA, 19 bp, Mus musculus
  siRNA target sequence for Gpr124 (NM_054044.1,1529-1547).
gttacgttgaccagatcaa

SEQ ID NO: 630812 - DNA, 19 bp, Mus musculus
  siRNA target sequence for Gpr124 (NM_054044.1,1896-1914).
cactgggaggcccaacatt

SEQ ID NO: 630813 - DNA, 19 bp, Mus musculus
  siRNA target sequence for Gpr124 (NM_054044.1,2130-2148).
ggccaccccagtcatattt

SEQ ID NO: 630814 - DNA, 19 bp, Mus musculus
  siRNA target sequence for Gpr124 (NM_054044.1,2339-2357).
gcaatgtggccgtgcttat

SEQ ID NO: 630815 - DNA, 19 bp, Mus musculus
  siRNA target sequence for Gpr124 (NM_054044.1,2353-2371).
cttatggagctgaatgcat

SEQ ID NO: 630816 - DNA, 19 bp, Mus musculus
  siRNA target sequence for Gpr124 (NM_054044.1,2579-2597).
cgctcaccaactaccaaat

SEQ ID NO: 630817 - DNA, 19 bp, Mus musculus
  siRNA target sequence for Gpr124 (NM_054044.1,2583-2601).
caccaactaccaaatggtt

SEQ ID NO: 630818 - DNA, 19 bp, Mus musculus
  siRNA target sequence for Gpr124 (NM_054044.1,2746-2764).
cccatgctccggttctact

SEQ ID NO: 630819 - DNA, 19 bp, Mus musculus
  siRNA target sequence for Gpr124 (NM_054044.1,2747-2765).
ccatgctccggttctactt

SEQ ID NO: 630820 - DNA, 19 bp, Mus musculus
  siRNA target sequence for Gpr124 (NM_054044.1,2751-2769).
gctccggttctacttgatt

SEQ ID NO: 630821 - DNA, 19 bp, Mus musculus
  siRNA target sequence for Gpr124 (NM_054044.1,2773-2791).
ggagggatccccctcataa

SEQ ID NO: 630822 - DNA, 19 bp, Mus musculus
  siRNA target sequence for Gpr124 (NM_054044.1,2774-2792).
gagggatccccctcataat

SEQ ID NO: 630823 - DNA, 19 bp, Mus musculus
  siRNA target sequence for Gpr124 (NM_054044.1,2886-2904).
cataccggtggcgttgatt

SEQ ID NO: 630824 - DNA, 19 bp, Mus musculus
  siRNA target sequence for Gpr124 (NM_054044.1,2908-2926).
cctatcacctggatctact

SEQ ID NO: 630825 - DNA, 19 bp, Mus musculus
  siRNA target sequence for Gpr124 (NM_054044.1,2931-2949).
gtgtgcaggccttcactta

SEQ ID NO: 630826 - DNA, 19 bp, Mus musculus
  siRNA target sequence for Gpr124 (NM_054044.1,3117-3135).
ggatggtgatggcgtatat

SEQ ID NO: 630827 - DNA, 19 bp, Mus musculus
  siRNA target sequence for Gpr124 (NM_054044.1,3118-3136).
gatggtgatggcgtatatt

SEQ ID NO: 630828 - DNA, 19 bp, Mus musculus
  siRNA target sequence for Gpr124 (NM_054044.1,3274-3292).
gctcttggtctgtttgtct

SEQ ID NO: 630829 - DNA, 19 bp, Mus musculus
  siRNA target sequence for Gpr124 (NM_054044.1,3303-3321).
ctgtgccagacgtagagat

SEQ ID NO: 630830 - DNA, 19 bp, Mus musculus
  siRNA target sequence for Gpr124 (NM_054044.1,3988-4006).
ctcaacactaccagtctta

SEQ ID NO: 630831 - DNA, 19 bp, Mus musculus
  siRNA target sequence for Gpr124 (NM_054044.1,4014-4032).
ccccaaagggggcaagtat

SEQ ID NO: 630832 - DNA, 19 bp, Mus musculus
  siRNA target sequence for Gpr124 (NM_054044.1,4016-4034).
ccaaagggggcaagtatga

SEQ ID NO: 630833 - DNA, 19 bp, Mus musculus
  siRNA target sequence for Gpr64 (NM_178712.2,109-127).
gacctgaagaggttttact

SEQ ID NO: 630834 - DNA, 19 bp, Mus musculus
  siRNA target sequence for Gpr64 (NM_178712.2,128-146).
gatatacaagatattcctt

SEQ ID NO: 630835 - DNA, 19 bp, Mus musculus
  siRNA target sequence for Gpr64 (NM_178712.2,137-155).
gatattccttgtcatcatt

SEQ ID NO: 630836 - DNA, 19 bp, Mus musculus
  siRNA target sequence for Gpr64 (NM_178712.2,183-201).
ctgaaagaaaacggtaatt

SEQ ID NO: 630837 - DNA, 19 bp, Mus musculus
  siRNA target sequence for Gpr64 (NM_178712.2,194-212).
cggtaattccagtttgtta

SEQ ID NO: 630838 - DNA, 19 bp, Mus musculus
  siRNA target sequence for Gpr64 (NM_178712.2,195-213).
ggtaattccagtttgttat

SEQ ID NO: 630839 - DNA, 19 bp, Mus musculus
  siRNA target sequence for Gpr64 (NM_178712.2,292-310).
cgactttaaacaaaacaga

SEQ ID NO: 630840 - DNA, 19 bp, Mus musculus
  siRNA target sequence for Gpr64 (NM_178712.2,341-359).
caatgcatcaggagtcaaa

SEQ ID NO: 630841 - DNA, 19 bp, Mus musculus
  siRNA target sequence for Gpr64 (NM_178712.2,354-372).
gtcaaatcccagagaaata

SEQ ID NO: 630842 - DNA, 19 bp, Mus musculus
  siRNA target sequence for Gpr64 (NM_178712.2,415-433).
gaggtgagatagtgtttca

SEQ ID NO: 630843 - DNA, 19 bp, Mus musculus
  siRNA target sequence for Gpr64 (NM_178712.2,422-440).
gatagtgtttcaacatgat

SEQ ID NO: 630844 - DNA, 19 bp, Mus musculus
  siRNA target sequence for Gpr64 (NM_178712.2,453-471).
gttacccagaatcaagata

SEQ ID NO: 630845 - DNA, 19 bp, Mus musculus
  siRNA target sequence for Gpr64 (NM_178712.2,461-479).
gaatcaagatacagctaat

SEQ ID NO: 630846 - DNA, 19 bp, Mus musculus
  siRNA target sequence for Gpr64 (NM_178712.2,493-511).
gagtcctgtctctaagtga

SEQ ID NO: 630847 - DNA, 19 bp, Mus musculus
  siRNA target sequence for Gpr64 (NM_178712.2,519-537).
cgatcagagctcaacaaaa

SEQ ID NO: 630848 - DNA, 19 bp, Mus musculus
  siRNA target sequence for Gpr64 (NM_178712.2,538-556).
ctctacagaccttaagtga

SEQ ID NO: 630849 - DNA, 19 bp, Mus musculus
  siRNA target sequence for Gpr64 (NM_178712.2,588-606).
gcccaaagcacggtaaact

SEQ ID NO: 630850 - DNA, 19 bp, Mus musculus
  siRNA target sequence for Gpr64 (NM_178712.2,590-608).
ccaaagcacggtaaactgt

SEQ ID NO: 630851 - DNA, 19 bp, Mus musculus
  siRNA target sequence for Gpr64 (NM_178712.2,591-609).
caaagcacggtaaactgta

SEQ ID NO: 630852 - DNA, 19 bp, Mus musculus
  siRNA target sequence for Gpr64 (NM_178712.2,599-617).
ggtaaactgtacattcaca

SEQ ID NO: 630853 - DNA, 19 bp, Mus musculus
  siRNA target sequence for Gpr64 (NM_178712.2,607-625).
gtacattcacagtaaaact

SEQ ID NO: 630854 - DNA, 19 bp, Mus musculus
  siRNA target sequence for Gpr64 (NM_178712.2,642-660).
gtgtgtgccatgatggtta

SEQ ID NO: 630855 - DNA, 19 bp, Mus musculus
  siRNA target sequence for Gpr64 (NM_178712.2,650-668).
catgatggttactttccaa

SEQ ID NO: 630856 - DNA, 19 bp, Mus musculus
  siRNA target sequence for Gpr64 (NM_178712.2,656-674).
ggttactttccaaactgta

SEQ ID NO: 630857 - DNA, 19 bp, Mus musculus
  siRNA target sequence for Gpr64 (NM_178712.2,798-816).
catggcccaccgttatcgt

SEQ ID NO: 630858 - DNA, 19 bp, Mus musculus
  siRNA target sequence for Gpr64 (NM_178712.2,837-855).
cctcaggccaccattattt

SEQ ID NO: 630859 - DNA, 19 bp, Mus musculus
  siRNA target sequence for Gpr64 (NM_178712.2,861-879).
gttgctagtgacttctctt

SEQ ID NO: 630860 - DNA, 19 bp, Mus musculus
  siRNA target sequence for Gpr64 (NM_178712.2,929-947).
gacacaagaaagtaacctt

SEQ ID NO: 630861 - DNA, 19 bp, Mus musculus
  siRNA target sequence for Gpr64 (NM_178712.2,989-1007).
cactgacttgccagttcaa

SEQ ID NO: 630862 - DNA, 19 bp, Mus musculus
  siRNA target sequence for Gpr64 (NM_178712.2,995-1013).
cttgccagttcaatctgta

SEQ ID NO: 630863 - DNA, 19 bp, Mus musculus
  siRNA target sequence for Gpr64 (NM_178712.2,1097-1115).
cccatctgtccctacagaa

SEQ ID NO: 630864 - DNA, 19 bp, Mus musculus
  siRNA target sequence for Gpr64 (NM_178712.2,1143-1161).
gagacagttgtcaacacta

SEQ ID NO: 630865 - DNA, 19 bp, Mus musculus
  siRNA target sequence for Gpr64 (NM_178712.2,1219-1237).
gtagcttagagcctaatct

SEQ ID NO: 630866 - DNA, 19 bp, Mus musculus
  siRNA target sequence for Gpr64 (NM_178712.2,1236-1254).
cttgcaggcgaaatggtaa

SEQ ID NO: 630867 - DNA, 19 bp, Mus musculus
  siRNA target sequence for Gpr64 (NM_178712.2,1306-1324).
ctcaaaggttgctaaaagt

SEQ ID NO: 630868 - DNA, 19 bp, Mus musculus
  siRNA target sequence for Gpr64 (NM_178712.2,1349-1367).
gaatttttcatctacaact

SEQ ID NO: 630869 - DNA, 19 bp, Mus musculus
  siRNA target sequence for Gpr64 (NM_178712.2,1408-1426).
gagtgaatgccagtaattt

SEQ ID NO: 630870 - DNA, 19 bp, Mus musculus
  siRNA target sequence for Gpr64 (NM_178712.2,1410-1428).
gtgaatgccagtaatttca

SEQ ID NO: 630871 - DNA, 19 bp, Mus musculus
  siRNA target sequence for Gpr64 (NM_178712.2,1412-1430).
gaatgccagtaatttcaat

SEQ ID NO: 630872 - DNA, 19 bp, Mus musculus
  siRNA target sequence for Gpr64 (NM_178712.2,1427-1445).
caataccacgacttttgca

SEQ ID NO: 630873 - DNA, 19 bp, Mus musculus
  siRNA target sequence for Gpr64 (NM_178712.2,1444-1462).
cagcccaagacccaacaaa

SEQ ID NO: 630874 - DNA, 19 bp, Mus musculus
  siRNA target sequence for Gpr64 (NM_178712.2,1459-1477).
caaatctccaggtttctct

SEQ ID NO: 630875 - DNA, 19 bp, Mus musculus
  siRNA target sequence for Gpr64 (NM_178712.2,1486-1504).
cacctcctgagaatagtat

SEQ ID NO: 630876 - DNA, 19 bp, Mus musculus
  siRNA target sequence for Gpr64 (NM_178712.2,1521-1539).
ccctcatcactgatgaata

SEQ ID NO: 630877 - DNA, 19 bp, Mus musculus
  siRNA target sequence for Gpr64 (NM_178712.2,1523-1541).
ctcatcactgatgaataat

SEQ ID NO: 630878 - DNA, 19 bp, Mus musculus
  siRNA target sequence for Gpr64 (NM_178712.2,1545-1563).
ccagctaatgatgtagaat

SEQ ID NO: 630879 - DNA, 19 bp, Mus musculus
  siRNA target sequence for Gpr64 (NM_178712.2,1546-1564).
cagctaatgatgtagaatt

SEQ ID NO: 630880 - DNA, 19 bp, Mus musculus
  siRNA target sequence for Gpr64 (NM_178712.2,1573-1591).
ggattcagttcaatttctt

SEQ ID NO: 630881 - DNA, 19 bp, Mus musculus
  siRNA target sequence for Gpr64 (NM_178712.2,1625-1643).
ggagaacctcactctgata

SEQ ID NO: 630882 - DNA, 19 bp, Mus musculus
  siRNA target sequence for Gpr64 (NM_178712.2,1626-1644).
gagaacctcactctgataa

SEQ ID NO: 630883 - DNA, 19 bp, Mus musculus
  siRNA target sequence for Gpr64 (NM_178712.2,1638-1656).
ctgataagctatgtcatat

SEQ ID NO: 630884 - DNA, 19 bp, Mus musculus
  siRNA target sequence for Gpr64 (NM_178712.2,1640-1658).
gataagctatgtcatatca

SEQ ID NO: 630885 - DNA, 19 bp, Mus musculus
  siRNA target sequence for Gpr64 (NM_178712.2,1700-1718).
cgtgacagtcgcactgaaa

SEQ ID NO: 630886 - DNA, 19 bp, Mus musculus
  siRNA target sequence for Gpr64 (NM_178712.2,1705-1723).
cagtcgcactgaaacacat

SEQ ID NO: 630887 - DNA, 19 bp, Mus musculus
  siRNA target sequence for Gpr64 (NM_178712.2,1732-1750).
gtccggatgacttaactgt

SEQ ID NO: 630888 - DNA, 19 bp, Mus musculus
  siRNA target sequence for Gpr64 (NM_178712.2,1810-1828).
gctgttccgtcaaagacaa

SEQ ID NO: 630889 - DNA, 19 bp, Mus musculus
  siRNA target sequence for Gpr64 (NM_178712.2,1816-1834).
ccgtcaaagacaagagaat

SEQ ID NO: 630890 - DNA, 19 bp, Mus musculus
  siRNA target sequence for Gpr64 (NM_178712.2,1853-1871).
ctgtagccatcttacaagt

SEQ ID NO: 630891 - DNA, 19 bp, Mus musculus
  siRNA target sequence for Gpr64 (NM_178712.2,1855-1873).
gtagccatcttacaagttt

SEQ ID NO: 630892 - DNA, 19 bp, Mus musculus
  siRNA target sequence for Gpr64 (NM_178712.2,1889-1907).
cctatctcgaacatcctta

SEQ ID NO: 630893 - DNA, 19 bp, Mus musculus
  siRNA target sequence for Gpr64 (NM_178712.2,1929-1947).
ctgacatttatcacgtata

SEQ ID NO: 630894 - DNA, 19 bp, Mus musculus
  siRNA target sequence for Gpr64 (NM_178712.2,1950-1968).
ggctgtgggctttcatcaa

SEQ ID NO: 630895 - DNA, 19 bp, Mus musculus
  siRNA target sequence for Gpr64 (NM_178712.2,1978-1996).
cagttactcttgtaaccta

SEQ ID NO: 630896 - DNA, 19 bp, Mus musculus
  siRNA target sequence for Gpr64 (NM_178712.2,1993-2011).
cctacatcgcctttgaaaa

SEQ ID NO: 630897 - DNA, 19 bp, Mus musculus
  siRNA target sequence for Gpr64 (NM_178712.2,2096-2114).
ctggattgcgctgtataat

SEQ ID NO: 630898 - DNA, 19 bp, Mus musculus
  siRNA target sequence for Gpr64 (NM_178712.2,2134-2152).
ccgtggctgtatttcttca

SEQ ID NO: 630899 - DNA, 19 bp, Mus musculus
  siRNA target sequence for Gpr64 (NM_178712.2,2214-2232).
ctggtcaaggtgtttaata

SEQ ID NO: 630900 - DNA, 19 bp, Mus musculus
  siRNA target sequence for Gpr64 (NM_178712.2,2216-2234).
ggtcaaggtgtttaatact

SEQ ID NO: 630901 - DNA, 19 bp, Mus musculus
  siRNA target sequence for Gpr64 (NM_178712.2,2217-2235).
gtcaaggtgtttaatactt

SEQ ID NO: 630902 - DNA, 19 bp, Mus musculus
  siRNA target sequence for Gpr64 (NM_178712.2,2240-2258).
ccgaaagtacatccttaaa

SEQ ID NO: 630903 - DNA, 19 bp, Mus musculus
  siRNA target sequence for Gpr64 (NM_178712.2,2241-2259).
cgaaagtacatccttaaat

SEQ ID NO: 630904 - DNA, 19 bp, Mus musculus
  siRNA target sequence for Gpr64 (NM_178712.2,2242-2260).
gaaagtacatccttaaatt

SEQ ID NO: 630905 - DNA, 19 bp, Mus musculus
  siRNA target sequence for Gpr64 (NM_178712.2,2311-2329).
ctatatccccagataacta

SEQ ID NO: 630906 - DNA, 19 bp, Mus musculus
  siRNA target sequence for Gpr64 (NM_178712.2,2390-2408).
cagcaatgtggtgttctat

SEQ ID NO: 630907 - DNA, 19 bp, Mus musculus
  siRNA target sequence for Gpr64 (NM_178712.2,2420-2438).
gggatatttctgtgtgata

SEQ ID NO: 630908 - DNA, 19 bp, Mus musculus
  siRNA target sequence for Gpr64 (NM_178712.2,2431-2449).
gtgtgatatttctactgaa

SEQ ID NO: 630909 - DNA, 19 bp, Mus musculus
  siRNA target sequence for Gpr64 (NM_178712.2,2445-2463).
ctgaacgtcagcatgttca

SEQ ID NO: 630910 - DNA, 19 bp, Mus musculus
  siRNA target sequence for Gpr64 (NM_178712.2,2474-2492).
ggttcagctctgtcgaatt

SEQ ID NO: 630911 - DNA, 19 bp, Mus musculus
  siRNA target sequence for Gpr64 (NM_178712.2,2475-2493).
gttcagctctgtcgaatta

SEQ ID NO: 630912 - DNA, 19 bp, Mus musculus
  siRNA target sequence for Gpr64 (NM_178712.2,2478-2496).
cagctctgtcgaattaaaa

SEQ ID NO: 630913 - DNA, 19 bp, Mus musculus
  siRNA target sequence for Gpr64 (NM_178712.2,2511-2529).
ggagcccagcgcaaaacta

SEQ ID NO: 630914 - DNA, 19 bp, Mus musculus
  siRNA target sequence for Gpr64 (NM_178712.2,2519-2537).
gcgcaaaactagtattcaa

SEQ ID NO: 630915 - DNA, 19 bp, Mus musculus
  siRNA target sequence for Gpr64 (NM_178712.2,2521-2539).
gcaaaactagtattcaaga

SEQ ID NO: 630916 - DNA, 19 bp, Mus musculus
  siRNA target sequence for Gpr64 (NM_178712.2,2548-2566).
gtatcgctggcctcacatt

SEQ ID NO: 630917 - DNA, 19 bp, Mus musculus
  siRNA target sequence for Gpr64 (NM_178712.2,2554-2572).
ctggcctcacatttttact

SEQ ID NO: 630918 - DNA, 19 bp, Mus musculus
  siRNA target sequence for Gpr64 (NM_178712.2,2602-2620).
cctggggaccagttaatgt

SEQ ID NO: 630919 - DNA, 19 bp, Mus musculus
  siRNA target sequence for Gpr64 (NM_178712.2,2613-2631).
gttaatgtcaccttcatgt

SEQ ID NO: 630920 - DNA, 19 bp, Mus musculus
  siRNA target sequence for Gpr64 (NM_178712.2,2654-2672).
cttacaagggtttttcata

SEQ ID NO: 630921 - DNA, 19 bp, Mus musculus
  siRNA target sequence for Gpr64 (NM_178712.2,2712-2730).
cagtggaggcggtatcttt

SEQ ID NO: 630922 - DNA, 19 bp, Mus musculus
  siRNA target sequence for Gpr64 (NM_178712.2,2717-2735).
gaggcggtatctttgttgt

SEQ ID NO: 630923 - DNA, 19 bp, Mus musculus
  siRNA target sequence for Gpr64 (NM_178712.2,2776-2794).
ctgctactaatggtttaaa

SEQ ID NO: 630924 - DNA, 19 bp, Mus musculus
  siRNA target sequence for Gpr64 (NM_178712.2,2778-2796).
gctactaatggtttaaaga

SEQ ID NO: 630925 - DNA, 19 bp, Mus musculus
  siRNA target sequence for Gpr64 (NM_178712.2,2814-2832).
ggagtatccagctcttcaa

SEQ ID NO: 630926 - DNA, 19 bp, Mus musculus
  siRNA target sequence for Gpr64 (NM_178712.2,2815-2833).
gagtatccagctcttcaaa

SEQ ID NO: 630927 - DNA, 19 bp, Mus musculus
  siRNA target sequence for Gpr64 (NM_178712.2,2817-2835).
gtatccagctcttcaaatt

SEQ ID NO: 630928 - DNA, 19 bp, Mus musculus
  siRNA target sequence for Gpr64 (NM_178712.2,2867-2885).
caccacactcctagtgaat

SEQ ID NO: 630929 - DNA, 19 bp, Mus musculus
  siRNA target sequence for Gpr64 (NM_178712.2,2931-2949).
gagaggaatggggtttctt

SEQ ID NO: 630930 - DNA, 19 bp, Mus musculus
  siRNA target sequence for Gpr64 (NM_178712.2,2989-3007).
ctggcaaacagcatatgtt

SEQ ID NO: 630931 - DNA, 19 bp, Mus musculus
  siRNA target sequence for Gpr64 (NM_178712.2,2993-3011).
caaacagcatatgtttagt

SEQ ID NO: 630932 - DNA, 19 bp, Mus musculus
  siRNA target sequence for Gpr64 (NM_178712.2,2999-3017).
gcatatgtttagtgacaaa

SEQ ID NO: 630933 - DNA, 19 bp, Mus musculus
  siRNA target sequence for Gpr64 (NM_178712.2,3018-3036).
gaggactcctgcaatggta

SEQ ID NO: 630934 - DNA, 19 bp, Mus musculus
  siRNA target sequence for Gpr64 (NM_178712.2,3020-3038).
ggactcctgcaatggtaaa

SEQ ID NO: 630935 - DNA, 19 bp, Mus musculus
  siRNA target sequence for Gpr64 (NM_178712.2,3069-3087).
cggggaagcttacacttta

SEQ ID NO: 630936 - DNA, 19 bp, Mus musculus
  siRNA target sequence for Gpr64 (NM_178712.2,3073-3091).
gaagcttacactttatcga

SEQ ID NO: 630937 - DNA, 19 bp, Mus musculus
  siRNA target sequence for Gpr64 (NM_178712.2,3081-3099).
cactttatcgagcaaatgt

SEQ ID NO: 630938 - DNA, 19 bp, Mus musculus
  siRNA target sequence for Gpr97 (NM_173036.2,137-155).
gagggccacgagtatgaca

SEQ ID NO: 630939 - DNA, 19 bp, Mus musculus
  siRNA target sequence for Gpr97 (NM_173036.2,238-256).
gagatactggttgaactat

SEQ ID NO: 630940 - DNA, 19 bp, Mus musculus
  siRNA target sequence for Gpr97 (NM_173036.2,240-258).
gatactggttgaactatga

SEQ ID NO: 630941 - DNA, 19 bp, Mus musculus
  siRNA target sequence for Gpr97 (NM_173036.2,475-493).
ccggttggccataactgtt

SEQ ID NO: 630942 - DNA, 19 bp, Mus musculus
  siRNA target sequence for Gpr97 (NM_173036.2,483-501).
ccataactgttctagacat

SEQ ID NO: 630943 - DNA, 19 bp, Mus musculus
  siRNA target sequence for Gpr97 (NM_173036.2,484-502).
cataactgttctagacatt

SEQ ID NO: 630944 - DNA, 19 bp, Mus musculus
  siRNA target sequence for Gpr97 (NM_173036.2,548-566).
ggcagcagcgtgttgaaca

SEQ ID NO: 630945 - DNA, 19 bp, Mus musculus
  siRNA target sequence for Gpr97 (NM_173036.2,549-567).
gcagcagcgtgttgaacaa

SEQ ID NO: 630946 - DNA, 19 bp, Mus musculus
  siRNA target sequence for Gpr97 (NM_173036.2,682-700).
ctgggatatggctaaagga

SEQ ID NO: 630947 - DNA, 19 bp, Mus musculus
  siRNA target sequence for Gpr97 (NM_173036.2,849-867).
gtgccgtctccatgatctt

SEQ ID NO: 630948 - DNA, 19 bp, Mus musculus
  siRNA target sequence for Gpr97 (NM_173036.2,916-934).
gaggctcaagtctgaagat

SEQ ID NO: 630949 - DNA, 19 bp, Mus musculus
  siRNA target sequence for Gpr97 (NM_173036.2,927-945).
ctgaagatgcccctaagat

SEQ ID NO: 630950 - DNA, 19 bp, Mus musculus
  siRNA target sequence for Gpr97 (NM_173036.2,1140-1158).
cctactttggacactattt

SEQ ID NO: 630951 - DNA, 19 bp, Mus musculus
  siRNA target sequence for Gpr97 (NM_173036.2,1189-1207).
gcctgttcttgtagttatt

SEQ ID NO: 630952 - DNA, 19 bp, Mus musculus
  siRNA target sequence for Gpr97 (NM_173036.2,1221-1239).
gcaacagttatggagttta

SEQ ID NO: 630953 - DNA, 19 bp, Mus musculus
  siRNA target sequence for Gpr97 (NM_173036.2,1319-1337).
cacggctacttccttgtta

SEQ ID NO: 630954 - DNA, 19 bp, Mus musculus
  siRNA target sequence for Gpr97 (NM_173036.2,1528-1546).
cttcaccctcttaaactct

SEQ ID NO: 630955 - DNA, 19 bp, Mus musculus
  siRNA target sequence for Gpr97 (NM_173036.2,1545-1563).
ctctacaagggctcttcat

SEQ ID NO: 630956 - DNA, 19 bp, Mus musculus
  siRNA target sequence for Gpr97 (NM_173036.2,1547-1565).
ctacaagggctcttcatct

SEQ ID NO: 630957 - DNA, 19 bp, Mus musculus
  siRNA target sequence for Pthr1 (NM_011199.1,83-101).
cagacgatgtctttaccaa

SEQ ID NO: 630958 - DNA, 19 bp, Mus musculus
  siRNA target sequence for Pthr1 (NM_011199.1,258-276).
gttctaccccgagtctaaa

SEQ ID NO: 630959 - DNA, 19 bp, Mus musculus
  siRNA target sequence for Pthr1 (NM_011199.1,266-284).
ccgagtctaaagagaacaa

SEQ ID NO: 630960 - DNA, 19 bp, Mus musculus
  siRNA target sequence for Pthr1 (NM_011199.1,331-349).
gagtgggacaacatcgttt

SEQ ID NO: 630961 - DNA, 19 bp, Mus musculus
  siRNA target sequence for Pthr1 (NM_011199.1,385-403).
gtaccttgtcccgattaca

SEQ ID NO: 630962 - DNA, 19 bp, Mus musculus
  siRNA target sequence for Pthr1 (NM_011199.1,388-406).
ccttgtcccgattacattt

SEQ ID NO: 630963 - DNA, 19 bp, Mus musculus
  siRNA target sequence for Pthr1 (NM_011199.1,389-407).
cttgtcccgattacattta

SEQ ID NO: 630964 - DNA, 19 bp, Mus musculus
  siRNA target sequence for Pthr1 (NM_011199.1,392-410).
gtcccgattacatttatga

SEQ ID NO: 630965 - DNA, 19 bp, Mus musculus
  siRNA target sequence for Pthr1 (NM_011199.1,394-412).
cccgattacatttatgact

SEQ ID NO: 630966 - DNA, 19 bp, Mus musculus
  siRNA target sequence for Pthr1 (NM_011199.1,484-502).
cggacgtgggccaactaca

SEQ ID NO: 630967 - DNA, 19 bp, Mus musculus
  siRNA target sequence for Pthr1 (NM_011199.1,533-551).
ctcgggaacgggaggtatt

SEQ ID NO: 630968 - DNA, 19 bp, Mus musculus
  siRNA target sequence for Pthr1 (NM_011199.1,553-571).
gaccgcctgggcatgatct

SEQ ID NO: 630969 - DNA, 19 bp, Mus musculus
  siRNA target sequence for Pthr1 (NM_011199.1,619-637).
ctcatcctagcctatttta

SEQ ID NO: 630970 - DNA, 19 bp, Mus musculus
  siRNA target sequence for Pthr1 (NM_011199.1,764-782).
gcctcacggaggaagagtt

SEQ ID NO: 630971 - DNA, 19 bp, Mus musculus
  siRNA target sequence for Pthr1 (NM_011199.1,770-788).
cggaggaagagttgcatat

SEQ ID NO: 630972 - DNA, 19 bp, Mus musculus
  siRNA target sequence for Pthr1 (NM_011199.1,874-892).
ctggctaccaactactact

SEQ ID NO: 630973 - DNA, 19 bp, Mus musculus
  siRNA target sequence for Pthr1 (NM_011199.1,900-918).
ggtggagggactgtactta

SEQ ID NO: 630974 - DNA, 19 bp, Mus musculus
  siRNA target sequence for Pthr1 (NM_011199.1,930-948).
cttcatggcctttttctca

SEQ ID NO: 630975 - DNA, 19 bp, Mus musculus
  siRNA target sequence for Pthr1 (NM_011199.1,1106-1124).
catctgttgtgctcaactt

SEQ ID NO: 630976 - DNA, 19 bp, Mus musculus
  siRNA target sequence for Pthr1 (NM_011199.1,1109-1127).
ctgttgtgctcaacttcat

SEQ ID NO: 630977 - DNA, 19 bp, Mus musculus
  siRNA target sequence for Pthr1 (NM_011199.1,1396-1414).
gcagagattaggaagtctt

SEQ ID NO: 630978 - DNA, 19 bp, Mus musculus
  siRNA target sequence for Pthr1 (NM_011199.1,1437-1455).
ggacttcaagcgtaaagca

SEQ ID NO: 630979 - DNA, 19 bp, Mus musculus
  siRNA target sequence for Pthr1 (NM_011199.1,1622-1640).
ccattgagaacgaaaccat

SEQ ID NO: 630980 - DNA, 19 bp, Mus musculus
  siRNA target sequence for Pthr1 (NM_011199.1,1665-1683).
ggacgacggcttccttaat

SEQ ID NO: 630981 - DNA, 19 bp, Mus musculus
  siRNA target sequence for Pthr1 (NM_011199.1,1735-1753).
ccattgttgcaggaagaat

SEQ ID NO: 630982 - DNA, 19 bp, Mus musculus
  siRNA target sequence for Pthr2 (NM_139270.1,4-22).
gcctggctggagactttca

SEQ ID NO: 630983 - DNA, 19 bp, Mus musculus
  siRNA target sequence for Pthr2 (NM_139270.1,87-105).
cggcaccatcactatagaa

SEQ ID NO: 630984 - DNA, 19 bp, Mus musculus
  siRNA target sequence for Pthr2 (NM_139270.1,118-136).
cttgttatgaaggctaaaa

SEQ ID NO: 630985 - DNA, 19 bp, Mus musculus
  siRNA target sequence for Pthr2 (NM_139270.1,252-270).
gccttgccctccgtatgtt

SEQ ID NO: 630986 - DNA, 19 bp, Mus musculus
  siRNA target sequence for Pthr2 (NM_139270.1,253-271).
ccttgccctccgtatgttt

SEQ ID NO: 630987 - DNA, 19 bp, Mus musculus
  siRNA target sequence for Pthr2 (NM_139270.1,254-272).
cttgccctccgtatgttta

SEQ ID NO: 630988 - DNA, 19 bp, Mus musculus
  siRNA target sequence for Pthr2 (NM_139270.1,257-275).
gccctccgtatgtttacga

SEQ ID NO: 630989 - DNA, 19 bp, Mus musculus
  siRNA target sequence for Pthr2 (NM_139270.1,263-281).
cgtatgtttacgacttcaa

SEQ ID NO: 630990 - DNA, 19 bp, Mus musculus
  siRNA target sequence for Pthr2 (NM_139270.1,264-282).
gtatgtttacgacttcaat

SEQ ID NO: 630991 - DNA, 19 bp, Mus musculus
  siRNA target sequence for Pthr2 (NM_139270.1,268-286).
gtttacgacttcaatcata

SEQ ID NO: 630992 - DNA, 19 bp, Mus musculus
  siRNA target sequence for Pthr2 (NM_139270.1,273-291).
cgacttcaatcataaagga

SEQ ID NO: 630993 - DNA, 19 bp, Mus musculus
  siRNA target sequence for Pthr2 (NM_139270.1,353-371).
cctgggctaactattcaga

SEQ ID NO: 630994 - DNA, 19 bp, Mus musculus
  siRNA target sequence for Pthr2 (NM_139270.1,381-399).
gcagcctgatatcaacata

SEQ ID NO: 630995 - DNA, 19 bp, Mus musculus
  siRNA target sequence for Pthr2 (NM_139270.1,386-404).
ctgatatcaacataggaaa

SEQ ID NO: 630996 - DNA, 19 bp, Mus musculus
  siRNA target sequence for Pthr2 (NM_139270.1,442-460).
gttggctactccatctctt

SEQ ID NO: 630997 - DNA, 19 bp, Mus musculus
  siRNA target sequence for Pthr2 (NM_139270.1,473-491).
ctgtagccattctcattat

SEQ ID NO: 630998 - DNA, 19 bp, Mus musculus
  siRNA target sequence for Pthr2 (NM_139270.1,484-502).
ctcattattggctacttca

SEQ ID NO: 630999 - DNA, 19 bp, Mus musculus
  siRNA target sequence for Pthr2 (NM_139270.1,495-513).
ctacttcaggcgattgcat

SEQ ID NO: 631000 - DNA, 19 bp, Mus musculus
  siRNA target sequence for Pthr2 (NM_139270.1,510-528).
gcattgcacgaggaactat

SEQ ID NO: 631001 - DNA, 19 bp, Mus musculus
  siRNA target sequence for Pthr2 (NM_139270.1,511-529).
cattgcacgaggaactata

SEQ ID NO: 631002 - DNA, 19 bp, Mus musculus
  siRNA target sequence for Pthr2 (NM_139270.1,516-534).
cacgaggaactatatccat

SEQ ID NO: 631003 - DNA, 19 bp, Mus musculus
  siRNA target sequence for Pthr2 (NM_139270.1,643-661).
ggtgaccttcagaacttca

SEQ ID NO: 631004 - DNA, 19 bp, Mus musculus
  siRNA target sequence for Pthr2 (NM_139270.1,705-723).
gatcgctgtcgtgatgttt

SEQ ID NO: 631005 - DNA, 19 bp, Mus musculus
  siRNA target sequence for Pthr2 (NM_139270.1,708-726).
cgctgtcgtgatgtttatt

SEQ ID NO: 631006 - DNA, 19 bp, Mus musculus
  siRNA target sequence for Pthr2 (NM_139270.1,709-727).
gctgtcgtgatgtttattt

SEQ ID NO: 631007 - DNA, 19 bp, Mus musculus
  siRNA target sequence for Pthr2 (NM_139270.1,768-786).
gctctacctgcacaactta

SEQ ID NO: 631008 - DNA, 19 bp, Mus musculus
  siRNA target sequence for Pthr2 (NM_139270.1,769-787).
ctctacctgcacaacttaa

SEQ ID NO: 631009 - DNA, 19 bp, Mus musculus
  siRNA target sequence for Pthr2 (NM_139270.1,961-979).
gctgctattgggctgaatt

SEQ ID NO: 631010 - DNA, 19 bp, Mus musculus
  siRNA target sequence for Pthr2 (NM_139270.1,990-1008).
cctgaatacagttagagtt

SEQ ID NO: 631011 - DNA, 19 bp, Mus musculus
  siRNA target sequence for Pthr2 (NM_139270.1,993-1011).
gaatacagttagagttctt

SEQ ID NO: 631012 - DNA, 19 bp, Mus musculus
  siRNA target sequence for Pthr2 (NM_139270.1,1206-1224).
gggtttcttcgtgtctatt

SEQ ID NO: 631013 - DNA, 19 bp, Mus musculus
  siRNA target sequence for Pthr2 (NM_139270.1,1269-1287).
gatgtggactcgatggaat

SEQ ID NO: 631014 - DNA, 19 bp, Mus musculus
  siRNA target sequence for Pthr2 (NM_139270.1,1288-1306).
ctgtccatcgactggaaaa

SEQ ID NO: 631015 - DNA, 19 bp, Mus musculus
  siRNA target sequence for Pthr2 (NM_139270.1,1473-1491).
ctatgtctggagtagttct

SEQ ID NO: 631016 - DNA, 19 bp, Mus musculus
  siRNA target sequence for Pthr2 (NM_139270.1,1542-1560).
caggcgacagggagatgat

SEQ ID NO: 631017 - DNA, 19 bp, Mus musculus
  siRNA target sequence for Vipr1 (NM_011703.2,391-409).
gccccctcatctttcaact

SEQ ID NO: 631018 - DNA, 19 bp, Mus musculus
  siRNA target sequence for Vipr1 (NM_011703.2,417-435).
cccattcacggctataaca

SEQ ID NO: 631019 - DNA, 19 bp, Mus musculus
  siRNA target sequence for Vipr1 (NM_011703.2,440-458).
ccgtaactgcactgaagaa

SEQ ID NO: 631020 - DNA, 19 bp, Mus musculus
  siRNA target sequence for Vipr1 (NM_011703.2,495-513).
gcctgcggcctgaatgaca

SEQ ID NO: 631021 - DNA, 19 bp, Mus musculus
  siRNA target sequence for Vipr1 (NM_011703.2,512-530).
cagggcatctagtatggat

SEQ ID NO: 631022 - DNA, 19 bp, Mus musculus
  siRNA target sequence for Vipr1 (NM_011703.2,703-721).
ccaccgccgtcttcatcaa

SEQ ID NO: 631023 - DNA, 19 bp, Mus musculus
  siRNA target sequence for Vipr1 (NM_011703.2,708-726).
gccgtcttcatcaaggata

SEQ ID NO: 631024 - DNA, 19 bp, Mus musculus
  siRNA target sequence for Vipr1 (NM_011703.2,709-727).
ccgtcttcatcaaggatat

SEQ ID NO: 631025 - DNA, 19 bp, Mus musculus
  siRNA target sequence for Vipr1 (NM_011703.2,723-741).
gatatggccctcttcaaca

SEQ ID NO: 631026 - DNA, 19 bp, Mus musculus
  siRNA target sequence for Vipr1 (NM_011703.2,991-1009).
gctgggacaccatcatcaa

SEQ ID NO: 631027 - DNA, 19 bp, Mus musculus
  siRNA target sequence for Vipr1 (NM_011703.2,1015-1033).
cactgtggtggatcataaa

SEQ ID NO: 631028 - DNA, 19 bp, Mus musculus
  siRNA target sequence for Vipr1 (NM_011703.2,1118-1136).
cgacattgggaagaatgat

SEQ ID NO: 631029 - DNA, 19 bp, Mus musculus
  siRNA target sequence for Vipr1 (NM_011703.2,1119-1137).
gacattgggaagaatgata

SEQ ID NO: 631030 - DNA, 19 bp, Mus musculus
  siRNA target sequence for Vipr1 (NM_011703.2,1241-1259).
ggtgaaaatggtctttgaa

SEQ ID NO: 631031 - DNA, 19 bp, Mus musculus
  siRNA target sequence for Vipr1 (NM_011703.2,1374-1392).
ctgggctggagctccaaat

SEQ ID NO: 631032 - DNA, 19 bp, Mus musculus
  siRNA target sequence for Vipr1 (NM_011703.2,1376-1394).
gggctggagctccaaatca

SEQ ID NO: 631033 - DNA, 19 bp, Mus musculus
  siRNA target sequence for Vipr2 (NM_009511.1,117-135).
cagaatgtcgctttcatct

SEQ ID NO: 631034 - DNA, 19 bp, Mus musculus
  siRNA target sequence for Vipr2 (NM_009511.1,123-141).
gtcgctttcatctagaaat

SEQ ID NO: 631035 - DNA, 19 bp, Mus musculus
  siRNA target sequence for Vipr2 (NM_009511.1,177-195).
gcagccaaacggagaatca

SEQ ID NO: 631036 - DNA, 19 bp, Mus musculus
  siRNA target sequence for Vipr2 (NM_009511.1,212-230).
gtctgggacaacatcacat

SEQ ID NO: 631037 - DNA, 19 bp, Mus musculus
  siRNA target sequence for Vipr2 (NM_009511.1,269-287).
ccctgccccaaagtattca

SEQ ID NO: 631038 - DNA, 19 bp, Mus musculus
  siRNA target sequence for Vipr2 (NM_009511.1,275-293).
cccaaagtattcagcaatt

SEQ ID NO: 631039 - DNA, 19 bp, Mus musculus
  siRNA target sequence for Vipr2 (NM_009511.1,276-294).
ccaaagtattcagcaattt

SEQ ID NO: 631040 - DNA, 19 bp, Mus musculus
  siRNA target sequence for Vipr2 (NM_009511.1,389-407).
cccgaggatgagagtaaga

SEQ ID NO: 631041 - DNA, 19 bp, Mus musculus
  siRNA target sequence for Vipr2 (NM_009511.1,390-408).
ccgaggatgagagtaagat

SEQ ID NO: 631042 - DNA, 19 bp, Mus musculus
  siRNA target sequence for Vipr2 (NM_009511.1,400-418).
gagtaagatctcgttttat

SEQ ID NO: 631043 - DNA, 19 bp, Mus musculus
  siRNA target sequence for Vipr2 (NM_009511.1,684-702).
gtatcatggcaaacttcta

SEQ ID NO: 631044 - DNA, 19 bp, Mus musculus
  siRNA target sequence for Vipr2 (NM_009511.1,799-817).
catccccagtgtgtgtata

SEQ ID NO: 631045 - DNA, 19 bp, Mus musculus
  siRNA target sequence for Vipr2 (NM_009511.1,802-820).
ccccagtgtgtgtataggt

SEQ ID NO: 631046 - DNA, 19 bp, Mus musculus
  siRNA target sequence for Vipr2 (NM_009511.1,828-846).
cagcaactcgcctctcttt

SEQ ID NO: 631047 - DNA, 19 bp, Mus musculus
  siRNA target sequence for Vipr2 (NM_009511.1,831-849).
caactcgcctctctttaga

SEQ ID NO: 631048 - DNA, 19 bp, Mus musculus
  siRNA target sequence for Vipr2 (NM_009511.1,902-920).
cggatgcccattctaattt

SEQ ID NO: 631049 - DNA, 19 bp, Mus musculus
  siRNA target sequence for Vipr2 (NM_009511.1,904-922).
gatgcccattctaatttct

SEQ ID NO: 631050 - DNA, 19 bp, Mus musculus
  siRNA target sequence for Vipr2 (NM_009511.1,951-969).
gcattgtaaggatcttact

SEQ ID NO: 631051 - DNA, 19 bp, Mus musculus
  siRNA target sequence for Vipr2 (NM_009511.1,964-982).
cttacttcagaaactaact

SEQ ID NO: 631052 - DNA, 19 bp, Mus musculus
  siRNA target sequence for Vipr2 (NM_009511.1,1117-1135).
gatcctgtttgagttatgt

SEQ ID NO: 631053 - DNA, 19 bp, Mus musculus
  siRNA target sequence for Vipr2 (NM_009511.1,1153-1171).
cctggtggtagcagttcta

SEQ ID NO: 631054 - DNA, 19 bp, Mus musculus
  siRNA target sequence for Vipr2 (NM_009511.1,1154-1172).
ctggtggtagcagttctat

SEQ ID NO: 631055 - DNA, 19 bp, Mus musculus
  siRNA target sequence for Vipr2 (NM_009511.1,1157-1175).
gtggtagcagttctatact

SEQ ID NO: 631056 - DNA, 19 bp, Mus musculus
  siRNA target sequence for Vipr2 (NM_009511.1,1282-1300).
ccggaatggctcagaaagt

SEQ ID NO: 631057 - DNA, 19 bp, Mus musculus
  siRNA target sequence for Osmr (NM_011019.1,154-172).
catcccgaagcgaagtctt

SEQ ID NO: 631058 - DNA, 19 bp, Mus musculus
  siRNA target sequence for Osmr (NM_011019.1,187-205).
cattgactcctgagataca

SEQ ID NO: 631059 - DNA, 19 bp, Mus musculus
  siRNA target sequence for Osmr (NM_011019.1,259-277).
cagcccttactcatgaaga

SEQ ID NO: 631060 - DNA, 19 bp, Mus musculus
  siRNA target sequence for Osmr (NM_011019.1,261-279).
gcccttactcatgaagaat

SEQ ID NO: 631061 - DNA, 19 bp, Mus musculus
  siRNA target sequence for Osmr (NM_011019.1,268-286).
ctcatgaagaattaaacat

SEQ ID NO: 631062 - DNA, 19 bp, Mus musculus
  siRNA target sequence for Osmr (NM_011019.1,302-320).
gatcagtagactgaacata

SEQ ID NO: 631063 - DNA, 19 bp, Mus musculus
  siRNA target sequence for Osmr (NM_011019.1,329-347).
catctgggtggagaattat

SEQ ID NO: 631064 - DNA, 19 bp, Mus musculus
  siRNA target sequence for Osmr (NM_011019.1,382-400).
ggaactggacgtctgatat

SEQ ID NO: 631065 - DNA, 19 bp, Mus musculus
  siRNA target sequence for Osmr (NM_011019.1,487-505).
ggagttcctggaaagaagt

SEQ ID NO: 631066 - DNA, 19 bp, Mus musculus
  siRNA target sequence for Osmr (NM_011019.1,494-512).
ctggaaagaagttaatgca

SEQ ID NO: 631067 - DNA, 19 bp, Mus musculus
  siRNA target sequence for Osmr (NM_011019.1,521-539).
cgttgaacctgataaatca

SEQ ID NO: 631068 - DNA, 19 bp, Mus musculus
  siRNA target sequence for Osmr (NM_011019.1,522-540).
gttgaacctgataaatcat

SEQ ID NO: 631069 - DNA, 19 bp, Mus musculus
  siRNA target sequence for Osmr (NM_011019.1,525-543).
gaacctgataaatcattaa

SEQ ID NO: 631070 - DNA, 19 bp, Mus musculus
  siRNA target sequence for Osmr (NM_011019.1,538-556).
cattaatatttcctaaaga

SEQ ID NO: 631071 - DNA, 19 bp, Mus musculus
  siRNA target sequence for Osmr (NM_011019.1,596-614).
gatgtatgggcagaatgta

SEQ ID NO: 631072 - DNA, 19 bp, Mus musculus
  siRNA target sequence for Osmr (NM_011019.1,670-688).
cccacgtgtcattattaaa

SEQ ID NO: 631073 - DNA, 19 bp, Mus musculus
  siRNA target sequence for Osmr (NM_011019.1,672-690).
cacgtgtcattattaaaat

SEQ ID NO: 631074 - DNA, 19 bp, Mus musculus
  siRNA target sequence for Osmr (NM_011019.1,712-730).
gtgacacagggacaaacat

SEQ ID NO: 631075 - DNA, 19 bp, Mus musculus
  siRNA target sequence for Osmr (NM_011019.1,721-739).
ggacaaacatcaattgtca

SEQ ID NO: 631076 - DNA, 19 bp, Mus musculus
  siRNA target sequence for Osmr (NM_011019.1,722-740).
gacaaacatcaattgtcaa

SEQ ID NO: 631077 - DNA, 19 bp, Mus musculus
  siRNA target sequence for Osmr (NM_011019.1,741-759).
gccacgaagggtcctaaaa

SEQ ID NO: 631078 - DNA, 19 bp, Mus musculus
  siRNA target sequence for Osmr (NM_011019.1,745-763).
cgaagggtcctaaaagaat

SEQ ID NO: 631079 - DNA, 19 bp, Mus musculus
  siRNA target sequence for Osmr (NM_011019.1,749-767).
gggtcctaaaagaatattt

SEQ ID NO: 631080 - DNA, 19 bp, Mus musculus
  siRNA target sequence for Osmr (NM_011019.1,794-812).
gctcgaggaacctaagaat

SEQ ID NO: 631081 - DNA, 19 bp, Mus musculus
  siRNA target sequence for Osmr (NM_011019.1,818-836).
ctgtgaaacccgagacttt

SEQ ID NO: 631082 - DNA, 19 bp, Mus musculus
  siRNA target sequence for Osmr (NM_011019.1,826-844).
cccgagactttaagacttt

SEQ ID NO: 631083 - DNA, 19 bp, Mus musculus
  siRNA target sequence for Osmr (NM_011019.1,866-884).
ggtagatacgactttgact

SEQ ID NO: 631084 - DNA, 19 bp, Mus musculus
  siRNA target sequence for Osmr (NM_011019.1,867-885).
gtagatacgactttgactt

SEQ ID NO: 631085 - DNA, 19 bp, Mus musculus
  siRNA target sequence for Osmr (NM_011019.1,877-895).
ctttgacttggcgtaaaca

SEQ ID NO: 631086 - DNA, 19 bp, Mus musculus
  siRNA target sequence for Osmr (NM_011019.1,883-901).
cttggcgtaaacaaagatt

SEQ ID NO: 631087 - DNA, 19 bp, Mus musculus
  siRNA target sequence for Osmr (NM_011019.1,902-920).
ccaaaactacactttatgt

SEQ ID NO: 631088 - DNA, 19 bp, Mus musculus
  siRNA target sequence for Osmr (NM_011019.1,921-939).
gaatcgttctctaagagat

SEQ ID NO: 631089 - DNA, 19 bp, Mus musculus
  siRNA target sequence for Osmr (NM_011019.1,965-983).
ctatacctggcaaatcact

SEQ ID NO: 631090 - DNA, 19 bp, Mus musculus
  siRNA target sequence for Osmr (NM_011019.1,991-1009).
cacaggaaatgtataactt

SEQ ID NO: 631091 - DNA, 19 bp, Mus musculus
  siRNA target sequence for Osmr (NM_011019.1,1095-1113).
caggacgtcacccttaaaa

SEQ ID NO: 631092 - DNA, 19 bp, Mus musculus
  siRNA target sequence for Osmr (NM_011019.1,1098-1116).
gacgtcacccttaaaatta

SEQ ID NO: 631093 - DNA, 19 bp, Mus musculus
  siRNA target sequence for Osmr (NM_011019.1,1100-1118).
cgtcacccttaaaattata

SEQ ID NO: 631094 - DNA, 19 bp, Mus musculus
  siRNA target sequence for Osmr (NM_011019.1,1103-1121).
cacccttaaaattataggt

SEQ ID NO: 631095 - DNA, 19 bp, Mus musculus
  siRNA target sequence for Osmr (NM_011019.1,1122-1140).
gctacaaaagccaacatga

SEQ ID NO: 631096 - DNA, 19 bp, Mus musculus
  siRNA target sequence for Osmr (NM_011019.1,1152-1170).
cactcccatggaaacaact

SEQ ID NO: 631097 - DNA, 19 bp, Mus musculus
  siRNA target sequence for Osmr (NM_011019.1,1161-1179).
ggaaacaactacacacttt

SEQ ID NO: 631098 - DNA, 19 bp, Mus musculus
  siRNA target sequence for Osmr (NM_011019.1,1174-1192).
cacttttgtgtcaggttaa

SEQ ID NO: 631099 - DNA, 19 bp, Mus musculus
  siRNA target sequence for Osmr (NM_011019.1,1211-1229).
gattcatgagcacaatgtt

SEQ ID NO: 631100 - DNA, 19 bp, Mus musculus
  siRNA target sequence for Osmr (NM_011019.1,1279-1297).
caaagtacaaggcttttgt

SEQ ID NO: 631101 - DNA, 19 bp, Mus musculus
  siRNA target sequence for Osmr (NM_011019.1,1375-1393).
cctcacaggctcttgatgt

SEQ ID NO: 631102 - DNA, 19 bp, Mus musculus
  siRNA target sequence for Osmr (NM_011019.1,1423-1441).
gacgcattgtgactttatt

SEQ ID NO: 631103 - DNA, 19 bp, Mus musculus
  siRNA target sequence for Osmr (NM_011019.1,1425-1443).
cgcattgtgactttattct

SEQ ID NO: 631104 - DNA, 19 bp, Mus musculus
  siRNA target sequence for Osmr (NM_011019.1,1462-1480).
cacaggccaatggcaaaat

SEQ ID NO: 631105 - DNA, 19 bp, Mus musculus
  siRNA target sequence for Osmr (NM_011019.1,1466-1484).
ggccaatggcaaaatcata

SEQ ID NO: 631106 - DNA, 19 bp, Mus musculus
  siRNA target sequence for Osmr (NM_011019.1,1467-1485).
gccaatggcaaaatcatat

SEQ ID NO: 631107 - DNA, 19 bp, Mus musculus
  siRNA target sequence for Osmr (NM_011019.1,1473-1491).
ggcaaaatcatatcctata

SEQ ID NO: 631108 - DNA, 19 bp, Mus musculus
  siRNA target sequence for Osmr (NM_011019.1,1481-1499).
catatcctataatatagtt

SEQ ID NO: 631109 - DNA, 19 bp, Mus musculus
  siRNA target sequence for Osmr (NM_011019.1,1487-1505).
ctataatatagttgtagaa

SEQ ID NO: 631110 - DNA, 19 bp, Mus musculus
  siRNA target sequence for Osmr (NM_011019.1,1519-1537).
caactgagtcagaacacta

SEQ ID NO: 631111 - DNA, 19 bp, Mus musculus
  siRNA target sequence for Osmr (NM_011019.1,1573-1591).
gccttgacctgcaacctta

SEQ ID NO: 631112 - DNA, 19 bp, Mus musculus
  siRNA target sequence for Osmr (NM_011019.1,1690-1708).
caattaaaggtataaagga

SEQ ID NO: 631113 - DNA, 19 bp, Mus musculus
  siRNA target sequence for Osmr (NM_011019.1,1782-1800).
caggaccaacgctgtgatt

SEQ ID NO: 631114 - DNA, 19 bp, Mus musculus
  siRNA target sequence for Osmr (NM_011019.1,1863-1881).
ccaggcgtccgttacaact

SEQ ID NO: 631115 - DNA, 19 bp, Mus musculus
  siRNA target sequence for Osmr (NM_011019.1,1864-1882).
caggcgtccgttacaactt

SEQ ID NO: 631116 - DNA, 19 bp, Mus musculus
  siRNA target sequence for Osmr (NM_011019.1,1866-1884).
ggcgtccgttacaacttca

SEQ ID NO: 631117 - DNA, 19 bp, Mus musculus
  siRNA target sequence for Osmr (NM_011019.1,1869-1887).
gtccgttacaacttcagaa

SEQ ID NO: 631118 - DNA, 19 bp, Mus musculus
  siRNA target sequence for Osmr (NM_011019.1,1871-1889).
ccgttacaacttcagaatt

SEQ ID NO: 631119 - DNA, 19 bp, Mus musculus
  siRNA target sequence for Osmr (NM_011019.1,1915-1933).
ctcggttagtagagaaaca

SEQ ID NO: 631120 - DNA, 19 bp, Mus musculus
  siRNA target sequence for Osmr (NM_011019.1,1917-1935).
cggttagtagagaaacaaa

SEQ ID NO: 631121 - DNA, 19 bp, Mus musculus
  siRNA target sequence for Osmr (NM_011019.1,1919-1937).
gttagtagagaaacaaaga

SEQ ID NO: 631122 - DNA, 19 bp, Mus musculus
  siRNA target sequence for Osmr (NM_011019.1,1956-1974).
gctcctttggtgaatccaa

SEQ ID NO: 631123 - DNA, 19 bp, Mus musculus
  siRNA target sequence for Osmr (NM_011019.1,1957-1975).
ctcctttggtgaatccaaa

SEQ ID NO: 631124 - DNA, 19 bp, Mus musculus
  siRNA target sequence for Osmr (NM_011019.1,1960-1978).
ctttggtgaatccaaaagt

SEQ ID NO: 631125 - DNA, 19 bp, Mus musculus
  siRNA target sequence for Osmr (NM_011019.1,1998-2016).
cctaactccttcgttctaa

SEQ ID NO: 631126 - DNA, 19 bp, Mus musculus
  siRNA target sequence for Osmr (NM_011019.1,2036-2054).
cgacttccaggctggtttt

SEQ ID NO: 631127 - DNA, 19 bp, Mus musculus
  siRNA target sequence for Osmr (NM_011019.1,2061-2079).
gggtacctcgtgtatgtga

SEQ ID NO: 631128 - DNA, 19 bp, Mus musculus
  siRNA target sequence for Osmr (NM_011019.1,2067-2085).
ctcgtgtatgtgaaatcca

SEQ ID NO: 631129 - DNA, 19 bp, Mus musculus
  siRNA target sequence for Osmr (NM_011019.1,2144-2162).
ctgtaaatacgacatcaat

SEQ ID NO: 631130 - DNA, 19 bp, Mus musculus
  siRNA target sequence for Osmr (NM_011019.1,2179-2197).
cactcaccgtggaaaacct

SEQ ID NO: 631131 - DNA, 19 bp, Mus musculus
  siRNA target sequence for Osmr (NM_011019.1,2203-2221).
cagagtccctctatgagtt

SEQ ID NO: 631132 - DNA, 19 bp, Mus musculus
  siRNA target sequence for Osmr (NM_011019.1,2205-2223).
gagtccctctatgagtttt

SEQ ID NO: 631133 - DNA, 19 bp, Mus musculus
  siRNA target sequence for Osmr (NM_011019.1,2251-2269).
caggacccaatgaaacgtt

SEQ ID NO: 631134 - DNA, 19 bp, Mus musculus
  siRNA target sequence for Osmr (NM_011019.1,2453-2471).
gaagaatcctcacttaata

SEQ ID NO: 631135 - DNA, 19 bp, Mus musculus
  siRNA target sequence for Osmr (NM_011019.1,2549-2567).
ctctgggaaacttcacatt

SEQ ID NO: 631136 - DNA, 19 bp, Mus musculus
  siRNA target sequence for Osmr (NM_011019.1,2589-2607).
ccaatcgtgccaacagaaa

SEQ ID NO: 631137 - DNA, 19 bp, Mus musculus
  siRNA target sequence for Osmr (NM_011019.1,2590-2608).
caatcgtgccaacagaaaa

SEQ ID NO: 631138 - DNA, 19 bp, Mus musculus
  siRNA target sequence for Osmr (NM_011019.1,2750-2768).
caagttccagaacgtatta

SEQ ID NO: 631139 - DNA, 19 bp, Mus musculus
  siRNA target sequence for Osmr (NM_011019.1,2792-2810).
ggtcgaaagtccaactgaa

SEQ ID NO: 631140 - DNA, 19 bp, Mus musculus
  siRNA target sequence for 1600019O04Rik (NM_173182.1,253-271).
gctgaagttcccatgatgt

SEQ ID NO: 631141 - DNA, 19 bp, Mus musculus
  siRNA target sequence for 1600019O04Rik (NM_173182.1,297-315).
ccatgtgcctccaggttat

SEQ ID NO: 631142 - DNA, 19 bp, Mus musculus
  siRNA target sequence for 1600019O04Rik (NM_173182.1,298-316).
catgtgcctccaggttata

SEQ ID NO: 631143 - DNA, 19 bp, Mus musculus
  siRNA target sequence for 1600019O04Rik (NM_173182.1,301-319).
gtgcctccaggttatatct

SEQ ID NO: 631144 - DNA, 19 bp, Mus musculus
  siRNA target sequence for 1600019O04Rik (NM_173182.1,303-321).
gcctccaggttatatctca

SEQ ID NO: 631145 - DNA, 19 bp, Mus musculus
  siRNA target sequence for 1600019O04Rik (NM_173182.1,541-559).
cttcctcccacaatatata

SEQ ID NO: 631146 - DNA, 19 bp, Mus musculus
  siRNA target sequence for 1600019O04Rik (NM_173182.1,623-641).
gcaagcctccacataagaa

SEQ ID NO: 631147 - DNA, 19 bp, Mus musculus
  siRNA target sequence for 1600019O04Rik (NM_173182.1,685-703).
ccaccttccaccatctaca

SEQ ID NO: 631148 - DNA, 19 bp, Mus musculus
  siRNA target sequence for 1600019O04Rik (NM_173182.1,686-704).
caccttccaccatctacaa

SEQ ID NO: 631149 - DNA, 19 bp, Mus musculus
  siRNA target sequence for 1600019O04Rik (NM_173182.1,688-706).
ccttccaccatctacaaga

SEQ ID NO: 631150 - DNA, 19 bp, Mus musculus
  siRNA target sequence for 1600019O04Rik (NM_173182.1,788-806).
gtggacctgggatcaagaa

SEQ ID NO: 631151 - DNA, 19 bp, Mus musculus
  siRNA target sequence for 1600019O04Rik (NM_173182.1,820-838).
gcgaggagcagcccaaaat

SEQ ID NO: 631152 - DNA, 19 bp, Mus musculus
  siRNA target sequence for 1600019O04Rik (NM_173182.1,831-849).
cccaaaatccagtgattct

SEQ ID NO: 631153 - DNA, 19 bp, Mus musculus
  siRNA target sequence for 1600019O04Rik (NM_173182.1,850-868).
gacctgcaagagtatgagt

SEQ ID NO: 631154 - DNA, 19 bp, Mus musculus
  siRNA target sequence for 1600019O04Rik (NM_173182.1,909-927).
gaaaccacaggtgtctaat

SEQ ID NO: 631155 - DNA, 19 bp, Mus musculus
  siRNA target sequence for 1600019O04Rik (NM_173182.1,914-932).
cacaggtgtctaatatcca

SEQ ID NO: 631156 - DNA, 19 bp, Mus musculus
  siRNA target sequence for 1600019O04Rik (NM_173182.1,1014-1032).
ctatgaggtcgccttatct

SEQ ID NO: 631157 - DNA, 19 bp, Mus musculus
  siRNA target sequence for 1600019O04Rik (NM_173182.1,1020-1038).
ggtcgccttatctgacaaa

SEQ ID NO: 631158 - DNA, 19 bp, Mus musculus
  siRNA target sequence for 1600019O04Rik (NM_173182.1,1039-1057).
gggcgagatgggaaataca

SEQ ID NO: 631159 - DNA, 19 bp, Mus musculus
  siRNA target sequence for 1600019O04Rik (NM_173182.1,1107-1125).
gcctgccacggattaccat

SEQ ID NO: 631160 - DNA, 19 bp, Mus musculus
  siRNA target sequence for 1600019O04Rik (NM_173182.1,1130-1148).
gggtatatgccgtgtacaa

SEQ ID NO: 631161 - DNA, 19 bp, Mus musculus
  siRNA target sequence for 1600019O04Rik (NM_173182.1,1131-1149).
ggtatatgccgtgtacaat

SEQ ID NO: 631162 - DNA, 19 bp, Mus musculus
  siRNA target sequence for 1600019O04Rik (NM_173182.1,1132-1150).
gtatatgccgtgtacaatt

SEQ ID NO: 631163 - DNA, 19 bp, Mus musculus
  siRNA target sequence for 1600019O04Rik (NM_173182.1,1230-1248).
ggcacacaggagcaaaagt

SEQ ID NO: 631164 - DNA, 19 bp, Mus musculus
  siRNA target sequence for 1600019O04Rik (NM_173182.1,1260-1278).
gcagtggaaggctccaatt

SEQ ID NO: 631165 - DNA, 19 bp, Mus musculus
  siRNA target sequence for 1600019O04Rik (NM_173182.1,1265-1283).
ggaaggctccaattgacaa

SEQ ID NO: 631166 - DNA, 19 bp, Mus musculus
  siRNA target sequence for 1600019O04Rik (NM_173182.1,1266-1284).
gaaggctccaattgacaat

SEQ ID NO: 631167 - DNA, 19 bp, Mus musculus
  siRNA target sequence for 1600019O04Rik (NM_173182.1,1270-1288).
gctccaattgacaatggtt

SEQ ID NO: 631168 - DNA, 19 bp, Mus musculus
  siRNA target sequence for 1600019O04Rik (NM_173182.1,1576-1594).
cctgaggaagtgataacct

SEQ ID NO: 631169 - DNA, 19 bp, Mus musculus
  siRNA target sequence for 1600019O04Rik (NM_173182.1,1592-1610).
cctacaccctggacattca

SEQ ID NO: 631170 - DNA, 19 bp, Mus musculus
  siRNA target sequence for 1600019O04Rik (NM_173182.1,1659-1677).
cctaacctgtactgtgaaa

SEQ ID NO: 631171 - DNA, 19 bp, Mus musculus
  siRNA target sequence for 1600019O04Rik (NM_173182.1,1660-1678).
ctaacctgtactgtgaaaa

SEQ ID NO: 631172 - DNA, 19 bp, Mus musculus
  siRNA target sequence for 1600019O04Rik (NM_173182.1,1664-1682).
cctgtactgtgaaaaatct

SEQ ID NO: 631173 - DNA, 19 bp, Mus musculus
  siRNA target sequence for 1600019O04Rik (NM_173182.1,1683-1701).
caagcgaagcacacagtat

SEQ ID NO: 631174 - DNA, 19 bp, Mus musculus
  siRNA target sequence for 1600019O04Rik (NM_173182.1,1792-1810).
ccaaccagacccctcatta

SEQ ID NO: 631175 - DNA, 19 bp, Mus musculus
  siRNA target sequence for 1600019O04Rik (NM_173182.1,1793-1811).
caaccagacccctcattaa

SEQ ID NO: 631176 - DNA, 19 bp, Mus musculus
  siRNA target sequence for 1600019O04Rik (NM_173182.1,1871-1889).
gctcagaaatcctgaagta

SEQ ID NO: 631177 - DNA, 19 bp, Mus musculus
  siRNA target sequence for 1600019O04Rik (NM_173182.1,1872-1890).
ctcagaaatcctgaagtat

SEQ ID NO: 631178 - DNA, 19 bp, Mus musculus
  siRNA target sequence for 1600019O04Rik (NM_173182.1,1874-1892).
cagaaatcctgaagtatct

SEQ ID NO: 631179 - DNA, 19 bp, Mus musculus
  siRNA target sequence for 1600019O04Rik (NM_173182.1,1899-1917).
gatcacggatggaacttct

SEQ ID NO: 631180 - DNA, 19 bp, Mus musculus
  siRNA target sequence for 1600019O04Rik (NM_173182.1,1902-1920).
cacggatggaacttctgaa

SEQ ID NO: 631181 - DNA, 19 bp, Mus musculus
  siRNA target sequence for 1600019O04Rik (NM_173182.1,1949-1967).
gatcggctacagagtatgt

SEQ ID NO: 631182 - DNA, 19 bp, Mus musculus
  siRNA target sequence for 1600019O04Rik (NM_173182.1,1952-1970).
cggctacagagtatgtctt

SEQ ID NO: 631183 - DNA, 19 bp, Mus musculus
  siRNA target sequence for 1600019O04Rik (NM_173182.1,1953-1971).
ggctacagagtatgtcttt

SEQ ID NO: 631184 - DNA, 19 bp, Mus musculus
  siRNA target sequence for 1600019O04Rik (NM_173182.1,2005-2023).
cgagcgtgctgcatcagta

SEQ ID NO: 631185 - DNA, 19 bp, Mus musculus
  siRNA target sequence for 1600019O04Rik (NM_173182.1,2053-2071).
ctccctgtccgcacactaa

SEQ ID NO: 631186 - DNA, 19 bp, Mus musculus
  siRNA target sequence for 1600019O04Rik (NM_173182.1,2496-2514).
gtccttagaactcgtttat

SEQ ID NO: 631187 - DNA, 19 bp, Mus musculus
  siRNA target sequence for 1600019O04Rik (NM_173182.1,2498-2516).
ccttagaactcgtttatca

SEQ ID NO: 631188 - DNA, 19 bp, Mus musculus
  siRNA target sequence for 1600019O04Rik (NM_173182.1,2499-2517).
cttagaactcgtttatcat

SEQ ID NO: 631189 - DNA, 19 bp, Mus musculus
  siRNA target sequence for 1600019O04Rik (NM_173182.1,2522-2540).
cagacacctgctttgagat

SEQ ID NO: 631190 - DNA, 19 bp, Mus musculus
  siRNA target sequence for 1600019O04Rik (NM_173182.1,2596-2614).
gcaggcgcagggccatata

SEQ ID NO: 631191 - DNA, 19 bp, Mus musculus
  siRNA target sequence for 1600019O04Rik (NM_173182.1,2600-2618).
gcgcagggccatatagtga

SEQ ID NO: 631192 - DNA, 19 bp, Mus musculus
  siRNA target sequence for 1600019O04Rik (NM_173182.1,2738-2756).
gggaagagccgtgcaataa

SEQ ID NO: 631193 - DNA, 19 bp, Mus musculus
  siRNA target sequence for 1600019O04Rik (NM_173182.1,2739-2757).
ggaagagccgtgcaataat

SEQ ID NO: 631194 - DNA, 19 bp, Mus musculus
  siRNA target sequence for 1600019O04Rik (NM_173182.1,2759-2777).
ggtctgaaatccttgctta

SEQ ID NO: 631195 - DNA, 19 bp, Mus musculus
  siRNA target sequence for 1600019O04Rik (NM_173182.1,2760-2778).
gtctgaaatccttgcttat

SEQ ID NO: 631196 - DNA, 19 bp, Mus musculus
  siRNA target sequence for 1600019O04Rik (NM_173182.1,2762-2780).
ctgaaatccttgcttataa

SEQ ID NO: 631197 - DNA, 19 bp, Mus musculus
  siRNA target sequence for 1600019O04Rik (NM_173182.1,2764-2782).
gaaatccttgcttataaca

SEQ ID NO: 631198 - DNA, 19 bp, Mus musculus
  siRNA target sequence for 1600019O04Rik (NM_173182.1,2790-2808).
gggagacagctgcattact

SEQ ID NO: 631199 - DNA, 19 bp, Mus musculus
  siRNA target sequence for 1600019O04Rik (NM_173182.1,2819-2837).
ctaccacacacgtgatgaa

SEQ ID NO: 631200 - DNA, 19 bp, Mus musculus
  siRNA target sequence for 1600019O04Rik (NM_173182.1,2855-2873).
cgacataccggatcagaat

SEQ ID NO: 631201 - DNA, 19 bp, Mus musculus
  siRNA target sequence for 1600019O04Rik (NM_173182.1,2856-2874).
gacataccggatcagaatt

SEQ ID NO: 631202 - DNA, 19 bp, Mus musculus
  siRNA target sequence for 1600019O04Rik (NM_173182.1,2877-2895).
ggctatcaatgaaattgga

SEQ ID NO: 631203 - DNA, 19 bp, Mus musculus
  siRNA target sequence for 1600019O04Rik (NM_173182.1,2894-2912).
gagttggaccatttagtca

SEQ ID NO: 631204 - DNA, 19 bp, Mus musculus
  siRNA target sequence for 1600019O04Rik (NM_173182.1,2900-2918).
gaccatttagtcagttcat

SEQ ID NO: 631205 - DNA, 19 bp, Mus musculus
  siRNA target sequence for 1600019O04Rik (NM_173182.1,2903-2921).
catttagtcagttcattaa

SEQ ID NO: 631206 - DNA, 19 bp, Mus musculus
  siRNA target sequence for 1600019O04Rik (NM_173182.1,3181-3199).
gaggggccttactcagaaa

SEQ ID NO: 631207 - DNA, 19 bp, Mus musculus
  siRNA target sequence for 1600019O04Rik (NM_173182.1,3185-3203).
ggccttactcagaaaccta

SEQ ID NO: 631208 - DNA, 19 bp, Mus musculus
  siRNA target sequence for 1600019O04Rik (NM_173182.1,3248-3266).
ctcgagtgacgcagttaga

SEQ ID NO: 631209 - DNA, 19 bp, Mus musculus
  siRNA target sequence for 1600019O04Rik (NM_173182.1,3269-3287).
ggaattcctgtgaaatctt

SEQ ID NO: 631210 - DNA, 19 bp, Mus musculus
  siRNA target sequence for 1600019O04Rik (NM_173182.1,3320-3338).
ctgtgagctacgttctaca

SEQ ID NO: 631211 - DNA, 19 bp, Mus musculus
  siRNA target sequence for 1600019O04Rik (NM_173182.1,3372-3390).
ggtgtacaagggagaagaa

SEQ ID NO: 631212 - DNA, 19 bp, Mus musculus
  siRNA target sequence for 1600019O04Rik (NM_173182.1,3497-3515).
gcccctctgcggctttcat

SEQ ID NO: 631213 - DNA, 19 bp, Mus musculus
  siRNA target sequence for 1600019O04Rik (NM_173182.1,3499-3517).
ccctctgcggctttcatgt

SEQ ID NO: 631214 - DNA, 19 bp, Mus musculus
  siRNA target sequence for 1600019O04Rik (NM_173182.1,3500-3518).
cctctgcggctttcatgtt

SEQ ID NO: 631215 - DNA, 19 bp, Mus musculus
  siRNA target sequence for 1600019O04Rik (NM_173182.1,3501-3519).
ctctgcggctttcatgtta

SEQ ID NO: 631216 - DNA, 19 bp, Mus musculus
  siRNA target sequence for 1600019O04Rik (NM_173182.1,3506-3524).
cggctttcatgttacaaca

SEQ ID NO: 631217 - DNA, 19 bp, Mus musculus
  siRNA target sequence for 1600019O04Rik (NM_173182.1,3523-3541).
cagcgtgaggttatgctta

SEQ ID NO: 631218 - DNA, 19 bp, Mus musculus
  siRNA target sequence for 1600019O04Rik (NM_173182.1,3588-3606).
gcccaccgacgaacagttt

SEQ ID NO: 631219 - DNA, 19 bp, Mus musculus
  siRNA target sequence for 1600019O04Rik (NM_173182.1,3631-3649).
gcgaccctgtccattttgt

SEQ ID NO: 631220 - DNA, 19 bp, Mus musculus
  siRNA target sequence for Cntfr (NM_016673.1,374-392).
gctgatactgcgaagctta

SEQ ID NO: 631221 - DNA, 19 bp, Mus musculus
  siRNA target sequence for Cntfr (NM_016673.1,377-395).
gatactgcgaagcttagaa

SEQ ID NO: 631222 - DNA, 19 bp, Mus musculus
  siRNA target sequence for Cntfr (NM_016673.1,448-466).
gccaccaagtccttctaca

SEQ ID NO: 631223 - DNA, 19 bp, Mus musculus
  siRNA target sequence for Cntfr (NM_016673.1,499-517).
gctgccgctccaacactta

SEQ ID NO: 631224 - DNA, 19 bp, Mus musculus
  siRNA target sequence for Cntfr (NM_016673.1,559-577).
cctacatccccaatacctt

SEQ ID NO: 631225 - DNA, 19 bp, Mus musculus
  siRNA target sequence for Cntfr (NM_016673.1,567-585).
cccaataccttcaatgtga

SEQ ID NO: 631226 - DNA, 19 bp, Mus musculus
  siRNA target sequence for Cntfr (NM_016673.1,590-608).
gctgcatggctccaaaatt

SEQ ID NO: 631227 - DNA, 19 bp, Mus musculus
  siRNA target sequence for Cntfr (NM_016673.1,683-701).
gtacaaggtctccataagt

SEQ ID NO: 631228 - DNA, 19 bp, Mus musculus
  siRNA target sequence for Cntfr (NM_016673.1,733-751).
ccatcacctttgacgaatt

SEQ ID NO: 631229 - DNA, 19 bp, Mus musculus
  siRNA target sequence for Cntfr (NM_016673.1,766-784).
ctgatcctccagaaaacgt

SEQ ID NO: 631230 - DNA, 19 bp, Mus musculus
  siRNA target sequence for Cntfr (NM_016673.1,850-868).
ggcccgaccctgaatcctt

SEQ ID NO: 631231 - DNA, 19 bp, Mus musculus
  siRNA target sequence for Cntfr (NM_016673.1,851-869).
gcccgaccctgaatccttt

SEQ ID NO: 631232 - DNA, 19 bp, Mus musculus
  siRNA target sequence for Cntfr (NM_016673.1,963-981).
gcctacgcagggaaggaat

SEQ ID NO: 631233 - DNA, 19 bp, Mus musculus
  siRNA target sequence for Cntfr (NM_016673.1,964-982).
cctacgcagggaaggaata

SEQ ID NO: 631234 - DNA, 19 bp, Mus musculus
  siRNA target sequence for Cntfr (NM_016673.1,970-988).
cagggaaggaatacatcat

SEQ ID NO: 631235 - DNA, 19 bp, Mus musculus
  siRNA target sequence for Cntfr (NM_016673.1,1185-1203).
ggaggaccctccatactct

SEQ ID NO: 631236 - DNA, 19 bp, Mus musculus
  siRNA target sequence for Csf2rb1 (NM_007780.1,592-610).
cctatacacgattttccat

SEQ ID NO: 631237 - DNA, 19 bp, Mus musculus
  siRNA target sequence for Csf2rb1 (NM_007780.1,598-616).
cacgattttccatcacaaa

SEQ ID NO: 631238 - DNA, 19 bp, Mus musculus
  siRNA target sequence for Csf2rb1 (NM_007780.1,607-625).
ccatcacaaacgaagacta

SEQ ID NO: 631239 - DNA, 19 bp, Mus musculus
  siRNA target sequence for Csf2rb1 (NM_007780.1,1573-1591).
gcaagtggagcgaagagta

SEQ ID NO: 631240 - DNA, 19 bp, Mus musculus
  siRNA target sequence for Csf2rb2 (NM_007781.1,379-397).
ccagctagacaagattcaa

SEQ ID NO: 631241 - DNA, 19 bp, Mus musculus
  siRNA target sequence for Csf2rb2 (NM_007781.1,483-501).
cctacacacgattttctaa

SEQ ID NO: 631242 - DNA, 19 bp, Mus musculus
  siRNA target sequence for Csf2rb2 (NM_007781.1,484-502).
ctacacacgattttctaat

SEQ ID NO: 631243 - DNA, 19 bp, Mus musculus
  siRNA target sequence for Csf2rb2 (NM_007781.1,487-505).
cacacgattttctaatgga

SEQ ID NO: 631244 - DNA, 19 bp, Mus musculus
  siRNA target sequence for Csf2rb2 (NM_007781.1,612-630).
gcccctctggggatcattt

SEQ ID NO: 631245 - DNA, 19 bp, Mus musculus
  siRNA target sequence for Csf2rb2 (NM_007781.1,637-655).
ggaatggagtgtatctctt

SEQ ID NO: 631246 - DNA, 19 bp, Mus musculus
  siRNA target sequence for Csf2rb2 (NM_007781.1,1355-1373).
ctaggtcgagtcaatagca

SEQ ID NO: 631247 - DNA, 19 bp, Mus musculus
  siRNA target sequence for Csf2rb2 (NM_007781.1,1458-1476).
gcgagtggagcaatgagta

SEQ ID NO: 631248 - DNA, 19 bp, Mus musculus
  siRNA target sequence for Csf2rb2 (NM_007781.1,1561-1579).
ccactttggccgtgtttat

SEQ ID NO: 631249 - DNA, 19 bp, Mus musculus
  siRNA target sequence for Csf3r (NM_007782.1,210-228).
ggagttaccctgatcttct

SEQ ID NO: 631250 - DNA, 19 bp, Mus musculus
  siRNA target sequence for Csf3r (NM_007782.1,211-229).
gagttaccctgatcttctt

SEQ ID NO: 631251 - DNA, 19 bp, Mus musculus
  siRNA target sequence for Csf3r (NM_007782.1,843-861).
cccatggatgttgtgaaat

SEQ ID NO: 631252 - DNA, 19 bp, Mus musculus
  siRNA target sequence for Csf3r (NM_007782.1,1084-1102).
cagtctacaccctacagat

SEQ ID NO: 631253 - DNA, 19 bp, Mus musculus
  siRNA target sequence for Csf3r (NM_007782.1,1094-1112).
cctacagatgcgatgcatt

SEQ ID NO: 631254 - DNA, 19 bp, Mus musculus
  siRNA target sequence for Csf3r (NM_007782.1,1555-1573).
ctcagggctatctcattga

SEQ ID NO: 631255 - DNA, 19 bp, Mus musculus
  siRNA target sequence for Csf3r (NM_007782.1,1566-1584).
ctcattgagtgggaaatga

SEQ ID NO: 631256 - DNA, 19 bp, Mus musculus
  siRNA target sequence for Csf3r (NM_007782.1,1568-1586).
cattgagtgggaaatgagt

SEQ ID NO: 631257 - DNA, 19 bp, Mus musculus
  siRNA target sequence for Csf3r (NM_007782.1,1626-1644).
gaacctaacgggaacatca

SEQ ID NO: 631258 - DNA, 19 bp, Mus musculus
  siRNA target sequence for Csf3r (NM_007782.1,1636-1654).
ggaacatcactggaattct

SEQ ID NO: 631259 - DNA, 19 bp, Mus musculus
  siRNA target sequence for Csf3r (NM_007782.1,1645-1663).
ctggaattctgttaaagga

SEQ ID NO: 631260 - DNA, 19 bp, Mus musculus
  siRNA target sequence for Csf3r (NM_007782.1,2129-2147).
caaacgcagaggaaagact

SEQ ID NO: 631261 - DNA, 19 bp, Mus musculus
  siRNA target sequence for E230031K19 (NM_172786.1,159-177).
ctgtggtttgcctaaacct

SEQ ID NO: 631262 - DNA, 19 bp, Mus musculus
  siRNA target sequence for E230031K19 (NM_172786.1,164-182).
gtttgcctaaacctacaaa

SEQ ID NO: 631263 - DNA, 19 bp, Mus musculus
  siRNA target sequence for E230031K19 (NM_172786.1,169-187).
cctaaacctacaaatatca

SEQ ID NO: 631264 - DNA, 19 bp, Mus musculus
  siRNA target sequence for E230031K19 (NM_172786.1,239-257).
gtctacacggagttgaagt

SEQ ID NO: 631265 - DNA, 19 bp, Mus musculus
  siRNA target sequence for E230031K19 (NM_172786.1,260-278).
catacactgtgcaatattt

SEQ ID NO: 631266 - DNA, 19 bp, Mus musculus
  siRNA target sequence for E230031K19 (NM_172786.1,311-329).
ctaaatgcgggagtatcaa

SEQ ID NO: 631267 - DNA, 19 bp, Mus musculus
  siRNA target sequence for E230031K19 (NM_172786.1,376-394).
cagttctatgccaaagtga

SEQ ID NO: 631268 - DNA, 19 bp, Mus musculus
  siRNA target sequence for E230031K19 (NM_172786.1,429-447).
cgagacggaacgcttctat

SEQ ID NO: 631269 - DNA, 19 bp, Mus musculus
  siRNA target sequence for E230031K19 (NM_172786.1,550-568).
ccacaagaccacactgttt

SEQ ID NO: 631270 - DNA, 19 bp, Mus musculus
  siRNA target sequence for E230031K19 (NM_172786.1,558-576).
ccacactgtttctatgcaa

SEQ ID NO: 631271 - DNA, 19 bp, Mus musculus
  siRNA target sequence for E230031K19 (NM_172786.1,587-605).
ccaatttgaagtacaatgt

SEQ ID NO: 631272 - DNA, 19 bp, Mus musculus
  siRNA target sequence for E230031K19 (NM_172786.1,684-702).
gcccaacactctgtattgt

SEQ ID NO: 631273 - DNA, 19 bp, Mus musculus
  siRNA target sequence for E230031K19 (NM_172786.1,686-704).
ccaacactctgtattgtgt

SEQ ID NO: 631274 - DNA, 19 bp, Mus musculus
  siRNA target sequence for E230031K19 (NM_172786.1,754-772).
cagaagcagtgcatcagta

SEQ ID NO: 631275 - DNA, 19 bp, Mus musculus
  siRNA target sequence for E230031K19 (NM_172786.1,794-812).
catggaaggctaaagtcat

SEQ ID NO: 631276 - DNA, 19 bp, Mus musculus
  siRNA target sequence for E230031K19 (NM_172786.1,833-851).
catctgttatcgtgtttct

SEQ ID NO: 631277 - DNA, 19 bp, Mus musculus
  siRNA target sequence for E230031K19 (NM_172786.1,859-877).
gcaattggctacttggttt

SEQ ID NO: 631278 - DNA, 19 bp, Mus musculus
  siRNA target sequence for E230031K19 (NM_172786.1,860-878).
caattggctacttggttta

SEQ ID NO: 631279 - DNA, 19 bp, Mus musculus
  siRNA target sequence for E230031K19 (NM_172786.1,911-929).
cagcaaatttggtactgat

SEQ ID NO: 631280 - DNA, 19 bp, Mus musculus
  siRNA target sequence for E230031K19 (NM_172786.1,961-979).
gaacctactgaaacaatca

SEQ ID NO: 631281 - DNA, 19 bp, Mus musculus
  siRNA target sequence for E230031K19 (NM_172786.1,999-1017).
cagtatgttggatgatact

SEQ ID NO: 631282 - DNA, 19 bp, Mus musculus
  siRNA target sequence for E230031K19 (NM_172786.1,1001-1019).
gtatgttggatgatactaa

SEQ ID NO: 631283 - DNA, 19 bp, Mus musculus
  siRNA target sequence for E230031K19 (NM_172786.1,1005-1023).
gttggatgatactaaaatt

SEQ ID NO: 631284 - DNA, 19 bp, Mus musculus
  siRNA target sequence for E230031K19 (NM_172786.1,1119-1137).
ggtggaggggcaacattta

SEQ ID NO: 631285 - DNA, 19 bp, Mus musculus
  siRNA target sequence for E230031K19 (NM_172786.1,1138-1156).
ggatgctcttcgcatttga

SEQ ID NO: 631286 - DNA, 19 bp, Mus musculus
  siRNA target sequence for E230031K19 (NM_172786.1,1139-1157).
gatgctcttcgcatttgat

SEQ ID NO: 631287 - DNA, 19 bp, Mus musculus
  siRNA target sequence for E230031K19 (NM_172786.1,1207-1225).
cagcatgggtggcttaaca

SEQ ID NO: 631288 - DNA, 19 bp, Mus musculus
  siRNA target sequence for E230031K19 (NM_172786.1,1249-1267).
gacactgagcctcaataca

SEQ ID NO: 631289 - DNA, 19 bp, Mus musculus
  siRNA target sequence for E230031K19 (NM_172786.1,1251-1269).
cactgagcctcaatacaaa

SEQ ID NO: 631290 - DNA, 19 bp, Mus musculus
  siRNA target sequence for E230031K19 (NM_172786.1,1467-1485).
ggattgggaccctcaaact

SEQ ID NO: 631291 - DNA, 19 bp, Mus musculus
  siRNA target sequence for E230031K19 (NM_172786.1,1496-1514).
gtatcccttccttacctat

SEQ ID NO: 631292 - DNA, 19 bp, Mus musculus
  siRNA target sequence for E230031K19 (NM_172786.1,1520-1538).
gccgtgatcctgagaacta

SEQ ID NO: 631293 - DNA, 19 bp, Mus musculus
  siRNA target sequence for E230031K19 (NM_172786.1,1521-1539).
ccgtgatcctgagaactat

SEQ ID NO: 631294 - DNA, 19 bp, Mus musculus
  siRNA target sequence for E230031K19 (NM_172786.1,1637-1655).
gtctcacacggtttatgga

SEQ ID NO: 631295 - DNA, 19 bp, Mus musculus
  siRNA target sequence for E230031K19 (NM_172786.1,1661-1679).
gggggttacatgtacaaat

SEQ ID NO: 631296 - DNA, 19 bp, Mus musculus
  siRNA target sequence for E230031K19 (NM_172786.1,1664-1682).
ggttacatgtacaaatgga

SEQ ID NO: 631297 - DNA, 19 bp, Mus musculus
  siRNA target sequence for Epor (NM_010149.2,386-404).
gctccgggatggacttcaa

SEQ ID NO: 631298 - DNA, 19 bp, Mus musculus
  siRNA target sequence for Epor (NM_010149.2,433-451).
gagtcacgaaagtcatgta

SEQ ID NO: 631299 - DNA, 19 bp, Mus musculus
  siRNA target sequence for Epor (NM_010149.2,512-530).
cggacacatcgagttttgt

SEQ ID NO: 631300 - DNA, 19 bp, Mus musculus
  siRNA target sequence for Epor (NM_010149.2,704-722).
cccacatccgatatgaagt

SEQ ID NO: 631301 - DNA, 19 bp, Mus musculus
  siRNA target sequence for Epor (NM_010149.2,919-937).
ctggaccctctcatcttga

SEQ ID NO: 631302 - DNA, 19 bp, Mus musculus
  siRNA target sequence for Epor (NM_010149.2,933-951).
cttgacgctgtctctcatt

SEQ ID NO: 631303 - DNA, 19 bp, Mus musculus
  siRNA target sequence for Epor (NM_010149.2,1187-1205).
cacgctgggcagttactca

SEQ ID NO: 631304 - DNA, 19 bp, Mus musculus
  siRNA target sequence for Epor (NM_010149.2,1275-1293).
cacctacttggtattggat

SEQ ID NO: 631305 - DNA, 19 bp, Mus musculus
  siRNA target sequence for Epor (NM_010149.2,1353-1371).
ggaccctgtgactatggat

SEQ ID NO: 631306 - DNA, 19 bp, Mus musculus
  siRNA target sequence for Epor (NM_010149.2,1530-1548).
cttgaagtacctatacctt

SEQ ID NO: 631307 - DNA, 19 bp, Mus musculus
  siRNA target sequence for Epor (NM_010149.2,1562-1580).
ctggcatctcaacagatta

SEQ ID NO: 631308 - DNA, 19 bp, Mus musculus
  siRNA target sequence for F3 (NM_010171.2,275-293).
gagaaagcgtttaatttaa

SEQ ID NO: 631309 - DNA, 19 bp, Mus musculus
  siRNA target sequence for F3 (NM_010171.2,277-295).
gaaagcgtttaatttaact

SEQ ID NO: 631310 - DNA, 19 bp, Mus musculus
  siRNA target sequence for F3 (NM_010171.2,297-315).
ggatatcaactgatttcaa

SEQ ID NO: 631311 - DNA, 19 bp, Mus musculus
  siRNA target sequence for F3 (NM_010171.2,306-324).
ctgatttcaagacaatttt

SEQ ID NO: 631312 - DNA, 19 bp, Mus musculus
  siRNA target sequence for F3 (NM_010171.2,335-353).
cccaaacccaccaactata

SEQ ID NO: 631313 - DNA, 19 bp, Mus musculus
  siRNA target sequence for F3 (NM_010171.2,517-535).
cggagaccaacttgtgatt

SEQ ID NO: 631314 - DNA, 19 bp, Mus musculus
  siRNA target sequence for F3 (NM_010171.2,519-537).
gagaccaacttgtgattca

SEQ ID NO: 631315 - DNA, 19 bp, Mus musculus
  siRNA target sequence for F3 (NM_010171.2,558-576).
caaacgccccaaagttttt

SEQ ID NO: 631316 - DNA, 19 bp, Mus musculus
  siRNA target sequence for F3 (NM_010171.2,562-580).
cgccccaaagtttttacct

SEQ ID NO: 631317 - DNA, 19 bp, Mus musculus
  siRNA target sequence for F3 (NM_010171.2,563-581).
gccccaaagtttttacctt

SEQ ID NO: 631318 - DNA, 19 bp, Mus musculus
  siRNA target sequence for F3 (NM_010171.2,564-582).
ccccaaagtttttacctta

SEQ ID NO: 631319 - DNA, 19 bp, Mus musculus
  siRNA target sequence for F3 (NM_010171.2,665-683).
cttacattagtcagaaaga

SEQ ID NO: 631320 - DNA, 19 bp, Mus musculus
  siRNA target sequence for F3 (NM_010171.2,724-742).
cttgggttatataattact

SEQ ID NO: 631321 - DNA, 19 bp, Mus musculus
  siRNA target sequence for F3 (NM_010171.2,819-837).
gagtaagctactgcttttt

SEQ ID NO: 631322 - DNA, 19 bp, Mus musculus
  siRNA target sequence for F3 (NM_010171.2,825-843).
gctactgcttttttgtaca

SEQ ID NO: 631323 - DNA, 19 bp, Mus musculus
  siRNA target sequence for F3 (NM_010171.2,1015-1033).
gaaccgagcgggacagaaa

SEQ ID NO: 631324 - DNA, 19 bp, Mus musculus
  siRNA target sequence for Ghr (NM_010284.1,308-326).
ggctacaccagctactctt

SEQ ID NO: 631325 - DNA, 19 bp, Mus musculus
  siRNA target sequence for Ghr (NM_010284.1,360-378).
ccaagcctggggacaagtt

SEQ ID NO: 631326 - DNA, 19 bp, Mus musculus
  siRNA target sequence for Ghr (NM_010284.1,365-383).
cctggggacaagttcttct

SEQ ID NO: 631327 - DNA, 19 bp, Mus musculus
  siRNA target sequence for Ghr (NM_010284.1,412-430).
cccctgaactggagacatt

SEQ ID NO: 631328 - DNA, 19 bp, Mus musculus
  siRNA target sequence for Ghr (NM_010284.1,443-461).
gacagaaggagataatcct

SEQ ID NO: 631329 - DNA, 19 bp, Mus musculus
  siRNA target sequence for Ghr (NM_010284.1,450-468).
ggagataatcctgatttaa

SEQ ID NO: 631330 - DNA, 19 bp, Mus musculus
  siRNA target sequence for Ghr (NM_010284.1,478-496).
gatctattcagctgtacta

SEQ ID NO: 631331 - DNA, 19 bp, Mus musculus
  siRNA target sequence for Ghr (NM_010284.1,486-504).
cagctgtactatgctaaaa

SEQ ID NO: 631332 - DNA, 19 bp, Mus musculus
  siRNA target sequence for Ghr (NM_010284.1,598-616).
gttacttcaactcatcata

SEQ ID NO: 631333 - DNA, 19 bp, Mus musculus
  siRNA target sequence for Ghr (NM_010284.1,633-651).
ccctactgcatcaagctaa

SEQ ID NO: 631334 - DNA, 19 bp, Mus musculus
  siRNA target sequence for Ghr (NM_010284.1,638-656).
ctgcatcaagctaactaca

SEQ ID NO: 631335 - DNA, 19 bp, Mus musculus
  siRNA target sequence for Ghr (NM_010284.1,641-659).
catcaagctaactacaaat

SEQ ID NO: 631336 - DNA, 19 bp, Mus musculus
  siRNA target sequence for Ghr (NM_010284.1,652-670).
ctacaaatggtgatttgct

SEQ ID NO: 631337 - DNA, 19 bp, Mus musculus
  siRNA target sequence for Ghr (NM_010284.1,663-681).
gatttgctggaccaaaaat

SEQ ID NO: 631338 - DNA, 19 bp, Mus musculus
  siRNA target sequence for Ghr (NM_010284.1,682-700).
gtttcactgttgacgaaat

SEQ ID NO: 631339 - DNA, 19 bp, Mus musculus
  siRNA target sequence for Ghr (NM_010284.1,823-841).
ggataattctggagtatga

SEQ ID NO: 631340 - DNA, 19 bp, Mus musculus
  siRNA target sequence for Ghr (NM_010284.1,879-897).
gtgatgggccctatatggt

SEQ ID NO: 631341 - DNA, 19 bp, Mus musculus
  siRNA target sequence for Ghr (NM_010284.1,881-899).
gatgggccctatatggtta

SEQ ID NO: 631342 - DNA, 19 bp, Mus musculus
  siRNA target sequence for Ghr (NM_010284.1,888-906).
cctatatggttaacatact

SEQ ID NO: 631343 - DNA, 19 bp, Mus musculus
  siRNA target sequence for Ghr (NM_010284.1,959-977).
cagacaacggagctttgaa

SEQ ID NO: 631344 - DNA, 19 bp, Mus musculus
  siRNA target sequence for Ghr (NM_010284.1,961-979).
gacaacggagctttgaaaa

SEQ ID NO: 631345 - DNA, 19 bp, Mus musculus
  siRNA target sequence for Ghr (NM_010284.1,963-981).
caacggagctttgaaaagt

SEQ ID NO: 631346 - DNA, 19 bp, Mus musculus
  siRNA target sequence for Ghr (NM_010284.1,994-1012).
gcgaagtcctccgtgtaat

SEQ ID NO: 631347 - DNA, 19 bp, Mus musculus
  siRNA target sequence for Ghr (NM_010284.1,995-1013).
cgaagtcctccgtgtaata

SEQ ID NO: 631348 - DNA, 19 bp, Mus musculus
  siRNA target sequence for Ghr (NM_010284.1,996-1014).
gaagtcctccgtgtaatat

SEQ ID NO: 631349 - DNA, 19 bp, Mus musculus
  siRNA target sequence for Ghr (NM_010284.1,1018-1036).
ctcagacgaacatattgga

SEQ ID NO: 631350 - DNA, 19 bp, Mus musculus
  siRNA target sequence for Ghr (NM_010284.1,1039-1057).
catgtgaagaagatatcca

SEQ ID NO: 631351 - DNA, 19 bp, Mus musculus
  siRNA target sequence for Ghr (NM_010284.1,1047-1065).
gaagatatccagtttccat

SEQ ID NO: 631352 - DNA, 19 bp, Mus musculus
  siRNA target sequence for Ghr (NM_010284.1,1056-1074).
cagtttccatggttcttaa

SEQ ID NO: 631353 - DNA, 19 bp, Mus musculus
  siRNA target sequence for Ghr (NM_010284.1,1095-1113).
ggagtagcagtgatgctat

SEQ ID NO: 631354 - DNA, 19 bp, Mus musculus
  siRNA target sequence for Ghr (NM_010284.1,1096-1114).
gagtagcagtgatgctatt

SEQ ID NO: 631355 - DNA, 19 bp, Mus musculus
  siRNA target sequence for Ghr (NM_010284.1,1104-1122).
gtgatgctatttgtagtta

SEQ ID NO: 631356 - DNA, 19 bp, Mus musculus
  siRNA target sequence for Ghr (NM_010284.1,1106-1124).
gatgctatttgtagttata

SEQ ID NO: 631357 - DNA, 19 bp, Mus musculus
  siRNA target sequence for Ghr (NM_010284.1,1141-1159).
ggattaagatgctgatttt

SEQ ID NO: 631358 - DNA, 19 bp, Mus musculus
  siRNA target sequence for Ghr (NM_010284.1,1189-1207).
ggattgatccagatcttct

SEQ ID NO: 631359 - DNA, 19 bp, Mus musculus
  siRNA target sequence for Ghr (NM_010284.1,1226-1244).
ggaggtgaacaccatctta

SEQ ID NO: 631360 - DNA, 19 bp, Mus musculus
  siRNA target sequence for Ghr (NM_010284.1,1246-1264).
gcattcatgataactacaa

SEQ ID NO: 631361 - DNA, 19 bp, Mus musculus
  siRNA target sequence for Ghr (NM_010284.1,1262-1280).
caaacccgacttctacaat

SEQ ID NO: 631362 - DNA, 19 bp, Mus musculus
  siRNA target sequence for Ghr (NM_010284.1,1268-1286).
cgacttctacaatgatgat

SEQ ID NO: 631363 - DNA, 19 bp, Mus musculus
  siRNA target sequence for Ghr (NM_010284.1,1288-1306).
cctgggtcgagttcattga

SEQ ID NO: 631364 - DNA, 19 bp, Mus musculus
  siRNA target sequence for Ghr (NM_010284.1,1298-1316).
gttcattgagctagatatt

SEQ ID NO: 631365 - DNA, 19 bp, Mus musculus
  siRNA target sequence for Ghr (NM_010284.1,1363-1381).
gacttctaagcaatgatca

SEQ ID NO: 631366 - DNA, 19 bp, Mus musculus
  siRNA target sequence for Ghr (NM_010284.1,1438-1456).
gttacgaccctgacatttt

SEQ ID NO: 631367 - DNA, 19 bp, Mus musculus
  siRNA target sequence for Ghr (NM_010284.1,1442-1460).
cgaccctgacattttggat

SEQ ID NO: 631368 - DNA, 19 bp, Mus musculus
  siRNA target sequence for Ghr (NM_010284.1,1443-1461).
gaccctgacattttggata

SEQ ID NO: 631369 - DNA, 19 bp, Mus musculus
  siRNA target sequence for Ghr (NM_010284.1,1449-1467).
gacattttggatactgatt

SEQ ID NO: 631370 - DNA, 19 bp, Mus musculus
  siRNA target sequence for Ghr (NM_010284.1,1544-1562).
gtgccttgatcagaagaat

SEQ ID NO: 631371 - DNA, 19 bp, Mus musculus
  siRNA target sequence for Ghr (NM_010284.1,1548-1566).
cttgatcagaagaatctga

SEQ ID NO: 631372 - DNA, 19 bp, Mus musculus
  siRNA target sequence for Ghr (NM_010284.1,1610-1628).
cattacccagacagtagaa

SEQ ID NO: 631373 - DNA, 19 bp, Mus musculus
  siRNA target sequence for Ghr (NM_010284.1,1684-1702).
cctctacaccgatgagtaa

SEQ ID NO: 631374 - DNA, 19 bp, Mus musculus
  siRNA target sequence for Ghr (NM_010284.1,1685-1703).
ctctacaccgatgagtaat

SEQ ID NO: 631375 - DNA, 19 bp, Mus musculus
  siRNA target sequence for Ghr (NM_010284.1,1705-1723).
ccacatcactggcaaacat

SEQ ID NO: 631376 - DNA, 19 bp, Mus musculus
  siRNA target sequence for Ghr (NM_010284.1,1725-1743).
gacttttatgcccaagtaa

SEQ ID NO: 631377 - DNA, 19 bp, Mus musculus
  siRNA target sequence for Ghr (NM_010284.1,1734-1752).
gcccaagtaagcgacatta

SEQ ID NO: 631378 - DNA, 19 bp, Mus musculus
  siRNA target sequence for Ghr (NM_010284.1,1736-1754).
ccaagtaagcgacattaca

SEQ ID NO: 631379 - DNA, 19 bp, Mus musculus
  siRNA target sequence for Ghr (NM_010284.1,1773-1791).
ctttccccaggccaaaaga

SEQ ID NO: 631380 - DNA, 19 bp, Mus musculus
  siRNA target sequence for Ghr (NM_010284.1,1835-1853).
cacgccctgccaagaaaat

SEQ ID NO: 631381 - DNA, 19 bp, Mus musculus
  siRNA target sequence for Ghr (NM_010284.1,1837-1855).
cgccctgccaagaaaatta

SEQ ID NO: 631382 - DNA, 19 bp, Mus musculus
  siRNA target sequence for Ghr (NM_010284.1,1848-1866).
gaaaattacagcatgaaca

SEQ ID NO: 631383 - DNA, 19 bp, Mus musculus
  siRNA target sequence for Ghr (NM_010284.1,1862-1880).
gaacagtgcctacttttgt

SEQ ID NO: 631384 - DNA, 19 bp, Mus musculus
  siRNA target sequence for Ghr (NM_010284.1,1923-1941).
gaagccacgtcttgtataa

SEQ ID NO: 631385 - DNA, 19 bp, Mus musculus
  siRNA target sequence for Ghr (NM_010284.1,1928-1946).
cacgtcttgtataaaacca

SEQ ID NO: 631386 - DNA, 19 bp, Mus musculus
  siRNA target sequence for Ghr (NM_010284.1,1936-1954).
gtataaaaccaagctttaa

SEQ ID NO: 631387 - DNA, 19 bp, Mus musculus
  siRNA target sequence for Ghr (NM_010284.1,2078-2096).
gtctccaaggggccttata

SEQ ID NO: 631388 - DNA, 19 bp, Mus musculus
  siRNA target sequence for Ghr (NM_010284.1,2080-2098).
ctccaaggggccttatact

SEQ ID NO: 631389 - DNA, 19 bp, Mus musculus
  siRNA target sequence for Ghr (NM_010284.1,2083-2101).
caaggggccttatactcaa

SEQ ID NO: 631390 - DNA, 19 bp, Mus musculus
  siRNA target sequence for Ghr (NM_010284.1,2115-2133).
cctttgcctgacaaaaaga

SEQ ID NO: 631391 - DNA, 19 bp, Mus musculus
  siRNA target sequence for Ghr (NM_010284.1,2140-2158).
cctcctcgtgtggttatgt

SEQ ID NO: 631392 - DNA, 19 bp, Mus musculus
  siRNA target sequence for Ghr (NM_010284.1,2166-2184).
gaccaactgaacaaaatca

SEQ ID NO: 631393 - DNA, 19 bp, Mus musculus
  siRNA target sequence for Ifnar1 (NM_010508.1,179-197).
ctgaaacctcctgagaata

SEQ ID NO: 631394 - DNA, 19 bp, Mus musculus
  siRNA target sequence for Ifnar1 (NM_010508.1,181-199).
gaaacctcctgagaatata

SEQ ID NO: 631395 - DNA, 19 bp, Mus musculus
  siRNA target sequence for Ifnar1 (NM_010508.1,193-211).
gaatatagacgtctacatt

SEQ ID NO: 631396 - DNA, 19 bp, Mus musculus
  siRNA target sequence for Ifnar1 (NM_010508.1,268-286).
gaccttttcagcagaatat

SEQ ID NO: 631397 - DNA, 19 bp, Mus musculus
  siRNA target sequence for Ifnar1 (NM_010508.1,271-289).
cttttcagcagaatatcga

SEQ ID NO: 631398 - DNA, 19 bp, Mus musculus
  siRNA target sequence for Ifnar1 (NM_010508.1,296-314).
gacgaggcgaagtggttaa

SEQ ID NO: 631399 - DNA, 19 bp, Mus musculus
  siRNA target sequence for Ifnar1 (NM_010508.1,298-316).
cgaggcgaagtggttaaaa

SEQ ID NO: 631400 - DNA, 19 bp, Mus musculus
  siRNA target sequence for Ifnar1 (NM_010508.1,320-338).
cctgaatgtcaacatacta

SEQ ID NO: 631401 - DNA, 19 bp, Mus musculus
  siRNA target sequence for Ifnar1 (NM_010508.1,323-341).
gaatgtcaacatactacaa

SEQ ID NO: 631402 - DNA, 19 bp, Mus musculus
  siRNA target sequence for Ifnar1 (NM_010508.1,346-364).
caagtgtgaattctcttta

SEQ ID NO: 631403 - DNA, 19 bp, Mus musculus
  siRNA target sequence for Ifnar1 (NM_010508.1,413-431).
gaagggaacagcacatctt

SEQ ID NO: 631404 - DNA, 19 bp, Mus musculus
  siRNA target sequence for Ifnar1 (NM_010508.1,442-460).
ggttgatccgtttattcca

SEQ ID NO: 631405 - DNA, 19 bp, Mus musculus
  siRNA target sequence for Ifnar1 (NM_010508.1,443-461).
gttgatccgtttattccat

SEQ ID NO: 631406 - DNA, 19 bp, Mus musculus
  siRNA target sequence for Ifnar1 (NM_010508.1,483-501).
ccccagaagtacgtttaga

SEQ ID NO: 631407 - DNA, 19 bp, Mus musculus
  siRNA target sequence for Ifnar1 (NM_010508.1,484-502).
cccagaagtacgtttagaa

SEQ ID NO: 631408 - DNA, 19 bp, Mus musculus
  siRNA target sequence for Ifnar1 (NM_010508.1,495-513).
gtttagaagctgaagataa

SEQ ID NO: 631409 - DNA, 19 bp, Mus musculus
  siRNA target sequence for Ifnar1 (NM_010508.1,596-614).
cgaatctggcagaagtctt

SEQ ID NO: 631410 - DNA, 19 bp, Mus musculus
  siRNA target sequence for Ifnar1 (NM_010508.1,615-633).
ccagtgacaaaaaaactat

SEQ ID NO: 631411 - DNA, 19 bp, Mus musculus
  siRNA target sequence for Ifnar1 (NM_010508.1,637-655).
ctctacgtattatgtagaa

SEQ ID NO: 631412 - DNA, 19 bp, Mus musculus
  siRNA target sequence for Ifnar1 (NM_010508.1,639-657).
ctacgtattatgtagaaaa

SEQ ID NO: 631413 - DNA, 19 bp, Mus musculus
  siRNA target sequence for Ifnar1 (NM_010508.1,642-660).
cgtattatgtagaaaagat

SEQ ID NO: 631414 - DNA, 19 bp, Mus musculus
  siRNA target sequence for Ifnar1 (NM_010508.1,668-686).
ctcttgccagagactactt

SEQ ID NO: 631415 - DNA, 19 bp, Mus musculus
  siRNA target sequence for Ifnar1 (NM_010508.1,674-692).
ccagagactacttactgtt

SEQ ID NO: 631416 - DNA, 19 bp, Mus musculus
  siRNA target sequence for Ifnar1 (NM_010508.1,675-693).
cagagactacttactgttt

SEQ ID NO: 631417 - DNA, 19 bp, Mus musculus
  siRNA target sequence for Ifnar1 (NM_010508.1,681-699).
ctacttactgtttagaagt

SEQ ID NO: 631418 - DNA, 19 bp, Mus musculus
  siRNA target sequence for Ifnar1 (NM_010508.1,705-723).
caatacatccgtcacttaa

SEQ ID NO: 631419 - DNA, 19 bp, Mus musculus
  siRNA target sequence for Ifnar1 (NM_010508.1,719-737).
cttaagaaacacagcaatt

SEQ ID NO: 631420 - DNA, 19 bp, Mus musculus
  siRNA target sequence for Ifnar1 (NM_010508.1,760-778).
caccacagtggcaaataaa

SEQ ID NO: 631421 - DNA, 19 bp, Mus musculus
  siRNA target sequence for Ifnar1 (NM_010508.1,829-847).
cctgaaatgggactacatt

SEQ ID NO: 631422 - DNA, 19 bp, Mus musculus
  siRNA target sequence for Ifnar1 (NM_010508.1,958-976).
gactacgcactgtgtcttt

SEQ ID NO: 631423 - DNA, 19 bp, Mus musculus
  siRNA target sequence for Ifnar1 (NM_010508.1,963-981).
cgcactgtgtcttttctca

SEQ ID NO: 631424 - DNA, 19 bp, Mus musculus
  siRNA target sequence for Ifnar1 (NM_010508.1,964-982).
gcactgtgtcttttctcaa

SEQ ID NO: 631425 - DNA, 19 bp, Mus musculus
  siRNA target sequence for Ifnar1 (NM_010508.1,1003-1021).
gttctttctccatgtacaa

SEQ ID NO: 631426 - DNA, 19 bp, Mus musculus
  siRNA target sequence for Ifnar1 (NM_010508.1,1095-1113).
ctcctccggtcattactgt

SEQ ID NO: 631427 - DNA, 19 bp, Mus musculus
  siRNA target sequence for Ifnar1 (NM_010508.1,1131-1149).
ccttgcttgtttatgtcaa

SEQ ID NO: 631428 - DNA, 19 bp, Mus musculus
  siRNA target sequence for Ifnar1 (NM_010508.1,1164-1182).
catgtgatggactcaatta

SEQ ID NO: 631429 - DNA, 19 bp, Mus musculus
  siRNA target sequence for Ifnar1 (NM_010508.1,1167-1185).
gtgatggactcaattacga

SEQ ID NO: 631430 - DNA, 19 bp, Mus musculus
  siRNA target sequence for Ifnar1 (NM_010508.1,1169-1187).
gatggactcaattacgaaa

SEQ ID NO: 631431 - DNA, 19 bp, Mus musculus
  siRNA target sequence for Ifnar1 (NM_010508.1,1172-1190).
ggactcaattacgaaatca

SEQ ID NO: 631432 - DNA, 19 bp, Mus musculus
  siRNA target sequence for Ifnar1 (NM_010508.1,1173-1191).
gactcaattacgaaatcat

SEQ ID NO: 631433 - DNA, 19 bp, Mus musculus
  siRNA target sequence for Ifnar1 (NM_010508.1,1177-1195).
caattacgaaatcatcttt

SEQ ID NO: 631434 - DNA, 19 bp, Mus musculus
  siRNA target sequence for Ifnar1 (NM_010508.1,1198-1216).
ggaaaacacttccaatact

SEQ ID NO: 631435 - DNA, 19 bp, Mus musculus
  siRNA target sequence for Ifnar1 (NM_010508.1,1199-1217).
gaaaacacttccaatacta

SEQ ID NO: 631436 - DNA, 19 bp, Mus musculus
  siRNA target sequence for Ifnar1 (NM_010508.1,1329-1347).
gcaacttcagtgaaaagct

SEQ ID NO: 631437 - DNA, 19 bp, Mus musculus
  siRNA target sequence for Ifnar1 (NM_010508.1,1361-1379).
cgtccaggaagtttttcca

SEQ ID NO: 631438 - DNA, 19 bp, Mus musculus
  siRNA target sequence for Ifnar1 (NM_010508.1,1378-1396).
cacgatctggattataact

SEQ ID NO: 631439 - DNA, 19 bp, Mus musculus
  siRNA target sequence for Ifnar1 (NM_010508.1,1417-1435).
ctctgtcatggtcctttat

SEQ ID NO: 631440 - DNA, 19 bp, Mus musculus
  siRNA target sequence for Ifnar1 (NM_010508.1,1443-1461).
ggagcgtctggaaatacct

SEQ ID NO: 631441 - DNA, 19 bp, Mus musculus
  siRNA target sequence for Ifnar1 (NM_010508.1,1486-1504).
caagcctccccgcagtatt

SEQ ID NO: 631442 - DNA, 19 bp, Mus musculus
  siRNA target sequence for Ifnar1 (NM_010508.1,1489-1507).
gcctccccgcagtattgat

SEQ ID NO: 631443 - DNA, 19 bp, Mus musculus
  siRNA target sequence for Ifnar1 (NM_010508.1,1491-1509).
ctccccgcagtattgatga

SEQ ID NO: 631444 - DNA, 19 bp, Mus musculus
  siRNA target sequence for Ifnar1 (NM_010508.1,1494-1512).
cccgcagtattgatgagtt

SEQ ID NO: 631445 - DNA, 19 bp, Mus musculus
  siRNA target sequence for Ifnar1 (NM_010508.1,1497-1515).
gcagtattgatgagttttt

SEQ ID NO: 631446 - DNA, 19 bp, Mus musculus
  siRNA target sequence for Ifnar1 (NM_010508.1,1516-1534).
ctctgagccgccttcaaaa

SEQ ID NO: 631447 - DNA, 19 bp, Mus musculus
  siRNA target sequence for Ifnar1 (NM_010508.1,1518-1536).
ctgagccgccttcaaaaaa

SEQ ID NO: 631448 - DNA, 19 bp, Mus musculus
  siRNA target sequence for Ifnar1 (NM_010508.1,1530-1548).
caaaaaaccttgtacttct

SEQ ID NO: 631449 - DNA, 19 bp, Mus musculus
  siRNA target sequence for Ifnar1 (NM_010508.1,1567-1585).
ggaaagatgcttcatcatt

SEQ ID NO: 631450 - DNA, 19 bp, Mus musculus
  siRNA target sequence for Ifnar1 (NM_010508.1,1576-1594).
cttcatcattgagaataca

SEQ ID NO: 631451 - DNA, 19 bp, Mus musculus
  siRNA target sequence for Ifnar1 (NM_010508.1,1597-1615).
cacggtcgctgtagaagta

SEQ ID NO: 631452 - DNA, 19 bp, Mus musculus
  siRNA target sequence for Ifnar1 (NM_010508.1,1664-1682).
caggactcgggcaactatt

SEQ ID NO: 631453 - DNA, 19 bp, Mus musculus
  siRNA target sequence for Ifnar1 (NM_010508.1,1667-1685).
gactcgggcaactattcca

SEQ ID NO: 631454 - DNA, 19 bp, Mus musculus
  siRNA target sequence for Ifngr2 (NM_008338.2,173-191).
caaggcttcacctgtacaa

SEQ ID NO: 631455 - DNA, 19 bp, Mus musculus
  siRNA target sequence for Ifngr2 (NM_008338.2,327-345).
gacaaagtgtgacttaaca

SEQ ID NO: 631456 - DNA, 19 bp, Mus musculus
  siRNA target sequence for Ifngr2 (NM_008338.2,435-453).
ggggctggagccatttcaa

SEQ ID NO: 631457 - DNA, 19 bp, Mus musculus
  siRNA target sequence for Ifngr2 (NM_008338.2,441-459).
ggagccatttcaacactat

SEQ ID NO: 631458 - DNA, 19 bp, Mus musculus
  siRNA target sequence for Ifngr2 (NM_008338.2,451-469).
caacactatgagaatgtta

SEQ ID NO: 631459 - DNA, 19 bp, Mus musculus
  siRNA target sequence for Ifngr2 (NM_008338.2,470-488).
ctgttggacctccgaaaaa

SEQ ID NO: 631460 - DNA, 19 bp, Mus musculus
  siRNA target sequence for Ifngr2 (NM_008338.2,472-490).
gttggacctccgaaaaaca

SEQ ID NO: 631461 - DNA, 19 bp, Mus musculus
  siRNA target sequence for Ifngr2 (NM_008338.2,496-514).
gtgaccccaggaaaaggtt

SEQ ID NO: 631462 - DNA, 19 bp, Mus musculus
  siRNA target sequence for Ifngr2 (NM_008338.2,511-529).
ggttccctcgtcatacact

SEQ ID NO: 631463 - DNA, 19 bp, Mus musculus
  siRNA target sequence for Ifngr2 (NM_008338.2,512-530).
gttccctcgtcatacactt

SEQ ID NO: 631464 - DNA, 19 bp, Mus musculus
  siRNA target sequence for Ifngr2 (NM_008338.2,553-571).
cacggggcaacttttcagt

SEQ ID NO: 631465 - DNA, 19 bp, Mus musculus
  siRNA target sequence for Ifngr2 (NM_008338.2,555-573).
cggggcaacttttcagtat

SEQ ID NO: 631466 - DNA, 19 bp, Mus musculus
  siRNA target sequence for Ifngr2 (NM_008338.2,577-595).
gtccactactgggaaaagt

SEQ ID NO: 631467 - DNA, 19 bp, Mus musculus
  siRNA target sequence for Ifngr2 (NM_008338.2,579-597).
ccactactgggaaaagtca

SEQ ID NO: 631468 - DNA, 19 bp, Mus musculus
  siRNA target sequence for Ifngr2 (NM_008338.2,693-711).
ggcacaactgattttgaaa

SEQ ID NO: 631469 - DNA, 19 bp, Mus musculus
  siRNA target sequence for Ifngr2 (NM_008338.2,874-892).
caaagccgagtgaagtact

SEQ ID NO: 631470 - DNA, 19 bp, Mus musculus
  siRNA target sequence for Ifngr2 (NM_008338.2,907-925).
ccaaacatcccggaacaaa

SEQ ID NO: 631471 - DNA, 19 bp, Mus musculus
  siRNA target sequence for Ifngr2 (NM_008338.2,908-926).
caaacatcccggaacaaat

SEQ ID NO: 631472 - DNA, 19 bp, Mus musculus
  siRNA target sequence for Ifngr2 (NM_008338.2,912-930).
catcccggaacaaatcgaa

SEQ ID NO: 631473 - DNA, 19 bp, Mus musculus
  siRNA target sequence for Ifngr2 (NM_008338.2,917-935).
cggaacaaatcgaagagta

SEQ ID NO: 631474 - DNA, 19 bp, Mus musculus
  siRNA target sequence for Ifngr2 (NM_008338.2,918-936).
ggaacaaatcgaagagtat

SEQ ID NO: 631475 - DNA, 19 bp, Mus musculus
  siRNA target sequence for Ifngr2 (NM_008338.2,943-961).
gacccagaccaattcatct

SEQ ID NO: 631476 - DNA, 19 bp, Mus musculus
  siRNA target sequence for Ifngr2 (NM_008338.2,945-963).
cccagaccaattcatctta

SEQ ID NO: 631477 - DNA, 19 bp, Mus musculus
  siRNA target sequence for Ifngr2 (NM_008338.2,1001-1019).
cctgggactccgtgtcaat

SEQ ID NO: 631478 - DNA, 19 bp, Mus musculus
  siRNA target sequence for Ifngr2 (NM_008338.2,1002-1020).
ctgggactccgtgtcaatt

SEQ ID NO: 631479 - DNA, 19 bp, Mus musculus
  siRNA target sequence for Ifngr2 (NM_008338.2,1004-1022).
gggactccgtgtcaattat

SEQ ID NO: 631480 - DNA, 19 bp, Mus musculus
  siRNA target sequence for Ifngr2 (NM_008338.2,1005-1023).
ggactccgtgtcaattatt

SEQ ID NO: 631481 - DNA, 19 bp, Mus musculus
  siRNA target sequence for Ifngr2 (NM_008338.2,1008-1026).
ctccgtgtcaattatttct

SEQ ID NO: 631482 - DNA, 19 bp, Mus musculus
  siRNA target sequence for Ifngr2 (NM_008338.2,1011-1029).
cgtgtcaattatttcttct

SEQ ID NO: 631483 - DNA, 19 bp, Mus musculus
  siRNA target sequence for Il10ra (NM_008348.1,126-144).
gcctagaattcattgcata

SEQ ID NO: 631484 - DNA, 19 bp, Mus musculus
  siRNA target sequence for Il10ra (NM_008348.1,177-195).
ggtttgaagccagattttt

SEQ ID NO: 631485 - DNA, 19 bp, Mus musculus
  siRNA target sequence for Il10ra (NM_008348.1,262-280).
caaacagtacggaaactca

SEQ ID NO: 631486 - DNA, 19 bp, Mus musculus
  siRNA target sequence for Il10ra (NM_008348.1,282-300).
cctggaatgacatccatat

SEQ ID NO: 631487 - DNA, 19 bp, Mus musculus
  siRNA target sequence for Il10ra (NM_008348.1,290-308).
gacatccatatctgtagaa

SEQ ID NO: 631488 - DNA, 19 bp, Mus musculus
  siRNA target sequence for Il10ra (NM_008348.1,502-520).
catctatgggacaatccat

SEQ ID NO: 631489 - DNA, 19 bp, Mus musculus
  siRNA target sequence for Il10ra (NM_008348.1,549-567).
gggatgagtacgaacaagt

SEQ ID NO: 631490 - DNA, 19 bp, Mus musculus
  siRNA target sequence for Il10ra (NM_008348.1,575-593).
gatctccgagtttacaaga

SEQ ID NO: 631491 - DNA, 19 bp, Mus musculus
  siRNA target sequence for Il10ra (NM_008348.1,578-596).
ctccgagtttacaagattt

SEQ ID NO: 631492 - DNA, 19 bp, Mus musculus
  siRNA target sequence for Il10ra (NM_008348.1,581-599).
cgagtttacaagatttcca

SEQ ID NO: 631493 - DNA, 19 bp, Mus musculus
  siRNA target sequence for Il10ra (NM_008348.1,582-600).
gagtttacaagatttccat

SEQ ID NO: 631494 - DNA, 19 bp, Mus musculus
  siRNA target sequence for Il10ra (NM_008348.1,602-620).
cggaagttctcagaactaa

SEQ ID NO: 631495 - DNA, 19 bp, Mus musculus
  siRNA target sequence for Il10ra (NM_008348.1,668-686).
cccataggggtgagaaagt

SEQ ID NO: 631496 - DNA, 19 bp, Mus musculus
  siRNA target sequence for Il10ra (NM_008348.1,669-687).
ccataggggtgagaaagtt

SEQ ID NO: 631497 - DNA, 19 bp, Mus musculus
  siRNA target sequence for Il10ra (NM_008348.1,738-756).
ggtcggaggagcagtgttt

SEQ ID NO: 631498 - DNA, 19 bp, Mus musculus
  siRNA target sequence for Il10ra (NM_008348.1,746-764).
gagcagtgtttacttatca

SEQ ID NO: 631499 - DNA, 19 bp, Mus musculus
  siRNA target sequence for Il10ra (NM_008348.1,787-805).
gaccaacctgagcatctta

SEQ ID NO: 631500 - DNA, 19 bp, Mus musculus
  siRNA target sequence for Il10ra (NM_008348.1,793-811).
cctgagcatcttagtcata

SEQ ID NO: 631501 - DNA, 19 bp, Mus musculus
  siRNA target sequence for Il10ra (NM_008348.1,794-812).
ctgagcatcttagtcatat

SEQ ID NO: 631502 - DNA, 19 bp, Mus musculus
  siRNA target sequence for Il10ra (NM_008348.1,1042-1060).
ctttggcagtggtaaacca

SEQ ID NO: 631503 - DNA, 19 bp, Mus musculus
  siRNA target sequence for Il10ra (NM_008348.1,1048-1066).
cagtggtaaaccatcactt

SEQ ID NO: 631504 - DNA, 19 bp, Mus musculus
  siRNA target sequence for Il10ra (NM_008348.1,1542-1560).
ctctggccgcaggttattt

SEQ ID NO: 631505 - DNA, 19 bp, Mus musculus
  siRNA target sequence for Il10ra (NM_008348.1,1544-1562).
ctggccgcaggttatttga

SEQ ID NO: 631506 - DNA, 19 bp, Mus musculus
  siRNA target sequence for Il10ra (NM_008348.1,1546-1564).
ggccgcaggttatttgaaa

SEQ ID NO: 631507 - DNA, 19 bp, Mus musculus
  siRNA target sequence for Il10ra (NM_008348.1,1548-1566).
ccgcaggttatttgaaaca

SEQ ID NO: 631508 - DNA, 19 bp, Mus musculus
  siRNA target sequence for Il10ra (NM_008348.1,1654-1672).
ggttagctgtgaagatcta

SEQ ID NO: 631509 - DNA, 19 bp, Mus musculus
  siRNA target sequence for Il10ra (NM_008348.1,1659-1677).
gctgtgaagatctaagcat

SEQ ID NO: 631510 - DNA, 19 bp, Mus musculus
  siRNA target sequence for Il10ra (NM_008348.1,1667-1685).
gatctaagcatagaaagtt

SEQ ID NO: 631511 - DNA, 19 bp, Mus musculus
  siRNA target sequence for Il10ra (NM_008348.1,1686-1704).
ggaggtttgcccataaact

SEQ ID NO: 631512 - DNA, 19 bp, Mus musculus
  siRNA target sequence for Il10ra (NM_008348.1,1687-1705).
gaggtttgcccataaactt

SEQ ID NO: 631513 - DNA, 19 bp, Mus musculus
  siRNA target sequence for Il10ra (NM_008348.1,1689-1707).
ggtttgcccataaacttga

SEQ ID NO: 631514 - DNA, 19 bp, Mus musculus
  siRNA target sequence for Il10ra (NM_008348.1,1766-1784).
gtcaccctgccgttgatct

SEQ ID NO: 631515 - DNA, 19 bp, Mus musculus
  siRNA target sequence for Il12rb2 (NM_008354.1,142-160).
gcacagactgttagagaat

SEQ ID NO: 631516 - DNA, 19 bp, Mus musculus
  siRNA target sequence for Il12rb2 (NM_008354.1,162-180).
ctcattggcacttcttttt

SEQ ID NO: 631517 - DNA, 19 bp, Mus musculus
  siRNA target sequence for Il12rb2 (NM_008354.1,268-286).
gggtcagctgccaatattt

SEQ ID NO: 631518 - DNA, 19 bp, Mus musculus
  siRNA target sequence for Il12rb2 (NM_008354.1,317-335).
cacattatcccagttctaa

SEQ ID NO: 631519 - DNA, 19 bp, Mus musculus
  siRNA target sequence for Il12rb2 (NM_008354.1,325-343).
cccagttctaacgaattaa

SEQ ID NO: 631520 - DNA, 19 bp, Mus musculus
  siRNA target sequence for Il12rb2 (NM_008354.1,326-344).
ccagttctaacgaattaat

SEQ ID NO: 631521 - DNA, 19 bp, Mus musculus
  siRNA target sequence for Il12rb2 (NM_008354.1,329-347).
gttctaacgaattaatcct

SEQ ID NO: 631522 - DNA, 19 bp, Mus musculus
  siRNA target sequence for Il12rb2 (NM_008354.1,337-355).
gaattaatcctcttaaagt

SEQ ID NO: 631523 - DNA, 19 bp, Mus musculus
  siRNA target sequence for Il12rb2 (NM_008354.1,437-455).
ccaacctgtcccttggtat

SEQ ID NO: 631524 - DNA, 19 bp, Mus musculus
  siRNA target sequence for Il12rb2 (NM_008354.1,451-469).
ggtatgaccttgtttgtct

SEQ ID NO: 631525 - DNA, 19 bp, Mus musculus
  siRNA target sequence for Il12rb2 (NM_008354.1,482-500).
gtagcaactctcaaaagaa

SEQ ID NO: 631526 - DNA, 19 bp, Mus musculus
  siRNA target sequence for Il12rb2 (NM_008354.1,501-519).
gccaccagtcccagtatgt

SEQ ID NO: 631527 - DNA, 19 bp, Mus musculus
  siRNA target sequence for Il12rb2 (NM_008354.1,550-568).
gagccacctcaaaacatat

SEQ ID NO: 631528 - DNA, 19 bp, Mus musculus
  siRNA target sequence for Il12rb2 (NM_008354.1,552-570).
gccacctcaaaacatatca

SEQ ID NO: 631529 - DNA, 19 bp, Mus musculus
  siRNA target sequence for Il12rb2 (NM_008354.1,609-627).
ctggaactctggaaaagtt

SEQ ID NO: 631530 - DNA, 19 bp, Mus musculus
  siRNA target sequence for Il12rb2 (NM_008354.1,629-647).
cttatctgaaaaccaatta

SEQ ID NO: 631531 - DNA, 19 bp, Mus musculus
  siRNA target sequence for Il12rb2 (NM_008354.1,636-654).
gaaaaccaattacacttta

SEQ ID NO: 631532 - DNA, 19 bp, Mus musculus
  siRNA target sequence for Il12rb2 (NM_008354.1,642-660).
caattacactttacagtta

SEQ ID NO: 631533 - DNA, 19 bp, Mus musculus
  siRNA target sequence for Il12rb2 (NM_008354.1,657-675).
gttaagtggaccaaacaat

SEQ ID NO: 631534 - DNA, 19 bp, Mus musculus
  siRNA target sequence for Il12rb2 (NM_008354.1,672-690).
caatctgacctgtcagaaa

SEQ ID NO: 631535 - DNA, 19 bp, Mus musculus
  siRNA target sequence for Il12rb2 (NM_008354.1,676-694).
ctgacctgtcagaaacaat

SEQ ID NO: 631536 - DNA, 19 bp, Mus musculus
  siRNA target sequence for Il12rb2 (NM_008354.1,729-747).
ggatcttgggatcaatcta

SEQ ID NO: 631537 - DNA, 19 bp, Mus musculus
  siRNA target sequence for Il12rb2 (NM_008354.1,730-748).
gatcttgggatcaatctaa

SEQ ID NO: 631538 - DNA, 19 bp, Mus musculus
  siRNA target sequence for Il12rb2 (NM_008354.1,771-789).
gttcatagtccgtgttact

SEQ ID NO: 631539 - DNA, 19 bp, Mus musculus
  siRNA target sequence for Il12rb2 (NM_008354.1,791-809).
ccatcaacgatcttggaaa

SEQ ID NO: 631540 - DNA, 19 bp, Mus musculus
  siRNA target sequence for Il12rb2 (NM_008354.1,795-813).
caacgatcttggaaattct

SEQ ID NO: 631541 - DNA, 19 bp, Mus musculus
  siRNA target sequence for Il12rb2 (NM_008354.1,815-833).
cttcacttccgcatacgtt

SEQ ID NO: 631542 - DNA, 19 bp, Mus musculus
  siRNA target sequence for Il12rb2 (NM_008354.1,836-854).
cgttcttggacatagtgat

SEQ ID NO: 631543 - DNA, 19 bp, Mus musculus
  siRNA target sequence for Il12rb2 (NM_008354.1,869-887).
gggacatcagaatcaactt

SEQ ID NO: 631544 - DNA, 19 bp, Mus musculus
  siRNA target sequence for Il12rb2 (NM_008354.1,870-888).
ggacatcagaatcaacttt

SEQ ID NO: 631545 - DNA, 19 bp, Mus musculus
  siRNA target sequence for Il12rb2 (NM_008354.1,873-891).
catcagaatcaactttcta

SEQ ID NO: 631546 - DNA, 19 bp, Mus musculus
  siRNA target sequence for Il12rb2 (NM_008354.1,876-894).
cagaatcaactttctaaat

SEQ ID NO: 631547 - DNA, 19 bp, Mus musculus
  siRNA target sequence for Il12rb2 (NM_008354.1,933-951).
ggggcaagtggtactcaat

SEQ ID NO: 631548 - DNA, 19 bp, Mus musculus
  siRNA target sequence for Il12rb2 (NM_008354.1,935-953).
ggcaagtggtactcaatca

SEQ ID NO: 631549 - DNA, 19 bp, Mus musculus
  siRNA target sequence for Il12rb2 (NM_008354.1,1036-1054).
ctgagaccgtttacagaat

SEQ ID NO: 631550 - DNA, 19 bp, Mus musculus
  siRNA target sequence for Il12rb2 (NM_008354.1,1038-1056).
gagaccgtttacagaatat

SEQ ID NO: 631551 - DNA, 19 bp, Mus musculus
  siRNA target sequence for Il12rb2 (NM_008354.1,1042-1060).
ccgtttacagaatatgaat

SEQ ID NO: 631552 - DNA, 19 bp, Mus musculus
  siRNA target sequence for Il12rb2 (NM_008354.1,1051-1069).
gaatatgaatttcaaatct

SEQ ID NO: 631553 - DNA, 19 bp, Mus musculus
  siRNA target sequence for Il12rb2 (NM_008354.1,1633-1651).
ctgatttcagagaacataa

SEQ ID NO: 631554 - DNA, 19 bp, Mus musculus
  siRNA target sequence for Il12rb2 (NM_008354.1,1843-1861).
ctccattacagaatatact

SEQ ID NO: 631555 - DNA, 19 bp, Mus musculus
  siRNA target sequence for Il12rb2 (NM_008354.1,1891-1909).
gagctctgcgaaattcagt

SEQ ID NO: 631556 - DNA, 19 bp, Mus musculus
  siRNA target sequence for Il12rb2 (NM_008354.1,1911-1929).
ccgacgctctcaaaactca

SEQ ID NO: 631557 - DNA, 19 bp, Mus musculus
  siRNA target sequence for Il12rb2 (NM_008354.1,2052-2070).
gaaagcattcgtgatatca

SEQ ID NO: 631558 - DNA, 19 bp, Mus musculus
  siRNA target sequence for Il12rb2 (NM_008354.1,2062-2080).
gtgatatcaagcatttgca

SEQ ID NO: 631559 - DNA, 19 bp, Mus musculus
  siRNA target sequence for Il12rb2 (NM_008354.1,2072-2090).
gcatttgcatcgctatcat

SEQ ID NO: 631560 - DNA, 19 bp, Mus musculus
  siRNA target sequence for Il12rb2 (NM_008354.1,2093-2111).
cggtgggcacgttctcaat

SEQ ID NO: 631561 - DNA, 19 bp, Mus musculus
  siRNA target sequence for Il12rb2 (NM_008354.1,2094-2112).
ggtgggcacgttctcaatt

SEQ ID NO: 631562 - DNA, 19 bp, Mus musculus
  siRNA target sequence for Il12rb2 (NM_008354.1,2102-2120).
cgttctcaattcgttactt

SEQ ID NO: 631563 - DNA, 19 bp, Mus musculus
  siRNA target sequence for Il12rb2 (NM_008354.1,2121-2139).
ccggcaaaaggcatttact

SEQ ID NO: 631564 - DNA, 19 bp, Mus musculus
  siRNA target sequence for Il12rb2 (NM_008354.1,2152-2170).
ctcaaacctcaatggtata

SEQ ID NO: 631565 - DNA, 19 bp, Mus musculus
  siRNA target sequence for Il12rb2 (NM_008354.1,2198-2216).
gcacttgggtaaagaagta

SEQ ID NO: 631566 - DNA, 19 bp, Mus musculus
  siRNA target sequence for Il12rb2 (NM_008354.1,2199-2217).
cacttgggtaaagaagtat

SEQ ID NO: 631567 - DNA, 19 bp, Mus musculus
  siRNA target sequence for Il12rb2 (NM_008354.1,2238-2256).
ccagctacctacggataat

SEQ ID NO: 631568 - DNA, 19 bp, Mus musculus
  siRNA target sequence for Il12rb2 (NM_008354.1,2330-2348).
cagttgtcagacaaccata

SEQ ID NO: 631569 - DNA, 19 bp, Mus musculus
  siRNA target sequence for Il12rb2 (NM_008354.1,2335-2353).
gtcagacaaccatattact

SEQ ID NO: 631570 - DNA, 19 bp, Mus musculus
  siRNA target sequence for Il12rb2 (NM_008354.1,2341-2359).
caaccatattacttcaaaa

SEQ ID NO: 631571 - DNA, 19 bp, Mus musculus
  siRNA target sequence for Il12rb2 (NM_008354.1,2444-2462).
ctgagaccagacaactagt

SEQ ID NO: 631572 - DNA, 19 bp, Mus musculus
  siRNA target sequence for Il12rb2 (NM_008354.1,2453-2471).
gacaactagtgaacctata

SEQ ID NO: 631573 - DNA, 19 bp, Mus musculus
  siRNA target sequence for Il12rb2 (NM_008354.1,2455-2473).
caactagtgaacctataca

SEQ ID NO: 631574 - DNA, 19 bp, Mus musculus
  siRNA target sequence for Il12rb2 (NM_008354.1,2531-2549).
cagtcaccccagtgaacta

SEQ ID NO: 631575 - DNA, 19 bp, Mus musculus
  siRNA target sequence for Il12rb2 (NM_008354.1,2555-2573).
ctagccatgaaggctattt

SEQ ID NO: 631576 - DNA, 19 bp, Mus musculus
  siRNA target sequence for Il12rb2 (NM_008354.1,2568-2586).
ctatttaccctccaacata

SEQ ID NO: 631577 - DNA, 19 bp, Mus musculus
  siRNA target sequence for Il12rb2 (NM_008354.1,2608-2626).
gctgacccaactgattctt

SEQ ID NO: 631578 - DNA, 19 bp, Mus musculus
  siRNA target sequence for Il12rb2 (NM_008354.1,2609-2627).
ctgacccaactgattcttt

SEQ ID NO: 631579 - DNA, 19 bp, Mus musculus
  siRNA target sequence for Il12rb2 (NM_008354.1,2629-2647).
gacctggagcatcaacata

SEQ ID NO: 631580 - DNA, 19 bp, Mus musculus
  siRNA target sequence for Il12rb2 (NM_008354.1,2631-2649).
cctggagcatcaacatatt

SEQ ID NO: 631581 - DNA, 19 bp, Mus musculus
  siRNA target sequence for Il12rb2 (NM_008354.1,2632-2650).
ctggagcatcaacatattt

SEQ ID NO: 631582 - DNA, 19 bp, Mus musculus
  siRNA target sequence for Il12rb2 (NM_008354.1,2711-2729).
ctctagatcggttaaagat

SEQ ID NO: 631583 - DNA, 19 bp, Mus musculus
  siRNA target sequence for Il13ra1 (NM_133990.3,165-183).
gcgtctctgtcgaaaatct

SEQ ID NO: 631584 - DNA, 19 bp, Mus musculus
  siRNA target sequence for Il13ra1 (NM_133990.3,176-194).
gaaaatctctgcacgataa

SEQ ID NO: 631585 - DNA, 19 bp, Mus musculus
  siRNA target sequence for Il13ra1 (NM_133990.3,218-236).
ggagccagtccaaattgca

SEQ ID NO: 631586 - DNA, 19 bp, Mus musculus
  siRNA target sequence for Il13ra1 (NM_133990.3,243-261).
gatattttagtcactttga

SEQ ID NO: 631587 - DNA, 19 bp, Mus musculus
  siRNA target sequence for Il13ra1 (NM_133990.3,260-278).
gatgaccaacaggataaga

SEQ ID NO: 631588 - DNA, 19 bp, Mus musculus
  siRNA target sequence for Il13ra1 (NM_133990.3,285-303).
ctccagaaactcatcgtaa

SEQ ID NO: 631589 - DNA, 19 bp, Mus musculus
  siRNA target sequence for Il13ra1 (NM_133990.3,294-312).
ctcatcgtaaagaggaatt

SEQ ID NO: 631590 - DNA, 19 bp, Mus musculus
  siRNA target sequence for Il13ra1 (NM_133990.3,350-368).
cagtgtagtgccaatgaaa

SEQ ID NO: 631591 - DNA, 19 bp, Mus musculus
  siRNA target sequence for Il13ra1 (NM_133990.3,352-370).
gtgtagtgccaatgaaagt

SEQ ID NO: 631592 - DNA, 19 bp, Mus musculus
  siRNA target sequence for Il13ra1 (NM_133990.3,456-474).
ggcataacctgagctatat

SEQ ID NO: 631593 - DNA, 19 bp, Mus musculus
  siRNA target sequence for Il13ra1 (NM_133990.3,487-505).
gctccctggaaggaataca

SEQ ID NO: 631594 - DNA, 19 bp, Mus musculus
  siRNA target sequence for Il13ra1 (NM_133990.3,508-526).
ccctgacacacactatact

SEQ ID NO: 631595 - DNA, 19 bp, Mus musculus
  siRNA target sequence for Il13ra1 (NM_133990.3,518-536).
cactatactctgtactatt

SEQ ID NO: 631596 - DNA, 19 bp, Mus musculus
  siRNA target sequence for Il13ra1 (NM_133990.3,550-568).
ggagaaaagtcgtcaatgt

SEQ ID NO: 631597 - DNA, 19 bp, Mus musculus
  siRNA target sequence for Il13ra1 (NM_133990.3,553-571).
gaaaagtcgtcaatgtgaa

SEQ ID NO: 631598 - DNA, 19 bp, Mus musculus
  siRNA target sequence for Il13ra1 (NM_133990.3,584-602).
gaaggtcaacacattgctt

SEQ ID NO: 631599 - DNA, 19 bp, Mus musculus
  siRNA target sequence for Il13ra1 (NM_133990.3,638-656).
gaacatcagaacgttcaaa

SEQ ID NO: 631600 - DNA, 19 bp, Mus musculus
  siRNA target sequence for Il13ra1 (NM_133990.3,667-685).
ggataatgctgggaaaatt

SEQ ID NO: 631601 - DNA, 19 bp, Mus musculus
  siRNA target sequence for Il13ra1 (NM_133990.3,668-686).
gataatgctgggaaaatta

SEQ ID NO: 631602 - DNA, 19 bp, Mus musculus
  siRNA target sequence for Il13ra1 (NM_133990.3,693-711).
cctgcaaaatagtgtcttt

SEQ ID NO: 631603 - DNA, 19 bp, Mus musculus
  siRNA target sequence for Il13ra1 (NM_133990.3,694-712).
ctgcaaaatagtgtcttta

SEQ ID NO: 631604 - DNA, 19 bp, Mus musculus
  siRNA target sequence for Il13ra1 (NM_133990.3,708-726).
ctttaacttcctatgtgaa

SEQ ID NO: 631605 - DNA, 19 bp, Mus musculus
  siRNA target sequence for Il13ra1 (NM_133990.3,728-746).
cctgatcctccacatatta

SEQ ID NO: 631606 - DNA, 19 bp, Mus musculus
  siRNA target sequence for Il13ra1 (NM_133990.3,784-802).
gtggaagaatccacaaaat

SEQ ID NO: 631607 - DNA, 19 bp, Mus musculus
  siRNA target sequence for Il13ra1 (NM_133990.3,786-804).
ggaagaatccacaaaattt

SEQ ID NO: 631608 - DNA, 19 bp, Mus musculus
  siRNA target sequence for Il13ra1 (NM_133990.3,810-828).
gcagatgcttaacttatga

SEQ ID NO: 631609 - DNA, 19 bp, Mus musculus
  siRNA target sequence for Il13ra1 (NM_133990.3,811-829).
cagatgcttaacttatgaa

SEQ ID NO: 631610 - DNA, 19 bp, Mus musculus
  siRNA target sequence for Il13ra1 (NM_133990.3,827-845).
gaagtggaggtcaataata

SEQ ID NO: 631611 - DNA, 19 bp, Mus musculus
  siRNA target sequence for Il13ra1 (NM_133990.3,846-864).
ctcaaaccgaccgacataa

SEQ ID NO: 631612 - DNA, 19 bp, Mus musculus
  siRNA target sequence for Il13ra1 (NM_133990.3,848-866).
caaaccgaccgacataata

SEQ ID NO: 631613 - DNA, 19 bp, Mus musculus
  siRNA target sequence for Il13ra1 (NM_133990.3,852-870).
ccgaccgacataatatttt

SEQ ID NO: 631614 - DNA, 19 bp, Mus musculus
  siRNA target sequence for Il13ra1 (NM_133990.3,853-871).
cgaccgacataatatttta

SEQ ID NO: 631615 - DNA, 19 bp, Mus musculus
  siRNA target sequence for Il13ra1 (NM_133990.3,891-909).
gccagaattccgaatctga

SEQ ID NO: 631616 - DNA, 19 bp, Mus musculus
  siRNA target sequence for Il13ra1 (NM_133990.3,892-910).
ccagaattccgaatctgat

SEQ ID NO: 631617 - DNA, 19 bp, Mus musculus
  siRNA target sequence for Il13ra1 (NM_133990.3,893-911).
cagaattccgaatctgata

SEQ ID NO: 631618 - DNA, 19 bp, Mus musculus
  siRNA target sequence for Il13ra1 (NM_133990.3,895-913).
gaattccgaatctgataga

SEQ ID NO: 631619 - DNA, 19 bp, Mus musculus
  siRNA target sequence for Il13ra1 (NM_133990.3,922-940).
gggtacaagttgtttccaa

SEQ ID NO: 631620 - DNA, 19 bp, Mus musculus
  siRNA target sequence for Il13ra1 (NM_133990.3,937-955).
ccaactccctggtgttctt

SEQ ID NO: 631621 - DNA, 19 bp, Mus musculus
  siRNA target sequence for Il13ra1 (NM_133990.3,1035-1053).
ggagtgaagcacagagtat

SEQ ID NO: 631622 - DNA, 19 bp, Mus musculus
  siRNA target sequence for Il13ra1 (NM_133990.3,1040-1058).
gaagcacagagtataggta

SEQ ID NO: 631623 - DNA, 19 bp, Mus musculus
  siRNA target sequence for Il13ra1 (NM_133990.3,1075-1093).
cttctacaccaccatgtta

SEQ ID NO: 631624 - DNA, 19 bp, Mus musculus
  siRNA target sequence for Il13ra1 (NM_133990.3,1112-1130).
gtcgcagtggcagtcataa

SEQ ID NO: 631625 - DNA, 19 bp, Mus musculus
  siRNA target sequence for Il13ra1 (NM_133990.3,1122-1140).
cagtcataatcctcctttt

SEQ ID NO: 631626 - DNA, 19 bp, Mus musculus
  siRNA target sequence for Il13ra1 (NM_133990.3,1147-1165).
gaaaaggcttaagatcatt

SEQ ID NO: 631627 - DNA, 19 bp, Mus musculus
  siRNA target sequence for Il13ra1 (NM_133990.3,1162-1180).
cattatatttcctccaatt

SEQ ID NO: 631628 - DNA, 19 bp, Mus musculus
  siRNA target sequence for Il13ra1 (NM_133990.3,1258-1276).
ctatgagaaacaatccaaa

SEQ ID NO: 631629 - DNA, 19 bp, Mus musculus
  siRNA target sequence for Il13ra2 (NM_008356.1,252-270).
ggcttttgtgcatatcaga

SEQ ID NO: 631630 - DNA, 19 bp, Mus musculus
  siRNA target sequence for Il13ra2 (NM_008356.1,269-287).
gatgcttgtgtttcattct

SEQ ID NO: 631631 - DNA, 19 bp, Mus musculus
  siRNA target sequence for Il13ra2 (NM_008356.1,315-333).
ggagataaaagttaatcct

SEQ ID NO: 631632 - DNA, 19 bp, Mus musculus
  siRNA target sequence for Il13ra2 (NM_008356.1,359-377).
ctggattacttggttatct

SEQ ID NO: 631633 - DNA, 19 bp, Mus musculus
  siRNA target sequence for Il13ra2 (NM_008356.1,361-379).
ggattacttggttatctct

SEQ ID NO: 631634 - DNA, 19 bp, Mus musculus
  siRNA target sequence for Il13ra2 (NM_008356.1,362-380).
gattacttggttatctcta

SEQ ID NO: 631635 - DNA, 19 bp, Mus musculus
  siRNA target sequence for Il13ra2 (NM_008356.1,370-388).
ggttatctctatttgcaat

SEQ ID NO: 631636 - DNA, 19 bp, Mus musculus
  siRNA target sequence for Il13ra2 (NM_008356.1,422-440).
gctgtacactagaatatga

SEQ ID NO: 631637 - DNA, 19 bp, Mus musculus
  siRNA target sequence for Il13ra2 (NM_008356.1,465-483).
cgacagctggaagactata

SEQ ID NO: 631638 - DNA, 19 bp, Mus musculus
  siRNA target sequence for Il13ra2 (NM_008356.1,466-484).
gacagctggaagactataa

SEQ ID NO: 631639 - DNA, 19 bp, Mus musculus
  siRNA target sequence for Il13ra2 (NM_008356.1,471-489).
ctggaagactataattact

SEQ ID NO: 631640 - DNA, 19 bp, Mus musculus
  siRNA target sequence for Il13ra2 (NM_008356.1,477-495).
gactataattactaggaat

SEQ ID NO: 631641 - DNA, 19 bp, Mus musculus
  siRNA target sequence for Il13ra2 (NM_008356.1,543-561).
gatacgtacgcatttgtca

SEQ ID NO: 631642 - DNA, 19 bp, Mus musculus
  siRNA target sequence for Il13ra2 (NM_008356.1,562-580).
gagcattgtacaaatggat

SEQ ID NO: 631643 - DNA, 19 bp, Mus musculus
  siRNA target sequence for Il13ra2 (NM_008356.1,596-614).
catggatagaagcttctta

SEQ ID NO: 631644 - DNA, 19 bp, Mus musculus
  siRNA target sequence for Il13ra2 (NM_008356.1,654-672).
ggacatgaagtgtatatat

SEQ ID NO: 631645 - DNA, 19 bp, Mus musculus
  siRNA target sequence for Il13ra2 (NM_008356.1,657-675).
catgaagtgtatatattat

SEQ ID NO: 631646 - DNA, 19 bp, Mus musculus
  siRNA target sequence for Il13ra2 (NM_008356.1,706-724).
cctggcaagacagtatatt

SEQ ID NO: 631647 - DNA, 19 bp, Mus musculus
  siRNA target sequence for Il13ra2 (NM_008356.1,711-729).
caagacagtatattctgat

SEQ ID NO: 631648 - DNA, 19 bp, Mus musculus
  siRNA target sequence for Il13ra2 (NM_008356.1,725-743).
ctgataccaactataccat

SEQ ID NO: 631649 - DNA, 19 bp, Mus musculus
  siRNA target sequence for Il13ra2 (NM_008356.1,840-858).
ctcatcagactataaagat

SEQ ID NO: 631650 - DNA, 19 bp, Mus musculus
  siRNA target sequence for Il13ra2 (NM_008356.1,867-885).
ctgtgttaatggatcttca

SEQ ID NO: 631651 - DNA, 19 bp, Mus musculus
  siRNA target sequence for Il13ra2 (NM_008356.1,871-889).
gttaatggatcttcaaagt

SEQ ID NO: 631652 - DNA, 19 bp, Mus musculus
  siRNA target sequence for Il13ra2 (NM_008356.1,897-915).
catcagatccagctataca

SEQ ID NO: 631653 - DNA, 19 bp, Mus musculus
  siRNA target sequence for Il13ra2 (NM_008356.1,900-918).
cagatccagctatacagtt

SEQ ID NO: 631654 - DNA, 19 bp, Mus musculus
  siRNA target sequence for Il13ra2 (NM_008356.1,902-920).
gatccagctatacagtttt

SEQ ID NO: 631655 - DNA, 19 bp, Mus musculus
  siRNA target sequence for Il13ra2 (NM_008356.1,909-927).
ctatacagtttttcaactt

SEQ ID NO: 631656 - DNA, 19 bp, Mus musculus
  siRNA target sequence for Il13ra2 (NM_008356.1,914-932).
cagtttttcaacttcaaaa

SEQ ID NO: 631657 - DNA, 19 bp, Mus musculus
  siRNA target sequence for Il13ra2 (NM_008356.1,922-940).
caacttcaaaatatagtta

SEQ ID NO: 631658 - DNA, 19 bp, Mus musculus
  siRNA target sequence for Il13ra2 (NM_008356.1,928-946).
caaaatatagttaaaccat

SEQ ID NO: 631659 - DNA, 19 bp, Mus musculus
  siRNA target sequence for Il13ra2 (NM_008356.1,964-982).
catattagtgtggagaatt

SEQ ID NO: 631660 - DNA, 19 bp, Mus musculus
  siRNA target sequence for Il13ra2 (NM_008356.1,975-993).
ggagaattccattgatatt

SEQ ID NO: 631661 - DNA, 19 bp, Mus musculus
  siRNA target sequence for Il13ra2 (NM_008356.1,976-994).
gagaattccattgatatta

SEQ ID NO: 631662 - DNA, 19 bp, Mus musculus
  siRNA target sequence for Il13ra2 (NM_008356.1,978-996).
gaattccattgatattaga

SEQ ID NO: 631663 - DNA, 19 bp, Mus musculus
  siRNA target sequence for Il13ra2 (NM_008356.1,1031-1049).
caaggtgttacacttatga

SEQ ID NO: 631664 - DNA, 19 bp, Mus musculus
  siRNA target sequence for Il13ra2 (NM_008356.1,1035-1053).
gtgttacacttatgaaatt

SEQ ID NO: 631665 - DNA, 19 bp, Mus musculus
  siRNA target sequence for Il13ra2 (NM_008356.1,1056-1074).
gatccgagaagacgatatt

SEQ ID NO: 631666 - DNA, 19 bp, Mus musculus
  siRNA target sequence for Il13ra2 (NM_008356.1,1060-1078).
cgagaagacgatatttcct

SEQ ID NO: 631667 - DNA, 19 bp, Mus musculus
  siRNA target sequence for Il13ra2 (NM_008356.1,1085-1103).
ctgccacagacaaaaacga

SEQ ID NO: 631668 - DNA, 19 bp, Mus musculus
  siRNA target sequence for Il13ra2 (NM_008356.1,1087-1105).
gccacagacaaaaacgata

SEQ ID NO: 631669 - DNA, 19 bp, Mus musculus
  siRNA target sequence for Il13ra2 (NM_008356.1,1088-1106).
ccacagacaaaaacgatat

SEQ ID NO: 631670 - DNA, 19 bp, Mus musculus
  siRNA target sequence for Il13ra2 (NM_008356.1,1093-1111).
gacaaaaacgatatgaagt

SEQ ID NO: 631671 - DNA, 19 bp, Mus musculus
  siRNA target sequence for Il13ra2 (NM_008356.1,1118-1136).
ggagagcaaatgaaagtga

SEQ ID NO: 631672 - DNA, 19 bp, Mus musculus
  siRNA target sequence for Il13ra2 (NM_008356.1,1133-1151).
gtgaagacctatgcttttt

SEQ ID NO: 631673 - DNA, 19 bp, Mus musculus
  siRNA target sequence for Il13ra2 (NM_008356.1,1138-1156).
gacctatgcttttttgtaa

SEQ ID NO: 631674 - DNA, 19 bp, Mus musculus
  siRNA target sequence for Il13ra2 (NM_008356.1,1153-1171).
gtaagatgtaaggtcaata

SEQ ID NO: 631675 - DNA, 19 bp, Mus musculus
  siRNA target sequence for Il13ra2 (NM_008356.1,1157-1175).
gatgtaaggtcaatatata

SEQ ID NO: 631676 - DNA, 19 bp, Mus musculus
  siRNA target sequence for Il13ra2 (NM_008356.1,1180-1198).
gcagatgatggaatttgga

SEQ ID NO: 631677 - DNA, 19 bp, Mus musculus
  siRNA target sequence for Il13ra2 (NM_008356.1,1237-1255).
gggccagactcaaagatta

SEQ ID NO: 631678 - DNA, 19 bp, Mus musculus
  siRNA target sequence for Il13ra2 (NM_008356.1,1238-1256).
ggccagactcaaagattat

SEQ ID NO: 631679 - DNA, 19 bp, Mus musculus
  siRNA target sequence for Il13ra2 (NM_008356.1,1239-1257).
gccagactcaaagattatt

SEQ ID NO: 631680 - DNA, 19 bp, Mus musculus
  siRNA target sequence for Il13ra2 (NM_008356.1,1264-1282).
gtaccagtttgtcttttct

SEQ ID NO: 631681 - DNA, 19 bp, Mus musculus
  siRNA target sequence for Il22ra1 (NM_178257.1,70-88).
ctccttcaacacgtgaaat

SEQ ID NO: 631682 - DNA, 19 bp, Mus musculus
  siRNA target sequence for Il22ra1 (NM_178257.1,152-170).
ccgtctacagtgtggaata

SEQ ID NO: 631683 - DNA, 19 bp, Mus musculus
  siRNA target sequence for Il22ra1 (NM_178257.1,153-171).
cgtctacagtgtggaatat

SEQ ID NO: 631684 - DNA, 19 bp, Mus musculus
  siRNA target sequence for Il22ra1 (NM_178257.1,217-235).
cggatcacccagaagttct

SEQ ID NO: 631685 - DNA, 19 bp, Mus musculus
  siRNA target sequence for Il22ra1 (NM_178257.1,255-273).
ccgcaaccacactgagttt

SEQ ID NO: 631686 - DNA, 19 bp, Mus musculus
  siRNA target sequence for Il22ra1 (NM_178257.1,256-274).
cgcaaccacactgagtttt

SEQ ID NO: 631687 - DNA, 19 bp, Mus musculus
  siRNA target sequence for Il22ra1 (NM_178257.1,305-323).
gaggcccaccagtcacaaa

SEQ ID NO: 631688 - DNA, 19 bp, Mus musculus
  siRNA target sequence for Il22ra1 (NM_178257.1,307-325).
ggcccaccagtcacaaaga

SEQ ID NO: 631689 - DNA, 19 bp, Mus musculus
  siRNA target sequence for Il22ra1 (NM_178257.1,320-338).
caaagatgactgatcgttt

SEQ ID NO: 631690 - DNA, 19 bp, Mus musculus
  siRNA target sequence for Il22ra1 (NM_178257.1,591-609).
cctcggctccatcacaatt

SEQ ID NO: 631691 - DNA, 19 bp, Mus musculus
  siRNA target sequence for Il22ra1 (NM_178257.1,592-610).
ctcggctccatcacaattt

SEQ ID NO: 631692 - DNA, 19 bp, Mus musculus
  siRNA target sequence for Il22ra1 (NM_178257.1,595-613).
ggctccatcacaattttga

SEQ ID NO: 631693 - DNA, 19 bp, Mus musculus
  siRNA target sequence for Il22ra1 (NM_178257.1,605-623).
caattttgactccgatatt

SEQ ID NO: 631694 - DNA, 19 bp, Mus musculus
  siRNA target sequence for Il22ra1 (NM_178257.1,616-634).
ccgatattgtccaaggaaa

SEQ ID NO: 631695 - DNA, 19 bp, Mus musculus
  siRNA target sequence for Il22ra1 (NM_178257.1,726-744).
cgtcggcttgctctgttat

SEQ ID NO: 631696 - DNA, 19 bp, Mus musculus
  siRNA target sequence for Il22ra1 (NM_178257.1,738-756).
ctgttatctgggctacaaa

SEQ ID NO: 631697 - DNA, 19 bp, Mus musculus
  siRNA target sequence for Il22ra1 (NM_178257.1,740-758).
gttatctgggctacaaata

SEQ ID NO: 631698 - DNA, 19 bp, Mus musculus
  siRNA target sequence for Il22ra1 (NM_178257.1,1265-1283).
ccaaatacctcaagacaaa

SEQ ID NO: 631699 - DNA, 19 bp, Mus musculus
  siRNA target sequence for Il22ra1 (NM_178257.1,1323-1341).
cccaggggacctttctcta

SEQ ID NO: 631700 - DNA, 19 bp, Mus musculus
  siRNA target sequence for Il22ra1 (NM_178257.1,1393-1411).
ccctcacctctgggatttt

SEQ ID NO: 631701 - DNA, 19 bp, Mus musculus
  siRNA target sequence for Il22ra2 (NM_178258.2,45-63).
gagcagtgcaacagaaata

SEQ ID NO: 631702 - DNA, 19 bp, Mus musculus
  siRNA target sequence for Il22ra2 (NM_178258.2,89-107).
cccagaaggtccgatttca

SEQ ID NO: 631703 - DNA, 19 bp, Mus musculus
  siRNA target sequence for Il22ra2 (NM_178258.2,91-109).
cagaaggtccgatttcagt

SEQ ID NO: 631704 - DNA, 19 bp, Mus musculus
  siRNA target sequence for Il22ra2 (NM_178258.2,99-117).
ccgatttcagtccagaaat

SEQ ID NO: 631705 - DNA, 19 bp, Mus musculus
  siRNA target sequence for Il22ra2 (NM_178258.2,110-128).
ccagaaatttccacaatat

SEQ ID NO: 631706 - DNA, 19 bp, Mus musculus
  siRNA target sequence for Il22ra2 (NM_178258.2,202-220).
cagagccaatgggaagata

SEQ ID NO: 631707 - DNA, 19 bp, Mus musculus
  siRNA target sequence for Il22ra2 (NM_178258.2,207-225).
ccaatgggaagataaagtt

SEQ ID NO: 631708 - DNA, 19 bp, Mus musculus
  siRNA target sequence for Il22ra2 (NM_178258.2,252-270).
ctgtgacctgaccaatgaa

SEQ ID NO: 631709 - DNA, 19 bp, Mus musculus
  siRNA target sequence for Il22ra2 (NM_178258.2,277-295).
gacccatacgagctgtatt

SEQ ID NO: 631710 - DNA, 19 bp, Mus musculus
  siRNA target sequence for Il22ra2 (NM_178258.2,385-403).
cctccggtcgtgactataa

SEQ ID NO: 631711 - DNA, 19 bp, Mus musculus
  siRNA target sequence for Il22ra2 (NM_178258.2,404-422).
cccgagttaacgcatcttt

SEQ ID NO: 631712 - DNA, 19 bp, Mus musculus
  siRNA target sequence for Il22ra2 (NM_178258.2,491-509).
cttactacggcttagtata

SEQ ID NO: 631713 - DNA, 19 bp, Mus musculus
  siRNA target sequence for Il22ra2 (NM_178258.2,495-513).
ctacggcttagtatacaga

SEQ ID NO: 631714 - DNA, 19 bp, Mus musculus
  siRNA target sequence for Il22ra2 (NM_178258.2,499-517).
ggcttagtatacagagttt

SEQ ID NO: 631715 - DNA, 19 bp, Mus musculus
  siRNA target sequence for Il22ra2 (NM_178258.2,514-532).
gttttcacaatcaacaatt

SEQ ID NO: 631716 - DNA, 19 bp, Mus musculus
  siRNA target sequence for Il22ra2 (NM_178258.2,570-588).
gagagctgttgaaattgaa

SEQ ID NO: 631717 - DNA, 19 bp, Mus musculus
  siRNA target sequence for Il22ra2 (NM_178258.2,614-632).
gcgtagtggctgaaatgta

SEQ ID NO: 631718 - DNA, 19 bp, Mus musculus
  siRNA target sequence for Il28ra (NM_174851.2,167-185).
ccccaaatgtgacctattt

SEQ ID NO: 631719 - DNA, 19 bp, Mus musculus
  siRNA target sequence for Il28ra (NM_174851.2,170-188).
caaatgtgacctatttcgt

SEQ ID NO: 631720 - DNA, 19 bp, Mus musculus
  siRNA target sequence for Il28ra (NM_174851.2,186-204).
cgtgacctaccaaagctat

SEQ ID NO: 631721 - DNA, 19 bp, Mus musculus
  siRNA target sequence for Il28ra (NM_174851.2,192-210).
ctaccaaagctatatcaaa

SEQ ID NO: 631722 - DNA, 19 bp, Mus musculus
  siRNA target sequence for Il28ra (NM_174851.2,470-488).
cgtcgctggaactgaagta

SEQ ID NO: 631723 - DNA, 19 bp, Mus musculus
  siRNA target sequence for Il28ra (NM_174851.2,607-625).
gccagaaccgtctatacct

SEQ ID NO: 631724 - DNA, 19 bp, Mus musculus
  siRNA target sequence for Il28ra (NM_174851.2,608-626).
ccagaaccgtctatacctt

SEQ ID NO: 631725 - DNA, 19 bp, Mus musculus
  siRNA target sequence for Il28ra (NM_174851.2,611-629).
gaaccgtctataccttaat

SEQ ID NO: 631726 - DNA, 19 bp, Mus musculus
  siRNA target sequence for Il28ra (NM_174851.2,614-632).
ccgtctataccttaattga

SEQ ID NO: 631727 - DNA, 19 bp, Mus musculus
  siRNA target sequence for Il28ra (NM_174851.2,678-696).
ggctccaggggacaaaaga

SEQ ID NO: 631728 - DNA, 19 bp, Mus musculus
  siRNA target sequence for Il28ra (NM_174851.2,713-731).
cctcactcttgcttctact

SEQ ID NO: 631729 - DNA, 19 bp, Mus musculus
  siRNA target sequence for Il28ra (NM_174851.2,752-770).
gtgtggcatggaagataat

SEQ ID NO: 631730 - DNA, 19 bp, Mus musculus
  siRNA target sequence for Il28ra (NM_174851.2,1194-1212).
cacaggggactcctcatat

SEQ ID NO: 631731 - DNA, 19 bp, Mus musculus
  siRNA target sequence for Il28ra (NM_174851.2,1196-1214).
caggggactcctcatataa

SEQ ID NO: 631732 - DNA, 19 bp, Mus musculus
  siRNA target sequence for Il28ra (NM_174851.2,1199-1217).
gggactcctcatataagga

SEQ ID NO: 631733 - DNA, 19 bp, Mus musculus
  siRNA target sequence for Il28ra (NM_174851.2,1200-1218).
ggactcctcatataaggat

SEQ ID NO: 631734 - DNA, 19 bp, Mus musculus
  siRNA target sequence for Il28ra (NM_174851.2,1205-1223).
cctcatataaggatgaagt

SEQ ID NO: 631735 - DNA, 19 bp, Mus musculus
  siRNA target sequence for Il28ra (NM_174851.2,1206-1224).
ctcatataaggatgaagtt

SEQ ID NO: 631736 - DNA, 19 bp, Mus musculus
  siRNA target sequence for Il28ra (NM_174851.2,1296-1314).
cccatgcctggaattttct

SEQ ID NO: 631737 - DNA, 19 bp, Mus musculus
  siRNA target sequence for Il28ra (NM_174851.2,1354-1372).
ctctccgggtggaggattt

SEQ ID NO: 631738 - DNA, 19 bp, Mus musculus
  siRNA target sequence for Il28ra (NM_174851.2,1356-1374).
ctccgggtggaggatttct

SEQ ID NO: 631739 - DNA, 19 bp, Mus musculus
  siRNA target sequence for Il28ra (NM_174851.2,1552-1570).
ggctgttggggcacttcaa

SEQ ID NO: 631740 - DNA, 19 bp, Mus musculus
  siRNA target sequence for Il28ra (NM_174851.2,1597-1615).
cggatgctgggagattact

SEQ ID NO: 631741 - DNA, 19 bp, Mus musculus
  siRNA target sequence for Il2rb (NM_008368.3,182-200).
gcagcagtgaaaaactgtt

SEQ ID NO: 631742 - DNA, 19 bp, Mus musculus
  siRNA target sequence for Il2rb (NM_008368.3,203-221).
catcttgaatgcttctaca

SEQ ID NO: 631743 - DNA, 19 bp, Mus musculus
  siRNA target sequence for Il2rb (NM_008368.3,209-227).
gaatgcttctacaactcaa

SEQ ID NO: 631744 - DNA, 19 bp, Mus musculus
  siRNA target sequence for Il2rb (NM_008368.3,243-261).
gcatgtggagccatgaaga

SEQ ID NO: 631745 - DNA, 19 bp, Mus musculus
  siRNA target sequence for Il2rb (NM_008368.3,253-271).
ccatgaagaggctctgaat

SEQ ID NO: 631746 - DNA, 19 bp, Mus musculus
  siRNA target sequence for Il2rb (NM_008368.3,304-322).
cctgcgacactggaacaaa

SEQ ID NO: 631747 - DNA, 19 bp, Mus musculus
  siRNA target sequence for Il2rb (NM_008368.3,305-323).
ctgcgacactggaacaaaa

SEQ ID NO: 631748 - DNA, 19 bp, Mus musculus
  siRNA target sequence for Il2rb (NM_008368.3,308-326).
cgacactggaacaaaacct

SEQ ID NO: 631749 - DNA, 19 bp, Mus musculus
  siRNA target sequence for Il2rb (NM_008368.3,408-426).
ccgtggacctccttgacat

SEQ ID NO: 631750 - DNA, 19 bp, Mus musculus
  siRNA target sequence for Il2rb (NM_008368.3,409-427).
cgtggacctccttgacata

SEQ ID NO: 631751 - DNA, 19 bp, Mus musculus
  siRNA target sequence for Il2rb (NM_008368.3,452-470).
ggttggcgtagggtaaaga

SEQ ID NO: 631752 - DNA, 19 bp, Mus musculus
  siRNA target sequence for Il2rb (NM_008368.3,573-591).
cccaggtctctcactacat

SEQ ID NO: 631753 - DNA, 19 bp, Mus musculus
  siRNA target sequence for Il2rb (NM_008368.3,574-592).
ccaggtctctcactacatt

SEQ ID NO: 631754 - DNA, 19 bp, Mus musculus
  siRNA target sequence for Il2rb (NM_008368.3,577-595).
ggtctctcactacattgaa

SEQ ID NO: 631755 - DNA, 19 bp, Mus musculus
  siRNA target sequence for Il2rb (NM_008368.3,644-662).
gaggatgcatccgtattaa

SEQ ID NO: 631756 - DNA, 19 bp, Mus musculus
  siRNA target sequence for Il2rb (NM_008368.3,735-753).
gggtcaaagctcaacgaaa

SEQ ID NO: 631757 - DNA, 19 bp, Mus musculus
  siRNA target sequence for Il2rb (NM_008368.3,739-757).
caaagctcaacgaaacaat

SEQ ID NO: 631758 - DNA, 19 bp, Mus musculus
  siRNA target sequence for Il2rb (NM_008368.3,824-842).
gagatcctccccatgtcat

SEQ ID NO: 631759 - DNA, 19 bp, Mus musculus
  siRNA target sequence for Il2rb (NM_008368.3,834-852).
ccatgtcatggctcagata

SEQ ID NO: 631760 - DNA, 19 bp, Mus musculus
  siRNA target sequence for Il2rb (NM_008368.3,838-856).
gtcatggctcagatacctt

SEQ ID NO: 631761 - DNA, 19 bp, Mus musculus
  siRNA target sequence for Il2rb (NM_008368.3,886-904).
cttctcctgcgtctacatt

SEQ ID NO: 631762 - DNA, 19 bp, Mus musculus
  siRNA target sequence for Il2rb (NM_008368.3,891-909).
cctgcgtctacattttggt

SEQ ID NO: 631763 - DNA, 19 bp, Mus musculus
  siRNA target sequence for Il2rb (NM_008368.3,1004-1022).
gggggagaccttcagaaat

SEQ ID NO: 631764 - DNA, 19 bp, Mus musculus
  siRNA target sequence for Il2rb (NM_008368.3,1565-1583).
gggctgtctgccaatagct

SEQ ID NO: 631765 - DNA, 19 bp, Mus musculus
  siRNA target sequence for Il2rb (NM_008368.3,1675-1693).
ctatctgtctcttcaagaa

SEQ ID NO: 631766 - DNA, 19 bp, Mus musculus
  siRNA target sequence for Il2rb (NM_008368.3,1691-1709).
gaactacaggcccaagatt

SEQ ID NO: 631767 - DNA, 19 bp, Mus musculus
  siRNA target sequence for Il2rg (NM_013563.2,121-139).
catgtccagtgcgaatgaa

SEQ ID NO: 631768 - DNA, 19 bp, Mus musculus
  siRNA target sequence for Il2rg (NM_013563.2,126-144).
ccagtgcgaatgaagacat

SEQ ID NO: 631769 - DNA, 19 bp, Mus musculus
  siRNA target sequence for Il2rg (NM_013563.2,129-147).
gtgcgaatgaagacatcaa

SEQ ID NO: 631770 - DNA, 19 bp, Mus musculus
  siRNA target sequence for Il2rg (NM_013563.2,218-236).
cagtgctttgtgttcaaca

SEQ ID NO: 631771 - DNA, 19 bp, Mus musculus
  siRNA target sequence for Il2rg (NM_013563.2,290-308).
ctcacgctgcactataggt

SEQ ID NO: 631772 - DNA, 19 bp, Mus musculus
  siRNA target sequence for Il2rg (NM_013563.2,299-317).
cactataggtacaaggtat

SEQ ID NO: 631773 - DNA, 19 bp, Mus musculus
  siRNA target sequence for Il2rg (NM_013563.2,306-324).
ggtacaaggtatctgataa

SEQ ID NO: 631774 - DNA, 19 bp, Mus musculus
  siRNA target sequence for Il2rg (NM_013563.2,338-356).
gagtgcagtcactatttgt

SEQ ID NO: 631775 - DNA, 19 bp, Mus musculus
  siRNA target sequence for Il2rg (NM_013563.2,372-390).
cttctggctgtcagataca

SEQ ID NO: 631776 - DNA, 19 bp, Mus musculus
  siRNA target sequence for Il2rg (NM_013563.2,403-421).
ccagctctaccagacattt

SEQ ID NO: 631777 - DNA, 19 bp, Mus musculus
  siRNA target sequence for Il2rg (NM_013563.2,458-476).
cgagctgtacagaagctaa

SEQ ID NO: 631778 - DNA, 19 bp, Mus musculus
  siRNA target sequence for Il2rg (NM_013563.2,498-516).
cacgggctccagaaaatct

SEQ ID NO: 631779 - DNA, 19 bp, Mus musculus
  siRNA target sequence for Il2rg (NM_013563.2,504-522).
ctccagaaaatctaacact

SEQ ID NO: 631780 - DNA, 19 bp, Mus musculus
  siRNA target sequence for Il2rg (NM_013563.2,515-533).
ctaacactcagcaatctga

SEQ ID NO: 631781 - DNA, 19 bp, Mus musculus
  siRNA target sequence for Il2rg (NM_013563.2,578-596).
gaacgctgtttacaatact

SEQ ID NO: 631782 - DNA, 19 bp, Mus musculus
  siRNA target sequence for Il2rg (NM_013563.2,623-641).
cgaagctggacggaactaa

SEQ ID NO: 631783 - DNA, 19 bp, Mus musculus
  siRNA target sequence for Il2rg (NM_013563.2,627-645).
gctggacggaactaatagt

SEQ ID NO: 631784 - DNA, 19 bp, Mus musculus
  siRNA target sequence for Il2rg (NM_013563.2,630-648).
ggacggaactaatagtgaa

SEQ ID NO: 631785 - DNA, 19 bp, Mus musculus
  siRNA target sequence for Il2rg (NM_013563.2,631-649).
gacggaactaatagtgaat

SEQ ID NO: 631786 - DNA, 19 bp, Mus musculus
  siRNA target sequence for Il2rg (NM_013563.2,633-651).
cggaactaatagtgaatca

SEQ ID NO: 631787 - DNA, 19 bp, Mus musculus
  siRNA target sequence for Il2rg (NM_013563.2,634-652).
ggaactaatagtgaatcat

SEQ ID NO: 631788 - DNA, 19 bp, Mus musculus
  siRNA target sequence for Il2rg (NM_013563.2,683-701).
gagctgaaacggtacacat

SEQ ID NO: 631789 - DNA, 19 bp, Mus musculus
  siRNA target sequence for Il2rg (NM_013563.2,685-703).
gctgaaacggtacacattt

SEQ ID NO: 631790 - DNA, 19 bp, Mus musculus
  siRNA target sequence for Il2rg (NM_013563.2,715-733).
ccgctataacccaatctgt

SEQ ID NO: 631791 - DNA, 19 bp, Mus musculus
  siRNA target sequence for Il2rg (NM_013563.2,770-788).
gtccactgggggagtcata

SEQ ID NO: 631792 - DNA, 19 bp, Mus musculus
  siRNA target sequence for Il2rg (NM_013563.2,772-790).
ccactgggggagtcatact

SEQ ID NO: 631793 - DNA, 19 bp, Mus musculus
  siRNA target sequence for Il2rg (NM_013563.2,775-793).
ctgggggagtcatactgta

SEQ ID NO: 631794 - DNA, 19 bp, Mus musculus
  siRNA target sequence for Il2rg (NM_013563.2,842-860).
ggcaccatggggttgatta

SEQ ID NO: 631795 - DNA, 19 bp, Mus musculus
  siRNA target sequence for Il2rg (NM_013563.2,843-861).
gcaccatggggttgattat

SEQ ID NO: 631796 - DNA, 19 bp, Mus musculus
  siRNA target sequence for Il2rg (NM_013563.2,844-862).
caccatggggttgattatt

SEQ ID NO: 631797 - DNA, 19 bp, Mus musculus
  siRNA target sequence for Il2rg (NM_013563.2,889-907).
ggaacgaatgcctccaatt

SEQ ID NO: 631798 - DNA, 19 bp, Mus musculus
  siRNA target sequence for Il2rg (NM_013563.2,926-944).
gaggatctggttactgaat

SEQ ID NO: 631799 - DNA, 19 bp, Mus musculus
  siRNA target sequence for Il2rg (NM_013563.2,963-981).
cctggagtggtgtgtctaa

SEQ ID NO: 631800 - DNA, 19 bp, Mus musculus
  siRNA target sequence for Il2rg (NM_013563.2,964-982).
ctggagtggtgtgtctaaa

SEQ ID NO: 631801 - DNA, 19 bp, Mus musculus
  siRNA target sequence for Il3ra (NM_008369.1,460-478).
gttccccccagatgatgat

SEQ ID NO: 631802 - DNA, 19 bp, Mus musculus
  siRNA target sequence for Il3ra (NM_008369.1,548-566).
gagcggggtccgaaagcaa

SEQ ID NO: 631803 - DNA, 19 bp, Mus musculus
  siRNA target sequence for Il3ra (NM_008369.1,575-593).
gtgcactaccggatgttct

SEQ ID NO: 631804 - DNA, 19 bp, Mus musculus
  siRNA target sequence for Il4ra (NM_010557.1,492-510).
gtgtgccacatggaaatga

SEQ ID NO: 631805 - DNA, 19 bp, Mus musculus
  siRNA target sequence for Il4ra (NM_010557.1,494-512).
gtgccacatggaaatgaat

SEQ ID NO: 631806 - DNA, 19 bp, Mus musculus
  siRNA target sequence for Il4ra (NM_010557.1,517-535).
cggtccaatcagacagata

SEQ ID NO: 631807 - DNA, 19 bp, Mus musculus
  siRNA target sequence for Il4ra (NM_010557.1,655-673).
ggctgctgacctggaataa

SEQ ID NO: 631808 - DNA, 19 bp, Mus musculus
  siRNA target sequence for Il4ra (NM_010557.1,675-693).
ctgtacccatcgaacaact

SEQ ID NO: 631809 - DNA, 19 bp, Mus musculus
  siRNA target sequence for Il4ra (NM_010557.1,677-695).
gtacccatcgaacaactta

SEQ ID NO: 631810 - DNA, 19 bp, Mus musculus
  siRNA target sequence for Il4ra (NM_010557.1,681-699).
ccatcgaacaacttactgt

SEQ ID NO: 631811 - DNA, 19 bp, Mus musculus
  siRNA target sequence for Il4ra (NM_010557.1,682-700).
catcgaacaacttactgta

SEQ ID NO: 631812 - DNA, 19 bp, Mus musculus
  siRNA target sequence for Il4ra (NM_010557.1,685-703).
cgaacaacttactgtacaa

SEQ ID NO: 631813 - DNA, 19 bp, Mus musculus
  siRNA target sequence for Il4ra (NM_010557.1,740-758).
caaccctgcagaattcata

SEQ ID NO: 631814 - DNA, 19 bp, Mus musculus
  siRNA target sequence for Il4ra (NM_010557.1,744-762).
cctgcagaattcatagtct

SEQ ID NO: 631815 - DNA, 19 bp, Mus musculus
  siRNA target sequence for Il4ra (NM_010557.1,745-763).
ctgcagaattcatagtcta

SEQ ID NO: 631816 - DNA, 19 bp, Mus musculus
  siRNA target sequence for Il4ra (NM_010557.1,747-765).
gcagaattcatagtctata

SEQ ID NO: 631817 - DNA, 19 bp, Mus musculus
  siRNA target sequence for Il4ra (NM_010557.1,789-807).
ctgagcttcccgatcaaca

SEQ ID NO: 631818 - DNA, 19 bp, Mus musculus
  siRNA target sequence for Il4ra (NM_010557.1,898-916).
cgtggtacaacccaagtaa

SEQ ID NO: 631819 - DNA, 19 bp, Mus musculus
  siRNA target sequence for Il4ra (NM_010557.1,899-917).
gtggtacaacccaagtaat

SEQ ID NO: 631820 - DNA, 19 bp, Mus musculus
  siRNA target sequence for Il4ra (NM_010557.1,901-919).
ggtacaacccaagtaatga

SEQ ID NO: 631821 - DNA, 19 bp, Mus musculus
  siRNA target sequence for Il5ra (NM_008370.1,305-323).
ggtgcctgtgttactaatt

SEQ ID NO: 631822 - DNA, 19 bp, Mus musculus
  siRNA target sequence for Il5ra (NM_008370.1,352-370).
ctgacttacttaatcacaa

SEQ ID NO: 631823 - DNA, 19 bp, Mus musculus
  siRNA target sequence for Il5ra (NM_008370.1,381-399).
cttctaccacctgtcaatt

SEQ ID NO: 631824 - DNA, 19 bp, Mus musculus
  siRNA target sequence for Il5ra (NM_008370.1,384-402).
ctaccacctgtcaatttta

SEQ ID NO: 631825 - DNA, 19 bp, Mus musculus
  siRNA target sequence for Il5ra (NM_008370.1,387-405).
ccacctgtcaattttacca

SEQ ID NO: 631826 - DNA, 19 bp, Mus musculus
  siRNA target sequence for Il5ra (NM_008370.1,388-406).
cacctgtcaattttaccat

SEQ ID NO: 631827 - DNA, 19 bp, Mus musculus
  siRNA target sequence for Il5ra (NM_008370.1,390-408).
cctgtcaattttaccatta

SEQ ID NO: 631828 - DNA, 19 bp, Mus musculus
  siRNA target sequence for Il5ra (NM_008370.1,404-422).
cattaaagccactggatta

SEQ ID NO: 631829 - DNA, 19 bp, Mus musculus
  siRNA target sequence for Il5ra (NM_008370.1,413-431).
cactggattagctcaagtt

SEQ ID NO: 631830 - DNA, 19 bp, Mus musculus
  siRNA target sequence for Il5ra (NM_008370.1,415-433).
ctggattagctcaagttct

SEQ ID NO: 631831 - DNA, 19 bp, Mus musculus
  siRNA target sequence for Il5ra (NM_008370.1,418-436).
gattagctcaagttctttt

SEQ ID NO: 631832 - DNA, 19 bp, Mus musculus
  siRNA target sequence for Il5ra (NM_008370.1,423-441).
gctcaagttcttttacact

SEQ ID NO: 631833 - DNA, 19 bp, Mus musculus
  siRNA target sequence for Il5ra (NM_008370.1,469-487).
ggcatgttgatctagagta

SEQ ID NO: 631834 - DNA, 19 bp, Mus musculus
  siRNA target sequence for Il5ra (NM_008370.1,470-488).
gcatgttgatctagagtat

SEQ ID NO: 631835 - DNA, 19 bp, Mus musculus
  siRNA target sequence for Il5ra (NM_008370.1,480-498).
ctagagtatcacgtgaaaa

SEQ ID NO: 631836 - DNA, 19 bp, Mus musculus
  siRNA target sequence for Il5ra (NM_008370.1,483-501).
gagtatcacgtgaaaataa

SEQ ID NO: 631837 - DNA, 19 bp, Mus musculus
  siRNA target sequence for Il5ra (NM_008370.1,485-503).
gtatcacgtgaaaataaat

SEQ ID NO: 631838 - DNA, 19 bp, Mus musculus
  siRNA target sequence for Il5ra (NM_008370.1,510-528).
caagaagacgaatatgata

SEQ ID NO: 631839 - DNA, 19 bp, Mus musculus
  siRNA target sequence for Il5ra (NM_008370.1,667-685).
ctggaacctcggttacgaa

SEQ ID NO: 631840 - DNA, 19 bp, Mus musculus
  siRNA target sequence for Il5ra (NM_008370.1,669-687).
ggaacctcggttacgaatt

SEQ ID NO: 631841 - DNA, 19 bp, Mus musculus
  siRNA target sequence for Il5ra (NM_008370.1,670-688).
gaacctcggttacgaattt

SEQ ID NO: 631842 - DNA, 19 bp, Mus musculus
  siRNA target sequence for Il5ra (NM_008370.1,674-692).
ctcggttacgaatttaact

SEQ ID NO: 631843 - DNA, 19 bp, Mus musculus
  siRNA target sequence for Il5ra (NM_008370.1,677-695).
ggttacgaatttaacttgt

SEQ ID NO: 631844 - DNA, 19 bp, Mus musculus
  siRNA target sequence for Il5ra (NM_008370.1,678-696).
gttacgaatttaacttgta

SEQ ID NO: 631845 - DNA, 19 bp, Mus musculus
  siRNA target sequence for Il5ra (NM_008370.1,788-806).
ggacacacagtatttccta

SEQ ID NO: 631846 - DNA, 19 bp, Mus musculus
  siRNA target sequence for Il5ra (NM_008370.1,789-807).
gacacacagtatttcctat

SEQ ID NO: 631847 - DNA, 19 bp, Mus musculus
  siRNA target sequence for Il5ra (NM_008370.1,883-901).
ggtttcccaggacatttat

SEQ ID NO: 631848 - DNA, 19 bp, Mus musculus
  siRNA target sequence for Il5ra (NM_008370.1,949-967).
gcaagcgtgctgcaatcaa

SEQ ID NO: 631849 - DNA, 19 bp, Mus musculus
  siRNA target sequence for Il5ra (NM_008370.1,961-979).
caatcaagccctttgatca

SEQ ID NO: 631850 - DNA, 19 bp, Mus musculus
  siRNA target sequence for Il5ra (NM_008370.1,1064-1082).
gtgggagaaaccactttct

SEQ ID NO: 631851 - DNA, 19 bp, Mus musculus
  siRNA target sequence for Il5ra (NM_008370.1,1089-1107).
ccagatcattgctttaact

SEQ ID NO: 631852 - DNA, 19 bp, Mus musculus
  siRNA target sequence for Il5ra (NM_008370.1,1090-1108).
cagatcattgctttaacta

SEQ ID NO: 631853 - DNA, 19 bp, Mus musculus
  siRNA target sequence for Il5ra (NM_008370.1,1164-1182).
gccaataagttcatctcaa

SEQ ID NO: 631854 - DNA, 19 bp, Mus musculus
  siRNA target sequence for Il5ra (NM_008370.1,1261-1279).
gcgagtggagtcaacctat

SEQ ID NO: 631855 - DNA, 19 bp, Mus musculus
  siRNA target sequence for Il5ra (NM_008370.1,1262-1280).
cgagtggagtcaacctatt

SEQ ID NO: 631856 - DNA, 19 bp, Mus musculus
  siRNA target sequence for Il5ra (NM_008370.1,1267-1285).
ggagtcaacctatttatgt

SEQ ID NO: 631857 - DNA, 19 bp, Mus musculus
  siRNA target sequence for Il5ra (NM_008370.1,1341-1359).
gcctgcttcgtcttgttaa

SEQ ID NO: 631858 - DNA, 19 bp, Mus musculus
  siRNA target sequence for Il5ra (NM_008370.1,1342-1360).
cctgcttcgtcttgttaat

SEQ ID NO: 631859 - DNA, 19 bp, Mus musculus
  siRNA target sequence for Il5ra (NM_008370.1,1345-1363).
gcttcgtcttgttaatctt

SEQ ID NO: 631860 - DNA, 19 bp, Mus musculus
  siRNA target sequence for Il5ra (NM_008370.1,1445-1463).
ccctgtggttactgaatat

SEQ ID NO: 631861 - DNA, 19 bp, Mus musculus
  siRNA target sequence for Il5ra (NM_008370.1,1484-1502).
caaaattgaagttgtacat

SEQ ID NO: 631862 - DNA, 19 bp, Mus musculus
  siRNA target sequence for Il5ra (NM_008370.1,1504-1522).
gtgtggaagaggttggatt

SEQ ID NO: 631863 - DNA, 19 bp, Mus musculus
  siRNA target sequence for Il6ra (NM_010559.1,124-142).
gccaccgttaccctgattt

SEQ ID NO: 631864 - DNA, 19 bp, Mus musculus
  siRNA target sequence for Il6ra (NM_010559.1,184-202).
gtgtactctggctcacaaa

SEQ ID NO: 631865 - DNA, 19 bp, Mus musculus
  siRNA target sequence for Il6ra (NM_010559.1,257-275).
gcgacactggggactattt

SEQ ID NO: 631866 - DNA, 19 bp, Mus musculus
  siRNA target sequence for Il6ra (NM_010559.1,258-276).
cgacactggggactattta

SEQ ID NO: 631867 - DNA, 19 bp, Mus musculus
  siRNA target sequence for Il6ra (NM_010559.1,480-498).
ggtgccctgccagtattct

SEQ ID NO: 631868 - DNA, 19 bp, Mus musculus
  siRNA target sequence for Il6ra (NM_010559.1,531-549).
gatcctggagggtgacaaa

SEQ ID NO: 631869 - DNA, 19 bp, Mus musculus
  siRNA target sequence for Il6ra (NM_010559.1,604-622).
cacaacgaagcgtttcaca

SEQ ID NO: 631870 - DNA, 19 bp, Mus musculus
  siRNA target sequence for Il6ra (NM_010559.1,613-631).
gcgtttcacagcttaaaaa

SEQ ID NO: 631871 - DNA, 19 bp, Mus musculus
  siRNA target sequence for Il6ra (NM_010559.1,614-632).
cgtttcacagcttaaaaat

SEQ ID NO: 631872 - DNA, 19 bp, Mus musculus
  siRNA target sequence for Il6ra (NM_010559.1,722-740).
cctgggacccgagttacta

SEQ ID NO: 631873 - DNA, 19 bp, Mus musculus
  siRNA target sequence for Il6ra (NM_010559.1,725-743).
gggacccgagttactactt

SEQ ID NO: 631874 - DNA, 19 bp, Mus musculus
  siRNA target sequence for Il6ra (NM_010559.1,924-942).
cacgggcactccttggata

SEQ ID NO: 631875 - DNA, 19 bp, Mus musculus
  siRNA target sequence for Il6ra (NM_010559.1,1015-1033).
cacgaggatcagtacgaaa

SEQ ID NO: 631876 - DNA, 19 bp, Mus musculus
  siRNA target sequence for Il6ra (NM_010559.1,1018-1036).
gaggatcagtacgaaagtt

SEQ ID NO: 631877 - DNA, 19 bp, Mus musculus
  siRNA target sequence for Il6ra (NM_010559.1,1020-1038).
ggatcagtacgaaagttct

SEQ ID NO: 631878 - DNA, 19 bp, Mus musculus
  siRNA target sequence for Il6ra (NM_010559.1,1021-1039).
gatcagtacgaaagttcta

SEQ ID NO: 631879 - DNA, 19 bp, Mus musculus
  siRNA target sequence for Il6ra (NM_010559.1,1026-1044).
gtacgaaagttctacagaa

SEQ ID NO: 631880 - DNA, 19 bp, Mus musculus
  siRNA target sequence for Il6ra (NM_010559.1,1057-1075).
ctcgccccagtgcaagaat

SEQ ID NO: 631881 - DNA, 19 bp, Mus musculus
  siRNA target sequence for Il6st (NM_010560.2,265-283).
gctagcgcaagctttgctt

SEQ ID NO: 631882 - DNA, 19 bp, Mus musculus
  siRNA target sequence for Il6st (NM_010560.2,270-288).
cgcaagctttgcttttttt

SEQ ID NO: 631883 - DNA, 19 bp, Mus musculus
  siRNA target sequence for Il6st (NM_010560.2,289-307).
cctcaccactgaatctata

SEQ ID NO: 631884 - DNA, 19 bp, Mus musculus
  siRNA target sequence for Il6st (NM_010560.2,292-310).
caccactgaatctataggt

SEQ ID NO: 631885 - DNA, 19 bp, Mus musculus
  siRNA target sequence for Il6st (NM_010560.2,303-321).
ctataggtcaacttttgga

SEQ ID NO: 631886 - DNA, 19 bp, Mus musculus
  siRNA target sequence for Il6st (NM_010560.2,320-338).
gaaccgtgtggttacatct

SEQ ID NO: 631887 - DNA, 19 bp, Mus musculus
  siRNA target sequence for Il6st (NM_010560.2,330-348).
gttacatctaccctgaatt

SEQ ID NO: 631888 - DNA, 19 bp, Mus musculus
  siRNA target sequence for Il6st (NM_010560.2,334-352).
catctaccctgaatttcca

SEQ ID NO: 631889 - DNA, 19 bp, Mus musculus
  siRNA target sequence for Il6st (NM_010560.2,401-419).
gcgtgtctgcagcattact

SEQ ID NO: 631890 - DNA, 19 bp, Mus musculus
  siRNA target sequence for Il6st (NM_010560.2,402-420).
cgtgtctgcagcattacta

SEQ ID NO: 631891 - DNA, 19 bp, Mus musculus
  siRNA target sequence for Il6st (NM_010560.2,574-592).
gatcgagcagaatgtgtat

SEQ ID NO: 631892 - DNA, 19 bp, Mus musculus
  siRNA target sequence for Il6st (NM_010560.2,618-636).
ctccagataaacctacaaa

SEQ ID NO: 631893 - DNA, 19 bp, Mus musculus
  siRNA target sequence for Il6st (NM_010560.2,623-641).
gataaacctacaaatttga

SEQ ID NO: 631894 - DNA, 19 bp, Mus musculus
  siRNA target sequence for Il6st (NM_010560.2,694-712).
ggagacttaccttgaaaca

SEQ ID NO: 631895 - DNA, 19 bp, Mus musculus
  siRNA target sequence for Il6st (NM_010560.2,707-725).
gaaacaaactacactttga

SEQ ID NO: 631896 - DNA, 19 bp, Mus musculus
  siRNA target sequence for Il6st (NM_010560.2,801-819).
ccacctattatgtcaacat

SEQ ID NO: 631897 - DNA, 19 bp, Mus musculus
  siRNA target sequence for Il6st (NM_010560.2,859-877).
ctcctcagagtctatcaat

SEQ ID NO: 631898 - DNA, 19 bp, Mus musculus
  siRNA target sequence for Il6st (NM_010560.2,864-882).
cagagtctatcaattttga

SEQ ID NO: 631899 - DNA, 19 bp, Mus musculus
  siRNA target sequence for Il6st (NM_010560.2,883-901).
ccccgtggataaagtgaaa

SEQ ID NO: 631900 - DNA, 19 bp, Mus musculus
  siRNA target sequence for Il6st (NM_010560.2,904-922).
caccccaccatataattta

SEQ ID NO: 631901 - DNA, 19 bp, Mus musculus
  siRNA target sequence for Il6st (NM_010560.2,907-925).
cccaccatataatttatca

SEQ ID NO: 631902 - DNA, 19 bp, Mus musculus
  siRNA target sequence for Il6st (NM_010560.2,928-946).
gaccaactcagaagaatta

SEQ ID NO: 631903 - DNA, 19 bp, Mus musculus
  siRNA target sequence for Il6st (NM_010560.2,978-996).
cagggctgggcggtctttt

SEQ ID NO: 631904 - DNA, 19 bp, Mus musculus
  siRNA target sequence for Il6st (NM_010560.2,981-999).
ggctgggcggtcttttaga

SEQ ID NO: 631905 - DNA, 19 bp, Mus musculus
  siRNA target sequence for Il6st (NM_010560.2,982-1000).
gctgggcggtcttttagat

SEQ ID NO: 631906 - DNA, 19 bp, Mus musculus
  siRNA target sequence for Il6st (NM_010560.2,985-1003).
gggcggtcttttagatcta

SEQ ID NO: 631907 - DNA, 19 bp, Mus musculus
  siRNA target sequence for Il6st (NM_010560.2,986-1004).
ggcggtcttttagatctaa

SEQ ID NO: 631908 - DNA, 19 bp, Mus musculus
  siRNA target sequence for Il6st (NM_010560.2,987-1005).
gcggtcttttagatctaaa

SEQ ID NO: 631909 - DNA, 19 bp, Mus musculus
  siRNA target sequence for Il6st (NM_010560.2,1015-1033).
ccaatataggaccaaagat

SEQ ID NO: 631910 - DNA, 19 bp, Mus musculus
  siRNA target sequence for Il6st (NM_010560.2,1052-1070).
gtccctcttgaagatacaa

SEQ ID NO: 631911 - DNA, 19 bp, Mus musculus
  siRNA target sequence for Il6st (NM_010560.2,1223-1241).
ccaccaagtttctggtata

SEQ ID NO: 631912 - DNA, 19 bp, Mus musculus
  siRNA target sequence for Il6st (NM_010560.2,1224-1242).
caccaagtttctggtataa

SEQ ID NO: 631913 - DNA, 19 bp, Mus musculus
  siRNA target sequence for Il6st (NM_010560.2,1226-1244).
ccaagtttctggtataaga

SEQ ID NO: 631914 - DNA, 19 bp, Mus musculus
  siRNA target sequence for Il6st (NM_010560.2,1234-1252).
ctggtataagacaaatcca

SEQ ID NO: 631915 - DNA, 19 bp, Mus musculus
  siRNA target sequence for Il6st (NM_010560.2,1251-1269).
catcccatgggcaggaata

SEQ ID NO: 631916 - DNA, 19 bp, Mus musculus
  siRNA target sequence for Il6st (NM_010560.2,1255-1273).
ccatgggcaggaatataga

SEQ ID NO: 631917 - DNA, 19 bp, Mus musculus
  siRNA target sequence for Il6st (NM_010560.2,1256-1274).
catgggcaggaatatagat

SEQ ID NO: 631918 - DNA, 19 bp, Mus musculus
  siRNA target sequence for Il6st (NM_010560.2,1275-1293).
ctgtacggctcatatggaa

SEQ ID NO: 631919 - DNA, 19 bp, Mus musculus
  siRNA target sequence for Il6st (NM_010560.2,1294-1312).
ggcactgcctctttctgaa

SEQ ID NO: 631920 - DNA, 19 bp, Mus musculus
  siRNA target sequence for Il6st (NM_010560.2,1321-1339).
gaaaatcttggattatgaa

SEQ ID NO: 631921 - DNA, 19 bp, Mus musculus
  siRNA target sequence for Il6st (NM_010560.2,1330-1348).
ggattatgaagtgattctt

SEQ ID NO: 631922 - DNA, 19 bp, Mus musculus
  siRNA target sequence for Il6st (NM_010560.2,1394-1412).
gagctgaccgtgaatctca

SEQ ID NO: 631923 - DNA, 19 bp, Mus musculus
  siRNA target sequence for Il6st (NM_010560.2,1495-1513).
ccacgtcacagctgcttat

SEQ ID NO: 631924 - DNA, 19 bp, Mus musculus
  siRNA target sequence for Il6st (NM_010560.2,1496-1514).
cacgtcacagctgcttatt

SEQ ID NO: 631925 - DNA, 19 bp, Mus musculus
  siRNA target sequence for Il6st (NM_010560.2,1506-1524).
ctgcttattctgtagtgaa

SEQ ID NO: 631926 - DNA, 19 bp, Mus musculus
  siRNA target sequence for Il6st (NM_010560.2,1583-1601).
cccgtgagcaagtacatct

SEQ ID NO: 631927 - DNA, 19 bp, Mus musculus
  siRNA target sequence for Il6st (NM_010560.2,1584-1602).
ccgtgagcaagtacatctt

SEQ ID NO: 631928 - DNA, 19 bp, Mus musculus
  siRNA target sequence for Il6st (NM_010560.2,1585-1603).
cgtgagcaagtacatctta

SEQ ID NO: 631929 - DNA, 19 bp, Mus musculus
  siRNA target sequence for Il6st (NM_010560.2,1624-1642).
gaacgcaccctgtgttgaa

SEQ ID NO: 631930 - DNA, 19 bp, Mus musculus
  siRNA target sequence for Il6st (NM_010560.2,1705-1723).
caagtgctatcaaatcaca

SEQ ID NO: 631931 - DNA, 19 bp, Mus musculus
  siRNA target sequence for Il6st (NM_010560.2,1805-1823).
ccgactgttcggacaaaga

SEQ ID NO: 631932 - DNA, 19 bp, Mus musculus
  siRNA target sequence for Il6st (NM_010560.2,1806-1824).
cgactgttcggacaaagaa

SEQ ID NO: 631933 - DNA, 19 bp, Mus musculus
  siRNA target sequence for Il6st (NM_010560.2,1807-1825).
gactgttcggacaaagaaa

SEQ ID NO: 631934 - DNA, 19 bp, Mus musculus
  siRNA target sequence for Il6st (NM_010560.2,1883-1901).
ggcttcattagaaactact

SEQ ID NO: 631935 - DNA, 19 bp, Mus musculus
  siRNA target sequence for Il6st (NM_010560.2,1893-1911).
gaaactactccatatctta

SEQ ID NO: 631936 - DNA, 19 bp, Mus musculus
  siRNA target sequence for Il6st (NM_010560.2,1897-1915).
ctactccatatcttacaga

SEQ ID NO: 631937 - DNA, 19 bp, Mus musculus
  siRNA target sequence for Il6st (NM_010560.2,1980-1998).
ctctgagtagtgatacgtt

SEQ ID NO: 631938 - DNA, 19 bp, Mus musculus
  siRNA target sequence for Il6st (NM_010560.2,1986-2004).
gtagtgatacgttgtacat

SEQ ID NO: 631939 - DNA, 19 bp, Mus musculus
  siRNA target sequence for Il6st (NM_010560.2,2048-2066).
ccggaattcacttttacaa

SEQ ID NO: 631940 - DNA, 19 bp, Mus musculus
  siRNA target sequence for Il6st (NM_010560.2,2058-2076).
cttttacaacaccaaagtt

SEQ ID NO: 631941 - DNA, 19 bp, Mus musculus
  siRNA target sequence for Il6st (NM_010560.2,2250-2268).
ccccaaggcacaattttaa

SEQ ID NO: 631942 - DNA, 19 bp, Mus musculus
  siRNA target sequence for Il6st (NM_010560.2,2287-2305).
ctcggacggcaatttcact

SEQ ID NO: 631943 - DNA, 19 bp, Mus musculus
  siRNA target sequence for Il6st (NM_010560.2,2294-2312).
ggcaatttcactgatgtaa

SEQ ID NO: 631944 - DNA, 19 bp, Mus musculus
  siRNA target sequence for Il6st (NM_010560.2,2709-2727).
cctgtccagagatttcaca

SEQ ID NO: 631945 - DNA, 19 bp, Mus musculus
  siRNA target sequence for Il6st (NM_010560.2,2754-2772).
ccggcaatgaggaggattt

SEQ ID NO: 631946 - DNA, 19 bp, Mus musculus
  siRNA target sequence for Il6st (NM_010560.2,2916-2934).
gaatggagaccacaattga

SEQ ID NO: 631947 - DNA, 19 bp, Mus musculus
  siRNA target sequence for Il6st (NM_010560.2,2923-2941).
gaccacaattgatgaagaa

SEQ ID NO: 631948 - DNA, 19 bp, Mus musculus
  siRNA target sequence for Il7r (NM_008372.2,61-79).
gtagagctttcgctatagt

SEQ ID NO: 631949 - DNA, 19 bp, Mus musculus
  siRNA target sequence for Il7r (NM_008372.2,64-82).
gagctttcgctatagtttt

SEQ ID NO: 631950 - DNA, 19 bp, Mus musculus
  siRNA target sequence for Il7r (NM_008372.2,66-84).
gctttcgctatagttttct

SEQ ID NO: 631951 - DNA, 19 bp, Mus musculus
  siRNA target sequence for Il7r (NM_008372.2,189-207).
gtggatggaagtcaacatt

SEQ ID NO: 631952 - DNA, 19 bp, Mus musculus
  siRNA target sequence for Il7r (NM_008372.2,272-290).
ggctcttttacgagtgaaa

SEQ ID NO: 631953 - DNA, 19 bp, Mus musculus
  siRNA target sequence for Il7r (NM_008372.2,273-291).
gctcttttacgagtgaaat

SEQ ID NO: 631954 - DNA, 19 bp, Mus musculus
  siRNA target sequence for Il7r (NM_008372.2,300-318).
cttaacaagctgcaagata

SEQ ID NO: 631955 - DNA, 19 bp, Mus musculus
  siRNA target sequence for Il7r (NM_008372.2,348-366).
ctgattggtagcagcaata

SEQ ID NO: 631956 - DNA, 19 bp, Mus musculus
  siRNA target sequence for Il7r (NM_008372.2,370-388).
gtgtgaagcttggacaaaa

SEQ ID NO: 631957 - DNA, 19 bp, Mus musculus
  siRNA target sequence for Il7r (NM_008372.2,377-395).
gcttggacaaaagaattta

SEQ ID NO: 631958 - DNA, 19 bp, Mus musculus
  siRNA target sequence for Il7r (NM_008372.2,381-399).
ggacaaaagaatttaactt

SEQ ID NO: 631959 - DNA, 19 bp, Mus musculus
  siRNA target sequence for Il7r (NM_008372.2,410-428).
ggctataaacacaatagtt

SEQ ID NO: 631960 - DNA, 19 bp, Mus musculus
  siRNA target sequence for Il7r (NM_008372.2,445-463).
ctgacctgaaagtcgttta

SEQ ID NO: 631961 - DNA, 19 bp, Mus musculus
  siRNA target sequence for Il7r (NM_008372.2,578-596).
ctggacgcatgtatcttta

SEQ ID NO: 631962 - DNA, 19 bp, Mus musculus
  siRNA target sequence for Il7r (NM_008372.2,580-598).
ggacgcatgtatctttatt

SEQ ID NO: 631963 - DNA, 19 bp, Mus musculus
  siRNA target sequence for Il7r (NM_008372.2,583-601).
cgcatgtatctttattcca

SEQ ID NO: 631964 - DNA, 19 bp, Mus musculus
  siRNA target sequence for Il7r (NM_008372.2,623-641).
gagaaaactacgaccaaaa

SEQ ID NO: 631965 - DNA, 19 bp, Mus musculus
  siRNA target sequence for Il7r (NM_008372.2,664-682).
gatccattccccataacga

SEQ ID NO: 631966 - DNA, 19 bp, Mus musculus
  siRNA target sequence for Il7r (NM_008372.2,667-685).
ccattccccataacgatta

SEQ ID NO: 631967 - DNA, 19 bp, Mus musculus
  siRNA target sequence for Il7r (NM_008372.2,673-691).
cccataacgattacttcaa

SEQ ID NO: 631968 - DNA, 19 bp, Mus musculus
  siRNA target sequence for Il7r (NM_008372.2,704-722).
cgagtggagtccaagttct

SEQ ID NO: 631969 - DNA, 19 bp, Mus musculus
  siRNA target sequence for Il7r (NM_008372.2,705-723).
gagtggagtccaagttcta

SEQ ID NO: 631970 - DNA, 19 bp, Mus musculus
  siRNA target sequence for Il7r (NM_008372.2,826-844).
cccatgtgctatggaaaaa

SEQ ID NO: 631971 - DNA, 19 bp, Mus musculus
  siRNA target sequence for Il7r (NM_008372.2,827-845).
ccatgtgctatggaaaaaa

SEQ ID NO: 631972 - DNA, 19 bp, Mus musculus
  siRNA target sequence for Il7r (NM_008372.2,867-885).
cctagtctccccgatcata

SEQ ID NO: 631973 - DNA, 19 bp, Mus musculus
  siRNA target sequence for Il7r (NM_008372.2,868-886).
ctagtctccccgatcataa

SEQ ID NO: 631974 - DNA, 19 bp, Mus musculus
  siRNA target sequence for Il7r (NM_008372.2,871-889).
gtctccccgatcataagaa

SEQ ID NO: 631975 - DNA, 19 bp, Mus musculus
  siRNA target sequence for Il7r (NM_008372.2,873-891).
ctccccgatcataagaaaa

SEQ ID NO: 631976 - DNA, 19 bp, Mus musculus
  siRNA target sequence for Il7r (NM_008372.2,875-893).
ccccgatcataagaaaact

SEQ ID NO: 631977 - DNA, 19 bp, Mus musculus
  siRNA target sequence for Il7r (NM_008372.2,877-895).
ccgatcataagaaaactct

SEQ ID NO: 631978 - DNA, 19 bp, Mus musculus
  siRNA target sequence for Il7r (NM_008372.2,894-912).
ctggaacaactatgtaaga

SEQ ID NO: 631979 - DNA, 19 bp, Mus musculus
  siRNA target sequence for Il7r (NM_008372.2,922-940).
cgagtctgaatgtgagttt

SEQ ID NO: 631980 - DNA, 19 bp, Mus musculus
  siRNA target sequence for Il7r (NM_008372.2,956-974).
cctggactgccagattcat

SEQ ID NO: 631981 - DNA, 19 bp, Mus musculus
  siRNA target sequence for Il7r (NM_008372.2,1150-1168).
gatgcctggctagaaatct

SEQ ID NO: 631982 - DNA, 19 bp, Mus musculus
  siRNA target sequence for Il7r (NM_008372.2,1237-1255).
ggcctcctgtgtatcaaga

SEQ ID NO: 631983 - DNA, 19 bp, Mus musculus
  siRNA target sequence for Il7r (NM_008372.2,1262-1280).
gccaaactctggaaacaca

SEQ ID NO: 631984 - DNA, 19 bp, Mus musculus
  siRNA target sequence for Il7r (NM_008372.2,1361-1379).
cacttcctcagtactgaat

SEQ ID NO: 631985 - DNA, 19 bp, Mus musculus
  siRNA target sequence for Il7r (NM_008372.2,1380-1398).
caagaagaagcgtatgtca

SEQ ID NO: 631986 - DNA, 19 bp, Mus musculus
  siRNA target sequence for Il9r (NM_008374.1,165-183).
cctgtctcagcaacagtat

SEQ ID NO: 631987 - DNA, 19 bp, Mus musculus
  siRNA target sequence for Il9r (NM_008374.1,255-273).
gtaaccaggtgactgaaat

SEQ ID NO: 631988 - DNA, 19 bp, Mus musculus
  siRNA target sequence for Il9r (NM_008374.1,326-344).
gaggaggtgttcttacctt

SEQ ID NO: 631989 - DNA, 19 bp, Mus musculus
  siRNA target sequence for Il9r (NM_008374.1,328-346).
ggaggtgttcttacctttt

SEQ ID NO: 631990 - DNA, 19 bp, Mus musculus
  siRNA target sequence for Il9r (NM_008374.1,423-441).
ccaggagacacatcaagtt

SEQ ID NO: 631991 - DNA, 19 bp, Mus musculus
  siRNA target sequence for Il9r (NM_008374.1,515-533).
ctggagccattgatcacat

SEQ ID NO: 631992 - DNA, 19 bp, Mus musculus
  siRNA target sequence for Il9r (NM_008374.1,586-604).
gcacaaggaccgtatcgtt

SEQ ID NO: 631993 - DNA, 19 bp, Mus musculus
  siRNA target sequence for Il9r (NM_008374.1,668-686).
ctgcgtgtccagatgactt

SEQ ID NO: 631994 - DNA, 19 bp, Mus musculus
  siRNA target sequence for Il9r (NM_008374.1,703-721).
caagacagagggggaatat

SEQ ID NO: 631995 - DNA, 19 bp, Mus musculus
  siRNA target sequence for Il9r (NM_008374.1,706-724).
gacagagggggaatattat

SEQ ID NO: 631996 - DNA, 19 bp, Mus musculus
  siRNA target sequence for Il9r (NM_008374.1,708-726).
cagagggggaatattataa

SEQ ID NO: 631997 - DNA, 19 bp, Mus musculus
  siRNA target sequence for Il9r (NM_008374.1,710-728).
gagggggaatattataaga

SEQ ID NO: 631998 - DNA, 19 bp, Mus musculus
  siRNA target sequence for Il9r (NM_008374.1,816-834).
ccagcatccttgtagttgt

SEQ ID NO: 631999 - DNA, 19 bp, Mus musculus
  siRNA target sequence for Il9r (NM_008374.1,891-909).
ggctgaagagaatctttta

SEQ ID NO: 632000 - DNA, 19 bp, Mus musculus
  siRNA target sequence for Il9r (NM_008374.1,1018-1036).
gaatggtgtcagtacttca

SEQ ID NO: 632001 - DNA, 19 bp, Mus musculus
  siRNA target sequence for Il9r (NM_008374.1,1070-1088).
gtcgccacactcacctata

SEQ ID NO: 632002 - DNA, 19 bp, Mus musculus
  siRNA target sequence for Il9r (NM_008374.1,1284-1302).
gcagcagcgactattgcat

SEQ ID NO: 632003 - DNA, 19 bp, Mus musculus
  siRNA target sequence for Lifr (NM_013584.1,100-118).
catcgtggatggtagacaa

SEQ ID NO: 632004 - DNA, 19 bp, Mus musculus
  siRNA target sequence for Lifr (NM_013584.1,103-121).
cgtggatggtagacaataa

SEQ ID NO: 632005 - DNA, 19 bp, Mus musculus
  siRNA target sequence for Lifr (NM_013584.1,281-299).
ggtcagccctggaactgtt

SEQ ID NO: 632006 - DNA, 19 bp, Mus musculus
  siRNA target sequence for Lifr (NM_013584.1,289-307).
ctggaactgttaaagatat

SEQ ID NO: 632007 - DNA, 19 bp, Mus musculus
  siRNA target sequence for Lifr (NM_013584.1,336-354).
cacccattagagacaacaa

SEQ ID NO: 632008 - DNA, 19 bp, Mus musculus
  siRNA target sequence for Lifr (NM_013584.1,345-363).
gagacaacaaacgttaaaa

SEQ ID NO: 632009 - DNA, 19 bp, Mus musculus
  siRNA target sequence for Lifr (NM_013584.1,382-400).
gtgatcacgaagtcacaat

SEQ ID NO: 632010 - DNA, 19 bp, Mus musculus
  siRNA target sequence for Lifr (NM_013584.1,384-402).
gatcacgaagtcacaataa

SEQ ID NO: 632011 - DNA, 19 bp, Mus musculus
  siRNA target sequence for Lifr (NM_013584.1,387-405).
cacgaagtcacaataaatt

SEQ ID NO: 632012 - DNA, 19 bp, Mus musculus
  siRNA target sequence for Lifr (NM_013584.1,389-407).
cgaagtcacaataaattat

SEQ ID NO: 632013 - DNA, 19 bp, Mus musculus
  siRNA target sequence for Lifr (NM_013584.1,414-432).
ggctttcagagtaaattca

SEQ ID NO: 632014 - DNA, 19 bp, Mus musculus
  siRNA target sequence for Lifr (NM_013584.1,424-442).
gtaaattcacgttgaatga

SEQ ID NO: 632015 - DNA, 19 bp, Mus musculus
  siRNA target sequence for Lifr (NM_013584.1,500-518).
cttcacctcctccttacta

SEQ ID NO: 632016 - DNA, 19 bp, Mus musculus
  siRNA target sequence for Lifr (NM_013584.1,565-583).
ccacctgggagattaaggt

SEQ ID NO: 632017 - DNA, 19 bp, Mus musculus
  siRNA target sequence for Lifr (NM_013584.1,607-625).
cagtagcactcgtgttact

SEQ ID NO: 632018 - DNA, 19 bp, Mus musculus
  siRNA target sequence for Lifr (NM_013584.1,609-627).
gtagcactcgtgttactca

SEQ ID NO: 632019 - DNA, 19 bp, Mus musculus
  siRNA target sequence for Lifr (NM_013584.1,702-720).
cactcggtgagcattcgat

SEQ ID NO: 632020 - DNA, 19 bp, Mus musculus
  siRNA target sequence for Lifr (NM_013584.1,712-730).
gcattcgatggcacattga

SEQ ID NO: 632021 - DNA, 19 bp, Mus musculus
  siRNA target sequence for Lifr (NM_013584.1,785-803).
catctcctggatacgtaat

SEQ ID NO: 632022 - DNA, 19 bp, Mus musculus
  siRNA target sequence for Lifr (NM_013584.1,837-855).
gtgctcgcaggctcaaaca

SEQ ID NO: 632023 - DNA, 19 bp, Mus musculus
  siRNA target sequence for Lifr (NM_013584.1,840-858).
ctcgcaggctcaaacatga

SEQ ID NO: 632024 - DNA, 19 bp, Mus musculus
  siRNA target sequence for Lifr (NM_013584.1,916-934).
gtcctctcatccatctgta

SEQ ID NO: 632025 - DNA, 19 bp, Mus musculus
  siRNA target sequence for Lifr (NM_013584.1,939-957).
caaaccgttgcgatccata

SEQ ID NO: 632026 - DNA, 19 bp, Mus musculus
  siRNA target sequence for Lifr (NM_013584.1,943-961).
ccgttgcgatccatatcct

SEQ ID NO: 632027 - DNA, 19 bp, Mus musculus
  siRNA target sequence for Lifr (NM_013584.1,949-967).
cgatccatatcctgaacat

SEQ ID NO: 632028 - DNA, 19 bp, Mus musculus
  siRNA target sequence for Lifr (NM_013584.1,985-1003).
gtggcacaaacatcatttt

SEQ ID NO: 632029 - DNA, 19 bp, Mus musculus
  siRNA target sequence for Lifr (NM_013584.1,1137-1155).
ctggtgggcccacgaaata

SEQ ID NO: 632030 - DNA, 19 bp, Mus musculus
  siRNA target sequence for Lifr (NM_013584.1,1139-1157).
ggtgggcccacgaaataca

SEQ ID NO: 632031 - DNA, 19 bp, Mus musculus
  siRNA target sequence for Lifr (NM_013584.1,1142-1160).
gggcccacgaaatacagaa

SEQ ID NO: 632032 - DNA, 19 bp, Mus musculus
  siRNA target sequence for Lifr (NM_013584.1,1143-1161).
ggcccacgaaatacagaat

SEQ ID NO: 632033 - DNA, 19 bp, Mus musculus
  siRNA target sequence for Lifr (NM_013584.1,1156-1174).
cagaatacaccctgtttga

SEQ ID NO: 632034 - DNA, 19 bp, Mus musculus
  siRNA target sequence for Lifr (NM_013584.1,1163-1181).
caccctgtttgaaagcatt

SEQ ID NO: 632035 - DNA, 19 bp, Mus musculus
  siRNA target sequence for Lifr (NM_013584.1,1207-1225).
ggattgaaggacttacaaa

SEQ ID NO: 632036 - DNA, 19 bp, Mus musculus
  siRNA target sequence for Lifr (NM_013584.1,1237-1255).
ggttaggcgtgcaaatgca

SEQ ID NO: 632037 - DNA, 19 bp, Mus musculus
  siRNA target sequence for Lifr (NM_013584.1,1238-1256).
gttaggcgtgcaaatgcat

SEQ ID NO: 632038 - DNA, 19 bp, Mus musculus
  siRNA target sequence for Lifr (NM_013584.1,1263-1281).
caagaaatccataacttca

SEQ ID NO: 632039 - DNA, 19 bp, Mus musculus
  siRNA target sequence for Lifr (NM_013584.1,1316-1334).
gtcagcagtggtcatcaat

SEQ ID NO: 632040 - DNA, 19 bp, Mus musculus
  siRNA target sequence for Lifr (NM_013584.1,1320-1338).
gcagtggtcatcaatgtga

SEQ ID NO: 632041 - DNA, 19 bp, Mus musculus
  siRNA target sequence for Lifr (NM_013584.1,1343-1361).
gagagttgctcctcatgat

SEQ ID NO: 632042 - DNA, 19 bp, Mus musculus
  siRNA target sequence for Lifr (NM_013584.1,1379-1397).
gaaggacatcaattcaaca

SEQ ID NO: 632043 - DNA, 19 bp, Mus musculus
  siRNA target sequence for Lifr (NM_013584.1,1382-1400).
ggacatcaattcaacagtt

SEQ ID NO: 632044 - DNA, 19 bp, Mus musculus
  siRNA target sequence for Lifr (NM_013584.1,1414-1432).
ggtatttaccaggaaattt

SEQ ID NO: 632045 - DNA, 19 bp, Mus musculus
  siRNA target sequence for Lifr (NM_013584.1,1415-1433).
gtatttaccaggaaatttt

SEQ ID NO: 632046 - DNA, 19 bp, Mus musculus
  siRNA target sequence for Lifr (NM_013584.1,1453-1471).
gtcaaattgaaatttgtaa

SEQ ID NO: 632047 - DNA, 19 bp, Mus musculus
  siRNA target sequence for Lifr (NM_013584.1,2189-2207).
gttacgttccataattgga

SEQ ID NO: 632048 - DNA, 19 bp, Mus musculus
  siRNA target sequence for Lifr (NM_013584.1,2226-2244).
cccattgttgcgccaaatt

SEQ ID NO: 632049 - DNA, 19 bp, Mus musculus
  siRNA target sequence for Lifr (NM_013584.1,2227-2245).
ccattgttgcgccaaattt

SEQ ID NO: 632050 - DNA, 19 bp, Mus musculus
  siRNA target sequence for Lifr (NM_013584.1,2260-2278).
cgtcggcagactcgatatt

SEQ ID NO: 632051 - DNA, 19 bp, Mus musculus
  siRNA target sequence for Lifr (NM_013584.1,2261-2279).
gtcggcagactcgatatta

SEQ ID NO: 632052 - DNA, 19 bp, Mus musculus
  siRNA target sequence for Lifr (NM_013584.1,2263-2281).
cggcagactcgatattagt

SEQ ID NO: 632053 - DNA, 19 bp, Mus musculus
  siRNA target sequence for Lifr (NM_013584.1,2265-2283).
gcagactcgatattagtga

SEQ ID NO: 632054 - DNA, 19 bp, Mus musculus
  siRNA target sequence for Lifr (NM_013584.1,2266-2284).
cagactcgatattagtgaa

SEQ ID NO: 632055 - DNA, 19 bp, Mus musculus
  siRNA target sequence for Lifr (NM_013584.1,2378-2396).
gagcttggagccacatcat

SEQ ID NO: 632056 - DNA, 19 bp, Mus musculus
  siRNA target sequence for Lifr (NM_013584.1,2381-2399).
cttggagccacatcattct

SEQ ID NO: 632057 - DNA, 19 bp, Mus musculus
  siRNA target sequence for Lifr (NM_013584.1,2389-2407).
cacatcattctgacatcaa

SEQ ID NO: 632058 - DNA, 19 bp, Mus musculus
  siRNA target sequence for Lifr (NM_013584.1,2398-2416).
ctgacatcaagctaaagaa

SEQ ID NO: 632059 - DNA, 19 bp, Mus musculus
  siRNA target sequence for Lifr (NM_013584.1,2610-2628).
gtggtaacgagcatccttt

SEQ ID NO: 632060 - DNA, 19 bp, Mus musculus
  siRNA target sequence for Lifr (NM_013584.1,2634-2652).
cggaagcgagaatggatta

SEQ ID NO: 632061 - DNA, 19 bp, Mus musculus
  siRNA target sequence for Lifr (NM_013584.1,2647-2665).
ggattaaggaaacattcta

SEQ ID NO: 632062 - DNA, 19 bp, Mus musculus
  siRNA target sequence for Lifr (NM_013584.1,2690-2708).
ctgtaaggcgctacagttt

SEQ ID NO: 632063 - DNA, 19 bp, Mus musculus
  siRNA target sequence for Lifr (NM_013584.1,2692-2710).
gtaaggcgctacagtttca

SEQ ID NO: 632064 - DNA, 19 bp, Mus musculus
  siRNA target sequence for Lifr (NM_013584.1,2717-2735).
cgtctgcgagggaagcaat

SEQ ID NO: 632065 - DNA, 19 bp, Mus musculus
  siRNA target sequence for Lifr (NM_013584.1,2731-2749).
gcaatgctcttaagacatt

SEQ ID NO: 632066 - DNA, 19 bp, Mus musculus
  siRNA target sequence for Lifr (NM_013584.1,2767-2785).
ccccgaacaacgttgaagt

SEQ ID NO: 632067 - DNA, 19 bp, Mus musculus
  siRNA target sequence for Lifr (NM_013584.1,2796-2814).
cggtcgatagtccctaaaa

SEQ ID NO: 632068 - DNA, 19 bp, Mus musculus
  siRNA target sequence for Lifr (NM_013584.1,2797-2815).
ggtcgatagtccctaaaat

SEQ ID NO: 632069 - DNA, 19 bp, Mus musculus
  siRNA target sequence for Lifr (NM_013584.1,2798-2816).
gtcgatagtccctaaaata

SEQ ID NO: 632070 - DNA, 19 bp, Mus musculus
  siRNA target sequence for Lifr (NM_013584.1,2800-2818).
cgatagtccctaaaataga

SEQ ID NO: 632071 - DNA, 19 bp, Mus musculus
  siRNA target sequence for Lifr (NM_013584.1,2805-2823).
gtccctaaaatagaagata

SEQ ID NO: 632072 - DNA, 19 bp, Mus musculus
  siRNA target sequence for Lifr (NM_013584.1,2847-2865).
gagcgtcctggggaaagat

SEQ ID NO: 632073 - DNA, 19 bp, Mus musculus
  siRNA target sequence for Lifr (NM_013584.1,2886-2904).
catgtggtcgtgtcttact

SEQ ID NO: 632074 - DNA, 19 bp, Mus musculus
  siRNA target sequence for Lifr (NM_013584.1,2981-2999).
cgatgtgcagtccatgtat

SEQ ID NO: 632075 - DNA, 19 bp, Mus musculus
  siRNA target sequence for Lifr (NM_013584.1,3140-3158).
cagacctcaggccaatgta

SEQ ID NO: 632076 - DNA, 19 bp, Mus musculus
  siRNA target sequence for Lifr (NM_013584.1,3209-3227).
caacgaagttgtctctttt

SEQ ID NO: 632077 - DNA, 19 bp, Mus musculus
  siRNA target sequence for Lifr (NM_013584.1,3212-3230).
cgaagttgtctcttttgga

SEQ ID NO: 632078 - DNA, 19 bp, Mus musculus
  siRNA target sequence for Lifr (NM_013584.1,3234-3252).
ccgtgctccatcaattcca

SEQ ID NO: 632079 - DNA, 19 bp, Mus musculus
  siRNA target sequence for Lifr (NM_013584.1,3284-3302).
ctctcctaaatctaatgga

SEQ ID NO: 632080 - DNA, 19 bp, Mus musculus
  siRNA target sequence for Lifr (NM_013584.1,3303-3321).
ggagggtggtcctttacaa

SEQ ID NO: 632081 - DNA, 19 bp, Mus musculus
  siRNA target sequence for Lifr (NM_013584.1,3304-3322).
gagggtggtcctttacaaa

SEQ ID NO: 632082 - DNA, 19 bp, Mus musculus
  siRNA target sequence for Lifr (NM_013584.1,3306-3324).
gggtggtcctttacaaact

SEQ ID NO: 632083 - DNA, 19 bp, Mus musculus
  siRNA target sequence for Lifr (NM_013584.1,3307-3325).
ggtggtcctttacaaactt

SEQ ID NO: 632084 - DNA, 19 bp, Mus musculus
  siRNA target sequence for Lifr (NM_013584.1,3310-3328).
ggtcctttacaaacttctt

SEQ ID NO: 632085 - DNA, 19 bp, Mus musculus
  siRNA target sequence for Prlr (NM_011169.3,391-409).
gtcaccacctggaaaacct

SEQ ID NO: 632086 - DNA, 19 bp, Mus musculus
  siRNA target sequence for Prlr (NM_011169.3,482-500).
ctccccaccaattattcat

SEQ ID NO: 632087 - DNA, 19 bp, Mus musculus
  siRNA target sequence for Prlr (NM_011169.3,485-503).
cccaccaattattcattga

SEQ ID NO: 632088 - DNA, 19 bp, Mus musculus
  siRNA target sequence for Prlr (NM_011169.3,489-507).
ccaattattcattgacata

SEQ ID NO: 632089 - DNA, 19 bp, Mus musculus
  siRNA target sequence for Prlr (NM_011169.3,587-605).
cagtacacttccatatgga

SEQ ID NO: 632090 - DNA, 19 bp, Mus musculus
  siRNA target sequence for Prlr (NM_011169.3,651-669).
gtacctcggatccacttta

SEQ ID NO: 632091 - DNA, 19 bp, Mus musculus
  siRNA target sequence for Prlr (NM_011169.3,654-672).
cctcggatccactttatgt

SEQ ID NO: 632092 - DNA, 19 bp, Mus musculus
  siRNA target sequence for Prlr (NM_011169.3,673-691).
ggatgtgacttacattgtt

SEQ ID NO: 632093 - DNA, 19 bp, Mus musculus
  siRNA target sequence for Prlr (NM_011169.3,702-720).
ctcctcggaacctgacttt

SEQ ID NO: 632094 - DNA, 19 bp, Mus musculus
  siRNA target sequence for Prlr (NM_011169.3,705-723).
ctcggaacctgactttaga

SEQ ID NO: 632095 - DNA, 19 bp, Mus musculus
  siRNA target sequence for Prlr (NM_011169.3,717-735).
ctttagaagtgaaacaact

SEQ ID NO: 632096 - DNA, 19 bp, Mus musculus
  siRNA target sequence for Prlr (NM_011169.3,740-758).
gacaaaaaaacatatctgt

SEQ ID NO: 632097 - DNA, 19 bp, Mus musculus
  siRNA target sequence for Prlr (NM_011169.3,769-787).
gttgccacctaccataact

SEQ ID NO: 632098 - DNA, 19 bp, Mus musculus
  siRNA target sequence for Prlr (NM_011169.3,772-790).
gccacctaccataactgat

SEQ ID NO: 632099 - DNA, 19 bp, Mus musculus
  siRNA target sequence for Prlr (NM_011169.3,814-832).
ggaatatgaaattcgatta

SEQ ID NO: 632100 - DNA, 19 bp, Mus musculus
  siRNA target sequence for Prlr (NM_011169.3,884-902).
caatttaaggtttttgact

SEQ ID NO: 632101 - DNA, 19 bp, Mus musculus
  siRNA target sequence for Prlr (NM_011169.3,939-957).
gcaagccagaccatggata

SEQ ID NO: 632102 - DNA, 19 bp, Mus musculus
  siRNA target sequence for Prlr (NM_011169.3,1053-1071).
ctgtcatctgtttgattat

SEQ ID NO: 632103 - DNA, 19 bp, Mus musculus
  siRNA target sequence for Prlr (NM_011169.3,1082-1100).
gtggctttgaagggttata

SEQ ID NO: 632104 - DNA, 19 bp, Mus musculus
  siRNA target sequence for Prlr (NM_011169.3,1200-1218).
ccttggggtgccaagactt

SEQ ID NO: 632105 - DNA, 19 bp, Mus musculus
  siRNA target sequence for Prlr (NM_011169.3,1201-1219).
cttggggtgccaagacttt

SEQ ID NO: 632106 - DNA, 19 bp, Mus musculus
  siRNA target sequence for Prlr (NM_011169.3,1360-1378).
ctctggtcatggaagctat

SEQ ID NO: 632107 - DNA, 19 bp, Mus musculus
  siRNA target sequence for Prlr (NM_011169.3,1364-1382).
ggtcatggaagctatgaca

SEQ ID NO: 632108 - DNA, 19 bp, Mus musculus
  siRNA target sequence for Prlr (NM_011169.3,1374-1392).
gctatgacagccattctct

SEQ ID NO: 632109 - DNA, 19 bp, Mus musculus
  siRNA target sequence for Prlr (NM_011169.3,1466-1484).
gagaatcctgaggcaaata

SEQ ID NO: 632110 - DNA, 19 bp, Mus musculus
  siRNA target sequence for Prlr (NM_011169.3,1513-1531).
cacccccaattgtcataca

SEQ ID NO: 632111 - DNA, 19 bp, Mus musculus
  siRNA target sequence for Prlr (NM_011169.3,1516-1534).
ccccaattgtcatacagat

SEQ ID NO: 632112 - DNA, 19 bp, Mus musculus
  siRNA target sequence for Prlr (NM_011169.3,1517-1535).
cccaattgtcatacagata

SEQ ID NO: 632113 - DNA, 19 bp, Mus musculus
  siRNA target sequence for Prlr (NM_011169.3,1519-1537).
caattgtcatacagataca

SEQ ID NO: 632114 - DNA, 19 bp, Mus musculus
  siRNA target sequence for Prlr (NM_011169.3,1526-1544).
catacagatacatccaaat

SEQ ID NO: 632115 - DNA, 19 bp, Mus musculus
  siRNA target sequence for Prlr (NM_011169.3,1787-1805).
ggccccattgtctatgcta

SEQ ID NO: 632116 - DNA, 19 bp, Mus musculus
  siRNA target sequence for Prlr (NM_011169.3,1803-1821).
ctaaacccccagattacgt

SEQ ID NO: 632117 - DNA, 19 bp, Mus musculus
  siRNA target sequence for Prlr (NM_011169.3,1812-1830).
cagattacgtggagattca

SEQ ID NO: 632118 - DNA, 19 bp, Mus musculus
  siRNA target sequence for Prlr (NM_011169.3,1814-1832).
gattacgtggagattcaca

SEQ ID NO: 632119 - DNA, 19 bp, Mus musculus
  siRNA target sequence for Prlr (NM_011169.3,1820-1838).
gtggagattcacaaagtca

SEQ ID NO: 632120 - DNA, 19 bp, Mus musculus
  siRNA target sequence for Prlr (NM_011169.3,1938-1956).
ctggggtcacggataacaa

SEQ ID NO: 632121 - DNA, 19 bp, Mus musculus
  siRNA target sequence for Prlr (NM_011169.3,1940-1958).
ggggtcacggataacaaca

SEQ ID NO: 632122 - DNA, 19 bp, Mus musculus
  siRNA target sequence for Prlr (NM_011169.3,1941-1959).
gggtcacggataacaacat

SEQ ID NO: 632123 - DNA, 19 bp, Mus musculus
  siRNA target sequence for Gria1 (NM_008165.2,122-140).
cggttgtgggtgccaattt

SEQ ID NO: 632124 - DNA, 19 bp, Mus musculus
  siRNA target sequence for Gria1 (NM_008165.2,134-152).
ccaatttccccaacaatat

SEQ ID NO: 632125 - DNA, 19 bp, Mus musculus
  siRNA target sequence for Gria1 (NM_008165.2,153-171).
ccagatagggggattattt

SEQ ID NO: 632126 - DNA, 19 bp, Mus musculus
  siRNA target sequence for Gria1 (NM_008165.2,162-180).
gggattatttccaaaccaa

SEQ ID NO: 632127 - DNA, 19 bp, Mus musculus
  siRNA target sequence for Gria1 (NM_008165.2,187-205).
caggaacatgcggctttta

SEQ ID NO: 632128 - DNA, 19 bp, Mus musculus
  siRNA target sequence for Gria1 (NM_008165.2,190-208).
gaacatgcggcttttaggt

SEQ ID NO: 632129 - DNA, 19 bp, Mus musculus
  siRNA target sequence for Gria1 (NM_008165.2,196-214).
gcggcttttaggtttgctt

SEQ ID NO: 632130 - DNA, 19 bp, Mus musculus
  siRNA target sequence for Gria1 (NM_008165.2,241-259).
ctgcttccccagatcgata

SEQ ID NO: 632131 - DNA, 19 bp, Mus musculus
  siRNA target sequence for Gria1 (NM_008165.2,243-261).
gcttccccagatcgatatt

SEQ ID NO: 632132 - DNA, 19 bp, Mus musculus
  siRNA target sequence for Gria1 (NM_008165.2,247-265).
ccccagatcgatattgtga

SEQ ID NO: 632133 - DNA, 19 bp, Mus musculus
  siRNA target sequence for Gria1 (NM_008165.2,248-266).
cccagatcgatattgtgaa

SEQ ID NO: 632134 - DNA, 19 bp, Mus musculus
  siRNA target sequence for Gria1 (NM_008165.2,746-764).
gcatcgggtaccactacat

SEQ ID NO: 632135 - DNA, 19 bp, Mus musculus
  siRNA target sequence for Gria1 (NM_008165.2,778-796).
ggcttcatggacattgact

SEQ ID NO: 632136 - DNA, 19 bp, Mus musculus
  siRNA target sequence for Gria1 (NM_008165.2,779-797).
gcttcatggacattgactt

SEQ ID NO: 632137 - DNA, 19 bp, Mus musculus
  siRNA target sequence for Gria1 (NM_008165.2,787-805).
gacattgacttaaataagt

SEQ ID NO: 632138 - DNA, 19 bp, Mus musculus
  siRNA target sequence for Gria1 (NM_008165.2,1101-1119).
gcagcaggtgcgctttgaa

SEQ ID NO: 632139 - DNA, 19 bp, Mus musculus
  siRNA target sequence for Gria1 (NM_008165.2,1201-1219).
ggaatccgcaagattggtt

SEQ ID NO: 632140 - DNA, 19 bp, Mus musculus
  siRNA target sequence for Gria1 (NM_008165.2,1202-1220).
gaatccgcaagattggtta

SEQ ID NO: 632141 - DNA, 19 bp, Mus musculus
  siRNA target sequence for Gria1 (NM_008165.2,1267-1285).
gctggaggggacaactcaa

SEQ ID NO: 632142 - DNA, 19 bp, Mus musculus
  siRNA target sequence for Gria1 (NM_008165.2,1327-1345).
gatccttacgtgatgctta

SEQ ID NO: 632143 - DNA, 19 bp, Mus musculus
  siRNA target sequence for Gria1 (NM_008165.2,1330-1348).
ccttacgtgatgcttaaaa

SEQ ID NO: 632144 - DNA, 19 bp, Mus musculus
  siRNA target sequence for Gria1 (NM_008165.2,1335-1353).
cgtgatgcttaaaaagaat

SEQ ID NO: 632145 - DNA, 19 bp, Mus musculus
  siRNA target sequence for Gria1 (NM_008165.2,1513-1531).
ggagagctagtctatggaa

SEQ ID NO: 632146 - DNA, 19 bp, Mus musculus
  siRNA target sequence for Gria1 (NM_008165.2,1610-1628).
gtttgggaatctccattat

SEQ ID NO: 632147 - DNA, 19 bp, Mus musculus
  siRNA target sequence for Gria1 (NM_008165.2,1743-1761).
cctggtcagccgtttcagt

SEQ ID NO: 632148 - DNA, 19 bp, Mus musculus
  siRNA target sequence for Gria1 (NM_008165.2,1749-1767).
cagccgtttcagtccttat

SEQ ID NO: 632149 - DNA, 19 bp, Mus musculus
  siRNA target sequence for Gria1 (NM_008165.2,1751-1769).
gccgtttcagtccttatga

SEQ ID NO: 632150 - DNA, 19 bp, Mus musculus
  siRNA target sequence for Gria1 (NM_008165.2,1752-1770).
ccgtttcagtccttatgaa

SEQ ID NO: 632151 - DNA, 19 bp, Mus musculus
  siRNA target sequence for Gria1 (NM_008165.2,1753-1771).
cgtttcagtccttatgaat

SEQ ID NO: 632152 - DNA, 19 bp, Mus musculus
  siRNA target sequence for Gria1 (NM_008165.2,1773-1791).
gcacagtgaagagtttgaa

SEQ ID NO: 632153 - DNA, 19 bp, Mus musculus
  siRNA target sequence for Gria1 (NM_008165.2,1935-1953).
gtggttcttcactttgatt

SEQ ID NO: 632154 - DNA, 19 bp, Mus musculus
  siRNA target sequence for Gria1 (NM_008165.2,2037-2055).
ggcaaagcagacggaaatt

SEQ ID NO: 632155 - DNA, 19 bp, Mus musculus
  siRNA target sequence for Gria1 (NM_008165.2,2078-2096).
gatccactaaggagttctt

SEQ ID NO: 632156 - DNA, 19 bp, Mus musculus
  siRNA target sequence for Gria1 (NM_008165.2,2334-2352).
ggggtccgccctgagaaat

SEQ ID NO: 632157 - DNA, 19 bp, Mus musculus
  siRNA target sequence for Gria1 (NM_008165.2,2342-2360).
ccctgagaaatccagtaaa

SEQ ID NO: 632158 - DNA, 19 bp, Mus musculus
  siRNA target sequence for Gria1 (NM_008165.2,2356-2374).
gtaaacctggcagtgttaa

SEQ ID NO: 632159 - DNA, 19 bp, Mus musculus
  siRNA target sequence for Gria1 (NM_008165.2,2386-2404).
caggggcttttggacaaat

SEQ ID NO: 632160 - DNA, 19 bp, Mus musculus
  siRNA target sequence for Gria1 (NM_008165.2,2589-2607).
gcggatgaagggtttctgt

SEQ ID NO: 632161 - DNA, 19 bp, Mus musculus
  siRNA target sequence for Gria1 (NM_008165.2,2733-2751).
caagtccatgcaatccatt

SEQ ID NO: 632162 - DNA, 19 bp, Mus musculus
  siRNA target sequence for Gria2 (NM_013540.1,270-288).
cttctaacagcatacagat

SEQ ID NO: 632163 - DNA, 19 bp, Mus musculus
  siRNA target sequence for Gria2 (NM_013540.1,372-390).
gactgacaccccatatcga

SEQ ID NO: 632164 - DNA, 19 bp, Mus musculus
  siRNA target sequence for Gria2 (NM_013540.1,378-396).
caccccatatcgacaattt

SEQ ID NO: 632165 - DNA, 19 bp, Mus musculus
  siRNA target sequence for Gria2 (NM_013540.1,381-399).
cccatatcgacaatttgga

SEQ ID NO: 632166 - DNA, 19 bp, Mus musculus
  siRNA target sequence for Gria2 (NM_013540.1,450-468).
gaggcgtctatgcgatttt

SEQ ID NO: 632167 - DNA, 19 bp, Mus musculus
  siRNA target sequence for Gria2 (NM_013540.1,491-509).
gtaaataccatcacatcat

SEQ ID NO: 632168 - DNA, 19 bp, Mus musculus
  siRNA target sequence for Gria2 (NM_013540.1,516-534).
ggacactgcatgtatcctt

SEQ ID NO: 632169 - DNA, 19 bp, Mus musculus
  siRNA target sequence for Gria2 (NM_013540.1,555-573).
cagatggcacgcatccatt

SEQ ID NO: 632170 - DNA, 19 bp, Mus musculus
  siRNA target sequence for Gria2 (NM_013540.1,560-578).
ggcacgcatccatttgtca

SEQ ID NO: 632171 - DNA, 19 bp, Mus musculus
  siRNA target sequence for Gria2 (NM_013540.1,606-624).
cactccttagcttgattga

SEQ ID NO: 632172 - DNA, 19 bp, Mus musculus
  siRNA target sequence for Gria2 (NM_013540.1,608-626).
ctccttagcttgattgagt

SEQ ID NO: 632173 - DNA, 19 bp, Mus musculus
  siRNA target sequence for Gria2 (NM_013540.1,661-679).
cagtgacagaggcttatca

SEQ ID NO: 632174 - DNA, 19 bp, Mus musculus
  siRNA target sequence for Gria2 (NM_013540.1,721-739).
gcaggtgactgctatcaat

SEQ ID NO: 632175 - DNA, 19 bp, Mus musculus
  siRNA target sequence for Gria2 (NM_013540.1,780-798).
gatcactctttcaagatct

SEQ ID NO: 632176 - DNA, 19 bp, Mus musculus
  siRNA target sequence for Gria2 (NM_013540.1,856-874).
cattgtggaccaggttatt

SEQ ID NO: 632177 - DNA, 19 bp, Mus musculus
  siRNA target sequence for Gria2 (NM_013540.1,860-878).
gtggaccaggttattacca

SEQ ID NO: 632178 - DNA, 19 bp, Mus musculus
  siRNA target sequence for Gria2 (NM_013540.1,862-880).
ggaccaggttattaccatt

SEQ ID NO: 632179 - DNA, 19 bp, Mus musculus
  siRNA target sequence for Gria2 (NM_013540.1,876-894).
ccattggaaagcatgttaa

SEQ ID NO: 632180 - DNA, 19 bp, Mus musculus
  siRNA target sequence for Gria2 (NM_013540.1,877-895).
cattggaaagcatgttaaa

SEQ ID NO: 632181 - DNA, 19 bp, Mus musculus
  siRNA target sequence for Gria2 (NM_013540.1,887-905).
catgttaaagggtaccatt

SEQ ID NO: 632182 - DNA, 19 bp, Mus musculus
  siRNA target sequence for Gria2 (NM_013540.1,932-950).
gatggagacctgctgaaaa

SEQ ID NO: 632183 - DNA, 19 bp, Mus musculus
  siRNA target sequence for Gria2 (NM_013540.1,1065-1083).
cacacacagcgacaattaa

SEQ ID NO: 632184 - DNA, 19 bp, Mus musculus
  siRNA target sequence for Gria2 (NM_013540.1,1069-1087).
cacagcgacaattaagtat

SEQ ID NO: 632185 - DNA, 19 bp, Mus musculus
  siRNA target sequence for Gria2 (NM_013540.1,1073-1091).
gcgacaattaagtatactt

SEQ ID NO: 632186 - DNA, 19 bp, Mus musculus
  siRNA target sequence for Gria2 (NM_013540.1,1089-1107).
cttcggccctgacttatga

SEQ ID NO: 632187 - DNA, 19 bp, Mus musculus
  siRNA target sequence for Gria2 (NM_013540.1,1216-1234).
gggacaaggcgtggaaata

SEQ ID NO: 632188 - DNA, 19 bp, Mus musculus
  siRNA target sequence for Gria2 (NM_013540.1,1265-1283).
ggtctctctggaaatataa

SEQ ID NO: 632189 - DNA, 19 bp, Mus musculus
  siRNA target sequence for Gria2 (NM_013540.1,1298-1316).
ggaaaacgaataaactaca

SEQ ID NO: 632190 - DNA, 19 bp, Mus musculus
  siRNA target sequence for Gria2 (NM_013540.1,1304-1322).
cgaataaactacacaatta

SEQ ID NO: 632191 - DNA, 19 bp, Mus musculus
  siRNA target sequence for Gria2 (NM_013540.1,1368-1386).
ggagtgaagtggataaaat

SEQ ID NO: 632192 - DNA, 19 bp, Mus musculus
  siRNA target sequence for Gria2 (NM_013540.1,1402-1420).
cgagctcccctctggaaat

SEQ ID NO: 632193 - DNA, 19 bp, Mus musculus
  siRNA target sequence for Gria2 (NM_013540.1,1469-1487).
gaatctccatatgttatga

SEQ ID NO: 632194 - DNA, 19 bp, Mus musculus
  siRNA target sequence for Gria2 (NM_013540.1,1473-1491).
ctccatatgttatgatgaa

SEQ ID NO: 632195 - DNA, 19 bp, Mus musculus
  siRNA target sequence for Gria2 (NM_013540.1,1475-1493).
ccatatgttatgatgaaga

SEQ ID NO: 632196 - DNA, 19 bp, Mus musculus
  siRNA target sequence for Gria2 (NM_013540.1,1563-1581).
ccaaacattgtggattcaa

SEQ ID NO: 632197 - DNA, 19 bp, Mus musculus
  siRNA target sequence for Gria2 (NM_013540.1,1688-1706).
gccattgctccattaacta

SEQ ID NO: 632198 - DNA, 19 bp, Mus musculus
  siRNA target sequence for Gria2 (NM_013540.1,1689-1707).
ccattgctccattaactat

SEQ ID NO: 632199 - DNA, 19 bp, Mus musculus
  siRNA target sequence for Gria2 (NM_013540.1,1746-1764).
cattcatgagccttggaat

SEQ ID NO: 632200 - DNA, 19 bp, Mus musculus
  siRNA target sequence for Gria2 (NM_013540.1,1757-1775).
cttggaatctctatcatga

SEQ ID NO: 632201 - DNA, 19 bp, Mus musculus
  siRNA target sequence for Gria2 (NM_013540.1,1952-1970).
caaagtagtgaatcaacta

SEQ ID NO: 632202 - DNA, 19 bp, Mus musculus
  siRNA target sequence for Gria2 (NM_013540.1,2032-2050).
cgatatttcgccaagatct

SEQ ID NO: 632203 - DNA, 19 bp, Mus musculus
  siRNA target sequence for Gria2 (NM_013540.1,2169-2187).
gtgctgaggatctgtctaa

SEQ ID NO: 632204 - DNA, 19 bp, Mus musculus
  siRNA target sequence for Gria2 (NM_013540.1,2222-2240).
ggctccactaaagagtttt

SEQ ID NO: 632205 - DNA, 19 bp, Mus musculus
  siRNA target sequence for Gria2 (NM_013540.1,2267-2285).
gataaaatgtggacttata

SEQ ID NO: 632206 - DNA, 19 bp, Mus musculus
  siRNA target sequence for Gria2 (NM_013540.1,2333-2351).
gtagccagagtcaggaaat

SEQ ID NO: 632207 - DNA, 19 bp, Mus musculus
  siRNA target sequence for Gria2 (NM_013540.1,2336-2354).
gccagagtcaggaaatcca

SEQ ID NO: 632208 - DNA, 19 bp, Mus musculus
  siRNA target sequence for Gria2 (NM_013540.1,2461-2479).
cggcatcgccacacctaaa

SEQ ID NO: 632209 - DNA, 19 bp, Mus musculus
  siRNA target sequence for Gria2 (NM_013540.1,2500-2518).
ggttaacctcgcagtacta

SEQ ID NO: 632210 - DNA, 19 bp, Mus musculus
  siRNA target sequence for Gria2 (NM_013540.1,2501-2519).
gttaacctcgcagtactaa

SEQ ID NO: 632211 - DNA, 19 bp, Mus musculus
  siRNA target sequence for Gria2 (NM_013540.1,2507-2525).
ctcgcagtactaaaactga

SEQ ID NO: 632212 - DNA, 19 bp, Mus musculus
  siRNA target sequence for Gria2 (NM_013540.1,2509-2527).
cgcagtactaaaactgaat

SEQ ID NO: 632213 - DNA, 19 bp, Mus musculus
  siRNA target sequence for Gria2 (NM_013540.1,2634-2652).
gcaacgttgctggagtatt

SEQ ID NO: 632214 - DNA, 19 bp, Mus musculus
  siRNA target sequence for Gria2 (NM_013540.1,2639-2657).
gttgctggagtattctaca

SEQ ID NO: 632215 - DNA, 19 bp, Mus musculus
  siRNA target sequence for Gria2 (NM_013540.1,2721-2739).
gggccgaggcgaaacgaat

SEQ ID NO: 632216 - DNA, 19 bp, Mus musculus
  siRNA target sequence for Gria2 (NM_013540.1,2724-2742).
ccgaggcgaaacgaatgaa

SEQ ID NO: 632217 - DNA, 19 bp, Mus musculus
  siRNA target sequence for Gria2 (NM_013540.1,2747-2765).
gcaaagaatgcacagaata

SEQ ID NO: 632218 - DNA, 19 bp, Mus musculus
  siRNA target sequence for Gria2 (NM_013540.1,2748-2766).
caaagaatgcacagaatat

SEQ ID NO: 632219 - DNA, 19 bp, Mus musculus
  siRNA target sequence for Gria2 (NM_013540.1,2781-2799).
cgcagaattcccagaattt

SEQ ID NO: 632220 - DNA, 19 bp, Mus musculus
  siRNA target sequence for Gria2 (NM_013540.1,2782-2800).
gcagaattcccagaatttt

SEQ ID NO: 632221 - DNA, 19 bp, Mus musculus
  siRNA target sequence for Gria2 (NM_013540.1,2792-2810).
cagaattttgcaacttata

SEQ ID NO: 632222 - DNA, 19 bp, Mus musculus
  siRNA target sequence for Gria2 (NM_013540.1,2802-2820).
caacttataaggaaggtta

SEQ ID NO: 632223 - DNA, 19 bp, Mus musculus
  siRNA target sequence for Gria2 (NM_013540.1,2805-2823).
cttataaggaaggttacaa

SEQ ID NO: 632224 - DNA, 19 bp, Mus musculus
  siRNA target sequence for Gria2 (NM_013540.1,2812-2830).
ggaaggttacaacgtatat

SEQ ID NO: 632225 - DNA, 19 bp, Mus musculus
  siRNA target sequence for Gria2 (NM_013540.1,2831-2849).
ggcatcgagagtgttaaaa

SEQ ID NO: 632226 - DNA, 19 bp, Mus musculus
  siRNA target sequence for Gria2 (NM_013540.1,2832-2850).
gcatcgagagtgttaaaat

SEQ ID NO: 632227 - DNA, 19 bp, Mus musculus
  siRNA target sequence for Gria4 (NM_019691.2,401-419).
gcaggcagattgtcttgtt

SEQ ID NO: 632228 - DNA, 19 bp, Mus musculus
  siRNA target sequence for Gria4 (NM_019691.2,459-477).
gagcagcgttcaaataggt

SEQ ID NO: 632229 - DNA, 19 bp, Mus musculus
  siRNA target sequence for Gria4 (NM_019691.2,512-530).
ctgcttttcggctagctat

SEQ ID NO: 632230 - DNA, 19 bp, Mus musculus
  siRNA target sequence for Gria4 (NM_019691.2,515-533).
cttttcggctagctatctt

SEQ ID NO: 632231 - DNA, 19 bp, Mus musculus
  siRNA target sequence for Gria4 (NM_019691.2,521-539).
ggctagctatctttcttca

SEQ ID NO: 632232 - DNA, 19 bp, Mus musculus
  siRNA target sequence for Gria4 (NM_019691.2,522-540).
gctagctatctttcttcat

SEQ ID NO: 632233 - DNA, 19 bp, Mus musculus
  siRNA target sequence for Gria4 (NM_019691.2,560-578).
ctgaagcccctttcaattt

SEQ ID NO: 632234 - DNA, 19 bp, Mus musculus
  siRNA target sequence for Gria4 (NM_019691.2,603-621).
gactgccaacagttttgct

SEQ ID NO: 632235 - DNA, 19 bp, Mus musculus
  siRNA target sequence for Gria4 (NM_019691.2,612-630).
cagttttgctgtgacaaat

SEQ ID NO: 632236 - DNA, 19 bp, Mus musculus
  siRNA target sequence for Gria4 (NM_019691.2,636-654).
ctgttcccagtattctaga

SEQ ID NO: 632237 - DNA, 19 bp, Mus musculus
  siRNA target sequence for Gria4 (NM_019691.2,665-683).
ccatttttggactctatga

SEQ ID NO: 632238 - DNA, 19 bp, Mus musculus
  siRNA target sequence for Gria4 (NM_019691.2,820-838).
ctcctggatcactatgaat

SEQ ID NO: 632239 - DNA, 19 bp, Mus musculus
  siRNA target sequence for Gria4 (NM_019691.2,826-844).
gatcactatgaatggaatt

SEQ ID NO: 632240 - DNA, 19 bp, Mus musculus
  siRNA target sequence for Gria4 (NM_019691.2,866-884).
cagacagggggtattcaat

SEQ ID NO: 632241 - DNA, 19 bp, Mus musculus
  siRNA target sequence for Gria4 (NM_019691.2,870-888).
cagggggtattcaatactt

SEQ ID NO: 632242 - DNA, 19 bp, Mus musculus
  siRNA target sequence for Gria4 (NM_019691.2,872-890).
gggggtattcaatacttca

SEQ ID NO: 632243 - DNA, 19 bp, Mus musculus
  siRNA target sequence for Gria4 (NM_019691.2,873-891).
ggggtattcaatacttcaa

SEQ ID NO: 632244 - DNA, 19 bp, Mus musculus
  siRNA target sequence for Gria4 (NM_019691.2,881-899).
caatacttcaagctataat

SEQ ID NO: 632245 - DNA, 19 bp, Mus musculus
  siRNA target sequence for Gria4 (NM_019691.2,886-904).
cttcaagctataatggaaa

SEQ ID NO: 632246 - DNA, 19 bp, Mus musculus
  siRNA target sequence for Gria4 (NM_019691.2,924-942).
gcatgtcagtgcgatatgt

SEQ ID NO: 632247 - DNA, 19 bp, Mus musculus
  siRNA target sequence for Gria4 (NM_019691.2,934-952).
gcgatatgtgtggaaaatt

SEQ ID NO: 632248 - DNA, 19 bp, Mus musculus
  siRNA target sequence for Gria4 (NM_019691.2,935-953).
cgatatgtgtggaaaattt

SEQ ID NO: 632249 - DNA, 19 bp, Mus musculus
  siRNA target sequence for Gria4 (NM_019691.2,936-954).
gatatgtgtggaaaatttt

SEQ ID NO: 632250 - DNA, 19 bp, Mus musculus
  siRNA target sequence for Gria4 (NM_019691.2,1008-1026).
gaaatttgtaatagattgt

SEQ ID NO: 632251 - DNA, 19 bp, Mus musculus
  siRNA target sequence for Gria4 (NM_019691.2,1080-1098).
cgtcaaaggctaccattat

SEQ ID NO: 632252 - DNA, 19 bp, Mus musculus
  siRNA target sequence for Gria4 (NM_019691.2,1164-1182).
cactggattccagttagta

SEQ ID NO: 632253 - DNA, 19 bp, Mus musculus
  siRNA target sequence for Gria4 (NM_019691.2,1168-1186).
ggattccagttagtagatt

SEQ ID NO: 632254 - DNA, 19 bp, Mus musculus
  siRNA target sequence for Gria4 (NM_019691.2,1173-1191).
ccagttagtagattttaat

SEQ ID NO: 632255 - DNA, 19 bp, Mus musculus
  siRNA target sequence for Gria4 (NM_019691.2,1196-1214).
ccatggtgacgaaactaat

SEQ ID NO: 632256 - DNA, 19 bp, Mus musculus
  siRNA target sequence for Gria4 (NM_019691.2,1200-1218).
ggtgacgaaactaatggat

SEQ ID NO: 632257 - DNA, 19 bp, Mus musculus
  siRNA target sequence for Gria4 (NM_019691.2,1215-1233).
ggatcgctggaagaaacta

SEQ ID NO: 632258 - DNA, 19 bp, Mus musculus
  siRNA target sequence for Gria4 (NM_019691.2,1220-1238).
gctggaagaaactagatca

SEQ ID NO: 632259 - DNA, 19 bp, Mus musculus
  siRNA target sequence for Gria4 (NM_019691.2,1302-1320).
cttggtaatggctgaaact

SEQ ID NO: 632260 - DNA, 19 bp, Mus musculus
  siRNA target sequence for Gria4 (NM_019691.2,1479-1497).
ccactatggacgtagagtt

SEQ ID NO: 632261 - DNA, 19 bp, Mus musculus
  siRNA target sequence for Gria4 (NM_019691.2,1480-1498).
cactatggacgtagagtta

SEQ ID NO: 632262 - DNA, 19 bp, Mus musculus
  siRNA target sequence for Gria4 (NM_019691.2,1541-1559).
gaaaggttggctattggaa

SEQ ID NO: 632263 - DNA, 19 bp, Mus musculus
  siRNA target sequence for Gria4 (NM_019691.2,1546-1564).
gttggctattggaacgata

SEQ ID NO: 632264 - DNA, 19 bp, Mus musculus
  siRNA target sequence for Gria4 (NM_019691.2,1550-1568).
gctattggaacgatatgga

SEQ ID NO: 632265 - DNA, 19 bp, Mus musculus
  siRNA target sequence for Gria4 (NM_019691.2,1551-1569).
ctattggaacgatatggat

SEQ ID NO: 632266 - DNA, 19 bp, Mus musculus
  siRNA target sequence for Gria4 (NM_019691.2,1561-1579).
gatatggataaattagtct

SEQ ID NO: 632267 - DNA, 19 bp, Mus musculus
  siRNA target sequence for Gria4 (NM_019691.2,1594-1612).
cctactcttggcaatgaca

SEQ ID NO: 632268 - DNA, 19 bp, Mus musculus
  siRNA target sequence for Gria4 (NM_019691.2,1642-1660).
gtaaccacaattatggaat

SEQ ID NO: 632269 - DNA, 19 bp, Mus musculus
  siRNA target sequence for Gria4 (NM_019691.2,1657-1675).
gaatccccctacgttatgt

SEQ ID NO: 632270 - DNA, 19 bp, Mus musculus
  siRNA target sequence for Gria4 (NM_019691.2,1729-1747).
gtagacttggcatctgaaa

SEQ ID NO: 632271 - DNA, 19 bp, Mus musculus
  siRNA target sequence for Gria4 (NM_019691.2,1751-1769).
cgaaacatatcggtatcaa

SEQ ID NO: 632272 - DNA, 19 bp, Mus musculus
  siRNA target sequence for Gria4 (NM_019691.2,1752-1770).
gaaacatatcggtatcaaa

SEQ ID NO: 632273 - DNA, 19 bp, Mus musculus
  siRNA target sequence for Gria4 (NM_019691.2,1756-1774).
catatcggtatcaaatata

SEQ ID NO: 632274 - DNA, 19 bp, Mus musculus
  siRNA target sequence for Gria4 (NM_019691.2,1781-1799).
ccattgtccctgatggaaa

SEQ ID NO: 632275 - DNA, 19 bp, Mus musculus
  siRNA target sequence for Gria4 (NM_019691.2,1842-1860).
ggtaggagagcttgtgtat

SEQ ID NO: 632276 - DNA, 19 bp, Mus musculus
  siRNA target sequence for Gria4 (NM_019691.2,1943-1961).
gtttaggcatctctatcat

SEQ ID NO: 632277 - DNA, 19 bp, Mus musculus
  siRNA target sequence for Gria4 (NM_019691.2,1962-1980).
gatcaaaaaacctcagaaa

SEQ ID NO: 632278 - DNA, 19 bp, Mus musculus
  siRNA target sequence for Gria4 (NM_019691.2,2238-2256).
cctgtccggtcggattgtt

SEQ ID NO: 632279 - DNA, 19 bp, Mus musculus
  siRNA target sequence for Gria4 (NM_019691.2,2435-2453).
gatcaaaaatagcagtata

SEQ ID NO: 632280 - DNA, 19 bp, Mus musculus
  siRNA target sequence for Gria4 (NM_019691.2,2446-2464).
gcagtatatgaaaagatgt

SEQ ID NO: 632281 - DNA, 19 bp, Mus musculus
  siRNA target sequence for Gria4 (NM_019691.2,2488-2506).
ccatctgtgttcactagaa

SEQ ID NO: 632282 - DNA, 19 bp, Mus musculus
  siRNA target sequence for Gria4 (NM_019691.2,2661-2679).
gcccaagggttcctcatta

SEQ ID NO: 632283 - DNA, 19 bp, Mus musculus
  siRNA target sequence for Gria4 (NM_019691.2,2664-2682).
caagggttcctcattaaga

SEQ ID NO: 632284 - DNA, 19 bp, Mus musculus
  siRNA target sequence for Gria4 (NM_019691.2,2667-2685).
gggttcctcattaagaact

SEQ ID NO: 632285 - DNA, 19 bp, Mus musculus
  siRNA target sequence for Gria4 (NM_019691.2,2714-2732).
gtgaggcaggcgtcttaga

SEQ ID NO: 632286 - DNA, 19 bp, Mus musculus
  siRNA target sequence for Gria4 (NM_019691.2,2716-2734).
gaggcaggcgtcttagaca

SEQ ID NO: 632287 - DNA, 19 bp, Mus musculus
  siRNA target sequence for Gria4 (NM_019691.2,2942-2960).
ccgaagccataagaaacaa

SEQ ID NO: 632288 - DNA, 19 bp, Mus musculus
  siRNA target sequence for Gria4 (NM_019691.2,3036-3054).
cacaggaactgcgattaga

SEQ ID NO: 632289 - DNA, 19 bp, Mus musculus
  siRNA target sequence for Gria4 (NM_019691.2,3038-3056).
caggaactgcgattagaca

SEQ ID NO: 632290 - DNA, 19 bp, Mus musculus
  siRNA target sequence for Gria4 (NM_019691.2,3060-3078).
ctcgggattggctgtcatt

SEQ ID NO: 632291 - DNA, 19 bp, Mus musculus
  siRNA target sequence for Gria4 (NM_019691.2,3064-3082).
ggattggctgtcattgcat

SEQ ID NO: 632292 - DNA, 19 bp, Mus musculus
  siRNA target sequence for Grik1 (NM_146072.1,202-220).
ccacattaacctatgacat

SEQ ID NO: 632293 - DNA, 19 bp, Mus musculus
  siRNA target sequence for Grik1 (NM_146072.1,212-230).
ctatgacatccagagaatt

SEQ ID NO: 632294 - DNA, 19 bp, Mus musculus
  siRNA target sequence for Grik1 (NM_146072.1,218-236).
catccagagaattaatctt

SEQ ID NO: 632295 - DNA, 19 bp, Mus musculus
  siRNA target sequence for Grik1 (NM_146072.1,398-416).
ggacaacagagacttattt

SEQ ID NO: 632296 - DNA, 19 bp, Mus musculus
  siRNA target sequence for Grik1 (NM_146072.1,399-417).
gacaacagagacttatttt

SEQ ID NO: 632297 - DNA, 19 bp, Mus musculus
  siRNA target sequence for Grik1 (NM_146072.1,515-533).
cagcacaggtctaattcgt

SEQ ID NO: 632298 - DNA, 19 bp, Mus musculus
  siRNA target sequence for Grik1 (NM_146072.1,559-577).
ccagatacaacatcaaaat

SEQ ID NO: 632299 - DNA, 19 bp, Mus musculus
  siRNA target sequence for Grik1 (NM_146072.1,677-695).
cgagacggctgctgaaatt

SEQ ID NO: 632300 - DNA, 19 bp, Mus musculus
  siRNA target sequence for Grik1 (NM_146072.1,727-745).
ctgaatactatcactactt

SEQ ID NO: 632301 - DNA, 19 bp, Mus musculus
  siRNA target sequence for Grik1 (NM_146072.1,813-831).
ggatttcggttgctgaata

SEQ ID NO: 632302 - DNA, 19 bp, Mus musculus
  siRNA target sequence for Grik1 (NM_146072.1,819-837).
cggttgctgaatattgaca

SEQ ID NO: 632303 - DNA, 19 bp, Mus musculus
  siRNA target sequence for Grik1 (NM_146072.1,915-933).
ctggacggcgtgatgacaa

SEQ ID NO: 632304 - DNA, 19 bp, Mus musculus
  siRNA target sequence for Grik1 (NM_146072.1,920-938).
cggcgtgatgacaactgaa

SEQ ID NO: 632305 - DNA, 19 bp, Mus musculus
  siRNA target sequence for Grik1 (NM_146072.1,1040-1058).
gcgcctaggacccagattt

SEQ ID NO: 632306 - DNA, 19 bp, Mus musculus
  siRNA target sequence for Grik1 (NM_146072.1,1041-1059).
cgcctaggacccagattta

SEQ ID NO: 632307 - DNA, 19 bp, Mus musculus
  siRNA target sequence for Grik1 (NM_146072.1,1042-1060).
gcctaggacccagatttat

SEQ ID NO: 632308 - DNA, 19 bp, Mus musculus
  siRNA target sequence for Grik1 (NM_146072.1,1044-1062).
ctaggacccagatttatga

SEQ ID NO: 632309 - DNA, 19 bp, Mus musculus
  siRNA target sequence for Grik1 (NM_146072.1,1054-1072).
gatttatgaacctcatcaa

SEQ ID NO: 632310 - DNA, 19 bp, Mus musculus
  siRNA target sequence for Grik1 (NM_146072.1,1101-1119).
cggatcaccttcaataaga

SEQ ID NO: 632311 - DNA, 19 bp, Mus musculus
  siRNA target sequence for Grik1 (NM_146072.1,1148-1166).
ggacattatcagtctcaaa

SEQ ID NO: 632312 - DNA, 19 bp, Mus musculus
  siRNA target sequence for Grik1 (NM_146072.1,1234-1252).
gagacaggtccaacaatat

SEQ ID NO: 632313 - DNA, 19 bp, Mus musculus
  siRNA target sequence for Grik1 (NM_146072.1,1236-1254).
gacaggtccaacaatatca

SEQ ID NO: 632314 - DNA, 19 bp, Mus musculus
  siRNA target sequence for Grik1 (NM_146072.1,1267-1285).
ctaaccgaacgctcattgt

SEQ ID NO: 632315 - DNA, 19 bp, Mus musculus
  siRNA target sequence for Grik1 (NM_146072.1,1277-1295).
gctcattgtcaccactatt

SEQ ID NO: 632316 - DNA, 19 bp, Mus musculus
  siRNA target sequence for Grik1 (NM_146072.1,1302-1320).
gagccctacgtgatgtaca

SEQ ID NO: 632317 - DNA, 19 bp, Mus musculus
  siRNA target sequence for Grik1 (NM_146072.1,1316-1334).
gtacaggaaatccgataaa

SEQ ID NO: 632318 - DNA, 19 bp, Mus musculus
  siRNA target sequence for Grik1 (NM_146072.1,1319-1337).
caggaaatccgataaacca

SEQ ID NO: 632319 - DNA, 19 bp, Mus musculus
  siRNA target sequence for Grik1 (NM_146072.1,1335-1353).
ccactgtacggaaatgaca

SEQ ID NO: 632320 - DNA, 19 bp, Mus musculus
  siRNA target sequence for Grik1 (NM_146072.1,1340-1358).
gtacggaaatgacagattt

SEQ ID NO: 632321 - DNA, 19 bp, Mus musculus
  siRNA target sequence for Grik1 (NM_146072.1,1343-1361).
cggaaatgacagatttgaa

SEQ ID NO: 632322 - DNA, 19 bp, Mus musculus
  siRNA target sequence for Grik1 (NM_146072.1,1379-1397).
gctgaaagaactgtcaaat

SEQ ID NO: 632323 - DNA, 19 bp, Mus musculus
  siRNA target sequence for Grik1 (NM_146072.1,1400-1418).
cctaggtttcctttatgat

SEQ ID NO: 632324 - DNA, 19 bp, Mus musculus
  siRNA target sequence for Grik1 (NM_146072.1,1427-1445).
ggttcctgacggcaaatat

SEQ ID NO: 632325 - DNA, 19 bp, Mus musculus
  siRNA target sequence for Grik1 (NM_146072.1,1467-1485).
gagtggaacgggatggtta

SEQ ID NO: 632326 - DNA, 19 bp, Mus musculus
  siRNA target sequence for Grik1 (NM_146072.1,1537-1555).
cgtatgtacgggagaaagt

SEQ ID NO: 632327 - DNA, 19 bp, Mus musculus
  siRNA target sequence for Grik1 (NM_146072.1,1707-1725).
gtgctttttgtgattgcaa

SEQ ID NO: 632328 - DNA, 19 bp, Mus musculus
  siRNA target sequence for Grik1 (NM_146072.1,1732-1750).
caccctacgagtggtataa

SEQ ID NO: 632329 - DNA, 19 bp, Mus musculus
  siRNA target sequence for Grik1 (NM_146072.1,1865-1883).
ggctctatcgaccagaata

SEQ ID NO: 632330 - DNA, 19 bp, Mus musculus
  siRNA target sequence for Grik1 (NM_146072.1,1947-1965).
gccttcttgacagtagaaa

SEQ ID NO: 632331 - DNA, 19 bp, Mus musculus
  siRNA target sequence for Grik1 (NM_146072.1,2117-2135).
gcagagcgccctggttaaa

SEQ ID NO: 632332 - DNA, 19 bp, Mus musculus
  siRNA target sequence for Grik1 (NM_146072.1,2118-2136).
cagagcgccctggttaaaa

SEQ ID NO: 632333 - DNA, 19 bp, Mus musculus
  siRNA target sequence for Grik1 (NM_146072.1,2190-2208).
gagtccaccagcattgagt

SEQ ID NO: 632334 - DNA, 19 bp, Mus musculus
  siRNA target sequence for Grik1 (NM_146072.1,2192-2210).
gtccaccagcattgagtat

SEQ ID NO: 632335 - DNA, 19 bp, Mus musculus
  siRNA target sequence for Grik1 (NM_146072.1,2295-2313).
ccttaccgggataaaatta

SEQ ID NO: 632336 - DNA, 19 bp, Mus musculus
  siRNA target sequence for Grik1 (NM_146072.1,2300-2318).
ccgggataaaattacaatt

SEQ ID NO: 632337 - DNA, 19 bp, Mus musculus
  siRNA target sequence for Grik1 (NM_146072.1,2303-2321).
ggataaaattacaattgct

SEQ ID NO: 632338 - DNA, 19 bp, Mus musculus
  siRNA target sequence for Grik1 (NM_146072.1,2337-2355).
gaagaagggaagcttcata

SEQ ID NO: 632339 - DNA, 19 bp, Mus musculus
  siRNA target sequence for Grik1 (NM_146072.1,2487-2505).
gtagccattggagaattca

SEQ ID NO: 632340 - DNA, 19 bp, Mus musculus
  siRNA target sequence for Grik1 (NM_146072.1,2490-2508).
gccattggagaattcatat

SEQ ID NO: 632341 - DNA, 19 bp, Mus musculus
  siRNA target sequence for Grik1 (NM_146072.1,2510-2528).
caaatcacggaagaacaat

SEQ ID NO: 632342 - DNA, 19 bp, Mus musculus
  siRNA target sequence for Grik1 (NM_146072.1,2593-2611).
ccacttccgggactacatt

SEQ ID NO: 632343 - DNA, 19 bp, Mus musculus
  siRNA target sequence for Grik1 (NM_146072.1,2594-2612).
cacttccgggactacatta

SEQ ID NO: 632344 - DNA, 19 bp, Mus musculus
  siRNA target sequence for Grik1 (NM_146072.1,2600-2618).
cgggactacattatctaca

SEQ ID NO: 632345 - DNA, 19 bp, Mus musculus
  siRNA target sequence for Grik1 (NM_146072.1,2622-2640).
gtagagtgtggcaaattat

SEQ ID NO: 632346 - DNA, 19 bp, Mus musculus
  siRNA target sequence for Grik1 (NM_146072.1,2627-2645).
gtgtggcaaattattacga

SEQ ID NO: 632347 - DNA, 19 bp, Mus musculus
  siRNA target sequence for Grik2 (NM_010349.1,164-182).
ccccagttttaagtaatct

SEQ ID NO: 632348 - DNA, 19 bp, Mus musculus
  siRNA target sequence for Grik2 (NM_010349.1,165-183).
cccagttttaagtaatcta

SEQ ID NO: 632349 - DNA, 19 bp, Mus musculus
  siRNA target sequence for Grik2 (NM_010349.1,184-202).
gtcttcagtcgctccatta

SEQ ID NO: 632350 - DNA, 19 bp, Mus musculus
  siRNA target sequence for Grik2 (NM_010349.1,186-204).
cttcagtcgctccattaaa

SEQ ID NO: 632351 - DNA, 19 bp, Mus musculus
  siRNA target sequence for Grik2 (NM_010349.1,255-273).
gttaagattcggtggtata

SEQ ID NO: 632352 - DNA, 19 bp, Mus musculus
  siRNA target sequence for Grik2 (NM_010349.1,302-320).
gagctgaagaacttgcatt

SEQ ID NO: 632353 - DNA, 19 bp, Mus musculus
  siRNA target sequence for Grik2 (NM_010349.1,323-341).
gatttgctgtgaatacaat

SEQ ID NO: 632354 - DNA, 19 bp, Mus musculus
  siRNA target sequence for Grik2 (NM_010349.1,372-390).
cacgttaacatatgataca

SEQ ID NO: 632355 - DNA, 19 bp, Mus musculus
  siRNA target sequence for Grik2 (NM_010349.1,472-490).
ggtccttcacacagttcat

SEQ ID NO: 632356 - DNA, 19 bp, Mus musculus
  siRNA target sequence for Grik2 (NM_010349.1,566-584).
cagacaataaggattcctt

SEQ ID NO: 632357 - DNA, 19 bp, Mus musculus
  siRNA target sequence for Grik2 (NM_010349.1,595-613).
ctctacccagacttctctt

SEQ ID NO: 632358 - DNA, 19 bp, Mus musculus
  siRNA target sequence for Grik2 (NM_010349.1,620-638).
gccgtgccatcttggattt

SEQ ID NO: 632359 - DNA, 19 bp, Mus musculus
  siRNA target sequence for Grik2 (NM_010349.1,681-699).
cgacagcactggtctcatt

SEQ ID NO: 632360 - DNA, 19 bp, Mus musculus
  siRNA target sequence for Grik2 (NM_010349.1,722-740).
ctccatcaaggtacaatct

SEQ ID NO: 632361 - DNA, 19 bp, Mus musculus
  siRNA target sequence for Grik2 (NM_010349.1,731-749).
ggtacaatcttcgacttaa

SEQ ID NO: 632362 - DNA, 19 bp, Mus musculus
  siRNA target sequence for Grik2 (NM_010349.1,732-750).
gtacaatcttcgacttaaa

SEQ ID NO: 632363 - DNA, 19 bp, Mus musculus
  siRNA target sequence for Grik2 (NM_010349.1,735-753).
caatcttcgacttaaaatt

SEQ ID NO: 632364 - DNA, 19 bp, Mus musculus
  siRNA target sequence for Grik2 (NM_010349.1,757-775).
cagctgccagctgatacaa

SEQ ID NO: 632365 - DNA, 19 bp, Mus musculus
  siRNA target sequence for Grik2 (NM_010349.1,759-777).
gctgccagctgatacaaaa

SEQ ID NO: 632366 - DNA, 19 bp, Mus musculus
  siRNA target sequence for Grik2 (NM_010349.1,875-893).
cattagctatgggaatgat

SEQ ID NO: 632367 - DNA, 19 bp, Mus musculus
  siRNA target sequence for Grik2 (NM_010349.1,982-1000).
gggttcagaatactaaata

SEQ ID NO: 632368 - DNA, 19 bp, Mus musculus
  siRNA target sequence for Grik2 (NM_010349.1,1185-1203).
gcaatgcaatcgacacaaa

SEQ ID NO: 632369 - DNA, 19 bp, Mus musculus
  siRNA target sequence for Grik2 (NM_010349.1,1222-1240).
cgcttcatgagcctaatta

SEQ ID NO: 632370 - DNA, 19 bp, Mus musculus
  siRNA target sequence for Grik2 (NM_010349.1,1223-1241).
gcttcatgagcctaattaa

SEQ ID NO: 632371 - DNA, 19 bp, Mus musculus
  siRNA target sequence for Grik2 (NM_010349.1,1224-1242).
cttcatgagcctaattaaa

SEQ ID NO: 632372 - DNA, 19 bp, Mus musculus
  siRNA target sequence for Grik2 (NM_010349.1,1290-1308).
caatggattgcgaacagat

SEQ ID NO: 632373 - DNA, 19 bp, Mus musculus
  siRNA target sequence for Grik2 (NM_010349.1,1378-1396).
ggcctgaatatgacagaaa

SEQ ID NO: 632374 - DNA, 19 bp, Mus musculus
  siRNA target sequence for Grik2 (NM_010349.1,1380-1398).
cctgaatatgacagaaagt

SEQ ID NO: 632375 - DNA, 19 bp, Mus musculus
  siRNA target sequence for Grik2 (NM_010349.1,1410-1428).
gccagcaaatattacagat

SEQ ID NO: 632376 - DNA, 19 bp, Mus musculus
  siRNA target sequence for Grik2 (NM_010349.1,1414-1432).
gcaaatattacagattcat

SEQ ID NO: 632377 - DNA, 19 bp, Mus musculus
  siRNA target sequence for Grik2 (NM_010349.1,1426-1444).
gattcattgtctaatcgtt

SEQ ID NO: 632378 - DNA, 19 bp, Mus musculus
  siRNA target sequence for Grik2 (NM_010349.1,1434-1452).
gtctaatcgttctttgatt

SEQ ID NO: 632379 - DNA, 19 bp, Mus musculus
  siRNA target sequence for Grik2 (NM_010349.1,1471-1489).
gaaccatatgtcctgttta

SEQ ID NO: 632380 - DNA, 19 bp, Mus musculus
  siRNA target sequence for Grik2 (NM_010349.1,1474-1492).
ccatatgtcctgtttaaga

SEQ ID NO: 632381 - DNA, 19 bp, Mus musculus
  siRNA target sequence for Grik2 (NM_010349.1,1494-1512).
gtctgacaaacctctctat

SEQ ID NO: 632382 - DNA, 19 bp, Mus musculus
  siRNA target sequence for Grik2 (NM_010349.1,1509-1527).
ctatgggaatgatcgattt

SEQ ID NO: 632383 - DNA, 19 bp, Mus musculus
  siRNA target sequence for Grik2 (NM_010349.1,1522-1540).
cgatttgaaggctactgta

SEQ ID NO: 632384 - DNA, 19 bp, Mus musculus
  siRNA target sequence for Grik2 (NM_010349.1,1523-1541).
gatttgaaggctactgtat

SEQ ID NO: 632385 - DNA, 19 bp, Mus musculus
  siRNA target sequence for Grik2 (NM_010349.1,1543-1561).
gatcttctacgagagttat

SEQ ID NO: 632386 - DNA, 19 bp, Mus musculus
  siRNA target sequence for Grik2 (NM_010349.1,1549-1567).
ctacgagagttatctacaa

SEQ ID NO: 632387 - DNA, 19 bp, Mus musculus
  siRNA target sequence for Grik2 (NM_010349.1,1565-1583).
caatccttggctttacata

SEQ ID NO: 632388 - DNA, 19 bp, Mus musculus
  siRNA target sequence for Grik2 (NM_010349.1,1653-1671).
ggttcgtgagctaattgat

SEQ ID NO: 632389 - DNA, 19 bp, Mus musculus
  siRNA target sequence for Grik2 (NM_010349.1,1657-1675).
cgtgagctaattgatcata

SEQ ID NO: 632390 - DNA, 19 bp, Mus musculus
  siRNA target sequence for Grik2 (NM_010349.1,1658-1676).
gtgagctaattgatcataa

SEQ ID NO: 632391 - DNA, 19 bp, Mus musculus
  siRNA target sequence for Grik2 (NM_010349.1,1662-1680).
gctaattgatcataaagct

SEQ ID NO: 632392 - DNA, 19 bp, Mus musculus
  siRNA target sequence for Grik2 (NM_010349.1,1745-1763).
cgtttatgactcttggaat

SEQ ID NO: 632393 - DNA, 19 bp, Mus musculus
  siRNA target sequence for Grik2 (NM_010349.1,1752-1770).
gactcttggaataagtatt

SEQ ID NO: 632394 - DNA, 19 bp, Mus musculus
  siRNA target sequence for Grik2 (NM_010349.1,1754-1772).
ctcttggaataagtatttt

SEQ ID NO: 632395 - DNA, 19 bp, Mus musculus
  siRNA target sequence for Grik2 (NM_010349.1,1822-1840).
cctctctcccctgatatct

SEQ ID NO: 632396 - DNA, 19 bp, Mus musculus
  siRNA target sequence for Grik2 (NM_010349.1,1904-1922).
gtccctatgagtggtataa

SEQ ID NO: 632397 - DNA, 19 bp, Mus musculus
  siRNA target sequence for Grik2 (NM_010349.1,2157-2175).
ctctgctgacgatttagct

SEQ ID NO: 632398 - DNA, 19 bp, Mus musculus
  siRNA target sequence for Grik2 (NM_010349.1,2159-2177).
ctgctgacgatttagctaa

SEQ ID NO: 632399 - DNA, 19 bp, Mus musculus
  siRNA target sequence for Grik2 (NM_010349.1,2164-2182).
gacgatttagctaagcaaa

SEQ ID NO: 632400 - DNA, 19 bp, Mus musculus
  siRNA target sequence for Grik2 (NM_010349.1,2212-2230).
ggcgcaaccatgacgtttt

SEQ ID NO: 632401 - DNA, 19 bp, Mus musculus
  siRNA target sequence for Grik2 (NM_010349.1,2213-2231).
gcgcaaccatgacgttttt

SEQ ID NO: 632402 - DNA, 19 bp, Mus musculus
  siRNA target sequence for Grik2 (NM_010349.1,2215-2233).
gcaaccatgacgtttttca

SEQ ID NO: 632403 - DNA, 19 bp, Mus musculus
  siRNA target sequence for Grik2 (NM_010349.1,2216-2234).
caaccatgacgtttttcaa

SEQ ID NO: 632404 - DNA, 19 bp, Mus musculus
  siRNA target sequence for Grik2 (NM_010349.1,2334-2352).
cctcacctccgattatgct

SEQ ID NO: 632405 - DNA, 19 bp, Mus musculus
  siRNA target sequence for Grik2 (NM_010349.1,2335-2353).
ctcacctccgattatgctt

SEQ ID NO: 632406 - DNA, 19 bp, Mus musculus
  siRNA target sequence for Grik2 (NM_010349.1,2339-2357).
cctccgattatgctttctt

SEQ ID NO: 632407 - DNA, 19 bp, Mus musculus
  siRNA target sequence for Grik2 (NM_010349.1,2366-2384).
caacgaccatcgagtttgt

SEQ ID NO: 632408 - DNA, 19 bp, Mus musculus
  siRNA target sequence for Grik2 (NM_010349.1,2383-2401).
gttacccagcggaactgta

SEQ ID NO: 632409 - DNA, 19 bp, Mus musculus
  siRNA target sequence for Grik2 (NM_010349.1,2457-2475).
catgggttctccatatcga

SEQ ID NO: 632410 - DNA, 19 bp, Mus musculus
  siRNA target sequence for Grik2 (NM_010349.1,2467-2485).
ccatatcgagacaaaatca

SEQ ID NO: 632411 - DNA, 19 bp, Mus musculus
  siRNA target sequence for Grik2 (NM_010349.1,2591-2609).
ctctaggggtgcagaatat

SEQ ID NO: 632412 - DNA, 19 bp, Mus musculus
  siRNA target sequence for Grik2 (NM_010349.1,2638-2656).
ggcttggtgctctcagttt

SEQ ID NO: 632413 - DNA, 19 bp, Mus musculus
  siRNA target sequence for Grik2 (NM_010349.1,2697-2715).
cgctcaattggaaaaggaa

SEQ ID NO: 632414 - DNA, 19 bp, Mus musculus
  siRNA target sequence for Grik2 (NM_010349.1,2712-2730).
ggaatcttctatttggtta

SEQ ID NO: 632415 - DNA, 19 bp, Mus musculus
  siRNA target sequence for Grik4 (NM_175481.2,584-602).
ggttccaactccagagatt

SEQ ID NO: 632416 - DNA, 19 bp, Mus musculus
  siRNA target sequence for Grik4 (NM_175481.2,732-750).
gctgctccgacaattcctt

SEQ ID NO: 632417 - DNA, 19 bp, Mus musculus
  siRNA target sequence for Grik4 (NM_175481.2,733-751).
ctgctccgacaattcctta

SEQ ID NO: 632418 - DNA, 19 bp, Mus musculus
  siRNA target sequence for Grik4 (NM_175481.2,829-847).
gacaagacagctactatca

SEQ ID NO: 632419 - DNA, 19 bp, Mus musculus
  siRNA target sequence for Grik4 (NM_175481.2,905-923).
ggatggtgtcagcctatta

SEQ ID NO: 632420 - DNA, 19 bp, Mus musculus
  siRNA target sequence for Grik4 (NM_175481.2,914-932).
cagcctattacacatacat

SEQ ID NO: 632421 - DNA, 19 bp, Mus musculus
  siRNA target sequence for Grik4 (NM_175481.2,969-987).
cagccttgtggatgataga

SEQ ID NO: 632422 - DNA, 19 bp, Mus musculus
  siRNA target sequence for Grik4 (NM_175481.2,1151-1169).
cagcggtacaggaactgaa

SEQ ID NO: 632423 - DNA, 19 bp, Mus musculus
  siRNA target sequence for Grik4 (NM_175481.2,1274-1292).
gtcttaccggccacattga

SEQ ID NO: 632424 - DNA, 19 bp, Mus musculus
  siRNA target sequence for Grik4 (NM_175481.2,1276-1294).
cttaccggccacattgaat

SEQ ID NO: 632425 - DNA, 19 bp, Mus musculus
  siRNA target sequence for Grik4 (NM_175481.2,1280-1298).
ccggccacattgaattcaa

SEQ ID NO: 632426 - DNA, 19 bp, Mus musculus
  siRNA target sequence for Grik4 (NM_175481.2,1527-1545).
ccgatatgagggattctgt

SEQ ID NO: 632427 - DNA, 19 bp, Mus musculus
  siRNA target sequence for Grik4 (NM_175481.2,1570-1588).
gagatcctacggttcaact

SEQ ID NO: 632428 - DNA, 19 bp, Mus musculus
  siRNA target sequence for Grik4 (NM_175481.2,1576-1594).
ctacggttcaactacaaga

SEQ ID NO: 632429 - DNA, 19 bp, Mus musculus
  siRNA target sequence for Grik4 (NM_175481.2,1712-1730).
cagcggaacgtgagaaagt

SEQ ID NO: 632430 - DNA, 19 bp, Mus musculus
  siRNA target sequence for Grik4 (NM_175481.2,1714-1732).
gcggaacgtgagaaagtga

SEQ ID NO: 632431 - DNA, 19 bp, Mus musculus
  siRNA target sequence for Grik4 (NM_175481.2,1721-1739).
gtgagaaagtgatcgattt

SEQ ID NO: 632432 - DNA, 19 bp, Mus musculus
  siRNA target sequence for Grik4 (NM_175481.2,1755-1773).
gacgctgggaattagtatt

SEQ ID NO: 632433 - DNA, 19 bp, Mus musculus
  siRNA target sequence for Grik4 (NM_175481.2,1757-1775).
cgctgggaattagtattct

SEQ ID NO: 632434 - DNA, 19 bp, Mus musculus
  siRNA target sequence for Grik4 (NM_175481.2,1793-1811).
gacgcagaccgggctattt

SEQ ID NO: 632435 - DNA, 19 bp, Mus musculus
  siRNA target sequence for Grik4 (NM_175481.2,1896-1914).
ggctcggttgactccttat

SEQ ID NO: 632436 - DNA, 19 bp, Mus musculus
  siRNA target sequence for Grik4 (NM_175481.2,1898-1916).
ctcggttgactccttatga

SEQ ID NO: 632437 - DNA, 19 bp, Mus musculus
  siRNA target sequence for Grik4 (NM_175481.2,1900-1918).
cggttgactccttatgagt

SEQ ID NO: 632438 - DNA, 19 bp, Mus musculus
  siRNA target sequence for Grik4 (NM_175481.2,2035-2053).
gcccctcgagctttgtcta

SEQ ID NO: 632439 - DNA, 19 bp, Mus musculus
  siRNA target sequence for Grik4 (NM_175481.2,2327-2345).
ggattgccagagtgttgaa

SEQ ID NO: 632440 - DNA, 19 bp, Mus musculus
  siRNA target sequence for Grik4 (NM_175481.2,2332-2350).
gccagagtgttgaattcca

SEQ ID NO: 632441 - DNA, 19 bp, Mus musculus
  siRNA target sequence for Grik4 (NM_175481.2,2333-2351).
ccagagtgttgaattccaa

SEQ ID NO: 632442 - DNA, 19 bp, Mus musculus
  siRNA target sequence for Grik4 (NM_175481.2,2517-2535).
gaacaaccgcctggaaatt

SEQ ID NO: 632443 - DNA, 19 bp, Mus musculus
  siRNA target sequence for Grik4 (NM_175481.2,2598-2616).
cctgggaatggagaatatt

SEQ ID NO: 632444 - DNA, 19 bp, Mus musculus
  siRNA target sequence for Grik4 (NM_175481.2,2601-2619).
gggaatggagaatattggt

SEQ ID NO: 632445 - DNA, 19 bp, Mus musculus
  siRNA target sequence for Grik5 (NM_008168.1,567-585).
gcccaagggggttgtatct

SEQ ID NO: 632446 - DNA, 19 bp, Mus musculus
  siRNA target sequence for Grik5 (NM_008168.1,569-587).
ccaagggggttgtatctgt

SEQ ID NO: 632447 - DNA, 19 bp, Mus musculus
  siRNA target sequence for Grik5 (NM_008168.1,621-639).
caccgtgagccatatctgt

SEQ ID NO: 632448 - DNA, 19 bp, Mus musculus
  siRNA target sequence for Grik5 (NM_008168.1,760-778).
cgaatcctcaagtccttta

SEQ ID NO: 632449 - DNA, 19 bp, Mus musculus
  siRNA target sequence for Grik5 (NM_008168.1,761-779).
gaatcctcaagtcctttaa

SEQ ID NO: 632450 - DNA, 19 bp, Mus musculus
  siRNA target sequence for Grik5 (NM_008168.1,942-960).
gtccaccatcatcattgat

SEQ ID NO: 632451 - DNA, 19 bp, Mus musculus
  siRNA target sequence for Grik5 (NM_008168.1,1010-1028).
gaatgacctcagcgtttta

SEQ ID NO: 632452 - DNA, 19 bp, Mus musculus
  siRNA target sequence for Grik5 (NM_008168.1,1016-1034).
cctcagcgttttacaagta

SEQ ID NO: 632453 - DNA, 19 bp, Mus musculus
  siRNA target sequence for Grik5 (NM_008168.1,1019-1037).
cagcgttttacaagtacat

SEQ ID NO: 632454 - DNA, 19 bp, Mus musculus
  siRNA target sequence for Grik5 (NM_008168.1,1131-1149).
ccccttctacccagagttt

SEQ ID NO: 632455 - DNA, 19 bp, Mus musculus
  siRNA target sequence for Grik5 (NM_008168.1,1256-1274).
gcgctgtccgagaactgaa

SEQ ID NO: 632456 - DNA, 19 bp, Mus musculus
  siRNA target sequence for Grik5 (NM_008168.1,1356-1374).
ccttcgaatggtagagtat

SEQ ID NO: 632457 - DNA, 19 bp, Mus musculus
  siRNA target sequence for Grik5 (NM_008168.1,1411-1429).
gggcagaggaccaactaca

SEQ ID NO: 632458 - DNA, 19 bp, Mus musculus
  siRNA target sequence for Grik5 (NM_008168.1,1556-1574).
ctctggtggtcacaactat

SEQ ID NO: 632459 - DNA, 19 bp, Mus musculus
  siRNA target sequence for Grik5 (NM_008168.1,1757-1775).
gcatggttggagaactcat

SEQ ID NO: 632460 - DNA, 19 bp, Mus musculus
  siRNA target sequence for Grik5 (NM_008168.1,1940-1958).
ctgccgtgtggctcttcat

SEQ ID NO: 632461 - DNA, 19 bp, Mus musculus
  siRNA target sequence for Grik5 (NM_008168.1,2283-2301).
ggcggatcagaccaacatt

SEQ ID NO: 632462 - DNA, 19 bp, Mus musculus
  siRNA target sequence for Grik5 (NM_008168.1,2285-2303).
cggatcagaccaacattga

SEQ ID NO: 632463 - DNA, 19 bp, Mus musculus
  siRNA target sequence for Grik5 (NM_008168.1,2398-2416).
cagcccagcgtgtttgtca

SEQ ID NO: 632464 - DNA, 19 bp, Mus musculus
  siRNA target sequence for Grik5 (NM_008168.1,2576-2594).
cccctttccgggatgagat

SEQ ID NO: 632465 - DNA, 19 bp, Mus musculus
  siRNA target sequence for Grik5 (NM_008168.1,2715-2733).
gaacattggcggcattttt

SEQ ID NO: 632466 - DNA, 19 bp, Mus musculus
  siRNA target sequence for Grik5 (NM_008168.1,2742-2760).
gatctgtggcctcatcatt

SEQ ID NO: 632467 - DNA, 19 bp, Mus musculus
  siRNA target sequence for Grik5 (NM_008168.1,2773-2791).
gcggtcatggagttcatct

SEQ ID NO: 632468 - DNA, 19 bp, Mus musculus
  siRNA target sequence for Grin3b (NM_130455.1,483-501).
gtggtggcctctataacct

SEQ ID NO: 632469 - DNA, 19 bp, Mus musculus
  siRNA target sequence for Grin3b (NM_130455.1,1134-1152).
cttccagcggcagtaaatt

SEQ ID NO: 632470 - DNA, 19 bp, Mus musculus
  siRNA target sequence for Grin3b (NM_130455.1,1138-1156).
cagcggcagtaaattgtga

SEQ ID NO: 632471 - DNA, 19 bp, Mus musculus
  siRNA target sequence for Grin3b (NM_130455.1,1452-1470).
gtggaacacccatttgtgt

SEQ ID NO: 632472 - DNA, 19 bp, Mus musculus
  siRNA target sequence for Grin3b (NM_130455.1,1469-1487).
gttcaccagggaatctgat

SEQ ID NO: 632473 - DNA, 19 bp, Mus musculus
  siRNA target sequence for Grin3b (NM_130455.1,1472-1490).
caccagggaatctgatgaa

SEQ ID NO: 632474 - DNA, 19 bp, Mus musculus
  siRNA target sequence for Grin3b (NM_130455.1,1590-1608).
cctcgcaccctgagaagat

SEQ ID NO: 632475 - DNA, 19 bp, Mus musculus
  siRNA target sequence for Grin3b (NM_130455.1,1767-1785).
gccgtgaccagcttcagta

SEQ ID NO: 632476 - DNA, 19 bp, Mus musculus
  siRNA target sequence for Grin3b (NM_130455.1,1768-1786).
ccgtgaccagcttcagtat

SEQ ID NO: 632477 - DNA, 19 bp, Mus musculus
  siRNA target sequence for Grin3b (NM_130455.1,1798-1816).
gctcccaggtggtggattt

SEQ ID NO: 632478 - DNA, 19 bp, Mus musculus
  siRNA target sequence for Grin3b (NM_130455.1,1853-1871).
ggtgcgcacgcgagataca

SEQ ID NO: 632479 - DNA, 19 bp, Mus musculus
  siRNA target sequence for Grin3b (NM_130455.1,2073-2091).
cgcactgtctccagtaaga

SEQ ID NO: 632480 - DNA, 19 bp, Mus musculus
  siRNA target sequence for Grin3b (NM_130455.1,2107-2125).
ccggacgcttcctcatgaa

SEQ ID NO: 632481 - DNA, 19 bp, Mus musculus
  siRNA target sequence for Grin3b (NM_130455.1,2108-2126).
cggacgcttcctcatgaat

SEQ ID NO: 632482 - DNA, 19 bp, Mus musculus
  siRNA target sequence for Grin3b (NM_130455.1,2112-2130).
cgcttcctcatgaatctct

SEQ ID NO: 632483 - DNA, 19 bp, Mus musculus
  siRNA target sequence for Grin3b (NM_130455.1,2150-2168).
ggtgctatccagttacaca

SEQ ID NO: 632484 - DNA, 19 bp, Mus musculus
  siRNA target sequence for Grin3b (NM_130455.1,2210-2228).
ggagctgtctggaatccat

SEQ ID NO: 632485 - DNA, 19 bp, Mus musculus
  siRNA target sequence for Grin3b (NM_130455.1,2411-2429).
catcatggataaatcacta

SEQ ID NO: 632486 - DNA, 19 bp, Mus musculus
  siRNA target sequence for Grin3b (NM_130455.1,2770-2788).
gcatccgcaggggcaataa

SEQ ID NO: 632487 - DNA, 19 bp, Mus musculus
  siRNA target sequence for Grin3b (NM_130455.1,2781-2799).
ggcaataagctgcagtatt

SEQ ID NO: 632488 - DNA, 19 bp, Mus musculus
  siRNA target sequence for 4933425F03Rik (NM_028903.1,618-636).
gtcaaccggctgaatgaga

SEQ ID NO: 632489 - DNA, 19 bp, Mus musculus
  siRNA target sequence for 4933425F03Rik (NM_028903.1,865-883).
ccgcacagctggaactcta

SEQ ID NO: 632490 - DNA, 19 bp, Mus musculus
  siRNA target sequence for 4933425F03Rik (NM_028903.1,891-909).
caggtggaaagcaatcgaa

SEQ ID NO: 632491 - DNA, 19 bp, Mus musculus
  siRNA target sequence for 4933425F03Rik (NM_028903.1,1403-1421).
gggcatgcgcggattcaaa

SEQ ID NO: 632492 - DNA, 19 bp, Mus musculus
  siRNA target sequence for 4933425F03Rik (NM_028903.1,1640-1658).
gtaccggacagctcgtttt

SEQ ID NO: 632493 - DNA, 19 bp, Mus musculus
  siRNA target sequence for 4933425F03Rik (NM_028903.1,1666-1684).
gcacagggaggatttggat

SEQ ID NO: 632494 - DNA, 19 bp, Mus musculus
  siRNA target sequence for 4933425F03Rik (NM_028903.1,1773-1791).
gatgctggggtgacttgta

SEQ ID NO: 632495 - DNA, 19 bp, Mus musculus
  siRNA target sequence for 5430419D17Rik (NM_175166.2,128-146).
gaaggaacggcctaagaga

SEQ ID NO: 632496 - DNA, 19 bp, Mus musculus
  siRNA target sequence for 5430419D17Rik (NM_175166.2,231-249).
gccaccatattatcagttt

SEQ ID NO: 632497 - DNA, 19 bp, Mus musculus
  siRNA target sequence for 5430419D17Rik (NM_175166.2,232-250).
ccaccatattatcagtttt

SEQ ID NO: 632498 - DNA, 19 bp, Mus musculus
  siRNA target sequence for 5430419D17Rik (NM_175166.2,290-308).
cccgagttcctctgtatca

SEQ ID NO: 632499 - DNA, 19 bp, Mus musculus
  siRNA target sequence for 5430419D17Rik (NM_175166.2,484-502).
gccgtgtagagctcttcta

SEQ ID NO: 632500 - DNA, 19 bp, Mus musculus
  siRNA target sequence for 5430419D17Rik (NM_175166.2,543-561).
cttccacaagcgaacatca

SEQ ID NO: 632501 - DNA, 19 bp, Mus musculus
  siRNA target sequence for 5430419D17Rik (NM_175166.2,546-564).
ccacaagcgaacatcatct

SEQ ID NO: 632502 - DNA, 19 bp, Mus musculus
  siRNA target sequence for 5430419D17Rik (NM_175166.2,595-613).
cggccctgagcgaagctta

SEQ ID NO: 632503 - DNA, 19 bp, Mus musculus
  siRNA target sequence for 5430419D17Rik (NM_175166.2,598-616).
ccctgagcgaagcttactt

SEQ ID NO: 632504 - DNA, 19 bp, Mus musculus
  siRNA target sequence for 5430419D17Rik (NM_175166.2,599-617).
cctgagcgaagcttacttt

SEQ ID NO: 632505 - DNA, 19 bp, Mus musculus
  siRNA target sequence for 5430419D17Rik (NM_175166.2,620-638).
gcaaggttctgggaagatt

SEQ ID NO: 632506 - DNA, 19 bp, Mus musculus
  siRNA target sequence for 5430419D17Rik (NM_175166.2,632-650).
gaagattctccttgataat

SEQ ID NO: 632507 - DNA, 19 bp, Mus musculus
  siRNA target sequence for 5430419D17Rik (NM_175166.2,829-847).
ctcggtgtggtggagttat

SEQ ID NO: 632508 - DNA, 19 bp, Mus musculus
  siRNA target sequence for 5430419D17Rik (NM_175166.2,850-868).
ccagtgcacccggaaaaat

SEQ ID NO: 632509 - DNA, 19 bp, Mus musculus
  siRNA target sequence for 5430419D17Rik (NM_175166.2,851-869).
cagtgcacccggaaaaatt

SEQ ID NO: 632510 - DNA, 19 bp, Mus musculus
  siRNA target sequence for 5430419D17Rik (NM_175166.2,856-874).
cacccggaaaaattaagaa

SEQ ID NO: 632511 - DNA, 19 bp, Mus musculus
  siRNA target sequence for 5430419D17Rik (NM_175166.2,928-946).
caagcacctctgagcatat

SEQ ID NO: 632512 - DNA, 19 bp, Mus musculus
  siRNA target sequence for 5430419D17Rik (NM_175166.2,977-995).
ctgcaccaacgagtatttt

SEQ ID NO: 632513 - DNA, 19 bp, Mus musculus
  siRNA target sequence for 5430419D17Rik (NM_175166.2,1084-1102).
caatgaccctcgtgtactt

SEQ ID NO: 632514 - DNA, 19 bp, Mus musculus
  siRNA target sequence for 5430419D17Rik (NM_175166.2,1136-1154).
ggcatattattattttgaa

SEQ ID NO: 632515 - DNA, 19 bp, Mus musculus
  siRNA target sequence for 5430419D17Rik (NM_175166.2,1171-1189).
caaagaccccgtatctgat

SEQ ID NO: 632516 - DNA, 19 bp, Mus musculus
  siRNA target sequence for 5430419D17Rik (NM_175166.2,1224-1242).
gaaagaccacaattctcaa

SEQ ID NO: 632517 - DNA, 19 bp, Mus musculus
  siRNA target sequence for 5430419D17Rik (NM_175166.2,1264-1282).
cacctcttcccgtatctga

SEQ ID NO: 632518 - DNA, 19 bp, Mus musculus
  siRNA target sequence for 5430419D17Rik (NM_175166.2,1333-1351).
caggacgagtggaaatcct

SEQ ID NO: 632519 - DNA, 19 bp, Mus musculus
  siRNA target sequence for 5430419D17Rik (NM_175166.2,1385-1403).
cctgtggggttcaaatgaa

SEQ ID NO: 632520 - DNA, 19 bp, Mus musculus
  siRNA target sequence for 5430419D17Rik (NM_175166.2,1513-1531).
ctggaatggaacattacct

SEQ ID NO: 632521 - DNA, 19 bp, Mus musculus
  siRNA target sequence for 5430419D17Rik (NM_175166.2,1703-1721).
cagcctctcgggttcattt

SEQ ID NO: 632522 - DNA, 19 bp, Mus musculus
  siRNA target sequence for 5430419D17Rik (NM_175166.2,1707-1725).
ctctcgggttcatttacga

SEQ ID NO: 632523 - DNA, 19 bp, Mus musculus
  siRNA target sequence for 5430419D17Rik (NM_175166.2,1726-1744).
gtccacggtacccagaaaa

SEQ ID NO: 632524 - DNA, 19 bp, Mus musculus
  siRNA target sequence for 5430419D17Rik (NM_175166.2,1728-1746).
ccacggtacccagaaaact

SEQ ID NO: 632525 - DNA, 19 bp, Mus musculus
  siRNA target sequence for 5430419D17Rik (NM_175166.2,1729-1747).
cacggtacccagaaaacta

SEQ ID NO: 632526 - DNA, 19 bp, Mus musculus
  siRNA target sequence for 5430419D17Rik (NM_175166.2,1787-1805).
gaaaaatttccgcatagaa

SEQ ID NO: 632527 - DNA, 19 bp, Mus musculus
  siRNA target sequence for 5430419D17Rik (NM_175166.2,1796-1814).
ccgcatagaactcatgatt

SEQ ID NO: 632528 - DNA, 19 bp, Mus musculus
  siRNA target sequence for 5430419D17Rik (NM_175166.2,1846-1864).
gtccctatgactcaattga

SEQ ID NO: 632529 - DNA, 19 bp, Mus musculus
  siRNA target sequence for 5430419D17Rik (NM_175166.2,1849-1867).
cctatgactcaattgagat

SEQ ID NO: 632530 - DNA, 19 bp, Mus musculus
  siRNA target sequence for 5430419D17Rik (NM_175166.2,1961-1979).
ggtgttccgcagcgattat

SEQ ID NO: 632531 - DNA, 19 bp, Mus musculus
  siRNA target sequence for 5430419D17Rik (NM_175166.2,1962-1980).
gtgttccgcagcgattata

SEQ ID NO: 632532 - DNA, 19 bp, Mus musculus
  siRNA target sequence for 5430419D17Rik (NM_175166.2,1967-1985).
ccgcagcgattatatgaca

SEQ ID NO: 632533 - DNA, 19 bp, Mus musculus
  siRNA target sequence for 5430419D17Rik (NM_175166.2,1968-1986).
cgcagcgattatatgacaa

SEQ ID NO: 632534 - DNA, 19 bp, Mus musculus
  siRNA target sequence for 5430419D17Rik (NM_175166.2,1972-1990).
gcgattatatgacaacaaa

SEQ ID NO: 632535 - DNA, 19 bp, Mus musculus
  siRNA target sequence for 5430419D17Rik (NM_175166.2,2227-2245).
gtccaggctctggaaacat

SEQ ID NO: 632536 - DNA, 19 bp, Mus musculus
  siRNA target sequence for 5430419D17Rik (NM_175166.2,2302-2320).
gctctgcctggttagatca

SEQ ID NO: 632537 - DNA, 19 bp, Mus musculus
  siRNA target sequence for 5430419D17Rik (NM_175166.2,2305-2323).
ctgcctggttagatcacaa

SEQ ID NO: 632538 - DNA, 19 bp, Mus musculus
  siRNA target sequence for 5430419D17Rik (NM_175166.2,2445-2463).
ccttggtatcctactaact

SEQ ID NO: 632539 - DNA, 19 bp, Mus musculus
  siRNA target sequence for 5430419D17Rik (NM_175166.2,2446-2464).
cttggtatcctactaacta

SEQ ID NO: 632540 - DNA, 19 bp, Mus musculus
  siRNA target sequence for 5830411N06Rik (NM_175533.2,170-188).
gtttcctgggcggtgataa

SEQ ID NO: 632541 - DNA, 19 bp, Mus musculus
  siRNA target sequence for 5830411N06Rik (NM_175533.2,177-195).
gggcggtgataataaatgt

SEQ ID NO: 632542 - DNA, 19 bp, Mus musculus
  siRNA target sequence for 5830411N06Rik (NM_175533.2,179-197).
gcggtgataataaatgtga

SEQ ID NO: 632543 - DNA, 19 bp, Mus musculus
  siRNA target sequence for 5830411N06Rik (NM_175533.2,225-243).
gcagtggggccttatgtgt

SEQ ID NO: 632544 - DNA, 19 bp, Mus musculus
  siRNA target sequence for 5830411N06Rik (NM_175533.2,348-366).
gcaaccttggctatatgat

SEQ ID NO: 632545 - DNA, 19 bp, Mus musculus
  siRNA target sequence for 5830411N06Rik (NM_175533.2,472-490).
ggtggtaccacactacaaa

SEQ ID NO: 632546 - DNA, 19 bp, Mus musculus
  siRNA target sequence for 5830411N06Rik (NM_175533.2,473-491).
gtggtaccacactacaaat

SEQ ID NO: 632547 - DNA, 19 bp, Mus musculus
  siRNA target sequence for 5830411N06Rik (NM_175533.2,595-613).
gtctgcagacagttggaat

SEQ ID NO: 632548 - DNA, 19 bp, Mus musculus
  siRNA target sequence for 5830411N06Rik (NM_175533.2,638-656).
gagcccacgatggaactaa

SEQ ID NO: 632549 - DNA, 19 bp, Mus musculus
  siRNA target sequence for 5830411N06Rik (NM_175533.2,690-708).
gggaacagagaccaacatt

SEQ ID NO: 632550 - DNA, 19 bp, Mus musculus
  siRNA target sequence for 5830411N06Rik (NM_175533.2,712-730).
caatgcctgatcaatgtga

SEQ ID NO: 632551 - DNA, 19 bp, Mus musculus
  siRNA target sequence for 5830411N06Rik (NM_175533.2,923-941).
gtggcactgctgtatccat

SEQ ID NO: 632552 - DNA, 19 bp, Mus musculus
  siRNA target sequence for 5830411N06Rik (NM_175533.2,997-1015).
cgctgtatgggcaacgaat

SEQ ID NO: 632553 - DNA, 19 bp, Mus musculus
  siRNA target sequence for 5830411N06Rik (NM_175533.2,1001-1019).
gtatgggcaacgaatcact

SEQ ID NO: 632554 - DNA, 19 bp, Mus musculus
  siRNA target sequence for 5830411N06Rik (NM_175533.2,1012-1030).
gaatcactgctgttccatt

SEQ ID NO: 632555 - DNA, 19 bp, Mus musculus
  siRNA target sequence for 5830411N06Rik (NM_175533.2,1313-1331).
gaacagagccccacttact

SEQ ID NO: 632556 - DNA, 19 bp, Mus musculus
  siRNA target sequence for A430110N23 (NM_173008.1,476-494).
cagcgtgcagctaactcta

SEQ ID NO: 632557 - DNA, 19 bp, Mus musculus
  siRNA target sequence for A430110N23 (NM_173008.1,1828-1846).
catctcagaccctttcagt

SEQ ID NO: 632558 - DNA, 19 bp, Mus musculus
  siRNA target sequence for A430110N23 (NM_173008.1,1964-1982).
gggaaagctcccaagagta

SEQ ID NO: 632559 - DNA, 19 bp, Mus musculus
  siRNA target sequence for A430110N23 (NM_173008.1,1973-1991).
cccaagagtaccaagaagt

SEQ ID NO: 632560 - DNA, 19 bp, Mus musculus
  siRNA target sequence for A430110N23 (NM_173008.1,1983-2001).
ccaagaagtgggtgactaa

SEQ ID NO: 632561 - DNA, 19 bp, Mus musculus
  siRNA target sequence for A430110N23 (NM_173008.1,1984-2002).
caagaagtgggtgactaaa

SEQ ID NO: 632562 - DNA, 19 bp, Mus musculus
  siRNA target sequence for A430110N23 (NM_173008.1,1987-2005).
gaagtgggtgactaaaaat

SEQ ID NO: 632563 - DNA, 19 bp, Mus musculus
  siRNA target sequence for A430110N23 (NM_173008.1,1990-2008).
gtgggtgactaaaaatgca

SEQ ID NO: 632564 - DNA, 19 bp, Mus musculus
  siRNA target sequence for A430110N23 (NM_173008.1,2096-2114).
cgtacctctgagttaccaa

SEQ ID NO: 632565 - DNA, 19 bp, Mus musculus
  siRNA target sequence for A430110N23 (NM_173008.1,2529-2547).
cccgagtaggcaaaactca

SEQ ID NO: 632566 - DNA, 19 bp, Mus musculus
  siRNA target sequence for A430110N23 (NM_173008.1,2692-2710).
cacgggtgatgacgattat

SEQ ID NO: 632567 - DNA, 19 bp, Mus musculus
  siRNA target sequence for A430110N23 (NM_173008.1,2695-2713).
gggtgatgacgattatcct

SEQ ID NO: 632568 - DNA, 19 bp, Mus musculus
  siRNA target sequence for A430110N23 (NM_173008.1,2901-2919).
caggaaggggtctgttcaa

SEQ ID NO: 632569 - DNA, 19 bp, Mus musculus
  siRNA target sequence for A430110N23 (NM_173008.1,3227-3245).
gccttgtccactcctaata

SEQ ID NO: 632570 - DNA, 19 bp, Mus musculus
  siRNA target sequence for A430110N23 (NM_173008.1,3321-3339).
cctcctctatgctatcaga

SEQ ID NO: 632571 - DNA, 19 bp, Mus musculus
  siRNA target sequence for A430110N23 (NM_173008.1,3387-3405).
caacaccagcacctgaaat

SEQ ID NO: 632572 - DNA, 19 bp, Mus musculus
  siRNA target sequence for A430110N23 (NM_173008.1,3486-3504).
ccagcatccctcaactcaa

SEQ ID NO: 632573 - DNA, 19 bp, Mus musculus
  siRNA target sequence for A430110N23 (NM_173008.1,3497-3515).
caactcaacacaacttctt

SEQ ID NO: 632574 - DNA, 19 bp, Mus musculus
  siRNA target sequence for A430110N23 (NM_173008.1,3674-3692).
cccactaagcctagactaa

SEQ ID NO: 632575 - DNA, 19 bp, Mus musculus
  siRNA target sequence for A430110N23 (NM_173008.1,3745-3763).
gaacctagagctctttcta

SEQ ID NO: 632576 - DNA, 19 bp, Mus musculus
  siRNA target sequence for A430110N23 (NM_173008.1,3885-3903).
ggccaacccctaatcacaa

SEQ ID NO: 632577 - DNA, 19 bp, Mus musculus
  siRNA target sequence for Cd163 (NM_053094.1,87-105).
gggtggacacagaatggtt

SEQ ID NO: 632578 - DNA, 19 bp, Mus musculus
  siRNA target sequence for Cd163 (NM_053094.1,203-221).
ctaacgctcctggagaaat

SEQ ID NO: 632579 - DNA, 19 bp, Mus musculus
  siRNA target sequence for Cd163 (NM_053094.1,236-254).
gactggcgggtggtgaaaa

SEQ ID NO: 632580 - DNA, 19 bp, Mus musculus
  siRNA target sequence for Cd163 (NM_053094.1,238-256).
ctggcgggtggtgaaaaca

SEQ ID NO: 632581 - DNA, 19 bp, Mus musculus
  siRNA target sequence for Cd163 (NM_053094.1,315-333).
cggctggagcatgaatgaa

SEQ ID NO: 632582 - DNA, 19 bp, Mus musculus
  siRNA target sequence for Cd163 (NM_053094.1,317-335).
gctggagcatgaatgaagt

SEQ ID NO: 632583 - DNA, 19 bp, Mus musculus
  siRNA target sequence for Cd163 (NM_053094.1,355-373).
ctgggatgcccaacttcta

SEQ ID NO: 632584 - DNA, 19 bp, Mus musculus
  siRNA target sequence for Cd163 (NM_053094.1,358-376).
ggatgcccaacttctatta

SEQ ID NO: 632585 - DNA, 19 bp, Mus musculus
  siRNA target sequence for Cd163 (NM_053094.1,423-441).
gatggacaaagtttcttgt

SEQ ID NO: 632586 - DNA, 19 bp, Mus musculus
  siRNA target sequence for Cd163 (NM_053094.1,530-548).
gctcagatggatctaattt

SEQ ID NO: 632587 - DNA, 19 bp, Mus musculus
  siRNA target sequence for Cd163 (NM_053094.1,574-592).
ggccaccgatgcttaggaa

SEQ ID NO: 632588 - DNA, 19 bp, Mus musculus
  siRNA target sequence for Cd163 (NM_053094.1,579-597).
ccgatgcttaggaagagta

SEQ ID NO: 632589 - DNA, 19 bp, Mus musculus
  siRNA target sequence for Cd163 (NM_053094.1,628-646).
gtgtgtgacgacaacttca

SEQ ID NO: 632590 - DNA, 19 bp, Mus musculus
  siRNA target sequence for Cd163 (NM_053094.1,636-654).
cgacaacttcagcaaagat

SEQ ID NO: 632591 - DNA, 19 bp, Mus musculus
  siRNA target sequence for Cd163 (NM_053094.1,655-673).
cacgcttctgtgatttgta

SEQ ID NO: 632592 - DNA, 19 bp, Mus musculus
  siRNA target sequence for Cd163 (NM_053094.1,657-675).
cgcttctgtgatttgtaaa

SEQ ID NO: 632593 - DNA, 19 bp, Mus musculus
  siRNA target sequence for Cd163 (NM_053094.1,686-704).
gtggaagtgccattagttt

SEQ ID NO: 632594 - DNA, 19 bp, Mus musculus
  siRNA target sequence for Cd163 (NM_053094.1,688-706).
ggaagtgccattagtttct

SEQ ID NO: 632595 - DNA, 19 bp, Mus musculus
  siRNA target sequence for Cd163 (NM_053094.1,802-820).
cggggatggggcaagcata

SEQ ID NO: 632596 - DNA, 19 bp, Mus musculus
  siRNA target sequence for Cd163 (NM_053094.1,835-853).
gaggatgtcggtgtgattt

SEQ ID NO: 632597 - DNA, 19 bp, Mus musculus
  siRNA target sequence for Cd163 (NM_053094.1,944-962).
ggaccgtgtgtgatgataa

SEQ ID NO: 632598 - DNA, 19 bp, Mus musculus
  siRNA target sequence for Cd163 (NM_053094.1,1058-1076).
gacagatttggcttgacaa

SEQ ID NO: 632599 - DNA, 19 bp, Mus musculus
  siRNA target sequence for Cd163 (NM_053094.1,1062-1080).
gatttggcttgacaacatt

SEQ ID NO: 632600 - DNA, 19 bp, Mus musculus
  siRNA target sequence for Cd163 (NM_053094.1,1090-1108).
ggacatgaggcaactcttt

SEQ ID NO: 632601 - DNA, 19 bp, Mus musculus
  siRNA target sequence for Cd163 (NM_053094.1,1100-1118).
caactctttgggagtgtaa

SEQ ID NO: 632602 - DNA, 19 bp, Mus musculus
  siRNA target sequence for Cd163 (NM_053094.1,1159-1177).
gacgctggtgtgacatgtt

SEQ ID NO: 632603 - DNA, 19 bp, Mus musculus
  siRNA target sequence for Cd163 (NM_053094.1,1161-1179).
cgctggtgtgacatgttct

SEQ ID NO: 632604 - DNA, 19 bp, Mus musculus
  siRNA target sequence for Cd163 (NM_053094.1,1350-1368).
ggctaagatctactctaaa

SEQ ID NO: 632605 - DNA, 19 bp, Mus musculus
  siRNA target sequence for Cd163 (NM_053094.1,1351-1369).
gctaagatctactctaaaa

SEQ ID NO: 632606 - DNA, 19 bp, Mus musculus
  siRNA target sequence for Cd163 (NM_053094.1,1400-1418).
gatcttgtaatggaaatga

SEQ ID NO: 632607 - DNA, 19 bp, Mus musculus
  siRNA target sequence for Cd163 (NM_053094.1,1421-1439).
ctactttttggcaatgcaa

SEQ ID NO: 632608 - DNA, 19 bp, Mus musculus
  siRNA target sequence for Cd163 (NM_053094.1,1456-1474).
ggcctttcctgtgataatt

SEQ ID NO: 632609 - DNA, 19 bp, Mus musculus
  siRNA target sequence for Cd163 (NM_053094.1,1544-1562).
ctggtcgtgtggaagtgaa

SEQ ID NO: 632610 - DNA, 19 bp, Mus musculus
  siRNA target sequence for Cd163 (NM_053094.1,1547-1565).
gtcgtgtggaagtgaaaca

SEQ ID NO: 632611 - DNA, 19 bp, Mus musculus
  siRNA target sequence for Cd163 (NM_053094.1,1577-1595).
ggggctccgtctgtgattt

SEQ ID NO: 632612 - DNA, 19 bp, Mus musculus
  siRNA target sequence for Cd163 (NM_053094.1,1623-1641).
ggtgtgcagggaattacaa

SEQ ID NO: 632613 - DNA, 19 bp, Mus musculus
  siRNA target sequence for Cd163 (NM_053094.1,1624-1642).
gtgtgcagggaattacaat

SEQ ID NO: 632614 - DNA, 19 bp, Mus musculus
  siRNA target sequence for Cd163 (NM_053094.1,1626-1644).
gtgcagggaattacaatgt

SEQ ID NO: 632615 - DNA, 19 bp, Mus musculus
  siRNA target sequence for Cd163 (NM_053094.1,1643-1661).
gtggaacagtcgtctctat

SEQ ID NO: 632616 - DNA, 19 bp, Mus musculus
  siRNA target sequence for Cd163 (NM_053094.1,1662-1680).
cctagggggagcacatttt

SEQ ID NO: 632617 - DNA, 19 bp, Mus musculus
  siRNA target sequence for Cd163 (NM_053094.1,1732-1750).
gagtcccatctttcactat

SEQ ID NO: 632618 - DNA, 19 bp, Mus musculus
  siRNA target sequence for Cd163 (NM_053094.1,1809-1827).
ctgctcacgatacatagat

SEQ ID NO: 632619 - DNA, 19 bp, Mus musculus
  siRNA target sequence for Cd163 (NM_053094.1,1811-1829).
gctcacgatacatagatat

SEQ ID NO: 632620 - DNA, 19 bp, Mus musculus
  siRNA target sequence for Cd163 (NM_053094.1,1812-1830).
ctcacgatacatagatatt

SEQ ID NO: 632621 - DNA, 19 bp, Mus musculus
  siRNA target sequence for Cd163 (NM_053094.1,1923-1941).
ggaagatgctcatgtctta

SEQ ID NO: 632622 - DNA, 19 bp, Mus musculus
  siRNA target sequence for Cd163 (NM_053094.1,2145-2163).
gacactattgccatgtagt

SEQ ID NO: 632623 - DNA, 19 bp, Mus musculus
  siRNA target sequence for Cd163 (NM_053094.1,2154-2172).
gccatgtagttcattgtct

SEQ ID NO: 632624 - DNA, 19 bp, Mus musculus
  siRNA target sequence for Cd163 (NM_053094.1,2212-2230).
gaagttccctgcatagcaa

SEQ ID NO: 632625 - DNA, 19 bp, Mus musculus
  siRNA target sequence for Cd163 (NM_053094.1,2307-2325).
caccgtctgtgatgacaat

SEQ ID NO: 632626 - DNA, 19 bp, Mus musculus
  siRNA target sequence for Cd163 (NM_053094.1,2450-2468).
ctgggaaagagtctcatat

SEQ ID NO: 632627 - DNA, 19 bp, Mus musculus
  siRNA target sequence for Cd163 (NM_053094.1,2488-2506).
ggctggggacgccataact

SEQ ID NO: 632628 - DNA, 19 bp, Mus musculus
  siRNA target sequence for Cd163 (NM_053094.1,2565-2583).
caacgaagcccacaaagaa

SEQ ID NO: 632629 - DNA, 19 bp, Mus musculus
  siRNA target sequence for Cd163 (NM_053094.1,2594-2612).
gtcgccttgaagtgtttta

SEQ ID NO: 632630 - DNA, 19 bp, Mus musculus
  siRNA target sequence for Cd163 (NM_053094.1,2597-2615).
gccttgaagtgttttacaa

SEQ ID NO: 632631 - DNA, 19 bp, Mus musculus
  siRNA target sequence for Cd163 (NM_053094.1,2602-2620).
gaagtgttttacaatggta

SEQ ID NO: 632632 - DNA, 19 bp, Mus musculus
  siRNA target sequence for Cd163 (NM_053094.1,2628-2646).
cagtattggcagtagcaat

SEQ ID NO: 632633 - DNA, 19 bp, Mus musculus
  siRNA target sequence for Cd163 (NM_053094.1,2853-2871).
gatcatctgtgacaacaaa

SEQ ID NO: 632634 - DNA, 19 bp, Mus musculus
  siRNA target sequence for Cd163 (NM_053094.1,2856-2874).
catctgtgacaacaaaata

SEQ ID NO: 632635 - DNA, 19 bp, Mus musculus
  siRNA target sequence for Cd163 (NM_053094.1,2914-2932).
gagatctggcacaaaggtt

SEQ ID NO: 632636 - DNA, 19 bp, Mus musculus
  siRNA target sequence for Cd163 (NM_053094.1,2971-2989).
gatgctaaggttgtatgta

SEQ ID NO: 632637 - DNA, 19 bp, Mus musculus
  siRNA target sequence for Cd163 (NM_053094.1,3064-3082).
ctcaatgaaattaagtgta

SEQ ID NO: 632638 - DNA, 19 bp, Mus musculus
  siRNA target sequence for Cd163 (NM_053094.1,3134-3152).
gcgactgtgggcacaaaga

SEQ ID NO: 632639 - DNA, 19 bp, Mus musculus
  siRNA target sequence for Cd163 (NM_053094.1,3234-3252).
ggtttgtggagccattcta

SEQ ID NO: 632640 - DNA, 19 bp, Mus musculus
  siRNA target sequence for Cd163 (NM_053094.1,3326-3344).
gaggagaggtcttgataca

SEQ ID NO: 632641 - DNA, 19 bp, Mus musculus
  siRNA target sequence for Cd163 (NM_053094.1,3329-3347).
gagaggtcttgatacatca

SEQ ID NO: 632642 - DNA, 19 bp, Mus musculus
  siRNA target sequence for Cd163 (NM_053094.1,3333-3351).
ggtcttgatacatcaagtt

SEQ ID NO: 632643 - DNA, 19 bp, Mus musculus
  siRNA target sequence for Cd163 (NM_053094.1,3382-3400).
gatctggacttgctgaaat

SEQ ID NO: 632644 - DNA, 19 bp, Mus musculus
  siRNA target sequence for Cd5 (NM_007650.2,204-222).
ggaaggggtggcctagata

SEQ ID NO: 632645 - DNA, 19 bp, Mus musculus
  siRNA target sequence for Cd5 (NM_007650.2,208-226).
ggggtggcctagatatcca

SEQ ID NO: 632646 - DNA, 19 bp, Mus musculus
  siRNA target sequence for Cd5 (NM_007650.2,323-341).
gagccaggaccattcgaaa

SEQ ID NO: 632647 - DNA, 19 bp, Mus musculus
  siRNA target sequence for Cd5 (NM_007650.2,325-343).
gccaggaccattcgaaaaa

SEQ ID NO: 632648 - DNA, 19 bp, Mus musculus
  siRNA target sequence for Cd5 (NM_007650.2,326-344).
ccaggaccattcgaaaaat

SEQ ID NO: 632649 - DNA, 19 bp, Mus musculus
  siRNA target sequence for Cd5 (NM_007650.2,402-420).
ggtcctttcccttcattga

SEQ ID NO: 632650 - DNA, 19 bp, Mus musculus
  siRNA target sequence for Cd5 (NM_007650.2,454-472).
ctccgtggtctatatccaa

SEQ ID NO: 632651 - DNA, 19 bp, Mus musculus
  siRNA target sequence for Cd5 (NM_007650.2,642-660).
ggtgtggtggaattctaca

SEQ ID NO: 632652 - DNA, 19 bp, Mus musculus
  siRNA target sequence for Cd5 (NM_007650.2,818-836).
caggcccttgccaattcga

SEQ ID NO: 632653 - DNA, 19 bp, Mus musculus
  siRNA target sequence for Cd5 (NM_007650.2,1112-1130).
cacggtggatgctgacaaa

SEQ ID NO: 632654 - DNA, 19 bp, Mus musculus
  siRNA target sequence for Cd5 (NM_007650.2,1174-1192).
gttaccatctccagaaaaa

SEQ ID NO: 632655 - DNA, 19 bp, Mus musculus
  siRNA target sequence for Cd5 (NM_007650.2,1201-1219).
gcaacaagagggtattcgt

SEQ ID NO: 632656 - DNA, 19 bp, Mus musculus
  siRNA target sequence for Cd5 (NM_007650.2,1389-1407).
ggagtgaaccagaacatgt

SEQ ID NO: 632657 - DNA, 19 bp, Mus musculus
  siRNA target sequence for Cd5 (NM_007650.2,1392-1410).
gtgaaccagaacatgtctt

SEQ ID NO: 632658 - DNA, 19 bp, Mus musculus
  siRNA target sequence for Cd5 (NM_007650.2,1432-1450).
ctgtgcggtcccaagttga

SEQ ID NO: 632659 - DNA, 19 bp, Mus musculus
  siRNA target sequence for Cd5 (NM_007650.2,1462-1480).
cctctcatgtggacaatga

SEQ ID NO: 632660 - DNA, 19 bp, Mus musculus
  siRNA target sequence for Cd5 (NM_007650.2,1463-1481).
ctctcatgtggacaatgaa

SEQ ID NO: 632661 - DNA, 19 bp, Mus musculus
  siRNA target sequence for Cd5 (NM_007650.2,1465-1483).
ctcatgtggacaatgaata

SEQ ID NO: 632662 - DNA, 19 bp, Mus musculus
  siRNA target sequence for Cd5 (NM_007650.2,1536-1554).
gccctacaccgatcttcta

SEQ ID NO: 632663 - DNA, 19 bp, Mus musculus
  siRNA target sequence for Cd5 (NM_007650.2,1538-1556).
cctacaccgatcttctaca

SEQ ID NO: 632664 - DNA, 19 bp, Mus musculus
  siRNA target sequence for Cd5l (NM_009690.1,32-50).
ctccattgttcaacttgat

SEQ ID NO: 632665 - DNA, 19 bp, Mus musculus
  siRNA target sequence for Cd5l (NM_009690.1,600-618).
cggaagctgcaacaagaat

SEQ ID NO: 632666 - DNA, 19 bp, Mus musculus
  siRNA target sequence for Cd5l (NM_009690.1,601-619).
ggaagctgcaacaagaata

SEQ ID NO: 632667 - DNA, 19 bp, Mus musculus
  siRNA target sequence for Cd5l (NM_009690.1,605-623).
gctgcaacaagaatactca

SEQ ID NO: 632668 - DNA, 19 bp, Mus musculus
  siRNA target sequence for Cd5l (NM_009690.1,654-672).
gtcgtgttctggacaagaa

SEQ ID NO: 632669 - DNA, 19 bp, Mus musculus
  siRNA target sequence for Cd5l (NM_009690.1,700-718).
cgtttggagaacaactgta

SEQ ID NO: 632670 - DNA, 19 bp, Mus musculus
  siRNA target sequence for Cd5l (NM_009690.1,800-818).
ggttggaggtgctacacaa

SEQ ID NO: 632671 - DNA, 19 bp, Mus musculus
  siRNA target sequence for Cd6 (NM_009852.1,247-265).
ggcaccatcccgaacatga

SEQ ID NO: 632672 - DNA, 19 bp, Mus musculus
  siRNA target sequence for Cd6 (NM_009852.1,421-439).
ggtgattcgggaaaggtta

SEQ ID NO: 632673 - DNA, 19 bp, Mus musculus
  siRNA target sequence for Cd6 (NM_009852.1,1118-1136).
ccctggacggtagaatgta

SEQ ID NO: 632674 - DNA, 19 bp, Mus musculus
  siRNA target sequence for Cd6 (NM_009852.1,1123-1141).
gacggtagaatgtactact

SEQ ID NO: 632675 - DNA, 19 bp, Mus musculus
  siRNA target sequence for Cd6 (NM_009852.1,1175-1193).
gttcctggcggttcaacaa

SEQ ID NO: 632676 - DNA, 19 bp, Mus musculus
  siRNA target sequence for Cd6 (NM_009852.1,1288-1306).
gttccagtcacgatagaat

SEQ ID NO: 632677 - DNA, 19 bp, Mus musculus
  siRNA target sequence for Cd6 (NM_009852.1,1315-1333).
ccggtgagcgtgaaggata

SEQ ID NO: 632678 - DNA, 19 bp, Mus musculus
  siRNA target sequence for Cd6 (NM_009852.1,1316-1334).
cggtgagcgtgaaggataa

SEQ ID NO: 632679 - DNA, 19 bp, Mus musculus
  siRNA target sequence for Cd6 (NM_009852.1,1352-1370).
cacttctcattctctgtat

SEQ ID NO: 632680 - DNA, 19 bp, Mus musculus
  siRNA target sequence for Cd6 (NM_009852.1,1392-1410).
cgtctccaccatcttcata

SEQ ID NO: 632681 - DNA, 19 bp, Mus musculus
  siRNA target sequence for Cd6 (NM_009852.1,1485-1503).
caaccaagcagggatcaat

SEQ ID NO: 632682 - DNA, 19 bp, Mus musculus
  siRNA target sequence for Cd6 (NM_009852.1,1489-1507).
caagcagggatcaataact

SEQ ID NO: 632683 - DNA, 19 bp, Mus musculus
  siRNA target sequence for Cd6 (NM_009852.1,1589-1607).
gttctgactccgactatga

SEQ ID NO: 632684 - DNA, 19 bp, Mus musculus
  siRNA target sequence for Cd6 (NM_009852.1,1639-1657).
gccctgaccaccttctaca

SEQ ID NO: 632685 - DNA, 19 bp, Mus musculus
  siRNA target sequence for Cd6 (NM_009852.1,1812-1830).
gtaccacgtgaggaacaaa

SEQ ID NO: 632686 - DNA, 19 bp, Mus musculus
  siRNA target sequence for Dmbt1 (NM_007769.1,13-31).
ggatctccactgttatctt

SEQ ID NO: 632687 - DNA, 19 bp, Mus musculus
  siRNA target sequence for Dmbt1 (NM_007769.1,40-58).
gtcttttgtggggtcaaat

SEQ ID NO: 632688 - DNA, 19 bp, Mus musculus
  siRNA target sequence for Dmbt1 (NM_007769.1,89-107).
cacagatggaacagattct

SEQ ID NO: 632689 - DNA, 19 bp, Mus musculus
  siRNA target sequence for Dmbt1 (NM_007769.1,2976-2994).
gatctgtggcctactacta

SEQ ID NO: 632690 - DNA, 19 bp, Mus musculus
  siRNA target sequence for Dmbt1 (NM_007769.1,3025-3043).
ctacaactccttattttga

SEQ ID NO: 632691 - DNA, 19 bp, Mus musculus
  siRNA target sequence for Dmbt1 (NM_007769.1,3042-3060).
gattggtggacaactactt

SEQ ID NO: 632692 - DNA, 19 bp, Mus musculus
  siRNA target sequence for Dmbt1 (NM_007769.1,3148-3166).
gatgttcgtggaaaattgt

SEQ ID NO: 632693 - DNA, 19 bp, Mus musculus
  siRNA target sequence for Dmbt1 (NM_007769.1,3603-3621).
ggccctcagtacaattcgt

SEQ ID NO: 632694 - DNA, 19 bp, Mus musculus
  siRNA target sequence for Dmbt1 (NM_007769.1,4526-4544).
ggcgctgaggctggtaaat

SEQ ID NO: 632695 - DNA, 19 bp, Mus musculus
  siRNA target sequence for Dmbt1 (NM_007769.1,4868-4886).
gactacaagtccttcctat

SEQ ID NO: 632696 - DNA, 19 bp, Mus musculus
  siRNA target sequence for Dmbt1 (NM_007769.1,4876-4894).
gtccttcctatgtaaacta

SEQ ID NO: 632697 - DNA, 19 bp, Mus musculus
  siRNA target sequence for Dmbt1 (NM_007769.1,4949-4967).
ccctgggaattatcctaat

SEQ ID NO: 632698 - DNA, 19 bp, Mus musculus
  siRNA target sequence for Dmbt1 (NM_007769.1,4950-4968).
cctgggaattatcctaata

SEQ ID NO: 632699 - DNA, 19 bp, Mus musculus
  siRNA target sequence for Dmbt1 (NM_007769.1,4951-4969).
ctgggaattatcctaataa

SEQ ID NO: 632700 - DNA, 19 bp, Mus musculus
  siRNA target sequence for Dmbt1 (NM_007769.1,5047-5065).
ggggctgcagctatgatta

SEQ ID NO: 632701 - DNA, 19 bp, Mus musculus
  siRNA target sequence for Dmbt1 (NM_007769.1,5048-5066).
gggctgcagctatgattat

SEQ ID NO: 632702 - DNA, 19 bp, Mus musculus
  siRNA target sequence for Dmbt1 (NM_007769.1,5051-5069).
ctgcagctatgattatata

SEQ ID NO: 632703 - DNA, 19 bp, Mus musculus
  siRNA target sequence for Dmbt1 (NM_007769.1,5053-5071).
gcagctatgattatataga

SEQ ID NO: 632704 - DNA, 19 bp, Mus musculus
  siRNA target sequence for Dmbt1 (NM_007769.1,5149-5167).
catccaacttcatgtcaat

SEQ ID NO: 632705 - DNA, 19 bp, Mus musculus
  siRNA target sequence for Dmbt1 (NM_007769.1,5219-5237).
ctactccgactttgacaat

SEQ ID NO: 632706 - DNA, 19 bp, Mus musculus
  siRNA target sequence for Dmbt1 (NM_007769.1,5242-5260).
ccaccaatctcctttgtca

SEQ ID NO: 632707 - DNA, 19 bp, Mus musculus
  siRNA target sequence for Dmbt1 (NM_007769.1,5253-5271).
ctttgtcagtcaaatcaca

SEQ ID NO: 632708 - DNA, 19 bp, Mus musculus
  siRNA target sequence for Dmbt1 (NM_007769.1,5362-5380).
gtcagccccagataacaca

SEQ ID NO: 632709 - DNA, 19 bp, Mus musculus
  siRNA target sequence for Dmbt1 (NM_007769.1,5381-5399).
gagggaggtcatattcaca

SEQ ID NO: 632710 - DNA, 19 bp, Mus musculus
  siRNA target sequence for Dmbt1 (NM_007769.1,5383-5401).
gggaggtcatattcacaat

SEQ ID NO: 632711 - DNA, 19 bp, Mus musculus
  siRNA target sequence for Dmbt1 (NM_007769.1,5384-5402).
ggaggtcatattcacaatt

SEQ ID NO: 632712 - DNA, 19 bp, Mus musculus
  siRNA target sequence for Dmbt1 (NM_007769.1,5413-5431).
gctgtggcacaatcaaaca

SEQ ID NO: 632713 - DNA, 19 bp, Mus musculus
  siRNA target sequence for Dmbt1 (NM_007769.1,5478-5496).
gtttcaaacggcatcatca

SEQ ID NO: 632714 - DNA, 19 bp, Mus musculus
  siRNA target sequence for Dmbt1 (NM_007769.1,5503-5521).
gaaaggacctgaatatcca

SEQ ID NO: 632715 - DNA, 19 bp, Mus musculus
  siRNA target sequence for Dmbt1 (NM_007769.1,5551-5569).
gggtcaacaccatgtacat

SEQ ID NO: 632716 - DNA, 19 bp, Mus musculus
  siRNA target sequence for Dmbt1 (NM_007769.1,5607-5625).
ggcaatttcgacgtaaaca

SEQ ID NO: 632717 - DNA, 19 bp, Mus musculus
  siRNA target sequence for Dmbt1 (NM_007769.1,5608-5626).
gcaatttcgacgtaaacat

SEQ ID NO: 632718 - DNA, 19 bp, Mus musculus
  siRNA target sequence for Dmbt1 (NM_007769.1,5609-5627).
caatttcgacgtaaacatt

SEQ ID NO: 632719 - DNA, 19 bp, Mus musculus
  siRNA target sequence for Dmbt1 (NM_007769.1,5685-5703).
gatctggaccagaatttgt

SEQ ID NO: 632720 - DNA, 19 bp, Mus musculus
  siRNA target sequence for Dmbt1 (NM_007769.1,5713-5731).
ccgaaatcctccattctga

SEQ ID NO: 632721 - DNA, 19 bp, Mus musculus
  siRNA target sequence for Dmbt1 (NM_007769.1,5732-5750).
cgcctccttggctctgttt

SEQ ID NO: 632722 - DNA, 19 bp, Mus musculus
  siRNA target sequence for Dmbt1 (NM_007769.1,5770-5788).
cgccacatcccaatgactt

SEQ ID NO: 632723 - DNA, 19 bp, Mus musculus
  siRNA target sequence for Dmbt1 (NM_007769.1,5820-5838).
ggatgcgtacgggatgata

SEQ ID NO: 632724 - DNA, 19 bp, Mus musculus
  siRNA target sequence for Dmbt1 (NM_007769.1,5824-5842).
gcgtacgggatgataccta

SEQ ID NO: 632725 - DNA, 19 bp, Mus musculus
  siRNA target sequence for Dmbt1 (NM_007769.1,5829-5847).
cgggatgatacctaccaat

SEQ ID NO: 632726 - DNA, 19 bp, Mus musculus
  siRNA target sequence for Dmbt1 (NM_007769.1,5866-5884).
cacgcgtctcccgctttaa

SEQ ID NO: 632727 - DNA, 19 bp, Mus musculus
  siRNA target sequence for Dmbt1 (NM_007769.1,5868-5886).
cgcgtctcccgctttaaat

SEQ ID NO: 632728 - DNA, 19 bp, Mus musculus
  siRNA target sequence for Dmbt1 (NM_007769.1,5869-5887).
gcgtctcccgctttaaatt

SEQ ID NO: 632729 - DNA, 19 bp, Mus musculus
  siRNA target sequence for Dmbt1 (NM_007769.1,5931-5949).
cagtgtaaactggtagtat

SEQ ID NO: 632730 - DNA, 19 bp, Mus musculus
  siRNA target sequence for Dmbt1 (NM_007769.1,5933-5951).
gtgtaaactggtagtatgt

SEQ ID NO: 632731 - DNA, 19 bp, Mus musculus
  siRNA target sequence for Dmbt1 (NM_007769.1,5946-5964).
gtatgtcgagcgtatgata

SEQ ID NO: 632732 - DNA, 19 bp, Mus musculus
  siRNA target sequence for Dmbt1 (NM_007769.1,5986-6004).
gctgcgtagtgagatctaa

SEQ ID NO: 632733 - DNA, 19 bp, Mus musculus
  siRNA target sequence for Dmbt1 (NM_007769.1,6016-6034).
gctcctaccaagaaaaggt

SEQ ID NO: 632734 - DNA, 19 bp, Mus musculus
  siRNA target sequence for Dmbt1 (NM_007769.1,6048-6066).
ggacccatccagttgcaat

SEQ ID NO: 632735 - DNA, 19 bp, Mus musculus
  siRNA target sequence for Dmbt1 (NM_007769.1,6240-6258).
cctccaagtactaagttgt

SEQ ID NO: 632736 - DNA, 19 bp, Mus musculus
  siRNA target sequence for E430002D04Rik (NM_172909.1,296-314).
cgctctggcctctgagttt

SEQ ID NO: 632737 - DNA, 19 bp, Mus musculus
  siRNA target sequence for E430002D04Rik (NM_172909.1,345-363).
cactggcacatcatctgaa

SEQ ID NO: 632738 - DNA, 19 bp, Mus musculus
  siRNA target sequence for E430002D04Rik (NM_172909.1,518-536).
ctgtgggtgctcccaaata

SEQ ID NO: 632739 - DNA, 19 bp, Mus musculus
  siRNA target sequence for E430002D04Rik (NM_172909.1,522-540).
gggtgctcccaaatatgta

SEQ ID NO: 632740 - DNA, 19 bp, Mus musculus
  siRNA target sequence for E430002D04Rik (NM_172909.1,565-583).
ccctggctgcacaatgtat

SEQ ID NO: 632741 - DNA, 19 bp, Mus musculus
  siRNA target sequence for E430002D04Rik (NM_172909.1,666-684).
ggtggctctctgtgcaaat

SEQ ID NO: 632742 - DNA, 19 bp, Mus musculus
  siRNA target sequence for E430002D04Rik (NM_172909.1,731-749).
caggactccctgagatcat

SEQ ID NO: 632743 - DNA, 19 bp, Mus musculus
  siRNA target sequence for E430002D04Rik (NM_172909.1,734-752).
gactccctgagatcatgaa

SEQ ID NO: 632744 - DNA, 19 bp, Mus musculus
  siRNA target sequence for E430002D04Rik (NM_172909.1,853-871).
gatgtgggcgtcagtaagt

SEQ ID NO: 632745 - DNA, 19 bp, Mus musculus
  siRNA target sequence for E430002D04Rik (NM_172909.1,856-874).
gtgggcgtcagtaagtaca

SEQ ID NO: 632746 - DNA, 19 bp, Mus musculus
  siRNA target sequence for E430002D04Rik (NM_172909.1,859-877).
ggcgtcagtaagtacatga

SEQ ID NO: 632747 - DNA, 19 bp, Mus musculus
  siRNA target sequence for E430002D04Rik (NM_172909.1,905-923).
gcaactgcagactcaacaa

SEQ ID NO: 632748 - DNA, 19 bp, Mus musculus
  siRNA target sequence for E430002D04Rik (NM_172909.1,994-1012).
ctagtgggtggagaacatt

SEQ ID NO: 632749 - DNA, 19 bp, Mus musculus
  siRNA target sequence for E430002D04Rik (NM_172909.1,1107-1125).
ggagttagggtgtggtata

SEQ ID NO: 632750 - DNA, 19 bp, Mus musculus
  siRNA target sequence for E430002D04Rik (NM_172909.1,1192-1210).
cgctgtgtggggaatgaat

SEQ ID NO: 632751 - DNA, 19 bp, Mus musculus
  siRNA target sequence for E430002D04Rik (NM_172909.1,1202-1220).
ggaatgaatcgctgctatt

SEQ ID NO: 632752 - DNA, 19 bp, Mus musculus
  siRNA target sequence for E430002D04Rik (NM_172909.1,1479-1497).
gccagacatatttcattgt

SEQ ID NO: 632753 - DNA, 19 bp, Mus musculus
  siRNA target sequence for E430002D04Rik (NM_172909.1,1833-1851).
cctggtgcattgcaatgtt

SEQ ID NO: 632754 - DNA, 19 bp, Mus musculus
  siRNA target sequence for E430002D04Rik (NM_172909.1,1834-1852).
ctggtgcattgcaatgttt

SEQ ID NO: 632755 - DNA, 19 bp, Mus musculus
  siRNA target sequence for E430002D04Rik (NM_172909.1,1836-1854).
ggtgcattgcaatgtttct

SEQ ID NO: 632756 - DNA, 19 bp, Mus musculus
  siRNA target sequence for E430002D04Rik (NM_172909.1,1954-1972).
gggcgtgtggagttattct

SEQ ID NO: 632757 - DNA, 19 bp, Mus musculus
  siRNA target sequence for E430002D04Rik (NM_172909.1,1955-1973).
ggcgtgtggagttattcta

SEQ ID NO: 632758 - DNA, 19 bp, Mus musculus
  siRNA target sequence for E430002D04Rik (NM_172909.1,2209-2227).
ggagtgttctgctcagaat

SEQ ID NO: 632759 - DNA, 19 bp, Mus musculus
  siRNA target sequence for E430002D04Rik (NM_172909.1,2274-2292).
gctggacgtgctctacaat

SEQ ID NO: 632760 - DNA, 19 bp, Mus musculus
  siRNA target sequence for E430002D04Rik (NM_172909.1,2417-2435).
gaatctcctgggtggataa

SEQ ID NO: 632761 - DNA, 19 bp, Mus musculus
  siRNA target sequence for E430002D04Rik (NM_172909.1,2442-2460).
gtgtcgaaatctacacaat

SEQ ID NO: 632762 - DNA, 19 bp, Mus musculus
  siRNA target sequence for E430002D04Rik (NM_172909.1,2520-2538).
ggaggtctggattaactgt

SEQ ID NO: 632763 - DNA, 19 bp, Mus musculus
  siRNA target sequence for E430002D04Rik (NM_172909.1,2597-2615).
catttggctgcctagagaa

SEQ ID NO: 632764 - DNA, 19 bp, Mus musculus
  siRNA target sequence for Marco (NM_010766.1,315-333).
gtaaagaactcctcaaaga

SEQ ID NO: 632765 - DNA, 19 bp, Mus musculus
  siRNA target sequence for Marco (NM_010766.1,366-384).
ccgattttgaccaagctat

SEQ ID NO: 632766 - DNA, 19 bp, Mus musculus
  siRNA target sequence for Marco (NM_010766.1,392-410).
gtgatggagaccttcgaaa

SEQ ID NO: 632767 - DNA, 19 bp, Mus musculus
  siRNA target sequence for Marco (NM_010766.1,400-418).
gaccttcgaaatcaatgat

SEQ ID NO: 632768 - DNA, 19 bp, Mus musculus
  siRNA target sequence for Marco (NM_010766.1,559-577).
ctgtggcaatggatcacta

SEQ ID NO: 632769 - DNA, 19 bp, Mus musculus
  siRNA target sequence for Marco (NM_010766.1,564-582).
gcaatggatcactagctat

SEQ ID NO: 632770 - DNA, 19 bp, Mus musculus
  siRNA target sequence for Marco (NM_010766.1,715-733).
caacaacctcactcaaaat

SEQ ID NO: 632771 - DNA, 19 bp, Mus musculus
  siRNA target sequence for Marco (NM_010766.1,734-752).
ccagagttgttccagatta

SEQ ID NO: 632772 - DNA, 19 bp, Mus musculus
  siRNA target sequence for Marco (NM_010766.1,739-757).
gttgttccagattaaaggt

SEQ ID NO: 632773 - DNA, 19 bp, Mus musculus
  siRNA target sequence for Marco (NM_010766.1,1547-1565).
ggtcaaaaaggcgaatctt

SEQ ID NO: 632774 - DNA, 19 bp, Mus musculus
  siRNA target sequence for Marco (NM_010766.1,1548-1566).
gtcaaaaaggcgaatcttt

SEQ ID NO: 632775 - DNA, 19 bp, Mus musculus
  siRNA target sequence for Marco (NM_010766.1,1601-1619).
ggccgagctgaagtttact

SEQ ID NO: 632776 - DNA, 19 bp, Mus musculus
  siRNA target sequence for Marco (NM_010766.1,1602-1620).
gccgagctgaagtttacta

SEQ ID NO: 632777 - DNA, 19 bp, Mus musculus
  siRNA target sequence for Marco (NM_010766.1,1603-1621).
ccgagctgaagtttactat

SEQ ID NO: 632778 - DNA, 19 bp, Mus musculus
  siRNA target sequence for Marco (NM_010766.1,1604-1622).
cgagctgaagtttactata

SEQ ID NO: 632779 - DNA, 19 bp, Mus musculus
  siRNA target sequence for Marco (NM_010766.1,1605-1623).
gagctgaagtttactataa

SEQ ID NO: 632780 - DNA, 19 bp, Mus musculus
  siRNA target sequence for Marco (NM_010766.1,1769-1787).
cggggcacagagaacagtt

SEQ ID NO: 632781 - DNA, 19 bp, Mus musculus
  siRNA target sequence for Marco (NM_010766.1,1807-1825).
ctcctggggcaatcacaat

SEQ ID NO: 632782 - DNA, 19 bp, Mus musculus
  siRNA target sequence for Marco (NM_010766.1,1822-1840).
caattgcgtacataatgaa

SEQ ID NO: 632783 - DNA, 19 bp, Mus musculus
  siRNA target sequence for Msr1 (NM_031195.1,70-88).
gttcagaatccgtgaaatt

SEQ ID NO: 632784 - DNA, 19 bp, Mus musculus
  siRNA target sequence for Msr1 (NM_031195.1,114-132).
cttcctcacagcactaaaa

SEQ ID NO: 632785 - DNA, 19 bp, Mus musculus
  siRNA target sequence for Msr1 (NM_031195.1,194-212).
ccttgtgtttgcagtacta

SEQ ID NO: 632786 - DNA, 19 bp, Mus musculus
  siRNA target sequence for Msr1 (NM_031195.1,200-218).
gtttgcagtactaatacct

SEQ ID NO: 632787 - DNA, 19 bp, Mus musculus
  siRNA target sequence for Msr1 (NM_031195.1,409-427).
caaaagccgaccttataga

SEQ ID NO: 632788 - DNA, 19 bp, Mus musculus
  siRNA target sequence for Msr1 (NM_031195.1,455-473).
ggcaactgaccaaagactt

SEQ ID NO: 632789 - DNA, 19 bp, Mus musculus
  siRNA target sequence for Msr1 (NM_031195.1,456-474).
gcaactgaccaaagactta

SEQ ID NO: 632790 - DNA, 19 bp, Mus musculus
  siRNA target sequence for Msr1 (NM_031195.1,457-475).
caactgaccaaagacttaa

SEQ ID NO: 632791 - DNA, 19 bp, Mus musculus
  siRNA target sequence for Msr1 (NM_031195.1,460-478).
ctgaccaaagacttaatga

SEQ ID NO: 632792 - DNA, 19 bp, Mus musculus
  siRNA target sequence for Msr1 (NM_031195.1,462-480).
gaccaaagacttaatgata

SEQ ID NO: 632793 - DNA, 19 bp, Mus musculus
  siRNA target sequence for Msr1 (NM_031195.1,469-487).
gacttaatgatattcttct

SEQ ID NO: 632794 - DNA, 19 bp, Mus musculus
  siRNA target sequence for Msr1 (NM_031195.1,488-506).
gcagttaaattccttgatt

SEQ ID NO: 632795 - DNA, 19 bp, Mus musculus
  siRNA target sequence for Msr1 (NM_031195.1,612-630).
gtcagagtccgtgaatcta

SEQ ID NO: 632796 - DNA, 19 bp, Mus musculus
  siRNA target sequence for Msr1 (NM_031195.1,614-632).
cagagtccgtgaatctaca

SEQ ID NO: 632797 - DNA, 19 bp, Mus musculus
  siRNA target sequence for Msr1 (NM_031195.1,639-657).
caacaggaggacatcagta

SEQ ID NO: 632798 - DNA, 19 bp, Mus musculus
  siRNA target sequence for Msr1 (NM_031195.1,666-684).
gaacgtgtgtacaaagtat

SEQ ID NO: 632799 - DNA, 19 bp, Mus musculus
  siRNA target sequence for Msr1 (NM_031195.1,1050-1068).
ggcggatcaagatcagtat

SEQ ID NO: 632800 - DNA, 19 bp, Mus musculus
  siRNA target sequence for Msr2 (NM_030707.1,548-566).
ctacgctattccttcttca

SEQ ID NO: 632801 - DNA, 19 bp, Mus musculus
  siRNA target sequence for Msr2 (NM_030707.1,597-615).
cctcatcaaaatttaccat

SEQ ID NO: 632802 - DNA, 19 bp, Mus musculus
  siRNA target sequence for Msr2 (NM_030707.1,612-630).
ccatctcagcaatatcgaa

SEQ ID NO: 632803 - DNA, 19 bp, Mus musculus
  siRNA target sequence for Msr2 (NM_030707.1,669-687).
cctctcgcagtgtctcaaa

SEQ ID NO: 632804 - DNA, 19 bp, Mus musculus
  siRNA target sequence for Msr2 (NM_030707.1,691-709).
gagtcaccggtcctacata

SEQ ID NO: 632805 - DNA, 19 bp, Mus musculus
  siRNA target sequence for Msr2 (NM_030707.1,693-711).
gtcaccggtcctacataga

SEQ ID NO: 632806 - DNA, 19 bp, Mus musculus
  siRNA target sequence for Msr2 (NM_030707.1,699-717).
ggtcctacatagatgtaga

SEQ ID NO: 632807 - DNA, 19 bp, Mus musculus
  siRNA target sequence for Msr2 (NM_030707.1,718-736).
gaggatccctgtatctcaa

SEQ ID NO: 632808 - DNA, 19 bp, Mus musculus
  siRNA target sequence for Msr2 (NM_030707.1,861-879).
ggcataggcaggacactaa

SEQ ID NO: 632809 - DNA, 19 bp, Mus musculus
  siRNA target sequence for Msr2 (NM_030707.1,1012-1030).
gaacatcaccgtgaaaatt

SEQ ID NO: 632810 - DNA, 19 bp, Mus musculus
  siRNA target sequence for Msr2 (NM_030707.1,1122-1140).
catctcctccggttctcta

SEQ ID NO: 632811 - DNA, 19 bp, Mus musculus
  siRNA target sequence for Msr2 (NM_030707.1,1138-1156).
ctactggttttatcatgaa

SEQ ID NO: 632812 - DNA, 19 bp, Mus musculus
  siRNA target sequence for Msr2 (NM_030707.1,1174-1192).
cacctcggcaccttttgga

SEQ ID NO: 632813 - DNA, 19 bp, Mus musculus
  siRNA target sequence for Msr2 (NM_030707.1,1486-1504).
gtatccaccagcagttgat

SEQ ID NO: 632814 - DNA, 19 bp, Mus musculus
  siRNA target sequence for Msr2 (NM_030707.1,1628-1646).
gtcttacccagcactttct

SEQ ID NO: 632815 - DNA, 19 bp, Mus musculus
  siRNA target sequence for Scarf2 (NM_153790.1,309-327).
gtgtgcgaaggcaattcca

SEQ ID NO: 632816 - DNA, 19 bp, Mus musculus
  siRNA target sequence for Scarf2 (NM_153790.1,371-389).
ctgccgacatggctacttt

SEQ ID NO: 632817 - DNA, 19 bp, Mus musculus
  siRNA target sequence for Scarf2 (NM_153790.1,393-411).
gccaactgcgacacaaagt

SEQ ID NO: 632818 - DNA, 19 bp, Mus musculus
  siRNA target sequence for Scarf2 (NM_153790.1,618-636).
gctagcgcttgctattgca

SEQ ID NO: 632819 - DNA, 19 bp, Mus musculus
  siRNA target sequence for Scarf2 (NM_153790.1,764-782).
gtgtcgcgagcgcatgttt

SEQ ID NO: 632820 - DNA, 19 bp, Mus musculus
  siRNA target sequence for Scarf2 (NM_153790.1,995-1013).
cggctggaacggaaccaaa

SEQ ID NO: 632821 - DNA, 19 bp, Mus musculus
  siRNA target sequence for Scarf2 (NM_153790.1,1024-1042).
cctgcgccaccggtttcta

SEQ ID NO: 632822 - DNA, 19 bp, Mus musculus
  siRNA target sequence for Scarf2 (NM_153790.1,1098-1116).
catgtcaccggcaagtgta

SEQ ID NO: 632823 - DNA, 19 bp, Mus musculus
  siRNA target sequence for Scarf2 (NM_153790.1,1141-1159).
gcgaccggtgcgagactaa

SEQ ID NO: 632824 - DNA, 19 bp, Mus musculus
  siRNA target sequence for Scarf2 (NM_153790.1,1143-1161).
gaccggtgcgagactaagt

SEQ ID NO: 632825 - DNA, 19 bp, Mus musculus
  siRNA target sequence for Scarf2 (NM_153790.1,1151-1169).
cgagactaagtgcagtaat

SEQ ID NO: 632826 - DNA, 19 bp, Mus musculus
  siRNA target sequence for Scarf2 (NM_153790.1,1191-1209).
gccttcgtgtgctctgatt

SEQ ID NO: 632827 - DNA, 19 bp, Mus musculus
  siRNA target sequence for Scarf2 (NM_153790.1,1268-1286).
cggacctcactgtaatgta

SEQ ID NO: 632828 - DNA, 19 bp, Mus musculus
  siRNA target sequence for Scarf2 (NM_153790.1,1269-1287).
ggacctcactgtaatgtaa

SEQ ID NO: 632829 - DNA, 19 bp, Mus musculus
  siRNA target sequence for Scarf2 (NM_153790.1,1520-1538).
gaaggcgcctcaacgtttt

SEQ ID NO: 632830 - DNA, 19 bp, Mus musculus
  siRNA target sequence for Scarf2 (NM_153790.1,1523-1541).
ggcgcctcaacgtttttgt

SEQ ID NO: 632831 - DNA, 19 bp, Mus musculus
  siRNA target sequence for Scarf2 (NM_153790.1,1637-1655).
cacactcaactgcagtttt

SEQ ID NO: 632832 - DNA, 19 bp, Mus musculus
  siRNA target sequence for H2-Aa (NM_010378.2,96-114).
cacgtaggcacctatggta

SEQ ID NO: 632833 - DNA, 19 bp, Mus musculus
  siRNA target sequence for H2-Aa (NM_010378.2,98-116).
cgtaggcacctatggtata

SEQ ID NO: 632834 - DNA, 19 bp, Mus musculus
  siRNA target sequence for H2-Aa (NM_010378.2,99-117).
gtaggcacctatggtataa

SEQ ID NO: 632835 - DNA, 19 bp, Mus musculus
  siRNA target sequence for H2-Aa (NM_010378.2,103-121).
gcacctatggtataagtgt

SEQ ID NO: 632836 - DNA, 19 bp, Mus musculus
  siRNA target sequence for H2-Aa (NM_010378.2,104-122).
cacctatggtataagtgta

SEQ ID NO: 632837 - DNA, 19 bp, Mus musculus
  siRNA target sequence for H2-Aa (NM_010378.2,107-125).
ctatggtataagtgtatat

SEQ ID NO: 632838 - DNA, 19 bp, Mus musculus
  siRNA target sequence for H2-Aa (NM_010378.2,144-162).
ggccagtacacatttgaat

SEQ ID NO: 632839 - DNA, 19 bp, Mus musculus
  siRNA target sequence for H2-Aa (NM_010378.2,145-163).
gccagtacacatttgaatt

SEQ ID NO: 632840 - DNA, 19 bp, Mus musculus
  siRNA target sequence for H2-Aa (NM_010378.2,165-183).
gatggtgatgagttgttct

SEQ ID NO: 632841 - DNA, 19 bp, Mus musculus
  siRNA target sequence for H2-Aa (NM_010378.2,255-273).
caaggtggactgcaaaaca

SEQ ID NO: 632842 - DNA, 19 bp, Mus musculus
  siRNA target sequence for H2-Aa (NM_010378.2,266-284).
gcaaaacatagctgtagta

SEQ ID NO: 632843 - DNA, 19 bp, Mus musculus
  siRNA target sequence for H2-Aa (NM_010378.2,267-285).
caaaacatagctgtagtaa

SEQ ID NO: 632844 - DNA, 19 bp, Mus musculus
  siRNA target sequence for H2-Aa (NM_010378.2,466-484).
cagtcgcagacggtgttta

SEQ ID NO: 632845 - DNA, 19 bp, Mus musculus
  siRNA target sequence for H2-Aa (NM_010378.2,497-515).
cttcgtcaaccgtgactat

SEQ ID NO: 632846 - DNA, 19 bp, Mus musculus
  siRNA target sequence for H2-Aa (NM_010378.2,501-519).
gtcaaccgtgactattcct

SEQ ID NO: 632847 - DNA, 19 bp, Mus musculus
  siRNA target sequence for H2-Aa (NM_010378.2,548-566).
cccttctgacgatgacatt

SEQ ID NO: 632848 - DNA, 19 bp, Mus musculus
  siRNA target sequence for H2-Aa (NM_010378.2,549-567).
ccttctgacgatgacattt

SEQ ID NO: 632849 - DNA, 19 bp, Mus musculus
  siRNA target sequence for H2-Aa (NM_010378.2,550-568).
cttctgacgatgacattta

SEQ ID NO: 632850 - DNA, 19 bp, Mus musculus
  siRNA target sequence for H2-Aa (NM_010378.2,596-614).
ggaggagccggttctgaaa

SEQ ID NO: 632851 - DNA, 19 bp, Mus musculus
  siRNA target sequence for H2-Ab1 (NM_010379.2,501-519).
ctacccagccaagatcaaa

SEQ ID NO: 632852 - DNA, 19 bp, Mus musculus
  siRNA target sequence for H2-Ab1 (NM_010379.2,752-770).
gcgtgcttggggtgatctt

SEQ ID NO: 632853 - DNA, 19 bp, Mus musculus
  siRNA target sequence for H2-DMa (NM_010386.2,121-139).
ggtgctcgaagcatctaca

SEQ ID NO: 632854 - DNA, 19 bp, Mus musculus
  siRNA target sequence for H2-DMa (NM_010386.2,171-189).
cattccggcacactctatt

SEQ ID NO: 632855 - DNA, 19 bp, Mus musculus
  siRNA target sequence for H2-DMa (NM_010386.2,351-369).
gcttctgcgagatgttgat

SEQ ID NO: 632856 - DNA, 19 bp, Mus musculus
  siRNA target sequence for H2-DMa (NM_010386.2,422-440).
cctgtggcagaggtattca

SEQ ID NO: 632857 - DNA, 19 bp, Mus musculus
  siRNA target sequence for H2-DMa (NM_010386.2,651-669).
ctgtgacacacgagattga

SEQ ID NO: 632858 - DNA, 19 bp, Mus musculus
  siRNA target sequence for H2-DMb1 (NM_010387.2,316-334).
ccccacaggacttcacata

SEQ ID NO: 632859 - DNA, 19 bp, Mus musculus
  siRNA target sequence for H2-DMb1 (NM_010387.2,376-394).
cagatgtgggaaaaatagt

SEQ ID NO: 632860 - DNA, 19 bp, Mus musculus
  siRNA target sequence for H2-DMb1 (NM_010387.2,567-585).
gcccaaaccacacctttta

SEQ ID NO: 632861 - DNA, 19 bp, Mus musculus
  siRNA target sequence for H2-DMb1 (NM_010387.2,614-632).
ctacgtctggggcttctat

SEQ ID NO: 632862 - DNA, 19 bp, Mus musculus
  siRNA target sequence for H2-DMb1 (NM_010387.2,636-654).
gcggatgtgaccatcacat

SEQ ID NO: 632863 - DNA, 19 bp, Mus musculus
  siRNA target sequence for H2-Ea (NM_010381.2,37-55).
ggagccctgctgttaagat

SEQ ID NO: 632864 - DNA, 19 bp, Mus musculus
  siRNA target sequence for H2-Ea (NM_010381.2,87-105).
gaagtcatgggctatcaaa

SEQ ID NO: 632865 - DNA, 19 bp, Mus musculus
  siRNA target sequence for H2-Ea (NM_010381.2,123-141).
ccaggcggagttctatctt

SEQ ID NO: 632866 - DNA, 19 bp, Mus musculus
  siRNA target sequence for H2-Ea (NM_010381.2,124-142).
caggcggagttctatcttt

SEQ ID NO: 632867 - DNA, 19 bp, Mus musculus
  siRNA target sequence for H2-Ea (NM_010381.2,126-144).
ggcggagttctatctttta

SEQ ID NO: 632868 - DNA, 19 bp, Mus musculus
  siRNA target sequence for H2-Ea (NM_010381.2,129-147).
ggagttctatcttttacca

SEQ ID NO: 632869 - DNA, 19 bp, Mus musculus
  siRNA target sequence for H2-Ea (NM_010381.2,148-166).
gacaaacgtggagagttta

SEQ ID NO: 632870 - DNA, 19 bp, Mus musculus
  siRNA target sequence for H2-Ea (NM_010381.2,219-237).
gaccatctggagacttgaa

SEQ ID NO: 632871 - DNA, 19 bp, Mus musculus
  siRNA target sequence for H2-Ea (NM_010381.2,268-286).
cagggtgcactggctaata

SEQ ID NO: 632872 - DNA, 19 bp, Mus musculus
  siRNA target sequence for H2-Ea (NM_010381.2,270-288).
gggtgcactggctaatata

SEQ ID NO: 632873 - DNA, 19 bp, Mus musculus
  siRNA target sequence for H2-Ea (NM_010381.2,535-553).
cgcaaattccactatctga

SEQ ID NO: 632874 - DNA, 19 bp, Mus musculus
  siRNA target sequence for H2-Ea (NM_010381.2,559-577).
ctgccctccacagatgatt

SEQ ID NO: 632875 - DNA, 19 bp, Mus musculus
  siRNA target sequence for H2-Ea (NM_010381.2,657-675).
cccagaaactacagagaat

SEQ ID NO: 632876 - DNA, 19 bp, Mus musculus
  siRNA target sequence for H2-Ea (NM_010381.2,724-742).
gggattatcctcatcatga

SEQ ID NO: 632877 - DNA, 19 bp, Mus musculus
  siRNA target sequence for H2-Ea (NM_010381.2,725-743).
ggattatcctcatcatgaa

SEQ ID NO: 632878 - DNA, 19 bp, Mus musculus
  siRNA target sequence for H2-Ea (NM_010381.2,733-751).
ctcatcatgaagggtatta

SEQ ID NO: 632879 - DNA, 19 bp, Mus musculus
  siRNA target sequence for H2-Ea (NM_010381.2,735-753).
catcatgaagggtattaaa

SEQ ID NO: 632880 - DNA, 19 bp, Mus musculus
  siRNA target sequence for H2-Eb1 (NM_010382.1,97-115).
gactccagaccatggtttt

SEQ ID NO: 632881 - DNA, 19 bp, Mus musculus
  siRNA target sequence for H2-Eb1 (NM_010382.1,106-124).
ccatggtttttggaatact

SEQ ID NO: 632882 - DNA, 19 bp, Mus musculus
  siRNA target sequence for H2-Eb1 (NM_010382.1,111-129).
gtttttggaatactgtaaa

SEQ ID NO: 632883 - DNA, 19 bp, Mus musculus
  siRNA target sequence for H2-Eb1 (NM_010382.1,528-546).
gggcctggtccgaaatgga

SEQ ID NO: 632884 - DNA, 19 bp, Mus musculus
  siRNA target sequence for H2-Oa (NM_008206.1,118-136).
ggaccggccttctaccaat

SEQ ID NO: 632885 - DNA, 19 bp, Mus musculus
  siRNA target sequence for H2-Oa (NM_008206.1,121-139).
ccggccttctaccaatctt

SEQ ID NO: 632886 - DNA, 19 bp, Mus musculus
  siRNA target sequence for H2-Oa (NM_008206.1,122-140).
cggccttctaccaatctta

SEQ ID NO: 632887 - DNA, 19 bp, Mus musculus
  siRNA target sequence for H2-Oa (NM_008206.1,152-170).
gacagttcacacacgaatt

SEQ ID NO: 632888 - DNA, 19 bp, Mus musculus
  siRNA target sequence for H2-Oa (NM_008206.1,172-190).
gacggggaacaaattttct

SEQ ID NO: 632889 - DNA, 19 bp, Mus musculus
  siRNA target sequence for H2-Ob (NM_010389.2,54-72).
gctggattccttcatgatt

SEQ ID NO: 632890 - DNA, 19 bp, Mus musculus
  siRNA target sequence for H2-Ob (NM_010389.2,80-98).
gagactccccagagaattt

SEQ ID NO: 632891 - DNA, 19 bp, Mus musculus
  siRNA target sequence for H2-Ob (NM_010389.2,109-127).
gcaaaggcggactgttact

SEQ ID NO: 632892 - DNA, 19 bp, Mus musculus
  siRNA target sequence for H2-Ob (NM_010389.2,110-128).
caaaggcggactgttactt

SEQ ID NO: 632893 - DNA, 19 bp, Mus musculus
  siRNA target sequence for H2-Ob (NM_010389.2,641-659).
ggatggctcagtctgaata

SEQ ID NO: 632894 - DNA, 19 bp, Mus musculus
  siRNA target sequence for H2-Ob (NM_010389.2,642-660).
gatggctcagtctgaatat

SEQ ID NO: 632895 - DNA, 19 bp, Mus musculus
  siRNA target sequence for H2-Ob (NM_010389.2,720-738).
ggtgggggttgttatccat

SEQ ID NO: 632896 - DNA, 19 bp, Mus musculus
  siRNA target sequence for H2-Ob (NM_010389.2,725-743).
gggttgttatccatctcaa

SEQ ID NO: 632897 - DNA, 19 bp, Mus musculus
  siRNA target sequence for B2m (NM_009735.2,97-115).
ctgaccggcctgtatgcta

SEQ ID NO: 632898 - DNA, 19 bp, Mus musculus
  siRNA target sequence for B2m (NM_009735.2,125-143).
cccctcaaattcaagtata

SEQ ID NO: 632899 - DNA, 19 bp, Mus musculus
  siRNA target sequence for B2m (NM_009735.2,127-145).
cctcaaattcaagtatact

SEQ ID NO: 632900 - DNA, 19 bp, Mus musculus
  siRNA target sequence for B2m (NM_009735.2,166-184).
gggaagccgaacatactga

SEQ ID NO: 632901 - DNA, 19 bp, Mus musculus
  siRNA target sequence for B2m (NM_009735.2,167-185).
ggaagccgaacatactgaa

SEQ ID NO: 632902 - DNA, 19 bp, Mus musculus
  siRNA target sequence for B2m (NM_009735.2,237-255).
gaacgggaaaaaaattcct

SEQ ID NO: 632903 - DNA, 19 bp, Mus musculus
  siRNA target sequence for B2m (NM_009735.2,240-258).
cgggaaaaaaattcctaaa

SEQ ID NO: 632904 - DNA, 19 bp, Mus musculus
  siRNA target sequence for B2m (NM_009735.2,284-302).
gcaaggactggtctttcta

SEQ ID NO: 632905 - DNA, 19 bp, Mus musculus
  siRNA target sequence for B2m (NM_009735.2,285-303).
caaggactggtctttctat

SEQ ID NO: 632906 - DNA, 19 bp, Mus musculus
  siRNA target sequence for B2m (NM_009735.2,307-325).
ctggctcacactgaattca

SEQ ID NO: 632907 - DNA, 19 bp, Mus musculus
  siRNA target sequence for B2m (NM_009735.2,327-345).
ccccactgagactgataca

SEQ ID NO: 632908 - DNA, 19 bp, Mus musculus
  siRNA target sequence for B2m (NM_009735.2,329-347).
ccactgagactgatacata

SEQ ID NO: 632909 - DNA, 19 bp, Mus musculus
  siRNA target sequence for B2m (NM_009735.2,344-362).
catacgcctgcagagttaa

SEQ ID NO: 632910 - DNA, 19 bp, Mus musculus
  siRNA target sequence for B2m (NM_009735.2,348-366).
cgcctgcagagttaagcat

SEQ ID NO: 632911 - DNA, 19 bp, Mus musculus
  siRNA target sequence for H2-T23 (NM_010398.1,489-507).
ctggaccgcgaatgacata

SEQ ID NO: 632912 - DNA, 19 bp, Mus musculus
  siRNA target sequence for Hfe (NM_010424.2,177-195).
ctgccaccgcgttcacatt

SEQ ID NO: 632913 - DNA, 19 bp, Mus musculus
  siRNA target sequence for Hfe (NM_010424.2,183-201).
ccgcgttcacattctctaa

SEQ ID NO: 632914 - DNA, 19 bp, Mus musculus
  siRNA target sequence for Hfe (NM_010424.2,186-204).
cgttcacattctctaagat

SEQ ID NO: 632915 - DNA, 19 bp, Mus musculus
  siRNA target sequence for Hfe (NM_010424.2,187-205).
gttcacattctctaagata

SEQ ID NO: 632916 - DNA, 19 bp, Mus musculus
  siRNA target sequence for Hfe (NM_010424.2,196-214).
ctctaagatacctcttcat

SEQ ID NO: 632917 - DNA, 19 bp, Mus musculus
  siRNA target sequence for Hfe (NM_010424.2,281-299).
ctttgtgtcctacaatcat

SEQ ID NO: 632918 - DNA, 19 bp, Mus musculus
  siRNA target sequence for Hfe (NM_010424.2,389-407).
gtgggactacatgttcata

SEQ ID NO: 632919 - DNA, 19 bp, Mus musculus
  siRNA target sequence for Hfe (NM_010424.2,391-409).
gggactacatgttcatagt

SEQ ID NO: 632920 - DNA, 19 bp, Mus musculus
  siRNA target sequence for Hfe (NM_010424.2,419-437).
gaccatcatgggcaactat

SEQ ID NO: 632921 - DNA, 19 bp, Mus musculus
  siRNA target sequence for Hfe (NM_010424.2,430-448).
gcaactataaccacagtaa

SEQ ID NO: 632922 - DNA, 19 bp, Mus musculus
  siRNA target sequence for Hfe (NM_010424.2,533-551).
cggcttctggagatatggt

SEQ ID NO: 632923 - DNA, 19 bp, Mus musculus
  siRNA target sequence for Hfe (NM_010424.2,535-553).
gcttctggagatatggtta

SEQ ID NO: 632924 - DNA, 19 bp, Mus musculus
  siRNA target sequence for Hfe (NM_010424.2,559-577).
ggcaagatcacctggaatt

SEQ ID NO: 632925 - DNA, 19 bp, Mus musculus
  siRNA target sequence for Hfe (NM_010424.2,742-760).
gacagcaagtgcctacttt

SEQ ID NO: 632926 - DNA, 19 bp, Mus musculus
  siRNA target sequence for Hfe (NM_010424.2,892-910).
ccgagaaggtgctacctaa

SEQ ID NO: 632927 - DNA, 19 bp, Mus musculus
  siRNA target sequence for Gfra3 (NM_010280.2,117-135).
gacctccactgctgatgat

SEQ ID NO: 632928 - DNA, 19 bp, Mus musculus
  siRNA target sequence for Gfra3 (NM_010280.2,216-234).
gtacccaggccagaaagaa

SEQ ID NO: 632929 - DNA, 19 bp, Mus musculus
  siRNA target sequence for Gfra3 (NM_010280.2,416-434).
gctacctgtctggacattt

SEQ ID NO: 632930 - DNA, 19 bp, Mus musculus
  siRNA target sequence for Gfra3 (NM_010280.2,417-435).
ctacctgtctggacattta

SEQ ID NO: 632931 - DNA, 19 bp, Mus musculus
  siRNA target sequence for Gfra3 (NM_010280.2,478-496).
ggatgtctcaccctatgaa

SEQ ID NO: 632932 - DNA, 19 bp, Mus musculus
  siRNA target sequence for Gfra3 (NM_010280.2,561-579).
cggacctctgcctcaaatt

SEQ ID NO: 632933 - DNA, 19 bp, Mus musculus
  siRNA target sequence for Gfra3 (NM_010280.2,562-580).
ggacctctgcctcaaattt

SEQ ID NO: 632934 - DNA, 19 bp, Mus musculus
  siRNA target sequence for Gfra3 (NM_010280.2,566-584).
ctctgcctcaaatttgcta

SEQ ID NO: 632935 - DNA, 19 bp, Mus musculus
  siRNA target sequence for Gfra3 (NM_010280.2,1167-1185).
cagactctactttttcagt

SEQ ID NO: 632936 - DNA, 19 bp, Mus musculus
  siRNA target sequence for Gfra3 (NM_010280.2,1228-1246).
caggctacccattctttct

SEQ ID NO: 632937 - DNA, 19 bp, Mus musculus
  siRNA target sequence for Sema5a (NM_009154.1,134-152).
ctgtcgtctcttacaaaga

SEQ ID NO: 632938 - DNA, 19 bp, Mus musculus
  siRNA target sequence for Sema5a (NM_009154.1,193-211).
gtggatttctcgaggttaa

SEQ ID NO: 632939 - DNA, 19 bp, Mus musculus
  siRNA target sequence for Sema5a (NM_009154.1,195-213).
ggatttctcgaggttaaca

SEQ ID NO: 632940 - DNA, 19 bp, Mus musculus
  siRNA target sequence for Sema5a (NM_009154.1,238-256).
gtcgtaggagcgagaaact

SEQ ID NO: 632941 - DNA, 19 bp, Mus musculus
  siRNA target sequence for Sema5a (NM_009154.1,240-258).
cgtaggagcgagaaactat

SEQ ID NO: 632942 - DNA, 19 bp, Mus musculus
  siRNA target sequence for Sema5a (NM_009154.1,244-262).
ggagcgagaaactatctct

SEQ ID NO: 632943 - DNA, 19 bp, Mus musculus
  siRNA target sequence for Sema5a (NM_009154.1,245-263).
gagcgagaaactatctctt

SEQ ID NO: 632944 - DNA, 19 bp, Mus musculus
  siRNA target sequence for Sema5a (NM_009154.1,397-415).
ggtggggaccggctattca

SEQ ID NO: 632945 - DNA, 19 bp, Mus musculus
  siRNA target sequence for Sema5a (NM_009154.1,449-467).
ccatccgctcgttaagtaa

SEQ ID NO: 632946 - DNA, 19 bp, Mus musculus
  siRNA target sequence for Sema5a (NM_009154.1,473-491).
ctgagatccatgatcagat

SEQ ID NO: 632947 - DNA, 19 bp, Mus musculus
  siRNA target sequence for Sema5a (NM_009154.1,593-611).
ggcgagatccagccattta

SEQ ID NO: 632948 - DNA, 19 bp, Mus musculus
  siRNA target sequence for Sema5a (NM_009154.1,692-710).
cctacgacatcggaaattt

SEQ ID NO: 632949 - DNA, 19 bp, Mus musculus
  siRNA target sequence for Sema5a (NM_009154.1,798-816).
cattggagggcgatttctt

SEQ ID NO: 632950 - DNA, 19 bp, Mus musculus
  siRNA target sequence for Sema5a (NM_009154.1,925-943).
ctggatctgatctatggta

SEQ ID NO: 632951 - DNA, 19 bp, Mus musculus
  siRNA target sequence for Sema5a (NM_009154.1,1028-1046).
ccttcaagtaccaagaaaa

SEQ ID NO: 632952 - DNA, 19 bp, Mus musculus
  siRNA target sequence for Sema5a (NM_009154.1,1108-1126).
gaccagggcctgtacgtaa

SEQ ID NO: 632953 - DNA, 19 bp, Mus musculus
  siRNA target sequence for Sema5a (NM_009154.1,1123-1141).
gtaaacctgacggaaagaa

SEQ ID NO: 632954 - DNA, 19 bp, Mus musculus
  siRNA target sequence for Sema5a (NM_009154.1,1128-1146).
cctgacggaaagaaaccta

SEQ ID NO: 632955 - DNA, 19 bp, Mus musculus
  siRNA target sequence for Sema5a (NM_009154.1,1149-1167).
ggatgctcagaagttcatt

SEQ ID NO: 632956 - DNA, 19 bp, Mus musculus
  siRNA target sequence for Sema5a (NM_009154.1,1233-1251).
ctcccacttagctgttgat

SEQ ID NO: 632957 - DNA, 19 bp, Mus musculus
  siRNA target sequence for Sema5a (NM_009154.1,1271-1289).
ctctggtccacatcattta

SEQ ID NO: 632958 - DNA, 19 bp, Mus musculus
  siRNA target sequence for Sema5a (NM_009154.1,1298-1316).
cagattatggcaccattaa

SEQ ID NO: 632959 - DNA, 19 bp, Mus musculus
  siRNA target sequence for Sema5a (NM_009154.1,1541-1559).
gctgggatgcggtgatgaa

SEQ ID NO: 632960 - DNA, 19 bp, Mus musculus
  siRNA target sequence for Sema5a (NM_009154.1,1544-1562).
gggatgcggtgatgaagaa

SEQ ID NO: 632961 - DNA, 19 bp, Mus musculus
  siRNA target sequence for Sema5a (NM_009154.1,1545-1563).
ggatgcggtgatgaagaaa

SEQ ID NO: 632962 - DNA, 19 bp, Mus musculus
  siRNA target sequence for Sema5a (NM_009154.1,1546-1564).
gatgcggtgatgaagaaat

SEQ ID NO: 632963 - DNA, 19 bp, Mus musculus
  siRNA target sequence for Sema5a (NM_009154.1,1619-1637).
cctgtccgaccagaaatct

SEQ ID NO: 632964 - DNA, 19 bp, Mus musculus
  siRNA target sequence for Sema5a (NM_009154.1,1629-1647).
cagaaatctcactgtagat

SEQ ID NO: 632965 - DNA, 19 bp, Mus musculus
  siRNA target sequence for Sema5a (NM_009154.1,2162-2180).
cctggacccctgtcaacat

SEQ ID NO: 632966 - DNA, 19 bp, Mus musculus
  siRNA target sequence for Sema5a (NM_009154.1,2206-2224).
cagcgtttccgctatacct

SEQ ID NO: 632967 - DNA, 19 bp, Mus musculus
  siRNA target sequence for Sema5a (NM_009154.1,2214-2232).
ccgctatacctgtaaagct

SEQ ID NO: 632968 - DNA, 19 bp, Mus musculus
  siRNA target sequence for Sema5a (NM_009154.1,2233-2251).
cgcctgccagatccaaatt

SEQ ID NO: 632969 - DNA, 19 bp, Mus musculus
  siRNA target sequence for Sema5a (NM_009154.1,2234-2252).
gcctgccagatccaaattt

SEQ ID NO: 632970 - DNA, 19 bp, Mus musculus
  siRNA target sequence for Sema5a (NM_009154.1,2344-2362).
ctaagagctgggagatact

SEQ ID NO: 632971 - DNA, 19 bp, Mus musculus
  siRNA target sequence for Sema5a (NM_009154.1,2355-2373).
gagatactctgctcataca

SEQ ID NO: 632972 - DNA, 19 bp, Mus musculus
  siRNA target sequence for Sema5a (NM_009154.1,2357-2375).
gatactctgctcatacagt

SEQ ID NO: 632973 - DNA, 19 bp, Mus musculus
  siRNA target sequence for Sema5a (NM_009154.1,2361-2379).
ctctgctcatacagtcaat

SEQ ID NO: 632974 - DNA, 19 bp, Mus musculus
  siRNA target sequence for Sema5a (NM_009154.1,2599-2617).
ggaggtggccactacatga

SEQ ID NO: 632975 - DNA, 19 bp, Mus musculus
  siRNA target sequence for Sema5a (NM_009154.1,2602-2620).
ggtggccactacatgagaa

SEQ ID NO: 632976 - DNA, 19 bp, Mus musculus
  siRNA target sequence for Sema5a (NM_009154.1,2780-2798).
ggcagtgcatccttctgtt

SEQ ID NO: 632977 - DNA, 19 bp, Mus musculus
  siRNA target sequence for Sema5a (NM_009154.1,2781-2799).
gcagtgcatccttctgttt

SEQ ID NO: 632978 - DNA, 19 bp, Mus musculus
  siRNA target sequence for Sema5a (NM_009154.1,2848-2866).
gtatttgactctaatttca

SEQ ID NO: 632979 - DNA, 19 bp, Mus musculus
  siRNA target sequence for Sema5a (NM_009154.1,2958-2976).
ggggcttagcagttccatt

SEQ ID NO: 632980 - DNA, 19 bp, Mus musculus
  siRNA target sequence for Sema5a (NM_009154.1,2961-2979).
gcttagcagttccattctt

SEQ ID NO: 632981 - DNA, 19 bp, Mus musculus
  siRNA target sequence for Sema5a (NM_009154.1,3086-3104).
gcataactaaccacatcaa

SEQ ID NO: 632982 - DNA, 19 bp, Mus musculus
  siRNA target sequence for Sema5a (NM_009154.1,3102-3120).
caacaaactggacaaatat

SEQ ID NO: 632983 - DNA, 19 bp, Mus musculus
  siRNA target sequence for Sema5a (NM_009154.1,3134-3152).
ccatcaaggcatttaacaa

SEQ ID NO: 632984 - DNA, 19 bp, Mus musculus
  siRNA target sequence for Sema5a (NM_009154.1,3213-3231).
ctattccaacgcctacttt

SEQ ID NO: 632985 - DNA, 19 bp, Mus musculus
  siRNA target sequence for Sema5a (NM_009154.1,3218-3236).
ccaacgcctactttacaga

SEQ ID NO: 632986 - DNA, 19 bp, Mus musculus
  siRNA target sequence for Sema5a (NM_009154.1,3219-3237).
caacgcctactttacagat

SEQ ID NO: 632987 - DNA, 19 bp, Mus musculus
  siRNA target sequence for Sema5a (NM_009154.1,3224-3242).
cctactttacagatctcaa

SEQ ID NO: 632988 - DNA, 19 bp, Mus musculus
  siRNA target sequence for Sema5a (NM_009154.1,3228-3246).
ctttacagatctcaacaat

SEQ ID NO: 632989 - DNA, 19 bp, Mus musculus
  siRNA target sequence for Sema5a (NM_009154.1,3233-3251).
cagatctcaacaattatga

SEQ ID NO: 632990 - DNA, 19 bp, Mus musculus
  siRNA target sequence for Disp1 (NM_026866.1,443-461).
cacctcggacccagagaaa

SEQ ID NO: 632991 - DNA, 19 bp, Mus musculus
  siRNA target sequence for Disp1 (NM_026866.1,527-545).
ctgcctttagacaaccaaa

SEQ ID NO: 632992 - DNA, 19 bp, Mus musculus
  siRNA target sequence for Disp1 (NM_026866.1,530-548).
cctttagacaaccaaagaa

SEQ ID NO: 632993 - DNA, 19 bp, Mus musculus
  siRNA target sequence for Disp1 (NM_026866.1,551-569).
cctcagacgccaactcaat

SEQ ID NO: 632994 - DNA, 19 bp, Mus musculus
  siRNA target sequence for Disp1 (NM_026866.1,680-698).
cagccacattccgaatact

SEQ ID NO: 632995 - DNA, 19 bp, Mus musculus
  siRNA target sequence for Disp1 (NM_026866.1,682-700).
gccacattccgaatactct

SEQ ID NO: 632996 - DNA, 19 bp, Mus musculus
  siRNA target sequence for Disp1 (NM_026866.1,762-780).
catctttctgccttcatca

SEQ ID NO: 632997 - DNA, 19 bp, Mus musculus
  siRNA target sequence for Disp1 (NM_026866.1,783-801).
cgtggcctgaccatttcca

SEQ ID NO: 632998 - DNA, 19 bp, Mus musculus
  siRNA target sequence for Disp1 (NM_026866.1,837-855).
ggccgtccagacctttcaa

SEQ ID NO: 632999 - DNA, 19 bp, Mus musculus
  siRNA target sequence for Disp1 (NM_026866.1,839-857).
ccgtccagacctttcaagt

SEQ ID NO: 633000 - DNA, 19 bp, Mus musculus
  siRNA target sequence for Disp1 (NM_026866.1,840-858).
cgtccagacctttcaagtt

SEQ ID NO: 633001 - DNA, 19 bp, Mus musculus
  siRNA target sequence for Disp1 (NM_026866.1,1026-1044).
ggctggtcacgtggaataa

SEQ ID NO: 633002 - DNA, 19 bp, Mus musculus
  siRNA target sequence for Disp1 (NM_026866.1,1051-1069).
gcgaaacacagggtacaaa

SEQ ID NO: 633003 - DNA, 19 bp, Mus musculus
  siRNA target sequence for Disp1 (NM_026866.1,1080-1098).
ccaactatccttataagta

SEQ ID NO: 633004 - DNA, 19 bp, Mus musculus
  siRNA target sequence for Disp1 (NM_026866.1,1204-1222).
ctgcgatgttccaagtgat

SEQ ID NO: 633005 - DNA, 19 bp, Mus musculus
  siRNA target sequence for Disp1 (NM_026866.1,1224-1242).
gatactccagagtagtgtt

SEQ ID NO: 633006 - DNA, 19 bp, Mus musculus
  siRNA target sequence for Disp1 (NM_026866.1,1256-1274).
ggggagactctgtggaatt

SEQ ID NO: 633007 - DNA, 19 bp, Mus musculus
  siRNA target sequence for Disp1 (NM_026866.1,1267-1285).
gtggaatttacctgcaatt

SEQ ID NO: 633008 - DNA, 19 bp, Mus musculus
  siRNA target sequence for Disp1 (NM_026866.1,1269-1287).
ggaatttacctgcaattaa

SEQ ID NO: 633009 - DNA, 19 bp, Mus musculus
  siRNA target sequence for Disp1 (NM_026866.1,1304-1322).
gataattccaggatcagat

SEQ ID NO: 633010 - DNA, 19 bp, Mus musculus
  siRNA target sequence for Disp1 (NM_026866.1,1380-1398).
gctggaccctggggaatta

SEQ ID NO: 633011 - DNA, 19 bp, Mus musculus
  siRNA target sequence for Disp1 (NM_026866.1,1383-1401).
ggaccctggggaattacat

SEQ ID NO: 633012 - DNA, 19 bp, Mus musculus
  siRNA target sequence for Disp1 (NM_026866.1,1402-1420).
cgccattctgaataacaga

SEQ ID NO: 633013 - DNA, 19 bp, Mus musculus
  siRNA target sequence for Disp1 (NM_026866.1,1422-1440).
cgtcctgtcagaagattgt

SEQ ID NO: 633014 - DNA, 19 bp, Mus musculus
  siRNA target sequence for Disp1 (NM_026866.1,1423-1441).
gtcctgtcagaagattgtt

SEQ ID NO: 633015 - DNA, 19 bp, Mus musculus
  siRNA target sequence for Disp1 (NM_026866.1,1425-1443).
cctgtcagaagattgttga

SEQ ID NO: 633016 - DNA, 19 bp, Mus musculus
  siRNA target sequence for Disp1 (NM_026866.1,1482-1500).
gcgccaagcactaccaaaa

SEQ ID NO: 633017 - DNA, 19 bp, Mus musculus
  siRNA target sequence for Disp1 (NM_026866.1,1574-1592).
cgcaagtgtaccaaataca

SEQ ID NO: 633018 - DNA, 19 bp, Mus musculus
  siRNA target sequence for Disp1 (NM_026866.1,1575-1593).
gcaagtgtaccaaatacaa

SEQ ID NO: 633019 - DNA, 19 bp, Mus musculus
  siRNA target sequence for Disp1 (NM_026866.1,1622-1640).
gtagacaaggacttcatga

SEQ ID NO: 633020 - DNA, 19 bp, Mus musculus
  siRNA target sequence for Disp1 (NM_026866.1,1657-1675).
ctacgccgtgccagcttta

SEQ ID NO: 633021 - DNA, 19 bp, Mus musculus
  siRNA target sequence for Disp1 (NM_026866.1,1662-1680).
ccgtgccagctttaaagta

SEQ ID NO: 633022 - DNA, 19 bp, Mus musculus
  siRNA target sequence for Disp1 (NM_026866.1,1733-1751).
ctggacaacttcgaaaact

SEQ ID NO: 633023 - DNA, 19 bp, Mus musculus
  siRNA target sequence for Disp1 (NM_026866.1,1809-1827).
gcttgttccaggattacct

SEQ ID NO: 633024 - DNA, 19 bp, Mus musculus
  siRNA target sequence for Disp1 (NM_026866.1,1961-1979).
ctctaccgagtcgtcttta

SEQ ID NO: 633025 - DNA, 19 bp, Mus musculus
  siRNA target sequence for Disp1 (NM_026866.1,1985-2003).
gagtttttcccctttatga

SEQ ID NO: 633026 - DNA, 19 bp, Mus musculus
  siRNA target sequence for Disp1 (NM_026866.1,2178-2196).
ctgccttctacgctaacta

SEQ ID NO: 633027 - DNA, 19 bp, Mus musculus
  siRNA target sequence for Disp1 (NM_026866.1,2306-2324).
gagcggtacctcctcaata

SEQ ID NO: 633028 - DNA, 19 bp, Mus musculus
  siRNA target sequence for Disp1 (NM_026866.1,2308-2326).
gcggtacctcctcaatata

SEQ ID NO: 633029 - DNA, 19 bp, Mus musculus
  siRNA target sequence for Disp1 (NM_026866.1,2309-2327).
cggtacctcctcaatatat

SEQ ID NO: 633030 - DNA, 19 bp, Mus musculus
  siRNA target sequence for Disp1 (NM_026866.1,2310-2328).
ggtacctcctcaatatatt

SEQ ID NO: 633031 - DNA, 19 bp, Mus musculus
  siRNA target sequence for Disp1 (NM_026866.1,2423-2441).
gaggcatcgcggattttct

SEQ ID NO: 633032 - DNA, 19 bp, Mus musculus
  siRNA target sequence for Disp1 (NM_026866.1,2425-2443).
ggcatcgcggattttcttt

SEQ ID NO: 633033 - DNA, 19 bp, Mus musculus
  siRNA target sequence for Disp1 (NM_026866.1,2427-2445).
catcgcggattttctttga

SEQ ID NO: 633034 - DNA, 19 bp, Mus musculus
  siRNA target sequence for Disp1 (NM_026866.1,2430-2448).
cgcggattttctttgaaaa

SEQ ID NO: 633035 - DNA, 19 bp, Mus musculus
  siRNA target sequence for Disp1 (NM_026866.1,2450-2468).
gtgctgccgtgcatagtca

SEQ ID NO: 633036 - DNA, 19 bp, Mus musculus
  siRNA target sequence for Disp1 (NM_026866.1,2456-2474).
ccgtgcatagtcatcaagt

SEQ ID NO: 633037 - DNA, 19 bp, Mus musculus
  siRNA target sequence for Disp1 (NM_026866.1,2457-2475).
cgtgcatagtcatcaagtt

SEQ ID NO: 633038 - DNA, 19 bp, Mus musculus
  siRNA target sequence for Disp1 (NM_026866.1,2535-2553).
gcgtaaacccaaagatgaa

SEQ ID NO: 633039 - DNA, 19 bp, Mus musculus
  siRNA target sequence for Disp1 (NM_026866.1,2759-2777).
ctagatagcacgttcaaca

SEQ ID NO: 633040 - DNA, 19 bp, Mus musculus
  siRNA target sequence for Disp1 (NM_026866.1,2790-2808).
cctcccaggcctggatttt

SEQ ID NO: 633041 - DNA, 19 bp, Mus musculus
  siRNA target sequence for Disp1 (NM_026866.1,2791-2809).
ctcccaggcctggatttta

SEQ ID NO: 633042 - DNA, 19 bp, Mus musculus
  siRNA target sequence for Disp1 (NM_026866.1,2793-2811).
cccaggcctggattttaca

SEQ ID NO: 633043 - DNA, 19 bp, Mus musculus
  siRNA target sequence for Disp1 (NM_026866.1,2864-2882).
gacttcaccagctgtttca

SEQ ID NO: 633044 - DNA, 19 bp, Mus musculus
  siRNA target sequence for Disp1 (NM_026866.1,3019-3037).
cagaagcacgggatatcat

SEQ ID NO: 633045 - DNA, 19 bp, Mus musculus
  siRNA target sequence for Disp1 (NM_026866.1,3021-3039).
gaagcacgggatatcatct

SEQ ID NO: 633046 - DNA, 19 bp, Mus musculus
  siRNA target sequence for Disp1 (NM_026866.1,3024-3042).
gcacgggatatcatctgaa

SEQ ID NO: 633047 - DNA, 19 bp, Mus musculus
  siRNA target sequence for Disp1 (NM_026866.1,3025-3043).
cacgggatatcatctgaat

SEQ ID NO: 633048 - DNA, 19 bp, Mus musculus
  siRNA target sequence for Disp1 (NM_026866.1,3027-3045).
cgggatatcatctgaataa

SEQ ID NO: 633049 - DNA, 19 bp, Mus musculus
  siRNA target sequence for Disp1 (NM_026866.1,3029-3047).
ggatatcatctgaataaca

SEQ ID NO: 633050 - DNA, 19 bp, Mus musculus
  siRNA target sequence for Disp1 (NM_026866.1,3057-3075).
ggccaaggttcgacatcaa

SEQ ID NO: 633051 - DNA, 19 bp, Mus musculus
  siRNA target sequence for Disp1 (NM_026866.1,3126-3144).
ccctggcctacgagaagat

SEQ ID NO: 633052 - DNA, 19 bp, Mus musculus
  siRNA target sequence for Disp1 (NM_026866.1,3161-3179).
gaggtggactcgtggattt

SEQ ID NO: 633053 - DNA, 19 bp, Mus musculus
  siRNA target sequence for Disp1 (NM_026866.1,3330-3348).
ccacgtggaatatcatcat

SEQ ID NO: 633054 - DNA, 19 bp, Mus musculus
  siRNA target sequence for Disp1 (NM_026866.1,3463-3481).
cggcctgtctgtagacttt

SEQ ID NO: 633055 - DNA, 19 bp, Mus musculus
  siRNA target sequence for Disp1 (NM_026866.1,3881-3899).
caactggaacatgagtttt

SEQ ID NO: 633056 - DNA, 19 bp, Mus musculus
  siRNA target sequence for Disp1 (NM_026866.1,3969-3987).
cctgctccgaatttttcaa

SEQ ID NO: 633057 - DNA, 19 bp, Mus musculus
  siRNA target sequence for Disp1 (NM_026866.1,3985-4003).
caacggccaagcaaagaat

SEQ ID NO: 633058 - DNA, 19 bp, Mus musculus
  siRNA target sequence for Disp1 (NM_026866.1,3988-4006).
cggccaagcaaagaattta

SEQ ID NO: 633059 - DNA, 19 bp, Mus musculus
  siRNA target sequence for Disp1 (NM_026866.1,3989-4007).
ggccaagcaaagaatttaa

SEQ ID NO: 633060 - DNA, 19 bp, Mus musculus
  siRNA target sequence for Disp1 (NM_026866.1,4102-4120).
caccgtgtgccatttctct

SEQ ID NO: 633061 - DNA, 19 bp, Mus musculus
  siRNA target sequence for Disp1 (NM_026866.1,4119-4137).
ctctcaatccgagatgtaa

SEQ ID NO: 633062 - DNA, 19 bp, Mus musculus
  siRNA target sequence for Disp1 (NM_026866.1,4121-4139).
ctcaatccgagatgtaact

SEQ ID NO: 633063 - DNA, 19 bp, Mus musculus
  siRNA target sequence for Disp1 (NM_026866.1,4148-4166).
gcctacacacacttacagt

SEQ ID NO: 633064 - DNA, 19 bp, Mus musculus
  siRNA target sequence for Disp1 (NM_026866.1,4236-4254).
gcggctttgtccagattca

SEQ ID NO: 633065 - DNA, 19 bp, Mus musculus
  siRNA target sequence for Disp1 (NM_026866.1,4342-4360).
gaattctcggcctaggaat

SEQ ID NO: 633066 - DNA, 19 bp, Mus musculus
  siRNA target sequence for Disp1 (NM_026866.1,4382-4400).
cactttcaggcccaagaaa

SEQ ID NO: 633067 - DNA, 19 bp, Mus musculus
  siRNA target sequence for Disp1 (NM_026866.1,4534-4552).
gagactctgcaaaagtaga

SEQ ID NO: 633068 - DNA, 19 bp, Mus musculus
  siRNA target sequence for Disp1 (NM_026866.1,4571-4589).
ggcagtggagggacaaaat

SEQ ID NO: 633069 - DNA, 19 bp, Mus musculus
  siRNA target sequence for Disp1 (NM_026866.1,4591-4609).
caaggtctctggtttacca

SEQ ID NO: 633070 - DNA, 19 bp, Mus musculus
  siRNA target sequence for Disp1 (NM_026866.1,4649-4667).
ctgctgcagaccgatgaaa

SEQ ID NO: 633071 - DNA, 19 bp, Mus musculus
  siRNA target sequence for Disp1 (NM_026866.1,4670-4688).
gtgaactcagaacatttaa

SEQ ID NO: 633072 - DNA, 19 bp, Mus musculus
  siRNA target sequence for Disp1 (NM_026866.1,4672-4690).
gaactcagaacatttaaat

SEQ ID NO: 633073 - DNA, 19 bp, Mus musculus
  siRNA target sequence for Disp1 (NM_026866.1,4691-4709).
cataacgaatcaaacttta

SEQ ID NO: 633074 - DNA, 19 bp, Mus musculus
  siRNA target sequence for Disp1 (NM_026866.1,4697-4715).
gaatcaaactttacattca

SEQ ID NO: 633075 - DNA, 19 bp, Mus musculus
  siRNA target sequence for Disp1 (NM_026866.1,4866-4884).
ctggcgagagtctgttaat

SEQ ID NO: 633076 - DNA, 19 bp, Mus musculus
  siRNA target sequence for Disp1 (NM_026866.1,4868-4886).
ggcgagagtctgttaataa

SEQ ID NO: 633077 - DNA, 19 bp, Mus musculus
  siRNA target sequence for Npc1 (NM_008720.1,191-209).
cgcaatcctgtgtttggta

SEQ ID NO: 633078 - DNA, 19 bp, Mus musculus
  siRNA target sequence for Npc1 (NM_008720.1,192-210).
gcaatcctgtgtttggtat

SEQ ID NO: 633079 - DNA, 19 bp, Mus musculus
  siRNA target sequence for Npc1 (NM_008720.1,207-225).
gtatggagagtgtggaatt

SEQ ID NO: 633080 - DNA, 19 bp, Mus musculus
  siRNA target sequence for Npc1 (NM_008720.1,280-298).
ccaaaggacggctatgact

SEQ ID NO: 633081 - DNA, 19 bp, Mus musculus
  siRNA target sequence for Npc1 (NM_008720.1,281-299).
caaaggacggctatgactt

SEQ ID NO: 633082 - DNA, 19 bp, Mus musculus
  siRNA target sequence for Npc1 (NM_008720.1,314-332).
gtccaggactcttctttga

SEQ ID NO: 633083 - DNA, 19 bp, Mus musculus
  siRNA target sequence for Npc1 (NM_008720.1,317-335).
caggactcttctttgacaa

SEQ ID NO: 633084 - DNA, 19 bp, Mus musculus
  siRNA target sequence for Npc1 (NM_008720.1,320-338).
gactcttctttgacaatgt

SEQ ID NO: 633085 - DNA, 19 bp, Mus musculus
  siRNA target sequence for Npc1 (NM_008720.1,416-434).
gtccgtcatgtttttataa

SEQ ID NO: 633086 - DNA, 19 bp, Mus musculus
  siRNA target sequence for Npc1 (NM_008720.1,420-438).
gtcatgtttttataaccta

SEQ ID NO: 633087 - DNA, 19 bp, Mus musculus
  siRNA target sequence for Npc1 (NM_008720.1,435-453).
cctaatgaccctgttttgt

SEQ ID NO: 633088 - DNA, 19 bp, Mus musculus
  siRNA target sequence for Npc1 (NM_008720.1,582-600).
cgcgaatgcgatgtacaat

SEQ ID NO: 633089 - DNA, 19 bp, Mus musculus
  siRNA target sequence for Npc1 (NM_008720.1,721-739).
ggacaagcgccatttacca

SEQ ID NO: 633090 - DNA, 19 bp, Mus musculus
  siRNA target sequence for Npc1 (NM_008720.1,722-740).
gacaagcgccatttaccat

SEQ ID NO: 633091 - DNA, 19 bp, Mus musculus
  siRNA target sequence for Npc1 (NM_008720.1,806-824).
gcaatgagtctgtagatga

SEQ ID NO: 633092 - DNA, 19 bp, Mus musculus
  siRNA target sequence for Npc1 (NM_008720.1,1002-1020).
ccacagaaggcggtacttt

SEQ ID NO: 633093 - DNA, 19 bp, Mus musculus
  siRNA target sequence for Npc1 (NM_008720.1,1034-1052).
ctcccattgacagtaacat

SEQ ID NO: 633094 - DNA, 19 bp, Mus musculus
  siRNA target sequence for Npc1 (NM_008720.1,1044-1062).
cagtaacatcgccttttct

SEQ ID NO: 633095 - DNA, 19 bp, Mus musculus
  siRNA target sequence for Npc1 (NM_008720.1,1046-1064).
gtaacatcgccttttctgt

SEQ ID NO: 633096 - DNA, 19 bp, Mus musculus
  siRNA target sequence for Npc1 (NM_008720.1,1336-1354).
cgcacggagcagcttatca

SEQ ID NO: 633097 - DNA, 19 bp, Mus musculus
  siRNA target sequence for Npc1 (NM_008720.1,1419-1437).
cgggcctccattgaacaaa

SEQ ID NO: 633098 - DNA, 19 bp, Mus musculus
  siRNA target sequence for Npc1 (NM_008720.1,1421-1439).
ggcctccattgaacaaaga

SEQ ID NO: 633099 - DNA, 19 bp, Mus musculus
  siRNA target sequence for Npc1 (NM_008720.1,1481-1499).
gcatcaccgcatcttacaa

SEQ ID NO: 633100 - DNA, 19 bp, Mus musculus
  siRNA target sequence for Npc1 (NM_008720.1,1485-1503).
caccgcatcttacaacaat

SEQ ID NO: 633101 - DNA, 19 bp, Mus musculus
  siRNA target sequence for Npc1 (NM_008720.1,1487-1505).
ccgcatcttacaacaatga

SEQ ID NO: 633102 - DNA, 19 bp, Mus musculus
  siRNA target sequence for Npc1 (NM_008720.1,1557-1575).
gaactgcaccattatgagt

SEQ ID NO: 633103 - DNA, 19 bp, Mus musculus
  siRNA target sequence for Npc1 (NM_008720.1,1563-1581).
caccattatgagtgtgtta

SEQ ID NO: 633104 - DNA, 19 bp, Mus musculus
  siRNA target sequence for Npc1 (NM_008720.1,1621-1639).
gtaggcgacgacttctata

SEQ ID NO: 633105 - DNA, 19 bp, Mus musculus
  siRNA target sequence for Npc1 (NM_008720.1,1624-1642).
ggcgacgacttctatatct

SEQ ID NO: 633106 - DNA, 19 bp, Mus musculus
  siRNA target sequence for Npc1 (NM_008720.1,1625-1643).
gcgacgacttctatatcta

SEQ ID NO: 633107 - DNA, 19 bp, Mus musculus
  siRNA target sequence for Npc1 (NM_008720.1,1682-1700).
ctcccgcctccttgaatga

SEQ ID NO: 633108 - DNA, 19 bp, Mus musculus
  siRNA target sequence for Npc1 (NM_008720.1,1684-1702).
cccgcctccttgaatgata

SEQ ID NO: 633109 - DNA, 19 bp, Mus musculus
  siRNA target sequence for Npc1 (NM_008720.1,1718-1736).
gtccttgcctgggtacatt

SEQ ID NO: 633110 - DNA, 19 bp, Mus musculus
  siRNA target sequence for Npc1 (NM_008720.1,1815-1833).
caccttccccgtgaataat

SEQ ID NO: 633111 - DNA, 19 bp, Mus musculus
  siRNA target sequence for Npc1 (NM_008720.1,1817-1835).
ccttccccgtgaataatta

SEQ ID NO: 633112 - DNA, 19 bp, Mus musculus
  siRNA target sequence for Npc1 (NM_008720.1,1822-1840).
cccgtgaataattactaca

SEQ ID NO: 633113 - DNA, 19 bp, Mus musculus
  siRNA target sequence for Npc1 (NM_008720.1,1823-1841).
ccgtgaataattactacaa

SEQ ID NO: 633114 - DNA, 19 bp, Mus musculus
  siRNA target sequence for Npc1 (NM_008720.1,1824-1842).
cgtgaataattactacaat

SEQ ID NO: 633115 - DNA, 19 bp, Mus musculus
  siRNA target sequence for Npc1 (NM_008720.1,1871-1889).
cctgggagaaagagtttat

SEQ ID NO: 633116 - DNA, 19 bp, Mus musculus
  siRNA target sequence for Npc1 (NM_008720.1,1960-1978).
gagctcaatcgggaaagta

SEQ ID NO: 633117 - DNA, 19 bp, Mus musculus
  siRNA target sequence for Npc1 (NM_008720.1,1963-1981).
ctcaatcgggaaagtaaca

SEQ ID NO: 633118 - DNA, 19 bp, Mus musculus
  siRNA target sequence for Npc1 (NM_008720.1,1965-1983).
caatcgggaaagtaacagt

SEQ ID NO: 633119 - DNA, 19 bp, Mus musculus
  siRNA target sequence for Npc1 (NM_008720.1,2004-2022).
cagctacgtcgtgatgttt

SEQ ID NO: 633120 - DNA, 19 bp, Mus musculus
  siRNA target sequence for Npc1 (NM_008720.1,2006-2024).
gctacgtcgtgatgtttct

SEQ ID NO: 633121 - DNA, 19 bp, Mus musculus
  siRNA target sequence for Npc1 (NM_008720.1,2213-2231).
ctgtcggggtggacaacat

SEQ ID NO: 633122 - DNA, 19 bp, Mus musculus
  siRNA target sequence for Npc1 (NM_008720.1,2215-2233).
gtcggggtggacaacatct

SEQ ID NO: 633123 - DNA, 19 bp, Mus musculus
  siRNA target sequence for Npc1 (NM_008720.1,2223-2241).
ggacaacatcttcattcta

SEQ ID NO: 633124 - DNA, 19 bp, Mus musculus
  siRNA target sequence for Npc1 (NM_008720.1,2397-2415).
gcacaccttctctctgttt

SEQ ID NO: 633125 - DNA, 19 bp, Mus musculus
  siRNA target sequence for Npc1 (NM_008720.1,2420-2438).
gaatggccgtcctcattga

SEQ ID NO: 633126 - DNA, 19 bp, Mus musculus
  siRNA target sequence for Npc1 (NM_008720.1,2466-2484).
gagcctgttggggttagat

SEQ ID NO: 633127 - DNA, 19 bp, Mus musculus
  siRNA target sequence for Npc1 (NM_008720.1,2468-2486).
gcctgttggggttagatat

SEQ ID NO: 633128 - DNA, 19 bp, Mus musculus
  siRNA target sequence for Npc1 (NM_008720.1,2469-2487).
cctgttggggttagatatt

SEQ ID NO: 633129 - DNA, 19 bp, Mus musculus
  siRNA target sequence for Npc1 (NM_008720.1,2555-2573).
gccacgcctccgaaagcta

SEQ ID NO: 633130 - DNA, 19 bp, Mus musculus
  siRNA target sequence for Npc1 (NM_008720.1,2574-2592).
cctgtttcgcttcttcaaa

SEQ ID NO: 633131 - DNA, 19 bp, Mus musculus
  siRNA target sequence for Npc1 (NM_008720.1,2581-2599).
cgcttcttcaaaaactact

SEQ ID NO: 633132 - DNA, 19 bp, Mus musculus
  siRNA target sequence for Npc1 (NM_008720.1,2653-2671).
gtgggcgttctgtcattca

SEQ ID NO: 633133 - DNA, 19 bp, Mus musculus
  siRNA target sequence for Npc1 (NM_008720.1,2655-2673).
gggcgttctgtcattcagt

SEQ ID NO: 633134 - DNA, 19 bp, Mus musculus
  siRNA target sequence for Npc1 (NM_008720.1,2678-2696).
cggtggtgaacaaagtaga

SEQ ID NO: 633135 - DNA, 19 bp, Mus musculus
  siRNA target sequence for Npc1 (NM_008720.1,2720-2738).
caatgccaaacgattcgta

SEQ ID NO: 633136 - DNA, 19 bp, Mus musculus
  siRNA target sequence for Npc1 (NM_008720.1,2725-2743).
ccaaacgattcgtatgtga

SEQ ID NO: 633137 - DNA, 19 bp, Mus musculus
  siRNA target sequence for Npc1 (NM_008720.1,2806-2824).
gaggaaggctataactaca

SEQ ID NO: 633138 - DNA, 19 bp, Mus musculus
  siRNA target sequence for Npc1 (NM_008720.1,2828-2846).
cacgcaaagggcagaacat

SEQ ID NO: 633139 - DNA, 19 bp, Mus musculus
  siRNA target sequence for Npc1 (NM_008720.1,2856-2874).
cggcatgggctgtgacaat

SEQ ID NO: 633140 - DNA, 19 bp, Mus musculus
  siRNA target sequence for Npc1 (NM_008720.1,2945-2963).
cgtcctggatcgatgacta

SEQ ID NO: 633141 - DNA, 19 bp, Mus musculus
  siRNA target sequence for Npc1 (NM_008720.1,2948-2966).
cctggatcgatgactactt

SEQ ID NO: 633142 - DNA, 19 bp, Mus musculus
  siRNA target sequence for Npc1 (NM_008720.1,3016-3034).
caccagttctgcaatgctt

SEQ ID NO: 633143 - DNA, 19 bp, Mus musculus
  siRNA target sequence for Npc1 (NM_008720.1,3123-3141).
gcccatgttcctttctgat

SEQ ID NO: 633144 - DNA, 19 bp, Mus musculus
  siRNA target sequence for Npc1 (NM_008720.1,3124-3142).
cccatgttcctttctgata

SEQ ID NO: 633145 - DNA, 19 bp, Mus musculus
  siRNA target sequence for Npc1 (NM_008720.1,3179-3197).
cttacggttcagctgttaa

SEQ ID NO: 633146 - DNA, 19 bp, Mus musculus
  siRNA target sequence for Npc1 (NM_008720.1,3183-3201).
cggttcagctgttaacatt

SEQ ID NO: 633147 - DNA, 19 bp, Mus musculus
  siRNA target sequence for Npc1 (NM_008720.1,3185-3203).
gttcagctgttaacattgt

SEQ ID NO: 633148 - DNA, 19 bp, Mus musculus
  siRNA target sequence for Npc1 (NM_008720.1,3204-3222).
gggagatgacacttacatt

SEQ ID NO: 633149 - DNA, 19 bp, Mus musculus
  siRNA target sequence for Npc1 (NM_008720.1,3261-3279).
gacctccgctgactatact

SEQ ID NO: 633150 - DNA, 19 bp, Mus musculus
  siRNA target sequence for Npc1 (NM_008720.1,3263-3281).
cctccgctgactatactga

SEQ ID NO: 633151 - DNA, 19 bp, Mus musculus
  siRNA target sequence for Npc1 (NM_008720.1,3264-3282).
ctccgctgactatactgat

SEQ ID NO: 633152 - DNA, 19 bp, Mus musculus
  siRNA target sequence for Npc1 (NM_008720.1,3288-3306).
gaagaaagctcggctaata

SEQ ID NO: 633153 - DNA, 19 bp, Mus musculus
  siRNA target sequence for Npc1 (NM_008720.1,3298-3316).
cggctaatagccagtaaca

SEQ ID NO: 633154 - DNA, 19 bp, Mus musculus
  siRNA target sequence for Npc1 (NM_008720.1,3299-3317).
ggctaatagccagtaacat

SEQ ID NO: 633155 - DNA, 19 bp, Mus musculus
  siRNA target sequence for Npc1 (NM_008720.1,3301-3319).
ctaatagccagtaacatca

SEQ ID NO: 633156 - DNA, 19 bp, Mus musculus
  siRNA target sequence for Npc1 (NM_008720.1,3320-3338).
cggaaaccatgcgttctaa

SEQ ID NO: 633157 - DNA, 19 bp, Mus musculus
  siRNA target sequence for Npc1 (NM_008720.1,3351-3369).
ccgcgtattcccttacagt

SEQ ID NO: 633158 - DNA, 19 bp, Mus musculus
  siRNA target sequence for Npc1 (NM_008720.1,3368-3386).
gtgtgttctacgtcttcta

SEQ ID NO: 633159 - DNA, 19 bp, Mus musculus
  siRNA target sequence for Npc1 (NM_008720.1,3372-3390).
gttctacgtcttctatgaa

SEQ ID NO: 633160 - DNA, 19 bp, Mus musculus
  siRNA target sequence for Npc1 (NM_008720.1,3388-3406).
gaacagtacctgaccatta

SEQ ID NO: 633161 - DNA, 19 bp, Mus musculus
  siRNA target sequence for Npc1 (NM_008720.1,3393-3411).
gtacctgaccattattgat

SEQ ID NO: 633162 - DNA, 19 bp, Mus musculus
  siRNA target sequence for Npc1 (NM_008720.1,3493-3511).
gcggtcatcatgtgtatca

SEQ ID NO: 633163 - DNA, 19 bp, Mus musculus
  siRNA target sequence for Npc1 (NM_008720.1,3575-3593).
cggtctccttggtcaactt

SEQ ID NO: 633164 - DNA, 19 bp, Mus musculus
  siRNA target sequence for Npc1 (NM_008720.1,3618-3636).
ggagttctgcagccatata

SEQ ID NO: 633165 - DNA, 19 bp, Mus musculus
  siRNA target sequence for Npc1 (NM_008720.1,3696-3714).
ggcccacatgggtagttct

SEQ ID NO: 633166 - DNA, 19 bp, Mus musculus
  siRNA target sequence for Npc1 (NM_008720.1,3699-3717).
ccacatgggtagttctgta

SEQ ID NO: 633167 - DNA, 19 bp, Mus musculus
  siRNA target sequence for Npc1 (NM_008720.1,3700-3718).
cacatgggtagttctgtat

SEQ ID NO: 633168 - DNA, 19 bp, Mus musculus
  siRNA target sequence for Npc1 (NM_008720.1,3722-3740).
gtggaatcacacttacgaa

SEQ ID NO: 633169 - DNA, 19 bp, Mus musculus
  siRNA target sequence for Npc1 (NM_008720.1,3725-3743).
gaatcacacttacgaaatt

SEQ ID NO: 633170 - DNA, 19 bp, Mus musculus
  siRNA target sequence for Npc1 (NM_008720.1,3729-3747).
cacacttacgaaatttgga

SEQ ID NO: 633171 - DNA, 19 bp, Mus musculus
  siRNA target sequence for Npc1 (NM_008720.1,3764-3782).
cctttgccaaatctcaaat

SEQ ID NO: 633172 - DNA, 19 bp, Mus musculus
  siRNA target sequence for Npc1 (NM_008720.1,3765-3783).
ctttgccaaatctcaaatt

SEQ ID NO: 633173 - DNA, 19 bp, Mus musculus
  siRNA target sequence for Npc1 (NM_008720.1,3830-3848).
gagccactcatggactaat

SEQ ID NO: 633174 - DNA, 19 bp, Mus musculus
  siRNA target sequence for Npc1 (NM_008720.1,3832-3850).
gccactcatggactaatat

SEQ ID NO: 633175 - DNA, 19 bp, Mus musculus
  siRNA target sequence for Npc1 (NM_008720.1,3833-3851).
ccactcatggactaatatt

SEQ ID NO: 633176 - DNA, 19 bp, Mus musculus
  siRNA target sequence for Npc1 (NM_008720.1,3856-3874).
cccgtcttactcagttaca

SEQ ID NO: 633177 - DNA, 19 bp, Mus musculus
  siRNA target sequence for Npc1 (NM_008720.1,3857-3875).
ccgtcttactcagttacat

SEQ ID NO: 633178 - DNA, 19 bp, Mus musculus
  siRNA target sequence for Npc1 (NM_008720.1,3879-3897).
gccgtcggtgaataaagct

SEQ ID NO: 633179 - DNA, 19 bp, Mus musculus
  siRNA target sequence for Npc1 (NM_008720.1,3880-3898).
ccgtcggtgaataaagcta

SEQ ID NO: 633180 - DNA, 19 bp, Mus musculus
  siRNA target sequence for Npc1 (NM_008720.1,3881-3899).
cgtcggtgaataaagctaa

SEQ ID NO: 633181 - DNA, 19 bp, Mus musculus
  siRNA target sequence for Npc1 (NM_008720.1,3882-3900).
gtcggtgaataaagctaaa

SEQ ID NO: 633182 - DNA, 19 bp, Mus musculus
  siRNA target sequence for Ptch (NM_008957.1,139-157).
gctctggagcagatttcca

SEQ ID NO: 633183 - DNA, 19 bp, Mus musculus
  siRNA target sequence for Ptch (NM_008957.1,189-207).
gtggctgagagcgaagttt

SEQ ID NO: 633184 - DNA, 19 bp, Mus musculus
  siRNA target sequence for Ptch (NM_008957.1,201-219).
gaagtttcagagactctta

SEQ ID NO: 633185 - DNA, 19 bp, Mus musculus
  siRNA target sequence for Ptch (NM_008957.1,265-283).
gttgtgggtctcctcatat

SEQ ID NO: 633186 - DNA, 19 bp, Mus musculus
  siRNA target sequence for Ptch (NM_008957.1,302-320).
gattaaaggcagctaatct

SEQ ID NO: 633187 - DNA, 19 bp, Mus musculus
  siRNA target sequence for Ptch (NM_008957.1,359-377).
gacgagtgagtcgagaatt

SEQ ID NO: 633188 - DNA, 19 bp, Mus musculus
  siRNA target sequence for Ptch (NM_008957.1,361-379).
cgagtgagtcgagaattaa

SEQ ID NO: 633189 - DNA, 19 bp, Mus musculus
  siRNA target sequence for Ptch (NM_008957.1,364-382).
gtgagtcgagaattaaatt

SEQ ID NO: 633190 - DNA, 19 bp, Mus musculus
  siRNA target sequence for Ptch (NM_008957.1,366-384).
gagtcgagaattaaattat

SEQ ID NO: 633191 - DNA, 19 bp, Mus musculus
  siRNA target sequence for Ptch (NM_008957.1,400-418).
ggagaagaggctatgttta

SEQ ID NO: 633192 - DNA, 19 bp, Mus musculus
  siRNA target sequence for Ptch (NM_008957.1,515-533).
gtcgtgtgcacgtctacat

SEQ ID NO: 633193 - DNA, 19 bp, Mus musculus
  siRNA target sequence for Ptch (NM_008957.1,517-535).
cgtgtgcacgtctacatgt

SEQ ID NO: 633194 - DNA, 19 bp, Mus musculus
  siRNA target sequence for Ptch (NM_008957.1,520-538).
gtgcacgtctacatgtata

SEQ ID NO: 633195 - DNA, 19 bp, Mus musculus
  siRNA target sequence for Ptch (NM_008957.1,523-541).
cacgtctacatgtataaca

SEQ ID NO: 633196 - DNA, 19 bp, Mus musculus
  siRNA target sequence for Ptch (NM_008957.1,596-614).
caggttacatggatcagat

SEQ ID NO: 633197 - DNA, 19 bp, Mus musculus
  siRNA target sequence for Ptch (NM_008957.1,599-617).
gttacatggatcagataat

SEQ ID NO: 633198 - DNA, 19 bp, Mus musculus
  siRNA target sequence for Ptch (NM_008957.1,625-643).
ctttacccttgcttaatca

SEQ ID NO: 633199 - DNA, 19 bp, Mus musculus
  siRNA target sequence for Ptch (NM_008957.1,630-648).
cccttgcttaatcattaca

SEQ ID NO: 633200 - DNA, 19 bp, Mus musculus
  siRNA target sequence for Ptch (NM_008957.1,692-710).
cagcatacctcctaggtaa

SEQ ID NO: 633201 - DNA, 19 bp, Mus musculus
  siRNA target sequence for Ptch (NM_008957.1,702-720).
cctaggtaagcctccttta

SEQ ID NO: 633202 - DNA, 19 bp, Mus musculus
  siRNA target sequence for Ptch (NM_008957.1,715-733).
cctttacggtggacaaact

SEQ ID NO: 633203 - DNA, 19 bp, Mus musculus
  siRNA target sequence for Ptch (NM_008957.1,716-734).
ctttacggtggacaaactt

SEQ ID NO: 633204 - DNA, 19 bp, Mus musculus
  siRNA target sequence for Ptch (NM_008957.1,740-758).
ccttggaattcctagaaga

SEQ ID NO: 633205 - DNA, 19 bp, Mus musculus
  siRNA target sequence for Ptch (NM_008957.1,896-914).
caaccaaacctcttgatgt

SEQ ID NO: 633206 - DNA, 19 bp, Mus musculus
  siRNA target sequence for Ptch (NM_008957.1,934-952).
ggatgtcaaggtttatcca

SEQ ID NO: 633207 - DNA, 19 bp, Mus musculus
  siRNA target sequence for Ptch (NM_008957.1,943-961).
ggtttatccaggaagtata

SEQ ID NO: 633208 - DNA, 19 bp, Mus musculus
  siRNA target sequence for Ptch (NM_008957.1,944-962).
gtttatccaggaagtatat

SEQ ID NO: 633209 - DNA, 19 bp, Mus musculus
  siRNA target sequence for Ptch (NM_008957.1,987-1005).
gggtggtaccgtcaagaat

SEQ ID NO: 633210 - DNA, 19 bp, Mus musculus
  siRNA target sequence for Ptch (NM_008957.1,1002-1020).
gaatgccactggaaaactt

SEQ ID NO: 633211 - DNA, 19 bp, Mus musculus
  siRNA target sequence for Ptch (NM_008957.1,1028-1046).
ctcacgccctgcaaaccat

SEQ ID NO: 633212 - DNA, 19 bp, Mus musculus
  siRNA target sequence for Ptch (NM_008957.1,1167-1185).
cgtggaggtggttcatcaa

SEQ ID NO: 633213 - DNA, 19 bp, Mus musculus
  siRNA target sequence for Ptch (NM_008957.1,1168-1186).
gtggaggtggttcatcaaa

SEQ ID NO: 633214 - DNA, 19 bp, Mus musculus
  siRNA target sequence for Ptch (NM_008957.1,1170-1188).
ggaggtggttcatcaaagt

SEQ ID NO: 633215 - DNA, 19 bp, Mus musculus
  siRNA target sequence for Ptch (NM_008957.1,1196-1214).
caaactccactcaaaaggt

SEQ ID NO: 633216 - DNA, 19 bp, Mus musculus
  siRNA target sequence for Ptch (NM_008957.1,1235-1253).
ccctggacgacatcctaaa

SEQ ID NO: 633217 - DNA, 19 bp, Mus musculus
  siRNA target sequence for Ptch (NM_008957.1,1236-1254).
cctggacgacatcctaaaa

SEQ ID NO: 633218 - DNA, 19 bp, Mus musculus
  siRNA target sequence for Ptch (NM_008957.1,1286-1304).
ccagcggctacctactgat

SEQ ID NO: 633219 - DNA, 19 bp, Mus musculus
  siRNA target sequence for Ptch (NM_008957.1,1306-1324).
cttgcctatgcctgtttaa

SEQ ID NO: 633220 - DNA, 19 bp, Mus musculus
  siRNA target sequence for Ptch (NM_008957.1,1309-1327).
gcctatgcctgtttaacca

SEQ ID NO: 633221 - DNA, 19 bp, Mus musculus
  siRNA target sequence for Ptch (NM_008957.1,1310-1328).
cctatgcctgtttaaccat

SEQ ID NO: 633222 - DNA, 19 bp, Mus musculus
  siRNA target sequence for Ptch (NM_008957.1,1539-1557).
gaataagaggattccattt

SEQ ID NO: 633223 - DNA, 19 bp, Mus musculus
  siRNA target sequence for Ptch (NM_008957.1,1699-1717).
gtggtattcaattttgcta

SEQ ID NO: 633224 - DNA, 19 bp, Mus musculus
  siRNA target sequence for Ptch (NM_008957.1,1715-1733).
ctatggttctgctcatttt

SEQ ID NO: 633225 - DNA, 19 bp, Mus musculus
  siRNA target sequence for Ptch (NM_008957.1,1912-1930).
cacgaaacccatatcacta

SEQ ID NO: 633226 - DNA, 19 bp, Mus musculus
  siRNA target sequence for Ptch (NM_008957.1,1967-1985).
ctcacacgcacgtgtacta

SEQ ID NO: 633227 - DNA, 19 bp, Mus musculus
  siRNA target sequence for Ptch (NM_008957.1,1969-1987).
cacacgcacgtgtactaca

SEQ ID NO: 633228 - DNA, 19 bp, Mus musculus
  siRNA target sequence for Ptch (NM_008957.1,2145-2163).
gtggacactctcttcgttt

SEQ ID NO: 633229 - DNA, 19 bp, Mus musculus
  siRNA target sequence for Ptch (NM_008957.1,2238-2256).
gctgggggtcagcctttat

SEQ ID NO: 633230 - DNA, 19 bp, Mus musculus
  siRNA target sequence for Ptch (NM_008957.1,2283-2301).
ggacctcacggacattgtt

SEQ ID NO: 633231 - DNA, 19 bp, Mus musculus
  siRNA target sequence for Ptch (NM_008957.1,2308-2326).
gaaaccagagaatatgact

SEQ ID NO: 633232 - DNA, 19 bp, Mus musculus
  siRNA target sequence for Ptch (NM_008957.1,2312-2330).
ccagagaatatgacttcat

SEQ ID NO: 633233 - DNA, 19 bp, Mus musculus
  siRNA target sequence for Ptch (NM_008957.1,2313-2331).
cagagaatatgacttcata

SEQ ID NO: 633234 - DNA, 19 bp, Mus musculus
  siRNA target sequence for Ptch (NM_008957.1,2332-2350).
gctgcccagttcaagtact

SEQ ID NO: 633235 - DNA, 19 bp, Mus musculus
  siRNA target sequence for Ptch (NM_008957.1,2333-2351).
ctgcccagttcaagtactt

SEQ ID NO: 633236 - DNA, 19 bp, Mus musculus
  siRNA target sequence for Ptch (NM_008957.1,2352-2370).
ctctttctacaacatgtat

SEQ ID NO: 633237 - DNA, 19 bp, Mus musculus
  siRNA target sequence for Ptch (NM_008957.1,2413-2431).
ctttacgaccttcataaga

SEQ ID NO: 633238 - DNA, 19 bp, Mus musculus
  siRNA target sequence for Ptch (NM_008957.1,2419-2437).
gaccttcataagagtttca

SEQ ID NO: 633239 - DNA, 19 bp, Mus musculus
  siRNA target sequence for Ptch (NM_008957.1,2487-2505).
gtggctgcactactttaga

SEQ ID NO: 633240 - DNA, 19 bp, Mus musculus
  siRNA target sequence for Ptch (NM_008957.1,2556-2574).
gaggatcatgccaaacaat

SEQ ID NO: 633241 - DNA, 19 bp, Mus musculus
  siRNA target sequence for Ptch (NM_008957.1,2595-2613).
cggggtcctcgcttacaaa

SEQ ID NO: 633242 - DNA, 19 bp, Mus musculus
  siRNA target sequence for Ptch (NM_008957.1,2597-2615).
gggtcctcgcttacaaact

SEQ ID NO: 633243 - DNA, 19 bp, Mus musculus
  siRNA target sequence for Ptch (NM_008957.1,2650-2668).
gacattagtcagttgacta

SEQ ID NO: 633244 - DNA, 19 bp, Mus musculus
  siRNA target sequence for Ptch (NM_008957.1,2704-2722).
ccgagcgctttctacatct

SEQ ID NO: 633245 - DNA, 19 bp, Mus musculus
  siRNA target sequence for Ptch (NM_008957.1,2705-2723).
cgagcgctttctacatcta

SEQ ID NO: 633246 - DNA, 19 bp, Mus musculus
  siRNA target sequence for Ptch (NM_008957.1,2741-2759).
gcaacgaccctgtagctta

SEQ ID NO: 633247 - DNA, 19 bp, Mus musculus
  siRNA target sequence for Ptch (NM_008957.1,2938-2956).
gtgagagtcatctgtaaca

SEQ ID NO: 633248 - DNA, 19 bp, Mus musculus
  siRNA target sequence for Ptch (NM_008957.1,2942-2960).
gagtcatctgtaacaacta

SEQ ID NO: 633249 - DNA, 19 bp, Mus musculus
  siRNA target sequence for Ptch (NM_008957.1,3375-3393).
gcttgcagggtccgaattt

SEQ ID NO: 633250 - DNA, 19 bp, Mus musculus
  siRNA target sequence for Ptch (NM_008957.1,3379-3397).
gcagggtccgaatttgatt

SEQ ID NO: 633251 - DNA, 19 bp, Mus musculus
  siRNA target sequence for Ptch (NM_008957.1,3380-3398).
cagggtccgaatttgattt

SEQ ID NO: 633252 - DNA, 19 bp, Mus musculus
  siRNA target sequence for Ptch (NM_008957.1,3382-3400).
gggtccgaatttgatttca

SEQ ID NO: 633253 - DNA, 19 bp, Mus musculus
  siRNA target sequence for Ptch (NM_008957.1,3383-3401).
ggtccgaatttgatttcat

SEQ ID NO: 633254 - DNA, 19 bp, Mus musculus
  siRNA target sequence for Ptch (NM_008957.1,3399-3417).
cattgtcagatacttcttt

SEQ ID NO: 633255 - DNA, 19 bp, Mus musculus
  siRNA target sequence for Ptch (NM_008957.1,3418-3436).
gccgtcctggccattctca

SEQ ID NO: 633256 - DNA, 19 bp, Mus musculus
  siRNA target sequence for Ptch (NM_008957.1,3437-3455).
ccgtcttgggggttctcaa

SEQ ID NO: 633257 - DNA, 19 bp, Mus musculus
  siRNA target sequence for Ptch (NM_008957.1,3438-3456).
cgtcttgggggttctcaat

SEQ ID NO: 633258 - DNA, 19 bp, Mus musculus
  siRNA target sequence for Ptch (NM_008957.1,3666-3684).
ggagctcaggcaatacgaa

SEQ ID NO: 633259 - DNA, 19 bp, Mus musculus
  siRNA target sequence for Ptch (NM_008957.1,3704-3722).
gccctgcccaccaagtgat

SEQ ID NO: 633260 - DNA, 19 bp, Mus musculus
  siRNA target sequence for Ptch (NM_008957.1,3705-3723).
ccctgcccaccaagtgatt

SEQ ID NO: 633261 - DNA, 19 bp, Mus musculus
  siRNA target sequence for Ptch (NM_008957.1,3911-3929).
cgcgcagagacgcttttga

SEQ ID NO: 633262 - DNA, 19 bp, Mus musculus
  siRNA target sequence for Ptch (NM_008957.1,3912-3930).
gcgcagagacgcttttgaa

SEQ ID NO: 633263 - DNA, 19 bp, Mus musculus
  siRNA target sequence for Ptch (NM_008957.1,3913-3931).
cgcagagacgcttttgaaa

SEQ ID NO: 633264 - DNA, 19 bp, Mus musculus
  siRNA target sequence for Ptch (NM_008957.1,3919-3937).
gacgcttttgaaatttcta

SEQ ID NO: 633265 - DNA, 19 bp, Mus musculus
  siRNA target sequence for Ptch (NM_008957.1,3946-3964).
cattctggccctagcaata

SEQ ID NO: 633266 - DNA, 19 bp, Mus musculus
  siRNA target sequence for Ptch (NM_008957.1,4170-4188).
gactgatcacggggtattt

SEQ ID NO: 633267 - DNA, 19 bp, Mus musculus
  siRNA target sequence for Ptch (NM_008957.1,4172-4190).
ctgatcacggggtatttga

SEQ ID NO: 633268 - DNA, 19 bp, Mus musculus
  siRNA target sequence for Ptch2 (NM_008958.1,56-74).
ggtcctccgcacctcatat

SEQ ID NO: 633269 - DNA, 19 bp, Mus musculus
  siRNA target sequence for Ptch2 (NM_008958.1,215-233).
gtctccgagtggctgtaat

SEQ ID NO: 633270 - DNA, 19 bp, Mus musculus
  siRNA target sequence for Ptch2 (NM_008958.1,220-238).
cgagtggctgtaattgaga

SEQ ID NO: 633271 - DNA, 19 bp, Mus musculus
  siRNA target sequence for Ptch2 (NM_008958.1,326-344).
cgtacacctcccagatgtt

SEQ ID NO: 633272 - DNA, 19 bp, Mus musculus
  siRNA target sequence for Ptch2 (NM_008958.1,332-350).
cctcccagatgttgattca

SEQ ID NO: 633273 - DNA, 19 bp, Mus musculus
  siRNA target sequence for Ptch2 (NM_008958.1,383-401).
cccccgaggcacttgactt

SEQ ID NO: 633274 - DNA, 19 bp, Mus musculus
  siRNA target sequence for Ptch2 (NM_008958.1,416-434).
cgctcactgccagtaaagt

SEQ ID NO: 633275 - DNA, 19 bp, Mus musculus
  siRNA target sequence for Ptch2 (NM_008958.1,424-442).
gccagtaaagtccaagtat

SEQ ID NO: 633276 - DNA, 19 bp, Mus musculus
  siRNA target sequence for Ptch2 (NM_008958.1,426-444).
cagtaaagtccaagtatca

SEQ ID NO: 633277 - DNA, 19 bp, Mus musculus
  siRNA target sequence for Ptch2 (NM_008958.1,488-506).
caggggttccccttattga

SEQ ID NO: 633278 - DNA, 19 bp, Mus musculus
  siRNA target sequence for Ptch2 (NM_008958.1,490-508).
ggggttccccttattgaaa

SEQ ID NO: 633279 - DNA, 19 bp, Mus musculus
  siRNA target sequence for Ptch2 (NM_008958.1,491-509).
gggttccccttattgaaaa

SEQ ID NO: 633280 - DNA, 19 bp, Mus musculus
  siRNA target sequence for Ptch2 (NM_008958.1,492-510).
ggttccccttattgaaaat

SEQ ID NO: 633281 - DNA, 19 bp, Mus musculus
  siRNA target sequence for Ptch2 (NM_008958.1,1199-1217).
gaggctatctgcttatgct

SEQ ID NO: 633282 - DNA, 19 bp, Mus musculus
  siRNA target sequence for Ptch2 (NM_008958.1,1219-1237).
gcctatgcctgcgtaacaa

SEQ ID NO: 633283 - DNA, 19 bp, Mus musculus
  siRNA target sequence for Ptch2 (NM_008958.1,1220-1238).
cctatgcctgcgtaacaat

SEQ ID NO: 633284 - DNA, 19 bp, Mus musculus
  siRNA target sequence for Ptch2 (NM_008958.1,1333-1351).
gccctacttggcatcactt

SEQ ID NO: 633285 - DNA, 19 bp, Mus musculus
  siRNA target sequence for Ptch2 (NM_008958.1,1420-1438).
ctggcgcatgccttcacaa

SEQ ID NO: 633286 - DNA, 19 bp, Mus musculus
  siRNA target sequence for Ptch2 (NM_008958.1,1422-1440).
ggcgcatgccttcacaaaa

SEQ ID NO: 633287 - DNA, 19 bp, Mus musculus
  siRNA target sequence for Ptch2 (NM_008958.1,1468-1486).
cgtatgggtgagtgtttga

SEQ ID NO: 633288 - DNA, 19 bp, Mus musculus
  siRNA target sequence for Ptch2 (NM_008958.1,1510-1528).
ctcacatccgtcaacaaca

SEQ ID NO: 633289 - DNA, 19 bp, Mus musculus
  siRNA target sequence for Ptch2 (NM_008958.1,1715-1733).
gctccgctcaggtcattca

SEQ ID NO: 633290 - DNA, 19 bp, Mus musculus
  siRNA target sequence for Ptch2 (NM_008958.1,1718-1736).
ccgctcaggtcattcagat

SEQ ID NO: 633291 - DNA, 19 bp, Mus musculus
  siRNA target sequence for Ptch2 (NM_008958.1,1823-1841).
ccagcagccagcatgtagt

SEQ ID NO: 633292 - DNA, 19 bp, Mus musculus
  siRNA target sequence for Ptch2 (NM_008958.1,1891-1909).
ctgggctccgaactctata

SEQ ID NO: 633293 - DNA, 19 bp, Mus musculus
  siRNA target sequence for Ptch2 (NM_008958.1,2333-2351).
cccgcacctggcttcacta

SEQ ID NO: 633294 - DNA, 19 bp, Mus musculus
  siRNA target sequence for Ptch2 (NM_008958.1,2336-2354).
gcacctggcttcactacta

SEQ ID NO: 633295 - DNA, 19 bp, Mus musculus
  siRNA target sequence for Ptch2 (NM_008958.1,2411-2429).
gcatcacctgccactctta

SEQ ID NO: 633296 - DNA, 19 bp, Mus musculus
  siRNA target sequence for Ptch2 (NM_008958.1,2430-2448).
ccgcaacggctcagaagat

SEQ ID NO: 633297 - DNA, 19 bp, Mus musculus
  siRNA target sequence for Ptch2 (NM_008958.1,2535-2553).
ggacaaggagggactcatt

SEQ ID NO: 633298 - DNA, 19 bp, Mus musculus
  siRNA target sequence for Ptch2 (NM_008958.1,2652-2670).
gtggcttcacgacaaatat

SEQ ID NO: 633299 - DNA, 19 bp, Mus musculus
  siRNA target sequence for Ptch2 (NM_008958.1,2654-2672).
ggcttcacgacaaatatga

SEQ ID NO: 633300 - DNA, 19 bp, Mus musculus
  siRNA target sequence for Ptch2 (NM_008958.1,2655-2673).
gcttcacgacaaatatgat

SEQ ID NO: 633301 - DNA, 19 bp, Mus musculus
  siRNA target sequence for Ptch2 (NM_008958.1,2656-2674).
cttcacgacaaatatgata

SEQ ID NO: 633302 - DNA, 19 bp, Mus musculus
  siRNA target sequence for Ptch2 (NM_008958.1,2999-3017).
ctgtggagctctttggtat

SEQ ID NO: 633303 - DNA, 19 bp, Mus musculus
  siRNA target sequence for Ptch2 (NM_008958.1,3047-3065).
ccatccccgtggtaatcct

SEQ ID NO: 633304 - DNA, 19 bp, Mus musculus
  siRNA target sequence for Ptch2 (NM_008958.1,3081-3099).
cattggtgttgaattcaca

SEQ ID NO: 633305 - DNA, 19 bp, Mus musculus
  siRNA target sequence for Ptch2 (NM_008958.1,3225-3243).
gcttgctggttctaacttt

SEQ ID NO: 633306 - DNA, 19 bp, Mus musculus
  siRNA target sequence for Ptch2 (NM_008958.1,3244-3262).
gacttcatcataaggtatt

SEQ ID NO: 633307 - DNA, 19 bp, Mus musculus
  siRNA target sequence for Ptch2 (NM_008958.1,3353-3371).
cacaggtggtgcaggtata

SEQ ID NO: 633308 - DNA, 19 bp, Mus musculus
  siRNA target sequence for Tnfrsf13b (NM_021349.1,9-27).
ggcattctgccccaaagat

SEQ ID NO: 633309 - DNA, 19 bp, Mus musculus
  siRNA target sequence for Tnfrsf13b (NM_021349.1,37-55).
gactcctcaaggaaatcct

SEQ ID NO: 633310 - DNA, 19 bp, Mus musculus
  siRNA target sequence for Tnfrsf13b (NM_021349.1,106-124).
gacttctgcaaattcatca

SEQ ID NO: 633311 - DNA, 19 bp, Mus musculus
  siRNA target sequence for Tnfrsf13b (NM_021349.1,678-696).
ctgtatgcgtgcaacagta

SEQ ID NO: 633312 - DNA, 19 bp, Mus musculus
  siRNA target sequence for Nrp (NM_008737.1,408-426).
gctttccgcagcgacaaat

SEQ ID NO: 633313 - DNA, 19 bp, Mus musculus
  siRNA target sequence for Nrp (NM_008737.1,427-445).
gtggcgggaccataaaaat

SEQ ID NO: 633314 - DNA, 19 bp, Mus musculus
  siRNA target sequence for Nrp (NM_008737.1,430-448).
gcgggaccataaaaatcga

SEQ ID NO: 633315 - DNA, 19 bp, Mus musculus
  siRNA target sequence for Nrp (NM_008737.1,431-449).
cgggaccataaaaatcgaa

SEQ ID NO: 633316 - DNA, 19 bp, Mus musculus
  siRNA target sequence for Nrp (NM_008737.1,433-451).
ggaccataaaaatcgaaaa

SEQ ID NO: 633317 - DNA, 19 bp, Mus musculus
  siRNA target sequence for Nrp (NM_008737.1,471-489).
cccggttaccctcattctt

SEQ ID NO: 633318 - DNA, 19 bp, Mus musculus
  siRNA target sequence for Nrp (NM_008737.1,472-490).
ccggttaccctcattctta

SEQ ID NO: 633319 - DNA, 19 bp, Mus musculus
  siRNA target sequence for Nrp (NM_008737.1,506-524).
gtgtgaatggctaatccaa

SEQ ID NO: 633320 - DNA, 19 bp, Mus musculus
  siRNA target sequence for Nrp (NM_008737.1,531-549).
gaaccctaccagagaatca

SEQ ID NO: 633321 - DNA, 19 bp, Mus musculus
  siRNA target sequence for Nrp (NM_008737.1,697-715).
cctttctcttcatcaaatt

SEQ ID NO: 633322 - DNA, 19 bp, Mus musculus
  siRNA target sequence for Nrp (NM_008737.1,698-716).
ctttctcttcatcaaattt

SEQ ID NO: 633323 - DNA, 19 bp, Mus musculus
  siRNA target sequence for Nrp (NM_008737.1,782-800).
cgaatgttctcagaactat

SEQ ID NO: 633324 - DNA, 19 bp, Mus musculus
  siRNA target sequence for Nrp (NM_008737.1,783-801).
gaatgttctcagaactata

SEQ ID NO: 633325 - DNA, 19 bp, Mus musculus
  siRNA target sequence for Nrp (NM_008737.1,804-822).
gcacctactggagtgataa

SEQ ID NO: 633326 - DNA, 19 bp, Mus musculus
  siRNA target sequence for Nrp (NM_008737.1,807-825).
cctactggagtgataaagt

SEQ ID NO: 633327 - DNA, 19 bp, Mus musculus
  siRNA target sequence for Nrp (NM_008737.1,1011-1029).
cctcacattgggcgttatt

SEQ ID NO: 633328 - DNA, 19 bp, Mus musculus
  siRNA target sequence for Nrp (NM_008737.1,1074-1092).
ctatccatggtcttttaca

SEQ ID NO: 633329 - DNA, 19 bp, Mus musculus
  siRNA target sequence for Nrp (NM_008737.1,1091-1109).
cactgacagcgcaatagca

SEQ ID NO: 633330 - DNA, 19 bp, Mus musculus
  siRNA target sequence for Nrp (NM_008737.1,1093-1111).
ctgacagcgcaatagcaaa

SEQ ID NO: 633331 - DNA, 19 bp, Mus musculus
  siRNA target sequence for Nrp (NM_008737.1,1097-1115).
cagcgcaatagcaaaagaa

SEQ ID NO: 633332 - DNA, 19 bp, Mus musculus
  siRNA target sequence for Nrp (NM_008737.1,1116-1134).
ggtttctcagccaactaca

SEQ ID NO: 633333 - DNA, 19 bp, Mus musculus
  siRNA target sequence for Nrp (NM_008737.1,1268-1286).
cctgaactaccctgaaaat

SEQ ID NO: 633334 - DNA, 19 bp, Mus musculus
  siRNA target sequence for Nrp (NM_008737.1,1338-1356).
ggcctcctgcgattcgtta

SEQ ID NO: 633335 - DNA, 19 bp, Mus musculus
  siRNA target sequence for Nrp (NM_008737.1,1515-1533).
gttgtcttaggagttttct

SEQ ID NO: 633336 - DNA, 19 bp, Mus musculus
  siRNA target sequence for Nrp (NM_008737.1,1540-1558).
cactgataactcgatttgt

SEQ ID NO: 633337 - DNA, 19 bp, Mus musculus
  siRNA target sequence for Nrp (NM_008737.1,1549-1567).
ctcgatttgtccgaatcaa

SEQ ID NO: 633338 - DNA, 19 bp, Mus musculus
  siRNA target sequence for Nrp (NM_008737.1,1585-1603).
ctggtatatctatgagatt

SEQ ID NO: 633339 - DNA, 19 bp, Mus musculus
  siRNA target sequence for Nrp (NM_008737.1,1588-1606).
gtatatctatgagatttga

SEQ ID NO: 633340 - DNA, 19 bp, Mus musculus
  siRNA target sequence for Nrp (NM_008737.1,1594-1612).
ctatgagatttgaagttta

SEQ ID NO: 633341 - DNA, 19 bp, Mus musculus
  siRNA target sequence for Nrp (NM_008737.1,1616-1634).
ctgcaagataacagattat

SEQ ID NO: 633342 - DNA, 19 bp, Mus musculus
  siRNA target sequence for Nrp (NM_008737.1,1619-1637).
caagataacagattatcct

SEQ ID NO: 633343 - DNA, 19 bp, Mus musculus
  siRNA target sequence for Nrp (NM_008737.1,1685-1703).
gattacagcatccaatcaa

SEQ ID NO: 633344 - DNA, 19 bp, Mus musculus
  siRNA target sequence for Nrp (NM_008737.1,1779-1797).
cacccatacaccaatgaat

SEQ ID NO: 633345 - DNA, 19 bp, Mus musculus
  siRNA target sequence for Nrp (NM_008737.1,1889-1907).
gttcaagatcgcctatagt

SEQ ID NO: 633346 - DNA, 19 bp, Mus musculus
  siRNA target sequence for Nrp (NM_008737.1,1895-1913).
gatcgcctatagtaacaat
